United States Patent Application Publication US 2007/0031850 A1 - sequence listing, part 8

SEQ ID NO: 222157 - DNA, 25 bp, Probe sequence
aggacacctattggcgtttttggag

SEQ ID NO: 222158 - DNA, 25 bp, Probe sequence
aggacaaaatccagcacgaattgct

SEQ ID NO: 222159 - DNA, 25 bp, Probe sequence
aggtgaatgttaaaggtggcgctat

SEQ ID NO: 222160 - DNA, 25 bp, Probe sequence
agcaggtaatgcatcaggaatcaat

SEQ ID NO: 222161 - DNA, 25 bp, Probe sequence
acatcattgtgtattggtggcggtc

SEQ ID NO: 222162 - DNA, 25 bp, Probe sequence
aaagacgtgccagcctatgatttag

SEQ ID NO: 222163 - DNA, 25 bp, Probe sequence
aagtcgattcaattagcatatcaat

SEQ ID NO: 222164 - DNA, 25 bp, Probe sequence
aaggtggcgctattgcattaggaca

SEQ ID NO: 222165 - DNA, 25 bp, Probe sequence
caatgcttgtcaacaacagtcgctt

SEQ ID NO: 222166 - DNA, 25 bp, Probe sequence
cctattggtgcatctggtgctagag

SEQ ID NO: 222167 - DNA, 25 bp, Probe sequence
gccagcctatgatttaggtgcgact

SEQ ID NO: 222168 - DNA, 25 bp, Probe sequence
gctatcgctgcagttgtatcaaagt

SEQ ID NO: 222169 - DNA, 25 bp, Probe sequence
gcatatcaatctattgtgactggtg

SEQ ID NO: 222170 - DNA, 25 bp, Probe sequence
gaattgctgctatgaaaggtggctt

SEQ ID NO: 222171 - DNA, 25 bp, Probe sequence
gaaactggtttaacatcattgtgta

SEQ ID NO: 222172 - DNA, 25 bp, Probe sequence
gaaatagttccagtatcgattcctc

SEQ ID NO: 222173 - DNA, 25 bp, Probe sequence
gacgagagtcgtattagcagcagca

SEQ ID NO: 222174 - DNA, 25 bp, Probe sequence
gagacgggtttgaatccaagtgaga

SEQ ID NO: 222175 - DNA, 25 bp, Probe sequence
gatggtgctgcgatgatgttagtca

SEQ ID NO: 222176 - DNA, 25 bp, Probe sequence
gattcctcaacgtaaaggtgaacca

SEQ ID NO: 222177 - DNA, 25 bp, Probe sequence
gtgctagctggcggtatggagaata

SEQ ID NO: 222178 - DNA, 25 bp, Probe sequence
gtgactggtgaaaatgacatcgtgc

SEQ ID NO: 222179 - DNA, 25 bp, Probe sequence
gtggttctgggttaaagtcgattca

SEQ ID NO: 222180 - DNA, 25 bp, Probe sequence
ggtgcgtttaaagacgtgccagcct

SEQ ID NO: 222181 - DNA, 25 bp, Probe sequence
ggcagtgcttgatggctttggaagt

SEQ ID NO: 222182 - DNA, 25 bp, Probe sequence
tagtgacattattgcatcaactgaa

SEQ ID NO: 222183 - DNA, 25 bp, Probe sequence
taggtgcgactttaatagaacatat

SEQ ID NO: 222184 - DNA, 25 bp, Probe sequence
tattggcgtttttggaggtgcgttt

SEQ ID NO: 222185 - DNA, 25 bp, Probe sequence
ttagcagcagcatacaggacaccta

SEQ ID NO: 222186 - DNA, 25 bp, Probe sequence
ttccagtatcgattcctcaacgtaa

SEQ ID NO: 222187 - DNA, 25 bp, Probe sequence
ttggtggcggtcaagctatcgctgc

SEQ ID NO: 222188 - DNA, 25 bp, Probe sequence
atttggtaatttattcgatgttgta

SEQ ID NO: 222189 - DNA, 25 bp, Probe sequence
atgaggttgtggatttctattttaa

SEQ ID NO: 222190 - DNA, 25 bp, Probe sequence
agtacgggctattatgttaaacaag

SEQ ID NO: 222191 - DNA, 25 bp, Probe sequence
agaagtgaattcgcgcacatttcaa

SEQ ID NO: 222192 - DNA, 25 bp, Probe sequence
agaatccgtgattcgtttgattata

SEQ ID NO: 222193 - DNA, 25 bp, Probe sequence
acagattcattcagtgattttgtag

SEQ ID NO: 222194 - DNA, 25 bp, Probe sequence
acacgaatatatcattgcagtaact

SEQ ID NO: 222195 - DNA, 25 bp, Probe sequence
acaaccacatttgatttatatgctt

SEQ ID NO: 222196 - DNA, 25 bp, Probe sequence
aaatatctatttacgcatacctatg

SEQ ID NO: 222197 - DNA, 25 bp, Probe sequence
aaagcgctatttaacattataagtg

SEQ ID NO: 222198 - DNA, 25 bp, Probe sequence
gaacgtggaaatgttagtacgggct

SEQ ID NO: 222199 - DNA, 25 bp, Probe sequence
aagatgggacagacaggcacaaagt

SEQ ID NO: 222200 - DNA, 25 bp, Probe sequence
aataattgggaggctgttgcagaca

SEQ ID NO: 222201 - DNA, 25 bp, Probe sequence
aatactcagaatactatacctacag

SEQ ID NO: 222202 - DNA, 25 bp, Probe sequence
aatactgacaattacaaagcgctat

SEQ ID NO: 222203 - DNA, 25 bp, Probe sequence
caatgatatcgttcgtttagacatg

SEQ ID NO: 222204 - DNA, 25 bp, Probe sequence
gcagcagacatattagttactagat

SEQ ID NO: 222205 - DNA, 25 bp, Probe sequence
gaattcgcgcacatttcaaatgata

SEQ ID NO: 222206 - DNA, 25 bp, Probe sequence
gataaaccaattgaacgagacgaac

SEQ ID NO: 222207 - DNA, 25 bp, Probe sequence
gaaagttactatgaccctagcaaaa

SEQ ID NO: 222208 - DNA, 25 bp, Probe sequence
gacatatcatgcaaagttgaacgtg

SEQ ID NO: 222209 - DNA, 25 bp, Probe sequence
gagacgaacatggcaaacacgttaa

SEQ ID NO: 222210 - DNA, 25 bp, Probe sequence
gatagtgatatacctccaattatta

SEQ ID NO: 222211 - DNA, 25 bp, Probe sequence
gattttttagaatacttacatcgtt

SEQ ID NO: 222212 - DNA, 25 bp, Probe sequence
gtataagtgattttcataagcgtgt

SEQ ID NO: 222213 - DNA, 25 bp, Probe sequence
gtggaagttatatagcagcagacat

SEQ ID NO: 222214 - DNA, 25 bp, Probe sequence
ggaggctgttgcagacatatcatgc

SEQ ID NO: 222215 - DNA, 25 bp, Probe sequence
ggacgatataacatggagaatccgt

SEQ ID NO: 222216 - DNA, 25 bp, Probe sequence
ggcacaaagtccaaatttaagcagg

SEQ ID NO: 222217 - DNA, 25 bp, Probe sequence
tgtgctattgcatttgagattggaa

SEQ ID NO: 222218 - DNA, 25 bp, Probe sequence
tgttatattatctaaattcggctat

SEQ ID NO: 222219 - DNA, 25 bp, Probe sequence
gatcaatcgagctattacgaatggt

SEQ ID NO: 222220 - DNA, 25 bp, Probe sequence
tacgaatggtttatgtttgttgaag

SEQ ID NO: 222221 - DNA, 25 bp, Probe sequence
tagagggcagcatatcaatgatatc

SEQ ID NO: 222222 - DNA, 25 bp, Probe sequence
tgcttaggttagcgaaacgggttgt

SEQ ID NO: 222223 - DNA, 25 bp, Probe sequence
attgagtaagtcgcgcccgtatata

SEQ ID NO: 222224 - DNA, 25 bp, Probe sequence
attacattgtagttggtgaaagaag

SEQ ID NO: 222225 - DNA, 25 bp, Probe sequence
attttgcaaccaattgtgcttagaa

SEQ ID NO: 222226 - DNA, 25 bp, Probe sequence
atacgtatcagcgattatcaaagat

SEQ ID NO: 222227 - DNA, 25 bp, Probe sequence
atggacgaacgttattggcaattaa

SEQ ID NO: 222228 - DNA, 25 bp, Probe sequence
agagcttcgaaaattgctggtctaa

SEQ ID NO: 222229 - DNA, 25 bp, Probe sequence
acgagaagacttaaatgcgattgaa

SEQ ID NO: 222230 - DNA, 25 bp, Probe sequence
aacagttcaaggttattacattgta

SEQ ID NO: 222231 - DNA, 25 bp, Probe sequence
aagtcgcgcccgtatatagcgaata

SEQ ID NO: 222232 - DNA, 25 bp, Probe sequence
aattgctggtctaaaatacgtatca

SEQ ID NO: 222233 - DNA, 25 bp, Probe sequence
caacgtttgatgacagatttgaaaa

SEQ ID NO: 222234 - DNA, 25 bp, Probe sequence
ccgaaaaagattgctgacatggtaa

SEQ ID NO: 222235 - DNA, 25 bp, Probe sequence
cgcgcccgtatatagcgaatatgtt

SEQ ID NO: 222236 - DNA, 25 bp, Probe sequence
gctgacatggtaaaagatgggcgac

SEQ ID NO: 222237 - DNA, 25 bp, Probe sequence
gaactggcggtcatcgaaaatttac

SEQ ID NO: 222238 - DNA, 25 bp, Probe sequence
gaagctgaaagttatcaacgtttga

SEQ ID NO: 222239 - DNA, 25 bp, Probe sequence
gaacgacagttgcgagaacagtatg

SEQ ID NO: 222240 - DNA, 25 bp, Probe sequence
gacaagtgcacatggacgaacgtta

SEQ ID NO: 222241 - DNA, 25 bp, Probe sequence
gagtaagtcgcgcccgtatatagcg

SEQ ID NO: 222242 - DNA, 25 bp, Probe sequence
gatgggcgactgacaagtgcacatg

SEQ ID NO: 222243 - DNA, 25 bp, Probe sequence
gatgaacaacaaatgcttaggttag

SEQ ID NO: 222244 - DNA, 25 bp, Probe sequence
gatttggcagattcaattaagcaat

SEQ ID NO: 222245 - DNA, 25 bp, Probe sequence
gtatcagccccgaaaaactttcgat

SEQ ID NO: 222246 - DNA, 25 bp, Probe sequence
gtagatataactaagcctaaattta

SEQ ID NO: 222247 - DNA, 25 bp, Probe sequence
gtgcacatggacgaacgttattggc

SEQ ID NO: 222248 - DNA, 25 bp, Probe sequence
gtgaagatcaacgtattactaaaac

SEQ ID NO: 222249 - DNA, 25 bp, Probe sequence
ggtgaaagaaggtttagagcttcga

SEQ ID NO: 222250 - DNA, 25 bp, Probe sequence
ggcgactgacaagtgcacatggacg

SEQ ID NO: 222251 - DNA, 25 bp, Probe sequence
tgaagatatgatggaactggcggtc

SEQ ID NO: 222252 - DNA, 25 bp, Probe sequence
tcagccccgaaaaactttcgatgaa

SEQ ID NO: 222253 - DNA, 25 bp, Probe sequence
tatcaaaccgaatccgtatcagccc

SEQ ID NO: 222254 - DNA, 25 bp, Probe sequence
tagcgaatatgttgaggttattaca

SEQ ID NO: 222255 - DNA, 25 bp, Probe sequence
tttcgtcaaagtcggaaacagacaa

SEQ ID NO: 222256 - DNA, 25 bp, Probe sequence
atccgtgccgaagtaacaagttatg

SEQ ID NO: 222257 - DNA, 25 bp, Probe sequence
atgggtgaatcaagcgcaattactg

SEQ ID NO: 222258 - DNA, 25 bp, Probe sequence
agtggcgctaaagaagcgggcagac

SEQ ID NO: 222259 - DNA, 25 bp, Probe sequence
aggtaataaattcttatcacatatt

SEQ ID NO: 222260 - DNA, 25 bp, Probe sequence
agcgcaattactgacttctaaaaaa

SEQ ID NO: 222261 - DNA, 25 bp, Probe sequence
acctcaatgtgctggtatcattcat

SEQ ID NO: 222262 - DNA, 25 bp, Probe sequence
aaaaatgctttatatcgctaatgtt

SEQ ID NO: 222263 - DNA, 25 bp, Probe sequence
aacaaggtatgactgcacctcaatg

SEQ ID NO: 222264 - DNA, 25 bp, Probe sequence
aagtacgtgcttggacatttaaaca

SEQ ID NO: 222265 - DNA, 25 bp, Probe sequence
aatggtaaacccgctcgtagtattg

SEQ ID NO: 222266 - DNA, 25 bp, Probe sequence
caacatattttactgctggtgtgca

SEQ ID NO: 222267 - DNA, 25 bp, Probe sequence
catactgattttgaacgtggattta

SEQ ID NO: 222268 - DNA, 25 bp, Probe sequence
gaacgtggatttatccgtgccgaag

SEQ ID NO: 222269 - DNA, 25 bp, Probe sequence
ggatttatccgtgccgaagtaacaa

SEQ ID NO: 222270 - DNA, 25 bp, Probe sequence
cgattcgtgaatatgcagcgcaaga

SEQ ID NO: 222271 - DNA, 25 bp, Probe sequence
cccgctcgtagtattgactttaatg

SEQ ID NO: 222272 - DNA, 25 bp, Probe sequence
gctggtgtgcaagaagtacgtgctt

SEQ ID NO: 222273 - DNA, 25 bp, Probe sequence
gctttatatcgctaatgttggtgaa

SEQ ID NO: 222274 - DNA, 25 bp, Probe sequence
gcagcgcaagaagactctgaagtga

SEQ ID NO: 222275 - DNA, 25 bp, Probe sequence
gaatcaagcgcaattactgacttct

SEQ ID NO: 222276 - DNA, 25 bp, Probe sequence
gaagtgattgttattagtgcaaaaa

SEQ ID NO: 222277 - DNA, 25 bp, Probe sequence
gaagaaccaggattagatcgattaa

SEQ ID NO: 222278 - DNA, 25 bp, Probe sequence
gaagcgggcagacaacgattagaag

SEQ ID NO: 222279 - DNA, 25 bp, Probe sequence
gaaattgctacattagatgatgaag

SEQ ID NO: 222280 - DNA, 25 bp, Probe sequence
gactgcacctcaatgtgctggtatc

SEQ ID NO: 222281 - DNA, 25 bp, Probe sequence
gatcgattaattagaacaacttatg

SEQ ID NO: 222282 - DNA, 25 bp, Probe sequence
gatatcgttcatttcagatttaatg

SEQ ID NO: 222283 - DNA, 25 bp, Probe sequence
gatttaggtatcgaagaaccaggat

SEQ ID NO: 222284 - DNA, 25 bp, Probe sequence
gttggtgaagatgaaattggtgatg

SEQ ID NO: 222285 - DNA, 25 bp, Probe sequence
gtgctggtatcattcatactgattt

SEQ ID NO: 222286 - DNA, 25 bp, Probe sequence
ggtatgactgcacctcaatgtgctg

SEQ ID NO: 222287 - DNA, 25 bp, Probe sequence
ggattatcaacatattttactgctg

SEQ ID NO: 222288 - DNA, 25 bp, Probe sequence
tgataaagtaaaagcgattcgtgaa

SEQ ID NO: 222289 - DNA, 25 bp, Probe sequence
taaacccgctcgtagtattgacttt

SEQ ID NO: 222290 - DNA, 25 bp, Probe sequence
attcgtacaataattcatcaaacac

SEQ ID NO: 222291 - DNA, 25 bp, Probe sequence
atcaggacaaaacaattcgtacaat

SEQ ID NO: 222292 - DNA, 25 bp, Probe sequence
aggggagcgcgaagcagattttatt

SEQ ID NO: 222293 - DNA, 25 bp, Probe sequence
agtgtagcgacattcactcttgcag

SEQ ID NO: 222294 - DNA, 25 bp, Probe sequence
actccctcaggtgtgagtgtagcga

SEQ ID NO: 222295 - DNA, 25 bp, Probe sequence
aaatcgtacgttcacgaatgctcaa

SEQ ID NO: 222296 - DNA, 25 bp, Probe sequence
aaatggtggccaacgtcaacaaaat

SEQ ID NO: 222297 - DNA, 25 bp, Probe sequence
aacggaccgattgatataagtgatg

SEQ ID NO: 222298 - DNA, 25 bp, Probe sequence
aatgaattccaagattacggtcaag

SEQ ID NO: 222299 - DNA, 25 bp, Probe sequence
aatctgataatccatttgcaaatgc

SEQ ID NO: 222300 - DNA, 25 bp, Probe sequence
aattcatcaaacacgaaacaatctg

SEQ ID NO: 222301 - DNA, 25 bp, Probe sequence
cactcttgcagtaaatcgtacgttc

SEQ ID NO: 222302 - DNA, 25 bp, Probe sequence
ctgtgttgtttttagaagacaagca

SEQ ID NO: 222303 - DNA, 25 bp, Probe sequence
gcgacattcactcttgcagtaaatc

SEQ ID NO: 222304 - DNA, 25 bp, Probe sequence
gaatgctcaaggggagcgcgaagca

SEQ ID NO: 222305 - DNA, 25 bp, Probe sequence
gaaggtcgtcgtgtgtttgttactg

SEQ ID NO: 222306 - DNA, 25 bp, Probe sequence
gaaccactccctcaggtgtgagtgt

SEQ ID NO: 222307 - DNA, 25 bp, Probe sequence
gaagcagattttattaactgtgttg

SEQ ID NO: 222308 - DNA, 25 bp, Probe sequence
gaaaatcaagaaggtcgtcgtgtgt

SEQ ID NO: 222309 - DNA, 25 bp, Probe sequence
gaaacaatctgataatccatttgca

SEQ ID NO: 222310 - DNA, 25 bp, Probe sequence
gatccggaatacagaaccactccct

SEQ ID NO: 222311 - DNA, 25 bp, Probe sequence
gattcggtggtcaacaatcaggaca

SEQ ID NO: 222312 - DNA, 25 bp, Probe sequence
gtttgttactgaagttgtgtgtgat

SEQ ID NO: 222313 - DNA, 25 bp, Probe sequence
gtcgtcgtgtgtttgttactgaagt

SEQ ID NO: 222314 - DNA, 25 bp, Probe sequence
ggtgtagatggtcgcttacaatccc

SEQ ID NO: 222315 - DNA, 25 bp, Probe sequence
ggtcgcttacaatcccgtaattatg

SEQ ID NO: 222316 - DNA, 25 bp, Probe sequence
ggtagtttagctggtgtagatggtc

SEQ ID NO: 222317 - DNA, 25 bp, Probe sequence
ggccaacgtcaacaaaatgaattcc

SEQ ID NO: 222318 - DNA, 25 bp, Probe sequence
tacaatcccgtaattatgaaaatca

SEQ ID NO: 222319 - DNA, 25 bp, Probe sequence
tacggtcaaggattcggtggtcaac

SEQ ID NO: 222320 - DNA, 25 bp, Probe sequence
tagatggtcgcttacaatcccgtaa

SEQ ID NO: 222321 - DNA, 25 bp, Probe sequence
tagagttgtattagtaggtcgttta

SEQ ID NO: 222322 - DNA, 25 bp, Probe sequence
ttcaattccttgaacctaaaaatgc

SEQ ID NO: 222323 - DNA, 25 bp, Probe sequence
ttgcaaatgcaaacggaccgattga

SEQ ID NO: 222324 - DNA, 25 bp, Probe sequence
acgtcgtgtaactggtacttcagct

SEQ ID NO: 222325 - DNA, 25 bp, Probe sequence
atatcgactacaaagacactgaatt

SEQ ID NO: 222326 - DNA, 25 bp, Probe sequence
atcaaacgttctcgtcatatggcat

SEQ ID NO: 222327 - DNA, 25 bp, Probe sequence
atgctatttcacagcaaatggtatt

SEQ ID NO: 222328 - DNA, 25 bp, Probe sequence
atggtattacacatatcgactacaa

SEQ ID NO: 222329 - DNA, 25 bp, Probe sequence
agctatcaaacgttctcgtcatatg

SEQ ID NO: 222330 - DNA, 25 bp, Probe sequence
accaagaagaggcggacgtcgtcgt

SEQ ID NO: 222331 - DNA, 25 bp, Probe sequence
acgttctcgtcatatggcattatta

SEQ ID NO: 222332 - DNA, 25 bp, Probe sequence
acagctatcaaacgttctcgtcata

SEQ ID NO: 222333 - DNA, 25 bp, Probe sequence
acacatatcgactacaaagacactg

SEQ ID NO: 222334 - DNA, 25 bp, Probe sequence
aaacgttctcgtcatatggcattat

SEQ ID NO: 222335 - DNA, 25 bp, Probe sequence
aaaagtatgctatttcacagcaaat

SEQ ID NO: 222336 - DNA, 25 bp, Probe sequence
caagaagaggcggacgtcgtcgtaa

SEQ ID NO: 222337 - DNA, 25 bp, Probe sequence
caacgtatgttgactacagctatca

SEQ ID NO: 222338 - DNA, 25 bp, Probe sequence
ctatcaaacgttctcgtcatatggc

SEQ ID NO: 222339 - DNA, 25 bp, Probe sequence
ctacagctatcaaacgttctcgtca

SEQ ID NO: 222340 - DNA, 25 bp, Probe sequence
ccacgtcgtgtaactggtacttcag

SEQ ID NO: 222341 - DNA, 25 bp, Probe sequence
gcaggtggaccaagaagaggcggac

SEQ ID NO: 222342 - DNA, 25 bp, Probe sequence
gcaaatggtattacacatatcgact

SEQ ID NO: 222343 - DNA, 25 bp, Probe sequence
gactacagctatcaaacgttctcgt

SEQ ID NO: 222344 - DNA, 25 bp, Probe sequence
gactacaaagacactgaattattaa

SEQ ID NO: 222345 - DNA, 25 bp, Probe sequence
ggtggaccaagaagaggcggacgtc

SEQ ID NO: 222346 - DNA, 25 bp, Probe sequence
gttctcgtcatatggcattattacc

SEQ ID NO: 222347 - DNA, 25 bp, Probe sequence
ggacgtcgtcgtaaaaaagtatgct

SEQ ID NO: 222348 - DNA, 25 bp, Probe sequence
gtcgtgtaactggtacttcagctaa

SEQ ID NO: 222349 - DNA, 25 bp, Probe sequence
ggaccaagaagaggcggacgtcgtc

SEQ ID NO: 222350 - DNA, 25 bp, Probe sequence
gtgtaactggtacttcagctaaata

SEQ ID NO: 222351 - DNA, 25 bp, Probe sequence
tggcattattaccatatgttaaaga

SEQ ID NO: 222352 - DNA, 25 bp, Probe sequence
tctcgtcatatggcattattaccat

SEQ ID NO: 222353 - DNA, 25 bp, Probe sequence
tcagctaaatatcaacgtatgttga

SEQ ID NO: 222354 - DNA, 25 bp, Probe sequence
taaaacgttttatctcagaacgcgg

SEQ ID NO: 222355 - DNA, 25 bp, Probe sequence
taactggtacttcagctaaatatca

SEQ ID NO: 222356 - DNA, 25 bp, Probe sequence
tttaccacgtcgtgtaactggtact

SEQ ID NO: 222357 - DNA, 25 bp, Probe sequence
ttatctcagaacgcggtaaaatttt

SEQ ID NO: 222358 - DNA, 25 bp, Probe sequence
attctatcgctaggtatcatctatg

SEQ ID NO: 222359 - DNA, 25 bp, Probe sequence
attagagtcgcataaagagctacaa

SEQ ID NO: 222360 - DNA, 25 bp, Probe sequence
atatccaaaagcagacgcgtcaaca

SEQ ID NO: 222361 - DNA, 25 bp, Probe sequence
atatcataagatttgctcatatttc

SEQ ID NO: 222362 - DNA, 25 bp, Probe sequence
atctattctatcgctaggtatcatc

SEQ ID NO: 222363 - DNA, 25 bp, Probe sequence
atccaaaagcagacgcgtcaacaca

SEQ ID NO: 222364 - DNA, 25 bp, Probe sequence
atcgctaggtatcatctatggggga

SEQ ID NO: 222365 - DNA, 25 bp, Probe sequence
atgggagaacatttgcctaaaggta

SEQ ID NO: 222366 - DNA, 25 bp, Probe sequence
agcagacgcgtcaacacaaaattcc

SEQ ID NO: 222367 - DNA, 25 bp, Probe sequence
aaatctaataaatctaggaattggg

SEQ ID NO: 222368 - DNA, 25 bp, Probe sequence
aaaatctattctatcgctaggtatc

SEQ ID NO: 222369 - DNA, 25 bp, Probe sequence
ctatcgctaggtatcatctatgggg

SEQ ID NO: 222370 - DNA, 25 bp, Probe sequence
ctattctatcgctaggtatcatcta

SEQ ID NO: 222371 - DNA, 25 bp, Probe sequence
gcctaaaggtaacatcgtcataaat

SEQ ID NO: 222372 - DNA, 25 bp, Probe sequence
gccgatataaaaaatgtaactttca

SEQ ID NO: 222373 - DNA, 25 bp, Probe sequence
gctaggtatcatctatgggggaaca

SEQ ID NO: 222374 - DNA, 25 bp, Probe sequence
gaatatatccaaaagcagacgcgtc

SEQ ID NO: 222375 - DNA, 25 bp, Probe sequence
gaagaagtaccaaataattcagaaa

SEQ ID NO: 222376 - DNA, 25 bp, Probe sequence
gagagacctttaaatgaaaaccaag

SEQ ID NO: 222377 - DNA, 25 bp, Probe sequence
gagtcgcataaagagctacaaaaag

SEQ ID NO: 222378 - DNA, 25 bp, Probe sequence
gtaactttcaaacttgtgaaaagtg

SEQ ID NO: 222379 - DNA, 25 bp, Probe sequence
ggtaacatcgtcataaatacaaaag

SEQ ID NO: 222380 - DNA, 25 bp, Probe sequence
ggtaaatatacattagagtcgcata

SEQ ID NO: 222381 - DNA, 25 bp, Probe sequence
ggtatcatctatgggggaacatttg

SEQ ID NO: 222382 - DNA, 25 bp, Probe sequence
ggatcatatcataagatttgctcat

SEQ ID NO: 222383 - DNA, 25 bp, Probe sequence
ggaattgggtttattcagagagacc

SEQ ID NO: 222384 - DNA, 25 bp, Probe sequence
tgggtttattcagagagacctttaa

SEQ ID NO: 222385 - DNA, 25 bp, Probe sequence
tgggggaacatttggaatatatcca

SEQ ID NO: 222386 - DNA, 25 bp, Probe sequence
tcatctatgggggaacatttggaat

SEQ ID NO: 222387 - DNA, 25 bp, Probe sequence
taaaaaactttacgatagatacagc

SEQ ID NO: 222388 - DNA, 25 bp, Probe sequence
taaaaattaatacagccgatataaa

SEQ ID NO: 222389 - DNA, 25 bp, Probe sequence
tactcttaataaagaagttgtcact

SEQ ID NO: 222390 - DNA, 25 bp, Probe sequence
tatatgggagaacatttgcctaaag

SEQ ID NO: 222391 - DNA, 25 bp, Probe sequence
tttgcctaaaggtaacatcgtcata

SEQ ID NO: 222392 - DNA, 25 bp, Probe sequence
attggcgcttatgctgctttattca

SEQ ID NO: 222393 - DNA, 25 bp, Probe sequence
atcattggcgcttatgctgctttat

SEQ ID NO: 222394 - DNA, 25 bp, Probe sequence
atggatgatcaactccgaagttata

SEQ ID NO: 222395 - DNA, 25 bp, Probe sequence
agatcaatttaacccattagtaaag

SEQ ID NO: 222396 - DNA, 25 bp, Probe sequence
agaagggaaagagacgcaattaatg

SEQ ID NO: 222397 - DNA, 25 bp, Probe sequence
actgctacatttgatgttaaaccgc

SEQ ID NO: 222398 - DNA, 25 bp, Probe sequence
actatcattggcgcttatgctgctt

SEQ ID NO: 222399 - DNA, 25 bp, Probe sequence
aacagatcaatttaacccattagta

SEQ ID NO: 222400 - DNA, 25 bp, Probe sequence
aaccgcatagatacttgaaaattac

SEQ ID NO: 222401 - DNA, 25 bp, Probe sequence
cattggcgcttatgctgctttattc

SEQ ID NO: 222402 - DNA, 25 bp, Probe sequence
ctatcattggcgcttatgctgcttt

SEQ ID NO: 222403 - DNA, 25 bp, Probe sequence
ctacatttgatgttaaaccgcatag

SEQ ID NO: 222404 - DNA, 25 bp, Probe sequence
gcgcttatgctgctttattcatttt

SEQ ID NO: 222405 - DNA, 25 bp, Probe sequence
gctgctttattcattttaaaaacaa

SEQ ID NO: 222406 - DNA, 25 bp, Probe sequence
gcttatgctgctttattcattttaa

SEQ ID NO: 222407 - DNA, 25 bp, Probe sequence
gcatagatacttgaaaattacacat

SEQ ID NO: 222408 - DNA, 25 bp, Probe sequence
gaatggatgatcaactccgaagtta

SEQ ID NO: 222409 - DNA, 25 bp, Probe sequence
gacgcaattaatgtatactgctaca

SEQ ID NO: 222410 - DNA, 25 bp, Probe sequence
gagacgcaattaatgtatactgcta

SEQ ID NO: 222411 - DNA, 25 bp, Probe sequence
gaggtgtctactagaatggatgatc

SEQ ID NO: 222412 - DNA, 25 bp, Probe sequence
gatgttaaaccgcatagatacttga

SEQ ID NO: 222413 - DNA, 25 bp, Probe sequence
gttaaaccgcatagatacttgaaaa

SEQ ID NO: 222414 - DNA, 25 bp, Probe sequence
gtgtctactagaatggatgatcaac

SEQ ID NO: 222415 - DNA, 25 bp, Probe sequence
ggtataacagatcaatttaacccat

SEQ ID NO: 222416 - DNA, 25 bp, Probe sequence
ggcgcttatgctgctttattcattt

SEQ ID NO: 222417 - DNA, 25 bp, Probe sequence
tggcgcttatgctgctttattcatt

SEQ ID NO: 222418 - DNA, 25 bp, Probe sequence
tgtatactgctacatttgatgttaa

SEQ ID NO: 222419 - DNA, 25 bp, Probe sequence
tgaaaattacacataaaggtcatca

SEQ ID NO: 222420 - DNA, 25 bp, Probe sequence
tcattggcgcttatgctgctttatt

SEQ ID NO: 222421 - DNA, 25 bp, Probe sequence
tactatcattggcgcttatgctgct

SEQ ID NO: 222422 - DNA, 25 bp, Probe sequence
tatgctgctttattcattttaaaaa

SEQ ID NO: 222423 - DNA, 25 bp, Probe sequence
tatcattggcgcttatgctgcttta

SEQ ID NO: 222424 - DNA, 25 bp, Probe sequence
ttactatcattggcgcttatgctgc

SEQ ID NO: 222425 - DNA, 25 bp, Probe sequence
ttggcgcttatgctgctttattcat

SEQ ID NO: 222426 - DNA, 25 bp, Probe sequence
atagcgatgctatagattacaaaaa

SEQ ID NO: 222427 - DNA, 25 bp, Probe sequence
atactaatcaagacactaatacaac

SEQ ID NO: 222428 - DNA, 25 bp, Probe sequence
atcaatgtcagcggtggtgcttact

SEQ ID NO: 222429 - DNA, 25 bp, Probe sequence
atcaagacactaatacaacaaaaga

SEQ ID NO: 222430 - DNA, 25 bp, Probe sequence
atgtcagcggtggtgcttactgcat

SEQ ID NO: 222431 - DNA, 25 bp, Probe sequence
actgcatgtggcaatgatactccaa

SEQ ID NO: 222432 - DNA, 25 bp, Probe sequence
acaagaagttactgttgatgctaag

SEQ ID NO: 222433 - DNA, 25 bp, Probe sequence
aaacaagcccagaagatgctgtgaa

SEQ ID NO: 222434 - DNA, 25 bp, Probe sequence
aatggtgaatgggcttataaagtga

SEQ ID NO: 222435 - DNA, 25 bp, Probe sequence
caatgtcagcggtggtgcttactgc

SEQ ID NO: 222436 - DNA, 25 bp, Probe sequence
caagcccagaagatgctgtgaaaaa

SEQ ID NO: 222437 - DNA, 25 bp, Probe sequence
cggtggtgcttactgcatgtggcaa

SEQ ID NO: 222438 - DNA, 25 bp, Probe sequence
gcatgtggcaatgatactccaaaag

SEQ ID NO: 222439 - DNA, 25 bp, Probe sequence
gcagtgttatcaatgtcagcggtgg

SEQ ID NO: 222440 - DNA, 25 bp, Probe sequence
gcaatgatactccaaaagatgaaac

SEQ ID NO: 222441 - DNA, 25 bp, Probe sequence
gaaacaaaatcaacagagtcaaata

SEQ ID NO: 222442 - DNA, 25 bp, Probe sequence
gaaattaaaatcattagcagtgtta

SEQ ID NO: 222443 - DNA, 25 bp, Probe sequence
gagtcaaatactaatcaagacacta

SEQ ID NO: 222444 - DNA, 25 bp, Probe sequence
gatgttaaaacaagcccagaagatg

SEQ ID NO: 222445 - DNA, 25 bp, Probe sequence
gatattaaagaatggtcacttgaaa

SEQ ID NO: 222446 - DNA, 25 bp, Probe sequence
gttatcaatgtcagcggtggtgctt

SEQ ID NO: 222447 - DNA, 25 bp, Probe sequence
gttactgttgatgctaagaacggta

SEQ ID NO: 222448 - DNA, 25 bp, Probe sequence
tgtcagcggtggtgcttactgcatg

SEQ ID NO: 222449 - DNA, 25 bp, Probe sequence
gtgttatcaatgtcagcggtggtgc

SEQ ID NO: 222450 - DNA, 25 bp, Probe sequence
gtggtgcttactgcatgtggcaatg

SEQ ID NO: 222451 - DNA, 25 bp, Probe sequence
ggtgcttactgcatgtggcaatgat

SEQ ID NO: 222452 - DNA, 25 bp, Probe sequence
ggtgaagagtcagaagtacttgttg

SEQ ID NO: 222453 - DNA, 25 bp, Probe sequence
ggtaaagtattaaagagtgagcaag

SEQ ID NO: 222454 - DNA, 25 bp, Probe sequence
tgataactttaaatatagcgatgct

SEQ ID NO: 222455 - DNA, 25 bp, Probe sequence
tcagcggtggtgcttactgcatgtg

SEQ ID NO: 222456 - DNA, 25 bp, Probe sequence
ttactgcatgtggcaatgatactcc

SEQ ID NO: 222457 - DNA, 25 bp, Probe sequence
ttagcagtgttatcaatgtcagcgg

SEQ ID NO: 222458 - DNA, 25 bp, Probe sequence
ttctaatggtgaatgggcttataaa

SEQ ID NO: 222459 - DNA, 25 bp, Probe sequence
ttgatgctaagaacggtaaagtatt

SEQ ID NO: 222460 - DNA, 25 bp, Probe sequence
attcatcgcatacaaggacagctta

SEQ ID NO: 222461 - DNA, 25 bp, Probe sequence
atcgtattcatcgcatacaaggaca

SEQ ID NO: 222462 - DNA, 25 bp, Probe sequence
atgattaatcgtattcatcgcatac

SEQ ID NO: 222463 - DNA, 25 bp, Probe sequence
atgggtattattattagcgagaact

SEQ ID NO: 222464 - DNA, 25 bp, Probe sequence
agtgcatctaaaagttctattcaac

SEQ ID NO: 222465 - DNA, 25 bp, Probe sequence
aaattgtaaagacgtcattagtcaa

SEQ ID NO: 222466 - DNA, 25 bp, Probe sequence
aatgaagctgttgaattattaataa

SEQ ID NO: 222467 - DNA, 25 bp, Probe sequence
aatcgtattcatcgcatacaaggac

SEQ ID NO: 222468 - DNA, 25 bp, Probe sequence
caaggacagcttaatggagtcatta

SEQ ID NO: 222469 - DNA, 25 bp, Probe sequence
catcgcatacaaggacagcttaatg

SEQ ID NO: 222470 - DNA, 25 bp, Probe sequence
ctattcaacgtttaatgggtattat

SEQ ID NO: 222471 - DNA, 25 bp, Probe sequence
gcgagaacttagtagaatgcgtcaa

SEQ ID NO: 222472 - DNA, 25 bp, Probe sequence
gcatacaaggacagcttaatggagt

SEQ ID NO: 222473 - DNA, 25 bp, Probe sequence
gcatctaaaagttctattcaacgtt

SEQ ID NO: 222474 - DNA, 25 bp, Probe sequence
gaatgcgtcaaaatgtctgaagaaa

SEQ ID NO: 222475 - DNA, 25 bp, Probe sequence
gaagattctcaggcactaattaatg

SEQ ID NO: 222476 - DNA, 25 bp, Probe sequence
gaacttagtagaatgcgtcaaaatg

SEQ ID NO: 222477 - DNA, 25 bp, Probe sequence
gaaaatagtgaagattctcaggcac

SEQ ID NO: 222478 - DNA, 25 bp, Probe sequence
gacgtcattagtcaattaagtgcat

SEQ ID NO: 222479 - DNA, 25 bp, Probe sequence
gagaacttagtagaatgcgtcaaaa

SEQ ID NO: 222480 - DNA, 25 bp, Probe sequence
gattaatcgtattcatcgcatacaa

SEQ ID NO: 222481 - DNA, 25 bp, Probe sequence
gattctcaggcactaattaatgaag

SEQ ID NO: 222482 - DNA, 25 bp, Probe sequence
gttctattcaacgtttaatgggtat

SEQ ID NO: 222483 - DNA, 25 bp, Probe sequence
gtagaatgcgtcaaaatgtctgaag

SEQ ID NO: 222484 - DNA, 25 bp, Probe sequence
gtcattagtcaattaagtgcatcta

SEQ ID NO: 222485 - DNA, 25 bp, Probe sequence
gtgaagattctcaggcactaattaa

SEQ ID NO: 222486 - DNA, 25 bp, Probe sequence
gggtattattattagcgagaactta

SEQ ID NO: 222487 - DNA, 25 bp, Probe sequence
tcgcatacaaggacagcttaatgga

SEQ ID NO: 222488 - DNA, 25 bp, Probe sequence
tctcaggcactaattaatgaagctg

SEQ ID NO: 222489 - DNA, 25 bp, Probe sequence
taagtgcatctaaaagttctattca

SEQ ID NO: 222490 - DNA, 25 bp, Probe sequence
taaaagttctattcaacgtttaatg

SEQ ID NO: 222491 - DNA, 25 bp, Probe sequence
tattcatcgcatacaaggacagctt

SEQ ID NO: 222492 - DNA, 25 bp, Probe sequence
ttaatcgtattcatcgcatacaagg

SEQ ID NO: 222493 - DNA, 25 bp, Probe sequence
ttcatcgcatacaaggacagcttaa

SEQ ID NO: 222494 - DNA, 25 bp, Probe sequence
cggacaatggggtcctgaattagga

SEQ ID NO: 222495 - DNA, 25 bp, Probe sequence
attggatgggctgctggtgctatta

SEQ ID NO: 222496 - DNA, 25 bp, Probe sequence
attggatcatgggtaggtggcaaac

SEQ ID NO: 222497 - DNA, 25 bp, Probe sequence
attattggatcatgggtaggtggca

SEQ ID NO: 222498 - DNA, 25 bp, Probe sequence
atgtttggatttattggaatgttaa

SEQ ID NO: 222499 - DNA, 25 bp, Probe sequence
catgggtaggtggcaaactattcgg

SEQ ID NO: 222500 - DNA, 25 bp, Probe sequence
atgggctgctggtgctattatgggt

SEQ ID NO: 222501 - DNA, 25 bp, Probe sequence
aggtggcaaactattcggacaatgg

SEQ ID NO: 222502 - DNA, 25 bp, Probe sequence
aggtattattggatcatgggtaggt

SEQ ID NO: 222503 - DNA, 25 bp, Probe sequence
aactattcggacaatggggtcctga

SEQ ID NO: 222504 - DNA, 25 bp, Probe sequence
aagatatcccaggtggtattttagg

SEQ ID NO: 222505 - DNA, 25 bp, Probe sequence
aatggggtcctgaattaggaagtat

SEQ ID NO: 222506 - DNA, 25 bp, Probe sequence
cttaattggatgggctgctggtgct

SEQ ID NO: 222507 - DNA, 25 bp, Probe sequence
gctggtgctattatgggtaaagata

SEQ ID NO: 222508 - DNA, 25 bp, Probe sequence
gctgctggtgctattatgggtaaag

SEQ ID NO: 222509 - DNA, 25 bp, Probe sequence
gcaatcgtaacgttaattttaagag

SEQ ID NO: 222510 - DNA, 25 bp, Probe sequence
gatgggctgctggtgctattatggg

SEQ ID NO: 222511 - DNA, 25 bp, Probe sequence
tattcggacaatggggtcctgaatt

SEQ ID NO: 222512 - DNA, 25 bp, Probe sequence
gtaggtggcaaactattcggacaat

SEQ ID NO: 222513 - DNA, 25 bp, Probe sequence
gtggcaaactattcggacaatgggg

SEQ ID NO: 222514 - DNA, 25 bp, Probe sequence
gtggcttaattggatgggctgctgg

SEQ ID NO: 222515 - DNA, 25 bp, Probe sequence
gggtaggtggcaaactattcggaca

SEQ ID NO: 222516 - DNA, 25 bp, Probe sequence
gggctgctggtgctattatgggtaa

SEQ ID NO: 222517 - DNA, 25 bp, Probe sequence
ggtggcttaattggatgggctgctg

SEQ ID NO: 222518 - DNA, 25 bp, Probe sequence
ggtaaagatatcccaggtggtattt

SEQ ID NO: 222519 - DNA, 25 bp, Probe sequence
ggatcatgggtaggtggcaaactat

SEQ ID NO: 222520 - DNA, 25 bp, Probe sequence
ggcaaactattcggacaatggggtc

SEQ ID NO: 222521 - DNA, 25 bp, Probe sequence
ggcttaattggatgggctgctggtg

SEQ ID NO: 222522 - DNA, 25 bp, Probe sequence
tggatgggctgctggtgctattatg

SEQ ID NO: 222523 - DNA, 25 bp, Probe sequence
tgggctgctggtgctattatgggta

SEQ ID NO: 222524 - DNA, 25 bp, Probe sequence
tcggtggcttaattggatgggctgc

SEQ ID NO: 222525 - DNA, 25 bp, Probe sequence
taattggatgggctgctggtgctat

SEQ ID NO: 222526 - DNA, 25 bp, Probe sequence
taggaagtatttacatcttgccagc

SEQ ID NO: 222527 - DNA, 25 bp, Probe sequence
ttggatgggctgctggtgctattat

SEQ ID NO: 222528 - DNA, 25 bp, Probe sequence
atagtttttcacaaaaagcgcctga

SEQ ID NO: 222529 - DNA, 25 bp, Probe sequence
atcatgttgtcaatgaagatacaca

SEQ ID NO: 222530 - DNA, 25 bp, Probe sequence
agacttattaagaacacagcaaacg

SEQ ID NO: 222531 - DNA, 25 bp, Probe sequence
agaacacagcaaacgtttgaacata

SEQ ID NO: 222532 - DNA, 25 bp, Probe sequence
acgttcacttggcgtatttgagggt

SEQ ID NO: 222533 - DNA, 25 bp, Probe sequence
acatgtatatgtttcagacttatta

SEQ ID NO: 222534 - DNA, 25 bp, Probe sequence
aaatatttcaatgatccaaacttta

SEQ ID NO: 222535 - DNA, 25 bp, Probe sequence
aagagaacgttcacttggcgtattt

SEQ ID NO: 222536 - DNA, 25 bp, Probe sequence
aagttgtcattcgttgtttgatggt

SEQ ID NO: 222537 - DNA, 25 bp, Probe sequence
aatcagtgcgaatccgaaatatgaa

SEQ ID NO: 222538 - DNA, 25 bp, Probe sequence
aattgcaaaccatatatcattgaat

SEQ ID NO: 222539 - DNA, 25 bp, Probe sequence
cacttggcgtatttgagggtgaata

SEQ ID NO: 222540 - DNA, 25 bp, Probe sequence
catatgacattgcatcaacgactac

SEQ ID NO: 222541 - DNA, 25 bp, Probe sequence
cgttaacggatactggcacaaaaag

SEQ ID NO: 222542 - DNA, 25 bp, Probe sequence
cctctattaagagaacgttcacttg

SEQ ID NO: 222543 - DNA, 25 bp, Probe sequence
gcgcctgaaggagaaagttatgaag

SEQ ID NO: 222544 - DNA, 25 bp, Probe sequence
gcacatcaagttgtcattcgttgtt

SEQ ID NO: 222545 - DNA, 25 bp, Probe sequence
gcaaacgtttgaacatatttttcca

SEQ ID NO: 222546 - DNA, 25 bp, Probe sequence
gaacgttcacttggcgtatttgagg

SEQ ID NO: 222547 - DNA, 25 bp, Probe sequence
gaacattttatgaatcatgttgtca

SEQ ID NO: 222548 - DNA, 25 bp, Probe sequence
gacatggcgaatcaaaatcgaatta

SEQ ID NO: 222549 - DNA, 25 bp, Probe sequence
gacgatttatttagttagacatggc

SEQ ID NO: 222550 - DNA, 25 bp, Probe sequence
gacgatttatgtgattattttaaag

SEQ ID NO: 222551 - DNA, 25 bp, Probe sequence
gatgtgccgttaacggatactggca

SEQ ID NO: 222552 - DNA, 25 bp, Probe sequence
gatgaaatcagtgcgaatccgaaat

SEQ ID NO: 222553 - DNA, 25 bp, Probe sequence
gatcttatttttgtggacaattaga

SEQ ID NO: 222554 - DNA, 25 bp, Probe sequence
gttgcacatcaagttgtcattcgtt

SEQ ID NO: 222555 - DNA, 25 bp, Probe sequence
gttatgaagatgtatatcaacgcgt

SEQ ID NO: 222556 - DNA, 25 bp, Probe sequence
gtttttcacaaaaagcgcctgaagg

SEQ ID NO: 222557 - DNA, 25 bp, Probe sequence
gtcattgttgcacatcaagttgtca

SEQ ID NO: 222558 - DNA, 25 bp, Probe sequence
gtcattcgttgtttgatggtttatt

SEQ ID NO: 222559 - DNA, 25 bp, Probe sequence
ggacaattagatgtgccgttaacgg

SEQ ID NO: 222560 - DNA, 25 bp, Probe sequence
tagttagacatggcgaatcaaaatc

SEQ ID NO: 222561 - DNA, 25 bp, Probe sequence
tatttttccatatgacattgcatca

SEQ ID NO: 222562 - DNA, 25 bp, Probe sequence
atcaacgtacaaacgggaatcgcaa

SEQ ID NO: 222563 - DNA, 25 bp, Probe sequence
atcgtcatcatttagttgatcaaca

SEQ ID NO: 222564 - DNA, 25 bp, Probe sequence
acgagaagtttctggacaaccttat

SEQ ID NO: 222565 - DNA, 25 bp, Probe sequence
atggttcaacggaaggtttgctagt

SEQ ID NO: 222566 - DNA, 25 bp, Probe sequence
atggcattgtctttttaggatcatt

SEQ ID NO: 222567 - DNA, 25 bp, Probe sequence
aggaaacacagtatgcacaaatggc

SEQ ID NO: 222568 - DNA, 25 bp, Probe sequence
agttgatcaacatgctgaaactgat

SEQ ID NO: 222569 - DNA, 25 bp, Probe sequence
accatttgaccatgtcttccatcat

SEQ ID NO: 222570 - DNA, 25 bp, Probe sequence
aaatggctatttattcgtctttgtt

SEQ ID NO: 222571 - DNA, 25 bp, Probe sequence
aaaatcaggcttaatacagcgatag

SEQ ID NO: 222572 - DNA, 25 bp, Probe sequence
aagctggacaaagcgcttcgacgtc

SEQ ID NO: 222573 - DNA, 25 bp, Probe sequence
caacggaaggtttgctagtaggtgc

SEQ ID NO: 222574 - DNA, 25 bp, Probe sequence
caaagcgcttcgacgtcaagtttcc

SEQ ID NO: 222575 - DNA, 25 bp, Probe sequence
cacgcttaccatttgaccatgtctt

SEQ ID NO: 222576 - DNA, 25 bp, Probe sequence
gcggtaactgctgaagatatggggt

SEQ ID NO: 222577 - DNA, 25 bp, Probe sequence
gctagtaggtgcaatcgatgcagca

SEQ ID NO: 222578 - DNA, 25 bp, Probe sequence
gcatactcaattattggtatcgacg

SEQ ID NO: 222579 - DNA, 25 bp, Probe sequence
gaagtttctggacaaccttatgttg

SEQ ID NO: 222580 - DNA, 25 bp, Probe sequence
gaagacgttgttaagaaattggtag

SEQ ID NO: 222581 - DNA, 25 bp, Probe sequence
gaacaattgcaaaaatcaggcttaa

SEQ ID NO: 222582 - DNA, 25 bp, Probe sequence
gaaacatggtcgcagcaaattgaga

SEQ ID NO: 222583 - DNA, 25 bp, Probe sequence
gaccatgtcttccatcataataagt

SEQ ID NO: 222584 - DNA, 25 bp, Probe sequence
gatatggggtatggcattgtctttt

SEQ ID NO: 222585 - DNA, 25 bp, Probe sequence
gattattatcgtcatcatttagttg

SEQ ID NO: 222586 - DNA, 25 bp, Probe sequence
gtcgcagcaaattgagatgttccta

SEQ ID NO: 222587 - DNA, 25 bp, Probe sequence
gtgcaatcgatgcagcattagttgc

SEQ ID NO: 222588 - DNA, 25 bp, Probe sequence
gtgaaaaagcatcattctgttagaa

SEQ ID NO: 222589 - DNA, 25 bp, Probe sequence
tatttggtatggcagtaggggaacc

SEQ ID NO: 222590 - DNA, 25 bp, Probe sequence
ggggtatggcattgtctttttagga

SEQ ID NO: 222591 - DNA, 25 bp, Probe sequence
ggaaaatgcatatggttcaacggaa

SEQ ID NO: 222592 - DNA, 25 bp, Probe sequence
ggaatcgcaaagaaacatggtcgca

SEQ ID NO: 222593 - DNA, 25 bp, Probe sequence
ggctatttattcgtctttgttattg

SEQ ID NO: 222594 - DNA, 25 bp, Probe sequence
tccatcataataagtatcatgctga

SEQ ID NO: 222595 - DNA, 25 bp, Probe sequence
tcgtctttgttattgattattatcg

SEQ ID NO: 222596 - DNA, 25 bp, Probe sequence
atcatcgatgactttttagcaaatg

SEQ ID NO: 222597 - DNA, 25 bp, Probe sequence
atgctaagacagctggtattggtat

SEQ ID NO: 222598 - DNA, 25 bp, Probe sequence
atgaagttggtcgcactttttacga

SEQ ID NO: 222599 - DNA, 25 bp, Probe sequence
agtgacattggtgggagaagaataa

SEQ ID NO: 222600 - DNA, 25 bp, Probe sequence
agcaaatggtgatgcttcattagga

SEQ ID NO: 222601 - DNA, 25 bp, Probe sequence
accattgaagcttccggtatcgcac

SEQ ID NO: 222602 - DNA, 25 bp, Probe sequence
acatctattcattcatttactaaaa

SEQ ID NO: 222603 - DNA, 25 bp, Probe sequence
acagtttcttctctctgcaaggttg

SEQ ID NO: 222604 - DNA, 25 bp, Probe sequence
aaatcttaaccattgaagcttccgg

SEQ ID NO: 222605 - DNA, 25 bp, Probe sequence
aagcaaaacctagcactttgacgga

SEQ ID NO: 222606 - DNA, 25 bp, Probe sequence
caagtacggtcattgtttcaaaaga

SEQ ID NO: 222607 - DNA, 25 bp, Probe sequence
cactgcattttgatgtgccatgttt

SEQ ID NO: 222608 - DNA, 25 bp, Probe sequence
cctagcactttgacggatggttatt

SEQ ID NO: 222609 - DNA, 25 bp, Probe sequence
gcactttgacggatggttattatga

SEQ ID NO: 222610 - DNA, 25 bp, Probe sequence
gcaagcgaatgctaagacagctggt

SEQ ID NO: 222611 - DNA, 25 bp, Probe sequence
gcaatcatggctgcactgcattttg

SEQ ID NO: 222612 - DNA, 25 bp, Probe sequence
gaagacggcgttgtcattgatgaga

SEQ ID NO: 222613 - DNA, 25 bp, Probe sequence
gagtttccaaaatgggcatcaacgt

SEQ ID NO: 222614 - DNA, 25 bp, Probe sequence
gatgactttttagcaaatggtgatg

SEQ ID NO: 222615 - DNA, 25 bp, Probe sequence
gatatcgcacagcaagcgaatgcta

SEQ ID NO: 222616 - DNA, 25 bp, Probe sequence
gattatacgatatcgcacagcaagc

SEQ ID NO: 222617 - DNA, 25 bp, Probe sequence
gttggtcgcactttttacgagcaat

SEQ ID NO: 222618 - DNA, 25 bp, Probe sequence
gtaaaggaagacggcgttgtcattg

SEQ ID NO: 222619 - DNA, 25 bp, Probe sequence
gtcgcactttttacgagcaatttaa

SEQ ID NO: 222620 - DNA, 25 bp, Probe sequence
gtgccatgtttatttgcgaaaaaag

SEQ ID NO: 222621 - DNA, 25 bp, Probe sequence
gtgatgcttcattaggattatacga

SEQ ID NO: 222622 - DNA, 25 bp, Probe sequence
gggcatcaacgtttagaagaagcag

SEQ ID NO: 222623 - DNA, 25 bp, Probe sequence
gggattactaaaatcttaaccattg

SEQ ID NO: 222624 - DNA, 25 bp, Probe sequence
ggctgcactgcattttgatgtgcca

SEQ ID NO: 222625 - DNA, 25 bp, Probe sequence
tgatgtgccatgtttatttgcgaaa

SEQ ID NO: 222626 - DNA, 25 bp, Probe sequence
tctgcaaggttgcttcactagaagg

SEQ ID NO: 222627 - DNA, 25 bp, Probe sequence
tttcttctctctgcaaggttgcttc

SEQ ID NO: 222628 - DNA, 25 bp, Probe sequence
ttaacagtttcttctctctgcaagg

SEQ ID NO: 222629 - DNA, 25 bp, Probe sequence
ttctctctgcaaggttgcttcacta

SEQ ID NO: 222630 - DNA, 25 bp, Probe sequence
attgttggtattcctgctaaaattt

SEQ ID NO: 222631 - DNA, 25 bp, Probe sequence
attcctgctaaaatttctaatatcg

SEQ ID NO: 222632 - DNA, 25 bp, Probe sequence
agatcttaatactggtgtaacaaag

SEQ ID NO: 222633 - DNA, 25 bp, Probe sequence
acggtcacttgcatattcacttaaa

SEQ ID NO: 222634 - DNA, 25 bp, Probe sequence
actggtgtaacaaaggttaatgcaa

SEQ ID NO: 222635 - DNA, 25 bp, Probe sequence
acacaattgttggtattcctgctaa

SEQ ID NO: 222636 - DNA, 25 bp, Probe sequence
acaactaagccgggacttatagcat

SEQ ID NO: 222637 - DNA, 25 bp, Probe sequence
aagccgggacttatagcattaaact

SEQ ID NO: 222638 - DNA, 25 bp, Probe sequence
aaacacaattgttggtattcctgct

SEQ ID NO: 222639 - DNA, 25 bp, Probe sequence
aacacaattgttggtattcctgcta

SEQ ID NO: 222640 - DNA, 25 bp, Probe sequence
aactaagccgggacttatagcatta

SEQ ID NO: 222641 - DNA, 25 bp, Probe sequence
caattgttggtattcctgctaaaat

SEQ ID NO: 222642 - DNA, 25 bp, Probe sequence
cacaattgttggtattcctgctaaa

SEQ ID NO: 222643 - DNA, 25 bp, Probe sequence
cacggtcacttgcatattcacttaa

SEQ ID NO: 222644 - DNA, 25 bp, Probe sequence
cgtgcacggtcacttgcatattcac

SEQ ID NO: 222645 - DNA, 25 bp, Probe sequence
cggtcacttgcatattcacttaaat

SEQ ID NO: 222646 - DNA, 25 bp, Probe sequence
ctgctaaaatttctaatatcggttt

SEQ ID NO: 222647 - DNA, 25 bp, Probe sequence
ccgggacttatagcattaaactctc

SEQ ID NO: 222648 - DNA, 25 bp, Probe sequence
gccgggacttatagcattaaactct

SEQ ID NO: 222649 - DNA, 25 bp, Probe sequence
gcacggtcacttgcatattcactta

SEQ ID NO: 222650 - DNA, 25 bp, Probe sequence
gacttatagcattaaactctccaag

SEQ ID NO: 222651 - DNA, 25 bp, Probe sequence
gttggtattcctgctaaaatttcta

SEQ ID NO: 222652 - DNA, 25 bp, Probe sequence
gtcgtgcacggtcacttgcatattc

SEQ ID NO: 222653 - DNA, 25 bp, Probe sequence
gtcacttgcatattcacttaaataa

SEQ ID NO: 222654 - DNA, 25 bp, Probe sequence
gtgcacggtcacttgcatattcact

SEQ ID NO: 222655 - DNA, 25 bp, Probe sequence
gtgatgagagggacaatcataatac

SEQ ID NO: 222656 - DNA, 25 bp, Probe sequence
gggacttatagcattaaactctcca

SEQ ID NO: 222657 - DNA, 25 bp, Probe sequence
tggtattcctgctaaaatttctaat

SEQ ID NO: 222658 - DNA, 25 bp, Probe sequence
tgaaagatcttaatactggtgtaac

SEQ ID NO: 222659 - DNA, 25 bp, Probe sequence
tgcacggtcacttgcatattcactt

SEQ ID NO: 222660 - DNA, 25 bp, Probe sequence
tcctgctaaaatttctaatatcggt

SEQ ID NO: 222661 - DNA, 25 bp, Probe sequence
tcgtgcacggtcacttgcatattca

SEQ ID NO: 222662 - DNA, 25 bp, Probe sequence
taatgcaaagaaaccaaacacaatt

SEQ ID NO: 222663 - DNA, 25 bp, Probe sequence
ttatagcattaaactctccaagacc

SEQ ID NO: 222664 - DNA, 25 bp, Probe sequence
attcaattcatttccgtatacagcc

SEQ ID NO: 222665 - DNA, 25 bp, Probe sequence
attagttattatcatcgcgcctttc

SEQ ID NO: 222666 - DNA, 25 bp, Probe sequence
atttaatcctaagtgttcaacatct

SEQ ID NO: 222667 - DNA, 25 bp, Probe sequence
atcaagtcaatcatgccggttggtt

SEQ ID NO: 222668 - DNA, 25 bp, Probe sequence
atcttttagctatgtacgcaggtgc

SEQ ID NO: 222669 - DNA, 25 bp, Probe sequence
tcttcccaccagtagtaacgggtag

SEQ ID NO: 222670 - DNA, 25 bp, Probe sequence
ccggttggttaggcatcccagtgcc

SEQ ID NO: 222671 - DNA, 25 bp, Probe sequence
gctggcttacttgggatggtcgata

SEQ ID NO: 222672 - DNA, 25 bp, Probe sequence
gctgttgcgcccatgattttaattg

SEQ ID NO: 222673 - DNA, 25 bp, Probe sequence
gcaaatatcataccgctacctgtgt

SEQ ID NO: 222674 - DNA, 25 bp, Probe sequence
gaattgttttaggcgcaatctctgc

SEQ ID NO: 222675 - DNA, 25 bp, Probe sequence
gaacaaatcgcttacttagttacag

SEQ ID NO: 222676 - DNA, 25 bp, Probe sequence
gattaggtactggtataagcgctgt

SEQ ID NO: 222677 - DNA, 25 bp, Probe sequence
gttgccacatttttacaagccaata

SEQ ID NO: 222678 - DNA, 25 bp, Probe sequence
gtattgccatattaattggactcgt

SEQ ID NO: 222679 - DNA, 25 bp, Probe sequence
gtaggacttgtttctttatccggcg

SEQ ID NO: 222680 - DNA, 25 bp, Probe sequence
gtgcgatgatagctatgtttggcat

SEQ ID NO: 222681 - DNA, 25 bp, Probe sequence
gtgacatcgacgttagtgttcttta

SEQ ID NO: 222682 - DNA, 25 bp, Probe sequence
gtgttgttactatcattggtatcaa

SEQ ID NO: 222683 - DNA, 25 bp, Probe sequence
ggtctagcgatagtgttaggttcta

SEQ ID NO: 222684 - DNA, 25 bp, Probe sequence
ggttatactgcggaaggtctagcga

SEQ ID NO: 222685 - DNA, 25 bp, Probe sequence
ggtatcaatttaatgccagtagcaa

SEQ ID NO: 222686 - DNA, 25 bp, Probe sequence
ggttcgctatttttatcagggatat

SEQ ID NO: 222687 - DNA, 25 bp, Probe sequence
ggatttagctttgatgtgacatcga

SEQ ID NO: 222688 - DNA, 25 bp, Probe sequence
ggaacaggattaccaatcgttcttg

SEQ ID NO: 222689 - DNA, 25 bp, Probe sequence
ggcatggtcgtgttattacttatat

SEQ ID NO: 222690 - DNA, 25 bp, Probe sequence
ggcgcaatctctgcaattattctta

SEQ ID NO: 222691 - DNA, 25 bp, Probe sequence
tggatgtacattcacggctgttgcg

SEQ ID NO: 222692 - DNA, 25 bp, Probe sequence
tcgacaggtgtctatcatgcgttaa

SEQ ID NO: 222693 - DNA, 25 bp, Probe sequence
taagcgctgtaccacaagcatttaa

SEQ ID NO: 222694 - DNA, 25 bp, Probe sequence
taggaacgataggtgctggcttact

SEQ ID NO: 222695 - DNA, 25 bp, Probe sequence
tatgtggttgtatacctaagcttgg

SEQ ID NO: 222696 - DNA, 25 bp, Probe sequence
tttccgtatacagcctattcgcaaa

SEQ ID NO: 222697 - DNA, 25 bp, Probe sequence
ttagctggaggtcaaggtgcaaagg

SEQ ID NO: 222698 - DNA, 25 bp, Probe sequence
atcgaattccctaatgcagcaaaag

SEQ ID NO: 222699 - DNA, 25 bp, Probe sequence
atgcggttatgttaggtagcttatt

SEQ ID NO: 222700 - DNA, 25 bp, Probe sequence
agaagacttacccagaaatcacatt

SEQ ID NO: 222701 - DNA, 25 bp, Probe sequence
acgaaagaatcaccgaactactcat

SEQ ID NO: 222702 - DNA, 25 bp, Probe sequence
aaagctatcattgctgatggtggta

SEQ ID NO: 222703 - DNA, 25 bp, Probe sequence
aaaacgctcagaaaatggtgtcatt

SEQ ID NO: 222704 - DNA, 25 bp, Probe sequence
aagttggtattggcccaggttcaat

SEQ ID NO: 222705 - DNA, 25 bp, Probe sequence
aatggcgattgctatggctcgtcaa

SEQ ID NO: 222706 - DNA, 25 bp, Probe sequence
aataccgtatttcaggtgtaccaat

SEQ ID NO: 222707 - DNA, 25 bp, Probe sequence
aattacagctccagtgaatacaaca

SEQ ID NO: 222708 - DNA, 25 bp, Probe sequence
cagttatttctgctggtatggatac

SEQ ID NO: 222709 - DNA, 25 bp, Probe sequence
gcacaatctgatattttaccgaaag

SEQ ID NO: 222710 - DNA, 25 bp, Probe sequence
gcaactgaagcacgcaaacatggta

SEQ ID NO: 222711 - DNA, 25 bp, Probe sequence
gaacatggtcgtctacttgtagccg

SEQ ID NO: 222712 - DNA, 25 bp, Probe sequence
gaagatcgcaacttagtaggtattt

SEQ ID NO: 222713 - DNA, 25 bp, Probe sequence
gaagcgggtgcagatattgttaaag

SEQ ID NO: 222714 - DNA, 25 bp, Probe sequence
gacttacgttttattgaagacttct

SEQ ID NO: 222715 - DNA, 25 bp, Probe sequence
gatggtggtattaaattctcaggag

SEQ ID NO: 222716 - DNA, 25 bp, Probe sequence
gatgtcttagttatcgatacagcac

SEQ ID NO: 222717 - DNA, 25 bp, Probe sequence
gatacagcacatggtcactctaaag

SEQ ID NO: 222718 - DNA, 25 bp, Probe sequence
gttgtagcaggtgttggtgtaccac

SEQ ID NO: 222719 - DNA, 25 bp, Probe sequence
gtatgggctctttaggtgcgatgga

SEQ ID NO: 222720 - DNA, 25 bp, Probe sequence
gtaacgtagcaactgcagaagcaac

SEQ ID NO: 222721 - DNA, 25 bp, Probe sequence
gtcgaagcaggtgtggatgtcttag

SEQ ID NO: 222722 - DNA, 25 bp, Probe sequence
gtgcgttacaagatacaatttacca

SEQ ID NO: 222723 - DNA, 25 bp, Probe sequence
gtgttattaattccagcacaatctg

SEQ ID NO: 222724 - DNA, 25 bp, Probe sequence
gtgtgcgtgctggtatgggttatac

SEQ ID NO: 222725 - DNA, 25 bp, Probe sequence
gtgtcatttcaaacccatttttctt

SEQ ID NO: 222726 - DNA, 25 bp, Probe sequence
gggttatactggttcacacgattta

SEQ ID NO: 222727 - DNA, 25 bp, Probe sequence
ggctcgtcaaggtggtttaggtgtt

SEQ ID NO: 222728 - DNA, 25 bp, Probe sequence
ggtagcttattagcaggtactgaag

SEQ ID NO: 222729 - DNA, 25 bp, Probe sequence
tgggcgttgaagaacaagcggacga

SEQ ID NO: 222730 - DNA, 25 bp, Probe sequence
ttaatgggcggtgtgcgtgctggta

SEQ ID NO: 222731 - DNA, 25 bp, Probe sequence
tagctgctggtggacatgcggttat

SEQ ID NO: 222732 - DNA, 25 bp, Probe sequence
acaaccattcccaggacctggtctt

SEQ ID NO: 222733 - DNA, 25 bp, Probe sequence
attacatcaaaaccaccaagcacaa

SEQ ID NO: 222734 - DNA, 25 bp, Probe sequence
ataagaaacgtcgcatttatggtgt

SEQ ID NO: 222735 - DNA, 25 bp, Probe sequence
aggaattccagtacttggtatttgt

SEQ ID NO: 222736 - DNA, 25 bp, Probe sequence
agagttaatccttgtcttagacttt

SEQ ID NO: 222737 - DNA, 25 bp, Probe sequence
acaaccaattaattacacgccgaat

SEQ ID NO: 222738 - DNA, 25 bp, Probe sequence
aaggtgtagacttccttgcgcaagg

SEQ ID NO: 222739 - DNA, 25 bp, Probe sequence
aaggctttgaagttatcgctgatag

SEQ ID NO: 222740 - DNA, 25 bp, Probe sequence
aattccatccagaagtacgtcatac

SEQ ID NO: 222741 - DNA, 25 bp, Probe sequence
gaattcgtgaaatgggcgtttatag

SEQ ID NO: 222742 - DNA, 25 bp, Probe sequence
caaactgtttggatgagtcattctg

SEQ ID NO: 222743 - DNA, 25 bp, Probe sequence
cttgtcttagactttggtagccaat

SEQ ID NO: 222744 - DNA, 25 bp, Probe sequence
cgcacgcatcgattgggaagtctta

SEQ ID NO: 222745 - DNA, 25 bp, Probe sequence
cgcgtagtctatgacattacatcaa

SEQ ID NO: 222746 - DNA, 25 bp, Probe sequence
gcgattttacgccaagtgattagag

SEQ ID NO: 222747 - DNA, 25 bp, Probe sequence
gaaggttcatttacaattgatccgg

SEQ ID NO: 222748 - DNA, 25 bp, Probe sequence
gactaccgtacgtatgatcacacag

SEQ ID NO: 222749 - DNA, 25 bp, Probe sequence
gaccgtcgtgtattatgtgcgatga

SEQ ID NO: 222750 - DNA, 25 bp, Probe sequence
gagaatcagacgcgattttacgcca

SEQ ID NO: 222751 - DNA, 25 bp, Probe sequence
gatgagttattcgctggcttaccag

SEQ ID NO: 222752 - DNA, 25 bp, Probe sequence
gatcaactaacatgtatctttgtag

SEQ ID NO: 222753 - DNA, 25 bp, Probe sequence
gtatctttgtagaccatggcttact

SEQ ID NO: 222754 - DNA, 25 bp, Probe sequence
gtagaccatggcttacttcgtaaag

SEQ ID NO: 222755 - DNA, 25 bp, Probe sequence
gtacttggtatttgttacggcatgc

SEQ ID NO: 222756 - DNA, 25 bp, Probe sequence
gtcttggtattcgtgtacttggaga

SEQ ID NO: 222757 - DNA, 25 bp, Probe sequence
gtgttatgggagactaccgtacgta

SEQ ID NO: 222758 - DNA, 25 bp, Probe sequence
gtgttaccaaacattcaatcagtag

SEQ ID NO: 222759 - DNA, 25 bp, Probe sequence
ggacctggtcttggtattcgtgtac

SEQ ID NO: 222760 - DNA, 25 bp, Probe sequence
ggcttaccagcagaacaaactgttt

SEQ ID NO: 222761 - DNA, 25 bp, Probe sequence
tgacaagtgacttcgcacgcatcga

SEQ ID NO: 222762 - DNA, 25 bp, Probe sequence
tcaggtggtccaaattcagtttatg

SEQ ID NO: 222763 - DNA, 25 bp, Probe sequence
tacggcatgcaattaactactaaat

SEQ ID NO: 222764 - DNA, 25 bp, Probe sequence
tttggcaatacttcacagtgttacc

SEQ ID NO: 222765 - DNA, 25 bp, Probe sequence
ttaaaaggtgtttcagatcctgaac

SEQ ID NO: 222766 - DNA, 25 bp, Probe sequence
attctcgaatcactttacttggatc

SEQ ID NO: 222767 - DNA, 25 bp, Probe sequence
attacaatgaatgatggcacaacac

SEQ ID NO: 222768 - DNA, 25 bp, Probe sequence
atactgatgagggtaaacactattt

SEQ ID NO: 222769 - DNA, 25 bp, Probe sequence
atcaatacgccaattttagaaatca

SEQ ID NO: 222770 - DNA, 25 bp, Probe sequence
agagcgtaaaaatgtgactggattt

SEQ ID NO: 222771 - DNA, 25 bp, Probe sequence
agaagtcacagtagggcaacagcat

SEQ ID NO: 222772 - DNA, 25 bp, Probe sequence
agaacgtatgggtgagtcaatcgac

SEQ ID NO: 222773 - DNA, 25 bp, Probe sequence
actacatttcaaaagaagacatctc

SEQ ID NO: 222774 - DNA, 25 bp, Probe sequence
acagtagggcaacagcattctcgaa

SEQ ID NO: 222775 - DNA, 25 bp, Probe sequence
acagcattctcgaatcactttactt

SEQ ID NO: 222776 - DNA, 25 bp, Probe sequence
aacgtgcgattaaacaacacggctt

SEQ ID NO: 222777 - DNA, 25 bp, Probe sequence
aacacatacaatcgatttaagtcaa

SEQ ID NO: 222778 - DNA, 25 bp, Probe sequence
ctcaattggtggcgttacaaaatca

SEQ ID NO: 222779 - DNA, 25 bp, Probe sequence
ctcgaatcactttacttggatctga

SEQ ID NO: 222780 - DNA, 25 bp, Probe sequence
gcattctcgaatcactttacttgga

SEQ ID NO: 222781 - DNA, 25 bp, Probe sequence
gcaacagcattctcgaatcacttta

SEQ ID NO: 222782 - DNA, 25 bp, Probe sequence
gaatgatggcacaacacatacaatc

SEQ ID NO: 222783 - DNA, 25 bp, Probe sequence
gaatcactttacttggatctgataa

SEQ ID NO: 222784 - DNA, 25 bp, Probe sequence
gacggcactaagattaataaaattc

SEQ ID NO: 222785 - DNA, 25 bp, Probe sequence
gatgtacttaaagatttttactaca

SEQ ID NO: 222786 - DNA, 25 bp, Probe sequence
gattatatcaatacgccaattttag

SEQ ID NO: 222787 - DNA, 25 bp, Probe sequence
gtatgggtgagtcaatcgacggcac

SEQ ID NO: 222788 - DNA, 25 bp, Probe sequence
gtagggcaacagcattctcgaatca

SEQ ID NO: 222789 - DNA, 25 bp, Probe sequence
gtcaatcgacggcactaagattaat

SEQ ID NO: 222790 - DNA, 25 bp, Probe sequence
gtcacagtagggcaacagcattctc

SEQ ID NO: 222791 - DNA, 25 bp, Probe sequence
gtgagtcaatcgacggcactaagat

SEQ ID NO: 222792 - DNA, 25 bp, Probe sequence
gtgactggatttaaatatactgatg

SEQ ID NO: 222793 - DNA, 25 bp, Probe sequence
gtgtgcagtatattgattatatcaa

SEQ ID NO: 222794 - DNA, 25 bp, Probe sequence
gggcaacagcattctcgaatcactt

SEQ ID NO: 222795 - DNA, 25 bp, Probe sequence
gggtaaacactatttagaagtcaca

SEQ ID NO: 222796 - DNA, 25 bp, Probe sequence
gggtgagtcaatcgacggcactaag

SEQ ID NO: 222797 - DNA, 25 bp, Probe sequence
ggtggcgttacaaaatcaaatagtg

SEQ ID NO: 222798 - DNA, 25 bp, Probe sequence
ggagaaaactcaaatatagatgtgt

SEQ ID NO: 222799 - DNA, 25 bp, Probe sequence
ggcacaacacatacaatcgatttaa

SEQ ID NO: 222800 - DNA, 25 bp, Probe sequence
atatggcaaatgcgaaacttgcaaa

SEQ ID NO: 222801 - DNA, 25 bp, Probe sequence
atactgctgtttgcgttaaaaatgc

SEQ ID NO: 222802 - DNA, 25 bp, Probe sequence
atgctggcccaattgcagaagttgc

SEQ ID NO: 222803 - DNA, 25 bp, Probe sequence
atgtaaatactgctgtttgcgttaa

SEQ ID NO: 222804 - DNA, 25 bp, Probe sequence
agttgccatcaaaaatacagaacct

SEQ ID NO: 222805 - DNA, 25 bp, Probe sequence
actgctgtttgcgttaaaaatgctg

SEQ ID NO: 222806 - DNA, 25 bp, Probe sequence
aaatactgctgtttgcgttaaaaat

SEQ ID NO: 222807 - DNA, 25 bp, Probe sequence
aaatgctggcccaattgcagaagtt

SEQ ID NO: 222808 - DNA, 25 bp, Probe sequence
aaaatgctggcccaattgcagaagt

SEQ ID NO: 222809 - DNA, 25 bp, Probe sequence
aatgctggcccaattgcagaagttg

SEQ ID NO: 222810 - DNA, 25 bp, Probe sequence
aattgcagaagttgccatcaaaaat

SEQ ID NO: 222811 - DNA, 25 bp, Probe sequence
aattgtgatgtaaatactgctgttt

SEQ ID NO: 222812 - DNA, 25 bp, Probe sequence
cagaacctaataataaccttttatg

SEQ ID NO: 222813 - DNA, 25 bp, Probe sequence
ctggcccaattgcagaagttgccat

SEQ ID NO: 222814 - DNA, 25 bp, Probe sequence
cccaattgcagaagttgccatcaaa

SEQ ID NO: 222815 - DNA, 25 bp, Probe sequence
gcccaattgcagaagttgccatcaa

SEQ ID NO: 222816 - DNA, 25 bp, Probe sequence
gcgaaacttgcaaaaaattgtgatg

SEQ ID NO: 222817 - DNA, 25 bp, Probe sequence
gcgttaaaaatgctggcccaattgc

SEQ ID NO: 222818 - DNA, 25 bp, Probe sequence
gctgtttgcgttaaaaatgctggcc

SEQ ID NO: 222819 - DNA, 25 bp, Probe sequence
gctggcccaattgcagaagttgcca

SEQ ID NO: 222820 - DNA, 25 bp, Probe sequence
gcagaagttgccatcaaaaatacag

SEQ ID NO: 222821 - DNA, 25 bp, Probe sequence
gatgtaaatactgctgtttgcgtta

SEQ ID NO: 222822 - DNA, 25 bp, Probe sequence
gatagacagtaatatggcaaatgcg

SEQ ID NO: 222823 - DNA, 25 bp, Probe sequence
gttaaaaatgctggcccaattgcag

SEQ ID NO: 222824 - DNA, 25 bp, Probe sequence
gtttgcgttaaaaatgctggcccaa

SEQ ID NO: 222825 - DNA, 25 bp, Probe sequence
gtaaatactgctgtttgcgttaaaa

SEQ ID NO: 222826 - DNA, 25 bp, Probe sequence
gtgatgtaaatactgctgtttgcgt

SEQ ID NO: 222827 - DNA, 25 bp, Probe sequence
ggcccaattgcagaagttgccatca

SEQ ID NO: 222828 - DNA, 25 bp, Probe sequence
tgtttgcgttaaaaatgctggccca

SEQ ID NO: 222829 - DNA, 25 bp, Probe sequence
tgctggcccaattgcagaagttgcc

SEQ ID NO: 222830 - DNA, 25 bp, Probe sequence
taaaaatgctggcccaattgcagaa

SEQ ID NO: 222831 - DNA, 25 bp, Probe sequence
tagacagtaatatggcaaatgcgaa

SEQ ID NO: 222832 - DNA, 25 bp, Probe sequence
ttgcgttaaaaatgctggcccaatt

SEQ ID NO: 222833 - DNA, 25 bp, Probe sequence
ttgccatcaaaaatacagaacctaa

SEQ ID NO: 222834 - DNA, 25 bp, Probe sequence
acaaccgaatctataaacgccgcga

SEQ ID NO: 222835 - DNA, 25 bp, Probe sequence
cctacaaccgaatctataaacgccg

SEQ ID NO: 222836 - DNA, 25 bp, Probe sequence
atttatttgtacctaaagccacaga

SEQ ID NO: 222837 - DNA, 25 bp, Probe sequence
atataaacaccgacgaaagtgcaat

SEQ ID NO: 222838 - DNA, 25 bp, Probe sequence
ataatgctggcgtagaaattaaacc

SEQ ID NO: 222839 - DNA, 25 bp, Probe sequence
accgattgctaataatgctggcgta

SEQ ID NO: 222840 - DNA, 25 bp, Probe sequence
aaccgaatctataaacgccgcgata

SEQ ID NO: 222841 - DNA, 25 bp, Probe sequence
aagccacagatggtggtagaccgat

SEQ ID NO: 222842 - DNA, 25 bp, Probe sequence
aatatatgcgccacatgcagatgcc

SEQ ID NO: 222843 - DNA, 25 bp, Probe sequence
cacagatggtggtagaccgattgct

SEQ ID NO: 222844 - DNA, 25 bp, Probe sequence
ccgaatctataaacgccgcgataaa

SEQ ID NO: 222845 - DNA, 25 bp, Probe sequence
gccaatttatttgtacctaaagcca

SEQ ID NO: 222846 - DNA, 25 bp, Probe sequence
gccacatgcagatgccaaaaataca

SEQ ID NO: 222847 - DNA, 25 bp, Probe sequence
gccccaatcttttttaagtaatgtg

SEQ ID NO: 222848 - DNA, 25 bp, Probe sequence
gcaatatatgcgccacatgcagatg

SEQ ID NO: 222849 - DNA, 25 bp, Probe sequence
gaatctataaacgccgcgataaaac

SEQ ID NO: 222850 - DNA, 25 bp, Probe sequence
gaacttgccaatttatttgtaccta

SEQ ID NO: 222851 - DNA, 25 bp, Probe sequence
gaccgattgctaataatgctggcgt

SEQ ID NO: 222852 - DNA, 25 bp, Probe sequence
gatggtggtagaccgattgctaata

SEQ ID NO: 222853 - DNA, 25 bp, Probe sequence
gattgctaataatgctggcgtagaa

SEQ ID NO: 222854 - DNA, 25 bp, Probe sequence
gttgcaatatatgcgccacatgcag

SEQ ID NO: 222855 - DNA, 25 bp, Probe sequence
gtgtattgccccaatcttttttaag

SEQ ID NO: 222856 - DNA, 25 bp, Probe sequence
gtttcaatatttgtgacggaaccat

SEQ ID NO: 222857 - DNA, 25 bp, Probe sequence
gtaatgtgaatataaacaccgacga

SEQ ID NO: 222858 - DNA, 25 bp, Probe sequence
gtggtagaccgattgctaataatgc

SEQ ID NO: 222859 - DNA, 25 bp, Probe sequence
tgtattgccccaatcttttttaagt

SEQ ID NO: 222860 - DNA, 25 bp, Probe sequence
tgctaataatgctggcgtagaaatt

SEQ ID NO: 222861 - DNA, 25 bp, Probe sequence
tgcgccacatgcagatgccaaaaat

SEQ ID NO: 222862 - DNA, 25 bp, Probe sequence
tatgcgccacatgcagatgccaaaa

SEQ ID NO: 222863 - DNA, 25 bp, Probe sequence
tataaacgccgcgataaaaccaaat

SEQ ID NO: 222864 - DNA, 25 bp, Probe sequence
tatatgcgccacatgcagatgccaa

SEQ ID NO: 222865 - DNA, 25 bp, Probe sequence
tatttgtacctaaagccacagatgg

SEQ ID NO: 222866 - DNA, 25 bp, Probe sequence
ttgccccaatcttttttaagtaatg

SEQ ID NO: 222867 - DNA, 25 bp, Probe sequence
ttgtacctaaagccacagatggtgg

SEQ ID NO: 222868 - DNA, 25 bp, Probe sequence
atcaaggtatgatttcacgcgatgt

SEQ ID NO: 222869 - DNA, 25 bp, Probe sequence
atctccaaccataaaacaagcacaa

SEQ ID NO: 222870 - DNA, 25 bp, Probe sequence
agacaagaacgcacgcctaaactcg

SEQ ID NO: 222871 - DNA, 25 bp, Probe sequence
agaacgcacgcctaaactcgaaaag

SEQ ID NO: 222872 - DNA, 25 bp, Probe sequence
agaacaatcacaaacgacaaccgaa

SEQ ID NO: 222873 - DNA, 25 bp, Probe sequence
accacaatctccaaccataaaacaa

SEQ ID NO: 222874 - DNA, 25 bp, Probe sequence
acggtaacatgggttcaggaacaat

SEQ ID NO: 222875 - DNA, 25 bp, Probe sequence
acacaagcagctaacacaagacaag

SEQ ID NO: 222876 - DNA, 25 bp, Probe sequence
aaaacataatctttacggtaacatg

SEQ ID NO: 222877 - DNA, 25 bp, Probe sequence
aaaactgcaagagcatcgtatggca

SEQ ID NO: 222878 - DNA, 25 bp, Probe sequence
aacacaagacaagaacgcacgccta

SEQ ID NO: 222879 - DNA, 25 bp, Probe sequence
aagatggaccttacgataatatcga

SEQ ID NO: 222880 - DNA, 25 bp, Probe sequence
aaggcaccaaatactaatgaggaaa

SEQ ID NO: 222881 - DNA, 25 bp, Probe sequence
aatgataaacataacagcaggtgca

SEQ ID NO: 222882 - DNA, 25 bp, Probe sequence
caagcacaaacagatatgactccta

SEQ ID NO: 222883 - DNA, 25 bp, Probe sequence
caacaggcgcaattacagtaacgac

SEQ ID NO: 222884 - DNA, 25 bp, Probe sequence
cagcaacgccagcgcctaaacaaga

SEQ ID NO: 222885 - DNA, 25 bp, Probe sequence
cagcaggtgcaaattcagcgacaac

SEQ ID NO: 222886 - DNA, 25 bp, Probe sequence
ctagggcttttaacaacaggcgcaa

SEQ ID NO: 222887 - DNA, 25 bp, Probe sequence
gccagcgcctaaacaagaacaatca

SEQ ID NO: 222888 - DNA, 25 bp, Probe sequence
gctcaaaccatggacgacggttagg

SEQ ID NO: 222889 - DNA, 25 bp, Probe sequence
gcttaaagcagagcgattagcaatg

SEQ ID NO: 222890 - DNA, 25 bp, Probe sequence
gcacgcctaaactcgaaaaggcacc

SEQ ID NO: 222891 - DNA, 25 bp, Probe sequence
gcaattacagtaacgacgcaatcgg

SEQ ID NO: 222892 - DNA, 25 bp, Probe sequence
gaatgttattccaaataggttcatc

SEQ ID NO: 222893 - DNA, 25 bp, Probe sequence
gaaaaaacctcagcttccaaaatag

SEQ ID NO: 222894 - DNA, 25 bp, Probe sequence
gaaaaaatatcacaacctaaacaag

SEQ ID NO: 222895 - DNA, 25 bp, Probe sequence
gacaaagtaccaacgcttaaagcag

SEQ ID NO: 222896 - DNA, 25 bp, Probe sequence
gatttcacgcgatgtttcagaatac

SEQ ID NO: 222897 - DNA, 25 bp, Probe sequence
gtaacgacgcaatcggtcaaagcag

SEQ ID NO: 222898 - DNA, 25 bp, Probe sequence
ggtggcatcacgaagactaatagta

SEQ ID NO: 222899 - DNA, 25 bp, Probe sequence
taatatatcagcaacgccagcgcct

SEQ ID NO: 222900 - DNA, 25 bp, Probe sequence
tattctgtcggtggcatcacgaaga

SEQ ID NO: 222901 - DNA, 25 bp, Probe sequence
ttcagcgacaacacaagcagctaac

SEQ ID NO: 222902 - DNA, 25 bp, Probe sequence
attacagggttatattcctatcaat

SEQ ID NO: 222903 - DNA, 25 bp, Probe sequence
ataggtagtattctaggtgcgttat

SEQ ID NO: 222904 - DNA, 25 bp, Probe sequence
atagtgcttatattgcctcaggatt

SEQ ID NO: 222905 - DNA, 25 bp, Probe sequence
atagtgcaataccgttaattttagg

SEQ ID NO: 222906 - DNA, 25 bp, Probe sequence
atcgtcattgcaatcattaagttga

SEQ ID NO: 222907 - DNA, 25 bp, Probe sequence
acgcctctaggcatgaaaatagggc

SEQ ID NO: 222908 - DNA, 25 bp, Probe sequence
aatcgcgtacttttaattacaatag

SEQ ID NO: 222909 - DNA, 25 bp, Probe sequence
gcattcatttcttctattggagcat

SEQ ID NO: 222910 - DNA, 25 bp, Probe sequence
gagcattcattattattccagtact

SEQ ID NO: 222911 - DNA, 25 bp, Probe sequence
gaggatttatttctggattagtcgg

SEQ ID NO: 222912 - DNA, 25 bp, Probe sequence
gattagtcggtatagggggagccat

SEQ ID NO: 222913 - DNA, 25 bp, Probe sequence
gtttattaaagtcacaccatctact

SEQ ID NO: 222914 - DNA, 25 bp, Probe sequence
gtatactatttacgcctctaggcat

SEQ ID NO: 222915 - DNA, 25 bp, Probe sequence
gtattgtaattgcattcatttcttc

SEQ ID NO: 222916 - DNA, 25 bp, Probe sequence
gtattttaatcgtcattgcaatcat

SEQ ID NO: 222917 - DNA, 25 bp, Probe sequence
gtatctggtattgtaggagctggtg

SEQ ID NO: 222918 - DNA, 25 bp, Probe sequence
gtaggagctggtggagcattcatta

SEQ ID NO: 222919 - DNA, 25 bp, Probe sequence
gtacattgagtggatctttaaaagc

SEQ ID NO: 222920 - DNA, 25 bp, Probe sequence
gtcaggtgttttttagtacattgag

SEQ ID NO: 222921 - DNA, 25 bp, Probe sequence
gtcacaccatctactagtcatatta

SEQ ID NO: 222922 - DNA, 25 bp, Probe sequence
gtcatattaagtttaatcgcgtact

SEQ ID NO: 222923 - DNA, 25 bp, Probe sequence
gggagccattgttatttaccctgct

SEQ ID NO: 222924 - DNA, 25 bp, Probe sequence
gggcaaaaaatacctgattctattc

SEQ ID NO: 222925 - DNA, 25 bp, Probe sequence
ggtgcgttattagcaactgtattta

SEQ ID NO: 222926 - DNA, 25 bp, Probe sequence
ggtagtatactatttacgcctctag

SEQ ID NO: 222927 - DNA, 25 bp, Probe sequence
ggtatcatcggtttagtatctggta

SEQ ID NO: 222928 - DNA, 25 bp, Probe sequence
tgcctcaggattaacttcaagtcag

SEQ ID NO: 222929 - DNA, 25 bp, Probe sequence
tacaataggtggtatcatcggttta

SEQ ID NO: 222930 - DNA, 25 bp, Probe sequence
tagctcttattctaatgtttattaa

SEQ ID NO: 222931 - DNA, 25 bp, Probe sequence
tattgctttgttagctcttattcta

SEQ ID NO: 222932 - DNA, 25 bp, Probe sequence
tttttctagaacgcttatacttaat

SEQ ID NO: 222933 - DNA, 25 bp, Probe sequence
ttcctatcaatagtgcaataccgtt

SEQ ID NO: 222934 - DNA, 25 bp, Probe sequence
ttccagtactacttgttatatttaa

SEQ ID NO: 222935 - DNA, 25 bp, Probe sequence
ttggtttacctacttatagtgctta

SEQ ID NO: 222936 - DNA, 25 bp, Probe sequence
atttcttaatttacttaacgatgat

SEQ ID NO: 222937 - DNA, 25 bp, Probe sequence
atttctatgtcttaaaagtgacgaa

SEQ ID NO: 222938 - DNA, 25 bp, Probe sequence
atgtgccaagtgttgaatcacatca

SEQ ID NO: 222939 - DNA, 25 bp, Probe sequence
agtggcatttctatgtcttaaaagt

SEQ ID NO: 222940 - DNA, 25 bp, Probe sequence
aaatgtgccaagtgttgaatcacat

SEQ ID NO: 222941 - DNA, 25 bp, Probe sequence
aaagtggcatttctatgtcttaaaa

SEQ ID NO: 222942 - DNA, 25 bp, Probe sequence
aaaagtggcatttctatgtcttaaa

SEQ ID NO: 222943 - DNA, 25 bp, Probe sequence
aagtggcatttctatgtcttaaaag

SEQ ID NO: 222944 - DNA, 25 bp, Probe sequence
aatgtgccaagtgttgaatcacatc

SEQ ID NO: 222945 - DNA, 25 bp, Probe sequence
caagtgttgaatcacatcaaaatca

SEQ ID NO: 222946 - DNA, 25 bp, Probe sequence
caaatgtgccaagtgttgaatcaca

SEQ ID NO: 222947 - DNA, 25 bp, Probe sequence
catttctatgtcttaaaagtgacga

SEQ ID NO: 222948 - DNA, 25 bp, Probe sequence
cattatggatttcttaatttactta

SEQ ID NO: 222949 - DNA, 25 bp, Probe sequence
ccaagtgttgaatcacatcaaaatc

SEQ ID NO: 222950 - DNA, 25 bp, Probe sequence
gccaagtgttgaatcacatcaaaat

SEQ ID NO: 222951 - DNA, 25 bp, Probe sequence
gcatttctatgtcttaaaagtgacg

SEQ ID NO: 222952 - DNA, 25 bp, Probe sequence
gatttcttaatttacttaacgatga

SEQ ID NO: 222953 - DNA, 25 bp, Probe sequence
gtttgtaaaagtggcatttctatgt

SEQ ID NO: 222954 - DNA, 25 bp, Probe sequence
gtaaaagtggcatttctatgtctta

SEQ ID NO: 222955 - DNA, 25 bp, Probe sequence
gtgccaagtgttgaatcacatcaaa

SEQ ID NO: 222956 - DNA, 25 bp, Probe sequence
gtggcatttctatgtcttaaaagtg

SEQ ID NO: 222957 - DNA, 25 bp, Probe sequence
ggatttcttaatttacttaacgatg

SEQ ID NO: 222958 - DNA, 25 bp, Probe sequence
ggcatttctatgtcttaaaagtgac

SEQ ID NO: 222959 - DNA, 25 bp, Probe sequence
tggcatttctatgtcttaaaagtga

SEQ ID NO: 222960 - DNA, 25 bp, Probe sequence
tggatttcttaatttacttaacgat

SEQ ID NO: 222961 - DNA, 25 bp, Probe sequence
tgtgccaagtgttgaatcacatcaa

SEQ ID NO: 222962 - DNA, 25 bp, Probe sequence
tgtttgtaaaagtggcatttctatg

SEQ ID NO: 222963 - DNA, 25 bp, Probe sequence
tgtaaaagtggcatttctatgtctt

SEQ ID NO: 222964 - DNA, 25 bp, Probe sequence
tgccaagtgttgaatcacatcaaaa

SEQ ID NO: 222965 - DNA, 25 bp, Probe sequence
tcaaatgtgccaagtgttgaatcac

SEQ ID NO: 222966 - DNA, 25 bp, Probe sequence
taaaagtggcatttctatgtcttaa

SEQ ID NO: 222967 - DNA, 25 bp, Probe sequence
tttgtaaaagtggcatttctatgtc

SEQ ID NO: 222968 - DNA, 25 bp, Probe sequence
ttgtaaaagtggcatttctatgtct

SEQ ID NO: 222969 - DNA, 25 bp, Probe sequence
ttgtttgtaaaagtggcatttctat

SEQ ID NO: 222970 - DNA, 25 bp, Probe sequence
atcaaaaccaaacgcgacaacaccg

SEQ ID NO: 222971 - DNA, 25 bp, Probe sequence
atctgtacggtaacgttggttcagg

SEQ ID NO: 222972 - DNA, 25 bp, Probe sequence
agttgatcacaaagcaggagtaaga

SEQ ID NO: 222973 - DNA, 25 bp, Probe sequence
agaagcaccgcaatcaaaaccaaac

SEQ ID NO: 222974 - DNA, 25 bp, Probe sequence
acgcaagcagcaaacgcgacaacac

SEQ ID NO: 222975 - DNA, 25 bp, Probe sequence
acaggtgtaatcacaacgacaacgc

SEQ ID NO: 222976 - DNA, 25 bp, Probe sequence
acaccgccctcaactaaagtagaag

SEQ ID NO: 222977 - DNA, 25 bp, Probe sequence
aaatattctgtcggtggtatcacaa

SEQ ID NO: 222978 - DNA, 25 bp, Probe sequence
aagaaaatcgcatggcagatgtcat

SEQ ID NO: 222979 - DNA, 25 bp, Probe sequence
aagatttatgaatgttgtcccagat

SEQ ID NO: 222980 - DNA, 25 bp, Probe sequence
caacaccgccctcaactaaaataga

SEQ ID NO: 222981 - DNA, 25 bp, Probe sequence
caaccaatgcaatctactaaatcag

SEQ ID NO: 222982 - DNA, 25 bp, Probe sequence
caacgacaacgcaagcagcaaacgc

SEQ ID NO: 222983 - DNA, 25 bp, Probe sequence
cacaatcgccaaccacaaaacaagt

SEQ ID NO: 222984 - DNA, 25 bp, Probe sequence
cacgccacaaccaatgcaatctact

SEQ ID NO: 222985 - DNA, 25 bp, Probe sequence
cagcaaatgcgacaacaccgccttc

SEQ ID NO: 222986 - DNA, 25 bp, Probe sequence
ctaaatcagacacaccacaatcgcc

SEQ ID NO: 222987 - DNA, 25 bp, Probe sequence
gccaaccacaaaacaagtaccaaca

SEQ ID NO: 222988 - DNA, 25 bp, Probe sequence
gcgtattatacgaaaccaagtttag

SEQ ID NO: 222989 - DNA, 25 bp, Probe sequence
gcactaggccttttaacaacaggtg

SEQ ID NO: 222990 - DNA, 25 bp, Probe sequence
gaagcaccgcaacaaacagcaaatg

SEQ ID NO: 222991 - DNA, 25 bp, Probe sequence
gacaacaccgccttcaactaaagtg

SEQ ID NO: 222992 - DNA, 25 bp, Probe sequence
gatgtttcagaattcaagattacta

SEQ ID NO: 222993 - DNA, 25 bp, Probe sequence
gatttccttgaaagaacttgatttt

SEQ ID NO: 222994 - DNA, 25 bp, Probe sequence
gtagaagcaccgcaacaaacagcaa

SEQ ID NO: 222995 - DNA, 25 bp, Probe sequence
gtggaagcaccacaatcaacaccgc

SEQ ID NO: 222996 - DNA, 25 bp, Probe sequence
ggtacaatctctcatgatgtttcag

SEQ ID NO: 222997 - DNA, 25 bp, Probe sequence
ggaaagtacacgtttgaattgcaca

SEQ ID NO: 222998 - DNA, 25 bp, Probe sequence
ggaatgtcgatgtatttgtcgtttt

SEQ ID NO: 222999 - DNA, 25 bp, Probe sequence
tgttgtcccagattatttcatatat

SEQ ID NO: 223000 - DNA, 25 bp, Probe sequence
tcaacaaacacgccacaaccaatgc

SEQ ID NO: 223001 - DNA, 25 bp, Probe sequence
tcaactaaagtgacaacacctccat

SEQ ID NO: 223002 - DNA, 25 bp, Probe sequence
taaaacaagtttagcactaggcctt

SEQ ID NO: 223003 - DNA, 25 bp, Probe sequence
taaagtgacaacacctccatcaaca

SEQ ID NO: 223004 - DNA, 25 bp, Probe sequence
atcaaaaccaaacgcgacaacaccg

SEQ ID NO: 223005 - DNA, 25 bp, Probe sequence
atcacaacgacaacgcaagaagcaa

SEQ ID NO: 223006 - DNA, 25 bp, Probe sequence
agttgatcacaaagcaggagtaaga

SEQ ID NO: 223007 - DNA, 25 bp, Probe sequence
agaagcaaacgcgacaacaccatct

SEQ ID NO: 223008 - DNA, 25 bp, Probe sequence
acgggtgtaatcacaacgacaacgc

SEQ ID NO: 223009 - DNA, 25 bp, Probe sequence
acaccgccctcaactaaagtagaag

SEQ ID NO: 223010 - DNA, 25 bp, Probe sequence
aacaccgcaacaaacaccgaacgcg

SEQ ID NO: 223011 - DNA, 25 bp, Probe sequence
caacaaacaccgaacgcgacaacac

SEQ ID NO: 223012 - DNA, 25 bp, Probe sequence
cacaatcgccaaccacaaaacaagt

SEQ ID NO: 223013 - DNA, 25 bp, Probe sequence
cgacaacaccatcttcaactaaagt

SEQ ID NO: 223014 - DNA, 25 bp, Probe sequence
gccttcaactaaagtggaaacaccg

SEQ ID NO: 223015 - DNA, 25 bp, Probe sequence
gccaaccacaaaacaagtaccaaca

SEQ ID NO: 223016 - DNA, 25 bp, Probe sequence
gcgtattatacgaaaccaagtttag

SEQ ID NO: 223017 - DNA, 25 bp, Probe sequence
gcactaggccttttaacaacgggtg

SEQ ID NO: 223018 - DNA, 25 bp, Probe sequence
gaaaatcataatctgtacggtaacg

SEQ ID NO: 223019 - DNA, 25 bp, Probe sequence
gaaaatcgcatggcagacgtcatag

SEQ ID NO: 223020 - DNA, 25 bp, Probe sequence
gaaagtacacgtttgaattacacaa

SEQ ID NO: 223021 - DNA, 25 bp, Probe sequence
gacaacaccgccttcaactaaagtg

SEQ ID NO: 223022 - DNA, 25 bp, Probe sequence
gacaacaccatcttccactaaagtg

SEQ ID NO: 223023 - DNA, 25 bp, Probe sequence
gatggcactaatattgataacattg

SEQ ID NO: 223024 - DNA, 25 bp, Probe sequence
gatgtttcagaattcaagattacta

SEQ ID NO: 223025 - DNA, 25 bp, Probe sequence
gatttccttgaaagaacttgatttt

SEQ ID NO: 223026 - DNA, 25 bp, Probe sequence
gattactaaagagcagatttccttg

SEQ ID NO: 223027 - DNA, 25 bp, Probe sequence
gtagaagcaccgcaatcaaaaccaa

SEQ ID NO: 223028 - DNA, 25 bp, Probe sequence
gtggaagcaccacaatcaacaccgc

SEQ ID NO: 223029 - DNA, 25 bp, Probe sequence
ggtacaatctctcatgatgtttcag

SEQ ID NO: 223030 - DNA, 25 bp, Probe sequence
ggagtggaaagatactcggtcggtg

SEQ ID NO: 223031 - DNA, 25 bp, Probe sequence
ggaatgtcgatgtatttgtcgtttt

SEQ ID NO: 223032 - DNA, 25 bp, Probe sequence
ggcagacgtcatagatggcactaat

SEQ ID NO: 223033 - DNA, 25 bp, Probe sequence
tctgtacggtaacgttggttcaggt

SEQ ID NO: 223034 - DNA, 25 bp, Probe sequence
taaaacaagtttagcactaggcctt

SEQ ID NO: 223035 - DNA, 25 bp, Probe sequence
taaagtggaaacaccacaatcgcca

SEQ ID NO: 223036 - DNA, 25 bp, Probe sequence
tactcggtcggtggtatcacaaaga

SEQ ID NO: 223037 - DNA, 25 bp, Probe sequence
tattgttccagattatttcatatat

SEQ ID NO: 223038 - DNA, 25 bp, Probe sequence
agtagcaaatgcaacaacaccatct

SEQ ID NO: 223039 - DNA, 25 bp, Probe sequence
agcaaatgcaacaacaccatcttca

SEQ ID NO: 223040 - DNA, 25 bp, Probe sequence
accttcgtctaatgtagacacatca

SEQ ID NO: 223041 - DNA, 25 bp, Probe sequence
accaccttcgtctaatgtagacaca

SEQ ID NO: 223042 - DNA, 25 bp, Probe sequence
accgcaacaagtagcaaatgcaaca

SEQ ID NO: 223043 - DNA, 25 bp, Probe sequence
acaccaccttcgtctaatgtagaca

SEQ ID NO: 223044 - DNA, 25 bp, Probe sequence
acaccgcaacaagtagcaaatgcaa

SEQ ID NO: 223045 - DNA, 25 bp, Probe sequence
acaagtagcaaatgcaacaacacca

SEQ ID NO: 223046 - DNA, 25 bp, Probe sequence
aacaccaccttcgtctaatgtagac

SEQ ID NO: 223047 - DNA, 25 bp, Probe sequence
aaacaccgcaacaagtagcaaatgc

SEQ ID NO: 223048 - DNA, 25 bp, Probe sequence
aacaagtagcaaatgcaacaacacc

SEQ ID NO: 223049 - DNA, 25 bp, Probe sequence
aacaccgcaacaagtagcaaatgca

SEQ ID NO: 223050 - DNA, 25 bp, Probe sequence
aagtagcaaatgcaacaacaccatc

SEQ ID NO: 223051 - DNA, 25 bp, Probe sequence
caagtagcaaatgcaacaacaccat

SEQ ID NO: 223052 - DNA, 25 bp, Probe sequence
caacaccaccttcgtctaatgtaga

SEQ ID NO: 223053 - DNA, 25 bp, Probe sequence
caccaccttcgtctaatgtagacac

SEQ ID NO: 223054 - DNA, 25 bp, Probe sequence
caccgcaacaagtagcaaatgcaac

SEQ ID NO: 223055 - DNA, 25 bp, Probe sequence
caccttcgtctaatgtagacacatc

SEQ ID NO: 223056 - DNA, 25 bp, Probe sequence
cttcgtctaatgtagacacatcacc

SEQ ID NO: 223057 - DNA, 25 bp, Probe sequence
ctaatgtagacacatcaccaccaca

SEQ ID NO: 223058 - DNA, 25 bp, Probe sequence
cgtctaatgtagacacatcaccacc

SEQ ID NO: 223059 - DNA, 25 bp, Probe sequence
cgcaacaagtagcaaatgcaacaac

SEQ ID NO: 223060 - DNA, 25 bp, Probe sequence
ccgcaacaagtagcaaatgcaacaa

SEQ ID NO: 223061 - DNA, 25 bp, Probe sequence
ccttcgtctaatgtagacacatcac

SEQ ID NO: 223062 - DNA, 25 bp, Probe sequence
ccaccttcgtctaatgtagacacat

SEQ ID NO: 223063 - DNA, 25 bp, Probe sequence
gcaacaagtagcaaatgcaacaaca

SEQ ID NO: 223064 - DNA, 25 bp, Probe sequence
gaaacaccgcaacaagtagcaaatg

SEQ ID NO: 223065 - DNA, 25 bp, Probe sequence
gtagcaaatgcaacaacaccatctt

SEQ ID NO: 223066 - DNA, 25 bp, Probe sequence
gtctaatgtagacacatcaccacca

SEQ ID NO: 223067 - DNA, 25 bp, Probe sequence
tcgtctaatgtagacacatcaccac

SEQ ID NO: 223068 - DNA, 25 bp, Probe sequence
tctaatgtagacacatcaccaccac

SEQ ID NO: 223069 - DNA, 25 bp, Probe sequence
taatgtagacacatcaccaccacaa

SEQ ID NO: 223070 - DNA, 25 bp, Probe sequence
tagcaaatgcaacaacaccatcttc

SEQ ID NO: 223071 - DNA, 25 bp, Probe sequence
ttcgtctaatgtagacacatcacca

SEQ ID NO: 223072 - DNA, 25 bp, Probe sequence
atttactgcaggttctatttcggca

SEQ ID NO: 223073 - DNA, 25 bp, Probe sequence
aggttctatttcggcaatacttgta

SEQ ID NO: 223074 - DNA, 25 bp, Probe sequence
agacgttggtatagatgctgtagaa

SEQ ID NO: 223075 - DNA, 25 bp, Probe sequence
agctggatttactgcaggttctatt

SEQ ID NO: 223076 - DNA, 25 bp, Probe sequence
acgttggtatagatgctgtagaaaa

SEQ ID NO: 223077 - DNA, 25 bp, Probe sequence
actgcaggttctatttcggcaatac

SEQ ID NO: 223078 - DNA, 25 bp, Probe sequence
actagacgttggtatagatgctgta

SEQ ID NO: 223079 - DNA, 25 bp, Probe sequence
acataaactagacgttggtatagat

SEQ ID NO: 223080 - DNA, 25 bp, Probe sequence
aaactagacgttggtatagatgctg

SEQ ID NO: 223081 - DNA, 25 bp, Probe sequence
aaaacagtagatggtgttgaaaatg

SEQ ID NO: 223082 - DNA, 25 bp, Probe sequence
aactagacgttggtatagatgctgt

SEQ ID NO: 223083 - DNA, 25 bp, Probe sequence
caggttctatttcggcaatacttgt

SEQ ID NO: 223084 - DNA, 25 bp, Probe sequence
ctagacgttggtatagatgctgtag

SEQ ID NO: 223085 - DNA, 25 bp, Probe sequence
ctgcaggttctatttcggcaatact

SEQ ID NO: 223086 - DNA, 25 bp, Probe sequence
ctggatttactgcaggttctatttc

SEQ ID NO: 223087 - DNA, 25 bp, Probe sequence
gctggatttactgcaggttctattt

SEQ ID NO: 223088 - DNA, 25 bp, Probe sequence
gcaggttctatttcggcaatacttg

SEQ ID NO: 223089 - DNA, 25 bp, Probe sequence
gacataaactagacgttggtataga

SEQ ID NO: 223090 - DNA, 25 bp, Probe sequence
gacgttggtatagatgctgtagaaa

SEQ ID NO: 223091 - DNA, 25 bp, Probe sequence
gatgctgtagaaaaatctgcagaaa

SEQ ID NO: 223092 - DNA, 25 bp, Probe sequence
gatttactgcaggttctatttcggc

SEQ ID NO: 223093 - DNA, 25 bp, Probe sequence
gttggtatagatgctgtagaaaaat

SEQ ID NO: 223094 - DNA, 25 bp, Probe sequence
gttctatttcggcaatacttgtata

SEQ ID NO: 223095 - DNA, 25 bp, Probe sequence
ggttctatttcggcaatacttgtat

SEQ ID NO: 223096 - DNA, 25 bp, Probe sequence
ggatttactgcaggttctatttcgg

SEQ ID NO: 223097 - DNA, 25 bp, Probe sequence
tggatttactgcaggttctatttcg

SEQ ID NO: 223098 - DNA, 25 bp, Probe sequence
tgcaggttctatttcggcaatactt

SEQ ID NO: 223099 - DNA, 25 bp, Probe sequence
tctatttcggcaatacttgtatatt

SEQ ID NO: 223100 - DNA, 25 bp, Probe sequence
taaactagacgttggtatagatgct

SEQ ID NO: 223101 - DNA, 25 bp, Probe sequence
tactgcaggttctatttcggcaata

SEQ ID NO: 223102 - DNA, 25 bp, Probe sequence
tagacgttggtatagatgctgtaga

SEQ ID NO: 223103 - DNA, 25 bp, Probe sequence
tttactgcaggttctatttcggcaa

SEQ ID NO: 223104 - DNA, 25 bp, Probe sequence
ttactgcaggttctatttcggcaat

SEQ ID NO: 223105 - DNA, 25 bp, Probe sequence
ttctatttcggcaatacttgtatat

SEQ ID NO: 223106 - DNA, 25 bp, Probe sequence
attgtcctctttgtatatttgtttt

SEQ ID NO: 223107 - DNA, 25 bp, Probe sequence
attttgattcgacacactggtatag

SEQ ID NO: 223108 - DNA, 25 bp, Probe sequence
atatccaagtttagaagaacagcaa

SEQ ID NO: 223109 - DNA, 25 bp, Probe sequence
atatccggacagttaggtttaattg

SEQ ID NO: 223110 - DNA, 25 bp, Probe sequence
atcacggattattaaatgtttctgt

SEQ ID NO: 223111 - DNA, 25 bp, Probe sequence
atgatagtggtgtattgtcctcttt

SEQ ID NO: 223112 - DNA, 25 bp, Probe sequence
agcctttaacaatatccggacagtt

SEQ ID NO: 223113 - DNA, 25 bp, Probe sequence
aaagcctttaacaatatccggacag

SEQ ID NO: 223114 - DNA, 25 bp, Probe sequence
aaaagttattctaatggatacccat

SEQ ID NO: 223115 - DNA, 25 bp, Probe sequence
aatggatacccattaggggctatta

SEQ ID NO: 223116 - DNA, 25 bp, Probe sequence
aatgtctaaagacttcatggaagca

SEQ ID NO: 223117 - DNA, 25 bp, Probe sequence
aatcagtttcgtcgaaaaatctaga

SEQ ID NO: 223118 - DNA, 25 bp, Probe sequence
gcatattttgattcgacacactggt

SEQ ID NO: 223119 - DNA, 25 bp, Probe sequence
gcagttgagggtgcaagaaatcacg

SEQ ID NO: 223120 - DNA, 25 bp, Probe sequence
gaatgatttttttactattctaatt

SEQ ID NO: 223121 - DNA, 25 bp, Probe sequence
gaatggagaattcgcgtataacaaa

SEQ ID NO: 223122 - DNA, 25 bp, Probe sequence
gacacactggtatagagaagtttct

SEQ ID NO: 223123 - DNA, 25 bp, Probe sequence
gagaattcgcgtataacaaaagtta

SEQ ID NO: 223124 - DNA, 25 bp, Probe sequence
gagaagtttctggaattgcagttga

SEQ ID NO: 223125 - DNA, 25 bp, Probe sequence
gagggtgcaagaaatcacggattat

SEQ ID NO: 223126 - DNA, 25 bp, Probe sequence
gatagtggtgtattgtcctctttgt

SEQ ID NO: 223127 - DNA, 25 bp, Probe sequence
gtttctggaattgcagttgagggtg

SEQ ID NO: 223128 - DNA, 25 bp, Probe sequence
gtttctgtgaatgatttttttacta

SEQ ID NO: 223129 - DNA, 25 bp, Probe sequence
gtcctctttgtatatttgtttttct

SEQ ID NO: 223130 - DNA, 25 bp, Probe sequence
ggggatcttacagatagagtaatta

SEQ ID NO: 223131 - DNA, 25 bp, Probe sequence
ggtgtattgtcctctttgtatattt

SEQ ID NO: 223132 - DNA, 25 bp, Probe sequence
ggacagttaggtttaattgatcaaa

SEQ ID NO: 223133 - DNA, 25 bp, Probe sequence
ggaagcatattttgattcgacacac

SEQ ID NO: 223134 - DNA, 25 bp, Probe sequence
tattttagtaaatcagtttcgtcga

SEQ ID NO: 223135 - DNA, 25 bp, Probe sequence
tacccattaggggctattaaaagat

SEQ ID NO: 223136 - DNA, 25 bp, Probe sequence
tctttgtatatttgtttttctatta

SEQ ID NO: 223137 - DNA, 25 bp, Probe sequence
tactattctaattaaatatccaagt

SEQ ID NO: 223138 - DNA, 25 bp, Probe sequence
tagtggtgtattgtcctctttgtat

SEQ ID NO: 223139 - DNA, 25 bp, Probe sequence
ttgattcgacacactggtatagaga

SEQ ID NO: 223140 - DNA, 25 bp, Probe sequence
atagtgaagattatccacattggga

SEQ ID NO: 223141 - DNA, 25 bp, Probe sequence
attttggctcaggatcgtcgattgt

SEQ ID NO: 223142 - DNA, 25 bp, Probe sequence
atatgtcttttttactaattcattt

SEQ ID NO: 223143 - DNA, 25 bp, Probe sequence
agggcggcctaaatcaggaattgat

SEQ ID NO: 223144 - DNA, 25 bp, Probe sequence
agagctttaacatcaggtagcgcaa

SEQ ID NO: 223145 - DNA, 25 bp, Probe sequence
aaatactgtgtttagtggatttgta

SEQ ID NO: 223146 - DNA, 25 bp, Probe sequence
aaatgaccctgaaaatactgtgttt

SEQ ID NO: 223147 - DNA, 25 bp, Probe sequence
aaagttctatgacaactagagcttt

SEQ ID NO: 223148 - DNA, 25 bp, Probe sequence
aacatcaggtagcgcaattaataaa

SEQ ID NO: 223149 - DNA, 25 bp, Probe sequence
aagagggcggcctaaatcaggaatt

SEQ ID NO: 223150 - DNA, 25 bp, Probe sequence
aagatatgtcttttttactaattca

SEQ ID NO: 223151 - DNA, 25 bp, Probe sequence
aaggactagtgaggtaattggtgaa

SEQ ID NO: 223152 - DNA, 25 bp, Probe sequence
aatgattacaaaaagttctatgaca

SEQ ID NO: 223153 - DNA, 25 bp, Probe sequence
aataggtgacttcttcagcaaactc

SEQ ID NO: 223154 - DNA, 25 bp, Probe sequence
ccgtctgtaattttaaatgaccctg

SEQ ID NO: 223155 - DNA, 25 bp, Probe sequence
gaatattttggctcaggatcgtcga

SEQ ID NO: 223156 - DNA, 25 bp, Probe sequence
gaaggtcatataccctgtttcggct

SEQ ID NO: 223157 - DNA, 25 bp, Probe sequence
gaaggttggcgagttattagaattt

SEQ ID NO: 223158 - DNA, 25 bp, Probe sequence
gaaaaataggtgacttcttcagcaa

SEQ ID NO: 223159 - DNA, 25 bp, Probe sequence
gacaactagagctttaacatcaggt

SEQ ID NO: 223160 - DNA, 25 bp, Probe sequence
ggtcatataccctgtttcggctaaa

SEQ ID NO: 223161 - DNA, 25 bp, Probe sequence
ggatcgtcgattgttaacttcaaag

SEQ ID NO: 223162 - DNA, 25 bp, Probe sequence
gtcgattgttaacttcaaagatgta

SEQ ID NO: 223163 - DNA, 25 bp, Probe sequence
gtgatgttttttttacaaggactag

SEQ ID NO: 223164 - DNA, 25 bp, Probe sequence
gggaagagaagaaggttggcgagtt

SEQ ID NO: 223165 - DNA, 25 bp, Probe sequence
ggtgaaataggttatccgtctgtaa

SEQ ID NO: 223166 - DNA, 25 bp, Probe sequence
ggttatccgtctgtaattttaaatg

SEQ ID NO: 223167 - DNA, 25 bp, Probe sequence
ggatttgtattaagagggcggccta

SEQ ID NO: 223168 - DNA, 25 bp, Probe sequence
ggagcttaaatacaaataatctgac

SEQ ID NO: 223169 - DNA, 25 bp, Probe sequence
ggctcaggatcgtcgattgttaact

SEQ ID NO: 223170 - DNA, 25 bp, Probe sequence
tgaccctgaaaatactgtgtttagt

SEQ ID NO: 223171 - DNA, 25 bp, Probe sequence
tcatataccctgtttcggctaaaga

SEQ ID NO: 223172 - DNA, 25 bp, Probe sequence
tataccctgtttcggctaaagaaca

SEQ ID NO: 223173 - DNA, 25 bp, Probe sequence
tattctgttgaaaagggtgatgttt

SEQ ID NO: 223174 - DNA, 25 bp, Probe sequence
attttggtgaagatatttctaatgt

SEQ ID NO: 223175 - DNA, 25 bp, Probe sequence
atcaacgtcaacatcatctacatat

SEQ ID NO: 223176 - DNA, 25 bp, Probe sequence
atgggtgatgttattgatggcagaa

SEQ ID NO: 223177 - DNA, 25 bp, Probe sequence
acatcgatagtgttacatcaacgtc

SEQ ID NO: 223178 - DNA, 25 bp, Probe sequence
acatcaacgtcaacatcatctacat

SEQ ID NO: 223179 - DNA, 25 bp, Probe sequence
acagcttcaattggtggtattacta

SEQ ID NO: 223180 - DNA, 25 bp, Probe sequence
aaacacaccgtatgggtgatgttat

SEQ ID NO: 223181 - DNA, 25 bp, Probe sequence
aacaaacggttcaaattatattgat

SEQ ID NO: 223182 - DNA, 25 bp, Probe sequence
aacatcatctacatatacaattaat

SEQ ID NO: 223183 - DNA, 25 bp, Probe sequence
aacttatagatgtaactttaactgg

SEQ ID NO: 223184 - DNA, 25 bp, Probe sequence
aacgtcaacatcatctacatataca

SEQ ID NO: 223185 - DNA, 25 bp, Probe sequence
aagatggtgggttctacacatttga

SEQ ID NO: 223186 - DNA, 25 bp, Probe sequence
aagttacaaacacaccgtatgggtg

SEQ ID NO: 223187 - DNA, 25 bp, Probe sequence
aagtgacgtttactcctaattatca

SEQ ID NO: 223188 - DNA, 25 bp, Probe sequence
aatagaccgttctttgagtatacaa

SEQ ID NO: 223189 - DNA, 25 bp, Probe sequence
gcttcaattggtggtattactaaaa

SEQ ID NO: 223190 - DNA, 25 bp, Probe sequence
gaattactatgaaagatggtgggtt

SEQ ID NO: 223191 - DNA, 25 bp, Probe sequence
gaatattataatagaccgttctttg

SEQ ID NO: 223192 - DNA, 25 bp, Probe sequence
gacgtttactcctaattatcaactt

SEQ ID NO: 223193 - DNA, 25 bp, Probe sequence
gaccgttctttgagtatacaaatca

SEQ ID NO: 223194 - DNA, 25 bp, Probe sequence
gagaaaattctgatagatctggtaa

SEQ ID NO: 223195 - DNA, 25 bp, Probe sequence
gagtatacaaatcagtcaggatata

SEQ ID NO: 223196 - DNA, 25 bp, Probe sequence
gatgtaactttaactgggaatgaaa

SEQ ID NO: 223197 - DNA, 25 bp, Probe sequence
gatagatctggtaatacagcttcaa

SEQ ID NO: 223198 - DNA, 25 bp, Probe sequence
gttacatcaacgtcaacatcatcta

SEQ ID NO: 223199 - DNA, 25 bp, Probe sequence
gtttactcctaattatcaacttata

SEQ ID NO: 223200 - DNA, 25 bp, Probe sequence
gtcaacatcatctacatatacaatt

SEQ ID NO: 223201 - DNA, 25 bp, Probe sequence
gggttctacacatttgaattgaata

SEQ ID NO: 223202 - DNA, 25 bp, Probe sequence
ggtgggttctacacatttgaattga

SEQ ID NO: 223203 - DNA, 25 bp, Probe sequence
tggtaatacagcttcaattggtggt

SEQ ID NO: 223204 - DNA, 25 bp, Probe sequence
tcgatagtgttacatcaacgtcaac

SEQ ID NO: 223205 - DNA, 25 bp, Probe sequence
taaacataacctttataagacagaa

SEQ ID NO: 223206 - DNA, 25 bp, Probe sequence
tactcctaattatcaacttatagat

SEQ ID NO: 223207 - DNA, 25 bp, Probe sequence
ttctaatgtagatatatttgttgta

SEQ ID NO: 223208 - DNA, 25 bp, Probe sequence
ttcccgattacctggttttatccat

SEQ ID NO: 223209 - DNA, 25 bp, Probe sequence
atcaaaacgctttaatctctaatat

SEQ ID NO: 223210 - DNA, 25 bp, Probe sequence
tactaacggattcccgattacctgg

SEQ ID NO: 223211 - DNA, 25 bp, Probe sequence
atcagatccctatttaggtgacgat

SEQ ID NO: 223212 - DNA, 25 bp, Probe sequence
agatgtgagctcagttgaagattct

SEQ ID NO: 223213 - DNA, 25 bp, Probe sequence
agctgttcagcctcaaaataatact

SEQ ID NO: 223214 - DNA, 25 bp, Probe sequence
actgaagaagttggtgctgaggaag

SEQ ID NO: 223215 - DNA, 25 bp, Probe sequence
acagcagctttgttatgtctgataa

SEQ ID NO: 223216 - DNA, 25 bp, Probe sequence
aaatggtcgcaaaattgttcataat

SEQ ID NO: 223217 - DNA, 25 bp, Probe sequence
aaaccaggtgatacttctatacaag

SEQ ID NO: 223218 - DNA, 25 bp, Probe sequence
aaaattgtcggctacgatactaacg

SEQ ID NO: 223219 - DNA, 25 bp, Probe sequence
aaaagcagatcgtgagtttgatgaa

SEQ ID NO: 223220 - DNA, 25 bp, Probe sequence
aatgtaaatcaagctgttcagcctc

SEQ ID NO: 223221 - DNA, 25 bp, Probe sequence
aattcgcaaatgcagttgtgaaggt

SEQ ID NO: 223222 - DNA, 25 bp, Probe sequence
aattccctgatttgcaagtcgatga

SEQ ID NO: 223223 - DNA, 25 bp, Probe sequence
gctacgatactaacggattcccgat

SEQ ID NO: 223224 - DNA, 25 bp, Probe sequence
gcacctgatgacgaagatgaggcat

SEQ ID NO: 223225 - DNA, 25 bp, Probe sequence
gaatggaaaacacacctgcatatca

SEQ ID NO: 223226 - DNA, 25 bp, Probe sequence
gaaggtcaagaattccctgatttgc

SEQ ID NO: 223227 - DNA, 25 bp, Probe sequence
gaagtgtcttcatcagatccctatt

SEQ ID NO: 223228 - DNA, 25 bp, Probe sequence
gaagattctgacagcagctttgtta

SEQ ID NO: 223229 - DNA, 25 bp, Probe sequence
gaagaagcgaaatctggatcagaag

SEQ ID NO: 223230 - DNA, 25 bp, Probe sequence
gaaacatcaaaagtaccggctaatt

SEQ ID NO: 223231 - DNA, 25 bp, Probe sequence
gatgtagatcatgctggatttagat

SEQ ID NO: 223232 - DNA, 25 bp, Probe sequence
gatatttatgaatctcctgaagaaa

SEQ ID NO: 223233 - DNA, 25 bp, Probe sequence
gtaccggctaattttgtcaaattga

SEQ ID NO: 223234 - DNA, 25 bp, Probe sequence
gtcttcatcagatccctatttaggt

SEQ ID NO: 223235 - DNA, 25 bp, Probe sequence
ggtgaattcagctttgatgtagatc

SEQ ID NO: 223236 - DNA, 25 bp, Probe sequence
ggatcagaaggaatctggatgccta

SEQ ID NO: 223237 - DNA, 25 bp, Probe sequence
ggagaaacactaaacttcacagtag

SEQ ID NO: 223238 - DNA, 25 bp, Probe sequence
tgagacaaatgctaatggtggtcca

SEQ ID NO: 223239 - DNA, 25 bp, Probe sequence
tctatacaaggaacaactttaccaa

SEQ ID NO: 223240 - DNA, 25 bp, Probe sequence
tacctggttttatccattaggtgaa

SEQ ID NO: 223241 - DNA, 25 bp, Probe sequence
tattaaaggccatacctctgtaaaa

SEQ ID NO: 223242 - DNA, 25 bp, Probe sequence
attagacgtttcactgtagggacag

SEQ ID NO: 223243 - DNA, 25 bp, Probe sequence
atagcgactctgatgcggacagcga

SEQ ID NO: 223244 - DNA, 25 bp, Probe sequence
acgcacaaccaagagcaacattccg

SEQ ID NO: 223245 - DNA, 25 bp, Probe sequence
aacaggagcagatggctggggcttc

SEQ ID NO: 223246 - DNA, 25 bp, Probe sequence
aacaccaccagtagacgatgtcaca

SEQ ID NO: 223247 - DNA, 25 bp, Probe sequence
caacattccgttcagtaagcagcaa

SEQ ID NO: 223248 - DNA, 25 bp, Probe sequence
ccaggctcacctgatgttattgtac

SEQ ID NO: 223249 - DNA, 25 bp, Probe sequence
gctggggcttcatgtttactcaagg

SEQ ID NO: 223250 - DNA, 25 bp, Probe sequence
gcgattctgatgcagacagcgactc

SEQ ID NO: 223251 - DNA, 25 bp, Probe sequence
gcgactctgatgcggacagcgattc

SEQ ID NO: 223252 - DNA, 25 bp, Probe sequence
gctcgattttcttccaaacaagctt

SEQ ID NO: 223253 - DNA, 25 bp, Probe sequence
gaaggcacgctaactgcattcaata

SEQ ID NO: 223254 - DNA, 25 bp, Probe sequence
gactctgatgcggacagcgactcag

SEQ ID NO: 223255 - DNA, 25 bp, Probe sequence
gactctgatgcggacagcgattcag

SEQ ID NO: 223256 - DNA, 25 bp, Probe sequence
gagctactttaattttcggtgttgc

SEQ ID NO: 223257 - DNA, 25 bp, Probe sequence
gagcagctgcacaagacacagttac

SEQ ID NO: 223258 - DNA, 25 bp, Probe sequence
gatgattcagatgcggacagcgatt

SEQ ID NO: 223259 - DNA, 25 bp, Probe sequence
gatagcgactctgatgcggacagcg

SEQ ID NO: 223260 - DNA, 25 bp, Probe sequence
gtagtaacacctccggttgacgatg

SEQ ID NO: 223261 - DNA, 25 bp, Probe sequence
gtaggcgaaggcgaaccaacaacgg

SEQ ID NO: 223262 - DNA, 25 bp, Probe sequence
gtagggacagcttcgattttagtag

SEQ ID NO: 223263 - DNA, 25 bp, Probe sequence
gtaacaattacaacgcctcaagctg

SEQ ID NO: 223264 - DNA, 25 bp, Probe sequence
gtaacacctccggttgacgatgtca

SEQ ID NO: 223265 - DNA, 25 bp, Probe sequence
gtaacgaaacaaccaattcctcata

SEQ ID NO: 223266 - DNA, 25 bp, Probe sequence
ggaatggccaagacttcttaaacca

SEQ ID NO: 223267 - DNA, 25 bp, Probe sequence
ggaactggtaactttactgcgcatg

SEQ ID NO: 223268 - DNA, 25 bp, Probe sequence
tggtcaattccatggccaaagatta

SEQ ID NO: 223269 - DNA, 25 bp, Probe sequence
tgatccaactctagaaccaggctca

SEQ ID NO: 223270 - DNA, 25 bp, Probe sequence
tgcacctgaaattattcctcatggt

SEQ ID NO: 223271 - DNA, 25 bp, Probe sequence
tagcgactctgatgcggacagcgat

SEQ ID NO: 223272 - DNA, 25 bp, Probe sequence
tagcgactctgatgcggacagcgac

SEQ ID NO: 223273 - DNA, 25 bp, Probe sequence
tattcttagttggcagacgtcgtaa

SEQ ID NO: 223274 - DNA, 25 bp, Probe sequence
ttatttggttcactattcgctgcgc

SEQ ID NO: 223275 - DNA, 25 bp, Probe sequence
ttcgctgcgcttggaggattattct

SEQ ID NO: 223276 - DNA, 25 bp, Probe sequence
attaacagaaatactagaacggcta

SEQ ID NO: 223277 - DNA, 25 bp, Probe sequence
attatattgttagagaagttgttga

SEQ ID NO: 223278 - DNA, 25 bp, Probe sequence
atattgttagagaagttgttgaaga

SEQ ID NO: 223279 - DNA, 25 bp, Probe sequence
atagcgatggaatgacacacaatca

SEQ ID NO: 223280 - DNA, 25 bp, Probe sequence
atggaatgacacacaatcatacaaa

SEQ ID NO: 223281 - DNA, 25 bp, Probe sequence
agttgttgaagatagcgatggaatg

SEQ ID NO: 223282 - DNA, 25 bp, Probe sequence
agatagcgatggaatgacacacaat

SEQ ID NO: 223283 - DNA, 25 bp, Probe sequence
agcgatggaatgacacacaatcata

SEQ ID NO: 223284 - DNA, 25 bp, Probe sequence
aacagaaatactagaacggctaaag

SEQ ID NO: 223285 - DNA, 25 bp, Probe sequence
aagatagcgatggaatgacacacaa

SEQ ID NO: 223286 - DNA, 25 bp, Probe sequence
cagaaatactagaacggctaaaggg

SEQ ID NO: 223287 - DNA, 25 bp, Probe sequence
ctataaaaaggattggattgtgcat

SEQ ID NO: 223288 - DNA, 25 bp, Probe sequence
cgatggaatgacacacaatcataca

SEQ ID NO: 223289 - DNA, 25 bp, Probe sequence
gcgatggaatgacacacaatcatac

SEQ ID NO: 223290 - DNA, 25 bp, Probe sequence
gaatgacacacaatcatacaaaaag

SEQ ID NO: 223291 - DNA, 25 bp, Probe sequence
gaagtctataaaaaggattggattg

SEQ ID NO: 223292 - DNA, 25 bp, Probe sequence
gaagatagcgatggaatgacacaca

SEQ ID NO: 223293 - DNA, 25 bp, Probe sequence
gatggaatgacacacaatcatacaa

SEQ ID NO: 223294 - DNA, 25 bp, Probe sequence
gatctgaaatgaaaatccaattaaa

SEQ ID NO: 223295 - DNA, 25 bp, Probe sequence
gatagcgatggaatgacacacaatc

SEQ ID NO: 223296 - DNA, 25 bp, Probe sequence
gttgttgaagatagcgatggaatga

SEQ ID NO: 223297 - DNA, 25 bp, Probe sequence
gttgaagatagcgatggaatgacac

SEQ ID NO: 223298 - DNA, 25 bp, Probe sequence
gtctataaaaaggattggattgtgc

SEQ ID NO: 223299 - DNA, 25 bp, Probe sequence
ggaaaactataaagaggacgaagtg

SEQ ID NO: 223300 - DNA, 25 bp, Probe sequence
ggaatgacacacaatcatacaaaaa

SEQ ID NO: 223301 - DNA, 25 bp, Probe sequence
tggaatgacacacaatcatacaaaa

SEQ ID NO: 223302 - DNA, 25 bp, Probe sequence
tgaagatagcgatggaatgacacac

SEQ ID NO: 223303 - DNA, 25 bp, Probe sequence
taaaaggagaaaatctggaatctag

SEQ ID NO: 223304 - DNA, 25 bp, Probe sequence
tagcgatggaatgacacacaatcat

SEQ ID NO: 223305 - DNA, 25 bp, Probe sequence
tagatctgaaatgaaaatccaatta

SEQ ID NO: 223306 - DNA, 25 bp, Probe sequence
ttgttgaagatagcgatggaatgac

SEQ ID NO: 223307 - DNA, 25 bp, Probe sequence
tattgttagagaagttgttgaagat

SEQ ID NO: 223308 - DNA, 25 bp, Probe sequence
ttaacagaaatactagaacggctaa

SEQ ID NO: 223309 - DNA, 25 bp, Probe sequence
ttgaagatagcgatggaatgacaca

SEQ ID NO: 223310 - DNA, 25 bp, Probe sequence
attaatttcaacccaagtgaggata

SEQ ID NO: 223311 - DNA, 25 bp, Probe sequence
ataccctacgaaaaatctagaagat

SEQ ID NO: 223312 - DNA, 25 bp, Probe sequence
ataagatcactggagattcgaaaga

SEQ ID NO: 223313 - DNA, 25 bp, Probe sequence
acattagatgtataccctacgaaaa

SEQ ID NO: 223314 - DNA, 25 bp, Probe sequence
atgtataccctacgaaaaatctaga

SEQ ID NO: 223315 - DNA, 25 bp, Probe sequence
agtattaatttcaacccaagtgagg

SEQ ID NO: 223316 - DNA, 25 bp, Probe sequence
agaaacacagatcaaaaagagcttt

SEQ ID NO: 223317 - DNA, 25 bp, Probe sequence
aaacattagatgtataccctacgaa

SEQ ID NO: 223318 - DNA, 25 bp, Probe sequence
aacattagatgtataccctacgaaa

SEQ ID NO: 223319 - DNA, 25 bp, Probe sequence
aagatcactggagattcgaaagaaa

SEQ ID NO: 223320 - DNA, 25 bp, Probe sequence
aatcgtattaatggcaggatgcgaa

SEQ ID NO: 223321 - DNA, 25 bp, Probe sequence
caaagggaagtgggttattagatct

SEQ ID NO: 223322 - DNA, 25 bp, Probe sequence
cattagatgtataccctacgaaaaa

SEQ ID NO: 223323 - DNA, 25 bp, Probe sequence
gaagtgttttcagaaattatacata

SEQ ID NO: 223324 - DNA, 25 bp, Probe sequence
gaaaacattagatgtataccctacg

SEQ ID NO: 223325 - DNA, 25 bp, Probe sequence
gatgtataccctacgaaaaatctag

SEQ ID NO: 223326 - DNA, 25 bp, Probe sequence
gattataatgtagaacaactacgta

SEQ ID NO: 223327 - DNA, 25 bp, Probe sequence
gtataccctacgaaaaatctagaag

SEQ ID NO: 223328 - DNA, 25 bp, Probe sequence
gtattaatttcaacccaagtgagga

SEQ ID NO: 223329 - DNA, 25 bp, Probe sequence
gtattaatggcaggatgcgaaagta

SEQ ID NO: 223330 - DNA, 25 bp, Probe sequence
gtaataagatcactggagattcgaa

SEQ ID NO: 223331 - DNA, 25 bp, Probe sequence
gtgttttcagaaattatacatattt

SEQ ID NO: 223332 - DNA, 25 bp, Probe sequence
ggagattcgaaagaaacacagatca

SEQ ID NO: 223333 - DNA, 25 bp, Probe sequence
ggatgcgaaagtaataagatcactg

SEQ ID NO: 223334 - DNA, 25 bp, Probe sequence
tggcaggatgcgaaagtaataagat

SEQ ID NO: 223335 - DNA, 25 bp, Probe sequence
taatataacgacgaaaaaagcgcct

SEQ ID NO: 223336 - DNA, 25 bp, Probe sequence
taatttcaacccaagtgaggataaa

SEQ ID NO: 223337 - DNA, 25 bp, Probe sequence
taagcgatataatataacgacgaaa

SEQ ID NO: 223338 - DNA, 25 bp, Probe sequence
tagtattaatttcaacccaagtgag

SEQ ID NO: 223339 - DNA, 25 bp, Probe sequence
tattattgaagggttcaggtaattt

SEQ ID NO: 223340 - DNA, 25 bp, Probe sequence
tattaatttcaacccaagtgaggat

SEQ ID NO: 223341 - DNA, 25 bp, Probe sequence
ttagatgtataccctacgaaaaatc

SEQ ID NO: 223342 - DNA, 25 bp, Probe sequence
ttaatttcaacccaagtgaggataa

SEQ ID NO: 223343 - DNA, 25 bp, Probe sequence
ttaatcgtattaatggcaggatgcg

SEQ ID NO: 223344 - DNA, 25 bp, Probe sequence
atataattgttatggttttgagtgt

SEQ ID NO: 223345 - DNA, 25 bp, Probe sequence
atcctactgaaaatctagaagactt

SEQ ID NO: 223346 - DNA, 25 bp, Probe sequence
agacatgtatcctactgaaaatcta

SEQ ID NO: 223347 - DNA, 25 bp, Probe sequence
acgttagacatgtatcctactgaaa

SEQ ID NO: 223348 - DNA, 25 bp, Probe sequence
actgaaaatctagaagacttttatg

SEQ ID NO: 223349 - DNA, 25 bp, Probe sequence
acatgtatcctactgaaaatctaga

SEQ ID NO: 223350 - DNA, 25 bp, Probe sequence
acaaagagggatatcgagatggaaa

SEQ ID NO: 223351 - DNA, 25 bp, Probe sequence
aaacgttagacatgtatcctactga

SEQ ID NO: 223352 - DNA, 25 bp, Probe sequence
aaaaacgttagacatgtatcctact

SEQ ID NO: 223353 - DNA, 25 bp, Probe sequence
aaaacgttagacatgtatcctactg

SEQ ID NO: 223354 - DNA, 25 bp, Probe sequence
aaaacagtgattacaatgtagaaca

SEQ ID NO: 223355 - DNA, 25 bp, Probe sequence
aacgttagacatgtatcctactgaa

SEQ ID NO: 223356 - DNA, 25 bp, Probe sequence
caaaaacgttagacatgtatcctac

SEQ ID NO: 223357 - DNA, 25 bp, Probe sequence
catgtatcctactgaaaatctagaa

SEQ ID NO: 223358 - DNA, 25 bp, Probe sequence
cgatacttcagaaaaatcaaaagga

SEQ ID NO: 223359 - DNA, 25 bp, Probe sequence
cgttagacatgtatcctactgaaaa

SEQ ID NO: 223360 - DNA, 25 bp, Probe sequence
gcgacaaaggtacttgggttattag

SEQ ID NO: 223361 - DNA, 25 bp, Probe sequence
gcaaaaacgttagacatgtatccta

SEQ ID NO: 223362 - DNA, 25 bp, Probe sequence
gaagacttttatgacaaagagggat

SEQ ID NO: 223363 - DNA, 25 bp, Probe sequence
gaaaaacagtgattacaatgtagaa

SEQ ID NO: 223364 - DNA, 25 bp, Probe sequence
gacatgtatcctactgaaaatctag

SEQ ID NO: 223365 - DNA, 25 bp, Probe sequence
gacttttatgacaaagagggatatc

SEQ ID NO: 223366 - DNA, 25 bp, Probe sequence
gagttttactttatataattgttat

SEQ ID NO: 223367 - DNA, 25 bp, Probe sequence
gagggatatcgagatggaaaattta

SEQ ID NO: 223368 - DNA, 25 bp, Probe sequence
gttagacatgtatcctactgaaaat

SEQ ID NO: 223369 - DNA, 25 bp, Probe sequence
gttttactttatataattgttatgg

SEQ ID NO: 223370 - DNA, 25 bp, Probe sequence
gtatcctactgaaaatctagaagac

SEQ ID NO: 223371 - DNA, 25 bp, Probe sequence
tgtatcctactgaaaatctagaaga

SEQ ID NO: 223372 - DNA, 25 bp, Probe sequence
tgcaaaaacgttagacatgtatcct

SEQ ID NO: 223373 - DNA, 25 bp, Probe sequence
tcctactgaaaatctagaagacttt

SEQ ID NO: 223374 - DNA, 25 bp, Probe sequence
tagacatgtatcctactgaaaatct

SEQ ID NO: 223375 - DNA, 25 bp, Probe sequence
tatcctactgaaaatctagaagact

SEQ ID NO: 223376 - DNA, 25 bp, Probe sequence
ttagacatgtatcctactgaaaatc

SEQ ID NO: 223377 - DNA, 25 bp, Probe sequence
ttgcaaaaacgttagacatgtatcc

SEQ ID NO: 223378 - DNA, 25 bp, Probe sequence
attcaaataatgctatctctaaatt

SEQ ID NO: 223379 - DNA, 25 bp, Probe sequence
agtgcttgcatcacaaataggtgga

SEQ ID NO: 223380 - DNA, 25 bp, Probe sequence
acaactttcaacgatagggtcttct

SEQ ID NO: 223381 - DNA, 25 bp, Probe sequence
acaattgcgcagtcattcagtcaac

SEQ ID NO: 223382 - DNA, 25 bp, Probe sequence
aaatattatattctcctgcatctga

SEQ ID NO: 223383 - DNA, 25 bp, Probe sequence
aaatggaaggctttctgaccgaaga

SEQ ID NO: 223384 - DNA, 25 bp, Probe sequence
aacagctttaacaattgcgcagtca

SEQ ID NO: 223385 - DNA, 25 bp, Probe sequence
aatgatgcattgacagaaaatctga

SEQ ID NO: 223386 - DNA, 25 bp, Probe sequence
aatgctttagatgaaggtcaagtga

SEQ ID NO: 223387 - DNA, 25 bp, Probe sequence
aatataagcattatgtttttttcgg

SEQ ID NO: 223388 - DNA, 25 bp, Probe sequence
gctgtaggtgaagatttgagtgtaa

SEQ ID NO: 223389 - DNA, 25 bp, Probe sequence
gctatctctaaattagctagtatag

SEQ ID NO: 223390 - DNA, 25 bp, Probe sequence
gaatcctaattccccagatggaaaa

SEQ ID NO: 223391 - DNA, 25 bp, Probe sequence
gaatgagtaatggtattccgaacat

SEQ ID NO: 223392 - DNA, 25 bp, Probe sequence
gaaggctttctgaccgaagaagaac

SEQ ID NO: 223393 - DNA, 25 bp, Probe sequence
gaacctgaacaaatgatatctgcaa

SEQ ID NO: 223394 - DNA, 25 bp, Probe sequence
gagagttagactcagtattaatgaa

SEQ ID NO: 223395 - DNA, 25 bp, Probe sequence
gataaagatcaagtgcttgcatcac

SEQ ID NO: 223396 - DNA, 25 bp, Probe sequence
gtaatattactaggtttgttgcaga

SEQ ID NO: 223397 - DNA, 25 bp, Probe sequence
gggaagacgctcaaaaagctggaaa

SEQ ID NO: 223398 - DNA, 25 bp, Probe sequence
ggaggaggattatcttcttcgcagc

SEQ ID NO: 223399 - DNA, 25 bp, Probe sequence
ggtattccgaacattgtggtttata

SEQ ID NO: 223400 - DNA, 25 bp, Probe sequence
tggagtaacaacttctgctttttta

SEQ ID NO: 223401 - DNA, 25 bp, Probe sequence
tggtttataatccagctcctatttc

SEQ ID NO: 223402 - DNA, 25 bp, Probe sequence
tgcgcagtcattcagtcaactgata

SEQ ID NO: 223403 - DNA, 25 bp, Probe sequence
tcagtcaactgatagacgatgaaat

SEQ ID NO: 223404 - DNA, 25 bp, Probe sequence
tagtttgaatcctaattccccagat

SEQ ID NO: 223405 - DNA, 25 bp, Probe sequence
taggtggaagagatgcggtagttct

SEQ ID NO: 223406 - DNA, 25 bp, Probe sequence
tagggtcttctgtatcaaattatat

SEQ ID NO: 223407 - DNA, 25 bp, Probe sequence
tataatccagctcctatttctataa

SEQ ID NO: 223408 - DNA, 25 bp, Probe sequence
ttatattctcctgcatctgatcaaa

SEQ ID NO: 223409 - DNA, 25 bp, Probe sequence
ttaccaatgctttggaaacagttaa

SEQ ID NO: 223410 - DNA, 25 bp, Probe sequence
ttctcctgcatctgatcaaaactat

SEQ ID NO: 223411 - DNA, 25 bp, Probe sequence
ttcccttctaatcttgaatatgttg

SEQ ID NO: 223412 - DNA, 25 bp, Probe sequence
atttcgaaagcgtcatacgaagttg

SEQ ID NO: 223413 - DNA, 25 bp, Probe sequence
atactgagtctacaagtgctatttc

SEQ ID NO: 223414 - DNA, 25 bp, Probe sequence
atgactgggactaatttacaagacg

SEQ ID NO: 223415 - DNA, 25 bp, Probe sequence
atgctaataataatggtctatcaaa

SEQ ID NO: 223416 - DNA, 25 bp, Probe sequence
atggtctatcaaaaagagacgtgat

SEQ ID NO: 223417 - DNA, 25 bp, Probe sequence
agtgctatttcgaaagcgtcatacg

SEQ ID NO: 223418 - DNA, 25 bp, Probe sequence
actgagtctacaagtgctatttcga

SEQ ID NO: 223419 - DNA, 25 bp, Probe sequence
acaagtgctatttcgaaagcgtcat

SEQ ID NO: 223420 - DNA, 25 bp, Probe sequence
aaatactgagtctacaagtgctatt

SEQ ID NO: 223421 - DNA, 25 bp, Probe sequence
aagcgtcatacgaagttgagaatgc

SEQ ID NO: 223422 - DNA, 25 bp, Probe sequence
aagtgctatttcgaaagcgtcatac

SEQ ID NO: 223423 - DNA, 25 bp, Probe sequence
aatactgagtctacaagtgctattt

SEQ ID NO: 223424 - DNA, 25 bp, Probe sequence
caaaatactgagtctacaagtgcta

SEQ ID NO: 223425 - DNA, 25 bp, Probe sequence
ctacaagtgctatttcgaaagcgtc

SEQ ID NO: 223426 - DNA, 25 bp, Probe sequence
ctgagtctacaagtgctatttcgaa

SEQ ID NO: 223427 - DNA, 25 bp, Probe sequence
ccagatggaaaacgtttattagaat

SEQ ID NO: 223428 - DNA, 25 bp, Probe sequence
gcgtcatacgaagttgagaatgcta

SEQ ID NO: 223429 - DNA, 25 bp, Probe sequence
gctatttcgaaagcgtcatacgaag

SEQ ID NO: 223430 - DNA, 25 bp, Probe sequence
gcaattaatcaaaatactgagtcta

SEQ ID NO: 223431 - DNA, 25 bp, Probe sequence
gaatgctaataataatggtctatca

SEQ ID NO: 223432 - DNA, 25 bp, Probe sequence
gaaagcgtcatacgaagttgagaat

SEQ ID NO: 223433 - DNA, 25 bp, Probe sequence
gactaatttacaagacgaagccttt

SEQ ID NO: 223434 - DNA, 25 bp, Probe sequence
gactgggactaatttacaagacgaa

SEQ ID NO: 223435 - DNA, 25 bp, Probe sequence
gagacgtgattaatcaatttaatga

SEQ ID NO: 223436 - DNA, 25 bp, Probe sequence
gagtctacaagtgctatttcgaaag

SEQ ID NO: 223437 - DNA, 25 bp, Probe sequence
gatggaaaacgtttattagaattat

SEQ ID NO: 223438 - DNA, 25 bp, Probe sequence
gtcatacgaagttgagaatgctaat

SEQ ID NO: 223439 - DNA, 25 bp, Probe sequence
gtctacaagtgctatttcgaaagcg

SEQ ID NO: 223440 - DNA, 25 bp, Probe sequence
gtgctatttcgaaagcgtcatacga

SEQ ID NO: 223441 - DNA, 25 bp, Probe sequence
gggactaatttacaagacgaagcct

SEQ ID NO: 223442 - DNA, 25 bp, Probe sequence
tgagtctacaagtgctatttcgaaa

SEQ ID NO: 223443 - DNA, 25 bp, Probe sequence
tcgaaagcgtcatacgaagttgaga

SEQ ID NO: 223444 - DNA, 25 bp, Probe sequence
tacaagtgctatttcgaaagcgtca

SEQ ID NO: 223445 - DNA, 25 bp, Probe sequence
tactgagtctacaagtgctatttcg

SEQ ID NO: 223446 - DNA, 25 bp, Probe sequence
atcataatttgagtaagatggcaat

SEQ ID NO: 223447 - DNA, 25 bp, Probe sequence
atggcgtatgaaattgaaaatgcta

SEQ ID NO: 223448 - DNA, 25 bp, Probe sequence
agagccaatatgatgactgcaaatg

SEQ ID NO: 223449 - DNA, 25 bp, Probe sequence
agaaaggggcatgttcccttctaat

SEQ ID NO: 223450 - DNA, 25 bp, Probe sequence
agaagcgcagaaaggggcatgttcc

SEQ ID NO: 223451 - DNA, 25 bp, Probe sequence
agcgcagaaaggggcatgttccctt

SEQ ID NO: 223452 - DNA, 25 bp, Probe sequence
acagttagatagaagcgcagaaagg

SEQ ID NO: 223453 - DNA, 25 bp, Probe sequence
aaaggggcatgttcccttctaatct

SEQ ID NO: 223454 - DNA, 25 bp, Probe sequence
cagaaaggggcatgttcccttctaa

SEQ ID NO: 223455 - DNA, 25 bp, Probe sequence
aagcgcagaaaggggcatgttccct

SEQ ID NO: 223456 - DNA, 25 bp, Probe sequence
aaggggcatgttcccttctaatctt

SEQ ID NO: 223457 - DNA, 25 bp, Probe sequence
aaggaacagttagatagaagcgcag

SEQ ID NO: 223458 - DNA, 25 bp, Probe sequence
aatgaagttcttaatgctttagatg

SEQ ID NO: 223459 - DNA, 25 bp, Probe sequence
cgcagaaaggggcatgttcccttct

SEQ ID NO: 223460 - DNA, 25 bp, Probe sequence
cagaaagttttagacagtttaacag

SEQ ID NO: 223461 - DNA, 25 bp, Probe sequence
gcagaaaggggcatgttcccttcta

SEQ ID NO: 223462 - DNA, 25 bp, Probe sequence
gcgcagaaaggggcatgttcccttc

SEQ ID NO: 223463 - DNA, 25 bp, Probe sequence
gcagcagaaagttttagacagttta

SEQ ID NO: 223464 - DNA, 25 bp, Probe sequence
gaaaggggcatgttcccttctaatc

SEQ ID NO: 223465 - DNA, 25 bp, Probe sequence
gaagcgcagaaaggggcatgttccc

SEQ ID NO: 223466 - DNA, 25 bp, Probe sequence
gaacagttagatagaagcgcagaaa

SEQ ID NO: 223467 - DNA, 25 bp, Probe sequence
gaaaatgctaataatcataatttga

SEQ ID NO: 223468 - DNA, 25 bp, Probe sequence
gagccaatatgatgactgcaaatgg

SEQ ID NO: 223469 - DNA, 25 bp, Probe sequence
gagtgtaaatgaagttcttaatgct

SEQ ID NO: 223470 - DNA, 25 bp, Probe sequence
gatagaagcgcagaaaggggcatgt

SEQ ID NO: 223471 - DNA, 25 bp, Probe sequence
gtaaatgaagttcttaatgctttag

SEQ ID NO: 223472 - DNA, 25 bp, Probe sequence
gtaagatggcaataaaggaacagtt

SEQ ID NO: 223473 - DNA, 25 bp, Probe sequence
gtgtaaatgaagttcttaatgcttt

SEQ ID NO: 223474 - DNA, 25 bp, Probe sequence
ggaacagttagatagaagcgcagaa

SEQ ID NO: 223475 - DNA, 25 bp, Probe sequence
tgaagttcttaatgctttagatgaa

SEQ ID NO: 223476 - DNA, 25 bp, Probe sequence
tcttcgcagcagaaagttttagaca

SEQ ID NO: 223477 - DNA, 25 bp, Probe sequence
tagagccaatatgatgactgcaaat

SEQ ID NO: 223478 - DNA, 25 bp, Probe sequence
ttagagccaatatgatgactgcaaa

SEQ ID NO: 223479 - DNA, 25 bp, Probe sequence
ttcgcagcagaaagttttagacagt

SEQ ID NO: 223480 - DNA, 25 bp, Probe sequence
atgaacttaggcatagaactcgaaa

SEQ ID NO: 223481 - DNA, 25 bp, Probe sequence
atgaacgtagttatgatgtttttca

SEQ ID NO: 223482 - DNA, 25 bp, Probe sequence
agttatgatgtttttcaatatttga

SEQ ID NO: 223483 - DNA, 25 bp, Probe sequence
agaagcgtatgagcaagaaatcaat

SEQ ID NO: 223484 - DNA, 25 bp, Probe sequence
acgtagttatgatgtttttcaatat

SEQ ID NO: 223485 - DNA, 25 bp, Probe sequence
acttaggcatagaactcgaaaagaa

SEQ ID NO: 223486 - DNA, 25 bp, Probe sequence
aaatgaacttaggcatagaactcga

SEQ ID NO: 223487 - DNA, 25 bp, Probe sequence
aaatgaacgtagttatgatgttttt

SEQ ID NO: 223488 - DNA, 25 bp, Probe sequence
aaaaacgtatagagaatgaactgca

SEQ ID NO: 223489 - DNA, 25 bp, Probe sequence
aaaagtcttatgaaaagcagttaga

SEQ ID NO: 223490 - DNA, 25 bp, Probe sequence
aacttaggcatagaactcgaaaaga

SEQ ID NO: 223491 - DNA, 25 bp, Probe sequence
aacgtagttatgatgtttttcaata

SEQ ID NO: 223492 - DNA, 25 bp, Probe sequence
aagcgtatgagcaagaaatcaatga

SEQ ID NO: 223493 - DNA, 25 bp, Probe sequence
aagtcttatgaaaagcagttagata

SEQ ID NO: 223494 - DNA, 25 bp, Probe sequence
aatgaacttaggcatagaactcgaa

SEQ ID NO: 223495 - DNA, 25 bp, Probe sequence
aatgaacgtagttatgatgtttttc

SEQ ID NO: 223496 - DNA, 25 bp, Probe sequence
cgtagttatgatgtttttcaatatt

SEQ ID NO: 223497 - DNA, 25 bp, Probe sequence
gcgtatgagcaagaaatcaatgaga

SEQ ID NO: 223498 - DNA, 25 bp, Probe sequence
gaagcgtatgagcaagaaatcaatg

SEQ ID NO: 223499 - DNA, 25 bp, Probe sequence
gaacgtagttatgatgtttttcaat

SEQ ID NO: 223500 - DNA, 25 bp, Probe sequence
gaacttaggcatagaactcgaaaag

SEQ ID NO: 223501 - DNA, 25 bp, Probe sequence
gaaaatgaacgtagttatgatgttt

SEQ ID NO: 223502 - DNA, 25 bp, Probe sequence
gaaatatagaagcgtatgagcaaga

SEQ ID NO: 223503 - DNA, 25 bp, Probe sequence
gagaaatatagaagcgtatgagcaa

SEQ ID NO: 223504 - DNA, 25 bp, Probe sequence
gttatgatgtttttcaatatttgaa

SEQ ID NO: 223505 - DNA, 25 bp, Probe sequence
gtatgagcaagaaatcaatgagata

SEQ ID NO: 223506 - DNA, 25 bp, Probe sequence
gtagttatgatgtttttcaatattt

SEQ ID NO: 223507 - DNA, 25 bp, Probe sequence
ggaaaatgacgagaaatatagaagc

SEQ ID NO: 223508 - DNA, 25 bp, Probe sequence
tgaacttaggcatagaactcgaaaa

SEQ ID NO: 223509 - DNA, 25 bp, Probe sequence
tgaacgtagttatgatgtttttcaa

SEQ ID NO: 223510 - DNA, 25 bp, Probe sequence
tagttatgatgtttttcaatatttg

SEQ ID NO: 223511 - DNA, 25 bp, Probe sequence
taggcatagaactcgaaaagaaaat

SEQ ID NO: 223512 - DNA, 25 bp, Probe sequence
tatagaagcgtatgagcaagaaatc

SEQ ID NO: 223513 - DNA, 25 bp, Probe sequence
ttaggcatagaactcgaaaagaaaa

SEQ ID NO: 223514 - DNA, 25 bp, Probe sequence
atatcgataaagatcttgtcgcaga

SEQ ID NO: 223515 - DNA, 25 bp, Probe sequence
atggctaaaattccagttacggtat

SEQ ID NO: 223516 - DNA, 25 bp, Probe sequence
aggtggcatcgatcaaattgttatt

SEQ ID NO: 223517 - DNA, 25 bp, Probe sequence
aagcagggtcatcttgcaatattca

SEQ ID NO: 223518 - DNA, 25 bp, Probe sequence
aatacgcagcgttttgattttgaaa

SEQ ID NO: 223519 - DNA, 25 bp, Probe sequence
catgcttagtcaatgcgcaagaaat

SEQ ID NO: 223520 - DNA, 25 bp, Probe sequence
ccagttacatattgggtggctagta

SEQ ID NO: 223521 - DNA, 25 bp, Probe sequence
gccgtttagatacaatggttacagt

SEQ ID NO: 223522 - DNA, 25 bp, Probe sequence
gctgatttattaattgaccaagttg

SEQ ID NO: 223523 - DNA, 25 bp, Probe sequence
gcacaaactttctcatatattgatg

SEQ ID NO: 223524 - DNA, 25 bp, Probe sequence
gaacttggcattgatcttacagcga

SEQ ID NO: 223525 - DNA, 25 bp, Probe sequence
gaaaaagcgagcgagtcagcaggat

SEQ ID NO: 223526 - DNA, 25 bp, Probe sequence
gaaattgatgcagattggcaacaat

SEQ ID NO: 223527 - DNA, 25 bp, Probe sequence
gagcgagtcagcaggatggatcaaa

SEQ ID NO: 223528 - DNA, 25 bp, Probe sequence
gaccaagttgaattttgtgatgtat

SEQ ID NO: 223529 - DNA, 25 bp, Probe sequence
gagtcaacagggatttcagagccag

SEQ ID NO: 223530 - DNA, 25 bp, Probe sequence
gatcttacagcgatttgccgtttag

SEQ ID NO: 223531 - DNA, 25 bp, Probe sequence
gtttattatctcaagcagggtcatc

SEQ ID NO: 223532 - DNA, 25 bp, Probe sequence
gtagcatgtttattatctcaagcag

SEQ ID NO: 223533 - DNA, 25 bp, Probe sequence
gtacctgttgcacaaactttctcat

SEQ ID NO: 223534 - DNA, 25 bp, Probe sequence
gtcgcagatggtgggggactatcgc

SEQ ID NO: 223535 - DNA, 25 bp, Probe sequence
gtcgcagctgaatgggatccagaat

SEQ ID NO: 223536 - DNA, 25 bp, Probe sequence
gggatccagaatatggcgatcgtca

SEQ ID NO: 223537 - DNA, 25 bp, Probe sequence
ggttgtatctgttgtacacttagag

SEQ ID NO: 223538 - DNA, 25 bp, Probe sequence
ggcaacaatttgaagatccatatca

SEQ ID NO: 223539 - DNA, 25 bp, Probe sequence
tggcgatcgtcatacacaatttgtc

SEQ ID NO: 223540 - DNA, 25 bp, Probe sequence
tgatggatcgtgatcaaagcgttga

SEQ ID NO: 223541 - DNA, 25 bp, Probe sequence
tgacatcaactcagaagatttattg

SEQ ID NO: 223542 - DNA, 25 bp, Probe sequence
tcagagccagtacctgttgcacaaa

SEQ ID NO: 223543 - DNA, 25 bp, Probe sequence
taatgtcgttcgatcaaaaggtatc

SEQ ID NO: 223544 - DNA, 25 bp, Probe sequence
tacagcgatttgccgtttagataca

SEQ ID NO: 223545 - DNA, 25 bp, Probe sequence
tattaagtggttatttaggctcggg

SEQ ID NO: 223546 - DNA, 25 bp, Probe sequence
tattgggtggctagtatgtctgaag

SEQ ID NO: 223547 - DNA, 25 bp, Probe sequence
tttccatgctaaaaggttcaatgat

SEQ ID NO: 223548 - DNA, 25 bp, Probe sequence
attaacacttacggtcacacgagtg

SEQ ID NO: 223549 - DNA, 25 bp, Probe sequence
atcaatgtactattaacacttacgg

SEQ ID NO: 223550 - DNA, 25 bp, Probe sequence
atgtactattaacacttacggtcac

SEQ ID NO: 223551 - DNA, 25 bp, Probe sequence
acttacggtcacacgagtgtttcag

SEQ ID NO: 223552 - DNA, 25 bp, Probe sequence
acgagtgtttcagtctaaacgtgca

SEQ ID NO: 223553 - DNA, 25 bp, Probe sequence
acggtcacacgagtgtttcagtcta

SEQ ID NO: 223554 - DNA, 25 bp, Probe sequence
actattaacacttacggtcacacga

SEQ ID NO: 223555 - DNA, 25 bp, Probe sequence
aacacttacggtcacacgagtgttt

SEQ ID NO: 223556 - DNA, 25 bp, Probe sequence
aatgtactattaacacttacggtca

SEQ ID NO: 223557 - DNA, 25 bp, Probe sequence
aatgcagctatcaatgtactattaa

SEQ ID NO: 223558 - DNA, 25 bp, Probe sequence
caatgtactattaacacttacggtc

SEQ ID NO: 223559 - DNA, 25 bp, Probe sequence
cacacgagtgtttcagtctaaacgt

SEQ ID NO: 223560 - DNA, 25 bp, Probe sequence
cacttacggtcacacgagtgtttca

SEQ ID NO: 223561 - DNA, 25 bp, Probe sequence
ctattaacacttacggtcacacgag

SEQ ID NO: 223562 - DNA, 25 bp, Probe sequence
cggtcacacgagtgtttcagtctaa

SEQ ID NO: 223563 - DNA, 25 bp, Probe sequence
gcagctatcaatgtactattaacac

SEQ ID NO: 223564 - DNA, 25 bp, Probe sequence
gaagtaaatgcagctatcaatgtac

SEQ ID NO: 223565 - DNA, 25 bp, Probe sequence
gagtgtttcagtctaaacgtgcaac

SEQ ID NO: 223566 - DNA, 25 bp, Probe sequence
gagtgaagtaaatgcagctatcaat

SEQ ID NO: 223567 - DNA, 25 bp, Probe sequence
gtttcagtctaaacgtgcaacgcaa

SEQ ID NO: 223568 - DNA, 25 bp, Probe sequence
gtactattaacacttacggtcacac

SEQ ID NO: 223569 - DNA, 25 bp, Probe sequence
gtcacacgagtgtttcagtctaaac

SEQ ID NO: 223570 - DNA, 25 bp, Probe sequence
gtgtttcagtctaaacgtgcaacgc

SEQ ID NO: 223571 - DNA, 25 bp, Probe sequence
tgtactattaacacttacggtcaca

SEQ ID NO: 223572 - DNA, 25 bp, Probe sequence
tcagtctaaacgtgcaacgcaattc

SEQ ID NO: 223573 - DNA, 25 bp, Probe sequence
taacacttacggtcacacgagtgtt

SEQ ID NO: 223574 - DNA, 25 bp, Probe sequence
taaatgcagctatcaatgtactatt

SEQ ID NO: 223575 - DNA, 25 bp, Probe sequence
tactattaacacttacggtcacacg

SEQ ID NO: 223576 - DNA, 25 bp, Probe sequence
tacggtcacacgagtgtttcagtct

SEQ ID NO: 223577 - DNA, 25 bp, Probe sequence
ttacggtcacacgagtgtttcagtc

SEQ ID NO: 223578 - DNA, 25 bp, Probe sequence
tattaacacttacggtcacacgagt

SEQ ID NO: 223579 - DNA, 25 bp, Probe sequence
tttcagtctaaacgtgcaacgcaat

SEQ ID NO: 223580 - DNA, 25 bp, Probe sequence
ttaacacttacggtcacacgagtgt

SEQ ID NO: 223581 - DNA, 25 bp, Probe sequence
ttcagtctaaacgtgcaacgcaatt

SEQ ID NO: 223582 - DNA, 25 bp, Probe sequence
atttatacatactagtcatgccagt

SEQ ID NO: 223583 - DNA, 25 bp, Probe sequence
atttctgtattgttaggatcgggta

SEQ ID NO: 223584 - DNA, 25 bp, Probe sequence
atttgcagtcattggctttttcggt

SEQ ID NO: 223585 - DNA, 25 bp, Probe sequence
actttccattgttcactgcgattac

SEQ ID NO: 223586 - DNA, 25 bp, Probe sequence
aaatgggctttatgttagttcaatg

SEQ ID NO: 223587 - DNA, 25 bp, Probe sequence
aagactgatggcactctgctggggt

SEQ ID NO: 223588 - DNA, 25 bp, Probe sequence
aatattccaaaacaagcatctgcta

SEQ ID NO: 223589 - DNA, 25 bp, Probe sequence
caatcaggttctatcgtgaagcgat

SEQ ID NO: 223590 - DNA, 25 bp, Probe sequence
ctaactcgttttgcgccgatatttg

SEQ ID NO: 223591 - DNA, 25 bp, Probe sequence
gcttatggctggattgtcatgggac

SEQ ID NO: 223592 - DNA, 25 bp, Probe sequence
gcatctgctaaagacgcttatggct

SEQ ID NO: 223593 - DNA, 25 bp, Probe sequence
gcaggtggtgttattctaactcgtt

SEQ ID NO: 223594 - DNA, 25 bp, Probe sequence
gcaccaacgccagtatcggcaatta

SEQ ID NO: 223595 - DNA, 25 bp, Probe sequence
gaagtgttaagtgcactcattctag

SEQ ID NO: 223596 - DNA, 25 bp, Probe sequence
gaaagtgccacgtgagtctgcgaaa

SEQ ID NO: 223597 - DNA, 25 bp, Probe sequence
gacattactttccattgttcactgc

SEQ ID NO: 223598 - DNA, 25 bp, Probe sequence
gttattgcgcttatcattgcattga

SEQ ID NO: 223599 - DNA, 25 bp, Probe sequence
gttttcaattgctattttcactgtt

SEQ ID NO: 223600 - DNA, 25 bp, Probe sequence
gtttatcttggttattagctggctt

SEQ ID NO: 223601 - DNA, 25 bp, Probe sequence
gtttgcatctttagcatggatgtct

SEQ ID NO: 223602 - DNA, 25 bp, Probe sequence
gtactacttgtattagctgtcatga

SEQ ID NO: 223603 - DNA, 25 bp, Probe sequence
gtcatgccagtattatttgcagtca

SEQ ID NO: 223604 - DNA, 25 bp, Probe sequence
gtcatgggacgtgtattagctatta

SEQ ID NO: 223605 - DNA, 25 bp, Probe sequence
gtggttggcttgcattcgttggagc

SEQ ID NO: 223606 - DNA, 25 bp, Probe sequence
gtggcttgttgtttttagcaccagt

SEQ ID NO: 223607 - DNA, 25 bp, Probe sequence
ggtgatcatcattatagacattact

SEQ ID NO: 223608 - DNA, 25 bp, Probe sequence
ggtcattacttgtatcttggaatca

SEQ ID NO: 223609 - DNA, 25 bp, Probe sequence
ggtcaacatgtcttaggtccattta

SEQ ID NO: 223610 - DNA, 25 bp, Probe sequence
ggctttttcggtattcatggtcaac

SEQ ID NO: 223611 - DNA, 25 bp, Probe sequence
ggctctacgatgagtcaaatgggct

SEQ ID NO: 223612 - DNA, 25 bp, Probe sequence
tagctggctttgtaatggcgcttgg

SEQ ID NO: 223613 - DNA, 25 bp, Probe sequence
tattagctattatcgtggcatttct

SEQ ID NO: 223614 - DNA, 25 bp, Probe sequence
ttagcaccagttatgccaatgagat

SEQ ID NO: 223615 - DNA, 25 bp, Probe sequence
ttcactgtttgttattgcgcttatc

SEQ ID NO: 223616 - DNA, 25 bp, Probe sequence
agatttccttggcagaggttccttg

SEQ ID NO: 223617 - DNA, 25 bp, Probe sequence
atttccttggcagaggttccttgtc

SEQ ID NO: 223618 - DNA, 25 bp, Probe sequence
attagttgaatccggtgagcaagat

SEQ ID NO: 223619 - DNA, 25 bp, Probe sequence
atcgtattcaaacttgaggataatt

SEQ ID NO: 223620 - DNA, 25 bp, Probe sequence
atccggtgagcaagatttgaatgat

SEQ ID NO: 223621 - DNA, 25 bp, Probe sequence
agtgatttaagtacagttacaggtg

SEQ ID NO: 223622 - DNA, 25 bp, Probe sequence
acgtattatcgtattcaaacttgag

SEQ ID NO: 223623 - DNA, 25 bp, Probe sequence
aaagatttccttggcagaggttcct

SEQ ID NO: 223624 - DNA, 25 bp, Probe sequence
aacgaacacgttctgaattagttga

SEQ ID NO: 223625 - DNA, 25 bp, Probe sequence
aagatttccttggcagaggttcctt

SEQ ID NO: 223626 - DNA, 25 bp, Probe sequence
aagtacagttacaggtgaacgtatt

SEQ ID NO: 223627 - DNA, 25 bp, Probe sequence
aatcagtaaagccattacgcaatgg

SEQ ID NO: 223628 - DNA, 25 bp, Probe sequence
aatcagacattttaagagatatggt

SEQ ID NO: 223629 - DNA, 25 bp, Probe sequence
aatattaaacgaacacgttctgaat

SEQ ID NO: 223630 - DNA, 25 bp, Probe sequence
cagttacaggtgaacgtattatcgt

SEQ ID NO: 223631 - DNA, 25 bp, Probe sequence
caggtatcaaagtgatgagcttcca

SEQ ID NO: 223632 - DNA, 25 bp, Probe sequence
cattacgcaatgggaaaaagatttc

SEQ ID NO: 223633 - DNA, 25 bp, Probe sequence
tctgaattagttgaatccggtgagc

SEQ ID NO: 223634 - DNA, 25 bp, Probe sequence
gctgaaatcagtaaagccattacgc

SEQ ID NO: 223635 - DNA, 25 bp, Probe sequence
gaattagttgaatccggtgagcaag

SEQ ID NO: 223636 - DNA, 25 bp, Probe sequence
gaaaggtgaaatcgaagctgaaatc

SEQ ID NO: 223637 - DNA, 25 bp, Probe sequence
gaaatcagtaaagccattacgcaat

SEQ ID NO: 223638 - DNA, 25 bp, Probe sequence
gagatatggtgattattagtttaca

SEQ ID NO: 223639 - DNA, 25 bp, Probe sequence
gaggataatttggaaaagcatattt

SEQ ID NO: 223640 - DNA, 25 bp, Probe sequence
gatttccttggcagaggttccttgt

SEQ ID NO: 223641 - DNA, 25 bp, Probe sequence
gttgaatccggtgagcaagatttga

SEQ ID NO: 223642 - DNA, 25 bp, Probe sequence
gtttacaaggtatcttaacgccagc

SEQ ID NO: 223643 - DNA, 25 bp, Probe sequence
gtattatcgtattcaaacttgagga

SEQ ID NO: 223644 - DNA, 25 bp, Probe sequence
gtaaagccattacgcaatgggaaaa

SEQ ID NO: 223645 - DNA, 25 bp, Probe sequence
gtgagcaagatttgaatgatatcat

SEQ ID NO: 223646 - DNA, 25 bp, Probe sequence
ggtgaacgtattatcgtattcaaac

SEQ ID NO: 223647 - DNA, 25 bp, Probe sequence
ggtgaaatcgaagctgaaatcagta

SEQ ID NO: 223648 - DNA, 25 bp, Probe sequence
tacaggtgaacgtattatcgtattc

SEQ ID NO: 223649 - DNA, 25 bp, Probe sequence
tatggtgattattagtttacaaggt

SEQ ID NO: 223650 - DNA, 25 bp, Probe sequence
attatcgtcacaatcatactgttta

SEQ ID NO: 223651 - DNA, 25 bp, Probe sequence
atatttggtttcaggtgtcatcatg

SEQ ID NO: 223652 - DNA, 25 bp, Probe sequence
atatgacgtttagtgcggaaattgg

SEQ ID NO: 223653 - DNA, 25 bp, Probe sequence
atcgcgctgattgtatttataggta

SEQ ID NO: 223654 - DNA, 25 bp, Probe sequence
atgtcaaaggtgtcgtgttgatttc

SEQ ID NO: 223655 - DNA, 25 bp, Probe sequence
atgggaatattatggcttagcatat

SEQ ID NO: 223656 - DNA, 25 bp, Probe sequence
atgggatcattaacatggtttacag

SEQ ID NO: 223657 - DNA, 25 bp, Probe sequence
agaccatataatcatttagccgttg

SEQ ID NO: 223658 - DNA, 25 bp, Probe sequence
agcgttattcttaatggtataccca

SEQ ID NO: 223659 - DNA, 25 bp, Probe sequence
acgccagcacattattatatttcgc

SEQ ID NO: 223660 - DNA, 25 bp, Probe sequence
acccatactttattaatcatcgacg

SEQ ID NO: 223661 - DNA, 25 bp, Probe sequence
acatcaccgaaaatgacagtgcctt

SEQ ID NO: 223662 - DNA, 25 bp, Probe sequence
acagaggcatttagcggtttggttt

SEQ ID NO: 223663 - DNA, 25 bp, Probe sequence
cagattatttcggtgagccacaacg

SEQ ID NO: 223664 - DNA, 25 bp, Probe sequence
cattacttttcagatgtcattggcg

SEQ ID NO: 223665 - DNA, 25 bp, Probe sequence
gccgttgatacaggcttttcatttc

SEQ ID NO: 223666 - DNA, 25 bp, Probe sequence
gcaatcatttgggtagcgttattct

SEQ ID NO: 223667 - DNA, 25 bp, Probe sequence
gacagtgcctttatttttaatcgcg

SEQ ID NO: 223668 - DNA, 25 bp, Probe sequence
gtagtgacaaatcaagaatggctta

SEQ ID NO: 223669 - DNA, 25 bp, Probe sequence
gtcacaatcatactgtttattaaac

SEQ ID NO: 223670 - DNA, 25 bp, Probe sequence
gtgcctttatttttaatcgcgctga

SEQ ID NO: 223671 - DNA, 25 bp, Probe sequence
ggtttgtgacatatttggtttcagg

SEQ ID NO: 223672 - DNA, 25 bp, Probe sequence
ggtatacccatactttattaatcat

SEQ ID NO: 223673 - DNA, 25 bp, Probe sequence
ggtttcaggtgtcatcatgaacaaa

SEQ ID NO: 223674 - DNA, 25 bp, Probe sequence
ggtttacagattatttcggtgagcc

SEQ ID NO: 223675 - DNA, 25 bp, Probe sequence
ggcacgtcactagcaatcatttggg

SEQ ID NO: 223676 - DNA, 25 bp, Probe sequence
ggcatttagcggtttggtttgtgac

SEQ ID NO: 223677 - DNA, 25 bp, Probe sequence
tggagatgtcaaaggtgtcgtgttg

SEQ ID NO: 223678 - DNA, 25 bp, Probe sequence
taatcatcgacgacaacgcgtttag

SEQ ID NO: 223679 - DNA, 25 bp, Probe sequence
tacgtccaagaccatataatcattt

SEQ ID NO: 223680 - DNA, 25 bp, Probe sequence
tagcggtttggtttgtgacatattt

SEQ ID NO: 223681 - DNA, 25 bp, Probe sequence
tattttgtcgcctttattttcatgc

SEQ ID NO: 223682 - DNA, 25 bp, Probe sequence
tttcagatgtcattggcggcacgtc

SEQ ID NO: 223683 - DNA, 25 bp, Probe sequence
ttagcatattattttgtcgccttta

SEQ ID NO: 223684 - DNA, 25 bp, Probe sequence
atcgagtgcgcaattagcagcaatt

SEQ ID NO: 223685 - DNA, 25 bp, Probe sequence
atgcaccgaattatccaggtcatgg

SEQ ID NO: 223686 - DNA, 25 bp, Probe sequence
atggacatgcgatattattattaca

SEQ ID NO: 223687 - DNA, 25 bp, Probe sequence
agttgttatgcaccgaattatccag

SEQ ID NO: 223688 - DNA, 25 bp, Probe sequence
agtttattatagtcaacgcatgtcg

SEQ ID NO: 223689 - DNA, 25 bp, Probe sequence
agatcagcaagcatcgagtgcgcaa

SEQ ID NO: 223690 - DNA, 25 bp, Probe sequence
acattcatttacaggtacaaatcgg

SEQ ID NO: 223691 - DNA, 25 bp, Probe sequence
agcttaccaatttttagtcaatgaa

SEQ ID NO: 223692 - DNA, 25 bp, Probe sequence
aacgtatcgctgtcatgtcagcacc

SEQ ID NO: 223693 - DNA, 25 bp, Probe sequence
aaggatttagttgttatgcaccgaa

SEQ ID NO: 223694 - DNA, 25 bp, Probe sequence
aaggcacaaatggacatgcgatatt

SEQ ID NO: 223695 - DNA, 25 bp, Probe sequence
cagtgcaacgggtgtgtctttaggt

SEQ ID NO: 223696 - DNA, 25 bp, Probe sequence
ctatcagtgcaacgggtgtgtcttt

SEQ ID NO: 223697 - DNA, 25 bp, Probe sequence
ctgtcatgtcagcaccaaaggaaaa

SEQ ID NO: 223698 - DNA, 25 bp, Probe sequence
gcatcttgcagctgagttaaatgac

SEQ ID NO: 223699 - DNA, 25 bp, Probe sequence
gcagctgagttaaatgaccaaggat

SEQ ID NO: 223700 - DNA, 25 bp, Probe sequence
gcagcaattgatgattatgaaggtg

SEQ ID NO: 223701 - DNA, 25 bp, Probe sequence
gcaacgggtgtgtctttaggtggat

SEQ ID NO: 223702 - DNA, 25 bp, Probe sequence
gcaagcatcgagtgcgcaattagca

SEQ ID NO: 223703 - DNA, 25 bp, Probe sequence
gaatctatcagtgcaacgggtgtgt

SEQ ID NO: 223704 - DNA, 25 bp, Probe sequence
gaaggttatgaatctatcagtgcaa

SEQ ID NO: 223705 - DNA, 25 bp, Probe sequence
gaagttgagaaagcttaccaatttt

SEQ ID NO: 223706 - DNA, 25 bp, Probe sequence
gaacatttaggatcagtagacaaag

SEQ ID NO: 223707 - DNA, 25 bp, Probe sequence
gaaagcttaccaatttttagtcaat

SEQ ID NO: 223708 - DNA, 25 bp, Probe sequence
gatgtgaagcatcttgcagctgagt

SEQ ID NO: 223709 - DNA, 25 bp, Probe sequence
gatgattggtgggaagaagttgaga

SEQ ID NO: 223710 - DNA, 25 bp, Probe sequence
gatattattattacattcatttaca

SEQ ID NO: 223711 - DNA, 25 bp, Probe sequence
gtatcgctgtcatgtcagcaccaaa

SEQ ID NO: 223712 - DNA, 25 bp, Probe sequence
gggtgtgtctttaggtggattaatg

SEQ ID NO: 223713 - DNA, 25 bp, Probe sequence
ggtacaaatcgggatgtgaagcatc

SEQ ID NO: 223714 - DNA, 25 bp, Probe sequence
ggagaaggcagagatattttagaag

SEQ ID NO: 223715 - DNA, 25 bp, Probe sequence
tcgctttttcaatgctttaacataa

SEQ ID NO: 223716 - DNA, 25 bp, Probe sequence
ttattcgctttttcaatgctttaac

SEQ ID NO: 223717 - DNA, 25 bp, Probe sequence
ttgaaacgtatcgctgtcatgtcag

SEQ ID NO: 223718 - DNA, 25 bp, Probe sequence
ctagtgcgggttctgcaatcggtct

SEQ ID NO: 223719 - DNA, 25 bp, Probe sequence
attagtattccagcaaccttatctt

SEQ ID NO: 223720 - DNA, 25 bp, Probe sequence
atttgggattcttagtgctgttctt

SEQ ID NO: 223721 - DNA, 25 bp, Probe sequence
aggcgcattaggtactacgcttgtc

SEQ ID NO: 223722 - DNA, 25 bp, Probe sequence
agtgctgttcttatttgcggcttta

SEQ ID NO: 223723 - DNA, 25 bp, Probe sequence
actcattatggaattcactgttggg

SEQ ID NO: 223724 - DNA, 25 bp, Probe sequence
aaaaagtcgcagtgatcggtagtat

SEQ ID NO: 223725 - DNA, 25 bp, Probe sequence
aagtactgccaatggtctttagtca

SEQ ID NO: 223726 - DNA, 25 bp, Probe sequence
aatcggtcttggtgccatgtggaaa

SEQ ID NO: 223727 - DNA, 25 bp, Probe sequence
aatatggatttcatcgtttcgaatg

SEQ ID NO: 223728 - DNA, 25 bp, Probe sequence
caatcattctttacgttatcattag

SEQ ID NO: 223729 - DNA, 25 bp, Probe sequence
cggctttaacgtcatctatttcttt

SEQ ID NO: 223730 - DNA, 25 bp, Probe sequence
gcatctaggcacattattctatttg

SEQ ID NO: 223731 - DNA, 25 bp, Probe sequence
gcaaccttatcttttggtatcttaa

SEQ ID NO: 223732 - DNA, 25 bp, Probe sequence
gaatatctttgtatctgtattggca

SEQ ID NO: 223733 - DNA, 25 bp, Probe sequence
gaatgtattgatgccattaggcgca

SEQ ID NO: 223734 - DNA, 25 bp, Probe sequence
gaagcggtaatatcaaatccttggt

SEQ ID NO: 223735 - DNA, 25 bp, Probe sequence
gatgcctgtcgttattattttagtc

SEQ ID NO: 223736 - DNA, 25 bp, Probe sequence
gattacttatgcgagttatgcctct

SEQ ID NO: 223737 - DNA, 25 bp, Probe sequence
gattcggtgcgggaacgatttttga

SEQ ID NO: 223738 - DNA, 25 bp, Probe sequence
gttcttaatattcaccatttttgtt

SEQ ID NO: 223739 - DNA, 25 bp, Probe sequence
gttatgcctctaaagacatgacgat

SEQ ID NO: 223740 - DNA, 25 bp, Probe sequence
gtcatcagctatttctatcgttgtt

SEQ ID NO: 223741 - DNA, 25 bp, Probe sequence
gtgcctttctagctatgttcttaat

SEQ ID NO: 223742 - DNA, 25 bp, Probe sequence
gtgtttattttatttggcttctata

SEQ ID NO: 223743 - DNA, 25 bp, Probe sequence
gtggttggattgtcatttacatcgg

SEQ ID NO: 223744 - DNA, 25 bp, Probe sequence
ggtctttagtcaaatgcatctaggc

SEQ ID NO: 223745 - DNA, 25 bp, Probe sequence
ggaagtcatcaactggatttatttt

SEQ ID NO: 223746 - DNA, 25 bp, Probe sequence
ggcaaggtatattcatattcgctac

SEQ ID NO: 223747 - DNA, 25 bp, Probe sequence
ggctcaatatcattggctggaacgg

SEQ ID NO: 223748 - DNA, 25 bp, Probe sequence
tgggacggacatatacaacacaaat

SEQ ID NO: 223749 - DNA, 25 bp, Probe sequence
tttcaacgcatcaatcatctccaag

SEQ ID NO: 223750 - DNA, 25 bp, Probe sequence
ttttagtctttatcgtgcaattatt

SEQ ID NO: 223751 - DNA, 25 bp, Probe sequence
ttaagtatgcgatgcctgtcgttat

SEQ ID NO: 223752 - DNA, 25 bp, Probe sequence
atttaaagcaacatcacgtgcaatg

SEQ ID NO: 223753 - DNA, 25 bp, Probe sequence
atattatgatagcgcttggtgcaga

SEQ ID NO: 223754 - DNA, 25 bp, Probe sequence
ataatccggatacatattttcatac

SEQ ID NO: 223755 - DNA, 25 bp, Probe sequence
atggggcacaattagctgcacgttc

SEQ ID NO: 223756 - DNA, 25 bp, Probe sequence
acgtgcaatgttatgccgttgagcc

SEQ ID NO: 223757 - DNA, 25 bp, Probe sequence
acaatggaatcctggaggcagtgtt

SEQ ID NO: 223758 - DNA, 25 bp, Probe sequence
aaatttatgccaagcttgaacaatg

SEQ ID NO: 223759 - DNA, 25 bp, Probe sequence
aaatggagggccagctcatgcacat

SEQ ID NO: 223760 - DNA, 25 bp, Probe sequence
aaagcgcaattatctgaaggtacga

SEQ ID NO: 223761 - DNA, 25 bp, Probe sequence
aaactattgttgaagcgactgctgg

SEQ ID NO: 223762 - DNA, 25 bp, Probe sequence
caagaagggcgtgtgcgtgcaggtc

SEQ ID NO: 223763 - DNA, 25 bp, Probe sequence
catattttcatacattgggacccga

SEQ ID NO: 223764 - DNA, 25 bp, Probe sequence
caggcatagggttagctattgcagc

SEQ ID NO: 223765 - DNA, 25 bp, Probe sequence
tgccgttgagccagaagggtccgtg

SEQ ID NO: 223766 - DNA, 25 bp, Probe sequence
ccgaattgacttcagcattacagca

SEQ ID NO: 223767 - DNA, 25 bp, Probe sequence
gacactgaaggtatcggttctgaga

SEQ ID NO: 223768 - DNA, 25 bp, Probe sequence
gatcaagatgcctttcgaaatgtca

SEQ ID NO: 223769 - DNA, 25 bp, Probe sequence
gattgttgtcgtatttccagatggt

SEQ ID NO: 223770 - DNA, 25 bp, Probe sequence
gtaggcagttcttcaggtgcagcat

SEQ ID NO: 223771 - DNA, 25 bp, Probe sequence
gtaagatctttgcgccgtatggttt

SEQ ID NO: 223772 - DNA, 25 bp, Probe sequence
gtcagtctgaaggtatgcatggggc

SEQ ID NO: 223773 - DNA, 25 bp, Probe sequence
gggtccgtgttaaatggagggccag

SEQ ID NO: 223774 - DNA, 25 bp, Probe sequence
gtgtgcgtgcaggtcaaactattgt

SEQ ID NO: 223775 - DNA, 25 bp, Probe sequence
ggtgccgtttatatgaatcaatttg

SEQ ID NO: 223776 - DNA, 25 bp, Probe sequence
ggttctgagaaatggccgatatttt

SEQ ID NO: 223777 - DNA, 25 bp, Probe sequence
ggcagtgttaaagacagactcggga

SEQ ID NO: 223778 - DNA, 25 bp, Probe sequence
ggcaatacaccattagtactgttag

SEQ ID NO: 223779 - DNA, 25 bp, Probe sequence
tgggacccgaattgacttcagcatt

SEQ ID NO: 223780 - DNA, 25 bp, Probe sequence
tgcacatgacactgaaggtatcggt

SEQ ID NO: 223781 - DNA, 25 bp, Probe sequence
tcaatttgaatccgaacataatccg

SEQ ID NO: 223782 - DNA, 25 bp, Probe sequence
tacaggtaccgcacgttatttaaag

SEQ ID NO: 223783 - DNA, 25 bp, Probe sequence
tatgctgaaaaatatggtgccgttt

SEQ ID NO: 223784 - DNA, 25 bp, Probe sequence
ttttgtggctggtattggctctggc

SEQ ID NO: 223785 - DNA, 25 bp, Probe sequence
ttgcgccgtatggtttttcagaaga

SEQ ID NO: 223786 - DNA, 25 bp, Probe sequence
attccagcagatattcgagctaaag

SEQ ID NO: 223787 - DNA, 25 bp, Probe sequence
atacggcggtacttatcgcgcattg

SEQ ID NO: 223788 - DNA, 25 bp, Probe sequence
atagtgatgtcgttgctggtttagt

SEQ ID NO: 223789 - DNA, 25 bp, Probe sequence
atcggatgacaagcttgcagaacgt

SEQ ID NO: 223790 - DNA, 25 bp, Probe sequence
atccagctgtgcaacaagtgttcca

SEQ ID NO: 223791 - DNA, 25 bp, Probe sequence
atccattattacgtgttactgacat

SEQ ID NO: 223792 - DNA, 25 bp, Probe sequence
agtgcagttgttatgctgttggaca

SEQ ID NO: 223793 - DNA, 25 bp, Probe sequence
agatacaacgcatacagattcaatt

SEQ ID NO: 223794 - DNA, 25 bp, Probe sequence
aaatgttacaagcacatccagctgt

SEQ ID NO: 223795 - DNA, 25 bp, Probe sequence
aagaaggtattacagacggacttgt

SEQ ID NO: 223796 - DNA, 25 bp, Probe sequence
aagtctgctgaaattgcgaaagaac

SEQ ID NO: 223797 - DNA, 25 bp, Probe sequence
aattcagatgtatacggcggtactt

SEQ ID NO: 223798 - DNA, 25 bp, Probe sequence
catgatgtccatatggctcaagcgg

SEQ ID NO: 223799 - DNA, 25 bp, Probe sequence
ctcgtactgcgaatccaacaagaag

SEQ ID NO: 223800 - DNA, 25 bp, Probe sequence
cggatggccatacaggtgtgattgc

SEQ ID NO: 223801 - DNA, 25 bp, Probe sequence
cggtacttatcgcgcattgacaaaa

SEQ ID NO: 223802 - DNA, 25 bp, Probe sequence
gcgaaagaacacggtttgatttcag

SEQ ID NO: 223803 - DNA, 25 bp, Probe sequence
gctggtttagttgcaacatcggatg

SEQ ID NO: 223804 - DNA, 25 bp, Probe sequence
gctcaagcggatggccatacaggtg

SEQ ID NO: 223805 - DNA, 25 bp, Probe sequence
gcagaacgtttagcatttatttcaa

SEQ ID NO: 223806 - DNA, 25 bp, Probe sequence
gcaacaagtgttccatccaagtatt

SEQ ID NO: 223807 - DNA, 25 bp, Probe sequence
gcaacatcgtattacacattagctg

SEQ ID NO: 223808 - DNA, 25 bp, Probe sequence
gaaagtttaggtgcagtggaaagtt

SEQ ID NO: 223809 - DNA, 25 bp, Probe sequence
gacggacttgtaagaatttctgtag

SEQ ID NO: 223810 - DNA, 25 bp, Probe sequence
gatattggtgatttacgtcaaggat

SEQ ID NO: 223811 - DNA, 25 bp, Probe sequence
gattcaattgtacaagcgatacgcc

SEQ ID NO: 223812 - DNA, 25 bp, Probe sequence
gtacaagcgatacgcccaacaacaa

SEQ ID NO: 223813 - DNA, 25 bp, Probe sequence
gtgttccatccaagtattgaaagtc

SEQ ID NO: 223814 - DNA, 25 bp, Probe sequence
ggtggcattttaggacctcaagata

SEQ ID NO: 223815 - DNA, 25 bp, Probe sequence
ggatatgaatattctcgtactgcga

SEQ ID NO: 223816 - DNA, 25 bp, Probe sequence
ggaaagtttaatttcagtacctgca

SEQ ID NO: 223817 - DNA, 25 bp, Probe sequence
tgaaacaccttctaatccattatta

SEQ ID NO: 223818 - DNA, 25 bp, Probe sequence
tcagtacctgcattgatgacacatg

SEQ ID NO: 223819 - DNA, 25 bp, Probe sequence
ttatttcaaattcaacaggtggcat

SEQ ID NO: 223820 - DNA, 25 bp, Probe sequence
atagcactaaatatgattacaaaag

SEQ ID NO: 223821 - DNA, 25 bp, Probe sequence
ataccgagcatcatagcactaaata

SEQ ID NO: 223822 - DNA, 25 bp, Probe sequence
atgctagagacgttattgctacagc

SEQ ID NO: 223823 - DNA, 25 bp, Probe sequence
atgacccaaataggactaactgcaa

SEQ ID NO: 223824 - DNA, 25 bp, Probe sequence
aggactaactgcaataccgagcatc

SEQ ID NO: 223825 - DNA, 25 bp, Probe sequence
agatgcatcagcaataaaatgtatt

SEQ ID NO: 223826 - DNA, 25 bp, Probe sequence
accgagcatcatagcactaaatatg

SEQ ID NO: 223827 - DNA, 25 bp, Probe sequence
actgcaataccgagcatcatagcac

SEQ ID NO: 223828 - DNA, 25 bp, Probe sequence
actaactgcaataccgagcatcata

SEQ ID NO: 223829 - DNA, 25 bp, Probe sequence
aaatgctagagacgttattgctaca

SEQ ID NO: 223830 - DNA, 25 bp, Probe sequence
aaatgctaaaataaatccagtcgtt

SEQ ID NO: 223831 - DNA, 25 bp, Probe sequence
aacaaagtttgtagatgcatcagca

SEQ ID NO: 223832 - DNA, 25 bp, Probe sequence
aataggactaactgcaataccgagc

SEQ ID NO: 223833 - DNA, 25 bp, Probe sequence
aataccgagcatcatagcactaaat

SEQ ID NO: 223834 - DNA, 25 bp, Probe sequence
caaagtttgtagatgcatcagcaat

SEQ ID NO: 223835 - DNA, 25 bp, Probe sequence
ctagagacgttattgctacagcaat

SEQ ID NO: 223836 - DNA, 25 bp, Probe sequence
ctgcaataccgagcatcatagcact

SEQ ID NO: 223837 - DNA, 25 bp, Probe sequence
cgatttttgtgccgaattttttcag

SEQ ID NO: 223838 - DNA, 25 bp, Probe sequence
gctagagacgttattgctacagcaa

SEQ ID NO: 223839 - DNA, 25 bp, Probe sequence
gcaataccgagcatcatagcactaa

SEQ ID NO: 223840 - DNA, 25 bp, Probe sequence
gactaactgcaataccgagcatcat

SEQ ID NO: 223841 - DNA, 25 bp, Probe sequence
gacccaaataggactaactgcaata

SEQ ID NO: 223842 - DNA, 25 bp, Probe sequence
gatgctggaaaccaaataactaaaa

SEQ ID NO: 223843 - DNA, 25 bp, Probe sequence
gatttttgtgccgaattttttcagt

SEQ ID NO: 223844 - DNA, 25 bp, Probe sequence
gattacaaaaggtgatgctggaaac

SEQ ID NO: 223845 - DNA, 25 bp, Probe sequence
gtttgtagatgcatcagcaataaaa

SEQ ID NO: 223846 - DNA, 25 bp, Probe sequence
gtattgaaaatgctagagacgttat

SEQ ID NO: 223847 - DNA, 25 bp, Probe sequence
ggtgatgctggaaaccaaataacta

SEQ ID NO: 223848 - DNA, 25 bp, Probe sequence
ggactaactgcaataccgagcatca

SEQ ID NO: 223849 - DNA, 25 bp, Probe sequence
tgtgccgaattttttcagtaaaaat

SEQ ID NO: 223850 - DNA, 25 bp, Probe sequence
tgctaaaataaatccagtcgttaaa

SEQ ID NO: 223851 - DNA, 25 bp, Probe sequence
tccagtcgttaaaacgatttttgtg

SEQ ID NO: 223852 - DNA, 25 bp, Probe sequence
taactgcaataccgagcatcatagc

SEQ ID NO: 223853 - DNA, 25 bp, Probe sequence
ttcagtaaaaatcctataacaaagt

SEQ ID NO: 223854 - DNA, 25 bp, Probe sequence
atactcctatgcgatgaagcaacaa

SEQ ID NO: 223855 - DNA, 25 bp, Probe sequence
atcattgattcgtcgattgaatgac

SEQ ID NO: 223856 - DNA, 25 bp, Probe sequence
agatgctttgaaggacgtatcattt

SEQ ID NO: 223857 - DNA, 25 bp, Probe sequence
aaacctttggcattacaattatgat

SEQ ID NO: 223858 - DNA, 25 bp, Probe sequence
aacgagtaacggaaatgcttgaatt

SEQ ID NO: 223859 - DNA, 25 bp, Probe sequence
aagctgcctcgaatggacaagtgat

SEQ ID NO: 223860 - DNA, 25 bp, Probe sequence
aagacatttgtaatcgtgttgctgt

SEQ ID NO: 223861 - DNA, 25 bp, Probe sequence
aagggtggctattgcaagagcgctt

SEQ ID NO: 223862 - DNA, 25 bp, Probe sequence
caagagcgcttgttactaatccgaa

SEQ ID NO: 223863 - DNA, 25 bp, Probe sequence
ctaatccgaaaatactcctatgcga

SEQ ID NO: 223864 - DNA, 25 bp, Probe sequence
cgtatcatttacggtcaatcgcaat

SEQ ID NO: 223865 - DNA, 25 bp, Probe sequence
gcgcattggatccagcaacgactgc

SEQ ID NO: 223866 - DNA, 25 bp, Probe sequence
gaatgtcaatcaaacctttggcatt

SEQ ID NO: 223867 - DNA, 25 bp, Probe sequence
gaagcaacaagcgcattggatccag

SEQ ID NO: 223868 - DNA, 25 bp, Probe sequence
gaaatacaaggtaacaccgtatgtt

SEQ ID NO: 223869 - DNA, 25 bp, Probe sequence
gacacaaccgattataaatgacttg

SEQ ID NO: 223870 - DNA, 25 bp, Probe sequence
gacttgattcaaatttgtggcagag

SEQ ID NO: 223871 - DNA, 25 bp, Probe sequence
gactgcttcgatattgacgttatta

SEQ ID NO: 223872 - DNA, 25 bp, Probe sequence
gatatcggtatgatatttcagcatt

SEQ ID NO: 223873 - DNA, 25 bp, Probe sequence
gattacacatgaaatgcgcgttatt

SEQ ID NO: 223874 - DNA, 25 bp, Probe sequence
gattgctcaaaattttgtgtctaca

SEQ ID NO: 223875 - DNA, 25 bp, Probe sequence
gttaaagaggtgtttagtcatccta

SEQ ID NO: 223876 - DNA, 25 bp, Probe sequence
gtatgttatatgtggcttcgattta

SEQ ID NO: 223877 - DNA, 25 bp, Probe sequence
gtacgttggtaagactcgtgaatca

SEQ ID NO: 223878 - DNA, 25 bp, Probe sequence
gtaatcgtgttgctgtaatggaaaa

SEQ ID NO: 223879 - DNA, 25 bp, Probe sequence
gtctacagttatacagactgagcca

SEQ ID NO: 223880 - DNA, 25 bp, Probe sequence
gtcatcctaaaacgacgattgctca

SEQ ID NO: 223881 - DNA, 25 bp, Probe sequence
gtgaatcatcttgaagctgcctcga

SEQ ID NO: 223882 - DNA, 25 bp, Probe sequence
gtggtgcaggaaaaagtacgttggt

SEQ ID NO: 223883 - DNA, 25 bp, Probe sequence
ggtgtgattggatatagtggtgcag

SEQ ID NO: 223884 - DNA, 25 bp, Probe sequence
ggatccagcaacgactgcttcgata

SEQ ID NO: 223885 - DNA, 25 bp, Probe sequence
tcgcaatgatatttttggtgtgatt

SEQ ID NO: 223886 - DNA, 25 bp, Probe sequence
taaaatcttcgtcgaggaaactcag

SEQ ID NO: 223887 - DNA, 25 bp, Probe sequence
tagatggacatgatattacgaatta

SEQ ID NO: 223888 - DNA, 25 bp, Probe sequence
attgaagcggcgaaagcgatgggcg

SEQ ID NO: 223889 - DNA, 25 bp, Probe sequence
attggtattccattaggtgtcttat

SEQ ID NO: 223890 - DNA, 25 bp, Probe sequence
attccattaggtgtcttattggtaa

SEQ ID NO: 223891 - DNA, 25 bp, Probe sequence
attagcaattaccactgcgattatt

SEQ ID NO: 223892 - DNA, 25 bp, Probe sequence
aggggattattgaagcggcgaaagc

SEQ ID NO: 223893 - DNA, 25 bp, Probe sequence
aaagatttgatacgacggtcattat

SEQ ID NO: 223894 - DNA, 25 bp, Probe sequence
aatcaatattttaaggtcactacca

SEQ ID NO: 223895 - DNA, 25 bp, Probe sequence
aattaccactgcgattattggactt

SEQ ID NO: 223896 - DNA, 25 bp, Probe sequence
cactgcgattattggacttattgga

SEQ ID NO: 223897 - DNA, 25 bp, Probe sequence
cttagctttagtgtatggttatcaa

SEQ ID NO: 223898 - DNA, 25 bp, Probe sequence
ctttatttttaggagcagtgattgg

SEQ ID NO: 223899 - DNA, 25 bp, Probe sequence
ctagctagattcatacgtagacatt

SEQ ID NO: 223900 - DNA, 25 bp, Probe sequence
gcgaaagcgatgggcgcttcaccac

SEQ ID NO: 223901 - DNA, 25 bp, Probe sequence
gcggtggtggtataggagacttagc

SEQ ID NO: 223902 - DNA, 25 bp, Probe sequence
gctgttggcggtggtggtataggag

SEQ ID NO: 223903 - DNA, 25 bp, Probe sequence
gcaagacttgttgaaaactcattat

SEQ ID NO: 223904 - DNA, 25 bp, Probe sequence
gaagtagacgaggggattattgaag

SEQ ID NO: 223905 - DNA, 25 bp, Probe sequence
gacagtgcacagttattacaagcat

SEQ ID NO: 223906 - DNA, 25 bp, Probe sequence
gatttagacagtgcacagttattac

SEQ ID NO: 223907 - DNA, 25 bp, Probe sequence
gtatatgtggcaccttacattgcaa

SEQ ID NO: 223908 - DNA, 25 bp, Probe sequence
gtccaagtgattcaaacgctaggga

SEQ ID NO: 223909 - DNA, 25 bp, Probe sequence
ggtgtcttattggtaattactcgaa

SEQ ID NO: 223910 - DNA, 25 bp, Probe sequence
ggagacttagctttagtgtatggtt

SEQ ID NO: 223911 - DNA, 25 bp, Probe sequence
ggagcagtgattggtattccattag

SEQ ID NO: 223912 - DNA, 25 bp, Probe sequence
ggcaccttacattgcaagacttgtt

SEQ ID NO: 223913 - DNA, 25 bp, Probe sequence
tgatacgacggtcattattattacc

SEQ ID NO: 223914 - DNA, 25 bp, Probe sequence
tatggtatctattgctttattttta

SEQ ID NO: 223915 - DNA, 25 bp, Probe sequence
tattgtccaagtgattcaaacgcta

SEQ ID NO: 223916 - DNA, 25 bp, Probe sequence
tattattaccgttattgtattagtc

SEQ ID NO: 223917 - DNA, 25 bp, Probe sequence
tttggttctgatttagacagtgcac

SEQ ID NO: 223918 - DNA, 25 bp, Probe sequence
ttattggaagtacggcgatggcagg

SEQ ID NO: 223919 - DNA, 25 bp, Probe sequence
ttagatattttttaattcctgaagc

SEQ ID NO: 223920 - DNA, 25 bp, Probe sequence
ttactcgaaaacaaggcatatggcc

SEQ ID NO: 223921 - DNA, 25 bp, Probe sequence
ttaaggtcactaccatttattattt

SEQ ID NO: 223922 - DNA, 25 bp, Probe sequence
atagacacagataagttcgtcaatc

SEQ ID NO: 223923 - DNA, 25 bp, Probe sequence
ataagttcgtcaatctgttaatgaa

SEQ ID NO: 223924 - DNA, 25 bp, Probe sequence
atcacaatacaatcatagacacaga

SEQ ID NO: 223925 - DNA, 25 bp, Probe sequence
atcatagacacagataagttcgtca

SEQ ID NO: 223926 - DNA, 25 bp, Probe sequence
agttcgtcaatctgttaatgaatta

SEQ ID NO: 223927 - DNA, 25 bp, Probe sequence
agataagttcgtcaatctgttaatg

SEQ ID NO: 223928 - DNA, 25 bp, Probe sequence
agacacagataagttcgtcaatctg

SEQ ID NO: 223929 - DNA, 25 bp, Probe sequence
acttggataaatcacaatacaatca

SEQ ID NO: 223930 - DNA, 25 bp, Probe sequence
acacagataagttcgtcaatctgtt

SEQ ID NO: 223931 - DNA, 25 bp, Probe sequence
acaatcatagacacagataagttcg

SEQ ID NO: 223932 - DNA, 25 bp, Probe sequence
aaatcacaatacaatcatagacaca

SEQ ID NO: 223933 - DNA, 25 bp, Probe sequence
aaaacttggataaatcacaatacaa

SEQ ID NO: 223934 - DNA, 25 bp, Probe sequence
aacttggataaatcacaatacaatc

SEQ ID NO: 223935 - DNA, 25 bp, Probe sequence
aagttcgtcaatctgttaatgaatt

SEQ ID NO: 223936 - DNA, 25 bp, Probe sequence
caatcatagacacagataagttcgt

SEQ ID NO: 223937 - DNA, 25 bp, Probe sequence
aatcacaatacaatcatagacacag

SEQ ID NO: 223938 - DNA, 25 bp, Probe sequence
aatacaatcatagacacagataagt

SEQ ID NO: 223939 - DNA, 25 bp, Probe sequence
caatctgttaatgaattatgatgtg

SEQ ID NO: 223940 - DNA, 25 bp, Probe sequence
cacaatacaatcatagacacagata

SEQ ID NO: 223941 - DNA, 25 bp, Probe sequence
catagacacagataagttcgtcaat

SEQ ID NO: 223942 - DNA, 25 bp, Probe sequence
gacacagataagttcgtcaatctgt

SEQ ID NO: 223943 - DNA, 25 bp, Probe sequence
gatgtgatagagttaagtgaggata

SEQ ID NO: 223944 - DNA, 25 bp, Probe sequence
gataagttcgtcaatctgttaatga

SEQ ID NO: 223945 - DNA, 25 bp, Probe sequence
gataaatcacaatacaatcatagac

SEQ ID NO: 223946 - DNA, 25 bp, Probe sequence
gttcgtcaatctgttaatgaattat

SEQ ID NO: 223947 - DNA, 25 bp, Probe sequence
gtcaatctgttaatgaattatgatg

SEQ ID NO: 223948 - DNA, 25 bp, Probe sequence
tcgtcaatctgttaatgaattatga

SEQ ID NO: 223949 - DNA, 25 bp, Probe sequence
tcatagacacagataagttcgtcaa

SEQ ID NO: 223950 - DNA, 25 bp, Probe sequence
tcacaatacaatcatagacacagat

SEQ ID NO: 223951 - DNA, 25 bp, Probe sequence
taagttcgtcaatctgttaatgaat

SEQ ID NO: 223952 - DNA, 25 bp, Probe sequence
taaatcacaatacaatcatagacac

SEQ ID NO: 223953 - DNA, 25 bp, Probe sequence
tagacacagataagttcgtcaatct

SEQ ID NO: 223954 - DNA, 25 bp, Probe sequence
tatgatgtgatagagttaagtgagg

SEQ ID NO: 223955 - DNA, 25 bp, Probe sequence
ttcgtcaatctgttaatgaattatg

SEQ ID NO: 223956 - DNA, 25 bp, Probe sequence
attgtatcattcaaaagaagctcaa

SEQ ID NO: 223957 - DNA, 25 bp, Probe sequence
atatgaatgcattccaacattttgc

SEQ ID NO: 223958 - DNA, 25 bp, Probe sequence
ataaaggaacaaagatttcagcatt

SEQ ID NO: 223959 - DNA, 25 bp, Probe sequence
agcacgtgcacttaaactattagaa

SEQ ID NO: 223960 - DNA, 25 bp, Probe sequence
acttgtattattagcagcgtgtggt

SEQ ID NO: 223961 - DNA, 25 bp, Probe sequence
aaagcgttgcaggaagatgtcaaag

SEQ ID NO: 223962 - DNA, 25 bp, Probe sequence
aacatttaaaaattactgcagtaga

SEQ ID NO: 223963 - DNA, 25 bp, Probe sequence
aactattagaagcagctggtttaat

SEQ ID NO: 223964 - DNA, 25 bp, Probe sequence
aaccaagcacgtgcacttaaactat

SEQ ID NO: 223965 - DNA, 25 bp, Probe sequence
aaggcaatagaaacgtcattagcaa

SEQ ID NO: 223966 - DNA, 25 bp, Probe sequence
gctaaaatcgtagaattgtatcatt

SEQ ID NO: 223967 - DNA, 25 bp, Probe sequence
gcattccaacattttgcatttttag

SEQ ID NO: 223968 - DNA, 25 bp, Probe sequence
gcaggaagatgtcaaagatggagag

SEQ ID NO: 223969 - DNA, 25 bp, Probe sequence
gacactaaggcttgggagaaggtta

SEQ ID NO: 223970 - DNA, 25 bp, Probe sequence
gaagctcaaaaagcgttgcaggaag

SEQ ID NO: 223971 - DNA, 25 bp, Probe sequence
gaagcagctggtttaataaaactga

SEQ ID NO: 223972 - DNA, 25 bp, Probe sequence
gaaacctgttaatttatctaaagat

SEQ ID NO: 223973 - DNA, 25 bp, Probe sequence
gacttggataacaaaacatatgcta

SEQ ID NO: 223974 - DNA, 25 bp, Probe sequence
gatgatattgatgtggagattaagc

SEQ ID NO: 223975 - DNA, 25 bp, Probe sequence
gattacaatttaccgaataaagcat

SEQ ID NO: 223976 - DNA, 25 bp, Probe sequence
gattgggttagttatcgtagcactt

SEQ ID NO: 223977 - DNA, 25 bp, Probe sequence
gttatcgtagcacttgtattattag

SEQ ID NO: 223978 - DNA, 25 bp, Probe sequence
gtagcacttgtattattagcagcgt

SEQ ID NO: 223979 - DNA, 25 bp, Probe sequence
gtcaaaaaggttaaagatggtgcta

SEQ ID NO: 223980 - DNA, 25 bp, Probe sequence
gtgctttatctgatgtcgatattgc

SEQ ID NO: 223981 - DNA, 25 bp, Probe sequence
gtgcacttaaactattagaagcagc

SEQ ID NO: 223982 - DNA, 25 bp, Probe sequence
gtgatattgatatgaatgcattcca

SEQ ID NO: 223983 - DNA, 25 bp, Probe sequence
gggttagttatcgtagcacttgtat

SEQ ID NO: 223984 - DNA, 25 bp, Probe sequence
ggagagaaacctgttaatttatcta

SEQ ID NO: 223985 - DNA, 25 bp, Probe sequence
tgatgtcgatattgcagttattaat

SEQ ID NO: 223986 - DNA, 25 bp, Probe sequence
tccaacattttgcatttttagatca

SEQ ID NO: 223987 - DNA, 25 bp, Probe sequence
tcaaatgacactaaggcttgggaga

SEQ ID NO: 223988 - DNA, 25 bp, Probe sequence
tcaaaccaagcacgtgcacttaaac

SEQ ID NO: 223989 - DNA, 25 bp, Probe sequence
tataacgtcaaatccaaaacattta

SEQ ID NO: 223990 - DNA, 25 bp, Probe sequence
attatgcgacttaatggtttaaata

SEQ ID NO: 223991 - DNA, 25 bp, Probe sequence
atatggtacaacttaccaaaacatt

SEQ ID NO: 223992 - DNA, 25 bp, Probe sequence
atgcgacttaatggtttaaataatt

SEQ ID NO: 223993 - DNA, 25 bp, Probe sequence
atggtacaacttaccaaaacattat

SEQ ID NO: 223994 - DNA, 25 bp, Probe sequence
accaaaacattatgcgacttaatgg

SEQ ID NO: 223995 - DNA, 25 bp, Probe sequence
acttaccaaaacattatgcgactta

SEQ ID NO: 223996 - DNA, 25 bp, Probe sequence
acattatgcgacttaatggtttaaa

SEQ ID NO: 223997 - DNA, 25 bp, Probe sequence
acaacttaccaaaacattatgcgac

SEQ ID NO: 223998 - DNA, 25 bp, Probe sequence
acaagcaggtgactcattgtcatta

SEQ ID NO: 223999 - DNA, 25 bp, Probe sequence
aaacattatgcgacttaatggttta

SEQ ID NO: 224000 - DNA, 25 bp, Probe sequence
aaaacattatgcgacttaatggttt

SEQ ID NO: 224001 - DNA, 25 bp, Probe sequence
aacttaccaaaacattatgcgactt

SEQ ID NO: 224002 - DNA, 25 bp, Probe sequence
aacattatgcgacttaatggtttaa

SEQ ID NO: 224003 - DNA, 25 bp, Probe sequence
aagcaggtgactcattgtcattaat

SEQ ID NO: 224004 - DNA, 25 bp, Probe sequence
caagcaggtgactcattgtcattaa

SEQ ID NO: 224005 - DNA, 25 bp, Probe sequence
caacttaccaaaacattatgcgact

SEQ ID NO: 224006 - DNA, 25 bp, Probe sequence
caaaacattatgcgacttaatggtt

SEQ ID NO: 224007 - DNA, 25 bp, Probe sequence
cattatgcgacttaatggtttaaat

SEQ ID NO: 224008 - DNA, 25 bp, Probe sequence
cttaccaaaacattatgcgacttaa

SEQ ID NO: 224009 - DNA, 25 bp, Probe sequence
ccaaaacattatgcgacttaatggt

SEQ ID NO: 224010 - DNA, 25 bp, Probe sequence
gtacaagcaggtgactcattgtcat

SEQ ID NO: 224011 - DNA, 25 bp, Probe sequence
gtacaacttaccaaaacattatgcg

SEQ ID NO: 224012 - DNA, 25 bp, Probe sequence
ggtacaacttaccaaaacattatgc

SEQ ID NO: 224013 - DNA, 25 bp, Probe sequence
tggtacaacttaccaaaacattatg

SEQ ID NO: 224014 - DNA, 25 bp, Probe sequence
tgcgacttaatggtttaaataattt

SEQ ID NO: 224015 - DNA, 25 bp, Probe sequence
tacaagcaggtgactcattgtcatt

SEQ ID NO: 224016 - DNA, 25 bp, Probe sequence
tacaacttaccaaaacattatgcga

SEQ ID NO: 224017 - DNA, 25 bp, Probe sequence
taccaaaacattatgcgacttaatg

SEQ ID NO: 224018 - DNA, 25 bp, Probe sequence
tatggtacaacttaccaaaacatta

SEQ ID NO: 224019 - DNA, 25 bp, Probe sequence
tatgcgacttaatggtttaaataat

SEQ ID NO: 224020 - DNA, 25 bp, Probe sequence
ttatgcgacttaatggtttaaataa

SEQ ID NO: 224021 - DNA, 25 bp, Probe sequence
ttaccaaaacattatgcgacttaat

SEQ ID NO: 224022 - DNA, 25 bp, Probe sequence
atcaacgaactcaggtggcggatca

SEQ ID NO: 224023 - DNA, 25 bp, Probe sequence
atctgcaacaactacgaatagaggt

SEQ ID NO: 224024 - DNA, 25 bp, Probe sequence
aggatctgcaacaactacgaataga

SEQ ID NO: 224025 - DNA, 25 bp, Probe sequence
atggttacactatcgacaatagacc

SEQ ID NO: 224026 - DNA, 25 bp, Probe sequence
agcggcagcagatggttacactatc

SEQ ID NO: 224027 - DNA, 25 bp, Probe sequence
agcagatggttacactatcgacaat

SEQ ID NO: 224028 - DNA, 25 bp, Probe sequence
acgaactcaggatctgcaacaacta

SEQ ID NO: 224029 - DNA, 25 bp, Probe sequence
actcaggatctgcaacaactacgaa

SEQ ID NO: 224030 - DNA, 25 bp, Probe sequence
aacaactacgaatagaggttacaat

SEQ ID NO: 224031 - DNA, 25 bp, Probe sequence
aactcaggatctgcaacaactacga

SEQ ID NO: 224032 - DNA, 25 bp, Probe sequence
aaccaagtactaaaagtatctggct

SEQ ID NO: 224033 - DNA, 25 bp, Probe sequence
cagcagatggttacactatcgacaa

SEQ ID NO: 224034 - DNA, 25 bp, Probe sequence
cagcggcagcagatggttacactat

SEQ ID NO: 224035 - DNA, 25 bp, Probe sequence
caggatctgcaacaactacgaatag

SEQ ID NO: 224036 - DNA, 25 bp, Probe sequence
catcaacgaactcaggtggcggatc

SEQ ID NO: 224037 - DNA, 25 bp, Probe sequence
ctcaggatctgcaacaactacgaat

SEQ ID NO: 224038 - DNA, 25 bp, Probe sequence
cgtccatcaacgaactcaggtggcg

SEQ ID NO: 224039 - DNA, 25 bp, Probe sequence
cggcagcagatggttacactatcga

SEQ ID NO: 224040 - DNA, 25 bp, Probe sequence
cgaactcaggatctgcaacaactac

SEQ ID NO: 224041 - DNA, 25 bp, Probe sequence
gcggcagcagatggttacactatcg

SEQ ID NO: 224042 - DNA, 25 bp, Probe sequence
gcagatggttacactatcgacaata

SEQ ID NO: 224043 - DNA, 25 bp, Probe sequence
gcagcagatggttacactatcgaca

SEQ ID NO: 224044 - DNA, 25 bp, Probe sequence
gcaacaactacgaatagaggttaca

SEQ ID NO: 224045 - DNA, 25 bp, Probe sequence
gaactcaggatctgcaacaactacg

SEQ ID NO: 224046 - DNA, 25 bp, Probe sequence
gatggttacactatcgacaatagac

SEQ ID NO: 224047 - DNA, 25 bp, Probe sequence
gatctgcaacaactacgaatagagg

SEQ ID NO: 224048 - DNA, 25 bp, Probe sequence
gttacactatcgacaatagacctac

SEQ ID NO: 224049 - DNA, 25 bp, Probe sequence
gtccatcaacgaactcaggtggcgg

SEQ ID NO: 224050 - DNA, 25 bp, Probe sequence
ggatctgcaacaactacgaatagag

SEQ ID NO: 224051 - DNA, 25 bp, Probe sequence
ggcagcagatggttacactatcgac

SEQ ID NO: 224052 - DNA, 25 bp, Probe sequence
tggtacaacttatcaaaaaattatg

SEQ ID NO: 224053 - DNA, 25 bp, Probe sequence
tctgcaacaactacgaatagaggtt

SEQ ID NO: 224054 - DNA, 25 bp, Probe sequence
tcaggatctgcaacaactacgaata

SEQ ID NO: 224055 - DNA, 25 bp, Probe sequence
ttacactatcgacaatagacctact

SEQ ID NO: 224056 - DNA, 25 bp, Probe sequence
attgcgcctgctgtcaaagtttgga

SEQ ID NO: 224057 - DNA, 25 bp, Probe sequence
atttcgcgcattaaccaaaatcgat

SEQ ID NO: 224058 - DNA, 25 bp, Probe sequence
atcgattgggaaaacgtaactatca

SEQ ID NO: 224059 - DNA, 25 bp, Probe sequence
atgatgcgttgattgcgcctgctgt

SEQ ID NO: 224060 - DNA, 25 bp, Probe sequence
atggatttcgcgcattaaccaaaat

SEQ ID NO: 224061 - DNA, 25 bp, Probe sequence
acggatatacgctggattgataaag

SEQ ID NO: 224062 - DNA, 25 bp, Probe sequence
acaacaggatatgttaactgagtta

SEQ ID NO: 224063 - DNA, 25 bp, Probe sequence
aaatggatttcgcgcattaaccaaa

SEQ ID NO: 224064 - DNA, 25 bp, Probe sequence
aactgagttaaatggatttcgcgca

SEQ ID NO: 224065 - DNA, 25 bp, Probe sequence
aatgatgcgttgattgcgcctgctg

SEQ ID NO: 224066 - DNA, 25 bp, Probe sequence
aattacggatatacgctggattgat

SEQ ID NO: 224067 - DNA, 25 bp, Probe sequence
cttgttcaagtaaggaatcgcgaaa

SEQ ID NO: 224068 - DNA, 25 bp, Probe sequence
ctgctgtcaaagtttggattgaaac

SEQ ID NO: 224069 - DNA, 25 bp, Probe sequence
gcctgctgtcaaagtttggattgaa

SEQ ID NO: 224070 - DNA, 25 bp, Probe sequence
gcgcctgctgtcaaagtttggattg

SEQ ID NO: 224071 - DNA, 25 bp, Probe sequence
gcgcattaaccaaaatcgattggga

SEQ ID NO: 224072 - DNA, 25 bp, Probe sequence
gaaattacggatatacgctggattg

SEQ ID NO: 224073 - DNA, 25 bp, Probe sequence
gagttaaatggatttcgcgcattaa

SEQ ID NO: 224074 - DNA, 25 bp, Probe sequence
gataatgatgcgttgattgcgcctg

SEQ ID NO: 224075 - DNA, 25 bp, Probe sequence
gtaaggaatcgcgaaaagtattatt

SEQ ID NO: 224076 - DNA, 25 bp, Probe sequence
gggaaaacgtaactatcaataatga

SEQ ID NO: 224077 - DNA, 25 bp, Probe sequence
gggacaattgtaggtcctgcatatc

SEQ ID NO: 224078 - DNA, 25 bp, Probe sequence
ggatttcgcgcattaaccaaaatcg

SEQ ID NO: 224079 - DNA, 25 bp, Probe sequence
ggatatacgctggattgataaagat

SEQ ID NO: 224080 - DNA, 25 bp, Probe sequence
tgattgcgcctgctgtcaaagtttg

SEQ ID NO: 224081 - DNA, 25 bp, Probe sequence
tgcgcctgctgtcaaagtttggatt

SEQ ID NO: 224082 - DNA, 25 bp, Probe sequence
tcgggacaattgtaggtcctgcata

SEQ ID NO: 224083 - DNA, 25 bp, Probe sequence
taatgatgcgttgattgcgcctgct

SEQ ID NO: 224084 - DNA, 25 bp, Probe sequence
taaatggatttcgcgcattaaccaa

SEQ ID NO: 224085 - DNA, 25 bp, Probe sequence
tacgctggattgataaagataatga

SEQ ID NO: 224086 - DNA, 25 bp, Probe sequence
ttacggatatacgctggattgataa

SEQ ID NO: 224087 - DNA, 25 bp, Probe sequence
ttcgcgcattaaccaaaatcgattg

SEQ ID NO: 224088 - DNA, 25 bp, Probe sequence
ttgcgcctgctgtcaaagtttggat

SEQ ID NO: 224089 - DNA, 25 bp, Probe sequence
ttgattgcgcctgctgtcaaagttt

SEQ ID NO: 224090 - DNA, 25 bp, Probe sequence
atttgtcctgctaaagtaccagtaa

SEQ ID NO: 224091 - DNA, 25 bp, Probe sequence
atacgataacaggaatgacagcaag

SEQ ID NO: 224092 - DNA, 25 bp, Probe sequence
atcttaaaaatccttccattacaat

SEQ ID NO: 224093 - DNA, 25 bp, Probe sequence
atccttccattacaatttgtcctgc

SEQ ID NO: 224094 - DNA, 25 bp, Probe sequence
agtaccagtaatcgttgaattttga

SEQ ID NO: 224095 - DNA, 25 bp, Probe sequence
accaatttggtatgtgtaatcttaa

SEQ ID NO: 224096 - DNA, 25 bp, Probe sequence
acgtcttaaccaatttggtatgtgt

SEQ ID NO: 224097 - DNA, 25 bp, Probe sequence
acaatttgtcctgctaaagtaccag

SEQ ID NO: 224098 - DNA, 25 bp, Probe sequence
aaatccttccattacaatttgtcct

SEQ ID NO: 224099 - DNA, 25 bp, Probe sequence
aagtaccagtaatcgttgaattttg

SEQ ID NO: 224100 - DNA, 25 bp, Probe sequence
aatccttccattacaatttgtcctg

SEQ ID NO: 224101 - DNA, 25 bp, Probe sequence
aatttgtcctgctaaagtaccagta

SEQ ID NO: 224102 - DNA, 25 bp, Probe sequence
caatttgtcctgctaaagtaccagt

SEQ ID NO: 224103 - DNA, 25 bp, Probe sequence
cattacaatttgtcctgctaaagta

SEQ ID NO: 224104 - DNA, 25 bp, Probe sequence
cttccattacaatttgtcctgctaa

SEQ ID NO: 224105 - DNA, 25 bp, Probe sequence
cctgctaaagtaccagtaatcgttg

SEQ ID NO: 224106 - DNA, 25 bp, Probe sequence
ccttccattacaatttgtcctgcta

SEQ ID NO: 224107 - DNA, 25 bp, Probe sequence
gctaaagtaccagtaatcgttgaat

SEQ ID NO: 224108 - DNA, 25 bp, Probe sequence
gtcctgctaaagtaccagtaatcgt

SEQ ID NO: 224109 - DNA, 25 bp, Probe sequence
gtgtaatcttaaaaatccttccatt

SEQ ID NO: 224110 - DNA, 25 bp, Probe sequence
tgtgtaatcttaaaaatccttccat

SEQ ID NO: 224111 - DNA, 25 bp, Probe sequence
tgtaatcttaaaaatccttccatta

SEQ ID NO: 224112 - DNA, 25 bp, Probe sequence
tccttccattacaatttgtcctgct

SEQ ID NO: 224113 - DNA, 25 bp, Probe sequence
tccattacaatttgtcctgctaaag

SEQ ID NO: 224114 - DNA, 25 bp, Probe sequence
tcttaaaaatccttccattacaatt

SEQ ID NO: 224115 - DNA, 25 bp, Probe sequence
taatcttaaaaatccttccattaca

SEQ ID NO: 224116 - DNA, 25 bp, Probe sequence
taaccaatttggtatgtgtaatctt

SEQ ID NO: 224117 - DNA, 25 bp, Probe sequence
taaaaatccttccattacaatttgt

SEQ ID NO: 224118 - DNA, 25 bp, Probe sequence
taaacgtcttaaccaatttggtatg

SEQ ID NO: 224119 - DNA, 25 bp, Probe sequence
tacaatttgtcctgctaaagtacca

SEQ ID NO: 224120 - DNA, 25 bp, Probe sequence
tttgtcctgctaaagtaccagtaat

SEQ ID NO: 224121 - DNA, 25 bp, Probe sequence
ttacaatttgtcctgctaaagtacc

SEQ ID NO: 224122 - DNA, 25 bp, Probe sequence
ttccattacaatttgtcctgctaaa

SEQ ID NO: 224123 - DNA, 25 bp, Probe sequence
ttgtcctgctaaagtaccagtaatc

SEQ ID NO: 224124 - DNA, 25 bp, Probe sequence
attcgatgttagaagcttttcaatt

SEQ ID NO: 224125 - DNA, 25 bp, Probe sequence
atcgttgtaatggatggcaggcaat

SEQ ID NO: 224126 - DNA, 25 bp, Probe sequence
atgccatggcactttatcgccaaca

SEQ ID NO: 224127 - DNA, 25 bp, Probe sequence
atgtcccacaagattattcgatgtt

SEQ ID NO: 224128 - DNA, 25 bp, Probe sequence
aggcaatgtgtggccttttttacat

SEQ ID NO: 224129 - DNA, 25 bp, Probe sequence
aggtatcccatcgttgtaatggatg

SEQ ID NO: 224130 - DNA, 25 bp, Probe sequence
aggtcatttagtgttgatcaacgtt

SEQ ID NO: 224131 - DNA, 25 bp, Probe sequence
agctgcaatgtctgataatgaaagg

SEQ ID NO: 224132 - DNA, 25 bp, Probe sequence
aacgccagaggaaaatattacagct

SEQ ID NO: 224133 - DNA, 25 bp, Probe sequence
aatgacaccatcatgttacgacatt

SEQ ID NO: 224134 - DNA, 25 bp, Probe sequence
aattggcgtcatttatcacttcaac

SEQ ID NO: 224135 - DNA, 25 bp, Probe sequence
catttatcacttcaacatttcagga

SEQ ID NO: 224136 - DNA, 25 bp, Probe sequence
cggaagacctgttcatattatggcg

SEQ ID NO: 224137 - DNA, 25 bp, Probe sequence
ccatcatgttacgacattatgtccc

SEQ ID NO: 224138 - DNA, 25 bp, Probe sequence
ccacatgccatggcactttatcgcc

SEQ ID NO: 224139 - DNA, 25 bp, Probe sequence
gccttttttacattacatcgtggaa

SEQ ID NO: 224140 - DNA, 25 bp, Probe sequence
gcgtcatttatcacttcaacatttc

SEQ ID NO: 224141 - DNA, 25 bp, Probe sequence
gacaatccacatgccatggcacttt

SEQ ID NO: 224142 - DNA, 25 bp, Probe sequence
gacattatgtcccacaagattattc

SEQ ID NO: 224143 - DNA, 25 bp, Probe sequence
gatggcaggcaatgtgtggcctttt

SEQ ID NO: 224144 - DNA, 25 bp, Probe sequence
gatgcagtatttttcaggtcattta

SEQ ID NO: 224145 - DNA, 25 bp, Probe sequence
gtcgcaccatttagcgataaccaag

SEQ ID NO: 224146 - DNA, 25 bp, Probe sequence
gtggccttttttacattacatcgtg

SEQ ID NO: 224147 - DNA, 25 bp, Probe sequence
ggcactttatcgccaacaaggatat

SEQ ID NO: 224148 - DNA, 25 bp, Probe sequence
tgaagtttgttaaaacgccagagga

SEQ ID NO: 224149 - DNA, 25 bp, Probe sequence
tcgccaacaaggatatcaatatatg

SEQ ID NO: 224150 - DNA, 25 bp, Probe sequence
tcacttcaacatttcaggatattaa

SEQ ID NO: 224151 - DNA, 25 bp, Probe sequence
taatactgacaatccacatgccatg

SEQ ID NO: 224152 - DNA, 25 bp, Probe sequence
taatgagattgtgttaacggttaat

SEQ ID NO: 224153 - DNA, 25 bp, Probe sequence
taatgaaaggtatcccatcgttgta

SEQ ID NO: 224154 - DNA, 25 bp, Probe sequence
tattacagctgcaatgtctgataat

SEQ ID NO: 224155 - DNA, 25 bp, Probe sequence
ttagtgttgatcaacgttatcgtaa

SEQ ID NO: 224156 - DNA, 25 bp, Probe sequence
ttagcgataaccaagatgcagtatt

SEQ ID NO: 224157 - DNA, 25 bp, Probe sequence
ttaacggttaatactgacaatccac

SEQ ID NO: 224158 - DNA, 25 bp, Probe sequence
ataactttattgtcttttcatctga

SEQ ID NO: 224159 - DNA, 25 bp, Probe sequence
agaaggatcctatcggtgcaatggg

SEQ ID NO: 224160 - DNA, 25 bp, Probe sequence
agttctattcgactcagtgcgattt

SEQ ID NO: 224161 - DNA, 25 bp, Probe sequence
agcgattggcttgtctcatgatgtg

SEQ ID NO: 224162 - DNA, 25 bp, Probe sequence
actgttatgtcctttcgatgggcca

SEQ ID NO: 224163 - DNA, 25 bp, Probe sequence
acatcatgcttttaatccggaatct

SEQ ID NO: 224164 - DNA, 25 bp, Probe sequence
aagagggtcaacgccaggtatcggt

SEQ ID NO: 224165 - DNA, 25 bp, Probe sequence
caccaccgccacatcatgatattta

SEQ ID NO: 224166 - DNA, 25 bp, Probe sequence
caggtatcggtctgatttcaccacc

SEQ ID NO: 224167 - DNA, 25 bp, Probe sequence
catgccggtgttccttgggagattg

SEQ ID NO: 224168 - DNA, 25 bp, Probe sequence
gcgtacgcatgtgcgcttggagcgg

SEQ ID NO: 224169 - DNA, 25 bp, Probe sequence
gctggtaacgtctcattctatggtg

SEQ ID NO: 224170 - DNA, 25 bp, Probe sequence
gctttgcaatgccgatgttactcgc

SEQ ID NO: 224171 - DNA, 25 bp, Probe sequence
gcatcatgttgcttgtttactcgca

SEQ ID NO: 224172 - DNA, 25 bp, Probe sequence
gcatgtacaccgattgacatcgacc

SEQ ID NO: 224173 - DNA, 25 bp, Probe sequence
gcaaggcgctcaaattctagtgtta

SEQ ID NO: 224174 - DNA, 25 bp, Probe sequence
gcaattgtgccatacctagcgcaac

SEQ ID NO: 224175 - DNA, 25 bp, Probe sequence
gaatccaccaattgatgcgtatcgt

SEQ ID NO: 224176 - DNA, 25 bp, Probe sequence
gaatggtcatgctggtcaaagtctt

SEQ ID NO: 224177 - DNA, 25 bp, Probe sequence
gaacgagcgaccagaatcactattt

SEQ ID NO: 224178 - DNA, 25 bp, Probe sequence
gacaaacttggcgcgcttacagata

SEQ ID NO: 224179 - DNA, 25 bp, Probe sequence
gagttcttatcgttagccatggagc

SEQ ID NO: 224180 - DNA, 25 bp, Probe sequence
gatggtcctacaatgatttcgttct

SEQ ID NO: 224181 - DNA, 25 bp, Probe sequence
gatacgatgccagtcattcaacaag

SEQ ID NO: 224182 - DNA, 25 bp, Probe sequence
gtaacttactagcacctgacgaaac

SEQ ID NO: 224183 - DNA, 25 bp, Probe sequence
gtttgcacaagttacgaatccacca

SEQ ID NO: 224184 - DNA, 25 bp, Probe sequence
gtaacggactttgatatcccaggtg

SEQ ID NO: 224185 - DNA, 25 bp, Probe sequence
ggtgttggtaccattgcatctgggg

SEQ ID NO: 224186 - DNA, 25 bp, Probe sequence
gggttacaaggcaccgttgtcgata

SEQ ID NO: 224187 - DNA, 25 bp, Probe sequence
ggattacgtccaggtcgttatacga

SEQ ID NO: 224188 - DNA, 25 bp, Probe sequence
tcggcgcagatggcatcactggtga

SEQ ID NO: 224189 - DNA, 25 bp, Probe sequence
tctattttcttattgcagcacgcat

SEQ ID NO: 224190 - DNA, 25 bp, Probe sequence
tattgcttacgttatcccgtctgat

SEQ ID NO: 224191 - DNA, 25 bp, Probe sequence
ttatctggtggtacggtcattgtca

SEQ ID NO: 224192 - DNA, 25 bp, Probe sequence
gtagcgccgaaagttccgagtcgcc

SEQ ID NO: 224193 - DNA, 25 bp, Probe sequence
atgtcattatcattggtgctggtga

SEQ ID NO: 224194 - DNA, 25 bp, Probe sequence
agttccgagtcgccgtagagatgaa

SEQ ID NO: 224195 - DNA, 25 bp, Probe sequence
accatgcgaaagtgcttgtgtgatg

SEQ ID NO: 224196 - DNA, 25 bp, Probe sequence
acgtgctagagaatcaggcggttta

SEQ ID NO: 224197 - DNA, 25 bp, Probe sequence
actggtagaccgtttgaagcatcat

SEQ ID NO: 224198 - DNA, 25 bp, Probe sequence
acaaataactttcctgactttacag

SEQ ID NO: 224199 - DNA, 25 bp, Probe sequence
aagaagatgcctctatccaaggtgc

SEQ ID NO: 224200 - DNA, 25 bp, Probe sequence
aagtggcaatcgttggaagcggtcc

SEQ ID NO: 224201 - DNA, 25 bp, Probe sequence
aatcggcttcgaaggtacagaacca

SEQ ID NO: 224202 - DNA, 25 bp, Probe sequence
gaaaatggttgggtagcgccgaaag

SEQ ID NO: 224203 - DNA, 25 bp, Probe sequence
ctgctgctgaagaacttaatctact

SEQ ID NO: 224204 - DNA, 25 bp, Probe sequence
ccttgtattattatcaatcggcttc

SEQ ID NO: 224205 - DNA, 25 bp, Probe sequence
gccgttttgtcaaaccggacaacag

SEQ ID NO: 224206 - DNA, 25 bp, Probe sequence
gctgctggagatgctagacgtggtc

SEQ ID NO: 224207 - DNA, 25 bp, Probe sequence
gaatctgagtatgatgccattatat

SEQ ID NO: 224208 - DNA, 25 bp, Probe sequence
gtatggattgtggaacgccgttttg

SEQ ID NO: 224209 - DNA, 25 bp, Probe sequence
gaaggacgcatgggtgatggtatac

SEQ ID NO: 224210 - DNA, 25 bp, Probe sequence
gaaccaacagtaccgaatgctttta

SEQ ID NO: 224211 - DNA, 25 bp, Probe sequence
gaaaatgcatcatggcctttagcaa

SEQ ID NO: 224212 - DNA, 25 bp, Probe sequence
gaggcgtagcgaaagcagtagatca

SEQ ID NO: 224213 - DNA, 25 bp, Probe sequence
gatggtatacatttcgctatggatt

SEQ ID NO: 224214 - DNA, 25 bp, Probe sequence
gtatgtcctgcaccatgcgaaagtg

SEQ ID NO: 224215 - DNA, 25 bp, Probe sequence
gtgaattatcactggtagaccgttt

SEQ ID NO: 224216 - DNA, 25 bp, Probe sequence
ggggcagactgtgtagcgacagcat

SEQ ID NO: 224217 - DNA, 25 bp, Probe sequence
ggtgctggtgatacaggggcagact

SEQ ID NO: 224218 - DNA, 25 bp, Probe sequence
ggtgttcaaacaatgcgttacgatg

SEQ ID NO: 224219 - DNA, 25 bp, Probe sequence
ggcctttagcaatgccggtgtttaa

SEQ ID NO: 224220 - DNA, 25 bp, Probe sequence
ggacctgaaagattttggcctgctg

SEQ ID NO: 224221 - DNA, 25 bp, Probe sequence
ggaaccacgtgcatatggtgttcaa

SEQ ID NO: 224222 - DNA, 25 bp, Probe sequence
tggactatgcgcaccaagagtacga

SEQ ID NO: 224223 - DNA, 25 bp, Probe sequence
tacagggcgtgtatgtcctgcacca

SEQ ID NO: 224224 - DNA, 25 bp, Probe sequence
taaagatgtggttcgacgtcgtatt

SEQ ID NO: 224225 - DNA, 25 bp, Probe sequence
tttggcctgctgaccttgtattatt

SEQ ID NO: 224226 - DNA, 25 bp, Probe sequence
attacctgcgattgtgacagctggt

SEQ ID NO: 224227 - DNA, 25 bp, Probe sequence
atatcaaattgtcattggtccagga

SEQ ID NO: 224228 - DNA, 25 bp, Probe sequence
atgaaacaggtgctcaagaagcttc

SEQ ID NO: 224229 - DNA, 25 bp, Probe sequence
atgtttttagcagtagatttccaat

SEQ ID NO: 224230 - DNA, 25 bp, Probe sequence
agttactggatttttagcatttatt

SEQ ID NO: 224231 - DNA, 25 bp, Probe sequence
agagattaagcagttgaattaccaa

SEQ ID NO: 224232 - DNA, 25 bp, Probe sequence
acggcatttattttcttaccagcat

SEQ ID NO: 224233 - DNA, 25 bp, Probe sequence
aaagcagaccatcaatatcaaattg

SEQ ID NO: 224234 - DNA, 25 bp, Probe sequence
aagggaatccagtacaacgtttgat

SEQ ID NO: 224235 - DNA, 25 bp, Probe sequence
aatgttggtcgttggacccgtagcg

SEQ ID NO: 224236 - DNA, 25 bp, Probe sequence
aattggttggagtagtatgcgtgta

SEQ ID NO: 224237 - DNA, 25 bp, Probe sequence
catttattatcattggaccagttgc

SEQ ID NO: 224238 - DNA, 25 bp, Probe sequence
ccgcaattagtatctcagtatgatt

SEQ ID NO: 224239 - DNA, 25 bp, Probe sequence
gcgtgtatttggtggtagtccgatt

SEQ ID NO: 224240 - DNA, 25 bp, Probe sequence
gcatttattttcttaccagcattaa

SEQ ID NO: 224241 - DNA, 25 bp, Probe sequence
gacccgtagcgcttttagttactgg

SEQ ID NO: 224242 - DNA, 25 bp, Probe sequence
tgaattaccaaggtcaagtgttgcc

SEQ ID NO: 224243 - DNA, 25 bp, Probe sequence
gattggtacaggtattacatctggt

SEQ ID NO: 224244 - DNA, 25 bp, Probe sequence
gttcacgattcgataaaaatgttgg

SEQ ID NO: 224245 - DNA, 25 bp, Probe sequence
gtatctcagtatgatttggcaaaag

SEQ ID NO: 224246 - DNA, 25 bp, Probe sequence
gtatgcgtgtatttggtggtagtcc

SEQ ID NO: 224247 - DNA, 25 bp, Probe sequence
gtagcgcttttagttactggatttt

SEQ ID NO: 224248 - DNA, 25 bp, Probe sequence
gtacaggtattacatctggtgttac

SEQ ID NO: 224249 - DNA, 25 bp, Probe sequence
gtcattggtccaggaacagtcgatg

SEQ ID NO: 224250 - DNA, 25 bp, Probe sequence
gtcgatgaagtgtataagcagttta

SEQ ID NO: 224251 - DNA, 25 bp, Probe sequence
ggagtagtatgcgtgtatttggtgg

SEQ ID NO: 224252 - DNA, 25 bp, Probe sequence
tggtccaggaacagtcgatgaagtg

SEQ ID NO: 224253 - DNA, 25 bp, Probe sequence
tgcgattgtgacagctggtttgtta

SEQ ID NO: 224254 - DNA, 25 bp, Probe sequence
tacatctggtgttacatttatattc

SEQ ID NO: 224255 - DNA, 25 bp, Probe sequence
tatttggtggtagtccgattctagg

SEQ ID NO: 224256 - DNA, 25 bp, Probe sequence
tttagcatttattatcattggacca

SEQ ID NO: 224257 - DNA, 25 bp, Probe sequence
tttttataccaatattacctgcgat

SEQ ID NO: 224258 - DNA, 25 bp, Probe sequence
ttcttaccagcattaattggttgga

SEQ ID NO: 224259 - DNA, 25 bp, Probe sequence
ttgtgacagctggtttgttaatggg

SEQ ID NO: 224260 - DNA, 25 bp, Probe sequence
attgacgtctgcaatggaaatgctt

SEQ ID NO: 224261 - DNA, 25 bp, Probe sequence
atggaaatgcttttaatcgcttgaa

SEQ ID NO: 224262 - DNA, 25 bp, Probe sequence
agctacaaagccatatattactgtt

SEQ ID NO: 224263 - DNA, 25 bp, Probe sequence
acgtctgcaatggaaatgcttttaa

SEQ ID NO: 224264 - DNA, 25 bp, Probe sequence
acaaagccatatattactgttaatt

SEQ ID NO: 224265 - DNA, 25 bp, Probe sequence
aaagccatatattactgttaattga

SEQ ID NO: 224266 - DNA, 25 bp, Probe sequence
aagtagctacaaagccatatattac

SEQ ID NO: 224267 - DNA, 25 bp, Probe sequence
aatggaaatgcttttaatcgcttga

SEQ ID NO: 224268 - DNA, 25 bp, Probe sequence
caatggaaatgcttttaatcgcttg

SEQ ID NO: 224269 - DNA, 25 bp, Probe sequence
ctgcaatggaaatgcttttaatcgc

SEQ ID NO: 224270 - DNA, 25 bp, Probe sequence
cggtttgattgacgtctgcaatgga

SEQ ID NO: 224271 - DNA, 25 bp, Probe sequence
gctacaaagccatatattactgtta

SEQ ID NO: 224272 - DNA, 25 bp, Probe sequence
gcaatggaaatgcttttaatcgctt

SEQ ID NO: 224273 - DNA, 25 bp, Probe sequence
gaaatgcttttaatcgcttgaaaac

SEQ ID NO: 224274 - DNA, 25 bp, Probe sequence
gacgtctgcaatggaaatgctttta

SEQ ID NO: 224275 - DNA, 25 bp, Probe sequence
gattgacgtctgcaatggaaatgct

SEQ ID NO: 224276 - DNA, 25 bp, Probe sequence
gttcggtttgattgacgtctgcaat

SEQ ID NO: 224277 - DNA, 25 bp, Probe sequence
gtttgattgacgtctgcaatggaaa

SEQ ID NO: 224278 - DNA, 25 bp, Probe sequence
gtagctacaaagccatatattactg

SEQ ID NO: 224279 - DNA, 25 bp, Probe sequence
gtctgcaatggaaatgcttttaatc

SEQ ID NO: 224280 - DNA, 25 bp, Probe sequence
gtgttcggtttgattgacgtctgca

SEQ ID NO: 224281 - DNA, 25 bp, Probe sequence
ggtttgattgacgtctgcaatggaa

SEQ ID NO: 224282 - DNA, 25 bp, Probe sequence
ggaaatgcttttaatcgcttgaaaa

SEQ ID NO: 224283 - DNA, 25 bp, Probe sequence
tggaaatgcttttaatcgcttgaaa

SEQ ID NO: 224284 - DNA, 25 bp, Probe sequence
tgttcggtttgattgacgtctgcaa

SEQ ID NO: 224285 - DNA, 25 bp, Probe sequence
tgattgacgtctgcaatggaaatgc

SEQ ID NO: 224286 - DNA, 25 bp, Probe sequence
tgacgtctgcaatggaaatgctttt

SEQ ID NO: 224287 - DNA, 25 bp, Probe sequence
tcggtttgattgacgtctgcaatgg

SEQ ID NO: 224288 - DNA, 25 bp, Probe sequence
tacaaagccatatattactgttaat

SEQ ID NO: 224289 - DNA, 25 bp, Probe sequence
tagctacaaagccatatattactgt

SEQ ID NO: 224290 - DNA, 25 bp, Probe sequence
tttgattgacgtctgcaatggaaat

SEQ ID NO: 224291 - DNA, 25 bp, Probe sequence
ttcggtttgattgacgtctgcaatg

SEQ ID NO: 224292 - DNA, 25 bp, Probe sequence
ttgattgacgtctgcaatggaaatg

SEQ ID NO: 224293 - DNA, 25 bp, Probe sequence
ttgacgtctgcaatggaaatgcttt

SEQ ID NO: 224294 - DNA, 25 bp, Probe sequence
gccacgggtagtgtctagatttggt

SEQ ID NO: 224295 - DNA, 25 bp, Probe sequence
attgcgaatttctcagcatcggctg

SEQ ID NO: 224296 - DNA, 25 bp, Probe sequence
atacggatggtcctagagtgcatga

SEQ ID NO: 224297 - DNA, 25 bp, Probe sequence
caacgaggtatttatgacggtggcg

SEQ ID NO: 224298 - DNA, 25 bp, Probe sequence
agtgtttttaattttcatcatctaa

SEQ ID NO: 224299 - DNA, 25 bp, Probe sequence
aaatgttagctatcgcactgcatat

SEQ ID NO: 224300 - DNA, 25 bp, Probe sequence
aattcgagaacgcctatgcaatgga

SEQ ID NO: 224301 - DNA, 25 bp, Probe sequence
caatcattggatagacttcggcgtt

SEQ ID NO: 224302 - DNA, 25 bp, Probe sequence
gcgggtttggtgcaattgtaatcga

SEQ ID NO: 224303 - DNA, 25 bp, Probe sequence
gcatcggctgttgatttgccagaag

SEQ ID NO: 224304 - DNA, 25 bp, Probe sequence
gaatcgattaatgcctaccatcagt

SEQ ID NO: 224305 - DNA, 25 bp, Probe sequence
gaagtacgtcaatcgttatatcgca

SEQ ID NO: 224306 - DNA, 25 bp, Probe sequence
gaaattggtatgacggacccacatt

SEQ ID NO: 224307 - DNA, 25 bp, Probe sequence
gacggtggcggatggaacgcgattt

SEQ ID NO: 224308 - DNA, 25 bp, Probe sequence
gagtgcatgagtttctgcatgaatt

SEQ ID NO: 224309 - DNA, 25 bp, Probe sequence
gatggttttcgatttgatgtcatta

SEQ ID NO: 224310 - DNA, 25 bp, Probe sequence
gatttggtgatgatacgtcggaaga

SEQ ID NO: 224311 - DNA, 25 bp, Probe sequence
gtttggtaacactgacatgatgact

SEQ ID NO: 224312 - DNA, 25 bp, Probe sequence
gtatggagacattgtgccacgtttt

SEQ ID NO: 224313 - DNA, 25 bp, Probe sequence
gtaatcatgatcagccacgggtagt

SEQ ID NO: 224314 - DNA, 25 bp, Probe sequence
gtgccacgttttatggatcatgatc

SEQ ID NO: 224315 - DNA, 25 bp, Probe sequence
gtgaagggcatgctgaagcggatgt

SEQ ID NO: 224316 - DNA, 25 bp, Probe sequence
ggtcaacgttagacaagcacttcag

SEQ ID NO: 224317 - DNA, 25 bp, Probe sequence
ggatttacagctggtaagccttgga

SEQ ID NO: 224318 - DNA, 25 bp, Probe sequence
ggagtgatgatgttaatgctggatt

SEQ ID NO: 224319 - DNA, 25 bp, Probe sequence
ggagaaatgtcttcgacgacgattg

SEQ ID NO: 224320 - DNA, 25 bp, Probe sequence
ggaaaattatcatcaggtcaacgtt

SEQ ID NO: 224321 - DNA, 25 bp, Probe sequence
ggacccacattttacatcaatagca

SEQ ID NO: 224322 - DNA, 25 bp, Probe sequence
ggacgccatatatttaccaaggtga

SEQ ID NO: 224323 - DNA, 25 bp, Probe sequence
ggaacgcgattttctggtgtaatca

SEQ ID NO: 224324 - DNA, 25 bp, Probe sequence
tgcatatgttgcaagggacgccata

SEQ ID NO: 224325 - DNA, 25 bp, Probe sequence
taagccttggattgatatttcggaa

SEQ ID NO: 224326 - DNA, 25 bp, Probe sequence
tagacttcggcgttgatggttttcg

SEQ ID NO: 224327 - DNA, 25 bp, Probe sequence
ttgggataatccggaagtacgtcaa

SEQ ID NO: 224328 - DNA, 25 bp, Probe sequence
attccgtctgaacatgatttggtgc

SEQ ID NO: 224329 - DNA, 25 bp, Probe sequence
atgaggttgttgaagcgcatgaagt

SEQ ID NO: 224330 - DNA, 25 bp, Probe sequence
aggtaatgatgttgcgagtgattct

SEQ ID NO: 224331 - DNA, 25 bp, Probe sequence
agatatattaaacgggcagattcaa

SEQ ID NO: 224332 - DNA, 25 bp, Probe sequence
aactcgtcggcttaaccaacatgtg

SEQ ID NO: 224333 - DNA, 25 bp, Probe sequence
aatacaatgccgtttcaatataata

SEQ ID NO: 224334 - DNA, 25 bp, Probe sequence
aatatttcaaaacatcttgcaaatg

SEQ ID NO: 224335 - DNA, 25 bp, Probe sequence
caagcatatcaattgtttggtgatg

SEQ ID NO: 224336 - DNA, 25 bp, Probe sequence
catctcgagagaccgtgcgtaaggc

SEQ ID NO: 224337 - DNA, 25 bp, Probe sequence
cagttcgaagtattgtgtatttaga

SEQ ID NO: 224338 - DNA, 25 bp, Probe sequence
catgctttaaacatcaattctagtg

SEQ ID NO: 224339 - DNA, 25 bp, Probe sequence
ctcattcatattgttagaactcgtc

SEQ ID NO: 224340 - DNA, 25 bp, Probe sequence
gaagttcaacatgctttaaacatca

SEQ ID NO: 224341 - DNA, 25 bp, Probe sequence
gaagttgttgtgaatgaggttgttg

SEQ ID NO: 224342 - DNA, 25 bp, Probe sequence
gaaccgtttgatgaacaagcatatc

SEQ ID NO: 224343 - DNA, 25 bp, Probe sequence
gagaccgtgcgtaaggcattagatt

SEQ ID NO: 224344 - DNA, 25 bp, Probe sequence
gaggttacagagtttccattttctg

SEQ ID NO: 224345 - DNA, 25 bp, Probe sequence
gatgttgcgagtgattctatttatg

SEQ ID NO: 224346 - DNA, 25 bp, Probe sequence
gattcatggtaaagggtcacttgtc

SEQ ID NO: 224347 - DNA, 25 bp, Probe sequence
gttggcattagacggcatgattcaa

SEQ ID NO: 224348 - DNA, 25 bp, Probe sequence
gtaccagtcatctcgagagaccgtg

SEQ ID NO: 224349 - DNA, 25 bp, Probe sequence
gtaaagggtcacttgtcatttatca

SEQ ID NO: 224350 - DNA, 25 bp, Probe sequence
gtaaggcattagatttgttggcatt

SEQ ID NO: 224351 - DNA, 25 bp, Probe sequence
gtctgaacatgatttggtgcaattg

SEQ ID NO: 224352 - DNA, 25 bp, Probe sequence
gtcggcttaaccaacatgtgaagat

SEQ ID NO: 224353 - DNA, 25 bp, Probe sequence
gtcgcatatttaactgaagttgttg

SEQ ID NO: 224354 - DNA, 25 bp, Probe sequence
gtgcaattgtaccagtcatctcgag

SEQ ID NO: 224355 - DNA, 25 bp, Probe sequence
gtgattctatttatgattatttgga

SEQ ID NO: 224356 - DNA, 25 bp, Probe sequence
gtggcttattcagcaacagttcgaa

SEQ ID NO: 224357 - DNA, 25 bp, Probe sequence
tagacggcatgattcaaaagattca

SEQ ID NO: 224358 - DNA, 25 bp, Probe sequence
tatggtgaacaaattccgtctgaac

SEQ ID NO: 224359 - DNA, 25 bp, Probe sequence
tattttctaaagtcgattgtttcag

SEQ ID NO: 224360 - DNA, 25 bp, Probe sequence
ttagaactcgtcggcttaaccaaca

SEQ ID NO: 224361 - DNA, 25 bp, Probe sequence
ttagttattcaagtaagtctattac

SEQ ID NO: 224362 - DNA, 25 bp, Probe sequence
attaggtcgtggcttggttcaagca

SEQ ID NO: 224363 - DNA, 25 bp, Probe sequence
ataacgatgtcgttggacacgtttt

SEQ ID NO: 224364 - DNA, 25 bp, Probe sequence
atctccttgctataattttgaatta

SEQ ID NO: 224365 - DNA, 25 bp, Probe sequence
agaccattgttttgactactttgaa

SEQ ID NO: 224366 - DNA, 25 bp, Probe sequence
agacgtattatggtttggcgattgc

SEQ ID NO: 224367 - DNA, 25 bp, Probe sequence
agaaagttttgatgataatcctgaa

SEQ ID NO: 224368 - DNA, 25 bp, Probe sequence
acgatgtcgttggacacgttttatt

SEQ ID NO: 224369 - DNA, 25 bp, Probe sequence
aaattaggtcgtggcttggttcaag

SEQ ID NO: 224370 - DNA, 25 bp, Probe sequence
aacatttaagaaaatctccttgcta

SEQ ID NO: 224371 - DNA, 25 bp, Probe sequence
aagttgggttatcaaaatgctgctg

SEQ ID NO: 224372 - DNA, 25 bp, Probe sequence
aatcctgaaacgagttggcaagcac

SEQ ID NO: 224373 - DNA, 25 bp, Probe sequence
cattgttttgactactttgaaaagt

SEQ ID NO: 224374 - DNA, 25 bp, Probe sequence
cggatgcaccacacggaatcgtaaa

SEQ ID NO: 224375 - DNA, 25 bp, Probe sequence
gcaccacacggaatcgtaaaatttc

SEQ ID NO: 224376 - DNA, 25 bp, Probe sequence
taatttgacggatgcaccacacgga

SEQ ID NO: 224377 - DNA, 25 bp, Probe sequence
gaatcgtaaaatttccagaacattt

SEQ ID NO: 224378 - DNA, 25 bp, Probe sequence
gaaaatctccttgctataattttga

SEQ ID NO: 224379 - DNA, 25 bp, Probe sequence
gagtatagtacggttgttgtagacc

SEQ ID NO: 224380 - DNA, 25 bp, Probe sequence
gatgcaccgttacttgtaaaatatt

SEQ ID NO: 224381 - DNA, 25 bp, Probe sequence
gataatcctgaaacgagttggcaag

SEQ ID NO: 224382 - DNA, 25 bp, Probe sequence
gttgttgtagaccattgttttgact

SEQ ID NO: 224383 - DNA, 25 bp, Probe sequence
gtacggttgttgtagaccattgttt

SEQ ID NO: 224384 - DNA, 25 bp, Probe sequence
ggtcgtggcttggttcaagcagtag

SEQ ID NO: 224385 - DNA, 25 bp, Probe sequence
ggataatttgacggatgcaccacac

SEQ ID NO: 224386 - DNA, 25 bp, Probe sequence
ggacaaaaattaggtcgtggcttgg

SEQ ID NO: 224387 - DNA, 25 bp, Probe sequence
ggacacgttttattaattgaagtag

SEQ ID NO: 224388 - DNA, 25 bp, Probe sequence
tggttcaagcagtagaagagcgtgc

SEQ ID NO: 224389 - DNA, 25 bp, Probe sequence
tggtgatgcaccgttacttgtaaaa

SEQ ID NO: 224390 - DNA, 25 bp, Probe sequence
tgggttatcaaaatgctgctgagca

SEQ ID NO: 224391 - DNA, 25 bp, Probe sequence
tgctgctgagcatgacattaaatta

SEQ ID NO: 224392 - DNA, 25 bp, Probe sequence
tcgttggacacgttttattaattga

SEQ ID NO: 224393 - DNA, 25 bp, Probe sequence
taagacgtattatggtttggcgatt

SEQ ID NO: 224394 - DNA, 25 bp, Probe sequence
tatgggataatttgacggatgcacc

SEQ ID NO: 224395 - DNA, 25 bp, Probe sequence
tttgacggatgcaccacacggaatc

SEQ ID NO: 224396 - DNA, 25 bp, Probe sequence
atagcactgatggagaaccttgtaa

SEQ ID NO: 224397 - DNA, 25 bp, Probe sequence
atcgctaaagcgtctgaagggggta

SEQ ID NO: 224398 - DNA, 25 bp, Probe sequence
atgctgctagtaataatggcgttga

SEQ ID NO: 224399 - DNA, 25 bp, Probe sequence
aagtttcgaggatgtcgtcggacaa

SEQ ID NO: 224400 - DNA, 25 bp, Probe sequence
acaaggtgacgtacaagcatctttt

SEQ ID NO: 224401 - DNA, 25 bp, Probe sequence
aaatcttcgaaaaagcctgcgagag

SEQ ID NO: 224402 - DNA, 25 bp, Probe sequence
aaatccctccaacaatcatttctag

SEQ ID NO: 224403 - DNA, 25 bp, Probe sequence
aaaatcactcgttagtttattgcaa

SEQ ID NO: 224404 - DNA, 25 bp, Probe sequence
aacgagtattgccaaagtgtttgct

SEQ ID NO: 224405 - DNA, 25 bp, Probe sequence
aacctccagcacacgctatttttat

SEQ ID NO: 224406 - DNA, 25 bp, Probe sequence
aatcatttctagggcacaacgtttt

SEQ ID NO: 224407 - DNA, 25 bp, Probe sequence
aattgcttcatcgccaaacacagat

SEQ ID NO: 224408 - DNA, 25 bp, Probe sequence
caacaggtgcttttaatgccctttt

SEQ ID NO: 224409 - DNA, 25 bp, Probe sequence
gctgagcagattaagggtcaaccac

SEQ ID NO: 224410 - DNA, 25 bp, Probe sequence
gcaaaattcggaacctgtggcggca

SEQ ID NO: 224411 - DNA, 25 bp, Probe sequence
gaagagatccattgtgaaatcgtca

SEQ ID NO: 224412 - DNA, 25 bp, Probe sequence
gaagccttggcatttatcgctaaag

SEQ ID NO: 224413 - DNA, 25 bp, Probe sequence
gaaccagcacaaattgcttcatcgc

SEQ ID NO: 224414 - DNA, 25 bp, Probe sequence
gaacctgtggcggcaagtgaagatc

SEQ ID NO: 224415 - DNA, 25 bp, Probe sequence
gacagaaccacataaaatccctcca

SEQ ID NO: 224416 - DNA, 25 bp, Probe sequence
gacgttagaagaacctccagcacac

SEQ ID NO: 224417 - DNA, 25 bp, Probe sequence
gaggtgcacatgctaacaacaggtg

SEQ ID NO: 224418 - DNA, 25 bp, Probe sequence
gatgaagcgttggatcacttgtttg

SEQ ID NO: 224419 - DNA, 25 bp, Probe sequence
gatactgagtatcgagcactgatga

SEQ ID NO: 224420 - DNA, 25 bp, Probe sequence
gatacattagtgtcgattcgtttta

SEQ ID NO: 224421 - DNA, 25 bp, Probe sequence
gttggtgtaccatcagatcaatggc

SEQ ID NO: 224422 - DNA, 25 bp, Probe sequence
gtatgtacagaccccaaagtttcga

SEQ ID NO: 224423 - DNA, 25 bp, Probe sequence
gtctgaagggggtatgcgtgatgca

SEQ ID NO: 224424 - DNA, 25 bp, Probe sequence
gtcgtcggacaagaacatgtcacga

SEQ ID NO: 224425 - DNA, 25 bp, Probe sequence
gggtcaaccacaagtgattgcgaat

SEQ ID NO: 224426 - DNA, 25 bp, Probe sequence
ggcattacgcaggggactaattcag

SEQ ID NO: 224427 - DNA, 25 bp, Probe sequence
tgtcacgaagacattgcgcaatgcg

SEQ ID NO: 224428 - DNA, 25 bp, Probe sequence
tgattgcgaatgtagctgaaccagc

SEQ ID NO: 224429 - DNA, 25 bp, Probe sequence
tatcaagccttatatcgtatgtaca

SEQ ID NO: 224430 - DNA, 25 bp, Probe sequence
attgtaggaacagctggcggtggca

SEQ ID NO: 224431 - DNA, 25 bp, Probe sequence
atcaaagaagaagctgtagacccag

SEQ ID NO: 224432 - DNA, 25 bp, Probe sequence
atgcgcggtggcggaaacatgcaac

SEQ ID NO: 224433 - DNA, 25 bp, Probe sequence
atgagcttactcaagaacgtttagg

SEQ ID NO: 224434 - DNA, 25 bp, Probe sequence
aggcttaaacatccctggaatgtga

SEQ ID NO: 224435 - DNA, 25 bp, Probe sequence
agttactgtaactggtcataaagaa

SEQ ID NO: 224436 - DNA, 25 bp, Probe sequence
agcagctactaatgaagcgatgaat

SEQ ID NO: 224437 - DNA, 25 bp, Probe sequence
agctgatgagcttactcaagaacgt

SEQ ID NO: 224438 - DNA, 25 bp, Probe sequence
agctggcggtggcatggttgcagtt

SEQ ID NO: 224439 - DNA, 25 bp, Probe sequence
aacttaaagaagagcgtattgtagg

SEQ ID NO: 224440 - DNA, 25 bp, Probe sequence
acaagacttagtgttagcagctact

SEQ ID NO: 224441 - DNA, 25 bp, Probe sequence
aacatactcaaggcttaaacatccc

SEQ ID NO: 224442 - DNA, 25 bp, Probe sequence
ctggcggtggcatggttgcagttac

SEQ ID NO: 224443 - DNA, 25 bp, Probe sequence
gcgcggtggcggaaacatgcaacaa

SEQ ID NO: 224444 - DNA, 25 bp, Probe sequence
gcggtggcatggttgcagttactgt

SEQ ID NO: 224445 - DNA, 25 bp, Probe sequence
gcgtattgtaggaacagctggcggt

SEQ ID NO: 224446 - DNA, 25 bp, Probe sequence
gcggtggcggaaacatgcaacaaat

SEQ ID NO: 224447 - DNA, 25 bp, Probe sequence
gcaaaagaaaatggctcaagaacaa

SEQ ID NO: 224448 - DNA, 25 bp, Probe sequence
gaagttgtcgacgttgaaatcaaag

SEQ ID NO: 224449 - DNA, 25 bp, Probe sequence
gaagcgatgaataaagctgatgagc

SEQ ID NO: 224450 - DNA, 25 bp, Probe sequence
gaaatgctacaagacttagtgttag

SEQ ID NO: 224451 - DNA, 25 bp, Probe sequence
gagcttactcaagaacgtttaggta

SEQ ID NO: 224452 - DNA, 25 bp, Probe sequence
gacttagtgttagcagctactaatg

SEQ ID NO: 224453 - DNA, 25 bp, Probe sequence
gtttaggtaaacatactcaaggctt

SEQ ID NO: 224454 - DNA, 25 bp, Probe sequence
gtcataaagaagttgtcgacgttga

SEQ ID NO: 224455 - DNA, 25 bp, Probe sequence
gtgttagcagctactaatgaagcga

SEQ ID NO: 224456 - DNA, 25 bp, Probe sequence
gtggcatggttgcagttactgtaac

SEQ ID NO: 224457 - DNA, 25 bp, Probe sequence
ggcatggttgcagttactgtaactg

SEQ ID NO: 224458 - DNA, 25 bp, Probe sequence
ggcggaaacatgcaacaaatgatga

SEQ ID NO: 224459 - DNA, 25 bp, Probe sequence
ggcggtggcatggttgcagttactg

SEQ ID NO: 224460 - DNA, 25 bp, Probe sequence
tgtaggaacagctggcggtggcatg

SEQ ID NO: 224461 - DNA, 25 bp, Probe sequence
tcaaggcttaaacatccctggaatg

SEQ ID NO: 224462 - DNA, 25 bp, Probe sequence
tactcaaggcttaaacatccctgga

SEQ ID NO: 224463 - DNA, 25 bp, Probe sequence
taggaacagctggcggtggcatggt

SEQ ID NO: 224464 - DNA, 25 bp, Probe sequence
attataatcacactactaacaatgg

SEQ ID NO: 224465 - DNA, 25 bp, Probe sequence
ataatcacactactaacaatggata

SEQ ID NO: 224466 - DNA, 25 bp, Probe sequence
atcacttttttagcgtgtggtgaca

SEQ ID NO: 224467 - DNA, 25 bp, Probe sequence
atctcccaaaatagccagttcaaaa

SEQ ID NO: 224468 - DNA, 25 bp, Probe sequence
agtacaagcgctatgggtatccaaa

SEQ ID NO: 224469 - DNA, 25 bp, Probe sequence
acctcatcacttttttagcgtgtgg

SEQ ID NO: 224470 - DNA, 25 bp, Probe sequence
acttaacctcatcacttttttagcg

SEQ ID NO: 224471 - DNA, 25 bp, Probe sequence
acttttttagcgtgtggtgacataa

SEQ ID NO: 224472 - DNA, 25 bp, Probe sequence
acaagcgctatgggtatccaaaaca

SEQ ID NO: 224473 - DNA, 25 bp, Probe sequence
aaacagcacagcacttaacctcatc

SEQ ID NO: 224474 - DNA, 25 bp, Probe sequence
aaaacagcacagcacttaacctcat

SEQ ID NO: 224475 - DNA, 25 bp, Probe sequence
aaaagtacaagcgctatgggtatcc

SEQ ID NO: 224476 - DNA, 25 bp, Probe sequence
aacctcatcacttttttagcgtgtg

SEQ ID NO: 224477 - DNA, 25 bp, Probe sequence
aagcgctatgggtatccaaaacagc

SEQ ID NO: 224478 - DNA, 25 bp, Probe sequence
aagcgtgaaaacagcaacaagtaat

SEQ ID NO: 224479 - DNA, 25 bp, Probe sequence
aagtacaagcgctatgggtatccaa

SEQ ID NO: 224480 - DNA, 25 bp, Probe sequence
caaaacagcacagcacttaacctca

SEQ ID NO: 224481 - DNA, 25 bp, Probe sequence
cacttaacctcatcacttttttagc

SEQ ID NO: 224482 - DNA, 25 bp, Probe sequence
cttaacctcatcacttttttagcgt

SEQ ID NO: 224483 - DNA, 25 bp, Probe sequence
ctatgggtatccaaaacagcacagc

SEQ ID NO: 224484 - DNA, 25 bp, Probe sequence
ctcatcacttttttagcgtgtggtg

SEQ ID NO: 224485 - DNA, 25 bp, Probe sequence
ctcccaaaatagccagttcaaaata

SEQ ID NO: 224486 - DNA, 25 bp, Probe sequence
cctcatcacttttttagcgtgtggt

SEQ ID NO: 224487 - DNA, 25 bp, Probe sequence
gccagttcaaaatattaaatgcgat

SEQ ID NO: 224488 - DNA, 25 bp, Probe sequence
gcgctatgggtatccaaaacagcac

SEQ ID NO: 224489 - DNA, 25 bp, Probe sequence
gcacttaacctcatcacttttttag

SEQ ID NO: 224490 - DNA, 25 bp, Probe sequence
gacaagcgtgaaaacagcaacaagt

SEQ ID NO: 224491 - DNA, 25 bp, Probe sequence
gattaaaagtacaagcgctatgggt

SEQ ID NO: 224492 - DNA, 25 bp, Probe sequence
gtacaagcgctatgggtatccaaaa

SEQ ID NO: 224493 - DNA, 25 bp, Probe sequence
gtaatattataatcacactactaac

SEQ ID NO: 224494 - DNA, 25 bp, Probe sequence
gtgaaaacagcaacaagtaatatta

SEQ ID NO: 224495 - DNA, 25 bp, Probe sequence
taacctcatcacttttttagcgtgt

SEQ ID NO: 224496 - DNA, 25 bp, Probe sequence
tagcgtgtggtgacataaaattata

SEQ ID NO: 224497 - DNA, 25 bp, Probe sequence
ttaacctcatcacttttttagcgtg

SEQ ID NO: 224498 - DNA, 25 bp, Probe sequence
attccttcattgattgaacgcttga

SEQ ID NO: 224499 - DNA, 25 bp, Probe sequence
atttctagattagttaagcctatag

SEQ ID NO: 224500 - DNA, 25 bp, Probe sequence
atattgtagcgtatgtggtcacatt

SEQ ID NO: 224501 - DNA, 25 bp, Probe sequence
atagctttatgaaattgccaggcat

SEQ ID NO: 224502 - DNA, 25 bp, Probe sequence
atcacgttttacatgggtctatttc

SEQ ID NO: 224503 - DNA, 25 bp, Probe sequence
atgcattatccagaacctatatcaa

SEQ ID NO: 224504 - DNA, 25 bp, Probe sequence
atgaagttagcgaattaatcttagc

SEQ ID NO: 224505 - DNA, 25 bp, Probe sequence
atgatccatgttatatttgtgaaga

SEQ ID NO: 224506 - DNA, 25 bp, Probe sequence
agatattaatattccttcattgatt

SEQ ID NO: 224507 - DNA, 25 bp, Probe sequence
agagggggaatctacagccatgtat

SEQ ID NO: 224508 - DNA, 25 bp, Probe sequence
acagcccaacgtctggcttttcata

SEQ ID NO: 224509 - DNA, 25 bp, Probe sequence
aagcctataggtatcaaagtgacga

SEQ ID NO: 224510 - DNA, 25 bp, Probe sequence
aagacagcccaacgtctggcttttc

SEQ ID NO: 224511 - DNA, 25 bp, Probe sequence
aattgccaggcattggtccaaagac

SEQ ID NO: 224512 - DNA, 25 bp, Probe sequence
caacgtctggcttttcataccttag

SEQ ID NO: 224513 - DNA, 25 bp, Probe sequence
cagttatttgtgttgtggaagatga

SEQ ID NO: 224514 - DNA, 25 bp, Probe sequence
gctatgaacccgaacttagaggggg

SEQ ID NO: 224515 - DNA, 25 bp, Probe sequence
gttcagtttgccaaagcattagtag

SEQ ID NO: 224516 - DNA, 25 bp, Probe sequence
gaatacaaaggtttatatcacgttt

SEQ ID NO: 224517 - DNA, 25 bp, Probe sequence
gaagacgatgttgttcagtttgcca

SEQ ID NO: 224518 - DNA, 25 bp, Probe sequence
gacaaagatgtcatagctatggaaa

SEQ ID NO: 224519 - DNA, 25 bp, Probe sequence
gacgaagtaacattatctaaagcaa

SEQ ID NO: 224520 - DNA, 25 bp, Probe sequence
gagatcgttcagttatttgtgttgt

SEQ ID NO: 224521 - DNA, 25 bp, Probe sequence
gatgttgttcagtttgccaaagcat

SEQ ID NO: 224522 - DNA, 25 bp, Probe sequence
gtccaaagacagcccaacgtctggc

SEQ ID NO: 224523 - DNA, 25 bp, Probe sequence
gtttatatcacgttttacatgggtc

SEQ ID NO: 224524 - DNA, 25 bp, Probe sequence
gtatgctgacgaagtaacattatct

SEQ ID NO: 224525 - DNA, 25 bp, Probe sequence
gtctggcttttcataccttagatat

SEQ ID NO: 224526 - DNA, 25 bp, Probe sequence
gtggtcacattactgaaaatgatcc

SEQ ID NO: 224527 - DNA, 25 bp, Probe sequence
ggtggcgatttagagtatgctgacg

SEQ ID NO: 224528 - DNA, 25 bp, Probe sequence
ggcattggtccaaagacagcccaac

SEQ ID NO: 224529 - DNA, 25 bp, Probe sequence
tgacgagattagcacaagggttatc

SEQ ID NO: 224530 - DNA, 25 bp, Probe sequence
taatcttagctatgaacccgaactt

SEQ ID NO: 224531 - DNA, 25 bp, Probe sequence
tacagccatgtatatttctagatta

SEQ ID NO: 224532 - DNA, 25 bp, Probe sequence
attgccaatggccaaaacggctgta

SEQ ID NO: 224533 - DNA, 25 bp, Probe sequence
ataattgccaatggccaaaacggct

SEQ ID NO: 224534 - DNA, 25 bp, Probe sequence
atgttaccgtacaaacgcagaccaa

SEQ ID NO: 224535 - DNA, 25 bp, Probe sequence
ccgtacaaacgcagaccaagcgtta

SEQ ID NO: 224536 - DNA, 25 bp, Probe sequence
agaccaagcgttaatgttgaagtga

SEQ ID NO: 224537 - DNA, 25 bp, Probe sequence
agcgttaatgttgaagtgaactctt

SEQ ID NO: 224538 - DNA, 25 bp, Probe sequence
accaagcgttaatgttgaagtgaac

SEQ ID NO: 224539 - DNA, 25 bp, Probe sequence
accgtacaaacgcagaccaagcgtt

SEQ ID NO: 224540 - DNA, 25 bp, Probe sequence
acattaataattgccaatggccaaa

SEQ ID NO: 224541 - DNA, 25 bp, Probe sequence
acaaacgcagaccaagcgttaatgt

SEQ ID NO: 224542 - DNA, 25 bp, Probe sequence
aaacattaataattgccaatggcca

SEQ ID NO: 224543 - DNA, 25 bp, Probe sequence
aacattaataattgccaatggccaa

SEQ ID NO: 224544 - DNA, 25 bp, Probe sequence
aacgcagaccaagcgttaatgttga

SEQ ID NO: 224545 - DNA, 25 bp, Probe sequence
aataattgccaatggccaaaacggc

SEQ ID NO: 224546 - DNA, 25 bp, Probe sequence
aattgccaatggccaaaacggctgt

SEQ ID NO: 224547 - DNA, 25 bp, Probe sequence
caatggccaaaacggctgtacataa

SEQ ID NO: 224548 - DNA, 25 bp, Probe sequence
caagcgttaatgttgaagtgaactc

SEQ ID NO: 224549 - DNA, 25 bp, Probe sequence
caaacgcagaccaagcgttaatgtt

SEQ ID NO: 224550 - DNA, 25 bp, Probe sequence
cagaccaagcgttaatgttgaagtg

SEQ ID NO: 224551 - DNA, 25 bp, Probe sequence
cgtacaaacgcagaccaagcgttaa

SEQ ID NO: 224552 - DNA, 25 bp, Probe sequence
cgcagaccaagcgttaatgttgaag

SEQ ID NO: 224553 - DNA, 25 bp, Probe sequence
ccaatggccaaaacggctgtacata

SEQ ID NO: 224554 - DNA, 25 bp, Probe sequence
gccaatggccaaaacggctgtacat

SEQ ID NO: 224555 - DNA, 25 bp, Probe sequence
gcgttaatgttgaagtgaactcttc

SEQ ID NO: 224556 - DNA, 25 bp, Probe sequence
gcagaccaagcgttaatgttgaagt

SEQ ID NO: 224557 - DNA, 25 bp, Probe sequence
gaccaagcgttaatgttgaagtgaa

SEQ ID NO: 224558 - DNA, 25 bp, Probe sequence
gttaccgtacaaacgcagaccaagc

SEQ ID NO: 224559 - DNA, 25 bp, Probe sequence
gtacaaacgcagaccaagcgttaat

SEQ ID NO: 224560 - DNA, 25 bp, Probe sequence
tgttaccgtacaaacgcagaccaag

SEQ ID NO: 224561 - DNA, 25 bp, Probe sequence
tgccaatggccaaaacggctgtaca

SEQ ID NO: 224562 - DNA, 25 bp, Probe sequence
taattgccaatggccaaaacggctg

SEQ ID NO: 224563 - DNA, 25 bp, Probe sequence
taccgtacaaacgcagaccaagcgt

SEQ ID NO: 224564 - DNA, 25 bp, Probe sequence
ttgccaatggccaaaacggctgtac

SEQ ID NO: 224565 - DNA, 25 bp, Probe sequence
ttaccgtacaaacgcagaccaagcg

SEQ ID NO: 224566 - DNA, 25 bp, Probe sequence
atttcttagtgaatggcaccacttc

SEQ ID NO: 224567 - DNA, 25 bp, Probe sequence
atattcctgtactcattgacgaagc

SEQ ID NO: 224568 - DNA, 25 bp, Probe sequence
atgaatgcacatatctatttagaat

SEQ ID NO: 224569 - DNA, 25 bp, Probe sequence
agtccgttaacgaatcattataata

SEQ ID NO: 224570 - DNA, 25 bp, Probe sequence
agctacttccaaacatctagtcctt

SEQ ID NO: 224571 - DNA, 25 bp, Probe sequence
agagagcgcaattaatcgaatgttt

SEQ ID NO: 224572 - DNA, 25 bp, Probe sequence
acgctttgaatatgttacttggtgt

SEQ ID NO: 224573 - DNA, 25 bp, Probe sequence
acgatgggctcggtactttatattc

SEQ ID NO: 224574 - DNA, 25 bp, Probe sequence
actcattgacgaagcacacggcgcg

SEQ ID NO: 224575 - DNA, 25 bp, Probe sequence
aatgcttcaagttgatgatccgttg

SEQ ID NO: 224576 - DNA, 25 bp, Probe sequence
cgtatccgccagggattcctattat

SEQ ID NO: 224577 - DNA, 25 bp, Probe sequence
cggcgcgcactttggattgcaagga

SEQ ID NO: 224578 - DNA, 25 bp, Probe sequence
ccagggattcctattattttcaaag

SEQ ID NO: 224579 - DNA, 25 bp, Probe sequence
gctgactatgttgttcaatcttttc

SEQ ID NO: 224580 - DNA, 25 bp, Probe sequence
gcaccaattaaatattcctgtactc

SEQ ID NO: 224581 - DNA, 25 bp, Probe sequence
gaaacgcatcaaagtccgttaacga

SEQ ID NO: 224582 - DNA, 25 bp, Probe sequence
gcaaggatttccagattctacatta

SEQ ID NO: 224583 - DNA, 25 bp, Probe sequence
gaatattatctgtcatccagtcttt

SEQ ID NO: 224584 - DNA, 25 bp, Probe sequence
gaagggcattttattgaaacgcatc

SEQ ID NO: 224585 - DNA, 25 bp, Probe sequence
gaagcaggtggagaaacattcagat

SEQ ID NO: 224586 - DNA, 25 bp, Probe sequence
gaagcgatttctttgcatgttccgg

SEQ ID NO: 224587 - DNA, 25 bp, Probe sequence
gactatcggtcatttatctcaatta

SEQ ID NO: 224588 - DNA, 25 bp, Probe sequence
gacttatcctaactattacggtgaa

SEQ ID NO: 224589 - DNA, 25 bp, Probe sequence
gaggttatcaaatctttgcaccaat

SEQ ID NO: 224590 - DNA, 25 bp, Probe sequence
gatttacatcatcctgaagaagtca

SEQ ID NO: 224591 - DNA, 25 bp, Probe sequence
gttaccagctttaacgatgggctcg

SEQ ID NO: 224592 - DNA, 25 bp, Probe sequence
tgtcatccagtctttttcacagaaa

SEQ ID NO: 224593 - DNA, 25 bp, Probe sequence
tcttttcataaaacgttaccagctt

SEQ ID NO: 224594 - DNA, 25 bp, Probe sequence
tacatgcgctcgatattagccaaca

SEQ ID NO: 224595 - DNA, 25 bp, Probe sequence
tagaatatctaagctacttccaaac

SEQ ID NO: 224596 - DNA, 25 bp, Probe sequence
tatggctagtttagagtcagctgcc

SEQ ID NO: 224597 - DNA, 25 bp, Probe sequence
tattgccgttatggcatcatgatga

SEQ ID NO: 224598 - DNA, 25 bp, Probe sequence
ttagaattagcggacgactatcaag

SEQ ID NO: 224599 - DNA, 25 bp, Probe sequence
ttctttgcatgttccgggtcataaa

SEQ ID NO: 224600 - DNA, 25 bp, Probe sequence
attgtaattctcagcaatcgccctt

SEQ ID NO: 224601 - DNA, 25 bp, Probe sequence
atatttatcggcaattgcccctgcc

SEQ ID NO: 224602 - DNA, 25 bp, Probe sequence
atcatatttatcggcaattgcccct

SEQ ID NO: 224603 - DNA, 25 bp, Probe sequence
atcgccctttatcatatttatcggc

SEQ ID NO: 224604 - DNA, 25 bp, Probe sequence
atgacgctaattggaattgcagtga

SEQ ID NO: 224605 - DNA, 25 bp, Probe sequence
agcacacataaaattgcagttacta

SEQ ID NO: 224606 - DNA, 25 bp, Probe sequence
agcaatcgccctttatcatatttat

SEQ ID NO: 224607 - DNA, 25 bp, Probe sequence
aagtctgcaaaaattgacaatcccc

SEQ ID NO: 224608 - DNA, 25 bp, Probe sequence
aatcgccctttatcatatttatcgg

SEQ ID NO: 224609 - DNA, 25 bp, Probe sequence
aataatattggtacaagtctgcaaa

SEQ ID NO: 224610 - DNA, 25 bp, Probe sequence
aatattggtacaagtctgcaaaaat

SEQ ID NO: 224611 - DNA, 25 bp, Probe sequence
aattgtaattctcagcaatcgccct

SEQ ID NO: 224612 - DNA, 25 bp, Probe sequence
caatcgccctttatcatatttatcg

SEQ ID NO: 224613 - DNA, 25 bp, Probe sequence
cacacataaaattgcagttactaaa

SEQ ID NO: 224614 - DNA, 25 bp, Probe sequence
ccctgcccacacacttagtaataat

SEQ ID NO: 224615 - DNA, 25 bp, Probe sequence
cagcaatcgccctttatcatattta

SEQ ID NO: 224616 - DNA, 25 bp, Probe sequence
catatttatcggcaattgcccctgc

SEQ ID NO: 224617 - DNA, 25 bp, Probe sequence
ctgcaaaaattgacaatccccagat

SEQ ID NO: 224618 - DNA, 25 bp, Probe sequence
ctgcccacacacttagtaataatat

SEQ ID NO: 224619 - DNA, 25 bp, Probe sequence
cgccctttatcatatttatcggcaa

SEQ ID NO: 224620 - DNA, 25 bp, Probe sequence
ccctttatcatatttatcggcaatt

SEQ ID NO: 224621 - DNA, 25 bp, Probe sequence
cctgcccacacacttagtaataata

SEQ ID NO: 224622 - DNA, 25 bp, Probe sequence
gcccacacacttagtaataatattg

SEQ ID NO: 224623 - DNA, 25 bp, Probe sequence
gctaattggaattgcagtgaaacta

SEQ ID NO: 224624 - DNA, 25 bp, Probe sequence
gcaaaaattgacaatccccagataa

SEQ ID NO: 224625 - DNA, 25 bp, Probe sequence
gcaatcgccctttatcatatttatc

SEQ ID NO: 224626 - DNA, 25 bp, Probe sequence
gaaattgtaattctcagcaatcgcc

SEQ ID NO: 224627 - DNA, 25 bp, Probe sequence
gacgctaattggaattgcagtgaaa

SEQ ID NO: 224628 - DNA, 25 bp, Probe sequence
gatgatgaaattgtaattctcagca

SEQ ID NO: 224629 - DNA, 25 bp, Probe sequence
gtctgcaaaaattgacaatccccag

SEQ ID NO: 224630 - DNA, 25 bp, Probe sequence
tcgccctttatcatatttatcggca

SEQ ID NO: 224631 - DNA, 25 bp, Probe sequence
tatcatatttatcggcaattgcccc

SEQ ID NO: 224632 - DNA, 25 bp, Probe sequence
ttatcatatttatcggcaattgccc

SEQ ID NO: 224633 - DNA, 25 bp, Probe sequence
ttggaattgcagtgaaactatacgt

SEQ ID NO: 224634 - DNA, 25 bp, Probe sequence
atgctagagggattggcgttgaaga

SEQ ID NO: 224635 - DNA, 25 bp, Probe sequence
atgatatggacattagaactgaagc

SEQ ID NO: 224636 - DNA, 25 bp, Probe sequence
atgttatttgctgcatctagaagag

SEQ ID NO: 224637 - DNA, 25 bp, Probe sequence
atgtcagcttttataacttttgagg

SEQ ID NO: 224638 - DNA, 25 bp, Probe sequence
aggtaaggttgtgttgtgtgatcgc

SEQ ID NO: 224639 - DNA, 25 bp, Probe sequence
aggtcataccagctttaaaagaagg

SEQ ID NO: 224640 - DNA, 25 bp, Probe sequence
aaagcgttaatgcagatcaacctct

SEQ ID NO: 224641 - DNA, 25 bp, Probe sequence
aatgcagatcaacctcttgaaaatg

SEQ ID NO: 224642 - DNA, 25 bp, Probe sequence
cattcataatgaatcacaacggttc

SEQ ID NO: 224643 - DNA, 25 bp, Probe sequence
ctatatcgatagttcattagcttat

SEQ ID NO: 224644 - DNA, 25 bp, Probe sequence
gcgttaatgcagatcaacctcttga

SEQ ID NO: 224645 - DNA, 25 bp, Probe sequence
gcttttataacttttgagggcccag

SEQ ID NO: 224646 - DNA, 25 bp, Probe sequence
gcttatcaaggttatgctagaggga

SEQ ID NO: 224647 - DNA, 25 bp, Probe sequence
gaatcacaacggttcaaaagcgtta

SEQ ID NO: 224648 - DNA, 25 bp, Probe sequence
gaaggttaccaagaaatcattcata

SEQ ID NO: 224649 - DNA, 25 bp, Probe sequence
gaagacacgtatcaaactatcatca

SEQ ID NO: 224650 - DNA, 25 bp, Probe sequence
gaaaatgttgttgaagacacgtatc

SEQ ID NO: 224651 - DNA, 25 bp, Probe sequence
gacacgtatcaaactatcatcaaat

SEQ ID NO: 224652 - DNA, 25 bp, Probe sequence
gagaacatcttgtattaaaggtcat

SEQ ID NO: 224653 - DNA, 25 bp, Probe sequence
gagggattggcgttgaagaagtaag

SEQ ID NO: 224654 - DNA, 25 bp, Probe sequence
gatcaacctcttgaaaatgttgttg

SEQ ID NO: 224655 - DNA, 25 bp, Probe sequence
gatcaagaagatttaaagtttcacg

SEQ ID NO: 224656 - DNA, 25 bp, Probe sequence
gttcctactggtgaagaaatacgta

SEQ ID NO: 224657 - DNA, 25 bp, Probe sequence
gttcattagcttatcaaggttatgc

SEQ ID NO: 224658 - DNA, 25 bp, Probe sequence
gtattagaaggcaatgatatggaca

SEQ ID NO: 224659 - DNA, 25 bp, Probe sequence
gtatcaaactatcatcaaatattta

SEQ ID NO: 224660 - DNA, 25 bp, Probe sequence
gtgtgatcgctatatcgatagttca

SEQ ID NO: 224661 - DNA, 25 bp, Probe sequence
ggttatgctagagggattggcgttg

SEQ ID NO: 224662 - DNA, 25 bp, Probe sequence
ggttgtgttgtgtgatcgctatatc

SEQ ID NO: 224663 - DNA, 25 bp, Probe sequence
ggcgttgaagaagtaagagcattaa

SEQ ID NO: 224664 - DNA, 25 bp, Probe sequence
tgctgcatctagaagagaacatctt

SEQ ID NO: 224665 - DNA, 25 bp, Probe sequence
taacttttgagggcccagaaggctc

SEQ ID NO: 224666 - DNA, 25 bp, Probe sequence
ttgtgttgtgtgatcgctatatcga

SEQ ID NO: 224667 - DNA, 25 bp, Probe sequence
ttgtattaaaggtcataccagcttt

SEQ ID NO: 224668 - DNA, 25 bp, Probe sequence
attcgtacattccatatccagttga

SEQ ID NO: 224669 - DNA, 25 bp, Probe sequence
attcttatgtggtgtcaatgatgac

SEQ ID NO: 224670 - DNA, 25 bp, Probe sequence
atcgtacaagatcaagatagtcagg

SEQ ID NO: 224671 - DNA, 25 bp, Probe sequence
agtgcggattcgtacattccatatc

SEQ ID NO: 224672 - DNA, 25 bp, Probe sequence
acctattacacctatgggaggcagt

SEQ ID NO: 224673 - DNA, 25 bp, Probe sequence
acattccatatccagttgaagttga

SEQ ID NO: 224674 - DNA, 25 bp, Probe sequence
acagttggtttcacctattacacct

SEQ ID NO: 224675 - DNA, 25 bp, Probe sequence
aatgattatagcgatcgtacaagat

SEQ ID NO: 224676 - DNA, 25 bp, Probe sequence
aatcaaacgtgtggtaatagagaac

SEQ ID NO: 224677 - DNA, 25 bp, Probe sequence
aatacaacattcttatgtggtgtca

SEQ ID NO: 224678 - DNA, 25 bp, Probe sequence
aatagagaacagttggtttcaccta

SEQ ID NO: 224679 - DNA, 25 bp, Probe sequence
cgtacattccatatccagttgaagt

SEQ ID NO: 224680 - DNA, 25 bp, Probe sequence
gccagttgatgcattccatcaattt

SEQ ID NO: 224681 - DNA, 25 bp, Probe sequence
gcggattcgtacattccatatccag

SEQ ID NO: 224682 - DNA, 25 bp, Probe sequence
gaagttggcggtgctactgtatttg

SEQ ID NO: 224683 - DNA, 25 bp, Probe sequence
gagcaacaaaattggcaacaacagg

SEQ ID NO: 224684 - DNA, 25 bp, Probe sequence
gagaacagttggtttcacctattac

SEQ ID NO: 224685 - DNA, 25 bp, Probe sequence
gatgaccgtgtagatgaaatattgt

SEQ ID NO: 224686 - DNA, 25 bp, Probe sequence
gatgaaatattgtctgtgattaatc

SEQ ID NO: 224687 - DNA, 25 bp, Probe sequence
gatagtcaggaacttgcagatcaac

SEQ ID NO: 224688 - DNA, 25 bp, Probe sequence
gttggcggtgctactgtatttgtta

SEQ ID NO: 224689 - DNA, 25 bp, Probe sequence
gttgaagttgaagttggcggtgcta

SEQ ID NO: 224690 - DNA, 25 bp, Probe sequence
gttgaagttggcggtgctactgtat

SEQ ID NO: 224691 - DNA, 25 bp, Probe sequence
gtcaggaacttgcagatcaacttgt

SEQ ID NO: 224692 - DNA, 25 bp, Probe sequence
gtctgtgattaatcaaacgtgtggt

SEQ ID NO: 224693 - DNA, 25 bp, Probe sequence
gtggtgtcaatgatgaccgtgtaga

SEQ ID NO: 224694 - DNA, 25 bp, Probe sequence
gggaggcagtgcggattcgtacatt

SEQ ID NO: 224695 - DNA, 25 bp, Probe sequence
ggtgctactgtatttgttatgccag

SEQ ID NO: 224696 - DNA, 25 bp, Probe sequence
ggcagtgcggattcgtacattccat

SEQ ID NO: 224697 - DNA, 25 bp, Probe sequence
ggaacttgcagatcaacttgttaaa

SEQ ID NO: 224698 - DNA, 25 bp, Probe sequence
ggcggtgctactgtatttgttatgc

SEQ ID NO: 224699 - DNA, 25 bp, Probe sequence
tggcaacaacaggtgggtttttaag

SEQ ID NO: 224700 - DNA, 25 bp, Probe sequence
tgtatttgttatgccagttgatgca

SEQ ID NO: 224701 - DNA, 25 bp, Probe sequence
tacacctatgggaggcagtgcggat

SEQ ID NO: 224702 - DNA, 25 bp, Probe sequence
attatcgcatgcctatttatttgaa

SEQ ID NO: 224703 - DNA, 25 bp, Probe sequence
atttcttgaagaaccaccggacaat

SEQ ID NO: 224704 - DNA, 25 bp, Probe sequence
atcatccagactttatgtatatatc

SEQ ID NO: 224705 - DNA, 25 bp, Probe sequence
atgcgcaaaagttgtcgtttaatca

SEQ ID NO: 224706 - DNA, 25 bp, Probe sequence
aggaaatcagttatacgttggtgtg

SEQ ID NO: 224707 - DNA, 25 bp, Probe sequence
agtgtacatcattgaagactttgaa

SEQ ID NO: 224708 - DNA, 25 bp, Probe sequence
agtacttatactacgcaaatagata

SEQ ID NO: 224709 - DNA, 25 bp, Probe sequence
agaaccaccggacaatacgattgct

SEQ ID NO: 224710 - DNA, 25 bp, Probe sequence
agctgaaatgattagtacttatact

SEQ ID NO: 224711 - DNA, 25 bp, Probe sequence
acatgtctaagccagtagctgaaat

SEQ ID NO: 224712 - DNA, 25 bp, Probe sequence
aaaacagtatcttgaaatttcttga

SEQ ID NO: 224713 - DNA, 25 bp, Probe sequence
aagccaatggcacttataggtatta

SEQ ID NO: 224714 - DNA, 25 bp, Probe sequence
aagttgaacaacttgtgcgtcatat

SEQ ID NO: 224715 - DNA, 25 bp, Probe sequence
aatctttaactattgcagctgtgaa

SEQ ID NO: 224716 - DNA, 25 bp, Probe sequence
caatccattcaaggtgtcagcatgt

SEQ ID NO: 224717 - DNA, 25 bp, Probe sequence
caaatcgtaattaagggtgtgagtt

SEQ ID NO: 224718 - DNA, 25 bp, Probe sequence
caaattttagacacaatccattcaa

SEQ ID NO: 224719 - DNA, 25 bp, Probe sequence
gcatatcattcaaataaattatcgc

SEQ ID NO: 224720 - DNA, 25 bp, Probe sequence
gcagctgtgaatggtttcttcgaag

SEQ ID NO: 224721 - DNA, 25 bp, Probe sequence
gcaaagcttattttatgtcaaacag

SEQ ID NO: 224722 - DNA, 25 bp, Probe sequence
gcaacaattgacgaatgcatatcat

SEQ ID NO: 224723 - DNA, 25 bp, Probe sequence
gaatcaaaatgtaaatccaacgctt

SEQ ID NO: 224724 - DNA, 25 bp, Probe sequence
gaatcaacttcctatagaaagcaca

SEQ ID NO: 224725 - DNA, 25 bp, Probe sequence
gatgtttgatcaactgacggaagca

SEQ ID NO: 224726 - DNA, 25 bp, Probe sequence
gatcaactgacggaagcacataaga

SEQ ID NO: 224727 - DNA, 25 bp, Probe sequence
gttggtgtgaattgttgcttactaa

SEQ ID NO: 224728 - DNA, 25 bp, Probe sequence
gtttcttcgaagatatcatacatac

SEQ ID NO: 224729 - DNA, 25 bp, Probe sequence
gtaaatccaacgcttgtatttgaac

SEQ ID NO: 224730 - DNA, 25 bp, Probe sequence
gtgcgtcatatgaatcaacttccta

SEQ ID NO: 224731 - DNA, 25 bp, Probe sequence
gtgatgatgcacaaacgatgaaaca

SEQ ID NO: 224732 - DNA, 25 bp, Probe sequence
ggttagtacatataatcatccagac

SEQ ID NO: 224733 - DNA, 25 bp, Probe sequence
ggatgaacagcaacaattgacgaat

SEQ ID NO: 224734 - DNA, 25 bp, Probe sequence
tgcgattaattttgcaaagcttatt

SEQ ID NO: 224735 - DNA, 25 bp, Probe sequence
tacgattgctattttattgtctaca

SEQ ID NO: 224736 - DNA, 25 bp, Probe sequence
attgctgaagaggatgttgtgttac

SEQ ID NO: 224737 - DNA, 25 bp, Probe sequence
atgccaaatgtaataggtgttcagt

SEQ ID NO: 224738 - DNA, 25 bp, Probe sequence
atgactattatgaggaagtacgtgc

SEQ ID NO: 224739 - DNA, 25 bp, Probe sequence
gatggtaacgggaaagtagttgctt

SEQ ID NO: 224740 - DNA, 25 bp, Probe sequence
agtcaattgcgaatatacattagat

SEQ ID NO: 224741 - DNA, 25 bp, Probe sequence
acatgcgtttagtcaattgcgaata

SEQ ID NO: 224742 - DNA, 25 bp, Probe sequence
aacacgtatcgagttgagacaaatt

SEQ ID NO: 224743 - DNA, 25 bp, Probe sequence
caaattgcttggcggtatcggacct

SEQ ID NO: 224744 - DNA, 25 bp, Probe sequence
gcgcaacatttaaaaacacgtatcg

SEQ ID NO: 224745 - DNA, 25 bp, Probe sequence
gaatattatacacctaatgatatac

SEQ ID NO: 224746 - DNA, 25 bp, Probe sequence
gaacagccacttgaatataaattag

SEQ ID NO: 224747 - DNA, 25 bp, Probe sequence
gaaacgcctgatggtaacgggaaag

SEQ ID NO: 224748 - DNA, 25 bp, Probe sequence
gactgggtagttgtcgaatctaaaa

SEQ ID NO: 224749 - DNA, 25 bp, Probe sequence
gagaacaaggtttggacatgcgttt

SEQ ID NO: 224750 - DNA, 25 bp, Probe sequence
gaggcatagagataggtattgttaa

SEQ ID NO: 224751 - DNA, 25 bp, Probe sequence
gattttgaaccagtatcgattaaga

SEQ ID NO: 224752 - DNA, 25 bp, Probe sequence
gtatcgattaagatggctaaggatc

SEQ ID NO: 224753 - DNA, 25 bp, Probe sequence
gtgtaagggatgaagccaaattgct

SEQ ID NO: 224754 - DNA, 25 bp, Probe sequence
gtggtcgtttgatgtgttgtttaaa

SEQ ID NO: 224755 - DNA, 25 bp, Probe sequence
gggacatgaacagccacttgaatat

SEQ ID NO: 224756 - DNA, 25 bp, Probe sequence
ggtgaagcaattgaaacgcctgatg

SEQ ID NO: 224757 - DNA, 25 bp, Probe sequence
ggtgcatgtggtcgtttgatgtgtt

SEQ ID NO: 224758 - DNA, 25 bp, Probe sequence
ggatgttgtgttacctcttaaaaat

SEQ ID NO: 224759 - DNA, 25 bp, Probe sequence
ggctaaggatcaaaatttatcatta

SEQ ID NO: 224760 - DNA, 25 bp, Probe sequence
tgttacctcttaaaaatattattcg

SEQ ID NO: 224761 - DNA, 25 bp, Probe sequence
tgagggacatgaacagccacttgaa

SEQ ID NO: 224762 - DNA, 25 bp, Probe sequence
tgcaggtgaagcttgagggacatga

SEQ ID NO: 224763 - DNA, 25 bp, Probe sequence
tccattaatggatattgctgaagag

SEQ ID NO: 224764 - DNA, 25 bp, Probe sequence
tcgttatgttgttctacatttttag

SEQ ID NO: 224765 - DNA, 25 bp, Probe sequence
taggtgttcagtttcaaaaagcggg

SEQ ID NO: 224766 - DNA, 25 bp, Probe sequence
tagacatttctatgcaggtgaagct

SEQ ID NO: 224767 - DNA, 25 bp, Probe sequence
ttggcggtatcggaccttgtggtag

SEQ ID NO: 224768 - DNA, 25 bp, Probe sequence
tatttttaattttacggcggatgat

SEQ ID NO: 224769 - DNA, 25 bp, Probe sequence
ttttacggcggatgatcgtattgat

SEQ ID NO: 224770 - DNA, 25 bp, Probe sequence
atatttgtaaaggcgaattatttgg

SEQ ID NO: 224771 - DNA, 25 bp, Probe sequence
atgtcaatcaactttcaaaggaaac

SEQ ID NO: 224772 - DNA, 25 bp, Probe sequence
agctgtgaaaaagccattaccaagt

SEQ ID NO: 224773 - DNA, 25 bp, Probe sequence
accaactactattgatactgcgaat

SEQ ID NO: 224774 - DNA, 25 bp, Probe sequence
acatggtgaagattgtctgttctgt

SEQ ID NO: 224775 - DNA, 25 bp, Probe sequence
aaatgtagcgcttcaacttgaaaat

SEQ ID NO: 224776 - DNA, 25 bp, Probe sequence
aaagctgtgaaaaagccattaccaa

SEQ ID NO: 224777 - DNA, 25 bp, Probe sequence
aagaaaatgtagcgcttcaacttga

SEQ ID NO: 224778 - DNA, 25 bp, Probe sequence
caactactattgatactgcgaattc

SEQ ID NO: 224779 - DNA, 25 bp, Probe sequence
gcgaattcaaaaccagcaaaagctg

SEQ ID NO: 224780 - DNA, 25 bp, Probe sequence
gaattatttggaaaacatcgacatg

SEQ ID NO: 224781 - DNA, 25 bp, Probe sequence
gaatgtcaatcaactttcaaaggaa

SEQ ID NO: 224782 - DNA, 25 bp, Probe sequence
gaagattgtctgttctgtttagaag

SEQ ID NO: 224783 - DNA, 25 bp, Probe sequence
gaaccaactactattgatactgcga

SEQ ID NO: 224784 - DNA, 25 bp, Probe sequence
gaaaatgtagcgcttcaacttgaaa

SEQ ID NO: 224785 - DNA, 25 bp, Probe sequence
gaaaaaggtgttgggcaatgatgaa

SEQ ID NO: 224786 - DNA, 25 bp, Probe sequence
gaaatgaatgtcaatcaactttcaa

SEQ ID NO: 224787 - DNA, 25 bp, Probe sequence
gagaaggatttcatatttgtaaagg

SEQ ID NO: 224788 - DNA, 25 bp, Probe sequence
gatgaaccaactactattgatactg

SEQ ID NO: 224789 - DNA, 25 bp, Probe sequence
gataatttgaaaaaggtgttgggca

SEQ ID NO: 224790 - DNA, 25 bp, Probe sequence
gataatttggctatattgtatggag

SEQ ID NO: 224791 - DNA, 25 bp, Probe sequence
gatactgcgaattcaaaaccagcaa

SEQ ID NO: 224792 - DNA, 25 bp, Probe sequence
gattgtctgttctgtttagaagttt

SEQ ID NO: 224793 - DNA, 25 bp, Probe sequence
gttctgtttagaagttttaagtgat

SEQ ID NO: 224794 - DNA, 25 bp, Probe sequence
gtagcgcttcaacttgaaaatgata

SEQ ID NO: 224795 - DNA, 25 bp, Probe sequence
gtctgttctgtttagaagttttaag

SEQ ID NO: 224796 - DNA, 25 bp, Probe sequence
gtgaaaaagccattaccaagtaaag

SEQ ID NO: 224797 - DNA, 25 bp, Probe sequence
gtgaagattgtctgttctgtttaga

SEQ ID NO: 224798 - DNA, 25 bp, Probe sequence
gggcaatgatgaaccaactactatt

SEQ ID NO: 224799 - DNA, 25 bp, Probe sequence
ggaaaacatcgacatggtgaagatt

SEQ ID NO: 224800 - DNA, 25 bp, Probe sequence
tggtgaagattgtctgttctgttta

SEQ ID NO: 224801 - DNA, 25 bp, Probe sequence
taatgcgtttagaaatgaatgtcaa

SEQ ID NO: 224802 - DNA, 25 bp, Probe sequence
tttggctatattgtatggagaagga

SEQ ID NO: 224803 - DNA, 25 bp, Probe sequence
ttggatcgcaatgaaatatttgaaa

SEQ ID NO: 224804 - DNA, 25 bp, Probe sequence
atgtgtacacttgaagattgcatga

SEQ ID NO: 224805 - DNA, 25 bp, Probe sequence
atggatgtcttgtttgaaatgagaa

SEQ ID NO: 224806 - DNA, 25 bp, Probe sequence
accttcacaatatactttagtaacg

SEQ ID NO: 224807 - DNA, 25 bp, Probe sequence
acaccaacatcaaaaagaagcacat

SEQ ID NO: 224808 - DNA, 25 bp, Probe sequence
aacacttgtcgatatggcgcgacgc

SEQ ID NO: 224809 - DNA, 25 bp, Probe sequence
aagagaatgaacgatttgatcaact

SEQ ID NO: 224810 - DNA, 25 bp, Probe sequence
aagagaatcagcaacaccaacatca

SEQ ID NO: 224811 - DNA, 25 bp, Probe sequence
aaggtttagaaatcatgcccccatt

SEQ ID NO: 224812 - DNA, 25 bp, Probe sequence
cacatggatttgaaaaacgttacta

SEQ ID NO: 224813 - DNA, 25 bp, Probe sequence
gcgcgacgcacatttcaattcaatg

SEQ ID NO: 224814 - DNA, 25 bp, Probe sequence
gcgagacatgagattatgtgtacac

SEQ ID NO: 224815 - DNA, 25 bp, Probe sequence
gaatcagcaacaccaacatcaaaaa

SEQ ID NO: 224816 - DNA, 25 bp, Probe sequence
gaaggtcgaaaaggtggaaatcaag

SEQ ID NO: 224817 - DNA, 25 bp, Probe sequence
gaagatggtaattatagcgaagaaa

SEQ ID NO: 224818 - DNA, 25 bp, Probe sequence
gaagcacataagatagcgagacatg

SEQ ID NO: 224819 - DNA, 25 bp, Probe sequence
gaaacatccacgacatatagaaggt

SEQ ID NO: 224820 - DNA, 25 bp, Probe sequence
gaaatcatgcccccattttatattt

SEQ ID NO: 224821 - DNA, 25 bp, Probe sequence
gacgcacatttcaattcaatgatgt

SEQ ID NO: 224822 - DNA, 25 bp, Probe sequence
gagattcaaaaaacacttgtcgata

SEQ ID NO: 224823 - DNA, 25 bp, Probe sequence
gattgcatgattgcagcccgtcatt

SEQ ID NO: 224824 - DNA, 25 bp, Probe sequence
gattgcagcccgtcatttattaaaa

SEQ ID NO: 224825 - DNA, 25 bp, Probe sequence
gttattgtttgcgaaacatccacga

SEQ ID NO: 224826 - DNA, 25 bp, Probe sequence
gtttgcgaaacatccacgacatata

SEQ ID NO: 224827 - DNA, 25 bp, Probe sequence
gtatttaaaccttcacaatatactt

SEQ ID NO: 224828 - DNA, 25 bp, Probe sequence
gtgttggacttatgttcaggcaatg

SEQ ID NO: 224829 - DNA, 25 bp, Probe sequence
tttcaacggatgctttgttgttagg

SEQ ID NO: 224830 - DNA, 25 bp, Probe sequence
ggacttatgttcaggcaatggggtg

SEQ ID NO: 224831 - DNA, 25 bp, Probe sequence
tcgatatggcgcgacgcacatttca

SEQ ID NO: 224832 - DNA, 25 bp, Probe sequence
tgcagcccgtcatttattaaaagaa

SEQ ID NO: 224833 - DNA, 25 bp, Probe sequence
tcatgcccccattttatatttataa

SEQ ID NO: 224834 - DNA, 25 bp, Probe sequence
taagaaagtcgtttttatatatagt

SEQ ID NO: 224835 - DNA, 25 bp, Probe sequence
taacaatgcatcacatggatttgaa

SEQ ID NO: 224836 - DNA, 25 bp, Probe sequence
tatggcgcgacgcacatttcaattc

SEQ ID NO: 224837 - DNA, 25 bp, Probe sequence
tatgttcaggcaatggggtgatacc

SEQ ID NO: 224838 - DNA, 25 bp, Probe sequence
atagaagctattcctgataactcgg

SEQ ID NO: 224839 - DNA, 25 bp, Probe sequence
atcatctattgataatatgcccata

SEQ ID NO: 224840 - DNA, 25 bp, Probe sequence
atgacttcggaattgattttgcaga

SEQ ID NO: 224841 - DNA, 25 bp, Probe sequence
atggaaacgccaactgaagatagaa

SEQ ID NO: 224842 - DNA, 25 bp, Probe sequence
actcttgttagatgatatgctcgac

SEQ ID NO: 224843 - DNA, 25 bp, Probe sequence
acatctttatctctttatagtctag

SEQ ID NO: 224844 - DNA, 25 bp, Probe sequence
acaagtatttcattgcgtgtaccga

SEQ ID NO: 224845 - DNA, 25 bp, Probe sequence
aaacgctattattaatcttcctcaa

SEQ ID NO: 224846 - DNA, 25 bp, Probe sequence
aaactatcgaattcttcaactacag

SEQ ID NO: 224847 - DNA, 25 bp, Probe sequence
aacgccttaaaatatccagaatcat

SEQ ID NO: 224848 - DNA, 25 bp, Probe sequence
aatgatgacaattatgaactgctta

SEQ ID NO: 224849 - DNA, 25 bp, Probe sequence
aatttgattgattatgacttcggaa

SEQ ID NO: 224850 - DNA, 25 bp, Probe sequence
gcgactgatcctgaagttgattaca

SEQ ID NO: 224851 - DNA, 25 bp, Probe sequence
gcgtgtaccgaatagaaagcagcaa

SEQ ID NO: 224852 - DNA, 25 bp, Probe sequence
gctactaaaaacgatactacatgca

SEQ ID NO: 224853 - DNA, 25 bp, Probe sequence
gaattttttgaccttttgaatgatc

SEQ ID NO: 224854 - DNA, 25 bp, Probe sequence
gaatcttatatatcagtccaaggac

SEQ ID NO: 224855 - DNA, 25 bp, Probe sequence
gacaatttattttcagaatccggtc

SEQ ID NO: 224856 - DNA, 25 bp, Probe sequence
gacatccacagaatcctcaaatttt

SEQ ID NO: 224857 - DNA, 25 bp, Probe sequence
gagacatttgatgcgactgatcctg

SEQ ID NO: 224858 - DNA, 25 bp, Probe sequence
gagtggtctctctatttaaaagatc

SEQ ID NO: 224859 - DNA, 25 bp, Probe sequence
gatgatatgctcgacgtcaatatat

SEQ ID NO: 224860 - DNA, 25 bp, Probe sequence
gatatggttcatactagtaacgtaa

SEQ ID NO: 224861 - DNA, 25 bp, Probe sequence
gtatggattttaccgatatcatcta

SEQ ID NO: 224862 - DNA, 25 bp, Probe sequence
gtccaaggacatccacagaatcctc

SEQ ID NO: 224863 - DNA, 25 bp, Probe sequence
gtgatagataatttggggcattcaa

SEQ ID NO: 224864 - DNA, 25 bp, Probe sequence
gtgtagattacgttagaccttcaga

SEQ ID NO: 224865 - DNA, 25 bp, Probe sequence
ggaatagagttggcagacttataca

SEQ ID NO: 224866 - DNA, 25 bp, Probe sequence
ggaattaatacatctttatctcttt

SEQ ID NO: 224867 - DNA, 25 bp, Probe sequence
tcagaatccggtcatcattttgatg

SEQ ID NO: 224868 - DNA, 25 bp, Probe sequence
taacacactaactcccacaggttta

SEQ ID NO: 224869 - DNA, 25 bp, Probe sequence
tacgttagaccttcagaatcttata

SEQ ID NO: 224870 - DNA, 25 bp, Probe sequence
taggtataacacactaactcccaca

SEQ ID NO: 224871 - DNA, 25 bp, Probe sequence
tataccttttggacaagcatatcat

SEQ ID NO: 224872 - DNA, 25 bp, Probe sequence
attgcgattaattaaggagcgatag

SEQ ID NO: 224873 - DNA, 25 bp, Probe sequence
ataccagacaaaagaaattgcgatt

SEQ ID NO: 224874 - DNA, 25 bp, Probe sequence
ataaccgaggtcaaggagccaaata

SEQ ID NO: 224875 - DNA, 25 bp, Probe sequence
agtaagacgtccggtgcatttagtt

SEQ ID NO: 224876 - DNA, 25 bp, Probe sequence
atggatagtcattttgtatatattg

SEQ ID NO: 224877 - DNA, 25 bp, Probe sequence
agacgtccggtgcatttagtttatc

SEQ ID NO: 224878 - DNA, 25 bp, Probe sequence
accgaggtcaaggagccaaatatac

SEQ ID NO: 224879 - DNA, 25 bp, Probe sequence
acgtccggtgcatttagtttatcaa

SEQ ID NO: 224880 - DNA, 25 bp, Probe sequence
aaagtaagacgtccggtgcatttag

SEQ ID NO: 224881 - DNA, 25 bp, Probe sequence
aacataaccgaggtcaaggagccaa

SEQ ID NO: 224882 - DNA, 25 bp, Probe sequence
aagtaagacgtccggtgcatttagt

SEQ ID NO: 224883 - DNA, 25 bp, Probe sequence
aaggagccaaatatacgaaagtaag

SEQ ID NO: 224884 - DNA, 25 bp, Probe sequence
aagacgtccggtgcatttagtttat

SEQ ID NO: 224885 - DNA, 25 bp, Probe sequence
taagacgtccggtgcatttagttta

SEQ ID NO: 224886 - DNA, 25 bp, Probe sequence
aagacgttaatgcacgtgttgaaaa

SEQ ID NO: 224887 - DNA, 25 bp, Probe sequence
aagtctgaagcattgaagcgtgaat

SEQ ID NO: 224888 - DNA, 25 bp, Probe sequence
cgtccggtgcatttagtttatcaag

SEQ ID NO: 224889 - DNA, 25 bp, Probe sequence
cgaaagtaagacgtccggtgcattt

SEQ ID NO: 224890 - DNA, 25 bp, Probe sequence
ccggtgcatttagtttatcaagaaa

SEQ ID NO: 224891 - DNA, 25 bp, Probe sequence
gctaaagacgttaatgcacgtgttg

SEQ ID NO: 224892 - DNA, 25 bp, Probe sequence
gcacgtgttgaaaaacataaccgag

SEQ ID NO: 224893 - DNA, 25 bp, Probe sequence
gaagcattgaagcgtgaatatgaaa

SEQ ID NO: 224894 - DNA, 25 bp, Probe sequence
gaaagtaagacgtccggtgcattta

SEQ ID NO: 224895 - DNA, 25 bp, Probe sequence
gacgtccggtgcatttagtttatca

SEQ ID NO: 224896 - DNA, 25 bp, Probe sequence
gagacaaagtctgaagcattgaagc

SEQ ID NO: 224897 - DNA, 25 bp, Probe sequence
gaggtcaaggagccaaatatacgaa

SEQ ID NO: 224898 - DNA, 25 bp, Probe sequence
gatagtcattttgtatatattgtaa

SEQ ID NO: 224899 - DNA, 25 bp, Probe sequence
gtaagacgtccggtgcatttagttt

SEQ ID NO: 224900 - DNA, 25 bp, Probe sequence
gtctgaagcattgaagcgtgaatat

SEQ ID NO: 224901 - DNA, 25 bp, Probe sequence
gtccggtgcatttagtttatcaaga

SEQ ID NO: 224902 - DNA, 25 bp, Probe sequence
ggatacgctaaagacgttaatgcac

SEQ ID NO: 224903 - DNA, 25 bp, Probe sequence
ggaagtttatatacaggatacgcta

SEQ ID NO: 224904 - DNA, 25 bp, Probe sequence
tgaaattaaaacttataccagacaa

SEQ ID NO: 224905 - DNA, 25 bp, Probe sequence
tagtgatggaagtttatatacagga

SEQ ID NO: 224906 - DNA, 25 bp, Probe sequence
attgcccttaattagtgatcctgga

SEQ ID NO: 224907 - DNA, 25 bp, Probe sequence
attccaactccattaaagtcatatc

SEQ ID NO: 224908 - DNA, 25 bp, Probe sequence
atcattatgatattccaactccatt

SEQ ID NO: 224909 - DNA, 25 bp, Probe sequence
atcgtggtttgatgatttatctatc

SEQ ID NO: 224910 - DNA, 25 bp, Probe sequence
atgcaacacgacaagtatcactagg

SEQ ID NO: 224911 - DNA, 25 bp, Probe sequence
atggctgtattatatttagtgggca

SEQ ID NO: 224912 - DNA, 25 bp, Probe sequence
agcagactgcttttatcattgaaca

SEQ ID NO: 224913 - DNA, 25 bp, Probe sequence
aagtagagactgtgcctggacctaa

SEQ ID NO: 224914 - DNA, 25 bp, Probe sequence
caccgcatcgtgtgacagatacatt

SEQ ID NO: 224915 - DNA, 25 bp, Probe sequence
cctaatgctgggctgacggctttga

SEQ ID NO: 224916 - DNA, 25 bp, Probe sequence
gcgatgtaccattgaaaggcgaatt

SEQ ID NO: 224917 - DNA, 25 bp, Probe sequence
gctgtattagagcaacgtatgcatg

SEQ ID NO: 224918 - DNA, 25 bp, Probe sequence
gctcgtatctgatgctggattgccc

SEQ ID NO: 224919 - DNA, 25 bp, Probe sequence
gaattaggtcttgacgttgcgctcg

SEQ ID NO: 224920 - DNA, 25 bp, Probe sequence
gaaacgtgttgatatgattgcttgt

SEQ ID NO: 224921 - DNA, 25 bp, Probe sequence
gacaagtatcactagggcgtgaatt

SEQ ID NO: 224922 - DNA, 25 bp, Probe sequence
gagcagttgatgtattgaaacgtgt

SEQ ID NO: 224923 - DNA, 25 bp, Probe sequence
gatggctagtggattaccttcatat

SEQ ID NO: 224924 - DNA, 25 bp, Probe sequence
gatgctggattgcccttaattagtg

SEQ ID NO: 224925 - DNA, 25 bp, Probe sequence
gatcattatattcaaacttcacaga

SEQ ID NO: 224926 - DNA, 25 bp, Probe sequence
gatttatctatcaatgagcatgttg

SEQ ID NO: 224927 - DNA, 25 bp, Probe sequence
gattcagcaaggcgatgtaccattg

SEQ ID NO: 224928 - DNA, 25 bp, Probe sequence
gattgcttgtgaagacactagagta

SEQ ID NO: 224929 - DNA, 25 bp, Probe sequence
gtgcctggacctaatgctgggctga

SEQ ID NO: 224930 - DNA, 25 bp, Probe sequence
gtgatcctggatacgaattagtagt

SEQ ID NO: 224931 - DNA, 25 bp, Probe sequence
gtggattaccttcatatgtatatac

SEQ ID NO: 224932 - DNA, 25 bp, Probe sequence
ggctgacggctttgatggctagtgg

SEQ ID NO: 224933 - DNA, 25 bp, Probe sequence
tacgaattagtagtggcagccagag

SEQ ID NO: 224934 - DNA, 25 bp, Probe sequence
tacatttttaggatttttgccacga

SEQ ID NO: 224935 - DNA, 25 bp, Probe sequence
taaagtcatatcacgaacataacaa

SEQ ID NO: 224936 - DNA, 25 bp, Probe sequence
tacaagcattgattcagcaaggcga

SEQ ID NO: 224937 - DNA, 25 bp, Probe sequence
tatacgaatcaccgcatcgtgtgac

SEQ ID NO: 224938 - DNA, 25 bp, Probe sequence
tttagtgggcacaccaattggtaat

SEQ ID NO: 224939 - DNA, 25 bp, Probe sequence
ttgacgttgcgctcgtatctgatgc

SEQ ID NO: 224940 - DNA, 25 bp, Probe sequence
atattcgttatgcagctgtattatt

SEQ ID NO: 224941 - DNA, 25 bp, Probe sequence
aggaaattgtgcgattccactcaat

SEQ ID NO: 224942 - DNA, 25 bp, Probe sequence
agagattcctagcaaacctcaaatt

SEQ ID NO: 224943 - DNA, 25 bp, Probe sequence
agcgtatcaaggtccacttcatgaa

SEQ ID NO: 224944 - DNA, 25 bp, Probe sequence
acgtcataaacatgtcgttgagcaa

SEQ ID NO: 224945 - DNA, 25 bp, Probe sequence
actggccagcagatattcatttaat

SEQ ID NO: 224946 - DNA, 25 bp, Probe sequence
acaaccccaatatactatcctagtg

SEQ ID NO: 224947 - DNA, 25 bp, Probe sequence
aacttcattaaaccaggacttgctg

SEQ ID NO: 224948 - DNA, 25 bp, Probe sequence
aagaatcaatgcaaccgcctgctac

SEQ ID NO: 224949 - DNA, 25 bp, Probe sequence
aagtctttgcacatggttggatttt

SEQ ID NO: 224950 - DNA, 25 bp, Probe sequence
aatgcgtgaattaccatttggttca

SEQ ID NO: 224951 - DNA, 25 bp, Probe sequence
aattgccaaattctatacaccagat

SEQ ID NO: 224952 - DNA, 25 bp, Probe sequence
cacctgaagcatttgttgagcgtac

SEQ ID NO: 224953 - DNA, 25 bp, Probe sequence
cagtggctggagatgttattgcaag

SEQ ID NO: 224954 - DNA, 25 bp, Probe sequence
catgcgccgaaagagatttttgaac

SEQ ID NO: 224955 - DNA, 25 bp, Probe sequence
cttagtaaaccgtacgatttctatg

SEQ ID NO: 224956 - DNA, 25 bp, Probe sequence
ccagattttatacaaccaccatcaa

SEQ ID NO: 224957 - DNA, 25 bp, Probe sequence
gaaggttggtattctgttccggatg

SEQ ID NO: 224958 - DNA, 25 bp, Probe sequence
gaaacaacgccttgggtattagcta

SEQ ID NO: 224959 - DNA, 25 bp, Probe sequence
gactggaacggatgaacacggtcaa

SEQ ID NO: 224960 - DNA, 25 bp, Probe sequence
gagcgtacaaatttcgatctagcaa

SEQ ID NO: 224961 - DNA, 25 bp, Probe sequence
gatggcattagacttaccgttacct

SEQ ID NO: 224962 - DNA, 25 bp, Probe sequence
gatggcgaattaccagcgtatcaag

SEQ ID NO: 224963 - DNA, 25 bp, Probe sequence
gatggcgtatttacacctgaagcat

SEQ ID NO: 224964 - DNA, 25 bp, Probe sequence
gattccactcaattatttggcctat

SEQ ID NO: 224965 - DNA, 25 bp, Probe sequence
gtttatgtttggattgatgcgttag

SEQ ID NO: 224966 - DNA, 25 bp, Probe sequence
gtttgcaattttctgtggcattatc

SEQ ID NO: 224967 - DNA, 25 bp, Probe sequence
gtaagtttaccaagtgcaattccaa

SEQ ID NO: 224968 - DNA, 25 bp, Probe sequence
gtcacaattagtagacccacaatac

SEQ ID NO: 224969 - DNA, 25 bp, Probe sequence
gtccatgttccgtctaatccaaaac

SEQ ID NO: 224970 - DNA, 25 bp, Probe sequence
ggacatgcatattctacagtggctg

SEQ ID NO: 224971 - DNA, 25 bp, Probe sequence
tggttactgggcaacctaaacctat

SEQ ID NO: 224972 - DNA, 25 bp, Probe sequence
tctgtggcattatctacggtatgga

SEQ ID NO: 224973 - DNA, 25 bp, Probe sequence
taaacctattttcccaagattggat

SEQ ID NO: 224974 - DNA, 25 bp, Probe sequence
attgctgaattaaaaggcttatctt

SEQ ID NO: 224975 - DNA, 25 bp, Probe sequence
atcactgggataaatctcctgcaga

SEQ ID NO: 224976 - DNA, 25 bp, Probe sequence
atgaaccggcgagagtaactttagt

SEQ ID NO: 224977 - DNA, 25 bp, Probe sequence
aaatctcctgcagatgttcaaaagg

SEQ ID NO: 224978 - DNA, 25 bp, Probe sequence
aacagcctaaagaagttgctaagca

SEQ ID NO: 224979 - DNA, 25 bp, Probe sequence
aagtgattacacgtgctagagaagc

SEQ ID NO: 224980 - DNA, 25 bp, Probe sequence
aatgggattagattatcactgggat

SEQ ID NO: 224981 - DNA, 25 bp, Probe sequence
gcgagagtaactttagtagctgaac

SEQ ID NO: 224982 - DNA, 25 bp, Probe sequence
gctagagaagcaggtgttgatcgta

SEQ ID NO: 224983 - DNA, 25 bp, Probe sequence
gctcagcatccaaaagtgattggta

SEQ ID NO: 224984 - DNA, 25 bp, Probe sequence
gctaagcgtttgaagttaccaatta

SEQ ID NO: 224985 - DNA, 25 bp, Probe sequence
gcattatcggttggcatccagttga

SEQ ID NO: 224986 - DNA, 25 bp, Probe sequence
gcaaattgctttagctaagcgtttg

SEQ ID NO: 224987 - DNA, 25 bp, Probe sequence
gaagaagtgtgcgaacaaacaacta

SEQ ID NO: 224988 - DNA, 25 bp, Probe sequence
gaagcaggtgttgatcgtatgtttg

SEQ ID NO: 224989 - DNA, 25 bp, Probe sequence
gatcgtatgtttgtagttggtttta

SEQ ID NO: 224990 - DNA, 25 bp, Probe sequence
gagggaagcgaaatgaaccggcgag

SEQ ID NO: 224991 - DNA, 25 bp, Probe sequence
gagcaatacgatgatgatttgagtg

SEQ ID NO: 224992 - DNA, 25 bp, Probe sequence
gagtgaagtgattacacgtgctaga

SEQ ID NO: 224993 - DNA, 25 bp, Probe sequence
gatgagtatgattttttatatggca

SEQ ID NO: 224994 - DNA, 25 bp, Probe sequence
gatacacatgtccatttaaatgatg

SEQ ID NO: 224995 - DNA, 25 bp, Probe sequence
gttggttttaacaaatcgacaattg

SEQ ID NO: 224996 - DNA, 25 bp, Probe sequence
gttgctaagcatgtgtcaatggagc

SEQ ID NO: 224997 - DNA, 25 bp, Probe sequence
gttaatcgatacacatgtccattta

SEQ ID NO: 224998 - DNA, 25 bp, Probe sequence
gtagctgaacaaattgctgaattaa

SEQ ID NO: 224999 - DNA, 25 bp, Probe sequence
gtgattggtattggtgaaatgggat

SEQ ID NO: 225000 - DNA, 25 bp, Probe sequence
ggtaggcgggattatgcatagcttt

SEQ ID NO: 225001 - DNA, 25 bp, Probe sequence
ggttctccagaaattgcagatattg

SEQ ID NO: 225002 - DNA, 25 bp, Probe sequence
ggagcatgctgaagaggtaggcggg

SEQ ID NO: 225003 - DNA, 25 bp, Probe sequence
tgcatagctttagtggttctccaga

SEQ ID NO: 225004 - DNA, 25 bp, Probe sequence
tcgacaattgaacgcgcgatgaaat

SEQ ID NO: 225005 - DNA, 25 bp, Probe sequence
tatatggcattatcggttggcatcc

SEQ ID NO: 225006 - DNA, 25 bp, Probe sequence
ttatcattcataaccgtgaagcaac

SEQ ID NO: 225007 - DNA, 25 bp, Probe sequence
ttaccaattatcattcataaccgtg

SEQ ID NO: 225008 - DNA, 25 bp, Probe sequence
attgcgaatcggccattccaatggt

SEQ ID NO: 225009 - DNA, 25 bp, Probe sequence
ataccgaagcggatgtaaggcaagc

SEQ ID NO: 225010 - DNA, 25 bp, Probe sequence
atggtagtgccatcaacgaacaaac

SEQ ID NO: 225011 - DNA, 25 bp, Probe sequence
aggacgagatgatactgagcgtgtt

SEQ ID NO: 225012 - DNA, 25 bp, Probe sequence
aggtgttaaacatgcgtatattgat

SEQ ID NO: 225013 - DNA, 25 bp, Probe sequence
acgattgaaacgaatggtagtgcca

SEQ ID NO: 225014 - DNA, 25 bp, Probe sequence
actgagcgtgttaaacgagctgttg

SEQ ID NO: 225015 - DNA, 25 bp, Probe sequence
aaattggtgttgaacatgccgactt

SEQ ID NO: 225016 - DNA, 25 bp, Probe sequence
aacagatccagatttcccaggagat

SEQ ID NO: 225017 - DNA, 25 bp, Probe sequence
aatgcatgttagttcaccctttgat

SEQ ID NO: 225018 - DNA, 25 bp, Probe sequence
aatctgtgctaatagagttggggtt

SEQ ID NO: 225019 - DNA, 25 bp, Probe sequence
cgagctgttgaatgtgatacgattg

SEQ ID NO: 225020 - DNA, 25 bp, Probe sequence
gccattccaatggtaagcagttatt

SEQ ID NO: 225021 - DNA, 25 bp, Probe sequence
gcgttaatgcatgttagttcaccct

SEQ ID NO: 225022 - DNA, 25 bp, Probe sequence
gcggatgtaaggcaagctttagaag

SEQ ID NO: 225023 - DNA, 25 bp, Probe sequence
gcatttggttataccgaagcggatg

SEQ ID NO: 225024 - DNA, 25 bp, Probe sequence
gcaaggcgccgtagagaaattttaa

SEQ ID NO: 225025 - DNA, 25 bp, Probe sequence
gaatcggccattccaatggtaagca

SEQ ID NO: 225026 - DNA, 25 bp, Probe sequence
gaatcaattgataaatctgtgctaa

SEQ ID NO: 225027 - DNA, 25 bp, Probe sequence
gaacatgccgacttaattgatatta

SEQ ID NO: 225028 - DNA, 25 bp, Probe sequence
gaaaattgcgaatcggccattccaa

SEQ ID NO: 225029 - DNA, 25 bp, Probe sequence
gaaatgctcaacaaagtcgaggcgt

SEQ ID NO: 225030 - DNA, 25 bp, Probe sequence
gaaagatgcaaggcgccgtagagaa

SEQ ID NO: 225031 - DNA, 25 bp, Probe sequence
gagtttatagttgtagaaggacgag

SEQ ID NO: 225032 - DNA, 25 bp, Probe sequence
gatccagatttcccaggagataaaa

SEQ ID NO: 225033 - DNA, 25 bp, Probe sequence
gttgggaaagatgcaaggcgccgta

SEQ ID NO: 225034 - DNA, 25 bp, Probe sequence
gttaaatgcatttggttataccgaa

SEQ ID NO: 225035 - DNA, 25 bp, Probe sequence
gtattaacagatccagatttcccag

SEQ ID NO: 225036 - DNA, 25 bp, Probe sequence
gtacaattactgaacatgtcaaagg

SEQ ID NO: 225037 - DNA, 25 bp, Probe sequence
gtcgaggcgttattgtattaacaga

SEQ ID NO: 225038 - DNA, 25 bp, Probe sequence
gtgccatcaacgaacaaactttaga

SEQ ID NO: 225039 - DNA, 25 bp, Probe sequence
ggtgttgaacatgccgacttaattg

SEQ ID NO: 225040 - DNA, 25 bp, Probe sequence
tgcatgttagttcaccctttgatga

SEQ ID NO: 225041 - DNA, 25 bp, Probe sequence
tagttcaccctttgatgaagcttat

SEQ ID NO: 225042 - DNA, 25 bp, Probe sequence
attggcgttagtgataaaatactaa

SEQ ID NO: 225043 - DNA, 25 bp, Probe sequence
attgtgataaaaataggtagcgctt

SEQ ID NO: 225044 - DNA, 25 bp, Probe sequence
attcaaaattggcgttagtgataaa

SEQ ID NO: 225045 - DNA, 25 bp, Probe sequence
ataggtgtaaatatttgtgataaaa

SEQ ID NO: 225046 - DNA, 25 bp, Probe sequence
ataaaacattcaaaattggcgttag

SEQ ID NO: 225047 - DNA, 25 bp, Probe sequence
ataaaatactaacaataagacagat

SEQ ID NO: 225048 - DNA, 25 bp, Probe sequence
atgcctaataacgataatataggtg

SEQ ID NO: 225049 - DNA, 25 bp, Probe sequence
aggtgtaaatatttgtgataaaaca

SEQ ID NO: 225050 - DNA, 25 bp, Probe sequence
acattcaaaattggcgttagtgata

SEQ ID NO: 225051 - DNA, 25 bp, Probe sequence
aaattggcgttagtgataaaatact

SEQ ID NO: 225052 - DNA, 25 bp, Probe sequence
aaacattcaaaattggcgttagtga

SEQ ID NO: 225053 - DNA, 25 bp, Probe sequence
aaaacattcaaaattggcgttagtg

SEQ ID NO: 225054 - DNA, 25 bp, Probe sequence
aacattcaaaattggcgttagtgat

SEQ ID NO: 225055 - DNA, 25 bp, Probe sequence
aataacgataatataggtgtaaata

SEQ ID NO: 225056 - DNA, 25 bp, Probe sequence
aattggcgttagtgataaaatacta

SEQ ID NO: 225057 - DNA, 25 bp, Probe sequence
caaaattggcgttagtgataaaata

SEQ ID NO: 225058 - DNA, 25 bp, Probe sequence
cattcaaaattggcgttagtgataa

SEQ ID NO: 225059 - DNA, 25 bp, Probe sequence
gataaaacattcaaaattggcgtta

SEQ ID NO: 225060 - DNA, 25 bp, Probe sequence
gataaaatactaacaataagacaga

SEQ ID NO: 225061 - DNA, 25 bp, Probe sequence
gattgtgataaaaataggtagcgct

SEQ ID NO: 225062 - DNA, 25 bp, Probe sequence
gtaaatatttgtgataaaacattca

SEQ ID NO: 225063 - DNA, 25 bp, Probe sequence
gtgataaaatactaacaataagaca

SEQ ID NO: 225064 - DNA, 25 bp, Probe sequence
ggtgtaaatatttgtgataaaacat

SEQ ID NO: 225065 - DNA, 25 bp, Probe sequence
tgtgataaaaataggtagcgcttga

SEQ ID NO: 225066 - DNA, 25 bp, Probe sequence
tcaaaattggcgttagtgataaaat

SEQ ID NO: 225067 - DNA, 25 bp, Probe sequence
taataacgataatataggtgtaaat

SEQ ID NO: 225068 - DNA, 25 bp, Probe sequence
taaaatactaacaataagacagatt

SEQ ID NO: 225069 - DNA, 25 bp, Probe sequence
taaaacattcaaaattggcgttagt

SEQ ID NO: 225070 - DNA, 25 bp, Probe sequence
taaatatttgtgataaaacattcaa

SEQ ID NO: 225071 - DNA, 25 bp, Probe sequence
taggtgtaaatatttgtgataaaac

SEQ ID NO: 225072 - DNA, 25 bp, Probe sequence
tataggtgtaaatatttgtgataaa

SEQ ID NO: 225073 - DNA, 25 bp, Probe sequence
ttgtgataaaaataggtagcgcttg

SEQ ID NO: 225074 - DNA, 25 bp, Probe sequence
ttcaaaattggcgttagtgataaaa

SEQ ID NO: 225075 - DNA, 25 bp, Probe sequence
attgtcgtacaatactatacagaga

SEQ ID NO: 225076 - DNA, 25 bp, Probe sequence
atgcaaaaagaagtgggcgaacgct

SEQ ID NO: 225077 - DNA, 25 bp, Probe sequence
atgtgacggtgattaatgaagatat

SEQ ID NO: 225078 - DNA, 25 bp, Probe sequence
atggttgttgcaaacctgccgtact

SEQ ID NO: 225079 - DNA, 25 bp, Probe sequence
agtgggcgaacgcttaaatgctgaa

SEQ ID NO: 225080 - DNA, 25 bp, Probe sequence
agacgtcgcggtgaaacgctatcta

SEQ ID NO: 225081 - DNA, 25 bp, Probe sequence
aactgatgcagagaactgaaccgtt

SEQ ID NO: 225082 - DNA, 25 bp, Probe sequence
aactggggtgattgaaattggtcca

SEQ ID NO: 225083 - DNA, 25 bp, Probe sequence
aacgctatctattcaagattttgct

SEQ ID NO: 225084 - DNA, 25 bp, Probe sequence
cctgccgtactatattacgacgcca

SEQ ID NO: 225085 - DNA, 25 bp, Probe sequence
gccaccacctaatgttgattcaata

SEQ ID NO: 225086 - DNA, 25 bp, Probe sequence
gtactatattacgacgccaatttta

SEQ ID NO: 225087 - DNA, 25 bp, Probe sequence
gcagagaactgaaccgttagtaaca

SEQ ID NO: 225088 - DNA, 25 bp, Probe sequence
gcaacaccatcaagaacgcgagcgt

SEQ ID NO: 225089 - DNA, 25 bp, Probe sequence
gaagctgttgaaaatcatttacaag

SEQ ID NO: 225090 - DNA, 25 bp, Probe sequence
gaacgcgagcgttgttagataaata

SEQ ID NO: 225091 - DNA, 25 bp, Probe sequence
gatccaagacgtcgcggtgaaacgc

SEQ ID NO: 225092 - DNA, 25 bp, Probe sequence
gagtattggcatttgaaattgatca

SEQ ID NO: 225093 - DNA, 25 bp, Probe sequence
gaggaagcattctttaagttagcaa

SEQ ID NO: 225094 - DNA, 25 bp, Probe sequence
gatggctacgtggtgatgatgcaaa

SEQ ID NO: 225095 - DNA, 25 bp, Probe sequence
gatataccaattgatggctacgtgg

SEQ ID NO: 225096 - DNA, 25 bp, Probe sequence
gatattgcaacaccatcaagaacgc

SEQ ID NO: 225097 - DNA, 25 bp, Probe sequence
gttagcaaaagcagcatttgcacaa

SEQ ID NO: 225098 - DNA, 25 bp, Probe sequence
gtattaacggtacctaaatctgtat

SEQ ID NO: 225099 - DNA, 25 bp, Probe sequence
gtattgatccaagacgtcgcggtga

SEQ ID NO: 225100 - DNA, 25 bp, Probe sequence
gtaacagtagataacgaggaagcat

SEQ ID NO: 225101 - DNA, 25 bp, Probe sequence
gtcgcggtgaaacgctatctattca

SEQ ID NO: 225102 - DNA, 25 bp, Probe sequence
gtgatattgatgcacaaactggggt

SEQ ID NO: 225103 - DNA, 25 bp, Probe sequence
taaatctgtatttatgccaccacct

SEQ ID NO: 225104 - DNA, 25 bp, Probe sequence
tatgccaccacctaatgttgattca

SEQ ID NO: 225105 - DNA, 25 bp, Probe sequence
tatcaccttatgataatgtgacggt

SEQ ID NO: 225106 - DNA, 25 bp, Probe sequence
tatttatgccaccacctaatgttga

SEQ ID NO: 225107 - DNA, 25 bp, Probe sequence
tattacgacgccaattttattaaat

SEQ ID NO: 225108 - DNA, 25 bp, Probe sequence
ttgcaaacctgccgtactatattac

SEQ ID NO: 225109 - DNA, 25 bp, Probe sequence
atatccgtcagttttcattgttgag

SEQ ID NO: 225110 - DNA, 25 bp, Probe sequence
atacatacactgatgtgttaactga

SEQ ID NO: 225111 - DNA, 25 bp, Probe sequence
atccgtcagttttcattgttgagtt

SEQ ID NO: 225112 - DNA, 25 bp, Probe sequence
actgaaagccaatggaggccgtaag

SEQ ID NO: 225113 - DNA, 25 bp, Probe sequence
acatatccgtcagttttcattgttg

SEQ ID NO: 225114 - DNA, 25 bp, Probe sequence
aacacaactttgagagagtatctta

SEQ ID NO: 225115 - DNA, 25 bp, Probe sequence
aacatatccgtcagttttcattgtt

SEQ ID NO: 225116 - DNA, 25 bp, Probe sequence
aagaaacatatccgtcagttttcat

SEQ ID NO: 225117 - DNA, 25 bp, Probe sequence
aatcatcacgaatcaattgcacact

SEQ ID NO: 225118 - DNA, 25 bp, Probe sequence
aattctattgattgtcatgtaggaa

SEQ ID NO: 225119 - DNA, 25 bp, Probe sequence
caatggaggccgtaagaaaacaata

SEQ ID NO: 225120 - DNA, 25 bp, Probe sequence
caaaaattctattgattgtcatgta

SEQ ID NO: 225121 - DNA, 25 bp, Probe sequence
cagttttcattgttgagttagatca

SEQ ID NO: 225122 - DNA, 25 bp, Probe sequence
catatccgtcagttttcattgttga

SEQ ID NO: 225123 - DNA, 25 bp, Probe sequence
gaaagccaatggaggccgtaagaaa

SEQ ID NO: 225124 - DNA, 25 bp, Probe sequence
ccgtcagttttcattgttgagttag

SEQ ID NO: 225125 - DNA, 25 bp, Probe sequence
gccaatggaggccgtaagaaaacaa

SEQ ID NO: 225126 - DNA, 25 bp, Probe sequence
gaagaggataatcatcacgaatcaa

SEQ ID NO: 225127 - DNA, 25 bp, Probe sequence
gaaaatgttcaagtttcatttgaag

SEQ ID NO: 225128 - DNA, 25 bp, Probe sequence
gaaacatatccgtcagttttcattg

SEQ ID NO: 225129 - DNA, 25 bp, Probe sequence
gagagagtatcttatacatacactg

SEQ ID NO: 225130 - DNA, 25 bp, Probe sequence
gagagtatcttatacatacactgat

SEQ ID NO: 225131 - DNA, 25 bp, Probe sequence
gaggataatcatcacgaatcaattg

SEQ ID NO: 225132 - DNA, 25 bp, Probe sequence
gatcaagacaaacacaactttgaga

SEQ ID NO: 225133 - DNA, 25 bp, Probe sequence
gataatcatcacgaatcaattgcac

SEQ ID NO: 225134 - DNA, 25 bp, Probe sequence
gttagatcaagacaaacacaacttt

SEQ ID NO: 225135 - DNA, 25 bp, Probe sequence
gtatcttatacatacactgatgtgt

SEQ ID NO: 225136 - DNA, 25 bp, Probe sequence
gtactgaaagccaatggaggccgta

SEQ ID NO: 225137 - DNA, 25 bp, Probe sequence
gtcagttttcattgttgagttagat

SEQ ID NO: 225138 - DNA, 25 bp, Probe sequence
ggaaatcgtattgtactgaaagcca

SEQ ID NO: 225139 - DNA, 25 bp, Probe sequence
tgatgtgttaactgaaaatgttcaa

SEQ ID NO: 225140 - DNA, 25 bp, Probe sequence
tcatcacgaatcaattgcacactaa

SEQ ID NO: 225141 - DNA, 25 bp, Probe sequence
tacactgatgtgttaactgaaaatg

SEQ ID NO: 225142 - DNA, 25 bp, Probe sequence
ttgtcatgtaggaaatcgtattgta

SEQ ID NO: 225143 - DNA, 25 bp, Probe sequence
attaattttacgctcgatacacttt

SEQ ID NO: 225144 - DNA, 25 bp, Probe sequence
atgaagtgtacttagttagactatt

SEQ ID NO: 225145 - DNA, 25 bp, Probe sequence
atgatatatgaaacggcaccagcca

SEQ ID NO: 225146 - DNA, 25 bp, Probe sequence
aggggcgagtttggaagaattggct

SEQ ID NO: 225147 - DNA, 25 bp, Probe sequence
accttcagcttgggtgattcttgct

SEQ ID NO: 225148 - DNA, 25 bp, Probe sequence
acgaaaatgtgttatgaggccttag

SEQ ID NO: 225149 - DNA, 25 bp, Probe sequence
aaatctcgcatatcgtgcagcgcaa

SEQ ID NO: 225150 - DNA, 25 bp, Probe sequence
aaagtggtgcagatggtgcgttaat

SEQ ID NO: 225151 - DNA, 25 bp, Probe sequence
aacataattatgtgccttctaatca

SEQ ID NO: 225152 - DNA, 25 bp, Probe sequence
aatgcagttaacggttgttgtaatg

SEQ ID NO: 225153 - DNA, 25 bp, Probe sequence
aataaaactgcactatgtactggaa

SEQ ID NO: 225154 - DNA, 25 bp, Probe sequence
caaggtgtaacaatttctatcgata

SEQ ID NO: 225155 - DNA, 25 bp, Probe sequence
caaaacacccacaaatcgataaatt

SEQ ID NO: 225156 - DNA, 25 bp, Probe sequence
caaacttaggcatatcatcaccaga

SEQ ID NO: 225157 - DNA, 25 bp, Probe sequence
ctgtttcaaaacacccacaaatcga

SEQ ID NO: 225158 - DNA, 25 bp, Probe sequence
cgtgcagcgcaactatttattgagc

SEQ ID NO: 225159 - DNA, 25 bp, Probe sequence
cgattagagccaatttctgtttcaa

SEQ ID NO: 225160 - DNA, 25 bp, Probe sequence
gccttctaatcataaaaatctcgca

SEQ ID NO: 225161 - DNA, 25 bp, Probe sequence
tgctggcttagctggaggttcggct

SEQ ID NO: 225162 - DNA, 25 bp, Probe sequence
gaagaattggctctactaggcagta

SEQ ID NO: 225163 - DNA, 25 bp, Probe sequence
gaaacggcaccagccaaaattaatt

SEQ ID NO: 225164 - DNA, 25 bp, Probe sequence
gaaatacctgtttctgctggcttag

SEQ ID NO: 225165 - DNA, 25 bp, Probe sequence
gagcaatatcaactaaagcaaggtg

SEQ ID NO: 225166 - DNA, 25 bp, Probe sequence
gaggttcggctgatgcagcagcaac

SEQ ID NO: 225167 - DNA, 25 bp, Probe sequence
gaggccttagaaaatcgagattatc

SEQ ID NO: 225168 - DNA, 25 bp, Probe sequence
gatgcagcagcaacgttaagaggat

SEQ ID NO: 225169 - DNA, 25 bp, Probe sequence
gataagcgttacgacgtacatacga

SEQ ID NO: 225170 - DNA, 25 bp, Probe sequence
gtgcgttaatgagtggaagcggacc

SEQ ID NO: 225171 - DNA, 25 bp, Probe sequence
gggacagatattccgttttgtattt

SEQ ID NO: 225172 - DNA, 25 bp, Probe sequence
gggtgattcttgctaaaccaaactt

SEQ ID NO: 225173 - DNA, 25 bp, Probe sequence
tgtcaaagtttgtctaatcgattag

SEQ ID NO: 225174 - DNA, 25 bp, Probe sequence
taaatgatcgtttaacttttcataa

SEQ ID NO: 225175 - DNA, 25 bp, Probe sequence
tacgctcgatacactttttaaaaga

SEQ ID NO: 225176 - DNA, 25 bp, Probe sequence
ttttaaataaaccaccttcagcttg

SEQ ID NO: 225177 - DNA, 25 bp, Probe sequence
attttatgagggctggtggctctat

SEQ ID NO: 225178 - DNA, 25 bp, Probe sequence
atacttccttagtgaaattatctga

SEQ ID NO: 225179 - DNA, 25 bp, Probe sequence
agtaattactactgctggcgcaagt

SEQ ID NO: 225180 - DNA, 25 bp, Probe sequence
actactgctggcgcaagtggtggtg

SEQ ID NO: 225181 - DNA, 25 bp, Probe sequence
aaagcccatgtaaaaggggtatcag

SEQ ID NO: 225182 - DNA, 25 bp, Probe sequence
aaggtatttcattggcaaatgcggt

SEQ ID NO: 225183 - DNA, 25 bp, Probe sequence
aatgaatgagtttaaagcccatgta

SEQ ID NO: 225184 - DNA, 25 bp, Probe sequence
gagtttaacgtagaacctggcaaca

SEQ ID NO: 225185 - DNA, 25 bp, Probe sequence
aattcaaatgttttagttgtcgatg

SEQ ID NO: 225186 - DNA, 25 bp, Probe sequence
gctgttgttaccattgcgacaaaag

SEQ ID NO: 225187 - DNA, 25 bp, Probe sequence
gaagaggcgactgaagttgttaatg

SEQ ID NO: 225188 - DNA, 25 bp, Probe sequence
gaaccatccgaataaattgattcca

SEQ ID NO: 225189 - DNA, 25 bp, Probe sequence
gaagcgagagaattgtttttatgac

SEQ ID NO: 225190 - DNA, 25 bp, Probe sequence
gagaaagaacgtttgttacctggcg

SEQ ID NO: 225191 - DNA, 25 bp, Probe sequence
gacaacaaggtgactgaaggttcta

SEQ ID NO: 225192 - DNA, 25 bp, Probe sequence
gacgcaatatttgatgaaccatccg

SEQ ID NO: 225193 - DNA, 25 bp, Probe sequence
gatttggtaggtaatccatcgctac

SEQ ID NO: 225194 - DNA, 25 bp, Probe sequence
gattgaagattatacttccttagtg

SEQ ID NO: 225195 - DNA, 25 bp, Probe sequence
gttgtcgatgattttatgagggctg

SEQ ID NO: 225196 - DNA, 25 bp, Probe sequence
gtagaacctggcaacagtttatcta

SEQ ID NO: 225197 - DNA, 25 bp, Probe sequence
gtgactgaaggttctacagtttcaa

SEQ ID NO: 225198 - DNA, 25 bp, Probe sequence
ggtaatccatcgctactaaacaaag

SEQ ID NO: 225199 - DNA, 25 bp, Probe sequence
gtgttacgtataaaccaatgatgag

SEQ ID NO: 225200 - DNA, 25 bp, Probe sequence
ggggtatcagtacttgtagaatcaa

SEQ ID NO: 225201 - DNA, 25 bp, Probe sequence
ggtactttcgaagagaactttagca

SEQ ID NO: 225202 - DNA, 25 bp, Probe sequence
ggttctacagtttcaattaattacg

SEQ ID NO: 225203 - DNA, 25 bp, Probe sequence
ggcaacagtttatctaagttttcat

SEQ ID NO: 225204 - DNA, 25 bp, Probe sequence
ggcaaatgcggttgctaatatttta

SEQ ID NO: 225205 - DNA, 25 bp, Probe sequence
ggcgcaagtggtggtgttacgtata

SEQ ID NO: 225206 - DNA, 25 bp, Probe sequence
taattacgtttcaggatcttcaaga

SEQ ID NO: 225207 - DNA, 25 bp, Probe sequence
taatgaggtcattactctattagaa

SEQ ID NO: 225208 - DNA, 25 bp, Probe sequence
taagttaattgccagtatttacatg

SEQ ID NO: 225209 - DNA, 25 bp, Probe sequence
tagatgctgttgttaccattgcgac

SEQ ID NO: 225210 - DNA, 25 bp, Probe sequence
ttgattccattaactttttttgtga

SEQ ID NO: 225211 - DNA, 25 bp, Probe sequence
attcgcatgcaacagttgtgaatgg

SEQ ID NO: 225212 - DNA, 25 bp, Probe sequence
attttaatgaacacaagccagcgcg

SEQ ID NO: 225213 - DNA, 25 bp, Probe sequence
attctgttgcgaaagcgaccatttt

SEQ ID NO: 225214 - DNA, 25 bp, Probe sequence
atcattaacacaacaagattaccgg

SEQ ID NO: 225215 - DNA, 25 bp, Probe sequence
atcgtaagcgctgatgttcaagcac

SEQ ID NO: 225216 - DNA, 25 bp, Probe sequence
atggtatggtttatacttctggtca

SEQ ID NO: 225217 - DNA, 25 bp, Probe sequence
aggttgcgcgtttgccaaaagatgt

SEQ ID NO: 225218 - DNA, 25 bp, Probe sequence
aggttgttttggaagaagcaggatc

SEQ ID NO: 225219 - DNA, 25 bp, Probe sequence
aacacaacaagattaccggaagcac

SEQ ID NO: 225220 - DNA, 25 bp, Probe sequence
aagcacttggaccatattcgcatgc

SEQ ID NO: 225221 - DNA, 25 bp, Probe sequence
aagcgaccattttcattaaagatat

SEQ ID NO: 225222 - DNA, 25 bp, Probe sequence
aagattaccggaagcacttggacca

SEQ ID NO: 225223 - DNA, 25 bp, Probe sequence
aatgaagtgtatggtcaatatttta

SEQ ID NO: 225224 - DNA, 25 bp, Probe sequence
cacttggaccatattcgcatgcaac

SEQ ID NO: 225225 - DNA, 25 bp, Probe sequence
catattcgcatgcaacagttgtgaa

SEQ ID NO: 225226 - DNA, 25 bp, Probe sequence
cttggaccatattcgcatgcaacag

SEQ ID NO: 225227 - DNA, 25 bp, Probe sequence
ccggaagcacttggaccatattcgc

SEQ ID NO: 225228 - DNA, 25 bp, Probe sequence
cgcgtttgccaaaagatgtgaaagt

SEQ ID NO: 225229 - DNA, 25 bp, Probe sequence
gcgaaagcgaccattttcattaaag

SEQ ID NO: 225230 - DNA, 25 bp, Probe sequence
gcacttggaccatattcgcatgcaa

SEQ ID NO: 225231 - DNA, 25 bp, Probe sequence
gcaacagttgtgaatggtatggttt

SEQ ID NO: 225232 - DNA, 25 bp, Probe sequence
gaattctgttgcgaaagcgaccatt

SEQ ID NO: 225233 - DNA, 25 bp, Probe sequence
gaagcaggatctgatttgaattctg

SEQ ID NO: 225234 - DNA, 25 bp, Probe sequence
gaccatattcgcatgcaacagttgt

SEQ ID NO: 225235 - DNA, 25 bp, Probe sequence
gattaccggaagcacttggaccata

SEQ ID NO: 225236 - DNA, 25 bp, Probe sequence
gttgcgaaagcgaccattttcatta

SEQ ID NO: 225237 - DNA, 25 bp, Probe sequence
gttgcgcgtttgccaaaagatgtga

SEQ ID NO: 225238 - DNA, 25 bp, Probe sequence
ggatctgatttgaattctgttgcga

SEQ ID NO: 225239 - DNA, 25 bp, Probe sequence
ggaagcacttggaccatattcgcat

SEQ ID NO: 225240 - DNA, 25 bp, Probe sequence
tggaccatattcgcatgcaacagtt

SEQ ID NO: 225241 - DNA, 25 bp, Probe sequence
tctgttgcgaaagcgaccattttca

SEQ ID NO: 225242 - DNA, 25 bp, Probe sequence
tcgtaagcgctgatgttcaagcaca

SEQ ID NO: 225243 - DNA, 25 bp, Probe sequence
taccggaagcacttggaccatattc

SEQ ID NO: 225244 - DNA, 25 bp, Probe sequence
tttaatgaacacaagccagcgcgta

SEQ ID NO: 225245 - DNA, 25 bp, Probe sequence
attattctgctaaaggtactacaat

SEQ ID NO: 225246 - DNA, 25 bp, Probe sequence
agtggagaattagacaaagctgtag

SEQ ID NO: 225247 - DNA, 25 bp, Probe sequence
caaagtcacagaccctggattccct

SEQ ID NO: 225248 - DNA, 25 bp, Probe sequence
aaaactagccaagcaagggcaatta

SEQ ID NO: 225249 - DNA, 25 bp, Probe sequence
aatatcaaattaatcgcttgtacga

SEQ ID NO: 225250 - DNA, 25 bp, Probe sequence
caatggttccatacttcatcctgtt

SEQ ID NO: 225251 - DNA, 25 bp, Probe sequence
catcctgttgatgagattgagtcat

SEQ ID NO: 225252 - DNA, 25 bp, Probe sequence
gctagagctgctggaaaagatgtaa

SEQ ID NO: 225253 - DNA, 25 bp, Probe sequence
gaatatacgaatgcctctttccaaa

SEQ ID NO: 225254 - DNA, 25 bp, Probe sequence
gaatgcctctttccaaaatgaatat

SEQ ID NO: 225255 - DNA, 25 bp, Probe sequence
gaagtcaaagtcacagaccctggat

SEQ ID NO: 225256 - DNA, 25 bp, Probe sequence
gaacagaagaggagtatgcattagg

SEQ ID NO: 225257 - DNA, 25 bp, Probe sequence
gagtacggtggtgtaggcacttata

SEQ ID NO: 225258 - DNA, 25 bp, Probe sequence
gagatgaagttgagtacggtggtgt

SEQ ID NO: 225259 - DNA, 25 bp, Probe sequence
gagtatggatgtcatgggtattcag

SEQ ID NO: 225260 - DNA, 25 bp, Probe sequence
gatgatgcgctacgtaatgaaaaag

SEQ ID NO: 225261 - DNA, 25 bp, Probe sequence
gatcgtaaacaatttaactatcgtg

SEQ ID NO: 225262 - DNA, 25 bp, Probe sequence
gattcattaccaacacttatcaatc

SEQ ID NO: 225263 - DNA, 25 bp, Probe sequence
gttccatacttcatcctgttgatga

SEQ ID NO: 225264 - DNA, 25 bp, Probe sequence
gtaggcacttatattggtgctactg

SEQ ID NO: 225265 - DNA, 25 bp, Probe sequence
gtggtaacagaagtgctaatgctag

SEQ ID NO: 225266 - DNA, 25 bp, Probe sequence
ggtgctactgaaaatgcgaatcata

SEQ ID NO: 225267 - DNA, 25 bp, Probe sequence
ggaaatatgatgatgcgctacgtaa

SEQ ID NO: 225268 - DNA, 25 bp, Probe sequence
ggaaaagatgtaactatcttcttta

SEQ ID NO: 225269 - DNA, 25 bp, Probe sequence
ggcatactttagttaagcttgatga

SEQ ID NO: 225270 - DNA, 25 bp, Probe sequence
tgggtgaaacaaacaaggcatactt

SEQ ID NO: 225271 - DNA, 25 bp, Probe sequence
tcacagaccctggattccctagtga

SEQ ID NO: 225272 - DNA, 25 bp, Probe sequence
taatcgcttgtacgatgagtatgga

SEQ ID NO: 225273 - DNA, 25 bp, Probe sequence
taaaacctattatgtaatctgtaga

SEQ ID NO: 225274 - DNA, 25 bp, Probe sequence
taggacatatcaatggttccatact

SEQ ID NO: 225275 - DNA, 25 bp, Probe sequence
tataacgttataaatcttgatggtg

SEQ ID NO: 225276 - DNA, 25 bp, Probe sequence
tttactttttgggggcttaatgcat

SEQ ID NO: 225277 - DNA, 25 bp, Probe sequence
ttcaatgtccagggccaattgtaaa

SEQ ID NO: 225278 - DNA, 25 bp, Probe sequence
ttgatggtggttataaagcttatga

SEQ ID NO: 225279 - DNA, 25 bp, Probe sequence
atcgcgcatcctattaattcagata

SEQ ID NO: 225280 - DNA, 25 bp, Probe sequence
agatggtgaattccgcgacatcgcg

SEQ ID NO: 225281 - DNA, 25 bp, Probe sequence
agtaccagataaaaacgctacatca

SEQ ID NO: 225282 - DNA, 25 bp, Probe sequence
agcactcgtttccattacattagat

SEQ ID NO: 225283 - DNA, 25 bp, Probe sequence
actctggcttgttcgttgcaatgcc

SEQ ID NO: 225284 - DNA, 25 bp, Probe sequence
acgctacatcagaagattcagaaga

SEQ ID NO: 225285 - DNA, 25 bp, Probe sequence
acgtgtaattgaaggaaactctggc

SEQ ID NO: 225286 - DNA, 25 bp, Probe sequence
ggtgaattccgcgacatcgcgcatc

SEQ ID NO: 225287 - DNA, 25 bp, Probe sequence
acattagatgaagctttcgtaattc

SEQ ID NO: 225288 - DNA, 25 bp, Probe sequence
acatcgcgcatcctattaattcaga

SEQ ID NO: 225289 - DNA, 25 bp, Probe sequence
aaactctggcttgttcgttgcaatg

SEQ ID NO: 225290 - DNA, 25 bp, Probe sequence
aaagcactcgtttccattacattag

SEQ ID NO: 225291 - DNA, 25 bp, Probe sequence
aaaacgctacatcagaagattcaga

SEQ ID NO: 225292 - DNA, 25 bp, Probe sequence
aacagatggacgaatgaaagcactc

SEQ ID NO: 225293 - DNA, 25 bp, Probe sequence
aaggaaactctggcttgttcgttgc

SEQ ID NO: 225294 - DNA, 25 bp, Probe sequence
cactcgtttccattacattagatga

SEQ ID NO: 225295 - DNA, 25 bp, Probe sequence
caccagatggtgaattccgcgacat

SEQ ID NO: 225296 - DNA, 25 bp, Probe sequence
ctggcttgttcgttgcaatgccaag

SEQ ID NO: 225297 - DNA, 25 bp, Probe sequence
cgcgcatcctattaattcagatatg

SEQ ID NO: 225298 - DNA, 25 bp, Probe sequence
gccaagtaaacgtacaccagatggt

SEQ ID NO: 225299 - DNA, 25 bp, Probe sequence
gcatcctattaattcagatatgaga

SEQ ID NO: 225300 - DNA, 25 bp, Probe sequence
gcaatgccaagtaaacgtacaccag

SEQ ID NO: 225301 - DNA, 25 bp, Probe sequence
gaatgaaagcactcgtttccattac

SEQ ID NO: 225302 - DNA, 25 bp, Probe sequence
gaagctttcgtaattcatgatttac

SEQ ID NO: 225303 - DNA, 25 bp, Probe sequence
gaaagtgacagatgtaagacttaga

SEQ ID NO: 225304 - DNA, 25 bp, Probe sequence
gagacaagaaattcaagatgcagtg

SEQ ID NO: 225305 - DNA, 25 bp, Probe sequence
gatgcagtgatgaaagtatatgatg

SEQ ID NO: 225306 - DNA, 25 bp, Probe sequence
gtttccattacattagatgaagctt

SEQ ID NO: 225307 - DNA, 25 bp, Probe sequence
gtaattcatgatttacgtgtaattg

SEQ ID NO: 225308 - DNA, 25 bp, Probe sequence
ggacgaatgaaagcactcgtttcca

SEQ ID NO: 225309 - DNA, 25 bp, Probe sequence
ggcttgttcgttgcaatgccaagta

SEQ ID NO: 225310 - DNA, 25 bp, Probe sequence
tgaattccgcgacatcgcgcatcct

SEQ ID NO: 225311 - DNA, 25 bp, Probe sequence
tgaaggaaactctggcttgttcgtt

SEQ ID NO: 225312 - DNA, 25 bp, Probe sequence
ttgttcgttgcaatgccaagtaaac

SEQ ID NO: 225313 - DNA, 25 bp, Probe sequence
attaaaaacaatgccttttatatgt

SEQ ID NO: 225314 - DNA, 25 bp, Probe sequence
atatgttgaaagagtattgcagatt

SEQ ID NO: 225315 - DNA, 25 bp, Probe sequence
atgccttttatatgttgaaagagta

SEQ ID NO: 225316 - DNA, 25 bp, Probe sequence
atgatgctcgtatttttgaagtaag

SEQ ID NO: 225317 - DNA, 25 bp, Probe sequence
atgttgaaagagtattgcagattaa

SEQ ID NO: 225318 - DNA, 25 bp, Probe sequence
agagtattgcagattaaattataat

SEQ ID NO: 225319 - DNA, 25 bp, Probe sequence
acaatgccttttatatgttgaaaga

SEQ ID NO: 225320 - DNA, 25 bp, Probe sequence
aaagagtattgcagattaaattata

SEQ ID NO: 225321 - DNA, 25 bp, Probe sequence
aaacaatgccttttatatgttgaaa

SEQ ID NO: 225322 - DNA, 25 bp, Probe sequence
aaaacaatgccttttatatgttgaa

SEQ ID NO: 225323 - DNA, 25 bp, Probe sequence
aaaaacaatgccttttatatgttga

SEQ ID NO: 225324 - DNA, 25 bp, Probe sequence
aacaatgccttttatatgttgaaag

SEQ ID NO: 225325 - DNA, 25 bp, Probe sequence
aagagtattgcagattaaattataa

SEQ ID NO: 225326 - DNA, 25 bp, Probe sequence
aatgatgctcgtatttttgaagtaa

SEQ ID NO: 225327 - DNA, 25 bp, Probe sequence
aatgccttttatatgttgaaagagt

SEQ ID NO: 225328 - DNA, 25 bp, Probe sequence
aattaaaaacaatgccttttatatg

SEQ ID NO: 225329 - DNA, 25 bp, Probe sequence
caatgccttttatatgttgaaagag

SEQ ID NO: 225330 - DNA, 25 bp, Probe sequence
gaattaaaaacaatgccttttatat

SEQ ID NO: 225331 - DNA, 25 bp, Probe sequence
gaatgatgctcgtatttttgaagta

SEQ ID NO: 225332 - DNA, 25 bp, Probe sequence
gaaagagtattgcagattaaattat

SEQ ID NO: 225333 - DNA, 25 bp, Probe sequence
gagtattgcagattaaattataata

SEQ ID NO: 225334 - DNA, 25 bp, Probe sequence
gttgaaagagtattgcagattaaat

SEQ ID NO: 225335 - DNA, 25 bp, Probe sequence
gtttgaatgatgctcgtatttttga

SEQ ID NO: 225336 - DNA, 25 bp, Probe sequence
tgttgaaagagtattgcagattaaa

SEQ ID NO: 225337 - DNA, 25 bp, Probe sequence
tgaatgatgctcgtatttttgaagt

SEQ ID NO: 225338 - DNA, 25 bp, Probe sequence
tgccttttatatgttgaaagagtat

SEQ ID NO: 225339 - DNA, 25 bp, Probe sequence
taaaaacaatgccttttatatgttg

SEQ ID NO: 225340 - DNA, 25 bp, Probe sequence
tatgttgaaagagtattgcagatta

SEQ ID NO: 225341 - DNA, 25 bp, Probe sequence
tatatgttgaaagagtattgcagat

SEQ ID NO: 225342 - DNA, 25 bp, Probe sequence
tttgaatgatgctcgtatttttgaa

SEQ ID NO: 225343 - DNA, 25 bp, Probe sequence
ttatatgttgaaagagtattgcaga

SEQ ID NO: 225344 - DNA, 25 bp, Probe sequence
ttaaaaacaatgccttttatatgtt

SEQ ID NO: 225345 - DNA, 25 bp, Probe sequence
ttgaaagagtattgcagattaaatt

SEQ ID NO: 225346 - DNA, 25 bp, Probe sequence
ttgaatgatgctcgtatttttgaag

SEQ ID NO: 225347 - DNA, 25 bp, Probe sequence
ataaagtgctacacgaggttgctgg

SEQ ID NO: 225348 - DNA, 25 bp, Probe sequence
atctgcatcgattcaacaaccatat

SEQ ID NO: 225349 - DNA, 25 bp, Probe sequence
agatggtgccaaggtttcacattta

SEQ ID NO: 225350 - DNA, 25 bp, Probe sequence
accgtttgcgcaattgagaccaggc

SEQ ID NO: 225351 - DNA, 25 bp, Probe sequence
acctccctgatgtattgtcgttaat

SEQ ID NO: 225352 - DNA, 25 bp, Probe sequence
acaatcatcgatcctgacagcactt

SEQ ID NO: 225353 - DNA, 25 bp, Probe sequence
aacaactcggtactgcgcatgcagt

SEQ ID NO: 225354 - DNA, 25 bp, Probe sequence
aaaaggacatttaggcgagcgttct

SEQ ID NO: 225355 - DNA, 25 bp, Probe sequence
aactatcgtcggcaaagattcattt

SEQ ID NO: 225356 - DNA, 25 bp, Probe sequence
aacgtcgtacgaatcattatcacat

SEQ ID NO: 225357 - DNA, 25 bp, Probe sequence
caagcaactgtattatctgcatcga

SEQ ID NO: 225358 - DNA, 25 bp, Probe sequence
cacaccgctcatcacaaaggaaaca

SEQ ID NO: 225359 - DNA, 25 bp, Probe sequence
ctaaggtcggaccgtttgcgcaatt

SEQ ID NO: 225360 - DNA, 25 bp, Probe sequence
gagaccaggcgcgcaattaggtgca

SEQ ID NO: 225361 - DNA, 25 bp, Probe sequence
gcgcaaggtgaatattacctccctg

SEQ ID NO: 225362 - DNA, 25 bp, Probe sequence
gaaaggctctggtgtcgatcaagtt

SEQ ID NO: 225363 - DNA, 25 bp, Probe sequence
gacacgcgataattttggcagcagg

SEQ ID NO: 225364 - DNA, 25 bp, Probe sequence
gacgtaccaaatgacagtttagctg

SEQ ID NO: 225365 - DNA, 25 bp, Probe sequence
gaggatgctaatgctcaagcaactg

SEQ ID NO: 225366 - DNA, 25 bp, Probe sequence
gatgttgttattggtcagtactctg

SEQ ID NO: 225367 - DNA, 25 bp, Probe sequence
gatcgtgtaatgcttagtcaggctg

SEQ ID NO: 225368 - DNA, 25 bp, Probe sequence
gatcaagttgtaaccatcgtaggac

SEQ ID NO: 225369 - DNA, 25 bp, Probe sequence
gatacagtcattgaaccaggcgtac

SEQ ID NO: 225370 - DNA, 25 bp, Probe sequence
gttcgaaatgcgtcaggtcgtttag

SEQ ID NO: 225371 - DNA, 25 bp, Probe sequence
gttccacaatcacagatgacgtacc

SEQ ID NO: 225372 - DNA, 25 bp, Probe sequence
gtatgtggtgacacaccgctcatca

SEQ ID NO: 225373 - DNA, 25 bp, Probe sequence
gtctgttgttaatgatgctagcgta

SEQ ID NO: 225374 - DNA, 25 bp, Probe sequence
ggtggcagctggttccacaatcaca

SEQ ID NO: 225375 - DNA, 25 bp, Probe sequence
ggtgatgatgtattggtggcagctg

SEQ ID NO: 225376 - DNA, 25 bp, Probe sequence
ggtgcatgtattcaacagtctgttg

SEQ ID NO: 225377 - DNA, 25 bp, Probe sequence
ggttgcggaacgattacagttaact

SEQ ID NO: 225378 - DNA, 25 bp, Probe sequence
ggcgagcgttctttatacagttttc

SEQ ID NO: 225379 - DNA, 25 bp, Probe sequence
tgcaaatggcgaaatcacacttaga

SEQ ID NO: 225380 - DNA, 25 bp, Probe sequence
tagttcaggtatttttgcgtttaat

SEQ ID NO: 225381 - DNA, 25 bp, Probe sequence
attgcgttagacttacatgcaccac

SEQ ID NO: 225382 - DNA, 25 bp, Probe sequence
atagataaacgtcgtcctagaccaa

SEQ ID NO: 225383 - DNA, 25 bp, Probe sequence
atacagcaggtacaatcactttagc

SEQ ID NO: 225384 - DNA, 25 bp, Probe sequence
atcgtaacaaactcaattcatttag

SEQ ID NO: 225385 - DNA, 25 bp, Probe sequence
atctgttgctggtttaatcgcacaa

SEQ ID NO: 225386 - DNA, 25 bp, Probe sequence
acacgtgcacgtaaattagctgaca

SEQ ID NO: 225387 - DNA, 25 bp, Probe sequence
aacagctggcgcaactcgtatgatt

SEQ ID NO: 225388 - DNA, 25 bp, Probe sequence
aacccagaagaatgtgtcgttgttt

SEQ ID NO: 225389 - DNA, 25 bp, Probe sequence
aaccaacatcatatcctgtgaatct

SEQ ID NO: 225390 - DNA, 25 bp, Probe sequence
aatcgcacaagctatcattcgtgta

SEQ ID NO: 225391 - DNA, 25 bp, Probe sequence
aattgaccacttaatgggtgtgcca

SEQ ID NO: 225392 - DNA, 25 bp, Probe sequence
caatcactttagctgcacaagcatt

SEQ ID NO: 225393 - DNA, 25 bp, Probe sequence
caggaccggctaaagaacgtatcga

SEQ ID NO: 225394 - DNA, 25 bp, Probe sequence
cacaccctgttttatcaggaccggc

SEQ ID NO: 225395 - DNA, 25 bp, Probe sequence
catgcaccacaaattcaaggattct

SEQ ID NO: 225396 - DNA, 25 bp, Probe sequence
gcttgtaaacgtgcttctgcagcaa

SEQ ID NO: 225397 - DNA, 25 bp, Probe sequence
gcttctgcagcaacaatcaatattg

SEQ ID NO: 225398 - DNA, 25 bp, Probe sequence
gcaagaagttgctgaccaagtagga

SEQ ID NO: 225399 - DNA, 25 bp, Probe sequence
gaatcagttagcgtattatttgact

SEQ ID NO: 225400 - DNA, 25 bp, Probe sequence
gaacgtatcgaaaattctgctataa

SEQ ID NO: 225401 - DNA, 25 bp, Probe sequence
gaaacgaagcattagcgcaagaagt

SEQ ID NO: 225402 - DNA, 25 bp, Probe sequence
gacaagatagaaaagcccgtagccg

SEQ ID NO: 225403 - DNA, 25 bp, Probe sequence
gacattttaaaaactccaattgcaa

SEQ ID NO: 225404 - DNA, 25 bp, Probe sequence
gacgtatttattattcaaccaacat

SEQ ID NO: 225405 - DNA, 25 bp, Probe sequence
gacgtacggcaattattattgacga

SEQ ID NO: 225406 - DNA, 25 bp, Probe sequence
gatgatccgaatattaacccagaag

SEQ ID NO: 225407 - DNA, 25 bp, Probe sequence
gagtattcgtggttgtgacgtattt

SEQ ID NO: 225408 - DNA, 25 bp, Probe sequence
tgtcgttgtttcaccagaccatggc

SEQ ID NO: 225409 - DNA, 25 bp, Probe sequence
gtcgtcctagaccaaatgttgctga

SEQ ID NO: 225410 - DNA, 25 bp, Probe sequence
gggtgtgccaattcttgctaaacat

SEQ ID NO: 225411 - DNA, 25 bp, Probe sequence
ggattctttgatattccaattgacc

SEQ ID NO: 225412 - DNA, 25 bp, Probe sequence
tggtgagattgaaggacgtacggca

SEQ ID NO: 225413 - DNA, 25 bp, Probe sequence
tgcaaacttaatcgaaacagctggc

SEQ ID NO: 225414 - DNA, 25 bp, Probe sequence
tatatgcttgttgtacacaccctgt

SEQ ID NO: 225415 - DNA, 25 bp, Probe sequence
attattacaatgttaatccagaaga

SEQ ID NO: 225416 - DNA, 25 bp, Probe sequence
atcacgatttgaccatgttatgaat

SEQ ID NO: 225417 - DNA, 25 bp, Probe sequence
atcgaaccaatgacaatgatgaatt

SEQ ID NO: 225418 - DNA, 25 bp, Probe sequence
atgaaatgtattgtaggtctaggta

SEQ ID NO: 225419 - DNA, 25 bp, Probe sequence
acgcagcacgcgcaattgaaaagtt

SEQ ID NO: 225420 - DNA, 25 bp, Probe sequence
aaagtttgttgaaacatcacgattt

SEQ ID NO: 225421 - DNA, 25 bp, Probe sequence
aaaggtgcatatacaattgaacgaa

SEQ ID NO: 225422 - DNA, 25 bp, Probe sequence
aaaaggaagtgcgggcggtcacaat

SEQ ID NO: 225423 - DNA, 25 bp, Probe sequence
aaaagttatcgaacacgcagcacgc

SEQ ID NO: 225424 - DNA, 25 bp, Probe sequence
aacaaggacaagttcgcttaagaca

SEQ ID NO: 225425 - DNA, 25 bp, Probe sequence
aacgtattcgtattggtgtgggaag

SEQ ID NO: 225426 - DNA, 25 bp, Probe sequence
aatatcggctttgaagtcgttgatt

SEQ ID NO: 225427 - DNA, 25 bp, Probe sequence
caaatgatgaaatggtaacgatgga

SEQ ID NO: 225428 - DNA, 25 bp, Probe sequence
cagcacgcgcaattgaaaagtttgt

SEQ ID NO: 225429 - DNA, 25 bp, Probe sequence
cgaacacgcagcacgcgcaattgaa

SEQ ID NO: 225430 - DNA, 25 bp, Probe sequence
gaagcagttgcaccgattatggatt

SEQ ID NO: 225431 - DNA, 25 bp, Probe sequence
gaacttacaagacataatatcggct

SEQ ID NO: 225432 - DNA, 25 bp, Probe sequence
gaccaacgaatggtatgacggtacc

SEQ ID NO: 225433 - DNA, 25 bp, Probe sequence
gatttaattgtcttatatgatgatt

SEQ ID NO: 225434 - DNA, 25 bp, Probe sequence
gattatgttttacaacgcttttcaa

SEQ ID NO: 225435 - DNA, 25 bp, Probe sequence
gttgcaccgattatggattattaca

SEQ ID NO: 225436 - DNA, 25 bp, Probe sequence
gttatcgaacacgcagcacgcgcaa

SEQ ID NO: 225437 - DNA, 25 bp, Probe sequence
gttttacaacgcttttcaaatgatg

SEQ ID NO: 225438 - DNA, 25 bp, Probe sequence
gtgcgggcggtcacaatggtatgaa

SEQ ID NO: 225439 - DNA, 25 bp, Probe sequence
gtatgacggtacctgattatgtttt

SEQ ID NO: 225440 - DNA, 25 bp, Probe sequence
gtacagaccaatttaaacgtattcg

SEQ ID NO: 225441 - DNA, 25 bp, Probe sequence
gggcggtcacaatggtatgaaatca

SEQ ID NO: 225442 - DNA, 25 bp, Probe sequence
ggtgtgggaagaccaacgaatggta

SEQ ID NO: 225443 - DNA, 25 bp, Probe sequence
ggaagtgcgggcggtcacaatggta

SEQ ID NO: 225444 - DNA, 25 bp, Probe sequence
ggacaagttcgcttaagacaaaaag

SEQ ID NO: 225445 - DNA, 25 bp, Probe sequence
ggctttgaagtcgttgattatattt

SEQ ID NO: 225446 - DNA, 25 bp, Probe sequence
tgacggtacctgattatgttttaca

SEQ ID NO: 225447 - DNA, 25 bp, Probe sequence
taaacgttttgaacttacaagacat

SEQ ID NO: 225448 - DNA, 25 bp, Probe sequence
ttattaaaatgcttggtacagacca

SEQ ID NO: 225449 - DNA, 25 bp, Probe sequence
atcctgttgaagtagcacgtttgct

SEQ ID NO: 225450 - DNA, 25 bp, Probe sequence
atgacattatgcgttctgaatttca

SEQ ID NO: 225451 - DNA, 25 bp, Probe sequence
agaggtcgtgttggtcgttcaagtc

SEQ ID NO: 225452 - DNA, 25 bp, Probe sequence
agtacacgcattacattcaggtatc

SEQ ID NO: 225453 - DNA, 25 bp, Probe sequence
actccagatgttaatgccagatgct

SEQ ID NO: 225454 - DNA, 25 bp, Probe sequence
aacagcacggctttattgatacagt

SEQ ID NO: 225455 - DNA, 25 bp, Probe sequence
aagagaactatcccgtgatggccaa

SEQ ID NO: 225456 - DNA, 25 bp, Probe sequence
aaggctatcctgtcacttatttttc

SEQ ID NO: 225457 - DNA, 25 bp, Probe sequence
aatcgcgtccaatggatcgcttgct

SEQ ID NO: 225458 - DNA, 25 bp, Probe sequence
aattgcatcgctcaatgtcatcggg

SEQ ID NO: 225459 - DNA, 25 bp, Probe sequence
caaacacactagtaactggtctttc

SEQ ID NO: 225460 - DNA, 25 bp, Probe sequence
caggtgtcgatgtcccaaatgcaaa

SEQ ID NO: 225461 - DNA, 25 bp, Probe sequence
gccagaaaatcgtttcccagttcaa

SEQ ID NO: 225462 - DNA, 25 bp, Probe sequence
gcaaccccaatacctagaacattgc

SEQ ID NO: 225463 - DNA, 25 bp, Probe sequence
gaacattcgtggtgctggtaatttg

SEQ ID NO: 225464 - DNA, 25 bp, Probe sequence
gaacaacgatttggtgtacgccata

SEQ ID NO: 225465 - DNA, 25 bp, Probe sequence
gacattgcgtgttggtgaggatatc

SEQ ID NO: 225466 - DNA, 25 bp, Probe sequence
gagttttcaacacaaagccctcaac

SEQ ID NO: 225467 - DNA, 25 bp, Probe sequence
gaggatatcgatgtggaccaatttc

SEQ ID NO: 225468 - DNA, 25 bp, Probe sequence
gatgcagatcgctttggattgagtc

SEQ ID NO: 225469 - DNA, 25 bp, Probe sequence
gatgctaacattgcagttgctcatg

SEQ ID NO: 225470 - DNA, 25 bp, Probe sequence
gatatttaggtgttgagacgctcga

SEQ ID NO: 225471 - DNA, 25 bp, Probe sequence
gttcctacaactattttagctcagc

SEQ ID NO: 225472 - DNA, 25 bp, Probe sequence
gtctttccccgtcagctaaagtgac

SEQ ID NO: 225473 - DNA, 25 bp, Probe sequence
gttatgcatacttcttacatccagc

SEQ ID NO: 225474 - DNA, 25 bp, Probe sequence
gtacggatcaactatttgttccagt

SEQ ID NO: 225475 - DNA, 25 bp, Probe sequence
gtactaacattgactgcaaccccaa

SEQ ID NO: 225476 - DNA, 25 bp, Probe sequence
ggtatcgcatattggtgaattctca

SEQ ID NO: 225477 - DNA, 25 bp, Probe sequence
ggtattatcgatatctttccgctaa

SEQ ID NO: 225478 - DNA, 25 bp, Probe sequence
ggatcgcttgctatgtggtgatgtt

SEQ ID NO: 225479 - DNA, 25 bp, Probe sequence
tgtcagtgattgaaacgccgccaga

SEQ ID NO: 225480 - DNA, 25 bp, Probe sequence
tgagcgtatgcaagattttcctgtt

SEQ ID NO: 225481 - DNA, 25 bp, Probe sequence
tatttttcattattcgctacaacaa

SEQ ID NO: 225482 - DNA, 25 bp, Probe sequence
ttccatatgaacttacgcctgacca

SEQ ID NO: 225483 - DNA, 25 bp, Probe sequence
atttattgcctttaatgaacggtgt

SEQ ID NO: 225484 - DNA, 25 bp, Probe sequence
aggtatggtatttatgtcgattgtt

SEQ ID NO: 225485 - DNA, 25 bp, Probe sequence
aacatttagttttgcgctcattcct

SEQ ID NO: 225486 - DNA, 25 bp, Probe sequence
aagtgtatccaattgtagcattagg

SEQ ID NO: 225487 - DNA, 25 bp, Probe sequence
aagtggcattattggtgcgagcatt

SEQ ID NO: 225488 - DNA, 25 bp, Probe sequence
aaggagtctatgaccgtggtgcatc

SEQ ID NO: 225489 - DNA, 25 bp, Probe sequence
aatgccattcctagtgcaattacac

SEQ ID NO: 225490 - DNA, 25 bp, Probe sequence
aatatgacagttccggctatttccc

SEQ ID NO: 225491 - DNA, 25 bp, Probe sequence
cattttgattcgtttaagtggcatt

SEQ ID NO: 225492 - DNA, 25 bp, Probe sequence
ctgagtgctgtatatcgaattccat

SEQ ID NO: 225493 - DNA, 25 bp, Probe sequence
cgatacgcgtgccattcgatgttgc

SEQ ID NO: 225494 - DNA, 25 bp, Probe sequence
gcgctcattcctctgttaagtgacg

SEQ ID NO: 225495 - DNA, 25 bp, Probe sequence
gcactttcggttttgattttcgcta

SEQ ID NO: 225496 - DNA, 25 bp, Probe sequence
gaatcgttatgcaaatgcgtcatta

SEQ ID NO: 225497 - DNA, 25 bp, Probe sequence
gaagcatttaatggcgttgtcgtgt

SEQ ID NO: 225498 - DNA, 25 bp, Probe sequence
gaaacagttcgcactttcggttttg

SEQ ID NO: 225499 - DNA, 25 bp, Probe sequence
gaccgtggtgcatcatttattcaga

SEQ ID NO: 225500 - DNA, 25 bp, Probe sequence
gagacgattttttatcaatgttgtt

SEQ ID NO: 225501 - DNA, 25 bp, Probe sequence
gatattatcgatgaatgccattcct

SEQ ID NO: 225502 - DNA, 25 bp, Probe sequence
gttaactgctgcattaattgtcatt

SEQ ID NO: 225503 - DNA, 25 bp, Probe sequence
gtacgattatccatattgctgtcac

SEQ ID NO: 225504 - DNA, 25 bp, Probe sequence
gtacagcagcgggaataggattaat

SEQ ID NO: 225505 - DNA, 25 bp, Probe sequence
gtcgattgttgttcaatgcgtgtta

SEQ ID NO: 225506 - DNA, 25 bp, Probe sequence
gtgcgagcattagtactgttgtatc

SEQ ID NO: 225507 - DNA, 25 bp, Probe sequence
ggtatgcttggcgtgttaagaggtt

SEQ ID NO: 225508 - DNA, 25 bp, Probe sequence
ggtatgacggcaggattggttatta

SEQ ID NO: 225509 - DNA, 25 bp, Probe sequence
ggtatcattgcattgtttttctata

SEQ ID NO: 225510 - DNA, 25 bp, Probe sequence
tggcgttgtcgtgttaactgctgca

SEQ ID NO: 225511 - DNA, 25 bp, Probe sequence
tgtgcagcagtattaggtatcattg

SEQ ID NO: 225512 - DNA, 25 bp, Probe sequence
tatttagtagcgcaccgacctttta

SEQ ID NO: 225513 - DNA, 25 bp, Probe sequence
tattgctatttttgtgtttgcgaac

SEQ ID NO: 225514 - DNA, 25 bp, Probe sequence
ttttcgctatcagtcaattaatcgt

SEQ ID NO: 225515 - DNA, 25 bp, Probe sequence
ttaagtcacttcaagcgatacgcgt

SEQ ID NO: 225516 - DNA, 25 bp, Probe sequence
ttccggctatttcccaggttataga

SEQ ID NO: 225517 - DNA, 25 bp, Probe sequence
attgtctatgcggttccgggtcatc

SEQ ID NO: 225518 - DNA, 25 bp, Probe sequence
atttgacgagtgtattcgtaccaaa

SEQ ID NO: 225519 - DNA, 25 bp, Probe sequence
atggttgctgctaatttgaaaatca

SEQ ID NO: 225520 - DNA, 25 bp, Probe sequence
atggcattgatgatttgccgctagg

SEQ ID NO: 225521 - DNA, 25 bp, Probe sequence
agtgaaattactggctttagcaaag

SEQ ID NO: 225522 - DNA, 25 bp, Probe sequence
acaagtgttattgcatactagtatt

SEQ ID NO: 225523 - DNA, 25 bp, Probe sequence
aaaatgattcgtagacacccacaca

SEQ ID NO: 225524 - DNA, 25 bp, Probe sequence
aacgttgtgacatgcccattatatg

SEQ ID NO: 225525 - DNA, 25 bp, Probe sequence
aagatattgtctatgcggttccggg

SEQ ID NO: 225526 - DNA, 25 bp, Probe sequence
aagtgattacaagtcttaatgctaa

SEQ ID NO: 225527 - DNA, 25 bp, Probe sequence
aatgctgaaactatcgatgacttaa

SEQ ID NO: 225528 - DNA, 25 bp, Probe sequence
cataccattacgattgttggcttag

SEQ ID NO: 225529 - DNA, 25 bp, Probe sequence
cgacatatttgtatcatgactttga

SEQ ID NO: 225530 - DNA, 25 bp, Probe sequence
cctgttcaaattgtcactggtgcac

SEQ ID NO: 225531 - DNA, 25 bp, Probe sequence
gcaagaacgttagatcatccagtta

SEQ ID NO: 225532 - DNA, 25 bp, Probe sequence
gaagcgatggtgcggataacgttgt

SEQ ID NO: 225533 - DNA, 25 bp, Probe sequence
gacacccacacatatttggtgatgc

SEQ ID NO: 225534 - DNA, 25 bp, Probe sequence
gatccaaatgatggcttcacactgt

SEQ ID NO: 225535 - DNA, 25 bp, Probe sequence
gatgatttgccgctagggatatata

SEQ ID NO: 225536 - DNA, 25 bp, Probe sequence
gatgcgacatcattacaagaagtaa

SEQ ID NO: 225537 - DNA, 25 bp, Probe sequence
gttggcttaggaaactatggcattg

SEQ ID NO: 225538 - DNA, 25 bp, Probe sequence
gttttgaccatgtttatgaagcaca

SEQ ID NO: 225539 - DNA, 25 bp, Probe sequence
gtccatgggataaagtgcaaacgca

SEQ ID NO: 225540 - DNA, 25 bp, Probe sequence
gtgcggataacgttgtgacatgccc

SEQ ID NO: 225541 - DNA, 25 bp, Probe sequence
ggtctaaggcgaaagatgctgaagg

SEQ ID NO: 225542 - DNA, 25 bp, Probe sequence
ggtcatcctagagttgctgagacaa

SEQ ID NO: 225543 - DNA, 25 bp, Probe sequence
ggcttcacactgttagatgcgacat

SEQ ID NO: 225544 - DNA, 25 bp, Probe sequence
ggcgcaattggttgaagctgctaat

SEQ ID NO: 225545 - DNA, 25 bp, Probe sequence
tgtcactggtgcacgaagcgatggt

SEQ ID NO: 225546 - DNA, 25 bp, Probe sequence
tcatgactttgattttgcaacggaa

SEQ ID NO: 225547 - DNA, 25 bp, Probe sequence
taatggaacgatatcctgatgatta

SEQ ID NO: 225548 - DNA, 25 bp, Probe sequence
tagaacgcatacattgattacgcaa

SEQ ID NO: 225549 - DNA, 25 bp, Probe sequence
ttaacatttcagagttttgaccatg

SEQ ID NO: 225550 - DNA, 25 bp, Probe sequence
ttccgggtcatcctagagttgctga

SEQ ID NO: 225551 - DNA, 25 bp, Probe sequence
atgcatctaaagataacgcgaaggg

SEQ ID NO: 225552 - DNA, 25 bp, Probe sequence
atgtgctgacgattcgctttggtca

SEQ ID NO: 225553 - DNA, 25 bp, Probe sequence
agatgtgctgacgattcgctttggt

SEQ ID NO: 225554 - DNA, 25 bp, Probe sequence
agagcgtcgacttgaagaagcgtaa

SEQ ID NO: 225555 - DNA, 25 bp, Probe sequence
aaagctggatcggatgttaaagttg

SEQ ID NO: 225556 - DNA, 25 bp, Probe sequence
aagatgtgctgacgattcgctttgg

SEQ ID NO: 225557 - DNA, 25 bp, Probe sequence
aagtaactgcattaaatgaacatgc

SEQ ID NO: 225558 - DNA, 25 bp, Probe sequence
aagtatcacggttaataaagcgacg

SEQ ID NO: 225559 - DNA, 25 bp, Probe sequence
aagtgatcaaggtagaattacaata

SEQ ID NO: 225560 - DNA, 25 bp, Probe sequence
aatcattgaagagcgtcgacttgaa

SEQ ID NO: 225561 - DNA, 25 bp, Probe sequence
cacggttaataaagcgacgtacgct

SEQ ID NO: 225562 - DNA, 25 bp, Probe sequence
gctggatcggatgttaaagttgaag

SEQ ID NO: 225563 - DNA, 25 bp, Probe sequence
gctgacgattcgctttggtcaaaaa

SEQ ID NO: 225564 - DNA, 25 bp, Probe sequence
gctaaagctggatcggatgttaaag

SEQ ID NO: 225565 - DNA, 25 bp, Probe sequence
gctttggtcaaaaattagtaacagt

SEQ ID NO: 225566 - DNA, 25 bp, Probe sequence
gaagatgtgctgacgattcgctttg

SEQ ID NO: 225567 - DNA, 25 bp, Probe sequence
gaagagcgtcgacttgaagaagcgt

SEQ ID NO: 225568 - DNA, 25 bp, Probe sequence
gaacatgcatctaaagataacgcga

SEQ ID NO: 225569 - DNA, 25 bp, Probe sequence
gaaatcattgaagagcgtcgacttg

SEQ ID NO: 225570 - DNA, 25 bp, Probe sequence
gacgattcgctttggtcaaaaatta

SEQ ID NO: 225571 - DNA, 25 bp, Probe sequence
gatgtgctgacgattcgctttggtc

SEQ ID NO: 225572 - DNA, 25 bp, Probe sequence
gattcgctttggtcaaaaattagta

SEQ ID NO: 225573 - DNA, 25 bp, Probe sequence
gttgaagatgtgctgacgattcgct

SEQ ID NO: 225574 - DNA, 25 bp, Probe sequence
gttgctaaagctggatcggatgtta

SEQ ID NO: 225575 - DNA, 25 bp, Probe sequence
gttaataaagcgacgtacgctagca

SEQ ID NO: 225576 - DNA, 25 bp, Probe sequence
gttaaagttgaagatgtgctgacga

SEQ ID NO: 225577 - DNA, 25 bp, Probe sequence
gtgctgacgattcgctttggtcaaa

SEQ ID NO: 225578 - DNA, 25 bp, Probe sequence
tgtgctgacgattcgctttggtcaa

SEQ ID NO: 225579 - DNA, 25 bp, Probe sequence
tgttgctaaagctggatcggatgtt

SEQ ID NO: 225580 - DNA, 25 bp, Probe sequence
tgaagatgtgctgacgattcgcttt

SEQ ID NO: 225581 - DNA, 25 bp, Probe sequence
tgctgacgattcgctttggtcaaaa

SEQ ID NO: 225582 - DNA, 25 bp, Probe sequence
tcattgaagagcgtcgacttgaaga

SEQ ID NO: 225583 - DNA, 25 bp, Probe sequence
taaagcgacgtacgctagcaaaaga

SEQ ID NO: 225584 - DNA, 25 bp, Probe sequence
tacaataaatggtaatgttgctaaa

SEQ ID NO: 225585 - DNA, 25 bp, Probe sequence
agccaccgttgtataaactgacaca

SEQ ID NO: 225586 - DNA, 25 bp, Probe sequence
aaacgtgcattaacgcgtgtcttaa

SEQ ID NO: 225587 - DNA, 25 bp, Probe sequence
aaacaacaatgaaccctgagcaccg

SEQ ID NO: 225588 - DNA, 25 bp, Probe sequence
aactcaggatatgccacaaatcttt

SEQ ID NO: 225589 - DNA, 25 bp, Probe sequence
aacgcaggcgattttaccattacga

SEQ ID NO: 225590 - DNA, 25 bp, Probe sequence
aaggtattatggcggcacgtgcacg

SEQ ID NO: 225591 - DNA, 25 bp, Probe sequence
aatgggacgtccagctgtcgaagtt

SEQ ID NO: 225592 - DNA, 25 bp, Probe sequence
caaacatggtgatcctcaattcgaa

SEQ ID NO: 225593 - DNA, 25 bp, Probe sequence
cacgtgcacgtgttgctgcgaaaaa

SEQ ID NO: 225594 - DNA, 25 bp, Probe sequence
gccacaaatcttttaacttacgcaa

SEQ ID NO: 225595 - DNA, 25 bp, Probe sequence
gaaggtggtacgcatgaagacggat

SEQ ID NO: 225596 - DNA, 25 bp, Probe sequence
gaaaatccacaagtcgcacgtacag

SEQ ID NO: 225597 - DNA, 25 bp, Probe sequence
gactcctatcactatgagggcggta

SEQ ID NO: 225598 - DNA, 25 bp, Probe sequence
gagaccgttaattgaagcaggctat

SEQ ID NO: 225599 - DNA, 25 bp, Probe sequence
gaggtttgcaccatttagtgtggga

SEQ ID NO: 225600 - DNA, 25 bp, Probe sequence
ggtcgtgactctagaacgcaggcga

SEQ ID NO: 225601 - DNA, 25 bp, Probe sequence
gtattagagagcttgctttcttaaa

SEQ ID NO: 225602 - DNA, 25 bp, Probe sequence
gtaaacgcattgtcacaagacttag

SEQ ID NO: 225603 - DNA, 25 bp, Probe sequence
gtgttggttcatcagttgtaaacgc

SEQ ID NO: 225604 - DNA, 25 bp, Probe sequence
gggtctacaaaatctggtcgtgact

SEQ ID NO: 225605 - DNA, 25 bp, Probe sequence
ggtggcgactttgatctagcgaaag

SEQ ID NO: 225606 - DNA, 25 bp, Probe sequence
ggtaattctgaagtgcgtcaagttg

SEQ ID NO: 225607 - DNA, 25 bp, Probe sequence
ggatcgacttcagagagaggtttgc

SEQ ID NO: 225608 - DNA, 25 bp, Probe sequence
ggagaaatcttcacagagacaactg

SEQ ID NO: 225609 - DNA, 25 bp, Probe sequence
tgatcacagcatttggtacaggaat

SEQ ID NO: 225610 - DNA, 25 bp, Probe sequence
tgccgatgtggatggagcgcatatt

SEQ ID NO: 225611 - DNA, 25 bp, Probe sequence
tcgtcattatgactgatgccgatgt

SEQ ID NO: 225612 - DNA, 25 bp, Probe sequence
taacggacgtggtatcccagttgat

SEQ ID NO: 225613 - DNA, 25 bp, Probe sequence
ttccaggtaaattagccgattgctc

SEQ ID NO: 225614 - DNA, 25 bp, Probe sequence
tatctggtggtttacatggtgttgg

SEQ ID NO: 225615 - DNA, 25 bp, Probe sequence
tatattgcacagccaccgttgtata

SEQ ID NO: 225616 - DNA, 25 bp, Probe sequence
tattctcagagcactttgaacgatt

SEQ ID NO: 225617 - DNA, 25 bp, Probe sequence
ttaactgttttacatgctggtggta

SEQ ID NO: 225618 - DNA, 25 bp, Probe sequence
ttcttctatcgatttatgagaccgt

SEQ ID NO: 225619 - DNA, 25 bp, Probe sequence
atatatgtgtctggcgaaggtgaag

SEQ ID NO: 225620 - DNA, 25 bp, Probe sequence
atatatgtacattgtcagtcaggtg

SEQ ID NO: 225621 - DNA, 25 bp, Probe sequence
aggtgccatacctatatctacaata

SEQ ID NO: 225622 - DNA, 25 bp, Probe sequence
agcatcatatttagtgggttgtcaa

SEQ ID NO: 225623 - DNA, 25 bp, Probe sequence
actatgttcaaatctggccgggtca

SEQ ID NO: 225624 - DNA, 25 bp, Probe sequence
caaatctggccgggtcatggtgctg

SEQ ID NO: 225625 - DNA, 25 bp, Probe sequence
aaaatcaggcatttcaacccagtcc

SEQ ID NO: 225626 - DNA, 25 bp, Probe sequence
aagcgaaacacactttacaattaat

SEQ ID NO: 225627 - DNA, 25 bp, Probe sequence
aatggacacttagatcaagcagtta

SEQ ID NO: 225628 - DNA, 25 bp, Probe sequence
aatcatatgatgtttatcctagttt

SEQ ID NO: 225629 - DNA, 25 bp, Probe sequence
aatagaccctgttcgtgatttatcg

SEQ ID NO: 225630 - DNA, 25 bp, Probe sequence
catggtgctggaagcccttgtggta

SEQ ID NO: 225631 - DNA, 25 bp, Probe sequence
catactccaggacacacgcctgaaa

SEQ ID NO: 225632 - DNA, 25 bp, Probe sequence
cccagtccgttcatagcgctgatat

SEQ ID NO: 225633 - DNA, 25 bp, Probe sequence
gaagttctgcatactccaggacaca

SEQ ID NO: 225634 - DNA, 25 bp, Probe sequence
gaagttcaattgcagtgggtatatt

SEQ ID NO: 225635 - DNA, 25 bp, Probe sequence
gaaacaaatgtatgagtccgttcaa

SEQ ID NO: 225636 - DNA, 25 bp, Probe sequence
gacacacgcctgaaagtattagctt

SEQ ID NO: 225637 - DNA, 25 bp, Probe sequence
gagaaggctatcaagattttccaga

SEQ ID NO: 225638 - DNA, 25 bp, Probe sequence
gagagtagcatttgatcttcgtagc

SEQ ID NO: 225639 - DNA, 25 bp, Probe sequence
gttccgatgggattatttagtggtg

SEQ ID NO: 225640 - DNA, 25 bp, Probe sequence
gtttaacaattacacaagctacaga

SEQ ID NO: 225641 - DNA, 25 bp, Probe sequence
gtgatgtggctaaacgcttaaatgc

SEQ ID NO: 225642 - DNA, 25 bp, Probe sequence
gtggtgactttatttttgttggtga

SEQ ID NO: 225643 - DNA, 25 bp, Probe sequence
ggtggtggttcaagtgttccgatgg

SEQ ID NO: 225644 - DNA, 25 bp, Probe sequence
gggttctacagaaattagcgcgaaa

SEQ ID NO: 225645 - DNA, 25 bp, Probe sequence
ggtagcaggctatcgtttgccaaaa

SEQ ID NO: 225646 - DNA, 25 bp, Probe sequence
ggaagcccttgtggtaaagcattag

SEQ ID NO: 225647 - DNA, 25 bp, Probe sequence
ggaacaatcaatataccatacaaca

SEQ ID NO: 225648 - DNA, 25 bp, Probe sequence
ggcctttcacggtggccacacaaaa

SEQ ID NO: 225649 - DNA, 25 bp, Probe sequence
tcttcgtagcaaagaggcctttcac

SEQ ID NO: 225650 - DNA, 25 bp, Probe sequence
taacatcaaatcaaccagcaccacc

SEQ ID NO: 225651 - DNA, 25 bp, Probe sequence
tattagctttttactcactgattta

SEQ ID NO: 225652 - DNA, 25 bp, Probe sequence
ttgcttcaggaattcgtgatgtggc

SEQ ID NO: 225653 - DNA, 25 bp, Probe sequence
agaaagctaaagaccgtccacgtag

SEQ ID NO: 225654 - DNA, 25 bp, Probe sequence
atcgaagttggaaataagcttaaag

SEQ ID NO: 225655 - DNA, 25 bp, Probe sequence
acctttctgttggtgatgaagtaga

SEQ ID NO: 225656 - DNA, 25 bp, Probe sequence
aacagaatctagacgcggtggcaaa

SEQ ID NO: 225657 - DNA, 25 bp, Probe sequence
aaagtggtttagttcacattagtga

SEQ ID NO: 225658 - DNA, 25 bp, Probe sequence
aaagtattatctattgctgatgatg

SEQ ID NO: 225659 - DNA, 25 bp, Probe sequence
aaaagtttggtgcattcgtagaatt

SEQ ID NO: 225660 - DNA, 25 bp, Probe sequence
aacatacgagtaaaccaagtcatca

SEQ ID NO: 225661 - DNA, 25 bp, Probe sequence
aagctaaagaccgtccacgtagaca

SEQ ID NO: 225662 - DNA, 25 bp, Probe sequence
aatctagacgcggtggcaaaggttc

SEQ ID NO: 225663 - DNA, 25 bp, Probe sequence
aaccagtgcaaaaagccgaagattt

SEQ ID NO: 225664 - DNA, 25 bp, Probe sequence
aaccaagtcatcaaaaaccagtgca

SEQ ID NO: 225665 - DNA, 25 bp, Probe sequence
aagaccgtccacgtagacaacatac

SEQ ID NO: 225666 - DNA, 25 bp, Probe sequence
caatcaaacgtcaaacagaatctag

SEQ ID NO: 225667 - DNA, 25 bp, Probe sequence
caagtcatcaaaaaccagtgcaaaa

SEQ ID NO: 225668 - DNA, 25 bp, Probe sequence
cagaatctagacgcggtggcaaagg

SEQ ID NO: 225669 - DNA, 25 bp, Probe sequence
caaacagaatctagacgcggtggca

SEQ ID NO: 225670 - DNA, 25 bp, Probe sequence
catacgagtaaaccaagtcatcaaa

SEQ ID NO: 225671 - DNA, 25 bp, Probe sequence
ccgtccacgtagacaacatacgagt

SEQ ID NO: 225672 - DNA, 25 bp, Probe sequence
gctaaagaccgtccacgtagacaac

SEQ ID NO: 225673 - DNA, 25 bp, Probe sequence
gcttaaaggtaaagtcactggtatt

SEQ ID NO: 225674 - DNA, 25 bp, Probe sequence
gcattcgtagaattacctgaaggaa

SEQ ID NO: 225675 - DNA, 25 bp, Probe sequence
gaccgtccacgtagacaacatacga

SEQ ID NO: 225676 - DNA, 25 bp, Probe sequence
gagtaaaccaagtcatcaaaaacca

SEQ ID NO: 225677 - DNA, 25 bp, Probe sequence
gatgatggaaaaattagtctttcaa

SEQ ID NO: 225678 - DNA, 25 bp, Probe sequence
gataaattaacttcaatcaaacgtc

SEQ ID NO: 225679 - DNA, 25 bp, Probe sequence
gtttagttcacattagtgaagtcgc

SEQ ID NO: 225680 - DNA, 25 bp, Probe sequence
gtttggtgcattcgtagaattacct

SEQ ID NO: 225681 - DNA, 25 bp, Probe sequence
gtattatctattgctgatgatggaa

SEQ ID NO: 225682 - DNA, 25 bp, Probe sequence
gtcactggtattaaaaagtttggtg

SEQ ID NO: 225683 - DNA, 25 bp, Probe sequence
ggtgcattcgtagaattacctgaag

SEQ ID NO: 225684 - DNA, 25 bp, Probe sequence
taaagaccgtccacgtagacaacat

SEQ ID NO: 225685 - DNA, 25 bp, Probe sequence
ttaacttcaatcaaacgtcaaacag

SEQ ID NO: 225686 - DNA, 25 bp, Probe sequence
tttctgttggtgatgaagtagacgt

SEQ ID NO: 225687 - DNA, 25 bp, Probe sequence
atcatggcgttaggtcagcttcaat

SEQ ID NO: 225688 - DNA, 25 bp, Probe sequence
atcgcctgtttatagattgtaaagt

SEQ ID NO: 225689 - DNA, 25 bp, Probe sequence
atcgaccacttttagctgtctctaa

SEQ ID NO: 225690 - DNA, 25 bp, Probe sequence
atgagttgtttaatattagtgctaa

SEQ ID NO: 225691 - DNA, 25 bp, Probe sequence
atgtcaatcatggcgttaggtcagc

SEQ ID NO: 225692 - DNA, 25 bp, Probe sequence
atgggcgcgatggttataagaaagt

SEQ ID NO: 225693 - DNA, 25 bp, Probe sequence
agtgctaaaacatacgaagagtggt

SEQ ID NO: 225694 - DNA, 25 bp, Probe sequence
agcggatgtattgctaacggcgcat

SEQ ID NO: 225695 - DNA, 25 bp, Probe sequence
accatattgttgtcgctgtttctac

SEQ ID NO: 225696 - DNA, 25 bp, Probe sequence
acgttacgaatggtttgatgaaatg

SEQ ID NO: 225697 - DNA, 25 bp, Probe sequence
actgaatgggcgcgatggttataag

SEQ ID NO: 225698 - DNA, 25 bp, Probe sequence
aacaattccaagagagatatcatat

SEQ ID NO: 225699 - DNA, 25 bp, Probe sequence
aagtggcgatacatttaaactgaat

SEQ ID NO: 225700 - DNA, 25 bp, Probe sequence
aatggctaaaaataatggcgataca

SEQ ID NO: 225701 - DNA, 25 bp, Probe sequence
cagcattcagaatgaagctcgaatt

SEQ ID NO: 225702 - DNA, 25 bp, Probe sequence
cgcattattgcggtaggagatttat

SEQ ID NO: 225703 - DNA, 25 bp, Probe sequence
ccaaactcattaaagatggttgtgt

SEQ ID NO: 225704 - DNA, 25 bp, Probe sequence
gctaacggcgcatcatttggacgat

SEQ ID NO: 225705 - DNA, 25 bp, Probe sequence
gcacaattcagtattaatctcacgg

SEQ ID NO: 225706 - DNA, 25 bp, Probe sequence
gaattattccagctattgatgaaaa

SEQ ID NO: 225707 - DNA, 25 bp, Probe sequence
gaagctcgaattaaacgttacgaat

SEQ ID NO: 225708 - DNA, 25 bp, Probe sequence
gagaacacgacaaagtggcgataca

SEQ ID NO: 225709 - DNA, 25 bp, Probe sequence
gagatacattctaatttaccaaaat

SEQ ID NO: 225710 - DNA, 25 bp, Probe sequence
gatgaatgtattagaagcggatgta

SEQ ID NO: 225711 - DNA, 25 bp, Probe sequence
gataaacaacagcgcattattgcgg

SEQ ID NO: 225712 - DNA, 25 bp, Probe sequence
gttgtcgctgtttctacaggtattg

SEQ ID NO: 225713 - DNA, 25 bp, Probe sequence
gtatgtgtttattgtatcaactact

SEQ ID NO: 225714 - DNA, 25 bp, Probe sequence
gtgggttcgggatcaaatgccaatc

SEQ ID NO: 225715 - DNA, 25 bp, Probe sequence
ggttggcatgttgatgaccatattg

SEQ ID NO: 225716 - DNA, 25 bp, Probe sequence
ggttatcagatttatcgaccacttt

SEQ ID NO: 225717 - DNA, 25 bp, Probe sequence
ggcgcatcatttggacgatcaatta

SEQ ID NO: 225718 - DNA, 25 bp, Probe sequence
tggcgatacatattttagagttcaa

SEQ ID NO: 225719 - DNA, 25 bp, Probe sequence
tcgggatcaaatgccaatcgtattg

SEQ ID NO: 225720 - DNA, 25 bp, Probe sequence
tattttgcaatattcagctaaacaa

SEQ ID NO: 225721 - DNA, 25 bp, Probe sequence
attgatttcatggatgtttctagtt

SEQ ID NO: 225722 - DNA, 25 bp, Probe sequence
attaaacgaattgatacccatttat

SEQ ID NO: 225723 - DNA, 25 bp, Probe sequence
attactgaattattacaatctagaa

SEQ ID NO: 225724 - DNA, 25 bp, Probe sequence
agatttaggttcttctattgaaaat

SEQ ID NO: 225725 - DNA, 25 bp, Probe sequence
gatgaatttgttgttggttacggtt

SEQ ID NO: 225726 - DNA, 25 bp, Probe sequence
actacacttaagtcaattactgaat

SEQ ID NO: 225727 - DNA, 25 bp, Probe sequence
aaagcggacattgaagctaagtatg

SEQ ID NO: 225728 - DNA, 25 bp, Probe sequence
gaaacttaccatatatcggtacgtt

SEQ ID NO: 225729 - DNA, 25 bp, Probe sequence
aatatctgtaaggaattgggagcac

SEQ ID NO: 225730 - DNA, 25 bp, Probe sequence
aattcattagaaatagttactttat

SEQ ID NO: 225731 - DNA, 25 bp, Probe sequence
caaaggattatcaaggtaaaccatt

SEQ ID NO: 225732 - DNA, 25 bp, Probe sequence
caaaccgtcgtaaagcggacattga

SEQ ID NO: 225733 - DNA, 25 bp, Probe sequence
tacgttaaaacctgaagtgtattca

SEQ ID NO: 225734 - DNA, 25 bp, Probe sequence
cagcaatgtttatgtcagatttaat

SEQ ID NO: 225735 - DNA, 25 bp, Probe sequence
cgtgaattataccgaaacttaccat

SEQ ID NO: 225736 - DNA, 25 bp, Probe sequence
ccattagtatgcgtgggtatcttaa

SEQ ID NO: 225737 - DNA, 25 bp, Probe sequence
gcgtgggtatcttaaaaggctcagc

SEQ ID NO: 225738 - DNA, 25 bp, Probe sequence
gaagtattgttaactgaagaagata

SEQ ID NO: 225739 - DNA, 25 bp, Probe sequence
gacgtattaattattgaagatatct

SEQ ID NO: 225740 - DNA, 25 bp, Probe sequence
gaggcactgagtcaactggtgaagt

SEQ ID NO: 225741 - DNA, 25 bp, Probe sequence
gatacccatttatcaattgatttca

SEQ ID NO: 225742 - DNA, 25 bp, Probe sequence
gatatcttagagactggtactacac

SEQ ID NO: 225743 - DNA, 25 bp, Probe sequence
gtttctagttatcacggaggcactg

SEQ ID NO: 225744 - DNA, 25 bp, Probe sequence
gttatcacggaggcactgagtcaac

SEQ ID NO: 225745 - DNA, 25 bp, Probe sequence
gtcaactggtgaagttcaaatcatt

SEQ ID NO: 225746 - DNA, 25 bp, Probe sequence
ggtaaaccattagtatgcgtgggta

SEQ ID NO: 225747 - DNA, 25 bp, Probe sequence
ggttacggtttagattatcgtgaat

SEQ ID NO: 225748 - DNA, 25 bp, Probe sequence
ggtatcttaaaaggctcagcaatgt

SEQ ID NO: 225749 - DNA, 25 bp, Probe sequence
ggatgtttctagttatcacggaggc

SEQ ID NO: 225750 - DNA, 25 bp, Probe sequence
tgggagcacaattaacaaaggatta

SEQ ID NO: 225751 - DNA, 25 bp, Probe sequence
tgttgttggttacggtttagattat

SEQ ID NO: 225752 - DNA, 25 bp, Probe sequence
tcacggaggcactgagtcaactggt

SEQ ID NO: 225753 - DNA, 25 bp, Probe sequence
tatcggtacgttaaaacctgaagtg

SEQ ID NO: 225754 - DNA, 25 bp, Probe sequence
ttagagactggtactacacttaagt

SEQ ID NO: 225755 - DNA, 25 bp, Probe sequence
gccggacctgctaagaaatctcgag

SEQ ID NO: 225756 - DNA, 25 bp, Probe sequence
attgttgctcatcacgaagctggtc

SEQ ID NO: 225757 - DNA, 25 bp, Probe sequence
attacttgctagagcggttgcaggt

SEQ ID NO: 225758 - DNA, 25 bp, Probe sequence
attttcttcctaagccaagcacaag

SEQ ID NO: 225759 - DNA, 25 bp, Probe sequence
atctgtggtttacttggtggacgtg

SEQ ID NO: 225760 - DNA, 25 bp, Probe sequence
aggtgtcttacttgttggacctcca

SEQ ID NO: 225761 - DNA, 25 bp, Probe sequence
aggtgagcctaattattcaagccaa

SEQ ID NO: 225762 - DNA, 25 bp, Probe sequence
acttgttggacctccaggtactggt

SEQ ID NO: 225763 - DNA, 25 bp, Probe sequence
acaaggtggcggtagtggcggtcgt

SEQ ID NO: 225764 - DNA, 25 bp, Probe sequence
aaaccttacgatccaaatcacccag

SEQ ID NO: 225765 - DNA, 25 bp, Probe sequence
aaaaacgcgccttgtatcatcttta

SEQ ID NO: 225766 - DNA, 25 bp, Probe sequence
aatgacttcgaacgtgcaacacaaa

SEQ ID NO: 225767 - DNA, 25 bp, Probe sequence
aattccagttgtagtcatagcgtta

SEQ ID NO: 225768 - DNA, 25 bp, Probe sequence
caacaggtgcttcaaatgacttcga

SEQ ID NO: 225769 - DNA, 25 bp, Probe sequence
cgcaccattcttctctattagtggt

SEQ ID NO: 225770 - DNA, 25 bp, Probe sequence
gcacgctcaatggttacgcaatatg

SEQ ID NO: 225771 - DNA, 25 bp, Probe sequence
gcaacacaaatcgcacgctcaatgg

SEQ ID NO: 225772 - DNA, 25 bp, Probe sequence
gaagactattcatcaactattttat

SEQ ID NO: 225773 - DNA, 25 bp, Probe sequence
gaagcaattcttcatgttcatgcta

SEQ ID NO: 225774 - DNA, 25 bp, Probe sequence
gaagctggtcatacaattatcggta

SEQ ID NO: 225775 - DNA, 25 bp, Probe sequence
gagccgtgttcgtgacttattcgat

SEQ ID NO: 225776 - DNA, 25 bp, Probe sequence
gagtatactttcaacattaattcca

SEQ ID NO: 225777 - DNA, 25 bp, Probe sequence
gtagagatgtttgttggtgttggtg

SEQ ID NO: 225778 - DNA, 25 bp, Probe sequence
gtggcggtcgtatgatgaactttgg

SEQ ID NO: 225779 - DNA, 25 bp, Probe sequence
gtggcggtcatgatgaacgtgaaca

SEQ ID NO: 225780 - DNA, 25 bp, Probe sequence
ggtggttatgcaatgatgctaccta

SEQ ID NO: 225781 - DNA, 25 bp, Probe sequence
ggatagagttatagccggacctgct

SEQ ID NO: 225782 - DNA, 25 bp, Probe sequence
tttcacaacgtacacctggtttctc

SEQ ID NO: 225783 - DNA, 25 bp, Probe sequence
tcgtgttcgtttctctgatgtagca

SEQ ID NO: 225784 - DNA, 25 bp, Probe sequence
tcggtatggtacttgatgaggcaga

SEQ ID NO: 225785 - DNA, 25 bp, Probe sequence
tacagttcggtcatagcaatggtca

SEQ ID NO: 225786 - DNA, 25 bp, Probe sequence
tagcgttattatttattttcttcct

SEQ ID NO: 225787 - DNA, 25 bp, Probe sequence
tatgatagctgctacaaaccgtcct

SEQ ID NO: 225788 - DNA, 25 bp, Probe sequence
ttcgcaatgtgctagttatcgtaat

SEQ ID NO: 225789 - DNA, 25 bp, Probe sequence
attgccgatgcaaatgctaaaggcg

SEQ ID NO: 225790 - DNA, 25 bp, Probe sequence
atgggcgcaatgttgaaaggtgatc

SEQ ID NO: 225791 - DNA, 25 bp, Probe sequence
accatccacaaactcattttccatt

SEQ ID NO: 225792 - DNA, 25 bp, Probe sequence
acagcaacagctatgatgggcgcaa

SEQ ID NO: 225793 - DNA, 25 bp, Probe sequence
acaagtgaacaaacaccttcatcgg

SEQ ID NO: 225794 - DNA, 25 bp, Probe sequence
aaatgacaccagtttctaaattaat

SEQ ID NO: 225795 - DNA, 25 bp, Probe sequence
aaagcagcaggaggatttatcattc

SEQ ID NO: 225796 - DNA, 25 bp, Probe sequence
aacaaggattaacgccagaaggatt

SEQ ID NO: 225797 - DNA, 25 bp, Probe sequence
aacaccttcatcggtaggtcttggt

SEQ ID NO: 225798 - DNA, 25 bp, Probe sequence
aacgagacattatacatggccgaca

SEQ ID NO: 225799 - DNA, 25 bp, Probe sequence
aagaagatcatggtgctgaagcagt

SEQ ID NO: 225800 - DNA, 25 bp, Probe sequence
gctgctttgacaactgaaactgttc

SEQ ID NO: 225801 - DNA, 25 bp, Probe sequence
gctaaaggcgaggtgcgtgcttatg

SEQ ID NO: 225802 - DNA, 25 bp, Probe sequence
gcatctgctgcaatgggaagaacaa

SEQ ID NO: 225803 - DNA, 25 bp, Probe sequence
gaagcagtatgtcatttctgtggaa

SEQ ID NO: 225804 - DNA, 25 bp, Probe sequence
gaacttggtgaagattttacttatt

SEQ ID NO: 225805 - DNA, 25 bp, Probe sequence
gaaactgttcaagaagcacaaacga

SEQ ID NO: 225806 - DNA, 25 bp, Probe sequence
gaaagactatttctctggagcaagt

SEQ ID NO: 225807 - DNA, 25 bp, Probe sequence
gacacacgattatattgttaaagca

SEQ ID NO: 225808 - DNA, 25 bp, Probe sequence
gagaaaatgcctgttcaatttgaat

SEQ ID NO: 225809 - DNA, 25 bp, Probe sequence
gagattagggcttatgctgctttga

SEQ ID NO: 225810 - DNA, 25 bp, Probe sequence
gatggccaaggacctattggacgaa

SEQ ID NO: 225811 - DNA, 25 bp, Probe sequence
gtcactgtagatggccaaggaccta

SEQ ID NO: 225812 - DNA, 25 bp, Probe sequence
gtgcgtgcttatgtagaccatccac

SEQ ID NO: 225813 - DNA, 25 bp, Probe sequence
gggcttatgctgctttgacaactga

SEQ ID NO: 225814 - DNA, 25 bp, Probe sequence
ggtgaagaccatgtgcaaattttag

SEQ ID NO: 225815 - DNA, 25 bp, Probe sequence
ggtcttggtgtattggtaaatcctg

SEQ ID NO: 225816 - DNA, 25 bp, Probe sequence
ggattgggcgaggctgagattcaaa

SEQ ID NO: 225817 - DNA, 25 bp, Probe sequence
ggagcaagtccaattgtttcaggag

SEQ ID NO: 225818 - DNA, 25 bp, Probe sequence
ggaagaacaatgacagcaacagcta

SEQ ID NO: 225819 - DNA, 25 bp, Probe sequence
taacgccagaaggattactaaacga

SEQ ID NO: 225820 - DNA, 25 bp, Probe sequence
tacatggccgacagcatctgctgca

SEQ ID NO: 225821 - DNA, 25 bp, Probe sequence
tattggacgaattattgccgatgca

SEQ ID NO: 225822 - DNA, 25 bp, Probe sequence
ttatcattcaagttatgccaggtgc

SEQ ID NO: 225823 - DNA, 25 bp, Probe sequence
attgccgagtaatggtgaacgctac

SEQ ID NO: 225824 - DNA, 25 bp, Probe sequence
atgtctcgtcgagttgctaaagagg

SEQ ID NO: 225825 - DNA, 25 bp, Probe sequence
aggtgctgcgatttatgctgccatt

SEQ ID NO: 225826 - DNA, 25 bp, Probe sequence
aacagtagtaacagtattgccgagt

SEQ ID NO: 225827 - DNA, 25 bp, Probe sequence
aaaccctgcgaaccctgaagttcat

SEQ ID NO: 225828 - DNA, 25 bp, Probe sequence
aacatggttacttcgagccacaaca

SEQ ID NO: 225829 - DNA, 25 bp, Probe sequence
caaggtttaggtgctggatttattc

SEQ ID NO: 225830 - DNA, 25 bp, Probe sequence
caggtatcggtttagcatttgtatg

SEQ ID NO: 225831 - DNA, 25 bp, Probe sequence
caggtatttcatcaggtgctgcgat

SEQ ID NO: 225832 - DNA, 25 bp, Probe sequence
cgttcctagctggtgttggtactgg

SEQ ID NO: 225833 - DNA, 25 bp, Probe sequence
ctacaggtcctgagttattacaaca

SEQ ID NO: 225834 - DNA, 25 bp, Probe sequence
gccacaacaatttgaaaaccctgcg

SEQ ID NO: 225835 - DNA, 25 bp, Probe sequence
gcctgaggcttctccagtattgagc

SEQ ID NO: 225836 - DNA, 25 bp, Probe sequence
gctgcgatttatgctgccattcaaa

SEQ ID NO: 225837 - DNA, 25 bp, Probe sequence
gcatttgtatgtgctgctaaaggat

SEQ ID NO: 225838 - DNA, 25 bp, Probe sequence
gaaaactatcgatgcgttcctagct

SEQ ID NO: 225839 - DNA, 25 bp, Probe sequence
gaaacaatgagccaagagcgtcgta

SEQ ID NO: 225840 - DNA, 25 bp, Probe sequence
gagccaggtccacataaattacaag

SEQ ID NO: 225841 - DNA, 25 bp, Probe sequence
gagccaagagcgtcgtaatttatta

SEQ ID NO: 225842 - DNA, 25 bp, Probe sequence
gagaaggcaaaattaaacctggcga

SEQ ID NO: 225843 - DNA, 25 bp, Probe sequence
gaggaaggtattttagcaggtattt

SEQ ID NO: 225844 - DNA, 25 bp, Probe sequence
gttcatgagttaactacaggtcctg

SEQ ID NO: 225845 - DNA, 25 bp, Probe sequence
ggtacgttatctggtgtaggtaaag

SEQ ID NO: 225846 - DNA, 25 bp, Probe sequence
ggcttctccagtattgagcggtggt

SEQ ID NO: 225847 - DNA, 25 bp, Probe sequence
ggaatatcaaaatccaggtggttct

SEQ ID NO: 225848 - DNA, 25 bp, Probe sequence
tgagcggtggtgagccaggtccaca

SEQ ID NO: 225849 - DNA, 25 bp, Probe sequence
ggcggtacaccggtagtcaaattga

SEQ ID NO: 225850 - DNA, 25 bp, Probe sequence
tgaacgctacttatcaacaccttta

SEQ ID NO: 225851 - DNA, 25 bp, Probe sequence
taaaagcatacggtgcggaattagt

SEQ ID NO: 225852 - DNA, 25 bp, Probe sequence
tactcaaattattggcggtacaccg

SEQ ID NO: 225853 - DNA, 25 bp, Probe sequence
tacagcgatggaaatgtctcgtcga

SEQ ID NO: 225854 - DNA, 25 bp, Probe sequence
tatcctaacatcgaaattgttgcta

SEQ ID NO: 225855 - DNA, 25 bp, Probe sequence
ttaacgcctggatcagaagcgatga

SEQ ID NO: 225856 - DNA, 25 bp, Probe sequence
ttgttgctatagagcctgaggcttc

SEQ ID NO: 225857 - DNA, 25 bp, Probe sequence
ctggtataccttcaaataaaatttg

SEQ ID NO: 225858 - DNA, 25 bp, Probe sequence
ataaaatttggctagatccaggtat

SEQ ID NO: 225859 - DNA, 25 bp, Probe sequence
atcgtgatgaaccggttgtcgaaga

SEQ ID NO: 225860 - DNA, 25 bp, Probe sequence
atccagttttattagcgacaagccg

SEQ ID NO: 225861 - DNA, 25 bp, Probe sequence
atggtattatgaaaggcgttagagc

SEQ ID NO: 225862 - DNA, 25 bp, Probe sequence
agcacaagcacatcaagctaaaata

SEQ ID NO: 225863 - DNA, 25 bp, Probe sequence
agccgaagttatggcaagactggat

SEQ ID NO: 225864 - DNA, 25 bp, Probe sequence
acttgttgcaacagaatatccagtt

SEQ ID NO: 225865 - DNA, 25 bp, Probe sequence
acatctttgttagcacaagcacatc

SEQ ID NO: 225866 - DNA, 25 bp, Probe sequence
aagctaaaatagctggtataccttc

SEQ ID NO: 225867 - DNA, 25 bp, Probe sequence
aagactggatgaacttgttgcaaca

SEQ ID NO: 225868 - DNA, 25 bp, Probe sequence
aaggcgttagagcagtacgcgttca

SEQ ID NO: 225869 - DNA, 25 bp, Probe sequence
caacaccggttgaaagagatgaagt

SEQ ID NO: 225870 - DNA, 25 bp, Probe sequence
cagctacgactgcatatggtattat

SEQ ID NO: 225871 - DNA, 25 bp, Probe sequence
caggtataggtttcgctaaaactag

SEQ ID NO: 225872 - DNA, 25 bp, Probe sequence
gcgacaagccggaaacgtttcacta

SEQ ID NO: 225873 - DNA, 25 bp, Probe sequence
gaaatgttaacatctttgttagcac

SEQ ID NO: 225874 - DNA, 25 bp, Probe sequence
gagatgaagtaactgcagctacgac

SEQ ID NO: 225875 - DNA, 25 bp, Probe sequence
gagcagtacgcgttcataatgtcga

SEQ ID NO: 225876 - DNA, 25 bp, Probe sequence
gatccaggtataggtttcgctaaaa

SEQ ID NO: 225877 - DNA, 25 bp, Probe sequence
gttgcaacagaatatccagttttat

SEQ ID NO: 225878 - DNA, 25 bp, Probe sequence
gttagagcagtacgcgttcataatg

SEQ ID NO: 225879 - DNA, 25 bp, Probe sequence
gtacgcgttcataatgtcgagttga

SEQ ID NO: 225880 - DNA, 25 bp, Probe sequence
gtaactgcagctacgactgcatatg

SEQ ID NO: 225881 - DNA, 25 bp, Probe sequence
ggtaatcgtgatgaaccggttgtcg

SEQ ID NO: 225882 - DNA, 25 bp, Probe sequence
ggagaatgaaaatgcaagacacaat

SEQ ID NO: 225883 - DNA, 25 bp, Probe sequence
ggctagatccaggtataggtttcgc

SEQ ID NO: 225884 - DNA, 25 bp, Probe sequence
tgtcgagttgaatgctaaattagct

SEQ ID NO: 225885 - DNA, 25 bp, Probe sequence
tgggttatgatacaacaccggttga

SEQ ID NO: 225886 - DNA, 25 bp, Probe sequence
tgaaccggttgtcgaagaaatgtta

SEQ ID NO: 225887 - DNA, 25 bp, Probe sequence
tgatgggttatgatacaacaccggt

SEQ ID NO: 225888 - DNA, 25 bp, Probe sequence
tagcgacaagccggaaacgtttcac

SEQ ID NO: 225889 - DNA, 25 bp, Probe sequence
tagaaatgaagaagccgaagttatg

SEQ ID NO: 225890 - DNA, 25 bp, Probe sequence
tttgttagcacaagcacatcaagct

SEQ ID NO: 225891 - DNA, 25 bp, Probe sequence
atatcatggtgctttatcagctgaa

SEQ ID NO: 225892 - DNA, 25 bp, Probe sequence
atctagctgaacgtattgcaaatcg

SEQ ID NO: 225893 - DNA, 25 bp, Probe sequence
atcatggtgctttatcagctgaaaa

SEQ ID NO: 225894 - DNA, 25 bp, Probe sequence
accgattccgggtcattatgatgga

SEQ ID NO: 225895 - DNA, 25 bp, Probe sequence
agctgaacgtattgcaaatcgtata

SEQ ID NO: 225896 - DNA, 25 bp, Probe sequence
acttgagcatctagctgaacgtatt

SEQ ID NO: 225897 - DNA, 25 bp, Probe sequence
aacccaccgattccgggtcattatg

SEQ ID NO: 225898 - DNA, 25 bp, Probe sequence
aagtgttcgaagaggttaaatcaat

SEQ ID NO: 225899 - DNA, 25 bp, Probe sequence
aaggccgttaatttacttgagcatc

SEQ ID NO: 225900 - DNA, 25 bp, Probe sequence
aaggtatgcgcttttatggatatca

SEQ ID NO: 225901 - DNA, 25 bp, Probe sequence
aattcacaatataatcgtgtaatgg

SEQ ID NO: 225902 - DNA, 25 bp, Probe sequence
caccgattccgggtcattatgatgg

SEQ ID NO: 225903 - DNA, 25 bp, Probe sequence
catggtgctttatcagctgaaaatg

SEQ ID NO: 225904 - DNA, 25 bp, Probe sequence
cgtactgataatgttattgatacag

SEQ ID NO: 225905 - DNA, 25 bp, Probe sequence
cccaccgattccgggtcattatgat

SEQ ID NO: 225906 - DNA, 25 bp, Probe sequence
gccgttaatttacttgagcatctag

SEQ ID NO: 225907 - DNA, 25 bp, Probe sequence
gcgcttttatggatatcatggtgct

SEQ ID NO: 225908 - DNA, 25 bp, Probe sequence
gcttttatggatatcatggtgcttt

SEQ ID NO: 225909 - DNA, 25 bp, Probe sequence
gaatcactaaagaaaacccaccgat

SEQ ID NO: 225910 - DNA, 25 bp, Probe sequence
gaacgtattgcaaatcgtataaatt

SEQ ID NO: 225911 - DNA, 25 bp, Probe sequence
gagaatcactaaagaaaacccaccg

SEQ ID NO: 225912 - DNA, 25 bp, Probe sequence
gagcatctagctgaacgtattgcaa

SEQ ID NO: 225913 - DNA, 25 bp, Probe sequence
gattccgggtcattatgatggagta

SEQ ID NO: 225914 - DNA, 25 bp, Probe sequence
gttaatttacttgagcatctagctg

SEQ ID NO: 225915 - DNA, 25 bp, Probe sequence
gtatgcgcttttatggatatcatgg

SEQ ID NO: 225916 - DNA, 25 bp, Probe sequence
gggtcattatgatggagtaggtatc

SEQ ID NO: 225917 - DNA, 25 bp, Probe sequence
ggtgctttatcagctgaaaatgaaa

SEQ ID NO: 225918 - DNA, 25 bp, Probe sequence
ggatatcatggtgctttatcagctg

SEQ ID NO: 225919 - DNA, 25 bp, Probe sequence
ggccgttaatttacttgagcatcta

SEQ ID NO: 225920 - DNA, 25 bp, Probe sequence
tgttattgatacagttcattatggt

SEQ ID NO: 225921 - DNA, 25 bp, Probe sequence
tttcttaaaggtatgcgcttttatg

SEQ ID NO: 225922 - DNA, 25 bp, Probe sequence
tcaattatggaaggtaaggccgtta

SEQ ID NO: 225923 - DNA, 25 bp, Probe sequence
tttacttgagcatctagctgaacgt

SEQ ID NO: 225924 - DNA, 25 bp, Probe sequence
ttgcaaatcgtataaattcacaata

SEQ ID NO: 225925 - DNA, 25 bp, Probe sequence
attcaaacaacactcacagtattac

SEQ ID NO: 225926 - DNA, 25 bp, Probe sequence
attaggtagtaatattggtgataga

SEQ ID NO: 225927 - DNA, 25 bp, Probe sequence
agaactttagatgtggatattttgt

SEQ ID NO: 225928 - DNA, 25 bp, Probe sequence
acgtgcatttgttttaatcccatta

SEQ ID NO: 225929 - DNA, 25 bp, Probe sequence
acagcaccagttgggtatactgagc

SEQ ID NO: 225930 - DNA, 25 bp, Probe sequence
aaacaacactcacagtattacaact

SEQ ID NO: 225931 - DNA, 25 bp, Probe sequence
aactgttggaatgttgtttgaagac

SEQ ID NO: 225932 - DNA, 25 bp, Probe sequence
aacgatgctataaagattttgaatg

SEQ ID NO: 225933 - DNA, 25 bp, Probe sequence
aagccagttaaacgatgctataaag

SEQ ID NO: 225934 - DNA, 25 bp, Probe sequence
cactcacagtattacaactgttgga

SEQ ID NO: 225935 - DNA, 25 bp, Probe sequence
catccgagaatgaatgaacgtgcat

SEQ ID NO: 225936 - DNA, 25 bp, Probe sequence
ctgtcggtgccacatccgagaatga

SEQ ID NO: 225937 - DNA, 25 bp, Probe sequence
gcaccagttgggtatactgagcaac

SEQ ID NO: 225938 - DNA, 25 bp, Probe sequence
gaacgtgcatttgttttaatcccat

SEQ ID NO: 225939 - DNA, 25 bp, Probe sequence
gaagacagaagaatgtttacaccgt

SEQ ID NO: 225940 - DNA, 25 bp, Probe sequence
gaacgatggggtcctagaactttag

SEQ ID NO: 225941 - DNA, 25 bp, Probe sequence
gaaacagcaccagttgggtatactg

SEQ ID NO: 225942 - DNA, 25 bp, Probe sequence
gagaaagccagttaaacgatgctat

SEQ ID NO: 225943 - DNA, 25 bp, Probe sequence
gatggggtcctagaactttagatgt

SEQ ID NO: 225944 - DNA, 25 bp, Probe sequence
gatgtggatattttgttgtatggag

SEQ ID NO: 225945 - DNA, 25 bp, Probe sequence
gatttatgaaacagcaccagttggg

SEQ ID NO: 225946 - DNA, 25 bp, Probe sequence
gattcaagcatacttaggattaggt

SEQ ID NO: 225947 - DNA, 25 bp, Probe sequence
gttggaatgttgtttgaagacagaa

SEQ ID NO: 225948 - DNA, 25 bp, Probe sequence
gtatactgagcaacctaacttttta

SEQ ID NO: 225949 - DNA, 25 bp, Probe sequence
gtcggtgccacatccgagaatgaat

SEQ ID NO: 225950 - DNA, 25 bp, Probe sequence
gtgcatttgttttaatcccattaaa

SEQ ID NO: 225951 - DNA, 25 bp, Probe sequence
gtgccacatccgagaatgaatgaac

SEQ ID NO: 225952 - DNA, 25 bp, Probe sequence
ggggtcctagaactttagatgtgga

SEQ ID NO: 225953 - DNA, 25 bp, Probe sequence
ggtgatagagaaagccagttaaacg

SEQ ID NO: 225954 - DNA, 25 bp, Probe sequence
ttgggtatactgagcaacctaactt

SEQ ID NO: 225955 - DNA, 25 bp, Probe sequence
tgagcaacctaactttttaaatttg

SEQ ID NO: 225956 - DNA, 25 bp, Probe sequence
tcccattaaatgatatagcagcaaa

SEQ ID NO: 225957 - DNA, 25 bp, Probe sequence
tagaaccacgttcgaaattgaaagt

SEQ ID NO: 225958 - DNA, 25 bp, Probe sequence
tactgagcaacctaactttttaaat

SEQ ID NO: 225959 - DNA, 25 bp, Probe sequence
atacctgaaggtgctaactggataa

SEQ ID NO: 225960 - DNA, 25 bp, Probe sequence
aggctgtttcaagttttcaacctga

SEQ ID NO: 225961 - DNA, 25 bp, Probe sequence
accacctatgggtcccttagatgta

SEQ ID NO: 225962 - DNA, 25 bp, Probe sequence
actattcacctgactatgttaacga

SEQ ID NO: 225963 - DNA, 25 bp, Probe sequence
acatgtaacaccacctatgggtccc

SEQ ID NO: 225964 - DNA, 25 bp, Probe sequence
aaagatgctttatttgacgtaggaa

SEQ ID NO: 225965 - DNA, 25 bp, Probe sequence
aaccttgttgaaatcgacggtgaca

SEQ ID NO: 225966 - DNA, 25 bp, Probe sequence
aagctactctaatgtatttgcactt

SEQ ID NO: 225967 - DNA, 25 bp, Probe sequence
aagtggctacattcgaacatatcaa

SEQ ID NO: 225968 - DNA, 25 bp, Probe sequence
cgtaagcaagcacctatcgtcgcta

SEQ ID NO: 225969 - DNA, 25 bp, Probe sequence
caggcgcagctattcgtaagcaagc

SEQ ID NO: 225970 - DNA, 25 bp, Probe sequence
ctataaagtgtggaggtgcgcctat

SEQ ID NO: 225971 - DNA, 25 bp, Probe sequence
cttcatgccctattgttactggata

SEQ ID NO: 225972 - DNA, 25 bp, Probe sequence
gctaatgtgatatatgcaacgccaa

SEQ ID NO: 225973 - DNA, 25 bp, Probe sequence
gcaggtgttaccgtagcatcaagac

SEQ ID NO: 225974 - DNA, 25 bp, Probe sequence
gcagaccatcattactatcaaccat

SEQ ID NO: 225975 - DNA, 25 bp, Probe sequence
gtattggtacggcatgctaaaagga

SEQ ID NO: 225976 - DNA, 25 bp, Probe sequence
gaaacaatgccgtttaatcaggcca

SEQ ID NO: 225977 - DNA, 25 bp, Probe sequence
gaaacataaaatccgttctaacgct

SEQ ID NO: 225978 - DNA, 25 bp, Probe sequence
gaggtgcgcctatgaaaattatgta

SEQ ID NO: 225979 - DNA, 25 bp, Probe sequence
gatggttatacttcatgccctattg

SEQ ID NO: 225980 - DNA, 25 bp, Probe sequence
gatagtgagggttgggtagatgtta

SEQ ID NO: 225981 - DNA, 25 bp, Probe sequence
gattttttagtagtagctccaggat

SEQ ID NO: 225982 - DNA, 25 bp, Probe sequence
gttggtgcaggggtatctagtttga

SEQ ID NO: 225983 - DNA, 25 bp, Probe sequence
gtatttgcacttggtgatgcttcaa

SEQ ID NO: 225984 - DNA, 25 bp, Probe sequence
gtgatgcttcaaatgtacctacttc

SEQ ID NO: 225985 - DNA, 25 bp, Probe sequence
gtgtttgctctaactattcacctga

SEQ ID NO: 225986 - DNA, 25 bp, Probe sequence
ggaaatgccatttttacgcatccaa

SEQ ID NO: 225987 - DNA, 25 bp, Probe sequence
tgttaacccaaccacattacagcat

SEQ ID NO: 225988 - DNA, 25 bp, Probe sequence
tacagtcgtttattatgatttttta

SEQ ID NO: 225989 - DNA, 25 bp, Probe sequence
tacctacttcaaaaacaggcgcagc

SEQ ID NO: 225990 - DNA, 25 bp, Probe sequence
tatggacgttggttggtgcaggggt

SEQ ID NO: 225991 - DNA, 25 bp, Probe sequence
tattggtggcggtacagcaggtgtt

SEQ ID NO: 225992 - DNA, 25 bp, Probe sequence
tttacgcatccaaacactcctataa

SEQ ID NO: 225993 - DNA, 25 bp, Probe sequence
atcgaaagagatgtatgttgagcaa

SEQ ID NO: 225994 - DNA, 25 bp, Probe sequence
atgttgagcaaaaatgtctgatatt

SEQ ID NO: 225995 - DNA, 25 bp, Probe sequence
atgtatgttgagcaaaaatgtctga

SEQ ID NO: 225996 - DNA, 25 bp, Probe sequence
atgtctgatattttataaaacttta

SEQ ID NO: 225997 - DNA, 25 bp, Probe sequence
agatgtatgttgagcaaaaatgtct

SEQ ID NO: 225998 - DNA, 25 bp, Probe sequence
agagatgtatgttgagcaaaaatgt

SEQ ID NO: 225999 - DNA, 25 bp, Probe sequence
agcaaaaatgtctgatattttataa

SEQ ID NO: 226000 - DNA, 25 bp, Probe sequence
aaatgtctgatattttataaaactt

SEQ ID NO: 226001 - DNA, 25 bp, Probe sequence
aaagtattagaaacatcgaaagaga

SEQ ID NO: 226002 - DNA, 25 bp, Probe sequence
aaagagatgtatgttgagcaaaaat

SEQ ID NO: 226003 - DNA, 25 bp, Probe sequence
aagagatgtatgttgagcaaaaatg

SEQ ID NO: 226004 - DNA, 25 bp, Probe sequence
aagtattagaaacatcgaaagagat

SEQ ID NO: 226005 - DNA, 25 bp, Probe sequence
aatgtctgatattttataaaacttt

SEQ ID NO: 226006 - DNA, 25 bp, Probe sequence
cgaaagagatgtatgttgagcaaaa

SEQ ID NO: 226007 - DNA, 25 bp, Probe sequence
gaaagagatgtatgttgagcaaaaa

SEQ ID NO: 226008 - DNA, 25 bp, Probe sequence
gagcaaaaatgtctgatattttata

SEQ ID NO: 226009 - DNA, 25 bp, Probe sequence
gagatgtatgttgagcaaaaatgtc

SEQ ID NO: 226010 - DNA, 25 bp, Probe sequence
gatgtatgttgagcaaaaatgtctg

SEQ ID NO: 226011 - DNA, 25 bp, Probe sequence
gttgagcaaaaatgtctgatatttt

SEQ ID NO: 226012 - DNA, 25 bp, Probe sequence
gtatgttgagcaaaaatgtctgata

SEQ ID NO: 226013 - DNA, 25 bp, Probe sequence
tgtctgatattttataaaactttaa

SEQ ID NO: 226014 - DNA, 25 bp, Probe sequence
tgtatgttgagcaaaaatgtctgat

SEQ ID NO: 226015 - DNA, 25 bp, Probe sequence
tgttgagcaaaaatgtctgatattt

SEQ ID NO: 226016 - DNA, 25 bp, Probe sequence
tgagcaaaaatgtctgatattttat

SEQ ID NO: 226017 - DNA, 25 bp, Probe sequence
tcgaaagagatgtatgttgagcaaa

SEQ ID NO: 226018 - DNA, 25 bp, Probe sequence
tctgatattttataaaactttaaag

SEQ ID NO: 226019 - DNA, 25 bp, Probe sequence
taaagtattagaaacatcgaaagag

SEQ ID NO: 226020 - DNA, 25 bp, Probe sequence
tatgttgagcaaaaatgtctgatat

SEQ ID NO: 226021 - DNA, 25 bp, Probe sequence
ttgagcaaaaatgtctgatatttta

SEQ ID NO: 226022 - DNA, 25 bp, Probe sequence
actaaatcattgcgaccattaccgg

SEQ ID NO: 226023 - DNA, 25 bp, Probe sequence
atcctagatttactgatcgtttcga

SEQ ID NO: 226024 - DNA, 25 bp, Probe sequence
agatgcaacgttatacatgcgtatt

SEQ ID NO: 226025 - DNA, 25 bp, Probe sequence
agcggatagtcatgtcgctatagct

SEQ ID NO: 226026 - DNA, 25 bp, Probe sequence
acgtttatctatggtcatccgactg

SEQ ID NO: 226027 - DNA, 25 bp, Probe sequence
acacttattcagccaacgtttatct

SEQ ID NO: 226028 - DNA, 25 bp, Probe sequence
aaatgctgatttaggcgatatcgtt

SEQ ID NO: 226029 - DNA, 25 bp, Probe sequence
aaaggtcgttttgaagcgcaacttg

SEQ ID NO: 226030 - DNA, 25 bp, Probe sequence
caggatttgcacacgttcaggactt

SEQ ID NO: 226031 - DNA, 25 bp, Probe sequence
gcctccgacaggtggtcttggtatc

SEQ ID NO: 226032 - DNA, 25 bp, Probe sequence
gcttggactcgtttgcatattgttg

SEQ ID NO: 226033 - DNA, 25 bp, Probe sequence
gcacacgttcaggacttagctggac

SEQ ID NO: 226034 - DNA, 25 bp, Probe sequence
gcagctgctagaccatttgtaacac

SEQ ID NO: 226035 - DNA, 25 bp, Probe sequence
gaagaaattcacgctactaactaaa

SEQ ID NO: 226036 - DNA, 25 bp, Probe sequence
gaaacacctatgatgcaccaaattg

SEQ ID NO: 226037 - DNA, 25 bp, Probe sequence
gacataaccctgaattcacaatgat

SEQ ID NO: 226038 - DNA, 25 bp, Probe sequence
gaccgttcaggtttatctagtgatt

SEQ ID NO: 226039 - DNA, 25 bp, Probe sequence
gaccaaatgttggttcgacgtcaaa

SEQ ID NO: 226040 - DNA, 25 bp, Probe sequence
gagtgggaccagtattctaaagaag

SEQ ID NO: 226041 - DNA, 25 bp, Probe sequence
gatcttggtatagacccgtttggtt

SEQ ID NO: 226042 - DNA, 25 bp, Probe sequence
gatcgtttcgaattgttcattgtag

SEQ ID NO: 226043 - DNA, 25 bp, Probe sequence
gatagcactcgtacatttattaatc

SEQ ID NO: 226044 - DNA, 25 bp, Probe sequence
gatttagaatctgcttggactcgtt

SEQ ID NO: 226045 - DNA, 25 bp, Probe sequence
gttggcgatgacgaatttgatttat

SEQ ID NO: 226046 - DNA, 25 bp, Probe sequence
gttagaatatggtatgcctccgaca

SEQ ID NO: 226047 - DNA, 25 bp, Probe sequence
gtcatccgactgaaatttcaccttt

SEQ ID NO: 226048 - DNA, 25 bp, Probe sequence
gtcatgtcgctatagctggacgatt

SEQ ID NO: 226049 - DNA, 25 bp, Probe sequence
ggtgtatcaactagacataaccctg

SEQ ID NO: 226050 - DNA, 25 bp, Probe sequence
ggtcttggtatcggtattgacagat

SEQ ID NO: 226051 - DNA, 25 bp, Probe sequence
ggcgatatcgttggtgttgaaggtg

SEQ ID NO: 226052 - DNA, 25 bp, Probe sequence
tgcgaccattaccggataaattcca

SEQ ID NO: 226053 - DNA, 25 bp, Probe sequence
taaattccacggtttacaggatatt

SEQ ID NO: 226054 - DNA, 25 bp, Probe sequence
tacatgcgtattgctattgagttgc

SEQ ID NO: 226055 - DNA, 25 bp, Probe sequence
tttggttctaaatttgaccgttcag

SEQ ID NO: 226056 - DNA, 25 bp, Probe sequence
attccagtcatggctaaagcacgta

SEQ ID NO: 226057 - DNA, 25 bp, Probe sequence
atcggtgcgccttatgaaattttaa

SEQ ID NO: 226058 - DNA, 25 bp, Probe sequence
aggtgaaccaggtacaggtaatatt

SEQ ID NO: 226059 - DNA, 25 bp, Probe sequence
agcaagtgaacttggcactgctatg

SEQ ID NO: 226060 - DNA, 25 bp, Probe sequence
acttggcactgctatgaaaggttta

SEQ ID NO: 226061 - DNA, 25 bp, Probe sequence
aaagcacgtattggtcatatcactg

SEQ ID NO: 226062 - DNA, 25 bp, Probe sequence
aaaattattggatcagacagagtca

SEQ ID NO: 226063 - DNA, 25 bp, Probe sequence
aactttgcagctggtggcgttgcga

SEQ ID NO: 226064 - DNA, 25 bp, Probe sequence
aacaccagcagatgaggaatatcac

SEQ ID NO: 226065 - DNA, 25 bp, Probe sequence
aagatcaatttacagtaccatttgt

SEQ ID NO: 226066 - DNA, 25 bp, Probe sequence
aagatgctgctttaatgatggaatt

SEQ ID NO: 226067 - DNA, 25 bp, Probe sequence
aaggcggcgttattatggatgtcgt

SEQ ID NO: 226068 - DNA, 25 bp, Probe sequence
cgactcctcaagatgctgctttaat

SEQ ID NO: 226069 - DNA, 25 bp, Probe sequence
gcgaaagatatcggtgcgccttatg

SEQ ID NO: 226070 - DNA, 25 bp, Probe sequence
gaattggtgaaggtgctgctatgtt

SEQ ID NO: 226071 - DNA, 25 bp, Probe sequence
gaatcagaagtgttaacaccagcag

SEQ ID NO: 226072 - DNA, 25 bp, Probe sequence
gaatgctgtttctattccagtcatg

SEQ ID NO: 226073 - DNA, 25 bp, Probe sequence
gaagcaagagtattagaggcgatgg

SEQ ID NO: 226074 - DNA, 25 bp, Probe sequence
gaacgtatgcaagagcgtggttggt

SEQ ID NO: 226075 - DNA, 25 bp, Probe sequence
gaggcgatgggtgttgactatattg

SEQ ID NO: 226076 - DNA, 25 bp, Probe sequence
tttaccggtagttaactttgcagct

SEQ ID NO: 226077 - DNA, 25 bp, Probe sequence
gttgcacgtatggcaaaccctaaaa

SEQ ID NO: 226078 - DNA, 25 bp, Probe sequence
gtattggtcatatcactgaagcaag

SEQ ID NO: 226079 - DNA, 25 bp, Probe sequence
gtaccttctgatattagagctgctg

SEQ ID NO: 226080 - DNA, 25 bp, Probe sequence
gtaccatttgtatgtggatgtcgta

SEQ ID NO: 226081 - DNA, 25 bp, Probe sequence
gtcgtaatttaggtgaagctgcgcg

SEQ ID NO: 226082 - DNA, 25 bp, Probe sequence
gtgaagctgcgcgtagaattggtga

SEQ ID NO: 226083 - DNA, 25 bp, Probe sequence
ggtgctgctatgttacgtactaaag

SEQ ID NO: 226084 - DNA, 25 bp, Probe sequence
ggcattagaacgagtaccttctgat

SEQ ID NO: 226085 - DNA, 25 bp, Probe sequence
ggctgaaatgcaaaaaggcggcgtt

SEQ ID NO: 226086 - DNA, 25 bp, Probe sequence
ggcgcggtagcagttatggcattag

SEQ ID NO: 226087 - DNA, 25 bp, Probe sequence
tggatgtcgttaatgctgagcaagc

SEQ ID NO: 226088 - DNA, 25 bp, Probe sequence
tagtcgattgactgtaatgaatgat

SEQ ID NO: 226089 - DNA, 25 bp, Probe sequence
ttcaagcaacaacacattaccaaga

SEQ ID NO: 226090 - DNA, 25 bp, Probe sequence
atattactgtacaacgaaactcatt

SEQ ID NO: 226091 - DNA, 25 bp, Probe sequence
atcattccatcctgaattaacagat

SEQ ID NO: 226092 - DNA, 25 bp, Probe sequence
agatgactatagagtaactgattac

SEQ ID NO: 226093 - DNA, 25 bp, Probe sequence
tacctggtggcgagtctacaacgtt

SEQ ID NO: 226094 - DNA, 25 bp, Probe sequence
acaacgttacgtcgattaatgaatt

SEQ ID NO: 226095 - DNA, 25 bp, Probe sequence
aaggcgtagatatcctatgtaaggt

SEQ ID NO: 226096 - DNA, 25 bp, Probe sequence
aatatttaggcgtatcattccatcc

SEQ ID NO: 226097 - DNA, 25 bp, Probe sequence
cattcggtagacaagttgacagctt

SEQ ID NO: 226098 - DNA, 25 bp, Probe sequence
catgcgcaggattaatagttctagc

SEQ ID NO: 226099 - DNA, 25 bp, Probe sequence
ctggtggcgagtctacaacgttacg

SEQ ID NO: 226100 - DNA, 25 bp, Probe sequence
gcgtatcattccatcctgaattaac

SEQ ID NO: 226101 - DNA, 25 bp, Probe sequence
gctacagatattgaaggtgtcttta

SEQ ID NO: 226102 - DNA, 25 bp, Probe sequence
gcattacaaggtgcagtacgtgaac

SEQ ID NO: 226103 - DNA, 25 bp, Probe sequence
gcaggattaatagttctagcgcaag

SEQ ID NO: 226104 - DNA, 25 bp, Probe sequence
gcagtacgtgaacatattagacata

SEQ ID NO: 226105 - DNA, 25 bp, Probe sequence
gaaggataccttaacaagttgaata

SEQ ID NO: 226106 - DNA, 25 bp, Probe sequence
gaaatcgagggcttaatattacctg

SEQ ID NO: 226107 - DNA, 25 bp, Probe sequence
gacaagttgacagctttgaaacaga

SEQ ID NO: 226108 - DNA, 25 bp, Probe sequence
gacatattgaattaagtggtcatga

SEQ ID NO: 226109 - DNA, 25 bp, Probe sequence
gagtctacaacgttacgtcgattaa

SEQ ID NO: 226110 - DNA, 25 bp, Probe sequence
gagggcttaatattacctggtggcg

SEQ ID NO: 226111 - DNA, 25 bp, Probe sequence
gatattaaaggtatcgctacagata

SEQ ID NO: 226112 - DNA, 25 bp, Probe sequence
gttctagcgcaagatatagttggtg

SEQ ID NO: 226113 - DNA, 25 bp, Probe sequence
gtttggtacatgcgcaggattaata

SEQ ID NO: 226114 - DNA, 25 bp, Probe sequence
gtacaacgaaactcattcggtagac

SEQ ID NO: 226115 - DNA, 25 bp, Probe sequence
gtcatgaaggtattgcagttaaaaa

SEQ ID NO: 226116 - DNA, 25 bp, Probe sequence
ggtgcagtacgtgaacatattagac

SEQ ID NO: 226117 - DNA, 25 bp, Probe sequence
ggcgagtctacaacgttacgtcgat

SEQ ID NO: 226118 - DNA, 25 bp, Probe sequence
tacaaaattcaactttacctatgtt

SEQ ID NO: 226119 - DNA, 25 bp, Probe sequence
taaagaggctttacaaaattcaact

SEQ ID NO: 226120 - DNA, 25 bp, Probe sequence
tacctatgtttggtacatgcgcagg

SEQ ID NO: 226121 - DNA, 25 bp, Probe sequence
taggcgtatcattccatcctgaatt

SEQ ID NO: 226122 - DNA, 25 bp, Probe sequence
tattacctggtggcgagtctacaac

SEQ ID NO: 226123 - DNA, 25 bp, Probe sequence
tttaggcgtatcattccatcctgaa

SEQ ID NO: 226124 - DNA, 25 bp, Probe sequence
acgtggtggtggtggttacatccga

SEQ ID NO: 226125 - DNA, 25 bp, Probe sequence
aaacgtttatttgaagagtcgaatg

SEQ ID NO: 226126 - DNA, 25 bp, Probe sequence
atttgcttcagctgattggaccttc

SEQ ID NO: 226127 - DNA, 25 bp, Probe sequence
atttctcaacaacaagcttattata

SEQ ID NO: 226128 - DNA, 25 bp, Probe sequence
atgcacaatatgtctgacatcatag

SEQ ID NO: 226129 - DNA, 25 bp, Probe sequence
agaacaatacatcaaacgtttattt

SEQ ID NO: 226130 - DNA, 25 bp, Probe sequence
agcagttattgatagagaaacgcta

SEQ ID NO: 226131 - DNA, 25 bp, Probe sequence
aacacgattcactaatgaacatggt

SEQ ID NO: 226132 - DNA, 25 bp, Probe sequence
cagctgattggaccttctatttctc

SEQ ID NO: 226133 - DNA, 25 bp, Probe sequence
cagagagcgaatatcgcacagcgtt

SEQ ID NO: 226134 - DNA, 25 bp, Probe sequence
cgaatatcgcacagcgttttgattg

SEQ ID NO: 226135 - DNA, 25 bp, Probe sequence
gctgattggaccttctatttctcaa

SEQ ID NO: 226136 - DNA, 25 bp, Probe sequence
gcttcagctgattggaccttctatt

SEQ ID NO: 226137 - DNA, 25 bp, Probe sequence
gaagctaaaatgattcaagcagtta

SEQ ID NO: 226138 - DNA, 25 bp, Probe sequence
gaaatcgaaagtaaacgtggtggtg

SEQ ID NO: 226139 - DNA, 25 bp, Probe sequence
gaaacgctatcaatggatatggttt

SEQ ID NO: 226140 - DNA, 25 bp, Probe sequence
gagcgaatatcgcacagcgttttga

SEQ ID NO: 226141 - DNA, 25 bp, Probe sequence
gaccttctatttctcaacaacaagc

SEQ ID NO: 226142 - DNA, 25 bp, Probe sequence
gatgtcgttgaaattcagagagcga

SEQ ID NO: 226143 - DNA, 25 bp, Probe sequence
gatgcaacaggttatattaatcatt

SEQ ID NO: 226144 - DNA, 25 bp, Probe sequence
gattggaccttctatttctcaacaa

SEQ ID NO: 226145 - DNA, 25 bp, Probe sequence
gtctgacatcatagaacaatacatc

SEQ ID NO: 226146 - DNA, 25 bp, Probe sequence
ggttacatccgaatcactaaaattg

SEQ ID NO: 226147 - DNA, 25 bp, Probe sequence
ggttatattaatcatttgcttcagc

SEQ ID NO: 226148 - DNA, 25 bp, Probe sequence
ggatatggtttctagagatattatt

SEQ ID NO: 226149 - DNA, 25 bp, Probe sequence
tggtggttacatccgaatcactaaa

SEQ ID NO: 226150 - DNA, 25 bp, Probe sequence
tcaacaacaagcttattatattatt

SEQ ID NO: 226151 - DNA, 25 bp, Probe sequence
tatgtaatcaaaacacgattcacta

SEQ ID NO: 226152 - DNA, 25 bp, Probe sequence
tatcaatggatatggtttctagaga

SEQ ID NO: 226153 - DNA, 25 bp, Probe sequence
ttatattattgatgggcttttagat

SEQ ID NO: 226154 - DNA, 25 bp, Probe sequence
ttctatttctcaacaacaagcttat

SEQ ID NO: 226155 - DNA, 25 bp, Probe sequence
ttgcttcagctgattggaccttcta

SEQ ID NO: 226156 - DNA, 25 bp, Probe sequence
ttgttaccagttataaattattact

SEQ ID NO: 226157 - DNA, 25 bp, Probe sequence
ttggaccttctatttctcaacaaca

SEQ ID NO: 226158 - DNA, 25 bp, Probe sequence
atccgtggaatcaagctaatgaaca

SEQ ID NO: 226159 - DNA, 25 bp, Probe sequence
acatcattgatatcgtccgcagagt

SEQ ID NO: 226160 - DNA, 25 bp, Probe sequence
aaagctgagagtgaggtgcaacatg

SEQ ID NO: 226161 - DNA, 25 bp, Probe sequence
aaaaatggtgtgtcaaacttgtgct

SEQ ID NO: 226162 - DNA, 25 bp, Probe sequence
aacatcaagataatttcgaagaagc

SEQ ID NO: 226163 - DNA, 25 bp, Probe sequence
aagaaaaacgttgcccatcatgtca

SEQ ID NO: 226164 - DNA, 25 bp, Probe sequence
aagattttgaggaagcagccattgt

SEQ ID NO: 226165 - DNA, 25 bp, Probe sequence
aattgtcaacttaatgaagcggaat

SEQ ID NO: 226166 - DNA, 25 bp, Probe sequence
caccatccgtggaatcaagctaatg

SEQ ID NO: 226167 - DNA, 25 bp, Probe sequence
catgttggtaaatttgggtgtgcta

SEQ ID NO: 226168 - DNA, 25 bp, Probe sequence
ccgcagagttcaaggtggacaattt

SEQ ID NO: 226169 - DNA, 25 bp, Probe sequence
gcagccattgttagagatgaaatta

SEQ ID NO: 226170 - DNA, 25 bp, Probe sequence
gcaaattttacaacatttagctacg

SEQ ID NO: 226171 - DNA, 25 bp, Probe sequence
gaagaaaaacgttgcccatcatgtc

SEQ ID NO: 226172 - DNA, 25 bp, Probe sequence
gaaagatattgcacatgttggtaaa

SEQ ID NO: 226173 - DNA, 25 bp, Probe sequence
gaaagacaccacattcttcacataa

SEQ ID NO: 226174 - DNA, 25 bp, Probe sequence
gacaccacattcttcacataaaaag

SEQ ID NO: 226175 - DNA, 25 bp, Probe sequence
gactttgaaagatattgcacatgtt

SEQ ID NO: 226176 - DNA, 25 bp, Probe sequence
gagcacgttggaaagacaccacatt

SEQ ID NO: 226177 - DNA, 25 bp, Probe sequence
gagagtgaggtgcaacatgatgacg

SEQ ID NO: 226178 - DNA, 25 bp, Probe sequence
gaggaagcagccattgttagagatg

SEQ ID NO: 226179 - DNA, 25 bp, Probe sequence
gatgacatcattgatatcgtccgca

SEQ ID NO: 226180 - DNA, 25 bp, Probe sequence
gatatcgtccgcagagttcaaggtg

SEQ ID NO: 226181 - DNA, 25 bp, Probe sequence
gttggaaagacaccacattcttcac

SEQ ID NO: 226182 - DNA, 25 bp, Probe sequence
gtgaggtgcaacatgatgacgcata

SEQ ID NO: 226183 - DNA, 25 bp, Probe sequence
gggtgtgctaattgttatgcaacat

SEQ ID NO: 226184 - DNA, 25 bp, Probe sequence
ggtggacaatttgagcacgttggaa

SEQ ID NO: 226185 - DNA, 25 bp, Probe sequence
tggtgtgtcaaacttgtgctgaggg

SEQ ID NO: 226186 - DNA, 25 bp, Probe sequence
tcgaagaagcatttgttgttaagca

SEQ ID NO: 226187 - DNA, 25 bp, Probe sequence
tcattgatatcgtccgcagagttca

SEQ ID NO: 226188 - DNA, 25 bp, Probe sequence
tcaagaagtagcgtttaaagaagaa

SEQ ID NO: 226189 - DNA, 25 bp, Probe sequence
tacaacatttagctacgaaacatgg

SEQ ID NO: 226190 - DNA, 25 bp, Probe sequence
tatcgtccgcagagttcaaggtgga

SEQ ID NO: 226191 - DNA, 25 bp, Probe sequence
tatgcaacatttaaagatgacatca

SEQ ID NO: 226192 - DNA, 25 bp, Probe sequence
ataaaacaaccagcagccgcagtat

SEQ ID NO: 226193 - DNA, 25 bp, Probe sequence
atgtcctaccaatataggtactggt

SEQ ID NO: 226194 - DNA, 25 bp, Probe sequence
atgaggtacaagatgccttgccaaa

SEQ ID NO: 226195 - DNA, 25 bp, Probe sequence
acacaagaccgtgtttttcgctcgc

SEQ ID NO: 226196 - DNA, 25 bp, Probe sequence
aacaccaattgttatgtcttctaga

SEQ ID NO: 226197 - DNA, 25 bp, Probe sequence
aagtatccaaccaacttacacttgg

SEQ ID NO: 226198 - DNA, 25 bp, Probe sequence
aaggttcgcaagtttatggacatac

SEQ ID NO: 226199 - DNA, 25 bp, Probe sequence
aatgataactatggaagaggcttct

SEQ ID NO: 226200 - DNA, 25 bp, Probe sequence
gaattcggttagcgcgtaatttaga

SEQ ID NO: 226201 - DNA, 25 bp, Probe sequence
caagctatgggaactgacacgacat

SEQ ID NO: 226202 - DNA, 25 bp, Probe sequence
ccagcagccgcagtattagtgaatg

SEQ ID NO: 226203 - DNA, 25 bp, Probe sequence
gaattgatggtagctatacagtcac

SEQ ID NO: 226204 - DNA, 25 bp, Probe sequence
gaattagatcgaagccttgatataa

SEQ ID NO: 226205 - DNA, 25 bp, Probe sequence
gaatgacacggattgctcaaaccat

SEQ ID NO: 226206 - DNA, 25 bp, Probe sequence
gaagttgttaatcaaatcattcatg

SEQ ID NO: 226207 - DNA, 25 bp, Probe sequence
gaaaatcatgtgcatccactaatgt

SEQ ID NO: 226208 - DNA, 25 bp, Probe sequence
gacacgacattacaggctttatata

SEQ ID NO: 226209 - DNA, 25 bp, Probe sequence
gaggtatttacggtgaaggttcgca

SEQ ID NO: 226210 - DNA, 25 bp, Probe sequence
gaggcttcttatagattaagcgaag

SEQ ID NO: 226211 - DNA, 25 bp, Probe sequence
gaggaccatattcgtattcaagcta

SEQ ID NO: 226212 - DNA, 25 bp, Probe sequence
gatgaacaacttggttatttaacta

SEQ ID NO: 226213 - DNA, 25 bp, Probe sequence
gttatttaactacatgtcctaccaa

SEQ ID NO: 226214 - DNA, 25 bp, Probe sequence
gtagctatacagtcaccatttttat

SEQ ID NO: 226215 - DNA, 25 bp, Probe sequence
gtcttctagaattcggttagcgcgt

SEQ ID NO: 226216 - DNA, 25 bp, Probe sequence
gtgcatccactaatgtatgctactg

SEQ ID NO: 226217 - DNA, 25 bp, Probe sequence
ggtactggtatgagagcaagcgtga

SEQ ID NO: 226218 - DNA, 25 bp, Probe sequence
ggacatacttatcaagtatccaacc

SEQ ID NO: 226219 - DNA, 25 bp, Probe sequence
tgagagcaagcgtgatgctacattt

SEQ ID NO: 226220 - DNA, 25 bp, Probe sequence
tgctcaaaccattaatcgttttgga

SEQ ID NO: 226221 - DNA, 25 bp, Probe sequence
tacagtcaccatttttattagatga

SEQ ID NO: 226222 - DNA, 25 bp, Probe sequence
tttatataatcaagcttcatcaatt

SEQ ID NO: 226223 - DNA, 25 bp, Probe sequence
ttttcgctcgctaggtattttacaa

SEQ ID NO: 226224 - DNA, 25 bp, Probe sequence
ttacacttggtaaatctgagttaga

SEQ ID NO: 226225 - DNA, 25 bp, Probe sequence
ttgaattaatgcgtcttgatcaaat

SEQ ID NO: 226226 - DNA, 25 bp, Probe sequence
gtaaagcggttagacgtgcccgtgc

SEQ ID NO: 226227 - DNA, 25 bp, Probe sequence
attagttggtgctcctccaggatat

SEQ ID NO: 226228 - DNA, 25 bp, Probe sequence
atcttccttggaccaactggtgttg

SEQ ID NO: 226229 - DNA, 25 bp, Probe sequence
atggcatgtcaacttcattgtcaga

SEQ ID NO: 226230 - DNA, 25 bp, Probe sequence
agatcaacgatttgctggattcggt

SEQ ID NO: 226231 - DNA, 25 bp, Probe sequence
acacgcagtgagccgattagttggt

SEQ ID NO: 226232 - DNA, 25 bp, Probe sequence
acaagcaggtaatgtcatcctattt

SEQ ID NO: 226233 - DNA, 25 bp, Probe sequence
aaactaaaacaccatcgcaagcata

SEQ ID NO: 226234 - DNA, 25 bp, Probe sequence
aacctgtacaagttgatgaaccttc

SEQ ID NO: 226235 - DNA, 25 bp, Probe sequence
aagacggtacattagatcctgttat

SEQ ID NO: 226236 - DNA, 25 bp, Probe sequence
aaggacgtacagttgatttcagaaa

SEQ ID NO: 226237 - DNA, 25 bp, Probe sequence
aattggtagctttatcttccttgga

SEQ ID NO: 226238 - DNA, 25 bp, Probe sequence
catactttagttggtgctggtggtg

SEQ ID NO: 226239 - DNA, 25 bp, Probe sequence
gctttagaacgtcgtttccaacctg

SEQ ID NO: 226240 - DNA, 25 bp, Probe sequence
ccggcattagcacgtggtgaattac

SEQ ID NO: 226241 - DNA, 25 bp, Probe sequence
gctggattcggtggttcaagtgatg

SEQ ID NO: 226242 - DNA, 25 bp, Probe sequence
gctcctccaggatatgttggtcatg

SEQ ID NO: 226243 - DNA, 25 bp, Probe sequence
gcacaccatcgtattaatatttcag

SEQ ID NO: 226244 - DNA, 25 bp, Probe sequence
gaaggtttagcgcaagccatagtga

SEQ ID NO: 226245 - DNA, 25 bp, Probe sequence
gaaggtgctatcgatgcttcgaata

SEQ ID NO: 226246 - DNA, 25 bp, Probe sequence
gagatcgttacgaagcacaccatcg

SEQ ID NO: 226247 - DNA, 25 bp, Probe sequence
gagtcatacgacacctaataattta

SEQ ID NO: 226248 - DNA, 25 bp, Probe sequence
gatgatgcgatgatccgtgtagaca

SEQ ID NO: 226249 - DNA, 25 bp, Probe sequence
gttgcaggtactaaatatcgtggtg

SEQ ID NO: 226250 - DNA, 25 bp, Probe sequence
gtttcagatcgtttcttaccagata

SEQ ID NO: 226251 - DNA, 25 bp, Probe sequence
gtattggtgctactacattagatga

SEQ ID NO: 226252 - DNA, 25 bp, Probe sequence
gtacattgcattatacacctagagc

SEQ ID NO: 226253 - DNA, 25 bp, Probe sequence
gtgcaagaccattaattagagcgat

SEQ ID NO: 226254 - DNA, 25 bp, Probe sequence
gtgcacagcgcgtattagcacatgc

SEQ ID NO: 226255 - DNA, 25 bp, Probe sequence
ggtgctggtggtgctgaaggtgcta

SEQ ID NO: 226256 - DNA, 25 bp, Probe sequence
ggacaggtatcccattaactaaaat

SEQ ID NO: 226257 - DNA, 25 bp, Probe sequence
tagtttagctcgtgacttaacagtc

SEQ ID NO: 226258 - DNA, 25 bp, Probe sequence
tagacgtgcccgtgcagggttaaaa

SEQ ID NO: 226259 - DNA, 25 bp, Probe sequence
taacagtcattgccaaagacggtac

SEQ ID NO: 226260 - DNA, 25 bp, Probe sequence
aaaagaaccaagagatagcccctag

SEQ ID NO: 226261 - DNA, 25 bp, Probe sequence
atagcccctagaaattgtaaaatag

SEQ ID NO: 226262 - DNA, 25 bp, Probe sequence
atgacgctaatgtaaaaggtgtaaa

SEQ ID NO: 226263 - DNA, 25 bp, Probe sequence
aggtgtaaattgtgtgagcgataat

SEQ ID NO: 226264 - DNA, 25 bp, Probe sequence
agatagcccctagaaattgtaaaat

SEQ ID NO: 226265 - DNA, 25 bp, Probe sequence
agaaccaagagatagcccctagaaa

SEQ ID NO: 226266 - DNA, 25 bp, Probe sequence
agagatagcccctagaaattgtaaa

SEQ ID NO: 226267 - DNA, 25 bp, Probe sequence
agaagaaattctaaaactcatataa

SEQ ID NO: 226268 - DNA, 25 bp, Probe sequence
accaagagatagcccctagaaattg

SEQ ID NO: 226269 - DNA, 25 bp, Probe sequence
aaatgacgctaatgtaaaaggtgta

SEQ ID NO: 226270 - DNA, 25 bp, Probe sequence
aaagaaccaagagatagcccctaga

SEQ ID NO: 226271 - DNA, 25 bp, Probe sequence
aaaggtgtaaattgtgtgagcgata

SEQ ID NO: 226272 - DNA, 25 bp, Probe sequence
aagaaccaagagatagcccctagaa

SEQ ID NO: 226273 - DNA, 25 bp, Probe sequence
aaaaggtgtaaattgtgtgagcgat

SEQ ID NO: 226274 - DNA, 25 bp, Probe sequence
aaccaagagatagcccctagaaatt

SEQ ID NO: 226275 - DNA, 25 bp, Probe sequence
aagagatagcccctagaaattgtaa

SEQ ID NO: 226276 - DNA, 25 bp, Probe sequence
aaggtgtaaattgtgtgagcgataa

SEQ ID NO: 226277 - DNA, 25 bp, Probe sequence
aattgaagttataaatgacgctaat

SEQ ID NO: 226278 - DNA, 25 bp, Probe sequence
aattgtgtgagcgataatatcaatg

SEQ ID NO: 226279 - DNA, 25 bp, Probe sequence
caagagatagcccctagaaattgta

SEQ ID NO: 226280 - DNA, 25 bp, Probe sequence
ccaagagatagcccctagaaattgt

SEQ ID NO: 226281 - DNA, 25 bp, Probe sequence
gcccctagaaattgtaaaatagcag

SEQ ID NO: 226282 - DNA, 25 bp, Probe sequence
gaagttataaatgacgctaatgtaa

SEQ ID NO: 226283 - DNA, 25 bp, Probe sequence
gaaccaagagatagcccctagaaat

SEQ ID NO: 226284 - DNA, 25 bp, Probe sequence
gagatagcccctagaaattgtaaaa

SEQ ID NO: 226285 - DNA, 25 bp, Probe sequence
gatagcccctagaaattgtaaaata

SEQ ID NO: 226286 - DNA, 25 bp, Probe sequence
gtaaaaggtgtaaattgtgtgagcg

SEQ ID NO: 226287 - DNA, 25 bp, Probe sequence
gtaaattgtgtgagcgataatatca

SEQ ID NO: 226288 - DNA, 25 bp, Probe sequence
gtgtaaattgtgtgagcgataatat

SEQ ID NO: 226289 - DNA, 25 bp, Probe sequence
gtgtgagcgataatatcaatgataa

SEQ ID NO: 226290 - DNA, 25 bp, Probe sequence
ggtgtaaattgtgtgagcgataata

SEQ ID NO: 226291 - DNA, 25 bp, Probe sequence
tgacgctaatgtaaaaggtgtaaat

SEQ ID NO: 226292 - DNA, 25 bp, Probe sequence
tgaagttataaatgacgctaatgta

SEQ ID NO: 226293 - DNA, 25 bp, Probe sequence
tagcccctagaaattgtaaaatagc

SEQ ID NO: 226294 - DNA, 25 bp, Probe sequence
attgcaacttttatagtgggtcatg

SEQ ID NO: 226295 - DNA, 25 bp, Probe sequence
aggcggatggacatatcctgaaggt

SEQ ID NO: 226296 - DNA, 25 bp, Probe sequence
acaacgccgagagtgttaacagatt

SEQ ID NO: 226297 - DNA, 25 bp, Probe sequence
caacgacttttaacaatccgagacg

SEQ ID NO: 226298 - DNA, 25 bp, Probe sequence
aagtttgttgatggctgttttggaa

SEQ ID NO: 226299 - DNA, 25 bp, Probe sequence
caagcgctggtaactccaacgactt

SEQ ID NO: 226300 - DNA, 25 bp, Probe sequence
cttatatcaaagtagctggcggtgt

SEQ ID NO: 226301 - DNA, 25 bp, Probe sequence
gcgccaggttctgtttcacaagttc

SEQ ID NO: 226302 - DNA, 25 bp, Probe sequence
gcggtgtaaagttaacggagccagc

SEQ ID NO: 226303 - DNA, 25 bp, Probe sequence
gctggcccaagattgctagaacaca

SEQ ID NO: 226304 - DNA, 25 bp, Probe sequence
gctgtcgacggattagattgctata

SEQ ID NO: 226305 - DNA, 25 bp, Probe sequence
gcaagaggctgcaaaactaggtttc

SEQ ID NO: 226306 - DNA, 25 bp, Probe sequence
gaaggcgatgaacaccacgcatatc

SEQ ID NO: 226307 - DNA, 25 bp, Probe sequence
gaaggtcaaattgctggcccaagat

SEQ ID NO: 226308 - DNA, 25 bp, Probe sequence
gaacaccacgcatatcgaattttgc

SEQ ID NO: 226309 - DNA, 25 bp, Probe sequence
gaaaaagcagccaatcctaaacatg

SEQ ID NO: 226310 - DNA, 25 bp, Probe sequence
gagcggatcgttagtacttattggt

SEQ ID NO: 226311 - DNA, 25 bp, Probe sequence
gatttttgaatgtatggcttgtggt

SEQ ID NO: 226312 - DNA, 25 bp, Probe sequence
gttcaacaaatgttccaggttcaac

SEQ ID NO: 226313 - DNA, 25 bp, Probe sequence
gtatctcggatagaacaacgcgtgc

SEQ ID NO: 226314 - DNA, 25 bp, Probe sequence
gtcagactaaattacgtgcagagcg

SEQ ID NO: 226315 - DNA, 25 bp, Probe sequence
ggtggaggtattgtgagcggatcgt

SEQ ID NO: 226316 - DNA, 25 bp, Probe sequence
gtggcgcttggaatcaaatggagga

SEQ ID NO: 226317 - DNA, 25 bp, Probe sequence
gtggggatccaggtattggtaagtc

SEQ ID NO: 226318 - DNA, 25 bp, Probe sequence
ggtgaggtacgtcgtgtatctcgga

SEQ ID NO: 226319 - DNA, 25 bp, Probe sequence
ggagaagaatcgcttagtcagacta

SEQ ID NO: 226320 - DNA, 25 bp, Probe sequence
ggagccagcagttgatttaagtgta

SEQ ID NO: 226321 - DNA, 25 bp, Probe sequence
ggaaatgtcctaattgtggcgcttg

SEQ ID NO: 226322 - DNA, 25 bp, Probe sequence
ggcttgtggttatcaatctcctaaa

SEQ ID NO: 226323 - DNA, 25 bp, Probe sequence
tcatcctgaaatcagctctgcgcca

SEQ ID NO: 226324 - DNA, 25 bp, Probe sequence
tcaacaattgttgcaaccatggagg

SEQ ID NO: 226325 - DNA, 25 bp, Probe sequence
tacaaatttgtgcatcgttatctca

SEQ ID NO: 226326 - DNA, 25 bp, Probe sequence
tagaacaacgcgtgcaagaggctgc

SEQ ID NO: 226327 - DNA, 25 bp, Probe sequence
ttgcgagctgttaaaaaccgttttg

SEQ ID NO: 226328 - DNA, 25 bp, Probe sequence
attagacgagttactaacgctataa

SEQ ID NO: 226329 - DNA, 25 bp, Probe sequence
atttcattcctgtcataattacgat

SEQ ID NO: 226330 - DNA, 25 bp, Probe sequence
atcctacaaaggttatacatccaac

SEQ ID NO: 226331 - DNA, 25 bp, Probe sequence
agtgctgttgaaatactattcgcaa

SEQ ID NO: 226332 - DNA, 25 bp, Probe sequence
agcttattgcaaacatcttcaggaa

SEQ ID NO: 226333 - DNA, 25 bp, Probe sequence
actctatttttaatcatttcattcc

SEQ ID NO: 226334 - DNA, 25 bp, Probe sequence
aaatcactatgtagatggcattatc

SEQ ID NO: 226335 - DNA, 25 bp, Probe sequence
aaaaatcttattggcagtcatgtca

SEQ ID NO: 226336 - DNA, 25 bp, Probe sequence
aattgttgcagattcaaatgacagt

SEQ ID NO: 226337 - DNA, 25 bp, Probe sequence
caaaaattatcgacacaagcgcaat

SEQ ID NO: 226338 - DNA, 25 bp, Probe sequence
cttcaggaagaattgtttttgctaa

SEQ ID NO: 226339 - DNA, 25 bp, Probe sequence
cgcgttccatgtcacaacatactaa

SEQ ID NO: 226340 - DNA, 25 bp, Probe sequence
gcggttttatcgatggcaatatttt

SEQ ID NO: 226341 - DNA, 25 bp, Probe sequence
gaatatagcgcgttccatgtcacaa

SEQ ID NO: 226342 - DNA, 25 bp, Probe sequence
gaagtcattcgttgcggttttatcg

SEQ ID NO: 226343 - DNA, 25 bp, Probe sequence
gaagcaatcaaacctaatgtacatc

SEQ ID NO: 226344 - DNA, 25 bp, Probe sequence
gaaatgttaatgtttttacctgaga

SEQ ID NO: 226345 - DNA, 25 bp, Probe sequence
gacacaagcgcaattattgatggtc

SEQ ID NO: 226346 - DNA, 25 bp, Probe sequence
gatggcattatcggtagtattttta

SEQ ID NO: 226347 - DNA, 25 bp, Probe sequence
gatatctagatgatggtacgatggt

SEQ ID NO: 226348 - DNA, 25 bp, Probe sequence
gttatacatccaactaaaacacata

SEQ ID NO: 226349 - DNA, 25 bp, Probe sequence
ggcagtcatgtcaatttagaagtag

SEQ ID NO: 226350 - DNA, 25 bp, Probe sequence
tggattacaaaactccagcttttta

SEQ ID NO: 226351 - DNA, 25 bp, Probe sequence
tattactatgttatttcggtttcca

SEQ ID NO: 226352 - DNA, 25 bp, Probe sequence
taatcggattacttatttctgttat

SEQ ID NO: 226353 - DNA, 25 bp, Probe sequence
tatgttatttcggtttccaatttgg

SEQ ID NO: 226354 - DNA, 25 bp, Probe sequence
tatgttcttaatttttggtgtattt

SEQ ID NO: 226355 - DNA, 25 bp, Probe sequence
tatcggtagtatttttatgttctta

SEQ ID NO: 226356 - DNA, 25 bp, Probe sequence
tattatgcgtagaagtgctgttgaa

SEQ ID NO: 226357 - DNA, 25 bp, Probe sequence
tattgatggtcgtattttagaagtc

SEQ ID NO: 226358 - DNA, 25 bp, Probe sequence
tattcctgaaattgcaaatgatctt

SEQ ID NO: 226359 - DNA, 25 bp, Probe sequence
tttacttaattattgggagcgcatt

SEQ ID NO: 226360 - DNA, 25 bp, Probe sequence
ttatttctgttatggtgtcgtttat

SEQ ID NO: 226361 - DNA, 25 bp, Probe sequence
ttacctgagaatatagcgcgttcca

SEQ ID NO: 226362 - DNA, 25 bp, Probe sequence
attgttatcattattttcttttcca

SEQ ID NO: 226363 - DNA, 25 bp, Probe sequence
attcgcataccttccaaactataat

SEQ ID NO: 226364 - DNA, 25 bp, Probe sequence
atcattattttcttttccataggtt

SEQ ID NO: 226365 - DNA, 25 bp, Probe sequence
aggtttgattttaactacgcatata

SEQ ID NO: 226366 - DNA, 25 bp, Probe sequence
acattgttatcattattttcttttc

SEQ ID NO: 226367 - DNA, 25 bp, Probe sequence
aacattgttatcattattttctttt

SEQ ID NO: 226368 - DNA, 25 bp, Probe sequence
cataccttccaaactataattttat

SEQ ID NO: 226369 - DNA, 25 bp, Probe sequence
cattattttcttttccataggtttg

SEQ ID NO: 226370 - DNA, 25 bp, Probe sequence
cattgttatcattattttcttttcc

SEQ ID NO: 226371 - DNA, 25 bp, Probe sequence
cttaacattgttatcattattttct

SEQ ID NO: 226372 - DNA, 25 bp, Probe sequence
ctattcgcataccttccaaactata

SEQ ID NO: 226373 - DNA, 25 bp, Probe sequence
cgcataccttccaaactataatttt

SEQ ID NO: 226374 - DNA, 25 bp, Probe sequence
gcataccttccaaactataatttta

SEQ ID NO: 226375 - DNA, 25 bp, Probe sequence
gattttaactacgcatataattata

SEQ ID NO: 226376 - DNA, 25 bp, Probe sequence
gttatcattattttcttttccatag

SEQ ID NO: 226377 - DNA, 25 bp, Probe sequence
gtttgattttaactacgcatataat

SEQ ID NO: 226378 - DNA, 25 bp, Probe sequence
ggtttgattttaactacgcatataa

SEQ ID NO: 226379 - DNA, 25 bp, Probe sequence
tgttatcattattttcttttccata

SEQ ID NO: 226380 - DNA, 25 bp, Probe sequence
tcgcataccttccaaactataattt

SEQ ID NO: 226381 - DNA, 25 bp, Probe sequence
tcattattttcttttccataggttt

SEQ ID NO: 226382 - DNA, 25 bp, Probe sequence
taaaattaagagcaacacgaaatga

SEQ ID NO: 226383 - DNA, 25 bp, Probe sequence
taacattgttatcattattttcttt

SEQ ID NO: 226384 - DNA, 25 bp, Probe sequence
tagataaaattaagagcaacacgaa

SEQ ID NO: 226385 - DNA, 25 bp, Probe sequence
tatcattattttcttttccataggt

SEQ ID NO: 226386 - DNA, 25 bp, Probe sequence
tattttcttttccataggtttgatt

SEQ ID NO: 226387 - DNA, 25 bp, Probe sequence
tattcgcataccttccaaactataa

SEQ ID NO: 226388 - DNA, 25 bp, Probe sequence
tttgattttaactacgcatataatt

SEQ ID NO: 226389 - DNA, 25 bp, Probe sequence
ttattttcttttccataggtttgat

SEQ ID NO: 226390 - DNA, 25 bp, Probe sequence
ttatcattattttcttttccatagg

SEQ ID NO: 226391 - DNA, 25 bp, Probe sequence
ttaacattgttatcattattttctt

SEQ ID NO: 226392 - DNA, 25 bp, Probe sequence
ttaactacgcatataattatagata

SEQ ID NO: 226393 - DNA, 25 bp, Probe sequence
ttcgcataccttccaaactataatt

SEQ ID NO: 226394 - DNA, 25 bp, Probe sequence
ttgattttaactacgcatataatta

SEQ ID NO: 226395 - DNA, 25 bp, Probe sequence
ttgttatcattattttcttttccat

SEQ ID NO: 226396 - DNA, 25 bp, Probe sequence
attgagcaatatcgtgacttaggtt

SEQ ID NO: 226397 - DNA, 25 bp, Probe sequence
attccaattagcattacctcattta

SEQ ID NO: 226398 - DNA, 25 bp, Probe sequence
atttgattcctgaggtgccgtcaga

SEQ ID NO: 226399 - DNA, 25 bp, Probe sequence
atggtattggtgactgggttatcgt

SEQ ID NO: 226400 - DNA, 25 bp, Probe sequence
agccacctcgttttggtcatatgtc

SEQ ID NO: 226401 - DNA, 25 bp, Probe sequence
aaatcgctcgtggtgaaatgcctcg

SEQ ID NO: 226402 - DNA, 25 bp, Probe sequence
aacatgcgcatttgactgaagaaca

SEQ ID NO: 226403 - DNA, 25 bp, Probe sequence
aacgtcaacatatctaccaaccatt

SEQ ID NO: 226404 - DNA, 25 bp, Probe sequence
aatgacgcacttattcagtaaatta

SEQ ID NO: 226405 - DNA, 25 bp, Probe sequence
aatcaccagcatttttcgataagca

SEQ ID NO: 226406 - DNA, 25 bp, Probe sequence
cgtggtgaaatgcctcgctatggtg

SEQ ID NO: 226407 - DNA, 25 bp, Probe sequence
cgtgttgctgtaacaggccaaatgc

SEQ ID NO: 226408 - DNA, 25 bp, Probe sequence
gccggtgaaattgtacctttatcag

SEQ ID NO: 226409 - DNA, 25 bp, Probe sequence
gcaagcaattatttatgcctattcg

SEQ ID NO: 226410 - DNA, 25 bp, Probe sequence
gcaagtaccagagttaatgacgcac

SEQ ID NO: 226411 - DNA, 25 bp, Probe sequence
gaagcatttggctgggagccacctc

SEQ ID NO: 226412 - DNA, 25 bp, Probe sequence
gaagcagaaggacgccaaccatcaa

SEQ ID NO: 226413 - DNA, 25 bp, Probe sequence
gaagcgttatttaattttattgcgt

SEQ ID NO: 226414 - DNA, 25 bp, Probe sequence
gaacagcattattcaattacttgta

SEQ ID NO: 226415 - DNA, 25 bp, Probe sequence
gacaatggctacggaccatatcgtc

SEQ ID NO: 226416 - DNA, 25 bp, Probe sequence
gacttaggttatttacctgaagcgt

SEQ ID NO: 226417 - DNA, 25 bp, Probe sequence
gaggtgccgtcagaagaggatttat

SEQ ID NO: 226418 - DNA, 25 bp, Probe sequence
gaggatttatcttggggacgcaaat

SEQ ID NO: 226419 - DNA, 25 bp, Probe sequence
gatcatatttcaaacacgcctaaac

SEQ ID NO: 226420 - DNA, 25 bp, Probe sequence
gtaagatatgcaccaagtccaactg

SEQ ID NO: 226421 - DNA, 25 bp, Probe sequence
ggacgccaaccatcaattcgtttcc

SEQ ID NO: 226422 - DNA, 25 bp, Probe sequence
ggaccatatcgtcaatctgaacgtc

SEQ ID NO: 226423 - DNA, 25 bp, Probe sequence
ggcattccaacgtacaattttgcag

SEQ ID NO: 226424 - DNA, 25 bp, Probe sequence
ggccaaatgcatggtcctgaattac

SEQ ID NO: 226425 - DNA, 25 bp, Probe sequence
tcaattcgtttccgagtacctcaaa

SEQ ID NO: 226426 - DNA, 25 bp, Probe sequence
taggttggtctcctgaaggtgaaga

SEQ ID NO: 226427 - DNA, 25 bp, Probe sequence
ttattgcgttattaggttggtctcc

SEQ ID NO: 226428 - DNA, 25 bp, Probe sequence
ttatgcctattcgtgttgctgtaac

SEQ ID NO: 226429 - DNA, 25 bp, Probe sequence
ttaaagaaatgccagctcttggtga

SEQ ID NO: 226430 - DNA, 25 bp, Probe sequence
attggtgcaaattcagttgttttac

SEQ ID NO: 226431 - DNA, 25 bp, Probe sequence
attacaacgtatgcaggtttacatg

SEQ ID NO: 226432 - DNA, 25 bp, Probe sequence
atccagcggcacgttcaacattaga

SEQ ID NO: 226433 - DNA, 25 bp, Probe sequence
atgtgacaatctatcaaggcgtgac

SEQ ID NO: 226434 - DNA, 25 bp, Probe sequence
aaatatgttgcagcacgcgcgatat

SEQ ID NO: 226435 - DNA, 25 bp, Probe sequence
aaacatttgatcatcgccatctacc

SEQ ID NO: 226436 - DNA, 25 bp, Probe sequence
aacggttgttggtataccaggacat

SEQ ID NO: 226437 - DNA, 25 bp, Probe sequence
aagacacccagatataggagacaat

SEQ ID NO: 226438 - DNA, 25 bp, Probe sequence
aaggcgtgacacttggtgggacagg

SEQ ID NO: 226439 - DNA, 25 bp, Probe sequence
aatttcaagatttttcacaggtata

SEQ ID NO: 226440 - DNA, 25 bp, Probe sequence
aattggaaagcgtctatttatagat

SEQ ID NO: 226441 - DNA, 25 bp, Probe sequence
cacaggtatagaaatccatccaggt

SEQ ID NO: 226442 - DNA, 25 bp, Probe sequence
caggtttacatgcagtttggagtca

SEQ ID NO: 226443 - DNA, 25 bp, Probe sequence
cgccatctacctgatccaatttatg

SEQ ID NO: 226444 - DNA, 25 bp, Probe sequence
gcacgcgcgatatctcaaatttcaa

SEQ ID NO: 226445 - DNA, 25 bp, Probe sequence
gaagtcattacaacgtatgcaggtt

SEQ ID NO: 226446 - DNA, 25 bp, Probe sequence
gttccaagttattcaacggttgttg

SEQ ID NO: 226447 - DNA, 25 bp, Probe sequence
gaaatccatccaggtgctaaaattg

SEQ ID NO: 226448 - DNA, 25 bp, Probe sequence
gttgttttacaatcagttccaagtt

SEQ ID NO: 226449 - DNA, 25 bp, Probe sequence
gattgcacataagttatacaaccaa

SEQ ID NO: 226450 - DNA, 25 bp, Probe sequence
gtttggagtcatttgattgcacata

SEQ ID NO: 226451 - DNA, 25 bp, Probe sequence
gtatttgagcaggatccagcggcac

SEQ ID NO: 226452 - DNA, 25 bp, Probe sequence
gtgacacttggtgggacagggaaag

SEQ ID NO: 226453 - DNA, 25 bp, Probe sequence
ggtatgggcgttgtaataggagaaa

SEQ ID NO: 226454 - DNA, 25 bp, Probe sequence
ggtataccaggacatattgttaagc

SEQ ID NO: 226455 - DNA, 25 bp, Probe sequence
ggagaaacatgtacaattggtgata

SEQ ID NO: 226456 - DNA, 25 bp, Probe sequence
ggcacgttcaacattagaagtcatt

SEQ ID NO: 226457 - DNA, 25 bp, Probe sequence
tgcagcacgcgcgatatctcaaatt

SEQ ID NO: 226458 - DNA, 25 bp, Probe sequence
tctacctgatccaatttatgaacaa

SEQ ID NO: 226459 - DNA, 25 bp, Probe sequence
taagcatttagaacgacaacttgaa

SEQ ID NO: 226460 - DNA, 25 bp, Probe sequence
taagcaagatggtgttcgagttgga

SEQ ID NO: 226461 - DNA, 25 bp, Probe sequence
taggagacaatgttttaatagcagc

SEQ ID NO: 226462 - DNA, 25 bp, Probe sequence
tatagatcatggtatgggcgttgta

SEQ ID NO: 226463 - DNA, 25 bp, Probe sequence
tttgatcatcgccatctacctgatc

SEQ ID NO: 226464 - DNA, 25 bp, Probe sequence
attactgggcatccgataaataaga

SEQ ID NO: 226465 - DNA, 25 bp, Probe sequence
atatgaatatgctgacttcgatcaa

SEQ ID NO: 226466 - DNA, 25 bp, Probe sequence
atgcgatttttatattaagattcca

SEQ ID NO: 226467 - DNA, 25 bp, Probe sequence
atgtaaacagtttgaatgcttcggt

SEQ ID NO: 226468 - DNA, 25 bp, Probe sequence
agcgattattactgggcatccgata

SEQ ID NO: 226469 - DNA, 25 bp, Probe sequence
agcgcttattgcaccatatgaatat

SEQ ID NO: 226470 - DNA, 25 bp, Probe sequence
acagtttgaatgcttcggttgcagc

SEQ ID NO: 226471 - DNA, 25 bp, Probe sequence
acttgggatcaattttaagaacagc

SEQ ID NO: 226472 - DNA, 25 bp, Probe sequence
acaggtgcaattgaacatgtaccag

SEQ ID NO: 226473 - DNA, 25 bp, Probe sequence
aacgtcgttcagttacactaacgca

SEQ ID NO: 226474 - DNA, 25 bp, Probe sequence
aacgcaaacagttgcaaaagcctca

SEQ ID NO: 226475 - DNA, 25 bp, Probe sequence
cagttacactaacgcaaacagttgc

SEQ ID NO: 226476 - DNA, 25 bp, Probe sequence
gatggtgttattattcctaaacgtc

SEQ ID NO: 226477 - DNA, 25 bp, Probe sequence
gcaaaagcctcaacaggtgcaattg

SEQ ID NO: 226478 - DNA, 25 bp, Probe sequence
gaagcggacatgtcattggctattg

SEQ ID NO: 226479 - DNA, 25 bp, Probe sequence
gaacatgtaccagttattcgagtga

SEQ ID NO: 226480 - DNA, 25 bp, Probe sequence
gacatgtcattggctattgtaattg

SEQ ID NO: 226481 - DNA, 25 bp, Probe sequence
gacttcgatcaatttttaaaacagc

SEQ ID NO: 226482 - DNA, 25 bp, Probe sequence
gatgcaacgggagttgatggtgtta

SEQ ID NO: 226483 - DNA, 25 bp, Probe sequence
gattttttagcaaatgcaccacatc

SEQ ID NO: 226484 - DNA, 25 bp, Probe sequence
gttgcagcgcttattgcaccatatg

SEQ ID NO: 226485 - DNA, 25 bp, Probe sequence
gttgcagcaagtttaatgatgtacg

SEQ ID NO: 226486 - DNA, 25 bp, Probe sequence
gttattattcctaaacgtcgttcag

SEQ ID NO: 226487 - DNA, 25 bp, Probe sequence
gtaggcatgctgttagagaagcgat

SEQ ID NO: 226488 - DNA, 25 bp, Probe sequence
gtaccagttattcgagtgacaaatt

SEQ ID NO: 226489 - DNA, 25 bp, Probe sequence
gtggaagatacggttattgttggta

SEQ ID NO: 226490 - DNA, 25 bp, Probe sequence
ggttattgttggtaggcatgctgtt

SEQ ID NO: 226491 - DNA, 25 bp, Probe sequence
ggcactgaagctaataatgcaacag

SEQ ID NO: 226492 - DNA, 25 bp, Probe sequence
tgttcaaactgtaccaaaatctaaa

SEQ ID NO: 226493 - DNA, 25 bp, Probe sequence
tattcgagtgacaaatttagctaaa

SEQ ID NO: 226494 - DNA, 25 bp, Probe sequence
tttgggtagctggcactgaagctaa

SEQ ID NO: 226495 - DNA, 25 bp, Probe sequence
tttagctaaaactatcgatgaacta

SEQ ID NO: 226496 - DNA, 25 bp, Probe sequence
ttttagcaaatgcaccacatcaggg

SEQ ID NO: 226497 - DNA, 25 bp, Probe sequence
ttgaatgcttcggttgcagcaagtt

SEQ ID NO: 226498 - DNA, 25 bp, Probe sequence
ataatgcagttatttcagatgaaat

SEQ ID NO: 226499 - DNA, 25 bp, Probe sequence
atcaccaacgctaagcgccattgca

SEQ ID NO: 226500 - DNA, 25 bp, Probe sequence
agaatatcatctcgcgaaatgtgga

SEQ ID NO: 226501 - DNA, 25 bp, Probe sequence
agaacgttacttaatcattgatgga

SEQ ID NO: 226502 - DNA, 25 bp, Probe sequence
agaagaagctagaatgcaattaata

SEQ ID NO: 226503 - DNA, 25 bp, Probe sequence
actcgaattccgttatcttctgaaa

SEQ ID NO: 226504 - DNA, 25 bp, Probe sequence
aaatacgaagaggacatcataagaa

SEQ ID NO: 226505 - DNA, 25 bp, Probe sequence
aacaagccaagaactcgaattccgt

SEQ ID NO: 226506 - DNA, 25 bp, Probe sequence
aacatgctatctttggatcaggtgc

SEQ ID NO: 226507 - DNA, 25 bp, Probe sequence
aacgctaagcgccattgcaaaagag

SEQ ID NO: 226508 - DNA, 25 bp, Probe sequence
aagcgccattgcaaaagagaattta

SEQ ID NO: 226509 - DNA, 25 bp, Probe sequence
aattatttgtgttttcgatgcttat

SEQ ID NO: 226510 - DNA, 25 bp, Probe sequence
cgttatcttctgaaatccttgcaga

SEQ ID NO: 226511 - DNA, 25 bp, Probe sequence
gccaagaactcgaattccgttatct

SEQ ID NO: 226512 - DNA, 25 bp, Probe sequence
gctatctttggatcaggtgcatata

SEQ ID NO: 226513 - DNA, 25 bp, Probe sequence
gcttatgaccaatcgggtgttgaaa

SEQ ID NO: 226514 - DNA, 25 bp, Probe sequence
gaattccgttatcttctgaaatcct

SEQ ID NO: 226515 - DNA, 25 bp, Probe sequence
gaactcgaattccgttatcttctga

SEQ ID NO: 226516 - DNA, 25 bp, Probe sequence
gacaatcaccaacgctaagcgccat

SEQ ID NO: 226517 - DNA, 25 bp, Probe sequence
gaccaatcgggtgttgaaagagaat

SEQ ID NO: 226518 - DNA, 25 bp, Probe sequence
gagaatacatgtatcatggcgttaa

SEQ ID NO: 226519 - DNA, 25 bp, Probe sequence
gagcaacatgctatctttggatcag

SEQ ID NO: 226520 - DNA, 25 bp, Probe sequence
gagtgagcaacatgctatctttgga

SEQ ID NO: 226521 - DNA, 25 bp, Probe sequence
gatggatacaatatgataggacaat

SEQ ID NO: 226522 - DNA, 25 bp, Probe sequence
gatgcttatgaccaatcgggtgttg

SEQ ID NO: 226523 - DNA, 25 bp, Probe sequence
gataggacaatcaccaacgctaagc

SEQ ID NO: 226524 - DNA, 25 bp, Probe sequence
gtaacaagtgatatgagtgagcaac

SEQ ID NO: 226525 - DNA, 25 bp, Probe sequence
gtgttttcgatgcttatgaccaatc

SEQ ID NO: 226526 - DNA, 25 bp, Probe sequence
ggtgcatatagaatatcatctcgcg

SEQ ID NO: 226527 - DNA, 25 bp, Probe sequence
tccgttatcttctgaaatccttgca

SEQ ID NO: 226528 - DNA, 25 bp, Probe sequence
tctgaaatccttgcagaatttgaaa

SEQ ID NO: 226529 - DNA, 25 bp, Probe sequence
tatcatctcgcgaaatgtggagaga

SEQ ID NO: 226530 - DNA, 25 bp, Probe sequence
tttgtgttttcgatgcttatgacca

SEQ ID NO: 226531 - DNA, 25 bp, Probe sequence
aacagctgatagtttcatagaacgt

SEQ ID NO: 226532 - DNA, 25 bp, Probe sequence
atataagccgagagaaattgctcaa

SEQ ID NO: 226533 - DNA, 25 bp, Probe sequence
atatcaagaaatacttatacggatg

SEQ ID NO: 226534 - DNA, 25 bp, Probe sequence
atcaaaacatttggatttaatcatt

SEQ ID NO: 226535 - DNA, 25 bp, Probe sequence
atgttcaatgtttaattacgtctgt

SEQ ID NO: 226536 - DNA, 25 bp, Probe sequence
atgtgtgaacaatataagccgagag

SEQ ID NO: 226537 - DNA, 25 bp, Probe sequence
agagcagcctttcacaaattatgtt

SEQ ID NO: 226538 - DNA, 25 bp, Probe sequence
agacagtacaatcaaacgtaacaat

SEQ ID NO: 226539 - DNA, 25 bp, Probe sequence
acgtatccatgtgcaataaagcgtt

SEQ ID NO: 226540 - DNA, 25 bp, Probe sequence
acggatgtataggtcggtccaaaca

SEQ ID NO: 226541 - DNA, 25 bp, Probe sequence
acgtctgtaaagtatgattatttga

SEQ ID NO: 226542 - DNA, 25 bp, Probe sequence
aaagttagtaatggatctacaacca

SEQ ID NO: 226543 - DNA, 25 bp, Probe sequence
aactcaagacagtacaatcaaacgt

SEQ ID NO: 226544 - DNA, 25 bp, Probe sequence
gcctttcacaaattatgttcaatgt

SEQ ID NO: 226545 - DNA, 25 bp, Probe sequence
gacttcgaaaagttagtaatggatc

SEQ ID NO: 226546 - DNA, 25 bp, Probe sequence
gcagcctttcacaaattatgttcaa

SEQ ID NO: 226547 - DNA, 25 bp, Probe sequence
gaatatagagttacgtatccatgtg

SEQ ID NO: 226548 - DNA, 25 bp, Probe sequence
gtcggtccaaacatttgattttagt

SEQ ID NO: 226549 - DNA, 25 bp, Probe sequence
gagaaagtgatttataatgccatac

SEQ ID NO: 226550 - DNA, 25 bp, Probe sequence
gagttacgtatccatgtgcaataaa

SEQ ID NO: 226551 - DNA, 25 bp, Probe sequence
gatgtcatgtatttaatgtgtgaac

SEQ ID NO: 226552 - DNA, 25 bp, Probe sequence
gatttgacaactcaagacagtacaa

SEQ ID NO: 226553 - DNA, 25 bp, Probe sequence
gttcaatgtttaattacgtctgtaa

SEQ ID NO: 226554 - DNA, 25 bp, Probe sequence
gttacgtatccatgtgcaataaagc

SEQ ID NO: 226555 - DNA, 25 bp, Probe sequence
gtataggtcggtccaaacatttgat

SEQ ID NO: 226556 - DNA, 25 bp, Probe sequence
gtaatggatctacaaccattaatta

SEQ ID NO: 226557 - DNA, 25 bp, Probe sequence
gtgatttataatgccatacaacgat

SEQ ID NO: 226558 - DNA, 25 bp, Probe sequence
ggatgtataggtcggtccaaacatt

SEQ ID NO: 226559 - DNA, 25 bp, Probe sequence
tgacaactcaagacagtacaatcaa

SEQ ID NO: 226560 - DNA, 25 bp, Probe sequence
taaaacgttatttcaaaatgatttg

SEQ ID NO: 226561 - DNA, 25 bp, Probe sequence
tagagttacgtatccatgtgcaata

SEQ ID NO: 226562 - DNA, 25 bp, Probe sequence
taggtcggtccaaacatttgatttt

SEQ ID NO: 226563 - DNA, 25 bp, Probe sequence
tatacggatgtataggtcggtccaa

SEQ ID NO: 226564 - DNA, 25 bp, Probe sequence
tatagagttacgtatccatgtgcaa

SEQ ID NO: 226565 - DNA, 25 bp, Probe sequence
tttataatgccatacaacgatgtaa

SEQ ID NO: 226566 - DNA, 25 bp, Probe sequence
attcttcttagtctttttctatgcc

SEQ ID NO: 226567 - DNA, 25 bp, Probe sequence
attacagcattgaaaaatttattat

SEQ ID NO: 226568 - DNA, 25 bp, Probe sequence
atattcttcttagtctttttctatg

SEQ ID NO: 226569 - DNA, 25 bp, Probe sequence
atgccttagatttaggaattacagc

SEQ ID NO: 226570 - DNA, 25 bp, Probe sequence
agtctttttctatgccttagattta

SEQ ID NO: 226571 - DNA, 25 bp, Probe sequence
aacaagttggccgacgaaagaagag

SEQ ID NO: 226572 - DNA, 25 bp, Probe sequence
actgttatattcttcttagtctttt

SEQ ID NO: 226573 - DNA, 25 bp, Probe sequence
aagttggccgacgaaagaagagcta

SEQ ID NO: 226574 - DNA, 25 bp, Probe sequence
cttagtctttttctatgccttagat

SEQ ID NO: 226575 - DNA, 25 bp, Probe sequence
cttcttagtctttttctatgcctta

SEQ ID NO: 226576 - DNA, 25 bp, Probe sequence
ctttttctatgccttagatttagga

SEQ ID NO: 226577 - DNA, 25 bp, Probe sequence
ctgttatattcttcttagtcttttt

SEQ ID NO: 226578 - DNA, 25 bp, Probe sequence
gaagagctatttaaatatactgtaa

SEQ ID NO: 226579 - DNA, 25 bp, Probe sequence
gaggttgagcagatggctaaaaaag

SEQ ID NO: 226580 - DNA, 25 bp, Probe sequence
gatttaggaattacagcattgaaaa

SEQ ID NO: 226581 - DNA, 25 bp, Probe sequence
gttggccgacgaaagaagagctatt

SEQ ID NO: 226582 - DNA, 25 bp, Probe sequence
gttatattcttcttagtctttttct

SEQ ID NO: 226583 - DNA, 25 bp, Probe sequence
gtctttttctatgccttagatttag

SEQ ID NO: 226584 - DNA, 25 bp, Probe sequence
ggccgacgaaagaagagctatttaa

SEQ ID NO: 226585 - DNA, 25 bp, Probe sequence
tgttatattcttcttagtctttttc

SEQ ID NO: 226586 - DNA, 25 bp, Probe sequence
tcttagtctttttctatgccttaga

SEQ ID NO: 226587 - DNA, 25 bp, Probe sequence
tcttcttagtctttttctatgcctt

SEQ ID NO: 226588 - DNA, 25 bp, Probe sequence
taaaggcgttaagtctgaaatggaa

SEQ ID NO: 226589 - DNA, 25 bp, Probe sequence
tagatttaggaattacagcattgaa

SEQ ID NO: 226590 - DNA, 25 bp, Probe sequence
tagtctttttctatgccttagattt

SEQ ID NO: 226591 - DNA, 25 bp, Probe sequence
tatattcttcttagtctttttctat

SEQ ID NO: 226592 - DNA, 25 bp, Probe sequence
tattcttcttagtctttttctatgc

SEQ ID NO: 226593 - DNA, 25 bp, Probe sequence
ttttctatgccttagatttaggaat

SEQ ID NO: 226594 - DNA, 25 bp, Probe sequence
ttagtctttttctatgccttagatt

SEQ ID NO: 226595 - DNA, 25 bp, Probe sequence
ttatattcttcttagtctttttcta

SEQ ID NO: 226596 - DNA, 25 bp, Probe sequence
ttaaatatactgtaattgtagtttc

SEQ ID NO: 226597 - DNA, 25 bp, Probe sequence
ttcttagtctttttctatgccttag

SEQ ID NO: 226598 - DNA, 25 bp, Probe sequence
ttcttcttagtctttttctatgcct

SEQ ID NO: 226599 - DNA, 25 bp, Probe sequence
ttggaggttgagcagatggctaaaa

SEQ ID NO: 226600 - DNA, 25 bp, Probe sequence
atgcagtgcatacatattctggata

SEQ ID NO: 226601 - DNA, 25 bp, Probe sequence
atgtctgaagaagttggcgcaaagc

SEQ ID NO: 226602 - DNA, 25 bp, Probe sequence
aggtccatttgcgaatcaagttggt

SEQ ID NO: 226603 - DNA, 25 bp, Probe sequence
agaaaagactatcgatgttgaactc

SEQ ID NO: 226604 - DNA, 25 bp, Probe sequence
accagaagaagttcgcttcatctta

SEQ ID NO: 226605 - DNA, 25 bp, Probe sequence
acaccagtagaagttgaattcgatc

SEQ ID NO: 226606 - DNA, 25 bp, Probe sequence
aagccaaatccattgttaccagaag

SEQ ID NO: 226607 - DNA, 25 bp, Probe sequence
aatctttagagtagtcataccggaa

SEQ ID NO: 226608 - DNA, 25 bp, Probe sequence
aatcaggtccatttgcgaatcaagt

SEQ ID NO: 226609 - DNA, 25 bp, Probe sequence
cattccctggatatgttttagtgga

SEQ ID NO: 226610 - DNA, 25 bp, Probe sequence
gcgaatcaagttggtgaagttcaag

SEQ ID NO: 226611 - DNA, 25 bp, Probe sequence
gcttcatcttaaaacaaatgggtct

SEQ ID NO: 226612 - DNA, 25 bp, Probe sequence
gcaaagcgttggtatgcagtgcata

SEQ ID NO: 226613 - DNA, 25 bp, Probe sequence
gcaagttcgtattaaatcaggtcca

SEQ ID NO: 226614 - DNA, 25 bp, Probe sequence
gaatatgactgaacaaatctttaga

SEQ ID NO: 226615 - DNA, 25 bp, Probe sequence
gaagttcgcttcatcttaaaacaaa

SEQ ID NO: 226616 - DNA, 25 bp, Probe sequence
gaagttggcgagcaagttcgtatta

SEQ ID NO: 226617 - DNA, 25 bp, Probe sequence
gaaactcaagtaaaagatggcaaag

SEQ ID NO: 226618 - DNA, 25 bp, Probe sequence
gacagatgaatcatggtatgtggta

SEQ ID NO: 226619 - DNA, 25 bp, Probe sequence
gatggcaaagctaaaacgactgtta

SEQ ID NO: 226620 - DNA, 25 bp, Probe sequence
gttggcgcaaagcgttggtatgcag

SEQ ID NO: 226621 - DNA, 25 bp, Probe sequence
gttaaaaaaacattccctggatatg

SEQ ID NO: 226622 - DNA, 25 bp, Probe sequence
gttactggttttgtaggttctgcag

SEQ ID NO: 226623 - DNA, 25 bp, Probe sequence
gttttagtggaattaatcatgacag

SEQ ID NO: 226624 - DNA, 25 bp, Probe sequence
gtttggccgagaaacaccagtagaa

SEQ ID NO: 226625 - DNA, 25 bp, Probe sequence
gtagaatctatgaatatgactgaac

SEQ ID NO: 226626 - DNA, 25 bp, Probe sequence
ggtatgtggtaagaaatacaccagg

SEQ ID NO: 226627 - DNA, 25 bp, Probe sequence
ggttttgtaggttctgcaggtgcag

SEQ ID NO: 226628 - DNA, 25 bp, Probe sequence
ggcgcaaagcgttggtatgcagtgc

SEQ ID NO: 226629 - DNA, 25 bp, Probe sequence
ggccgagaaacaccagtagaagttg

SEQ ID NO: 226630 - DNA, 25 bp, Probe sequence
tccattgttaccagaagaagttcgc

SEQ ID NO: 226631 - DNA, 25 bp, Probe sequence
tcgatgttgaactcgaagttggcga

SEQ ID NO: 226632 - DNA, 25 bp, Probe sequence
tctaagccaaatccattgttaccag

SEQ ID NO: 226633 - DNA, 25 bp, Probe sequence
tagtagatatgtttggccgagaaac

SEQ ID NO: 226634 - DNA, 25 bp, Probe sequence
attccggtagaaatcagtgtttatg

SEQ ID NO: 226635 - DNA, 25 bp, Probe sequence
atgcgtattatcgaaggtactgcac

SEQ ID NO: 226636 - DNA, 25 bp, Probe sequence
aggtcaagcaggtgtgaacatcatg

SEQ ID NO: 226637 - DNA, 25 bp, Probe sequence
aggtaaagcgaatccagcaccacca

SEQ ID NO: 226638 - DNA, 25 bp, Probe sequence
agcagctatgcgtattatcgaaggt

SEQ ID NO: 226639 - DNA, 25 bp, Probe sequence
aaatcagtgtttatgaagatcgttc

SEQ ID NO: 226640 - DNA, 25 bp, Probe sequence
aattcctgcaggtaaagcgaatcca

SEQ ID NO: 226641 - DNA, 25 bp, Probe sequence
caagtacgcgaaattgctaacagca

SEQ ID NO: 226642 - DNA, 25 bp, Probe sequence
caagcaggtttaattattccggtag

SEQ ID NO: 226643 - DNA, 25 bp, Probe sequence
caaaactaaagttgctacagtaact

SEQ ID NO: 226644 - DNA, 25 bp, Probe sequence
caccaccagttggtccagcattagg

SEQ ID NO: 226645 - DNA, 25 bp, Probe sequence
caccagttggtccagcattaggtca

SEQ ID NO: 226646 - DNA, 25 bp, Probe sequence
gcaggtgtgaacatcatgggattct

SEQ ID NO: 226647 - DNA, 25 bp, Probe sequence
gcacgtactcaagatcaagcaggtt

SEQ ID NO: 226648 - DNA, 25 bp, Probe sequence
gaagatcgttcatttacatttatta

SEQ ID NO: 226649 - DNA, 25 bp, Probe sequence
gacttaaacgctgctgacgaagaag

SEQ ID NO: 226650 - DNA, 25 bp, Probe sequence
gacgaagaagcagctatgcgtatta

SEQ ID NO: 226651 - DNA, 25 bp, Probe sequence
gatcgttcatttacatttattacaa

SEQ ID NO: 226652 - DNA, 25 bp, Probe sequence
gttggtccagcattaggtcaagcag

SEQ ID NO: 226653 - DNA, 25 bp, Probe sequence
gttcaatgcacgtactcaagatcaa

SEQ ID NO: 226654 - DNA, 25 bp, Probe sequence
gttaaattacaaattcctgcaggta

SEQ ID NO: 226655 - DNA, 25 bp, Probe sequence
gtattacttaaaaaagcagctggta

SEQ ID NO: 226656 - DNA, 25 bp, Probe sequence
gtagtatgggtatcgttgtagaata

SEQ ID NO: 226657 - DNA, 25 bp, Probe sequence
gtactcaagatcaagcaggtttaat

SEQ ID NO: 226658 - DNA, 25 bp, Probe sequence
gtgcacatcgtggctaaaaaagtag

SEQ ID NO: 226659 - DNA, 25 bp, Probe sequence
gtgtgaacatcatgggattctgtaa

SEQ ID NO: 226660 - DNA, 25 bp, Probe sequence
ggtccagcattaggtcaagcaggtg

SEQ ID NO: 226661 - DNA, 25 bp, Probe sequence
ggtactgcacgtagtatgggtatcg

SEQ ID NO: 226662 - DNA, 25 bp, Probe sequence
ggattctgtaaagagttcaatgcac

SEQ ID NO: 226663 - DNA, 25 bp, Probe sequence
tccagcattaggtcaagcaggtgtg

SEQ ID NO: 226664 - DNA, 25 bp, Probe sequence
tgcaagacttaaacgctgctgacga

SEQ ID NO: 226665 - DNA, 25 bp, Probe sequence
tgctaacagcaaaatgcaagactta

SEQ ID NO: 226666 - DNA, 25 bp, Probe sequence
tacatttattacaaaaactccaccg

SEQ ID NO: 226667 - DNA, 25 bp, Probe sequence
tattatcgaaggtactgcacgtagt

SEQ ID NO: 226668 - DNA, 25 bp, Probe sequence
atgccaaaccctaaaactggaactg

SEQ ID NO: 226669 - DNA, 25 bp, Probe sequence
atgaccaacaaatccgtggtgcagt

SEQ ID NO: 226670 - DNA, 25 bp, Probe sequence
aggtgacaaaattgctgaagctgaa

SEQ ID NO: 226671 - DNA, 25 bp, Probe sequence
agtagttgctacaccagacatgatg

SEQ ID NO: 226672 - DNA, 25 bp, Probe sequence
agcactacagtgttgaagaagcaat

SEQ ID NO: 226673 - DNA, 25 bp, Probe sequence
acttcaaatctgttgctgtaactac

SEQ ID NO: 226674 - DNA, 25 bp, Probe sequence
aaagctggtatcgtacatgcatcaa

SEQ ID NO: 226675 - DNA, 25 bp, Probe sequence
aactggaactgtaacaatggatgtt

SEQ ID NO: 226676 - DNA, 25 bp, Probe sequence
caaatccgtggtgcagttgtattac

SEQ ID NO: 226677 - DNA, 25 bp, Probe sequence
ccaacaaggttggttcgacttcgat

SEQ ID NO: 226678 - DNA, 25 bp, Probe sequence
ccatcatctgctaaaggtacatact

SEQ ID NO: 226679 - DNA, 25 bp, Probe sequence
gctaactttgacgcttctgttgaag

SEQ ID NO: 226680 - DNA, 25 bp, Probe sequence
gcttctgttgaagttgcattccgtt

SEQ ID NO: 226681 - DNA, 25 bp, Probe sequence
gcattgctaactttgacgcttctgt

SEQ ID NO: 226682 - DNA, 25 bp, Probe sequence
gacatgatgggtgaagttggtaaat

SEQ ID NO: 226683 - DNA, 25 bp, Probe sequence
gaagcagctagtaaagttgaccgta

SEQ ID NO: 226684 - DNA, 25 bp, Probe sequence
gaaaacttcaatactttacaagatg

SEQ ID NO: 226685 - DNA, 25 bp, Probe sequence
gaccgtactcagcactacagtgttg

SEQ ID NO: 226686 - DNA, 25 bp, Probe sequence
gttgaagttgcattccgtttaggaa

SEQ ID NO: 226687 - DNA, 25 bp, Probe sequence
gttcgacttcgatgtagtagttgct

SEQ ID NO: 226688 - DNA, 25 bp, Probe sequence
gtaggtgaagcagaatacgttcaaa

SEQ ID NO: 226689 - DNA, 25 bp, Probe sequence
gtaactacaacaatgggtcctggag

SEQ ID NO: 226690 - DNA, 25 bp, Probe sequence
tccgtttaggaattgatacacgtaa

SEQ ID NO: 226691 - DNA, 25 bp, Probe sequence
gtgcagttgtattaccaaacggaac

SEQ ID NO: 226692 - DNA, 25 bp, Probe sequence
ggtacatacttcaaatctgttgctg

SEQ ID NO: 226693 - DNA, 25 bp, Probe sequence
ggaactggtaaatcacaaagtgtat

SEQ ID NO: 226694 - DNA, 25 bp, Probe sequence
tgggtcctggagttaaaattgatac

SEQ ID NO: 226695 - DNA, 25 bp, Probe sequence
tggtatcgtacatgcatcaattggt

SEQ ID NO: 226696 - DNA, 25 bp, Probe sequence
tgaagttggtaaattaggtcgtgta

SEQ ID NO: 226697 - DNA, 25 bp, Probe sequence
tgcatcaattggtaaagtttcattt

SEQ ID NO: 226698 - DNA, 25 bp, Probe sequence
tcacaaagtgtattagtattcgcta

SEQ ID NO: 226699 - DNA, 25 bp, Probe sequence
taaagttgaccgtactcagcactac

SEQ ID NO: 226700 - DNA, 25 bp, Probe sequence
tagctaaagctaaaccatcatctgc

SEQ ID NO: 226701 - DNA, 25 bp, Probe sequence
tagtattcgctaaaggtgacaaaat

SEQ ID NO: 226702 - DNA, 25 bp, Probe sequence
attacaagctcctgtacgcaacttc

SEQ ID NO: 226703 - DNA, 25 bp, Probe sequence
atgcggttaaagctattggagaaca

SEQ ID NO: 226704 - DNA, 25 bp, Probe sequence
atgtctgctatcattgaagctaaaa

SEQ ID NO: 226705 - DNA, 25 bp, Probe sequence
atggtcttgtatctatgcttttatc

SEQ ID NO: 226706 - DNA, 25 bp, Probe sequence
accttcacacgatggtcttgtatct

SEQ ID NO: 226707 - DNA, 25 bp, Probe sequence
actgctattgcaacttcaagtgaag

SEQ ID NO: 226708 - DNA, 25 bp, Probe sequence
acacgatggtcttgtatctatgctt

SEQ ID NO: 226709 - DNA, 25 bp, Probe sequence
aaattcagtttcaacagtaatcgtt

SEQ ID NO: 226710 - DNA, 25 bp, Probe sequence
aacactatggtacgtcgtgcagctg

SEQ ID NO: 226711 - DNA, 25 bp, Probe sequence
aacaggtcctactgctattgcaact

SEQ ID NO: 226712 - DNA, 25 bp, Probe sequence
aactgttggttcattaccttcacac

SEQ ID NO: 226713 - DNA, 25 bp, Probe sequence
cacaattacgtgaagctggtgttga

SEQ ID NO: 226714 - DNA, 25 bp, Probe sequence
cttcaagtgaagatgctgtagctgc

SEQ ID NO: 226715 - DNA, 25 bp, Probe sequence
gctggtatcgaaggcttagatgaat

SEQ ID NO: 226716 - DNA, 25 bp, Probe sequence
gctgaagttactgacttacgttcac

SEQ ID NO: 226717 - DNA, 25 bp, Probe sequence
gcaacttcgcttatgcggttaaagc

SEQ ID NO: 226718 - DNA, 25 bp, Probe sequence
gaagctggtgttgagtataaagtat

SEQ ID NO: 226719 - DNA, 25 bp, Probe sequence
gaaagtaatttctggatttgctaaa

SEQ ID NO: 226720 - DNA, 25 bp, Probe sequence
gaggtactatcaaattcagtttcaa

SEQ ID NO: 226721 - DNA, 25 bp, Probe sequence
gatgaattcttaacaggtcctactg

SEQ ID NO: 226722 - DNA, 25 bp, Probe sequence
gttgatgaaattgctgaggtactat

SEQ ID NO: 226723 - DNA, 25 bp, Probe sequence
gttactgacttacgttcacaattac

SEQ ID NO: 226724 - DNA, 25 bp, Probe sequence
gtatctatgcttttatcagtattac

SEQ ID NO: 226725 - DNA, 25 bp, Probe sequence
gtacgcaacttcgcttatgcggtta

SEQ ID NO: 226726 - DNA, 25 bp, Probe sequence
gtgaagatgctgtagctgcagcgaa

SEQ ID NO: 226727 - DNA, 25 bp, Probe sequence
gtggattaacagtagctgaagttac

SEQ ID NO: 226728 - DNA, 25 bp, Probe sequence
ggtcctactgctattgcaacttcaa

SEQ ID NO: 226729 - DNA, 25 bp, Probe sequence
ggttcattaccttcacacgatggtc

SEQ ID NO: 226730 - DNA, 25 bp, Probe sequence
ggaaggcaatgttattacagcagaa

SEQ ID NO: 226731 - DNA, 25 bp, Probe sequence
tggtacgtcgtgcagctgaaaaagc

SEQ ID NO: 226732 - DNA, 25 bp, Probe sequence
tgtagctgcagcgaaagtaatttct

SEQ ID NO: 226733 - DNA, 25 bp, Probe sequence
tcctgtacgcaacttcgcttatgcg

SEQ ID NO: 226734 - DNA, 25 bp, Probe sequence
tcagtattacaagctcctgtacgca

SEQ ID NO: 226735 - DNA, 25 bp, Probe sequence
ttctggatttgctaaagatcatgaa

SEQ ID NO: 226736 - DNA, 25 bp, Probe sequence
atttggtgtaactgcagctgctcca

SEQ ID NO: 226737 - DNA, 25 bp, Probe sequence
atcaaagttgttaaagctgttaaag

SEQ ID NO: 226738 - DNA, 25 bp, Probe sequence
atggctaatcatgaacaaatcattg

SEQ ID NO: 226739 - DNA, 25 bp, Probe sequence
agtagcagtagcaggtgcagctggt

SEQ ID NO: 226740 - DNA, 25 bp, Probe sequence
agtagacggagctcctaaagtaatc

SEQ ID NO: 226741 - DNA, 25 bp, Probe sequence
agacggagctcctaaagtaatcaaa

SEQ ID NO: 226742 - DNA, 25 bp, Probe sequence
agctgctccagtagcagtagcaggt

SEQ ID NO: 226743 - DNA, 25 bp, Probe sequence
agctggttcatctaaaatcaaagtt

SEQ ID NO: 226744 - DNA, 25 bp, Probe sequence
aactgcagctgctccagtagcagta

SEQ ID NO: 226745 - DNA, 25 bp, Probe sequence
aatttggtgtaactgcagctgctcc

SEQ ID NO: 226746 - DNA, 25 bp, Probe sequence
ctccagtagcagtagcaggtgcagc

SEQ ID NO: 226747 - DNA, 25 bp, Probe sequence
ctgcagctgctccagtagcagtagc

SEQ ID NO: 226748 - DNA, 25 bp, Probe sequence
ccagtagcagtagcaggtgcagctg

SEQ ID NO: 226749 - DNA, 25 bp, Probe sequence
gctccagtagcagtagcaggtgcag

SEQ ID NO: 226750 - DNA, 25 bp, Probe sequence
gcagctgctccagtagcagtagcag

SEQ ID NO: 226751 - DNA, 25 bp, Probe sequence
gaatttggtgtaactgcagctgctc

SEQ ID NO: 226752 - DNA, 25 bp, Probe sequence
gaattagtagacggagctcctaaag

SEQ ID NO: 226753 - DNA, 25 bp, Probe sequence
gaagttggagctactgtagaattaa

SEQ ID NO: 226754 - DNA, 25 bp, Probe sequence
gaagaatttggtgtaactgcagctg

SEQ ID NO: 226755 - DNA, 25 bp, Probe sequence
gaagaagttggagctactgtagaat

SEQ ID NO: 226756 - DNA, 25 bp, Probe sequence
gaagctttacctaaagaagaagctg

SEQ ID NO: 226757 - DNA, 25 bp, Probe sequence
gaagcaactggtttaggattaaaag

SEQ ID NO: 226758 - DNA, 25 bp, Probe sequence
gtaatcaaagaagctttacctaaag

SEQ ID NO: 226759 - DNA, 25 bp, Probe sequence
gacggagctcctaaagtaatcaaag

SEQ ID NO: 226760 - DNA, 25 bp, Probe sequence
gtaactgcagctgctccagtagcag

SEQ ID NO: 226761 - DNA, 25 bp, Probe sequence
gtcagtattagaattaaacgactta

SEQ ID NO: 226762 - DNA, 25 bp, Probe sequence
ggttcatctaaaatcaaagttgtta

SEQ ID NO: 226763 - DNA, 25 bp, Probe sequence
ggagctcctaaagtaatcaaagaag

SEQ ID NO: 226764 - DNA, 25 bp, Probe sequence
tgtaactgcagctgctccagtagca

SEQ ID NO: 226765 - DNA, 25 bp, Probe sequence
taactgcagctgctccagtagcagt

SEQ ID NO: 226766 - DNA, 25 bp, Probe sequence
taaagaattagtagacggagctcct

SEQ ID NO: 226767 - DNA, 25 bp, Probe sequence
taaagaagcaactggtttaggatta

SEQ ID NO: 226768 - DNA, 25 bp, Probe sequence
taaacgacttagtaaaagcaattga

SEQ ID NO: 226769 - DNA, 25 bp, Probe sequence
tttggtgtaactgcagctgctccag

SEQ ID NO: 226770 - DNA, 25 bp, Probe sequence
atcacagagcgctagccttagttga

SEQ ID NO: 226771 - DNA, 25 bp, Probe sequence
atgttaatcacagagcgctagcctt

SEQ ID NO: 226772 - DNA, 25 bp, Probe sequence
agagcgctagccttagttgaaaaaa

SEQ ID NO: 226773 - DNA, 25 bp, Probe sequence
agaatgaatgaactttttggaaatg

SEQ ID NO: 226774 - DNA, 25 bp, Probe sequence
agcaagcattacatagattagactc

SEQ ID NO: 226775 - DNA, 25 bp, Probe sequence
accacatcattcaattacaatgcta

SEQ ID NO: 226776 - DNA, 25 bp, Probe sequence
aaagtgatgctttgtctgctgtgga

SEQ ID NO: 226777 - DNA, 25 bp, Probe sequence
aaagtatcaccacatcattcaatta

SEQ ID NO: 226778 - DNA, 25 bp, Probe sequence
aaccaatccaccaataagagcaggg

SEQ ID NO: 226779 - DNA, 25 bp, Probe sequence
cagatgttcttgttcaaactttttt

SEQ ID NO: 226780 - DNA, 25 bp, Probe sequence
gccgatgttggttgtggttacggac

SEQ ID NO: 226781 - DNA, 25 bp, Probe sequence
cctggtccaagtaagcgaattgccg

SEQ ID NO: 226782 - DNA, 25 bp, Probe sequence
gcgaattgccgatgttggttgtggt

SEQ ID NO: 226783 - DNA, 25 bp, Probe sequence
gcatccacctggtccaagtaagcga

SEQ ID NO: 226784 - DNA, 25 bp, Probe sequence
gcaaggtatgccatctgcaaagaaa

SEQ ID NO: 226785 - DNA, 25 bp, Probe sequence
gcaatgaacaacgtattcaatatca

SEQ ID NO: 226786 - DNA, 25 bp, Probe sequence
gaagatccaagtgtaattagcaatg

SEQ ID NO: 226787 - DNA, 25 bp, Probe sequence
gaagaagcaaggtatgccatctgca

SEQ ID NO: 226788 - DNA, 25 bp, Probe sequence
gagcagggaaagaaaccgtgcatcg

SEQ ID NO: 226789 - DNA, 25 bp, Probe sequence
gaaaccgtgcatcgtatattcgagc

SEQ ID NO: 226790 - DNA, 25 bp, Probe sequence
gagtcattattacgatgaagatcca

SEQ ID NO: 226791 - DNA, 25 bp, Probe sequence
gattagactcgaacggtgaactatt

SEQ ID NO: 226792 - DNA, 25 bp, Probe sequence
gattatggttcagatgttcttgttc

SEQ ID NO: 226793 - DNA, 25 bp, Probe sequence
gattgctaaagtatcaccacatcat

SEQ ID NO: 226794 - DNA, 25 bp, Probe sequence
gtatcaccacatcattcaattacaa

SEQ ID NO: 226795 - DNA, 25 bp, Probe sequence
gtgcatcgtatattcgagcaagcat

SEQ ID NO: 226796 - DNA, 25 bp, Probe sequence
gtgatgctttgtctgctgtggaaga

SEQ ID NO: 226797 - DNA, 25 bp, Probe sequence
gtggttacggaccaattggtttgat

SEQ ID NO: 226798 - DNA, 25 bp, Probe sequence
ggaccaattggtttgatgattgcta

SEQ ID NO: 226799 - DNA, 25 bp, Probe sequence
ggttcagatgttcttgttcaaactt

SEQ ID NO: 226800 - DNA, 25 bp, Probe sequence
tgattttattttaaccaatccacca

SEQ ID NO: 226801 - DNA, 25 bp, Probe sequence
taaaggatattacattctgagaagt

SEQ ID NO: 226802 - DNA, 25 bp, Probe sequence
tacaatgctagatgttaatcacaga

SEQ ID NO: 226803 - DNA, 25 bp, Probe sequence
tttttaaaagcgcatccacctggtc

SEQ ID NO: 226804 - DNA, 25 bp, Probe sequence
acgtcgtctatcagcattaggacct

SEQ ID NO: 226805 - DNA, 25 bp, Probe sequence
actactctcactatggccgtatgtg

SEQ ID NO: 226806 - DNA, 25 bp, Probe sequence
acatgcgcgttcaacaggaccatat

SEQ ID NO: 226807 - DNA, 25 bp, Probe sequence
aaaccgtgacgctacttatgctgca

SEQ ID NO: 226808 - DNA, 25 bp, Probe sequence
aagcgcaattcggtggacaacgttt

SEQ ID NO: 226809 - DNA, 25 bp, Probe sequence
aagcagtgcctttgatgaatccaga

SEQ ID NO: 226810 - DNA, 25 bp, Probe sequence
caggtatggaacacgttgcagcacg

SEQ ID NO: 226811 - DNA, 25 bp, Probe sequence
gcgacagcatgtattccattcttag

SEQ ID NO: 226812 - DNA, 25 bp, Probe sequence
gctggcggtatcgttcttgatgtaa

SEQ ID NO: 226813 - DNA, 25 bp, Probe sequence
gcaagttgtttcagcagcgacagca

SEQ ID NO: 226814 - DNA, 25 bp, Probe sequence
gaaggtacagtgcttgatcgtcgta

SEQ ID NO: 226815 - DNA, 25 bp, Probe sequence
gaagttgtatgtcgtttccgtggta

SEQ ID NO: 226816 - DNA, 25 bp, Probe sequence
gaagctggtatggctcgtgatggta

SEQ ID NO: 226817 - DNA, 25 bp, Probe sequence
gaaccattcgataaccgtatttcag

SEQ ID NO: 226818 - DNA, 25 bp, Probe sequence
gaaacttgcgcacatggttgatgat

SEQ ID NO: 226819 - DNA, 25 bp, Probe sequence
gaccaagtgttccagaatcattccg

SEQ ID NO: 226820 - DNA, 25 bp, Probe sequence
gagctacacttaggtatggctgcta

SEQ ID NO: 226821 - DNA, 25 bp, Probe sequence
gatactgagtctatcacacctcaac

SEQ ID NO: 226822 - DNA, 25 bp, Probe sequence
gttggtttcatgacttgggacggtt

SEQ ID NO: 226823 - DNA, 25 bp, Probe sequence
gtattcacgttgcatcaccagtatt

SEQ ID NO: 226824 - DNA, 25 bp, Probe sequence
gggtgcgaacatgcaacgtcaagca

SEQ ID NO: 226825 - DNA, 25 bp, Probe sequence
ggtgtaccatctcgtatgaacatcg

SEQ ID NO: 226826 - DNA, 25 bp, Probe sequence
ggtacgttcgttatcaatggtgcag

SEQ ID NO: 226827 - DNA, 25 bp, Probe sequence
ggtacatgttacaaccaacgtccaa

SEQ ID NO: 226828 - DNA, 25 bp, Probe sequence
ggaccatattcacttgttacacaac

SEQ ID NO: 226829 - DNA, 25 bp, Probe sequence
tgttacgtgcattaggtttctcaag

SEQ ID NO: 226830 - DNA, 25 bp, Probe sequence
tgaacgtttacgtccaggtgaacca

SEQ ID NO: 226831 - DNA, 25 bp, Probe sequence
tcgtatctcaattagttcgttcacc

SEQ ID NO: 226832 - DNA, 25 bp, Probe sequence
taattggtaatgctttccctgactc

SEQ ID NO: 226833 - DNA, 25 bp, Probe sequence
tattcgacctgttattgcatctatt

SEQ ID NO: 226834 - DNA, 25 bp, Probe sequence
ttatgctgcacctcttcgtgtaaaa

SEQ ID NO: 226835 - DNA, 25 bp, Probe sequence
ttcgttcaccatccgtttatttcaa

SEQ ID NO: 226836 - DNA, 25 bp, Probe sequence
ttctttggtagctctcaattatcac

SEQ ID NO: 226837 - DNA, 25 bp, Probe sequence
ttgtattcacgtttctttgatccaa

SEQ ID NO: 226838 - DNA, 25 bp, Probe sequence
atcacacaaggtcttcctcgtattc

SEQ ID NO: 226839 - DNA, 25 bp, Probe sequence
atccgttcttggtcttttggtgaag

SEQ ID NO: 226840 - DNA, 25 bp, Probe sequence
atcctgtattacttaaccgtgcacc

SEQ ID NO: 226841 - DNA, 25 bp, Probe sequence
atggccgcaccatctggtaagatta

SEQ ID NO: 226842 - DNA, 25 bp, Probe sequence
actcaggatatcttactcgtcgtct

SEQ ID NO: 226843 - DNA, 25 bp, Probe sequence
aaccgtgcaccaacacttcatagac

SEQ ID NO: 226844 - DNA, 25 bp, Probe sequence
gtccagttactggcccaggtaaccg

SEQ ID NO: 226845 - DNA, 25 bp, Probe sequence
aaggtcttgccgatacagcacttaa

SEQ ID NO: 226846 - DNA, 25 bp, Probe sequence
aattaccaatcacatcttcattccg

SEQ ID NO: 226847 - DNA, 25 bp, Probe sequence
caatgcgtacattccatacaggtgg

SEQ ID NO: 226848 - DNA, 25 bp, Probe sequence
ctcgtcgtcttgttgacgtggcaca

SEQ ID NO: 226849 - DNA, 25 bp, Probe sequence
ctgctccagtttctcacatttggta

SEQ ID NO: 226850 - DNA, 25 bp, Probe sequence
gcccgtggtaacgcatctaacttta

SEQ ID NO: 226851 - DNA, 25 bp, Probe sequence
gcagcacaaaacatcttgaacccta

SEQ ID NO: 226852 - DNA, 25 bp, Probe sequence
gaaggtcgtgcgattcgtctacatc

SEQ ID NO: 226853 - DNA, 25 bp, Probe sequence
gaagcagttggtacaattgcagccc

SEQ ID NO: 226854 - DNA, 25 bp, Probe sequence
gaaccaggtacacagcttacaatgc

SEQ ID NO: 226855 - DNA, 25 bp, Probe sequence
gaaacaattcgtcatcctgaaactg

SEQ ID NO: 226856 - DNA, 25 bp, Probe sequence
gaaagtttcttatctgcagcatcat

SEQ ID NO: 226857 - DNA, 25 bp, Probe sequence
gagattttcgaagcacgtaacccta

SEQ ID NO: 226858 - DNA, 25 bp, Probe sequence
gattcgtctacatccacttgtaaca

SEQ ID NO: 226859 - DNA, 25 bp, Probe sequence
gtatgcgtggattgatggccgcacc

SEQ ID NO: 226860 - DNA, 25 bp, Probe sequence
ggggtagcaggtagcgatatcacac

SEQ ID NO: 226861 - DNA, 25 bp, Probe sequence
tgggtcacattgaacttgctgctcc

SEQ ID NO: 226862 - DNA, 25 bp, Probe sequence
tgataatggtcgtcgtggtcgtcca

SEQ ID NO: 226863 - DNA, 25 bp, Probe sequence
tgagtgattcaggtgcccgtggtaa

SEQ ID NO: 226864 - DNA, 25 bp, Probe sequence
tgaccaaatggcggttcacgttcct

SEQ ID NO: 226865 - DNA, 25 bp, Probe sequence
tgaatacttcatctcaactcacggt

SEQ ID NO: 226866 - DNA, 25 bp, Probe sequence
tcatcccaccagaaattcgtccaat

SEQ ID NO: 226867 - DNA, 25 bp, Probe sequence
tagatgtacttccaatcatcccacc

SEQ ID NO: 226868 - DNA, 25 bp, Probe sequence
tttactttgcttcttatgttgttgt

SEQ ID NO: 226869 - DNA, 25 bp, Probe sequence
ttaggtgcacctggtatcatcgttc

SEQ ID NO: 226870 - DNA, 25 bp, Probe sequence
ttgcagcccaatctatcggtgaacc

SEQ ID NO: 226871 - DNA, 25 bp, Probe sequence
ttcgctcagcatttacttgtaacgc

SEQ ID NO: 226872 - DNA, 25 bp, Probe sequence
attgctgaagacgttgaagtatatt

SEQ ID NO: 226873 - DNA, 25 bp, Probe sequence
atttaatgactcgcgtgttaagcca

SEQ ID NO: 226874 - DNA, 25 bp, Probe sequence
atgcgacaatagtagcattgattaa

SEQ ID NO: 226875 - DNA, 25 bp, Probe sequence
atgactcgcgtgttaagccaaatca

SEQ ID NO: 226876 - DNA, 25 bp, Probe sequence
atgtaggtattaacgtcaatgcgac

SEQ ID NO: 226877 - DNA, 25 bp, Probe sequence
actcgcgtgttaagccaaatcaatc

SEQ ID NO: 226878 - DNA, 25 bp, Probe sequence
acatctttgattattgctgaagacg

SEQ ID NO: 226879 - DNA, 25 bp, Probe sequence
aagcaaacatgctttgggtaaacat

SEQ ID NO: 226880 - DNA, 25 bp, Probe sequence
aagttgcacgctttaacaaacaaca

SEQ ID NO: 226881 - DNA, 25 bp, Probe sequence
aatgactcgcgtgttaagccaaatc

SEQ ID NO: 226882 - DNA, 25 bp, Probe sequence
caatcagaaaaatatacctgtatct

SEQ ID NO: 226883 - DNA, 25 bp, Probe sequence
caagttacatctttgattattgctg

SEQ ID NO: 226884 - DNA, 25 bp, Probe sequence
caaacaacattttgtagttggtctt

SEQ ID NO: 226885 - DNA, 25 bp, Probe sequence
cgtgttaagccaaatcaatcagaaa

SEQ ID NO: 226886 - DNA, 25 bp, Probe sequence
gcgttaaagaaagatcaagttacat

SEQ ID NO: 226887 - DNA, 25 bp, Probe sequence
gcgtgttaagccaaatcaatcagaa

SEQ ID NO: 226888 - DNA, 25 bp, Probe sequence
gaagtatatttaatgactcgcgtgt

SEQ ID NO: 226889 - DNA, 25 bp, Probe sequence
gactcgcgtgttaagccaaatcaat

SEQ ID NO: 226890 - DNA, 25 bp, Probe sequence
gattattgctgaagacgttgaagta

SEQ ID NO: 226891 - DNA, 25 bp, Probe sequence
gttacatctttgattattgctgaag

SEQ ID NO: 226892 - DNA, 25 bp, Probe sequence
gtatatttaatgactcgcgtgttaa

SEQ ID NO: 226893 - DNA, 25 bp, Probe sequence
gtaggtattaacgtcaatgcgacaa

SEQ ID NO: 226894 - DNA, 25 bp, Probe sequence
ggtaaacatgtaggtattaacgtca

SEQ ID NO: 226895 - DNA, 25 bp, Probe sequence
ggtattaacgtcaatgcgacaatag

SEQ ID NO: 226896 - DNA, 25 bp, Probe sequence
tggtcttaaagaaacgcttaaagcg

SEQ ID NO: 226897 - DNA, 25 bp, Probe sequence
tgtagttggtcttaaagaaacgctt

SEQ ID NO: 226898 - DNA, 25 bp, Probe sequence
tgcacgctttaacaaacaacatttt

SEQ ID NO: 226899 - DNA, 25 bp, Probe sequence
tgctttgggtaaacatgtaggtatt

SEQ ID NO: 226900 - DNA, 25 bp, Probe sequence
tcgcgtgttaagccaaatcaatcag

SEQ ID NO: 226901 - DNA, 25 bp, Probe sequence
taatgactcgcgtgttaagccaaat

SEQ ID NO: 226902 - DNA, 25 bp, Probe sequence
taacgtcaatgcgacaatagtagca

SEQ ID NO: 226903 - DNA, 25 bp, Probe sequence
tacctgtatcttttttcaaaagcaa

SEQ ID NO: 226904 - DNA, 25 bp, Probe sequence
tatacctgtatcttttttcaaaagc

SEQ ID NO: 226905 - DNA, 25 bp, Probe sequence
ttgtctaaggaaaaagttgcacgct

SEQ ID NO: 226906 - DNA, 25 bp, Probe sequence
atcagattctccagctttaaataaa

SEQ ID NO: 226907 - DNA, 25 bp, Probe sequence
atgccaactattaaccaattagtac

SEQ ID NO: 226908 - DNA, 25 bp, Probe sequence
agacttaccaggtgtgcgttaccat

SEQ ID NO: 226909 - DNA, 25 bp, Probe sequence
acctaactcagcgttacgtaaatat

SEQ ID NO: 226910 - DNA, 25 bp, Probe sequence
acttcaggtgttgacggacgtagac

SEQ ID NO: 226911 - DNA, 25 bp, Probe sequence
aaaaaatcagattctccagctttaa

SEQ ID NO: 226912 - DNA, 25 bp, Probe sequence
aaaacgtggtgtatgtactcgtgta

SEQ ID NO: 226913 - DNA, 25 bp, Probe sequence
aatttactgacttaaactcaccaca

SEQ ID NO: 226914 - DNA, 25 bp, Probe sequence
caaggtcgttcattatacggaacta

SEQ ID NO: 226915 - DNA, 25 bp, Probe sequence
catcgaaattaacgcatacatccct

SEQ ID NO: 226916 - DNA, 25 bp, Probe sequence
cataacttacaagaacacagtgttg

SEQ ID NO: 226917 - DNA, 25 bp, Probe sequence
cgaaattaacgcatacatccctggt

SEQ ID NO: 226918 - DNA, 25 bp, Probe sequence
cgtggtgtatgtactcgtgtaggta

SEQ ID NO: 226919 - DNA, 25 bp, Probe sequence
gcgttaccatattgtacgtggagca

SEQ ID NO: 226920 - DNA, 25 bp, Probe sequence
gcgtttatcaaacaacatcgaaatt

SEQ ID NO: 226921 - DNA, 25 bp, Probe sequence
gcgttacgtaaatatgcacgtgtgc

SEQ ID NO: 226922 - DNA, 25 bp, Probe sequence
gacggacgtagacaaggtcgttcat

SEQ ID NO: 226923 - DNA, 25 bp, Probe sequence
gaacacagtgttgtacttgtacgtg

SEQ ID NO: 226924 - DNA, 25 bp, Probe sequence
gacttaaactcaccacaaaaacgtg

SEQ ID NO: 226925 - DNA, 25 bp, Probe sequence
gatacttcaggtgttgacggacgta

SEQ ID NO: 226926 - DNA, 25 bp, Probe sequence
gtagacaaggtcgttcattatacgg

SEQ ID NO: 226927 - DNA, 25 bp, Probe sequence
gtacttgtacgtggtggacgtgtaa

SEQ ID NO: 226928 - DNA, 25 bp, Probe sequence
gtactcgtgtaggtacaatgacacc

SEQ ID NO: 226929 - DNA, 25 bp, Probe sequence
gtgttgtacttgtacgtggtggacg

SEQ ID NO: 226930 - DNA, 25 bp, Probe sequence
gtgtgcgtttatcaaacaacatcga

SEQ ID NO: 226931 - DNA, 25 bp, Probe sequence
ggtgtgcgttaccatattgtacgtg

SEQ ID NO: 226932 - DNA, 25 bp, Probe sequence
ggagcacttgatacttcaggtgttg

SEQ ID NO: 226933 - DNA, 25 bp, Probe sequence
tcattatacggaactaagaaaccta

SEQ ID NO: 226934 - DNA, 25 bp, Probe sequence
tacgtggagcacttgatacttcagg

SEQ ID NO: 226935 - DNA, 25 bp, Probe sequence
taccaggtgtgcgttaccatattgt

SEQ ID NO: 226936 - DNA, 25 bp, Probe sequence
ttaacgcatacatccctggtatcgg

SEQ ID NO: 226937 - DNA, 25 bp, Probe sequence
tatgcacgtgtgcgtttatcaaaca

SEQ ID NO: 226938 - DNA, 25 bp, Probe sequence
ttactgacttaaactcaccacaaaa

SEQ ID NO: 226939 - DNA, 25 bp, Probe sequence
ttagtacgtaaaccaagacaaagca

SEQ ID NO: 226940 - DNA, 25 bp, Probe sequence
atacaggtggtgccgttaagaaacg

SEQ ID NO: 226941 - DNA, 25 bp, Probe sequence
atgcctcgtaaaggatcagtaccta

SEQ ID NO: 226942 - DNA, 25 bp, Probe sequence
agatccaattcataactctaagtta

SEQ ID NO: 226943 - DNA, 25 bp, Probe sequence
agaagcaatcaacaacattatgcca

SEQ ID NO: 226944 - DNA, 25 bp, Probe sequence
acaacattatgccagtattagaagt

SEQ ID NO: 226945 - DNA, 25 bp, Probe sequence
aaatggctgaagcaaacaaagcatt

SEQ ID NO: 226946 - DNA, 25 bp, Probe sequence
aacgcagtggtcgtgatgcattaga

SEQ ID NO: 226947 - DNA, 25 bp, Probe sequence
aattctttattcagcattcgaccta

SEQ ID NO: 226948 - DNA, 25 bp, Probe sequence
caaagcatttgctcactaccgttgg

SEQ ID NO: 226949 - DNA, 25 bp, Probe sequence
cagagcgtcgtactactttaggttt

SEQ ID NO: 226950 - DNA, 25 bp, Probe sequence
cagtattagaagttaaagctcgtcg

SEQ ID NO: 226951 - DNA, 25 bp, Probe sequence
ctttattcagcattcgacctagttg

SEQ ID NO: 226952 - DNA, 25 bp, Probe sequence
gctaacgaaattttagatgcagcaa

SEQ ID NO: 226953 - DNA, 25 bp, Probe sequence
gcattcgacctagttgaacaacgca

SEQ ID NO: 226954 - DNA, 25 bp, Probe sequence
gcacgtcttcgtggtgaaaaaacga

SEQ ID NO: 226955 - DNA, 25 bp, Probe sequence
gaacaacgcagtggtcgtgatgcat

SEQ ID NO: 226956 - DNA, 25 bp, Probe sequence
gagacgtattaccagatccaattca

SEQ ID NO: 226957 - DNA, 25 bp, Probe sequence
gaggacactcacaaaatggctgaag

SEQ ID NO: 226958 - DNA, 25 bp, Probe sequence
gatggaagatcgtttagctaacgaa

SEQ ID NO: 226959 - DNA, 25 bp, Probe sequence
gatgcagcaaataatacaggtggtg

SEQ ID NO: 226960 - DNA, 25 bp, Probe sequence
gtagaagttcgtccagagcgtcgta

SEQ ID NO: 226961 - DNA, 25 bp, Probe sequence
gttagttaactatgcacgtcttcgt

SEQ ID NO: 226962 - DNA, 25 bp, Probe sequence
gtattcgaagaagcaatcaacaaca

SEQ ID NO: 226963 - DNA, 25 bp, Probe sequence
gtaggtggttctaactatcaagtac

SEQ ID NO: 226964 - DNA, 25 bp, Probe sequence
gtaccagtagaagttcgtccagagc

SEQ ID NO: 226965 - DNA, 25 bp, Probe sequence
gtgccgttaagaaacgtgaggacac

SEQ ID NO: 226966 - DNA, 25 bp, Probe sequence
gtggaacagcacaaagaattcttta

SEQ ID NO: 226967 - DNA, 25 bp, Probe sequence
ggtcgtgatgcattagaagtattcg

SEQ ID NO: 226968 - DNA, 25 bp, Probe sequence
ggttctaactatcaagtaccagtag

SEQ ID NO: 226969 - DNA, 25 bp, Probe sequence
ggatcagtacctaaaagagacgtat

SEQ ID NO: 226970 - DNA, 25 bp, Probe sequence
tcgtccagagcgtcgtactacttta

SEQ ID NO: 226971 - DNA, 25 bp, Probe sequence
taactatgcacgtcttcgtggtgaa

SEQ ID NO: 226972 - DNA, 25 bp, Probe sequence
ttaccagatccaattcataactcta

SEQ ID NO: 226973 - DNA, 25 bp, Probe sequence
ttagatggtaaacgtggaacagcac

SEQ ID NO: 226974 - DNA, 25 bp, Probe sequence
acgttcaaacactcaaggtcgcggt

SEQ ID NO: 226975 - DNA, 25 bp, Probe sequence
ctatccgccaagctactactaacgt

SEQ ID NO: 226976 - DNA, 25 bp, Probe sequence
atcgttggtggtgtagttcctcgtg

SEQ ID NO: 226977 - DNA, 25 bp, Probe sequence
atggccttcaaaattgctgcatcat

SEQ ID NO: 226978 - DNA, 25 bp, Probe sequence
aggtgctaacttcgaatactctgta

SEQ ID NO: 226979 - DNA, 25 bp, Probe sequence
agcagcttgggaaggtcaccgtgta

SEQ ID NO: 226980 - DNA, 25 bp, Probe sequence
gtaacgtaggtgctccaatggtttc

SEQ ID NO: 226981 - DNA, 25 bp, Probe sequence
actatgtacttcgatcactatgctg

SEQ ID NO: 226982 - DNA, 25 bp, Probe sequence
acacctggacacgtagacttcactg

SEQ ID NO: 226983 - DNA, 25 bp, Probe sequence
aaatgcacgctaactcacgtcaaga

SEQ ID NO: 226984 - DNA, 25 bp, Probe sequence
aacaggcgcaggtttcgaattcgaa

SEQ ID NO: 226985 - DNA, 25 bp, Probe sequence
aagttatgactgacccttatgttgg

SEQ ID NO: 226986 - DNA, 25 bp, Probe sequence
aaggtcgcggtacttacactatgta

SEQ ID NO: 226987 - DNA, 25 bp, Probe sequence
caggctacaacttatggtgttccac

SEQ ID NO: 226988 - DNA, 25 bp, Probe sequence
cattccatgcacacactgacgaaga

SEQ ID NO: 226989 - DNA, 25 bp, Probe sequence
gctgctccaatccaattaccaattg

SEQ ID NO: 226990 - DNA, 25 bp, Probe sequence
gaagaagacccaacattccatgcac

SEQ ID NO: 226991 - DNA, 25 bp, Probe sequence
gaaacagtttggcgtcaggctacaa

SEQ ID NO: 226992 - DNA, 25 bp, Probe sequence
gacgattcagctgaattcgctgcat

SEQ ID NO: 226993 - DNA, 25 bp, Probe sequence
gagccagttattcacttatcagtag

SEQ ID NO: 226994 - DNA, 25 bp, Probe sequence
gacgtaacatctcgtcgtggacgtg

SEQ ID NO: 226995 - DNA, 25 bp, Probe sequence
gttcctcgtgaatacattccatcag

SEQ ID NO: 226996 - DNA, 25 bp, Probe sequence
gttaatgcttatgtaccactttcag

SEQ ID NO: 226997 - DNA, 25 bp, Probe sequence
gtttacaagctaacgctgctccaat

SEQ ID NO: 226998 - DNA, 25 bp, Probe sequence
gtattactatcacatctgctgcaac

SEQ ID NO: 226999 - DNA, 25 bp, Probe sequence
gtagaattctacccagtactttgtg

SEQ ID NO: 227000 - DNA, 25 bp, Probe sequence
gtaatatcggtatcatggctcacat

SEQ ID NO: 227001 - DNA, 25 bp, Probe sequence
ggtgttccacgtatcgtatttgtaa

SEQ ID NO: 227002 - DNA, 25 bp, Probe sequence
ggtgagcttcacttagacatcttag

SEQ ID NO: 227003 - DNA, 25 bp, Probe sequence
ggaacctcgtggtaatgcacaagtt

SEQ ID NO: 227004 - DNA, 25 bp, Probe sequence
tttattacactggccgtatccacaa

SEQ ID NO: 227005 - DNA, 25 bp, Probe sequence
ttattggtcaccgtgctagcaaccc

SEQ ID NO: 227006 - DNA, 25 bp, Probe sequence
ttgattacttaccttcaccactaga

SEQ ID NO: 227007 - DNA, 25 bp, Probe sequence
ttctctcgtcaatctggtggtcgtg

SEQ ID NO: 227008 - DNA, 25 bp, Probe sequence
attgccggaatttattgttgcagat

SEQ ID NO: 227009 - DNA, 25 bp, Probe sequence
atattagccttatcacagacgaaaa

SEQ ID NO: 227010 - DNA, 25 bp, Probe sequence
agaaagtcagtatttgtatcgctac

SEQ ID NO: 227011 - DNA, 25 bp, Probe sequence
agaaccttactaaagcatcagagtt

SEQ ID NO: 227012 - DNA, 25 bp, Probe sequence
agcaagtacttgaatcttttgtaaa

SEQ ID NO: 227013 - DNA, 25 bp, Probe sequence
actaaagcatcagagttacttaact

SEQ ID NO: 227014 - DNA, 25 bp, Probe sequence
aaattgctaatttcaaatcggatat

SEQ ID NO: 227015 - DNA, 25 bp, Probe sequence
aaaccatacattacttgttactgaa

SEQ ID NO: 227016 - DNA, 25 bp, Probe sequence
aacattgataattaatcctgaatcg

SEQ ID NO: 227017 - DNA, 25 bp, Probe sequence
aacttgaagtttaaatccgcacatt

SEQ ID NO: 227018 - DNA, 25 bp, Probe sequence
aacgatattcaaaaccatacattac

SEQ ID NO: 227019 - DNA, 25 bp, Probe sequence
aatccgcacattctaatttctatat

SEQ ID NO: 227020 - DNA, 25 bp, Probe sequence
aatcggatattagccttatcacaga

SEQ ID NO: 227021 - DNA, 25 bp, Probe sequence
cacagtcaactgtatctacacatat

SEQ ID NO: 227022 - DNA, 25 bp, Probe sequence
ctgctattcctataactgaagaacg

SEQ ID NO: 227023 - DNA, 25 bp, Probe sequence
gcgctattgccggaatttattgttg

SEQ ID NO: 227024 - DNA, 25 bp, Probe sequence
gaatttctaggaattgagtcattaa

SEQ ID NO: 227025 - DNA, 25 bp, Probe sequence
gaacacccatatgtaaacttgaagt

SEQ ID NO: 227026 - DNA, 25 bp, Probe sequence
gaaaaattcaggtgggattgcgcta

SEQ ID NO: 227027 - DNA, 25 bp, Probe sequence
gacgtagatgtcgatattccgaatt

SEQ ID NO: 227028 - DNA, 25 bp, Probe sequence
gatattccgaatttagaaacaacat

SEQ ID NO: 227029 - DNA, 25 bp, Probe sequence
gttacttaactattcacagtcaact

SEQ ID NO: 227030 - DNA, 25 bp, Probe sequence
gtttgtttcaaatagacgtagatgt

SEQ ID NO: 227031 - DNA, 25 bp, Probe sequence
gtatttgtatcgctactataataag

SEQ ID NO: 227032 - DNA, 25 bp, Probe sequence
gtaacttaactgctattcctataac

SEQ ID NO: 227033 - DNA, 25 bp, Probe sequence
gggtgtagttacagagaacagttag

SEQ ID NO: 227034 - DNA, 25 bp, Probe sequence
ggtatggaactaacggaagaaggct

SEQ ID NO: 227035 - DNA, 25 bp, Probe sequence
ggttagctgaacacccatatgtaaa

SEQ ID NO: 227036 - DNA, 25 bp, Probe sequence
ggattgcgctattgccggaatttat

SEQ ID NO: 227037 - DNA, 25 bp, Probe sequence
ggaagaaggcttagcatacgttaaa

SEQ ID NO: 227038 - DNA, 25 bp, Probe sequence
tagtgaatggttagctgaacaccca

SEQ ID NO: 227039 - DNA, 25 bp, Probe sequence
tgaagaacgtttaatatttgttact

SEQ ID NO: 227040 - DNA, 25 bp, Probe sequence
tcaggtgggattgcgctattgccgg

SEQ ID NO: 227041 - DNA, 25 bp, Probe sequence
tcctgaatcgaataagcaagtactt

SEQ ID NO: 227042 - DNA, 25 bp, Probe sequence
attctctacatcattagcacctggg

SEQ ID NO: 227043 - DNA, 25 bp, Probe sequence
accattcttattctctacatcatta

SEQ ID NO: 227044 - DNA, 25 bp, Probe sequence
acgctcatggttcaggtgttatggg

SEQ ID NO: 227045 - DNA, 25 bp, Probe sequence
acgacgctcatggttcaggtgttat

SEQ ID NO: 227046 - DNA, 25 bp, Probe sequence
acaactcaagaatttagtaagcgtt

SEQ ID NO: 227047 - DNA, 25 bp, Probe sequence
ctacatcattagcacctggggatac

SEQ ID NO: 227048 - DNA, 25 bp, Probe sequence
ccaagaggtacaggacgtgtaagaa

SEQ ID NO: 227049 - DNA, 25 bp, Probe sequence
gcctacagctgcacatacaaaagac

SEQ ID NO: 227050 - DNA, 25 bp, Probe sequence
gctttctaaagcaattggtgtcgtt

SEQ ID NO: 227051 - DNA, 25 bp, Probe sequence
gcacaatcacgaccattcttattct

SEQ ID NO: 227052 - DNA, 25 bp, Probe sequence
gcaattgcggcttatgaaaaagtag

SEQ ID NO: 227053 - DNA, 25 bp, Probe sequence
gaaggtgcaaacggaccagaaatca

SEQ ID NO: 227054 - DNA, 25 bp, Probe sequence
gaagaatttggtttattaacttatg

SEQ ID NO: 227055 - DNA, 25 bp, Probe sequence
gaagcagttgaatcaggtcaataca

SEQ ID NO: 227056 - DNA, 25 bp, Probe sequence
gaaatatgcctacagctgcacatac

SEQ ID NO: 227057 - DNA, 25 bp, Probe sequence
gaaatcatacattaacttatcttca

SEQ ID NO: 227058 - DNA, 25 bp, Probe sequence
gacgaaggtgtctatgtgaaatcta

SEQ ID NO: 227059 - DNA, 25 bp, Probe sequence
gatggcgtttttagtatggatggtg

SEQ ID NO: 227060 - DNA, 25 bp, Probe sequence
gatgtatatcactgatggcgttttt

SEQ ID NO: 227061 - DNA, 25 bp, Probe sequence
gatgctattttatcagatgagctta

SEQ ID NO: 227062 - DNA, 25 bp, Probe sequence
gatttgaaatcagctgcaaaagcag

SEQ ID NO: 227063 - DNA, 25 bp, Probe sequence
gttaaaagcacaatcacgaccattc

SEQ ID NO: 227064 - DNA, 25 bp, Probe sequence
gtatggatggtgatgtggctaaatt

SEQ ID NO: 227065 - DNA, 25 bp, Probe sequence
gtgaaatctatcgttttcccaacag

SEQ ID NO: 227066 - DNA, 25 bp, Probe sequence
gtgatgtggctaaattacctgaaat

SEQ ID NO: 227067 - DNA, 25 bp, Probe sequence
ggtacattagatttacacgacgaat

SEQ ID NO: 227068 - DNA, 25 bp, Probe sequence
ggatttaattgtaatatggctgcta

SEQ ID NO: 227069 - DNA, 25 bp, Probe sequence
ggaacagaagctgcaatagcttatc

SEQ ID NO: 227070 - DNA, 25 bp, Probe sequence
ggcgctggtacggttaaacattttg

SEQ ID NO: 227071 - DNA, 25 bp, Probe sequence
ggcgctgttcgtacaatcaatggta

SEQ ID NO: 227072 - DNA, 25 bp, Probe sequence
tgagcttaatcatgcatcaattatt

SEQ ID NO: 227073 - DNA, 25 bp, Probe sequence
tgcaggcgctgttcgtacaatcaat

SEQ ID NO: 227074 - DNA, 25 bp, Probe sequence
tcacgaccattcttattctctacat

SEQ ID NO: 227075 - DNA, 25 bp, Probe sequence
tattcgagttaaccattcagacatg

SEQ ID NO: 227076 - DNA, 25 bp, Probe sequence
attaagtaagcaaccaacgccagat

SEQ ID NO: 227077 - DNA, 25 bp, Probe sequence
attacctttacatcatttaatggaa

SEQ ID NO: 227078 - DNA, 25 bp, Probe sequence
atttatctgtctttatcccaggcgg

SEQ ID NO: 227079 - DNA, 25 bp, Probe sequence
atgaccgctttatagttacattatg

SEQ ID NO: 227080 - DNA, 25 bp, Probe sequence
agatcgtaaattattaacaggtgac

SEQ ID NO: 227081 - DNA, 25 bp, Probe sequence
agttaacgacgatatgacaggaaga

SEQ ID NO: 227082 - DNA, 25 bp, Probe sequence
agcacctaaaacagattttgatggt

SEQ ID NO: 227083 - DNA, 25 bp, Probe sequence
aacaggtgacagtcctttagcttca

SEQ ID NO: 227084 - DNA, 25 bp, Probe sequence
aagataacgcatttttcccatcacc

SEQ ID NO: 227085 - DNA, 25 bp, Probe sequence
aatggaagcaggttttgacgttgat

SEQ ID NO: 227086 - DNA, 25 bp, Probe sequence
cagtcctttagcttcaaatgagtta

SEQ ID NO: 227087 - DNA, 25 bp, Probe sequence
catcaccatattcccttagtcaata

SEQ ID NO: 227088 - DNA, 25 bp, Probe sequence
cattagaaggatactctgtttgtgt

SEQ ID NO: 227089 - DNA, 25 bp, Probe sequence
ctctacgggtaatcatcctgttgaa

SEQ ID NO: 227090 - DNA, 25 bp, Probe sequence
gcaaccaacgccagataaagcagaa

SEQ ID NO: 227091 - DNA, 25 bp, Probe sequence
gaaaaatgttctctacgggtaatca

SEQ ID NO: 227092 - DNA, 25 bp, Probe sequence
gaaagtattgatgattgctgctgaa

SEQ ID NO: 227093 - DNA, 25 bp, Probe sequence
gaaatggttagttgctgatttatta

SEQ ID NO: 227094 - DNA, 25 bp, Probe sequence
gaaatgttattacctttacatcatt

SEQ ID NO: 227095 - DNA, 25 bp, Probe sequence
gttgcgacattatctggttatccag

SEQ ID NO: 227096 - DNA, 25 bp, Probe sequence
gttctctacgggtaatcatcctgtt

SEQ ID NO: 227097 - DNA, 25 bp, Probe sequence
gtcaatatacagcacctaaaacaga

SEQ ID NO: 227098 - DNA, 25 bp, Probe sequence
gggtaatcatcctgttgaaatgtta

SEQ ID NO: 227099 - DNA, 25 bp, Probe sequence
ggtgttgaacacaaaggtgcctata

SEQ ID NO: 227100 - DNA, 25 bp, Probe sequence
ggtgcctataaagatggtaaatgga

SEQ ID NO: 227101 - DNA, 25 bp, Probe sequence
ggtgacagtcctttagcttcaaatg

SEQ ID NO: 227102 - DNA, 25 bp, Probe sequence
ggttttgacgttgatgttgcgacat

SEQ ID NO: 227103 - DNA, 25 bp, Probe sequence
tgggctatgccaactgaagacgagg

SEQ ID NO: 227104 - DNA, 25 bp, Probe sequence
tcaacaaacattagattgggcatta

SEQ ID NO: 227105 - DNA, 25 bp, Probe sequence
tagaattatgggctatgccaactga

SEQ ID NO: 227106 - DNA, 25 bp, Probe sequence
tagttacattatgtcatggaccagc

SEQ ID NO: 227107 - DNA, 25 bp, Probe sequence
ttgaaataggttatttacctggacg

SEQ ID NO: 227108 - DNA, 25 bp, Probe sequence
ttccctgactcattagatgaaggtg

SEQ ID NO: 227109 - DNA, 25 bp, Probe sequence
ttcccttagtcaatatacagcacct

SEQ ID NO: 227110 - DNA, 25 bp, Probe sequence
attattccagaattatttgcttatg

SEQ ID NO: 227111 - DNA, 25 bp, Probe sequence
atttgcatgtggcggtatacctaaa

SEQ ID NO: 227112 - DNA, 25 bp, Probe sequence
ataagtggttaggccattatggata

SEQ ID NO: 227113 - DNA, 25 bp, Probe sequence
atgactatggtgatgggaacaagca

SEQ ID NO: 227114 - DNA, 25 bp, Probe sequence
acaggttgtatctttggattaactt

SEQ ID NO: 227115 - DNA, 25 bp, Probe sequence
aaggctttacatgatatccatggtt

SEQ ID NO: 227116 - DNA, 25 bp, Probe sequence
aataccacatacatatgcacttcaa

SEQ ID NO: 227117 - DNA, 25 bp, Probe sequence
cagtcagtggtggcgcacataattc

SEQ ID NO: 227118 - DNA, 25 bp, Probe sequence
catctactattatttttactgacga

SEQ ID NO: 227119 - DNA, 25 bp, Probe sequence
gccaggtgaaagtgggctcattgct

SEQ ID NO: 227120 - DNA, 25 bp, Probe sequence
gcttcaggccgtgtgtttttaatta

SEQ ID NO: 227121 - DNA, 25 bp, Probe sequence
gcaacagtatcaagattggcatatg

SEQ ID NO: 227122 - DNA, 25 bp, Probe sequence
gcaagcaccaaagtcatatgtagat

SEQ ID NO: 227123 - DNA, 25 bp, Probe sequence
gaagctacagcatttggtactaaga

SEQ ID NO: 227124 - DNA, 25 bp, Probe sequence
gaagcggggcaatcagcagtaggtg

SEQ ID NO: 227125 - DNA, 25 bp, Probe sequence
gaaaagcaacatcaagtgccaggta

SEQ ID NO: 227126 - DNA, 25 bp, Probe sequence
gaaactttggaaacatcatggtgca

SEQ ID NO: 227127 - DNA, 25 bp, Probe sequence
gactttacttcatctactattattt

SEQ ID NO: 227128 - DNA, 25 bp, Probe sequence
gagtatgtcgctaagcaagcaccaa

SEQ ID NO: 227129 - DNA, 25 bp, Probe sequence
gatgcccatgctagtttattaggta

SEQ ID NO: 227130 - DNA, 25 bp, Probe sequence
gataaagtatctgcaccggttgtta

SEQ ID NO: 227131 - DNA, 25 bp, Probe sequence
gtattggtatagactttacttcatc

SEQ ID NO: 227132 - DNA, 25 bp, Probe sequence
gtatctgcaccggttgttaatattg

SEQ ID NO: 227133 - DNA, 25 bp, Probe sequence
gtaggtgatttgtttgagtatgtcg

SEQ ID NO: 227134 - DNA, 25 bp, Probe sequence
gtcatgaatcgagcaccagaaatta

SEQ ID NO: 227135 - DNA, 25 bp, Probe sequence
gtccttttattattgatgcccatgc

SEQ ID NO: 227136 - DNA, 25 bp, Probe sequence
gtgccaggtatatcaggttctgtaa

SEQ ID NO: 227137 - DNA, 25 bp, Probe sequence
gtggattaggtttcaaagcattttg

SEQ ID NO: 227138 - DNA, 25 bp, Probe sequence
gggctcattgctcttgattggcata

SEQ ID NO: 227139 - DNA, 25 bp, Probe sequence
ggatagtgagtatgcaccagcaata

SEQ ID NO: 227140 - DNA, 25 bp, Probe sequence
ggaacaagcacatgccatcttatgt

SEQ ID NO: 227141 - DNA, 25 bp, Probe sequence
ggaagcgggcgattggattgtaaat

SEQ ID NO: 227142 - DNA, 25 bp, Probe sequence
tattaggtgcagtcagtggtggcgc

SEQ ID NO: 227143 - DNA, 25 bp, Probe sequence
tttaaaaacaatccacatgcgtatg

SEQ ID NO: 227144 - DNA, 25 bp, Probe sequence
atttgcactttttcacaccaagttc

SEQ ID NO: 227145 - DNA, 25 bp, Probe sequence
atatggcagcattattatcagcaac

SEQ ID NO: 227146 - DNA, 25 bp, Probe sequence
atgtttgagttagttagggactttg

SEQ ID NO: 227147 - DNA, 25 bp, Probe sequence
agggaacctgaagcagactcacctg

SEQ ID NO: 227148 - DNA, 25 bp, Probe sequence
agtgcagagaaatttatgggacaga

SEQ ID NO: 227149 - DNA, 25 bp, Probe sequence
agttagggactttgaagcggatagt

SEQ ID NO: 227150 - DNA, 25 bp, Probe sequence
agaagctgcaagaacttataatttg

SEQ ID NO: 227151 - DNA, 25 bp, Probe sequence
agctgttcacgtggcgaatggggat

SEQ ID NO: 227152 - DNA, 25 bp, Probe sequence
acctgaagcagactcacctgtacaa

SEQ ID NO: 227153 - DNA, 25 bp, Probe sequence
acgattcagcaacctacgacaatgt

SEQ ID NO: 227154 - DNA, 25 bp, Probe sequence
acgccacaagtaacgattcagcaac

SEQ ID NO: 227155 - DNA, 25 bp, Probe sequence
acgtggcgaatggggatttgatcct

SEQ ID NO: 227156 - DNA, 25 bp, Probe sequence
actcctaaagttaatacgccacaag

SEQ ID NO: 227157 - DNA, 25 bp, Probe sequence
actcacctgtacaaaatggaccatt

SEQ ID NO: 227158 - DNA, 25 bp, Probe sequence
gcggatagtctaatgcatatggcag

SEQ ID NO: 227159 - DNA, 25 bp, Probe sequence
gcttgggatttaaatatgggtggat

SEQ ID NO: 227160 - DNA, 25 bp, Probe sequence
gcactttttcacaccaagttcaatt

SEQ ID NO: 227161 - DNA, 25 bp, Probe sequence
gcaacctacgacaatgtatggtgta

SEQ ID NO: 227162 - DNA, 25 bp, Probe sequence
gacaaggtatcgctaatagttggcc

SEQ ID NO: 227163 - DNA, 25 bp, Probe sequence
gagactcaactcctaaagttaatac

SEQ ID NO: 227164 - DNA, 25 bp, Probe sequence
gatacaagctgttcacgtggcgaat

SEQ ID NO: 227165 - DNA, 25 bp, Probe sequence
gttcaattggtgcatttggagactc

SEQ ID NO: 227166 - DNA, 25 bp, Probe sequence
gtatcgctaatagttggccggattc

SEQ ID NO: 227167 - DNA, 25 bp, Probe sequence
gtaacgattcagcaacctacgacaa

SEQ ID NO: 227168 - DNA, 25 bp, Probe sequence
gggacagataatgttcttgctacag

SEQ ID NO: 227169 - DNA, 25 bp, Probe sequence
ggggatttgatcctaaatatgattt

SEQ ID NO: 227170 - DNA, 25 bp, Probe sequence
ggtgcatttggagactcaactccta

SEQ ID NO: 227171 - DNA, 25 bp, Probe sequence
ggtacagaattagttgttaagtgca

SEQ ID NO: 227172 - DNA, 25 bp, Probe sequence
tggccggattctattgatacaagct

SEQ ID NO: 227173 - DNA, 25 bp, Probe sequence
tggtgcattaggacaaattggtaca

SEQ ID NO: 227174 - DNA, 25 bp, Probe sequence
tcttgctacagatattagggaacct

SEQ ID NO: 227175 - DNA, 25 bp, Probe sequence
tagatacaagaagtgttagattccc

SEQ ID NO: 227176 - DNA, 25 bp, Probe sequence
tatgattactggtgcattaggacaa

SEQ ID NO: 227177 - DNA, 25 bp, Probe sequence
ttataatttgcactttttcacacca

SEQ ID NO: 227178 - DNA, 25 bp, Probe sequence
attttatctccttcaggtgcatatt

SEQ ID NO: 227179 - DNA, 25 bp, Probe sequence
atatgttgagttatgattatgatgc

SEQ ID NO: 227180 - DNA, 25 bp, Probe sequence
atacgacgtctatactggtattcaa

SEQ ID NO: 227181 - DNA, 25 bp, Probe sequence
aggttatgaccaagtattatggctt

SEQ ID NO: 227182 - DNA, 25 bp, Probe sequence
agcgtcttaataactcgttagcacg

SEQ ID NO: 227183 - DNA, 25 bp, Probe sequence
agcgccgcgtttcaatcgatgaatt

SEQ ID NO: 227184 - DNA, 25 bp, Probe sequence
actggtattcaaaatggtactttag

SEQ ID NO: 227185 - DNA, 25 bp, Probe sequence
acttggcgttggtgcatcacatcag

SEQ ID NO: 227186 - DNA, 25 bp, Probe sequence
aaagtaattacaccagagttgaatg

SEQ ID NO: 227187 - DNA, 25 bp, Probe sequence
aagttgcaggtaactatgcggcaag

SEQ ID NO: 227188 - DNA, 25 bp, Probe sequence
aaggtcaatcattatatattcgtcc

SEQ ID NO: 227189 - DNA, 25 bp, Probe sequence
aatcgatgaattattcgaatcatat

SEQ ID NO: 227190 - DNA, 25 bp, Probe sequence
ctatgcggcaagtttattagcacaa

SEQ ID NO: 227191 - DNA, 25 bp, Probe sequence
cgaagagcgccgcgtttcaatcgat

SEQ ID NO: 227192 - DNA, 25 bp, Probe sequence
gaagtcgaagagcgccgcgtttcaa

SEQ ID NO: 227193 - DNA, 25 bp, Probe sequence
gaagatcgtgaaatcgttattaata

SEQ ID NO: 227194 - DNA, 25 bp, Probe sequence
gataaaaatggttggagagtcgttg

SEQ ID NO: 227195 - DNA, 25 bp, Probe sequence
gataaaggatggcatgatttgaaga

SEQ ID NO: 227196 - DNA, 25 bp, Probe sequence
gtattatggcttgatggtgttgaac

SEQ ID NO: 227197 - DNA, 25 bp, Probe sequence
gtatttggtagtggtactgcagcag

SEQ ID NO: 227198 - DNA, 25 bp, Probe sequence
gtactgcagcagttatttcacctgt

SEQ ID NO: 227199 - DNA, 25 bp, Probe sequence
gtaaatctattatcgaattagctaa

SEQ ID NO: 227200 - DNA, 25 bp, Probe sequence
ggtgttgaacagaaatatatcgaag

SEQ ID NO: 227201 - DNA, 25 bp, Probe sequence
ggtgagttaacagaagtatttggta

SEQ ID NO: 227202 - DNA, 25 bp, Probe sequence
ggtgcatcacatcagtataaattat

SEQ ID NO: 227203 - DNA, 25 bp, Probe sequence
ggatatgaagtcgaagagcgccgcg

SEQ ID NO: 227204 - DNA, 25 bp, Probe sequence
ggcgttggtgcatcacatcagtata

SEQ ID NO: 227205 - DNA, 25 bp, Probe sequence
tctccttcaggtgcatattatggtg

SEQ ID NO: 227206 - DNA, 25 bp, Probe sequence
taattattttatctccttcaggtgc

SEQ ID NO: 227207 - DNA, 25 bp, Probe sequence
taaaaccaactaaaatctatgtaga

SEQ ID NO: 227208 - DNA, 25 bp, Probe sequence
tacaccagagttgaatggcagtatt

SEQ ID NO: 227209 - DNA, 25 bp, Probe sequence
tactcaaaaattatacgacgtctat

SEQ ID NO: 227210 - DNA, 25 bp, Probe sequence
tacctggtattacacgtaaatctat

SEQ ID NO: 227211 - DNA, 25 bp, Probe sequence
ttaagcgtcttaataactcgttagc

SEQ ID NO: 227212 - DNA, 25 bp, Probe sequence
attattttaaatagtgcggcagata

SEQ ID NO: 227213 - DNA, 25 bp, Probe sequence
atttaggtatggcaataggtgtatt

SEQ ID NO: 227214 - DNA, 25 bp, Probe sequence
atgcctatgagaagccaaatcctaa

SEQ ID NO: 227215 - DNA, 25 bp, Probe sequence
agatcctcagaaagtagctatagta

SEQ ID NO: 227216 - DNA, 25 bp, Probe sequence
agcaatataatgtagatcctcagaa

SEQ ID NO: 227217 - DNA, 25 bp, Probe sequence
agctatagtaggagacactgctaat

SEQ ID NO: 227218 - DNA, 25 bp, Probe sequence
acaaccgactggtccaagtcaacaa

SEQ ID NO: 227219 - DNA, 25 bp, Probe sequence
acaactcggtgtcattaaagaatct

SEQ ID NO: 227220 - DNA, 25 bp, Probe sequence
aaatcagtgatgggttcaggatctt

SEQ ID NO: 227221 - DNA, 25 bp, Probe sequence
aaagaagcacttatcgatttgaaag

SEQ ID NO: 227222 - DNA, 25 bp, Probe sequence
caggcatttaatgatgtgacgggac

SEQ ID NO: 227223 - DNA, 25 bp, Probe sequence
ctcgttgttcgatttgatcatttct

SEQ ID NO: 227224 - DNA, 25 bp, Probe sequence
ctggtccaagtcaacaagtcaaaag

SEQ ID NO: 227225 - DNA, 25 bp, Probe sequence
gccaaatcctaaagtattatcgcct

SEQ ID NO: 227226 - DNA, 25 bp, Probe sequence
gaatctattgatccaaaatcagtga

SEQ ID NO: 227227 - DNA, 25 bp, Probe sequence
gaagaattacatgaagctgatatta

SEQ ID NO: 227228 - DNA, 25 bp, Probe sequence
gaagcggatgcctatgagaagccaa

SEQ ID NO: 227229 - DNA, 25 bp, Probe sequence
gaagctgctttaagacaactcggtg

SEQ ID NO: 227230 - DNA, 25 bp, Probe sequence
gaacaatttttagcacataccaatg

SEQ ID NO: 227231 - DNA, 25 bp, Probe sequence
gacaagatacaaccgactggtccaa

SEQ ID NO: 227232 - DNA, 25 bp, Probe sequence
gatttgatcatttctaccgaagcgg

SEQ ID NO: 227233 - DNA, 25 bp, Probe sequence
gtattcctgaaattaattgggtaga

SEQ ID NO: 227234 - DNA, 25 bp, Probe sequence
gtattatcgcctttatttgagcaat

SEQ ID NO: 227235 - DNA, 25 bp, Probe sequence
gtaggagacactgctaatgatatga

SEQ ID NO: 227236 - DNA, 25 bp, Probe sequence
gtgacgggacaagatacaaccgact

SEQ ID NO: 227237 - DNA, 25 bp, Probe sequence
gtgcggcagatattttagaagcttt

SEQ ID NO: 227238 - DNA, 25 bp, Probe sequence
gtgatgggttcaggatctttacaac

SEQ ID NO: 227239 - DNA, 25 bp, Probe sequence
gggttcaggatctttacaacaaatt

SEQ ID NO: 227240 - DNA, 25 bp, Probe sequence
ggggtacgatttgtacaatcattgc

SEQ ID NO: 227241 - DNA, 25 bp, Probe sequence
ggtgtattaacaggtattgcaacaa

SEQ ID NO: 227242 - DNA, 25 bp, Probe sequence
ggtagatgaacgtattcctgaaatt

SEQ ID NO: 227243 - DNA, 25 bp, Probe sequence
ggtattgttacgagtgatactaaaa

SEQ ID NO: 227244 - DNA, 25 bp, Probe sequence
tcatttctaccgaagcggatgccta

SEQ ID NO: 227245 - DNA, 25 bp, Probe sequence
ttgtacaatcattgcttgagacttt

SEQ ID NO: 227246 - DNA, 25 bp, Probe sequence
ctacaacaaccaacggcgcatgctg

SEQ ID NO: 227247 - DNA, 25 bp, Probe sequence
attttaatcatcgtgcaattgttga

SEQ ID NO: 227248 - DNA, 25 bp, Probe sequence
attttatgacattagcgattgaaga

SEQ ID NO: 227249 - DNA, 25 bp, Probe sequence
atattgcaattgaacgtgcagccaa

SEQ ID NO: 227250 - DNA, 25 bp, Probe sequence
atcgctagagcacataatttaagag

SEQ ID NO: 227251 - DNA, 25 bp, Probe sequence
aggaacaattgtaatgagtcgcatt

SEQ ID NO: 227252 - DNA, 25 bp, Probe sequence
atggcgcagatgatcctaaaggtgg

SEQ ID NO: 227253 - DNA, 25 bp, Probe sequence
accaacggcgcatgctgaacatatt

SEQ ID NO: 227254 - DNA, 25 bp, Probe sequence
accatgtgtcatgtgcgcaggaaca

SEQ ID NO: 227255 - DNA, 25 bp, Probe sequence
acaaccaacggcgcatgctgaacat

SEQ ID NO: 227256 - DNA, 25 bp, Probe sequence
aagagccaataagaaatccaccaat

SEQ ID NO: 227257 - DNA, 25 bp, Probe sequence
gcattccaagagtcgtctatggcgc

SEQ ID NO: 227258 - DNA, 25 bp, Probe sequence
gcagtttaatgaatttattgcaaca

SEQ ID NO: 227259 - DNA, 25 bp, Probe sequence
gcagctcaactaggcgaagtaccta

SEQ ID NO: 227260 - DNA, 25 bp, Probe sequence
gcacattatatgtaaccttagaacc

SEQ ID NO: 227261 - DNA, 25 bp, Probe sequence
gcaacaatctaattttaatcatcgt

SEQ ID NO: 227262 - DNA, 25 bp, Probe sequence
gaacgtgcagccaaagtgttaggta

SEQ ID NO: 227263 - DNA, 25 bp, Probe sequence
gatcctaaaggtggttgtagtggca

SEQ ID NO: 227264 - DNA, 25 bp, Probe sequence
gagaaacactacaacaaccaacggc

SEQ ID NO: 227265 - DNA, 25 bp, Probe sequence
gagtcgtctatggcgcagatgatcc

SEQ ID NO: 227266 - DNA, 25 bp, Probe sequence
gatgatgaagttatcgctagagcac

SEQ ID NO: 227267 - DNA, 25 bp, Probe sequence
gtagcacattattaacaacattttt

SEQ ID NO: 227268 - DNA, 25 bp, Probe sequence
gtacctataggtgctatcatcacta

SEQ ID NO: 227269 - DNA, 25 bp, Probe sequence
gtaaccttagaaccatgtgtcatgt

SEQ ID NO: 227270 - DNA, 25 bp, Probe sequence
gtgttaggtagttggcgtttagaag

SEQ ID NO: 227271 - DNA, 25 bp, Probe sequence
gtcgtctatggcgcagatgatccta

SEQ ID NO: 227272 - DNA, 25 bp, Probe sequence
gtgcaattgttgataaaggtgtact

SEQ ID NO: 227273 - DNA, 25 bp, Probe sequence
gtgtacttaaagaagcatgtagcac

SEQ ID NO: 227274 - DNA, 25 bp, Probe sequence
gtgtcatgtgcgcaggaacaattgt

SEQ ID NO: 227275 - DNA, 25 bp, Probe sequence
ggtggttgtagtggcagtttaatga

SEQ ID NO: 227276 - DNA, 25 bp, Probe sequence
ggcgaagtacctataggtgctatca

SEQ ID NO: 227277 - DNA, 25 bp, Probe sequence
ggcgcatgctgaacatattgcaatt

SEQ ID NO: 227278 - DNA, 25 bp, Probe sequence
tgagtcgcattccaagagtcgtcta

SEQ ID NO: 227279 - DNA, 25 bp, Probe sequence
tataggtgctatcatcactaaagat

SEQ ID NO: 227280 - DNA, 25 bp, Probe sequence
attgatgcgattaaatacgctcaag

SEQ ID NO: 227281 - DNA, 25 bp, Probe sequence
attatcaagtatacacgagtcgtgc

SEQ ID NO: 227282 - DNA, 25 bp, Probe sequence
atttctcaacctaatattgatgcga

SEQ ID NO: 227283 - DNA, 25 bp, Probe sequence
atagcgaaatatgtcacagatacga

SEQ ID NO: 227284 - DNA, 25 bp, Probe sequence
agtggtgttggaaaagctattatga

SEQ ID NO: 227285 - DNA, 25 bp, Probe sequence
agcaccagttgctgacacagattta

SEQ ID NO: 227286 - DNA, 25 bp, Probe sequence
agctatatcatcatcttcgagagga

SEQ ID NO: 227287 - DNA, 25 bp, Probe sequence
aaatggtattcaaagacgcatagat

SEQ ID NO: 227288 - DNA, 25 bp, Probe sequence
aagatgcaggtatttattatcaagt

SEQ ID NO: 227289 - DNA, 25 bp, Probe sequence
caatgtaatgagcacttcacacctt

SEQ ID NO: 227290 - DNA, 25 bp, Probe sequence
cactgatatggatggcacgctactt

SEQ ID NO: 227291 - DNA, 25 bp, Probe sequence
gcagcacatgaaatttctcaaccta

SEQ ID NO: 227292 - DNA, 25 bp, Probe sequence
gaatctccgaatttagctatatcat

SEQ ID NO: 227293 - DNA, 25 bp, Probe sequence
gaagcacaagcaccagttgctgaca

SEQ ID NO: 227294 - DNA, 25 bp, Probe sequence
gaaagttggctatccagttgcgatg

SEQ ID NO: 227295 - DNA, 25 bp, Probe sequence
gaaataacgcattcagatgcacaaa

SEQ ID NO: 227296 - DNA, 25 bp, Probe sequence
gaaattattacgtgaacaacaagtt

SEQ ID NO: 227297 - DNA, 25 bp, Probe sequence
gacacagatttaacagtaccatata

SEQ ID NO: 227298 - DNA, 25 bp, Probe sequence
gacaggtcgagcattttatgaagca

SEQ ID NO: 227299 - DNA, 25 bp, Probe sequence
gacatttacatagatattgctgagc

SEQ ID NO: 227300 - DNA, 25 bp, Probe sequence
gagcattttatgaagcacaagcacc

SEQ ID NO: 227301 - DNA, 25 bp, Probe sequence
gagcacttcacaccttaataaatcg

SEQ ID NO: 227302 - DNA, 25 bp, Probe sequence
gatgctattgaaaacatacctggtg

SEQ ID NO: 227303 - DNA, 25 bp, Probe sequence
gataaaactaatagccactgatatg

SEQ ID NO: 227304 - DNA, 25 bp, Probe sequence
gatattgctgagcgtgcaggtcaac

SEQ ID NO: 227305 - DNA, 25 bp, Probe sequence
gtaaaattttagctgaatctccgaa

SEQ ID NO: 227306 - DNA, 25 bp, Probe sequence
gtgcgatttatactgaagatccaca

SEQ ID NO: 227307 - DNA, 25 bp, Probe sequence
ggtacgttgaaagttgttgataatt

SEQ ID NO: 227308 - DNA, 25 bp, Probe sequence
ggcacgctacttaatgcagcacatg

SEQ ID NO: 227309 - DNA, 25 bp, Probe sequence
tgaatggtgctgaagtacgtgatga

SEQ ID NO: 227310 - DNA, 25 bp, Probe sequence
tgcgctagaaacaattgccgaaaga

SEQ ID NO: 227311 - DNA, 25 bp, Probe sequence
tacacgagtcgtgcgatttatactg

SEQ ID NO: 227312 - DNA, 25 bp, Probe sequence
taacggttgttatcgcgacaggtcg

SEQ ID NO: 227313 - DNA, 25 bp, Probe sequence
tacgctcaagaacaagggataacgg

SEQ ID NO: 227314 - DNA, 25 bp, Probe sequence
attacctatgacttttgagaataaa

SEQ ID NO: 227315 - DNA, 25 bp, Probe sequence
atatctcaaagaattagcaagcttg

SEQ ID NO: 227316 - DNA, 25 bp, Probe sequence
atactatgtctattttatgctcaga

SEQ ID NO: 227317 - DNA, 25 bp, Probe sequence
atgaattaggtgtagttttgctttt

SEQ ID NO: 227318 - DNA, 25 bp, Probe sequence
atggaaattgattcattggcagcaa

SEQ ID NO: 227319 - DNA, 25 bp, Probe sequence
agtacaggacatttctaagatattt

SEQ ID NO: 227320 - DNA, 25 bp, Probe sequence
agagatatagtacaggacatttcta

SEQ ID NO: 227321 - DNA, 25 bp, Probe sequence
agcaggcgaagaattcttagcgtat

SEQ ID NO: 227322 - DNA, 25 bp, Probe sequence
agcttgattcacaacgggtaatgga

SEQ ID NO: 227323 - DNA, 25 bp, Probe sequence
ctcaattaattttatttctagtgga

SEQ ID NO: 227324 - DNA, 25 bp, Probe sequence
ctaaggcaactaaagcaggcgaaga

SEQ ID NO: 227325 - DNA, 25 bp, Probe sequence
ctgagagcgaagaaattatgatgtc

SEQ ID NO: 227326 - DNA, 25 bp, Probe sequence
gcaattaaacttagatatgcacaat

SEQ ID NO: 227327 - DNA, 25 bp, Probe sequence
gtaacgctttacagtaatggaagta

SEQ ID NO: 227328 - DNA, 25 bp, Probe sequence
gaagaattcttagcgtatagcaaaa

SEQ ID NO: 227329 - DNA, 25 bp, Probe sequence
gaagcatctatcaataaagctgcaa

SEQ ID NO: 227330 - DNA, 25 bp, Probe sequence
gaactgttatttaattatttatctg

SEQ ID NO: 227331 - DNA, 25 bp, Probe sequence
gaaatcaaaaaggtgctaaggcaac

SEQ ID NO: 227332 - DNA, 25 bp, Probe sequence
gatgtcgaataactcaattaatttt

SEQ ID NO: 227333 - DNA, 25 bp, Probe sequence
gataaggttatttcattcataaaaa

SEQ ID NO: 227334 - DNA, 25 bp, Probe sequence
gataataagcttgattcacaacggg

SEQ ID NO: 227335 - DNA, 25 bp, Probe sequence
gatactatgaaagtaacgctttaca

SEQ ID NO: 227336 - DNA, 25 bp, Probe sequence
gatatttgaagttaactactatact

SEQ ID NO: 227337 - DNA, 25 bp, Probe sequence
gttaactactatacttataatcata

SEQ ID NO: 227338 - DNA, 25 bp, Probe sequence
gtatgtgaagaagcatctatcaata

SEQ ID NO: 227339 - DNA, 25 bp, Probe sequence
gtctattttatgctcagaactgtta

SEQ ID NO: 227340 - DNA, 25 bp, Probe sequence
gtgtagttttgctttttagaaatca

SEQ ID NO: 227341 - DNA, 25 bp, Probe sequence
ggaaaggctttattacctatgactt

SEQ ID NO: 227342 - DNA, 25 bp, Probe sequence
ggaaatttttataactgtatgtgaa

SEQ ID NO: 227343 - DNA, 25 bp, Probe sequence
ggctttattacctatgacttttgag

SEQ ID NO: 227344 - DNA, 25 bp, Probe sequence
taaagatgagttttgtcctttaagg

SEQ ID NO: 227345 - DNA, 25 bp, Probe sequence
tatgcacaatctaatatatctcaaa

SEQ ID NO: 227346 - DNA, 25 bp, Probe sequence
ttaacgactcaaattatagacttag

SEQ ID NO: 227347 - DNA, 25 bp, Probe sequence
ttggcagcaataataaacttagtta

SEQ ID NO: 227348 - DNA, 25 bp, Probe sequence
attgttagttcagagccattgtcac

SEQ ID NO: 227349 - DNA, 25 bp, Probe sequence
agtgcactagcaagatacttaactg

SEQ ID NO: 227350 - DNA, 25 bp, Probe sequence
agttcagagccattgtcacatttaa

SEQ ID NO: 227351 - DNA, 25 bp, Probe sequence
agagccattgtcacatttaagagta

SEQ ID NO: 227352 - DNA, 25 bp, Probe sequence
agcaatggcggcggactttttaata

SEQ ID NO: 227353 - DNA, 25 bp, Probe sequence
agcaagatacttaactgagcatttt

SEQ ID NO: 227354 - DNA, 25 bp, Probe sequence
acgagcaagattatttgtcgatcaa

SEQ ID NO: 227355 - DNA, 25 bp, Probe sequence
aaatgaaacctgtaggcttaatagg

SEQ ID NO: 227356 - DNA, 25 bp, Probe sequence
aacacatgattctgattttgctaaa

SEQ ID NO: 227357 - DNA, 25 bp, Probe sequence
aactgagcattttaaaacacatgat

SEQ ID NO: 227358 - DNA, 25 bp, Probe sequence
aagagaaagcaatggcggcggactt

SEQ ID NO: 227359 - DNA, 25 bp, Probe sequence
aatcgtcagaagtttactaggcatt

SEQ ID NO: 227360 - DNA, 25 bp, Probe sequence
aatagcaacacatgattctgatttt

SEQ ID NO: 227361 - DNA, 25 bp, Probe sequence
aatattaggaacgccaaactatcat

SEQ ID NO: 227362 - DNA, 25 bp, Probe sequence
caacaccgtctattgatgaaatcaa

SEQ ID NO: 227363 - DNA, 25 bp, Probe sequence
caggaacaacaccgtctattgatga

SEQ ID NO: 227364 - DNA, 25 bp, Probe sequence
ctatcatggttcatattctggaata

SEQ ID NO: 227365 - DNA, 25 bp, Probe sequence
gccaaactatcatggttcatattct

SEQ ID NO: 227366 - DNA, 25 bp, Probe sequence
gaattcacatacaagtgcactagca

SEQ ID NO: 227367 - DNA, 25 bp, Probe sequence
gaagatggttcatattacttaaatg

SEQ ID NO: 227368 - DNA, 25 bp, Probe sequence
gaagcggaaatattcgatttagcag

SEQ ID NO: 227369 - DNA, 25 bp, Probe sequence
gatagtgaattccaattacgagcaa

SEQ ID NO: 227370 - DNA, 25 bp, Probe sequence
gatttttcaggaacaacaccgtcta

SEQ ID NO: 227371 - DNA, 25 bp, Probe sequence
gtaggcttaataggaaatagtggtg

SEQ ID NO: 227372 - DNA, 25 bp, Probe sequence
gtaccaactcaaatagcaacacatg

SEQ ID NO: 227373 - DNA, 25 bp, Probe sequence
gtcacatttaagagtaatcgtcaga

SEQ ID NO: 227374 - DNA, 25 bp, Probe sequence
gtgaattccaattacgagcaagatt

SEQ ID NO: 227375 - DNA, 25 bp, Probe sequence
ggattaattattattggcagtgcac

SEQ ID NO: 227376 - DNA, 25 bp, Probe sequence
ggaacgccaaactatcatggttcat

SEQ ID NO: 227377 - DNA, 25 bp, Probe sequence
ggcagtgcacaagtgaattcacata

SEQ ID NO: 227378 - DNA, 25 bp, Probe sequence
tggcggcggactttttaatattagg

SEQ ID NO: 227379 - DNA, 25 bp, Probe sequence
tgtcgatcaaattgtatcttttgtg

SEQ ID NO: 227380 - DNA, 25 bp, Probe sequence
tattcgatttagcagaaaaaccgtt

SEQ ID NO: 227381 - DNA, 25 bp, Probe sequence
taaaacacatgatattgaagcggaa

SEQ ID NO: 227382 - DNA, 25 bp, Probe sequence
attaatgttgaaaggtactgagaat

SEQ ID NO: 227383 - DNA, 25 bp, Probe sequence
attaatgcaccaaaaatgataacta

SEQ ID NO: 227384 - DNA, 25 bp, Probe sequence
atacaaacttcgaaaattctaatcg

SEQ ID NO: 227385 - DNA, 25 bp, Probe sequence
ataatcttgatttagcgaaaagaat

SEQ ID NO: 227386 - DNA, 25 bp, Probe sequence
atgcaccaaaaatgataactaaatt

SEQ ID NO: 227387 - DNA, 25 bp, Probe sequence
atgataactaaattattacgtgaat

SEQ ID NO: 227388 - DNA, 25 bp, Probe sequence
atgttgaaaggtactgagaatatag

SEQ ID NO: 227389 - DNA, 25 bp, Probe sequence
aggtactgagaatatagtgacaaat

SEQ ID NO: 227390 - DNA, 25 bp, Probe sequence
aaattaatgttgaaaggtactgaga

SEQ ID NO: 227391 - DNA, 25 bp, Probe sequence
aaataatcttgatttagcgaaaaga

SEQ ID NO: 227392 - DNA, 25 bp, Probe sequence
aaaggtactgagaatatagtgacaa

SEQ ID NO: 227393 - DNA, 25 bp, Probe sequence
aaggtactgagaatatagtgacaaa

SEQ ID NO: 227394 - DNA, 25 bp, Probe sequence
aatgttgaaaggtactgagaatata

SEQ ID NO: 227395 - DNA, 25 bp, Probe sequence
aatgcaccaaaaatgataactaaat

SEQ ID NO: 227396 - DNA, 25 bp, Probe sequence
aattaatgcaccaaaaatgataact

SEQ ID NO: 227397 - DNA, 25 bp, Probe sequence
aattaatgttgaaaggtactgagaa

SEQ ID NO: 227398 - DNA, 25 bp, Probe sequence
ctgagaatatagtgacaaatgttaa

SEQ ID NO: 227399 - DNA, 25 bp, Probe sequence
gaaaattctaatcggactaacgtct

SEQ ID NO: 227400 - DNA, 25 bp, Probe sequence
gaaaagaattaaaaaggcagcactt

SEQ ID NO: 227401 - DNA, 25 bp, Probe sequence
gaaaggtactgagaatatagtgaca

SEQ ID NO: 227402 - DNA, 25 bp, Probe sequence
gatacaaacttcgaaaattctaatc

SEQ ID NO: 227403 - DNA, 25 bp, Probe sequence
gtactgagaatatagtgacaaatgt

SEQ ID NO: 227404 - DNA, 25 bp, Probe sequence
ggtactgagaatatagtgacaaatg

SEQ ID NO: 227405 - DNA, 25 bp, Probe sequence
tgataactaaattattacgtgaata

SEQ ID NO: 227406 - DNA, 25 bp, Probe sequence
tgagaatatagtgacaaatgttaat

SEQ ID NO: 227407 - DNA, 25 bp, Probe sequence
tcgaaaattctaatcggactaacgt

SEQ ID NO: 227408 - DNA, 25 bp, Probe sequence
taatgttgaaaggtactgagaatat

SEQ ID NO: 227409 - DNA, 25 bp, Probe sequence
taatgcaccaaaaatgataactaaa

SEQ ID NO: 227410 - DNA, 25 bp, Probe sequence
taaaaaggcagcacttaataataaa

SEQ ID NO: 227411 - DNA, 25 bp, Probe sequence
tacaaacttcgaaaattctaatcgg

SEQ ID NO: 227412 - DNA, 25 bp, Probe sequence
tacgatacaaacttcgaaaattcta

SEQ ID NO: 227413 - DNA, 25 bp, Probe sequence
ttacgatacaaacttcgaaaattct

SEQ ID NO: 227414 - DNA, 25 bp, Probe sequence
ttaatgcaccaaaaatgataactaa

SEQ ID NO: 227415 - DNA, 25 bp, Probe sequence
ttcgaaaattctaatcggactaacg

SEQ ID NO: 227416 - DNA, 25 bp, Probe sequence
attgggaaaagtcatgtaggtacac

SEQ ID NO: 227417 - DNA, 25 bp, Probe sequence
atattccggttggctacgtggcaaa

SEQ ID NO: 227418 - DNA, 25 bp, Probe sequence
attagttcaatattttctccatcaa

SEQ ID NO: 227419 - DNA, 25 bp, Probe sequence
atttcatggttttaagacgcatatt

SEQ ID NO: 227420 - DNA, 25 bp, Probe sequence
atattttctccatcaattatgtaaa

SEQ ID NO: 227421 - DNA, 25 bp, Probe sequence
atgtatgctcattttttagataaac

SEQ ID NO: 227422 - DNA, 25 bp, Probe sequence
atggatttaatggctatttagtacc

SEQ ID NO: 227423 - DNA, 25 bp, Probe sequence
agagtcgctttcagtaggtacacca

SEQ ID NO: 227424 - DNA, 25 bp, Probe sequence
agcaatgccaagatatttcacaata

SEQ ID NO: 227425 - DNA, 25 bp, Probe sequence
acacatatgcgaagcaacatcagat

SEQ ID NO: 227426 - DNA, 25 bp, Probe sequence
aaaacacgctcacaaaggttatctt

SEQ ID NO: 227427 - DNA, 25 bp, Probe sequence
aatggaaggttttggcttagcaatt

SEQ ID NO: 227428 - DNA, 25 bp, Probe sequence
aataccagttatcaatattccggtt

SEQ ID NO: 227429 - DNA, 25 bp, Probe sequence
cacgttataaagcgattgttgtatc

SEQ ID NO: 227430 - DNA, 25 bp, Probe sequence
cacggcatatcttcaaaatgtgtat

SEQ ID NO: 227431 - DNA, 25 bp, Probe sequence
gcagaactgatgttatcgacaagta

SEQ ID NO: 227432 - DNA, 25 bp, Probe sequence
gcaactactatcagtacaaagtggc

SEQ ID NO: 227433 - DNA, 25 bp, Probe sequence
gcacaacagtacaatgcaactacta

SEQ ID NO: 227434 - DNA, 25 bp, Probe sequence
gaattgtatgatggaagaggctttt

SEQ ID NO: 227435 - DNA, 25 bp, Probe sequence
gaaggacaacggattgtactcgaaa

SEQ ID NO: 227436 - DNA, 25 bp, Probe sequence
gacaaagcaagttaactggatacag

SEQ ID NO: 227437 - DNA, 25 bp, Probe sequence
gttcaaacaacacggcatatcttca

SEQ ID NO: 227438 - DNA, 25 bp, Probe sequence
gtaggtacaccagtgatcagttatg

SEQ ID NO: 227439 - DNA, 25 bp, Probe sequence
gtactcgaaaattactatacaccta

SEQ ID NO: 227440 - DNA, 25 bp, Probe sequence
gtcagaatatcgacaacttgtagaa

SEQ ID NO: 227441 - DNA, 25 bp, Probe sequence
ggggaaatcgtcatccaaaaatatt

SEQ ID NO: 227442 - DNA, 25 bp, Probe sequence
ggaatccttattcatacacatatgc

SEQ ID NO: 227443 - DNA, 25 bp, Probe sequence
ggcttagcaattttagagtcgcttt

SEQ ID NO: 227444 - DNA, 25 bp, Probe sequence
tggaaatggtttgtcagaatatcga

SEQ ID NO: 227445 - DNA, 25 bp, Probe sequence
tgtgtatatgttaaatggaatcctt

SEQ ID NO: 227446 - DNA, 25 bp, Probe sequence
taagttgttctcgaattttaggtga

SEQ ID NO: 227447 - DNA, 25 bp, Probe sequence
tacacctaatggggaaatcgtcatc

SEQ ID NO: 227448 - DNA, 25 bp, Probe sequence
tagcatagaatctgcacaacagtac

SEQ ID NO: 227449 - DNA, 25 bp, Probe sequence
tatcaattgctcgcctcgttgaaaa

SEQ ID NO: 227450 - DNA, 25 bp, Probe sequence
attggatttaatgaacctggtacgc

SEQ ID NO: 227451 - DNA, 25 bp, Probe sequence
atttagacgacgaagcttgcccgaa

SEQ ID NO: 227452 - DNA, 25 bp, Probe sequence
atatcgttgatttgactgaaagtac

SEQ ID NO: 227453 - DNA, 25 bp, Probe sequence
atcattttactcgcatttggtgaaa

SEQ ID NO: 227454 - DNA, 25 bp, Probe sequence
atcattctatgttgcatgtgagtta

SEQ ID NO: 227455 - DNA, 25 bp, Probe sequence
acattacttcacaaacacccgaatg

SEQ ID NO: 227456 - DNA, 25 bp, Probe sequence
acatccgcaaagttatcactattat

SEQ ID NO: 227457 - DNA, 25 bp, Probe sequence
acacccgaatgttgagatatattta

SEQ ID NO: 227458 - DNA, 25 bp, Probe sequence
acaagcatcattctatgttgcatgt

SEQ ID NO: 227459 - DNA, 25 bp, Probe sequence
aaacgtatcattttactcgcatttg

SEQ ID NO: 227460 - DNA, 25 bp, Probe sequence
aaccgcatcacatccgcaaagttat

SEQ ID NO: 227461 - DNA, 25 bp, Probe sequence
atgttccagccacattacttcacaa

SEQ ID NO: 227462 - DNA, 25 bp, Probe sequence
aatttctgttgatgttccagccaca

SEQ ID NO: 227463 - DNA, 25 bp, Probe sequence
gccatttcgatgggacttgctaata

SEQ ID NO: 227464 - DNA, 25 bp, Probe sequence
gcgttactcatatcgttgatttgac

SEQ ID NO: 227465 - DNA, 25 bp, Probe sequence
gctgctattacacatttattaaatc

SEQ ID NO: 227466 - DNA, 25 bp, Probe sequence
gcatcacatccgcaaagttatcact

SEQ ID NO: 227467 - DNA, 25 bp, Probe sequence
gaagatgatgttccaaagcaagcca

SEQ ID NO: 227468 - DNA, 25 bp, Probe sequence
gaacaacaaggtcaacgtgatattc

SEQ ID NO: 227469 - DNA, 25 bp, Probe sequence
gaaacgtgctgctattacacattta

SEQ ID NO: 227470 - DNA, 25 bp, Probe sequence
gactgaaagtactattaaggctaat

SEQ ID NO: 227471 - DNA, 25 bp, Probe sequence
gagatggcatttaatcagcactgta

SEQ ID NO: 227472 - DNA, 25 bp, Probe sequence
gatgggacttgctaatattcttcaa

SEQ ID NO: 227473 - DNA, 25 bp, Probe sequence
gttccaaagcaagccatttcgatgg

SEQ ID NO: 227474 - DNA, 25 bp, Probe sequence
gtatccacgtttaatttagacgaat

SEQ ID NO: 227475 - DNA, 25 bp, Probe sequence
gttatcactattatatggatgacat

SEQ ID NO: 227476 - DNA, 25 bp, Probe sequence
gtagacaatgtatccacgtttaatt

SEQ ID NO: 227477 - DNA, 25 bp, Probe sequence
gtgaaaagaaacgtgctgctattac

SEQ ID NO: 227478 - DNA, 25 bp, Probe sequence
ggtcaacgtgatattcaaattttag

SEQ ID NO: 227479 - DNA, 25 bp, Probe sequence
tggatgacatgcttttcaaacaata

SEQ ID NO: 227480 - DNA, 25 bp, Probe sequence
tgtaggtttaaccgcatcacatccg

SEQ ID NO: 227481 - DNA, 25 bp, Probe sequence
tagacgacgaagcttgcccgaaaaa

SEQ ID NO: 227482 - DNA, 25 bp, Probe sequence
tagacgaatatgtaggtttaaccgc

SEQ ID NO: 227483 - DNA, 25 bp, Probe sequence
ttaatgaacctggtacgccgtttga

SEQ ID NO: 227484 - DNA, 25 bp, Probe sequence
attgtcgctgaaagtcctgatcttg

SEQ ID NO: 227485 - DNA, 25 bp, Probe sequence
atttggcgcggatgtaattacaata

SEQ ID NO: 227486 - DNA, 25 bp, Probe sequence
atatgattgctgttcaagatttaga

SEQ ID NO: 227487 - DNA, 25 bp, Probe sequence
atcggtacgccaatcatttacaacg

SEQ ID NO: 227488 - DNA, 25 bp, Probe sequence
acgccaatcatttacaacgaaggtt

SEQ ID NO: 227489 - DNA, 25 bp, Probe sequence
acaaagaagacgcggctgagttagc

SEQ ID NO: 227490 - DNA, 25 bp, Probe sequence
aaatgcagatgatccagtagaagct

SEQ ID NO: 227491 - DNA, 25 bp, Probe sequence
aaagcagctattgaagaagctcata

SEQ ID NO: 227492 - DNA, 25 bp, Probe sequence
aaacaatgtcgcgctgcaatcgaag

SEQ ID NO: 227493 - DNA, 25 bp, Probe sequence
aaaattctaaagttgcagtagcagg

SEQ ID NO: 227494 - DNA, 25 bp, Probe sequence
aagcagaagggcaatcaccattaga

SEQ ID NO: 227495 - DNA, 25 bp, Probe sequence
caagcaattaaatttggcgcggatg

SEQ ID NO: 227496 - DNA, 25 bp, Probe sequence
cagcagttaaacatatggcagacaa

SEQ ID NO: 227497 - DNA, 25 bp, Probe sequence
catatggcagacaacattagtaatg

SEQ ID NO: 227498 - DNA, 25 bp, Probe sequence
ctgatcttgttattgttggtggcgg

SEQ ID NO: 227499 - DNA, 25 bp, Probe sequence
gaagacgcggctgagttagcaaata

SEQ ID NO: 227500 - DNA, 25 bp, Probe sequence
gaaaattatggatgcagctgattat

SEQ ID NO: 227501 - DNA, 25 bp, Probe sequence
gatatcgtagaaatcggtacgccaa

SEQ ID NO: 227502 - DNA, 25 bp, Probe sequence
gattatattgcagtacacactggtt

SEQ ID NO: 227503 - DNA, 25 bp, Probe sequence
gattatgaagttagccaagcaatta

SEQ ID NO: 227504 - DNA, 25 bp, Probe sequence
gttggtggcggaatcgcaaatgcag

SEQ ID NO: 227505 - DNA, 25 bp, Probe sequence
gttatgatttacaagcagaagggca

SEQ ID NO: 227506 - DNA, 25 bp, Probe sequence
gtagcaggtggaattaaaccagata

SEQ ID NO: 227507 - DNA, 25 bp, Probe sequence
gtaattacaatactaggtgttgcag

SEQ ID NO: 227508 - DNA, 25 bp, Probe sequence
gtcgcgctgcaatcgaaggtaagta

SEQ ID NO: 227509 - DNA, 25 bp, Probe sequence
gtcgctgaaagtcctgatcttgtta

SEQ ID NO: 227510 - DNA, 25 bp, Probe sequence
gggcaatcaccattagaaagtttaa

SEQ ID NO: 227511 - DNA, 25 bp, Probe sequence
ggtgttgcagaagatgcatcaatta

SEQ ID NO: 227512 - DNA, 25 bp, Probe sequence
ggaatcgcaaatgcagatgatccag

SEQ ID NO: 227513 - DNA, 25 bp, Probe sequence
tggatgcagctgattatgaagttag

SEQ ID NO: 227514 - DNA, 25 bp, Probe sequence
tgttattgttggtggcggaatcgca

SEQ ID NO: 227515 - DNA, 25 bp, Probe sequence
tacaacgaaggtttaccagcagtta

SEQ ID NO: 227516 - DNA, 25 bp, Probe sequence
tacacactggttatgatttacaagc

SEQ ID NO: 227517 - DNA, 25 bp, Probe sequence
ttactagttgatatgattgctgttc

SEQ ID NO: 227518 - DNA, 25 bp, Probe sequence
attcgtggcgaatagttttgcaatg

SEQ ID NO: 227519 - DNA, 25 bp, Probe sequence
attactacaaataaagattctgcaa

SEQ ID NO: 227520 - DNA, 25 bp, Probe sequence
ataggcaatctagctgggacgaaca

SEQ ID NO: 227521 - DNA, 25 bp, Probe sequence
atcagctcggcaaacaggcacatgt

SEQ ID NO: 227522 - DNA, 25 bp, Probe sequence
atgcgcttaaatcagctcggcaaac

SEQ ID NO: 227523 - DNA, 25 bp, Probe sequence
atgctgaacatatatttgtagctgg

SEQ ID NO: 227524 - DNA, 25 bp, Probe sequence
atgcaacaaaatcatgctaatttag

SEQ ID NO: 227525 - DNA, 25 bp, Probe sequence
atgactttgtcacatgttgaagcgg

SEQ ID NO: 227526 - DNA, 25 bp, Probe sequence
aggacgttcaggattcgtggcgaat

SEQ ID NO: 227527 - DNA, 25 bp, Probe sequence
aggtgctgacatcgtattaattact

SEQ ID NO: 227528 - DNA, 25 bp, Probe sequence
acatcgttttgcctgcaggtacaaa

SEQ ID NO: 227529 - DNA, 25 bp, Probe sequence
acaggcacatgttgttggagaatca

SEQ ID NO: 227530 - DNA, 25 bp, Probe sequence
cagtaggtgctgacatcgtattaat

SEQ ID NO: 227531 - DNA, 25 bp, Probe sequence
ctctggttcaggttccacggaacat

SEQ ID NO: 227532 - DNA, 25 bp, Probe sequence
cgaacatcgttttgcctgcaggtac

SEQ ID NO: 227533 - DNA, 25 bp, Probe sequence
gctcggcaaacaggcacatgttgtt

SEQ ID NO: 227534 - DNA, 25 bp, Probe sequence
gctgggacgaacatcgttttgcctg

SEQ ID NO: 227535 - DNA, 25 bp, Probe sequence
gctgacatcgtattaattactacaa

SEQ ID NO: 227536 - DNA, 25 bp, Probe sequence
gcaatgcgcttaaatcagctcggca

SEQ ID NO: 227537 - DNA, 25 bp, Probe sequence
gcaatctagctgggacgaacatcgt

SEQ ID NO: 227538 - DNA, 25 bp, Probe sequence
gaatcaacgacacctgcgattaagt

SEQ ID NO: 227539 - DNA, 25 bp, Probe sequence
gaagtttgtttgaacaagcatctca

SEQ ID NO: 227540 - DNA, 25 bp, Probe sequence
gacacctgcgattaagtcgaatgat

SEQ ID NO: 227541 - DNA, 25 bp, Probe sequence
gattaagtcgaatgatgtatttgta

SEQ ID NO: 227542 - DNA, 25 bp, Probe sequence
gattctgcaataggcaatctagctg

SEQ ID NO: 227543 - DNA, 25 bp, Probe sequence
gttgtaatgggattgatgactgaaa

SEQ ID NO: 227544 - DNA, 25 bp, Probe sequence
gttccacggaacatttaagattatt

SEQ ID NO: 227545 - DNA, 25 bp, Probe sequence
gtatttgtaattatctctggttcag

SEQ ID NO: 227546 - DNA, 25 bp, Probe sequence
gtcacatgttgaagcggatgagttt

SEQ ID NO: 227547 - DNA, 25 bp, Probe sequence
ggcgaatagttttgcaatgcgctta

SEQ ID NO: 227548 - DNA, 25 bp, Probe sequence
tccaaaatactacatgctgaacata

SEQ ID NO: 227549 - DNA, 25 bp, Probe sequence
tgcctgcaggtacaaaatatgatga

SEQ ID NO: 227550 - DNA, 25 bp, Probe sequence
ttatctctggttcaggttccacgga

SEQ ID NO: 227551 - DNA, 25 bp, Probe sequence
ttggagaatcaacgacacctgcgat

SEQ ID NO: 227552 - DNA, 25 bp, Probe sequence
attagcagaccgaccattagatgaa

SEQ ID NO: 227553 - DNA, 25 bp, Probe sequence
atatttttgattttgatggtacgtt

SEQ ID NO: 227554 - DNA, 25 bp, Probe sequence
atcctgaaggcatacacacaattgt

SEQ ID NO: 227555 - DNA, 25 bp, Probe sequence
agcagaccgaccattagatgaagca

SEQ ID NO: 227556 - DNA, 25 bp, Probe sequence
acttttcgtggtgtctagtaagaag

SEQ ID NO: 227557 - DNA, 25 bp, Probe sequence
aaaattagcagaccgaccattagat

SEQ ID NO: 227558 - DNA, 25 bp, Probe sequence
aaccaaatcctgaaggcatacacac

SEQ ID NO: 227559 - DNA, 25 bp, Probe sequence
aagtgcatataaaccaaatcctgaa

SEQ ID NO: 227560 - DNA, 25 bp, Probe sequence
aatcgatacatttagacatacatat

SEQ ID NO: 227561 - DNA, 25 bp, Probe sequence
caaggtcattacttcattcaaatcc

SEQ ID NO: 227562 - DNA, 25 bp, Probe sequence
cgggtataactgaagccattacaag

SEQ ID NO: 227563 - DNA, 25 bp, Probe sequence
cgcattatatgggaatacctattga

SEQ ID NO: 227564 - DNA, 25 bp, Probe sequence
gcacatgatgcaaggtcattacttc

SEQ ID NO: 227565 - DNA, 25 bp, Probe sequence
gcaaagttaatcgatacatttagac

SEQ ID NO: 227566 - DNA, 25 bp, Probe sequence
gcaacacaaagtgcatttaaagcat

SEQ ID NO: 227567 - DNA, 25 bp, Probe sequence
gaatttgcgggtataactgaagcca

SEQ ID NO: 227568 - DNA, 25 bp, Probe sequence
gaatacctattgaagaatcattttt

SEQ ID NO: 227569 - DNA, 25 bp, Probe sequence
gaagctgttggatccgatcaagtaa

SEQ ID NO: 227570 - DNA, 25 bp, Probe sequence
gaagccattacaagtttgtataacc

SEQ ID NO: 227571 - DNA, 25 bp, Probe sequence
gatggtacgttggcagacacgaaaa

SEQ ID NO: 227572 - DNA, 25 bp, Probe sequence
gatgcaaggtcattacttcattcaa

SEQ ID NO: 227573 - DNA, 25 bp, Probe sequence
tttttaaaattagcagaccgaccat

SEQ ID NO: 227574 - DNA, 25 bp, Probe sequence
gattttgatggtacgttggcagaca

SEQ ID NO: 227575 - DNA, 25 bp, Probe sequence
gtgcaacgctacaatttaaatagcc

SEQ ID NO: 227576 - DNA, 25 bp, Probe sequence
gtggtgaagtagcaacacaaagtgc

SEQ ID NO: 227577 - DNA, 25 bp, Probe sequence
ggtacgttggcagacacgaaaaaat

SEQ ID NO: 227578 - DNA, 25 bp, Probe sequence
ggatccgatcaagtaagtgcatata

SEQ ID NO: 227579 - DNA, 25 bp, Probe sequence
ggactatatttatgaatttgcgggt

SEQ ID NO: 227580 - DNA, 25 bp, Probe sequence
ggcatacacacaattgtgcaacgct

SEQ ID NO: 227581 - DNA, 25 bp, Probe sequence
tcgtggtgtctagtaagaagagtga

SEQ ID NO: 227582 - DNA, 25 bp, Probe sequence
tacaatttaaatagccaacaaacgg

SEQ ID NO: 227583 - DNA, 25 bp, Probe sequence
tacacacaattgtgcaacgctacaa

SEQ ID NO: 227584 - DNA, 25 bp, Probe sequence
tagacatacatatcaatctattgaa

SEQ ID NO: 227585 - DNA, 25 bp, Probe sequence
tttgcgggtataactgaagccatta

SEQ ID NO: 227586 - DNA, 25 bp, Probe sequence
atatttggtggtacgacgccattag

SEQ ID NO: 227587 - DNA, 25 bp, Probe sequence
atcgcatttatgttattacattcac

SEQ ID NO: 227588 - DNA, 25 bp, Probe sequence
atggttcgattttggtgtctatgca

SEQ ID NO: 227589 - DNA, 25 bp, Probe sequence
agccattgcgtttttattaagacca

SEQ ID NO: 227590 - DNA, 25 bp, Probe sequence
acattaactttttacaaatcatcag

SEQ ID NO: 227591 - DNA, 25 bp, Probe sequence
acaggtggagagtatgcgggggcaa

SEQ ID NO: 227592 - DNA, 25 bp, Probe sequence
aactgcgtacattggagcgaacttc

SEQ ID NO: 227593 - DNA, 25 bp, Probe sequence
cattttcaacattaaccattggatt

SEQ ID NO: 227594 - DNA, 25 bp, Probe sequence
cggtaatgcaatggaatggttcgat

SEQ ID NO: 227595 - DNA, 25 bp, Probe sequence
gcgtcgtaactcattaggtagtgga

SEQ ID NO: 227596 - DNA, 25 bp, Probe sequence
gcattaatgtttggtaagttagcgg

SEQ ID NO: 227597 - DNA, 25 bp, Probe sequence
gcagcattagccattgcgtttttat

SEQ ID NO: 227598 - DNA, 25 bp, Probe sequence
gcacctgcgtattatttaacagcaa

SEQ ID NO: 227599 - DNA, 25 bp, Probe sequence
gaagaatcaccagttttcgaaaatg

SEQ ID NO: 227600 - DNA, 25 bp, Probe sequence
gagtatgcgggggcaatgacatatg

SEQ ID NO: 227601 - DNA, 25 bp, Probe sequence
gatccattagcacctgcgtattatt

SEQ ID NO: 227602 - DNA, 25 bp, Probe sequence
gttgactttcgcagcattagccatt

SEQ ID NO: 227603 - DNA, 25 bp, Probe sequence
gttattacattcacaatcatttgtt

SEQ ID NO: 227604 - DNA, 25 bp, Probe sequence
gtagctgttgtattcttcaatgtta

SEQ ID NO: 227605 - DNA, 25 bp, Probe sequence
gtgtcatggcaataatgattccatt

SEQ ID NO: 227606 - DNA, 25 bp, Probe sequence
ggtgtctatgcatatacaactgcgt

SEQ ID NO: 227607 - DNA, 25 bp, Probe sequence
ggtacgacgccattagttgcaacat

SEQ ID NO: 227608 - DNA, 25 bp, Probe sequence
ggactttgggcaccaatactattat

SEQ ID NO: 227609 - DNA, 25 bp, Probe sequence
tggagcgaacttcttctctccagta

SEQ ID NO: 227610 - DNA, 25 bp, Probe sequence
tggcatcatttggttggagaatccc

SEQ ID NO: 227611 - DNA, 25 bp, Probe sequence
tgttgcaaccggtatcggtaatgca

SEQ ID NO: 227612 - DNA, 25 bp, Probe sequence
tgtattaattacttgtgtcatggca

SEQ ID NO: 227613 - DNA, 25 bp, Probe sequence
tgttttgtagctgttgtattcttca

SEQ ID NO: 227614 - DNA, 25 bp, Probe sequence
tgatcaaattggactttgggcacca

SEQ ID NO: 227615 - DNA, 25 bp, Probe sequence
tcatctccagataagcgtcgtaact

SEQ ID NO: 227616 - DNA, 25 bp, Probe sequence
tattcggcttatatttacgtcgtaa

SEQ ID NO: 227617 - DNA, 25 bp, Probe sequence
ttattcctaggattattcggcttat

SEQ ID NO: 227618 - DNA, 25 bp, Probe sequence
ttggttggagaatcccattcttact

SEQ ID NO: 227619 - DNA, 25 bp, Probe sequence
ttcgacaaatgttgactttcgcagc

SEQ ID NO: 227620 - DNA, 25 bp, Probe sequence
atctctagttttggttcacactacg

SEQ ID NO: 227621 - DNA, 25 bp, Probe sequence
aggcttatctctagttttggttcac

SEQ ID NO: 227622 - DNA, 25 bp, Probe sequence
agcgggcggttatgcttatttagct

SEQ ID NO: 227623 - DNA, 25 bp, Probe sequence
aagtgagacatataaattcgctact

SEQ ID NO: 227624 - DNA, 25 bp, Probe sequence
aatcgaaaccgtcgacaatacaaat

SEQ ID NO: 227625 - DNA, 25 bp, Probe sequence
ctctagttttggttcacactacgaa

SEQ ID NO: 227626 - DNA, 25 bp, Probe sequence
gcggttatgcttatttagctttagc

SEQ ID NO: 227627 - DNA, 25 bp, Probe sequence
gcttatctctagttttggttcacac

SEQ ID NO: 227628 - DNA, 25 bp, Probe sequence
gctttgttagttattggtggtatta

SEQ ID NO: 227629 - DNA, 25 bp, Probe sequence
gcaggtatcatttttttaatgccat

SEQ ID NO: 227630 - DNA, 25 bp, Probe sequence
gaaggtatagtacatatttcaaaaa

SEQ ID NO: 227631 - DNA, 25 bp, Probe sequence
gaaaatttatatggacgaaggtggc

SEQ ID NO: 227632 - DNA, 25 bp, Probe sequence
gaaacaagcgggcggttatgcttat

SEQ ID NO: 227633 - DNA, 25 bp, Probe sequence
gaaaccgtcgacaatacaaatataa

SEQ ID NO: 227634 - DNA, 25 bp, Probe sequence
gatactattacggtagttttgtaat

SEQ ID NO: 227635 - DNA, 25 bp, Probe sequence
gttaattgttgcgaaaaaagctaca

SEQ ID NO: 227636 - DNA, 25 bp, Probe sequence
gtttttgctttgttagttattggtg

SEQ ID NO: 227637 - DNA, 25 bp, Probe sequence
gtatcatttttttaatgccatatgg

SEQ ID NO: 227638 - DNA, 25 bp, Probe sequence
gtactttcaacgttgttaattgttg

SEQ ID NO: 227639 - DNA, 25 bp, Probe sequence
gtaatgaaacaagcgggcggttatg

SEQ ID NO: 227640 - DNA, 25 bp, Probe sequence
gtaatcccagtttttgctttgttag

SEQ ID NO: 227641 - DNA, 25 bp, Probe sequence
gggcggttatgcttatttagcttta

SEQ ID NO: 227642 - DNA, 25 bp, Probe sequence
ggtggcgtaagatactattacggta

SEQ ID NO: 227643 - DNA, 25 bp, Probe sequence
ggtatttctcaattttatctatatt

SEQ ID NO: 227644 - DNA, 25 bp, Probe sequence
ggacgaaggtggcgtaagatactat

SEQ ID NO: 227645 - DNA, 25 bp, Probe sequence
tagttttggttcacactacgaaaat

SEQ ID NO: 227646 - DNA, 25 bp, Probe sequence
ttttatttctaatcttggctacggc

SEQ ID NO: 227647 - DNA, 25 bp, Probe sequence
tcccagtttttgctttgttagttat

SEQ ID NO: 227648 - DNA, 25 bp, Probe sequence
taatcccagtttttgctttgttagt

SEQ ID NO: 227649 - DNA, 25 bp, Probe sequence
tttggttcacactacgaaaatttat

SEQ ID NO: 227650 - DNA, 25 bp, Probe sequence
ttttttatttctaatcttggctacg

SEQ ID NO: 227651 - DNA, 25 bp, Probe sequence
ttacactacgattggtttgtcaatt

SEQ ID NO: 227652 - DNA, 25 bp, Probe sequence
ttcaacgttgttaattgttgcgaaa

SEQ ID NO: 227653 - DNA, 25 bp, Probe sequence
ttctcaattttatctatattatata

SEQ ID NO: 227654 - DNA, 25 bp, Probe sequence
atatccagcacatgttgaacgcctt

SEQ ID NO: 227655 - DNA, 25 bp, Probe sequence
atgttgaacgccttttaacgcaatc

SEQ ID NO: 227656 - DNA, 25 bp, Probe sequence
atgtttcttgttccaacgatgatta

SEQ ID NO: 227657 - DNA, 25 bp, Probe sequence
aggacagaccacttttcatcctgaa

SEQ ID NO: 227658 - DNA, 25 bp, Probe sequence
accactatcgcactcgttaacatta

SEQ ID NO: 227659 - DNA, 25 bp, Probe sequence
acttcagggacaactggactgccaa

SEQ ID NO: 227660 - DNA, 25 bp, Probe sequence
acaatccaatcattttttagcagtg

SEQ ID NO: 227661 - DNA, 25 bp, Probe sequence
aaagttgctatgtttcttgttccaa

SEQ ID NO: 227662 - DNA, 25 bp, Probe sequence
catcggtattccaaatgagcgtttt

SEQ ID NO: 227663 - DNA, 25 bp, Probe sequence
cattatatgcgttattgtttgcttt

SEQ ID NO: 227664 - DNA, 25 bp, Probe sequence
ctagcgcagttgaatctttgcagaa

SEQ ID NO: 227665 - DNA, 25 bp, Probe sequence
cggaaaccagttttatcagctataa

SEQ ID NO: 227666 - DNA, 25 bp, Probe sequence
gaatcacgatcacaatggtatagga

SEQ ID NO: 227667 - DNA, 25 bp, Probe sequence
gaagattcatggttggcttcttttg

SEQ ID NO: 227668 - DNA, 25 bp, Probe sequence
gaaacgctatgaaattccatcgatg

SEQ ID NO: 227669 - DNA, 25 bp, Probe sequence
gaaattccatcgatgattcatcatg

SEQ ID NO: 227670 - DNA, 25 bp, Probe sequence
gatgtcgatgtatttgagaggtgaa

SEQ ID NO: 227671 - DNA, 25 bp, Probe sequence
gattgaattttttggtacatcggaa

SEQ ID NO: 227672 - DNA, 25 bp, Probe sequence
gattcaacgcaattacagcactacc

SEQ ID NO: 227673 - DNA, 25 bp, Probe sequence
gttatttagctttgcatcgtttaca

SEQ ID NO: 227674 - DNA, 25 bp, Probe sequence
gtattgctttattctggtgatgtga

SEQ ID NO: 227675 - DNA, 25 bp, Probe sequence
gtaggtgtgctatttccaaatgtgg

SEQ ID NO: 227676 - DNA, 25 bp, Probe sequence
ggactgccaaaagcatattatcgtg

SEQ ID NO: 227677 - DNA, 25 bp, Probe sequence
ggcaaagtactatacatcgtcaatt

SEQ ID NO: 227678 - DNA, 25 bp, Probe sequence
tgcatcgtttacataaagtgcctat

SEQ ID NO: 227679 - DNA, 25 bp, Probe sequence
tgaatcagcaagcaccagttgaatc

SEQ ID NO: 227680 - DNA, 25 bp, Probe sequence
tgcagaaatattcacttaaccctgt

SEQ ID NO: 227681 - DNA, 25 bp, Probe sequence
tgcccgcatcactagcgcagttgaa

SEQ ID NO: 227682 - DNA, 25 bp, Probe sequence
tacatattggttttacttcagggac

SEQ ID NO: 227683 - DNA, 25 bp, Probe sequence
tatagtcaactaaatgcccgcatca

SEQ ID NO: 227684 - DNA, 25 bp, Probe sequence
tattctggtgatgtgacacttacac

SEQ ID NO: 227685 - DNA, 25 bp, Probe sequence
tattgtttgctttaagttccggtcg

SEQ ID NO: 227686 - DNA, 25 bp, Probe sequence
ttccggtcgtacttttataggacag

SEQ ID NO: 227687 - DNA, 25 bp, Probe sequence
ttacagcactaccccaatttattac

SEQ ID NO: 227688 - DNA, 25 bp, Probe sequence
attacctgagttttatgagcgtgca

SEQ ID NO: 227689 - DNA, 25 bp, Probe sequence
atttgggaaatatggtggcacttta

SEQ ID NO: 227690 - DNA, 25 bp, Probe sequence
aggtaatgttgttgggaatggtggc

SEQ ID NO: 227691 - DNA, 25 bp, Probe sequence
agtaccagccatttccaacttacta

SEQ ID NO: 227692 - DNA, 25 bp, Probe sequence
agatatggcatacgaattaggtttc

SEQ ID NO: 227693 - DNA, 25 bp, Probe sequence
agcatcaggtcatccatacggtgca

SEQ ID NO: 227694 - DNA, 25 bp, Probe sequence
aaacgaccgcattctgtgtacgaaa

SEQ ID NO: 227695 - DNA, 25 bp, Probe sequence
aagattcaatacctggcgtcacaat

SEQ ID NO: 227696 - DNA, 25 bp, Probe sequence
cagctaaacgaactgcatttgggaa

SEQ ID NO: 227697 - DNA, 25 bp, Probe sequence
ctggcgtcacaatcgatcggcaatg

SEQ ID NO: 227698 - DNA, 25 bp, Probe sequence
cgatcggcaatgtgggtctggactt

SEQ ID NO: 227699 - DNA, 25 bp, Probe sequence
cctggcattggtccagtaccagcca

SEQ ID NO: 227700 - DNA, 25 bp, Probe sequence
gcgacccatcaatgattcaaggtgc

SEQ ID NO: 227701 - DNA, 25 bp, Probe sequence
gcaccttggaaaatcaaacgaccgc

SEQ ID NO: 227702 - DNA, 25 bp, Probe sequence
gaatcaagcagtcatagttgcagct

SEQ ID NO: 227703 - DNA, 25 bp, Probe sequence
gaccgttaccgctgcgaatagttgt

SEQ ID NO: 227704 - DNA, 25 bp, Probe sequence
gaaaagcattgcttgaagcggggct

SEQ ID NO: 227705 - DNA, 25 bp, Probe sequence
gaaagtctaaaatcacatattccga

SEQ ID NO: 227706 - DNA, 25 bp, Probe sequence
gaaagtacaagtcgagcaccttgga

SEQ ID NO: 227707 - DNA, 25 bp, Probe sequence
gaaagtgttcaatatgcatgtcgca

SEQ ID NO: 227708 - DNA, 25 bp, Probe sequence
gataactttggccgatttaagcccg

SEQ ID NO: 227709 - DNA, 25 bp, Probe sequence
gttgcctgccaacaagctttaaata

SEQ ID NO: 227710 - DNA, 25 bp, Probe sequence
gttgggaatggtggcaatattgcaa

SEQ ID NO: 227711 - DNA, 25 bp, Probe sequence
gtgcaagcggtgcccaattagtgac

SEQ ID NO: 227712 - DNA, 25 bp, Probe sequence
gtgggtctggacttgaaagtgttca

SEQ ID NO: 227713 - DNA, 25 bp, Probe sequence
gtggcactttaaaacatttagagcc

SEQ ID NO: 227714 - DNA, 25 bp, Probe sequence
ggggtggtgcattagcatcaggtca

SEQ ID NO: 227715 - DNA, 25 bp, Probe sequence
gggggaggtctaggaaatgcagcat

SEQ ID NO: 227716 - DNA, 25 bp, Probe sequence
ggtgttacggtaggtgttgattcta

SEQ ID NO: 227717 - DNA, 25 bp, Probe sequence
tgagcgtgcatcatttgcacctgaa

SEQ ID NO: 227718 - DNA, 25 bp, Probe sequence
tgcacctgaaatgagcgacccatca

SEQ ID NO: 227719 - DNA, 25 bp, Probe sequence
tcatccatacggtgcaagcggtgcc

SEQ ID NO: 227720 - DNA, 25 bp, Probe sequence
tcaaaggtgggaccgttaccgctgc

SEQ ID NO: 227721 - DNA, 25 bp, Probe sequence
ttaacgaagcgttcagtgcacaggt

SEQ ID NO: 227722 - DNA, 25 bp, Probe sequence
atatcacacgttatacaatggcttt

SEQ ID NO: 227723 - DNA, 25 bp, Probe sequence
atacaatggctttaacattaactaa

SEQ ID NO: 227724 - DNA, 25 bp, Probe sequence
atgtcataacggttacacaaacttt

SEQ ID NO: 227725 - DNA, 25 bp, Probe sequence
atcacacgttatacaatggctttaa

SEQ ID NO: 227726 - DNA, 25 bp, Probe sequence
aggatagtgtggctgcatattatca

SEQ ID NO: 227727 - DNA, 25 bp, Probe sequence
agtaccaccattaatgtgtgcgtca

SEQ ID NO: 227728 - DNA, 25 bp, Probe sequence
accaccattaatgtgtgcgtcatta

SEQ ID NO: 227729 - DNA, 25 bp, Probe sequence
accattaatgtgtgcgtcattatgg

SEQ ID NO: 227730 - DNA, 25 bp, Probe sequence
actcgattctaaccagcgattaaat

SEQ ID NO: 227731 - DNA, 25 bp, Probe sequence
acaaacttttattaaggcgatgaag

SEQ ID NO: 227732 - DNA, 25 bp, Probe sequence
aaaatatgcaaatagcgaactgatt

SEQ ID NO: 227733 - DNA, 25 bp, Probe sequence
aaccagcgattaaatgtgtcatttt

SEQ ID NO: 227734 - DNA, 25 bp, Probe sequence
aagtaccaccattaatgtgtgcgtc

SEQ ID NO: 227735 - DNA, 25 bp, Probe sequence
aatgtgtcattttctaaggatagtg

SEQ ID NO: 227736 - DNA, 25 bp, Probe sequence
aatagcgaactgattttaacaaaat

SEQ ID NO: 227737 - DNA, 25 bp, Probe sequence
cacgttatacaatggctttaacatt

SEQ ID NO: 227738 - DNA, 25 bp, Probe sequence
ctaaccagcgattaaatgtgtcatt

SEQ ID NO: 227739 - DNA, 25 bp, Probe sequence
gcaatatcacacgttatacaatggc

SEQ ID NO: 227740 - DNA, 25 bp, Probe sequence
gaagtaccaccattaatgtgtgcgt

SEQ ID NO: 227741 - DNA, 25 bp, Probe sequence
gatcaacatgtcataacggttacac

SEQ ID NO: 227742 - DNA, 25 bp, Probe sequence
gattctaaccagcgattaaatgtgt

SEQ ID NO: 227743 - DNA, 25 bp, Probe sequence
gtaccaccattaatgtgtgcgtcat

SEQ ID NO: 227744 - DNA, 25 bp, Probe sequence
gtcattttctaaggatagtgtggct

SEQ ID NO: 227745 - DNA, 25 bp, Probe sequence
tcataacggttacacaaacttttat

SEQ ID NO: 227746 - DNA, 25 bp, Probe sequence
tgcaaatagcgaactgattttaaca

SEQ ID NO: 227747 - DNA, 25 bp, Probe sequence
tcgattctaaccagcgattaaatgt

SEQ ID NO: 227748 - DNA, 25 bp, Probe sequence
tcgcaatatcacacgttatacaatg

SEQ ID NO: 227749 - DNA, 25 bp, Probe sequence
tcaacatgtcataacggttacacaa

SEQ ID NO: 227750 - DNA, 25 bp, Probe sequence
taaggatagtgtggctgcatattat

SEQ ID NO: 227751 - DNA, 25 bp, Probe sequence
tacacaaacttttattaaggcgatg

SEQ ID NO: 227752 - DNA, 25 bp, Probe sequence
taccaccattaatgtgtgcgtcatt

SEQ ID NO: 227753 - DNA, 25 bp, Probe sequence
tttactcgattctaaccagcgatta

SEQ ID NO: 227754 - DNA, 25 bp, Probe sequence
ttactcgattctaaccagcgattaa

SEQ ID NO: 227755 - DNA, 25 bp, Probe sequence
ttctaaggatagtgtggctgcatat

SEQ ID NO: 227756 - DNA, 25 bp, Probe sequence
atttggcgctcgtaaatgatgataa

SEQ ID NO: 227757 - DNA, 25 bp, Probe sequence
atatttggcgctcgtaaatgatgat

SEQ ID NO: 227758 - DNA, 25 bp, Probe sequence
atacataatgagattgtgccaggac

SEQ ID NO: 227759 - DNA, 25 bp, Probe sequence
ataaatgaatatttggcgctcgtaa

SEQ ID NO: 227760 - DNA, 25 bp, Probe sequence
atgaatatttggcgctcgtaaatga

SEQ ID NO: 227761 - DNA, 25 bp, Probe sequence
atgagattgtgccaggacaattagt

SEQ ID NO: 227762 - DNA, 25 bp, Probe sequence
atgacgatggagagattaaaataaa

SEQ ID NO: 227763 - DNA, 25 bp, Probe sequence
acataatgagattgtgccaggacaa

SEQ ID NO: 227764 - DNA, 25 bp, Probe sequence
aaatgaatatttggcgctcgtaaat

SEQ ID NO: 227765 - DNA, 25 bp, Probe sequence
aatgatgataatccaatacataatg

SEQ ID NO: 227766 - DNA, 25 bp, Probe sequence
aatgaatatttggcgctcgtaaatg

SEQ ID NO: 227767 - DNA, 25 bp, Probe sequence
aatatttggcgctcgtaaatgatga

SEQ ID NO: 227768 - DNA, 25 bp, Probe sequence
gcgctcgtaaatgatgataatccaa

SEQ ID NO: 227769 - DNA, 25 bp, Probe sequence
gctcgtaaatgatgataatccaata

SEQ ID NO: 227770 - DNA, 25 bp, Probe sequence
gaatatttggcgctcgtaaatgatg

SEQ ID NO: 227771 - DNA, 25 bp, Probe sequence
gagattgtgccaggacaattagtga

SEQ ID NO: 227772 - DNA, 25 bp, Probe sequence
gataaatgaatatttggcgctcgta

SEQ ID NO: 227773 - DNA, 25 bp, Probe sequence
gattgtgccaggacaattagtgagt

SEQ ID NO: 227774 - DNA, 25 bp, Probe sequence
gtaaatgatgataatccaatacata

SEQ ID NO: 227775 - DNA, 25 bp, Probe sequence
gtgccaggacaattagtgagtcaaa

SEQ ID NO: 227776 - DNA, 25 bp, Probe sequence
ggataaatgaatatttggcgctcgt

SEQ ID NO: 227777 - DNA, 25 bp, Probe sequence
ggcgctcgtaaatgatgataatcca

SEQ ID NO: 227778 - DNA, 25 bp, Probe sequence
tggcgctcgtaaatgatgataatcc

SEQ ID NO: 227779 - DNA, 25 bp, Probe sequence
tgtgccaggacaattagtgagtcaa

SEQ ID NO: 227780 - DNA, 25 bp, Probe sequence
tgaatatttggcgctcgtaaatgat

SEQ ID NO: 227781 - DNA, 25 bp, Probe sequence
taatgagattgtgccaggacaatta

SEQ ID NO: 227782 - DNA, 25 bp, Probe sequence
taaatgaatatttggcgctcgtaaa

SEQ ID NO: 227783 - DNA, 25 bp, Probe sequence
tacataatgagattgtgccaggaca

SEQ ID NO: 227784 - DNA, 25 bp, Probe sequence
tagcaattaatgacgatggagagat

SEQ ID NO: 227785 - DNA, 25 bp, Probe sequence
tatttggcgctcgtaaatgatgata

SEQ ID NO: 227786 - DNA, 25 bp, Probe sequence
tatagcaattaatgacgatggagag

SEQ ID NO: 227787 - DNA, 25 bp, Probe sequence
tttggcgctcgtaaatgatgataat

SEQ ID NO: 227788 - DNA, 25 bp, Probe sequence
ttggcgctcgtaaatgatgataatc

SEQ ID NO: 227789 - DNA, 25 bp, Probe sequence
ttgtgccaggacaattagtgagtca

SEQ ID NO: 227790 - DNA, 25 bp, Probe sequence
attggttgggaaacatttactgatg

SEQ ID NO: 227791 - DNA, 25 bp, Probe sequence
attcgactgcaatcgtataccctga

SEQ ID NO: 227792 - DNA, 25 bp, Probe sequence
attccctccatctttacgtaatatg

SEQ ID NO: 227793 - DNA, 25 bp, Probe sequence
gtgggggaaacctgcacagcaaaaa

SEQ ID NO: 227794 - DNA, 25 bp, Probe sequence
atggaatggtcgcaaatttttcatg

SEQ ID NO: 227795 - DNA, 25 bp, Probe sequence
aaagcttatcgatacatctaaacat

SEQ ID NO: 227796 - DNA, 25 bp, Probe sequence
aaagctatgcatgattttttagaaa

SEQ ID NO: 227797 - DNA, 25 bp, Probe sequence
aaccaagcacatggattagcatttt

SEQ ID NO: 227798 - DNA, 25 bp, Probe sequence
aattctcatcgtgatattggttggg

SEQ ID NO: 227799 - DNA, 25 bp, Probe sequence
caagcgtttgatttaacaccgtttg

SEQ ID NO: 227800 - DNA, 25 bp, Probe sequence
cactgtctgcatatagaggattctt

SEQ ID NO: 227801 - DNA, 25 bp, Probe sequence
tcagtgcatcctagtccactgtctg

SEQ ID NO: 227802 - DNA, 25 bp, Probe sequence
catgttgtctttattttgtggggga

SEQ ID NO: 227803 - DNA, 25 bp, Probe sequence
ctgcaatcgtataccctgataggga

SEQ ID NO: 227804 - DNA, 25 bp, Probe sequence
ccctccatctttacgtaatatgtat

SEQ ID NO: 227805 - DNA, 25 bp, Probe sequence
gcattttcagtgcaacctaacgcaa

SEQ ID NO: 227806 - DNA, 25 bp, Probe sequence
gcagtgtctgattataaagaacatg

SEQ ID NO: 227807 - DNA, 25 bp, Probe sequence
gaatacagttttaaccgtaagacag

SEQ ID NO: 227808 - DNA, 25 bp, Probe sequence
tgcaacctaacgcaaaattccctcc

SEQ ID NO: 227809 - DNA, 25 bp, Probe sequence
gaaacatgactttaaagctatgcat

SEQ ID NO: 227810 - DNA, 25 bp, Probe sequence
gaaattattaaagcagtgtctgatt

SEQ ID NO: 227811 - DNA, 25 bp, Probe sequence
gacagggtgaagcaaattctcatcg

SEQ ID NO: 227812 - DNA, 25 bp, Probe sequence
gacataacaacgaaacatgacttta

SEQ ID NO: 227813 - DNA, 25 bp, Probe sequence
gaggattctttggatcaaaaccgta

SEQ ID NO: 227814 - DNA, 25 bp, Probe sequence
gatcaaaaccgtattccaaagcgaa

SEQ ID NO: 227815 - DNA, 25 bp, Probe sequence
gatttaacaccgtttgaaaatatca

SEQ ID NO: 227816 - DNA, 25 bp, Probe sequence
gttatattaggacaagacccgtatc

SEQ ID NO: 227817 - DNA, 25 bp, Probe sequence
gggtgaagcaaattctcatcgtgat

SEQ ID NO: 227818 - DNA, 25 bp, Probe sequence
ggtcgcaaatttttcatgacataac

SEQ ID NO: 227819 - DNA, 25 bp, Probe sequence
ggattagcattttcagtgcaaccta

SEQ ID NO: 227820 - DNA, 25 bp, Probe sequence
tcctagtccactgtctgcatataga

SEQ ID NO: 227821 - DNA, 25 bp, Probe sequence
taattggtgtgaaagtgaggcgtag

SEQ ID NO: 227822 - DNA, 25 bp, Probe sequence
taggacaagacccgtatcatggtcc

SEQ ID NO: 227823 - DNA, 25 bp, Probe sequence
tataaaatcagtgcatcctagtcca

SEQ ID NO: 227824 - DNA, 25 bp, Probe sequence
atacgcattcagcacatcatcataa

SEQ ID NO: 227825 - DNA, 25 bp, Probe sequence
agtcatattcacaaccttcaaacca

SEQ ID NO: 227826 - DNA, 25 bp, Probe sequence
agattagcgacagatgatgacattg

SEQ ID NO: 227827 - DNA, 25 bp, Probe sequence
agcgacagatgatgacattggcaat

SEQ ID NO: 227828 - DNA, 25 bp, Probe sequence
accacatattggtgaacaacaaatg

SEQ ID NO: 227829 - DNA, 25 bp, Probe sequence
acgcattcagcacatcatcataata

SEQ ID NO: 227830 - DNA, 25 bp, Probe sequence
aaagtaaatacgcattcagcacatc

SEQ ID NO: 227831 - DNA, 25 bp, Probe sequence
aacatcaaatacaccacatattggt

SEQ ID NO: 227832 - DNA, 25 bp, Probe sequence
aaccaacaacaaagattagcgacag

SEQ ID NO: 227833 - DNA, 25 bp, Probe sequence
aagaattagtacaagcagagcaggc

SEQ ID NO: 227834 - DNA, 25 bp, Probe sequence
aataagtcatattcacaaccttcaa

SEQ ID NO: 227835 - DNA, 25 bp, Probe sequence
aatacgcattcagcacatcatcata

SEQ ID NO: 227836 - DNA, 25 bp, Probe sequence
cacaaccttcaaaccaacaacaaag

SEQ ID NO: 227837 - DNA, 25 bp, Probe sequence
catattcacaaccttcaaaccaaca

SEQ ID NO: 227838 - DNA, 25 bp, Probe sequence
ctgaaattgaagcgatgggtggtaa

SEQ ID NO: 227839 - DNA, 25 bp, Probe sequence
gccatacatatattaacatctttat

SEQ ID NO: 227840 - DNA, 25 bp, Probe sequence
gcattcagcacatcatcataataag

SEQ ID NO: 227841 - DNA, 25 bp, Probe sequence
gaatagagaaactttaatagcacga

SEQ ID NO: 227842 - DNA, 25 bp, Probe sequence
gaagcgatgggtggtaaagtaaata

SEQ ID NO: 227843 - DNA, 25 bp, Probe sequence
gaaactttaatagcacgaattgagc

SEQ ID NO: 227844 - DNA, 25 bp, Probe sequence
gacagatgatgacattggcaatggt

SEQ ID NO: 227845 - DNA, 25 bp, Probe sequence
gacattggcaatggtgaatccatat

SEQ ID NO: 227846 - DNA, 25 bp, Probe sequence
gactttgaaaaacatatgtatgcca

SEQ ID NO: 227847 - DNA, 25 bp, Probe sequence
gtattgctaaccataatcaaatgcc

SEQ ID NO: 227848 - DNA, 25 bp, Probe sequence
gtatgccatacatatattaacatct

SEQ ID NO: 227849 - DNA, 25 bp, Probe sequence
gtaaatacgcattcagcacatcatc

SEQ ID NO: 227850 - DNA, 25 bp, Probe sequence
gtcatattcacaaccttcaaaccaa

SEQ ID NO: 227851 - DNA, 25 bp, Probe sequence
ggcaatggtgaatccatatttgatt

SEQ ID NO: 227852 - DNA, 25 bp, Probe sequence
tggtgaatccatatttgatttttaa

SEQ ID NO: 227853 - DNA, 25 bp, Probe sequence
tcagcacatcatcataataagtcat

SEQ ID NO: 227854 - DNA, 25 bp, Probe sequence
tattcacaaccttcaaaccaacaac

SEQ ID NO: 227855 - DNA, 25 bp, Probe sequence
ttaatagcacgaattgagcaagaat

SEQ ID NO: 227856 - DNA, 25 bp, Probe sequence
ttcacaaccttcaaaccaacaacaa

SEQ ID NO: 227857 - DNA, 25 bp, Probe sequence
ttgctaaccataatcaaatgccaca

SEQ ID NO: 227858 - DNA, 25 bp, Probe sequence
attggtggcgtattgttcatcattg

SEQ ID NO: 227859 - DNA, 25 bp, Probe sequence
attattttctttagtggatcattat

SEQ ID NO: 227860 - DNA, 25 bp, Probe sequence
attttaggtgcattaaacgcgatga

SEQ ID NO: 227861 - DNA, 25 bp, Probe sequence
atcaatgttaactgggctggctggt

SEQ ID NO: 227862 - DNA, 25 bp, Probe sequence
atcattgcgacattcaaatttgctg

SEQ ID NO: 227863 - DNA, 25 bp, Probe sequence
aggtgcgattacgccaattggtggc

SEQ ID NO: 227864 - DNA, 25 bp, Probe sequence
agtggtacaacttcaatcaatgtta

SEQ ID NO: 227865 - DNA, 25 bp, Probe sequence
acttcaatcaatgttaactgggctg

SEQ ID NO: 227866 - DNA, 25 bp, Probe sequence
actgggctggctggttaatatttgc

SEQ ID NO: 227867 - DNA, 25 bp, Probe sequence
aaatgtaccatggcttagcattatt

SEQ ID NO: 227868 - DNA, 25 bp, Probe sequence
taaagttttaggtgcgattacgcca

SEQ ID NO: 227869 - DNA, 25 bp, Probe sequence
aagtgatcactatttatcagtatgg

SEQ ID NO: 227870 - DNA, 25 bp, Probe sequence
caatgttaactgggctggctggtta

SEQ ID NO: 227871 - DNA, 25 bp, Probe sequence
caatcaatgttaactgggctggctg

SEQ ID NO: 227872 - DNA, 25 bp, Probe sequence
cattaaacgcgatgatggctgtcgg

SEQ ID NO: 227873 - DNA, 25 bp, Probe sequence
gccaattggtggcgtattgttcatc

SEQ ID NO: 227874 - DNA, 25 bp, Probe sequence
gcaacgacgtatcaaatgtaccatg

SEQ ID NO: 227875 - DNA, 25 bp, Probe sequence
gaaattatttattattttaggtgca

SEQ ID NO: 227876 - DNA, 25 bp, Probe sequence
gacgtatcaaatgtaccatggctta

SEQ ID NO: 227877 - DNA, 25 bp, Probe sequence
gatcactatttatcagtatgggaaa

SEQ ID NO: 227878 - DNA, 25 bp, Probe sequence
gttttaggtgcgattacgccaattg

SEQ ID NO: 227879 - DNA, 25 bp, Probe sequence
gtatcaaatgtaccatggcttagca

SEQ ID NO: 227880 - DNA, 25 bp, Probe sequence
gtatgggaaaaagcaacgacgtatc

SEQ ID NO: 227881 - DNA, 25 bp, Probe sequence
gtaccatggcttagcattattaatt

SEQ ID NO: 227882 - DNA, 25 bp, Probe sequence
gtaattagtggtacaacttcaatca

SEQ ID NO: 227883 - DNA, 25 bp, Probe sequence
gggctggctggttaatatttgctgg

SEQ ID NO: 227884 - DNA, 25 bp, Probe sequence
ggtattattttctttagtggatcat

SEQ ID NO: 227885 - DNA, 25 bp, Probe sequence
ggcttagcattattaattataggtg

SEQ ID NO: 227886 - DNA, 25 bp, Probe sequence
tggataatgttaatcattgcgacat

SEQ ID NO: 227887 - DNA, 25 bp, Probe sequence
tgcattaaacgcgatgatggctgtc

SEQ ID NO: 227888 - DNA, 25 bp, Probe sequence
tgctggtattattttctttagtgga

SEQ ID NO: 227889 - DNA, 25 bp, Probe sequence
tgcgacattcaaatttgctggttaa

SEQ ID NO: 227890 - DNA, 25 bp, Probe sequence
tagtggatcattatatattttagta

SEQ ID NO: 227891 - DNA, 25 bp, Probe sequence
tatttgctggtattattttctttag

SEQ ID NO: 227892 - DNA, 25 bp, Probe sequence
atttccagtatcagggggcgcgttt

SEQ ID NO: 227893 - DNA, 25 bp, Probe sequence
atattatttctgtgtggcgatggta

SEQ ID NO: 227894 - DNA, 25 bp, Probe sequence
atgggcgattgcatatggttcatgt

SEQ ID NO: 227895 - DNA, 25 bp, Probe sequence
atggcgcattagtagagagatttcc

SEQ ID NO: 227896 - DNA, 25 bp, Probe sequence
acaaaacaccatatgtcgcaatcat

SEQ ID NO: 227897 - DNA, 25 bp, Probe sequence
aaattcttattgccagatgtcttaa

SEQ ID NO: 227898 - DNA, 25 bp, Probe sequence
caagtcgcttgttattttctatggg

SEQ ID NO: 227899 - DNA, 25 bp, Probe sequence
cattgcgggctgggacgtttatatt

SEQ ID NO: 227900 - DNA, 25 bp, Probe sequence
cattcattttcttagcgttgttatt

SEQ ID NO: 227901 - DNA, 25 bp, Probe sequence
cggaaatcattattgcgaccgtatt

SEQ ID NO: 227902 - DNA, 25 bp, Probe sequence
gcgcgtttgcctttagtttcttaag

SEQ ID NO: 227903 - DNA, 25 bp, Probe sequence
gcgaccgtattactacttgtattca

SEQ ID NO: 227904 - DNA, 25 bp, Probe sequence
gcagtcaggtccgattgcagcatca

SEQ ID NO: 227905 - DNA, 25 bp, Probe sequence
gcagcatcattaacttatgttgtca

SEQ ID NO: 227906 - DNA, 25 bp, Probe sequence
gacatttaagcttatcgtgtacagt

SEQ ID NO: 227907 - DNA, 25 bp, Probe sequence
gagtttcttctcatcatggttttta

SEQ ID NO: 227908 - DNA, 25 bp, Probe sequence
gatgttctttggttcattctttggt

SEQ ID NO: 227909 - DNA, 25 bp, Probe sequence
gggaaactatacaccattgcgggct

SEQ ID NO: 227910 - DNA, 25 bp, Probe sequence
gtattcatgctagtaacgattcgtg

SEQ ID NO: 227911 - DNA, 25 bp, Probe sequence
gtcatgattttatacactggttggt

SEQ ID NO: 227912 - DNA, 25 bp, Probe sequence
gtgtacagtttattagcagcatcat

SEQ ID NO: 227913 - DNA, 25 bp, Probe sequence
gtggttattgtatccgtggcaccat

SEQ ID NO: 227914 - DNA, 25 bp, Probe sequence
gtggcgcaagtgtatctggatcatt

SEQ ID NO: 227915 - DNA, 25 bp, Probe sequence
ggtgtatccattgcctactttatta

SEQ ID NO: 227916 - DNA, 25 bp, Probe sequence
ggttcatgtatcggatggggcgcat

SEQ ID NO: 227917 - DNA, 25 bp, Probe sequence
ggttagtgtctattgtggttattgt

SEQ ID NO: 227918 - DNA, 25 bp, Probe sequence
ggctcatttgtatcattcattttct

SEQ ID NO: 227919 - DNA, 25 bp, Probe sequence
tccgtggcaccatgggcatatgttg

SEQ ID NO: 227920 - DNA, 25 bp, Probe sequence
tgcctactttattacatgtttgtct

SEQ ID NO: 227921 - DNA, 25 bp, Probe sequence
tcggcagatatgtgagtttcttctc

SEQ ID NO: 227922 - DNA, 25 bp, Probe sequence
taatacgtatgcaccggtttacaaa

SEQ ID NO: 227923 - DNA, 25 bp, Probe sequence
tttacaaccgttagctgaacctagc

SEQ ID NO: 227924 - DNA, 25 bp, Probe sequence
tattagtgccaggttctcctgcagc

SEQ ID NO: 227925 - DNA, 25 bp, Probe sequence
tattctttgtgattcgatatcctaa

SEQ ID NO: 227926 - DNA, 25 bp, Probe sequence
attggttacaaaattgcacaacgtt

SEQ ID NO: 227927 - DNA, 25 bp, Probe sequence
attgcacaacgtttaggtggatatg

SEQ ID NO: 227928 - DNA, 25 bp, Probe sequence
attgtgcaatcaatccagaacttga

SEQ ID NO: 227929 - DNA, 25 bp, Probe sequence
accaatcgtgttaggtgatgagact

SEQ ID NO: 227930 - DNA, 25 bp, Probe sequence
aaatcatcaaaacgaaaccaggtgt

SEQ ID NO: 227931 - DNA, 25 bp, Probe sequence
aaacaatgtgaactacttcggtaca

SEQ ID NO: 227932 - DNA, 25 bp, Probe sequence
aaccaggtgtatcaagaacatcagg

SEQ ID NO: 227933 - DNA, 25 bp, Probe sequence
caatcatttgttgaacgacgtaaag

SEQ ID NO: 227934 - DNA, 25 bp, Probe sequence
gcgccaggtgctaaattacaaggtg

SEQ ID NO: 227935 - DNA, 25 bp, Probe sequence
gcgattgtaccaggtgttgctgaga

SEQ ID NO: 227936 - DNA, 25 bp, Probe sequence
gcagttggtccagtattacaaggtt

SEQ ID NO: 227937 - DNA, 25 bp, Probe sequence
gcaaatgtctttgtattcccaagtt

SEQ ID NO: 227938 - DNA, 25 bp, Probe sequence
gaagcaatcattgatggcgaattcc

SEQ ID NO: 227939 - DNA, 25 bp, Probe sequence
gaagctgtcaaattagcacaacaaa

SEQ ID NO: 227940 - DNA, 25 bp, Probe sequence
gaactacttcggtacaatgcttgtt

SEQ ID NO: 227941 - DNA, 25 bp, Probe sequence
gagactaaggttcaatctttagcgc

SEQ ID NO: 227942 - DNA, 25 bp, Probe sequence
gatgctgcgattgtaccaggtgttg

SEQ ID NO: 227943 - DNA, 25 bp, Probe sequence
gattatgttacaccaatcgtgttag

SEQ ID NO: 227944 - DNA, 25 bp, Probe sequence
gttgcaatgttaagcttttcaacaa

SEQ ID NO: 227945 - DNA, 25 bp, Probe sequence
gttgctgagaaaaaagcgccaggtg

SEQ ID NO: 227946 - DNA, 25 bp, Probe sequence
gttaaaatcgtattacctgaaggag

SEQ ID NO: 227947 - DNA, 25 bp, Probe sequence
gttctaacagctgcaacacaattac

SEQ ID NO: 227948 - DNA, 25 bp, Probe sequence
gtattcccaagtttagaagctggta

SEQ ID NO: 227949 - DNA, 25 bp, Probe sequence
gtacaatgcttgtttatgctggtaa

SEQ ID NO: 227950 - DNA, 25 bp, Probe sequence
ggttcaatctttagcgcaaaaactt

SEQ ID NO: 227951 - DNA, 25 bp, Probe sequence
ggatatgatgcagttggtccagtat

SEQ ID NO: 227952 - DNA, 25 bp, Probe sequence
ggcatggatccaaaagttgcaatgt

SEQ ID NO: 227953 - DNA, 25 bp, Probe sequence
ggcgaattccaatttgatgctgcga

SEQ ID NO: 227954 - DNA, 25 bp, Probe sequence
tcagcattaagctttggcatggatc

SEQ ID NO: 227955 - DNA, 25 bp, Probe sequence
tcacgtggctgctcaattgaagatg

SEQ ID NO: 227956 - DNA, 25 bp, Probe sequence
tcaacaaaagggtctgctaaatcag

SEQ ID NO: 227957 - DNA, 25 bp, Probe sequence
tacatctttggtgattgtgcaatca

SEQ ID NO: 227958 - DNA, 25 bp, Probe sequence
tattacaaggtttaaattctccagt

SEQ ID NO: 227959 - DNA, 25 bp, Probe sequence
ttagtggtgcagcacattcaacagg

SEQ ID NO: 227960 - DNA, 25 bp, Probe sequence
attgcccaggaaaatttgacttaag

SEQ ID NO: 227961 - DNA, 25 bp, Probe sequence
atattttaatggcgtcaactggcga

SEQ ID NO: 227962 - DNA, 25 bp, Probe sequence
atatcagataatgttgtgcgtactt

SEQ ID NO: 227963 - DNA, 25 bp, Probe sequence
atctttgtgttgaaggctctggttc

SEQ ID NO: 227964 - DNA, 25 bp, Probe sequence
atgcaatcaaagatcttggcggtgt

SEQ ID NO: 227965 - DNA, 25 bp, Probe sequence
atggcgtcaactggcgatatatcga

SEQ ID NO: 227966 - DNA, 25 bp, Probe sequence
aggtgtcgttctagatcaaggtgta

SEQ ID NO: 227967 - DNA, 25 bp, Probe sequence
actgttattcttggtattcatgatt

SEQ ID NO: 227968 - DNA, 25 bp, Probe sequence
acaaaacgattactgttcaagatgt

SEQ ID NO: 227969 - DNA, 25 bp, Probe sequence
aagatggcattgattatttaacgaa

SEQ ID NO: 227970 - DNA, 25 bp, Probe sequence
aatttgacttaagtatcgatggtaa

SEQ ID NO: 227971 - DNA, 25 bp, Probe sequence
aattgaacattcttattgcccagga

SEQ ID NO: 227972 - DNA, 25 bp, Probe sequence
aattgaaccatcttgtatggcctca

SEQ ID NO: 227973 - DNA, 25 bp, Probe sequence
caaaggacaaacagaaacaacgatt

SEQ ID NO: 227974 - DNA, 25 bp, Probe sequence
ctttcgcattcgatgatacattttg

SEQ ID NO: 227975 - DNA, 25 bp, Probe sequence
cctatgcaatctttcgcattcgatg

SEQ ID NO: 227976 - DNA, 25 bp, Probe sequence
gcgtacttggattcatcaacatact

SEQ ID NO: 227977 - DNA, 25 bp, Probe sequence
gcaggcatatcgcaacgaagagtta

SEQ ID NO: 227978 - DNA, 25 bp, Probe sequence
gcaatctttcgcattcgatgataca

SEQ ID NO: 227979 - DNA, 25 bp, Probe sequence
gaaggctctggttcagaacgtgcat

SEQ ID NO: 227980 - DNA, 25 bp, Probe sequence
gaagaatggcaaagatacgatacgt

SEQ ID NO: 227981 - DNA, 25 bp, Probe sequence
gaaatttgcaggcatatcgcaacga

SEQ ID NO: 227982 - DNA, 25 bp, Probe sequence
gagattggttataatgccattgtta

SEQ ID NO: 227983 - DNA, 25 bp, Probe sequence
gagttagaggcggtattgctgtaca

SEQ ID NO: 227984 - DNA, 25 bp, Probe sequence
gatgcaaacattttatgaacatgct

SEQ ID NO: 227985 - DNA, 25 bp, Probe sequence
gatcttggcggtgtattaaatatga

SEQ ID NO: 227986 - DNA, 25 bp, Probe sequence
gattcaagattgccgtttttaaaag

SEQ ID NO: 227987 - DNA, 25 bp, Probe sequence
gattcatcaacatactgttattctt

SEQ ID NO: 227988 - DNA, 25 bp, Probe sequence
gattgatgaagcgtttactgtgatg

SEQ ID NO: 227989 - DNA, 25 bp, Probe sequence
ggtattcatgattcaagattgccgt

SEQ ID NO: 227990 - DNA, 25 bp, Probe sequence
ggtattgctgtacaaatttatcttt

SEQ ID NO: 227991 - DNA, 25 bp, Probe sequence
ggttcagaacgtgcattgatgatgc

SEQ ID NO: 227992 - DNA, 25 bp, Probe sequence
tgttgtgcgtacttggattcatcaa

SEQ ID NO: 227993 - DNA, 25 bp, Probe sequence
tatatcgctgatgttcaaaggacaa

SEQ ID NO: 227994 - DNA, 25 bp, Probe sequence
atgttccggaatatctagtttctaa

SEQ ID NO: 227995 - DNA, 25 bp, Probe sequence
atacctcaagcagctgtgggagcat

SEQ ID NO: 227996 - DNA, 25 bp, Probe sequence
atccttcacgtttgcctgatggacg

SEQ ID NO: 227997 - DNA, 25 bp, Probe sequence
atggtagtcgcatctagtaataatg

SEQ ID NO: 227998 - DNA, 25 bp, Probe sequence
atggcaatcacatcaacgtgcattt

SEQ ID NO: 227999 - DNA, 25 bp, Probe sequence
agttgattctatacatattccgatg

SEQ ID NO: 228000 - DNA, 25 bp, Probe sequence
agacgtgccatgctctttttaagag

SEQ ID NO: 228001 - DNA, 25 bp, Probe sequence
agcggaagatatactctcagctgaa

SEQ ID NO: 228002 - DNA, 25 bp, Probe sequence
acctttatgggtgcacagacgatgt

SEQ ID NO: 228003 - DNA, 25 bp, Probe sequence
acttcaatacagacgtgccatgctc

SEQ ID NO: 228004 - DNA, 25 bp, Probe sequence
aagcaacaactaccgactagaattg

SEQ ID NO: 228005 - DNA, 25 bp, Probe sequence
aagtgcctggggcttattttctgga

SEQ ID NO: 228006 - DNA, 25 bp, Probe sequence
aagtacagttgcaattagacgagtt

SEQ ID NO: 228007 - DNA, 25 bp, Probe sequence
ctaaagaagcttctgtgcagtctgt

SEQ ID NO: 228008 - DNA, 25 bp, Probe sequence
gcaacaacttgctgtaaaccaaatt

SEQ ID NO: 228009 - DNA, 25 bp, Probe sequence
gcaagctttaaatctatgtatgggg

SEQ ID NO: 228010 - DNA, 25 bp, Probe sequence
gaagcaggacaagcaatacctcaag

SEQ ID NO: 228011 - DNA, 25 bp, Probe sequence
gacaaatttttacatccttcacgtt

SEQ ID NO: 228012 - DNA, 25 bp, Probe sequence
gatggtgctgtgaactggtcatgcg

SEQ ID NO: 228013 - DNA, 25 bp, Probe sequence
gatgcgaatgatattggctttgcta

SEQ ID NO: 228014 - DNA, 25 bp, Probe sequence
gatacgttatcggcttggttgttaa

SEQ ID NO: 228015 - DNA, 25 bp, Probe sequence
gataggcatacctttatgggtgcac

SEQ ID NO: 228016 - DNA, 25 bp, Probe sequence
gattggtgaaagtgcctggggctta

SEQ ID NO: 228017 - DNA, 25 bp, Probe sequence
gtgatgcatttaatatttccagtag

SEQ ID NO: 228018 - DNA, 25 bp, Probe sequence
gtggacgagtgacgaacttcaatac

SEQ ID NO: 228019 - DNA, 25 bp, Probe sequence
gggacacactgttatggttacacat

SEQ ID NO: 228020 - DNA, 25 bp, Probe sequence
gggtcgataaatccattggtactgt

SEQ ID NO: 228021 - DNA, 25 bp, Probe sequence
gggggcataccaaaagatttcatag

SEQ ID NO: 228022 - DNA, 25 bp, Probe sequence
ggtactgttcatacttttcaaggta

SEQ ID NO: 228023 - DNA, 25 bp, Probe sequence
ggaaatctgatgctactgatagtaa

SEQ ID NO: 228024 - DNA, 25 bp, Probe sequence
tggccatcacagactgagtttagat

SEQ ID NO: 228025 - DNA, 25 bp, Probe sequence
taagttcagttaatgggccaccagg

SEQ ID NO: 228026 - DNA, 25 bp, Probe sequence
ttatgatgagcgccaagttactaat

SEQ ID NO: 228027 - DNA, 25 bp, Probe sequence
ttagtacgacgtttgcaagctttaa

SEQ ID NO: 228028 - DNA, 25 bp, Probe sequence
atcaggcaaaccagtttggttccaa

SEQ ID NO: 228029 - DNA, 25 bp, Probe sequence
attgcagtaccgtttaacgcaggta

SEQ ID NO: 228030 - DNA, 25 bp, Probe sequence
atagaagccttagagagcgggaact

SEQ ID NO: 228031 - DNA, 25 bp, Probe sequence
aggagaacatgctgttacatttgga

SEQ ID NO: 228032 - DNA, 25 bp, Probe sequence
agagcaaattgcacatggtaaacca

SEQ ID NO: 228033 - DNA, 25 bp, Probe sequence
acgatccaaacgaatttaccaccat

SEQ ID NO: 228034 - DNA, 25 bp, Probe sequence
aaaccaagtggtattgatacgcaaa

SEQ ID NO: 228035 - DNA, 25 bp, Probe sequence
aaaggcgttgacagttagtcatgat

SEQ ID NO: 228036 - DNA, 25 bp, Probe sequence
aaagcgatgtttacgatggtatgtt

SEQ ID NO: 228037 - DNA, 25 bp, Probe sequence
aataatattacagagccgctagcag

SEQ ID NO: 228038 - DNA, 25 bp, Probe sequence
caaacgaatttaccaccatcacgtg

SEQ ID NO: 228039 - DNA, 25 bp, Probe sequence
catcttaagtctttggtgaaccgtt

SEQ ID NO: 228040 - DNA, 25 bp, Probe sequence
gcgcctgaccatcttaagtctttgg

SEQ ID NO: 228041 - DNA, 25 bp, Probe sequence
gctggtcgtggtggaagtatgttat

SEQ ID NO: 228042 - DNA, 25 bp, Probe sequence
gcttgccaaagatttaccaacagcg

SEQ ID NO: 228043 - DNA, 25 bp, Probe sequence
gaatgtcatgcggatttaaaggcgt

SEQ ID NO: 228044 - DNA, 25 bp, Probe sequence
gaagatgttcataaactttgtgagg

SEQ ID NO: 228045 - DNA, 25 bp, Probe sequence
gagccgctagcagtaacgatccaaa

SEQ ID NO: 228046 - DNA, 25 bp, Probe sequence
gagagcctgctattgcagtaccgtt

SEQ ID NO: 228047 - DNA, 25 bp, Probe sequence
gagagcgggaactattcgtctatta

SEQ ID NO: 228048 - DNA, 25 bp, Probe sequence
gatactggtgtgaaaggttcaacaa

SEQ ID NO: 228049 - DNA, 25 bp, Probe sequence
gttacatttggagagcctgctattg

SEQ ID NO: 228050 - DNA, 25 bp, Probe sequence
gtttagacggctatatggttgttat

SEQ ID NO: 228051 - DNA, 25 bp, Probe sequence
gtatgttatatgatgcgcctgacca

SEQ ID NO: 228052 - DNA, 25 bp, Probe sequence
ggtgcgattgctggaaaacttactg

SEQ ID NO: 228053 - DNA, 25 bp, Probe sequence
ggatatggggaatcgacaggtaaga

SEQ ID NO: 228054 - DNA, 25 bp, Probe sequence
ggaagtatgttattgcttgccaaag

SEQ ID NO: 228055 - DNA, 25 bp, Probe sequence
ggctaattgggcagagcaaattgca

SEQ ID NO: 228056 - DNA, 25 bp, Probe sequence
tctttggtgaaccgttttgtagaat

SEQ ID NO: 228057 - DNA, 25 bp, Probe sequence
taagttagttttacgtgcgagtgat

SEQ ID NO: 228058 - DNA, 25 bp, Probe sequence
tacgtgcgagtgatgtgattgaaca

SEQ ID NO: 228059 - DNA, 25 bp, Probe sequence
tacgcaaacgattgtatcaggcaaa

SEQ ID NO: 228060 - DNA, 25 bp, Probe sequence
tagaaaaagctggtgcagcacatac

SEQ ID NO: 228061 - DNA, 25 bp, Probe sequence
taggatcgagtgcagctgtcgcggt

SEQ ID NO: 228062 - DNA, 25 bp, Probe sequence
atagcatatctgttacattagaaaa

SEQ ID NO: 228063 - DNA, 25 bp, Probe sequence
atgccgttccacttgaatcgaatca

SEQ ID NO: 228064 - DNA, 25 bp, Probe sequence
aggatttatcgagattggcgcgaat

SEQ ID NO: 228065 - DNA, 25 bp, Probe sequence
aggtacctagtcgatatggtatgtc

SEQ ID NO: 228066 - DNA, 25 bp, Probe sequence
acaattttgtaccaacagcagcagg

SEQ ID NO: 228067 - DNA, 25 bp, Probe sequence
aaagcagcgattcaagacaaagatt

SEQ ID NO: 228068 - DNA, 25 bp, Probe sequence
aagcacgtgcacatacgaatattgc

SEQ ID NO: 228069 - DNA, 25 bp, Probe sequence
aagtggcaaagcacgtgcacatacg

SEQ ID NO: 228070 - DNA, 25 bp, Probe sequence
aatagagctggcatcgattggtatg

SEQ ID NO: 228071 - DNA, 25 bp, Probe sequence
gcgcatatgcagctttagcagcagc

SEQ ID NO: 228072 - DNA, 25 bp, Probe sequence
gcgacaattttgtaccaacagcagc

SEQ ID NO: 228073 - DNA, 25 bp, Probe sequence
gctgaagcaaaagcagcgattcaag

SEQ ID NO: 228074 - DNA, 25 bp, Probe sequence
gctttagcagcagcttgtaatcaag

SEQ ID NO: 228075 - DNA, 25 bp, Probe sequence
gcaagcgcatatgcagctttagcag

SEQ ID NO: 228076 - DNA, 25 bp, Probe sequence
gaatcattttgaagatgaccttgcc

SEQ ID NO: 228077 - DNA, 25 bp, Probe sequence
gaatggtgaaaaggttagtggcaaa

SEQ ID NO: 228078 - DNA, 25 bp, Probe sequence
gaagatgaccttgccatgatatttg

SEQ ID NO: 228079 - DNA, 25 bp, Probe sequence
gacaaagattttaaacgccttggtg

SEQ ID NO: 228080 - DNA, 25 bp, Probe sequence
gaccttgccatgatatttgttgtga

SEQ ID NO: 228081 - DNA, 25 bp, Probe sequence
gatgagacgtcatatgccgttccac

SEQ ID NO: 228082 - DNA, 25 bp, Probe sequence
gttccacttgaatcgaatcattttg

SEQ ID NO: 228083 - DNA, 25 bp, Probe sequence
gttaacacaggatcaattttggttg

SEQ ID NO: 228084 - DNA, 25 bp, Probe sequence
gtcagaaatagagctggcatcgatt

SEQ ID NO: 228085 - DNA, 25 bp, Probe sequence
gtcgcgtagtatttatggtggattt

SEQ ID NO: 228086 - DNA, 25 bp, Probe sequence
gtgacattattgccacaggaattga

SEQ ID NO: 228087 - DNA, 25 bp, Probe sequence
tcgggttctgcgtcgcgtagtattt

SEQ ID NO: 228088 - DNA, 25 bp, Probe sequence
tctgcgtcgcgtagtatttatggtg

SEQ ID NO: 228089 - DNA, 25 bp, Probe sequence
tcatatgccgttccacttgaatcga

SEQ ID NO: 228090 - DNA, 25 bp, Probe sequence
taacgaccagttaacacaggatcaa

SEQ ID NO: 228091 - DNA, 25 bp, Probe sequence
taaacgccttggtgaagtaattgaa

SEQ ID NO: 228092 - DNA, 25 bp, Probe sequence
tacactgaaacgaaagtcactttta

SEQ ID NO: 228093 - DNA, 25 bp, Probe sequence
tatggtggatttgcagaatgggaaa

SEQ ID NO: 228094 - DNA, 25 bp, Probe sequence
tattgatgaagatttagctgaagca

SEQ ID NO: 228095 - DNA, 25 bp, Probe sequence
ttgatagtgacattattgccacagg

SEQ ID NO: 228096 - DNA, 25 bp, Probe sequence
ttatcggttggactggctcaccggc

SEQ ID NO: 228097 - DNA, 25 bp, Probe sequence
attgctgtgagtgtatatagtggat

SEQ ID NO: 228098 - DNA, 25 bp, Probe sequence
atcgtacaattattcaacgtatgga

SEQ ID NO: 228099 - DNA, 25 bp, Probe sequence
atgattcaggtcaaagcacccggaa

SEQ ID NO: 228100 - DNA, 25 bp, Probe sequence
aggtgtgcaaaagatggtgcgtcag

SEQ ID NO: 228101 - DNA, 25 bp, Probe sequence
agatccttcattttacggtgacttc

SEQ ID NO: 228102 - DNA, 25 bp, Probe sequence
agcgtatagtacttttgatcatgaa

SEQ ID NO: 228103 - DNA, 25 bp, Probe sequence
aaaactggcctggattgcacatcga

SEQ ID NO: 228104 - DNA, 25 bp, Probe sequence
aagcattacatcataacccagttac

SEQ ID NO: 228105 - DNA, 25 bp, Probe sequence
aaggtaccattcattcaaaagcatt

SEQ ID NO: 228106 - DNA, 25 bp, Probe sequence
cacccggaaaactttatattgctgg

SEQ ID NO: 228107 - DNA, 25 bp, Probe sequence
catgcggagatattgctgtgagtgt

SEQ ID NO: 228108 - DNA, 25 bp, Probe sequence
cataacccagttacatttagtagag

SEQ ID NO: 228109 - DNA, 25 bp, Probe sequence
cattttacggtgacttcttagaaga

SEQ ID NO: 228110 - DNA, 25 bp, Probe sequence
cgtcatcaccacactttgttagcga

SEQ ID NO: 228111 - DNA, 25 bp, Probe sequence
gcgctggtggtggagactgtggtat

SEQ ID NO: 228112 - DNA, 25 bp, Probe sequence
gcgatatagcgatgaagcattttca

SEQ ID NO: 228113 - DNA, 25 bp, Probe sequence
gcatctaaaacatcaggcgctggtg

SEQ ID NO: 228114 - DNA, 25 bp, Probe sequence
gcacctgaaaatatggaagtactta

SEQ ID NO: 228115 - DNA, 25 bp, Probe sequence
gaagcattttcatctgactattgat

SEQ ID NO: 228116 - DNA, 25 bp, Probe sequence
gaaccaggatataaatctgtactta

SEQ ID NO: 228117 - DNA, 25 bp, Probe sequence
gaaacgtttgaaatcagatccttca

SEQ ID NO: 228118 - DNA, 25 bp, Probe sequence
gagactgtggtattacaattatcaa

SEQ ID NO: 228119 - DNA, 25 bp, Probe sequence
gatggtgcgtcagaatcgtacaatt

SEQ ID NO: 228120 - DNA, 25 bp, Probe sequence
gatcgttttgtaactgctactattg

SEQ ID NO: 228121 - DNA, 25 bp, Probe sequence
gtattgtcatttcagatccacatgc

SEQ ID NO: 228122 - DNA, 25 bp, Probe sequence
gtacttatcggttggactggctcac

SEQ ID NO: 228123 - DNA, 25 bp, Probe sequence
gtacttattgcgttagatcgttttg

SEQ ID NO: 228124 - DNA, 25 bp, Probe sequence
ggattaggttcaagtgcagcagtac

SEQ ID NO: 228125 - DNA, 25 bp, Probe sequence
ggcctggattgcacatcgaaccatt

SEQ ID NO: 228126 - DNA, 25 bp, Probe sequence
tacaaagtttaagttcatgcggaga

SEQ ID NO: 228127 - DNA, 25 bp, Probe sequence
tattgctggagaatatgctgtaaca

SEQ ID NO: 228128 - DNA, 25 bp, Probe sequence
tttcagatccacatgcagcaaaaca

SEQ ID NO: 228129 - DNA, 25 bp, Probe sequence
ttatgtggtcacagctattgaaata

SEQ ID NO: 228130 - DNA, 25 bp, Probe sequence
attagatcccgatgctgaaatcgtg

SEQ ID NO: 228131 - DNA, 25 bp, Probe sequence
atttgtgatgaatgtcaggcagtca

SEQ ID NO: 228132 - DNA, 25 bp, Probe sequence
atcttattgtggacctggacgccga

SEQ ID NO: 228133 - DNA, 25 bp, Probe sequence
agaaaagcgaaaagcacaacaataa

SEQ ID NO: 228134 - DNA, 25 bp, Probe sequence
accacgtgatcctgaagaagaagag

SEQ ID NO: 228135 - DNA, 25 bp, Probe sequence
actggctgcgcttactgaagaagaa

SEQ ID NO: 228136 - DNA, 25 bp, Probe sequence
aaagaaaccacgtgatcctgaagaa

SEQ ID NO: 228137 - DNA, 25 bp, Probe sequence
aaaattagatcccgatgctgaaatc

SEQ ID NO: 228138 - DNA, 25 bp, Probe sequence
aacgtcgtaaagaagaacaagatag

SEQ ID NO: 228139 - DNA, 25 bp, Probe sequence
aatacattccttatttgtgatgaat

SEQ ID NO: 228140 - DNA, 25 bp, Probe sequence
caattaaagaaaccacgtgatcctg

SEQ ID NO: 228141 - DNA, 25 bp, Probe sequence
caatcttattgtggacctggacgcc

SEQ ID NO: 228142 - DNA, 25 bp, Probe sequence
cttattgtggacctggacgccgaaa

SEQ ID NO: 228143 - DNA, 25 bp, Probe sequence
ccactggctgcgcttactgaagaag

SEQ ID NO: 228144 - DNA, 25 bp, Probe sequence
gtggacctggacgccgaaaaacatt

SEQ ID NO: 228145 - DNA, 25 bp, Probe sequence
gaatgtcaggcagtcaatataagaa

SEQ ID NO: 228146 - DNA, 25 bp, Probe sequence
gaaaaatacattccttatttgtgat

SEQ ID NO: 228147 - DNA, 25 bp, Probe sequence
gaaaacgacatgaagaacgtaaacg

SEQ ID NO: 228148 - DNA, 25 bp, Probe sequence
gaaaccacgtgatcctgaagaagaa

SEQ ID NO: 228149 - DNA, 25 bp, Probe sequence
gaaatcgtgataggttgtcaatctt

SEQ ID NO: 228150 - DNA, 25 bp, Probe sequence
gatgctgaaatcgtgataggttgtc

SEQ ID NO: 228151 - DNA, 25 bp, Probe sequence
gatcccgatgctgaaatcgtgatag

SEQ ID NO: 228152 - DNA, 25 bp, Probe sequence
gatcctgaagaagaagagcgtttaa

SEQ ID NO: 228153 - DNA, 25 bp, Probe sequence
gtcaggcagtcaatataagaacgtt

SEQ ID NO: 228154 - DNA, 25 bp, Probe sequence
gtgatgaatgtcaggcagtcaatat

SEQ ID NO: 228155 - DNA, 25 bp, Probe sequence
gtgataggttgtcaatcttattgtg

SEQ ID NO: 228156 - DNA, 25 bp, Probe sequence
ggttgtcaatcttattgtggacctg

SEQ ID NO: 228157 - DNA, 25 bp, Probe sequence
ggaaaaattagatcccgatgctgaa

SEQ ID NO: 228158 - DNA, 25 bp, Probe sequence
ggcagtcaatataagaacgttacaa

SEQ ID NO: 228159 - DNA, 25 bp, Probe sequence
tggctgcgcttactgaagaagaatt

SEQ ID NO: 228160 - DNA, 25 bp, Probe sequence
tggacctggacgccgaaaaacattc

SEQ ID NO: 228161 - DNA, 25 bp, Probe sequence
taatcgaaaaagtttctcaacaatt

SEQ ID NO: 228162 - DNA, 25 bp, Probe sequence
ttgtggacctggacgccgaaaaaca

SEQ ID NO: 228163 - DNA, 25 bp, Probe sequence
tattgtggacctggacgccgaaaaa

SEQ ID NO: 228164 - DNA, 25 bp, Probe sequence
cctaggtaaaggtgttgctggtgta

SEQ ID NO: 228165 - DNA, 25 bp, Probe sequence
atgaccttgcaaatgatgataaaac

SEQ ID NO: 228166 - DNA, 25 bp, Probe sequence
atgatgaccttgcaaatgatgataa

SEQ ID NO: 228167 - DNA, 25 bp, Probe sequence
aggtttggctatgagtacagtattt

SEQ ID NO: 228168 - DNA, 25 bp, Probe sequence
agcagttggagctggattagcgact

SEQ ID NO: 228169 - DNA, 25 bp, Probe sequence
acagtatttgcattaggaacagatt

SEQ ID NO: 228170 - DNA, 25 bp, Probe sequence
aaatccaatgaaatgggcgtggtga

SEQ ID NO: 228171 - DNA, 25 bp, Probe sequence
aaaactacagaaaaatccatggata

SEQ ID NO: 228172 - DNA, 25 bp, Probe sequence
aaaatccatggatagtgttgggaat

SEQ ID NO: 228173 - DNA, 25 bp, Probe sequence
ccagtaggatgggtgattttagcag

SEQ ID NO: 228174 - DNA, 25 bp, Probe sequence
gctggatctgcagggacagcagttg

SEQ ID NO: 228175 - DNA, 25 bp, Probe sequence
gcagggacagcagttggagctggat

SEQ ID NO: 228176 - DNA, 25 bp, Probe sequence
gcaggtttggctatgagtacagtat

SEQ ID NO: 228177 - DNA, 25 bp, Probe sequence
gcagctggatctgcagggacagcag

SEQ ID NO: 228178 - DNA, 25 bp, Probe sequence
gataaagtagactgggtagggcata

SEQ ID NO: 228179 - DNA, 25 bp, Probe sequence
gactgggtagggcataaaatcgata

SEQ ID NO: 228180 - DNA, 25 bp, Probe sequence
gagtacagtatttgcattaggaaca

SEQ ID NO: 228181 - DNA, 25 bp, Probe sequence
gatgggtgattttagcaggtttggc

SEQ ID NO: 228182 - DNA, 25 bp, Probe sequence
gatctgcagggacagcagttggagc

SEQ ID NO: 228183 - DNA, 25 bp, Probe sequence
gattagcgacttttgttttaggaag

SEQ ID NO: 228184 - DNA, 25 bp, Probe sequence
gttggagctggattagcgacttttg

SEQ ID NO: 228185 - DNA, 25 bp, Probe sequence
gtaggatgggtgattttagcaggtt

SEQ ID NO: 228186 - DNA, 25 bp, Probe sequence
gtaaaggtgttgctggtgtaggatt

SEQ ID NO: 228187 - DNA, 25 bp, Probe sequence
gggaatgctgttagtgaagctaaaa

SEQ ID NO: 228188 - DNA, 25 bp, Probe sequence
gggtgattttagcaggtttggctat

SEQ ID NO: 228189 - DNA, 25 bp, Probe sequence
ggagctggattagcgacttttgttt

SEQ ID NO: 228190 - DNA, 25 bp, Probe sequence
ggtagggcataaaatcgataatagt

SEQ ID NO: 228191 - DNA, 25 bp, Probe sequence
tggattagcgacttttgttttagga

SEQ ID NO: 228192 - DNA, 25 bp, Probe sequence
tagtgttgggaatgctgttagtgaa

SEQ ID NO: 228193 - DNA, 25 bp, Probe sequence
tattagcaatcatataaatccaatg

SEQ ID NO: 228194 - DNA, 25 bp, Probe sequence
gctggattagcgacttttgttttag

SEQ ID NO: 228195 - DNA, 25 bp, Probe sequence
ttgttttaggaagtaatccagtagg

SEQ ID NO: 228196 - DNA, 25 bp, Probe sequence
ttaggaacagatttaatttatcaaa

SEQ ID NO: 228197 - DNA, 25 bp, Probe sequence
ttgcagctggatctgcagggacagc

SEQ ID NO: 228198 - DNA, 25 bp, Probe sequence
attggatctactgtttctgattatc

SEQ ID NO: 228199 - DNA, 25 bp, Probe sequence
attaatcctatgaaatggagttggt

SEQ ID NO: 228200 - DNA, 25 bp, Probe sequence
atatctagggaaaggtgttgcaggt

SEQ ID NO: 228201 - DNA, 25 bp, Probe sequence
atccagtcggttgggctgtggtagg

SEQ ID NO: 228202 - DNA, 25 bp, Probe sequence
atgccattggtgatgccacaaaaag

SEQ ID NO: 228203 - DNA, 25 bp, Probe sequence
atgatgatcttgcaaatgataataa

SEQ ID NO: 228204 - DNA, 25 bp, Probe sequence
agtcggttgggctgtggtaggtatt

SEQ ID NO: 228205 - DNA, 25 bp, Probe sequence
agacgagggtattgatgctgtaaac

SEQ ID NO: 228206 - DNA, 25 bp, Probe sequence
actgtttctgattatctttatcaaa

SEQ ID NO: 228207 - DNA, 25 bp, Probe sequence
ctgttgcagcatttggtgtagcggc

SEQ ID NO: 228208 - DNA, 25 bp, Probe sequence
ctggatctgttgcagcatttggtgt

SEQ ID NO: 228209 - DNA, 25 bp, Probe sequence
gcggctttagtaagtaatccagtcg

SEQ ID NO: 228210 - DNA, 25 bp, Probe sequence
gcatttggtgtagcggctttagtaa

SEQ ID NO: 228211 - DNA, 25 bp, Probe sequence
gcagcatttggtgtagcggctttag

SEQ ID NO: 228212 - DNA, 25 bp, Probe sequence
gcagctggatctgttgcagcatttg

SEQ ID NO: 228213 - DNA, 25 bp, Probe sequence
gatgctgtaaacaaaactgcagaaa

SEQ ID NO: 228214 - DNA, 25 bp, Probe sequence
gataaagtggactgggcaggacata

SEQ ID NO: 228215 - DNA, 25 bp, Probe sequence
gatagtgttggtaatgccattggtg

SEQ ID NO: 228216 - DNA, 25 bp, Probe sequence
gtattagtaatcatattaatcctat

SEQ ID NO: 228217 - DNA, 25 bp, Probe sequence
gtaatccagtcggttgggctgtggt

SEQ ID NO: 228218 - DNA, 25 bp, Probe sequence
gtaagtaatccagtcggttgggctg

SEQ ID NO: 228219 - DNA, 25 bp, Probe sequence
gtggtaggtattttaacagcaggta

SEQ ID NO: 228220 - DNA, 25 bp, Probe sequence
gggcaggacataaaatagacgaggg

SEQ ID NO: 228221 - DNA, 25 bp, Probe sequence
ggtgatgccacaaaaagtattagta

SEQ ID NO: 228222 - DNA, 25 bp, Probe sequence
ggtgtagcggctttagtaagtaatc

SEQ ID NO: 228223 - DNA, 25 bp, Probe sequence
ggtaatgccattggtgatgccacaa

SEQ ID NO: 228224 - DNA, 25 bp, Probe sequence
ggtattattggatctactgtttctg

SEQ ID NO: 228225 - DNA, 25 bp, Probe sequence
ggtattttaacagcaggtattattg

SEQ ID NO: 228226 - DNA, 25 bp, Probe sequence
ggatctactgtttctgattatcttt

SEQ ID NO: 228227 - DNA, 25 bp, Probe sequence
ggactgggcaggacataaaatagac

SEQ ID NO: 228228 - DNA, 25 bp, Probe sequence
tcggttgggctgtggtaggtatttt

SEQ ID NO: 228229 - DNA, 25 bp, Probe sequence
tctactgtttctgattatctttatc

SEQ ID NO: 228230 - DNA, 25 bp, Probe sequence
tacgtaaattacgtgagtttaatca

SEQ ID NO: 228231 - DNA, 25 bp, Probe sequence
ttgcagctggatctgttgcagcatt

SEQ ID NO: 228232 - DNA, 25 bp, Probe sequence
atacctaggcaaaggtgttgcaggt

SEQ ID NO: 228233 - DNA, 25 bp, Probe sequence
atcgcgttatttgcaagtaatccag

SEQ ID NO: 228234 - DNA, 25 bp, Probe sequence
atccagtaggatgggctgttatagg

SEQ ID NO: 228235 - DNA, 25 bp, Probe sequence
aggtgcgggtatgactgctactatc

SEQ ID NO: 228236 - DNA, 25 bp, Probe sequence
aggaataggtattggcgcaggtgcg

SEQ ID NO: 228237 - DNA, 25 bp, Probe sequence
aaagcagactgggtaggacataaac

SEQ ID NO: 228238 - DNA, 25 bp, Probe sequence
aatgcttgtagattgggcttatcaa

SEQ ID NO: 228239 - DNA, 25 bp, Probe sequence
cgttatttgcaagtaatccagtagg

SEQ ID NO: 228240 - DNA, 25 bp, Probe sequence
gcgggtatgactgctactatcgcgt

SEQ ID NO: 228241 - DNA, 25 bp, Probe sequence
gcttgtagattgggcttatcaaaat

SEQ ID NO: 228242 - DNA, 25 bp, Probe sequence
gcagactgggtaggacataaactag

SEQ ID NO: 228243 - DNA, 25 bp, Probe sequence
gaataggtattggcgcaggtgcggg

SEQ ID NO: 228244 - DNA, 25 bp, Probe sequence
gactgctactatcgcgttatttgca

SEQ ID NO: 228245 - DNA, 25 bp, Probe sequence
gatagtgttggtgaagctacaaaaa

SEQ ID NO: 228246 - DNA, 25 bp, Probe sequence
gtattggcgcaggtgcgggtatgac

SEQ ID NO: 228247 - DNA, 25 bp, Probe sequence
gtttggttcggtttcgacaatgctt

SEQ ID NO: 228248 - DNA, 25 bp, Probe sequence
gtatttctaatcatttaaaccctat

SEQ ID NO: 228249 - DNA, 25 bp, Probe sequence
gtatgatgatatggcaaacgatgat

SEQ ID NO: 228250 - DNA, 25 bp, Probe sequence
gtcgcataatgctttaactacagga

SEQ ID NO: 228251 - DNA, 25 bp, Probe sequence
gtgtttggttcggtttcgacaatgc

SEQ ID NO: 228252 - DNA, 25 bp, Probe sequence
gggctgttataggtggctttgtgtt

SEQ ID NO: 228253 - DNA, 25 bp, Probe sequence
ggatgggctgttataggtggctttg

SEQ ID NO: 228254 - DNA, 25 bp, Probe sequence
ggtatgtatgatgatatggcaaacg

SEQ ID NO: 228255 - DNA, 25 bp, Probe sequence
ggtatgactgctactatcgcgttat

SEQ ID NO: 228256 - DNA, 25 bp, Probe sequence
ggttcggtttcgacaatgcttgtag

SEQ ID NO: 228257 - DNA, 25 bp, Probe sequence
ggcaaacgatgataaaacagttgga

SEQ ID NO: 228258 - DNA, 25 bp, Probe sequence
ggcgcaggtgcgggtatgactgcta

SEQ ID NO: 228259 - DNA, 25 bp, Probe sequence
tgactgctactatcgcgttatttgc

SEQ ID NO: 228260 - DNA, 25 bp, Probe sequence
tgctactatcgcgttatttgcaagt

SEQ ID NO: 228261 - DNA, 25 bp, Probe sequence
tcggtttcgacaatgcttgtagatt

SEQ ID NO: 228262 - DNA, 25 bp, Probe sequence
taatgctttaactacaggaataggt

SEQ ID NO: 228263 - DNA, 25 bp, Probe sequence
taaaccctatgaaatggagctggta

SEQ ID NO: 228264 - DNA, 25 bp, Probe sequence
tatgactgctactatcgcgttattt

SEQ ID NO: 228265 - DNA, 25 bp, Probe sequence
tataggtggctttgtgtttggttcg

SEQ ID NO: 228266 - DNA, 25 bp, Probe sequence
attgcagcattttacatttacttaa

SEQ ID NO: 228267 - DNA, 25 bp, Probe sequence
atattagtgcctacttttaaagatg

SEQ ID NO: 228268 - DNA, 25 bp, Probe sequence
atatctattattaggaggttgttct

SEQ ID NO: 228269 - DNA, 25 bp, Probe sequence
atatggctaatgactataaaacctc

SEQ ID NO: 228270 - DNA, 25 bp, Probe sequence
ataatgatgagtatttgttaattga

SEQ ID NO: 228271 - DNA, 25 bp, Probe sequence
atctttatgttttataggatttata

SEQ ID NO: 228272 - DNA, 25 bp, Probe sequence
aggatttataggtattgcagcattt

SEQ ID NO: 228273 - DNA, 25 bp, Probe sequence
agtgcctacttttaaagatggaagt

SEQ ID NO: 228274 - DNA, 25 bp, Probe sequence
agttttcacatatctattattagga

SEQ ID NO: 228275 - DNA, 25 bp, Probe sequence
actggtatttattatgtggattatt

SEQ ID NO: 228276 - DNA, 25 bp, Probe sequence
aaatccgagatataaagtcgttcaa

SEQ ID NO: 228277 - DNA, 25 bp, Probe sequence
aaagtcgttcaatataatgatgagt

SEQ ID NO: 228278 - DNA, 25 bp, Probe sequence
aacctcaaaatctactggtatttat

SEQ ID NO: 228279 - DNA, 25 bp, Probe sequence
aagcatgggctcaattagtaataaa

SEQ ID NO: 228280 - DNA, 25 bp, Probe sequence
aatctactggtatttattatgtgga

SEQ ID NO: 228281 - DNA, 25 bp, Probe sequence
aataatattttctggccagttactg

SEQ ID NO: 228282 - DNA, 25 bp, Probe sequence
aatattttctggccagttactggta

SEQ ID NO: 228283 - DNA, 25 bp, Probe sequence
aattggttcattcccaaaaggtatg

SEQ ID NO: 228284 - DNA, 25 bp, Probe sequence
caatttttttctttctaataagcat

SEQ ID NO: 228285 - DNA, 25 bp, Probe sequence
gcagcattttacatttacttaaata

SEQ ID NO: 228286 - DNA, 25 bp, Probe sequence
gaagttttatagttttcacatatct

SEQ ID NO: 228287 - DNA, 25 bp, Probe sequence
gactataaaacctcaaaatctactg

SEQ ID NO: 228288 - DNA, 25 bp, Probe sequence
gaggttgttctatattatttttaat

SEQ ID NO: 228289 - DNA, 25 bp, Probe sequence
gatggaagttttatagttttcacat

SEQ ID NO: 228290 - DNA, 25 bp, Probe sequence
gattttaatatctttatgttttata

SEQ ID NO: 228291 - DNA, 25 bp, Probe sequence
gttatattagtgcctacttttaaag

SEQ ID NO: 228292 - DNA, 25 bp, Probe sequence
ggtatgcaaaacttagtgagaagga

SEQ ID NO: 228293 - DNA, 25 bp, Probe sequence
ggtattgcagcattttacatttact

SEQ ID NO: 228294 - DNA, 25 bp, Probe sequence
ggttcattcccaaaaggtatgcaaa

SEQ ID NO: 228295 - DNA, 25 bp, Probe sequence
tggccagttactggtagttcgtttt

SEQ ID NO: 228296 - DNA, 25 bp, Probe sequence
tacggaaatatgtacatacgtttga

SEQ ID NO: 228297 - DNA, 25 bp, Probe sequence
tatgtacatacgtttgaagttcaat

SEQ ID NO: 228298 - DNA, 25 bp, Probe sequence
tttctttctaataagcatgggctca

SEQ ID NO: 228299 - DNA, 25 bp, Probe sequence
ttctggccagttactggtagttcgt

SEQ ID NO: 228300 - DNA, 25 bp, Probe sequence
attgcgttattatcatttgttcggt

SEQ ID NO: 228301 - DNA, 25 bp, Probe sequence
attatcatttgttcggttttattat

SEQ ID NO: 228302 - DNA, 25 bp, Probe sequence
atatatacctgattctcatttagaa

SEQ ID NO: 228303 - DNA, 25 bp, Probe sequence
atcaatcatgttcttagatgttttg

SEQ ID NO: 228304 - DNA, 25 bp, Probe sequence
atgacaatgctatttttctttataa

SEQ ID NO: 228305 - DNA, 25 bp, Probe sequence
atgttcttagatgttttgattagtt

SEQ ID NO: 228306 - DNA, 25 bp, Probe sequence
agtattctagtgttttatatatatt

SEQ ID NO: 228307 - DNA, 25 bp, Probe sequence
aaattatgatttttccatcattcaa

SEQ ID NO: 228308 - DNA, 25 bp, Probe sequence
aaatatgtccaaatcagcagagaag

SEQ ID NO: 228309 - DNA, 25 bp, Probe sequence
aaaacgactatctgatgattgattt

SEQ ID NO: 228310 - DNA, 25 bp, Probe sequence
aaaatatatatacctgattctcatt

SEQ ID NO: 228311 - DNA, 25 bp, Probe sequence
gcgttattatcatttgttcggtttt

SEQ ID NO: 228312 - DNA, 25 bp, Probe sequence
gaatctttgctttgtactattttct

SEQ ID NO: 228313 - DNA, 25 bp, Probe sequence
gaaagtaaagttatctatctataat

SEQ ID NO: 228314 - DNA, 25 bp, Probe sequence
gatgttttgattagtttatctatcc

SEQ ID NO: 228315 - DNA, 25 bp, Probe sequence
gatttttccatcattcaagaatctt

SEQ ID NO: 228316 - DNA, 25 bp, Probe sequence
gattagtttatctatccaaaatatt

SEQ ID NO: 228317 - DNA, 25 bp, Probe sequence
gattcatgttatatatttaaggtca

SEQ ID NO: 228318 - DNA, 25 bp, Probe sequence
gtagcatacttttatttggcactat

SEQ ID NO: 228319 - DNA, 25 bp, Probe sequence
gtactattttcttattttttctgtg

SEQ ID NO: 228320 - DNA, 25 bp, Probe sequence
ggtggattatcaatcatgttcttag

SEQ ID NO: 228321 - DNA, 25 bp, Probe sequence
tgcttgggttattatgacaatgcta

SEQ ID NO: 228322 - DNA, 25 bp, Probe sequence
tgctttgtactattttcttattttt

SEQ ID NO: 228323 - DNA, 25 bp, Probe sequence
tcggttttattattaagtattctag

SEQ ID NO: 228324 - DNA, 25 bp, Probe sequence
tctttgctttgtactattttcttat

SEQ ID NO: 228325 - DNA, 25 bp, Probe sequence
tcatttgttcggttttattattaag

SEQ ID NO: 228326 - DNA, 25 bp, Probe sequence
tcaagaatctttgctttgtactatt

SEQ ID NO: 228327 - DNA, 25 bp, Probe sequence
tacttttatttggcactatgtttag

SEQ ID NO: 228328 - DNA, 25 bp, Probe sequence
tagtatttattgcttgggttattat

SEQ ID NO: 228329 - DNA, 25 bp, Probe sequence
taggtagcatacttttatttggcac

SEQ ID NO: 228330 - DNA, 25 bp, Probe sequence
tatttggcactatgtttagagataa

SEQ ID NO: 228331 - DNA, 25 bp, Probe sequence
tattttcttattttttctgtggtgg

SEQ ID NO: 228332 - DNA, 25 bp, Probe sequence
tttcttattttttctgtggtggatt

SEQ ID NO: 228333 - DNA, 25 bp, Probe sequence
ttttttctgtggtggattatcaatc

SEQ ID NO: 228334 - DNA, 25 bp, Probe sequence
atcttttttgtgcttctgaatcgaa

SEQ ID NO: 228335 - DNA, 25 bp, Probe sequence
atcctactaggtgctacttccagaa

SEQ ID NO: 228336 - DNA, 25 bp, Probe sequence
actgaacactgttaagccagttaaa

SEQ ID NO: 228337 - DNA, 25 bp, Probe sequence
aaatgctgttcttatattatatggc

SEQ ID NO: 228338 - DNA, 25 bp, Probe sequence
aaaggtgcgccaaaattagtagaga

SEQ ID NO: 228339 - DNA, 25 bp, Probe sequence
caatcctactaggtgctacttccag

SEQ ID NO: 228340 - DNA, 25 bp, Probe sequence
aataacttttatagcttggggtatg

SEQ ID NO: 228341 - DNA, 25 bp, Probe sequence
ctactaggtgctacttccagaaagt

SEQ ID NO: 228342 - DNA, 25 bp, Probe sequence
gctgttcttatattatatggctatt

SEQ ID NO: 228343 - DNA, 25 bp, Probe sequence
gctatttgttgattggaggcatgtc

SEQ ID NO: 228344 - DNA, 25 bp, Probe sequence
gcttcgttgtatttctatgtatttt

SEQ ID NO: 228345 - DNA, 25 bp, Probe sequence
gcatgttgctgacattagaaaacca

SEQ ID NO: 228346 - DNA, 25 bp, Probe sequence
gaatataacactcattgtcaataaa

SEQ ID NO: 228347 - DNA, 25 bp, Probe sequence
gaaaaactgaacactgttaagccag

SEQ ID NO: 228348 - DNA, 25 bp, Probe sequence
gagttattaagtatgatgatgagta

SEQ ID NO: 228349 - DNA, 25 bp, Probe sequence
gaggcatgtcaatattagctttaag

SEQ ID NO: 228350 - DNA, 25 bp, Probe sequence
gatgagtatttaatggtcgatgtaa

SEQ ID NO: 228351 - DNA, 25 bp, Probe sequence
gatcggttatatttatatgcttcgt

SEQ ID NO: 228352 - DNA, 25 bp, Probe sequence
gtttttcttgatgaatataacactc

SEQ ID NO: 228353 - DNA, 25 bp, Probe sequence
gtattttaatcttttttgtgcttct

SEQ ID NO: 228354 - DNA, 25 bp, Probe sequence
gtaccaacattaaaaaatgctgttc

SEQ ID NO: 228355 - DNA, 25 bp, Probe sequence
gtacatacacttacttaatattcaa

SEQ ID NO: 228356 - DNA, 25 bp, Probe sequence
ggggttaatgttgtttttcttgatg

SEQ ID NO: 228357 - DNA, 25 bp, Probe sequence
ggtgctacttccagaaagtacatac

SEQ ID NO: 228358 - DNA, 25 bp, Probe sequence
ggttcattccaaaaaggtgcgccaa

SEQ ID NO: 228359 - DNA, 25 bp, Probe sequence
ggaggaacaatcctactaggtgcta

SEQ ID NO: 228360 - DNA, 25 bp, Probe sequence
tagcttggggtatggggttaatgtt

SEQ ID NO: 228361 - DNA, 25 bp, Probe sequence
tatggctatttgttgattggaggca

SEQ ID NO: 228362 - DNA, 25 bp, Probe sequence
tatgcttcgttgtatttctatgtat

SEQ ID NO: 228363 - DNA, 25 bp, Probe sequence
tttgtgcttctgaatcgaaaattaa

SEQ ID NO: 228364 - DNA, 25 bp, Probe sequence
tttttggcctgttgtaggaggaaca

SEQ ID NO: 228365 - DNA, 25 bp, Probe sequence
ttagctttaagcatgttgctgacat

SEQ ID NO: 228366 - DNA, 25 bp, Probe sequence
ttaatcttttttgtgcttctgaatc

SEQ ID NO: 228367 - DNA, 25 bp, Probe sequence
ttgctttgtgaaaccgaaattatca

SEQ ID NO: 228368 - DNA, 25 bp, Probe sequence
atttgcttaacatccatttagaaaa

SEQ ID NO: 228369 - DNA, 25 bp, Probe sequence
atattaacatgctgtatgatacttc

SEQ ID NO: 228370 - DNA, 25 bp, Probe sequence
atattatttggtggattgtcaacaa

SEQ ID NO: 228371 - DNA, 25 bp, Probe sequence
atatctatttgcttaacatccattt

SEQ ID NO: 228372 - DNA, 25 bp, Probe sequence
agagtcattaatcaaaaccctaaat

SEQ ID NO: 228373 - DNA, 25 bp, Probe sequence
agaatttcttgctttaattggcatg

SEQ ID NO: 228374 - DNA, 25 bp, Probe sequence
actgcatgcttctttctactgaata

SEQ ID NO: 228375 - DNA, 25 bp, Probe sequence
acttctaggtgttttcgcattgttt

SEQ ID NO: 228376 - DNA, 25 bp, Probe sequence
aaataatactttctggcctgttgca

SEQ ID NO: 228377 - DNA, 25 bp, Probe sequence
aacttcatcccctcaaaatataata

SEQ ID NO: 228378 - DNA, 25 bp, Probe sequence
aagatcatattaatacctacattta

SEQ ID NO: 228379 - DNA, 25 bp, Probe sequence
aatactttctggcctgttgcaggat

SEQ ID NO: 228380 - DNA, 25 bp, Probe sequence
caacaatggctctgagtatgttagt

SEQ ID NO: 228381 - DNA, 25 bp, Probe sequence
ctttctggcctgttgcaggatttgc

SEQ ID NO: 228382 - DNA, 25 bp, Probe sequence
gcccatgattaattggtttattccc

SEQ ID NO: 228383 - DNA, 25 bp, Probe sequence
gcttattttttgcccatgattaatt

SEQ ID NO: 228384 - DNA, 25 bp, Probe sequence
gcttctttctactgaatatgtcatc

SEQ ID NO: 228385 - DNA, 25 bp, Probe sequence
gcatgactgcatgcttctttctact

SEQ ID NO: 228386 - DNA, 25 bp, Probe sequence
gaatatgtcatcggttctagataaa

SEQ ID NO: 228387 - DNA, 25 bp, Probe sequence
gatacttctaggtgttttcgcattg

SEQ ID NO: 228388 - DNA, 25 bp, Probe sequence
gattgtcaacaatggctctgagtat

SEQ ID NO: 228389 - DNA, 25 bp, Probe sequence
gtatgttagtaacttcatcccctca

SEQ ID NO: 228390 - DNA, 25 bp, Probe sequence
gtatgatacttctaggtgttttcgc

SEQ ID NO: 228391 - DNA, 25 bp, Probe sequence
gtacttggattgcttattttttgcc

SEQ ID NO: 228392 - DNA, 25 bp, Probe sequence
gtaacttcatcccctcaaaatataa

SEQ ID NO: 228393 - DNA, 25 bp, Probe sequence
gtgctttgcgaatctagagtcatta

SEQ ID NO: 228394 - DNA, 25 bp, Probe sequence
ggtgttttcgcattgtttatatata

SEQ ID NO: 228395 - DNA, 25 bp, Probe sequence
ggattgcttattttttgcccatgat

SEQ ID NO: 228396 - DNA, 25 bp, Probe sequence
ggcctgttgcaggatttgcagtgtt

SEQ ID NO: 228397 - DNA, 25 bp, Probe sequence
tgtcaaacccgctaaaaataatact

SEQ ID NO: 228398 - DNA, 25 bp, Probe sequence
tgcagtgttattaacaaccttaaca

SEQ ID NO: 228399 - DNA, 25 bp, Probe sequence
tctactgaatatgtcatcggttcta

SEQ ID NO: 228400 - DNA, 25 bp, Probe sequence
ttatccttatttgcttatatattat

SEQ ID NO: 228401 - DNA, 25 bp, Probe sequence
ttcttgctttaattggcatgactgc

SEQ ID NO: 228402 - DNA, 25 bp, Probe sequence
attcaatgctcgttttgcttgcgtt

SEQ ID NO: 228403 - DNA, 25 bp, Probe sequence
atatacggtttcactgacttaggaa

SEQ ID NO: 228404 - DNA, 25 bp, Probe sequence
atttggcctcgtatgttacacaatg

SEQ ID NO: 228405 - DNA, 25 bp, Probe sequence
atattcattcacattttggagccta

SEQ ID NO: 228406 - DNA, 25 bp, Probe sequence
atcaatcaccactcaaatcatcatc

SEQ ID NO: 228407 - DNA, 25 bp, Probe sequence
atcatcatcgttttgattttaattg

SEQ ID NO: 228408 - DNA, 25 bp, Probe sequence
agtgatttaatcgtttggagcatag

SEQ ID NO: 228409 - DNA, 25 bp, Probe sequence
agtggatctcaaacagacaagaatg

SEQ ID NO: 228410 - DNA, 25 bp, Probe sequence
aaatgcaataagtggatctcaaaca

SEQ ID NO: 228411 - DNA, 25 bp, Probe sequence
aactatcaatcaccactcaaatcat

SEQ ID NO: 228412 - DNA, 25 bp, Probe sequence
aatcgtttggagcataggtggtatt

SEQ ID NO: 228413 - DNA, 25 bp, Probe sequence
aatcaccactcaaatcatcatcgtt

SEQ ID NO: 228414 - DNA, 25 bp, Probe sequence
aatcaattttagtagcaattttatt

SEQ ID NO: 228415 - DNA, 25 bp, Probe sequence
aattttatttacatcattggcgctg

SEQ ID NO: 228416 - DNA, 25 bp, Probe sequence
caatgctcgttttgcttgcgttagt

SEQ ID NO: 228417 - DNA, 25 bp, Probe sequence
cactaattggactgcgtttcttgaa

SEQ ID NO: 228418 - DNA, 25 bp, Probe sequence
ctaattggactgcgtttcttgaaag

SEQ ID NO: 228419 - DNA, 25 bp, Probe sequence
cctaaactatcaatcaccactcaaa

SEQ ID NO: 228420 - DNA, 25 bp, Probe sequence
gcatattcaatgctcgttttgcttg

SEQ ID NO: 228421 - DNA, 25 bp, Probe sequence
gatatatacggtttcactgacttag

SEQ ID NO: 228422 - DNA, 25 bp, Probe sequence
gttttgcttgcgttagtaatttcta

SEQ ID NO: 228423 - DNA, 25 bp, Probe sequence
gtagctgatatatacggtttcactg

SEQ ID NO: 228424 - DNA, 25 bp, Probe sequence
gtacgatgttaagcgtggcaaagat

SEQ ID NO: 228425 - DNA, 25 bp, Probe sequence
gtaatttctaacatattcattcaca

SEQ ID NO: 228426 - DNA, 25 bp, Probe sequence
ggtggtattatatttggcctcgtat

SEQ ID NO: 228427 - DNA, 25 bp, Probe sequence
ggtttcactgacttaggaaatacta

SEQ ID NO: 228428 - DNA, 25 bp, Probe sequence
ggagcctaaactatcaatcaccact

SEQ ID NO: 228429 - DNA, 25 bp, Probe sequence
ggcctcgtatgttacacaatggaag

SEQ ID NO: 228430 - DNA, 25 bp, Probe sequence
tgctcgttttgcttgcgttagtaat

SEQ ID NO: 228431 - DNA, 25 bp, Probe sequence
tcaccactcaaatcatcatcgtttt

SEQ ID NO: 228432 - DNA, 25 bp, Probe sequence
tatttacatcattggcgctgacagc

SEQ ID NO: 228433 - DNA, 25 bp, Probe sequence
ttacatcattggcgctgacagcagg

SEQ ID NO: 228434 - DNA, 25 bp, Probe sequence
ttatatttggcctcgtatgttacac

SEQ ID NO: 228435 - DNA, 25 bp, Probe sequence
ttcattcacattttggagcctaaac

SEQ ID NO: 228436 - DNA, 25 bp, Probe sequence
attttgcttggattacagcaataat

SEQ ID NO: 228437 - DNA, 25 bp, Probe sequence
attttctcatatgctctattatcaa

SEQ ID NO: 228438 - DNA, 25 bp, Probe sequence
atctctactttattcgcagttacat

SEQ ID NO: 228439 - DNA, 25 bp, Probe sequence
atgagtacttaatgatcgatataat

SEQ ID NO: 228440 - DNA, 25 bp, Probe sequence
agtgattttctcatatgctctatta

SEQ ID NO: 228441 - DNA, 25 bp, Probe sequence
acagtgattttctcatatgctctat

SEQ ID NO: 228442 - DNA, 25 bp, Probe sequence
aatgatgagtacttaatgatcgata

SEQ ID NO: 228443 - DNA, 25 bp, Probe sequence
aatagtatattttgcttggattaca

SEQ ID NO: 228444 - DNA, 25 bp, Probe sequence
cagtgattttctcatatgctctatt

SEQ ID NO: 228445 - DNA, 25 bp, Probe sequence
ctttattcgcagttacattaagaaa

SEQ ID NO: 228446 - DNA, 25 bp, Probe sequence
ctactttattcgcagttacattaag

SEQ ID NO: 228447 - DNA, 25 bp, Probe sequence
ctctactttattcgcagttacatta

SEQ ID NO: 228448 - DNA, 25 bp, Probe sequence
ctcatatgctctattatcaatgagt

SEQ ID NO: 228449 - DNA, 25 bp, Probe sequence
gacagtgattttctcatatgctcta

SEQ ID NO: 228450 - DNA, 25 bp, Probe sequence
gattttctcatatgctctattatca

SEQ ID NO: 228451 - DNA, 25 bp, Probe sequence
gttcatccccaaaagatacgtcaaa

SEQ ID NO: 228452 - DNA, 25 bp, Probe sequence
gtatattttgcttggattacagcaa

SEQ ID NO: 228453 - DNA, 25 bp, Probe sequence
gtatctctactttattcgcagttac

SEQ ID NO: 228454 - DNA, 25 bp, Probe sequence
gtgattttctcatatgctctattat

SEQ ID NO: 228455 - DNA, 25 bp, Probe sequence
ggttcatccccaaaagatacgtcaa

SEQ ID NO: 228456 - DNA, 25 bp, Probe sequence
ggacagtgattttctcatatgctct

SEQ ID NO: 228457 - DNA, 25 bp, Probe sequence
tggttcatccccaaaagatacgtca

SEQ ID NO: 228458 - DNA, 25 bp, Probe sequence
tggacagtgattttctcatatgctc

SEQ ID NO: 228459 - DNA, 25 bp, Probe sequence
tgattttctcatatgctctattatc

SEQ ID NO: 228460 - DNA, 25 bp, Probe sequence
tctactttattcgcagttacattaa

SEQ ID NO: 228461 - DNA, 25 bp, Probe sequence
tctctactttattcgcagttacatt

SEQ ID NO: 228462 - DNA, 25 bp, Probe sequence
tactttattcgcagttacattaaga

SEQ ID NO: 228463 - DNA, 25 bp, Probe sequence
tagtatattttgcttggattacagc

SEQ ID NO: 228464 - DNA, 25 bp, Probe sequence
tatctctactttattcgcagttaca

SEQ ID NO: 228465 - DNA, 25 bp, Probe sequence
tattcgcagttacattaagaaagta

SEQ ID NO: 228466 - DNA, 25 bp, Probe sequence
tttctcatatgctctattatcaatg

SEQ ID NO: 228467 - DNA, 25 bp, Probe sequence
ttttctcatatgctctattatcaat

SEQ ID NO: 228468 - DNA, 25 bp, Probe sequence
ttcatccccaaaagatacgtcaaaa

SEQ ID NO: 228469 - DNA, 25 bp, Probe sequence
ttctcatatgctctattatcaatga

SEQ ID NO: 228470 - DNA, 25 bp, Probe sequence
attgctttgcgaatctaaagttatt

SEQ ID NO: 228471 - DNA, 25 bp, Probe sequence
attcgcgggtattgtgttacttggt

SEQ ID NO: 228472 - DNA, 25 bp, Probe sequence
atttattaactggctcataccgaaa

SEQ ID NO: 228473 - DNA, 25 bp, Probe sequence
attaactggctcataccgaaaacat

SEQ ID NO: 228474 - DNA, 25 bp, Probe sequence
atattcgcgggtattgtgttacttg

SEQ ID NO: 228475 - DNA, 25 bp, Probe sequence
atgtcttatggggcattttacttgt

SEQ ID NO: 228476 - DNA, 25 bp, Probe sequence
actggtttcatgtcttatggggcat

SEQ ID NO: 228477 - DNA, 25 bp, Probe sequence
acttatttatttgattttcaattag

SEQ ID NO: 228478 - DNA, 25 bp, Probe sequence
aacatatgtcaaaatcactaagaat

SEQ ID NO: 228479 - DNA, 25 bp, Probe sequence
aactaattgtttggagcagctgttt

SEQ ID NO: 228480 - DNA, 25 bp, Probe sequence
ccatttattaactggctcataccga

SEQ ID NO: 228481 - DNA, 25 bp, Probe sequence
cttatggggcattttacttgttggt

SEQ ID NO: 228482 - DNA, 25 bp, Probe sequence
gcgggtattgtgttacttggtggta

SEQ ID NO: 228483 - DNA, 25 bp, Probe sequence
gacattgctttgcgaatctaaagtt

SEQ ID NO: 228484 - DNA, 25 bp, Probe sequence
gttacttggtggtactgtaagaaga

SEQ ID NO: 228485 - DNA, 25 bp, Probe sequence
gggtattgtgttacttggtggtact

SEQ ID NO: 228486 - DNA, 25 bp, Probe sequence
ggtttcatgtcttatggggcatttt

SEQ ID NO: 228487 - DNA, 25 bp, Probe sequence
ggagacattgctttgcgaatctaaa

SEQ ID NO: 228488 - DNA, 25 bp, Probe sequence
ggctcataccgaaaacatatgtcaa

SEQ ID NO: 228489 - DNA, 25 bp, Probe sequence
ggcttttcatgactatgctatttat

SEQ ID NO: 228490 - DNA, 25 bp, Probe sequence
tcgcgggtattgtgttacttggtgg

SEQ ID NO: 228491 - DNA, 25 bp, Probe sequence
tcttggcttttcatgactatgctat

SEQ ID NO: 228492 - DNA, 25 bp, Probe sequence
taactggctcataccgaaaacatat

SEQ ID NO: 228493 - DNA, 25 bp, Probe sequence
tatatttttttattgttatctaaat

SEQ ID NO: 228494 - DNA, 25 bp, Probe sequence
tattgtgttacttggtggtactgta

SEQ ID NO: 228495 - DNA, 25 bp, Probe sequence
tttcttggcttttcatgactatgct

SEQ ID NO: 228496 - DNA, 25 bp, Probe sequence
tttactggtttcatgtcttatgggg

SEQ ID NO: 228497 - DNA, 25 bp, Probe sequence
ttttcatgactatgctatttatgtt

SEQ ID NO: 228498 - DNA, 25 bp, Probe sequence
ttattaactggctcataccgaaaac

SEQ ID NO: 228499 - DNA, 25 bp, Probe sequence
ttctttccatttattaactggctca

SEQ ID NO: 228500 - DNA, 25 bp, Probe sequence
ttcttctttccatttattaactggc

SEQ ID NO: 228501 - DNA, 25 bp, Probe sequence
ttcatgtcttatggggcattttact

SEQ ID NO: 228502 - DNA, 25 bp, Probe sequence
ttccatttattaactggctcatacc

SEQ ID NO: 228503 - DNA, 25 bp, Probe sequence
ttggcttttcatgactatgctattt

SEQ ID NO: 228504 - DNA, 25 bp, Probe sequence
ataccaacgtggttaataagaatag

SEQ ID NO: 228505 - DNA, 25 bp, Probe sequence
atcactgtattttttatcatgttaa

SEQ ID NO: 228506 - DNA, 25 bp, Probe sequence
agtcgagcctgttaaaaataatgtt

SEQ ID NO: 228507 - DNA, 25 bp, Probe sequence
aggaagcgcttcaatatttacttta

SEQ ID NO: 228508 - DNA, 25 bp, Probe sequence
aggttaaatatagtcgagcctgtta

SEQ ID NO: 228509 - DNA, 25 bp, Probe sequence
agtgaatatggcttcgataggtaat

SEQ ID NO: 228510 - DNA, 25 bp, Probe sequence
agttcagttctatttggaattatat

SEQ ID NO: 228511 - DNA, 25 bp, Probe sequence
agagttgtattaataccgactttca

SEQ ID NO: 228512 - DNA, 25 bp, Probe sequence
agcgcttcaatatttactttaacca

SEQ ID NO: 228513 - DNA, 25 bp, Probe sequence
actagcaatcactgtattttttatc

SEQ ID NO: 228514 - DNA, 25 bp, Probe sequence
aaatatagtcgagcctgttaaaaat

SEQ ID NO: 228515 - DNA, 25 bp, Probe sequence
aaaacaactagcaatcactgtattt

SEQ ID NO: 228516 - DNA, 25 bp, Probe sequence
aataatgttttttggccggttgcag

SEQ ID NO: 228517 - DNA, 25 bp, Probe sequence
cattcttttgacgacagagtcacaa

SEQ ID NO: 228518 - DNA, 25 bp, Probe sequence
cgatgtttttctttttagtgaatat

SEQ ID NO: 228519 - DNA, 25 bp, Probe sequence
gccggttgcaggaagttcagttcta

SEQ ID NO: 228520 - DNA, 25 bp, Probe sequence
gcaggaagttcagttctatttggaa

SEQ ID NO: 228521 - DNA, 25 bp, Probe sequence
gacagagtcacaaaatataataata

SEQ ID NO: 228522 - DNA, 25 bp, Probe sequence
gataggtaataaaaatgttcatgtt

SEQ ID NO: 228523 - DNA, 25 bp, Probe sequence
gattgttaatagtttttgcgtactt

SEQ ID NO: 228524 - DNA, 25 bp, Probe sequence
gtattaataccgactttcaaacaag

SEQ ID NO: 228525 - DNA, 25 bp, Probe sequence
gtacggtaacttctttaatgttcag

SEQ ID NO: 228526 - DNA, 25 bp, Probe sequence
gtaacttctttaatgttcagtttga

SEQ ID NO: 228527 - DNA, 25 bp, Probe sequence
gtgctttgtgaatctagacaaattt

SEQ ID NO: 228528 - DNA, 25 bp, Probe sequence
ggttgcaggaagttcagttctattt

SEQ ID NO: 228529 - DNA, 25 bp, Probe sequence
ggaattatattgagaaagtacggta

SEQ ID NO: 228530 - DNA, 25 bp, Probe sequence
tggccggttgcaggaagttcagttc

SEQ ID NO: 228531 - DNA, 25 bp, Probe sequence
tgcgtacttttttttaggaagcgct

SEQ ID NO: 228532 - DNA, 25 bp, Probe sequence
taaccattcttttgacgacagagtc

SEQ ID NO: 228533 - DNA, 25 bp, Probe sequence
taaaaatcctaaatatcgagttatt

SEQ ID NO: 228534 - DNA, 25 bp, Probe sequence
tactttaaccattcttttgacgaca

SEQ ID NO: 228535 - DNA, 25 bp, Probe sequence
taccgactttcaaacaaggattgtt

SEQ ID NO: 228536 - DNA, 25 bp, Probe sequence
tatgattaattggtttttgcccaaa

SEQ ID NO: 228537 - DNA, 25 bp, Probe sequence
tttttggccggttgcaggaagttca

SEQ ID NO: 228538 - DNA, 25 bp, Probe sequence
atattttcgctggaagtttttcaat

SEQ ID NO: 228539 - DNA, 25 bp, Probe sequence
atccgaaatacaaagtcattcaaca

SEQ ID NO: 228540 - DNA, 25 bp, Probe sequence
atgttgctttgcgatgtcagagtca

SEQ ID NO: 228541 - DNA, 25 bp, Probe sequence
atgatattgtgtgctctcgctttaa

SEQ ID NO: 228542 - DNA, 25 bp, Probe sequence
agtcgatttagtaagcacttggttc

SEQ ID NO: 228543 - DNA, 25 bp, Probe sequence
agttttcggatatattttcgctgga

SEQ ID NO: 228544 - DNA, 25 bp, Probe sequence
aaaataatgttttctggtcagttat

SEQ ID NO: 228545 - DNA, 25 bp, Probe sequence
aacggtgaatacttattagtcgatt

SEQ ID NO: 228546 - DNA, 25 bp, Probe sequence
aatgcttttctttttgttaaatatg

SEQ ID NO: 228547 - DNA, 25 bp, Probe sequence
aatattttcattaattgcccttatg

SEQ ID NO: 228548 - DNA, 25 bp, Probe sequence
gcccttatgacaatcgaacctcaaa

SEQ ID NO: 228549 - DNA, 25 bp, Probe sequence
gctggaagtttttcaatattttcat

SEQ ID NO: 228550 - DNA, 25 bp, Probe sequence
gctctcgctttaatttgtgttatag

SEQ ID NO: 228551 - DNA, 25 bp, Probe sequence
gctttgcgatgtcagagtcatttat

SEQ ID NO: 228552 - DNA, 25 bp, Probe sequence
gacaatcgaacctcaaaatataata

SEQ ID NO: 228553 - DNA, 25 bp, Probe sequence
gagagttatattaataccaacgttt

SEQ ID NO: 228554 - DNA, 25 bp, Probe sequence
gatgttcaattagataagctagttg

SEQ ID NO: 228555 - DNA, 25 bp, Probe sequence
gatgacaatgcttttctttttgtta

SEQ ID NO: 228556 - DNA, 25 bp, Probe sequence
gttaaatatgacttcgataggtaat

SEQ ID NO: 228557 - DNA, 25 bp, Probe sequence
gttactttaaggaaatacatacatg

SEQ ID NO: 228558 - DNA, 25 bp, Probe sequence
gtaatgaaaaagttcgcgttataat

SEQ ID NO: 228559 - DNA, 25 bp, Probe sequence
gtaatgatattgtgtgctctcgctt

SEQ ID NO: 228560 - DNA, 25 bp, Probe sequence
gtcagagtcatttataaaaatccga

SEQ ID NO: 228561 - DNA, 25 bp, Probe sequence
ggattatgatgacaatgcttttctt

SEQ ID NO: 228562 - DNA, 25 bp, Probe sequence
tggtcagttataggaagttcggttt

SEQ ID NO: 228563 - DNA, 25 bp, Probe sequence
tggctgttttttagttttcggatat

SEQ ID NO: 228564 - DNA, 25 bp, Probe sequence
tgtgctctcgctttaatttgtgtta

SEQ ID NO: 228565 - DNA, 25 bp, Probe sequence
taataccaacgtttaaacttggctg

SEQ ID NO: 228566 - DNA, 25 bp, Probe sequence
taagcacttggttcgtgtacttttt

SEQ ID NO: 228567 - DNA, 25 bp, Probe sequence
tacaaagtcattcaacataacggtg

SEQ ID NO: 228568 - DNA, 25 bp, Probe sequence
tacatacatgtttttgatgttcaat

SEQ ID NO: 228569 - DNA, 25 bp, Probe sequence
tattgtgtgctctcgctttaatttg

SEQ ID NO: 228570 - DNA, 25 bp, Probe sequence
ttccaaaaaagtacgcgataattag

SEQ ID NO: 228571 - DNA, 25 bp, Probe sequence
ttgcccttatgacaatcgaacctca

SEQ ID NO: 228572 - DNA, 25 bp, Probe sequence
atttgttgcatcataatactaggta

SEQ ID NO: 228573 - DNA, 25 bp, Probe sequence
atatgtgctcactatatgacaataa

SEQ ID NO: 228574 - DNA, 25 bp, Probe sequence
atggttagcactctttttcccaatg

SEQ ID NO: 228575 - DNA, 25 bp, Probe sequence
aggtggtggttcattctttactatt

SEQ ID NO: 228576 - DNA, 25 bp, Probe sequence
agtaattttaatttgttgcatcata

SEQ ID NO: 228577 - DNA, 25 bp, Probe sequence
agagtctttgtttatcaatagtttt

SEQ ID NO: 228578 - DNA, 25 bp, Probe sequence
aaagttcatgtattatttaaatcaa

SEQ ID NO: 228579 - DNA, 25 bp, Probe sequence
aacattgtgaagacagctaaaatca

SEQ ID NO: 228580 - DNA, 25 bp, Probe sequence
aagtacgtcaaaatcagcgaaaaag

SEQ ID NO: 228581 - DNA, 25 bp, Probe sequence
cataatactaggtatttttctgttt

SEQ ID NO: 228582 - DNA, 25 bp, Probe sequence
gctaaaatcaattctttttggccag

SEQ ID NO: 228583 - DNA, 25 bp, Probe sequence
gcactctttttcccaatgattaatt

SEQ ID NO: 228584 - DNA, 25 bp, Probe sequence
gaaggtattcccatttatttatcgt

SEQ ID NO: 228585 - DNA, 25 bp, Probe sequence
gataatcatatttcccactttaaag

SEQ ID NO: 228586 - DNA, 25 bp, Probe sequence
gattttgaaactttaaacattgtga

SEQ ID NO: 228587 - DNA, 25 bp, Probe sequence
gttcattctttactatttatatgtt

SEQ ID NO: 228588 - DNA, 25 bp, Probe sequence
gtacggtcttatttggtgttatgtt

SEQ ID NO: 228589 - DNA, 25 bp, Probe sequence
gtaagtacatggttagcactctttt

SEQ ID NO: 228590 - DNA, 25 bp, Probe sequence
gtgttatgttaagaaggtattccca

SEQ ID NO: 228591 - DNA, 25 bp, Probe sequence
ggtggttcattctttactatttata

SEQ ID NO: 228592 - DNA, 25 bp, Probe sequence
ggccagtggcaggaagtacggtctt

SEQ ID NO: 228593 - DNA, 25 bp, Probe sequence
ggagacattgctttgtgaaactgaa

SEQ ID NO: 228594 - DNA, 25 bp, Probe sequence
ggcaggaagtacggtcttatttggt

SEQ ID NO: 228595 - DNA, 25 bp, Probe sequence
tgattaattggctgattccaaaaaa

SEQ ID NO: 228596 - DNA, 25 bp, Probe sequence
tcaattctttttggccagtggcagg

SEQ ID NO: 228597 - DNA, 25 bp, Probe sequence
taagataatcatatttcccacttta

SEQ ID NO: 228598 - DNA, 25 bp, Probe sequence
tacatggttagcactctttttccca

SEQ ID NO: 228599 - DNA, 25 bp, Probe sequence
tataactttgtttgtaatatttttg

SEQ ID NO: 228600 - DNA, 25 bp, Probe sequence
tatatgttattgacgattgaagttc

SEQ ID NO: 228601 - DNA, 25 bp, Probe sequence
tatttcccactttaaagagtctttg

SEQ ID NO: 228602 - DNA, 25 bp, Probe sequence
tattcccatttatttatcgttaaat

SEQ ID NO: 228603 - DNA, 25 bp, Probe sequence
ttatttttaaatatgtgctcactat

SEQ ID NO: 228604 - DNA, 25 bp, Probe sequence
ttatatatttatttaggtggtggtt

SEQ ID NO: 228605 - DNA, 25 bp, Probe sequence
ttagcactctttttcccaatgatta

SEQ ID NO: 228606 - DNA, 25 bp, Probe sequence
atttggcggtctttcaataatggct

SEQ ID NO: 228607 - DNA, 25 bp, Probe sequence
atattccttcacttaatattcaatt

SEQ ID NO: 228608 - DNA, 25 bp, Probe sequence
atgttgtgcaatatttctgggtgtt

SEQ ID NO: 228609 - DNA, 25 bp, Probe sequence
aactttatttcttcctatgattaat

SEQ ID NO: 228610 - DNA, 25 bp, Probe sequence
aatggctctaagtatgttattaact

SEQ ID NO: 228611 - DNA, 25 bp, Probe sequence
aatgactgcaggtttctttctgtta

SEQ ID NO: 228612 - DNA, 25 bp, Probe sequence
caatatttctgggtgttttaatact

SEQ ID NO: 228613 - DNA, 25 bp, Probe sequence
catggtgattgtaatatgttgtgca

SEQ ID NO: 228614 - DNA, 25 bp, Probe sequence
ctgttaaacatgtcatcgattattg

SEQ ID NO: 228615 - DNA, 25 bp, Probe sequence
ctggttaactttatttcttcctatg

SEQ ID NO: 228616 - DNA, 25 bp, Probe sequence
gccagttgcaggtagtactattttg

SEQ ID NO: 228617 - DNA, 25 bp, Probe sequence
gctatgtgaatctaaagttatcaac

SEQ ID NO: 228618 - DNA, 25 bp, Probe sequence
gcaggtagtactattttgttcggag

SEQ ID NO: 228619 - DNA, 25 bp, Probe sequence
gcaggtttctttctgttaaacatgt

SEQ ID NO: 228620 - DNA, 25 bp, Probe sequence
gactgcaggtttctttctgttaaac

SEQ ID NO: 228621 - DNA, 25 bp, Probe sequence
gacgatttaaacattgtcaaacctg

SEQ ID NO: 228622 - DNA, 25 bp, Probe sequence
gatttaaacattgtcaaacctgtta

SEQ ID NO: 228623 - DNA, 25 bp, Probe sequence
gtttagaaaatatattccttcactt

SEQ ID NO: 228624 - DNA, 25 bp, Probe sequence
gttaactttatttcttcctatgatt

SEQ ID NO: 228625 - DNA, 25 bp, Probe sequence
gttatcaacaaaaatcctaagtata

SEQ ID NO: 228626 - DNA, 25 bp, Probe sequence
gtttctttctgttaaacatgtcatc

SEQ ID NO: 228627 - DNA, 25 bp, Probe sequence
gtatgttattaactttaaatcctca

SEQ ID NO: 228628 - DNA, 25 bp, Probe sequence
ggtctttcaataatggctctaagta

SEQ ID NO: 228629 - DNA, 25 bp, Probe sequence
ggttggttggtaatgactgcaggtt

SEQ ID NO: 228630 - DNA, 25 bp, Probe sequence
ggttggtaatgactgcaggtttctt

SEQ ID NO: 228631 - DNA, 25 bp, Probe sequence
ggcggtctttcaataatggctctaa

SEQ ID NO: 228632 - DNA, 25 bp, Probe sequence
tggtaatgactgcaggtttctttct

SEQ ID NO: 228633 - DNA, 25 bp, Probe sequence
tgtgcaatatttctgggtgttttaa

SEQ ID NO: 228634 - DNA, 25 bp, Probe sequence
tgatttagtaagtacctggttaact

SEQ ID NO: 228635 - DNA, 25 bp, Probe sequence
tagtactattttgttcggagttacg

SEQ ID NO: 228636 - DNA, 25 bp, Probe sequence
taataggctttattggttggttggt

SEQ ID NO: 228637 - DNA, 25 bp, Probe sequence
taatactttttttatttctgaatcg

SEQ ID NO: 228638 - DNA, 25 bp, Probe sequence
ttttatttctgaatcgtaagctaag

SEQ ID NO: 228639 - DNA, 25 bp, Probe sequence
ttatttcttcctatgattaattggt

SEQ ID NO: 228640 - DNA, 25 bp, Probe sequence
attcctagatgcactattatcaatg

SEQ ID NO: 228641 - DNA, 25 bp, Probe sequence
attgccatatgttgcatcacattta

SEQ ID NO: 228642 - DNA, 25 bp, Probe sequence
atttggcggattgactatgctattc

SEQ ID NO: 228643 - DNA, 25 bp, Probe sequence
agctctgctttgctgggagttgcat

SEQ ID NO: 228644 - DNA, 25 bp, Probe sequence
aaaaaattagttattgccatatgtt

SEQ ID NO: 228645 - DNA, 25 bp, Probe sequence
aagaaaatatacacatttacttgac

SEQ ID NO: 228646 - DNA, 25 bp, Probe sequence
aatgatgaatacttaatggtcgata

SEQ ID NO: 228647 - DNA, 25 bp, Probe sequence
ctatgctattcctagatgcactatt

SEQ ID NO: 228648 - DNA, 25 bp, Probe sequence
cctagatgcactattatcaatgagt

SEQ ID NO: 228649 - DNA, 25 bp, Probe sequence
ccagttgcaggtagctctgctttgc

SEQ ID NO: 228650 - DNA, 25 bp, Probe sequence
gccagttgcaggtagctctgctttg

SEQ ID NO: 228651 - DNA, 25 bp, Probe sequence
gccatatgttgcatcacatttatag

SEQ ID NO: 228652 - DNA, 25 bp, Probe sequence
gcggattgactatgctattcctaga

SEQ ID NO: 228653 - DNA, 25 bp, Probe sequence
gctgggagttgcattaagaaaatat

SEQ ID NO: 228654 - DNA, 25 bp, Probe sequence
gctctgctttgctgggagttgcatt

SEQ ID NO: 228655 - DNA, 25 bp, Probe sequence
gctattcctagatgcactattatca

SEQ ID NO: 228656 - DNA, 25 bp, Probe sequence
gctttgctgggagttgcattaagaa

SEQ ID NO: 228657 - DNA, 25 bp, Probe sequence
gactatgctattcctagatgcacta

SEQ ID NO: 228658 - DNA, 25 bp, Probe sequence
gatatattttatttggcggattgac

SEQ ID NO: 228659 - DNA, 25 bp, Probe sequence
gattgactatgctattcctagatgc

SEQ ID NO: 228660 - DNA, 25 bp, Probe sequence
gttattgccatatgttgcatcacat

SEQ ID NO: 228661 - DNA, 25 bp, Probe sequence
gtttcacattatttggatatatttt

SEQ ID NO: 228662 - DNA, 25 bp, Probe sequence
gtttgtttcacattatttggatata

SEQ ID NO: 228663 - DNA, 25 bp, Probe sequence
gtagctctgctttgctgggagttgc

SEQ ID NO: 228664 - DNA, 25 bp, Probe sequence
ggttcatcccaaaagaatacgtcaa

SEQ ID NO: 228665 - DNA, 25 bp, Probe sequence
tggcggattgactatgctattccta

SEQ ID NO: 228666 - DNA, 25 bp, Probe sequence
tgaatacttaatggtcgatataata

SEQ ID NO: 228667 - DNA, 25 bp, Probe sequence
tgcaggtagctctgctttgctggga

SEQ ID NO: 228668 - DNA, 25 bp, Probe sequence
tctgctttgctgggagttgcattaa

SEQ ID NO: 228669 - DNA, 25 bp, Probe sequence
tacactaaaaaatgtttgtttcaca

SEQ ID NO: 228670 - DNA, 25 bp, Probe sequence
tagttattgccatatgttgcatcac

SEQ ID NO: 228671 - DNA, 25 bp, Probe sequence
tatgttgcatcacatttatagggat

SEQ ID NO: 228672 - DNA, 25 bp, Probe sequence
tattttatttggcggattgactatg

SEQ ID NO: 228673 - DNA, 25 bp, Probe sequence
ttgactatgctattcctagatgcac

SEQ ID NO: 228674 - DNA, 25 bp, Probe sequence
atcagaacaatcaaccggaatattt

SEQ ID NO: 228675 - DNA, 25 bp, Probe sequence
atcgatgtgattattcctggtgcaa

SEQ ID NO: 228676 - DNA, 25 bp, Probe sequence
accatcgtactacacgtcgtgattt

SEQ ID NO: 228677 - DNA, 25 bp, Probe sequence
acaacactccgaaagatcaagcagt

SEQ ID NO: 228678 - DNA, 25 bp, Probe sequence
aaagctgcagatatcgttttatcag

SEQ ID NO: 228679 - DNA, 25 bp, Probe sequence
aaaattgctacgaaagggtctcatg

SEQ ID NO: 228680 - DNA, 25 bp, Probe sequence
aacgagaccagctatcgatgtgatt

SEQ ID NO: 228681 - DNA, 25 bp, Probe sequence
aatgtgcgtcgcgtaaaagctttgg

SEQ ID NO: 228682 - DNA, 25 bp, Probe sequence
aatcgcacttgggacgaacgcagta

SEQ ID NO: 228683 - DNA, 25 bp, Probe sequence
gcgaacattgtattagcattttatt

SEQ ID NO: 228684 - DNA, 25 bp, Probe sequence
gcgtcgcgtaaaagctttggaaagc

SEQ ID NO: 228685 - DNA, 25 bp, Probe sequence
gctacgaaagggtctcatgaatttg

SEQ ID NO: 228686 - DNA, 25 bp, Probe sequence
gcattttatttaacgagaccagcta

SEQ ID NO: 228687 - DNA, 25 bp, Probe sequence
gcagcattacaagagcttaaggaac

SEQ ID NO: 228688 - DNA, 25 bp, Probe sequence
gcacatcaaacttcaattgcgaaca

SEQ ID NO: 228689 - DNA, 25 bp, Probe sequence
gaatatccgcgagagcaaattaaaa

SEQ ID NO: 228690 - DNA, 25 bp, Probe sequence
gaagtacatcagaacaatcaaccgg

SEQ ID NO: 228691 - DNA, 25 bp, Probe sequence
gaagaattggttggagaagttgtta

SEQ ID NO: 228692 - DNA, 25 bp, Probe sequence
gaaaagatgttgttcgtcaagccat

SEQ ID NO: 228693 - DNA, 25 bp, Probe sequence
gaaacgtctacaaactgattatatc

SEQ ID NO: 228694 - DNA, 25 bp, Probe sequence
gatggttacgttgatgttgtacagt

SEQ ID NO: 228695 - DNA, 25 bp, Probe sequence
gatgttgaagtgtttccaatcgcac

SEQ ID NO: 228696 - DNA, 25 bp, Probe sequence
gatcaagcagttgcagcattacaag

SEQ ID NO: 228697 - DNA, 25 bp, Probe sequence
gatacggcatatatttatgggccag

SEQ ID NO: 228698 - DNA, 25 bp, Probe sequence
gtgtttccaatcgcacttgggacga

SEQ ID NO: 228699 - DNA, 25 bp, Probe sequence
gttgttcgtcaagccattaatcatg

SEQ ID NO: 228700 - DNA, 25 bp, Probe sequence
gggacgaacgcagtaggtgggcata

SEQ ID NO: 228701 - DNA, 25 bp, Probe sequence
ggtgggcataatttatatccgaact

SEQ ID NO: 228702 - DNA, 25 bp, Probe sequence
ggtgtatcaaatttcacattagatc

SEQ ID NO: 228703 - DNA, 25 bp, Probe sequence
tagtgaccatcgtactacacgtcgt

SEQ ID NO: 228704 - DNA, 25 bp, Probe sequence
tagctgcagcacatcaaacttcaat

SEQ ID NO: 228705 - DNA, 25 bp, Probe sequence
tattcctggtgcaaaacgtgcagaa

SEQ ID NO: 228706 - DNA, 25 bp, Probe sequence
ttatgggccagaacgatcagaagaa

SEQ ID NO: 228707 - DNA, 25 bp, Probe sequence
ttagcatccggtattttagctggaa

SEQ ID NO: 228708 - DNA, 25 bp, Probe sequence
attatttttgcatcaccagtgtatt

SEQ ID NO: 228709 - DNA, 25 bp, Probe sequence
atcaatggattgacgtgacacaaca

SEQ ID NO: 228710 - DNA, 25 bp, Probe sequence
atgacgatgactatttgccgattct

SEQ ID NO: 228711 - DNA, 25 bp, Probe sequence
atgattactgttttgtttggtggga

SEQ ID NO: 228712 - DNA, 25 bp, Probe sequence
atggttatattattggaactgctga

SEQ ID NO: 228713 - DNA, 25 bp, Probe sequence
agcacgtgcaactgagtggaatagt

SEQ ID NO: 228714 - DNA, 25 bp, Probe sequence
acatcagtttaaaccgatacgtgac

SEQ ID NO: 228715 - DNA, 25 bp, Probe sequence
actgcacaattaacaaaattcgctt

SEQ ID NO: 228716 - DNA, 25 bp, Probe sequence
aactatgccttagcacgtgcaactg

SEQ ID NO: 228717 - DNA, 25 bp, Probe sequence
aacgatatcctaattttaaggcaca

SEQ ID NO: 228718 - DNA, 25 bp, Probe sequence
aagcctggtgacatcatgaaagaca

SEQ ID NO: 228719 - DNA, 25 bp, Probe sequence
aataaaagcgaagccagcaattacg

SEQ ID NO: 228720 - DNA, 25 bp, Probe sequence
aattcgctttgcaagatttagagta

SEQ ID NO: 228721 - DNA, 25 bp, Probe sequence
cagcaccattgaaagcatttatcga

SEQ ID NO: 228722 - DNA, 25 bp, Probe sequence
cgaagccagcaattacgcaaatgaa

SEQ ID NO: 228723 - DNA, 25 bp, Probe sequence
gccttagcacgtgcaactgagtgga

SEQ ID NO: 228724 - DNA, 25 bp, Probe sequence
gactttttaggtgccactttaaatg

SEQ ID NO: 228725 - DNA, 25 bp, Probe sequence
gcatcaccagtgtattggtatagca

SEQ ID NO: 228726 - DNA, 25 bp, Probe sequence
gaaagcatttatcgaacattggtca

SEQ ID NO: 228727 - DNA, 25 bp, Probe sequence
gaaagacaactatgccttagcacgt

SEQ ID NO: 228728 - DNA, 25 bp, Probe sequence
gacatacagcagagactattacttc

SEQ ID NO: 228729 - DNA, 25 bp, Probe sequence
gactatttgccgattctagataaaa

SEQ ID NO: 228730 - DNA, 25 bp, Probe sequence
gacgtgacacaacatcagtttaaac

SEQ ID NO: 228731 - DNA, 25 bp, Probe sequence
gaccaaacggtaatactgcacaatt

SEQ ID NO: 228732 - DNA, 25 bp, Probe sequence
gagactattacttcatatgacgatg

SEQ ID NO: 228733 - DNA, 25 bp, Probe sequence
gagttattttagttggtggagattg

SEQ ID NO: 228734 - DNA, 25 bp, Probe sequence
gatacgtgacgtgagacatacagca

SEQ ID NO: 228735 - DNA, 25 bp, Probe sequence
ggtatagcatttcagcaccattgaa

SEQ ID NO: 228736 - DNA, 25 bp, Probe sequence
ggaactgctgaaaagcctggtgaca

SEQ ID NO: 228737 - DNA, 25 bp, Probe sequence
ggcacaaatggccgaaaaggatttt

SEQ ID NO: 228738 - DNA, 25 bp, Probe sequence
tggtgggagtagaccaaacggtaat

SEQ ID NO: 228739 - DNA, 25 bp, Probe sequence
tcgaacattggtcagaaacattaca

SEQ ID NO: 228740 - DNA, 25 bp, Probe sequence
tagtttagactttttaggtgccact

SEQ ID NO: 228741 - DNA, 25 bp, Probe sequence
taggtgccactttaaatggttatat

SEQ ID NO: 228742 - DNA, 25 bp, Probe sequence
atcgttggctttgctaactttattt

SEQ ID NO: 228743 - DNA, 25 bp, Probe sequence
atgacatcgttggctttgctaactt

SEQ ID NO: 228744 - DNA, 25 bp, Probe sequence
atgtcgcaactaaagcttggtttaa

SEQ ID NO: 228745 - DNA, 25 bp, Probe sequence
atggcgaaaagttagacttagcact

SEQ ID NO: 228746 - DNA, 25 bp, Probe sequence
aggttttacaatcttacgctcttat

SEQ ID NO: 228747 - DNA, 25 bp, Probe sequence
aggtaatgacatcgttggctttgct

SEQ ID NO: 228748 - DNA, 25 bp, Probe sequence
agcacttatgtacaaagcattttaa

SEQ ID NO: 228749 - DNA, 25 bp, Probe sequence
aatgaaggattatcacgttttgaag

SEQ ID NO: 228750 - DNA, 25 bp, Probe sequence
aatcacttgttagaagcttcatata

SEQ ID NO: 228751 - DNA, 25 bp, Probe sequence
ccagaatcgcaacatacaggttatg

SEQ ID NO: 228752 - DNA, 25 bp, Probe sequence
gcgacaacagttaatcacttgttag

SEQ ID NO: 228753 - DNA, 25 bp, Probe sequence
gctaactttatttacggtgaagaat

SEQ ID NO: 228754 - DNA, 25 bp, Probe sequence
gcaaggttttacaatcttacgctct

SEQ ID NO: 228755 - DNA, 25 bp, Probe sequence
gaagaattatatttatcagctcatt

SEQ ID NO: 228756 - DNA, 25 bp, Probe sequence
gaagcagtagcttactataaagagc

SEQ ID NO: 228757 - DNA, 25 bp, Probe sequence
gaagcttcatataatgaacatcatt

SEQ ID NO: 228758 - DNA, 25 bp, Probe sequence
gaacaattattcttagtcgttgaag

SEQ ID NO: 228759 - DNA, 25 bp, Probe sequence
gaaaagacttcaagaacaattattc

SEQ ID NO: 228760 - DNA, 25 bp, Probe sequence
gacatcgttggctttgctaacttta

SEQ ID NO: 228761 - DNA, 25 bp, Probe sequence
gacttagcacttatgtacaaagcat

SEQ ID NO: 228762 - DNA, 25 bp, Probe sequence
gagatgtcgcaactaaagcttggtt

SEQ ID NO: 228763 - DNA, 25 bp, Probe sequence
gttaaaccagaatcgcaacatacag

SEQ ID NO: 228764 - DNA, 25 bp, Probe sequence
gttagacttagcacttatgtacaaa

SEQ ID NO: 228765 - DNA, 25 bp, Probe sequence
gttatggtacagcattgttaaatga

SEQ ID NO: 228766 - DNA, 25 bp, Probe sequence
gtagcttactataaagagcaaggtt

SEQ ID NO: 228767 - DNA, 25 bp, Probe sequence
ggctttgctaactttatttacggtg

SEQ ID NO: 228768 - DNA, 25 bp, Probe sequence
tgttcaaggtaagacaagcaactga

SEQ ID NO: 228769 - DNA, 25 bp, Probe sequence
tgttgttcaaattagagatgtcgca

SEQ ID NO: 228770 - DNA, 25 bp, Probe sequence
taaagcttggtttaatacatactta

SEQ ID NO: 228771 - DNA, 25 bp, Probe sequence
tacaggttatggtacagcattgtta

SEQ ID NO: 228772 - DNA, 25 bp, Probe sequence
tacttaaatatatacgctgcgacaa

SEQ ID NO: 228773 - DNA, 25 bp, Probe sequence
tttgaaggtgtttacttagaagtag

SEQ ID NO: 228774 - DNA, 25 bp, Probe sequence
tacgctgcgacaacagttaatcact

SEQ ID NO: 228775 - DNA, 25 bp, Probe sequence
ttatcagctcattatgttaaaccag

SEQ ID NO: 228776 - DNA, 25 bp, Probe sequence
atatcagaatcttttttacacagga

SEQ ID NO: 228777 - DNA, 25 bp, Probe sequence
atatgatttcagttcatcacggcat

SEQ ID NO: 228778 - DNA, 25 bp, Probe sequence
ataaatcctgaaattgcaaaaacga

SEQ ID NO: 228779 - DNA, 25 bp, Probe sequence
agtacttataactatgcatcacata

SEQ ID NO: 228780 - DNA, 25 bp, Probe sequence
agattcgttgagtaaaagtccagaa

SEQ ID NO: 228781 - DNA, 25 bp, Probe sequence
aaaggactacgatagcgattctaaa

SEQ ID NO: 228782 - DNA, 25 bp, Probe sequence
aaaacggatagtaacaaagacaatg

SEQ ID NO: 228783 - DNA, 25 bp, Probe sequence
aacgaaacaattgtgatgtctatga

SEQ ID NO: 228784 - DNA, 25 bp, Probe sequence
aacccgcaatatcagaatctttttt

SEQ ID NO: 228785 - DNA, 25 bp, Probe sequence
aaggtaaaattgtcctattcaatag

SEQ ID NO: 228786 - DNA, 25 bp, Probe sequence
aataacccgcaatatcagaatcttt

SEQ ID NO: 228787 - DNA, 25 bp, Probe sequence
cagaaaattggatgagtaaacttga

SEQ ID NO: 228788 - DNA, 25 bp, Probe sequence
cagaatcttttttacacaggaagta

SEQ ID NO: 228789 - DNA, 25 bp, Probe sequence
catgatagtggctcattcactttaa

SEQ ID NO: 228790 - DNA, 25 bp, Probe sequence
gaagctgttaaaaatttattggcta

SEQ ID NO: 228791 - DNA, 25 bp, Probe sequence
gagcaagtgctgataatatgatttc

SEQ ID NO: 228792 - DNA, 25 bp, Probe sequence
gatagcgattctaaagttacgaaga

SEQ ID NO: 228793 - DNA, 25 bp, Probe sequence
gatattagaggtagagcaagtgctg

SEQ ID NO: 228794 - DNA, 25 bp, Probe sequence
gatttcagttcatcacggcatggtt

SEQ ID NO: 228795 - DNA, 25 bp, Probe sequence
gattctaaagttacgaagacatttg

SEQ ID NO: 228796 - DNA, 25 bp, Probe sequence
gttggctgattgttgactatgcagg

SEQ ID NO: 228797 - DNA, 25 bp, Probe sequence
gtttttaagtatcattttagtagtg

SEQ ID NO: 228798 - DNA, 25 bp, Probe sequence
gtgatgtctatgaaaaaggactacg

SEQ ID NO: 228799 - DNA, 25 bp, Probe sequence
gtggttggtatcattcagcacatgc

SEQ ID NO: 228800 - DNA, 25 bp, Probe sequence
gtggcctggatatgatgatatcgta

SEQ ID NO: 228801 - DNA, 25 bp, Probe sequence
ggttggctgattgttgactatgcag

SEQ ID NO: 228802 - DNA, 25 bp, Probe sequence
ggttggtatcattcagcacatgcgt

SEQ ID NO: 228803 - DNA, 25 bp, Probe sequence
ggactacgatagcgattctaaagtt

SEQ ID NO: 228804 - DNA, 25 bp, Probe sequence
ggagtcaggttttttgatattagag

SEQ ID NO: 228805 - DNA, 25 bp, Probe sequence
tcacatgatagtggctcattcactt

SEQ ID NO: 228806 - DNA, 25 bp, Probe sequence
taagactttgtttttaagtatcatt

SEQ ID NO: 228807 - DNA, 25 bp, Probe sequence
tatgcatcacatataaatcctgaaa

SEQ ID NO: 228808 - DNA, 25 bp, Probe sequence
tattattataataacccgcaatatc

SEQ ID NO: 228809 - DNA, 25 bp, Probe sequence
ttcagttcatcacggcatggtttat

SEQ ID NO: 228810 - DNA, 25 bp, Probe sequence
atcgcaaaccgattcatttattaag

SEQ ID NO: 228811 - DNA, 25 bp, Probe sequence
agattaatgcgaccttctaaagatg

SEQ ID NO: 228812 - DNA, 25 bp, Probe sequence
agcgattattactggagatactgag

SEQ ID NO: 228813 - DNA, 25 bp, Probe sequence
actgaggtgaatgctgtattacgta

SEQ ID NO: 228814 - DNA, 25 bp, Probe sequence
acacagcagaacatagtcgctttgg

SEQ ID NO: 228815 - DNA, 25 bp, Probe sequence
aaagaaagtggtatgcatgcagttg

SEQ ID NO: 228816 - DNA, 25 bp, Probe sequence
aacgtgatgcgtatttcacaggtgt

SEQ ID NO: 228817 - DNA, 25 bp, Probe sequence
aagtgatttagcaagtcgatttatt

SEQ ID NO: 228818 - DNA, 25 bp, Probe sequence
aatccagattattattttgtgagtg

SEQ ID NO: 228819 - DNA, 25 bp, Probe sequence
cagaactgcaagaactgtttgaagc

SEQ ID NO: 228820 - DNA, 25 bp, Probe sequence
caggcattaatcgccaagactataa

SEQ ID NO: 228821 - DNA, 25 bp, Probe sequence
gcctgagtttccaagagaagttgcg

SEQ ID NO: 228822 - DNA, 25 bp, Probe sequence
gaatggattatttacaacgtgatgc

SEQ ID NO: 228823 - DNA, 25 bp, Probe sequence
gaagtgctgcttaataattgtttga

SEQ ID NO: 228824 - DNA, 25 bp, Probe sequence
gaagcaggtggtattaatccagatt

SEQ ID NO: 228825 - DNA, 25 bp, Probe sequence
gaagcggtagttacgtattatttgg

SEQ ID NO: 228826 - DNA, 25 bp, Probe sequence
gaaacgcgcaaaacagctttataat

SEQ ID NO: 228827 - DNA, 25 bp, Probe sequence
gaccgttggcattatgtgctgcatt

SEQ ID NO: 228828 - DNA, 25 bp, Probe sequence
gatgagtcatttattggtcatgatg

SEQ ID NO: 228829 - DNA, 25 bp, Probe sequence
gatttgccatatgactatgatcgac

SEQ ID NO: 228830 - DNA, 25 bp, Probe sequence
gttgcatccacatgattttattcca

SEQ ID NO: 228831 - DNA, 25 bp, Probe sequence
gtacctatcttttcacacagcagaa

SEQ ID NO: 228832 - DNA, 25 bp, Probe sequence
gtcgctttggacattctttaggtgt

SEQ ID NO: 228833 - DNA, 25 bp, Probe sequence
gtgctgcattattacatgatttagg

SEQ ID NO: 228834 - DNA, 25 bp, Probe sequence
ggacatggtccattttcacatagtt

SEQ ID NO: 228835 - DNA, 25 bp, Probe sequence
ggaacactgtacctatcttttcaca

SEQ ID NO: 228836 - DNA, 25 bp, Probe sequence
ggctatgaatttaagttgcatccac

SEQ ID NO: 228837 - DNA, 25 bp, Probe sequence
tgagtcgttatcaaatgtattggca

SEQ ID NO: 228838 - DNA, 25 bp, Probe sequence
tcgtggtggagaagtgctgcttaat

SEQ ID NO: 228839 - DNA, 25 bp, Probe sequence
tatgttgaactcgatgaagcggtag

SEQ ID NO: 228840 - DNA, 25 bp, Probe sequence
ttccacccagttagtcgtggtggag

SEQ ID NO: 228841 - DNA, 25 bp, Probe sequence
ttagtcattcatagtattacaggca

SEQ ID NO: 228842 - DNA, 25 bp, Probe sequence
ttaatacagaccatgaagcatacac

SEQ ID NO: 228843 - DNA, 25 bp, Probe sequence
ttccatttgatggctcaattattac

SEQ ID NO: 228844 - DNA, 25 bp, Probe sequence
attggtgacgagaataaagctattt

SEQ ID NO: 228845 - DNA, 25 bp, Probe sequence
attgcaccagtttttatcgatgttg

SEQ ID NO: 228846 - DNA, 25 bp, Probe sequence
atggaggttatatcattgtctgaga

SEQ ID NO: 228847 - DNA, 25 bp, Probe sequence
agaatattggttgtgttgggtaaca

SEQ ID NO: 228848 - DNA, 25 bp, Probe sequence
accctctagatggtcataaaggtac

SEQ ID NO: 228849 - DNA, 25 bp, Probe sequence
aaagctgctgttgaaggcgatgaag

SEQ ID NO: 228850 - DNA, 25 bp, Probe sequence
aaaagactttttaatgaaccatgat

SEQ ID NO: 228851 - DNA, 25 bp, Probe sequence
aacagcgtgctatttattagtgaat

SEQ ID NO: 228852 - DNA, 25 bp, Probe sequence
aagtatgcctgaacatgttaatatg

SEQ ID NO: 228853 - DNA, 25 bp, Probe sequence
aatggattactgataaagctgctgt

SEQ ID NO: 228854 - DNA, 25 bp, Probe sequence
aatattggttcaattagcttagaca

SEQ ID NO: 228855 - DNA, 25 bp, Probe sequence
cagtttttatcgatgttgctaacaa

SEQ ID NO: 228856 - DNA, 25 bp, Probe sequence
cattgtctgagaaaaaaggctttaa

SEQ ID NO: 228857 - DNA, 25 bp, Probe sequence
ctggtttaacagcgtgctatttatt

SEQ ID NO: 228858 - DNA, 25 bp, Probe sequence
gctgctgttgaaggcgatgaagcta

SEQ ID NO: 228859 - DNA, 25 bp, Probe sequence
gcaccagtttttatcgatgttgcta

SEQ ID NO: 228860 - DNA, 25 bp, Probe sequence
gcaattcgtcgtggttataaaagta

SEQ ID NO: 228861 - DNA, 25 bp, Probe sequence
gaataaagcaattcgtcgtggttat

SEQ ID NO: 228862 - DNA, 25 bp, Probe sequence
gaagcatttattgatattggaggca

SEQ ID NO: 228863 - DNA, 25 bp, Probe sequence
gaagctaaagaatattggttgtgtt

SEQ ID NO: 228864 - DNA, 25 bp, Probe sequence
gaaccatgatgaaggtatgtggaag

SEQ ID NO: 228865 - DNA, 25 bp, Probe sequence
gaacgtaatgaacaaggaccatatt

SEQ ID NO: 228866 - DNA, 25 bp, Probe sequence
gacaatattgcaccagtttttatcg

SEQ ID NO: 228867 - DNA, 25 bp, Probe sequence
gaggttatatcattgtctgagaaaa

SEQ ID NO: 228868 - DNA, 25 bp, Probe sequence
gataaagctgctgttgaaggcgatg

SEQ ID NO: 228869 - DNA, 25 bp, Probe sequence
gtcgtggttataaaagtatgcctga

SEQ ID NO: 228870 - DNA, 25 bp, Probe sequence
gggtaacaacagaacgtaatgaaca

SEQ ID NO: 228871 - DNA, 25 bp, Probe sequence
ggattactgataaagctgctgttga

SEQ ID NO: 228872 - DNA, 25 bp, Probe sequence
tcataaaaaatgaccctctagatgg

SEQ ID NO: 228873 - DNA, 25 bp, Probe sequence
taaaggtacaaatattggttcaatt

SEQ ID NO: 228874 - DNA, 25 bp, Probe sequence
taaagcaattcgtcgtggttataaa

SEQ ID NO: 228875 - DNA, 25 bp, Probe sequence
tagcttagacaatattgcaccagtt

SEQ ID NO: 228876 - DNA, 25 bp, Probe sequence
ttatcgatgttgctaacaaagaagc

SEQ ID NO: 228877 - DNA, 25 bp, Probe sequence
ttgatattggaggcatgcatgctcg

SEQ ID NO: 228878 - DNA, 25 bp, Probe sequence
attggagaccgtgtgtctatcgctt

SEQ ID NO: 228879 - DNA, 25 bp, Probe sequence
aggtcgtgaaacactttgccgtagt

SEQ ID NO: 228880 - DNA, 25 bp, Probe sequence
aggtaacctagctttacaatatgct

SEQ ID NO: 228881 - DNA, 25 bp, Probe sequence
agaatgctgattttggtgatgttac

SEQ ID NO: 228882 - DNA, 25 bp, Probe sequence
acatgcgcaggtgtgacaacttata

SEQ ID NO: 228883 - DNA, 25 bp, Probe sequence
aagttattgttactgcagactatgc

SEQ ID NO: 228884 - DNA, 25 bp, Probe sequence
aattagatccagcagcagcgtcttc

SEQ ID NO: 228885 - DNA, 25 bp, Probe sequence
gccgtagtgtgaaaaatgctggtta

SEQ ID NO: 228886 - DNA, 25 bp, Probe sequence
gcggttgatgttgtaaaagctggtg

SEQ ID NO: 228887 - DNA, 25 bp, Probe sequence
ggggctaaaattgttgccttcgaca

SEQ ID NO: 228888 - DNA, 25 bp, Probe sequence
gcagactatgctgtgaaagtacctg

SEQ ID NO: 228889 - DNA, 25 bp, Probe sequence
gcagcgtcttctattacatgcgcag

SEQ ID NO: 228890 - DNA, 25 bp, Probe sequence
gacgccatttaaccaagcggttgat

SEQ ID NO: 228891 - DNA, 25 bp, Probe sequence
gaagcgtttgaatttgctgctgaaa

SEQ ID NO: 228892 - DNA, 25 bp, Probe sequence
gaacttagatatcccaagattagtg

SEQ ID NO: 228893 - DNA, 25 bp, Probe sequence
gacaagacttacgtgaagcgtttga

SEQ ID NO: 228894 - DNA, 25 bp, Probe sequence
gagcagcagttgtaacgaaagatca

SEQ ID NO: 228895 - DNA, 25 bp, Probe sequence
gatggtgcaatggctgaacaagtta

SEQ ID NO: 228896 - DNA, 25 bp, Probe sequence
gattagatgcaacagtggtaacttc

SEQ ID NO: 228897 - DNA, 25 bp, Probe sequence
gttgctaagacgccatttaaccaag

SEQ ID NO: 228898 - DNA, 25 bp, Probe sequence
gttgatccagttgcagaagttatga

SEQ ID NO: 228899 - DNA, 25 bp, Probe sequence
gtttgtcataccgatttacatgtta

SEQ ID NO: 228900 - DNA, 25 bp, Probe sequence
gtattggtaaagtcatcgaagttgc

SEQ ID NO: 228901 - DNA, 25 bp, Probe sequence
gtagtaggttcacttgttggtacaa

SEQ ID NO: 228902 - DNA, 25 bp, Probe sequence
gtaaaagctggtgcaagagttgttg

SEQ ID NO: 228903 - DNA, 25 bp, Probe sequence
gtgaatattgtacaacaggtcgtga

SEQ ID NO: 228904 - DNA, 25 bp, Probe sequence
gtgtgtctatcgcttggatgttcga

SEQ ID NO: 228905 - DNA, 25 bp, Probe sequence
ggtgatgttacaggcgttactttag

SEQ ID NO: 228906 - DNA, 25 bp, Probe sequence
ggtaacttcagttgctaagacgcca

SEQ ID NO: 228907 - DNA, 25 bp, Probe sequence
ggatgttcgaaagctgtggaagatg

SEQ ID NO: 228908 - DNA, 25 bp, Probe sequence
tggttaggtgtttttggtataggtg

SEQ ID NO: 228909 - DNA, 25 bp, Probe sequence
tacaggcgttactttaggtcatgaa

SEQ ID NO: 228910 - DNA, 25 bp, Probe sequence
tatgctaaaaacgttatgggggcta

SEQ ID NO: 228911 - DNA, 25 bp, Probe sequence
ttaagagctttaaaacctggtgaag

SEQ ID NO: 228912 - DNA, 25 bp, Probe sequence
acatttcgtaagtggagacggtggc

SEQ ID NO: 228913 - DNA, 25 bp, Probe sequence
tttcgtaagtggagacggtggcaag

SEQ ID NO: 228914 - DNA, 25 bp, Probe sequence
aggcgacattaatatgaatttgcat

SEQ ID NO: 228915 - DNA, 25 bp, Probe sequence
acgatatatcggctggacgaattcc

SEQ ID NO: 228916 - DNA, 25 bp, Probe sequence
acgcattttacatttcgtaagtgga

SEQ ID NO: 228917 - DNA, 25 bp, Probe sequence
acttggcaacaaaggcaatctaact

SEQ ID NO: 228918 - DNA, 25 bp, Probe sequence
actttattcggtatgtagaacaaat

SEQ ID NO: 228919 - DNA, 25 bp, Probe sequence
acaacaactttttacgatatatcgg

SEQ ID NO: 228920 - DNA, 25 bp, Probe sequence
aaaaaatgggttcttatcaatatga

SEQ ID NO: 228921 - DNA, 25 bp, Probe sequence
aaaacattacgcattttacatttcg

SEQ ID NO: 228922 - DNA, 25 bp, Probe sequence
aacattacgcattttacatttcgta

SEQ ID NO: 228923 - DNA, 25 bp, Probe sequence
aactttttacgatatatcggctgga

SEQ ID NO: 228924 - DNA, 25 bp, Probe sequence
aagttgattcgtaaaggcgacatta

SEQ ID NO: 228925 - DNA, 25 bp, Probe sequence
aagtggatgatgatagcgttaagtt

SEQ ID NO: 228926 - DNA, 25 bp, Probe sequence
aaggcaatctaactttattcggtat

SEQ ID NO: 228927 - DNA, 25 bp, Probe sequence
aatgggttcttatcaatatgaaatt

SEQ ID NO: 228928 - DNA, 25 bp, Probe sequence
aattgaggatgcaacagttaatgtt

SEQ ID NO: 228929 - DNA, 25 bp, Probe sequence
caatctaactttattcggtatgtag

SEQ ID NO: 228930 - DNA, 25 bp, Probe sequence
cgacaacaactttttacgatatatc

SEQ ID NO: 228931 - DNA, 25 bp, Probe sequence
gcgttaagttgattcgtaaaggcga

SEQ ID NO: 228932 - DNA, 25 bp, Probe sequence
gaatttactactgaaggaacttggc

SEQ ID NO: 228933 - DNA, 25 bp, Probe sequence
gcaagtgttgaaacagcacaacgaa

SEQ ID NO: 228934 - DNA, 25 bp, Probe sequence
gaacaaattgaggatgcaacagtta

SEQ ID NO: 228935 - DNA, 25 bp, Probe sequence
gatgatgatagcgttaagttgattc

SEQ ID NO: 228936 - DNA, 25 bp, Probe sequence
gatatatcggctggacgaattccac

SEQ ID NO: 228937 - DNA, 25 bp, Probe sequence
gatagcgttaagttgattcgtaaag

SEQ ID NO: 228938 - DNA, 25 bp, Probe sequence
gattcgtaaaggcgacattaatatg

SEQ ID NO: 228939 - DNA, 25 bp, Probe sequence
gttgaaggacaaacgacaacaactt

SEQ ID NO: 228940 - DNA, 25 bp, Probe sequence
ggaacttggcaacaaaggcaatcta

SEQ ID NO: 228941 - DNA, 25 bp, Probe sequence
ggcaatctaactttattcggtatgt

SEQ ID NO: 228942 - DNA, 25 bp, Probe sequence
tgaatttgcattttgttgaaggaca

SEQ ID NO: 228943 - DNA, 25 bp, Probe sequence
tatcggctggacgaattccactaga

SEQ ID NO: 228944 - DNA, 25 bp, Probe sequence
tactactgaaggaacttggcaacaa

SEQ ID NO: 228945 - DNA, 25 bp, Probe sequence
tatatcggctggacgaattccacta

SEQ ID NO: 228946 - DNA, 25 bp, Probe sequence
attactaacttagcgcgttcgattg

SEQ ID NO: 228947 - DNA, 25 bp, Probe sequence
attgcaaagcgtaatcctcgtgaaa

SEQ ID NO: 228948 - DNA, 25 bp, Probe sequence
atttcttaactatgcgtagtcctga

SEQ ID NO: 228949 - DNA, 25 bp, Probe sequence
atttggtgctgatcatcatggttat

SEQ ID NO: 228950 - DNA, 25 bp, Probe sequence
acgtatttcttaccagatattgcgt

SEQ ID NO: 228951 - DNA, 25 bp, Probe sequence
aacaaattgacattgctggtccagg

SEQ ID NO: 228952 - DNA, 25 bp, Probe sequence
aacagcaattattcctgaagcaatt

SEQ ID NO: 228953 - DNA, 25 bp, Probe sequence
aagcatctcttgaaacgtttggtgt

SEQ ID NO: 228954 - DNA, 25 bp, Probe sequence
gcgatggtactgactaagattgcaa

SEQ ID NO: 228955 - DNA, 25 bp, Probe sequence
gcgtagtcctgatagtcactttgat

SEQ ID NO: 228956 - DNA, 25 bp, Probe sequence
gctggtccaggattcattaattttt

SEQ ID NO: 228957 - DNA, 25 bp, Probe sequence
gcattggcaatggtcggtgtaagcg

SEQ ID NO: 228958 - DNA, 25 bp, Probe sequence
gctaaccctacaggagatttacata

SEQ ID NO: 228959 - DNA, 25 bp, Probe sequence
gcagcagttggtgatgctttagcta

SEQ ID NO: 228960 - DNA, 25 bp, Probe sequence
gcagctggctataatgtaacacgtg

SEQ ID NO: 228961 - DNA, 25 bp, Probe sequence
gcacatgcgcgtatttgttcaattt

SEQ ID NO: 228962 - DNA, 25 bp, Probe sequence
gcacatgttgctatgattgaagcgg

SEQ ID NO: 228963 - DNA, 25 bp, Probe sequence
gaagttggcgttgacgctgcacgtt

SEQ ID NO: 228964 - DNA, 25 bp, Probe sequence
gacaatccagtttactatgctcaat

SEQ ID NO: 228965 - DNA, 25 bp, Probe sequence
gacggtacatatacgtatttcttac

SEQ ID NO: 228966 - DNA, 25 bp, Probe sequence
gacgctgcacgttatttcttaacta

SEQ ID NO: 228967 - DNA, 25 bp, Probe sequence
gagcaatctcaagacaatccagttt

SEQ ID NO: 228968 - DNA, 25 bp, Probe sequence
gagtaaacgtactggtaatgcgatt

SEQ ID NO: 228969 - DNA, 25 bp, Probe sequence
gagatttacatattggtcatgctag

SEQ ID NO: 228970 - DNA, 25 bp, Probe sequence
gatggcgctacatggttacgtacaa

SEQ ID NO: 228971 - DNA, 25 bp, Probe sequence
gatattgcgtaccacttcgataaag

SEQ ID NO: 228972 - DNA, 25 bp, Probe sequence
gatttagcagagaaacaccctgaaa

SEQ ID NO: 228973 - DNA, 25 bp, Probe sequence
gatttagcagagttcaatacgcatt

SEQ ID NO: 228974 - DNA, 25 bp, Probe sequence
gtgtaagcgcacctgaatcaatgta

SEQ ID NO: 228975 - DNA, 25 bp, Probe sequence
tcctcgtgaaattgctcaagcgatt

SEQ ID NO: 228976 - DNA, 25 bp, Probe sequence
tcatgcaaatggttcgtttaatgga

SEQ ID NO: 228977 - DNA, 25 bp, Probe sequence
tacgtatgaagctgatggcgctaca

SEQ ID NO: 228978 - DNA, 25 bp, Probe sequence
tatgctactaatattgcgatggtac

SEQ ID NO: 228979 - DNA, 25 bp, Probe sequence
tatgctcaatatgcacatgcgcgta

SEQ ID NO: 228980 - DNA, 25 bp, Probe sequence
attactagatgcctgcacaacaatc

SEQ ID NO: 228981 - DNA, 25 bp, Probe sequence
attttttccattactagatgcctgc

SEQ ID NO: 228982 - DNA, 25 bp, Probe sequence
atatcattgctgttttttgtgatgc

SEQ ID NO: 228983 - DNA, 25 bp, Probe sequence
atgcctgcacaacaatcaaaatcac

SEQ ID NO: 228984 - DNA, 25 bp, Probe sequence
atgagtactaaaaatacacctaatg

SEQ ID NO: 228985 - DNA, 25 bp, Probe sequence
agatgcctgcacaacaatcaaaatc

SEQ ID NO: 228986 - DNA, 25 bp, Probe sequence
agaaccataaattatctacatattt

SEQ ID NO: 228987 - DNA, 25 bp, Probe sequence
actagatgcctgcacaacaatcaaa

SEQ ID NO: 228988 - DNA, 25 bp, Probe sequence
aaattttttccattactagatgcct

SEQ ID NO: 228989 - DNA, 25 bp, Probe sequence
aaaaatacacctaatgaaaatatca

SEQ ID NO: 228990 - DNA, 25 bp, Probe sequence
aattttttccattactagatgcctg

SEQ ID NO: 228991 - DNA, 25 bp, Probe sequence
ctgcacaacaatcaaaatcacataa

SEQ ID NO: 228992 - DNA, 25 bp, Probe sequence
cgccaaattttttccattactagat

SEQ ID NO: 228993 - DNA, 25 bp, Probe sequence
ccattactagatgcctgcacaacaa

SEQ ID NO: 228994 - DNA, 25 bp, Probe sequence
gccaaattttttccattactagatg

SEQ ID NO: 228995 - DNA, 25 bp, Probe sequence
gcctgcacaacaatcaaaatcacat

SEQ ID NO: 228996 - DNA, 25 bp, Probe sequence
gctgttttttgtgatgcaagtgtga

SEQ ID NO: 228997 - DNA, 25 bp, Probe sequence
gaaaatatcattgctgttttttgtg

SEQ ID NO: 228998 - DNA, 25 bp, Probe sequence
gttttttgtgatgcaagtgtgatta

SEQ ID NO: 228999 - DNA, 25 bp, Probe sequence
gtgatgcaagtgtgattaagaataa

SEQ ID NO: 229000 - DNA, 25 bp, Probe sequence
ggaagaaccataaattatctacata

SEQ ID NO: 229001 - DNA, 25 bp, Probe sequence
tccattactagatgcctgcacaaca

SEQ ID NO: 229002 - DNA, 25 bp, Probe sequence
tcattgctgttttttgtgatgcaag

SEQ ID NO: 229003 - DNA, 25 bp, Probe sequence
tacatatttagaaaacgccaaattt

SEQ ID NO: 229004 - DNA, 25 bp, Probe sequence
tactagatgcctgcacaacaatcaa

SEQ ID NO: 229005 - DNA, 25 bp, Probe sequence
tagatgcctgcacaacaatcaaaat

SEQ ID NO: 229006 - DNA, 25 bp, Probe sequence
tatctacatatttagaaaacgccaa

SEQ ID NO: 229007 - DNA, 25 bp, Probe sequence
tatcattgctgttttttgtgatgca

SEQ ID NO: 229008 - DNA, 25 bp, Probe sequence
tttccattactagatgcctgcacaa

SEQ ID NO: 229009 - DNA, 25 bp, Probe sequence
tttttccattactagatgcctgcac

SEQ ID NO: 229010 - DNA, 25 bp, Probe sequence
ttttttccattactagatgcctgca

SEQ ID NO: 229011 - DNA, 25 bp, Probe sequence
ttttccattactagatgcctgcaca

SEQ ID NO: 229012 - DNA, 25 bp, Probe sequence
ttactagatgcctgcacaacaatca

SEQ ID NO: 229013 - DNA, 25 bp, Probe sequence
ttccattactagatgcctgcacaac

SEQ ID NO: 229014 - DNA, 25 bp, Probe sequence
attgaaacgttacaatcattgatac

SEQ ID NO: 229015 - DNA, 25 bp, Probe sequence
attaacatggttagcacgacatcat

SEQ ID NO: 229016 - DNA, 25 bp, Probe sequence
attaccaaatcattttacaaatcaa

SEQ ID NO: 229017 - DNA, 25 bp, Probe sequence
agtcacattaccaaatcattttaca

SEQ ID NO: 229018 - DNA, 25 bp, Probe sequence
agcacgacatcatttcaattatcaa

SEQ ID NO: 229019 - DNA, 25 bp, Probe sequence
acttgtttatatattcggacgtatt

SEQ ID NO: 229020 - DNA, 25 bp, Probe sequence
aaagtagtcacattaccaaatcatt

SEQ ID NO: 229021 - DNA, 25 bp, Probe sequence
aacatggttagcacgacatcatttc

SEQ ID NO: 229022 - DNA, 25 bp, Probe sequence
aatgaatttcatgctctgttagatg

SEQ ID NO: 229023 - DNA, 25 bp, Probe sequence
aatcatatattagaactacctattg

SEQ ID NO: 229024 - DNA, 25 bp, Probe sequence
caaaatactagatggcgaaatgcag

SEQ ID NO: 229025 - DNA, 25 bp, Probe sequence
cactgacgattaaaacattattaac

SEQ ID NO: 229026 - DNA, 25 bp, Probe sequence
cagcagatgtcttacttgtttatat

SEQ ID NO: 229027 - DNA, 25 bp, Probe sequence
cttacttgtttatatattcggacgt

SEQ ID NO: 229028 - DNA, 25 bp, Probe sequence
ctagatggcgaaatgcagaaattgc

SEQ ID NO: 229029 - DNA, 25 bp, Probe sequence
gctctgttagatgtatttggtaaac

SEQ ID NO: 229030 - DNA, 25 bp, Probe sequence
gaatttattccagatagctatacaa

SEQ ID NO: 229031 - DNA, 25 bp, Probe sequence
gaatttcatgctctgttagatgtat

SEQ ID NO: 229032 - DNA, 25 bp, Probe sequence
gaaaggtattggaagtgaaacagca

SEQ ID NO: 229033 - DNA, 25 bp, Probe sequence
gatgttaggtgcaattttagttcaa

SEQ ID NO: 229034 - DNA, 25 bp, Probe sequence
gatgtcttacttgtttatatattcg

SEQ ID NO: 229035 - DNA, 25 bp, Probe sequence
gatgtatttggtaaacattacttta

SEQ ID NO: 229036 - DNA, 25 bp, Probe sequence
gatgctaatgaatttcatgctctgt

SEQ ID NO: 229037 - DNA, 25 bp, Probe sequence
gttagcacgacatcatttcaattat

SEQ ID NO: 229038 - DNA, 25 bp, Probe sequence
gtgaaacagcagatgtcttacttgt

SEQ ID NO: 229039 - DNA, 25 bp, Probe sequence
gtggcctgctgataatgacattgaa

SEQ ID NO: 229040 - DNA, 25 bp, Probe sequence
ggtggcctgctgataatgacattga

SEQ ID NO: 229041 - DNA, 25 bp, Probe sequence
ggtgcaattttagttcaaaatacta

SEQ ID NO: 229042 - DNA, 25 bp, Probe sequence
tggttagcacgacatcatttcaatt

SEQ ID NO: 229043 - DNA, 25 bp, Probe sequence
tcatgctctgttagatgtatttggt

SEQ ID NO: 229044 - DNA, 25 bp, Probe sequence
tagaactacctattgaaacgttaca

SEQ ID NO: 229045 - DNA, 25 bp, Probe sequence
ttcggacgtattgaatttattccag

SEQ ID NO: 229046 - DNA, 25 bp, Probe sequence
ttattccagatagctatacaagaaa

SEQ ID NO: 229047 - DNA, 25 bp, Probe sequence
ttggtggcctgctgataatgacatt

SEQ ID NO: 229048 - DNA, 25 bp, Probe sequence
atttcgacggaagctaagacaagat

SEQ ID NO: 229049 - DNA, 25 bp, Probe sequence
atcgccgtaccatagaattgtttcg

SEQ ID NO: 229050 - DNA, 25 bp, Probe sequence
atcgttaattgcttttattttgatt

SEQ ID NO: 229051 - DNA, 25 bp, Probe sequence
agatctaattcttgcgcatgagtcg

SEQ ID NO: 229052 - DNA, 25 bp, Probe sequence
agaattgtttcgttaatgcctagta

SEQ ID NO: 229053 - DNA, 25 bp, Probe sequence
agcaggctgaacaacttgttgagga

SEQ ID NO: 229054 - DNA, 25 bp, Probe sequence
acatagttggtgtttcaacggttga

SEQ ID NO: 229055 - DNA, 25 bp, Probe sequence
aatggctcgtctaaatcgccgtacc

SEQ ID NO: 229056 - DNA, 25 bp, Probe sequence
acacgtattgaagttgtaaatggtg

SEQ ID NO: 229057 - DNA, 25 bp, Probe sequence
acaaggcatcaaagtagtgtatgtt

SEQ ID NO: 229058 - DNA, 25 bp, Probe sequence
aaattgggaaattaacgcatcatga

SEQ ID NO: 229059 - DNA, 25 bp, Probe sequence
aaagtcatagattcaattcctgctc

SEQ ID NO: 229060 - DNA, 25 bp, Probe sequence
aaagccagatctaattcttgcgcat

SEQ ID NO: 229061 - DNA, 25 bp, Probe sequence
aacccagatatattaatttcgacgg

SEQ ID NO: 229062 - DNA, 25 bp, Probe sequence
aatgctgtcaagaatacacgtattg

SEQ ID NO: 229063 - DNA, 25 bp, Probe sequence
aattcctgctcatcataaaaaatca

SEQ ID NO: 229064 - DNA, 25 bp, Probe sequence
catagattcaattcctgctcatcat

SEQ ID NO: 229065 - DNA, 25 bp, Probe sequence
ctcgtctaaatcgccgtaccataga

SEQ ID NO: 229066 - DNA, 25 bp, Probe sequence
ctgagtggctgtggtatgaaagata

SEQ ID NO: 229067 - DNA, 25 bp, Probe sequence
gcatgagtcgcaaaaggcaactgct

SEQ ID NO: 229068 - DNA, 25 bp, Probe sequence
gaaacaatttgatgctttgaatcta

SEQ ID NO: 229069 - DNA, 25 bp, Probe sequence
gataatggctcgtctaaatcgccgt

SEQ ID NO: 229070 - DNA, 25 bp, Probe sequence
gatcagattatatggatatcatcaa

SEQ ID NO: 229071 - DNA, 25 bp, Probe sequence
gattcaattcctgctcatcataaaa

SEQ ID NO: 229072 - DNA, 25 bp, Probe sequence
gtttcgttaatgcctagtaatactg

SEQ ID NO: 229073 - DNA, 25 bp, Probe sequence
gtcatcattagagaaacaaggcatc

SEQ ID NO: 229074 - DNA, 25 bp, Probe sequence
gtgaagaaatcgttaattgctttta

SEQ ID NO: 229075 - DNA, 25 bp, Probe sequence
gtgtatgttaaagatgcacaatcaa

SEQ ID NO: 229076 - DNA, 25 bp, Probe sequence
ggtccacgtattgatgaaggattaa

SEQ ID NO: 229077 - DNA, 25 bp, Probe sequence
ggcaactgctaataaagtattgtca

SEQ ID NO: 229078 - DNA, 25 bp, Probe sequence
taatggttggaaccctgtaacgaag

SEQ ID NO: 229079 - DNA, 25 bp, Probe sequence
tagtgacattaatggttggaaccct

SEQ ID NO: 229080 - DNA, 25 bp, Probe sequence
tattgaggtttcatcaaagcctgaa

SEQ ID NO: 229081 - DNA, 25 bp, Probe sequence
tttcaacggttgatgattatccaaa

SEQ ID NO: 229082 - DNA, 25 bp, Probe sequence
atctcagtcgaaacggttacactag

SEQ ID NO: 229083 - DNA, 25 bp, Probe sequence
atatcgcgttatgtatagcttctat

SEQ ID NO: 229084 - DNA, 25 bp, Probe sequence
ataactgtattagtcattacgtcgg

SEQ ID NO: 229085 - DNA, 25 bp, Probe sequence
atcaatgttagattaccgagattat

SEQ ID NO: 229086 - DNA, 25 bp, Probe sequence
aggctatccagttagaatcttaata

SEQ ID NO: 229087 - DNA, 25 bp, Probe sequence
acaactagcatatatctattttggc

SEQ ID NO: 229088 - DNA, 25 bp, Probe sequence
aatgatgtatttaaccagtctattt

SEQ ID NO: 229089 - DNA, 25 bp, Probe sequence
aatgcattggcagatagctttacat

SEQ ID NO: 229090 - DNA, 25 bp, Probe sequence
aatagcaatcacatttatcattgca

SEQ ID NO: 229091 - DNA, 25 bp, Probe sequence
aattcacttctatattttttgattt

SEQ ID NO: 229092 - DNA, 25 bp, Probe sequence
cgataaatgtcgcatatgttggcat

SEQ ID NO: 229093 - DNA, 25 bp, Probe sequence
gcatatatctattttggcagttggg

SEQ ID NO: 229094 - DNA, 25 bp, Probe sequence
gaagcattgttgacaggtatgatat

SEQ ID NO: 229095 - DNA, 25 bp, Probe sequence
tacgtcggtattgagccaaggctat

SEQ ID NO: 229096 - DNA, 25 bp, Probe sequence
gagccaaggctatccagttagaatc

SEQ ID NO: 229097 - DNA, 25 bp, Probe sequence
gatagctttacattaggattggcaa

SEQ ID NO: 229098 - DNA, 25 bp, Probe sequence
gattaccgagattattagaagcatt

SEQ ID NO: 229099 - DNA, 25 bp, Probe sequence
gtatagcttctatgataacggcgat

SEQ ID NO: 229100 - DNA, 25 bp, Probe sequence
gtcagtcactaggcttaaatgttca

SEQ ID NO: 229101 - DNA, 25 bp, Probe sequence
ggtatatttatcattcttaatcaac

SEQ ID NO: 229102 - DNA, 25 bp, Probe sequence
ggtataccagtgttattttacatgc

SEQ ID NO: 229103 - DNA, 25 bp, Probe sequence
ggttatggcagattttattggtagc

SEQ ID NO: 229104 - DNA, 25 bp, Probe sequence
ggattcctgtattttcaataacatt

SEQ ID NO: 229105 - DNA, 25 bp, Probe sequence
ggagaactaaaaagtcagtcactag

SEQ ID NO: 229106 - DNA, 25 bp, Probe sequence
ggcagtggaaacaatcattaggaag

SEQ ID NO: 229107 - DNA, 25 bp, Probe sequence
tgattttattaaaacctcgcaaatt

SEQ ID NO: 229108 - DNA, 25 bp, Probe sequence
tgagctggatagtcatattgattat

SEQ ID NO: 229109 - DNA, 25 bp, Probe sequence
taaccagtctattttaatcaatgtt

SEQ ID NO: 229110 - DNA, 25 bp, Probe sequence
tacatttggttcaggattagcatta

SEQ ID NO: 229111 - DNA, 25 bp, Probe sequence
tagtcattacgtcggtattgagcca

SEQ ID NO: 229112 - DNA, 25 bp, Probe sequence
tattcaattcacttctatatttttt

SEQ ID NO: 229113 - DNA, 25 bp, Probe sequence
tttacatgctaatatctcagtcgaa

SEQ ID NO: 229114 - DNA, 25 bp, Probe sequence
ttaacaacgttatggattcctgtat

SEQ ID NO: 229115 - DNA, 25 bp, Probe sequence
ttggtgatgcagaatactcaaatgt

SEQ ID NO: 229116 - DNA, 25 bp, Probe sequence
attacgatactttgtatacactaga

SEQ ID NO: 229117 - DNA, 25 bp, Probe sequence
atttcgattacattcacttggtttg

SEQ ID NO: 229118 - DNA, 25 bp, Probe sequence
atgatgtagctccagcacgagctat

SEQ ID NO: 229119 - DNA, 25 bp, Probe sequence
atgggcatggttagtgtatggtata

SEQ ID NO: 229120 - DNA, 25 bp, Probe sequence
agcacgagctatgggcatggttagt

SEQ ID NO: 229121 - DNA, 25 bp, Probe sequence
agctatcgcaaaaaggctttcaaat

SEQ ID NO: 229122 - DNA, 25 bp, Probe sequence
accacatcctaaaatttttgaagat

SEQ ID NO: 229123 - DNA, 25 bp, Probe sequence
acgtttccatgtagataggttaact

SEQ ID NO: 229124 - DNA, 25 bp, Probe sequence
acatcagaaacagttggttttcgta

SEQ ID NO: 229125 - DNA, 25 bp, Probe sequence
aaatcattaaacgtttccatgtaga

SEQ ID NO: 229126 - DNA, 25 bp, Probe sequence
aaagcatttattgagctagatgacg

SEQ ID NO: 229127 - DNA, 25 bp, Probe sequence
aaacaatttcgattacattcacttg

SEQ ID NO: 229128 - DNA, 25 bp, Probe sequence
aaggctttcaaattggtgttatcgc

SEQ ID NO: 229129 - DNA, 25 bp, Probe sequence
aattcatgttcaactggcagatttt

SEQ ID NO: 229130 - DNA, 25 bp, Probe sequence
cattcacttggtttgatgcatgtta

SEQ ID NO: 229131 - DNA, 25 bp, Probe sequence
ctccagcacgagctatgggcatggt

SEQ ID NO: 229132 - DNA, 25 bp, Probe sequence
gaaggtacgttgttggacagagtta

SEQ ID NO: 229133 - DNA, 25 bp, Probe sequence
gaacgatttcatgactacttaattc

SEQ ID NO: 229134 - DNA, 25 bp, Probe sequence
gaaattgaaccactcgaagaagaag

SEQ ID NO: 229135 - DNA, 25 bp, Probe sequence
gactacttaattcatgttcaactgg

SEQ ID NO: 229136 - DNA, 25 bp, Probe sequence
gataggttaacttggaaagacttat

SEQ ID NO: 229137 - DNA, 25 bp, Probe sequence
gatttagaaggtacgttgttggaca

SEQ ID NO: 229138 - DNA, 25 bp, Probe sequence
gattttgaaatgcatttttatcgtt

SEQ ID NO: 229139 - DNA, 25 bp, Probe sequence
gttggacagagttaaatctcgagag

SEQ ID NO: 229140 - DNA, 25 bp, Probe sequence
gtatttccttattacgatactttgt

SEQ ID NO: 229141 - DNA, 25 bp, Probe sequence
gtatacactagaaaagctatcgcaa

SEQ ID NO: 229142 - DNA, 25 bp, Probe sequence
ggggtattacctgagcaaattatgt

SEQ ID NO: 229143 - DNA, 25 bp, Probe sequence
ggtgttatcgcaaatggtaaatcta

SEQ ID NO: 229144 - DNA, 25 bp, Probe sequence
ggtttgatgcatgttattaattatt

SEQ ID NO: 229145 - DNA, 25 bp, Probe sequence
tgattgatcaactaggggtattacc

SEQ ID NO: 229146 - DNA, 25 bp, Probe sequence
tgattttacaattacaacagtggaa

SEQ ID NO: 229147 - DNA, 25 bp, Probe sequence
tcgaagagcaatatgaacgatttca

SEQ ID NO: 229148 - DNA, 25 bp, Probe sequence
ttttatcgttatgtatttccttatt

SEQ ID NO: 229149 - DNA, 25 bp, Probe sequence
ttgagctagatgacgatgaagataa

SEQ ID NO: 229150 - DNA, 25 bp, Probe sequence
attaaacgtttgccggtatctacat

SEQ ID NO: 229151 - DNA, 25 bp, Probe sequence
atttctcaaaatggtcgtgcagcac

SEQ ID NO: 229152 - DNA, 25 bp, Probe sequence
atgcatcattaattcgattccctga

SEQ ID NO: 229153 - DNA, 25 bp, Probe sequence
atggctgaattacctcaatcaagaa

SEQ ID NO: 229154 - DNA, 25 bp, Probe sequence
aggtcgtggttcaattcaaatgcgt

SEQ ID NO: 229155 - DNA, 25 bp, Probe sequence
agtgcctgagttatcaagacagtct

SEQ ID NO: 229156 - DNA, 25 bp, Probe sequence
acatgaccatgtattgttctttact

SEQ ID NO: 229157 - DNA, 25 bp, Probe sequence
aaatcagcacgtatcgttggtgacg

SEQ ID NO: 229158 - DNA, 25 bp, Probe sequence
aaaccagtacatcgtcgtatactat

SEQ ID NO: 229159 - DNA, 25 bp, Probe sequence
aacgtacgccagttaatgactatcg

SEQ ID NO: 229160 - DNA, 25 bp, Probe sequence
aagatttcagttatcgttatccgct

SEQ ID NO: 229161 - DNA, 25 bp, Probe sequence
aaggtgttcgcttaattcgcttagg

SEQ ID NO: 229162 - DNA, 25 bp, Probe sequence
aatggatggagatggcgcagcagca

SEQ ID NO: 229163 - DNA, 25 bp, Probe sequence
aatgcgttctcgtgcagttattgaa

SEQ ID NO: 229164 - DNA, 25 bp, Probe sequence
cattacgtcctttaggccgtacagc

SEQ ID NO: 229165 - DNA, 25 bp, Probe sequence
gctcaagctattttagacatgcgtt

SEQ ID NO: 229166 - DNA, 25 bp, Probe sequence
gaacgtggaggcggacgtcaacgta

SEQ ID NO: 229167 - DNA, 25 bp, Probe sequence
gaaagagagccgtcagtcttacctg

SEQ ID NO: 229168 - DNA, 25 bp, Probe sequence
gatcaatttgtttcaacggttgcta

SEQ ID NO: 229169 - DNA, 25 bp, Probe sequence
gattccctgaatcaacattacgtcc

SEQ ID NO: 229170 - DNA, 25 bp, Probe sequence
gattggtacatcacatgcatcatta

SEQ ID NO: 229171 - DNA, 25 bp, Probe sequence
gttgtcactgaaattcctttccaag

SEQ ID NO: 229172 - DNA, 25 bp, Probe sequence
gtttacgtactggtgtgcgtgtcgt

SEQ ID NO: 229173 - DNA, 25 bp, Probe sequence
gtgcgtgtcgttattgatgtgcgta

SEQ ID NO: 229174 - DNA, 25 bp, Probe sequence
gtggtggtcgtggtgttcaaggtat

SEQ ID NO: 229175 - DNA, 25 bp, Probe sequence
ggtcgtgcagcacaaggtgttcgct

SEQ ID NO: 229176 - DNA, 25 bp, Probe sequence
ggtacgtatggctcaagatttcagt

SEQ ID NO: 229177 - DNA, 25 bp, Probe sequence
ggacgtcaacgtattgttgtcactg

SEQ ID NO: 229178 - DNA, 25 bp, Probe sequence
ggcaacgaatattccaccacataac

SEQ ID NO: 229179 - DNA, 25 bp, Probe sequence
ggcgcagcagcaatgcgttatactg

SEQ ID NO: 229180 - DNA, 25 bp, Probe sequence
tgcaacaacgcttcaaactttctga

SEQ ID NO: 229181 - DNA, 25 bp, Probe sequence
tatcgttgctcgtgcattgccagat

SEQ ID NO: 229182 - DNA, 25 bp, Probe sequence
tatcgtgctcaaaaccgtggtggtc

SEQ ID NO: 229183 - DNA, 25 bp, Probe sequence
ttgccggtatctacatatcgtgctc

SEQ ID NO: 229184 - DNA, 25 bp, Probe sequence
attgattcatactgtacttgataat

SEQ ID NO: 229185 - DNA, 25 bp, Probe sequence
attattgcaggagaattcggtgaaa

SEQ ID NO: 229186 - DNA, 25 bp, Probe sequence
atattattcgaaactgggatcctga

SEQ ID NO: 229187 - DNA, 25 bp, Probe sequence
atgggtggaatcattggtgcggata

SEQ ID NO: 229188 - DNA, 25 bp, Probe sequence
aggtgaaggctatcctatcgtattg

SEQ ID NO: 229189 - DNA, 25 bp, Probe sequence
agaagttgcatttgtatgccatgaa

SEQ ID NO: 229190 - DNA, 25 bp, Probe sequence
agcaaaatcatttcaagttgtgtta

SEQ ID NO: 229191 - DNA, 25 bp, Probe sequence
acgctgatatttctcaaacttatag

SEQ ID NO: 229192 - DNA, 25 bp, Probe sequence
aacttatagaaatgtcgtagtaccg

SEQ ID NO: 229193 - DNA, 25 bp, Probe sequence
aatgcggactttgaagtatatcaag

SEQ ID NO: 229194 - DNA, 25 bp, Probe sequence
aatatgcccatattattcgaaactg

SEQ ID NO: 229195 - DNA, 25 bp, Probe sequence
cagtacgttatcctgaatttacatc

SEQ ID NO: 229196 - DNA, 25 bp, Probe sequence
cattacagtacattaggtgaaggct

SEQ ID NO: 229197 - DNA, 25 bp, Probe sequence
catttatcaacaaacatcacgatga

SEQ ID NO: 229198 - DNA, 25 bp, Probe sequence
cgtagtaccgacaaaaattattgca

SEQ ID NO: 229199 - DNA, 25 bp, Probe sequence
gctgatttaatccaaaatgcggact

SEQ ID NO: 229200 - DNA, 25 bp, Probe sequence
gaatcaagtgcattcccatttgttg

SEQ ID NO: 229201 - DNA, 25 bp, Probe sequence
gaaactgggatcctgaaaaacaaga

SEQ ID NO: 229202 - DNA, 25 bp, Probe sequence
gataaacctcgtcacattgaaataa

SEQ ID NO: 229203 - DNA, 25 bp, Probe sequence
gatttacgtggacatggctattctg

SEQ ID NO: 229204 - DNA, 25 bp, Probe sequence
gttgtgttaattgatttacgtggac

SEQ ID NO: 229205 - DNA, 25 bp, Probe sequence
gtattcaaaaacgctgatatttctc

SEQ ID NO: 229206 - DNA, 25 bp, Probe sequence
gtacttgataattattctgtgttta

SEQ ID NO: 229207 - DNA, 25 bp, Probe sequence
gtccgagaaaaatgaatcgattcct

SEQ ID NO: 229208 - DNA, 25 bp, Probe sequence
gtgcattcccatttgttgaagagca

SEQ ID NO: 229209 - DNA, 25 bp, Probe sequence
ggtaaatccaacatctattgaaggt

SEQ ID NO: 229210 - DNA, 25 bp, Probe sequence
ggacatggctattctgataaacctc

SEQ ID NO: 229211 - DNA, 25 bp, Probe sequence
ggctattctgataaacctcgtcaca

SEQ ID NO: 229212 - DNA, 25 bp, Probe sequence
ggctatcctatcgtattgattcata

SEQ ID NO: 229213 - DNA, 25 bp, Probe sequence
tggtgcggatatttcagtacgttat

SEQ ID NO: 229214 - DNA, 25 bp, Probe sequence
tgaaggtgaattaccggaagaacgt

SEQ ID NO: 229215 - DNA, 25 bp, Probe sequence
taagcgtaagtattatcgtccgaga

SEQ ID NO: 229216 - DNA, 25 bp, Probe sequence
tatcctgaatttacatcatcactta

SEQ ID NO: 229217 - DNA, 25 bp, Probe sequence
ttcaagcagttaaagaggtattcaa

SEQ ID NO: 229218 - DNA, 25 bp, Probe sequence
attactggtacaactacaagtgtta

SEQ ID NO: 229219 - DNA, 25 bp, Probe sequence
atttcatatattactggtacaacta

SEQ ID NO: 229220 - DNA, 25 bp, Probe sequence
atattactggtacaactacaagtgt

SEQ ID NO: 229221 - DNA, 25 bp, Probe sequence
atatattactggtacaactacaagt

SEQ ID NO: 229222 - DNA, 25 bp, Probe sequence
atgaaattaaaccaccaataactgt

SEQ ID NO: 229223 - DNA, 25 bp, Probe sequence
atcctttcgaaataagaatcgagct

SEQ ID NO: 229224 - DNA, 25 bp, Probe sequence
agttgatgaaattaaaccaccaata

SEQ ID NO: 229225 - DNA, 25 bp, Probe sequence
actggtacaactacaagtgttaata

SEQ ID NO: 229226 - DNA, 25 bp, Probe sequence
actacaagtgttaataaagttgatg

SEQ ID NO: 229227 - DNA, 25 bp, Probe sequence
aagttgatgaaattaaaccaccaat

SEQ ID NO: 229228 - DNA, 25 bp, Probe sequence
aatcctttcgaaataagaatcgagc

SEQ ID NO: 229229 - DNA, 25 bp, Probe sequence
catatattactggtacaactacaag

SEQ ID NO: 229230 - DNA, 25 bp, Probe sequence
ctggtacaactacaagtgttaataa

SEQ ID NO: 229231 - DNA, 25 bp, Probe sequence
ctaatcctttcgaaataagaatcga

SEQ ID NO: 229232 - DNA, 25 bp, Probe sequence
cgaaataagaatcgagctatcttga

SEQ ID NO: 229233 - DNA, 25 bp, Probe sequence
gctaatcctttcgaaataagaatcg

SEQ ID NO: 229234 - DNA, 25 bp, Probe sequence
gaaattaaaccaccaataactgtag

SEQ ID NO: 229235 - DNA, 25 bp, Probe sequence
gatgaaattaaaccaccaataactg

SEQ ID NO: 229236 - DNA, 25 bp, Probe sequence
tgaaattaaaccaccaataactgta

SEQ ID NO: 229237 - DNA, 25 bp, Probe sequence
gttgatgaaattaaaccaccaataa

SEQ ID NO: 229238 - DNA, 25 bp, Probe sequence
gtacaactacaagtgttaataaagt

SEQ ID NO: 229239 - DNA, 25 bp, Probe sequence
gtaaagagaatttcatatattactg

SEQ ID NO: 229240 - DNA, 25 bp, Probe sequence
ggtacaactacaagtgttaataaag

SEQ ID NO: 229241 - DNA, 25 bp, Probe sequence
tggtacaactacaagtgttaataaa

SEQ ID NO: 229242 - DNA, 25 bp, Probe sequence
tgatgaaattaaaccaccaataact

SEQ ID NO: 229243 - DNA, 25 bp, Probe sequence
tcctttcgaaataagaatcgagcta

SEQ ID NO: 229244 - DNA, 25 bp, Probe sequence
tcatatattactggtacaactacaa

SEQ ID NO: 229245 - DNA, 25 bp, Probe sequence
tactggtacaactacaagtgttaat

SEQ ID NO: 229246 - DNA, 25 bp, Probe sequence
tatattactggtacaactacaagtg

SEQ ID NO: 229247 - DNA, 25 bp, Probe sequence
tattactggtacaactacaagtgtt

SEQ ID NO: 229248 - DNA, 25 bp, Probe sequence
tttcatatattactggtacaactac

SEQ ID NO: 229249 - DNA, 25 bp, Probe sequence
ttactggtacaactacaagtgttaa

SEQ ID NO: 229250 - DNA, 25 bp, Probe sequence
ttcatatattactggtacaactaca

SEQ ID NO: 229251 - DNA, 25 bp, Probe sequence
ttgatgaaattaaaccaccaataac

SEQ ID NO: 229252 - DNA, 25 bp, Probe sequence
atcaatttgcctcagcaccaaaaga

SEQ ID NO: 229253 - DNA, 25 bp, Probe sequence
atgttctgttgtaatgggagtaggc

SEQ ID NO: 229254 - DNA, 25 bp, Probe sequence
atgtgaaaattggcgaatctattaa

SEQ ID NO: 229255 - DNA, 25 bp, Probe sequence
acgacttatcaatttgcctcagcac

SEQ ID NO: 229256 - DNA, 25 bp, Probe sequence
acatacggaatatagcaaagttgct

SEQ ID NO: 229257 - DNA, 25 bp, Probe sequence
aaacgacttatcaatttgcctcagc

SEQ ID NO: 229258 - DNA, 25 bp, Probe sequence
aagctgttaaaaattatgttggcaa

SEQ ID NO: 229259 - DNA, 25 bp, Probe sequence
aagttgctggtaattttggatatat

SEQ ID NO: 229260 - DNA, 25 bp, Probe sequence
aagtataattgcatgttctgttgta

SEQ ID NO: 229261 - DNA, 25 bp, Probe sequence
aatggtaaagtaactcatatttcaa

SEQ ID NO: 229262 - DNA, 25 bp, Probe sequence
aatttgcctcagcaccaaaagataa

SEQ ID NO: 229263 - DNA, 25 bp, Probe sequence
aattatatcgtattgatttggaaaa

SEQ ID NO: 229264 - DNA, 25 bp, Probe sequence
aattgcatgttctgttgtaatggga

SEQ ID NO: 229265 - DNA, 25 bp, Probe sequence
cattattacgaattccatactaaaa

SEQ ID NO: 229266 - DNA, 25 bp, Probe sequence
cttatcaatttgcctcagcaccaaa

SEQ ID NO: 229267 - DNA, 25 bp, Probe sequence
gcctcagcaccaaaagataaaaaca

SEQ ID NO: 229268 - DNA, 25 bp, Probe sequence
gctaatggtccaacatatcaagctg

SEQ ID NO: 229269 - DNA, 25 bp, Probe sequence
gcagcaagtggcaactctattgata

SEQ ID NO: 229270 - DNA, 25 bp, Probe sequence
gcaactctattgatactgttaaaca

SEQ ID NO: 229271 - DNA, 25 bp, Probe sequence
gcaagtggcaactctattgatactg

SEQ ID NO: 229272 - DNA, 25 bp, Probe sequence
gaagatggaactgaacattattacg

SEQ ID NO: 229273 - DNA, 25 bp, Probe sequence
gaagcagcaagtggcaactctattg

SEQ ID NO: 229274 - DNA, 25 bp, Probe sequence
gaacattattacgaattccatacta

SEQ ID NO: 229275 - DNA, 25 bp, Probe sequence
gaacactagtgccgaagcagcaagt

SEQ ID NO: 229276 - DNA, 25 bp, Probe sequence
gaaaaaggcaaaacgacttatcaat

SEQ ID NO: 229277 - DNA, 25 bp, Probe sequence
gaaaaagctactaacggcaagtata

SEQ ID NO: 229278 - DNA, 25 bp, Probe sequence
gacttatcaatttgcctcagcacca

SEQ ID NO: 229279 - DNA, 25 bp, Probe sequence
gttggcaaagcagtaacacatacgg

SEQ ID NO: 229280 - DNA, 25 bp, Probe sequence
gtataatgatgctaatggtccaaca

SEQ ID NO: 229281 - DNA, 25 bp, Probe sequence
gtaactcatatttcaatgatgtata

SEQ ID NO: 229282 - DNA, 25 bp, Probe sequence
gtgccgaagcagcaagtggcaactc

SEQ ID NO: 229283 - DNA, 25 bp, Probe sequence
gtggcaactctattgatactgttaa

SEQ ID NO: 229284 - DNA, 25 bp, Probe sequence
ggtatgttattagtaactactgatg

SEQ ID NO: 229285 - DNA, 25 bp, Probe sequence
ggcaaagcagtaacacatacggaat

SEQ ID NO: 229286 - DNA, 25 bp, Probe sequence
attgccggcatattttataagcgac

SEQ ID NO: 229287 - DNA, 25 bp, Probe sequence
attcataatccacaatcagcccaga

SEQ ID NO: 229288 - DNA, 25 bp, Probe sequence
atatggatattattagtagttctag

SEQ ID NO: 229289 - DNA, 25 bp, Probe sequence
atctccagcacaaatcatattaatg

SEQ ID NO: 229290 - DNA, 25 bp, Probe sequence
agcgacttgagttttcgggaatcgg

SEQ ID NO: 229291 - DNA, 25 bp, Probe sequence
agcatttaatattacttggggcgtt

SEQ ID NO: 229292 - DNA, 25 bp, Probe sequence
acagtatgttcagtttcaagctatt

SEQ ID NO: 229293 - DNA, 25 bp, Probe sequence
aaagaaaatctccagcacaaatcat

SEQ ID NO: 229294 - DNA, 25 bp, Probe sequence
aatgaatccagttattttctttatt

SEQ ID NO: 229295 - DNA, 25 bp, Probe sequence
caagctattactggaatgagtctat

SEQ ID NO: 229296 - DNA, 25 bp, Probe sequence
gccggcatattttataagcgacttg

SEQ ID NO: 229297 - DNA, 25 bp, Probe sequence
gaatccagttattttctttattata

SEQ ID NO: 229298 - DNA, 25 bp, Probe sequence
gaatgagtctattttattgtttagt

SEQ ID NO: 229299 - DNA, 25 bp, Probe sequence
gaaaatctccagcacaaatcatatt

SEQ ID NO: 229300 - DNA, 25 bp, Probe sequence
gactattgttgtatacctaagggtg

SEQ ID NO: 229301 - DNA, 25 bp, Probe sequence
gatgcaatgattcataatccacaat

SEQ ID NO: 229302 - DNA, 25 bp, Probe sequence
gattatcttcacgtacaagattata

SEQ ID NO: 229303 - DNA, 25 bp, Probe sequence
gttctagttatatatttcacaatta

SEQ ID NO: 229304 - DNA, 25 bp, Probe sequence
gtatgttcagtttcaagctattact

SEQ ID NO: 229305 - DNA, 25 bp, Probe sequence
gtagttctagttatatatttcacaa

SEQ ID NO: 229306 - DNA, 25 bp, Probe sequence
gtgatttttccaatgactattgttg

SEQ ID NO: 229307 - DNA, 25 bp, Probe sequence
gggtacaattatcgctatcatatcc

SEQ ID NO: 229308 - DNA, 25 bp, Probe sequence
ggtattattttagtaattgccggca

SEQ ID NO: 229309 - DNA, 25 bp, Probe sequence
ggtttatcaccgcatttgattgatg

SEQ ID NO: 229310 - DNA, 25 bp, Probe sequence
ggcgttataccaattacaaattttg

SEQ ID NO: 229311 - DNA, 25 bp, Probe sequence
tcataaaggtttatcaccgcatttg

SEQ ID NO: 229312 - DNA, 25 bp, Probe sequence
tcacaattagattatcttcacgtac

SEQ ID NO: 229313 - DNA, 25 bp, Probe sequence
tcaatttttctttttcattggtatt

SEQ ID NO: 229314 - DNA, 25 bp, Probe sequence
tacttggggcgttataccaattaca

SEQ ID NO: 229315 - DNA, 25 bp, Probe sequence
tttgctttacaaatgaatccagtta

SEQ ID NO: 229316 - DNA, 25 bp, Probe sequence
ttatgggtacaattatcgctatcat

SEQ ID NO: 229317 - DNA, 25 bp, Probe sequence
ttcattctcatatcctatttatatg

SEQ ID NO: 229318 - DNA, 25 bp, Probe sequence
ttgtttagtgatttttccaatgact

SEQ ID NO: 229319 - DNA, 25 bp, Probe sequence
ttggacatcaatttttctttttcat

SEQ ID NO: 229320 - DNA, 25 bp, Probe sequence
attcgttcattaattttgcataaag

SEQ ID NO: 229321 - DNA, 25 bp, Probe sequence
atattacttcatggattggatggta

SEQ ID NO: 229322 - DNA, 25 bp, Probe sequence
atcaagatgatatagcgggttttaa

SEQ ID NO: 229323 - DNA, 25 bp, Probe sequence
agtgcggtggcaattcgttcattaa

SEQ ID NO: 229324 - DNA, 25 bp, Probe sequence
acgatttaagaggtcatggcaagtc

SEQ ID NO: 229325 - DNA, 25 bp, Probe sequence
aaatcattaactaccattgcatcga

SEQ ID NO: 229326 - DNA, 25 bp, Probe sequence
aaatcttcgaacattcaggacatgc

SEQ ID NO: 229327 - DNA, 25 bp, Probe sequence
aacattcaggacatgcaccgcatat

SEQ ID NO: 229328 - DNA, 25 bp, Probe sequence
aagttaaatattcatgaggcacata

SEQ ID NO: 229329 - DNA, 25 bp, Probe sequence
aagtcacaattaatcctcaaatcca

SEQ ID NO: 229330 - DNA, 25 bp, Probe sequence
aatggggaacatgatcctttgatta

SEQ ID NO: 229331 - DNA, 25 bp, Probe sequence
aatcctcaaatccaattaacttatc

SEQ ID NO: 229332 - DNA, 25 bp, Probe sequence
catgcaccgcatattgaagaaccag

SEQ ID NO: 229333 - DNA, 25 bp, Probe sequence
catcaactagcatcatcatataaag

SEQ ID NO: 229334 - DNA, 25 bp, Probe sequence
cgtacatgtgtacctactttgttaa

SEQ ID NO: 229335 - DNA, 25 bp, Probe sequence
gcgggttttaataagtctgaagcgt

SEQ ID NO: 229336 - DNA, 25 bp, Probe sequence
gctggatttgaagatttgcaacatc

SEQ ID NO: 229337 - DNA, 25 bp, Probe sequence
gcaacatcaactagcatcatcatat

SEQ ID NO: 229338 - DNA, 25 bp, Probe sequence
gaatatatagcattaagtctgagga

SEQ ID NO: 229339 - DNA, 25 bp, Probe sequence
gaagcgtatattcttttattttcta

SEQ ID NO: 229340 - DNA, 25 bp, Probe sequence
gacatgatttaggtggggtagttgc

SEQ ID NO: 229341 - DNA, 25 bp, Probe sequence
gaggtcatggcaagtcttctaaaag

SEQ ID NO: 229342 - DNA, 25 bp, Probe sequence
gaggcacatattctaggacatgatt

SEQ ID NO: 229343 - DNA, 25 bp, Probe sequence
gatgacttaatacacagctttactc

SEQ ID NO: 229344 - DNA, 25 bp, Probe sequence
gtctgaggatgatagtgcggtggca

SEQ ID NO: 229345 - DNA, 25 bp, Probe sequence
gtgtacctactttgttaattaatgg

SEQ ID NO: 229346 - DNA, 25 bp, Probe sequence
ggggtagttgctaagttatttacag

SEQ ID NO: 229347 - DNA, 25 bp, Probe sequence
ggggatcctataatattacttcatg

SEQ ID NO: 229348 - DNA, 25 bp, Probe sequence
ggcaagtcttctaaaagtgaatcat

SEQ ID NO: 229349 - DNA, 25 bp, Probe sequence
tggatggtaatttagctggatttga

SEQ ID NO: 229350 - DNA, 25 bp, Probe sequence
tcatacgatttaaacgatcacgttg

SEQ ID NO: 229351 - DNA, 25 bp, Probe sequence
taactaccattgcatcgaagaaaga

SEQ ID NO: 229352 - DNA, 25 bp, Probe sequence
tacacagctttactcaattgttaat

SEQ ID NO: 229353 - DNA, 25 bp, Probe sequence
tatgcttatcgtgtaaaatcattaa

SEQ ID NO: 229354 - DNA, 25 bp, Probe sequence
atagaggacaggagtctttcgaatg

SEQ ID NO: 229355 - DNA, 25 bp, Probe sequence
attctttaagttagctatacatagt

SEQ ID NO: 229356 - DNA, 25 bp, Probe sequence
attattaacaattacagtctctcaa

SEQ ID NO: 229357 - DNA, 25 bp, Probe sequence
atcgaataattcaccaagcatcaat

SEQ ID NO: 229358 - DNA, 25 bp, Probe sequence
atgagtgtgaacatagtatttatat

SEQ ID NO: 229359 - DNA, 25 bp, Probe sequence
acattatcgaaagaactacttcaat

SEQ ID NO: 229360 - DNA, 25 bp, Probe sequence
aaatgtatgaagcgctcaagataaa

SEQ ID NO: 229361 - DNA, 25 bp, Probe sequence
aaagtgtacgttatcagaaatgtgt

SEQ ID NO: 229362 - DNA, 25 bp, Probe sequence
aaagcacattttcattcgttgatta

SEQ ID NO: 229363 - DNA, 25 bp, Probe sequence
aacaattacagtctctcaagttaag

SEQ ID NO: 229364 - DNA, 25 bp, Probe sequence
aagacatttgcatatcatgcttatc

SEQ ID NO: 229365 - DNA, 25 bp, Probe sequence
aatctgaacgtgactatttattctt

SEQ ID NO: 229366 - DNA, 25 bp, Probe sequence
aatcactacgaacaaatcaagtatt

SEQ ID NO: 229367 - DNA, 25 bp, Probe sequence
caatctgctattgaaacactaaatt

SEQ ID NO: 229368 - DNA, 25 bp, Probe sequence
cagcaagcatatcgaataattcacc

SEQ ID NO: 229369 - DNA, 25 bp, Probe sequence
gctattgaaacactaaattttatcg

SEQ ID NO: 229370 - DNA, 25 bp, Probe sequence
gcatatcatgcttatcaaaaaggta

SEQ ID NO: 229371 - DNA, 25 bp, Probe sequence
gaagacgttctttttcaatcactac

SEQ ID NO: 229372 - DNA, 25 bp, Probe sequence
gaagctggtatagataatgtaggac

SEQ ID NO: 229373 - DNA, 25 bp, Probe sequence
gaacgtgactatttattctttaagt

SEQ ID NO: 229374 - DNA, 25 bp, Probe sequence
gaactacttcaatatatagaggaca

SEQ ID NO: 229375 - DNA, 25 bp, Probe sequence
gactatttattctttaagttagcta

SEQ ID NO: 229376 - DNA, 25 bp, Probe sequence
gacgttctttttcaatcactacgaa

SEQ ID NO: 229377 - DNA, 25 bp, Probe sequence
gagactaattgaaaagtgtacgtta

SEQ ID NO: 229378 - DNA, 25 bp, Probe sequence
gtgtaaagcacattttcattcgttg

SEQ ID NO: 229379 - DNA, 25 bp, Probe sequence
ggagtctttcgaatgaagacgttct

SEQ ID NO: 229380 - DNA, 25 bp, Probe sequence
tcgttgattaaaattaggttaccag

SEQ ID NO: 229381 - DNA, 25 bp, Probe sequence
tcaagtattatctagacagcaagca

SEQ ID NO: 229382 - DNA, 25 bp, Probe sequence
taggttaccagaaacattatcgaaa

SEQ ID NO: 229383 - DNA, 25 bp, Probe sequence
tatctagacagcaagcatatcgaat

SEQ ID NO: 229384 - DNA, 25 bp, Probe sequence
tattgttaaaatgtatgaagcgctc

SEQ ID NO: 229385 - DNA, 25 bp, Probe sequence
tttagggcatcaatctgctattgaa

SEQ ID NO: 229386 - DNA, 25 bp, Probe sequence
ttcaccaagcatcaattgaagctgg

SEQ ID NO: 229387 - DNA, 25 bp, Probe sequence
ttctttttcaatcactacgaacaaa

SEQ ID NO: 229388 - DNA, 25 bp, Probe sequence
attggagcgacaacatggaaaagcg

SEQ ID NO: 229389 - DNA, 25 bp, Probe sequence
attgtagttccaacattttttatcg

SEQ ID NO: 229390 - DNA, 25 bp, Probe sequence
agctgcaattggagcgacaacatgg

SEQ ID NO: 229391 - DNA, 25 bp, Probe sequence
agcgacaacatggaaaagcgatctc

SEQ ID NO: 229392 - DNA, 25 bp, Probe sequence
acagctgcaattggagcgacaacat

SEQ ID NO: 229393 - DNA, 25 bp, Probe sequence
acagaaataaaatcaataggtactt

SEQ ID NO: 229394 - DNA, 25 bp, Probe sequence
acaacatggaaaagcgatctccagt

SEQ ID NO: 229395 - DNA, 25 bp, Probe sequence
aaatcaataggtactttaattgtag

SEQ ID NO: 229396 - DNA, 25 bp, Probe sequence
aatcaataggtactttaattgtagt

SEQ ID NO: 229397 - DNA, 25 bp, Probe sequence
aattggagcgacaacatggaaaagc

SEQ ID NO: 229398 - DNA, 25 bp, Probe sequence
caattggagcgacaacatggaaaag

SEQ ID NO: 229399 - DNA, 25 bp, Probe sequence
caacatggaaaagcgatctccagtt

SEQ ID NO: 229400 - DNA, 25 bp, Probe sequence
cagctgcaattggagcgacaacatg

SEQ ID NO: 229401 - DNA, 25 bp, Probe sequence
cagaaataaaatcaataggtacttt

SEQ ID NO: 229402 - DNA, 25 bp, Probe sequence
ctgcaattggagcgacaacatggaa

SEQ ID NO: 229403 - DNA, 25 bp, Probe sequence
cgacaacatggaaaagcgatctcca

SEQ ID NO: 229404 - DNA, 25 bp, Probe sequence
gcgacaacatggaaaagcgatctcc

SEQ ID NO: 229405 - DNA, 25 bp, Probe sequence
gctgcaattggagcgacaacatgga

SEQ ID NO: 229406 - DNA, 25 bp, Probe sequence
gcaattggagcgacaacatggaaaa

SEQ ID NO: 229407 - DNA, 25 bp, Probe sequence
gacaacatggaaaagcgatctccag

SEQ ID NO: 229408 - DNA, 25 bp, Probe sequence
gacagaaataaaatcaataggtact

SEQ ID NO: 229409 - DNA, 25 bp, Probe sequence
gagcgacaacatggaaaagcgatct

SEQ ID NO: 229410 - DNA, 25 bp, Probe sequence
ggagcgacaacatggaaaagcgatc

SEQ ID NO: 229411 - DNA, 25 bp, Probe sequence
tggagcgacaacatggaaaagcgat

SEQ ID NO: 229412 - DNA, 25 bp, Probe sequence
tgtagttccaacattttttatcgtt

SEQ ID NO: 229413 - DNA, 25 bp, Probe sequence
tgcaattggagcgacaacatggaaa

SEQ ID NO: 229414 - DNA, 25 bp, Probe sequence
taattgtagttccaacattttttat

SEQ ID NO: 229415 - DNA, 25 bp, Probe sequence
taaaatcaataggtactttaattgt

SEQ ID NO: 229416 - DNA, 25 bp, Probe sequence
ttgtagttccaacattttttatcgt

SEQ ID NO: 229417 - DNA, 25 bp, Probe sequence
ttggagcgacaacatggaaaagcga

SEQ ID NO: 229418 - DNA, 25 bp, Probe sequence
acaggccttgatgaaaaacggttcg

SEQ ID NO: 229419 - DNA, 25 bp, Probe sequence
atatcgcaaatgttaaagcgtacat

SEQ ID NO: 229420 - DNA, 25 bp, Probe sequence
ataggtccacatatcgcaaatgtta

SEQ ID NO: 229421 - DNA, 25 bp, Probe sequence
atacaggccttgatgaaaaacggtt

SEQ ID NO: 229422 - DNA, 25 bp, Probe sequence
ataatacaggccttgatgaaaaacg

SEQ ID NO: 229423 - DNA, 25 bp, Probe sequence
ataataatacaggccttgatgaaaa

SEQ ID NO: 229424 - DNA, 25 bp, Probe sequence
atgttaaagcgtacattgtcactaa

SEQ ID NO: 229425 - DNA, 25 bp, Probe sequence
atgtccataataatacaggccttga

SEQ ID NO: 229426 - DNA, 25 bp, Probe sequence
caggccttgatgaaaaacggttcgt

SEQ ID NO: 229427 - DNA, 25 bp, Probe sequence
aggtccacatatcgcaaatgttaaa

SEQ ID NO: 229428 - DNA, 25 bp, Probe sequence
agaataggtccacatatcgcaaatg

SEQ ID NO: 229429 - DNA, 25 bp, Probe sequence
acatatcgcaaatgttaaagcgtac

SEQ ID NO: 229430 - DNA, 25 bp, Probe sequence
aatacaggccttgatgaaaaacggt

SEQ ID NO: 229431 - DNA, 25 bp, Probe sequence
aatgtccataataatacaggccttg

SEQ ID NO: 229432 - DNA, 25 bp, Probe sequence
aataatacaggccttgatgaaaaac

SEQ ID NO: 229433 - DNA, 25 bp, Probe sequence
aataggtccacatatcgcaaatgtt

SEQ ID NO: 229434 - DNA, 25 bp, Probe sequence
ccataataatacaggccttgatgaa

SEQ ID NO: 229435 - DNA, 25 bp, Probe sequence
ccacatatcgcaaatgttaaagcgt

SEQ ID NO: 229436 - DNA, 25 bp, Probe sequence
gaataggtccacatatcgcaaatgt

SEQ ID NO: 229437 - DNA, 25 bp, Probe sequence
gataaatataagtaatgtccataat

SEQ ID NO: 229438 - DNA, 25 bp, Probe sequence
gttaaagcgtacattgtcactaatt

SEQ ID NO: 229439 - DNA, 25 bp, Probe sequence
gtaatgtccataataatacaggcct

SEQ ID NO: 229440 - DNA, 25 bp, Probe sequence
gtccacatatcgcaaatgttaaagc

SEQ ID NO: 229441 - DNA, 25 bp, Probe sequence
gtccataataatacaggccttgatg

SEQ ID NO: 229442 - DNA, 25 bp, Probe sequence
ggtccacatatcgcaaatgttaaag

SEQ ID NO: 229443 - DNA, 25 bp, Probe sequence
tgtccataataatacaggccttgat

SEQ ID NO: 229444 - DNA, 25 bp, Probe sequence
tgttaaagcgtacattgtcactaat

SEQ ID NO: 229445 - DNA, 25 bp, Probe sequence
tccataataatacaggccttgatga

SEQ ID NO: 229446 - DNA, 25 bp, Probe sequence
taatacaggccttgatgaaaaacgg

SEQ ID NO: 229447 - DNA, 25 bp, Probe sequence
taatgtccataataatacaggcctt

SEQ ID NO: 229448 - DNA, 25 bp, Probe sequence
taaagcgtacattgtcactaattga

SEQ ID NO: 229449 - DNA, 25 bp, Probe sequence
tacaggccttgatgaaaaacggttc

SEQ ID NO: 229450 - DNA, 25 bp, Probe sequence
taggtccacatatcgcaaatgttaa

SEQ ID NO: 229451 - DNA, 25 bp, Probe sequence
ttaaagcgtacattgtcactaattg

SEQ ID NO: 229452 - DNA, 25 bp, Probe sequence
atcgcactgttacaatgatttcatt

SEQ ID NO: 229453 - DNA, 25 bp, Probe sequence
atggttacaaccgcttcgtttgtga

SEQ ID NO: 229454 - DNA, 25 bp, Probe sequence
aggtacaatgactatcaccacaatt

SEQ ID NO: 229455 - DNA, 25 bp, Probe sequence
acacttggacaatctgtagaacaat

SEQ ID NO: 229456 - DNA, 25 bp, Probe sequence
aaacacgtttgcaggtattaatggt

SEQ ID NO: 229457 - DNA, 25 bp, Probe sequence
aaaagattgcagcttaccaagtcat

SEQ ID NO: 229458 - DNA, 25 bp, Probe sequence
aacttttcacatattgcaatgcgtt

SEQ ID NO: 229459 - DNA, 25 bp, Probe sequence
caaccgcttcgtttgtgattacttt

SEQ ID NO: 229460 - DNA, 25 bp, Probe sequence
cagcgctggtcctttttatgtggct

SEQ ID NO: 229461 - DNA, 25 bp, Probe sequence
cagtaggtacattaaacttttcaca

SEQ ID NO: 229462 - DNA, 25 bp, Probe sequence
gcgtcatttgtactcattacacttg

SEQ ID NO: 229463 - DNA, 25 bp, Probe sequence
gctataactatggtcatcggcgcta

SEQ ID NO: 229464 - DNA, 25 bp, Probe sequence
gcagcttaccaagtcataatctcaa

SEQ ID NO: 229465 - DNA, 25 bp, Probe sequence
gcaatgcgtttgaatgacatgggag

SEQ ID NO: 229466 - DNA, 25 bp, Probe sequence
gacatgggagataatcgcactgtta

SEQ ID NO: 229467 - DNA, 25 bp, Probe sequence
gagcttgcagcattatttgcagcgt

SEQ ID NO: 229468 - DNA, 25 bp, Probe sequence
gataggctcttttctaacatcagat

SEQ ID NO: 229469 - DNA, 25 bp, Probe sequence
gatttgggcgtggcgaacataaagc

SEQ ID NO: 229470 - DNA, 25 bp, Probe sequence
gtacttattttccaaggtgcattgc

SEQ ID NO: 229471 - DNA, 25 bp, Probe sequence
gtgttaaatactgagcttgcagcat

SEQ ID NO: 229472 - DNA, 25 bp, Probe sequence
tggtcctttttatgtggctacccaa

SEQ ID NO: 229473 - DNA, 25 bp, Probe sequence
ggttcatggctattcttattaggta

SEQ ID NO: 229474 - DNA, 25 bp, Probe sequence
ggactagcgttaatgattattacta

SEQ ID NO: 229475 - DNA, 25 bp, Probe sequence
tgatttttgctattggcggcgtgcc

SEQ ID NO: 229476 - DNA, 25 bp, Probe sequence
tgatttcattaatcttcttagtcgc

SEQ ID NO: 229477 - DNA, 25 bp, Probe sequence
tgactatcaccacaattatttcatt

SEQ ID NO: 229478 - DNA, 25 bp, Probe sequence
taatgctattaatttatgttcagcg

SEQ ID NO: 229479 - DNA, 25 bp, Probe sequence
taccaatgttattaccattcctttg

SEQ ID NO: 229480 - DNA, 25 bp, Probe sequence
tagtagttgtggttatcgcaatcgg

SEQ ID NO: 229481 - DNA, 25 bp, Probe sequence
tatgttgtcttgaatattattggtt

SEQ ID NO: 229482 - DNA, 25 bp, Probe sequence
tatttgcagcgttaatgaccaaagt

SEQ ID NO: 229483 - DNA, 25 bp, Probe sequence
ttattaccattcctttgtgccttaa

SEQ ID NO: 229484 - DNA, 25 bp, Probe sequence
ttattggttcatggctattcttatt

SEQ ID NO: 229485 - DNA, 25 bp, Probe sequence
ttgtgccttaatccttgtattttta

SEQ ID NO: 229486 - DNA, 25 bp, Probe sequence
attagtgcttggtattagtcttctg

SEQ ID NO: 229487 - DNA, 25 bp, Probe sequence
atacgaagtagctcaggataatcaa

SEQ ID NO: 229488 - DNA, 25 bp, Probe sequence
ataaagcgccgaagctgttgttgaa

SEQ ID NO: 229489 - DNA, 25 bp, Probe sequence
ataataaattcatttctactgagga

SEQ ID NO: 229490 - DNA, 25 bp, Probe sequence
agtgcttggtattagtcttctgttt

SEQ ID NO: 229491 - DNA, 25 bp, Probe sequence
agcgccgaagctgttgttgaaaggt

SEQ ID NO: 229492 - DNA, 25 bp, Probe sequence
accaacaaataaagcgccgaagctg

SEQ ID NO: 229493 - DNA, 25 bp, Probe sequence
actttaagttttttgcgcaatatag

SEQ ID NO: 229494 - DNA, 25 bp, Probe sequence
aaattagtgcttggtattagtcttc

SEQ ID NO: 229495 - DNA, 25 bp, Probe sequence
aaatatttactttactgatagtcta

SEQ ID NO: 229496 - DNA, 25 bp, Probe sequence
aaatacgaagtagctcaggataatc

SEQ ID NO: 229497 - DNA, 25 bp, Probe sequence
aaaggcatgcttttgaagatagata

SEQ ID NO: 229498 - DNA, 25 bp, Probe sequence
aagcgccgaagctgttgttgaaagg

SEQ ID NO: 229499 - DNA, 25 bp, Probe sequence
aagttttttgcgcaatatagcaatt

SEQ ID NO: 229500 - DNA, 25 bp, Probe sequence
aaggattttactatactaatgaaat

SEQ ID NO: 229501 - DNA, 25 bp, Probe sequence
aataaagcgccgaagctgttgttga

SEQ ID NO: 229502 - DNA, 25 bp, Probe sequence
aattcatttctactgaggaagttaa

SEQ ID NO: 229503 - DNA, 25 bp, Probe sequence
caaataaagcgccgaagctgttgtt

SEQ ID NO: 229504 - DNA, 25 bp, Probe sequence
cttggtattagtcttctgtttttag

SEQ ID NO: 229505 - DNA, 25 bp, Probe sequence
cgaagtagctcaggataatcaaaaa

SEQ ID NO: 229506 - DNA, 25 bp, Probe sequence
gcgccgaagctgttgttgaaaggta

SEQ ID NO: 229507 - DNA, 25 bp, Probe sequence
gcttggtattagtcttctgttttta

SEQ ID NO: 229508 - DNA, 25 bp, Probe sequence
gaagctctaaaaataaaaggcatgc

SEQ ID NO: 229509 - DNA, 25 bp, Probe sequence
gacggagaaatacgaagtagctcag

SEQ ID NO: 229510 - DNA, 25 bp, Probe sequence
gttttttgcgcaatatagcaatttt

SEQ ID NO: 229511 - DNA, 25 bp, Probe sequence
gtgcttggtattagtcttctgtttt

SEQ ID NO: 229512 - DNA, 25 bp, Probe sequence
ggcatgcttttgaagatagatagaa

SEQ ID NO: 229513 - DNA, 25 bp, Probe sequence
tgcttggtattagtcttctgttttt

SEQ ID NO: 229514 - DNA, 25 bp, Probe sequence
tgcgcaatatagcaattttaaagat

SEQ ID NO: 229515 - DNA, 25 bp, Probe sequence
tcatttctactgaggaagttaaaga

SEQ ID NO: 229516 - DNA, 25 bp, Probe sequence
taaattcatttctactgaggaagtt

SEQ ID NO: 229517 - DNA, 25 bp, Probe sequence
tagtgcttggtattagtcttctgtt

SEQ ID NO: 229518 - DNA, 25 bp, Probe sequence
ttagtgcttggtattagtcttctgt

SEQ ID NO: 229519 - DNA, 25 bp, Probe sequence
ttggtattagtcttctgtttttagt

SEQ ID NO: 229520 - DNA, 25 bp, Probe sequence
atattatcattgcattcttatgggt

SEQ ID NO: 229521 - DNA, 25 bp, Probe sequence
atatcaattaataacatctagcatt

SEQ ID NO: 229522 - DNA, 25 bp, Probe sequence
ataactccagggtctacagtaatac

SEQ ID NO: 229523 - DNA, 25 bp, Probe sequence
ataacatctagcattagcacgatta

SEQ ID NO: 229524 - DNA, 25 bp, Probe sequence
aggtttttcagcgatgatttttatg

SEQ ID NO: 229525 - DNA, 25 bp, Probe sequence
agcacgattaattatattcttttta

SEQ ID NO: 229526 - DNA, 25 bp, Probe sequence
acatctagcattagcacgattaatt

SEQ ID NO: 229527 - DNA, 25 bp, Probe sequence
acaaaagatatgaaccctggattac

SEQ ID NO: 229528 - DNA, 25 bp, Probe sequence
aactccagggtctacagtaatacga

SEQ ID NO: 229529 - DNA, 25 bp, Probe sequence
aagttttttattcatagtatcgacg

SEQ ID NO: 229530 - DNA, 25 bp, Probe sequence
aagatatgaaccctggattactttc

SEQ ID NO: 229531 - DNA, 25 bp, Probe sequence
aattctcgactttcttttctggata

SEQ ID NO: 229532 - DNA, 25 bp, Probe sequence
aattggtttaattgtcatttatata

SEQ ID NO: 229533 - DNA, 25 bp, Probe sequence
cagtaatacgaatttctcaagactc

SEQ ID NO: 229534 - DNA, 25 bp, Probe sequence
cttaatattggaggtgtcgcgatga

SEQ ID NO: 229535 - DNA, 25 bp, Probe sequence
ctcgactttcttttctggatatcta

SEQ ID NO: 229536 - DNA, 25 bp, Probe sequence
gaagacttaatattggaggtgtcgc

SEQ ID NO: 229537 - DNA, 25 bp, Probe sequence
gaagatcattttaaattctcgactt

SEQ ID NO: 229538 - DNA, 25 bp, Probe sequence
gactttcttttctggatatctaatt

SEQ ID NO: 229539 - DNA, 25 bp, Probe sequence
gatcattttaaattctcgactttct

SEQ ID NO: 229540 - DNA, 25 bp, Probe sequence
gttttaaatattatcattgcattct

SEQ ID NO: 229541 - DNA, 25 bp, Probe sequence
gtcatttatatattacacaggtttt

SEQ ID NO: 229542 - DNA, 25 bp, Probe sequence
gggtctacagtaatacgaatttctc

SEQ ID NO: 229543 - DNA, 25 bp, Probe sequence
tgggtagctattaaatttttaggtg

SEQ ID NO: 229544 - DNA, 25 bp, Probe sequence
tattataactccagggtctacagta

SEQ ID NO: 229545 - DNA, 25 bp, Probe sequence
taattattataactccagggtctac

SEQ ID NO: 229546 - DNA, 25 bp, Probe sequence
taaattctcgactttcttttctgga

SEQ ID NO: 229547 - DNA, 25 bp, Probe sequence
tttaaattctcgactttcttttctg

SEQ ID NO: 229548 - DNA, 25 bp, Probe sequence
tttaggtgtttatttatatcaatta

SEQ ID NO: 229549 - DNA, 25 bp, Probe sequence
tttttattcatagtatcgacgtgtc

SEQ ID NO: 229550 - DNA, 25 bp, Probe sequence
ttttctggatatctaattggtttaa

SEQ ID NO: 229551 - DNA, 25 bp, Probe sequence
ttatatattacacaggtttttcagc

SEQ ID NO: 229552 - DNA, 25 bp, Probe sequence
ttctcgactttcttttctggatatc

SEQ ID NO: 229553 - DNA, 25 bp, Probe sequence
ttcttttctggatatctaattggtt

SEQ ID NO: 229554 - DNA, 25 bp, Probe sequence
atatcacgctttattggtggggggc

SEQ ID NO: 229555 - DNA, 25 bp, Probe sequence
atcacgctttattggtggggggcat

SEQ ID NO: 229556 - DNA, 25 bp, Probe sequence
agtgctgtcgtaatgtcaattgtgg

SEQ ID NO: 229557 - DNA, 25 bp, Probe sequence
agttctgtttcaatatcacgcttta

SEQ ID NO: 229558 - DNA, 25 bp, Probe sequence
acgctttattggtggggggcatgtg

SEQ ID NO: 229559 - DNA, 25 bp, Probe sequence
acaagtgctgtcgtaatgtcaattg

SEQ ID NO: 229560 - DNA, 25 bp, Probe sequence
aagttctgtttcaatatcacgcttt

SEQ ID NO: 229561 - DNA, 25 bp, Probe sequence
aagtgctgtcgtaatgtcaattgtg

SEQ ID NO: 229562 - DNA, 25 bp, Probe sequence
aatgtcaattgtgggtgtgttaagt

SEQ ID NO: 229563 - DNA, 25 bp, Probe sequence
aatatcacgctttattggtgggggg

SEQ ID NO: 229564 - DNA, 25 bp, Probe sequence
aattgtgggtgtgttaagtgtactt

SEQ ID NO: 229565 - DNA, 25 bp, Probe sequence
caacaagtgctgtcgtaatgtcaat

SEQ ID NO: 229566 - DNA, 25 bp, Probe sequence
ctgtttcaatatcacgctttattgg

SEQ ID NO: 229567 - DNA, 25 bp, Probe sequence
cgtaatgtcaattgtgggtgtgtta

SEQ ID NO: 229568 - DNA, 25 bp, Probe sequence
cgctttattggtggggggcatgtgt

SEQ ID NO: 229569 - DNA, 25 bp, Probe sequence
tcacgctttattggtggggggcatg

SEQ ID NO: 229570 - DNA, 25 bp, Probe sequence
gctgtcgtaatgtcaattgtgggtg

SEQ ID NO: 229571 - DNA, 25 bp, Probe sequence
gctttattggtggggggcatgtgtt

SEQ ID NO: 229572 - DNA, 25 bp, Probe sequence
gttctgtttcaatatcacgctttat

SEQ ID NO: 229573 - DNA, 25 bp, Probe sequence
gtttcaatatcacgctttattggtg

SEQ ID NO: 229574 - DNA, 25 bp, Probe sequence
gtaagttctgtttcaatatcacgct

SEQ ID NO: 229575 - DNA, 25 bp, Probe sequence
gtcaattgtgggtgtgttaagtgta

SEQ ID NO: 229576 - DNA, 25 bp, Probe sequence
gtcgtaatgtcaattgtgggtgtgt

SEQ ID NO: 229577 - DNA, 25 bp, Probe sequence
gtgctgtcgtaatgtcaattgtggg

SEQ ID NO: 229578 - DNA, 25 bp, Probe sequence
gtgttaagtgtacttatgggcaccg

SEQ ID NO: 229579 - DNA, 25 bp, Probe sequence
gggtgtgttaagtgtacttatgggc

SEQ ID NO: 229580 - DNA, 25 bp, Probe sequence
tgttaagtgtacttatgggcaccgt

SEQ ID NO: 229581 - DNA, 25 bp, Probe sequence
taagttctgtttcaatatcacgctt

SEQ ID NO: 229582 - DNA, 25 bp, Probe sequence
tacaacaagtgctgtcgtaatgtca

SEQ ID NO: 229583 - DNA, 25 bp, Probe sequence
tatcacgctttattggtggggggca

SEQ ID NO: 229584 - DNA, 25 bp, Probe sequence
tatcttttgtaagttctgtttcaat

SEQ ID NO: 229585 - DNA, 25 bp, Probe sequence
tatatcttttgtaagttctgtttca

SEQ ID NO: 229586 - DNA, 25 bp, Probe sequence
ttctgtttcaatatcacgctttatt

SEQ ID NO: 229587 - DNA, 25 bp, Probe sequence
ttgtgggtgtgttaagtgtacttat

SEQ ID NO: 229588 - DNA, 25 bp, Probe sequence
attccaagatgttttcttaagaagt

SEQ ID NO: 229589 - DNA, 25 bp, Probe sequence
atcgcaacggcgcttatatgtatcg

SEQ ID NO: 229590 - DNA, 25 bp, Probe sequence
agaaatctttagtcttattgctgct

SEQ ID NO: 229591 - DNA, 25 bp, Probe sequence
acggcgcttatatgtatcgaaaaaa

SEQ ID NO: 229592 - DNA, 25 bp, Probe sequence
aaactctacagaagcattacaatta

SEQ ID NO: 229593 - DNA, 25 bp, Probe sequence
aatctttagtcttattgctgctgtg

SEQ ID NO: 229594 - DNA, 25 bp, Probe sequence
aatttaacttcaccagtcggcatgc

SEQ ID NO: 229595 - DNA, 25 bp, Probe sequence
cacacatgcatcaatattattaagt

SEQ ID NO: 229596 - DNA, 25 bp, Probe sequence
caggatttttcagtgtgcgtttatt

SEQ ID NO: 229597 - DNA, 25 bp, Probe sequence
ctgcttatcgcaacggcgcttatat

SEQ ID NO: 229598 - DNA, 25 bp, Probe sequence
gcgtttattactgtcacttgttttt

SEQ ID NO: 229599 - DNA, 25 bp, Probe sequence
gctgctgtgatgttgttgttaggta

SEQ ID NO: 229600 - DNA, 25 bp, Probe sequence
gcttatcgcaacggcgcttatatgt

SEQ ID NO: 229601 - DNA, 25 bp, Probe sequence
gcaacggcgcttatatgtatcgaaa

SEQ ID NO: 229602 - DNA, 25 bp, Probe sequence
gaatacaggatttttcagtgtgcgt

SEQ ID NO: 229603 - DNA, 25 bp, Probe sequence
gaagagcatcgtaagaaatggtatc

SEQ ID NO: 229604 - DNA, 25 bp, Probe sequence
gttgttaggtagttttattgctctt

SEQ ID NO: 229605 - DNA, 25 bp, Probe sequence
gttaggtagttttattgctcttatt

SEQ ID NO: 229606 - DNA, 25 bp, Probe sequence
gtcttattgctgctgtgatgttgtt

SEQ ID NO: 229607 - DNA, 25 bp, Probe sequence
gtgcaataggtatcgtgaaattcca

SEQ ID NO: 229608 - DNA, 25 bp, Probe sequence
gtgtgcgtttattactgtcacttgt

SEQ ID NO: 229609 - DNA, 25 bp, Probe sequence
ggtagttttattgctcttattagtg

SEQ ID NO: 229610 - DNA, 25 bp, Probe sequence
ggtatcgtgaaattccaagatgttt

SEQ ID NO: 229611 - DNA, 25 bp, Probe sequence
ggatttttcagtgtgcgtttattac

SEQ ID NO: 229612 - DNA, 25 bp, Probe sequence
tgtgatgttgttgttaggtagtttt

SEQ ID NO: 229613 - DNA, 25 bp, Probe sequence
tgctcttattagtgcaataggtatc

SEQ ID NO: 229614 - DNA, 25 bp, Probe sequence
tctacagaagcattacaattacgtg

SEQ ID NO: 229615 - DNA, 25 bp, Probe sequence
tctttagtcttattgctgctgtgat

SEQ ID NO: 229616 - DNA, 25 bp, Probe sequence
tcacacacatgcatcaatattatta

SEQ ID NO: 229617 - DNA, 25 bp, Probe sequence
tactgtcacttgtttttattaattt

SEQ ID NO: 229618 - DNA, 25 bp, Probe sequence
tattaatttaacttcaccagtcggc

SEQ ID NO: 229619 - DNA, 25 bp, Probe sequence
tattgctgctgtgatgttgttgtta

SEQ ID NO: 229620 - DNA, 25 bp, Probe sequence
ttattactgtcacttgtttttatta

SEQ ID NO: 229621 - DNA, 25 bp, Probe sequence
ttagtcttattgctgctgtgatgtt

SEQ ID NO: 229622 - DNA, 25 bp, Probe sequence
atttacctattggagcagcatttgc

SEQ ID NO: 229623 - DNA, 25 bp, Probe sequence
atgattgcgcctttgttatttgtag

SEQ ID NO: 229624 - DNA, 25 bp, Probe sequence
aggttccgattaacattgatgcgtc

SEQ ID NO: 229625 - DNA, 25 bp, Probe sequence
aaggtgttaatgtttctagagtcca

SEQ ID NO: 229626 - DNA, 25 bp, Probe sequence
aatccaacgactgagaaaccaccaa

SEQ ID NO: 229627 - DNA, 25 bp, Probe sequence
aattgctgaattgtttcacgcatca

SEQ ID NO: 229628 - DNA, 25 bp, Probe sequence
cacgcatcaggaatcattgcagcag

SEQ ID NO: 229629 - DNA, 25 bp, Probe sequence
cagaaccgcacaatttaatcttttt

SEQ ID NO: 229630 - DNA, 25 bp, Probe sequence
catacctaaagtacccctagcattt

SEQ ID NO: 229631 - DNA, 25 bp, Probe sequence
gccattattaacgaaacctgcacct

SEQ ID NO: 229632 - DNA, 25 bp, Probe sequence
gcagcagtagttgcaggacttgtac

SEQ ID NO: 229633 - DNA, 25 bp, Probe sequence
gctttttcacttgttgatgctgttc

SEQ ID NO: 229634 - DNA, 25 bp, Probe sequence
gcatttgcaattgctgccattcttt

SEQ ID NO: 229635 - DNA, 25 bp, Probe sequence
gcatcttcacttagtgttacggata

SEQ ID NO: 229636 - DNA, 25 bp, Probe sequence
gaacaatttctttagcaatcgcatt

SEQ ID NO: 229637 - DNA, 25 bp, Probe sequence
gaacaacgtcgcattttacgtgagt

SEQ ID NO: 229638 - DNA, 25 bp, Probe sequence
gacgttatgtggtgtgcatggaaca

SEQ ID NO: 229639 - DNA, 25 bp, Probe sequence
gatgctgttcagttgtttttaattg

SEQ ID NO: 229640 - DNA, 25 bp, Probe sequence
gatgctgctggtattatttcattta

SEQ ID NO: 229641 - DNA, 25 bp, Probe sequence
gttgctttagctgtctatctattta

SEQ ID NO: 229642 - DNA, 25 bp, Probe sequence
gtttgtccatactttcatacctaaa

SEQ ID NO: 229643 - DNA, 25 bp, Probe sequence
gtttgggtttatgtcttatatcctt

SEQ ID NO: 229644 - DNA, 25 bp, Probe sequence
gtattagttacaggtgctttttcac

SEQ ID NO: 229645 - DNA, 25 bp, Probe sequence
gtgatactaagttcgtttgtccata

SEQ ID NO: 229646 - DNA, 25 bp, Probe sequence
gtggcgcagtggttggtttacttat

SEQ ID NO: 229647 - DNA, 25 bp, Probe sequence
ggtatggcattagtaaggttccgat

SEQ ID NO: 229648 - DNA, 25 bp, Probe sequence
ggacttgtacatggtttcgaacgtg

SEQ ID NO: 229649 - DNA, 25 bp, Probe sequence
ggcatgttactatttattaccccaa

SEQ ID NO: 229650 - DNA, 25 bp, Probe sequence
tggatttggccagatttacctattg

SEQ ID NO: 229651 - DNA, 25 bp, Probe sequence
tgccattctttgtcctactgatgca

SEQ ID NO: 229652 - DNA, 25 bp, Probe sequence
taattgcatcaattggtggcgcagt

SEQ ID NO: 229653 - DNA, 25 bp, Probe sequence
taggcatcactattgttgttgcttt

SEQ ID NO: 229654 - DNA, 25 bp, Probe sequence
tatccttatttttatttagccatca

SEQ ID NO: 229655 - DNA, 25 bp, Probe sequence
ttagccatcagtccattccaaaaaa

SEQ ID NO: 229656 - DNA, 25 bp, Probe sequence
ctgtaagtgaaatggtaggacgtct

SEQ ID NO: 229657 - DNA, 25 bp, Probe sequence
acgattttgaattatgaacctggtg

SEQ ID NO: 229658 - DNA, 25 bp, Probe sequence
acatcgaatttcagatttatttgtt

SEQ ID NO: 229659 - DNA, 25 bp, Probe sequence
aaatattaagcctccatctgtaagt

SEQ ID NO: 229660 - DNA, 25 bp, Probe sequence
aaaaagcaggctatgttgaaacaaa

SEQ ID NO: 229661 - DNA, 25 bp, Probe sequence
aaggcaatccttacgaataatggcg

SEQ ID NO: 229662 - DNA, 25 bp, Probe sequence
aatgaacatgtttgctgaaaaataa

SEQ ID NO: 229663 - DNA, 25 bp, Probe sequence
aatccttacgaataatggcgataaa

SEQ ID NO: 229664 - DNA, 25 bp, Probe sequence
aatcttatctcaatttttaaatatt

SEQ ID NO: 229665 - DNA, 25 bp, Probe sequence
aattattgtcagttacgaaaatgca

SEQ ID NO: 229666 - DNA, 25 bp, Probe sequence
cacggcggtgtgattcctagaaata

SEQ ID NO: 229667 - DNA, 25 bp, Probe sequence
cgcacggcggtgtgattcctagaaa

SEQ ID NO: 229668 - DNA, 25 bp, Probe sequence
gaagtggaaattgtatcgaaagatg

SEQ ID NO: 229669 - DNA, 25 bp, Probe sequence
gaagtacatcaagaagcagaaattt

SEQ ID NO: 229670 - DNA, 25 bp, Probe sequence
gaagcagaaattttagaacatcgaa

SEQ ID NO: 229671 - DNA, 25 bp, Probe sequence
gaaaatgcaatgaacatgtttgctg

SEQ ID NO: 229672 - DNA, 25 bp, Probe sequence
gagacatcgactattagaattattt

SEQ ID NO: 229673 - DNA, 25 bp, Probe sequence
gaggatggtttaacgcatacgcttg

SEQ ID NO: 229674 - DNA, 25 bp, Probe sequence
gatatcattaagagacatcgactat

SEQ ID NO: 229675 - DNA, 25 bp, Probe sequence
gatttgctaatatatttgtctagta

SEQ ID NO: 229676 - DNA, 25 bp, Probe sequence
gttacaatcaaacgtgtgagagata

SEQ ID NO: 229677 - DNA, 25 bp, Probe sequence
gtgacaaataaaatcttatctcaat

SEQ ID NO: 229678 - DNA, 25 bp, Probe sequence
ggtgatatcgttacaatcaaacgtg

SEQ ID NO: 229679 - DNA, 25 bp, Probe sequence
ggtttaacgcatacgcttgatatca

SEQ ID NO: 229680 - DNA, 25 bp, Probe sequence
ggatggtttaacgcatacgcttgat

SEQ ID NO: 229681 - DNA, 25 bp, Probe sequence
ggactatttaaaggcaatccttacg

SEQ ID NO: 229682 - DNA, 25 bp, Probe sequence
ggcggtgtgattcctagaaataatg

SEQ ID NO: 229683 - DNA, 25 bp, Probe sequence
tgaacctggtgatatcgttacaatc

SEQ ID NO: 229684 - DNA, 25 bp, Probe sequence
taaatttcccagaaacttgcccgca

SEQ ID NO: 229685 - DNA, 25 bp, Probe sequence
taagcctccatctgtaagtgaaatg

SEQ ID NO: 229686 - DNA, 25 bp, Probe sequence
taacgcatacgcttgatatcattaa

SEQ ID NO: 229687 - DNA, 25 bp, Probe sequence
tattaagcctccatctgtaagtgaa

SEQ ID NO: 229688 - DNA, 25 bp, Probe sequence
tttatttgttgaaaggctggatagc

SEQ ID NO: 229689 - DNA, 25 bp, Probe sequence
tttaaatattaagcctccatctgta

SEQ ID NO: 229690 - DNA, 25 bp, Probe sequence
atttaattcaaagactggctcagtt

SEQ ID NO: 229691 - DNA, 25 bp, Probe sequence
ataccgacatatattgtgacaagta

SEQ ID NO: 229692 - DNA, 25 bp, Probe sequence
atgtggttcttcatcaaccaaggta

SEQ ID NO: 229693 - DNA, 25 bp, Probe sequence
atggtttactggatggtttttggat

SEQ ID NO: 229694 - DNA, 25 bp, Probe sequence
agactggctcagtttcaagttaaaa

SEQ ID NO: 229695 - DNA, 25 bp, Probe sequence
actgcctcggtgacgttattaacat

SEQ ID NO: 229696 - DNA, 25 bp, Probe sequence
acactcggtgtgttagttagagata

SEQ ID NO: 229697 - DNA, 25 bp, Probe sequence
aatttcggtattgttgccattttct

SEQ ID NO: 229698 - DNA, 25 bp, Probe sequence
aagaagtaatgcaccaattcatggt

SEQ ID NO: 229699 - DNA, 25 bp, Probe sequence
cttcccgttatcgataataccgaca

SEQ ID NO: 229700 - DNA, 25 bp, Probe sequence
ccatggtatcagtggtttaattcat

SEQ ID NO: 229701 - DNA, 25 bp, Probe sequence
gccattttctttgcaattggtgcgt

SEQ ID NO: 229702 - DNA, 25 bp, Probe sequence
gcagcaattttatatcacgaatggt

SEQ ID NO: 229703 - DNA, 25 bp, Probe sequence
gaatattattttacttttcaccaat

SEQ ID NO: 229704 - DNA, 25 bp, Probe sequence
gaatcataccgtgcagcaattttat

SEQ ID NO: 229705 - DNA, 25 bp, Probe sequence
gaatgtcagcaataggaacagtttt

SEQ ID NO: 229706 - DNA, 25 bp, Probe sequence
gaaatataatccagtttactttatt

SEQ ID NO: 229707 - DNA, 25 bp, Probe sequence
gacaagtagattttatggacattta

SEQ ID NO: 229708 - DNA, 25 bp, Probe sequence
gacgttattaacatcaacactcggt

SEQ ID NO: 229709 - DNA, 25 bp, Probe sequence
gagatcaatttgcagacttcttgta

SEQ ID NO: 229710 - DNA, 25 bp, Probe sequence
gtatcgaaaatgaacttcccgttat

SEQ ID NO: 229711 - DNA, 25 bp, Probe sequence
gtgtggtttaatggaatgtcagcaa

SEQ ID NO: 229712 - DNA, 25 bp, Probe sequence
gtggctaccaaagaaccatggtatc

SEQ ID NO: 229713 - DNA, 25 bp, Probe sequence
gggaattaattaaccctgttatgca

SEQ ID NO: 229714 - DNA, 25 bp, Probe sequence
ggttggtatcagtatgtggttcttc

SEQ ID NO: 229715 - DNA, 25 bp, Probe sequence
ggacatttaggcttacttttacttg

SEQ ID NO: 229716 - DNA, 25 bp, Probe sequence
ggcttacttttacttgtgataattg

SEQ ID NO: 229717 - DNA, 25 bp, Probe sequence
tgtttattggttattggttggtatc

SEQ ID NO: 229718 - DNA, 25 bp, Probe sequence
tgatatatgtaccgttttgtttttt

SEQ ID NO: 229719 - DNA, 25 bp, Probe sequence
tttcttaactgcctcggtgacgtta

SEQ ID NO: 229720 - DNA, 25 bp, Probe sequence
tcatggtgtaccttttgtttattgg

SEQ ID NO: 229721 - DNA, 25 bp, Probe sequence
tcacgaatggtatttcatggatcat

SEQ ID NO: 229722 - DNA, 25 bp, Probe sequence
tatttatccatcaatacatatcatt

SEQ ID NO: 229723 - DNA, 25 bp, Probe sequence
ttttcaccaattttgtggctaccaa

SEQ ID NO: 229724 - DNA, 25 bp, Probe sequence
attccaactatattttatgtgtatg

SEQ ID NO: 229725 - DNA, 25 bp, Probe sequence
attacacagctgatagagcaacggt

SEQ ID NO: 229726 - DNA, 25 bp, Probe sequence
atactttctaaaatgattacgcctc

SEQ ID NO: 229727 - DNA, 25 bp, Probe sequence
ataagacttctaatcaacacattgt

SEQ ID NO: 229728 - DNA, 25 bp, Probe sequence
atcaattttacaaagcaataccgga

SEQ ID NO: 229729 - DNA, 25 bp, Probe sequence
atgtttaccaggatatacactgatt

SEQ ID NO: 229730 - DNA, 25 bp, Probe sequence
agcgcgcagatgattattatcgata

SEQ ID NO: 229731 - DNA, 25 bp, Probe sequence
agcgccttatttatctgaacttagc

SEQ ID NO: 229732 - DNA, 25 bp, Probe sequence
aaaagtttacatcagctcacagaat

SEQ ID NO: 229733 - DNA, 25 bp, Probe sequence
aacaacaccaaaacaagcgccttat

SEQ ID NO: 229734 - DNA, 25 bp, Probe sequence
aacacattgttcaaacgtggcatgc

SEQ ID NO: 229735 - DNA, 25 bp, Probe sequence
aatgattacgcctcaagtgattgat

SEQ ID NO: 229736 - DNA, 25 bp, Probe sequence
caatggttcagcagtaccgtaaagt

SEQ ID NO: 229737 - DNA, 25 bp, Probe sequence
catttggtagttcgaatactttcta

SEQ ID NO: 229738 - DNA, 25 bp, Probe sequence
cgctgccaatagaagctagcttgtt

SEQ ID NO: 229739 - DNA, 25 bp, Probe sequence
gcgactatagttcgctgccaataga

SEQ ID NO: 229740 - DNA, 25 bp, Probe sequence
gctagcttgttagatattccaacta

SEQ ID NO: 229741 - DNA, 25 bp, Probe sequence
gcagtaccgtaaagtttatcaagcg

SEQ ID NO: 229742 - DNA, 25 bp, Probe sequence
gcaataccggatagctacaaagtgt

SEQ ID NO: 229743 - DNA, 25 bp, Probe sequence
gaaattttatcatttggtagttcga

SEQ ID NO: 229744 - DNA, 25 bp, Probe sequence
gacttttccagaagatattaagcct

SEQ ID NO: 229745 - DNA, 25 bp, Probe sequence
gatcatcaagtcgatgtgtctgaca

SEQ ID NO: 229746 - DNA, 25 bp, Probe sequence
gttcaaacgtggcatgcaagtggtg

SEQ ID NO: 229747 - DNA, 25 bp, Probe sequence
gtattttgggcttccgagaattaat

SEQ ID NO: 229748 - DNA, 25 bp, Probe sequence
gtgagaggcctgaatcaattttaca

SEQ ID NO: 229749 - DNA, 25 bp, Probe sequence
gtgattgataaaccgcatatcgtat

SEQ ID NO: 229750 - DNA, 25 bp, Probe sequence
gggctattgataaagcttattttga

SEQ ID NO: 229751 - DNA, 25 bp, Probe sequence
ggctttgaaaagcgcgcagatgatt

SEQ ID NO: 229752 - DNA, 25 bp, Probe sequence
tcgtatttatgatgacttttccaga

SEQ ID NO: 229753 - DNA, 25 bp, Probe sequence
tacatcagctcacagaatatataga

SEQ ID NO: 229754 - DNA, 25 bp, Probe sequence
tagagcaacggttaaggcagagtta

SEQ ID NO: 229755 - DNA, 25 bp, Probe sequence
tttacttagtgggttgtgaacaaat

SEQ ID NO: 229756 - DNA, 25 bp, Probe sequence
tattaagcctatcatcaaagcatta

SEQ ID NO: 229757 - DNA, 25 bp, Probe sequence
tttatctgaacttagcgacgatgtt

SEQ ID NO: 229758 - DNA, 25 bp, Probe sequence
ataatgaggcaacaattcgacaatt

SEQ ID NO: 229759 - DNA, 25 bp, Probe sequence
agaacactatagaatcctttgtatt

SEQ ID NO: 229760 - DNA, 25 bp, Probe sequence
acccagcagtaacgcacacgacaat

SEQ ID NO: 229761 - DNA, 25 bp, Probe sequence
acaattcctatgattgaacggttac

SEQ ID NO: 229762 - DNA, 25 bp, Probe sequence
aaatttgctgaattacagtgtgacg

SEQ ID NO: 229763 - DNA, 25 bp, Probe sequence
aatgcttcgatagctacgtgtatta

SEQ ID NO: 229764 - DNA, 25 bp, Probe sequence
ccaacatcaatcgtattgccaggta

SEQ ID NO: 229765 - DNA, 25 bp, Probe sequence
gcgagcttacaattaccatggtgaa

SEQ ID NO: 229766 - DNA, 25 bp, Probe sequence
gcagtaacgcacacgacaattcaac

SEQ ID NO: 229767 - DNA, 25 bp, Probe sequence
gaatcctttgtattgatggtggttc

SEQ ID NO: 229768 - DNA, 25 bp, Probe sequence
gaaaagtgctgatgagtttattaaa

SEQ ID NO: 229769 - DNA, 25 bp, Probe sequence
gaaagttattcagtgctaaatttgc

SEQ ID NO: 229770 - DNA, 25 bp, Probe sequence
gacagatccacatgatagtgacgca

SEQ ID NO: 229771 - DNA, 25 bp, Probe sequence
gactatattatgtctatgcagcatt

SEQ ID NO: 229772 - DNA, 25 bp, Probe sequence
gagaaatatacgaattgtggcgaca

SEQ ID NO: 229773 - DNA, 25 bp, Probe sequence
gagaactcaagcatatttcattaat

SEQ ID NO: 229774 - DNA, 25 bp, Probe sequence
gatggtggttctactgatcaaacaa

SEQ ID NO: 229775 - DNA, 25 bp, Probe sequence
gatatagatacacatgctacaagta

SEQ ID NO: 229776 - DNA, 25 bp, Probe sequence
gatagtgacgcatttatggtcataa

SEQ ID NO: 229777 - DNA, 25 bp, Probe sequence
gatatggtaatagggcagcgagctt

SEQ ID NO: 229778 - DNA, 25 bp, Probe sequence
gatatacatttagtttcacagatga

SEQ ID NO: 229779 - DNA, 25 bp, Probe sequence
gttactattacctgaacaaaggcta

SEQ ID NO: 229780 - DNA, 25 bp, Probe sequence
gttatcaatgatgtcttttgacgga

SEQ ID NO: 229781 - DNA, 25 bp, Probe sequence
gtttcacagatgattgtcggagata

SEQ ID NO: 229782 - DNA, 25 bp, Probe sequence
gtcatggaaatgttactattacctg

SEQ ID NO: 229783 - DNA, 25 bp, Probe sequence
gtctatgcagcattctgattatgta

SEQ ID NO: 229784 - DNA, 25 bp, Probe sequence
gtggcgacaaacattaattcaagtg

SEQ ID NO: 229785 - DNA, 25 bp, Probe sequence
gggcagcgagcttacaattaccatg

SEQ ID NO: 229786 - DNA, 25 bp, Probe sequence
gggagaaagtttgcacatcgaacaa

SEQ ID NO: 229787 - DNA, 25 bp, Probe sequence
ggaacaaccagatttgttatcaatg

SEQ ID NO: 229788 - DNA, 25 bp, Probe sequence
tgatatggttgatcgtattttattc

SEQ ID NO: 229789 - DNA, 25 bp, Probe sequence
tacgataatcatacctacatgtaat

SEQ ID NO: 229790 - DNA, 25 bp, Probe sequence
ttcaagtgggcattaataggccgac

SEQ ID NO: 229791 - DNA, 25 bp, Probe sequence
ttctactgatcaaacaattcctatg

SEQ ID NO: 229792 - DNA, 25 bp, Probe sequence
atatggcacatatgacttacttcac

SEQ ID NO: 229793 - DNA, 25 bp, Probe sequence
atcgaattgcttcgtcgtgcaagag

SEQ ID NO: 229794 - DNA, 25 bp, Probe sequence
atggcacatatgacttacttcacta

SEQ ID NO: 229795 - DNA, 25 bp, Probe sequence
agagagatgggcgattatttaatag

SEQ ID NO: 229796 - DNA, 25 bp, Probe sequence
acatatgacttacttcactatggtc

SEQ ID NO: 229797 - DNA, 25 bp, Probe sequence
aacgtacagaaggcatttcgacgac

SEQ ID NO: 229798 - DNA, 25 bp, Probe sequence
cactatggtcatatcgaattgcttc

SEQ ID NO: 229799 - DNA, 25 bp, Probe sequence
catatcgaattgcttcgtcgtgcaa

SEQ ID NO: 229800 - DNA, 25 bp, Probe sequence
cttacttcactatggtcatatcgaa

SEQ ID NO: 229801 - DNA, 25 bp, Probe sequence
gcttcgtcgtgcaagagagatgggc

SEQ ID NO: 229802 - DNA, 25 bp, Probe sequence
gaaggcatttcgacgactaaaatca

SEQ ID NO: 229803 - DNA, 25 bp, Probe sequence
gaattgcttcgtcgtgcaagagaga

SEQ ID NO: 229804 - DNA, 25 bp, Probe sequence
gaattcgacttcttaaaggataaat

SEQ ID NO: 229805 - DNA, 25 bp, Probe sequence
gaacaacgaaaaatgatgcttgaat

SEQ ID NO: 229806 - DNA, 25 bp, Probe sequence
gaaacgtgtaataacatatggcaca

SEQ ID NO: 229807 - DNA, 25 bp, Probe sequence
gactgggaaggtgaattcgacttct

SEQ ID NO: 229808 - DNA, 25 bp, Probe sequence
gacttacttcactatggtcatatcg

SEQ ID NO: 229809 - DNA, 25 bp, Probe sequence
gacgatgtcgaaaaatttgatgtag

SEQ ID NO: 229810 - DNA, 25 bp, Probe sequence
gatgtagatgtttttgttatgggac

SEQ ID NO: 229811 - DNA, 25 bp, Probe sequence
gatgcttgaatcaatacgctatgtc

SEQ ID NO: 229812 - DNA, 25 bp, Probe sequence
gttatgggacatgactgggaaggtg

SEQ ID NO: 229813 - DNA, 25 bp, Probe sequence
gtttttgttatgggacatgactggg

SEQ ID NO: 229814 - DNA, 25 bp, Probe sequence
gtcattccagaaaagggctggggac

SEQ ID NO: 229815 - DNA, 25 bp, Probe sequence
gtacagaaggcatttcgacgactaa

SEQ ID NO: 229816 - DNA, 25 bp, Probe sequence
gtgcaagagagatgggcgattattt

SEQ ID NO: 229817 - DNA, 25 bp, Probe sequence
gggacatgactgggaaggtgaattc

SEQ ID NO: 229818 - DNA, 25 bp, Probe sequence
gggctggggacaaaaagaagacgat

SEQ ID NO: 229819 - DNA, 25 bp, Probe sequence
gggcgattatttaatagtagcatta

SEQ ID NO: 229820 - DNA, 25 bp, Probe sequence
ggtgaattcgacttcttaaaggata

SEQ ID NO: 229821 - DNA, 25 bp, Probe sequence
ggtcatatcgaattgcttcgtcgtg

SEQ ID NO: 229822 - DNA, 25 bp, Probe sequence
ggcacatatgacttacttcactatg

SEQ ID NO: 229823 - DNA, 25 bp, Probe sequence
ggcatttcgacgactaaaatcaaac

SEQ ID NO: 229824 - DNA, 25 bp, Probe sequence
tcttattatgattatgaacaacgaa

SEQ ID NO: 229825 - DNA, 25 bp, Probe sequence
tttcgacgactaaaatcaaacaaga

SEQ ID NO: 229826 - DNA, 25 bp, Probe sequence
attggttctgaaatggcaactcaaa

SEQ ID NO: 229827 - DNA, 25 bp, Probe sequence
attattggttctgaaatggcaactc

SEQ ID NO: 229828 - DNA, 25 bp, Probe sequence
atggcaactcaaaataagggggaag

SEQ ID NO: 229829 - DNA, 25 bp, Probe sequence
agctctgaaagttaaaggtatggtc

SEQ ID NO: 229830 - DNA, 25 bp, Probe sequence
aggtacatggattattggttctgaa

SEQ ID NO: 229831 - DNA, 25 bp, Probe sequence
actcaaaataagggggaagctctga

SEQ ID NO: 229832 - DNA, 25 bp, Probe sequence
aaaggtatggtcttgtatatgaata

SEQ ID NO: 229833 - DNA, 25 bp, Probe sequence
aactcaaaataagggggaagctctg

SEQ ID NO: 229834 - DNA, 25 bp, Probe sequence
aagctctgaaagttaaaggtatggt

SEQ ID NO: 229835 - DNA, 25 bp, Probe sequence
caaaataagggggaagctctgaaag

SEQ ID NO: 229836 - DNA, 25 bp, Probe sequence
caactcaaaataagggggaagctct

SEQ ID NO: 229837 - DNA, 25 bp, Probe sequence
ctcaaaataagggggaagctctgaa

SEQ ID NO: 229838 - DNA, 25 bp, Probe sequence
gctctgaaagttaaaggtatggtct

SEQ ID NO: 229839 - DNA, 25 bp, Probe sequence
gcaactcaaaataagggggaagctc

SEQ ID NO: 229840 - DNA, 25 bp, Probe sequence
gaagctctgaaagttaaaggtatgg

SEQ ID NO: 229841 - DNA, 25 bp, Probe sequence
gattattggttctgaaatggcaact

SEQ ID NO: 229842 - DNA, 25 bp, Probe sequence
gggaagctctgaaagttaaaggtat

SEQ ID NO: 229843 - DNA, 25 bp, Probe sequence
ggaagctctgaaagttaaaggtatg

SEQ ID NO: 229844 - DNA, 25 bp, Probe sequence
ggcaactcaaaataagggggaagct

SEQ ID NO: 229845 - DNA, 25 bp, Probe sequence
tggcaactcaaaataagggggaagc

SEQ ID NO: 229846 - DNA, 25 bp, Probe sequence
tcaaaataagggggaagctctgaaa

SEQ ID NO: 229847 - DNA, 25 bp, Probe sequence
taaaggtatggtcttgtatatgaat

SEQ ID NO: 229848 - DNA, 25 bp, Probe sequence
tattggttctgaaatggcaactcaa

SEQ ID NO: 229849 - DNA, 25 bp, Probe sequence
ttattggttctgaaatggcaactca

SEQ ID NO: 229850 - DNA, 25 bp, Probe sequence
aggtgccaagttattcagctaaata

SEQ ID NO: 229851 - DNA, 25 bp, Probe sequence
agggctatcgagatgatcaatttga

SEQ ID NO: 229852 - DNA, 25 bp, Probe sequence
agagggctatcgagatgatcaattt

SEQ ID NO: 229853 - DNA, 25 bp, Probe sequence
acaaagagggctatcgagatgatca

SEQ ID NO: 229854 - DNA, 25 bp, Probe sequence
aaatcaaaaggcatggttctgtata

SEQ ID NO: 229855 - DNA, 25 bp, Probe sequence
aaaggagaacctatgaaatcaaaag

SEQ ID NO: 229856 - DNA, 25 bp, Probe sequence
aaagagggctatcgagatgatcaat

SEQ ID NO: 229857 - DNA, 25 bp, Probe sequence
aacaaatggctattattatgttaat

SEQ ID NO: 229858 - DNA, 25 bp, Probe sequence
aagagggctatcgagatgatcaatt

SEQ ID NO: 229859 - DNA, 25 bp, Probe sequence
aatggtcgacaataaaataatcctt

SEQ ID NO: 229860 - DNA, 25 bp, Probe sequence
aatcaaaaggcatggttctgtatat

SEQ ID NO: 229861 - DNA, 25 bp, Probe sequence
caaagagggctatcgagatgatcaa

SEQ ID NO: 229862 - DNA, 25 bp, Probe sequence
gaaaagacaatgagtatgtatccga

SEQ ID NO: 229863 - DNA, 25 bp, Probe sequence
gacaataaaataatccttactaaag

SEQ ID NO: 229864 - DNA, 25 bp, Probe sequence
gagggctatcgagatgatcaatttg

SEQ ID NO: 229865 - DNA, 25 bp, Probe sequence
gataaaggtaaacatcaagacaatg

SEQ ID NO: 229866 - DNA, 25 bp, Probe sequence
gttaatgtgattaagggcgaggata

SEQ ID NO: 229867 - DNA, 25 bp, Probe sequence
gtattagtttcttatttttagtcat

SEQ ID NO: 229868 - DNA, 25 bp, Probe sequence
gtcgacaataaaataatccttacta

SEQ ID NO: 229869 - DNA, 25 bp, Probe sequence
gtgccaagttattcagctaaatatc

SEQ ID NO: 229870 - DNA, 25 bp, Probe sequence
gtgattaagggcgaggataaaggta

SEQ ID NO: 229871 - DNA, 25 bp, Probe sequence
gggcgaggataaaggtaaacatcaa

SEQ ID NO: 229872 - DNA, 25 bp, Probe sequence
gggctatcgagatgatcaatttgat

SEQ ID NO: 229873 - DNA, 25 bp, Probe sequence
ggtgccaagttattcagctaaatat

SEQ ID NO: 229874 - DNA, 25 bp, Probe sequence
ggtcgacaataaaataatccttact

SEQ ID NO: 229875 - DNA, 25 bp, Probe sequence
taagggcgaggataaaggtaaacat

SEQ ID NO: 229876 - DNA, 25 bp, Probe sequence
tcaaaaggcatggttctgtatatga

SEQ ID NO: 229877 - DNA, 25 bp, Probe sequence
taatgtgattaagggcgaggataaa

SEQ ID NO: 229878 - DNA, 25 bp, Probe sequence
taaaaacctagaggatttatatgac

SEQ ID NO: 229879 - DNA, 25 bp, Probe sequence
tagtttcttatttttagtcattagt

SEQ ID NO: 229880 - DNA, 25 bp, Probe sequence
tagtgttaggtattagtttcttatt

SEQ ID NO: 229881 - DNA, 25 bp, Probe sequence
tattagtttcttatttttagtcatt

SEQ ID NO: 229882 - DNA, 25 bp, Probe sequence
ttagtgttaggtattagtttcttat

SEQ ID NO: 229883 - DNA, 25 bp, Probe sequence
ttagtttcttatttttagtcattag

SEQ ID NO: 229884 - DNA, 25 bp, Probe sequence
attagcgaactgtcatgattttatc

SEQ ID NO: 229885 - DNA, 25 bp, Probe sequence
atatcgacaagtacacaatctgaaa

SEQ ID NO: 229886 - DNA, 25 bp, Probe sequence
atcactatttcatcactagggagct

SEQ ID NO: 229887 - DNA, 25 bp, Probe sequence
atcgttgcagctatcactatttcat

SEQ ID NO: 229888 - DNA, 25 bp, Probe sequence
atgagtcgattaactgacgatacga

SEQ ID NO: 229889 - DNA, 25 bp, Probe sequence
aaatcctgatattttgttacttgat

SEQ ID NO: 229890 - DNA, 25 bp, Probe sequence
aaaactatcatggccagtgggtctt

SEQ ID NO: 229891 - DNA, 25 bp, Probe sequence
aacaggctaaaattgcggcagttgt

SEQ ID NO: 229892 - DNA, 25 bp, Probe sequence
aactgatggcatcacatgcgaagta

SEQ ID NO: 229893 - DNA, 25 bp, Probe sequence
aatcgcattatttggtggtatcttt

SEQ ID NO: 229894 - DNA, 25 bp, Probe sequence
caatcgttacattagttgggtcact

SEQ ID NO: 229895 - DNA, 25 bp, Probe sequence
cgaggattgaaactgtctggcggac

SEQ ID NO: 229896 - DNA, 25 bp, Probe sequence
gcgactggtgcaatcactgcaggta

SEQ ID NO: 229897 - DNA, 25 bp, Probe sequence
gcggcagttgtacaaccaatttcag

SEQ ID NO: 229898 - DNA, 25 bp, Probe sequence
gctacctaacttattaccatcaatc

SEQ ID NO: 229899 - DNA, 25 bp, Probe sequence
gaagcaacagctaatctcgatagtg

SEQ ID NO: 229900 - DNA, 25 bp, Probe sequence
gatgatgtgtcgttccaaatcccac

SEQ ID NO: 229901 - DNA, 25 bp, Probe sequence
gatacgctcagttttatgggagcat

SEQ ID NO: 229902 - DNA, 25 bp, Probe sequence
gatatgacacgcttgtaggtgaacg

SEQ ID NO: 229903 - DNA, 25 bp, Probe sequence
gttgggtcactaatcatgttattta

SEQ ID NO: 229904 - DNA, 25 bp, Probe sequence
gtctggcggacaacgtcaacgtatt

SEQ ID NO: 229905 - DNA, 25 bp, Probe sequence
gtaaaggtacgcattcagaactgat

SEQ ID NO: 229906 - DNA, 25 bp, Probe sequence
gtggcgacgcaaaattggatatgtt

SEQ ID NO: 229907 - DNA, 25 bp, Probe sequence
gggcgtgtcctaactgaaatgcgtc

SEQ ID NO: 229908 - DNA, 25 bp, Probe sequence
ggtgcattagaaattgcgactggtg

SEQ ID NO: 229909 - DNA, 25 bp, Probe sequence
ggagcttaagtggactattagtgcc

SEQ ID NO: 229910 - DNA, 25 bp, Probe sequence
ggcagtcggtgcaagtagtagaata

SEQ ID NO: 229911 - DNA, 25 bp, Probe sequence
tcatggccagtgggtcttatcgttg

SEQ ID NO: 229912 - DNA, 25 bp, Probe sequence
tatcccgttatctaagtggcgacgc

SEQ ID NO: 229913 - DNA, 25 bp, Probe sequence
taaaaatgccattctttgacaaaaa

SEQ ID NO: 229914 - DNA, 25 bp, Probe sequence
taaatatggccttgaaagtgtctat

SEQ ID NO: 229915 - DNA, 25 bp, Probe sequence
tatcaattggaatctaatcgcatta

SEQ ID NO: 229916 - DNA, 25 bp, Probe sequence
tttatttcacaaaagctacctaact

SEQ ID NO: 229917 - DNA, 25 bp, Probe sequence
ttagtgccactgtttactggacgaa

SEQ ID NO: 229918 - DNA, 25 bp, Probe sequence
attatagcagacaatgaaatgaaag

SEQ ID NO: 229919 - DNA, 25 bp, Probe sequence
atagcagacaatgaaatgaaagtaa

SEQ ID NO: 229920 - DNA, 25 bp, Probe sequence
ataaacaacacaaaggagataactt

SEQ ID NO: 229921 - DNA, 25 bp, Probe sequence
aggagataacttctctattgaagaa

SEQ ID NO: 229922 - DNA, 25 bp, Probe sequence
agataacttctctattgaagaagtt

SEQ ID NO: 229923 - DNA, 25 bp, Probe sequence
acattatagcagacaatgaaatgaa

SEQ ID NO: 229924 - DNA, 25 bp, Probe sequence
acaaaggagataacttctctattga

SEQ ID NO: 229925 - DNA, 25 bp, Probe sequence
acaacacaaaggagataacttctct

SEQ ID NO: 229926 - DNA, 25 bp, Probe sequence
acacaaaggagataacttctctatt

SEQ ID NO: 229927 - DNA, 25 bp, Probe sequence
aaaggagataacttctctattgaag

SEQ ID NO: 229928 - DNA, 25 bp, Probe sequence
aaacattatagcagacaatgaaatg

SEQ ID NO: 229929 - DNA, 25 bp, Probe sequence
aaacaacacaaaggagataacttct

SEQ ID NO: 229930 - DNA, 25 bp, Probe sequence
aaaacattatagcagacaatgaaat

SEQ ID NO: 229931 - DNA, 25 bp, Probe sequence
aacaacacaaaggagataacttctc

SEQ ID NO: 229932 - DNA, 25 bp, Probe sequence
aacacaaaggagataacttctctat

SEQ ID NO: 229933 - DNA, 25 bp, Probe sequence
aacattatagcagacaatgaaatga

SEQ ID NO: 229934 - DNA, 25 bp, Probe sequence
aaggagataacttctctattgaaga

SEQ ID NO: 229935 - DNA, 25 bp, Probe sequence
caacacaaaggagataacttctcta

SEQ ID NO: 229936 - DNA, 25 bp, Probe sequence
caaaggagataacttctctattgaa

SEQ ID NO: 229937 - DNA, 25 bp, Probe sequence
cacaaaggagataacttctctattg

SEQ ID NO: 229938 - DNA, 25 bp, Probe sequence
gagataacttctctattgaagaagt

SEQ ID NO: 229939 - DNA, 25 bp, Probe sequence
gataacttctctattgaagaagtta

SEQ ID NO: 229940 - DNA, 25 bp, Probe sequence
ggagataacttctctattgaagaag

SEQ ID NO: 229941 - DNA, 25 bp, Probe sequence
tgttttgttattataaacaacacaa

SEQ ID NO: 229942 - DNA, 25 bp, Probe sequence
taaacaacacaaaggagataacttc

SEQ ID NO: 229943 - DNA, 25 bp, Probe sequence
tagcagacaatgaaatgaaagtaaa

SEQ ID NO: 229944 - DNA, 25 bp, Probe sequence
tataaacaacacaaaggagataact

SEQ ID NO: 229945 - DNA, 25 bp, Probe sequence
tatagcagacaatgaaatgaaagta

SEQ ID NO: 229946 - DNA, 25 bp, Probe sequence
tattataaacaacacaaaggagata

SEQ ID NO: 229947 - DNA, 25 bp, Probe sequence
ttatagcagacaatgaaatgaaagt

SEQ ID NO: 229948 - DNA, 25 bp, Probe sequence
ttattataaacaacacaaaggagat

SEQ ID NO: 229949 - DNA, 25 bp, Probe sequence
attcctcgtaattcatgatgtaaga

SEQ ID NO: 229950 - DNA, 25 bp, Probe sequence
atatttcaccagccatcactaactt

SEQ ID NO: 229951 - DNA, 25 bp, Probe sequence
atcccgacaaacttgccaaagcaat

SEQ ID NO: 229952 - DNA, 25 bp, Probe sequence
atgcgtttcatatttcaccagccat

SEQ ID NO: 229953 - DNA, 25 bp, Probe sequence
atgcatttattatttctggtaactt

SEQ ID NO: 229954 - DNA, 25 bp, Probe sequence
aggttcatttatctttgctgcaggt

SEQ ID NO: 229955 - DNA, 25 bp, Probe sequence
agcacgccatatgctttgcttttct

SEQ ID NO: 229956 - DNA, 25 bp, Probe sequence
aaagctatgacgattatttcaacta

SEQ ID NO: 229957 - DNA, 25 bp, Probe sequence
aatactagttgtcttaggttcattt

SEQ ID NO: 229958 - DNA, 25 bp, Probe sequence
aatacctcgatgtaagcacgccata

SEQ ID NO: 229959 - DNA, 25 bp, Probe sequence
caattattttatattatgcgtttca

SEQ ID NO: 229960 - DNA, 25 bp, Probe sequence
catcactaacttcttggtcaacgca

SEQ ID NO: 229961 - DNA, 25 bp, Probe sequence
gcaggcggtacaacagcaggtacaa

SEQ ID NO: 229962 - DNA, 25 bp, Probe sequence
gcaggtacaacaattttggcgagaa

SEQ ID NO: 229963 - DNA, 25 bp, Probe sequence
gaaacagcattgtgaatgccatttt

SEQ ID NO: 229964 - DNA, 25 bp, Probe sequence
gagaattgcaacgaaatacctcgat

SEQ ID NO: 229965 - DNA, 25 bp, Probe sequence
gagtttaacagaatcatggcaagta

SEQ ID NO: 229966 - DNA, 25 bp, Probe sequence
gatgtcttatacgttgttatttcta

SEQ ID NO: 229967 - DNA, 25 bp, Probe sequence
gatgcattcctcgtaattcatgatg

SEQ ID NO: 229968 - DNA, 25 bp, Probe sequence
gatcgttgttgcaatttcacttaca

SEQ ID NO: 229969 - DNA, 25 bp, Probe sequence
gataaagatgcattcctcgtaattc

SEQ ID NO: 229970 - DNA, 25 bp, Probe sequence
gattgccataggttataaatttttg

SEQ ID NO: 229971 - DNA, 25 bp, Probe sequence
gtatgtacttaactattcttgtaac

SEQ ID NO: 229972 - DNA, 25 bp, Probe sequence
gtaagcgttggactaggaatcggag

SEQ ID NO: 229973 - DNA, 25 bp, Probe sequence
gtgaatgccatttttggtggtgtaa

SEQ ID NO: 229974 - DNA, 25 bp, Probe sequence
ggaatcggagtaattatccttgcag

SEQ ID NO: 229975 - DNA, 25 bp, Probe sequence
tggtggtgtaagcgttggactagga

SEQ ID NO: 229976 - DNA, 25 bp, Probe sequence
tatttcaactaatcccgacaaactt

SEQ ID NO: 229977 - DNA, 25 bp, Probe sequence
tcaccagccatcactaacttcttgg

SEQ ID NO: 229978 - DNA, 25 bp, Probe sequence
ttttaaacggacatggctattatac

SEQ ID NO: 229979 - DNA, 25 bp, Probe sequence
ttatccttgcaggcggtacaacagc

SEQ ID NO: 229980 - DNA, 25 bp, Probe sequence
ttatctttgctgcaggtgtaaatgc

SEQ ID NO: 229981 - DNA, 25 bp, Probe sequence
ttcacttacagttattccacttgat

SEQ ID NO: 229982 - DNA, 25 bp, Probe sequence
ttcttgtaacaattcttatttcaat

SEQ ID NO: 229983 - DNA, 25 bp, Probe sequence
ataccagatggcaaagtgacgtcaa

SEQ ID NO: 229984 - DNA, 25 bp, Probe sequence
atcgctacaggttcaacagaagacg

SEQ ID NO: 229985 - DNA, 25 bp, Probe sequence
atgatttaagtggtggtcaaagaca

SEQ ID NO: 229986 - DNA, 25 bp, Probe sequence
atggcattagcacaaagaactgata

SEQ ID NO: 229987 - DNA, 25 bp, Probe sequence
actttgctaaaggcattgtcacgtt

SEQ ID NO: 229988 - DNA, 25 bp, Probe sequence
aacagaagacgtattaacacaggaa

SEQ ID NO: 229989 - DNA, 25 bp, Probe sequence
caatcattggtcctaacggctgcgg

SEQ ID NO: 229990 - DNA, 25 bp, Probe sequence
caggaactgatacattccgacaccg

SEQ ID NO: 229991 - DNA, 25 bp, Probe sequence
catatttagatatctgtcatcaatt

SEQ ID NO: 229992 - DNA, 25 bp, Probe sequence
ggtcgttttccacatcaaaaaggat

SEQ ID NO: 229993 - DNA, 25 bp, Probe sequence
gcgattcgtttctcagatcatctta

SEQ ID NO: 229994 - DNA, 25 bp, Probe sequence
ttggtcctaacggctgcgggaaatc

SEQ ID NO: 229995 - DNA, 25 bp, Probe sequence
gaatcgtttgcatggacaacaagtt

SEQ ID NO: 229996 - DNA, 25 bp, Probe sequence
gaaggcgaagtatttttagatggtg

SEQ ID NO: 229997 - DNA, 25 bp, Probe sequence
gaagtagcagatggcttaactgttg

SEQ ID NO: 229998 - DNA, 25 bp, Probe sequence
gaagctaaatcaggaacaaggttgt

SEQ ID NO: 229999 - DNA, 25 bp, Probe sequence
gaaaatattcatacacaatctacga

SEQ ID NO: 230000 - DNA, 25 bp, Probe sequence
gacaacgtgtttggattgcaatggc

SEQ ID NO: 230001 - DNA, 25 bp, Probe sequence
gacttatgtcgcagagcttattctt

SEQ ID NO: 230002 - DNA, 25 bp, Probe sequence
gatatcatcgctacaggttcaacag

SEQ ID NO: 230003 - DNA, 25 bp, Probe sequence
gatattatctttttagacgaaccaa

SEQ ID NO: 230004 - DNA, 25 bp, Probe sequence
gattgggcaatggaagttacaggaa

SEQ ID NO: 230005 - DNA, 25 bp, Probe sequence
gttcttcatgatatcaaccaagcga

SEQ ID NO: 230006 - DNA, 25 bp, Probe sequence
gtttcatatggtcgttttccacatc

SEQ ID NO: 230007 - DNA, 25 bp, Probe sequence
gtttctcagatcatcttattgcgat

SEQ ID NO: 230008 - DNA, 25 bp, Probe sequence
gtgacgtcaatcattggtcctaacg

SEQ ID NO: 230009 - DNA, 25 bp, Probe sequence
ggtaacttatgacttatgtcgcaga

SEQ ID NO: 230010 - DNA, 25 bp, Probe sequence
ggcattgtcacgtttattggcagtt

SEQ ID NO: 230011 - DNA, 25 bp, Probe sequence
ggctgcgggaaatctactttgctaa

SEQ ID NO: 230012 - DNA, 25 bp, Probe sequence
tcaaccaagcgattcgtttctcaga

SEQ ID NO: 230013 - DNA, 25 bp, Probe sequence
tttacctcaatcacctgaagtagca

SEQ ID NO: 230014 - DNA, 25 bp, Probe sequence
ttggttacggggataacacgattat

SEQ ID NO: 230015 - DNA, 25 bp, Probe sequence
ttgtacaattgtcatggttcttcat

SEQ ID NO: 230016 - DNA, 25 bp, Probe sequence
ttggtagattaactgctgaggataa

SEQ ID NO: 230017 - DNA, 25 bp, Probe sequence
attataatcctagcaatcaacagca

SEQ ID NO: 230018 - DNA, 25 bp, Probe sequence
atcatttcatttatcggtgttcctt

SEQ ID NO: 230019 - DNA, 25 bp, Probe sequence
atggatttaatccgatgcgtattat

SEQ ID NO: 230020 - DNA, 25 bp, Probe sequence
aggagaagcgcctgttggtgcaatc

SEQ ID NO: 230021 - DNA, 25 bp, Probe sequence
aggtgctattctaggaggtgctatt

SEQ ID NO: 230022 - DNA, 25 bp, Probe sequence
agaggcatatgtttaattattgcta

SEQ ID NO: 230023 - DNA, 25 bp, Probe sequence
agccttgttaggtgggatactcgtg

SEQ ID NO: 230024 - DNA, 25 bp, Probe sequence
aaattctaccattaacagccttgtt

SEQ ID NO: 230025 - DNA, 25 bp, Probe sequence
aaatcttggtgaatcattagctaaa

SEQ ID NO: 230026 - DNA, 25 bp, Probe sequence
aattcaggtgcttcatttgctttag

SEQ ID NO: 230027 - DNA, 25 bp, Probe sequence
cagcgctaagtcaaggtattgcatt

SEQ ID NO: 230028 - DNA, 25 bp, Probe sequence
ctgatccggcgctcataggtttaaa

SEQ ID NO: 230029 - DNA, 25 bp, Probe sequence
ctggtgcgattatacaaggtgttac

SEQ ID NO: 230030 - DNA, 25 bp, Probe sequence
cgcttgcagtttctggtgcgattat

SEQ ID NO: 230031 - DNA, 25 bp, Probe sequence
gcgtattattttagcgggtgcagca

SEQ ID NO: 230032 - DNA, 25 bp, Probe sequence
gcgggtgcagcagtaagtgctatgt

SEQ ID NO: 230033 - DNA, 25 bp, Probe sequence
gctatcgctggacaagttgcatttg

SEQ ID NO: 230034 - DNA, 25 bp, Probe sequence
gcagttttaccaaacacttcatttt

SEQ ID NO: 230035 - DNA, 25 bp, Probe sequence
gcagttgctatcgctggacaagttg

SEQ ID NO: 230036 - DNA, 25 bp, Probe sequence
gactgctggaggcgtttcaggcaca

SEQ ID NO: 230037 - DNA, 25 bp, Probe sequence
gcaatcaacagcaaaacatcatcaa

SEQ ID NO: 230038 - DNA, 25 bp, Probe sequence
gaggctatttttaattataatccta

SEQ ID NO: 230039 - DNA, 25 bp, Probe sequence
gaggcgtttcaggcacaacatggtc

SEQ ID NO: 230040 - DNA, 25 bp, Probe sequence
gataggccgatctagacgtgatgga

SEQ ID NO: 230041 - DNA, 25 bp, Probe sequence
gttggtgcaatcatttcatttatcg

SEQ ID NO: 230042 - DNA, 25 bp, Probe sequence
gtttgctggatttttaggtgctatt

SEQ ID NO: 230043 - DNA, 25 bp, Probe sequence
gtaacattttggactgctggaggcg

SEQ ID NO: 230044 - DNA, 25 bp, Probe sequence
gtcacaccttaagtgggcaattcca

SEQ ID NO: 230045 - DNA, 25 bp, Probe sequence
gtgacgccaaaattcaagcctctac

SEQ ID NO: 230046 - DNA, 25 bp, Probe sequence
ggcacaacatggtcacaccttaagt

SEQ ID NO: 230047 - DNA, 25 bp, Probe sequence
ggcgctcataggtttaaattcaggt

SEQ ID NO: 230048 - DNA, 25 bp, Probe sequence
tatcggtgttccttactttttatat

SEQ ID NO: 230049 - DNA, 25 bp, Probe sequence
tttctacattaataggtgacgccaa

SEQ ID NO: 230050 - DNA, 25 bp, Probe sequence
ttaggtgggatactcgtgcttgttg

SEQ ID NO: 230051 - DNA, 25 bp, Probe sequence
ttggggtgacgaatggccatttgtc

SEQ ID NO: 230052 - DNA, 25 bp, Probe sequence
attggacaaggtgatgccattgatg

SEQ ID NO: 230053 - DNA, 25 bp, Probe sequence
aggtgttacacctgcgagtatggta

SEQ ID NO: 230054 - DNA, 25 bp, Probe sequence
accagttgtttttaccaattgccat

SEQ ID NO: 230055 - DNA, 25 bp, Probe sequence
actttgtttatgtactgccgttaat

SEQ ID NO: 230056 - DNA, 25 bp, Probe sequence
acaaccaggtggggttccagcaggt

SEQ ID NO: 230057 - DNA, 25 bp, Probe sequence
aaaattaatgctgacaactttgttt

SEQ ID NO: 230058 - DNA, 25 bp, Probe sequence
aacagcattatatggtggctcaatt

SEQ ID NO: 230059 - DNA, 25 bp, Probe sequence
aatattattctttatcgcagtgatg

SEQ ID NO: 230060 - DNA, 25 bp, Probe sequence
caatctgatttcatcgctgcttggt

SEQ ID NO: 230061 - DNA, 25 bp, Probe sequence
caaacgtatcgttggaccacgtcac

SEQ ID NO: 230062 - DNA, 25 bp, Probe sequence
ctatttctaggttgtacttggagta

SEQ ID NO: 230063 - DNA, 25 bp, Probe sequence
ccgcatattgccaaacgtatcgttg

SEQ ID NO: 230064 - DNA, 25 bp, Probe sequence
gcaggtggcggatttgcaatcgcat

SEQ ID NO: 230065 - DNA, 25 bp, Probe sequence
gcagcgcttagtattagtggtgcaa

SEQ ID NO: 230066 - DNA, 25 bp, Probe sequence
gcactggctgtttttagcattctac

SEQ ID NO: 230067 - DNA, 25 bp, Probe sequence
gcaccgtatttcttatatttaatgt

SEQ ID NO: 230068 - DNA, 25 bp, Probe sequence
gaggtctaggtgtaaggttaagcag

SEQ ID NO: 230069 - DNA, 25 bp, Probe sequence
gatgttatcatctgctgctgtagca

SEQ ID NO: 230070 - DNA, 25 bp, Probe sequence
gattattattccttacttactattt

SEQ ID NO: 230071 - DNA, 25 bp, Probe sequence
gtttttagcattctactatttctag

SEQ ID NO: 230072 - DNA, 25 bp, Probe sequence
gtttgcaggtaatatttggggtgac

SEQ ID NO: 230073 - DNA, 25 bp, Probe sequence
gtacttggagtattacctcaggtga

SEQ ID NO: 230074 - DNA, 25 bp, Probe sequence
gtcattgcatttttaccgtgggtgt

SEQ ID NO: 230075 - DNA, 25 bp, Probe sequence
gtgggtgttgattattattccttac

SEQ ID NO: 230076 - DNA, 25 bp, Probe sequence
ggggcatgtttacttgttatagctg

SEQ ID NO: 230077 - DNA, 25 bp, Probe sequence
ggtggctcaattacaattatgtcaa

SEQ ID NO: 230078 - DNA, 25 bp, Probe sequence
tggaccacgtcaccagttgttttta

SEQ ID NO: 230079 - DNA, 25 bp, Probe sequence
ggccatttgtcattgcatttttacc

SEQ ID NO: 230080 - DNA, 25 bp, Probe sequence
tgataatattgcacgaggtctaggt

SEQ ID NO: 230081 - DNA, 25 bp, Probe sequence
tattaggtattaacgcaggtggcgg

SEQ ID NO: 230082 - DNA, 25 bp, Probe sequence
ttaccaattgccattttagtagggg

SEQ ID NO: 230083 - DNA, 25 bp, Probe sequence
ttacctcggatgatgattactattt

SEQ ID NO: 230084 - DNA, 25 bp, Probe sequence
ttcatcgctgcttggtttgcaggta

SEQ ID NO: 230085 - DNA, 25 bp, Probe sequence
atattgatcatattgttggaacatt

SEQ ID NO: 230086 - DNA, 25 bp, Probe sequence
atggtatgggtggtacgccgttatc

SEQ ID NO: 230087 - DNA, 25 bp, Probe sequence
atggctttgatattgaagacgacaa

SEQ ID NO: 230088 - DNA, 25 bp, Probe sequence
agtgtttgttcataagcttgccggt

SEQ ID NO: 230089 - DNA, 25 bp, Probe sequence
actatcgtgcctaataaaccagaat

SEQ ID NO: 230090 - DNA, 25 bp, Probe sequence
aactatgcaggtgacgtgatgaatt

SEQ ID NO: 230091 - DNA, 25 bp, Probe sequence
aactactggaaaatatggctttgat

SEQ ID NO: 230092 - DNA, 25 bp, Probe sequence
ccaccgcttgttccaactactggaa

SEQ ID NO: 230093 - DNA, 25 bp, Probe sequence
gcttgccggttatcttgctgaaaaa

SEQ ID NO: 230094 - DNA, 25 bp, Probe sequence
gaaggtatgctagatgcagcggttt

SEQ ID NO: 230095 - DNA, 25 bp, Probe sequence
gaagtacaacgtcgtggtgttgcag

SEQ ID NO: 230096 - DNA, 25 bp, Probe sequence
gaagctattaaagcagtagatactg

SEQ ID NO: 230097 - DNA, 25 bp, Probe sequence
gaagcggacatgaacctgcgcatgc

SEQ ID NO: 230098 - DNA, 25 bp, Probe sequence
gaacggttaatgttgctaaatggtt

SEQ ID NO: 230099 - DNA, 25 bp, Probe sequence
gaaatggcacaagagcttgcagaaa

SEQ ID NO: 230100 - DNA, 25 bp, Probe sequence
gacatctttagacatgcaaggtttt

SEQ ID NO: 230101 - DNA, 25 bp, Probe sequence
gagttagatctgattgctaatacag

SEQ ID NO: 230102 - DNA, 25 bp, Probe sequence
gatgcagcggtttgtggcgaagtat

SEQ ID NO: 230103 - DNA, 25 bp, Probe sequence
gttggtgattatatgacatctttag

SEQ ID NO: 230104 - DNA, 25 bp, Probe sequence
gttgctaaatggtttgttggtgatt

SEQ ID NO: 230105 - DNA, 25 bp, Probe sequence
gttcgtgacgacattgctgtgacaa

SEQ ID NO: 230106 - DNA, 25 bp, Probe sequence
gtggtacgccgttatctgaattaaa

SEQ ID NO: 230107 - DNA, 25 bp, Probe sequence
gtggtgttgcaggaacagtgtttgt

SEQ ID NO: 230108 - DNA, 25 bp, Probe sequence
ggtgtagcaatagtctctggaggtg

SEQ ID NO: 230109 - DNA, 25 bp, Probe sequence
ggtatggcaattgagccaccgcttg

SEQ ID NO: 230110 - DNA, 25 bp, Probe sequence
ggtttttctataactatcgtgccta

SEQ ID NO: 230111 - DNA, 25 bp, Probe sequence
ggaaatcggtattggtatacatggt

SEQ ID NO: 230112 - DNA, 25 bp, Probe sequence
ggaagcatttttagcaccaacaaca

SEQ ID NO: 230113 - DNA, 25 bp, Probe sequence
tgtggcgaagtatttacatcaccta

SEQ ID NO: 230114 - DNA, 25 bp, Probe sequence
tcgcgtgtagaagcgttgttacctg

SEQ ID NO: 230115 - DNA, 25 bp, Probe sequence
tactggtgatggtgtattactagtt

SEQ ID NO: 230116 - DNA, 25 bp, Probe sequence
tagtctctggaggtggaagcggaca

SEQ ID NO: 230117 - DNA, 25 bp, Probe sequence
tagaagcgttgttacctgaaattaa

SEQ ID NO: 230118 - DNA, 25 bp, Probe sequence
tagcaccaacaacaagtcaatactt

SEQ ID NO: 230119 - DNA, 25 bp, Probe sequence
atcaggaccactgtatggctttagc

SEQ ID NO: 230120 - DNA, 25 bp, Probe sequence
aggcatttgccgaagcggttgaatc

SEQ ID NO: 230121 - DNA, 25 bp, Probe sequence
accactgtatggctttagctttgtt

SEQ ID NO: 230122 - DNA, 25 bp, Probe sequence
actgtatggctttagctttgttaaa

SEQ ID NO: 230123 - DNA, 25 bp, Probe sequence
actggtatggcattgatgtcaaatg

SEQ ID NO: 230124 - DNA, 25 bp, Probe sequence
actaattcaggcatttgccgaagcg

SEQ ID NO: 230125 - DNA, 25 bp, Probe sequence
aaagatatggtagcaacgaaaggta

SEQ ID NO: 230126 - DNA, 25 bp, Probe sequence
aaaacatgaatctgaattaactgaa

SEQ ID NO: 230127 - DNA, 25 bp, Probe sequence
aaaagacaatgtatgatgtagtagc

SEQ ID NO: 230128 - DNA, 25 bp, Probe sequence
aatgatttacagcaattagcagata

SEQ ID NO: 230129 - DNA, 25 bp, Probe sequence
aattcaggcatttgccgaagcggtt

SEQ ID NO: 230130 - DNA, 25 bp, Probe sequence
aattaactgaattagatcgagcaat

SEQ ID NO: 230131 - DNA, 25 bp, Probe sequence
caggaccactgtatggctttagctt

SEQ ID NO: 230132 - DNA, 25 bp, Probe sequence
catggttcgtgggtttagtagtctt

SEQ ID NO: 230133 - DNA, 25 bp, Probe sequence
gcatcaggaccactgtatggcttta

SEQ ID NO: 230134 - DNA, 25 bp, Probe sequence
gcatttgccgaagcggttgaatcac

SEQ ID NO: 230135 - DNA, 25 bp, Probe sequence
gaaaggtagagctgcatattttgga

SEQ ID NO: 230136 - DNA, 25 bp, Probe sequence
gacaaacttgatgatagctcaatgc

SEQ ID NO: 230137 - DNA, 25 bp, Probe sequence
gagctgcatattttggagaagaatc

SEQ ID NO: 230138 - DNA, 25 bp, Probe sequence
gatcgagcaattggtgatggtgacc

SEQ ID NO: 230139 - DNA, 25 bp, Probe sequence
gattggagatgaagataatgcctaa

SEQ ID NO: 230140 - DNA, 25 bp, Probe sequence
gtatggctttagctttgttaaaatg

SEQ ID NO: 230141 - DNA, 25 bp, Probe sequence
gtatggcattgatgtcaaatgttgg

SEQ ID NO: 230142 - DNA, 25 bp, Probe sequence
gtgcatcaggaccactgtatggctt

SEQ ID NO: 230143 - DNA, 25 bp, Probe sequence
ggtgcatcaggaccactgtatggct

SEQ ID NO: 230144 - DNA, 25 bp, Probe sequence
ggtagcaacgaaaggtagagctgca

SEQ ID NO: 230145 - DNA, 25 bp, Probe sequence
ggtagagctgcatattttggagaag

SEQ ID NO: 230146 - DNA, 25 bp, Probe sequence
ggaccactgtatggctttagctttg

SEQ ID NO: 230147 - DNA, 25 bp, Probe sequence
tcaggcatttgccgaagcggttgaa

SEQ ID NO: 230148 - DNA, 25 bp, Probe sequence
tagctttgttaaaatgtctgcagtc

SEQ ID NO: 230149 - DNA, 25 bp, Probe sequence
tttaaacgctttgattggagatgaa

SEQ ID NO: 230150 - DNA, 25 bp, Probe sequence
tttatattttaaacgctttgattgg

SEQ ID NO: 230151 - DNA, 25 bp, Probe sequence
ttaacatggttcgtgggtttagtag

SEQ ID NO: 230152 - DNA, 25 bp, Probe sequence
ttgccgaagcggttgaatcacgtgg

SEQ ID NO: 230153 - DNA, 25 bp, Probe sequence
attataccaatcgggggattaccag

SEQ ID NO: 230154 - DNA, 25 bp, Probe sequence
atgcctaaaattatacttgttagcc

SEQ ID NO: 230155 - DNA, 25 bp, Probe sequence
accagatggttcaattggaacttca

SEQ ID NO: 230156 - DNA, 25 bp, Probe sequence
acgttgatattataccaatcggggg

SEQ ID NO: 230157 - DNA, 25 bp, Probe sequence
aacttcatttgatatcatccaagaa

SEQ ID NO: 230158 - DNA, 25 bp, Probe sequence
aatcgggggattaccagatggttca

SEQ ID NO: 230159 - DNA, 25 bp, Probe sequence
aattatacttgttagccacagtaaa

SEQ ID NO: 230160 - DNA, 25 bp, Probe sequence
caatcgggggattaccagatggttc

SEQ ID NO: 230161 - DNA, 25 bp, Probe sequence
aattgatgatgcattagcagaaatc

SEQ ID NO: 230162 - DNA, 25 bp, Probe sequence
aattggaacttcatttgatatcatc

SEQ ID NO: 230163 - DNA, 25 bp, Probe sequence
caaaatctttgttaaagcaaatggc

SEQ ID NO: 230164 - DNA, 25 bp, Probe sequence
cattgtgtttttacgatattggatc

SEQ ID NO: 230165 - DNA, 25 bp, Probe sequence
cgatattggatcttcagaaatgaat

SEQ ID NO: 230166 - DNA, 25 bp, Probe sequence
gatggttcaattggaacttcatttg

SEQ ID NO: 230167 - DNA, 25 bp, Probe sequence
gatgatgcattgtgtttttacgata

SEQ ID NO: 230168 - DNA, 25 bp, Probe sequence
gatgcattgtgtttttacgatattg

SEQ ID NO: 230169 - DNA, 25 bp, Probe sequence
gatgcattagcagaaatcaaacaat

SEQ ID NO: 230170 - DNA, 25 bp, Probe sequence
gatattataccaatcgggggattac

SEQ ID NO: 230171 - DNA, 25 bp, Probe sequence
gttgatattataccaatcgggggat

SEQ ID NO: 230172 - DNA, 25 bp, Probe sequence
gttagccacagtaaagaaattgcaa

SEQ ID NO: 230173 - DNA, 25 bp, Probe sequence
gtttttacgatattggatcttcaga

SEQ ID NO: 230174 - DNA, 25 bp, Probe sequence
gtgacgttgatattataccaatcgg

SEQ ID NO: 230175 - DNA, 25 bp, Probe sequence
gtgtttttacgatattggatcttca

SEQ ID NO: 230176 - DNA, 25 bp, Probe sequence
gggattaccagatggttcaattgga

SEQ ID NO: 230177 - DNA, 25 bp, Probe sequence
gggggattaccagatggttcaattg

SEQ ID NO: 230178 - DNA, 25 bp, Probe sequence
ggttcaattggaacttcatttgata

SEQ ID NO: 230179 - DNA, 25 bp, Probe sequence
ggaacttcatttgatatcatccaag

SEQ ID NO: 230180 - DNA, 25 bp, Probe sequence
tgcattgtgtttttacgatattgga

SEQ ID NO: 230181 - DNA, 25 bp, Probe sequence
tcgggggattaccagatggttcaat

SEQ ID NO: 230182 - DNA, 25 bp, Probe sequence
taaaattatacttgttagccacagt

SEQ ID NO: 230183 - DNA, 25 bp, Probe sequence
taccaatcgggggattaccagatgg

SEQ ID NO: 230184 - DNA, 25 bp, Probe sequence
tatacttgttagccacagtaaagaa

SEQ ID NO: 230185 - DNA, 25 bp, Probe sequence
tataccaatcgggggattaccagat

SEQ ID NO: 230186 - DNA, 25 bp, Probe sequence
tttacgatattggatcttcagaaat

SEQ ID NO: 230187 - DNA, 25 bp, Probe sequence
attgcttgtgtatccactaagtgaa

SEQ ID NO: 230188 - DNA, 25 bp, Probe sequence
attacaccaacgtaatgcacgttaa

SEQ ID NO: 230189 - DNA, 25 bp, Probe sequence
attatcatgcagacgcttccataaa

SEQ ID NO: 230190 - DNA, 25 bp, Probe sequence
atttttattgcttgtgtatccacta

SEQ ID NO: 230191 - DNA, 25 bp, Probe sequence
atatgaaggtgctttggattctgct

SEQ ID NO: 230192 - DNA, 25 bp, Probe sequence
atcatgcagacgcttccataaaact

SEQ ID NO: 230193 - DNA, 25 bp, Probe sequence
agatcctaataataatgttgctcgt

SEQ ID NO: 230194 - DNA, 25 bp, Probe sequence
accaacacctgttatttcagataag

SEQ ID NO: 230195 - DNA, 25 bp, Probe sequence
aaatgttattattgcatgcgatacc

SEQ ID NO: 230196 - DNA, 25 bp, Probe sequence
aacgttgttgttgatataaatgaat

SEQ ID NO: 230197 - DNA, 25 bp, Probe sequence
aagcatatatttcaagtgcgcatga

SEQ ID NO: 230198 - DNA, 25 bp, Probe sequence
caagtgcgcatgaagtagaaagtat

SEQ ID NO: 230199 - DNA, 25 bp, Probe sequence
catgcgataccaacacctgttattt

SEQ ID NO: 230200 - DNA, 25 bp, Probe sequence
gccaaacgtatggacaacgttgttg

SEQ ID NO: 230201 - DNA, 25 bp, Probe sequence
gcgataccaacacctgttatttcag

SEQ ID NO: 230202 - DNA, 25 bp, Probe sequence
gctttggattctgcttattatcatg

SEQ ID NO: 230203 - DNA, 25 bp, Probe sequence
gcttattatcatgcagacgcttcca

SEQ ID NO: 230204 - DNA, 25 bp, Probe sequence
gcatgacttagcatttttattgctt

SEQ ID NO: 230205 - DNA, 25 bp, Probe sequence
gcaacaccttataaaaaaacatgta

SEQ ID NO: 230206 - DNA, 25 bp, Probe sequence
gaatcatctgaaatgcatgacttag

SEQ ID NO: 230207 - DNA, 25 bp, Probe sequence
gaaggcttttgatatcgccaagcaa

SEQ ID NO: 230208 - DNA, 25 bp, Probe sequence
gaaggtgctttggattctgcttatt

SEQ ID NO: 230209 - DNA, 25 bp, Probe sequence
gacaattgatgtccgaaacagattt

SEQ ID NO: 230210 - DNA, 25 bp, Probe sequence
gatgtccgaaacagattttatggaa

SEQ ID NO: 230211 - DNA, 25 bp, Probe sequence
gataagaaggcttttgatatcgcca

SEQ ID NO: 230212 - DNA, 25 bp, Probe sequence
gatataaatgaattacaccaacgta

SEQ ID NO: 230213 - DNA, 25 bp, Probe sequence
gatatcgccaagcaaattttaaaat

SEQ ID NO: 230214 - DNA, 25 bp, Probe sequence
gttgctcgtaacgtcttaaaagaca

SEQ ID NO: 230215 - DNA, 25 bp, Probe sequence
gtatgatgttttatacatgtatttt

SEQ ID NO: 230216 - DNA, 25 bp, Probe sequence
gtacgaagaatcatctgaaatgcat

SEQ ID NO: 230217 - DNA, 25 bp, Probe sequence
ggtgctttggattctgcttattatc

SEQ ID NO: 230218 - DNA, 25 bp, Probe sequence
ggcttttgatatcgccaagcaaatt

SEQ ID NO: 230219 - DNA, 25 bp, Probe sequence
taataatgttgctcgtaacgtctta

SEQ ID NO: 230220 - DNA, 25 bp, Probe sequence
tattgcatgcgataccaacacctgt

SEQ ID NO: 230221 - DNA, 25 bp, Probe sequence
attgggcgccaagtagcaaaaattg

SEQ ID NO: 230222 - DNA, 25 bp, Probe sequence
attggtactgcctttgaagcgacaa

SEQ ID NO: 230223 - DNA, 25 bp, Probe sequence
attatattttaatcttcttcttatt

SEQ ID NO: 230224 - DNA, 25 bp, Probe sequence
atcttcttcttatttggtatagctg

SEQ ID NO: 230225 - DNA, 25 bp, Probe sequence
atccaactattaaaaatgcctcaat

SEQ ID NO: 230226 - DNA, 25 bp, Probe sequence
atggcttgtgggcttatttaggtgt

SEQ ID NO: 230227 - DNA, 25 bp, Probe sequence
agaaagttataacatacctacatgg

SEQ ID NO: 230228 - DNA, 25 bp, Probe sequence
agaagttatgcaatttttcactaaa

SEQ ID NO: 230229 - DNA, 25 bp, Probe sequence
aaagcgtacagtgtcaggtgcaggc

SEQ ID NO: 230230 - DNA, 25 bp, Probe sequence
aagtttcgtaggatttgctgaatta

SEQ ID NO: 230231 - DNA, 25 bp, Probe sequence
aaggtcatgtttcattagcagaagt

SEQ ID NO: 230232 - DNA, 25 bp, Probe sequence
aattggatttgcctacgtcggcatt

SEQ ID NO: 230233 - DNA, 25 bp, Probe sequence
cagtgtcaggtgcaggcgcgatgta

SEQ ID NO: 230234 - DNA, 25 bp, Probe sequence
gcattgatcaactttgcattgcaaa

SEQ ID NO: 230235 - DNA, 25 bp, Probe sequence
gcattgcaaagtgaatatccaacta

SEQ ID NO: 230236 - DNA, 25 bp, Probe sequence
gcaggttatttattaagtttcgtag

SEQ ID NO: 230237 - DNA, 25 bp, Probe sequence
gttaaccaagtagtgcctgaagcaa

SEQ ID NO: 230238 - DNA, 25 bp, Probe sequence
gttatctgttattatgctggcggtt

SEQ ID NO: 230239 - DNA, 25 bp, Probe sequence
gttttagttgtattaatcgctggcg

SEQ ID NO: 230240 - DNA, 25 bp, Probe sequence
gtaccatcgtagcaatcggtgggga

SEQ ID NO: 230241 - DNA, 25 bp, Probe sequence
ggtggattagctttttctgtaggtt

SEQ ID NO: 230242 - DNA, 25 bp, Probe sequence
ggtggtattatctatactgtattac

SEQ ID NO: 230243 - DNA, 25 bp, Probe sequence
ggtgcaggcgcaacatttgaagaaa

SEQ ID NO: 230244 - DNA, 25 bp, Probe sequence
ggaagggaatctggtttggtacaat

SEQ ID NO: 230245 - DNA, 25 bp, Probe sequence
tcatttgcagcacgttttacagaac

SEQ ID NO: 230246 - DNA, 25 bp, Probe sequence
tcactaaatatggcttgtgggctta

SEQ ID NO: 230247 - DNA, 25 bp, Probe sequence
tcaacattacaatacgtattcggtg

SEQ ID NO: 230248 - DNA, 25 bp, Probe sequence
taatgtattcatttgcagcacgttt

SEQ ID NO: 230249 - DNA, 25 bp, Probe sequence
tacgtcggcattgtagtgggcgcag

SEQ ID NO: 230250 - DNA, 25 bp, Probe sequence
tactgtattactagcattgatcaac

SEQ ID NO: 230251 - DNA, 25 bp, Probe sequence
tatatctggttttattttagctttt

SEQ ID NO: 230252 - DNA, 25 bp, Probe sequence
ttttagcttttattgggcgccaagt

SEQ ID NO: 230253 - DNA, 25 bp, Probe sequence
ttgtagtgggcgcaggattttcaac

SEQ ID NO: 230254 - DNA, 25 bp, Probe sequence
ttctgtaggttttagtaccatcgta

SEQ ID NO: 230255 - DNA, 25 bp, Probe sequence
attagatattattacacctgttgat

SEQ ID NO: 230256 - DNA, 25 bp, Probe sequence
atttcacaaatgtcgacagtaaaac

SEQ ID NO: 230257 - DNA, 25 bp, Probe sequence
atatgtcttctaatgccaaactgcc

SEQ ID NO: 230258 - DNA, 25 bp, Probe sequence
atcgacaaaaaattatccaccaaca

SEQ ID NO: 230259 - DNA, 25 bp, Probe sequence
atgagaaccatgctaataaagacaa

SEQ ID NO: 230260 - DNA, 25 bp, Probe sequence
agtcattcaaaccatcgcaaattaa

SEQ ID NO: 230261 - DNA, 25 bp, Probe sequence
actgccagttattttttggatgcac

SEQ ID NO: 230262 - DNA, 25 bp, Probe sequence
acatcatcagtatcaatttcacctt

SEQ ID NO: 230263 - DNA, 25 bp, Probe sequence
aaatggacgatgataactgcgcttt

SEQ ID NO: 230264 - DNA, 25 bp, Probe sequence
aaacccattattagcgaaaattgct

SEQ ID NO: 230265 - DNA, 25 bp, Probe sequence
aagccatgaaatttgatcagtcatt

SEQ ID NO: 230266 - DNA, 25 bp, Probe sequence
aatgtgcgcatttatcaaaacctta

SEQ ID NO: 230267 - DNA, 25 bp, Probe sequence
aatatcccacaccattaattcaaat

SEQ ID NO: 230268 - DNA, 25 bp, Probe sequence
aattatccaccaacatttttatctg

SEQ ID NO: 230269 - DNA, 25 bp, Probe sequence
caccttaataaacctgaatcgatag

SEQ ID NO: 230270 - DNA, 25 bp, Probe sequence
cacctgttgatatgtcttctaatgc

SEQ ID NO: 230271 - DNA, 25 bp, Probe sequence
catctgaaacaacattatgaccaaa

SEQ ID NO: 230272 - DNA, 25 bp, Probe sequence
cgcaaattaaaggtgctatactatt

SEQ ID NO: 230273 - DNA, 25 bp, Probe sequence
gaaaattgctgaacaagggtacatt

SEQ ID NO: 230274 - DNA, 25 bp, Probe sequence
gacgatgataactgcgctttttata

SEQ ID NO: 230275 - DNA, 25 bp, Probe sequence
gatgcacggtggtggttatattgcg

SEQ ID NO: 230276 - DNA, 25 bp, Probe sequence
gatccattcgaaagtcaaaatatag

SEQ ID NO: 230277 - DNA, 25 bp, Probe sequence
gttattttttggatgcacggtggtg

SEQ ID NO: 230278 - DNA, 25 bp, Probe sequence
gtatcaatttcaccttaataaacct

SEQ ID NO: 230279 - DNA, 25 bp, Probe sequence
gtgataagcagtataaaaacccatt

SEQ ID NO: 230280 - DNA, 25 bp, Probe sequence
ggtggtggttatattgcgggtgata

SEQ ID NO: 230281 - DNA, 25 bp, Probe sequence
ggtacgcatcatttacatcatcagt

SEQ ID NO: 230282 - DNA, 25 bp, Probe sequence
ggcgccacaatataaatatcccaca

SEQ ID NO: 230283 - DNA, 25 bp, Probe sequence
tgtaaattatgcattggcgccacaa

SEQ ID NO: 230284 - DNA, 25 bp, Probe sequence
tgatcagtcattcaaaccatcgcaa

SEQ ID NO: 230285 - DNA, 25 bp, Probe sequence
tgaatttacctattgattttaatca

SEQ ID NO: 230286 - DNA, 25 bp, Probe sequence
tgcgcatttatcaaaaccttacata

SEQ ID NO: 230287 - DNA, 25 bp, Probe sequence
tcttctaatgccaaactgccagtta

SEQ ID NO: 230288 - DNA, 25 bp, Probe sequence
tacttttcttaagtcgtaatacatc

SEQ ID NO: 230289 - DNA, 25 bp, Probe sequence
ataaacgcgttatggttactggacg

SEQ ID NO: 230290 - DNA, 25 bp, Probe sequence
attaccggatatagattttagactc

SEQ ID NO: 230291 - DNA, 25 bp, Probe sequence
atagcacatttaagccgaatgtaag

SEQ ID NO: 230292 - DNA, 25 bp, Probe sequence
atgacaaggtcagcattaaaaccat

SEQ ID NO: 230293 - DNA, 25 bp, Probe sequence
acgcgttatggttactggacgtata

SEQ ID NO: 230294 - DNA, 25 bp, Probe sequence
aacttattcatcaacgagtaaaatt

SEQ ID NO: 230295 - DNA, 25 bp, Probe sequence
aacgcgttatggttactggacgtat

SEQ ID NO: 230296 - DNA, 25 bp, Probe sequence
aatggaacttattcatcaacgagta

SEQ ID NO: 230297 - DNA, 25 bp, Probe sequence
aatttattcgtacaagattatggaa

SEQ ID NO: 230298 - DNA, 25 bp, Probe sequence
aattatttagatagacatagcacat

SEQ ID NO: 230299 - DNA, 25 bp, Probe sequence
caaggtcagcattaaaaccatttaa

SEQ ID NO: 230300 - DNA, 25 bp, Probe sequence
cgtacaagattatggaattaagcgt

SEQ ID NO: 230301 - DNA, 25 bp, Probe sequence
cgcgttatggttactggacgtatac

SEQ ID NO: 230302 - DNA, 25 bp, Probe sequence
ccggatatagattttagactcgaag

SEQ ID NO: 230303 - DNA, 25 bp, Probe sequence
gcgttatggttactggacgtataca

SEQ ID NO: 230304 - DNA, 25 bp, Probe sequence
gcaatggaacttattcatcaacgag

SEQ ID NO: 230305 - DNA, 25 bp, Probe sequence
gacaaggtcagcattaaaaccattt

SEQ ID NO: 230306 - DNA, 25 bp, Probe sequence
gacatagcacatttaagccgaatgt

SEQ ID NO: 230307 - DNA, 25 bp, Probe sequence
gactcgaagatttttatagtaagga

SEQ ID NO: 230308 - DNA, 25 bp, Probe sequence
gatagacatagcacatttaagccga

SEQ ID NO: 230309 - DNA, 25 bp, Probe sequence
gattttagactcgaagatttttata

SEQ ID NO: 230310 - DNA, 25 bp, Probe sequence
gattatggaattaagcgtaaaggta

SEQ ID NO: 230311 - DNA, 25 bp, Probe sequence
ggatatagattttagactcgaagat

SEQ ID NO: 230312 - DNA, 25 bp, Probe sequence
ggaacttattcatcaacgagtaaaa

SEQ ID NO: 230313 - DNA, 25 bp, Probe sequence
tggaacttattcatcaacgagtaaa

SEQ ID NO: 230314 - DNA, 25 bp, Probe sequence
taagccgaatgtaaggatattatta

SEQ ID NO: 230315 - DNA, 25 bp, Probe sequence
taaaatttagtgcgaatgttgtacc

SEQ ID NO: 230316 - DNA, 25 bp, Probe sequence
taaacgcgttatggttactggacgt

SEQ ID NO: 230317 - DNA, 25 bp, Probe sequence
taccggatatagattttagactcga

SEQ ID NO: 230318 - DNA, 25 bp, Probe sequence
tagacatagcacatttaagccgaat

SEQ ID NO: 230319 - DNA, 25 bp, Probe sequence
tagattttagactcgaagattttta

SEQ ID NO: 230320 - DNA, 25 bp, Probe sequence
tatagattttagactcgaagatttt

SEQ ID NO: 230321 - DNA, 25 bp, Probe sequence
ttagactcgaagatttttatagtaa

SEQ ID NO: 230322 - DNA, 25 bp, Probe sequence
ttcatcaacgagtaaaatttagtgc

SEQ ID NO: 230323 - DNA, 25 bp, Probe sequence
attgcatggatgggttacactaaag

SEQ ID NO: 230324 - DNA, 25 bp, Probe sequence
attactttatacaagcaccaatgca

SEQ ID NO: 230325 - DNA, 25 bp, Probe sequence
atatccctcgattattttggccgat

SEQ ID NO: 230326 - DNA, 25 bp, Probe sequence
ataattttggtcgagcagcggctat

SEQ ID NO: 230327 - DNA, 25 bp, Probe sequence
atggctttgaagttgactgccggat

SEQ ID NO: 230328 - DNA, 25 bp, Probe sequence
acgttgtaaaccattttattgcatg

SEQ ID NO: 230329 - DNA, 25 bp, Probe sequence
acatctatacgattatatccctcga

SEQ ID NO: 230330 - DNA, 25 bp, Probe sequence
acagatgatgttgaaatgacttgga

SEQ ID NO: 230331 - DNA, 25 bp, Probe sequence
aaagttttattagcaggtggaacag

SEQ ID NO: 230332 - DNA, 25 bp, Probe sequence
aaataacacaatcatcagcaagaga

SEQ ID NO: 230333 - DNA, 25 bp, Probe sequence
aaatgatgattcatggctttgaagt

SEQ ID NO: 230334 - DNA, 25 bp, Probe sequence
caattgaacgcctaggtgcatatgg

SEQ ID NO: 230335 - DNA, 25 bp, Probe sequence
cagtcgtttatatacatctatacga

SEQ ID NO: 230336 - DNA, 25 bp, Probe sequence
cgcagcagataattttggtcgagca

SEQ ID NO: 230337 - DNA, 25 bp, Probe sequence
gccggattaaagattttcaaagtcg

SEQ ID NO: 230338 - DNA, 25 bp, Probe sequence
gaattctgccaaaataacacaatca

SEQ ID NO: 230339 - DNA, 25 bp, Probe sequence
gaaatgacttggattcagtgtgata

SEQ ID NO: 230340 - DNA, 25 bp, Probe sequence
gagcagcggctatcaatcaagtaaa

SEQ ID NO: 230341 - DNA, 25 bp, Probe sequence
gagatttaacattaatcgcagcaga

SEQ ID NO: 230342 - DNA, 25 bp, Probe sequence
gatcaacgatgaaggtagttttacc

SEQ ID NO: 230343 - DNA, 25 bp, Probe sequence
gattcagtgtgatatatttcattac

SEQ ID NO: 230344 - DNA, 25 bp, Probe sequence
gttgactgccggattaaagattttc

SEQ ID NO: 230345 - DNA, 25 bp, Probe sequence
gtatgatgatgttagatcaacgatg

SEQ ID NO: 230346 - DNA, 25 bp, Probe sequence
gtagttttaccaaagggatggacat

SEQ ID NO: 230347 - DNA, 25 bp, Probe sequence
gtaatctacatacctgggagtcgtt

SEQ ID NO: 230348 - DNA, 25 bp, Probe sequence
gtgattgaaaatgatgctgaacttt

SEQ ID NO: 230349 - DNA, 25 bp, Probe sequence
gggatggacattaaagaacgttgta

SEQ ID NO: 230350 - DNA, 25 bp, Probe sequence
ggccgatttattactttatacaagc

SEQ ID NO: 230351 - DNA, 25 bp, Probe sequence
tgaaacaattgaacgcctaggtgca

SEQ ID NO: 230352 - DNA, 25 bp, Probe sequence
tacctgggagtcgttatgataatga

SEQ ID NO: 230353 - DNA, 25 bp, Probe sequence
tagatattgctgtattctttatcga

SEQ ID NO: 230354 - DNA, 25 bp, Probe sequence
tatttcattacgaacaggttgttgc

SEQ ID NO: 230355 - DNA, 25 bp, Probe sequence
tattttggccgatttattactttat

SEQ ID NO: 230356 - DNA, 25 bp, Probe sequence
ttggtcgagcagcggctatcaatca

SEQ ID NO: 230357 - DNA, 25 bp, Probe sequence
attgctaaattacaagcgatttatc

SEQ ID NO: 230358 - DNA, 25 bp, Probe sequence
atttcggcaaagtaatggatacatt

SEQ ID NO: 230359 - DNA, 25 bp, Probe sequence
atatgatgggttttattggtgcaga

SEQ ID NO: 230360 - DNA, 25 bp, Probe sequence
atcatctcgtgataatccaatggat

SEQ ID NO: 230361 - DNA, 25 bp, Probe sequence
atggaacttggcgcagatgattata

SEQ ID NO: 230362 - DNA, 25 bp, Probe sequence
accaatattatttttatcatctcgt

SEQ ID NO: 230363 - DNA, 25 bp, Probe sequence
acaatgggattttaatgttgctggt

SEQ ID NO: 230364 - DNA, 25 bp, Probe sequence
aatgagagaagtttccaacgtacca

SEQ ID NO: 230365 - DNA, 25 bp, Probe sequence
aatccaatggatcaagtgatgagta

SEQ ID NO: 230366 - DNA, 25 bp, Probe sequence
aatattatttttatcatctcgtgat

SEQ ID NO: 230367 - DNA, 25 bp, Probe sequence
catctcgtgataatccaatggatca

SEQ ID NO: 230368 - DNA, 25 bp, Probe sequence
cttggcgcagatgattatatgcaaa

SEQ ID NO: 230369 - DNA, 25 bp, Probe sequence
cctgaaattgttatattggatgttc

SEQ ID NO: 230370 - DNA, 25 bp, Probe sequence
gctggtattgaagatttcggcaaag

SEQ ID NO: 230371 - DNA, 25 bp, Probe sequence
gaagtttccaacgtaccaatattat

SEQ ID NO: 230372 - DNA, 25 bp, Probe sequence
gaagatttcggcaaagtaatggata

SEQ ID NO: 230373 - DNA, 25 bp, Probe sequence
gaagatgacaatactttgtttcaag

SEQ ID NO: 230374 - DNA, 25 bp, Probe sequence
gacaatactttgtttcaagaattga

SEQ ID NO: 230375 - DNA, 25 bp, Probe sequence
gagaagtttccaacgtaccaatatt

SEQ ID NO: 230376 - DNA, 25 bp, Probe sequence
gagagaagtttccaacgtaccaata

SEQ ID NO: 230377 - DNA, 25 bp, Probe sequence
gagtatggaacttggcgcagatgat

SEQ ID NO: 230378 - DNA, 25 bp, Probe sequence
gatgggttttattggtgcagaaaaa

SEQ ID NO: 230379 - DNA, 25 bp, Probe sequence
gatgagtatggaacttggcgcagat

SEQ ID NO: 230380 - DNA, 25 bp, Probe sequence
gatacatttgaaagttttaatcctg

SEQ ID NO: 230381 - DNA, 25 bp, Probe sequence
gtatggaacttggcgcagatgatta

SEQ ID NO: 230382 - DNA, 25 bp, Probe sequence
gtgatgagtatggaacttggcgcag

SEQ ID NO: 230383 - DNA, 25 bp, Probe sequence
gtgatatggatgcaaatactactag

SEQ ID NO: 230384 - DNA, 25 bp, Probe sequence
gggattttaatgttgctggtattga

SEQ ID NO: 230385 - DNA, 25 bp, Probe sequence
ggaacttggcgcagatgattatatg

SEQ ID NO: 230386 - DNA, 25 bp, Probe sequence
tgttgctggtattgaagatttcggc

SEQ ID NO: 230387 - DNA, 25 bp, Probe sequence
tgttcaattacctaaatatgatggg

SEQ ID NO: 230388 - DNA, 25 bp, Probe sequence
tgaaagttttaatcctgaaattgtt

SEQ ID NO: 230389 - DNA, 25 bp, Probe sequence
tatggatgcaaatactactagtaga

SEQ ID NO: 230390 - DNA, 25 bp, Probe sequence
ttggatgttcaattacctaaatatg

SEQ ID NO: 230391 - DNA, 25 bp, Probe sequence
atttcagcgattactgtttcagttc

SEQ ID NO: 230392 - DNA, 25 bp, Probe sequence
atgctttttcacttacggtcatggc

SEQ ID NO: 230393 - DNA, 25 bp, Probe sequence
atgtcatgttctcatcatctattat

SEQ ID NO: 230394 - DNA, 25 bp, Probe sequence
agtattgtattttagctttgtagca

SEQ ID NO: 230395 - DNA, 25 bp, Probe sequence
acggtcatggcaatcatttcagcga

SEQ ID NO: 230396 - DNA, 25 bp, Probe sequence
actgcaccacacgacgttacaatta

SEQ ID NO: 230397 - DNA, 25 bp, Probe sequence
aaagcatatcgtctctcaatttgga

SEQ ID NO: 230398 - DNA, 25 bp, Probe sequence
aaaatatactgcaccacacgacgtt

SEQ ID NO: 230399 - DNA, 25 bp, Probe sequence
aacgacgaagttatgagcttgcatt

SEQ ID NO: 230400 - DNA, 25 bp, Probe sequence
aagctcaatatcaagtttaaccgga

SEQ ID NO: 230401 - DNA, 25 bp, Probe sequence
aagcgaacaattagacattccatat

SEQ ID NO: 230402 - DNA, 25 bp, Probe sequence
cgtctctcaatttggattcgatttg

SEQ ID NO: 230403 - DNA, 25 bp, Probe sequence
cgaatcaaataccggttttcatagt

SEQ ID NO: 230404 - DNA, 25 bp, Probe sequence
gcagtgacggcttataatcattcca

SEQ ID NO: 230405 - DNA, 25 bp, Probe sequence
gcactatcacatgcatattttacat

SEQ ID NO: 230406 - DNA, 25 bp, Probe sequence
gaaggctcacaagtcggaagctact

SEQ ID NO: 230407 - DNA, 25 bp, Probe sequence
gacagatgttgatttaggtggacca

SEQ ID NO: 230408 - DNA, 25 bp, Probe sequence
gagggcggtatttgaaacattaatg

SEQ ID NO: 230409 - DNA, 25 bp, Probe sequence
gaggttgttttaggcatcttaggta

SEQ ID NO: 230410 - DNA, 25 bp, Probe sequence
gtttcagttctttgctttgctgcta

SEQ ID NO: 230411 - DNA, 25 bp, Probe sequence
gtatgctgtttttgcagtgacggct

SEQ ID NO: 230412 - DNA, 25 bp, Probe sequence
gtagagcgtccttatcaagtgaaat

SEQ ID NO: 230413 - DNA, 25 bp, Probe sequence
gtcaactgtgattggggcatactta

SEQ ID NO: 230414 - DNA, 25 bp, Probe sequence
gtgttcaaacaatctatttcacaga

SEQ ID NO: 230415 - DNA, 25 bp, Probe sequence
ggtggaccaacgtttgtcttaaatg

SEQ ID NO: 230416 - DNA, 25 bp, Probe sequence
ggaagctactttctatttttcatca

SEQ ID NO: 230417 - DNA, 25 bp, Probe sequence
ttgggttacctttagttattgcact

SEQ ID NO: 230418 - DNA, 25 bp, Probe sequence
tgttaatcggtgtcgcttatttttt

SEQ ID NO: 230419 - DNA, 25 bp, Probe sequence
tgattaccacaggatactatctatc

SEQ ID NO: 230420 - DNA, 25 bp, Probe sequence
taaaagctctgtttctctagttttt

SEQ ID NO: 230421 - DNA, 25 bp, Probe sequence
tactatctatctttgaacattgttc

SEQ ID NO: 230422 - DNA, 25 bp, Probe sequence
ttttcatcataattgcatttttgtt

SEQ ID NO: 230423 - DNA, 25 bp, Probe sequence
ttaggtattacattcttgattgctg

SEQ ID NO: 230424 - DNA, 25 bp, Probe sequence
ttgctgctataagtagagcgtcctt

SEQ ID NO: 230425 - DNA, 25 bp, Probe sequence
atcacatatgcgtattcattcaatt

SEQ ID NO: 230426 - DNA, 25 bp, Probe sequence
agtacatcaagtaattactgattta

SEQ ID NO: 230427 - DNA, 25 bp, Probe sequence
agatgaatatatggctgagtttgtt

SEQ ID NO: 230428 - DNA, 25 bp, Probe sequence
agaaatgaaacttgctgtcggctta

SEQ ID NO: 230429 - DNA, 25 bp, Probe sequence
acttgctgtcggcttattagtcgat

SEQ ID NO: 230430 - DNA, 25 bp, Probe sequence
acatatgcgtattcattcaattaat

SEQ ID NO: 230431 - DNA, 25 bp, Probe sequence
aaatgtcaaatcgtagcaaataatt

SEQ ID NO: 230432 - DNA, 25 bp, Probe sequence
aaaattatcacatatgcgtattcat

SEQ ID NO: 230433 - DNA, 25 bp, Probe sequence
aacggcagctatgtttgaaatgtat

SEQ ID NO: 230434 - DNA, 25 bp, Probe sequence
aagataagtttatggttcaattaga

SEQ ID NO: 230435 - DNA, 25 bp, Probe sequence
aatgaaacttgctgtcggcttatta

SEQ ID NO: 230436 - DNA, 25 bp, Probe sequence
caaacatttatcacaccaattgaac

SEQ ID NO: 230437 - DNA, 25 bp, Probe sequence
cggtaaaatggatttcaatacacat

SEQ ID NO: 230438 - DNA, 25 bp, Probe sequence
gctgataaatgtcaaatcgtagcaa

SEQ ID NO: 230439 - DNA, 25 bp, Probe sequence
gctgtcggcttattagtcgataaaa

SEQ ID NO: 230440 - DNA, 25 bp, Probe sequence
gctattgaattcggtaaaatggatt

SEQ ID NO: 230441 - DNA, 25 bp, Probe sequence
gcatactcagacaacattaaaactt

SEQ ID NO: 230442 - DNA, 25 bp, Probe sequence
gcaattgatgatgttttagatgcaa

SEQ ID NO: 230443 - DNA, 25 bp, Probe sequence
gcaattgaagaaacggcagctatgt

SEQ ID NO: 230444 - DNA, 25 bp, Probe sequence
gaacgtgaagatattttatcattat

SEQ ID NO: 230445 - DNA, 25 bp, Probe sequence
gaaacaaactgtgatggtattttaa

SEQ ID NO: 230446 - DNA, 25 bp, Probe sequence
gaaacttgctgtcggcttattagtc

SEQ ID NO: 230447 - DNA, 25 bp, Probe sequence
gacagtcaattaaacatattttcaa

SEQ ID NO: 230448 - DNA, 25 bp, Probe sequence
gatggtattttaagacagtcaatta

SEQ ID NO: 230449 - DNA, 25 bp, Probe sequence
gataacattcaaaaagcagttgcag

SEQ ID NO: 230450 - DNA, 25 bp, Probe sequence
gatattttatcattatgtgatgcaa

SEQ ID NO: 230451 - DNA, 25 bp, Probe sequence
gtcacatggtgacgaattagtacat

SEQ ID NO: 230452 - DNA, 25 bp, Probe sequence
gtgatgcaattgatgatgttttaga

SEQ ID NO: 230453 - DNA, 25 bp, Probe sequence
ggtgacgaattagtacatcaagtaa

SEQ ID NO: 230454 - DNA, 25 bp, Probe sequence
ggctgagtttgttgataacattcaa

SEQ ID NO: 230455 - DNA, 25 bp, Probe sequence
tcaatcgaatacacagatgaatata

SEQ ID NO: 230456 - DNA, 25 bp, Probe sequence
taaaacttatgagtcacatggtgac

SEQ ID NO: 230457 - DNA, 25 bp, Probe sequence
ttatcacaccaattgaacgtgaaga

SEQ ID NO: 230458 - DNA, 25 bp, Probe sequence
ttgctgtcggcttattagtcgataa

SEQ ID NO: 230459 - DNA, 25 bp, Probe sequence
attttctcgctgatatttgacttta

SEQ ID NO: 230460 - DNA, 25 bp, Probe sequence
atttttgttgcatcatcgctacatt

SEQ ID NO: 230461 - DNA, 25 bp, Probe sequence
atttcccattatcaacaactcacgt

SEQ ID NO: 230462 - DNA, 25 bp, Probe sequence
atagctgtagttattttctcgctga

SEQ ID NO: 230463 - DNA, 25 bp, Probe sequence
ataatcatcgtcactatagctgtag

SEQ ID NO: 230464 - DNA, 25 bp, Probe sequence
aggtgttggtgcttctaaccgagct

SEQ ID NO: 230465 - DNA, 25 bp, Probe sequence
agtgatgaactttataggtgcttta

SEQ ID NO: 230466 - DNA, 25 bp, Probe sequence
actcacgttgtgtcatcatcaatct

SEQ ID NO: 230467 - DNA, 25 bp, Probe sequence
aacggcaattttaatggcagcagtg

SEQ ID NO: 230468 - DNA, 25 bp, Probe sequence
aagacattgtcgatccatttaaatt

SEQ ID NO: 230469 - DNA, 25 bp, Probe sequence
caatggattccatgatacagccaat

SEQ ID NO: 230470 - DNA, 25 bp, Probe sequence
ctgcggccgatttatcatctgcatt

SEQ ID NO: 230471 - DNA, 25 bp, Probe sequence
cgggtgcagcaatcgcatctgaagg

SEQ ID NO: 230472 - DNA, 25 bp, Probe sequence
gctactgctgtatctactagagcgt

SEQ ID NO: 230473 - DNA, 25 bp, Probe sequence
gcagcgttacaatcattctctcacg

SEQ ID NO: 230474 - DNA, 25 bp, Probe sequence
gcaatcgcatctgaaggctcatttg

SEQ ID NO: 230475 - DNA, 25 bp, Probe sequence
gagcgttaacgcctaaaacggcaat

SEQ ID NO: 230476 - DNA, 25 bp, Probe sequence
gtgctttaacatttacgggcgttgc

SEQ ID NO: 230477 - DNA, 25 bp, Probe sequence
gatacagccaatgcagtagctactg

SEQ ID NO: 230478 - DNA, 25 bp, Probe sequence
gttcgtcttcacatgcacttatagg

SEQ ID NO: 230479 - DNA, 25 bp, Probe sequence
gttagctgcaatacttgcggctatt

SEQ ID NO: 230480 - DNA, 25 bp, Probe sequence
gtcatcatcaatcttaggtgttggt

SEQ ID NO: 230481 - DNA, 25 bp, Probe sequence
gtgcgacagcaatggggcttggtac

SEQ ID NO: 230482 - DNA, 25 bp, Probe sequence
ggggcttggtactgcaattggtggc

SEQ ID NO: 230483 - DNA, 25 bp, Probe sequence
gggtaaaatttgcctgtgcgacagc

SEQ ID NO: 230484 - DNA, 25 bp, Probe sequence
ggcgttgcaggcaccattactaaag

SEQ ID NO: 230485 - DNA, 25 bp, Probe sequence
tggaatttagctacttggttttacg

SEQ ID NO: 230486 - DNA, 25 bp, Probe sequence
tggattagttgttgtgttagctgca

SEQ ID NO: 230487 - DNA, 25 bp, Probe sequence
tcgctacatttcccattatcaacaa

SEQ ID NO: 230488 - DNA, 25 bp, Probe sequence
tcgcattttgtgttggtttcttgat

SEQ ID NO: 230489 - DNA, 25 bp, Probe sequence
tacggaattccaagttcgtcttcac

SEQ ID NO: 230490 - DNA, 25 bp, Probe sequence
tatttcagcattgttagcaggttta

SEQ ID NO: 230491 - DNA, 25 bp, Probe sequence
ttataggttcaattgcgggtgcagc

SEQ ID NO: 230492 - DNA, 25 bp, Probe sequence
ttctctcacggtacgaatgatgcgc

SEQ ID NO: 230493 - DNA, 25 bp, Probe sequence
atttaggaccagatattttctataa

SEQ ID NO: 230494 - DNA, 25 bp, Probe sequence
ataacattaattattgcgagtctaa

SEQ ID NO: 230495 - DNA, 25 bp, Probe sequence
agcaacacttgtttttgaaagagcg

SEQ ID NO: 230496 - DNA, 25 bp, Probe sequence
aaatatcgcattagcaatttttgca

SEQ ID NO: 230497 - DNA, 25 bp, Probe sequence
aacccttgtcatttggattactgat

SEQ ID NO: 230498 - DNA, 25 bp, Probe sequence
aagttggcgacaacccttgtcattt

SEQ ID NO: 230499 - DNA, 25 bp, Probe sequence
aagtgtggctttattttatgtatta

SEQ ID NO: 230500 - DNA, 25 bp, Probe sequence
catacgcaacgtttaccacgtattt

SEQ ID NO: 230501 - DNA, 25 bp, Probe sequence
cattcatattatcatcaaaaccagc

SEQ ID NO: 230502 - DNA, 25 bp, Probe sequence
gcgagtctaattggtatttttcttc

SEQ ID NO: 230503 - DNA, 25 bp, Probe sequence
gctatctaggtcagtttttaccatt

SEQ ID NO: 230504 - DNA, 25 bp, Probe sequence
gcatttatagcatttggtattattg

SEQ ID NO: 230505 - DNA, 25 bp, Probe sequence
gcaatttttgcatttatagcatttg

SEQ ID NO: 230506 - DNA, 25 bp, Probe sequence
gacaacccttgtcatttggattact

SEQ ID NO: 230507 - DNA, 25 bp, Probe sequence
gattactgattattattttagcaac

SEQ ID NO: 230508 - DNA, 25 bp, Probe sequence
gttggagatgcatcgagtataggca

SEQ ID NO: 230509 - DNA, 25 bp, Probe sequence
gttgttatttctactttatactttg

SEQ ID NO: 230510 - DNA, 25 bp, Probe sequence
gttatttcttcgttggagatgcatc

SEQ ID NO: 230511 - DNA, 25 bp, Probe sequence
gtatttacaaaatttaggaccagat

SEQ ID NO: 230512 - DNA, 25 bp, Probe sequence
gtattattggattatatttggcata

SEQ ID NO: 230513 - DNA, 25 bp, Probe sequence
gtcagtttttaccattaagttggcg

SEQ ID NO: 230514 - DNA, 25 bp, Probe sequence
gtcgcaaaatacaaatcattcatat

SEQ ID NO: 230515 - DNA, 25 bp, Probe sequence
gtgactattcaccaagagaaatggg

SEQ ID NO: 230516 - DNA, 25 bp, Probe sequence
gtggctttattttatgtattattgg

SEQ ID NO: 230517 - DNA, 25 bp, Probe sequence
ggtattattggttatttcttcgttg

SEQ ID NO: 230518 - DNA, 25 bp, Probe sequence
ggttcggtttaattatttcacatat

SEQ ID NO: 230519 - DNA, 25 bp, Probe sequence
ggatgctatctaggtcagtttttac

SEQ ID NO: 230520 - DNA, 25 bp, Probe sequence
ggcttattgtcatacgcaacgttta

SEQ ID NO: 230521 - DNA, 25 bp, Probe sequence
tggtatttttcttcaaaatcctatt

SEQ ID NO: 230522 - DNA, 25 bp, Probe sequence
tgaaagagcgagacggttcggttta

SEQ ID NO: 230523 - DNA, 25 bp, Probe sequence
ttatactttgtatgattttaatcgt

SEQ ID NO: 230524 - DNA, 25 bp, Probe sequence
ttatcatcaaaaccagcatgctcaa

SEQ ID NO: 230525 - DNA, 25 bp, Probe sequence
ttggcataggatgctatctaggtca

SEQ ID NO: 230526 - DNA, 25 bp, Probe sequence
ttgtcatacgcaacgtttaccacgt

SEQ ID NO: 230527 - DNA, 25 bp, Probe sequence
attccacttacttatgggcatgggt

SEQ ID NO: 230528 - DNA, 25 bp, Probe sequence
attacgaagtgcattttgtttttga

SEQ ID NO: 230529 - DNA, 25 bp, Probe sequence
atagtgctccattaatttataagac

SEQ ID NO: 230530 - DNA, 25 bp, Probe sequence
ataagacattaagtgcgctgtatca

SEQ ID NO: 230531 - DNA, 25 bp, Probe sequence
atcatctggatgtatttagtattaa

SEQ ID NO: 230532 - DNA, 25 bp, Probe sequence
agcgacttaaattcgattcgttaat

SEQ ID NO: 230533 - DNA, 25 bp, Probe sequence
acgttacttttaatgcgttatacat

SEQ ID NO: 230534 - DNA, 25 bp, Probe sequence
acaccgaatgaatatcgtaatttat

SEQ ID NO: 230535 - DNA, 25 bp, Probe sequence
aaacagttattattctatttttgat

SEQ ID NO: 230536 - DNA, 25 bp, Probe sequence
caagttgtctttttcatcatgccat

SEQ ID NO: 230537 - DNA, 25 bp, Probe sequence
catttaatgcgatgcatctatatga

SEQ ID NO: 230538 - DNA, 25 bp, Probe sequence
gcgacaacgcgttgccaagatggca

SEQ ID NO: 230539 - DNA, 25 bp, Probe sequence
gcatagtcttattttggccaattga

SEQ ID NO: 230540 - DNA, 25 bp, Probe sequence
gaatatgcgacaacgcgttgccaag

SEQ ID NO: 230541 - DNA, 25 bp, Probe sequence
gaatatgtctcgaaaccaaaatacg

SEQ ID NO: 230542 - DNA, 25 bp, Probe sequence
gagtagcgattggtttgcggaatta

SEQ ID NO: 230543 - DNA, 25 bp, Probe sequence
gatttaaaacaacactaggtcttat

SEQ ID NO: 230544 - DNA, 25 bp, Probe sequence
gatcatgttgtatttgagtagcgat

SEQ ID NO: 230545 - DNA, 25 bp, Probe sequence
gataatgcaaatttaagtagccctt

SEQ ID NO: 230546 - DNA, 25 bp, Probe sequence
gattgaaattctacttactactgat

SEQ ID NO: 230547 - DNA, 25 bp, Probe sequence
gtttttaaatcactagtatcacaaa

SEQ ID NO: 230548 - DNA, 25 bp, Probe sequence
gtagcccttatttgatgggggaaag

SEQ ID NO: 230549 - DNA, 25 bp, Probe sequence
gtaaaaataccatgtccgaagaaga

SEQ ID NO: 230550 - DNA, 25 bp, Probe sequence
gtctcaaagtcaaatttgtcatcac

SEQ ID NO: 230551 - DNA, 25 bp, Probe sequence
gtgcattttgtttttgatttatcat

SEQ ID NO: 230552 - DNA, 25 bp, Probe sequence
gtgtcgctgataaattatttgtctc

SEQ ID NO: 230553 - DNA, 25 bp, Probe sequence
gggggaaagtgatgagttactattg

SEQ ID NO: 230554 - DNA, 25 bp, Probe sequence
ggccaattgacggggaaatcgaact

SEQ ID NO: 230555 - DNA, 25 bp, Probe sequence
tgtctttttcatcatgccatcgatt

SEQ ID NO: 230556 - DNA, 25 bp, Probe sequence
tgcggaattaggctttactttcttt

SEQ ID NO: 230557 - DNA, 25 bp, Probe sequence
tcatgcttgcatatacttactaata

SEQ ID NO: 230558 - DNA, 25 bp, Probe sequence
tactttctttaattaccactataca

SEQ ID NO: 230559 - DNA, 25 bp, Probe sequence
ttctttaattaccactatacagcaa

SEQ ID NO: 230560 - DNA, 25 bp, Probe sequence
ttgtcatcacaattccacttactta

SEQ ID NO: 230561 - DNA, 25 bp, Probe sequence
attgtctttatatatttgggggtgc

SEQ ID NO: 230562 - DNA, 25 bp, Probe sequence
ataatgacagaagcattgtctttat

SEQ ID NO: 230563 - DNA, 25 bp, Probe sequence
aaatataagttgtcgctaaatgatt

SEQ ID NO: 230564 - DNA, 25 bp, Probe sequence
aaagtacttatgcaatcatttttaa

SEQ ID NO: 230565 - DNA, 25 bp, Probe sequence
aaaactgcaatggatgagctagatt

SEQ ID NO: 230566 - DNA, 25 bp, Probe sequence
aacattgcttggcttctataaacaa

SEQ ID NO: 230567 - DNA, 25 bp, Probe sequence
aactgcaatggatgagctagattta

SEQ ID NO: 230568 - DNA, 25 bp, Probe sequence
aagcattgtctttatatatttgggg

SEQ ID NO: 230569 - DNA, 25 bp, Probe sequence
aatgatttagcagtcttagatttaa

SEQ ID NO: 230570 - DNA, 25 bp, Probe sequence
aatgctttatttgaagatgtagaac

SEQ ID NO: 230571 - DNA, 25 bp, Probe sequence
aatttaatgctttatttgaagatgt

SEQ ID NO: 230572 - DNA, 25 bp, Probe sequence
cattgcttggcttctataaacaata

SEQ ID NO: 230573 - DNA, 25 bp, Probe sequence
gcattgtctttatatatttgggggt

SEQ ID NO: 230574 - DNA, 25 bp, Probe sequence
gcttggcttctataaacaatataaa

SEQ ID NO: 230575 - DNA, 25 bp, Probe sequence
gcagtcttagatttaacgatgaagc

SEQ ID NO: 230576 - DNA, 25 bp, Probe sequence
gaaacattgcttggcttctataaac

SEQ ID NO: 230577 - DNA, 25 bp, Probe sequence
gaaattagaaacattgcttggcttc

SEQ ID NO: 230578 - DNA, 25 bp, Probe sequence
gacttagtaaagttagatcatctaa

SEQ ID NO: 230579 - DNA, 25 bp, Probe sequence
gatgatatatctaaatttaatgctt

SEQ ID NO: 230580 - DNA, 25 bp, Probe sequence
gatgagcgtaaaatttatatttatt

SEQ ID NO: 230581 - DNA, 25 bp, Probe sequence
gatttaacgatgaagcattgcaaag

SEQ ID NO: 230582 - DNA, 25 bp, Probe sequence
gatttagcagtcttagatttaacga

SEQ ID NO: 230583 - DNA, 25 bp, Probe sequence
gtaggacaaaattattagtttctat

SEQ ID NO: 230584 - DNA, 25 bp, Probe sequence
gtacttatgcaatcatttttaaaaa

SEQ ID NO: 230585 - DNA, 25 bp, Probe sequence
gggggtgcaacattttgaatactga

SEQ ID NO: 230586 - DNA, 25 bp, Probe sequence
ggtgcaacattttgaatactgagaa

SEQ ID NO: 230587 - DNA, 25 bp, Probe sequence
ggatgagctagatttaagtaggaca

SEQ ID NO: 230588 - DNA, 25 bp, Probe sequence
tgtctttatatatttgggggtgcaa

SEQ ID NO: 230589 - DNA, 25 bp, Probe sequence
taacgatgaagcattgcaaagatga

SEQ ID NO: 230590 - DNA, 25 bp, Probe sequence
tataagttgtcgctaaatgatttag

SEQ ID NO: 230591 - DNA, 25 bp, Probe sequence
tatatttgggggtgcaacattttga

SEQ ID NO: 230592 - DNA, 25 bp, Probe sequence
tttgggggtgcaacattttgaatac

SEQ ID NO: 230593 - DNA, 25 bp, Probe sequence
ttagcagtcttagatttaacgatga

SEQ ID NO: 230594 - DNA, 25 bp, Probe sequence
ttgcttggcttctataaacaatata

SEQ ID NO: 230595 - DNA, 25 bp, Probe sequence
atatatgcgaaatttggtaaggaga

SEQ ID NO: 230596 - DNA, 25 bp, Probe sequence
atgttgcagcaaaatctggtgaacc

SEQ ID NO: 230597 - DNA, 25 bp, Probe sequence
atgtgattgacgataatggattgac

SEQ ID NO: 230598 - DNA, 25 bp, Probe sequence
atggattgacaatagtctatgctga

SEQ ID NO: 230599 - DNA, 25 bp, Probe sequence
agggtgctggagacgaaaactttga

SEQ ID NO: 230600 - DNA, 25 bp, Probe sequence
aaatgttacctcaaacagatattga

SEQ ID NO: 230601 - DNA, 25 bp, Probe sequence
aacgtattccataatgtggatttga

SEQ ID NO: 230602 - DNA, 25 bp, Probe sequence
aaccagatcaatttgcagtcgttca

SEQ ID NO: 230603 - DNA, 25 bp, Probe sequence
aatccagaatctaaccaagctttaa

SEQ ID NO: 230604 - DNA, 25 bp, Probe sequence
catgtggcaacatttggtattgaag

SEQ ID NO: 230605 - DNA, 25 bp, Probe sequence
ctttctgaagcggaccaagtaacat

SEQ ID NO: 230606 - DNA, 25 bp, Probe sequence
gcggaccaagtaacatttgaaaaat

SEQ ID NO: 230607 - DNA, 25 bp, Probe sequence
gcagtcgttcaagatgcgcttcgtg

SEQ ID NO: 230608 - DNA, 25 bp, Probe sequence
gatttggcccaagcggatcaatgct

SEQ ID NO: 230609 - DNA, 25 bp, Probe sequence
gaagatgtacaaaacgtattccata

SEQ ID NO: 230610 - DNA, 25 bp, Probe sequence
gaaaactttgatcacctaagatatg

SEQ ID NO: 230611 - DNA, 25 bp, Probe sequence
gacaatagtctatgctgaaccagat

SEQ ID NO: 230612 - DNA, 25 bp, Probe sequence
gataaagctaagggtgctggagacg

SEQ ID NO: 230613 - DNA, 25 bp, Probe sequence
gatatgaaggatttggcccaagcgg

SEQ ID NO: 230614 - DNA, 25 bp, Probe sequence
gttgctgaatttgaaatgttacctc

SEQ ID NO: 230615 - DNA, 25 bp, Probe sequence
gtagatgtaaatgatgtgattgacg

SEQ ID NO: 230616 - DNA, 25 bp, Probe sequence
gtcgttcaagatgcgcttcgtgcag

SEQ ID NO: 230617 - DNA, 25 bp, Probe sequence
ggtgttgaagaatttaaagttgctg

SEQ ID NO: 230618 - DNA, 25 bp, Probe sequence
ggtaaggagatttatgttgcagcaa

SEQ ID NO: 230619 - DNA, 25 bp, Probe sequence
ggatttggcccaagcggatcaatgc

SEQ ID NO: 230620 - DNA, 25 bp, Probe sequence
ggagacgaaaactttgatcacctaa

SEQ ID NO: 230621 - DNA, 25 bp, Probe sequence
tgcgcttcgtgcagcaggtgttgaa

SEQ ID NO: 230622 - DNA, 25 bp, Probe sequence
tcgtgcagcaggtgttgaagaattt

SEQ ID NO: 230623 - DNA, 25 bp, Probe sequence
tcgatgcattagaagatttagaaga

SEQ ID NO: 230624 - DNA, 25 bp, Probe sequence
tctgttgacgaaatacttgaaacat

SEQ ID NO: 230625 - DNA, 25 bp, Probe sequence
tagtctatgctgaaccagatcaatt

SEQ ID NO: 230626 - DNA, 25 bp, Probe sequence
tttgcagtcgttcaagatgcgcttc

SEQ ID NO: 230627 - DNA, 25 bp, Probe sequence
ttcaagatgcgcttcgtgcagcagg

SEQ ID NO: 230628 - DNA, 25 bp, Probe sequence
ttgaacgcgctaagacatattcagt

SEQ ID NO: 230629 - DNA, 25 bp, Probe sequence
attcatatgataaatccggatgggg

SEQ ID NO: 230630 - DNA, 25 bp, Probe sequence
atatacgactgcaacattgggtact

SEQ ID NO: 230631 - DNA, 25 bp, Probe sequence
atacgactgcaacattgggtactga

SEQ ID NO: 230632 - DNA, 25 bp, Probe sequence
atgaagtatggtactatcatgctgg

SEQ ID NO: 230633 - DNA, 25 bp, Probe sequence
agtgcctaaaggaacaatttttgct

SEQ ID NO: 230634 - DNA, 25 bp, Probe sequence
agagcgccgtttagtagtatttatt

SEQ ID NO: 230635 - DNA, 25 bp, Probe sequence
acgactgcaacattgggtactgata

SEQ ID NO: 230636 - DNA, 25 bp, Probe sequence
actgcaacattgggtactgatatcc

SEQ ID NO: 230637 - DNA, 25 bp, Probe sequence
aacaatttttgcttcttcaatcgaa

SEQ ID NO: 230638 - DNA, 25 bp, Probe sequence
aacattgggtactgatatccaaaat

SEQ ID NO: 230639 - DNA, 25 bp, Probe sequence
aaggaacaatttttgcttcttcaat

SEQ ID NO: 230640 - DNA, 25 bp, Probe sequence
aatggattgatgaattgcaacttga

SEQ ID NO: 230641 - DNA, 25 bp, Probe sequence
aatatttcgcattttcatcgaattg

SEQ ID NO: 230642 - DNA, 25 bp, Probe sequence
cagatgacaatatttcgcattttca

SEQ ID NO: 230643 - DNA, 25 bp, Probe sequence
catcctgaaggtggtttctatagag

SEQ ID NO: 230644 - DNA, 25 bp, Probe sequence
cttacagatgacaatatttcgcatt

SEQ ID NO: 230645 - DNA, 25 bp, Probe sequence
gcattttcatcgaattgatgctgat

SEQ ID NO: 230646 - DNA, 25 bp, Probe sequence
gcatttgagtttaagcagtttgaat

SEQ ID NO: 230647 - DNA, 25 bp, Probe sequence
gaaggtggtttctatagagagacaa

SEQ ID NO: 230648 - DNA, 25 bp, Probe sequence
gaaatcagcagaacaatggattgat

SEQ ID NO: 230649 - DNA, 25 bp, Probe sequence
gagcgccgtttagtagtatttattt

SEQ ID NO: 230650 - DNA, 25 bp, Probe sequence
gagtttaagcagtttgaattgttta

SEQ ID NO: 230651 - DNA, 25 bp, Probe sequence
gattctctaacaattcatatgataa

SEQ ID NO: 230652 - DNA, 25 bp, Probe sequence
gtttgaattgtttaagcaatctgaa

SEQ ID NO: 230653 - DNA, 25 bp, Probe sequence
ggggaatatacgactgcaacattgg

SEQ ID NO: 230654 - DNA, 25 bp, Probe sequence
ggattgatgaattgcaacttgaatc

SEQ ID NO: 230655 - DNA, 25 bp, Probe sequence
ggatggggaatatacgactgcaaca

SEQ ID NO: 230656 - DNA, 25 bp, Probe sequence
ggaacaatttttgcttcttcaatcg

SEQ ID NO: 230657 - DNA, 25 bp, Probe sequence
ggaatatacgactgcaacattgggt

SEQ ID NO: 230658 - DNA, 25 bp, Probe sequence
tgacaatatttcgcattttcatcga

SEQ ID NO: 230659 - DNA, 25 bp, Probe sequence
tccggatggggaatatacgactgca

SEQ ID NO: 230660 - DNA, 25 bp, Probe sequence
tagtttagtaggttgtatgtgtcaa

SEQ ID NO: 230661 - DNA, 25 bp, Probe sequence
ttcgcattttcatcgaattgatgct

SEQ ID NO: 230662 - DNA, 25 bp, Probe sequence
ttgatgctgatgaagtatggtacta

SEQ ID NO: 230663 - DNA, 25 bp, Probe sequence
ataagagtgtgttatttatattttt

SEQ ID NO: 230664 - DNA, 25 bp, Probe sequence
atcacttttatgaagaaatgtgtgt

SEQ ID NO: 230665 - DNA, 25 bp, Probe sequence
atgaagaaatgtgtgtactatctaa

SEQ ID NO: 230666 - DNA, 25 bp, Probe sequence
agagtgtgttatttatatttttgaa

SEQ ID NO: 230667 - DNA, 25 bp, Probe sequence
acttttatgaagaaatgtgtgtact

SEQ ID NO: 230668 - DNA, 25 bp, Probe sequence
aaatcacttttatgaagaaatgtgt

SEQ ID NO: 230669 - DNA, 25 bp, Probe sequence
aaaaatcacttttatgaagaaatgt

SEQ ID NO: 230670 - DNA, 25 bp, Probe sequence
aaaatcacttttatgaagaaatgtg

SEQ ID NO: 230671 - DNA, 25 bp, Probe sequence
aagagtgtgttatttatatttttga

SEQ ID NO: 230672 - DNA, 25 bp, Probe sequence
aatcacttttatgaagaaatgtgtg

SEQ ID NO: 230673 - DNA, 25 bp, Probe sequence
cacttttatgaagaaatgtgtgtac

SEQ ID NO: 230674 - DNA, 25 bp, Probe sequence
cttttatgaagaaatgtgtgtacta

SEQ ID NO: 230675 - DNA, 25 bp, Probe sequence
gaaaatagcattaaatgattttgaa

SEQ ID NO: 230676 - DNA, 25 bp, Probe sequence
gaaaaatcacttttatgaagaaatg

SEQ ID NO: 230677 - DNA, 25 bp, Probe sequence
gataagagtgtgttatttatatttt

SEQ ID NO: 230678 - DNA, 25 bp, Probe sequence
tgaaaaatcacttttatgaagaaat

SEQ ID NO: 230679 - DNA, 25 bp, Probe sequence
tgaagaaatgtgtgtactatctaat

SEQ ID NO: 230680 - DNA, 25 bp, Probe sequence
tcacttttatgaagaaatgtgtgta

SEQ ID NO: 230681 - DNA, 25 bp, Probe sequence
taagagtgtgttatttatatttttg

SEQ ID NO: 230682 - DNA, 25 bp, Probe sequence
tatgaagaaatgtgtgtactatcta

SEQ ID NO: 230683 - DNA, 25 bp, Probe sequence
tatttttgaaaaatcacttttatga

SEQ ID NO: 230684 - DNA, 25 bp, Probe sequence
tttgaaaaatcacttttatgaagaa

SEQ ID NO: 230685 - DNA, 25 bp, Probe sequence
tttttgaaaaatcacttttatgaag

SEQ ID NO: 230686 - DNA, 25 bp, Probe sequence
tttatgaagaaatgtgtgtactatc

SEQ ID NO: 230687 - DNA, 25 bp, Probe sequence
ttttatgaagaaatgtgtgtactat

SEQ ID NO: 230688 - DNA, 25 bp, Probe sequence
ttttgaaaaatcacttttatgaaga

SEQ ID NO: 230689 - DNA, 25 bp, Probe sequence
ttatgaagaaatgtgtgtactatct

SEQ ID NO: 230690 - DNA, 25 bp, Probe sequence
ttgaaaaatcacttttatgaagaaa

SEQ ID NO: 230691 - DNA, 25 bp, Probe sequence
atcctttagaggtgacggtagttgg

SEQ ID NO: 230692 - DNA, 25 bp, Probe sequence
attataggcttagtcacgatgaaaa

SEQ ID NO: 230693 - DNA, 25 bp, Probe sequence
ataaacgtcactggcgtcgcctaat

SEQ ID NO: 230694 - DNA, 25 bp, Probe sequence
ataaaggcaatccattagaatatta

SEQ ID NO: 230695 - DNA, 25 bp, Probe sequence
ataaaattaatgcaaaggctcaaaa

SEQ ID NO: 230696 - DNA, 25 bp, Probe sequence
actggcgtcgcctaattgataggga

SEQ ID NO: 230697 - DNA, 25 bp, Probe sequence
atggcagagttagaaaatgatttta

SEQ ID NO: 230698 - DNA, 25 bp, Probe sequence
aggttcgtgatcctttagaggtgac

SEQ ID NO: 230699 - DNA, 25 bp, Probe sequence
agggtattataggcttagtcacgat

SEQ ID NO: 230700 - DNA, 25 bp, Probe sequence
agtggtgaatatgagttggtagatg

SEQ ID NO: 230701 - DNA, 25 bp, Probe sequence
acgtcactggcgtcgcctaattgat

SEQ ID NO: 230702 - DNA, 25 bp, Probe sequence
aaatggttgcaaatactacctgaaa

SEQ ID NO: 230703 - DNA, 25 bp, Probe sequence
aaaggtaatgcgcgtacagtagatt

SEQ ID NO: 230704 - DNA, 25 bp, Probe sequence
aaagcaatttcatgaagcatatatg

SEQ ID NO: 230705 - DNA, 25 bp, Probe sequence
aaacgtcactggcgtcgcctaattg

SEQ ID NO: 230706 - DNA, 25 bp, Probe sequence
aagaaaatcatgtactgctttaata

SEQ ID NO: 230707 - DNA, 25 bp, Probe sequence
aatcatgtactgctttaataaaatt

SEQ ID NO: 230708 - DNA, 25 bp, Probe sequence
aattgatagggaatacacagaggta

SEQ ID NO: 230709 - DNA, 25 bp, Probe sequence
cgtgatcctttagaggtgacggtag

SEQ ID NO: 230710 - DNA, 25 bp, Probe sequence
gcgcgtacagtagatttatgtttag

SEQ ID NO: 230711 - DNA, 25 bp, Probe sequence
gcaaatactacctgaaaagaaacgt

SEQ ID NO: 230712 - DNA, 25 bp, Probe sequence
gaggtgacggtagttggacaaaata

SEQ ID NO: 230713 - DNA, 25 bp, Probe sequence
gttcgtgatcctttagaggtgacgg

SEQ ID NO: 230714 - DNA, 25 bp, Probe sequence
gtcactggcgtcgcctaattgatag

SEQ ID NO: 230715 - DNA, 25 bp, Probe sequence
ggtaatgcgcgtacagtagatttat

SEQ ID NO: 230716 - DNA, 25 bp, Probe sequence
ggtattataggcttagtcacgatga

SEQ ID NO: 230717 - DNA, 25 bp, Probe sequence
ggcttagtcacgatgaaaaaggttc

SEQ ID NO: 230718 - DNA, 25 bp, Probe sequence
ggcgtcgcctaattgatagggaata

SEQ ID NO: 230719 - DNA, 25 bp, Probe sequence
tcatcaaaagccacaaaataaaact

SEQ ID NO: 230720 - DNA, 25 bp, Probe sequence
tcaaactaaaaatcaccaacaacaa

SEQ ID NO: 230721 - DNA, 25 bp, Probe sequence
taatgtttgcattagaaagtgagca

SEQ ID NO: 230722 - DNA, 25 bp, Probe sequence
tagataaacgtcactggcgtcgcct

SEQ ID NO: 230723 - DNA, 25 bp, Probe sequence
tagatttatgtttagatgttttagc

SEQ ID NO: 230724 - DNA, 25 bp, Probe sequence
tttagaggtgacggtagttggacaa

SEQ ID NO: 230725 - DNA, 25 bp, Probe sequence
attacagtggatcaagtagcaactt

SEQ ID NO: 230726 - DNA, 25 bp, Probe sequence
atatatctcaacctgctgttacaca

SEQ ID NO: 230727 - DNA, 25 bp, Probe sequence
atagagtttcaagctgatccgattt

SEQ ID NO: 230728 - DNA, 25 bp, Probe sequence
atctcaacctgctgttacacaaaga

SEQ ID NO: 230729 - DNA, 25 bp, Probe sequence
atgaaccgctgattcgttcgacatt

SEQ ID NO: 230730 - DNA, 25 bp, Probe sequence
atgatgatcattattttatttttcc

SEQ ID NO: 230731 - DNA, 25 bp, Probe sequence
agttaccatttatagagtttcaagc

SEQ ID NO: 230732 - DNA, 25 bp, Probe sequence
agattaccatgcaactattacagtg

SEQ ID NO: 230733 - DNA, 25 bp, Probe sequence
agctattgaaaatgcttttggagta

SEQ ID NO: 230734 - DNA, 25 bp, Probe sequence
accgctgattcgttcgacatttatg

SEQ ID NO: 230735 - DNA, 25 bp, Probe sequence
acttcctgaagttttgagcctatat

SEQ ID NO: 230736 - DNA, 25 bp, Probe sequence
aagagagcgattattttttgacaaa

SEQ ID NO: 230737 - DNA, 25 bp, Probe sequence
aatgttgattagtggtgtaggtgtt

SEQ ID NO: 230738 - DNA, 25 bp, Probe sequence
aatgcaggcacatattggtgaagtg

SEQ ID NO: 230739 - DNA, 25 bp, Probe sequence
caacctgctgttacacaaagactaa

SEQ ID NO: 230740 - DNA, 25 bp, Probe sequence
cgacatttatgagttatgatccgag

SEQ ID NO: 230741 - DNA, 25 bp, Probe sequence
cgtgacatgttgaaaagagagcgat

SEQ ID NO: 230742 - DNA, 25 bp, Probe sequence
gaacaagattaccatgcaactatta

SEQ ID NO: 230743 - DNA, 25 bp, Probe sequence
gaaattgataatgaaccgctgattc

SEQ ID NO: 230744 - DNA, 25 bp, Probe sequence
gactatcgtttactaataacattag

SEQ ID NO: 230745 - DNA, 25 bp, Probe sequence
gagcctatataatgcccaatttcct

SEQ ID NO: 230746 - DNA, 25 bp, Probe sequence
gagatgatgttacaaagttaccatt

SEQ ID NO: 230747 - DNA, 25 bp, Probe sequence
gattacaacaactgaaggaacaatg

SEQ ID NO: 230748 - DNA, 25 bp, Probe sequence
gattcgttcgacatttatgagttat

SEQ ID NO: 230749 - DNA, 25 bp, Probe sequence
gattgaagactatcgtttactaata

SEQ ID NO: 230750 - DNA, 25 bp, Probe sequence
gtttcaagctgatccgatttatata

SEQ ID NO: 230751 - DNA, 25 bp, Probe sequence
tggacaaaccttacttcctgaagtt

SEQ ID NO: 230752 - DNA, 25 bp, Probe sequence
tgcttttggagtagatatttttatc

SEQ ID NO: 230753 - DNA, 25 bp, Probe sequence
tacgtaaagcggctgaaattttata

SEQ ID NO: 230754 - DNA, 25 bp, Probe sequence
taatgcccaatttcctaatgttgaa

SEQ ID NO: 230755 - DNA, 25 bp, Probe sequence
ttgattggacaaaccttacttcctg

SEQ ID NO: 230756 - DNA, 25 bp, Probe sequence
tatcatgttatgataactcgtggaa

SEQ ID NO: 230757 - DNA, 25 bp, Probe sequence
ttttttgacaaaatgcaggcacata

SEQ ID NO: 230758 - DNA, 25 bp, Probe sequence
ttttatatatatctcaacctgctgt

SEQ ID NO: 230759 - DNA, 25 bp, Probe sequence
attactatatgcgattttccaagga

SEQ ID NO: 230760 - DNA, 25 bp, Probe sequence
atatgcctttatttgttactgatta

SEQ ID NO: 230761 - DNA, 25 bp, Probe sequence
atcattcttggcgttttatcatcta

SEQ ID NO: 230762 - DNA, 25 bp, Probe sequence
atggatatgtttgcagcgttattac

SEQ ID NO: 230763 - DNA, 25 bp, Probe sequence
acgcttttattaccatttattgcat

SEQ ID NO: 230764 - DNA, 25 bp, Probe sequence
actctttgttgctaatatgtttcta

SEQ ID NO: 230765 - DNA, 25 bp, Probe sequence
acaccctattagtacgcaacaacat

SEQ ID NO: 230766 - DNA, 25 bp, Probe sequence
aaattattattattctcgcattatt

SEQ ID NO: 230767 - DNA, 25 bp, Probe sequence
aacactattttctaatgcaatggtt

SEQ ID NO: 230768 - DNA, 25 bp, Probe sequence
aaggctatgctggattgtttggtgg

SEQ ID NO: 230769 - DNA, 25 bp, Probe sequence
aatctatcaatgtttcaagctctaa

SEQ ID NO: 230770 - DNA, 25 bp, Probe sequence
cagtattacgttcaatgttctcatt

SEQ ID NO: 230771 - DNA, 25 bp, Probe sequence
catgtcggttatttagctagtttat

SEQ ID NO: 230772 - DNA, 25 bp, Probe sequence
ccccaactttacgcatctgctagag

SEQ ID NO: 230773 - DNA, 25 bp, Probe sequence
gctagattttcggatacgcatcact

SEQ ID NO: 230774 - DNA, 25 bp, Probe sequence
gcatttattttattacacattggac

SEQ ID NO: 230775 - DNA, 25 bp, Probe sequence
gaagtgccatttatgatcattcttg

SEQ ID NO: 230776 - DNA, 25 bp, Probe sequence
gatacaatctggttattcatattac

SEQ ID NO: 230777 - DNA, 25 bp, Probe sequence
gttctcattgggctttttatttggt

SEQ ID NO: 230778 - DNA, 25 bp, Probe sequence
gtttatgtgctggtttagaagtgcc

SEQ ID NO: 230779 - DNA, 25 bp, Probe sequence
gtatgatacttatattctttactaa

SEQ ID NO: 230780 - DNA, 25 bp, Probe sequence
atggttattggacagttaggcggta

SEQ ID NO: 230781 - DNA, 25 bp, Probe sequence
gtcccatatcttgttctttttgcaa

SEQ ID NO: 230782 - DNA, 25 bp, Probe sequence
gtggtgctatgagtcactgggtagg

SEQ ID NO: 230783 - DNA, 25 bp, Probe sequence
ggtttattctacttcagcattgggg

SEQ ID NO: 230784 - DNA, 25 bp, Probe sequence
ggattacttctagcatctgcagcga

SEQ ID NO: 230785 - DNA, 25 bp, Probe sequence
ggatgtatacgatgaatatgccttt

SEQ ID NO: 230786 - DNA, 25 bp, Probe sequence
tgggtattgcggttacggtcccata

SEQ ID NO: 230787 - DNA, 25 bp, Probe sequence
tgtattttttgtatcagcagcatca

SEQ ID NO: 230788 - DNA, 25 bp, Probe sequence
tcagcagcatcaatcatgttaggta

SEQ ID NO: 230789 - DNA, 25 bp, Probe sequence
tagctattttcttagcggttctttt

SEQ ID NO: 230790 - DNA, 25 bp, Probe sequence
tagtacttcaagtgtttttctataa

SEQ ID NO: 230791 - DNA, 25 bp, Probe sequence
tttccaaggattatttgcaccagca

SEQ ID NO: 230792 - DNA, 25 bp, Probe sequence
ttaatgggtgcgcttggtttttcaa

SEQ ID NO: 230793 - DNA, 25 bp, Probe sequence
aacgtccggtctatttcacggcatt

SEQ ID NO: 230794 - DNA, 25 bp, Probe sequence
attcagttgcttatgcatatgattc

SEQ ID NO: 230795 - DNA, 25 bp, Probe sequence
atatcgaggtgatcgtccagcaatc

SEQ ID NO: 230796 - DNA, 25 bp, Probe sequence
atgcgccattcacgtatgatgcaga

SEQ ID NO: 230797 - DNA, 25 bp, Probe sequence
atggcttttcaagtgcagcgagctt

SEQ ID NO: 230798 - DNA, 25 bp, Probe sequence
aacatcatacgatacatggcatgga

SEQ ID NO: 230799 - DNA, 25 bp, Probe sequence
aagctacggaaagacatctaccatt

SEQ ID NO: 230800 - DNA, 25 bp, Probe sequence
aagtgggctatttgaggaatttgct

SEQ ID NO: 230801 - DNA, 25 bp, Probe sequence
cacgaccgtgaattgatattacttt

SEQ ID NO: 230802 - DNA, 25 bp, Probe sequence
cagcgagctttgcgagaacatttaa

SEQ ID NO: 230803 - DNA, 25 bp, Probe sequence
catggcatggacaaggactctatag

SEQ ID NO: 230804 - DNA, 25 bp, Probe sequence
cgttgccctgcatgtcagtcataga

SEQ ID NO: 230805 - DNA, 25 bp, Probe sequence
cctaaagcgtccactcattttactc

SEQ ID NO: 230806 - DNA, 25 bp, Probe sequence
ccgcgtacatatcattcgaaccaaa

SEQ ID NO: 230807 - DNA, 25 bp, Probe sequence
gcgactatatcgagttacattttca

SEQ ID NO: 230808 - DNA, 25 bp, Probe sequence
gcgtccactcattttactcaattgg

SEQ ID NO: 230809 - DNA, 25 bp, Probe sequence
gcattgtctatattttcacttaaca

SEQ ID NO: 230810 - DNA, 25 bp, Probe sequence
gaattgagcatgcgaaactcgattt

SEQ ID NO: 230811 - DNA, 25 bp, Probe sequence
gaagttcaacttgtatgtgacgaca

SEQ ID NO: 230812 - DNA, 25 bp, Probe sequence
gaacatttaaacactttacgcatca

SEQ ID NO: 230813 - DNA, 25 bp, Probe sequence
gaaaaagctcaatgcgccattcacg

SEQ ID NO: 230814 - DNA, 25 bp, Probe sequence
gacttgtatcgatttcaacttcaac

SEQ ID NO: 230815 - DNA, 25 bp, Probe sequence
gacgcaatgcaacagtggcgacatt

SEQ ID NO: 230816 - DNA, 25 bp, Probe sequence
gatgaatttaaaaccgcgagtcaaa

SEQ ID NO: 230817 - DNA, 25 bp, Probe sequence
gggtggtcagagagccatctgtcta

SEQ ID NO: 230818 - DNA, 25 bp, Probe sequence
ggaatacattgacgggtgatacatt

SEQ ID NO: 230819 - DNA, 25 bp, Probe sequence
ggaatttgctcaatacacagtatca

SEQ ID NO: 230820 - DNA, 25 bp, Probe sequence
ggcatcatatgttatatccaattcc

SEQ ID NO: 230821 - DNA, 25 bp, Probe sequence
ggcgacattttcatcattaaccacc

SEQ ID NO: 230822 - DNA, 25 bp, Probe sequence
tcaatcacagttgcttacatgtcat

SEQ ID NO: 230823 - DNA, 25 bp, Probe sequence
taatggcaagactggtttcaacaca

SEQ ID NO: 230824 - DNA, 25 bp, Probe sequence
taaatacgacgcgaattgagcatgc

SEQ ID NO: 230825 - DNA, 25 bp, Probe sequence
tttagaggtggtatcatcattgagc

SEQ ID NO: 230826 - DNA, 25 bp, Probe sequence
ttcacttaacagatgcgaccacaac

SEQ ID NO: 230827 - DNA, 25 bp, Probe sequence
attgtatggttctttatagatgctt

SEQ ID NO: 230828 - DNA, 25 bp, Probe sequence
atagctcaagcaatcattatgttta

SEQ ID NO: 230829 - DNA, 25 bp, Probe sequence
ataatgattgtatggttctttatag

SEQ ID NO: 230830 - DNA, 25 bp, Probe sequence
atgattgtatggttctttatagatg

SEQ ID NO: 230831 - DNA, 25 bp, Probe sequence
atggttctttatagatgctttattg

SEQ ID NO: 230832 - DNA, 25 bp, Probe sequence
agtatagctcaagcaatcattatgt

SEQ ID NO: 230833 - DNA, 25 bp, Probe sequence
agctcaagcaatcattatgtttata

SEQ ID NO: 230834 - DNA, 25 bp, Probe sequence
aatgattgtatggttctttatagat

SEQ ID NO: 230835 - DNA, 25 bp, Probe sequence
ctttatagatgctttattgattaat

SEQ ID NO: 230836 - DNA, 25 bp, Probe sequence
ctcaagcaatcattatgtttataat

SEQ ID NO: 230837 - DNA, 25 bp, Probe sequence
gctcaagcaatcattatgtttataa

SEQ ID NO: 230838 - DNA, 25 bp, Probe sequence
gattgtatggttctttatagatgct

SEQ ID NO: 230839 - DNA, 25 bp, Probe sequence
gttctttatagatgctttattgatt

SEQ ID NO: 230840 - DNA, 25 bp, Probe sequence
gtttataatgattgtatggttcttt

SEQ ID NO: 230841 - DNA, 25 bp, Probe sequence
gtatagctcaagcaatcattatgtt

SEQ ID NO: 230842 - DNA, 25 bp, Probe sequence
gtatggttctttatagatgctttat

SEQ ID NO: 230843 - DNA, 25 bp, Probe sequence
ggttctttatagatgctttattgat

SEQ ID NO: 230844 - DNA, 25 bp, Probe sequence
tggaattattattataccttttatt

SEQ ID NO: 230845 - DNA, 25 bp, Probe sequence
tggttctttatagatgctttattga

SEQ ID NO: 230846 - DNA, 25 bp, Probe sequence
tgtatggttctttatagatgcttta

SEQ ID NO: 230847 - DNA, 25 bp, Probe sequence
tgattgtatggttctttatagatgc

SEQ ID NO: 230848 - DNA, 25 bp, Probe sequence
tctttatagatgctttattgattaa

SEQ ID NO: 230849 - DNA, 25 bp, Probe sequence
taatgattgtatggttctttataga

SEQ ID NO: 230850 - DNA, 25 bp, Probe sequence
tagctcaagcaatcattatgtttat

SEQ ID NO: 230851 - DNA, 25 bp, Probe sequence
tagtatagctcaagcaatcattatg

SEQ ID NO: 230852 - DNA, 25 bp, Probe sequence
tatggttctttatagatgctttatt

SEQ ID NO: 230853 - DNA, 25 bp, Probe sequence
tatagctcaagcaatcattatgttt

SEQ ID NO: 230854 - DNA, 25 bp, Probe sequence
tatagatgctttattgattaattaa

SEQ ID NO: 230855 - DNA, 25 bp, Probe sequence
tttataatgattgtatggttcttta

SEQ ID NO: 230856 - DNA, 25 bp, Probe sequence
ttatagatgctttattgattaatta

SEQ ID NO: 230857 - DNA, 25 bp, Probe sequence
ttataatgattgtatggttctttat

SEQ ID NO: 230858 - DNA, 25 bp, Probe sequence
ttctttatagatgctttattgatta

SEQ ID NO: 230859 - DNA, 25 bp, Probe sequence
ttgtatggttctttatagatgcttt

SEQ ID NO: 230860 - DNA, 25 bp, Probe sequence
ttggaattattattataccttttat

SEQ ID NO: 230861 - DNA, 25 bp, Probe sequence
attatcattccatttattttggtat

SEQ ID NO: 230862 - DNA, 25 bp, Probe sequence
attattatcattccatttattttgg

SEQ ID NO: 230863 - DNA, 25 bp, Probe sequence
atttggaattattatcattccattt

SEQ ID NO: 230864 - DNA, 25 bp, Probe sequence
atattaattttatgtgcggactttt

SEQ ID NO: 230865 - DNA, 25 bp, Probe sequence
atagctcaagcgagtctgggacata

SEQ ID NO: 230866 - DNA, 25 bp, Probe sequence
agtatagctcaagcgagtctgggac

SEQ ID NO: 230867 - DNA, 25 bp, Probe sequence
agctcaagcgagtctgggacataaa

SEQ ID NO: 230868 - DNA, 25 bp, Probe sequence
aatattaattttatgtgcggacttt

SEQ ID NO: 230869 - DNA, 25 bp, Probe sequence
aattattatcattccatttattttg

SEQ ID NO: 230870 - DNA, 25 bp, Probe sequence
caatattaattttatgtgcggactt

SEQ ID NO: 230871 - DNA, 25 bp, Probe sequence
ctcaagcgagtctgggacataaatc

SEQ ID NO: 230872 - DNA, 25 bp, Probe sequence
gctcaagcgagtctgggacataaat

SEQ ID NO: 230873 - DNA, 25 bp, Probe sequence
gaattattatcattccatttatttt

SEQ ID NO: 230874 - DNA, 25 bp, Probe sequence
gtatagctcaagcgagtctgggaca

SEQ ID NO: 230875 - DNA, 25 bp, Probe sequence
ggaattattatcattccatttattt

SEQ ID NO: 230876 - DNA, 25 bp, Probe sequence
tggaattattatcattccatttatt

SEQ ID NO: 230877 - DNA, 25 bp, Probe sequence
tcaagcgagtctgggacataaatcc

SEQ ID NO: 230878 - DNA, 25 bp, Probe sequence
tagctcaagcgagtctgggacataa

SEQ ID NO: 230879 - DNA, 25 bp, Probe sequence
tagtatagctcaagcgagtctggga

SEQ ID NO: 230880 - DNA, 25 bp, Probe sequence
tatcattccatttattttggtattc

SEQ ID NO: 230881 - DNA, 25 bp, Probe sequence
tatagctcaagcgagtctgggacat

SEQ ID NO: 230882 - DNA, 25 bp, Probe sequence
tattatcattccatttattttggta

SEQ ID NO: 230883 - DNA, 25 bp, Probe sequence
tttggaattattatcattccattta

SEQ ID NO: 230884 - DNA, 25 bp, Probe sequence
ttattatcattccatttattttggt

SEQ ID NO: 230885 - DNA, 25 bp, Probe sequence
ttatcattccatttattttggtatt

SEQ ID NO: 230886 - DNA, 25 bp, Probe sequence
ttggaattattatcattccatttat

SEQ ID NO: 230887 - DNA, 25 bp, Probe sequence
attgaactgctatatgttgaaccac

SEQ ID NO: 230888 - DNA, 25 bp, Probe sequence
attgctcttaggtacgagatgatat

SEQ ID NO: 230889 - DNA, 25 bp, Probe sequence
atatcaagcaaatagctaatataca

SEQ ID NO: 230890 - DNA, 25 bp, Probe sequence
atatgttgaaccacaatttcgcaaa

SEQ ID NO: 230891 - DNA, 25 bp, Probe sequence
accacaatttcgcaaactgggaata

SEQ ID NO: 230892 - DNA, 25 bp, Probe sequence
atgaaggtcaattaatagcgtttat

SEQ ID NO: 230893 - DNA, 25 bp, Probe sequence
atgaggacacttaataaagatgaac

SEQ ID NO: 230894 - DNA, 25 bp, Probe sequence
atgttgaaccacaatttcgcaaact

SEQ ID NO: 230895 - DNA, 25 bp, Probe sequence
actgggaatagctacgcaactgaag

SEQ ID NO: 230896 - DNA, 25 bp, Probe sequence
acaatttcgcaaactgggaatagct

SEQ ID NO: 230897 - DNA, 25 bp, Probe sequence
aaactgggaatagctacgcaactga

SEQ ID NO: 230898 - DNA, 25 bp, Probe sequence
aactgagtattgctcttaggtacga

SEQ ID NO: 230899 - DNA, 25 bp, Probe sequence
aactatgaatgcaaagcgaataagc

SEQ ID NO: 230900 - DNA, 25 bp, Probe sequence
cttaggtacgagatgatatgttcaa

SEQ ID NO: 230901 - DNA, 25 bp, Probe sequence
gctacgcaactgaagattgcgcttg

SEQ ID NO: 230902 - DNA, 25 bp, Probe sequence
gctatatgttgaaccacaatttcgc

SEQ ID NO: 230903 - DNA, 25 bp, Probe sequence
gcaaactgggaatagctacgcaact

SEQ ID NO: 230904 - DNA, 25 bp, Probe sequence
gaatccaactataaatgtactaaac

SEQ ID NO: 230905 - DNA, 25 bp, Probe sequence
gaactgctatatgttgaaccacaat

SEQ ID NO: 230906 - DNA, 25 bp, Probe sequence
gagtattgctcttaggtacgagatg

SEQ ID NO: 230907 - DNA, 25 bp, Probe sequence
gatgaacataattatatcaagcaaa

SEQ ID NO: 230908 - DNA, 25 bp, Probe sequence
gatttaggttatcaagtgagtcatg

SEQ ID NO: 230909 - DNA, 25 bp, Probe sequence
gttgaaccacaatttcgcaaactgg

SEQ ID NO: 230910 - DNA, 25 bp, Probe sequence
gtatggttaacattgaactgctata

SEQ ID NO: 230911 - DNA, 25 bp, Probe sequence
gggcaaaaactatgaatgcaaagcg

SEQ ID NO: 230912 - DNA, 25 bp, Probe sequence
gggaatagctacgcaactgaagatt

SEQ ID NO: 230913 - DNA, 25 bp, Probe sequence
ggtacgagatgatatgttcaagatt

SEQ ID NO: 230914 - DNA, 25 bp, Probe sequence
tgtactaaactgagtattgctctta

SEQ ID NO: 230915 - DNA, 25 bp, Probe sequence
tgaagattgcgcttgaaaaatgggc

SEQ ID NO: 230916 - DNA, 25 bp, Probe sequence
tgaaccacaatttcgcaaactggga

SEQ ID NO: 230917 - DNA, 25 bp, Probe sequence
tgcgcttgaaaaatgggcaaaaact

SEQ ID NO: 230918 - DNA, 25 bp, Probe sequence
tcgcaaactgggaatagctacgcaa

SEQ ID NO: 230919 - DNA, 25 bp, Probe sequence
tagcgtttatttggggacattttag

SEQ ID NO: 230920 - DNA, 25 bp, Probe sequence
tttatttggggacattttagtaatg

SEQ ID NO: 230921 - DNA, 25 bp, Probe sequence
atgctatttttaacaggttgtggta

SEQ ID NO: 230922 - DNA, 25 bp, Probe sequence
agatcaaactaagtcatcggataaa

SEQ ID NO: 230923 - DNA, 25 bp, Probe sequence
agataatcacaaaaagcctacatca

SEQ ID NO: 230924 - DNA, 25 bp, Probe sequence
agaggcatcacaagataagcaatca

SEQ ID NO: 230925 - DNA, 25 bp, Probe sequence
agctaatgacaaacaccaatcataa

SEQ ID NO: 230926 - DNA, 25 bp, Probe sequence
agccactctggaaaaggatatcgat

SEQ ID NO: 230927 - DNA, 25 bp, Probe sequence
aaagataatcacaaaaagcctacat

SEQ ID NO: 230928 - DNA, 25 bp, Probe sequence
aaagatcaaactaagtcatcggata

SEQ ID NO: 230929 - DNA, 25 bp, Probe sequence
aaagctaatgacaaacaccaatcat

SEQ ID NO: 230930 - DNA, 25 bp, Probe sequence
caagagaaagccactctggaaaagg

SEQ ID NO: 230931 - DNA, 25 bp, Probe sequence
aaaaagctaatgacaaacaccaatc

SEQ ID NO: 230932 - DNA, 25 bp, Probe sequence
aaaagctaatgacaaacaccaatca

SEQ ID NO: 230933 - DNA, 25 bp, Probe sequence
aaaagatcaaactaagtcatcggat

SEQ ID NO: 230934 - DNA, 25 bp, Probe sequence
aagccactctggaaaaggatatcga

SEQ ID NO: 230935 - DNA, 25 bp, Probe sequence
aagctaatgacaaacaccaatcata

SEQ ID NO: 230936 - DNA, 25 bp, Probe sequence
aagaggcatcacaagataagcaatc

SEQ ID NO: 230937 - DNA, 25 bp, Probe sequence
aagatcaaactaagtcatcggataa

SEQ ID NO: 230938 - DNA, 25 bp, Probe sequence
caaactaagtcatcggataaagata

SEQ ID NO: 230939 - DNA, 25 bp, Probe sequence
cactctggaaaaggatatcgataat

SEQ ID NO: 230940 - DNA, 25 bp, Probe sequence
catgctatttttaacaggttgtggt

SEQ ID NO: 230941 - DNA, 25 bp, Probe sequence
ccactctggaaaaggatatcgataa

SEQ ID NO: 230942 - DNA, 25 bp, Probe sequence
gccactctggaaaaggatatcgata

SEQ ID NO: 230943 - DNA, 25 bp, Probe sequence
gcagataagcaaaaagaccttgaaa

SEQ ID NO: 230944 - DNA, 25 bp, Probe sequence
gaaagccactctggaaaaggatatc

SEQ ID NO: 230945 - DNA, 25 bp, Probe sequence
gagaaagccactctggaaaaggata

SEQ ID NO: 230946 - DNA, 25 bp, Probe sequence
gaggcatcacaagataagcaatcaa

SEQ ID NO: 230947 - DNA, 25 bp, Probe sequence
gatcaaactaagtcatcggataaag

SEQ ID NO: 230948 - DNA, 25 bp, Probe sequence
gataaagaggcatcacaagataagc

SEQ ID NO: 230949 - DNA, 25 bp, Probe sequence
ggatatcgataatttacaaaaagaa

SEQ ID NO: 230950 - DNA, 25 bp, Probe sequence
ggaaaaggatatcgataatttacaa

SEQ ID NO: 230951 - DNA, 25 bp, Probe sequence
ggcatcacaagataagcaatcaaaa

SEQ ID NO: 230952 - DNA, 25 bp, Probe sequence
tgctatttttaacaggttgtggtaa

SEQ ID NO: 230953 - DNA, 25 bp, Probe sequence
tcatgctatttttaacaggttgtgg

SEQ ID NO: 230954 - DNA, 25 bp, Probe sequence
tagcagataagcaaaaagaccttga

SEQ ID NO: 230955 - DNA, 25 bp, Probe sequence
atagatgcaacttttactgcgctga

SEQ ID NO: 230956 - DNA, 25 bp, Probe sequence
atacttttgttgctacatatcgttt

SEQ ID NO: 230957 - DNA, 25 bp, Probe sequence
atcagatagagcacgtttaaaagaa

SEQ ID NO: 230958 - DNA, 25 bp, Probe sequence
atcgtttaaaccatcaacaagattt

SEQ ID NO: 230959 - DNA, 25 bp, Probe sequence
agtgccagttcatgttgaacttata

SEQ ID NO: 230960 - DNA, 25 bp, Probe sequence
agatgcaacttttactgcgctgaaa

SEQ ID NO: 230961 - DNA, 25 bp, Probe sequence
acgattgctgattctactggcgaaa

SEQ ID NO: 230962 - DNA, 25 bp, Probe sequence
actttgagtccgatacagatacttt

SEQ ID NO: 230963 - DNA, 25 bp, Probe sequence
acttttactgcgctgaaatcagata

SEQ ID NO: 230964 - DNA, 25 bp, Probe sequence
actttgccagaattaggtagagaat

SEQ ID NO: 230965 - DNA, 25 bp, Probe sequence
acatatcgtttaaaccatcaacaag

SEQ ID NO: 230966 - DNA, 25 bp, Probe sequence
aaagaagtgccagttcatgttgaac

SEQ ID NO: 230967 - DNA, 25 bp, Probe sequence
caaactttgagtccgatacagatac

SEQ ID NO: 230968 - DNA, 25 bp, Probe sequence
cttttgttgctacatatcgtttaaa

SEQ ID NO: 230969 - DNA, 25 bp, Probe sequence
gcgtgtaattgcacatttaccaaac

SEQ ID NO: 230970 - DNA, 25 bp, Probe sequence
gctgattctactggcgaaattaagc

SEQ ID NO: 230971 - DNA, 25 bp, Probe sequence
gctgaaatcagatagagcacgttta

SEQ ID NO: 230972 - DNA, 25 bp, Probe sequence
gcacatttaccaaactttgagtccg

SEQ ID NO: 230973 - DNA, 25 bp, Probe sequence
gcaacttttactgcgctgaaatcag

SEQ ID NO: 230974 - DNA, 25 bp, Probe sequence
gagtccgatacagatacttttgttg

SEQ ID NO: 230975 - DNA, 25 bp, Probe sequence
gatacagatacttttgttgctacat

SEQ ID NO: 230976 - DNA, 25 bp, Probe sequence
gatattactttgccagaattaggta

SEQ ID NO: 230977 - DNA, 25 bp, Probe sequence
gattctactggcgaaattaagcgtg

SEQ ID NO: 230978 - DNA, 25 bp, Probe sequence
gattttagaattttagagggtcaag

SEQ ID NO: 230979 - DNA, 25 bp, Probe sequence
gattgctgattctactggcgaaatt

SEQ ID NO: 230980 - DNA, 25 bp, Probe sequence
gtccgatacagatacttttgttgct

SEQ ID NO: 230981 - DNA, 25 bp, Probe sequence
tgcaacttttactgcgctgaaatca

SEQ ID NO: 230982 - DNA, 25 bp, Probe sequence
tctactggcgaaattaagcgtgtaa

SEQ ID NO: 230983 - DNA, 25 bp, Probe sequence
tcaacaagattttatagatgcaact

SEQ ID NO: 230984 - DNA, 25 bp, Probe sequence
taattgcacatttaccaaactttga

SEQ ID NO: 230985 - DNA, 25 bp, Probe sequence
taagcgtgtaattgcacatttacca

SEQ ID NO: 230986 - DNA, 25 bp, Probe sequence
tacagatacttttgttgctacatat

SEQ ID NO: 230987 - DNA, 25 bp, Probe sequence
tagagggtcaagatattactttgcc

SEQ ID NO: 230988 - DNA, 25 bp, Probe sequence
ttaccaaactttgagtccgatacag

SEQ ID NO: 230989 - DNA, 25 bp, Probe sequence
attccagaaacaagcgattatccat

SEQ ID NO: 230990 - DNA, 25 bp, Probe sequence
ataggtttgaattatattccagaaa

SEQ ID NO: 230991 - DNA, 25 bp, Probe sequence
atacgatgtctatagttttacagca

SEQ ID NO: 230992 - DNA, 25 bp, Probe sequence
atcgtcgttcagaattagatatgag

SEQ ID NO: 230993 - DNA, 25 bp, Probe sequence
atgaatgcgaattatgacgtacgta

SEQ ID NO: 230994 - DNA, 25 bp, Probe sequence
aaaggcaagtgcgctattacattaa

SEQ ID NO: 230995 - DNA, 25 bp, Probe sequence
aaaggattagcaactgaaggcgcaa

SEQ ID NO: 230996 - DNA, 25 bp, Probe sequence
aaaattggcatgacagtgtatgatc

SEQ ID NO: 230997 - DNA, 25 bp, Probe sequence
aagagtcccatcaatggataggctt

SEQ ID NO: 230998 - DNA, 25 bp, Probe sequence
aagaattaccgctttatgaaatagg

SEQ ID NO: 230999 - DNA, 25 bp, Probe sequence
caagtttattgagttatcgtcgttc

SEQ ID NO: 231000 - DNA, 25 bp, Probe sequence
cattggattatttgctgtagaagat

SEQ ID NO: 231001 - DNA, 25 bp, Probe sequence
gctgtagaagataaagagtcccatc

SEQ ID NO: 231002 - DNA, 25 bp, Probe sequence
gaagatgatctgttaccttttcaaa

SEQ ID NO: 231003 - DNA, 25 bp, Probe sequence
gaaacaagcgattatccatttaaag

SEQ ID NO: 231004 - DNA, 25 bp, Probe sequence
gagcgtttaatattaagagactggc

SEQ ID NO: 231005 - DNA, 25 bp, Probe sequence
gagactggcatgaagatgatctgtt

SEQ ID NO: 231006 - DNA, 25 bp, Probe sequence
gagttatcgtcgttcagaattagat

SEQ ID NO: 231007 - DNA, 25 bp, Probe sequence
gatctgttaccttttcaaaaaatga

SEQ ID NO: 231008 - DNA, 25 bp, Probe sequence
gatcatttcgaattacccaatctaa

SEQ ID NO: 231009 - DNA, 25 bp, Probe sequence
gatatgagaactatggatgcggtta

SEQ ID NO: 231010 - DNA, 25 bp, Probe sequence
gattatggcattggattatttgctg

SEQ ID NO: 231011 - DNA, 25 bp, Probe sequence
gtctatagttttacagcagaagcaa

SEQ ID NO: 231012 - DNA, 25 bp, Probe sequence
gtcccatcaatggataggctttata

SEQ ID NO: 231013 - DNA, 25 bp, Probe sequence
gtgcgctattacattaatcttcgaa

SEQ ID NO: 231014 - DNA, 25 bp, Probe sequence
gtgtatgatcatttcgaattaccca

SEQ ID NO: 231015 - DNA, 25 bp, Probe sequence
ggataggctttataggtttgaatta

SEQ ID NO: 231016 - DNA, 25 bp, Probe sequence
ggatgcggttattaaagattatggc

SEQ ID NO: 231017 - DNA, 25 bp, Probe sequence
ggcaagtgcgctattacattaatct

SEQ ID NO: 231018 - DNA, 25 bp, Probe sequence
tgatttattgtgaaacagagcgttt

SEQ ID NO: 231019 - DNA, 25 bp, Probe sequence
tgacgtacgtaaatattttccaagt

SEQ ID NO: 231020 - DNA, 25 bp, Probe sequence
tagcaactgaaggcgcaaaggcaac

SEQ ID NO: 231021 - DNA, 25 bp, Probe sequence
tacccaatctaagtaagtatcattt

SEQ ID NO: 231022 - DNA, 25 bp, Probe sequence
tatgaaataggttggcgcttgttgc

SEQ ID NO: 231023 - DNA, 25 bp, Probe sequence
cttggtcagtactggtctcggcata

SEQ ID NO: 231024 - DNA, 25 bp, Probe sequence
attgcaggtgtttatcagccaacaa

SEQ ID NO: 231025 - DNA, 25 bp, Probe sequence
agccatatattttcagtgcttctat

SEQ ID NO: 231026 - DNA, 25 bp, Probe sequence
acgcatagaactttgccgtctttta

SEQ ID NO: 231027 - DNA, 25 bp, Probe sequence
actgcaccatttattcctttgtttt

SEQ ID NO: 231028 - DNA, 25 bp, Probe sequence
aaaactgcggcaattgcgattattt

SEQ ID NO: 231029 - DNA, 25 bp, Probe sequence
aacaatgcgcattttacgcagtgct

SEQ ID NO: 231030 - DNA, 25 bp, Probe sequence
aacagagaagcatatttacgacgat

SEQ ID NO: 231031 - DNA, 25 bp, Probe sequence
aagcatatgcttagacagcgggtta

SEQ ID NO: 231032 - DNA, 25 bp, Probe sequence
aatcattgcaatgtttttcatccat

SEQ ID NO: 231033 - DNA, 25 bp, Probe sequence
aatttttccggtactcatgttcttg

SEQ ID NO: 231034 - DNA, 25 bp, Probe sequence
cgatgattgtcattgcacatagaga

SEQ ID NO: 231035 - DNA, 25 bp, Probe sequence
gcgattattttagcgcctgaatttt

SEQ ID NO: 231036 - DNA, 25 bp, Probe sequence
gaaggtgccagtgacgttgtgtttg

SEQ ID NO: 231037 - DNA, 25 bp, Probe sequence
gagcaactgtgcaatttctaaatca

SEQ ID NO: 231038 - DNA, 25 bp, Probe sequence
gagttatttgcctcaagtgttcaaa

SEQ ID NO: 231039 - DNA, 25 bp, Probe sequence
gatgagcctgcaactggtttagata

SEQ ID NO: 231040 - DNA, 25 bp, Probe sequence
gataatacaattcgccatttacaac

SEQ ID NO: 231041 - DNA, 25 bp, Probe sequence
ttgtaggtccaagcggggcaggtaa

SEQ ID NO: 231042 - DNA, 25 bp, Probe sequence
gttcaaatcaatgatggttccgctc

SEQ ID NO: 231043 - DNA, 25 bp, Probe sequence
gtattggattggttgcattggaagc

SEQ ID NO: 231044 - DNA, 25 bp, Probe sequence
gtgatcaaattgcacttgtaggtcc

SEQ ID NO: 231045 - DNA, 25 bp, Probe sequence
ggttccgctcatcataatcattgca

SEQ ID NO: 231046 - DNA, 25 bp, Probe sequence
ggaggcgaaatgttatctggtggac

SEQ ID NO: 231047 - DNA, 25 bp, Probe sequence
ggaatacttagtcaacagccatata

SEQ ID NO: 231048 - DNA, 25 bp, Probe sequence
ggaagactgattgctgatgatcgca

SEQ ID NO: 231049 - DNA, 25 bp, Probe sequence
tgaagccagatctcgttatatttga

SEQ ID NO: 231050 - DNA, 25 bp, Probe sequence
tgccgtcttttagttatgaagccag

SEQ ID NO: 231051 - DNA, 25 bp, Probe sequence
tccggtactcatgttcttggtcagt

SEQ ID NO: 231052 - DNA, 25 bp, Probe sequence
tctggtggacagatgagacgcatag

SEQ ID NO: 231053 - DNA, 25 bp, Probe sequence
tcagaacgttctgtttcaacatttt

SEQ ID NO: 231054 - DNA, 25 bp, Probe sequence
taatggtcatccaatcggtgaacaa

SEQ ID NO: 231055 - DNA, 25 bp, Probe sequence
tacgcagtgcttttttatcgggatt

SEQ ID NO: 231056 - DNA, 25 bp, Probe sequence
ttacgacgatagtactcagtttaga

SEQ ID NO: 231057 - DNA, 25 bp, Probe sequence
attgttgctacacacgatttaactt

SEQ ID NO: 231058 - DNA, 25 bp, Probe sequence
attgctatgctttcgatttttggta

SEQ ID NO: 231059 - DNA, 25 bp, Probe sequence
atcggtttgacagcgctagttacag

SEQ ID NO: 231060 - DNA, 25 bp, Probe sequence
atgaagtgatatctgtaccttctac

SEQ ID NO: 231061 - DNA, 25 bp, Probe sequence
agagcaacgctttttaacgatttat

SEQ ID NO: 231062 - DNA, 25 bp, Probe sequence
agaacatttggcactagaacgtcaa

SEQ ID NO: 231063 - DNA, 25 bp, Probe sequence
aaagctacatttacaatgctacgtg

SEQ ID NO: 231064 - DNA, 25 bp, Probe sequence
aagctgtaccaatgacaaatgtcgc

SEQ ID NO: 231065 - DNA, 25 bp, Probe sequence
aatgtcattcctaatgtttaccgta

SEQ ID NO: 231066 - DNA, 25 bp, Probe sequence
aagtgcacttggtgcgccactatac

SEQ ID NO: 231067 - DNA, 25 bp, Probe sequence
aatgtcttgctacaatctcaacaat

SEQ ID NO: 231068 - DNA, 25 bp, Probe sequence
aatgctacgtgatattcgggtacag

SEQ ID NO: 231069 - DNA, 25 bp, Probe sequence
aatcggccatgcgctattgattatg

SEQ ID NO: 231070 - DNA, 25 bp, Probe sequence
aattcaaattaatgcaggccaacta

SEQ ID NO: 231071 - DNA, 25 bp, Probe sequence
cagcaaacgtatgtgttgtcggata

SEQ ID NO: 231072 - DNA, 25 bp, Probe sequence
cgctctgatgattttagtcgttaca

SEQ ID NO: 231073 - DNA, 25 bp, Probe sequence
cgccactatacgctctgatgatttt

SEQ ID NO: 231074 - DNA, 25 bp, Probe sequence
gctggtatggatgaactacgtcgat

SEQ ID NO: 231075 - DNA, 25 bp, Probe sequence
gcggagaaattcagcgtttagcgat

SEQ ID NO: 231076 - DNA, 25 bp, Probe sequence
gctcgccatgtttttcttaagtggt

SEQ ID NO: 231077 - DNA, 25 bp, Probe sequence
gagcgccttatttctcataaagcta

SEQ ID NO: 231078 - DNA, 25 bp, Probe sequence
gaggcgaaaagattgcgattgtggg

SEQ ID NO: 231079 - DNA, 25 bp, Probe sequence
gatggtcatacattatctggcggag

SEQ ID NO: 231080 - DNA, 25 bp, Probe sequence
gatttaactttattgtcacgttttg

SEQ ID NO: 231081 - DNA, 25 bp, Probe sequence
gttagctatagttgttggtgtttgt

SEQ ID NO: 231082 - DNA, 25 bp, Probe sequence
gtttaccgtaaactgagttctagtg

SEQ ID NO: 231083 - DNA, 25 bp, Probe sequence
gtcacgttttgagaccatcattgtg

SEQ ID NO: 231084 - DNA, 25 bp, Probe sequence
gtgacacaaagtgcacttggtgcgc

SEQ ID NO: 231085 - DNA, 25 bp, Probe sequence
tgatattcgggtacagtttttcggt

SEQ ID NO: 231086 - DNA, 25 bp, Probe sequence
ttggcgttcatttcaatcggccatg

SEQ ID NO: 231087 - DNA, 25 bp, Probe sequence
tacgtgtttattatccaccagtcgt

SEQ ID NO: 231088 - DNA, 25 bp, Probe sequence
tactcgatacgtagagcgccttatt

SEQ ID NO: 231089 - DNA, 25 bp, Probe sequence
tttagttgcgctcgccatgtttttc

SEQ ID NO: 231090 - DNA, 25 bp, Probe sequence
ttgtggaagtttagttgcgctcgcc

SEQ ID NO: 231091 - DNA, 25 bp, Probe sequence
attggcatgcaattaccattaacga

SEQ ID NO: 231092 - DNA, 25 bp, Probe sequence
attggatatgctacaatttacgtaa

SEQ ID NO: 231093 - DNA, 25 bp, Probe sequence
atcaaccaaatgcaatttatgaatt

SEQ ID NO: 231094 - DNA, 25 bp, Probe sequence
atctgttctacgtttgaaaggttat

SEQ ID NO: 231095 - DNA, 25 bp, Probe sequence
agatccgcaaatcgttaatttcttt

SEQ ID NO: 231096 - DNA, 25 bp, Probe sequence
aaaccacgttactgacacattatat

SEQ ID NO: 231097 - DNA, 25 bp, Probe sequence
aacaagaacttgtctatgaactaaa

SEQ ID NO: 231098 - DNA, 25 bp, Probe sequence
aaggggacgttaatcatgtcatcat

SEQ ID NO: 231099 - DNA, 25 bp, Probe sequence
aatggttgtgtttgttgcgatctta

SEQ ID NO: 231100 - DNA, 25 bp, Probe sequence
aatcatcatgaatgaattcggtact

SEQ ID NO: 231101 - DNA, 25 bp, Probe sequence
caaatcacatacgtaatcaattgga

SEQ ID NO: 231102 - DNA, 25 bp, Probe sequence
catcatcaccatcatcatgggatta

SEQ ID NO: 231103 - DNA, 25 bp, Probe sequence
cggaatctgttctacgtttgaaagg

SEQ ID NO: 231104 - DNA, 25 bp, Probe sequence
ccacgttactgacacattatattag

SEQ ID NO: 231105 - DNA, 25 bp, Probe sequence
gcatgtcaagatccgcaaatcgtta

SEQ ID NO: 231106 - DNA, 25 bp, Probe sequence
gcaattaccattaacgattgttatt

SEQ ID NO: 231107 - DNA, 25 bp, Probe sequence
gaatatccataattaacggattttt

SEQ ID NO: 231108 - DNA, 25 bp, Probe sequence
gaacgtcatcaatataccgaaaata

SEQ ID NO: 231109 - DNA, 25 bp, Probe sequence
gaaaatacagtttcgctgatggaag

SEQ ID NO: 231110 - DNA, 25 bp, Probe sequence
gaaactttagatacaaatcacatac

SEQ ID NO: 231111 - DNA, 25 bp, Probe sequence
gaaactaagtgacatgattattatt

SEQ ID NO: 231112 - DNA, 25 bp, Probe sequence
gaaattgaagtccattcattgatta

SEQ ID NO: 231113 - DNA, 25 bp, Probe sequence
gattaatggttgtgtttgttgcgat

SEQ ID NO: 231114 - DNA, 25 bp, Probe sequence
gttgcgatcttaaacaagaacttgt

SEQ ID NO: 231115 - DNA, 25 bp, Probe sequence
gttattattggtgaaactttagata

SEQ ID NO: 231116 - DNA, 25 bp, Probe sequence
gtctatgaactaaaagccattgctt

SEQ ID NO: 231117 - DNA, 25 bp, Probe sequence
gtggtaaaaccacgttactgacaca

SEQ ID NO: 231118 - DNA, 25 bp, Probe sequence
ggtgtattagatgcgactcgatttt

SEQ ID NO: 231119 - DNA, 25 bp, Probe sequence
ggttgtgtttgttgcgatcttaaac

SEQ ID NO: 231120 - DNA, 25 bp, Probe sequence
ggacgttaatcatgtcatcatagaa

SEQ ID NO: 231121 - DNA, 25 bp, Probe sequence
tccgcaaatcgttaatttctttgaa

SEQ ID NO: 231122 - DNA, 25 bp, Probe sequence
tacgtaatcaattggatatgctaca

SEQ ID NO: 231123 - DNA, 25 bp, Probe sequence
tatggtgtattagatgcgactcgat

SEQ ID NO: 231124 - DNA, 25 bp, Probe sequence
ttactagttgcatgtcaagatccgc

SEQ ID NO: 231125 - DNA, 25 bp, Probe sequence
atgcagtcattgtattactattaaa

SEQ ID NO: 231126 - DNA, 25 bp, Probe sequence
atgacattattcggacttttctttg

SEQ ID NO: 231127 - DNA, 25 bp, Probe sequence
agtggcgcggcattctttggaatta

SEQ ID NO: 231128 - DNA, 25 bp, Probe sequence
acgcaaatttatagttattccgtat

SEQ ID NO: 231129 - DNA, 25 bp, Probe sequence
actaagtcttatattaacagtgctt

SEQ ID NO: 231130 - DNA, 25 bp, Probe sequence
acattataaacgcacattgttacta

SEQ ID NO: 231131 - DNA, 25 bp, Probe sequence
aacaatgacattattcggacttttc

SEQ ID NO: 231132 - DNA, 25 bp, Probe sequence
aacgcacattgttactaagtcttat

SEQ ID NO: 231133 - DNA, 25 bp, Probe sequence
aatttatgcagtcattgtattacta

SEQ ID NO: 231134 - DNA, 25 bp, Probe sequence
caatgacattattcggacttttctt

SEQ ID NO: 231135 - DNA, 25 bp, Probe sequence
cattattcggacttttctttgcgta

SEQ ID NO: 231136 - DNA, 25 bp, Probe sequence
cttagtggcgcggcattctttggaa

SEQ ID NO: 231137 - DNA, 25 bp, Probe sequence
gcggcattctttggaattatttatg

SEQ ID NO: 231138 - DNA, 25 bp, Probe sequence
gcacattgttactaagtcttatatt

SEQ ID NO: 231139 - DNA, 25 bp, Probe sequence
gacattattcggacttttctttgcg

SEQ ID NO: 231140 - DNA, 25 bp, Probe sequence
gataaacgtttcgaacaattaagat

SEQ ID NO: 231141 - DNA, 25 bp, Probe sequence
gtggcgcggcattctttggaattat

SEQ ID NO: 231142 - DNA, 25 bp, Probe sequence
ggacttttctttgcgtataatgtag

SEQ ID NO: 231143 - DNA, 25 bp, Probe sequence
ggcgcggcattctttggaattattt

SEQ ID NO: 231144 - DNA, 25 bp, Probe sequence
tgtagtcattttgttcatagcattt

SEQ ID NO: 231145 - DNA, 25 bp, Probe sequence
tcgaacaattaagatttgaacgcaa

SEQ ID NO: 231146 - DNA, 25 bp, Probe sequence
tcggacttttctttgcgtataatgt

SEQ ID NO: 231147 - DNA, 25 bp, Probe sequence
taaacgcacattgttactaagtctt

SEQ ID NO: 231148 - DNA, 25 bp, Probe sequence
taacagtgcttagtggcgcggcatt

SEQ ID NO: 231149 - DNA, 25 bp, Probe sequence
taaatattttctattctgatttgaa

SEQ ID NO: 231150 - DNA, 25 bp, Probe sequence
tactattaaatattttctattctga

SEQ ID NO: 231151 - DNA, 25 bp, Probe sequence
tatgtttatggcattaatcattttt

SEQ ID NO: 231152 - DNA, 25 bp, Probe sequence
tattaacagtgcttagtggcgcggc

SEQ ID NO: 231153 - DNA, 25 bp, Probe sequence
tattcggacttttctttgcgtataa

SEQ ID NO: 231154 - DNA, 25 bp, Probe sequence
tttggaattatttatgtttatggca

SEQ ID NO: 231155 - DNA, 25 bp, Probe sequence
tttctttgcgtataatgtagtcatt

SEQ ID NO: 231156 - DNA, 25 bp, Probe sequence
ttattcggacttttctttgcgtata

SEQ ID NO: 231157 - DNA, 25 bp, Probe sequence
ttagtggcgcggcattctttggaat

SEQ ID NO: 231158 - DNA, 25 bp, Probe sequence
ttcggacttttctttgcgtataatg

SEQ ID NO: 231159 - DNA, 25 bp, Probe sequence
aggtaaaggtggtcatggttcatca

SEQ ID NO: 231160 - DNA, 25 bp, Probe sequence
agtttactgagtacgtggctaagac

SEQ ID NO: 231161 - DNA, 25 bp, Probe sequence
agacgttatttacatcagcatccag

SEQ ID NO: 231162 - DNA, 25 bp, Probe sequence
acatgcttgtattagcagagacgct

SEQ ID NO: 231163 - DNA, 25 bp, Probe sequence
aacagttgtatctagacgactaagt

SEQ ID NO: 231164 - DNA, 25 bp, Probe sequence
aaccacaaccaccttcagaagactt

SEQ ID NO: 231165 - DNA, 25 bp, Probe sequence
aatggtgtattagacggtgttgatc

SEQ ID NO: 231166 - DNA, 25 bp, Probe sequence
caatcggttcatttgacggtaaagg

SEQ ID NO: 231167 - DNA, 25 bp, Probe sequence
cagcatccagaattatcttttcatg

SEQ ID NO: 231168 - DNA, 25 bp, Probe sequence
cattagcaatccgtgcagactttga

SEQ ID NO: 231169 - DNA, 25 bp, Probe sequence
gaaacctggtaaaacattagcaatc

SEQ ID NO: 231170 - DNA, 25 bp, Probe sequence
gacgactaagtccatttgaaaccgg

SEQ ID NO: 231171 - DNA, 25 bp, Probe sequence
gacggtgttgatcatgtattaggtg

SEQ ID NO: 231172 - DNA, 25 bp, Probe sequence
gtagctacttcgtcacagcgttaca

SEQ ID NO: 231173 - DNA, 25 bp, Probe sequence
gtacgtggattaacagatgctacaa

SEQ ID NO: 231174 - DNA, 25 bp, Probe sequence
gtaacgattgattcagggaaacctg

SEQ ID NO: 231175 - DNA, 25 bp, Probe sequence
gtcgttgtgatacatcaaccagctg

SEQ ID NO: 231176 - DNA, 25 bp, Probe sequence
gtccatttgaaaccggtgttgtcac

SEQ ID NO: 231177 - DNA, 25 bp, Probe sequence
gtgcctttatttatacaggtgcagc

SEQ ID NO: 231178 - DNA, 25 bp, Probe sequence
gtgtattacagacctggttatgttc

SEQ ID NO: 231179 - DNA, 25 bp, Probe sequence
ggtgttatgcacgcatgtggtcacg

SEQ ID NO: 231180 - DNA, 25 bp, Probe sequence
ggtgttgtcacaatcggttcatttg

SEQ ID NO: 231181 - DNA, 25 bp, Probe sequence
ggtgaaatttacccacatcatcatc

SEQ ID NO: 231182 - DNA, 25 bp, Probe sequence
ggttatgttcaaacaggacgcgcat

SEQ ID NO: 231183 - DNA, 25 bp, Probe sequence
ggccaatgatgccattgttgcaggt

SEQ ID NO: 231184 - DNA, 25 bp, Probe sequence
ggcgaaatacatcgctgaattttac

SEQ ID NO: 231185 - DNA, 25 bp, Probe sequence
tgttgcaggtagctacttcgtcaca

SEQ ID NO: 231186 - DNA, 25 bp, Probe sequence
tgcacgcatgtggtcacgatgcaca

SEQ ID NO: 231187 - DNA, 25 bp, Probe sequence
tcgtcacagcgttacaaacagttgt

SEQ ID NO: 231188 - DNA, 25 bp, Probe sequence
tcaaccagctgaagaagtaccacca

SEQ ID NO: 231189 - DNA, 25 bp, Probe sequence
tacaggattatcttttgcatcacaa

SEQ ID NO: 231190 - DNA, 25 bp, Probe sequence
tacccacatcatcatcctaaattta

SEQ ID NO: 231191 - DNA, 25 bp, Probe sequence
tagggacagttgttttagattacct

SEQ ID NO: 231192 - DNA, 25 bp, Probe sequence
ttaggtgtacacgtcatgagcacaa

SEQ ID NO: 231193 - DNA, 25 bp, Probe sequence
atttcgctaacctctacgttacact

SEQ ID NO: 231194 - DNA, 25 bp, Probe sequence
attgtacttgcatttttcgttcctt

SEQ ID NO: 231195 - DNA, 25 bp, Probe sequence
attgcacttatcacgctttttaata

SEQ ID NO: 231196 - DNA, 25 bp, Probe sequence
attacatccgattgactctgcatcc

SEQ ID NO: 231197 - DNA, 25 bp, Probe sequence
attacttcagtacaagctgtgtcaa

SEQ ID NO: 231198 - DNA, 25 bp, Probe sequence
atcatcagcgttaatacctgttttt

SEQ ID NO: 231199 - DNA, 25 bp, Probe sequence
agaattgcataaacttggccccgtt

SEQ ID NO: 231200 - DNA, 25 bp, Probe sequence
aaaacatttacctattatcgcgaca

SEQ ID NO: 231201 - DNA, 25 bp, Probe sequence
tatagttgtactattactcccggca

SEQ ID NO: 231202 - DNA, 25 bp, Probe sequence
cagctagagcaggggcagttgtacc

SEQ ID NO: 231203 - DNA, 25 bp, Probe sequence
cattatttttggctgctgctatgca

SEQ ID NO: 231204 - DNA, 25 bp, Probe sequence
ctacgttacacttaggagaccagtc

SEQ ID NO: 231205 - DNA, 25 bp, Probe sequence
gcagcgccttggtccatagttatgt

SEQ ID NO: 231206 - DNA, 25 bp, Probe sequence
gactctgcatccattactattattg

SEQ ID NO: 231207 - DNA, 25 bp, Probe sequence
gagaccagtctataggatttgtttt

SEQ ID NO: 231208 - DNA, 25 bp, Probe sequence
gagtgcaacaagtttatcatcagcg

SEQ ID NO: 231209 - DNA, 25 bp, Probe sequence
gagtggttcttatatgcagcgcctt

SEQ ID NO: 231210 - DNA, 25 bp, Probe sequence
gatgtttcatggggcgagtggttct

SEQ ID NO: 231211 - DNA, 25 bp, Probe sequence
gatgttattattactgttttggtca

SEQ ID NO: 231212 - DNA, 25 bp, Probe sequence
gatagcaagttagcgtctttattaa

SEQ ID NO: 231213 - DNA, 25 bp, Probe sequence
gattcatttgggctttgcgagtgca

SEQ ID NO: 231214 - DNA, 25 bp, Probe sequence
gttggcttatggcactggtactttt

SEQ ID NO: 231215 - DNA, 25 bp, Probe sequence
gtatcatatccggtgtcagcaactt

SEQ ID NO: 231216 - DNA, 25 bp, Probe sequence
gtgcacctcaaaatatgttggctta

SEQ ID NO: 231217 - DNA, 25 bp, Probe sequence
gtgatgcctccagaaattaatacaa

SEQ ID NO: 231218 - DNA, 25 bp, Probe sequence
gtgggtaacggaagctgtatcatat

SEQ ID NO: 231219 - DNA, 25 bp, Probe sequence
ggcagttgtaccaatcttgctgggt

SEQ ID NO: 231220 - DNA, 25 bp, Probe sequence
ggcggcagcacaaaatatcgtagcg

SEQ ID NO: 231221 - DNA, 25 bp, Probe sequence
tcttattacctgttagtgcacctca

SEQ ID NO: 231222 - DNA, 25 bp, Probe sequence
tagcttttgcagttattatgtgggt

SEQ ID NO: 231223 - DNA, 25 bp, Probe sequence
tatcgcgacaattgcacttatcacg

SEQ ID NO: 231224 - DNA, 25 bp, Probe sequence
tattggtatcaaaacggcggcagca

SEQ ID NO: 231225 - DNA, 25 bp, Probe sequence
tttcgttccttctgcaacagctaga

SEQ ID NO: 231226 - DNA, 25 bp, Probe sequence
ttatcgtgtttggtgtaggtatttc

SEQ ID NO: 231227 - DNA, 25 bp, Probe sequence
attctttagaaagcaccttattgac

SEQ ID NO: 231228 - DNA, 25 bp, Probe sequence
agaggacatgtcttcagcttctgat

SEQ ID NO: 231229 - DNA, 25 bp, Probe sequence
agcggaagagactatttacctgaag

SEQ ID NO: 231230 - DNA, 25 bp, Probe sequence
accaatcgttgcacgcagaaaagct

SEQ ID NO: 231231 - DNA, 25 bp, Probe sequence
acaagtcagctaagtgttgctttag

SEQ ID NO: 231232 - DNA, 25 bp, Probe sequence
aaatggcgaccttacttgaggcata

SEQ ID NO: 231233 - DNA, 25 bp, Probe sequence
aaacatatcttccgatttttaatca

SEQ ID NO: 231234 - DNA, 25 bp, Probe sequence
aatgatttattggcgcgttatgatg

SEQ ID NO: 231235 - DNA, 25 bp, Probe sequence
caccttattgactatgatgcagcat

SEQ ID NO: 231236 - DNA, 25 bp, Probe sequence
cgcaatgagtccaacctttttgaac

SEQ ID NO: 231237 - DNA, 25 bp, Probe sequence
gcttctacaggtacggatgcagtgc

SEQ ID NO: 231238 - DNA, 25 bp, Probe sequence
gcatcacctgatgatttagtgtttg

SEQ ID NO: 231239 - DNA, 25 bp, Probe sequence
gcagcgcttttaccaatcgttgcac

SEQ ID NO: 231240 - DNA, 25 bp, Probe sequence
gaattgacacaaactggttttatgc

SEQ ID NO: 231241 - DNA, 25 bp, Probe sequence
gtgcgaagggcaaacaggatttcca

SEQ ID NO: 231242 - DNA, 25 bp, Probe sequence
gaatgagaatggttgtgtcgcaatt

SEQ ID NO: 231243 - DNA, 25 bp, Probe sequence
gaagcatttatacgtgaactcattt

SEQ ID NO: 231244 - DNA, 25 bp, Probe sequence
gaaagcacagttttatcgcggtact

SEQ ID NO: 231245 - DNA, 25 bp, Probe sequence
gacgatatcatttcattttgtaaag

SEQ ID NO: 231246 - DNA, 25 bp, Probe sequence
gatgcatgttattttatcattccgg

SEQ ID NO: 231247 - DNA, 25 bp, Probe sequence
gatgcagtgccgtattttagaatgt

SEQ ID NO: 231248 - DNA, 25 bp, Probe sequence
gatgcagcatcaaatattcatggat

SEQ ID NO: 231249 - DNA, 25 bp, Probe sequence
gatacacaacgcaatgagtccaacc

SEQ ID NO: 231250 - DNA, 25 bp, Probe sequence
gttgctttagcatatggattattag

SEQ ID NO: 231251 - DNA, 25 bp, Probe sequence
gtcttcagcttctgatttgaaagca

SEQ ID NO: 231252 - DNA, 25 bp, Probe sequence
gtgggaatcattactttaaagcgag

SEQ ID NO: 231253 - DNA, 25 bp, Probe sequence
gtgtcgcaatttttaaccaaagatt

SEQ ID NO: 231254 - DNA, 25 bp, Probe sequence
ggatggcaatggtctgcttctacag

SEQ ID NO: 231255 - DNA, 25 bp, Probe sequence
ggatttccaatcattgatgcagcaa

SEQ ID NO: 231256 - DNA, 25 bp, Probe sequence
ggaacacaatccattatttgaatat

SEQ ID NO: 231257 - DNA, 25 bp, Probe sequence
ggcaacattttttagatcaagatat

SEQ ID NO: 231258 - DNA, 25 bp, Probe sequence
tgaggcatagagacgtatatcacta

SEQ ID NO: 231259 - DNA, 25 bp, Probe sequence
tgaatcaacaaggggagccatacaa

SEQ ID NO: 231260 - DNA, 25 bp, Probe sequence
tatcgcggtactttgcagcgctttt

SEQ ID NO: 231261 - DNA, 25 bp, Probe sequence
attcacctaaagatatttcgattgc

SEQ ID NO: 231262 - DNA, 25 bp, Probe sequence
ataggtcctttaatcgcaggtgcgt

SEQ ID NO: 231263 - DNA, 25 bp, Probe sequence
atggcagaagtttcacatcgtatgc

SEQ ID NO: 231264 - DNA, 25 bp, Probe sequence
aggtcctttaatcgcaggtgcgtta

SEQ ID NO: 231265 - DNA, 25 bp, Probe sequence
agaagtttcacatcgtatgccattt

SEQ ID NO: 231266 - DNA, 25 bp, Probe sequence
aaactttggctacatgtcagcgatt

SEQ ID NO: 231267 - DNA, 25 bp, Probe sequence
aaaaactttggctacatgtcagcga

SEQ ID NO: 231268 - DNA, 25 bp, Probe sequence
aactttggctacatgtcagcgatta

SEQ ID NO: 231269 - DNA, 25 bp, Probe sequence
aagtttcacatcgtatgccatttta

SEQ ID NO: 231270 - DNA, 25 bp, Probe sequence
aattattcacctaaagatatttcga

SEQ ID NO: 231271 - DNA, 25 bp, Probe sequence
cagaagtttcacatcgtatgccatt

SEQ ID NO: 231272 - DNA, 25 bp, Probe sequence
cagggattggtggatttatggcaga

SEQ ID NO: 231273 - DNA, 25 bp, Probe sequence
ctttggctacatgtcagcgattatc

SEQ ID NO: 231274 - DNA, 25 bp, Probe sequence
cctttaatcgcaggtgcgttatttg

SEQ ID NO: 231275 - DNA, 25 bp, Probe sequence
gctacatgtcagcgattatcaattc

SEQ ID NO: 231276 - DNA, 25 bp, Probe sequence
gcagaagtttcacatcgtatgccat

SEQ ID NO: 231277 - DNA, 25 bp, Probe sequence
gcaaaaaactttggctacatgtcag

SEQ ID NO: 231278 - DNA, 25 bp, Probe sequence
gaagtttcacatcgtatgccatttt

SEQ ID NO: 231279 - DNA, 25 bp, Probe sequence
gattcattttaggaccagggattgg

SEQ ID NO: 231280 - DNA, 25 bp, Probe sequence
gattggtggatttatggcagaagtt

SEQ ID NO: 231281 - DNA, 25 bp, Probe sequence
gtcctttaatcgcaggtgcgttatt

SEQ ID NO: 231282 - DNA, 25 bp, Probe sequence
gggattggtggatttatggcagaag

SEQ ID NO: 231283 - DNA, 25 bp, Probe sequence
ggtcctttaatcgcaggtgcgttat

SEQ ID NO: 231284 - DNA, 25 bp, Probe sequence
ggatttatggcagaagtttcacatc

SEQ ID NO: 231285 - DNA, 25 bp, Probe sequence
ggattcattttaggaccagggattg

SEQ ID NO: 231286 - DNA, 25 bp, Probe sequence
ggctacatgtcagcgattatcaatt

SEQ ID NO: 231287 - DNA, 25 bp, Probe sequence
tggtggatttatggcagaagtttca

SEQ ID NO: 231288 - DNA, 25 bp, Probe sequence
tcaccaagccatcaaaaagcaaaaa

SEQ ID NO: 231289 - DNA, 25 bp, Probe sequence
taatcgcaggtgcgttatttgatgt

SEQ ID NO: 231290 - DNA, 25 bp, Probe sequence
taggaccagggattggtggatttat

SEQ ID NO: 231291 - DNA, 25 bp, Probe sequence
taggtcctttaatcgcaggtgcgtt

SEQ ID NO: 231292 - DNA, 25 bp, Probe sequence
tttcaccaagccatcaaaaagcaaa

SEQ ID NO: 231293 - DNA, 25 bp, Probe sequence
ttatggcagaagtttcacatcgtat

SEQ ID NO: 231294 - DNA, 25 bp, Probe sequence
ttggctacatgtcagcgattatcaa

SEQ ID NO: 231295 - DNA, 25 bp, Probe sequence
attgctgatcgttatgcagataagc

SEQ ID NO: 231296 - DNA, 25 bp, Probe sequence
attcttttaacgaacaagagtgcca

SEQ ID NO: 231297 - DNA, 25 bp, Probe sequence
attaatacgcttaacgcgataaatg

SEQ ID NO: 231298 - DNA, 25 bp, Probe sequence
atttttaggctttgttgctgtaata

SEQ ID NO: 231299 - DNA, 25 bp, Probe sequence
atttcaaatcaaggcataataacga

SEQ ID NO: 231300 - DNA, 25 bp, Probe sequence
atatcaatgataattatggtttaga

SEQ ID NO: 231301 - DNA, 25 bp, Probe sequence
atgcgcttgctaaggtacataaaac

SEQ ID NO: 231302 - DNA, 25 bp, Probe sequence
atgaagatgcgcttgctaaggtaca

SEQ ID NO: 231303 - DNA, 25 bp, Probe sequence
agatgcgcttgctaaggtacataaa

SEQ ID NO: 231304 - DNA, 25 bp, Probe sequence
aacgcgataaatgtatcaactgaag

SEQ ID NO: 231305 - DNA, 25 bp, Probe sequence
aagagtgccaagttattgctgatcg

SEQ ID NO: 231306 - DNA, 25 bp, Probe sequence
aagttattgctgatcgttatgcaga

SEQ ID NO: 231307 - DNA, 25 bp, Probe sequence
aatttatttttaggctttgttgctg

SEQ ID NO: 231308 - DNA, 25 bp, Probe sequence
caacaaatgaagatgcgcttgctaa

SEQ ID NO: 231309 - DNA, 25 bp, Probe sequence
gccaagttattgctgatcgttatgc

SEQ ID NO: 231310 - DNA, 25 bp, Probe sequence
gcaaataaatcaaattcttttaacg

SEQ ID NO: 231311 - DNA, 25 bp, Probe sequence
gcaacatgtaagtatttcaaatcaa

SEQ ID NO: 231312 - DNA, 25 bp, Probe sequence
gaatttctaagacaaatcatggata

SEQ ID NO: 231313 - DNA, 25 bp, Probe sequence
gaagatgcgcttgctaaggtacata

SEQ ID NO: 231314 - DNA, 25 bp, Probe sequence
gaacaagagtgccaagttattgctg

SEQ ID NO: 231315 - DNA, 25 bp, Probe sequence
gagtgccaagttattgctgatcgtt

SEQ ID NO: 231316 - DNA, 25 bp, Probe sequence
gatcgttatgcagataagcatatca

SEQ ID NO: 231317 - DNA, 25 bp, Probe sequence
gatattctcaatattcatactgcta

SEQ ID NO: 231318 - DNA, 25 bp, Probe sequence
gttgctgtaatattaaccgtttgtt

SEQ ID NO: 231319 - DNA, 25 bp, Probe sequence
gttattgctgatcgttatgcagata

SEQ ID NO: 231320 - DNA, 25 bp, Probe sequence
gtaagcaacatgtaagtatttcaaa

SEQ ID NO: 231321 - DNA, 25 bp, Probe sequence
gtaagtatttcaaatcaaggcataa

SEQ ID NO: 231322 - DNA, 25 bp, Probe sequence
gtgccaagttattgctgatcgttat

SEQ ID NO: 231323 - DNA, 25 bp, Probe sequence
ggctttgttgctgtaatattaaccg

SEQ ID NO: 231324 - DNA, 25 bp, Probe sequence
tgctgtaatattaaccgtttgttta

SEQ ID NO: 231325 - DNA, 25 bp, Probe sequence
tacgcttaacgcgataaatgtatca

SEQ ID NO: 231326 - DNA, 25 bp, Probe sequence
tattctcaatattcatactgctaaa

SEQ ID NO: 231327 - DNA, 25 bp, Probe sequence
tttaggctttgttgctgtaatatta

SEQ ID NO: 231328 - DNA, 25 bp, Probe sequence
ttatttttaggctttgttgctgtaa

SEQ ID NO: 231329 - DNA, 25 bp, Probe sequence
atatcagtgtgagtggtgggcttcg

SEQ ID NO: 231330 - DNA, 25 bp, Probe sequence
atagctgttgaggatttgattacaa

SEQ ID NO: 231331 - DNA, 25 bp, Probe sequence
atagctttgaggtaccagaagaaca

SEQ ID NO: 231332 - DNA, 25 bp, Probe sequence
aacattgtttccaacagtcgttgac

SEQ ID NO: 231333 - DNA, 25 bp, Probe sequence
aacgcgatgcgtatgcttgatcgtg

SEQ ID NO: 231334 - DNA, 25 bp, Probe sequence
aagttcatagctttgaggtaccaga

SEQ ID NO: 231335 - DNA, 25 bp, Probe sequence
aattggagcagttatccatgaatga

SEQ ID NO: 231336 - DNA, 25 bp, Probe sequence
cattgtttccaacagtcgttgacaa

SEQ ID NO: 231337 - DNA, 25 bp, Probe sequence
cattttgtatttgttatcccagtaa

SEQ ID NO: 231338 - DNA, 25 bp, Probe sequence
cgggatacattcgtggtgggtgttc

SEQ ID NO: 231339 - DNA, 25 bp, Probe sequence
cgcgatgcgtatgcttgatcgtgca

SEQ ID NO: 231340 - DNA, 25 bp, Probe sequence
gaacattttgtatttgttatcccag

SEQ ID NO: 231341 - DNA, 25 bp, Probe sequence
gaaaacattgtttccaacagtcgtt

SEQ ID NO: 231342 - DNA, 25 bp, Probe sequence
gaaaattatagtcatatcagtgtga

SEQ ID NO: 231343 - DNA, 25 bp, Probe sequence
gagtggtgggcttcgaacaatgcaa

SEQ ID NO: 231344 - DNA, 25 bp, Probe sequence
gatgcgtatgcttgatcgtgcaaaa

SEQ ID NO: 231345 - DNA, 25 bp, Probe sequence
gttgaggatttgattacaataacta

SEQ ID NO: 231346 - DNA, 25 bp, Probe sequence
gttcatagctttgaggtaccagaag

SEQ ID NO: 231347 - DNA, 25 bp, Probe sequence
gtatttgttatcccagtaagtgaaa

SEQ ID NO: 231348 - DNA, 25 bp, Probe sequence
gtatgcttgatcgtgcaaaaattaa

SEQ ID NO: 231349 - DNA, 25 bp, Probe sequence
gtaacgggatacattcgtggtgggt

SEQ ID NO: 231350 - DNA, 25 bp, Probe sequence
gtgtgagtggtgggcttcgaacaat

SEQ ID NO: 231351 - DNA, 25 bp, Probe sequence
gtgagtggtgggcttcgaacaatgc

SEQ ID NO: 231352 - DNA, 25 bp, Probe sequence
gtggtgggcttcgaacaatgcaaat

SEQ ID NO: 231353 - DNA, 25 bp, Probe sequence
gtgggcttcgaacaatgcaaatcac

SEQ ID NO: 231354 - DNA, 25 bp, Probe sequence
ggtgggcttcgaacaatgcaaatca

SEQ ID NO: 231355 - DNA, 25 bp, Probe sequence
tgtttccaacagtcgttgacaaatc

SEQ ID NO: 231356 - DNA, 25 bp, Probe sequence
tgttggtatgaaaacattgtttcca

SEQ ID NO: 231357 - DNA, 25 bp, Probe sequence
tgttatcccagtaagtgaaacttta

SEQ ID NO: 231358 - DNA, 25 bp, Probe sequence
tgcgtatgcttgatcgtgcaaaaat

SEQ ID NO: 231359 - DNA, 25 bp, Probe sequence
tcagtgtgagtggtgggcttcgaac

SEQ ID NO: 231360 - DNA, 25 bp, Probe sequence
tttgaggtaccagaagaacatttat

SEQ ID NO: 231361 - DNA, 25 bp, Probe sequence
tttagatatgaaaaaggcagctgct

SEQ ID NO: 231362 - DNA, 25 bp, Probe sequence
ttgtatttgttatcccagtaagtga

SEQ ID NO: 231363 - DNA, 25 bp, Probe sequence
atattttgctcgtgtacctttgcta

SEQ ID NO: 231364 - DNA, 25 bp, Probe sequence
atgctggttcatctacattggagct

SEQ ID NO: 231365 - DNA, 25 bp, Probe sequence
agatttatctaaactacaacaatta

SEQ ID NO: 231366 - DNA, 25 bp, Probe sequence
agaaaatacacttgctacgattggt

SEQ ID NO: 231367 - DNA, 25 bp, Probe sequence
actactcccgatgagcaagaggcat

SEQ ID NO: 231368 - DNA, 25 bp, Probe sequence
aaagtatattttgctcgtgtacctt

SEQ ID NO: 231369 - DNA, 25 bp, Probe sequence
aaagcttttatcgggatgaatggat

SEQ ID NO: 231370 - DNA, 25 bp, Probe sequence
aaacaattatgctaggtggtcaagt

SEQ ID NO: 231371 - DNA, 25 bp, Probe sequence
aaaatagcagctaatcaaatcaacg

SEQ ID NO: 231372 - DNA, 25 bp, Probe sequence
aacacatgtagaagctttacttaaa

SEQ ID NO: 231373 - DNA, 25 bp, Probe sequence
aacgtgtgcatggtggtgcaatgtt

SEQ ID NO: 231374 - DNA, 25 bp, Probe sequence
caatcatcacatctgaaaaagcatt

SEQ ID NO: 231375 - DNA, 25 bp, Probe sequence
cagcaatgtcattagccaatcaatc

SEQ ID NO: 231376 - DNA, 25 bp, Probe sequence
gcgaaagatatcattgtggtaacca

SEQ ID NO: 231377 - DNA, 25 bp, Probe sequence
gcacaaagattttttgactttacaa

SEQ ID NO: 231378 - DNA, 25 bp, Probe sequence
gaatgcttatttatcgatgctggtt

SEQ ID NO: 231379 - DNA, 25 bp, Probe sequence
gaatggattagatattgaacttgga

SEQ ID NO: 231380 - DNA, 25 bp, Probe sequence
gaacttggattaactactcccgatg

SEQ ID NO: 231381 - DNA, 25 bp, Probe sequence
gaaagtacgacaatcatcacatctg

SEQ ID NO: 231382 - DNA, 25 bp, Probe sequence
gacgatattgtttcgataaagcttt

SEQ ID NO: 231383 - DNA, 25 bp, Probe sequence
gtatcactttataggagggacttta

SEQ ID NO: 231384 - DNA, 25 bp, Probe sequence
gtacgacaatcatcacatctgaaaa

SEQ ID NO: 231385 - DNA, 25 bp, Probe sequence
gtaaccaatggtttaacacatgtag

SEQ ID NO: 231386 - DNA, 25 bp, Probe sequence
gtgtacctttgctagaaagtacgac

SEQ ID NO: 231387 - DNA, 25 bp, Probe sequence
ggttcatctacattggagctaatta

SEQ ID NO: 231388 - DNA, 25 bp, Probe sequence
ggattaactactcccgatgagcaag

SEQ ID NO: 231389 - DNA, 25 bp, Probe sequence
ggagctaattaaatatattcaagcg

SEQ ID NO: 231390 - DNA, 25 bp, Probe sequence
tgagcaagaggcattagttaaacaa

SEQ ID NO: 231391 - DNA, 25 bp, Probe sequence
tcatttgtacttatagatcattcta

SEQ ID NO: 231392 - DNA, 25 bp, Probe sequence
taaacaaacagcaatgtcattagcc

SEQ ID NO: 231393 - DNA, 25 bp, Probe sequence
tatgctaggtggtcaagttaaagaa

SEQ ID NO: 231394 - DNA, 25 bp, Probe sequence
tttgctcgtgtacctttgctagaaa

SEQ ID NO: 231395 - DNA, 25 bp, Probe sequence
ttatcgatgctggttcatctacatt

SEQ ID NO: 231396 - DNA, 25 bp, Probe sequence
ttagccaatcaatcatttgtactta

SEQ ID NO: 231397 - DNA, 25 bp, Probe sequence
attgactatgtcatttttacgaatg

SEQ ID NO: 231398 - DNA, 25 bp, Probe sequence
atttcctgggaaattcattatagat

SEQ ID NO: 231399 - DNA, 25 bp, Probe sequence
acgtcaacacaatttgaacaactgt

SEQ ID NO: 231400 - DNA, 25 bp, Probe sequence
actgccacggcatttgatgaggact

SEQ ID NO: 231401 - DNA, 25 bp, Probe sequence
acagcaacatataaattcgctgggg

SEQ ID NO: 231402 - DNA, 25 bp, Probe sequence
aacagaaatcaatgcaccgggtcct

SEQ ID NO: 231403 - DNA, 25 bp, Probe sequence
aaatcaatgcaccgggtcctcatat

SEQ ID NO: 231404 - DNA, 25 bp, Probe sequence
aaataacagtgcaattcaatcgaat

SEQ ID NO: 231405 - DNA, 25 bp, Probe sequence
aagcagtcgcatgcggtactgccac

SEQ ID NO: 231406 - DNA, 25 bp, Probe sequence
aaggtgcgcaatctgttattgtctc

SEQ ID NO: 231407 - DNA, 25 bp, Probe sequence
caatgcaccgggtcctcatataacg

SEQ ID NO: 231408 - DNA, 25 bp, Probe sequence
caacaagcagtcgcatgcggtactg

SEQ ID NO: 231409 - DNA, 25 bp, Probe sequence
catgcggtactgccacggcatttga

SEQ ID NO: 231410 - DNA, 25 bp, Probe sequence
gcgaagatatagttattgttgctgg

SEQ ID NO: 231411 - DNA, 25 bp, Probe sequence
gctaaattagtagtcgacgctgaaa

SEQ ID NO: 231412 - DNA, 25 bp, Probe sequence
gcacaaattacagcacagacaggtg

SEQ ID NO: 231413 - DNA, 25 bp, Probe sequence
gaagtgtaccaagtagtattccaag

SEQ ID NO: 231414 - DNA, 25 bp, Probe sequence
gaaagtggttaatacagttggctct

SEQ ID NO: 231415 - DNA, 25 bp, Probe sequence
gggatttgcaggtggatttcctggg

SEQ ID NO: 231416 - DNA, 25 bp, Probe sequence
gatggtttgaacagagcaacagcaa

SEQ ID NO: 231417 - DNA, 25 bp, Probe sequence
gttgataaaggtgcgcaatctgtta

SEQ ID NO: 231418 - DNA, 25 bp, Probe sequence
gtttaatacaacagtgaactcagac

SEQ ID NO: 231419 - DNA, 25 bp, Probe sequence
gtagtattccaagcgatgcgtatgc

SEQ ID NO: 231420 - DNA, 25 bp, Probe sequence
gtacagttgcaggcatggtggctgg

SEQ ID NO: 231421 - DNA, 25 bp, Probe sequence
gtgatagtacagttgcaggcatggt

SEQ ID NO: 231422 - DNA, 25 bp, Probe sequence
gggtcctcatataacgtcaacacaa

SEQ ID NO: 231423 - DNA, 25 bp, Probe sequence
ggtggctggaattgcttcaggttta

SEQ ID NO: 231424 - DNA, 25 bp, Probe sequence
ggcatggtggctggaattgcttcag

SEQ ID NO: 231425 - DNA, 25 bp, Probe sequence
ggcggtgatggtgctatttatattg

SEQ ID NO: 231426 - DNA, 25 bp, Probe sequence
tgaagttgatgaagatacacgtatt

SEQ ID NO: 231427 - DNA, 25 bp, Probe sequence
tacagttggctctggtgatagtaca

SEQ ID NO: 231428 - DNA, 25 bp, Probe sequence
tagttattgttgctggaagtgtacc

SEQ ID NO: 231429 - DNA, 25 bp, Probe sequence
ttaaagcagttaatccacaagggaa

SEQ ID NO: 231430 - DNA, 25 bp, Probe sequence
ttgatgaggacttagcaacacggga

SEQ ID NO: 231431 - DNA, 25 bp, Probe sequence
attgatatgggcggtccattcaaca

SEQ ID NO: 231432 - DNA, 25 bp, Probe sequence
atgttgagacggatcgcttcgatgg

SEQ ID NO: 231433 - DNA, 25 bp, Probe sequence
atgttgccacttgtaatatctggtg

SEQ ID NO: 231434 - DNA, 25 bp, Probe sequence
atgtcgtagaagtaccagtagcaga

SEQ ID NO: 231435 - DNA, 25 bp, Probe sequence
agtacaatgcgtttgcagagcagct

SEQ ID NO: 231436 - DNA, 25 bp, Probe sequence
agcaccaattacagctgcaatgatt

SEQ ID NO: 231437 - DNA, 25 bp, Probe sequence
acggtgtttctaacatgttgccact

SEQ ID NO: 231438 - DNA, 25 bp, Probe sequence
acacgtaagttaccacaagcattag

SEQ ID NO: 231439 - DNA, 25 bp, Probe sequence
aaagctcagagtacaatgcgtttgc

SEQ ID NO: 231440 - DNA, 25 bp, Probe sequence
aacaggtgcgttgattgaaggtaat

SEQ ID NO: 231441 - DNA, 25 bp, Probe sequence
cacgtagtattgcggataaacctgg

SEQ ID NO: 231442 - DNA, 25 bp, Probe sequence
caacgtggttcaattatccctaact

SEQ ID NO: 231443 - DNA, 25 bp, Probe sequence
ctttaatccaccagcatcttggtta

SEQ ID NO: 231444 - DNA, 25 bp, Probe sequence
ctgcttgtccaacaggtattgcaca

SEQ ID NO: 231445 - DNA, 25 bp, Probe sequence
gcgtcatttaaggaagcgattcaca

SEQ ID NO: 231446 - DNA, 25 bp, Probe sequence
gcggcatatgtttttgcaacaggtg

SEQ ID NO: 231447 - DNA, 25 bp, Probe sequence
gctacaggcttattgatgatttatg

SEQ ID NO: 231448 - DNA, 25 bp, Probe sequence
gaatcacaaagtacaactggtatcg

SEQ ID NO: 231449 - DNA, 25 bp, Probe sequence
gaagaggcagaagctgaagcacaac

SEQ ID NO: 231450 - DNA, 25 bp, Probe sequence
gatgctttagctaagttgtctggta

SEQ ID NO: 231451 - DNA, 25 bp, Probe sequence
gttgcaactgcagaacaatcatcta

SEQ ID NO: 231452 - DNA, 25 bp, Probe sequence
gttgctgctgatgttcatgttgaga

SEQ ID NO: 231453 - DNA, 25 bp, Probe sequence
gttagcaatttcaggtggttcagga

SEQ ID NO: 231454 - DNA, 25 bp, Probe sequence
gttagcaattgcgacagcgatgtta

SEQ ID NO: 231455 - DNA, 25 bp, Probe sequence
gtatgattccaccgttagcaattgc

SEQ ID NO: 231456 - DNA, 25 bp, Probe sequence
gtagcagatggtattaaacgcccag

SEQ ID NO: 231457 - DNA, 25 bp, Probe sequence
ggtggttcaggatttattggtggta

SEQ ID NO: 231458 - DNA, 25 bp, Probe sequence
ggtggtattattgcaggtttcttag

SEQ ID NO: 231459 - DNA, 25 bp, Probe sequence
ggtccattcaacaaagcggcatatg

SEQ ID NO: 231460 - DNA, 25 bp, Probe sequence
ggtcttgtaggtggtatgttagcaa

SEQ ID NO: 231461 - DNA, 25 bp, Probe sequence
ggtatcattgttgctgctgatgttc

SEQ ID NO: 231462 - DNA, 25 bp, Probe sequence
taaaccttttgttgcccgtgatggt

SEQ ID NO: 231463 - DNA, 25 bp, Probe sequence
ttattctttatgattgcagcgccag

SEQ ID NO: 231464 - DNA, 25 bp, Probe sequence
ttatctggattcattgcacgtagta

SEQ ID NO: 231465 - DNA, 25 bp, Probe sequence
atttaattaccgatgcaatgcgtgc

SEQ ID NO: 231466 - DNA, 25 bp, Probe sequence
atacgttgtacgcccatttatcgat

SEQ ID NO: 231467 - DNA, 25 bp, Probe sequence
ataccgaaatgattgttgatggcac

SEQ ID NO: 231468 - DNA, 25 bp, Probe sequence
atgcctgaaggagaatatgatttgg

SEQ ID NO: 231469 - DNA, 25 bp, Probe sequence
atgcagcggaaattgtaggtataca

SEQ ID NO: 231470 - DNA, 25 bp, Probe sequence
aggatgcagatcttgttattctaga

SEQ ID NO: 231471 - DNA, 25 bp, Probe sequence
acttggccactacaatgacgcaatc

SEQ ID NO: 231472 - DNA, 25 bp, Probe sequence
aaatgaatcatgggttacgtaactt

SEQ ID NO: 231473 - DNA, 25 bp, Probe sequence
aaagttggtgctcaacatccgcaat

SEQ ID NO: 231474 - DNA, 25 bp, Probe sequence
aaagattatgacgtttgcacctgaa

SEQ ID NO: 231475 - DNA, 25 bp, Probe sequence
aacggcaaagtttatactgaagatg

SEQ ID NO: 231476 - DNA, 25 bp, Probe sequence
aaggtcatcatgtattaccaggttt

SEQ ID NO: 231477 - DNA, 25 bp, Probe sequence
aatggatgggtcatacgatggctta

SEQ ID NO: 231478 - DNA, 25 bp, Probe sequence
aatcgataatggttacattcatgtg

SEQ ID NO: 231479 - DNA, 25 bp, Probe sequence
caacatccgcaatacgttgtacgcc

SEQ ID NO: 231480 - DNA, 25 bp, Probe sequence
cgaggagctaaacatgtcacgcatt

SEQ ID NO: 231481 - DNA, 25 bp, Probe sequence
gcaagatgttcacaatgcagcggaa

SEQ ID NO: 231482 - DNA, 25 bp, Probe sequence
gcaatgcgtgcaaaaggtatgcctg

SEQ ID NO: 231483 - DNA, 25 bp, Probe sequence
gacattattttttcaattggtcata

SEQ ID NO: 231484 - DNA, 25 bp, Probe sequence
gagaaccaggtgtttttggagcagc

SEQ ID NO: 231485 - DNA, 25 bp, Probe sequence
gatggacagattgttgcaattggag

SEQ ID NO: 231486 - DNA, 25 bp, Probe sequence
gatggcttaaaatatctatccgaaa

SEQ ID NO: 231487 - DNA, 25 bp, Probe sequence
gatatacatattcatggtggttatg

SEQ ID NO: 231488 - DNA, 25 bp, Probe sequence
gttgtacgcccatttatcgataaaa

SEQ ID NO: 231489 - DNA, 25 bp, Probe sequence
gtaacaagtttaaatcaagccattg

SEQ ID NO: 231490 - DNA, 25 bp, Probe sequence
gtaactgttcaatcgcaacaagcac

SEQ ID NO: 231491 - DNA, 25 bp, Probe sequence
gtcacgcatttatataatgcagcga

SEQ ID NO: 231492 - DNA, 25 bp, Probe sequence
ggtgtttttggagcagcatggttga

SEQ ID NO: 231493 - DNA, 25 bp, Probe sequence
ggtgatacattagatcatttatggc

SEQ ID NO: 231494 - DNA, 25 bp, Probe sequence
ggtgcaaaagaagcgcttgaaacgt

SEQ ID NO: 231495 - DNA, 25 bp, Probe sequence
tgggttacgtaacttaatatcattt

SEQ ID NO: 231496 - DNA, 25 bp, Probe sequence
tgttcaatcgcaacaagcacgtctt

SEQ ID NO: 231497 - DNA, 25 bp, Probe sequence
tcaagccattgcattaggtatcgat

SEQ ID NO: 231498 - DNA, 25 bp, Probe sequence
taaacattttcaagagactgctaac

SEQ ID NO: 231499 - DNA, 25 bp, Probe sequence
atctttctgcttgtcagttaggtat

SEQ ID NO: 231500 - DNA, 25 bp, Probe sequence
atcctgatgcccaaactgatgcaat

SEQ ID NO: 231501 - DNA, 25 bp, Probe sequence
atcgttacgtatttgcatgtagtac

SEQ ID NO: 231502 - DNA, 25 bp, Probe sequence
atgtttggtgtaaatcctgatgccc

SEQ ID NO: 231503 - DNA, 25 bp, Probe sequence
atggttctgcacgtgttattattag

SEQ ID NO: 231504 - DNA, 25 bp, Probe sequence
acatctttagggttaggttggcttg

SEQ ID NO: 231505 - DNA, 25 bp, Probe sequence
acaagaattgaacagctagcagatg

SEQ ID NO: 231506 - DNA, 25 bp, Probe sequence
aaatgattacactaaatgaaccttt

SEQ ID NO: 231507 - DNA, 25 bp, Probe sequence
aagcaatcaatttaccaactgcatt

SEQ ID NO: 231508 - DNA, 25 bp, Probe sequence
aatgaaccttttaatgtagacgaat

SEQ ID NO: 231509 - DNA, 25 bp, Probe sequence
cgttatccaattactgatgatggtg

SEQ ID NO: 231510 - DNA, 25 bp, Probe sequence
cgagacctactatcggacagtctga

SEQ ID NO: 231511 - DNA, 25 bp, Probe sequence
cgataggtggatggttacaatctcg

SEQ ID NO: 231512 - DNA, 25 bp, Probe sequence
gaacggcaggtattttaacgatgga

SEQ ID NO: 231513 - DNA, 25 bp, Probe sequence
gaaaccattgatttggctgatgaat

SEQ ID NO: 231514 - DNA, 25 bp, Probe sequence
gaccattgttctatttcggtaacat

SEQ ID NO: 231515 - DNA, 25 bp, Probe sequence
gagacaacacgtatcagtgatgcat

SEQ ID NO: 231516 - DNA, 25 bp, Probe sequence
gagttgccaatgatttcagagacaa

SEQ ID NO: 231517 - DNA, 25 bp, Probe sequence
gatgactctgaggatattgatacga

SEQ ID NO: 231518 - DNA, 25 bp, Probe sequence
gatgaatatggtggaacggcaggta

SEQ ID NO: 231519 - DNA, 25 bp, Probe sequence
gtagtacttggtgaattagcgccta

SEQ ID NO: 231520 - DNA, 25 bp, Probe sequence
gattattatctttctgcttgtcagt

SEQ ID NO: 231521 - DNA, 25 bp, Probe sequence
gttggttcagaatttgcattagtaa

SEQ ID NO: 231522 - DNA, 25 bp, Probe sequence
gtttcagaaatcgataaccaccaaa

SEQ ID NO: 231523 - DNA, 25 bp, Probe sequence
gtatatgcaagaccattgttctatt

SEQ ID NO: 231524 - DNA, 25 bp, Probe sequence
gtactattggatgatttaactgaag

SEQ ID NO: 231525 - DNA, 25 bp, Probe sequence
gtgaattagcgcctaaatctatagc

SEQ ID NO: 231526 - DNA, 25 bp, Probe sequence
ggttggcttggtgaaccaacgtttg

SEQ ID NO: 231527 - DNA, 25 bp, Probe sequence
ggaaacttcgaccataattagtttg

SEQ ID NO: 231528 - DNA, 25 bp, Probe sequence
ggctgatgaatggttctgcacgtgt

SEQ ID NO: 231529 - DNA, 25 bp, Probe sequence
taacgacgacgatttcgtttgcagt

SEQ ID NO: 231530 - DNA, 25 bp, Probe sequence
tcaacatactgaaaagcttgcttta

SEQ ID NO: 231531 - DNA, 25 bp, Probe sequence
taccaactgcattaacgacgacgat

SEQ ID NO: 231532 - DNA, 25 bp, Probe sequence
tatgatcgctgggttgtttcagaaa

SEQ ID NO: 231533 - DNA, 25 bp, Probe sequence
attgtagcattctttattttcttaa

SEQ ID NO: 231534 - DNA, 25 bp, Probe sequence
atttatgcaacaccttctacagata

SEQ ID NO: 231535 - DNA, 25 bp, Probe sequence
atttcattagtattcttaccaggca

SEQ ID NO: 231536 - DNA, 25 bp, Probe sequence
atacacataaatttgacgttgcagg

SEQ ID NO: 231537 - DNA, 25 bp, Probe sequence
ataaaatggcttcatcacttggtgg

SEQ ID NO: 231538 - DNA, 25 bp, Probe sequence
atcttaggtattgtattaggtgtta

SEQ ID NO: 231539 - DNA, 25 bp, Probe sequence
aagggacgcctgaaacgaaatcaga

SEQ ID NO: 231540 - DNA, 25 bp, Probe sequence
atgttactcatcaaagggacgcctg

SEQ ID NO: 231541 - DNA, 25 bp, Probe sequence
gaatgaaacgtatcgcgggggcaac

SEQ ID NO: 231542 - DNA, 25 bp, Probe sequence
caccttctacagatacagctatttc

SEQ ID NO: 231543 - DNA, 25 bp, Probe sequence
ccatatacaggtgcaacgatttcga

SEQ ID NO: 231544 - DNA, 25 bp, Probe sequence
gcgattcctaatgatgataaacgtg

SEQ ID NO: 231545 - DNA, 25 bp, Probe sequence
gcgggggcaacaagttaatcttagg

SEQ ID NO: 231546 - DNA, 25 bp, Probe sequence
gcattcatacaggtgcgatgattgc

SEQ ID NO: 231547 - DNA, 25 bp, Probe sequence
gcattcggtgtcgcaattagtggtg

SEQ ID NO: 231548 - DNA, 25 bp, Probe sequence
gcattgcaggcaggatacttatcaa

SEQ ID NO: 231549 - DNA, 25 bp, Probe sequence
gcagttgcgacaactatgggttgga

SEQ ID NO: 231550 - DNA, 25 bp, Probe sequence
gcaacgatttcgaacttcttattaa

SEQ ID NO: 231551 - DNA, 25 bp, Probe sequence
gcaatcgtaattgtagcattcttta

SEQ ID NO: 231552 - DNA, 25 bp, Probe sequence
gaatcatggcatttatcgcaatttt

SEQ ID NO: 231553 - DNA, 25 bp, Probe sequence
gactaggcttaggtatttatgcaac

SEQ ID NO: 231554 - DNA, 25 bp, Probe sequence
gatgattgcactttgggttaacgta

SEQ ID NO: 231555 - DNA, 25 bp, Probe sequence
gttggcgttgcttcaggtatttata

SEQ ID NO: 231556 - DNA, 25 bp, Probe sequence
gttgtgtcgtaggatatttatgttt

SEQ ID NO: 231557 - DNA, 25 bp, Probe sequence
gttgtcattactaaaggtgcagcac

SEQ ID NO: 231558 - DNA, 25 bp, Probe sequence
gttgccgtactttcaatgttactca

SEQ ID NO: 231559 - DNA, 25 bp, Probe sequence
gttattacattttggttgtttgcac

SEQ ID NO: 231560 - DNA, 25 bp, Probe sequence
gtttaggttatacagcattgcaggc

SEQ ID NO: 231561 - DNA, 25 bp, Probe sequence
gtattcttaccaggcatattttatg

SEQ ID NO: 231562 - DNA, 25 bp, Probe sequence
gggttctaagcgaccaatgttatta

SEQ ID NO: 231563 - DNA, 25 bp, Probe sequence
ggagatggattttcatcttctcaat

SEQ ID NO: 231564 - DNA, 25 bp, Probe sequence
tgcaccgttagataaagttggcgtt

SEQ ID NO: 231565 - DNA, 25 bp, Probe sequence
tcattggtattgcacttatttcatt

SEQ ID NO: 231566 - DNA, 25 bp, Probe sequence
ttgtttgcacaatcacttgtaaatg

SEQ ID NO: 231567 - DNA, 25 bp, Probe sequence
ataaaacaccagcacaagttgtatt

SEQ ID NO: 231568 - DNA, 25 bp, Probe sequence
ataatggatacccgatgccttcagt

SEQ ID NO: 231569 - DNA, 25 bp, Probe sequence
atctcagacacctaaacgcattcaa

SEQ ID NO: 231570 - DNA, 25 bp, Probe sequence
atgtaattttaatgttcatcatcta

SEQ ID NO: 231571 - DNA, 25 bp, Probe sequence
atggaagaactttacgagcaaggta

SEQ ID NO: 231572 - DNA, 25 bp, Probe sequence
agaattttgtgatcgtcacgatatt

SEQ ID NO: 231573 - DNA, 25 bp, Probe sequence
accctgtcattgttaaaattgctga

SEQ ID NO: 231574 - DNA, 25 bp, Probe sequence
actgcatggatgcctttgatgagaa

SEQ ID NO: 231575 - DNA, 25 bp, Probe sequence
aaatatcataaaacaccagcacaag

SEQ ID NO: 231576 - DNA, 25 bp, Probe sequence
aaatgctgcaattgacgcaggctat

SEQ ID NO: 231577 - DNA, 25 bp, Probe sequence
aaagtgactgcatggatgcctttga

SEQ ID NO: 231578 - DNA, 25 bp, Probe sequence
aaactgattatcttgatttatttct

SEQ ID NO: 231579 - DNA, 25 bp, Probe sequence
aacattcgaatatttcaacaaatcg

SEQ ID NO: 231580 - DNA, 25 bp, Probe sequence
aatacattggccttgtgaagcagat

SEQ ID NO: 231581 - DNA, 25 bp, Probe sequence
cagaagtagctgaaattgatgcttt

SEQ ID NO: 231582 - DNA, 25 bp, Probe sequence
gcaggctatagagcgtttgatacag

SEQ ID NO: 231583 - DNA, 25 bp, Probe sequence
gaatcaaattgaggtacatccatat

SEQ ID NO: 231584 - DNA, 25 bp, Probe sequence
gaagttatggaatgactatcaaggt

SEQ ID NO: 231585 - DNA, 25 bp, Probe sequence
gacacctaaacgcattcaagaaaat

SEQ ID NO: 231586 - DNA, 25 bp, Probe sequence
gagcgtttgatacagcatactttta

SEQ ID NO: 231587 - DNA, 25 bp, Probe sequence
gaggcttcactaggacgagcattaa

SEQ ID NO: 231588 - DNA, 25 bp, Probe sequence
gataatgaggcttcactaggacgag

SEQ ID NO: 231589 - DNA, 25 bp, Probe sequence
gatttatttctaatacattggcctt

SEQ ID NO: 231590 - DNA, 25 bp, Probe sequence
gttggcatttagcacacaatagaat

SEQ ID NO: 231591 - DNA, 25 bp, Probe sequence
gtacatccatattttaaccaacaag

SEQ ID NO: 231592 - DNA, 25 bp, Probe sequence
gtgaagcagatggtctatttttaga

SEQ ID NO: 231593 - DNA, 25 bp, Probe sequence
ggccttgtgaagcagatggtctatt

SEQ ID NO: 231594 - DNA, 25 bp, Probe sequence
ggctcaatcaagtatcaaaccaatg

SEQ ID NO: 231595 - DNA, 25 bp, Probe sequence
ggcgtcgatagagaagatttgttta

SEQ ID NO: 231596 - DNA, 25 bp, Probe sequence
taatggctcaatcaagtatcaaacc

SEQ ID NO: 231597 - DNA, 25 bp, Probe sequence
tatgactaaagttgtaaatgctgca

SEQ ID NO: 231598 - DNA, 25 bp, Probe sequence
tattattccaaaatctcagacacct

SEQ ID NO: 231599 - DNA, 25 bp, Probe sequence
ttaaaggataatggcgtcgatagag

SEQ ID NO: 231600 - DNA, 25 bp, Probe sequence
ttcactaggacgagcattaaaggat

SEQ ID NO: 231601 - DNA, 25 bp, Probe sequence
atatattatctatttattcatcaat

SEQ ID NO: 231602 - DNA, 25 bp, Probe sequence
aggctatgattataatatgcttttc

SEQ ID NO: 231603 - DNA, 25 bp, Probe sequence
agttagttaattgctttgtagaaga

SEQ ID NO: 231604 - DNA, 25 bp, Probe sequence
aaagtgtttacgtatcaaaatgttg

SEQ ID NO: 231605 - DNA, 25 bp, Probe sequence
catgtcagctttatttcttttagta

SEQ ID NO: 231606 - DNA, 25 bp, Probe sequence
gctattttattattaggcggcatac

SEQ ID NO: 231607 - DNA, 25 bp, Probe sequence
gcaggttaccagcatagtactgaat

SEQ ID NO: 231608 - DNA, 25 bp, Probe sequence
gcaacatccacctgaatatattccg

SEQ ID NO: 231609 - DNA, 25 bp, Probe sequence
gaagtggtgaaaattttagtcgcaa

SEQ ID NO: 231610 - DNA, 25 bp, Probe sequence
gaagcagctatgattgcaggttacc

SEQ ID NO: 231611 - DNA, 25 bp, Probe sequence
gaaaattagagtcgtcattccttgt

SEQ ID NO: 231612 - DNA, 25 bp, Probe sequence
gacttttaagccaaagagctgttaa

SEQ ID NO: 231613 - DNA, 25 bp, Probe sequence
gagctgttaaatccattgcatcact

SEQ ID NO: 231614 - DNA, 25 bp, Probe sequence
gatggtgttggtgattttagacttt

SEQ ID NO: 231615 - DNA, 25 bp, Probe sequence
gatggattgatttcctttaatagta

SEQ ID NO: 231616 - DNA, 25 bp, Probe sequence
gatgaaatgcaacatcttgccacaa

SEQ ID NO: 231617 - DNA, 25 bp, Probe sequence
gatgcagtcatcatgatagattgtg

SEQ ID NO: 231618 - DNA, 25 bp, Probe sequence
gattgcaaagcgtgatagaagtggt

SEQ ID NO: 231619 - DNA, 25 bp, Probe sequence
gattgtgatttgcaacatccacctg

SEQ ID NO: 231620 - DNA, 25 bp, Probe sequence
gtacggataccactatagatgaaat

SEQ ID NO: 231621 - DNA, 25 bp, Probe sequence
ggggaagtcattacacaaacacatc

SEQ ID NO: 231622 - DNA, 25 bp, Probe sequence
ggttgaaggttttatggaaggctat

SEQ ID NO: 231623 - DNA, 25 bp, Probe sequence
ggatatttttcaacgattgcagcta

SEQ ID NO: 231624 - DNA, 25 bp, Probe sequence
ggaaggctatgatcaagtgattgca

SEQ ID NO: 231625 - DNA, 25 bp, Probe sequence
ggcggcatacagttaatttcaattg

SEQ ID NO: 231626 - DNA, 25 bp, Probe sequence
tggtgttgtaggtgaatatattggc

SEQ ID NO: 231627 - DNA, 25 bp, Probe sequence
tgcaacatcttgccacaatagatag

SEQ ID NO: 231628 - DNA, 25 bp, Probe sequence
taaatccattgcatcacttgaagaa

SEQ ID NO: 231629 - DNA, 25 bp, Probe sequence
tacacaaacacatcaacaattaact

SEQ ID NO: 231630 - DNA, 25 bp, Probe sequence
tagagtcgtcattccttgttttaat

SEQ ID NO: 231631 - DNA, 25 bp, Probe sequence
tattatgaagttaaggcacgtccta

SEQ ID NO: 231632 - DNA, 25 bp, Probe sequence
tattcaagctacaaatctttcaagt

SEQ ID NO: 231633 - DNA, 25 bp, Probe sequence
ttagtcgcaaaacattaagccattt

SEQ ID NO: 231634 - DNA, 25 bp, Probe sequence
ttcaacgattgcagctattttatta

SEQ ID NO: 231635 - DNA, 25 bp, Probe sequence
attattatggcatttgagcatatta

SEQ ID NO: 231636 - DNA, 25 bp, Probe sequence
atttccggtttttggtgtgcaatat

SEQ ID NO: 231637 - DNA, 25 bp, Probe sequence
atagactatattaagactcaaacga

SEQ ID NO: 231638 - DNA, 25 bp, Probe sequence
atacggttatcgacaagttgaatta

SEQ ID NO: 231639 - DNA, 25 bp, Probe sequence
atactacacagttacgccataccaa

SEQ ID NO: 231640 - DNA, 25 bp, Probe sequence
atcatcctgaatctattttgagtga

SEQ ID NO: 231641 - DNA, 25 bp, Probe sequence
atgcgttatcattcattaattgctg

SEQ ID NO: 231642 - DNA, 25 bp, Probe sequence
aggactgcctcaaaatttcaatgta

SEQ ID NO: 231643 - DNA, 25 bp, Probe sequence
agactcaaacgaaactaacagttca

SEQ ID NO: 231644 - DNA, 25 bp, Probe sequence
agaacaattttatcagcgtgtacct

SEQ ID NO: 231645 - DNA, 25 bp, Probe sequence
agcgtgtacctatactaggtgtatg

SEQ ID NO: 231646 - DNA, 25 bp, Probe sequence
acagttacgccataccaatgaaggt

SEQ ID NO: 231647 - DNA, 25 bp, Probe sequence
aaatatcattcacggctatcatcct

SEQ ID NO: 231648 - DNA, 25 bp, Probe sequence
aaaatttcaatgtaatgcgttatca

SEQ ID NO: 231649 - DNA, 25 bp, Probe sequence
aattgctgacggagcgacttttcca

SEQ ID NO: 231650 - DNA, 25 bp, Probe sequence
cacggacatactacacagttacgcc

SEQ ID NO: 231651 - DNA, 25 bp, Probe sequence
cgggtaatccggatgattatcctat

SEQ ID NO: 231652 - DNA, 25 bp, Probe sequence
cattcacggctatcatcctgtacac

SEQ ID NO: 231653 - DNA, 25 bp, Probe sequence
ctaacagttcaagttgttggtattg

SEQ ID NO: 231654 - DNA, 25 bp, Probe sequence
cctgggccgggtaatccggatgatt

SEQ ID NO: 231655 - DNA, 25 bp, Probe sequence
gctatcatcctgtacacggacatac

SEQ ID NO: 231656 - DNA, 25 bp, Probe sequence
gaattatttttatcgaaggtaggtg

SEQ ID NO: 231657 - DNA, 25 bp, Probe sequence
gaaggtatttttcaaggactgcctc

SEQ ID NO: 231658 - DNA, 25 bp, Probe sequence
gaaggtaggtgattactgtgagaat

SEQ ID NO: 231659 - DNA, 25 bp, Probe sequence
gacggagcgacttttccaaattgct

SEQ ID NO: 231660 - DNA, 25 bp, Probe sequence
gagcgacttttccaaattgcttaaa

SEQ ID NO: 231661 - DNA, 25 bp, Probe sequence
gagtgaatacggttatcgacaagtt

SEQ ID NO: 231662 - DNA, 25 bp, Probe sequence
gttggtattgataatctgctgatag

SEQ ID NO: 231663 - DNA, 25 bp, Probe sequence
gtatcgtgtcttattttggtggaaa

SEQ ID NO: 231664 - DNA, 25 bp, Probe sequence
tgaagccaaaagcaattgttatttc

SEQ ID NO: 231665 - DNA, 25 bp, Probe sequence
tcacggctatcatcctgtacacgga

SEQ ID NO: 231666 - DNA, 25 bp, Probe sequence
taggatttcaatgtatcgtgtctta

SEQ ID NO: 231667 - DNA, 25 bp, Probe sequence
tttatcagcgtgtacctatactagg

SEQ ID NO: 231668 - DNA, 25 bp, Probe sequence
ttggtgtgcaatatcatcctgaatc

SEQ ID NO: 231669 - DNA, 25 bp, Probe sequence
atcaagtgaactatacggcgcgctt

SEQ ID NO: 231670 - DNA, 25 bp, Probe sequence
atctcaccagaattattttttcaaa

SEQ ID NO: 231671 - DNA, 25 bp, Probe sequence
actaagttggctgatgtgggagaag

SEQ ID NO: 231672 - DNA, 25 bp, Probe sequence
actgcggagcaattggactattact

SEQ ID NO: 231673 - DNA, 25 bp, Probe sequence
aacatcgttatttccttgtggttcg

SEQ ID NO: 231674 - DNA, 25 bp, Probe sequence
aacatttattatcctattagtactt

SEQ ID NO: 231675 - DNA, 25 bp, Probe sequence
aactgtatttcaaatgacttcgatg

SEQ ID NO: 231676 - DNA, 25 bp, Probe sequence
aaccgatgaaagggacaatgcctag

SEQ ID NO: 231677 - DNA, 25 bp, Probe sequence
aatgcctagaggtaaaacggaagct

SEQ ID NO: 231678 - DNA, 25 bp, Probe sequence
aattatcgctactatttaactgaaa

SEQ ID NO: 231679 - DNA, 25 bp, Probe sequence
cacctcgtggtatatactgcggagc

SEQ ID NO: 231680 - DNA, 25 bp, Probe sequence
cagagtggctcaattaaggtgtata

SEQ ID NO: 231681 - DNA, 25 bp, Probe sequence
catttttcatttgttgaatcttctg

SEQ ID NO: 231682 - DNA, 25 bp, Probe sequence
gcacaagcgcagcaacgacaaggta

SEQ ID NO: 231683 - DNA, 25 bp, Probe sequence
gcaaacttcttcgaaagatcgtgca

SEQ ID NO: 231684 - DNA, 25 bp, Probe sequence
gaatcttctgaggttatgatgacta

SEQ ID NO: 231685 - DNA, 25 bp, Probe sequence
gaagcggcaaagtattttaatcatg

SEQ ID NO: 231686 - DNA, 25 bp, Probe sequence
gaaagttcacctcgtggtatatact

SEQ ID NO: 231687 - DNA, 25 bp, Probe sequence
gaaatccaagtagcgtctatctcac

SEQ ID NO: 231688 - DNA, 25 bp, Probe sequence
gacaagcgatttatggagtcggagc

SEQ ID NO: 231689 - DNA, 25 bp, Probe sequence
gatcgtgcagaaaatgtcatgattg

SEQ ID NO: 231690 - DNA, 25 bp, Probe sequence
gataacgttatcataagcaaaccga

SEQ ID NO: 231691 - DNA, 25 bp, Probe sequence
gttatatttaagttacgaagcggca

SEQ ID NO: 231692 - DNA, 25 bp, Probe sequence
gtagcgtctatctcaccagaattat

SEQ ID NO: 231693 - DNA, 25 bp, Probe sequence
gtaatggtaattatactgcgttatt

SEQ ID NO: 231694 - DNA, 25 bp, Probe sequence
gtgatacactttgcacaagcgcagc

SEQ ID NO: 231695 - DNA, 25 bp, Probe sequence
gggagaatatcacagagtggctcaa

SEQ ID NO: 231696 - DNA, 25 bp, Probe sequence
ggtgcaccgaaactgaatacaatga

SEQ ID NO: 231697 - DNA, 25 bp, Probe sequence
ggtattacaattgattctaagccaa

SEQ ID NO: 231698 - DNA, 25 bp, Probe sequence
tgaactatacggcgcgcttaacgga

SEQ ID NO: 231699 - DNA, 25 bp, Probe sequence
ggagtcggagcaggtattacaattg

SEQ ID NO: 231700 - DNA, 25 bp, Probe sequence
ggactattacttccaactgaagatg

SEQ ID NO: 231701 - DNA, 25 bp, Probe sequence
tgtggttcgattacaggtgcaccga

SEQ ID NO: 231702 - DNA, 25 bp, Probe sequence
ttaaacgtgtccaacaagcaattgt

SEQ ID NO: 231703 - DNA, 25 bp, Probe sequence
attgtgccatcagaatcagacatga

SEQ ID NO: 231704 - DNA, 25 bp, Probe sequence
attccagctggttctgtagtacttg

SEQ ID NO: 231705 - DNA, 25 bp, Probe sequence
attttgtttcgatgatgggatattc

SEQ ID NO: 231706 - DNA, 25 bp, Probe sequence
atcactttttaatccgaaagaatca

SEQ ID NO: 231707 - DNA, 25 bp, Probe sequence
agttattggttatacaccattatca

SEQ ID NO: 231708 - DNA, 25 bp, Probe sequence
agaaattgtgccatcagaatcagac

SEQ ID NO: 231709 - DNA, 25 bp, Probe sequence
acaccattatcactttttaatccga

SEQ ID NO: 231710 - DNA, 25 bp, Probe sequence
acaccataatatacaatcacctttt

SEQ ID NO: 231711 - DNA, 25 bp, Probe sequence
aaacatgattttaaccagcaagatt

SEQ ID NO: 231712 - DNA, 25 bp, Probe sequence
aagatttattaacacttcgctcata

SEQ ID NO: 231713 - DNA, 25 bp, Probe sequence
aattcattccagctggttctgtagt

SEQ ID NO: 231714 - DNA, 25 bp, Probe sequence
cacttcgctcatatttaattgaaca

SEQ ID NO: 231715 - DNA, 25 bp, Probe sequence
cagatttcgcacgcttaaagttagg

SEQ ID NO: 231716 - DNA, 25 bp, Probe sequence
gctggttctgtagtacttgaaggga

SEQ ID NO: 231717 - DNA, 25 bp, Probe sequence
gcacgcttaaagttaggcgataata

SEQ ID NO: 231718 - DNA, 25 bp, Probe sequence
gaatcagatttcgcacgcttaaagt

SEQ ID NO: 231719 - DNA, 25 bp, Probe sequence
gaaaaaattcattccagctggttct

SEQ ID NO: 231720 - DNA, 25 bp, Probe sequence
gaaagaatcagatttcgcacgctta

SEQ ID NO: 231721 - DNA, 25 bp, Probe sequence
gaaagcactaatagaatcgattcat

SEQ ID NO: 231722 - DNA, 25 bp, Probe sequence
gaaataccaattgtgtatggttcga

SEQ ID NO: 231723 - DNA, 25 bp, Probe sequence
gaaattgtatattaatcacacgagt

SEQ ID NO: 231724 - DNA, 25 bp, Probe sequence
gacgcaagggatatgattaaacacc

SEQ ID NO: 231725 - DNA, 25 bp, Probe sequence
gatgatgggatattcacctgggttt

SEQ ID NO: 231726 - DNA, 25 bp, Probe sequence
gattggttagttattggttatacac

SEQ ID NO: 231727 - DNA, 25 bp, Probe sequence
gtatggttcgaaatatggtccggat

SEQ ID NO: 231728 - DNA, 25 bp, Probe sequence
gtaggagcgtttaaagatgtcaatc

SEQ ID NO: 231729 - DNA, 25 bp, Probe sequence
gtcaaggtgaccaagccattgtagt

SEQ ID NO: 231730 - DNA, 25 bp, Probe sequence
ggcgataatattaaatttagaccta

SEQ ID NO: 231731 - DNA, 25 bp, Probe sequence
tgaacaaaattatccatttattata

SEQ ID NO: 231732 - DNA, 25 bp, Probe sequence
tacaatcaccttttttatacatgaa

SEQ ID NO: 231733 - DNA, 25 bp, Probe sequence
tagaatcacttttaaaacattacaa

SEQ ID NO: 231734 - DNA, 25 bp, Probe sequence
tagaatcgattcatttaaacataaa

SEQ ID NO: 231735 - DNA, 25 bp, Probe sequence
tttaaccagcaagatttgattgaaa

SEQ ID NO: 231736 - DNA, 25 bp, Probe sequence
tttattaacacttcgctcatattta

SEQ ID NO: 231737 - DNA, 25 bp, Probe sequence
aggtagctacccgcaaatcggtaca

SEQ ID NO: 231738 - DNA, 25 bp, Probe sequence
atttatagatattttaacggctgaa

SEQ ID NO: 231739 - DNA, 25 bp, Probe sequence
atatctccatataaattgtatttgt

SEQ ID NO: 231740 - DNA, 25 bp, Probe sequence
agcacaaaaaccgcaaggatcacgt

SEQ ID NO: 231741 - DNA, 25 bp, Probe sequence
atgtctgatgtatttcatgtcgtta

SEQ ID NO: 231742 - DNA, 25 bp, Probe sequence
actggttaaaccaattattccatgg

SEQ ID NO: 231743 - DNA, 25 bp, Probe sequence
acagctcgtcatcataagttatttg

SEQ ID NO: 231744 - DNA, 25 bp, Probe sequence
aaccgcaaggatcacgtttgaaatt

SEQ ID NO: 231745 - DNA, 25 bp, Probe sequence
aaccttgctcacacgaaacaaacag

SEQ ID NO: 231746 - DNA, 25 bp, Probe sequence
aagtggcttattcagtagctttcag

SEQ ID NO: 231747 - DNA, 25 bp, Probe sequence
catgtggtgcacttgatactttagc

SEQ ID NO: 231748 - DNA, 25 bp, Probe sequence
catcgcgagtgtatttagctgtggg

SEQ ID NO: 231749 - DNA, 25 bp, Probe sequence
cccgcaaatcggtacaatcgcaagt

SEQ ID NO: 231750 - DNA, 25 bp, Probe sequence
gctgattgcattagcagggggtaat

SEQ ID NO: 231751 - DNA, 25 bp, Probe sequence
gcacttgatactttagcacatgaaa

SEQ ID NO: 231752 - DNA, 25 bp, Probe sequence
gcacatgaaattgctaatcgattag

SEQ ID NO: 231753 - DNA, 25 bp, Probe sequence
gcaacgattcgttttacagaaccta

SEQ ID NO: 231754 - DNA, 25 bp, Probe sequence
gaaggggatatgaacatgatggtgt

SEQ ID NO: 231755 - DNA, 25 bp, Probe sequence
gaagatgccattcaaagatttgtga

SEQ ID NO: 231756 - DNA, 25 bp, Probe sequence
gaagcaactttggaaatgactaata

SEQ ID NO: 231757 - DNA, 25 bp, Probe sequence
gaacctacgctgattgcattagcag

SEQ ID NO: 231758 - DNA, 25 bp, Probe sequence
gagaaacaagttatacatcgcgagt

SEQ ID NO: 231759 - DNA, 25 bp, Probe sequence
gagagattatacagctcgtcatcat

SEQ ID NO: 231760 - DNA, 25 bp, Probe sequence
gatggcgatgaaataaagcttaaga

SEQ ID NO: 231761 - DNA, 25 bp, Probe sequence
gattcgttttacagaacctacgctg

SEQ ID NO: 231762 - DNA, 25 bp, Probe sequence
gttatttgaaaaccttgctcacacg

SEQ ID NO: 231763 - DNA, 25 bp, Probe sequence
gtaacgagcaaagcaaatcgcatgg

SEQ ID NO: 231764 - DNA, 25 bp, Probe sequence
gggggtaatgtcaaagcttacactg

SEQ ID NO: 231765 - DNA, 25 bp, Probe sequence
ggtgtaattccatgtggtgcacttg

SEQ ID NO: 231766 - DNA, 25 bp, Probe sequence
ggtacaatcgcaagttatcatttaa

SEQ ID NO: 231767 - DNA, 25 bp, Probe sequence
ggatttgaattagatgcatggttag

SEQ ID NO: 231768 - DNA, 25 bp, Probe sequence
taagcgtgatggcacacctattatc

SEQ ID NO: 231769 - DNA, 25 bp, Probe sequence
tacgccttgtcatttaattatatgt

SEQ ID NO: 231770 - DNA, 25 bp, Probe sequence
tattcagtagctttcaggactttgg

SEQ ID NO: 231771 - DNA, 25 bp, Probe sequence
attagtctttttgcgttcttcttat

SEQ ID NO: 231772 - DNA, 25 bp, Probe sequence
attattaacacgtacatttgaccat

SEQ ID NO: 231773 - DNA, 25 bp, Probe sequence
atccctggtaaatctggtggtatca

SEQ ID NO: 231774 - DNA, 25 bp, Probe sequence
atgctggtcaagtcgatgtaatgcc

SEQ ID NO: 231775 - DNA, 25 bp, Probe sequence
atgttgtgtactttagattcttctc

SEQ ID NO: 231776 - DNA, 25 bp, Probe sequence
agaaatttgttcctgtcgtaatggc

SEQ ID NO: 231777 - DNA, 25 bp, Probe sequence
accgcaaggttctgccttttcatta

SEQ ID NO: 231778 - DNA, 25 bp, Probe sequence
actactcaaccagctgatttcgaaa

SEQ ID NO: 231779 - DNA, 25 bp, Probe sequence
acaacgtcaaacagagcctaaccca

SEQ ID NO: 231780 - DNA, 25 bp, Probe sequence
aaaacatctgactctgaatttacaa

SEQ ID NO: 231781 - DNA, 25 bp, Probe sequence
aagagcaattcacatacttccctaa

SEQ ID NO: 231782 - DNA, 25 bp, Probe sequence
ctggttttaagtgtgttcctattct

SEQ ID NO: 231783 - DNA, 25 bp, Probe sequence
gcttttgctgaaactgacagaccag

SEQ ID NO: 231784 - DNA, 25 bp, Probe sequence
gcttcagtagcattattcttcttaa

SEQ ID NO: 231785 - DNA, 25 bp, Probe sequence
gcacggtgactataaaacattctgg

SEQ ID NO: 231786 - DNA, 25 bp, Probe sequence
gaactcataactactcaaccagctg

SEQ ID NO: 231787 - DNA, 25 bp, Probe sequence
gaaacaggacctaaagcaaactcta

SEQ ID NO: 231788 - DNA, 25 bp, Probe sequence
gaaatcaccattctattctcattta

SEQ ID NO: 231789 - DNA, 25 bp, Probe sequence
gactttgtttatttcattgatacgt

SEQ ID NO: 231790 - DNA, 25 bp, Probe sequence
gacgttcctattatatgccaatgtt

SEQ ID NO: 231791 - DNA, 25 bp, Probe sequence
gacgtatttttcttattatgttgat

SEQ ID NO: 231792 - DNA, 25 bp, Probe sequence
gagtgacaacgtgcttaatggtgat

SEQ ID NO: 231793 - DNA, 25 bp, Probe sequence
gtagaatctatgggtggtgcggtta

SEQ ID NO: 231794 - DNA, 25 bp, Probe sequence
ggtggtgcggttagtgcatcattca

SEQ ID NO: 231795 - DNA, 25 bp, Probe sequence
ggtcataatcaagtagttccattca

SEQ ID NO: 231796 - DNA, 25 bp, Probe sequence
ggctacaaatctgatgtcatgcacg

SEQ ID NO: 231797 - DNA, 25 bp, Probe sequence
tggtgaccactatggtatctctgaa

SEQ ID NO: 231798 - DNA, 25 bp, Probe sequence
tgttcggtactgatttattctctaa

SEQ ID NO: 231799 - DNA, 25 bp, Probe sequence
tacggtttaccgcaaggttctgcct

SEQ ID NO: 231800 - DNA, 25 bp, Probe sequence
taggcggcttcttattgacgttcct

SEQ ID NO: 231801 - DNA, 25 bp, Probe sequence
ttgactaaccactatccattcacat

SEQ ID NO: 231802 - DNA, 25 bp, Probe sequence
ttcttcttaaacttagcttttgctg

SEQ ID NO: 231803 - DNA, 25 bp, Probe sequence
ttgcgttcttcttattaaccgtaat

SEQ ID NO: 231804 - DNA, 25 bp, Probe sequence
ttccctaactttttccatcaaacag

SEQ ID NO: 231805 - DNA, 25 bp, Probe sequence
atatcctggtaactatgaatcttat

SEQ ID NO: 231806 - DNA, 25 bp, Probe sequence
atacaacaactttacgcatcatcaa

SEQ ID NO: 231807 - DNA, 25 bp, Probe sequence
atgcatccaaatcaatatcgaattc

SEQ ID NO: 231808 - DNA, 25 bp, Probe sequence
aggtgagcgtattggtgttgttggg

SEQ ID NO: 231809 - DNA, 25 bp, Probe sequence
agattatattcatactttcggtggt

SEQ ID NO: 231810 - DNA, 25 bp, Probe sequence
agctggtaaaacaacactcttaaat

SEQ ID NO: 231811 - DNA, 25 bp, Probe sequence
acgatttttatttccaagtgcaact

SEQ ID NO: 231812 - DNA, 25 bp, Probe sequence
aagtattatttgaacatctgacgga

SEQ ID NO: 231813 - DNA, 25 bp, Probe sequence
aatcttatattgaaatgcgcgctga

SEQ ID NO: 231814 - DNA, 25 bp, Probe sequence
caggcagtacaagcttatgcggatg

SEQ ID NO: 231815 - DNA, 25 bp, Probe sequence
gcgtttgtatttattacgtctactc

SEQ ID NO: 231816 - DNA, 25 bp, Probe sequence
gaagtttccactagaattattgaac

SEQ ID NO: 231817 - DNA, 25 bp, Probe sequence
gaacttgcttggatgagggctggag

SEQ ID NO: 231818 - DNA, 25 bp, Probe sequence
gagaccctggatagagatattcgta

SEQ ID NO: 231819 - DNA, 25 bp, Probe sequence
gatgtgctcatgattgaggcaagtg

SEQ ID NO: 231820 - DNA, 25 bp, Probe sequence
gatgcttgggactataacgctgaaa

SEQ ID NO: 231821 - DNA, 25 bp, Probe sequence
gatgcgcaagatgctatggatcaac

SEQ ID NO: 231822 - DNA, 25 bp, Probe sequence
gatactgagactttaacaatacttg

SEQ ID NO: 231823 - DNA, 25 bp, Probe sequence
gttgttgggccaaatggagctggta

SEQ ID NO: 231824 - DNA, 25 bp, Probe sequence
gttgcacagtcatattggtttattc

SEQ ID NO: 231825 - DNA, 25 bp, Probe sequence
gttttattcgtaacccatgatcgat

SEQ ID NO: 231826 - DNA, 25 bp, Probe sequence
gtacaccagccaaatgttctgttgt

SEQ ID NO: 231827 - DNA, 25 bp, Probe sequence
ggtggtacagtgattaccgtaagcc

SEQ ID NO: 231828 - DNA, 25 bp, Probe sequence
ggtaagttagcgtcatatcctggta

SEQ ID NO: 231829 - DNA, 25 bp, Probe sequence
ggatcaacatgatgcttgggactat

SEQ ID NO: 231830 - DNA, 25 bp, Probe sequence
ggaacctcggtatctattacacaac

SEQ ID NO: 231831 - DNA, 25 bp, Probe sequence
tgaacctacgaaccatttagacttc

SEQ ID NO: 231832 - DNA, 25 bp, Probe sequence
tattacgtctactcgtacaccagcc

SEQ ID NO: 231833 - DNA, 25 bp, Probe sequence
tcagctggttgatcaattatgtgaa

SEQ ID NO: 231834 - DNA, 25 bp, Probe sequence
tacacaacttcttgaacgattttta

SEQ ID NO: 231835 - DNA, 25 bp, Probe sequence
tagacttcgaatcaatcagctggtt

SEQ ID NO: 231836 - DNA, 25 bp, Probe sequence
tttacagccaatgttatgcatccaa

SEQ ID NO: 231837 - DNA, 25 bp, Probe sequence
ttatccggcggacaacaaaaacgtg

SEQ ID NO: 231838 - DNA, 25 bp, Probe sequence
ttaccgtaagccatgatcgctactt

SEQ ID NO: 231839 - DNA, 25 bp, Probe sequence
agtcgcgtttgatgaagcgcattgt

SEQ ID NO: 231840 - DNA, 25 bp, Probe sequence
agcacctgtaagtatattttctgat

SEQ ID NO: 231841 - DNA, 25 bp, Probe sequence
aacattatcgcattactttgggtat

SEQ ID NO: 231842 - DNA, 25 bp, Probe sequence
aacattattgtccagcatttttaga

SEQ ID NO: 231843 - DNA, 25 bp, Probe sequence
aactgccacggttgaagtacagcaa

SEQ ID NO: 231844 - DNA, 25 bp, Probe sequence
aatttttgtatgttgcaccagaacg

SEQ ID NO: 231845 - DNA, 25 bp, Probe sequence
aattgtccattattttgaaccgaat

SEQ ID NO: 231846 - DNA, 25 bp, Probe sequence
ccatcgtaatgtgcttggtgtctta

SEQ ID NO: 231847 - DNA, 25 bp, Probe sequence
gcgatgggaattcaagctgcttttt

SEQ ID NO: 231848 - DNA, 25 bp, Probe sequence
gcatcgctcgtatgaaacaacaaga

SEQ ID NO: 231849 - DNA, 25 bp, Probe sequence
gcaccagaacgatttgaaaaccgat

SEQ ID NO: 231850 - DNA, 25 bp, Probe sequence
gaatgatttcttatttgatcgtgtt

SEQ ID NO: 231851 - DNA, 25 bp, Probe sequence
gaagtattcacaacaccatttaagc

SEQ ID NO: 231852 - DNA, 25 bp, Probe sequence
gaacgcgatatcaatttacacgagt

SEQ ID NO: 231853 - DNA, 25 bp, Probe sequence
gacaaattaacgatagcacctgtaa

SEQ ID NO: 231854 - DNA, 25 bp, Probe sequence
gaaagtgttatatatcatgcaggtt

SEQ ID NO: 231855 - DNA, 25 bp, Probe sequence
gagttatagtgttatcattcaagtg

SEQ ID NO: 231856 - DNA, 25 bp, Probe sequence
gatcgtgttaaagtagtcgttgcta

SEQ ID NO: 231857 - DNA, 25 bp, Probe sequence
gattattagttgcatcgctcgtatg

SEQ ID NO: 231858 - DNA, 25 bp, Probe sequence
gttaaatatcgctcaaactgatcaa

SEQ ID NO: 231859 - DNA, 25 bp, Probe sequence
gtattttataacagtctctcaagct

SEQ ID NO: 231860 - DNA, 25 bp, Probe sequence
gtaaatcctacttatcaacgtcaaa

SEQ ID NO: 231861 - DNA, 25 bp, Probe sequence
gtaagcctgcttcgaaacaagatat

SEQ ID NO: 231862 - DNA, 25 bp, Probe sequence
gtctctcaagctgatgatgactata

SEQ ID NO: 231863 - DNA, 25 bp, Probe sequence
ggggttgaccgagtattattcagtc

SEQ ID NO: 231864 - DNA, 25 bp, Probe sequence
ggtgtcttaccaactggtggaggta

SEQ ID NO: 231865 - DNA, 25 bp, Probe sequence
ggtggaggtaagtctatatgctatc

SEQ ID NO: 231866 - DNA, 25 bp, Probe sequence
tagcgttgacagcaactgccacggt

SEQ ID NO: 231867 - DNA, 25 bp, Probe sequence
tagtcgttgctacaaatgcttttgg

SEQ ID NO: 231868 - DNA, 25 bp, Probe sequence
tattttctgattacacgttggagga

SEQ ID NO: 231869 - DNA, 25 bp, Probe sequence
ttacgttacctcaagattttacaat

SEQ ID NO: 231870 - DNA, 25 bp, Probe sequence
tatatgctatcaagtaccaggttta

SEQ ID NO: 231871 - DNA, 25 bp, Probe sequence
tatttattgttctacacgtaagcaa

SEQ ID NO: 231872 - DNA, 25 bp, Probe sequence
tttgctaaacgtaagcctgcttcga

SEQ ID NO: 231873 - DNA, 25 bp, Probe sequence
attggatacgtattgcagcagattg

SEQ ID NO: 231874 - DNA, 25 bp, Probe sequence
attgcacaagtgccacaaatgaaaa

SEQ ID NO: 231875 - DNA, 25 bp, Probe sequence
atcagagagcgagcgtgtcattgtc

SEQ ID NO: 231876 - DNA, 25 bp, Probe sequence
atctatgagcgcttatccaattgtt

SEQ ID NO: 231877 - DNA, 25 bp, Probe sequence
agattgcattattcccacatatgac

SEQ ID NO: 231878 - DNA, 25 bp, Probe sequence
agagcgagcgtgtcattgtcatgca

SEQ ID NO: 231879 - DNA, 25 bp, Probe sequence
agaggcgatgaaacttggtgataag

SEQ ID NO: 231880 - DNA, 25 bp, Probe sequence
aaaggaggtagctcaacatgactaa

SEQ ID NO: 231881 - DNA, 25 bp, Probe sequence
aaaccaataagtgattatccagtat

SEQ ID NO: 231882 - DNA, 25 bp, Probe sequence
aacaatttatgggtagtcatttaga

SEQ ID NO: 231883 - DNA, 25 bp, Probe sequence
caacgacaacgtgtaggagttatac

SEQ ID NO: 231884 - DNA, 25 bp, Probe sequence
caaacatgttgctgtcgataacatt

SEQ ID NO: 231885 - DNA, 25 bp, Probe sequence
cgaaatgcgttgggatattggatac

SEQ ID NO: 231886 - DNA, 25 bp, Probe sequence
gctgatccaccagttattttaatgg

SEQ ID NO: 231887 - DNA, 25 bp, Probe sequence
gcagcagattgcattattcccacat

SEQ ID NO: 231888 - DNA, 25 bp, Probe sequence
gaaccgtttagtgcattagacccaa

SEQ ID NO: 231889 - DNA, 25 bp, Probe sequence
gaacaaattgacacaccagaaggat

SEQ ID NO: 231890 - DNA, 25 bp, Probe sequence
gaaacttggtgataagatttgtctt

SEQ ID NO: 231891 - DNA, 25 bp, Probe sequence
gaaaccaatcgatgaggttacatct

SEQ ID NO: 231892 - DNA, 25 bp, Probe sequence
gacccaatcagccgagaaaaacttc

SEQ ID NO: 231893 - DNA, 25 bp, Probe sequence
gagcgcttatccaattgtttatgac

SEQ ID NO: 231894 - DNA, 25 bp, Probe sequence
gagcgtgtcattgtcatgcaagaag

SEQ ID NO: 231895 - DNA, 25 bp, Probe sequence
gatatcttcaaatatttgtcccaga

SEQ ID NO: 231896 - DNA, 25 bp, Probe sequence
gattatccagtatacgaaatgcgtt

SEQ ID NO: 231897 - DNA, 25 bp, Probe sequence
gattaatcgactcattcacttaagt

SEQ ID NO: 231898 - DNA, 25 bp, Probe sequence
gttacatctatgagcgcttatccaa

SEQ ID NO: 231899 - DNA, 25 bp, Probe sequence
gttagcagctgatccaccagttatt

SEQ ID NO: 231900 - DNA, 25 bp, Probe sequence
ggagttatacgtgcgttagcagctg

SEQ ID NO: 231901 - DNA, 25 bp, Probe sequence
tggaccttcaggttgtggaaaaact

SEQ ID NO: 231902 - DNA, 25 bp, Probe sequence
tgttgctgtcgataacattagtttc

SEQ ID NO: 231903 - DNA, 25 bp, Probe sequence
tcatatttgttacacatgatattca

SEQ ID NO: 231904 - DNA, 25 bp, Probe sequence
tacgtgcgttagcagctgatccacc

SEQ ID NO: 231905 - DNA, 25 bp, Probe sequence
tagtgcattagacccaatcagccga

SEQ ID NO: 231906 - DNA, 25 bp, Probe sequence
ttaatggatgaaccgtttagtgcat

SEQ ID NO: 231907 - DNA, 25 bp, Probe sequence
attcgcttcaatgaaggcgacgtga

SEQ ID NO: 231908 - DNA, 25 bp, Probe sequence
atgtgaaggttatggcaattcgctt

SEQ ID NO: 231909 - DNA, 25 bp, Probe sequence
atggttatttattgcgttgttctaa

SEQ ID NO: 231910 - DNA, 25 bp, Probe sequence
atggcaattcgcttcaatgaaggcg

SEQ ID NO: 231911 - DNA, 25 bp, Probe sequence
aggcgacgtgaaagtgaatactaaa

SEQ ID NO: 231912 - DNA, 25 bp, Probe sequence
aggttatggcaattcgcttcaatga

SEQ ID NO: 231913 - DNA, 25 bp, Probe sequence
aaggttatggcaattcgcttcaatg

SEQ ID NO: 231914 - DNA, 25 bp, Probe sequence
aaggcgacgtgaaagtgaatactaa

SEQ ID NO: 231915 - DNA, 25 bp, Probe sequence
aatgtgaaggttatggcaattcgct

SEQ ID NO: 231916 - DNA, 25 bp, Probe sequence
aattcgcttcaatgaaggcgacgtg

SEQ ID NO: 231917 - DNA, 25 bp, Probe sequence
caattcgcttcaatgaaggcgacgt

SEQ ID NO: 231918 - DNA, 25 bp, Probe sequence
gcgttgttctaaaaatttggacatt

SEQ ID NO: 231919 - DNA, 25 bp, Probe sequence
gcttcaatgaaggcgacgtgaaagt

SEQ ID NO: 231920 - DNA, 25 bp, Probe sequence
gcaattcgcttcaatgaaggcgacg

SEQ ID NO: 231921 - DNA, 25 bp, Probe sequence
gaaggcgacgtgaaagtgaatacta

SEQ ID NO: 231922 - DNA, 25 bp, Probe sequence
gaaggttatggcaattcgcttcaat

SEQ ID NO: 231923 - DNA, 25 bp, Probe sequence
gatggttatttattgcgttgttcta

SEQ ID NO: 231924 - DNA, 25 bp, Probe sequence
gttatggcaattcgcttcaatgaag

SEQ ID NO: 231925 - DNA, 25 bp, Probe sequence
gtgaaggttatggcaattcgcttca

SEQ ID NO: 231926 - DNA, 25 bp, Probe sequence
gtggatggttatttattgcgttgtt

SEQ ID NO: 231927 - DNA, 25 bp, Probe sequence
ggttatggcaattcgcttcaatgaa

SEQ ID NO: 231928 - DNA, 25 bp, Probe sequence
ggatggttatttattgcgttgttct

SEQ ID NO: 231929 - DNA, 25 bp, Probe sequence
ggcaattcgcttcaatgaaggcgac

SEQ ID NO: 231930 - DNA, 25 bp, Probe sequence
tggatggttatttattgcgttgttc

SEQ ID NO: 231931 - DNA, 25 bp, Probe sequence
tggttatttattgcgttgttctaaa

SEQ ID NO: 231932 - DNA, 25 bp, Probe sequence
tgtgaaggttatggcaattcgcttc

SEQ ID NO: 231933 - DNA, 25 bp, Probe sequence
tcgcttcaatgaaggcgacgtgaaa

SEQ ID NO: 231934 - DNA, 25 bp, Probe sequence
tatggcaattcgcttcaatgaaggc

SEQ ID NO: 231935 - DNA, 25 bp, Probe sequence
tattgcgttgttctaaaaatttgga

SEQ ID NO: 231936 - DNA, 25 bp, Probe sequence
ttattgcgttgttctaaaaatttgg

SEQ ID NO: 231937 - DNA, 25 bp, Probe sequence
ttatttattgcgttgttctaaaaat

SEQ ID NO: 231938 - DNA, 25 bp, Probe sequence
ttatggcaattcgcttcaatgaagg

SEQ ID NO: 231939 - DNA, 25 bp, Probe sequence
ttgcgttgttctaaaaatttggaca

SEQ ID NO: 231940 - DNA, 25 bp, Probe sequence
ttgttctaaaaatttggacatttat

SEQ ID NO: 231941 - DNA, 25 bp, Probe sequence
attgcaactgctattgcggtaccat

SEQ ID NO: 231942 - DNA, 25 bp, Probe sequence
attaggtgcaattccagcagcctta

SEQ ID NO: 231943 - DNA, 25 bp, Probe sequence
ataacaatacgtatgctttagctgt

SEQ ID NO: 231944 - DNA, 25 bp, Probe sequence
atcgctattcctatgtttgcacaaa

SEQ ID NO: 231945 - DNA, 25 bp, Probe sequence
atgacgttaggtgttatagtgatga

SEQ ID NO: 231946 - DNA, 25 bp, Probe sequence
atggctggtgtaagaacggctatgg

SEQ ID NO: 231947 - DNA, 25 bp, Probe sequence
aggtgataaaattacgttagctgga

SEQ ID NO: 231948 - DNA, 25 bp, Probe sequence
agatgataagcacgtatttccacca

SEQ ID NO: 231949 - DNA, 25 bp, Probe sequence
accatcgttggcattattaggttta

SEQ ID NO: 231950 - DNA, 25 bp, Probe sequence
aaaacgtgattttgctaaacaacat

SEQ ID NO: 231951 - DNA, 25 bp, Probe sequence
aaaagttattgatgacgttaggtgt

SEQ ID NO: 231952 - DNA, 25 bp, Probe sequence
aacatacgtacaatggaacctaagt

SEQ ID NO: 231953 - DNA, 25 bp, Probe sequence
aatcgtaatgaatattgcggcaatt

SEQ ID NO: 231954 - DNA, 25 bp, Probe sequence
aattccagcagccttattggcaatt

SEQ ID NO: 231955 - DNA, 25 bp, Probe sequence
caaaccataccatcgttggcattat

SEQ ID NO: 231956 - DNA, 25 bp, Probe sequence
ctagcagcattaattggtgcaggcg

SEQ ID NO: 231957 - DNA, 25 bp, Probe sequence
ctgctattgcggtaccattaggtat

SEQ ID NO: 231958 - DNA, 25 bp, Probe sequence
ccaccatatcaaggagcaccattat

SEQ ID NO: 231959 - DNA, 25 bp, Probe sequence
gcaatgcctgttataatggctggtg

SEQ ID NO: 231960 - DNA, 25 bp, Probe sequence
gcaattcttcaaaccataccatcgt

SEQ ID NO: 231961 - DNA, 25 bp, Probe sequence
gaagacccatatacagttgcgaaag

SEQ ID NO: 231962 - DNA, 25 bp, Probe sequence
gaagcggctaaaggtataggtatga

SEQ ID NO: 231963 - DNA, 25 bp, Probe sequence
gatcaacttaaaccaggatttacat

SEQ ID NO: 231964 - DNA, 25 bp, Probe sequence
gattcctttatttggtatcggtcgt

SEQ ID NO: 231965 - DNA, 25 bp, Probe sequence
gtatcggtcgtgtgccagcaattat

SEQ ID NO: 231966 - DNA, 25 bp, Probe sequence
gtatgctttagctgtaaaacgtgat

SEQ ID NO: 231967 - DNA, 25 bp, Probe sequence
ggtgcaggcggactaggagatttaa

SEQ ID NO: 231968 - DNA, 25 bp, Probe sequence
tggaatttaatgatcgtccagatgg

SEQ ID NO: 231969 - DNA, 25 bp, Probe sequence
tgactaactttttcgacatattgag

SEQ ID NO: 231970 - DNA, 25 bp, Probe sequence
tgcggcaattcttcaaaccatacca

SEQ ID NO: 231971 - DNA, 25 bp, Probe sequence
taatatacgtacaattggtgattta

SEQ ID NO: 231972 - DNA, 25 bp, Probe sequence
taagcacgtatttccaccatatcaa

SEQ ID NO: 231973 - DNA, 25 bp, Probe sequence
tagctggaaagcttggctccgagcc

SEQ ID NO: 231974 - DNA, 25 bp, Probe sequence
taggtttaatgattcctttatttgg

SEQ ID NO: 231975 - DNA, 25 bp, Probe sequence
gtacctttaaaagatggtggcttcg

SEQ ID NO: 231976 - DNA, 25 bp, Probe sequence
atttggtgcgggattagatgaagtt

SEQ ID NO: 231977 - DNA, 25 bp, Probe sequence
agaggactacccggatacacttgct

SEQ ID NO: 231978 - DNA, 25 bp, Probe sequence
agatgagttatattattatcctgaa

SEQ ID NO: 231979 - DNA, 25 bp, Probe sequence
agatcaatcacgcattttatttggt

SEQ ID NO: 231980 - DNA, 25 bp, Probe sequence
agaccaccatttaatgtgacacgta

SEQ ID NO: 231981 - DNA, 25 bp, Probe sequence
agcggcgattagtaaacatttaaat

SEQ ID NO: 231982 - DNA, 25 bp, Probe sequence
acgtcattggtatggttatgtaatc

SEQ ID NO: 231983 - DNA, 25 bp, Probe sequence
aaatgaactttatgaagcactttta

SEQ ID NO: 231984 - DNA, 25 bp, Probe sequence
caaaggcgtatggattagcgggttt

SEQ ID NO: 231985 - DNA, 25 bp, Probe sequence
cacaatgcgattgttgaatcagcta

SEQ ID NO: 231986 - DNA, 25 bp, Probe sequence
cttattacgtacattttcaaaggcg

SEQ ID NO: 231987 - DNA, 25 bp, Probe sequence
cccggatacacttgctttgcaacaa

SEQ ID NO: 231988 - DNA, 25 bp, Probe sequence
gcgacattcggtcaatattatcaca

SEQ ID NO: 231989 - DNA, 25 bp, Probe sequence
gcgaccatttccaactggtgttaga

SEQ ID NO: 231990 - DNA, 25 bp, Probe sequence
gcagcagttgcagcacttgaagatc

SEQ ID NO: 231991 - DNA, 25 bp, Probe sequence
gaatacgcagcagttgcagcacttg

SEQ ID NO: 231992 - DNA, 25 bp, Probe sequence
gaagcttattttgaatttgtgacag

SEQ ID NO: 231993 - DNA, 25 bp, Probe sequence
gaaaatttgtatggaccatcgccta

SEQ ID NO: 231994 - DNA, 25 bp, Probe sequence
gaacaacttaatcaactatcagcat

SEQ ID NO: 231995 - DNA, 25 bp, Probe sequence
gaaagattttatcaattacctcaaa

SEQ ID NO: 231996 - DNA, 25 bp, Probe sequence
gatcaccgacattaaaagcggcgat

SEQ ID NO: 231997 - DNA, 25 bp, Probe sequence
gttacaagtgaagcgacattcggtc

SEQ ID NO: 231998 - DNA, 25 bp, Probe sequence
gtattacgcgaccatttccaactgg

SEQ ID NO: 231999 - DNA, 25 bp, Probe sequence
gtatggaccatcgcctaaagttaaa

SEQ ID NO: 232000 - DNA, 25 bp, Probe sequence
gtagggtgtattacgcgaccatttc

SEQ ID NO: 232001 - DNA, 25 bp, Probe sequence
gtaatccaaataatcctacaggtac

SEQ ID NO: 232002 - DNA, 25 bp, Probe sequence
gtgacacgtatatctgaatacgcag

SEQ ID NO: 232003 - DNA, 25 bp, Probe sequence
ggattagcgggtttacgtgtaggat

SEQ ID NO: 232004 - DNA, 25 bp, Probe sequence
ggaacatcattagaccaccatttaa

SEQ ID NO: 232005 - DNA, 25 bp, Probe sequence
tcctgaaacaggatcaccgacatta

SEQ ID NO: 232006 - DNA, 25 bp, Probe sequence
tcatgagagcttagattcgttttta

SEQ ID NO: 232007 - DNA, 25 bp, Probe sequence
tagattcgtttttatctcaagtacc

SEQ ID NO: 232008 - DNA, 25 bp, Probe sequence
tatcagcatatcagcctggtttatc

SEQ ID NO: 232009 - DNA, 25 bp, Probe sequence
atcctagacagcttgaaatttttac

SEQ ID NO: 232010 - DNA, 25 bp, Probe sequence
atgaatggttactagagttctttcc

SEQ ID NO: 232011 - DNA, 25 bp, Probe sequence
atgacccgtaaatcaatcgcgattg

SEQ ID NO: 232012 - DNA, 25 bp, Probe sequence
agatgacaatcctagacagcttgaa

SEQ ID NO: 232013 - DNA, 25 bp, Probe sequence
accgattatgtttacagcagtgcat

SEQ ID NO: 232014 - DNA, 25 bp, Probe sequence
acagcagcaatggatgtaccaacat

SEQ ID NO: 232015 - DNA, 25 bp, Probe sequence
actggtacaccgattatgtttacag

SEQ ID NO: 232016 - DNA, 25 bp, Probe sequence
acagcagtgcataatattaatgatg

SEQ ID NO: 232017 - DNA, 25 bp, Probe sequence
aaaaattaactgaacattatgatgt

SEQ ID NO: 232018 - DNA, 25 bp, Probe sequence
aaaacatcgttaaagctgattattt

SEQ ID NO: 232019 - DNA, 25 bp, Probe sequence
aacttaaacatgttattcctgaaca

SEQ ID NO: 232020 - DNA, 25 bp, Probe sequence
aatggttactagagttctttccatt

SEQ ID NO: 232021 - DNA, 25 bp, Probe sequence
aatgatgatcgatttgaacgcgtaa

SEQ ID NO: 232022 - DNA, 25 bp, Probe sequence
aatagatgacaatcctagacagctt

SEQ ID NO: 232023 - DNA, 25 bp, Probe sequence
aatttttactggtacaccgattatg

SEQ ID NO: 232024 - DNA, 25 bp, Probe sequence
caatcgcgattgatatggatgaagt

SEQ ID NO: 232025 - DNA, 25 bp, Probe sequence
cagcattttgttttttgtggtagaa

SEQ ID NO: 232026 - DNA, 25 bp, Probe sequence
cagcaatggatgtaccaacatcatt

SEQ ID NO: 232027 - DNA, 25 bp, Probe sequence
gcttgaaatttttactggtacaccg

SEQ ID NO: 232028 - DNA, 25 bp, Probe sequence
gaatggtcaaaaacttaaacatgtt

SEQ ID NO: 232029 - DNA, 25 bp, Probe sequence
gaacgcgtaaatagctggaaagatg

SEQ ID NO: 232030 - DNA, 25 bp, Probe sequence
gacaatcctagacagcttgaaattt

SEQ ID NO: 232031 - DNA, 25 bp, Probe sequence
gatgtagaacagtattttttagata

SEQ ID NO: 232032 - DNA, 25 bp, Probe sequence
gatgctgtcaattttagagcggatt

SEQ ID NO: 232033 - DNA, 25 bp, Probe sequence
gatcgatttgaacgcgtaaatagct

SEQ ID NO: 232034 - DNA, 25 bp, Probe sequence
gatatggatgaagtattggcagata

SEQ ID NO: 232035 - DNA, 25 bp, Probe sequence
gttattcctgaacatgatggattaa

SEQ ID NO: 232036 - DNA, 25 bp, Probe sequence
gtcaattttagagcggatttaggta

SEQ ID NO: 232037 - DNA, 25 bp, Probe sequence
ggtacaccgattatgtttacagcag

SEQ ID NO: 232038 - DNA, 25 bp, Probe sequence
tgctacagcagcaatggatgtacca

SEQ ID NO: 232039 - DNA, 25 bp, Probe sequence
taaaatggaagctttgaatggtcaa

SEQ ID NO: 232040 - DNA, 25 bp, Probe sequence
taggagaaatcattgatgctgtcaa

SEQ ID NO: 232041 - DNA, 25 bp, Probe sequence
tattggcagatacattaggagaaat

SEQ ID NO: 232042 - DNA, 25 bp, Probe sequence
ttatgatgtatatattgctacagca

SEQ ID NO: 232043 - DNA, 25 bp, Probe sequence
atcagaggtgtggcagctagcggta

SEQ ID NO: 232044 - DNA, 25 bp, Probe sequence
atcagaagagtataatgtcccttta

SEQ ID NO: 232045 - DNA, 25 bp, Probe sequence
atgaaccgtttattatcgttactgg

SEQ ID NO: 232046 - DNA, 25 bp, Probe sequence
atgaagtttgagttacatggaaaaa

SEQ ID NO: 232047 - DNA, 25 bp, Probe sequence
agcagaaaattgtatggaaccagtt

SEQ ID NO: 232048 - DNA, 25 bp, Probe sequence
accgtttattatcgttactggcact

SEQ ID NO: 232049 - DNA, 25 bp, Probe sequence
actggcactattggatttggagaag

SEQ ID NO: 232050 - DNA, 25 bp, Probe sequence
acatcagaggtgtggcagctagcgg

SEQ ID NO: 232051 - DNA, 25 bp, Probe sequence
aaagcgggtcgcacgatatcagaag

SEQ ID NO: 232052 - DNA, 25 bp, Probe sequence
aagagtataatgtccctttattaat

SEQ ID NO: 232053 - DNA, 25 bp, Probe sequence
aatgtccctttattaatgaagtttg

SEQ ID NO: 232054 - DNA, 25 bp, Probe sequence
aatttcgcaaaagcgggtcgcacga

SEQ ID NO: 232055 - DNA, 25 bp, Probe sequence
catttactggaaatgtccgtcgttt

SEQ ID NO: 232056 - DNA, 25 bp, Probe sequence
cgggtcgcacgatatcagaagagta

SEQ ID NO: 232057 - DNA, 25 bp, Probe sequence
gaagtaccagaacccgttcaatctt

SEQ ID NO: 232058 - DNA, 25 bp, Probe sequence
gcaaaagcgggtcgcacgatatcag

SEQ ID NO: 232059 - DNA, 25 bp, Probe sequence
gaaccgtttattatcgttactggca

SEQ ID NO: 232060 - DNA, 25 bp, Probe sequence
gacgttattgaatttaagaacaagg

SEQ ID NO: 232061 - DNA, 25 bp, Probe sequence
gaggtgtggcagctagcggtaatcg

SEQ ID NO: 232062 - DNA, 25 bp, Probe sequence
gttaatcatcaatacatcagaggtg

SEQ ID NO: 232063 - DNA, 25 bp, Probe sequence
gttactggcactattggatttggag

SEQ ID NO: 232064 - DNA, 25 bp, Probe sequence
gtttattatcgttactggcactatt

SEQ ID NO: 232065 - DNA, 25 bp, Probe sequence
gtggcagctagcggtaatcgaaatt

SEQ ID NO: 232066 - DNA, 25 bp, Probe sequence
ggtgtggcagctagcggtaatcgaa

SEQ ID NO: 232067 - DNA, 25 bp, Probe sequence
ggtcgcacgatatcagaagagtata

SEQ ID NO: 232068 - DNA, 25 bp, Probe sequence
ggagaagtaccagaacccgttcaat

SEQ ID NO: 232069 - DNA, 25 bp, Probe sequence
tggggactaaatttcgcaaaagcgg

SEQ ID NO: 232070 - DNA, 25 bp, Probe sequence
tcgttactggcactattggatttgg

SEQ ID NO: 232071 - DNA, 25 bp, Probe sequence
tagaagttaatcatcaatacatcag

SEQ ID NO: 232072 - DNA, 25 bp, Probe sequence
tattatcgttactggcactattgga

SEQ ID NO: 232073 - DNA, 25 bp, Probe sequence
ttatcgttactggcactattggatt

SEQ ID NO: 232074 - DNA, 25 bp, Probe sequence
ttcaatcttttttagaagttaatca

SEQ ID NO: 232075 - DNA, 25 bp, Probe sequence
ttcgcaaaagcgggtcgcacgatat

SEQ ID NO: 232076 - DNA, 25 bp, Probe sequence
ttggagaagtaccagaacccgttca

SEQ ID NO: 232077 - DNA, 25 bp, Probe sequence
attgttccatctaaattcttcgatt

SEQ ID NO: 232078 - DNA, 25 bp, Probe sequence
atgcggaaacattttaccctatgcc

SEQ ID NO: 232079 - DNA, 25 bp, Probe sequence
agagattcagttcactctggtatgg

SEQ ID NO: 232080 - DNA, 25 bp, Probe sequence
agaatgtacaagttgttctatctaa

SEQ ID NO: 232081 - DNA, 25 bp, Probe sequence
aaagatatcaaccagcgacaccaac

SEQ ID NO: 232082 - DNA, 25 bp, Probe sequence
aacttatctaaattgcgtgcacgtg

SEQ ID NO: 232083 - DNA, 25 bp, Probe sequence
aagtcacttgaaggtggctttagct

SEQ ID NO: 232084 - DNA, 25 bp, Probe sequence
gaacgtcgtacttatggtaatgcgg

SEQ ID NO: 232085 - DNA, 25 bp, Probe sequence
caaccagcgacaccaacatttttaa

SEQ ID NO: 232086 - DNA, 25 bp, Probe sequence
cactctggtatggacgcattaactg

SEQ ID NO: 232087 - DNA, 25 bp, Probe sequence
cattttaccctatgccattcttatc

SEQ ID NO: 232088 - DNA, 25 bp, Probe sequence
gcgacaattcaaacgcatattgacc

SEQ ID NO: 232089 - DNA, 25 bp, Probe sequence
gcatattgaccaaggtatctcaacg

SEQ ID NO: 232090 - DNA, 25 bp, Probe sequence
gaattacattcagttggtcttggtg

SEQ ID NO: 232091 - DNA, 25 bp, Probe sequence
gaatttctactcaatcgaacgttca

SEQ ID NO: 232092 - DNA, 25 bp, Probe sequence
gaagtggatgacagcttaaattcaa

SEQ ID NO: 232093 - DNA, 25 bp, Probe sequence
gaagcggatctaattgaaatcactg

SEQ ID NO: 232094 - DNA, 25 bp, Probe sequence
gaacgttcaatggaaatcgctaaag

SEQ ID NO: 232095 - DNA, 25 bp, Probe sequence
gacaacgatttttatttcaatgtgt

SEQ ID NO: 232096 - DNA, 25 bp, Probe sequence
gacttttatatgtttgcacctcata

SEQ ID NO: 232097 - DNA, 25 bp, Probe sequence
gttttacctattgctaagtcacttg

SEQ ID NO: 232098 - DNA, 25 bp, Probe sequence
gatttacgtttatctacaatatcaa

SEQ ID NO: 232099 - DNA, 25 bp, Probe sequence
gattttgcaaatatcttctttatga

SEQ ID NO: 232100 - DNA, 25 bp, Probe sequence
gtttgcacctcatacagttaaagaa

SEQ ID NO: 232101 - DNA, 25 bp, Probe sequence
gtgtacttaaatatcttccattatg

SEQ ID NO: 232102 - DNA, 25 bp, Probe sequence
ggtggctttagctatgcagatcaac

SEQ ID NO: 232103 - DNA, 25 bp, Probe sequence
ggtatggctattcctacttctgagg

SEQ ID NO: 232104 - DNA, 25 bp, Probe sequence
tcaactggtttaattgttccatcta

SEQ ID NO: 232105 - DNA, 25 bp, Probe sequence
tagaagactataatcaacacgttgc

SEQ ID NO: 232106 - DNA, 25 bp, Probe sequence
tttgcaagttatatgtcagctagta

SEQ ID NO: 232107 - DNA, 25 bp, Probe sequence
gctaaacaatttatttctgctatgg

SEQ ID NO: 232108 - DNA, 25 bp, Probe sequence
ttaaacgtgatatttcttgtaactt

SEQ ID NO: 232109 - DNA, 25 bp, Probe sequence
ttctgaaatttctacacgtgagtta

SEQ ID NO: 232110 - DNA, 25 bp, Probe sequence
ttgcgcaaacacaattacaatcagg

SEQ ID NO: 232111 - DNA, 25 bp, Probe sequence
atatctcaaatgtgggttgaaacag

SEQ ID NO: 232112 - DNA, 25 bp, Probe sequence
atatggccagagttacgagtgtatt

SEQ ID NO: 232113 - DNA, 25 bp, Probe sequence
atgatgactttgtatttgacaacaa

SEQ ID NO: 232114 - DNA, 25 bp, Probe sequence
atggcgatgatggagcaaatacacg

SEQ ID NO: 232115 - DNA, 25 bp, Probe sequence
aggtgatggttatgtattagcatta

SEQ ID NO: 232116 - DNA, 25 bp, Probe sequence
agcattagctggtttaacaggctta

SEQ ID NO: 232117 - DNA, 25 bp, Probe sequence
accaatatatggccagagttacgag

SEQ ID NO: 232118 - DNA, 25 bp, Probe sequence
acaacaactaaaaaccatgacttct

SEQ ID NO: 232119 - DNA, 25 bp, Probe sequence
caactaaaaaccatgacttcttctc

SEQ ID NO: 232120 - DNA, 25 bp, Probe sequence
aagacattgcaagttggaagacttt

SEQ ID NO: 232121 - DNA, 25 bp, Probe sequence
aatgttatacgatgatcttggaatc

SEQ ID NO: 232122 - DNA, 25 bp, Probe sequence
aattcttttagatgaatctattcat

SEQ ID NO: 232123 - DNA, 25 bp, Probe sequence
caagatgatgactttgtatttgaca

SEQ ID NO: 232124 - DNA, 25 bp, Probe sequence
caggcttagatacacatcaagcaga

SEQ ID NO: 232125 - DNA, 25 bp, Probe sequence
catttacgaaatgaactatctgaaa

SEQ ID NO: 232126 - DNA, 25 bp, Probe sequence
ctattaccatctagtgaaacaaact

SEQ ID NO: 232127 - DNA, 25 bp, Probe sequence
gaagctgaacaagacacatttaaaa

SEQ ID NO: 232128 - DNA, 25 bp, Probe sequence
gaaatcattcgtaaaattcttttag

SEQ ID NO: 232129 - DNA, 25 bp, Probe sequence
gacaaaatatatctcaaatgtgggt

SEQ ID NO: 232130 - DNA, 25 bp, Probe sequence
gagtcatacacaaaaatgttatacg

SEQ ID NO: 232131 - DNA, 25 bp, Probe sequence
gagtgtatttttagaaacattctta

SEQ ID NO: 232132 - DNA, 25 bp, Probe sequence
gatagctgttaattggaacacacaa

SEQ ID NO: 232133 - DNA, 25 bp, Probe sequence
gatatgacgaatatgttttggagac

SEQ ID NO: 232134 - DNA, 25 bp, Probe sequence
gtttattcatttatggcgatgatgg

SEQ ID NO: 232135 - DNA, 25 bp, Probe sequence
gtatcaaaagacattgcaagttgga

SEQ ID NO: 232136 - DNA, 25 bp, Probe sequence
gtataaattgctaaatgacttgtat

SEQ ID NO: 232137 - DNA, 25 bp, Probe sequence
ggtttaacaggcttagatacacatc

SEQ ID NO: 232138 - DNA, 25 bp, Probe sequence
ggaacacacaagaagatatgacgaa

SEQ ID NO: 232139 - DNA, 25 bp, Probe sequence
ggccagagttacgagtgtattttta

SEQ ID NO: 232140 - DNA, 25 bp, Probe sequence
tgatggagcaaatacacgcgaaaag

SEQ ID NO: 232141 - DNA, 25 bp, Probe sequence
tgagaatgccttagatacaacaact

SEQ ID NO: 232142 - DNA, 25 bp, Probe sequence
tacgatgatcttggaatcactgaag

SEQ ID NO: 232143 - DNA, 25 bp, Probe sequence
tttgaaccttattttgaggaacgtg

SEQ ID NO: 232144 - DNA, 25 bp, Probe sequence
ttgaggaacgtgaatttaacccaat

SEQ ID NO: 232145 - DNA, 25 bp, Probe sequence
atgtacaatgctatttatattggca

SEQ ID NO: 232146 - DNA, 25 bp, Probe sequence
aggcggaaagtcagctaacaatatt

SEQ ID NO: 232147 - DNA, 25 bp, Probe sequence
agtcagctaacaatattgtgcaagt

SEQ ID NO: 232148 - DNA, 25 bp, Probe sequence
agaagcaggcggaaagtcagctaac

SEQ ID NO: 232149 - DNA, 25 bp, Probe sequence
agcaggcggaaagtcagctaacaat

SEQ ID NO: 232150 - DNA, 25 bp, Probe sequence
agctaacaatattgtgcaagttggc

SEQ ID NO: 232151 - DNA, 25 bp, Probe sequence
acagaagcaggcggaaagtcagcta

SEQ ID NO: 232152 - DNA, 25 bp, Probe sequence
acacagaagcaggcggaaagtcagc

SEQ ID NO: 232153 - DNA, 25 bp, Probe sequence
acaatgctatttatattggcagtag

SEQ ID NO: 232154 - DNA, 25 bp, Probe sequence
aaagtcagctaacaatattgtgcaa

SEQ ID NO: 232155 - DNA, 25 bp, Probe sequence
aacacagaagcaggcggaaagtcag

SEQ ID NO: 232156 - DNA, 25 bp, Probe sequence
aagcaggcggaaagtcagctaacaa

SEQ ID NO: 232157 - DNA, 25 bp, Probe sequence
aagtcagctaacaatattgtgcaag

SEQ ID NO: 232158 - DNA, 25 bp, Probe sequence
cacagaagcaggcggaaagtcagct

SEQ ID NO: 232159 - DNA, 25 bp, Probe sequence
cagctaacaatattgtgcaagttgg

SEQ ID NO: 232160 - DNA, 25 bp, Probe sequence
cagaagcaggcggaaagtcagctaa

SEQ ID NO: 232161 - DNA, 25 bp, Probe sequence
caggcggaaagtcagctaacaatat

SEQ ID NO: 232162 - DNA, 25 bp, Probe sequence
ctaacaatattgtgcaagttggcgg

SEQ ID NO: 232163 - DNA, 25 bp, Probe sequence
cggaaagtcagctaacaatattgtg

SEQ ID NO: 232164 - DNA, 25 bp, Probe sequence
cccaacacagaagcaggcggaaagt

SEQ ID NO: 232165 - DNA, 25 bp, Probe sequence
ccccaacacagaagcaggcggaaag

SEQ ID NO: 232166 - DNA, 25 bp, Probe sequence
ccaacacagaagcaggcggaaagtc

SEQ ID NO: 232167 - DNA, 25 bp, Probe sequence
gcggaaagtcagctaacaatattgt

SEQ ID NO: 232168 - DNA, 25 bp, Probe sequence
gctaacaatattgtgcaagttggcg

SEQ ID NO: 232169 - DNA, 25 bp, Probe sequence
gcaggcggaaagtcagctaacaata

SEQ ID NO: 232170 - DNA, 25 bp, Probe sequence
gaagcaggcggaaagtcagctaaca

SEQ ID NO: 232171 - DNA, 25 bp, Probe sequence
gaaagtcagctaacaatattgtgca

SEQ ID NO: 232172 - DNA, 25 bp, Probe sequence
gtacaatgctatttatattggcagt

SEQ ID NO: 232173 - DNA, 25 bp, Probe sequence
gtcagctaacaatattgtgcaagtt

SEQ ID NO: 232174 - DNA, 25 bp, Probe sequence
ggaaagtcagctaacaatattgtgc

SEQ ID NO: 232175 - DNA, 25 bp, Probe sequence
ggcggaaagtcagctaacaatattg

SEQ ID NO: 232176 - DNA, 25 bp, Probe sequence
tgtacaatgctatttatattggcag

SEQ ID NO: 232177 - DNA, 25 bp, Probe sequence
tcagctaacaatattgtgcaagttg

SEQ ID NO: 232178 - DNA, 25 bp, Probe sequence
tacaatgctatttatattggcagta

SEQ ID NO: 232179 - DNA, 25 bp, Probe sequence
attgacactaaattatttgaaaggc

SEQ ID NO: 232180 - DNA, 25 bp, Probe sequence
attatggtcaaaaaacgctactatt

SEQ ID NO: 232181 - DNA, 25 bp, Probe sequence
atggtcaaaaaacgctactattaat

SEQ ID NO: 232182 - DNA, 25 bp, Probe sequence
aggctattgaaattatggtcaaaaa

SEQ ID NO: 232183 - DNA, 25 bp, Probe sequence
acgctactattaatgagaaatatta

SEQ ID NO: 232184 - DNA, 25 bp, Probe sequence
actaaattatttgaaaggctattga

SEQ ID NO: 232185 - DNA, 25 bp, Probe sequence
aaaggctattgaaattatggtcaaa

SEQ ID NO: 232186 - DNA, 25 bp, Probe sequence
aaacgctactattaatgagaaatat

SEQ ID NO: 232187 - DNA, 25 bp, Probe sequence
aaaaacgctactattaatgagaaat

SEQ ID NO: 232188 - DNA, 25 bp, Probe sequence
aaaacgctactattaatgagaaata

SEQ ID NO: 232189 - DNA, 25 bp, Probe sequence
aacgctactattaatgagaaatatt

SEQ ID NO: 232190 - DNA, 25 bp, Probe sequence
aaggctattgaaattatggtcaaaa

SEQ ID NO: 232191 - DNA, 25 bp, Probe sequence
aattatggtcaaaaaacgctactat

SEQ ID NO: 232192 - DNA, 25 bp, Probe sequence
caaaaaacgctactattaatgagaa

SEQ ID NO: 232193 - DNA, 25 bp, Probe sequence
cactaaattatttgaaaggctattg

SEQ ID NO: 232194 - DNA, 25 bp, Probe sequence
cacattccgaaaaattaaatttcag

SEQ ID NO: 232195 - DNA, 25 bp, Probe sequence
ctaaattatttgaaaggctattgaa

SEQ ID NO: 232196 - DNA, 25 bp, Probe sequence
gaaaggctattgaaattatggtcaa

SEQ ID NO: 232197 - DNA, 25 bp, Probe sequence
gacactaaattatttgaaaggctat

SEQ ID NO: 232198 - DNA, 25 bp, Probe sequence
gaaattatggtcaaaaaacgctact

SEQ ID NO: 232199 - DNA, 25 bp, Probe sequence
gtcaaaaaacgctactattaatgag

SEQ ID NO: 232200 - DNA, 25 bp, Probe sequence
ggtcaaaaaacgctactattaatga

SEQ ID NO: 232201 - DNA, 25 bp, Probe sequence
tggtcaaaaaacgctactattaatg

SEQ ID NO: 232202 - DNA, 25 bp, Probe sequence
tgacactaaattatttgaaaggcta

SEQ ID NO: 232203 - DNA, 25 bp, Probe sequence
tgaaaggctattgaaattatggtca

SEQ ID NO: 232204 - DNA, 25 bp, Probe sequence
tcaaaaaacgctactattaatgaga

SEQ ID NO: 232205 - DNA, 25 bp, Probe sequence
taagtaaacaaaatacacattccga

SEQ ID NO: 232206 - DNA, 25 bp, Probe sequence
taaaattgacactaaattatttgaa

SEQ ID NO: 232207 - DNA, 25 bp, Probe sequence
taaattatttgaaaggctattgaaa

SEQ ID NO: 232208 - DNA, 25 bp, Probe sequence
taaatttcagtttaattgcaaatat

SEQ ID NO: 232209 - DNA, 25 bp, Probe sequence
tatggtcaaaaaacgctactattaa

SEQ ID NO: 232210 - DNA, 25 bp, Probe sequence
ttatggtcaaaaaacgctactatta

SEQ ID NO: 232211 - DNA, 25 bp, Probe sequence
ttgaaaggctattgaaattatggtc

SEQ ID NO: 232212 - DNA, 25 bp, Probe sequence
ttgacactaaattatttgaaaggct

SEQ ID NO: 232213 - DNA, 25 bp, Probe sequence
ataggttggattgttgcttctgaaa

SEQ ID NO: 232214 - DNA, 25 bp, Probe sequence
atcacaggggattggttttatggaa

SEQ ID NO: 232215 - DNA, 25 bp, Probe sequence
atcaatccgggttacatttatggca

SEQ ID NO: 232216 - DNA, 25 bp, Probe sequence
atggtcctctcaacaaagaagtcag

SEQ ID NO: 232217 - DNA, 25 bp, Probe sequence
agccatgtctaatacagccagtcat

SEQ ID NO: 232218 - DNA, 25 bp, Probe sequence
acatgccattcaacttttatctatt

SEQ ID NO: 232219 - DNA, 25 bp, Probe sequence
aaagacataatattcctatcattga

SEQ ID NO: 232220 - DNA, 25 bp, Probe sequence
aaagcgatttatatagaacctaggt

SEQ ID NO: 232221 - DNA, 25 bp, Probe sequence
aagaagtcagtatacggtgcaatta

SEQ ID NO: 232222 - DNA, 25 bp, Probe sequence
aatgtaatgatcacttcaggcgctt

SEQ ID NO: 232223 - DNA, 25 bp, Probe sequence
caggcgctttacatgccattcaact

SEQ ID NO: 232224 - DNA, 25 bp, Probe sequence
ccgacaggtcgttctttaacgaatg

SEQ ID NO: 232225 - DNA, 25 bp, Probe sequence
gaatgcaaattgactatggatccag

SEQ ID NO: 232226 - DNA, 25 bp, Probe sequence
gaagacttatcttttggttataata

SEQ ID NO: 232227 - DNA, 25 bp, Probe sequence
gaaatgatgttatggtcctctcaac

SEQ ID NO: 232228 - DNA, 25 bp, Probe sequence
gacatattgatgttccttataatca

SEQ ID NO: 232229 - DNA, 25 bp, Probe sequence
gagactttatgttaaacatcctcaa

SEQ ID NO: 232230 - DNA, 25 bp, Probe sequence
gaggttattttgtatggttagtctt

SEQ ID NO: 232231 - DNA, 25 bp, Probe sequence
gatgccataataatttcgaatacac

SEQ ID NO: 232232 - DNA, 25 bp, Probe sequence
gttaatgccacatattcaattgaaa

SEQ ID NO: 232233 - DNA, 25 bp, Probe sequence
gtttttcaaaaacgattgcaccagc

SEQ ID NO: 232234 - DNA, 25 bp, Probe sequence
gggtttttaggtcaagatgccataa

SEQ ID NO: 232235 - DNA, 25 bp, Probe sequence
ggatatagcacattgggaggttcca

SEQ ID NO: 232236 - DNA, 25 bp, Probe sequence
ggctatcttttgcctttgaatcaaa

SEQ ID NO: 232237 - DNA, 25 bp, Probe sequence
tgggaggttccaagtggaggttatt

SEQ ID NO: 232238 - DNA, 25 bp, Probe sequence
tgatcacttcaggcgctttacatgc

SEQ ID NO: 232239 - DNA, 25 bp, Probe sequence
taatggctatggttatatcaagtta

SEQ ID NO: 232240 - DNA, 25 bp, Probe sequence
taagcatgcgctctataaaatttat

SEQ ID NO: 232241 - DNA, 25 bp, Probe sequence
tacaccatcatatattcactctaca

SEQ ID NO: 232242 - DNA, 25 bp, Probe sequence
tatggatccagtattttgtcacaaa

SEQ ID NO: 232243 - DNA, 25 bp, Probe sequence
tattttctttagcgatccaactcct

SEQ ID NO: 232244 - DNA, 25 bp, Probe sequence
ttcactctacaaatgtttttgagca

SEQ ID NO: 232245 - DNA, 25 bp, Probe sequence
ttgagacagatgattcgtatataca

SEQ ID NO: 232246 - DNA, 25 bp, Probe sequence
ttgggtatatcgttaatgccacata

SEQ ID NO: 232247 - DNA, 25 bp, Probe sequence
attggtggaagttatttcatttatc

SEQ ID NO: 232248 - DNA, 25 bp, Probe sequence
atttgaactttatattaacacttat

SEQ ID NO: 232249 - DNA, 25 bp, Probe sequence
atttgcttgagttggattagtttat

SEQ ID NO: 232250 - DNA, 25 bp, Probe sequence
agttagaaggagaaatgcgcaatga

SEQ ID NO: 232251 - DNA, 25 bp, Probe sequence
actgtaaatctagcgcatgaactaa

SEQ ID NO: 232252 - DNA, 25 bp, Probe sequence
aacgatggtgttattcgcactaatc

SEQ ID NO: 232253 - DNA, 25 bp, Probe sequence
aatcggtatgggttactaatgtata

SEQ ID NO: 232254 - DNA, 25 bp, Probe sequence
aatatcaattttcaagtcgtttaag

SEQ ID NO: 232255 - DNA, 25 bp, Probe sequence
ctgtgtcaactgcattagtaggacc

SEQ ID NO: 232256 - DNA, 25 bp, Probe sequence
gcgcatgaactaatgaagacgtatg

SEQ ID NO: 232257 - DNA, 25 bp, Probe sequence
gcgacaatttgcttgagttggatta

SEQ ID NO: 232258 - DNA, 25 bp, Probe sequence
gctacgacagaaatgagtatactta

SEQ ID NO: 232259 - DNA, 25 bp, Probe sequence
gatgtattgcttttaggtcgtgctg

SEQ ID NO: 232260 - DNA, 25 bp, Probe sequence
gatgcagtttatttatttatcaaag

SEQ ID NO: 232261 - DNA, 25 bp, Probe sequence
gttattcgcactaatcctattccaa

SEQ ID NO: 232262 - DNA, 25 bp, Probe sequence
gttatttcatttatctattagttag

SEQ ID NO: 232263 - DNA, 25 bp, Probe sequence
gtattgcttttaggtcgtgctgaag

SEQ ID NO: 232264 - DNA, 25 bp, Probe sequence
gtcaactgcattagtaggaccaatt

SEQ ID NO: 232265 - DNA, 25 bp, Probe sequence
gtctttttatttggaattcaatcgg

SEQ ID NO: 232266 - DNA, 25 bp, Probe sequence
gggttactaatgtatatttgaactt

SEQ ID NO: 232267 - DNA, 25 bp, Probe sequence
ggtgttattcgcactaatcctattc

SEQ ID NO: 232268 - DNA, 25 bp, Probe sequence
ggattagtttatttagtgcgcaatg

SEQ ID NO: 232269 - DNA, 25 bp, Probe sequence
ggaagttatttcatttatctattag

SEQ ID NO: 232270 - DNA, 25 bp, Probe sequence
tggaattcaatcggtatgggttact

SEQ ID NO: 232271 - DNA, 25 bp, Probe sequence
tgattatggatcctgagtcattttt

SEQ ID NO: 232272 - DNA, 25 bp, Probe sequence
tcaagtcgtttaagaaagttcatat

SEQ ID NO: 232273 - DNA, 25 bp, Probe sequence
taattagtatgctgtacttatttgt

SEQ ID NO: 232274 - DNA, 25 bp, Probe sequence
taattattttagtaggtgctgccat

SEQ ID NO: 232275 - DNA, 25 bp, Probe sequence
tagtaggaccaattacatttttagg

SEQ ID NO: 232276 - DNA, 25 bp, Probe sequence
taggtcgtgctgaagcaattaatct

SEQ ID NO: 232277 - DNA, 25 bp, Probe sequence
tatattaacacttataacgatggtg

SEQ ID NO: 232278 - DNA, 25 bp, Probe sequence
tattcgcactaatcctattccaagg

SEQ ID NO: 232279 - DNA, 25 bp, Probe sequence
tttagtgcgcaatgggtagttgaaa

SEQ ID NO: 232280 - DNA, 25 bp, Probe sequence
ttttagtaggtgctgccattgcaac

SEQ ID NO: 232281 - DNA, 25 bp, Probe sequence
attaactttgcgtcctgttattcag

SEQ ID NO: 232282 - DNA, 25 bp, Probe sequence
atattaactttgcgtcctgttattc

SEQ ID NO: 232283 - DNA, 25 bp, Probe sequence
atatgaagcatgctgttcaaattat

SEQ ID NO: 232284 - DNA, 25 bp, Probe sequence
atgctgttcaaattatgcaaacgtt

SEQ ID NO: 232285 - DNA, 25 bp, Probe sequence
atgatattaactttgcgtcctgtta

SEQ ID NO: 232286 - DNA, 25 bp, Probe sequence
agatatgaagcatgctgttcaaatt

SEQ ID NO: 232287 - DNA, 25 bp, Probe sequence
actttgcgtcctgttattcagatca

SEQ ID NO: 232288 - DNA, 25 bp, Probe sequence
acatgatattaactttgcgtcctgt

SEQ ID NO: 232289 - DNA, 25 bp, Probe sequence
aaatgaataaagcgattgtcattgt

SEQ ID NO: 232290 - DNA, 25 bp, Probe sequence
aaatgttagcgcataaaatgaataa

SEQ ID NO: 232291 - DNA, 25 bp, Probe sequence
aactttgcgtcctgttattcagatc

SEQ ID NO: 232292 - DNA, 25 bp, Probe sequence
aatttagatatgaagcatgctgttc

SEQ ID NO: 232293 - DNA, 25 bp, Probe sequence
catgatattaactttgcgtcctgtt

SEQ ID NO: 232294 - DNA, 25 bp, Probe sequence
catgctgttcaaattatgcaaacgt

SEQ ID NO: 232295 - DNA, 25 bp, Probe sequence
ctttgcgtcctgttattcagatcag

SEQ ID NO: 232296 - DNA, 25 bp, Probe sequence
ctgttattcagatcagattgtagca

SEQ ID NO: 232297 - DNA, 25 bp, Probe sequence
cgtcctgttattcagatcagattgt

SEQ ID NO: 232298 - DNA, 25 bp, Probe sequence
gcgtcctgttattcagatcagattg

SEQ ID NO: 232299 - DNA, 25 bp, Probe sequence
gctgttcaaattatgcaaacgttaa

SEQ ID NO: 232300 - DNA, 25 bp, Probe sequence
gcaaacgttaaaaatgttagcgcat

SEQ ID NO: 232301 - DNA, 25 bp, Probe sequence
gaagcatgctgttcaaattatgcaa

SEQ ID NO: 232302 - DNA, 25 bp, Probe sequence
gatattaactttgcgtcctgttatt

SEQ ID NO: 232303 - DNA, 25 bp, Probe sequence
gtcctgttattcagatcagattgta

SEQ ID NO: 232304 - DNA, 25 bp, Probe sequence
ggatttgtttatattttaaggattg

SEQ ID NO: 232305 - DNA, 25 bp, Probe sequence
tgatattaactttgcgtcctgttat

SEQ ID NO: 232306 - DNA, 25 bp, Probe sequence
tgacttctttaattggacctaatgg

SEQ ID NO: 232307 - DNA, 25 bp, Probe sequence
tgcgtcctgttattcagatcagatt

SEQ ID NO: 232308 - DNA, 25 bp, Probe sequence
tcaaaggatttgtttatattttaag

SEQ ID NO: 232309 - DNA, 25 bp, Probe sequence
taactttgcgtcctgttattcagat

SEQ ID NO: 232310 - DNA, 25 bp, Probe sequence
tattaactttgcgtcctgttattca

SEQ ID NO: 232311 - DNA, 25 bp, Probe sequence
tttgcgtcctgttattcagatcaga

SEQ ID NO: 232312 - DNA, 25 bp, Probe sequence
ttaactttgcgtcctgttattcaga

SEQ ID NO: 232313 - DNA, 25 bp, Probe sequence
ttgcgtcctgttattcagatcagat

SEQ ID NO: 232314 - DNA, 25 bp, Probe sequence
ttgacttctttaattggacctaatg

SEQ ID NO: 232315 - DNA, 25 bp, Probe sequence
attagcggcatgcggtaacaattct

SEQ ID NO: 232316 - DNA, 25 bp, Probe sequence
atggtactttgcagctggatcaact

SEQ ID NO: 232317 - DNA, 25 bp, Probe sequence
agcagtaatgtttttattagcggca

SEQ ID NO: 232318 - DNA, 25 bp, Probe sequence
agctggatcaactacaactacaatt

SEQ ID NO: 232319 - DNA, 25 bp, Probe sequence
actttgcagctggatcaactacaac

SEQ ID NO: 232320 - DNA, 25 bp, Probe sequence
aactataaaatgcgtggcgagaaaa

SEQ ID NO: 232321 - DNA, 25 bp, Probe sequence
aatgtttttattagcggcatgcggt

SEQ ID NO: 232322 - DNA, 25 bp, Probe sequence
aatgcgtggcgagaaaaaagatggt

SEQ ID NO: 232323 - DNA, 25 bp, Probe sequence
aattatggtactttgcagctggatc

SEQ ID NO: 232324 - DNA, 25 bp, Probe sequence
catgcggtaacaattctgataaaga

SEQ ID NO: 232325 - DNA, 25 bp, Probe sequence
cctaaattatggtactttgcagctg

SEQ ID NO: 232326 - DNA, 25 bp, Probe sequence
gcggcatgcggtaacaattctgata

SEQ ID NO: 232327 - DNA, 25 bp, Probe sequence
gctggatcaactacaactacaatta

SEQ ID NO: 232328 - DNA, 25 bp, Probe sequence
gcagctggatcaactacaactacaa

SEQ ID NO: 232329 - DNA, 25 bp, Probe sequence
gaattatcaacatttggacctaaag

SEQ ID NO: 232330 - DNA, 25 bp, Probe sequence
gaaggtgaattatcaacatttggac

SEQ ID NO: 232331 - DNA, 25 bp, Probe sequence
gaagaaaacagtcttatatttagta

SEQ ID NO: 232332 - DNA, 25 bp, Probe sequence
gtttttattagcggcatgcggtaac

SEQ ID NO: 232333 - DNA, 25 bp, Probe sequence
gtactttgcagctggatcaactaca

SEQ ID NO: 232334 - DNA, 25 bp, Probe sequence
gtaatgaaagaaatgggcttatcag

SEQ ID NO: 232335 - DNA, 25 bp, Probe sequence
gtggtaaatcaactgcgaaacaagc

SEQ ID NO: 232336 - DNA, 25 bp, Probe sequence
ggtggattagtttacgatacattag

SEQ ID NO: 232337 - DNA, 25 bp, Probe sequence
ggtgaattatcaacatttggaccta

SEQ ID NO: 232338 - DNA, 25 bp, Probe sequence
ggtactttgcagctggatcaactac

SEQ ID NO: 232339 - DNA, 25 bp, Probe sequence
ggatcaactacaactacaattaaac

SEQ ID NO: 232340 - DNA, 25 bp, Probe sequence
ggcatgcggtaacaattctgataaa

SEQ ID NO: 232341 - DNA, 25 bp, Probe sequence
tgcagctggatcaactacaactaca

SEQ ID NO: 232342 - DNA, 25 bp, Probe sequence
tcaactacaactacaattaaacaaa

SEQ ID NO: 232343 - DNA, 25 bp, Probe sequence
taaatcaactgcgaaacaagcatta

SEQ ID NO: 232344 - DNA, 25 bp, Probe sequence
tagcggcatgcggtaacaattctga

SEQ ID NO: 232345 - DNA, 25 bp, Probe sequence
tatcaacatttggacctaaaggtcg

SEQ ID NO: 232346 - DNA, 25 bp, Probe sequence
tttgcagctggatcaactacaacta

SEQ ID NO: 232347 - DNA, 25 bp, Probe sequence
tttattagcggcatgcggtaacaat

SEQ ID NO: 232348 - DNA, 25 bp, Probe sequence
ttatggtactttgcagctggatcaa

SEQ ID NO: 232349 - DNA, 25 bp, Probe sequence
ataaagcgttaagagatactgcgaa

SEQ ID NO: 232350 - DNA, 25 bp, Probe sequence
ataactcacggcgataaagcctttg

SEQ ID NO: 232351 - DNA, 25 bp, Probe sequence
atcacattatgccaatgattgaaaa

SEQ ID NO: 232352 - DNA, 25 bp, Probe sequence
atctcatacctaaatttgaagcata

SEQ ID NO: 232353 - DNA, 25 bp, Probe sequence
atgttaaaaaccatctcatacctaa

SEQ ID NO: 232354 - DNA, 25 bp, Probe sequence
aggtttatgtaatcaatctatcaag

SEQ ID NO: 232355 - DNA, 25 bp, Probe sequence
aaattgttattatcgctgttttagc

SEQ ID NO: 232356 - DNA, 25 bp, Probe sequence
aaattgatcatctaagtaaaactga

SEQ ID NO: 232357 - DNA, 25 bp, Probe sequence
aaagaattacaacatgtcatggata

SEQ ID NO: 232358 - DNA, 25 bp, Probe sequence
aaaaaccatctcatacctaaatttg

SEQ ID NO: 232359 - DNA, 25 bp, Probe sequence
aaaatttgcctgatgatacaatgaa

SEQ ID NO: 232360 - DNA, 25 bp, Probe sequence
aacgaagacattttagattatacga

SEQ ID NO: 232361 - DNA, 25 bp, Probe sequence
aagtcgatgtagataagttgccgaa

SEQ ID NO: 232362 - DNA, 25 bp, Probe sequence
aagtgaagcaactaatcttacgaca

SEQ ID NO: 232363 - DNA, 25 bp, Probe sequence
ctcacggcgataaagcctttgaaaa

SEQ ID NO: 232364 - DNA, 25 bp, Probe sequence
gcgattaaaaatcacattatgccaa

SEQ ID NO: 232365 - DNA, 25 bp, Probe sequence
gctgttttagcgattttatttgtag

SEQ ID NO: 232366 - DNA, 25 bp, Probe sequence
gcagaactattataatacacgtatt

SEQ ID NO: 232367 - DNA, 25 bp, Probe sequence
gcacaacatcaatttactaagcaat

SEQ ID NO: 232368 - DNA, 25 bp, Probe sequence
gaatttaaggcactacaagaagatg

SEQ ID NO: 232369 - DNA, 25 bp, Probe sequence
gaatatatgacgcttgcaaatgaga

SEQ ID NO: 232370 - DNA, 25 bp, Probe sequence
gaagaaggatgcgatatatcaatta

SEQ ID NO: 232371 - DNA, 25 bp, Probe sequence
gaagcaactaatcttacgacaaaat

SEQ ID NO: 232372 - DNA, 25 bp, Probe sequence
gaagcatattataagtcagcaaaaa

SEQ ID NO: 232373 - DNA, 25 bp, Probe sequence
gaaaatgaagtaaaaggcgcgatta

SEQ ID NO: 232374 - DNA, 25 bp, Probe sequence
gaaatgtattacagtctgcagaact

SEQ ID NO: 232375 - DNA, 25 bp, Probe sequence
gacgcttgcaaatgagaagaaggat

SEQ ID NO: 232376 - DNA, 25 bp, Probe sequence
gaggcacaacatcaatttactaagc

SEQ ID NO: 232377 - DNA, 25 bp, Probe sequence
gataagttgccgaaaaagggtatag

SEQ ID NO: 232378 - DNA, 25 bp, Probe sequence
gtagtaataagtgcttgtggtaata

SEQ ID NO: 232379 - DNA, 25 bp, Probe sequence
gtaatcaatctatcaagtataacga

SEQ ID NO: 232380 - DNA, 25 bp, Probe sequence
gtgagaagttatcaaaagtcgatgt

SEQ ID NO: 232381 - DNA, 25 bp, Probe sequence
gggtatagatataactcacggcgat

SEQ ID NO: 232382 - DNA, 25 bp, Probe sequence
tattacagtctgcagaactattata

SEQ ID NO: 232383 - DNA, 25 bp, Probe sequence
atcacctcaagcattttattttgta

SEQ ID NO: 232384 - DNA, 25 bp, Probe sequence
atgaatcacctcaagcattttattt

SEQ ID NO: 232385 - DNA, 25 bp, Probe sequence
acctcaagcattttattttgtaaat

SEQ ID NO: 232386 - DNA, 25 bp, Probe sequence
acgcgatttgtcagattatattgct

SEQ ID NO: 232387 - DNA, 25 bp, Probe sequence
acttgtccaatatcggcaaatgcgt

SEQ ID NO: 232388 - DNA, 25 bp, Probe sequence
aaaacatagtgaaacttgtccaata

SEQ ID NO: 232389 - DNA, 25 bp, Probe sequence
aacatgaatcacctcaagcatttta

SEQ ID NO: 232390 - DNA, 25 bp, Probe sequence
aacgcgatatggacggttattattt

SEQ ID NO: 232391 - DNA, 25 bp, Probe sequence
aagaacgcgatttgtcagattatat

SEQ ID NO: 232392 - DNA, 25 bp, Probe sequence
aatgtgtcgtcattagcacaagcag

SEQ ID NO: 232393 - DNA, 25 bp, Probe sequence
aatggtgaaatggtttggaatcgag

SEQ ID NO: 232394 - DNA, 25 bp, Probe sequence
aatgcgtacgatcaatttaataaat

SEQ ID NO: 232395 - DNA, 25 bp, Probe sequence
aataaatttttatatgaacgcgata

SEQ ID NO: 232396 - DNA, 25 bp, Probe sequence
caattgaccaatttgaacaggttat

SEQ ID NO: 232397 - DNA, 25 bp, Probe sequence
cgaacgttaaacatgaatcacctca

SEQ ID NO: 232398 - DNA, 25 bp, Probe sequence
gaatcacctcaagcattttattttg

SEQ ID NO: 232399 - DNA, 25 bp, Probe sequence
gaaacttgtccaatatcggcaaatg

SEQ ID NO: 232400 - DNA, 25 bp, Probe sequence
gacggttattatttgattgtccaac

SEQ ID NO: 232401 - DNA, 25 bp, Probe sequence
gaccaatttgaacaggttattgagg

SEQ ID NO: 232402 - DNA, 25 bp, Probe sequence
gatttgtcagattatattgctaaaa

SEQ ID NO: 232403 - DNA, 25 bp, Probe sequence
gattgtccaacaagaacgcgatttg

SEQ ID NO: 232404 - DNA, 25 bp, Probe sequence
gttaaacatgaatcacctcaagcat

SEQ ID NO: 232405 - DNA, 25 bp, Probe sequence
ggtttggaatcgagaccacggtgat

SEQ ID NO: 232406 - DNA, 25 bp, Probe sequence
gtcgtcattagcacaagcagaagaa

SEQ ID NO: 232407 - DNA, 25 bp, Probe sequence
gtccaacaagaacgcgatttgtcag

SEQ ID NO: 232408 - DNA, 25 bp, Probe sequence
gtccaatatcggcaaatgcgtacga

SEQ ID NO: 232409 - DNA, 25 bp, Probe sequence
gtgaaacttgtccaatatcggcaaa

SEQ ID NO: 232410 - DNA, 25 bp, Probe sequence
gtgtcgtcattagcacaagcagaag

SEQ ID NO: 232411 - DNA, 25 bp, Probe sequence
ggttattatttgattgtccaacaag

SEQ ID NO: 232412 - DNA, 25 bp, Probe sequence
ggctataaagctaagttcaattgac

SEQ ID NO: 232413 - DNA, 25 bp, Probe sequence
tcggcaaatgcgtacgatcaattta

SEQ ID NO: 232414 - DNA, 25 bp, Probe sequence
tagtgaaacttgtccaatatcggca

SEQ ID NO: 232415 - DNA, 25 bp, Probe sequence
tatgaacgcgatatggacggttatt

SEQ ID NO: 232416 - DNA, 25 bp, Probe sequence
tttggaatcgagaccacggtgatat

SEQ ID NO: 232417 - DNA, 25 bp, Probe sequence
attctgtatttttatggcaatctgg

SEQ ID NO: 232418 - DNA, 25 bp, Probe sequence
atatattcgtcgtatggatatgtcg

SEQ ID NO: 232419 - DNA, 25 bp, Probe sequence
agttgaacgtggtggtgctggtggt

SEQ ID NO: 232420 - DNA, 25 bp, Probe sequence
agcattaggtgctcaattctatgat

SEQ ID NO: 232421 - DNA, 25 bp, Probe sequence
agctgaaatattaaccagtcatgca

SEQ ID NO: 232422 - DNA, 25 bp, Probe sequence
aaactgatacagggatgaccgttat

SEQ ID NO: 232423 - DNA, 25 bp, Probe sequence
aacatcaaaaggttgccattgcaat

SEQ ID NO: 232424 - DNA, 25 bp, Probe sequence
aatgatcagttgctagaaacgacaa

SEQ ID NO: 232425 - DNA, 25 bp, Probe sequence
aattgcaattggtccagttgaacgt

SEQ ID NO: 232426 - DNA, 25 bp, Probe sequence
caagccaaattgaaactgcagatgt

SEQ ID NO: 232427 - DNA, 25 bp, Probe sequence
catgcaaacttatgatgcgcatcag

SEQ ID NO: 232428 - DNA, 25 bp, Probe sequence
ccagtcatgcattagtagaccaact

SEQ ID NO: 232429 - DNA, 25 bp, Probe sequence
gccattgcaatttgtgcaactgctg

SEQ ID NO: 232430 - DNA, 25 bp, Probe sequence
gctggtgcaggtatgttacaagcat

SEQ ID NO: 232431 - DNA, 25 bp, Probe sequence
gaattcaagtaatgtcggatttttc

SEQ ID NO: 232432 - DNA, 25 bp, Probe sequence
gcagatgtagttcaagtaccattgt

SEQ ID NO: 232433 - DNA, 25 bp, Probe sequence
gaatggactgtatcaagctgaaata

SEQ ID NO: 232434 - DNA, 25 bp, Probe sequence
gaagggcgtgtcgtagatatgagac

SEQ ID NO: 232435 - DNA, 25 bp, Probe sequence
gaaggtgtttacggacaaactgata

SEQ ID NO: 232436 - DNA, 25 bp, Probe sequence
gaagaggcagttgcaagccaaattg

SEQ ID NO: 232437 - DNA, 25 bp, Probe sequence
gaaacgacaacattgcgtattgcag

SEQ ID NO: 232438 - DNA, 25 bp, Probe sequence
gaaagtattagtagccatggatgag

SEQ ID NO: 232439 - DNA, 25 bp, Probe sequence
gatatgagacaaggtgctggtgtaa

SEQ ID NO: 232440 - DNA, 25 bp, Probe sequence
gattgatagttttgatgctggtgca

SEQ ID NO: 232441 - DNA, 25 bp, Probe sequence
gtatcgtataccagtacatgatgca

SEQ ID NO: 232442 - DNA, 25 bp, Probe sequence
gggatgaccgttatcgaggggaatt

SEQ ID NO: 232443 - DNA, 25 bp, Probe sequence
gtggtggtgctggtggtggaattgc

SEQ ID NO: 232444 - DNA, 25 bp, Probe sequence
ggtgctcaattctatgatgacgaag

SEQ ID NO: 232445 - DNA, 25 bp, Probe sequence
ggatttttcaagtcgattatatggt

SEQ ID NO: 232446 - DNA, 25 bp, Probe sequence
ggatatgtcgaacttacaccctaaa

SEQ ID NO: 232447 - DNA, 25 bp, Probe sequence
ggcaatctgggcaaaagtatcgtat

SEQ ID NO: 232448 - DNA, 25 bp, Probe sequence
ggaattgcagcagtcttgaatggac

SEQ ID NO: 232449 - DNA, 25 bp, Probe sequence
tgaatcacaaggggttacagcaatg

SEQ ID NO: 232450 - DNA, 25 bp, Probe sequence
tgcgtattgcagaactttgtcataa

SEQ ID NO: 232451 - DNA, 25 bp, Probe sequence
attcattttggatttcttagtattc

SEQ ID NO: 232452 - DNA, 25 bp, Probe sequence
atcatcggattcctttctttactcg

SEQ ID NO: 232453 - DNA, 25 bp, Probe sequence
aggtatttggattggtcatcctatt

SEQ ID NO: 232454 - DNA, 25 bp, Probe sequence
agataacaactaccgaccaatatta

SEQ ID NO: 232455 - DNA, 25 bp, Probe sequence
acaagctaatattttcataacgatg

SEQ ID NO: 232456 - DNA, 25 bp, Probe sequence
caattattgcattgttcttcccaat

SEQ ID NO: 232457 - DNA, 25 bp, Probe sequence
caagctgataaatcgcatttgcatc

SEQ ID NO: 232458 - DNA, 25 bp, Probe sequence
caaaccacttattattggtgcgatt

SEQ ID NO: 232459 - DNA, 25 bp, Probe sequence
ctgtgatttggattgttgctattac

SEQ ID NO: 232460 - DNA, 25 bp, Probe sequence
gctgccttagtagttgctttttatg

SEQ ID NO: 232461 - DNA, 25 bp, Probe sequence
taattgatggactcgatggtttggc

SEQ ID NO: 232462 - DNA, 25 bp, Probe sequence
gatgatatctacgatttgaaaccgt

SEQ ID NO: 232463 - DNA, 25 bp, Probe sequence
gatttcttagtattccaattactgt

SEQ ID NO: 232464 - DNA, 25 bp, Probe sequence
gattcctttctttactcggattcaa

SEQ ID NO: 232465 - DNA, 25 bp, Probe sequence
gattggatttatcatcggattcctt

SEQ ID NO: 232466 - DNA, 25 bp, Probe sequence
gattggtcatcctattgaaacagaa

SEQ ID NO: 232467 - DNA, 25 bp, Probe sequence
gttgctttttatggtgtgactattg

SEQ ID NO: 232468 - DNA, 25 bp, Probe sequence
gttcttcccaattgttatcttagca

SEQ ID NO: 232469 - DNA, 25 bp, Probe sequence
gtttctgcaatcggactcattacaa

SEQ ID NO: 232470 - DNA, 25 bp, Probe sequence
gtatcgccaccattaggtgttgtat

SEQ ID NO: 232471 - DNA, 25 bp, Probe sequence
gtacacactaaacctatttcagtta

SEQ ID NO: 232472 - DNA, 25 bp, Probe sequence
gtacgtacttgggcttgtagatgat

SEQ ID NO: 232473 - DNA, 25 bp, Probe sequence
gtcagtttgacgataacaccaattg

SEQ ID NO: 232474 - DNA, 25 bp, Probe sequence
ggtgcgattattatgtacgtacttg

SEQ ID NO: 232475 - DNA, 25 bp, Probe sequence
tggttacattattactagttgcagt

SEQ ID NO: 232476 - DNA, 25 bp, Probe sequence
tgattttatttcgttgccaatgggt

SEQ ID NO: 232477 - DNA, 25 bp, Probe sequence
tagctttaggctacacacatagaca

SEQ ID NO: 232478 - DNA, 25 bp, Probe sequence
tattttacaatttccatcctgccaa

SEQ ID NO: 232479 - DNA, 25 bp, Probe sequence
tattttatttagtctttcgagcatt

SEQ ID NO: 232480 - DNA, 25 bp, Probe sequence
tttccatcctgccaaaatattttta

SEQ ID NO: 232481 - DNA, 25 bp, Probe sequence
ttatcttagcagttccattcattga

SEQ ID NO: 232482 - DNA, 25 bp, Probe sequence
ttgttcgcaatgattcgacgtgtga

SEQ ID NO: 232483 - DNA, 25 bp, Probe sequence
ttgtatgtatcgccaccattaggtg

SEQ ID NO: 232484 - DNA, 25 bp, Probe sequence
ttgttgtgttttattaggctcttta

SEQ ID NO: 232485 - DNA, 25 bp, Probe sequence
agatacaaccaacattttaatggtt

SEQ ID NO: 232486 - DNA, 25 bp, Probe sequence
attagatacaaccaacattttaatg

SEQ ID NO: 232487 - DNA, 25 bp, Probe sequence
attattagatacaaccaacatttta

SEQ ID NO: 232488 - DNA, 25 bp, Probe sequence
agttcttggaatgtttgaacgatta

SEQ ID NO: 232489 - DNA, 25 bp, Probe sequence
actttgtagttcttggaatgtttga

SEQ ID NO: 232490 - DNA, 25 bp, Probe sequence
aactttgtagttcttggaatgtttg

SEQ ID NO: 232491 - DNA, 25 bp, Probe sequence
aattattagatacaaccaacatttt

SEQ ID NO: 232492 - DNA, 25 bp, Probe sequence
cttggaatgtttgaacgattaaata

SEQ ID NO: 232493 - DNA, 25 bp, Probe sequence
ctttgtagttcttggaatgtttgaa

SEQ ID NO: 232494 - DNA, 25 bp, Probe sequence
gaatgtttgaacgattaaatagaca

SEQ ID NO: 232495 - DNA, 25 bp, Probe sequence
gatacaaccaacattttaatggttt

SEQ ID NO: 232496 - DNA, 25 bp, Probe sequence
gttcttggaatgtttgaacgattaa

SEQ ID NO: 232497 - DNA, 25 bp, Probe sequence
gttaattattagatacaaccaacat

SEQ ID NO: 232498 - DNA, 25 bp, Probe sequence
gtttgaacgattaaatagacattta

SEQ ID NO: 232499 - DNA, 25 bp, Probe sequence
gtagttcttggaatgtttgaacgat

SEQ ID NO: 232500 - DNA, 25 bp, Probe sequence
ggaatgtttgaacgattaaatagac

SEQ ID NO: 232501 - DNA, 25 bp, Probe sequence
tgtagttcttggaatgtttgaacga

SEQ ID NO: 232502 - DNA, 25 bp, Probe sequence
tgtttgaacgattaaatagacattt

SEQ ID NO: 232503 - DNA, 25 bp, Probe sequence
tcttggaatgtttgaacgattaaat

SEQ ID NO: 232504 - DNA, 25 bp, Probe sequence
taattattagatacaaccaacattt

SEQ ID NO: 232505 - DNA, 25 bp, Probe sequence
taactttgtagttcttggaatgttt

SEQ ID NO: 232506 - DNA, 25 bp, Probe sequence
tagatacaaccaacattttaatggt

SEQ ID NO: 232507 - DNA, 25 bp, Probe sequence
tagttcttggaatgtttgaacgatt

SEQ ID NO: 232508 - DNA, 25 bp, Probe sequence
tattagatacaaccaacattttaat

SEQ ID NO: 232509 - DNA, 25 bp, Probe sequence
tttgtagttcttggaatgtttgaac

SEQ ID NO: 232510 - DNA, 25 bp, Probe sequence
tttaactttgtagttcttggaatgt

SEQ ID NO: 232511 - DNA, 25 bp, Probe sequence
ttttaactttgtagttcttggaatg

SEQ ID NO: 232512 - DNA, 25 bp, Probe sequence
ttattagatacaaccaacattttaa

SEQ ID NO: 232513 - DNA, 25 bp, Probe sequence
ttagatacaaccaacattttaatgg

SEQ ID NO: 232514 - DNA, 25 bp, Probe sequence
ttaactttgtagttcttggaatgtt

SEQ ID NO: 232515 - DNA, 25 bp, Probe sequence
ttaattattagatacaaccaacatt

SEQ ID NO: 232516 - DNA, 25 bp, Probe sequence
ttcttggaatgtttgaacgattaaa

SEQ ID NO: 232517 - DNA, 25 bp, Probe sequence
ttgtagttcttggaatgtttgaacg

SEQ ID NO: 232518 - DNA, 25 bp, Probe sequence
ttggaatgtttgaacgattaaatag

SEQ ID NO: 232519 - DNA, 25 bp, Probe sequence
attgatgatttaactaatatgcgtg

SEQ ID NO: 232520 - DNA, 25 bp, Probe sequence
atcaatctagttatcaagcagggga

SEQ ID NO: 232521 - DNA, 25 bp, Probe sequence
atgaagccagttcttaagtttgaag

SEQ ID NO: 232522 - DNA, 25 bp, Probe sequence
agccagttcttaagtttgaagatgg

SEQ ID NO: 232523 - DNA, 25 bp, Probe sequence
accagcaattggcgaatggattact

SEQ ID NO: 232524 - DNA, 25 bp, Probe sequence
acagatatcattgtcatttgcttat

SEQ ID NO: 232525 - DNA, 25 bp, Probe sequence
acaacaagccaaccagcaattggcg

SEQ ID NO: 232526 - DNA, 25 bp, Probe sequence
aaatggcatcgtctcaaacgattcc

SEQ ID NO: 232527 - DNA, 25 bp, Probe sequence
aaagtggtcgaattactggtgctca

SEQ ID NO: 232528 - DNA, 25 bp, Probe sequence
aagcttgcagcaatgattgaaggat

SEQ ID NO: 232529 - DNA, 25 bp, Probe sequence
aagttatcaatctagttatcaagca

SEQ ID NO: 232530 - DNA, 25 bp, Probe sequence
aatctagttatcaagcaggggaaat

SEQ ID NO: 232531 - DNA, 25 bp, Probe sequence
caagccaaccagcaattggcgaatg

SEQ ID NO: 232532 - DNA, 25 bp, Probe sequence
cacacaggtgcatatttaattgttg

SEQ ID NO: 232533 - DNA, 25 bp, Probe sequence
gctcaagcatgggttggaacattat

SEQ ID NO: 232534 - DNA, 25 bp, Probe sequence
gcatttgatagtaagcttgcagcaa

SEQ ID NO: 232535 - DNA, 25 bp, Probe sequence
gcaggggaaatggttgaaggtgtta

SEQ ID NO: 232536 - DNA, 25 bp, Probe sequence
gcatgggttggaacattattgaaaa

SEQ ID NO: 232537 - DNA, 25 bp, Probe sequence
gcaattggcgaatggattactaaat

SEQ ID NO: 232538 - DNA, 25 bp, Probe sequence
gaattactggtgctcaagcatgggt

SEQ ID NO: 232539 - DNA, 25 bp, Probe sequence
gaaggtgttaatgtacatgcatttg

SEQ ID NO: 232540 - DNA, 25 bp, Probe sequence
gaaaatgaagccagttcttaagttt

SEQ ID NO: 232541 - DNA, 25 bp, Probe sequence
gtattacgtgctattgaaatggttg

SEQ ID NO: 232542 - DNA, 25 bp, Probe sequence
gtacatgcatttgatagtaagcttg

SEQ ID NO: 232543 - DNA, 25 bp, Probe sequence
gtcgaattactggtgctcaagcatg

SEQ ID NO: 232544 - DNA, 25 bp, Probe sequence
gtggtcgaattactggtgctcaagc

SEQ ID NO: 232545 - DNA, 25 bp, Probe sequence
ggtgctcaagcatgggttggaacat

SEQ ID NO: 232546 - DNA, 25 bp, Probe sequence
ggtgcatatttaattgttgatgact

SEQ ID NO: 232547 - DNA, 25 bp, Probe sequence
ggttacacagatatcattgtcattt

SEQ ID NO: 232548 - DNA, 25 bp, Probe sequence
ggatgttatgtattacgtgctattg

SEQ ID NO: 232549 - DNA, 25 bp, Probe sequence
tgaaggatgttatgtattacgtgct

SEQ ID NO: 232550 - DNA, 25 bp, Probe sequence
taataaaatggcatcgtctcaaacg

SEQ ID NO: 232551 - DNA, 25 bp, Probe sequence
tactggtgctcaagcatgggttgga

SEQ ID NO: 232552 - DNA, 25 bp, Probe sequence
tacgtgctattgaaatggttgaaga

SEQ ID NO: 232553 - DNA, 25 bp, Probe sequence
atttcgaagatggtcaagcgttata

SEQ ID NO: 232554 - DNA, 25 bp, Probe sequence
ataaatggagatcatttcgaagatg

SEQ ID NO: 232555 - DNA, 25 bp, Probe sequence
atcatttcgaagatggtcaagcgtt

SEQ ID NO: 232556 - DNA, 25 bp, Probe sequence
atggagatcatttcgaagatggtca

SEQ ID NO: 232557 - DNA, 25 bp, Probe sequence
agatcatttcgaagatggtcaagcg

SEQ ID NO: 232558 - DNA, 25 bp, Probe sequence
agatgattgtccttcagcttatcaa

SEQ ID NO: 232559 - DNA, 25 bp, Probe sequence
acaagatgattgtccttcagcttat

SEQ ID NO: 232560 - DNA, 25 bp, Probe sequence
aaatggagatcatttcgaagatggt

SEQ ID NO: 232561 - DNA, 25 bp, Probe sequence
aagatgattgtccttcagcttatca

SEQ ID NO: 232562 - DNA, 25 bp, Probe sequence
aagtgtgacttttgaagatggcaag

SEQ ID NO: 232563 - DNA, 25 bp, Probe sequence
aatggagatcatttcgaagatggtc

SEQ ID NO: 232564 - DNA, 25 bp, Probe sequence
caagatgattgtccttcagcttatc

SEQ ID NO: 232565 - DNA, 25 bp, Probe sequence
cataaatggagatcatttcgaagat

SEQ ID NO: 232566 - DNA, 25 bp, Probe sequence
catttcgaagatggtcaagcgttat

SEQ ID NO: 232567 - DNA, 25 bp, Probe sequence
gagatcatttcgaagatggtcaagc

SEQ ID NO: 232568 - DNA, 25 bp, Probe sequence
gatcatttcgaagatggtcaagcgt

SEQ ID NO: 232569 - DNA, 25 bp, Probe sequence
gtcataaatggagatcatttcgaag

SEQ ID NO: 232570 - DNA, 25 bp, Probe sequence
ggagatcatttcgaagatggtcaag

SEQ ID NO: 232571 - DNA, 25 bp, Probe sequence
tggagatcatttcgaagatggtcaa

SEQ ID NO: 232572 - DNA, 25 bp, Probe sequence
tgtcataaatggagatcatttcgaa

SEQ ID NO: 232573 - DNA, 25 bp, Probe sequence
tcatttcgaagatggtcaagcgtta

SEQ ID NO: 232574 - DNA, 25 bp, Probe sequence
tcataaatggagatcatttcgaaga

SEQ ID NO: 232575 - DNA, 25 bp, Probe sequence
taaatggagatcatttcgaagatgg

SEQ ID NO: 232576 - DNA, 25 bp, Probe sequence
tacaagatgattgtccttcagctta

SEQ ID NO: 232577 - DNA, 25 bp, Probe sequence
atttatatgacagcaacaccaccga

SEQ ID NO: 232578 - DNA, 25 bp, Probe sequence
atacactggtgttttttaacaatat

SEQ ID NO: 232579 - DNA, 25 bp, Probe sequence
atgatgtttcaaggcattcaatatg

SEQ ID NO: 232580 - DNA, 25 bp, Probe sequence
agttcgcaaagttcatcacaagcat

SEQ ID NO: 232581 - DNA, 25 bp, Probe sequence
acaccaccgaaacaacttctgtcag

SEQ ID NO: 232582 - DNA, 25 bp, Probe sequence
acaaattgctggacgtgttggacga

SEQ ID NO: 232583 - DNA, 25 bp, Probe sequence
aaattgccagctcgctttcataaaa

SEQ ID NO: 232584 - DNA, 25 bp, Probe sequence
aaatcacttccagttcctaaatatc

SEQ ID NO: 232585 - DNA, 25 bp, Probe sequence
aaacaacttctgtcagagattcccc

SEQ ID NO: 232586 - DNA, 25 bp, Probe sequence
aacagcactttgatactatttttat

SEQ ID NO: 232587 - DNA, 25 bp, Probe sequence
aactttaccgattcaaacagcactt

SEQ ID NO: 232588 - DNA, 25 bp, Probe sequence
aagaggctttaatacaaattgctgg

SEQ ID NO: 232589 - DNA, 25 bp, Probe sequence
aagggcattttgttgtatgcacagt

SEQ ID NO: 232590 - DNA, 25 bp, Probe sequence
aatcaacgttatacactggtgtttt

SEQ ID NO: 232591 - DNA, 25 bp, Probe sequence
caacaagcattgaagtcatcttcta

SEQ ID NO: 232592 - DNA, 25 bp, Probe sequence
cagtcttatgcctcagaacatattg

SEQ ID NO: 232593 - DNA, 25 bp, Probe sequence
cgatgtcatttttactacgacaata

SEQ ID NO: 232594 - DNA, 25 bp, Probe sequence
gcctttcctttatcaatggataaaa

SEQ ID NO: 232595 - DNA, 25 bp, Probe sequence
gcgaggatgtttttcgctttgaaaa

SEQ ID NO: 232596 - DNA, 25 bp, Probe sequence
gctcgctttcataaaaaatcacttc

SEQ ID NO: 232597 - DNA, 25 bp, Probe sequence
gcatattatcatctctcatttgaat

SEQ ID NO: 232598 - DNA, 25 bp, Probe sequence
gcacatcaatatactcaagaggctt

SEQ ID NO: 232599 - DNA, 25 bp, Probe sequence
gaagatatagacatactacaccagc

SEQ ID NO: 232600 - DNA, 25 bp, Probe sequence
gaacatattgttcgagccattagaa

SEQ ID NO: 232601 - DNA, 25 bp, Probe sequence
gagataatatagctattgtgtcacc

SEQ ID NO: 232602 - DNA, 25 bp, Probe sequence
gttgttgttatcgatgcacatcaat

SEQ ID NO: 232603 - DNA, 25 bp, Probe sequence
gtaaacgtattaaagacgcatttct

SEQ ID NO: 232604 - DNA, 25 bp, Probe sequence
gtaacaggtgcaggtaagacagaaa

SEQ ID NO: 232605 - DNA, 25 bp, Probe sequence
gtcatcttctaaagttgaacatgca

SEQ ID NO: 232606 - DNA, 25 bp, Probe sequence
gtgtagatgttgttgtagaaattag

SEQ ID NO: 232607 - DNA, 25 bp, Probe sequence
tcacaagcatattatcatctctcat

SEQ ID NO: 232608 - DNA, 25 bp, Probe sequence
taattaaattgccagctcgctttca

SEQ ID NO: 232609 - DNA, 25 bp, Probe sequence
tagaacgtggatttacaatggcaaa

SEQ ID NO: 232610 - DNA, 25 bp, Probe sequence
tagacatactacaccagcaatcaag

SEQ ID NO: 232611 - DNA, 25 bp, Probe sequence
attactcgttgacgatatttataca

SEQ ID NO: 232612 - DNA, 25 bp, Probe sequence
ataaccatttataatttgttcaaga

SEQ ID NO: 232613 - DNA, 25 bp, Probe sequence
acaattcatcgtgcagggtgtaaat

SEQ ID NO: 232614 - DNA, 25 bp, Probe sequence
aacatcttatgactatattgtgcca

SEQ ID NO: 232615 - DNA, 25 bp, Probe sequence
aactaagaaagagcgtctggcagat

SEQ ID NO: 232616 - DNA, 25 bp, Probe sequence
aagggattcgctttgataagatttt

SEQ ID NO: 232617 - DNA, 25 bp, Probe sequence
aaggaaatattactcgttgacgata

SEQ ID NO: 232618 - DNA, 25 bp, Probe sequence
aatccatttattattgatacggaat

SEQ ID NO: 232619 - DNA, 25 bp, Probe sequence
aattcaaagtgtttgcgtttgcacg

SEQ ID NO: 232620 - DNA, 25 bp, Probe sequence
caaagtgtttgcgtttgcacgatag

SEQ ID NO: 232621 - DNA, 25 bp, Probe sequence
cttcttcgccggcacatgatttatc

SEQ ID NO: 232622 - DNA, 25 bp, Probe sequence
catttaacccggtagaagcagtact

SEQ ID NO: 232623 - DNA, 25 bp, Probe sequence
ctatattgtgccaattccttcttcg

SEQ ID NO: 232624 - DNA, 25 bp, Probe sequence
gcgtctggcagatgaaaatccattt

SEQ ID NO: 232625 - DNA, 25 bp, Probe sequence
gaattgggacaatattaaacttgat

SEQ ID NO: 232626 - DNA, 25 bp, Probe sequence
gcaaggcgatgttcaaggtgcttaa

SEQ ID NO: 232627 - DNA, 25 bp, Probe sequence
gaataattgtttgagttgtggtgct

SEQ ID NO: 232628 - DNA, 25 bp, Probe sequence
gaagcgtattgtttagactgcaagt

SEQ ID NO: 232629 - DNA, 25 bp, Probe sequence
gaaagactattatttatgtgaatta

SEQ ID NO: 232630 - DNA, 25 bp, Probe sequence
gaaataccacaaacatcttatgact

SEQ ID NO: 232631 - DNA, 25 bp, Probe sequence
gactgcaagtttctatcggcacact

SEQ ID NO: 232632 - DNA, 25 bp, Probe sequence
gaccaaaacagtctcatttaactaa

SEQ ID NO: 232633 - DNA, 25 bp, Probe sequence
gagttgtggtgctaagttatatgaa

SEQ ID NO: 232634 - DNA, 25 bp, Probe sequence
gatatttatacaactggattaacaa

SEQ ID NO: 232635 - DNA, 25 bp, Probe sequence
gatttatctagaacatttaacccgg

SEQ ID NO: 232636 - DNA, 25 bp, Probe sequence
gattatgtgacagatgcaaagagaa

SEQ ID NO: 232637 - DNA, 25 bp, Probe sequence
gtttctatcggcacactttaattta

SEQ ID NO: 232638 - DNA, 25 bp, Probe sequence
gtttgagttgtggtgctaagttata

SEQ ID NO: 232639 - DNA, 25 bp, Probe sequence
gtgcagggtgtaaattatatgctaa

SEQ ID NO: 232640 - DNA, 25 bp, Probe sequence
gtgaattattggcacatttgattga

SEQ ID NO: 232641 - DNA, 25 bp, Probe sequence
ggattaacaattcatcgtgcagggt

SEQ ID NO: 232642 - DNA, 25 bp, Probe sequence
tcaatttcaatatgacggtttaatg

SEQ ID NO: 232643 - DNA, 25 bp, Probe sequence
tatcggcacactttaatttaatgga

SEQ ID NO: 232644 - DNA, 25 bp, Probe sequence
ttcgccggcacatgatttatctaga

SEQ ID NO: 232645 - DNA, 25 bp, Probe sequence
atatgctgctgcaagtctcgtttct

SEQ ID NO: 232646 - DNA, 25 bp, Probe sequence
atggacaacctattgcttttgcatt

SEQ ID NO: 232647 - DNA, 25 bp, Probe sequence
atggcgcgagttttcaagtattcaa

SEQ ID NO: 232648 - DNA, 25 bp, Probe sequence
agagcgactagtaaatcctcaatta

SEQ ID NO: 232649 - DNA, 25 bp, Probe sequence
agcgccattatcacatttagcatta

SEQ ID NO: 232650 - DNA, 25 bp, Probe sequence
aacgcatcagtctcttaatggcatt

SEQ ID NO: 232651 - DNA, 25 bp, Probe sequence
aaggtcattcaggtgccactttaga

SEQ ID NO: 232652 - DNA, 25 bp, Probe sequence
aataaaactttagcgcatccagcga

SEQ ID NO: 232653 - DNA, 25 bp, Probe sequence
ctgcgaaccaagaagatcacgtatc

SEQ ID NO: 232654 - DNA, 25 bp, Probe sequence
gcctgtggactaggtgagccatttt

SEQ ID NO: 232655 - DNA, 25 bp, Probe sequence
gcgcatccagcgagtgttgattcta

SEQ ID NO: 232656 - DNA, 25 bp, Probe sequence
gcgcgatgattatgcaatatgctgc

SEQ ID NO: 232657 - DNA, 25 bp, Probe sequence
gcatcaggagatttagcgccattat

SEQ ID NO: 232658 - DNA, 25 bp, Probe sequence
gaatgcggctaatgataatccactt

SEQ ID NO: 232659 - DNA, 25 bp, Probe sequence
gaaggatcaacattaacgacgcgac

SEQ ID NO: 232660 - DNA, 25 bp, Probe sequence
gaacgtattataccgataatcccac

SEQ ID NO: 232661 - DNA, 25 bp, Probe sequence
gacaacctttgaaccttcaggctaa

SEQ ID NO: 232662 - DNA, 25 bp, Probe sequence
gatacgctcacatgcctgtggacta

SEQ ID NO: 232663 - DNA, 25 bp, Probe sequence
gatattgaagcggttgcacagtatt

SEQ ID NO: 232664 - DNA, 25 bp, Probe sequence
gatttaccagcatttcttagtccag

SEQ ID NO: 232665 - DNA, 25 bp, Probe sequence
gttgattctatcacttcatctgcga

SEQ ID NO: 232666 - DNA, 25 bp, Probe sequence
gtataccacaaatccatggcgcgag

SEQ ID NO: 232667 - DNA, 25 bp, Probe sequence
gtatctatgggaactacagctgcta

SEQ ID NO: 232668 - DNA, 25 bp, Probe sequence
gtggcagcgcgtatgcgtgattggt

SEQ ID NO: 232669 - DNA, 25 bp, Probe sequence
ggtggtaacttccatggacaaccta

SEQ ID NO: 232670 - DNA, 25 bp, Probe sequence
ggtacgcaagctatgacagctcaag

SEQ ID NO: 232671 - DNA, 25 bp, Probe sequence
ggattgctgcattaacgcatcagtc

SEQ ID NO: 232672 - DNA, 25 bp, Probe sequence
ggattgcaaagtggcgcgatgatta

SEQ ID NO: 232673 - DNA, 25 bp, Probe sequence
ggctctctcggtgcatcaggagatt

SEQ ID NO: 232674 - DNA, 25 bp, Probe sequence
tgtacgtatagacccgacgcaatat

SEQ ID NO: 232675 - DNA, 25 bp, Probe sequence
tcgaagtatcgtgccatccattaca

SEQ ID NO: 232676 - DNA, 25 bp, Probe sequence
tcttagtccagagccaggattgcaa

SEQ ID NO: 232677 - DNA, 25 bp, Probe sequence
tacagctgctagacatggttatcaa

SEQ ID NO: 232678 - DNA, 25 bp, Probe sequence
ttatcaaacgactgcatgtcactaa

SEQ ID NO: 232679 - DNA, 25 bp, Probe sequence
atttttcattgcaggtagatactat

SEQ ID NO: 232680 - DNA, 25 bp, Probe sequence
atcttcacagtattagaaatttggc

SEQ ID NO: 232681 - DNA, 25 bp, Probe sequence
atacaccacgtgaaattcgagcgat

SEQ ID NO: 232682 - DNA, 25 bp, Probe sequence
ataatttagcaggggatgctgataa

SEQ ID NO: 232683 - DNA, 25 bp, Probe sequence
atgagctatatgtctatcttcacag

SEQ ID NO: 232684 - DNA, 25 bp, Probe sequence
atgtctaaaatcaggtcttttacaa

SEQ ID NO: 232685 - DNA, 25 bp, Probe sequence
agtctacttatttacttagctatga

SEQ ID NO: 232686 - DNA, 25 bp, Probe sequence
acgcttgtcatattttgtttacttc

SEQ ID NO: 232687 - DNA, 25 bp, Probe sequence
acgatttgccaaatggtcacattat

SEQ ID NO: 232688 - DNA, 25 bp, Probe sequence
aagtacgttaaatttagagattatg

SEQ ID NO: 232689 - DNA, 25 bp, Probe sequence
aatagcgcatttatagtgatttggc

SEQ ID NO: 232690 - DNA, 25 bp, Probe sequence
aatttactatggtttaatatgatat

SEQ ID NO: 232691 - DNA, 25 bp, Probe sequence
caccacgtgaaattcgagcgattaa

SEQ ID NO: 232692 - DNA, 25 bp, Probe sequence
gcgcatttatagtgatttggcttat

SEQ ID NO: 232693 - DNA, 25 bp, Probe sequence
gctatgatgtgctatacagtagtga

SEQ ID NO: 232694 - DNA, 25 bp, Probe sequence
gctatatgtctatcttcacagtatt

SEQ ID NO: 232695 - DNA, 25 bp, Probe sequence
gcttgtcatattttgtttacttcct

SEQ ID NO: 232696 - DNA, 25 bp, Probe sequence
gaaatttggcaaatacaacaccatc

SEQ ID NO: 232697 - DNA, 25 bp, Probe sequence
gaaattcgagcgattaaattatttt

SEQ ID NO: 232698 - DNA, 25 bp, Probe sequence
gagctatatgtctatcttcacagta

SEQ ID NO: 232699 - DNA, 25 bp, Probe sequence
gatactatgaacgatttgccaaatg

SEQ ID NO: 232700 - DNA, 25 bp, Probe sequence
gatttggcttatatttttcattgca

SEQ ID NO: 232701 - DNA, 25 bp, Probe sequence
gattatgagctatatgtctatcttc

SEQ ID NO: 232702 - DNA, 25 bp, Probe sequence
gtcacattataatcatacaccacgt

SEQ ID NO: 232703 - DNA, 25 bp, Probe sequence
ggtcttttacaatattaagtctact

SEQ ID NO: 232704 - DNA, 25 bp, Probe sequence
ggtagatactatgaacgatttgcca

SEQ ID NO: 232705 - DNA, 25 bp, Probe sequence
ggcaaatacaacaccatcatcaatt

SEQ ID NO: 232706 - DNA, 25 bp, Probe sequence
ggcttatatttttcattgcaggtag

SEQ ID NO: 232707 - DNA, 25 bp, Probe sequence
tgtcatattttgtttacttcctaca

SEQ ID NO: 232708 - DNA, 25 bp, Probe sequence
tgatatttatcattatcattggttt

SEQ ID NO: 232709 - DNA, 25 bp, Probe sequence
tacttatttacttagctatgatgtg

SEQ ID NO: 232710 - DNA, 25 bp, Probe sequence
tatgtctatcttcacagtattagaa

SEQ ID NO: 232711 - DNA, 25 bp, Probe sequence
tattttgtttacttcctacaattca

SEQ ID NO: 232712 - DNA, 25 bp, Probe sequence
ttggcttatatttttcattgcaggt

SEQ ID NO: 232713 - DNA, 25 bp, Probe sequence
ataacctcactatcacagatgctat

SEQ ID NO: 232714 - DNA, 25 bp, Probe sequence
atcacagatgctattcgcaactata

SEQ ID NO: 232715 - DNA, 25 bp, Probe sequence
atgacgtaccaaatgcagtggcgca

SEQ ID NO: 232716 - DNA, 25 bp, Probe sequence
atggcttgattcaaactagtgaaca

SEQ ID NO: 232717 - DNA, 25 bp, Probe sequence
agacggtaaatatggcttgattcaa

SEQ ID NO: 232718 - DNA, 25 bp, Probe sequence
acttattcaaattcagctactaaaa

SEQ ID NO: 232719 - DNA, 25 bp, Probe sequence
aacacgtattaatcgtaagagccgt

SEQ ID NO: 232720 - DNA, 25 bp, Probe sequence
aaaacttattcaaattcagctacta

SEQ ID NO: 232721 - DNA, 25 bp, Probe sequence
aagaagtgtttgttgccgaattaca

SEQ ID NO: 232722 - DNA, 25 bp, Probe sequence
aatgttacgttaagagctgaagagc

SEQ ID NO: 232723 - DNA, 25 bp, Probe sequence
aattcagcttaaaaccaatggattc

SEQ ID NO: 232724 - DNA, 25 bp, Probe sequence
caatggattcagaagaagcggtatt

SEQ ID NO: 232725 - DNA, 25 bp, Probe sequence
cacaagttgataatgacgcttacga

SEQ ID NO: 232726 - DNA, 25 bp, Probe sequence
catggagataacctcactatcacag

SEQ ID NO: 232727 - DNA, 25 bp, Probe sequence
ctcactatcacagatgctattcgca

SEQ ID NO: 232728 - DNA, 25 bp, Probe sequence
ctgatggaacaagtatcgtttaccg

SEQ ID NO: 232729 - DNA, 25 bp, Probe sequence
cgtaagagccgtgatcgaggagatc

SEQ ID NO: 232730 - DNA, 25 bp, Probe sequence
gctattcgcaactatattgaggaaa

SEQ ID NO: 232731 - DNA, 25 bp, Probe sequence
gaatctattaggtcatgacttcttt

SEQ ID NO: 232732 - DNA, 25 bp, Probe sequence
gaagcggtattacaaatgaatctat

SEQ ID NO: 232733 - DNA, 25 bp, Probe sequence
gaaacgatgatttatacgcaggtat

SEQ ID NO: 232734 - DNA, 25 bp, Probe sequence
gaaattcatggagataacctcacta

SEQ ID NO: 232735 - DNA, 25 bp, Probe sequence
gacgcttacgatgataacgagatag

SEQ ID NO: 232736 - DNA, 25 bp, Probe sequence
gagctgaagagcgaaacgatgattt

SEQ ID NO: 232737 - DNA, 25 bp, Probe sequence
gagatagaaattattcgttcaaaag

SEQ ID NO: 232738 - DNA, 25 bp, Probe sequence
gatgctattcgcaactatattgagg

SEQ ID NO: 232739 - DNA, 25 bp, Probe sequence
gataatgacgcttacgatgataacg

SEQ ID NO: 232740 - DNA, 25 bp, Probe sequence
gtaccaaatgcagtggcgcatgtta

SEQ ID NO: 232741 - DNA, 25 bp, Probe sequence
gtgtttgttgccgaattacaagaaa

SEQ ID NO: 232742 - DNA, 25 bp, Probe sequence
ggagatcaagaagtgtttgttgccg

SEQ ID NO: 232743 - DNA, 25 bp, Probe sequence
tgcagtggcgcatgttaaagttaaa

SEQ ID NO: 232744 - DNA, 25 bp, Probe sequence
tatacgcaggtattgatttaattaa

SEQ ID NO: 232745 - DNA, 25 bp, Probe sequence
tattcgttcaaaagaattcagctta

SEQ ID NO: 232746 - DNA, 25 bp, Probe sequence
ttaggtcatgacttctttgtattca

SEQ ID NO: 232747 - DNA, 25 bp, Probe sequence
ttttcgaagtcgtttgggctaagat

SEQ ID NO: 232748 - DNA, 25 bp, Probe sequence
aggcgatcaagttggtcgtaacgat

SEQ ID NO: 232749 - DNA, 25 bp, Probe sequence
acttcgacgcgcgtaaacgtatctt

SEQ ID NO: 232750 - DNA, 25 bp, Probe sequence
acttcttaggtttgactgtcggatt

SEQ ID NO: 232751 - DNA, 25 bp, Probe sequence
acaaggcagggcaaccagtgctatt

SEQ ID NO: 232752 - DNA, 25 bp, Probe sequence
aacagcgacaatgccaacatactta

SEQ ID NO: 232753 - DNA, 25 bp, Probe sequence
aaggtgccgttactattgccactaa

SEQ ID NO: 232754 - DNA, 25 bp, Probe sequence
aaggctctaaacgtgtattcaatat

SEQ ID NO: 232755 - DNA, 25 bp, Probe sequence
aataaacctgtgcaacgtaacgata

SEQ ID NO: 232756 - DNA, 25 bp, Probe sequence
cgtggtcgttctggacgtcaaggtg

SEQ ID NO: 232757 - DNA, 25 bp, Probe sequence
gcgctggacaaaaaggtgccgttac

SEQ ID NO: 232758 - DNA, 25 bp, Probe sequence
gctgaaattgttgcaggcgctggac

SEQ ID NO: 232759 - DNA, 25 bp, Probe sequence
gcattagctggtagaggtgttcacg

SEQ ID NO: 232760 - DNA, 25 bp, Probe sequence
gaatctcgtcgtattgatgaccagt

SEQ ID NO: 232761 - DNA, 25 bp, Probe sequence
gaagcgaagcacgtttcagctgaag

SEQ ID NO: 232762 - DNA, 25 bp, Probe sequence
gacagctctcaagttgtagatgcaa

SEQ ID NO: 232763 - DNA, 25 bp, Probe sequence
gacagtaactcaaattccgacaaat

SEQ ID NO: 232764 - DNA, 25 bp, Probe sequence
gagcgtatgattttacttcgttcta

SEQ ID NO: 232765 - DNA, 25 bp, Probe sequence
gaggtgttcacgttattacagtcaa

SEQ ID NO: 232766 - DNA, 25 bp, Probe sequence
gatgacgagcctgaatatcaaccat

SEQ ID NO: 232767 - DNA, 25 bp, Probe sequence
gatgactctacaccaattgaatcaa

SEQ ID NO: 232768 - DNA, 25 bp, Probe sequence
gatgagccgactaggtttagatgac

SEQ ID NO: 232769 - DNA, 25 bp, Probe sequence
gtattcacttacgttcttatgcaca

SEQ ID NO: 232770 - DNA, 25 bp, Probe sequence
gtagactatatggttgttgatggcg

SEQ ID NO: 232771 - DNA, 25 bp, Probe sequence
gtaacgatgattgtccatgtggtag

SEQ ID NO: 232772 - DNA, 25 bp, Probe sequence
gtcaacgtcactttatacacaagca

SEQ ID NO: 232773 - DNA, 25 bp, Probe sequence
ggggatagtcgcttctatttatcat

SEQ ID NO: 232774 - DNA, 25 bp, Probe sequence
ggcacgtacgccattaattatttct

SEQ ID NO: 232775 - DNA, 25 bp, Probe sequence
ggcgtctattacattccaaaactat

SEQ ID NO: 232776 - DNA, 25 bp, Probe sequence
tcaacacagctttacgtgcgcacgt

SEQ ID NO: 232777 - DNA, 25 bp, Probe sequence
tacgtgcgcacgttacattacaacg

SEQ ID NO: 232778 - DNA, 25 bp, Probe sequence
tagccattggactgatcatatcgac

SEQ ID NO: 232779 - DNA, 25 bp, Probe sequence
tagatgcaatgctacgttcaacgtt

SEQ ID NO: 232780 - DNA, 25 bp, Probe sequence
tatcaaccattcatcgactacatta

SEQ ID NO: 232781 - DNA, 25 bp, Probe sequence
atttgattcatcaggacgtcgtcat

SEQ ID NO: 232782 - DNA, 25 bp, Probe sequence
ataaccaaaatgaacgttctcaaat

SEQ ID NO: 232783 - DNA, 25 bp, Probe sequence
atggatgctacttgggatttattac

SEQ ID NO: 232784 - DNA, 25 bp, Probe sequence
agtgtaacattgctcatcaaagggc

SEQ ID NO: 232785 - DNA, 25 bp, Probe sequence
acgcaattctagagttacatcctgg

SEQ ID NO: 232786 - DNA, 25 bp, Probe sequence
acaggtaaggttgatgcagtgatgg

SEQ ID NO: 232787 - DNA, 25 bp, Probe sequence
aagacttagagcaagaggtcattaa

SEQ ID NO: 232788 - DNA, 25 bp, Probe sequence
aaggtgtacaccgactagtacgaat

SEQ ID NO: 232789 - DNA, 25 bp, Probe sequence
aagtggatgaatacgaattgcaatt

SEQ ID NO: 232790 - DNA, 25 bp, Probe sequence
caatccggatgatattacagttgat

SEQ ID NO: 232791 - DNA, 25 bp, Probe sequence
caagattgggctaatatgctattta

SEQ ID NO: 232792 - DNA, 25 bp, Probe sequence
ctgaatcggcaatacgaattaccca

SEQ ID NO: 232793 - DNA, 25 bp, Probe sequence
caccgactagtacgaatttctccat

SEQ ID NO: 232794 - DNA, 25 bp, Probe sequence
cacccctcaggtatagttgttaata

SEQ ID NO: 232795 - DNA, 25 bp, Probe sequence
cctcacgatgccaataacgcaattc

SEQ ID NO: 232796 - DNA, 25 bp, Probe sequence
gcaggtggtcagcatattaacaaaa

SEQ ID NO: 232797 - DNA, 25 bp, Probe sequence
gcagtgatggatggagacattggac

SEQ ID NO: 232798 - DNA, 25 bp, Probe sequence
gaatttctccatttgattcatcagg

SEQ ID NO: 232799 - DNA, 25 bp, Probe sequence
gaatgtatcaacgttattgtgagaa

SEQ ID NO: 232800 - DNA, 25 bp, Probe sequence
gaagagcaggcacgtgaaatggctg

SEQ ID NO: 232801 - DNA, 25 bp, Probe sequence
gaaatggctgaaattcgtggcgaac

SEQ ID NO: 232802 - DNA, 25 bp, Probe sequence
gacattggaccatttatcgaatcat

SEQ ID NO: 232803 - DNA, 25 bp, Probe sequence
gacgtcgtcatacatcatttgcatc

SEQ ID NO: 232804 - DNA, 25 bp, Probe sequence
gatcatatgttttccatccatactc

SEQ ID NO: 232805 - DNA, 25 bp, Probe sequence
gttttccatccatactcaatggtga

SEQ ID NO: 232806 - DNA, 25 bp, Probe sequence
gtcgtcatacatcatttgcatcatg

SEQ ID NO: 232807 - DNA, 25 bp, Probe sequence
ggggaagccaaattagatcatatgt

SEQ ID NO: 232808 - DNA, 25 bp, Probe sequence
tggtgaaagatcatcgtacgaacga

SEQ ID NO: 232809 - DNA, 25 bp, Probe sequence
tgctcatcaaagggcataatgctta

SEQ ID NO: 232810 - DNA, 25 bp, Probe sequence
tcagagcttctggtgcaggtggtca

SEQ ID NO: 232811 - DNA, 25 bp, Probe sequence
taagacagacaatgtcgcacgatta

SEQ ID NO: 232812 - DNA, 25 bp, Probe sequence
tacatcctggtgcaggtggcacgga

SEQ ID NO: 232813 - DNA, 25 bp, Probe sequence
tacagttgatacattcagagcttct

SEQ ID NO: 232814 - DNA, 25 bp, Probe sequence
ttaaaaaccgtgaagcagctatgaa

SEQ ID NO: 232815 - DNA, 25 bp, Probe sequence
atgttggtgttgttgaatctgtaaa

SEQ ID NO: 232816 - DNA, 25 bp, Probe sequence
agtagttaagcaagcacctaagcaa

SEQ ID NO: 232817 - DNA, 25 bp, Probe sequence
actacaataaatcagttgctaacag

SEQ ID NO: 232818 - DNA, 25 bp, Probe sequence
acaccagaagttggcgctattttcc

SEQ ID NO: 232819 - DNA, 25 bp, Probe sequence
aaacctgctcaagtacaaaaatcag

SEQ ID NO: 232820 - DNA, 25 bp, Probe sequence
aatgaactatgctggatttaatgtt

SEQ ID NO: 232821 - DNA, 25 bp, Probe sequence
aatgcagcacatgcacaacaacatg

SEQ ID NO: 232822 - DNA, 25 bp, Probe sequence
aatcagtaccaactgtacctgttgc

SEQ ID NO: 232823 - DNA, 25 bp, Probe sequence
caattatattcatacaatcctggtg

SEQ ID NO: 232824 - DNA, 25 bp, Probe sequence
caccagtaagaaaagcaagccaagc

SEQ ID NO: 232825 - DNA, 25 bp, Probe sequence
catatggacatgttggtgttgttga

SEQ ID NO: 232826 - DNA, 25 bp, Probe sequence
ctcttacagtgacggtttcgtcagt

SEQ ID NO: 232827 - DNA, 25 bp, Probe sequence
gcacaaacgcaatcaccgacaactt

SEQ ID NO: 232828 - DNA, 25 bp, Probe sequence
gcacaacaacatggcacacaagtaa

SEQ ID NO: 232829 - DNA, 25 bp, Probe sequence
gcaatcaccgacaacttatacagta

SEQ ID NO: 232830 - DNA, 25 bp, Probe sequence
gacggtttcgtcagtgttagctttt

SEQ ID NO: 232831 - DNA, 25 bp, Probe sequence
gagcatcacttaacgttgaatcaat

SEQ ID NO: 232832 - DNA, 25 bp, Probe sequence
gtataggaagtttatggggcaatgc

SEQ ID NO: 232833 - DNA, 25 bp, Probe sequence
gttgctggcgattcattatataaga

SEQ ID NO: 232834 - DNA, 25 bp, Probe sequence
gtatcaaatgttcaagcacaaacgc

SEQ ID NO: 232835 - DNA, 25 bp, Probe sequence
gtaccaactgtacctgttgcacata

SEQ ID NO: 232836 - DNA, 25 bp, Probe sequence
gtacctgttgcacataactacaata

SEQ ID NO: 232837 - DNA, 25 bp, Probe sequence
gtcagtgttagcttttttagcttta

SEQ ID NO: 232838 - DNA, 25 bp, Probe sequence
gtgatttcacttgtgcctcaaaata

SEQ ID NO: 232839 - DNA, 25 bp, Probe sequence
ggggcaatgcaaataactggaatta

SEQ ID NO: 232840 - DNA, 25 bp, Probe sequence
ggtgacgtgatttcacttgtgcctc

SEQ ID NO: 232841 - DNA, 25 bp, Probe sequence
ggcacacaagtaaaaacacctgttc

SEQ ID NO: 232842 - DNA, 25 bp, Probe sequence
tggaattacgcagcaaaagttgcag

SEQ ID NO: 232843 - DNA, 25 bp, Probe sequence
ggcgctattttccaaacagctgctg

SEQ ID NO: 232844 - DNA, 25 bp, Probe sequence
tcatacaatcctggtgtaacacctt

SEQ ID NO: 232845 - DNA, 25 bp, Probe sequence
taatttttcctggtgacgtgatttc

SEQ ID NO: 232846 - DNA, 25 bp, Probe sequence
tatgcttatggaaactgcacatatt

SEQ ID NO: 232847 - DNA, 25 bp, Probe sequence
tatacagtagttgctggcgattcat

SEQ ID NO: 232848 - DNA, 25 bp, Probe sequence
ttcgatcgtcgtgcacaattaggta

SEQ ID NO: 232849 - DNA, 25 bp, Probe sequence
atatcattccagaaatgttgactga

SEQ ID NO: 232850 - DNA, 25 bp, Probe sequence
atgagtctagaaacaattattcaat

SEQ ID NO: 232851 - DNA, 25 bp, Probe sequence
atgttgactgaaaactttataccta

SEQ ID NO: 232852 - DNA, 25 bp, Probe sequence
atgggtgtacatcaatattttaaaa

SEQ ID NO: 232853 - DNA, 25 bp, Probe sequence
agaaattccattacaatatagagat

SEQ ID NO: 232854 - DNA, 25 bp, Probe sequence
agcaacgactgcaagaaggtaaaga

SEQ ID NO: 232855 - DNA, 25 bp, Probe sequence
acctgttaaatatgcgagtagtgaa

SEQ ID NO: 232856 - DNA, 25 bp, Probe sequence
aaattgatttgctttatgaaacatt

SEQ ID NO: 232857 - DNA, 25 bp, Probe sequence
aaaacacctgttaaatatgcgagta

SEQ ID NO: 232858 - DNA, 25 bp, Probe sequence
aatactttcagttgctgataaaatt

SEQ ID NO: 232859 - DNA, 25 bp, Probe sequence
aatattttgaacacaatgttgcagc

SEQ ID NO: 232860 - DNA, 25 bp, Probe sequence
aatttgaccatttagcatctgtaca

SEQ ID NO: 232861 - DNA, 25 bp, Probe sequence
aattattttcgcaagttgaagaaga

SEQ ID NO: 232862 - DNA, 25 bp, Probe sequence
caatatctagcaacagttgaagaat

SEQ ID NO: 232863 - DNA, 25 bp, Probe sequence
gaaggccaaatactttcagttgctg

SEQ ID NO: 232864 - DNA, 25 bp, Probe sequence
gaagaattatttttcgaaatttatg

SEQ ID NO: 232865 - DNA, 25 bp, Probe sequence
gaagaaatggtagagacctttattg

SEQ ID NO: 232866 - DNA, 25 bp, Probe sequence
gaaaactttatacctagaacagaat

SEQ ID NO: 232867 - DNA, 25 bp, Probe sequence
gacttataagattacctggaaaatt

SEQ ID NO: 232868 - DNA, 25 bp, Probe sequence
gactgaaaactttatacctagaaca

SEQ ID NO: 232869 - DNA, 25 bp, Probe sequence
gaccatttagcatctgtacaagatt

SEQ ID NO: 232870 - DNA, 25 bp, Probe sequence
gagatgtttataagcaacgactgca

SEQ ID NO: 232871 - DNA, 25 bp, Probe sequence
gatgattcattagaaggccaaatac

SEQ ID NO: 232872 - DNA, 25 bp, Probe sequence
gatttgctttatgaaacatttggag

SEQ ID NO: 232873 - DNA, 25 bp, Probe sequence
gattatcagatatggaaagacttat

SEQ ID NO: 232874 - DNA, 25 bp, Probe sequence
ggtagagacctttattgaagaagaa

SEQ ID NO: 232875 - DNA, 25 bp, Probe sequence
ggaaagacttataagattacctgga

SEQ ID NO: 232876 - DNA, 25 bp, Probe sequence
ggccaaatactttcagttgctgata

SEQ ID NO: 232877 - DNA, 25 bp, Probe sequence
tatacctagaacagaattaagagaa

SEQ ID NO: 232878 - DNA, 25 bp, Probe sequence
tttattaataatatcattccagaaa

SEQ ID NO: 232879 - DNA, 25 bp, Probe sequence
ttattcaatttgaccatttagcatc

SEQ ID NO: 232880 - DNA, 25 bp, Probe sequence
ttagcatctgtacaagattttatta

SEQ ID NO: 232881 - DNA, 25 bp, Probe sequence
ttcaatttgaccatttagcatctgt

SEQ ID NO: 232882 - DNA, 25 bp, Probe sequence
ttgaccatttagcatctgtacaaga

SEQ ID NO: 232883 - DNA, 25 bp, Probe sequence
attggtgcctcaatctataaagagt

SEQ ID NO: 232884 - DNA, 25 bp, Probe sequence
attctttccatgtgtcttggtagta

SEQ ID NO: 232885 - DNA, 25 bp, Probe sequence
attatagatcaactcgaatttcata

SEQ ID NO: 232886 - DNA, 25 bp, Probe sequence
attttagcgcagcattctttccatg

SEQ ID NO: 232887 - DNA, 25 bp, Probe sequence
ataaagagtatttccataacgagtg

SEQ ID NO: 232888 - DNA, 25 bp, Probe sequence
atgatatggtattttagcgcagcat

SEQ ID NO: 232889 - DNA, 25 bp, Probe sequence
agcattctttccatgtgtcttggta

SEQ ID NO: 232890 - DNA, 25 bp, Probe sequence
acattaattttaattggtgcctcaa

SEQ ID NO: 232891 - DNA, 25 bp, Probe sequence
aactcgaatttcataaacatcaaga

SEQ ID NO: 232892 - DNA, 25 bp, Probe sequence
aacgagtggattatttttattgatg

SEQ ID NO: 232893 - DNA, 25 bp, Probe sequence
aattttaattggtgcctcaatctat

SEQ ID NO: 232894 - DNA, 25 bp, Probe sequence
cagcattctttccatgtgtcttggt

SEQ ID NO: 232895 - DNA, 25 bp, Probe sequence
cattctttccatgtgtcttggtagt

SEQ ID NO: 232896 - DNA, 25 bp, Probe sequence
gcattctttccatgtgtcttggtag

SEQ ID NO: 232897 - DNA, 25 bp, Probe sequence
gcagcattctttccatgtgtcttgg

SEQ ID NO: 232898 - DNA, 25 bp, Probe sequence
gagtatttccataacgagtggatta

SEQ ID NO: 232899 - DNA, 25 bp, Probe sequence
gatcaactcgaatttcataaacatc

SEQ ID NO: 232900 - DNA, 25 bp, Probe sequence
gatatggtattttagcgcagcattc

SEQ ID NO: 232901 - DNA, 25 bp, Probe sequence
gtattttagcgcagcattctttcca

SEQ ID NO: 232902 - DNA, 25 bp, Probe sequence
gtgtcattattagctggttatttaa

SEQ ID NO: 232903 - DNA, 25 bp, Probe sequence
gggtcggtactattctgacattaat

SEQ ID NO: 232904 - DNA, 25 bp, Probe sequence
ggtgcctcaatctataaagagtatt

SEQ ID NO: 232905 - DNA, 25 bp, Probe sequence
ggtactattctgacattaattttaa

SEQ ID NO: 232906 - DNA, 25 bp, Probe sequence
ggtattttagcgcagcattctttcc

SEQ ID NO: 232907 - DNA, 25 bp, Probe sequence
tgggtcggtactattctgacattaa

SEQ ID NO: 232908 - DNA, 25 bp, Probe sequence
tcggtactattctgacattaatttt

SEQ ID NO: 232909 - DNA, 25 bp, Probe sequence
tctttccatgtgtcttggtagtatt

SEQ ID NO: 232910 - DNA, 25 bp, Probe sequence
taaacatcaagatgaagatcgctaa

SEQ ID NO: 232911 - DNA, 25 bp, Probe sequence
tatggtattttagcgcagcattctt

SEQ ID NO: 232912 - DNA, 25 bp, Probe sequence
tattttagcgcagcattctttccat

SEQ ID NO: 232913 - DNA, 25 bp, Probe sequence
ttttaattggtgcctcaatctataa

SEQ ID NO: 232914 - DNA, 25 bp, Probe sequence
ttttagcgcagcattctttccatgt

SEQ ID NO: 232915 - DNA, 25 bp, Probe sequence
ttagctggttatttaattatagatc

SEQ ID NO: 232916 - DNA, 25 bp, Probe sequence
ttaattggtgcctcaatctataaag

SEQ ID NO: 232917 - DNA, 25 bp, Probe sequence
ataggtagagctgcgcgtaacgata

SEQ ID NO: 232918 - DNA, 25 bp, Probe sequence
aggcatacgtaccgtctactgacac

SEQ ID NO: 232919 - DNA, 25 bp, Probe sequence
agaagtttctctagttgtcatatta

SEQ ID NO: 232920 - DNA, 25 bp, Probe sequence
agcgtaatgaacgcgtacttgttac

SEQ ID NO: 232921 - DNA, 25 bp, Probe sequence
actattccgtacatttaactttgcg

SEQ ID NO: 232922 - DNA, 25 bp, Probe sequence
acattttgcgatattcccagcttct

SEQ ID NO: 232923 - DNA, 25 bp, Probe sequence
aaatgacatcgatttccaacgagga

SEQ ID NO: 232924 - DNA, 25 bp, Probe sequence
aagggttgagtttttcggcgatgag

SEQ ID NO: 232925 - DNA, 25 bp, Probe sequence
aatacattctgattttgagcctcaa

SEQ ID NO: 232926 - DNA, 25 bp, Probe sequence
cagcttctcacttcgtaacacgtga

SEQ ID NO: 232927 - DNA, 25 bp, Probe sequence
ccgtctactgacacttttattgaaa

SEQ ID NO: 232928 - DNA, 25 bp, Probe sequence
gcgagagatgggattctgttcagga

SEQ ID NO: 232929 - DNA, 25 bp, Probe sequence
gctacaagtgcattatttgaacgcg

SEQ ID NO: 232930 - DNA, 25 bp, Probe sequence
gcacaaactgtgatacctaagaaga

SEQ ID NO: 232931 - DNA, 25 bp, Probe sequence
gcaacgcctggaccatacgaaattg

SEQ ID NO: 232932 - DNA, 25 bp, Probe sequence
gaacagcgtaccaactatgatttag

SEQ ID NO: 232933 - DNA, 25 bp, Probe sequence
gaaatattcccagcctctaaagaag

SEQ ID NO: 232934 - DNA, 25 bp, Probe sequence
gagacagagcgcgtaaacaagtttt

SEQ ID NO: 232935 - DNA, 25 bp, Probe sequence
gatgagacacaacgtcgtcgagaaa

SEQ ID NO: 232936 - DNA, 25 bp, Probe sequence
gatcaactacgacattctgctacaa

SEQ ID NO: 232937 - DNA, 25 bp, Probe sequence
gttcgaggcatgtataacggagaca

SEQ ID NO: 232938 - DNA, 25 bp, Probe sequence
gtattgatataccagaagtttctct

SEQ ID NO: 232939 - DNA, 25 bp, Probe sequence
gtagtaagtgttcgagttggtatgg

SEQ ID NO: 232940 - DNA, 25 bp, Probe sequence
gtacttgttacaacgctcactaaaa

SEQ ID NO: 232941 - DNA, 25 bp, Probe sequence
gtgtatgtatctgcaacgcctggac

SEQ ID NO: 232942 - DNA, 25 bp, Probe sequence
ggtgaagtcattatgtatgccgata

SEQ ID NO: 232943 - DNA, 25 bp, Probe sequence
ggaacgtttcgagtgcgtggtgatg

SEQ ID NO: 232944 - DNA, 25 bp, Probe sequence
ggttgaacaaattattcgtcctact

SEQ ID NO: 232945 - DNA, 25 bp, Probe sequence
tcgtcctactggtttactggatcct

SEQ ID NO: 232946 - DNA, 25 bp, Probe sequence
tcaaggtgaccaaccgcaagcaatt

SEQ ID NO: 232947 - DNA, 25 bp, Probe sequence
tactttattggattactttggcgat

SEQ ID NO: 232948 - DNA, 25 bp, Probe sequence
taccgagtgcattagataaccgtcc

SEQ ID NO: 232949 - DNA, 25 bp, Probe sequence
tacgttctaaccgctcattaattca

SEQ ID NO: 232950 - DNA, 25 bp, Probe sequence
tttgagcctcaaggtgaccaaccgc

SEQ ID NO: 232951 - DNA, 25 bp, Probe sequence
attgggtcgcgtttgactggtgtct

SEQ ID NO: 232952 - DNA, 25 bp, Probe sequence
atatacgtgatgtgtttgcgcaaac

SEQ ID NO: 232953 - DNA, 25 bp, Probe sequence
ataggtagaacgccacgctctaatc

SEQ ID NO: 232954 - DNA, 25 bp, Probe sequence
aggtcctgaaggtggtagtggcggt

SEQ ID NO: 232955 - DNA, 25 bp, Probe sequence
atgagccatcaattggactgcatca

SEQ ID NO: 232956 - DNA, 25 bp, Probe sequence
agagcttcaggtacactttcaggtg

SEQ ID NO: 232957 - DNA, 25 bp, Probe sequence
acctgatgtttatgttccttgtgaa

SEQ ID NO: 232958 - DNA, 25 bp, Probe sequence
acgtgtgaaacttgcatctgaactt

SEQ ID NO: 232959 - DNA, 25 bp, Probe sequence
acacccgaagatattgctcagacaa

SEQ ID NO: 232960 - DNA, 25 bp, Probe sequence
aaaggtgctcgtgcgcataacttga

SEQ ID NO: 232961 - DNA, 25 bp, Probe sequence
aaaggtggacgctgtgaagcttgta

SEQ ID NO: 232962 - DNA, 25 bp, Probe sequence
cgattccatgaatctccttcagaat

SEQ ID NO: 232963 - DNA, 25 bp, Probe sequence
ccacgctctaatccagcaacatata

SEQ ID NO: 232964 - DNA, 25 bp, Probe sequence
gaaggattatcgccagcaatttcaa

SEQ ID NO: 232965 - DNA, 25 bp, Probe sequence
gaaacacgactagctgactctatag

SEQ ID NO: 232966 - DNA, 25 bp, Probe sequence
gagtcgtgaagcgttatctgtttat

SEQ ID NO: 232967 - DNA, 25 bp, Probe sequence
gatgatgatacaatgcgtgcggctg

SEQ ID NO: 232968 - DNA, 25 bp, Probe sequence
gttggtcttggatacgtcacattag

SEQ ID NO: 232969 - DNA, 25 bp, Probe sequence
gttacaggtgtatcaggttctggta

SEQ ID NO: 232970 - DNA, 25 bp, Probe sequence
gttatatgcacgtgttggtaaacct

SEQ ID NO: 232971 - DNA, 25 bp, Probe sequence
gtacctgaatatcgcagaccggctt

SEQ ID NO: 232972 - DNA, 25 bp, Probe sequence
gtcatcgctcatcgtaaaggtagtc

SEQ ID NO: 232973 - DNA, 25 bp, Probe sequence
gtcgatgtagacttggttgttcccg

SEQ ID NO: 232974 - DNA, 25 bp, Probe sequence
gtggtgaggctcaacgtgtgaaact

SEQ ID NO: 232975 - DNA, 25 bp, Probe sequence
gtggcggtggtactattgttgcgac

SEQ ID NO: 232976 - DNA, 25 bp, Probe sequence
gggtcaggtaaatcgtcattagcat

SEQ ID NO: 232977 - DNA, 25 bp, Probe sequence
ggtggtgaagcacaacgtattcgat

SEQ ID NO: 232978 - DNA, 25 bp, Probe sequence
ggtaaaccttactgtccaaatcaca

SEQ ID NO: 232979 - DNA, 25 bp, Probe sequence
ggataccgacgagttctgattttta

SEQ ID NO: 232980 - DNA, 25 bp, Probe sequence
tgcgtgcggctgattacttagtgga

SEQ ID NO: 232981 - DNA, 25 bp, Probe sequence
tcgcagaccggcttcagatcgtaaa

SEQ ID NO: 232982 - DNA, 25 bp, Probe sequence
taagtgcctatgcgcgtcaattttt

SEQ ID NO: 232983 - DNA, 25 bp, Probe sequence
ttattagcacctgtcatcgctcatc

SEQ ID NO: 232984 - DNA, 25 bp, Probe sequence
ttaacagtccttttggtgcttgtcc

SEQ ID NO: 232985 - DNA, 25 bp, Probe sequence
attgccaattccaaatactgtgagt

SEQ ID NO: 232986 - DNA, 25 bp, Probe sequence
attccatggtccagaactagcagac

SEQ ID NO: 232987 - DNA, 25 bp, Probe sequence
atactttattcgcacctattcaagc

SEQ ID NO: 232988 - DNA, 25 bp, Probe sequence
atccttacaatttcagctatcctag

SEQ ID NO: 232989 - DNA, 25 bp, Probe sequence
agttgcagcagtacctattatttta

SEQ ID NO: 232990 - DNA, 25 bp, Probe sequence
acttatttcaccacaatcaattgcc

SEQ ID NO: 232991 - DNA, 25 bp, Probe sequence
aagtgcaggtgctttattggtcgaa

SEQ ID NO: 232992 - DNA, 25 bp, Probe sequence
aatttcaacaagcggttcattactt

SEQ ID NO: 232993 - DNA, 25 bp, Probe sequence
aattgccattgcgactgcagctgtt

SEQ ID NO: 232994 - DNA, 25 bp, Probe sequence
gcgtctcgatttaattggtgcaact

SEQ ID NO: 232995 - DNA, 25 bp, Probe sequence
gcgtgtatcagcaggtgcgattaca

SEQ ID NO: 232996 - DNA, 25 bp, Probe sequence
gcaggtggtgtagcagcgaaactta

SEQ ID NO: 232997 - DNA, 25 bp, Probe sequence
gaaattgtctttgcttggagtccgt

SEQ ID NO: 232998 - DNA, 25 bp, Probe sequence
gacactacttactgtaaatccattc

SEQ ID NO: 232999 - DNA, 25 bp, Probe sequence
gacatacggtggtttgactgtagca

SEQ ID NO: 233000 - DNA, 25 bp, Probe sequence
gattgtggctttatttgtatttgaa

SEQ ID NO: 233001 - DNA, 25 bp, Probe sequence
ggtggtgttagcatttgtttgtcgt

SEQ ID NO: 233002 - DNA, 25 bp, Probe sequence
ggtgtgccaattgcgatttgtgcag

SEQ ID NO: 233003 - DNA, 25 bp, Probe sequence
ggtgcaactgggacagcgattttat

SEQ ID NO: 233004 - DNA, 25 bp, Probe sequence
ggattatcagccttagttgcagcag

SEQ ID NO: 233005 - DNA, 25 bp, Probe sequence
ggatatatcgttttaatggcagttt

SEQ ID NO: 233006 - DNA, 25 bp, Probe sequence
tggattttgtttcaacgcattttta

SEQ ID NO: 233007 - DNA, 25 bp, Probe sequence
tggagtgcaccattcttcaaaaaat

SEQ ID NO: 233008 - DNA, 25 bp, Probe sequence
tggtgtgtttatgactggttcagtt

SEQ ID NO: 233009 - DNA, 25 bp, Probe sequence
tgcgattacagaaggcgttgttgcc

SEQ ID NO: 233010 - DNA, 25 bp, Probe sequence
tcagcattaacacttccaattttaa

SEQ ID NO: 233011 - DNA, 25 bp, Probe sequence
taaaggaattgcgttgcgtctcgat

SEQ ID NO: 233012 - DNA, 25 bp, Probe sequence
tactgtgagtgatttatcgcctaaa

SEQ ID NO: 233013 - DNA, 25 bp, Probe sequence
tatgcagcattgacaactttggttg

SEQ ID NO: 233014 - DNA, 25 bp, Probe sequence
tattccaacctggaggtgcacttga

SEQ ID NO: 233015 - DNA, 25 bp, Probe sequence
ttgttgccggtattttcccaatagg

SEQ ID NO: 233016 - DNA, 25 bp, Probe sequence
ttatggttaccgatccttacaattt

SEQ ID NO: 233017 - DNA, 25 bp, Probe sequence
ttcccattattctctccagtattag

SEQ ID NO: 233018 - DNA, 25 bp, Probe sequence
ttaattgctaatggtgcggcgggtg

SEQ ID NO: 233019 - DNA, 25 bp, Probe sequence
attatgcgtcagatagaatacaact

SEQ ID NO: 233020 - DNA, 25 bp, Probe sequence
atgttatgactttatttggcgcggg

SEQ ID NO: 233021 - DNA, 25 bp, Probe sequence
aggttatttttcacattatgcgtca

SEQ ID NO: 233022 - DNA, 25 bp, Probe sequence
agataaggatcgcgcaggtcgtatg

SEQ ID NO: 233023 - DNA, 25 bp, Probe sequence
acgtttttagagcatgcacttgcaa

SEQ ID NO: 233024 - DNA, 25 bp, Probe sequence
aaacaatacctgtaagacctggtag

SEQ ID NO: 233025 - DNA, 25 bp, Probe sequence
aagacctggtagaaatgttgcggta

SEQ ID NO: 233026 - DNA, 25 bp, Probe sequence
cagaaacgcctgcaattattgtgac

SEQ ID NO: 233027 - DNA, 25 bp, Probe sequence
catgcacttgcaaagacgacatctt

SEQ ID NO: 233028 - DNA, 25 bp, Probe sequence
ctatcgttttacaatttattaccag

SEQ ID NO: 233029 - DNA, 25 bp, Probe sequence
ctacaagtttaatgagtcgcttaac

SEQ ID NO: 233030 - DNA, 25 bp, Probe sequence
cgtgggcatagattagtagcagatg

SEQ ID NO: 233031 - DNA, 25 bp, Probe sequence
gcaggtcgtatgcgtaaactatgca

SEQ ID NO: 233032 - DNA, 25 bp, Probe sequence
gactttatttggcgcgggttcaata

SEQ ID NO: 233033 - DNA, 25 bp, Probe sequence
gcagccaccagaagaattagttgaa

SEQ ID NO: 233034 - DNA, 25 bp, Probe sequence
gcaaaagttatatgaccgcgtaggt

SEQ ID NO: 233035 - DNA, 25 bp, Probe sequence
gaactatcgattaaatatcatgggc

SEQ ID NO: 233036 - DNA, 25 bp, Probe sequence
gaaaccaccaaagttaatagaacat

SEQ ID NO: 233037 - DNA, 25 bp, Probe sequence
gaccgcgtaggtcttaatgaagaga

SEQ ID NO: 233038 - DNA, 25 bp, Probe sequence
gagatggcaggttatttttcacatt

SEQ ID NO: 233039 - DNA, 25 bp, Probe sequence
gaggtcgctgcaatgaactatcgat

SEQ ID NO: 233040 - DNA, 25 bp, Probe sequence
gatgaactaatagggaaaccaccaa

SEQ ID NO: 233041 - DNA, 25 bp, Probe sequence
gttgcggtaattattgaggtcgctg

SEQ ID NO: 233042 - DNA, 25 bp, Probe sequence
gtagatgtttacggtgttggtgtac

SEQ ID NO: 233043 - DNA, 25 bp, Probe sequence
gtactaattaccggtgattcaggaa

SEQ ID NO: 233044 - DNA, 25 bp, Probe sequence
ggtgttggtgtactaattaccggtg

SEQ ID NO: 233045 - DNA, 25 bp, Probe sequence
ggatcgcgcaggtcgtatgcgtaaa

SEQ ID NO: 233046 - DNA, 25 bp, Probe sequence
tggattgcagccaccagaagaatta

SEQ ID NO: 233047 - DNA, 25 bp, Probe sequence
tacaactattaggaacaacggaact

SEQ ID NO: 233048 - DNA, 25 bp, Probe sequence
taaactatgcagaccagaaacgcct

SEQ ID NO: 233049 - DNA, 25 bp, Probe sequence
tacgtggactaggtattatcaatgt

SEQ ID NO: 233050 - DNA, 25 bp, Probe sequence
tagatttaatcgctggtgaagaagg

SEQ ID NO: 233051 - DNA, 25 bp, Probe sequence
tattaccagataaggatcgcgcagg

SEQ ID NO: 233052 - DNA, 25 bp, Probe sequence
ttggcgcgggttcaatattaactga

SEQ ID NO: 233053 - DNA, 25 bp, Probe sequence
attgctggtgttattgtatgtaaag

SEQ ID NO: 233054 - DNA, 25 bp, Probe sequence
atagatcctgtggcatttaacttag

SEQ ID NO: 233055 - DNA, 25 bp, Probe sequence
ataggtggctttattgctggtgtta

SEQ ID NO: 233056 - DNA, 25 bp, Probe sequence
atccaacattcttatatgaatccat

SEQ ID NO: 233057 - DNA, 25 bp, Probe sequence
atgaatccatttgggatgtcgctgg

SEQ ID NO: 233058 - DNA, 25 bp, Probe sequence
atggaattatcattgctgtcggaat

SEQ ID NO: 233059 - DNA, 25 bp, Probe sequence
agtgcactatttggatttatcgcgg

SEQ ID NO: 233060 - DNA, 25 bp, Probe sequence
aaacccatttcaaattggtgatatc

SEQ ID NO: 233061 - DNA, 25 bp, Probe sequence
aacttggtattcaattggtcgattc

SEQ ID NO: 233062 - DNA, 25 bp, Probe sequence
aatccaccgttgtatagcaaagttg

SEQ ID NO: 233063 - DNA, 25 bp, Probe sequence
ctatttggatttatcgcggcacgaa

SEQ ID NO: 233064 - DNA, 25 bp, Probe sequence
ctgtggcatttaacttaggaccact

SEQ ID NO: 233065 - DNA, 25 bp, Probe sequence
gccaagtataattttagcgcaagga

SEQ ID NO: 233066 - DNA, 25 bp, Probe sequence
gccaatattatcatccaacattctt

SEQ ID NO: 233067 - DNA, 25 bp, Probe sequence
gcacaacgtgcactagttaaagcag

SEQ ID NO: 233068 - DNA, 25 bp, Probe sequence
gcaaggaattggacgctggggtaac

SEQ ID NO: 233069 - DNA, 25 bp, Probe sequence
gaaggattacgtacagatagcttaa

SEQ ID NO: 233070 - DNA, 25 bp, Probe sequence
gagttgcacaattagtatcaattct

SEQ ID NO: 233071 - DNA, 25 bp, Probe sequence
gatagcttaatgctcacaagtaata

SEQ ID NO: 233072 - DNA, 25 bp, Probe sequence
gatattattttttatagtgcactat

SEQ ID NO: 233073 - DNA, 25 bp, Probe sequence
gattaagtataatccaccgttgtat

SEQ ID NO: 233074 - DNA, 25 bp, Probe sequence
gtattcaattggtcgattctttata

SEQ ID NO: 233075 - DNA, 25 bp, Probe sequence
gtcgctggatttattatcttagtta

SEQ ID NO: 233076 - DNA, 25 bp, Probe sequence
gtggctttattgctggtgttattgt

SEQ ID NO: 233077 - DNA, 25 bp, Probe sequence
gggatgtcgctggatttattatctt

SEQ ID NO: 233078 - DNA, 25 bp, Probe sequence
ggttactttgttgcacaacgtgcac

SEQ ID NO: 233079 - DNA, 25 bp, Probe sequence
ggacgctggggtaactttatgaatc

SEQ ID NO: 233080 - DNA, 25 bp, Probe sequence
tggtgatatcgttgcgccaagtata

SEQ ID NO: 233081 - DNA, 25 bp, Probe sequence
tacttggttactttgttgcacaacg

SEQ ID NO: 233082 - DNA, 25 bp, Probe sequence
tagcaaagttggggcgcttccatgg

SEQ ID NO: 233083 - DNA, 25 bp, Probe sequence
tatgaatcacgaggcacatggtgga

SEQ ID NO: 233084 - DNA, 25 bp, Probe sequence
ttatcgcggcacgaatctattttgt

SEQ ID NO: 233085 - DNA, 25 bp, Probe sequence
ttaacggccaatattatcatccaac

SEQ ID NO: 233086 - DNA, 25 bp, Probe sequence
ttaactatatagatcctgtggcatt

SEQ ID NO: 233087 - DNA, 25 bp, Probe sequence
attttcgaaatttattccaagtatg

SEQ ID NO: 233088 - DNA, 25 bp, Probe sequence
atttattccaagtatggtactgaaa

SEQ ID NO: 233089 - DNA, 25 bp, Probe sequence
atttgcatatggcaaccctatgtat

SEQ ID NO: 233090 - DNA, 25 bp, Probe sequence
atggatttgcatatggcaaccctat

SEQ ID NO: 233091 - DNA, 25 bp, Probe sequence
atggcaaccctatgtatataaaaat

SEQ ID NO: 233092 - DNA, 25 bp, Probe sequence
cccggtataacgattggtgacaatg

SEQ ID NO: 233093 - DNA, 25 bp, Probe sequence
acagtgttattggttacaatgtaac

SEQ ID NO: 233094 - DNA, 25 bp, Probe sequence
acaatgtaacaattttgacgcatga

SEQ ID NO: 233095 - DNA, 25 bp, Probe sequence
acaattttgacgcatgaagcattag

SEQ ID NO: 233096 - DNA, 25 bp, Probe sequence
aagttgcagctggtacggttgtttc

SEQ ID NO: 233097 - DNA, 25 bp, Probe sequence
cactttgattggtgcaaatgctacc

SEQ ID NO: 233098 - DNA, 25 bp, Probe sequence
gcaaatgctaccattttacccggta

SEQ ID NO: 233099 - DNA, 25 bp, Probe sequence
gctggtacggttgtttcaaaagata

SEQ ID NO: 233100 - DNA, 25 bp, Probe sequence
ccagaactgattacgattggtagta

SEQ ID NO: 233101 - DNA, 25 bp, Probe sequence
gcatatggcaaccctatgtatataa

SEQ ID NO: 233102 - DNA, 25 bp, Probe sequence
gcagctggtacggttgtttcaaaag

SEQ ID NO: 233103 - DNA, 25 bp, Probe sequence
gaatttcgttatggaccagtgacga

SEQ ID NO: 233104 - DNA, 25 bp, Probe sequence
gaagcattagttgatgaatttcgtt

SEQ ID NO: 233105 - DNA, 25 bp, Probe sequence
gacgataggatctaacactttgatt

SEQ ID NO: 233106 - DNA, 25 bp, Probe sequence
gacgcatgaagcattagttgatgaa

SEQ ID NO: 233107 - DNA, 25 bp, Probe sequence
ggtgcaaatgctaccattttacccg

SEQ ID NO: 233108 - DNA, 25 bp, Probe sequence
gatgaatttcgttatggaccagtga

SEQ ID NO: 233109 - DNA, 25 bp, Probe sequence
gatagcttataaagtaatgttagat

SEQ ID NO: 233110 - DNA, 25 bp, Probe sequence
gatataccggataatggatttgcat

SEQ ID NO: 233111 - DNA, 25 bp, Probe sequence
gttgtttcaaaagatataccggata

SEQ ID NO: 233112 - DNA, 25 bp, Probe sequence
gttgcagctggtacggttgtttcaa

SEQ ID NO: 233113 - DNA, 25 bp, Probe sequence
gttatggaccagtgacgataggatc

SEQ ID NO: 233114 - DNA, 25 bp, Probe sequence
ggaccagtgacgataggatctaaca

SEQ ID NO: 233115 - DNA, 25 bp, Probe sequence
ggtgacaatgtaaaagttgcagctg

SEQ ID NO: 233116 - DNA, 25 bp, Probe sequence
ggatctaacactttgattggtgcaa

SEQ ID NO: 233117 - DNA, 25 bp, Probe sequence
tgtataccgtcttgttaaattttcg

SEQ ID NO: 233118 - DNA, 25 bp, Probe sequence
tgctaccattttacccggtataacg

SEQ ID NO: 233119 - DNA, 25 bp, Probe sequence
tacgattggtagtaacagtgttatt

SEQ ID NO: 233120 - DNA, 25 bp, Probe sequence
ttacccggtataacgattggtgaca

SEQ ID NO: 233121 - DNA, 25 bp, Probe sequence
attatgccattatactttgctactt

SEQ ID NO: 233122 - DNA, 25 bp, Probe sequence
atactttgctactttataacactaa

SEQ ID NO: 233123 - DNA, 25 bp, Probe sequence
atcaaggtgaactcataattgctga

SEQ ID NO: 233124 - DNA, 25 bp, Probe sequence
atcggtgcgtttatttatttgtatt

SEQ ID NO: 233125 - DNA, 25 bp, Probe sequence
atggttgcatggattaatcaaggtg

SEQ ID NO: 233126 - DNA, 25 bp, Probe sequence
accacaagaagttcaagatcatcgt

SEQ ID NO: 233127 - DNA, 25 bp, Probe sequence
aaattagacttcattcatcgcggct

SEQ ID NO: 233128 - DNA, 25 bp, Probe sequence
aaacgagctgctgaatactttgaaa

SEQ ID NO: 233129 - DNA, 25 bp, Probe sequence
aagttgtacctatgaatgacgatga

SEQ ID NO: 233130 - DNA, 25 bp, Probe sequence
aagtgttagaattgtcacctgatga

SEQ ID NO: 233131 - DNA, 25 bp, Probe sequence
aaggcattcttgtttggtattaatt

SEQ ID NO: 233132 - DNA, 25 bp, Probe sequence
aatgattgaatttctcttgagcata

SEQ ID NO: 233133 - DNA, 25 bp, Probe sequence
aattcaaatgtacaatgctttagca

SEQ ID NO: 233134 - DNA, 25 bp, Probe sequence
aattccaatgacttttgatgatgca

SEQ ID NO: 233135 - DNA, 25 bp, Probe sequence
caacaattgttgtaccctttatata

SEQ ID NO: 233136 - DNA, 25 bp, Probe sequence
cacaatgtctagtgcaacttggtat

SEQ ID NO: 233137 - DNA, 25 bp, Probe sequence
ctaaagcattgtacgaagcactatt

SEQ ID NO: 233138 - DNA, 25 bp, Probe sequence
gaattatgtcttacatcaaccacaa

SEQ ID NO: 233139 - DNA, 25 bp, Probe sequence
gaagcaaattacaacatggttaggc

SEQ ID NO: 233140 - DNA, 25 bp, Probe sequence
gaagctcaattgtttgtagttcaaa

SEQ ID NO: 233141 - DNA, 25 bp, Probe sequence
gacgaaagtcattactactgggata

SEQ ID NO: 233142 - DNA, 25 bp, Probe sequence
gagtcagctcaacattgaagttaac

SEQ ID NO: 233143 - DNA, 25 bp, Probe sequence
gatgacggaaagtatttggcaggtt

SEQ ID NO: 233144 - DNA, 25 bp, Probe sequence
gatgacagtcattatcgtttatatg

SEQ ID NO: 233145 - DNA, 25 bp, Probe sequence
gttgagccatatatcggtgcgttta

SEQ ID NO: 233146 - DNA, 25 bp, Probe sequence
gttaacgaaccaaacaaggcattct

SEQ ID NO: 233147 - DNA, 25 bp, Probe sequence
gttcaaatactattccaatatcttt

SEQ ID NO: 233148 - DNA, 25 bp, Probe sequence
gttagcgacgaccaagattatagag

SEQ ID NO: 233149 - DNA, 25 bp, Probe sequence
gtagatttaactgatgttgagccat

SEQ ID NO: 233150 - DNA, 25 bp, Probe sequence
gtacagatatatatgcattatgcca

SEQ ID NO: 233151 - DNA, 25 bp, Probe sequence
tggcaatgtgttatttatatctcgg

SEQ ID NO: 233152 - DNA, 25 bp, Probe sequence
tcaacctcgaaacgttacaaagaag

SEQ ID NO: 233153 - DNA, 25 bp, Probe sequence
ttagttcaaggtttaacgctcaata

SEQ ID NO: 233154 - DNA, 25 bp, Probe sequence
ttatgttattgttagcgacgaccaa

SEQ ID NO: 233155 - DNA, 25 bp, Probe sequence
atggtgtattcatctatattggtat

SEQ ID NO: 233156 - DNA, 25 bp, Probe sequence
aggtttacgccaaattgtcactgct

SEQ ID NO: 233157 - DNA, 25 bp, Probe sequence
agtaacaatcgttcaccgtcgtgat

SEQ ID NO: 233158 - DNA, 25 bp, Probe sequence
agcaattatcggtgcaggtccagct

SEQ ID NO: 233159 - DNA, 25 bp, Probe sequence
accaggtatttttgcagcaggagat

SEQ ID NO: 233160 - DNA, 25 bp, Probe sequence
accgtcgtgatgagttacgtgcaca

SEQ ID NO: 233161 - DNA, 25 bp, Probe sequence
acgcctattcgttatcggtggtggt

SEQ ID NO: 233162 - DNA, 25 bp, Probe sequence
aaagaggtattccaggcggtcaaat

SEQ ID NO: 233163 - DNA, 25 bp, Probe sequence
aacacacgaggctgatggtgtattc

SEQ ID NO: 233164 - DNA, 25 bp, Probe sequence
aattgtcactgctactggcgatggt

SEQ ID NO: 233165 - DNA, 25 bp, Probe sequence
caagaacttggtggacgcggtgtaa

SEQ ID NO: 233166 - DNA, 25 bp, Probe sequence
gctactggcgatggtagtattgcag

SEQ ID NO: 233167 - DNA, 25 bp, Probe sequence
gcatcacgtgctaatttaaaaacag

SEQ ID NO: 233168 - DNA, 25 bp, Probe sequence
gcagtatacgcatcacgtgctaatt

SEQ ID NO: 233169 - DNA, 25 bp, Probe sequence
gcagtatgtgatggtgcattcttta

SEQ ID NO: 233170 - DNA, 25 bp, Probe sequence
gaacttccctggtttcgaaatgatt

SEQ ID NO: 233171 - DNA, 25 bp, Probe sequence
gaagtagagaacttccctggtttcg

SEQ ID NO: 233172 - DNA, 25 bp, Probe sequence
gacggcaaagtgggttctgtgacat

SEQ ID NO: 233173 - DNA, 25 bp, Probe sequence
gactgctgcagtatacgcatcacgt

SEQ ID NO: 233174 - DNA, 25 bp, Probe sequence
gacgcggtgtaagttattgtgcagt

SEQ ID NO: 233175 - DNA, 25 bp, Probe sequence
gatggttcagaagaaacacacgagg

SEQ ID NO: 233176 - DNA, 25 bp, Probe sequence
gattacaggtccagatttatctaca

SEQ ID NO: 233177 - DNA, 25 bp, Probe sequence
ggtgttccgggtgaacaagaacttg

SEQ ID NO: 233178 - DNA, 25 bp, Probe sequence
gtttggtgcagtttatcaatatgga

SEQ ID NO: 233179 - DNA, 25 bp, Probe sequence
gggttctgtgacattaacgtctaca

SEQ ID NO: 233180 - DNA, 25 bp, Probe sequence
ggtgcaggtccagctggtatgactg

SEQ ID NO: 233181 - DNA, 25 bp, Probe sequence
ggtccagctggtatgactgctgcag

SEQ ID NO: 233182 - DNA, 25 bp, Probe sequence
ggtttcgaaatgattacaggtccag

SEQ ID NO: 233183 - DNA, 25 bp, Probe sequence
ggaacattcttaactaaatttgctg

SEQ ID NO: 233184 - DNA, 25 bp, Probe sequence
tgaacatttaaacgatcaagcttaa

SEQ ID NO: 233185 - DNA, 25 bp, Probe sequence
taacgtctacaaaagatggttcaga

SEQ ID NO: 233186 - DNA, 25 bp, Probe sequence
tacaagaaaattggtgttccgggtg

SEQ ID NO: 233187 - DNA, 25 bp, Probe sequence
ttccaggcggtcaaatggctaatac

SEQ ID NO: 233188 - DNA, 25 bp, Probe sequence
ttgaacacgctaaaaagtttggtgc

SEQ ID NO: 233189 - DNA, 25 bp, Probe sequence
atttttaccaaatccatattatgta

SEQ ID NO: 233190 - DNA, 25 bp, Probe sequence
atactacaaagttatcacctaaaga

SEQ ID NO: 233191 - DNA, 25 bp, Probe sequence
agtaattgccatcggttgtacgggt

SEQ ID NO: 233192 - DNA, 25 bp, Probe sequence
acaattaatgtcacaagtttcggtt

SEQ ID NO: 233193 - DNA, 25 bp, Probe sequence
aaaagaacgcattcgtcgatactat

SEQ ID NO: 233194 - DNA, 25 bp, Probe sequence
aactgatttgttagattttatgata

SEQ ID NO: 233195 - DNA, 25 bp, Probe sequence
aatctttggttattcaatgtttaga

SEQ ID NO: 233196 - DNA, 25 bp, Probe sequence
cgcattcgtcgatactatgaagatg

SEQ ID NO: 233197 - DNA, 25 bp, Probe sequence
gcgtcgtgcacatcctttgatggaa

SEQ ID NO: 233198 - DNA, 25 bp, Probe sequence
gcagaacgactaggtaattatctaa

SEQ ID NO: 233199 - DNA, 25 bp, Probe sequence
gcaggtaaatctttggttattcaat

SEQ ID NO: 233200 - DNA, 25 bp, Probe sequence
gcaattgcaattgatttaagaggta

SEQ ID NO: 233201 - DNA, 25 bp, Probe sequence
gaagggaaatctcaattagtaattg

SEQ ID NO: 233202 - DNA, 25 bp, Probe sequence
gaagacatgggatatttttgtgtag

SEQ ID NO: 233203 - DNA, 25 bp, Probe sequence
gaaatccatccttaagaaaagtggc

SEQ ID NO: 233204 - DNA, 25 bp, Probe sequence
gagtttgaaacttttacaattaatg

SEQ ID NO: 233205 - DNA, 25 bp, Probe sequence
gaggtaaggaactatttaattcatt

SEQ ID NO: 233206 - DNA, 25 bp, Probe sequence
gatggatgcagatttagtatttgat

SEQ ID NO: 233207 - DNA, 25 bp, Probe sequence
gatgagcgagagcatttgtctcaaa

SEQ ID NO: 233208 - DNA, 25 bp, Probe sequence
gatctgtagcattagcagaacgact

SEQ ID NO: 233209 - DNA, 25 bp, Probe sequence
gtatttgatgtacgatttttaccaa

SEQ ID NO: 233210 - DNA, 25 bp, Probe sequence
gtagatttaagacctttaacaggat

SEQ ID NO: 233211 - DNA, 25 bp, Probe sequence
gtagataatctaccaccagtgttat

SEQ ID NO: 233212 - DNA, 25 bp, Probe sequence
gtcacaagtttcggttttaaacatg

SEQ ID NO: 233213 - DNA, 25 bp, Probe sequence
gtgcacatcctttgatggaacaagg

SEQ ID NO: 233214 - DNA, 25 bp, Probe sequence
gtgaaagtgacgtcatcattgatgt

SEQ ID NO: 233215 - DNA, 25 bp, Probe sequence
gtgacgtcatcattgatgttatgtt

SEQ ID NO: 233216 - DNA, 25 bp, Probe sequence
gggacgcacatattgaaagtggcga

SEQ ID NO: 233217 - DNA, 25 bp, Probe sequence
ggaacaaggaaatccatccttaaga

SEQ ID NO: 233218 - DNA, 25 bp, Probe sequence
tgtttatgtgcatcatagggacgca

SEQ ID NO: 233219 - DNA, 25 bp, Probe sequence
tgcatcatagggacgcacatattga

SEQ ID NO: 233220 - DNA, 25 bp, Probe sequence
tgccatcggttgtacgggtggacaa

SEQ ID NO: 233221 - DNA, 25 bp, Probe sequence
taattcattagttgcagtagtggat

SEQ ID NO: 233222 - DNA, 25 bp, Probe sequence
tagctaattttgttatagatactac

SEQ ID NO: 233223 - DNA, 25 bp, Probe sequence
attctgatgcgcctaagctatatgt

SEQ ID NO: 233224 - DNA, 25 bp, Probe sequence
atacgagcgttatttctaacttatg

SEQ ID NO: 233225 - DNA, 25 bp, Probe sequence
atgatttcggacatgccattaaagc

SEQ ID NO: 233226 - DNA, 25 bp, Probe sequence
agtacacaaactttcaatgctcaag

SEQ ID NO: 233227 - DNA, 25 bp, Probe sequence
acaaccgtttattgattatgtcatt

SEQ ID NO: 233228 - DNA, 25 bp, Probe sequence
aacagttgctgataatggtgggagt

SEQ ID NO: 233229 - DNA, 25 bp, Probe sequence
aacagatggttatagcgtgaaagat

SEQ ID NO: 233230 - DNA, 25 bp, Probe sequence
aagttgtacttatcggtggtggcac

SEQ ID NO: 233231 - DNA, 25 bp, Probe sequence
aatttattaatcgcaggtatgacta

SEQ ID NO: 233232 - DNA, 25 bp, Probe sequence
ctggcttatcagttatggctagggg

SEQ ID NO: 233233 - DNA, 25 bp, Probe sequence
ccagcaccaggagacatcagaaatg

SEQ ID NO: 233234 - DNA, 25 bp, Probe sequence
gcagctttaagtgattctgagtcag

SEQ ID NO: 233235 - DNA, 25 bp, Probe sequence
gcaaccaatggaagaagcaatcgat

SEQ ID NO: 233236 - DNA, 25 bp, Probe sequence
gaacctaacgatgtgcaaccaatgg

SEQ ID NO: 233237 - DNA, 25 bp, Probe sequence
gaaaatcaaattagcggtcactcat

SEQ ID NO: 233238 - DNA, 25 bp, Probe sequence
gaaatgtgattgcagctttaagtga

SEQ ID NO: 233239 - DNA, 25 bp, Probe sequence
gacgcaacctggggaaacagatggt

SEQ ID NO: 233240 - DNA, 25 bp, Probe sequence
gaccagggtcattatatacgagcgt

SEQ ID NO: 233241 - DNA, 25 bp, Probe sequence
gagtcattccatctacaaatacaag

SEQ ID NO: 233242 - DNA, 25 bp, Probe sequence
gattctgagtcagttttaagccaac

SEQ ID NO: 233243 - DNA, 25 bp, Probe sequence
gggaagcagatttaatcgttcttgg

SEQ ID NO: 233244 - DNA, 25 bp, Probe sequence
ggtgggagtacagggaaaatcagag

SEQ ID NO: 233245 - DNA, 25 bp, Probe sequence
ggattaagagaattcccaattgata

SEQ ID NO: 233246 - DNA, 25 bp, Probe sequence
ggatataccagcaccaggagacatc

SEQ ID NO: 233247 - DNA, 25 bp, Probe sequence
tgattatgtcatttgtagtacacaa

SEQ ID NO: 233248 - DNA, 25 bp, Probe sequence
tgatcgtgtgtttttagaacctaac

SEQ ID NO: 233249 - DNA, 25 bp, Probe sequence
tctaatgtgatgacgcaacctgggg

SEQ ID NO: 233250 - DNA, 25 bp, Probe sequence
taattcattctgatgcgcctaagct

SEQ ID NO: 233251 - DNA, 25 bp, Probe sequence
taatcgttcttggaccagggtcatt

SEQ ID NO: 233252 - DNA, 25 bp, Probe sequence
tagcggtcactcattaggtaattta

SEQ ID NO: 233253 - DNA, 25 bp, Probe sequence
tatcggtggtggcactggcttatca

SEQ ID NO: 233254 - DNA, 25 bp, Probe sequence
tattcctttcgtaccaagtgataaa

SEQ ID NO: 233255 - DNA, 25 bp, Probe sequence
ttttaagccaactttttcagtatcg

SEQ ID NO: 233256 - DNA, 25 bp, Probe sequence
ttagtactattcctttcgtaccaag

SEQ ID NO: 233257 - DNA, 25 bp, Probe sequence
atagacgtcgatgaaatgaatgcaa

SEQ ID NO: 233258 - DNA, 25 bp, Probe sequence
atgagctttgcatcagaaatgaaaa

SEQ ID NO: 233259 - DNA, 25 bp, Probe sequence
agtgctgcgatgaaacaagttgaga

SEQ ID NO: 233260 - DNA, 25 bp, Probe sequence
agaggagcttttctggcaggtggct

SEQ ID NO: 233261 - DNA, 25 bp, Probe sequence
accagacaggttgagagagattgct

SEQ ID NO: 233262 - DNA, 25 bp, Probe sequence
acggcaagacgtatttattcgttga

SEQ ID NO: 233263 - DNA, 25 bp, Probe sequence
actggtccaatttcaaaatcaggtg

SEQ ID NO: 233264 - DNA, 25 bp, Probe sequence
aaagacggcatttttacgcatgaaa

SEQ ID NO: 233265 - DNA, 25 bp, Probe sequence
aaacgtgtctttaatgtggaagttg

SEQ ID NO: 233266 - DNA, 25 bp, Probe sequence
aaaacagttagtgctgcgatgaaac

SEQ ID NO: 233267 - DNA, 25 bp, Probe sequence
aatgccaaacatttagagcgaaaaa

SEQ ID NO: 233268 - DNA, 25 bp, Probe sequence
aatttcgttgaaagagcttggagaa

SEQ ID NO: 233269 - DNA, 25 bp, Probe sequence
cagtgaataaccctgaaacatcttc

SEQ ID NO: 233270 - DNA, 25 bp, Probe sequence
gcttttctggcaggtggctcagtga

SEQ ID NO: 233271 - DNA, 25 bp, Probe sequence
gcagaaggcttaacgaaactaatga

SEQ ID NO: 233272 - DNA, 25 bp, Probe sequence
gaagacgtacgtattgtaagagata

SEQ ID NO: 233273 - DNA, 25 bp, Probe sequence
gaaatggtatcaactggtccaattt

SEQ ID NO: 233274 - DNA, 25 bp, Probe sequence
gagagagattgctagaattcgagta

SEQ ID NO: 233275 - DNA, 25 bp, Probe sequence
gagagtcatgcagaaggcttaacga

SEQ ID NO: 233276 - DNA, 25 bp, Probe sequence
gatatgcgtaattctgttaaccgac

SEQ ID NO: 233277 - DNA, 25 bp, Probe sequence
gataggtggctatcaagcgttatta

SEQ ID NO: 233278 - DNA, 25 bp, Probe sequence
gatttcggattttcttagtttgata

SEQ ID NO: 233279 - DNA, 25 bp, Probe sequence
gattcgaatgaatggtgcacttagt

SEQ ID NO: 233280 - DNA, 25 bp, Probe sequence
gttacttgagaggagcttttctggc

SEQ ID NO: 233281 - DNA, 25 bp, Probe sequence
gtggaagttgaaatattagtccgta

SEQ ID NO: 233282 - DNA, 25 bp, Probe sequence
ggtgcacttagtctttcaaatcaac

SEQ ID NO: 233283 - DNA, 25 bp, Probe sequence
ggattttcttagtttgataggtggc

SEQ ID NO: 233284 - DNA, 25 bp, Probe sequence
ggcaggtggctcagtgaataaccct

SEQ ID NO: 233285 - DNA, 25 bp, Probe sequence
ggaaaatgcaacaacggcaagacgt

SEQ ID NO: 233286 - DNA, 25 bp, Probe sequence
tgaatgcaaaagcagagctcagtgc

SEQ ID NO: 233287 - DNA, 25 bp, Probe sequence
tgcgtaattctgttaaccgactcgt

SEQ ID NO: 233288 - DNA, 25 bp, Probe sequence
taaccgactcgttaattgtgaaacg

SEQ ID NO: 233289 - DNA, 25 bp, Probe sequence
tattcgttgattaaacgtgtcttta

SEQ ID NO: 233290 - DNA, 25 bp, Probe sequence
ttacgcatgaaattgatcattcaat

SEQ ID NO: 233291 - DNA, 25 bp, Probe sequence
attgctgcaaatcacattttaaaaa

SEQ ID NO: 233292 - DNA, 25 bp, Probe sequence
atgggatcattcttattagcagctg

SEQ ID NO: 233293 - DNA, 25 bp, Probe sequence
agagcgtactggtcaaagtattgaa

SEQ ID NO: 233294 - DNA, 25 bp, Probe sequence
agacacagatcgtgataacttctta

SEQ ID NO: 233295 - DNA, 25 bp, Probe sequence
agctggttttgcgatttatgataca

SEQ ID NO: 233296 - DNA, 25 bp, Probe sequence
accaaccattaggtggtgctcaagg

SEQ ID NO: 233297 - DNA, 25 bp, Probe sequence
aaacaatttgtatcggtatggctgc

SEQ ID NO: 233298 - DNA, 25 bp, Probe sequence
aatttgtatcggtatggctgcatca

SEQ ID NO: 233299 - DNA, 25 bp, Probe sequence
aattcctacagttattgaaacaaca

SEQ ID NO: 233300 - DNA, 25 bp, Probe sequence
caatcgtatcacagttattattctt

SEQ ID NO: 233301 - DNA, 25 bp, Probe sequence
gcattttatcagagcgtactggtca

SEQ ID NO: 233302 - DNA, 25 bp, Probe sequence
gcagaagtaatgattcaccaaccat

SEQ ID NO: 233303 - DNA, 25 bp, Probe sequence
gaatatggcttaattgatgaagtga

SEQ ID NO: 233304 - DNA, 25 bp, Probe sequence
gaccgtattattatgttaggttcac

SEQ ID NO: 233305 - DNA, 25 bp, Probe sequence
gatgacaacgtagcaaattcaatcg

SEQ ID NO: 233306 - DNA, 25 bp, Probe sequence
gatgaagtgatggtacctgaaacaa

SEQ ID NO: 233307 - DNA, 25 bp, Probe sequence
gatcattcttattagcagctggtgc

SEQ ID NO: 233308 - DNA, 25 bp, Probe sequence
gatcgtgataacttcttaactgcag

SEQ ID NO: 233309 - DNA, 25 bp, Probe sequence
gatacaattcaacacattaaacctg

SEQ ID NO: 233310 - DNA, 25 bp, Probe sequence
gatatatactcacgtttattaaaag

SEQ ID NO: 233311 - DNA, 25 bp, Probe sequence
gattcaccaaccattaggtggtgct

SEQ ID NO: 233312 - DNA, 25 bp, Probe sequence
gttaggttcacaaattgatgacaac

SEQ ID NO: 233313 - DNA, 25 bp, Probe sequence
gtatcggtatggctgcatcaatggg

SEQ ID NO: 233314 - DNA, 25 bp, Probe sequence
gtagcaaattcaatcgtatcacagt

SEQ ID NO: 233315 - DNA, 25 bp, Probe sequence
gtaacagctggttttgcgatttatg

SEQ ID NO: 233316 - DNA, 25 bp, Probe sequence
gtggaagtgtaacagctggttttgc

SEQ ID NO: 233317 - DNA, 25 bp, Probe sequence
ggtgctcaaggacaagcaactgaaa

SEQ ID NO: 233318 - DNA, 25 bp, Probe sequence
ggtatggctgcatcaatgggatcat

SEQ ID NO: 233319 - DNA, 25 bp, Probe sequence
ggttttgcgatttatgatacaattc

SEQ ID NO: 233320 - DNA, 25 bp, Probe sequence
ggctgcatcaatgggatcattctta

SEQ ID NO: 233321 - DNA, 25 bp, Probe sequence
tgaatttaattcctacagttattga

SEQ ID NO: 233322 - DNA, 25 bp, Probe sequence
tcaacacattaaacctgatgttcaa

SEQ ID NO: 233323 - DNA, 25 bp, Probe sequence
taaacctgatgttcaaacaatttgt

SEQ ID NO: 233324 - DNA, 25 bp, Probe sequence
tatcacagttattattcttacaagc

SEQ ID NO: 233325 - DNA, 25 bp, Probe sequence
atatgtgccacctcagcaacaagca

SEQ ID NO: 233326 - DNA, 25 bp, Probe sequence
atcaatatgtgccacctcagcaaca

SEQ ID NO: 233327 - DNA, 25 bp, Probe sequence
atcagcaattgccacagcagaatca

SEQ ID NO: 233328 - DNA, 25 bp, Probe sequence
agctagattcacaagcaaaccaata

SEQ ID NO: 233329 - DNA, 25 bp, Probe sequence
acctcagcaacaagcacctacaaag

SEQ ID NO: 233330 - DNA, 25 bp, Probe sequence
acagcgaaagtagttagcattgcga

SEQ ID NO: 233331 - DNA, 25 bp, Probe sequence
acaccaaagccaaataataatcaac

SEQ ID NO: 233332 - DNA, 25 bp, Probe sequence
cgcaacaaccaacaccaaagccaaa

SEQ ID NO: 233333 - DNA, 25 bp, Probe sequence
acaaccaacaccaaagccaaataat

SEQ ID NO: 233334 - DNA, 25 bp, Probe sequence
aaaccacaagcaccacaacaaaata

SEQ ID NO: 233335 - DNA, 25 bp, Probe sequence
aaccaatatcagcaattgccacagc

SEQ ID NO: 233336 - DNA, 25 bp, Probe sequence
aagagcagaatgagctagattcaca

SEQ ID NO: 233337 - DNA, 25 bp, Probe sequence
aatagccaatcaacaacaaataaac

SEQ ID NO: 233338 - DNA, 25 bp, Probe sequence
caagcacctacaaagcaacgtcctg

SEQ ID NO: 233339 - DNA, 25 bp, Probe sequence
caccacaacaaaatagccaatcaac

SEQ ID NO: 233340 - DNA, 25 bp, Probe sequence
cattgcgacggtattgctattactc

SEQ ID NO: 233341 - DNA, 25 bp, Probe sequence
ctcggaggattagtatttgcaattt

SEQ ID NO: 233342 - DNA, 25 bp, Probe sequence
cgaatcaaaattacgactacaataa

SEQ ID NO: 233343 - DNA, 25 bp, Probe sequence
gcgacggtattgctattactcggag

SEQ ID NO: 233344 - DNA, 25 bp, Probe sequence
gctaaagaacgtatgttgaacgaac

SEQ ID NO: 233345 - DNA, 25 bp, Probe sequence
gcatcaaaggatgagtcgaaagata

SEQ ID NO: 233346 - DNA, 25 bp, Probe sequence
gcacctacaaagcaacgtcctgcta

SEQ ID NO: 233347 - DNA, 25 bp, Probe sequence
gcaacgtcctgctaaagaagagaat

SEQ ID NO: 233348 - DNA, 25 bp, Probe sequence
gcaatttttgcatatgtagatcatt

SEQ ID NO: 233349 - DNA, 25 bp, Probe sequence
gaagaaaatgagtacaacagcgaaa

SEQ ID NO: 233350 - DNA, 25 bp, Probe sequence
gataataaacaaccagctcagccta

SEQ ID NO: 233351 - DNA, 25 bp, Probe sequence
gattcacaagcaaaccaatatcagc

SEQ ID NO: 233352 - DNA, 25 bp, Probe sequence
gttgaacgaacaaaagcaggaacaa

SEQ ID NO: 233353 - DNA, 25 bp, Probe sequence
gtagatcattcgaataaagctaaag

SEQ ID NO: 233354 - DNA, 25 bp, Probe sequence
gtagttagcattgcgacggtattgc

SEQ ID NO: 233355 - DNA, 25 bp, Probe sequence
ggtattgctattactcggaggatta

SEQ ID NO: 233356 - DNA, 25 bp, Probe sequence
tgccacagcagaatcaatatcaata

SEQ ID NO: 233357 - DNA, 25 bp, Probe sequence
tcaatatcaatatgtgccacctcag

SEQ ID NO: 233358 - DNA, 25 bp, Probe sequence
taaacaaccagctcagcctaaacca

SEQ ID NO: 233359 - DNA, 25 bp, Probe sequence
atcagcctgtcggacgtcgaagttt

SEQ ID NO: 233360 - DNA, 25 bp, Probe sequence
agttgctgtaactggcggatccacg

SEQ ID NO: 233361 - DNA, 25 bp, Probe sequence
agcaaaagcttataccggatctcat

SEQ ID NO: 233362 - DNA, 25 bp, Probe sequence
acgtgtactgcgttctgaaacagat

SEQ ID NO: 233363 - DNA, 25 bp, Probe sequence
actatctcaaaaaatcagcctgtcg

SEQ ID NO: 233364 - DNA, 25 bp, Probe sequence
acattgttgttagagccatcagtca

SEQ ID NO: 233365 - DNA, 25 bp, Probe sequence
aaagcatacttgacgattgcaccca

SEQ ID NO: 233366 - DNA, 25 bp, Probe sequence
aacttcaacatcatcaagctgtcgg

SEQ ID NO: 233367 - DNA, 25 bp, Probe sequence
aagctgtcggagaggcatttggtta

SEQ ID NO: 233368 - DNA, 25 bp, Probe sequence
aagcaggtcaattacttgaaggcat

SEQ ID NO: 233369 - DNA, 25 bp, Probe sequence
aagactttatttttgcagttgcagg

SEQ ID NO: 233370 - DNA, 25 bp, Probe sequence
gcgctgaagatggcgcatcgacgtc

SEQ ID NO: 233371 - DNA, 25 bp, Probe sequence
gctggcggttattatacgacgatgt

SEQ ID NO: 233372 - DNA, 25 bp, Probe sequence
gcatcgacgtcaatcacctgaaaag

SEQ ID NO: 233373 - DNA, 25 bp, Probe sequence
gaaggtgagcaactgatttcgcaat

SEQ ID NO: 233374 - DNA, 25 bp, Probe sequence
gaagttcatgttgttcctggtgatg

SEQ ID NO: 233375 - DNA, 25 bp, Probe sequence
gaagcaattcatttattaccatata

SEQ ID NO: 233376 - DNA, 25 bp, Probe sequence
gacgattgcacccaagaatacagtg

SEQ ID NO: 233377 - DNA, 25 bp, Probe sequence
gagccatcagtcataaacactttag

SEQ ID NO: 233378 - DNA, 25 bp, Probe sequence
gatggcatgtgttagtgaagcaatt

SEQ ID NO: 233379 - DNA, 25 bp, Probe sequence
gatacacaaggtcaaattgtccata

SEQ ID NO: 233380 - DNA, 25 bp, Probe sequence
gttgtctttcaggcaaacacaattg

SEQ ID NO: 233381 - DNA, 25 bp, Probe sequence
gttgttcctggtgatgctgataata

SEQ ID NO: 233382 - DNA, 25 bp, Probe sequence
gtttttctattcttactactatctc

SEQ ID NO: 233383 - DNA, 25 bp, Probe sequence
gtatggcacaacaagctggcggtta

SEQ ID NO: 233384 - DNA, 25 bp, Probe sequence
gtaccagccagaggtggactaggcg

SEQ ID NO: 233385 - DNA, 25 bp, Probe sequence
gtgaaagacttattgcaagcacagc

SEQ ID NO: 233386 - DNA, 25 bp, Probe sequence
ggactaggcgaaaatgttgtctttc

SEQ ID NO: 233387 - DNA, 25 bp, Probe sequence
ggcggatccacgatggcatgtgtta

SEQ ID NO: 233388 - DNA, 25 bp, Probe sequence
tggatatgactgaacgtgtactgcg

SEQ ID NO: 233389 - DNA, 25 bp, Probe sequence
taatcactgatgaagccgcagcaaa

SEQ ID NO: 233390 - DNA, 25 bp, Probe sequence
taatgtattcttcgtaccagccaga

SEQ ID NO: 233391 - DNA, 25 bp, Probe sequence
tacacggcattggtgatgcgctgaa

SEQ ID NO: 233392 - DNA, 25 bp, Probe sequence
tacgacgatgtatgtacctgataat

SEQ ID NO: 233393 - DNA, 25 bp, Probe sequence
attggtcgtttagcattcagaagaa

SEQ ID NO: 233394 - DNA, 25 bp, Probe sequence
attaatctcagcaccagctactggt

SEQ ID NO: 233395 - DNA, 25 bp, Probe sequence
atcattcagtgaaccagatgcaagc

SEQ ID NO: 233396 - DNA, 25 bp, Probe sequence
aggtgacaaacgtcgtgctcgtgca

SEQ ID NO: 233397 - DNA, 25 bp, Probe sequence
agatggtggtgcacaacgtgttcct

SEQ ID NO: 233398 - DNA, 25 bp, Probe sequence
acgaaatgtcatatactgcacaatt

SEQ ID NO: 233399 - DNA, 25 bp, Probe sequence
acaggtgctgctaaagctatcggta

SEQ ID NO: 233400 - DNA, 25 bp, Probe sequence
acaagctcatattgaagcaggcgct

SEQ ID NO: 233401 - DNA, 25 bp, Probe sequence
aaacagttgtttcaggtgcttcatg

SEQ ID NO: 233402 - DNA, 25 bp, Probe sequence
aagttgcagcttggtatgataacga

SEQ ID NO: 233403 - DNA, 25 bp, Probe sequence
aaggtttaatgactacaattcacgc

SEQ ID NO: 233404 - DNA, 25 bp, Probe sequence
aaggtcttgaagttgtagcagtaaa

SEQ ID NO: 233405 - DNA, 25 bp, Probe sequence
aatcgtattcaacactaaccaccaa

SEQ ID NO: 233406 - DNA, 25 bp, Probe sequence
cactatgcaaggtcgtttcacaggt

SEQ ID NO: 233407 - DNA, 25 bp, Probe sequence
catccctaactcaacaggtgctgct

SEQ ID NO: 233408 - DNA, 25 bp, Probe sequence
gctatcggtaaagttattcctgaaa

SEQ ID NO: 233409 - DNA, 25 bp, Probe sequence
gcaccagttgctaaagttttaaacg

SEQ ID NO: 233410 - DNA, 25 bp, Probe sequence
gcagaaaacatcatccctaactcaa

SEQ ID NO: 233411 - DNA, 25 bp, Probe sequence
gaatcattcggttacactgaagacg

SEQ ID NO: 233412 - DNA, 25 bp, Probe sequence
gaatgtactggtttctacactgata

SEQ ID NO: 233413 - DNA, 25 bp, Probe sequence
gaaatcgtttcttcagacgttgtag

SEQ ID NO: 233414 - DNA, 25 bp, Probe sequence
gacgttgtaggtatgacttacggtt

SEQ ID NO: 233415 - DNA, 25 bp, Probe sequence
gacgctacacaaactcgtgtaatgt

SEQ ID NO: 233416 - DNA, 25 bp, Probe sequence
gatgacgacatgttagcgcatttat

SEQ ID NO: 233417 - DNA, 25 bp, Probe sequence
gtttcaggtgcttcatgtactacaa

SEQ ID NO: 233418 - DNA, 25 bp, Probe sequence
gtactacaaactcattagcaccagt

SEQ ID NO: 233419 - DNA, 25 bp, Probe sequence
gtaaacgacttaacagatgacgaca

SEQ ID NO: 233420 - DNA, 25 bp, Probe sequence
ggtagttgatggtggtttccgcgta

SEQ ID NO: 233421 - DNA, 25 bp, Probe sequence
tgtagctacaggttcattaactgaa

SEQ ID NO: 233422 - DNA, 25 bp, Probe sequence
tgatggtggtttccgcgtaaatggt

SEQ ID NO: 233423 - DNA, 25 bp, Probe sequence
tgcacaacgtgttcctgtagctaca

SEQ ID NO: 233424 - DNA, 25 bp, Probe sequence
tgcacaattagttcgtacattagca

SEQ ID NO: 233425 - DNA, 25 bp, Probe sequence
tacacaagacgcacctcacagaaaa

SEQ ID NO: 233426 - DNA, 25 bp, Probe sequence
ttagcatacttagctgaactttcta

SEQ ID NO: 233427 - DNA, 25 bp, Probe sequence
atcgttcaagctttacctacaattc

SEQ ID NO: 233428 - DNA, 25 bp, Probe sequence
atgcatctaatgttggtatttctac

SEQ ID NO: 233429 - DNA, 25 bp, Probe sequence
agctttacctacaattcaatacatc

SEQ ID NO: 233430 - DNA, 25 bp, Probe sequence
accagttgttgctattttaggtgga

SEQ ID NO: 233431 - DNA, 25 bp, Probe sequence
acgtccagttgctgaagacttatct

SEQ ID NO: 233432 - DNA, 25 bp, Probe sequence
actgcgcatcgtgagcatgcatcta

SEQ ID NO: 233433 - DNA, 25 bp, Probe sequence
aaactgcagctggattcttaatgga

SEQ ID NO: 233434 - DNA, 25 bp, Probe sequence
aaacagtcctagtacgtgctgattt

SEQ ID NO: 233435 - DNA, 25 bp, Probe sequence
aatgacaaccgtatcgttcaagctt

SEQ ID NO: 233436 - DNA, 25 bp, Probe sequence
aatcgtactattttcacatttaggt

SEQ ID NO: 233437 - DNA, 25 bp, Probe sequence
aattatcatcggcggaggtatggct

SEQ ID NO: 233438 - DNA, 25 bp, Probe sequence
aattaactttacgtccagttgctga

SEQ ID NO: 233439 - DNA, 25 bp, Probe sequence
gcgtagttaacgatccacataaacc

SEQ ID NO: 233440 - DNA, 25 bp, Probe sequence
gcggtgattcagctgcagcagcaat

SEQ ID NO: 233441 - DNA, 25 bp, Probe sequence
gcttttggtactgcgcatcgtgagc

SEQ ID NO: 233442 - DNA, 25 bp, Probe sequence
gcacactgttgtatggaatggacct

SEQ ID NO: 233443 - DNA, 25 bp, Probe sequence
gaaggtgcgcacactgttgtatgga

SEQ ID NO: 233444 - DNA, 25 bp, Probe sequence
gagttcagtaactttgcacaaggta

SEQ ID NO: 233445 - DNA, 25 bp, Probe sequence
gatgcaattacgattatcggtggcg

SEQ ID NO: 233446 - DNA, 25 bp, Probe sequence
gatccacataaaccagttgttgcta

SEQ ID NO: 233447 - DNA, 25 bp, Probe sequence
gataaagaagttgttttcgtaccag

SEQ ID NO: 233448 - DNA, 25 bp, Probe sequence
gattcaattccagcagaccaagaag

SEQ ID NO: 233449 - DNA, 25 bp, Probe sequence
gtaaagaattgcctggtatcaaagc

SEQ ID NO: 233450 - DNA, 25 bp, Probe sequence
gtaaatgatgcttttggtactgcgc

SEQ ID NO: 233451 - DNA, 25 bp, Probe sequence
ggtaaatactgggcatctttaggtg

SEQ ID NO: 233452 - DNA, 25 bp, Probe sequence
ggaggtatggcttatactttcttaa

SEQ ID NO: 233453 - DNA, 25 bp, Probe sequence
ggacctatgggtgtattcgagttca

SEQ ID NO: 233454 - DNA, 25 bp, Probe sequence
tgtagtaccatctgattcaattcca

SEQ ID NO: 233455 - DNA, 25 bp, Probe sequence
tgacttcactcatatttcaactggt

SEQ ID NO: 233456 - DNA, 25 bp, Probe sequence
tcaatacatcatcgaacaaggtggt

SEQ ID NO: 233457 - DNA, 25 bp, Probe sequence
tacgtgctgattttaacgtaccttt

SEQ ID NO: 233458 - DNA, 25 bp, Probe sequence
taggtggagcaaaagtatctgacaa

SEQ ID NO: 233459 - DNA, 25 bp, Probe sequence
ttatcggtggcggtgattcagctgc

SEQ ID NO: 233460 - DNA, 25 bp, Probe sequence
ttaccagtagacactaaagttgcta

SEQ ID NO: 233461 - DNA, 25 bp, Probe sequence
atagctggtaactggaaaatgaaca

SEQ ID NO: 233462 - DNA, 25 bp, Probe sequence
agaatcagtaatttgtgcaccagca

SEQ ID NO: 233463 - DNA, 25 bp, Probe sequence
acaggtgaaacgtctccagttgcat

SEQ ID NO: 233464 - DNA, 25 bp, Probe sequence
acaagaagcaaaagacttcgtcaat

SEQ ID NO: 233465 - DNA, 25 bp, Probe sequence
acaaggtttagaaatcggtgctcaa

SEQ ID NO: 233466 - DNA, 25 bp, Probe sequence
aaagaatacatggcacaaactgata

SEQ ID NO: 233467 - DNA, 25 bp, Probe sequence
aaacgtctccagttgcattagcaga

SEQ ID NO: 233468 - DNA, 25 bp, Probe sequence
aactcgtattcaatatggtggtagt

SEQ ID NO: 233469 - DNA, 25 bp, Probe sequence
aacgatgttgtaggtgagcaagtta

SEQ ID NO: 233470 - DNA, 25 bp, Probe sequence
aagaaagctgttgcaggtttatctg

SEQ ID NO: 233471 - DNA, 25 bp, Probe sequence
aagtggtaaagctaacgatgttgta

SEQ ID NO: 233472 - DNA, 25 bp, Probe sequence
aatgtgtgcatttgtacgtcaaact

SEQ ID NO: 233473 - DNA, 25 bp, Probe sequence
aatcggtgctcaaaatacgtatttc

SEQ ID NO: 233474 - DNA, 25 bp, Probe sequence
aatacgttgttatcggtcattctga

SEQ ID NO: 233475 - DNA, 25 bp, Probe sequence
cagcaattcaattagatgcattaac

SEQ ID NO: 233476 - DNA, 25 bp, Probe sequence
cggtcattctgaacgtcgtgaatta

SEQ ID NO: 233477 - DNA, 25 bp, Probe sequence
gcgttaaatacgttgttatcggtca

SEQ ID NO: 233478 - DNA, 25 bp, Probe sequence
gcatttgtacgtcaaactattgctg

SEQ ID NO: 233479 - DNA, 25 bp, Probe sequence
gaacgtcgtgaattattccacgaaa

SEQ ID NO: 233480 - DNA, 25 bp, Probe sequence
gacgaagagcgtgaaagtggtaaag

SEQ ID NO: 233481 - DNA, 25 bp, Probe sequence
gagaacaccaattatagctggtaac

SEQ ID NO: 233482 - DNA, 25 bp, Probe sequence
gttggtgaaacagacgaagagcgtg

SEQ ID NO: 233483 - DNA, 25 bp, Probe sequence
gttgcattagcagatttaggcgtta

SEQ ID NO: 233484 - DNA, 25 bp, Probe sequence
gttatcggtcattctgaacgtcgtg

SEQ ID NO: 233485 - DNA, 25 bp, Probe sequence
gtaggtggcgcatcacttaaagttg

SEQ ID NO: 233486 - DNA, 25 bp, Probe sequence
gtaatttgtgcaccagcaattcaat

SEQ ID NO: 233487 - DNA, 25 bp, Probe sequence
gtggcgcatcacttaaagttgaaga

SEQ ID NO: 233488 - DNA, 25 bp, Probe sequence
ggtgcgttcacaggtgaaacgtctc

SEQ ID NO: 233489 - DNA, 25 bp, Probe sequence
ggggcattagtaggtggcgcatcac

SEQ ID NO: 233490 - DNA, 25 bp, Probe sequence
ggaactggtaaatcatcaacatctg

SEQ ID NO: 233491 - DNA, 25 bp, Probe sequence
ggcacaaactgatattgatggggca

SEQ ID NO: 233492 - DNA, 25 bp, Probe sequence
tatggtggtagtgttaaacctaaca

SEQ ID NO: 233493 - DNA, 25 bp, Probe sequence
ttagatgcattaactactgcagtta

SEQ ID NO: 233494 - DNA, 25 bp, Probe sequence
ttgaagatttcgtacaattgttaga

SEQ ID NO: 233495 - DNA, 25 bp, Probe sequence
attacaacaaatatccaacgactca

SEQ ID NO: 233496 - DNA, 25 bp, Probe sequence
atctttggtttattgtctgacggtg

SEQ ID NO: 233497 - DNA, 25 bp, Probe sequence
atccaacgactcaaatcgaagcgag

SEQ ID NO: 233498 - DNA, 25 bp, Probe sequence
atggctaagaaaccaactgcgttaa

SEQ ID NO: 233499 - DNA, 25 bp, Probe sequence
agtggtatgcttgagccgacaatca

SEQ ID NO: 233500 - DNA, 25 bp, Probe sequence
agtttacgtacacgcatttttagat

SEQ ID NO: 233501 - DNA, 25 bp, Probe sequence
actgctgaccatggtaactctgatc

SEQ ID NO: 233502 - DNA, 25 bp, Probe sequence
aaaatccgctttgaaatacatcgaa

SEQ ID NO: 233503 - DNA, 25 bp, Probe sequence
aacaagcctaattttgatcgttatt

SEQ ID NO: 233504 - DNA, 25 bp, Probe sequence
aattcacatgattcagcgttacaca

SEQ ID NO: 233505 - DNA, 25 bp, Probe sequence
aattcgtagtaccattcatcgttga

SEQ ID NO: 233506 - DNA, 25 bp, Probe sequence
cacgttacttactttatgagtggtg

SEQ ID NO: 233507 - DNA, 25 bp, Probe sequence
cgcatacaacgaacccagtaccagt

SEQ ID NO: 233508 - DNA, 25 bp, Probe sequence
gcgaaagcgaacatggtaatgcggt

SEQ ID NO: 233509 - DNA, 25 bp, Probe sequence
gatggttttgcgaaccgcgaaagcg

SEQ ID NO: 233510 - DNA, 25 bp, Probe sequence
gcaattgcacacgtgaattcacatg

SEQ ID NO: 233511 - DNA, 25 bp, Probe sequence
gaatatcggtgcaggacgtatcgtt

SEQ ID NO: 233512 - DNA, 25 bp, Probe sequence
gaacccagtaccagtgattgtaaca

SEQ ID NO: 233513 - DNA, 25 bp, Probe sequence
gaaaaagcttacaatgctattcgta

SEQ ID NO: 233514 - DNA, 25 bp, Probe sequence
gacttattctatgcaacattcacta

SEQ ID NO: 233515 - DNA, 25 bp, Probe sequence
gttgcaacgtatgacttgaaaccag

SEQ ID NO: 233516 - DNA, 25 bp, Probe sequence
gtatcgtttatcaaagtttaactcg

SEQ ID NO: 233517 - DNA, 25 bp, Probe sequence
gtgacgtagatcaaaaatccgcttt

SEQ ID NO: 233518 - DNA, 25 bp, Probe sequence
gtgatcttctataatttccgacctg

SEQ ID NO: 233519 - DNA, 25 bp, Probe sequence
gtgacttagcacctacattattaga

SEQ ID NO: 233520 - DNA, 25 bp, Probe sequence
gtggcttagatgttggactacctga

SEQ ID NO: 233521 - DNA, 25 bp, Probe sequence
ggttatgcaattattactgctgacc

SEQ ID NO: 233522 - DNA, 25 bp, Probe sequence
tgattcacctaaagttgcaacgtat

SEQ ID NO: 233523 - DNA, 25 bp, Probe sequence
tgatgccccaacttatgcaactgcc

SEQ ID NO: 233524 - DNA, 25 bp, Probe sequence
tcgaagcggttgatgaatgtttagg

SEQ ID NO: 233525 - DNA, 25 bp, Probe sequence
ttatttgctttgttagaacttgcta

SEQ ID NO: 233526 - DNA, 25 bp, Probe sequence
ttaaactttgctaaccctgatatgg

SEQ ID NO: 233527 - DNA, 25 bp, Probe sequence
ttcagcgttacacatctttggttta

SEQ ID NO: 233528 - DNA, 25 bp, Probe sequence
ttggtcaatttgcatctgtgtctgg

SEQ ID NO: 233529 - DNA, 25 bp, Probe sequence
atcggtgaccgtgtacaattagtag

SEQ ID NO: 233530 - DNA, 25 bp, Probe sequence
atccaagcaatcgaagcagctggtt

SEQ ID NO: 233531 - DNA, 25 bp, Probe sequence
agactctcgtggtaacccaactgtt

SEQ ID NO: 233532 - DNA, 25 bp, Probe sequence
aaagtggcgcatttggtcgtgcatt

SEQ ID NO: 233533 - DNA, 25 bp, Probe sequence
aaaactggttcattatcacgtactg

SEQ ID NO: 233534 - DNA, 25 bp, Probe sequence
aacacggtgcaaaacgtacagctgc

SEQ ID NO: 233535 - DNA, 25 bp, Probe sequence
aacttacagaacgtatcggtgaccg

SEQ ID NO: 233536 - DNA, 25 bp, Probe sequence
aatggtggttctcactcagatgctc

SEQ ID NO: 233537 - DNA, 25 bp, Probe sequence
cagatgctccaattgcattccaaga

SEQ ID NO: 233538 - DNA, 25 bp, Probe sequence
cgtacagctgcagaacaagttgact

SEQ ID NO: 233539 - DNA, 25 bp, Probe sequence
gctgttgctacaaacgctggtcaaa

SEQ ID NO: 233540 - DNA, 25 bp, Probe sequence
gcagctgacttattaggtcaaccac

SEQ ID NO: 233541 - DNA, 25 bp, Probe sequence
gcagtagcacgtgcagcagctgact

SEQ ID NO: 233542 - DNA, 25 bp, Probe sequence
gaattcatgattttacctgtaggtg

SEQ ID NO: 233543 - DNA, 25 bp, Probe sequence
gaagctgttgaattacgtgatggag

SEQ ID NO: 233544 - DNA, 25 bp, Probe sequence
gaaatcatcgcaccagaaattattg

SEQ ID NO: 233545 - DNA, 25 bp, Probe sequence
gacaaatatcctatcattacaattg

SEQ ID NO: 233546 - DNA, 25 bp, Probe sequence
gacggtatggacgaaaacgactggg

SEQ ID NO: 233547 - DNA, 25 bp, Probe sequence
gactgtgcatcatcagaattctatg

SEQ ID NO: 233548 - DNA, 25 bp, Probe sequence
gacggtatcaaatcattctataact

SEQ ID NO: 233549 - DNA, 25 bp, Probe sequence
gatgatcgcattagacggtactcca

SEQ ID NO: 233550 - DNA, 25 bp, Probe sequence
ggtggtttcgctcctaaatttgaag

SEQ ID NO: 233551 - DNA, 25 bp, Probe sequence
gtattcttaggatttgactgtgcat

SEQ ID NO: 233552 - DNA, 25 bp, Probe sequence
gtaggtgctacaacgttcaaagaat

SEQ ID NO: 233553 - DNA, 25 bp, Probe sequence
gtaagcagttaccagtaccaatgat

SEQ ID NO: 233554 - DNA, 25 bp, Probe sequence
gtcgtgcattagtaccatcaggtgc

SEQ ID NO: 233555 - DNA, 25 bp, Probe sequence
ggtgacgaaggtggtttcgctccta

SEQ ID NO: 233556 - DNA, 25 bp, Probe sequence
tggggtactgaaattttccacaact

SEQ ID NO: 233557 - DNA, 25 bp, Probe sequence
tcacgtactgaccgtattgctaaat

SEQ ID NO: 233558 - DNA, 25 bp, Probe sequence
tcaggtgcttcaactggtgaacacg

SEQ ID NO: 233559 - DNA, 25 bp, Probe sequence
tacacagcagtagtttctcaccgtt

SEQ ID NO: 233560 - DNA, 25 bp, Probe sequence
tattacagatgtttacgctcgcgaa

SEQ ID NO: 233561 - DNA, 25 bp, Probe sequence
ttaggtcaaccactttacaaatatt

SEQ ID NO: 233562 - DNA, 25 bp, Probe sequence
ttacgctcgcgaagtcttagactct

SEQ ID NO: 233563 - DNA, 25 bp, Probe sequence
attcattactttgtttcgttggata

SEQ ID NO: 233564 - DNA, 25 bp, Probe sequence
atttatcaatcacaattcaagcaat

SEQ ID NO: 233565 - DNA, 25 bp, Probe sequence
ataatgcgactgccaaagcattact

SEQ ID NO: 233566 - DNA, 25 bp, Probe sequence
atcactttttggaatcgacatactt

SEQ ID NO: 233567 - DNA, 25 bp, Probe sequence
aggacgctttattgcaactgcatca

SEQ ID NO: 233568 - DNA, 25 bp, Probe sequence
agctttagattcactggtattatgt

SEQ ID NO: 233569 - DNA, 25 bp, Probe sequence
acgtaaaagtacatttaatcgctag

SEQ ID NO: 233570 - DNA, 25 bp, Probe sequence
acggtgcgtacttaacattgccaat

SEQ ID NO: 233571 - DNA, 25 bp, Probe sequence
aaacagctttagattcactggtatt

SEQ ID NO: 233572 - DNA, 25 bp, Probe sequence
aaacaggacgctttattgcaactgc

SEQ ID NO: 233573 - DNA, 25 bp, Probe sequence
aagctgcacacggtgcgtacttaac

SEQ ID NO: 233574 - DNA, 25 bp, Probe sequence
cacacggtgcgtacttaacattgcc

SEQ ID NO: 233575 - DNA, 25 bp, Probe sequence
cgctttattgcaactgcatcaatcg

SEQ ID NO: 233576 - DNA, 25 bp, Probe sequence
gcgatttatatgcttgttgtttcta

SEQ ID NO: 233577 - DNA, 25 bp, Probe sequence
gcttgttgtttctatcaaacgtaaa

SEQ ID NO: 233578 - DNA, 25 bp, Probe sequence
gcaggcttcatcactttttggaatc

SEQ ID NO: 233579 - DNA, 25 bp, Probe sequence
gcaataaaagctgcacacggtgcgt

SEQ ID NO: 233580 - DNA, 25 bp, Probe sequence
gacatacttatgtgtggtggtttat

SEQ ID NO: 233581 - DNA, 25 bp, Probe sequence
gattattcattactttgtttcgttg

SEQ ID NO: 233582 - DNA, 25 bp, Probe sequence
gattacattttaaacagctttagat

SEQ ID NO: 233583 - DNA, 25 bp, Probe sequence
gttattataggttcggttgcattag

SEQ ID NO: 233584 - DNA, 25 bp, Probe sequence
gtttcgttggataatgcgactgcca

SEQ ID NO: 233585 - DNA, 25 bp, Probe sequence
gtatcaaatagtttgtttacgttga

SEQ ID NO: 233586 - DNA, 25 bp, Probe sequence
gtgtggtggtttatgtttgcagttt

SEQ ID NO: 233587 - DNA, 25 bp, Probe sequence
ggtattatgtatattttggcttatc

SEQ ID NO: 233588 - DNA, 25 bp, Probe sequence
ggtttatgtttgcagtttatgtatc

SEQ ID NO: 233589 - DNA, 25 bp, Probe sequence
ggttcggttgcattagcgatttata

SEQ ID NO: 233590 - DNA, 25 bp, Probe sequence
ggcttatctagcaggcttcatcact

SEQ ID NO: 233591 - DNA, 25 bp, Probe sequence
ggcttcatcactttttggaatcgac

SEQ ID NO: 233592 - DNA, 25 bp, Probe sequence
tgcgtacttaacattgccaatttta

SEQ ID NO: 233593 - DNA, 25 bp, Probe sequence
tctagcaggcttcatcactttttgg

SEQ ID NO: 233594 - DNA, 25 bp, Probe sequence
tatatgcttgttgtttctatcaaac

SEQ ID NO: 233595 - DNA, 25 bp, Probe sequence
tttggcttatctagcaggcttcatc

SEQ ID NO: 233596 - DNA, 25 bp, Probe sequence
ttaacgaatcaaaacacttcagata

SEQ ID NO: 233597 - DNA, 25 bp, Probe sequence
attattttttgtacttatgatttgc

SEQ ID NO: 233598 - DNA, 25 bp, Probe sequence
atttatgcatacatttttaatcgta

SEQ ID NO: 233599 - DNA, 25 bp, Probe sequence
attttttgtacttatgatttgcata

SEQ ID NO: 233600 - DNA, 25 bp, Probe sequence
ataactgttgtactactccaagaag

SEQ ID NO: 233601 - DNA, 25 bp, Probe sequence
atcagtggtggtgctgagcagttat

SEQ ID NO: 233602 - DNA, 25 bp, Probe sequence
atgcatacatttttaatcgtattat

SEQ ID NO: 233603 - DNA, 25 bp, Probe sequence
atgatatactacttgtcgtatataa

SEQ ID NO: 233604 - DNA, 25 bp, Probe sequence
atgatttgcataagttatcttggta

SEQ ID NO: 233605 - DNA, 25 bp, Probe sequence
acgtggcgtcgatttattcttaaat

SEQ ID NO: 233606 - DNA, 25 bp, Probe sequence
actacttgtcgtatataaggaacgg

SEQ ID NO: 233607 - DNA, 25 bp, Probe sequence
aacaacgtggcgtcgatttattctt

SEQ ID NO: 233608 - DNA, 25 bp, Probe sequence
aactgttgtactactccaagaaggt

SEQ ID NO: 233609 - DNA, 25 bp, Probe sequence
aacggaggacaatttatgcatacat

SEQ ID NO: 233610 - DNA, 25 bp, Probe sequence
ctgttgtactactccaagaaggtaa

SEQ ID NO: 233611 - DNA, 25 bp, Probe sequence
aatcgtattattaatcattgattgt

SEQ ID NO: 233612 - DNA, 25 bp, Probe sequence
aatcattgattgtattgcattaata

SEQ ID NO: 233613 - DNA, 25 bp, Probe sequence
caacgtggcgtcgatttattcttaa

SEQ ID NO: 233614 - DNA, 25 bp, Probe sequence
gtactactccaagaaggtaaaagca

SEQ ID NO: 233615 - DNA, 25 bp, Probe sequence
gccatcagtggtggtgctgagcagt

SEQ ID NO: 233616 - DNA, 25 bp, Probe sequence
gctgagcagttattcggtaaacaaa

SEQ ID NO: 233617 - DNA, 25 bp, Probe sequence
gcattaataactgttgtactactcc

SEQ ID NO: 233618 - DNA, 25 bp, Probe sequence
gaggacaatttatgcatacattttt

SEQ ID NO: 233619 - DNA, 25 bp, Probe sequence
gtgccatcagtggtggtgctgagca

SEQ ID NO: 233620 - DNA, 25 bp, Probe sequence
gtggtgctgagcagttattcggtaa

SEQ ID NO: 233621 - DNA, 25 bp, Probe sequence
gtggtggtgctgagcagttattcgg

SEQ ID NO: 233622 - DNA, 25 bp, Probe sequence
gtggcgtcgatttattcttaaatag

SEQ ID NO: 233623 - DNA, 25 bp, Probe sequence
ggtgctgagcagttattcggtaaac

SEQ ID NO: 233624 - DNA, 25 bp, Probe sequence
ggtgccatcagtggtggtgctgagc

SEQ ID NO: 233625 - DNA, 25 bp, Probe sequence
ggaacggaggacaatttatgcatac

SEQ ID NO: 233626 - DNA, 25 bp, Probe sequence
tcaggtgccatcagtggtggtgctg

SEQ ID NO: 233627 - DNA, 25 bp, Probe sequence
taataactgttgtactactccaaga

SEQ ID NO: 233628 - DNA, 25 bp, Probe sequence
taaacaaaaacaacgtggcgtcgat

SEQ ID NO: 233629 - DNA, 25 bp, Probe sequence
tttcaggtgccatcagtggtggtgc

SEQ ID NO: 233630 - DNA, 25 bp, Probe sequence
ttgcataagttatcttggtatgtaa

SEQ ID NO: 233631 - DNA, 25 bp, Probe sequence
attgcctgagttagctgaacatact

SEQ ID NO: 233632 - DNA, 25 bp, Probe sequence
atcaacctgaatatgaacctatgtc

SEQ ID NO: 233633 - DNA, 25 bp, Probe sequence
atcagatcgcttaagacaattcttt

SEQ ID NO: 233634 - DNA, 25 bp, Probe sequence
acagttcatcgtttaatccgtaagt

SEQ ID NO: 233635 - DNA, 25 bp, Probe sequence
aaaggccgtcatgatttacgtgatg

SEQ ID NO: 233636 - DNA, 25 bp, Probe sequence
aagaagaagtagaaggtcgacctga

SEQ ID NO: 233637 - DNA, 25 bp, Probe sequence
gaaggggaagttaagtcgattgaga

SEQ ID NO: 233638 - DNA, 25 bp, Probe sequence
caagtgtatatcttgttgaccgtgt

SEQ ID NO: 233639 - DNA, 25 bp, Probe sequence
ctgaaaaggatcctaacattcgcga

SEQ ID NO: 233640 - DNA, 25 bp, Probe sequence
gcgttgggaagacaaattgcctgag

SEQ ID NO: 233641 - DNA, 25 bp, Probe sequence
gcatgagcaacctaaatcagatcgc

SEQ ID NO: 233642 - DNA, 25 bp, Probe sequence
gcacaagatttatctaatcgtttga

SEQ ID NO: 233643 - DNA, 25 bp, Probe sequence
gcaacaagcgcattatgatgatgtg

SEQ ID NO: 233644 - DNA, 25 bp, Probe sequence
gaaggtatggttcatattgcgaata

SEQ ID NO: 233645 - DNA, 25 bp, Probe sequence
gaagctgaagcagtacctgatcata

SEQ ID NO: 233646 - DNA, 25 bp, Probe sequence
gaacttgggacattttggcttatca

SEQ ID NO: 233647 - DNA, 25 bp, Probe sequence
gaacatacttctaaacgtgaacgtc

SEQ ID NO: 233648 - DNA, 25 bp, Probe sequence
gaaacagttgctgaacattttagta

SEQ ID NO: 233649 - DNA, 25 bp, Probe sequence
gactgatgattattaccgttttgaa

SEQ ID NO: 233650 - DNA, 25 bp, Probe sequence
gacgttatcctgatttaacagttca

SEQ ID NO: 233651 - DNA, 25 bp, Probe sequence
gatattcatccaacaacacttcaaa

SEQ ID NO: 233652 - DNA, 25 bp, Probe sequence
gattttcaagatgcattaggtttaa

SEQ ID NO: 233653 - DNA, 25 bp, Probe sequence
gtaactcaagttgttggtacgtata

SEQ ID NO: 233654 - DNA, 25 bp, Probe sequence
gtcgacctgaacaaatggtcatttc

SEQ ID NO: 233655 - DNA, 25 bp, Probe sequence
ggtacgtatagtgaagctagacatt

SEQ ID NO: 233656 - DNA, 25 bp, Probe sequence
ggttaaagtgacgcatgttgatgta

SEQ ID NO: 233657 - DNA, 25 bp, Probe sequence
ggcattaattggtgagcgtcaagct

SEQ ID NO: 233658 - DNA, 25 bp, Probe sequence
ggcttatcagctgaatattatacgc

SEQ ID NO: 233659 - DNA, 25 bp, Probe sequence
tgcaagatattttcattcctaaagg

SEQ ID NO: 233660 - DNA, 25 bp, Probe sequence
tgaagagcgtcaaatggcattaatt

SEQ ID NO: 233661 - DNA, 25 bp, Probe sequence
taaacgtgaacgtcgtgctattgag

SEQ ID NO: 233662 - DNA, 25 bp, Probe sequence
tagtgttatacattctgattatcga

SEQ ID NO: 233663 - DNA, 25 bp, Probe sequence
tattatacgcattttacatcaccaa

SEQ ID NO: 233664 - DNA, 25 bp, Probe sequence
tttatttaccgagtgcatgagcaac

SEQ ID NO: 233665 - DNA, 25 bp, Probe sequence
atagattattttgtcgcgccagtca

SEQ ID NO: 233666 - DNA, 25 bp, Probe sequence
atcaagggattaaaactcacgtgtg

SEQ ID NO: 233667 - DNA, 25 bp, Probe sequence
atccaaacgcacaaattgttgctgt

SEQ ID NO: 233668 - DNA, 25 bp, Probe sequence
atgggggttatttaatgactcgtat

SEQ ID NO: 233669 - DNA, 25 bp, Probe sequence
aaaggtgcaagaactgttagccact

SEQ ID NO: 233670 - DNA, 25 bp, Probe sequence
aaacatggtttaatcactgagaata

SEQ ID NO: 233671 - DNA, 25 bp, Probe sequence
aaaaagtcaagcatgtcacgattca

SEQ ID NO: 233672 - DNA, 25 bp, Probe sequence
aactcacgtgtgttgttgatcctaa

SEQ ID NO: 233673 - DNA, 25 bp, Probe sequence
cggtgctagtcgtgtacccgaaata

SEQ ID NO: 233674 - DNA, 25 bp, Probe sequence
cgccagtcagcacgacaggtagcat

SEQ ID NO: 233675 - DNA, 25 bp, Probe sequence
gggcaaacacctatggttcaacttc

SEQ ID NO: 233676 - DNA, 25 bp, Probe sequence
gcgaatgagttaaattggcaatccc

SEQ ID NO: 233677 - DNA, 25 bp, Probe sequence
gcgaaagggtcagtcatttttggtg

SEQ ID NO: 233678 - DNA, 25 bp, Probe sequence
gcacgacaggtagcattatgggtat

SEQ ID NO: 233679 - DNA, 25 bp, Probe sequence
gcagcgattgagcagttgataacgt

SEQ ID NO: 233680 - DNA, 25 bp, Probe sequence
gcaatcccattatcatggtgcaggc

SEQ ID NO: 233681 - DNA, 25 bp, Probe sequence
gaattacctggtatcggtgctagtc

SEQ ID NO: 233682 - DNA, 25 bp, Probe sequence
gaaggtgcaacaattgtcacgattt

SEQ ID NO: 233683 - DNA, 25 bp, Probe sequence
gatcgacctgccaagtacatcattg

SEQ ID NO: 233684 - DNA, 25 bp, Probe sequence
gatcgaggcgatcgttacttagatt

SEQ ID NO: 233685 - DNA, 25 bp, Probe sequence
gattatcaatctgctttgggctgtc

SEQ ID NO: 233686 - DNA, 25 bp, Probe sequence
gttagccactattgacgatgcatat

SEQ ID NO: 233687 - DNA, 25 bp, Probe sequence
gttagattctgtagggcaaacacct

SEQ ID NO: 233688 - DNA, 25 bp, Probe sequence
gtcacgattttaccagatcgaggcg

SEQ ID NO: 233689 - DNA, 25 bp, Probe sequence
gtacttctggtaatttaggcattgc

SEQ ID NO: 233690 - DNA, 25 bp, Probe sequence
gtcacgattcattgttagattctgt

SEQ ID NO: 233691 - DNA, 25 bp, Probe sequence
ggaggcagcatgaaagatcgacctg

SEQ ID NO: 233692 - DNA, 25 bp, Probe sequence
ggttcaacttcatcaactatttccg

SEQ ID NO: 233693 - DNA, 25 bp, Probe sequence
ggttgaagaacctgatgcacatggg

SEQ ID NO: 233694 - DNA, 25 bp, Probe sequence
tctgctttgggctgtcgaaaactga

SEQ ID NO: 233695 - DNA, 25 bp, Probe sequence
tggtgcaggcacagagattgttgaa

SEQ ID NO: 233696 - DNA, 25 bp, Probe sequence
taatgactcgtattgcaaaggtgca

SEQ ID NO: 233697 - DNA, 25 bp, Probe sequence
tagagtatatgaatcctggaggcag

SEQ ID NO: 233698 - DNA, 25 bp, Probe sequence
ttgttgctgttgatgcgaaagggtc

SEQ ID NO: 233699 - DNA, 25 bp, Probe sequence
attcgccgaggtagtgctaacctta

SEQ ID NO: 233700 - DNA, 25 bp, Probe sequence
atatgataaacgtcaagctttgaaa

SEQ ID NO: 233701 - DNA, 25 bp, Probe sequence
atagcaccatacgaagaagggaatc

SEQ ID NO: 233702 - DNA, 25 bp, Probe sequence
atcaccaggtacattagcggaaaat

SEQ ID NO: 233703 - DNA, 25 bp, Probe sequence
atgcatatagcaccatacgaagaag

SEQ ID NO: 233704 - DNA, 25 bp, Probe sequence
agcagtcaaacgagatgttgcgcgc

SEQ ID NO: 233705 - DNA, 25 bp, Probe sequence
accaggtacattagcggaaaatcgt

SEQ ID NO: 233706 - DNA, 25 bp, Probe sequence
acgatcctcttcgttctcgaaaatt

SEQ ID NO: 233707 - DNA, 25 bp, Probe sequence
aaatcaccaggtacattagcggaaa

SEQ ID NO: 233708 - DNA, 25 bp, Probe sequence
aacgagatgttgcgcgcgatatgaa

SEQ ID NO: 233709 - DNA, 25 bp, Probe sequence
caaacgagatgttgcgcgcgatatg

SEQ ID NO: 233710 - DNA, 25 bp, Probe sequence
gccgaggtagtgctaaccttaaaga

SEQ ID NO: 233711 - DNA, 25 bp, Probe sequence
cagtcaaacgagatgttgcgcgcga

SEQ ID NO: 233712 - DNA, 25 bp, Probe sequence
cgcgcgatatgaaagcccgttatta

SEQ ID NO: 233713 - DNA, 25 bp, Probe sequence
gcgcgatatgaaagcccgttattaa

SEQ ID NO: 233714 - DNA, 25 bp, Probe sequence
gaatcgttttaatcacgatcctctt

SEQ ID NO: 233715 - DNA, 25 bp, Probe sequence
gaataatatgcatatagcaccatac

SEQ ID NO: 233716 - DNA, 25 bp, Probe sequence
gaagaaatcaccaggtacattagcg

SEQ ID NO: 233717 - DNA, 25 bp, Probe sequence
gagatgttgcgcgcgatatgaaagc

SEQ ID NO: 233718 - DNA, 25 bp, Probe sequence
gatgttgcgcgcgatatgaaagccc

SEQ ID NO: 233719 - DNA, 25 bp, Probe sequence
gatcctcttcgttctcgaaaattat

SEQ ID NO: 233720 - DNA, 25 bp, Probe sequence
gttgcgcgcgatatgaaagcccgtt

SEQ ID NO: 233721 - DNA, 25 bp, Probe sequence
gttttaatcacgatcctcttcgttc

SEQ ID NO: 233722 - DNA, 25 bp, Probe sequence
gtcaaacgagatgttgcgcgcgata

SEQ ID NO: 233723 - DNA, 25 bp, Probe sequence
gggaatcgttttaatcacgatcctc

SEQ ID NO: 233724 - DNA, 25 bp, Probe sequence
ggtagtgctaaccttaaagatagtt

SEQ ID NO: 233725 - DNA, 25 bp, Probe sequence
tcctcttcgttctcgaaaattatta

SEQ ID NO: 233726 - DNA, 25 bp, Probe sequence
ggctaagaagaaatcaccaggtaca

SEQ ID NO: 233727 - DNA, 25 bp, Probe sequence
tgttgcgcgcgatatgaaagcccgt

SEQ ID NO: 233728 - DNA, 25 bp, Probe sequence
tcgccgaggtagtgctaaccttaaa

SEQ ID NO: 233729 - DNA, 25 bp, Probe sequence
tcgttttaatcacgatcctcttcgt

SEQ ID NO: 233730 - DNA, 25 bp, Probe sequence
tttaatcacgatcctcttcgttctc

SEQ ID NO: 233731 - DNA, 25 bp, Probe sequence
ttcgttctcgaaaattattattgca

SEQ ID NO: 233732 - DNA, 25 bp, Probe sequence
ttgcgcgcgatatgaaagcccgtta

SEQ ID NO: 233733 - DNA, 25 bp, Probe sequence
atatgagcagtcgaatataacgttt

SEQ ID NO: 233734 - DNA, 25 bp, Probe sequence
atgctttttcagtttgaaattaatc

SEQ ID NO: 233735 - DNA, 25 bp, Probe sequence
atgagcagtcgaatataacgtttaa

SEQ ID NO: 233736 - DNA, 25 bp, Probe sequence
atgattgtttttggatataaacgat

SEQ ID NO: 233737 - DNA, 25 bp, Probe sequence
agtcgaatataacgtttaaaatgat

SEQ ID NO: 233738 - DNA, 25 bp, Probe sequence
agcagtcgaatataacgtttaaaat

SEQ ID NO: 233739 - DNA, 25 bp, Probe sequence
agcaaaactttttatatgagcagtc

SEQ ID NO: 233740 - DNA, 25 bp, Probe sequence
actttttatatgagcagtcgaatat

SEQ ID NO: 233741 - DNA, 25 bp, Probe sequence
aaagcaaaactttttatatgagcag

SEQ ID NO: 233742 - DNA, 25 bp, Probe sequence
aaactttttatatgagcagtcgaat

SEQ ID NO: 233743 - DNA, 25 bp, Probe sequence
aaaactttttatatgagcagtcgaa

SEQ ID NO: 233744 - DNA, 25 bp, Probe sequence
aactttttatatgagcagtcgaata

SEQ ID NO: 233745 - DNA, 25 bp, Probe sequence
aagcaaaactttttatatgagcagt

SEQ ID NO: 233746 - DNA, 25 bp, Probe sequence
aatgattgtttttggatataaacga

SEQ ID NO: 233747 - DNA, 25 bp, Probe sequence
aatgctttttcagtttgaaattaat

SEQ ID NO: 233748 - DNA, 25 bp, Probe sequence
caaaactttttatatgagcagtcga

SEQ ID NO: 233749 - DNA, 25 bp, Probe sequence
cagtcgaatataacgtttaaaatga

SEQ ID NO: 233750 - DNA, 25 bp, Probe sequence
ctttttatatgagcagtcgaatata

SEQ ID NO: 233751 - DNA, 25 bp, Probe sequence
gctttttcagtttgaaattaatcat

SEQ ID NO: 233752 - DNA, 25 bp, Probe sequence
gcagtcgaatataacgtttaaaatg

SEQ ID NO: 233753 - DNA, 25 bp, Probe sequence
gcaaaactttttatatgagcagtcg

SEQ ID NO: 233754 - DNA, 25 bp, Probe sequence
gaatataacgtttaaaatgattgtt

SEQ ID NO: 233755 - DNA, 25 bp, Probe sequence
gagcagtcgaatataacgtttaaaa

SEQ ID NO: 233756 - DNA, 25 bp, Probe sequence
gattgtttttggatataaacgatta

SEQ ID NO: 233757 - DNA, 25 bp, Probe sequence
gtaaaatgctttttcagtttgaaat

SEQ ID NO: 233758 - DNA, 25 bp, Probe sequence
gtcgaatataacgtttaaaatgatt

SEQ ID NO: 233759 - DNA, 25 bp, Probe sequence
tgagcagtcgaatataacgtttaaa

SEQ ID NO: 233760 - DNA, 25 bp, Probe sequence
tgctttttcagtttgaaattaatca

SEQ ID NO: 233761 - DNA, 25 bp, Probe sequence
taagtaaaatgctttttcagtttga

SEQ ID NO: 233762 - DNA, 25 bp, Probe sequence
taaaatgctttttcagtttgaaatt

SEQ ID NO: 233763 - DNA, 25 bp, Probe sequence
tacttaaggctataaagcaaaactt

SEQ ID NO: 233764 - DNA, 25 bp, Probe sequence
tatgagcagtcgaatataacgttta

SEQ ID NO: 233765 - DNA, 25 bp, Probe sequence
tttcagtttgaaattaatcatataa

SEQ ID NO: 233766 - DNA, 25 bp, Probe sequence
ttaatcatataaatttcttatggga

SEQ ID NO: 233767 - DNA, 25 bp, Probe sequence
attagctttctgccagctttaggtt

SEQ ID NO: 233768 - DNA, 25 bp, Probe sequence
attatggctttattttattttgtat

SEQ ID NO: 233769 - DNA, 25 bp, Probe sequence
atttcagctataggatctattggaa

SEQ ID NO: 233770 - DNA, 25 bp, Probe sequence
atataatttaggtggcggtgctgct

SEQ ID NO: 233771 - DNA, 25 bp, Probe sequence
ataatttaggtggcggtgctgctaa

SEQ ID NO: 233772 - DNA, 25 bp, Probe sequence
atcagtttcagttcaactttatcaa

SEQ ID NO: 233773 - DNA, 25 bp, Probe sequence
atgaagctgatttgaatgtacgtat

SEQ ID NO: 233774 - DNA, 25 bp, Probe sequence
atggctttattttattttgtatcag

SEQ ID NO: 233775 - DNA, 25 bp, Probe sequence
agagcatcatcataaagattatatt

SEQ ID NO: 233776 - DNA, 25 bp, Probe sequence
acatttattatggctttattttatt

SEQ ID NO: 233777 - DNA, 25 bp, Probe sequence
acagaagagcatcatcataaagatt

SEQ ID NO: 233778 - DNA, 25 bp, Probe sequence
aaattagctttctgccagctttagg

SEQ ID NO: 233779 - DNA, 25 bp, Probe sequence
aaatgaaaattagctttctgccagc

SEQ ID NO: 233780 - DNA, 25 bp, Probe sequence
aatttaggtggcggtgctgctaaaa

SEQ ID NO: 233781 - DNA, 25 bp, Probe sequence
gctgatttgaatgtacgtatgactt

SEQ ID NO: 233782 - DNA, 25 bp, Probe sequence
gctttctgccagctttaggttttaa

SEQ ID NO: 233783 - DNA, 25 bp, Probe sequence
gaatgtacgtatgacttattatcat

SEQ ID NO: 233784 - DNA, 25 bp, Probe sequence
gaaaattagctttctgccagcttta

SEQ ID NO: 233785 - DNA, 25 bp, Probe sequence
gaaatttatgatttgcagtttatct

SEQ ID NO: 233786 - DNA, 25 bp, Probe sequence
gatttgaatgtacgtatgacttatt

SEQ ID NO: 233787 - DNA, 25 bp, Probe sequence
gtttcagttcaactttatcaaatga

SEQ ID NO: 233788 - DNA, 25 bp, Probe sequence
gtatcagtttcagttcaactttatc

SEQ ID NO: 233789 - DNA, 25 bp, Probe sequence
gtacgtatgacttattatcataatg

SEQ ID NO: 233790 - DNA, 25 bp, Probe sequence
ggtggcggtgctgctaaaaaaattg

SEQ ID NO: 233791 - DNA, 25 bp, Probe sequence
ggatctattggaacatttattatgg

SEQ ID NO: 233792 - DNA, 25 bp, Probe sequence
ggaacatttattatggctttatttt

SEQ ID NO: 233793 - DNA, 25 bp, Probe sequence
ggctttattttattttgtatcagtt

SEQ ID NO: 233794 - DNA, 25 bp, Probe sequence
tgccagctttaggttttaaccaaat

SEQ ID NO: 233795 - DNA, 25 bp, Probe sequence
tctgccagctttaggttttaaccaa

SEQ ID NO: 233796 - DNA, 25 bp, Probe sequence
tagctttctgccagctttaggtttt

SEQ ID NO: 233797 - DNA, 25 bp, Probe sequence
taggtggcggtgctgctaaaaaaat

SEQ ID NO: 233798 - DNA, 25 bp, Probe sequence
tattttgtatcagtttcagttcaac

SEQ ID NO: 233799 - DNA, 25 bp, Probe sequence
ttctgccagctttaggttttaacca

SEQ ID NO: 233800 - DNA, 25 bp, Probe sequence
ttttattttgtatcagtttcagttc

SEQ ID NO: 233801 - DNA, 25 bp, Probe sequence
atgccaatctaggatatcaacgcgc

SEQ ID NO: 233802 - DNA, 25 bp, Probe sequence
aaattcgtctaagtgatacgtatga

SEQ ID NO: 233803 - DNA, 25 bp, Probe sequence
aaattacacatctgcttttgaaaaa

SEQ ID NO: 233804 - DNA, 25 bp, Probe sequence
aacaggtaccataaattacacatct

SEQ ID NO: 233805 - DNA, 25 bp, Probe sequence
aatacatcaacatgactttgctcaa

SEQ ID NO: 233806 - DNA, 25 bp, Probe sequence
caatctaggatatcaacgcgcaagt

SEQ ID NO: 233807 - DNA, 25 bp, Probe sequence
ctaagtgaagtttatcttgataacg

SEQ ID NO: 233808 - DNA, 25 bp, Probe sequence
cgacatttatccaccatatgatggt

SEQ ID NO: 233809 - DNA, 25 bp, Probe sequence
ccataaattacacatctgcttttga

SEQ ID NO: 233810 - DNA, 25 bp, Probe sequence
gcacctgtatctgttgatattcatc

SEQ ID NO: 233811 - DNA, 25 bp, Probe sequence
gcacaacgggaaattggattagtgt

SEQ ID NO: 233812 - DNA, 25 bp, Probe sequence
gcaaattagacaaatacatcaacat

SEQ ID NO: 233813 - DNA, 25 bp, Probe sequence
gaacggcatttgaaaatagtgaaca

SEQ ID NO: 233814 - DNA, 25 bp, Probe sequence
gaccaaattcgtctaagtgatacgt

SEQ ID NO: 233815 - DNA, 25 bp, Probe sequence
gaccagttaattagaacggcatttg

SEQ ID NO: 233816 - DNA, 25 bp, Probe sequence
gtgaacagtttagcgggaaaaacag

SEQ ID NO: 233817 - DNA, 25 bp, Probe sequence
gattcaagcattagaacgagaagca

SEQ ID NO: 233818 - DNA, 25 bp, Probe sequence
gttgtagggcacggtttactaagtg

SEQ ID NO: 233819 - DNA, 25 bp, Probe sequence
gtatctgttgatattcatcatcaaa

SEQ ID NO: 233820 - DNA, 25 bp, Probe sequence
gtatgtacgacatttatccaccata

SEQ ID NO: 233821 - DNA, 25 bp, Probe sequence
gtagggcacggtttactaagtgaag

SEQ ID NO: 233822 - DNA, 25 bp, Probe sequence
gtaccataaattacacatctgcttt

SEQ ID NO: 233823 - DNA, 25 bp, Probe sequence
gtacgacatttatccaccatatgat

SEQ ID NO: 233824 - DNA, 25 bp, Probe sequence
gtgaacatggttatggtaatgaatc

SEQ ID NO: 233825 - DNA, 25 bp, Probe sequence
gtgttagcacctgtatctgttgata

SEQ ID NO: 233826 - DNA, 25 bp, Probe sequence
gggaagcgattgattcaagcattag

SEQ ID NO: 233827 - DNA, 25 bp, Probe sequence
ggatatcaacgcgcaagtatgtacg

SEQ ID NO: 233828 - DNA, 25 bp, Probe sequence
ggattagtgttagcacctgtatctg

SEQ ID NO: 233829 - DNA, 25 bp, Probe sequence
tcaacgcgcaagtatgtacgacatt

SEQ ID NO: 233830 - DNA, 25 bp, Probe sequence
taaaggtattgggaagcgattgatt

SEQ ID NO: 233831 - DNA, 25 bp, Probe sequence
tacatcaacatgactttgctcaagt

SEQ ID NO: 233832 - DNA, 25 bp, Probe sequence
tagtgttagcacctgtatctgttga

SEQ ID NO: 233833 - DNA, 25 bp, Probe sequence
tatccaccatatgatggtataccag

SEQ ID NO: 233834 - DNA, 25 bp, Probe sequence
tttatcagtgtattaggatggccga

SEQ ID NO: 233835 - DNA, 25 bp, Probe sequence
acttgtggtttctgcaccaacaaag

SEQ ID NO: 233836 - DNA, 25 bp, Probe sequence
acaagacctaataatattcctgttt

SEQ ID NO: 233837 - DNA, 25 bp, Probe sequence
aaatatcaacagagatttatggctg

SEQ ID NO: 233838 - DNA, 25 bp, Probe sequence
aaatactcaaaatcacaaacctgca

SEQ ID NO: 233839 - DNA, 25 bp, Probe sequence
aaatcacaaacctgcatctcaagaa

SEQ ID NO: 233840 - DNA, 25 bp, Probe sequence
aaaacaattggctggattaaatggt

SEQ ID NO: 233841 - DNA, 25 bp, Probe sequence
aaaagcgagatttttggataatcaa

SEQ ID NO: 233842 - DNA, 25 bp, Probe sequence
aactcagcaacaaattatttataat

SEQ ID NO: 233843 - DNA, 25 bp, Probe sequence
aacctgcatctcaagaagtttctga

SEQ ID NO: 233844 - DNA, 25 bp, Probe sequence
aagtgcgacttagaattaaacaaat

SEQ ID NO: 233845 - DNA, 25 bp, Probe sequence
aatgcaccaaaacaattggctggat

SEQ ID NO: 233846 - DNA, 25 bp, Probe sequence
aatatggtcctttccaaacttagat

SEQ ID NO: 233847 - DNA, 25 bp, Probe sequence
aatatggctcaattaaaatctgaca

SEQ ID NO: 233848 - DNA, 25 bp, Probe sequence
aattgatgaattttttagtgatata

SEQ ID NO: 233849 - DNA, 25 bp, Probe sequence
caacaaagaaaccaacatcaccgac

SEQ ID NO: 233850 - DNA, 25 bp, Probe sequence
ctcaaaatcacaaacctgcatctca

SEQ ID NO: 233851 - DNA, 25 bp, Probe sequence
gcaccaacaaagaaaccaacatcac

SEQ ID NO: 233852 - DNA, 25 bp, Probe sequence
gaatccatatgtatctgagtcgttg

SEQ ID NO: 233853 - DNA, 25 bp, Probe sequence
gaagacttagaaaccataattgatg

SEQ ID NO: 233854 - DNA, 25 bp, Probe sequence
gaagcagcaaaaagtgatgaatcaa

SEQ ID NO: 233855 - DNA, 25 bp, Probe sequence
gaaaacacctgtagtgtcattagaa

SEQ ID NO: 233856 - DNA, 25 bp, Probe sequence
gaaagatttgataatcctgaatata

SEQ ID NO: 233857 - DNA, 25 bp, Probe sequence
gaggctttgaagaaattttttagtg

SEQ ID NO: 233858 - DNA, 25 bp, Probe sequence
gaggagcaattaaagtgcgacttag

SEQ ID NO: 233859 - DNA, 25 bp, Probe sequence
gataaccctgaattgaaagacttta

SEQ ID NO: 233860 - DNA, 25 bp, Probe sequence
gatttaatatggtcctttccaaact

SEQ ID NO: 233861 - DNA, 25 bp, Probe sequence
gattatctaggattatctcatgaaa

SEQ ID NO: 233862 - DNA, 25 bp, Probe sequence
gtatctgagtcgttgaaactgacta

SEQ ID NO: 233863 - DNA, 25 bp, Probe sequence
ggtcctttccaaacttagataatga

SEQ ID NO: 233864 - DNA, 25 bp, Probe sequence
ggatgatttaatatggtcctttcca

SEQ ID NO: 233865 - DNA, 25 bp, Probe sequence
taatattcctgttttagaagatgaa

SEQ ID NO: 233866 - DNA, 25 bp, Probe sequence
tagagatgatgttgaaagtttatat

SEQ ID NO: 233867 - DNA, 25 bp, Probe sequence
tatggctgaagatgaggctttgaag

SEQ ID NO: 233868 - DNA, 25 bp, Probe sequence
ttgagcataaacaacgtattgacaa

SEQ ID NO: 233869 - DNA, 25 bp, Probe sequence
atttattaggtttaacacatgaaag

SEQ ID NO: 233870 - DNA, 25 bp, Probe sequence
atactcaaaataataaatctacaac

SEQ ID NO: 233871 - DNA, 25 bp, Probe sequence
atgagtctgtggtttcactaatcga

SEQ ID NO: 233872 - DNA, 25 bp, Probe sequence
aaaattcaacaagaacgtccagaga

SEQ ID NO: 233873 - DNA, 25 bp, Probe sequence
aagctgctaaaaatgacgtatcaaa

SEQ ID NO: 233874 - DNA, 25 bp, Probe sequence
aaggactttaacaatacagagcaac

SEQ ID NO: 233875 - DNA, 25 bp, Probe sequence
aatgcagatattagcagaaaatcga

SEQ ID NO: 233876 - DNA, 25 bp, Probe sequence
aatcgatgacgaagacgacaacgaa

SEQ ID NO: 233877 - DNA, 25 bp, Probe sequence
aatgccgacgtagaaataaacaatt

SEQ ID NO: 233878 - DNA, 25 bp, Probe sequence
aatctacaacacaagaaatttctga

SEQ ID NO: 233879 - DNA, 25 bp, Probe sequence
aatcagactatggcattaaagttaa

SEQ ID NO: 233880 - DNA, 25 bp, Probe sequence
aatcataatcagactatggcattaa

SEQ ID NO: 233881 - DNA, 25 bp, Probe sequence
catcattatcttttgctgattatga

SEQ ID NO: 233882 - DNA, 25 bp, Probe sequence
gcaacataatgccgacgtagaaata

SEQ ID NO: 233883 - DNA, 25 bp, Probe sequence
gaatccatatgtatcaaaagcttta

SEQ ID NO: 233884 - DNA, 25 bp, Probe sequence
gaagttgaagaattatatagtgagt

SEQ ID NO: 233885 - DNA, 25 bp, Probe sequence
gaacgtccagagagtataccagcat

SEQ ID NO: 233886 - DNA, 25 bp, Probe sequence
gaaagtttgatttcatcattatctt

SEQ ID NO: 233887 - DNA, 25 bp, Probe sequence
gagagtataccagcattaactagtg

SEQ ID NO: 233888 - DNA, 25 bp, Probe sequence
gatattcttatatttttgatacatt

SEQ ID NO: 233889 - DNA, 25 bp, Probe sequence
gttagatttgattgttggagaagtt

SEQ ID NO: 233890 - DNA, 25 bp, Probe sequence
gtataccagcattaactagtgaaaa

SEQ ID NO: 233891 - DNA, 25 bp, Probe sequence
gtctgtggtttcactaatcgatgac

SEQ ID NO: 233892 - DNA, 25 bp, Probe sequence
gtccagagagtataccagcattaac

SEQ ID NO: 233893 - DNA, 25 bp, Probe sequence
gtggtttcactaatcgatgacgaag

SEQ ID NO: 233894 - DNA, 25 bp, Probe sequence
ggtagggtatacattctataataca

SEQ ID NO: 233895 - DNA, 25 bp, Probe sequence
ggagaagttcaagataagtcggata

SEQ ID NO: 233896 - DNA, 25 bp, Probe sequence
tgatttcatcattatcttttgctga

SEQ ID NO: 233897 - DNA, 25 bp, Probe sequence
tgacgaagacgacaacgaaaacgac

SEQ ID NO: 233898 - DNA, 25 bp, Probe sequence
taataaatccaattcttacgaaaat

SEQ ID NO: 233899 - DNA, 25 bp, Probe sequence
taaaaatgagtctgtggtttcacta

SEQ ID NO: 233900 - DNA, 25 bp, Probe sequence
tacagagcaacataatgccgacgta

SEQ ID NO: 233901 - DNA, 25 bp, Probe sequence
tagtgagttagatttgattgttgga

SEQ ID NO: 233902 - DNA, 25 bp, Probe sequence
tatcaaagaaagtcagaggcattaa

SEQ ID NO: 233903 - DNA, 25 bp, Probe sequence
atatcgtcattatcatttgcagatt

SEQ ID NO: 233904 - DNA, 25 bp, Probe sequence
atatgttaatatcgtcattatcatt

SEQ ID NO: 233905 - DNA, 25 bp, Probe sequence
atcgtcattatcatttgcagattat

SEQ ID NO: 233906 - DNA, 25 bp, Probe sequence
atccatataaatctgagtcattgaa

SEQ ID NO: 233907 - DNA, 25 bp, Probe sequence
atgaggaaccagaatacaaagaagc

SEQ ID NO: 233908 - DNA, 25 bp, Probe sequence
atgttaatatcgtcattatcatttg

SEQ ID NO: 233909 - DNA, 25 bp, Probe sequence
aggagaatccatataaatctgagtc

SEQ ID NO: 233910 - DNA, 25 bp, Probe sequence
agaatccatataaatctgagtcatt

SEQ ID NO: 233911 - DNA, 25 bp, Probe sequence
aatccatataaatctgagtcattga

SEQ ID NO: 233912 - DNA, 25 bp, Probe sequence
aatatcgtcattatcatttgcagat

SEQ ID NO: 233913 - DNA, 25 bp, Probe sequence
cattatcatttgcagattatgaaaa

SEQ ID NO: 233914 - DNA, 25 bp, Probe sequence
cgtcattatcatttgcagattatga

SEQ ID NO: 233915 - DNA, 25 bp, Probe sequence
gaatccatataaatctgagtcattg

SEQ ID NO: 233916 - DNA, 25 bp, Probe sequence
gaagtactacaataactagtgataa

SEQ ID NO: 233917 - DNA, 25 bp, Probe sequence
gaaaaatatgaggaaccagaataca

SEQ ID NO: 233918 - DNA, 25 bp, Probe sequence
gagaatccatataaatctgagtcat

SEQ ID NO: 233919 - DNA, 25 bp, Probe sequence
gatatgttaatatcgtcattatcat

SEQ ID NO: 233920 - DNA, 25 bp, Probe sequence
gttaatatcgtcattatcatttgca

SEQ ID NO: 233921 - DNA, 25 bp, Probe sequence
gtcattatcatttgcagattatgaa

SEQ ID NO: 233922 - DNA, 25 bp, Probe sequence
gggaggagaatccatataaatctga

SEQ ID NO: 233923 - DNA, 25 bp, Probe sequence
ggggaggagaatccatataaatctg

SEQ ID NO: 233924 - DNA, 25 bp, Probe sequence
ggaggagaatccatataaatctgag

SEQ ID NO: 233925 - DNA, 25 bp, Probe sequence
ggagaatccatataaatctgagtca

SEQ ID NO: 233926 - DNA, 25 bp, Probe sequence
ggaaaagaagtactacaataactag

SEQ ID NO: 233927 - DNA, 25 bp, Probe sequence
tgttaatatcgtcattatcatttgc

SEQ ID NO: 233928 - DNA, 25 bp, Probe sequence
tccatataaatctgagtcattgaaa

SEQ ID NO: 233929 - DNA, 25 bp, Probe sequence
tcgtcattatcatttgcagattatg

SEQ ID NO: 233930 - DNA, 25 bp, Probe sequence
tctggggaggagaatccatataaat

SEQ ID NO: 233931 - DNA, 25 bp, Probe sequence
taatatcgtcattatcatttgcaga

SEQ ID NO: 233932 - DNA, 25 bp, Probe sequence
taaatctgagtcattgaaattaaat

SEQ ID NO: 233933 - DNA, 25 bp, Probe sequence
tatcgtcattatcatttgcagatta

SEQ ID NO: 233934 - DNA, 25 bp, Probe sequence
tataaatctgagtcattgaaattaa

SEQ ID NO: 233935 - DNA, 25 bp, Probe sequence
tttctggggaggagaatccatataa

SEQ ID NO: 233936 - DNA, 25 bp, Probe sequence
ttaatatcgtcattatcatttgcag

SEQ ID NO: 233937 - DNA, 25 bp, Probe sequence
attaatgtacaaaggtcaaccaatg

SEQ ID NO: 233938 - DNA, 25 bp, Probe sequence
atccaacagtatatagtgcaacttc

SEQ ID NO: 233939 - DNA, 25 bp, Probe sequence
atggacgtggcttagcgtatattta

SEQ ID NO: 233940 - DNA, 25 bp, Probe sequence
agacaacgctgattcaggtcaataa

SEQ ID NO: 233941 - DNA, 25 bp, Probe sequence
acttatagggatggctatcagtaat

SEQ ID NO: 233942 - DNA, 25 bp, Probe sequence
acacctgaaacaaagcatcctaaaa

SEQ ID NO: 233943 - DNA, 25 bp, Probe sequence
aaattgaagtcgagtttgacaaagg

SEQ ID NO: 233944 - DNA, 25 bp, Probe sequence
aaacctaacaatacacatgaacaac

SEQ ID NO: 233945 - DNA, 25 bp, Probe sequence
aacagtatatagtgcaacttcaact

SEQ ID NO: 233946 - DNA, 25 bp, Probe sequence
aaggcttggctaaagttgcttatgt

SEQ ID NO: 233947 - DNA, 25 bp, Probe sequence
aatatggacgtggcttagcgtatat

SEQ ID NO: 233948 - DNA, 25 bp, Probe sequence
cctgaagcaagtgcatttacgaaaa

SEQ ID NO: 233949 - DNA, 25 bp, Probe sequence
gcgaagacaacgctgattcaggtca

SEQ ID NO: 233950 - DNA, 25 bp, Probe sequence
gcgtatatttatgctgatggaaaaa

SEQ ID NO: 233951 - DNA, 25 bp, Probe sequence
gctttagttcgtcaaggcttggcta

SEQ ID NO: 233952 - DNA, 25 bp, Probe sequence
gcttggctaaagttgcttatgttta

SEQ ID NO: 233953 - DNA, 25 bp, Probe sequence
gaactgataaatatggacgtggctt

SEQ ID NO: 233954 - DNA, 25 bp, Probe sequence
gacagaatacttattaagtgctggc

SEQ ID NO: 233955 - DNA, 25 bp, Probe sequence
gacgtggcttagcgtatatttatgc

SEQ ID NO: 233956 - DNA, 25 bp, Probe sequence
gatacacctgaaacaaagcatccta

SEQ ID NO: 233957 - DNA, 25 bp, Probe sequence
gtttcaatattacttatagggatgg

SEQ ID NO: 233958 - DNA, 25 bp, Probe sequence
gtatatagtgcaacttcaactaaaa

SEQ ID NO: 233959 - DNA, 25 bp, Probe sequence
gtagctcagcaaatgcatcacaaac

SEQ ID NO: 233960 - DNA, 25 bp, Probe sequence
gtctaagtagctcagcaaatgcatc

SEQ ID NO: 233961 - DNA, 25 bp, Probe sequence
gtcaaggcttggctaaagttgctta

SEQ ID NO: 233962 - DNA, 25 bp, Probe sequence
ggcttagcgtatatttatgctgatg

SEQ ID NO: 233963 - DNA, 25 bp, Probe sequence
tggtaaacgaagctttagttcgtca

SEQ ID NO: 233964 - DNA, 25 bp, Probe sequence
tgtacaaaggtcaaccaatgacatt

SEQ ID NO: 233965 - DNA, 25 bp, Probe sequence
tcagcaaatgcatcacaaacagata

SEQ ID NO: 233966 - DNA, 25 bp, Probe sequence
taattaaagcgattgatggtgatac

SEQ ID NO: 233967 - DNA, 25 bp, Probe sequence
ttagttcgtcaaggcttggctaaag

SEQ ID NO: 233968 - DNA, 25 bp, Probe sequence
taagtgctggcatatgtatggcaat

SEQ ID NO: 233969 - DNA, 25 bp, Probe sequence
tttggagcgaagacaacgctgattc

SEQ ID NO: 233970 - DNA, 25 bp, Probe sequence
ttcaagtctaagtagctcagcaaat

SEQ ID NO: 233971 - DNA, 25 bp, Probe sequence
attcgacatcgttgaaggcgaccgt

SEQ ID NO: 233972 - DNA, 25 bp, Probe sequence
atcattagaagaaggccaaaaagtt

SEQ ID NO: 233973 - DNA, 25 bp, Probe sequence
acatcgttgaaggcgaccgtggcga

SEQ ID NO: 233974 - DNA, 25 bp, Probe sequence
atggtagcgacgtattcgtacactt

SEQ ID NO: 233975 - DNA, 25 bp, Probe sequence
agatggtagcgacgtattcgtacac

SEQ ID NO: 233976 - DNA, 25 bp, Probe sequence
accgtggcgagcaagctgcaaacgt

SEQ ID NO: 233977 - DNA, 25 bp, Probe sequence
acttctcagcaatcgctgaagatgg

SEQ ID NO: 233978 - DNA, 25 bp, Probe sequence
acacttctcagcaatcgctgaagat

SEQ ID NO: 233979 - DNA, 25 bp, Probe sequence
aaaaagttgaattcgacatcgttga

SEQ ID NO: 233980 - DNA, 25 bp, Probe sequence
catcgttgaaggcgaccgtggcgag

SEQ ID NO: 233981 - DNA, 25 bp, Probe sequence
cagcaatcgctgaagatggatacaa

SEQ ID NO: 233982 - DNA, 25 bp, Probe sequence
cgaccgtggcgagcaagctgcaaac

SEQ ID NO: 233983 - DNA, 25 bp, Probe sequence
cgacatcgttgaaggcgaccgtggc

SEQ ID NO: 233984 - DNA, 25 bp, Probe sequence
cgagcaagctgcaaacgtagttaaa

SEQ ID NO: 233985 - DNA, 25 bp, Probe sequence
ccgtggcgagcaagctgcaaacgta

SEQ ID NO: 233986 - DNA, 25 bp, Probe sequence
gccaaaaagttgaattcgacatcgt

SEQ ID NO: 233987 - DNA, 25 bp, Probe sequence
gctgaagatggatacaaatcattag

SEQ ID NO: 233988 - DNA, 25 bp, Probe sequence
tcgacatcgttgaaggcgaccgtgg

SEQ ID NO: 233989 - DNA, 25 bp, Probe sequence
gcaagctgcaaacgtagttaaaatg

SEQ ID NO: 233990 - DNA, 25 bp, Probe sequence
gcaatcgctgaagatggatacaaat

SEQ ID NO: 233991 - DNA, 25 bp, Probe sequence
gaattcgacatcgttgaaggcgacc

SEQ ID NO: 233992 - DNA, 25 bp, Probe sequence
gaagatggtagcgacgtattcgtac

SEQ ID NO: 233993 - DNA, 25 bp, Probe sequence
gacatcgttgaaggcgaccgtggcg

SEQ ID NO: 233994 - DNA, 25 bp, Probe sequence
gaccgtggcgagcaagctgcaaacg

SEQ ID NO: 233995 - DNA, 25 bp, Probe sequence
gatggtagcgacgtattcgtacact

SEQ ID NO: 233996 - DNA, 25 bp, Probe sequence
gttgaattcgacatcgttgaaggcg

SEQ ID NO: 233997 - DNA, 25 bp, Probe sequence
gtagcgacgtattcgtacacttctc

SEQ ID NO: 233998 - DNA, 25 bp, Probe sequence
gtacacttctcagcaatcgctgaag

SEQ ID NO: 233999 - DNA, 25 bp, Probe sequence
gtggcgagcaagctgcaaacgtagt

SEQ ID NO: 234000 - DNA, 25 bp, Probe sequence
ggtagcgacgtattcgtacacttct

SEQ ID NO: 234001 - DNA, 25 bp, Probe sequence
tggtagcgacgtattcgtacacttc

SEQ ID NO: 234002 - DNA, 25 bp, Probe sequence
ggcgagcaagctgcaaacgtagtta

SEQ ID NO: 234003 - DNA, 25 bp, Probe sequence
tcgtacacttctcagcaatcgctga

SEQ ID NO: 234004 - DNA, 25 bp, Probe sequence
tagcgacgtattcgtacacttctca

SEQ ID NO: 234005 - DNA, 25 bp, Probe sequence
attgggacaacattgaacctatatt

SEQ ID NO: 234006 - DNA, 25 bp, Probe sequence
ataggtagtaagcacgacaatccat

SEQ ID NO: 234007 - DNA, 25 bp, Probe sequence
atcatattacttaatccgatgggta

SEQ ID NO: 234008 - DNA, 25 bp, Probe sequence
agccgtatttaagacaggatcctga

SEQ ID NO: 234009 - DNA, 25 bp, Probe sequence
acatgtaccgtaacggatcaaccat

SEQ ID NO: 234010 - DNA, 25 bp, Probe sequence
aaagtatgttagagcaattcgatca

SEQ ID NO: 234011 - DNA, 25 bp, Probe sequence
aacgaattatccaattgcagttatg

SEQ ID NO: 234012 - DNA, 25 bp, Probe sequence
aatccgatgggtatggctatcgaag

SEQ ID NO: 234013 - DNA, 25 bp, Probe sequence
gcgcacaatgattttgtacaaccgc

SEQ ID NO: 234014 - DNA, 25 bp, Probe sequence
gcgtccggaaattaattttattgcg

SEQ ID NO: 234015 - DNA, 25 bp, Probe sequence
gctatcgaagatatttcaagtgctt

SEQ ID NO: 234016 - DNA, 25 bp, Probe sequence
gcacgacaatccatcgaaacgtaat

SEQ ID NO: 234017 - DNA, 25 bp, Probe sequence
gcaacatttctatcatggatgtgca

SEQ ID NO: 234018 - DNA, 25 bp, Probe sequence
gaatgatccagaaacgaattatcca

SEQ ID NO: 234019 - DNA, 25 bp, Probe sequence
gaacacgcaatttcaggtattaagt

SEQ ID NO: 234020 - DNA, 25 bp, Probe sequence
gaaaatggacacatcgcagatcgaa

SEQ ID NO: 234021 - DNA, 25 bp, Probe sequence
gaaacgtaatatggagcgtgcaagt

SEQ ID NO: 234022 - DNA, 25 bp, Probe sequence
gactggtcacaatgtaatcgagaaa

SEQ ID NO: 234023 - DNA, 25 bp, Probe sequence
gatggcaacaacagcgtccggaaat

SEQ ID NO: 234024 - DNA, 25 bp, Probe sequence
gatcagatattgaacaagcgggagg

SEQ ID NO: 234025 - DNA, 25 bp, Probe sequence
gatagatggcaacaacagcgtccgg

SEQ ID NO: 234026 - DNA, 25 bp, Probe sequence
gattttgtacaaccgcttaagccgt

SEQ ID NO: 234027 - DNA, 25 bp, Probe sequence
gattggttacaaaagggtgcattta

SEQ ID NO: 234028 - DNA, 25 bp, Probe sequence
gtagtatgcgtactgcagcagtttc

SEQ ID NO: 234029 - DNA, 25 bp, Probe sequence
gtactgcagcagtttcagtgattgc

SEQ ID NO: 234030 - DNA, 25 bp, Probe sequence
gtcatatcggtggtgaacacgcaat

SEQ ID NO: 234031 - DNA, 25 bp, Probe sequence
gggtgcatttattagcaacatttct

SEQ ID NO: 234032 - DNA, 25 bp, Probe sequence
ggtgaagtagtcattacatgtaccg

SEQ ID NO: 234033 - DNA, 25 bp, Probe sequence
ggatcctgaaaatggacacatcgca

SEQ ID NO: 234034 - DNA, 25 bp, Probe sequence
tgtgcacgctttgttgatagatggc

SEQ ID NO: 234035 - DNA, 25 bp, Probe sequence
tgtacaaccgcttaagccgtattta

SEQ ID NO: 234036 - DNA, 25 bp, Probe sequence
tgcgggctaatcggagacaagcaat

SEQ ID NO: 234037 - DNA, 25 bp, Probe sequence
ttatttatcaacaggcacaacaaca

SEQ ID NO: 234038 - DNA, 25 bp, Probe sequence
ttgtttacgatcaattctctgaagc

SEQ ID NO: 234039 - DNA, 25 bp, Probe sequence
attccctcgattagaagaaagacac

SEQ ID NO: 234040 - DNA, 25 bp, Probe sequence
ataaagcattccctcgattagaaga

SEQ ID NO: 234041 - DNA, 25 bp, Probe sequence
atgtctaattacacagatcatcaat

SEQ ID NO: 234042 - DNA, 25 bp, Probe sequence
atgtgatgtctaattacacagatca

SEQ ID NO: 234043 - DNA, 25 bp, Probe sequence
agtgaagataaagcattccctcgat

SEQ ID NO: 234044 - DNA, 25 bp, Probe sequence
agataaagcattccctcgattagaa

SEQ ID NO: 234045 - DNA, 25 bp, Probe sequence
agagctattagcttatatatggcaa

SEQ ID NO: 234046 - DNA, 25 bp, Probe sequence
agagcatatgtgatgtctaattaca

SEQ ID NO: 234047 - DNA, 25 bp, Probe sequence
agacaccaagtaattagagcatatg

SEQ ID NO: 234048 - DNA, 25 bp, Probe sequence
agcattccctcgattagaagaaaga

SEQ ID NO: 234049 - DNA, 25 bp, Probe sequence
accaagtaattagagcatatgtgat

SEQ ID NO: 234050 - DNA, 25 bp, Probe sequence
aaagcattccctcgattagaagaaa

SEQ ID NO: 234051 - DNA, 25 bp, Probe sequence
aagcattccctcgattagaagaaag

SEQ ID NO: 234052 - DNA, 25 bp, Probe sequence
aagataaagcattccctcgattaga

SEQ ID NO: 234053 - DNA, 25 bp, Probe sequence
aattgaaactacaaatagagctatt

SEQ ID NO: 234054 - DNA, 25 bp, Probe sequence
ccctcgattagaagaaagacaccaa

SEQ ID NO: 234055 - DNA, 25 bp, Probe sequence
gctattagcttatatatggcaaatt

SEQ ID NO: 234056 - DNA, 25 bp, Probe sequence
gcattccctcgattagaagaaagac

SEQ ID NO: 234057 - DNA, 25 bp, Probe sequence
gcatatgtgatgtctaattacacag

SEQ ID NO: 234058 - DNA, 25 bp, Probe sequence
gaagataaagcattccctcgattag

SEQ ID NO: 234059 - DNA, 25 bp, Probe sequence
gaaagacaccaagtaattagagcat

SEQ ID NO: 234060 - DNA, 25 bp, Probe sequence
gagctattagcttatatatggcaaa

SEQ ID NO: 234061 - DNA, 25 bp, Probe sequence
gagcatatgtgatgtctaattacac

SEQ ID NO: 234062 - DNA, 25 bp, Probe sequence
gataaagcattccctcgattagaag

SEQ ID NO: 234063 - DNA, 25 bp, Probe sequence
gtctaattacacagatcatcaatta

SEQ ID NO: 234064 - DNA, 25 bp, Probe sequence
gtgaagataaagcattccctcgatt

SEQ ID NO: 234065 - DNA, 25 bp, Probe sequence
gtgatgtctaattacacagatcatc

SEQ ID NO: 234066 - DNA, 25 bp, Probe sequence
ggccgaacacgttagtgaagataaa

SEQ ID NO: 234067 - DNA, 25 bp, Probe sequence
tgaagataaagcattccctcgatta

SEQ ID NO: 234068 - DNA, 25 bp, Probe sequence
taaagcattccctcgattagaagaa

SEQ ID NO: 234069 - DNA, 25 bp, Probe sequence
tagtgaagataaagcattccctcga

SEQ ID NO: 234070 - DNA, 25 bp, Probe sequence
tattagcttatatatggcaaattaa

SEQ ID NO: 234071 - DNA, 25 bp, Probe sequence
ttacacagatcatcaattaattgaa

SEQ ID NO: 234072 - DNA, 25 bp, Probe sequence
ttggccgaacacgttagtgaagata

SEQ ID NO: 234073 - DNA, 25 bp, Probe sequence
atttaatgcgccacggacaaacttt

SEQ ID NO: 234074 - DNA, 25 bp, Probe sequence
attgctcaagctcaaaaggcacgta

SEQ ID NO: 234075 - DNA, 25 bp, Probe sequence
atcgtatcaacgttttaagggactg

SEQ ID NO: 234076 - DNA, 25 bp, Probe sequence
aaatttgttgagttaattgatccaa

SEQ ID NO: 234077 - DNA, 25 bp, Probe sequence
aaagcataatatcggtaattgtaat

SEQ ID NO: 234078 - DNA, 25 bp, Probe sequence
aaacgttatatttaatgcgccacgg

SEQ ID NO: 234079 - DNA, 25 bp, Probe sequence
aaacttcgatttatatgcatcatca

SEQ ID NO: 234080 - DNA, 25 bp, Probe sequence
aaaactttacatgacattatgtctc

SEQ ID NO: 234081 - DNA, 25 bp, Probe sequence
aagggactgaaggaatggcattttg

SEQ ID NO: 234082 - DNA, 25 bp, Probe sequence
aatgcgccacggacaaactttgttt

SEQ ID NO: 234083 - DNA, 25 bp, Probe sequence
cgcattgtgaaaactttacatgaca

SEQ ID NO: 234084 - DNA, 25 bp, Probe sequence
gcgccacggacaaactttgtttaat

SEQ ID NO: 234085 - DNA, 25 bp, Probe sequence
gccgctaacagaacttggaattgct

SEQ ID NO: 234086 - DNA, 25 bp, Probe sequence
gcattagtcgtgagtcatggaacaa

SEQ ID NO: 234087 - DNA, 25 bp, Probe sequence
gaataatgcattagtcgtgagtcat

SEQ ID NO: 234088 - DNA, 25 bp, Probe sequence
gaaggtgagtcagtctatctatttg

SEQ ID NO: 234089 - DNA, 25 bp, Probe sequence
gaacttggaattgctcaagctcaaa

SEQ ID NO: 234090 - DNA, 25 bp, Probe sequence
gagattcgccgctaacagaacttgg

SEQ ID NO: 234091 - DNA, 25 bp, Probe sequence
gacacacttgaaaatgttgcaccta

SEQ ID NO: 234092 - DNA, 25 bp, Probe sequence
gagatcgaattgttcctttcaaagg

SEQ ID NO: 234093 - DNA, 25 bp, Probe sequence
gatattgccttaaactagatgaagc

SEQ ID NO: 234094 - DNA, 25 bp, Probe sequence
gattcgccgctaacagaacttggaa

SEQ ID NO: 234095 - DNA, 25 bp, Probe sequence
gtgttattgttggctaaaacgttat

SEQ ID NO: 234096 - DNA, 25 bp, Probe sequence
gggagtatttttaagatattgcctt

SEQ ID NO: 234097 - DNA, 25 bp, Probe sequence
ggtgagtcagtctatctatttgata

SEQ ID NO: 234098 - DNA, 25 bp, Probe sequence
ggatttggagattcgccgctaacag

SEQ ID NO: 234099 - DNA, 25 bp, Probe sequence
ggagaggcaaggcaacaagttgaag

SEQ ID NO: 234100 - DNA, 25 bp, Probe sequence
tcagggatttggagattcgccgcta

SEQ ID NO: 234101 - DNA, 25 bp, Probe sequence
tgaaactaaggggataaacttcgat

SEQ ID NO: 234102 - DNA, 25 bp, Probe sequence
tgacattatgtctcaaacaaagaat

SEQ ID NO: 234103 - DNA, 25 bp, Probe sequence
taagggactaattcagggatttgga

SEQ ID NO: 234104 - DNA, 25 bp, Probe sequence
tatatgcatcatcaacgcaagaacg

SEQ ID NO: 234105 - DNA, 25 bp, Probe sequence
tatttgataatctatacaagcctga

SEQ ID NO: 234106 - DNA, 25 bp, Probe sequence
ttcggagatcgaattgttcctttca

SEQ ID NO: 234107 - DNA, 25 bp, Probe sequence
cttggactaataagtagaacggctc

SEQ ID NO: 234108 - DNA, 25 bp, Probe sequence
cggctcaaggcgtttttggtggtgc

SEQ ID NO: 234109 - DNA, 25 bp, Probe sequence
atttcaatgtctaaacttggactaa

SEQ ID NO: 234110 - DNA, 25 bp, Probe sequence
atttcgaaagtacgcctccattaga

SEQ ID NO: 234111 - DNA, 25 bp, Probe sequence
atcttaatttaatatcagacttagc

SEQ ID NO: 234112 - DNA, 25 bp, Probe sequence
atcatcgtattgatgcaatagacgt

SEQ ID NO: 234113 - DNA, 25 bp, Probe sequence
atgtcacagttgatcaagtggcaga

SEQ ID NO: 234114 - DNA, 25 bp, Probe sequence
atggcaagcagatattgacattgaa

SEQ ID NO: 234115 - DNA, 25 bp, Probe sequence
agctccaggacagattgatgttact

SEQ ID NO: 234116 - DNA, 25 bp, Probe sequence
accacaagctccaggacagattgat

SEQ ID NO: 234117 - DNA, 25 bp, Probe sequence
aaattagcagtaatgccacataata

SEQ ID NO: 234118 - DNA, 25 bp, Probe sequence
aaagttacaaggtggctatgggcaa

SEQ ID NO: 234119 - DNA, 25 bp, Probe sequence
aaaagcacaagtgactttatactaa

SEQ ID NO: 234120 - DNA, 25 bp, Probe sequence
aagtggcagaaatgattacaaagct

SEQ ID NO: 234121 - DNA, 25 bp, Probe sequence
cataatttcgaaagtacgcctccat

SEQ ID NO: 234122 - DNA, 25 bp, Probe sequence
gcctccattagatgaattgcaattt

SEQ ID NO: 234123 - DNA, 25 bp, Probe sequence
gcaggcaatgtctacattttcagat

SEQ ID NO: 234124 - DNA, 25 bp, Probe sequence
gtagaacggctcaaggcgtttttgg

SEQ ID NO: 234125 - DNA, 25 bp, Probe sequence
gaaggttatgcaagattcattcaaa

SEQ ID NO: 234126 - DNA, 25 bp, Probe sequence
gaaagtacgcctccattagatgaat

SEQ ID NO: 234127 - DNA, 25 bp, Probe sequence
gacttagcaaatatcaatggcatag

SEQ ID NO: 234128 - DNA, 25 bp, Probe sequence
gatgttactgatttaaaagcacaag

SEQ ID NO: 234129 - DNA, 25 bp, Probe sequence
gatactatggactgcaaagttgttg

SEQ ID NO: 234130 - DNA, 25 bp, Probe sequence
gattacaaagctgaaggttatgcaa

SEQ ID NO: 234131 - DNA, 25 bp, Probe sequence
gttgttggtatttcaatgtctaaac

SEQ ID NO: 234132 - DNA, 25 bp, Probe sequence
gttacgtatcgtacaaagttacaag

SEQ ID NO: 234133 - DNA, 25 bp, Probe sequence
gtacgcctccattagatgaattgca

SEQ ID NO: 234134 - DNA, 25 bp, Probe sequence
gtctacattttcagatactatggac

SEQ ID NO: 234135 - DNA, 25 bp, Probe sequence
ggactgcaaagttgttggtatttca

SEQ ID NO: 234136 - DNA, 25 bp, Probe sequence
tgacacatgtggaagtagtagcgac

SEQ ID NO: 234137 - DNA, 25 bp, Probe sequence
tcaacccagaatacgttaaattagc

SEQ ID NO: 234138 - DNA, 25 bp, Probe sequence
taaaatgcaaaaattcaacccagaa

SEQ ID NO: 234139 - DNA, 25 bp, Probe sequence
ttattgcaggcaatgtctacatttt

SEQ ID NO: 234140 - DNA, 25 bp, Probe sequence
ttacaaggtggctatgggcaattta

SEQ ID NO: 234141 - DNA, 25 bp, Probe sequence
atttctaaatttgcatttcctaatg

SEQ ID NO: 234142 - DNA, 25 bp, Probe sequence
atatatctatgatcctaaagtaaga

SEQ ID NO: 234143 - DNA, 25 bp, Probe sequence
ataggtacatgttggaaatcgccat

SEQ ID NO: 234144 - DNA, 25 bp, Probe sequence
atcgccattatatatctatgatcct

SEQ ID NO: 234145 - DNA, 25 bp, Probe sequence
atgcctaaagcaccacgtaaaaata

SEQ ID NO: 234146 - DNA, 25 bp, Probe sequence
agttgtgcatgttccgaaagacaga

SEQ ID NO: 234147 - DNA, 25 bp, Probe sequence
agcaacaatgtcattatgatgcagt

SEQ ID NO: 234148 - DNA, 25 bp, Probe sequence
actactttgcatttggtgcatatgc

SEQ ID NO: 234149 - DNA, 25 bp, Probe sequence
aaagctgctgatgctccaaatcacg

SEQ ID NO: 234150 - DNA, 25 bp, Probe sequence
aaaacagatccaagacaacgtcaaa

SEQ ID NO: 234151 - DNA, 25 bp, Probe sequence
aatcacggaatgagggaaccatgga

SEQ ID NO: 234152 - DNA, 25 bp, Probe sequence
aatttgcatttcctaatgaattaga

SEQ ID NO: 234153 - DNA, 25 bp, Probe sequence
aattgagaaagctgctgatgctcca

SEQ ID NO: 234154 - DNA, 25 bp, Probe sequence
caaaatcttatgttgttactttatg

SEQ ID NO: 234155 - DNA, 25 bp, Probe sequence
ctggattcttatatttaacggattt

SEQ ID NO: 234156 - DNA, 25 bp, Probe sequence
gctgctgatgctccaaatcacggaa

SEQ ID NO: 234157 - DNA, 25 bp, Probe sequence
gcatgttattgcttattttaaaaac

SEQ ID NO: 234158 - DNA, 25 bp, Probe sequence
gaattagataagcaacaatgtcatt

SEQ ID NO: 234159 - DNA, 25 bp, Probe sequence
gaaactaggtggcatgttattgctt

SEQ ID NO: 234160 - DNA, 25 bp, Probe sequence
gagaaagctgctgatgctccaaatc

SEQ ID NO: 234161 - DNA, 25 bp, Probe sequence
gagagttgtgcatgttccgaaagac

SEQ ID NO: 234162 - DNA, 25 bp, Probe sequence
gagggaaccatggagagttgtgcat

SEQ ID NO: 234163 - DNA, 25 bp, Probe sequence
gatgctccaaatcacggaatgaggg

SEQ ID NO: 234164 - DNA, 25 bp, Probe sequence
gatccaagacaacgtcaaaatgatg

SEQ ID NO: 234165 - DNA, 25 bp, Probe sequence
gatatgcacatagatgacgcattgc

SEQ ID NO: 234166 - DNA, 25 bp, Probe sequence
gatatgcctaaagcaccacgtaaaa

SEQ ID NO: 234167 - DNA, 25 bp, Probe sequence
gttggaaatcgccattatatatcta

SEQ ID NO: 234168 - DNA, 25 bp, Probe sequence
gtgcatgttccgaaagacagattag

SEQ ID NO: 234169 - DNA, 25 bp, Probe sequence
ggtggcatgttattgcttattttaa

SEQ ID NO: 234170 - DNA, 25 bp, Probe sequence
ggtgcatatgcacaaaatcttatgt

SEQ ID NO: 234171 - DNA, 25 bp, Probe sequence
ggatatttctaaatttgcatttcct

SEQ ID NO: 234172 - DNA, 25 bp, Probe sequence
tgaaaactactttgcatttggtgca

SEQ ID NO: 234173 - DNA, 25 bp, Probe sequence
tagatgacgcattgctatatcaagc

SEQ ID NO: 234174 - DNA, 25 bp, Probe sequence
ttatgttgttactttatgaagcggg

SEQ ID NO: 234175 - DNA, 25 bp, Probe sequence
atataaagagacttggttagcgtaa

SEQ ID NO: 234176 - DNA, 25 bp, Probe sequence
atatcgttcaacatacacctacaat

SEQ ID NO: 234177 - DNA, 25 bp, Probe sequence
atatcgtgagcttgatttgaaaaat

SEQ ID NO: 234178 - DNA, 25 bp, Probe sequence
atacaggcgtagaaattaataaatt

SEQ ID NO: 234179 - DNA, 25 bp, Probe sequence
atacacctacaataaatgaatttaa

SEQ ID NO: 234180 - DNA, 25 bp, Probe sequence
atcgttcaacatacacctacaataa

SEQ ID NO: 234181 - DNA, 25 bp, Probe sequence
atgaatatggcgtaagttatgaacc

SEQ ID NO: 234182 - DNA, 25 bp, Probe sequence
atgttagtaaagcgtcctctagcag

SEQ ID NO: 234183 - DNA, 25 bp, Probe sequence
atggcgtaagttatgaaccaattga

SEQ ID NO: 234184 - DNA, 25 bp, Probe sequence
agcgtcctctagcagtaatgggcga

SEQ ID NO: 234185 - DNA, 25 bp, Probe sequence
aaagcgtcctctagcagtaatgggc

SEQ ID NO: 234186 - DNA, 25 bp, Probe sequence
aaagtttttagatgaatatggcgta

SEQ ID NO: 234187 - DNA, 25 bp, Probe sequence
aagcgtcctctagcagtaatgggcg

SEQ ID NO: 234188 - DNA, 25 bp, Probe sequence
aagttatgaaccaattgatatcgtt

SEQ ID NO: 234189 - DNA, 25 bp, Probe sequence
aaggcagcaaagtttttagatgaat

SEQ ID NO: 234190 - DNA, 25 bp, Probe sequence
aattacaaactttatcagatgatga

SEQ ID NO: 234191 - DNA, 25 bp, Probe sequence
caataattgcaaatacaggcgtaga

SEQ ID NO: 234192 - DNA, 25 bp, Probe sequence
cgttcaacatacacctacaataaat

SEQ ID NO: 234193 - DNA, 25 bp, Probe sequence
gcgaaatatcgtgagcttgatttga

SEQ ID NO: 234194 - DNA, 25 bp, Probe sequence
gcgtcctctagcagtaatgggcgat

SEQ ID NO: 234195 - DNA, 25 bp, Probe sequence
gaaaagttagagttgttatcatctg

SEQ ID NO: 234196 - DNA, 25 bp, Probe sequence
gagttgttatcatctgatggtatgt

SEQ ID NO: 234197 - DNA, 25 bp, Probe sequence
gatggtatgttagtaaagcgtcctc

SEQ ID NO: 234198 - DNA, 25 bp, Probe sequence
gatatcgttcaacatacacctacaa

SEQ ID NO: 234199 - DNA, 25 bp, Probe sequence
gattaaattttaccaatataagaat

SEQ ID NO: 234200 - DNA, 25 bp, Probe sequence
gttagtaaagcgtcctctagcagta

SEQ ID NO: 234201 - DNA, 25 bp, Probe sequence
gttagagttgttatcatctgatggt

SEQ ID NO: 234202 - DNA, 25 bp, Probe sequence
gtatgttagtaaagcgtcctctagc

SEQ ID NO: 234203 - DNA, 25 bp, Probe sequence
gtaaagcgtcctctagcagtaatgg

SEQ ID NO: 234204 - DNA, 25 bp, Probe sequence
gtcctctagcagtaatgggcgataa

SEQ ID NO: 234205 - DNA, 25 bp, Probe sequence
tgtacaacttgtaaaaaggcagcaa

SEQ ID NO: 234206 - DNA, 25 bp, Probe sequence
tagcagtaatgggcgataagataac

SEQ ID NO: 234207 - DNA, 25 bp, Probe sequence
tagtaaagcgtcctctagcagtaat

SEQ ID NO: 234208 - DNA, 25 bp, Probe sequence
ttaataaattgtttaatacacacgg

SEQ ID NO: 234209 - DNA, 25 bp, Probe sequence
ttaatgaaggggatacgtttggtag

SEQ ID NO: 234210 - DNA, 25 bp, Probe sequence
gaaggggatacgtttggtagcgtag

SEQ ID NO: 234211 - DNA, 25 bp, Probe sequence
attatatgcaccaatctctggtaaa

SEQ ID NO: 234212 - DNA, 25 bp, Probe sequence
atcagaattatatgcaccaatctct

SEQ ID NO: 234213 - DNA, 25 bp, Probe sequence
atctctggtaaagtagttgaagtca

SEQ ID NO: 234214 - DNA, 25 bp, Probe sequence
atgaatctccatacgaaaaagcatg

SEQ ID NO: 234215 - DNA, 25 bp, Probe sequence
agatagtcccgaatttgtaaatgaa

SEQ ID NO: 234216 - DNA, 25 bp, Probe sequence
agaattatatgcaccaatctctggt

SEQ ID NO: 234217 - DNA, 25 bp, Probe sequence
accaatctctggtaaagtagttgaa

SEQ ID NO: 234218 - DNA, 25 bp, Probe sequence
aaagcgagttaggtgatattgtttt

SEQ ID NO: 234219 - DNA, 25 bp, Probe sequence
aactgtatcagaattatatgcacca

SEQ ID NO: 234220 - DNA, 25 bp, Probe sequence
aagcatggatggtaaaagtagaaat

SEQ ID NO: 234221 - DNA, 25 bp, Probe sequence
aattggaatcacagaatacgcacaa

SEQ ID NO: 234222 - DNA, 25 bp, Probe sequence
ctagaagatagtcccgaatttgtaa

SEQ ID NO: 234223 - DNA, 25 bp, Probe sequence
cgtttggtagcgtagaatcagttaa

SEQ ID NO: 234224 - DNA, 25 bp, Probe sequence
gcatgaatgggttaaagttgaaggt

SEQ ID NO: 234225 - DNA, 25 bp, Probe sequence
gaatttgtaaatgaatctccatacg

SEQ ID NO: 234226 - DNA, 25 bp, Probe sequence
gaattaccagaaacagatgatgaaa

SEQ ID NO: 234227 - DNA, 25 bp, Probe sequence
gaatacgcacaaagcgagttaggtg

SEQ ID NO: 234228 - DNA, 25 bp, Probe sequence
gaatcacagaatacgcacaaagcga

SEQ ID NO: 234229 - DNA, 25 bp, Probe sequence
gaagatagtcccgaatttgtaaatg

SEQ ID NO: 234230 - DNA, 25 bp, Probe sequence
gaagaactagaagatagtcccgaat

SEQ ID NO: 234231 - DNA, 25 bp, Probe sequence
gagcatgaatgggttaaagttgaag

SEQ ID NO: 234232 - DNA, 25 bp, Probe sequence
gttgaagtcaacgaagaactagaag

SEQ ID NO: 234233 - DNA, 25 bp, Probe sequence
gtcccgaatttgtaaatgaatctcc

SEQ ID NO: 234234 - DNA, 25 bp, Probe sequence
gggatacgtttggtagcgtagaatc

SEQ ID NO: 234235 - DNA, 25 bp, Probe sequence
ggtagcgtagaatcagttaaaactg

SEQ ID NO: 234236 - DNA, 25 bp, Probe sequence
ggaatcacagaatacgcacaaagcg

SEQ ID NO: 234237 - DNA, 25 bp, Probe sequence
tacgcacaaagcgagttaggtgata

SEQ ID NO: 234238 - DNA, 25 bp, Probe sequence
tatgcaccaatctctggtaaagtag

SEQ ID NO: 234239 - DNA, 25 bp, Probe sequence
tatatgcaccaatctctggtaaagt

SEQ ID NO: 234240 - DNA, 25 bp, Probe sequence
tttgtaaatgaatctccatacgaaa

SEQ ID NO: 234241 - DNA, 25 bp, Probe sequence
ttgaagctttattaacagctgaaaa

SEQ ID NO: 234242 - DNA, 25 bp, Probe sequence
ttggcagtaccaaatgaattgaaat

SEQ ID NO: 234243 - DNA, 25 bp, Probe sequence
atttttcacatatcaacatcacaaa

SEQ ID NO: 234244 - DNA, 25 bp, Probe sequence
atatcaacatcacaaattatttaaa

SEQ ID NO: 234245 - DNA, 25 bp, Probe sequence
atcaacatcacaaattatttaaaaa

SEQ ID NO: 234246 - DNA, 25 bp, Probe sequence
agttgtatttttcacatatcaacat

SEQ ID NO: 234247 - DNA, 25 bp, Probe sequence
agcgcaaatatctttataattttta

SEQ ID NO: 234248 - DNA, 25 bp, Probe sequence
acatatcaacatcacaaattattta

SEQ ID NO: 234249 - DNA, 25 bp, Probe sequence
aaagcgcaaatatctttataatttt

SEQ ID NO: 234250 - DNA, 25 bp, Probe sequence
aaaaagcgcaaatatctttataatt

SEQ ID NO: 234251 - DNA, 25 bp, Probe sequence
aaaagcgcaaatatctttataattt

SEQ ID NO: 234252 - DNA, 25 bp, Probe sequence
aagcgcaaatatctttataattttt

SEQ ID NO: 234253 - DNA, 25 bp, Probe sequence
cacatatcaacatcacaaattattt

SEQ ID NO: 234254 - DNA, 25 bp, Probe sequence
catatcaacatcacaaattatttaa

SEQ ID NO: 234255 - DNA, 25 bp, Probe sequence
cgcaaatatctttataatttttatt

SEQ ID NO: 234256 - DNA, 25 bp, Probe sequence
gcgcaaatatctttataatttttat

SEQ ID NO: 234257 - DNA, 25 bp, Probe sequence
gttgtatttttcacatatcaacatc

SEQ ID NO: 234258 - DNA, 25 bp, Probe sequence
gttagttgtatttttcacatatcaa

SEQ ID NO: 234259 - DNA, 25 bp, Probe sequence
gtatttttcacatatcaacatcaca

SEQ ID NO: 234260 - DNA, 25 bp, Probe sequence
tgtatttttcacatatcaacatcac

SEQ ID NO: 234261 - DNA, 25 bp, Probe sequence
tgttagttgtatttttcacatatca

SEQ ID NO: 234262 - DNA, 25 bp, Probe sequence
tcacatatcaacatcacaaattatt

SEQ ID NO: 234263 - DNA, 25 bp, Probe sequence
taaaaagcgcaaatatctttataat

SEQ ID NO: 234264 - DNA, 25 bp, Probe sequence
tagttgtatttttcacatatcaaca

SEQ ID NO: 234265 - DNA, 25 bp, Probe sequence
tatcaacatcacaaattatttaaaa

SEQ ID NO: 234266 - DNA, 25 bp, Probe sequence
tatttttcacatatcaacatcacaa

SEQ ID NO: 234267 - DNA, 25 bp, Probe sequence
tttcacatatcaacatcacaaatta

SEQ ID NO: 234268 - DNA, 25 bp, Probe sequence
tttaaaaagcgcaaatatctttata

SEQ ID NO: 234269 - DNA, 25 bp, Probe sequence
tttttcacatatcaacatcacaaat

SEQ ID NO: 234270 - DNA, 25 bp, Probe sequence
ttttcacatatcaacatcacaaatt

SEQ ID NO: 234271 - DNA, 25 bp, Probe sequence
ttattggcctaaccaactaattaat

SEQ ID NO: 234272 - DNA, 25 bp, Probe sequence
ttagttgtatttttcacatatcaac

SEQ ID NO: 234273 - DNA, 25 bp, Probe sequence
ttaaaaagcgcaaatatctttataa

SEQ ID NO: 234274 - DNA, 25 bp, Probe sequence
ttcacatatcaacatcacaaattat

SEQ ID NO: 234275 - DNA, 25 bp, Probe sequence
ttgttagttgtatttttcacatatc

SEQ ID NO: 234276 - DNA, 25 bp, Probe sequence
ttgtatttttcacatatcaacatca

SEQ ID NO: 234277 - DNA, 25 bp, Probe sequence
attgccccaaacaatatttggcgca

SEQ ID NO: 234278 - DNA, 25 bp, Probe sequence
attatttgtactcatggaacaatga

SEQ ID NO: 234279 - DNA, 25 bp, Probe sequence
actgtcaagttgcgaattgccccaa

SEQ ID NO: 234280 - DNA, 25 bp, Probe sequence
acaggttattgcagaaccagtcaat

SEQ ID NO: 234281 - DNA, 25 bp, Probe sequence
acaagtttttgtattagccgattct

SEQ ID NO: 234282 - DNA, 25 bp, Probe sequence
aacaatatttggcgcatgtactttc

SEQ ID NO: 234283 - DNA, 25 bp, Probe sequence
aacatggctttacttgtaagaaaga

SEQ ID NO: 234284 - DNA, 25 bp, Probe sequence
aagttgcgaattgccccaaacaata

SEQ ID NO: 234285 - DNA, 25 bp, Probe sequence
caatatttggcgcatgtactttcaa

SEQ ID NO: 234286 - DNA, 25 bp, Probe sequence
caatattatttgtactcatggaaca

SEQ ID NO: 234287 - DNA, 25 bp, Probe sequence
caaaacatggctttacttgtaagaa

SEQ ID NO: 234288 - DNA, 25 bp, Probe sequence
ctttcaaaacatggctttacttgta

SEQ ID NO: 234289 - DNA, 25 bp, Probe sequence
cttactgtcaagttgcgaattgccc

SEQ ID NO: 234290 - DNA, 25 bp, Probe sequence
ctgtcaagttgcgaattgccccaaa

SEQ ID NO: 234291 - DNA, 25 bp, Probe sequence
gcagaaccagtcaatattatttgta

SEQ ID NO: 234292 - DNA, 25 bp, Probe sequence
gcaacaggttattgcagaaccagtc

SEQ ID NO: 234293 - DNA, 25 bp, Probe sequence
tactgtcaagttgcgaattgcccca

SEQ ID NO: 234294 - DNA, 25 bp, Probe sequence
gagtatagataagcttgatgatatg

SEQ ID NO: 234295 - DNA, 25 bp, Probe sequence
gataagcttgatgatatgatagaat

SEQ ID NO: 234296 - DNA, 25 bp, Probe sequence
gttgcgaattgccccaaacaatatt

SEQ ID NO: 234297 - DNA, 25 bp, Probe sequence
gtactttcaaaacatggctttactt

SEQ ID NO: 234298 - DNA, 25 bp, Probe sequence
gtcaagttgcgaattgccccaaaca

SEQ ID NO: 234299 - DNA, 25 bp, Probe sequence
gggtgcaacaggttattgcagaacc

SEQ ID NO: 234300 - DNA, 25 bp, Probe sequence
ggagatcgaattagaaattggttta

SEQ ID NO: 234301 - DNA, 25 bp, Probe sequence
tgccccaaacaatatttggcgcatg

SEQ ID NO: 234302 - DNA, 25 bp, Probe sequence
ggcgcatgtactttcaaaacatggc

SEQ ID NO: 234303 - DNA, 25 bp, Probe sequence
tgtcaagttgcgaattgccccaaac

SEQ ID NO: 234304 - DNA, 25 bp, Probe sequence
tgagtgaaagtgaacatatatttat

SEQ ID NO: 234305 - DNA, 25 bp, Probe sequence
tgcgaattgccccaaacaatatttg

SEQ ID NO: 234306 - DNA, 25 bp, Probe sequence
tcaagttgcgaattgccccaaacaa

SEQ ID NO: 234307 - DNA, 25 bp, Probe sequence
tatttggcgcatgtactttcaaaac

SEQ ID NO: 234308 - DNA, 25 bp, Probe sequence
tatttattgataaaacttactgtca

SEQ ID NO: 234309 - DNA, 25 bp, Probe sequence
tttggcgcatgtactttcaaaacat

SEQ ID NO: 234310 - DNA, 25 bp, Probe sequence
ttaaacgttatttgagtgaaagtga

SEQ ID NO: 234311 - DNA, 25 bp, Probe sequence
atatgcaaatcatgtctacgccgat

SEQ ID NO: 234312 - DNA, 25 bp, Probe sequence
atagatttaaacttttatcctcagt

SEQ ID NO: 234313 - DNA, 25 bp, Probe sequence
atcatgtctacgccgattttattgt

SEQ ID NO: 234314 - DNA, 25 bp, Probe sequence
atcggtgactgatttgttagaaaat

SEQ ID NO: 234315 - DNA, 25 bp, Probe sequence
atcctcagttttgtaaagatatgca

SEQ ID NO: 234316 - DNA, 25 bp, Probe sequence
atgcaaatcatgtctacgccgattt

SEQ ID NO: 234317 - DNA, 25 bp, Probe sequence
atgtctacgccgattttattgttga

SEQ ID NO: 234318 - DNA, 25 bp, Probe sequence
agatatgcaaatcatgtctacgccg

SEQ ID NO: 234319 - DNA, 25 bp, Probe sequence
agaagtaaaacgaatttatgcattt

SEQ ID NO: 234320 - DNA, 25 bp, Probe sequence
acgccgattttattgttgatgaata

SEQ ID NO: 234321 - DNA, 25 bp, Probe sequence
aaatcatgtctacgccgattttatt

SEQ ID NO: 234322 - DNA, 25 bp, Probe sequence
aagatatgcaaatcatgtctacgcc

SEQ ID NO: 234323 - DNA, 25 bp, Probe sequence
aatcatgtctacgccgattttattg

SEQ ID NO: 234324 - DNA, 25 bp, Probe sequence
aatagatttaaacttttatcctcag

SEQ ID NO: 234325 - DNA, 25 bp, Probe sequence
caaatcatgtctacgccgattttat

SEQ ID NO: 234326 - DNA, 25 bp, Probe sequence
catgtctacgccgattttattgttg

SEQ ID NO: 234327 - DNA, 25 bp, Probe sequence
cttttatcctcagttttgtaaagat

SEQ ID NO: 234328 - DNA, 25 bp, Probe sequence
ctacgccgattttattgttgatgaa

SEQ ID NO: 234329 - DNA, 25 bp, Probe sequence
gcaaatcatgtctacgccgatttta

SEQ ID NO: 234330 - DNA, 25 bp, Probe sequence
gaataattcattagacatcaaagat

SEQ ID NO: 234331 - DNA, 25 bp, Probe sequence
gacatcaaagatgtaactacatttt

SEQ ID NO: 234332 - DNA, 25 bp, Probe sequence
gatgtaactacattttatgaggaag

SEQ ID NO: 234333 - DNA, 25 bp, Probe sequence
gatatgcaaatcatgtctacgccga

SEQ ID NO: 234334 - DNA, 25 bp, Probe sequence
gtctacgccgattttattgttgatg

SEQ ID NO: 234335 - DNA, 25 bp, Probe sequence
ggtgactgatttgttagaaaattta

SEQ ID NO: 234336 - DNA, 25 bp, Probe sequence
ggtttcagaaagaatgttagacatt

SEQ ID NO: 234337 - DNA, 25 bp, Probe sequence
tgtctacgccgattttattgttgat

SEQ ID NO: 234338 - DNA, 25 bp, Probe sequence
tgcaaatcatgtctacgccgatttt

SEQ ID NO: 234339 - DNA, 25 bp, Probe sequence
tctacgccgattttattgttgatga

SEQ ID NO: 234340 - DNA, 25 bp, Probe sequence
tcatgtctacgccgattttattgtt

SEQ ID NO: 234341 - DNA, 25 bp, Probe sequence
tacgccgattttattgttgatgaat

SEQ ID NO: 234342 - DNA, 25 bp, Probe sequence
tagatttaaacttttatcctcagtt

SEQ ID NO: 234343 - DNA, 25 bp, Probe sequence
tatgcaaatcatgtctacgccgatt

SEQ ID NO: 234344 - DNA, 25 bp, Probe sequence
ttttatcctcagttttgtaaagata

SEQ ID NO: 234345 - DNA, 25 bp, Probe sequence
attaccattgctatatcaacgtgat

SEQ ID NO: 234346 - DNA, 25 bp, Probe sequence
attttcaaacattagctgtatcggt

SEQ ID NO: 234347 - DNA, 25 bp, Probe sequence
atttcctttaatggttgcagcagtt

SEQ ID NO: 234348 - DNA, 25 bp, Probe sequence
atcatacagcagtcaatacagcaca

SEQ ID NO: 234349 - DNA, 25 bp, Probe sequence
atgattcatggcgatactgcaaata

SEQ ID NO: 234350 - DNA, 25 bp, Probe sequence
atgatacgcaacagctagtgtcaat

SEQ ID NO: 234351 - DNA, 25 bp, Probe sequence
actgctgccacacagcttgctaaac

SEQ ID NO: 234352 - DNA, 25 bp, Probe sequence
acagcttggtggtcatatatgggtc

SEQ ID NO: 234353 - DNA, 25 bp, Probe sequence
acagcacatcagctttcattgccga

SEQ ID NO: 234354 - DNA, 25 bp, Probe sequence
aaaccatggctaacagcacatcagc

SEQ ID NO: 234355 - DNA, 25 bp, Probe sequence
aagaaggactgactactgctgccac

SEQ ID NO: 234356 - DNA, 25 bp, Probe sequence
aagatcgtccatttcatccattagc

SEQ ID NO: 234357 - DNA, 25 bp, Probe sequence
aaggtaacactatcatttatgcaat

SEQ ID NO: 234358 - DNA, 25 bp, Probe sequence
gcattaaggctaacgcctacgcgtt

SEQ ID NO: 234359 - DNA, 25 bp, Probe sequence
gcggattatcaagtgtatcaagctg

SEQ ID NO: 234360 - DNA, 25 bp, Probe sequence
gcagcactcgcggcaaatgatcgca

SEQ ID NO: 234361 - DNA, 25 bp, Probe sequence
gagaagatacacctaatacgctaat

SEQ ID NO: 234362 - DNA, 25 bp, Probe sequence
gatacctgtttattttagtgcttta

SEQ ID NO: 234363 - DNA, 25 bp, Probe sequence
gtatcggtaaatctatatgccatta

SEQ ID NO: 234364 - DNA, 25 bp, Probe sequence
gtatgccttcaggtttaactaccgt

SEQ ID NO: 234365 - DNA, 25 bp, Probe sequence
gtgagcatgaacttatgtcgttgtt

SEQ ID NO: 234366 - DNA, 25 bp, Probe sequence
gtggtggaggtagtatgccttcagg

SEQ ID NO: 234367 - DNA, 25 bp, Probe sequence
gtggcaactatttcctgggttacaa

SEQ ID NO: 234368 - DNA, 25 bp, Probe sequence
ggttacaactgatcagctagctgtc

SEQ ID NO: 234369 - DNA, 25 bp, Probe sequence
ggacgtgtacaaaaatgcgtgttac

SEQ ID NO: 234370 - DNA, 25 bp, Probe sequence
ggaaacattctttgcttattttcaa

SEQ ID NO: 234371 - DNA, 25 bp, Probe sequence
ggcgcattaccagagttgcatggtc

SEQ ID NO: 234372 - DNA, 25 bp, Probe sequence
tgcaatacggcgcattaccagagtt

SEQ ID NO: 234373 - DNA, 25 bp, Probe sequence
tgcgtgttacgtgatcatgatactg

SEQ ID NO: 234374 - DNA, 25 bp, Probe sequence
tcattgccgaagtatgtcgtcagag

SEQ ID NO: 234375 - DNA, 25 bp, Probe sequence
tagtgtcaatggcagcactcgcggc

SEQ ID NO: 234376 - DNA, 25 bp, Probe sequence
tatcccgaagtgctagccaaaaatg

SEQ ID NO: 234377 - DNA, 25 bp, Probe sequence
tatttgataaacagacgtggccatt

SEQ ID NO: 234378 - DNA, 25 bp, Probe sequence
tttaactaccgtaccaaatccaatg

SEQ ID NO: 234379 - DNA, 25 bp, Probe sequence
atatcgttagattagttttcgctgg

SEQ ID NO: 234380 - DNA, 25 bp, Probe sequence
atgatttcgaaacatctttaacaga

SEQ ID NO: 234381 - DNA, 25 bp, Probe sequence
atgtttaatcatttagaagcgccta

SEQ ID NO: 234382 - DNA, 25 bp, Probe sequence
atggcgtcattggtttttctggagc

SEQ ID NO: 234383 - DNA, 25 bp, Probe sequence
agcattagaacttgtcgaactcgtc

SEQ ID NO: 234384 - DNA, 25 bp, Probe sequence
acaagtgcacttgatccgcaaacaa

SEQ ID NO: 234385 - DNA, 25 bp, Probe sequence
aagaagtccttgctgtagatcacgt

SEQ ID NO: 234386 - DNA, 25 bp, Probe sequence
aagtactttgattcgaatgtttaat

SEQ ID NO: 234387 - DNA, 25 bp, Probe sequence
aaggcttatccatcagagttatcag

SEQ ID NO: 234388 - DNA, 25 bp, Probe sequence
aatgcatgtcattcgtcgtatttgt

SEQ ID NO: 234389 - DNA, 25 bp, Probe sequence
aatttgttatggtcaaggactgtgt

SEQ ID NO: 234390 - DNA, 25 bp, Probe sequence
caaccgagcctattgtatcgagtct

SEQ ID NO: 234391 - DNA, 25 bp, Probe sequence
cgtcattggtttttctggagcagga

SEQ ID NO: 234392 - DNA, 25 bp, Probe sequence
gctggttcaacaacaaccgagccta

SEQ ID NO: 234393 - DNA, 25 bp, Probe sequence
gcacttgatccgcaaacaacagatg

SEQ ID NO: 234394 - DNA, 25 bp, Probe sequence
gcacgagcgttagctaatgatccaa

SEQ ID NO: 234395 - DNA, 25 bp, Probe sequence
gaagttgcagttatggaaagtggta

SEQ ID NO: 234396 - DNA, 25 bp, Probe sequence
gaagcgcctacatcaggtgaagtta

SEQ ID NO: 234397 - DNA, 25 bp, Probe sequence
gagcaggatcgatttatggcgtcat

SEQ ID NO: 234398 - DNA, 25 bp, Probe sequence
gattagttttcgctggttcaacaac

SEQ ID NO: 234399 - DNA, 25 bp, Probe sequence
gttgggattgcacgagcgttagcta

SEQ ID NO: 234400 - DNA, 25 bp, Probe sequence
gttctgcatattccatatatttcaa

SEQ ID NO: 234401 - DNA, 25 bp, Probe sequence
gtatcgagtctatcaactgcctatg

SEQ ID NO: 234402 - DNA, 25 bp, Probe sequence
gtcttgctttgtgatgaggcaacaa

SEQ ID NO: 234403 - DNA, 25 bp, Probe sequence
gtcgtatttgtgatgaagttgcagt

SEQ ID NO: 234404 - DNA, 25 bp, Probe sequence
gtccttgctgtagatcacgttaatt

SEQ ID NO: 234405 - DNA, 25 bp, Probe sequence
gtgacacaggtttttgaaaatccgc

SEQ ID NO: 234406 - DNA, 25 bp, Probe sequence
ggaacagtcggctttttagttctgc

SEQ ID NO: 234407 - DNA, 25 bp, Probe sequence
ggctttttagttctgcatattccat

SEQ ID NO: 234408 - DNA, 25 bp, Probe sequence
tcacgttaatttatcgattcgagca

SEQ ID NO: 234409 - DNA, 25 bp, Probe sequence
taaaaaatattatgtttccgcttga

SEQ ID NO: 234410 - DNA, 25 bp, Probe sequence
tagaacttgtcgaactcgtcggttt

SEQ ID NO: 234411 - DNA, 25 bp, Probe sequence
ttgcaggtgtccctagaaggagagc

SEQ ID NO: 234412 - DNA, 25 bp, Probe sequence
ttccgcttgaaattgcaggtgtccc

SEQ ID NO: 234413 - DNA, 25 bp, Probe sequence
attcttgtctgctaaaggtaagtct

SEQ ID NO: 234414 - DNA, 25 bp, Probe sequence
aagtggtccgacaggtgcgttacca

SEQ ID NO: 234415 - DNA, 25 bp, Probe sequence
atcgtttctttcattgttaacttat

SEQ ID NO: 234416 - DNA, 25 bp, Probe sequence
aggctcgtagaaattgcttttaaag

SEQ ID NO: 234417 - DNA, 25 bp, Probe sequence
agtggccagaagtttggactgcaat

SEQ ID NO: 234418 - DNA, 25 bp, Probe sequence
agtgtctggcattacagttacagca

SEQ ID NO: 234419 - DNA, 25 bp, Probe sequence
agcatacttaacaggtttcactcga

SEQ ID NO: 234420 - DNA, 25 bp, Probe sequence
aaacactatacatgacagtcgtctc

SEQ ID NO: 234421 - DNA, 25 bp, Probe sequence
aacaggtttcactcgaaatcaaaat

SEQ ID NO: 234422 - DNA, 25 bp, Probe sequence
aattcattggggattggcttacaaa

SEQ ID NO: 234423 - DNA, 25 bp, Probe sequence
aattccatttacaagtttgatactt

SEQ ID NO: 234424 - DNA, 25 bp, Probe sequence
caatgcctaatattcagtggccaga

SEQ ID NO: 234425 - DNA, 25 bp, Probe sequence
cagcgctagtgtctggcattacagt

SEQ ID NO: 234426 - DNA, 25 bp, Probe sequence
cagcaatcgctttagttggttcaac

SEQ ID NO: 234427 - DNA, 25 bp, Probe sequence
gccggtggtttaggaaatttagcat

SEQ ID NO: 234428 - DNA, 25 bp, Probe sequence
ccgttttatgcaaggctcgtagaaa

SEQ ID NO: 234429 - DNA, 25 bp, Probe sequence
gcagttgcaggtgtaattggtgccg

SEQ ID NO: 234430 - DNA, 25 bp, Probe sequence
gaaatgattacaatgcctaatattc

SEQ ID NO: 234431 - DNA, 25 bp, Probe sequence
gacagtcgtctcaactatatttgca

SEQ ID NO: 234432 - DNA, 25 bp, Probe sequence
gatacttggaacgataagtggtccg

SEQ ID NO: 234433 - DNA, 25 bp, Probe sequence
gttaacttatttagagcgataccat

SEQ ID NO: 234434 - DNA, 25 bp, Probe sequence
gtcgtctcaactatatttgcattta

SEQ ID NO: 234435 - DNA, 25 bp, Probe sequence
gtgtaattggtgccggtggtttagg

SEQ ID NO: 234436 - DNA, 25 bp, Probe sequence
ggggattggcttacaaataaacttg

SEQ ID NO: 234437 - DNA, 25 bp, Probe sequence
ggtgtgttattattcttgtctgcta

SEQ ID NO: 234438 - DNA, 25 bp, Probe sequence
ggtgcaaggttattttattctatcg

SEQ ID NO: 234439 - DNA, 25 bp, Probe sequence
ggactgcaatagtcgaaacactata

SEQ ID NO: 234440 - DNA, 25 bp, Probe sequence
ggcattacagttacagcaatcgctt

SEQ ID NO: 234441 - DNA, 25 bp, Probe sequence
tattttattctatcgtttctttcat

SEQ ID NO: 234442 - DNA, 25 bp, Probe sequence
tattctatcgtttctttcattgtta

SEQ ID NO: 234443 - DNA, 25 bp, Probe sequence
tttagagcgataccatttattattt

SEQ ID NO: 234444 - DNA, 25 bp, Probe sequence
ttttattattaattccatttacaag

SEQ ID NO: 234445 - DNA, 25 bp, Probe sequence
ttgtatttataatccaattcattgg

SEQ ID NO: 234446 - DNA, 25 bp, Probe sequence
ttgataaaggtgtcatcgaagcggc

SEQ ID NO: 234447 - DNA, 25 bp, Probe sequence
attactgatgtggtacctactgtaa

SEQ ID NO: 234448 - DNA, 25 bp, Probe sequence
atagttgcccctactattactgatg

SEQ ID NO: 234449 - DNA, 25 bp, Probe sequence
atacttattctgcttattcgacaaa

SEQ ID NO: 234450 - DNA, 25 bp, Probe sequence
agtatagttgcccctactattactg

SEQ ID NO: 234451 - DNA, 25 bp, Probe sequence
actattactgatgtggtacctactg

SEQ ID NO: 234452 - DNA, 25 bp, Probe sequence
aaacgtctaatcgaatacttattct

SEQ ID NO: 234453 - DNA, 25 bp, Probe sequence
aatcgaatacttattctgcttattc

SEQ ID NO: 234454 - DNA, 25 bp, Probe sequence
ctactattactgatgtggtacctac

SEQ ID NO: 234455 - DNA, 25 bp, Probe sequence
ctgatgtggtacctactgtaaaacg

SEQ ID NO: 234456 - DNA, 25 bp, Probe sequence
cccaaatagtatagttgcccctact

SEQ ID NO: 234457 - DNA, 25 bp, Probe sequence
cccctactattactgatgtggtacc

SEQ ID NO: 234458 - DNA, 25 bp, Probe sequence
ccctactattactgatgtggtacct

SEQ ID NO: 234459 - DNA, 25 bp, Probe sequence
cctactgtaaaacgtctaatcgaat

SEQ ID NO: 234460 - DNA, 25 bp, Probe sequence
gcccctactattactgatgtggtac

SEQ ID NO: 234461 - DNA, 25 bp, Probe sequence
gaatacttattctgcttattcgaca

SEQ ID NO: 234462 - DNA, 25 bp, Probe sequence
gatgtggtacctactgtaaaacgtc

SEQ ID NO: 234463 - DNA, 25 bp, Probe sequence
gttgcccctactattactgatgtgg

SEQ ID NO: 234464 - DNA, 25 bp, Probe sequence
gtatagttgcccctactattactga

SEQ ID NO: 234465 - DNA, 25 bp, Probe sequence
gtacctactgtaaaacgtctaatcg

SEQ ID NO: 234466 - DNA, 25 bp, Probe sequence
gtaaaacgtctaatcgaatacttat

SEQ ID NO: 234467 - DNA, 25 bp, Probe sequence
gtctaatcgaatacttattctgctt

SEQ ID NO: 234468 - DNA, 25 bp, Probe sequence
tgtggtacctactgtaaaacgtcta

SEQ ID NO: 234469 - DNA, 25 bp, Probe sequence
tggtacctactgtaaaacgtctaat

SEQ ID NO: 234470 - DNA, 25 bp, Probe sequence
tcccaaatagtatagttgcccctac

SEQ ID NO: 234471 - DNA, 25 bp, Probe sequence
tgcccctactattactgatgtggta

SEQ ID NO: 234472 - DNA, 25 bp, Probe sequence
tacctactgtaaaacgtctaatcga

SEQ ID NO: 234473 - DNA, 25 bp, Probe sequence
tactgatgtggtacctactgtaaaa

SEQ ID NO: 234474 - DNA, 25 bp, Probe sequence
tagtatagttgcccctactattact

SEQ ID NO: 234475 - DNA, 25 bp, Probe sequence
tatcccaaatagtatagttgcccct

SEQ ID NO: 234476 - DNA, 25 bp, Probe sequence
tagttgcccctactattactgatgt

SEQ ID NO: 234477 - DNA, 25 bp, Probe sequence
tatagttgcccctactattactgat

SEQ ID NO: 234478 - DNA, 25 bp, Probe sequence
tattactgatgtggtacctactgta

SEQ ID NO: 234479 - DNA, 25 bp, Probe sequence
ttgcccctactattactgatgtggt

SEQ ID NO: 234480 - DNA, 25 bp, Probe sequence
ttgcctatcccaaatagtatagttg

SEQ ID NO: 234481 - DNA, 25 bp, Probe sequence
atttccaacatacaccatatttaaa

SEQ ID NO: 234482 - DNA, 25 bp, Probe sequence
atgctaagtttagtgatattacaga

SEQ ID NO: 234483 - DNA, 25 bp, Probe sequence
agttgtattagcagcttgcggtaat

SEQ ID NO: 234484 - DNA, 25 bp, Probe sequence
acttagaacctatggctgtatactc

SEQ ID NO: 234485 - DNA, 25 bp, Probe sequence
acagtaggtgcttcaccagcaccac

SEQ ID NO: 234486 - DNA, 25 bp, Probe sequence
aaaggcgtaaaaattgaagatgcta

SEQ ID NO: 234487 - DNA, 25 bp, Probe sequence
aaacaatcagcagaattcttaccta

SEQ ID NO: 234488 - DNA, 25 bp, Probe sequence
aaaattcttcgttgatgcaggttta

SEQ ID NO: 234489 - DNA, 25 bp, Probe sequence
aactatttccaacatacaccatatt

SEQ ID NO: 234490 - DNA, 25 bp, Probe sequence
aagatattcaagacttcattaatga

SEQ ID NO: 234491 - DNA, 25 bp, Probe sequence
aagtgcgaaagataatccttatgca

SEQ ID NO: 234492 - DNA, 25 bp, Probe sequence
aattgacgcaaactatttccaacat

SEQ ID NO: 234493 - DNA, 25 bp, Probe sequence
aattgctgttaaagaaggacatcaa

SEQ ID NO: 234494 - DNA, 25 bp, Probe sequence
caatcagcagaattcttacctaaaa

SEQ ID NO: 234495 - DNA, 25 bp, Probe sequence
catacaccatatttaaacacagaga

SEQ ID NO: 234496 - DNA, 25 bp, Probe sequence
ctattgctgtagaaagtgcgaaaga

SEQ ID NO: 234497 - DNA, 25 bp, Probe sequence
ctaataatccagctgaacaaggacg

SEQ ID NO: 234498 - DNA, 25 bp, Probe sequence
gcgaaagataatccttatgcaaact

SEQ ID NO: 234499 - DNA, 25 bp, Probe sequence
gcagaattcttacctaaaatttatc

SEQ ID NO: 234500 - DNA, 25 bp, Probe sequence
gcaatcgaacaaaaactaaatccta

SEQ ID NO: 234501 - DNA, 25 bp, Probe sequence
gcaaactatttccaacatacaccat

SEQ ID NO: 234502 - DNA, 25 bp, Probe sequence
gaacctatggctgtatactctaaaa

SEQ ID NO: 234503 - DNA, 25 bp, Probe sequence
gaaaataacagtaggtgcttcacca

SEQ ID NO: 234504 - DNA, 25 bp, Probe sequence
gaaaaagcaaaaccattattagaga

SEQ ID NO: 234505 - DNA, 25 bp, Probe sequence
gacgcaaactatttccaacatacac

SEQ ID NO: 234506 - DNA, 25 bp, Probe sequence
gttcacttagaacctatggctgtat

SEQ ID NO: 234507 - DNA, 25 bp, Probe sequence
gtattaacatttgcagttgtattag

SEQ ID NO: 234508 - DNA, 25 bp, Probe sequence
gtattagcagcttgcggtaatggaa

SEQ ID NO: 234509 - DNA, 25 bp, Probe sequence
gtaggtgcttcaccagcaccacatg

SEQ ID NO: 234510 - DNA, 25 bp, Probe sequence
gtgtctaataatccagctgaacaag

SEQ ID NO: 234511 - DNA, 25 bp, Probe sequence
tatgtgtctaataatccagctgaac

SEQ ID NO: 234512 - DNA, 25 bp, Probe sequence
tttggtcttattttagtattaacat

SEQ ID NO: 234513 - DNA, 25 bp, Probe sequence
ttcttaaaattcttcgttgatgcag

SEQ ID NO: 234514 - DNA, 25 bp, Probe sequence
ttcttcgttgatgcaggtttaatta

SEQ ID NO: 234515 - DNA, 25 bp, Probe sequence
attggagcgaatgaatttattaaaa

SEQ ID NO: 234516 - DNA, 25 bp, Probe sequence
attacgcaagatgaaatggctcaca

SEQ ID NO: 234517 - DNA, 25 bp, Probe sequence
atagcttgtggtattacgcaagatg

SEQ ID NO: 234518 - DNA, 25 bp, Probe sequence
agaacgccttatgcaaagagagaaa

SEQ ID NO: 234519 - DNA, 25 bp, Probe sequence
agcttgtggtattacgcaagatgaa

SEQ ID NO: 234520 - DNA, 25 bp, Probe sequence
acaagaacgccttatgcaaagagag

SEQ ID NO: 234521 - DNA, 25 bp, Probe sequence
aaacaagaacgccttatgcaaagag

SEQ ID NO: 234522 - DNA, 25 bp, Probe sequence
aaaaggaggtgaattaaatgtctag

SEQ ID NO: 234523 - DNA, 25 bp, Probe sequence
aacaagaacgccttatgcaaagaga

SEQ ID NO: 234524 - DNA, 25 bp, Probe sequence
aacgccttatgcaaagagagaaaat

SEQ ID NO: 234525 - DNA, 25 bp, Probe sequence
aagaatagcttgtggtattacgcaa

SEQ ID NO: 234526 - DNA, 25 bp, Probe sequence
aatggcaaaaatattaggttatgaa

SEQ ID NO: 234527 - DNA, 25 bp, Probe sequence
aatggctcacaaaatggggtggaaa

SEQ ID NO: 234528 - DNA, 25 bp, Probe sequence
caagaacgccttatgcaaagagaga

SEQ ID NO: 234529 - DNA, 25 bp, Probe sequence
gcaagatgaaatggctcacaaaatg

SEQ ID NO: 234530 - DNA, 25 bp, Probe sequence
gaatagcttgtggtattacgcaaga

SEQ ID NO: 234531 - DNA, 25 bp, Probe sequence
gaaaacaagaacgccttatgcaaag

SEQ ID NO: 234532 - DNA, 25 bp, Probe sequence
gaaagaatagcttgtggtattacgc

SEQ ID NO: 234533 - DNA, 25 bp, Probe sequence
gaaatggctcacaaaatggggtgga

SEQ ID NO: 234534 - DNA, 25 bp, Probe sequence
gagcggaaagaatagcttgtggtat

SEQ ID NO: 234535 - DNA, 25 bp, Probe sequence
gagagcggaaagaatagcttgtggt

SEQ ID NO: 234536 - DNA, 25 bp, Probe sequence
gatgaaatggctcacaaaatggggt

SEQ ID NO: 234537 - DNA, 25 bp, Probe sequence
gatattggagcgaatgaatttatta

SEQ ID NO: 234538 - DNA, 25 bp, Probe sequence
gtattacgcaagatgaaatggctca

SEQ ID NO: 234539 - DNA, 25 bp, Probe sequence
gtagatattggagcgaatgaattta

SEQ ID NO: 234540 - DNA, 25 bp, Probe sequence
tggctcacaaaatggggtggaaaac

SEQ ID NO: 234541 - DNA, 25 bp, Probe sequence
gtggtattacgcaagatgaaatggc

SEQ ID NO: 234542 - DNA, 25 bp, Probe sequence
gtggaaaacaagaacgccttatgca

SEQ ID NO: 234543 - DNA, 25 bp, Probe sequence
gggtggaaaacaagaacgccttatg

SEQ ID NO: 234544 - DNA, 25 bp, Probe sequence
ggtggaaaacaagaacgccttatgc

SEQ ID NO: 234545 - DNA, 25 bp, Probe sequence
ggtattacgcaagatgaaatggctc

SEQ ID NO: 234546 - DNA, 25 bp, Probe sequence
ggaatagtagatattggagcgaatg

SEQ ID NO: 234547 - DNA, 25 bp, Probe sequence
ggaaaacaagaacgccttatgcaaa

SEQ ID NO: 234548 - DNA, 25 bp, Probe sequence
tacgcaagatgaaatggctcacaaa

SEQ ID NO: 234549 - DNA, 25 bp, Probe sequence
atgattgttataagtattccacgat

SEQ ID NO: 234550 - DNA, 25 bp, Probe sequence
agtgaatcctttgtttgcgaaacct

SEQ ID NO: 234551 - DNA, 25 bp, Probe sequence
agttgtagtgaatcctttgtttgcg

SEQ ID NO: 234552 - DNA, 25 bp, Probe sequence
agcaagttgtagtgaatcctttgtt

SEQ ID NO: 234553 - DNA, 25 bp, Probe sequence
actcgttatcatcaacaatgattgt

SEQ ID NO: 234554 - DNA, 25 bp, Probe sequence
acagaaccaaagcaagttgtagtga

SEQ ID NO: 234555 - DNA, 25 bp, Probe sequence
aaagattctaaaggtgttgatgatt

SEQ ID NO: 234556 - DNA, 25 bp, Probe sequence
aacctaatgcactagctagtatttt

SEQ ID NO: 234557 - DNA, 25 bp, Probe sequence
aatacaattacagaaccaaagcaag

SEQ ID NO: 234558 - DNA, 25 bp, Probe sequence
aattgcatgatgtaccagctaaaga

SEQ ID NO: 234559 - DNA, 25 bp, Probe sequence
caaaattgcatgatgtaccagctaa

SEQ ID NO: 234560 - DNA, 25 bp, Probe sequence
catatagttcggtgaatcgcatttt

SEQ ID NO: 234561 - DNA, 25 bp, Probe sequence
cgaaacctaatgcactagctagtat

SEQ ID NO: 234562 - DNA, 25 bp, Probe sequence
gcatgatgtaccagctaaagaaaat

SEQ ID NO: 234563 - DNA, 25 bp, Probe sequence
gaacaaaattgcatgatgtaccagc

SEQ ID NO: 234564 - DNA, 25 bp, Probe sequence
gaaaatacaattacagaaccaaagc

SEQ ID NO: 234565 - DNA, 25 bp, Probe sequence
gaaacctaatgcactagctagtatt

SEQ ID NO: 234566 - DNA, 25 bp, Probe sequence
gattgttataagtattccacgattc

SEQ ID NO: 234567 - DNA, 25 bp, Probe sequence
gttgtagtgaatcctttgtttgcga

SEQ ID NO: 234568 - DNA, 25 bp, Probe sequence
gttcggtgaatcgcattttaaaaga

SEQ ID NO: 234569 - DNA, 25 bp, Probe sequence
gtagtgaatcctttgtttgcgaaac

SEQ ID NO: 234570 - DNA, 25 bp, Probe sequence
ggtgttgatgatttatattactcgt

SEQ ID NO: 234571 - DNA, 25 bp, Probe sequence
ggaatttcatatagttcggtgaatc

SEQ ID NO: 234572 - DNA, 25 bp, Probe sequence
tgttataagtattccacgattcgag

SEQ ID NO: 234573 - DNA, 25 bp, Probe sequence
tcggtgaatcgcattttaaaagaat

SEQ ID NO: 234574 - DNA, 25 bp, Probe sequence
taatgcactagctagtatttttgga

SEQ ID NO: 234575 - DNA, 25 bp, Probe sequence
tagttcggtgaatcgcattttaaaa

SEQ ID NO: 234576 - DNA, 25 bp, Probe sequence
tatagttcggtgaatcgcattttaa

SEQ ID NO: 234577 - DNA, 25 bp, Probe sequence
tatattactcgttatcatcaacaat

SEQ ID NO: 234578 - DNA, 25 bp, Probe sequence
tattactcgttatcatcaacaatga

SEQ ID NO: 234579 - DNA, 25 bp, Probe sequence
ttataagtattccacgattcgagga

SEQ ID NO: 234580 - DNA, 25 bp, Probe sequence
tttatattactcgttatcatcaaca

SEQ ID NO: 234581 - DNA, 25 bp, Probe sequence
ttgcatgatgtaccagctaaagaaa

SEQ ID NO: 234582 - DNA, 25 bp, Probe sequence
ttgtagtgaatcctttgtttgcgaa

SEQ ID NO: 234583 - DNA, 25 bp, Probe sequence
attagcttttaattatctaacacaa

SEQ ID NO: 234584 - DNA, 25 bp, Probe sequence
atatccgagacaatcacacttggaa

SEQ ID NO: 234585 - DNA, 25 bp, Probe sequence
ataacttggtcagggcatgaatttt

SEQ ID NO: 234586 - DNA, 25 bp, Probe sequence
ataatatccgagacaatcacacttg

SEQ ID NO: 234587 - DNA, 25 bp, Probe sequence
ttcggttgggaagatggacatattt

SEQ ID NO: 234588 - DNA, 25 bp, Probe sequence
atgcattattaaaactggaagaagc

SEQ ID NO: 234589 - DNA, 25 bp, Probe sequence
atgtccgtaacattgctaagcaaat

SEQ ID NO: 234590 - DNA, 25 bp, Probe sequence
accgctcaccgaatacaatttcaaa

SEQ ID NO: 234591 - DNA, 25 bp, Probe sequence
acgatataacttggtcagggcatga

SEQ ID NO: 234592 - DNA, 25 bp, Probe sequence
aaagattggtgaaccgctcaccgaa

SEQ ID NO: 234593 - DNA, 25 bp, Probe sequence
aaaccactagtatgtccgtaacatt

SEQ ID NO: 234594 - DNA, 25 bp, Probe sequence
aacattgctaagcaaattagctttt

SEQ ID NO: 234595 - DNA, 25 bp, Probe sequence
aagtcgcaaacaaaaccactagtat

SEQ ID NO: 234596 - DNA, 25 bp, Probe sequence
caaaaccactagtatgtccgtaaca

SEQ ID NO: 234597 - DNA, 25 bp, Probe sequence
cttggtcagggcatgaatttttaga

SEQ ID NO: 234598 - DNA, 25 bp, Probe sequence
ccgagacaatcacacttggaaagaa

SEQ ID NO: 234599 - DNA, 25 bp, Probe sequence
ccactagtatgtccgtaacattgct

SEQ ID NO: 234600 - DNA, 25 bp, Probe sequence
gctcaccgaatacaatttcaaagat

SEQ ID NO: 234601 - DNA, 25 bp, Probe sequence
gcaaacaaaaccactagtatgtccg

SEQ ID NO: 234602 - DNA, 25 bp, Probe sequence
gaaccgctcaccgaatacaatttca

SEQ ID NO: 234603 - DNA, 25 bp, Probe sequence
gacatcttttgttagaaattgaaac

SEQ ID NO: 234604 - DNA, 25 bp, Probe sequence
gatcatgattgtgttagacatcttt

SEQ ID NO: 234605 - DNA, 25 bp, Probe sequence
gattttgaaactgtaatgtatgcat

SEQ ID NO: 234606 - DNA, 25 bp, Probe sequence
gattggtgaaccgctcaccgaatac

SEQ ID NO: 234607 - DNA, 25 bp, Probe sequence
gattgtgttagacatcttttgttag

SEQ ID NO: 234608 - DNA, 25 bp, Probe sequence
gtatgttagtgttaaattcggttgg

SEQ ID NO: 234609 - DNA, 25 bp, Probe sequence
gtgaaccgctcaccgaatacaattt

SEQ ID NO: 234610 - DNA, 25 bp, Probe sequence
gtgttagacatcttttgttagaaat

SEQ ID NO: 234611 - DNA, 25 bp, Probe sequence
ggacatatttatggttatacaatta

SEQ ID NO: 234612 - DNA, 25 bp, Probe sequence
ggaagaagcaaagtatgttagtgtt

SEQ ID NO: 234613 - DNA, 25 bp, Probe sequence
tctaacacaaaaatttaatctaact

SEQ ID NO: 234614 - DNA, 25 bp, Probe sequence
tagtatgtccgtaacattgctaagc

SEQ ID NO: 234615 - DNA, 25 bp, Probe sequence
ttaacgatataacttggtcagggca

SEQ ID NO: 234616 - DNA, 25 bp, Probe sequence
ttggtgaaccgctcaccgaatacaa

SEQ ID NO: 234617 - DNA, 25 bp, Probe sequence
attcccaatgtttatcgctgagttt

SEQ ID NO: 234618 - DNA, 25 bp, Probe sequence
atggaatcaggagaatcggcgtatg

SEQ ID NO: 234619 - DNA, 25 bp, Probe sequence
atggccacgaatgaaagagcatata

SEQ ID NO: 234620 - DNA, 25 bp, Probe sequence
agctgaaacactcgtagatttacac

SEQ ID NO: 234621 - DNA, 25 bp, Probe sequence
acatccaacctcaaacaatctcatt

SEQ ID NO: 234622 - DNA, 25 bp, Probe sequence
acaaacggtagacttcttacagaag

SEQ ID NO: 234623 - DNA, 25 bp, Probe sequence
aaaacattaacgttcagcatataaa

SEQ ID NO: 234624 - DNA, 25 bp, Probe sequence
aacacattagctgaaacactcgtag

SEQ ID NO: 234625 - DNA, 25 bp, Probe sequence
aatatcaattacacatccaacctca

SEQ ID NO: 234626 - DNA, 25 bp, Probe sequence
caagcaaacgtcacaggtctcatag

SEQ ID NO: 234627 - DNA, 25 bp, Probe sequence
cactccgacccatcaatggacttta

SEQ ID NO: 234628 - DNA, 25 bp, Probe sequence
cgatggcattgaaagagttaggtat

SEQ ID NO: 234629 - DNA, 25 bp, Probe sequence
gctggaggtgaaatatggccacgaa

SEQ ID NO: 234630 - DNA, 25 bp, Probe sequence
gcagccacaatagatccagaaatac

SEQ ID NO: 234631 - DNA, 25 bp, Probe sequence
gaaaacgacgaactatggcctcgac

SEQ ID NO: 234632 - DNA, 25 bp, Probe sequence
gaacacaaaccattaccagaaaact

SEQ ID NO: 234633 - DNA, 25 bp, Probe sequence
gaaaactttattaacacattagctg

SEQ ID NO: 234634 - DNA, 25 bp, Probe sequence
gatacatggggacttacatccagga

SEQ ID NO: 234635 - DNA, 25 bp, Probe sequence
gtcacaggtctcatagactggactg

SEQ ID NO: 234636 - DNA, 25 bp, Probe sequence
ggggacttacatccaggacatataa

SEQ ID NO: 234637 - DNA, 25 bp, Probe sequence
ggtagataaccaagcaaacgtcaca

SEQ ID NO: 234638 - DNA, 25 bp, Probe sequence
ggacaccatcgtgtattcgacgacg

SEQ ID NO: 234639 - DNA, 25 bp, Probe sequence
tgcagtattcccaatgtttatcgct

SEQ ID NO: 234640 - DNA, 25 bp, Probe sequence
tcgacgacgaaggattagagcaact

SEQ ID NO: 234641 - DNA, 25 bp, Probe sequence
tatggcctcgacatgcgaccatgat

SEQ ID NO: 234642 - DNA, 25 bp, Probe sequence
tcgacatgcgaccatgatacatggg

SEQ ID NO: 234643 - DNA, 25 bp, Probe sequence
tctcattgaatgaatcgggacttga

SEQ ID NO: 234644 - DNA, 25 bp, Probe sequence
tcggcgtatgaaacgatggcattga

SEQ ID NO: 234645 - DNA, 25 bp, Probe sequence
tcaattacacatccaacctcaaaca

SEQ ID NO: 234646 - DNA, 25 bp, Probe sequence
tagactggactgaagcaacccactc

SEQ ID NO: 234647 - DNA, 25 bp, Probe sequence
taaacccgcagccacaatagatcca

SEQ ID NO: 234648 - DNA, 25 bp, Probe sequence
tagaactcaatgcagtattcccaat

SEQ ID NO: 234649 - DNA, 25 bp, Probe sequence
tagatttacacaacataccagaaga

SEQ ID NO: 234650 - DNA, 25 bp, Probe sequence
ttatcgctgagtttgctatggaatc

SEQ ID NO: 234651 - DNA, 25 bp, Probe sequence
atttttgccgtgtcggtgaaaagtg

SEQ ID NO: 234652 - DNA, 25 bp, Probe sequence
atagaacggttagtcctcggatata

SEQ ID NO: 234653 - DNA, 25 bp, Probe sequence
atgtaggtaatttaacaggcgaaga

SEQ ID NO: 234654 - DNA, 25 bp, Probe sequence
aggctatttttgccgtgtcggtgaa

SEQ ID NO: 234655 - DNA, 25 bp, Probe sequence
agggtacgaatcaagagaagaaggt

SEQ ID NO: 234656 - DNA, 25 bp, Probe sequence
acggccaaccaactgaagaatatat

SEQ ID NO: 234657 - DNA, 25 bp, Probe sequence
acaggcgaagaaagccattattatg

SEQ ID NO: 234658 - DNA, 25 bp, Probe sequence
acaccagctttctatgtaggtaatt

SEQ ID NO: 234659 - DNA, 25 bp, Probe sequence
aaatcatatctattgaagattacta

SEQ ID NO: 234660 - DNA, 25 bp, Probe sequence
aaaggctatttttgccgtgtcggtg

SEQ ID NO: 234661 - DNA, 25 bp, Probe sequence
aaaaaggaacaccagctttctatgt

SEQ ID NO: 234662 - DNA, 25 bp, Probe sequence
aaggaacaccagctttctatgtagg

SEQ ID NO: 234663 - DNA, 25 bp, Probe sequence
cacgtagaaacggccaaccaactga

SEQ ID NO: 234664 - DNA, 25 bp, Probe sequence
ctacttatagaacggttagtcctcg

SEQ ID NO: 234665 - DNA, 25 bp, Probe sequence
gccattattatgaggtgattgtagt

SEQ ID NO: 234666 - DNA, 25 bp, Probe sequence
gtagaaacggccaaccaactgaaga

SEQ ID NO: 234667 - DNA, 25 bp, Probe sequence
gctatttttgccgtgtcggtgaaaa

SEQ ID NO: 234668 - DNA, 25 bp, Probe sequence
gaatatatattagctagtagtgggg

SEQ ID NO: 234669 - DNA, 25 bp, Probe sequence
gaatatgagactgaaacacgtagaa

SEQ ID NO: 234670 - DNA, 25 bp, Probe sequence
gaagtggtactaatgatcacaaaga

SEQ ID NO: 234671 - DNA, 25 bp, Probe sequence
gaacggttagtcctcggatatacaa

SEQ ID NO: 234672 - DNA, 25 bp, Probe sequence
gaaacggccaaccaactgaagaata

SEQ ID NO: 234673 - DNA, 25 bp, Probe sequence
gacaatagtaatttatcccatgaaa

SEQ ID NO: 234674 - DNA, 25 bp, Probe sequence
gaggtgattgtagttaataatttaa

SEQ ID NO: 234675 - DNA, 25 bp, Probe sequence
gatagagtacttgaatatgagactg

SEQ ID NO: 234676 - DNA, 25 bp, Probe sequence
gtaatttatcccatgaaaatataca

SEQ ID NO: 234677 - DNA, 25 bp, Probe sequence
ggagtagatttgtttgaacttggaa

SEQ ID NO: 234678 - DNA, 25 bp, Probe sequence
ggaacaccagctttctatgtaggta

SEQ ID NO: 234679 - DNA, 25 bp, Probe sequence
ggaattttacacacttcattaataa

SEQ ID NO: 234680 - DNA, 25 bp, Probe sequence
tgaaacacgtagaaacggccaacca

SEQ ID NO: 234681 - DNA, 25 bp, Probe sequence
ttgccgtgtcggtgaaaagtgggac

SEQ ID NO: 234682 - DNA, 25 bp, Probe sequence
tacacacttcattaataaaagggta

SEQ ID NO: 234683 - DNA, 25 bp, Probe sequence
tagtcctcggatatacaaattaatg

SEQ ID NO: 234684 - DNA, 25 bp, Probe sequence
ttgtttgaacttggaattttacaca

SEQ ID NO: 234685 - DNA, 25 bp, Probe sequence
attacctcaaaagcattagcagata

SEQ ID NO: 234686 - DNA, 25 bp, Probe sequence
ataagaattactactatcctagaaa

SEQ ID NO: 234687 - DNA, 25 bp, Probe sequence
atcgcgactttgtctattgaacaga

SEQ ID NO: 234688 - DNA, 25 bp, Probe sequence
atgagtatgtacggttaggaggaaa

SEQ ID NO: 234689 - DNA, 25 bp, Probe sequence
aggacaaaagaaaactggccatgaa

SEQ ID NO: 234690 - DNA, 25 bp, Probe sequence
agtatggcagtttagtagattgtct

SEQ ID NO: 234691 - DNA, 25 bp, Probe sequence
agatataagattaccgactgttagg

SEQ ID NO: 234692 - DNA, 25 bp, Probe sequence
actggccatgaatttgaagaaggat

SEQ ID NO: 234693 - DNA, 25 bp, Probe sequence
aacaccaaaagatgcatagagtttc

SEQ ID NO: 234694 - DNA, 25 bp, Probe sequence
aaggaatatgcatgggcttttttaa

SEQ ID NO: 234695 - DNA, 25 bp, Probe sequence
aatgttttttaaagctgtagattct

SEQ ID NO: 234696 - DNA, 25 bp, Probe sequence
aatattctctataatcgatccaaaa

SEQ ID NO: 234697 - DNA, 25 bp, Probe sequence
aattattgacaagtatggcagttta

SEQ ID NO: 234698 - DNA, 25 bp, Probe sequence
aattagttatgttgctttagaaaag

SEQ ID NO: 234699 - DNA, 25 bp, Probe sequence
caatcatatgtcattattttactta

SEQ ID NO: 234700 - DNA, 25 bp, Probe sequence
gcatgggcttttttaaatgaattat

SEQ ID NO: 234701 - DNA, 25 bp, Probe sequence
gaattatcaatcgcgactttgtcta

SEQ ID NO: 234702 - DNA, 25 bp, Probe sequence
gaagaaggattgaacgcatttattc

SEQ ID NO: 234703 - DNA, 25 bp, Probe sequence
gaacgcatttattcaatcatatgtc

SEQ ID NO: 234704 - DNA, 25 bp, Probe sequence
gaacatttgagttatgacccatcta

SEQ ID NO: 234705 - DNA, 25 bp, Probe sequence
gaacaattaaaatcactacttgcga

SEQ ID NO: 234706 - DNA, 25 bp, Probe sequence
gacccatctattacctcaaaagcat

SEQ ID NO: 234707 - DNA, 25 bp, Probe sequence
gagttatgacccatctattacctca

SEQ ID NO: 234708 - DNA, 25 bp, Probe sequence
gagtacaacgtatcaatgtttttta

SEQ ID NO: 234709 - DNA, 25 bp, Probe sequence
gattatttgttagatgactcagaat

SEQ ID NO: 234710 - DNA, 25 bp, Probe sequence
gattaccgactgttaggttatatat

SEQ ID NO: 234711 - DNA, 25 bp, Probe sequence
gattcagtattataatcttactaat

SEQ ID NO: 234712 - DNA, 25 bp, Probe sequence
gattgtctaaagtttgatatatcag

SEQ ID NO: 234713 - DNA, 25 bp, Probe sequence
gttaggttatatattattaggcgta

SEQ ID NO: 234714 - DNA, 25 bp, Probe sequence
ggtgaggtttatgaagacttattgt

SEQ ID NO: 234715 - DNA, 25 bp, Probe sequence
ggttacaaagccaaatattctctat

SEQ ID NO: 234716 - DNA, 25 bp, Probe sequence
ggagaagcattgggaatatttacat

SEQ ID NO: 234717 - DNA, 25 bp, Probe sequence
ttaggcgtattgtggatgaatgcga

SEQ ID NO: 234718 - DNA, 25 bp, Probe sequence
ttaagcgatttaaatgaacaccaaa

SEQ ID NO: 234719 - DNA, 25 bp, Probe sequence
attggactagataagcgtatggact

SEQ ID NO: 234720 - DNA, 25 bp, Probe sequence
atcagtatttaacacaccgacaccc

SEQ ID NO: 234721 - DNA, 25 bp, Probe sequence
atatctgatgtttcaatacgtccaa

SEQ ID NO: 234722 - DNA, 25 bp, Probe sequence
atgaaatgacgacacctttatcagt

SEQ ID NO: 234723 - DNA, 25 bp, Probe sequence
agataagcgtatggacttttgctga

SEQ ID NO: 234724 - DNA, 25 bp, Probe sequence
aatacgtccaatattttgtccgttg

SEQ ID NO: 234725 - DNA, 25 bp, Probe sequence
acaccgacacccgtatacaacgatg

SEQ ID NO: 234726 - DNA, 25 bp, Probe sequence
aataactagtttctcaaccccagat

SEQ ID NO: 234727 - DNA, 25 bp, Probe sequence
cacaaatgatttcatccgcctgcga

SEQ ID NO: 234728 - DNA, 25 bp, Probe sequence
ctagtttctcaaccccagatttggg

SEQ ID NO: 234729 - DNA, 25 bp, Probe sequence
cgcctgcgactgtgtaatttctttt

SEQ ID NO: 234730 - DNA, 25 bp, Probe sequence
cccagatttggggtcaagaaacttg

SEQ ID NO: 234731 - DNA, 25 bp, Probe sequence
gcgactgtgtaatttcttttgaaag

SEQ ID NO: 234732 - DNA, 25 bp, Probe sequence
gaagccatacatgattagtgaaggt

SEQ ID NO: 234733 - DNA, 25 bp, Probe sequence
gaaagatatggttcatctaatgaaa

SEQ ID NO: 234734 - DNA, 25 bp, Probe sequence
gacacccgtatacaacgatgacaga

SEQ ID NO: 234735 - DNA, 25 bp, Probe sequence
gacagaggcagtgattggcgcatta

SEQ ID NO: 234736 - DNA, 25 bp, Probe sequence
gacgacacctttatcagtatttaac

SEQ ID NO: 234737 - DNA, 25 bp, Probe sequence
gatgctgaagccatacatgattagt

SEQ ID NO: 234738 - DNA, 25 bp, Probe sequence
gatttaatgtacttctcattgatgc

SEQ ID NO: 234739 - DNA, 25 bp, Probe sequence
gtttcacaaatgatttcatccgcct

SEQ ID NO: 234740 - DNA, 25 bp, Probe sequence
gtatacaacgatgacagaggcagtg

SEQ ID NO: 234741 - DNA, 25 bp, Probe sequence
gtagtgcattgcttaatgatttaat

SEQ ID NO: 234742 - DNA, 25 bp, Probe sequence
gtacttctcattgatgctgaagcca

SEQ ID NO: 234743 - DNA, 25 bp, Probe sequence
gtaacttttgcgatgttaaaatatc

SEQ ID NO: 234744 - DNA, 25 bp, Probe sequence
gtgcctttaggttgtagatcgtact

SEQ ID NO: 234745 - DNA, 25 bp, Probe sequence
ggttgtagatcgtactgtgtttcac

SEQ ID NO: 234746 - DNA, 25 bp, Probe sequence
ggcagtgattggcgcattaattgta

SEQ ID NO: 234747 - DNA, 25 bp, Probe sequence
ggcgcattaattgtagtgcattgct

SEQ ID NO: 234748 - DNA, 25 bp, Probe sequence
tgtagatcgtactgtgtttcacaaa

SEQ ID NO: 234749 - DNA, 25 bp, Probe sequence
tcatccgcctgcgactgtgtaattt

SEQ ID NO: 234750 - DNA, 25 bp, Probe sequence
tagtgaaggtaacttttgcgatgtt

SEQ ID NO: 234751 - DNA, 25 bp, Probe sequence
tattttgtccgttggaaataactag

SEQ ID NO: 234752 - DNA, 25 bp, Probe sequence
tttcatccgcctgcgactgtgtaat

SEQ ID NO: 234753 - DNA, 25 bp, Probe sequence
attctttttctactcattatggata

SEQ ID NO: 234754 - DNA, 25 bp, Probe sequence
atatcagcagcgtcttttggttctt

SEQ ID NO: 234755 - DNA, 25 bp, Probe sequence
atctattctttttctactcattatg

SEQ ID NO: 234756 - DNA, 25 bp, Probe sequence
atggccaataatcatacccgttgcg

SEQ ID NO: 234757 - DNA, 25 bp, Probe sequence
atggctgttttaaatatttctcgag

SEQ ID NO: 234758 - DNA, 25 bp, Probe sequence
aacatctattctttttctactcatt

SEQ ID NO: 234759 - DNA, 25 bp, Probe sequence
aaccatttggactttgacaacatct

SEQ ID NO: 234760 - DNA, 25 bp, Probe sequence
cagcatttcctatgaagtcacgcat

SEQ ID NO: 234761 - DNA, 25 bp, Probe sequence
ctcgaggatgtataaccgcaaaatt

SEQ ID NO: 234762 - DNA, 25 bp, Probe sequence
ctcggtcagcatttcctatgaagtc

SEQ ID NO: 234763 - DNA, 25 bp, Probe sequence
gccaataatcatacccgttgcgtta

SEQ ID NO: 234764 - DNA, 25 bp, Probe sequence
gtctccacttgggtggttatggcca

SEQ ID NO: 234765 - DNA, 25 bp, Probe sequence
gcagcgtcttttggttcttcaatac

SEQ ID NO: 234766 - DNA, 25 bp, Probe sequence
gacaacatctattctttttctactc

SEQ ID NO: 234767 - DNA, 25 bp, Probe sequence
gacggtttcaatatgtgtaggttca

SEQ ID NO: 234768 - DNA, 25 bp, Probe sequence
gttctcggtcagcatttcctatgaa

SEQ ID NO: 234769 - DNA, 25 bp, Probe sequence
gttgcgttacttaatatggctgttt

SEQ ID NO: 234770 - DNA, 25 bp, Probe sequence
gtcttttggttcttcaatacgtctt

SEQ ID NO: 234771 - DNA, 25 bp, Probe sequence
gtgtaggttcatttttgctattcaa

SEQ ID NO: 234772 - DNA, 25 bp, Probe sequence
gtgtatcttctttaaccatttggac

SEQ ID NO: 234773 - DNA, 25 bp, Probe sequence
ggttaatatgtctccacttgggtgg

SEQ ID NO: 234774 - DNA, 25 bp, Probe sequence
ggataagctctatactttctattaa

SEQ ID NO: 234775 - DNA, 25 bp, Probe sequence
ggactttgacaacatctattctttt

SEQ ID NO: 234776 - DNA, 25 bp, Probe sequence
tggttcctatagagacggtttcaat

SEQ ID NO: 234777 - DNA, 25 bp, Probe sequence
tgaagtgttctcggtcagcatttcc

SEQ ID NO: 234778 - DNA, 25 bp, Probe sequence
tgaagtcacgcataatatcagcagc

SEQ ID NO: 234779 - DNA, 25 bp, Probe sequence
tccacttgggtggttatggccaata

SEQ ID NO: 234780 - DNA, 25 bp, Probe sequence
taatcatacccgttgcgttacttaa

SEQ ID NO: 234781 - DNA, 25 bp, Probe sequence
taaccgcaaaattaatggttcctat

SEQ ID NO: 234782 - DNA, 25 bp, Probe sequence
taaataccaaagtgtatcttcttta

SEQ ID NO: 234783 - DNA, 25 bp, Probe sequence
tacccgttgcgttacttaatatggc

SEQ ID NO: 234784 - DNA, 25 bp, Probe sequence
taggttcatttttgctattcaagca

SEQ ID NO: 234785 - DNA, 25 bp, Probe sequence
tatttctcgaggatgtataaccgca

SEQ ID NO: 234786 - DNA, 25 bp, Probe sequence
ttctactcattatggataagctcta

SEQ ID NO: 234787 - DNA, 25 bp, Probe sequence
attaattattcaagccagcaccatt

SEQ ID NO: 234788 - DNA, 25 bp, Probe sequence
attataccaattatcattatgttat

SEQ ID NO: 234789 - DNA, 25 bp, Probe sequence
atggttgttcaagctataatatcta

SEQ ID NO: 234790 - DNA, 25 bp, Probe sequence
aaatcttctctatcgaaaatatacg

SEQ ID NO: 234791 - DNA, 25 bp, Probe sequence
aagtatcaccttattaatttcatgt

SEQ ID NO: 234792 - DNA, 25 bp, Probe sequence
aatggaaccctattagtatgatgaa

SEQ ID NO: 234793 - DNA, 25 bp, Probe sequence
aatggagttttatcatggtacaatt

SEQ ID NO: 234794 - DNA, 25 bp, Probe sequence
aatcatctattgaatcagcatttag

SEQ ID NO: 234795 - DNA, 25 bp, Probe sequence
caccttattaatttcatgtgcaatg

SEQ ID NO: 234796 - DNA, 25 bp, Probe sequence
cagcatttagtggtttttcatggtt

SEQ ID NO: 234797 - DNA, 25 bp, Probe sequence
ccggtgtctctattgctgtcggtat

SEQ ID NO: 234798 - DNA, 25 bp, Probe sequence
gccacttcaattttgtcagggatat

SEQ ID NO: 234799 - DNA, 25 bp, Probe sequence
gaacatggttagtcttaagtatcac

SEQ ID NO: 234800 - DNA, 25 bp, Probe sequence
gaactgcatgaattatttattggta

SEQ ID NO: 234801 - DNA, 25 bp, Probe sequence
gaaatcgacgtttattataccaatt

SEQ ID NO: 234802 - DNA, 25 bp, Probe sequence
gttattaactggactaggtacatat

SEQ ID NO: 234803 - DNA, 25 bp, Probe sequence
gttttttctccacaatcatctattg

SEQ ID NO: 234804 - DNA, 25 bp, Probe sequence
gtattttgccacttcaattttgtca

SEQ ID NO: 234805 - DNA, 25 bp, Probe sequence
gtattttattgttagtattgttgta

SEQ ID NO: 234806 - DNA, 25 bp, Probe sequence
gtaagggtgatgcgttatcgttatt

SEQ ID NO: 234807 - DNA, 25 bp, Probe sequence
gtctctattgctgtcggtattgtat

SEQ ID NO: 234808 - DNA, 25 bp, Probe sequence
gtgcaatgaaaagtcccggtgtctc

SEQ ID NO: 234809 - DNA, 25 bp, Probe sequence
ggtacaattaaaaatcttctctatc

SEQ ID NO: 234810 - DNA, 25 bp, Probe sequence
ggtattgtattgtattttgccactt

SEQ ID NO: 234811 - DNA, 25 bp, Probe sequence
ggactaggtacatatgttggaacat

SEQ ID NO: 234812 - DNA, 25 bp, Probe sequence
ggaattattctatgggctattttct

SEQ ID NO: 234813 - DNA, 25 bp, Probe sequence
tgatgatgttttttctccacaatca

SEQ ID NO: 234814 - DNA, 25 bp, Probe sequence
tgaaaagtcccggtgtctctattgc

SEQ ID NO: 234815 - DNA, 25 bp, Probe sequence
tctatgggctattttcttcaacgat

SEQ ID NO: 234816 - DNA, 25 bp, Probe sequence
taatcatcgtagtatttgtctttaa

SEQ ID NO: 234817 - DNA, 25 bp, Probe sequence
tacattaatacttttttcactactg

SEQ ID NO: 234818 - DNA, 25 bp, Probe sequence
tacttttttcactactgtattttat

SEQ ID NO: 234819 - DNA, 25 bp, Probe sequence
ttcttcaacgatatcaatctccttg

SEQ ID NO: 234820 - DNA, 25 bp, Probe sequence
ttcaagccagcaccattatttcaat

SEQ ID NO: 234821 - DNA, 25 bp, Probe sequence
attgtctctcaacttaaaatggatg

SEQ ID NO: 234822 - DNA, 25 bp, Probe sequence
agtaacgttggtgcattgatcgaaa

SEQ ID NO: 234823 - DNA, 25 bp, Probe sequence
atttctagccatatattaagtgagt

SEQ ID NO: 234824 - DNA, 25 bp, Probe sequence
atatccctttatgtcaggctatgac

SEQ ID NO: 234825 - DNA, 25 bp, Probe sequence
aggctatgacaatcttaaactacta

SEQ ID NO: 234826 - DNA, 25 bp, Probe sequence
aagccaaaacatattccttgggtat

SEQ ID NO: 234827 - DNA, 25 bp, Probe sequence
aaatcaccaattctatccttatcat

SEQ ID NO: 234828 - DNA, 25 bp, Probe sequence
aacatattccttgggtatgaaacaa

SEQ ID NO: 234829 - DNA, 25 bp, Probe sequence
aacgaggacagattgtcggtcttgt

SEQ ID NO: 234830 - DNA, 25 bp, Probe sequence
aagactattctcaaagatatttctt

SEQ ID NO: 234831 - DNA, 25 bp, Probe sequence
aattaggtattgcaatagctttctt

SEQ ID NO: 234832 - DNA, 25 bp, Probe sequence
caattctatccttatcattaacaaa

SEQ ID NO: 234833 - DNA, 25 bp, Probe sequence
gcaatagctttcttaaatcaacccc

SEQ ID NO: 234834 - DNA, 25 bp, Probe sequence
gaatgggttagatcctagggctgta

SEQ ID NO: 234835 - DNA, 25 bp, Probe sequence
gaaaatccaggagtatatcccttta

SEQ ID NO: 234836 - DNA, 25 bp, Probe sequence
gaaagttatattaggctactcgatt

SEQ ID NO: 234837 - DNA, 25 bp, Probe sequence
gacagattgtcggtcttgttggagc

SEQ ID NO: 234838 - DNA, 25 bp, Probe sequence
gagatgttagagaactcattgtaaa

SEQ ID NO: 234839 - DNA, 25 bp, Probe sequence
gatcctagggctgtaagagatgtta

SEQ ID NO: 234840 - DNA, 25 bp, Probe sequence
gatacaattgtctctcaacttaaaa

SEQ ID NO: 234841 - DNA, 25 bp, Probe sequence
gatattgatacaattgtctctcaac

SEQ ID NO: 234842 - DNA, 25 bp, Probe sequence
gattgtcggtcttgttggagcaaat

SEQ ID NO: 234843 - DNA, 25 bp, Probe sequence
gttggtgcattgatcgaaaatccag

SEQ ID NO: 234844 - DNA, 25 bp, Probe sequence
gtcttgttggagcaaatggggcagg

SEQ ID NO: 234845 - DNA, 25 bp, Probe sequence
ggggcaggaaaaacatctttgatga

SEQ ID NO: 234846 - DNA, 25 bp, Probe sequence
ggttagatcctagggctgtaagaga

SEQ ID NO: 234847 - DNA, 25 bp, Probe sequence
ggagtatatccctttatgtcaggct

SEQ ID NO: 234848 - DNA, 25 bp, Probe sequence
ggctactcgatttatcaagaaggta

SEQ ID NO: 234849 - DNA, 25 bp, Probe sequence
tgttactgaaactaccgaagaagaa

SEQ ID NO: 234850 - DNA, 25 bp, Probe sequence
tcaccaattctatccttatcattaa

SEQ ID NO: 234851 - DNA, 25 bp, Probe sequence
tcaaccccaattaattattttagat

SEQ ID NO: 234852 - DNA, 25 bp, Probe sequence
tagctttcttaaatcaaccccaatt

SEQ ID NO: 234853 - DNA, 25 bp, Probe sequence
tattaggctactcgatttatcaaga

SEQ ID NO: 234854 - DNA, 25 bp, Probe sequence
ttacctttttaatttctagccatat

SEQ ID NO: 234855 - DNA, 25 bp, Probe sequence
atattttgaacagcttaacatggat

SEQ ID NO: 234856 - DNA, 25 bp, Probe sequence
atcagaatcattcagtagagctatt

SEQ ID NO: 234857 - DNA, 25 bp, Probe sequence
atgagtgaactccatatacctatgc

SEQ ID NO: 234858 - DNA, 25 bp, Probe sequence
acacgttagacggtagtttaatgag

SEQ ID NO: 234859 - DNA, 25 bp, Probe sequence
acaaccgacagtatgagtggtggtg

SEQ ID NO: 234860 - DNA, 25 bp, Probe sequence
aaaggcacggttgagaaggctgctc

SEQ ID NO: 234861 - DNA, 25 bp, Probe sequence
aaatggcacaagcatcatcaaaaca

SEQ ID NO: 234862 - DNA, 25 bp, Probe sequence
aaacaaagattgtcccaagccagta

SEQ ID NO: 234863 - DNA, 25 bp, Probe sequence
aactgctaacacaagtacgattcca

SEQ ID NO: 234864 - DNA, 25 bp, Probe sequence
aagtatagcaccagatcgtttaagt

SEQ ID NO: 234865 - DNA, 25 bp, Probe sequence
aaggctgctcaaaaacaagctaagc

SEQ ID NO: 234866 - DNA, 25 bp, Probe sequence
aatgtcatatcaaattatagtccga

SEQ ID NO: 234867 - DNA, 25 bp, Probe sequence
ctttacttgaagctatttaccacca

SEQ ID NO: 234868 - DNA, 25 bp, Probe sequence
cctggaatcattttgtttacatcac

SEQ ID NO: 234869 - DNA, 25 bp, Probe sequence
gcgctcgtaggtgcaaatggtgtag

SEQ ID NO: 234870 - DNA, 25 bp, Probe sequence
gaagacatgcgtgacgtttcattat

SEQ ID NO: 234871 - DNA, 25 bp, Probe sequence
gacagatttacgatcacttaacatc

SEQ ID NO: 234872 - DNA, 25 bp, Probe sequence
gatgaacctacaaatcacttggata

SEQ ID NO: 234873 - DNA, 25 bp, Probe sequence
gatagagcacttatagaccaaattg

SEQ ID NO: 234874 - DNA, 25 bp, Probe sequence
gattgttctcctaaagtgcaaatgg

SEQ ID NO: 234875 - DNA, 25 bp, Probe sequence
gtacgattccaaataccatatggca

SEQ ID NO: 234876 - DNA, 25 bp, Probe sequence
gtcaacttgcttatgaagacatgcg

SEQ ID NO: 234877 - DNA, 25 bp, Probe sequence
gtcccaagccagtaaagctaaacga

SEQ ID NO: 234878 - DNA, 25 bp, Probe sequence
gtgcaaatggcatactatcgtcaac

SEQ ID NO: 234879 - DNA, 25 bp, Probe sequence
gtgacgtttcattattgcaatattt

SEQ ID NO: 234880 - DNA, 25 bp, Probe sequence
ggtactggcaaaaccacattactaa

SEQ ID NO: 234881 - DNA, 25 bp, Probe sequence
ggcatactatcgtcaacttgcttat

SEQ ID NO: 234882 - DNA, 25 bp, Probe sequence
tagagggaattgattgttctcctaa

SEQ ID NO: 234883 - DNA, 25 bp, Probe sequence
tatggcaaaaatatagcgctcgtag

SEQ ID NO: 234884 - DNA, 25 bp, Probe sequence
tatccaatcattgcacaaaatctaa

SEQ ID NO: 234885 - DNA, 25 bp, Probe sequence
tatacctatgcatacaaccgacagt

SEQ ID NO: 234886 - DNA, 25 bp, Probe sequence
tatagtccgatattacttttagatg

SEQ ID NO: 234887 - DNA, 25 bp, Probe sequence
ttatcgttagcagtattattttcaa

SEQ ID NO: 234888 - DNA, 25 bp, Probe sequence
ttgctgacacaatttgggatataca

SEQ ID NO: 234889 - DNA, 25 bp, Probe sequence
atgcaaaccacctattaatcaaagt

SEQ ID NO: 234890 - DNA, 25 bp, Probe sequence
atgtagatccaaacttagtttatgg

SEQ ID NO: 234891 - DNA, 25 bp, Probe sequence
aggtatgtagatccaaacttagttt

SEQ ID NO: 234892 - DNA, 25 bp, Probe sequence
agtgtatgcaaaccacctattaatc

SEQ ID NO: 234893 - DNA, 25 bp, Probe sequence
agtttatgggttagtgagtgcgtgg

SEQ ID NO: 234894 - DNA, 25 bp, Probe sequence
acttagtttatgggttagtgagtgc

SEQ ID NO: 234895 - DNA, 25 bp, Probe sequence
aaaccacctattaatcaaagtgaag

SEQ ID NO: 234896 - DNA, 25 bp, Probe sequence
aacttagtttatgggttagtgagtg

SEQ ID NO: 234897 - DNA, 25 bp, Probe sequence
aaccacctattaatcaaagtgaagt

SEQ ID NO: 234898 - DNA, 25 bp, Probe sequence
caaacttagtttatgggttagtgag

SEQ ID NO: 234899 - DNA, 25 bp, Probe sequence
caaaccacctattaatcaaagtgaa

SEQ ID NO: 234900 - DNA, 25 bp, Probe sequence
cttagtttatgggttagtgagtgcg

SEQ ID NO: 234901 - DNA, 25 bp, Probe sequence
cgtaggtatgtagatccaaacttag

SEQ ID NO: 234902 - DNA, 25 bp, Probe sequence
gcgtaggtatgtagatccaaactta

SEQ ID NO: 234903 - DNA, 25 bp, Probe sequence
gcaaaccacctattaatcaaagtga

SEQ ID NO: 234904 - DNA, 25 bp, Probe sequence
gatccaaacttagtttatgggttag

SEQ ID NO: 234905 - DNA, 25 bp, Probe sequence
gtttatgggttagtgagtgcgtggg

SEQ ID NO: 234906 - DNA, 25 bp, Probe sequence
gtaggtatgtagatccaaacttagt

SEQ ID NO: 234907 - DNA, 25 bp, Probe sequence
gtatgcaaaccacctattaatcaaa

SEQ ID NO: 234908 - DNA, 25 bp, Probe sequence
gtatgtagatccaaacttagtttat

SEQ ID NO: 234909 - DNA, 25 bp, Probe sequence
gtagatccaaacttagtttatgggt

SEQ ID NO: 234910 - DNA, 25 bp, Probe sequence
gtgtatgcaaaccacctattaatca

SEQ ID NO: 234911 - DNA, 25 bp, Probe sequence
ggtatgtagatccaaacttagttta

SEQ ID NO: 234912 - DNA, 25 bp, Probe sequence
tgtatgcaaaccacctattaatcaa

SEQ ID NO: 234913 - DNA, 25 bp, Probe sequence
tgcaaaccacctattaatcaaagtg

SEQ ID NO: 234914 - DNA, 25 bp, Probe sequence
tgcgtaggtatgtagatccaaactt

SEQ ID NO: 234915 - DNA, 25 bp, Probe sequence
tccaaacttagtttatgggttagtg

SEQ ID NO: 234916 - DNA, 25 bp, Probe sequence
tagatccaaacttagtttatgggtt

SEQ ID NO: 234917 - DNA, 25 bp, Probe sequence
taggtatgtagatccaaacttagtt

SEQ ID NO: 234918 - DNA, 25 bp, Probe sequence
tagtttatgggttagtgagtgcgtg

SEQ ID NO: 234919 - DNA, 25 bp, Probe sequence
tatgtagatccaaacttagtttatg

SEQ ID NO: 234920 - DNA, 25 bp, Probe sequence
tatgcaaaccacctattaatcaaag

SEQ ID NO: 234921 - DNA, 25 bp, Probe sequence
tttatgggttagtgagtgcgtgggc

SEQ ID NO: 234922 - DNA, 25 bp, Probe sequence
ttagtttatgggttagtgagtgcgt

SEQ ID NO: 234923 - DNA, 25 bp, Probe sequence
atcagccaagtagatgttttgcact

SEQ ID NO: 234924 - DNA, 25 bp, Probe sequence
atgactgtccaattatggatgttga

SEQ ID NO: 234925 - DNA, 25 bp, Probe sequence
agaacaagaaatcaacgccactttt

SEQ ID NO: 234926 - DNA, 25 bp, Probe sequence
agcaattacatgaagcaatcagctc

SEQ ID NO: 234927 - DNA, 25 bp, Probe sequence
acagagatgtgattgtacttgatta

SEQ ID NO: 234928 - DNA, 25 bp, Probe sequence
aaatcaacgccacttttcaatcgat

SEQ ID NO: 234929 - DNA, 25 bp, Probe sequence
aaaggacacatatttattaaacgag

SEQ ID NO: 234930 - DNA, 25 bp, Probe sequence
aaaaacggtgcaaatgatcatggtg

SEQ ID NO: 234931 - DNA, 25 bp, Probe sequence
aactgaacaagctagaatacgcctg

SEQ ID NO: 234932 - DNA, 25 bp, Probe sequence
aacgccacttttcaatcgatattaa

SEQ ID NO: 234933 - DNA, 25 bp, Probe sequence
aagtatgcacgtggtgttgctgttt

SEQ ID NO: 234934 - DNA, 25 bp, Probe sequence
aatcgtaacaatgcactagctagct

SEQ ID NO: 234935 - DNA, 25 bp, Probe sequence
caattcgcatgtaaaccacctatga

SEQ ID NO: 234936 - DNA, 25 bp, Probe sequence
caatgttgcatggttttggcacaca

SEQ ID NO: 234937 - DNA, 25 bp, Probe sequence
catgaagcaatcagctcagctttaa

SEQ ID NO: 234938 - DNA, 25 bp, Probe sequence
ctagaatacgcctgtatatccctct

SEQ ID NO: 234939 - DNA, 25 bp, Probe sequence
gcactaccagttattcaaaaaggac

SEQ ID NO: 234940 - DNA, 25 bp, Probe sequence
gcactagctagcttagttgggcatt

SEQ ID NO: 234941 - DNA, 25 bp, Probe sequence
gcacgtggtgttgctgtttacggtg

SEQ ID NO: 234942 - DNA, 25 bp, Probe sequence
gaatatgacacacatgtttcagtgg

SEQ ID NO: 234943 - DNA, 25 bp, Probe sequence
gaaagtttagactcacgttcattta

SEQ ID NO: 234944 - DNA, 25 bp, Probe sequence
gacacacatgtttcagtggtacatt

SEQ ID NO: 234945 - DNA, 25 bp, Probe sequence
gactcacgttcatttaagagctttt

SEQ ID NO: 234946 - DNA, 25 bp, Probe sequence
gagcttttcaaaacctaaatggagt

SEQ ID NO: 234947 - DNA, 25 bp, Probe sequence
gagttatgctttggaacaaccgaag

SEQ ID NO: 234948 - DNA, 25 bp, Probe sequence
gatgaaggttcatatcagccaagta

SEQ ID NO: 234949 - DNA, 25 bp, Probe sequence
gatgttttgcactaccagttattca

SEQ ID NO: 234950 - DNA, 25 bp, Probe sequence
gatgtcacgttaatgattatattgt

SEQ ID NO: 234951 - DNA, 25 bp, Probe sequence
gttgggcatttattaagatgtcacg

SEQ ID NO: 234952 - DNA, 25 bp, Probe sequence
gttgatatgcttgaacagtggttaa

SEQ ID NO: 234953 - DNA, 25 bp, Probe sequence
gtaaaccacctatgaaagaacaaga

SEQ ID NO: 234954 - DNA, 25 bp, Probe sequence
ggtgttgctgtttacggtgatatta

SEQ ID NO: 234955 - DNA, 25 bp, Probe sequence
ggaacaaccgaaggcaatcgtaaca

SEQ ID NO: 234956 - DNA, 25 bp, Probe sequence
taaacgagtgaatgactgtccaatt

SEQ ID NO: 234957 - DNA, 25 bp, Probe sequence
gaccaaacaggcaatcgtcgttttt

SEQ ID NO: 234958 - DNA, 25 bp, Probe sequence
agggctagtacaatatgacgctttt

SEQ ID NO: 234959 - DNA, 25 bp, Probe sequence
agtccaagaagctcattctgaaaaa

SEQ ID NO: 234960 - DNA, 25 bp, Probe sequence
agataccacacatgtgatttcacat

SEQ ID NO: 234961 - DNA, 25 bp, Probe sequence
accaaccacaacaacaccatttaag

SEQ ID NO: 234962 - DNA, 25 bp, Probe sequence
acggcagtgagtaaattgggaggtc

SEQ ID NO: 234963 - DNA, 25 bp, Probe sequence
acagagcgtcatcctagacagtgtg

SEQ ID NO: 234964 - DNA, 25 bp, Probe sequence
aaattgcagggttcttggatatgtg

SEQ ID NO: 234965 - DNA, 25 bp, Probe sequence
aaagagtgtctgcgcatgatgttat

SEQ ID NO: 234966 - DNA, 25 bp, Probe sequence
aaaccaggtgcttatgtatggcgtg

SEQ ID NO: 234967 - DNA, 25 bp, Probe sequence
aattgggaggtcattggtataacca

SEQ ID NO: 234968 - DNA, 25 bp, Probe sequence
aattgtataatgtgcagtttagccg

SEQ ID NO: 234969 - DNA, 25 bp, Probe sequence
ctgtcggcatttcaaaagtctacta

SEQ ID NO: 234970 - DNA, 25 bp, Probe sequence
gcgcatgatgttatagaccaagact

SEQ ID NO: 234971 - DNA, 25 bp, Probe sequence
gcgtcatcctagacagtgtgtgttt

SEQ ID NO: 234972 - DNA, 25 bp, Probe sequence
gctcttcattgattatttaggtgct

SEQ ID NO: 234973 - DNA, 25 bp, Probe sequence
gcagttgctagaatctatcagccag

SEQ ID NO: 234974 - DNA, 25 bp, Probe sequence
gaattgaaacgctcttcattgatta

SEQ ID NO: 234975 - DNA, 25 bp, Probe sequence
gaatctatcagccaggtattaaata

SEQ ID NO: 234976 - DNA, 25 bp, Probe sequence
gaaccggtgttttaaatgctaatga

SEQ ID NO: 234977 - DNA, 25 bp, Probe sequence
gaaacgtctaccgtattggaggtca

SEQ ID NO: 234978 - DNA, 25 bp, Probe sequence
gacagtgtgtgtttgtagggacaac

SEQ ID NO: 234979 - DNA, 25 bp, Probe sequence
gatgaaacgagatgaccaaccacaa

SEQ ID NO: 234980 - DNA, 25 bp, Probe sequence
gatatttatagagcttcgtatggta

SEQ ID NO: 234981 - DNA, 25 bp, Probe sequence
gattattttatatggtggtcaaggt

SEQ ID NO: 234982 - DNA, 25 bp, Probe sequence
gtcctattccgtcagactattggta

SEQ ID NO: 234983 - DNA, 25 bp, Probe sequence
gtgaaattgaagaactgtcggcatt

SEQ ID NO: 234984 - DNA, 25 bp, Probe sequence
gggctgatatagataccacacatgt

SEQ ID NO: 234985 - DNA, 25 bp, Probe sequence
gggacaaccaataactatgagtttt

SEQ ID NO: 234986 - DNA, 25 bp, Probe sequence
ggtgcttatgtatggcgtgacaagg

SEQ ID NO: 234987 - DNA, 25 bp, Probe sequence
ggaaaagtcaattaaggcgttctgc

SEQ ID NO: 234988 - DNA, 25 bp, Probe sequence
ggcgtgacaaggtatgtagcatgga

SEQ ID NO: 234989 - DNA, 25 bp, Probe sequence
tcgttttttccctattacgacagat

SEQ ID NO: 234990 - DNA, 25 bp, Probe sequence
ttgaacgtcctattccgtcagacta

SEQ ID NO: 234991 - DNA, 25 bp, Probe sequence
attggcggtgttacagcttcgatat

SEQ ID NO: 234992 - DNA, 25 bp, Probe sequence
attgccgttattacttttattgtct

SEQ ID NO: 234993 - DNA, 25 bp, Probe sequence
agcgattgctggactgacagtactt

SEQ ID NO: 234994 - DNA, 25 bp, Probe sequence
acgacgatgatagcttcgccgatat

SEQ ID NO: 234995 - DNA, 25 bp, Probe sequence
acggcttcgatattaagcgcgcctt

SEQ ID NO: 234996 - DNA, 25 bp, Probe sequence
actacaccagctactacgtttatcg

SEQ ID NO: 234997 - DNA, 25 bp, Probe sequence
cagtccgcattttggacggcttcga

SEQ ID NO: 234998 - DNA, 25 bp, Probe sequence
gagcgttacttggtttggcggtatg

SEQ ID NO: 234999 - DNA, 25 bp, Probe sequence
ctgctccagctgtaacgacgatgat

SEQ ID NO: 235000 - DNA, 25 bp, Probe sequence
gcgtttgcgagtgcagaggcgccag

SEQ ID NO: 235001 - DNA, 25 bp, Probe sequence
gcgcagtaactttcgcattttatgg

SEQ ID NO: 235002 - DNA, 25 bp, Probe sequence
gcgatactgcaaggtttagcgacga

SEQ ID NO: 235003 - DNA, 25 bp, Probe sequence
gcattttatggctcagtcagtttat

SEQ ID NO: 235004 - DNA, 25 bp, Probe sequence
gcattatcaccacttgcttcatcag

SEQ ID NO: 235005 - DNA, 25 bp, Probe sequence
gcagggactatttggtggtgttgtt

SEQ ID NO: 235006 - DNA, 25 bp, Probe sequence
gcatgtggttgtagtgcgatactgc

SEQ ID NO: 235007 - DNA, 25 bp, Probe sequence
gaaacgacacatatgccaaaatcac

SEQ ID NO: 235008 - DNA, 25 bp, Probe sequence
gacagtacttgtgccattattgcca

SEQ ID NO: 235009 - DNA, 25 bp, Probe sequence
gaggcgccagctgaagatcgtggaa

SEQ ID NO: 235010 - DNA, 25 bp, Probe sequence
gatttattatcgttggcgttttagc

SEQ ID NO: 235011 - DNA, 25 bp, Probe sequence
gattaatcagtctatatggcgcagt

SEQ ID NO: 235012 - DNA, 25 bp, Probe sequence
gttgatgcatcaagtgcgtttgcga

SEQ ID NO: 235013 - DNA, 25 bp, Probe sequence
gtattcgccgttcatttcaatgtct

SEQ ID NO: 235014 - DNA, 25 bp, Probe sequence
gtacttgtgaggttattgcagggac

SEQ ID NO: 235015 - DNA, 25 bp, Probe sequence
gtcgtgaatgcgtgtcatcaacaac

SEQ ID NO: 235016 - DNA, 25 bp, Probe sequence
gtgattggatttttacagtccgcat

SEQ ID NO: 235017 - DNA, 25 bp, Probe sequence
gtggtatagcgattgctgctccagc

SEQ ID NO: 235018 - DNA, 25 bp, Probe sequence
gtggcgctgccattacaagttatac

SEQ ID NO: 235019 - DNA, 25 bp, Probe sequence
ggcatgctaactgcattatcaccac

SEQ ID NO: 235020 - DNA, 25 bp, Probe sequence
tcgccgatatgggggaagctaggtg

SEQ ID NO: 235021 - DNA, 25 bp, Probe sequence
tgttcaaccatcactaatcaaatca

SEQ ID NO: 235022 - DNA, 25 bp, Probe sequence
tgcaaagttcagtcagcgcagggtc

SEQ ID NO: 235023 - DNA, 25 bp, Probe sequence
tatggcatcactacaaaatctatca

SEQ ID NO: 235024 - DNA, 25 bp, Probe sequence
tattgtctgtattttcggtgcatta

SEQ ID NO: 235025 - DNA, 25 bp, Probe sequence
attgggtggaatcaagaagcgtttg

SEQ ID NO: 235026 - DNA, 25 bp, Probe sequence
atatggttgatggtaaaggtttgga

SEQ ID NO: 235027 - DNA, 25 bp, Probe sequence
ataaaggcgcatgctggtacatcat

SEQ ID NO: 235028 - DNA, 25 bp, Probe sequence
ataaaggtgacggcgcatatacaag

SEQ ID NO: 235029 - DNA, 25 bp, Probe sequence
atgttgtgttttggattgggtggaa

SEQ ID NO: 235030 - DNA, 25 bp, Probe sequence
aggcgcatgctggtacatcatttgt

SEQ ID NO: 235031 - DNA, 25 bp, Probe sequence
aggtgacggcgcatatacaagtggt

SEQ ID NO: 235032 - DNA, 25 bp, Probe sequence
acctgtcacgtttactattagtaag

SEQ ID NO: 235033 - DNA, 25 bp, Probe sequence
acggcgcatatacaagtggtcaaca

SEQ ID NO: 235034 - DNA, 25 bp, Probe sequence
acagatcattggctacctgtcacgt

SEQ ID NO: 235035 - DNA, 25 bp, Probe sequence
aaaggcgcatgctggtacatcattt

SEQ ID NO: 235036 - DNA, 25 bp, Probe sequence
aaaagacagacgtattgagatggat

SEQ ID NO: 235037 - DNA, 25 bp, Probe sequence
aacatcccaatgttgtgttttggat

SEQ ID NO: 235038 - DNA, 25 bp, Probe sequence
aaggtttggatttgcctattgtaag

SEQ ID NO: 235039 - DNA, 25 bp, Probe sequence
cattaaaacagatcattggctacct

SEQ ID NO: 235040 - DNA, 25 bp, Probe sequence
ctacctgtcacgtttactattagta

SEQ ID NO: 235041 - DNA, 25 bp, Probe sequence
gcgcatatacaagtggtcaacatcc

SEQ ID NO: 235042 - DNA, 25 bp, Probe sequence
gcgtttgatgttatcgctgaactta

SEQ ID NO: 235043 - DNA, 25 bp, Probe sequence
gctggtacatcatttgtagaaatag

SEQ ID NO: 235044 - DNA, 25 bp, Probe sequence
gcatgctggtacatcatttgtagaa

SEQ ID NO: 235045 - DNA, 25 bp, Probe sequence
gaagcgtttgatgttatcgctgaac

SEQ ID NO: 235046 - DNA, 25 bp, Probe sequence
gatgttatcgctgaacttaaaaaag

SEQ ID NO: 235047 - DNA, 25 bp, Probe sequence
gtttgatgttatcgctgaacttaaa

SEQ ID NO: 235048 - DNA, 25 bp, Probe sequence
gtattgagatggatatttgtgagcc

SEQ ID NO: 235049 - DNA, 25 bp, Probe sequence
gtaaaggtttggatttgcctattgt

SEQ ID NO: 235050 - DNA, 25 bp, Probe sequence
gtaagaaagaaacggagtgtgtcta

SEQ ID NO: 235051 - DNA, 25 bp, Probe sequence
gtgagccaattgtttatatggttga

SEQ ID NO: 235052 - DNA, 25 bp, Probe sequence
gtggtcaacatcccaatgttgtgtt

SEQ ID NO: 235053 - DNA, 25 bp, Probe sequence
ggatatttgtgagccaattgtttat

SEQ ID NO: 235054 - DNA, 25 bp, Probe sequence
ggctacctgtcacgtttactattag

SEQ ID NO: 235055 - DNA, 25 bp, Probe sequence
ggcgcatgctggtacatcatttgta

SEQ ID NO: 235056 - DNA, 25 bp, Probe sequence
tacaagtggtcaacatcccaatgtt

SEQ ID NO: 235057 - DNA, 25 bp, Probe sequence
tagaatatataaaggcgcatgctgg

SEQ ID NO: 235058 - DNA, 25 bp, Probe sequence
tttgattataaaggtgacggcgcat

SEQ ID NO: 235059 - DNA, 25 bp, Probe sequence
attagcgtcacctaagcacactgag

SEQ ID NO: 235060 - DNA, 25 bp, Probe sequence
atactgatgtgatagcgaatattga

SEQ ID NO: 235061 - DNA, 25 bp, Probe sequence
atgcgacacaagaggattacaaggc

SEQ ID NO: 235062 - DNA, 25 bp, Probe sequence
agtaatactgatgtgatagcgaata

SEQ ID NO: 235063 - DNA, 25 bp, Probe sequence
agcgtcacctaagcacactgagggg

SEQ ID NO: 235064 - DNA, 25 bp, Probe sequence
agcacactgaggggcttataagaag

SEQ ID NO: 235065 - DNA, 25 bp, Probe sequence
acctaagcacactgaggggcttata

SEQ ID NO: 235066 - DNA, 25 bp, Probe sequence
aaagcgtcttactatagcttgagta

SEQ ID NO: 235067 - DNA, 25 bp, Probe sequence
aaaagcgtcttactatagcttgagt

SEQ ID NO: 235068 - DNA, 25 bp, Probe sequence
aatgttgtatcagttagctacggga

SEQ ID NO: 235069 - DNA, 25 bp, Probe sequence
aattagcgtcacctaagcacactga

SEQ ID NO: 235070 - DNA, 25 bp, Probe sequence
cgtcacctaagcacactgaggggct

SEQ ID NO: 235071 - DNA, 25 bp, Probe sequence
gcgtcacctaagcacactgaggggc

SEQ ID NO: 235072 - DNA, 25 bp, Probe sequence
gcgtcttactatagcttgagtaaat

SEQ ID NO: 235073 - DNA, 25 bp, Probe sequence
gaattagcgtcacctaagcacactg

SEQ ID NO: 235074 - DNA, 25 bp, Probe sequence
gaatgatctaaaagcgtcttactat

SEQ ID NO: 235075 - DNA, 25 bp, Probe sequence
gaaatgttgtatcagttagctacgg

SEQ ID NO: 235076 - DNA, 25 bp, Probe sequence
gagaatgcgacacaagaggattaca

SEQ ID NO: 235077 - DNA, 25 bp, Probe sequence
gagtttgtacaagatgagaatgcga

SEQ ID NO: 235078 - DNA, 25 bp, Probe sequence
gatctaaaagcgtcttactatagct

SEQ ID NO: 235079 - DNA, 25 bp, Probe sequence
gatagcgaatattgaaatgttgtat

SEQ ID NO: 235080 - DNA, 25 bp, Probe sequence
gttgtatcagttagctacgggaatc

SEQ ID NO: 235081 - DNA, 25 bp, Probe sequence
gttagctacgggaatcaatgaacca

SEQ ID NO: 235082 - DNA, 25 bp, Probe sequence
gtacaagatgagaatgcgacacaag

SEQ ID NO: 235083 - DNA, 25 bp, Probe sequence
gtaactgagtttgtacaagatgaga

SEQ ID NO: 235084 - DNA, 25 bp, Probe sequence
gtcacctaagcacactgaggggctt

SEQ ID NO: 235085 - DNA, 25 bp, Probe sequence
tgaattagcgtcacctaagcacact

SEQ ID NO: 235086 - DNA, 25 bp, Probe sequence
ttagcgtcacctaagcacactgagg

SEQ ID NO: 235087 - DNA, 25 bp, Probe sequence
tagcgtcacctaagcacactgaggg

SEQ ID NO: 235088 - DNA, 25 bp, Probe sequence
tatcagttagctacgggaatcaatg

SEQ ID NO: 235089 - DNA, 25 bp, Probe sequence
ttagctacgggaatcaatgaaccag

SEQ ID NO: 235090 - DNA, 25 bp, Probe sequence
tttgaattagcgtcacctaagcaca

SEQ ID NO: 235091 - DNA, 25 bp, Probe sequence
ttgaatgatctaaaagcgtcttact

SEQ ID NO: 235092 - DNA, 25 bp, Probe sequence
ttgaagatgagtattttatgtatgg

SEQ ID NO: 235093 - DNA, 25 bp, Probe sequence
atttcgggaattgtgggtgcaggtg

SEQ ID NO: 235094 - DNA, 25 bp, Probe sequence
atagcatagcaattgcttttatatc

SEQ ID NO: 235095 - DNA, 25 bp, Probe sequence
atcttcagtaggggcattttttata

SEQ ID NO: 235096 - DNA, 25 bp, Probe sequence
atcattcctgtattattagcattat

SEQ ID NO: 235097 - DNA, 25 bp, Probe sequence
accagtagaaagtgcaatttttttg

SEQ ID NO: 235098 - DNA, 25 bp, Probe sequence
atcgccatacttgctttaatattga

SEQ ID NO: 235099 - DNA, 25 bp, Probe sequence
atgttgctaattggcgtactgggtg

SEQ ID NO: 235100 - DNA, 25 bp, Probe sequence
agaaaacaaccagctttctctccta

SEQ ID NO: 235101 - DNA, 25 bp, Probe sequence
agctttctctcctaaacttgttata

SEQ ID NO: 235102 - DNA, 25 bp, Probe sequence
acctctagtcaagtatttttcagta

SEQ ID NO: 235103 - DNA, 25 bp, Probe sequence
gccaccattaataggtatacctgcg

SEQ ID NO: 235104 - DNA, 25 bp, Probe sequence
gcttcgggacttacctctagtcaag

SEQ ID NO: 235105 - DNA, 25 bp, Probe sequence
gctagtttgtttaatgctacttttg

SEQ ID NO: 235106 - DNA, 25 bp, Probe sequence
gctattcttatattgccaccattaa

SEQ ID NO: 235107 - DNA, 25 bp, Probe sequence
gcttttatatcttcagtaggggcat

SEQ ID NO: 235108 - DNA, 25 bp, Probe sequence
gcatatattgcttcgggacttacct

SEQ ID NO: 235109 - DNA, 25 bp, Probe sequence
gaagcatgttaggggcaattttagc

SEQ ID NO: 235110 - DNA, 25 bp, Probe sequence
gagcatttatcatcattcctgtatt

SEQ ID NO: 235111 - DNA, 25 bp, Probe sequence
gagacgaaatctaaacctttgctat

SEQ ID NO: 235112 - DNA, 25 bp, Probe sequence
gttaaacctactacacaagagacga

SEQ ID NO: 235113 - DNA, 25 bp, Probe sequence
gtatttttcagtacacttagtggat

SEQ ID NO: 235114 - DNA, 25 bp, Probe sequence
gtacacttagtggatcattaaatgc

SEQ ID NO: 235115 - DNA, 25 bp, Probe sequence
gtaataatcgccatacttgctttaa

SEQ ID NO: 235116 - DNA, 25 bp, Probe sequence
gggagggggtatgttgattggaagc

SEQ ID NO: 235117 - DNA, 25 bp, Probe sequence
gtgggtgcaggtggagcatttatca

SEQ ID NO: 235118 - DNA, 25 bp, Probe sequence
ggattaataggtattgggggcgcaa

SEQ ID NO: 235119 - DNA, 25 bp, Probe sequence
ggaattggtgtaatttcgggaattg

SEQ ID NO: 235120 - DNA, 25 bp, Probe sequence
ggcgtactgggtggatttatatctg

SEQ ID NO: 235121 - DNA, 25 bp, Probe sequence
ggcgcaattattatttacccagcta

SEQ ID NO: 235122 - DNA, 25 bp, Probe sequence
taatgctacttttgtaaatacggta

SEQ ID NO: 235123 - DNA, 25 bp, Probe sequence
tacggtagtgaacaatagcatagca

SEQ ID NO: 235124 - DNA, 25 bp, Probe sequence
tacccagctattcttatattgccac

SEQ ID NO: 235125 - DNA, 25 bp, Probe sequence
taggggcaattttagctagtttgtt

SEQ ID NO: 235126 - DNA, 25 bp, Probe sequence
tatacctgcgtatagtgcatatatt

SEQ ID NO: 235127 - DNA, 25 bp, Probe sequence
attacgcaacttagtgcatctaaag

SEQ ID NO: 235128 - DNA, 25 bp, Probe sequence
ataattacgcaacttagtgcatcta

SEQ ID NO: 235129 - DNA, 25 bp, Probe sequence
atgaagcagttaatttattagttaa

SEQ ID NO: 235130 - DNA, 25 bp, Probe sequence
agtgcatctaaaggttctatacaac

SEQ ID NO: 235131 - DNA, 25 bp, Probe sequence
acgcaacttagtgcatctaaaggtt

SEQ ID NO: 235132 - DNA, 25 bp, Probe sequence
aaaataatgaaagttctcaagaatt

SEQ ID NO: 235133 - DNA, 25 bp, Probe sequence
aacttagtgcatctaaaggttctat

SEQ ID NO: 235134 - DNA, 25 bp, Probe sequence
aagatataattacgcaacttagtgc

SEQ ID NO: 235135 - DNA, 25 bp, Probe sequence
aatggtgtcgtaaaaatgatggaag

SEQ ID NO: 235136 - DNA, 25 bp, Probe sequence
aatggggattataattagtgaaaat

SEQ ID NO: 235137 - DNA, 25 bp, Probe sequence
aatagaatgcgttaaaacagcagaa

SEQ ID NO: 235138 - DNA, 25 bp, Probe sequence
aattacgcaacttagtgcatctaaa

SEQ ID NO: 235139 - DNA, 25 bp, Probe sequence
caaggtcaattaaatggtgtcgtaa

SEQ ID NO: 235140 - DNA, 25 bp, Probe sequence
catctaaaggttctatacaacgttt

SEQ ID NO: 235141 - DNA, 25 bp, Probe sequence
ctatacaacgtttaatggggattat

SEQ ID NO: 235142 - DNA, 25 bp, Probe sequence
cgcaacttagtgcatctaaaggttc

SEQ ID NO: 235143 - DNA, 25 bp, Probe sequence
gcatctaaaggttctatacaacgtt

SEQ ID NO: 235144 - DNA, 25 bp, Probe sequence
gcaacttagtgcatctaaaggttct

SEQ ID NO: 235145 - DNA, 25 bp, Probe sequence
gcaaagatataattacgcaacttag

SEQ ID NO: 235146 - DNA, 25 bp, Probe sequence
gatataattacgcaacttagtgcat

SEQ ID NO: 235147 - DNA, 25 bp, Probe sequence
gttctatacaacgtttaatggggat

SEQ ID NO: 235148 - DNA, 25 bp, Probe sequence
gtcaattaaatggtgtcgtaaaaat

SEQ ID NO: 235149 - DNA, 25 bp, Probe sequence
gtgcatctaaaggttctatacaacg

SEQ ID NO: 235150 - DNA, 25 bp, Probe sequence
ggtgtcgtaaaaatgatggaagaag

SEQ ID NO: 235151 - DNA, 25 bp, Probe sequence
tgcatctaaaggttctatacaacgt

SEQ ID NO: 235152 - DNA, 25 bp, Probe sequence
tctatacaacgtttaatggggatta

SEQ ID NO: 235153 - DNA, 25 bp, Probe sequence
taattacgcaacttagtgcatctaa

SEQ ID NO: 235154 - DNA, 25 bp, Probe sequence
taaaggttctatacaacgtttaatg

SEQ ID NO: 235155 - DNA, 25 bp, Probe sequence
tacaaggtcaattaaatggtgtcgt

SEQ ID NO: 235156 - DNA, 25 bp, Probe sequence
tacaacgtttaatggggattataat

SEQ ID NO: 235157 - DNA, 25 bp, Probe sequence
tacgcaacttagtgcatctaaaggt

SEQ ID NO: 235158 - DNA, 25 bp, Probe sequence
tataattacgcaacttagtgcatct

SEQ ID NO: 235159 - DNA, 25 bp, Probe sequence
ttagtgcatctaaaggttctataca

SEQ ID NO: 235160 - DNA, 25 bp, Probe sequence
ttacgcaacttagtgcatctaaagg

SEQ ID NO: 235161 - DNA, 25 bp, Probe sequence
atttaccattccatgaaactgaagg

SEQ ID NO: 235162 - DNA, 25 bp, Probe sequence
ataaggcaacgatttctagtatttt

SEQ ID NO: 235163 - DNA, 25 bp, Probe sequence
agcgataatgtggagatctttcata

SEQ ID NO: 235164 - DNA, 25 bp, Probe sequence
acatctaatgtcaaatttgcaactt

SEQ ID NO: 235165 - DNA, 25 bp, Probe sequence
aaatctcttgttaatgaggttggtg

SEQ ID NO: 235166 - DNA, 25 bp, Probe sequence
aaaatccagtcgtagttgaagaaat

SEQ ID NO: 235167 - DNA, 25 bp, Probe sequence
aacacccagtttaatccgaatgcaa

SEQ ID NO: 235168 - DNA, 25 bp, Probe sequence
aacacttgtctcaaaagttagcgat

SEQ ID NO: 235169 - DNA, 25 bp, Probe sequence
aacggactattaggtgtgtctgttt

SEQ ID NO: 235170 - DNA, 25 bp, Probe sequence
aaccatcataatatttcgcgtactc

SEQ ID NO: 235171 - DNA, 25 bp, Probe sequence
aagaagctttactgcataatttaag

SEQ ID NO: 235172 - DNA, 25 bp, Probe sequence
aatgttccagtcgtagttgaaaatg

SEQ ID NO: 235173 - DNA, 25 bp, Probe sequence
gcatgtgacatatttaccattccat

SEQ ID NO: 235174 - DNA, 25 bp, Probe sequence
gaatcttatgatttacctgatgaaa

SEQ ID NO: 235175 - DNA, 25 bp, Probe sequence
gaaggttaatcatctttatggttat

SEQ ID NO: 235176 - DNA, 25 bp, Probe sequence
gaagcgaatctttcagcgttatatg

SEQ ID NO: 235177 - DNA, 25 bp, Probe sequence
gaaccagttcaaacaatattcacgt

SEQ ID NO: 235178 - DNA, 25 bp, Probe sequence
gaaacttgatacttataacggacta

SEQ ID NO: 235179 - DNA, 25 bp, Probe sequence
gaaattactaatgttccagtcgtag

SEQ ID NO: 235180 - DNA, 25 bp, Probe sequence
gaggttggtgagggtgatagcacga

SEQ ID NO: 235181 - DNA, 25 bp, Probe sequence
ggtggtagaaaacctattcttctga

SEQ ID NO: 235182 - DNA, 25 bp, Probe sequence
ggtgtgtctgtttctatacatggag

SEQ ID NO: 235183 - DNA, 25 bp, Probe sequence
ggtggtacattagcaattatccaaa

SEQ ID NO: 235184 - DNA, 25 bp, Probe sequence
ggtattggtgctgggcttattatta

SEQ ID NO: 235185 - DNA, 25 bp, Probe sequence
ggatttaacttatagttctgttgaa

SEQ ID NO: 235186 - DNA, 25 bp, Probe sequence
ggagttgtggataatgagcagcatg

SEQ ID NO: 235187 - DNA, 25 bp, Probe sequence
tgacgcttagcaaattaattcaatt

SEQ ID NO: 235188 - DNA, 25 bp, Probe sequence
taatacataatttaaacacccagtt

SEQ ID NO: 235189 - DNA, 25 bp, Probe sequence
tccattgttcaatgaaatgcctgaa

SEQ ID NO: 235190 - DNA, 25 bp, Probe sequence
taatcaattgtatcgtggtgcaaat

SEQ ID NO: 235191 - DNA, 25 bp, Probe sequence
tatggttattttatttctttggatt

SEQ ID NO: 235192 - DNA, 25 bp, Probe sequence
tttacattaactgtccattgttcaa

SEQ ID NO: 235193 - DNA, 25 bp, Probe sequence
ttcgcgtactcaaatatctaaaaat

SEQ ID NO: 235194 - DNA, 25 bp, Probe sequence
ttgcaactttgctaggtggtacatt

SEQ ID NO: 235195 - DNA, 25 bp, Probe sequence
attactctcttgtagaagaaagtga

SEQ ID NO: 235196 - DNA, 25 bp, Probe sequence
atacaaaggcggtttcaattcactt

SEQ ID NO: 235197 - DNA, 25 bp, Probe sequence
atacaaatgcaaaaggactggagtc

SEQ ID NO: 235198 - DNA, 25 bp, Probe sequence
atgcaagtgcgaataatataataga

SEQ ID NO: 235199 - DNA, 25 bp, Probe sequence
atgaaatatcatctgcagaatggga

SEQ ID NO: 235200 - DNA, 25 bp, Probe sequence
aggcggtttcaattcacttgtctta

SEQ ID NO: 235201 - DNA, 25 bp, Probe sequence
aaaccattcgtacacttataacgag

SEQ ID NO: 235202 - DNA, 25 bp, Probe sequence
acaaaggcggtttcaattcacttgt

SEQ ID NO: 235203 - DNA, 25 bp, Probe sequence
aaaggcggtttcaattcacttgtct

SEQ ID NO: 235204 - DNA, 25 bp, Probe sequence
aaacgtatgaaatatcatctgcaga

SEQ ID NO: 235205 - DNA, 25 bp, Probe sequence
aaccattcgtacacttataacgaga

SEQ ID NO: 235206 - DNA, 25 bp, Probe sequence
aaggcggtttcaattcacttgtctt

SEQ ID NO: 235207 - DNA, 25 bp, Probe sequence
aatattactctcttgtagaagaaag

SEQ ID NO: 235208 - DNA, 25 bp, Probe sequence
caaaggcggtttcaattcacttgtc

SEQ ID NO: 235209 - DNA, 25 bp, Probe sequence
ctggagtccaaaaaccattcgtaca

SEQ ID NO: 235210 - DNA, 25 bp, Probe sequence
cgtacacttataacgagattgtata

SEQ ID NO: 235211 - DNA, 25 bp, Probe sequence
ccattcgtacacttataacgagatt

SEQ ID NO: 235212 - DNA, 25 bp, Probe sequence
gaagatctatcacaagatgaaatag

SEQ ID NO: 235213 - DNA, 25 bp, Probe sequence
gactggagtccaaaaaccattcgta

SEQ ID NO: 235214 - DNA, 25 bp, Probe sequence
gagtccaaaaaccattcgtacactt

SEQ ID NO: 235215 - DNA, 25 bp, Probe sequence
gtatacaaaggcggtttcaattcac

SEQ ID NO: 235216 - DNA, 25 bp, Probe sequence
gtccaaaaaccattcgtacacttat

SEQ ID NO: 235217 - DNA, 25 bp, Probe sequence
ggagtccaaaaaccattcgtacact

SEQ ID NO: 235218 - DNA, 25 bp, Probe sequence
ggactggagtccaaaaaccattcgt

SEQ ID NO: 235219 - DNA, 25 bp, Probe sequence
ggatgaaaaaatatgcaagtgcgaa

SEQ ID NO: 235220 - DNA, 25 bp, Probe sequence
tggagtccaaaaaccattcgtacac

SEQ ID NO: 235221 - DNA, 25 bp, Probe sequence
tgaaatatcatctgcagaatgggaa

SEQ ID NO: 235222 - DNA, 25 bp, Probe sequence
tccaaaaaccattcgtacacttata

SEQ ID NO: 235223 - DNA, 25 bp, Probe sequence
tcacttgtcttaaactttgtagaaa

SEQ ID NO: 235224 - DNA, 25 bp, Probe sequence
taacgagattgtataaaaagggatt

SEQ ID NO: 235225 - DNA, 25 bp, Probe sequence
taaagtatacaaaggcggtttcaat

SEQ ID NO: 235226 - DNA, 25 bp, Probe sequence
tacaaaggcggtttcaattcacttg

SEQ ID NO: 235227 - DNA, 25 bp, Probe sequence
tatacaaaggcggtttcaattcact

SEQ ID NO: 235228 - DNA, 25 bp, Probe sequence
ttcgtacacttataacgagattgta

SEQ ID NO: 235229 - DNA, 25 bp, Probe sequence
ggaagcccgtcgaggaagttaagca

SEQ ID NO: 235230 - DNA, 25 bp, Probe sequence
atatttcagaattctcagcccaact

SEQ ID NO: 235231 - DNA, 25 bp, Probe sequence
actgggtcgccatttgggagcgcgt

SEQ ID NO: 235232 - DNA, 25 bp, Probe sequence
agcgttttgcccgttgaagatgcct

SEQ ID NO: 235233 - DNA, 25 bp, Probe sequence
gaaccggaccgcgttgtaagcgtcg

SEQ ID NO: 235234 - DNA, 25 bp, Probe sequence
cagatgaaatggcctcggttcggtc

SEQ ID NO: 235235 - DNA, 25 bp, Probe sequence
aagcaagtcctacagactctaccta

SEQ ID NO: 235236 - DNA, 25 bp, Probe sequence
aatgctggcggagggcgatccagtc

SEQ ID NO: 235237 - DNA, 25 bp, Probe sequence
aattacgcctgcgtcaatcttggcc

SEQ ID NO: 235238 - DNA, 25 bp, Probe sequence
caacaccctgagtcgagcgttttgc

SEQ ID NO: 235239 - DNA, 25 bp, Probe sequence
cagggccgtgtcgtcggttatggcc

SEQ ID NO: 235240 - DNA, 25 bp, Probe sequence
caagactggcttaaccaacaccctg

SEQ ID NO: 235241 - DNA, 25 bp, Probe sequence
caccgagtgcagcccaagactggct

SEQ ID NO: 235242 - DNA, 25 bp, Probe sequence
cttgacacacttatgttcccagcac

SEQ ID NO: 235243 - DNA, 25 bp, Probe sequence
ctttttcagttcaccgagtgcagcc

SEQ ID NO: 235244 - DNA, 25 bp, Probe sequence
ccccccatcgcttcgaggttgatgg

SEQ ID NO: 235245 - DNA, 25 bp, Probe sequence
cctactaatgggtcctgttgtaaca

SEQ ID NO: 235246 - DNA, 25 bp, Probe sequence
ccgtccgttgctaaaaatgctggcg

SEQ ID NO: 235247 - DNA, 25 bp, Probe sequence
ccttcaacagccgttgtctcgattg

SEQ ID NO: 235248 - DNA, 25 bp, Probe sequence
gcaactatatgcatggtgcgccctt

SEQ ID NO: 235249 - DNA, 25 bp, Probe sequence
gaagatgcctttgaactgggtcgcc

SEQ ID NO: 235250 - DNA, 25 bp, Probe sequence
gactctacctagtgtggaacttgat

SEQ ID NO: 235251 - DNA, 25 bp, Probe sequence
gatcaaggggaagccgtctctatgg

SEQ ID NO: 235252 - DNA, 25 bp, Probe sequence
gttgtctcgattgttacaccagatg

SEQ ID NO: 235253 - DNA, 25 bp, Probe sequence
ggaacttgatgagcagggccgtgtc

SEQ ID NO: 235254 - DNA, 25 bp, Probe sequence
tgggagcgcgttatgaggagtcagg

SEQ ID NO: 235255 - DNA, 25 bp, Probe sequence
tccagtccccgttgaggacatcgcg

SEQ ID NO: 235256 - DNA, 25 bp, Probe sequence
tatggagtggttattccgtccgttg

SEQ ID NO: 235257 - DNA, 25 bp, Probe sequence
tcacggcaccggtaagtccgtccgg

SEQ ID NO: 235258 - DNA, 25 bp, Probe sequence
ttcggtcggccttctgtaacgacgt

SEQ ID NO: 235259 - DNA, 25 bp, Probe sequence
tcttggccttacgatgatgtcctgt

SEQ ID NO: 235260 - DNA, 25 bp, Probe sequence
taacgacgttcactttttcagttca

SEQ ID NO: 235261 - DNA, 25 bp, Probe sequence
ttctcagcccaacttgatcaaactt

SEQ ID NO: 235262 - DNA, 25 bp, Probe sequence
ttgtaagcgtcgagccttcaacagc

SEQ ID NO: 235263 - DNA, 25 bp, Probe sequence
atcatcacaatgtatccaaattata

SEQ ID NO: 235264 - DNA, 25 bp, Probe sequence
atcgctatctacttaagaaaacatg

SEQ ID NO: 235265 - DNA, 25 bp, Probe sequence
atgaaagccgtgaaagagtcagatg

SEQ ID NO: 235266 - DNA, 25 bp, Probe sequence
atgaccaacaacatcgctatctact

SEQ ID NO: 235267 - DNA, 25 bp, Probe sequence
agcttggggtgcttacgctaaaaag

SEQ ID NO: 235268 - DNA, 25 bp, Probe sequence
agcgagacagaaatggactttgaaa

SEQ ID NO: 235269 - DNA, 25 bp, Probe sequence
accaacaacatcgctatctacttaa

SEQ ID NO: 235270 - DNA, 25 bp, Probe sequence
aaagtgaaacgactcatgaaccccg

SEQ ID NO: 235271 - DNA, 25 bp, Probe sequence
aaagcccgttgttgaatcacgcgtc

SEQ ID NO: 235272 - DNA, 25 bp, Probe sequence
aacaacatcgctatctacttaagaa

SEQ ID NO: 235273 - DNA, 25 bp, Probe sequence
aaccgaagccattttcagtgatgac

SEQ ID NO: 235274 - DNA, 25 bp, Probe sequence
aagtacattagaaaccgaagccatt

SEQ ID NO: 235275 - DNA, 25 bp, Probe sequence
catgaaccccgcaaccaatgaaatc

SEQ ID NO: 235276 - DNA, 25 bp, Probe sequence
catttggttccatcaattttgtgaa

SEQ ID NO: 235277 - DNA, 25 bp, Probe sequence
ccccgcaaccaatgaaatcatgcat

SEQ ID NO: 235278 - DNA, 25 bp, Probe sequence
cctatcaatctcaaacatttagaaa

SEQ ID NO: 235279 - DNA, 25 bp, Probe sequence
gccattttcagtgatgaccaacaac

SEQ ID NO: 235280 - DNA, 25 bp, Probe sequence
gcccgttgttgaatcacgcgtcaat

SEQ ID NO: 235281 - DNA, 25 bp, Probe sequence
gaagtattagagatgttgaaaccac

SEQ ID NO: 235282 - DNA, 25 bp, Probe sequence
gaagccattttcagtgatgaccaac

SEQ ID NO: 235283 - DNA, 25 bp, Probe sequence
gaaccccgcaaccaatgaaatcatg

SEQ ID NO: 235284 - DNA, 25 bp, Probe sequence
gagtcagatgaagtgatactagctt

SEQ ID NO: 235285 - DNA, 25 bp, Probe sequence
gatcacaatcatcacaatgtatcca

SEQ ID NO: 235286 - DNA, 25 bp, Probe sequence
gatactagcttggggtgcttacgct

SEQ ID NO: 235287 - DNA, 25 bp, Probe sequence
gtatagatttaactacccaattgat

SEQ ID NO: 235288 - DNA, 25 bp, Probe sequence
gtgaatctatactctaatattacaa

SEQ ID NO: 235289 - DNA, 25 bp, Probe sequence
ggtgcttacgctaaaaagcccgttg

SEQ ID NO: 235290 - DNA, 25 bp, Probe sequence
ggttccatcaattttgtgaatctat

SEQ ID NO: 235291 - DNA, 25 bp, Probe sequence
ggccttcttcgtatagatttaacta

SEQ ID NO: 235292 - DNA, 25 bp, Probe sequence
tgaatcacgcgtcaatgaagtatta

SEQ ID NO: 235293 - DNA, 25 bp, Probe sequence
tgcatccccttaatccgaaagcgag

SEQ ID NO: 235294 - DNA, 25 bp, Probe sequence
tccccttaatccgaaagcgagacag

SEQ ID NO: 235295 - DNA, 25 bp, Probe sequence
ttagaaaacgcctatgataatcata

SEQ ID NO: 235296 - DNA, 25 bp, Probe sequence
ttaactacccaattgataatgaaca

SEQ ID NO: 235297 - DNA, 25 bp, Probe sequence
attccatcaatgctgaagtcgtcga

SEQ ID NO: 235298 - DNA, 25 bp, Probe sequence
atttcccaggttatgactatgagac

SEQ ID NO: 235299 - DNA, 25 bp, Probe sequence
atttgttccttattcaatcgttcag

SEQ ID NO: 235300 - DNA, 25 bp, Probe sequence
atatcgcaccattaatcaaaaacca

SEQ ID NO: 235301 - DNA, 25 bp, Probe sequence
ataggatctatagaacgccagactt

SEQ ID NO: 235302 - DNA, 25 bp, Probe sequence
agatttctacttacgtggccttatt

SEQ ID NO: 235303 - DNA, 25 bp, Probe sequence
agcaggaacaagtactcatcaaaga

SEQ ID NO: 235304 - DNA, 25 bp, Probe sequence
accgggtcgacctattggtggagat

SEQ ID NO: 235305 - DNA, 25 bp, Probe sequence
aaaccattttcagtgtttggcgtga

SEQ ID NO: 235306 - DNA, 25 bp, Probe sequence
aaccatcaaaattgggctgttcagc

SEQ ID NO: 235307 - DNA, 25 bp, Probe sequence
aacgccagactttgatttcgaatgt

SEQ ID NO: 235308 - DNA, 25 bp, Probe sequence
aagtcttatccctcaatctttgaaa

SEQ ID NO: 235309 - DNA, 25 bp, Probe sequence
aaggacttaaagcaatcacgacaat

SEQ ID NO: 235310 - DNA, 25 bp, Probe sequence
aatatggtatgtcgacggacgtatt

SEQ ID NO: 235311 - DNA, 25 bp, Probe sequence
aatcgttcagggagttctgcatgtc

SEQ ID NO: 235312 - DNA, 25 bp, Probe sequence
aatccagtctataaaggctatgtca

SEQ ID NO: 235313 - DNA, 25 bp, Probe sequence
aattgcactttattcacgtgttagt

SEQ ID NO: 235314 - DNA, 25 bp, Probe sequence
cgtgttagtacgtctgagcagtcag

SEQ ID NO: 235315 - DNA, 25 bp, Probe sequence
gaaggtcgtccggcaatgaaacgtc

SEQ ID NO: 235316 - DNA, 25 bp, Probe sequence
gaagtactcgttacaatgtttgggt

SEQ ID NO: 235317 - DNA, 25 bp, Probe sequence
ggagcggagaggcaatcaccggtcg

SEQ ID NO: 235318 - DNA, 25 bp, Probe sequence
gaagctcatattgtacgggaaatct

SEQ ID NO: 235319 - DNA, 25 bp, Probe sequence
gaaactttctatgaatgctaaggca

SEQ ID NO: 235320 - DNA, 25 bp, Probe sequence
gacatatactgactcaggcatttca

SEQ ID NO: 235321 - DNA, 25 bp, Probe sequence
gatgaaagtcttatccctcaatctt

SEQ ID NO: 235322 - DNA, 25 bp, Probe sequence
gatacatccaatgcttctggagaag

SEQ ID NO: 235323 - DNA, 25 bp, Probe sequence
gttggaaattgaatcgtatctcacg

SEQ ID NO: 235324 - DNA, 25 bp, Probe sequence
ggccttattaaatgcccagaatgcg

SEQ ID NO: 235325 - DNA, 25 bp, Probe sequence
ggctatgtcagattcaataaccatc

SEQ ID NO: 235326 - DNA, 25 bp, Probe sequence
taagaaaggctacacccgaagctaa

SEQ ID NO: 235327 - DNA, 25 bp, Probe sequence
tgaaaatttatcacttttaccactt

SEQ ID NO: 235328 - DNA, 25 bp, Probe sequence
tcaccggtcgtgttttaggctacaa

SEQ ID NO: 235329 - DNA, 25 bp, Probe sequence
tctgcatgtcacagtaattccatca

SEQ ID NO: 235330 - DNA, 25 bp, Probe sequence
ttatcacttaatccacttacacaga

SEQ ID NO: 235331 - DNA, 25 bp, Probe sequence
ataagccttcactaagcactctaaa

SEQ ID NO: 235332 - DNA, 25 bp, Probe sequence
atcaaacgctttaattcagaactgt

SEQ ID NO: 235333 - DNA, 25 bp, Probe sequence
atcacgaatcaaagtatccgagtta

SEQ ID NO: 235334 - DNA, 25 bp, Probe sequence
atgatttacaatactttcttttcca

SEQ ID NO: 235335 - DNA, 25 bp, Probe sequence
atggctacgattattggattgattt

SEQ ID NO: 235336 - DNA, 25 bp, Probe sequence
agatattgtgtctaagccacttaat

SEQ ID NO: 235337 - DNA, 25 bp, Probe sequence
acttacagctgatactaaataccgt

SEQ ID NO: 235338 - DNA, 25 bp, Probe sequence
aaattcaatcgatatctttccaaaa

SEQ ID NO: 235339 - DNA, 25 bp, Probe sequence
aaaagcggacacttcattaattgat

SEQ ID NO: 235340 - DNA, 25 bp, Probe sequence
aaggaggcaatcgaccgtcaaggtc

SEQ ID NO: 235341 - DNA, 25 bp, Probe sequence
aatgagcttgaaggtcgttttgaca

SEQ ID NO: 235342 - DNA, 25 bp, Probe sequence
caggtccgtaagtaatgcaaatcag

SEQ ID NO: 235343 - DNA, 25 bp, Probe sequence
ctttcttttccaacatacagcagta

SEQ ID NO: 235344 - DNA, 25 bp, Probe sequence
gcgaaagctttggagcgtcgaatta

SEQ ID NO: 235345 - DNA, 25 bp, Probe sequence
gaatttgtttctagcaggtccgtaa

SEQ ID NO: 235346 - DNA, 25 bp, Probe sequence
gaagaatcctaatgacaccgtactc

SEQ ID NO: 235347 - DNA, 25 bp, Probe sequence
gaacttgttgagaatgagcgctata

SEQ ID NO: 235348 - DNA, 25 bp, Probe sequence
gaaacggctcaaggtgaaaccgtgt

SEQ ID NO: 235349 - DNA, 25 bp, Probe sequence
gaaaccgtgtataacgaacttatcg

SEQ ID NO: 235350 - DNA, 25 bp, Probe sequence
gaaatctttctttacttgatgtatg

SEQ ID NO: 235351 - DNA, 25 bp, Probe sequence
gaccgtcaaggtctgattgctatcc

SEQ ID NO: 235352 - DNA, 25 bp, Probe sequence
gagttctcaggttattaatcagtta

SEQ ID NO: 235353 - DNA, 25 bp, Probe sequence
gatcagttacgacttaatatcccaa

SEQ ID NO: 235354 - DNA, 25 bp, Probe sequence
gataccgccttattttaagcaatat

SEQ ID NO: 235355 - DNA, 25 bp, Probe sequence
gattgctatcctaactattcctgtt

SEQ ID NO: 235356 - DNA, 25 bp, Probe sequence
gttacaacttgcgaattatgacgat

SEQ ID NO: 235357 - DNA, 25 bp, Probe sequence
gtatcttgaaaatagccgtgtcact

SEQ ID NO: 235358 - DNA, 25 bp, Probe sequence
gtaattactgataagataccgcctt

SEQ ID NO: 235359 - DNA, 25 bp, Probe sequence
ggactttgattgggaggactttgac

SEQ ID NO: 235360 - DNA, 25 bp, Probe sequence
tgagcgctatattggttgtggtgaa

SEQ ID NO: 235361 - DNA, 25 bp, Probe sequence
tgcgatacttaattttcctcctgaa

SEQ ID NO: 235362 - DNA, 25 bp, Probe sequence
taccgtaggggtctcatattatatg

SEQ ID NO: 235363 - DNA, 25 bp, Probe sequence
tatgttcgatcttaatacgtttcaa

SEQ ID NO: 235364 - DNA, 25 bp, Probe sequence
ttcctcctgaacatgcgaaagcttt

SEQ ID NO: 235365 - DNA, 25 bp, Probe sequence
attccaacaaaaccgagcgctaatc

SEQ ID NO: 235366 - DNA, 25 bp, Probe sequence
atattggtcaatatagcggtaacta

SEQ ID NO: 235367 - DNA, 25 bp, Probe sequence
atatgcgaatcgtaatattccaaca

SEQ ID NO: 235368 - DNA, 25 bp, Probe sequence
atgtacaagatgtagcatcgttaga

SEQ ID NO: 235369 - DNA, 25 bp, Probe sequence
agaggacaaagcctacacatcccaa

SEQ ID NO: 235370 - DNA, 25 bp, Probe sequence
accgagcgctaatcagttgtcaatt

SEQ ID NO: 235371 - DNA, 25 bp, Probe sequence
acacatcccaagtagtacaccaatc

SEQ ID NO: 235372 - DNA, 25 bp, Probe sequence
aaaaccgagcgctaatcagttgtca

SEQ ID NO: 235373 - DNA, 25 bp, Probe sequence
aaagcaccaattcacgtatgaaatt

SEQ ID NO: 235374 - DNA, 25 bp, Probe sequence
aatattccaacaaaaccgagcgcta

SEQ ID NO: 235375 - DNA, 25 bp, Probe sequence
caatcagattgtatatgcgaatcgt

SEQ ID NO: 235376 - DNA, 25 bp, Probe sequence
cagttgtcaattcatgattggctga

SEQ ID NO: 235377 - DNA, 25 bp, Probe sequence
catcgttagatgcgtttggaggcgt

SEQ ID NO: 235378 - DNA, 25 bp, Probe sequence
cgtatgaaccttatattgaccgtaa

SEQ ID NO: 235379 - DNA, 25 bp, Probe sequence
cccaagtagtacaccaatcaaagaa

SEQ ID NO: 235380 - DNA, 25 bp, Probe sequence
gcctacacatcccaagtagtacacc

SEQ ID NO: 235381 - DNA, 25 bp, Probe sequence
gcgtgggtcatgatacgtatgaacc

SEQ ID NO: 235382 - DNA, 25 bp, Probe sequence
gctacgttacattctgtgatccaaa

SEQ ID NO: 235383 - DNA, 25 bp, Probe sequence
gcaactatagcgtgggtcatgatac

SEQ ID NO: 235384 - DNA, 25 bp, Probe sequence
gaaataaagcaccaattcacgtatg

SEQ ID NO: 235385 - DNA, 25 bp, Probe sequence
gacaaagcctacacatcccaagtag

SEQ ID NO: 235386 - DNA, 25 bp, Probe sequence
gagcgctaatcagttgtcaattcat

SEQ ID NO: 235387 - DNA, 25 bp, Probe sequence
gatccaaacagatttctcaggtgaa

SEQ ID NO: 235388 - DNA, 25 bp, Probe sequence
gatacgtatgaaccttatattgacc

SEQ ID NO: 235389 - DNA, 25 bp, Probe sequence
gattggctgaaacgtcatagcaact

SEQ ID NO: 235390 - DNA, 25 bp, Probe sequence
gttagatgcgtttggaggcgtatta

SEQ ID NO: 235391 - DNA, 25 bp, Probe sequence
gtagctacgttacattctgtgatcc

SEQ ID NO: 235392 - DNA, 25 bp, Probe sequence
gtaagcatttaatccatattggtca

SEQ ID NO: 235393 - DNA, 25 bp, Probe sequence
gtgatccaaacagatttctcaggtg

SEQ ID NO: 235394 - DNA, 25 bp, Probe sequence
tgcgtttggaggcgtattatcatga

SEQ ID NO: 235395 - DNA, 25 bp, Probe sequence
tcatagcaactatagcgtgggtcat

SEQ ID NO: 235396 - DNA, 25 bp, Probe sequence
tacgttacattctgtgatccaaaca

SEQ ID NO: 235397 - DNA, 25 bp, Probe sequence
tagcggtaactattatgtacaagat

SEQ ID NO: 235398 - DNA, 25 bp, Probe sequence
tattgaccgtaagcatttaatccat

SEQ ID NO: 235399 - DNA, 25 bp, Probe sequence
attccatgcctatgccttatagtat

SEQ ID NO: 235400 - DNA, 25 bp, Probe sequence
attatggcaatctacgtacaaactg

SEQ ID NO: 235401 - DNA, 25 bp, Probe sequence
atataatgcacttttagctgatgaa

SEQ ID NO: 235402 - DNA, 25 bp, Probe sequence
aggtgtatacagtcgattttaaatc

SEQ ID NO: 235403 - DNA, 25 bp, Probe sequence
agacggactgtatgacgcattgcta

SEQ ID NO: 235404 - DNA, 25 bp, Probe sequence
agcacagtgcgatcaaaaaacgttc

SEQ ID NO: 235405 - DNA, 25 bp, Probe sequence
agcacattctgctaaaagtgtacaa

SEQ ID NO: 235406 - DNA, 25 bp, Probe sequence
actgtagcgagttatattttcaagc

SEQ ID NO: 235407 - DNA, 25 bp, Probe sequence
aaattacccgatatcaaagcaacaa

SEQ ID NO: 235408 - DNA, 25 bp, Probe sequence
aaacgttcaagattatagtacctat

SEQ ID NO: 235409 - DNA, 25 bp, Probe sequence
aagctaagttagaccaatacgtgga

SEQ ID NO: 235410 - DNA, 25 bp, Probe sequence
aagagtaattccatgcctatgcctt

SEQ ID NO: 235411 - DNA, 25 bp, Probe sequence
caaggcttacctaaagcagtccaac

SEQ ID NO: 235412 - DNA, 25 bp, Probe sequence
cagtcagcagcttgatcaacaatat

SEQ ID NO: 235413 - DNA, 25 bp, Probe sequence
cgtgcatttattggttcgtttctat

SEQ ID NO: 235414 - DNA, 25 bp, Probe sequence
gcagtccaacatacgattttacctt

SEQ ID NO: 235415 - DNA, 25 bp, Probe sequence
gcagcaacaattcagtcagcagctt

SEQ ID NO: 235416 - DNA, 25 bp, Probe sequence
gagcgcatttcaaggtagcagtatt

SEQ ID NO: 235417 - DNA, 25 bp, Probe sequence
gagacaaactgatgtcattgactca

SEQ ID NO: 235418 - DNA, 25 bp, Probe sequence
gatgacattcaacaattgcagcaac

SEQ ID NO: 235419 - DNA, 25 bp, Probe sequence
gatacggctaaccagttgttcaatg

SEQ ID NO: 235420 - DNA, 25 bp, Probe sequence
gattgaatcagaacctattacgctt

SEQ ID NO: 235421 - DNA, 25 bp, Probe sequence
gttgcagcgtacatgactcaagatt

SEQ ID NO: 235422 - DNA, 25 bp, Probe sequence
gttgattggtacacgaacacatcga

SEQ ID NO: 235423 - DNA, 25 bp, Probe sequence
gtacgaatcgattatatacgcaatt

SEQ ID NO: 235424 - DNA, 25 bp, Probe sequence
gtacaatggttggatgcggtcagcc

SEQ ID NO: 235425 - DNA, 25 bp, Probe sequence
ggtgaatttgcacatgtgacagtgg

SEQ ID NO: 235426 - DNA, 25 bp, Probe sequence
ggatgcggtcagccaatttacaaaa

SEQ ID NO: 235427 - DNA, 25 bp, Probe sequence
ggctaatggacaagtcatctaacca

SEQ ID NO: 235428 - DNA, 25 bp, Probe sequence
tcgtttgaaccatcagttgcagcgt

SEQ ID NO: 235429 - DNA, 25 bp, Probe sequence
tagtacctatacacgatgcgattat

SEQ ID NO: 235430 - DNA, 25 bp, Probe sequence
tattggttcgtttctatttggaggt

SEQ ID NO: 235431 - DNA, 25 bp, Probe sequence
ttatcagatgagctacgtgtatttg

SEQ ID NO: 235432 - DNA, 25 bp, Probe sequence
ttgagcatgatatgagcgcatttca

SEQ ID NO: 235433 - DNA, 25 bp, Probe sequence
atatgcgtttattgggctttcagaa

SEQ ID NO: 235434 - DNA, 25 bp, Probe sequence
atcagagatgcatttctattagata

SEQ ID NO: 235435 - DNA, 25 bp, Probe sequence
acgaatgaattaattttagcagtga

SEQ ID NO: 235436 - DNA, 25 bp, Probe sequence
acaagcggagagtatcgaaacaaat

SEQ ID NO: 235437 - DNA, 25 bp, Probe sequence
aaagcactaccagatttaagatttg

SEQ ID NO: 235438 - DNA, 25 bp, Probe sequence
aaggcatacttagttgaagatttag

SEQ ID NO: 235439 - DNA, 25 bp, Probe sequence
aatggtagaatgagatatgcgttta

SEQ ID NO: 235440 - DNA, 25 bp, Probe sequence
aataaccttaaatcgcgtacattag

SEQ ID NO: 235441 - DNA, 25 bp, Probe sequence
aatcgcgtacattaggtagttggat

SEQ ID NO: 235442 - DNA, 25 bp, Probe sequence
ctaataatgcagttgtctcagctta

SEQ ID NO: 235443 - DNA, 25 bp, Probe sequence
cggtcatggatctaaggcatactta

SEQ ID NO: 235444 - DNA, 25 bp, Probe sequence
gaatttatacaaaaaagcactacca

SEQ ID NO: 235445 - DNA, 25 bp, Probe sequence
gaatttggctacgattcaattaatc

SEQ ID NO: 235446 - DNA, 25 bp, Probe sequence
gaagtatcatttgaacaagcggaga

SEQ ID NO: 235447 - DNA, 25 bp, Probe sequence
gaaagtaaagagtatcctattaatg

SEQ ID NO: 235448 - DNA, 25 bp, Probe sequence
gaaataaccttaaatcgcgtacatt

SEQ ID NO: 235449 - DNA, 25 bp, Probe sequence
gagatatgcgtttattgggctttca

SEQ ID NO: 235450 - DNA, 25 bp, Probe sequence
gagtatcctattaatgaaagtaaac

SEQ ID NO: 235451 - DNA, 25 bp, Probe sequence
gatgctactctaaaaaaattgaatt

SEQ ID NO: 235452 - DNA, 25 bp, Probe sequence
gattaacggtcatggatctaaggca

SEQ ID NO: 235453 - DNA, 25 bp, Probe sequence
gatttggtagtggtagcgctacagc

SEQ ID NO: 235454 - DNA, 25 bp, Probe sequence
gatttaagatttggtagtggtagcg

SEQ ID NO: 235455 - DNA, 25 bp, Probe sequence
gttgtctcagcttatgaagtatcat

SEQ ID NO: 235456 - DNA, 25 bp, Probe sequence
gtgaaaatcagagatgcatttctat

SEQ ID NO: 235457 - DNA, 25 bp, Probe sequence
gtggtagcgctacagcatatataaa

SEQ ID NO: 235458 - DNA, 25 bp, Probe sequence
gggctttcagaaagagatgctactc

SEQ ID NO: 235459 - DNA, 25 bp, Probe sequence
ggtgctaataatgcagttgtctcag

SEQ ID NO: 235460 - DNA, 25 bp, Probe sequence
ggtagtggtagcgctacagcatata

SEQ ID NO: 235461 - DNA, 25 bp, Probe sequence
tgcagttgtctcagcttatgaagta

SEQ ID NO: 235462 - DNA, 25 bp, Probe sequence
tgcgtttattgggctttcagaaaga

SEQ ID NO: 235463 - DNA, 25 bp, Probe sequence
taatgcagttgtctcagcttatgaa

SEQ ID NO: 235464 - DNA, 25 bp, Probe sequence
tagcgctacagcatatataaataat

SEQ ID NO: 235465 - DNA, 25 bp, Probe sequence
ttggctacgattcaattaatcttga

SEQ ID NO: 235466 - DNA, 25 bp, Probe sequence
ttggtatcaatacaggtgctaataa

SEQ ID NO: 235467 - DNA, 25 bp, Probe sequence
atatacaatgcctacgattaataaa

SEQ ID NO: 235468 - DNA, 25 bp, Probe sequence
atacaatgcctacgattaataaaag

SEQ ID NO: 235469 - DNA, 25 bp, Probe sequence
agttgtaaggtatgttatttttgat

SEQ ID NO: 235470 - DNA, 25 bp, Probe sequence
agcaatcctaaattaagaaaagagc

SEQ ID NO: 235471 - DNA, 25 bp, Probe sequence
aaatatacaatgcctacgattaata

SEQ ID NO: 235472 - DNA, 25 bp, Probe sequence
aaagagcaattgatatcgacggtaa

SEQ ID NO: 235473 - DNA, 25 bp, Probe sequence
aacagtggatgtttttgtaaatgga

SEQ ID NO: 235474 - DNA, 25 bp, Probe sequence
aagagcaattgatatcgacggtaaa

SEQ ID NO: 235475 - DNA, 25 bp, Probe sequence
aagttttattgaagttcatcatatt

SEQ ID NO: 235476 - DNA, 25 bp, Probe sequence
aaggaaatatacaatgcctacgatt

SEQ ID NO: 235477 - DNA, 25 bp, Probe sequence
aaggtatgttatttttgattttgag

SEQ ID NO: 235478 - DNA, 25 bp, Probe sequence
caatgcctacgattaataaaaggaa

SEQ ID NO: 235479 - DNA, 25 bp, Probe sequence
gcaattgatatcgacggtaaaagtt

SEQ ID NO: 235480 - DNA, 25 bp, Probe sequence
gaagtttattagattttgtgttaga

SEQ ID NO: 235481 - DNA, 25 bp, Probe sequence
gaagttcatcatattaagacaatgt

SEQ ID NO: 235482 - DNA, 25 bp, Probe sequence
gatatcgacggtaaaagttgtaagg

SEQ ID NO: 235483 - DNA, 25 bp, Probe sequence
gaaaagagcaattgatatcgacggt

SEQ ID NO: 235484 - DNA, 25 bp, Probe sequence
gaaatatacaatgcctacgattaat

SEQ ID NO: 235485 - DNA, 25 bp, Probe sequence
gagcaattgatatcgacggtaaaag

SEQ ID NO: 235486 - DNA, 25 bp, Probe sequence
gattttgtgttagaaacagtggatg

SEQ ID NO: 235487 - DNA, 25 bp, Probe sequence
gtttcacgttatagtacaaaatttg

SEQ ID NO: 235488 - DNA, 25 bp, Probe sequence
gtagtttcacgttatagtacaaaat

SEQ ID NO: 235489 - DNA, 25 bp, Probe sequence
gtacaaaatttgaaagcaatcctaa

SEQ ID NO: 235490 - DNA, 25 bp, Probe sequence
gtggatgtttttgtaaatggaagta

SEQ ID NO: 235491 - DNA, 25 bp, Probe sequence
gggcatagggaaagttttattgaag

SEQ ID NO: 235492 - DNA, 25 bp, Probe sequence
gggaaagttttattgaagttcatca

SEQ ID NO: 235493 - DNA, 25 bp, Probe sequence
ggtatgttatttttgattttgagaa

SEQ ID NO: 235494 - DNA, 25 bp, Probe sequence
ggaaatatacaatgcctacgattaa

SEQ ID NO: 235495 - DNA, 25 bp, Probe sequence
ggaagtttattagattttgtgttag

SEQ ID NO: 235496 - DNA, 25 bp, Probe sequence
tggggcatagggaaagttttattga

SEQ ID NO: 235497 - DNA, 25 bp, Probe sequence
tcatattaagacaatgtttactata

SEQ ID NO: 235498 - DNA, 25 bp, Probe sequence
taaggtatgttatttttgattttga

SEQ ID NO: 235499 - DNA, 25 bp, Probe sequence
tttgaaagcaatcctaaattaagaa

SEQ ID NO: 235500 - DNA, 25 bp, Probe sequence
ttgagaaaattttatggggcatagg

SEQ ID NO: 235501 - DNA, 25 bp, Probe sequence
atttctacacccaacgttttagcag

SEQ ID NO: 235502 - DNA, 25 bp, Probe sequence
atattaattcgcatcaaactgacaa

SEQ ID NO: 235503 - DNA, 25 bp, Probe sequence
atatattctattaaggacactaagt

SEQ ID NO: 235504 - DNA, 25 bp, Probe sequence
atagatcaatttctatactttgact

SEQ ID NO: 235505 - DNA, 25 bp, Probe sequence
atactttgacttaatatattctatt

SEQ ID NO: 235506 - DNA, 25 bp, Probe sequence
atgagaatagcttttggtatgacat

SEQ ID NO: 235507 - DNA, 25 bp, Probe sequence
agagtcaaccagatcctaaaccaga

SEQ ID NO: 235508 - DNA, 25 bp, Probe sequence
agattacctaactcgtcactatttg

SEQ ID NO: 235509 - DNA, 25 bp, Probe sequence
acctaactcgtcactatttggtgaa

SEQ ID NO: 235510 - DNA, 25 bp, Probe sequence
actgttcgggtatttgaagatggta

SEQ ID NO: 235511 - DNA, 25 bp, Probe sequence
acacccaacgttttagcagagagtc

SEQ ID NO: 235512 - DNA, 25 bp, Probe sequence
aactcgccttatgaaacgggatata

SEQ ID NO: 235513 - DNA, 25 bp, Probe sequence
aagagattatttatttcacatgtaa

SEQ ID NO: 235514 - DNA, 25 bp, Probe sequence
aatcatgtatcagcaataaacgtta

SEQ ID NO: 235515 - DNA, 25 bp, Probe sequence
aattatgataatgttcgagtcgaat

SEQ ID NO: 235516 - DNA, 25 bp, Probe sequence
ctctatgaatttaacaactcgcctt

SEQ ID NO: 235517 - DNA, 25 bp, Probe sequence
gcctgcaccaggagataaatttgac

SEQ ID NO: 235518 - DNA, 25 bp, Probe sequence
gcttttggtatgacatgatgcctgc

SEQ ID NO: 235519 - DNA, 25 bp, Probe sequence
gcatcaaactgacaaacgaaaaact

SEQ ID NO: 235520 - DNA, 25 bp, Probe sequence
gcagagagtcaaccagatcctaaac

SEQ ID NO: 235521 - DNA, 25 bp, Probe sequence
gaagtattactgttcgggtatttga

SEQ ID NO: 235522 - DNA, 25 bp, Probe sequence
gaaaaaggtgactgctcaagaatta

SEQ ID NO: 235523 - DNA, 25 bp, Probe sequence
gacactaagttagggaattatgata

SEQ ID NO: 235524 - DNA, 25 bp, Probe sequence
gactgctcaagaattagattaccta

SEQ ID NO: 235525 - DNA, 25 bp, Probe sequence
gagtaaattcactggtttgatggaa

SEQ ID NO: 235526 - DNA, 25 bp, Probe sequence
gagttgcacaaatcgagtaaattca

SEQ ID NO: 235527 - DNA, 25 bp, Probe sequence
gatgtgtttggagctaattattatt

SEQ ID NO: 235528 - DNA, 25 bp, Probe sequence
gatcctaaaccagatgagttgcaca

SEQ ID NO: 235529 - DNA, 25 bp, Probe sequence
gatattagttatttctacacccaac

SEQ ID NO: 235530 - DNA, 25 bp, Probe sequence
gattgaagtttatcttacgacaaag

SEQ ID NO: 235531 - DNA, 25 bp, Probe sequence
ggtggtgtaactgagcataatggaa

SEQ ID NO: 235532 - DNA, 25 bp, Probe sequence
taacaactcgccttatgaaacggga

SEQ ID NO: 235533 - DNA, 25 bp, Probe sequence
tattatcttttgacgtacaaactaa

SEQ ID NO: 235534 - DNA, 25 bp, Probe sequence
tttgatattcgcactgatattagtt

SEQ ID NO: 235535 - DNA, 25 bp, Probe sequence
atagtgccatgattgttcgtgaagg

SEQ ID NO: 235536 - DNA, 25 bp, Probe sequence
atggcgcaaattatgtctgacatcg

SEQ ID NO: 235537 - DNA, 25 bp, Probe sequence
agagtgcaagtgggttttcagaagc

SEQ ID NO: 235538 - DNA, 25 bp, Probe sequence
agccctgttgtatatgcacatgatg

SEQ ID NO: 235539 - DNA, 25 bp, Probe sequence
acggcagtgcaacaacatatggcgc

SEQ ID NO: 235540 - DNA, 25 bp, Probe sequence
aacgccgaccattgcggctaaagcg

SEQ ID NO: 235541 - DNA, 25 bp, Probe sequence
aagtaccacctcaaaatcatcaatg

SEQ ID NO: 235542 - DNA, 25 bp, Probe sequence
ccatttcatccgactcctaagagtg

SEQ ID NO: 235543 - DNA, 25 bp, Probe sequence
aatatgcacccgaatgtcatacatc

SEQ ID NO: 235544 - DNA, 25 bp, Probe sequence
gccgcgcaagttatcgcatcagtca

SEQ ID NO: 235545 - DNA, 25 bp, Probe sequence
gcgcgtattttgcaacatatggctc

SEQ ID NO: 235546 - DNA, 25 bp, Probe sequence
gctattggtctgcgatggggcatca

SEQ ID NO: 235547 - DNA, 25 bp, Probe sequence
gcatcaagatgttctgctcacgcgc

SEQ ID NO: 235548 - DNA, 25 bp, Probe sequence
gaagatttatatcaaacgccgacca

SEQ ID NO: 235549 - DNA, 25 bp, Probe sequence
gaaaatttatatcaagtaccacctc

SEQ ID NO: 235550 - DNA, 25 bp, Probe sequence
gaacggacaattgatgccgcgcaag

SEQ ID NO: 235551 - DNA, 25 bp, Probe sequence
gatgaggttgaaacaccccatttta

SEQ ID NO: 235552 - DNA, 25 bp, Probe sequence
gatatcgtgcattgttaccgaatcc

SEQ ID NO: 235553 - DNA, 25 bp, Probe sequence
gatattcatgtattggcgtcattat

SEQ ID NO: 235554 - DNA, 25 bp, Probe sequence
gtagcgcatcgtcttatgacttgga

SEQ ID NO: 235555 - DNA, 25 bp, Probe sequence
gtaacacaggcattagtctagaagc

SEQ ID NO: 235556 - DNA, 25 bp, Probe sequence
gtcatacatcattccaattgcatta

SEQ ID NO: 235557 - DNA, 25 bp, Probe sequence
gtctatctagaacgattgctactga

SEQ ID NO: 235558 - DNA, 25 bp, Probe sequence
gtgttgcgacagcatccacagtata

SEQ ID NO: 235559 - DNA, 25 bp, Probe sequence
gtggtgcaaaccctatttatacaca

SEQ ID NO: 235560 - DNA, 25 bp, Probe sequence
gggataccgaattaccatgctgata

SEQ ID NO: 235561 - DNA, 25 bp, Probe sequence
ggtttagcaccagaagcatggcttg

SEQ ID NO: 235562 - DNA, 25 bp, Probe sequence
tggggcatcatatgtatcatccaga

SEQ ID NO: 235563 - DNA, 25 bp, Probe sequence
tacccgacgtcttcggttagaactg

SEQ ID NO: 235564 - DNA, 25 bp, Probe sequence
tcgataatagcattcatcgcacggc

SEQ ID NO: 235565 - DNA, 25 bp, Probe sequence
tctgctcacgcgctatgtagaaggt

SEQ ID NO: 235566 - DNA, 25 bp, Probe sequence
taccgaatccattagggcaaacagt

SEQ ID NO: 235567 - DNA, 25 bp, Probe sequence
tttgaaacgatgcctgattcaccga

SEQ ID NO: 235568 - DNA, 25 bp, Probe sequence
ttaggtcatccatttcatccgactc

SEQ ID NO: 235569 - DNA, 25 bp, Probe sequence
ctcggctacctagaccgaaagccaa

SEQ ID NO: 235570 - DNA, 25 bp, Probe sequence
attggcagtactgataattccagaa

SEQ ID NO: 235571 - DNA, 25 bp, Probe sequence
atctcggctacctagaccgaaagcc

SEQ ID NO: 235572 - DNA, 25 bp, Probe sequence
aggtgaaaagcctcatgctagacat

SEQ ID NO: 235573 - DNA, 25 bp, Probe sequence
agagaatggcatctcggctacctag

SEQ ID NO: 235574 - DNA, 25 bp, Probe sequence
acatcaagtattggcagtactgata

SEQ ID NO: 235575 - DNA, 25 bp, Probe sequence
acaacttagagaatggcatctcggc

SEQ ID NO: 235576 - DNA, 25 bp, Probe sequence
aaacacttctagaacatcaagtatt

SEQ ID NO: 235577 - DNA, 25 bp, Probe sequence
aacttagagaatggcatctcggcta

SEQ ID NO: 235578 - DNA, 25 bp, Probe sequence
aagcctcatgctagacataataaaa

SEQ ID NO: 235579 - DNA, 25 bp, Probe sequence
catctcggctacctagaccgaaagc

SEQ ID NO: 235580 - DNA, 25 bp, Probe sequence
gcatctcggctacctagaccgaaag

SEQ ID NO: 235581 - DNA, 25 bp, Probe sequence
cttagagaatggcatctcggctacc

SEQ ID NO: 235582 - DNA, 25 bp, Probe sequence
cttctagaacatcaagtattggcag

SEQ ID NO: 235583 - DNA, 25 bp, Probe sequence
gctacctagaccgaaagccaaacaa

SEQ ID NO: 235584 - DNA, 25 bp, Probe sequence
gaacatcaagtattggcagtactga

SEQ ID NO: 235585 - DNA, 25 bp, Probe sequence
gaaaagcctcatgctagacataata

SEQ ID NO: 235586 - DNA, 25 bp, Probe sequence
gacataataaaaacacttctagaac

SEQ ID NO: 235587 - DNA, 25 bp, Probe sequence
gaccgaaagccaaacaacaaagatt

SEQ ID NO: 235588 - DNA, 25 bp, Probe sequence
gtattggcagtactgataattccag

SEQ ID NO: 235589 - DNA, 25 bp, Probe sequence
gtactgataattccagaagtgttaa

SEQ ID NO: 235590 - DNA, 25 bp, Probe sequence
gtaaggaggtgaaaagcctcatgct

SEQ ID NO: 235591 - DNA, 25 bp, Probe sequence
gtgaaaagcctcatgctagacataa

SEQ ID NO: 235592 - DNA, 25 bp, Probe sequence
ggtgaaaagcctcatgctagacata

SEQ ID NO: 235593 - DNA, 25 bp, Probe sequence
ggaggtgaaaagcctcatgctagac

SEQ ID NO: 235594 - DNA, 25 bp, Probe sequence
ggctacctagaccgaaagccaaaca

SEQ ID NO: 235595 - DNA, 25 bp, Probe sequence
ggcagtactgataattccagaagtg

SEQ ID NO: 235596 - DNA, 25 bp, Probe sequence
tctcggctacctagaccgaaagcca

SEQ ID NO: 235597 - DNA, 25 bp, Probe sequence
tcggctacctagaccgaaagccaaa

SEQ ID NO: 235598 - DNA, 25 bp, Probe sequence
taattccagaagtgttaaaacaact

SEQ ID NO: 235599 - DNA, 25 bp, Probe sequence
tagagaatggcatctcggctaccta

SEQ ID NO: 235600 - DNA, 25 bp, Probe sequence
tacctagaccgaaagccaaacaaca

SEQ ID NO: 235601 - DNA, 25 bp, Probe sequence
tagaccgaaagccaaacaacaaaga

SEQ ID NO: 235602 - DNA, 25 bp, Probe sequence
ttagagaatggcatctcggctacct

SEQ ID NO: 235603 - DNA, 25 bp, Probe sequence
attgagcttttagttgactttttca

SEQ ID NO: 235604 - DNA, 25 bp, Probe sequence
attactcaacaaagttattgagctt

SEQ ID NO: 235605 - DNA, 25 bp, Probe sequence
agttgactttttcaacagcatcggt

SEQ ID NO: 235606 - DNA, 25 bp, Probe sequence
agttattgagcttttagttgacttt

SEQ ID NO: 235607 - DNA, 25 bp, Probe sequence
agcttttagttgactttttcaacag

SEQ ID NO: 235608 - DNA, 25 bp, Probe sequence
actttttcaacagcatcggttacag

SEQ ID NO: 235609 - DNA, 25 bp, Probe sequence
acaaagttattgagcttttagttga

SEQ ID NO: 235610 - DNA, 25 bp, Probe sequence
aaagttattgagcttttagttgact

SEQ ID NO: 235611 - DNA, 25 bp, Probe sequence
aacaaagttattgagcttttagttg

SEQ ID NO: 235612 - DNA, 25 bp, Probe sequence
aagttattgagcttttagttgactt

SEQ ID NO: 235613 - DNA, 25 bp, Probe sequence
caacaaagttattgagcttttagtt

SEQ ID NO: 235614 - DNA, 25 bp, Probe sequence
caaagttattgagcttttagttgac

SEQ ID NO: 235615 - DNA, 25 bp, Probe sequence
ctttttcaacagcatcggttacaga

SEQ ID NO: 235616 - DNA, 25 bp, Probe sequence
cttttagttgactttttcaacagca

SEQ ID NO: 235617 - DNA, 25 bp, Probe sequence
gcttttagttgactttttcaacagc

SEQ ID NO: 235618 - DNA, 25 bp, Probe sequence
gactttttcaacagcatcggttaca

SEQ ID NO: 235619 - DNA, 25 bp, Probe sequence
gagcttttagttgactttttcaaca

SEQ ID NO: 235620 - DNA, 25 bp, Probe sequence
gttgactttttcaacagcatcggtt

SEQ ID NO: 235621 - DNA, 25 bp, Probe sequence
gttattgagcttttagttgactttt

SEQ ID NO: 235622 - DNA, 25 bp, Probe sequence
tgactttttcaacagcatcggttac

SEQ ID NO: 235623 - DNA, 25 bp, Probe sequence
tgagcttttagttgactttttcaac

SEQ ID NO: 235624 - DNA, 25 bp, Probe sequence
tgaaaaaattactcaacaaagttat

SEQ ID NO: 235625 - DNA, 25 bp, Probe sequence
tcaacaaagttattgagcttttagt

SEQ ID NO: 235626 - DNA, 25 bp, Probe sequence
tactcaacaaagttattgagctttt

SEQ ID NO: 235627 - DNA, 25 bp, Probe sequence
tagttgactttttcaacagcatcgg

SEQ ID NO: 235628 - DNA, 25 bp, Probe sequence
ttagttgactttttcaacagcatcg

SEQ ID NO: 235629 - DNA, 25 bp, Probe sequence
tattgagcttttagttgactttttc

SEQ ID NO: 235630 - DNA, 25 bp, Probe sequence
tttagttgactttttcaacagcatc

SEQ ID NO: 235631 - DNA, 25 bp, Probe sequence
ttttagttgactttttcaacagcat

SEQ ID NO: 235632 - DNA, 25 bp, Probe sequence
tttttcaacagcatcggttacagag

SEQ ID NO: 235633 - DNA, 25 bp, Probe sequence
ttttcaacagcatcggttacagagc

SEQ ID NO: 235634 - DNA, 25 bp, Probe sequence
ttattgagcttttagttgacttttt

SEQ ID NO: 235635 - DNA, 25 bp, Probe sequence
ttgactttttcaacagcatcggtta

SEQ ID NO: 235636 - DNA, 25 bp, Probe sequence
ttgagcttttagttgactttttcaa

SEQ ID NO: 235637 - DNA, 25 bp, Probe sequence
accaaattgagagatgcccttgctc

SEQ ID NO: 235638 - DNA, 25 bp, Probe sequence
attgagagatgcccttgctcacgaa

SEQ ID NO: 235639 - DNA, 25 bp, Probe sequence
atcggagagctatgttagttcatta

SEQ ID NO: 235640 - DNA, 25 bp, Probe sequence
agagatgcccttgctcacgaaataa

SEQ ID NO: 235641 - DNA, 25 bp, Probe sequence
acttaatattacaatccgtcgagta

SEQ ID NO: 235642 - DNA, 25 bp, Probe sequence
acagatctaccagcaatacctcata

SEQ ID NO: 235643 - DNA, 25 bp, Probe sequence
acaatccgtcgagtataaaaatgaa

SEQ ID NO: 235644 - DNA, 25 bp, Probe sequence
acaatacagatctaccagcaatacc

SEQ ID NO: 235645 - DNA, 25 bp, Probe sequence
aaatcattgatgttaacaatatttg

SEQ ID NO: 235646 - DNA, 25 bp, Probe sequence
aatacagatctaccagcaatacctc

SEQ ID NO: 235647 - DNA, 25 bp, Probe sequence
aatattacaatccgtcgagtataaa

SEQ ID NO: 235648 - DNA, 25 bp, Probe sequence
aatttttacaatacagatctaccag

SEQ ID NO: 235649 - DNA, 25 bp, Probe sequence
aattgagagatgcccttgctcacga

SEQ ID NO: 235650 - DNA, 25 bp, Probe sequence
caatatttgtattatcggagagcta

SEQ ID NO: 235651 - DNA, 25 bp, Probe sequence
cagatctaccagcaatacctcatac

SEQ ID NO: 235652 - DNA, 25 bp, Probe sequence
cattaattgtttctaatttacctga

SEQ ID NO: 235653 - DNA, 25 bp, Probe sequence
ctaccagcaatacctcataccaaat

SEQ ID NO: 235654 - DNA, 25 bp, Probe sequence
ccagcaatacctcataccaaattga

SEQ ID NO: 235655 - DNA, 25 bp, Probe sequence
gctatgttagttcattaattgtttc

SEQ ID NO: 235656 - DNA, 25 bp, Probe sequence
gagatgcccttgctcacgaaataaa

SEQ ID NO: 235657 - DNA, 25 bp, Probe sequence
gatgcccttgctcacgaaataaata

SEQ ID NO: 235658 - DNA, 25 bp, Probe sequence
gtattatcggagagctatgttagtt

SEQ ID NO: 235659 - DNA, 25 bp, Probe sequence
gtgttgcacttaatattacaatccg

SEQ ID NO: 235660 - DNA, 25 bp, Probe sequence
ggagagctatgttagttcattaatt

SEQ ID NO: 235661 - DNA, 25 bp, Probe sequence
tgagagatgcccttgctcacgaaat

SEQ ID NO: 235662 - DNA, 25 bp, Probe sequence
tgcacttaatattacaatccgtcga

SEQ ID NO: 235663 - DNA, 25 bp, Probe sequence
tgcccttgctcacgaaataaataaa

SEQ ID NO: 235664 - DNA, 25 bp, Probe sequence
tctaccagcaatacctcataccaaa

SEQ ID NO: 235665 - DNA, 25 bp, Probe sequence
tacagatctaccagcaatacctcat

SEQ ID NO: 235666 - DNA, 25 bp, Probe sequence
taccagcaatacctcataccaaatt

SEQ ID NO: 235667 - DNA, 25 bp, Probe sequence
tatagaagttagtattgacgaaata

SEQ ID NO: 235668 - DNA, 25 bp, Probe sequence
tttacaatacagatctaccagcaat

SEQ ID NO: 235669 - DNA, 25 bp, Probe sequence
ttaatgagttagaagaatggttttt

SEQ ID NO: 235670 - DNA, 25 bp, Probe sequence
ttgtttctaatttacctgaaagaga

SEQ ID NO: 235671 - DNA, 25 bp, Probe sequence
cttctggtaaagcgaaagaattcgt

SEQ ID NO: 235672 - DNA, 25 bp, Probe sequence
agataaagcttctggtaaagcgaaa

SEQ ID NO: 235673 - DNA, 25 bp, Probe sequence
ataaagcttctggtaaagcgaaaga

SEQ ID NO: 235674 - DNA, 25 bp, Probe sequence
agacgaaagtaaatttgaacaagca

SEQ ID NO: 235675 - DNA, 25 bp, Probe sequence
agaaaaagcaactgattttattgat

SEQ ID NO: 235676 - DNA, 25 bp, Probe sequence
agaattcgttgaaaatgcaaaagaa

SEQ ID NO: 235677 - DNA, 25 bp, Probe sequence
agcttctggtaaagcgaaagaattc

SEQ ID NO: 235678 - DNA, 25 bp, Probe sequence
agcgaaagaattcgttgaaaatgca

SEQ ID NO: 235679 - DNA, 25 bp, Probe sequence
acagtaggtaatgttactgataata

SEQ ID NO: 235680 - DNA, 25 bp, Probe sequence
aaagaattcgttgaaaatgcaaaag

SEQ ID NO: 235681 - DNA, 25 bp, Probe sequence
aaagcttctggtaaagcgaaagaat

SEQ ID NO: 235682 - DNA, 25 bp, Probe sequence
aaagcgaaagaattcgttgaaaatg

SEQ ID NO: 235683 - DNA, 25 bp, Probe sequence
aagcgaaagaattcgttgaaaatgc

SEQ ID NO: 235684 - DNA, 25 bp, Probe sequence
aagcttctggtaaagcgaaagaatt

SEQ ID NO: 235685 - DNA, 25 bp, Probe sequence
aagaattcgttgaaaatgcaaaaga

SEQ ID NO: 235686 - DNA, 25 bp, Probe sequence
aagaaaaagcaactgattttattga

SEQ ID NO: 235687 - DNA, 25 bp, Probe sequence
aagataaagcttctggtaaagcgaa

SEQ ID NO: 235688 - DNA, 25 bp, Probe sequence
cagacgaaagtaaatttgaacaagc

SEQ ID NO: 235689 - DNA, 25 bp, Probe sequence
gcttctggtaaagcgaaagaattcg

SEQ ID NO: 235690 - DNA, 25 bp, Probe sequence
ctggtaaagcgaaagaattcgttga

SEQ ID NO: 235691 - DNA, 25 bp, Probe sequence
cgaaagaattcgttgaaaatgcaaa

SEQ ID NO: 235692 - DNA, 25 bp, Probe sequence
gcgaaagaattcgttgaaaatgcaa

SEQ ID NO: 235693 - DNA, 25 bp, Probe sequence
gcagacgaaagtaaatttgaacaag

SEQ ID NO: 235694 - DNA, 25 bp, Probe sequence
gaattcgttgaaaatgcaaaagaaa

SEQ ID NO: 235695 - DNA, 25 bp, Probe sequence
gaagataaagcttctggtaaagcga

SEQ ID NO: 235696 - DNA, 25 bp, Probe sequence
gaaagaattcgttgaaaatgcaaaa

SEQ ID NO: 235697 - DNA, 25 bp, Probe sequence
gacgaaagtaaatttgaacaagcaa

SEQ ID NO: 235698 - DNA, 25 bp, Probe sequence
gataaagcttctggtaaagcgaaag

SEQ ID NO: 235699 - DNA, 25 bp, Probe sequence
ggcagacgaaagtaaatttgaacaa

SEQ ID NO: 235700 - DNA, 25 bp, Probe sequence
tggtaaagcgaaagaattcgttgaa

SEQ ID NO: 235701 - DNA, 25 bp, Probe sequence
tctggtaaagcgaaagaattcgttg

SEQ ID NO: 235702 - DNA, 25 bp, Probe sequence
taaagcgaaagaattcgttgaaaat

SEQ ID NO: 235703 - DNA, 25 bp, Probe sequence
taaagcttctggtaaagcgaaagaa

SEQ ID NO: 235704 - DNA, 25 bp, Probe sequence
ttctggtaaagcgaaagaattcgtt

SEQ ID NO: 235705 - DNA, 25 bp, Probe sequence
attattatctttatcatgatttaga

SEQ ID NO: 235706 - DNA, 25 bp, Probe sequence
atttacccattcttggaatgacttt

SEQ ID NO: 235707 - DNA, 25 bp, Probe sequence
atagcttgaggtatttttacactga

SEQ ID NO: 235708 - DNA, 25 bp, Probe sequence
atctaatagcatttttattctttta

SEQ ID NO: 235709 - DNA, 25 bp, Probe sequence
atgaagttatgattccaagcctaaa

SEQ ID NO: 235710 - DNA, 25 bp, Probe sequence
atgacaatcttaaatttccttctga

SEQ ID NO: 235711 - DNA, 25 bp, Probe sequence
aggtatttttacactgattatattc

SEQ ID NO: 235712 - DNA, 25 bp, Probe sequence
agttactggctctataagtttagaa

SEQ ID NO: 235713 - DNA, 25 bp, Probe sequence
agctcagaaatcaaaccaaccagaa

SEQ ID NO: 235714 - DNA, 25 bp, Probe sequence
aaatgtaatagttactggctctata

SEQ ID NO: 235715 - DNA, 25 bp, Probe sequence
aacgttaatcattgatgatcctatt

SEQ ID NO: 235716 - DNA, 25 bp, Probe sequence
aagatcatcagggaactagtttttt

SEQ ID NO: 235717 - DNA, 25 bp, Probe sequence
aatagtgacctagctcagaaatcaa

SEQ ID NO: 235718 - DNA, 25 bp, Probe sequence
aatatttatatttacccattcttgg

SEQ ID NO: 235719 - DNA, 25 bp, Probe sequence
aatttccttctgatgattacattac

SEQ ID NO: 235720 - DNA, 25 bp, Probe sequence
gaattaggggtccaaaagtcagtag

SEQ ID NO: 235721 - DNA, 25 bp, Probe sequence
gaatgacttttgtgatataacttat

SEQ ID NO: 235722 - DNA, 25 bp, Probe sequence
gaagttgttgatatgacggatacta

SEQ ID NO: 235723 - DNA, 25 bp, Probe sequence
gaagaactttcaagtattcaatatg

SEQ ID NO: 235724 - DNA, 25 bp, Probe sequence
gaaagtttgggagactcaattgatg

SEQ ID NO: 235725 - DNA, 25 bp, Probe sequence
gacgaagcaaatagattttacgttt

SEQ ID NO: 235726 - DNA, 25 bp, Probe sequence
gataaagctcattatgatgctatga

SEQ ID NO: 235727 - DNA, 25 bp, Probe sequence
gattggttgcgtaatggtttagaat

SEQ ID NO: 235728 - DNA, 25 bp, Probe sequence
gttggaattaattactgatttttca

SEQ ID NO: 235729 - DNA, 25 bp, Probe sequence
gttttgaagttatagattggttgcg

SEQ ID NO: 235730 - DNA, 25 bp, Probe sequence
gtagcgaatgatgaaacactttata

SEQ ID NO: 235731 - DNA, 25 bp, Probe sequence
gtaattggttcagcaaaatttttga

SEQ ID NO: 235732 - DNA, 25 bp, Probe sequence
gtcacataaaccatacagagcaata

SEQ ID NO: 235733 - DNA, 25 bp, Probe sequence
gggaaaaacttcattagctagaggt

SEQ ID NO: 235734 - DNA, 25 bp, Probe sequence
ggttgaaatctgatgaaactacaca

SEQ ID NO: 235735 - DNA, 25 bp, Probe sequence
ggaagattgttattactatcattca

SEQ ID NO: 235736 - DNA, 25 bp, Probe sequence
tgatcctattaatagcttcgacgaa

SEQ ID NO: 235737 - DNA, 25 bp, Probe sequence
tttattttgaactttttgaggatga

SEQ ID NO: 235738 - DNA, 25 bp, Probe sequence
ttatttcaagagatttacgagttat

SEQ ID NO: 235739 - DNA, 25 bp, Probe sequence
attcagggttagacatcgatgcatt

SEQ ID NO: 235740 - DNA, 25 bp, Probe sequence
atcgatgcattaaaagttgtatcta

SEQ ID NO: 235741 - DNA, 25 bp, Probe sequence
atccatcagaaattacaggtgttac

SEQ ID NO: 235742 - DNA, 25 bp, Probe sequence
atggcatcaacattagaaatcaaag

SEQ ID NO: 235743 - DNA, 25 bp, Probe sequence
agaagagttcggttcagctgaataa

SEQ ID NO: 235744 - DNA, 25 bp, Probe sequence
agcaggattattcttggcaatgcaa

SEQ ID NO: 235745 - DNA, 25 bp, Probe sequence
acattactcctgataaagtacatgt

SEQ ID NO: 235746 - DNA, 25 bp, Probe sequence
acaggtgttacaaatgctgatttca

SEQ ID NO: 235747 - DNA, 25 bp, Probe sequence
acacactatcaacgattattaaatt

SEQ ID NO: 235748 - DNA, 25 bp, Probe sequence
aacactgatgaaatacatgcgatta

SEQ ID NO: 235749 - DNA, 25 bp, Probe sequence
aagacatggcacaacgttatttaaa

SEQ ID NO: 235750 - DNA, 25 bp, Probe sequence
aatgcgaaacgtgaagaaggacaag

SEQ ID NO: 235751 - DNA, 25 bp, Probe sequence
aatacatgcgattatgggaccaaac

SEQ ID NO: 235752 - DNA, 25 bp, Probe sequence
gcgtggggaaaactttggtgcatta

SEQ ID NO: 235753 - DNA, 25 bp, Probe sequence
gaattagcaaaacgtcttgaagaag

SEQ ID NO: 235754 - DNA, 25 bp, Probe sequence
gaaatcaaagacctacatgtgtcta

SEQ ID NO: 235755 - DNA, 25 bp, Probe sequence
gacctacatgtgtctattgaggata

SEQ ID NO: 235756 - DNA, 25 bp, Probe sequence
gagcaaaagcaggattattcttggc

SEQ ID NO: 235757 - DNA, 25 bp, Probe sequence
gattatgggaccaaacgggacaggt

SEQ ID NO: 235758 - DNA, 25 bp, Probe sequence
gattattaaattacattactcctga

SEQ ID NO: 235759 - DNA, 25 bp, Probe sequence
gtttgcaatcttagatgaaatcgat

SEQ ID NO: 235760 - DNA, 25 bp, Probe sequence
gtcgttaaatctggtggtccagaat

SEQ ID NO: 235761 - DNA, 25 bp, Probe sequence
gggaaaactttggtgcattaatgat

SEQ ID NO: 235762 - DNA, 25 bp, Probe sequence
ggtggtccagaattagcaaaacgtc

SEQ ID NO: 235763 - DNA, 25 bp, Probe sequence
ggacaagaaatcaacttaatgcaat

SEQ ID NO: 235764 - DNA, 25 bp, Probe sequence
ggcaatgcaatatccatcagaaatt

SEQ ID NO: 235765 - DNA, 25 bp, Probe sequence
tgttagaacctaagtttgcaatctt

SEQ ID NO: 235766 - DNA, 25 bp, Probe sequence
tgaaatcgattcagggttagacatc

SEQ ID NO: 235767 - DNA, 25 bp, Probe sequence
tcatctgcaattatgggacacccaa

SEQ ID NO: 235768 - DNA, 25 bp, Probe sequence
taacttgacaattaacactgatgaa

SEQ ID NO: 235769 - DNA, 25 bp, Probe sequence
taaaggtattaaccaaatgcgtggg

SEQ ID NO: 235770 - DNA, 25 bp, Probe sequence
taaatgaaggtttctcaggtggaga

SEQ ID NO: 235771 - DNA, 25 bp, Probe sequence
tacaaatgctgatttcatgcgttca

SEQ ID NO: 235772 - DNA, 25 bp, Probe sequence
tattcttggcaatgcaatatccatc

SEQ ID NO: 235773 - DNA, 25 bp, Probe sequence
atacgattgcgtacacacaagttga

SEQ ID NO: 235774 - DNA, 25 bp, Probe sequence
atcatcgttactgaagaaagcgccg

SEQ ID NO: 235775 - DNA, 25 bp, Probe sequence
atggcgttatcgttgaaggtttagc

SEQ ID NO: 235776 - DNA, 25 bp, Probe sequence
agcccacaatgaaccttcttggatg

SEQ ID NO: 235777 - DNA, 25 bp, Probe sequence
acatgctcgtggtgacgcgaatcct

SEQ ID NO: 235778 - DNA, 25 bp, Probe sequence
acagcgctacacacggcattagtta

SEQ ID NO: 235779 - DNA, 25 bp, Probe sequence
acaatacgttgtgttgcacgacgac

SEQ ID NO: 235780 - DNA, 25 bp, Probe sequence
aaaatgcaagcttttataaccatgt

SEQ ID NO: 235781 - DNA, 25 bp, Probe sequence
aacgtcttgttatacatggtttctt

SEQ ID NO: 235782 - DNA, 25 bp, Probe sequence
aaggctttacaggtcatatcattcg

SEQ ID NO: 235783 - DNA, 25 bp, Probe sequence
aattacttatcaaatgcatctggtg

SEQ ID NO: 235784 - DNA, 25 bp, Probe sequence
caattgctaatcaggaatcacgtgt

SEQ ID NO: 235785 - DNA, 25 bp, Probe sequence
cagtaggtcgtgttgatccagatca

SEQ ID NO: 235786 - DNA, 25 bp, Probe sequence
ctttatcacaattacctgagtcagt

SEQ ID NO: 235787 - DNA, 25 bp, Probe sequence
gaatcacgtgtattaatgttatctg

SEQ ID NO: 235788 - DNA, 25 bp, Probe sequence
gaagcggatgcctcaattaattggg

SEQ ID NO: 235789 - DNA, 25 bp, Probe sequence
gaaagcgccgaagtcacatatgttg

SEQ ID NO: 235790 - DNA, 25 bp, Probe sequence
gagaagcggaacgtcttgttataca

SEQ ID NO: 235791 - DNA, 25 bp, Probe sequence
gatgtttatcaatctttatcacaat

SEQ ID NO: 235792 - DNA, 25 bp, Probe sequence
gatgaacatcgtatcacagcgctac

SEQ ID NO: 235793 - DNA, 25 bp, Probe sequence
gatccagatcaactttactatttaa

SEQ ID NO: 235794 - DNA, 25 bp, Probe sequence
gttatctgaacatgctcgtggtgac

SEQ ID NO: 235795 - DNA, 25 bp, Probe sequence
gtagtacgtgaattacctatcgaag

SEQ ID NO: 235796 - DNA, 25 bp, Probe sequence
gtagaacatccagtacaatacgttg

SEQ ID NO: 235797 - DNA, 25 bp, Probe sequence
gtacaagctggtcatgctgcatcag

SEQ ID NO: 235798 - DNA, 25 bp, Probe sequence
gtcatatcattcgacgtggtattac

SEQ ID NO: 235799 - DNA, 25 bp, Probe sequence
gtggtgacgcgaatcctattttatt

SEQ ID NO: 235800 - DNA, 25 bp, Probe sequence
gtggtattactgaagcggatgcctc

SEQ ID NO: 235801 - DNA, 25 bp, Probe sequence
ggtggcgtatttgtttatgttccta

SEQ ID NO: 235802 - DNA, 25 bp, Probe sequence
ggtgatcgttcaacaagttcactta

SEQ ID NO: 235803 - DNA, 25 bp, Probe sequence
ggtatcggctacattaagcatggtg

SEQ ID NO: 235804 - DNA, 25 bp, Probe sequence
ggtttcttagatccagtagtacgtg

SEQ ID NO: 235805 - DNA, 25 bp, Probe sequence
tgttgattattctaaagcccacaat

SEQ ID NO: 235806 - DNA, 25 bp, Probe sequence
tttctgaagtgattgctggtgcaaa

SEQ ID NO: 235807 - DNA, 25 bp, Probe sequence
atccacacgatgttgctacagccgt

SEQ ID NO: 235808 - DNA, 25 bp, Probe sequence
atgtgtcttcaacagctagagcgag

SEQ ID NO: 235809 - DNA, 25 bp, Probe sequence
aggatcgtcgtgcaggtgtaataac

SEQ ID NO: 235810 - DNA, 25 bp, Probe sequence
agcagcaccacatatgaaacttgat

SEQ ID NO: 235811 - DNA, 25 bp, Probe sequence
agctattcgctatttagaacgcata

SEQ ID NO: 235812 - DNA, 25 bp, Probe sequence
acgttcatcgtggtgttcatacatt

SEQ ID NO: 235813 - DNA, 25 bp, Probe sequence
acaggtattggcgtattatttggta

SEQ ID NO: 235814 - DNA, 25 bp, Probe sequence
aaaccattgcagaaatagctcatca

SEQ ID NO: 235815 - DNA, 25 bp, Probe sequence
aatgcttggaccaacaggtattggc

SEQ ID NO: 235816 - DNA, 25 bp, Probe sequence
caaagatcgttgctattgcacatat

SEQ ID NO: 235817 - DNA, 25 bp, Probe sequence
catcatgccaatattgttccttggc

SEQ ID NO: 235818 - DNA, 25 bp, Probe sequence
cgttcgtcgttttattaatgcgaag

SEQ ID NO: 235819 - DNA, 25 bp, Probe sequence
gcgtcgattaaccttgtagcacata

SEQ ID NO: 235820 - DNA, 25 bp, Probe sequence
gcggaacaactgcgtcgattaacct

SEQ ID NO: 235821 - DNA, 25 bp, Probe sequence
gctacagccgtagatacagaaggtg

SEQ ID NO: 235822 - DNA, 25 bp, Probe sequence
gcatcattgtgcgcaaccgttaatg

SEQ ID NO: 235823 - DNA, 25 bp, Probe sequence
gcaacatgggctgatttacctacta

SEQ ID NO: 235824 - DNA, 25 bp, Probe sequence
gaaggaattgaaatttatggcccgc

SEQ ID NO: 235825 - DNA, 25 bp, Probe sequence
gaaggagtttttctcttatgaattt

SEQ ID NO: 235826 - DNA, 25 bp, Probe sequence
gagctgggcatcattgtgcgcaacc

SEQ ID NO: 235827 - DNA, 25 bp, Probe sequence
gagggcgatgaaattgttgtcactg

SEQ ID NO: 235828 - DNA, 25 bp, Probe sequence
gaggcgggtactccattaattgctc

SEQ ID NO: 235829 - DNA, 25 bp, Probe sequence
gttccttggcaacagttagcaaagc

SEQ ID NO: 235830 - DNA, 25 bp, Probe sequence
gtttagcatatcttgattcaacagc

SEQ ID NO: 235831 - DNA, 25 bp, Probe sequence
gtagcacatagctatggtgatgcaa

SEQ ID NO: 235832 - DNA, 25 bp, Probe sequence
gtcaatggcaaacgtttagcatatc

SEQ ID NO: 235833 - DNA, 25 bp, Probe sequence
ggtgtagcggttagagctgggcatc

SEQ ID NO: 235834 - DNA, 25 bp, Probe sequence
ggtactccattaattgctcaagcaa

SEQ ID NO: 235835 - DNA, 25 bp, Probe sequence
tggccgaacactcatttgacgttaa

SEQ ID NO: 235836 - DNA, 25 bp, Probe sequence
tgaaaatgcccgtgaaaccgttcgt

SEQ ID NO: 235837 - DNA, 25 bp, Probe sequence
taccaatgacagctgacggtgaatt

SEQ ID NO: 235838 - DNA, 25 bp, Probe sequence
ttcaacagcgacaagtcaaacgcct

SEQ ID NO: 235839 - DNA, 25 bp, Probe sequence
ttgatggggcgcaagcagcaccaca

SEQ ID NO: 235840 - DNA, 25 bp, Probe sequence
ttgggcttgcagaagctattcgcta

SEQ ID NO: 235841 - DNA, 25 bp, Probe sequence
attcccagctcgtattaaatgtgcc

SEQ ID NO: 235842 - DNA, 25 bp, Probe sequence
atttacgaaaatgatgcttggtgaa

SEQ ID NO: 235843 - DNA, 25 bp, Probe sequence
atcaattatatagatctgtcattat

SEQ ID NO: 235844 - DNA, 25 bp, Probe sequence
atgcggtgaccgtatacgactaaca

SEQ ID NO: 235845 - DNA, 25 bp, Probe sequence
aggtgtattagataacgggtctatg

SEQ ID NO: 235846 - DNA, 25 bp, Probe sequence
agatctgtcattatggatcattata

SEQ ID NO: 235847 - DNA, 25 bp, Probe sequence
acatttgatatagaagacggcatta

SEQ ID NO: 235848 - DNA, 25 bp, Probe sequence
gaataacccgacatgcggtgaccgt

SEQ ID NO: 235849 - DNA, 25 bp, Probe sequence
taacccgacatgcggtgaccgtata

SEQ ID NO: 235850 - DNA, 25 bp, Probe sequence
aaggtcattcacttggagaagcaat

SEQ ID NO: 235851 - DNA, 25 bp, Probe sequence
aatgtgccacattagcttggaaagc

SEQ ID NO: 235852 - DNA, 25 bp, Probe sequence
caagtgcatcgatgatgacacaagc

SEQ ID NO: 235853 - DNA, 25 bp, Probe sequence
caatggcaagtgcatcgatgatgac

SEQ ID NO: 235854 - DNA, 25 bp, Probe sequence
cagctcgtattaaatgtgccacatt

SEQ ID NO: 235855 - DNA, 25 bp, Probe sequence
ccgacatgcggtgaccgtatacgac

SEQ ID NO: 235856 - DNA, 25 bp, Probe sequence
gccacattagcttggaaagcattgg

SEQ ID NO: 235857 - DNA, 25 bp, Probe sequence
gctaagtttgaaggtgaaggttgtt

SEQ ID NO: 235858 - DNA, 25 bp, Probe sequence
gcttggtgaagactatgtgattaca

SEQ ID NO: 235859 - DNA, 25 bp, Probe sequence
gcaaatgagccaagaatttacgaaa

SEQ ID NO: 235860 - DNA, 25 bp, Probe sequence
gaaggttgttcgatttcaatggcaa

SEQ ID NO: 235861 - DNA, 25 bp, Probe sequence
gaaagcattggaaaaaggtactgtt

SEQ ID NO: 235862 - DNA, 25 bp, Probe sequence
gaaaaaggtactgttgctaaagaag

SEQ ID NO: 235863 - DNA, 25 bp, Probe sequence
gacagtagatatgaataacccgaca

SEQ ID NO: 235864 - DNA, 25 bp, Probe sequence
gagaagcaatgcaaatgagccaaga

SEQ ID NO: 235865 - DNA, 25 bp, Probe sequence
gataacgggtctatgacagtagata

SEQ ID NO: 235866 - DNA, 25 bp, Probe sequence
gttcgatttcaatggcaagtgcatc

SEQ ID NO: 235867 - DNA, 25 bp, Probe sequence
gttaaaggtcattcacttggagaag

SEQ ID NO: 235868 - DNA, 25 bp, Probe sequence
gggagatattgaagcattgcaaggt

SEQ ID NO: 235869 - DNA, 25 bp, Probe sequence
ggtaaagcagaaggtacgactgaag

SEQ ID NO: 235870 - DNA, 25 bp, Probe sequence
tgaccgtatacgactaacatttgat

SEQ ID NO: 235871 - DNA, 25 bp, Probe sequence
tgaagcattgcaaggtgtatctcaa

SEQ ID NO: 235872 - DNA, 25 bp, Probe sequence
tgcaaggtgtatctcaattcccagc

SEQ ID NO: 235873 - DNA, 25 bp, Probe sequence
tcccagctcgtattaaatgtgccac

SEQ ID NO: 235874 - DNA, 25 bp, Probe sequence
tctcaattcccagctcgtattaaat

SEQ ID NO: 235875 - DNA, 25 bp, Probe sequence
atatccaaactgtgttcttttaggt

SEQ ID NO: 235876 - DNA, 25 bp, Probe sequence
atttagctggtgtttctgctcaata

SEQ ID NO: 235877 - DNA, 25 bp, Probe sequence
atgagtcgtggtatttctgaagaag

SEQ ID NO: 235878 - DNA, 25 bp, Probe sequence
atggggtggcgacttatcagaattg

SEQ ID NO: 235879 - DNA, 25 bp, Probe sequence
agatgcgcacgttcgttatactacg

SEQ ID NO: 235880 - DNA, 25 bp, Probe sequence
acttccaatggaatacgcggtcgaa

SEQ ID NO: 235881 - DNA, 25 bp, Probe sequence
actctgctgttgtggaaatcattgt

SEQ ID NO: 235882 - DNA, 25 bp, Probe sequence
actttgcttctgtagtacctgcagc

SEQ ID NO: 235883 - DNA, 25 bp, Probe sequence
acttactatgtaaagccttcagaac

SEQ ID NO: 235884 - DNA, 25 bp, Probe sequence
acaaatttgcggcgttaaactcagc

SEQ ID NO: 235885 - DNA, 25 bp, Probe sequence
aaatgccaatgcctcaatggggtgg

SEQ ID NO: 235886 - DNA, 25 bp, Probe sequence
aaaagcacctgatgttggggattat

SEQ ID NO: 235887 - DNA, 25 bp, Probe sequence
aacaagctgaacgttcatgggatga

SEQ ID NO: 235888 - DNA, 25 bp, Probe sequence
aactagttctttacactctgctgtt

SEQ ID NO: 235889 - DNA, 25 bp, Probe sequence
aagttatttatcgcggtattgttca

SEQ ID NO: 235890 - DNA, 25 bp, Probe sequence
aatatggattccacgacgatgatgt

SEQ ID NO: 235891 - DNA, 25 bp, Probe sequence
gcggcgttaaactcagcagtatggt

SEQ ID NO: 235892 - DNA, 25 bp, Probe sequence
gcggtattgttcattttggacgtaa

SEQ ID NO: 235893 - DNA, 25 bp, Probe sequence
gctgatgaaggtgcttctgtacatt

SEQ ID NO: 235894 - DNA, 25 bp, Probe sequence
gcttatttccgtattaactctgaga

SEQ ID NO: 235895 - DNA, 25 bp, Probe sequence
gcagtatggtcaggtggttcgttca

SEQ ID NO: 235896 - DNA, 25 bp, Probe sequence
gaatttcgatgacattacttactat

SEQ ID NO: 235897 - DNA, 25 bp, Probe sequence
gaatctgaagttgtttaccataata

SEQ ID NO: 235898 - DNA, 25 bp, Probe sequence
gaaggttgtactgcaccagtttata

SEQ ID NO: 235899 - DNA, 25 bp, Probe sequence
gaatggatgttagatttccgtctta

SEQ ID NO: 235900 - DNA, 25 bp, Probe sequence
gatgccggtgctaaaatgattcata

SEQ ID NO: 235901 - DNA, 25 bp, Probe sequence
gatacgccactacaagcttatttcc

SEQ ID NO: 235902 - DNA, 25 bp, Probe sequence
gtacattatctattgcatttgctgg

SEQ ID NO: 235903 - DNA, 25 bp, Probe sequence
ggtggttcgttcatttatgtaccta

SEQ ID NO: 235904 - DNA, 25 bp, Probe sequence
ggattcatcgaaccatttacaaaag

SEQ ID NO: 235905 - DNA, 25 bp, Probe sequence
ggacaagttcaagatgccggtgcta

SEQ ID NO: 235906 - DNA, 25 bp, Probe sequence
tgaacgtacattaatcattgctgat

SEQ ID NO: 235907 - DNA, 25 bp, Probe sequence
tcaacatcagatacaattccatata

SEQ ID NO: 235908 - DNA, 25 bp, Probe sequence
tactacgattcaaaactgggcgaac

SEQ ID NO: 235909 - DNA, 25 bp, Probe sequence
agagttttttggcgctaggtatgac

SEQ ID NO: 235910 - DNA, 25 bp, Probe sequence
agggtactctgtttctgtttttgat

SEQ ID NO: 235911 - DNA, 25 bp, Probe sequence
agttcttttatacgccaataaagat

SEQ ID NO: 235912 - DNA, 25 bp, Probe sequence
agcacttacaaactatgaccaactt

SEQ ID NO: 235913 - DNA, 25 bp, Probe sequence
actcgctttctcgtagtgaaataga

SEQ ID NO: 235914 - DNA, 25 bp, Probe sequence
aaacatgataactcgctttctcgta

SEQ ID NO: 235915 - DNA, 25 bp, Probe sequence
aaaacgcctcgggacaaatagcaat

SEQ ID NO: 235916 - DNA, 25 bp, Probe sequence
aacgaccctaaagttgtggcaacag

SEQ ID NO: 235917 - DNA, 25 bp, Probe sequence
aagcaattacaatataacaccaaat

SEQ ID NO: 235918 - DNA, 25 bp, Probe sequence
aatatcaaaggcattgctacagata

SEQ ID NO: 235919 - DNA, 25 bp, Probe sequence
aattcaaaaaatcaagcacttacaa

SEQ ID NO: 235920 - DNA, 25 bp, Probe sequence
ctatgaccaacttgatgagtatcac

SEQ ID NO: 235921 - DNA, 25 bp, Probe sequence
ctaactgtttccccttcaatgaggt

SEQ ID NO: 235922 - DNA, 25 bp, Probe sequence
gcctcgggacaaatagcaatgggat

SEQ ID NO: 235923 - DNA, 25 bp, Probe sequence
gctgacacttttgaggaggcagtaa

SEQ ID NO: 235924 - DNA, 25 bp, Probe sequence
gcaacagcattgaaaggtaacataa

SEQ ID NO: 235925 - DNA, 25 bp, Probe sequence
gaaaataagttagtcatggccgaag

SEQ ID NO: 235926 - DNA, 25 bp, Probe sequence
gagagcaaactaaattatcaatcaa

SEQ ID NO: 235927 - DNA, 25 bp, Probe sequence
gagtatcacaatcgacaaaagcaat

SEQ ID NO: 235928 - DNA, 25 bp, Probe sequence
gaggcagtaaaattatccaaagaaa

SEQ ID NO: 235929 - DNA, 25 bp, Probe sequence
gaggctgttcaaaacacttttggta

SEQ ID NO: 235930 - DNA, 25 bp, Probe sequence
gatttaacatcagctgacacttttg

SEQ ID NO: 235931 - DNA, 25 bp, Probe sequence
gttagtcatggccgaagatagagag

SEQ ID NO: 235932 - DNA, 25 bp, Probe sequence
gtttaggacttacagcaacagcatt

SEQ ID NO: 235933 - DNA, 25 bp, Probe sequence
gtttccccttcaatgaggttaggat

SEQ ID NO: 235934 - DNA, 25 bp, Probe sequence
gtactctgtttctgtttttgataaa

SEQ ID NO: 235935 - DNA, 25 bp, Probe sequence
gtcagaacatttaatttcagacttt

SEQ ID NO: 235936 - DNA, 25 bp, Probe sequence
gggatttacagagttttttggcgct

SEQ ID NO: 235937 - DNA, 25 bp, Probe sequence
ggtagcacttataaagaggctgttc

SEQ ID NO: 235938 - DNA, 25 bp, Probe sequence
ggataacataacatttcgtaaacgt

SEQ ID NO: 235939 - DNA, 25 bp, Probe sequence
ggcgctaggtatgacgaaagcactt

SEQ ID NO: 235940 - DNA, 25 bp, Probe sequence
tgataactcgctttctcgtagtgaa

SEQ ID NO: 235941 - DNA, 25 bp, Probe sequence
tatcgaaagcgatctattgagcaaa

SEQ ID NO: 235942 - DNA, 25 bp, Probe sequence
ttatttgaattctggtagcacttat

SEQ ID NO: 235943 - DNA, 25 bp, Probe sequence
aggcctaattgttgctgttggtatc

SEQ ID NO: 235944 - DNA, 25 bp, Probe sequence
agtacaaacattcttaacaggccta

SEQ ID NO: 235945 - DNA, 25 bp, Probe sequence
acacttggcgcagaaaatccagggc

SEQ ID NO: 235946 - DNA, 25 bp, Probe sequence
aacaactgtttatgtagcattttta

SEQ ID NO: 235947 - DNA, 25 bp, Probe sequence
aatccagggccgaaaattgaacaag

SEQ ID NO: 235948 - DNA, 25 bp, Probe sequence
aattacctggaattgatgatccaat

SEQ ID NO: 235949 - DNA, 25 bp, Probe sequence
aattgttgctgttggtatctgtgct

SEQ ID NO: 235950 - DNA, 25 bp, Probe sequence
caaacattcttaacaggcctaattg

SEQ ID NO: 235951 - DNA, 25 bp, Probe sequence
catgggtatacaaccttttccaata

SEQ ID NO: 235952 - DNA, 25 bp, Probe sequence
ctgtgctggtgtttggatagttctt

SEQ ID NO: 235953 - DNA, 25 bp, Probe sequence
gcgcagaaaatccagggccgaaaat

SEQ ID NO: 235954 - DNA, 25 bp, Probe sequence
gcctaattgttgctgttggtatctg

SEQ ID NO: 235955 - DNA, 25 bp, Probe sequence
gctggtgtggctgttggggcagcac

SEQ ID NO: 235956 - DNA, 25 bp, Probe sequence
gctggtgtttggatagttcttaaaa

SEQ ID NO: 235957 - DNA, 25 bp, Probe sequence
gctgttggtatctgtgctggtgttt

SEQ ID NO: 235958 - DNA, 25 bp, Probe sequence
gcatttttaagcattgttttatcaa

SEQ ID NO: 235959 - DNA, 25 bp, Probe sequence
gcagcacttgtttggttggttccat

SEQ ID NO: 235960 - DNA, 25 bp, Probe sequence
gcacttgtttggttggttccatggg

SEQ ID NO: 235961 - DNA, 25 bp, Probe sequence
gaatggtattagctggtgtggctgt

SEQ ID NO: 235962 - DNA, 25 bp, Probe sequence
gaaatgtttagaggcgttggaatgg

SEQ ID NO: 235963 - DNA, 25 bp, Probe sequence
gaggcgttggaatggtattagctgg

SEQ ID NO: 235964 - DNA, 25 bp, Probe sequence
gttggttccatgggtatacaacctt

SEQ ID NO: 235965 - DNA, 25 bp, Probe sequence
gttggtatctgtgctggtgtttgga

SEQ ID NO: 235966 - DNA, 25 bp, Probe sequence
gtttggttggttccatgggtataca

SEQ ID NO: 235967 - DNA, 25 bp, Probe sequence
gtagcatttttaagcattgttttat

SEQ ID NO: 235968 - DNA, 25 bp, Probe sequence
gtgtggctgttggggcagcacttgt

SEQ ID NO: 235969 - DNA, 25 bp, Probe sequence
gtggctgttggggcagcacttgttt

SEQ ID NO: 235970 - DNA, 25 bp, Probe sequence
tggatagttcttaaaaaattacctg

SEQ ID NO: 235971 - DNA, 25 bp, Probe sequence
tgttggggcagcacttgtttggttg

SEQ ID NO: 235972 - DNA, 25 bp, Probe sequence
tgttgctgttggtatctgtgctggt

SEQ ID NO: 235973 - DNA, 25 bp, Probe sequence
tatcaaatataacacttggcgcaga

SEQ ID NO: 235974 - DNA, 25 bp, Probe sequence
ttggcgcagaaaatccagggccgaa

SEQ ID NO: 235975 - DNA, 25 bp, Probe sequence
ttagctggtgtggctgttggggcag

SEQ ID NO: 235976 - DNA, 25 bp, Probe sequence
ttgaacaaggtttacaacaagtaca

SEQ ID NO: 235977 - DNA, 25 bp, Probe sequence
attgtggcattagagtgctggtctt

SEQ ID NO: 235978 - DNA, 25 bp, Probe sequence
attagagtgctggtctttattaaat

SEQ ID NO: 235979 - DNA, 25 bp, Probe sequence
attagttcgattaagattcgttgta

SEQ ID NO: 235980 - DNA, 25 bp, Probe sequence
atattctttagataattcgatatta

SEQ ID NO: 235981 - DNA, 25 bp, Probe sequence
atcaaatattctttagataattcga

SEQ ID NO: 235982 - DNA, 25 bp, Probe sequence
atgattgtggcattagagtgctggt

SEQ ID NO: 235983 - DNA, 25 bp, Probe sequence
atggtggataaagcgacaacacaaa

SEQ ID NO: 235984 - DNA, 25 bp, Probe sequence
agtgctggtctttattaaattaatt

SEQ ID NO: 235985 - DNA, 25 bp, Probe sequence
agagtgctggtctttattaaattaa

SEQ ID NO: 235986 - DNA, 25 bp, Probe sequence
caaatattctttagataattcgata

SEQ ID NO: 235987 - DNA, 25 bp, Probe sequence
cattagagtgctggtctttattaaa

SEQ ID NO: 235988 - DNA, 25 bp, Probe sequence
gctggtctttattaaattaattgaa

SEQ ID NO: 235989 - DNA, 25 bp, Probe sequence
gcattagagtgctggtctttattaa

SEQ ID NO: 235990 - DNA, 25 bp, Probe sequence
gagtgctggtctttattaaattaat

SEQ ID NO: 235991 - DNA, 25 bp, Probe sequence
gatggtggataaagcgacaacacaa

SEQ ID NO: 235992 - DNA, 25 bp, Probe sequence
gataattcgatattagttcgattaa

SEQ ID NO: 235993 - DNA, 25 bp, Probe sequence
gatattagttcgattaagattcgtt

SEQ ID NO: 235994 - DNA, 25 bp, Probe sequence
gattgtggcattagagtgctggtct

SEQ ID NO: 235995 - DNA, 25 bp, Probe sequence
gtgctggtctttattaaattaattg

SEQ ID NO: 235996 - DNA, 25 bp, Probe sequence
gtggcattagagtgctggtctttat

SEQ ID NO: 235997 - DNA, 25 bp, Probe sequence
ggataaagcgacaacacaaatacaa

SEQ ID NO: 235998 - DNA, 25 bp, Probe sequence
ggcattagagtgctggtctttatta

SEQ ID NO: 235999 - DNA, 25 bp, Probe sequence
tggataaagcgacaacacaaataca

SEQ ID NO: 236000 - DNA, 25 bp, Probe sequence
tggcattagagtgctggtctttatt

SEQ ID NO: 236001 - DNA, 25 bp, Probe sequence
tggtggataaagcgacaacacaaat

SEQ ID NO: 236002 - DNA, 25 bp, Probe sequence
tgtggcattagagtgctggtcttta

SEQ ID NO: 236003 - DNA, 25 bp, Probe sequence
tgattgtggcattagagtgctggtc

SEQ ID NO: 236004 - DNA, 25 bp, Probe sequence
tgatggtggataaagcgacaacaca

SEQ ID NO: 236005 - DNA, 25 bp, Probe sequence
tgctggtctttattaaattaattga

SEQ ID NO: 236006 - DNA, 25 bp, Probe sequence
tagagtgctggtctttattaaatta

SEQ ID NO: 236007 - DNA, 25 bp, Probe sequence
tattagttcgattaagattcgttgt

SEQ ID NO: 236008 - DNA, 25 bp, Probe sequence
ttagagtgctggtctttattaaatt

SEQ ID NO: 236009 - DNA, 25 bp, Probe sequence
ttgatggtggataaagcgacaacac

SEQ ID NO: 236010 - DNA, 25 bp, Probe sequence
ttgtggcattagagtgctggtcttt

SEQ ID NO: 236011 - DNA, 25 bp, Probe sequence
atttctaacaatagcatttggtgta

SEQ ID NO: 236012 - DNA, 25 bp, Probe sequence
atcacaacgatttagcagaaggcag

SEQ ID NO: 236013 - DNA, 25 bp, Probe sequence
atgctcgatatgttgggcgaagaaa

SEQ ID NO: 236014 - DNA, 25 bp, Probe sequence
atgtctgttgagcaagaagttaaag

SEQ ID NO: 236015 - DNA, 25 bp, Probe sequence
aggattgggtgatgatgatgtttaa

SEQ ID NO: 236016 - DNA, 25 bp, Probe sequence
acctcgtaatgtagacgctagttat

SEQ ID NO: 236017 - DNA, 25 bp, Probe sequence
acaacgatttagcagaaggcagaaa

SEQ ID NO: 236018 - DNA, 25 bp, Probe sequence
aagagaatataatacctcgtaatgt

SEQ ID NO: 236019 - DNA, 25 bp, Probe sequence
aatacctcgtaatgtagacgctagt

SEQ ID NO: 236020 - DNA, 25 bp, Probe sequence
caatagcatttggtgtaacgttttt

SEQ ID NO: 236021 - DNA, 25 bp, Probe sequence
ctcgtaatgtagacgctagttataa

SEQ ID NO: 236022 - DNA, 25 bp, Probe sequence
ctggctttatggtttttatagtagg

SEQ ID NO: 236023 - DNA, 25 bp, Probe sequence
gcttacttaatttaataactggctt

SEQ ID NO: 236024 - DNA, 25 bp, Probe sequence
gcatttggtgtaacgtttttaatgg

SEQ ID NO: 236025 - DNA, 25 bp, Probe sequence
gaattagcaattgtatttgttcctt

SEQ ID NO: 236026 - DNA, 25 bp, Probe sequence
gaaggattgggtgatgatgatgttt

SEQ ID NO: 236027 - DNA, 25 bp, Probe sequence
gaaggcagaaagtttacttctataa

SEQ ID NO: 236028 - DNA, 25 bp, Probe sequence
gaagttaaagatataatgctcgata

SEQ ID NO: 236029 - DNA, 25 bp, Probe sequence
gacgctagttataaaatattcttaa

SEQ ID NO: 236030 - DNA, 25 bp, Probe sequence
gatataatgctcgatatgttgggcg

SEQ ID NO: 236031 - DNA, 25 bp, Probe sequence
gataccataaaacaatcacaacgat

SEQ ID NO: 236032 - DNA, 25 bp, Probe sequence
gatatgttgggcgaagaaaagaaag

SEQ ID NO: 236033 - DNA, 25 bp, Probe sequence
gatttttggtttaacaatatatggc

SEQ ID NO: 236034 - DNA, 25 bp, Probe sequence
ggtttaacaatatatggcttactaa

SEQ ID NO: 236035 - DNA, 25 bp, Probe sequence
ggcagaaagtttacttctataaaag

SEQ ID NO: 236036 - DNA, 25 bp, Probe sequence
taatgctcgatatgttgggcgaaga

SEQ ID NO: 236037 - DNA, 25 bp, Probe sequence
taataactggctttatggtttttat

SEQ ID NO: 236038 - DNA, 25 bp, Probe sequence
taactggctttatggtttttatagt

SEQ ID NO: 236039 - DNA, 25 bp, Probe sequence
taacaatatatggcttactaacaat

SEQ ID NO: 236040 - DNA, 25 bp, Probe sequence
taacaattagaccaattagtacaaa

SEQ ID NO: 236041 - DNA, 25 bp, Probe sequence
tagcatttggtgtaacgtttttaat

SEQ ID NO: 236042 - DNA, 25 bp, Probe sequence
tagcaattgtatttgttcctttttt

SEQ ID NO: 236043 - DNA, 25 bp, Probe sequence
tatggtttttatagtaggtttgatt

SEQ ID NO: 236044 - DNA, 25 bp, Probe sequence
ttttttactatttctaacaatagca

SEQ ID NO: 236045 - DNA, 25 bp, Probe sequence
ataaaccaacaagacgtggccaatt

SEQ ID NO: 236046 - DNA, 25 bp, Probe sequence
attctttacgacgaaccaatgataa

SEQ ID NO: 236047 - DNA, 25 bp, Probe sequence
attcatcttttatttcaaacattct

SEQ ID NO: 236048 - DNA, 25 bp, Probe sequence
attacaacaagcattttcacattat

SEQ ID NO: 236049 - DNA, 25 bp, Probe sequence
atagatatataaaaggggacggacg

SEQ ID NO: 236050 - DNA, 25 bp, Probe sequence
atggtttagaaactagacctatata

SEQ ID NO: 236051 - DNA, 25 bp, Probe sequence
agatcatgcagtgaatagactacat

SEQ ID NO: 236052 - DNA, 25 bp, Probe sequence
aaaccagttttatgctttatatgat

SEQ ID NO: 236053 - DNA, 25 bp, Probe sequence
aaactagacctatatatcaaacaga

SEQ ID NO: 236054 - DNA, 25 bp, Probe sequence
aacacctttacagacaagtattact

SEQ ID NO: 236055 - DNA, 25 bp, Probe sequence
aagcattttcacattatggtttaga

SEQ ID NO: 236056 - DNA, 25 bp, Probe sequence
aagacggttatatcagtggaggttt

SEQ ID NO: 236057 - DNA, 25 bp, Probe sequence
aaggttataacgactatcatcttag

SEQ ID NO: 236058 - DNA, 25 bp, Probe sequence
caaacattctttacgacgaaccaat

SEQ ID NO: 236059 - DNA, 25 bp, Probe sequence
gctggtcgtatattgtttcttcaag

SEQ ID NO: 236060 - DNA, 25 bp, Probe sequence
gctagcaaaaggcgaaatgagtaca

SEQ ID NO: 236061 - DNA, 25 bp, Probe sequence
gaatacttaaaccagttttatgctt

SEQ ID NO: 236062 - DNA, 25 bp, Probe sequence
gaagattcactaatagctggttttt

SEQ ID NO: 236063 - DNA, 25 bp, Probe sequence
gaagaatattcatcttttatttcaa

SEQ ID NO: 236064 - DNA, 25 bp, Probe sequence
gaaaatactgtagcacaattagatc

SEQ ID NO: 236065 - DNA, 25 bp, Probe sequence
gacgtggccaattaatagctggtcg

SEQ ID NO: 236066 - DNA, 25 bp, Probe sequence
gacctatatatcaaacagaatactt

SEQ ID NO: 236067 - DNA, 25 bp, Probe sequence
gaggcattacaacaagcattttcac

SEQ ID NO: 236068 - DNA, 25 bp, Probe sequence
gttgttactaaagacggttatatca

SEQ ID NO: 236069 - DNA, 25 bp, Probe sequence
gtagcacaattagatcatgcagtga

SEQ ID NO: 236070 - DNA, 25 bp, Probe sequence
gtggaggtttaaatattactggtgt

SEQ ID NO: 236071 - DNA, 25 bp, Probe sequence
gggacggacgtaatcaaagtattca

SEQ ID NO: 236072 - DNA, 25 bp, Probe sequence
ggtcgtatattgtttcttcaagaaa

SEQ ID NO: 236073 - DNA, 25 bp, Probe sequence
taacgactatcatcttagtaattag

SEQ ID NO: 236074 - DNA, 25 bp, Probe sequence
tagctggtcgtatattgtttcttca

SEQ ID NO: 236075 - DNA, 25 bp, Probe sequence
tagactacatgaaaagataaacctt

SEQ ID NO: 236076 - DNA, 25 bp, Probe sequence
tataaagattacgttgttactaaag

SEQ ID NO: 236077 - DNA, 25 bp, Probe sequence
ttatttcaaacattctttacgacga

SEQ ID NO: 236078 - DNA, 25 bp, Probe sequence
ttcactaatagctggtttttataaa

SEQ ID NO: 236079 - DNA, 25 bp, Probe sequence
atatattcagtttcttatgggacga

SEQ ID NO: 236080 - DNA, 25 bp, Probe sequence
atacacctacaaacgcaatgcgaga

SEQ ID NO: 236081 - DNA, 25 bp, Probe sequence
atcatttcatacagttcttccttta

SEQ ID NO: 236082 - DNA, 25 bp, Probe sequence
agtagttgactaccctcaatcagta

SEQ ID NO: 236083 - DNA, 25 bp, Probe sequence
acgaacacgaaagccaaattgacac

SEQ ID NO: 236084 - DNA, 25 bp, Probe sequence
acacctaatacatcagtttttggaa

SEQ ID NO: 236085 - DNA, 25 bp, Probe sequence
aaaatatggcggtggcgctattgcc

SEQ ID NO: 236086 - DNA, 25 bp, Probe sequence
aaaggacttaacacttatcatagaa

SEQ ID NO: 236087 - DNA, 25 bp, Probe sequence
aagacttaaaacacatacacctaca

SEQ ID NO: 236088 - DNA, 25 bp, Probe sequence
aacttcttatcagcatttacacaac

SEQ ID NO: 236089 - DNA, 25 bp, Probe sequence
aacgtaggcgttgatgatgttgttg

SEQ ID NO: 236090 - DNA, 25 bp, Probe sequence
aagcgaagattatccaactttaaca

SEQ ID NO: 236091 - DNA, 25 bp, Probe sequence
aagatgttcaaagtgcagcgtattt

SEQ ID NO: 236092 - DNA, 25 bp, Probe sequence
aatatctgtattatcttcaacttta

SEQ ID NO: 236093 - DNA, 25 bp, Probe sequence
caaattgacacattagttcgttcta

SEQ ID NO: 236094 - DNA, 25 bp, Probe sequence
ctttggaatggataacgtaggcgtt

SEQ ID NO: 236095 - DNA, 25 bp, Probe sequence
gtactactacaatctttgacggtta

SEQ ID NO: 236096 - DNA, 25 bp, Probe sequence
cgctattgcctctactcaacaaatt

SEQ ID NO: 236097 - DNA, 25 bp, Probe sequence
gcagggcatttctttatgtttgatg

SEQ ID NO: 236098 - DNA, 25 bp, Probe sequence
gaagaaccagcagacgtagagccga

SEQ ID NO: 236099 - DNA, 25 bp, Probe sequence
gaacaaatgcgtactacagacccta

SEQ ID NO: 236100 - DNA, 25 bp, Probe sequence
gacaatttatcattgatcccgaaga

SEQ ID NO: 236101 - DNA, 25 bp, Probe sequence
gactattatcggtacaagtggtgta

SEQ ID NO: 236102 - DNA, 25 bp, Probe sequence
gactgacgaattacatttcttagca

SEQ ID NO: 236103 - DNA, 25 bp, Probe sequence
gatagtatttatccttttagttgga

SEQ ID NO: 236104 - DNA, 25 bp, Probe sequence
gtatatcacgttaaatggcgattca

SEQ ID NO: 236105 - DNA, 25 bp, Probe sequence
gtagagccgaattatgttgaacaac

SEQ ID NO: 236106 - DNA, 25 bp, Probe sequence
gtggtgtaggtaaatctaccctcaa

SEQ ID NO: 236107 - DNA, 25 bp, Probe sequence
ggatacagcaacagcagggcatttc

SEQ ID NO: 236108 - DNA, 25 bp, Probe sequence
ggaacatggtactactacaatcttt

SEQ ID NO: 236109 - DNA, 25 bp, Probe sequence
ggcgaggcattattactatacggaa

SEQ ID NO: 236110 - DNA, 25 bp, Probe sequence
tgaccatttaaacaactcaatcaaa

SEQ ID NO: 236111 - DNA, 25 bp, Probe sequence
tacagaccctaaacgaaatgcaaca

SEQ ID NO: 236112 - DNA, 25 bp, Probe sequence
tagtcatactaaattcttctttgga

SEQ ID NO: 236113 - DNA, 25 bp, Probe sequence
atagcacaagcagacaaacaagaac

SEQ ID NO: 236114 - DNA, 25 bp, Probe sequence
atggcaatgttgatcaagcagttaa

SEQ ID NO: 236115 - DNA, 25 bp, Probe sequence
agcactcaaattatctttaatggat

SEQ ID NO: 236116 - DNA, 25 bp, Probe sequence
aacacaccttatgtaattgaacaat

SEQ ID NO: 236117 - DNA, 25 bp, Probe sequence
aacgtttggctttagcgtcagctaa

SEQ ID NO: 236118 - DNA, 25 bp, Probe sequence
aaccacttagaatatatcatcaatg

SEQ ID NO: 236119 - DNA, 25 bp, Probe sequence
aagacagcacgaaggataaagacaa

SEQ ID NO: 236120 - DNA, 25 bp, Probe sequence
aagagagttagctttcaattttgaa

SEQ ID NO: 236121 - DNA, 25 bp, Probe sequence
aatataactgttatgcacccagcga

SEQ ID NO: 236122 - DNA, 25 bp, Probe sequence
catcaatgttgatttgtgccatata

SEQ ID NO: 236123 - DNA, 25 bp, Probe sequence
gcagttaaaggcatgaaacgtgacg

SEQ ID NO: 236124 - DNA, 25 bp, Probe sequence
gaattgagtagtaaaaacacacctt

SEQ ID NO: 236125 - DNA, 25 bp, Probe sequence
gaatataattccttcctatcagcaa

SEQ ID NO: 236126 - DNA, 25 bp, Probe sequence
gaaggttatgttgaatcagctaaag

SEQ ID NO: 236127 - DNA, 25 bp, Probe sequence
gaacctaatgaattgttttttgaag

SEQ ID NO: 236128 - DNA, 25 bp, Probe sequence
gaacagcatttagtgtaggctcaac

SEQ ID NO: 236129 - DNA, 25 bp, Probe sequence
gaaaatctttacaatggcaatgttg

SEQ ID NO: 236130 - DNA, 25 bp, Probe sequence
gaaacgtgacgatagctttaacaaa

SEQ ID NO: 236131 - DNA, 25 bp, Probe sequence
gaaagcaaagcactcaaattatctt

SEQ ID NO: 236132 - DNA, 25 bp, Probe sequence
gacaaagacggaacagcatttagtg

SEQ ID NO: 236133 - DNA, 25 bp, Probe sequence
gagtacattatcacaatacacgttt

SEQ ID NO: 236134 - DNA, 25 bp, Probe sequence
gatatgacttaacagaacctaatga

SEQ ID NO: 236135 - DNA, 25 bp, Probe sequence
gatttgtgccatatatcagatatag

SEQ ID NO: 236136 - DNA, 25 bp, Probe sequence
gtaggaaaacataaccacttagaat

SEQ ID NO: 236137 - DNA, 25 bp, Probe sequence
gtacagacagattatttactgaatg

SEQ ID NO: 236138 - DNA, 25 bp, Probe sequence
gtaaacgtttggctttagcgtcagc

SEQ ID NO: 236139 - DNA, 25 bp, Probe sequence
gtgtaggctcaacaggtaaatacga

SEQ ID NO: 236140 - DNA, 25 bp, Probe sequence
ggaaggcgattattttcatatcatt

SEQ ID NO: 236141 - DNA, 25 bp, Probe sequence
ggccatgaatatttacctaaaccta

SEQ ID NO: 236142 - DNA, 25 bp, Probe sequence
tgcacccagcgaacctattttttaa

SEQ ID NO: 236143 - DNA, 25 bp, Probe sequence
taattccttcctatcagcaaaaaaa

SEQ ID NO: 236144 - DNA, 25 bp, Probe sequence
tacttggttttgttggtattgcaat

SEQ ID NO: 236145 - DNA, 25 bp, Probe sequence
tagcgtcagctaaagaaggttatgt

SEQ ID NO: 236146 - DNA, 25 bp, Probe sequence
tattttcatatcatttacaacactg

SEQ ID NO: 236147 - DNA, 25 bp, Probe sequence
aaccccctatctataatgggggctg

SEQ ID NO: 236148 - DNA, 25 bp, Probe sequence
aggtgcgtgtactggtggaagtgtt

SEQ ID NO: 236149 - DNA, 25 bp, Probe sequence
aggcgctagtaatgacccagatgac

SEQ ID NO: 236150 - DNA, 25 bp, Probe sequence
agtgttgacggttcgggtatctctg

SEQ ID NO: 236151 - DNA, 25 bp, Probe sequence
accaccaccgtatggacacatcatg

SEQ ID NO: 236152 - DNA, 25 bp, Probe sequence
acggtggaattgtagttagtgaggc

SEQ ID NO: 236153 - DNA, 25 bp, Probe sequence
aaatacgcaccagtaggcgctagta

SEQ ID NO: 236154 - DNA, 25 bp, Probe sequence
aaatcgggccaaaatacgcaccagt

SEQ ID NO: 236155 - DNA, 25 bp, Probe sequence
aaggcctaggagttataagttcaag

SEQ ID NO: 236156 - DNA, 25 bp, Probe sequence
aacacaacgtatgcaatttatttat

SEQ ID NO: 236157 - DNA, 25 bp, Probe sequence
aagcagtggtggaggttcagacgga

SEQ ID NO: 236158 - DNA, 25 bp, Probe sequence
aagcgcaaggctgggaagtaggtag

SEQ ID NO: 236159 - DNA, 25 bp, Probe sequence
ccatggggacagtgtacttggtatg

SEQ ID NO: 236160 - DNA, 25 bp, Probe sequence
cctctacaagtttacccttcaattg

SEQ ID NO: 236161 - DNA, 25 bp, Probe sequence
gccaaaggtggcgcattagaaggta

SEQ ID NO: 236162 - DNA, 25 bp, Probe sequence
gaatcaacagcaacaggtgcgtgta

SEQ ID NO: 236163 - DNA, 25 bp, Probe sequence
gaagtcattcggtggcaaagaggct

SEQ ID NO: 236164 - DNA, 25 bp, Probe sequence
gaagtaggtagtaagccgaaagctg

SEQ ID NO: 236165 - DNA, 25 bp, Probe sequence
gagaattccctaaacctgacaaatc

SEQ ID NO: 236166 - DNA, 25 bp, Probe sequence
gaggctaaatgttctactgaaagca

SEQ ID NO: 236167 - DNA, 25 bp, Probe sequence
gattgcttatctagtaggatctttc

SEQ ID NO: 236168 - DNA, 25 bp, Probe sequence
gttcgggtatctctgcttttgaaaa

SEQ ID NO: 236169 - DNA, 25 bp, Probe sequence
gtatggacacatcatgtttgtcgaa

SEQ ID NO: 236170 - DNA, 25 bp, Probe sequence
gggactggggcgataatgcaaaagc

SEQ ID NO: 236171 - DNA, 25 bp, Probe sequence
gggtacctacagttaagaaaatcat

SEQ ID NO: 236172 - DNA, 25 bp, Probe sequence
gggtaatggtggggactggggcgat

SEQ ID NO: 236173 - DNA, 25 bp, Probe sequence
tgtggagtgctattgctaaaggaat

SEQ ID NO: 236174 - DNA, 25 bp, Probe sequence
tctgaaggtttgacaactcccgaga

SEQ ID NO: 236175 - DNA, 25 bp, Probe sequence
taacggtcaatcttatccatgggga

SEQ ID NO: 236176 - DNA, 25 bp, Probe sequence
taatgggggctggccctctacaagt

SEQ ID NO: 236177 - DNA, 25 bp, Probe sequence
tacttggtatgtacatcaacgtaga

SEQ ID NO: 236178 - DNA, 25 bp, Probe sequence
tagcaattgtagcttctgagtcaga

SEQ ID NO: 236179 - DNA, 25 bp, Probe sequence
tagtaataggctttttccttcttat

SEQ ID NO: 236180 - DNA, 25 bp, Probe sequence
ttggcaaaccagtacctttaacttg

SEQ ID NO: 236181 - DNA, 25 bp, Probe sequence
attcactttggttctggctggttgt

SEQ ID NO: 236182 - DNA, 25 bp, Probe sequence
atcagcacaaactaaaggtgtaaaa

SEQ ID NO: 236183 - DNA, 25 bp, Probe sequence
agagaaaaactctgactactcaatg

SEQ ID NO: 236184 - DNA, 25 bp, Probe sequence
actttggttctggctggttgtggcc

SEQ ID NO: 236185 - DNA, 25 bp, Probe sequence
aaatcaatcagcacaaactaaaggt

SEQ ID NO: 236186 - DNA, 25 bp, Probe sequence
aaactctgactactcaatgagatat

SEQ ID NO: 236187 - DNA, 25 bp, Probe sequence
aaaaactctgactactcaatgagat

SEQ ID NO: 236188 - DNA, 25 bp, Probe sequence
aactatagttattttattcactttg

SEQ ID NO: 236189 - DNA, 25 bp, Probe sequence
aagacattaaactttatcaagacgt

SEQ ID NO: 236190 - DNA, 25 bp, Probe sequence
aagttgcaaaagcaagcagaattgc

SEQ ID NO: 236191 - DNA, 25 bp, Probe sequence
cactttggttctggctggttgtggc

SEQ ID NO: 236192 - DNA, 25 bp, Probe sequence
caagacgtagataatgatgatgaat

SEQ ID NO: 236193 - DNA, 25 bp, Probe sequence
cattaaactttatcaagacgtagat

SEQ ID NO: 236194 - DNA, 25 bp, Probe sequence
ctctgactactcaatgagatatggg

SEQ ID NO: 236195 - DNA, 25 bp, Probe sequence
gcagaattgcaaaatcaatcagcac

SEQ ID NO: 236196 - DNA, 25 bp, Probe sequence
gaaacgatatgataaaaggtctaat

SEQ ID NO: 236197 - DNA, 25 bp, Probe sequence
gataatgtcgaagaactaacacaaa

SEQ ID NO: 236198 - DNA, 25 bp, Probe sequence
gatactacagaagaaagaaacgata

SEQ ID NO: 236199 - DNA, 25 bp, Probe sequence
gatatattatctgaaaagttgcaaa

SEQ ID NO: 236200 - DNA, 25 bp, Probe sequence
gttctggctggttgtggccaaaatc

SEQ ID NO: 236201 - DNA, 25 bp, Probe sequence
gttattttattcactttggttctgg

SEQ ID NO: 236202 - DNA, 25 bp, Probe sequence
ggttgtggccaaaatcaaagtgaga

SEQ ID NO: 236203 - DNA, 25 bp, Probe sequence
tggttctggctggttgtggccaaaa

SEQ ID NO: 236204 - DNA, 25 bp, Probe sequence
ggctggttgtggccaaaatcaaagt

SEQ ID NO: 236205 - DNA, 25 bp, Probe sequence
tgatgatgaattgatttattctatt

SEQ ID NO: 236206 - DNA, 25 bp, Probe sequence
tctggctggttgtggccaaaatcaa

SEQ ID NO: 236207 - DNA, 25 bp, Probe sequence
tctattaaactttcaattacaaaca

SEQ ID NO: 236208 - DNA, 25 bp, Probe sequence
tttggttctggctggttgtggccaa

SEQ ID NO: 236209 - DNA, 25 bp, Probe sequence
ttttattcactttggttctggctgg

SEQ ID NO: 236210 - DNA, 25 bp, Probe sequence
tattttattcactttggttctggct

SEQ ID NO: 236211 - DNA, 25 bp, Probe sequence
tttattcactttggttctggctggt

SEQ ID NO: 236212 - DNA, 25 bp, Probe sequence
ttattcactttggttctggctggtt

SEQ ID NO: 236213 - DNA, 25 bp, Probe sequence
ttattctattaaactttcaattaca

SEQ ID NO: 236214 - DNA, 25 bp, Probe sequence
ttcactttggttctggctggttgtg

SEQ ID NO: 236215 - DNA, 25 bp, Probe sequence
attaacttatcacgtcatttcacta

SEQ ID NO: 236216 - DNA, 25 bp, Probe sequence
attttatgacttatcagctttacaa

SEQ ID NO: 236217 - DNA, 25 bp, Probe sequence
attttagcacatatcctatattgtt

SEQ ID NO: 236218 - DNA, 25 bp, Probe sequence
atagcaaaatgccctgcttgcgata

SEQ ID NO: 236219 - DNA, 25 bp, Probe sequence
ataacagcttgattaatccttctaa

SEQ ID NO: 236220 - DNA, 25 bp, Probe sequence
agcaatggacttaagcactgttttt

SEQ ID NO: 236221 - DNA, 25 bp, Probe sequence
acgtcatttcactaaaatttcacga

SEQ ID NO: 236222 - DNA, 25 bp, Probe sequence
aaaggtttaggcacaccagcaacta

SEQ ID NO: 236223 - DNA, 25 bp, Probe sequence
aaagtttcagcgactattaacaaag

SEQ ID NO: 236224 - DNA, 25 bp, Probe sequence
aacaaacttcaattttcattcgatt

SEQ ID NO: 236225 - DNA, 25 bp, Probe sequence
aagattgtggcttacttctaaagta

SEQ ID NO: 236226 - DNA, 25 bp, Probe sequence
caaaaccagacttaacaggacaatg

SEQ ID NO: 236227 - DNA, 25 bp, Probe sequence
ccctgcttgcgataatggctattta

SEQ ID NO: 236228 - DNA, 25 bp, Probe sequence
gcacaccagcaactagagccgatat

SEQ ID NO: 236229 - DNA, 25 bp, Probe sequence
gcaatggccaatcctatagaaacac

SEQ ID NO: 236230 - DNA, 25 bp, Probe sequence
gaagttattattgctactgacccag

SEQ ID NO: 236231 - DNA, 25 bp, Probe sequence
gaacattagaaatcgcacagacatt

SEQ ID NO: 236232 - DNA, 25 bp, Probe sequence
gaaaaaccttcacaagcaatggact

SEQ ID NO: 236233 - DNA, 25 bp, Probe sequence
gaaacgacacctccaaaaagatata

SEQ ID NO: 236234 - DNA, 25 bp, Probe sequence
gaaataggctatacaatgccaccta

SEQ ID NO: 236235 - DNA, 25 bp, Probe sequence
gaaattaatcacatatccaagaact

SEQ ID NO: 236236 - DNA, 25 bp, Probe sequence
gactactatagaaatcgctgttaaa

SEQ ID NO: 236237 - DNA, 25 bp, Probe sequence
gacggtgttattcatatcggtagag

SEQ ID NO: 236238 - DNA, 25 bp, Probe sequence
gagtatctagtcctacattaaacat

SEQ ID NO: 236239 - DNA, 25 bp, Probe sequence
gagggcagggctagagaattaagtg

SEQ ID NO: 236240 - DNA, 25 bp, Probe sequence
gatgaattgcacgaatttttgtttg

SEQ ID NO: 236241 - DNA, 25 bp, Probe sequence
gatgaaggcttaaagtctacactta

SEQ ID NO: 236242 - DNA, 25 bp, Probe sequence
gtatacctccaactgtagtaaaagc

SEQ ID NO: 236243 - DNA, 25 bp, Probe sequence
gtaagtggctttttaacttgggcag

SEQ ID NO: 236244 - DNA, 25 bp, Probe sequence
ggacatttactttcaaaaccagact

SEQ ID NO: 236245 - DNA, 25 bp, Probe sequence
taacggttgtgaatttactattcct

SEQ ID NO: 236246 - DNA, 25 bp, Probe sequence
tacaatgccacctaaattttatgac

SEQ ID NO: 236247 - DNA, 25 bp, Probe sequence
tactgacccagctagagaaggcgaa

SEQ ID NO: 236248 - DNA, 25 bp, Probe sequence
ttgggcagttggtcatttagtcgaa

SEQ ID NO: 236249 - DNA, 25 bp, Probe sequence
atttgagagcaaagacggaaacgaa

SEQ ID NO: 236250 - DNA, 25 bp, Probe sequence
atcacagttgtttatacctccagct

SEQ ID NO: 236251 - DNA, 25 bp, Probe sequence
atggttctcatggatcagctaaatt

SEQ ID NO: 236252 - DNA, 25 bp, Probe sequence
agcactattatcggttttgtatctg

SEQ ID NO: 236253 - DNA, 25 bp, Probe sequence
agcatatgctttaaatacactaagt

SEQ ID NO: 236254 - DNA, 25 bp, Probe sequence
acctccagctaaacacccaataagc

SEQ ID NO: 236255 - DNA, 25 bp, Probe sequence
acacccaataagcactattatcggt

SEQ ID NO: 236256 - DNA, 25 bp, Probe sequence
acagttgtttatacctccagctaaa

SEQ ID NO: 236257 - DNA, 25 bp, Probe sequence
aaacgacattacgaactatgtttat

SEQ ID NO: 236258 - DNA, 25 bp, Probe sequence
aaaattgctaaacatggttctcatg

SEQ ID NO: 236259 - DNA, 25 bp, Probe sequence
aacaattatttgtatatatattctt

SEQ ID NO: 236260 - DNA, 25 bp, Probe sequence
aactggtattatttggctagtatta

SEQ ID NO: 236261 - DNA, 25 bp, Probe sequence
aatacactaagtaatactagcaata

SEQ ID NO: 236262 - DNA, 25 bp, Probe sequence
cactattatcggttttgtatctgat

SEQ ID NO: 236263 - DNA, 25 bp, Probe sequence
cagtgttttttgtaataggtgtaat

SEQ ID NO: 236264 - DNA, 25 bp, Probe sequence
gtttatacctccagctaaacaccca

SEQ ID NO: 236265 - DNA, 25 bp, Probe sequence
gcgaattgttttcagaaggacatta

SEQ ID NO: 236266 - DNA, 25 bp, Probe sequence
gctaaacacccaataagcactatta

SEQ ID NO: 236267 - DNA, 25 bp, Probe sequence
gaatattcattttaactggtattat

SEQ ID NO: 236268 - DNA, 25 bp, Probe sequence
gaactatgtttataacagtttagat

SEQ ID NO: 236269 - DNA, 25 bp, Probe sequence
gaaagaaaacgacattacgaactat

SEQ ID NO: 236270 - DNA, 25 bp, Probe sequence
gatagcgaattgttttcagaaggac

SEQ ID NO: 236271 - DNA, 25 bp, Probe sequence
gatatatcacagttgtttatacctc

SEQ ID NO: 236272 - DNA, 25 bp, Probe sequence
gttctcatggatcagctaaatttgc

SEQ ID NO: 236273 - DNA, 25 bp, Probe sequence
ggtgtaatagcaacaattatttgta

SEQ ID NO: 236274 - DNA, 25 bp, Probe sequence
ggatcagctaaatttgccgaagata

SEQ ID NO: 236275 - DNA, 25 bp, Probe sequence
tccagctaaacacccaataagcact

SEQ ID NO: 236276 - DNA, 25 bp, Probe sequence
tcacagttgtttatacctccagcta

SEQ ID NO: 236277 - DNA, 25 bp, Probe sequence
tcatggatcagctaaatttgccgaa

SEQ ID NO: 236278 - DNA, 25 bp, Probe sequence
taagcactattatcggttttgtatc

SEQ ID NO: 236279 - DNA, 25 bp, Probe sequence
taaacatggttctcatggatcagct

SEQ ID NO: 236280 - DNA, 25 bp, Probe sequence
tagcgcaaatattagcatatgcttt

SEQ ID NO: 236281 - DNA, 25 bp, Probe sequence
tatcggttttgtatctgataaaaat

SEQ ID NO: 236282 - DNA, 25 bp, Probe sequence
tttgccgaagatagcgaattgtttt

SEQ ID NO: 236283 - DNA, 25 bp, Probe sequence
atatcggcgcaataccagactatga

SEQ ID NO: 236284 - DNA, 25 bp, Probe sequence
atagttgtaactgaccctagtggcg

SEQ ID NO: 236285 - DNA, 25 bp, Probe sequence
atagcacctcaaaacgaatacaaac

SEQ ID NO: 236286 - DNA, 25 bp, Probe sequence
atgactacacttttaggcgaattag

SEQ ID NO: 236287 - DNA, 25 bp, Probe sequence
agaccacccagctagagaaagttat

SEQ ID NO: 236288 - DNA, 25 bp, Probe sequence
agaaactttagcaacttgtcgtaag

SEQ ID NO: 236289 - DNA, 25 bp, Probe sequence
accacgcagttattttatgtttagg

SEQ ID NO: 236290 - DNA, 25 bp, Probe sequence
acgctattataggtaaccacgcagt

SEQ ID NO: 236291 - DNA, 25 bp, Probe sequence
aaattcattgcttttatacgctaaa

SEQ ID NO: 236292 - DNA, 25 bp, Probe sequence
aaaactttttagcctctgatagaca

SEQ ID NO: 236293 - DNA, 25 bp, Probe sequence
aacagaaacgtatatagcacctcaa

SEQ ID NO: 236294 - DNA, 25 bp, Probe sequence
aacgcatgcaaggttttgatgttag

SEQ ID NO: 236295 - DNA, 25 bp, Probe sequence
aagctacactggaagggcattacta

SEQ ID NO: 236296 - DNA, 25 bp, Probe sequence
aagcgattctgattttgatttacga

SEQ ID NO: 236297 - DNA, 25 bp, Probe sequence
aatgttgccagttttggggaacact

SEQ ID NO: 236298 - DNA, 25 bp, Probe sequence
ctgaccctagtggcgaagtttatga

SEQ ID NO: 236299 - DNA, 25 bp, Probe sequence
gattttttactagacgaatggccaa

SEQ ID NO: 236300 - DNA, 25 bp, Probe sequence
gacttccagtcccagtagatttttt

SEQ ID NO: 236301 - DNA, 25 bp, Probe sequence
gaattatctaaagaccacccagcta

SEQ ID NO: 236302 - DNA, 25 bp, Probe sequence
gaatttggttttgcagtatcagaag

SEQ ID NO: 236303 - DNA, 25 bp, Probe sequence
gaaaacggtgctagacttccagtcc

SEQ ID NO: 236304 - DNA, 25 bp, Probe sequence
gacgtatggtataaagcctctgtag

SEQ ID NO: 236305 - DNA, 25 bp, Probe sequence
gacgaatggccaaatatcggcgcaa

SEQ ID NO: 236306 - DNA, 25 bp, Probe sequence
gattttgatactaaatgccctaata

SEQ ID NO: 236307 - DNA, 25 bp, Probe sequence
gattctgattgttcaatagttgctg

SEQ ID NO: 236308 - DNA, 25 bp, Probe sequence
gttccaacagctatataggttaggg

SEQ ID NO: 236309 - DNA, 25 bp, Probe sequence
gttcaatctatatcacaagcagtag

SEQ ID NO: 236310 - DNA, 25 bp, Probe sequence
gtcagctgggtatgttattcctaat

SEQ ID NO: 236311 - DNA, 25 bp, Probe sequence
gggccaggttcctataagtcagctg

SEQ ID NO: 236312 - DNA, 25 bp, Probe sequence
gggaacactgttcaatcactttcta

SEQ ID NO: 236313 - DNA, 25 bp, Probe sequence
tcactttctagtttattcttctctc

SEQ ID NO: 236314 - DNA, 25 bp, Probe sequence
tactaacctttgtagccgatttacg

SEQ ID NO: 236315 - DNA, 25 bp, Probe sequence
tttgtggtaggagggccaggttcct

SEQ ID NO: 236316 - DNA, 25 bp, Probe sequence
ttcttctctcaaatgttccaacagc

SEQ ID NO: 236317 - DNA, 25 bp, Probe sequence
atataggtgtatggtggcgtgaatt

SEQ ID NO: 236318 - DNA, 25 bp, Probe sequence
atcgccttcctttattagatcaatg

SEQ ID NO: 236319 - DNA, 25 bp, Probe sequence
atggcaggtagtcaaattatgttta

SEQ ID NO: 236320 - DNA, 25 bp, Probe sequence
agggcatttttagatgtaggtcaaa

SEQ ID NO: 236321 - DNA, 25 bp, Probe sequence
agtggtgcaaaacttctagttagaa

SEQ ID NO: 236322 - DNA, 25 bp, Probe sequence
agtccaggctattatgtagcacaat

SEQ ID NO: 236323 - DNA, 25 bp, Probe sequence
agcacaattattaccaagttcttta

SEQ ID NO: 236324 - DNA, 25 bp, Probe sequence
aaacgcctctgtattagttaatagc

SEQ ID NO: 236325 - DNA, 25 bp, Probe sequence
aagacgctattaaagaactgaccga

SEQ ID NO: 236326 - DNA, 25 bp, Probe sequence
ctttggtgcaaagctagacgtaggc

SEQ ID NO: 236327 - DNA, 25 bp, Probe sequence
gaactgaccgaaggtattgcagacg

SEQ ID NO: 236328 - DNA, 25 bp, Probe sequence
gaaatgctaggttctatggggacta

SEQ ID NO: 236329 - DNA, 25 bp, Probe sequence
gactaaattatcttattcagcgact

SEQ ID NO: 236330 - DNA, 25 bp, Probe sequence
gacgtaggcacattattattaggta

SEQ ID NO: 236331 - DNA, 25 bp, Probe sequence
gatcaatggtttactctactggaag

SEQ ID NO: 236332 - DNA, 25 bp, Probe sequence
gttgccccgttagtagcagtttctt

SEQ ID NO: 236333 - DNA, 25 bp, Probe sequence
gttaatagcttaatcacttcaatag

SEQ ID NO: 236334 - DNA, 25 bp, Probe sequence
gttttaccatggctagttgatataa

SEQ ID NO: 236335 - DNA, 25 bp, Probe sequence
gtagcagtttctttattagcagatg

SEQ ID NO: 236336 - DNA, 25 bp, Probe sequence
gtgattacatttcaaacgcctctgt

SEQ ID NO: 236337 - DNA, 25 bp, Probe sequence
ggtaatgctgaaagtccaggctatt

SEQ ID NO: 236338 - DNA, 25 bp, Probe sequence
ggttctatggggactatggcaggta

SEQ ID NO: 236339 - DNA, 25 bp, Probe sequence
ggtagcagttttaccatggctagtt

SEQ ID NO: 236340 - DNA, 25 bp, Probe sequence
ggaatggctggaagtggtgcaaaac

SEQ ID NO: 236341 - DNA, 25 bp, Probe sequence
ggcgcatggcaactggaatggctgg

SEQ ID NO: 236342 - DNA, 25 bp, Probe sequence
tctactggaagtgggcgcatggcaa

SEQ ID NO: 236343 - DNA, 25 bp, Probe sequence
tcttattcagcgactagggcatttt

SEQ ID NO: 236344 - DNA, 25 bp, Probe sequence
taatgaaagttgttgccccgttagt

SEQ ID NO: 236345 - DNA, 25 bp, Probe sequence
tacaagtgtttactttctttggagg

SEQ ID NO: 236346 - DNA, 25 bp, Probe sequence
tatggtggcgtgaattattagcaat

SEQ ID NO: 236347 - DNA, 25 bp, Probe sequence
tatgtttattctatttattctattg

SEQ ID NO: 236348 - DNA, 25 bp, Probe sequence
tatttcagtttctttatacgttatt

SEQ ID NO: 236349 - DNA, 25 bp, Probe sequence
tattacagttaaatcgccttccttt

SEQ ID NO: 236350 - DNA, 25 bp, Probe sequence
ttcaattaccattacaagtgtttac

SEQ ID NO: 236351 - DNA, 25 bp, Probe sequence
atatcgccgaaatcatcttatttat

SEQ ID NO: 236352 - DNA, 25 bp, Probe sequence
atcgtatacgtatcacatcaccaat

SEQ ID NO: 236353 - DNA, 25 bp, Probe sequence
atgctttattatcacggtattgcct

SEQ ID NO: 236354 - DNA, 25 bp, Probe sequence
actgcagtggttagctatcgacaaa

SEQ ID NO: 236355 - DNA, 25 bp, Probe sequence
actcaagtttatggtgcgttaggtg

SEQ ID NO: 236356 - DNA, 25 bp, Probe sequence
aaagcaatttttagctgtagcgatt

SEQ ID NO: 236357 - DNA, 25 bp, Probe sequence
aacgactatgaattttatgcgatgg

SEQ ID NO: 236358 - DNA, 25 bp, Probe sequence
aaggcttaatggcacagtactatgg

SEQ ID NO: 236359 - DNA, 25 bp, Probe sequence
aatgcagcgcaaattacggattggt

SEQ ID NO: 236360 - DNA, 25 bp, Probe sequence
cccaccagcaacacctgagacattt

SEQ ID NO: 236361 - DNA, 25 bp, Probe sequence
gcttcacacctgacattaaagccaa

SEQ ID NO: 236362 - DNA, 25 bp, Probe sequence
gaagggcatcagtatcatccaagtt

SEQ ID NO: 236363 - DNA, 25 bp, Probe sequence
gacacatagctttgatcgtatacgt

SEQ ID NO: 236364 - DNA, 25 bp, Probe sequence
gacacgtcgattattaagtgactcc

SEQ ID NO: 236365 - DNA, 25 bp, Probe sequence
gactccgagttaagaattcatcatg

SEQ ID NO: 236366 - DNA, 25 bp, Probe sequence
gagcgtgtcgtaggagatgaggcag

SEQ ID NO: 236367 - DNA, 25 bp, Probe sequence
gaggcgtatcaagaagcatttccag

SEQ ID NO: 236368 - DNA, 25 bp, Probe sequence
gatgaggcagatacaacaacagact

SEQ ID NO: 236369 - DNA, 25 bp, Probe sequence
gatgcgataccatttaatgcacttt

SEQ ID NO: 236370 - DNA, 25 bp, Probe sequence
gattcagagtatcgttttactgctg

SEQ ID NO: 236371 - DNA, 25 bp, Probe sequence
gttgagatgatacctgtacacccat

SEQ ID NO: 236372 - DNA, 25 bp, Probe sequence
gtatcgagaatcaaacccaccagca

SEQ ID NO: 236373 - DNA, 25 bp, Probe sequence
gtagcgattcgtccaatgattcata

SEQ ID NO: 236374 - DNA, 25 bp, Probe sequence
ggggaagtcttaggacagtcttatt

SEQ ID NO: 236375 - DNA, 25 bp, Probe sequence
ggtgcgttaggtgttatatggcgtg

SEQ ID NO: 236376 - DNA, 25 bp, Probe sequence
ggtgttcgttttaagcgtgagcatt

SEQ ID NO: 236377 - DNA, 25 bp, Probe sequence
ggtattgcctttgaatcgcatgcac

SEQ ID NO: 236378 - DNA, 25 bp, Probe sequence
ggttggcctacacgtattgccttaa

SEQ ID NO: 236379 - DNA, 25 bp, Probe sequence
tgtacacccatggcagtttgaacat

SEQ ID NO: 236380 - DNA, 25 bp, Probe sequence
tcgattcgtacgatgtcgccaatag

SEQ ID NO: 236381 - DNA, 25 bp, Probe sequence
tcacatcaccaattgagcgtgtcgt

SEQ ID NO: 236382 - DNA, 25 bp, Probe sequence
tcatccaagttacaaatcacgttta

SEQ ID NO: 236383 - DNA, 25 bp, Probe sequence
taaatacacaactttcgccttataa

SEQ ID NO: 236384 - DNA, 25 bp, Probe sequence
tacatgatgcatttttctttattaa

SEQ ID NO: 236385 - DNA, 25 bp, Probe sequence
attacaaactattcagctaagccat

SEQ ID NO: 236386 - DNA, 25 bp, Probe sequence
attacgtaagatgactatttctaga

SEQ ID NO: 236387 - DNA, 25 bp, Probe sequence
atttgcttcaaatgcgacatacgaa

SEQ ID NO: 236388 - DNA, 25 bp, Probe sequence
atatctgttggcttggagtaataaa

SEQ ID NO: 236389 - DNA, 25 bp, Probe sequence
agtgtacgagggagatattgataac

SEQ ID NO: 236390 - DNA, 25 bp, Probe sequence
agcaaattcaatttcaacaacggaa

SEQ ID NO: 236391 - DNA, 25 bp, Probe sequence
actagatatccagtgtacgagggag

SEQ ID NO: 236392 - DNA, 25 bp, Probe sequence
acatttagcaattgtgttggacgaa

SEQ ID NO: 236393 - DNA, 25 bp, Probe sequence
aaaactttctcaacagcaaattcaa

SEQ ID NO: 236394 - DNA, 25 bp, Probe sequence
aaaactgaagctgacaaaggtgata

SEQ ID NO: 236395 - DNA, 25 bp, Probe sequence
aacggttatgaataagccatacact

SEQ ID NO: 236396 - DNA, 25 bp, Probe sequence
aattgctggacatgaaggtgcttta

SEQ ID NO: 236397 - DNA, 25 bp, Probe sequence
caacctcaagaacatcaattttcaa

SEQ ID NO: 236398 - DNA, 25 bp, Probe sequence
caacacctagaattaatgtgacggc

SEQ ID NO: 236399 - DNA, 25 bp, Probe sequence
cacttgttacaattatggctttacg

SEQ ID NO: 236400 - DNA, 25 bp, Probe sequence
gttgacggacagtattaatcgaagt

SEQ ID NO: 236401 - DNA, 25 bp, Probe sequence
ctaattgggaataatgtcgcgaata

SEQ ID NO: 236402 - DNA, 25 bp, Probe sequence
cgaagtgattcccaagtctgtcgct

SEQ ID NO: 236403 - DNA, 25 bp, Probe sequence
gcatcagctgttttaacagttgtta

SEQ ID NO: 236404 - DNA, 25 bp, Probe sequence
gaatattttattaccaacacttgtt

SEQ ID NO: 236405 - DNA, 25 bp, Probe sequence
gacggcattaacggctgccaataaa

SEQ ID NO: 236406 - DNA, 25 bp, Probe sequence
gaagcgagacggcattaacggctgc

SEQ ID NO: 236407 - DNA, 25 bp, Probe sequence
gaagcgatagtgtcacatgaagact

SEQ ID NO: 236408 - DNA, 25 bp, Probe sequence
gagtaggttggaaggtgtcattaat

SEQ ID NO: 236409 - DNA, 25 bp, Probe sequence
ggaaaaatcgcaacgtatctatata

SEQ ID NO: 236410 - DNA, 25 bp, Probe sequence
tcattctaaatatctgttggcttgg

SEQ ID NO: 236411 - DNA, 25 bp, Probe sequence
taatgtgacggcatttgcttcaaat

SEQ ID NO: 236412 - DNA, 25 bp, Probe sequence
taacaaggcttgtatatccaattat

SEQ ID NO: 236413 - DNA, 25 bp, Probe sequence
taaagctgaatgggtattacgtaag

SEQ ID NO: 236414 - DNA, 25 bp, Probe sequence
tattcagctaagccattatttgtga

SEQ ID NO: 236415 - DNA, 25 bp, Probe sequence
tattgatatttatttcgtttttctt

SEQ ID NO: 236416 - DNA, 25 bp, Probe sequence
ttttcttttcaggaagcgagacggc

SEQ ID NO: 236417 - DNA, 25 bp, Probe sequence
ttgtgttggacgaatttggtggtac

SEQ ID NO: 236418 - DNA, 25 bp, Probe sequence
ttatggctttacgttgggggattag

SEQ ID NO: 236419 - DNA, 25 bp, Probe sequence
atatagtggacgtatcgcaactgat

SEQ ID NO: 236420 - DNA, 25 bp, Probe sequence
atagtggacgtatcgcaactgattt

SEQ ID NO: 236421 - DNA, 25 bp, Probe sequence
atagctgtacctaggcagtttgata

SEQ ID NO: 236422 - DNA, 25 bp, Probe sequence
ataagcccagcagaagatagtggca

SEQ ID NO: 236423 - DNA, 25 bp, Probe sequence
atgacgtgtcagaagatgacgctat

SEQ ID NO: 236424 - DNA, 25 bp, Probe sequence
atgtttggttgaaaagactatcttt

SEQ ID NO: 236425 - DNA, 25 bp, Probe sequence
agcagaaagtttagttgattatcaa

SEQ ID NO: 236426 - DNA, 25 bp, Probe sequence
agctgtacctaggcagtttgataat

SEQ ID NO: 236427 - DNA, 25 bp, Probe sequence
aacatagctgtacctaggcagtttg

SEQ ID NO: 236428 - DNA, 25 bp, Probe sequence
aagatgacgctataagcccagcaga

SEQ ID NO: 236429 - DNA, 25 bp, Probe sequence
aagtcttatgttttctttaacatag

SEQ ID NO: 236430 - DNA, 25 bp, Probe sequence
aatctaattattattgaaggttcaa

SEQ ID NO: 236431 - DNA, 25 bp, Probe sequence
aatctatctctgatgatgacttacc

SEQ ID NO: 236432 - DNA, 25 bp, Probe sequence
gcccagcagaagatagtggcaacga

SEQ ID NO: 236433 - DNA, 25 bp, Probe sequence
gaagatgacgctataagcccagcag

SEQ ID NO: 236434 - DNA, 25 bp, Probe sequence
gaaaacaaaaaacatgacgtgtcag

SEQ ID NO: 236435 - DNA, 25 bp, Probe sequence
gacgctataagcccagcagaagata

SEQ ID NO: 236436 - DNA, 25 bp, Probe sequence
gacgtatcgcaactgatttaaaatt

SEQ ID NO: 236437 - DNA, 25 bp, Probe sequence
gatgacgctataagcccagcagaag

SEQ ID NO: 236438 - DNA, 25 bp, Probe sequence
gataaatctatctctgatgatgact

SEQ ID NO: 236439 - DNA, 25 bp, Probe sequence
gattttattaattgtgttgtatggg

SEQ ID NO: 236440 - DNA, 25 bp, Probe sequence
gttttctttaacatagctgtaccta

SEQ ID NO: 236441 - DNA, 25 bp, Probe sequence
gtacctaggcagtttgataatgata

SEQ ID NO: 236442 - DNA, 25 bp, Probe sequence
gtaatatatagtggacgtatcgcaa

SEQ ID NO: 236443 - DNA, 25 bp, Probe sequence
gtgttgtatggggaaaacaagcaga

SEQ ID NO: 236444 - DNA, 25 bp, Probe sequence
gtggacgtatcgcaactgatttaaa

SEQ ID NO: 236445 - DNA, 25 bp, Probe sequence
gtggcaacgataaatctatctctga

SEQ ID NO: 236446 - DNA, 25 bp, Probe sequence
ggcaacgataaatctatctctgatg

SEQ ID NO: 236447 - DNA, 25 bp, Probe sequence
ggcagtttgataatgatagaacaga

SEQ ID NO: 236448 - DNA, 25 bp, Probe sequence
tgaaggttcaactgaaacatataaa

SEQ ID NO: 236449 - DNA, 25 bp, Probe sequence
taatatgtctagatgtttggttgaa

SEQ ID NO: 236450 - DNA, 25 bp, Probe sequence
ttctttaacatagctgtacctaggc

SEQ ID NO: 236451 - DNA, 25 bp, Probe sequence
ttattaattgtgttgtatggggaaa

SEQ ID NO: 236452 - DNA, 25 bp, Probe sequence
ttaacatagctgtacctaggcagtt

SEQ ID NO: 236453 - DNA, 25 bp, Probe sequence
attagcttcacaatggttacaggtt

SEQ ID NO: 236454 - DNA, 25 bp, Probe sequence
attatgtatttctttggtcatccat

SEQ ID NO: 236455 - DNA, 25 bp, Probe sequence
atagttgtctatttgttaattccca

SEQ ID NO: 236456 - DNA, 25 bp, Probe sequence
atagctattcgatttttacttggta

SEQ ID NO: 236457 - DNA, 25 bp, Probe sequence
atactctcttgttttagctggcttt

SEQ ID NO: 236458 - DNA, 25 bp, Probe sequence
atgcagctgctgttgaagagtctat

SEQ ID NO: 236459 - DNA, 25 bp, Probe sequence
agtgcagagttcgtaatagctattc

SEQ ID NO: 236460 - DNA, 25 bp, Probe sequence
agagagttagagccttctggtaccc

SEQ ID NO: 236461 - DNA, 25 bp, Probe sequence
agatatttcatctttttcatcaaaa

SEQ ID NO: 236462 - DNA, 25 bp, Probe sequence
agcagtacttggtagcctatcttct

SEQ ID NO: 236463 - DNA, 25 bp, Probe sequence
agctggcttatacctattacctatg

SEQ ID NO: 236464 - DNA, 25 bp, Probe sequence
agccttctggtacccaacagttatg

SEQ ID NO: 236465 - DNA, 25 bp, Probe sequence
aagagatcattttcagctggtacaa

SEQ ID NO: 236466 - DNA, 25 bp, Probe sequence
aattccattgagtgcctttgctgat

SEQ ID NO: 236467 - DNA, 25 bp, Probe sequence
caattgcacccggattagcggcgcg

SEQ ID NO: 236468 - DNA, 25 bp, Probe sequence
caggtgctttaataatgccaactac

SEQ ID NO: 236469 - DNA, 25 bp, Probe sequence
ctggatttgctttatttggcctcgt

SEQ ID NO: 236470 - DNA, 25 bp, Probe sequence
cctatcttctatgctttatcgtgta

SEQ ID NO: 236471 - DNA, 25 bp, Probe sequence
gcttcactagcagttgcatctgctc

SEQ ID NO: 236472 - DNA, 25 bp, Probe sequence
gcttgcaaacgaggctgtaacatca

SEQ ID NO: 236473 - DNA, 25 bp, Probe sequence
gcagccattggcatgtttattatgt

SEQ ID NO: 236474 - DNA, 25 bp, Probe sequence
gcaattttcatggcactcggcattt

SEQ ID NO: 236475 - DNA, 25 bp, Probe sequence
gaagaatctgtagtgggcgctgtcg

SEQ ID NO: 236476 - DNA, 25 bp, Probe sequence
gaactttctccttttaaagctggct

SEQ ID NO: 236477 - DNA, 25 bp, Probe sequence
gaaagggccactgcattagctgtat

SEQ ID NO: 236478 - DNA, 25 bp, Probe sequence
gactagcagatattattccatgggt

SEQ ID NO: 236479 - DNA, 25 bp, Probe sequence
gataggtgctgtttttggaccaatt

SEQ ID NO: 236480 - DNA, 25 bp, Probe sequence
gtagcaactgctttagtaggtggga

SEQ ID NO: 236481 - DNA, 25 bp, Probe sequence
gtctcactcgtgggatattccttct

SEQ ID NO: 236482 - DNA, 25 bp, Probe sequence
gggcgctgtcgaagtagctaaagct

SEQ ID NO: 236483 - DNA, 25 bp, Probe sequence
ggtcatccattatcatattctacaa

SEQ ID NO: 236484 - DNA, 25 bp, Probe sequence
tggtgtttgcaccaattgcacccgg

SEQ ID NO: 236485 - DNA, 25 bp, Probe sequence
tagcggcgcgatttggaccgaaaat

SEQ ID NO: 236486 - DNA, 25 bp, Probe sequence
ttggcctcgtttcattagctatatt

SEQ ID NO: 236487 - DNA, 25 bp, Probe sequence
aggtttatcgaagaaatgtcccaat

SEQ ID NO: 236488 - DNA, 25 bp, Probe sequence
atcccagattatccaatacaaaatg

SEQ ID NO: 236489 - DNA, 25 bp, Probe sequence
atggttaaaaccttatcgacgcgca

SEQ ID NO: 236490 - DNA, 25 bp, Probe sequence
aggtgcagaaggggtacaaatgggc

SEQ ID NO: 236491 - DNA, 25 bp, Probe sequence
agatgtcgtttcaattccggtcatt

SEQ ID NO: 236492 - DNA, 25 bp, Probe sequence
aaatcaattacctatggttggaaca

SEQ ID NO: 236493 - DNA, 25 bp, Probe sequence
aaagcaagtgcctgtatgttgtttt

SEQ ID NO: 236494 - DNA, 25 bp, Probe sequence
aaccttatcgacgcgcattacattt

SEQ ID NO: 236495 - DNA, 25 bp, Probe sequence
aagaaatgtcccaatacgaaggcga

SEQ ID NO: 236496 - DNA, 25 bp, Probe sequence
aatagattatgtacgccaattaacg

SEQ ID NO: 236497 - DNA, 25 bp, Probe sequence
cgcgcattacatttagaagagccgg

SEQ ID NO: 236498 - DNA, 25 bp, Probe sequence
gcctgtatgttgttttacttttgga

SEQ ID NO: 236499 - DNA, 25 bp, Probe sequence
gcaggttactttaatacgcagcaat

SEQ ID NO: 236500 - DNA, 25 bp, Probe sequence
gcaaacatcggcgacaaagagttaa

SEQ ID NO: 236501 - DNA, 25 bp, Probe sequence
gaatatccaattatacaagcaggta

SEQ ID NO: 236502 - DNA, 25 bp, Probe sequence
gacaccgaaattagttgcatcagta

SEQ ID NO: 236503 - DNA, 25 bp, Probe sequence
gaggagttttggcaagtattgtctt

SEQ ID NO: 236504 - DNA, 25 bp, Probe sequence
gatgctatcgttgctcaaggtagtg

SEQ ID NO: 236505 - DNA, 25 bp, Probe sequence
gtatggcaggaagtacgacaccgaa

SEQ ID NO: 236506 - DNA, 25 bp, Probe sequence
gtacgccaattaacgtcaaattctt

SEQ ID NO: 236507 - DNA, 25 bp, Probe sequence
gtaaatgtctttgtaccaagtcaac

SEQ ID NO: 236508 - DNA, 25 bp, Probe sequence
ggtggacatcgtggttcatttttaa

SEQ ID NO: 236509 - DNA, 25 bp, Probe sequence
ggtatggatgctatcgttgctcaag

SEQ ID NO: 236510 - DNA, 25 bp, Probe sequence
ggtagtgaagcaggtggacatcgtg

SEQ ID NO: 236511 - DNA, 25 bp, Probe sequence
ggaacaatatctttagtgccacaaa

SEQ ID NO: 236512 - DNA, 25 bp, Probe sequence
ggcaagtattgtcttaggtgcagaa

SEQ ID NO: 236513 - DNA, 25 bp, Probe sequence
tggaaagcttgcacgcggtatcaac

SEQ ID NO: 236514 - DNA, 25 bp, Probe sequence
tgcacgcggtatcaacaataggttt

SEQ ID NO: 236515 - DNA, 25 bp, Probe sequence
tgccacaaattgtagatgtcgtttc

SEQ ID NO: 236516 - DNA, 25 bp, Probe sequence
tccggtcattgccgctggtggaatt

SEQ ID NO: 236517 - DNA, 25 bp, Probe sequence
tcattgccgctggtggaattatgga

SEQ ID NO: 236518 - DNA, 25 bp, Probe sequence
taggcacaataggcgcaggttactt

SEQ ID NO: 236519 - DNA, 25 bp, Probe sequence
tatgtggagtggacaaagcccgcga

SEQ ID NO: 236520 - DNA, 25 bp, Probe sequence
ttgcatcagtaagtaacagtggtgg

SEQ ID NO: 236521 - DNA, 25 bp, Probe sequence
attcttttactactttgtaatatgt

SEQ ID NO: 236522 - DNA, 25 bp, Probe sequence
atatacactgacaattttaatttac

SEQ ID NO: 236523 - DNA, 25 bp, Probe sequence
atagttgccttgattataatgataa

SEQ ID NO: 236524 - DNA, 25 bp, Probe sequence
ataactatatttttaggagcactag

SEQ ID NO: 236525 - DNA, 25 bp, Probe sequence
agatcgttcgaggttattttattag

SEQ ID NO: 236526 - DNA, 25 bp, Probe sequence
actagcttgttatgtaacgagtgtc

SEQ ID NO: 236527 - DNA, 25 bp, Probe sequence
actagtagcaactttcatctatttt

SEQ ID NO: 236528 - DNA, 25 bp, Probe sequence
acattagcttttcctgcatatttat

SEQ ID NO: 236529 - DNA, 25 bp, Probe sequence
acagtgattatagttgccttgatta

SEQ ID NO: 236530 - DNA, 25 bp, Probe sequence
acagtataggtattattattctttt

SEQ ID NO: 236531 - DNA, 25 bp, Probe sequence
aaaaattagcagatcgttcgaggtt

SEQ ID NO: 236532 - DNA, 25 bp, Probe sequence
aaatgtcaattttatctggagatta

SEQ ID NO: 236533 - DNA, 25 bp, Probe sequence
aatgatatttgatcttataattgga

SEQ ID NO: 236534 - DNA, 25 bp, Probe sequence
ctttcatctattttataagttacat

SEQ ID NO: 236535 - DNA, 25 bp, Probe sequence
gcttttcctgcatatttattaaaaa

SEQ ID NO: 236536 - DNA, 25 bp, Probe sequence
gcttaacattagcttttcctgcata

SEQ ID NO: 236537 - DNA, 25 bp, Probe sequence
gcactagtagcaactttcatctatt

SEQ ID NO: 236538 - DNA, 25 bp, Probe sequence
gaattgaacgagagatactggtgaa

SEQ ID NO: 236539 - DNA, 25 bp, Probe sequence
gaattaattacattatgcttaacat

SEQ ID NO: 236540 - DNA, 25 bp, Probe sequence
gacaattttaatttacagtataggt

SEQ ID NO: 236541 - DNA, 25 bp, Probe sequence
gtagcaactttcatctattttataa

SEQ ID NO: 236542 - DNA, 25 bp, Probe sequence
gtaaaatcaaaatctgtgacaaaga

SEQ ID NO: 236543 - DNA, 25 bp, Probe sequence
gtgtcacagtgattatagttgcctt

SEQ ID NO: 236544 - DNA, 25 bp, Probe sequence
ggagcactagtagcaactttcatct

SEQ ID NO: 236545 - DNA, 25 bp, Probe sequence
tcgttcgaggttattttattagagg

SEQ ID NO: 236546 - DNA, 25 bp, Probe sequence
tgttatgtaacgagtgtcacagtga

SEQ ID NO: 236547 - DNA, 25 bp, Probe sequence
tctggagattactagcttgttatgt

SEQ ID NO: 236548 - DNA, 25 bp, Probe sequence
taacattagcttttcctgcatattt

SEQ ID NO: 236549 - DNA, 25 bp, Probe sequence
tatgttaagttatggaattggtgaa

SEQ ID NO: 236550 - DNA, 25 bp, Probe sequence
tatgcttaacattagcttttcctgc

SEQ ID NO: 236551 - DNA, 25 bp, Probe sequence
tattattattcttttactactttgt

SEQ ID NO: 236552 - DNA, 25 bp, Probe sequence
ttatctggagattactagcttgtta

SEQ ID NO: 236553 - DNA, 25 bp, Probe sequence
ttagcttttcctgcatatttattaa

SEQ ID NO: 236554 - DNA, 25 bp, Probe sequence
ttggattactattaaattttcaaat

SEQ ID NO: 236555 - DNA, 25 bp, Probe sequence
atcaagctgaagatcgccgaaagat

SEQ ID NO: 236556 - DNA, 25 bp, Probe sequence
atcaaacgaaaacatcaagctgaag

SEQ ID NO: 236557 - DNA, 25 bp, Probe sequence
atcgccgaaagattttaatcaagca

SEQ ID NO: 236558 - DNA, 25 bp, Probe sequence
agatcgccgaaagattttaatcaag

SEQ ID NO: 236559 - DNA, 25 bp, Probe sequence
agctgaagatcgccgaaagatttta

SEQ ID NO: 236560 - DNA, 25 bp, Probe sequence
acgaaaacatcaagctgaagatcgc

SEQ ID NO: 236561 - DNA, 25 bp, Probe sequence
acatcaagctgaagatcgccgaaag

SEQ ID NO: 236562 - DNA, 25 bp, Probe sequence
aaacgaaaacatcaagctgaagatc

SEQ ID NO: 236563 - DNA, 25 bp, Probe sequence
aaacatcaagctgaagatcgccgaa

SEQ ID NO: 236564 - DNA, 25 bp, Probe sequence
aaaacatcaagctgaagatcgccga

SEQ ID NO: 236565 - DNA, 25 bp, Probe sequence
aacatcaagctgaagatcgccgaaa

SEQ ID NO: 236566 - DNA, 25 bp, Probe sequence
aagctgaagatcgccgaaagatttt

SEQ ID NO: 236567 - DNA, 25 bp, Probe sequence
aagatcgccgaaagattttaatcaa

SEQ ID NO: 236568 - DNA, 25 bp, Probe sequence
aatcaaacgaaaacatcaagctgaa

SEQ ID NO: 236569 - DNA, 25 bp, Probe sequence
caagctgaagatcgccgaaagattt

SEQ ID NO: 236570 - DNA, 25 bp, Probe sequence
catcaagctgaagatcgccgaaaga

SEQ ID NO: 236571 - DNA, 25 bp, Probe sequence
ctgaagatcgccgaaagattttaat

SEQ ID NO: 236572 - DNA, 25 bp, Probe sequence
cgaaaacatcaagctgaagatcgcc

SEQ ID NO: 236573 - DNA, 25 bp, Probe sequence
cgccgaaagattttaatcaagcaaa

SEQ ID NO: 236574 - DNA, 25 bp, Probe sequence
gccgaaagattttaatcaagcaaaa

SEQ ID NO: 236575 - DNA, 25 bp, Probe sequence
gctgaagatcgccgaaagattttaa

SEQ ID NO: 236576 - DNA, 25 bp, Probe sequence
gcaaaaacatcaaactaaagttcgc

SEQ ID NO: 236577 - DNA, 25 bp, Probe sequence
gaagatcgccgaaagattttaatca

SEQ ID NO: 236578 - DNA, 25 bp, Probe sequence
gaaaacatcaagctgaagatcgccg

SEQ ID NO: 236579 - DNA, 25 bp, Probe sequence
gatcgccgaaagattttaatcaagc

SEQ ID NO: 236580 - DNA, 25 bp, Probe sequence
tgaagatcgccgaaagattttaatc

SEQ ID NO: 236581 - DNA, 25 bp, Probe sequence
tgcgtttctattttaccaatttaat

SEQ ID NO: 236582 - DNA, 25 bp, Probe sequence
tcgccgaaagattttaatcaagcaa

SEQ ID NO: 236583 - DNA, 25 bp, Probe sequence
tctattttaccaatttaatcaaacg

SEQ ID NO: 236584 - DNA, 25 bp, Probe sequence
tcaagctgaagatcgccgaaagatt

SEQ ID NO: 236585 - DNA, 25 bp, Probe sequence
tcaaacgaaaacatcaagctgaaga

SEQ ID NO: 236586 - DNA, 25 bp, Probe sequence
taatcaaacgaaaacatcaagctga

SEQ ID NO: 236587 - DNA, 25 bp, Probe sequence
taccaatttaatcaaacgaaaacat

SEQ ID NO: 236588 - DNA, 25 bp, Probe sequence
ttaatcaaacgaaaacatcaagctg

SEQ ID NO: 236589 - DNA, 25 bp, Probe sequence
atagtgataatacagcaaacaataa

SEQ ID NO: 236590 - DNA, 25 bp, Probe sequence
ataacatatgcttctagaaatgatg

SEQ ID NO: 236591 - DNA, 25 bp, Probe sequence
atcctaagggccaatctgaacctat

SEQ ID NO: 236592 - DNA, 25 bp, Probe sequence
aggagataaagtaacaaatccagtt

SEQ ID NO: 236593 - DNA, 25 bp, Probe sequence
agatgatatagttgcttattctcct

SEQ ID NO: 236594 - DNA, 25 bp, Probe sequence
aaatagtgctattttgttagaacaa

SEQ ID NO: 236595 - DNA, 25 bp, Probe sequence
aaagtgataagccaaatgataagtt

SEQ ID NO: 236596 - DNA, 25 bp, Probe sequence
aaaccgccaagagtgtaatgaagga

SEQ ID NO: 236597 - DNA, 25 bp, Probe sequence
aaaagtggtcaagcaataacatatg

SEQ ID NO: 236598 - DNA, 25 bp, Probe sequence
aagtgaaaccgccaagagtgtaatg

SEQ ID NO: 236599 - DNA, 25 bp, Probe sequence
aagggccaatctgaacctattgttt

SEQ ID NO: 236600 - DNA, 25 bp, Probe sequence
aatctgaacctattgttttagtcat

SEQ ID NO: 236601 - DNA, 25 bp, Probe sequence
ccgccaagagtgtaatgaaggaatt

SEQ ID NO: 236602 - DNA, 25 bp, Probe sequence
cctaagggccaatctgaacctattg

SEQ ID NO: 236603 - DNA, 25 bp, Probe sequence
gcttttgtttatcctaagggccaat

SEQ ID NO: 236604 - DNA, 25 bp, Probe sequence
gctttagttttaagtgcatgtaatt

SEQ ID NO: 236605 - DNA, 25 bp, Probe sequence
gcttattctcctattttagaaaaat

SEQ ID NO: 236606 - DNA, 25 bp, Probe sequence
gataagtgaaaccgccaagagtgta

SEQ ID NO: 236607 - DNA, 25 bp, Probe sequence
gataagttgataagtgaaaccgcca

SEQ ID NO: 236608 - DNA, 25 bp, Probe sequence
gatatagttgcttattctcctattt

SEQ ID NO: 236609 - DNA, 25 bp, Probe sequence
gttgcttattctcctattttagaaa

SEQ ID NO: 236610 - DNA, 25 bp, Probe sequence
gtgaaaccgccaagagtgtaatgaa

SEQ ID NO: 236611 - DNA, 25 bp, Probe sequence
gggccaatctgaacctattgtttta

SEQ ID NO: 236612 - DNA, 25 bp, Probe sequence
ggtcaagcaataacatatgcttcta

SEQ ID NO: 236613 - DNA, 25 bp, Probe sequence
tgtaatatcggagggtttattttga

SEQ ID NO: 236614 - DNA, 25 bp, Probe sequence
tgaacctattgttttagtcattttt

SEQ ID NO: 236615 - DNA, 25 bp, Probe sequence
tcaaaagcgataaatagtgctattt

SEQ ID NO: 236616 - DNA, 25 bp, Probe sequence
tagttgcttattctcctattttaga

SEQ ID NO: 236617 - DNA, 25 bp, Probe sequence
tatagttgcttattctcctatttta

SEQ ID NO: 236618 - DNA, 25 bp, Probe sequence
tattgttttagtcatttttacgaat

SEQ ID NO: 236619 - DNA, 25 bp, Probe sequence
tttatcctaagggccaatctgaacc

SEQ ID NO: 236620 - DNA, 25 bp, Probe sequence
ttacaactgtaatatcggagggttt

SEQ ID NO: 236621 - DNA, 25 bp, Probe sequence
ttagttttaagtgcatgtaattcaa

SEQ ID NO: 236622 - DNA, 25 bp, Probe sequence
ttgtttatcctaagggccaatctga

SEQ ID NO: 236623 - DNA, 25 bp, Probe sequence
tctgtcgggggtatcacgaagacaa

SEQ ID NO: 236624 - DNA, 25 bp, Probe sequence
atctcacacgatgattcagaatata

SEQ ID NO: 236625 - DNA, 25 bp, Probe sequence
agaaaggcaaaatctcacacgatga

SEQ ID NO: 236626 - DNA, 25 bp, Probe sequence
agcactatcacttttaacaacaggt

SEQ ID NO: 236627 - DNA, 25 bp, Probe sequence
accagtttagcactatcacttttaa

SEQ ID NO: 236628 - DNA, 25 bp, Probe sequence
acatattatacgaaaccgagtttag

SEQ ID NO: 236629 - DNA, 25 bp, Probe sequence
acaacatcgccttcaccaaatgtac

SEQ ID NO: 236630 - DNA, 25 bp, Probe sequence
aaaagtaacaacatcgccttcacca

SEQ ID NO: 236631 - DNA, 25 bp, Probe sequence
aagaacatattatacgaaaccgagt

SEQ ID NO: 236632 - DNA, 25 bp, Probe sequence
aagatgggccatacgataatattga

SEQ ID NO: 236633 - DNA, 25 bp, Probe sequence
cacaaagcagaattaagcattacta

SEQ ID NO: 236634 - DNA, 25 bp, Probe sequence
cagcacttaaaacagaacaggcaat

SEQ ID NO: 236635 - DNA, 25 bp, Probe sequence
ctaatgtcgaaacaaaacaaccgca

SEQ ID NO: 236636 - DNA, 25 bp, Probe sequence
catcgccttcaccaaatgtacaacc

SEQ ID NO: 236637 - DNA, 25 bp, Probe sequence
ccgagtttagaattcgaaaagcaat

SEQ ID NO: 236638 - DNA, 25 bp, Probe sequence
ccaacaacaccgcattcatctaatg

SEQ ID NO: 236639 - DNA, 25 bp, Probe sequence
gctgaaaccatggacgacagttagg

SEQ ID NO: 236640 - DNA, 25 bp, Probe sequence
gctttatgctgaaaccatggacgac

SEQ ID NO: 236641 - DNA, 25 bp, Probe sequence
gcatcagcacttaaaacagaacagg

SEQ ID NO: 236642 - DNA, 25 bp, Probe sequence
gcaatttggctttatgctgaaacca

SEQ ID NO: 236643 - DNA, 25 bp, Probe sequence
gaacaggcaataaaatctaaaatac

SEQ ID NO: 236644 - DNA, 25 bp, Probe sequence
gaaacaaaacaaccgcaatcgccaa

SEQ ID NO: 236645 - DNA, 25 bp, Probe sequence
gacacaaattgcgaaaaccagttta

SEQ ID NO: 236646 - DNA, 25 bp, Probe sequence
gtttagcactatcacttttaacaac

SEQ ID NO: 236647 - DNA, 25 bp, Probe sequence
gttataccagattggttcatttata

SEQ ID NO: 236648 - DNA, 25 bp, Probe sequence
gtttatgaatgttataccagattgg

SEQ ID NO: 236649 - DNA, 25 bp, Probe sequence
tcgccttcaccaaatgtacaaccgc

SEQ ID NO: 236650 - DNA, 25 bp, Probe sequence
gggggtatcacgaagacaaatagta

SEQ ID NO: 236651 - DNA, 25 bp, Probe sequence
ggcaaaatctcacacgatgattcag

SEQ ID NO: 236652 - DNA, 25 bp, Probe sequence
tgggccatacgataatattgatgta

SEQ ID NO: 236653 - DNA, 25 bp, Probe sequence
tcatagatggcactagtatcgaaag

SEQ ID NO: 236654 - DNA, 25 bp, Probe sequence
taacaacatcgccttcaccaaatgt

SEQ ID NO: 236655 - DNA, 25 bp, Probe sequence
tattctgtcgggggtatcacgaaga

SEQ ID NO: 236656 - DNA, 25 bp, Probe sequence
ttggctttatgctgaaaccatggac

SEQ ID NO: 236657 - DNA, 25 bp, Probe sequence
attgcgaaagccagtttagctctaa

SEQ ID NO: 236658 - DNA, 25 bp, Probe sequence
ataacatcaacggctcaaactgtaa

SEQ ID NO: 236659 - DNA, 25 bp, Probe sequence
atggtggcgttactaagaaaaatca

SEQ ID NO: 236660 - DNA, 25 bp, Probe sequence
agcgactggggttataacatcaacg

SEQ ID NO: 236661 - DNA, 25 bp, Probe sequence
agaaaaatcaaggcgcttactatga

SEQ ID NO: 236662 - DNA, 25 bp, Probe sequence
agctctaagtattttagcgactggg

SEQ ID NO: 236663 - DNA, 25 bp, Probe sequence
agcgcacctagattcgttattaaaa

SEQ ID NO: 236664 - DNA, 25 bp, Probe sequence
acttaagcgcacctagattcgttat

SEQ ID NO: 236665 - DNA, 25 bp, Probe sequence
acagtgtattcatatggtggcgtta

SEQ ID NO: 236666 - DNA, 25 bp, Probe sequence
aaaagtttcctaaagctagcaagat

SEQ ID NO: 236667 - DNA, 25 bp, Probe sequence
aaaatcgcaacggcacagtgtattc

SEQ ID NO: 236668 - DNA, 25 bp, Probe sequence
caaggcgcttactatgattacttaa

SEQ ID NO: 236669 - DNA, 25 bp, Probe sequence
caaacaaaccgaatgagtgacgtca

SEQ ID NO: 236670 - DNA, 25 bp, Probe sequence
caggtgtttctgtgcatgttaaaag

SEQ ID NO: 236671 - DNA, 25 bp, Probe sequence
catcaacggctcaaactgtaaatgc

SEQ ID NO: 236672 - DNA, 25 bp, Probe sequence
cttgattttaaattacgacagtatt

SEQ ID NO: 236673 - DNA, 25 bp, Probe sequence
ctatgaagatgacagcaattgcgaa

SEQ ID NO: 236674 - DNA, 25 bp, Probe sequence
ccgaatgagtgacgtcatagatggc

SEQ ID NO: 236675 - DNA, 25 bp, Probe sequence
gcatacaactatgaagatgacagca

SEQ ID NO: 236676 - DNA, 25 bp, Probe sequence
gcaacggcacagtgtattcatatgg

SEQ ID NO: 236677 - DNA, 25 bp, Probe sequence
gaagtaggtgcaggtgtttctgtgc

SEQ ID NO: 236678 - DNA, 25 bp, Probe sequence
gaagcggaaaatcgcaacggcacag

SEQ ID NO: 236679 - DNA, 25 bp, Probe sequence
gaaagccagtttagctctaagtatt

SEQ ID NO: 236680 - DNA, 25 bp, Probe sequence
gacaaaagatatcttcgacttgaga

SEQ ID NO: 236681 - DNA, 25 bp, Probe sequence
gatatcttcgacttgagagattact

SEQ ID NO: 236682 - DNA, 25 bp, Probe sequence
gattacttaagcgcacctagattcg

SEQ ID NO: 236683 - DNA, 25 bp, Probe sequence
gtaaatgcgagcgaacatgaatcaa

SEQ ID NO: 236684 - DNA, 25 bp, Probe sequence
ggggttataacatcaacggctcaaa

SEQ ID NO: 236685 - DNA, 25 bp, Probe sequence
ggtgcaggtgtttctgtgcatgtta

SEQ ID NO: 236686 - DNA, 25 bp, Probe sequence
ggaagagatttcgctgaaagaactt

SEQ ID NO: 236687 - DNA, 25 bp, Probe sequence
tgagagattactatagtcgcgcaag

SEQ ID NO: 236688 - DNA, 25 bp, Probe sequence
tccaggattagatatatttgtagtt

SEQ ID NO: 236689 - DNA, 25 bp, Probe sequence
tactatgattacttaagcgcaccta

SEQ ID NO: 236690 - DNA, 25 bp, Probe sequence
tattcatatggtggcgttactaaga

SEQ ID NO: 236691 - DNA, 25 bp, Probe sequence
attttccggttgtcgaattagatgc

SEQ ID NO: 236692 - DNA, 25 bp, Probe sequence
agatggcagtgtacctttagtcaat

SEQ ID NO: 236693 - DNA, 25 bp, Probe sequence
acaagcatttccaatgtgtgtagaa

SEQ ID NO: 236694 - DNA, 25 bp, Probe sequence
aacatcggattaacaggttggggtg

SEQ ID NO: 236695 - DNA, 25 bp, Probe sequence
aacatatgctggacattttccggtt

SEQ ID NO: 236696 - DNA, 25 bp, Probe sequence
aagatatgtcagatcaagaatggcg

SEQ ID NO: 236697 - DNA, 25 bp, Probe sequence
aatgccaaaacatatcagcgattat

SEQ ID NO: 236698 - DNA, 25 bp, Probe sequence
aattcatcaagcactcacattgcat

SEQ ID NO: 236699 - DNA, 25 bp, Probe sequence
catgcagtagttgatgaaccacaag

SEQ ID NO: 236700 - DNA, 25 bp, Probe sequence
cattggcatttttaacagaacatca

SEQ ID NO: 236701 - DNA, 25 bp, Probe sequence
gcactcacattgcatgcagactaca

SEQ ID NO: 236702 - DNA, 25 bp, Probe sequence
gcagtgtacctttagtcaatcgaat

SEQ ID NO: 236703 - DNA, 25 bp, Probe sequence
gcagactacaaaacatttgcagata

SEQ ID NO: 236704 - DNA, 25 bp, Probe sequence
gaattagatgcgacatactatgcga

SEQ ID NO: 236705 - DNA, 25 bp, Probe sequence
gaagggttagcaccacaacaattaa

SEQ ID NO: 236706 - DNA, 25 bp, Probe sequence
gaagatttagaacgccaaaccgata

SEQ ID NO: 236707 - DNA, 25 bp, Probe sequence
gaacaaacattggcatttttaacag

SEQ ID NO: 236708 - DNA, 25 bp, Probe sequence
gaaacgcctgatacatttgaatttg

SEQ ID NO: 236709 - DNA, 25 bp, Probe sequence
gaaagtttacgtcatatttaacaat

SEQ ID NO: 236710 - DNA, 25 bp, Probe sequence
gaaattgcgtttgtacgttatcatg

SEQ ID NO: 236711 - DNA, 25 bp, Probe sequence
gacagcaattacaagcatttccaat

SEQ ID NO: 236712 - DNA, 25 bp, Probe sequence
gacatactatgcgatacaaccggaa

SEQ ID NO: 236713 - DNA, 25 bp, Probe sequence
gactgcaatgcacaaaatatcaaat

SEQ ID NO: 236714 - DNA, 25 bp, Probe sequence
gagcccttacatacacagaaaaaat

SEQ ID NO: 236715 - DNA, 25 bp, Probe sequence
gatgtacgctatttatatgattata

SEQ ID NO: 236716 - DNA, 25 bp, Probe sequence
gatacaaggcaagaactatttgatc

SEQ ID NO: 236717 - DNA, 25 bp, Probe sequence
gttagagcccttacatacacagaaa

SEQ ID NO: 236718 - DNA, 25 bp, Probe sequence
gtacgttatcatggacgtaatcatt

SEQ ID NO: 236719 - DNA, 25 bp, Probe sequence
gtgtgtagaatttaggcatcaatca

SEQ ID NO: 236720 - DNA, 25 bp, Probe sequence
ggtggtcatgcagcaaataatgcca

SEQ ID NO: 236721 - DNA, 25 bp, Probe sequence
ggttggggtgatcactattcattat

SEQ ID NO: 236722 - DNA, 25 bp, Probe sequence
tgctggacattttccggttgtcgaa

SEQ ID NO: 236723 - DNA, 25 bp, Probe sequence
taacaataattctggtggtcatgca

SEQ ID NO: 236724 - DNA, 25 bp, Probe sequence
ttaggcatcaatcatggtttagtga

SEQ ID NO: 236725 - DNA, 25 bp, Probe sequence
attggaggtggcgcactaatgacgc

SEQ ID NO: 236726 - DNA, 25 bp, Probe sequence
attgtatttagatttccacctcatg

SEQ ID NO: 236727 - DNA, 25 bp, Probe sequence
atttggtattggaggtggcgcacta

SEQ ID NO: 236728 - DNA, 25 bp, Probe sequence
atcgtaggcattggaggcggtatta

SEQ ID NO: 236729 - DNA, 25 bp, Probe sequence
atcggtgtcaaagtgaatcaatcaa

SEQ ID NO: 236730 - DNA, 25 bp, Probe sequence
aggtcacgtagcttggggttatgca

SEQ ID NO: 236731 - DNA, 25 bp, Probe sequence
acctcatgtagctgttggaacaagt

SEQ ID NO: 236732 - DNA, 25 bp, Probe sequence
acgtttttaattggtatattgacag

SEQ ID NO: 236733 - DNA, 25 bp, Probe sequence
acagtaatgttgttaatgggtatat

SEQ ID NO: 236734 - DNA, 25 bp, Probe sequence
ccaccattgtttgcttttattacaa

SEQ ID NO: 236735 - DNA, 25 bp, Probe sequence
gcactaatgacgccactaatgctta

SEQ ID NO: 236736 - DNA, 25 bp, Probe sequence
gacgccactaatgcttattgtattt

SEQ ID NO: 236737 - DNA, 25 bp, Probe sequence
gagttctatagggcacattgctcaa

SEQ ID NO: 236738 - DNA, 25 bp, Probe sequence
gaggcggtattattatcgttccaac

SEQ ID NO: 236739 - DNA, 25 bp, Probe sequence
gatacggtagtaacattattgagaa

SEQ ID NO: 236740 - DNA, 25 bp, Probe sequence
gatttccacctcatgtagctgttgg

SEQ ID NO: 236741 - DNA, 25 bp, Probe sequence
gattttcttttcaagtgtcatgagt

SEQ ID NO: 236742 - DNA, 25 bp, Probe sequence
gttccaacaatggtttacctcggtg

SEQ ID NO: 236743 - DNA, 25 bp, Probe sequence
gtatgatgatgattttcttttcaag

SEQ ID NO: 236744 - DNA, 25 bp, Probe sequence
gtagacgctaaaggtaaaacatatc

SEQ ID NO: 236745 - DNA, 25 bp, Probe sequence
gtagatatttaacatttgagtcatt

SEQ ID NO: 236746 - DNA, 25 bp, Probe sequence
gtagcttggggttatgcaatcattt

SEQ ID NO: 236747 - DNA, 25 bp, Probe sequence
gtgtcatgagttctatagggcacat

SEQ ID NO: 236748 - DNA, 25 bp, Probe sequence
ggggttatgcaatcattttaattat

SEQ ID NO: 236749 - DNA, 25 bp, Probe sequence
ggcggtattattatcgttccaacaa

SEQ ID NO: 236750 - DNA, 25 bp, Probe sequence
ggtgttgaacatggattactacata

SEQ ID NO: 236751 - DNA, 25 bp, Probe sequence
ggtttacctcggtgttgaacatgga

SEQ ID NO: 236752 - DNA, 25 bp, Probe sequence
ggcacattgctcaaggtcacgtagc

SEQ ID NO: 236753 - DNA, 25 bp, Probe sequence
taattgtgacaggactttcttcatc

SEQ ID NO: 236754 - DNA, 25 bp, Probe sequence
tagatttccacctcatgtagctgtt

SEQ ID NO: 236755 - DNA, 25 bp, Probe sequence
tagggcacattgctcaaggtcacgt

SEQ ID NO: 236756 - DNA, 25 bp, Probe sequence
tattgacaggtttatttggtattgg

SEQ ID NO: 236757 - DNA, 25 bp, Probe sequence
ttttggtgcgaaaatcggtgtcaaa

SEQ ID NO: 236758 - DNA, 25 bp, Probe sequence
ttgagtcatttaatttatattttgg

SEQ ID NO: 236759 - DNA, 25 bp, Probe sequence
attgctgcagaagctgttgtcacaa

SEQ ID NO: 236760 - DNA, 25 bp, Probe sequence
atctattcaggatgggttgggagaa

SEQ ID NO: 236761 - DNA, 25 bp, Probe sequence
atgatagtaagcgaggagaatcctt

SEQ ID NO: 236762 - DNA, 25 bp, Probe sequence
agatcttcccttgaaaggggacatt

SEQ ID NO: 236763 - DNA, 25 bp, Probe sequence
caattggtcccggaacaacatttat

SEQ ID NO: 236764 - DNA, 25 bp, Probe sequence
acaatgaccatggacctgatcccga

SEQ ID NO: 236765 - DNA, 25 bp, Probe sequence
aaaggttttctgatggagttatcga

SEQ ID NO: 236766 - DNA, 25 bp, Probe sequence
aagaaaacttctagatgacacttga

SEQ ID NO: 236767 - DNA, 25 bp, Probe sequence
aagggaatcggaatcttcaatttat

SEQ ID NO: 236768 - DNA, 25 bp, Probe sequence
aatggagatatcgaaatgctgaaga

SEQ ID NO: 236769 - DNA, 25 bp, Probe sequence
caacatatccttttcatctattcag

SEQ ID NO: 236770 - DNA, 25 bp, Probe sequence
catcggatggatggatcaacatatc

SEQ ID NO: 236771 - DNA, 25 bp, Probe sequence
ttctattgtcggtggaaatccctta

SEQ ID NO: 236772 - DNA, 25 bp, Probe sequence
gccttccttaaaagatcttcccttg

SEQ ID NO: 236773 - DNA, 25 bp, Probe sequence
gaatcttcaatttataaaacctact

SEQ ID NO: 236774 - DNA, 25 bp, Probe sequence
gaatggtgcaaaccatcggatggat

SEQ ID NO: 236775 - DNA, 25 bp, Probe sequence
gaatgttgctccctattctattgtc

SEQ ID NO: 236776 - DNA, 25 bp, Probe sequence
gaatggttagctttacaatggtgga

SEQ ID NO: 236777 - DNA, 25 bp, Probe sequence
gaagattttgttcaattggtcccgg

SEQ ID NO: 236778 - DNA, 25 bp, Probe sequence
gaagtgattggagataagttgatta

SEQ ID NO: 236779 - DNA, 25 bp, Probe sequence
gaaaatcttcccttcataataaatg

SEQ ID NO: 236780 - DNA, 25 bp, Probe sequence
gaccatggacctgatcccgaaaata

SEQ ID NO: 236781 - DNA, 25 bp, Probe sequence
gagaatcctttgaagatcaagtctt

SEQ ID NO: 236782 - DNA, 25 bp, Probe sequence
gagatgtaaccattatgcctggggt

SEQ ID NO: 236783 - DNA, 25 bp, Probe sequence
gatcaagtcttatatcattatgaag

SEQ ID NO: 236784 - DNA, 25 bp, Probe sequence
gttgggagaagtatatgccttcctt

SEQ ID NO: 236785 - DNA, 25 bp, Probe sequence
gttgtcacaaagaatgttgctccct

SEQ ID NO: 236786 - DNA, 25 bp, Probe sequence
tgcctggggtgaaaattggggacgg

SEQ ID NO: 236787 - DNA, 25 bp, Probe sequence
gggcaatcattgctgcagaagctgt

SEQ ID NO: 236788 - DNA, 25 bp, Probe sequence
ggggacggggcaatcattgctgcag

SEQ ID NO: 236789 - DNA, 25 bp, Probe sequence
ggtgggggaatattcttattatgat

SEQ ID NO: 236790 - DNA, 25 bp, Probe sequence
tgatcccgaaaatattttaccgata

SEQ ID NO: 236791 - DNA, 25 bp, Probe sequence
tggagttatcgaagaatggttagct

SEQ ID NO: 236792 - DNA, 25 bp, Probe sequence
ttgctccctattctattgtcggtgg

SEQ ID NO: 236793 - DNA, 25 bp, Probe sequence
gtattggacgtattacggacgacgg

SEQ ID NO: 236794 - DNA, 25 bp, Probe sequence
atatcctcagatggggaagtttggt

SEQ ID NO: 236795 - DNA, 25 bp, Probe sequence
acctgcatcaggaccagttggtatt

SEQ ID NO: 236796 - DNA, 25 bp, Probe sequence
aaacgctcgacctcatgcaattact

SEQ ID NO: 236797 - DNA, 25 bp, Probe sequence
aagataggcaaattaactctcatta

SEQ ID NO: 236798 - DNA, 25 bp, Probe sequence
aattacagagtacccactaccgaca

SEQ ID NO: 236799 - DNA, 25 bp, Probe sequence
aattcctacacctgcatcaggacca

SEQ ID NO: 236800 - DNA, 25 bp, Probe sequence
aattcgtgaatacgagctgcctaat

SEQ ID NO: 236801 - DNA, 25 bp, Probe sequence
caaaattccaacgccaaacgctcga

SEQ ID NO: 236802 - DNA, 25 bp, Probe sequence
cattgcctaacccagattcagcacc

SEQ ID NO: 236803 - DNA, 25 bp, Probe sequence
ctgctggagcaggaattgatttatg

SEQ ID NO: 236804 - DNA, 25 bp, Probe sequence
gcgaataactcctctgggggaaatt

SEQ ID NO: 236805 - DNA, 25 bp, Probe sequence
cgacgatgctttatggtttgtggaa

SEQ ID NO: 236806 - DNA, 25 bp, Probe sequence
ccttcttttatcactttgggttctg

SEQ ID NO: 236807 - DNA, 25 bp, Probe sequence
ccactaccgacaccagatgcaaaag

SEQ ID NO: 236808 - DNA, 25 bp, Probe sequence
gctgcctaataaaggatcttaccct

SEQ ID NO: 236809 - DNA, 25 bp, Probe sequence
gcaccctacggtattacagaaggac

SEQ ID NO: 236810 - DNA, 25 bp, Probe sequence
gagtttaaaattcctacacctgcat

SEQ ID NO: 236811 - DNA, 25 bp, Probe sequence
gaatggcaaccgtattggacgtatt

SEQ ID NO: 236812 - DNA, 25 bp, Probe sequence
gaagtttggtttactgagaatgcag

SEQ ID NO: 236813 - DNA, 25 bp, Probe sequence
gaaccacatggcatttgtttcgatg

SEQ ID NO: 236814 - DNA, 25 bp, Probe sequence
gacctcatgcaattactgctggagc

SEQ ID NO: 236815 - DNA, 25 bp, Probe sequence
gaggaatacccaattcaaatcaaaa

SEQ ID NO: 236816 - DNA, 25 bp, Probe sequence
gatagggcgaataactcctctgggg

SEQ ID NO: 236817 - DNA, 25 bp, Probe sequence
gattcagcaccctacggtattacag

SEQ ID NO: 236818 - DNA, 25 bp, Probe sequence
gttctgataatgccctgtggttcac

SEQ ID NO: 236819 - DNA, 25 bp, Probe sequence
gtcatgtgtttaactatatcctcag

SEQ ID NO: 236820 - DNA, 25 bp, Probe sequence
ggggaacgacgatgctttatggttt

SEQ ID NO: 236821 - DNA, 25 bp, Probe sequence
ggaccatatggtataaccgtttcag

SEQ ID NO: 236822 - DNA, 25 bp, Probe sequence
ggaatatacattgcctaacccagat

SEQ ID NO: 236823 - DNA, 25 bp, Probe sequence
tcttacccttcttttatcactttgg

SEQ ID NO: 236824 - DNA, 25 bp, Probe sequence
tactaaccaagatacaggaccatat

SEQ ID NO: 236825 - DNA, 25 bp, Probe sequence
ttatggtttactgaatggggggcta

SEQ ID NO: 236826 - DNA, 25 bp, Probe sequence
tttggtttgcaatggagtgtgacaa

SEQ ID NO: 236827 - DNA, 25 bp, Probe sequence
attcgcggaggagacaagatggcaa

SEQ ID NO: 236828 - DNA, 25 bp, Probe sequence
atcgccatctgtcaaaatcggttat

SEQ ID NO: 236829 - DNA, 25 bp, Probe sequence
agtggtggagagcgagttaaagtag

SEQ ID NO: 236830 - DNA, 25 bp, Probe sequence
agtttcacatgatcgcgctttttta

SEQ ID NO: 236831 - DNA, 25 bp, Probe sequence
agatgaaccaacaactaacttagat

SEQ ID NO: 236832 - DNA, 25 bp, Probe sequence
acgtggtgaagatgtctcgggtaca

SEQ ID NO: 236833 - DNA, 25 bp, Probe sequence
cgaacttcctccacttaaaatggat

SEQ ID NO: 236834 - DNA, 25 bp, Probe sequence
aaagccatactttgcaggtaagcaa

SEQ ID NO: 236835 - DNA, 25 bp, Probe sequence
aaaaatccagaactgctattagcag

SEQ ID NO: 236836 - DNA, 25 bp, Probe sequence
aaaattgtgcatgggaatcctggta

SEQ ID NO: 236837 - DNA, 25 bp, Probe sequence
aacttattcctcaattgaagctcat

SEQ ID NO: 236838 - DNA, 25 bp, Probe sequence
aagtagccactcgaataatgacaat

SEQ ID NO: 236839 - DNA, 25 bp, Probe sequence
aatctttgtatctcacgatcgtaaa

SEQ ID NO: 236840 - DNA, 25 bp, Probe sequence
cttattcgaactattctagctagaa

SEQ ID NO: 236841 - DNA, 25 bp, Probe sequence
tctcgggtacaattgaaggacgggt

SEQ ID NO: 236842 - DNA, 25 bp, Probe sequence
gctcaacgagcaactaaaaaaccga

SEQ ID NO: 236843 - DNA, 25 bp, Probe sequence
gcatggagcatttattatagtttca

SEQ ID NO: 236844 - DNA, 25 bp, Probe sequence
gcaaaaagttttagtattcgcggag

SEQ ID NO: 236845 - DNA, 25 bp, Probe sequence
gaatgatcgtattggtttaattggt

SEQ ID NO: 236846 - DNA, 25 bp, Probe sequence
tgaaggacgggtattgtggaaagca

SEQ ID NO: 236847 - DNA, 25 bp, Probe sequence
gaaaatgttcaatcttcttcacaac

SEQ ID NO: 236848 - DNA, 25 bp, Probe sequence
gaaactatattcggcaagcgcttga

SEQ ID NO: 236849 - DNA, 25 bp, Probe sequence
gaggcgtttgaatctttgttaaagg

SEQ ID NO: 236850 - DNA, 25 bp, Probe sequence
gatggcaattatcggatctaatggt

SEQ ID NO: 236851 - DNA, 25 bp, Probe sequence
gatggcacatatgaacaatttaaac

SEQ ID NO: 236852 - DNA, 25 bp, Probe sequence
gatcgcgcttttttagataacttgt

SEQ ID NO: 236853 - DNA, 25 bp, Probe sequence
gataacttgtgtactactatatggg

SEQ ID NO: 236854 - DNA, 25 bp, Probe sequence
gtgaagttaatacgttggtactaga

SEQ ID NO: 236855 - DNA, 25 bp, Probe sequence
ggaatcctggtatttcattatcgcc

SEQ ID NO: 236856 - DNA, 25 bp, Probe sequence
ggcaagcgcttgataaaaatccaga

SEQ ID NO: 236857 - DNA, 25 bp, Probe sequence
ggcagtataatctttgtatctcacg

SEQ ID NO: 236858 - DNA, 25 bp, Probe sequence
tatttcattatcgccatctgtcaaa

SEQ ID NO: 236859 - DNA, 25 bp, Probe sequence
tattgttgaacataaatcgcctaaa

SEQ ID NO: 236860 - DNA, 25 bp, Probe sequence
ttcacattgtgaacttattcctcaa

SEQ ID NO: 236861 - DNA, 25 bp, Probe sequence
attggattgttaccgatccacttga

SEQ ID NO: 236862 - DNA, 25 bp, Probe sequence
atcacctttacgacgaagcaaaatt

SEQ ID NO: 236863 - DNA, 25 bp, Probe sequence
atcatcaatgctggcttactcgtta

SEQ ID NO: 236864 - DNA, 25 bp, Probe sequence
atgttaccgcatccgattaatatgg

SEQ ID NO: 236865 - DNA, 25 bp, Probe sequence
atgtgatgttgcaacaatcggtaat

SEQ ID NO: 236866 - DNA, 25 bp, Probe sequence
atggtgtactgatggcggcagctgg

SEQ ID NO: 236867 - DNA, 25 bp, Probe sequence
atggcggcagctggaaagtatggta

SEQ ID NO: 236868 - DNA, 25 bp, Probe sequence
agtcattgtggcattttcttcgatg

SEQ ID NO: 236869 - DNA, 25 bp, Probe sequence
actattcgttgcagcgacagcacct

SEQ ID NO: 236870 - DNA, 25 bp, Probe sequence
acagggcgttactatctgaatggag

SEQ ID NO: 236871 - DNA, 25 bp, Probe sequence
aagagtatttaatgccagagttttt

SEQ ID NO: 236872 - DNA, 25 bp, Probe sequence
aatgctggcttactcgttaaagata

SEQ ID NO: 236873 - DNA, 25 bp, Probe sequence
aatcgtgctaagtcattgtggcatt

SEQ ID NO: 236874 - DNA, 25 bp, Probe sequence
caacatccagtagtgcttaagcgta

SEQ ID NO: 236875 - DNA, 25 bp, Probe sequence
cacgacttaatcatccttctttata

SEQ ID NO: 236876 - DNA, 25 bp, Probe sequence
cagtaattcaacatccagtagtgct

SEQ ID NO: 236877 - DNA, 25 bp, Probe sequence
cattcatcaaatgttaccgcatccg

SEQ ID NO: 236878 - DNA, 25 bp, Probe sequence
gaattgcctgaaattgatgtcattt

SEQ ID NO: 236879 - DNA, 25 bp, Probe sequence
gaagctttaaatcacctttacgacg

SEQ ID NO: 236880 - DNA, 25 bp, Probe sequence
gaagctgcatacttattagctcaaa

SEQ ID NO: 236881 - DNA, 25 bp, Probe sequence
gaacgatattcatagtcatttacat

SEQ ID NO: 236882 - DNA, 25 bp, Probe sequence
gaacatgcacaaggtttgggtttca

SEQ ID NO: 236883 - DNA, 25 bp, Probe sequence
gacggtgtgaaaatactattcgttg

SEQ ID NO: 236884 - DNA, 25 bp, Probe sequence
gaggcttacaatttatcatacgaac

SEQ ID NO: 236885 - DNA, 25 bp, Probe sequence
gatgtcatttttggtagtcatacgc

SEQ ID NO: 236886 - DNA, 25 bp, Probe sequence
gatgaatcaggtcatttaccaaata

SEQ ID NO: 236887 - DNA, 25 bp, Probe sequence
gatcatgtagatttatccgcaccta

SEQ ID NO: 236888 - DNA, 25 bp, Probe sequence
gtagtcatacgcatcattattttga

SEQ ID NO: 236889 - DNA, 25 bp, Probe sequence
gggtacattcattctacagggcgtt

SEQ ID NO: 236890 - DNA, 25 bp, Probe sequence
ggttaatttaacttttgaggcacat

SEQ ID NO: 236891 - DNA, 25 bp, Probe sequence
tcatccttctttatatgttgatcta

SEQ ID NO: 236892 - DNA, 25 bp, Probe sequence
taccaaataatatcgtttcttctta

SEQ ID NO: 236893 - DNA, 25 bp, Probe sequence
ttttaccccattttatcgtgcacta

SEQ ID NO: 236894 - DNA, 25 bp, Probe sequence
ttcttcgatgaaacattatgccaag

SEQ ID NO: 236895 - DNA, 25 bp, Probe sequence
gttggtacggttgcaattgttacga

SEQ ID NO: 236896 - DNA, 25 bp, Probe sequence
attgttgagaaatttagtcgttgga

SEQ ID NO: 236897 - DNA, 25 bp, Probe sequence
aagtggctatttatgatgattgtga

SEQ ID NO: 236898 - DNA, 25 bp, Probe sequence
aatatcccaggaattggagaaattg

SEQ ID NO: 236899 - DNA, 25 bp, Probe sequence
aatttagtcgttggattatggctat

SEQ ID NO: 236900 - DNA, 25 bp, Probe sequence
aatttattacttactctgtttgtct

SEQ ID NO: 236901 - DNA, 25 bp, Probe sequence
caagttgtggcgccgataatattgg

SEQ ID NO: 236902 - DNA, 25 bp, Probe sequence
ctattcaaacaattttaggatttat

SEQ ID NO: 236903 - DNA, 25 bp, Probe sequence
gctgctgctgttctttatattgcta

SEQ ID NO: 236904 - DNA, 25 bp, Probe sequence
gctgctgttctttatattgctacag

SEQ ID NO: 236905 - DNA, 25 bp, Probe sequence
gctacagcagttgatttattagtaa

SEQ ID NO: 236906 - DNA, 25 bp, Probe sequence
gcttttgtattaaattatgttccag

SEQ ID NO: 236907 - DNA, 25 bp, Probe sequence
gaaaagtggatattaggtttattgg

SEQ ID NO: 236908 - DNA, 25 bp, Probe sequence
gaggtgtattatgattcaaacggtt

SEQ ID NO: 236909 - DNA, 25 bp, Probe sequence
gattcaaacggttgttgctgctgct

SEQ ID NO: 236910 - DNA, 25 bp, Probe sequence
gttgtggcgccgataatattggttt

SEQ ID NO: 236911 - DNA, 25 bp, Probe sequence
gtctaaattagttggtacggttgca

SEQ ID NO: 236912 - DNA, 25 bp, Probe sequence
gtgttactaatttattacttactct

SEQ ID NO: 236913 - DNA, 25 bp, Probe sequence
ggtcaatatttagggtctattattt

SEQ ID NO: 236914 - DNA, 25 bp, Probe sequence
ggctatttatgatgattgtgaagga

SEQ ID NO: 236915 - DNA, 25 bp, Probe sequence
ggcgccgataatattggtttatttg

SEQ ID NO: 236916 - DNA, 25 bp, Probe sequence
tggtacggttgcaattgttacgata

SEQ ID NO: 236917 - DNA, 25 bp, Probe sequence
tgggtttaataccaatttatcttgg

SEQ ID NO: 236918 - DNA, 25 bp, Probe sequence
tggtgtttactgcacaaaaattagc

SEQ ID NO: 236919 - DNA, 25 bp, Probe sequence
tcttcttggtgtttactgcacaaaa

SEQ ID NO: 236920 - DNA, 25 bp, Probe sequence
taattttcttcttggtgtttactgc

SEQ ID NO: 236921 - DNA, 25 bp, Probe sequence
tatgttggtcaatatttagggtcta

SEQ ID NO: 236922 - DNA, 25 bp, Probe sequence
tattttgtgacattaagtgttacta

SEQ ID NO: 236923 - DNA, 25 bp, Probe sequence
tattacttactctgtttgtcttttt

SEQ ID NO: 236924 - DNA, 25 bp, Probe sequence
ttttcttcttggtgtttactgcaca

SEQ ID NO: 236925 - DNA, 25 bp, Probe sequence
tttatatagctttaggtttatttat

SEQ ID NO: 236926 - DNA, 25 bp, Probe sequence
ttatcttggaattaaagtggctatt

SEQ ID NO: 236927 - DNA, 25 bp, Probe sequence
ttattaatattttttgctagagcaa

SEQ ID NO: 236928 - DNA, 25 bp, Probe sequence
ttgctgctgctgttctttatattgc

SEQ ID NO: 236929 - DNA, 25 bp, Probe sequence
atattacacgcctttagagtttggt

SEQ ID NO: 236930 - DNA, 25 bp, Probe sequence
atgaatgttggggtgcacgtcgtac

SEQ ID NO: 236931 - DNA, 25 bp, Probe sequence
atgctgagacagtacgtaaagttag

SEQ ID NO: 236932 - DNA, 25 bp, Probe sequence
aggtgaggcacagttaaatagttaa

SEQ ID NO: 236933 - DNA, 25 bp, Probe sequence
agagcttgtcgtttttgtgcggtta

SEQ ID NO: 236934 - DNA, 25 bp, Probe sequence
agcaacgccaaggtgaggcacagtt

SEQ ID NO: 236935 - DNA, 25 bp, Probe sequence
accataatattgaaactgttcgtcg

SEQ ID NO: 236936 - DNA, 25 bp, Probe sequence
actgctgttgcgcgtgatgatttaa

SEQ ID NO: 236937 - DNA, 25 bp, Probe sequence
aacttgatttaaatgagcctgaacg

SEQ ID NO: 236938 - DNA, 25 bp, Probe sequence
aacgattgaaattttaccatcagat

SEQ ID NO: 236939 - DNA, 25 bp, Probe sequence
aagtattatggttggattaggtgaa

SEQ ID NO: 236940 - DNA, 25 bp, Probe sequence
caagctggacctttagtacgtagtt

SEQ ID NO: 236941 - DNA, 25 bp, Probe sequence
cacgttgttatcactgctgttgcgc

SEQ ID NO: 236942 - DNA, 25 bp, Probe sequence
cagaacattagagtttttacgtcgt

SEQ ID NO: 236943 - DNA, 25 bp, Probe sequence
ccatcagatatgggcggggactatg

SEQ ID NO: 236944 - DNA, 25 bp, Probe sequence
gcgcgtgatgatttaagagatgctg

SEQ ID NO: 236945 - DNA, 25 bp, Probe sequence
gcgacatttatgattttaggtgccg

SEQ ID NO: 236946 - DNA, 25 bp, Probe sequence
gaagaagctaaatgtcctaatatac

SEQ ID NO: 236947 - DNA, 25 bp, Probe sequence
gaaacacgttgttatcactgctgtt

SEQ ID NO: 236948 - DNA, 25 bp, Probe sequence
gaaagaaatccatttacaacgattg

SEQ ID NO: 236949 - DNA, 25 bp, Probe sequence
gacaggtttacctaatgaacttgat

SEQ ID NO: 236950 - DNA, 25 bp, Probe sequence
gatgtagatattttaacgattggtc

SEQ ID NO: 236951 - DNA, 25 bp, Probe sequence
gatgctggttcaaatgtttatgctg

SEQ ID NO: 236952 - DNA, 25 bp, Probe sequence
gatatcccaactaaatcaagtatta

SEQ ID NO: 236953 - DNA, 25 bp, Probe sequence
gatttacgtgcgaatgatgtagata

SEQ ID NO: 236954 - DNA, 25 bp, Probe sequence
gggcggggactatgatgcgttagaa

SEQ ID NO: 236955 - DNA, 25 bp, Probe sequence
gggtgcacgtcgtacagcgacattt

SEQ ID NO: 236956 - DNA, 25 bp, Probe sequence
ggtgccgtatgtacaagagcttgtc

SEQ ID NO: 236957 - DNA, 25 bp, Probe sequence
ggtcaatatttacaaccttcacgta

SEQ ID NO: 236958 - DNA, 25 bp, Probe sequence
tgtgcggttaagacaggtttaccta

SEQ ID NO: 236959 - DNA, 25 bp, Probe sequence
tgagcctgaacgtgtagctgaatca

SEQ ID NO: 236960 - DNA, 25 bp, Probe sequence
tcaagacctgacattttaaaccata

SEQ ID NO: 236961 - DNA, 25 bp, Probe sequence
taacaccgagagttcgtgcgcgtgc

SEQ ID NO: 236962 - DNA, 25 bp, Probe sequence
taccaacgaaaactatacaggactt

SEQ ID NO: 236963 - DNA, 25 bp, Probe sequence
atcgaagaagttcatccgtctgatg

SEQ ID NO: 236964 - DNA, 25 bp, Probe sequence
agtagatcaacattactttgaatta

SEQ ID NO: 236965 - DNA, 25 bp, Probe sequence
agccaaccattcaagatactgaaca

SEQ ID NO: 236966 - DNA, 25 bp, Probe sequence
aagcagagatgagtaaacgtttttc

SEQ ID NO: 236967 - DNA, 25 bp, Probe sequence
aagacatttgtctaaacaagaggtt

SEQ ID NO: 236968 - DNA, 25 bp, Probe sequence
aagattaagccaaccattcaagata

SEQ ID NO: 236969 - DNA, 25 bp, Probe sequence
caaccattcaagatactgaacatta

SEQ ID NO: 236970 - DNA, 25 bp, Probe sequence
gaatattgtaactttggttgtcctt

SEQ ID NO: 236971 - DNA, 25 bp, Probe sequence
gaagttcatccgtctgatgtgatag

SEQ ID NO: 236972 - DNA, 25 bp, Probe sequence
gaagaagttcatccgtctgatgtga

SEQ ID NO: 236973 - DNA, 25 bp, Probe sequence
gaaaattatcgcgaatgttttaatg

SEQ ID NO: 236974 - DNA, 25 bp, Probe sequence
gaacaatttattgctaggtattcag

SEQ ID NO: 236975 - DNA, 25 bp, Probe sequence
gactatggttacgatcaattacgat

SEQ ID NO: 236976 - DNA, 25 bp, Probe sequence
gacgacaataaacttcaagatgtga

SEQ ID NO: 236977 - DNA, 25 bp, Probe sequence
gatgtgaagattaagccaaccattc

SEQ ID NO: 236978 - DNA, 25 bp, Probe sequence
gttaatcgaagaagttcatccgtct

SEQ ID NO: 236979 - DNA, 25 bp, Probe sequence
gattaagccaaccattcaagatact

SEQ ID NO: 236980 - DNA, 25 bp, Probe sequence
gttggtgactatggttacgatcaat

SEQ ID NO: 236981 - DNA, 25 bp, Probe sequence
gttcatccgtctgatgtgatagatg

SEQ ID NO: 236982 - DNA, 25 bp, Probe sequence
gtttttcaaatattcaagattacat

SEQ ID NO: 236983 - DNA, 25 bp, Probe sequence
tgtaactttggttgtccttactttg

SEQ ID NO: 236984 - DNA, 25 bp, Probe sequence
gtctgatgtgatagatgacgacaat

SEQ ID NO: 236985 - DNA, 25 bp, Probe sequence
gtgatagatgacgacaataaacttc

SEQ ID NO: 236986 - DNA, 25 bp, Probe sequence
ggtgactatggttacgatcaattac

SEQ ID NO: 236987 - DNA, 25 bp, Probe sequence
ggttacgatcaattacgattaaaag

SEQ ID NO: 236988 - DNA, 25 bp, Probe sequence
taatcgaagaagttcatccgtctga

SEQ ID NO: 236989 - DNA, 25 bp, Probe sequence
taaacgtttttcaaatattcaagat

SEQ ID NO: 236990 - DNA, 25 bp, Probe sequence
tactttgtattaagacatttgtcta

SEQ ID NO: 236991 - DNA, 25 bp, Probe sequence
tattgctaggtattcagatatttta

SEQ ID NO: 236992 - DNA, 25 bp, Probe sequence
tattgtaactttggttgtccttact

SEQ ID NO: 236993 - DNA, 25 bp, Probe sequence
ttatcgcgaatgttttaatgaagaa

SEQ ID NO: 236994 - DNA, 25 bp, Probe sequence
ttaagccaaccattcaagatactga

SEQ ID NO: 236995 - DNA, 25 bp, Probe sequence
ttggttgtccttactttgtattaag

SEQ ID NO: 236996 - DNA, 25 bp, Probe sequence
ttgtccttactttgtattaagacat

SEQ ID NO: 236997 - DNA, 25 bp, Probe sequence
atcatgccaatgtttgatgacgcat

SEQ ID NO: 236998 - DNA, 25 bp, Probe sequence
atgtaccagtaacagcttttggtaa

SEQ ID NO: 236999 - DNA, 25 bp, Probe sequence
atgtttgatgacgcattaccttatt

SEQ ID NO: 237000 - DNA, 25 bp, Probe sequence
agggaatatgattatcgatgcattt

SEQ ID NO: 237001 - DNA, 25 bp, Probe sequence
agcattaactgatgattatcatgag

SEQ ID NO: 237002 - DNA, 25 bp, Probe sequence
acatatgattacacagccttagata

SEQ ID NO: 237003 - DNA, 25 bp, Probe sequence
aagcacaatcattatgcatttgaac

SEQ ID NO: 237004 - DNA, 25 bp, Probe sequence
aatttacatatgattacacagcctt

SEQ ID NO: 237005 - DNA, 25 bp, Probe sequence
aattagcctatttacaagcattaac

SEQ ID NO: 237006 - DNA, 25 bp, Probe sequence
ccagtaacagcttttggtaaaggag

SEQ ID NO: 237007 - DNA, 25 bp, Probe sequence
ccttattacaaacaatttattacag

SEQ ID NO: 237008 - DNA, 25 bp, Probe sequence
gccaatgtttgatgacgcattacct

SEQ ID NO: 237009 - DNA, 25 bp, Probe sequence
gcattgctcaaatgttgatagaatc

SEQ ID NO: 237010 - DNA, 25 bp, Probe sequence
gcacaatcattatgcatttgaacgc

SEQ ID NO: 237011 - DNA, 25 bp, Probe sequence
gaatcatcggtagatatagggaata

SEQ ID NO: 237012 - DNA, 25 bp, Probe sequence
gaacgcattgctcaaatgttgatag

SEQ ID NO: 237013 - DNA, 25 bp, Probe sequence
gaaaatgtaccagtaacagcttttg

SEQ ID NO: 237014 - DNA, 25 bp, Probe sequence
gacaaagataaactaactcagaaat

SEQ ID NO: 237015 - DNA, 25 bp, Probe sequence
gatgtgattgatatattagaactag

SEQ ID NO: 237016 - DNA, 25 bp, Probe sequence
gatgcatttattttaagggatcctg

SEQ ID NO: 237017 - DNA, 25 bp, Probe sequence
gttgatagaatcatcggtagatata

SEQ ID NO: 237018 - DNA, 25 bp, Probe sequence
gtttgatgacgcattaccttattac

SEQ ID NO: 237019 - DNA, 25 bp, Probe sequence
gggatcctggtaattataaagatgt

SEQ ID NO: 237020 - DNA, 25 bp, Probe sequence
tgattacacagccttagatattaag

SEQ ID NO: 237021 - DNA, 25 bp, Probe sequence
tgcatttattttaagggatcctggt

SEQ ID NO: 237022 - DNA, 25 bp, Probe sequence
taactcagaaattagcctatttaca

SEQ ID NO: 237023 - DNA, 25 bp, Probe sequence
tagcctatttacaagcattaactga

SEQ ID NO: 237024 - DNA, 25 bp, Probe sequence
tatgattacacagccttagatatta

SEQ ID NO: 237025 - DNA, 25 bp, Probe sequence
ttatcatgccaatgtttgatgacgc

SEQ ID NO: 237026 - DNA, 25 bp, Probe sequence
ttatgcatttgaacgcattgctcaa

SEQ ID NO: 237027 - DNA, 25 bp, Probe sequence
ttacatatgattacacagccttaga

SEQ ID NO: 237028 - DNA, 25 bp, Probe sequence
ttaagggatcctggtaattataaag

SEQ ID NO: 237029 - DNA, 25 bp, Probe sequence
ttgaacgcattgctcaaatgttgat

SEQ ID NO: 237030 - DNA, 25 bp, Probe sequence
ttgatgacgcattaccttattacaa

SEQ ID NO: 237031 - DNA, 25 bp, Probe sequence
attcctcatttatacgtaactaata

SEQ ID NO: 237032 - DNA, 25 bp, Probe sequence
attacgtgaaatgcacattgatgct

SEQ ID NO: 237033 - DNA, 25 bp, Probe sequence
atatttcagaacaatcaccaggagc

SEQ ID NO: 237034 - DNA, 25 bp, Probe sequence
atccgaagttgctatggtaggcgat

SEQ ID NO: 237035 - DNA, 25 bp, Probe sequence
atgtagttattggacttgacgaaca

SEQ ID NO: 237036 - DNA, 25 bp, Probe sequence
atgacgagcatgttgattatgtagt

SEQ ID NO: 237037 - DNA, 25 bp, Probe sequence
atgtctggtattaacgtaggtatgg

SEQ ID NO: 237038 - DNA, 25 bp, Probe sequence
agataaatccgaagttgctatggta

SEQ ID NO: 237039 - DNA, 25 bp, Probe sequence
acaagtgttgtaagtgtatcgacag

SEQ ID NO: 237040 - DNA, 25 bp, Probe sequence
aaagcttgcgattgcaacgttaggt

SEQ ID NO: 237041 - DNA, 25 bp, Probe sequence
aaagcgtatttaatcgatttagatg

SEQ ID NO: 237042 - DNA, 25 bp, Probe sequence
aaaacacctgagcaagtaactgaaa

SEQ ID NO: 237043 - DNA, 25 bp, Probe sequence
aaaatgtgccaccaacgtattcttt

SEQ ID NO: 237044 - DNA, 25 bp, Probe sequence
caaacaggtgtatctacgttagaag

SEQ ID NO: 237045 - DNA, 25 bp, Probe sequence
gcacattgatgctaaaccagaagag

SEQ ID NO: 237046 - DNA, 25 bp, Probe sequence
gaacaatcaccaggagcatcagtat

SEQ ID NO: 237047 - DNA, 25 bp, Probe sequence
gacaggtgtatcgccacaatttatt

SEQ ID NO: 237048 - DNA, 25 bp, Probe sequence
gaggttgtaacgtcagcgttagcca

SEQ ID NO: 237049 - DNA, 25 bp, Probe sequence
gatggcacaatgtatatgggaacag

SEQ ID NO: 237050 - DNA, 25 bp, Probe sequence
gatacgattcatgtacaaacaggtg

SEQ ID NO: 237051 - DNA, 25 bp, Probe sequence
gttacatatgaaaagcttgcgattg

SEQ ID NO: 237052 - DNA, 25 bp, Probe sequence
gtatcgccacaatttattggtaaac

SEQ ID NO: 237053 - DNA, 25 bp, Probe sequence
gtgtatcgacaggtgtatcgccaca

SEQ ID NO: 237054 - DNA, 25 bp, Probe sequence
gggaacagatgagattgatggagca

SEQ ID NO: 237055 - DNA, 25 bp, Probe sequence
ggagcaaaacaattcatcgattatt

SEQ ID NO: 237056 - DNA, 25 bp, Probe sequence
ggagcatcagtatatatgttaggtg

SEQ ID NO: 237057 - DNA, 25 bp, Probe sequence
tggtaaaccagaaccgattattatg

SEQ ID NO: 237058 - DNA, 25 bp, Probe sequence
tgtacgataccgatattatgtctgg

SEQ ID NO: 237059 - DNA, 25 bp, Probe sequence
tgcgattgcaacgttaggtgtaaga

SEQ ID NO: 237060 - DNA, 25 bp, Probe sequence
tgccaccaacgtattcttttaaaga

SEQ ID NO: 237061 - DNA, 25 bp, Probe sequence
taaatactgcgttaaccgaagcggg

SEQ ID NO: 237062 - DNA, 25 bp, Probe sequence
taaccgaagcgggacttgtcattaa

SEQ ID NO: 237063 - DNA, 25 bp, Probe sequence
taggtatggatacgattcatgtaca

SEQ ID NO: 237064 - DNA, 25 bp, Probe sequence
ttgtaacgtcagcgttagccactgc

SEQ ID NO: 237065 - DNA, 25 bp, Probe sequence
attctataccggacccattgatgat

SEQ ID NO: 237066 - DNA, 25 bp, Probe sequence
atttattttaggtgatgatcgcgga

SEQ ID NO: 237067 - DNA, 25 bp, Probe sequence
ataccaattgtacgtgtcactgcag

SEQ ID NO: 237068 - DNA, 25 bp, Probe sequence
atcgccatttaagtgcatctctagc

SEQ ID NO: 237069 - DNA, 25 bp, Probe sequence
atcgcggaaaaatatatcgccattt

SEQ ID NO: 237070 - DNA, 25 bp, Probe sequence
atggcaaacgcgtgatgatcaagta

SEQ ID NO: 237071 - DNA, 25 bp, Probe sequence
agcgggtatgactttgttgtgattg

SEQ ID NO: 237072 - DNA, 25 bp, Probe sequence
aacatttttgtgcattaccacgtga

SEQ ID NO: 237073 - DNA, 25 bp, Probe sequence
aattcgtgcagctgaagcagcgcat

SEQ ID NO: 237074 - DNA, 25 bp, Probe sequence
cagtcacttggcataccatggcaaa

SEQ ID NO: 237075 - DNA, 25 bp, Probe sequence
gcatggcaagatttggacgtacacc

SEQ ID NO: 237076 - DNA, 25 bp, Probe sequence
gcaaaatggcaggcacaaggtgtac

SEQ ID NO: 237077 - DNA, 25 bp, Probe sequence
gaagcagcgcatattataccaattg

SEQ ID NO: 237078 - DNA, 25 bp, Probe sequence
gacatgatagtcgaaggtgccgcag

SEQ ID NO: 237079 - DNA, 25 bp, Probe sequence
gacactagcgcatttaattcgtgca

SEQ ID NO: 237080 - DNA, 25 bp, Probe sequence
gagcatattatggtgattgccatga

SEQ ID NO: 237081 - DNA, 25 bp, Probe sequence
gaggttatcgcagcaagcgggtatg

SEQ ID NO: 237082 - DNA, 25 bp, Probe sequence
gatgcaatggagatggctaatgagc

SEQ ID NO: 237083 - DNA, 25 bp, Probe sequence
gatcgtgagacagttgagcatattg

SEQ ID NO: 237084 - DNA, 25 bp, Probe sequence
gatcaagtaacatcacatgttcaac

SEQ ID NO: 237085 - DNA, 25 bp, Probe sequence
gattgatacagaacacgtggcgatt

SEQ ID NO: 237086 - DNA, 25 bp, Probe sequence
gttgaaggggttatggccattgacg

SEQ ID NO: 237087 - DNA, 25 bp, Probe sequence
gtttgaatggtggtcgcatggcaag

SEQ ID NO: 237088 - DNA, 25 bp, Probe sequence
gtgcatctctagcgacgtctaaaca

SEQ ID NO: 237089 - DNA, 25 bp, Probe sequence
gggttatggccattgacgatatagc

SEQ ID NO: 237090 - DNA, 25 bp, Probe sequence
ggacgtacaccattacttgatgcaa

SEQ ID NO: 237091 - DNA, 25 bp, Probe sequence
ggcataccatggcaaacgcgtgatg

SEQ ID NO: 237092 - DNA, 25 bp, Probe sequence
ggcgattaatgatgagacactagcg

SEQ ID NO: 237093 - DNA, 25 bp, Probe sequence
tggcatttttaattctataccggac

SEQ ID NO: 237094 - DNA, 25 bp, Probe sequence
tgggtgcgagaggtattattgtgcc

SEQ ID NO: 237095 - DNA, 25 bp, Probe sequence
tggtgattcagtttatggcattttt

SEQ ID NO: 237096 - DNA, 25 bp, Probe sequence
taagtcgttattacccgcaaggatt

SEQ ID NO: 237097 - DNA, 25 bp, Probe sequence
tagtcgaaggtgccgcagatttatc

SEQ ID NO: 237098 - DNA, 25 bp, Probe sequence
tattgtgccacacgttaaagatcgt

SEQ ID NO: 237099 - DNA, 25 bp, Probe sequence
atgcaacatatgtttcttttgaaac

SEQ ID NO: 237100 - DNA, 25 bp, Probe sequence
aggtaaagatgtcttcaattcaact

SEQ ID NO: 237101 - DNA, 25 bp, Probe sequence
agtgcctatgcctaaagatcaattt

SEQ ID NO: 237102 - DNA, 25 bp, Probe sequence
agtaattgcgaatatggctgtagga

SEQ ID NO: 237103 - DNA, 25 bp, Probe sequence
agcgcatcagtaacaacacgggaca

SEQ ID NO: 237104 - DNA, 25 bp, Probe sequence
acagcgccacttacaaaagaaacac

SEQ ID NO: 237105 - DNA, 25 bp, Probe sequence
aacacgggacaatatgattcaatta

SEQ ID NO: 237106 - DNA, 25 bp, Probe sequence
aacttggtgacgttgttatgtggca

SEQ ID NO: 237107 - DNA, 25 bp, Probe sequence
aacgtggttgtcacgaatacaccaa

SEQ ID NO: 237108 - DNA, 25 bp, Probe sequence
caaaaatcattagtgcctatgccta

SEQ ID NO: 237109 - DNA, 25 bp, Probe sequence
cacattggtagcgcatcagtaacaa

SEQ ID NO: 237110 - DNA, 25 bp, Probe sequence
gctggggtccttatttattgtcagg

SEQ ID NO: 237111 - DNA, 25 bp, Probe sequence
gcatgtggtttagatgtattagcaa

SEQ ID NO: 237112 - DNA, 25 bp, Probe sequence
gcacttcgtgacgcagatgcttgtt

SEQ ID NO: 237113 - DNA, 25 bp, Probe sequence
gaaacaactgcagaattaggattta

SEQ ID NO: 237114 - DNA, 25 bp, Probe sequence
gaaacagcattaatcgatgcactag

SEQ ID NO: 237115 - DNA, 25 bp, Probe sequence
gaaacgttgttagcagaaagtgatt

SEQ ID NO: 237116 - DNA, 25 bp, Probe sequence
gacataaagatgcagaggcggactt

SEQ ID NO: 237117 - DNA, 25 bp, Probe sequence
gacgtgataatgttctgattacacc

SEQ ID NO: 237118 - DNA, 25 bp, Probe sequence
gaggcggactttaatgcaacatatg

SEQ ID NO: 237119 - DNA, 25 bp, Probe sequence
gatgcatggcaaagctggggtcctt

SEQ ID NO: 237120 - DNA, 25 bp, Probe sequence
gatcatacacatccattaatgggac

SEQ ID NO: 237121 - DNA, 25 bp, Probe sequence
gatcaatttgtgacagcacttcgtg

SEQ ID NO: 237122 - DNA, 25 bp, Probe sequence
gtgaacagatcgatgcagaaatttt

SEQ ID NO: 237123 - DNA, 25 bp, Probe sequence
gtgattttatcatctgtacagcgcc

SEQ ID NO: 237124 - DNA, 25 bp, Probe sequence
gggagatattggtaaagcttttgca

SEQ ID NO: 237125 - DNA, 25 bp, Probe sequence
ggtaaagcttttgcaagaaggttgc

SEQ ID NO: 237126 - DNA, 25 bp, Probe sequence
ggttatgacaaatcaggtaccacat

SEQ ID NO: 237127 - DNA, 25 bp, Probe sequence
ggctgtaggatatgacaacatcgat

SEQ ID NO: 237128 - DNA, 25 bp, Probe sequence
tgatgcaatttttattaatatcggt

SEQ ID NO: 237129 - DNA, 25 bp, Probe sequence
tcatctgtacagcgccacttacaaa

SEQ ID NO: 237130 - DNA, 25 bp, Probe sequence
ttaggatttacattaatgcttgcta

SEQ ID NO: 237131 - DNA, 25 bp, Probe sequence
ttcgtgacgcagatgcttgttttat

SEQ ID NO: 237132 - DNA, 25 bp, Probe sequence
ttgtgacagcacttcgtgacgcaga

SEQ ID NO: 237133 - DNA, 25 bp, Probe sequence
atagcaggatcttctcttgtaatgg

SEQ ID NO: 237134 - DNA, 25 bp, Probe sequence
atcaatagcaggatcttctcttgta

SEQ ID NO: 237135 - DNA, 25 bp, Probe sequence
agatggatttgatgttcaagtaatt

SEQ ID NO: 237136 - DNA, 25 bp, Probe sequence
aaaaaatgaaagtaccttgcatctt

SEQ ID NO: 237137 - DNA, 25 bp, Probe sequence
aaaacgtcaaaagtgatgccaacta

SEQ ID NO: 237138 - DNA, 25 bp, Probe sequence
aacagttggaggcgctggcactggt

SEQ ID NO: 237139 - DNA, 25 bp, Probe sequence
aagtattattaagtacagtcgtagt

SEQ ID NO: 237140 - DNA, 25 bp, Probe sequence
aagtaccttgcatctttcatttgaa

SEQ ID NO: 237141 - DNA, 25 bp, Probe sequence
cagcttcagttataccaggtttagg

SEQ ID NO: 237142 - DNA, 25 bp, Probe sequence
gctagtgcagcttcagttataccag

SEQ ID NO: 237143 - DNA, 25 bp, Probe sequence
ggtttctggtggtgccacaggtgcc

SEQ ID NO: 237144 - DNA, 25 bp, Probe sequence
gacaacgctcatgctgaacaaaaaa

SEQ ID NO: 237145 - DNA, 25 bp, Probe sequence
gataatatcgggaaactgaatcaaa

SEQ ID NO: 237146 - DNA, 25 bp, Probe sequence
gttgcaggtgctattattggtgggg

SEQ ID NO: 237147 - DNA, 25 bp, Probe sequence
gttcaagtaattaaatctagtcaag

SEQ ID NO: 237148 - DNA, 25 bp, Probe sequence
gtaccttgcatctttcatttgaaaa

SEQ ID NO: 237149 - DNA, 25 bp, Probe sequence
gtacagtcgtagttatgggatcaat

SEQ ID NO: 237150 - DNA, 25 bp, Probe sequence
gtaatggatgacaacgctcatgctg

SEQ ID NO: 237151 - DNA, 25 bp, Probe sequence
gtcgtagttatgggatcaatagcag

SEQ ID NO: 237152 - DNA, 25 bp, Probe sequence
gtgcagcttcagttataccaggttt

SEQ ID NO: 237153 - DNA, 25 bp, Probe sequence
gtgatgccaactaatgctaaagata

SEQ ID NO: 237154 - DNA, 25 bp, Probe sequence
gtggtctaggaacagttggaggcgc

SEQ ID NO: 237155 - DNA, 25 bp, Probe sequence
gggactgttgacaaaaatggtaagt

SEQ ID NO: 237156 - DNA, 25 bp, Probe sequence
ggtgctattattggtggggtttctg

SEQ ID NO: 237157 - DNA, 25 bp, Probe sequence
ggtgctagtgcagcttcagttatac

SEQ ID NO: 237158 - DNA, 25 bp, Probe sequence
ggtaagttaacattatctgatggaa

SEQ ID NO: 237159 - DNA, 25 bp, Probe sequence
ggatgacaacgctcatgctgaacaa

SEQ ID NO: 237160 - DNA, 25 bp, Probe sequence
ggatcttctcttgtaatggatgaca

SEQ ID NO: 237161 - DNA, 25 bp, Probe sequence
ggaactgttgcaggtgctattattg

SEQ ID NO: 237162 - DNA, 25 bp, Probe sequence
tggtggggtttctggtggtgccaca

SEQ ID NO: 237163 - DNA, 25 bp, Probe sequence
tgccgcagcgtcatgtttcggttga

SEQ ID NO: 237164 - DNA, 25 bp, Probe sequence
taactgggttaaatgtggtctagga

SEQ ID NO: 237165 - DNA, 25 bp, Probe sequence
taccaggtttaggaactgttgcagg

SEQ ID NO: 237166 - DNA, 25 bp, Probe sequence
tattggtggggtttctggtggtgcc

SEQ ID NO: 237167 - DNA, 25 bp, Probe sequence
attgaatttcattatgaatatcgat

SEQ ID NO: 237168 - DNA, 25 bp, Probe sequence
attactatgttgaatctataaaatt

SEQ ID NO: 237169 - DNA, 25 bp, Probe sequence
atttcattatgaatatcgatataat

SEQ ID NO: 237170 - DNA, 25 bp, Probe sequence
atgacaaccaattactatgttgaat

SEQ ID NO: 237171 - DNA, 25 bp, Probe sequence
accaattactatgttgaatctataa

SEQ ID NO: 237172 - DNA, 25 bp, Probe sequence
actatgttgaatctataaaattaaa

SEQ ID NO: 237173 - DNA, 25 bp, Probe sequence
acaaccaattactatgttgaatcta

SEQ ID NO: 237174 - DNA, 25 bp, Probe sequence
aaccaattactatgttgaatctata

SEQ ID NO: 237175 - DNA, 25 bp, Probe sequence
aatatcgatataatgaattgtaaaa

SEQ ID NO: 237176 - DNA, 25 bp, Probe sequence
aatttcattatgaatatcgatataa

SEQ ID NO: 237177 - DNA, 25 bp, Probe sequence
aattactatgttgaatctataaaat

SEQ ID NO: 237178 - DNA, 25 bp, Probe sequence
caattactatgttgaatctataaaa

SEQ ID NO: 237179 - DNA, 25 bp, Probe sequence
caaccaattactatgttgaatctat

SEQ ID NO: 237180 - DNA, 25 bp, Probe sequence
ctatgttgaatctataaaattaaaa

SEQ ID NO: 237181 - DNA, 25 bp, Probe sequence
ccaattactatgttgaatctataaa

SEQ ID NO: 237182 - DNA, 25 bp, Probe sequence
gaatttcattatgaatatcgatata

SEQ ID NO: 237183 - DNA, 25 bp, Probe sequence
gaatatcgatataatgaattgtaaa

SEQ ID NO: 237184 - DNA, 25 bp, Probe sequence
gacaaccaattactatgttgaatct

SEQ ID NO: 237185 - DNA, 25 bp, Probe sequence
gatgacaaccaattactatgttgaa

SEQ ID NO: 237186 - DNA, 25 bp, Probe sequence
gtgatgacaaccaattactatgttg

SEQ ID NO: 237187 - DNA, 25 bp, Probe sequence
tgatgacaaccaattactatgttga

SEQ ID NO: 237188 - DNA, 25 bp, Probe sequence
tgacaaccaattactatgttgaatc

SEQ ID NO: 237189 - DNA, 25 bp, Probe sequence
tgaatttcattatgaatatcgatat

SEQ ID NO: 237190 - DNA, 25 bp, Probe sequence
tgaatatcgatataatgaattgtaa

SEQ ID NO: 237191 - DNA, 25 bp, Probe sequence
tactatgttgaatctataaaattaa

SEQ ID NO: 237192 - DNA, 25 bp, Probe sequence
ttactatgttgaatctataaaatta

SEQ ID NO: 237193 - DNA, 25 bp, Probe sequence
ttgaatttcattatgaatatcgata

SEQ ID NO: 237194 - DNA, 25 bp, Probe sequence
atttatggcagtggcgacacacaca

SEQ ID NO: 237195 - DNA, 25 bp, Probe sequence
atatgttgaagcattcaaaccatat

SEQ ID NO: 237196 - DNA, 25 bp, Probe sequence
atctaaaagtaaacagccacctaat

SEQ ID NO: 237197 - DNA, 25 bp, Probe sequence
atggcagtggcgacacacacaataa

SEQ ID NO: 237198 - DNA, 25 bp, Probe sequence
acagccacctaataaatatgttgaa

SEQ ID NO: 237199 - DNA, 25 bp, Probe sequence
aaccatatttattaacactattgta

SEQ ID NO: 237200 - DNA, 25 bp, Probe sequence
aagaactttaagaggtgcaatatga

SEQ ID NO: 237201 - DNA, 25 bp, Probe sequence
aagtaaacagccacctaataaatat

SEQ ID NO: 237202 - DNA, 25 bp, Probe sequence
aatttatggcagtggcgacacacac

SEQ ID NO: 237203 - DNA, 25 bp, Probe sequence
caaaccatatttattaacactattg

SEQ ID NO: 237204 - DNA, 25 bp, Probe sequence
cacacaataacttcatttataatga

SEQ ID NO: 237205 - DNA, 25 bp, Probe sequence
cagtggcgacacacacaataacttc

SEQ ID NO: 237206 - DNA, 25 bp, Probe sequence
gccacctaataaatatgttgaagca

SEQ ID NO: 237207 - DNA, 25 bp, Probe sequence
gcgacacacacaataacttcattta

SEQ ID NO: 237208 - DNA, 25 bp, Probe sequence
gcagtggcgacacacacaataactt

SEQ ID NO: 237209 - DNA, 25 bp, Probe sequence
gcattcaaaccatatttattaacac

SEQ ID NO: 237210 - DNA, 25 bp, Probe sequence
gaaatctaaaagtaaacagccacct

SEQ ID NO: 237211 - DNA, 25 bp, Probe sequence
gacacacacaataacttcatttata

SEQ ID NO: 237212 - DNA, 25 bp, Probe sequence
gaggtgcaatatgaaatctaaaagt

SEQ ID NO: 237213 - DNA, 25 bp, Probe sequence
gtatttggcaatatttattacttta

SEQ ID NO: 237214 - DNA, 25 bp, Probe sequence
gtaaacagccacctaataaatatgt

SEQ ID NO: 237215 - DNA, 25 bp, Probe sequence
gtggcgacacacacaataacttcat

SEQ ID NO: 237216 - DNA, 25 bp, Probe sequence
ggcagtggcgacacacacaataact

SEQ ID NO: 237217 - DNA, 25 bp, Probe sequence
ggcgacacacacaataacttcattt

SEQ ID NO: 237218 - DNA, 25 bp, Probe sequence
tggcgacacacacaataacttcatt

SEQ ID NO: 237219 - DNA, 25 bp, Probe sequence
tggcagtggcgacacacacaataac

SEQ ID NO: 237220 - DNA, 25 bp, Probe sequence
tgaagcattcaaaccatatttatta

SEQ ID NO: 237221 - DNA, 25 bp, Probe sequence
tactttatatttaatttatggcagt

SEQ ID NO: 237222 - DNA, 25 bp, Probe sequence
tatggcagtggcgacacacacaata

SEQ ID NO: 237223 - DNA, 25 bp, Probe sequence
tttggcaatatttattactttatat

SEQ ID NO: 237224 - DNA, 25 bp, Probe sequence
tttatggcagtggcgacacacacaa

SEQ ID NO: 237225 - DNA, 25 bp, Probe sequence
ttatggcagtggcgacacacacaat

SEQ ID NO: 237226 - DNA, 25 bp, Probe sequence
ttattaacactattgtatttggcaa

SEQ ID NO: 237227 - DNA, 25 bp, Probe sequence
ttaatttatggcagtggcgacacac

SEQ ID NO: 237228 - DNA, 25 bp, Probe sequence
attgtgggaaatattgaagtggagg

SEQ ID NO: 237229 - DNA, 25 bp, Probe sequence
attgttcaatattcttgctgaatta

SEQ ID NO: 237230 - DNA, 25 bp, Probe sequence
attcttgctgaattagattttgaag

SEQ ID NO: 237231 - DNA, 25 bp, Probe sequence
atacaacagatcgcaaaggacacgt

SEQ ID NO: 237232 - DNA, 25 bp, Probe sequence
ataaggactatcattatcaggataa

SEQ ID NO: 237233 - DNA, 25 bp, Probe sequence
atcgcaaaggacacgtgattggaat

SEQ ID NO: 237234 - DNA, 25 bp, Probe sequence
atgctttaaagttagttcataatgg

SEQ ID NO: 237235 - DNA, 25 bp, Probe sequence
atggattgttcaatattcttgctga

SEQ ID NO: 237236 - DNA, 25 bp, Probe sequence
acatacaacagatcgcaaaggacac

SEQ ID NO: 237237 - DNA, 25 bp, Probe sequence
acataaacatacaacagatcgcaaa

SEQ ID NO: 237238 - DNA, 25 bp, Probe sequence
acaacagatcgcaaaggacacgtga

SEQ ID NO: 237239 - DNA, 25 bp, Probe sequence
aaatatcaattatcaaaagtggtta

SEQ ID NO: 237240 - DNA, 25 bp, Probe sequence
aaacatacaacagatcgcaaaggac

SEQ ID NO: 237241 - DNA, 25 bp, Probe sequence
aacagatcgcaaaggacacgtgatt

SEQ ID NO: 237242 - DNA, 25 bp, Probe sequence
cagatcgcaaaggacacgtgattgg

SEQ ID NO: 237243 - DNA, 25 bp, Probe sequence
cgtgattggaatgttagagtgggca

SEQ ID NO: 237244 - DNA, 25 bp, Probe sequence
gcattttatgaatatgctttaaagt

SEQ ID NO: 237245 - DNA, 25 bp, Probe sequence
gcaaaggacacgtgattggaatgtt

SEQ ID NO: 237246 - DNA, 25 bp, Probe sequence
gaacataaacatacaacagatcgca

SEQ ID NO: 237247 - DNA, 25 bp, Probe sequence
gacgctaagtgatgtcatgaaagaa

SEQ ID NO: 237248 - DNA, 25 bp, Probe sequence
gagtgggcattagattacattgtgg

SEQ ID NO: 237249 - DNA, 25 bp, Probe sequence
gatcgcaaaggacacgtgattggaa

SEQ ID NO: 237250 - DNA, 25 bp, Probe sequence
gttcaatattcttgctgaattagat

SEQ ID NO: 237251 - DNA, 25 bp, Probe sequence
gttagagtgggcattagattacatt

SEQ ID NO: 237252 - DNA, 25 bp, Probe sequence
gttagttcataatggattgttcaat

SEQ ID NO: 237253 - DNA, 25 bp, Probe sequence
gtgggcattagattacattgtggga

SEQ ID NO: 237254 - DNA, 25 bp, Probe sequence
ggtgaacataaacatacaacagatc

SEQ ID NO: 237255 - DNA, 25 bp, Probe sequence
ggactatcattatcaggataaagca

SEQ ID NO: 237256 - DNA, 25 bp, Probe sequence
ggacacgtgattggaatgttagagt

SEQ ID NO: 237257 - DNA, 25 bp, Probe sequence
ggcattagattacattgtgggaaat

SEQ ID NO: 237258 - DNA, 25 bp, Probe sequence
tgggcattagattacattgtgggaa

SEQ ID NO: 237259 - DNA, 25 bp, Probe sequence
tgtcatgaaagaaacacaacacgtt

SEQ ID NO: 237260 - DNA, 25 bp, Probe sequence
tagagtgggcattagattacattgt

SEQ ID NO: 237261 - DNA, 25 bp, Probe sequence
tatacgaggaagataagtttcaatc

SEQ ID NO: 237262 - DNA, 25 bp, Probe sequence
attagcacatcgattacaaggtagt

SEQ ID NO: 237263 - DNA, 25 bp, Probe sequence
atccgacattacctgttggcgttga

SEQ ID NO: 237264 - DNA, 25 bp, Probe sequence
atgacttgaaatcacgcttaccaga

SEQ ID NO: 237265 - DNA, 25 bp, Probe sequence
atggtccaactgaagctacggtagc

SEQ ID NO: 237266 - DNA, 25 bp, Probe sequence
agatcaatatccgacattacctgtt

SEQ ID NO: 237267 - DNA, 25 bp, Probe sequence
agcattgctgttagacacacaactg

SEQ ID NO: 237268 - DNA, 25 bp, Probe sequence
acatttgggtatcaacaccatcatt

SEQ ID NO: 237269 - DNA, 25 bp, Probe sequence
aacatctcaagacccagtaattttt

SEQ ID NO: 237270 - DNA, 25 bp, Probe sequence
aacgacacagtatacacaatcttta

SEQ ID NO: 237271 - DNA, 25 bp, Probe sequence
aacgaattcttcttctgtggtgaaa

SEQ ID NO: 237272 - DNA, 25 bp, Probe sequence
aatgctaacagcaacaccgattaac

SEQ ID NO: 237273 - DNA, 25 bp, Probe sequence
caaggttcaaccagagtttgtattt

SEQ ID NO: 237274 - DNA, 25 bp, Probe sequence
caatctttacatctggttctactgg

SEQ ID NO: 237275 - DNA, 25 bp, Probe sequence
caagctgcaagcgtttgcggatgca

SEQ ID NO: 237276 - DNA, 25 bp, Probe sequence
cttaccagagtatatgattcctaga

SEQ ID NO: 237277 - DNA, 25 bp, Probe sequence
cgatgattttattcggtcacatgtc

SEQ ID NO: 237278 - DNA, 25 bp, Probe sequence
gcgccattttcatttgatttatctg

SEQ ID NO: 237279 - DNA, 25 bp, Probe sequence
gctacggtagcagttacaagtattc

SEQ ID NO: 237280 - DNA, 25 bp, Probe sequence
gaagcgattgttgtacctgtatata

SEQ ID NO: 237281 - DNA, 25 bp, Probe sequence
gaaacacaattacgccagtctgagt

SEQ ID NO: 237282 - DNA, 25 bp, Probe sequence
gaaattctacctcacagagcagcaa

SEQ ID NO: 237283 - DNA, 25 bp, Probe sequence
gatttacaacacatatggtccaact

SEQ ID NO: 237284 - DNA, 25 bp, Probe sequence
gtttcccaagtgcgacgatttacaa

SEQ ID NO: 237285 - DNA, 25 bp, Probe sequence
gtgccaacgactgaagttacggaca

SEQ ID NO: 237286 - DNA, 25 bp, Probe sequence
ggatgtggatatgtacctgtagaca

SEQ ID NO: 237287 - DNA, 25 bp, Probe sequence
ggaacaattgccattgacttcaaat

SEQ ID NO: 237288 - DNA, 25 bp, Probe sequence
ggcttaaccaagcgccattttcatt

SEQ ID NO: 237289 - DNA, 25 bp, Probe sequence
tggtgcaattgtgccaacgactgaa

SEQ ID NO: 237290 - DNA, 25 bp, Probe sequence
tggtagtcttaacgaattcttcttc

SEQ ID NO: 237291 - DNA, 25 bp, Probe sequence
tgtgtttattattaccaacgcttaa

SEQ ID NO: 237292 - DNA, 25 bp, Probe sequence
tcaattcctgaagaccgtattaaaa

SEQ ID NO: 237293 - DNA, 25 bp, Probe sequence
tcaatggttcattcaaggtcgtatt

SEQ ID NO: 237294 - DNA, 25 bp, Probe sequence
tacctgtagacacttcaattcctga

SEQ ID NO: 237295 - DNA, 25 bp, Probe sequence
ttcggtcacatgtcaccatatatga

SEQ ID NO: 237296 - DNA, 25 bp, Probe sequence
attggtaacgttgcttcttatagta

SEQ ID NO: 237297 - DNA, 25 bp, Probe sequence
ataatggacgaagttgaaataccta

SEQ ID NO: 237298 - DNA, 25 bp, Probe sequence
atggacgaagttgaaatacctaaag

SEQ ID NO: 237299 - DNA, 25 bp, Probe sequence
agtacatgttatttcataatggacg

SEQ ID NO: 237300 - DNA, 25 bp, Probe sequence
acgttgcttcttatagtacatgtta

SEQ ID NO: 237301 - DNA, 25 bp, Probe sequence
acattggtaacgttgcttcttatag

SEQ ID NO: 237302 - DNA, 25 bp, Probe sequence
acatgttatttcataatggacgaag

SEQ ID NO: 237303 - DNA, 25 bp, Probe sequence
aaacattggtaacgttgcttcttat

SEQ ID NO: 237304 - DNA, 25 bp, Probe sequence
aacattggtaacgttgcttcttata

SEQ ID NO: 237305 - DNA, 25 bp, Probe sequence
aacgttgcttcttatagtacatgtt

SEQ ID NO: 237306 - DNA, 25 bp, Probe sequence
catgttatttcataatggacgaagt

SEQ ID NO: 237307 - DNA, 25 bp, Probe sequence
cattggtaacgttgcttcttatagt

SEQ ID NO: 237308 - DNA, 25 bp, Probe sequence
cttcttatagtacatgttatttcat

SEQ ID NO: 237309 - DNA, 25 bp, Probe sequence
cttatagtacatgttatttcataat

SEQ ID NO: 237310 - DNA, 25 bp, Probe sequence
ctaaagaattaactcaattacacga

SEQ ID NO: 237311 - DNA, 25 bp, Probe sequence
cgttgcttcttatagtacatgttat

SEQ ID NO: 237312 - DNA, 25 bp, Probe sequence
gcttcttatagtacatgttatttca

SEQ ID NO: 237313 - DNA, 25 bp, Probe sequence
gaaatacctaaagaattaactcaat

SEQ ID NO: 237314 - DNA, 25 bp, Probe sequence
gacgaagttgaaatacctaaagaat

SEQ ID NO: 237315 - DNA, 25 bp, Probe sequence
gttgcttcttatagtacatgttatt

SEQ ID NO: 237316 - DNA, 25 bp, Probe sequence
gttatttcataatggacgaagttga

SEQ ID NO: 237317 - DNA, 25 bp, Probe sequence
gtacatgttatttcataatggacga

SEQ ID NO: 237318 - DNA, 25 bp, Probe sequence
gtaacgttgcttcttatagtacatg

SEQ ID NO: 237319 - DNA, 25 bp, Probe sequence
ggtaacgttgcttcttatagtacat

SEQ ID NO: 237320 - DNA, 25 bp, Probe sequence
tggacgaagttgaaatacctaaaga

SEQ ID NO: 237321 - DNA, 25 bp, Probe sequence
tggtaacgttgcttcttatagtaca

SEQ ID NO: 237322 - DNA, 25 bp, Probe sequence
tgcttcttatagtacatgttatttc

SEQ ID NO: 237323 - DNA, 25 bp, Probe sequence
taatggacgaagttgaaatacctaa

SEQ ID NO: 237324 - DNA, 25 bp, Probe sequence
taacgttgcttcttatagtacatgt

SEQ ID NO: 237325 - DNA, 25 bp, Probe sequence
tacatgttatttcataatggacgaa

SEQ ID NO: 237326 - DNA, 25 bp, Probe sequence
tagtacatgttatttcataatggac

SEQ ID NO: 237327 - DNA, 25 bp, Probe sequence
ttcttatagtacatgttatttcata

SEQ ID NO: 237328 - DNA, 25 bp, Probe sequence
ttggtaacgttgcttcttatagtac

SEQ ID NO: 237329 - DNA, 25 bp, Probe sequence
ttgcttcttatagtacatgttattt

SEQ ID NO: 237330 - DNA, 25 bp, Probe sequence
atttacgtcgtatggcaagttttat

SEQ ID NO: 237331 - DNA, 25 bp, Probe sequence
attccactttgtaacatttggcttt

SEQ ID NO: 237332 - DNA, 25 bp, Probe sequence
attgcattattaccagtcattatac

SEQ ID NO: 237333 - DNA, 25 bp, Probe sequence
atttattctttgactttgcaggtta

SEQ ID NO: 237334 - DNA, 25 bp, Probe sequence
atgacattatcattctggttcagag

SEQ ID NO: 237335 - DNA, 25 bp, Probe sequence
atgtctaacgtggcattcttaatca

SEQ ID NO: 237336 - DNA, 25 bp, Probe sequence
atggtttcacaacagcacttagcat

SEQ ID NO: 237337 - DNA, 25 bp, Probe sequence
agatctttattctacatgtctcgta

SEQ ID NO: 237338 - DNA, 25 bp, Probe sequence
agcatttagttatttattcggtatt

SEQ ID NO: 237339 - DNA, 25 bp, Probe sequence
agcattgtgattacattccactttg

SEQ ID NO: 237340 - DNA, 25 bp, Probe sequence
aacacatatgcaatcatgccgttac

SEQ ID NO: 237341 - DNA, 25 bp, Probe sequence
aattcaatttatttcattcttccca

SEQ ID NO: 237342 - DNA, 25 bp, Probe sequence
catgattatgcttggtttcttgtat

SEQ ID NO: 237343 - DNA, 25 bp, Probe sequence
ccatgcagcattgtttataggttat

SEQ ID NO: 237344 - DNA, 25 bp, Probe sequence
gaatttggcatggtatcgaagtgta

SEQ ID NO: 237345 - DNA, 25 bp, Probe sequence
gaaacatccgccacgttggcaaaat

SEQ ID NO: 237346 - DNA, 25 bp, Probe sequence
gacttacatggctttgtcaatttgt

SEQ ID NO: 237347 - DNA, 25 bp, Probe sequence
gagtcaatttgcaatgtctaacgtg

SEQ ID NO: 237348 - DNA, 25 bp, Probe sequence
gattttacattcttcttaattgctt

SEQ ID NO: 237349 - DNA, 25 bp, Probe sequence
gattgtgttaatcttttcttctgat

SEQ ID NO: 237350 - DNA, 25 bp, Probe sequence
gttggtttcttaggaatttcttatg

SEQ ID NO: 237351 - DNA, 25 bp, Probe sequence
gttgcttactttattaacacatatg

SEQ ID NO: 237352 - DNA, 25 bp, Probe sequence
gtaccaacaggcaatgaatatcgtg

SEQ ID NO: 237353 - DNA, 25 bp, Probe sequence
ggtggacatcagattcacttccatg

SEQ ID NO: 237354 - DNA, 25 bp, Probe sequence
ggttatggctattatgaacgttggc

SEQ ID NO: 237355 - DNA, 25 bp, Probe sequence
ggaaattcgtgatggttctatcaaa

SEQ ID NO: 237356 - DNA, 25 bp, Probe sequence
ggcattcttaatcaacttcttcata

SEQ ID NO: 237357 - DNA, 25 bp, Probe sequence
ggcgtagttacagcatttatgattg

SEQ ID NO: 237358 - DNA, 25 bp, Probe sequence
tcattcttcccaacgatttcatctg

SEQ ID NO: 237359 - DNA, 25 bp, Probe sequence
tcatctggaccaatcgatcgttaca

SEQ ID NO: 237360 - DNA, 25 bp, Probe sequence
tcatgccgttacaattagacttaca

SEQ ID NO: 237361 - DNA, 25 bp, Probe sequence
tcaatattgccattagcacttgtga

SEQ ID NO: 237362 - DNA, 25 bp, Probe sequence
tattaaaacaccaccaaacttcgat

SEQ ID NO: 237363 - DNA, 25 bp, Probe sequence
tttggctttttaatcttctcaggta

SEQ ID NO: 237364 - DNA, 25 bp, Probe sequence
attattgattctttccaaacagttg

SEQ ID NO: 237365 - DNA, 25 bp, Probe sequence
ataaacttgatatcgaagtatctat

SEQ ID NO: 237366 - DNA, 25 bp, Probe sequence
atcgttgaagcattagaagagttac

SEQ ID NO: 237367 - DNA, 25 bp, Probe sequence
atcgaagtatctattatggactttg

SEQ ID NO: 237368 - DNA, 25 bp, Probe sequence
aggtattattgattctttccaaaca

SEQ ID NO: 237369 - DNA, 25 bp, Probe sequence
aacagttggattattattagagatt

SEQ ID NO: 237370 - DNA, 25 bp, Probe sequence
aatccagacgtagaaatttttgaag

SEQ ID NO: 237371 - DNA, 25 bp, Probe sequence
aatttattagcagaagtagcagaaa

SEQ ID NO: 237372 - DNA, 25 bp, Probe sequence
caccaaataaaatcgttgaagcatt

SEQ ID NO: 237373 - DNA, 25 bp, Probe sequence
cagttggattattattagagattca

SEQ ID NO: 237374 - DNA, 25 bp, Probe sequence
ccaaacagttggattattattagag

SEQ ID NO: 237375 - DNA, 25 bp, Probe sequence
gaaggtattattgattctttccaaa

SEQ ID NO: 237376 - DNA, 25 bp, Probe sequence
gaagtatctattatggactttgata

SEQ ID NO: 237377 - DNA, 25 bp, Probe sequence
gaagtagcagaaaatgatattgtaa

SEQ ID NO: 237378 - DNA, 25 bp, Probe sequence
gaacaagtattaaatttattagcag

SEQ ID NO: 237379 - DNA, 25 bp, Probe sequence
gagatgagtgggcaacaccaaataa

SEQ ID NO: 237380 - DNA, 25 bp, Probe sequence
gagtgggcaacaccaaataaaatcg

SEQ ID NO: 237381 - DNA, 25 bp, Probe sequence
gatgagtgggcaacaccaaataaaa

SEQ ID NO: 237382 - DNA, 25 bp, Probe sequence
gatagagatgagtgggcaacaccaa

SEQ ID NO: 237383 - DNA, 25 bp, Probe sequence
gatatcgaagtatctattatggact

SEQ ID NO: 237384 - DNA, 25 bp, Probe sequence
gattctttccaaacagttggattat

SEQ ID NO: 237385 - DNA, 25 bp, Probe sequence
gttgaagcattagaagagttacgat

SEQ ID NO: 237386 - DNA, 25 bp, Probe sequence
gtattattgattctttccaaacagt

SEQ ID NO: 237387 - DNA, 25 bp, Probe sequence
gtgggcaacaccaaataaaatcgtt

SEQ ID NO: 237388 - DNA, 25 bp, Probe sequence
gggcaacaccaaataaaatcgttga

SEQ ID NO: 237389 - DNA, 25 bp, Probe sequence
ggtattattgattctttccaaacag

SEQ ID NO: 237390 - DNA, 25 bp, Probe sequence
ggactttgatagagatgagtgggca

SEQ ID NO: 237391 - DNA, 25 bp, Probe sequence
tgaagcattagaagagttacgatga

SEQ ID NO: 237392 - DNA, 25 bp, Probe sequence
tccagacgtagaaatttttgaagaa

SEQ ID NO: 237393 - DNA, 25 bp, Probe sequence
tagagatgagtgggcaacaccaaat

SEQ ID NO: 237394 - DNA, 25 bp, Probe sequence
tattattgattctttccaaacagtt

SEQ ID NO: 237395 - DNA, 25 bp, Probe sequence
tattgattctttccaaacagttgga

SEQ ID NO: 237396 - DNA, 25 bp, Probe sequence
ttgtaaaagaaaatccagacgtaga

SEQ ID NO: 237397 - DNA, 25 bp, Probe sequence
ttattgattctttccaaacagttgg

SEQ ID NO: 237398 - DNA, 25 bp, Probe sequence
attgtctttctattattacctgcta

SEQ ID NO: 237399 - DNA, 25 bp, Probe sequence
attagaacatgttaaacctgctaca

SEQ ID NO: 237400 - DNA, 25 bp, Probe sequence
atcagtgatgccgtacacatcggtt

SEQ ID NO: 237401 - DNA, 25 bp, Probe sequence
atgacccatttaatcctgcaattgc

SEQ ID NO: 237402 - DNA, 25 bp, Probe sequence
atgtctactgaattaaaacgtcgtt

SEQ ID NO: 237403 - DNA, 25 bp, Probe sequence
atggtatgaccacattggtatcgat

SEQ ID NO: 237404 - DNA, 25 bp, Probe sequence
acagtttccacatgtacacaataaa

SEQ ID NO: 237405 - DNA, 25 bp, Probe sequence
acaacgtttattacagtttccacat

SEQ ID NO: 237406 - DNA, 25 bp, Probe sequence
aaacaatgcgtgctgctggtgcaga

SEQ ID NO: 237407 - DNA, 25 bp, Probe sequence
aaaaaaatccattctactgttgtag

SEQ ID NO: 237408 - DNA, 25 bp, Probe sequence
aacgtcgttatgcacaacgtttatt

SEQ ID NO: 237409 - DNA, 25 bp, Probe sequence
aacctgctacaaaaccagacgcttc

SEQ ID NO: 237410 - DNA, 25 bp, Probe sequence
aacgccaacaaaaaagcattcttat

SEQ ID NO: 237411 - DNA, 25 bp, Probe sequence
aaccagacgcttcttgggatgagat

SEQ ID NO: 237412 - DNA, 25 bp, Probe sequence
aagcgattaaatcattgtttgcaat

SEQ ID NO: 237413 - DNA, 25 bp, Probe sequence
aagaacgtcgtcaagcagtttataa

SEQ ID NO: 237414 - DNA, 25 bp, Probe sequence
aaggttgggtttatatggatgagca

SEQ ID NO: 237415 - DNA, 25 bp, Probe sequence
aattctccagaattccaagatttag

SEQ ID NO: 237416 - DNA, 25 bp, Probe sequence
caaaactttgatgctcgtatgtctc

SEQ ID NO: 237417 - DNA, 25 bp, Probe sequence
cattcttattaggtgctggtggttc

SEQ ID NO: 237418 - DNA, 25 bp, Probe sequence
ctgctggtgcagatgttcaatatgt

SEQ ID NO: 237419 - DNA, 25 bp, Probe sequence
gaacttcattgacagatcaagtact

SEQ ID NO: 237420 - DNA, 25 bp, Probe sequence
gatgctcgtatgtctcaaactcaaa

SEQ ID NO: 237421 - DNA, 25 bp, Probe sequence
gttccagcagaaaaacatgtctact

SEQ ID NO: 237422 - DNA, 25 bp, Probe sequence
gtacacatcggttggaaaggttggg

SEQ ID NO: 237423 - DNA, 25 bp, Probe sequence
gtactaaaaggcacactcattcaag

SEQ ID NO: 237424 - DNA, 25 bp, Probe sequence
gtaagtattccatcaaacggtgtat

SEQ ID NO: 237425 - DNA, 25 bp, Probe sequence
gtgaaccacaacctgaagtagataa

SEQ ID NO: 237426 - DNA, 25 bp, Probe sequence
gtggagcggtattcattgtctttct

SEQ ID NO: 237427 - DNA, 25 bp, Probe sequence
ggtgctggtggttctacagacttaa

SEQ ID NO: 237428 - DNA, 25 bp, Probe sequence
tgaaatcttatgctaaaaaccctaa

SEQ ID NO: 237429 - DNA, 25 bp, Probe sequence
tattatcctatatacggctctagtg

SEQ ID NO: 237430 - DNA, 25 bp, Probe sequence
ttattacctgctagttggtttacag

SEQ ID NO: 237431 - DNA, 25 bp, Probe sequence
ttaacatttattatttcaccacaat

SEQ ID NO: 237432 - DNA, 25 bp, Probe sequence
atttatgactggctacagccgctat

SEQ ID NO: 237433 - DNA, 25 bp, Probe sequence
atagaccaaaagcttgtgaatgaat

SEQ ID NO: 237434 - DNA, 25 bp, Probe sequence
atcactcgatttatagaccaaaagc

SEQ ID NO: 237435 - DNA, 25 bp, Probe sequence
atgcgccaacatcgaaagatattta

SEQ ID NO: 237436 - DNA, 25 bp, Probe sequence
atgactggctacagccgctattaaa

SEQ ID NO: 237437 - DNA, 25 bp, Probe sequence
atgtgcaagttgcgttaatgcgcca

SEQ ID NO: 237438 - DNA, 25 bp, Probe sequence
agttgcgttaatgcgccaacatcga

SEQ ID NO: 237439 - DNA, 25 bp, Probe sequence
agatgttatatgtgcaagttgcgtt

SEQ ID NO: 237440 - DNA, 25 bp, Probe sequence
agatgaactattttatccattaatt

SEQ ID NO: 237441 - DNA, 25 bp, Probe sequence
agcaaatcactcgatttatagacca

SEQ ID NO: 237442 - DNA, 25 bp, Probe sequence
aagatatttatgactggctacagcc

SEQ ID NO: 237443 - DNA, 25 bp, Probe sequence
aagataatgacaacttaacagatca

SEQ ID NO: 237444 - DNA, 25 bp, Probe sequence
ctcgatttatagaccaaaagcttgt

SEQ ID NO: 237445 - DNA, 25 bp, Probe sequence
ctggctacagccgctattaaaaaga

SEQ ID NO: 237446 - DNA, 25 bp, Probe sequence
gcgttaatgcgccaacatcgaaaga

SEQ ID NO: 237447 - DNA, 25 bp, Probe sequence
gctacagccgctattaaaaagaaaa

SEQ ID NO: 237448 - DNA, 25 bp, Probe sequence
gcaagttgcgttaatgcgccaacat

SEQ ID NO: 237449 - DNA, 25 bp, Probe sequence
gaacgatgaatatgtagcagatggt

SEQ ID NO: 237450 - DNA, 25 bp, Probe sequence
gaactattttatccattaattacaa

SEQ ID NO: 237451 - DNA, 25 bp, Probe sequence
gaacaagatgaactattttatccat

SEQ ID NO: 237452 - DNA, 25 bp, Probe sequence
gaaaatacccaaatatatcatttaa

SEQ ID NO: 237453 - DNA, 25 bp, Probe sequence
gacaacttaacagatcatgatttac

SEQ ID NO: 237454 - DNA, 25 bp, Probe sequence
gactggctacagccgctattaaaaa

SEQ ID NO: 237455 - DNA, 25 bp, Probe sequence
gatatttatgactggctacagccgc

SEQ ID NO: 237456 - DNA, 25 bp, Probe sequence
gttaatgcgccaacatcgaaagata

SEQ ID NO: 237457 - DNA, 25 bp, Probe sequence
gtagcagatggttatatacaaacaa

SEQ ID NO: 237458 - DNA, 25 bp, Probe sequence
gtgcaagttgcgttaatgcgccaac

SEQ ID NO: 237459 - DNA, 25 bp, Probe sequence
ggggcagatgttatatgtgcaagtt

SEQ ID NO: 237460 - DNA, 25 bp, Probe sequence
taacagatcatgatttacaatttat

SEQ ID NO: 237461 - DNA, 25 bp, Probe sequence
tacaaacaaagcaaatcactcgatt

SEQ ID NO: 237462 - DNA, 25 bp, Probe sequence
tatggggcagatgttatatgtgcaa

SEQ ID NO: 237463 - DNA, 25 bp, Probe sequence
tatccattaattacaatgaacgatg

SEQ ID NO: 237464 - DNA, 25 bp, Probe sequence
ttatgactggctacagccgctatta

SEQ ID NO: 237465 - DNA, 25 bp, Probe sequence
ttgcgttaatgcgccaacatcgaaa

SEQ ID NO: 237466 - DNA, 25 bp, Probe sequence
attgttgaaggtgattcgccggaag

SEQ ID NO: 237467 - DNA, 25 bp, Probe sequence
attgtggtatatgttcagccgggtt

SEQ ID NO: 237468 - DNA, 25 bp, Probe sequence
atatgttcagccgggttgtatgctt

SEQ ID NO: 237469 - DNA, 25 bp, Probe sequence
atgaatccgatcgtagaattttgtc

SEQ ID NO: 237470 - DNA, 25 bp, Probe sequence
atgttcagccgggttgtatgcttta

SEQ ID NO: 237471 - DNA, 25 bp, Probe sequence
atgtgttagagtatggttgcctgac

SEQ ID NO: 237472 - DNA, 25 bp, Probe sequence
atggttgcctgacacattgtggtat

SEQ ID NO: 237473 - DNA, 25 bp, Probe sequence
agccgggttgtatgctttagtaaat

SEQ ID NO: 237474 - DNA, 25 bp, Probe sequence
aaatgacccagatgtcgatgtgtta

SEQ ID NO: 237475 - DNA, 25 bp, Probe sequence
gctttagtaaatggtgatattgttg

SEQ ID NO: 237476 - DNA, 25 bp, Probe sequence
gaattttgtctctctaacatggcaa

SEQ ID NO: 237477 - DNA, 25 bp, Probe sequence
gaatccgatcgtagaattttgtctc

SEQ ID NO: 237478 - DNA, 25 bp, Probe sequence
gaaggtgattcgccggaagaattat

SEQ ID NO: 237479 - DNA, 25 bp, Probe sequence
gacacattgtggtatatgttcagcc

SEQ ID NO: 237480 - DNA, 25 bp, Probe sequence
gacccagatgtcgatgtgttagagt

SEQ ID NO: 237481 - DNA, 25 bp, Probe sequence
gagtatggttgcctgacacattgtg

SEQ ID NO: 237482 - DNA, 25 bp, Probe sequence
gatcgtagaattttgtctctctaac

SEQ ID NO: 237483 - DNA, 25 bp, Probe sequence
gatattgttgaaggtgattcgccgg

SEQ ID NO: 237484 - DNA, 25 bp, Probe sequence
gttgcctgacacattgtggtatatg

SEQ ID NO: 237485 - DNA, 25 bp, Probe sequence
gttcagccgggttgtatgctttagt

SEQ ID NO: 237486 - DNA, 25 bp, Probe sequence
gttagagtatggttgcctgacacat

SEQ ID NO: 237487 - DNA, 25 bp, Probe sequence
gtatatgttcagccgggttgtatgc

SEQ ID NO: 237488 - DNA, 25 bp, Probe sequence
gtatggttgcctgacacattgtggt

SEQ ID NO: 237489 - DNA, 25 bp, Probe sequence
gtctctctaacatggcaaaaggtgg

SEQ ID NO: 237490 - DNA, 25 bp, Probe sequence
gtcgatgtgttagagtatggttgcc

SEQ ID NO: 237491 - DNA, 25 bp, Probe sequence
gtgattcgccggaagaattattaca

SEQ ID NO: 237492 - DNA, 25 bp, Probe sequence
gtggtatatgttcagccgggttgta

SEQ ID NO: 237493 - DNA, 25 bp, Probe sequence
ggaaaatgacccagatgtcgatgtg

SEQ ID NO: 237494 - DNA, 25 bp, Probe sequence
ggcaaaaggtggagattatgttttt

SEQ ID NO: 237495 - DNA, 25 bp, Probe sequence
tgttgaaggtgattcgccggaagaa

SEQ ID NO: 237496 - DNA, 25 bp, Probe sequence
tccgatcgtagaattttgtctctct

SEQ ID NO: 237497 - DNA, 25 bp, Probe sequence
tcgccggaagaattattacaaaata

SEQ ID NO: 237498 - DNA, 25 bp, Probe sequence
tcagccgggttgtatgctttagtaa

SEQ ID NO: 237499 - DNA, 25 bp, Probe sequence
ttatgtttttaatcaactggaaaat

SEQ ID NO: 237500 - DNA, 25 bp, Probe sequence
caatcattaatgggtggcggtttcc

SEQ ID NO: 237501 - DNA, 25 bp, Probe sequence
attaaagtgaatggtggcgggtgca

SEQ ID NO: 237502 - DNA, 25 bp, Probe sequence
atcattaatgggtggcggtttccaa

SEQ ID NO: 237503 - DNA, 25 bp, Probe sequence
atgccagatggctatttaaaaatta

SEQ ID NO: 237504 - DNA, 25 bp, Probe sequence
atgccaacagttatattaacagaag

SEQ ID NO: 237505 - DNA, 25 bp, Probe sequence
atgggtggcggtttccaaatcgaca

SEQ ID NO: 237506 - DNA, 25 bp, Probe sequence
atgtggctgtggtagttcatttaga

SEQ ID NO: 237507 - DNA, 25 bp, Probe sequence
atggtacgactattgattttaagca

SEQ ID NO: 237508 - DNA, 25 bp, Probe sequence
aaatcgacaatcctaatgcaattgc

SEQ ID NO: 237509 - DNA, 25 bp, Probe sequence
aagcaaatgaaatgccagatggcta

SEQ ID NO: 237510 - DNA, 25 bp, Probe sequence
aagcaatcattaatgggtggcggtt

SEQ ID NO: 237511 - DNA, 25 bp, Probe sequence
aagtgaatggtggcgggtgcactgg

SEQ ID NO: 237512 - DNA, 25 bp, Probe sequence
aagatgcacccgtattaaatggtac

SEQ ID NO: 237513 - DNA, 25 bp, Probe sequence
cagttatattaacagaagcagctgc

SEQ ID NO: 237514 - DNA, 25 bp, Probe sequence
cggtttccaaatcgacaatcctaat

SEQ ID NO: 237515 - DNA, 25 bp, Probe sequence
ccaaatcgacaatcctaatgcaatt

SEQ ID NO: 237516 - DNA, 25 bp, Probe sequence
gcggtttccaaatcgacaatcctaa

SEQ ID NO: 237517 - DNA, 25 bp, Probe sequence
gcacccgtattaaatggtacgacta

SEQ ID NO: 237518 - DNA, 25 bp, Probe sequence
gcaaaagttgcaggtaatcctgaaa

SEQ ID NO: 237519 - DNA, 25 bp, Probe sequence
gaagtcttagaatactttggattaa

SEQ ID NO: 237520 - DNA, 25 bp, Probe sequence
gatgaagtcttagaatactttggat

SEQ ID NO: 237521 - DNA, 25 bp, Probe sequence
gatgcacccgtattaaatggtacga

SEQ ID NO: 237522 - DNA, 25 bp, Probe sequence
gttcatttagaactgcaaaagttgc

SEQ ID NO: 237523 - DNA, 25 bp, Probe sequence
gtttccaaatcgacaatcctaatgc

SEQ ID NO: 237524 - DNA, 25 bp, Probe sequence
gtacgactattgattttaagcaatc

SEQ ID NO: 237525 - DNA, 25 bp, Probe sequence
gtggcggtttccaaatcgacaatcc

SEQ ID NO: 237526 - DNA, 25 bp, Probe sequence
gtggtagttcatttagaactgcaaa

SEQ ID NO: 237527 - DNA, 25 bp, Probe sequence
gtggctgtggtagttcatttagaac

SEQ ID NO: 237528 - DNA, 25 bp, Probe sequence
gggtggcggtttccaaatcgacaat

SEQ ID NO: 237529 - DNA, 25 bp, Probe sequence
ggtggcggtttccaaatcgacaatc

SEQ ID NO: 237530 - DNA, 25 bp, Probe sequence
tgggtggcggtttccaaatcgacaa

SEQ ID NO: 237531 - DNA, 25 bp, Probe sequence
tcatgtggctgtggtagttcattta

SEQ ID NO: 237532 - DNA, 25 bp, Probe sequence
taatgggtggcggtttccaaatcga

SEQ ID NO: 237533 - DNA, 25 bp, Probe sequence
ttccaaatcgacaatcctaatgcaa

SEQ ID NO: 237534 - DNA, 25 bp, Probe sequence
attccagaagcattagtaccattta

SEQ ID NO: 237535 - DNA, 25 bp, Probe sequence
attagttcatgctcaaactgtacgg

SEQ ID NO: 237536 - DNA, 25 bp, Probe sequence
atggtacgttttgaacaacctgaag

SEQ ID NO: 237537 - DNA, 25 bp, Probe sequence
atgctgatgatgtgattgctgaaat

SEQ ID NO: 237538 - DNA, 25 bp, Probe sequence
aggtgtacttcctgaaaaattcact

SEQ ID NO: 237539 - DNA, 25 bp, Probe sequence
aattattcaaccaggtgtacttcct

SEQ ID NO: 237540 - DNA, 25 bp, Probe sequence
acaggtatcctttgtcgtattccaa

SEQ ID NO: 237541 - DNA, 25 bp, Probe sequence
aaatgcgcacattaggtgacgatat

SEQ ID NO: 237542 - DNA, 25 bp, Probe sequence
aaaattcactggtcaatctgcatgt

SEQ ID NO: 237543 - DNA, 25 bp, Probe sequence
aactgtacggatttccaagcgcgtc

SEQ ID NO: 237544 - DNA, 25 bp, Probe sequence
aactgctgaagtaccattaacgaat

SEQ ID NO: 237545 - DNA, 25 bp, Probe sequence
aagcgtgacaaagcagctaaaccag

SEQ ID NO: 237546 - DNA, 25 bp, Probe sequence
aatggctgattttgatcgtgcagca

SEQ ID NO: 237547 - DNA, 25 bp, Probe sequence
caccacgtgagttttcatttgaacc

SEQ ID NO: 237548 - DNA, 25 bp, Probe sequence
cagaaatgatggtaccacagcttgt

SEQ ID NO: 237549 - DNA, 25 bp, Probe sequence
cgtcgtgttattttatgtacaggtg

SEQ ID NO: 237550 - DNA, 25 bp, Probe sequence
gaaggtgcgcaattagagcgtgctt

SEQ ID NO: 237551 - DNA, 25 bp, Probe sequence
gagcgtgctttaatgaactatatga

SEQ ID NO: 237552 - DNA, 25 bp, Probe sequence
gatcgtgcagcaaaagtttcaggtg

SEQ ID NO: 237553 - DNA, 25 bp, Probe sequence
gattatatacaattccaactgctga

SEQ ID NO: 237554 - DNA, 25 bp, Probe sequence
gattaattcgtttacatcaattcga

SEQ ID NO: 237555 - DNA, 25 bp, Probe sequence
gttggacgtacatttgctgctattg

SEQ ID NO: 237556 - DNA, 25 bp, Probe sequence
gtttcaggtgcgcgttttgtatatt

SEQ ID NO: 237557 - DNA, 25 bp, Probe sequence
gtttccgtagtgaagcaggatcagc

SEQ ID NO: 237558 - DNA, 25 bp, Probe sequence
gtttggttaccaagctacaatgatt

SEQ ID NO: 237559 - DNA, 25 bp, Probe sequence
gtatggtacaggtcaattacctaaa

SEQ ID NO: 237560 - DNA, 25 bp, Probe sequence
gtacaggtgatattggatttagtgc

SEQ ID NO: 237561 - DNA, 25 bp, Probe sequence
gtgctaacatccgcttcaagcgtga

SEQ ID NO: 237562 - DNA, 25 bp, Probe sequence
ggtagtggtttagcagttggacgta

SEQ ID NO: 237563 - DNA, 25 bp, Probe sequence
tggggtacaccacgtgagttttcat

SEQ ID NO: 237564 - DNA, 25 bp, Probe sequence
tggtcaatctgcatgtttccgtagt

SEQ ID NO: 237565 - DNA, 25 bp, Probe sequence
taagtgatgatgtacctcaaggtga

SEQ ID NO: 237566 - DNA, 25 bp, Probe sequence
tttccaagcgcgtcgtgctaacatc

SEQ ID NO: 237567 - DNA, 25 bp, Probe sequence
ttgctgctattgttgaaaattacca

SEQ ID NO: 237568 - DNA, 25 bp, Probe sequence
acgttagtcggtcaattatgtacac

SEQ ID NO: 237569 - DNA, 25 bp, Probe sequence
attgttttcaaatatgcaggtgcat

SEQ ID NO: 237570 - DNA, 25 bp, Probe sequence
atatctatgatttagtcggactgga

SEQ ID NO: 237571 - DNA, 25 bp, Probe sequence
atctcatccagtttgtcattatatc

SEQ ID NO: 237572 - DNA, 25 bp, Probe sequence
atgcgtatagttcaacctgttattg

SEQ ID NO: 237573 - DNA, 25 bp, Probe sequence
acaatttagactgccggtatcttgg

SEQ ID NO: 237574 - DNA, 25 bp, Probe sequence
aagccatccacatcctgaatttatt

SEQ ID NO: 237575 - DNA, 25 bp, Probe sequence
aagacacaacacattttattgcgtg

SEQ ID NO: 237576 - DNA, 25 bp, Probe sequence
aagtttcaatttcgagacaggacac

SEQ ID NO: 237577 - DNA, 25 bp, Probe sequence
aaggacaatccatattcatttgaaa

SEQ ID NO: 237578 - DNA, 25 bp, Probe sequence
caacgttgcatatggcaggacgccc

SEQ ID NO: 237579 - DNA, 25 bp, Probe sequence
cacgatttcttaagccatccacatc

SEQ ID NO: 237580 - DNA, 25 bp, Probe sequence
ctcaaacatatcaatcttggtggtg

SEQ ID NO: 237581 - DNA, 25 bp, Probe sequence
gcaggacgcccaacacaatttggta

SEQ ID NO: 237582 - DNA, 25 bp, Probe sequence
gaaggtgttcagcgtattcatgttg

SEQ ID NO: 237583 - DNA, 25 bp, Probe sequence
ggattcgaagttgcatctcaaggtg

SEQ ID NO: 237584 - DNA, 25 bp, Probe sequence
gaacatcatttgcaacatattacat

SEQ ID NO: 237585 - DNA, 25 bp, Probe sequence
gacaggacacaacgttagtcggtca

SEQ ID NO: 237586 - DNA, 25 bp, Probe sequence
gaccatttcccaatgcaacgttgca

SEQ ID NO: 237587 - DNA, 25 bp, Probe sequence
gaggaggtacgcaacaatttagact

SEQ ID NO: 237588 - DNA, 25 bp, Probe sequence
gtacaggcgacgttattgttttcaa

SEQ ID NO: 237589 - DNA, 25 bp, Probe sequence
gtacaccgaaagatgtctttgctag

SEQ ID NO: 237590 - DNA, 25 bp, Probe sequence
gtcggactggaacatcatttgcaac

SEQ ID NO: 237591 - DNA, 25 bp, Probe sequence
gtgttaatttagcaggaccatttcc

SEQ ID NO: 237592 - DNA, 25 bp, Probe sequence
gtgggcgctttattgtggcacatat

SEQ ID NO: 237593 - DNA, 25 bp, Probe sequence
ggtgcatacggatggtctatttcac

SEQ ID NO: 237594 - DNA, 25 bp, Probe sequence
ggccctggtaagacagacgaggaac

SEQ ID NO: 237595 - DNA, 25 bp, Probe sequence
tggtctatttcacatcacgatttct

SEQ ID NO: 237596 - DNA, 25 bp, Probe sequence
tacaacggctaaatgccatcttaga

SEQ ID NO: 237597 - DNA, 25 bp, Probe sequence
tattgtggcacatattggttactat

SEQ ID NO: 237598 - DNA, 25 bp, Probe sequence
tttcattttcattctatttctaaca

SEQ ID NO: 237599 - DNA, 25 bp, Probe sequence
ttaaaacacttatcgttgagcaaga

SEQ ID NO: 237600 - DNA, 25 bp, Probe sequence
ttaaaagcacaatctcatccagttt

SEQ ID NO: 237601 - DNA, 25 bp, Probe sequence
ttgaactttgaatgtgggcgcttta

SEQ ID NO: 237602 - DNA, 25 bp, Probe sequence
atatcctgtggaaagtgtcttgaag

SEQ ID NO: 237603 - DNA, 25 bp, Probe sequence
atcacttgtgttgaagcagcaccta

SEQ ID NO: 237604 - DNA, 25 bp, Probe sequence
agtagcattaggtttcgttagtgaa

SEQ ID NO: 237605 - DNA, 25 bp, Probe sequence
agtacttgtacttggtgctggttat

SEQ ID NO: 237606 - DNA, 25 bp, Probe sequence
agttaaccacgcagttagctactta

SEQ ID NO: 237607 - DNA, 25 bp, Probe sequence
agcatcagcaggtacactaaactat

SEQ ID NO: 237608 - DNA, 25 bp, Probe sequence
acgtgcggtattcaaaatcggtggt

SEQ ID NO: 237609 - DNA, 25 bp, Probe sequence
actgtttgttctttaggttcacatg

SEQ ID NO: 237610 - DNA, 25 bp, Probe sequence
acatggttacatgaagcatcagcag

SEQ ID NO: 237611 - DNA, 25 bp, Probe sequence
aaatttgctaactatgcagcatcaa

SEQ ID NO: 237612 - DNA, 25 bp, Probe sequence
aaatgttaccaatgttctcagaaga

SEQ ID NO: 237613 - DNA, 25 bp, Probe sequence
aaagatcatgctttccaaattgaaa

SEQ ID NO: 237614 - DNA, 25 bp, Probe sequence
aacaaaaattgaccgtgatgctaaa

SEQ ID NO: 237615 - DNA, 25 bp, Probe sequence
aacgcatcttaaacggtgaatcaac

SEQ ID NO: 237616 - DNA, 25 bp, Probe sequence
aattgctacaccaatcgttgcttgt

SEQ ID NO: 237617 - DNA, 25 bp, Probe sequence
caacatttttgttattggtgactgt

SEQ ID NO: 237618 - DNA, 25 bp, Probe sequence
cgtccattaccaactacagcacaaa

SEQ ID NO: 237619 - DNA, 25 bp, Probe sequence
gaaggcgttaaacgtggacgtatcg

SEQ ID NO: 237620 - DNA, 25 bp, Probe sequence
gaccgcggtgttgaatttaaaattg

SEQ ID NO: 237621 - DNA, 25 bp, Probe sequence
gttcagcgtttatcccagctggaga

SEQ ID NO: 237622 - DNA, 25 bp, Probe sequence
gttgatcgtggaactgtttgttctt

SEQ ID NO: 237623 - DNA, 25 bp, Probe sequence
gttagtgaaacattcggcatcgaag

SEQ ID NO: 237624 - DNA, 25 bp, Probe sequence
gtgctggttatgcaggtttacaaac

SEQ ID NO: 237625 - DNA, 25 bp, Probe sequence
gtgaattatcacgtcatatcgaaga

SEQ ID NO: 237626 - DNA, 25 bp, Probe sequence
gtgattgatacacgtgcggtattca

SEQ ID NO: 237627 - DNA, 25 bp, Probe sequence
gtggtgctggattcactggtgttga

SEQ ID NO: 237628 - DNA, 25 bp, Probe sequence
gtggacgtatcgttacaaagcaaga

SEQ ID NO: 237629 - DNA, 25 bp, Probe sequence
ggttcacatgacggtgtaggtatgg

SEQ ID NO: 237630 - DNA, 25 bp, Probe sequence
tggtgactgttcagcgtttatccca

SEQ ID NO: 237631 - DNA, 25 bp, Probe sequence
tcaaaatcggtggtatcggtttagc

SEQ ID NO: 237632 - DNA, 25 bp, Probe sequence
taaatgcaggtacttcagtatgggc

SEQ ID NO: 237633 - DNA, 25 bp, Probe sequence
tagctacttagaagaccgcggtgtt

SEQ ID NO: 237634 - DNA, 25 bp, Probe sequence
tatctatcttagttggtggtgctgg

SEQ ID NO: 237635 - DNA, 25 bp, Probe sequence
ttgaaaatgttatcacagcacgtga

SEQ ID NO: 237636 - DNA, 25 bp, Probe sequence
atggggacatcttttccaatacata

SEQ ID NO: 237637 - DNA, 25 bp, Probe sequence
agcaccaattgccttagttggtaaa

SEQ ID NO: 237638 - DNA, 25 bp, Probe sequence
acatgtgtggcgctgcgaatgtcgt

SEQ ID NO: 237639 - DNA, 25 bp, Probe sequence
aaatcagttagagcgcattagtttt

SEQ ID NO: 237640 - DNA, 25 bp, Probe sequence
aaagctgctgcatttgaatcgaata

SEQ ID NO: 237641 - DNA, 25 bp, Probe sequence
aacacctcacattcatttcgatatt

SEQ ID NO: 237642 - DNA, 25 bp, Probe sequence
aacgtatgattctggtggttatagt

SEQ ID NO: 237643 - DNA, 25 bp, Probe sequence
aaccgagattagtaaccatcacata

SEQ ID NO: 237644 - DNA, 25 bp, Probe sequence
cggctagtcgtttacaactgcctgt

SEQ ID NO: 237645 - DNA, 25 bp, Probe sequence
gccaacaggatttatgattccgacg

SEQ ID NO: 237646 - DNA, 25 bp, Probe sequence
gcctagtgtgattatggactttgct

SEQ ID NO: 237647 - DNA, 25 bp, Probe sequence
gcctgtaaatattgtcggagtgctt

SEQ ID NO: 237648 - DNA, 25 bp, Probe sequence
gcggcaagttttgtaacacatttta

SEQ ID NO: 237649 - DNA, 25 bp, Probe sequence
gcaggtccagcaacgactaataaag

SEQ ID NO: 237650 - DNA, 25 bp, Probe sequence
gagcgtgcaacatatgaattcgatc

SEQ ID NO: 237651 - DNA, 25 bp, Probe sequence
gagactttagtaatatgccaccgaa

SEQ ID NO: 237652 - DNA, 25 bp, Probe sequence
gatatcgctgatttagttaaccata

SEQ ID NO: 237653 - DNA, 25 bp, Probe sequence
gattatgacactttagtttctgaag

SEQ ID NO: 237654 - DNA, 25 bp, Probe sequence
gattccgacgatagtacaatggtta

SEQ ID NO: 237655 - DNA, 25 bp, Probe sequence
gttggtatcattgaagcggctagtc

SEQ ID NO: 237656 - DNA, 25 bp, Probe sequence
gtagattagtccttgcagatgctgt

SEQ ID NO: 237657 - DNA, 25 bp, Probe sequence
ggtaaagcgctatttgcggcaagtt

SEQ ID NO: 237658 - DNA, 25 bp, Probe sequence
ggcatgcggtattcaaagtgagcgt

SEQ ID NO: 237659 - DNA, 25 bp, Probe sequence
ggcgctgcgaatgtcgttggtatca

SEQ ID NO: 237660 - DNA, 25 bp, Probe sequence
tggactttgctacattaacgggtgc

SEQ ID NO: 237661 - DNA, 25 bp, Probe sequence
tggtccaaaagggccaacaggattt

SEQ ID NO: 237662 - DNA, 25 bp, Probe sequence
tgggaagatttatacaactgcattt

SEQ ID NO: 237663 - DNA, 25 bp, Probe sequence
tgaagccagatgatgtatttacagc

SEQ ID NO: 237664 - DNA, 25 bp, Probe sequence
tgcaaatcaatatcagcctagtgtg

SEQ ID NO: 237665 - DNA, 25 bp, Probe sequence
tgccaccgaatgtattaacaccaca

SEQ ID NO: 237666 - DNA, 25 bp, Probe sequence
tcaagtaagaaggcaccgtttaaga

SEQ ID NO: 237667 - DNA, 25 bp, Probe sequence
ttaccgattactgcaaccgaacgtg

SEQ ID NO: 237668 - DNA, 25 bp, Probe sequence
tttagtggtcaaacacctcacattc

SEQ ID NO: 237669 - DNA, 25 bp, Probe sequence
ttcatttcgatattgcaggtccagc

SEQ ID NO: 237670 - DNA, 25 bp, Probe sequence
attatcgcatcattattcattcctt

SEQ ID NO: 237671 - DNA, 25 bp, Probe sequence
atgtttcccgtatgtgttattacca

SEQ ID NO: 237672 - DNA, 25 bp, Probe sequence
atatagtcgatggtgctgaggtagc

SEQ ID NO: 237673 - DNA, 25 bp, Probe sequence
ataatattcctttaatgattttcgg

SEQ ID NO: 237674 - DNA, 25 bp, Probe sequence
aggtattggatcatcatttgcaaca

SEQ ID NO: 237675 - DNA, 25 bp, Probe sequence
taggaccaactgcgggattaaatgt

SEQ ID NO: 237676 - DNA, 25 bp, Probe sequence
agatagacgtttaatcggtttgatt

SEQ ID NO: 237677 - DNA, 25 bp, Probe sequence
agcaatgcttattccttcaatgggg

SEQ ID NO: 237678 - DNA, 25 bp, Probe sequence
catttgcaacaattcctattatcgc

SEQ ID NO: 237679 - DNA, 25 bp, Probe sequence
gctggtgtaatgaatgctactggtg

SEQ ID NO: 237680 - DNA, 25 bp, Probe sequence
gagtcaaaacttaattcctgtacat

SEQ ID NO: 237681 - DNA, 25 bp, Probe sequence
gatacatgtgtaccaaacttcttgt

SEQ ID NO: 237682 - DNA, 25 bp, Probe sequence
gataggtttaattgtcactttaggt

SEQ ID NO: 237683 - DNA, 25 bp, Probe sequence
gattttcggtactattgctgctatg

SEQ ID NO: 237684 - DNA, 25 bp, Probe sequence
gattcaatgatttttggtgcactgg

SEQ ID NO: 237685 - DNA, 25 bp, Probe sequence
gttggcttacttatcggtttatatg

SEQ ID NO: 237686 - DNA, 25 bp, Probe sequence
gttgatggccaacatgatcatatac

SEQ ID NO: 237687 - DNA, 25 bp, Probe sequence
gttattaccatatggattcggtcaa

SEQ ID NO: 237688 - DNA, 25 bp, Probe sequence
gtttgattatcggttttggtttatg

SEQ ID NO: 237689 - DNA, 25 bp, Probe sequence
gtattctttatttcacgtgcatata

SEQ ID NO: 237690 - DNA, 25 bp, Probe sequence
gtgattcaacattaggaccaactgc

SEQ ID NO: 237691 - DNA, 25 bp, Probe sequence
gtggtatcacagactatttagtagg

SEQ ID NO: 237692 - DNA, 25 bp, Probe sequence
gggtactcgtattctttatttcacg

SEQ ID NO: 237693 - DNA, 25 bp, Probe sequence
ggggtatattgttggcttacttatc

SEQ ID NO: 237694 - DNA, 25 bp, Probe sequence
ggtggcttaatttcaggcatgagca

SEQ ID NO: 237695 - DNA, 25 bp, Probe sequence
ggagcgtcaattggactagatacaa

SEQ ID NO: 237696 - DNA, 25 bp, Probe sequence
ggaacagcgagtgcattaggtgact

SEQ ID NO: 237697 - DNA, 25 bp, Probe sequence
tgcagcattaatttcatacagtggt

SEQ ID NO: 237698 - DNA, 25 bp, Probe sequence
tcctgtacatattgcattcattcca

SEQ ID NO: 237699 - DNA, 25 bp, Probe sequence
taagcttatttatcagtgcgctagt

SEQ ID NO: 237700 - DNA, 25 bp, Probe sequence
tactattgctgctatggtactataa

SEQ ID NO: 237701 - DNA, 25 bp, Probe sequence
tattcattccttttggagcgtcaat

SEQ ID NO: 237702 - DNA, 25 bp, Probe sequence
tttggtttatgtttcccgtatgtgt

SEQ ID NO: 237703 - DNA, 25 bp, Probe sequence
ttcacgctgaaaatagtcgatggtc

SEQ ID NO: 237704 - DNA, 25 bp, Probe sequence
attgatacaaccaaatttattccat

SEQ ID NO: 237705 - DNA, 25 bp, Probe sequence
atgactcatttattagagacatttg

SEQ ID NO: 237706 - DNA, 25 bp, Probe sequence
agttatgcgtggtacagttgctatt

SEQ ID NO: 237707 - DNA, 25 bp, Probe sequence
agcatgttcattaggatctgctaat

SEQ ID NO: 237708 - DNA, 25 bp, Probe sequence
acagttatgcgtggtacagttgcta

SEQ ID NO: 237709 - DNA, 25 bp, Probe sequence
acagcatgttcattaggatctgcta

SEQ ID NO: 237710 - DNA, 25 bp, Probe sequence
acaattaattacagttatgcgtggt

SEQ ID NO: 237711 - DNA, 25 bp, Probe sequence
aaacaaccatttggatatttacatg

SEQ ID NO: 237712 - DNA, 25 bp, Probe sequence
aatttattccattaggtttagagat

SEQ ID NO: 237713 - DNA, 25 bp, Probe sequence
aattacagttatgcgtggtacagtt

SEQ ID NO: 237714 - DNA, 25 bp, Probe sequence
caaatttattccattaggtttagag

SEQ ID NO: 237715 - DNA, 25 bp, Probe sequence
cagttatgcgtggtacagttgctat

SEQ ID NO: 237716 - DNA, 25 bp, Probe sequence
catattcattctgctaaagatggtc

SEQ ID NO: 237717 - DNA, 25 bp, Probe sequence
ccaggaagatggtttagttgttatt

SEQ ID NO: 237718 - DNA, 25 bp, Probe sequence
gctttaggtgaaacagcatgttcat

SEQ ID NO: 237719 - DNA, 25 bp, Probe sequence
gcttcgattgctttaggtgaaacag

SEQ ID NO: 237720 - DNA, 25 bp, Probe sequence
gaagatggtttagttgttatttcta

SEQ ID NO: 237721 - DNA, 25 bp, Probe sequence
gataaagtaaaacaaccatttggat

SEQ ID NO: 237722 - DNA, 25 bp, Probe sequence
gaaacagcatgttcattaggatctg

SEQ ID NO: 237723 - DNA, 25 bp, Probe sequence
gagatgtcaatagatcaccaggaag

SEQ ID NO: 237724 - DNA, 25 bp, Probe sequence
gatggtttagttgttatttctatgc

SEQ ID NO: 237725 - DNA, 25 bp, Probe sequence
gatgtcaatagatcaccaggaagat

SEQ ID NO: 237726 - DNA, 25 bp, Probe sequence
gatacaaccaaatttattccattag

SEQ ID NO: 237727 - DNA, 25 bp, Probe sequence
gattgctttaggtgaaacagcatgt

SEQ ID NO: 237728 - DNA, 25 bp, Probe sequence
gttatgcgtggtacagttgctatta

SEQ ID NO: 237729 - DNA, 25 bp, Probe sequence
gtttagttgttatttctatgcctgt

SEQ ID NO: 237730 - DNA, 25 bp, Probe sequence
ggtttagttgttatttctatgcctg

SEQ ID NO: 237731 - DNA, 25 bp, Probe sequence
tgtcaatagatcaccaggaagatgg

SEQ ID NO: 237732 - DNA, 25 bp, Probe sequence
tacaaccaaatttattccattaggt

SEQ ID NO: 237733 - DNA, 25 bp, Probe sequence
tacagttatgcgtggtacagttgct

SEQ ID NO: 237734 - DNA, 25 bp, Probe sequence
taggtgaaacagcatgttcattagg

SEQ ID NO: 237735 - DNA, 25 bp, Probe sequence
ttatgcgtggtacagttgctattaa

SEQ ID NO: 237736 - DNA, 25 bp, Probe sequence
ttattccattaggtttagagatgaa

SEQ ID NO: 237737 - DNA, 25 bp, Probe sequence
ttgagatgtcaatagatcaccagga

SEQ ID NO: 237738 - DNA, 25 bp, Probe sequence
attatttccaaatattgcaccaaaa

SEQ ID NO: 237739 - DNA, 25 bp, Probe sequence
atgacttcatgattcaaggtggcga

SEQ ID NO: 237740 - DNA, 25 bp, Probe sequence
atggctaactatccacagttaaaca

SEQ ID NO: 237741 - DNA, 25 bp, Probe sequence
atggcgcattatcaatggctaactc

SEQ ID NO: 237742 - DNA, 25 bp, Probe sequence
acattccaccgtgtcattaatgact

SEQ ID NO: 237743 - DNA, 25 bp, Probe sequence
aaaccacttcatgatgttgtaattg

SEQ ID NO: 237744 - DNA, 25 bp, Probe sequence
aacatacagtattcggtcaaatcat

SEQ ID NO: 237745 - DNA, 25 bp, Probe sequence
aaccaatcgttgatgcatatggcga

SEQ ID NO: 237746 - DNA, 25 bp, Probe sequence
aatggttcacaatttttcattgttc

SEQ ID NO: 237747 - DNA, 25 bp, Probe sequence
caaggtggcgatccaacagctactg

SEQ ID NO: 237748 - DNA, 25 bp, Probe sequence
caatggctaactcaggacctaatac

SEQ ID NO: 237749 - DNA, 25 bp, Probe sequence
caacagctactggtatgggtggcga

SEQ ID NO: 237750 - DNA, 25 bp, Probe sequence
cagctactggtatgggtggcgaaag

SEQ ID NO: 237751 - DNA, 25 bp, Probe sequence
cagttgaaaattttgtgacacatgc

SEQ ID NO: 237752 - DNA, 25 bp, Probe sequence
gcgatccaacagctactggtatggg

SEQ ID NO: 237753 - DNA, 25 bp, Probe sequence
gcggtgcttttgaagatgaattttc

SEQ ID NO: 237754 - DNA, 25 bp, Probe sequence
gctggcctcaaccaatcgttgatgc

SEQ ID NO: 237755 - DNA, 25 bp, Probe sequence
gcatatggcgaaaagggtggtacac

SEQ ID NO: 237756 - DNA, 25 bp, Probe sequence
gaagtacctcaaaatatgttaagtc

SEQ ID NO: 237757 - DNA, 25 bp, Probe sequence
gattcaaggtggcgatccaacagct

SEQ ID NO: 237758 - DNA, 25 bp, Probe sequence
gttgtaattgaatctattgatgttg

SEQ ID NO: 237759 - DNA, 25 bp, Probe sequence
gtatttatggcggtgcttttgaaga

SEQ ID NO: 237760 - DNA, 25 bp, Probe sequence
gtacaccatggttagatcaaaaaca

SEQ ID NO: 237761 - DNA, 25 bp, Probe sequence
gtgacacatgcaaaaaatggttatt

SEQ ID NO: 237762 - DNA, 25 bp, Probe sequence
gtggcgatccaacagctactggtat

SEQ ID NO: 237763 - DNA, 25 bp, Probe sequence
gtggttatgcacacaaataaaggtg

SEQ ID NO: 237764 - DNA, 25 bp, Probe sequence
gtggcgaaagtatttatggcggtgc

SEQ ID NO: 237765 - DNA, 25 bp, Probe sequence
gggtggtacaccatggttagatcaa

SEQ ID NO: 237766 - DNA, 25 bp, Probe sequence
tgcaaatacaaaagtgggaccacaa

SEQ ID NO: 237767 - DNA, 25 bp, Probe sequence
tgcatttaacttatatggcgcatta

SEQ ID NO: 237768 - DNA, 25 bp, Probe sequence
tccaccgtgtcattaatgacttcat

SEQ ID NO: 237769 - DNA, 25 bp, Probe sequence
taaaggtgacatgacattcaaatta

SEQ ID NO: 237770 - DNA, 25 bp, Probe sequence
ttatcaatggctaactcaggaccta

SEQ ID NO: 237771 - DNA, 25 bp, Probe sequence
ttcggtcaaatcattgatggtgaaa

SEQ ID NO: 237772 - DNA, 25 bp, Probe sequence
atcaaggtgcgtgtaactggtattc

SEQ ID NO: 237773 - DNA, 25 bp, Probe sequence
tacggtgcgtttgttgagaccccta

SEQ ID NO: 237774 - DNA, 25 bp, Probe sequence
actggtattcaaccatacggtgcgt

SEQ ID NO: 237775 - DNA, 25 bp, Probe sequence
gagacccctaatcatactgaaggac

SEQ ID NO: 237776 - DNA, 25 bp, Probe sequence
aaaggataatgattacttcaaaaat

SEQ ID NO: 237777 - DNA, 25 bp, Probe sequence
aaagaacgcttaccaatctggataa

SEQ ID NO: 237778 - DNA, 25 bp, Probe sequence
aaagcgagcaattcgaaacgactaa

SEQ ID NO: 237779 - DNA, 25 bp, Probe sequence
aaagctaaaattttgtctatagatg

SEQ ID NO: 237780 - DNA, 25 bp, Probe sequence
aaaacagtcaaagcgagcaattcga

SEQ ID NO: 237781 - DNA, 25 bp, Probe sequence
aaccatacggtgcgtttgttgagac

SEQ ID NO: 237782 - DNA, 25 bp, Probe sequence
aaggtgcgtgtaactggtattcaac

SEQ ID NO: 237783 - DNA, 25 bp, Probe sequence
aattggccaacatatcaaggtgcgt

SEQ ID NO: 237784 - DNA, 25 bp, Probe sequence
cagaaattatggatgactacgttca

SEQ ID NO: 237785 - DNA, 25 bp, Probe sequence
cagaaggccaaattgttaaagctaa

SEQ ID NO: 237786 - DNA, 25 bp, Probe sequence
catacggtgcgtttgttgagacccc

SEQ ID NO: 237787 - DNA, 25 bp, Probe sequence
gcgtgtaactggtattcaaccatac

SEQ ID NO: 237788 - DNA, 25 bp, Probe sequence
gcttaccaatctggataaaacagtc

SEQ ID NO: 237789 - DNA, 25 bp, Probe sequence
gaataactacaaaattggccaacat

SEQ ID NO: 237790 - DNA, 25 bp, Probe sequence
gaagaaatttctatcagaaggccaa

SEQ ID NO: 237791 - DNA, 25 bp, Probe sequence
gaacgcttaccaatctggataaaac

SEQ ID NO: 237792 - DNA, 25 bp, Probe sequence
gacccctaatcatactgaaggactg

SEQ ID NO: 237793 - DNA, 25 bp, Probe sequence
gttgagacccctaatcatactgaag

SEQ ID NO: 237794 - DNA, 25 bp, Probe sequence
gtttgttgagacccctaatcatact

SEQ ID NO: 237795 - DNA, 25 bp, Probe sequence
gtcaaagcgagcaattcgaaacgac

SEQ ID NO: 237796 - DNA, 25 bp, Probe sequence
ggtgcgtgtaactggtattcaacca

SEQ ID NO: 237797 - DNA, 25 bp, Probe sequence
ggtattcaaccatacggtgcgtttg

SEQ ID NO: 237798 - DNA, 25 bp, Probe sequence
ggatgactacgttcataatttgaag

SEQ ID NO: 237799 - DNA, 25 bp, Probe sequence
ggccaacatatcaaggtgcgtgtaa

SEQ ID NO: 237800 - DNA, 25 bp, Probe sequence
tgcgtttgttgagacccctaatcat

SEQ ID NO: 237801 - DNA, 25 bp, Probe sequence
tcaaacacttaaagaacgcttacca

SEQ ID NO: 237802 - DNA, 25 bp, Probe sequence
tactgaaggactgattcatatatca

SEQ ID NO: 237803 - DNA, 25 bp, Probe sequence
tattcaaccatacggtgcgtttgtt

SEQ ID NO: 237804 - DNA, 25 bp, Probe sequence
ttctatcagaaggccaaattgttaa

SEQ ID NO: 237805 - DNA, 25 bp, Probe sequence
ttgttgagacccctaatcatactga

SEQ ID NO: 237806 - DNA, 25 bp, Probe sequence
aaatgatgatggtactatttcagat

SEQ ID NO: 237807 - DNA, 25 bp, Probe sequence
aaaacggtgccaaagcactcgtaca

SEQ ID NO: 237808 - DNA, 25 bp, Probe sequence
aaagcgttcacaagatgttggtatt

SEQ ID NO: 237809 - DNA, 25 bp, Probe sequence
aaaattagccatatgccaatcgact

SEQ ID NO: 237810 - DNA, 25 bp, Probe sequence
aagcactcgtacaaatacatcatgg

SEQ ID NO: 237811 - DNA, 25 bp, Probe sequence
aatggaaattacagaggaactcgtt

SEQ ID NO: 237812 - DNA, 25 bp, Probe sequence
aatgctgcgagtaatgtgagtgatg

SEQ ID NO: 237813 - DNA, 25 bp, Probe sequence
aattcatcaatttgtatcaccatac

SEQ ID NO: 237814 - DNA, 25 bp, Probe sequence
gcccctttaacacatatttcttcaa

SEQ ID NO: 237815 - DNA, 25 bp, Probe sequence
tggagacgtcgtagcaccaagtcca

SEQ ID NO: 237816 - DNA, 25 bp, Probe sequence
gcggagtctccaggaatcacaatgg

SEQ ID NO: 237817 - DNA, 25 bp, Probe sequence
tccagaggaagcggagtctccagga

SEQ ID NO: 237818 - DNA, 25 bp, Probe sequence
gcaatcaaggattttggtgaagcaa

SEQ ID NO: 237819 - DNA, 25 bp, Probe sequence
gaaatcgatttgtgttagccccttt

SEQ ID NO: 237820 - DNA, 25 bp, Probe sequence
gaacttccttatattgaaaagcgtt

SEQ ID NO: 237821 - DNA, 25 bp, Probe sequence
gaagataatcatcacttaactccta

SEQ ID NO: 237822 - DNA, 25 bp, Probe sequence
gatgcagttgaaaatgttggtgttg

SEQ ID NO: 237823 - DNA, 25 bp, Probe sequence
gttggatacagattatctccagagg

SEQ ID NO: 237824 - DNA, 25 bp, Probe sequence
gtagcaccaagtccaatttctttaa

SEQ ID NO: 237825 - DNA, 25 bp, Probe sequence
gtaaatacgaaccattgtttgataa

SEQ ID NO: 237826 - DNA, 25 bp, Probe sequence
gtcggaaaagcatttccaggacagc

SEQ ID NO: 237827 - DNA, 25 bp, Probe sequence
gtgaaggtaaatacgctggacaaga

SEQ ID NO: 237828 - DNA, 25 bp, Probe sequence
ggtcgtatgccacttatcggtattg

SEQ ID NO: 237829 - DNA, 25 bp, Probe sequence
ggtgttgacttagtagccattggta

SEQ ID NO: 237830 - DNA, 25 bp, Probe sequence
ggtgcacaagcattgcctgaattaa

SEQ ID NO: 237831 - DNA, 25 bp, Probe sequence
ggtcagaaacaagaacatagtgcta

SEQ ID NO: 237832 - DNA, 25 bp, Probe sequence
ggataaatggtcgtatgccacttat

SEQ ID NO: 237833 - DNA, 25 bp, Probe sequence
ggactaaaacgattagctacagcaa

SEQ ID NO: 237834 - DNA, 25 bp, Probe sequence
ggcgcgaatcattacttaattcatc

SEQ ID NO: 237835 - DNA, 25 bp, Probe sequence
tgccacttatcggtattggttcaat

SEQ ID NO: 237836 - DNA, 25 bp, Probe sequence
tgccaatcgactatattcatgtttc

SEQ ID NO: 237837 - DNA, 25 bp, Probe sequence
tagccattggtagagagctactact

SEQ ID NO: 237838 - DNA, 25 bp, Probe sequence
ttaactcctaatttatggcatcaat

SEQ ID NO: 237839 - DNA, 25 bp, Probe sequence
ttggttcaattttcacagctgacga

SEQ ID NO: 237840 - DNA, 25 bp, Probe sequence
attgctgacgaaatccaagcaggat

SEQ ID NO: 237841 - DNA, 25 bp, Probe sequence
attgctgcattagatgttatcgttg

SEQ ID NO: 237842 - DNA, 25 bp, Probe sequence
attcgttttgcaccaccattaatta

SEQ ID NO: 237843 - DNA, 25 bp, Probe sequence
attagatgtctttacacctggctca

SEQ ID NO: 237844 - DNA, 25 bp, Probe sequence
atcaattaaagaagtccgtggacgt

SEQ ID NO: 237845 - DNA, 25 bp, Probe sequence
agtttcacgtgcttttcatagtgat

SEQ ID NO: 237846 - DNA, 25 bp, Probe sequence
agcacgacgctgggcatacgatgtt

SEQ ID NO: 237847 - DNA, 25 bp, Probe sequence
actgcagcagttttagtagaaccaa

SEQ ID NO: 237848 - DNA, 25 bp, Probe sequence
acagctttgaaagcagcacgacgct

SEQ ID NO: 237849 - DNA, 25 bp, Probe sequence
caagcaggattaggtcgttcgggta

SEQ ID NO: 237850 - DNA, 25 bp, Probe sequence
cataatgtcttatttattgctgacg

SEQ ID NO: 237851 - DNA, 25 bp, Probe sequence
gctcacatggttcaacatttggtgg

SEQ ID NO: 237852 - DNA, 25 bp, Probe sequence
gaagaattggaccttgcacttgaaa

SEQ ID NO: 237853 - DNA, 25 bp, Probe sequence
gaagctgaaggggtatgggttaaag

SEQ ID NO: 237854 - DNA, 25 bp, Probe sequence
gaaacgcatgatactgtcattcgtt

SEQ ID NO: 237855 - DNA, 25 bp, Probe sequence
gacatccgaaaattattcaagcatt

SEQ ID NO: 237856 - DNA, 25 bp, Probe sequence
gagcacataattatttaccattgcc

SEQ ID NO: 237857 - DNA, 25 bp, Probe sequence
gataaagctttaccaatgaatacag

SEQ ID NO: 237858 - DNA, 25 bp, Probe sequence
gttaacaaatcattacggagcacat

SEQ ID NO: 237859 - DNA, 25 bp, Probe sequence
gttatcgttgatgaggatttaccag

SEQ ID NO: 237860 - DNA, 25 bp, Probe sequence
gtatgggttaaagatcctgaaggca

SEQ ID NO: 237861 - DNA, 25 bp, Probe sequence
gtcttcccaatttctgttgtattag

SEQ ID NO: 237862 - DNA, 25 bp, Probe sequence
gtccgtggacgtggtttgtttatag

SEQ ID NO: 237863 - DNA, 25 bp, Probe sequence
gggataatgtaaaacctgatgtcta

SEQ ID NO: 237864 - DNA, 25 bp, Probe sequence
ggtcgaacaatggcgccagtttcat

SEQ ID NO: 237865 - DNA, 25 bp, Probe sequence
tggtaacttccatggtcgaacaatg

SEQ ID NO: 237866 - DNA, 25 bp, Probe sequence
tgttatctgcatattccgctgttaa

SEQ ID NO: 237867 - DNA, 25 bp, Probe sequence
tcagaagcagaataccaacgtggtt

SEQ ID NO: 237868 - DNA, 25 bp, Probe sequence
taaccaaggtcatagacatccgaaa

SEQ ID NO: 237869 - DNA, 25 bp, Probe sequence
tacacctggctcacatggttcaaca

SEQ ID NO: 237870 - DNA, 25 bp, Probe sequence
taccattgccaattgtcatttcaga

SEQ ID NO: 237871 - DNA, 25 bp, Probe sequence
tattccgctgttaaccaaggtcata

SEQ ID NO: 237872 - DNA, 25 bp, Probe sequence
tttgcaccaccattaattattacta

SEQ ID NO: 237873 - DNA, 25 bp, Probe sequence
ttggtggtaatccacttgcttgtgc

SEQ ID NO: 237874 - DNA, 25 bp, Probe sequence
attccagcaccagatgtatttacaa

SEQ ID NO: 237875 - DNA, 25 bp, Probe sequence
agaccgtcgtgatagttttggtacg

SEQ ID NO: 237876 - DNA, 25 bp, Probe sequence
agtaacttctactcaaggaattatt

SEQ ID NO: 237877 - DNA, 25 bp, Probe sequence
agttccagacgtattagcaagtgct

SEQ ID NO: 237878 - DNA, 25 bp, Probe sequence
agacttgcagcatatatcataggta

SEQ ID NO: 237879 - DNA, 25 bp, Probe sequence
acataatgatgctgttggaccaaca

SEQ ID NO: 237880 - DNA, 25 bp, Probe sequence
aacattcacaggttaccgtgcgcaa

SEQ ID NO: 237881 - DNA, 25 bp, Probe sequence
aattcaccaggtttcatcacaggta

SEQ ID NO: 237882 - DNA, 25 bp, Probe sequence
gcgtttccacccagatgttgatgaa

SEQ ID NO: 237883 - DNA, 25 bp, Probe sequence
gcttacggtgcattacacgatccaa

SEQ ID NO: 237884 - DNA, 25 bp, Probe sequence
gcagctagatatcgtggttgggcat

SEQ ID NO: 237885 - DNA, 25 bp, Probe sequence
gcaagtgctggtggtgtaacggttt

SEQ ID NO: 237886 - DNA, 25 bp, Probe sequence
gcaatttcacaattcgtaggtccga

SEQ ID NO: 237887 - DNA, 25 bp, Probe sequence
gaatgttacaagtgcgtatccctgt

SEQ ID NO: 237888 - DNA, 25 bp, Probe sequence
gaaggtgccaaggttgttattcaag

SEQ ID NO: 237889 - DNA, 25 bp, Probe sequence
gaagttgaacgtttatcacgcggat

SEQ ID NO: 237890 - DNA, 25 bp, Probe sequence
gaagctgctaatggacctacaacac

SEQ ID NO: 237891 - DNA, 25 bp, Probe sequence
gaacaagctgcaaaacgtcgtaata

SEQ ID NO: 237892 - DNA, 25 bp, Probe sequence
gatcaactgcactaggtgtagttat

SEQ ID NO: 237893 - DNA, 25 bp, Probe sequence
gattgtgacattttagtaccagcgg

SEQ ID NO: 237894 - DNA, 25 bp, Probe sequence
gttattcaaggtttcggtaatgccg

SEQ ID NO: 237895 - DNA, 25 bp, Probe sequence
gtaggtatctctgatgcttacggtg

SEQ ID NO: 237896 - DNA, 25 bp, Probe sequence
gtaccagcggctatttcaaaccaaa

SEQ ID NO: 237897 - DNA, 25 bp, Probe sequence
gtgcgtatccctgtacgaatggatg

SEQ ID NO: 237898 - DNA, 25 bp, Probe sequence
gtgatccacgtcaaatgagcattca

SEQ ID NO: 237899 - DNA, 25 bp, Probe sequence
gtggtggtaagggtggtatcgtttg

SEQ ID NO: 237900 - DNA, 25 bp, Probe sequence
ggtaatgccggaagtttcttagcta

SEQ ID NO: 237901 - DNA, 25 bp, Probe sequence
ggtccgaacaaagatattccagcac

SEQ ID NO: 237902 - DNA, 25 bp, Probe sequence
ggttaccgtgcgcaacataatgatg

SEQ ID NO: 237903 - DNA, 25 bp, Probe sequence
ggatgactttgaaatgtggcattgt

SEQ ID NO: 237904 - DNA, 25 bp, Probe sequence
tggaccaacaaaagggggcgtgcgt

SEQ ID NO: 237905 - DNA, 25 bp, Probe sequence
tggtatcgtttgtgatccacgtcaa

SEQ ID NO: 237906 - DNA, 25 bp, Probe sequence
tgtattgggtggttctcatggacgc

SEQ ID NO: 237907 - DNA, 25 bp, Probe sequence
tagattatttattagaccgtcgtga

SEQ ID NO: 237908 - DNA, 25 bp, Probe sequence
atttgttggtaatcacttatcatca

SEQ ID NO: 237909 - DNA, 25 bp, Probe sequence
atgttcgcattattaggtaaacctg

SEQ ID NO: 237910 - DNA, 25 bp, Probe sequence
agcgcatactgatggtggtgttcct

SEQ ID NO: 237911 - DNA, 25 bp, Probe sequence
acagttggctacaaacgaaggttat

SEQ ID NO: 237912 - DNA, 25 bp, Probe sequence
actgatttacattctttaggtcaat

SEQ ID NO: 237913 - DNA, 25 bp, Probe sequence
acatggtagtgaacattccacaatt

SEQ ID NO: 237914 - DNA, 25 bp, Probe sequence
aactacagaaccagcagttgcattt

SEQ ID NO: 237915 - DNA, 25 bp, Probe sequence
aactatgaaccatctatgcaatact

SEQ ID NO: 237916 - DNA, 25 bp, Probe sequence
aacgtttatcgtacctgatgatgta

SEQ ID NO: 237917 - DNA, 25 bp, Probe sequence
aaccaacctggtgtagaagcatata

SEQ ID NO: 237918 - DNA, 25 bp, Probe sequence
ccagcagttgcatttagattgttca

SEQ ID NO: 237919 - DNA, 25 bp, Probe sequence
gccaactacacaactgatttacatt

SEQ ID NO: 237920 - DNA, 25 bp, Probe sequence
gcgacaattcgaaacattttatatg

SEQ ID NO: 237921 - DNA, 25 bp, Probe sequence
gcattcgaaggtacattattagcgc

SEQ ID NO: 237922 - DNA, 25 bp, Probe sequence
gcagtaggattattaccaattgcaa

SEQ ID NO: 237923 - DNA, 25 bp, Probe sequence
gcacgtgcagcaatcgaaatgttaa

SEQ ID NO: 237924 - DNA, 25 bp, Probe sequence
gaagctatgatgattggtgctgcaa

SEQ ID NO: 237925 - DNA, 25 bp, Probe sequence
gaaacagcaatgaataccctgaaat

SEQ ID NO: 237926 - DNA, 25 bp, Probe sequence
gagttagttgattatttagcagaca

SEQ ID NO: 237927 - DNA, 25 bp, Probe sequence
gatttctctgtaaacgttatttcta

SEQ ID NO: 237928 - DNA, 25 bp, Probe sequence
gtagtcatcggtattggtggttctt

SEQ ID NO: 237929 - DNA, 25 bp, Probe sequence
gtaaatccatttaaccaacctggtg

SEQ ID NO: 237930 - DNA, 25 bp, Probe sequence
gtcaatatgtacaagaaggccgtcg

SEQ ID NO: 237931 - DNA, 25 bp, Probe sequence
gtcgtatacttcttcgaacttgctt

SEQ ID NO: 237932 - DNA, 25 bp, Probe sequence
ggtgcaggtagtgacttcttaggct

SEQ ID NO: 237933 - DNA, 25 bp, Probe sequence
ggtggtgttcctaacatggtagtga

SEQ ID NO: 237934 - DNA, 25 bp, Probe sequence
ggtggaagatattctgttttaacag

SEQ ID NO: 237935 - DNA, 25 bp, Probe sequence
ggttcttacttaggtgcacgtgcag

SEQ ID NO: 237936 - DNA, 25 bp, Probe sequence
tacttcttcgaacttgcttgtgcaa

SEQ ID NO: 237937 - DNA, 25 bp, Probe sequence
tatccttcaagtgccaactacacaa

SEQ ID NO: 237938 - DNA, 25 bp, Probe sequence
tatttctaaatctggtacaactaca

SEQ ID NO: 237939 - DNA, 25 bp, Probe sequence
ttaacgtcatcatttagaaacagca

SEQ ID NO: 237940 - DNA, 25 bp, Probe sequence
ttgcttgtgcaatgagtggatacca

SEQ ID NO: 237941 - DNA, 25 bp, Probe sequence
ttgatttaccagttgattacgacaa

SEQ ID NO: 237942 - DNA, 25 bp, Probe sequence
atgtgtcatggtgatacagaacaat

SEQ ID NO: 237943 - DNA, 25 bp, Probe sequence
aggtacatatccttgtctttctcaa

SEQ ID NO: 237944 - DNA, 25 bp, Probe sequence
agattgatcttcacgaaacattcga

SEQ ID NO: 237945 - DNA, 25 bp, Probe sequence
aaagttccatttggtgtgtggtggg

SEQ ID NO: 237946 - DNA, 25 bp, Probe sequence
aaacgttacaacaagaacatcgctt

SEQ ID NO: 237947 - DNA, 25 bp, Probe sequence
aagatttaggcgaagcacattttca

SEQ ID NO: 237948 - DNA, 25 bp, Probe sequence
aaggggaaactgtgccagcaggtgt

SEQ ID NO: 237949 - DNA, 25 bp, Probe sequence
caagtttgaaagcgttaggatgtaa

SEQ ID NO: 237950 - DNA, 25 bp, Probe sequence
ccatggactactgagacaagacaag

SEQ ID NO: 237951 - DNA, 25 bp, Probe sequence
gcagataagtttgccaatatgagat

SEQ ID NO: 237952 - DNA, 25 bp, Probe sequence
gaagtatcagccattgagttataag

SEQ ID NO: 237953 - DNA, 25 bp, Probe sequence
gaacatttaaaattggtaccagtag

SEQ ID NO: 237954 - DNA, 25 bp, Probe sequence
gaaacattcgaacctttaagattgg

SEQ ID NO: 237955 - DNA, 25 bp, Probe sequence
gaaagttccagtgcaagaaatccat

SEQ ID NO: 237956 - DNA, 25 bp, Probe sequence
gacaagacaagaagcgccatttatt

SEQ ID NO: 237957 - DNA, 25 bp, Probe sequence
gacacgctttaatatttcaggacga

SEQ ID NO: 237958 - DNA, 25 bp, Probe sequence
gagagaattgcacaaggtacatatc

SEQ ID NO: 237959 - DNA, 25 bp, Probe sequence
gatggtgtgcatcggtatacaagtt

SEQ ID NO: 237960 - DNA, 25 bp, Probe sequence
gatgtactcatgaagtatcagccat

SEQ ID NO: 237961 - DNA, 25 bp, Probe sequence
gattttatacgtcatcctattttag

SEQ ID NO: 237962 - DNA, 25 bp, Probe sequence
gtatgggaaaaggttgtcgcaagtt

SEQ ID NO: 237963 - DNA, 25 bp, Probe sequence
gtaccactggcattacttaaacaag

SEQ ID NO: 237964 - DNA, 25 bp, Probe sequence
gtcttaatcttcaagtaccactggc

SEQ ID NO: 237965 - DNA, 25 bp, Probe sequence
gtctttctcaacaagatgtactcat

SEQ ID NO: 237966 - DNA, 25 bp, Probe sequence
gtgccagcaggtgtgacacgcttta

SEQ ID NO: 237967 - DNA, 25 bp, Probe sequence
gtgacagcgatgcaacatggtagat

SEQ ID NO: 237968 - DNA, 25 bp, Probe sequence
gtgtgtggtgggaaacgttacaaca

SEQ ID NO: 237969 - DNA, 25 bp, Probe sequence
ggttgtcgcaagttatagtggttgt

SEQ ID NO: 237970 - DNA, 25 bp, Probe sequence
ggaagcagtttttagcagataagtt

SEQ ID NO: 237971 - DNA, 25 bp, Probe sequence
ggcaacataaagttccatttggtgt

SEQ ID NO: 237972 - DNA, 25 bp, Probe sequence
ggcgaagcacattttcaagtatggg

SEQ ID NO: 237973 - DNA, 25 bp, Probe sequence
tcctattttagtgacagcgatgcaa

SEQ ID NO: 237974 - DNA, 25 bp, Probe sequence
tagtggttgttgttctgtagagaga

SEQ ID NO: 237975 - DNA, 25 bp, Probe sequence
ttcaggacgatgtcttaatcttcaa

SEQ ID NO: 237976 - DNA, 25 bp, Probe sequence
agttggcttggattaatttctggaa

SEQ ID NO: 237977 - DNA, 25 bp, Probe sequence
aaaagttagaacagcattttatggg

SEQ ID NO: 237978 - DNA, 25 bp, Probe sequence
aacaacgtactgctgttcaacgctt

SEQ ID NO: 237979 - DNA, 25 bp, Probe sequence
aacgtactgctgttcaacgcttgat

SEQ ID NO: 237980 - DNA, 25 bp, Probe sequence
aatggtttgagatatttcgacagtt

SEQ ID NO: 237981 - DNA, 25 bp, Probe sequence
aattactacaattttaacgcatcct

SEQ ID NO: 237982 - DNA, 25 bp, Probe sequence
caattttaacgcatcctttaagagg

SEQ ID NO: 237983 - DNA, 25 bp, Probe sequence
ctaaatattatttcattgttttggc

SEQ ID NO: 237984 - DNA, 25 bp, Probe sequence
gcgagtctatctcatattagaccta

SEQ ID NO: 237985 - DNA, 25 bp, Probe sequence
gctgttcaacgcttgattagtttta

SEQ ID NO: 237986 - DNA, 25 bp, Probe sequence
gcttgattagttttattgatcgcca

SEQ ID NO: 237987 - DNA, 25 bp, Probe sequence
gacagtttggttatttacctggatt

SEQ ID NO: 237988 - DNA, 25 bp, Probe sequence
gagatatttcgacagtttggttatt

SEQ ID NO: 237989 - DNA, 25 bp, Probe sequence
gagggatattaatgttagttgtgtt

SEQ ID NO: 237990 - DNA, 25 bp, Probe sequence
gattagttttattgatcgccaagga

SEQ ID NO: 237991 - DNA, 25 bp, Probe sequence
gtctatttgatctgtaaacgattgg

SEQ ID NO: 237992 - DNA, 25 bp, Probe sequence
gtactgctgttcaacgcttgattag

SEQ ID NO: 237993 - DNA, 25 bp, Probe sequence
ggtatattgattagttggcttggat

SEQ ID NO: 237994 - DNA, 25 bp, Probe sequence
ggatgcagcgaattaaacaacgtac

SEQ ID NO: 237995 - DNA, 25 bp, Probe sequence
ggaacatttacagtctatttgatct

SEQ ID NO: 237996 - DNA, 25 bp, Probe sequence
ggcttggattaatttctggaacatt

SEQ ID NO: 237997 - DNA, 25 bp, Probe sequence
tggcatcatcaaagttagtttcaac

SEQ ID NO: 237998 - DNA, 25 bp, Probe sequence
tgttttccttttacgccaaatacat

SEQ ID NO: 237999 - DNA, 25 bp, Probe sequence
tcaacaattattttaggttatttag

SEQ ID NO: 238000 - DNA, 25 bp, Probe sequence
taacgcatcctttaagagggatatt

SEQ ID NO: 238001 - DNA, 25 bp, Probe sequence
taaattttgtagcgagtctatctca

SEQ ID NO: 238002 - DNA, 25 bp, Probe sequence
tactacaattttaacgcatccttta

SEQ ID NO: 238003 - DNA, 25 bp, Probe sequence
tatggacctattttaggtatattga

SEQ ID NO: 238004 - DNA, 25 bp, Probe sequence
tattgatcgccaaggattaatccca

SEQ ID NO: 238005 - DNA, 25 bp, Probe sequence
ttgtagcgagtctatctcatattag

SEQ ID NO: 238006 - DNA, 25 bp, Probe sequence
ttcattgttttggcatcatcaaagt

SEQ ID NO: 238007 - DNA, 25 bp, Probe sequence
ttccttttacgccaaatacattaat

SEQ ID NO: 238008 - DNA, 25 bp, Probe sequence
ttgatcgccaaggattaatcccatt

SEQ ID NO: 238009 - DNA, 25 bp, Probe sequence
ttgtcgtttcatcaagtagaagaat

SEQ ID NO: 238010 - DNA, 25 bp, Probe sequence
accgtgatgaccgaccggttgacgc

SEQ ID NO: 238011 - DNA, 25 bp, Probe sequence
accggttgacgcatcttatgccaag

SEQ ID NO: 238012 - DNA, 25 bp, Probe sequence
atatttgatttcattgatacttgct

SEQ ID NO: 238013 - DNA, 25 bp, Probe sequence
atagttggtcatgtcattccgaata

SEQ ID NO: 238014 - DNA, 25 bp, Probe sequence
agggacaattataccgtgatgaccg

SEQ ID NO: 238015 - DNA, 25 bp, Probe sequence
agttggtcatgtcattccgaataat

SEQ ID NO: 238016 - DNA, 25 bp, Probe sequence
acttgctattatcattgtactgttc

SEQ ID NO: 238017 - DNA, 25 bp, Probe sequence
acaattataccgtgatgaccgaccg

SEQ ID NO: 238018 - DNA, 25 bp, Probe sequence
aaagttacatttaatcaattgaata

SEQ ID NO: 238019 - DNA, 25 bp, Probe sequence
aacaattttgttgtgctaaatgatc

SEQ ID NO: 238020 - DNA, 25 bp, Probe sequence
aatggcgtttcgtcagggacaatta

SEQ ID NO: 238021 - DNA, 25 bp, Probe sequence
aatcaatggcgtttcgtcagggaca

SEQ ID NO: 238022 - DNA, 25 bp, Probe sequence
caaaggggatcgtgttattgtaaat

SEQ ID NO: 238023 - DNA, 25 bp, Probe sequence
cctggtcaatcaatggcgtttcgtc

SEQ ID NO: 238024 - DNA, 25 bp, Probe sequence
gcgtttcgtcagggacaattatacc

SEQ ID NO: 238025 - DNA, 25 bp, Probe sequence
gctattatcattgtactgttcgtac

SEQ ID NO: 238026 - DNA, 25 bp, Probe sequence
gacgcatcttatgccaagaacagaa

SEQ ID NO: 238027 - DNA, 25 bp, Probe sequence
gatatcattacatataggcgtggta

SEQ ID NO: 238028 - DNA, 25 bp, Probe sequence
gtgatgaccgaccggttgacgcatc

SEQ ID NO: 238029 - DNA, 25 bp, Probe sequence
gtcaatcaatggcgtttcgtcaggg

SEQ ID NO: 238030 - DNA, 25 bp, Probe sequence
gtaatagttggtcatgtcattccga

SEQ ID NO: 238031 - DNA, 25 bp, Probe sequence
ggtgatatcattacatataggcgtg

SEQ ID NO: 238032 - DNA, 25 bp, Probe sequence
ggttgacgcatcttatgccaagaac

SEQ ID NO: 238033 - DNA, 25 bp, Probe sequence
ggtcatgtcattccgaataatgata

SEQ ID NO: 238034 - DNA, 25 bp, Probe sequence
ggcgtggtaacgagatatatactag

SEQ ID NO: 238035 - DNA, 25 bp, Probe sequence
tgatgaccgaccggttgacgcatct

SEQ ID NO: 238036 - DNA, 25 bp, Probe sequence
tggtcaatcaatggcgtttcgtcag

SEQ ID NO: 238037 - DNA, 25 bp, Probe sequence
tgtactgttcgtacaaacttttgta

SEQ ID NO: 238038 - DNA, 25 bp, Probe sequence
tgatttcattgatacttgctattat

SEQ ID NO: 238039 - DNA, 25 bp, Probe sequence
tcgtcagggacaattataccgtgat

SEQ ID NO: 238040 - DNA, 25 bp, Probe sequence
tcaatggcgtttcgtcagggacaat

SEQ ID NO: 238041 - DNA, 25 bp, Probe sequence
tataccgtgatgaccgaccggttga

SEQ ID NO: 238042 - DNA, 25 bp, Probe sequence
taaagattttagtttgcgcaatttt

SEQ ID NO: 238043 - DNA, 25 bp, Probe sequence
tatatactagtcgaattattgccaa

SEQ ID NO: 238044 - DNA, 25 bp, Probe sequence
gttaaacgtgtcatcggtgttcctg

SEQ ID NO: 238045 - DNA, 25 bp, Probe sequence
aaagatagccgtgcgtttggcctca

SEQ ID NO: 238046 - DNA, 25 bp, Probe sequence
aaaggtgaatcaatggatccaactt

SEQ ID NO: 238047 - DNA, 25 bp, Probe sequence
aacaaggtgattacattactgggac

SEQ ID NO: 238048 - DNA, 25 bp, Probe sequence
aaaatgatgactatgttaaacgtgt

SEQ ID NO: 238049 - DNA, 25 bp, Probe sequence
aacaagatgaaccatatttaaacta

SEQ ID NO: 238050 - DNA, 25 bp, Probe sequence
aaggtaatgtagttgtcttccatgc

SEQ ID NO: 238051 - DNA, 25 bp, Probe sequence
caattgcagtcgcttttgtcatttt

SEQ ID NO: 238052 - DNA, 25 bp, Probe sequence
caagttaaagatttaccgaatgcga

SEQ ID NO: 238053 - DNA, 25 bp, Probe sequence
gcctcattgatgaagaccaaattgt

SEQ ID NO: 238054 - DNA, 25 bp, Probe sequence
gcgtttggcctcattgatgaagacc

SEQ ID NO: 238055 - DNA, 25 bp, Probe sequence
aatgtagttgtcttccatgcaaaca

SEQ ID NO: 238056 - DNA, 25 bp, Probe sequence
gaagtaagtaaagatagccgtgcgt

SEQ ID NO: 238057 - DNA, 25 bp, Probe sequence
gaaagatggcgagcgagtagctgta

SEQ ID NO: 238058 - DNA, 25 bp, Probe sequence
gatggcgagcgagtagctgtaaaca

SEQ ID NO: 238059 - DNA, 25 bp, Probe sequence
gatccaactttgaaagatggcgagc

SEQ ID NO: 238060 - DNA, 25 bp, Probe sequence
gtttggcctcattgatgaagaccaa

SEQ ID NO: 238061 - DNA, 25 bp, Probe sequence
gtagttgtcttccatgcaaacaaaa

SEQ ID NO: 238062 - DNA, 25 bp, Probe sequence
gtcttccatgcaaacaaaaatgatg

SEQ ID NO: 238063 - DNA, 25 bp, Probe sequence
gtgcgtttggcctcattgatgaaga

SEQ ID NO: 238064 - DNA, 25 bp, Probe sequence
gtgaatcaatggatccaactttgaa

SEQ ID NO: 238065 - DNA, 25 bp, Probe sequence
gtgattacattactgggactttcca

SEQ ID NO: 238066 - DNA, 25 bp, Probe sequence
ggtaatgtagttgtcttccatgcaa

SEQ ID NO: 238067 - DNA, 25 bp, Probe sequence
ggattatttcaattgcagtcgcttt

SEQ ID NO: 238068 - DNA, 25 bp, Probe sequence
ggaatggattatttcaattgcagtc

SEQ ID NO: 238069 - DNA, 25 bp, Probe sequence
tggcgagcgagtagctgtaaacatt

SEQ ID NO: 238070 - DNA, 25 bp, Probe sequence
tgtcatcggtgttcctggtgataaa

SEQ ID NO: 238071 - DNA, 25 bp, Probe sequence
tcggtgttcctggtgataaagtaga

SEQ ID NO: 238072 - DNA, 25 bp, Probe sequence
tcatcggtgttcctggtgataaagt

SEQ ID NO: 238073 - DNA, 25 bp, Probe sequence
taaacgtgtcatcggtgttcctggt

SEQ ID NO: 238074 - DNA, 25 bp, Probe sequence
tacattactgggactttccaagtta

SEQ ID NO: 238075 - DNA, 25 bp, Probe sequence
tactgggactttccaagttaaagat

SEQ ID NO: 238076 - DNA, 25 bp, Probe sequence
tatttcaattgcagtcgcttttgtc

SEQ ID NO: 238077 - DNA, 25 bp, Probe sequence
ttcaattgcagtcgcttttgtcatt

SEQ ID NO: 238078 - DNA, 25 bp, Probe sequence
attactaacattcctcaataccatg

SEQ ID NO: 238079 - DNA, 25 bp, Probe sequence
atttgattccatattaccgctttat

SEQ ID NO: 238080 - DNA, 25 bp, Probe sequence
atcaaggcacgtattcaaagtttat

SEQ ID NO: 238081 - DNA, 25 bp, Probe sequence
atcaatcgagtggcatgtcaaggtc

SEQ ID NO: 238082 - DNA, 25 bp, Probe sequence
atcctctgaaggtagtgcgacactt

SEQ ID NO: 238083 - DNA, 25 bp, Probe sequence
atgcagtaacgcctgaacatttaga

SEQ ID NO: 238084 - DNA, 25 bp, Probe sequence
agcagatccgcttggagatccaatc

SEQ ID NO: 238085 - DNA, 25 bp, Probe sequence
acaacgccttggattaacagatatt

SEQ ID NO: 238086 - DNA, 25 bp, Probe sequence
aaattcttcagcttactatcgttat

SEQ ID NO: 238087 - DNA, 25 bp, Probe sequence
aacaagcctttgtcaatgatccgga

SEQ ID NO: 238088 - DNA, 25 bp, Probe sequence
aatgctacgcttattgaagactgat

SEQ ID NO: 238089 - DNA, 25 bp, Probe sequence
aatcattttaattgcgccaactcaa

SEQ ID NO: 238090 - DNA, 25 bp, Probe sequence
aattcacttcagatattgtaccagt

SEQ ID NO: 238091 - DNA, 25 bp, Probe sequence
aattgccatgtgctttttgtagtta

SEQ ID NO: 238092 - DNA, 25 bp, Probe sequence
gcgccaactcaaagtacatttcaat

SEQ ID NO: 238093 - DNA, 25 bp, Probe sequence
gcagaccaaactgttattgatgcat

SEQ ID NO: 238094 - DNA, 25 bp, Probe sequence
gaaggttatcaacaatgcccattta

SEQ ID NO: 238095 - DNA, 25 bp, Probe sequence
gacacatcatccggtcatggaaatg

SEQ ID NO: 238096 - DNA, 25 bp, Probe sequence
gacgacagatggtaaccacgatcaa

SEQ ID NO: 238097 - DNA, 25 bp, Probe sequence
gacgcattggcgctattgtagaaac

SEQ ID NO: 238098 - DNA, 25 bp, Probe sequence
gagcgggaacaggtaagtctacgaa

SEQ ID NO: 238099 - DNA, 25 bp, Probe sequence
gagttcgaacaacgcattcaaaacg

SEQ ID NO: 238100 - DNA, 25 bp, Probe sequence
gagggcaaattgaccgtatcgatac

SEQ ID NO: 238101 - DNA, 25 bp, Probe sequence
gagtggctaaaacgtgctgatatat

SEQ ID NO: 238102 - DNA, 25 bp, Probe sequence
gatggttttcacaacttttcaacga

SEQ ID NO: 238103 - DNA, 25 bp, Probe sequence
gatgcattggatattcgtttagaac

SEQ ID NO: 238104 - DNA, 25 bp, Probe sequence
gatacaaagcgttcgatgacacatc

SEQ ID NO: 238105 - DNA, 25 bp, Probe sequence
gattaagtcatcgtattttccaaga

SEQ ID NO: 238106 - DNA, 25 bp, Probe sequence
gttaacccattgtcactaatgcaac

SEQ ID NO: 238107 - DNA, 25 bp, Probe sequence
gtattggtacgatggatttggctaa

SEQ ID NO: 238108 - DNA, 25 bp, Probe sequence
gtagttatcaatcggtatgtcatgt

SEQ ID NO: 238109 - DNA, 25 bp, Probe sequence
gtggctgatagttggttagatgctt

SEQ ID NO: 238110 - DNA, 25 bp, Probe sequence
ggacatactgaagttgcaccattaa

SEQ ID NO: 238111 - DNA, 25 bp, Probe sequence
taacgacaactcaaggtattccaat

SEQ ID NO: 238112 - DNA, 25 bp, Probe sequence
atagattttcggcacaagacttaat

SEQ ID NO: 238113 - DNA, 25 bp, Probe sequence
actacgatccttttgctaaattagc

SEQ ID NO: 238114 - DNA, 25 bp, Probe sequence
acaatctgatgtttttagtttagga

SEQ ID NO: 238115 - DNA, 25 bp, Probe sequence
aaacgaatcttcagcatgtgattta

SEQ ID NO: 238116 - DNA, 25 bp, Probe sequence
aacatttgcaaactctgattcagga

SEQ ID NO: 238117 - DNA, 25 bp, Probe sequence
aagcgatgagtcaagcacatagtga

SEQ ID NO: 238118 - DNA, 25 bp, Probe sequence
aagatcaatcaatttttcacattaa

SEQ ID NO: 238119 - DNA, 25 bp, Probe sequence
gaatcagattattcatacacgatgg

SEQ ID NO: 238120 - DNA, 25 bp, Probe sequence
gaagatacggagtctattggttatg

SEQ ID NO: 238121 - DNA, 25 bp, Probe sequence
gaagaaatcttacgcgaagtagcag

SEQ ID NO: 238122 - DNA, 25 bp, Probe sequence
gaaattcattcgcatcaaacctttg

SEQ ID NO: 238123 - DNA, 25 bp, Probe sequence
gacatatatcaggctccgtttccat

SEQ ID NO: 238124 - DNA, 25 bp, Probe sequence
gacgaggttgaagcagcaaagcagg

SEQ ID NO: 238125 - DNA, 25 bp, Probe sequence
gagaatttgatctcactaaatcttt

SEQ ID NO: 238126 - DNA, 25 bp, Probe sequence
gagcaagcgtgtttaattcgttata

SEQ ID NO: 238127 - DNA, 25 bp, Probe sequence
gagtatcacagtagtgcaaagcacg

SEQ ID NO: 238128 - DNA, 25 bp, Probe sequence
gagtgaatgaaacagcagctagagt

SEQ ID NO: 238129 - DNA, 25 bp, Probe sequence
gaggagtggagcctttgattgaaga

SEQ ID NO: 238130 - DNA, 25 bp, Probe sequence
gatacaaatccattgttcattaatg

SEQ ID NO: 238131 - DNA, 25 bp, Probe sequence
gtagttaacaaccatcacctattta

SEQ ID NO: 238132 - DNA, 25 bp, Probe sequence
gtctattggttatggagggtatgcg

SEQ ID NO: 238133 - DNA, 25 bp, Probe sequence
gtgctaaattatgttgcttggtctg

SEQ ID NO: 238134 - DNA, 25 bp, Probe sequence
gggtactacataacaggaactaaca

SEQ ID NO: 238135 - DNA, 25 bp, Probe sequence
ggctgctaaagcacttaagttgttc

SEQ ID NO: 238136 - DNA, 25 bp, Probe sequence
ggtgtatctgataaggctacgaaca

SEQ ID NO: 238137 - DNA, 25 bp, Probe sequence
ggtttgaagactacgatccttttgc

SEQ ID NO: 238138 - DNA, 25 bp, Probe sequence
ggagtatcttactgattcttcaatt

SEQ ID NO: 238139 - DNA, 25 bp, Probe sequence
ggacaatataaatactgtgcaccgg

SEQ ID NO: 238140 - DNA, 25 bp, Probe sequence
ggctccgtttccatctagatggcta

SEQ ID NO: 238141 - DNA, 25 bp, Probe sequence
tgtgcaccggaacagatgtatagtt

SEQ ID NO: 238142 - DNA, 25 bp, Probe sequence
tacacgatggagttagctgatgaaa

SEQ ID NO: 238143 - DNA, 25 bp, Probe sequence
tagtgaggttttttaatcattactt

SEQ ID NO: 238144 - DNA, 25 bp, Probe sequence
tatgtcaaatggttctaagttctaa

SEQ ID NO: 238145 - DNA, 25 bp, Probe sequence
ttacagaagtctacaggtcttgctg

SEQ ID NO: 238146 - DNA, 25 bp, Probe sequence
attaacttcaccaaatccgttccat

SEQ ID NO: 238147 - DNA, 25 bp, Probe sequence
atcagcaatttggtctcggaatgga

SEQ ID NO: 238148 - DNA, 25 bp, Probe sequence
atccgttccatcttatttatagtat

SEQ ID NO: 238149 - DNA, 25 bp, Probe sequence
aggtctagagtttccatttgtcatt

SEQ ID NO: 238150 - DNA, 25 bp, Probe sequence
agtaccttgcgcgtattgtgaaaga

SEQ ID NO: 238151 - DNA, 25 bp, Probe sequence
agaggcatcgattgctgatcctgca

SEQ ID NO: 238152 - DNA, 25 bp, Probe sequence
aaaccaacgcatcaaaattcatcaa

SEQ ID NO: 238153 - DNA, 25 bp, Probe sequence
aaccgatgcatttaatcgtcgccgt

SEQ ID NO: 238154 - DNA, 25 bp, Probe sequence
aagcgcaacttattcaactactaac

SEQ ID NO: 238155 - DNA, 25 bp, Probe sequence
aagctcgcaatttacaacaagcctt

SEQ ID NO: 238156 - DNA, 25 bp, Probe sequence
aagatcatccggtgtatcagttaat

SEQ ID NO: 238157 - DNA, 25 bp, Probe sequence
aatcgtcgccgtgggatgacagatg

SEQ ID NO: 238158 - DNA, 25 bp, Probe sequence
catttccatctttagcttcggttgc

SEQ ID NO: 238159 - DNA, 25 bp, Probe sequence
gcgcgtttgcctaatgtaacagcga

SEQ ID NO: 238160 - DNA, 25 bp, Probe sequence
gctgatcctgcaaatgcacacttga

SEQ ID NO: 238161 - DNA, 25 bp, Probe sequence
gcattagttgaccaattgccacaag

SEQ ID NO: 238162 - DNA, 25 bp, Probe sequence
gcaattgtctatttctggtgagcac

SEQ ID NO: 238163 - DNA, 25 bp, Probe sequence
gaatcggaccatccagtaaacttaa

SEQ ID NO: 238164 - DNA, 25 bp, Probe sequence
gaagcatcgtgtagaccaacgtatt

SEQ ID NO: 238165 - DNA, 25 bp, Probe sequence
gaacgcagctttggacaagctcgca

SEQ ID NO: 238166 - DNA, 25 bp, Probe sequence
gaaattgccgaatcataccgtcaac

SEQ ID NO: 238167 - DNA, 25 bp, Probe sequence
gatggttcgccttcagaaattgccg

SEQ ID NO: 238168 - DNA, 25 bp, Probe sequence
gatggtcgatgccttagaagatgct

SEQ ID NO: 238169 - DNA, 25 bp, Probe sequence
gatgactacttctatcaatcgattg

SEQ ID NO: 238170 - DNA, 25 bp, Probe sequence
gatatgcaacaattggcgccacgag

SEQ ID NO: 238171 - DNA, 25 bp, Probe sequence
gatttgtcgcaaaacttccgttctc

SEQ ID NO: 238172 - DNA, 25 bp, Probe sequence
gtgatttggactgacgcgcaatggc

SEQ ID NO: 238173 - DNA, 25 bp, Probe sequence
gtgatggcattgatgtcgatcgact

SEQ ID NO: 238174 - DNA, 25 bp, Probe sequence
tggcgccacgagtaaagtaccttgc

SEQ ID NO: 238175 - DNA, 25 bp, Probe sequence
ggacttattggtggacgtggacgac

SEQ ID NO: 238176 - DNA, 25 bp, Probe sequence
taaacatcaatctgcgtcaattcca

SEQ ID NO: 238177 - DNA, 25 bp, Probe sequence
tacgatatccttgatcctgctttta

SEQ ID NO: 238178 - DNA, 25 bp, Probe sequence
tagcgttgcaaatccaaatcctaca

SEQ ID NO: 238179 - DNA, 25 bp, Probe sequence
ttgcagccgcggcaggttcaggtaa

SEQ ID NO: 238180 - DNA, 25 bp, Probe sequence
atgggtccttatatcgttactaaag

SEQ ID NO: 238181 - DNA, 25 bp, Probe sequence
agctttagattatgtttacggctat

SEQ ID NO: 238182 - DNA, 25 bp, Probe sequence
agcggcaaagctgaagactataaaa

SEQ ID NO: 238183 - DNA, 25 bp, Probe sequence
acctccgaataatgtgattgctttt

SEQ ID NO: 238184 - DNA, 25 bp, Probe sequence
aaacgcgaagatgctgtatgggatt

SEQ ID NO: 238185 - DNA, 25 bp, Probe sequence
aacacaagtatttgctgactttgca

SEQ ID NO: 238186 - DNA, 25 bp, Probe sequence
aacactggcgaaatgattcttaaaa

SEQ ID NO: 238187 - DNA, 25 bp, Probe sequence
aatatgttgcactacatccgggaga

SEQ ID NO: 238188 - DNA, 25 bp, Probe sequence
aagtttaactggcggttgcccaatg

SEQ ID NO: 238189 - DNA, 25 bp, Probe sequence
aagcagcgtcatctttaacaggaga

SEQ ID NO: 238190 - DNA, 25 bp, Probe sequence
catccgggagatattattgcaactg

SEQ ID NO: 238191 - DNA, 25 bp, Probe sequence
ccaccagtaacacctccgaataatg

SEQ ID NO: 238192 - DNA, 25 bp, Probe sequence
gcgttggtgcaggtatgcaaccacc

SEQ ID NO: 238193 - DNA, 25 bp, Probe sequence
gctgactttgcagaaggagatttcc

SEQ ID NO: 238194 - DNA, 25 bp, Probe sequence
gaacaagatcaagcatttttatcaa

SEQ ID NO: 238195 - DNA, 25 bp, Probe sequence
gaaattacaaagatcatgcgaacga

SEQ ID NO: 238196 - DNA, 25 bp, Probe sequence
gacaaaacttcatatggcgttaaag

SEQ ID NO: 238197 - DNA, 25 bp, Probe sequence
gatgctgtatgggatttaacacaag

SEQ ID NO: 238198 - DNA, 25 bp, Probe sequence
gatatcactgatcgcaaagcacaaa

SEQ ID NO: 238199 - DNA, 25 bp, Probe sequence
gatattattgcaactggtacaccag

SEQ ID NO: 238200 - DNA, 25 bp, Probe sequence
gtttacggctatacaattattaacg

SEQ ID NO: 238201 - DNA, 25 bp, Probe sequence
gtagcagcagaagatagcggcaaag

SEQ ID NO: 238202 - DNA, 25 bp, Probe sequence
gtacgtaaagcagttgtagcagcag

SEQ ID NO: 238203 - DNA, 25 bp, Probe sequence
gtgattgcttttggtagaaattaca

SEQ ID NO: 238204 - DNA, 25 bp, Probe sequence
ggtacaccagcaggcgttggtgcag

SEQ ID NO: 238205 - DNA, 25 bp, Probe sequence
ggtattgttattggtaagtctggtg

SEQ ID NO: 238206 - DNA, 25 bp, Probe sequence
ggtttacaacaaaatcatactttag

SEQ ID NO: 238207 - DNA, 25 bp, Probe sequence
ggagatttccatcctaaaacattgt

SEQ ID NO: 238208 - DNA, 25 bp, Probe sequence
ggaacgctgacaacttatatcgcta

SEQ ID NO: 238209 - DNA, 25 bp, Probe sequence
tgtatttacaaaagcagcgtcatct

SEQ ID NO: 238210 - DNA, 25 bp, Probe sequence
tgaaaagattccaaaagcattagct

SEQ ID NO: 238211 - DNA, 25 bp, Probe sequence
taaaacattgttagctggtttacaa

SEQ ID NO: 238212 - DNA, 25 bp, Probe sequence
taaagacgaactaccattacctgaa

SEQ ID NO: 238213 - DNA, 25 bp, Probe sequence
ttgcccaatgggtccttatatcgtt

SEQ ID NO: 238214 - DNA, 25 bp, Probe sequence
attgatggaagtgtcgattgctaaa

SEQ ID NO: 238215 - DNA, 25 bp, Probe sequence
attctaccgttagggcctatatcaa

SEQ ID NO: 238216 - DNA, 25 bp, Probe sequence
attaggtgtcattctaccgttaggg

SEQ ID NO: 238217 - DNA, 25 bp, Probe sequence
attttatttatcgctacatacttaa

SEQ ID NO: 238218 - DNA, 25 bp, Probe sequence
atttcaggattttggatattaattc

SEQ ID NO: 238219 - DNA, 25 bp, Probe sequence
atcaaaattattcggtattggctaa

SEQ ID NO: 238220 - DNA, 25 bp, Probe sequence
atcatcacaatggtattaggtgtca

SEQ ID NO: 238221 - DNA, 25 bp, Probe sequence
aggtgtcattctaccgttagggcct

SEQ ID NO: 238222 - DNA, 25 bp, Probe sequence
agaaagagacatgaacaaagtcaca

SEQ ID NO: 238223 - DNA, 25 bp, Probe sequence
gctgttgacgttaatttcaggattt

SEQ ID NO: 238224 - DNA, 25 bp, Probe sequence
gcattaattatcatcacaatggtat

SEQ ID NO: 238225 - DNA, 25 bp, Probe sequence
gcagtagttggattgatggaagtgt

SEQ ID NO: 238226 - DNA, 25 bp, Probe sequence
gcaaatcatatgttgcttacattga

SEQ ID NO: 238227 - DNA, 25 bp, Probe sequence
gaatggcggggcaaatcatatgttg

SEQ ID NO: 238228 - DNA, 25 bp, Probe sequence
gaagtgtcgattgctaaaagaaaga

SEQ ID NO: 238229 - DNA, 25 bp, Probe sequence
gacgttaatttcaggattttggata

SEQ ID NO: 238230 - DNA, 25 bp, Probe sequence
gatggaagtgtcgattgctaaaaga

SEQ ID NO: 238231 - DNA, 25 bp, Probe sequence
gttgcttacattgaaaatgctgtgt

SEQ ID NO: 238232 - DNA, 25 bp, Probe sequence
gttagggcctatatcaaaattattc

SEQ ID NO: 238233 - DNA, 25 bp, Probe sequence
gtattaggtgtcattctaccgttag

SEQ ID NO: 238234 - DNA, 25 bp, Probe sequence
gtcattctaccgttagggcctatat

SEQ ID NO: 238235 - DNA, 25 bp, Probe sequence
gtcatttatgaatggcggggcaaat

SEQ ID NO: 238236 - DNA, 25 bp, Probe sequence
gggcctatatcaaaattattcggta

SEQ ID NO: 238237 - DNA, 25 bp, Probe sequence
ggggcaaatcatatgttgcttacat

SEQ ID NO: 238238 - DNA, 25 bp, Probe sequence
ggattgatggaagtgtcgattgcta

SEQ ID NO: 238239 - DNA, 25 bp, Probe sequence
ggcggggcaaatcatatgttgctta

SEQ ID NO: 238240 - DNA, 25 bp, Probe sequence
tgtcattctaccgttagggcctata

SEQ ID NO: 238241 - DNA, 25 bp, Probe sequence
tctaccgttagggcctatatcaaaa

SEQ ID NO: 238242 - DNA, 25 bp, Probe sequence
tcattctaccgttagggcctatatc

SEQ ID NO: 238243 - DNA, 25 bp, Probe sequence
taggtgtcattctaccgttagggcc

SEQ ID NO: 238244 - DNA, 25 bp, Probe sequence
tatgctgttgacgttaatttcagga

SEQ ID NO: 238245 - DNA, 25 bp, Probe sequence
tatttatgctgttgacgttaatttc

SEQ ID NO: 238246 - DNA, 25 bp, Probe sequence
ttacattgaaaatgctgtgtggtgt

SEQ ID NO: 238247 - DNA, 25 bp, Probe sequence
ttcagtcatttatgaatggcggggc

SEQ ID NO: 238248 - DNA, 25 bp, Probe sequence
atatcgtatggagtccaccttggac

SEQ ID NO: 238249 - DNA, 25 bp, Probe sequence
atcgtatggagtccaccttggacaa

SEQ ID NO: 238250 - DNA, 25 bp, Probe sequence
atggtaattgaccctgaattaggaa

SEQ ID NO: 238251 - DNA, 25 bp, Probe sequence
agatatgatgtcacgttacgctaag

SEQ ID NO: 238252 - DNA, 25 bp, Probe sequence
aaagatatgatgtcacgttacgcta

SEQ ID NO: 238253 - DNA, 25 bp, Probe sequence
aagtgaatgttgatgatgaaggcgt

SEQ ID NO: 238254 - DNA, 25 bp, Probe sequence
aaggcgtatgtacagttgatatgac

SEQ ID NO: 238255 - DNA, 25 bp, Probe sequence
aatgggatgtccaatgggacctcaa

SEQ ID NO: 238256 - DNA, 25 bp, Probe sequence
aattgaccctgaattaggaattgat

SEQ ID NO: 238257 - DNA, 25 bp, Probe sequence
catcaatgggatgtccaatgggacc

SEQ ID NO: 238258 - DNA, 25 bp, Probe sequence
cacgttacgctaagattgcacttgg

SEQ ID NO: 238259 - DNA, 25 bp, Probe sequence
cagtattagcagagattcctgaaat

SEQ ID NO: 238260 - DNA, 25 bp, Probe sequence
caggatactgaagtgaatatcgtat

SEQ ID NO: 238261 - DNA, 25 bp, Probe sequence
gaatatcgtatggagtccaccttgg

SEQ ID NO: 238262 - DNA, 25 bp, Probe sequence
gctaagattgcacttggtgtgagct

SEQ ID NO: 238263 - DNA, 25 bp, Probe sequence
gaatgttgatgatgaaggcgtatgt

SEQ ID NO: 238264 - DNA, 25 bp, Probe sequence
gaccctgaattaggaattgatatcg

SEQ ID NO: 238265 - DNA, 25 bp, Probe sequence
gatgtcacgttacgctaagattgca

SEQ ID NO: 238266 - DNA, 25 bp, Probe sequence
gatgaaggcgtatgtacagttgata

SEQ ID NO: 238267 - DNA, 25 bp, Probe sequence
gatatgactttaacatcaatgggat

SEQ ID NO: 238268 - DNA, 25 bp, Probe sequence
gttgatgatgaaggcgtatgtacag

SEQ ID NO: 238269 - DNA, 25 bp, Probe sequence
gttacgctaagattgcacttggtgt

SEQ ID NO: 238270 - DNA, 25 bp, Probe sequence
gtatggagtccaccttggacaaaag

SEQ ID NO: 238271 - DNA, 25 bp, Probe sequence
gtacagttgatatgactttaacatc

SEQ ID NO: 238272 - DNA, 25 bp, Probe sequence
gtcacgttacgctaagattgcactt

SEQ ID NO: 238273 - DNA, 25 bp, Probe sequence
gtccaatgggacctcaaattattga

SEQ ID NO: 238274 - DNA, 25 bp, Probe sequence
gtgaatatcgtatggagtccacctt

SEQ ID NO: 238275 - DNA, 25 bp, Probe sequence
gggatgtccaatgggacctcaaatt

SEQ ID NO: 238276 - DNA, 25 bp, Probe sequence
gggacctcaaattattgatcaagtt

SEQ ID NO: 238277 - DNA, 25 bp, Probe sequence
ggagtccaccttggacaaaagatat

SEQ ID NO: 238278 - DNA, 25 bp, Probe sequence
taagattgcacttggtgtgagctaa

SEQ ID NO: 238279 - DNA, 25 bp, Probe sequence
taaaacagtattagcagagattcct

SEQ ID NO: 238280 - DNA, 25 bp, Probe sequence
tacgctaagattgcacttggtgtga

SEQ ID NO: 238281 - DNA, 25 bp, Probe sequence
tatgatgtcacgttacgctaagatt

SEQ ID NO: 238282 - DNA, 25 bp, Probe sequence
aggtacaaatggcgactttactgtc

SEQ ID NO: 238283 - DNA, 25 bp, Probe sequence
atcggtgagtcatttaagtcatcag

SEQ ID NO: 238284 - DNA, 25 bp, Probe sequence
atgcggatagcaccaattgataaca

SEQ ID NO: 238285 - DNA, 25 bp, Probe sequence
agtgtcgttcatccatctacatgga

SEQ ID NO: 238286 - DNA, 25 bp, Probe sequence
actgtcaaacagctcgacgatttac

SEQ ID NO: 238287 - DNA, 25 bp, Probe sequence
aaatcatctgatcaagtcgtattag

SEQ ID NO: 238288 - DNA, 25 bp, Probe sequence
aacgtttattaccagcagtcatagt

SEQ ID NO: 238289 - DNA, 25 bp, Probe sequence
aatggggatcattcacgagtgtatt

SEQ ID NO: 238290 - DNA, 25 bp, Probe sequence
caattgtatcaaaccttacctttag

SEQ ID NO: 238291 - DNA, 25 bp, Probe sequence
ggaaaagtagggcgtcaattgtatc

SEQ ID NO: 238292 - DNA, 25 bp, Probe sequence
cagatacctgtatatgtgtacttta

SEQ ID NO: 238293 - DNA, 25 bp, Probe sequence
ccagggctcgatggtttgagggcaa

SEQ ID NO: 238294 - DNA, 25 bp, Probe sequence
gcaatggttgacaggtggcttttta

SEQ ID NO: 238295 - DNA, 25 bp, Probe sequence
gaacagttttacatatttttcccag

SEQ ID NO: 238296 - DNA, 25 bp, Probe sequence
gaaaaatgatccacctaaagttgta

SEQ ID NO: 238297 - DNA, 25 bp, Probe sequence
gagcaattttcatttatgccattaa

SEQ ID NO: 238298 - DNA, 25 bp, Probe sequence
gagggcaatcgctgttctaggaatt

SEQ ID NO: 238299 - DNA, 25 bp, Probe sequence
gatctctggttatttaattacaagc

SEQ ID NO: 238300 - DNA, 25 bp, Probe sequence
gattattagctgacgcggcgaaacg

SEQ ID NO: 238301 - DNA, 25 bp, Probe sequence
gtagggacagcaaccttattattaa

SEQ ID NO: 238302 - DNA, 25 bp, Probe sequence
gtaaccttgttaattccatttatgt

SEQ ID NO: 238303 - DNA, 25 bp, Probe sequence
gtgaatattttgcaccagacggtgt

SEQ ID NO: 238304 - DNA, 25 bp, Probe sequence
ggtggtttctatttaatatccatat

SEQ ID NO: 238305 - DNA, 25 bp, Probe sequence
ggtggctttttaggtgtggatacat

SEQ ID NO: 238306 - DNA, 25 bp, Probe sequence
ggatacattttttgtgatctctggt

SEQ ID NO: 238307 - DNA, 25 bp, Probe sequence
ggcattttgcagtaattagtttcgt

SEQ ID NO: 238308 - DNA, 25 bp, Probe sequence
ggcgaaacgaaagtccaatgtcaca

SEQ ID NO: 238309 - DNA, 25 bp, Probe sequence
tgggtgttattttagcttttttatg

SEQ ID NO: 238310 - DNA, 25 bp, Probe sequence
tgaaaagcttttggatacgtcgttt

SEQ ID NO: 238311 - DNA, 25 bp, Probe sequence
taagtcatcagttcctaagtctaga

SEQ ID NO: 238312 - DNA, 25 bp, Probe sequence
taaacctcttttaatcggtgattca

SEQ ID NO: 238313 - DNA, 25 bp, Probe sequence
tacagacattgttactgggtgttat

SEQ ID NO: 238314 - DNA, 25 bp, Probe sequence
tatcgctttatagaaactccattta

SEQ ID NO: 238315 - DNA, 25 bp, Probe sequence
tttgcagagctatcatatcgcttta

SEQ ID NO: 238316 - DNA, 25 bp, Probe sequence
attagctaaatatggccgcgactta

SEQ ID NO: 238317 - DNA, 25 bp, Probe sequence
atcactgatcgttttttaccagata

SEQ ID NO: 238318 - DNA, 25 bp, Probe sequence
atgaatctgacaatgcgagcaaaca

SEQ ID NO: 238319 - DNA, 25 bp, Probe sequence
agatagagccttagttgctgccgct

SEQ ID NO: 238320 - DNA, 25 bp, Probe sequence
agcggttgacctggtttcagatgca

SEQ ID NO: 238321 - DNA, 25 bp, Probe sequence
acatatgctgttcaaagtgctttac

SEQ ID NO: 238322 - DNA, 25 bp, Probe sequence
acaaccctgtgctcattggtgaacc

SEQ ID NO: 238323 - DNA, 25 bp, Probe sequence
acaagcagcacttcaatctcgtgta

SEQ ID NO: 238324 - DNA, 25 bp, Probe sequence
aactgaagcggttcgtcgtaatcca

SEQ ID NO: 238325 - DNA, 25 bp, Probe sequence
aagcgcatactgacgtctttaatgt

SEQ ID NO: 238326 - DNA, 25 bp, Probe sequence
gccaatggacaggcataccagtttc

SEQ ID NO: 238327 - DNA, 25 bp, Probe sequence
gcatgtgcaacaattcgtacggaaa

SEQ ID NO: 238328 - DNA, 25 bp, Probe sequence
gaacctcaatacggtgcaagaccat

SEQ ID NO: 238329 - DNA, 25 bp, Probe sequence
gattgataggggcacctccaggata

SEQ ID NO: 238330 - DNA, 25 bp, Probe sequence
gaaacaccattagcacgtatgatga

SEQ ID NO: 238331 - DNA, 25 bp, Probe sequence
gaaatccatatgcttgtaggtgctg

SEQ ID NO: 238332 - DNA, 25 bp, Probe sequence
gacaaactaaacacgtatgcatctg

SEQ ID NO: 238333 - DNA, 25 bp, Probe sequence
gagcgtcgtttccaaaaagtagcag

SEQ ID NO: 238334 - DNA, 25 bp, Probe sequence
gagggggaaatcacgtgacatcaca

SEQ ID NO: 238335 - DNA, 25 bp, Probe sequence
gaggcaattttaagcgctgccttaa

SEQ ID NO: 238336 - DNA, 25 bp, Probe sequence
gatggtgccatggatgcaggcaaca

SEQ ID NO: 238337 - DNA, 25 bp, Probe sequence
gatgatgctaaagcttggctaggtc

SEQ ID NO: 238338 - DNA, 25 bp, Probe sequence
gatgaaggccgtttaactgattcta

SEQ ID NO: 238339 - DNA, 25 bp, Probe sequence
gattcggcattagagcgtcgtttcc

SEQ ID NO: 238340 - DNA, 25 bp, Probe sequence
gatttagttgaccaagcatgtgcaa

SEQ ID NO: 238341 - DNA, 25 bp, Probe sequence
gtagcgggcgctaaatatcgtggtg

SEQ ID NO: 238342 - DNA, 25 bp, Probe sequence
gtagcagttagtgagcctgatgttg

SEQ ID NO: 238343 - DNA, 25 bp, Probe sequence
gtacaacgccaaattgaaacaccat

SEQ ID NO: 238344 - DNA, 25 bp, Probe sequence
gtctgatcgttacatcactgatcgt

SEQ ID NO: 238345 - DNA, 25 bp, Probe sequence
ggtgtgcgtattcaagatagagcct

SEQ ID NO: 238346 - DNA, 25 bp, Probe sequence
ggttcgtcgtaatccatactcagtt

SEQ ID NO: 238347 - DNA, 25 bp, Probe sequence
tggtagtttcttattcctaggtcca

SEQ ID NO: 238348 - DNA, 25 bp, Probe sequence
tggagcatattttacgttcggcaat

SEQ ID NO: 238349 - DNA, 25 bp, Probe sequence
tgctgccgctgaattgtctgatcgt

SEQ ID NO: 238350 - DNA, 25 bp, Probe sequence
attaggattaatattggctcttttc

SEQ ID NO: 238351 - DNA, 25 bp, Probe sequence
atattgctggaggatctgattacga

SEQ ID NO: 238352 - DNA, 25 bp, Probe sequence
atcggaggtgcactttttattgttt

SEQ ID NO: 238353 - DNA, 25 bp, Probe sequence
atggctgattggtggtattttgctg

SEQ ID NO: 238354 - DNA, 25 bp, Probe sequence
aggcatcgtagctcaaatatatttt

SEQ ID NO: 238355 - DNA, 25 bp, Probe sequence
actcaaaagatgaatcgacagacga

SEQ ID NO: 238356 - DNA, 25 bp, Probe sequence
aaccatctttactgcgatttatatg

SEQ ID NO: 238357 - DNA, 25 bp, Probe sequence
aagtacagagaatcaatttgaatct

SEQ ID NO: 238358 - DNA, 25 bp, Probe sequence
cactttttattgtttatgctattat

SEQ ID NO: 238359 - DNA, 25 bp, Probe sequence
ctgttttaccaaccatctttactgc

SEQ ID NO: 238360 - DNA, 25 bp, Probe sequence
gcgatttatatggaaagttactctg

SEQ ID NO: 238361 - DNA, 25 bp, Probe sequence
gctcttttcactgttttaccaacca

SEQ ID NO: 238362 - DNA, 25 bp, Probe sequence
gcaatttggataggcatcgtagctc

SEQ ID NO: 238363 - DNA, 25 bp, Probe sequence
gattggtggtattttgctgatttgg

SEQ ID NO: 238364 - DNA, 25 bp, Probe sequence
gttactctgtaatcggaggtgcact

SEQ ID NO: 238365 - DNA, 25 bp, Probe sequence
gtttatgctattattgcactgtgtt

SEQ ID NO: 238366 - DNA, 25 bp, Probe sequence
gtaatcggaggtgcactttttattg

SEQ ID NO: 238367 - DNA, 25 bp, Probe sequence
gtgtcgtttttgttaggatgatatc

SEQ ID NO: 238368 - DNA, 25 bp, Probe sequence
ggtggtattttgctgatttggaata

SEQ ID NO: 238369 - DNA, 25 bp, Probe sequence
ggattaatattggctcttttcactg

SEQ ID NO: 238370 - DNA, 25 bp, Probe sequence
ggataggcatcgtagctcaaatata

SEQ ID NO: 238371 - DNA, 25 bp, Probe sequence
ggaggtgcactttttattgtttatg

SEQ ID NO: 238372 - DNA, 25 bp, Probe sequence
ggaggatctgattacgaaacaattt

SEQ ID NO: 238373 - DNA, 25 bp, Probe sequence
ggatgatatctattaatattgctgg

SEQ ID NO: 238374 - DNA, 25 bp, Probe sequence
tggctcttttcactgttttaccaac

SEQ ID NO: 238375 - DNA, 25 bp, Probe sequence
tcactgttttaccaaccatctttac

SEQ ID NO: 238376 - DNA, 25 bp, Probe sequence
taatattggctcttttcactgtttt

SEQ ID NO: 238377 - DNA, 25 bp, Probe sequence
taccaaccatctttactgcgattta

SEQ ID NO: 238378 - DNA, 25 bp, Probe sequence
ttttaccaaccatctttactgcgat

SEQ ID NO: 238379 - DNA, 25 bp, Probe sequence
tatattttagtgtcgtttttgttag

SEQ ID NO: 238380 - DNA, 25 bp, Probe sequence
tattgcactgtgtttatataatttc

SEQ ID NO: 238381 - DNA, 25 bp, Probe sequence
tattggctcttttcactgttttacc

SEQ ID NO: 238382 - DNA, 25 bp, Probe sequence
tttcgtcaattttatggctgattgg

SEQ ID NO: 238383 - DNA, 25 bp, Probe sequence
ttttcactgttttaccaaccatctt

SEQ ID NO: 238384 - DNA, 25 bp, Probe sequence
attgccaatatctgacttgcatata

SEQ ID NO: 238385 - DNA, 25 bp, Probe sequence
attcacaagttgttcagtttccaat

SEQ ID NO: 238386 - DNA, 25 bp, Probe sequence
atgtatcaatatttagttcctagtg

SEQ ID NO: 238387 - DNA, 25 bp, Probe sequence
agcgggtaatgctcctattgaggaa

SEQ ID NO: 238388 - DNA, 25 bp, Probe sequence
agttgttcagtttccaataagtaat

SEQ ID NO: 238389 - DNA, 25 bp, Probe sequence
acttgtgaacaagttttcacctgaa

SEQ ID NO: 238390 - DNA, 25 bp, Probe sequence
aaattctcgattttcaaatatcaga

SEQ ID NO: 238391 - DNA, 25 bp, Probe sequence
aacgatctagggttggctactgcaa

SEQ ID NO: 238392 - DNA, 25 bp, Probe sequence
aattttttctgctcattgtcataac

SEQ ID NO: 238393 - DNA, 25 bp, Probe sequence
aattctgttgaagtaggcatgtgta

SEQ ID NO: 238394 - DNA, 25 bp, Probe sequence
gaattagtagtattgactaggctta

SEQ ID NO: 238395 - DNA, 25 bp, Probe sequence
gaatcaggaattcatcaagatggta

SEQ ID NO: 238396 - DNA, 25 bp, Probe sequence
gaaaatcaaagactgcttggatata

SEQ ID NO: 238397 - DNA, 25 bp, Probe sequence
gaaactacatttttgggaattggtg

SEQ ID NO: 238398 - DNA, 25 bp, Probe sequence
gacactgtaggatgttcgacaccat

SEQ ID NO: 238399 - DNA, 25 bp, Probe sequence
gagagagcgggtaatgctcctattg

SEQ ID NO: 238400 - DNA, 25 bp, Probe sequence
gatacagtggatttacttcagataa

SEQ ID NO: 238401 - DNA, 25 bp, Probe sequence
gttcgacaccattagaatacggaga

SEQ ID NO: 238402 - DNA, 25 bp, Probe sequence
gttttcacctgaagtagcacctgaa

SEQ ID NO: 238403 - DNA, 25 bp, Probe sequence
gtagcacctgaagatacagtggatt

SEQ ID NO: 238404 - DNA, 25 bp, Probe sequence
gggatggtatgcaacaaagtaatgt

SEQ ID NO: 238405 - DNA, 25 bp, Probe sequence
ggagtagatatttgttttgaagatg

SEQ ID NO: 238406 - DNA, 25 bp, Probe sequence
ggaattcactttacccgacgtatat

SEQ ID NO: 238407 - DNA, 25 bp, Probe sequence
ggcatgtgtacaactatcgaggatg

SEQ ID NO: 238408 - DNA, 25 bp, Probe sequence
ggctactgcaaatacattagctgca

SEQ ID NO: 238409 - DNA, 25 bp, Probe sequence
tctgctcattgtcataacgatctag

SEQ ID NO: 238410 - DNA, 25 bp, Probe sequence
tacccgacgtatataaaactagtat

SEQ ID NO: 238411 - DNA, 25 bp, Probe sequence
taatattcatcaattcagagacatt

SEQ ID NO: 238412 - DNA, 25 bp, Probe sequence
tactattgccaatatctgacttgca

SEQ ID NO: 238413 - DNA, 25 bp, Probe sequence
tacggagatatttttaattactttg

SEQ ID NO: 238414 - DNA, 25 bp, Probe sequence
ttgggaattggtgagagagcgggta

SEQ ID NO: 238415 - DNA, 25 bp, Probe sequence
ttagaacagttacatttgcggacac

SEQ ID NO: 238416 - DNA, 25 bp, Probe sequence
ttctaacataattttttctgctcat

SEQ ID NO: 238417 - DNA, 25 bp, Probe sequence
ttgcggacactgtaggatgttcgac

SEQ ID NO: 238418 - DNA, 25 bp, Probe sequence
atttatgacgatgaacaagaactta

SEQ ID NO: 238419 - DNA, 25 bp, Probe sequence
atttgatatttatgacgatgaacaa

SEQ ID NO: 238420 - DNA, 25 bp, Probe sequence
atatttatgacgatgaacaagaact

SEQ ID NO: 238421 - DNA, 25 bp, Probe sequence
atagtagtgaatttgatatttatga

SEQ ID NO: 238422 - DNA, 25 bp, Probe sequence
atagcttatataaaagaatcagttg

SEQ ID NO: 238423 - DNA, 25 bp, Probe sequence
atgacgatgaacaagaacttaaatt

SEQ ID NO: 238424 - DNA, 25 bp, Probe sequence
agtgaatttgatatttatgacgatg

SEQ ID NO: 238425 - DNA, 25 bp, Probe sequence
agtagtgaatttgatatttatgacg

SEQ ID NO: 238426 - DNA, 25 bp, Probe sequence
actgacgcagaaatagcttatataa

SEQ ID NO: 238427 - DNA, 25 bp, Probe sequence
aatttgatatttatgacgatgaaca

SEQ ID NO: 238428 - DNA, 25 bp, Probe sequence
ctatttattccgtcttattaattga

SEQ ID NO: 238429 - DNA, 25 bp, Probe sequence
ctgacgcagaaatagcttatataaa

SEQ ID NO: 238430 - DNA, 25 bp, Probe sequence
gaatttgatatttatgacgatgaac

SEQ ID NO: 238431 - DNA, 25 bp, Probe sequence
gaatcagttgaaaattatagtagtg

SEQ ID NO: 238432 - DNA, 25 bp, Probe sequence
gacgatgaacaagaacttaaattaa

SEQ ID NO: 238433 - DNA, 25 bp, Probe sequence
gacgcagaaatagcttatataaaag

SEQ ID NO: 238434 - DNA, 25 bp, Probe sequence
gatatttatgacgatgaacaagaac

SEQ ID NO: 238435 - DNA, 25 bp, Probe sequence
gtagtgaatttgatatttatgacga

SEQ ID NO: 238436 - DNA, 25 bp, Probe sequence
gtgaatttgatatttatgacgatga

SEQ ID NO: 238437 - DNA, 25 bp, Probe sequence
tgatatttatgacgatgaacaagaa

SEQ ID NO: 238438 - DNA, 25 bp, Probe sequence
tgacgcagaaatagcttatataaaa

SEQ ID NO: 238439 - DNA, 25 bp, Probe sequence
tgaatttgatatttatgacgatgaa

SEQ ID NO: 238440 - DNA, 25 bp, Probe sequence
tactgacgcagaaatagcttatata

SEQ ID NO: 238441 - DNA, 25 bp, Probe sequence
tagtagtgaatttgatatttatgac

SEQ ID NO: 238442 - DNA, 25 bp, Probe sequence
tagtgaatttgatatttatgacgat

SEQ ID NO: 238443 - DNA, 25 bp, Probe sequence
tatgacgatgaacaagaacttaaat

SEQ ID NO: 238444 - DNA, 25 bp, Probe sequence
tatagtagtgaatttgatatttatg

SEQ ID NO: 238445 - DNA, 25 bp, Probe sequence
tatttatgacgatgaacaagaactt

SEQ ID NO: 238446 - DNA, 25 bp, Probe sequence
tttgatatttatgacgatgaacaag

SEQ ID NO: 238447 - DNA, 25 bp, Probe sequence
tttactgacgcagaaatagcttata

SEQ ID NO: 238448 - DNA, 25 bp, Probe sequence
tttatgacgatgaacaagaacttaa

SEQ ID NO: 238449 - DNA, 25 bp, Probe sequence
ttatgacgatgaacaagaacttaaa

SEQ ID NO: 238450 - DNA, 25 bp, Probe sequence
ttactgacgcagaaatagcttatat

SEQ ID NO: 238451 - DNA, 25 bp, Probe sequence
ttgatatttatgacgatgaacaaga

SEQ ID NO: 238452 - DNA, 25 bp, Probe sequence
attcacctatagcaattacttcagc

SEQ ID NO: 238453 - DNA, 25 bp, Probe sequence
attacaagatggttttccagtgatt

SEQ ID NO: 238454 - DNA, 25 bp, Probe sequence
attttggcctggaccattaaatatt

SEQ ID NO: 238455 - DNA, 25 bp, Probe sequence
atatgctcaataattcagatagtat

SEQ ID NO: 238456 - DNA, 25 bp, Probe sequence
atggttttccagtgattgttcctac

SEQ ID NO: 238457 - DNA, 25 bp, Probe sequence
aggattggaaattgtatggagataa

SEQ ID NO: 238458 - DNA, 25 bp, Probe sequence
agtgattgttcctactgatactaat

SEQ ID NO: 238459 - DNA, 25 bp, Probe sequence
agttgaaatattttggcctggacca

SEQ ID NO: 238460 - DNA, 25 bp, Probe sequence
acctatagcaattacttcagcaaat

SEQ ID NO: 238461 - DNA, 25 bp, Probe sequence
aaactttatttacaattacaagatg

SEQ ID NO: 238462 - DNA, 25 bp, Probe sequence
aacaagctataattatatgctcaat

SEQ ID NO: 238463 - DNA, 25 bp, Probe sequence
aactagttgaaatattttggcctgg

SEQ ID NO: 238464 - DNA, 25 bp, Probe sequence
aatattttggcctggaccattaaat

SEQ ID NO: 238465 - DNA, 25 bp, Probe sequence
cagatagtatagctataggatgtgt

SEQ ID NO: 238466 - DNA, 25 bp, Probe sequence
ctatagcaattacttcagcaaatat

SEQ ID NO: 238467 - DNA, 25 bp, Probe sequence
ctaggtacaggtattatttatgaat

SEQ ID NO: 238468 - DNA, 25 bp, Probe sequence
ctagtacgattattaaagtgacaga

SEQ ID NO: 238469 - DNA, 25 bp, Probe sequence
gaaatattttggcctggaccattaa

SEQ ID NO: 238470 - DNA, 25 bp, Probe sequence
gatggttttccagtgattgttccta

SEQ ID NO: 238471 - DNA, 25 bp, Probe sequence
gatctttgtatcgataaaatatttg

SEQ ID NO: 238472 - DNA, 25 bp, Probe sequence
gataagccagaggattggaaattgt

SEQ ID NO: 238473 - DNA, 25 bp, Probe sequence
gataagccattatcattatttattg

SEQ ID NO: 238474 - DNA, 25 bp, Probe sequence
gattgttcctactgatactaattat

SEQ ID NO: 238475 - DNA, 25 bp, Probe sequence
gttcctactgatactaattataatt

SEQ ID NO: 238476 - DNA, 25 bp, Probe sequence
gttttccagtgattgttcctactga

SEQ ID NO: 238477 - DNA, 25 bp, Probe sequence
gtaagatatatgctaagaagtcaaa

SEQ ID NO: 238478 - DNA, 25 bp, Probe sequence
tggcctggaccattaaatattattt

SEQ ID NO: 238479 - DNA, 25 bp, Probe sequence
tggttttccagtgattgttcctact

SEQ ID NO: 238480 - DNA, 25 bp, Probe sequence
tcacctatagcaattacttcagcaa

SEQ ID NO: 238481 - DNA, 25 bp, Probe sequence
taaaagaaagactaggtacaggtat

SEQ ID NO: 238482 - DNA, 25 bp, Probe sequence
taaatgattctgtaaaaagttttga

SEQ ID NO: 238483 - DNA, 25 bp, Probe sequence
tatttattgataagccagaggattg

SEQ ID NO: 238484 - DNA, 25 bp, Probe sequence
ttatttcatatattaattcacctat

SEQ ID NO: 238485 - DNA, 25 bp, Probe sequence
ttccagtgattgttcctactgatac

SEQ ID NO: 238486 - DNA, 25 bp, Probe sequence
attgcagcatttttattctctctat

SEQ ID NO: 238487 - DNA, 25 bp, Probe sequence
attagggttaagttactcaatgatg

SEQ ID NO: 238488 - DNA, 25 bp, Probe sequence
atcatcggtttattgttgttattat

SEQ ID NO: 238489 - DNA, 25 bp, Probe sequence
atgttcctatcattattaatttcag

SEQ ID NO: 238490 - DNA, 25 bp, Probe sequence
atggcgtcttatggcattgcagcat

SEQ ID NO: 238491 - DNA, 25 bp, Probe sequence
aatggcctataataatgactggtat

SEQ ID NO: 238492 - DNA, 25 bp, Probe sequence
aatatttaattttagtagtggcaca

SEQ ID NO: 238493 - DNA, 25 bp, Probe sequence
cagggttaactcgtccacaaactat

SEQ ID NO: 238494 - DNA, 25 bp, Probe sequence
cagtagtaacttaagagtgatgctt

SEQ ID NO: 238495 - DNA, 25 bp, Probe sequence
catatcaaagtttcatagcagttac

SEQ ID NO: 238496 - DNA, 25 bp, Probe sequence
gcattattcttttttaagagcgtta

SEQ ID NO: 238497 - DNA, 25 bp, Probe sequence
gcagttactatttctatgatatttt

SEQ ID NO: 238498 - DNA, 25 bp, Probe sequence
gcagcatttttattctctctataca

SEQ ID NO: 238499 - DNA, 25 bp, Probe sequence
gaagagaagttttggatattgcatt

SEQ ID NO: 238500 - DNA, 25 bp, Probe sequence
gaaatattcaaaatcatcggtttat

SEQ ID NO: 238501 - DNA, 25 bp, Probe sequence
gaaatattaatggcgtcttatggca

SEQ ID NO: 238502 - DNA, 25 bp, Probe sequence
gactggtatattttcaattctaaca

SEQ ID NO: 238503 - DNA, 25 bp, Probe sequence
gagcgttaatattaggattttttat

SEQ ID NO: 238504 - DNA, 25 bp, Probe sequence
gatgcttaattatgcagaaacgtta

SEQ ID NO: 238505 - DNA, 25 bp, Probe sequence
gatatttttaggtatttcttcaggg

SEQ ID NO: 238506 - DNA, 25 bp, Probe sequence
gattttttataggatttattccaat

SEQ ID NO: 238507 - DNA, 25 bp, Probe sequence
tttcttcagggttaactcgtccaca

SEQ ID NO: 238508 - DNA, 25 bp, Probe sequence
gttaactcgtccacaaactataaat

SEQ ID NO: 238509 - DNA, 25 bp, Probe sequence
gtttcatagcagttactatttctat

SEQ ID NO: 238510 - DNA, 25 bp, Probe sequence
gggattataggtagttatctttatg

SEQ ID NO: 238511 - DNA, 25 bp, Probe sequence
ggatattgcattattcttttttaag

SEQ ID NO: 238512 - DNA, 25 bp, Probe sequence
ggcattgcagcatttttattctctc

SEQ ID NO: 238513 - DNA, 25 bp, Probe sequence
tgcagaaacgttatattttattttt

SEQ ID NO: 238514 - DNA, 25 bp, Probe sequence
tcttcagggttaactcgtccacaaa

SEQ ID NO: 238515 - DNA, 25 bp, Probe sequence
taaactttctagcagtagtaactta

SEQ ID NO: 238516 - DNA, 25 bp, Probe sequence
taagtttgtgtcagaaatttgttta

SEQ ID NO: 238517 - DNA, 25 bp, Probe sequence
taggtatttcttcagggttaactcg

SEQ ID NO: 238518 - DNA, 25 bp, Probe sequence
tttttaatatcgcatttttacttat

SEQ ID NO: 238519 - DNA, 25 bp, Probe sequence
ttcaaggttattccataatacaatt

SEQ ID NO: 238520 - DNA, 25 bp, Probe sequence
attaacagtttatgcgttagatcat

SEQ ID NO: 238521 - DNA, 25 bp, Probe sequence
atttgaagaatgggttctacttgaa

SEQ ID NO: 238522 - DNA, 25 bp, Probe sequence
atcatcaatatgaattaacagttta

SEQ ID NO: 238523 - DNA, 25 bp, Probe sequence
atgcgttagatcattctttaaattt

SEQ ID NO: 238524 - DNA, 25 bp, Probe sequence
atgggttctacttgaatgaattttt

SEQ ID NO: 238525 - DNA, 25 bp, Probe sequence
agtttatgcgttagatcattcttta

SEQ ID NO: 238526 - DNA, 25 bp, Probe sequence
agaatgggttctacttgaatgaatt

SEQ ID NO: 238527 - DNA, 25 bp, Probe sequence
acagtttatgcgttagatcattctt

SEQ ID NO: 238528 - DNA, 25 bp, Probe sequence
aaatttgaagaatgggttctacttg

SEQ ID NO: 238529 - DNA, 25 bp, Probe sequence
aaatagaaaatcactatgtaggacc

SEQ ID NO: 238530 - DNA, 25 bp, Probe sequence
aaagcagatttatcaagaacaaagg

SEQ ID NO: 238531 - DNA, 25 bp, Probe sequence
aacagtttatgcgttagatcattct

SEQ ID NO: 238532 - DNA, 25 bp, Probe sequence
aagaatgggttctacttgaatgaat

SEQ ID NO: 238533 - DNA, 25 bp, Probe sequence
aatgggttctacttgaatgaatttt

SEQ ID NO: 238534 - DNA, 25 bp, Probe sequence
aatatgaattaacagtttatgcgtt

SEQ ID NO: 238535 - DNA, 25 bp, Probe sequence
aattaacagtttatgcgttagatca

SEQ ID NO: 238536 - DNA, 25 bp, Probe sequence
cagtttatgcgttagatcattcttt

SEQ ID NO: 238537 - DNA, 25 bp, Probe sequence
cgttagatcattctttaaatttgaa

SEQ ID NO: 238538 - DNA, 25 bp, Probe sequence
gcgttagatcattctttaaatttga

SEQ ID NO: 238539 - DNA, 25 bp, Probe sequence
gaattaacagtttatgcgttagatc

SEQ ID NO: 238540 - DNA, 25 bp, Probe sequence
gaatgggttctacttgaatgaattt

SEQ ID NO: 238541 - DNA, 25 bp, Probe sequence
gaagaatgggttctacttgaatgaa

SEQ ID NO: 238542 - DNA, 25 bp, Probe sequence
gatcaaacaagtattaaccttatag

SEQ ID NO: 238543 - DNA, 25 bp, Probe sequence
gttagatcattctttaaatttgaag

SEQ ID NO: 238544 - DNA, 25 bp, Probe sequence
gtttatgcgttagatcattctttaa

SEQ ID NO: 238545 - DNA, 25 bp, Probe sequence
tgggttctacttgaatgaattttta

SEQ ID NO: 238546 - DNA, 25 bp, Probe sequence
tgaagaatgggttctacttgaatga

SEQ ID NO: 238547 - DNA, 25 bp, Probe sequence
tgcgttagatcattctttaaatttg

SEQ ID NO: 238548 - DNA, 25 bp, Probe sequence
tcaaacaagtattaaccttatagga

SEQ ID NO: 238549 - DNA, 25 bp, Probe sequence
tatgcgttagatcattctttaaatt

SEQ ID NO: 238550 - DNA, 25 bp, Probe sequence
tttatgcgttagatcattctttaaa

SEQ ID NO: 238551 - DNA, 25 bp, Probe sequence
ttatgcgttagatcattctttaaat

SEQ ID NO: 238552 - DNA, 25 bp, Probe sequence
ttaacagtttatgcgttagatcatt

SEQ ID NO: 238553 - DNA, 25 bp, Probe sequence
ttgaagaatgggttctacttgaatg

SEQ ID NO: 238554 - DNA, 25 bp, Probe sequence
ctaccggcaactcaaaaagctaaag

SEQ ID NO: 238555 - DNA, 25 bp, Probe sequence
atgatcgcaacgactggcgctactg

SEQ ID NO: 238556 - DNA, 25 bp, Probe sequence
attgcagtagatggcattatggctt

SEQ ID NO: 238557 - DNA, 25 bp, Probe sequence
atgcaaaatctgccgtttacacgat

SEQ ID NO: 238558 - DNA, 25 bp, Probe sequence
agcaaacttgtttgattcaaattca

SEQ ID NO: 238559 - DNA, 25 bp, Probe sequence
actgtaactttggcactgggcatga

SEQ ID NO: 238560 - DNA, 25 bp, Probe sequence
actgggcatgatcgcaacgactggc

SEQ ID NO: 238561 - DNA, 25 bp, Probe sequence
aaatctgccgtttacacgattactt

SEQ ID NO: 238562 - DNA, 25 bp, Probe sequence
aaatcatttataactgtaactttgg

SEQ ID NO: 238563 - DNA, 25 bp, Probe sequence
aaatgcaaaatctgccgtttacacg

SEQ ID NO: 238564 - DNA, 25 bp, Probe sequence
aacacctgagaagattcgaaatgca

SEQ ID NO: 238565 - DNA, 25 bp, Probe sequence
aactttggcactgggcatgatcgca

SEQ ID NO: 238566 - DNA, 25 bp, Probe sequence
caaactaccggcaactcaaaaagct

SEQ ID NO: 238567 - DNA, 25 bp, Probe sequence
ctttggcactgggcatgatcgcaac

SEQ ID NO: 238568 - DNA, 25 bp, Probe sequence
gccgtttacacgattacttggaaag

SEQ ID NO: 238569 - DNA, 25 bp, Probe sequence
gcatgatcgcaacgactggcgctac

SEQ ID NO: 238570 - DNA, 25 bp, Probe sequence
gcagaaaaggacaaactaccggcaa

SEQ ID NO: 238571 - DNA, 25 bp, Probe sequence
gcactgggcatgatcgcaacgactg

SEQ ID NO: 238572 - DNA, 25 bp, Probe sequence
gcaaaatgttccatatacaattgca

SEQ ID NO: 238573 - DNA, 25 bp, Probe sequence
gaaatgcaaaatgttccatatacaa

SEQ ID NO: 238574 - DNA, 25 bp, Probe sequence
gacaaactaccggcaactcaaaaag

SEQ ID NO: 238575 - DNA, 25 bp, Probe sequence
gtaactttggcactgggcatgatcg

SEQ ID NO: 238576 - DNA, 25 bp, Probe sequence
gattcgaaatgcaaaatctgccgtt

SEQ ID NO: 238577 - DNA, 25 bp, Probe sequence
gtttacacgattacttggaaagatg

SEQ ID NO: 238578 - DNA, 25 bp, Probe sequence
gtaatgaggtatctgcagcagaaaa

SEQ ID NO: 238579 - DNA, 25 bp, Probe sequence
ggtgtaacacctgagaagattcgaa

SEQ ID NO: 238580 - DNA, 25 bp, Probe sequence
ggcatgatcgcaacgactggcgcta

SEQ ID NO: 238581 - DNA, 25 bp, Probe sequence
tggcactgggcatgatcgcaacgac

SEQ ID NO: 238582 - DNA, 25 bp, Probe sequence
tgggcatgatcgcaacgactggcgc

SEQ ID NO: 238583 - DNA, 25 bp, Probe sequence
tctgccgtttacacgattacttgga

SEQ ID NO: 238584 - DNA, 25 bp, Probe sequence
taactgtaactttggcactgggcat

SEQ ID NO: 238585 - DNA, 25 bp, Probe sequence
atagccaattatcatatttagattt

SEQ ID NO: 238586 - DNA, 25 bp, Probe sequence
tataactgtaactttggcactgggc

SEQ ID NO: 238587 - DNA, 25 bp, Probe sequence
ttaaatttaccaaaagatagccaat

SEQ ID NO: 238588 - DNA, 25 bp, Probe sequence
attgttcttgtcggattcggtggcg

SEQ ID NO: 238589 - DNA, 25 bp, Probe sequence
acttcagctgcgtcaatacctttaa

SEQ ID NO: 238590 - DNA, 25 bp, Probe sequence
aaagcaatcgctgacgctggtattc

SEQ ID NO: 238591 - DNA, 25 bp, Probe sequence
aaaagcgaatttaacatcagatgat

SEQ ID NO: 238592 - DNA, 25 bp, Probe sequence
aacaatatgttcaatctggagatta

SEQ ID NO: 238593 - DNA, 25 bp, Probe sequence
cagatttaactgaccgttctactgc

SEQ ID NO: 238594 - DNA, 25 bp, Probe sequence
gccatttccaactgtcgcaaatatg

SEQ ID NO: 238595 - DNA, 25 bp, Probe sequence
gcctctatggatcaacttgcagcat

SEQ ID NO: 238596 - DNA, 25 bp, Probe sequence
gcgtcaatacctttaagtatcgatc

SEQ ID NO: 238597 - DNA, 25 bp, Probe sequence
gcggcctaacttggggcgcaatgac

SEQ ID NO: 238598 - DNA, 25 bp, Probe sequence
gcggttatcatcggtgaagtttcag

SEQ ID NO: 238599 - DNA, 25 bp, Probe sequence
gcatgttctggatttatgtattcaa

SEQ ID NO: 238600 - DNA, 25 bp, Probe sequence
gagaacgcttaggtatttcaaaaga

SEQ ID NO: 238601 - DNA, 25 bp, Probe sequence
gagatatgccatttccaactgtcgc

SEQ ID NO: 238602 - DNA, 25 bp, Probe sequence
gatgatacaattgttcttgtcggat

SEQ ID NO: 238603 - DNA, 25 bp, Probe sequence
gatcaagatacttcagatttagcat

SEQ ID NO: 238604 - DNA, 25 bp, Probe sequence
gatacatctgatgaatggatttcta

SEQ ID NO: 238605 - DNA, 25 bp, Probe sequence
gatttatttattcctcatcaagcta

SEQ ID NO: 238606 - DNA, 25 bp, Probe sequence
gttctactgcagttctatttggaga

SEQ ID NO: 238607 - DNA, 25 bp, Probe sequence
gttatgaaatgggttctgatggcac

SEQ ID NO: 238608 - DNA, 25 bp, Probe sequence
gggacgggcaaagttgcctctatgg

SEQ ID NO: 238609 - DNA, 25 bp, Probe sequence
gtgcaggtgcggttatcatcggtga

SEQ ID NO: 238610 - DNA, 25 bp, Probe sequence
gtgggtattaaaggttttggtgcat

SEQ ID NO: 238611 - DNA, 25 bp, Probe sequence
gggtgatgcatcaacacgtgtagtt

SEQ ID NO: 238612 - DNA, 25 bp, Probe sequence
ggatcaacttgcagcatgttctgga

SEQ ID NO: 238613 - DNA, 25 bp, Probe sequence
ggaatcagctagagaacgcttaggt

SEQ ID NO: 238614 - DNA, 25 bp, Probe sequence
tgaccgttctactgcagttctattt

SEQ ID NO: 238615 - DNA, 25 bp, Probe sequence
tagatatgataattgttgccacagc

SEQ ID NO: 238616 - DNA, 25 bp, Probe sequence
tagttgtcggtgcagataaattatc

SEQ ID NO: 238617 - DNA, 25 bp, Probe sequence
tatggaaatacttcagctgcgtcaa

SEQ ID NO: 238618 - DNA, 25 bp, Probe sequence
tatttggagatggtgcaggtgcggt

SEQ ID NO: 238619 - DNA, 25 bp, Probe sequence
ttgccacagcaactggagatatgcc

SEQ ID NO: 238620 - DNA, 25 bp, Probe sequence
ttgctgttagaattatgggtgatgc

SEQ ID NO: 238621 - DNA, 25 bp, Probe sequence
ttgacaatgcctattttgagcaatt

SEQ ID NO: 238622 - DNA, 25 bp, Probe sequence
atttctgaatgtctatatggaggta

SEQ ID NO: 238623 - DNA, 25 bp, Probe sequence
agtttgcaactgctgatttagctca

SEQ ID NO: 238624 - DNA, 25 bp, Probe sequence
agatcagaaaaatattgtccgataa

SEQ ID NO: 238625 - DNA, 25 bp, Probe sequence
acaggaaagggtgattggtgctaat

SEQ ID NO: 238626 - DNA, 25 bp, Probe sequence
acagcgaaataagtaaaggtctaat

SEQ ID NO: 238627 - DNA, 25 bp, Probe sequence
aaatgtgacattgcaagaattagat

SEQ ID NO: 238628 - DNA, 25 bp, Probe sequence
aactcctagagattactcattcgac

SEQ ID NO: 238629 - DNA, 25 bp, Probe sequence
aaggtgatagtggcaatgatttgag

SEQ ID NO: 238630 - DNA, 25 bp, Probe sequence
gcgaaagcagaagatttacacgata

SEQ ID NO: 238631 - DNA, 25 bp, Probe sequence
gctgatttagctcagaagtttaaaa

SEQ ID NO: 238632 - DNA, 25 bp, Probe sequence
gctaatgtttgggtagatggtattc

SEQ ID NO: 238633 - DNA, 25 bp, Probe sequence
gcattattactttcattcacatcat

SEQ ID NO: 238634 - DNA, 25 bp, Probe sequence
gcaactgctgatttagctcagaagt

SEQ ID NO: 238635 - DNA, 25 bp, Probe sequence
gaatttgatatgaaaactcctagag

SEQ ID NO: 238636 - DNA, 25 bp, Probe sequence
gagagtaaagtttgcaactgctgat

SEQ ID NO: 238637 - DNA, 25 bp, Probe sequence
gatatatatggggcatctttttatt

SEQ ID NO: 238638 - DNA, 25 bp, Probe sequence
gattggtgctaatgtttgggtagat

SEQ ID NO: 238639 - DNA, 25 bp, Probe sequence
gtcatattgatgtaaatctatatac

SEQ ID NO: 238640 - DNA, 25 bp, Probe sequence
gtctatatggaggtacaacactaaa

SEQ ID NO: 238641 - DNA, 25 bp, Probe sequence
gtgaaaatatttctgaatgtctata

SEQ ID NO: 238642 - DNA, 25 bp, Probe sequence
gtgagttaacagatttagctttagc

SEQ ID NO: 238643 - DNA, 25 bp, Probe sequence
gggtgattggtgctaatgtttgggt

SEQ ID NO: 238644 - DNA, 25 bp, Probe sequence
ggggcatctttttattataagtgtg

SEQ ID NO: 238645 - DNA, 25 bp, Probe sequence
tggtcaatataatcacccattcatt

SEQ ID NO: 238646 - DNA, 25 bp, Probe sequence
tcattcacatcatatgcgaaagcag

SEQ ID NO: 238647 - DNA, 25 bp, Probe sequence
tactcattcgacatttatgatttaa

SEQ ID NO: 238648 - DNA, 25 bp, Probe sequence
tagctttagctaatgcatatggtca

SEQ ID NO: 238649 - DNA, 25 bp, Probe sequence
tagcattattactttcattcacatc

SEQ ID NO: 238650 - DNA, 25 bp, Probe sequence
tagagattactcattcgacatttat

SEQ ID NO: 238651 - DNA, 25 bp, Probe sequence
tatggaggtacaacactaaatagtg

SEQ ID NO: 238652 - DNA, 25 bp, Probe sequence
tataatcacccattcattaaagaaa

SEQ ID NO: 238653 - DNA, 25 bp, Probe sequence
tattattttcgtttttagcattatt

SEQ ID NO: 238654 - DNA, 25 bp, Probe sequence
tttagctaatgcatatggtcaatat

SEQ ID NO: 238655 - DNA, 25 bp, Probe sequence
ttactttcattcacatcatatgcga

SEQ ID NO: 238656 - DNA, 25 bp, Probe sequence
atgcccatggtacaagtactcctgt

SEQ ID NO: 238657 - DNA, 25 bp, Probe sequence
atggtactacaggtgatgcttatca

SEQ ID NO: 238658 - DNA, 25 bp, Probe sequence
agccctttctccaatcggtaatgat

SEQ ID NO: 238659 - DNA, 25 bp, Probe sequence
aatcttctcagcgctttcaattaaa

SEQ ID NO: 238660 - DNA, 25 bp, Probe sequence
cagcgccagctccagaaggtgaagg

SEQ ID NO: 238661 - DNA, 25 bp, Probe sequence
cagttacagcatgtgcaacaggtac

SEQ ID NO: 238662 - DNA, 25 bp, Probe sequence
cttatagcgttcacttagcaggaga

SEQ ID NO: 238663 - DNA, 25 bp, Probe sequence
cgtgtgagtccatttttcgtaccaa

SEQ ID NO: 238664 - DNA, 25 bp, Probe sequence
cgtaccaatgttaattcctgatatg

SEQ ID NO: 238665 - DNA, 25 bp, Probe sequence
gcttatcatattacagcgccagctc

SEQ ID NO: 238666 - DNA, 25 bp, Probe sequence
gcatgtcgtccattccaagaaggta

SEQ ID NO: 238667 - DNA, 25 bp, Probe sequence
gcaagaccttgatattacttatgca

SEQ ID NO: 238668 - DNA, 25 bp, Probe sequence
gcaacgcggtgatgcagatgcaatg

SEQ ID NO: 238669 - DNA, 25 bp, Probe sequence
gaatctttagaatcagcacaagctc

SEQ ID NO: 238670 - DNA, 25 bp, Probe sequence
gaagcgcgtcgtatggatagattta

SEQ ID NO: 238671 - DNA, 25 bp, Probe sequence
gactggtcacttacttggtgcaaca

SEQ ID NO: 238672 - DNA, 25 bp, Probe sequence
gagcgctttctacaaatgatgacat

SEQ ID NO: 238673 - DNA, 25 bp, Probe sequence
gagaggctgttaaagatgcgcaatt

SEQ ID NO: 238674 - DNA, 25 bp, Probe sequence
gagtaatagcttaggattcggtgga

SEQ ID NO: 238675 - DNA, 25 bp, Probe sequence
gataaaggcccaagacgtgtgagtc

SEQ ID NO: 238676 - DNA, 25 bp, Probe sequence
gttccaaatgaagcgcaagaccttg

SEQ ID NO: 238677 - DNA, 25 bp, Probe sequence
gtatcgatactgaaccttatagcgt

SEQ ID NO: 238678 - DNA, 25 bp, Probe sequence
gtatggattggttctggtatcggtg

SEQ ID NO: 238679 - DNA, 25 bp, Probe sequence
gtactcctgttggtgacttaaatga

SEQ ID NO: 238680 - DNA, 25 bp, Probe sequence
gggtgaaggtgctggtattttagta

SEQ ID NO: 238681 - DNA, 25 bp, Probe sequence
ggaccaaatggtgcaacagttacag

SEQ ID NO: 238682 - DNA, 25 bp, Probe sequence
ggttctagagcaatgcaagcagcta

SEQ ID NO: 238683 - DNA, 25 bp, Probe sequence
ggattcggtggacataacgcagtat

SEQ ID NO: 238684 - DNA, 25 bp, Probe sequence
tgtacaatacttaaatgcccatggt

SEQ ID NO: 238685 - DNA, 25 bp, Probe sequence
tgaaacagcatgtcgtccattccaa

SEQ ID NO: 238686 - DNA, 25 bp, Probe sequence
tgaagcaatcttctcagcgctttca

SEQ ID NO: 238687 - DNA, 25 bp, Probe sequence
tcagtgcaagtcgagcgctttctac

SEQ ID NO: 238688 - DNA, 25 bp, Probe sequence
tacaggtatgggagccctttctcca

SEQ ID NO: 238689 - DNA, 25 bp, Probe sequence
tactgcagatcgaatcggtgtatgg

SEQ ID NO: 238690 - DNA, 25 bp, Probe sequence
attcgtacgttcaattacaacaaat

SEQ ID NO: 238691 - DNA, 25 bp, Probe sequence
attttaggtgttgcagcagctacta

SEQ ID NO: 238692 - DNA, 25 bp, Probe sequence
atcgttcccatgttagcaagtattt

SEQ ID NO: 238693 - DNA, 25 bp, Probe sequence
atgcgtgtactttttggacatgcac

SEQ ID NO: 238694 - DNA, 25 bp, Probe sequence
agcacactgtttatcgtttctattt

SEQ ID NO: 238695 - DNA, 25 bp, Probe sequence
aattattacaattatcgttcccatg

SEQ ID NO: 238696 - DNA, 25 bp, Probe sequence
caactacagttatttcagttattgc

SEQ ID NO: 238697 - DNA, 25 bp, Probe sequence
tggatgggaaggtttttcgaccgcg

SEQ ID NO: 238698 - DNA, 25 bp, Probe sequence
ccttcttttgaaatgggtcttacag

SEQ ID NO: 238699 - DNA, 25 bp, Probe sequence
ccacgaattcgtgttcaaggaggta

SEQ ID NO: 238700 - DNA, 25 bp, Probe sequence
gcagctgttttagcaactgtcgcca

SEQ ID NO: 238701 - DNA, 25 bp, Probe sequence
gcagcagctactaaacaaaattctt

SEQ ID NO: 238702 - DNA, 25 bp, Probe sequence
gcaatgttcatcggtgtgatactgg

SEQ ID NO: 238703 - DNA, 25 bp, Probe sequence
gcaactgtcgccagatacataagag

SEQ ID NO: 238704 - DNA, 25 bp, Probe sequence
gcaatcacactattatttagcacac

SEQ ID NO: 238705 - DNA, 25 bp, Probe sequence
gtattttaacaggcactttaacaat

SEQ ID NO: 238706 - DNA, 25 bp, Probe sequence
gtatctgtaccatcttttgtacttg

SEQ ID NO: 238707 - DNA, 25 bp, Probe sequence
gtagatattttgtacggtgtgatag

SEQ ID NO: 238708 - DNA, 25 bp, Probe sequence
gtaccatcttttgtacttgctgtac

SEQ ID NO: 238709 - DNA, 25 bp, Probe sequence
gtactttttggacatgcacttagaa

SEQ ID NO: 238710 - DNA, 25 bp, Probe sequence
gtcacttgcattatctgcagctgtt

SEQ ID NO: 238711 - DNA, 25 bp, Probe sequence
gtgggatttgattaaaccgagacta

SEQ ID NO: 238712 - DNA, 25 bp, Probe sequence
gggtcttacagcaatgttcatcggt

SEQ ID NO: 238713 - DNA, 25 bp, Probe sequence
ggtgtgatagatccacgaattcgtg

SEQ ID NO: 238714 - DNA, 25 bp, Probe sequence
ggtaattcgacaatgcgtgtacttt

SEQ ID NO: 238715 - DNA, 25 bp, Probe sequence
ggtattaccgtcacttgcattatct

SEQ ID NO: 238716 - DNA, 25 bp, Probe sequence
tgtttatcgtttctatttttattgt

SEQ ID NO: 238717 - DNA, 25 bp, Probe sequence
tgcacttagaaatgctttaattcca

SEQ ID NO: 238718 - DNA, 25 bp, Probe sequence
tcataatcaacctgtgtgggatttg

SEQ ID NO: 238719 - DNA, 25 bp, Probe sequence
ttcgaccgcggtattaccgtcactt

SEQ ID NO: 238720 - DNA, 25 bp, Probe sequence
ttaggggatcaattcgtacgttcaa

SEQ ID NO: 238721 - DNA, 25 bp, Probe sequence
ttaagatggttcccagtagctggat

SEQ ID NO: 238722 - DNA, 25 bp, Probe sequence
ttctcagtaatcatggcaatcacac

SEQ ID NO: 238723 - DNA, 25 bp, Probe sequence
ttgtacttgctgtacttttacaata

SEQ ID NO: 238724 - DNA, 25 bp, Probe sequence
attggctatgtctatcacaggctgg

SEQ ID NO: 238725 - DNA, 25 bp, Probe sequence
attaatttttgaaccatccatttgg

SEQ ID NO: 238726 - DNA, 25 bp, Probe sequence
attattggtttggtactgatcagtt

SEQ ID NO: 238727 - DNA, 25 bp, Probe sequence
atcaagagtttgtcatggcttcgaa

SEQ ID NO: 238728 - DNA, 25 bp, Probe sequence
atcacaggctggttaggcatgagca

SEQ ID NO: 238729 - DNA, 25 bp, Probe sequence
aacttttggcaagatgcttgggctc

SEQ ID NO: 238730 - DNA, 25 bp, Probe sequence
aacgacgatcattctaatgcagcta

SEQ ID NO: 238731 - DNA, 25 bp, Probe sequence
aagcatttttaagtttcattggtat

SEQ ID NO: 238732 - DNA, 25 bp, Probe sequence
aatgcagctatgacgcatacctctg

SEQ ID NO: 238733 - DNA, 25 bp, Probe sequence
cagtacctagtgctattttcttcga

SEQ ID NO: 238734 - DNA, 25 bp, Probe sequence
cattgtttatcggtgttgttgcagc

SEQ ID NO: 238735 - DNA, 25 bp, Probe sequence
gcacctcaaacatcgttagggtcat

SEQ ID NO: 238736 - DNA, 25 bp, Probe sequence
gaagtcatagcatctattccgaatt

SEQ ID NO: 238737 - DNA, 25 bp, Probe sequence
gatgcttgggctcagttaaaacgaa

SEQ ID NO: 238738 - DNA, 25 bp, Probe sequence
gattcttcggtggacgtgtcgatac

SEQ ID NO: 238739 - DNA, 25 bp, Probe sequence
gatgcagatggcaaggatgcttata

SEQ ID NO: 238740 - DNA, 25 bp, Probe sequence
gatttctggattcttcggtggacgt

SEQ ID NO: 238741 - DNA, 25 bp, Probe sequence
gattatgcaacgtatacttgaagtc

SEQ ID NO: 238742 - DNA, 25 bp, Probe sequence
gattacgtgatgcatttgatccgaa

SEQ ID NO: 238743 - DNA, 25 bp, Probe sequence
gttgtatatggtgcgatttctggat

SEQ ID NO: 238744 - DNA, 25 bp, Probe sequence
gttacatcaatgtttacagtaccta

SEQ ID NO: 238745 - DNA, 25 bp, Probe sequence
ggtgctcaaatttcattgtttatcg

SEQ ID NO: 238746 - DNA, 25 bp, Probe sequence
ggtgttgttgcagcgatgttagata

SEQ ID NO: 238747 - DNA, 25 bp, Probe sequence
ggtactgatcagttgggtcgagatt

SEQ ID NO: 238748 - DNA, 25 bp, Probe sequence
tggcttcgaaaacattgggggcttc

SEQ ID NO: 238749 - DNA, 25 bp, Probe sequence
ggacgtgtcgatacgattatgcaac

SEQ ID NO: 238750 - DNA, 25 bp, Probe sequence
ggcatgagcagagttgtacgtggag

SEQ ID NO: 238751 - DNA, 25 bp, Probe sequence
tccacatgaattatttataccagca

SEQ ID NO: 238752 - DNA, 25 bp, Probe sequence
tcaggaacctgaaatgcaacgagaa

SEQ ID NO: 238753 - DNA, 25 bp, Probe sequence
taagttagctgttgtcggtatgata

SEQ ID NO: 238754 - DNA, 25 bp, Probe sequence
tagaaatcttccggcaaaaatacct

SEQ ID NO: 238755 - DNA, 25 bp, Probe sequence
tatttgcttttatcggtccagttat

SEQ ID NO: 238756 - DNA, 25 bp, Probe sequence
tattaattctattcttttacttatt

SEQ ID NO: 238757 - DNA, 25 bp, Probe sequence
ttaggtgctatcgtggttacatcaa

SEQ ID NO: 238758 - DNA, 25 bp, Probe sequence
atagttatatcggcaataatttcta

SEQ ID NO: 238759 - DNA, 25 bp, Probe sequence
atcggcaataatttctatatttgta

SEQ ID NO: 238760 - DNA, 25 bp, Probe sequence
atgtgggtttgtaatttgctatgga

SEQ ID NO: 238761 - DNA, 25 bp, Probe sequence
agggaacgcaaatcaagcatcacat

SEQ ID NO: 238762 - DNA, 25 bp, Probe sequence
agtactcatggctataactttatgt

SEQ ID NO: 238763 - DNA, 25 bp, Probe sequence
agacacgtgtaaaaaggaacttgat

SEQ ID NO: 238764 - DNA, 25 bp, Probe sequence
aaatagcttatatagtactcatggc

SEQ ID NO: 238765 - DNA, 25 bp, Probe sequence
aaagatgaagctacaactaaagttg

SEQ ID NO: 238766 - DNA, 25 bp, Probe sequence
aacgcaaatcaagcatcacataaag

SEQ ID NO: 238767 - DNA, 25 bp, Probe sequence
aagataggtttatattttcaaatag

SEQ ID NO: 238768 - DNA, 25 bp, Probe sequence
aatcgtacctgtcatcgtattggca

SEQ ID NO: 238769 - DNA, 25 bp, Probe sequence
caagcatcacataaagacacgtgta

SEQ ID NO: 238770 - DNA, 25 bp, Probe sequence
cagatactaccactattcaaaaaag

SEQ ID NO: 238771 - DNA, 25 bp, Probe sequence
catggctataactttatgtgggttt

SEQ ID NO: 238772 - DNA, 25 bp, Probe sequence
catcgtattggcatctgacttattt

SEQ ID NO: 238773 - DNA, 25 bp, Probe sequence
cctgtcatcgtattggcatctgact

SEQ ID NO: 238774 - DNA, 25 bp, Probe sequence
gctttagtattatgcaactttgtat

SEQ ID NO: 238775 - DNA, 25 bp, Probe sequence
gcaactttgtatctgcaatactctg

SEQ ID NO: 238776 - DNA, 25 bp, Probe sequence
gcaatactctggtttgtttcagcca

SEQ ID NO: 238777 - DNA, 25 bp, Probe sequence
gtttcagccatatctattttaggta

SEQ ID NO: 238778 - DNA, 25 bp, Probe sequence
gtattggcatctgacttatttaaag

SEQ ID NO: 238779 - DNA, 25 bp, Probe sequence
gtatctgcaatactctggtttgttt

SEQ ID NO: 238780 - DNA, 25 bp, Probe sequence
gtacctgtcatcgtattggcatctg

SEQ ID NO: 238781 - DNA, 25 bp, Probe sequence
gtaattatactttcaatcgtacctg

SEQ ID NO: 238782 - DNA, 25 bp, Probe sequence
gggtttgtaatttgctatggactaa

SEQ ID NO: 238783 - DNA, 25 bp, Probe sequence
ggtgtcatattaattgtattggcta

SEQ ID NO: 238784 - DNA, 25 bp, Probe sequence
ggtttgtttcagccatatctatttt

SEQ ID NO: 238785 - DNA, 25 bp, Probe sequence
tgctatggactaattttcggccttt

SEQ ID NO: 238786 - DNA, 25 bp, Probe sequence
tactttcaatcgtacctgtcatcgt

SEQ ID NO: 238787 - DNA, 25 bp, Probe sequence
tactctggtttgtttcagccatatc

SEQ ID NO: 238788 - DNA, 25 bp, Probe sequence
tagtcaagacatgatggaacatcct

SEQ ID NO: 238789 - DNA, 25 bp, Probe sequence
tatggactaattttcggccttttct

SEQ ID NO: 238790 - DNA, 25 bp, Probe sequence
tatactttcaatcgtacctgtcatc

SEQ ID NO: 238791 - DNA, 25 bp, Probe sequence
tttcaatcgtacctgtcatcgtatt

SEQ ID NO: 238792 - DNA, 25 bp, Probe sequence
attgctgatgaaccaacgactgcat

SEQ ID NO: 238793 - DNA, 25 bp, Probe sequence
ataacgcatgatttaggggttgttg

SEQ ID NO: 238794 - DNA, 25 bp, Probe sequence
atcttggttattagacgcacgtgca

SEQ ID NO: 238795 - DNA, 25 bp, Probe sequence
atccaatgacatctttaaacccaac

SEQ ID NO: 238796 - DNA, 25 bp, Probe sequence
atgacacaccattactagcgattcc

SEQ ID NO: 238797 - DNA, 25 bp, Probe sequence
atgatccaaagcatccatatacatg

SEQ ID NO: 238798 - DNA, 25 bp, Probe sequence
acgatgcaggcacaaattttagatt

SEQ ID NO: 238799 - DNA, 25 bp, Probe sequence
acagcaggggaagtgcaggcagtga

SEQ ID NO: 238800 - DNA, 25 bp, Probe sequence
aaagaattgttattgcaaccgcatt

SEQ ID NO: 238801 - DNA, 25 bp, Probe sequence
aacaacgtatgaaaccgatgcctaa

SEQ ID NO: 238802 - DNA, 25 bp, Probe sequence
aatgatttgcatgtttcctttgata

SEQ ID NO: 238803 - DNA, 25 bp, Probe sequence
caaaagttgaactacccgagctggt

SEQ ID NO: 238804 - DNA, 25 bp, Probe sequence
cctgatttattacacccacctaaag

SEQ ID NO: 238805 - DNA, 25 bp, Probe sequence
ccacctaaaggtgatgcatttgcga

SEQ ID NO: 238806 - DNA, 25 bp, Probe sequence
gcatgtttcctttgatattacagca

SEQ ID NO: 238807 - DNA, 25 bp, Probe sequence
gcaaccgcattagcttgtgaaccta

SEQ ID NO: 238808 - DNA, 25 bp, Probe sequence
gaaccaacgactgcattagacgtaa

SEQ ID NO: 238809 - DNA, 25 bp, Probe sequence
gacacattttgtgaaatcttggtta

SEQ ID NO: 238810 - DNA, 25 bp, Probe sequence
gacgcacgtgcaccaaaagttgaac

SEQ ID NO: 238811 - DNA, 25 bp, Probe sequence
gagacgtagtcaatatgcattagat

SEQ ID NO: 238812 - DNA, 25 bp, Probe sequence
gatgcatttgcgagacgtagtcaat

SEQ ID NO: 238813 - DNA, 25 bp, Probe sequence
gagtggcagttatgtatggtggtca

SEQ ID NO: 238814 - DNA, 25 bp, Probe sequence
gatctttcaagatccaatgacatct

SEQ ID NO: 238815 - DNA, 25 bp, Probe sequence
gtcatggaaccattaattaagcaca

SEQ ID NO: 238816 - DNA, 25 bp, Probe sequence
ggggattattatcgtcaatgcctga

SEQ ID NO: 238817 - DNA, 25 bp, Probe sequence
ggggaaacattggcaattgttggtg

SEQ ID NO: 238818 - DNA, 25 bp, Probe sequence
ggggttgttgcgaatattgctgata

SEQ ID NO: 238819 - DNA, 25 bp, Probe sequence
ggtgaatcaggttcaggtaaatctg

SEQ ID NO: 238820 - DNA, 25 bp, Probe sequence
ggtagaaagggtgtcgttcaatgaa

SEQ ID NO: 238821 - DNA, 25 bp, Probe sequence
tgaactacccgagctggtaaaacaa

SEQ ID NO: 238822 - DNA, 25 bp, Probe sequence
tgaaaccgatgcctaataattatga

SEQ ID NO: 238823 - DNA, 25 bp, Probe sequence
ttactagcgattcctggagcgccac

SEQ ID NO: 238824 - DNA, 25 bp, Probe sequence
ttagacgtaacgatgcaggcacaaa

SEQ ID NO: 238825 - DNA, 25 bp, Probe sequence
ttaaagtttcaccgacacattttgt

SEQ ID NO: 238826 - DNA, 25 bp, Probe sequence
attgctttagatactgctttatcca

SEQ ID NO: 238827 - DNA, 25 bp, Probe sequence
atatgcaatattttggaacagggtc

SEQ ID NO: 238828 - DNA, 25 bp, Probe sequence
ataataaacagttctatcaagagat

SEQ ID NO: 238829 - DNA, 25 bp, Probe sequence
aggaactggcaaatgattcaaggtt

SEQ ID NO: 238830 - DNA, 25 bp, Probe sequence
acaacattatcttcagaaggttttc

SEQ ID NO: 238831 - DNA, 25 bp, Probe sequence
aaagctattgcttactatcgattta

SEQ ID NO: 238832 - DNA, 25 bp, Probe sequence
aaaatattgctttagatactgcttt

SEQ ID NO: 238833 - DNA, 25 bp, Probe sequence
aacattaagcatatgtcattattat

SEQ ID NO: 238834 - DNA, 25 bp, Probe sequence
aagctattgcttactatcgatttag

SEQ ID NO: 238835 - DNA, 25 bp, Probe sequence
aagaatgtattatgcgttgttttta

SEQ ID NO: 238836 - DNA, 25 bp, Probe sequence
aagagataggcaggatatttaatga

SEQ ID NO: 238837 - DNA, 25 bp, Probe sequence
aatgattcaaggttccatatgcaat

SEQ ID NO: 238838 - DNA, 25 bp, Probe sequence
aatattgctttagatactgctttat

SEQ ID NO: 238839 - DNA, 25 bp, Probe sequence
caaggttccatatgcaatattttgg

SEQ ID NO: 238840 - DNA, 25 bp, Probe sequence
cattcaccgctacagaagctaataa

SEQ ID NO: 238841 - DNA, 25 bp, Probe sequence
ctggcaaatgattcaaggttccata

SEQ ID NO: 238842 - DNA, 25 bp, Probe sequence
gctttagatactgctttatccataa

SEQ ID NO: 238843 - DNA, 25 bp, Probe sequence
gaatgtattatgcgttgtttttaaa

SEQ ID NO: 238844 - DNA, 25 bp, Probe sequence
gaagctaataaattcggactgggtt

SEQ ID NO: 238845 - DNA, 25 bp, Probe sequence
gacgatgaggatagcgattcttggc

SEQ ID NO: 238846 - DNA, 25 bp, Probe sequence
gatggccaattaatataggttttat

SEQ ID NO: 238847 - DNA, 25 bp, Probe sequence
gatgaattgatggattggtataaca

SEQ ID NO: 238848 - DNA, 25 bp, Probe sequence
gatacattcaccgctacagaagcta

SEQ ID NO: 238849 - DNA, 25 bp, Probe sequence
gatactgctttatccataagaatgt

SEQ ID NO: 238850 - DNA, 25 bp, Probe sequence
gattttgtcatagtatggggaagtt

SEQ ID NO: 238851 - DNA, 25 bp, Probe sequence
gattcaaggttccatatgcaatatt

SEQ ID NO: 238852 - DNA, 25 bp, Probe sequence
gtattggtgatgaattgatggattg

SEQ ID NO: 238853 - DNA, 25 bp, Probe sequence
gtcattattatcacattatttaaac

SEQ ID NO: 238854 - DNA, 25 bp, Probe sequence
tggaggaaatgacgatgaggatagc

SEQ ID NO: 238855 - DNA, 25 bp, Probe sequence
tgatatacttaataatttgtttggt

SEQ ID NO: 238856 - DNA, 25 bp, Probe sequence
tgaggatagcgattcttggcgctac

SEQ ID NO: 238857 - DNA, 25 bp, Probe sequence
tacattcaccgctacagaagctaat

SEQ ID NO: 238858 - DNA, 25 bp, Probe sequence
tactgctttatccataagaatgtat

SEQ ID NO: 238859 - DNA, 25 bp, Probe sequence
tatcttcagaaggttttcttaaatt

SEQ ID NO: 238860 - DNA, 25 bp, Probe sequence
attgcagcttctatagactatttga

SEQ ID NO: 238861 - DNA, 25 bp, Probe sequence
attttcgtattagcattgatgacac

SEQ ID NO: 238862 - DNA, 25 bp, Probe sequence
atttcgagtgctggatatggaatta

SEQ ID NO: 238863 - DNA, 25 bp, Probe sequence
atatcttttttgcatttctgagtga

SEQ ID NO: 238864 - DNA, 25 bp, Probe sequence
acccgacaccattaatcacattgat

SEQ ID NO: 238865 - DNA, 25 bp, Probe sequence
aatttattacattgtgtttggtctt

SEQ ID NO: 238866 - DNA, 25 bp, Probe sequence
ctagccaactttttaaccaattgat

SEQ ID NO: 238867 - DNA, 25 bp, Probe sequence
ccattttaatgtttccttgccttat

SEQ ID NO: 238868 - DNA, 25 bp, Probe sequence
gctatgatagtgtttttccaggatt

SEQ ID NO: 238869 - DNA, 25 bp, Probe sequence
gatgcaatgggaagaggaaccgaag

SEQ ID NO: 238870 - DNA, 25 bp, Probe sequence
gatgttttaggttttcttagattag

SEQ ID NO: 238871 - DNA, 25 bp, Probe sequence
gatttctatgattttagttgtatat

SEQ ID NO: 238872 - DNA, 25 bp, Probe sequence
gttatagctattatcccaggcatta

SEQ ID NO: 238873 - DNA, 25 bp, Probe sequence
gtttttccaggattcaactatagat

SEQ ID NO: 238874 - DNA, 25 bp, Probe sequence
gtttccttgccttatgttaggtgat

SEQ ID NO: 238875 - DNA, 25 bp, Probe sequence
ggtagtaaacaattgactggtcatc

SEQ ID NO: 238876 - DNA, 25 bp, Probe sequence
ggacccttattcttctatttgaatt

SEQ ID NO: 238877 - DNA, 25 bp, Probe sequence
ggacctagcaatattgcagcttcta

SEQ ID NO: 238878 - DNA, 25 bp, Probe sequence
tgtgtttggtcttgttatttgtggg

SEQ ID NO: 238879 - DNA, 25 bp, Probe sequence
tgtatacgatgttttaggttttctt

SEQ ID NO: 238880 - DNA, 25 bp, Probe sequence
tgattactagccaactttttaacca

SEQ ID NO: 238881 - DNA, 25 bp, Probe sequence
tcatatttttatggacctagcaata

SEQ ID NO: 238882 - DNA, 25 bp, Probe sequence
tacgagtatttttagtcacccgaca

SEQ ID NO: 238883 - DNA, 25 bp, Probe sequence
tagtatttatacctgctatgatagt

SEQ ID NO: 238884 - DNA, 25 bp, Probe sequence
taggaaagctctttataagcttctc

SEQ ID NO: 238885 - DNA, 25 bp, Probe sequence
tatggaattatttattttggaccct

SEQ ID NO: 238886 - DNA, 25 bp, Probe sequence
tatagttcatatagcgaggcgttaa

SEQ ID NO: 238887 - DNA, 25 bp, Probe sequence
tattcttaataatcgcatatgcttc

SEQ ID NO: 238888 - DNA, 25 bp, Probe sequence
tatttgtgggatttttgtagctttt

SEQ ID NO: 238889 - DNA, 25 bp, Probe sequence
tattttggacccttattcttctatt

SEQ ID NO: 238890 - DNA, 25 bp, Probe sequence
tattcggaagagtcattcgttagaa

SEQ ID NO: 238891 - DNA, 25 bp, Probe sequence
tttctgagtgagtatattattcgga

SEQ ID NO: 238892 - DNA, 25 bp, Probe sequence
tttttagcacctataagttatggag

SEQ ID NO: 238893 - DNA, 25 bp, Probe sequence
ttagtcacccgacaccattaatcac

SEQ ID NO: 238894 - DNA, 25 bp, Probe sequence
accaggagtagaattgggggaacat

SEQ ID NO: 238895 - DNA, 25 bp, Probe sequence
atttttcagcagttatatatatagg

SEQ ID NO: 238896 - DNA, 25 bp, Probe sequence
atttcctgcagatataactgttaga

SEQ ID NO: 238897 - DNA, 25 bp, Probe sequence
ataaagtggctggatggttatgggc

SEQ ID NO: 238898 - DNA, 25 bp, Probe sequence
atgcaccaggtgaagatgtcaaaat

SEQ ID NO: 238899 - DNA, 25 bp, Probe sequence
aaatagggaattatagttggattgg

SEQ ID NO: 238900 - DNA, 25 bp, Probe sequence
acgttgttataggtggcaatccagc

SEQ ID NO: 238901 - DNA, 25 bp, Probe sequence
aaatttgaagtcacatgcaccaggt

SEQ ID NO: 238902 - DNA, 25 bp, Probe sequence
aacatacaattgtaggggctgggtc

SEQ ID NO: 238903 - DNA, 25 bp, Probe sequence
aactgttagaatgcataaccctaat

SEQ ID NO: 238904 - DNA, 25 bp, Probe sequence
aacgtaggtattattacagctaatc

SEQ ID NO: 238905 - DNA, 25 bp, Probe sequence
aatgaactcagttatattaccagga

SEQ ID NO: 238906 - DNA, 25 bp, Probe sequence
gccatttcctgcagatataactgtt

SEQ ID NO: 238907 - DNA, 25 bp, Probe sequence
gcataaccctaataacattgttttt

SEQ ID NO: 238908 - DNA, 25 bp, Probe sequence
gaatacaccactattattattttat

SEQ ID NO: 238909 - DNA, 25 bp, Probe sequence
gaatgcataaccctaataacattgt

SEQ ID NO: 238910 - DNA, 25 bp, Probe sequence
gaagtcacatgcaccaggtgaagat

SEQ ID NO: 238911 - DNA, 25 bp, Probe sequence
gaactcagttatattaccaggagta

SEQ ID NO: 238912 - DNA, 25 bp, Probe sequence
gacgtattttaataatttttcagca

SEQ ID NO: 238913 - DNA, 25 bp, Probe sequence
ggtaacgttgttataggtggcaatc

SEQ ID NO: 238914 - DNA, 25 bp, Probe sequence
gattaatgaatacaccactattatt

SEQ ID NO: 238915 - DNA, 25 bp, Probe sequence
gttggattggaatgaactcagttat

SEQ ID NO: 238916 - DNA, 25 bp, Probe sequence
gttgttataggtggcaatccagcga

SEQ ID NO: 238917 - DNA, 25 bp, Probe sequence
gtattttaataatttttcagcagtt

SEQ ID NO: 238918 - DNA, 25 bp, Probe sequence
gtaggtattattacagctaatcata

SEQ ID NO: 238919 - DNA, 25 bp, Probe sequence
gtcacatgcaccaggtgaagatgtc

SEQ ID NO: 238920 - DNA, 25 bp, Probe sequence
gggggaacatacaattgtaggggct

SEQ ID NO: 238921 - DNA, 25 bp, Probe sequence
tgttataggtggcaatccagcgaaa

SEQ ID NO: 238922 - DNA, 25 bp, Probe sequence
taaccctaataacattgtttttgat

SEQ ID NO: 238923 - DNA, 25 bp, Probe sequence
tacaccactattattattttataag

SEQ ID NO: 238924 - DNA, 25 bp, Probe sequence
taggtagaggtgtttatatagcgcc

SEQ ID NO: 238925 - DNA, 25 bp, Probe sequence
tatttaactggatattattttgaaa

SEQ ID NO: 238926 - DNA, 25 bp, Probe sequence
tttgaagtcacatgcaccaggtgaa

SEQ ID NO: 238927 - DNA, 25 bp, Probe sequence
ttgccatttcctgcagatataactg

SEQ ID NO: 238928 - DNA, 25 bp, Probe sequence
attcaacaccatcaatattattaaa

SEQ ID NO: 238929 - DNA, 25 bp, Probe sequence
attagattttattttcattattatt

SEQ ID NO: 238930 - DNA, 25 bp, Probe sequence
atttgttataaggctgattgtatca

SEQ ID NO: 238931 - DNA, 25 bp, Probe sequence
atatactttcacaaatcagtttttt

SEQ ID NO: 238932 - DNA, 25 bp, Probe sequence
ataggtattttgtataccaatacag

SEQ ID NO: 238933 - DNA, 25 bp, Probe sequence
ataattctttatgtgccactttatt

SEQ ID NO: 238934 - DNA, 25 bp, Probe sequence
atcagttagtttattcaacaccatc

SEQ ID NO: 238935 - DNA, 25 bp, Probe sequence
atcgcaatgattttaataccaataa

SEQ ID NO: 238936 - DNA, 25 bp, Probe sequence
agtggcatcgctcaagtcatattaa

SEQ ID NO: 238937 - DNA, 25 bp, Probe sequence
acatgatatttttcatagcactcta

SEQ ID NO: 238938 - DNA, 25 bp, Probe sequence
acaattttttcaaatatcgcaatga

SEQ ID NO: 238939 - DNA, 25 bp, Probe sequence
aatgtgtttagagctggatcaatgg

SEQ ID NO: 238940 - DNA, 25 bp, Probe sequence
aattattacaagactatattcacct

SEQ ID NO: 238941 - DNA, 25 bp, Probe sequence
caggcattacactaggatataaaac

SEQ ID NO: 238942 - DNA, 25 bp, Probe sequence
ctaccccaattattacaagactata

SEQ ID NO: 238943 - DNA, 25 bp, Probe sequence
gcgttatttttaataggtactactg

SEQ ID NO: 238944 - DNA, 25 bp, Probe sequence
gctggatcaatggctttacttcaaa

SEQ ID NO: 238945 - DNA, 25 bp, Probe sequence
gatatcattgcttattttattaata

SEQ ID NO: 238946 - DNA, 25 bp, Probe sequence
gattgtatcaacggtatcactttct

SEQ ID NO: 238947 - DNA, 25 bp, Probe sequence
gttgttgtgttctttataggtattt

SEQ ID NO: 238948 - DNA, 25 bp, Probe sequence
gtatcaacggtatcactttctgtga

SEQ ID NO: 238949 - DNA, 25 bp, Probe sequence
gtcatattaatcatcactaccccaa

SEQ ID NO: 238950 - DNA, 25 bp, Probe sequence
gggttatcaaaaatatttatgcaac

SEQ ID NO: 238951 - DNA, 25 bp, Probe sequence
gggttgacgcaattacagttataaa

SEQ ID NO: 238952 - DNA, 25 bp, Probe sequence
tggtgagtttacaattttttcaaat

SEQ ID NO: 238953 - DNA, 25 bp, Probe sequence
tgaccgtagtgctaatatactttca

SEQ ID NO: 238954 - DNA, 25 bp, Probe sequence
tcagttttttgatatcattgcttat

SEQ ID NO: 238955 - DNA, 25 bp, Probe sequence
tcactttctgtgattgtattacaaa

SEQ ID NO: 238956 - DNA, 25 bp, Probe sequence
taatcatcactaccccaattattac

SEQ ID NO: 238957 - DNA, 25 bp, Probe sequence
taaataaatttattggcgattcgtt

SEQ ID NO: 238958 - DNA, 25 bp, Probe sequence
tattattatgttgtttttggtaagt

SEQ ID NO: 238959 - DNA, 25 bp, Probe sequence
tattattaaatagtttgtctttctc

SEQ ID NO: 238960 - DNA, 25 bp, Probe sequence
tattggtttttcattatcctatatc

SEQ ID NO: 238961 - DNA, 25 bp, Probe sequence
ttttcatagcactctattattttgc

SEQ ID NO: 238962 - DNA, 25 bp, Probe sequence
atatccatcatttagcaactgataa

SEQ ID NO: 238963 - DNA, 25 bp, Probe sequence
atcggggtgtggtaaatctacaact

SEQ ID NO: 238964 - DNA, 25 bp, Probe sequence
atgatttacttgaaactgttggatt

SEQ ID NO: 238965 - DNA, 25 bp, Probe sequence
aggtggacaacgccaacgtattgga

SEQ ID NO: 238966 - DNA, 25 bp, Probe sequence
aaagcaatattttaacgcaggaaag

SEQ ID NO: 238967 - DNA, 25 bp, Probe sequence
aaacgaagtgagagcgattgaaaat

SEQ ID NO: 238968 - DNA, 25 bp, Probe sequence
aaaaacgtgtctatgatttacttga

SEQ ID NO: 238969 - DNA, 25 bp, Probe sequence
aacgccaacgtattggaattgcccg

SEQ ID NO: 238970 - DNA, 25 bp, Probe sequence
aacgtgtctatgatttacttgaaac

SEQ ID NO: 238971 - DNA, 25 bp, Probe sequence
aagtggagaaattttgtatgagggt

SEQ ID NO: 238972 - DNA, 25 bp, Probe sequence
aatctacaactggtaaatcaattat

SEQ ID NO: 238973 - DNA, 25 bp, Probe sequence
cgccaacgtattggaattgcccgtg

SEQ ID NO: 238974 - DNA, 25 bp, Probe sequence
cccatatgcgtctttaaatcctagg

SEQ ID NO: 238975 - DNA, 25 bp, Probe sequence
catatgcgtctttaaatcctaggtt

SEQ ID NO: 238976 - DNA, 25 bp, Probe sequence
gctgaaggtattgatatccatcatt

SEQ ID NO: 238977 - DNA, 25 bp, Probe sequence
gaaattttgtatgagggtattgata

SEQ ID NO: 238978 - DNA, 25 bp, Probe sequence
gacccatatgcgtctttaaatccta

SEQ ID NO: 238979 - DNA, 25 bp, Probe sequence
gatgatttttcaagacccatatgcg

SEQ ID NO: 238980 - DNA, 25 bp, Probe sequence
gatacagatgatttttcaagaccca

SEQ ID NO: 238981 - DNA, 25 bp, Probe sequence
gatttttcaagacccatatgcgtct

SEQ ID NO: 238982 - DNA, 25 bp, Probe sequence
gattcgtaaacgtaaagatttgctt

SEQ ID NO: 238983 - DNA, 25 bp, Probe sequence
gtaggagaatcggggtgtggtaaat

SEQ ID NO: 238984 - DNA, 25 bp, Probe sequence
gtaatggatatagtagctgaaggta

SEQ ID NO: 238985 - DNA, 25 bp, Probe sequence
gtggtaaatctacaactggtaaatc

SEQ ID NO: 238986 - DNA, 25 bp, Probe sequence
gtgtctatgatttacttgaaactgt

SEQ ID NO: 238987 - DNA, 25 bp, Probe sequence
gggtgtggtaaatctacaactggta

SEQ ID NO: 238988 - DNA, 25 bp, Probe sequence
ggtttagtaggagaatcggggtgtg

SEQ ID NO: 238989 - DNA, 25 bp, Probe sequence
ggtattgatatacaaaagattcgta

SEQ ID NO: 238990 - DNA, 25 bp, Probe sequence
ttttcaggtggacaacgccaacgta

SEQ ID NO: 238991 - DNA, 25 bp, Probe sequence
tatgcgtctttaaatcctaggttaa

SEQ ID NO: 238992 - DNA, 25 bp, Probe sequence
tttagtactgaagaagaagcggcac

SEQ ID NO: 238993 - DNA, 25 bp, Probe sequence
tttcaagacccatatgcgtctttaa

SEQ ID NO: 238994 - DNA, 25 bp, Probe sequence
ttcaggtggacaacgccaacgtatt

SEQ ID NO: 238995 - DNA, 25 bp, Probe sequence
ttgatatccatcatttagcaactga

SEQ ID NO: 238996 - DNA, 25 bp, Probe sequence
atatcttctgaagtgactgcgcaaa

SEQ ID NO: 238997 - DNA, 25 bp, Probe sequence
atgaccacaggtagcgcacaaaata

SEQ ID NO: 238998 - DNA, 25 bp, Probe sequence
agattaccctgatcctatggcttat

SEQ ID NO: 238999 - DNA, 25 bp, Probe sequence
agagtatcactagaactgagtaaca

SEQ ID NO: 239000 - DNA, 25 bp, Probe sequence
agagcggtatacaatggtccattta

SEQ ID NO: 239001 - DNA, 25 bp, Probe sequence
accctgatcctatggcttatttaga

SEQ ID NO: 239002 - DNA, 25 bp, Probe sequence
aacaattttgaagcatcacttagtg

SEQ ID NO: 239003 - DNA, 25 bp, Probe sequence
aagattatgcgagtaccatgaattc

SEQ ID NO: 239004 - DNA, 25 bp, Probe sequence
aatgcgagtgatattagtactggta

SEQ ID NO: 239005 - DNA, 25 bp, Probe sequence
aattgcattaagtggttgtgctaat

SEQ ID NO: 239006 - DNA, 25 bp, Probe sequence
catcacttagtggttggtctgcaga

SEQ ID NO: 239007 - DNA, 25 bp, Probe sequence
ccggtagcaccaatttatcaaaaag

SEQ ID NO: 239008 - DNA, 25 bp, Probe sequence
gcgcacaaaataatacagactgggg

SEQ ID NO: 239009 - DNA, 25 bp, Probe sequence
gcttggagaaaaacagttgacccta

SEQ ID NO: 239010 - DNA, 25 bp, Probe sequence
gaaccaaattggcacttcaaccgaa

SEQ ID NO: 239011 - DNA, 25 bp, Probe sequence
gaacacagaagatacaccagatgca

SEQ ID NO: 239012 - DNA, 25 bp, Probe sequence
gaaacaatgaccacaggtagcgcac

SEQ ID NO: 239013 - DNA, 25 bp, Probe sequence
gaaatgttcctaggagatgcaccgg

SEQ ID NO: 239014 - DNA, 25 bp, Probe sequence
gacaaaccggtgttaggtgttgcga

SEQ ID NO: 239015 - DNA, 25 bp, Probe sequence
gttgcacatttaacaaatcctcaag

SEQ ID NO: 239016 - DNA, 25 bp, Probe sequence
gtactggtaagaaacctgtagagca

SEQ ID NO: 239017 - DNA, 25 bp, Probe sequence
gtgactgcgcaaacattcgaaggtt

SEQ ID NO: 239018 - DNA, 25 bp, Probe sequence
ggtgttgcgaaagcttttcctgaaa

SEQ ID NO: 239019 - DNA, 25 bp, Probe sequence
ggtgcatcattgtatgatactgaat

SEQ ID NO: 239020 - DNA, 25 bp, Probe sequence
ggagatgcaccggtagcaccaattt

SEQ ID NO: 239021 - DNA, 25 bp, Probe sequence
ggtacggcagctgatagagcggtat

SEQ ID NO: 239022 - DNA, 25 bp, Probe sequence
ggttctgaatttgcatacattatgg

SEQ ID NO: 239023 - DNA, 25 bp, Probe sequence
ggagcaatggtgacaaagtgactgc

SEQ ID NO: 239024 - DNA, 25 bp, Probe sequence
ggcacttcaaccgaacgaacgatat

SEQ ID NO: 239025 - DNA, 25 bp, Probe sequence
tggctatcgcacaagcaatagataa

SEQ ID NO: 239026 - DNA, 25 bp, Probe sequence
tccttccgatacactaacagccaaa

SEQ ID NO: 239027 - DNA, 25 bp, Probe sequence
tcaattccttccgatacactaacag

SEQ ID NO: 239028 - DNA, 25 bp, Probe sequence
ttggtccaaataactcacttaaaca

SEQ ID NO: 239029 - DNA, 25 bp, Probe sequence
ttggtctgcagattaccctgatcct

SEQ ID NO: 239030 - DNA, 25 bp, Probe sequence
attcaattgaagtcttagctaacaa

SEQ ID NO: 239031 - DNA, 25 bp, Probe sequence
atctgcgccaagcttagactacggt

SEQ ID NO: 239032 - DNA, 25 bp, Probe sequence
aggacatcgagccggctaagaaaat

SEQ ID NO: 239033 - DNA, 25 bp, Probe sequence
accacactgatagacctcaaaatga

SEQ ID NO: 239034 - DNA, 25 bp, Probe sequence
accgccaagtggtgtttattcttcg

SEQ ID NO: 239035 - DNA, 25 bp, Probe sequence
actgctgcgataaaagatttctggg

SEQ ID NO: 239036 - DNA, 25 bp, Probe sequence
aaagcaatgctttatgcaattgata

SEQ ID NO: 239037 - DNA, 25 bp, Probe sequence
aatgttccaaggtaaatcgataact

SEQ ID NO: 239038 - DNA, 25 bp, Probe sequence
aatcctacttttgaaccaagaactg

SEQ ID NO: 239039 - DNA, 25 bp, Probe sequence
aatacttcttattgtcgttttagtg

SEQ ID NO: 239040 - DNA, 25 bp, Probe sequence
aataggattcgtatctcatgattac

SEQ ID NO: 239041 - DNA, 25 bp, Probe sequence
caagtggtgtttattcttcgttatt

SEQ ID NO: 239042 - DNA, 25 bp, Probe sequence
ctcaaggtattatctgcgccaagct

SEQ ID NO: 239043 - DNA, 25 bp, Probe sequence
cgaatgatgctaccggtgcaatggc

SEQ ID NO: 239044 - DNA, 25 bp, Probe sequence
gcgccaagcttagactacggtttaa

SEQ ID NO: 239045 - DNA, 25 bp, Probe sequence
gctggtctcaaggtattatctgcgc

SEQ ID NO: 239046 - DNA, 25 bp, Probe sequence
gctaagtcatctaatgctggtctca

SEQ ID NO: 239047 - DNA, 25 bp, Probe sequence
gaatgatgagttacctggattacca

SEQ ID NO: 239048 - DNA, 25 bp, Probe sequence
gaagtgtacttcagatcatgggcag

SEQ ID NO: 239049 - DNA, 25 bp, Probe sequence
gaaggtgcttattatccaagtgtag

SEQ ID NO: 239050 - DNA, 25 bp, Probe sequence
gaacagttttaccaaaatcagatca

SEQ ID NO: 239051 - DNA, 25 bp, Probe sequence
gaaaatatcctattggtattggacc

SEQ ID NO: 239052 - DNA, 25 bp, Probe sequence
gagatggtgacggatttagagaaga

SEQ ID NO: 239053 - DNA, 25 bp, Probe sequence
gatgctaccggtgcaatggcaaaag

SEQ ID NO: 239054 - DNA, 25 bp, Probe sequence
gatttctgggaaaaagttggcttga

SEQ ID NO: 239055 - DNA, 25 bp, Probe sequence
gatttataccacactgatagacctc

SEQ ID NO: 239056 - DNA, 25 bp, Probe sequence
gttacctggattaccaatgttccaa

SEQ ID NO: 239057 - DNA, 25 bp, Probe sequence
gtacgaaacttagacattgaaattg

SEQ ID NO: 239058 - DNA, 25 bp, Probe sequence
tgattattggcaaggtaagcctgca

SEQ ID NO: 239059 - DNA, 25 bp, Probe sequence
tcatggaaggacatcgagccggcta

SEQ ID NO: 239060 - DNA, 25 bp, Probe sequence
tttgaaccaagaactgctgcgataa

SEQ ID NO: 239061 - DNA, 25 bp, Probe sequence
tttttcaatggttacgctagtgaaa

SEQ ID NO: 239062 - DNA, 25 bp, Probe sequence
ttaacagcaccgccaagtggtgttt

SEQ ID NO: 239063 - DNA, 25 bp, Probe sequence
ttcttattgtcgttttagtgttgag

SEQ ID NO: 239064 - DNA, 25 bp, Probe sequence
attgctatgatttttcaagaaccta

SEQ ID NO: 239065 - DNA, 25 bp, Probe sequence
attcgaggaaatgatattgctatga

SEQ ID NO: 239066 - DNA, 25 bp, Probe sequence
atcaatccaagcatttcacgttaat

SEQ ID NO: 239067 - DNA, 25 bp, Probe sequence
atgaatggttagcaactgttgaaaa

SEQ ID NO: 239068 - DNA, 25 bp, Probe sequence
acgaatcgatacgctcaatgagaag

SEQ ID NO: 239069 - DNA, 25 bp, Probe sequence
actacacaatccgaaacatccttat

SEQ ID NO: 239070 - DNA, 25 bp, Probe sequence
acaatccgaaacatccttataccca

SEQ ID NO: 239071 - DNA, 25 bp, Probe sequence
aaaatcaacttgtggaatctataaa

SEQ ID NO: 239072 - DNA, 25 bp, Probe sequence
aagaacctatgactgctttaaatcc

SEQ ID NO: 239073 - DNA, 25 bp, Probe sequence
aatctcctaaaatgcatgtttgtga

SEQ ID NO: 239074 - DNA, 25 bp, Probe sequence
aattattaattgctgatgaacctac

SEQ ID NO: 239075 - DNA, 25 bp, Probe sequence
catccttatacccaaaaattattat

SEQ ID NO: 239076 - DNA, 25 bp, Probe sequence
gcatttcacgttaataagtgcagat

SEQ ID NO: 239077 - DNA, 25 bp, Probe sequence
gaatctggttgcggtaagtccatat

SEQ ID NO: 239078 - DNA, 25 bp, Probe sequence
gaaggaattgtgccatcaatccaag

SEQ ID NO: 239079 - DNA, 25 bp, Probe sequence
gaagcaattgctagatattcgagga

SEQ ID NO: 239080 - DNA, 25 bp, Probe sequence
gaaaatatttcttttgaattatcta

SEQ ID NO: 239081 - DNA, 25 bp, Probe sequence
gaaatactacacaatccgaaacatc

SEQ ID NO: 239082 - DNA, 25 bp, Probe sequence
gagtaatgattgcaatggccatttc

SEQ ID NO: 239083 - DNA, 25 bp, Probe sequence
gatggtaaacgaatcgatacgctca

SEQ ID NO: 239084 - DNA, 25 bp, Probe sequence
gatacgctcaatgagaagcaattgc

SEQ ID NO: 239085 - DNA, 25 bp, Probe sequence
gttttgggtatagtaggggaatctg

SEQ ID NO: 239086 - DNA, 25 bp, Probe sequence
gatatttgtaataatcaatctccta

SEQ ID NO: 239087 - DNA, 25 bp, Probe sequence
gatttttcaagaacctatgactgct

SEQ ID NO: 239088 - DNA, 25 bp, Probe sequence
gattcaagcgcaaatattagactta

SEQ ID NO: 239089 - DNA, 25 bp, Probe sequence
gtaggggaatctggttgcggtaagt

SEQ ID NO: 239090 - DNA, 25 bp, Probe sequence
gttatgtatgcaggtcaaattgtag

SEQ ID NO: 239091 - DNA, 25 bp, Probe sequence
gtaagtccatattaagtaagtcaat

SEQ ID NO: 239092 - DNA, 25 bp, Probe sequence
gtgccatcaatccaagcatttcacg

SEQ ID NO: 239093 - DNA, 25 bp, Probe sequence
gtgcagatttgcaaatagatgtaac

SEQ ID NO: 239094 - DNA, 25 bp, Probe sequence
ggttgcggtaagtccatattaagta

SEQ ID NO: 239095 - DNA, 25 bp, Probe sequence
ggaaacgcaaatggcaattatgatg

SEQ ID NO: 239096 - DNA, 25 bp, Probe sequence
tggatgtcacgattcaagcgcaaat

SEQ ID NO: 239097 - DNA, 25 bp, Probe sequence
ttgcaatggccatttcatgttctcc

SEQ ID NO: 239098 - DNA, 25 bp, Probe sequence
attttcaggtggacagagacaaaga

SEQ ID NO: 239099 - DNA, 25 bp, Probe sequence
atttcaagatccgtatgcatcattg

SEQ ID NO: 239100 - DNA, 25 bp, Probe sequence
agaaaatcacgacaacaatatcaga

SEQ ID NO: 239101 - DNA, 25 bp, Probe sequence
aaagagtgggaattgcaagagcatt

SEQ ID NO: 239102 - DNA, 25 bp, Probe sequence
aaagctgttgatgacgtatcgtttt

SEQ ID NO: 239103 - DNA, 25 bp, Probe sequence
aactcagtacgttaaagctgttgat

SEQ ID NO: 239104 - DNA, 25 bp, Probe sequence
caagagcattggctttgcgtccgag

SEQ ID NO: 239105 - DNA, 25 bp, Probe sequence
cgagtttaattgttgctgatgagcc

SEQ ID NO: 239106 - DNA, 25 bp, Probe sequence
gcgtccgagtttaattgttgctgat

SEQ ID NO: 239107 - DNA, 25 bp, Probe sequence
gctgatgagcctgtaagtgcattag

SEQ ID NO: 239108 - DNA, 25 bp, Probe sequence
gctgttgatgacgtatcgttttcaa

SEQ ID NO: 239109 - DNA, 25 bp, Probe sequence
gaattaccttcgccaagtaatccgc

SEQ ID NO: 239110 - DNA, 25 bp, Probe sequence
gaatccgatgcaaatggttggagat

SEQ ID NO: 239111 - DNA, 25 bp, Probe sequence
gaaatttatgaaaatcccaaacatc

SEQ ID NO: 239112 - DNA, 25 bp, Probe sequence
gatgacgtatcgttttcaataaaaa

SEQ ID NO: 239113 - DNA, 25 bp, Probe sequence
gatgtatctgttcaatctcaagtac

SEQ ID NO: 239114 - DNA, 25 bp, Probe sequence
gatgatatttcaagatccgtatgca

SEQ ID NO: 239115 - DNA, 25 bp, Probe sequence
gatccgtatgcatcattgaatccga

SEQ ID NO: 239116 - DNA, 25 bp, Probe sequence
gatatcatttcagaacctattttaa

SEQ ID NO: 239117 - DNA, 25 bp, Probe sequence
gttggagatatcatttcagaaccta

SEQ ID NO: 239118 - DNA, 25 bp, Probe sequence
gttgctgatgagcctgtaagtgcat

SEQ ID NO: 239119 - DNA, 25 bp, Probe sequence
gtatctgttcaatctcaagtactga

SEQ ID NO: 239120 - DNA, 25 bp, Probe sequence
gtaagtcaacgttaggtaaagtgat

SEQ ID NO: 239121 - DNA, 25 bp, Probe sequence
gtgcattagatgtatctgttcaatc

SEQ ID NO: 239122 - DNA, 25 bp, Probe sequence
ggtggacagagacaaagagtgggaa

SEQ ID NO: 239123 - DNA, 25 bp, Probe sequence
ggattattacaaaaaactcagtacg

SEQ ID NO: 239124 - DNA, 25 bp, Probe sequence
ggctttgcgtccgagtttaattgtt

SEQ ID NO: 239125 - DNA, 25 bp, Probe sequence
tggagttatgtatttaggtcatata

SEQ ID NO: 239126 - DNA, 25 bp, Probe sequence
ggagaattaccttcgccaagtaatc

SEQ ID NO: 239127 - DNA, 25 bp, Probe sequence
tgagcctgtaagtgcattagatgta

SEQ ID NO: 239128 - DNA, 25 bp, Probe sequence
tccgtatgcatcattgaatccgatg

SEQ ID NO: 239129 - DNA, 25 bp, Probe sequence
tcaatctcaagtactgaatttatta

SEQ ID NO: 239130 - DNA, 25 bp, Probe sequence
taaatatgcacatgaattttcaggt

SEQ ID NO: 239131 - DNA, 25 bp, Probe sequence
ttggctttgcgtccgagtttaattg

SEQ ID NO: 239132 - DNA, 25 bp, Probe sequence
attgttatcagtattccgcgattcg

SEQ ID NO: 239133 - DNA, 25 bp, Probe sequence
atttcatacagttcggtcaatcgta

SEQ ID NO: 239134 - DNA, 25 bp, Probe sequence
atacagttcggtcaatcgtatttta

SEQ ID NO: 239135 - DNA, 25 bp, Probe sequence
atgcctagaacaaagttacaagatt

SEQ ID NO: 239136 - DNA, 25 bp, Probe sequence
atgattgttatcagtattccgcgat

SEQ ID NO: 239137 - DNA, 25 bp, Probe sequence
atgatttatattattcactatcatc

SEQ ID NO: 239138 - DNA, 25 bp, Probe sequence
agttgtagtaaatccgttgtttgcg

SEQ ID NO: 239139 - DNA, 25 bp, Probe sequence
agaacaaagttacaagattttccat

SEQ ID NO: 239140 - DNA, 25 bp, Probe sequence
aatttcatacagttcggtcaatcgt

SEQ ID NO: 239141 - DNA, 25 bp, Probe sequence
caagttgtagtaaatccgttgtttg

SEQ ID NO: 239142 - DNA, 25 bp, Probe sequence
cggtcaatcgtattttaaaagagtg

SEQ ID NO: 239143 - DNA, 25 bp, Probe sequence
catacagttcggtcaatcgtatttt

SEQ ID NO: 239144 - DNA, 25 bp, Probe sequence
gaatttcatacagttcggtcaatcg

SEQ ID NO: 239145 - DNA, 25 bp, Probe sequence
gattgttatcagtattccgcgattc

SEQ ID NO: 239146 - DNA, 25 bp, Probe sequence
gttgtagtaaatccgttgtttgcga

SEQ ID NO: 239147 - DNA, 25 bp, Probe sequence
gttatcagtattccgcgattcgagg

SEQ ID NO: 239148 - DNA, 25 bp, Probe sequence
gtgggaaaaagatcataaaggtatt

SEQ ID NO: 239149 - DNA, 25 bp, Probe sequence
gtcaatcgtattttaaaagagtggg

SEQ ID NO: 239150 - DNA, 25 bp, Probe sequence
ggtcaatcgtattttaaaagagtgg

SEQ ID NO: 239151 - DNA, 25 bp, Probe sequence
ggaatttcatacagttcggtcaatc

SEQ ID NO: 239152 - DNA, 25 bp, Probe sequence
tgtagtaaatccgttgtttgcgaaa

SEQ ID NO: 239153 - DNA, 25 bp, Probe sequence
tgttatcagtattccgcgattcgag

SEQ ID NO: 239154 - DNA, 25 bp, Probe sequence
tgattgttatcagtattccgcgatt

SEQ ID NO: 239155 - DNA, 25 bp, Probe sequence
tcggtcaatcgtattttaaaagagt

SEQ ID NO: 239156 - DNA, 25 bp, Probe sequence
tcatacagttcggtcaatcgtattt

SEQ ID NO: 239157 - DNA, 25 bp, Probe sequence
tcaatcgtattttaaaagagtggga

SEQ ID NO: 239158 - DNA, 25 bp, Probe sequence
tagaacaaagttacaagattttcca

SEQ ID NO: 239159 - DNA, 25 bp, Probe sequence
tacagttcggtcaatcgtattttaa

SEQ ID NO: 239160 - DNA, 25 bp, Probe sequence
tttcatacagttcggtcaatcgtat

SEQ ID NO: 239161 - DNA, 25 bp, Probe sequence
ttatcagtattccgcgattcgagga

SEQ ID NO: 239162 - DNA, 25 bp, Probe sequence
ttcatacagttcggtcaatcgtatt

SEQ ID NO: 239163 - DNA, 25 bp, Probe sequence
ttcggtcaatcgtattttaaaagag

SEQ ID NO: 239164 - DNA, 25 bp, Probe sequence
ttgtagtaaatccgttgtttgcgaa

SEQ ID NO: 239165 - DNA, 25 bp, Probe sequence
ttgttatcagtattccgcgattcga

SEQ ID NO: 239166 - DNA, 25 bp, Probe sequence
attacatttttaggtgctgatattg

SEQ ID NO: 239167 - DNA, 25 bp, Probe sequence
attatctactgctggttatattcaa

SEQ ID NO: 239168 - DNA, 25 bp, Probe sequence
atttttaggtgctgatattgtaagt

SEQ ID NO: 239169 - DNA, 25 bp, Probe sequence
atattgtaagtattttaggtggagc

SEQ ID NO: 239170 - DNA, 25 bp, Probe sequence
atcttttcatataacggtatcggta

SEQ ID NO: 239171 - DNA, 25 bp, Probe sequence
atctactgctggttatattcaatat

SEQ ID NO: 239172 - DNA, 25 bp, Probe sequence
aggtcaaaaggattatctatgaata

SEQ ID NO: 239173 - DNA, 25 bp, Probe sequence
actgctggttatattcaatatttac

SEQ ID NO: 239174 - DNA, 25 bp, Probe sequence
actatcttttcatataacggtatcg

SEQ ID NO: 239175 - DNA, 25 bp, Probe sequence
acatttttaggtgctgatattgtaa

SEQ ID NO: 239176 - DNA, 25 bp, Probe sequence
aaaagattatgtattgacggcaagg

SEQ ID NO: 239177 - DNA, 25 bp, Probe sequence
aagactatccattaatgatggcatt

SEQ ID NO: 239178 - DNA, 25 bp, Probe sequence
aagattatgtattgacggcaaggtc

SEQ ID NO: 239179 - DNA, 25 bp, Probe sequence
ctatcttttcatataacggtatcgg

SEQ ID NO: 239180 - DNA, 25 bp, Probe sequence
ctactgctggttatattcaatattt

SEQ ID NO: 239181 - DNA, 25 bp, Probe sequence
gctggttatattcaatatttacgta

SEQ ID NO: 239182 - DNA, 25 bp, Probe sequence
gactatcttttcatataacggtatc

SEQ ID NO: 239183 - DNA, 25 bp, Probe sequence
gacggcaaggtcaaaaggattatct

SEQ ID NO: 239184 - DNA, 25 bp, Probe sequence
gagactatcttttcatataacggta

SEQ ID NO: 239185 - DNA, 25 bp, Probe sequence
ggtgctgatattgtaagtattttag

SEQ ID NO: 239186 - DNA, 25 bp, Probe sequence
ggcaaggtcaaaaggattatctatg

SEQ ID NO: 239187 - DNA, 25 bp, Probe sequence
tcttttcatataacggtatcggtaa

SEQ ID NO: 239188 - DNA, 25 bp, Probe sequence
tctactgctggttatattcaatatt

SEQ ID NO: 239189 - DNA, 25 bp, Probe sequence
taatacctattattacatttttagg

SEQ ID NO: 239190 - DNA, 25 bp, Probe sequence
tatcggtaaattatttttagaatcg

SEQ ID NO: 239191 - DNA, 25 bp, Probe sequence
tatcttttcatataacggtatcggt

SEQ ID NO: 239192 - DNA, 25 bp, Probe sequence
tatctactgctggttatattcaata

SEQ ID NO: 239193 - DNA, 25 bp, Probe sequence
tatattcaatatttacgtaatgata

SEQ ID NO: 239194 - DNA, 25 bp, Probe sequence
tattatctactgctggttatattca

SEQ ID NO: 239195 - DNA, 25 bp, Probe sequence
ttttcatataacggtatcggtaaat

SEQ ID NO: 239196 - DNA, 25 bp, Probe sequence
ttattatctactgctggttatattc

SEQ ID NO: 239197 - DNA, 25 bp, Probe sequence
ttatctactgctggttatattcaat

SEQ ID NO: 239198 - DNA, 25 bp, Probe sequence
ttaggtgctgatattgtaagtattt

SEQ ID NO: 239199 - DNA, 25 bp, Probe sequence
ttcatataacggtatcggtaaatta

SEQ ID NO: 239200 - DNA, 25 bp, Probe sequence
attttcattagcaatcatacaacca

SEQ ID NO: 239201 - DNA, 25 bp, Probe sequence
atatatcacacatttttacctgcat

SEQ ID NO: 239202 - DNA, 25 bp, Probe sequence
atatcacacatttttacctgcattc

SEQ ID NO: 239203 - DNA, 25 bp, Probe sequence
tagggttaatgatcccgttactaat

SEQ ID NO: 239204 - DNA, 25 bp, Probe sequence
aggtctcaacgactcaataccacat

SEQ ID NO: 239205 - DNA, 25 bp, Probe sequence
agcaatcatacaaccaggagatcca

SEQ ID NO: 239206 - DNA, 25 bp, Probe sequence
acgactcaataccacatcaatacat

SEQ ID NO: 239207 - DNA, 25 bp, Probe sequence
acatttttacctgcattcactttag

SEQ ID NO: 239208 - DNA, 25 bp, Probe sequence
acacatttttacctgcattcacttt

SEQ ID NO: 239209 - DNA, 25 bp, Probe sequence
aattaggtctcaacgactcaatacc

SEQ ID NO: 239210 - DNA, 25 bp, Probe sequence
aatatatcacacatttttacctgca

SEQ ID NO: 239211 - DNA, 25 bp, Probe sequence
aatttcaatagttgtattttcatta

SEQ ID NO: 239212 - DNA, 25 bp, Probe sequence
caacgactcaataccacatcaatac

SEQ ID NO: 239213 - DNA, 25 bp, Probe sequence
cacatttttacctgcattcacttta

SEQ ID NO: 239214 - DNA, 25 bp, Probe sequence
cattttcagatctacaaaacggtaa

SEQ ID NO: 239215 - DNA, 25 bp, Probe sequence
catttttacctgcattcactttagg

SEQ ID NO: 239216 - DNA, 25 bp, Probe sequence
cattagcaatcatacaaccaggaga

SEQ ID NO: 239217 - DNA, 25 bp, Probe sequence
ctcaacgactcaataccacatcaat

SEQ ID NO: 239218 - DNA, 25 bp, Probe sequence
ctcaataccacatcaatacattaga

SEQ ID NO: 239219 - DNA, 25 bp, Probe sequence
gcacaaagggaaaaattaggtctca

SEQ ID NO: 239220 - DNA, 25 bp, Probe sequence
gaaaaattaggtctcaacgactcaa

SEQ ID NO: 239221 - DNA, 25 bp, Probe sequence
gactcaataccacatcaatacatta

SEQ ID NO: 239222 - DNA, 25 bp, Probe sequence
gattagggttaatgatcccgttact

SEQ ID NO: 239223 - DNA, 25 bp, Probe sequence
ggtctcaacgactcaataccacatc

SEQ ID NO: 239224 - DNA, 25 bp, Probe sequence
tctcaacgactcaataccacatcaa

SEQ ID NO: 239225 - DNA, 25 bp, Probe sequence
tcaacgactcaataccacatcaata

SEQ ID NO: 239226 - DNA, 25 bp, Probe sequence
tacctgcattcactttaggtttact

SEQ ID NO: 239227 - DNA, 25 bp, Probe sequence
taccacatcaatacattagatgggt

SEQ ID NO: 239228 - DNA, 25 bp, Probe sequence
taggtctcaacgactcaataccaca

SEQ ID NO: 239229 - DNA, 25 bp, Probe sequence
tatcacacatttttacctgcattca

SEQ ID NO: 239230 - DNA, 25 bp, Probe sequence
tttacctgcattcactttaggttta

SEQ ID NO: 239231 - DNA, 25 bp, Probe sequence
tttttacctgcattcactttaggtt

SEQ ID NO: 239232 - DNA, 25 bp, Probe sequence
ttaggtctcaacgactcaataccac

SEQ ID NO: 239233 - DNA, 25 bp, Probe sequence
ttcattagcaatcatacaaccagga

SEQ ID NO: 239234 - DNA, 25 bp, Probe sequence
accgtggatatggatgccacctgct

SEQ ID NO: 239235 - DNA, 25 bp, Probe sequence
atttccatttttaatatttgcaatt

SEQ ID NO: 239236 - DNA, 25 bp, Probe sequence
agtgtagttatcgtacaagcaacat

SEQ ID NO: 239237 - DNA, 25 bp, Probe sequence
agtcgtttgttatatgcaggtcgta

SEQ ID NO: 239238 - DNA, 25 bp, Probe sequence
agatgcttttaatcctagaggtaga

SEQ ID NO: 239239 - DNA, 25 bp, Probe sequence
aacattcttggtacagactctggtg

SEQ ID NO: 239240 - DNA, 25 bp, Probe sequence
caagcaacattgttatttgccggta

SEQ ID NO: 239241 - DNA, 25 bp, Probe sequence
gcaggtcgtatttcattatccattg

SEQ ID NO: 239242 - DNA, 25 bp, Probe sequence
gcaattgtattaaatgctgcacttg

SEQ ID NO: 239243 - DNA, 25 bp, Probe sequence
gaatttgttatgttatttccatttt

SEQ ID NO: 239244 - DNA, 25 bp, Probe sequence
gaatgcttttgattggaattacagt

SEQ ID NO: 239245 - DNA, 25 bp, Probe sequence
gaaaatgaatactttttggcagcaa

SEQ ID NO: 239246 - DNA, 25 bp, Probe sequence
gaaacatcttttgccgaatatatta

SEQ ID NO: 239247 - DNA, 25 bp, Probe sequence
gacagcacaaaacattcttggtaca

SEQ ID NO: 239248 - DNA, 25 bp, Probe sequence
gacttgttcgtggtaaagtacttca

SEQ ID NO: 239249 - DNA, 25 bp, Probe sequence
gactctggtggtagggataacttta

SEQ ID NO: 239250 - DNA, 25 bp, Probe sequence
gagtgatgctcaagaaggggatgtt

SEQ ID NO: 239251 - DNA, 25 bp, Probe sequence
gatgccacctgctataatgattaca

SEQ ID NO: 239252 - DNA, 25 bp, Probe sequence
gttggagtgatttctggttattttg

SEQ ID NO: 239253 - DNA, 25 bp, Probe sequence
gttatttgccggtatgattgtagtg

SEQ ID NO: 239254 - DNA, 25 bp, Probe sequence
gtcaaaatcgccttttaaaattgca

SEQ ID NO: 239255 - DNA, 25 bp, Probe sequence
gggatgttataagtggtaaaccgtg

SEQ ID NO: 239256 - DNA, 25 bp, Probe sequence
ggattgagctttttaggattcggaa

SEQ ID NO: 239257 - DNA, 25 bp, Probe sequence
ggatctgccataattcttgttctag

SEQ ID NO: 239258 - DNA, 25 bp, Probe sequence
ggcagcaaaatcaattggtacaccc

SEQ ID NO: 239259 - DNA, 25 bp, Probe sequence
tggggaggtattgcaagacttgttc

SEQ ID NO: 239260 - DNA, 25 bp, Probe sequence
tggggtaatatgttgagtgatgctc

SEQ ID NO: 239261 - DNA, 25 bp, Probe sequence
tcttgttctagttattatcgtatta

SEQ ID NO: 239262 - DNA, 25 bp, Probe sequence
tagcgccattaatagctccttttcc

SEQ ID NO: 239263 - DNA, 25 bp, Probe sequence
tagctccttttccagtgaaccaaca

SEQ ID NO: 239264 - DNA, 25 bp, Probe sequence
ttatccattggaattacatctacaa

SEQ ID NO: 239265 - DNA, 25 bp, Probe sequence
ttaaaaatccttatggatctgccat

SEQ ID NO: 239266 - DNA, 25 bp, Probe sequence
ttggtacacccacatataaaattat

SEQ ID NO: 239267 - DNA, 25 bp, Probe sequence
ttctggttattttggaggtattgtt

SEQ ID NO: 239268 - DNA, 25 bp, Probe sequence
ataaggcatgccatagatcaatcgc

SEQ ID NO: 239269 - DNA, 25 bp, Probe sequence
gaggcttcgacctcgaactttaata

SEQ ID NO: 239270 - DNA, 25 bp, Probe sequence
agggcatgtagttattcaatctttt

SEQ ID NO: 239271 - DNA, 25 bp, Probe sequence
agacagagagaacttgaacaggcaa

SEQ ID NO: 239272 - DNA, 25 bp, Probe sequence
agcactacatgatattcgacaagcg

SEQ ID NO: 239273 - DNA, 25 bp, Probe sequence
agcagttttaaagcaacacgtgaaa

SEQ ID NO: 239274 - DNA, 25 bp, Probe sequence
agcacctaatcatcaagttgccgta

SEQ ID NO: 239275 - DNA, 25 bp, Probe sequence
agcactatattaaacgacttgatga

SEQ ID NO: 239276 - DNA, 25 bp, Probe sequence
agcagcgtcttatgaagaactgggt

SEQ ID NO: 239277 - DNA, 25 bp, Probe sequence
agcctaacgaagtaacaccagaaca

SEQ ID NO: 239278 - DNA, 25 bp, Probe sequence
aaacaattacttatcgacatttgga

SEQ ID NO: 239279 - DNA, 25 bp, Probe sequence
aacagatggcaacgaagggcatgta

SEQ ID NO: 239280 - DNA, 25 bp, Probe sequence
aagactagaggcttcgacctcgaac

SEQ ID NO: 239281 - DNA, 25 bp, Probe sequence
caagagctattaattacgcagaaaa

SEQ ID NO: 239282 - DNA, 25 bp, Probe sequence
caggtccgatagtcatttctttggt

SEQ ID NO: 239283 - DNA, 25 bp, Probe sequence
cataacgatacagaccatgttcata

SEQ ID NO: 239284 - DNA, 25 bp, Probe sequence
gcgaaattacgttatacacaagcag

SEQ ID NO: 239285 - DNA, 25 bp, Probe sequence
gaatacagcgctaaaagtgatgaca

SEQ ID NO: 239286 - DNA, 25 bp, Probe sequence
gaagtacgcaagcaattagacagaa

SEQ ID NO: 239287 - DNA, 25 bp, Probe sequence
gaagagcgagcaagacaggaacgag

SEQ ID NO: 239288 - DNA, 25 bp, Probe sequence
gaccatgttcataatcatattgtga

SEQ ID NO: 239289 - DNA, 25 bp, Probe sequence
gagagcgtagcgaacgagaagaacg

SEQ ID NO: 239290 - DNA, 25 bp, Probe sequence
gagtgggctcgatttaatagaagta

SEQ ID NO: 239291 - DNA, 25 bp, Probe sequence
gatgaccacgaaagtgcatggcgat

SEQ ID NO: 239292 - DNA, 25 bp, Probe sequence
gatcaatcgcaagcagcgtcttatg

SEQ ID NO: 239293 - DNA, 25 bp, Probe sequence
gttgccgtatatacacataacgata

SEQ ID NO: 239294 - DNA, 25 bp, Probe sequence
gtttcacataatttgtcaatacccg

SEQ ID NO: 239295 - DNA, 25 bp, Probe sequence
gtcatttctttggtattgaacattt

SEQ ID NO: 239296 - DNA, 25 bp, Probe sequence
ggggcttagaaattggctttaacag

SEQ ID NO: 239297 - DNA, 25 bp, Probe sequence
ggttgataaatcgaatacagcgcta

SEQ ID NO: 239298 - DNA, 25 bp, Probe sequence
ggcgaagattacgacaaagggggct

SEQ ID NO: 239299 - DNA, 25 bp, Probe sequence
tgtgctaattatttttgtacttgta

SEQ ID NO: 239300 - DNA, 25 bp, Probe sequence
taagctcaacgaaatcaacatcaag

SEQ ID NO: 239301 - DNA, 25 bp, Probe sequence
ttgtaatgcttgtgacaggtccgat

SEQ ID NO: 239302 - DNA, 25 bp, Probe sequence
atttacttcaccaagttgcacatct

SEQ ID NO: 239303 - DNA, 25 bp, Probe sequence
agaagcacaacgtatggttgactaa

SEQ ID NO: 239304 - DNA, 25 bp, Probe sequence
acttcaccaagttgcacatcttgcc

SEQ ID NO: 239305 - DNA, 25 bp, Probe sequence
acaagacttatattcaatcattcaa

SEQ ID NO: 239306 - DNA, 25 bp, Probe sequence
aaagcgaaagcatggttacaagaac

SEQ ID NO: 239307 - DNA, 25 bp, Probe sequence
aaaatgactgaagacggtactgatg

SEQ ID NO: 239308 - DNA, 25 bp, Probe sequence
aagaacatgacattccgtatacgga

SEQ ID NO: 239309 - DNA, 25 bp, Probe sequence
aagttgcacatcttgccgtaaagcg

SEQ ID NO: 239310 - DNA, 25 bp, Probe sequence
aagttggttataatgaggacgagat

SEQ ID NO: 239311 - DNA, 25 bp, Probe sequence
aatcctggcttattacgtcgtccaa

SEQ ID NO: 239312 - DNA, 25 bp, Probe sequence
aatcatttctacacgttctaaaaca

SEQ ID NO: 239313 - DNA, 25 bp, Probe sequence
caatcattcaagataatcctggctt

SEQ ID NO: 239314 - DNA, 25 bp, Probe sequence
gcacatcttgccgtaaagcgaaagc

SEQ ID NO: 239315 - DNA, 25 bp, Probe sequence
gactgaagacggtactgatgaaatc

SEQ ID NO: 239316 - DNA, 25 bp, Probe sequence
gagattcgacgtttcttacctagaa

SEQ ID NO: 239317 - DNA, 25 bp, Probe sequence
gatgaaatcatttctacacgttcta

SEQ ID NO: 239318 - DNA, 25 bp, Probe sequence
gataataaacgactacaagttggtt

SEQ ID NO: 239319 - DNA, 25 bp, Probe sequence
gataatcctggcttattacgtcgtc

SEQ ID NO: 239320 - DNA, 25 bp, Probe sequence
gattcactaccattacaagacttat

SEQ ID NO: 239321 - DNA, 25 bp, Probe sequence
gttgatattgattcactaccattac

SEQ ID NO: 239322 - DNA, 25 bp, Probe sequence
gttcgtacgttccaattacaagaag

SEQ ID NO: 239323 - DNA, 25 bp, Probe sequence
gtacgttccaattacaagaagcaca

SEQ ID NO: 239324 - DNA, 25 bp, Probe sequence
ggtaacattatttacttcaccaagt

SEQ ID NO: 239325 - DNA, 25 bp, Probe sequence
ggttacaagaacatgacattccgta

SEQ ID NO: 239326 - DNA, 25 bp, Probe sequence
ggagcgtaatattttttctgaacat

SEQ ID NO: 239327 - DNA, 25 bp, Probe sequence
ggacgagattcgacgtttcttacct

SEQ ID NO: 239328 - DNA, 25 bp, Probe sequence
ggcttattacgtcgtccaattattt

SEQ ID NO: 239329 - DNA, 25 bp, Probe sequence
tgacattccgtatacggagcgtaat

SEQ ID NO: 239330 - DNA, 25 bp, Probe sequence
tcctggcttattacgtcgtccaatt

SEQ ID NO: 239331 - DNA, 25 bp, Probe sequence
tcaccaagttgcacatcttgccgta

SEQ ID NO: 239332 - DNA, 25 bp, Probe sequence
tcactaccattacaagacttatatt

SEQ ID NO: 239333 - DNA, 25 bp, Probe sequence
tacgtcgtccaattattttagataa

SEQ ID NO: 239334 - DNA, 25 bp, Probe sequence
ttttctgaacatttaacaattgatg

SEQ ID NO: 239335 - DNA, 25 bp, Probe sequence
ttctacacgttctaaaacataccaa

SEQ ID NO: 239336 - DNA, 25 bp, Probe sequence
attatgagtcataacgtaacagctc

SEQ ID NO: 239337 - DNA, 25 bp, Probe sequence
atagcaatccaataactacagagtt

SEQ ID NO: 239338 - DNA, 25 bp, Probe sequence
atgatagttacagtcaattgcttga

SEQ ID NO: 239339 - DNA, 25 bp, Probe sequence
acgtaacagctcaagttcgacgtta

SEQ ID NO: 239340 - DNA, 25 bp, Probe sequence
aaaggtgtcgaagtcacaatttcta

SEQ ID NO: 239341 - DNA, 25 bp, Probe sequence
aaagtcttcagcacgtaaaaataca

SEQ ID NO: 239342 - DNA, 25 bp, Probe sequence
aacatatagcgatatcgaggcccgt

SEQ ID NO: 239343 - DNA, 25 bp, Probe sequence
aagttcaagaattgttagctcaaac

SEQ ID NO: 239344 - DNA, 25 bp, Probe sequence
cagctcaagttcgacgttattttcc

SEQ ID NO: 239345 - DNA, 25 bp, Probe sequence
cgcaaacgtggcgaagaattctttt

SEQ ID NO: 239346 - DNA, 25 bp, Probe sequence
gcccgtggatttagtcgtgaagatt

SEQ ID NO: 239347 - DNA, 25 bp, Probe sequence
gctcaaggttctaaacgtcaaaagt

SEQ ID NO: 239348 - DNA, 25 bp, Probe sequence
gaatatgtctgatgatgatgcaact

SEQ ID NO: 239349 - DNA, 25 bp, Probe sequence
gaattcttttggtcaatgatggatg

SEQ ID NO: 239350 - DNA, 25 bp, Probe sequence
gaagatttgttatatatggttgatg

SEQ ID NO: 239351 - DNA, 25 bp, Probe sequence
gaagaattattcgagcaacgaacaa

SEQ ID NO: 239352 - DNA, 25 bp, Probe sequence
gaacgagtagatgatacaactgtaa

SEQ ID NO: 239353 - DNA, 25 bp, Probe sequence
gaggcccgtggatttagtcgtgaag

SEQ ID NO: 239354 - DNA, 25 bp, Probe sequence
gatatcgaggcccgtggatttagtc

SEQ ID NO: 239355 - DNA, 25 bp, Probe sequence
gatgatgcaactgatcaatttgatg

SEQ ID NO: 239356 - DNA, 25 bp, Probe sequence
gattttgttgtagaaggtccattat

SEQ ID NO: 239357 - DNA, 25 bp, Probe sequence
gttctaaacgtcaaaagtcttcagc

SEQ ID NO: 239358 - DNA, 25 bp, Probe sequence
gttacagtcaattgcttgaatttgc

SEQ ID NO: 239359 - DNA, 25 bp, Probe sequence
gttagctcaaacattagaaggtgaa

SEQ ID NO: 239360 - DNA, 25 bp, Probe sequence
gtcgaagtcacaatttctaaatcta

SEQ ID NO: 239361 - DNA, 25 bp, Probe sequence
gtggcgaagaattcttttggtcaat

SEQ ID NO: 239362 - DNA, 25 bp, Probe sequence
ggtccattatggattcaagtacatg

SEQ ID NO: 239363 - DNA, 25 bp, Probe sequence
ggatttagtcgtgaagatttatgga

SEQ ID NO: 239364 - DNA, 25 bp, Probe sequence
tggttgatggtacttattattatgc

SEQ ID NO: 239365 - DNA, 25 bp, Probe sequence
tttatggacaaatcgcaaacgtggc

SEQ ID NO: 239366 - DNA, 25 bp, Probe sequence
tagcgatatcgaggcccgtggattt

SEQ ID NO: 239367 - DNA, 25 bp, Probe sequence
tatggattcaagtacatgcctttga

SEQ ID NO: 239368 - DNA, 25 bp, Probe sequence
tatgcatatcatagcaatccaataa

SEQ ID NO: 239369 - DNA, 25 bp, Probe sequence
tatccaacagacagaacagaagttt

SEQ ID NO: 239370 - DNA, 25 bp, Probe sequence
atgtcatggttaacaatgccggcct

SEQ ID NO: 239371 - DNA, 25 bp, Probe sequence
atggcgtgaacgttgcaggtgtgct

SEQ ID NO: 239372 - DNA, 25 bp, Probe sequence
agatggtggtatgagattccgttaa

SEQ ID NO: 239373 - DNA, 25 bp, Probe sequence
aagcaggcgttgagggtaacccagg

SEQ ID NO: 239374 - DNA, 25 bp, Probe sequence
aacaccaatcgatacaattactgaa

SEQ ID NO: 239375 - DNA, 25 bp, Probe sequence
aagactctgattacattactggaca

SEQ ID NO: 239376 - DNA, 25 bp, Probe sequence
aagtagcagttgttgatttcaatga

SEQ ID NO: 239377 - DNA, 25 bp, Probe sequence
aatttggcgatttccatgtcatggt

SEQ ID NO: 239378 - DNA, 25 bp, Probe sequence
aattgcagaacgtttagtggaagat

SEQ ID NO: 239379 - DNA, 25 bp, Probe sequence
caatgcaacatctcaagcaggcgtt

SEQ ID NO: 239380 - DNA, 25 bp, Probe sequence
caagccgcacatgaacaatttaaaa

SEQ ID NO: 239381 - DNA, 25 bp, Probe sequence
caaagcagatgtatcaaaccgtgat

SEQ ID NO: 239382 - DNA, 25 bp, Probe sequence
caggcttgtctttatattgcagtac

SEQ ID NO: 239383 - DNA, 25 bp, Probe sequence
gccttggaccaacaacaccaatcga

SEQ ID NO: 239384 - DNA, 25 bp, Probe sequence
gcagtacaaaattcgcagtgcgagg

SEQ ID NO: 239385 - DNA, 25 bp, Probe sequence
gcaggtgtgctatggggtattcaag

SEQ ID NO: 239386 - DNA, 25 bp, Probe sequence
gaaggggcaaaagcagctgcactta

SEQ ID NO: 239387 - DNA, 25 bp, Probe sequence
gaaagtatcgcagtggcaacagccg

SEQ ID NO: 239388 - DNA, 25 bp, Probe sequence
gagcttcttagctggtaaagactct

SEQ ID NO: 239389 - DNA, 25 bp, Probe sequence
gaggtttaacacaagtagccgcaca

SEQ ID NO: 239390 - DNA, 25 bp, Probe sequence
gatggtacaaaagctattgctatca

SEQ ID NO: 239391 - DNA, 25 bp, Probe sequence
gatgtttcaaatgtagtgagcttct

SEQ ID NO: 239392 - DNA, 25 bp, Probe sequence
tggttaacaatgccggccttggacc

SEQ ID NO: 239393 - DNA, 25 bp, Probe sequence
gtagccgcacaagatttagcgtctg

SEQ ID NO: 239394 - DNA, 25 bp, Probe sequence
gtaactggcggagcacaagggattg

SEQ ID NO: 239395 - DNA, 25 bp, Probe sequence
gtaacccaggcttgtctttatattg

SEQ ID NO: 239396 - DNA, 25 bp, Probe sequence
gtcagattgctttgggcagagtttc

SEQ ID NO: 239397 - DNA, 25 bp, Probe sequence
gggttgggaacaatttacaagtcag

SEQ ID NO: 239398 - DNA, 25 bp, Probe sequence
ggcggagcacaagggattggtttta

SEQ ID NO: 239399 - DNA, 25 bp, Probe sequence
ggtaaacctgaagcatggggttggg

SEQ ID NO: 239400 - DNA, 25 bp, Probe sequence
ggaagatggtttcaaagtagcagtt

SEQ ID NO: 239401 - DNA, 25 bp, Probe sequence
tcgcagtggcaacagccgaagaagc

SEQ ID NO: 239402 - DNA, 25 bp, Probe sequence
tatggggtattcaagccgcacatga

SEQ ID NO: 239403 - DNA, 25 bp, Probe sequence
ttagcgtctgaaggtattactgtga

SEQ ID NO: 239404 - DNA, 25 bp, Probe sequence
atatatcaaatattgtcgctggcaa

SEQ ID NO: 239405 - DNA, 25 bp, Probe sequence
ataaagtgaagttcaatcattttca

SEQ ID NO: 239406 - DNA, 25 bp, Probe sequence
atggttatatttttccagagcaaat

SEQ ID NO: 239407 - DNA, 25 bp, Probe sequence
agcacagatgatacagcaacaagga

SEQ ID NO: 239408 - DNA, 25 bp, Probe sequence
acaaattccggatattttgattaat

SEQ ID NO: 239409 - DNA, 25 bp, Probe sequence
aaattgattttagcacagatgatac

SEQ ID NO: 239410 - DNA, 25 bp, Probe sequence
aaacttcatacgttcaatttagaga

SEQ ID NO: 239411 - DNA, 25 bp, Probe sequence
aagtagagatagagccatttttaaa

SEQ ID NO: 239412 - DNA, 25 bp, Probe sequence
aatacaatatttaggcgggcacaaa

SEQ ID NO: 239413 - DNA, 25 bp, Probe sequence
aattatcaaagttcgcaattaatca

SEQ ID NO: 239414 - DNA, 25 bp, Probe sequence
ctacagtattcgccaattccttata

SEQ ID NO: 239415 - DNA, 25 bp, Probe sequence
cgggcacaaatatgtcgctgaaaaa

SEQ ID NO: 239416 - DNA, 25 bp, Probe sequence
gccaattccttataaacagattctt

SEQ ID NO: 239417 - DNA, 25 bp, Probe sequence
gcgccttgtgattatcatgctgttt

SEQ ID NO: 239418 - DNA, 25 bp, Probe sequence
gcgtgggctcaaagtaattagtcat

SEQ ID NO: 239419 - DNA, 25 bp, Probe sequence
gcaactactgcattgagaaagacac

SEQ ID NO: 239420 - DNA, 25 bp, Probe sequence
gcaagttattttaaagcgtgggctc

SEQ ID NO: 239421 - DNA, 25 bp, Probe sequence
gaacccactttaagtgcaatgtatc

SEQ ID NO: 239422 - DNA, 25 bp, Probe sequence
gagttgtttaatgaggcgccttgtg

SEQ ID NO: 239423 - DNA, 25 bp, Probe sequence
gagtggcaattacaagttgatttat

SEQ ID NO: 239424 - DNA, 25 bp, Probe sequence
gttattgagctacagtattcgccaa

SEQ ID NO: 239425 - DNA, 25 bp, Probe sequence
gtattcgccaattccttataaacag

SEQ ID NO: 239426 - DNA, 25 bp, Probe sequence
gtaattagtcattttgcacataaac

SEQ ID NO: 239427 - DNA, 25 bp, Probe sequence
gtcgctggcaaaattctgttttaga

SEQ ID NO: 239428 - DNA, 25 bp, Probe sequence
gtgtgtggcaagcaagttattttaa

SEQ ID NO: 239429 - DNA, 25 bp, Probe sequence
ggtaatgacgtgcaaattttgttct

SEQ ID NO: 239430 - DNA, 25 bp, Probe sequence
tgaggcgccttgtgattatcatgct

SEQ ID NO: 239431 - DNA, 25 bp, Probe sequence
tgcacataaacatttagcggaacaa

SEQ ID NO: 239432 - DNA, 25 bp, Probe sequence
tctgttttagaacccactttaagtg

SEQ ID NO: 239433 - DNA, 25 bp, Probe sequence
tcactcgaaaacttcatacgttcaa

SEQ ID NO: 239434 - DNA, 25 bp, Probe sequence
taaacagattcttcaacgaacggaa

SEQ ID NO: 239435 - DNA, 25 bp, Probe sequence
taggcgggcacaaatatgtcgctga

SEQ ID NO: 239436 - DNA, 25 bp, Probe sequence
tatcatgctgtttataaattatcaa

SEQ ID NO: 239437 - DNA, 25 bp, Probe sequence
ttgagctacagtattcgccaattcc

SEQ ID NO: 239438 - DNA, 25 bp, Probe sequence
attatacttcggtgattctgtagaa

SEQ ID NO: 239439 - DNA, 25 bp, Probe sequence
atacggtatgtttagcaacgctgat

SEQ ID NO: 239440 - DNA, 25 bp, Probe sequence
atactatttcagacttatacacatt

SEQ ID NO: 239441 - DNA, 25 bp, Probe sequence
atcaacgccatcaaatgtatacggt

SEQ ID NO: 239442 - DNA, 25 bp, Probe sequence
atccatttattctacttaactggtc

SEQ ID NO: 239443 - DNA, 25 bp, Probe sequence
atgcacacccgttaacacaaggtac

SEQ ID NO: 239444 - DNA, 25 bp, Probe sequence
atggtcacgtattccacacttctat

SEQ ID NO: 239445 - DNA, 25 bp, Probe sequence
agtgcagctcaaagcttaagtcatc

SEQ ID NO: 239446 - DNA, 25 bp, Probe sequence
acattggtgatagtgctgagacatt

SEQ ID NO: 239447 - DNA, 25 bp, Probe sequence
acacctgaaccaattgaacaagctt

SEQ ID NO: 239448 - DNA, 25 bp, Probe sequence
aaattccaaccgtcaaattctagtg

SEQ ID NO: 239449 - DNA, 25 bp, Probe sequence
aaatatttaccattgctacatagat

SEQ ID NO: 239450 - DNA, 25 bp, Probe sequence
aaaaggtagctcaaattatccaatt

SEQ ID NO: 239451 - DNA, 25 bp, Probe sequence
aacgtcctcatattttagatgctga

SEQ ID NO: 239452 - DNA, 25 bp, Probe sequence
gaagcgcaggacgcgttatcaacgc

SEQ ID NO: 239453 - DNA, 25 bp, Probe sequence
aatttagctcggcatggagtttctt

SEQ ID NO: 239454 - DNA, 25 bp, Probe sequence
cattcagcacatagttacttcagta

SEQ ID NO: 239455 - DNA, 25 bp, Probe sequence
cgctacgctagcaggtgaagtgaag

SEQ ID NO: 239456 - DNA, 25 bp, Probe sequence
gcatcaacttgtaacgaagcacttt

SEQ ID NO: 239457 - DNA, 25 bp, Probe sequence
gaaggcttaaacaatcgttgggtcg

SEQ ID NO: 239458 - DNA, 25 bp, Probe sequence
gtaaacgttcaggtggctattcatc

SEQ ID NO: 239459 - DNA, 25 bp, Probe sequence
gtttcagagctacattattccgaca

SEQ ID NO: 239460 - DNA, 25 bp, Probe sequence
gtatttaatgctcgtacacacaatt

SEQ ID NO: 239461 - DNA, 25 bp, Probe sequence
gtagatatgacaacacctgaaccaa

SEQ ID NO: 239462 - DNA, 25 bp, Probe sequence
gtgactacactatttttgtcgctga

SEQ ID NO: 239463 - DNA, 25 bp, Probe sequence
ggtggctattcatcaggtgcacatt

SEQ ID NO: 239464 - DNA, 25 bp, Probe sequence
ggtgcacatttaactaatccattta

SEQ ID NO: 239465 - DNA, 25 bp, Probe sequence
ggtgctcataataatacgcttggcg

SEQ ID NO: 239466 - DNA, 25 bp, Probe sequence
ggagtttcttagtgccagagatttt

SEQ ID NO: 239467 - DNA, 25 bp, Probe sequence
tgaagcttttgaggctgcatttaaa

SEQ ID NO: 239468 - DNA, 25 bp, Probe sequence
tcgttgggtcgatgtctatgagaat

SEQ ID NO: 239469 - DNA, 25 bp, Probe sequence
taatacgcttggcgctacgctagca

SEQ ID NO: 239470 - DNA, 25 bp, Probe sequence
tacgcaactggttacagtgcagctc

SEQ ID NO: 239471 - DNA, 25 bp, Probe sequence
tattccgacaaacaatgttcgcaga

SEQ ID NO: 239472 - DNA, 25 bp, Probe sequence
attccaccaagaacttacttatatt

SEQ ID NO: 239473 - DNA, 25 bp, Probe sequence
atctgaagtaggacaaatgctcgtt

SEQ ID NO: 239474 - DNA, 25 bp, Probe sequence
atctcattttcgtacaagaaacatg

SEQ ID NO: 239475 - DNA, 25 bp, Probe sequence
aggaatttgttgcaaccgttgaaga

SEQ ID NO: 239476 - DNA, 25 bp, Probe sequence
agcgtatgcttatctcattttcgta

SEQ ID NO: 239477 - DNA, 25 bp, Probe sequence
aaagcgtatgcttatctcattttcg

SEQ ID NO: 239478 - DNA, 25 bp, Probe sequence
aacttacttatattttagacaacat

SEQ ID NO: 239479 - DNA, 25 bp, Probe sequence
aatgatgaactagaattgactgaat

SEQ ID NO: 239480 - DNA, 25 bp, Probe sequence
aattatgcctttgcgtatacattag

SEQ ID NO: 239481 - DNA, 25 bp, Probe sequence
aattgactgaattccaccaagaact

SEQ ID NO: 239482 - DNA, 25 bp, Probe sequence
cgttgaagaaacattcgacattgaa

SEQ ID NO: 239483 - DNA, 25 bp, Probe sequence
gcctttgcgtatacattagatgatg

SEQ ID NO: 239484 - DNA, 25 bp, Probe sequence
gcgtatgcttatctcattttcgtac

SEQ ID NO: 239485 - DNA, 25 bp, Probe sequence
gcaaccgttgaagaaacattcgaca

SEQ ID NO: 239486 - DNA, 25 bp, Probe sequence
gaattccaccaagaacttacttata

SEQ ID NO: 239487 - DNA, 25 bp, Probe sequence
gaagtaggacaaatgctcgttgata

SEQ ID NO: 239488 - DNA, 25 bp, Probe sequence
gaaacatggacgatgttgcatgaaa

SEQ ID NO: 239489 - DNA, 25 bp, Probe sequence
gacatactttattgttatacagaag

SEQ ID NO: 239490 - DNA, 25 bp, Probe sequence
gactgaattccaccaagaacttact

SEQ ID NO: 239491 - DNA, 25 bp, Probe sequence
gatgacatactttattgttatacag

SEQ ID NO: 239492 - DNA, 25 bp, Probe sequence
gataattatgcctttgcgtatacat

SEQ ID NO: 239493 - DNA, 25 bp, Probe sequence
gatagtgataattatgcctttgcgt

SEQ ID NO: 239494 - DNA, 25 bp, Probe sequence
gattctattaaaggattatctgaag

SEQ ID NO: 239495 - DNA, 25 bp, Probe sequence
gttgcaaccgttgaagaaacattcg

SEQ ID NO: 239496 - DNA, 25 bp, Probe sequence
gtatgcttatctcattttcgtacaa

SEQ ID NO: 239497 - DNA, 25 bp, Probe sequence
gtaggacaaatgctcgttgatagtg

SEQ ID NO: 239498 - DNA, 25 bp, Probe sequence
gtaaggaatttgttgcaaccgttga

SEQ ID NO: 239499 - DNA, 25 bp, Probe sequence
gtgataattatgcctttgcgtatac

SEQ ID NO: 239500 - DNA, 25 bp, Probe sequence
ggacaaatgctcgttgatagtgata

SEQ ID NO: 239501 - DNA, 25 bp, Probe sequence
tgcttatctcattttcgtacaagaa

SEQ ID NO: 239502 - DNA, 25 bp, Probe sequence
tccaccaagaacttacttatatttt

SEQ ID NO: 239503 - DNA, 25 bp, Probe sequence
tatgcttatctcattttcgtacaag

SEQ ID NO: 239504 - DNA, 25 bp, Probe sequence
tatgcctttgcgtatacattagatg

SEQ ID NO: 239505 - DNA, 25 bp, Probe sequence
ttagatgatggtaaagcgtatgctt

SEQ ID NO: 239506 - DNA, 25 bp, Probe sequence
attagcaatgaatttctgggcaacg

SEQ ID NO: 239507 - DNA, 25 bp, Probe sequence
atccggatgaaattcaacatcgttt

SEQ ID NO: 239508 - DNA, 25 bp, Probe sequence
atgaagttggtgaacaagcgtcgcc

SEQ ID NO: 239509 - DNA, 25 bp, Probe sequence
aggcaaacaaacgacaaataccatt

SEQ ID NO: 239510 - DNA, 25 bp, Probe sequence
agagaagaaatgtacgatatcgctg

SEQ ID NO: 239511 - DNA, 25 bp, Probe sequence
agcgtcgccaatagaatttgttact

SEQ ID NO: 239512 - DNA, 25 bp, Probe sequence
aaagtggttaccgctcgtatcatgt

SEQ ID NO: 239513 - DNA, 25 bp, Probe sequence
aaagagcggcagaagcagcgtattt

SEQ ID NO: 239514 - DNA, 25 bp, Probe sequence
aacaccttataagcaagcggttgat

SEQ ID NO: 239515 - DNA, 25 bp, Probe sequence
aacatcgtttggaaagagcggcaga

SEQ ID NO: 239516 - DNA, 25 bp, Probe sequence
aagcggttgatgagttgaaagtgaa

SEQ ID NO: 239517 - DNA, 25 bp, Probe sequence
aagaaagtggttaccgctcgtatca

SEQ ID NO: 239518 - DNA, 25 bp, Probe sequence
aatatgatggtgcttatccggatga

SEQ ID NO: 239519 - DNA, 25 bp, Probe sequence
caatgggatcagttcttaacacctt

SEQ ID NO: 239520 - DNA, 25 bp, Probe sequence
cgagattatattcgtaacactaaag

SEQ ID NO: 239521 - DNA, 25 bp, Probe sequence
gcggcagaagcagcgtatttacttg

SEQ ID NO: 239522 - DNA, 25 bp, Probe sequence
gctgagattcagattcgtacattag

SEQ ID NO: 239523 - DNA, 25 bp, Probe sequence
gaatttctgggcaacgattgaacat

SEQ ID NO: 239524 - DNA, 25 bp, Probe sequence
gaagcagcgtatttacttgatgaag

SEQ ID NO: 239525 - DNA, 25 bp, Probe sequence
gatggtgcttatccggatgaaattc

SEQ ID NO: 239526 - DNA, 25 bp, Probe sequence
gatgttgtcgtcaatattttaagac

SEQ ID NO: 239527 - DNA, 25 bp, Probe sequence
gattcagattcgtacattagcaatg

SEQ ID NO: 239528 - DNA, 25 bp, Probe sequence
gttggtgaacaagcgtcgccaatag

SEQ ID NO: 239529 - DNA, 25 bp, Probe sequence
gattgaacatactttacgatataaa

SEQ ID NO: 239530 - DNA, 25 bp, Probe sequence
gttaccgctcgtatcatgtcattat

SEQ ID NO: 239531 - DNA, 25 bp, Probe sequence
gtttaagaatgatgtgccaatttgt

SEQ ID NO: 239532 - DNA, 25 bp, Probe sequence
gtacgatatcgctggtttaagaatg

SEQ ID NO: 239533 - DNA, 25 bp, Probe sequence
gtgaaacttaaaggcatgcgcaaac

SEQ ID NO: 239534 - DNA, 25 bp, Probe sequence
gggatcagttcttaacaccttataa

SEQ ID NO: 239535 - DNA, 25 bp, Probe sequence
ggtgcttatccggatgaaattcaac

SEQ ID NO: 239536 - DNA, 25 bp, Probe sequence
ggcaacgattgaacatactttacga

SEQ ID NO: 239537 - DNA, 25 bp, Probe sequence
ggcatgcgcaaacaatatgaagttg

SEQ ID NO: 239538 - DNA, 25 bp, Probe sequence
taccgctcgtatcatgtcattattg

SEQ ID NO: 239539 - DNA, 25 bp, Probe sequence
tagaatttgttactggtcgtgttaa

SEQ ID NO: 239540 - DNA, 25 bp, Probe sequence
tttaactaaaggtgactccaagtct

SEQ ID NO: 239541 - DNA, 25 bp, Probe sequence
attgaatatccattgcttgaaatta

SEQ ID NO: 239542 - DNA, 25 bp, Probe sequence
attaccaaagcatcatacatgttta

SEQ ID NO: 239543 - DNA, 25 bp, Probe sequence
ataacaaagcgctaggtggcgcact

SEQ ID NO: 239544 - DNA, 25 bp, Probe sequence
ataatcgtgtgtttagaacggtagg

SEQ ID NO: 239545 - DNA, 25 bp, Probe sequence
atcagtatagccacatgttatcaaa

SEQ ID NO: 239546 - DNA, 25 bp, Probe sequence
atgacgatagatcatgttagtatca

SEQ ID NO: 239547 - DNA, 25 bp, Probe sequence
atgttaattcaatacaataccgtgt

SEQ ID NO: 239548 - DNA, 25 bp, Probe sequence
acacttgttgtggatgttaacttaa

SEQ ID NO: 239549 - DNA, 25 bp, Probe sequence
aaattgttatttcagttggtggtga

SEQ ID NO: 239550 - DNA, 25 bp, Probe sequence
aataattcagagtttcaggtcattg

SEQ ID NO: 239551 - DNA, 25 bp, Probe sequence
caagcattccatcagtatagccaca

SEQ ID NO: 239552 - DNA, 25 bp, Probe sequence
cacgattctttcatatcaagtgatg

SEQ ID NO: 239553 - DNA, 25 bp, Probe sequence
caggtcattgaatatccattgcttg

SEQ ID NO: 239554 - DNA, 25 bp, Probe sequence
catacatgtttaatatcaccagtta

SEQ ID NO: 239555 - DNA, 25 bp, Probe sequence
ctgaaaatggctcaacacttgttgt

SEQ ID NO: 239556 - DNA, 25 bp, Probe sequence
gaacggtaggatcaccacttgtatt

SEQ ID NO: 239557 - DNA, 25 bp, Probe sequence
gacaacggctatgaaacaaggtatt

SEQ ID NO: 239558 - DNA, 25 bp, Probe sequence
gaaagattttcgcatgattgaggat

SEQ ID NO: 239559 - DNA, 25 bp, Probe sequence
gactccaagtctaatgccttaaagc

SEQ ID NO: 239560 - DNA, 25 bp, Probe sequence
gagatacaacgacaacggctatgaa

SEQ ID NO: 239561 - DNA, 25 bp, Probe sequence
gagggaaacactttgagcgatttag

SEQ ID NO: 239562 - DNA, 25 bp, Probe sequence
gaggtttgcacgttttagaccattc

SEQ ID NO: 239563 - DNA, 25 bp, Probe sequence
gaggcgatggattatgtgtatcaac

SEQ ID NO: 239564 - DNA, 25 bp, Probe sequence
gttcatacaggtcatttaggatttt

SEQ ID NO: 239565 - DNA, 25 bp, Probe sequence
gtacattactacaagcattccatca

SEQ ID NO: 239566 - DNA, 25 bp, Probe sequence
gtgtatcaacaccttcgggttcaac

SEQ ID NO: 239567 - DNA, 25 bp, Probe sequence
ggattggttacctcatgaagttgaa

SEQ ID NO: 239568 - DNA, 25 bp, Probe sequence
ggatcaccacttgtattaccaaagc

SEQ ID NO: 239569 - DNA, 25 bp, Probe sequence
ggattttatgcggattggttacctc

SEQ ID NO: 239570 - DNA, 25 bp, Probe sequence
tcgggttcaacggcttataacaaag

SEQ ID NO: 239571 - DNA, 25 bp, Probe sequence
tcaccagttaatcatgataccatta

SEQ ID NO: 239572 - DNA, 25 bp, Probe sequence
tatcaacaccttcgggttcaacggc

SEQ ID NO: 239573 - DNA, 25 bp, Probe sequence
ttgagcgatttagaggcgatggatt

SEQ ID NO: 239574 - DNA, 25 bp, Probe sequence
atacgggacgtacacatcaaattcg

SEQ ID NO: 239575 - DNA, 25 bp, Probe sequence
attaacccacatattgttacgcgtc

SEQ ID NO: 239576 - DNA, 25 bp, Probe sequence
attttgttcatccaatcaataagaa

SEQ ID NO: 239577 - DNA, 25 bp, Probe sequence
atttaataccttatgctcgtaagct

SEQ ID NO: 239578 - DNA, 25 bp, Probe sequence
atcaaattcgtgtacattttcaaca

SEQ ID NO: 239579 - DNA, 25 bp, Probe sequence
atcatagttactaaaccaaacaatc

SEQ ID NO: 239580 - DNA, 25 bp, Probe sequence
atccatcatttattttctaaagtaa

SEQ ID NO: 239581 - DNA, 25 bp, Probe sequence
atgctcgtaagctagaagtattgta

SEQ ID NO: 239582 - DNA, 25 bp, Probe sequence
agcacgacatgatttttctaagaag

SEQ ID NO: 239583 - DNA, 25 bp, Probe sequence
acatcctcatgaaagtttaatcgaa

SEQ ID NO: 239584 - DNA, 25 bp, Probe sequence
aactagagaagttgcctcggatggt

SEQ ID NO: 239585 - DNA, 25 bp, Probe sequence
aagttcatttgcatacgggacgtac

SEQ ID NO: 239586 - DNA, 25 bp, Probe sequence
aataatggcgctttaattgttaatg

SEQ ID NO: 239587 - DNA, 25 bp, Probe sequence
aatttaagtatcatatatcacaaca

SEQ ID NO: 239588 - DNA, 25 bp, Probe sequence
caactggtattgtgatattcgctaa

SEQ ID NO: 239589 - DNA, 25 bp, Probe sequence
caaaattcatggtcaagtactgcaa

SEQ ID NO: 239590 - DNA, 25 bp, Probe sequence
cattttcaacatattgggcatccaa

SEQ ID NO: 239591 - DNA, 25 bp, Probe sequence
cttttttagcacgacatgatttttc

SEQ ID NO: 239592 - DNA, 25 bp, Probe sequence
cccacatattgttacgcgtctagat

SEQ ID NO: 239593 - DNA, 25 bp, Probe sequence
ccttcgagagaacatcctcatgaaa

SEQ ID NO: 239594 - DNA, 25 bp, Probe sequence
gcgtctagatcgtaatacaactggt

SEQ ID NO: 239595 - DNA, 25 bp, Probe sequence
gaagacagtgagcgccattaaaaat

SEQ ID NO: 239596 - DNA, 25 bp, Probe sequence
gttgcctcggatggtaaatacgcta

SEQ ID NO: 239597 - DNA, 25 bp, Probe sequence
gtacgcaaatatattttgttcatcc

SEQ ID NO: 239598 - DNA, 25 bp, Probe sequence
gtaaatacgctaaaacatcttatga

SEQ ID NO: 239599 - DNA, 25 bp, Probe sequence
gggcatccaattgtgggagattctt

SEQ ID NO: 239600 - DNA, 25 bp, Probe sequence
ggtcaagtactgcaatgtacgcaaa

SEQ ID NO: 239601 - DNA, 25 bp, Probe sequence
ggagattctttgtatgatggttttc

SEQ ID NO: 239602 - DNA, 25 bp, Probe sequence
tgatggttttcatgacaaaattcat

SEQ ID NO: 239603 - DNA, 25 bp, Probe sequence
tgaaaaaaatatatacttgccttgt

SEQ ID NO: 239604 - DNA, 25 bp, Probe sequence
tcgaacaagtactatatcattgtca

SEQ ID NO: 239605 - DNA, 25 bp, Probe sequence
tacttaaattattcaatcaactcta

SEQ ID NO: 239606 - DNA, 25 bp, Probe sequence
ttctaagaagacagtgagcgccatt

SEQ ID NO: 239607 - DNA, 25 bp, Probe sequence
ttgttaatgatgaaccagtcacagt

SEQ ID NO: 239608 - DNA, 25 bp, Probe sequence
atttattttggtttagctacatcat

SEQ ID NO: 239609 - DNA, 25 bp, Probe sequence
atatcgatccagcagtggctagtgg

SEQ ID NO: 239610 - DNA, 25 bp, Probe sequence
atatcgattcgactaatgattcaat

SEQ ID NO: 239611 - DNA, 25 bp, Probe sequence
aacttgtgcgatgacggtggggacg

SEQ ID NO: 239612 - DNA, 25 bp, Probe sequence
atcatcagccacttttagcattaat

SEQ ID NO: 239613 - DNA, 25 bp, Probe sequence
agccgtttcagttcgtaacattacg

SEQ ID NO: 239614 - DNA, 25 bp, Probe sequence
atgacgacggagtatttatcactta

SEQ ID NO: 239615 - DNA, 25 bp, Probe sequence
agtgaagactactctcgtttagccg

SEQ ID NO: 239616 - DNA, 25 bp, Probe sequence
actatgatttcatggctgtacctgt

SEQ ID NO: 239617 - DNA, 25 bp, Probe sequence
aaatgtagcgctactcgcagcgttt

SEQ ID NO: 239618 - DNA, 25 bp, Probe sequence
aagcgcatacgcctgttaaagaagc

SEQ ID NO: 239619 - DNA, 25 bp, Probe sequence
aagttgctagtcttttaacattgat

SEQ ID NO: 239620 - DNA, 25 bp, Probe sequence
cactatgatgaggatacggccggcg

SEQ ID NO: 239621 - DNA, 25 bp, Probe sequence
gctacatcatttatggcttacttaa

SEQ ID NO: 239622 - DNA, 25 bp, Probe sequence
gctagtggaccatttattacaacaa

SEQ ID NO: 239623 - DNA, 25 bp, Probe sequence
gcagcgtttattcctattattagtg

SEQ ID NO: 239624 - DNA, 25 bp, Probe sequence
gaagtttaacttgtgcgatgacggt

SEQ ID NO: 239625 - DNA, 25 bp, Probe sequence
gaaatcaaagcattacttcactatg

SEQ ID NO: 239626 - DNA, 25 bp, Probe sequence
gacgttatggatgaagaggctagtg

SEQ ID NO: 239627 - DNA, 25 bp, Probe sequence
gacgaccaagaagatgttgctcaag

SEQ ID NO: 239628 - DNA, 25 bp, Probe sequence
gagatgaatttctagcattacacac

SEQ ID NO: 239629 - DNA, 25 bp, Probe sequence
gaggctagtgaagactactctcgtt

SEQ ID NO: 239630 - DNA, 25 bp, Probe sequence
gatgacgatgaatatgagttgctat

SEQ ID NO: 239631 - DNA, 25 bp, Probe sequence
gattactgcgacaattttagggaga

SEQ ID NO: 239632 - DNA, 25 bp, Probe sequence
gttgcaatatatcatcagccacttt

SEQ ID NO: 239633 - DNA, 25 bp, Probe sequence
gtaggttcgatgattccattattga

SEQ ID NO: 239634 - DNA, 25 bp, Probe sequence
gtgtgaatgtagcagacgaccaaga

SEQ ID NO: 239635 - DNA, 25 bp, Probe sequence
ggtggggacgtttgtaggttcgatg

SEQ ID NO: 239636 - DNA, 25 bp, Probe sequence
ggtacacaatctttagccgtttcag

SEQ ID NO: 239637 - DNA, 25 bp, Probe sequence
ggtatgtcaggaaattcaggtacac

SEQ ID NO: 239638 - DNA, 25 bp, Probe sequence
ggctgtacctgttatagattaccaa

SEQ ID NO: 239639 - DNA, 25 bp, Probe sequence
tacggccggcggtattatgacgacg

SEQ ID NO: 239640 - DNA, 25 bp, Probe sequence
tactcgcagcgtttattcctattat

SEQ ID NO: 239641 - DNA, 25 bp, Probe sequence
tttatcacttaaagcgcatacgcct

SEQ ID NO: 239642 - DNA, 25 bp, Probe sequence
tatttccttaggcgtagttgttcca

SEQ ID NO: 239643 - DNA, 25 bp, Probe sequence
attccagtcatgtttattcgacgtt

SEQ ID NO: 239644 - DNA, 25 bp, Probe sequence
attaacatcaacattatcgctcgtg

SEQ ID NO: 239645 - DNA, 25 bp, Probe sequence
attacatgtgtattcgttccgatta

SEQ ID NO: 239646 - DNA, 25 bp, Probe sequence
attttaagcgcagtcattacatgtg

SEQ ID NO: 239647 - DNA, 25 bp, Probe sequence
atttcttgccagttgttgttgcaga

SEQ ID NO: 239648 - DNA, 25 bp, Probe sequence
atcaattaacgattcctatagcgca

SEQ ID NO: 239649 - DNA, 25 bp, Probe sequence
atgaatcctcaattccagggcatct

SEQ ID NO: 239650 - DNA, 25 bp, Probe sequence
atgagtcgattgttccgcatggaga

SEQ ID NO: 239651 - DNA, 25 bp, Probe sequence
atgacgtgacattatattatcgcaa

SEQ ID NO: 239652 - DNA, 25 bp, Probe sequence
agggcaatttatcctattagtagca

SEQ ID NO: 239653 - DNA, 25 bp, Probe sequence
aggtgcattcttagcaggtgtcgtt

SEQ ID NO: 239654 - DNA, 25 bp, Probe sequence
agttgttttcacagcaatttcatat

SEQ ID NO: 239655 - DNA, 25 bp, Probe sequence
aactgtttccagttccagatgagtt

SEQ ID NO: 239656 - DNA, 25 bp, Probe sequence
aagacttgagtgatcgtcgtcaatt

SEQ ID NO: 239657 - DNA, 25 bp, Probe sequence
aatcaatggtcaaggcggcagtaca

SEQ ID NO: 239658 - DNA, 25 bp, Probe sequence
caattacgtaatttcccattcggag

SEQ ID NO: 239659 - DNA, 25 bp, Probe sequence
catcttcgtgcgtattatccgtaat

SEQ ID NO: 239660 - DNA, 25 bp, Probe sequence
cggaggagacatcatcttcgtgcgt

SEQ ID NO: 239661 - DNA, 25 bp, Probe sequence
cctagcagagggagttggcgcagaa

SEQ ID NO: 239662 - DNA, 25 bp, Probe sequence
gcaggtgtcgttgtttcattattaa

SEQ ID NO: 239663 - DNA, 25 bp, Probe sequence
gaacgactaggtctgtttgaccgag

SEQ ID NO: 239664 - DNA, 25 bp, Probe sequence
gataaacgcgcacgtcaaggacaaa

SEQ ID NO: 239665 - DNA, 25 bp, Probe sequence
gatcgcttaattgttaccggtgcta

SEQ ID NO: 239666 - DNA, 25 bp, Probe sequence
gattatttcgattcttttagcgtat

SEQ ID NO: 239667 - DNA, 25 bp, Probe sequence
gttgagcgtgtcatttgcagacttg

SEQ ID NO: 239668 - DNA, 25 bp, Probe sequence
gtacgacgcaaatcggtattcgtgc

SEQ ID NO: 239669 - DNA, 25 bp, Probe sequence
ggtcattatcatttcaactatttcc

SEQ ID NO: 239670 - DNA, 25 bp, Probe sequence
tgcatcagcatttttattaacatca

SEQ ID NO: 239671 - DNA, 25 bp, Probe sequence
tccagggcatcttaatctagcgtta

SEQ ID NO: 239672 - DNA, 25 bp, Probe sequence
tctagcgttaactgtatttgcattt

SEQ ID NO: 239673 - DNA, 25 bp, Probe sequence
ttatcgctcgtgatagctgcagcca

SEQ ID NO: 239674 - DNA, 25 bp, Probe sequence
tttagcagcgtttttaactccaata

SEQ ID NO: 239675 - DNA, 25 bp, Probe sequence
ttgaccgagacatagttgtttgtgc

SEQ ID NO: 239676 - DNA, 25 bp, Probe sequence
attcatgtagatagcggattccacg

SEQ ID NO: 239677 - DNA, 25 bp, Probe sequence
atcaaccagaagcgcacttatatca

SEQ ID NO: 239678 - DNA, 25 bp, Probe sequence
gtgcaaaaggtgtgggtggtttcaa

SEQ ID NO: 239679 - DNA, 25 bp, Probe sequence
atgtgatgggtgttgctaaagcgag

SEQ ID NO: 239680 - DNA, 25 bp, Probe sequence
aggtggtagcattgttgcaacaaca

SEQ ID NO: 239681 - DNA, 25 bp, Probe sequence
agaacgtagccgtaaagagcttgaa

SEQ ID NO: 239682 - DNA, 25 bp, Probe sequence
agctcaagacattagttcttactca

SEQ ID NO: 239683 - DNA, 25 bp, Probe sequence
aatatttagcattagacttaggtcc

SEQ ID NO: 239684 - DNA, 25 bp, Probe sequence
aattaaatcaaccagaagcgcactt

SEQ ID NO: 239685 - DNA, 25 bp, Probe sequence
cattcaatcgcatttgctaatatgg

SEQ ID NO: 239686 - DNA, 25 bp, Probe sequence
gccagaaggtggtagcattgttgca

SEQ ID NO: 239687 - DNA, 25 bp, Probe sequence
gctaatatggaagacttacgcggac

SEQ ID NO: 239688 - DNA, 25 bp, Probe sequence
gcttttggtgtcgctaaagttttag

SEQ ID NO: 239689 - DNA, 25 bp, Probe sequence
gcaacaacatatttaggtggcgaat

SEQ ID NO: 239690 - DNA, 25 bp, Probe sequence
gaagagcgtgcacctttaaaacgta

SEQ ID NO: 239691 - DNA, 25 bp, Probe sequence
gaagcgcacttatatcaaattgatg

SEQ ID NO: 239692 - DNA, 25 bp, Probe sequence
gaaatcgaagagcgtgcacctttaa

SEQ ID NO: 239693 - DNA, 25 bp, Probe sequence
gagcaaattggtaaagatgttggca

SEQ ID NO: 239694 - DNA, 25 bp, Probe sequence
gatggtgtatatcattcaatcgcat

SEQ ID NO: 239695 - DNA, 25 bp, Probe sequence
gttattaatggttttgagcaaattg

SEQ ID NO: 239696 - DNA, 25 bp, Probe sequence
gtatatcattcaatcgcatttgcta

SEQ ID NO: 239697 - DNA, 25 bp, Probe sequence
gtagatagcggattccacgcaatta

SEQ ID NO: 239698 - DNA, 25 bp, Probe sequence
gtagtattgcttttggtgtcgctaa

SEQ ID NO: 239699 - DNA, 25 bp, Probe sequence
gtccaatccgtacattaagtgcaaa

SEQ ID NO: 239700 - DNA, 25 bp, Probe sequence
gtgctaaattagtatttacttaccg

SEQ ID NO: 239701 - DNA, 25 bp, Probe sequence
gtggtttcaatacaattcttaaaga

SEQ ID NO: 239702 - DNA, 25 bp, Probe sequence
gtgggtggtttcaatacaattctta

SEQ ID NO: 239703 - DNA, 25 bp, Probe sequence
gtggcgttacaggtgaaaatattca

SEQ ID NO: 239704 - DNA, 25 bp, Probe sequence
gggaatcgctaataagcgtagtatt

SEQ ID NO: 239705 - DNA, 25 bp, Probe sequence
taaagttttagatcaattaggtgct

SEQ ID NO: 239706 - DNA, 25 bp, Probe sequence
tagcggattccacgcaattaaataa

SEQ ID NO: 239707 - DNA, 25 bp, Probe sequence
taggtggcgaattcgcagttcaaaa

SEQ ID NO: 239708 - DNA, 25 bp, Probe sequence
ttatcaagtggcgttacaggtgaaa

SEQ ID NO: 239709 - DNA, 25 bp, Probe sequence
tattcgcgttaatgcaatttcagct

SEQ ID NO: 239710 - DNA, 25 bp, Probe sequence
attacctaatgctgtcttttggttg

SEQ ID NO: 239711 - DNA, 25 bp, Probe sequence
attttgtcgtactactacattacag

SEQ ID NO: 239712 - DNA, 25 bp, Probe sequence
atgcgattcatgttccacaatggtt

SEQ ID NO: 239713 - DNA, 25 bp, Probe sequence
actgcgatgtatgcacaagccggca

SEQ ID NO: 239714 - DNA, 25 bp, Probe sequence
aagccggcattgataaagcgttcca

SEQ ID NO: 239715 - DNA, 25 bp, Probe sequence
aagcgttccatggcagtggttatca

SEQ ID NO: 239716 - DNA, 25 bp, Probe sequence
aagcgatagccatgtctttagcagg

SEQ ID NO: 239717 - DNA, 25 bp, Probe sequence
aatgcagtttatcaacctgatccga

SEQ ID NO: 239718 - DNA, 25 bp, Probe sequence
aatctgcttttggtggtatcgttgg

SEQ ID NO: 239719 - DNA, 25 bp, Probe sequence
caatttgatcctactttctctggcg

SEQ ID NO: 239720 - DNA, 25 bp, Probe sequence
cacacgcagcagcggcagcagaagt

SEQ ID NO: 239721 - DNA, 25 bp, Probe sequence
ctcagtaggtctattgcttcctggt

SEQ ID NO: 239722 - DNA, 25 bp, Probe sequence
ctcgtgtgattattttgttcgctac

SEQ ID NO: 239723 - DNA, 25 bp, Probe sequence
gctttattcttctttgcatttacta

SEQ ID NO: 239724 - DNA, 25 bp, Probe sequence
gcttcctggtgtgcaatctaacgct

SEQ ID NO: 239725 - DNA, 25 bp, Probe sequence
gcaacagccgttgtaccatttatgg

SEQ ID NO: 239726 - DNA, 25 bp, Probe sequence
gaataccgtggtggaccagcgtatt

SEQ ID NO: 239727 - DNA, 25 bp, Probe sequence
gaagtgccagcgttatttgcattaa

SEQ ID NO: 239728 - DNA, 25 bp, Probe sequence
ggtgtaggtctaatggcttggttaa

SEQ ID NO: 239729 - DNA, 25 bp, Probe sequence
ggtgtgctatttacattgcgtatgc

SEQ ID NO: 239730 - DNA, 25 bp, Probe sequence
ggtttgctaattactggtgtgctat

SEQ ID NO: 239731 - DNA, 25 bp, Probe sequence
ggttcgtactttattgcatttgctt

SEQ ID NO: 239732 - DNA, 25 bp, Probe sequence
ggaggacctggtgcagtattttgga

SEQ ID NO: 239733 - DNA, 25 bp, Probe sequence
ggcagcagaagtatcacatccaagt

SEQ ID NO: 239734 - DNA, 25 bp, Probe sequence
ggctggtcaaggtacaggtccacac

SEQ ID NO: 239735 - DNA, 25 bp, Probe sequence
tggctgtcattatcatttgtatcaa

SEQ ID NO: 239736 - DNA, 25 bp, Probe sequence
tgttcgctacattttacggtgcagt

SEQ ID NO: 239737 - DNA, 25 bp, Probe sequence
tgcgaatggcacaccgcatttaatt

SEQ ID NO: 239738 - DNA, 25 bp, Probe sequence
taatattgtcggtgtatctactgca

SEQ ID NO: 239739 - DNA, 25 bp, Probe sequence
tactttctctggcgtaggttcgtac

SEQ ID NO: 239740 - DNA, 25 bp, Probe sequence
tactgcaactgctctgattatactt

SEQ ID NO: 239741 - DNA, 25 bp, Probe sequence
tagcatgggcattcggtgatttagg

SEQ ID NO: 239742 - DNA, 25 bp, Probe sequence
tttggattttacataagcctgccgt

SEQ ID NO: 239743 - DNA, 25 bp, Probe sequence
ttagcaggcagggttggtacaggta

SEQ ID NO: 239744 - DNA, 25 bp, Probe sequence
attaacacacccaagatattataaa

SEQ ID NO: 239745 - DNA, 25 bp, Probe sequence
ataaaacatcacaaaaacaccacta

SEQ ID NO: 239746 - DNA, 25 bp, Probe sequence
atcacaaaaacaccactatctaatt

SEQ ID NO: 239747 - DNA, 25 bp, Probe sequence
agtattaacacacccaagatattat

SEQ ID NO: 239748 - DNA, 25 bp, Probe sequence
accactatctaatttatctcaataa

SEQ ID NO: 239749 - DNA, 25 bp, Probe sequence
acatcacaaaaacaccactatctaa

SEQ ID NO: 239750 - DNA, 25 bp, Probe sequence
acaccactatctaatttatctcaat

SEQ ID NO: 239751 - DNA, 25 bp, Probe sequence
acacacccaagatattataaaacat

SEQ ID NO: 239752 - DNA, 25 bp, Probe sequence
acaaaaacaccactatctaatttat

SEQ ID NO: 239753 - DNA, 25 bp, Probe sequence
aaacatcacaaaaacaccactatct

SEQ ID NO: 239754 - DNA, 25 bp, Probe sequence
aaacaccactatctaatttatctca

SEQ ID NO: 239755 - DNA, 25 bp, Probe sequence
aaaaattcacaaagttatctcattt

SEQ ID NO: 239756 - DNA, 25 bp, Probe sequence
aaaacatcacaaaaacaccactatc

SEQ ID NO: 239757 - DNA, 25 bp, Probe sequence
aaaaacaccactatctaatttatct

SEQ ID NO: 239758 - DNA, 25 bp, Probe sequence
aaaacaccactatctaatttatctc

SEQ ID NO: 239759 - DNA, 25 bp, Probe sequence
aaaattcacaaagttatctcatttt

SEQ ID NO: 239760 - DNA, 25 bp, Probe sequence
aacacacccaagatattataaaaca

SEQ ID NO: 239761 - DNA, 25 bp, Probe sequence
aacaccactatctaatttatctcaa

SEQ ID NO: 239762 - DNA, 25 bp, Probe sequence
aacatcacaaaaacaccactatcta

SEQ ID NO: 239763 - DNA, 25 bp, Probe sequence
caaaaacaccactatctaatttatc

SEQ ID NO: 239764 - DNA, 25 bp, Probe sequence
cacaaaaacaccactatctaattta

SEQ ID NO: 239765 - DNA, 25 bp, Probe sequence
caccactatctaatttatctcaata

SEQ ID NO: 239766 - DNA, 25 bp, Probe sequence
catcacaaaaacaccactatctaat

SEQ ID NO: 239767 - DNA, 25 bp, Probe sequence
ccactatctaatttatctcaataaa

SEQ ID NO: 239768 - DNA, 25 bp, Probe sequence
gtattaacacacccaagatattata

SEQ ID NO: 239769 - DNA, 25 bp, Probe sequence
tcacaaaaacaccactatctaattt

SEQ ID NO: 239770 - DNA, 25 bp, Probe sequence
taacacacccaagatattataaaac

SEQ ID NO: 239771 - DNA, 25 bp, Probe sequence
taaaacatcacaaaaacaccactat

SEQ ID NO: 239772 - DNA, 25 bp, Probe sequence
taaaaattcacaaagttatctcatt

SEQ ID NO: 239773 - DNA, 25 bp, Probe sequence
tagtattaacacacccaagatatta

SEQ ID NO: 239774 - DNA, 25 bp, Probe sequence
tataaaacatcacaaaaacaccact

SEQ ID NO: 239775 - DNA, 25 bp, Probe sequence
tattaacacacccaagatattataa

SEQ ID NO: 239776 - DNA, 25 bp, Probe sequence
ttatctcaataaaaattcacaaagt

SEQ ID NO: 239777 - DNA, 25 bp, Probe sequence
ttaacacacccaagatattataaaa

SEQ ID NO: 239778 - DNA, 25 bp, Probe sequence
gtttcgggagaatacaacgtacata

SEQ ID NO: 239779 - DNA, 25 bp, Probe sequence
attgctgtcagatatattattgtat

SEQ ID NO: 239780 - DNA, 25 bp, Probe sequence
atttaactattcaatcagtcggtaa

SEQ ID NO: 239781 - DNA, 25 bp, Probe sequence
ataacttattattacgatgaatttg

SEQ ID NO: 239782 - DNA, 25 bp, Probe sequence
agcgggtagtattgccttattaacg

SEQ ID NO: 239783 - DNA, 25 bp, Probe sequence
aacaccgaatagagaattagctgaa

SEQ ID NO: 239784 - DNA, 25 bp, Probe sequence
aatgtcattctttgctttgacggat

SEQ ID NO: 239785 - DNA, 25 bp, Probe sequence
cactgaaagtaggtaatgcaaggtt

SEQ ID NO: 239786 - DNA, 25 bp, Probe sequence
cagtcggtaaagaaatattgccatt

SEQ ID NO: 239787 - DNA, 25 bp, Probe sequence
catccacaaggaagtcgttctcatt

SEQ ID NO: 239788 - DNA, 25 bp, Probe sequence
ctcgacgttttctacactgaaagta

SEQ ID NO: 239789 - DNA, 25 bp, Probe sequence
cgatttttagtcgtgtagcaatgtt

SEQ ID NO: 239790 - DNA, 25 bp, Probe sequence
ccaacaaatggtaagcgtgccgatt

SEQ ID NO: 239791 - DNA, 25 bp, Probe sequence
ccagaatcttataatcaacttgtta

SEQ ID NO: 239792 - DNA, 25 bp, Probe sequence
gcaatgttaagtccacattcagatg

SEQ ID NO: 239793 - DNA, 25 bp, Probe sequence
gaatttcatccacaaggaagtcgtt

SEQ ID NO: 239794 - DNA, 25 bp, Probe sequence
gaatcgttaatcaaagaagcgcgta

SEQ ID NO: 239795 - DNA, 25 bp, Probe sequence
gaagcgcgtattgatgatgcgatca

SEQ ID NO: 239796 - DNA, 25 bp, Probe sequence
gacaatttggcatgtcattggtcta

SEQ ID NO: 239797 - DNA, 25 bp, Probe sequence
gatagtttagcgggtagtattgcct

SEQ ID NO: 239798 - DNA, 25 bp, Probe sequence
gattggaaaccattgctgtcagata

SEQ ID NO: 239799 - DNA, 25 bp, Probe sequence
gtattgccttattaacggcgttgac

SEQ ID NO: 239800 - DNA, 25 bp, Probe sequence
gtaagcgtgccgatttcttaacacc

SEQ ID NO: 239801 - DNA, 25 bp, Probe sequence
gtcgtgtagcaatgttaagtccaca

SEQ ID NO: 239802 - DNA, 25 bp, Probe sequence
gtcgttctcatttaactattcaatc

SEQ ID NO: 239803 - DNA, 25 bp, Probe sequence
gtgccgatttcttaacaccgaatag

SEQ ID NO: 239804 - DNA, 25 bp, Probe sequence
ggattccattatgaagacgttgata

SEQ ID NO: 239805 - DNA, 25 bp, Probe sequence
ggaagtcgttctcatttaactattc

SEQ ID NO: 239806 - DNA, 25 bp, Probe sequence
tgctttgacggattagattttttac

SEQ ID NO: 239807 - DNA, 25 bp, Probe sequence
tattaacggcgttgacctatccaac

SEQ ID NO: 239808 - DNA, 25 bp, Probe sequence
tattgccatttattgactcgacgtt

SEQ ID NO: 239809 - DNA, 25 bp, Probe sequence
ttgactcgacgttttctacactgaa

SEQ ID NO: 239810 - DNA, 25 bp, Probe sequence
ttgacctatccaacgatttttagtc

SEQ ID NO: 239811 - DNA, 25 bp, Probe sequence
ttggcatgtcattggtctagatgaa

SEQ ID NO: 239812 - DNA, 25 bp, Probe sequence
atgtgatttactttaaagttgcgaa

SEQ ID NO: 239813 - DNA, 25 bp, Probe sequence
agttgcgaagacggacgacttagaa

SEQ ID NO: 239814 - DNA, 25 bp, Probe sequence
agtattcacgaattaaaccacatgt

SEQ ID NO: 239815 - DNA, 25 bp, Probe sequence
agatggtgatttagattctgtcatt

SEQ ID NO: 239816 - DNA, 25 bp, Probe sequence
agaattgtttaatcgctttaatgga

SEQ ID NO: 239817 - DNA, 25 bp, Probe sequence
accaacgaacaatgtgatttacttt

SEQ ID NO: 239818 - DNA, 25 bp, Probe sequence
acgttttgacgatgacgaagataaa

SEQ ID NO: 239819 - DNA, 25 bp, Probe sequence
actttgttacgttttgacgatgacg

SEQ ID NO: 239820 - DNA, 25 bp, Probe sequence
aagcttctagcttcaaaccaacgaa

SEQ ID NO: 239821 - DNA, 25 bp, Probe sequence
aagttcatgctacaaaagcttctag

SEQ ID NO: 239822 - DNA, 25 bp, Probe sequence
caagaagcggtggattcttaccgta

SEQ ID NO: 239823 - DNA, 25 bp, Probe sequence
ccatcaaagtcatttcaagaagcgg

SEQ ID NO: 239824 - DNA, 25 bp, Probe sequence
gccacactttacaatagcacaagga

SEQ ID NO: 239825 - DNA, 25 bp, Probe sequence
gcttctagcttcaaaccaacgaaca

SEQ ID NO: 239826 - DNA, 25 bp, Probe sequence
gcattaattccatcaaagtcatttc

SEQ ID NO: 239827 - DNA, 25 bp, Probe sequence
gaattcgaagatatttttggtcaag

SEQ ID NO: 239828 - DNA, 25 bp, Probe sequence
gaattaaaccacatgtgacaattaa

SEQ ID NO: 239829 - DNA, 25 bp, Probe sequence
gaagatttctatggagaagctgaac

SEQ ID NO: 239830 - DNA, 25 bp, Probe sequence
gaagctgaacatgtttttgtgccac

SEQ ID NO: 239831 - DNA, 25 bp, Probe sequence
gaacaggttagagctcgtattaatg

SEQ ID NO: 239832 - DNA, 25 bp, Probe sequence
gacggacgacttagaagaattgttt

SEQ ID NO: 239833 - DNA, 25 bp, Probe sequence
gagctcgtattaatggtataccagc

SEQ ID NO: 239834 - DNA, 25 bp, Probe sequence
gtataccagcagtagaagttcatgc

SEQ ID NO: 239835 - DNA, 25 bp, Probe sequence
gtagcattagctggggtagaccata

SEQ ID NO: 239836 - DNA, 25 bp, Probe sequence
gtcattgaacaggttagagctcgta

SEQ ID NO: 239837 - DNA, 25 bp, Probe sequence
ggtggattcttaccgtaaaagatat

SEQ ID NO: 239838 - DNA, 25 bp, Probe sequence
ggtgatttagattctgtcattgaac

SEQ ID NO: 239839 - DNA, 25 bp, Probe sequence
ggactatctagccaagaattcgaag

SEQ ID NO: 239840 - DNA, 25 bp, Probe sequence
tgaacatgtttttgtgccacacttt

SEQ ID NO: 239841 - DNA, 25 bp, Probe sequence
tagcacaaggactatctagccaaga

SEQ ID NO: 239842 - DNA, 25 bp, Probe sequence
tttttggtcaagtagcattagctgg

SEQ ID NO: 239843 - DNA, 25 bp, Probe sequence
ttttgtgccacactttacaatagca

SEQ ID NO: 239844 - DNA, 25 bp, Probe sequence
ttatcgatgaattaactttgttacg

SEQ ID NO: 239845 - DNA, 25 bp, Probe sequence
ttaggattagcattaattccatcaa

SEQ ID NO: 239846 - DNA, 25 bp, Probe sequence
aaatggggcgagttgcctgtcgtgc

SEQ ID NO: 239847 - DNA, 25 bp, Probe sequence
tacaaaaagttcggtggtggccctg

SEQ ID NO: 239848 - DNA, 25 bp, Probe sequence
agtgacatttggtgtaacgggtaca

SEQ ID NO: 239849 - DNA, 25 bp, Probe sequence
attaaggtgccacatcgagatgatt

SEQ ID NO: 239850 - DNA, 25 bp, Probe sequence
atcactactgattcacgtacagcga

SEQ ID NO: 239851 - DNA, 25 bp, Probe sequence
atgacgattcattttctgagtattt

SEQ ID NO: 239852 - DNA, 25 bp, Probe sequence
agctgagcctggggatactgtcgtt

SEQ ID NO: 239853 - DNA, 25 bp, Probe sequence
agccatggcttagtattaggacgac

SEQ ID NO: 239854 - DNA, 25 bp, Probe sequence
agcgtgtattgggttctttagaaca

SEQ ID NO: 239855 - DNA, 25 bp, Probe sequence
acggacacgcgaagtctttattgtt

SEQ ID NO: 239856 - DNA, 25 bp, Probe sequence
aaatacgacaccagaaacagtttct

SEQ ID NO: 239857 - DNA, 25 bp, Probe sequence
aacacaagaccatttagattttcat

SEQ ID NO: 239858 - DNA, 25 bp, Probe sequence
cacaagtggttgtgccggacacatt

SEQ ID NO: 239859 - DNA, 25 bp, Probe sequence
catgcaattgacatagctgagcctg

SEQ ID NO: 239860 - DNA, 25 bp, Probe sequence
ctgtcgtgcagattatgtcattttc

SEQ ID NO: 239861 - DNA, 25 bp, Probe sequence
gctagtattctagcacacacattat

SEQ ID NO: 239862 - DNA, 25 bp, Probe sequence
gcatttttgtcgcttcagttggata

SEQ ID NO: 239863 - DNA, 25 bp, Probe sequence
gcaatgattgcggtgtggagtaaag

SEQ ID NO: 239864 - DNA, 25 bp, Probe sequence
gaattagccaaaggtgcaacacatc

SEQ ID NO: 239865 - DNA, 25 bp, Probe sequence
gaatctttacaaggtgtcagctttg

SEQ ID NO: 239866 - DNA, 25 bp, Probe sequence
gaagcagttgatgcaggcgctgaat

SEQ ID NO: 239867 - DNA, 25 bp, Probe sequence
gagaaccatatcaaatcatgccagg

SEQ ID NO: 239868 - DNA, 25 bp, Probe sequence
gataatccggcaaatgatgacccga

SEQ ID NO: 239869 - DNA, 25 bp, Probe sequence
gattatccgagtcatcagttagtga

SEQ ID NO: 239870 - DNA, 25 bp, Probe sequence
gattatgcacatacagctgatggta

SEQ ID NO: 239871 - DNA, 25 bp, Probe sequence
gtatggcaggcgaacgtgatttaac

SEQ ID NO: 239872 - DNA, 25 bp, Probe sequence
gtcagctttgattttgtaacgcctt

SEQ ID NO: 239873 - DNA, 25 bp, Probe sequence
tgtcattttcacaccggataatccg

SEQ ID NO: 239874 - DNA, 25 bp, Probe sequence
gtgccggacacattaagagtagcta

SEQ ID NO: 239875 - DNA, 25 bp, Probe sequence
ggggatactgtcgttttagcatcaa

SEQ ID NO: 239876 - DNA, 25 bp, Probe sequence
tctattgcgacgatgattcatttaa

SEQ ID NO: 239877 - DNA, 25 bp, Probe sequence
taattggccttgaagcagcttacaa

SEQ ID NO: 239878 - DNA, 25 bp, Probe sequence
taatcgatgcagtacagccttttgt

SEQ ID NO: 239879 - DNA, 25 bp, Probe sequence
tagatccttcgttacctattgattt

SEQ ID NO: 239880 - DNA, 25 bp, Probe sequence
attgctataccagattggttttggt

SEQ ID NO: 239881 - DNA, 25 bp, Probe sequence
ataccagattggttttggtcatatc

SEQ ID NO: 239882 - DNA, 25 bp, Probe sequence
atcacaactaacagattggatagaa

SEQ ID NO: 239883 - DNA, 25 bp, Probe sequence
atcgattgcatcacaactaacagat

SEQ ID NO: 239884 - DNA, 25 bp, Probe sequence
agcaatactcatgcaattgtttgtt

SEQ ID NO: 239885 - DNA, 25 bp, Probe sequence
accagataatcattgctataccaga

SEQ ID NO: 239886 - DNA, 25 bp, Probe sequence
aacttgttttgaagcaatactcatg

SEQ ID NO: 239887 - DNA, 25 bp, Probe sequence
aatcattgctataccagattggttt

SEQ ID NO: 239888 - DNA, 25 bp, Probe sequence
aatactcatgcaattgtttgttttt

SEQ ID NO: 239889 - DNA, 25 bp, Probe sequence
cagaatcgattgcatcacaactaac

SEQ ID NO: 239890 - DNA, 25 bp, Probe sequence
ccagattggttttggtcatatcaga

SEQ ID NO: 239891 - DNA, 25 bp, Probe sequence
gctataccagattggttttggtcat

SEQ ID NO: 239892 - DNA, 25 bp, Probe sequence
gcatcacaactaacagattggatag

SEQ ID NO: 239893 - DNA, 25 bp, Probe sequence
gaatcgattgcatcacaactaacag

SEQ ID NO: 239894 - DNA, 25 bp, Probe sequence
gaaggtaaaactattgatgtttatt

SEQ ID NO: 239895 - DNA, 25 bp, Probe sequence
gaagaggcagaatcgattgcatcac

SEQ ID NO: 239896 - DNA, 25 bp, Probe sequence
gaagaggaagaggcagaatcgattg

SEQ ID NO: 239897 - DNA, 25 bp, Probe sequence
gaagcaatactcatgcaattgtttg

SEQ ID NO: 239898 - DNA, 25 bp, Probe sequence
gaaacttgttttgaagcaatactca

SEQ ID NO: 239899 - DNA, 25 bp, Probe sequence
gaggcagaatcgattgcatcacaac

SEQ ID NO: 239900 - DNA, 25 bp, Probe sequence
gatgtttatttattcgaagcattaa

SEQ ID NO: 239901 - DNA, 25 bp, Probe sequence
gataatcattgctataccagattgg

SEQ ID NO: 239902 - DNA, 25 bp, Probe sequence
gattgcatcacaactaacagattgg

SEQ ID NO: 239903 - DNA, 25 bp, Probe sequence
gattggttttggtcatatcagatgg

SEQ ID NO: 239904 - DNA, 25 bp, Probe sequence
gttttggtcatatcagatggcaatg

SEQ ID NO: 239905 - DNA, 25 bp, Probe sequence
gttttgaagcaatactcatgcaatt

SEQ ID NO: 239906 - DNA, 25 bp, Probe sequence
ggtcatatcagatggcaatgacatt

SEQ ID NO: 239907 - DNA, 25 bp, Probe sequence
ggttttggtcatatcagatggcaat

SEQ ID NO: 239908 - DNA, 25 bp, Probe sequence
ggcagaatcgattgcatcacaacta

SEQ ID NO: 239909 - DNA, 25 bp, Probe sequence
tcgattgcatcacaactaacagatt

SEQ ID NO: 239910 - DNA, 25 bp, Probe sequence
tcatgcaattgtttgtttttaaaga

SEQ ID NO: 239911 - DNA, 25 bp, Probe sequence
tactcatgcaattgtttgtttttaa

SEQ ID NO: 239912 - DNA, 25 bp, Probe sequence
ttgcatcacaactaacagattggat

SEQ ID NO: 239913 - DNA, 25 bp, Probe sequence
ttggttttggtcatatcagatggca

SEQ ID NO: 239914 - DNA, 25 bp, Probe sequence
attcctcaaggtatacaatacgagt

SEQ ID NO: 239915 - DNA, 25 bp, Probe sequence
ataaggttcaaatccctacagtgga

SEQ ID NO: 239916 - DNA, 25 bp, Probe sequence
agtacagaggattttatagattcaa

SEQ ID NO: 239917 - DNA, 25 bp, Probe sequence
agagattttagaaccatatgatgat

SEQ ID NO: 239918 - DNA, 25 bp, Probe sequence
agaatcatctaaatactggtcacta

SEQ ID NO: 239919 - DNA, 25 bp, Probe sequence
aaatccctacagtggataggttgaa

SEQ ID NO: 239920 - DNA, 25 bp, Probe sequence
aaatactggtcactagaaatggatg

SEQ ID NO: 239921 - DNA, 25 bp, Probe sequence
aagatggttttgtgtttggtggata

SEQ ID NO: 239922 - DNA, 25 bp, Probe sequence
aatacgagtatgatgaaggaatgcc

SEQ ID NO: 239923 - DNA, 25 bp, Probe sequence
ggttcaaatccctacagtggatagg

SEQ ID NO: 239924 - DNA, 25 bp, Probe sequence
gaaggaatgccagaatcatctaaat

SEQ ID NO: 239925 - DNA, 25 bp, Probe sequence
gaagatttccaagttgaagaagtaa

SEQ ID NO: 239926 - DNA, 25 bp, Probe sequence
gaagctatttgtgatgaagcaatta

SEQ ID NO: 239927 - DNA, 25 bp, Probe sequence
gtacgaaattcctcaaggtatacaa

SEQ ID NO: 239928 - DNA, 25 bp, Probe sequence
gaaatggatgaagacctttatttta

SEQ ID NO: 239929 - DNA, 25 bp, Probe sequence
gattataaggttcaaatccctacag

SEQ ID NO: 239930 - DNA, 25 bp, Probe sequence
gattacgaagatttccaagttgaag

SEQ ID NO: 239931 - DNA, 25 bp, Probe sequence
gattggcctagtttcgttgattacg

SEQ ID NO: 239932 - DNA, 25 bp, Probe sequence
gtaatgagtttattagggttggaca

SEQ ID NO: 239933 - DNA, 25 bp, Probe sequence
ggcctagtttcgttgattacgaaga

SEQ ID NO: 239934 - DNA, 25 bp, Probe sequence
ggttggacataccatttgggagttc

SEQ ID NO: 239935 - DNA, 25 bp, Probe sequence
ggttttgtgtttggtggatatatag

SEQ ID NO: 239936 - DNA, 25 bp, Probe sequence
ggattttatagattcaattatggat

SEQ ID NO: 239937 - DNA, 25 bp, Probe sequence
ggatatatagattggcctagtttcg

SEQ ID NO: 239938 - DNA, 25 bp, Probe sequence
ggattatacgaagctatttgtgatg

SEQ ID NO: 239939 - DNA, 25 bp, Probe sequence
ggacaatagctttttagaaagccta

SEQ ID NO: 239940 - DNA, 25 bp, Probe sequence
ggacataccatttgggagttctaaa

SEQ ID NO: 239941 - DNA, 25 bp, Probe sequence
tggatgaagacctttattttattaa

SEQ ID NO: 239942 - DNA, 25 bp, Probe sequence
tgaaaagtacgaaattcctcaaggt

SEQ ID NO: 239943 - DNA, 25 bp, Probe sequence
tcgttgattacgaagatttccaagt

SEQ ID NO: 239944 - DNA, 25 bp, Probe sequence
tagggttggacataccatttgggag

SEQ ID NO: 239945 - DNA, 25 bp, Probe sequence
tctaaaaatccgtttgaattttatg

SEQ ID NO: 239946 - DNA, 25 bp, Probe sequence
tacagtggataggttgaagagttca

SEQ ID NO: 239947 - DNA, 25 bp, Probe sequence
tagattggcctagtttcgttgatta

SEQ ID NO: 239948 - DNA, 25 bp, Probe sequence
attatgcattacgcagacgctttgc

SEQ ID NO: 239949 - DNA, 25 bp, Probe sequence
atgcaaccggcgtttcatacaacta

SEQ ID NO: 239950 - DNA, 25 bp, Probe sequence
atgggatatagacctactagttcag

SEQ ID NO: 239951 - DNA, 25 bp, Probe sequence
agggacgttctatgatttttgtaag

SEQ ID NO: 239952 - DNA, 25 bp, Probe sequence
actgactacagggacgttctatgat

SEQ ID NO: 239953 - DNA, 25 bp, Probe sequence
acagcagatcgtagtttagcaattt

SEQ ID NO: 239954 - DNA, 25 bp, Probe sequence
aaagctgataaagaccgcgataatg

SEQ ID NO: 239955 - DNA, 25 bp, Probe sequence
aaaattccctactttagcaagtgat

SEQ ID NO: 239956 - DNA, 25 bp, Probe sequence
aacttttcttgcaaaacgtcttgct

SEQ ID NO: 239957 - DNA, 25 bp, Probe sequence
aacttttgctaactttgattcacgt

SEQ ID NO: 239958 - DNA, 25 bp, Probe sequence
aacgtcttgcttattcattgattgg

SEQ ID NO: 239959 - DNA, 25 bp, Probe sequence
aagtagtattttctatctttccata

SEQ ID NO: 239960 - DNA, 25 bp, Probe sequence
aatttgagattattcctatgttaga

SEQ ID NO: 239961 - DNA, 25 bp, Probe sequence
aattttgcgaattatccttcagaag

SEQ ID NO: 239962 - DNA, 25 bp, Probe sequence
tctacagggaccgcctggtgtagga

SEQ ID NO: 239963 - DNA, 25 bp, Probe sequence
gcggtgagagattttctgtacctag

SEQ ID NO: 239964 - DNA, 25 bp, Probe sequence
gaaaaactaacaggtcgacattatt

SEQ ID NO: 239965 - DNA, 25 bp, Probe sequence
gaaatgtcattctacagggaccgcc

SEQ ID NO: 239966 - DNA, 25 bp, Probe sequence
gacgctttgcgttttataatatgca

SEQ ID NO: 239967 - DNA, 25 bp, Probe sequence
gagattgttcaagacgatatgttag

SEQ ID NO: 239968 - DNA, 25 bp, Probe sequence
gagtggtttgtactggattgcacct

SEQ ID NO: 239969 - DNA, 25 bp, Probe sequence
gatatagagaccttgtggaccttat

SEQ ID NO: 239970 - DNA, 25 bp, Probe sequence
gattcacgttcaatttggtacattt

SEQ ID NO: 239971 - DNA, 25 bp, Probe sequence
gattgcacctgaaacttttgctaac

SEQ ID NO: 239972 - DNA, 25 bp, Probe sequence
gttatgagtcttggcattattcaga

SEQ ID NO: 239973 - DNA, 25 bp, Probe sequence
gtattccaacagtcaataatctgaa

SEQ ID NO: 239974 - DNA, 25 bp, Probe sequence
gtcagtttttgacagtattccaaca

SEQ ID NO: 239975 - DNA, 25 bp, Probe sequence
ggtaatggctttgttattggtcata

SEQ ID NO: 239976 - DNA, 25 bp, Probe sequence
ggacatagatccttttacaatattt

SEQ ID NO: 239977 - DNA, 25 bp, Probe sequence
tgtggaccttatttactgctgcatt

SEQ ID NO: 239978 - DNA, 25 bp, Probe sequence
tattaagtccaaaattccgtcagtt

SEQ ID NO: 239979 - DNA, 25 bp, Probe sequence
tttactgctgcattaaattttgcga

SEQ ID NO: 239980 - DNA, 25 bp, Probe sequence
ttctatctttccataatacattgta

SEQ ID NO: 239981 - DNA, 25 bp, Probe sequence
ttgatacatataaactccctaaaga

SEQ ID NO: 239982 - DNA, 25 bp, Probe sequence
atttgatttatattcagctattctt

SEQ ID NO: 239983 - DNA, 25 bp, Probe sequence
atattcagctattcttataaaaggt

SEQ ID NO: 239984 - DNA, 25 bp, Probe sequence
atctatatgctatttaatttttcaa

SEQ ID NO: 239985 - DNA, 25 bp, Probe sequence
atccattcaactaacctgtatcaaa

SEQ ID NO: 239986 - DNA, 25 bp, Probe sequence
acctgtatcaaatatttacttacgt

SEQ ID NO: 239987 - DNA, 25 bp, Probe sequence
acagttgaatgggatagttaatgat

SEQ ID NO: 239988 - DNA, 25 bp, Probe sequence
aaatgtctaattatcgatgcaaaat

SEQ ID NO: 239989 - DNA, 25 bp, Probe sequence
aaagttgatgttaagaattctatac

SEQ ID NO: 239990 - DNA, 25 bp, Probe sequence
aaagctccgaaagttattagttcat

SEQ ID NO: 239991 - DNA, 25 bp, Probe sequence
aaaagatccattcaactaacctgta

SEQ ID NO: 239992 - DNA, 25 bp, Probe sequence
aaaaggtatatcaagtcagttaaat

SEQ ID NO: 239993 - DNA, 25 bp, Probe sequence
aagtcaacgtattaattgtatttat

SEQ ID NO: 239994 - DNA, 25 bp, Probe sequence
aaggctatcagaagttagcaacaga

SEQ ID NO: 239995 - DNA, 25 bp, Probe sequence
gcttaggagttttaagtcaacgtat

SEQ ID NO: 239996 - DNA, 25 bp, Probe sequence
gcaagggacaaaatgatcttatggt

SEQ ID NO: 239997 - DNA, 25 bp, Probe sequence
gaattctatacaaggcttaggagtt

SEQ ID NO: 239998 - DNA, 25 bp, Probe sequence
gaatttccagagcttgttgtaacat

SEQ ID NO: 239999 - DNA, 25 bp, Probe sequence
gaacgataaatttcatatgagtggt

SEQ ID NO: 240000 - DNA, 25 bp, Probe sequence
gaacagacagattctctaaaagtta

SEQ ID NO: 240001 - DNA, 25 bp, Probe sequence
gaaagcaatacaggtctcaggaatg

SEQ ID NO: 240002 - DNA, 25 bp, Probe sequence
gacgaacaacaaatatctcggctat

SEQ ID NO: 240003 - DNA, 25 bp, Probe sequence
gagtggtagtcaaatcattattaag

SEQ ID NO: 240004 - DNA, 25 bp, Probe sequence
gatcttatggtatttgtagacgaac

SEQ ID NO: 240005 - DNA, 25 bp, Probe sequence
gataacgtgaatatgcttcctgtaa

SEQ ID NO: 240006 - DNA, 25 bp, Probe sequence
gttaaatagtggacttcatcatgaa

SEQ ID NO: 240007 - DNA, 25 bp, Probe sequence
gttatcttatgcatttacagtactt

SEQ ID NO: 240008 - DNA, 25 bp, Probe sequence
gtaacatcatcaaatattcaatggt

SEQ ID NO: 240009 - DNA, 25 bp, Probe sequence
gtaatacaaactgaaagcaagggac

SEQ ID NO: 240010 - DNA, 25 bp, Probe sequence
gtgaatatgcttcctgtaatgagaa

SEQ ID NO: 240011 - DNA, 25 bp, Probe sequence
ggtctcaggaatgttgttatatgct

SEQ ID NO: 240012 - DNA, 25 bp, Probe sequence
tccagagcttgttgtaacatcatca

SEQ ID NO: 240013 - DNA, 25 bp, Probe sequence
tcaatggtatcattcgtttgatcga

SEQ ID NO: 240014 - DNA, 25 bp, Probe sequence
tagatttgaactgtaattttactat

SEQ ID NO: 240015 - DNA, 25 bp, Probe sequence
tatctcggctatatgaaaaatttat

SEQ ID NO: 240016 - DNA, 25 bp, Probe sequence
atacaaattcttcatgcaattaata

SEQ ID NO: 240017 - DNA, 25 bp, Probe sequence
atcgctaaaaacctttcacttgaag

SEQ ID NO: 240018 - DNA, 25 bp, Probe sequence
atgaacttattcgtaaaatcgcttt

SEQ ID NO: 240019 - DNA, 25 bp, Probe sequence
atgattactattgattcaaagatta

SEQ ID NO: 240020 - DNA, 25 bp, Probe sequence
atgtatgttacacgagaacagcaaa

SEQ ID NO: 240021 - DNA, 25 bp, Probe sequence
agaaattacaaatgaacttattcgt

SEQ ID NO: 240022 - DNA, 25 bp, Probe sequence
agcaaatacaaattcttcatgcaat

SEQ ID NO: 240023 - DNA, 25 bp, Probe sequence
acagcaaatacaaattcttcatgca

SEQ ID NO: 240024 - DNA, 25 bp, Probe sequence
aaacctttcacttgaaggtatgtat

SEQ ID NO: 240025 - DNA, 25 bp, Probe sequence
taaaaacctttcacttgaaggtatg

SEQ ID NO: 240026 - DNA, 25 bp, Probe sequence
aacagcaaatacaaattcttcatgc

SEQ ID NO: 240027 - DNA, 25 bp, Probe sequence
aacctttcacttgaaggtatgtatg

SEQ ID NO: 240028 - DNA, 25 bp, Probe sequence
aaggtatgtatgttacacgagaaca

SEQ ID NO: 240029 - DNA, 25 bp, Probe sequence
aatacaaattcttcatgcaattaat

SEQ ID NO: 240030 - DNA, 25 bp, Probe sequence
aattcttcatgcaattaataatgag

SEQ ID NO: 240031 - DNA, 25 bp, Probe sequence
caaatcgctaaaaacctttcacttg

SEQ ID NO: 240032 - DNA, 25 bp, Probe sequence
caaatacaaattcttcatgcaatta

SEQ ID NO: 240033 - DNA, 25 bp, Probe sequence
caaattcttcatgcaattaataatg

SEQ ID NO: 240034 - DNA, 25 bp, Probe sequence
cacttgaaggtatgtatgttacacg

SEQ ID NO: 240035 - DNA, 25 bp, Probe sequence
cagcaaatacaaattcttcatgcaa

SEQ ID NO: 240036 - DNA, 25 bp, Probe sequence
cttgaaggtatgtatgttacacgag

SEQ ID NO: 240037 - DNA, 25 bp, Probe sequence
ctttcacttgaaggtatgtatgtta

SEQ ID NO: 240038 - DNA, 25 bp, Probe sequence
gcaaatacaaattcttcatgcaatt

SEQ ID NO: 240039 - DNA, 25 bp, Probe sequence
gaaggtatgtatgttacacgagaac

SEQ ID NO: 240040 - DNA, 25 bp, Probe sequence
gaacagcaaatacaaattcttcatg

SEQ ID NO: 240041 - DNA, 25 bp, Probe sequence
gttacacgagaacagcaaatacaaa

SEQ ID NO: 240042 - DNA, 25 bp, Probe sequence
gtatgtatgttacacgagaacagca

SEQ ID NO: 240043 - DNA, 25 bp, Probe sequence
gtatgttacacgagaacagcaaata

SEQ ID NO: 240044 - DNA, 25 bp, Probe sequence
ggtatgtatgttacacgagaacagc

SEQ ID NO: 240045 - DNA, 25 bp, Probe sequence
tgaacttattcgtaaaatcgctttt

SEQ ID NO: 240046 - DNA, 25 bp, Probe sequence
tcgctaaaaacctttcacttgaagg

SEQ ID NO: 240047 - DNA, 25 bp, Probe sequence
tacacgagaacagcaaatacaaatt

SEQ ID NO: 240048 - DNA, 25 bp, Probe sequence
tacaaattcttcatgcaattaataa

SEQ ID NO: 240049 - DNA, 25 bp, Probe sequence
ttcacttgaaggtatgtatgttaca

SEQ ID NO: 240050 - DNA, 25 bp, Probe sequence
attaatggcagttgacagtgctgtc

SEQ ID NO: 240051 - DNA, 25 bp, Probe sequence
atgacgatttagtattcttatttga

SEQ ID NO: 240052 - DNA, 25 bp, Probe sequence
agtttgtaaaatgcgtggtattcca

SEQ ID NO: 240053 - DNA, 25 bp, Probe sequence
agcaaaagatcacacgttcaacgtc

SEQ ID NO: 240054 - DNA, 25 bp, Probe sequence
agctttagctaactttggtgtacaa

SEQ ID NO: 240055 - DNA, 25 bp, Probe sequence
acataccctatgaattggccaattg

SEQ ID NO: 240056 - DNA, 25 bp, Probe sequence
aaattcaagccaacatggaccctaa

SEQ ID NO: 240057 - DNA, 25 bp, Probe sequence
aaagtttctttggcatcattgatag

SEQ ID NO: 240058 - DNA, 25 bp, Probe sequence
aacatggaccctaaacaccgtgata

SEQ ID NO: 240059 - DNA, 25 bp, Probe sequence
aagaaggtgcgattcaatactataa

SEQ ID NO: 240060 - DNA, 25 bp, Probe sequence
aagtaagcccgtttgatgattcatt

SEQ ID NO: 240061 - DNA, 25 bp, Probe sequence
aatttgcgacaagtgactggatgaa

SEQ ID NO: 240062 - DNA, 25 bp, Probe sequence
aattattttaggtgctgttggtcag

SEQ ID NO: 240063 - DNA, 25 bp, Probe sequence
cacgttcaacgtcatttatggcaga

SEQ ID NO: 240064 - DNA, 25 bp, Probe sequence
cctacagtttccaagatttaccaca

SEQ ID NO: 240065 - DNA, 25 bp, Probe sequence
gcgtgtcgttagtggtgcatttgaa

SEQ ID NO: 240066 - DNA, 25 bp, Probe sequence
gctgtagcaggcgatatcattggac

SEQ ID NO: 240067 - DNA, 25 bp, Probe sequence
gaattggccaattggtatgggacaa

SEQ ID NO: 240068 - DNA, 25 bp, Probe sequence
gaagaagcgggtgaagcctttgata

SEQ ID NO: 240069 - DNA, 25 bp, Probe sequence
gaagcctttgataatgacgcgctgt

SEQ ID NO: 240070 - DNA, 25 bp, Probe sequence
gaaactgtgaatcatgctgtagcag

SEQ ID NO: 240071 - DNA, 25 bp, Probe sequence
gaaagtttctgctaaaaacgtcatg

SEQ ID NO: 240072 - DNA, 25 bp, Probe sequence
gacttttgcgattatttcacatccc

SEQ ID NO: 240073 - DNA, 25 bp, Probe sequence
gagccagtaggccgtaaaattgcac

SEQ ID NO: 240074 - DNA, 25 bp, Probe sequence
gatgaacacatcaagatcgatttta

SEQ ID NO: 240075 - DNA, 25 bp, Probe sequence
gatttaccacaatttacgccagaaa

SEQ ID NO: 240076 - DNA, 25 bp, Probe sequence
gattcattttcaggatttatcttta

SEQ ID NO: 240077 - DNA, 25 bp, Probe sequence
gttgatgttgttatggagccagtag

SEQ ID NO: 240078 - DNA, 25 bp, Probe sequence
gtatttttcggttcagctttagcta

SEQ ID NO: 240079 - DNA, 25 bp, Probe sequence
gtgctgtcatggtcatagactgtgc

SEQ ID NO: 240080 - DNA, 25 bp, Probe sequence
gtggtgcatttgaacgtggtatgga

SEQ ID NO: 240081 - DNA, 25 bp, Probe sequence
ggtgctgttggtcagttacaatttg

SEQ ID NO: 240082 - DNA, 25 bp, Probe sequence
ggagacttaacacctgtatttttcg

SEQ ID NO: 240083 - DNA, 25 bp, Probe sequence
tgacgcgctgttgagtggagactta

SEQ ID NO: 240084 - DNA, 25 bp, Probe sequence
atatgtgttaactgtcccgttcaaa

SEQ ID NO: 240085 - DNA, 25 bp, Probe sequence
ataacacgcttagtttagagacgct

SEQ ID NO: 240086 - DNA, 25 bp, Probe sequence
atgaaggaggtagtttatataaatt

SEQ ID NO: 240087 - DNA, 25 bp, Probe sequence
atgggatgaaagtttctgcagaagt

SEQ ID NO: 240088 - DNA, 25 bp, Probe sequence
actgtcccgttcaaaaatatggatg

SEQ ID NO: 240089 - DNA, 25 bp, Probe sequence
acgcttagtttagagacgcttaatt

SEQ ID NO: 240090 - DNA, 25 bp, Probe sequence
acacgcttagtttagagacgcttaa

SEQ ID NO: 240091 - DNA, 25 bp, Probe sequence
acaagatataacacgcttagtttag

SEQ ID NO: 240092 - DNA, 25 bp, Probe sequence
aactgtcccgttcaaaaatatggat

SEQ ID NO: 240093 - DNA, 25 bp, Probe sequence
acaatatgtgttaactgtcccgttc

SEQ ID NO: 240094 - DNA, 25 bp, Probe sequence
aaatatggatgttcaaaatgggatg

SEQ ID NO: 240095 - DNA, 25 bp, Probe sequence
aaaacgcaataatgaaggaggtagt

SEQ ID NO: 240096 - DNA, 25 bp, Probe sequence
aaatgggatgaaagtttctgcagaa

SEQ ID NO: 240097 - DNA, 25 bp, Probe sequence
aacacgcttagtttagagacgctta

SEQ ID NO: 240098 - DNA, 25 bp, Probe sequence
aacaatatgtgttaactgtcccgtt

SEQ ID NO: 240099 - DNA, 25 bp, Probe sequence
aatacaagatataacacgcttagtt

SEQ ID NO: 240100 - DNA, 25 bp, Probe sequence
aatatgtgttaactgtcccgttcaa

SEQ ID NO: 240101 - DNA, 25 bp, Probe sequence
caatatgtgttaactgtcccgttca

SEQ ID NO: 240102 - DNA, 25 bp, Probe sequence
cacgcttagtttagagacgcttaat

SEQ ID NO: 240103 - DNA, 25 bp, Probe sequence
gcttagtttagagacgcttaattat

SEQ ID NO: 240104 - DNA, 25 bp, Probe sequence
gataatacaagatataacacgctta

SEQ ID NO: 240105 - DNA, 25 bp, Probe sequence
gatataacacgcttagtttagagac

SEQ ID NO: 240106 - DNA, 25 bp, Probe sequence
gttaactgtcccgttcaaaaatatg

SEQ ID NO: 240107 - DNA, 25 bp, Probe sequence
gtttagagacgcttaattattattt

SEQ ID NO: 240108 - DNA, 25 bp, Probe sequence
ggattagaacaatatttaaatggtg

SEQ ID NO: 240109 - DNA, 25 bp, Probe sequence
ggatgaaagtttctgcagaagtaaa

SEQ ID NO: 240110 - DNA, 25 bp, Probe sequence
tgtgttaactgtcccgttcaaaaat

SEQ ID NO: 240111 - DNA, 25 bp, Probe sequence
tgtcccgttcaaaaatatggatgtt

SEQ ID NO: 240112 - DNA, 25 bp, Probe sequence
tgttaactgtcccgttcaaaaatat

SEQ ID NO: 240113 - DNA, 25 bp, Probe sequence
taactgtcccgttcaaaaatatgga

SEQ ID NO: 240114 - DNA, 25 bp, Probe sequence
taacacgcttagtttagagacgctt

SEQ ID NO: 240115 - DNA, 25 bp, Probe sequence
tagagacgcttaattattatttaaa

SEQ ID NO: 240116 - DNA, 25 bp, Probe sequence
tatgtgttaactgtcccgttcaaaa

SEQ ID NO: 240117 - DNA, 25 bp, Probe sequence
ttaactgtcccgttcaaaaatatgg

SEQ ID NO: 240118 - DNA, 25 bp, Probe sequence
agtgtcatgccaattgttccaaaag

SEQ ID NO: 240119 - DNA, 25 bp, Probe sequence
accatcaacacggtgacttttatta

SEQ ID NO: 240120 - DNA, 25 bp, Probe sequence
aacttggatcacactatgaagtgga

SEQ ID NO: 240121 - DNA, 25 bp, Probe sequence
aagcttaaaaggttctcacgtgtct

SEQ ID NO: 240122 - DNA, 25 bp, Probe sequence
aatgaataatttctttaacgtgtat

SEQ ID NO: 240123 - DNA, 25 bp, Probe sequence
caggtgctgactttggagacttgcc

SEQ ID NO: 240124 - DNA, 25 bp, Probe sequence
cttgccatttagtgtcatgccaatt

SEQ ID NO: 240125 - DNA, 25 bp, Probe sequence
ctatccatacccatggtgatggaaa

SEQ ID NO: 240126 - DNA, 25 bp, Probe sequence
ctcacgtgtctttaatcatacctat

SEQ ID NO: 240127 - DNA, 25 bp, Probe sequence
cggtgatttccatgcaatttacgtc

SEQ ID NO: 240128 - DNA, 25 bp, Probe sequence
gctgactttggagacttgccattta

SEQ ID NO: 240129 - DNA, 25 bp, Probe sequence
gaacggtgatttccatgcaatttac

SEQ ID NO: 240130 - DNA, 25 bp, Probe sequence
gacaataacttggatcacactatga

SEQ ID NO: 240131 - DNA, 25 bp, Probe sequence
gagacttgccatttagtgtcatgcc

SEQ ID NO: 240132 - DNA, 25 bp, Probe sequence
gatggcgttgattatgttacaggtg

SEQ ID NO: 240133 - DNA, 25 bp, Probe sequence
gataatagtccagtcattcatgata

SEQ ID NO: 240134 - DNA, 25 bp, Probe sequence
gatttccatgcaatttacgtcaacg

SEQ ID NO: 240135 - DNA, 25 bp, Probe sequence
gatttactgtaaatatagtttcttc

SEQ ID NO: 240136 - DNA, 25 bp, Probe sequence
gttgattatgttacaggtgctgact

SEQ ID NO: 240137 - DNA, 25 bp, Probe sequence
gttccaaaagataatagtccagtca

SEQ ID NO: 240138 - DNA, 25 bp, Probe sequence
gtcatgccaattgttccaaaagata

SEQ ID NO: 240139 - DNA, 25 bp, Probe sequence
gtgaaccatcaacacggtgactttt

SEQ ID NO: 240140 - DNA, 25 bp, Probe sequence
ggttctcacgtgtctttaatcatac

SEQ ID NO: 240141 - DNA, 25 bp, Probe sequence
tgatatgaacggtgatttccatgca

SEQ ID NO: 240142 - DNA, 25 bp, Probe sequence
tcaactatccatacccatggtgatg

SEQ ID NO: 240143 - DNA, 25 bp, Probe sequence
taatcatacctattgatggcgttga

SEQ ID NO: 240144 - DNA, 25 bp, Probe sequence
tacgtcaacgattatttattttatg

SEQ ID NO: 240145 - DNA, 25 bp, Probe sequence
tacctattgatggcgttgattatgt

SEQ ID NO: 240146 - DNA, 25 bp, Probe sequence
tagtttcttcaactatccataccca

SEQ ID NO: 240147 - DNA, 25 bp, Probe sequence
tagtccagtcattcatgatatgaac

SEQ ID NO: 240148 - DNA, 25 bp, Probe sequence
tttctttaacgtgtattttgaatat

SEQ ID NO: 240149 - DNA, 25 bp, Probe sequence
tttagtgtcatgccaattgttccaa

SEQ ID NO: 240150 - DNA, 25 bp, Probe sequence
ttcttcaactatccatacccatggt

SEQ ID NO: 240151 - DNA, 25 bp, Probe sequence
ttccatgcaatttacgtcaacgatt

SEQ ID NO: 240152 - DNA, 25 bp, Probe sequence
atgctcaatgcattttcttcagatt

SEQ ID NO: 240153 - DNA, 25 bp, Probe sequence
agttctgtaattaatattccattct

SEQ ID NO: 240154 - DNA, 25 bp, Probe sequence
agaaaatgtcagatattgctaaaat

SEQ ID NO: 240155 - DNA, 25 bp, Probe sequence
agcagacttggattttaaacttaat

SEQ ID NO: 240156 - DNA, 25 bp, Probe sequence
acagtggcccgtgcgagataaaatc

SEQ ID NO: 240157 - DNA, 25 bp, Probe sequence
aaatatcaggtgttggagttggtac

SEQ ID NO: 240158 - DNA, 25 bp, Probe sequence
aaatgttcattccatagcagacttg

SEQ ID NO: 240159 - DNA, 25 bp, Probe sequence
aaagaagcaaatttcacaacattaa

SEQ ID NO: 240160 - DNA, 25 bp, Probe sequence
aaaagtcgatcaaatgtttatagaa

SEQ ID NO: 240161 - DNA, 25 bp, Probe sequence
aacaattcgaaaatgttcattccat

SEQ ID NO: 240162 - DNA, 25 bp, Probe sequence
aatccagttcacactctagttctgt

SEQ ID NO: 240163 - DNA, 25 bp, Probe sequence
aatgcattttcttcagatttctatt

SEQ ID NO: 240164 - DNA, 25 bp, Probe sequence
aatacacagtggcccgtgcgagata

SEQ ID NO: 240165 - DNA, 25 bp, Probe sequence
aatattccattctttgagcgactaa

SEQ ID NO: 240166 - DNA, 25 bp, Probe sequence
caacgaaaaaaacgcagtgatgccg

SEQ ID NO: 240167 - DNA, 25 bp, Probe sequence
caacagattatcttaactacaatgg

SEQ ID NO: 240168 - DNA, 25 bp, Probe sequence
tttagcggaaaatacacagtggccc

SEQ ID NO: 240169 - DNA, 25 bp, Probe sequence
gcagtgatgccgaatataaccaaca

SEQ ID NO: 240170 - DNA, 25 bp, Probe sequence
gaaaatacacagtggcccgtgcgag

SEQ ID NO: 240171 - DNA, 25 bp, Probe sequence
gaacagggtgaagatataagtacta

SEQ ID NO: 240172 - DNA, 25 bp, Probe sequence
gaaaaatccagttcacactctagtt

SEQ ID NO: 240173 - DNA, 25 bp, Probe sequence
gatgccgaatataaccaacagatta

SEQ ID NO: 240174 - DNA, 25 bp, Probe sequence
gttgtgtcaggctattatggataaa

SEQ ID NO: 240175 - DNA, 25 bp, Probe sequence
gttcattccatagcagacttggatt

SEQ ID NO: 240176 - DNA, 25 bp, Probe sequence
gttcacactctagttctgtaattaa

SEQ ID NO: 240177 - DNA, 25 bp, Probe sequence
gtaaaacattgttgtgtcaggctat

SEQ ID NO: 240178 - DNA, 25 bp, Probe sequence
ggtacattatatcgtcattttgaaa

SEQ ID NO: 240179 - DNA, 25 bp, Probe sequence
ggcccgtgcgagataaaatcaatgt

SEQ ID NO: 240180 - DNA, 25 bp, Probe sequence
ggagttggtacattatatcgtcatt

SEQ ID NO: 240181 - DNA, 25 bp, Probe sequence
ggaagatttactagaacagggtgaa

SEQ ID NO: 240182 - DNA, 25 bp, Probe sequence
tccattctttgagcgactaaaaaac

SEQ ID NO: 240183 - DNA, 25 bp, Probe sequence
tccagttcacactctagttctgtaa

SEQ ID NO: 240184 - DNA, 25 bp, Probe sequence
taaacttaatctaatgctcaatgca

SEQ ID NO: 240185 - DNA, 25 bp, Probe sequence
ttcttcagatttctattattttgta

SEQ ID NO: 240186 - DNA, 25 bp, Probe sequence
attatgctgaaataattgcctcaga

SEQ ID NO: 240187 - DNA, 25 bp, Probe sequence
attttgtctgagttgccatgtattg

SEQ ID NO: 240188 - DNA, 25 bp, Probe sequence
atatagaatcacagacgttattttt

SEQ ID NO: 240189 - DNA, 25 bp, Probe sequence
atattttatctatcttgttgagtga

SEQ ID NO: 240190 - DNA, 25 bp, Probe sequence
atcacagacgttatttttgatgctg

SEQ ID NO: 240191 - DNA, 25 bp, Probe sequence
atggtagtctcaacaggtagttaca

SEQ ID NO: 240192 - DNA, 25 bp, Probe sequence
agttgccatgtattgttgcctataa

SEQ ID NO: 240193 - DNA, 25 bp, Probe sequence
agaagtatcagtgttattactacaa

SEQ ID NO: 240194 - DNA, 25 bp, Probe sequence
acaggtagttacattttgtctgagt

SEQ ID NO: 240195 - DNA, 25 bp, Probe sequence
aaaatggtagtctcaacaggtagtt

SEQ ID NO: 240196 - DNA, 25 bp, Probe sequence
aataatattttatctatcttgttga

SEQ ID NO: 240197 - DNA, 25 bp, Probe sequence
cagacgttatttttgatgctgtaac

SEQ ID NO: 240198 - DNA, 25 bp, Probe sequence
catttctttagatagttttgtagag

SEQ ID NO: 240199 - DNA, 25 bp, Probe sequence
ctgagttgccatgtattgttgccta

SEQ ID NO: 240200 - DNA, 25 bp, Probe sequence
gctaggaaaataaagccgtcgattc

SEQ ID NO: 240201 - DNA, 25 bp, Probe sequence
gccatgtattgttgcctataaaaat

SEQ ID NO: 240202 - DNA, 25 bp, Probe sequence
gaatcacagacgttatttttgatgc

SEQ ID NO: 240203 - DNA, 25 bp, Probe sequence
gaaataattgcctcagatatgagta

SEQ ID NO: 240204 - DNA, 25 bp, Probe sequence
gaaatcatttctttagatagttttg

SEQ ID NO: 240205 - DNA, 25 bp, Probe sequence
gacgttatttttgatgctgtaacag

SEQ ID NO: 240206 - DNA, 25 bp, Probe sequence
gagaacaagggtattggtagtcatt

SEQ ID NO: 240207 - DNA, 25 bp, Probe sequence
gagttgccatgtattgttgcctata

SEQ ID NO: 240208 - DNA, 25 bp, Probe sequence
gatgagtatattgaaatcatttctt

SEQ ID NO: 240209 - DNA, 25 bp, Probe sequence
gatgctgtaacagaagctaggaaaa

SEQ ID NO: 240210 - DNA, 25 bp, Probe sequence
gttgccatgtattgttgcctataaa

SEQ ID NO: 240211 - DNA, 25 bp, Probe sequence
gttacattttgtctgagttgccatg

SEQ ID NO: 240212 - DNA, 25 bp, Probe sequence
gtatcagtgttattactacaaatga

SEQ ID NO: 240213 - DNA, 25 bp, Probe sequence
gtagttacattttgtctgagttgcc

SEQ ID NO: 240214 - DNA, 25 bp, Probe sequence
gtctgagttgccatgtattgttgcc

SEQ ID NO: 240215 - DNA, 25 bp, Probe sequence
gtctcaacaggtagttacattttgt

SEQ ID NO: 240216 - DNA, 25 bp, Probe sequence
gggctactaacgtataaagtttatg

SEQ ID NO: 240217 - DNA, 25 bp, Probe sequence
ggtagtctcaacaggtagttacatt

SEQ ID NO: 240218 - DNA, 25 bp, Probe sequence
ggaatataaatcttacaacaaaatg

SEQ ID NO: 240219 - DNA, 25 bp, Probe sequence
tttgtctgagttgccatgtattgtt

SEQ ID NO: 240220 - DNA, 25 bp, Probe sequence
atatccaggacttgaaggtgcagcc

SEQ ID NO: 240221 - DNA, 25 bp, Probe sequence
atccaagtttgatcttaccttattt

SEQ ID NO: 240222 - DNA, 25 bp, Probe sequence
aggtgcatttgtatttagattttta

SEQ ID NO: 240223 - DNA, 25 bp, Probe sequence
agcacttcccacatggcgtattatg

SEQ ID NO: 240224 - DNA, 25 bp, Probe sequence
acatcgctgtattgcctgagcactt

SEQ ID NO: 240225 - DNA, 25 bp, Probe sequence
acacttcctaaagttggtattcact

SEQ ID NO: 240226 - DNA, 25 bp, Probe sequence
aaatcattctggggaactgtgttga

SEQ ID NO: 240227 - DNA, 25 bp, Probe sequence
aaggcttattagcagcagataacgc

SEQ ID NO: 240228 - DNA, 25 bp, Probe sequence
aattgaaagtcctgaagctggagat

SEQ ID NO: 240229 - DNA, 25 bp, Probe sequence
gccattgattctatgcttgctgctt

SEQ ID NO: 240230 - DNA, 25 bp, Probe sequence
gcgatcgttggttgggtaggtgtta

SEQ ID NO: 240231 - DNA, 25 bp, Probe sequence
gctgctttagctattgctgtaacac

SEQ ID NO: 240232 - DNA, 25 bp, Probe sequence
gctgcaggagcggtttacttaattt

SEQ ID NO: 240233 - DNA, 25 bp, Probe sequence
gctattgctgtaacacttcctaaag

SEQ ID NO: 240234 - DNA, 25 bp, Probe sequence
gaatttgcagatatcgcatttgcca

SEQ ID NO: 240235 - DNA, 25 bp, Probe sequence
gatatcgcatttgccattgattcta

SEQ ID NO: 240236 - DNA, 25 bp, Probe sequence
gattctatgcttgctgctttagcta

SEQ ID NO: 240237 - DNA, 25 bp, Probe sequence
gttgtcatggtattagcgcacccag

SEQ ID NO: 240238 - DNA, 25 bp, Probe sequence
gattggtgttattctaatgcgttat

SEQ ID NO: 240239 - DNA, 25 bp, Probe sequence
gttggtattcactttggtggtatgg

SEQ ID NO: 240240 - DNA, 25 bp, Probe sequence
gttcgtagtcatgttcctaggtgga

SEQ ID NO: 240241 - DNA, 25 bp, Probe sequence
gtattatcgcgaacttttggtttat

SEQ ID NO: 240242 - DNA, 25 bp, Probe sequence
ggtggtatggacttaggtcagttcg

SEQ ID NO: 240243 - DNA, 25 bp, Probe sequence
ggtcagttcgtagtcatgttcctag

SEQ ID NO: 240244 - DNA, 25 bp, Probe sequence
tggttaagcacttaccacccgaaca

SEQ ID NO: 240245 - DNA, 25 bp, Probe sequence
tggcagttctttaaacacccagaaa

SEQ ID NO: 240246 - DNA, 25 bp, Probe sequence
tgaaggtgcagccttcgcgatcgtt

SEQ ID NO: 240247 - DNA, 25 bp, Probe sequence
taatgcgttatgcagcaacatggtt

SEQ ID NO: 240248 - DNA, 25 bp, Probe sequence
tagatttttagcattattcttaatt

SEQ ID NO: 240249 - DNA, 25 bp, Probe sequence
tattagcgcacccagacatcgctgt

SEQ ID NO: 240250 - DNA, 25 bp, Probe sequence
tatcggttggttaggttcagttgtt

SEQ ID NO: 240251 - DNA, 25 bp, Probe sequence
tattatggcaatctattttctggac

SEQ ID NO: 240252 - DNA, 25 bp, Probe sequence
tatttatgggtacttgtcgttttag

SEQ ID NO: 240253 - DNA, 25 bp, Probe sequence
tttggtttattcaagctgcaggagc

SEQ ID NO: 240254 - DNA, 25 bp, Probe sequence
atgcatttggtatcagtatcgatga

SEQ ID NO: 240255 - DNA, 25 bp, Probe sequence
agaagtacttaaaaacgatggagag

SEQ ID NO: 240256 - DNA, 25 bp, Probe sequence
acatgcatttggtatcagtatcgat

SEQ ID NO: 240257 - DNA, 25 bp, Probe sequence
aaagcaattagctgcaatcaaacaa

SEQ ID NO: 240258 - DNA, 25 bp, Probe sequence
aaagaaaatgctggaccatcatgga

SEQ ID NO: 240259 - DNA, 25 bp, Probe sequence
aaaagaaggcagtaatagagatatt

SEQ ID NO: 240260 - DNA, 25 bp, Probe sequence
aacgtatggtgattagtgatgccta

SEQ ID NO: 240261 - DNA, 25 bp, Probe sequence
aaggactatgttaatgagagaaatg

SEQ ID NO: 240262 - DNA, 25 bp, Probe sequence
aatgctggaccatcatggaagtatt

SEQ ID NO: 240263 - DNA, 25 bp, Probe sequence
aattagctgcaatcaaacaatggtt

SEQ ID NO: 240264 - DNA, 25 bp, Probe sequence
aattctgcaattatggttgatgatt

SEQ ID NO: 240265 - DNA, 25 bp, Probe sequence
cgtatggtgattagtgatgcctatg

SEQ ID NO: 240266 - DNA, 25 bp, Probe sequence
gcgtagggaagagtttagttgctga

SEQ ID NO: 240267 - DNA, 25 bp, Probe sequence
gcatttggaaaattttgttaagtat

SEQ ID NO: 240268 - DNA, 25 bp, Probe sequence
gcatttggtatcagtatcgatgaag

SEQ ID NO: 240269 - DNA, 25 bp, Probe sequence
gcaattagctgcaatcaaacaatgg

SEQ ID NO: 240270 - DNA, 25 bp, Probe sequence
gaatcaaagcaattagctgcaatca

SEQ ID NO: 240271 - DNA, 25 bp, Probe sequence
gaacatgcatttggtatcagtatcg

SEQ ID NO: 240272 - DNA, 25 bp, Probe sequence
gaaaatgctggaccatcatggaagt

SEQ ID NO: 240273 - DNA, 25 bp, Probe sequence
gaaaaatgaagattactttgatgaa

SEQ ID NO: 240274 - DNA, 25 bp, Probe sequence
gaaacaaattctgcaattatggttg

SEQ ID NO: 240275 - DNA, 25 bp, Probe sequence
gaaatgaagtcaagaaacgtatggt

SEQ ID NO: 240276 - DNA, 25 bp, Probe sequence
gactgcagatagtatattatttaat

SEQ ID NO: 240277 - DNA, 25 bp, Probe sequence
gacgaagaagagttagaagtactta

SEQ ID NO: 240278 - DNA, 25 bp, Probe sequence
gaccatcatggaagtatttaaagtt

SEQ ID NO: 240279 - DNA, 25 bp, Probe sequence
gagaagattatcatattgacgaaga

SEQ ID NO: 240280 - DNA, 25 bp, Probe sequence
gttgctaagcatttggaaaattttg

SEQ ID NO: 240281 - DNA, 25 bp, Probe sequence
gtaagcgtagggaagagtttagttg

SEQ ID NO: 240282 - DNA, 25 bp, Probe sequence
gtaagagaatctattgttaaaggaa

SEQ ID NO: 240283 - DNA, 25 bp, Probe sequence
ggcatcaaatgactgcagatagtat

SEQ ID NO: 240284 - DNA, 25 bp, Probe sequence
tgcaattatggttgatgatttgaca

SEQ ID NO: 240285 - DNA, 25 bp, Probe sequence
tcgcgggatataaggactatgttaa

SEQ ID NO: 240286 - DNA, 25 bp, Probe sequence
tagggaagagtttagttgctgataa

SEQ ID NO: 240287 - DNA, 25 bp, Probe sequence
ttaattattacatatcgtattgata

SEQ ID NO: 240288 - DNA, 25 bp, Probe sequence
agtgttactggattgtctccgataa

SEQ ID NO: 240289 - DNA, 25 bp, Probe sequence
acgatgttatgggtggtactaggta

SEQ ID NO: 240290 - DNA, 25 bp, Probe sequence
actcatgtttataggacgtgttggc

SEQ ID NO: 240291 - DNA, 25 bp, Probe sequence
acacaatgagtggtaccgtcaaatt

SEQ ID NO: 240292 - DNA, 25 bp, Probe sequence
aacttaccgtatgttcataaaccag

SEQ ID NO: 240293 - DNA, 25 bp, Probe sequence
caagttcggttggtggcggtattcg

SEQ ID NO: 240294 - DNA, 25 bp, Probe sequence
aagtcattaattccttatgcacatg

SEQ ID NO: 240295 - DNA, 25 bp, Probe sequence
aagtgcgggtcttcaaacaattgat

SEQ ID NO: 240296 - DNA, 25 bp, Probe sequence
caatcggcttcccagtattattaga

SEQ ID NO: 240297 - DNA, 25 bp, Probe sequence
cagcgactacaagaagtgcgggtct

SEQ ID NO: 240298 - DNA, 25 bp, Probe sequence
cgatacctattctacatttggacaa

SEQ ID NO: 240299 - DNA, 25 bp, Probe sequence
gccgtatccggaattagtgttactg

SEQ ID NO: 240300 - DNA, 25 bp, Probe sequence
gcaaggtgtttttgtttctatttct

SEQ ID NO: 240301 - DNA, 25 bp, Probe sequence
gaacttgtggactatcgcttggtgt

SEQ ID NO: 240302 - DNA, 25 bp, Probe sequence
gacacattatttgttgccgtatccg

SEQ ID NO: 240303 - DNA, 25 bp, Probe sequence
gatcaagccctcaacaaggtattgt

SEQ ID NO: 240304 - DNA, 25 bp, Probe sequence
gatagcaggacgtcgagaaccagat

SEQ ID NO: 240305 - DNA, 25 bp, Probe sequence
gttggcatcaatcgttattctattc

SEQ ID NO: 240306 - DNA, 25 bp, Probe sequence
gttattctattcgctgtttcaatca

SEQ ID NO: 240307 - DNA, 25 bp, Probe sequence
gtattcgtacaacaactttcgctat

SEQ ID NO: 240308 - DNA, 25 bp, Probe sequence
gtaatcgaactcgtaggagccatgt

SEQ ID NO: 240309 - DNA, 25 bp, Probe sequence
gtctccgataagtattgtcgatacc

SEQ ID NO: 240310 - DNA, 25 bp, Probe sequence
ggggtattagccattctattatttg

SEQ ID NO: 240311 - DNA, 25 bp, Probe sequence
ggatattcaacgttcatttgcagta

SEQ ID NO: 240312 - DNA, 25 bp, Probe sequence
ggactatcgcttggtgtcacaagtg

SEQ ID NO: 240313 - DNA, 25 bp, Probe sequence
ggagccatgttattagcattttact

SEQ ID NO: 240314 - DNA, 25 bp, Probe sequence
ggacgtgttggcttaatatcattta

SEQ ID NO: 240315 - DNA, 25 bp, Probe sequence
ggcgtcatggcaattggtacgatgt

SEQ ID NO: 240316 - DNA, 25 bp, Probe sequence
ttttaggatcaatcggcttcccagt

SEQ ID NO: 240317 - DNA, 25 bp, Probe sequence
tcatgtctgcatttggaacttgtgg

SEQ ID NO: 240318 - DNA, 25 bp, Probe sequence
tattggtggaattggcgtcatggca

SEQ ID NO: 240319 - DNA, 25 bp, Probe sequence
tattcctatttattgttggggtatt

SEQ ID NO: 240320 - DNA, 25 bp, Probe sequence
ttacgacatcaacatatttattcct

SEQ ID NO: 240321 - DNA, 25 bp, Probe sequence
ttctatttctgccactaccaatggt

SEQ ID NO: 240322 - DNA, 25 bp, Probe sequence
atattaaaagtttggctgacgatca

SEQ ID NO: 240323 - DNA, 25 bp, Probe sequence
agttttgataactggtggggctggt

SEQ ID NO: 240324 - DNA, 25 bp, Probe sequence
atctcaagaaataaacgtcgtagca

SEQ ID NO: 240325 - DNA, 25 bp, Probe sequence
accattatcaccatatgcaatagat

SEQ ID NO: 240326 - DNA, 25 bp, Probe sequence
aaagtttggctgacgatcatgtgtt

SEQ ID NO: 240327 - DNA, 25 bp, Probe sequence
gctgagtcggttgagaaacctatct

SEQ ID NO: 240328 - DNA, 25 bp, Probe sequence
gcaatagataaatattacggcgaac

SEQ ID NO: 240329 - DNA, 25 bp, Probe sequence
gaattatatggaaaatcagtcgagc

SEQ ID NO: 240330 - DNA, 25 bp, Probe sequence
gaaacctatcttatctcaagaaata

SEQ ID NO: 240331 - DNA, 25 bp, Probe sequence
gacgatcatgtgtttgaattagata

SEQ ID NO: 240332 - DNA, 25 bp, Probe sequence
gagaaacctatcttatctcaagaaa

SEQ ID NO: 240333 - DNA, 25 bp, Probe sequence
gagatattaagcattcttatgcaga

SEQ ID NO: 240334 - DNA, 25 bp, Probe sequence
gagtcggttgagaaacctatcttat

SEQ ID NO: 240335 - DNA, 25 bp, Probe sequence
gatgtttatgttctagataactata

SEQ ID NO: 240336 - DNA, 25 bp, Probe sequence
gatgcagttgaacaaatcatgaaga

SEQ ID NO: 240337 - DNA, 25 bp, Probe sequence
gataactggtggggctggttttatt

SEQ ID NO: 240338 - DNA, 25 bp, Probe sequence
gataactatagaacaggtaaacgag

SEQ ID NO: 240339 - DNA, 25 bp, Probe sequence
gattatgatgtttatgttctagata

SEQ ID NO: 240340 - DNA, 25 bp, Probe sequence
gattatgttattcatttagcagcat

SEQ ID NO: 240341 - DNA, 25 bp, Probe sequence
gttattcatttagcagcattagtta

SEQ ID NO: 240342 - DNA, 25 bp, Probe sequence
gtttggctgacgatcatgtgtttga

SEQ ID NO: 240343 - DNA, 25 bp, Probe sequence
gtgtttgaattagatattcgtgaat

SEQ ID NO: 240344 - DNA, 25 bp, Probe sequence
ggattactttaattttgaggtagat

SEQ ID NO: 240345 - DNA, 25 bp, Probe sequence
ggctgacgatcatgtgtttgaatta

SEQ ID NO: 240346 - DNA, 25 bp, Probe sequence
tcgtgaatatgatgcagttgaacaa

SEQ ID NO: 240347 - DNA, 25 bp, Probe sequence
tcggttgagaaacctatcttatctc

SEQ ID NO: 240348 - DNA, 25 bp, Probe sequence
tcatgaagacatatcaatttgatta

SEQ ID NO: 240349 - DNA, 25 bp, Probe sequence
taactggtggggctggttttattgg

SEQ ID NO: 240350 - DNA, 25 bp, Probe sequence
taccattatcaccatatgcaataga

SEQ ID NO: 240351 - DNA, 25 bp, Probe sequence
tatatggaaaatcagtcgagcatga

SEQ ID NO: 240352 - DNA, 25 bp, Probe sequence
tttgataactggtggggctggtttt

SEQ ID NO: 240353 - DNA, 25 bp, Probe sequence
ttaaaagtttggctgacgatcatgt

SEQ ID NO: 240354 - DNA, 25 bp, Probe sequence
ttcatttagcagcattagttagtgt

SEQ ID NO: 240355 - DNA, 25 bp, Probe sequence
ttggctgacgatcatgtgtttgaat

SEQ ID NO: 240356 - DNA, 25 bp, Probe sequence
attatgctattgttgcaccttataa

SEQ ID NO: 240357 - DNA, 25 bp, Probe sequence
atacaatgttactaaggagccttat

SEQ ID NO: 240358 - DNA, 25 bp, Probe sequence
atcatttttaactcgttcaattgct

SEQ ID NO: 240359 - DNA, 25 bp, Probe sequence
atgaagatttgtatcatgcataccc

SEQ ID NO: 240360 - DNA, 25 bp, Probe sequence
atgactgactattgttatcgtaact

SEQ ID NO: 240361 - DNA, 25 bp, Probe sequence
atgggttacaagatttagtctgtca

SEQ ID NO: 240362 - DNA, 25 bp, Probe sequence
agtggcggaagtttagctggctcgt

SEQ ID NO: 240363 - DNA, 25 bp, Probe sequence
agagcttgtacatctttcgattaat

SEQ ID NO: 240364 - DNA, 25 bp, Probe sequence
agaacctgggcaacgagtaatgtta

SEQ ID NO: 240365 - DNA, 25 bp, Probe sequence
aaagcagtggcttattggtcacagg

SEQ ID NO: 240366 - DNA, 25 bp, Probe sequence
aagagcacaaaatcatcgcgtcatt

SEQ ID NO: 240367 - DNA, 25 bp, Probe sequence
cagctcatcagcatcaaacaatagt

SEQ ID NO: 240368 - DNA, 25 bp, Probe sequence
gcggcctattattatgctattgttg

SEQ ID NO: 240369 - DNA, 25 bp, Probe sequence
gaaaagacattagtggcatcaaaac

SEQ ID NO: 240370 - DNA, 25 bp, Probe sequence
gaaacgtattatgttcaggctggtc

SEQ ID NO: 240371 - DNA, 25 bp, Probe sequence
gagccttatttttcaactccatatt

SEQ ID NO: 240372 - DNA, 25 bp, Probe sequence
gagattttaactacgtcagatatgc

SEQ ID NO: 240373 - DNA, 25 bp, Probe sequence
gatatatccatgaagttgaagagcc

SEQ ID NO: 240374 - DNA, 25 bp, Probe sequence
gttcaattgctttggcacgttttcc

SEQ ID NO: 240375 - DNA, 25 bp, Probe sequence
gtacaatgtggcaaggattcaatta

SEQ ID NO: 240376 - DNA, 25 bp, Probe sequence
gtcagatatgcatagtcatttctta

SEQ ID NO: 240377 - DNA, 25 bp, Probe sequence
gtgaattcaagtttggtttatcatt

SEQ ID NO: 240378 - DNA, 25 bp, Probe sequence
ggtgacttaaaaattgctatcgtag

SEQ ID NO: 240379 - DNA, 25 bp, Probe sequence
ggagtatagttattcacatttagat

SEQ ID NO: 240380 - DNA, 25 bp, Probe sequence
ggcacgttttccatggttatcagca

SEQ ID NO: 240381 - DNA, 25 bp, Probe sequence
tgatataacatgtgtccacgtgcct

SEQ ID NO: 240382 - DNA, 25 bp, Probe sequence
tgcaccttataaacgacatccaatg

SEQ ID NO: 240383 - DNA, 25 bp, Probe sequence
tcgcgtcattttattagatagtggc

SEQ ID NO: 240384 - DNA, 25 bp, Probe sequence
taatgattacagctcatcagcatca

SEQ ID NO: 240385 - DNA, 25 bp, Probe sequence
tagctggctcgttagcggcctatta

SEQ ID NO: 240386 - DNA, 25 bp, Probe sequence
tagcggtgtgagtccaagtgaattc

SEQ ID NO: 240387 - DNA, 25 bp, Probe sequence
tagtctgtcaaacacatccattttc

SEQ ID NO: 240388 - DNA, 25 bp, Probe sequence
tatgatgctagcggtgtgagtccaa

SEQ ID NO: 240389 - DNA, 25 bp, Probe sequence
ttatagagctggtacttatgttaac

SEQ ID NO: 240390 - DNA, 25 bp, Probe sequence
atttggaggcatttctcggtgaata

SEQ ID NO: 240391 - DNA, 25 bp, Probe sequence
atacaactttagaagcgtttgtcac

SEQ ID NO: 240392 - DNA, 25 bp, Probe sequence
aggtaagaaaacgacagctcataga

SEQ ID NO: 240393 - DNA, 25 bp, Probe sequence
agaaaacgacagctcatagaactta

SEQ ID NO: 240394 - DNA, 25 bp, Probe sequence
agaacttatagatgacgcactcgtc

SEQ ID NO: 240395 - DNA, 25 bp, Probe sequence
acgacagctcatagaacttatagat

SEQ ID NO: 240396 - DNA, 25 bp, Probe sequence
acttatagatgacgcactcgtcaat

SEQ ID NO: 240397 - DNA, 25 bp, Probe sequence
aaatttggaggcatttctcggtgaa

SEQ ID NO: 240398 - DNA, 25 bp, Probe sequence
aaagatgaagcagcatttaatcaat

SEQ ID NO: 240399 - DNA, 25 bp, Probe sequence
aaacgacagctcatagaacttatag

SEQ ID NO: 240400 - DNA, 25 bp, Probe sequence
aaaatttggaggcatttctcggtga

SEQ ID NO: 240401 - DNA, 25 bp, Probe sequence
aaaaatttggaggcatttctcggtg

SEQ ID NO: 240402 - DNA, 25 bp, Probe sequence
aaaacgacagctcatagaacttata

SEQ ID NO: 240403 - DNA, 25 bp, Probe sequence
aacgacagctcatagaacttataga

SEQ ID NO: 240404 - DNA, 25 bp, Probe sequence
gaagcacttcgagaggtaagaaaac

SEQ ID NO: 240405 - DNA, 25 bp, Probe sequence
aatgaagcacttcgagaggtaagaa

SEQ ID NO: 240406 - DNA, 25 bp, Probe sequence
aatttggaggcatttctcggtgaat

SEQ ID NO: 240407 - DNA, 25 bp, Probe sequence
caactttagaagcgtttgtcacaac

SEQ ID NO: 240408 - DNA, 25 bp, Probe sequence
cactcgtcaataaagatgaagcagc

SEQ ID NO: 240409 - DNA, 25 bp, Probe sequence
cgacagctcatagaacttatagatg

SEQ ID NO: 240410 - DNA, 25 bp, Probe sequence
cgcactcgtcaataaagatgaagca

SEQ ID NO: 240411 - DNA, 25 bp, Probe sequence
gaattaattatcaatgaagcacttc

SEQ ID NO: 240412 - DNA, 25 bp, Probe sequence
gaacttatagatgacgcactcgtca

SEQ ID NO: 240413 - DNA, 25 bp, Probe sequence
gaaaacgacagctcatagaacttat

SEQ ID NO: 240414 - DNA, 25 bp, Probe sequence
gaaatacaatactaatgttaaacat

SEQ ID NO: 240415 - DNA, 25 bp, Probe sequence
gacgcactcgtcaataaagatgaag

SEQ ID NO: 240416 - DNA, 25 bp, Probe sequence
gatgaagcagcatttaatcaatata

SEQ ID NO: 240417 - DNA, 25 bp, Probe sequence
gttaaacatacaactttagaagcgt

SEQ ID NO: 240418 - DNA, 25 bp, Probe sequence
gtaagaaaacgacagctcatagaac

SEQ ID NO: 240419 - DNA, 25 bp, Probe sequence
tagatgacgcactcgtcaataaaga

SEQ ID NO: 240420 - DNA, 25 bp, Probe sequence
tatcaatgaagcacttcgagaggta

SEQ ID NO: 240421 - DNA, 25 bp, Probe sequence
tatagatgacgcactcgtcaataaa

SEQ ID NO: 240422 - DNA, 25 bp, Probe sequence
tttggaggcatttctcggtgaataa

SEQ ID NO: 240423 - DNA, 25 bp, Probe sequence
ttaattatcaatgaagcacttcgag

SEQ ID NO: 240424 - DNA, 25 bp, Probe sequence
attgttgagtttatggatggattaa

SEQ ID NO: 240425 - DNA, 25 bp, Probe sequence
ataactctgttattgttgacttaac

SEQ ID NO: 240426 - DNA, 25 bp, Probe sequence
atcaacgataactctgttattgttg

SEQ ID NO: 240427 - DNA, 25 bp, Probe sequence
atgactgttgcagaagtgggtaaca

SEQ ID NO: 240428 - DNA, 25 bp, Probe sequence
accggaaaaaactgttatcaatcat

SEQ ID NO: 240429 - DNA, 25 bp, Probe sequence
acgataactctgttattgttgactt

SEQ ID NO: 240430 - DNA, 25 bp, Probe sequence
aaatcaacgataactctgttattgt

SEQ ID NO: 240431 - DNA, 25 bp, Probe sequence
aaaaatcaacgataactctgttatt

SEQ ID NO: 240432 - DNA, 25 bp, Probe sequence
aaaactgttatcaatcataaacgat

SEQ ID NO: 240433 - DNA, 25 bp, Probe sequence
aacattgttgagtttatggatggat

SEQ ID NO: 240434 - DNA, 25 bp, Probe sequence
aactctgttattgttgacttaacaa

SEQ ID NO: 240435 - DNA, 25 bp, Probe sequence
aactgttatcaatcataaacgatat

SEQ ID NO: 240436 - DNA, 25 bp, Probe sequence
aacgataactctgttattgttgact

SEQ ID NO: 240437 - DNA, 25 bp, Probe sequence
aagtgggtaacattgttgagtttat

SEQ ID NO: 240438 - DNA, 25 bp, Probe sequence
caacgataactctgttattgttgac

SEQ ID NO: 240439 - DNA, 25 bp, Probe sequence
ctctgttattgttgacttaacaatt

SEQ ID NO: 240440 - DNA, 25 bp, Probe sequence
gcagaagtgggtaacattgttgagt

SEQ ID NO: 240441 - DNA, 25 bp, Probe sequence
gaagtgggtaacattgttgagttta

SEQ ID NO: 240442 - DNA, 25 bp, Probe sequence
gaaaaaatcaacgataactctgtta

SEQ ID NO: 240443 - DNA, 25 bp, Probe sequence
gactgttgcagaagtgggtaacatt

SEQ ID NO: 240444 - DNA, 25 bp, Probe sequence
gagtttatggatggattaagaggtc

SEQ ID NO: 240445 - DNA, 25 bp, Probe sequence
gataactctgttattgttgacttaa

SEQ ID NO: 240446 - DNA, 25 bp, Probe sequence
gttgcagaagtgggtaacattgttg

SEQ ID NO: 240447 - DNA, 25 bp, Probe sequence
gtttatggatggattaagaggtcgt

SEQ ID NO: 240448 - DNA, 25 bp, Probe sequence
gtaacattgttgagtttatggatgg

SEQ ID NO: 240449 - DNA, 25 bp, Probe sequence
gtgggtaacattgttgagtttatgg

SEQ ID NO: 240450 - DNA, 25 bp, Probe sequence
gggtaacattgttgagtttatggat

SEQ ID NO: 240451 - DNA, 25 bp, Probe sequence
tggaaaattttaatgaccttgattt

SEQ ID NO: 240452 - DNA, 25 bp, Probe sequence
tgcagaagtgggtaacattgttgag

SEQ ID NO: 240453 - DNA, 25 bp, Probe sequence
taagaggtcgtgttgaaaaaatcaa

SEQ ID NO: 240454 - DNA, 25 bp, Probe sequence
taccggaaaaaactgttatcaatca

SEQ ID NO: 240455 - DNA, 25 bp, Probe sequence
tatggaaaattttaatgaccttgat

SEQ ID NO: 240456 - DNA, 25 bp, Probe sequence
ttatggatggattaagaggtcgtgt

SEQ ID NO: 240457 - DNA, 25 bp, Probe sequence
ttgcagaagtgggtaacattgttga

SEQ ID NO: 240458 - DNA, 25 bp, Probe sequence
attccatgtcacgagttatatatga

SEQ ID NO: 240459 - DNA, 25 bp, Probe sequence
atttattatgtggggcgaacaccaa

SEQ ID NO: 240460 - DNA, 25 bp, Probe sequence
atgcttcaacttttattctcactta

SEQ ID NO: 240461 - DNA, 25 bp, Probe sequence
agtggcaaatgttagtaactttact

SEQ ID NO: 240462 - DNA, 25 bp, Probe sequence
actgcaatttgttctagttcattat

SEQ ID NO: 240463 - DNA, 25 bp, Probe sequence
actttactttttgtcattccatgtc

SEQ ID NO: 240464 - DNA, 25 bp, Probe sequence
acttttattctcacttataacttct

SEQ ID NO: 240465 - DNA, 25 bp, Probe sequence
aagaattagcaagaacaggtgtcaa

SEQ ID NO: 240466 - DNA, 25 bp, Probe sequence
aattattttaattatgcttcaactt

SEQ ID NO: 240467 - DNA, 25 bp, Probe sequence
catcaattggtgttggtattattac

SEQ ID NO: 240468 - DNA, 25 bp, Probe sequence
cggttgcttacatcaattggtgttg

SEQ ID NO: 240469 - DNA, 25 bp, Probe sequence
gcttcaacttttattctcacttata

SEQ ID NO: 240470 - DNA, 25 bp, Probe sequence
gaattaacacatttttcaataccga

SEQ ID NO: 240471 - DNA, 25 bp, Probe sequence
gaatactggtatttatatacaggta

SEQ ID NO: 240472 - DNA, 25 bp, Probe sequence
gaacaggtgtcaattggaagtggca

SEQ ID NO: 240473 - DNA, 25 bp, Probe sequence
gataattggtggatagtaacattta

SEQ ID NO: 240474 - DNA, 25 bp, Probe sequence
gttatatatgagaactgttttacaa

SEQ ID NO: 240475 - DNA, 25 bp, Probe sequence
gtaactttactttttgtcattccat

SEQ ID NO: 240476 - DNA, 25 bp, Probe sequence
gtaacatttatatttgttgcacaag

SEQ ID NO: 240477 - DNA, 25 bp, Probe sequence
gtcattccatgtcacgagttatata

SEQ ID NO: 240478 - DNA, 25 bp, Probe sequence
gtggggcgaacaccaagaatactgg

SEQ ID NO: 240479 - DNA, 25 bp, Probe sequence
ggtataatgctaattgctggtatca

SEQ ID NO: 240480 - DNA, 25 bp, Probe sequence
tgctaattgctggtatcagttatgt

SEQ ID NO: 240481 - DNA, 25 bp, Probe sequence
tctcgaaggctttaacttggtttat

SEQ ID NO: 240482 - DNA, 25 bp, Probe sequence
tcattaagttatgagtatactcgac

SEQ ID NO: 240483 - DNA, 25 bp, Probe sequence
taagtttcattatatttcatctcat

SEQ ID NO: 240484 - DNA, 25 bp, Probe sequence
taaaatctcgaaggctttaacttgg

SEQ ID NO: 240485 - DNA, 25 bp, Probe sequence
tactttttgtcattccatgtcacga

SEQ ID NO: 240486 - DNA, 25 bp, Probe sequence
tagctatattaataactgcaatttg

SEQ ID NO: 240487 - DNA, 25 bp, Probe sequence
tagttcattatttatttatttagat

SEQ ID NO: 240488 - DNA, 25 bp, Probe sequence
tatttcatctcatattatttattat

SEQ ID NO: 240489 - DNA, 25 bp, Probe sequence
ttttgtcattccatgtcacgagtta

SEQ ID NO: 240490 - DNA, 25 bp, Probe sequence
ttctcacttataacttctaatttaa

SEQ ID NO: 240491 - DNA, 25 bp, Probe sequence
ttgttgcacaagtgatattatcatt

SEQ ID NO: 240492 - DNA, 25 bp, Probe sequence
attctattttagagcaatcggcgga

SEQ ID NO: 240493 - DNA, 25 bp, Probe sequence
atttcattttgagcctggtccagac

SEQ ID NO: 240494 - DNA, 25 bp, Probe sequence
ataccaagtcgattgaaggcactac

SEQ ID NO: 240495 - DNA, 25 bp, Probe sequence
atcagagcgccaattaattttagta

SEQ ID NO: 240496 - DNA, 25 bp, Probe sequence
atcatcgatcatcatgtgattggat

SEQ ID NO: 240497 - DNA, 25 bp, Probe sequence
atgcccaatacatcaatcattctat

SEQ ID NO: 240498 - DNA, 25 bp, Probe sequence
atgttagtgatacttggtgggccaa

SEQ ID NO: 240499 - DNA, 25 bp, Probe sequence
atggtgcttgctttggtgcacaaca

SEQ ID NO: 240500 - DNA, 25 bp, Probe sequence
agcaatcggcggaggacatattagc

SEQ ID NO: 240501 - DNA, 25 bp, Probe sequence
agcctggtccagacgatgtcagaga

SEQ ID NO: 240502 - DNA, 25 bp, Probe sequence
acagaataggcaggccattttccga

SEQ ID NO: 240503 - DNA, 25 bp, Probe sequence
aacaaaccaatttatggtgcttgct

SEQ ID NO: 240504 - DNA, 25 bp, Probe sequence
aaccaaggatttatcatcgatcatc

SEQ ID NO: 240505 - DNA, 25 bp, Probe sequence
gtgctacctcttgcggaagaaacgg

SEQ ID NO: 240506 - DNA, 25 bp, Probe sequence
gcacgaagtctatatttatcatcca

SEQ ID NO: 240507 - DNA, 25 bp, Probe sequence
gaatccagacgatgagatgccttgg

SEQ ID NO: 240508 - DNA, 25 bp, Probe sequence
gaaggcactacattggcatgaagat

SEQ ID NO: 240509 - DNA, 25 bp, Probe sequence
gaagatatgtttcaaataccgcaac

SEQ ID NO: 240510 - DNA, 25 bp, Probe sequence
gaaagcattaggttatgcggtgtta

SEQ ID NO: 240511 - DNA, 25 bp, Probe sequence
gaaatcattccgaatataccaagtc

SEQ ID NO: 240512 - DNA, 25 bp, Probe sequence
gaaatagtactaaatgatgcccaat

SEQ ID NO: 240513 - DNA, 25 bp, Probe sequence
gacatattagcctttgaggtgccta

SEQ ID NO: 240514 - DNA, 25 bp, Probe sequence
gagtcaatgttttacaacatacacc

SEQ ID NO: 240515 - DNA, 25 bp, Probe sequence
gatgccttggattcaatcagagcgc

SEQ ID NO: 240516 - DNA, 25 bp, Probe sequence
gttggatacataggtgagtgggcga

SEQ ID NO: 240517 - DNA, 25 bp, Probe sequence
ggcgaaggaaagagggcacgaagtc

SEQ ID NO: 240518 - DNA, 25 bp, Probe sequence
gggaaccatattagaaaccaaggat

SEQ ID NO: 240519 - DNA, 25 bp, Probe sequence
ggtgggccaatgaatccagacgatg

SEQ ID NO: 240520 - DNA, 25 bp, Probe sequence
ggtgcacaacaaatttcgaaagcat

SEQ ID NO: 240521 - DNA, 25 bp, Probe sequence
ggcaggccattttccgaatacttga

SEQ ID NO: 240522 - DNA, 25 bp, Probe sequence
tgaatgatggcgtgctacctcttgc

SEQ ID NO: 240523 - DNA, 25 bp, Probe sequence
taccgcaacaagcagaattattatt

SEQ ID NO: 240524 - DNA, 25 bp, Probe sequence
tagcctttgaggtgcctaaacagaa

SEQ ID NO: 240525 - DNA, 25 bp, Probe sequence
taggttgggatgatgtttacttaga

SEQ ID NO: 240526 - DNA, 25 bp, Probe sequence
attgcctgatactaaataccctata

SEQ ID NO: 240527 - DNA, 25 bp, Probe sequence
attccacaaaagtttcatgcaatgc

SEQ ID NO: 240528 - DNA, 25 bp, Probe sequence
attacacgattgaatttgcacctta

SEQ ID NO: 240529 - DNA, 25 bp, Probe sequence
ataatgcgattttattcaaaccaaa

SEQ ID NO: 240530 - DNA, 25 bp, Probe sequence
atgtcttttcattttaacgattagt

SEQ ID NO: 240531 - DNA, 25 bp, Probe sequence
atggtgttactgctgaatcatacaa

SEQ ID NO: 240532 - DNA, 25 bp, Probe sequence
atggccgacgttttaatgaagttat

SEQ ID NO: 240533 - DNA, 25 bp, Probe sequence
agagccaattaccaatacttattaa

SEQ ID NO: 240534 - DNA, 25 bp, Probe sequence
agcagcactttaaaacaattcgttt

SEQ ID NO: 240535 - DNA, 25 bp, Probe sequence
acaagcagtttcaacctgatattcc

SEQ ID NO: 240536 - DNA, 25 bp, Probe sequence
aacagtactcaacttttcacaaatc

SEQ ID NO: 240537 - DNA, 25 bp, Probe sequence
aagttatctatacagtttatcaaca

SEQ ID NO: 240538 - DNA, 25 bp, Probe sequence
aagggtgactccgttgacaatgaca

SEQ ID NO: 240539 - DNA, 25 bp, Probe sequence
aatttcaaagcgtatgcgattaagt

SEQ ID NO: 240540 - DNA, 25 bp, Probe sequence
caatcaagcatatcattcatggttt

SEQ ID NO: 240541 - DNA, 25 bp, Probe sequence
cttcattctgattgctatattgtta

SEQ ID NO: 240542 - DNA, 25 bp, Probe sequence
ccctatagcggtaactgactggaat

SEQ ID NO: 240543 - DNA, 25 bp, Probe sequence
cctatactatcatggccgacgtttt

SEQ ID NO: 240544 - DNA, 25 bp, Probe sequence
gcagatttgcagcctatactatcat

SEQ ID NO: 240545 - DNA, 25 bp, Probe sequence
gaatgttcaggcatcagatttatcg

SEQ ID NO: 240546 - DNA, 25 bp, Probe sequence
gatcagtcaaggcgggtatttattc

SEQ ID NO: 240547 - DNA, 25 bp, Probe sequence
gatgcacgagatagtcgccatttgt

SEQ ID NO: 240548 - DNA, 25 bp, Probe sequence
gatagtcgccatttgtcatttatag

SEQ ID NO: 240549 - DNA, 25 bp, Probe sequence
gatttttattatgccatgatcagtc

SEQ ID NO: 240550 - DNA, 25 bp, Probe sequence
gattgccgttggtgtcattaaacaa

SEQ ID NO: 240551 - DNA, 25 bp, Probe sequence
gtagcaatctataaatcaacttcaa

SEQ ID NO: 240552 - DNA, 25 bp, Probe sequence
gtcatttatagaggcgccaatcatt

SEQ ID NO: 240553 - DNA, 25 bp, Probe sequence
ggttattcaacattaagagccaatt

SEQ ID NO: 240554 - DNA, 25 bp, Probe sequence
taatgtcgaagtaattattccacaa

SEQ ID NO: 240555 - DNA, 25 bp, Probe sequence
tagttctgctttcatgtcttttcat

SEQ ID NO: 240556 - DNA, 25 bp, Probe sequence
ttatggactttcttaatgttactaa

SEQ ID NO: 240557 - DNA, 25 bp, Probe sequence
ttcaaaccaaagggtgactccgttg

SEQ ID NO: 240558 - DNA, 25 bp, Probe sequence
ttcacaaatcattatcgcaatcatt

SEQ ID NO: 240559 - DNA, 25 bp, Probe sequence
ttgaatttgcaccttatcacgaaac

SEQ ID NO: 240560 - DNA, 25 bp, Probe sequence
ctacctgggcaatggttcctactta

SEQ ID NO: 240561 - DNA, 25 bp, Probe sequence
attccgttattttatcttgcatcat

SEQ ID NO: 240562 - DNA, 25 bp, Probe sequence
attttctgggttgctacgacttggt

SEQ ID NO: 240563 - DNA, 25 bp, Probe sequence
atgggtcatcattactattggcaag

SEQ ID NO: 240564 - DNA, 25 bp, Probe sequence
agtcaattctttttctggggtgctt

SEQ ID NO: 240565 - DNA, 25 bp, Probe sequence
agtcgtgccactttgtttattaatt

SEQ ID NO: 240566 - DNA, 25 bp, Probe sequence
agcatacacacactatcgcttatat

SEQ ID NO: 240567 - DNA, 25 bp, Probe sequence
acgacgattcgtgcattatattttc

SEQ ID NO: 240568 - DNA, 25 bp, Probe sequence
aacacaccagcagttaactactttg

SEQ ID NO: 240569 - DNA, 25 bp, Probe sequence
aacagattatggctcctacctgggc

SEQ ID NO: 240570 - DNA, 25 bp, Probe sequence
aaggctctttccatttaatattgcg

SEQ ID NO: 240571 - DNA, 25 bp, Probe sequence
catgcccatggttctatggctggcg

SEQ ID NO: 240572 - DNA, 25 bp, Probe sequence
cgagggtttttaccagctattcgca

SEQ ID NO: 240573 - DNA, 25 bp, Probe sequence
gctattcgggcactttggttgggaa

SEQ ID NO: 240574 - DNA, 25 bp, Probe sequence
gctagcactgggttcttgtttttca

SEQ ID NO: 240575 - DNA, 25 bp, Probe sequence
gcagaggcattacatcattacctga

SEQ ID NO: 240576 - DNA, 25 bp, Probe sequence
gcaatggactgcagcacatgcccat

SEQ ID NO: 240577 - DNA, 25 bp, Probe sequence
gaagcacctcgtccaacaaagatag

SEQ ID NO: 240578 - DNA, 25 bp, Probe sequence
gaagcatttgccgtagtgttgattg

SEQ ID NO: 240579 - DNA, 25 bp, Probe sequence
gatcaacttgtattaacgccaggac

SEQ ID NO: 240580 - DNA, 25 bp, Probe sequence
gattactggcgatggtggattgttc

SEQ ID NO: 240581 - DNA, 25 bp, Probe sequence
gattgattctcattggtggctattc

SEQ ID NO: 240582 - DNA, 25 bp, Probe sequence
gttggcttggcaggtatggtgttca

SEQ ID NO: 240583 - DNA, 25 bp, Probe sequence
gttcctacttaggcccagattatac

SEQ ID NO: 240584 - DNA, 25 bp, Probe sequence
gtagatatcttgttttgggccttaa

SEQ ID NO: 240585 - DNA, 25 bp, Probe sequence
gtcgttgtcatgttactatttttgg

SEQ ID NO: 240586 - DNA, 25 bp, Probe sequence
gtgacatcgcttttccttacaaagg

SEQ ID NO: 240587 - DNA, 25 bp, Probe sequence
gggtgcttggctatcatcaacagat

SEQ ID NO: 240588 - DNA, 25 bp, Probe sequence
gggttatcattctttgtcgagggtt

SEQ ID NO: 240589 - DNA, 25 bp, Probe sequence
ggtgatcattccatatggctagcac

SEQ ID NO: 240590 - DNA, 25 bp, Probe sequence
ggtacatttatttttcttgcttcaa

SEQ ID NO: 240591 - DNA, 25 bp, Probe sequence
ggactgctatatctgtaacattact

SEQ ID NO: 240592 - DNA, 25 bp, Probe sequence
tggctggcgtgtatggtatgttctc

SEQ ID NO: 240593 - DNA, 25 bp, Probe sequence
tactgattgcaggcttggcattcat

SEQ ID NO: 240594 - DNA, 25 bp, Probe sequence
attactattgcttttacaatcatac

SEQ ID NO: 240595 - DNA, 25 bp, Probe sequence
atatgttaatattacggcttatagt

SEQ ID NO: 240596 - DNA, 25 bp, Probe sequence
atcatacatcatcctatacttgatc

SEQ ID NO: 240597 - DNA, 25 bp, Probe sequence
atcctatacttgatcgttttaatcc

SEQ ID NO: 240598 - DNA, 25 bp, Probe sequence
acatcatcctatacttgatcgtttt

SEQ ID NO: 240599 - DNA, 25 bp, Probe sequence
acaatcatacatcatcctatacttg

SEQ ID NO: 240600 - DNA, 25 bp, Probe sequence
aaagtgccaaaaggtacgcaacaat

SEQ ID NO: 240601 - DNA, 25 bp, Probe sequence
aaagcttgattataaattaacattt

SEQ ID NO: 240602 - DNA, 25 bp, Probe sequence
aaggtacgcaacaatatgttaatat

SEQ ID NO: 240603 - DNA, 25 bp, Probe sequence
caatcatacatcatcctatacttga

SEQ ID NO: 240604 - DNA, 25 bp, Probe sequence
catacatcatcctatacttgatcgt

SEQ ID NO: 240605 - DNA, 25 bp, Probe sequence
catcatcctatacttgatcgtttta

SEQ ID NO: 240606 - DNA, 25 bp, Probe sequence
cttttacaatcatacatcatcctat

SEQ ID NO: 240607 - DNA, 25 bp, Probe sequence
cctagtagaacgtatgtcgaaataa

SEQ ID NO: 240608 - DNA, 25 bp, Probe sequence
cctatacttgatcgttttaatcctt

SEQ ID NO: 240609 - DNA, 25 bp, Probe sequence
gccaaaaggtacgcaacaatatgtt

SEQ ID NO: 240610 - DNA, 25 bp, Probe sequence
gccaaagtgccaaaaggtacgcaac

SEQ ID NO: 240611 - DNA, 25 bp, Probe sequence
gcttttacaatcatacatcatccta

SEQ ID NO: 240612 - DNA, 25 bp, Probe sequence
gaggggaaaagcttgattataaatt

SEQ ID NO: 240613 - DNA, 25 bp, Probe sequence
gttaatattacggcttatagtgaaa

SEQ ID NO: 240614 - DNA, 25 bp, Probe sequence
gttatgccaaagtgccaaaaggtac

SEQ ID NO: 240615 - DNA, 25 bp, Probe sequence
gtagaacgtatgtcgaaataaagca

SEQ ID NO: 240616 - DNA, 25 bp, Probe sequence
tgcttttacaatcatacatcatcct

SEQ ID NO: 240617 - DNA, 25 bp, Probe sequence
tcatcctatacttgatcgttttaat

SEQ ID NO: 240618 - DNA, 25 bp, Probe sequence
tacaatcatacatcatcctatactt

SEQ ID NO: 240619 - DNA, 25 bp, Probe sequence
tacatcatcctatacttgatcgttt

SEQ ID NO: 240620 - DNA, 25 bp, Probe sequence
tacttgatcgttttaatcctttctt

SEQ ID NO: 240621 - DNA, 25 bp, Probe sequence
tatagttatgccaaagtgccaaaag

SEQ ID NO: 240622 - DNA, 25 bp, Probe sequence
tatgccaaagtgccaaaaggtacgc

SEQ ID NO: 240623 - DNA, 25 bp, Probe sequence
tattacggcttatagtgaaagaggg

SEQ ID NO: 240624 - DNA, 25 bp, Probe sequence
tatcattgcaatattattaggatta

SEQ ID NO: 240625 - DNA, 25 bp, Probe sequence
tatacttgatcgttttaatcctttc

SEQ ID NO: 240626 - DNA, 25 bp, Probe sequence
tttacaatcatacatcatcctatac

SEQ ID NO: 240627 - DNA, 25 bp, Probe sequence
ttgcttttacaatcatacatcatcc

SEQ ID NO: 240628 - DNA, 25 bp, Probe sequence
attcgaacaaatggacaaggcttaa

SEQ ID NO: 240629 - DNA, 25 bp, Probe sequence
atacgacggctatggatacaacggt

SEQ ID NO: 240630 - DNA, 25 bp, Probe sequence
ataaagttaaaccaagcctctgtca

SEQ ID NO: 240631 - DNA, 25 bp, Probe sequence
ataattgaacaagatacgacggcta

SEQ ID NO: 240632 - DNA, 25 bp, Probe sequence
atcaatcagctctatctaattatga

SEQ ID NO: 240633 - DNA, 25 bp, Probe sequence
agttaaaccaagcctctgtcagcaa

SEQ ID NO: 240634 - DNA, 25 bp, Probe sequence
agaaatttcaagcattcgaacaaat

SEQ ID NO: 240635 - DNA, 25 bp, Probe sequence
accaagcctctgtcagcaaagaaat

SEQ ID NO: 240636 - DNA, 25 bp, Probe sequence
acgacggctatggatacaacggtaa

SEQ ID NO: 240637 - DNA, 25 bp, Probe sequence
acaagatacgacggctatggataca

SEQ ID NO: 240638 - DNA, 25 bp, Probe sequence
aaagttaaaccaagcctctgtcagc

SEQ ID NO: 240639 - DNA, 25 bp, Probe sequence
aaaccaagcctctgtcagcaaagaa

SEQ ID NO: 240640 - DNA, 25 bp, Probe sequence
aaacgatagagaaatagcaggacaa

SEQ ID NO: 240641 - DNA, 25 bp, Probe sequence
aagcctctgtcagcaaagaaatttc

SEQ ID NO: 240642 - DNA, 25 bp, Probe sequence
aagttaaaccaagcctctgtcagca

SEQ ID NO: 240643 - DNA, 25 bp, Probe sequence
aagatacgacggctatggatacaac

SEQ ID NO: 240644 - DNA, 25 bp, Probe sequence
caatcagctctatctaattatgaaa

SEQ ID NO: 240645 - DNA, 25 bp, Probe sequence
cagctctatctaattatgaaaacat

SEQ ID NO: 240646 - DNA, 25 bp, Probe sequence
gcctctgtcagcaaagaaatttcaa

SEQ ID NO: 240647 - DNA, 25 bp, Probe sequence
gcaaagaaatttcaagcattcgaac

SEQ ID NO: 240648 - DNA, 25 bp, Probe sequence
gaatctcgttacttttaaagaatat

SEQ ID NO: 240649 - DNA, 25 bp, Probe sequence
gaagattatcaatcagctctatcta

SEQ ID NO: 240650 - DNA, 25 bp, Probe sequence
gacggctatggatacaacggtaaca

SEQ ID NO: 240651 - DNA, 25 bp, Probe sequence
gaacaagatacgacggctatggata

SEQ ID NO: 240652 - DNA, 25 bp, Probe sequence
gatacgacggctatggatacaacgg

SEQ ID NO: 240653 - DNA, 25 bp, Probe sequence
gattatcaatcagctctatctaatt

SEQ ID NO: 240654 - DNA, 25 bp, Probe sequence
gttaaaccaagcctctgtcagcaaa

SEQ ID NO: 240655 - DNA, 25 bp, Probe sequence
gtttgaagattatcaatcagctcta

SEQ ID NO: 240656 - DNA, 25 bp, Probe sequence
ggatacaacggtaacagaaattgtt

SEQ ID NO: 240657 - DNA, 25 bp, Probe sequence
ggacaaggcttaaaacaatcaaatg

SEQ ID NO: 240658 - DNA, 25 bp, Probe sequence
ggcttaaaacaatcaaatgggaatg

SEQ ID NO: 240659 - DNA, 25 bp, Probe sequence
ggctatggatacaacggtaacagaa

SEQ ID NO: 240660 - DNA, 25 bp, Probe sequence
ttatcaatcagctctatctaattat

SEQ ID NO: 240661 - DNA, 25 bp, Probe sequence
ttaaaccaagcctctgtcagcaaag

SEQ ID NO: 240662 - DNA, 25 bp, Probe sequence
aggactaaaagtgacagcaaaaaga

SEQ ID NO: 240663 - DNA, 25 bp, Probe sequence
attggatacagcaggagaagatttt

SEQ ID NO: 240664 - DNA, 25 bp, Probe sequence
atagatgcacttaaatcaaaattat

SEQ ID NO: 240665 - DNA, 25 bp, Probe sequence
agggagtcgaaggagaaatcagtac

SEQ ID NO: 240666 - DNA, 25 bp, Probe sequence
acagcaggagaagattttaacaaag

SEQ ID NO: 240667 - DNA, 25 bp, Probe sequence
aaatcagtactataaatgcagctat

SEQ ID NO: 240668 - DNA, 25 bp, Probe sequence
aaaggacagagtagttataacaaag

SEQ ID NO: 240669 - DNA, 25 bp, Probe sequence
aaagaagcacaactaacagatttaa

SEQ ID NO: 240670 - DNA, 25 bp, Probe sequence
aaaagaaagatgtcgattctgaatt

SEQ ID NO: 240671 - DNA, 25 bp, Probe sequence
aagactttgatgatgcgaagaaggc

SEQ ID NO: 240672 - DNA, 25 bp, Probe sequence
gcagctatagatgcacttaaatcaa

SEQ ID NO: 240673 - DNA, 25 bp, Probe sequence
gcaagtaaagaagcacaactaacag

SEQ ID NO: 240674 - DNA, 25 bp, Probe sequence
gcacaactaacagatttaaaagagg

SEQ ID NO: 240675 - DNA, 25 bp, Probe sequence
gaaggctattaaaaaagatattcag

SEQ ID NO: 240676 - DNA, 25 bp, Probe sequence
gaagattttaacaaaggacagagta

SEQ ID NO: 240677 - DNA, 25 bp, Probe sequence
gaagaaatcaagggagtcgaaggag

SEQ ID NO: 240678 - DNA, 25 bp, Probe sequence
gaagcacaactaacagatttaaaag

SEQ ID NO: 240679 - DNA, 25 bp, Probe sequence
gaacaagactttgatgatgcgaaga

SEQ ID NO: 240680 - DNA, 25 bp, Probe sequence
gaaagaaggactaaaagtgacagca

SEQ ID NO: 240681 - DNA, 25 bp, Probe sequence
gaaagacgcttcgaaaaaattggat

SEQ ID NO: 240682 - DNA, 25 bp, Probe sequence
gaaagatgtcgattctgaattaaaa

SEQ ID NO: 240683 - DNA, 25 bp, Probe sequence
gaaatcagtactataaatgcagcta

SEQ ID NO: 240684 - DNA, 25 bp, Probe sequence
gaaattagtacttcagattggaaag

SEQ ID NO: 240685 - DNA, 25 bp, Probe sequence
gactttgatgatgcgaagaaggcta

SEQ ID NO: 240686 - DNA, 25 bp, Probe sequence
gacgcttcgaaaaaattggatacag

SEQ ID NO: 240687 - DNA, 25 bp, Probe sequence
gatgatgcgaagaaggctattaaaa

SEQ ID NO: 240688 - DNA, 25 bp, Probe sequence
gatacagcaggagaagattttaaca

SEQ ID NO: 240689 - DNA, 25 bp, Probe sequence
gttgaacaagactttgatgatgcga

SEQ ID NO: 240690 - DNA, 25 bp, Probe sequence
gtagaaattagtacttcagattgga

SEQ ID NO: 240691 - DNA, 25 bp, Probe sequence
gtcgaaggagaaatcagtactataa

SEQ ID NO: 240692 - DNA, 25 bp, Probe sequence
ggagaaataagaaggcaaattgcta

SEQ ID NO: 240693 - DNA, 25 bp, Probe sequence
taagaaggttgaaagacgcttcgaa

SEQ ID NO: 240694 - DNA, 25 bp, Probe sequence
taaatgcagctatagatgcacttaa

SEQ ID NO: 240695 - DNA, 25 bp, Probe sequence
tagtacttcagattggaaaggagaa

SEQ ID NO: 240696 - DNA, 25 bp, Probe sequence
attactgcaattactgacaacatag

SEQ ID NO: 240697 - DNA, 25 bp, Probe sequence
atatcattggtaaactcggcaaatt

SEQ ID NO: 240698 - DNA, 25 bp, Probe sequence
agggtatcaaagtgtaagtgctcaa

SEQ ID NO: 240699 - DNA, 25 bp, Probe sequence
agttgatatgtctgaagtgcacaat

SEQ ID NO: 240700 - DNA, 25 bp, Probe sequence
agcagcttctgacataattacccaa

SEQ ID NO: 240701 - DNA, 25 bp, Probe sequence
agctgtagggaatggcagtgcttta

SEQ ID NO: 240702 - DNA, 25 bp, Probe sequence
accttcgacgccaacaattctatag

SEQ ID NO: 240703 - DNA, 25 bp, Probe sequence
aaaccattaggatttattactgcaa

SEQ ID NO: 240704 - DNA, 25 bp, Probe sequence
aaaaagcagcagtcacagaatttaa

SEQ ID NO: 240705 - DNA, 25 bp, Probe sequence
aacaccaggtctaagtaaagcagct

SEQ ID NO: 240706 - DNA, 25 bp, Probe sequence
aagtgctattggtgcaagtgcagct

SEQ ID NO: 240707 - DNA, 25 bp, Probe sequence
aataatgcttcagctatattggatg

SEQ ID NO: 240708 - DNA, 25 bp, Probe sequence
aattacccaagctggacgcgagtac

SEQ ID NO: 240709 - DNA, 25 bp, Probe sequence
ccgtatcttgataagtctgcaacag

SEQ ID NO: 240710 - DNA, 25 bp, Probe sequence
gcaggtgcagctgttggaacggcaa

SEQ ID NO: 240711 - DNA, 25 bp, Probe sequence
gcaggtgcattagctggagcagcag

SEQ ID NO: 240712 - DNA, 25 bp, Probe sequence
gaagccaaaccgtgcaagaattagt

SEQ ID NO: 240713 - DNA, 25 bp, Probe sequence
gaaggattcgaaggtcagacagcaa

SEQ ID NO: 240714 - DNA, 25 bp, Probe sequence
gaaagattaacgaccttcgacgcca

SEQ ID NO: 240715 - DNA, 25 bp, Probe sequence
gacgcgagtactatgctatcaaagc

SEQ ID NO: 240716 - DNA, 25 bp, Probe sequence
gaggcaaggctttaaaaccattagg

SEQ ID NO: 240717 - DNA, 25 bp, Probe sequence
gatggcaaacttacatggaaacgtt

SEQ ID NO: 240718 - DNA, 25 bp, Probe sequence
gatggtattaactcgggtattaaca

SEQ ID NO: 240719 - DNA, 25 bp, Probe sequence
gatgcaaacggagctatttcagatg

SEQ ID NO: 240720 - DNA, 25 bp, Probe sequence
gtttcagatttaacaacagccaaaa

SEQ ID NO: 240721 - DNA, 25 bp, Probe sequence
gtagtaggaacagttgcaggtgcat

SEQ ID NO: 240722 - DNA, 25 bp, Probe sequence
gtgaatttgcccgtaataatccttt

SEQ ID NO: 240723 - DNA, 25 bp, Probe sequence
ggtgcaagtgcagctgcaggtgcag

SEQ ID NO: 240724 - DNA, 25 bp, Probe sequence
ggttagcacgcttagcagtagcata

SEQ ID NO: 240725 - DNA, 25 bp, Probe sequence
ggatgagcaaagtccaagggtatca

SEQ ID NO: 240726 - DNA, 25 bp, Probe sequence
ggagcagcagtgggtatagctttag

SEQ ID NO: 240727 - DNA, 25 bp, Probe sequence
ggagctatttcagatgtttcagatt

SEQ ID NO: 240728 - DNA, 25 bp, Probe sequence
ggaacggcaataccattacctgtag

SEQ ID NO: 240729 - DNA, 25 bp, Probe sequence
tgcgaaatctatacgtaaattccaa

SEQ ID NO: 240730 - DNA, 25 bp, Probe sequence
attaatgctatttgtatcgtggttt

SEQ ID NO: 240731 - DNA, 25 bp, Probe sequence
atttgcagcagttgtatttatttta

SEQ ID NO: 240732 - DNA, 25 bp, Probe sequence
agaacagtcgttcctaatactgcag

SEQ ID NO: 240733 - DNA, 25 bp, Probe sequence
agctgggtattcaatggtactactt

SEQ ID NO: 240734 - DNA, 25 bp, Probe sequence
aaagagagcttatctgacaccatta

SEQ ID NO: 240735 - DNA, 25 bp, Probe sequence
caatggtactacttgttgcctctat

SEQ ID NO: 240736 - DNA, 25 bp, Probe sequence
cattaaatgttgtagctgggtattc

SEQ ID NO: 240737 - DNA, 25 bp, Probe sequence
cttgttgcctctatttatgtttttg

SEQ ID NO: 240738 - DNA, 25 bp, Probe sequence
gctgttgatttattgctggttagat

SEQ ID NO: 240739 - DNA, 25 bp, Probe sequence
gctatttgtatcgtggtttgctcta

SEQ ID NO: 240740 - DNA, 25 bp, Probe sequence
gcttttggaggacttttctatatca

SEQ ID NO: 240741 - DNA, 25 bp, Probe sequence
gcaggctatggttttgatgtattta

SEQ ID NO: 240742 - DNA, 25 bp, Probe sequence
gaaaccttcaagggaaattgccaat

SEQ ID NO: 240743 - DNA, 25 bp, Probe sequence
gaaatttataactctaagtatctta

SEQ ID NO: 240744 - DNA, 25 bp, Probe sequence
gacaccattaataatttttgtgatt

SEQ ID NO: 240745 - DNA, 25 bp, Probe sequence
gagagcttatctgacaccattaata

SEQ ID NO: 240746 - DNA, 25 bp, Probe sequence
gatgtatttaattactggttaggta

SEQ ID NO: 240747 - DNA, 25 bp, Probe sequence
gatatcgaaaacggagtggatgatt

SEQ ID NO: 240748 - DNA, 25 bp, Probe sequence
gttatctgcttttggaggacttttc

SEQ ID NO: 240749 - DNA, 25 bp, Probe sequence
gtatttctaatatttgcagcagttg

SEQ ID NO: 240750 - DNA, 25 bp, Probe sequence
gtatcttaattaatatagctgttga

SEQ ID NO: 240751 - DNA, 25 bp, Probe sequence
gtatcgtggtttgctctatttttgt

SEQ ID NO: 240752 - DNA, 25 bp, Probe sequence
gtcgttcctaatactgcagatgaag

SEQ ID NO: 240753 - DNA, 25 bp, Probe sequence
gtgattttgttttcattattttttg

SEQ ID NO: 240754 - DNA, 25 bp, Probe sequence
gtggtttgctctatttttgttttat

SEQ ID NO: 240755 - DNA, 25 bp, Probe sequence
ggtagcaggctatggttttgatgta

SEQ ID NO: 240756 - DNA, 25 bp, Probe sequence
ggacttttctatatcagaacagtcg

SEQ ID NO: 240757 - DNA, 25 bp, Probe sequence
tgcctctatttatgtttttggggta

SEQ ID NO: 240758 - DNA, 25 bp, Probe sequence
tcaaacgttattcgttatttaacat

SEQ ID NO: 240759 - DNA, 25 bp, Probe sequence
taatgtatttttatggaaaccttca

SEQ ID NO: 240760 - DNA, 25 bp, Probe sequence
tactacttgttgcctctatttatgt

SEQ ID NO: 240761 - DNA, 25 bp, Probe sequence
tatgtttttggggtagcaggctatg

SEQ ID NO: 240762 - DNA, 25 bp, Probe sequence
tattgctggttagatcatattttaa

SEQ ID NO: 240763 - DNA, 25 bp, Probe sequence
tttattttaatgtacttccaagaga

SEQ ID NO: 240764 - DNA, 25 bp, Probe sequence
attgcaaatcaatgtgacgaaataa

SEQ ID NO: 240765 - DNA, 25 bp, Probe sequence
atactattgctggacttgaaaaaac

SEQ ID NO: 240766 - DNA, 25 bp, Probe sequence
atgatatggctattgcaaatcaatg

SEQ ID NO: 240767 - DNA, 25 bp, Probe sequence
agctgatgaaccaacgggtgcgtta

SEQ ID NO: 240768 - DNA, 25 bp, Probe sequence
acaacgtgtcgctttaattagaatg

SEQ ID NO: 240769 - DNA, 25 bp, Probe sequence
aaatcatatgcacttattggtaaaa

SEQ ID NO: 240770 - DNA, 25 bp, Probe sequence
aaagttcatacgctaagtggaggtg

SEQ ID NO: 240771 - DNA, 25 bp, Probe sequence
aaagtgctgattttagcaacacatg

SEQ ID NO: 240772 - DNA, 25 bp, Probe sequence
aaaacaggacagatgattattcaat

SEQ ID NO: 240773 - DNA, 25 bp, Probe sequence
aagaaaagttcatacgctaagtgga

SEQ ID NO: 240774 - DNA, 25 bp, Probe sequence
aaaagatccgattgttatgttagct

SEQ ID NO: 240775 - DNA, 25 bp, Probe sequence
aagatccgattgttatgttagctga

SEQ ID NO: 240776 - DNA, 25 bp, Probe sequence
aatatgtctattttaatggtcaatt

SEQ ID NO: 240777 - DNA, 25 bp, Probe sequence
caacacatgatatggctattgcaaa

SEQ ID NO: 240778 - DNA, 25 bp, Probe sequence
catacgctaagtggaggtgaacaac

SEQ ID NO: 240779 - DNA, 25 bp, Probe sequence
cagtttggtctgtcaaacagtttaa

SEQ ID NO: 240780 - DNA, 25 bp, Probe sequence
gcggtaaatctacattattaaatac

SEQ ID NO: 240781 - DNA, 25 bp, Probe sequence
gctgattttagcaacacatgatatg

SEQ ID NO: 240782 - DNA, 25 bp, Probe sequence
gaaccaacgggtgcgttagatccta

SEQ ID NO: 240783 - DNA, 25 bp, Probe sequence
gaatgatgttaaaagatccgattgt

SEQ ID NO: 240784 - DNA, 25 bp, Probe sequence
gaacaacaacgtgtcgctttaatta

SEQ ID NO: 240785 - DNA, 25 bp, Probe sequence
gaacagtttggtctgtcaaacagtt

SEQ ID NO: 240786 - DNA, 25 bp, Probe sequence
gaaaatttagatattggattagcat

SEQ ID NO: 240787 - DNA, 25 bp, Probe sequence
gatacgttatatagaacagtttggt

SEQ ID NO: 240788 - DNA, 25 bp, Probe sequence
gttagctgatgaaccaacgggtgcg

SEQ ID NO: 240789 - DNA, 25 bp, Probe sequence
gttatgttagctgatgaaccaacgg

SEQ ID NO: 240790 - DNA, 25 bp, Probe sequence
gtgtcgctttaattagaatgatgtt

SEQ ID NO: 240791 - DNA, 25 bp, Probe sequence
gtggatgcggtaaatctacattatt

SEQ ID NO: 240792 - DNA, 25 bp, Probe sequence
gtggaaaatcatatgcacttattgg

SEQ ID NO: 240793 - DNA, 25 bp, Probe sequence
ggtgaacaacaacgtgtcgctttaa

SEQ ID NO: 240794 - DNA, 25 bp, Probe sequence
ggaggtgaacaacaacgtgtcgctt

SEQ ID NO: 240795 - DNA, 25 bp, Probe sequence
tccgattgttatgttagctgatgaa

SEQ ID NO: 240796 - DNA, 25 bp, Probe sequence
tattggtaaaagtggatgcggtaaa

SEQ ID NO: 240797 - DNA, 25 bp, Probe sequence
ttaaatactattgctggacttgaaa

SEQ ID NO: 240798 - DNA, 25 bp, Probe sequence
attggttaaatgcattagatacagt

SEQ ID NO: 240799 - DNA, 25 bp, Probe sequence
attatgccgttttgtgtgaagatta

SEQ ID NO: 240800 - DNA, 25 bp, Probe sequence
atattaagatcctaaatcaaccata

SEQ ID NO: 240801 - DNA, 25 bp, Probe sequence
atatagctcttaatgatgaacttca

SEQ ID NO: 240802 - DNA, 25 bp, Probe sequence
atatccaactggtcctataattttc

SEQ ID NO: 240803 - DNA, 25 bp, Probe sequence
atacagcatatatagctcttaatga

SEQ ID NO: 240804 - DNA, 25 bp, Probe sequence
atgatgaacttcaagatatacctga

SEQ ID NO: 240805 - DNA, 25 bp, Probe sequence
agatatatatccaactggtcctata

SEQ ID NO: 240806 - DNA, 25 bp, Probe sequence
acggcttttgaaatttatgctcaag

SEQ ID NO: 240807 - DNA, 25 bp, Probe sequence
aaatcaaccatattatcatgtaatg

SEQ ID NO: 240808 - DNA, 25 bp, Probe sequence
aagagaattagcaggtttgggtgaa

SEQ ID NO: 240809 - DNA, 25 bp, Probe sequence
aagtgttttgaagaagaggaatttg

SEQ ID NO: 240810 - DNA, 25 bp, Probe sequence
caactggtcctataattttccaaag

SEQ ID NO: 240811 - DNA, 25 bp, Probe sequence
cctacgttatcaactaagtgttttg

SEQ ID NO: 240812 - DNA, 25 bp, Probe sequence
tccaactggtcctataattttccaa

SEQ ID NO: 240813 - DNA, 25 bp, Probe sequence
gccgttttgtgtgaagattacattt

SEQ ID NO: 240814 - DNA, 25 bp, Probe sequence
gaattagcaggtttgggtgaatata

SEQ ID NO: 240815 - DNA, 25 bp, Probe sequence
gaatttttcatggacaaagatatat

SEQ ID NO: 240816 - DNA, 25 bp, Probe sequence
gaatgttaattatgccgttttgtgt

SEQ ID NO: 240817 - DNA, 25 bp, Probe sequence
gaagaggaatttgaaagagcttata

SEQ ID NO: 240818 - DNA, 25 bp, Probe sequence
gaaattgaatatgtagctaacgaaa

SEQ ID NO: 240819 - DNA, 25 bp, Probe sequence
gaggtaggacctacgttatcaacta

SEQ ID NO: 240820 - DNA, 25 bp, Probe sequence
gatcctaaatcaaccatattatcat

SEQ ID NO: 240821 - DNA, 25 bp, Probe sequence
gatatacctgaattgaacatcaaat

SEQ ID NO: 240822 - DNA, 25 bp, Probe sequence
gttaattatgccgttttgtgtgaag

SEQ ID NO: 240823 - DNA, 25 bp, Probe sequence
gtaggacctacgttatcaactaagt

SEQ ID NO: 240824 - DNA, 25 bp, Probe sequence
gtaggaatgttaattatgccgtttt

SEQ ID NO: 240825 - DNA, 25 bp, Probe sequence
gtagatttggatgagagtgaagtat

SEQ ID NO: 240826 - DNA, 25 bp, Probe sequence
ggacctacgttatcaactaagtgtt

SEQ ID NO: 240827 - DNA, 25 bp, Probe sequence
ggtcctataattttccaaagagaat

SEQ ID NO: 240828 - DNA, 25 bp, Probe sequence
ggtacggcttttgaaatttatgctc

SEQ ID NO: 240829 - DNA, 25 bp, Probe sequence
tggtggtacggcttttgaaatttat

SEQ ID NO: 240830 - DNA, 25 bp, Probe sequence
tattgattgtttagaggtaggacct

SEQ ID NO: 240831 - DNA, 25 bp, Probe sequence
tttatgctcaagtagatttggatga

SEQ ID NO: 240832 - DNA, 25 bp, Probe sequence
atgtgactatggatgactatgaaga

SEQ ID NO: 240833 - DNA, 25 bp, Probe sequence
agactttacaaatcttgcaatttct

SEQ ID NO: 240834 - DNA, 25 bp, Probe sequence
acatggtcgtatcacttccaacaat

SEQ ID NO: 240835 - DNA, 25 bp, Probe sequence
acagatgaaatagcgttacttgagg

SEQ ID NO: 240836 - DNA, 25 bp, Probe sequence
acaaatcttgcaatttctaaaggta

SEQ ID NO: 240837 - DNA, 25 bp, Probe sequence
aaaaatggatactcatatattatga

SEQ ID NO: 240838 - DNA, 25 bp, Probe sequence
aaaacttattttgatgtgactatgg

SEQ ID NO: 240839 - DNA, 25 bp, Probe sequence
cgtttacttcgtcttattatcacac

SEQ ID NO: 240840 - DNA, 25 bp, Probe sequence
caattacagggccattaacctttgc

SEQ ID NO: 240841 - DNA, 25 bp, Probe sequence
aaggccaaagtgtatgaaaatgatt

SEQ ID NO: 240842 - DNA, 25 bp, Probe sequence
aatgtagcttacaaaacttattttg

SEQ ID NO: 240843 - DNA, 25 bp, Probe sequence
cagggccattaacctttgcagtcac

SEQ ID NO: 240844 - DNA, 25 bp, Probe sequence
cacttccaacaattttataacagat

SEQ ID NO: 240845 - DNA, 25 bp, Probe sequence
catgttacatggtcgtatcacttcc

SEQ ID NO: 240846 - DNA, 25 bp, Probe sequence
cttcgtcttattatcacacaatgag

SEQ ID NO: 240847 - DNA, 25 bp, Probe sequence
gccattaacctttgcagtcacgcaa

SEQ ID NO: 240848 - DNA, 25 bp, Probe sequence
gcggtgaacaaggttggattgatgt

SEQ ID NO: 240849 - DNA, 25 bp, Probe sequence
gcagtcacgcaaatagacttgcaaa

SEQ ID NO: 240850 - DNA, 25 bp, Probe sequence
gaacgaatttgcttctgacaacaat

SEQ ID NO: 240851 - DNA, 25 bp, Probe sequence
gaacatatttttgtctagataacat

SEQ ID NO: 240852 - DNA, 25 bp, Probe sequence
gaaatagcgttacttgaggatatga

SEQ ID NO: 240853 - DNA, 25 bp, Probe sequence
gttacatggtcgtatcacttccaac

SEQ ID NO: 240854 - DNA, 25 bp, Probe sequence
gttttagcggtgaacaaggttggat

SEQ ID NO: 240855 - DNA, 25 bp, Probe sequence
gtatcacttccaacaattttataac

SEQ ID NO: 240856 - DNA, 25 bp, Probe sequence
gtcgtatcacttccaacaattttat

SEQ ID NO: 240857 - DNA, 25 bp, Probe sequence
ggattgatgtaaaggccaaagtgta

SEQ ID NO: 240858 - DNA, 25 bp, Probe sequence
ggatatgaacgaatttgcttctgac

SEQ ID NO: 240859 - DNA, 25 bp, Probe sequence
tgacaacaatttaacgtttacttcg

SEQ ID NO: 240860 - DNA, 25 bp, Probe sequence
tacagggccattaacctttgcagtc

SEQ ID NO: 240861 - DNA, 25 bp, Probe sequence
taacctttgcagtcacgcaaataga

SEQ ID NO: 240862 - DNA, 25 bp, Probe sequence
tttgcttctgacaacaatttaacgt

SEQ ID NO: 240863 - DNA, 25 bp, Probe sequence
tttttgtctagataacatgttacat

SEQ ID NO: 240864 - DNA, 25 bp, Probe sequence
ttacttcgtcttattatcacacaat

SEQ ID NO: 240865 - DNA, 25 bp, Probe sequence
ttgatttatttatttcagttggaaa

SEQ ID NO: 240866 - DNA, 25 bp, Probe sequence
attgcgtcaattataagcccattaa

SEQ ID NO: 240867 - DNA, 25 bp, Probe sequence
attaattgttaaatatactgaggta

SEQ ID NO: 240868 - DNA, 25 bp, Probe sequence
attacgataatgcgaatgtattaaa

SEQ ID NO: 240869 - DNA, 25 bp, Probe sequence
attagatactaatcagttaaatgaa

SEQ ID NO: 240870 - DNA, 25 bp, Probe sequence
attttattgcgtcaattataagccc

SEQ ID NO: 240871 - DNA, 25 bp, Probe sequence
atggatattttattgcgtcaattat

SEQ ID NO: 240872 - DNA, 25 bp, Probe sequence
aggggattttcaattacgataatgc

SEQ ID NO: 240873 - DNA, 25 bp, Probe sequence
aaatggatattttattgcgtcaatt

SEQ ID NO: 240874 - DNA, 25 bp, Probe sequence
aagtcattgacgatatatttaaaaa

SEQ ID NO: 240875 - DNA, 25 bp, Probe sequence
aaggggattttcaattacgataatg

SEQ ID NO: 240876 - DNA, 25 bp, Probe sequence
aatggatattttattgcgtcaatta

SEQ ID NO: 240877 - DNA, 25 bp, Probe sequence
aatgcgaatgtattaaaattagata

SEQ ID NO: 240878 - DNA, 25 bp, Probe sequence
gcgtcaattataagcccattaaatt

SEQ ID NO: 240879 - DNA, 25 bp, Probe sequence
gaattttatcatacatataacgaat

SEQ ID NO: 240880 - DNA, 25 bp, Probe sequence
gaagaattttatcatacatataacg

SEQ ID NO: 240881 - DNA, 25 bp, Probe sequence
gaagaagaattttatcatacatata

SEQ ID NO: 240882 - DNA, 25 bp, Probe sequence
gattttcaattacgataatgcgaat

SEQ ID NO: 240883 - DNA, 25 bp, Probe sequence
gtcaattataagcccattaaattta

SEQ ID NO: 240884 - DNA, 25 bp, Probe sequence
gggattttcaattacgataatgcga

SEQ ID NO: 240885 - DNA, 25 bp, Probe sequence
ggggattttcaattacgataatgcg

SEQ ID NO: 240886 - DNA, 25 bp, Probe sequence
ggatattttattgcgtcaattataa

SEQ ID NO: 240887 - DNA, 25 bp, Probe sequence
ggattttcaattacgataatgcgaa

SEQ ID NO: 240888 - DNA, 25 bp, Probe sequence
tggatattttattgcgtcaattata

SEQ ID NO: 240889 - DNA, 25 bp, Probe sequence
tgaaaacataaaagtcattgacgat

SEQ ID NO: 240890 - DNA, 25 bp, Probe sequence
tgcgtcaattataagcccattaaat

SEQ ID NO: 240891 - DNA, 25 bp, Probe sequence
tcaattacgataatgcgaatgtatt

SEQ ID NO: 240892 - DNA, 25 bp, Probe sequence
tcaattataagcccattaaatttaa

SEQ ID NO: 240893 - DNA, 25 bp, Probe sequence
tatcatacatataacgaattaattg

SEQ ID NO: 240894 - DNA, 25 bp, Probe sequence
tattgcgtcaattataagcccatta

SEQ ID NO: 240895 - DNA, 25 bp, Probe sequence
tttcaattacgataatgcgaatgta

SEQ ID NO: 240896 - DNA, 25 bp, Probe sequence
tttattgcgtcaattataagcccat

SEQ ID NO: 240897 - DNA, 25 bp, Probe sequence
ttttattgcgtcaattataagccca

SEQ ID NO: 240898 - DNA, 25 bp, Probe sequence
ttattgcgtcaattataagcccatt

SEQ ID NO: 240899 - DNA, 25 bp, Probe sequence
ttgcgtcaattataagcccattaaa

SEQ ID NO: 240900 - DNA, 25 bp, Probe sequence
atattttcactattagcaattttgt

SEQ ID NO: 240901 - DNA, 25 bp, Probe sequence
atacaacaactccacaaaaatgctt

SEQ ID NO: 240902 - DNA, 25 bp, Probe sequence
atgctccaaaacattttcaaactga

SEQ ID NO: 240903 - DNA, 25 bp, Probe sequence
atgacctcttcgatgttcaatagaa

SEQ ID NO: 240904 - DNA, 25 bp, Probe sequence
aggtcatatttctagaatggtacca

SEQ ID NO: 240905 - DNA, 25 bp, Probe sequence
agcactgtgtgtttactatttagaa

SEQ ID NO: 240906 - DNA, 25 bp, Probe sequence
agcgaattgatttgcttattgaagt

SEQ ID NO: 240907 - DNA, 25 bp, Probe sequence
acgactggtacatatattgcctaca

SEQ ID NO: 240908 - DNA, 25 bp, Probe sequence
aaatggttaaatcttttcaatagct

SEQ ID NO: 240909 - DNA, 25 bp, Probe sequence
aaaaatcgtaggtcatatttctaga

SEQ ID NO: 240910 - DNA, 25 bp, Probe sequence
aacaatttagcactgtgtgtttact

SEQ ID NO: 240911 - DNA, 25 bp, Probe sequence
aacagaggcacaaagattagatatt

SEQ ID NO: 240912 - DNA, 25 bp, Probe sequence
aagggatacccatatatttcaagga

SEQ ID NO: 240913 - DNA, 25 bp, Probe sequence
aatgatttctaaaaggcctgttgtt

SEQ ID NO: 240914 - DNA, 25 bp, Probe sequence
aatacggaccaagtgattttataga

SEQ ID NO: 240915 - DNA, 25 bp, Probe sequence
aatttcgatgatacgggtgcattta

SEQ ID NO: 240916 - DNA, 25 bp, Probe sequence
gcctgttgttgcctttgacatcaaa

SEQ ID NO: 240917 - DNA, 25 bp, Probe sequence
gctgatattgttactttcgattaca

SEQ ID NO: 240918 - DNA, 25 bp, Probe sequence
gaatggtaccaacgaagcgaattga

SEQ ID NO: 240919 - DNA, 25 bp, Probe sequence
gatattttgatataacgactggtac

SEQ ID NO: 240920 - DNA, 25 bp, Probe sequence
gttgcctttgacatcaaatacggac

SEQ ID NO: 240921 - DNA, 25 bp, Probe sequence
gttaagatacataatgctccaaaac

SEQ ID NO: 240922 - DNA, 25 bp, Probe sequence
gtttctacatctcaatatgaaggtc

SEQ ID NO: 240923 - DNA, 25 bp, Probe sequence
gtattatgatttgtgatggaccagg

SEQ ID NO: 240924 - DNA, 25 bp, Probe sequence
gtaaagagttttatgatgcggacat

SEQ ID NO: 240925 - DNA, 25 bp, Probe sequence
gtgatggaccagggagttttccaaa

SEQ ID NO: 240926 - DNA, 25 bp, Probe sequence
gtggtatgacctcttcgatgttcaa

SEQ ID NO: 240927 - DNA, 25 bp, Probe sequence
ggtgctgtaggtaaaacttatgtgt

SEQ ID NO: 240928 - DNA, 25 bp, Probe sequence
ggtacatatattgcctacattagaa

SEQ ID NO: 240929 - DNA, 25 bp, Probe sequence
ggagtttggttcgaaagcgagagaa

SEQ ID NO: 240930 - DNA, 25 bp, Probe sequence
tgatgcggacatacctgctgatatt

SEQ ID NO: 240931 - DNA, 25 bp, Probe sequence
taatgctaataatggtgctgtaggt

SEQ ID NO: 240932 - DNA, 25 bp, Probe sequence
tacctgctgatattgttactttcga

SEQ ID NO: 240933 - DNA, 25 bp, Probe sequence
ttgaagtggctgagttagtcgtaaa

SEQ ID NO: 240934 - DNA, 25 bp, Probe sequence
attgctatcgtcatagattcgccag

SEQ ID NO: 240935 - DNA, 25 bp, Probe sequence
attcaaggtggatatgacttaacac

SEQ ID NO: 240936 - DNA, 25 bp, Probe sequence
atagattcgccaggaaaccctattt

SEQ ID NO: 240937 - DNA, 25 bp, Probe sequence
atcgtcatagattcgccaggaaacc

SEQ ID NO: 240938 - DNA, 25 bp, Probe sequence
aaatatacaaattacgttcgatgtg

SEQ ID NO: 240939 - DNA, 25 bp, Probe sequence
aaacacgcattgatgaattaccaca

SEQ ID NO: 240940 - DNA, 25 bp, Probe sequence
aatgagttttattggaccacgcccg

SEQ ID NO: 240941 - DNA, 25 bp, Probe sequence
cacgcattgatgaattaccacaact

SEQ ID NO: 240942 - DNA, 25 bp, Probe sequence
gccaggaaaccctatttatagtcag

SEQ ID NO: 240943 - DNA, 25 bp, Probe sequence
gccattgctatcgtcatagattcgc

SEQ ID NO: 240944 - DNA, 25 bp, Probe sequence
gctatcgtcatagattcgccaggaa

SEQ ID NO: 240945 - DNA, 25 bp, Probe sequence
gcattgatgaattaccacaactaat

SEQ ID NO: 240946 - DNA, 25 bp, Probe sequence
gaattaccacaactaattaatgttg

SEQ ID NO: 240947 - DNA, 25 bp, Probe sequence
gaatttgtagaattatttagttcag

SEQ ID NO: 240948 - DNA, 25 bp, Probe sequence
gaaaccctatttatagtcaggttag

SEQ ID NO: 240949 - DNA, 25 bp, Probe sequence
gaagtttattcgtaaaacacgcatt

SEQ ID NO: 240950 - DNA, 25 bp, Probe sequence
gaacattgatggttgttattacagg

SEQ ID NO: 240951 - DNA, 25 bp, Probe sequence
gagcaaagatgtcttgttacaccag

SEQ ID NO: 240952 - DNA, 25 bp, Probe sequence
gagttgggaagatgggtaaattaat

SEQ ID NO: 240953 - DNA, 25 bp, Probe sequence
gatggttgttattacaggggaaggc

SEQ ID NO: 240954 - DNA, 25 bp, Probe sequence
gatgatcgtataacaaatgtcggga

SEQ ID NO: 240955 - DNA, 25 bp, Probe sequence
gattcgccaggaaaccctatttata

SEQ ID NO: 240956 - DNA, 25 bp, Probe sequence
gttattacaggggaaggctcaaggt

SEQ ID NO: 240957 - DNA, 25 bp, Probe sequence
gtcaggttagagttgggaagatggg

SEQ ID NO: 240958 - DNA, 25 bp, Probe sequence
gtcatagattcgccaggaaacccta

SEQ ID NO: 240959 - DNA, 25 bp, Probe sequence
ggtgcgcaatgggctgataaagatg

SEQ ID NO: 240960 - DNA, 25 bp, Probe sequence
ggaaatgagttttattggaccacgc

SEQ ID NO: 240961 - DNA, 25 bp, Probe sequence
tgggctgataaagatgatgatcgta

SEQ ID NO: 240962 - DNA, 25 bp, Probe sequence
tcgccaggaaaccctatttatagtc

SEQ ID NO: 240963 - DNA, 25 bp, Probe sequence
tcgccattgctatcgtcatagattc

SEQ ID NO: 240964 - DNA, 25 bp, Probe sequence
taacaaatgtcgggaagtttattcg

SEQ ID NO: 240965 - DNA, 25 bp, Probe sequence
tattacaggggaaggctcaaggtag

SEQ ID NO: 240966 - DNA, 25 bp, Probe sequence
tattcgccattgctatcgtcataga

SEQ ID NO: 240967 - DNA, 25 bp, Probe sequence
ttgcgcaaattcaaggtggatatga

SEQ ID NO: 240968 - DNA, 25 bp, Probe sequence
atgaaacctgttggtattgcagatg

SEQ ID NO: 240969 - DNA, 25 bp, Probe sequence
agatacatttatgggacaattctta

SEQ ID NO: 240970 - DNA, 25 bp, Probe sequence
aaatgggtattcaacctgaagtcac

SEQ ID NO: 240971 - DNA, 25 bp, Probe sequence
aacctgttggtattgcagatgatgg

SEQ ID NO: 240972 - DNA, 25 bp, Probe sequence
gaatcggttggatctagaccgcaac

SEQ ID NO: 240973 - DNA, 25 bp, Probe sequence
aatatagttttgctgattatttagc

SEQ ID NO: 240974 - DNA, 25 bp, Probe sequence
cttgccaatatcaatccaaaagtta

SEQ ID NO: 240975 - DNA, 25 bp, Probe sequence
ctgattatttagcagcattagatat

SEQ ID NO: 240976 - DNA, 25 bp, Probe sequence
cgcatgttggtgaacgcaagggtgg

SEQ ID NO: 240977 - DNA, 25 bp, Probe sequence
gcgggttgtggtcaaaaagatactg

SEQ ID NO: 240978 - DNA, 25 bp, Probe sequence
gcagtttggaaatcattaaaagctg

SEQ ID NO: 240979 - DNA, 25 bp, Probe sequence
gcagtagcgggttgtggtcaaaaag

SEQ ID NO: 240980 - DNA, 25 bp, Probe sequence
gcattagatatgaaacctgttggta

SEQ ID NO: 240981 - DNA, 25 bp, Probe sequence
gcaagtgaaagtatggcagaagatt

SEQ ID NO: 240982 - DNA, 25 bp, Probe sequence
gtcagtaagagataagattggggca

SEQ ID NO: 240983 - DNA, 25 bp, Probe sequence
gaagcatttaaaacagtcgctaaag

SEQ ID NO: 240984 - DNA, 25 bp, Probe sequence
gaacgaaattcattgatcctgcagt

SEQ ID NO: 240985 - DNA, 25 bp, Probe sequence
gaaattcattgatcctgcagtttgg

SEQ ID NO: 240986 - DNA, 25 bp, Probe sequence
gaccgcaaccgaatatggaagtgat

SEQ ID NO: 240987 - DNA, 25 bp, Probe sequence
gagcaggtatgtttattaataatga

SEQ ID NO: 240988 - DNA, 25 bp, Probe sequence
gagtacgttaaaatctgcatttgca

SEQ ID NO: 240989 - DNA, 25 bp, Probe sequence
gatcctgcagtttggaaatcattaa

SEQ ID NO: 240990 - DNA, 25 bp, Probe sequence
gttgtagcagtagcgggttgtggtc

SEQ ID NO: 240991 - DNA, 25 bp, Probe sequence
gttggatctagaccgcaaccgaata

SEQ ID NO: 240992 - DNA, 25 bp, Probe sequence
gtattagaatatagttttgctgatt

SEQ ID NO: 240993 - DNA, 25 bp, Probe sequence
gtatctcaagagcaggtatgtttat

SEQ ID NO: 240994 - DNA, 25 bp, Probe sequence
gtagcagtagcgggttgtggtcaaa

SEQ ID NO: 240995 - DNA, 25 bp, Probe sequence
gtacgttaaaatctgcatttgcatt

SEQ ID NO: 240996 - DNA, 25 bp, Probe sequence
ggatctagaccgcaaccgaatatgg

SEQ ID NO: 240997 - DNA, 25 bp, Probe sequence
tgggtattcaacctgaagtcacaaa

SEQ ID NO: 240998 - DNA, 25 bp, Probe sequence
tctagaccgcaaccgaatatggaag

SEQ ID NO: 240999 - DNA, 25 bp, Probe sequence
tcattgatcctgcagtttggaaatc

SEQ ID NO: 241000 - DNA, 25 bp, Probe sequence
tattcaacctgaagtcacaaaagac

SEQ ID NO: 241001 - DNA, 25 bp, Probe sequence
ttggggcatatgaatcggttggatc

SEQ ID NO: 241002 - DNA, 25 bp, Probe sequence
attgatgaagaattaagcggttatt

SEQ ID NO: 241003 - DNA, 25 bp, Probe sequence
atttgcagattacttaatgattata

SEQ ID NO: 241004 - DNA, 25 bp, Probe sequence
aggcatttgcagattacttaatgat

SEQ ID NO: 241005 - DNA, 25 bp, Probe sequence
agaggcatttgcagattacttaatg

SEQ ID NO: 241006 - DNA, 25 bp, Probe sequence
agacgagaacaattgtaatcaacca

SEQ ID NO: 241007 - DNA, 25 bp, Probe sequence
agaacaattgtaatcaaccatactc

SEQ ID NO: 241008 - DNA, 25 bp, Probe sequence
agcagggtattttgttacatgttgg

SEQ ID NO: 241009 - DNA, 25 bp, Probe sequence
acgagaacaattgtaatcaaccata

SEQ ID NO: 241010 - DNA, 25 bp, Probe sequence
actaaagcagggtattttgttacat

SEQ ID NO: 241011 - DNA, 25 bp, Probe sequence
acaccgactaaagcagggtattttg

SEQ ID NO: 241012 - DNA, 25 bp, Probe sequence
aaagaggcatttgcagattacttaa

SEQ ID NO: 241013 - DNA, 25 bp, Probe sequence
aaagcagggtattttgttacatgtt

SEQ ID NO: 241014 - DNA, 25 bp, Probe sequence
aagcagggtattttgttacatgttg

SEQ ID NO: 241015 - DNA, 25 bp, Probe sequence
aagacgagaacaattgtaatcaacc

SEQ ID NO: 241016 - DNA, 25 bp, Probe sequence
aagaggcatttgcagattacttaat

SEQ ID NO: 241017 - DNA, 25 bp, Probe sequence
caccgactaaagcagggtattttgt

SEQ ID NO: 241018 - DNA, 25 bp, Probe sequence
cagggtattttgttacatgttggac

SEQ ID NO: 241019 - DNA, 25 bp, Probe sequence
ctaaagcagggtattttgttacatg

SEQ ID NO: 241020 - DNA, 25 bp, Probe sequence
cgagaacaattgtaatcaaccatac

SEQ ID NO: 241021 - DNA, 25 bp, Probe sequence
gcagggtattttgttacatgttgga

SEQ ID NO: 241022 - DNA, 25 bp, Probe sequence
gcatttgcagattacttaatgatta

SEQ ID NO: 241023 - DNA, 25 bp, Probe sequence
gcagattacttaatgattatagtta

SEQ ID NO: 241024 - DNA, 25 bp, Probe sequence
gactaaagcagggtattttgttaca

SEQ ID NO: 241025 - DNA, 25 bp, Probe sequence
gacgagaacaattgtaatcaaccat

SEQ ID NO: 241026 - DNA, 25 bp, Probe sequence
gagaacaattgtaatcaaccatact

SEQ ID NO: 241027 - DNA, 25 bp, Probe sequence
gaggcatttgcagattacttaatga

SEQ ID NO: 241028 - DNA, 25 bp, Probe sequence
gattacttaatgattatagttattg

SEQ ID NO: 241029 - DNA, 25 bp, Probe sequence
gttattgatgaagaattaagcggtt

SEQ ID NO: 241030 - DNA, 25 bp, Probe sequence
ggcatttgcagattacttaatgatt

SEQ ID NO: 241031 - DNA, 25 bp, Probe sequence
taaagcagggtattttgttacatgt

SEQ ID NO: 241032 - DNA, 25 bp, Probe sequence
tacttaatgattatagttattgatg

SEQ ID NO: 241033 - DNA, 25 bp, Probe sequence
tactaataaaaagtcatatggttga

SEQ ID NO: 241034 - DNA, 25 bp, Probe sequence
tttgcagattacttaatgattatag

SEQ ID NO: 241035 - DNA, 25 bp, Probe sequence
ttgatgaagaattaagcggttattt

SEQ ID NO: 241036 - DNA, 25 bp, Probe sequence
atcgcgacaaagttattaacgtcat

SEQ ID NO: 241037 - DNA, 25 bp, Probe sequence
aggaccgatttgatattgcgaagtt

SEQ ID NO: 241038 - DNA, 25 bp, Probe sequence
agttattaacgtcattacttgaatc

SEQ ID NO: 241039 - DNA, 25 bp, Probe sequence
agcacgtccagaggaccgatttgat

SEQ ID NO: 241040 - DNA, 25 bp, Probe sequence
acgtcaagcacgtccagaggaccga

SEQ ID NO: 241041 - DNA, 25 bp, Probe sequence
acgtccagaggaccgatttgatatt

SEQ ID NO: 241042 - DNA, 25 bp, Probe sequence
aaataaaacaatatggcacgccatt

SEQ ID NO: 241043 - DNA, 25 bp, Probe sequence
aaagtaggctttatatctgatggac

SEQ ID NO: 241044 - DNA, 25 bp, Probe sequence
aagcacatgtatcatcatttaattg

SEQ ID NO: 241045 - DNA, 25 bp, Probe sequence
caagcacgtccagaggaccgatttg

SEQ ID NO: 241046 - DNA, 25 bp, Probe sequence
ccagaggaccgatttgatattgcga

SEQ ID NO: 241047 - DNA, 25 bp, Probe sequence
gcacatgtatcatcatttaattgtt

SEQ ID NO: 241048 - DNA, 25 bp, Probe sequence
gaattggtaaagcatctacctaaag

SEQ ID NO: 241049 - DNA, 25 bp, Probe sequence
gaagcagcattaaagttatataaaa

SEQ ID NO: 241050 - DNA, 25 bp, Probe sequence
gaagctaaagacgatgagtattata

SEQ ID NO: 241051 - DNA, 25 bp, Probe sequence
gaccgatttgatattgcgaagttag

SEQ ID NO: 241052 - DNA, 25 bp, Probe sequence
gatacgtcaagcacgtccagaggac

SEQ ID NO: 241053 - DNA, 25 bp, Probe sequence
gatattgcgaagttagtttatatgg

SEQ ID NO: 241054 - DNA, 25 bp, Probe sequence
gatttgatattgcgaagttagttta

SEQ ID NO: 241055 - DNA, 25 bp, Probe sequence
gttaaatggagtttgaattgcgata

SEQ ID NO: 241056 - DNA, 25 bp, Probe sequence
gtaggctttatatctgatggacaga

SEQ ID NO: 241057 - DNA, 25 bp, Probe sequence
gtagcaggttgtattattagctata

SEQ ID NO: 241058 - DNA, 25 bp, Probe sequence
gtcaagcacgtccagaggaccgatt

SEQ ID NO: 241059 - DNA, 25 bp, Probe sequence
gtccagaggaccgatttgatattgc

SEQ ID NO: 241060 - DNA, 25 bp, Probe sequence
gtgatacgtcaagcacgtccagagg

SEQ ID NO: 241061 - DNA, 25 bp, Probe sequence
tggagtttgaattgcgatattaata

SEQ ID NO: 241062 - DNA, 25 bp, Probe sequence
tggtaaagcatctacctaaagacat

SEQ ID NO: 241063 - DNA, 25 bp, Probe sequence
tgggatgatatggaattagaattgg

SEQ ID NO: 241064 - DNA, 25 bp, Probe sequence
tgaaaaaagctgtgttgatgcaaca

SEQ ID NO: 241065 - DNA, 25 bp, Probe sequence
tacgtcaagcacgtccagaggaccg

SEQ ID NO: 241066 - DNA, 25 bp, Probe sequence
taaagtagcaggttgtattattagc

SEQ ID NO: 241067 - DNA, 25 bp, Probe sequence
taaaacaatatggcacgccattacc

SEQ ID NO: 241068 - DNA, 25 bp, Probe sequence
tatatagaaacaattgcgacatttg

SEQ ID NO: 241069 - DNA, 25 bp, Probe sequence
ttattaacgtcattacttgaatcaa

SEQ ID NO: 241070 - DNA, 25 bp, Probe sequence
atttacatccaacacctgctttagg

SEQ ID NO: 241071 - DNA, 25 bp, Probe sequence
atcattttgtattacctgaagtttt

SEQ ID NO: 241072 - DNA, 25 bp, Probe sequence
atcgaacatcgatttgttgttgaca

SEQ ID NO: 241073 - DNA, 25 bp, Probe sequence
atcgaacgtcatattttggctacaa

SEQ ID NO: 241074 - DNA, 25 bp, Probe sequence
atgactggcgtcaacttgtagtaga

SEQ ID NO: 241075 - DNA, 25 bp, Probe sequence
agttcacacctatgatgaatgcatt

SEQ ID NO: 241076 - DNA, 25 bp, Probe sequence
agatgtggacgagcaaattggggaa

SEQ ID NO: 241077 - DNA, 25 bp, Probe sequence
agcacaagcaactttatttgctggg

SEQ ID NO: 241078 - DNA, 25 bp, Probe sequence
acctgctttaggtggctatccaaaa

SEQ ID NO: 241079 - DNA, 25 bp, Probe sequence
acatccgcaatctgagaaacatcat

SEQ ID NO: 241080 - DNA, 25 bp, Probe sequence
aaacgttcacaagatgaggacgaag

SEQ ID NO: 241081 - DNA, 25 bp, Probe sequence
aaaccttatatcactgaattacatt

SEQ ID NO: 241082 - DNA, 25 bp, Probe sequence
aattgtactagcacgtagacggtta

SEQ ID NO: 241083 - DNA, 25 bp, Probe sequence
aaggcgccactgaaggatgattcgt

SEQ ID NO: 241084 - DNA, 25 bp, Probe sequence
aaggatgattcgtatattagtttaa

SEQ ID NO: 241085 - DNA, 25 bp, Probe sequence
gaattggcagaaacgaaccttaagt

SEQ ID NO: 241086 - DNA, 25 bp, Probe sequence
gaatgcattaggagtcgatatgaat

SEQ ID NO: 241087 - DNA, 25 bp, Probe sequence
gaaccttaagttcacacctatgatg

SEQ ID NO: 241088 - DNA, 25 bp, Probe sequence
gaaacatcatcttcgagttgttgga

SEQ ID NO: 241089 - DNA, 25 bp, Probe sequence
gagagtttggactaaatcattttgt

SEQ ID NO: 241090 - DNA, 25 bp, Probe sequence
gatgatgaatggcgagagtttggac

SEQ ID NO: 241091 - DNA, 25 bp, Probe sequence
gatcatttatatcacttgtacactg

SEQ ID NO: 241092 - DNA, 25 bp, Probe sequence
gttgttgacagtattttacatgata

SEQ ID NO: 241093 - DNA, 25 bp, Probe sequence
gttttactgttgaggcattgaacga

SEQ ID NO: 241094 - DNA, 25 bp, Probe sequence
gtattccatatattctaaagcaagc

SEQ ID NO: 241095 - DNA, 25 bp, Probe sequence
gtagcaggtacaattaaacgttcac

SEQ ID NO: 241096 - DNA, 25 bp, Probe sequence
gtacactgaaataaaggcgccactg

SEQ ID NO: 241097 - DNA, 25 bp, Probe sequence
gtgaatttattgttgcaattcgttc

SEQ ID NO: 241098 - DNA, 25 bp, Probe sequence
gtggcattgttaaagattctgatcc

SEQ ID NO: 241099 - DNA, 25 bp, Probe sequence
tggctacaaagcaattcaattattc

SEQ ID NO: 241100 - DNA, 25 bp, Probe sequence
tcacatttatacatccgcaatctga

SEQ ID NO: 241101 - DNA, 25 bp, Probe sequence
tactatcgactaaagctgtagcagg

SEQ ID NO: 241102 - DNA, 25 bp, Probe sequence
ttatttgctgggtgtggcattgtta

SEQ ID NO: 241103 - DNA, 25 bp, Probe sequence
ttctgatccagatagtgaattggca

SEQ ID NO: 241104 - DNA, 25 bp, Probe sequence
attgttacgtataagtgaacgccat

SEQ ID NO: 241105 - DNA, 25 bp, Probe sequence
ataccacatactaaaattggcggaa

SEQ ID NO: 241106 - DNA, 25 bp, Probe sequence
ataaatgcatatattcttaaggtga

SEQ ID NO: 241107 - DNA, 25 bp, Probe sequence
aggtgaggggtgattttatgtttat

SEQ ID NO: 241108 - DNA, 25 bp, Probe sequence
aggggtgattttatgtttatgactg

SEQ ID NO: 241109 - DNA, 25 bp, Probe sequence
agtgaacgccatacttataaacttc

SEQ ID NO: 241110 - DNA, 25 bp, Probe sequence
agttgctcaattgttacgtataagt

SEQ ID NO: 241111 - DNA, 25 bp, Probe sequence
acgccatacttataaacttcttcaa

SEQ ID NO: 241112 - DNA, 25 bp, Probe sequence
acatactaaaattggcggaaagata

SEQ ID NO: 241113 - DNA, 25 bp, Probe sequence
aaaagaagttgctcaattgttacgt

SEQ ID NO: 241114 - DNA, 25 bp, Probe sequence
aacgttataccacatactaaaattg

SEQ ID NO: 241115 - DNA, 25 bp, Probe sequence
aacgccatacttataaacttcttca

SEQ ID NO: 241116 - DNA, 25 bp, Probe sequence
aagaagttgctcaattgttacgtat

SEQ ID NO: 241117 - DNA, 25 bp, Probe sequence
aagttgctcaattgttacgtataag

SEQ ID NO: 241118 - DNA, 25 bp, Probe sequence
aatgcatatattcttaaggtgaggg

SEQ ID NO: 241119 - DNA, 25 bp, Probe sequence
cgccatacttataaacttcttcaaa

SEQ ID NO: 241120 - DNA, 25 bp, Probe sequence
gccatacttataaacttcttcaaaa

SEQ ID NO: 241121 - DNA, 25 bp, Probe sequence
gctcaattgttacgtataagtgaac

SEQ ID NO: 241122 - DNA, 25 bp, Probe sequence
gcatatattcttaaggtgaggggtg

SEQ ID NO: 241123 - DNA, 25 bp, Probe sequence
gaagttgctcaattgttacgtataa

SEQ ID NO: 241124 - DNA, 25 bp, Probe sequence
gaacgccatacttataaacttcttc

SEQ ID NO: 241125 - DNA, 25 bp, Probe sequence
gaggggtgattttatgtttatgact

SEQ ID NO: 241126 - DNA, 25 bp, Probe sequence
gttgctcaattgttacgtataagtg

SEQ ID NO: 241127 - DNA, 25 bp, Probe sequence
gttacgtataagtgaacgccatact

SEQ ID NO: 241128 - DNA, 25 bp, Probe sequence
gttataccacatactaaaattggcg

SEQ ID NO: 241129 - DNA, 25 bp, Probe sequence
gtgaacgccatacttataaacttct

SEQ ID NO: 241130 - DNA, 25 bp, Probe sequence
gtgaggggtgattttatgtttatga

SEQ ID NO: 241131 - DNA, 25 bp, Probe sequence
gggtgattttatgtttatgactgta

SEQ ID NO: 241132 - DNA, 25 bp, Probe sequence
ggtgattttatgtttatgactgtaa

SEQ ID NO: 241133 - DNA, 25 bp, Probe sequence
tggcggaaagatattagttaacaaa

SEQ ID NO: 241134 - DNA, 25 bp, Probe sequence
tgaacgccatacttataaacttctt

SEQ ID NO: 241135 - DNA, 25 bp, Probe sequence
tcttcaaaaaaacgttataccacat

SEQ ID NO: 241136 - DNA, 25 bp, Probe sequence
tcaaaaaaacgttataccacatact

SEQ ID NO: 241137 - DNA, 25 bp, Probe sequence
tattcttaaggtgaggggtgatttt

SEQ ID NO: 241138 - DNA, 25 bp, Probe sequence
atagatacgaagaattgcgtcaaga

SEQ ID NO: 241139 - DNA, 25 bp, Probe sequence
atacgaagaattgcgtcaagaagga

SEQ ID NO: 241140 - DNA, 25 bp, Probe sequence
ataagaatagtgcgattttagatag

SEQ ID NO: 241141 - DNA, 25 bp, Probe sequence
aggttataagaatagtgcgatttta

SEQ ID NO: 241142 - DNA, 25 bp, Probe sequence
agggataaatgcgagcaattgaatc

SEQ ID NO: 241143 - DNA, 25 bp, Probe sequence
agtgcgattttagatagatacgaag

SEQ ID NO: 241144 - DNA, 25 bp, Probe sequence
agaattgcgtcaagaaggaaactaa

SEQ ID NO: 241145 - DNA, 25 bp, Probe sequence
aaatgcgagcaattgaatcaagaag

SEQ ID NO: 241146 - DNA, 25 bp, Probe sequence
aagaatagtgcgattttagatagat

SEQ ID NO: 241147 - DNA, 25 bp, Probe sequence
aagaattgcgtcaagaaggaaacta

SEQ ID NO: 241148 - DNA, 25 bp, Probe sequence
aatgcgagcaattgaatcaagaaga

SEQ ID NO: 241149 - DNA, 25 bp, Probe sequence
aatagtgcgattttagatagatacg

SEQ ID NO: 241150 - DNA, 25 bp, Probe sequence
ccgtaggttataagaatagtgcgat

SEQ ID NO: 241151 - DNA, 25 bp, Probe sequence
gcgagcaattgaatcaagaagaagt

SEQ ID NO: 241152 - DNA, 25 bp, Probe sequence
gaatagtgcgattttagatagatac

SEQ ID NO: 241153 - DNA, 25 bp, Probe sequence
gaagaattgcgtcaagaaggaaact

SEQ ID NO: 241154 - DNA, 25 bp, Probe sequence
gaaaagggataaatgcgagcaattg

SEQ ID NO: 241155 - DNA, 25 bp, Probe sequence
gagaaaagggataaatgcgagcaat

SEQ ID NO: 241156 - DNA, 25 bp, Probe sequence
gatacgaagaattgcgtcaagaagg

SEQ ID NO: 241157 - DNA, 25 bp, Probe sequence
gataaatgcgagcaattgaatcaag

SEQ ID NO: 241158 - DNA, 25 bp, Probe sequence
gatagatacgaagaattgcgtcaag

SEQ ID NO: 241159 - DNA, 25 bp, Probe sequence
gattttccgtaggttataagaatag

SEQ ID NO: 241160 - DNA, 25 bp, Probe sequence
gttataagaatagtgcgattttaga

SEQ ID NO: 241161 - DNA, 25 bp, Probe sequence
gtaggttataagaatagtgcgattt

SEQ ID NO: 241162 - DNA, 25 bp, Probe sequence
gtgcgattttagatagatacgaaga

SEQ ID NO: 241163 - DNA, 25 bp, Probe sequence
gggataaatgcgagcaattgaatca

SEQ ID NO: 241164 - DNA, 25 bp, Probe sequence
ggtgagaaaagggataaatgcgagc

SEQ ID NO: 241165 - DNA, 25 bp, Probe sequence
ggataaatgcgagcaattgaatcaa

SEQ ID NO: 241166 - DNA, 25 bp, Probe sequence
tgcgattttagatagatacgaagaa

SEQ ID NO: 241167 - DNA, 25 bp, Probe sequence
tccgtaggttataagaatagtgcga

SEQ ID NO: 241168 - DNA, 25 bp, Probe sequence
taaatgcgagcaattgaatcaagaa

SEQ ID NO: 241169 - DNA, 25 bp, Probe sequence
tagatacgaagaattgcgtcaagaa

SEQ ID NO: 241170 - DNA, 25 bp, Probe sequence
tagtgcgattttagatagatacgaa

SEQ ID NO: 241171 - DNA, 25 bp, Probe sequence
ttttccgtaggttataagaatagtg

SEQ ID NO: 241172 - DNA, 25 bp, Probe sequence
agcgatagaaagtcgtcttactgaa

SEQ ID NO: 241173 - DNA, 25 bp, Probe sequence
acgaaatcattaattagacaaggct

SEQ ID NO: 241174 - DNA, 25 bp, Probe sequence
acaaaataacgggcaaccagtcatc

SEQ ID NO: 241175 - DNA, 25 bp, Probe sequence
aaatggataataaggctttgagcct

SEQ ID NO: 241176 - DNA, 25 bp, Probe sequence
aaaccactaatgtatatgaacttaa

SEQ ID NO: 241177 - DNA, 25 bp, Probe sequence
aacgggcaaccagtcatcaaacata

SEQ ID NO: 241178 - DNA, 25 bp, Probe sequence
aacgtcaagacatagaggcgaaagt

SEQ ID NO: 241179 - DNA, 25 bp, Probe sequence
aaccttactttgatgtattggtaga

SEQ ID NO: 241180 - DNA, 25 bp, Probe sequence
aataacgggcaaccagtcatcaaac

SEQ ID NO: 241181 - DNA, 25 bp, Probe sequence
aatgccaatcctaaaaccactaatg

SEQ ID NO: 241182 - DNA, 25 bp, Probe sequence
aatcttgtttataatgccaatccta

SEQ ID NO: 241183 - DNA, 25 bp, Probe sequence
caatcacgggtgatacgtgggatgt

SEQ ID NO: 241184 - DNA, 25 bp, Probe sequence
gccaatcctaaaaccactaatgtat

SEQ ID NO: 241185 - DNA, 25 bp, Probe sequence
gcagaagaactatttaatcttgttt

SEQ ID NO: 241186 - DNA, 25 bp, Probe sequence
gaatcttcatatgagaatccacaag

SEQ ID NO: 241187 - DNA, 25 bp, Probe sequence
gaaaaggtaatttatccatatcgaa

SEQ ID NO: 241188 - DNA, 25 bp, Probe sequence
gaaagtcgtcttactgaagatgaaa

SEQ ID NO: 241189 - DNA, 25 bp, Probe sequence
gacaaggctataaaacggatgttat

SEQ ID NO: 241190 - DNA, 25 bp, Probe sequence
gacaactacaacaatcacgggtgat

SEQ ID NO: 241191 - DNA, 25 bp, Probe sequence
gacgttatagaaatttgttaggaga

SEQ ID NO: 241192 - DNA, 25 bp, Probe sequence
gagcctacaatctaaattcaaagaa

SEQ ID NO: 241193 - DNA, 25 bp, Probe sequence
gagaatccacaagttgaaatgttga

SEQ ID NO: 241194 - DNA, 25 bp, Probe sequence
gaggcgaaagtaaatttaattgatg

SEQ ID NO: 241195 - DNA, 25 bp, Probe sequence
gatggcgatatagaaattattaaca

SEQ ID NO: 241196 - DNA, 25 bp, Probe sequence
gttgaaatgttgaaacgtcaagaca

SEQ ID NO: 241197 - DNA, 25 bp, Probe sequence
gttaaaaccttactttgatgtattg

SEQ ID NO: 241198 - DNA, 25 bp, Probe sequence
gggcaaccagtcatcaaacatagtg

SEQ ID NO: 241199 - DNA, 25 bp, Probe sequence
gggtgatacgtgggatgtatatttt

SEQ ID NO: 241200 - DNA, 25 bp, Probe sequence
ggtaatttatccatatcgaaataat

SEQ ID NO: 241201 - DNA, 25 bp, Probe sequence
ggctttgagcctacaatctaaattc

SEQ ID NO: 241202 - DNA, 25 bp, Probe sequence
tcaaacatagtgatggcgatataga

SEQ ID NO: 241203 - DNA, 25 bp, Probe sequence
tataacgaagtgttccgtaacgctt

SEQ ID NO: 241204 - DNA, 25 bp, Probe sequence
tataatgccaatcctaaaaccacta

SEQ ID NO: 241205 - DNA, 25 bp, Probe sequence
tataatgttttaagacagtttgggt

SEQ ID NO: 241206 - DNA, 25 bp, Probe sequence
atactcataatggagtgccactatg

SEQ ID NO: 241207 - DNA, 25 bp, Probe sequence
ataagcaaggtactcattttaaaga

SEQ ID NO: 241208 - DNA, 25 bp, Probe sequence
atggtagttatgtattcgatttgtt

SEQ ID NO: 241209 - DNA, 25 bp, Probe sequence
agtagagctaatatattcgccaatt

SEQ ID NO: 241210 - DNA, 25 bp, Probe sequence
actccatcagatgtagacagtatac

SEQ ID NO: 241211 - DNA, 25 bp, Probe sequence
acacgtgttcaaataactccatcag

SEQ ID NO: 241212 - DNA, 25 bp, Probe sequence
aaatgaattttccagatcaaacaaa

SEQ ID NO: 241213 - DNA, 25 bp, Probe sequence
aaaaattattcatctgacacaagta

SEQ ID NO: 241214 - DNA, 25 bp, Probe sequence
aatggttgctacatttagctcggtt

SEQ ID NO: 241215 - DNA, 25 bp, Probe sequence
caagcacatatgtttcgtaacgtgt

SEQ ID NO: 241216 - DNA, 25 bp, Probe sequence
caagaatttcatattattttagcga

SEQ ID NO: 241217 - DNA, 25 bp, Probe sequence
cacattctttctatacaattactat

SEQ ID NO: 241218 - DNA, 25 bp, Probe sequence
gctacatttagctcggttatgagta

SEQ ID NO: 241219 - DNA, 25 bp, Probe sequence
gcatcgtgaaaatggttgctacatt

SEQ ID NO: 241220 - DNA, 25 bp, Probe sequence
gaatacgttcctacaatgaatggta

SEQ ID NO: 241221 - DNA, 25 bp, Probe sequence
gaagtcttttctttatacaaactag

SEQ ID NO: 241222 - DNA, 25 bp, Probe sequence
gaaccacattcatatttatacttta

SEQ ID NO: 241223 - DNA, 25 bp, Probe sequence
gacacaagtaagacagatagcatcg

SEQ ID NO: 241224 - DNA, 25 bp, Probe sequence
gacagtatactacaacaagcacata

SEQ ID NO: 241225 - DNA, 25 bp, Probe sequence
gatgatcttcgattggaagttgcta

SEQ ID NO: 241226 - DNA, 25 bp, Probe sequence
gttgatttcactatgtctatttttg

SEQ ID NO: 241227 - DNA, 25 bp, Probe sequence
gtatttgttagtatttgaaactcat

SEQ ID NO: 241228 - DNA, 25 bp, Probe sequence
gtattcgatttgttgatttcactat

SEQ ID NO: 241229 - DNA, 25 bp, Probe sequence
gtaacgtgtgtgcgcatgaagaaag

SEQ ID NO: 241230 - DNA, 25 bp, Probe sequence
gtaattattcacattctttctatac

SEQ ID NO: 241231 - DNA, 25 bp, Probe sequence
ggtaatgtttcaaaaatgtattcca

SEQ ID NO: 241232 - DNA, 25 bp, Probe sequence
ggagtgccactatggatattggtga

SEQ ID NO: 241233 - DNA, 25 bp, Probe sequence
ggaatggaagtaccgagtagtgcta

SEQ ID NO: 241234 - DNA, 25 bp, Probe sequence
ggaatgttttattagagtatttgtt

SEQ ID NO: 241235 - DNA, 25 bp, Probe sequence
tgtttcgtaacgtgtgtgcgcatga

SEQ ID NO: 241236 - DNA, 25 bp, Probe sequence
tgaagccatttgaaagtcataataa

SEQ ID NO: 241237 - DNA, 25 bp, Probe sequence
taatggtaattttttggttcctgat

SEQ ID NO: 241238 - DNA, 25 bp, Probe sequence
ttttggttcctgataaatataagca

SEQ ID NO: 241239 - DNA, 25 bp, Probe sequence
ttccaatttggatgatgatcttcga

SEQ ID NO: 241240 - DNA, 25 bp, Probe sequence
atcacaaatggaacaagcacaacgt

SEQ ID NO: 241241 - DNA, 25 bp, Probe sequence
atgacttagcgcacggagagtttgg

SEQ ID NO: 241242 - DNA, 25 bp, Probe sequence
agaaaatgacttagcgcacggagag

SEQ ID NO: 241243 - DNA, 25 bp, Probe sequence
agcacaacgttcggaggagatagcg

SEQ ID NO: 241244 - DNA, 25 bp, Probe sequence
acgcacaacttcaatcacaaatgga

SEQ ID NO: 241245 - DNA, 25 bp, Probe sequence
actcgagcgcaaatttaggacttaa

SEQ ID NO: 241246 - DNA, 25 bp, Probe sequence
acaatcaaaattgcactcgagcgca

SEQ ID NO: 241247 - DNA, 25 bp, Probe sequence
aaagcgctttatcagatagcaacta

SEQ ID NO: 241248 - DNA, 25 bp, Probe sequence
aaaacaacaaacgtcttcaggagag

SEQ ID NO: 241249 - DNA, 25 bp, Probe sequence
aaaacgcacaacttcaatcacaaat

SEQ ID NO: 241250 - DNA, 25 bp, Probe sequence
aacaagcacaacgttcggaggagat

SEQ ID NO: 241251 - DNA, 25 bp, Probe sequence
aacgcgatgaagaaaacgcacaact

SEQ ID NO: 241252 - DNA, 25 bp, Probe sequence
aagcgccaactcaaacaacgcgatg

SEQ ID NO: 241253 - DNA, 25 bp, Probe sequence
caacaaacgtcttcaggagagatga

SEQ ID NO: 241254 - DNA, 25 bp, Probe sequence
cggagagtttggtaagtggcttgaa

SEQ ID NO: 241255 - DNA, 25 bp, Probe sequence
ccaagctagcaggtttatcaaagtt

SEQ ID NO: 241256 - DNA, 25 bp, Probe sequence
gccaactcaaacaacgcgatgaaga

SEQ ID NO: 241257 - DNA, 25 bp, Probe sequence
gaagaatttaagcgccaactcaaac

SEQ ID NO: 241258 - DNA, 25 bp, Probe sequence
gcaggtttatcaaagttgcaaatga

SEQ ID NO: 241259 - DNA, 25 bp, Probe sequence
gcaaatttaggacttaaagcgcttt

SEQ ID NO: 241260 - DNA, 25 bp, Probe sequence
gcactcgagcgcaaatttaggactt

SEQ ID NO: 241261 - DNA, 25 bp, Probe sequence
gcaactattccagtagagcatcgag

SEQ ID NO: 241262 - DNA, 25 bp, Probe sequence
gaatttaagcgccaactcaaacaac

SEQ ID NO: 241263 - DNA, 25 bp, Probe sequence
gaacgtgaagaatttaagcgccaac

SEQ ID NO: 241264 - DNA, 25 bp, Probe sequence
gaaaacaccatacgaaatgaccaat

SEQ ID NO: 241265 - DNA, 25 bp, Probe sequence
gaaatgaccaataaagaacgtgaag

SEQ ID NO: 241266 - DNA, 25 bp, Probe sequence
gatagcaactattccagtagagcat

SEQ ID NO: 241267 - DNA, 25 bp, Probe sequence
gtggcttgaaaaagttgggttagat

SEQ ID NO: 241268 - DNA, 25 bp, Probe sequence
gggttagataagtaccaagctagca

SEQ ID NO: 241269 - DNA, 25 bp, Probe sequence
ggaggagatagcgagaaagcaatat

SEQ ID NO: 241270 - DNA, 25 bp, Probe sequence
ggagagatgaaaacaccatacgaaa

SEQ ID NO: 241271 - DNA, 25 bp, Probe sequence
taagtaccaagctagcaggtttatc

SEQ ID NO: 241272 - DNA, 25 bp, Probe sequence
ttagcgcacggagagtttggtaagt

SEQ ID NO: 241273 - DNA, 25 bp, Probe sequence
tattccagtagagcatcgagaagaa

SEQ ID NO: 241274 - DNA, 25 bp, Probe sequence
agagatccgttaacacctgatttga

SEQ ID NO: 241275 - DNA, 25 bp, Probe sequence
agacctgtcgctatattatgtacgt

SEQ ID NO: 241276 - DNA, 25 bp, Probe sequence
acagctaagttatatcaattcgatt

SEQ ID NO: 241277 - DNA, 25 bp, Probe sequence
aaatgccacattgttatctgaaact

SEQ ID NO: 241278 - DNA, 25 bp, Probe sequence
aaaacatggatacaccccgatgagc

SEQ ID NO: 241279 - DNA, 25 bp, Probe sequence
aagtttttacatttgcatctgagtt

SEQ ID NO: 241280 - DNA, 25 bp, Probe sequence
gcggtattttttcatatttaccaca

SEQ ID NO: 241281 - DNA, 25 bp, Probe sequence
gcacaccgacgggattggatttcga

SEQ ID NO: 241282 - DNA, 25 bp, Probe sequence
gcacttgcatttgaagcacatccaa

SEQ ID NO: 241283 - DNA, 25 bp, Probe sequence
gaagtgtaggcgcaccacaagcgat

SEQ ID NO: 241284 - DNA, 25 bp, Probe sequence
gaacggttgtttggcacaccgacgg

SEQ ID NO: 241285 - DNA, 25 bp, Probe sequence
gaacaacgatggtggcggtattttt

SEQ ID NO: 241286 - DNA, 25 bp, Probe sequence
gaacaagctacagatgagagtgcat

SEQ ID NO: 241287 - DNA, 25 bp, Probe sequence
gagagtgcattcgttggtgaattga

SEQ ID NO: 241288 - DNA, 25 bp, Probe sequence
gatgaagattttaccgcactatcaa

SEQ ID NO: 241289 - DNA, 25 bp, Probe sequence
gatgcatcggcattaagacacattt

SEQ ID NO: 241290 - DNA, 25 bp, Probe sequence
tacaccccgatgagcgaagtgcagc

SEQ ID NO: 241291 - DNA, 25 bp, Probe sequence
gatttgctgtttagaagcggcttag

SEQ ID NO: 241292 - DNA, 25 bp, Probe sequence
gatttgcctattttagctgatcctt

SEQ ID NO: 241293 - DNA, 25 bp, Probe sequence
gttatctgaaacttcgacgatttat

SEQ ID NO: 241294 - DNA, 25 bp, Probe sequence
gttatctgtacatatgatttgctgt

SEQ ID NO: 241295 - DNA, 25 bp, Probe sequence
gtacgtcaggtacagcagcagcgaa

SEQ ID NO: 241296 - DNA, 25 bp, Probe sequence
gtgaccgtccgcatgaattaagaag

SEQ ID NO: 241297 - DNA, 25 bp, Probe sequence
gtgttgggaaaccagtgatttctaa

SEQ ID NO: 241298 - DNA, 25 bp, Probe sequence
gtggatttcgtaattcgtgttggga

SEQ ID NO: 241299 - DNA, 25 bp, Probe sequence
ggattggatttcgagtatacagcta

SEQ ID NO: 241300 - DNA, 25 bp, Probe sequence
ggcgcaccacaagcgattaatcaag

SEQ ID NO: 241301 - DNA, 25 bp, Probe sequence
tgatcatccgaatgttatctgtaca

SEQ ID NO: 241302 - DNA, 25 bp, Probe sequence
tttaacttgccatttagagatccgt

SEQ ID NO: 241303 - DNA, 25 bp, Probe sequence
tcgttttaacaagtgaccgtccgca

SEQ ID NO: 241304 - DNA, 25 bp, Probe sequence
tcaacgccacttgcacttgcatttg

SEQ ID NO: 241305 - DNA, 25 bp, Probe sequence
tagatgtctatgcgaatcgtggtgc

SEQ ID NO: 241306 - DNA, 25 bp, Probe sequence
ttatcagtccgggatcacgctcaac

SEQ ID NO: 241307 - DNA, 25 bp, Probe sequence
ttagctgatcctttaagtcatttaa

SEQ ID NO: 241308 - DNA, 25 bp, Probe sequence
atatagatgtgtttgtcgttagaga

SEQ ID NO: 241309 - DNA, 25 bp, Probe sequence
ataatggaccaagttttgaatataa

SEQ ID NO: 241310 - DNA, 25 bp, Probe sequence
atgtgtttgtcgttagagaaggaaa

SEQ ID NO: 241311 - DNA, 25 bp, Probe sequence
agctgataatcattcgattggtggc

SEQ ID NO: 241312 - DNA, 25 bp, Probe sequence
acccagatatagatgtgtttgtcgt

SEQ ID NO: 241313 - DNA, 25 bp, Probe sequence
acggtagacaagctgataatcattc

SEQ ID NO: 241314 - DNA, 25 bp, Probe sequence
actggatatggatttattgaaggta

SEQ ID NO: 241315 - DNA, 25 bp, Probe sequence
aaacaacaaagtgaggctgatttaa

SEQ ID NO: 241316 - DNA, 25 bp, Probe sequence
aaaagtaactggatatggatttatt

SEQ ID NO: 241317 - DNA, 25 bp, Probe sequence
aacggtagacaagctgataatcatt

SEQ ID NO: 241318 - DNA, 25 bp, Probe sequence
aatgaagaagttaacccagatatag

SEQ ID NO: 241319 - DNA, 25 bp, Probe sequence
aatatctttagttggttctgataaa

SEQ ID NO: 241320 - DNA, 25 bp, Probe sequence
caagctgataatcattcgattggtg

SEQ ID NO: 241321 - DNA, 25 bp, Probe sequence
cagatatagatgtgtttgtcgttag

SEQ ID NO: 241322 - DNA, 25 bp, Probe sequence
cccagatatagatgtgtttgtcgtt

SEQ ID NO: 241323 - DNA, 25 bp, Probe sequence
gaaggaaacggtagacaagctgata

SEQ ID NO: 241324 - DNA, 25 bp, Probe sequence
gaagttaacccagatatagatgtgt

SEQ ID NO: 241325 - DNA, 25 bp, Probe sequence
gaagaagttaacccagatatagatg

SEQ ID NO: 241326 - DNA, 25 bp, Probe sequence
gaaacggtagacaagctgataatca

SEQ ID NO: 241327 - DNA, 25 bp, Probe sequence
gacaagctgataatcattcgattgg

SEQ ID NO: 241328 - DNA, 25 bp, Probe sequence
gagaaggaaacggtagacaagctga

SEQ ID NO: 241329 - DNA, 25 bp, Probe sequence
gatgtgtttgtcgttagagaaggaa

SEQ ID NO: 241330 - DNA, 25 bp, Probe sequence
gaggctgatttaaaactttattata

SEQ ID NO: 241331 - DNA, 25 bp, Probe sequence
gatatagatgtgtttgtcgttagag

SEQ ID NO: 241332 - DNA, 25 bp, Probe sequence
gttaacccagatatagatgtgtttg

SEQ ID NO: 241333 - DNA, 25 bp, Probe sequence
gtagacaagctgataatcattcgat

SEQ ID NO: 241334 - DNA, 25 bp, Probe sequence
gtaactggatatggatttattgaag

SEQ ID NO: 241335 - DNA, 25 bp, Probe sequence
gtgaggctgatttaaaactttatta

SEQ ID NO: 241336 - DNA, 25 bp, Probe sequence
ggaaacggtagacaagctgataatc

SEQ ID NO: 241337 - DNA, 25 bp, Probe sequence
taaaactttattataatggaccaag

SEQ ID NO: 241338 - DNA, 25 bp, Probe sequence
taaaatatctttagttggttctgat

SEQ ID NO: 241339 - DNA, 25 bp, Probe sequence
tagatgtgtttgtcgttagagaagg

SEQ ID NO: 241340 - DNA, 25 bp, Probe sequence
tttagttggttctgataaagataaa

SEQ ID NO: 241341 - DNA, 25 bp, Probe sequence
ttgattttatatacaatggacaata

SEQ ID NO: 241342 - DNA, 25 bp, Probe sequence
atattacgacgttgttagaccgaat

SEQ ID NO: 241343 - DNA, 25 bp, Probe sequence
atccctatatctaatttgatattag

SEQ ID NO: 241344 - DNA, 25 bp, Probe sequence
atgaagcaaacgttgagaccaatca

SEQ ID NO: 241345 - DNA, 25 bp, Probe sequence
atgtcatcactatagacttaccagg

SEQ ID NO: 241346 - DNA, 25 bp, Probe sequence
atggccaaagcattaagagattatg

SEQ ID NO: 241347 - DNA, 25 bp, Probe sequence
aggtcatacaattcatgtggaagat

SEQ ID NO: 241348 - DNA, 25 bp, Probe sequence
agcaggtattgaattatttgttaat

SEQ ID NO: 241349 - DNA, 25 bp, Probe sequence
acgttgagaccaatcaagttttagt

SEQ ID NO: 241350 - DNA, 25 bp, Probe sequence
acgtcaccaggtattaaagaagaag

SEQ ID NO: 241351 - DNA, 25 bp, Probe sequence
aaatgccaaacttatggccgcgcct

SEQ ID NO: 241352 - DNA, 25 bp, Probe sequence
aaagtaccaacattaatattagctg

SEQ ID NO: 241353 - DNA, 25 bp, Probe sequence
aaaagttgccattatttcaatcgca

SEQ ID NO: 241354 - DNA, 25 bp, Probe sequence
aagtattagacatagcaggtattga

SEQ ID NO: 241355 - DNA, 25 bp, Probe sequence
aatcaataacattgtttggatattc

SEQ ID NO: 241356 - DNA, 25 bp, Probe sequence
catggcgaagatcagtcttcaatgg

SEQ ID NO: 241357 - DNA, 25 bp, Probe sequence
gccattatttcaatcgcaactagaa

SEQ ID NO: 241358 - DNA, 25 bp, Probe sequence
gctacaggtcatacaattcatgtgg

SEQ ID NO: 241359 - DNA, 25 bp, Probe sequence
gaattaccagttgaaatacaacatc

SEQ ID NO: 241360 - DNA, 25 bp, Probe sequence
gaaaaatttgtacagattgcgaaaa

SEQ ID NO: 241361 - DNA, 25 bp, Probe sequence
gaaagtacgtcaccaggtattaaag

SEQ ID NO: 241362 - DNA, 25 bp, Probe sequence
gacgttgttagaccgaattttagat

SEQ ID NO: 241363 - DNA, 25 bp, Probe sequence
gagattatggtacaggtcaaatgcc

SEQ ID NO: 241364 - DNA, 25 bp, Probe sequence
gatcagtcttcaatggatgaaacgt

SEQ ID NO: 241365 - DNA, 25 bp, Probe sequence
gatacaatgatattaggatttttaa

SEQ ID NO: 241366 - DNA, 25 bp, Probe sequence
gatattagaaagtacgtcaccaggt

SEQ ID NO: 241367 - DNA, 25 bp, Probe sequence
gattgggaaaagttgccattatttc

SEQ ID NO: 241368 - DNA, 25 bp, Probe sequence
gtaaattaatttctgctacaggtca

SEQ ID NO: 241369 - DNA, 25 bp, Probe sequence
gtggaagatagtgatgaatttgata

SEQ ID NO: 241370 - DNA, 25 bp, Probe sequence
gtggaattttgattatattacgacg

SEQ ID NO: 241371 - DNA, 25 bp, Probe sequence
ggtacaggtcaaatgccaaacttat

SEQ ID NO: 241372 - DNA, 25 bp, Probe sequence
ggatgaaacgtggaattttgattat

SEQ ID NO: 241373 - DNA, 25 bp, Probe sequence
tcatgtcatcactatagacttacca

SEQ ID NO: 241374 - DNA, 25 bp, Probe sequence
tttctgctacaggtcatacaattca

SEQ ID NO: 241375 - DNA, 25 bp, Probe sequence
ttcaatcgcaactagaattaccagt

SEQ ID NO: 241376 - DNA, 25 bp, Probe sequence
atcatacggctaatcctgaacaggc

SEQ ID NO: 241377 - DNA, 25 bp, Probe sequence
atgcacaaccgcaatcaacacaacc

SEQ ID NO: 241378 - DNA, 25 bp, Probe sequence
atgtatcaacatcgctttcaactca

SEQ ID NO: 241379 - DNA, 25 bp, Probe sequence
agtctttaccaaatgcacaaccgca

SEQ ID NO: 241380 - DNA, 25 bp, Probe sequence
agcaccaagcggaacaactcagtct

SEQ ID NO: 241381 - DNA, 25 bp, Probe sequence
agcgagtatagcgttagggcttgta

SEQ ID NO: 241382 - DNA, 25 bp, Probe sequence
acggctaatcctgaacaggcggcaa

SEQ ID NO: 241383 - DNA, 25 bp, Probe sequence
acaacgacagcgcaagcagtgaacg

SEQ ID NO: 241384 - DNA, 25 bp, Probe sequence
aaattgcaacaacatcgcatggcag

SEQ ID NO: 241385 - DNA, 25 bp, Probe sequence
aaagcaggacagttagcaaagataa

SEQ ID NO: 241386 - DNA, 25 bp, Probe sequence
aaacgtatcaacaagcgcaatcaca

SEQ ID NO: 241387 - DNA, 25 bp, Probe sequence
aacaggcggcaaagtctaacacaga

SEQ ID NO: 241388 - DNA, 25 bp, Probe sequence
aagcggaacaactcagtctttacca

SEQ ID NO: 241389 - DNA, 25 bp, Probe sequence
caacaagcgcaatcacaacgacagc

SEQ ID NO: 241390 - DNA, 25 bp, Probe sequence
caacatcgctttcaactcaaacaga

SEQ ID NO: 241391 - DNA, 25 bp, Probe sequence
cacaaccagcaccaagcggaacaac

SEQ ID NO: 241392 - DNA, 25 bp, Probe sequence
cggtggtatcacaaaagcaaataga

SEQ ID NO: 241393 - DNA, 25 bp, Probe sequence
gcataggcatgtcgatgtatttatc

SEQ ID NO: 241394 - DNA, 25 bp, Probe sequence
gcatggcagatgttattgatggtac

SEQ ID NO: 241395 - DNA, 25 bp, Probe sequence
gcatcagcacttaaagcaggacagt

SEQ ID NO: 241396 - DNA, 25 bp, Probe sequence
gaacgcagaacaaaatcatacggct

SEQ ID NO: 241397 - DNA, 25 bp, Probe sequence
gaacaactcagtctttaccaaatgc

SEQ ID NO: 241398 - DNA, 25 bp, Probe sequence
gaacagacgccaaaatctaacatac

SEQ ID NO: 241399 - DNA, 25 bp, Probe sequence
gaacaattgcgaaagcgagtatagc

SEQ ID NO: 241400 - DNA, 25 bp, Probe sequence
gacagcgcaagcagtgaacgcagaa

SEQ ID NO: 241401 - DNA, 25 bp, Probe sequence
gttagggcttgtaacaacaggtgca

SEQ ID NO: 241402 - DNA, 25 bp, Probe sequence
ggtgaaggcgtgcataggcatgtcg

SEQ ID NO: 241403 - DNA, 25 bp, Probe sequence
ggcgtagacaaatactcggtcggtg

SEQ ID NO: 241404 - DNA, 25 bp, Probe sequence
ggcgtgcataggcatgtcgatgtat

SEQ ID NO: 241405 - DNA, 25 bp, Probe sequence
tgtcgaaacaccacaaccaacatcg

SEQ ID NO: 241406 - DNA, 25 bp, Probe sequence
tctaatgtcgaaacaccacaaccaa

SEQ ID NO: 241407 - DNA, 25 bp, Probe sequence
tcaactcaaacagaacagacgccaa

SEQ ID NO: 241408 - DNA, 25 bp, Probe sequence
taacatacaaaaagcaacacaacca

SEQ ID NO: 241409 - DNA, 25 bp, Probe sequence
taaaaaaggtacaatctcacatgat

SEQ ID NO: 241410 - DNA, 25 bp, Probe sequence
ataggtggaattaccaagacgaata

SEQ ID NO: 241411 - DNA, 25 bp, Probe sequence
attactatgaaaggtggcggctact

SEQ ID NO: 241412 - DNA, 25 bp, Probe sequence
atcagttacttcaaacgacacgcaa

SEQ ID NO: 241413 - DNA, 25 bp, Probe sequence
atgggtgatgtaattgatggtagaa

SEQ ID NO: 241414 - DNA, 25 bp, Probe sequence
acttcaaacgacacgcaagaattaa

SEQ ID NO: 241415 - DNA, 25 bp, Probe sequence
acaggacataatacagcaacaagac

SEQ ID NO: 241416 - DNA, 25 bp, Probe sequence
acagcaacaagacaagcagaaactt

SEQ ID NO: 241417 - DNA, 25 bp, Probe sequence
aaccaacaggacataatacagcaac

SEQ ID NO: 241418 - DNA, 25 bp, Probe sequence
cagagaaggatcaggtaaacaagct

SEQ ID NO: 241419 - DNA, 25 bp, Probe sequence
aagacaagcagaaacttatagaatt

SEQ ID NO: 241420 - DNA, 25 bp, Probe sequence
aaggtggcggctactatacttttga

SEQ ID NO: 241421 - DNA, 25 bp, Probe sequence
cagagcctaaagacggtaaaattag

SEQ ID NO: 241422 - DNA, 25 bp, Probe sequence
cagcctcatcgtatgggtgatgtaa

SEQ ID NO: 241423 - DNA, 25 bp, Probe sequence
cagttacttcaaacgacacgcaaga

SEQ ID NO: 241424 - DNA, 25 bp, Probe sequence
caggtaaacaagctgaaaatatttc

SEQ ID NO: 241425 - DNA, 25 bp, Probe sequence
ccaacaggacataatacagcaacaa

SEQ ID NO: 241426 - DNA, 25 bp, Probe sequence
gcctcatcgtatgggtgatgtaatt

SEQ ID NO: 241427 - DNA, 25 bp, Probe sequence
gaattactatgaaaggtggcggcta

SEQ ID NO: 241428 - DNA, 25 bp, Probe sequence
gaagggttagatgtctttgtagtca

SEQ ID NO: 241429 - DNA, 25 bp, Probe sequence
gaaaatcatgaactttataagacag

SEQ ID NO: 241430 - DNA, 25 bp, Probe sequence
gaaaggtggcggctactatactttt

SEQ ID NO: 241431 - DNA, 25 bp, Probe sequence
gaaataactaaaccaacaggacata

SEQ ID NO: 241432 - DNA, 25 bp, Probe sequence
gatgtctttgtagtcagagaaggat

SEQ ID NO: 241433 - DNA, 25 bp, Probe sequence
gatttcgtaaataatgtaggtctag

SEQ ID NO: 241434 - DNA, 25 bp, Probe sequence
gttacttcaaacgacacgcaagaat

SEQ ID NO: 241435 - DNA, 25 bp, Probe sequence
gttagatgtctttgtagtcagagaa

SEQ ID NO: 241436 - DNA, 25 bp, Probe sequence
gtagtcagagaaggatcaggtaaac

SEQ ID NO: 241437 - DNA, 25 bp, Probe sequence
gggttagatgtctttgtagtcagag

SEQ ID NO: 241438 - DNA, 25 bp, Probe sequence
ggtggcggctactatacttttgaat

SEQ ID NO: 241439 - DNA, 25 bp, Probe sequence
ggacataatacagcaacaagacaag

SEQ ID NO: 241440 - DNA, 25 bp, Probe sequence
tgtaggtctagaaataactaaacca

SEQ ID NO: 241441 - DNA, 25 bp, Probe sequence
tatgaaaggtggcggctactatact

SEQ ID NO: 241442 - DNA, 25 bp, Probe sequence
tacttggtacagacaaagaaagatt

SEQ ID NO: 241443 - DNA, 25 bp, Probe sequence
ttatgactatgattatgaagggtta

SEQ ID NO: 241444 - DNA, 25 bp, Probe sequence
atgaccatactaaactcaacaaagt

SEQ ID NO: 241445 - DNA, 25 bp, Probe sequence
agttacttacacaacaccgcgatat

SEQ ID NO: 241446 - DNA, 25 bp, Probe sequence
agaggtggaagaagcttcaactgat

SEQ ID NO: 241447 - DNA, 25 bp, Probe sequence
aaattaaacttcacagtggttgatc

SEQ ID NO: 241448 - DNA, 25 bp, Probe sequence
acctgaacaaaaagcggatcgtgag

SEQ ID NO: 241449 - DNA, 25 bp, Probe sequence
actaaagctagttcagatggtatct

SEQ ID NO: 241450 - DNA, 25 bp, Probe sequence
acatggtgctggttttagattacaa

SEQ ID NO: 241451 - DNA, 25 bp, Probe sequence
acaattattccctgatttacaagta

SEQ ID NO: 241452 - DNA, 25 bp, Probe sequence
aaagcggatcgtgagtttgacgaaa

SEQ ID NO: 241453 - DNA, 25 bp, Probe sequence
aaacttgaaaatacgcctgcttact

SEQ ID NO: 241454 - DNA, 25 bp, Probe sequence
aagctggcgttgaggaagaaagtac

SEQ ID NO: 241455 - DNA, 25 bp, Probe sequence
aacctggagctcaaaagataacggg

SEQ ID NO: 241456 - DNA, 25 bp, Probe sequence
aatacgcctgcttactacaagttat

SEQ ID NO: 241457 - DNA, 25 bp, Probe sequence
aattgaggtttcgtcgtcaagccct

SEQ ID NO: 241458 - DNA, 25 bp, Probe sequence
caagcagaagcatcagaggctaatg

SEQ ID NO: 241459 - DNA, 25 bp, Probe sequence
tggcggtttgggttttgttgaagca

SEQ ID NO: 241460 - DNA, 25 bp, Probe sequence
gctttgactcacatggtgctggttt

SEQ ID NO: 241461 - DNA, 25 bp, Probe sequence
gcttactacaagttatacggcgata

SEQ ID NO: 241462 - DNA, 25 bp, Probe sequence
gcttcaactgataaagctggcgttg

SEQ ID NO: 241463 - DNA, 25 bp, Probe sequence
gaatttagctttgactcacatggtg

SEQ ID NO: 241464 - DNA, 25 bp, Probe sequence
gaatcaaaagttgtttcacagactg

SEQ ID NO: 241465 - DNA, 25 bp, Probe sequence
gatgggaaaagtgcggattcagtag

SEQ ID NO: 241466 - DNA, 25 bp, Probe sequence
gacatttcactaacatttgcacctg

SEQ ID NO: 241467 - DNA, 25 bp, Probe sequence
gagagcgttaagggcggagttagta

SEQ ID NO: 241468 - DNA, 25 bp, Probe sequence
gatactaacgatttcccgattactt

SEQ ID NO: 241469 - DNA, 25 bp, Probe sequence
gttcagatggtatctggatgcctat

SEQ ID NO: 241470 - DNA, 25 bp, Probe sequence
gtacagaagctaaagttacttacac

SEQ ID NO: 241471 - DNA, 25 bp, Probe sequence
gggaactactttaccaaatcactat

SEQ ID NO: 241472 - DNA, 25 bp, Probe sequence
ggtgaagcacaattattccctgatt

SEQ ID NO: 241473 - DNA, 25 bp, Probe sequence
ggattcgatactaacgatttcccga

SEQ ID NO: 241474 - DNA, 25 bp, Probe sequence
tcctattacaggtgacttgttaagt

SEQ ID NO: 241475 - DNA, 25 bp, Probe sequence
tttcccgattacttggttctatcca

SEQ ID NO: 241476 - DNA, 25 bp, Probe sequence
taccaaatcactatgttttattaac

SEQ ID NO: 241477 - DNA, 25 bp, Probe sequence
tagatactattaaacctggagctca

SEQ ID NO: 241478 - DNA, 25 bp, Probe sequence
atttagcacgtatcgttggacataa

SEQ ID NO: 241479 - DNA, 25 bp, Probe sequence
atcgcgatggtaaaaggttatgctg

SEQ ID NO: 241480 - DNA, 25 bp, Probe sequence
aggtgatttagcattctgttctggt

SEQ ID NO: 241481 - DNA, 25 bp, Probe sequence
agaaaaacgtgatcctgacttcgat

SEQ ID NO: 241482 - DNA, 25 bp, Probe sequence
agctatgaatgctgacacagatggt

SEQ ID NO: 241483 - DNA, 25 bp, Probe sequence
accaaatccctcgcttaaatgtatt

SEQ ID NO: 241484 - DNA, 25 bp, Probe sequence
acagcgtttaattcgtattattcca

SEQ ID NO: 241485 - DNA, 25 bp, Probe sequence
aagagattatgaaacactcaccaac

SEQ ID NO: 241486 - DNA, 25 bp, Probe sequence
cacgtgcacgtgatgatcaaaacgt

SEQ ID NO: 241487 - DNA, 25 bp, Probe sequence
cgatcaattccctaaattcccataa

SEQ ID NO: 241488 - DNA, 25 bp, Probe sequence
gcgaaagaaggccgtgatgcgttta

SEQ ID NO: 241489 - DNA, 25 bp, Probe sequence
gctgctgataatgctatttttggac

SEQ ID NO: 241490 - DNA, 25 bp, Probe sequence
gctatttttggacaaactggtccta

SEQ ID NO: 241491 - DNA, 25 bp, Probe sequence
gaagatgaaactgtgcaatggtgta

SEQ ID NO: 241492 - DNA, 25 bp, Probe sequence
gaaacgtggacatggtggttatgta

SEQ ID NO: 241493 - DNA, 25 bp, Probe sequence
gacacagatggtttagctggtttac

SEQ ID NO: 241494 - DNA, 25 bp, Probe sequence
gacttcgatcaattccctaaattcc

SEQ ID NO: 241495 - DNA, 25 bp, Probe sequence
gatcaaaacgtttcagttatcgtat

SEQ ID NO: 241496 - DNA, 25 bp, Probe sequence
gattgacgcattttcacgtgcacgt

SEQ ID NO: 241497 - DNA, 25 bp, Probe sequence
gttatggttcaggatatttagcacg

SEQ ID NO: 241498 - DNA, 25 bp, Probe sequence
gtttacaacaaatggctggggatgc

SEQ ID NO: 241499 - DNA, 25 bp, Probe sequence
gtaggtgaagaccaaatccctcgct

SEQ ID NO: 241500 - DNA, 25 bp, Probe sequence
gtacgcaatgcgtttacacctaaaa

SEQ ID NO: 241501 - DNA, 25 bp, Probe sequence
gtcgtcaatacaatgcacaagaagc

SEQ ID NO: 241502 - DNA, 25 bp, Probe sequence
gtcctaaagtaggttcatttgatgc

SEQ ID NO: 241503 - DNA, 25 bp, Probe sequence
ggtggtgaccagaagaaacgtggac

SEQ ID NO: 241504 - DNA, 25 bp, Probe sequence
ggtacttatgtcgtcaatacaatgc

SEQ ID NO: 241505 - DNA, 25 bp, Probe sequence
ggtaacaataaatcgccctgaagta

SEQ ID NO: 241506 - DNA, 25 bp, Probe sequence
ggttatgctgtaggtggcggtaatg

SEQ ID NO: 241507 - DNA, 25 bp, Probe sequence
tgtgacttaacgattgctgctgata

SEQ ID NO: 241508 - DNA, 25 bp, Probe sequence
tgtactaaatgttgtttgtgactta

SEQ ID NO: 241509 - DNA, 25 bp, Probe sequence
taaatcgccctgaagtacgcaatgc

SEQ ID NO: 241510 - DNA, 25 bp, Probe sequence
tagcattctgttctggtggtgacca

SEQ ID NO: 241511 - DNA, 25 bp, Probe sequence
ttacgattccttaaagcagctatga

SEQ ID NO: 241512 - DNA, 25 bp, Probe sequence
atctgaacagctagaacttctccgt

SEQ ID NO: 241513 - DNA, 25 bp, Probe sequence
atctatagtttcaaggtggattaag

SEQ ID NO: 241514 - DNA, 25 bp, Probe sequence
atcggaagtcgaattagacaattta

SEQ ID NO: 241515 - DNA, 25 bp, Probe sequence
atgcacgttgcgaattgattgaagc

SEQ ID NO: 241516 - DNA, 25 bp, Probe sequence
atgtcaatgtttatcggaagtcgaa

SEQ ID NO: 241517 - DNA, 25 bp, Probe sequence
agaagatttggacaacgcacggata

SEQ ID NO: 241518 - DNA, 25 bp, Probe sequence
agcacgtacattaatttcacaaata

SEQ ID NO: 241519 - DNA, 25 bp, Probe sequence
aaatcaacgacgcatatcgttgtaa

SEQ ID NO: 241520 - DNA, 25 bp, Probe sequence
aacaatgacttaaacttagtgaata

SEQ ID NO: 241521 - DNA, 25 bp, Probe sequence
aacgcacggatatcacatctgaaca

SEQ ID NO: 241522 - DNA, 25 bp, Probe sequence
caacttgaaaaacttattacactga

SEQ ID NO: 241523 - DNA, 25 bp, Probe sequence
cacaaataaataatgcacgttgcga

SEQ ID NO: 241524 - DNA, 25 bp, Probe sequence
cacagtatgatttgacgatgaagat

SEQ ID NO: 241525 - DNA, 25 bp, Probe sequence
cactgactaacaatgacttaaactt

SEQ ID NO: 241526 - DNA, 25 bp, Probe sequence
gctagaacttctccgtattttattt

SEQ ID NO: 241527 - DNA, 25 bp, Probe sequence
gcacggatatcacatctgaacagct

SEQ ID NO: 241528 - DNA, 25 bp, Probe sequence
gaagcaagatgtcaatgtttatcgg

SEQ ID NO: 241529 - DNA, 25 bp, Probe sequence
gaacagctagaacttctccgtattt

SEQ ID NO: 241530 - DNA, 25 bp, Probe sequence
gaaaaacttattacactgactaaca

SEQ ID NO: 241531 - DNA, 25 bp, Probe sequence
gactgatcaagcacgtacattaatt

SEQ ID NO: 241532 - DNA, 25 bp, Probe sequence
gatcgcttatcacagtatgatttga

SEQ ID NO: 241533 - DNA, 25 bp, Probe sequence
gatcaagcacgtacattaatttcac

SEQ ID NO: 241534 - DNA, 25 bp, Probe sequence
gatttggacaacgcacggatatcac

SEQ ID NO: 241535 - DNA, 25 bp, Probe sequence
gtaaagaattaattttgactgatca

SEQ ID NO: 241536 - DNA, 25 bp, Probe sequence
gggaacaatctatagtttcaaggtg

SEQ ID NO: 241537 - DNA, 25 bp, Probe sequence
ggacaacgcacggatatcacatctg

SEQ ID NO: 241538 - DNA, 25 bp, Probe sequence
tcacaagtcaacaatctagcgaaga

SEQ ID NO: 241539 - DNA, 25 bp, Probe sequence
taattacgatcgcttatcacagtat

SEQ ID NO: 241540 - DNA, 25 bp, Probe sequence
taagttaaatcaacgacgcatatcg

SEQ ID NO: 241541 - DNA, 25 bp, Probe sequence
tacatcacaagtcaacaatctagcg

SEQ ID NO: 241542 - DNA, 25 bp, Probe sequence
tattacactgactaacaatgactta

SEQ ID NO: 241543 - DNA, 25 bp, Probe sequence
ttttatttaattacgatcgcttatc

SEQ ID NO: 241544 - DNA, 25 bp, Probe sequence
ttacgatcgcttatcacagtatgat

SEQ ID NO: 241545 - DNA, 25 bp, Probe sequence
ttgactgatcaagcacgtacattaa

SEQ ID NO: 241546 - DNA, 25 bp, Probe sequence
atgttggcgcaagtatacagcgttg

SEQ ID NO: 241547 - DNA, 25 bp, Probe sequence
atgtggcgagatgttggggatatgg

SEQ ID NO: 241548 - DNA, 25 bp, Probe sequence
agatgttggcgcaagtatacagcgt

SEQ ID NO: 241549 - DNA, 25 bp, Probe sequence
acctgaagttgttatgtggcgagat

SEQ ID NO: 241550 - DNA, 25 bp, Probe sequence
acagcgttgaaccagaaattttaat

SEQ ID NO: 241551 - DNA, 25 bp, Probe sequence
cgagatgttggcgcaagtatacagc

SEQ ID NO: 241552 - DNA, 25 bp, Probe sequence
gcgcaagtatacagcgttgaaccag

SEQ ID NO: 241553 - DNA, 25 bp, Probe sequence
gcgttgaaccagaaattttaatgta

SEQ ID NO: 241554 - DNA, 25 bp, Probe sequence
gcgagatgttggcgcaagtatacag

SEQ ID NO: 241555 - DNA, 25 bp, Probe sequence
gcaagtatacagcgttgaaccagaa

SEQ ID NO: 241556 - DNA, 25 bp, Probe sequence
gaagttgttatgtggcgagatgttg

SEQ ID NO: 241557 - DNA, 25 bp, Probe sequence
gagatgttggggatatggatggtgt

SEQ ID NO: 241558 - DNA, 25 bp, Probe sequence
gatggtgttgtatgtggcgagatgt

SEQ ID NO: 241559 - DNA, 25 bp, Probe sequence
gatgttggggatatggatggtgttg

SEQ ID NO: 241560 - DNA, 25 bp, Probe sequence
gttgtatgtggcgagatgttggcgc

SEQ ID NO: 241561 - DNA, 25 bp, Probe sequence
gttgttatgtggcgagatgttgggg

SEQ ID NO: 241562 - DNA, 25 bp, Probe sequence
gtatacagcgttgaaccagaaattt

SEQ ID NO: 241563 - DNA, 25 bp, Probe sequence
gtatgtggcgagatgttggcgcaag

SEQ ID NO: 241564 - DNA, 25 bp, Probe sequence
gtacctgaagttgttatgtggcgag

SEQ ID NO: 241565 - DNA, 25 bp, Probe sequence
gtgggcattgtacctgaagttgtta

SEQ ID NO: 241566 - DNA, 25 bp, Probe sequence
gtggcgagatgttggcgcaagtata

SEQ ID NO: 241567 - DNA, 25 bp, Probe sequence
gtggcgagatgttggggatatggat

SEQ ID NO: 241568 - DNA, 25 bp, Probe sequence
ggtgttgtatgtggcgagatgttgg

SEQ ID NO: 241569 - DNA, 25 bp, Probe sequence
ggatatggatggtgttgtatgtggc

SEQ ID NO: 241570 - DNA, 25 bp, Probe sequence
ggcattgtacctgaagttgttatgt

SEQ ID NO: 241571 - DNA, 25 bp, Probe sequence
ggcgagatgttggggatatggatgg

SEQ ID NO: 241572 - DNA, 25 bp, Probe sequence
ggcgcaagtatacagcgttgaacca

SEQ ID NO: 241573 - DNA, 25 bp, Probe sequence
tggcgagatgttggcgcaagtatac

SEQ ID NO: 241574 - DNA, 25 bp, Probe sequence
tggatggtgttgtatgtggcgagat

SEQ ID NO: 241575 - DNA, 25 bp, Probe sequence
tgggcattgtacctgaagttgttat

SEQ ID NO: 241576 - DNA, 25 bp, Probe sequence
tgttatgtggcgagatgttggggat

SEQ ID NO: 241577 - DNA, 25 bp, Probe sequence
tgttggggatatggatggtgttgta

SEQ ID NO: 241578 - DNA, 25 bp, Probe sequence
tatggatggtgttgtatgtggcgag

SEQ ID NO: 241579 - DNA, 25 bp, Probe sequence
ttggcgcaagtatacagcgttgaac

SEQ ID NO: 241580 - DNA, 25 bp, Probe sequence
attgatggtaaacaatcaccgctat

SEQ ID NO: 241581 - DNA, 25 bp, Probe sequence
atcaccgctatttttgcttgtgtat

SEQ ID NO: 241582 - DNA, 25 bp, Probe sequence
atggtaaacaatcaccgctattttt

SEQ ID NO: 241583 - DNA, 25 bp, Probe sequence
agtagcggtgattgttaaaattgat

SEQ ID NO: 241584 - DNA, 25 bp, Probe sequence
agcggtgattgttaaaattgatggt

SEQ ID NO: 241585 - DNA, 25 bp, Probe sequence
accgctatttttgcttgtgtatgta

SEQ ID NO: 241586 - DNA, 25 bp, Probe sequence
acaatcaccgctatttttgcttgtg

SEQ ID NO: 241587 - DNA, 25 bp, Probe sequence
aaattgaatcatgaattacaagcaa

SEQ ID NO: 241588 - DNA, 25 bp, Probe sequence
aaagtagcggtgattgttaaaattg

SEQ ID NO: 241589 - DNA, 25 bp, Probe sequence
aaacaatcaccgctatttttgcttg

SEQ ID NO: 241590 - DNA, 25 bp, Probe sequence
aacaatcaccgctatttttgcttgt

SEQ ID NO: 241591 - DNA, 25 bp, Probe sequence
aagcaaaagtagcggtgattgttaa

SEQ ID NO: 241592 - DNA, 25 bp, Probe sequence
aagtagcggtgattgttaaaattga

SEQ ID NO: 241593 - DNA, 25 bp, Probe sequence
aatcaccgctatttttgcttgtgta

SEQ ID NO: 241594 - DNA, 25 bp, Probe sequence
aattacaagcaaaagtagcggtgat

SEQ ID NO: 241595 - DNA, 25 bp, Probe sequence
aattgatggtaaacaatcaccgcta

SEQ ID NO: 241596 - DNA, 25 bp, Probe sequence
caatcaccgctatttttgcttgtgt

SEQ ID NO: 241597 - DNA, 25 bp, Probe sequence
caagcaaaagtagcggtgattgtta

SEQ ID NO: 241598 - DNA, 25 bp, Probe sequence
caccgctatttttgcttgtgtatgt

SEQ ID NO: 241599 - DNA, 25 bp, Probe sequence
gcggtgattgttaaaattgatggta

SEQ ID NO: 241600 - DNA, 25 bp, Probe sequence
gcacacaacaaaaattgaatcatga

SEQ ID NO: 241601 - DNA, 25 bp, Probe sequence
gcaaaagtagcggtgattgttaaaa

SEQ ID NO: 241602 - DNA, 25 bp, Probe sequence
gatggtaaacaatcaccgctatttt

SEQ ID NO: 241603 - DNA, 25 bp, Probe sequence
gtagcggtgattgttaaaattgatg

SEQ ID NO: 241604 - DNA, 25 bp, Probe sequence
gtaaacaatcaccgctatttttgct

SEQ ID NO: 241605 - DNA, 25 bp, Probe sequence
gtgcacacaacaaaaattgaatcat

SEQ ID NO: 241606 - DNA, 25 bp, Probe sequence
ggtaaacaatcaccgctatttttgc

SEQ ID NO: 241607 - DNA, 25 bp, Probe sequence
tggtaaacaatcaccgctatttttg

SEQ ID NO: 241608 - DNA, 25 bp, Probe sequence
tgtgcacacaacaaaaattgaatca

SEQ ID NO: 241609 - DNA, 25 bp, Probe sequence
tgatggtaaacaatcaccgctattt

SEQ ID NO: 241610 - DNA, 25 bp, Probe sequence
tcaccgctatttttgcttgtgtatg

SEQ ID NO: 241611 - DNA, 25 bp, Probe sequence
taaacaatcaccgctatttttgctt

SEQ ID NO: 241612 - DNA, 25 bp, Probe sequence
ttacaagcaaaagtagcggtgattg

SEQ ID NO: 241613 - DNA, 25 bp, Probe sequence
ttgatggtaaacaatcaccgctatt

SEQ ID NO: 241614 - DNA, 25 bp, Probe sequence
attattacatgagtttggtacgaaa

SEQ ID NO: 241615 - DNA, 25 bp, Probe sequence
atacgaagggtgttattgttcaata

SEQ ID NO: 241616 - DNA, 25 bp, Probe sequence
ataaccaatccattattacatgagt

SEQ ID NO: 241617 - DNA, 25 bp, Probe sequence
atgacaccaacagatatgggtaaat

SEQ ID NO: 241618 - DNA, 25 bp, Probe sequence
agtcctaaaataaccaatccattat

SEQ ID NO: 241619 - DNA, 25 bp, Probe sequence
agtctttactgtttactataatgat

SEQ ID NO: 241620 - DNA, 25 bp, Probe sequence
agttcgaatcaaacatatttataat

SEQ ID NO: 241621 - DNA, 25 bp, Probe sequence
catggtttaaaacatctaagcctat

SEQ ID NO: 241622 - DNA, 25 bp, Probe sequence
agccaacattgaatagacttaacgg

SEQ ID NO: 241623 - DNA, 25 bp, Probe sequence
accaatccattattacatgagtttg

SEQ ID NO: 241624 - DNA, 25 bp, Probe sequence
acaagtctttactgtttactataat

SEQ ID NO: 241625 - DNA, 25 bp, Probe sequence
aaccaatccattattacatgagttt

SEQ ID NO: 241626 - DNA, 25 bp, Probe sequence
aagtctttactgtttactataatga

SEQ ID NO: 241627 - DNA, 25 bp, Probe sequence
aatacgaagggtgttattgttcaat

SEQ ID NO: 241628 - DNA, 25 bp, Probe sequence
aatgaagttcgaatcaaacatattt

SEQ ID NO: 241629 - DNA, 25 bp, Probe sequence
aatccattattacatgagtttggta

SEQ ID NO: 241630 - DNA, 25 bp, Probe sequence
caagtctttactgtttactataatg

SEQ ID NO: 241631 - DNA, 25 bp, Probe sequence
caacattgaatagacttaacggggg

SEQ ID NO: 241632 - DNA, 25 bp, Probe sequence
ctttactgtttactataatgataag

SEQ ID NO: 241633 - DNA, 25 bp, Probe sequence
gccaacattgaatagacttaacggg

SEQ ID NO: 241634 - DNA, 25 bp, Probe sequence
gaagttcgaatcaaacatatttata

SEQ ID NO: 241635 - DNA, 25 bp, Probe sequence
gacaccaacagatatgggtaaatta

SEQ ID NO: 241636 - DNA, 25 bp, Probe sequence
gacaagtctttactgtttactataa

SEQ ID NO: 241637 - DNA, 25 bp, Probe sequence
gatgaatatcgatatggtttctatg

SEQ ID NO: 241638 - DNA, 25 bp, Probe sequence
gatcctaagaaatacaaaaagcata

SEQ ID NO: 241639 - DNA, 25 bp, Probe sequence
gttcagctcaaaaattttcaacagg

SEQ ID NO: 241640 - DNA, 25 bp, Probe sequence
gtatccagatgaatatcgatatggt

SEQ ID NO: 241641 - DNA, 25 bp, Probe sequence
gtctttactgtttactataatgata

SEQ ID NO: 241642 - DNA, 25 bp, Probe sequence
ggttcagctcaaaaattttcaacag

SEQ ID NO: 241643 - DNA, 25 bp, Probe sequence
ggacaagtctttactgtttactata

SEQ ID NO: 241644 - DNA, 25 bp, Probe sequence
ggaaacaatgaagttcgaatcaaac

SEQ ID NO: 241645 - DNA, 25 bp, Probe sequence
tccattattacatgagtttggtacg

SEQ ID NO: 241646 - DNA, 25 bp, Probe sequence
taaccaatccattattacatgagtt

SEQ ID NO: 241647 - DNA, 25 bp, Probe sequence
tacgaagggtgttattgttcaataa

SEQ ID NO: 241648 - DNA, 25 bp, Probe sequence
attgcagatgttcccgctgttaagc

SEQ ID NO: 241649 - DNA, 25 bp, Probe sequence
atcacaatacgatacgtttatttta

SEQ ID NO: 241650 - DNA, 25 bp, Probe sequence
atgattgcaagatttgcttatccaa

SEQ ID NO: 241651 - DNA, 25 bp, Probe sequence
atggtggtgcacaaacacatctcat

SEQ ID NO: 241652 - DNA, 25 bp, Probe sequence
atggatgggcttttacagagggtgt

SEQ ID NO: 241653 - DNA, 25 bp, Probe sequence
aggcgatggacctacattaaatgat

SEQ ID NO: 241654 - DNA, 25 bp, Probe sequence
acgctaaaaagccaatcacataaca

SEQ ID NO: 241655 - DNA, 25 bp, Probe sequence
acattcttccaaagctggaacggtc

SEQ ID NO: 241656 - DNA, 25 bp, Probe sequence
aaattgccacaaaatctaatcgcgg

SEQ ID NO: 241657 - DNA, 25 bp, Probe sequence
aaatctaatcgcggcaatagagata

SEQ ID NO: 241658 - DNA, 25 bp, Probe sequence
aacagttagcgttaaaatatcgatt

SEQ ID NO: 241659 - DNA, 25 bp, Probe sequence
aatgcgagtcatttattatcacaat

SEQ ID NO: 241660 - DNA, 25 bp, Probe sequence
cataacagtaatcatgcgcatttta

SEQ ID NO: 241661 - DNA, 25 bp, Probe sequence
gctggaacggtcggacgaattgcga

SEQ ID NO: 241662 - DNA, 25 bp, Probe sequence
gcgcattttacatttataggcgatg

SEQ ID NO: 241663 - DNA, 25 bp, Probe sequence
gctgggttagaaaatgatgtcacat

SEQ ID NO: 241664 - DNA, 25 bp, Probe sequence
gcatgaaggtttgccaattagcatt

SEQ ID NO: 241665 - DNA, 25 bp, Probe sequence
gcattatttgtgtttcagatttcga

SEQ ID NO: 241666 - DNA, 25 bp, Probe sequence
gaagtggaagacgtttataatggaa

SEQ ID NO: 241667 - DNA, 25 bp, Probe sequence
gaccaatgattgaacaactagatgc

SEQ ID NO: 241668 - DNA, 25 bp, Probe sequence
gatgtcacatttttgggcaatgtca

SEQ ID NO: 241669 - DNA, 25 bp, Probe sequence
gatgtttatgtcattgtaggcaatc

SEQ ID NO: 241670 - DNA, 25 bp, Probe sequence
gatattttagctgtcaaagtgttag

SEQ ID NO: 241671 - DNA, 25 bp, Probe sequence
gatttgcttatccaaaattgccaca

SEQ ID NO: 241672 - DNA, 25 bp, Probe sequence
gttggaatgttgcctaataaacaag

SEQ ID NO: 241673 - DNA, 25 bp, Probe sequence
gttcccgctgttaagcaaacgctaa

SEQ ID NO: 241674 - DNA, 25 bp, Probe sequence
gtcattgtaggcaatcatggaccaa

SEQ ID NO: 241675 - DNA, 25 bp, Probe sequence
gtgcacaaacacatctcattcaact

SEQ ID NO: 241676 - DNA, 25 bp, Probe sequence
gggcaatgtcattaatgcgagtcat

SEQ ID NO: 241677 - DNA, 25 bp, Probe sequence
ggacctacattaaatgattgtcagc

SEQ ID NO: 241678 - DNA, 25 bp, Probe sequence
tcggacgaattgcgaagttcatttc

SEQ ID NO: 241679 - DNA, 25 bp, Probe sequence
tcagatttcgataaacagttagcgt

SEQ ID NO: 241680 - DNA, 25 bp, Probe sequence
tacagagggtgttaaaccagctaaa

SEQ ID NO: 241681 - DNA, 25 bp, Probe sequence
ttgcgaagttcatttcgaaatcgaa

SEQ ID NO: 241682 - DNA, 25 bp, Probe sequence
attccggttgcaacgactgcaattg

SEQ ID NO: 241683 - DNA, 25 bp, Probe sequence
aggtattccggttgcaacgactgca

SEQ ID NO: 241684 - DNA, 25 bp, Probe sequence
atgttaagtattcaaaatccttctt

SEQ ID NO: 241685 - DNA, 25 bp, Probe sequence
atggttgcatcattaacgacgctac

SEQ ID NO: 241686 - DNA, 25 bp, Probe sequence
aggaggtattccggttgcaacgact

SEQ ID NO: 241687 - DNA, 25 bp, Probe sequence
agtattcaaaatccttctttagttg

SEQ ID NO: 241688 - DNA, 25 bp, Probe sequence
acattatcattgcaggcgctggcgg

SEQ ID NO: 241689 - DNA, 25 bp, Probe sequence
aaatcagtatgaatcttcgttaatt

SEQ ID NO: 241690 - DNA, 25 bp, Probe sequence
aaaacaagtagtatccgcacatcgt

SEQ ID NO: 241691 - DNA, 25 bp, Probe sequence
aaaaagtggaggacatgcaaaatga

SEQ ID NO: 241692 - DNA, 25 bp, Probe sequence
aactaaatcagtatgaatcttcgtt

SEQ ID NO: 241693 - DNA, 25 bp, Probe sequence
aagggtatagattctttattatcaa

SEQ ID NO: 241694 - DNA, 25 bp, Probe sequence
aatgccaggaggtattccggttgca

SEQ ID NO: 241695 - DNA, 25 bp, Probe sequence
caagtagtatccgcacatcgtacgc

SEQ ID NO: 241696 - DNA, 25 bp, Probe sequence
cattaacgacgctaccagttattgg

SEQ ID NO: 241697 - DNA, 25 bp, Probe sequence
cattatcattgcaggcgctggcggt

SEQ ID NO: 241698 - DNA, 25 bp, Probe sequence
ctggcggtgcggcacatttaccagg

SEQ ID NO: 241699 - DNA, 25 bp, Probe sequence
cggtgcggcacatttaccaggtatg

SEQ ID NO: 241700 - DNA, 25 bp, Probe sequence
gccaggaggtattccggttgcaacg

SEQ ID NO: 241701 - DNA, 25 bp, Probe sequence
gcaggtatacttgcagcaagaatgt

SEQ ID NO: 241702 - DNA, 25 bp, Probe sequence
gcaattggtgcagcaggtgctaaaa

SEQ ID NO: 241703 - DNA, 25 bp, Probe sequence
gaatcttcgttaattcaaaaagtgg

SEQ ID NO: 241704 - DNA, 25 bp, Probe sequence
gatggttcaatttgcttctgaagcg

SEQ ID NO: 241705 - DNA, 25 bp, Probe sequence
gattctttattatcaattgttcaaa

SEQ ID NO: 241706 - DNA, 25 bp, Probe sequence
gttgcatcattaacgacgctaccag

SEQ ID NO: 241707 - DNA, 25 bp, Probe sequence
gtgcggcacatttaccaggtatggt

SEQ ID NO: 241708 - DNA, 25 bp, Probe sequence
ggtatggttgcatcattaacgacgc

SEQ ID NO: 241709 - DNA, 25 bp, Probe sequence
ggttgcaacgactgcaattggtgca

SEQ ID NO: 241710 - DNA, 25 bp, Probe sequence
ggcacatttaccaggtatggttgca

SEQ ID NO: 241711 - DNA, 25 bp, Probe sequence
tggattattttgaaattccgtacga

SEQ ID NO: 241712 - DNA, 25 bp, Probe sequence
tggttcaatttgcttctgaagcgag

SEQ ID NO: 241713 - DNA, 25 bp, Probe sequence
tgcatcattaacgacgctaccagtt

SEQ ID NO: 241714 - DNA, 25 bp, Probe sequence
tcaattgttcaaatgccaggaggta

SEQ ID NO: 241715 - DNA, 25 bp, Probe sequence
tttgcttctgaagcgagagaaagag

SEQ ID NO: 241716 - DNA, 25 bp, Probe sequence
atgaacatccagagtggcacttaca

SEQ ID NO: 241717 - DNA, 25 bp, Probe sequence
atggggcatatgactgtactaacga

SEQ ID NO: 241718 - DNA, 25 bp, Probe sequence
agagtggcacttacatatttatggt

SEQ ID NO: 241719 - DNA, 25 bp, Probe sequence
agaggaaacaacaatcaaatcactt

SEQ ID NO: 241720 - DNA, 25 bp, Probe sequence
agcagttaccggacaatcattacca

SEQ ID NO: 241721 - DNA, 25 bp, Probe sequence
accggacaatcattaccaaattcaa

SEQ ID NO: 241722 - DNA, 25 bp, Probe sequence
acgaatgatgtaaaccaaactgaac

SEQ ID NO: 241723 - DNA, 25 bp, Probe sequence
acaagccaagtatgacgatgaaaag

SEQ ID NO: 241724 - DNA, 25 bp, Probe sequence
acaatattccgcaaggttaccaagc

SEQ ID NO: 241725 - DNA, 25 bp, Probe sequence
aaaggcactcaatcaattaggacaa

SEQ ID NO: 241726 - DNA, 25 bp, Probe sequence
aaagtttggtgcgactattggcatt

SEQ ID NO: 241727 - DNA, 25 bp, Probe sequence
aaaacaattgttccagcgagaatag

SEQ ID NO: 241728 - DNA, 25 bp, Probe sequence
aactagatttggtggctacgatggc

SEQ ID NO: 241729 - DNA, 25 bp, Probe sequence
aatgtgatgtgattacttatgaatt

SEQ ID NO: 241730 - DNA, 25 bp, Probe sequence
aattatccaatcgattcatttcatt

SEQ ID NO: 241731 - DNA, 25 bp, Probe sequence
gcctcacaattccggacattattca

SEQ ID NO: 241732 - DNA, 25 bp, Probe sequence
gcgactattggcattattggtggtg

SEQ ID NO: 241733 - DNA, 25 bp, Probe sequence
gcattattggtggtggtcagcttgg

SEQ ID NO: 241734 - DNA, 25 bp, Probe sequence
gcagtcatgatgaacttactaggta

SEQ ID NO: 241735 - DNA, 25 bp, Probe sequence
gcacacgaatttatacaagccaagt

SEQ ID NO: 241736 - DNA, 25 bp, Probe sequence
gaagattgtccatgtagatacgttg

SEQ ID NO: 241737 - DNA, 25 bp, Probe sequence
gaaacattaaaaagtgctggtacca

SEQ ID NO: 241738 - DNA, 25 bp, Probe sequence
gaaaacatttcagcccaacaattaa

SEQ ID NO: 241739 - DNA, 25 bp, Probe sequence
gaaacattaggatatccttttattg

SEQ ID NO: 241740 - DNA, 25 bp, Probe sequence
gaaactagtgaatgcgtagctgaaa

SEQ ID NO: 241741 - DNA, 25 bp, Probe sequence
gatggcacaatcagctcaaaaaatg

SEQ ID NO: 241742 - DNA, 25 bp, Probe sequence
gatactcatattttagcagttaccg

SEQ ID NO: 241743 - DNA, 25 bp, Probe sequence
gatatgtacgctaaatttgagggga

SEQ ID NO: 241744 - DNA, 25 bp, Probe sequence
gattattcacaatttgatactcata

SEQ ID NO: 241745 - DNA, 25 bp, Probe sequence
gattcatttcattggaacatttaca

SEQ ID NO: 241746 - DNA, 25 bp, Probe sequence
gttaccaagctatacagttattaca

SEQ ID NO: 241747 - DNA, 25 bp, Probe sequence
gtccatgtagatacgttgcacacga

SEQ ID NO: 241748 - DNA, 25 bp, Probe sequence
gtggctacgatggcaaaggtcaagt

SEQ ID NO: 241749 - DNA, 25 bp, Probe sequence
ggtcagcttggaaagatgatggcac

SEQ ID NO: 241750 - DNA, 25 bp, Probe sequence
atatctccagatacatgtcgaattt

SEQ ID NO: 241751 - DNA, 25 bp, Probe sequence
atgtcgaatttgggataaagctacc

SEQ ID NO: 241752 - DNA, 25 bp, Probe sequence
agatgaagttactgctggaaacggg

SEQ ID NO: 241753 - DNA, 25 bp, Probe sequence
agcgcattttctcaacaaatcaaga

SEQ ID NO: 241754 - DNA, 25 bp, Probe sequence
actgctggaaacggggctaagaaag

SEQ ID NO: 241755 - DNA, 25 bp, Probe sequence
acaatggcaggtaaggggcgattaa

SEQ ID NO: 241756 - DNA, 25 bp, Probe sequence
aaaagcgaagcgcattttctcaaca

SEQ ID NO: 241757 - DNA, 25 bp, Probe sequence
aaaatggaatagaaagtcactttat

SEQ ID NO: 241758 - DNA, 25 bp, Probe sequence
aacactggatcactgattgaaacat

SEQ ID NO: 241759 - DNA, 25 bp, Probe sequence
aagcctgtgaaaataattccattag

SEQ ID NO: 241760 - DNA, 25 bp, Probe sequence
aagcgaagcgcattttctcaacaaa

SEQ ID NO: 241761 - DNA, 25 bp, Probe sequence
aagctaccaatgcaaactttgataa

SEQ ID NO: 241762 - DNA, 25 bp, Probe sequence
aatcaaattacttctattatattta

SEQ ID NO: 241763 - DNA, 25 bp, Probe sequence
aattccattagaagtagttgttcgt

SEQ ID NO: 241764 - DNA, 25 bp, Probe sequence
cagaacaattagttaagcctgtgaa

SEQ ID NO: 241765 - DNA, 25 bp, Probe sequence
cgaatttggaaagactgagactggt

SEQ ID NO: 241766 - DNA, 25 bp, Probe sequence
gcgaagcgcattttctcaacaaatc

SEQ ID NO: 241767 - DNA, 25 bp, Probe sequence
gcaggtaaggggcgattaaataatc

SEQ ID NO: 241768 - DNA, 25 bp, Probe sequence
gaagttactgctggaaacggggcta

SEQ ID NO: 241769 - DNA, 25 bp, Probe sequence
gaagtagttgttcgtaatattgcta

SEQ ID NO: 241770 - DNA, 25 bp, Probe sequence
gaagcgcattttctcaacaaatcaa

SEQ ID NO: 241771 - DNA, 25 bp, Probe sequence
gacacaatggcaggtaaggggcgat

SEQ ID NO: 241772 - DNA, 25 bp, Probe sequence
gaaacggggctaagaaagacacaat

SEQ ID NO: 241773 - DNA, 25 bp, Probe sequence
gaaataacactggatcactgattga

SEQ ID NO: 241774 - DNA, 25 bp, Probe sequence
gactgagactggtcaaattttgtta

SEQ ID NO: 241775 - DNA, 25 bp, Probe sequence
gactggtcaaattttgttagcggat

SEQ ID NO: 241776 - DNA, 25 bp, Probe sequence
gatacatgtcgaatttgggataaag

SEQ ID NO: 241777 - DNA, 25 bp, Probe sequence
gttactgctggaaacggggctaaga

SEQ ID NO: 241778 - DNA, 25 bp, Probe sequence
gttagcggatgaaatatctccagat

SEQ ID NO: 241779 - DNA, 25 bp, Probe sequence
gtgaagtttttagagaaccacttgt

SEQ ID NO: 241780 - DNA, 25 bp, Probe sequence
gggataaagctaccaatgcaaactt

SEQ ID NO: 241781 - DNA, 25 bp, Probe sequence
ggggctaagaaagacacaatggcag

SEQ ID NO: 241782 - DNA, 25 bp, Probe sequence
ggatcactgattgaaacatatcaaa

SEQ ID NO: 241783 - DNA, 25 bp, Probe sequence
tctccagatacatgtcgaatttggg

SEQ ID NO: 241784 - DNA, 25 bp, Probe sequence
atatcacattacaaccacaagtatt

SEQ ID NO: 241785 - DNA, 25 bp, Probe sequence
atcacattacaaccacaagtattag

SEQ ID NO: 241786 - DNA, 25 bp, Probe sequence
atgacagtggatgaggttagtgatg

SEQ ID NO: 241787 - DNA, 25 bp, Probe sequence
aggacaaacgcttactcgagctgta

SEQ ID NO: 241788 - DNA, 25 bp, Probe sequence
acgcaaggacaaacgcttactcgag

SEQ ID NO: 241789 - DNA, 25 bp, Probe sequence
actctaagtgaaaaattgtttgcaa

SEQ ID NO: 241790 - DNA, 25 bp, Probe sequence
actacatatcacattacaaccacaa

SEQ ID NO: 241791 - DNA, 25 bp, Probe sequence
acaaacgcttactcgagctgtacat

SEQ ID NO: 241792 - DNA, 25 bp, Probe sequence
acacaacattattacaactctaagt

SEQ ID NO: 241793 - DNA, 25 bp, Probe sequence
aaacgcttactcgagctgtacatga

SEQ ID NO: 241794 - DNA, 25 bp, Probe sequence
aaacaattgaactacatatcacatt

SEQ ID NO: 241795 - DNA, 25 bp, Probe sequence
aaggtacacaacattattacaactc

SEQ ID NO: 241796 - DNA, 25 bp, Probe sequence
aaggacaaacgcttactcgagctgt

SEQ ID NO: 241797 - DNA, 25 bp, Probe sequence
aattgtttgcaaatacagtgattga

SEQ ID NO: 241798 - DNA, 25 bp, Probe sequence
caaccacaagtattagatacgcaag

SEQ ID NO: 241799 - DNA, 25 bp, Probe sequence
caacattattacaactctaagtgaa

SEQ ID NO: 241800 - DNA, 25 bp, Probe sequence
caaacgcttactcgagctgtacatg

SEQ ID NO: 241801 - DNA, 25 bp, Probe sequence
cgcaaggacaaacgcttactcgagc

SEQ ID NO: 241802 - DNA, 25 bp, Probe sequence
gcacaagtgaatgatattcgtgtag

SEQ ID NO: 241803 - DNA, 25 bp, Probe sequence
gcaaggacaaacgcttactcgagct

SEQ ID NO: 241804 - DNA, 25 bp, Probe sequence
gaatgatattcgtgtaggaaaagta

SEQ ID NO: 241805 - DNA, 25 bp, Probe sequence
gaactacatatcacattacaaccac

SEQ ID NO: 241806 - DNA, 25 bp, Probe sequence
gacaaacgcttactcgagctgtaca

SEQ ID NO: 241807 - DNA, 25 bp, Probe sequence
gacagtggatgaggttagtgatgaa

SEQ ID NO: 241808 - DNA, 25 bp, Probe sequence
gatacgcaaggacaaacgcttactc

SEQ ID NO: 241809 - DNA, 25 bp, Probe sequence
ggtacacaacattattacaactcta

SEQ ID NO: 241810 - DNA, 25 bp, Probe sequence
ggttatgcacaagtgaatgatattc

SEQ ID NO: 241811 - DNA, 25 bp, Probe sequence
ggatgaggttagtgatgaaaaggta

SEQ ID NO: 241812 - DNA, 25 bp, Probe sequence
ggacaaacgcttactcgagctgtac

SEQ ID NO: 241813 - DNA, 25 bp, Probe sequence
ggaaaagtattatatatgacagtgg

SEQ ID NO: 241814 - DNA, 25 bp, Probe sequence
tacagtgattgaagaatatagctat

SEQ ID NO: 241815 - DNA, 25 bp, Probe sequence
tacatatcacattacaaccacaagt

SEQ ID NO: 241816 - DNA, 25 bp, Probe sequence
tacgcaaggacaaacgcttactcga

SEQ ID NO: 241817 - DNA, 25 bp, Probe sequence
ttacaaccacaagtattagatacgc

SEQ ID NO: 241818 - DNA, 25 bp, Probe sequence
attcctggtggattttcattcgggg

SEQ ID NO: 241819 - DNA, 25 bp, Probe sequence
aaaagctaacaatcaaattattctg

SEQ ID NO: 241820 - DNA, 25 bp, Probe sequence
aaaagttatatatcctgtagctcac

SEQ ID NO: 241821 - DNA, 25 bp, Probe sequence
aacgattcacatttatttattagta

SEQ ID NO: 241822 - DNA, 25 bp, Probe sequence
aagttggagggaacaacatgtctaa

SEQ ID NO: 241823 - DNA, 25 bp, Probe sequence
aagttatatatcctgtagctcacgg

SEQ ID NO: 241824 - DNA, 25 bp, Probe sequence
aagtggtgttgaagcggaatatgta

SEQ ID NO: 241825 - DNA, 25 bp, Probe sequence
aatgctgctattaaaagtggtgttg

SEQ ID NO: 241826 - DNA, 25 bp, Probe sequence
gaaggtaagccagtattaggtgttt

SEQ ID NO: 241827 - DNA, 25 bp, Probe sequence
gaagcgatggtaaaaagttggaggg

SEQ ID NO: 241828 - DNA, 25 bp, Probe sequence
gaaacgttgttaggtactgatagtg

SEQ ID NO: 241829 - DNA, 25 bp, Probe sequence
gaaagagctttagaaacgttgttag

SEQ ID NO: 241830 - DNA, 25 bp, Probe sequence
gaaatatgtgaataatccgaacggt

SEQ ID NO: 241831 - DNA, 25 bp, Probe sequence
gaaataggcttattacctggtgcat

SEQ ID NO: 241832 - DNA, 25 bp, Probe sequence
gatctggggcaatggctagtgtagc

SEQ ID NO: 241833 - DNA, 25 bp, Probe sequence
gagaaacatcactaagtggatttga

SEQ ID NO: 241834 - DNA, 25 bp, Probe sequence
gatgccacatcctgaaagagcttta

SEQ ID NO: 241835 - DNA, 25 bp, Probe sequence
gatagagacatgtttaatgctgcta

SEQ ID NO: 241836 - DNA, 25 bp, Probe sequence
gattttcattcggggattacttaag

SEQ ID NO: 241837 - DNA, 25 bp, Probe sequence
gggattacttaagatctggggcaat

SEQ ID NO: 241838 - DNA, 25 bp, Probe sequence
gttaggtactgatagtggtgtgaaa

SEQ ID NO: 241839 - DNA, 25 bp, Probe sequence
gtttttccaggttcgaattgtgata

SEQ ID NO: 241840 - DNA, 25 bp, Probe sequence
gtacttattcctggtggattttcat

SEQ ID NO: 241841 - DNA, 25 bp, Probe sequence
gtaagccagtattaggtgtttgtaa

SEQ ID NO: 241842 - DNA, 25 bp, Probe sequence
gtgaataatccgaacggttcatatg

SEQ ID NO: 241843 - DNA, 25 bp, Probe sequence
gtgcattattgcataacgattcaca

SEQ ID NO: 241844 - DNA, 25 bp, Probe sequence
gtggtgtgaaattatttgaagcgat

SEQ ID NO: 241845 - DNA, 25 bp, Probe sequence
ggtggattttcattcggggattact

SEQ ID NO: 241846 - DNA, 25 bp, Probe sequence
ggcttattacctggtgcattattgc

SEQ ID NO: 241847 - DNA, 25 bp, Probe sequence
tggcatgatgccacatcctgaaaga

SEQ ID NO: 241848 - DNA, 25 bp, Probe sequence
tggggcaatggctagtgtagcgccg

SEQ ID NO: 241849 - DNA, 25 bp, Probe sequence
tgtaatgggtttcaaattttaactg

SEQ ID NO: 241850 - DNA, 25 bp, Probe sequence
tccaggttcgaattgtgatagagac

SEQ ID NO: 241851 - DNA, 25 bp, Probe sequence
ttcttgtttttccaggttcgaattg

SEQ ID NO: 241852 - DNA, 25 bp, Probe sequence
attggggctagacctattaatttgt

SEQ ID NO: 241853 - DNA, 25 bp, Probe sequence
aggtgcaggggtagtcgatataggt

SEQ ID NO: 241854 - DNA, 25 bp, Probe sequence
aggtatcttttctgttatgtggagt

SEQ ID NO: 241855 - DNA, 25 bp, Probe sequence
aggtgaatcaatcaagaccgctatt

SEQ ID NO: 241856 - DNA, 25 bp, Probe sequence
accactagctgatgaagcacctgta

SEQ ID NO: 241857 - DNA, 25 bp, Probe sequence
aaggccgatatgttgtttctgttaa

SEQ ID NO: 241858 - DNA, 25 bp, Probe sequence
aatcggtgatccatttgtaggtaaa

SEQ ID NO: 241859 - DNA, 25 bp, Probe sequence
aattgccgtgggtgcaacaccatta

SEQ ID NO: 241860 - DNA, 25 bp, Probe sequence
cacgtgagccaggtatttctcctta

SEQ ID NO: 241861 - DNA, 25 bp, Probe sequence
gcgaaagtaaacgaccttctgtaca

SEQ ID NO: 241862 - DNA, 25 bp, Probe sequence
gctgctacaggcgttggtggaatca

SEQ ID NO: 241863 - DNA, 25 bp, Probe sequence
gcattggtattccaacaactgctgg

SEQ ID NO: 241864 - DNA, 25 bp, Probe sequence
gcatcggtagtacgtgtggaaggca

SEQ ID NO: 241865 - DNA, 25 bp, Probe sequence
gcaattgctcaatgtttaactactc

SEQ ID NO: 241866 - DNA, 25 bp, Probe sequence
gaagtttatgctgacattccagttg

SEQ ID NO: 241867 - DNA, 25 bp, Probe sequence
gaacattgctcttataaacattcta

SEQ ID NO: 241868 - DNA, 25 bp, Probe sequence
gaacaagtgccaacacgtgagccag

SEQ ID NO: 241869 - DNA, 25 bp, Probe sequence
gacattccagttgaaccactagctg

SEQ ID NO: 241870 - DNA, 25 bp, Probe sequence
gaccttctgtacaaatcggtgatcc

SEQ ID NO: 241871 - DNA, 25 bp, Probe sequence
ggtaattcggtcatttatgttggtt

SEQ ID NO: 241872 - DNA, 25 bp, Probe sequence
gtattcaagatatgggtgctgctgg

SEQ ID NO: 241873 - DNA, 25 bp, Probe sequence
gtgctgctggtttaacatcttcatc

SEQ ID NO: 241874 - DNA, 25 bp, Probe sequence
gtgtgttggtgttatcaatcacgac

SEQ ID NO: 241875 - DNA, 25 bp, Probe sequence
gtggcttactgattaccttagctaa

SEQ ID NO: 241876 - DNA, 25 bp, Probe sequence
ggacgactttggtggtagtcaactt

SEQ ID NO: 241877 - DNA, 25 bp, Probe sequence
ggtgataatcaagccgtagtattta

SEQ ID NO: 241878 - DNA, 25 bp, Probe sequence
ggtgccaatacgataattaagccag

SEQ ID NO: 241879 - DNA, 25 bp, Probe sequence
ggtcgagatggtattcatggtgcta

SEQ ID NO: 241880 - DNA, 25 bp, Probe sequence
ggcagacaacctaactttacagaaa

SEQ ID NO: 241881 - DNA, 25 bp, Probe sequence
tctcacaatcatccatcagcaattg

SEQ ID NO: 241882 - DNA, 25 bp, Probe sequence
tcatggtgctacttttgcatctgaa

SEQ ID NO: 241883 - DNA, 25 bp, Probe sequence
taagtgcgcattacggtttaggatt

SEQ ID NO: 241884 - DNA, 25 bp, Probe sequence
taagcatccgactatagcatctaaa

SEQ ID NO: 241885 - DNA, 25 bp, Probe sequence
taagccaggacttcaagcatcggta

SEQ ID NO: 241886 - DNA, 25 bp, Probe sequence
attggtcacgtccgttatgctactt

SEQ ID NO: 241887 - DNA, 25 bp, Probe sequence
atggtaacctcattaatgctaaatc

SEQ ID NO: 241888 - DNA, 25 bp, Probe sequence
acatcgtggtcaagaaggtgcaggt

SEQ ID NO: 241889 - DNA, 25 bp, Probe sequence
acatacatccttgcaagtgaaacat

SEQ ID NO: 241890 - DNA, 25 bp, Probe sequence
aaatgctatcagaccacttgttgta

SEQ ID NO: 241891 - DNA, 25 bp, Probe sequence
aaacaaggtgctatcttccattcgt

SEQ ID NO: 241892 - DNA, 25 bp, Probe sequence
aagtcatcgacaaaagcaatatatt

SEQ ID NO: 241893 - DNA, 25 bp, Probe sequence
aaggcgagcgaggattaggcttact

SEQ ID NO: 241894 - DNA, 25 bp, Probe sequence
aatttctgcaagcaaatcacctgaa

SEQ ID NO: 241895 - DNA, 25 bp, Probe sequence
caacatgcaattggtcacgtccgtt

SEQ ID NO: 241896 - DNA, 25 bp, Probe sequence
cgtccgttatgctacttcaggtaat

SEQ ID NO: 241897 - DNA, 25 bp, Probe sequence
gcgtatagcatcaccggaatttatg

SEQ ID NO: 241898 - DNA, 25 bp, Probe sequence
gcagcgcaactaacatatatgggac

SEQ ID NO: 241899 - DNA, 25 bp, Probe sequence
gaatgtggcgtgtttggtatttgga

SEQ ID NO: 241900 - DNA, 25 bp, Probe sequence
gacaactgcaatttctgcgatggaa

SEQ ID NO: 241901 - DNA, 25 bp, Probe sequence
gacgcgccatatagtggcttatgtg

SEQ ID NO: 241902 - DNA, 25 bp, Probe sequence
gatgcgttatatggcgcagtagatc

SEQ ID NO: 241903 - DNA, 25 bp, Probe sequence
gattaggcttactaactgaagcgat

SEQ ID NO: 241904 - DNA, 25 bp, Probe sequence
gtttcactggagattatcctgcagg

SEQ ID NO: 241905 - DNA, 25 bp, Probe sequence
gtgcatgtgcgtatagcatcaccgg

SEQ ID NO: 241906 - DNA, 25 bp, Probe sequence
gtgtttggtatttggaatcatcctg

SEQ ID NO: 241907 - DNA, 25 bp, Probe sequence
gggacttcatagtttgcaacatcgt

SEQ ID NO: 241908 - DNA, 25 bp, Probe sequence
ggtgcaggtatagttgtttctgatc

SEQ ID NO: 241909 - DNA, 25 bp, Probe sequence
ggtttagattatgacgcgccatata

SEQ ID NO: 241910 - DNA, 25 bp, Probe sequence
ggaatcgatgtttcaactacggcag

SEQ ID NO: 241911 - DNA, 25 bp, Probe sequence
ggaatcatcctgaagcagcgcaact

SEQ ID NO: 241912 - DNA, 25 bp, Probe sequence
ggcttatgtgtagaaagtttcactg

SEQ ID NO: 241913 - DNA, 25 bp, Probe sequence
ggcgcagtagatccaaatgctatca

SEQ ID NO: 241914 - DNA, 25 bp, Probe sequence
tacacatcatacgacaactgcaatt

SEQ ID NO: 241915 - DNA, 25 bp, Probe sequence
tacagttaaatcttatacacatcat

SEQ ID NO: 241916 - DNA, 25 bp, Probe sequence
tatcctgcagggttatatgattatg

SEQ ID NO: 241917 - DNA, 25 bp, Probe sequence
ttaaagattatattggcgctgattc

SEQ ID NO: 241918 - DNA, 25 bp, Probe sequence
ttcttgttgatgattccattgttcg

SEQ ID NO: 241919 - DNA, 25 bp, Probe sequence
ttgcaagaacatttattcaaccaac

SEQ ID NO: 241920 - DNA, 25 bp, Probe sequence
attgccagccggatatgctgctaga

SEQ ID NO: 241921 - DNA, 25 bp, Probe sequence
atgagtcaactgcaattgaattgtt

SEQ ID NO: 241922 - DNA, 25 bp, Probe sequence
agtttagtgcgcaaattaattaatg

SEQ ID NO: 241923 - DNA, 25 bp, Probe sequence
acgtgcattgccagccggatatgct

SEQ ID NO: 241924 - DNA, 25 bp, Probe sequence
aattaaaactagctatcgactatgg

SEQ ID NO: 241925 - DNA, 25 bp, Probe sequence
caaacttcgataatcgtccatttat

SEQ ID NO: 241926 - DNA, 25 bp, Probe sequence
cacttatcggtggagagactgctga

SEQ ID NO: 241927 - DNA, 25 bp, Probe sequence
cagttttagtttctggaacagacgg

SEQ ID NO: 241928 - DNA, 25 bp, Probe sequence
cttgcgtcaagtggcattcattcaa

SEQ ID NO: 241929 - DNA, 25 bp, Probe sequence
gccggatatgctgctagaattgata

SEQ ID NO: 241930 - DNA, 25 bp, Probe sequence
gaattgatactacatcatttccaac

SEQ ID NO: 241931 - DNA, 25 bp, Probe sequence
gaatcatattactggtggaggtttt

SEQ ID NO: 241932 - DNA, 25 bp, Probe sequence
gaatcaggcattgatttggcatcaa

SEQ ID NO: 241933 - DNA, 25 bp, Probe sequence
gaatgtctagtcatgttaaacgtac

SEQ ID NO: 241934 - DNA, 25 bp, Probe sequence
gaagtgaaagagggacaagttgtta

SEQ ID NO: 241935 - DNA, 25 bp, Probe sequence
gaaaatattccacgtgcattgccag

SEQ ID NO: 241936 - DNA, 25 bp, Probe sequence
gaaacgaatactgcacttatcggtg

SEQ ID NO: 241937 - DNA, 25 bp, Probe sequence
gatgtctttttagaaccaactaaat

SEQ ID NO: 241938 - DNA, 25 bp, Probe sequence
gagactgctgaaatgggtgaaatgt

SEQ ID NO: 241939 - DNA, 25 bp, Probe sequence
gatattttaacgacaggtgcagaac

SEQ ID NO: 241940 - DNA, 25 bp, Probe sequence
gtttctattaaggcaatgaatcata

SEQ ID NO: 241941 - DNA, 25 bp, Probe sequence
gtcatgttaaacgtacgatgcgtaa

SEQ ID NO: 241942 - DNA, 25 bp, Probe sequence
gtctaaagcatatgaacaatctggt

SEQ ID NO: 241943 - DNA, 25 bp, Probe sequence
ggaacagacggagtaggtacgaaat

SEQ ID NO: 241944 - DNA, 25 bp, Probe sequence
gggtattggctatacggttatcgtt

SEQ ID NO: 241945 - DNA, 25 bp, Probe sequence
ggtggtttaggtggattcggtgcta

SEQ ID NO: 241946 - DNA, 25 bp, Probe sequence
ggtgctacatttgatttatcacaat

SEQ ID NO: 241947 - DNA, 25 bp, Probe sequence
ggctatacggttatcgttgatgaaa

SEQ ID NO: 241948 - DNA, 25 bp, Probe sequence
tggcatcaaacttcgataatcgtcc

SEQ ID NO: 241949 - DNA, 25 bp, Probe sequence
tgcgtaaagaagttatcggtggttt

SEQ ID NO: 241950 - DNA, 25 bp, Probe sequence
tctggtgtaaatattcatgctggtt

SEQ ID NO: 241951 - DNA, 25 bp, Probe sequence
tcatgctggttatgaagctgtagaa

SEQ ID NO: 241952 - DNA, 25 bp, Probe sequence
taggtggattcggtgctacatttga

SEQ ID NO: 241953 - DNA, 25 bp, Probe sequence
ttgattggttacaacaacaaggcaa

SEQ ID NO: 241954 - DNA, 25 bp, Probe sequence
attgccgaaatataaggggattgac

SEQ ID NO: 241955 - DNA, 25 bp, Probe sequence
atacggatcatcaaaatgcgttttg

SEQ ID NO: 241956 - DNA, 25 bp, Probe sequence
atccaagtgttattgctaaaattgt

SEQ ID NO: 241957 - DNA, 25 bp, Probe sequence
agctggctacatgcgtctaattggt

SEQ ID NO: 241958 - DNA, 25 bp, Probe sequence
agcacgatattcctgtttatattaa

SEQ ID NO: 241959 - DNA, 25 bp, Probe sequence
acggcgctatatacggatcatcaaa

SEQ ID NO: 241960 - DNA, 25 bp, Probe sequence
aaaaagcacgatattcctgtttata

SEQ ID NO: 241961 - DNA, 25 bp, Probe sequence
aaaatatagttgagcatgttgaatc

SEQ ID NO: 241962 - DNA, 25 bp, Probe sequence
aaaatgcgttttgtatagatagagc

SEQ ID NO: 241963 - DNA, 25 bp, Probe sequence
aagcagcgtatgaacaacatttagt

SEQ ID NO: 241964 - DNA, 25 bp, Probe sequence
aatgtgatattagaccggacgattc

SEQ ID NO: 241965 - DNA, 25 bp, Probe sequence
aattgcgatttttgcatcaggttca

SEQ ID NO: 241966 - DNA, 25 bp, Probe sequence
ctggttcgacagtacattatgttga

SEQ ID NO: 241967 - DNA, 25 bp, Probe sequence
ccaagcatatcatagtggcgatact

SEQ ID NO: 241968 - DNA, 25 bp, Probe sequence
gctacatgcgtctaattggtccaga

SEQ ID NO: 241969 - DNA, 25 bp, Probe sequence
gcatcaggttcaggaagtaactttg

SEQ ID NO: 241970 - DNA, 25 bp, Probe sequence
gcaataggccaagcatatcatagtg

SEQ ID NO: 241971 - DNA, 25 bp, Probe sequence
gaagttacggcgctatatacggatc

SEQ ID NO: 241972 - DNA, 25 bp, Probe sequence
gaaaatattgaagttacggcgctat

SEQ ID NO: 241973 - DNA, 25 bp, Probe sequence
gacgcaataggccaagcatatcata

SEQ ID NO: 241974 - DNA, 25 bp, Probe sequence
gaccggacgattcaaaagaacaatt

SEQ ID NO: 241975 - DNA, 25 bp, Probe sequence
gagcatgttgaatcaggaaaacttg

SEQ ID NO: 241976 - DNA, 25 bp, Probe sequence
gagcaaaaaagcacgatattcctgt

SEQ ID NO: 241977 - DNA, 25 bp, Probe sequence
gagttatatccaagtgttattgcta

SEQ ID NO: 241978 - DNA, 25 bp, Probe sequence
gatattagaccggacgattcaaaag

SEQ ID NO: 241979 - DNA, 25 bp, Probe sequence
gatttttgcatcaggttcaggaagt

SEQ ID NO: 241980 - DNA, 25 bp, Probe sequence
gttacggcgctatatacggatcatc

SEQ ID NO: 241981 - DNA, 25 bp, Probe sequence
gtggcgatactattactggttcgac

SEQ ID NO: 241982 - DNA, 25 bp, Probe sequence
ggggattgacgcaataggccaagca

SEQ ID NO: 241983 - DNA, 25 bp, Probe sequence
ggatacgggagaaattattgaacag

SEQ ID NO: 241984 - DNA, 25 bp, Probe sequence
ggcgatactattactggttcgacag

SEQ ID NO: 241985 - DNA, 25 bp, Probe sequence
ggctacatgcgtctaattggtccag

SEQ ID NO: 241986 - DNA, 25 bp, Probe sequence
ggcgctatatacggatcatcaaaat

SEQ ID NO: 241987 - DNA, 25 bp, Probe sequence
ttcctgtttatattaatgaaccaaa

SEQ ID NO: 241988 - DNA, 25 bp, Probe sequence
atttatatccattccaacaaactgt

SEQ ID NO: 241989 - DNA, 25 bp, Probe sequence
atcaatgatcatgtagcgttagtat

SEQ ID NO: 241990 - DNA, 25 bp, Probe sequence
atgcgtatgaagcggatagtcaatc

SEQ ID NO: 241991 - DNA, 25 bp, Probe sequence
atggccgtgttaaaacattacatcc

SEQ ID NO: 241992 - DNA, 25 bp, Probe sequence
accagttcgttctgtttcagactta

SEQ ID NO: 241993 - DNA, 25 bp, Probe sequence
acacctgagttagcagagcaattgc

SEQ ID NO: 241994 - DNA, 25 bp, Probe sequence
aaatgaatcgtgtcggtgctgctaa

SEQ ID NO: 241995 - DNA, 25 bp, Probe sequence
aacgattcgttagatgagtcatata

SEQ ID NO: 241996 - DNA, 25 bp, Probe sequence
aaccctgatgtgacgatggacgaag

SEQ ID NO: 241997 - DNA, 25 bp, Probe sequence
caaactgtaggtataggtgctggac

SEQ ID NO: 241998 - DNA, 25 bp, Probe sequence
cacaggcactcgacattttaaacac

SEQ ID NO: 241999 - DNA, 25 bp, Probe sequence
cagcgtattttgtgagaacttcgaa

SEQ ID NO: 242000 - DNA, 25 bp, Probe sequence
ctgatcgaaataaaccgcagcattt

SEQ ID NO: 242001 - DNA, 25 bp, Probe sequence
gcagcacaacatggtataaaggcaa

SEQ ID NO: 242002 - DNA, 25 bp, Probe sequence
gcaatggtagtcacaggcactcgac

SEQ ID NO: 242003 - DNA, 25 bp, Probe sequence
gaatccatgtggtgttggtatcggt

SEQ ID NO: 242004 - DNA, 25 bp, Probe sequence
gaagcaaatgtaccagttcgttctg

SEQ ID NO: 242005 - DNA, 25 bp, Probe sequence
gaagagtttgtttcagtatctggcg

SEQ ID NO: 242006 - DNA, 25 bp, Probe sequence
gaaaatccacaacaatcagcgtatt

SEQ ID NO: 242007 - DNA, 25 bp, Probe sequence
gacaattatgtcgtgccaaaagaag

SEQ ID NO: 242008 - DNA, 25 bp, Probe sequence
gagcaattgcatagtatctttttgg

SEQ ID NO: 242009 - DNA, 25 bp, Probe sequence
gagatacagttgaacttgcagcaca

SEQ ID NO: 242010 - DNA, 25 bp, Probe sequence
gatgaagcgattgtacgtttcttta

SEQ ID NO: 242011 - DNA, 25 bp, Probe sequence
gatgcagatgctacactagctttag

SEQ ID NO: 242012 - DNA, 25 bp, Probe sequence
gttacgtgctgcagctaaaaactat

SEQ ID NO: 242013 - DNA, 25 bp, Probe sequence
gtatctgatggatttttccctatgg

SEQ ID NO: 242014 - DNA, 25 bp, Probe sequence
gtagagtttgctaaagcgttaacgc

SEQ ID NO: 242015 - DNA, 25 bp, Probe sequence
ggcaattatccaaccgggtggttcg

SEQ ID NO: 242016 - DNA, 25 bp, Probe sequence
gtccaacaatgttacgtgctgcagc

SEQ ID NO: 242017 - DNA, 25 bp, Probe sequence
gtggaattgttgcattaaaccgagc

SEQ ID NO: 242018 - DNA, 25 bp, Probe sequence
ggaagtcattattgcaccaaaattt

SEQ ID NO: 242019 - DNA, 25 bp, Probe sequence
tcagacttaacacattttccagaaa

SEQ ID NO: 242020 - DNA, 25 bp, Probe sequence
taaaccgagctgtaacacctgagtt

SEQ ID NO: 242021 - DNA, 25 bp, Probe sequence
tatctggcggatatttagttcaaga

SEQ ID NO: 242022 - DNA, 25 bp, Probe sequence
attgttgtaatgttgacgatgctga

SEQ ID NO: 242023 - DNA, 25 bp, Probe sequence
attccaattaagcgaccttgatgcc

SEQ ID NO: 242024 - DNA, 25 bp, Probe sequence
atagctggtttgaacaagtcccctt

SEQ ID NO: 242025 - DNA, 25 bp, Probe sequence
ataattacatattcaaggtccttgc

SEQ ID NO: 242026 - DNA, 25 bp, Probe sequence
atgaatgaccctaactatttcgcga

SEQ ID NO: 242027 - DNA, 25 bp, Probe sequence
atgcatttgtagtcatttatttcta

SEQ ID NO: 242028 - DNA, 25 bp, Probe sequence
aggaattatcgtctttattgttcaa

SEQ ID NO: 242029 - DNA, 25 bp, Probe sequence
agtgatcgttacctcttatattata

SEQ ID NO: 242030 - DNA, 25 bp, Probe sequence
acattgttacttatcggtttagcgg

SEQ ID NO: 242031 - DNA, 25 bp, Probe sequence
aagcagtgtgactataggtctattt

SEQ ID NO: 242032 - DNA, 25 bp, Probe sequence
aaggaagttcttgcatctacagtta

SEQ ID NO: 242033 - DNA, 25 bp, Probe sequence
aataactcaagatatgtcgctttta

SEQ ID NO: 242034 - DNA, 25 bp, Probe sequence
caatcttcggttattgccggtgtga

SEQ ID NO: 242035 - DNA, 25 bp, Probe sequence
cagtttttcattattttgtatacat

SEQ ID NO: 242036 - DNA, 25 bp, Probe sequence
ctgagcgaagtgttgtatggataaa

SEQ ID NO: 242037 - DNA, 25 bp, Probe sequence
gccggtgtgaatgtttctatagctg

SEQ ID NO: 242038 - DNA, 25 bp, Probe sequence
gcggtttttattcagcaatcttcgg

SEQ ID NO: 242039 - DNA, 25 bp, Probe sequence
gcaaatcattttttacagtttttca

SEQ ID NO: 242040 - DNA, 25 bp, Probe sequence
taactacaacggggtctaagactgc

SEQ ID NO: 242041 - DNA, 25 bp, Probe sequence
gaccctaactatttcgcgatgacac

SEQ ID NO: 242042 - DNA, 25 bp, Probe sequence
gatatgtcgcttttattttaggaat

SEQ ID NO: 242043 - DNA, 25 bp, Probe sequence
gattattacattggtacttgcttac

SEQ ID NO: 242044 - DNA, 25 bp, Probe sequence
gattatgtacatattggctcgcaaa

SEQ ID NO: 242045 - DNA, 25 bp, Probe sequence
gtttatcatattaatcgtcttagcc

SEQ ID NO: 242046 - DNA, 25 bp, Probe sequence
ggggtctaagactgcgtttatcata

SEQ ID NO: 242047 - DNA, 25 bp, Probe sequence
gggatgatcatctttaagttaggta

SEQ ID NO: 242048 - DNA, 25 bp, Probe sequence
tggtattttacttgttgcccataat

SEQ ID NO: 242049 - DNA, 25 bp, Probe sequence
tgaacaagtcccctttactaatgaa

SEQ ID NO: 242050 - DNA, 25 bp, Probe sequence
tgacgatgctgatttactttttaac

SEQ ID NO: 242051 - DNA, 25 bp, Probe sequence
tcgtcttagccatttatttctttat

SEQ ID NO: 242052 - DNA, 25 bp, Probe sequence
tcaaggtccttgcatgtggtatttt

SEQ ID NO: 242053 - DNA, 25 bp, Probe sequence
tatagctgactttatcacattacta

SEQ ID NO: 242054 - DNA, 25 bp, Probe sequence
tttcgcgatgacacagattattaca

SEQ ID NO: 242055 - DNA, 25 bp, Probe sequence
ttgttgcccataatacatatttgca

SEQ ID NO: 242056 - DNA, 25 bp, Probe sequence
attctatcgtcatgacattgcgaat

SEQ ID NO: 242057 - DNA, 25 bp, Probe sequence
atactggtggtatgggggcttattg

SEQ ID NO: 242058 - DNA, 25 bp, Probe sequence
atgcacttgcatataaacttaatca

SEQ ID NO: 242059 - DNA, 25 bp, Probe sequence
atgaaacaattgcacaacccattgc

SEQ ID NO: 242060 - DNA, 25 bp, Probe sequence
agaaagatgggttagctgctgggaa

SEQ ID NO: 242061 - DNA, 25 bp, Probe sequence
acttgccatcggaaaaggtgacaat

SEQ ID NO: 242062 - DNA, 25 bp, Probe sequence
acaaagtgaccatttattctatcgt

SEQ ID NO: 242063 - DNA, 25 bp, Probe sequence
aaatataatattccaactgctgatt

SEQ ID NO: 242064 - DNA, 25 bp, Probe sequence
aacgcgcatttgatcatgatgaagg

SEQ ID NO: 242065 - DNA, 25 bp, Probe sequence
aaggtgatacctttgttacttcagg

SEQ ID NO: 242066 - DNA, 25 bp, Probe sequence
cctttcgactgtattgcacaagatc

SEQ ID NO: 242067 - DNA, 25 bp, Probe sequence
gcccgttttggtgatcctgaagctc

SEQ ID NO: 242068 - DNA, 25 bp, Probe sequence
gcacaagatcataaacgcgcatttg

SEQ ID NO: 242069 - DNA, 25 bp, Probe sequence
gcaagcagctcaaatcgaaggctca

SEQ ID NO: 242070 - DNA, 25 bp, Probe sequence
gaatggtttcaaagtgtttggtcca

SEQ ID NO: 242071 - DNA, 25 bp, Probe sequence
gaagagttctcgctaatgacatttg

SEQ ID NO: 242072 - DNA, 25 bp, Probe sequence
gaagcagccagaagtgctattgaga

SEQ ID NO: 242073 - DNA, 25 bp, Probe sequence
gaagctcaagtattattaagtcgca

SEQ ID NO: 242074 - DNA, 25 bp, Probe sequence
gacacctatagctgaagtacacact

SEQ ID NO: 242075 - DNA, 25 bp, Probe sequence
gattgggtagttataggtccagaac

SEQ ID NO: 242076 - DNA, 25 bp, Probe sequence
gtttggtccaaataagcaagcagct

SEQ ID NO: 242077 - DNA, 25 bp, Probe sequence
gtaatagaatttaatgcccgttttg

SEQ ID NO: 242078 - DNA, 25 bp, Probe sequence
gtaatgaggcaatgacacctatagc

SEQ ID NO: 242079 - DNA, 25 bp, Probe sequence
gtaattggtgctggtggacgagaac

SEQ ID NO: 242080 - DNA, 25 bp, Probe sequence
gtccagtaccacatattagtgacga

SEQ ID NO: 242081 - DNA, 25 bp, Probe sequence
gtggtagagttatacttgccatcgg

SEQ ID NO: 242082 - DNA, 25 bp, Probe sequence
gggttagctgctgggaaaggcgtta

SEQ ID NO: 242083 - DNA, 25 bp, Probe sequence
ggtggacgagaacatgcacttgcat

SEQ ID NO: 242084 - DNA, 25 bp, Probe sequence
ggttatcaattcttcggtgtattat

SEQ ID NO: 242085 - DNA, 25 bp, Probe sequence
ggattagcagacattttacgagcga

SEQ ID NO: 242086 - DNA, 25 bp, Probe sequence
ggaaaggcgttattattgcagatac

SEQ ID NO: 242087 - DNA, 25 bp, Probe sequence
ggaaagtgatttaatgcagcatatt

SEQ ID NO: 242088 - DNA, 25 bp, Probe sequence
tgggggcttattgtccagtaccaca

SEQ ID NO: 242089 - DNA, 25 bp, Probe sequence
tattgtaggggtcatgttggcatca

SEQ ID NO: 242090 - DNA, 25 bp, Probe sequence
agcaattaaggctggcatagagaat

SEQ ID NO: 242091 - DNA, 25 bp, Probe sequence
agcgaattgtgtaaagcccattatc

SEQ ID NO: 242092 - DNA, 25 bp, Probe sequence
acctattcctgtcattcaaaagtat

SEQ ID NO: 242093 - DNA, 25 bp, Probe sequence
aaatgtatgacgcgctcaaagctcg

SEQ ID NO: 242094 - DNA, 25 bp, Probe sequence
aaagtctgtcaaatgaagatgtatt

SEQ ID NO: 242095 - DNA, 25 bp, Probe sequence
aaagctcgatctgatagggattatt

SEQ ID NO: 242096 - DNA, 25 bp, Probe sequence
aacattatctaatgagttacttcat

SEQ ID NO: 242097 - DNA, 25 bp, Probe sequence
aacgactgatagaaaaggggacact

SEQ ID NO: 242098 - DNA, 25 bp, Probe sequence
aagcccattatcactcattgattaa

SEQ ID NO: 242099 - DNA, 25 bp, Probe sequence
aagcctatcgtattattcatcaagc

SEQ ID NO: 242100 - DNA, 25 bp, Probe sequence
aagacatttgcgtatcatgcatatc

SEQ ID NO: 242101 - DNA, 25 bp, Probe sequence
aagggcatacctattcctgtcattc

SEQ ID NO: 242102 - DNA, 25 bp, Probe sequence
cattgattaaaattagattgccaga

SEQ ID NO: 242103 - DNA, 25 bp, Probe sequence
cgcgctcaaagctcgatctgatagg

SEQ ID NO: 242104 - DNA, 25 bp, Probe sequence
gcatacctattcctgtcattcaaaa

SEQ ID NO: 242105 - DNA, 25 bp, Probe sequence
gcaacaagcctatcgtattattcat

SEQ ID NO: 242106 - DNA, 25 bp, Probe sequence
gaagatgtattatttcaatcattga

SEQ ID NO: 242107 - DNA, 25 bp, Probe sequence
gaaaaggggacactaagcgaattgt

SEQ ID NO: 242108 - DNA, 25 bp, Probe sequence
gagttacttcattatattgaaaaca

SEQ ID NO: 242109 - DNA, 25 bp, Probe sequence
gatctgatagggattatttgttttt

SEQ ID NO: 242110 - DNA, 25 bp, Probe sequence
gattgccagaaacattatctaatga

SEQ ID NO: 242111 - DNA, 25 bp, Probe sequence
gttttttaaattagctatacatagt

SEQ ID NO: 242112 - DNA, 25 bp, Probe sequence
gtatgacgcgctcaaagctcgatct

SEQ ID NO: 242113 - DNA, 25 bp, Probe sequence
gggcatcaatcagctatagaaacat

SEQ ID NO: 242114 - DNA, 25 bp, Probe sequence
ggctggcatagagaatgtaggacta

SEQ ID NO: 242115 - DNA, 25 bp, Probe sequence
tgtaaagcccattatcactcattga

SEQ ID NO: 242116 - DNA, 25 bp, Probe sequence
tgacgcgctcaaagctcgatctgat

SEQ ID NO: 242117 - DNA, 25 bp, Probe sequence
tgcgtatcatgcatatcaaaagggc

SEQ ID NO: 242118 - DNA, 25 bp, Probe sequence
tcaaaagggcatacctattcctgtc

SEQ ID NO: 242119 - DNA, 25 bp, Probe sequence
tcaagtattatctaggcaacaagcc

SEQ ID NO: 242120 - DNA, 25 bp, Probe sequence
tactgttgaagatactaaacgactg

SEQ ID NO: 242121 - DNA, 25 bp, Probe sequence
tatcgtattattcatcaagcagcaa

SEQ ID NO: 242122 - DNA, 25 bp, Probe sequence
tttagggcatcaatcagctatagaa

SEQ ID NO: 242123 - DNA, 25 bp, Probe sequence
ttattcatcaagcagcaattaaggc

SEQ ID NO: 242124 - DNA, 25 bp, Probe sequence
attgcattgtatggcagaattgatg

SEQ ID NO: 242125 - DNA, 25 bp, Probe sequence
attatcgcatatatcgctacaacgt

SEQ ID NO: 242126 - DNA, 25 bp, Probe sequence
attttcattattccatttacaattc

SEQ ID NO: 242127 - DNA, 25 bp, Probe sequence
atgcattatttgtatctggtgattg

SEQ ID NO: 242128 - DNA, 25 bp, Probe sequence
atgactatgatatttctatcttttt

SEQ ID NO: 242129 - DNA, 25 bp, Probe sequence
acacgccgaaattatttttagctat

SEQ ID NO: 242130 - DNA, 25 bp, Probe sequence
aaagttgatacacatgttcataatg

SEQ ID NO: 242131 - DNA, 25 bp, Probe sequence
aagggaatgtcacgaatcaaactaa

SEQ ID NO: 242132 - DNA, 25 bp, Probe sequence
cactcttcactggtctcattatttt

SEQ ID NO: 242133 - DNA, 25 bp, Probe sequence
gccgagctttacctttaacaaagca

SEQ ID NO: 242134 - DNA, 25 bp, Probe sequence
gctacaacgttaactttccacttga

SEQ ID NO: 242135 - DNA, 25 bp, Probe sequence
gactacagaatatgcacgtaagaca

SEQ ID NO: 242136 - DNA, 25 bp, Probe sequence
gacgatattcctgattggatgagaa

SEQ ID NO: 242137 - DNA, 25 bp, Probe sequence
tgagtcgatttataggtaatttccc

SEQ ID NO: 242138 - DNA, 25 bp, Probe sequence
gaggagccagaattatcaagaacaa

SEQ ID NO: 242139 - DNA, 25 bp, Probe sequence
gatatcttaagtgtcaatgctttct

SEQ ID NO: 242140 - DNA, 25 bp, Probe sequence
gattggtcatacattacttagaact

SEQ ID NO: 242141 - DNA, 25 bp, Probe sequence
gttacaattacgagagcgaccataa

SEQ ID NO: 242142 - DNA, 25 bp, Probe sequence
gttatcggtatcatgtactttatta

SEQ ID NO: 242143 - DNA, 25 bp, Probe sequence
gttattggcaatcatcatttcttat

SEQ ID NO: 242144 - DNA, 25 bp, Probe sequence
gtatgtcgaactattttgtggtgtc

SEQ ID NO: 242145 - DNA, 25 bp, Probe sequence
gtaatttccctatagttagtgcaat

SEQ ID NO: 242146 - DNA, 25 bp, Probe sequence
gtcgtcatctttttattcacatttt

SEQ ID NO: 242147 - DNA, 25 bp, Probe sequence
gtgggaatttctgaatgcatttttc

SEQ ID NO: 242148 - DNA, 25 bp, Probe sequence
gtgtcaatgctttctttataattat

SEQ ID NO: 242149 - DNA, 25 bp, Probe sequence
gtggttacttggtcaaatggctatt

SEQ ID NO: 242150 - DNA, 25 bp, Probe sequence
ggtattttagttatgttgattggtc

SEQ ID NO: 242151 - DNA, 25 bp, Probe sequence
tgtcttttcttaggaaacacgccga

SEQ ID NO: 242152 - DNA, 25 bp, Probe sequence
tcatcatttcttattcgttacaatt

SEQ ID NO: 242153 - DNA, 25 bp, Probe sequence
tatggggagcattttattctttaaa

SEQ ID NO: 242154 - DNA, 25 bp, Probe sequence
tatctttttcttagttatcggtatc

SEQ ID NO: 242155 - DNA, 25 bp, Probe sequence
tttggaatttcttgttcttgcgccg

SEQ ID NO: 242156 - DNA, 25 bp, Probe sequence
ttaatcggtatcgtttcactcttca

SEQ ID NO: 242157 - DNA, 25 bp, Probe sequence
ttgtggtgtcgtcatctttttattc

SEQ ID NO: 242158 - DNA, 25 bp, Probe sequence
atttagttatacaggtgctttttct

SEQ ID NO: 242159 - DNA, 25 bp, Probe sequence
atatgccaaagaacgccatgtttta

SEQ ID NO: 242160 - DNA, 25 bp, Probe sequence
atagcaactctgaacaaaggcaaag

SEQ ID NO: 242161 - DNA, 25 bp, Probe sequence
atcgacaattacgatggtcatttgt

SEQ ID NO: 242162 - DNA, 25 bp, Probe sequence
atgtagaccttgaagatggtttgat

SEQ ID NO: 242163 - DNA, 25 bp, Probe sequence
atgtcatggacacttttgatttcta

SEQ ID NO: 242164 - DNA, 25 bp, Probe sequence
aatcgttctcgtagtttaactgaag

SEQ ID NO: 242165 - DNA, 25 bp, Probe sequence
aatatgccattcttgaagcggttag

SEQ ID NO: 242166 - DNA, 25 bp, Probe sequence
aattgtttaatactgcattagcaga

SEQ ID NO: 242167 - DNA, 25 bp, Probe sequence
cacctgagtttccaattgttatcga

SEQ ID NO: 242168 - DNA, 25 bp, Probe sequence
catccacattataagccatctaaat

SEQ ID NO: 242169 - DNA, 25 bp, Probe sequence
gcaacggcttatgttggtcgccaac

SEQ ID NO: 242170 - DNA, 25 bp, Probe sequence
gcaagtgtatatccattaaagcaat

SEQ ID NO: 242171 - DNA, 25 bp, Probe sequence
gacacgatcgtgattgatccaccta

SEQ ID NO: 242172 - DNA, 25 bp, Probe sequence
gacagcgaatatagtggtggttttg

SEQ ID NO: 242173 - DNA, 25 bp, Probe sequence
gacatagttatgacacgatcgtgat

SEQ ID NO: 242174 - DNA, 25 bp, Probe sequence
gagagtggcgttgattatgaattaa

SEQ ID NO: 242175 - DNA, 25 bp, Probe sequence
gaggatatctattcacaagatcatt

SEQ ID NO: 242176 - DNA, 25 bp, Probe sequence
gaggcatcttcaacaacaagtgtag

SEQ ID NO: 242177 - DNA, 25 bp, Probe sequence
gatggaacaaatgcttttagattat

SEQ ID NO: 242178 - DNA, 25 bp, Probe sequence
gatggtttgatgacaggtatctttt

SEQ ID NO: 242179 - DNA, 25 bp, Probe sequence
gatgcacctgagtttccaattgtta

SEQ ID NO: 242180 - DNA, 25 bp, Probe sequence
gattaaatgctattgatcctaaatc

SEQ ID NO: 242181 - DNA, 25 bp, Probe sequence
gtcatttgttgattcaatggtactc

SEQ ID NO: 242182 - DNA, 25 bp, Probe sequence
gtgtagatttggctaatcgttctcg

SEQ ID NO: 242183 - DNA, 25 bp, Probe sequence
gggttctaacatacgataaagctca

SEQ ID NO: 242184 - DNA, 25 bp, Probe sequence
ggattaggttgggttctaacatacg

SEQ ID NO: 242185 - DNA, 25 bp, Probe sequence
ggagatatttttcaaattgtgactg

SEQ ID NO: 242186 - DNA, 25 bp, Probe sequence
tggtcgccaacataaaggattaggt

SEQ ID NO: 242187 - DNA, 25 bp, Probe sequence
tcgtgattgatccacctagctttgc

SEQ ID NO: 242188 - DNA, 25 bp, Probe sequence
tagcagcaagtgaggcatcttcaac

SEQ ID NO: 242189 - DNA, 25 bp, Probe sequence
ttagcagaacgtgattattatttta

SEQ ID NO: 242190 - DNA, 25 bp, Probe sequence
ttggctaatcgttctcgtagtttaa

SEQ ID NO: 242191 - DNA, 25 bp, Probe sequence
ttgatttctataaatatgctgcacg

SEQ ID NO: 242192 - DNA, 25 bp, Probe sequence
attcaaggtagtcaatttattggta

SEQ ID NO: 242193 - DNA, 25 bp, Probe sequence
atagccttggggatgatgtgaaaga

SEQ ID NO: 242194 - DNA, 25 bp, Probe sequence
aggacaagctgtgtctgcatctatt

SEQ ID NO: 242195 - DNA, 25 bp, Probe sequence
agctgtgtctgcatctattagttac

SEQ ID NO: 242196 - DNA, 25 bp, Probe sequence
acaagctgtgtctgcatctattagt

SEQ ID NO: 242197 - DNA, 25 bp, Probe sequence
aagctgtgtctgcatctattagtta

SEQ ID NO: 242198 - DNA, 25 bp, Probe sequence
aaggtgcaatgccaacgacgattca

SEQ ID NO: 242199 - DNA, 25 bp, Probe sequence
aatggtttcctgttgtaggacaagc

SEQ ID NO: 242200 - DNA, 25 bp, Probe sequence
aatgccaacgacgattcaagaattg

SEQ ID NO: 242201 - DNA, 25 bp, Probe sequence
caagctgtgtctgcatctattagtt

SEQ ID NO: 242202 - DNA, 25 bp, Probe sequence
caacaatgagcgttgttccaattcc

SEQ ID NO: 242203 - DNA, 25 bp, Probe sequence
caaacaaaatggtttcctgttgtag

SEQ ID NO: 242204 - DNA, 25 bp, Probe sequence
gccaacgacgattcaagaattgaga

SEQ ID NO: 242205 - DNA, 25 bp, Probe sequence
gctgtgtctgcatctattagttact

SEQ ID NO: 242206 - DNA, 25 bp, Probe sequence
gcatctattagttactattttatga

SEQ ID NO: 242207 - DNA, 25 bp, Probe sequence
gcaatgccaacgacgattcaagaat

SEQ ID NO: 242208 - DNA, 25 bp, Probe sequence
gcaattcaaggtagtcaatttattg

SEQ ID NO: 242209 - DNA, 25 bp, Probe sequence
gaaaaggtgcaatgccaacgacgat

SEQ ID NO: 242210 - DNA, 25 bp, Probe sequence
gaaaagatcacattcaaaaatgcga

SEQ ID NO: 242211 - DNA, 25 bp, Probe sequence
gacaagctgtgtctgcatctattag

SEQ ID NO: 242212 - DNA, 25 bp, Probe sequence
gtaggacaagctgtgtctgcatcta

SEQ ID NO: 242213 - DNA, 25 bp, Probe sequence
gttgtaggacaagctgtgtctgcat

SEQ ID NO: 242214 - DNA, 25 bp, Probe sequence
gttaatagccttggggatgatgtga

SEQ ID NO: 242215 - DNA, 25 bp, Probe sequence
gtcatcaacaatgagcgttgttcca

SEQ ID NO: 242216 - DNA, 25 bp, Probe sequence
gtctgcatctattagttactatttt

SEQ ID NO: 242217 - DNA, 25 bp, Probe sequence
gtgcaatgccaacgacgattcaaga

SEQ ID NO: 242218 - DNA, 25 bp, Probe sequence
gtgtctgcatctattagttactatt

SEQ ID NO: 242219 - DNA, 25 bp, Probe sequence
ggtttcctgttgtaggacaagctgt

SEQ ID NO: 242220 - DNA, 25 bp, Probe sequence
tgttgacggaaaaggtgcaatgcca

SEQ ID NO: 242221 - DNA, 25 bp, Probe sequence
tgacggaaaaggtgcaatgccaacg

SEQ ID NO: 242222 - DNA, 25 bp, Probe sequence
tgaaagaaagaattatgtctgcagc

SEQ ID NO: 242223 - DNA, 25 bp, Probe sequence
tctttaatgtcatcaacaatgagcg

SEQ ID NO: 242224 - DNA, 25 bp, Probe sequence
tagatcataagcaagttaatagcct

SEQ ID NO: 242225 - DNA, 25 bp, Probe sequence
ttcctgttgtaggacaagctgtgtc

SEQ ID NO: 242226 - DNA, 25 bp, Probe sequence
atgcattttcacttactgttatggc

SEQ ID NO: 242227 - DNA, 25 bp, Probe sequence
atgtcatgttttcttcatctattat

SEQ ID NO: 242228 - DNA, 25 bp, Probe sequence
agtactttgttttgctgctatcagt

SEQ ID NO: 242229 - DNA, 25 bp, Probe sequence
agtatacgtcacctcatgatgttac

SEQ ID NO: 242230 - DNA, 25 bp, Probe sequence
agttactttctattttttatcattg

SEQ ID NO: 242231 - DNA, 25 bp, Probe sequence
gacttaggtggaccgacgtttgtgt

SEQ ID NO: 242232 - DNA, 25 bp, Probe sequence
actatgatgcaattggcgtccttat

SEQ ID NO: 242233 - DNA, 25 bp, Probe sequence
aacagctatattgggcattacgatt

SEQ ID NO: 242234 - DNA, 25 bp, Probe sequence
aacataactgagacatatcccatta

SEQ ID NO: 242235 - DNA, 25 bp, Probe sequence
aactgcagctcaaaatcttatctta

SEQ ID NO: 242236 - DNA, 25 bp, Probe sequence
aagcgtacaatcagacattcaattt

SEQ ID NO: 242237 - DNA, 25 bp, Probe sequence
ctgatttatttgtagcggaaggcgc

SEQ ID NO: 242238 - DNA, 25 bp, Probe sequence
gccaatgtactatttcttaaacgtc

SEQ ID NO: 242239 - DNA, 25 bp, Probe sequence
gcgtccttatgtttatattgtttgc

SEQ ID NO: 242240 - DNA, 25 bp, Probe sequence
gactgatgttgacttaggtggaccg

SEQ ID NO: 242241 - DNA, 25 bp, Probe sequence
gttgcctttttgctatatgccaatg

SEQ ID NO: 242242 - DNA, 25 bp, Probe sequence
gtttgcgacagtaattggggcgtat

SEQ ID NO: 242243 - DNA, 25 bp, Probe sequence
gtatgccatttttgcaatgacagct

SEQ ID NO: 242244 - DNA, 25 bp, Probe sequence
gtagttctgaacttgcattatatca

SEQ ID NO: 242245 - DNA, 25 bp, Probe sequence
gtcattgcactttcacatgcatact

SEQ ID NO: 242246 - DNA, 25 bp, Probe sequence
gtgaagccataagttcgatatcgag

SEQ ID NO: 242247 - DNA, 25 bp, Probe sequence
gtgggtattactactctttacgcat

SEQ ID NO: 242248 - DNA, 25 bp, Probe sequence
ggatttgaaacgtggtcaggctgat

SEQ ID NO: 242249 - DNA, 25 bp, Probe sequence
ggttccaattattttcagctttaga

SEQ ID NO: 242250 - DNA, 25 bp, Probe sequence
tgaacaaccgaaaaattcctcattt

SEQ ID NO: 242251 - DNA, 25 bp, Probe sequence
tactctttacgcattgtacattact

SEQ ID NO: 242252 - DNA, 25 bp, Probe sequence
tagtttcctaattgccgtatgttgt

SEQ ID NO: 242253 - DNA, 25 bp, Probe sequence
ttgggttaccattagtcattgcact

SEQ ID NO: 242254 - DNA, 25 bp, Probe sequence
tatgccatttatcttttttcgctaa

SEQ ID NO: 242255 - DNA, 25 bp, Probe sequence
tttattttttagcttcgtagcacta

SEQ ID NO: 242256 - DNA, 25 bp, Probe sequence
tttttatcattgttgcctttttgct

SEQ ID NO: 242257 - DNA, 25 bp, Probe sequence
ttatttcagctattactttatcagt

SEQ ID NO: 242258 - DNA, 25 bp, Probe sequence
ttacgattggtatctttggttctaa

SEQ ID NO: 242259 - DNA, 25 bp, Probe sequence
ttggcgttgcttatttcctaactgc

SEQ ID NO: 242260 - DNA, 25 bp, Probe sequence
attcatatgtaatcatcgacgagac

SEQ ID NO: 242261 - DNA, 25 bp, Probe sequence
atctgacgccattcaagcaatcagt

SEQ ID NO: 242262 - DNA, 25 bp, Probe sequence
acgctagaccagcaacaatgttagt

SEQ ID NO: 242263 - DNA, 25 bp, Probe sequence
acaatttatgctgacggtagtgatg

SEQ ID NO: 242264 - DNA, 25 bp, Probe sequence
aacttaaaatcaatcatgggtgtta

SEQ ID NO: 242265 - DNA, 25 bp, Probe sequence
aatcatgggtgttatgagccttggt

SEQ ID NO: 242266 - DNA, 25 bp, Probe sequence
aatcatcgacgagactggtattcac

SEQ ID NO: 242267 - DNA, 25 bp, Probe sequence
caaacagcttcaaaattcgattctg

SEQ ID NO: 242268 - DNA, 25 bp, Probe sequence
cagcttcaaaattcgattctgatat

SEQ ID NO: 242269 - DNA, 25 bp, Probe sequence
catcgacgagactggtattcacgct

SEQ ID NO: 242270 - DNA, 25 bp, Probe sequence
catgggtgttatgagccttggtgtt

SEQ ID NO: 242271 - DNA, 25 bp, Probe sequence
ctgacgccattcaagcaatcagtga

SEQ ID NO: 242272 - DNA, 25 bp, Probe sequence
cgagactggtattcacgctagacca

SEQ ID NO: 242273 - DNA, 25 bp, Probe sequence
gccttggtgttggtaaagatgctga

SEQ ID NO: 242274 - DNA, 25 bp, Probe sequence
gaatctgacgccattcaagcaatca

SEQ ID NO: 242275 - DNA, 25 bp, Probe sequence
gaaattacaatttatgctgacggta

SEQ ID NO: 242276 - DNA, 25 bp, Probe sequence
gactggtattcacgctagaccagca

SEQ ID NO: 242277 - DNA, 25 bp, Probe sequence
gacggtagtgatgaatctgacgcca

SEQ ID NO: 242278 - DNA, 25 bp, Probe sequence
gacgagactggtattcacgctagac

SEQ ID NO: 242279 - DNA, 25 bp, Probe sequence
gagccttggtgttggtaaagatgct

SEQ ID NO: 242280 - DNA, 25 bp, Probe sequence
gatgaatctgacgccattcaagcaa

SEQ ID NO: 242281 - DNA, 25 bp, Probe sequence
gttatgagccttggtgttggtaaag

SEQ ID NO: 242282 - DNA, 25 bp, Probe sequence
gtgatgaatctgacgccattcaagc

SEQ ID NO: 242283 - DNA, 25 bp, Probe sequence
gtgttatgagccttggtgttggtaa

SEQ ID NO: 242284 - DNA, 25 bp, Probe sequence
gggtgttatgagccttggtgttggt

SEQ ID NO: 242285 - DNA, 25 bp, Probe sequence
ggtgttggtaaagatgctgaaatta

SEQ ID NO: 242286 - DNA, 25 bp, Probe sequence
ggtagtgatgaatctgacgccattc

SEQ ID NO: 242287 - DNA, 25 bp, Probe sequence
ggtattcacgctagaccagcaacaa

SEQ ID NO: 242288 - DNA, 25 bp, Probe sequence
tcgacgagactggtattcacgctag

SEQ ID NO: 242289 - DNA, 25 bp, Probe sequence
ggaacaaaattcatatgtaatcatc

SEQ ID NO: 242290 - DNA, 25 bp, Probe sequence
tgctgacggtagtgatgaatctgac

SEQ ID NO: 242291 - DNA, 25 bp, Probe sequence
tattcacgctagaccagcaacaatg

SEQ ID NO: 242292 - DNA, 25 bp, Probe sequence
ttatgctgacggtagtgatgaatct

SEQ ID NO: 242293 - DNA, 25 bp, Probe sequence
ttcacgctagaccagcaacaatgtt

SEQ ID NO: 242294 - DNA, 25 bp, Probe sequence
atatcatgttcccaatggttgcaac

SEQ ID NO: 242295 - DNA, 25 bp, Probe sequence
atgagttctctatgagtgcaacgtc

SEQ ID NO: 242296 - DNA, 25 bp, Probe sequence
agctacgtgcattattacgtgcatc

SEQ ID NO: 242297 - DNA, 25 bp, Probe sequence
actacgtgatgctgatactgttaca

SEQ ID NO: 242298 - DNA, 25 bp, Probe sequence
acagctattccattattgcttggtt

SEQ ID NO: 242299 - DNA, 25 bp, Probe sequence
acacattagctgctgaccgtatgtc

SEQ ID NO: 242300 - DNA, 25 bp, Probe sequence
aaatgactgaacttgctaaccgtgc

SEQ ID NO: 242301 - DNA, 25 bp, Probe sequence
aacttgctaaccgtgcagtcgactg

SEQ ID NO: 242302 - DNA, 25 bp, Probe sequence
aagctgctatctttgatgcacattt

SEQ ID NO: 242303 - DNA, 25 bp, Probe sequence
aatggtgcacaaggtatcggcttat

SEQ ID NO: 242304 - DNA, 25 bp, Probe sequence
ttggcggaagaacaagtcactctgc

SEQ ID NO: 242305 - DNA, 25 bp, Probe sequence
gcgtgtatcatatctataccaacca

SEQ ID NO: 242306 - DNA, 25 bp, Probe sequence
gctgatattcgcgacgtttctaaac

SEQ ID NO: 242307 - DNA, 25 bp, Probe sequence
gcttgctgcaaatattggtacacct

SEQ ID NO: 242308 - DNA, 25 bp, Probe sequence
gcagcattagctgatgtctttgcta

SEQ ID NO: 242309 - DNA, 25 bp, Probe sequence
gaattcgtacaaggttttgctacaa

SEQ ID NO: 242310 - DNA, 25 bp, Probe sequence
gaattatcatacttaaacttgcctg

SEQ ID NO: 242311 - DNA, 25 bp, Probe sequence
gaacgtgcggctgatattcgcgacg

SEQ ID NO: 242312 - DNA, 25 bp, Probe sequence
gaccgtatgtcagagcgtgtatcat

SEQ ID NO: 242313 - DNA, 25 bp, Probe sequence
gagtcgttctttagaaattccagca

SEQ ID NO: 242314 - DNA, 25 bp, Probe sequence
gatattttcagaccacagctacgtg

SEQ ID NO: 242315 - DNA, 25 bp, Probe sequence
gattcgtttatgccttgcgcaacaa

SEQ ID NO: 242316 - DNA, 25 bp, Probe sequence
gttaccgtgcgattcgtttatgcct

SEQ ID NO: 242317 - DNA, 25 bp, Probe sequence
gttacagttgatggtgttcacgcag

SEQ ID NO: 242318 - DNA, 25 bp, Probe sequence
gtagatttcttcagtatcggtacaa

SEQ ID NO: 242319 - DNA, 25 bp, Probe sequence
ggtcgtgaccaaatgcctacagaag

SEQ ID NO: 242320 - DNA, 25 bp, Probe sequence
ggtgttcacgcagagcttgctgcaa

SEQ ID NO: 242321 - DNA, 25 bp, Probe sequence
ggtgatgtaatcgttaatccaactg

SEQ ID NO: 242322 - DNA, 25 bp, Probe sequence
tggtagagatacctgcaacagcagc

SEQ ID NO: 242323 - DNA, 25 bp, Probe sequence
tgaatccattcttaggttaccgtgc

SEQ ID NO: 242324 - DNA, 25 bp, Probe sequence
tgagtgcaacgtctattctgaaagc

SEQ ID NO: 242325 - DNA, 25 bp, Probe sequence
tgagccagacttaacattcgacaaa

SEQ ID NO: 242326 - DNA, 25 bp, Probe sequence
ttgtagggaatgacttaacgccatc

SEQ ID NO: 242327 - DNA, 25 bp, Probe sequence
ttggtacacctaatgatttgccagg

SEQ ID NO: 242328 - DNA, 25 bp, Probe sequence
atctcttcagatctacgggttttcg

SEQ ID NO: 242329 - DNA, 25 bp, Probe sequence
atcactcagcatatacgtttattaa

SEQ ID NO: 242330 - DNA, 25 bp, Probe sequence
atcgatgggtacaggaatatgctcc

SEQ ID NO: 242331 - DNA, 25 bp, Probe sequence
atcgcgctattgatgcagatggcca

SEQ ID NO: 242332 - DNA, 25 bp, Probe sequence
atgtcattactgtagccgttggcta

SEQ ID NO: 242333 - DNA, 25 bp, Probe sequence
agatcatcgtcatatcaaagtaagg

SEQ ID NO: 242334 - DNA, 25 bp, Probe sequence
agccccttcaacgaaggtggcaatg

SEQ ID NO: 242335 - DNA, 25 bp, Probe sequence
aaaagaaccgcagatctcttcagat

SEQ ID NO: 242336 - DNA, 25 bp, Probe sequence
aacaatttggcaaacctcaaatgat

SEQ ID NO: 242337 - DNA, 25 bp, Probe sequence
aacgagataatcactcagcatatac

SEQ ID NO: 242338 - DNA, 25 bp, Probe sequence
aagcaagcttattataaatggcata

SEQ ID NO: 242339 - DNA, 25 bp, Probe sequence
aaggcattgaatgtatttatggact

SEQ ID NO: 242340 - DNA, 25 bp, Probe sequence
aatggaattatttatatcgcgctat

SEQ ID NO: 242341 - DNA, 25 bp, Probe sequence
catgccgtgtaattagcatcatgct

SEQ ID NO: 242342 - DNA, 25 bp, Probe sequence
ctcattgaacaagatcatcgtcata

SEQ ID NO: 242343 - DNA, 25 bp, Probe sequence
cccaactgtcattgtacctctaaat

SEQ ID NO: 242344 - DNA, 25 bp, Probe sequence
ccatacactagatatttcgttacgt

SEQ ID NO: 242345 - DNA, 25 bp, Probe sequence
gctcctattttgtatcaaatttgga

SEQ ID NO: 242346 - DNA, 25 bp, Probe sequence
gaccaagccccttcaacgaaggtgg

SEQ ID NO: 242347 - DNA, 25 bp, Probe sequence
gacaaagatgtcattactgtagccg

SEQ ID NO: 242348 - DNA, 25 bp, Probe sequence
gagaacgaggcatctatgttcatca

SEQ ID NO: 242349 - DNA, 25 bp, Probe sequence
gagacgtatatcaaaattaaagggc

SEQ ID NO: 242350 - DNA, 25 bp, Probe sequence
gaggcatctatgttcatcattcaac

SEQ ID NO: 242351 - DNA, 25 bp, Probe sequence
gatgcagatggccatacactagata

SEQ ID NO: 242352 - DNA, 25 bp, Probe sequence
gatatgcattaagttatcgtgatat

SEQ ID NO: 242353 - DNA, 25 bp, Probe sequence
gttatcaaagtatcaatacggcaaa

SEQ ID NO: 242354 - DNA, 25 bp, Probe sequence
gttttcgccatgccgtgtaattagc

SEQ ID NO: 242355 - DNA, 25 bp, Probe sequence
gtcattgtacctctaaatatttaaa

SEQ ID NO: 242356 - DNA, 25 bp, Probe sequence
ggtggcaatgtccaaagtgattaaa

SEQ ID NO: 242357 - DNA, 25 bp, Probe sequence
ggaatatgctcctattttgtatcaa

SEQ ID NO: 242358 - DNA, 25 bp, Probe sequence
ggcaaagaatacgatcaaaggcatt

SEQ ID NO: 242359 - DNA, 25 bp, Probe sequence
tgataattacagaccaagccccttc

SEQ ID NO: 242360 - DNA, 25 bp, Probe sequence
tgttcatcattcaacaatttatcga

SEQ ID NO: 242361 - DNA, 25 bp, Probe sequence
ttcagatctacgggttttcgccatg

SEQ ID NO: 242362 - DNA, 25 bp, Probe sequence
atatctacgaaaaatcttcgaaaag

SEQ ID NO: 242363 - DNA, 25 bp, Probe sequence
atgcgtagacatggagacacttcag

SEQ ID NO: 242364 - DNA, 25 bp, Probe sequence
atggagtgattacatgagtttaact

SEQ ID NO: 242365 - DNA, 25 bp, Probe sequence
agttcagctcatgataacgagttta

SEQ ID NO: 242366 - DNA, 25 bp, Probe sequence
agacatggagacacttcagaattat

SEQ ID NO: 242367 - DNA, 25 bp, Probe sequence
agaagttcagctcatgataacgagt

SEQ ID NO: 242368 - DNA, 25 bp, Probe sequence
acatggagacacttcagaattatgg

SEQ ID NO: 242369 - DNA, 25 bp, Probe sequence
aaagaagttcagctcatgataacga

SEQ ID NO: 242370 - DNA, 25 bp, Probe sequence
aagttcagctcatgataacgagttt

SEQ ID NO: 242371 - DNA, 25 bp, Probe sequence
catggagacacttcagaattatgga

SEQ ID NO: 242372 - DNA, 25 bp, Probe sequence
catgagtttaactatttttctttat

SEQ ID NO: 242373 - DNA, 25 bp, Probe sequence
cttcgaaaagaagttcagctcatga

SEQ ID NO: 242374 - DNA, 25 bp, Probe sequence
ctatgcgtagacatggagacacttc

SEQ ID NO: 242375 - DNA, 25 bp, Probe sequence
cgtagacatggagacacttcagaat

SEQ ID NO: 242376 - DNA, 25 bp, Probe sequence
gcgtagacatggagacacttcagaa

SEQ ID NO: 242377 - DNA, 25 bp, Probe sequence
gcaaattatatctacgaaaaatctt

SEQ ID NO: 242378 - DNA, 25 bp, Probe sequence
gaattatggagtgattacatgagtt

SEQ ID NO: 242379 - DNA, 25 bp, Probe sequence
gaagttcagctcatgataacgagtt

SEQ ID NO: 242380 - DNA, 25 bp, Probe sequence
gaaaagaagttcagctcatgataac

SEQ ID NO: 242381 - DNA, 25 bp, Probe sequence
gacacttcagaattatggagtgatt

SEQ ID NO: 242382 - DNA, 25 bp, Probe sequence
gacatggagacacttcagaattatg

SEQ ID NO: 242383 - DNA, 25 bp, Probe sequence
gagacacttcagaattatggagtga

SEQ ID NO: 242384 - DNA, 25 bp, Probe sequence
gagtgattacatgagtttaactatt

SEQ ID NO: 242385 - DNA, 25 bp, Probe sequence
gattacatgagtttaactatttttc

SEQ ID NO: 242386 - DNA, 25 bp, Probe sequence
gtttattagcaaattatatctacga

SEQ ID NO: 242387 - DNA, 25 bp, Probe sequence
gtagacatggagacacttcagaatt

SEQ ID NO: 242388 - DNA, 25 bp, Probe sequence
gtctatgcgtagacatggagacact

SEQ ID NO: 242389 - DNA, 25 bp, Probe sequence
ggaagtttattagcaaattatatct

SEQ ID NO: 242390 - DNA, 25 bp, Probe sequence
tggagacacttcagaattatggagt

SEQ ID NO: 242391 - DNA, 25 bp, Probe sequence
tgcgtagacatggagacacttcaga

SEQ ID NO: 242392 - DNA, 25 bp, Probe sequence
tcgaaaagaagttcagctcatgata

SEQ ID NO: 242393 - DNA, 25 bp, Probe sequence
tcagttttaggaagtttattagcaa

SEQ ID NO: 242394 - DNA, 25 bp, Probe sequence
tagacatggagacacttcagaatta

SEQ ID NO: 242395 - DNA, 25 bp, Probe sequence
tatgcgtagacatggagacacttca

SEQ ID NO: 242396 - DNA, 25 bp, Probe sequence
attggtatcaacttaatcatgctat

SEQ ID NO: 242397 - DNA, 25 bp, Probe sequence
attctcacaacctacactaagtcat

SEQ ID NO: 242398 - DNA, 25 bp, Probe sequence
atcaacttaatcatgctattttaga

SEQ ID NO: 242399 - DNA, 25 bp, Probe sequence
agataatgaattagttacaacacga

SEQ ID NO: 242400 - DNA, 25 bp, Probe sequence
acctacactaagtcatcatatgaag

SEQ ID NO: 242401 - DNA, 25 bp, Probe sequence
acttgaacatcattaatacatctaa

SEQ ID NO: 242402 - DNA, 25 bp, Probe sequence
acaacctacactaagtcatcatatg

SEQ ID NO: 242403 - DNA, 25 bp, Probe sequence
aaatgtggaatcaggtgactgttga

SEQ ID NO: 242404 - DNA, 25 bp, Probe sequence
aagatgtgtatgtaaaaatgtggaa

SEQ ID NO: 242405 - DNA, 25 bp, Probe sequence
aagtcatcatatgaagtcattagta

SEQ ID NO: 242406 - DNA, 25 bp, Probe sequence
caattctcacaacctacactaagtc

SEQ ID NO: 242407 - DNA, 25 bp, Probe sequence
ctttcttgtggtgagctatgcgctt

SEQ ID NO: 242408 - DNA, 25 bp, Probe sequence
gcgcttgtgacttattagaacactt

SEQ ID NO: 242409 - DNA, 25 bp, Probe sequence
gctatgcgcttgtgacttattagaa

SEQ ID NO: 242410 - DNA, 25 bp, Probe sequence
gaacatcattaatacatctaatcaa

SEQ ID NO: 242411 - DNA, 25 bp, Probe sequence
gaacactttcaattctcacaaccta

SEQ ID NO: 242412 - DNA, 25 bp, Probe sequence
gacggcaataaacattggtatcaac

SEQ ID NO: 242413 - DNA, 25 bp, Probe sequence
gagctatgcgcttgtgacttattag

SEQ ID NO: 242414 - DNA, 25 bp, Probe sequence
gttacaacacgaaaagacggcaata

SEQ ID NO: 242415 - DNA, 25 bp, Probe sequence
gtcttataaagaactatcaacaata

SEQ ID NO: 242416 - DNA, 25 bp, Probe sequence
gtgacttattagaacactttcaatt

SEQ ID NO: 242417 - DNA, 25 bp, Probe sequence
gtggtgagctatgcgcttgtgactt

SEQ ID NO: 242418 - DNA, 25 bp, Probe sequence
ggtgagctatgcgcttgtgacttat

SEQ ID NO: 242419 - DNA, 25 bp, Probe sequence
ggtatcaacttaatcatgctatttt

SEQ ID NO: 242420 - DNA, 25 bp, Probe sequence
tgctattttagatgatattatccaa

SEQ ID NO: 242421 - DNA, 25 bp, Probe sequence
tctcacaacctacactaagtcatca

SEQ ID NO: 242422 - DNA, 25 bp, Probe sequence
tcacaacctacactaagtcatcata

SEQ ID NO: 242423 - DNA, 25 bp, Probe sequence
tatgcgcttgtgacttattagaaca

SEQ ID NO: 242424 - DNA, 25 bp, Probe sequence
tatccaaaacttgaacatcattaat

SEQ ID NO: 242425 - DNA, 25 bp, Probe sequence
tttcaattctcacaacctacactaa

SEQ ID NO: 242426 - DNA, 25 bp, Probe sequence
tttatcagattcaagtaggttagaa

SEQ ID NO: 242427 - DNA, 25 bp, Probe sequence
ttcaattctcacaacctacactaag

SEQ ID NO: 242428 - DNA, 25 bp, Probe sequence
ttcttgtggtgagctatgcgcttgt

SEQ ID NO: 242429 - DNA, 25 bp, Probe sequence
ttgtggtgagctatgcgcttgtgac

SEQ ID NO: 242430 - DNA, 25 bp, Probe sequence
ggtattacaacggtccttggggatg

SEQ ID NO: 242431 - DNA, 25 bp, Probe sequence
attctctctgattgctagtattctc

SEQ ID NO: 242432 - DNA, 25 bp, Probe sequence
atttagcagcatcatgggtatcggc

SEQ ID NO: 242433 - DNA, 25 bp, Probe sequence
atactacatcacttcccttaattgt

SEQ ID NO: 242434 - DNA, 25 bp, Probe sequence
atccatacctaaaacgttcgataca

SEQ ID NO: 242435 - DNA, 25 bp, Probe sequence
atgcaactttaacttttgtggctgt

SEQ ID NO: 242436 - DNA, 25 bp, Probe sequence
atcgttgtattctctattggtatgt

SEQ ID NO: 242437 - DNA, 25 bp, Probe sequence
aggagtcgtaagtctttctgatgta

SEQ ID NO: 242438 - DNA, 25 bp, Probe sequence
aggtttataccttacactaatcata

SEQ ID NO: 242439 - DNA, 25 bp, Probe sequence
agcagtactactcgttggatatctt

SEQ ID NO: 242440 - DNA, 25 bp, Probe sequence
aattatcatcactattccagtccta

SEQ ID NO: 242441 - DNA, 25 bp, Probe sequence
cattattgtggctacatgtcttaac

SEQ ID NO: 242442 - DNA, 25 bp, Probe sequence
cgtttctgcagattacttcgatatt

SEQ ID NO: 242443 - DNA, 25 bp, Probe sequence
gcgagtttatccaaattcctgtatc

SEQ ID NO: 242444 - DNA, 25 bp, Probe sequence
gctagtattctcgttttatggttat

SEQ ID NO: 242445 - DNA, 25 bp, Probe sequence
gagcaattgtagcagcatttttcgc

SEQ ID NO: 242446 - DNA, 25 bp, Probe sequence
gatcattcctaatatattctctctg

SEQ ID NO: 242447 - DNA, 25 bp, Probe sequence
gattggccaatccagtgctacagga

SEQ ID NO: 242448 - DNA, 25 bp, Probe sequence
gttggatatcttgttagcgagttta

SEQ ID NO: 242449 - DNA, 25 bp, Probe sequence
gtggttttattgctgatactacatc

SEQ ID NO: 242450 - DNA, 25 bp, Probe sequence
gggtatcggctttatagctgctttc

SEQ ID NO: 242451 - DNA, 25 bp, Probe sequence
ggtgcagctttaatcttaacgccta

SEQ ID NO: 242452 - DNA, 25 bp, Probe sequence
ggtctgcgatacatatggtcaaggc

SEQ ID NO: 242453 - DNA, 25 bp, Probe sequence
ggtgcaccatggaatatcgttgtat

SEQ ID NO: 242454 - DNA, 25 bp, Probe sequence
ggtcaaggcttcaaacggtaatggc

SEQ ID NO: 242455 - DNA, 25 bp, Probe sequence
ggtatgtatcttgttgtgtttggac

SEQ ID NO: 242456 - DNA, 25 bp, Probe sequence
tccccctttattattgccagtggtt

SEQ ID NO: 242457 - DNA, 25 bp, Probe sequence
tggagctgttgttgctatcattaca

SEQ ID NO: 242458 - DNA, 25 bp, Probe sequence
tccagtcctatttgtaacactctta

SEQ ID NO: 242459 - DNA, 25 bp, Probe sequence
tacgccaattggttctttagcaaca

SEQ ID NO: 242460 - DNA, 25 bp, Probe sequence
tagctgctttcttatcttcgattat

SEQ ID NO: 242461 - DNA, 25 bp, Probe sequence
ttaacctttgtgatttggcaaccaa

SEQ ID NO: 242462 - DNA, 25 bp, Probe sequence
ttgtggctgttattcttatttcatt

SEQ ID NO: 242463 - DNA, 25 bp, Probe sequence
ttggtttttttgaatggtctgcgat

SEQ ID NO: 242464 - DNA, 25 bp, Probe sequence
attgatatatcaaaccatacgtcag

SEQ ID NO: 242465 - DNA, 25 bp, Probe sequence
atatatcaaaccatacgtcagactt

SEQ ID NO: 242466 - DNA, 25 bp, Probe sequence
atatgtacaggaaactcttgtcgta

SEQ ID NO: 242467 - DNA, 25 bp, Probe sequence
aggaaactcttgtcgtagccaaatg

SEQ ID NO: 242468 - DNA, 25 bp, Probe sequence
acaggaaactcttgtcgtagccaaa

SEQ ID NO: 242469 - DNA, 25 bp, Probe sequence
acacatggtgttaatcctaaagcaa

SEQ ID NO: 242470 - DNA, 25 bp, Probe sequence
aaaccatacgtcagacttgattgat

SEQ ID NO: 242471 - DNA, 25 bp, Probe sequence
aaacaatcagatttggtcgtaacgt

SEQ ID NO: 242472 - DNA, 25 bp, Probe sequence
aactcttgtcgtagccaaatggctg

SEQ ID NO: 242473 - DNA, 25 bp, Probe sequence
aagagcattggggttttgatgatcc

SEQ ID NO: 242474 - DNA, 25 bp, Probe sequence
aaggttggaatgtctattctgctgg

SEQ ID NO: 242475 - DNA, 25 bp, Probe sequence
aattccaacgtgttagagacgagat

SEQ ID NO: 242476 - DNA, 25 bp, Probe sequence
caataattgtcctattttaccacca

SEQ ID NO: 242477 - DNA, 25 bp, Probe sequence
caatcagatttggtcgtaacgttat

SEQ ID NO: 242478 - DNA, 25 bp, Probe sequence
catacgtcagacttgattgataatg

SEQ ID NO: 242479 - DNA, 25 bp, Probe sequence
cttgtcgtagccaaatggctgaagg

SEQ ID NO: 242480 - DNA, 25 bp, Probe sequence
gcattggggttttgatgatccagca

SEQ ID NO: 242481 - DNA, 25 bp, Probe sequence
gaatggtcagaattccaacgtgtta

SEQ ID NO: 242482 - DNA, 25 bp, Probe sequence
gaaactcttgtcgtagccaaatggc

SEQ ID NO: 242483 - DNA, 25 bp, Probe sequence
gaaaggaaatattgggtgaaggttg

SEQ ID NO: 242484 - DNA, 25 bp, Probe sequence
gagacgagattaaattagctataga

SEQ ID NO: 242485 - DNA, 25 bp, Probe sequence
gatccagcaggtaaagaatggtcag

SEQ ID NO: 242486 - DNA, 25 bp, Probe sequence
gttttgatgatccagcaggtaaaga

SEQ ID NO: 242487 - DNA, 25 bp, Probe sequence
gtagtgatgcagacaataattgtcc

SEQ ID NO: 242488 - DNA, 25 bp, Probe sequence
gtacaggaaactcttgtcgtagcca

SEQ ID NO: 242489 - DNA, 25 bp, Probe sequence
gtctattctgctggtattgaaacac

SEQ ID NO: 242490 - DNA, 25 bp, Probe sequence
gtgttaatcctaaagcaatagaagc

SEQ ID NO: 242491 - DNA, 25 bp, Probe sequence
gggtgaaggttggaatgtctattct

SEQ ID NO: 242492 - DNA, 25 bp, Probe sequence
ggggttttgatgatccagcaggtaa

SEQ ID NO: 242493 - DNA, 25 bp, Probe sequence
ggtcagaattccaacgtgttagaga

SEQ ID NO: 242494 - DNA, 25 bp, Probe sequence
ggtcgtaacgttatgtagtgatgca

SEQ ID NO: 242495 - DNA, 25 bp, Probe sequence
ggaatgtctattctgctggtattga

SEQ ID NO: 242496 - DNA, 25 bp, Probe sequence
tggctgaaggttggggaaaggaaat

SEQ ID NO: 242497 - DNA, 25 bp, Probe sequence
tctgctggtattgaaacacatggtg

SEQ ID NO: 242498 - DNA, 25 bp, Probe sequence
atctgctccaaaggcttggggtgga

SEQ ID NO: 242499 - DNA, 25 bp, Probe sequence
acagtacatgtagctggtggtgttt

SEQ ID NO: 242500 - DNA, 25 bp, Probe sequence
acaaaacattttatagtcttcacta

SEQ ID NO: 242501 - DNA, 25 bp, Probe sequence
aatctaaggcatctgctccaaaggc

SEQ ID NO: 242502 - DNA, 25 bp, Probe sequence
aagctgaagctgcaacagtacatgt

SEQ ID NO: 242503 - DNA, 25 bp, Probe sequence
aatcttattcggcactttattaggt

SEQ ID NO: 242504 - DNA, 25 bp, Probe sequence
catggttcaacagcagtagggaaat

SEQ ID NO: 242505 - DNA, 25 bp, Probe sequence
ctaaggcatctgctccaaaggcttg

SEQ ID NO: 242506 - DNA, 25 bp, Probe sequence
gctcgacctggtgttcaatctaagg

SEQ ID NO: 242507 - DNA, 25 bp, Probe sequence
gctccaaaggcttggggtggaaaca

SEQ ID NO: 242508 - DNA, 25 bp, Probe sequence
gctggtggtgtttggagccatggta

SEQ ID NO: 242509 - DNA, 25 bp, Probe sequence
gctgcaacagtacatgtagctggtg

SEQ ID NO: 242510 - DNA, 25 bp, Probe sequence
gctagtacaatcttattcggcactt

SEQ ID NO: 242511 - DNA, 25 bp, Probe sequence
gaaatcatggttcaacagcagtagg

SEQ ID NO: 242512 - DNA, 25 bp, Probe sequence
gaaatttgtttctagttgtattgct

SEQ ID NO: 242513 - DNA, 25 bp, Probe sequence
gacctggtgttcaatctaaggcatc

SEQ ID NO: 242514 - DNA, 25 bp, Probe sequence
gttgctcgacctggtgttcaatcta

SEQ ID NO: 242515 - DNA, 25 bp, Probe sequence
gttcaatctaaggcatctgctccaa

SEQ ID NO: 242516 - DNA, 25 bp, Probe sequence
gtttctagttgtattgctagtacaa

SEQ ID NO: 242517 - DNA, 25 bp, Probe sequence
gtatggtcttattatagtcacaata

SEQ ID NO: 242518 - DNA, 25 bp, Probe sequence
gtagggaaatattcatcttttagtg

SEQ ID NO: 242519 - DNA, 25 bp, Probe sequence
gtagctggtggtgtttggagccatg

SEQ ID NO: 242520 - DNA, 25 bp, Probe sequence
gtacaatcttattcggcactttatt

SEQ ID NO: 242521 - DNA, 25 bp, Probe sequence
gtgtaacttataaagctgaagctgc

SEQ ID NO: 242522 - DNA, 25 bp, Probe sequence
ggtgtttggagccatggtattggaa

SEQ ID NO: 242523 - DNA, 25 bp, Probe sequence
ggtgttcaatctaaggcatctgctc

SEQ ID NO: 242524 - DNA, 25 bp, Probe sequence
ggagccatggtattggaaaacatta

SEQ ID NO: 242525 - DNA, 25 bp, Probe sequence
ggaaaacattacgtatggtcttatt

SEQ ID NO: 242526 - DNA, 25 bp, Probe sequence
ggcatctgctccaaaggcttggggt

SEQ ID NO: 242527 - DNA, 25 bp, Probe sequence
tcggcactttattaggtgtaactta

SEQ ID NO: 242528 - DNA, 25 bp, Probe sequence
tcatcttttagtggtgttgctcgac

SEQ ID NO: 242529 - DNA, 25 bp, Probe sequence
tacgtatggtcttattatagtcaca

SEQ ID NO: 242530 - DNA, 25 bp, Probe sequence
tattcatcttttagtggtgttgctc

SEQ ID NO: 242531 - DNA, 25 bp, Probe sequence
ttttagtggtgttgctcgacctggt

SEQ ID NO: 242532 - DNA, 25 bp, Probe sequence
atcaccaaggatggattgactttca

SEQ ID NO: 242533 - DNA, 25 bp, Probe sequence
atcatggtgctaatactatcttttt

SEQ ID NO: 242534 - DNA, 25 bp, Probe sequence
atctagattctccaatagtaatgtt

SEQ ID NO: 242535 - DNA, 25 bp, Probe sequence
atggttattcattattcagcagtaa

SEQ ID NO: 242536 - DNA, 25 bp, Probe sequence
agttccaatattttaacaatctcta

SEQ ID NO: 242537 - DNA, 25 bp, Probe sequence
agatgtcattgaatcaggcgccaaa

SEQ ID NO: 242538 - DNA, 25 bp, Probe sequence
acgtatctgttttttcttttgatcg

SEQ ID NO: 242539 - DNA, 25 bp, Probe sequence
acgttttcattcttttgatagctac

SEQ ID NO: 242540 - DNA, 25 bp, Probe sequence
aaagctggtttaacatctgaagttg

SEQ ID NO: 242541 - DNA, 25 bp, Probe sequence
aaacatcacttttaactccatcaga

SEQ ID NO: 242542 - DNA, 25 bp, Probe sequence
aatggcaatgtcttttttatcaata

SEQ ID NO: 242543 - DNA, 25 bp, Probe sequence
aatcatttattggctagtacttacc

SEQ ID NO: 242544 - DNA, 25 bp, Probe sequence
aatactatcttttttactggcacaa

SEQ ID NO: 242545 - DNA, 25 bp, Probe sequence
cctttcatattcttaggcgtattat

SEQ ID NO: 242546 - DNA, 25 bp, Probe sequence
gcgaacaacttggtggattgctttt

SEQ ID NO: 242547 - DNA, 25 bp, Probe sequence
gctgctgtttctcaaggtggatatc

SEQ ID NO: 242548 - DNA, 25 bp, Probe sequence
gctacatggcttttcaactacacgc

SEQ ID NO: 242549 - DNA, 25 bp, Probe sequence
gctttttgtttttgcttgtattact

SEQ ID NO: 242550 - DNA, 25 bp, Probe sequence
gaataataatatagccaatcccgat

SEQ ID NO: 242551 - DNA, 25 bp, Probe sequence
gagatttttatttagctgctgtttc

SEQ ID NO: 242552 - DNA, 25 bp, Probe sequence
gatttatcgtgttgctttttgtttt

SEQ ID NO: 242553 - DNA, 25 bp, Probe sequence
gatttattagtgcctttcatattct

SEQ ID NO: 242554 - DNA, 25 bp, Probe sequence
gttttttcttttgatcgcacaacta

SEQ ID NO: 242555 - DNA, 25 bp, Probe sequence
gtgtttattcctccaaggttacaat

SEQ ID NO: 242556 - DNA, 25 bp, Probe sequence
gtggctgatttcgtatagtcttctt

SEQ ID NO: 242557 - DNA, 25 bp, Probe sequence
gggtaccttcaccaaatgtatcatg

SEQ ID NO: 242558 - DNA, 25 bp, Probe sequence
ggcgtattatatcttttgtacttct

SEQ ID NO: 242559 - DNA, 25 bp, Probe sequence
tggatttcttaatgtttattcgtag

SEQ ID NO: 242560 - DNA, 25 bp, Probe sequence
tgctattattcaacatttacttcaa

SEQ ID NO: 242561 - DNA, 25 bp, Probe sequence
tcagggctattatttttatttttct

SEQ ID NO: 242562 - DNA, 25 bp, Probe sequence
tcaactacacgcattatttttcata

SEQ ID NO: 242563 - DNA, 25 bp, Probe sequence
tactttctattatgttagcttacac

SEQ ID NO: 242564 - DNA, 25 bp, Probe sequence
tagcttacactacgcatattttatt

SEQ ID NO: 242565 - DNA, 25 bp, Probe sequence
ttcaatatttatgggtaccttcacc

SEQ ID NO: 242566 - DNA, 25 bp, Probe sequence
atttttgcataaattccaacctgaa

SEQ ID NO: 242567 - DNA, 25 bp, Probe sequence
atgttttgtcatttcaggtgtttat

SEQ ID NO: 242568 - DNA, 25 bp, Probe sequence
acctatagaagcgatgtttaaccca

SEQ ID NO: 242569 - DNA, 25 bp, Probe sequence
aacatttgcgttcttctttgaagct

SEQ ID NO: 242570 - DNA, 25 bp, Probe sequence
aacgattggtgttggtatgccttta

SEQ ID NO: 242571 - DNA, 25 bp, Probe sequence
aagcagcaacacaagcaggcggaat

SEQ ID NO: 242572 - DNA, 25 bp, Probe sequence
aattattgcgtaatcgtcaacctaa

SEQ ID NO: 242573 - DNA, 25 bp, Probe sequence
gccggtatgacgatggcatttgtta

SEQ ID NO: 242574 - DNA, 25 bp, Probe sequence
gcagttcatatcatttttgcaacga

SEQ ID NO: 242575 - DNA, 25 bp, Probe sequence
gaaatcagtcggtttttgacagcta

SEQ ID NO: 242576 - DNA, 25 bp, Probe sequence
gacagccttggattgttcgtggtta

SEQ ID NO: 242577 - DNA, 25 bp, Probe sequence
gacacgttattgcacttccattatt

SEQ ID NO: 242578 - DNA, 25 bp, Probe sequence
gacagctatgactttagcagttcat

SEQ ID NO: 242579 - DNA, 25 bp, Probe sequence
gagatgggtagacagccttggattg

SEQ ID NO: 242580 - DNA, 25 bp, Probe sequence
gatggtcaatgttcaacctatagaa

SEQ ID NO: 242581 - DNA, 25 bp, Probe sequence
gatcttcaatatatagctatggcca

SEQ ID NO: 242582 - DNA, 25 bp, Probe sequence
gatactgtctaccataagaaagctt

SEQ ID NO: 242583 - DNA, 25 bp, Probe sequence
gtatgcctttaatgttcgcaattgc

SEQ ID NO: 242584 - DNA, 25 bp, Probe sequence
gtaattattggtggctctttctcag

SEQ ID NO: 242585 - DNA, 25 bp, Probe sequence
gtgcgattgaattacctggactatt

SEQ ID NO: 242586 - DNA, 25 bp, Probe sequence
ggactattgagtttcttagcagata

SEQ ID NO: 242587 - DNA, 25 bp, Probe sequence
ggacacatttcttaattagtatacc

SEQ ID NO: 242588 - DNA, 25 bp, Probe sequence
ggcatttcgatacatcttcccatgc

SEQ ID NO: 242589 - DNA, 25 bp, Probe sequence
tgtttaacccatcgtttatagttcg

SEQ ID NO: 242590 - DNA, 25 bp, Probe sequence
tgttcgtggttatatgcgcgtggca

SEQ ID NO: 242591 - DNA, 25 bp, Probe sequence
tcacgtaattactacagccggtatg

SEQ ID NO: 242592 - DNA, 25 bp, Probe sequence
tacgcctgcaggttttgagttgaag

SEQ ID NO: 242593 - DNA, 25 bp, Probe sequence
tacaggtacaattataggacttcaa

SEQ ID NO: 242594 - DNA, 25 bp, Probe sequence
tagcagtgggagttgttacaggtac

SEQ ID NO: 242595 - DNA, 25 bp, Probe sequence
tagcagcttatgaatggcatttcga

SEQ ID NO: 242596 - DNA, 25 bp, Probe sequence
tatagttcgatcatttcacgtaatt

SEQ ID NO: 242597 - DNA, 25 bp, Probe sequence
ttatcattgatttggcctacattta

SEQ ID NO: 242598 - DNA, 25 bp, Probe sequence
ttactttctatgttggcaggggatt

SEQ ID NO: 242599 - DNA, 25 bp, Probe sequence
ttcatttatgaatacgcctgcaggt

SEQ ID NO: 242600 - DNA, 25 bp, Probe sequence
atcatcatacttagtctgttattgg

SEQ ID NO: 242601 - DNA, 25 bp, Probe sequence
atgccaaagttccaaaagataccca

SEQ ID NO: 242602 - DNA, 25 bp, Probe sequence
atgagcatttagatcgttttaaccc

SEQ ID NO: 242603 - DNA, 25 bp, Probe sequence
aggttatgatcctacaaaagaatat

SEQ ID NO: 242604 - DNA, 25 bp, Probe sequence
agttccaaaagatacccaggactat

SEQ ID NO: 242605 - DNA, 25 bp, Probe sequence
agatattcctagctttttaaaatga

SEQ ID NO: 242606 - DNA, 25 bp, Probe sequence
agaactttaattattgtaacaattg

SEQ ID NO: 242607 - DNA, 25 bp, Probe sequence
agaaatataactgtatactctaaaa

SEQ ID NO: 242608 - DNA, 25 bp, Probe sequence
aaagatacccaggactatagaaata

SEQ ID NO: 242609 - DNA, 25 bp, Probe sequence
aaaagtatcttatgccaaagttcca

SEQ ID NO: 242610 - DNA, 25 bp, Probe sequence
aagatattcctagctttttaaaatg

SEQ ID NO: 242611 - DNA, 25 bp, Probe sequence
aagtatcttatgccaaagttccaaa

SEQ ID NO: 242612 - DNA, 25 bp, Probe sequence
catcatacttagtctgttattggtt

SEQ ID NO: 242613 - DNA, 25 bp, Probe sequence
catttagatcgttttaacccactgt

SEQ ID NO: 242614 - DNA, 25 bp, Probe sequence
ctattaatcatcatacttagtctgt

SEQ ID NO: 242615 - DNA, 25 bp, Probe sequence
ccaaaagatacccaggactatagaa

SEQ ID NO: 242616 - DNA, 25 bp, Probe sequence
gccaaagttccaaaagatacccagg

SEQ ID NO: 242617 - DNA, 25 bp, Probe sequence
gcatttagatcgttttaacccactg

SEQ ID NO: 242618 - DNA, 25 bp, Probe sequence
gaaatgagcatttagatcgttttaa

SEQ ID NO: 242619 - DNA, 25 bp, Probe sequence
gaaatatgtgcgttcgatagaatac

SEQ ID NO: 242620 - DNA, 25 bp, Probe sequence
gagcatttagatcgttttaacccac

SEQ ID NO: 242621 - DNA, 25 bp, Probe sequence
gatacccaggactatagaaatataa

SEQ ID NO: 242622 - DNA, 25 bp, Probe sequence
gtatcttatgccaaagttccaaaag

SEQ ID NO: 242623 - DNA, 25 bp, Probe sequence
gtaacaattgtactattaatcatca

SEQ ID NO: 242624 - DNA, 25 bp, Probe sequence
gtctgttattggttagaaatgagca

SEQ ID NO: 242625 - DNA, 25 bp, Probe sequence
gtgcgttcgatagaatacattacaa

SEQ ID NO: 242626 - DNA, 25 bp, Probe sequence
gggaaatatgtgcgttcgatagaat

SEQ ID NO: 242627 - DNA, 25 bp, Probe sequence
ggattttttaggttatgatcctaca

SEQ ID NO: 242628 - DNA, 25 bp, Probe sequence
tcatacttagtctgttattggttag

SEQ ID NO: 242629 - DNA, 25 bp, Probe sequence
taatcatcatacttagtctgttatt

SEQ ID NO: 242630 - DNA, 25 bp, Probe sequence
taaagggaaatatgtgcgttcgata

SEQ ID NO: 242631 - DNA, 25 bp, Probe sequence
tacattacaaaagatattcctagct

SEQ ID NO: 242632 - DNA, 25 bp, Probe sequence
tacttagtctgttattggttagaaa

SEQ ID NO: 242633 - DNA, 25 bp, Probe sequence
ttgtactattaatcatcatacttag

SEQ ID NO: 242634 - DNA, 25 bp, Probe sequence
ataaaactatgattgtcgtaacgca

SEQ ID NO: 242635 - DNA, 25 bp, Probe sequence
agagcttgcgaaacgatttgatgtc

SEQ ID NO: 242636 - DNA, 25 bp, Probe sequence
agaattgttagttctctaagcggtg

SEQ ID NO: 242637 - DNA, 25 bp, Probe sequence
aaaggtcggcctagatttagatatc

SEQ ID NO: 242638 - DNA, 25 bp, Probe sequence
aaactatgattgtcgtaacgcatga

SEQ ID NO: 242639 - DNA, 25 bp, Probe sequence
aatctactttacttaacataatcgc

SEQ ID NO: 242640 - DNA, 25 bp, Probe sequence
gcgaaacgatttgatgtcatagtca

SEQ ID NO: 242641 - DNA, 25 bp, Probe sequence
gcggtggtgaacaacaaagagtagc

SEQ ID NO: 242642 - DNA, 25 bp, Probe sequence
gctggaaaatctactttacttaaca

SEQ ID NO: 242643 - DNA, 25 bp, Probe sequence
gcttgcgaaacgatttgatgtcata

SEQ ID NO: 242644 - DNA, 25 bp, Probe sequence
gcatgatttagagcttgcgaaacga

SEQ ID NO: 242645 - DNA, 25 bp, Probe sequence
gaacaacaaagagtagcattggcaa

SEQ ID NO: 242646 - DNA, 25 bp, Probe sequence
gaaaatcaaacaatcagtcaaaatt

SEQ ID NO: 242647 - DNA, 25 bp, Probe sequence
gaaagtcgatttttatagatatacg

SEQ ID NO: 242648 - DNA, 25 bp, Probe sequence
gagtagcattggcaagattaatatt

SEQ ID NO: 242649 - DNA, 25 bp, Probe sequence
gatgtatcacaaggaagcatatata

SEQ ID NO: 242650 - DNA, 25 bp, Probe sequence
gatatacgttagggtatttgtttca

SEQ ID NO: 242651 - DNA, 25 bp, Probe sequence
gttagttctctaagcggtggtgaac

SEQ ID NO: 242652 - DNA, 25 bp, Probe sequence
gtcaatatttctgagcttagaagtt

SEQ ID NO: 242653 - DNA, 25 bp, Probe sequence
gtcatagtcaatatttctgagctta

SEQ ID NO: 242654 - DNA, 25 bp, Probe sequence
gtcggcctagatttagatatcaaga

SEQ ID NO: 242655 - DNA, 25 bp, Probe sequence
gtcgtaacgcatgatttagagcttg

SEQ ID NO: 242656 - DNA, 25 bp, Probe sequence
gtggcgctggaaaatctactttact

SEQ ID NO: 242657 - DNA, 25 bp, Probe sequence
gggttcgaagatgtatcacaaggaa

SEQ ID NO: 242658 - DNA, 25 bp, Probe sequence
ggaaaatcatatgctttagttggag

SEQ ID NO: 242659 - DNA, 25 bp, Probe sequence
ggcgctggaaaatctactttactta

SEQ ID NO: 242660 - DNA, 25 bp, Probe sequence
tgtttcaaaattttgctttacttga

SEQ ID NO: 242661 - DNA, 25 bp, Probe sequence
tgatttattattgaagctacttgat

SEQ ID NO: 242662 - DNA, 25 bp, Probe sequence
tctctaagcggtggtgaacaacaaa

SEQ ID NO: 242663 - DNA, 25 bp, Probe sequence
tcattttagctgatgaacctactgg

SEQ ID NO: 242664 - DNA, 25 bp, Probe sequence
tagacggatgtaactttaattttga

SEQ ID NO: 242665 - DNA, 25 bp, Probe sequence
ttttgctttacttgaaaatcaaaca

SEQ ID NO: 242666 - DNA, 25 bp, Probe sequence
ttagttggagaaagtggcgctggaa

SEQ ID NO: 242667 - DNA, 25 bp, Probe sequence
ttgaagctacttgatgaaaataaaa

SEQ ID NO: 242668 - DNA, 25 bp, Probe sequence
attgataatcatttagacaattcta

SEQ ID NO: 242669 - DNA, 25 bp, Probe sequence
atgaattgactagtgtccatatgga

SEQ ID NO: 242670 - DNA, 25 bp, Probe sequence
atggaaaatgaaaagctggttgaag

SEQ ID NO: 242671 - DNA, 25 bp, Probe sequence
aggcaatattgtaattactaaaact

SEQ ID NO: 242672 - DNA, 25 bp, Probe sequence
agacaattctaaaatacgtgaagta

SEQ ID NO: 242673 - DNA, 25 bp, Probe sequence
acgttataattatttgttgtcagag

SEQ ID NO: 242674 - DNA, 25 bp, Probe sequence
aaattaaagcagcacagatgatatt

SEQ ID NO: 242675 - DNA, 25 bp, Probe sequence
aaagcagcacagatgatattagatg

SEQ ID NO: 242676 - DNA, 25 bp, Probe sequence
aaaaatgtaggtggatggtttcata

SEQ ID NO: 242677 - DNA, 25 bp, Probe sequence
aagtatgatgaaagaagagcgttat

SEQ ID NO: 242678 - DNA, 25 bp, Probe sequence
aatgatttagcacaacgttataatt

SEQ ID NO: 242679 - DNA, 25 bp, Probe sequence
aattatacgcttaagttattcaatc

SEQ ID NO: 242680 - DNA, 25 bp, Probe sequence
gcttaagttattcaatcaagttttt

SEQ ID NO: 242681 - DNA, 25 bp, Probe sequence
gcagcacagatgatattagatgatt

SEQ ID NO: 242682 - DNA, 25 bp, Probe sequence
gaattgactagtgtccatatggaaa

SEQ ID NO: 242683 - DNA, 25 bp, Probe sequence
gaatttaatgatttagcacaacgtt

SEQ ID NO: 242684 - DNA, 25 bp, Probe sequence
gaagtaatgacgatagataacaatg

SEQ ID NO: 242685 - DNA, 25 bp, Probe sequence
gaaacaggcaatattgtaattacta

SEQ ID NO: 242686 - DNA, 25 bp, Probe sequence
gactagtgtccatatggaaaatgaa

SEQ ID NO: 242687 - DNA, 25 bp, Probe sequence
gagaagcaagaaacaggcaatattg

SEQ ID NO: 242688 - DNA, 25 bp, Probe sequence
gagtgtcatgtatgaaattaaaact

SEQ ID NO: 242689 - DNA, 25 bp, Probe sequence
gataacaatgatgaacagttcttta

SEQ ID NO: 242690 - DNA, 25 bp, Probe sequence
gatagagaagatggttatacattat

SEQ ID NO: 242691 - DNA, 25 bp, Probe sequence
gatttagcacaacgttataattatt

SEQ ID NO: 242692 - DNA, 25 bp, Probe sequence
gttaatgaattgactagtgtccata

SEQ ID NO: 242693 - DNA, 25 bp, Probe sequence
gtaggtggatggtttcataaagaga

SEQ ID NO: 242694 - DNA, 25 bp, Probe sequence
ggatggtttcataaagagaagcaag

SEQ ID NO: 242695 - DNA, 25 bp, Probe sequence
tgaaaagctggttgaagaatttaat

SEQ ID NO: 242696 - DNA, 25 bp, Probe sequence
taattatttgttgtcagagaatgaa

SEQ ID NO: 242697 - DNA, 25 bp, Probe sequence
taaagaactaaattatacgcttaag

SEQ ID NO: 242698 - DNA, 25 bp, Probe sequence
tacgcttaagttattcaatcaagtt

SEQ ID NO: 242699 - DNA, 25 bp, Probe sequence
tattcaatcaagtttttaaaatcat

SEQ ID NO: 242700 - DNA, 25 bp, Probe sequence
ttatacgcttaagttattcaatcaa

SEQ ID NO: 242701 - DNA, 25 bp, Probe sequence
ttaagaagaaatatcaagcacaaga

SEQ ID NO: 242702 - DNA, 25 bp, Probe sequence
attaaggcgatttacagctactgaa

SEQ ID NO: 242703 - DNA, 25 bp, Probe sequence
atatctagaaatatcaacttcttca

SEQ ID NO: 242704 - DNA, 25 bp, Probe sequence
ataatcttactatcaataaaatcaa

SEQ ID NO: 242705 - DNA, 25 bp, Probe sequence
atgacaggagagacagttgtatata

SEQ ID NO: 242706 - DNA, 25 bp, Probe sequence
agagttcacatttgacgctgagaaa

SEQ ID NO: 242707 - DNA, 25 bp, Probe sequence
agagcaagatactaatacattacgt

SEQ ID NO: 242708 - DNA, 25 bp, Probe sequence
acctaaatcttatcgtatgactgat

SEQ ID NO: 242709 - DNA, 25 bp, Probe sequence
aaagattacgacccacaattagaga

SEQ ID NO: 242710 - DNA, 25 bp, Probe sequence
aaacaacttgaactgaattgggaat

SEQ ID NO: 242711 - DNA, 25 bp, Probe sequence
aacaatacaaacatacaggctattt

SEQ ID NO: 242712 - DNA, 25 bp, Probe sequence
aagatgttgaatttaaccattagat

SEQ ID NO: 242713 - DNA, 25 bp, Probe sequence
aagtaattatagtccagaaacacgt

SEQ ID NO: 242714 - DNA, 25 bp, Probe sequence
aatcgtttagatatacctaaatctt

SEQ ID NO: 242715 - DNA, 25 bp, Probe sequence
aatacattacgtttgtcttttgatg

SEQ ID NO: 242716 - DNA, 25 bp, Probe sequence
caaacgacaacctcaaatgtccaag

SEQ ID NO: 242717 - DNA, 25 bp, Probe sequence
caacctcaaatgtccaagatagata

SEQ ID NO: 242718 - DNA, 25 bp, Probe sequence
gaatttagttccattaaggcgattt

SEQ ID NO: 242719 - DNA, 25 bp, Probe sequence
gcattcataacaaacgacaacctca

SEQ ID NO: 242720 - DNA, 25 bp, Probe sequence
gcaacctcaaaaagattacgaccca

SEQ ID NO: 242721 - DNA, 25 bp, Probe sequence
gaattaggttctatatttaataatc

SEQ ID NO: 242722 - DNA, 25 bp, Probe sequence
gaatccataagcgagaacaatatct

SEQ ID NO: 242723 - DNA, 25 bp, Probe sequence
gaacggtcatatgaaaagcaacctc

SEQ ID NO: 242724 - DNA, 25 bp, Probe sequence
gaaagattcgttttattcaatcatt

SEQ ID NO: 242725 - DNA, 25 bp, Probe sequence
gaaatgactaggcttaaatctacat

SEQ ID NO: 242726 - DNA, 25 bp, Probe sequence
gacaatatgtgaggcgtgaaaagac

SEQ ID NO: 242727 - DNA, 25 bp, Probe sequence
gagaaacgcattcataacaaacgac

SEQ ID NO: 242728 - DNA, 25 bp, Probe sequence
gtgaaaagacgcctaaatggttaga

SEQ ID NO: 242729 - DNA, 25 bp, Probe sequence
ggatagagttcacatttgacgctga

SEQ ID NO: 242730 - DNA, 25 bp, Probe sequence
ggcgatttacagctactgaaattaa

SEQ ID NO: 242731 - DNA, 25 bp, Probe sequence
tcaacttcttcaaatttaaaacaca

SEQ ID NO: 242732 - DNA, 25 bp, Probe sequence
tacgacccacaattagagaaagaac

SEQ ID NO: 242733 - DNA, 25 bp, Probe sequence
tacgtttgtcttttgatgaattaaa

SEQ ID NO: 242734 - DNA, 25 bp, Probe sequence
tagtccagaaacacgtaatattaat

SEQ ID NO: 242735 - DNA, 25 bp, Probe sequence
taggcttaaatctacatattctaaa

SEQ ID NO: 242736 - DNA, 25 bp, Probe sequence
tttaattaaaggagatgcacgtttt

SEQ ID NO: 242737 - DNA, 25 bp, Probe sequence
agtgtttctaaatgggaaagtgcca

SEQ ID NO: 242738 - DNA, 25 bp, Probe sequence
agtgccaaaaactatccttccttag

SEQ ID NO: 242739 - DNA, 25 bp, Probe sequence
agatattttgattgctatgagcgat

SEQ ID NO: 242740 - DNA, 25 bp, Probe sequence
accttccatagttgattttctttat

SEQ ID NO: 242741 - DNA, 25 bp, Probe sequence
aaactatccttccttagatattttg

SEQ ID NO: 242742 - DNA, 25 bp, Probe sequence
caaaaactatccttccttagatatt

SEQ ID NO: 242743 - DNA, 25 bp, Probe sequence
ctatccttccttagatattttgatt

SEQ ID NO: 242744 - DNA, 25 bp, Probe sequence
cggatttttagtttgggccattcat

SEQ ID NO: 242745 - DNA, 25 bp, Probe sequence
tcctgttgccggatttttagtttgg

SEQ ID NO: 242746 - DNA, 25 bp, Probe sequence
gccaatatattaaaggtttccagac

SEQ ID NO: 242747 - DNA, 25 bp, Probe sequence
gaaagtgccaaaaactatccttcct

SEQ ID NO: 242748 - DNA, 25 bp, Probe sequence
gatggtctcaagaggaattagccaa

SEQ ID NO: 242749 - DNA, 25 bp, Probe sequence
gatttttagtttgggccattcattc

SEQ ID NO: 242750 - DNA, 25 bp, Probe sequence
gattttctttatgatttttggtggc

SEQ ID NO: 242751 - DNA, 25 bp, Probe sequence
gttgattttctttatgatttttggt

SEQ ID NO: 242752 - DNA, 25 bp, Probe sequence
gtttgggccattcattcgttcatgg

SEQ ID NO: 242753 - DNA, 25 bp, Probe sequence
gtttccagacaaagtgtttctaaat

SEQ ID NO: 242754 - DNA, 25 bp, Probe sequence
gtctcaagaggaattagccaatata

SEQ ID NO: 242755 - DNA, 25 bp, Probe sequence
gtgccaaaaactatccttccttaga

SEQ ID NO: 242756 - DNA, 25 bp, Probe sequence
gggccattcattcgttcatgggttg

SEQ ID NO: 242757 - DNA, 25 bp, Probe sequence
ggaatctctttagagcatttaatta

SEQ ID NO: 242758 - DNA, 25 bp, Probe sequence
ggccattcattcgttcatgggttga

SEQ ID NO: 242759 - DNA, 25 bp, Probe sequence
tgatttttggtggcttttctttcct

SEQ ID NO: 242760 - DNA, 25 bp, Probe sequence
tgccaaaaactatccttccttagat

SEQ ID NO: 242761 - DNA, 25 bp, Probe sequence
tctttcctgttgccggatttttagt

SEQ ID NO: 242762 - DNA, 25 bp, Probe sequence
tatgatttttggtggcttttctttc

SEQ ID NO: 242763 - DNA, 25 bp, Probe sequence
ttttagtttgggccattcattcgtt

SEQ ID NO: 242764 - DNA, 25 bp, Probe sequence
ttttgattgctatgagcgatttatt

SEQ ID NO: 242765 - DNA, 25 bp, Probe sequence
ttagtttgggccattcattcgttca

SEQ ID NO: 242766 - DNA, 25 bp, Probe sequence
ttctttatgatttttggtggctttt

SEQ ID NO: 242767 - DNA, 25 bp, Probe sequence
ttctttcctgttgccggatttttag

SEQ ID NO: 242768 - DNA, 25 bp, Probe sequence
ttgccggatttttagtttgggccat

SEQ ID NO: 242769 - DNA, 25 bp, Probe sequence
ttgggccattcattcgttcatgggt

SEQ ID NO: 242770 - DNA, 25 bp, Probe sequence
atttcagttttatatatttcatcag

SEQ ID NO: 242771 - DNA, 25 bp, Probe sequence
atcatttgtttattcgtatttctat

SEQ ID NO: 242772 - DNA, 25 bp, Probe sequence
atgtattctttgttttcttcttcgt

SEQ ID NO: 242773 - DNA, 25 bp, Probe sequence
acatttttattcagctgtttttgac

SEQ ID NO: 242774 - DNA, 25 bp, Probe sequence
aatgatgttcgcgttctttggctat

SEQ ID NO: 242775 - DNA, 25 bp, Probe sequence
aattccagcttcattatctactgct

SEQ ID NO: 242776 - DNA, 25 bp, Probe sequence
catggtttggcttttgtatttgtta

SEQ ID NO: 242777 - DNA, 25 bp, Probe sequence
gcttcattatctactgctttaacta

SEQ ID NO: 242778 - DNA, 25 bp, Probe sequence
gcttggtctgtagtattcttggcaa

SEQ ID NO: 242779 - DNA, 25 bp, Probe sequence
gcaggtttcttcgcattgcattcaa

SEQ ID NO: 242780 - DNA, 25 bp, Probe sequence
gaattagtaaattgccatacctttt

SEQ ID NO: 242781 - DNA, 25 bp, Probe sequence
gacaatggcacatatttttagggcc

SEQ ID NO: 242782 - DNA, 25 bp, Probe sequence
gacgaaccagcatataatttaacaa

SEQ ID NO: 242783 - DNA, 25 bp, Probe sequence
gagaaacagtttttatgcatttgaa

SEQ ID NO: 242784 - DNA, 25 bp, Probe sequence
gattttggggcaggtttcttcgcat

SEQ ID NO: 242785 - DNA, 25 bp, Probe sequence
gattcgtaggtttctttccagagtc

SEQ ID NO: 242786 - DNA, 25 bp, Probe sequence
gttcgcgttctttggctatggaatt

SEQ ID NO: 242787 - DNA, 25 bp, Probe sequence
gttttcttcttcgtaggattcgtag

SEQ ID NO: 242788 - DNA, 25 bp, Probe sequence
gttatcgatctagattgggtgcagt

SEQ ID NO: 242789 - DNA, 25 bp, Probe sequence
gttatggttgtttttattttgctat

SEQ ID NO: 242790 - DNA, 25 bp, Probe sequence
gtatttctatcattacgcattcaaa

SEQ ID NO: 242791 - DNA, 25 bp, Probe sequence
gtcaatcaaatatttaggcacggta

SEQ ID NO: 242792 - DNA, 25 bp, Probe sequence
ggtttctttccagagtcaatcaaat

SEQ ID NO: 242793 - DNA, 25 bp, Probe sequence
tgggctggacattagtgattgtctt

SEQ ID NO: 242794 - DNA, 25 bp, Probe sequence
tgattgtctttattttaggtttact

SEQ ID NO: 242795 - DNA, 25 bp, Probe sequence
tgccataccttttatatccgtttgt

SEQ ID NO: 242796 - DNA, 25 bp, Probe sequence
tacttttattacttccatcgttaat

SEQ ID NO: 242797 - DNA, 25 bp, Probe sequence
taccaggttcaatagcactgattat

SEQ ID NO: 242798 - DNA, 25 bp, Probe sequence
tatcattattgcttctatagatttt

SEQ ID NO: 242799 - DNA, 25 bp, Probe sequence
tattctttgcattagcttcattgtt

SEQ ID NO: 242800 - DNA, 25 bp, Probe sequence
tattcttggcaattatttcagtttt

SEQ ID NO: 242801 - DNA, 25 bp, Probe sequence
ttagcttcattgttaacattcttta

SEQ ID NO: 242802 - DNA, 25 bp, Probe sequence
ttaagcccatttgcttggtctgtag

SEQ ID NO: 242803 - DNA, 25 bp, Probe sequence
ttaatcacttaatttcacgttattt

SEQ ID NO: 242804 - DNA, 25 bp, Probe sequence
aagggttaccctgaagcatatcgtt

SEQ ID NO: 242805 - DNA, 25 bp, Probe sequence
attggcactatattttcgcttgcat

SEQ ID NO: 242806 - DNA, 25 bp, Probe sequence
attccatacttatgtatccttgcca

SEQ ID NO: 242807 - DNA, 25 bp, Probe sequence
attgctatactgattgcgattctat

SEQ ID NO: 242808 - DNA, 25 bp, Probe sequence
attttcgcttgcatatactgtaata

SEQ ID NO: 242809 - DNA, 25 bp, Probe sequence
atctcctgaagtatttggggtctgg

SEQ ID NO: 242810 - DNA, 25 bp, Probe sequence
aggtgctttaacaattgctatactg

SEQ ID NO: 242811 - DNA, 25 bp, Probe sequence
agcgtattgatgtaccttacttttt

SEQ ID NO: 242812 - DNA, 25 bp, Probe sequence
agctgtcattattgtatctatttgt

SEQ ID NO: 242813 - DNA, 25 bp, Probe sequence
aactgtgacatttattgttgctaag

SEQ ID NO: 242814 - DNA, 25 bp, Probe sequence
aagatcgtgctttcaaaccattaat

SEQ ID NO: 242815 - DNA, 25 bp, Probe sequence
gcaaagcctttatttatggtttatt

SEQ ID NO: 242816 - DNA, 25 bp, Probe sequence
gaagcatatcgttcaggaatcgcat

SEQ ID NO: 242817 - DNA, 25 bp, Probe sequence
gaaattgcacatgtaattcttgctt

SEQ ID NO: 242818 - DNA, 25 bp, Probe sequence
gacttctcaggccaagaggctttga

SEQ ID NO: 242819 - DNA, 25 bp, Probe sequence
gagataaaaacctcatcctattatt

SEQ ID NO: 242820 - DNA, 25 bp, Probe sequence
gaggctttgagtatgggactgttag

SEQ ID NO: 242821 - DNA, 25 bp, Probe sequence
gattctgcgattagtattggtattg

SEQ ID NO: 242822 - DNA, 25 bp, Probe sequence
gtatccttgccacacatggttatgc

SEQ ID NO: 242823 - DNA, 25 bp, Probe sequence
gtatctatttgtttatcaactgtga

SEQ ID NO: 242824 - DNA, 25 bp, Probe sequence
gtaattcttgcttcagacttctcag

SEQ ID NO: 242825 - DNA, 25 bp, Probe sequence
gtgtgtttttattaatacctctgag

SEQ ID NO: 242826 - DNA, 25 bp, Probe sequence
gggtctggtcaggtacaagtttaca

SEQ ID NO: 242827 - DNA, 25 bp, Probe sequence
ggtattgtcgcacttattggcacta

SEQ ID NO: 242828 - DNA, 25 bp, Probe sequence
ggttttgtcatgatggcattattcc

SEQ ID NO: 242829 - DNA, 25 bp, Probe sequence
ggaatcgcattttcgtctaaacggt

SEQ ID NO: 242830 - DNA, 25 bp, Probe sequence
ggcagctattgcagcagtatctcca

SEQ ID NO: 242831 - DNA, 25 bp, Probe sequence
tcactactatatgcttattgatggc

SEQ ID NO: 242832 - DNA, 25 bp, Probe sequence
tattggcactggggtgtgtggcgcg

SEQ ID NO: 242833 - DNA, 25 bp, Probe sequence
taggctcaaagttaccatttttaga

SEQ ID NO: 242834 - DNA, 25 bp, Probe sequence
tattcacatttatcatcgcagttat

SEQ ID NO: 242835 - DNA, 25 bp, Probe sequence
ttactttttacttggttttgtcatg

SEQ ID NO: 242836 - DNA, 25 bp, Probe sequence
ttctatttttacaatatctcctgaa

SEQ ID NO: 242837 - DNA, 25 bp, Probe sequence
ttggagtcatcctttttagtatcgg

SEQ ID NO: 242838 - DNA, 25 bp, Probe sequence
ataacgtgattgcagttcctcttgc

SEQ ID NO: 242839 - DNA, 25 bp, Probe sequence
acgtcgatttcgcacttgaacggct

SEQ ID NO: 242840 - DNA, 25 bp, Probe sequence
agttcctcttgcagctggtatatta

SEQ ID NO: 242841 - DNA, 25 bp, Probe sequence
acccacagacggaatcattgttcga

SEQ ID NO: 242842 - DNA, 25 bp, Probe sequence
accgtattagtcattgcttgtccac

SEQ ID NO: 242843 - DNA, 25 bp, Probe sequence
acttcagtggttcatccacacatac

SEQ ID NO: 242844 - DNA, 25 bp, Probe sequence
aaatggctacctatctcaagttatg

SEQ ID NO: 242845 - DNA, 25 bp, Probe sequence
aatggcagaacttttacctaatact

SEQ ID NO: 242846 - DNA, 25 bp, Probe sequence
aatatttcatatgctactcctcaag

SEQ ID NO: 242847 - DNA, 25 bp, Probe sequence
caaaagctgaactcctctctgataa

SEQ ID NO: 242848 - DNA, 25 bp, Probe sequence
catccacttgccactggtattgttg

SEQ ID NO: 242849 - DNA, 25 bp, Probe sequence
cgttctacctctataggcgcacata

SEQ ID NO: 242850 - DNA, 25 bp, Probe sequence
gaatcgggggatgtcatactcgtta

SEQ ID NO: 242851 - DNA, 25 bp, Probe sequence
gcgccaagccttattagagcagata

SEQ ID NO: 242852 - DNA, 25 bp, Probe sequence
gctgtgggtgcaatacttatgtctt

SEQ ID NO: 242853 - DNA, 25 bp, Probe sequence
gcttgtccacatgcattaggcttgg

SEQ ID NO: 242854 - DNA, 25 bp, Probe sequence
gcaggcgaaagtatacccacagacg

SEQ ID NO: 242855 - DNA, 25 bp, Probe sequence
gaaacattacgccagtcatgcttac

SEQ ID NO: 242856 - DNA, 25 bp, Probe sequence
gactgctacgggtgaaaatggctac

SEQ ID NO: 242857 - DNA, 25 bp, Probe sequence
gatgacgcttgttgctctaggtatt

SEQ ID NO: 242858 - DNA, 25 bp, Probe sequence
gtattggcctgatttcatttatcgt

SEQ ID NO: 242859 - DNA, 25 bp, Probe sequence
gtaattctaatcatccacttgccac

SEQ ID NO: 242860 - DNA, 25 bp, Probe sequence
gtcgcaggttatttgttttactttg

SEQ ID NO: 242861 - DNA, 25 bp, Probe sequence
ggtggggcgcaggatataacgtgat

SEQ ID NO: 242862 - DNA, 25 bp, Probe sequence
ggtatggcaattggcgcagggacag

SEQ ID NO: 242863 - DNA, 25 bp, Probe sequence
ggtattagtgatgtccacgcgcaat

SEQ ID NO: 242864 - DNA, 25 bp, Probe sequence
ggtatcaatgatgcgccaagcctta

SEQ ID NO: 242865 - DNA, 25 bp, Probe sequence
ggcttggcaatacctttagttacag

SEQ ID NO: 242866 - DNA, 25 bp, Probe sequence
tccacgcgcaattgatgcccgaaga

SEQ ID NO: 242867 - DNA, 25 bp, Probe sequence
tacccctatcccgtatatgttacac

SEQ ID NO: 242868 - DNA, 25 bp, Probe sequence
ttacgaatctcgctcaacaagggaa

SEQ ID NO: 242869 - DNA, 25 bp, Probe sequence
ttagttacagcacgttctacctcta

SEQ ID NO: 242870 - DNA, 25 bp, Probe sequence
tattatcaattttttgtccctttca

SEQ ID NO: 242871 - DNA, 25 bp, Probe sequence
ttctttgatttttgcgataccgatt

SEQ ID NO: 242872 - DNA, 25 bp, Probe sequence
atattgcttcagaaggcggccattt

SEQ ID NO: 242873 - DNA, 25 bp, Probe sequence
atctctggaacctggacaaaaagcc

SEQ ID NO: 242874 - DNA, 25 bp, Probe sequence
atatccacggaacgcaatttaaagt

SEQ ID NO: 242875 - DNA, 25 bp, Probe sequence
atcagtggatgggaagaaaccttca

SEQ ID NO: 242876 - DNA, 25 bp, Probe sequence
atggttcctaatgatacttttgcag

SEQ ID NO: 242877 - DNA, 25 bp, Probe sequence
aggtatggacgataatgttactatt

SEQ ID NO: 242878 - DNA, 25 bp, Probe sequence
agaaattaatttagctccttcagca

SEQ ID NO: 242879 - DNA, 25 bp, Probe sequence
acaacatttcattggcatgggttag

SEQ ID NO: 242880 - DNA, 25 bp, Probe sequence
aaatggctccaatgctcgggattta

SEQ ID NO: 242881 - DNA, 25 bp, Probe sequence
aagacgttatatctctggaacctgg

SEQ ID NO: 242882 - DNA, 25 bp, Probe sequence
aatggcaaaaaattcgatcctaaca

SEQ ID NO: 242883 - DNA, 25 bp, Probe sequence
aatttagctccttcagcaagaaaag

SEQ ID NO: 242884 - DNA, 25 bp, Probe sequence
caatggaaatttacttgggccaact

SEQ ID NO: 242885 - DNA, 25 bp, Probe sequence
ccctccccaaatacagctaaacaag

SEQ ID NO: 242886 - DNA, 25 bp, Probe sequence
gctccaatgctcgggatttaaatct

SEQ ID NO: 242887 - DNA, 25 bp, Probe sequence
gctacattatggtatcatccccacc

SEQ ID NO: 242888 - DNA, 25 bp, Probe sequence
gcacccgttccatatccacggaacg

SEQ ID NO: 242889 - DNA, 25 bp, Probe sequence
gaaggcggccatttagaaaagacta

SEQ ID NO: 242890 - DNA, 25 bp, Probe sequence
gaaggtaagcacaacatgatggaca

SEQ ID NO: 242891 - DNA, 25 bp, Probe sequence
gaggttaaacaagaggctgctacat

SEQ ID NO: 242892 - DNA, 25 bp, Probe sequence
gaggctgctacattatggtatcatc

SEQ ID NO: 242893 - DNA, 25 bp, Probe sequence
gatggtactcaaggtgatacagtcc

SEQ ID NO: 242894 - DNA, 25 bp, Probe sequence
gatcctaacagaatagatttcacac

SEQ ID NO: 242895 - DNA, 25 bp, Probe sequence
gttccattgtcacatacttgagcat

SEQ ID NO: 242896 - DNA, 25 bp, Probe sequence
gtttgagacttttaaatggctccaa

SEQ ID NO: 242897 - DNA, 25 bp, Probe sequence
gtactaacaaagacactactccaaa

SEQ ID NO: 242898 - DNA, 25 bp, Probe sequence
ggtgatacagtccttgtgaatggga

SEQ ID NO: 242899 - DNA, 25 bp, Probe sequence
ggtaatttctctaacactttaggat

SEQ ID NO: 242900 - DNA, 25 bp, Probe sequence
ggaaaagtggatggaggcccttctc

SEQ ID NO: 242901 - DNA, 25 bp, Probe sequence
ggcccttctcaagttataaaaccag

SEQ ID NO: 242902 - DNA, 25 bp, Probe sequence
tggatggaggcccttctcaagttat

SEQ ID NO: 242903 - DNA, 25 bp, Probe sequence
tgagtggtatgaagcacccgttcca

SEQ ID NO: 242904 - DNA, 25 bp, Probe sequence
tactgggacatacatgttccattgt

SEQ ID NO: 242905 - DNA, 25 bp, Probe sequence
ttttctataatgtttatggttccta

SEQ ID NO: 242906 - DNA, 25 bp, Probe sequence
attcaatcaagtacgttgacgactt

SEQ ID NO: 242907 - DNA, 25 bp, Probe sequence
atgttgcgagtgcaagtgtacttga

SEQ ID NO: 242908 - DNA, 25 bp, Probe sequence
aatatagtgatatcgctactcatgc

SEQ ID NO: 242909 - DNA, 25 bp, Probe sequence
catcggtctaggtcgttttggaggt

SEQ ID NO: 242910 - DNA, 25 bp, Probe sequence
gctaaagcacaaaatgattatcatg

SEQ ID NO: 242911 - DNA, 25 bp, Probe sequence
gaatatgtagtcatcggtctaggtc

SEQ ID NO: 242912 - DNA, 25 bp, Probe sequence
gaaaagatggcggggcagtctatca

SEQ ID NO: 242913 - DNA, 25 bp, Probe sequence
gacatggatgtaatggccatcgacc

SEQ ID NO: 242914 - DNA, 25 bp, Probe sequence
gagttggcagacgagcattctattg

SEQ ID NO: 242915 - DNA, 25 bp, Probe sequence
gagttgaatgcattagacatggatg

SEQ ID NO: 242916 - DNA, 25 bp, Probe sequence
gagttcatcatttcaccaaatccaa

SEQ ID NO: 242917 - DNA, 25 bp, Probe sequence
gaggcaaagagttcatcatttcacc

SEQ ID NO: 242918 - DNA, 25 bp, Probe sequence
gatcatgtcattgtggcaattggtg

SEQ ID NO: 242919 - DNA, 25 bp, Probe sequence
gattatcttgagttggcagacgagc

SEQ ID NO: 242920 - DNA, 25 bp, Probe sequence
gttgtgcaccctgagcgtgatatgg

SEQ ID NO: 242921 - DNA, 25 bp, Probe sequence
gttttggaggtagtatcgttcgtga

SEQ ID NO: 242922 - DNA, 25 bp, Probe sequence
gtttaggtatccgtaactttgatca

SEQ ID NO: 242923 - DNA, 25 bp, Probe sequence
gtattgcgcataatgttgcgagtgc

SEQ ID NO: 242924 - DNA, 25 bp, Probe sequence
gtatcgttcgtgagttgaatgcatt

SEQ ID NO: 242925 - DNA, 25 bp, Probe sequence
gtagacgtattgcgcataatgttgc

SEQ ID NO: 242926 - DNA, 25 bp, Probe sequence
gtagtcatcggtctaggtcgttttg

SEQ ID NO: 242927 - DNA, 25 bp, Probe sequence
gtaactttgatcatgtcattgtggc

SEQ ID NO: 242928 - DNA, 25 bp, Probe sequence
gtaatggccatcgaccatgatgaaa

SEQ ID NO: 242929 - DNA, 25 bp, Probe sequence
gtgatatgggtagacgtattgcgca

SEQ ID NO: 242930 - DNA, 25 bp, Probe sequence
gtgatatcgctactcatgcggttgt

SEQ ID NO: 242931 - DNA, 25 bp, Probe sequence
gtgtacttgattatcttgagttggc

SEQ ID NO: 242932 - DNA, 25 bp, Probe sequence
ggggcagtctatcattgatttagat

SEQ ID NO: 242933 - DNA, 25 bp, Probe sequence
ggtatccgtaactttgatcatgtca

SEQ ID NO: 242934 - DNA, 25 bp, Probe sequence
ggagcagatacggttgtgcaccctg

SEQ ID NO: 242935 - DNA, 25 bp, Probe sequence
ggaggtagtatcgttcgtgagttga

SEQ ID NO: 242936 - DNA, 25 bp, Probe sequence
ggcagacgagcattctattgtagaa

SEQ ID NO: 242937 - DNA, 25 bp, Probe sequence
tggcggggcagtctatcattgattt

SEQ ID NO: 242938 - DNA, 25 bp, Probe sequence
tcgctactcatgcggttgttgcaga

SEQ ID NO: 242939 - DNA, 25 bp, Probe sequence
taacattattgcaattaaacgaggc

SEQ ID NO: 242940 - DNA, 25 bp, Probe sequence
attagcatctagtgtcttgcttgca

SEQ ID NO: 242941 - DNA, 25 bp, Probe sequence
atctagtgtcttgcttgcaggatgt

SEQ ID NO: 242942 - DNA, 25 bp, Probe sequence
atcgcagtagtattagcatctagtg

SEQ ID NO: 242943 - DNA, 25 bp, Probe sequence
agaaagcaaaaagtcacgttgataa

SEQ ID NO: 242944 - DNA, 25 bp, Probe sequence
aaattaactgaagatgtcaatagta

SEQ ID NO: 242945 - DNA, 25 bp, Probe sequence
aaaatgccgatgatcgtctaaagga

SEQ ID NO: 242946 - DNA, 25 bp, Probe sequence
aacaatcgcagtagtattagcatct

SEQ ID NO: 242947 - DNA, 25 bp, Probe sequence
aactgttggtaagaaaattgctgaa

SEQ ID NO: 242948 - DNA, 25 bp, Probe sequence
aagatacagcagttcgcggtaaagc

SEQ ID NO: 242949 - DNA, 25 bp, Probe sequence
aaggcatatttaaagcaagtggata

SEQ ID NO: 242950 - DNA, 25 bp, Probe sequence
cagcagttcgcggtaaagcagtaaa

SEQ ID NO: 242951 - DNA, 25 bp, Probe sequence
gccgatgatcgtctaaaggaatttg

SEQ ID NO: 242952 - DNA, 25 bp, Probe sequence
gcttgcaggatgtactacggataaa

SEQ ID NO: 242953 - DNA, 25 bp, Probe sequence
gcatataaaaaggctgtaaactcag

SEQ ID NO: 242954 - DNA, 25 bp, Probe sequence
gcatctagtgtcttgcttgcaggat

SEQ ID NO: 242955 - DNA, 25 bp, Probe sequence
gcagtagtattagcatctagtgtct

SEQ ID NO: 242956 - DNA, 25 bp, Probe sequence
gcaagacgttgatcaatttaaataa

SEQ ID NO: 242957 - DNA, 25 bp, Probe sequence
gaaaagcaagacgttgatcaattta

SEQ ID NO: 242958 - DNA, 25 bp, Probe sequence
gaaatttggaaaaacaatcgcagta

SEQ ID NO: 242959 - DNA, 25 bp, Probe sequence
gacgcaattaagaagtctgaacaag

SEQ ID NO: 242960 - DNA, 25 bp, Probe sequence
gatgatcgtctaaaggaatttgaaa

SEQ ID NO: 242961 - DNA, 25 bp, Probe sequence
gatgaagaaccaattaaaactgttg

SEQ ID NO: 242962 - DNA, 25 bp, Probe sequence
gatacagcagttcgcggtaaagcag

SEQ ID NO: 242963 - DNA, 25 bp, Probe sequence
gtagtattagcatctagtgtcttgc

SEQ ID NO: 242964 - DNA, 25 bp, Probe sequence
gtcttgcttgcaggatgtactacgg

SEQ ID NO: 242965 - DNA, 25 bp, Probe sequence
gtctgaacaagactttaagaaagca

SEQ ID NO: 242966 - DNA, 25 bp, Probe sequence
gtgtcttgcttgcaggatgtactac

SEQ ID NO: 242967 - DNA, 25 bp, Probe sequence
tcttgcttgcaggatgtactacgga

SEQ ID NO: 242968 - DNA, 25 bp, Probe sequence
tacagcagttcgcggtaaagcagta

SEQ ID NO: 242969 - DNA, 25 bp, Probe sequence
tagcatctagtgtcttgcttgcagg

SEQ ID NO: 242970 - DNA, 25 bp, Probe sequence
tagtaaagatacagcagttcgcggt

SEQ ID NO: 242971 - DNA, 25 bp, Probe sequence
tagtgtcttgcttgcaggatgtact

SEQ ID NO: 242972 - DNA, 25 bp, Probe sequence
ttaattaaaaatgccgatgatcgtc

SEQ ID NO: 242973 - DNA, 25 bp, Probe sequence
ttgcttgcaggatgtactacggata

SEQ ID NO: 242974 - DNA, 25 bp, Probe sequence
gggttatgccggtgttggtatttca

SEQ ID NO: 242975 - DNA, 25 bp, Probe sequence
attgcagccacaatttcagcagcgt

SEQ ID NO: 242976 - DNA, 25 bp, Probe sequence
atatcagcgattgtactaactgtat

SEQ ID NO: 242977 - DNA, 25 bp, Probe sequence
atatgccggtgctgcgcaatttatt

SEQ ID NO: 242978 - DNA, 25 bp, Probe sequence
atcgtaaattcaagaatgttccttt

SEQ ID NO: 242979 - DNA, 25 bp, Probe sequence
atgatcgttggatgcatggtcttaa

SEQ ID NO: 242980 - DNA, 25 bp, Probe sequence
atgttccttttaagtatgtcgcttg

SEQ ID NO: 242981 - DNA, 25 bp, Probe sequence
atgtcttgttatatatgccggtgct

SEQ ID NO: 242982 - DNA, 25 bp, Probe sequence
agcagcgttaggagtgatgatggaa

SEQ ID NO: 242983 - DNA, 25 bp, Probe sequence
acattattgggttatgccggtgttg

SEQ ID NO: 242984 - DNA, 25 bp, Probe sequence
aatttgaatcaattactaaatcgcg

SEQ ID NO: 242985 - DNA, 25 bp, Probe sequence
aatttattatgtgcgcgttgtttat

SEQ ID NO: 242986 - DNA, 25 bp, Probe sequence
ccgtgttggattaggttcattagta

SEQ ID NO: 242987 - DNA, 25 bp, Probe sequence
gccacaatttcagcagcgttaggag

SEQ ID NO: 242988 - DNA, 25 bp, Probe sequence
gccggtgttggtatttcatttggta

SEQ ID NO: 242989 - DNA, 25 bp, Probe sequence
gccgtcatagtaatgatgttatcgc

SEQ ID NO: 242990 - DNA, 25 bp, Probe sequence
gccggtgctgcgcaatttattatgt

SEQ ID NO: 242991 - DNA, 25 bp, Probe sequence
gcgcgttgtttatagcaggtacacc

SEQ ID NO: 242992 - DNA, 25 bp, Probe sequence
gctatcacggctatgtttatctttt

SEQ ID NO: 242993 - DNA, 25 bp, Probe sequence
gcaccaaacttcaagacatatgggt

SEQ ID NO: 242994 - DNA, 25 bp, Probe sequence
gacatatgggttttggaaccgtgtt

SEQ ID NO: 242995 - DNA, 25 bp, Probe sequence
gattgtactaactgtatttatcgta

SEQ ID NO: 242996 - DNA, 25 bp, Probe sequence
gttatcgctaagtatgtttatgcct

SEQ ID NO: 242997 - DNA, 25 bp, Probe sequence
gttatatatgccggtgctgcgcaat

SEQ ID NO: 242998 - DNA, 25 bp, Probe sequence
gtatgtttatgccttcatatctagc

SEQ ID NO: 242999 - DNA, 25 bp, Probe sequence
gtcgcttgcaccaaacttcaagaca

SEQ ID NO: 243000 - DNA, 25 bp, Probe sequence
gtcgccattacaccttatttaaaag

SEQ ID NO: 243001 - DNA, 25 bp, Probe sequence
ggttcattagtaactgacgaaacgt

SEQ ID NO: 243002 - DNA, 25 bp, Probe sequence
ggagaagctatcaatgatcgttgga

SEQ ID NO: 243003 - DNA, 25 bp, Probe sequence
tacatagtactcattattgccgtca

SEQ ID NO: 243004 - DNA, 25 bp, Probe sequence
tagattttgctatcacggctatgtt

SEQ ID NO: 243005 - DNA, 25 bp, Probe sequence
tagtactcattattgccgtcatagt

SEQ ID NO: 243006 - DNA, 25 bp, Probe sequence
tatgtcgcttgcaccaaacttcaag

SEQ ID NO: 243007 - DNA, 25 bp, Probe sequence
tatgccttcatatctagcaatatta

SEQ ID NO: 243008 - DNA, 25 bp, Probe sequence
attgcaattatgccatcattttatt

SEQ ID NO: 243009 - DNA, 25 bp, Probe sequence
attttatttatggttctttggtgag

SEQ ID NO: 243010 - DNA, 25 bp, Probe sequence
atttcatggttttatgctggaactg

SEQ ID NO: 243011 - DNA, 25 bp, Probe sequence
atatcgtgcaatactttttgatgat

SEQ ID NO: 243012 - DNA, 25 bp, Probe sequence
atgtatttactattgctattgtgac

SEQ ID NO: 243013 - DNA, 25 bp, Probe sequence
cacgtgcatttggtcccagtggtgt

SEQ ID NO: 243014 - DNA, 25 bp, Probe sequence
actagtatttcttgcgttgttcttg

SEQ ID NO: 243015 - DNA, 25 bp, Probe sequence
aatacccattatttcacgtgcattt

SEQ ID NO: 243016 - DNA, 25 bp, Probe sequence
aattgcgattggtatagtagtttat

SEQ ID NO: 243017 - DNA, 25 bp, Probe sequence
cttgcgttgttcttggtttagtagg

SEQ ID NO: 243018 - DNA, 25 bp, Probe sequence
cctacaatgtacgctacgctgctat

SEQ ID NO: 243019 - DNA, 25 bp, Probe sequence
gcgatgtatatggtcgtaattacta

SEQ ID NO: 243020 - DNA, 25 bp, Probe sequence
gcatttaatattttaacggtcgcaa

SEQ ID NO: 243021 - DNA, 25 bp, Probe sequence
gcagttttgggatatctttgtcagt

SEQ ID NO: 243022 - DNA, 25 bp, Probe sequence
gcaattgtttcgttcgtcattagca

SEQ ID NO: 243023 - DNA, 25 bp, Probe sequence
gaggaattcgcatcaactgtcccat

SEQ ID NO: 243024 - DNA, 25 bp, Probe sequence
gatgattgcaagtgttggcgttcag

SEQ ID NO: 243025 - DNA, 25 bp, Probe sequence
gatgaccattttagcgatacttgta

SEQ ID NO: 243026 - DNA, 25 bp, Probe sequence
gatacattagctttgtttcggttaa

SEQ ID NO: 243027 - DNA, 25 bp, Probe sequence
gatacttgtattaatcattccttta

SEQ ID NO: 243028 - DNA, 25 bp, Probe sequence
gattactatcttattttcctactac

SEQ ID NO: 243029 - DNA, 25 bp, Probe sequence
gtttcggttaattggatacacgtct

SEQ ID NO: 243030 - DNA, 25 bp, Probe sequence
gtaagtacgattcaatgtgtcattg

SEQ ID NO: 243031 - DNA, 25 bp, Probe sequence
gtgttggcgttcagttatattttaa

SEQ ID NO: 243032 - DNA, 25 bp, Probe sequence
gtgggtattgtttcattttctttca

SEQ ID NO: 243033 - DNA, 25 bp, Probe sequence
ggatacacgtctggcaattgtttcg

SEQ ID NO: 243034 - DNA, 25 bp, Probe sequence
tgtacgctacgctgctattaattgc

SEQ ID NO: 243035 - DNA, 25 bp, Probe sequence
tgatcttgtaatgattccgcgtatt

SEQ ID NO: 243036 - DNA, 25 bp, Probe sequence
tgatgtttattgtgcttggtgtggt

SEQ ID NO: 243037 - DNA, 25 bp, Probe sequence
tcaactgtcccattgatgaccattt

SEQ ID NO: 243038 - DNA, 25 bp, Probe sequence
taacaatacctatggtctttggttt

SEQ ID NO: 243039 - DNA, 25 bp, Probe sequence
tagcgttaacagtttttgcgatgta

SEQ ID NO: 243040 - DNA, 25 bp, Probe sequence
ttggtatcttttctaacgcatttaa

SEQ ID NO: 243041 - DNA, 25 bp, Probe sequence
ttggtgtggtcaatcattatttgcc

SEQ ID NO: 243042 - DNA, 25 bp, Probe sequence
atggctcctaagttacaagcccaat

SEQ ID NO: 243043 - DNA, 25 bp, Probe sequence
atggctggtgacgatccaactcgtt

SEQ ID NO: 243044 - DNA, 25 bp, Probe sequence
agcacctgcaattttcgttattcaa

SEQ ID NO: 243045 - DNA, 25 bp, Probe sequence
acaagcccaattcgatgcagtaaaa

SEQ ID NO: 243046 - DNA, 25 bp, Probe sequence
aaatgcagttgcaatcacttacact

SEQ ID NO: 243047 - DNA, 25 bp, Probe sequence
aacaaactgttacttctctaatgga

SEQ ID NO: 243048 - DNA, 25 bp, Probe sequence
aactgctgctgaaacattagctcaa

SEQ ID NO: 243049 - DNA, 25 bp, Probe sequence
aagcaattgctgtaggtattcctgg

SEQ ID NO: 243050 - DNA, 25 bp, Probe sequence
caacgttctatctcattaaacagac

SEQ ID NO: 243051 - DNA, 25 bp, Probe sequence
cacttacactggtgacggtggttct

SEQ ID NO: 243052 - DNA, 25 bp, Probe sequence
gcgttagctgtatatcaagcaacta

SEQ ID NO: 243053 - DNA, 25 bp, Probe sequence
gcagcagcttataaagcacctgcaa

SEQ ID NO: 243054 - DNA, 25 bp, Probe sequence
gaatggtatggactcgtatccttga

SEQ ID NO: 243055 - DNA, 25 bp, Probe sequence
gaaggtattaactttgcagcagctt

SEQ ID NO: 243056 - DNA, 25 bp, Probe sequence
gaagcatcacaattagcgtcacaat

SEQ ID NO: 243057 - DNA, 25 bp, Probe sequence
gaagctttcttattctcaagaggtc

SEQ ID NO: 243058 - DNA, 25 bp, Probe sequence
gacaaggacgtttaggtttctatgc

SEQ ID NO: 243059 - DNA, 25 bp, Probe sequence
gacttagtacctgatcttacggatg

SEQ ID NO: 243060 - DNA, 25 bp, Probe sequence
gacatatcgttatggtcctcataca

SEQ ID NO: 243061 - DNA, 25 bp, Probe sequence
gacggtggttcttcacaaggtgatt

SEQ ID NO: 243062 - DNA, 25 bp, Probe sequence
ggtcctcatacaatggctggtgacg

SEQ ID NO: 243063 - DNA, 25 bp, Probe sequence
gatccaactcgttacagaacttcag

SEQ ID NO: 243064 - DNA, 25 bp, Probe sequence
gatacagagatgttcctcaaattat

SEQ ID NO: 243065 - DNA, 25 bp, Probe sequence
gatatgcctcaaaacttagcagaac

SEQ ID NO: 243066 - DNA, 25 bp, Probe sequence
gttgatggtatggatgcgttagctg

SEQ ID NO: 243067 - DNA, 25 bp, Probe sequence
gtttctatgcaccaactgctggtca

SEQ ID NO: 243068 - DNA, 25 bp, Probe sequence
gtatccttgatcaacgttctatctc

SEQ ID NO: 243069 - DNA, 25 bp, Probe sequence
gtgaccgcgcagttgcaggtgaagg

SEQ ID NO: 243070 - DNA, 25 bp, Probe sequence
ggtattcctggtatccaagttgatg

SEQ ID NO: 243071 - DNA, 25 bp, Probe sequence
ggtttaccattaactgaagctttct

SEQ ID NO: 243072 - DNA, 25 bp, Probe sequence
ggaaatcaattccctgaaggcgtta

SEQ ID NO: 243073 - DNA, 25 bp, Probe sequence
taactatgcaatttcaacaccaaga

SEQ ID NO: 243074 - DNA, 25 bp, Probe sequence
taaagaagcacgtgaccgcgcagtt

SEQ ID NO: 243075 - DNA, 25 bp, Probe sequence
tattatcggtgcacaatacattcaa

SEQ ID NO: 243076 - DNA, 25 bp, Probe sequence
tactcgtttccgttcaggcggtact

SEQ ID NO: 243077 - DNA, 25 bp, Probe sequence
gaagacgttggtgttaacggcggtg

SEQ ID NO: 243078 - DNA, 25 bp, Probe sequence
aggcggtactaaaactgcacctgta

SEQ ID NO: 243079 - DNA, 25 bp, Probe sequence
agctcaatctccaggtctaaaggtt

SEQ ID NO: 243080 - DNA, 25 bp, Probe sequence
aaggttgttattccttcaggcccat

SEQ ID NO: 243081 - DNA, 25 bp, Probe sequence
aatggttcaagcgattaatgatgcg

SEQ ID NO: 243082 - DNA, 25 bp, Probe sequence
aatgatgcgcttaaaactgaactta

SEQ ID NO: 243083 - DNA, 25 bp, Probe sequence
aatctccaggtctaaaggttgttat

SEQ ID NO: 243084 - DNA, 25 bp, Probe sequence
caaattgcacgtactcgtttccgtt

SEQ ID NO: 243085 - DNA, 25 bp, Probe sequence
cacgcagataacttagaaggtattt

SEQ ID NO: 243086 - DNA, 25 bp, Probe sequence
gcagttgaaggattccgtccggtta

SEQ ID NO: 243087 - DNA, 25 bp, Probe sequence
ccatttggtggtggcgtacacacac

SEQ ID NO: 243088 - DNA, 25 bp, Probe sequence
gaaggtattttagctcaatctccag

SEQ ID NO: 243089 - DNA, 25 bp, Probe sequence
gaagtatttgatgcgattgctggac

SEQ ID NO: 243090 - DNA, 25 bp, Probe sequence
gaaattgtatcgttcattccgtgaa

SEQ ID NO: 243091 - DNA, 25 bp, Probe sequence
gacccagtcgtatacttagagcata

SEQ ID NO: 243092 - DNA, 25 bp, Probe sequence
gattccgtccggttatggaagtaca

SEQ ID NO: 243093 - DNA, 25 bp, Probe sequence
gagtattcgatacacctttagctga

SEQ ID NO: 243094 - DNA, 25 bp, Probe sequence
gatgttttaatttttggtgaagacg

SEQ ID NO: 243095 - DNA, 25 bp, Probe sequence
gatgcgattgctggacaaattgcac

SEQ ID NO: 243096 - DNA, 25 bp, Probe sequence
gatacacctttagctgaatcaggta

SEQ ID NO: 243097 - DNA, 25 bp, Probe sequence
gtacaattcttaggtttcgtattcg

SEQ ID NO: 243098 - DNA, 25 bp, Probe sequence
gggtcttgcagttgaaggattccgt

SEQ ID NO: 243099 - DNA, 25 bp, Probe sequence
ggcggtgttttccgtgttactgaag

SEQ ID NO: 243100 - DNA, 25 bp, Probe sequence
ggcccatacgatgcgaaaggtttat

SEQ ID NO: 243101 - DNA, 25 bp, Probe sequence
ggcacaaatgacaatggttcaagcg

SEQ ID NO: 243102 - DNA, 25 bp, Probe sequence
tcattccgtgaagaagtacctgaag

SEQ ID NO: 243103 - DNA, 25 bp, Probe sequence
tgcgaaaggtttattaatttcttct

SEQ ID NO: 243104 - DNA, 25 bp, Probe sequence
tccttcaggcccatacgatgcgaaa

SEQ ID NO: 243105 - DNA, 25 bp, Probe sequence
taaaactgcacctgtaacaattcgt

SEQ ID NO: 243106 - DNA, 25 bp, Probe sequence
tattttagctcaatctccaggtcta

SEQ ID NO: 243107 - DNA, 25 bp, Probe sequence
tattagaagtaatgacccagtcgta

SEQ ID NO: 243108 - DNA, 25 bp, Probe sequence
tttccgtgttactgaaggactacaa

SEQ ID NO: 243109 - DNA, 25 bp, Probe sequence
ttgttattccttcaggcccatacga

SEQ ID NO: 243110 - DNA, 25 bp, Probe sequence
atttcaaatcaatcacatcggtgca

SEQ ID NO: 243111 - DNA, 25 bp, Probe sequence
atcaatcacatcggtgcaaatggtt

SEQ ID NO: 243112 - DNA, 25 bp, Probe sequence
atcacatcggtgcaaatggttcaag

SEQ ID NO: 243113 - DNA, 25 bp, Probe sequence
atcggtgcaaatggttcaagaaatc

SEQ ID NO: 243114 - DNA, 25 bp, Probe sequence
atgacatttcaaatcaatcacatcg

SEQ ID NO: 243115 - DNA, 25 bp, Probe sequence
acatttcaaatcaatcacatcggtg

SEQ ID NO: 243116 - DNA, 25 bp, Probe sequence
acatcggtgcaaatggttcaagaaa

SEQ ID NO: 243117 - DNA, 25 bp, Probe sequence
aaatcaatcacatcggtgcaaatgg

SEQ ID NO: 243118 - DNA, 25 bp, Probe sequence
aatgacatttcaaatcaatcacatc

SEQ ID NO: 243119 - DNA, 25 bp, Probe sequence
aatcacatcggtgcaaatggttcaa

SEQ ID NO: 243120 - DNA, 25 bp, Probe sequence
aatcaatcacatcggtgcaaatggt

SEQ ID NO: 243121 - DNA, 25 bp, Probe sequence
caatcacatcggtgcaaatggttca

SEQ ID NO: 243122 - DNA, 25 bp, Probe sequence
caaatcaatcacatcggtgcaaatg

SEQ ID NO: 243123 - DNA, 25 bp, Probe sequence
caaatggttcaagaaatcaaatgaa

SEQ ID NO: 243124 - DNA, 25 bp, Probe sequence
cacatcggtgcaaatggttcaagaa

SEQ ID NO: 243125 - DNA, 25 bp, Probe sequence
catcggtgcaaatggttcaagaaat

SEQ ID NO: 243126 - DNA, 25 bp, Probe sequence
catttcaaatcaatcacatcggtgc

SEQ ID NO: 243127 - DNA, 25 bp, Probe sequence
cggtgcaaatggttcaagaaatcaa

SEQ ID NO: 243128 - DNA, 25 bp, Probe sequence
gcaaatggttcaagaaatcaaatga

SEQ ID NO: 243129 - DNA, 25 bp, Probe sequence
gacatttcaaatcaatcacatcggt

SEQ ID NO: 243130 - DNA, 25 bp, Probe sequence
gtaatgacatttcaaatcaatcaca

SEQ ID NO: 243131 - DNA, 25 bp, Probe sequence
gtgcaaatggttcaagaaatcaaat

SEQ ID NO: 243132 - DNA, 25 bp, Probe sequence
ggtgcaaatggttcaagaaatcaaa

SEQ ID NO: 243133 - DNA, 25 bp, Probe sequence
tgacatttcaaatcaatcacatcgg

SEQ ID NO: 243134 - DNA, 25 bp, Probe sequence
tgcaaatggttcaagaaatcaaatg

SEQ ID NO: 243135 - DNA, 25 bp, Probe sequence
tcggtgcaaatggttcaagaaatca

SEQ ID NO: 243136 - DNA, 25 bp, Probe sequence
tcaatcacatcggtgcaaatggttc

SEQ ID NO: 243137 - DNA, 25 bp, Probe sequence
tcacatcggtgcaaatggttcaaga

SEQ ID NO: 243138 - DNA, 25 bp, Probe sequence
tcaaatcaatcacatcggtgcaaat

SEQ ID NO: 243139 - DNA, 25 bp, Probe sequence
taatgacatttcaaatcaatcacat

SEQ ID NO: 243140 - DNA, 25 bp, Probe sequence
tttcaaatcaatcacatcggtgcaa

SEQ ID NO: 243141 - DNA, 25 bp, Probe sequence
ttcaaatcaatcacatcggtgcaaa

SEQ ID NO: 243142 - DNA, 25 bp, Probe sequence
atcggggaaggtatccacgaaggtg

SEQ ID NO: 243143 - DNA, 25 bp, Probe sequence
atatcggttcagctggtggacaatg

SEQ ID NO: 243144 - DNA, 25 bp, Probe sequence
atcacccagaagtagcaatcttagg

SEQ ID NO: 243145 - DNA, 25 bp, Probe sequence
atcttaggaattggccgtattgctc

SEQ ID NO: 243146 - DNA, 25 bp, Probe sequence
agaaggcgacttcccagaaacaact

SEQ ID NO: 243147 - DNA, 25 bp, Probe sequence
agcaatgccttcagtacgtaaatac

SEQ ID NO: 243148 - DNA, 25 bp, Probe sequence
acagtagctgtagttggtgacgtta

SEQ ID NO: 243149 - DNA, 25 bp, Probe sequence
aactcctgcagcacctgcagcagta

SEQ ID NO: 243150 - DNA, 25 bp, Probe sequence
acaactgaaaaaatccctgctatgc

SEQ ID NO: 243151 - DNA, 25 bp, Probe sequence
aaatcgatgcacctgatgcagaaga

SEQ ID NO: 243152 - DNA, 25 bp, Probe sequence
aagcagtttctggatctggtaaaaa

SEQ ID NO: 243153 - DNA, 25 bp, Probe sequence
aagaggaagcgccagcagagcaagc

SEQ ID NO: 243154 - DNA, 25 bp, Probe sequence
aatccctgctatgcgtagagcaatt

SEQ ID NO: 243155 - DNA, 25 bp, Probe sequence
cgtattgctcaaaaacctatcgtta

SEQ ID NO: 243156 - DNA, 25 bp, Probe sequence
gcattgaaaaaatacccagcactta

SEQ ID NO: 243157 - DNA, 25 bp, Probe sequence
gcattatcattaagctttgaccaca

SEQ ID NO: 243158 - DNA, 25 bp, Probe sequence
gcatactgcacctcatgtaacatta

SEQ ID NO: 243159 - DNA, 25 bp, Probe sequence
gcagagcaagcacctgtagctactc

SEQ ID NO: 243160 - DNA, 25 bp, Probe sequence
gcacgtgatggtaaattaacagccg

SEQ ID NO: 243161 - DNA, 25 bp, Probe sequence
gcagcaccagtattagcattatcat

SEQ ID NO: 243162 - DNA, 25 bp, Probe sequence
gcacctgtagctactcaaactgaag

SEQ ID NO: 243163 - DNA, 25 bp, Probe sequence
gcacaatcagtaatatcggttcagc

SEQ ID NO: 243164 - DNA, 25 bp, Probe sequence
gaagacgatgttttagctgaggtac

SEQ ID NO: 243165 - DNA, 25 bp, Probe sequence
gaagaagttgctgaaactcctgcag

SEQ ID NO: 243166 - DNA, 25 bp, Probe sequence
gaaatcgcagctgaacaaggtacta

SEQ ID NO: 243167 - DNA, 25 bp, Probe sequence
gatggagaaattgttgcagcaccag

SEQ ID NO: 243168 - DNA, 25 bp, Probe sequence
gttaactctaagcatactgcacctc

SEQ ID NO: 243169 - DNA, 25 bp, Probe sequence
gttcaagcattatgggatcaccgta

SEQ ID NO: 243170 - DNA, 25 bp, Probe sequence
gttaaagcacttgtttctgcattga

SEQ ID NO: 243171 - DNA, 25 bp, Probe sequence
gtggcatttgaatttagattacccg

SEQ ID NO: 243172 - DNA, 25 bp, Probe sequence
ggtggacaatggttcactccagtta

SEQ ID NO: 243173 - DNA, 25 bp, Probe sequence
tggtggtgcaccaacagcttcaaat

SEQ ID NO: 243174 - DNA, 25 bp, Probe sequence
tcagtagtagaaatcccatcaccag

SEQ ID NO: 243175 - DNA, 25 bp, Probe sequence
ttgatggtgcaactggccaaaatgc

SEQ ID NO: 243176 - DNA, 25 bp, Probe sequence
attcggtaaacgtgttatcgactca

SEQ ID NO: 243177 - DNA, 25 bp, Probe sequence
attcgtgcagctcaattaggacaaa

SEQ ID NO: 243178 - DNA, 25 bp, Probe sequence
aggtgttattgctgaaagtgtttct

SEQ ID NO: 243179 - DNA, 25 bp, Probe sequence
agagcgcacaaacatacaactttaa

SEQ ID NO: 243180 - DNA, 25 bp, Probe sequence
agaagtaaccatccttgaaggtgct

SEQ ID NO: 243181 - DNA, 25 bp, Probe sequence
agcattactacatgcttctcaccgt

SEQ ID NO: 243182 - DNA, 25 bp, Probe sequence
aagctatcggatacccaatccatac

SEQ ID NO: 243183 - DNA, 25 bp, Probe sequence
acagcatttgctaactttggttcag

SEQ ID NO: 243184 - DNA, 25 bp, Probe sequence
acaatccatgcacatccaacattag

SEQ ID NO: 243185 - DNA, 25 bp, Probe sequence
aagccgtacgtctatcagcaatatc

SEQ ID NO: 243186 - DNA, 25 bp, Probe sequence
aagttgattacattggtatgccagc

SEQ ID NO: 243187 - DNA, 25 bp, Probe sequence
aaggtgttgaaatcgttactgaagc

SEQ ID NO: 243188 - DNA, 25 bp, Probe sequence
aatcggtgctcaagtagttggtact

SEQ ID NO: 243189 - DNA, 25 bp, Probe sequence
caaacacagacgaattaggcctaga

SEQ ID NO: 243190 - DNA, 25 bp, Probe sequence
ctacagttggttattcagaagcgca

SEQ ID NO: 243191 - DNA, 25 bp, Probe sequence
gttaaattcgctgaccgtggattat

SEQ ID NO: 243192 - DNA, 25 bp, Probe sequence
gcaggtcctggtggatacgttgcag

SEQ ID NO: 243193 - DNA, 25 bp, Probe sequence
gcagcaaatggtcgtgcattatcat

SEQ ID NO: 243194 - DNA, 25 bp, Probe sequence
gcaatcattgcaacaggttcaagac

SEQ ID NO: 243195 - DNA, 25 bp, Probe sequence
gaagatatcgcattaacaatccatg

SEQ ID NO: 243196 - DNA, 25 bp, Probe sequence
gaagatgatactttaatcggtgctc

SEQ ID NO: 243197 - DNA, 25 bp, Probe sequence
gatggtcaagctgctgaagttgatt

SEQ ID NO: 243198 - DNA, 25 bp, Probe sequence
gatatcttaggtggcttcgaaaaac

SEQ ID NO: 243199 - DNA, 25 bp, Probe sequence
gttatcgactcaacaggtgctttaa

SEQ ID NO: 243200 - DNA, 25 bp, Probe sequence
gtatgccagcagtatgctttactga

SEQ ID NO: 243201 - DNA, 25 bp, Probe sequence
gtaactgtaggtcgtcgtccaaaca

SEQ ID NO: 243202 - DNA, 25 bp, Probe sequence
gtagttggtactggtgcatcagata

SEQ ID NO: 243203 - DNA, 25 bp, Probe sequence
ggtaatcttggtggtgtttgcttaa

SEQ ID NO: 243204 - DNA, 25 bp, Probe sequence
ggtagttggagatttcccaattgaa

SEQ ID NO: 243205 - DNA, 25 bp, Probe sequence
ggatgtattccttcaaaagcattac

SEQ ID NO: 243206 - DNA, 25 bp, Probe sequence
tagtaatcggagcaggtcctggtgg

SEQ ID NO: 243207 - DNA, 25 bp, Probe sequence
taccacttgctcacaaagctagcta

SEQ ID NO: 243208 - DNA, 25 bp, Probe sequence
tatcgttccaggtttaccacttgct

SEQ ID NO: 243209 - DNA, 25 bp, Probe sequence
ttctcaccgttttgttgaagcacaa

SEQ ID NO: 243210 - DNA, 25 bp, Probe sequence
atcccgcacaagtattacctgtatc

SEQ ID NO: 243211 - DNA, 25 bp, Probe sequence
atgccaattatttatgaccctgtta

SEQ ID NO: 243212 - DNA, 25 bp, Probe sequence
atgaccctgttattgcacaatcgat

SEQ ID NO: 243213 - DNA, 25 bp, Probe sequence
aggtatcggcgattggggcgttgat

SEQ ID NO: 243214 - DNA, 25 bp, Probe sequence
agattctatcagctgcgagtcatgc

SEQ ID NO: 243215 - DNA, 25 bp, Probe sequence
agaatatcctaatgcactattacat

SEQ ID NO: 243216 - DNA, 25 bp, Probe sequence
agctgcgagtcatgcacttggtggc

SEQ ID NO: 243217 - DNA, 25 bp, Probe sequence
agcctactgttttaatcggtacatc

SEQ ID NO: 243218 - DNA, 25 bp, Probe sequence
acagaacgtccaatgattttcccat

SEQ ID NO: 243219 - DNA, 25 bp, Probe sequence
aatgcattgatgtatcctggtttag

SEQ ID NO: 243220 - DNA, 25 bp, Probe sequence
aatacatcaatgttctcgtgccata

SEQ ID NO: 243221 - DNA, 25 bp, Probe sequence
aattgacttctgagcatttagttga

SEQ ID NO: 243222 - DNA, 25 bp, Probe sequence
ctcgtgccatagccaaagcggttgc

SEQ ID NO: 243223 - DNA, 25 bp, Probe sequence
gcggttgcacaaagtgtcattgatc

SEQ ID NO: 243224 - DNA, 25 bp, Probe sequence
gcacttggtggcatggtcaatccag

SEQ ID NO: 243225 - DNA, 25 bp, Probe sequence
gaattgcgcaacgttgcaaatggca

SEQ ID NO: 243226 - DNA, 25 bp, Probe sequence
gaagctgaaatttggtatcctgaat

SEQ ID NO: 243227 - DNA, 25 bp, Probe sequence
gacgttcttagtttatggtggtggt

SEQ ID NO: 243228 - DNA, 25 bp, Probe sequence
gagtgcagtgcgtaaagaatatcct

SEQ ID NO: 243229 - DNA, 25 bp, Probe sequence
gattttcccattgtctaatcctaca

SEQ ID NO: 243230 - DNA, 25 bp, Probe sequence
ggtatagttacattagccggcgtac

SEQ ID NO: 243231 - DNA, 25 bp, Probe sequence
ggtggtggtacagctggtatgggta

SEQ ID NO: 243232 - DNA, 25 bp, Probe sequence
ggtacatcaactcaaacaggtgcat

SEQ ID NO: 243233 - DNA, 25 bp, Probe sequence
ggattattacctgcgaatgttcgaa

SEQ ID NO: 243234 - DNA, 25 bp, Probe sequence
ggatgacttaactgaagctcaacaa

SEQ ID NO: 243235 - DNA, 25 bp, Probe sequence
tgcagtcttaccacctgttgagaaa

SEQ ID NO: 243236 - DNA, 25 bp, Probe sequence
ggaagattttggtagagggcatgct

SEQ ID NO: 243237 - DNA, 25 bp, Probe sequence
ggaactggtatcccatataatgaca

SEQ ID NO: 243238 - DNA, 25 bp, Probe sequence
ggcagctggaataaatcccgcacaa

SEQ ID NO: 243239 - DNA, 25 bp, Probe sequence
ggcgttgatggtgtagatattgcga

SEQ ID NO: 243240 - DNA, 25 bp, Probe sequence
tgaaccaggagctgcagtcttacca

SEQ ID NO: 243241 - DNA, 25 bp, Probe sequence
tcagtagaccccaagatgcagtatt

SEQ ID NO: 243242 - DNA, 25 bp, Probe sequence
tttaggtttgggtcttattgcgtca

SEQ ID NO: 243243 - DNA, 25 bp, Probe sequence
ttagccggcgtactaggtgcattaa

SEQ ID NO: 243244 - DNA, 25 bp, Probe sequence
attatgaatccggcgtgacggcagg

SEQ ID NO: 243245 - DNA, 25 bp, Probe sequence
atgagtatccaattgatttagactg

SEQ ID NO: 243246 - DNA, 25 bp, Probe sequence
agtattatgaatccggcgtgacggc

SEQ ID NO: 243247 - DNA, 25 bp, Probe sequence
agagaagtattatgaatccggcgtg

SEQ ID NO: 243248 - DNA, 25 bp, Probe sequence
agaagtattatgaatccggcgtgac

SEQ ID NO: 243249 - DNA, 25 bp, Probe sequence
aaagaaattgtgcctgctaaagcag

SEQ ID NO: 243250 - DNA, 25 bp, Probe sequence
aaaaactcactctgaagaacaaaga

SEQ ID NO: 243251 - DNA, 25 bp, Probe sequence
aaaagtagtggctataatagttaca

SEQ ID NO: 243252 - DNA, 25 bp, Probe sequence
aagaaattgtgcctgctaaagcaga

SEQ ID NO: 243253 - DNA, 25 bp, Probe sequence
aagtattatgaatccggcgtgacgg

SEQ ID NO: 243254 - DNA, 25 bp, Probe sequence
aagatgtaaaaactcactctgaaga

SEQ ID NO: 243255 - DNA, 25 bp, Probe sequence
aatagttacaaagcagttcaagatg

SEQ ID NO: 243256 - DNA, 25 bp, Probe sequence
aatttctttaatcatgtagagaagt

SEQ ID NO: 243257 - DNA, 25 bp, Probe sequence
aattgtgcctgctaaagcagaggaa

SEQ ID NO: 243258 - DNA, 25 bp, Probe sequence
ccaattgatttagactggagtaatg

SEQ ID NO: 243259 - DNA, 25 bp, Probe sequence
gaagtattatgaatccggcgtgacg

SEQ ID NO: 243260 - DNA, 25 bp, Probe sequence
gaagaacaaagagtaacagctaaaa

SEQ ID NO: 243261 - DNA, 25 bp, Probe sequence
gaaattgtgcctgctaaagcagagg

SEQ ID NO: 243262 - DNA, 25 bp, Probe sequence
gagaagtattatgaatccggcgtga

SEQ ID NO: 243263 - DNA, 25 bp, Probe sequence
gagtatccaattgatttagactgga

SEQ ID NO: 243264 - DNA, 25 bp, Probe sequence
gatgtaaaaactcactctgaagaac

SEQ ID NO: 243265 - DNA, 25 bp, Probe sequence
gataaatttctttaatcatgtagag

SEQ ID NO: 243266 - DNA, 25 bp, Probe sequence
gatttaaagaaattgtgcctgctaa

SEQ ID NO: 243267 - DNA, 25 bp, Probe sequence
gttcaagatgtaaaaactcactctg

SEQ ID NO: 243268 - DNA, 25 bp, Probe sequence
gtattatgaatccggcgtgacggca

SEQ ID NO: 243269 - DNA, 25 bp, Probe sequence
gtatccaattgatttagactggagt

SEQ ID NO: 243270 - DNA, 25 bp, Probe sequence
gtagagaagtattatgaatccggcg

SEQ ID NO: 243271 - DNA, 25 bp, Probe sequence
gtaaaaactcactctgaagaacaaa

SEQ ID NO: 243272 - DNA, 25 bp, Probe sequence
ggaatatgagtatccaattgattta

SEQ ID NO: 243273 - DNA, 25 bp, Probe sequence
tcaagatgtaaaaactcactctgaa

SEQ ID NO: 243274 - DNA, 25 bp, Probe sequence
tagactggagtaatgaagagatgat

SEQ ID NO: 243275 - DNA, 25 bp, Probe sequence
tattatgaatccggcgtgacggcag

SEQ ID NO: 243276 - DNA, 25 bp, Probe sequence
ttaaagaaattgtgcctgctaaagc

SEQ ID NO: 243277 - DNA, 25 bp, Probe sequence
ttgtgcctgctaaagcagaggaaaa

SEQ ID NO: 243278 - DNA, 25 bp, Probe sequence
atcaagcacaagaagaagacgtttt

SEQ ID NO: 243279 - DNA, 25 bp, Probe sequence
atcaaacaatgaaacacgaatactt

SEQ ID NO: 243280 - DNA, 25 bp, Probe sequence
atcagagtctgatacgtttatttat

SEQ ID NO: 243281 - DNA, 25 bp, Probe sequence
atggaaactttcttaaatattatag

SEQ ID NO: 243282 - DNA, 25 bp, Probe sequence
agaaagtgaacatgcctcaccaagt

SEQ ID NO: 243283 - DNA, 25 bp, Probe sequence
acgtttatttattgtatgtcaggtc

SEQ ID NO: 243284 - DNA, 25 bp, Probe sequence
acatgcctcaccaagtatggaaact

SEQ ID NO: 243285 - DNA, 25 bp, Probe sequence
aaaattttaatccatcagagtctga

SEQ ID NO: 243286 - DNA, 25 bp, Probe sequence
aacgcaagaagaacttgctgaacgt

SEQ ID NO: 243287 - DNA, 25 bp, Probe sequence
aagtgaacatgcctcaccaagtatg

SEQ ID NO: 243288 - DNA, 25 bp, Probe sequence
aattggttagtttcaaagtcaaatg

SEQ ID NO: 243289 - DNA, 25 bp, Probe sequence
cgaaaggctacatttcacaaataga

SEQ ID NO: 243290 - DNA, 25 bp, Probe sequence
cgccaagtgaattttttaaagacag

SEQ ID NO: 243291 - DNA, 25 bp, Probe sequence
gcctcaccaagtatggaaactttct

SEQ ID NO: 243292 - DNA, 25 bp, Probe sequence
gccattaatattaactttaaagcct

SEQ ID NO: 243293 - DNA, 25 bp, Probe sequence
gcacgagataatcatcgtttgtcaa

SEQ ID NO: 243294 - DNA, 25 bp, Probe sequence
gaatacttattgtagcgacagcttc

SEQ ID NO: 243295 - DNA, 25 bp, Probe sequence
gaaggttatatattaaattggttag

SEQ ID NO: 243296 - DNA, 25 bp, Probe sequence
gaagaacaagttatttatgatgagt

SEQ ID NO: 243297 - DNA, 25 bp, Probe sequence
gaaacacgaatacttattgtagcga

SEQ ID NO: 243298 - DNA, 25 bp, Probe sequence
gacttatcgaaaggctacatttcac

SEQ ID NO: 243299 - DNA, 25 bp, Probe sequence
gagtctgatacgtttatttattgta

SEQ ID NO: 243300 - DNA, 25 bp, Probe sequence
gtatgtcaggtcagataacacttaa

SEQ ID NO: 243301 - DNA, 25 bp, Probe sequence
gtcagataacacttaatttaggcaa

SEQ ID NO: 243302 - DNA, 25 bp, Probe sequence
gtcaaatgaatatgatatggagcca

SEQ ID NO: 243303 - DNA, 25 bp, Probe sequence
gtcaggtcagataacacttaattta

SEQ ID NO: 243304 - DNA, 25 bp, Probe sequence
tgtagcgacagcttcatatttatag

SEQ ID NO: 243305 - DNA, 25 bp, Probe sequence
tgaacatgcctcaccaagtatggaa

SEQ ID NO: 243306 - DNA, 25 bp, Probe sequence
tacttattgtagcgacagcttcata

SEQ ID NO: 243307 - DNA, 25 bp, Probe sequence
tatggagccattaatattaacttta

SEQ ID NO: 243308 - DNA, 25 bp, Probe sequence
tattgtagcgacagcttcatattta

SEQ ID NO: 243309 - DNA, 25 bp, Probe sequence
ttttgtattttaaagcacgagataa

SEQ ID NO: 243310 - DNA, 25 bp, Probe sequence
ttatttattgtatgtcaggtcagat

SEQ ID NO: 243311 - DNA, 25 bp, Probe sequence
ttatgatgagtatgatgaaggttat

SEQ ID NO: 243312 - DNA, 25 bp, Probe sequence
attctttggagaaattggacaacaa

SEQ ID NO: 243313 - DNA, 25 bp, Probe sequence
atacactgaaacaaccacacagcta

SEQ ID NO: 243314 - DNA, 25 bp, Probe sequence
agaaaactcctgtagtttcattaga

SEQ ID NO: 243315 - DNA, 25 bp, Probe sequence
agaagtttaaatacccacaatcaca

SEQ ID NO: 243316 - DNA, 25 bp, Probe sequence
acatctataccaacattagcgccta

SEQ ID NO: 243317 - DNA, 25 bp, Probe sequence
acaacaaaaagctgactacgaaaga

SEQ ID NO: 243318 - DNA, 25 bp, Probe sequence
aaatacccacaatcacaaatctgta

SEQ ID NO: 243319 - DNA, 25 bp, Probe sequence
aaagaagagggctaccaatcaaaga

SEQ ID NO: 243320 - DNA, 25 bp, Probe sequence
aaagcgagatttttagataagcaaa

SEQ ID NO: 243321 - DNA, 25 bp, Probe sequence
aacgtgaacacgtgagagaagctca

SEQ ID NO: 243322 - DNA, 25 bp, Probe sequence
aaggccaacatctataccaacatta

SEQ ID NO: 243323 - DNA, 25 bp, Probe sequence
aatcacacgcataatcatcttattg

SEQ ID NO: 243324 - DNA, 25 bp, Probe sequence
aattagatatgattcttggttataa

SEQ ID NO: 243325 - DNA, 25 bp, Probe sequence
ctgaaacaaccacacagctaccaat

SEQ ID NO: 243326 - DNA, 25 bp, Probe sequence
ctgggattaacacacgaaagatatg

SEQ ID NO: 243327 - DNA, 25 bp, Probe sequence
cccacaatcacaaatctgtatctca

SEQ ID NO: 243328 - DNA, 25 bp, Probe sequence
gctgatacggaattaaacactcttg

SEQ ID NO: 243329 - DNA, 25 bp, Probe sequence
gaagcgcgtgattaaacgtgaacac

SEQ ID NO: 243330 - DNA, 25 bp, Probe sequence
gaacgtgagaagcgcgtgattaaac

SEQ ID NO: 243331 - DNA, 25 bp, Probe sequence
gaaactattattgatgaattctttg

SEQ ID NO: 243332 - DNA, 25 bp, Probe sequence
gaaagacaggttcattggttggttt

SEQ ID NO: 243333 - DNA, 25 bp, Probe sequence
gagggctaccaatcaaagaatgttc

SEQ ID NO: 243334 - DNA, 25 bp, Probe sequence
gaggaacaaactaaagctgatacgg

SEQ ID NO: 243335 - DNA, 25 bp, Probe sequence
ggacaacaaaggccaacatctatac

SEQ ID NO: 243336 - DNA, 25 bp, Probe sequence
ggaattaaacactcttgaaaatcaa

SEQ ID NO: 243337 - DNA, 25 bp, Probe sequence
tgattcttcgcatttaactgaacgt

SEQ ID NO: 243338 - DNA, 25 bp, Probe sequence
tctgtatctcaagaagtctctgaac

SEQ ID NO: 243339 - DNA, 25 bp, Probe sequence
tctataccaacattagcgcctaaag

SEQ ID NO: 243340 - DNA, 25 bp, Probe sequence
tcattggttggtttgagtcaaattg

SEQ ID NO: 243341 - DNA, 25 bp, Probe sequence
tcttcgcatttaactgaacgtgaga

SEQ ID NO: 243342 - DNA, 25 bp, Probe sequence
tcaaattgattcttcgcatttaact

SEQ ID NO: 243343 - DNA, 25 bp, Probe sequence
taccaacattagcgcctaaagaaga

SEQ ID NO: 243344 - DNA, 25 bp, Probe sequence
taggttatacattttatcactcgaa

SEQ ID NO: 243345 - DNA, 25 bp, Probe sequence
tttgaacataaacaacgtgttgaca

SEQ ID NO: 243346 - DNA, 25 bp, Probe sequence
atcgatttgtagctgattttattgg

SEQ ID NO: 243347 - DNA, 25 bp, Probe sequence
atgcattatttccacacttaaacgt

SEQ ID NO: 243348 - DNA, 25 bp, Probe sequence
atgacgaaccagtgaatcgatttgt

SEQ ID NO: 243349 - DNA, 25 bp, Probe sequence
atgtgtcgatatgggtattcctgaa

SEQ ID NO: 243350 - DNA, 25 bp, Probe sequence
atgtcgtgaatatttatgggcaaga

SEQ ID NO: 243351 - DNA, 25 bp, Probe sequence
agtgatttatcaaaacaaaccaatt

SEQ ID NO: 243352 - DNA, 25 bp, Probe sequence
agattatgcattatttccacactta

SEQ ID NO: 243353 - DNA, 25 bp, Probe sequence
acatttatatttgtaacacatgatc

SEQ ID NO: 243354 - DNA, 25 bp, Probe sequence
aagctatgatgatcttaatatctta

SEQ ID NO: 243355 - DNA, 25 bp, Probe sequence
aattaattgcagggtttgaatatcc

SEQ ID NO: 243356 - DNA, 25 bp, Probe sequence
caccaacagatatatatgacgaacc

SEQ ID NO: 243357 - DNA, 25 bp, Probe sequence
gctatgaggaagtagacaatgcgta

SEQ ID NO: 243358 - DNA, 25 bp, Probe sequence
gcatggttagagattatgtcgtgaa

SEQ ID NO: 243359 - DNA, 25 bp, Probe sequence
gcaatctagattaggtattacattt

SEQ ID NO: 243360 - DNA, 25 bp, Probe sequence
gaattacgagaattgcaatctagat

SEQ ID NO: 243361 - DNA, 25 bp, Probe sequence
gaatacagtctttcaagattatgca

SEQ ID NO: 243362 - DNA, 25 bp, Probe sequence
gaatcaggatacttttatacattat

SEQ ID NO: 243363 - DNA, 25 bp, Probe sequence
gaatctttatccgcattagatttga

SEQ ID NO: 243364 - DNA, 25 bp, Probe sequence
gaagttggtctttattttgatcctg

SEQ ID NO: 243365 - DNA, 25 bp, Probe sequence
gaagccattcatattatggttcctg

SEQ ID NO: 243366 - DNA, 25 bp, Probe sequence
gaggggtccactatgaaatatgttg

SEQ ID NO: 243367 - DNA, 25 bp, Probe sequence
gagtggcggacaaaagcaacgtgtt

SEQ ID NO: 243368 - DNA, 25 bp, Probe sequence
gttagatgaatctttatccgcatta

SEQ ID NO: 243369 - DNA, 25 bp, Probe sequence
gtagaagtcgttattcgaccagaag

SEQ ID NO: 243370 - DNA, 25 bp, Probe sequence
gggtttgaatatcctgacagtggtg

SEQ ID NO: 243371 - DNA, 25 bp, Probe sequence
ggattatttaaagcaactgttgatt

SEQ ID NO: 243372 - DNA, 25 bp, Probe sequence
ggaaccgttattatcattaaaatca

SEQ ID NO: 243373 - DNA, 25 bp, Probe sequence
tattaggtccttcaggttgtggtaa

SEQ ID NO: 243374 - DNA, 25 bp, Probe sequence
tcctgacagtggtgaagtgatttat

SEQ ID NO: 243375 - DNA, 25 bp, Probe sequence
taaacgtattgaaagctatgaggaa

SEQ ID NO: 243376 - DNA, 25 bp, Probe sequence
tatgggcaagatttcgaatgtgtcg

SEQ ID NO: 243377 - DNA, 25 bp, Probe sequence
tttatacattattaggtccttcagg

SEQ ID NO: 243378 - DNA, 25 bp, Probe sequence
ttattttgatcctgaagccattcat

SEQ ID NO: 243379 - DNA, 25 bp, Probe sequence
ttagatttgaaattgcgtactgaaa

SEQ ID NO: 243380 - DNA, 25 bp, Probe sequence
atttaccatcattcaatttgttatt

SEQ ID NO: 243381 - DNA, 25 bp, Probe sequence
ataccatttatgattttacctatat

SEQ ID NO: 243382 - DNA, 25 bp, Probe sequence
atagctatattcttaattgtattta

SEQ ID NO: 243383 - DNA, 25 bp, Probe sequence
atcaatggacattttagtttcacga

SEQ ID NO: 243384 - DNA, 25 bp, Probe sequence
atcatgccgttaacaaaagaaggtg

SEQ ID NO: 243385 - DNA, 25 bp, Probe sequence
atccagctgcctattatattactcg

SEQ ID NO: 243386 - DNA, 25 bp, Probe sequence
acctttattccatcactttcattat

SEQ ID NO: 243387 - DNA, 25 bp, Probe sequence
aaatgtttgcatattcaattttata

SEQ ID NO: 243388 - DNA, 25 bp, Probe sequence
aaaatcatctaatgggagagggtga

SEQ ID NO: 243389 - DNA, 25 bp, Probe sequence
aagtcataaatataggtacggcaat

SEQ ID NO: 243390 - DNA, 25 bp, Probe sequence
aatagcatgaaagcaattcctaata

SEQ ID NO: 243391 - DNA, 25 bp, Probe sequence
aattgtatttatggcattcatttta

SEQ ID NO: 243392 - DNA, 25 bp, Probe sequence
cagttatccagctgcctattatatt

SEQ ID NO: 243393 - DNA, 25 bp, Probe sequence
ctatcagttatccagctgcctatta

SEQ ID NO: 243394 - DNA, 25 bp, Probe sequence
cccgtatttactatggatggttata

SEQ ID NO: 243395 - DNA, 25 bp, Probe sequence
gaattatcaacaaatttttactaca

SEQ ID NO: 243396 - DNA, 25 bp, Probe sequence
gaaggtgttatgactgggattcaag

SEQ ID NO: 243397 - DNA, 25 bp, Probe sequence
gaaaagtaatcatgccgttaacaaa

SEQ ID NO: 243398 - DNA, 25 bp, Probe sequence
gacatatgcttttataggtttatta

SEQ ID NO: 243399 - DNA, 25 bp, Probe sequence
gttgtattactcatttatttttcat

SEQ ID NO: 243400 - DNA, 25 bp, Probe sequence
gttatatttattattgtaccagttg

SEQ ID NO: 243401 - DNA, 25 bp, Probe sequence
gtaccagttgtattactcatttatt

SEQ ID NO: 243402 - DNA, 25 bp, Probe sequence
gtgattaatcaatttttccacttat

SEQ ID NO: 243403 - DNA, 25 bp, Probe sequence
gggatcaactatagctatattctta

SEQ ID NO: 243404 - DNA, 25 bp, Probe sequence
ggattcaagtaacctttattccatc

SEQ ID NO: 243405 - DNA, 25 bp, Probe sequence
ggacattttagtttcacgaattatc

SEQ ID NO: 243406 - DNA, 25 bp, Probe sequence
tggcattcattttaatcattacaaa

SEQ ID NO: 243407 - DNA, 25 bp, Probe sequence
tgataatgattattccaacatggat

SEQ ID NO: 243408 - DNA, 25 bp, Probe sequence
tcaatttgttatttacaactggtgc

SEQ ID NO: 243409 - DNA, 25 bp, Probe sequence
taatcccgtatttactatggatggt

SEQ ID NO: 243410 - DNA, 25 bp, Probe sequence
tactcatttatttttcatttttaga

SEQ ID NO: 243411 - DNA, 25 bp, Probe sequence
tatggtatgggatcaactatagcta

SEQ ID NO: 243412 - DNA, 25 bp, Probe sequence
tttccacttatttaatttaccatca

SEQ ID NO: 243413 - DNA, 25 bp, Probe sequence
ttattccatcactttcattatttat

SEQ ID NO: 243414 - DNA, 25 bp, Probe sequence
attggtacatttggtgccattgcta

SEQ ID NO: 243415 - DNA, 25 bp, Probe sequence
attatgtttacaacgattggccatt

SEQ ID NO: 243416 - DNA, 25 bp, Probe sequence
atagttgtgattatcgtcttaccac

SEQ ID NO: 243417 - DNA, 25 bp, Probe sequence
atggctttagtgtgttatcagttga

SEQ ID NO: 243418 - DNA, 25 bp, Probe sequence
agcacttttagcagcctcaatttct

SEQ ID NO: 243419 - DNA, 25 bp, Probe sequence
agcagcctcaatttctacagttatt

SEQ ID NO: 243420 - DNA, 25 bp, Probe sequence
acgatagctgtagcacttttagcag

SEQ ID NO: 243421 - DNA, 25 bp, Probe sequence
acttattcactagacgatttcacag

SEQ ID NO: 243422 - DNA, 25 bp, Probe sequence
cagttgaagtttatgctatggcgag

SEQ ID NO: 243423 - DNA, 25 bp, Probe sequence
gcgactgaaccacaattattaagca

SEQ ID NO: 243424 - DNA, 25 bp, Probe sequence
gcgattttatacatcccaatattct

SEQ ID NO: 243425 - DNA, 25 bp, Probe sequence
gcattttgcatacctatagttgtga

SEQ ID NO: 243426 - DNA, 25 bp, Probe sequence
gagatttaggagcgactgaaccaca

SEQ ID NO: 243427 - DNA, 25 bp, Probe sequence
gaacattttacattagagcattatc

SEQ ID NO: 243428 - DNA, 25 bp, Probe sequence
gacgttgtcataggtgcatcattct

SEQ ID NO: 243429 - DNA, 25 bp, Probe sequence
gagcattatcaatcattatttcaaa

SEQ ID NO: 243430 - DNA, 25 bp, Probe sequence
gatcatttaatgtcggtcattttta

SEQ ID NO: 243431 - DNA, 25 bp, Probe sequence
gatttcacagtaagtttcttcgtta

SEQ ID NO: 243432 - DNA, 25 bp, Probe sequence
gattggccattttactggtcttggt

SEQ ID NO: 243433 - DNA, 25 bp, Probe sequence
gttctattcattcaattcggctggt

SEQ ID NO: 243434 - DNA, 25 bp, Probe sequence
gtttcttcgttactggtaatggctt

SEQ ID NO: 243435 - DNA, 25 bp, Probe sequence
ggtgcatcattcttaattatgttta

SEQ ID NO: 243436 - DNA, 25 bp, Probe sequence
ggtgccattgctatttattatttaa

SEQ ID NO: 243437 - DNA, 25 bp, Probe sequence
ggtatggaaagctgtatatcgggat

SEQ ID NO: 243438 - DNA, 25 bp, Probe sequence
ggattttggacagttctaatatctc

SEQ ID NO: 243439 - DNA, 25 bp, Probe sequence
tgatggtatcatccgacgttgtcat

SEQ ID NO: 243440 - DNA, 25 bp, Probe sequence
tcgggatacttttagcgattttata

SEQ ID NO: 243441 - DNA, 25 bp, Probe sequence
tcggctggtaatatgattcactttg

SEQ ID NO: 243442 - DNA, 25 bp, Probe sequence
taatatctcatattgcattttgcat

SEQ ID NO: 243443 - DNA, 25 bp, Probe sequence
tactggtcttggtttaggattttgg

SEQ ID NO: 243444 - DNA, 25 bp, Probe sequence
tatcgtcttaccacaactgtatgaa

SEQ ID NO: 243445 - DNA, 25 bp, Probe sequence
tatacatcccaatattctttttaat

SEQ ID NO: 243446 - DNA, 25 bp, Probe sequence
ttattcctaatattttaccttctat

SEQ ID NO: 243447 - DNA, 25 bp, Probe sequence
ttctttatggctttaacttattcac

SEQ ID NO: 243448 - DNA, 25 bp, Probe sequence
attataggtgcattagttgtgggta

SEQ ID NO: 243449 - DNA, 25 bp, Probe sequence
atttacgtatacaattggggcgaat

SEQ ID NO: 243450 - DNA, 25 bp, Probe sequence
atcttaatgaccgtaattcgcacca

SEQ ID NO: 243451 - DNA, 25 bp, Probe sequence
aggcaataaatattctttaccttat

SEQ ID NO: 243452 - DNA, 25 bp, Probe sequence
aggtgatgaaattaccatgatgctt

SEQ ID NO: 243453 - DNA, 25 bp, Probe sequence
agtggtgttgcagcacctctagtgc

SEQ ID NO: 243454 - DNA, 25 bp, Probe sequence
agttgacggtgctagagagattata

SEQ ID NO: 243455 - DNA, 25 bp, Probe sequence
agagagattataggcatgagtttga

SEQ ID NO: 243456 - DNA, 25 bp, Probe sequence
acattatgatgttgcttttcctagt

SEQ ID NO: 243457 - DNA, 25 bp, Probe sequence
aaagagatcatttattgttaccaat

SEQ ID NO: 243458 - DNA, 25 bp, Probe sequence
aagagattaaagacgaccatcgttt

SEQ ID NO: 243459 - DNA, 25 bp, Probe sequence
caaattttactagttgacggtgcta

SEQ ID NO: 243460 - DNA, 25 bp, Probe sequence
cgatggaagccaaaattcgcaatgg

SEQ ID NO: 243461 - DNA, 25 bp, Probe sequence
gcggttgtttggagtggtgttgcag

SEQ ID NO: 243462 - DNA, 25 bp, Probe sequence
gctgctcgacaattgttgcctaaag

SEQ ID NO: 243463 - DNA, 25 bp, Probe sequence
gctttgtcttactttaagtcattgg

SEQ ID NO: 243464 - DNA, 25 bp, Probe sequence
gcagcacctctagtgcaagaagggg

SEQ ID NO: 243465 - DNA, 25 bp, Probe sequence
gaattcgtaggctatgcaacgccaa

SEQ ID NO: 243466 - DNA, 25 bp, Probe sequence
gcaacgccaaacaaggctgctcgac

SEQ ID NO: 243467 - DNA, 25 bp, Probe sequence
gaagtcattgtataatcctaaattt

SEQ ID NO: 243468 - DNA, 25 bp, Probe sequence
gaaactggcattcaagtcgtttatg

SEQ ID NO: 243469 - DNA, 25 bp, Probe sequence
gaccgtaattcgcaccatttaaaag

SEQ ID NO: 243470 - DNA, 25 bp, Probe sequence
gagcaagaacgccttgaagtttata

SEQ ID NO: 243471 - DNA, 25 bp, Probe sequence
gatttaggacctgaagttttaagtg

SEQ ID NO: 243472 - DNA, 25 bp, Probe sequence
gttgtgggtatgctttgtcttactt

SEQ ID NO: 243473 - DNA, 25 bp, Probe sequence
gttgcttttcctagtgaatatacag

SEQ ID NO: 243474 - DNA, 25 bp, Probe sequence
gtaagaggtgtcgtaggtgatgaaa

SEQ ID NO: 243475 - DNA, 25 bp, Probe sequence
gtcgtttatgaaactttcgattcaa

SEQ ID NO: 243476 - DNA, 25 bp, Probe sequence
ggggcgaatatattgatccagagtt

SEQ ID NO: 243477 - DNA, 25 bp, Probe sequence
tctttaccttatttctttggaactg

SEQ ID NO: 243478 - DNA, 25 bp, Probe sequence
tatggtaattccaaaaacggcacaa

SEQ ID NO: 243479 - DNA, 25 bp, Probe sequence
tatggttcgacaatatggtaattcc

SEQ ID NO: 243480 - DNA, 25 bp, Probe sequence
ttctttggaactgtaggtattttat

SEQ ID NO: 243481 - DNA, 25 bp, Probe sequence
tttacaactcattataggtgcatta

SEQ ID NO: 243482 - DNA, 25 bp, Probe sequence
attctgggaaatactatcacctaat

SEQ ID NO: 243483 - DNA, 25 bp, Probe sequence
atggcggtggtcattttaaccattc

SEQ ID NO: 243484 - DNA, 25 bp, Probe sequence
aggcaaaacaccaatcttactattt

SEQ ID NO: 243485 - DNA, 25 bp, Probe sequence
aggaacagagttagagcatcaatca

SEQ ID NO: 243486 - DNA, 25 bp, Probe sequence
agcaacaacattatttggatcaggt

SEQ ID NO: 243487 - DNA, 25 bp, Probe sequence
aaagcgcagtggggcactttagatg

SEQ ID NO: 243488 - DNA, 25 bp, Probe sequence
aaacgtccagactatatgactgcat

SEQ ID NO: 243489 - DNA, 25 bp, Probe sequence
aacatcacaatacgtacgtgacgaa

SEQ ID NO: 243490 - DNA, 25 bp, Probe sequence
aacgcaacagttgaaggaacagagt

SEQ ID NO: 243491 - DNA, 25 bp, Probe sequence
aatactatcacctaattctgaagaa

SEQ ID NO: 243492 - DNA, 25 bp, Probe sequence
aatatcaaaataaacgtccagacta

SEQ ID NO: 243493 - DNA, 25 bp, Probe sequence
aattaccaaatttaccatatgcata

SEQ ID NO: 243494 - DNA, 25 bp, Probe sequence
caccaatcttactatttgatgtttg

SEQ ID NO: 243495 - DNA, 25 bp, Probe sequence
cagtggggcactttagatgaattta

SEQ ID NO: 243496 - DNA, 25 bp, Probe sequence
ccagactatatgactgcattttgga

SEQ ID NO: 243497 - DNA, 25 bp, Probe sequence
gcatgcctactatctgaaatatcaa

SEQ ID NO: 243498 - DNA, 25 bp, Probe sequence
gaagcgatgaggatgtcagtccgta

SEQ ID NO: 243499 - DNA, 25 bp, Probe sequence
gaacaatggagtttcatcacgacaa

SEQ ID NO: 243500 - DNA, 25 bp, Probe sequence
gaaattgtgacaacgccaaaccaag

SEQ ID NO: 243501 - DNA, 25 bp, Probe sequence
gatgtttgggagcatgcctactatc

SEQ ID NO: 243502 - DNA, 25 bp, Probe sequence
gatgtcagtccgtaataatggcggt

SEQ ID NO: 243503 - DNA, 25 bp, Probe sequence
gatgcattggaaccatatatagatc

SEQ ID NO: 243504 - DNA, 25 bp, Probe sequence
gtacgtgacgaaattaaacgcaaca

SEQ ID NO: 243505 - DNA, 25 bp, Probe sequence
ggtggtcattttaaccattcattat

SEQ ID NO: 243506 - DNA, 25 bp, Probe sequence
ggtaccggaagcgatgaggatgtca

SEQ ID NO: 243507 - DNA, 25 bp, Probe sequence
ggttggacttggttagttgttaatg

SEQ ID NO: 243508 - DNA, 25 bp, Probe sequence
ggagtttcatcacgacaaacatcac

SEQ ID NO: 243509 - DNA, 25 bp, Probe sequence
tggatcaggttggacttggttagtt

SEQ ID NO: 243510 - DNA, 25 bp, Probe sequence
tgtgacaacgccaaaccaagataat

SEQ ID NO: 243511 - DNA, 25 bp, Probe sequence
tgatgaattataccaagcagcaaaa

SEQ ID NO: 243512 - DNA, 25 bp, Probe sequence
taatccattaacagaaggcaaaaca

SEQ ID NO: 243513 - DNA, 25 bp, Probe sequence
ttcatcacgacaaacatcacaatac

SEQ ID NO: 243514 - DNA, 25 bp, Probe sequence
ttgctaacttagacaaggtaccgga

SEQ ID NO: 243515 - DNA, 25 bp, Probe sequence
ttgggagcatgcctactatctgaaa

SEQ ID NO: 243516 - DNA, 25 bp, Probe sequence
attgtttgtttgttgatttcatttt

SEQ ID NO: 243517 - DNA, 25 bp, Probe sequence
ataatcatgatgagcgcactgagga

SEQ ID NO: 243518 - DNA, 25 bp, Probe sequence
atcgtgaacctgtgtatgagcgccc

SEQ ID NO: 243519 - DNA, 25 bp, Probe sequence
atcagcaattgtaacgattccttta

SEQ ID NO: 243520 - DNA, 25 bp, Probe sequence
atgcatttatccagcaattattagc

SEQ ID NO: 243521 - DNA, 25 bp, Probe sequence
atgcagaacctgaagttgatccaaa

SEQ ID NO: 243522 - DNA, 25 bp, Probe sequence
atgttgggtgatgttattagtgctt

SEQ ID NO: 243523 - DNA, 25 bp, Probe sequence
agttctaggttggttatgttgggtg

SEQ ID NO: 243524 - DNA, 25 bp, Probe sequence
agcgcagttagtcaacgtcgaatga

SEQ ID NO: 243525 - DNA, 25 bp, Probe sequence
acttatcgttactttaatcattccg

SEQ ID NO: 243526 - DNA, 25 bp, Probe sequence
aatggtatatgggctattatcgttt

SEQ ID NO: 243527 - DNA, 25 bp, Probe sequence
aatcttgtcaggtttcttattctta

SEQ ID NO: 243528 - DNA, 25 bp, Probe sequence
aatcattccgatattattctttatt

SEQ ID NO: 243529 - DNA, 25 bp, Probe sequence
ctcaaattaaacgtccagtaagtag

SEQ ID NO: 243530 - DNA, 25 bp, Probe sequence
gctggaaatggctataatacaacac

SEQ ID NO: 243531 - DNA, 25 bp, Probe sequence
gaagagcgacgtcaaatttacaaca

SEQ ID NO: 243532 - DNA, 25 bp, Probe sequence
gaaccatcagtattatccagacagg

SEQ ID NO: 243533 - DNA, 25 bp, Probe sequence
gaaaaatcaacctagcgcagttagt

SEQ ID NO: 243534 - DNA, 25 bp, Probe sequence
gactggagaacaatttactcaaatt

SEQ ID NO: 243535 - DNA, 25 bp, Probe sequence
gataaagttgaaatggttgcgccac

SEQ ID NO: 243536 - DNA, 25 bp, Probe sequence
gatatttctgaagaacgcaattcaa

SEQ ID NO: 243537 - DNA, 25 bp, Probe sequence
gatttcatttttagctctcatatct

SEQ ID NO: 243538 - DNA, 25 bp, Probe sequence
gttgcgccacaatattatgaagagt

SEQ ID NO: 243539 - DNA, 25 bp, Probe sequence
gtttcattcagtaataacacatcga

SEQ ID NO: 243540 - DNA, 25 bp, Probe sequence
gtaaagcttataaccaacgaatgaa

SEQ ID NO: 243541 - DNA, 25 bp, Probe sequence
gtcattacgatgtttatagcacttg

SEQ ID NO: 243542 - DNA, 25 bp, Probe sequence
ggtttcttattcttaatatcagcaa

SEQ ID NO: 243543 - DNA, 25 bp, Probe sequence
ggaccgatttatgattatcgtgaac

SEQ ID NO: 243544 - DNA, 25 bp, Probe sequence
tgtttatagcacttgtttcattcag

SEQ ID NO: 243545 - DNA, 25 bp, Probe sequence
tgatcaatttcctaaacgtgcagtt

SEQ ID NO: 243546 - DNA, 25 bp, Probe sequence
tgagcgcactgaggaagaaccatca

SEQ ID NO: 243547 - DNA, 25 bp, Probe sequence
tagtgcttactgtcattacgatgtt

SEQ ID NO: 243548 - DNA, 25 bp, Probe sequence
tattctttattattgcgatgatgct

SEQ ID NO: 243549 - DNA, 25 bp, Probe sequence
ttatccagacaggctaaatacaaac

SEQ ID NO: 243550 - DNA, 25 bp, Probe sequence
atttattagttatggggctatccta

SEQ ID NO: 243551 - DNA, 25 bp, Probe sequence
atcatggcttggattgcaaatagta

SEQ ID NO: 243552 - DNA, 25 bp, Probe sequence
agttatggggctatcctatttttct

SEQ ID NO: 243553 - DNA, 25 bp, Probe sequence
agtggtaatgcatcacaacgtgaag

SEQ ID NO: 243554 - DNA, 25 bp, Probe sequence
agtttgatggctcttaatttaattg

SEQ ID NO: 243555 - DNA, 25 bp, Probe sequence
agcaattatctcagaacggtggcaa

SEQ ID NO: 243556 - DNA, 25 bp, Probe sequence
agcgaagcaattatctcagaacggt

SEQ ID NO: 243557 - DNA, 25 bp, Probe sequence
acaatgggtgcattagcaattattt

SEQ ID NO: 243558 - DNA, 25 bp, Probe sequence
aaaagtggtaatgcatcacaacgtg

SEQ ID NO: 243559 - DNA, 25 bp, Probe sequence
aacactttatggtatatttgcgaca

SEQ ID NO: 243560 - DNA, 25 bp, Probe sequence
aacctgaattaatcatggcttggat

SEQ ID NO: 243561 - DNA, 25 bp, Probe sequence
cacaacgtgaagaattagcgaagca

SEQ ID NO: 243562 - DNA, 25 bp, Probe sequence
gcgataattgtaagtttgatggctc

SEQ ID NO: 243563 - DNA, 25 bp, Probe sequence
gcttcagacaacaatgggtgcatta

SEQ ID NO: 243564 - DNA, 25 bp, Probe sequence
gaattaatcatggcttggattgcaa

SEQ ID NO: 243565 - DNA, 25 bp, Probe sequence
gaagcaattatctcagaacggtggc

SEQ ID NO: 243566 - DNA, 25 bp, Probe sequence
gaaaattatcgattatactttttgt

SEQ ID NO: 243567 - DNA, 25 bp, Probe sequence
gaaaacctgaattaatcatggcttg

SEQ ID NO: 243568 - DNA, 25 bp, Probe sequence
gacaacaatgggtgcattagcaatt

SEQ ID NO: 243569 - DNA, 25 bp, Probe sequence
gatggctcttaatttaattgcaatt

SEQ ID NO: 243570 - DNA, 25 bp, Probe sequence
gatatgcttcagacaacaatgggtg

SEQ ID NO: 243571 - DNA, 25 bp, Probe sequence
gttatcgcgataattgtaagtttga

SEQ ID NO: 243572 - DNA, 25 bp, Probe sequence
gttatggggctatcctatttttctt

SEQ ID NO: 243573 - DNA, 25 bp, Probe sequence
gtttctttagatatgcttcagacaa

SEQ ID NO: 243574 - DNA, 25 bp, Probe sequence
ggtatatttgcgacaatttgtatta

SEQ ID NO: 243575 - DNA, 25 bp, Probe sequence
ggacgatgagtatatttatcattaa

SEQ ID NO: 243576 - DNA, 25 bp, Probe sequence
ggcttggattgcaaatagtattagt

SEQ ID NO: 243577 - DNA, 25 bp, Probe sequence
ggctcttaatttaattgcaattgtc

SEQ ID NO: 243578 - DNA, 25 bp, Probe sequence
taatttaattgcaattgtcttatgg

SEQ ID NO: 243579 - DNA, 25 bp, Probe sequence
tagtattagtattatttatttatta

SEQ ID NO: 243580 - DNA, 25 bp, Probe sequence
tatggggctatcctatttttcttta

SEQ ID NO: 243581 - DNA, 25 bp, Probe sequence
tatactttttgttatcgcgataatt

SEQ ID NO: 243582 - DNA, 25 bp, Probe sequence
ttattaatttcaacactttatggta

SEQ ID NO: 243583 - DNA, 25 bp, Probe sequence
ttagcgaagcaattatctcagaacg

SEQ ID NO: 243584 - DNA, 25 bp, Probe sequence
atatcccaatcatcaagtattaggt

SEQ ID NO: 243585 - DNA, 25 bp, Probe sequence
atacaattacatgaacaacgattta

SEQ ID NO: 243586 - DNA, 25 bp, Probe sequence
atgattctaatctaagacaaagcat

SEQ ID NO: 243587 - DNA, 25 bp, Probe sequence
atggcactttatggatttgcccaag

SEQ ID NO: 243588 - DNA, 25 bp, Probe sequence
agaaacatatcccaatcatcaagta

SEQ ID NO: 243589 - DNA, 25 bp, Probe sequence
accttatgcaggttttgtatatgat

SEQ ID NO: 243590 - DNA, 25 bp, Probe sequence
acaattttagaaacatatcccaatc

SEQ ID NO: 243591 - DNA, 25 bp, Probe sequence
aaatccgaatgaccttgttacaaat

SEQ ID NO: 243592 - DNA, 25 bp, Probe sequence
cgatacttccaaaggtacggtatgg

SEQ ID NO: 243593 - DNA, 25 bp, Probe sequence
caaagtcaaatccgaatgaccttgt

SEQ ID NO: 243594 - DNA, 25 bp, Probe sequence
catatggtagtgcagcgcttgaaat

SEQ ID NO: 243595 - DNA, 25 bp, Probe sequence
gccaacccttgaaaccattgaatga

SEQ ID NO: 243596 - DNA, 25 bp, Probe sequence
gcccaaggacttattcaagaagcag

SEQ ID NO: 243597 - DNA, 25 bp, Probe sequence
gcactttatggatttgcccaaggac

SEQ ID NO: 243598 - DNA, 25 bp, Probe sequence
gaatgaccttgttacaaatgtagat

SEQ ID NO: 243599 - DNA, 25 bp, Probe sequence
gaagtgcaagggcatatggtagtgc

SEQ ID NO: 243600 - DNA, 25 bp, Probe sequence
gaaccattaacaattagtggtccaa

SEQ ID NO: 243601 - DNA, 25 bp, Probe sequence
gaaaccattgaatgattctaatcta

SEQ ID NO: 243602 - DNA, 25 bp, Probe sequence
gacatcgatacttccaaaggtacgg

SEQ ID NO: 243603 - DNA, 25 bp, Probe sequence
gacaaagcattattgggatcaatcc

SEQ ID NO: 243604 - DNA, 25 bp, Probe sequence
gtattaggtgaagaagggcatggtc

SEQ ID NO: 243605 - DNA, 25 bp, Probe sequence
gtagccaacccttgaaaccattgaa

SEQ ID NO: 243606 - DNA, 25 bp, Probe sequence
gggcatatggtagtgcagcgcttga

SEQ ID NO: 243607 - DNA, 25 bp, Probe sequence
gtcttatatcatgctaaagtagggg

SEQ ID NO: 243608 - DNA, 25 bp, Probe sequence
gggcatggtcatgacatcgatactt

SEQ ID NO: 243609 - DNA, 25 bp, Probe sequence
ggtcatgacatcgatacttccaaag

SEQ ID NO: 243610 - DNA, 25 bp, Probe sequence
ggtacattgaattttgttcatcaac

SEQ ID NO: 243611 - DNA, 25 bp, Probe sequence
ggttttgtatatgatgttatggctg

SEQ ID NO: 243612 - DNA, 25 bp, Probe sequence
ggatttgcccaaggacttattcaag

SEQ ID NO: 243613 - DNA, 25 bp, Probe sequence
tagacggtacattgaattttgttca

SEQ ID NO: 243614 - DNA, 25 bp, Probe sequence
tagtggtccaaattcaatcttagtt

SEQ ID NO: 243615 - DNA, 25 bp, Probe sequence
tatcgatggtaaaccttatgcaggt

SEQ ID NO: 243616 - DNA, 25 bp, Probe sequence
ttattgggatcaatccgaactggtt

SEQ ID NO: 243617 - DNA, 25 bp, Probe sequence
ttgttgacccaatagacggtacatt

SEQ ID NO: 243618 - DNA, 25 bp, Probe sequence
aaattggcggtcgtcgtaatggtgc

SEQ ID NO: 243619 - DNA, 25 bp, Probe sequence
atttcaatggatcaaggttctgcaa

SEQ ID NO: 243620 - DNA, 25 bp, Probe sequence
atttgctggccgtgaaggtgacttt

SEQ ID NO: 243621 - DNA, 25 bp, Probe sequence
atgaccatcaagaagcattgccagt

SEQ ID NO: 243622 - DNA, 25 bp, Probe sequence
agtttctaacacagattctccagat

SEQ ID NO: 243623 - DNA, 25 bp, Probe sequence
agaattccctgttgtttatgcttca

SEQ ID NO: 243624 - DNA, 25 bp, Probe sequence
agcattgccagttctacgtattgat

SEQ ID NO: 243625 - DNA, 25 bp, Probe sequence
aattattgattatgtaccagctcca

SEQ ID NO: 243626 - DNA, 25 bp, Probe sequence
caaactaacgtacgttctgcaacga

SEQ ID NO: 243627 - DNA, 25 bp, Probe sequence
cagatacatgggtagttgctggtcg

SEQ ID NO: 243628 - DNA, 25 bp, Probe sequence
ccggctcgtggtatgattggttata

SEQ ID NO: 243629 - DNA, 25 bp, Probe sequence
gcaattattgctcacgttgaccatg

SEQ ID NO: 243630 - DNA, 25 bp, Probe sequence
gaagatgtccgcaatatagcaatta

SEQ ID NO: 243631 - DNA, 25 bp, Probe sequence
gaacgtgtgcaatgtgaagtgccac

SEQ ID NO: 243632 - DNA, 25 bp, Probe sequence
gaacatgtcgatgaacgtgcaatgg

SEQ ID NO: 243633 - DNA, 25 bp, Probe sequence
gaaactgtaacaccacatgaccatc

SEQ ID NO: 243634 - DNA, 25 bp, Probe sequence
gagcgtggaattacgattctagcca

SEQ ID NO: 243635 - DNA, 25 bp, Probe sequence
gagcctactcttgaaatgacattta

SEQ ID NO: 243636 - DNA, 25 bp, Probe sequence
gataaaccatcagcacgtccagagg

SEQ ID NO: 243637 - DNA, 25 bp, Probe sequence
gttctacgtattgatgagcctactc

SEQ ID NO: 243638 - DNA, 25 bp, Probe sequence
gtaccagctccaattgataacagtg

SEQ ID NO: 243639 - DNA, 25 bp, Probe sequence
gtaaacttcatggaacctggtactg

SEQ ID NO: 243640 - DNA, 25 bp, Probe sequence
gtgcaatggactctaacgatatcga

SEQ ID NO: 243641 - DNA, 25 bp, Probe sequence
gtgaattgcatttatcaatccttat

SEQ ID NO: 243642 - DNA, 25 bp, Probe sequence
gtgatgagccattacaattccaagt

SEQ ID NO: 243643 - DNA, 25 bp, Probe sequence
ggagatttaattgctgtttcaggta

SEQ ID NO: 243644 - DNA, 25 bp, Probe sequence
ggtacaatgcctcaaacacgttttg

SEQ ID NO: 243645 - DNA, 25 bp, Probe sequence
ggtattggtcgtgtattcagaggta

SEQ ID NO: 243646 - DNA, 25 bp, Probe sequence
ggttgatggggttgtcttagtagta

SEQ ID NO: 243647 - DNA, 25 bp, Probe sequence
ggttctgcaagtacttatgccattt

SEQ ID NO: 243648 - DNA, 25 bp, Probe sequence
tgtgtgaaccatttgaacgtgtgca

SEQ ID NO: 243649 - DNA, 25 bp, Probe sequence
tcagcacgtccagagggtgttgtag

SEQ ID NO: 243650 - DNA, 25 bp, Probe sequence
ttaatctttaatgtaccggctcgtg

SEQ ID NO: 243651 - DNA, 25 bp, Probe sequence
taatggacttacacgtttaatcttt

SEQ ID NO: 243652 - DNA, 25 bp, Probe sequence
attacatgaagcttttacacttgtt

SEQ ID NO: 243653 - DNA, 25 bp, Probe sequence
attaggtttagttgaccgcgaagat

SEQ ID NO: 243654 - DNA, 25 bp, Probe sequence
atttaacattaccttcatgcccatt

SEQ ID NO: 243655 - DNA, 25 bp, Probe sequence
atcttgcatctgattaaagttcaac

SEQ ID NO: 243656 - DNA, 25 bp, Probe sequence
atgctgatgaaatcttgcatctgat

SEQ ID NO: 243657 - DNA, 25 bp, Probe sequence
aggtttagttgaccgcgaagatggc

SEQ ID NO: 243658 - DNA, 25 bp, Probe sequence
acattaccttcatgcccattatatg

SEQ ID NO: 243659 - DNA, 25 bp, Probe sequence
acatgaagcttttacacttgtttaa

SEQ ID NO: 243660 - DNA, 25 bp, Probe sequence
aaattatgttacgtcttgagaaaga

SEQ ID NO: 243661 - DNA, 25 bp, Probe sequence
aaagaagttgattttgctgttaaat

SEQ ID NO: 243662 - DNA, 25 bp, Probe sequence
aacaattgactaaagatgctgatga

SEQ ID NO: 243663 - DNA, 25 bp, Probe sequence
aacattaccttcatgcccattatat

SEQ ID NO: 243664 - DNA, 25 bp, Probe sequence
aatttaacattaccttcatgcccat

SEQ ID NO: 243665 - DNA, 25 bp, Probe sequence
gcccattatatgaagaagtactaga

SEQ ID NO: 243666 - DNA, 25 bp, Probe sequence
gctgatgaaatcttgcatctgatta

SEQ ID NO: 243667 - DNA, 25 bp, Probe sequence
gaagtactagatacacaaatgtttg

SEQ ID NO: 243668 - DNA, 25 bp, Probe sequence
gaactttcaaaattacatgaagctt

SEQ ID NO: 243669 - DNA, 25 bp, Probe sequence
gaaaaatgcagctttgaaacaattg

SEQ ID NO: 243670 - DNA, 25 bp, Probe sequence
gaaatcttgcatctgattaaagttc

SEQ ID NO: 243671 - DNA, 25 bp, Probe sequence
gaccgcgaagatggcaaacaaatta

SEQ ID NO: 243672 - DNA, 25 bp, Probe sequence
gatggcaaacaaattatgttacgtc

SEQ ID NO: 243673 - DNA, 25 bp, Probe sequence
gataatttaacattaccttcatgcc

SEQ ID NO: 243674 - DNA, 25 bp, Probe sequence
gatacacaaatgtttggacttcaaa

SEQ ID NO: 243675 - DNA, 25 bp, Probe sequence
gttgaccgcgaagatggcaaacaaa

SEQ ID NO: 243676 - DNA, 25 bp, Probe sequence
gttacgtcttgagaaagaactttca

SEQ ID NO: 243677 - DNA, 25 bp, Probe sequence
gtttagttgaccgcgaagatggcaa

SEQ ID NO: 243678 - DNA, 25 bp, Probe sequence
tgattttgctgttaaattaggttta

SEQ ID NO: 243679 - DNA, 25 bp, Probe sequence
tgcatctgattaaagttcaactaga

SEQ ID NO: 243680 - DNA, 25 bp, Probe sequence
taatttaacattaccttcatgccca

SEQ ID NO: 243681 - DNA, 25 bp, Probe sequence
taacattaccttcatgcccattata

SEQ ID NO: 243682 - DNA, 25 bp, Probe sequence
aatgcagctttgaaacaattgacta

SEQ ID NO: 243683 - DNA, 25 bp, Probe sequence
tagttgaccgcgaagatggcaaaca

SEQ ID NO: 243684 - DNA, 25 bp, Probe sequence
tttaacattaccttcatgcccatta

SEQ ID NO: 243685 - DNA, 25 bp, Probe sequence
ttaacattaccttcatgcccattat

SEQ ID NO: 243686 - DNA, 25 bp, Probe sequence
attgggataaaatattcagtcgaat

SEQ ID NO: 243687 - DNA, 25 bp, Probe sequence
attttattgaaatgcctttggtagt

SEQ ID NO: 243688 - DNA, 25 bp, Probe sequence
atttcaatttcctcacgtagctttt

SEQ ID NO: 243689 - DNA, 25 bp, Probe sequence
atttcctcacgtagcttttgaaaat

SEQ ID NO: 243690 - DNA, 25 bp, Probe sequence
atatcattaaatttcaatcattata

SEQ ID NO: 243691 - DNA, 25 bp, Probe sequence
atctgatacttttggattaactatt

SEQ ID NO: 243692 - DNA, 25 bp, Probe sequence
atccgatgcagataattacacaaca

SEQ ID NO: 243693 - DNA, 25 bp, Probe sequence
atgttttacaagttatttcaagtat

SEQ ID NO: 243694 - DNA, 25 bp, Probe sequence
aggattgcacagggccatagaaaaa

SEQ ID NO: 243695 - DNA, 25 bp, Probe sequence
aggtataggttcttggacagtgcaa

SEQ ID NO: 243696 - DNA, 25 bp, Probe sequence
acgaagcatacttaatgaagctctt

SEQ ID NO: 243697 - DNA, 25 bp, Probe sequence
aaagtttgagccctatgtaaccaat

SEQ ID NO: 243698 - DNA, 25 bp, Probe sequence
aaaatattcctgtagcagacatagg

SEQ ID NO: 243699 - DNA, 25 bp, Probe sequence
aatacggactatacttgctcagcaa

SEQ ID NO: 243700 - DNA, 25 bp, Probe sequence
cagacataggattgcacagggccat

SEQ ID NO: 243701 - DNA, 25 bp, Probe sequence
cataactcttgctgaattacatata

SEQ ID NO: 243702 - DNA, 25 bp, Probe sequence
gcaggctatcataactcttgctgaa

SEQ ID NO: 243703 - DNA, 25 bp, Probe sequence
gcaagtgagcatagaacaatccaat

SEQ ID NO: 243704 - DNA, 25 bp, Probe sequence
gaagctcttgatatcaatagtaata

SEQ ID NO: 243705 - DNA, 25 bp, Probe sequence
gaaaaaaatcatgatcttccacata

SEQ ID NO: 243706 - DNA, 25 bp, Probe sequence
gaaagcaggctatcataactcttgc

SEQ ID NO: 243707 - DNA, 25 bp, Probe sequence
gaaatgcctttggtagtagatggaa

SEQ ID NO: 243708 - DNA, 25 bp, Probe sequence
gacagtgcaaatgtttatgctattt

SEQ ID NO: 243709 - DNA, 25 bp, Probe sequence
gacgctttaattaaacttcattatc

SEQ ID NO: 243710 - DNA, 25 bp, Probe sequence
gagccctatgtaaccaatgaaaatt

SEQ ID NO: 243711 - DNA, 25 bp, Probe sequence
gatcttccacataaatcgattgata

SEQ ID NO: 243712 - DNA, 25 bp, Probe sequence
gattaactattatatccgatgcaga

SEQ ID NO: 243713 - DNA, 25 bp, Probe sequence
gttagaatttcacgaagcatactta

SEQ ID NO: 243714 - DNA, 25 bp, Probe sequence
gtagatggaaattatgtgctcttaa

SEQ ID NO: 243715 - DNA, 25 bp, Probe sequence
gggagaatcttacttccaaaacatg

SEQ ID NO: 243716 - DNA, 25 bp, Probe sequence
tcaggaagtattaaactctaatcga

SEQ ID NO: 243717 - DNA, 25 bp, Probe sequence
tacacaacattaatacggactatac

SEQ ID NO: 243718 - DNA, 25 bp, Probe sequence
tacttatggtgaaatttttgaacta

SEQ ID NO: 243719 - DNA, 25 bp, Probe sequence
tatgctatttcaatttcctcacgta

SEQ ID NO: 243720 - DNA, 25 bp, Probe sequence
atatcgtgccttccagtttgcaaat

SEQ ID NO: 243721 - DNA, 25 bp, Probe sequence
atcggaggattgctagttattactt

SEQ ID NO: 243722 - DNA, 25 bp, Probe sequence
agtacgctaacagatccattccaat

SEQ ID NO: 243723 - DNA, 25 bp, Probe sequence
agatccattccaattcgaatcagga

SEQ ID NO: 243724 - DNA, 25 bp, Probe sequence
acaaatcaaagtagaccagcaacga

SEQ ID NO: 243725 - DNA, 25 bp, Probe sequence
acaattccattaactggtgtgccat

SEQ ID NO: 243726 - DNA, 25 bp, Probe sequence
aacttgtgtgtgttgggattgccac

SEQ ID NO: 243727 - DNA, 25 bp, Probe sequence
aagacgtagggcaaacattactaat

SEQ ID NO: 243728 - DNA, 25 bp, Probe sequence
aaggtatgattataactatcgtctc

SEQ ID NO: 243729 - DNA, 25 bp, Probe sequence
cattgactggtggtatcgatgttcc

SEQ ID NO: 243730 - DNA, 25 bp, Probe sequence
gccattgccatttatcagctttggt

SEQ ID NO: 243731 - DNA, 25 bp, Probe sequence
gctagttattactttagagttcttt

SEQ ID NO: 243732 - DNA, 25 bp, Probe sequence
gcttgcgataggtaacggtggcgta

SEQ ID NO: 243733 - DNA, 25 bp, Probe sequence
gcaatcatattatatatcccattta

SEQ ID NO: 243734 - DNA, 25 bp, Probe sequence
gaatcaggaactggataccatattt

SEQ ID NO: 243735 - DNA, 25 bp, Probe sequence
gaaccacatacagattttatttttg

SEQ ID NO: 243736 - DNA, 25 bp, Probe sequence
gaccagcaacgaaagaaacaacaac

SEQ ID NO: 243737 - DNA, 25 bp, Probe sequence
gagttctttattgtatatcgtgcct

SEQ ID NO: 243738 - DNA, 25 bp, Probe sequence
gataccatatttccaattcattgct

SEQ ID NO: 243739 - DNA, 25 bp, Probe sequence
gattcttagtagtatttgtcattgc

SEQ ID NO: 243740 - DNA, 25 bp, Probe sequence
gttgggattgccacatactttggaa

SEQ ID NO: 243741 - DNA, 25 bp, Probe sequence
gtatttttacaaccgacaattagca

SEQ ID NO: 243742 - DNA, 25 bp, Probe sequence
ggtggtatcgatgttccaggaacgt

SEQ ID NO: 243743 - DNA, 25 bp, Probe sequence
ggtgtgccattgccatttatcagct

SEQ ID NO: 243744 - DNA, 25 bp, Probe sequence
ggtatttcggcaacaattccattaa

SEQ ID NO: 243745 - DNA, 25 bp, Probe sequence
tcagctttggtggatcatcaatgat

SEQ ID NO: 243746 - DNA, 25 bp, Probe sequence
taattgtattttttattgcattttt

SEQ ID NO: 243747 - DNA, 25 bp, Probe sequence
tagcattaggttgtacgtttttagt

SEQ ID NO: 243748 - DNA, 25 bp, Probe sequence
tacaggcatctgagttattaaaaat

SEQ ID NO: 243749 - DNA, 25 bp, Probe sequence
ttaagtcctattgtattagcattag

SEQ ID NO: 243750 - DNA, 25 bp, Probe sequence
ttaactgccagatttagtacgctaa

SEQ ID NO: 243751 - DNA, 25 bp, Probe sequence
ttgcattaatggctggttggttacc

SEQ ID NO: 243752 - DNA, 25 bp, Probe sequence
ttccaattcattgcttgcgataggt

SEQ ID NO: 243753 - DNA, 25 bp, Probe sequence
ttgggctatttaccagaaccacata

SEQ ID NO: 243754 - DNA, 25 bp, Probe sequence
atatcattgatactgctgttgcttc

SEQ ID NO: 243755 - DNA, 25 bp, Probe sequence
atcgcatccaaaacagcggacgtat

SEQ ID NO: 243756 - DNA, 25 bp, Probe sequence
atggtgacacaatagcgacaggcga

SEQ ID NO: 243757 - DNA, 25 bp, Probe sequence
agtatctggtgacgaattcttcttt

SEQ ID NO: 243758 - DNA, 25 bp, Probe sequence
acgtcaacgtatttgtgatgctgca

SEQ ID NO: 243759 - DNA, 25 bp, Probe sequence
acaagtcagccaagcgccaattcgt

SEQ ID NO: 243760 - DNA, 25 bp, Probe sequence
acaacctttagagatgcacaccaat

SEQ ID NO: 243761 - DNA, 25 bp, Probe sequence
aaacaccagaacttttcgacattca

SEQ ID NO: 243762 - DNA, 25 bp, Probe sequence
aacagctcgtccaggtgaatatcta

SEQ ID NO: 243763 - DNA, 25 bp, Probe sequence
gctcgtacaacggctatcaaggcag

SEQ ID NO: 243764 - DNA, 25 bp, Probe sequence
gcatcaattccaactgtatcttcaa

SEQ ID NO: 243765 - DNA, 25 bp, Probe sequence
gcagcaggtgccgatttatttggtg

SEQ ID NO: 243766 - DNA, 25 bp, Probe sequence
gcacaccaatcattattagctacac

SEQ ID NO: 243767 - DNA, 25 bp, Probe sequence
gaatcagtagtgtcgttcttcaaag

SEQ ID NO: 243768 - DNA, 25 bp, Probe sequence
gaagctggtttcccgctaatgatta

SEQ ID NO: 243769 - DNA, 25 bp, Probe sequence
gaacaatttgcgcgtcgttgtgcag

SEQ ID NO: 243770 - DNA, 25 bp, Probe sequence
gaaatgcctggtggacagtattcga

SEQ ID NO: 243771 - DNA, 25 bp, Probe sequence
gagcaacaaggtcctgttacggagc

SEQ ID NO: 243772 - DNA, 25 bp, Probe sequence
gagtcacttagtcattattggtcaa

SEQ ID NO: 243773 - DNA, 25 bp, Probe sequence
gatgcgattcatcctggctatggat

SEQ ID NO: 243774 - DNA, 25 bp, Probe sequence
gattgttcagtacaacgtcgtcatc

SEQ ID NO: 243775 - DNA, 25 bp, Probe sequence
gttgtagaagttgcaccatcagttg

SEQ ID NO: 243776 - DNA, 25 bp, Probe sequence
gttacttgttgctaaccgtggagaa

SEQ ID NO: 243777 - DNA, 25 bp, Probe sequence
gttacgtgcttcaaacgcagttggt

SEQ ID NO: 243778 - DNA, 25 bp, Probe sequence
gttattcctggtacagacggtccaa

SEQ ID NO: 243779 - DNA, 25 bp, Probe sequence
tgggaacgacttgaacgtctacgta

SEQ ID NO: 243780 - DNA, 25 bp, Probe sequence
ggctatgccatccaatgtcgtatta

SEQ ID NO: 243781 - DNA, 25 bp, Probe sequence
tggtttccaaggtgctgagatatca

SEQ ID NO: 243782 - DNA, 25 bp, Probe sequence
tgatacgcctacattcttctttgga

SEQ ID NO: 243783 - DNA, 25 bp, Probe sequence
tgaaggtttccatattttagcgatt

SEQ ID NO: 243784 - DNA, 25 bp, Probe sequence
tagaagttaaccctcgtgtacaagt

SEQ ID NO: 243785 - DNA, 25 bp, Probe sequence
tattggtcctcatttagaacattta

SEQ ID NO: 243786 - DNA, 25 bp, Probe sequence
ttattggtcaactgtacgtacttat

SEQ ID NO: 243787 - DNA, 25 bp, Probe sequence
ttcgacattcagccgtctctagata

SEQ ID NO: 243788 - DNA, 25 bp, Probe sequence
atacctcaaattttattaatgctat

SEQ ID NO: 243789 - DNA, 25 bp, Probe sequence
atgggtggcgcatgtgcgttaaata

SEQ ID NO: 243790 - DNA, 25 bp, Probe sequence
acatacaacatggaacacagtgatt

SEQ ID NO: 243791 - DNA, 25 bp, Probe sequence
aaattagtttaacagcgattgcgct

SEQ ID NO: 243792 - DNA, 25 bp, Probe sequence
aaccaattcatttttatgccttagc

SEQ ID NO: 243793 - DNA, 25 bp, Probe sequence
aatattccaatgttaccatcagtta

SEQ ID NO: 243794 - DNA, 25 bp, Probe sequence
cacgtgtcagtatgtttatctggtt

SEQ ID NO: 243795 - DNA, 25 bp, Probe sequence
cttttgcgggcgcatggctagcagt

SEQ ID NO: 243796 - DNA, 25 bp, Probe sequence
gcgattgcgctgtttttagttgtat

SEQ ID NO: 243797 - DNA, 25 bp, Probe sequence
gaacacagtgattgggagttttcct

SEQ ID NO: 243798 - DNA, 25 bp, Probe sequence
gacaaatcattccttcttatcatca

SEQ ID NO: 243799 - DNA, 25 bp, Probe sequence
gagcaaagagcatactttgtcacaa

SEQ ID NO: 243800 - DNA, 25 bp, Probe sequence
gatggattgcattaggtttaacaac

SEQ ID NO: 243801 - DNA, 25 bp, Probe sequence
gatattgatcgtattatgcctagta

SEQ ID NO: 243802 - DNA, 25 bp, Probe sequence
gttgtattttgttggcaaccaattc

SEQ ID NO: 243803 - DNA, 25 bp, Probe sequence
gttttggtatgatgttagttggaga

SEQ ID NO: 243804 - DNA, 25 bp, Probe sequence
gtaccaccactaattggatgggttg

SEQ ID NO: 243805 - DNA, 25 bp, Probe sequence
gtgtcttattactcaatatggtcta

SEQ ID NO: 243806 - DNA, 25 bp, Probe sequence
gggcgcatggctagcagttgtaatg

SEQ ID NO: 243807 - DNA, 25 bp, Probe sequence
ggagttttcctggagcagtaccacc

SEQ ID NO: 243808 - DNA, 25 bp, Probe sequence
ggggattgtaggttatgtgtcttat

SEQ ID NO: 243809 - DNA, 25 bp, Probe sequence
ggtgtcgtattcgtagtgttagcta

SEQ ID NO: 243810 - DNA, 25 bp, Probe sequence
ggatgggttgcaattgaaggacaaa

SEQ ID NO: 243811 - DNA, 25 bp, Probe sequence
ggatctactttaattatgggtggcg

SEQ ID NO: 243812 - DNA, 25 bp, Probe sequence
ggcgtacttggtcttatggggattg

SEQ ID NO: 243813 - DNA, 25 bp, Probe sequence
ggctttaaacgtacacgtgtcagta

SEQ ID NO: 243814 - DNA, 25 bp, Probe sequence
tgttcaaggtaacttaattccggct

SEQ ID NO: 243815 - DNA, 25 bp, Probe sequence
tatgcacttgcaaatattccaatgt

SEQ ID NO: 243816 - DNA, 25 bp, Probe sequence
ttatctggttgattattttattgcc

SEQ ID NO: 243817 - DNA, 25 bp, Probe sequence
ttatgccttagctattaaacgtaaa

SEQ ID NO: 243818 - DNA, 25 bp, Probe sequence
ttcctggagcagtaccaccactaat

SEQ ID NO: 243819 - DNA, 25 bp, Probe sequence
ttccttcttatcatcaatacctcaa

SEQ ID NO: 243820 - DNA, 25 bp, Probe sequence
ttgaatataccatcaggcgtacttg

SEQ ID NO: 243821 - DNA, 25 bp, Probe sequence
ttgtttcattacttactttgatcta

SEQ ID NO: 243822 - DNA, 25 bp, Probe sequence
attacaggtgtagcagtttacttat

SEQ ID NO: 243823 - DNA, 25 bp, Probe sequence
atcggtaatacagcatttggcggac

SEQ ID NO: 243824 - DNA, 25 bp, Probe sequence
aggtgtagcagtttacttattatta

SEQ ID NO: 243825 - DNA, 25 bp, Probe sequence
agcatttggcggaccagcatcaatt

SEQ ID NO: 243826 - DNA, 25 bp, Probe sequence
agctgcagctgtttttgctttaact

SEQ ID NO: 243827 - DNA, 25 bp, Probe sequence
aattgccattggttggagacttatt

SEQ ID NO: 243828 - DNA, 25 bp, Probe sequence
caccgcaaattcgggccattcgctt

SEQ ID NO: 243829 - DNA, 25 bp, Probe sequence
cattggttggagacttatttggaaa

SEQ ID NO: 243830 - DNA, 25 bp, Probe sequence
cattcgcttcagttatatggttctg

SEQ ID NO: 243831 - DNA, 25 bp, Probe sequence
cttttttcttaatctatgcaagtag

SEQ ID NO: 243832 - DNA, 25 bp, Probe sequence
ctagttcaaattattactgcattta

SEQ ID NO: 243833 - DNA, 25 bp, Probe sequence
cgggccattcgcttcagttatatgg

SEQ ID NO: 243834 - DNA, 25 bp, Probe sequence
cgcttcagttatatggttctgtact

SEQ ID NO: 243835 - DNA, 25 bp, Probe sequence
ccaggtggagaaacgacatcactga

SEQ ID NO: 243836 - DNA, 25 bp, Probe sequence
gcagctgtttttgctttaacttttt

SEQ ID NO: 243837 - DNA, 25 bp, Probe sequence
gacatcactgattaaagcaacattt

SEQ ID NO: 243838 - DNA, 25 bp, Probe sequence
gattaaagcaacatttggtcattaa

SEQ ID NO: 243839 - DNA, 25 bp, Probe sequence
gttagctgcagctgtttttgcttta

SEQ ID NO: 243840 - DNA, 25 bp, Probe sequence
gttatatggttctgtactgcaatta

SEQ ID NO: 243841 - DNA, 25 bp, Probe sequence
gtattgtcattagtgcaattttaat

SEQ ID NO: 243842 - DNA, 25 bp, Probe sequence
gtacgacatgtattgtcattagtgc

SEQ ID NO: 243843 - DNA, 25 bp, Probe sequence
gtaatacagcatttggcggaccagc

SEQ ID NO: 243844 - DNA, 25 bp, Probe sequence
ggttctgtactgcaattacaggtgt

SEQ ID NO: 243845 - DNA, 25 bp, Probe sequence
ggcggaccagcatcaattaagaaat

SEQ ID NO: 243846 - DNA, 25 bp, Probe sequence
tgggcgttccaattttaccaacgat

SEQ ID NO: 243847 - DNA, 25 bp, Probe sequence
tgttatgttagctgcagctgttttt

SEQ ID NO: 243848 - DNA, 25 bp, Probe sequence
tgctttaacttttttcttaatctat

SEQ ID NO: 243849 - DNA, 25 bp, Probe sequence
tacagcatttggcggaccagcatca

SEQ ID NO: 243850 - DNA, 25 bp, Probe sequence
tagcaacaattggtggtattctagg

SEQ ID NO: 243851 - DNA, 25 bp, Probe sequence
tagcagtttacttattattatatgt

SEQ ID NO: 243852 - DNA, 25 bp, Probe sequence
tatatgtattatatccaggtggaga

SEQ ID NO: 243853 - DNA, 25 bp, Probe sequence
tttggcggaccagcatcaattaaga

SEQ ID NO: 243854 - DNA, 25 bp, Probe sequence
ttttccacattaatttagcaacaat

SEQ ID NO: 243855 - DNA, 25 bp, Probe sequence
ttcttatttttccacattaatttag

SEQ ID NO: 243856 - DNA, 25 bp, Probe sequence
atatgcattcatcaaatcatcaaat

SEQ ID NO: 243857 - DNA, 25 bp, Probe sequence
atcaaatgatgagtccaaaagcaaa

SEQ ID NO: 243858 - DNA, 25 bp, Probe sequence
atgcattcatcaaatcatcaaatga

SEQ ID NO: 243859 - DNA, 25 bp, Probe sequence
atgagtccaaaagcaaatatgcatt

SEQ ID NO: 243860 - DNA, 25 bp, Probe sequence
atgatgagtccaaaagcaaatatgc

SEQ ID NO: 243861 - DNA, 25 bp, Probe sequence
agtccaaaagcaaatatgcattcat

SEQ ID NO: 243862 - DNA, 25 bp, Probe sequence
agcaaatatgcattcatcaaatcat

SEQ ID NO: 243863 - DNA, 25 bp, Probe sequence
accatcaaatgatgagtccaaaagc

SEQ ID NO: 243864 - DNA, 25 bp, Probe sequence
aaatatgcattcatcaaatcatcaa

SEQ ID NO: 243865 - DNA, 25 bp, Probe sequence
aaatgatgagtccaaaagcaaatat

SEQ ID NO: 243866 - DNA, 25 bp, Probe sequence
aaagcaaatatgcattcatcaaatc

SEQ ID NO: 243867 - DNA, 25 bp, Probe sequence
aaaccatcaaatgatgagtccaaaa

SEQ ID NO: 243868 - DNA, 25 bp, Probe sequence
aaccatcaaatgatgagtccaaaag

SEQ ID NO: 243869 - DNA, 25 bp, Probe sequence
aagcaaatatgcattcatcaaatca

SEQ ID NO: 243870 - DNA, 25 bp, Probe sequence
aatgatgagtccaaaagcaaatatg

SEQ ID NO: 243871 - DNA, 25 bp, Probe sequence
aatatgcattcatcaaatcatcaaa

SEQ ID NO: 243872 - DNA, 25 bp, Probe sequence
caaaccatcaaatgatgagtccaaa

SEQ ID NO: 243873 - DNA, 25 bp, Probe sequence
caaatgatgagtccaaaagcaaata

SEQ ID NO: 243874 - DNA, 25 bp, Probe sequence
caaatatgcattcatcaaatcatca

SEQ ID NO: 243875 - DNA, 25 bp, Probe sequence
catcaaatgatgagtccaaaagcaa

SEQ ID NO: 243876 - DNA, 25 bp, Probe sequence
ccatcaaatgatgagtccaaaagca

SEQ ID NO: 243877 - DNA, 25 bp, Probe sequence
ccaaaagcaaatatgcattcatcaa

SEQ ID NO: 243878 - DNA, 25 bp, Probe sequence
gcaaatatgcattcatcaaatcatc

SEQ ID NO: 243879 - DNA, 25 bp, Probe sequence
gagtccaaaagcaaatatgcattca

SEQ ID NO: 243880 - DNA, 25 bp, Probe sequence
gatgagtccaaaagcaaatatgcat

SEQ ID NO: 243881 - DNA, 25 bp, Probe sequence
gtccaaaagcaaatatgcattcatc

SEQ ID NO: 243882 - DNA, 25 bp, Probe sequence
tgagtccaaaagcaaatatgcattc

SEQ ID NO: 243883 - DNA, 25 bp, Probe sequence
tgatgagtccaaaagcaaatatgca

SEQ ID NO: 243884 - DNA, 25 bp, Probe sequence
tgcattcatcaaatcatcaaatgaa

SEQ ID NO: 243885 - DNA, 25 bp, Probe sequence
tccaaaagcaaatatgcattcatca

SEQ ID NO: 243886 - DNA, 25 bp, Probe sequence
tcaaatgatgagtccaaaagcaaat

SEQ ID NO: 243887 - DNA, 25 bp, Probe sequence
tatgcattcatcaaatcatcaaatg

SEQ ID NO: 243888 - DNA, 25 bp, Probe sequence
atgcgcatgctgacacaacttcaat

SEQ ID NO: 243889 - DNA, 25 bp, Probe sequence
atgctgacacaacttcaatgaatgt

SEQ ID NO: 243890 - DNA, 25 bp, Probe sequence
agccacacatgcaacaaggtcatat

SEQ ID NO: 243891 - DNA, 25 bp, Probe sequence
aaagctttaccccaattaagcgctg

SEQ ID NO: 243892 - DNA, 25 bp, Probe sequence
acacaacttcaatgaatgtgtcgaa

SEQ ID NO: 243893 - DNA, 25 bp, Probe sequence
acaacttcaatgaatgtgtcgaata

SEQ ID NO: 243894 - DNA, 25 bp, Probe sequence
aaatgcgcatgctgacacaacttca

SEQ ID NO: 243895 - DNA, 25 bp, Probe sequence
aaaatgcgcatgctgacacaacttc

SEQ ID NO: 243896 - DNA, 25 bp, Probe sequence
aacagccacacatgcaacaaggtca

SEQ ID NO: 243897 - DNA, 25 bp, Probe sequence
aaccaacagccacacatgcaacaag

SEQ ID NO: 243898 - DNA, 25 bp, Probe sequence
aatgcgcatgctgacacaacttcaa

SEQ ID NO: 243899 - DNA, 25 bp, Probe sequence
caacttcaatgaatgtgtcgaataa

SEQ ID NO: 243900 - DNA, 25 bp, Probe sequence
caacagccacacatgcaacaaggtc

SEQ ID NO: 243901 - DNA, 25 bp, Probe sequence
caaaatgcgcatgctgacacaactt

SEQ ID NO: 243902 - DNA, 25 bp, Probe sequence
cacaacttcaatgaatgtgtcgaat

SEQ ID NO: 243903 - DNA, 25 bp, Probe sequence
catgctgacacaacttcaatgaatg

SEQ ID NO: 243904 - DNA, 25 bp, Probe sequence
ctgaattagagaaagctttacccca

SEQ ID NO: 243905 - DNA, 25 bp, Probe sequence
ctgacacaacttcaatgaatgtgtc

SEQ ID NO: 243906 - DNA, 25 bp, Probe sequence
cgcatgctgacacaacttcaatgaa

SEQ ID NO: 243907 - DNA, 25 bp, Probe sequence
gccacacatgcaacaaggtcatatg

SEQ ID NO: 243908 - DNA, 25 bp, Probe sequence
gcgcatgctgacacaacttcaatga

SEQ ID NO: 243909 - DNA, 25 bp, Probe sequence
gctgacacaacttcaatgaatgtgt

SEQ ID NO: 243910 - DNA, 25 bp, Probe sequence
gcatgctgacacaacttcaatgaat

SEQ ID NO: 243911 - DNA, 25 bp, Probe sequence
gaattagagaaagctttaccccaat

SEQ ID NO: 243912 - DNA, 25 bp, Probe sequence
gaaagctttaccccaattaagcgct

SEQ ID NO: 243913 - DNA, 25 bp, Probe sequence
gagaaagctttaccccaattaagcg

SEQ ID NO: 243914 - DNA, 25 bp, Probe sequence
gacacaacttcaatgaatgtgtcga

SEQ ID NO: 243915 - DNA, 25 bp, Probe sequence
tgcgcatgctgacacaacttcaatg

SEQ ID NO: 243916 - DNA, 25 bp, Probe sequence
tgacacaacttcaatgaatgtgtcg

SEQ ID NO: 243917 - DNA, 25 bp, Probe sequence
tgaattagagaaagctttaccccaa

SEQ ID NO: 243918 - DNA, 25 bp, Probe sequence
tgctgacacaacttcaatgaatgtg

SEQ ID NO: 243919 - DNA, 25 bp, Probe sequence
tcaaaatgcgcatgctgacacaact

SEQ ID NO: 243920 - DNA, 25 bp, Probe sequence
tagagaaagctttaccccaattaag

SEQ ID NO: 243921 - DNA, 25 bp, Probe sequence
attacattgtttcaactaaacgtga

SEQ ID NO: 243922 - DNA, 25 bp, Probe sequence
ataacttatatgaagcgacctctaa

SEQ ID NO: 243923 - DNA, 25 bp, Probe sequence
atcatacaagtattaatccagaacc

SEQ ID NO: 243924 - DNA, 25 bp, Probe sequence
agtgcttacttctaaatttggacaa

SEQ ID NO: 243925 - DNA, 25 bp, Probe sequence
agcgatttagcacatattgcatcta

SEQ ID NO: 243926 - DNA, 25 bp, Probe sequence
actgctcaaaatgttggttatgcgt

SEQ ID NO: 243927 - DNA, 25 bp, Probe sequence
acatcgatctcgtctattaaattca

SEQ ID NO: 243928 - DNA, 25 bp, Probe sequence
aaataggacaacattctgcagaaat

SEQ ID NO: 243929 - DNA, 25 bp, Probe sequence
aagcgtccagttgagcaaaatccaa

SEQ ID NO: 243930 - DNA, 25 bp, Probe sequence
aaccatgctgaaaatccaaagccta

SEQ ID NO: 243931 - DNA, 25 bp, Probe sequence
aatgttagcagatattgaaccttat

SEQ ID NO: 243932 - DNA, 25 bp, Probe sequence
aatcaattaatttctctttatgaag

SEQ ID NO: 243933 - DNA, 25 bp, Probe sequence
aatacgatgagatgggtggagatgt

SEQ ID NO: 243934 - DNA, 25 bp, Probe sequence
aattctaattctacgtcagaagagc

SEQ ID NO: 243935 - DNA, 25 bp, Probe sequence
gcacatattgcatctaataacttat

SEQ ID NO: 243936 - DNA, 25 bp, Probe sequence
gaaggtgttggtacatgggtaggta

SEQ ID NO: 243937 - DNA, 25 bp, Probe sequence
gaagagcataataagcgtccagttg

SEQ ID NO: 243938 - DNA, 25 bp, Probe sequence
gaagcgacctctaatggttctgata

SEQ ID NO: 243939 - DNA, 25 bp, Probe sequence
gaaatcgtttcagtgtatgctacag

SEQ ID NO: 243940 - DNA, 25 bp, Probe sequence
gacctctaatggttctgatagtgtt

SEQ ID NO: 243941 - DNA, 25 bp, Probe sequence
gagattattattcactaattttctt

SEQ ID NO: 243942 - DNA, 25 bp, Probe sequence
gaggacgcattaagagggcaattag

SEQ ID NO: 243943 - DNA, 25 bp, Probe sequence
gatcgtgtctacccttttagagatg

SEQ ID NO: 243944 - DNA, 25 bp, Probe sequence
gatgtaccaacattaatccatagtt

SEQ ID NO: 243945 - DNA, 25 bp, Probe sequence
gttacttataaaacaactgctcaaa

SEQ ID NO: 243946 - DNA, 25 bp, Probe sequence
gttatgcgtttaatgatgtaccaac

SEQ ID NO: 243947 - DNA, 25 bp, Probe sequence
gtcaatgttagtccgttaaaaatag

SEQ ID NO: 243948 - DNA, 25 bp, Probe sequence
gtctacccttttagagatggttaca

SEQ ID NO: 243949 - DNA, 25 bp, Probe sequence
gtgttgaatttacagaggacgcatt

SEQ ID NO: 243950 - DNA, 25 bp, Probe sequence
gtgtattctgatcaacaatcgaaaa

SEQ ID NO: 243951 - DNA, 25 bp, Probe sequence
ggtgctaagtgtacgatttttaaca

SEQ ID NO: 243952 - DNA, 25 bp, Probe sequence
ggacaagcagatcgtgtctaccctt

SEQ ID NO: 243953 - DNA, 25 bp, Probe sequence
tatgcacaagtgtattctgatcaac

SEQ ID NO: 243954 - DNA, 25 bp, Probe sequence
ttcagatatacatcgatctcgtcta

SEQ ID NO: 243955 - DNA, 25 bp, Probe sequence
cgggcggatcctgtaattgttcatt

SEQ ID NO: 243956 - DNA, 25 bp, Probe sequence
aggcgctcgaaaacaatgacgaagc

SEQ ID NO: 243957 - DNA, 25 bp, Probe sequence
attctttcaaacatcacatagtggt

SEQ ID NO: 243958 - DNA, 25 bp, Probe sequence
atttatgcatcatttgagcaagcta

SEQ ID NO: 243959 - DNA, 25 bp, Probe sequence
atatgagatgcttgacgttgtgatg

SEQ ID NO: 243960 - DNA, 25 bp, Probe sequence
agagacaagacaacgcaaaagagca

SEQ ID NO: 243961 - DNA, 25 bp, Probe sequence
agctagggaaatggcacttcaacat

SEQ ID NO: 243962 - DNA, 25 bp, Probe sequence
acgggcggatcctgtaattgttcat

SEQ ID NO: 243963 - DNA, 25 bp, Probe sequence
aaacaggcgctcgaaaacaatgacg

SEQ ID NO: 243964 - DNA, 25 bp, Probe sequence
aatccattctttcaaacatcacata

SEQ ID NO: 243965 - DNA, 25 bp, Probe sequence
catagtggttgtgcgacgggcggat

SEQ ID NO: 243966 - DNA, 25 bp, Probe sequence
catcagatatttatgcatcatttga

SEQ ID NO: 243967 - DNA, 25 bp, Probe sequence
catttactttatcaatcatttttaa

SEQ ID NO: 243968 - DNA, 25 bp, Probe sequence
cggatcctgtaattgttcattataa

SEQ ID NO: 243969 - DNA, 25 bp, Probe sequence
cgacgggcggatcctgtaattgttc

SEQ ID NO: 243970 - DNA, 25 bp, Probe sequence
cgaaaattgcgtacgctgtttcaga

SEQ ID NO: 243971 - DNA, 25 bp, Probe sequence
gctaaacaggcgctcgaaaacaatg

SEQ ID NO: 243972 - DNA, 25 bp, Probe sequence
gcttcactagcgatattagatgata

SEQ ID NO: 243973 - DNA, 25 bp, Probe sequence
gcaagctaaacaggcgctcgaaaac

SEQ ID NO: 243974 - DNA, 25 bp, Probe sequence
gaagcttcactagcgatattagatg

SEQ ID NO: 243975 - DNA, 25 bp, Probe sequence
gacaacgcaaaagagcatatgagat

SEQ ID NO: 243976 - DNA, 25 bp, Probe sequence
gacgttgtgatgcattacaaagcta

SEQ ID NO: 243977 - DNA, 25 bp, Probe sequence
gagatgcttgacgttgtgatgcatt

SEQ ID NO: 243978 - DNA, 25 bp, Probe sequence
gatatgatagttgcatcagatattt

SEQ ID NO: 243979 - DNA, 25 bp, Probe sequence
gattaatgaagcttcactagcgata

SEQ ID NO: 243980 - DNA, 25 bp, Probe sequence
gttgttacgaaaattgcgtacgctg

SEQ ID NO: 243981 - DNA, 25 bp, Probe sequence
gtgatgcattacaaagctagggaaa

SEQ ID NO: 243982 - DNA, 25 bp, Probe sequence
gggaaatggcacttcaacatttaat

SEQ ID NO: 243983 - DNA, 25 bp, Probe sequence
ggcggatcctgtaattgttcattat

SEQ ID NO: 243984 - DNA, 25 bp, Probe sequence
tgagcaagctaaacaggcgctcgaa

SEQ ID NO: 243985 - DNA, 25 bp, Probe sequence
tgcttgacgttgtgatgcattacaa

SEQ ID NO: 243986 - DNA, 25 bp, Probe sequence
tccattctttcaaacatcacatagt

SEQ ID NO: 243987 - DNA, 25 bp, Probe sequence
taatgaagcttcactagcgatatta

SEQ ID NO: 243988 - DNA, 25 bp, Probe sequence
ttcgggaaatatcatcctgattata

SEQ ID NO: 243989 - DNA, 25 bp, Probe sequence
atatgaaacatgaacgacaaatccg

SEQ ID NO: 243990 - DNA, 25 bp, Probe sequence
atagagatcgtaaatttgtaattat

SEQ ID NO: 243991 - DNA, 25 bp, Probe sequence
atcccaagaactagtattgtagttt

SEQ ID NO: 243992 - DNA, 25 bp, Probe sequence
atgaatttaatcccaagaactagta

SEQ ID NO: 243993 - DNA, 25 bp, Probe sequence
atggctcaccatataaatacttaaa

SEQ ID NO: 243994 - DNA, 25 bp, Probe sequence
agacacattgatggctcaccatata

SEQ ID NO: 243995 - DNA, 25 bp, Probe sequence
acgttagacacattgatggctcacc

SEQ ID NO: 243996 - DNA, 25 bp, Probe sequence
acatgaacgacaaatccgaaaatat

SEQ ID NO: 243997 - DNA, 25 bp, Probe sequence
aaatatggacatatcgttcattcaa

SEQ ID NO: 243998 - DNA, 25 bp, Probe sequence
aatgcaacttaaatacgttagacac

SEQ ID NO: 243999 - DNA, 25 bp, Probe sequence
aatacgttagacacattgatggctc

SEQ ID NO: 244000 - DNA, 25 bp, Probe sequence
aatatggacatatcgttcattcaaa

SEQ ID NO: 244001 - DNA, 25 bp, Probe sequence
aattgtacataaactaatgcaactt

SEQ ID NO: 244002 - DNA, 25 bp, Probe sequence
cacattgatggctcaccatataaat

SEQ ID NO: 244003 - DNA, 25 bp, Probe sequence
cgttagacacattgatggctcacca

SEQ ID NO: 244004 - DNA, 25 bp, Probe sequence
gcaacttaaatacgttagacacatt

SEQ ID NO: 244005 - DNA, 25 bp, Probe sequence
gaatttaatcccaagaactagtatt

SEQ ID NO: 244006 - DNA, 25 bp, Probe sequence
gaacgacaaatccgaaaatatggac

SEQ ID NO: 244007 - DNA, 25 bp, Probe sequence
gaaacatgaacgacaaatccgaaaa

SEQ ID NO: 244008 - DNA, 25 bp, Probe sequence
gacacattgatggctcaccatataa

SEQ ID NO: 244009 - DNA, 25 bp, Probe sequence
gacatatcgttcattcaaatagaga

SEQ ID NO: 244010 - DNA, 25 bp, Probe sequence
gatggctcaccatataaatacttaa

SEQ ID NO: 244011 - DNA, 25 bp, Probe sequence
gatgttgatcaaattgtacataaac

SEQ ID NO: 244012 - DNA, 25 bp, Probe sequence
gttagacacattgatggctcaccat

SEQ ID NO: 244013 - DNA, 25 bp, Probe sequence
ggctcaccatataaatacttaaaga

SEQ ID NO: 244014 - DNA, 25 bp, Probe sequence
tggacatatcgttcattcaaataga

SEQ ID NO: 244015 - DNA, 25 bp, Probe sequence
tcgttcattcaaatagagatcgtaa

SEQ ID NO: 244016 - DNA, 25 bp, Probe sequence
tacgttagacacattgatggctcac

SEQ ID NO: 244017 - DNA, 25 bp, Probe sequence
tagacacattgatggctcaccatat

SEQ ID NO: 244018 - DNA, 25 bp, Probe sequence
tatggacatatcgttcattcaaata

SEQ ID NO: 244019 - DNA, 25 bp, Probe sequence
tatcgttcattcaaatagagatcgt

SEQ ID NO: 244020 - DNA, 25 bp, Probe sequence
ttagacacattgatggctcaccata

SEQ ID NO: 244021 - DNA, 25 bp, Probe sequence
ttaatcccaagaactagtattgtag

SEQ ID NO: 244022 - DNA, 25 bp, Probe sequence
ttgtaattatgtatgtgaatgagca

SEQ ID NO: 244023 - DNA, 25 bp, Probe sequence
atattcaatttgatgtcattttctt

SEQ ID NO: 244024 - DNA, 25 bp, Probe sequence
atagtttatatgatgtgtcaggtat

SEQ ID NO: 244025 - DNA, 25 bp, Probe sequence
atacgagaccaactatggataaagt

SEQ ID NO: 244026 - DNA, 25 bp, Probe sequence
ataatgcagatagagctttaaaagc

SEQ ID NO: 244027 - DNA, 25 bp, Probe sequence
atcttgcgaatttggatttagaggc

SEQ ID NO: 244028 - DNA, 25 bp, Probe sequence
atcgtttgtgaatttagcaatcatg

SEQ ID NO: 244029 - DNA, 25 bp, Probe sequence
atgcgcgtcattgcaggtaaacata

SEQ ID NO: 244030 - DNA, 25 bp, Probe sequence
atgattaaacgttaccattatgggt

SEQ ID NO: 244031 - DNA, 25 bp, Probe sequence
atgggttgacagacacattgttatt

SEQ ID NO: 244032 - DNA, 25 bp, Probe sequence
aggtctcattgataaagctttaaaa

SEQ ID NO: 244033 - DNA, 25 bp, Probe sequence
agctttagaaagtatggaaggccgt

SEQ ID NO: 244034 - DNA, 25 bp, Probe sequence
accattatgggttgacagacacatt

SEQ ID NO: 244035 - DNA, 25 bp, Probe sequence
actaatttcagagtttaatttattg

SEQ ID NO: 244036 - DNA, 25 bp, Probe sequence
aaacgttaccattatgggttgacag

SEQ ID NO: 244037 - DNA, 25 bp, Probe sequence
aagttattaaatcaaatcttgcgaa

SEQ ID NO: 244038 - DNA, 25 bp, Probe sequence
cttggaatagaagcactctctcgag

SEQ ID NO: 244039 - DNA, 25 bp, Probe sequence
ccgtaatacgagaccaactatggat

SEQ ID NO: 244040 - DNA, 25 bp, Probe sequence
ccaccttataataaaggtctcattg

SEQ ID NO: 244041 - DNA, 25 bp, Probe sequence
gcgcgtcattgcaggtaaacataaa

SEQ ID NO: 244042 - DNA, 25 bp, Probe sequence
gcgaatttggatttagaggcacaat

SEQ ID NO: 244043 - DNA, 25 bp, Probe sequence
gaatagaagcactctctcgaggtat

SEQ ID NO: 244044 - DNA, 25 bp, Probe sequence
gaaggtatctttaatagtttatatg

SEQ ID NO: 244045 - DNA, 25 bp, Probe sequence
gaaaatggtatcatcgtttgtgaat

SEQ ID NO: 244046 - DNA, 25 bp, Probe sequence
gacacattgttattagaaaagggag

SEQ ID NO: 244047 - DNA, 25 bp, Probe sequence
gaggcacaatctgaagtttataaaa

SEQ ID NO: 244048 - DNA, 25 bp, Probe sequence
gatgtgtcaggtataggtttagatt

SEQ ID NO: 244049 - DNA, 25 bp, Probe sequence
gttgatcaaaattttaaagctgtaa

SEQ ID NO: 244050 - DNA, 25 bp, Probe sequence
ggaaggccgtaatacgagaccaact

SEQ ID NO: 244051 - DNA, 25 bp, Probe sequence
ggggcgcttggaatagaagcactct

SEQ ID NO: 244052 - DNA, 25 bp, Probe sequence
ggccgtaatacgagaccaactatgg

SEQ ID NO: 244053 - DNA, 25 bp, Probe sequence
ggtatcatcgtttgtgaatttagca

SEQ ID NO: 244054 - DNA, 25 bp, Probe sequence
ggttgacagacacattgttattaga

SEQ ID NO: 244055 - DNA, 25 bp, Probe sequence
taggtttagatttatttgcaggaag

SEQ ID NO: 244056 - DNA, 25 bp, Probe sequence
ttcaatttgatgtcattttcttaga

SEQ ID NO: 244057 - DNA, 25 bp, Probe sequence
attcgttccaccttatgttgaaaag

SEQ ID NO: 244058 - DNA, 25 bp, Probe sequence
attcatttataagttcaagtattgt

SEQ ID NO: 244059 - DNA, 25 bp, Probe sequence
attacgcttaacttcaatgaataaa

SEQ ID NO: 244060 - DNA, 25 bp, Probe sequence
atatttctgaattcgttccacctta

SEQ ID NO: 244061 - DNA, 25 bp, Probe sequence
aggagctaaaacaatcatacgtggt

SEQ ID NO: 244062 - DNA, 25 bp, Probe sequence
aggttcatcaatttagtggtttact

SEQ ID NO: 244063 - DNA, 25 bp, Probe sequence
agttgcagcttatcgagcagatatt

SEQ ID NO: 244064 - DNA, 25 bp, Probe sequence
acgttatatatgatgtctagtacta

SEQ ID NO: 244065 - DNA, 25 bp, Probe sequence
aaacaatcatacgtggtttaagagc

SEQ ID NO: 244066 - DNA, 25 bp, Probe sequence
aagaagttgcagcttatcgagcaga

SEQ ID NO: 244067 - DNA, 25 bp, Probe sequence
aagtattgttaaagaagttgcagct

SEQ ID NO: 244068 - DNA, 25 bp, Probe sequence
catttacctaatgtcaaggttcatc

SEQ ID NO: 244069 - DNA, 25 bp, Probe sequence
cctaatgtcaaggttcatcaattta

SEQ ID NO: 244070 - DNA, 25 bp, Probe sequence
gcagatatttctgaattcgttccac

SEQ ID NO: 244071 - DNA, 25 bp, Probe sequence
gcagcttatcgagcagatatttctg

SEQ ID NO: 244072 - DNA, 25 bp, Probe sequence
gaattcgttccaccttatgttgaaa

SEQ ID NO: 244073 - DNA, 25 bp, Probe sequence
gaattacgcttaacttcaatgaata

SEQ ID NO: 244074 - DNA, 25 bp, Probe sequence
gaagttgcagcttatcgagcagata

SEQ ID NO: 244075 - DNA, 25 bp, Probe sequence
gaacaatctgttaaacatttaccta

SEQ ID NO: 244076 - DNA, 25 bp, Probe sequence
gaaacgttatatatgatgtctagta

SEQ ID NO: 244077 - DNA, 25 bp, Probe sequence
gatgtctagtactaattattcattt

SEQ ID NO: 244078 - DNA, 25 bp, Probe sequence
gatatttctgaattcgttccacctt

SEQ ID NO: 244079 - DNA, 25 bp, Probe sequence
gttccaccttatgttgaaaaggcat

SEQ ID NO: 244080 - DNA, 25 bp, Probe sequence
gtcaaggttcatcaatttagtggtt

SEQ ID NO: 244081 - DNA, 25 bp, Probe sequence
gtctagtactaattattcatttata

SEQ ID NO: 244082 - DNA, 25 bp, Probe sequence
gtgattttgaatatgaattacgctt

SEQ ID NO: 244083 - DNA, 25 bp, Probe sequence
gtggtttactagtcgattattgtga

SEQ ID NO: 244084 - DNA, 25 bp, Probe sequence
tgaattcgttccaccttatgttgaa

SEQ ID NO: 244085 - DNA, 25 bp, Probe sequence
tctgaattcgttccaccttatgttg

SEQ ID NO: 244086 - DNA, 25 bp, Probe sequence
tttctgaattcgttccaccttatgt

SEQ ID NO: 244087 - DNA, 25 bp, Probe sequence
tatttctgaattcgttccaccttat

SEQ ID NO: 244088 - DNA, 25 bp, Probe sequence
tattgtgaacaagtaggagctaaaa

SEQ ID NO: 244089 - DNA, 25 bp, Probe sequence
ttactagtcgattattgtgaacaag

SEQ ID NO: 244090 - DNA, 25 bp, Probe sequence
ttctgaattcgttccaccttatgtt

SEQ ID NO: 244091 - DNA, 25 bp, Probe sequence
ataattcaaagtgagtttcatgata

SEQ ID NO: 244092 - DNA, 25 bp, Probe sequence
ataatttcgcaaaaatggctgaagc

SEQ ID NO: 244093 - DNA, 25 bp, Probe sequence
atcattacttgatcaatcttatgta

SEQ ID NO: 244094 - DNA, 25 bp, Probe sequence
agagcaaaagcagcactaaaaagta

SEQ ID NO: 244095 - DNA, 25 bp, Probe sequence
accaatatagagcaaaagcagcact

SEQ ID NO: 244096 - DNA, 25 bp, Probe sequence
actacaaacgtatgattatgatgaa

SEQ ID NO: 244097 - DNA, 25 bp, Probe sequence
acagcagtatcaacgttagatggga

SEQ ID NO: 244098 - DNA, 25 bp, Probe sequence
acaacagcagtatcaacgttagatg

SEQ ID NO: 244099 - DNA, 25 bp, Probe sequence
aaacccatactacaaacgtatgatt

SEQ ID NO: 244100 - DNA, 25 bp, Probe sequence
aacgtatgattatgatgaaccaata

SEQ ID NO: 244101 - DNA, 25 bp, Probe sequence
aacgttagatgggaataaagcagat

SEQ ID NO: 244102 - DNA, 25 bp, Probe sequence
aatggctgaagctaaagttggatta

SEQ ID NO: 244103 - DNA, 25 bp, Probe sequence
caggaagcttaaacccatactacaa

SEQ ID NO: 244104 - DNA, 25 bp, Probe sequence
gctgaagaattgaaatcattacttg

SEQ ID NO: 244105 - DNA, 25 bp, Probe sequence
gcttaaacccatactacaaacgtat

SEQ ID NO: 244106 - DNA, 25 bp, Probe sequence
gcaggaagcttaaacccatactaca

SEQ ID NO: 244107 - DNA, 25 bp, Probe sequence
gcaggaacattagcagtactattat

SEQ ID NO: 244108 - DNA, 25 bp, Probe sequence
gcagtactattatcaacaacagcag

SEQ ID NO: 244109 - DNA, 25 bp, Probe sequence
gcagtatcaacgttagatgggaata

SEQ ID NO: 244110 - DNA, 25 bp, Probe sequence
gcagatgcaagtagtaagaaagact

SEQ ID NO: 244111 - DNA, 25 bp, Probe sequence
gaagcttaaacccatactacaaacg

SEQ ID NO: 244112 - DNA, 25 bp, Probe sequence
gaacattagcagtactattatcaac

SEQ ID NO: 244113 - DNA, 25 bp, Probe sequence
gaaatcattacttgatcaatcttat

SEQ ID NO: 244114 - DNA, 25 bp, Probe sequence
gatgaaccaatatagagcaaaagca

SEQ ID NO: 244115 - DNA, 25 bp, Probe sequence
gtttcatgataaacgaattgctgaa

SEQ ID NO: 244116 - DNA, 25 bp, Probe sequence
gtagcaggaacattagcagtactat

SEQ ID NO: 244117 - DNA, 25 bp, Probe sequence
tgtaaatgatttagctgcaggaagc

SEQ ID NO: 244118 - DNA, 25 bp, Probe sequence
tgcaggaagcttaaacccatactac

SEQ ID NO: 244119 - DNA, 25 bp, Probe sequence
tcaacaacagcagtatcaacgttag

SEQ ID NO: 244120 - DNA, 25 bp, Probe sequence
tacttgatcaatcttatgtaaatga

SEQ ID NO: 244121 - DNA, 25 bp, Probe sequence
tatagtagcaggaacattagcagta

SEQ ID NO: 244122 - DNA, 25 bp, Probe sequence
tattatcaacaacagcagtatcaac

SEQ ID NO: 244123 - DNA, 25 bp, Probe sequence
ttatcaacaacagcagtatcaacgt

SEQ ID NO: 244124 - DNA, 25 bp, Probe sequence
ttagcagtactattatcaacaacag

SEQ ID NO: 244125 - DNA, 25 bp, Probe sequence
atctccaattacaatccaaggtcag

SEQ ID NO: 244126 - DNA, 25 bp, Probe sequence
attagatgagcttgctaaacagcaa

SEQ ID NO: 244127 - DNA, 25 bp, Probe sequence
atttatctccaattacaatccaagg

SEQ ID NO: 244128 - DNA, 25 bp, Probe sequence
atggttgggaagtaatcgatgagga

SEQ ID NO: 244129 - DNA, 25 bp, Probe sequence
aacagcaagaacaagatgattcaga

SEQ ID NO: 244130 - DNA, 25 bp, Probe sequence
aagtcccactagatgtaactactac

SEQ ID NO: 244131 - DNA, 25 bp, Probe sequence
aagtcgttgcggatattcacattac

SEQ ID NO: 244132 - DNA, 25 bp, Probe sequence
aagtcaacagaagtcgttgcggata

SEQ ID NO: 244133 - DNA, 25 bp, Probe sequence
aaggtaagccatttgaatttgatca

SEQ ID NO: 244134 - DNA, 25 bp, Probe sequence
cacgacaagttgatccaaggcttca

SEQ ID NO: 244135 - DNA, 25 bp, Probe sequence
cttgtgcacgtactcttgtaccagt

SEQ ID NO: 244136 - DNA, 25 bp, Probe sequence
cgttgcggatattcacattactgga

SEQ ID NO: 244137 - DNA, 25 bp, Probe sequence
gcggatattcacattactggaacgt

SEQ ID NO: 244138 - DNA, 25 bp, Probe sequence
gcaaagtgaccaaatgttgacagta

SEQ ID NO: 244139 - DNA, 25 bp, Probe sequence
gaatttgatcaaacggtgagttttg

SEQ ID NO: 244140 - DNA, 25 bp, Probe sequence
gaagggtacaatcagtataacgatg

SEQ ID NO: 244141 - DNA, 25 bp, Probe sequence
gaacgtatacaatgccttgtgcacg

SEQ ID NO: 244142 - DNA, 25 bp, Probe sequence
gaaatggtcaattacgcaattaagg

SEQ ID NO: 244143 - DNA, 25 bp, Probe sequence
gagcttattcagagcaaagtgacca

SEQ ID NO: 244144 - DNA, 25 bp, Probe sequence
gagaaaccaatgagagcttattcag

SEQ ID NO: 244145 - DNA, 25 bp, Probe sequence
gaggatcaattagatgagcttgcta

SEQ ID NO: 244146 - DNA, 25 bp, Probe sequence
gatggtatggttaatcttcaggata

SEQ ID NO: 244147 - DNA, 25 bp, Probe sequence
gatccaaggcttcaaaaattacaac

SEQ ID NO: 244148 - DNA, 25 bp, Probe sequence
gattcagaatcacgacaagttgatc

SEQ ID NO: 244149 - DNA, 25 bp, Probe sequence
gttgacagtaggtaatggttgggaa

SEQ ID NO: 244150 - DNA, 25 bp, Probe sequence
gtagatgaacactatcacattatta

SEQ ID NO: 244151 - DNA, 25 bp, Probe sequence
gtaactactacagaagtatttgatt

SEQ ID NO: 244152 - DNA, 25 bp, Probe sequence
gtcgaggatatagttattattgaga

SEQ ID NO: 244153 - DNA, 25 bp, Probe sequence
ggtcagttaaccattaagtcaacag

SEQ ID NO: 244154 - DNA, 25 bp, Probe sequence
taatcttcaggatattgtcgaggat

SEQ ID NO: 244155 - DNA, 25 bp, Probe sequence
tacaatccaaggtcagttaaccatt

SEQ ID NO: 244156 - DNA, 25 bp, Probe sequence
tacaatgccttgtgcacgtactctt

SEQ ID NO: 244157 - DNA, 25 bp, Probe sequence
tactggaacgtatacaatgccttgt

SEQ ID NO: 244158 - DNA, 25 bp, Probe sequence
tagatttaattgatttatctccaat

SEQ ID NO: 244159 - DNA, 25 bp, Probe sequence
atttcaaaatttcagtaccaggtat

SEQ ID NO: 244160 - DNA, 25 bp, Probe sequence
atcacaccgtgtatgtaaaaactgt

SEQ ID NO: 244161 - DNA, 25 bp, Probe sequence
atgcccaaactgtggcgaatacaaa

SEQ ID NO: 244162 - DNA, 25 bp, Probe sequence
atgactgaatgcccaaactgtggcg

SEQ ID NO: 244163 - DNA, 25 bp, Probe sequence
atggcgaagaagtagcagctaaata

SEQ ID NO: 244164 - DNA, 25 bp, Probe sequence
aggtatgactgaatgcccaaactgt

SEQ ID NO: 244165 - DNA, 25 bp, Probe sequence
agtaccaggtatgactgaatgccca

SEQ ID NO: 244166 - DNA, 25 bp, Probe sequence
accaggtatgactgaatgcccaaac

SEQ ID NO: 244167 - DNA, 25 bp, Probe sequence
actgtggttcttacaatggcgaaga

SEQ ID NO: 244168 - DNA, 25 bp, Probe sequence
acgtcgtacgcatttcaaaatttca

SEQ ID NO: 244169 - DNA, 25 bp, Probe sequence
acaaacgtcgtacgcatttcaaaat

SEQ ID NO: 244170 - DNA, 25 bp, Probe sequence
aaaaactgtggttcttacaatggcg

SEQ ID NO: 244171 - DNA, 25 bp, Probe sequence
acaatggcgaagaagtagcagctaa

SEQ ID NO: 244172 - DNA, 25 bp, Probe sequence
aaactgtggttcttacaatggcgaa

SEQ ID NO: 244173 - DNA, 25 bp, Probe sequence
aactgtggttcttacaatggcgaag

SEQ ID NO: 244174 - DNA, 25 bp, Probe sequence
caaacgtcgtacgcatttcaaaatt

SEQ ID NO: 244175 - DNA, 25 bp, Probe sequence
caaattatcacaccgtgtatgtaaa

SEQ ID NO: 244176 - DNA, 25 bp, Probe sequence
ctgaatgcccaaactgtggcgaata

SEQ ID NO: 244177 - DNA, 25 bp, Probe sequence
cgcatttcaaaatttcagtaccagg

SEQ ID NO: 244178 - DNA, 25 bp, Probe sequence
ccgtgtatgtaaaaactgtggttct

SEQ ID NO: 244179 - DNA, 25 bp, Probe sequence
gcgaatacaaattatcacaccgtgt

SEQ ID NO: 244180 - DNA, 25 bp, Probe sequence
gaatgcccaaactgtggcgaataca

SEQ ID NO: 244181 - DNA, 25 bp, Probe sequence
gactgaatgcccaaactgtggcgaa

SEQ ID NO: 244182 - DNA, 25 bp, Probe sequence
gtatgactgaatgcccaaactgtgg

SEQ ID NO: 244183 - DNA, 25 bp, Probe sequence
gtaccaggtatgactgaatgcccaa

SEQ ID NO: 244184 - DNA, 25 bp, Probe sequence
gtcgtacgcatttcaaaatttcagt

SEQ ID NO: 244185 - DNA, 25 bp, Probe sequence
gtggttcttacaatggcgaagaagt

SEQ ID NO: 244186 - DNA, 25 bp, Probe sequence
ggtatgactgaatgcccaaactgtg

SEQ ID NO: 244187 - DNA, 25 bp, Probe sequence
ggcagtaccaaaaagaagaacttct

SEQ ID NO: 244188 - DNA, 25 bp, Probe sequence
ggcgaatacaaattatcacaccgtg

SEQ ID NO: 244189 - DNA, 25 bp, Probe sequence
tcaaaatttcagtaccaggtatgac

SEQ ID NO: 244190 - DNA, 25 bp, Probe sequence
tacaaattatcacaccgtgtatgta

SEQ ID NO: 244191 - DNA, 25 bp, Probe sequence
tagaaaaaacaaacgtcgtacgcat

SEQ ID NO: 244192 - DNA, 25 bp, Probe sequence
tacgcatttcaaaatttcagtacca

SEQ ID NO: 244193 - DNA, 25 bp, Probe sequence
attctgcttcaggtagtgacaaagg

SEQ ID NO: 244194 - DNA, 25 bp, Probe sequence
attatcatcatcgcgacattcagta

SEQ ID NO: 244195 - DNA, 25 bp, Probe sequence
ataccagttgcatccttagcattat

SEQ ID NO: 244196 - DNA, 25 bp, Probe sequence
aggtagtgacaaaggatctgatgga

SEQ ID NO: 244197 - DNA, 25 bp, Probe sequence
agcggtactttgaattatgaggttt

SEQ ID NO: 244198 - DNA, 25 bp, Probe sequence
accagttgcatccttagcattatta

SEQ ID NO: 244199 - DNA, 25 bp, Probe sequence
acaaatacaataccaatgacacgtc

SEQ ID NO: 244200 - DNA, 25 bp, Probe sequence
aaatgctggtacacctgcatatata

SEQ ID NO: 244201 - DNA, 25 bp, Probe sequence
aaaaattctgcttcaggtagtgaca

SEQ ID NO: 244202 - DNA, 25 bp, Probe sequence
aaaaatctaaaggcaatgtggaata

SEQ ID NO: 244203 - DNA, 25 bp, Probe sequence
aacaaatgctggtacacctgcatat

SEQ ID NO: 244204 - DNA, 25 bp, Probe sequence
aatgccgcagatagcggtactttga

SEQ ID NO: 244205 - DNA, 25 bp, Probe sequence
caataccagttgcatccttagcatt

SEQ ID NO: 244206 - DNA, 25 bp, Probe sequence
cacaaacaaatgctggtacacctgc

SEQ ID NO: 244207 - DNA, 25 bp, Probe sequence
ctgatgtagcaggtgctaatgcacc

SEQ ID NO: 244208 - DNA, 25 bp, Probe sequence
cgactactggtcaaagtgaatctaa

SEQ ID NO: 244209 - DNA, 25 bp, Probe sequence
cgcaatcacattgtttgttagaaaa

SEQ ID NO: 244210 - DNA, 25 bp, Probe sequence
gcattattaatcgcaatcacattgt

SEQ ID NO: 244211 - DNA, 25 bp, Probe sequence
gcagatagcggtactttgaattatg

SEQ ID NO: 244212 - DNA, 25 bp, Probe sequence
gcatccttagcattattaatcgcaa

SEQ ID NO: 244213 - DNA, 25 bp, Probe sequence
gcaaatgccgcagatagcggtactt

SEQ ID NO: 244214 - DNA, 25 bp, Probe sequence
gaattatgaggtttacaaatacaat

SEQ ID NO: 244215 - DNA, 25 bp, Probe sequence
gacaaagtagaaaatccacaaacaa

SEQ ID NO: 244216 - DNA, 25 bp, Probe sequence
gatgataaaaattctgcttcaggta

SEQ ID NO: 244217 - DNA, 25 bp, Probe sequence
gattttagcgttaattatcatcatc

SEQ ID NO: 244218 - DNA, 25 bp, Probe sequence
gttaattatcatcatcgcgacattc

SEQ ID NO: 244219 - DNA, 25 bp, Probe sequence
gtagcaggtgctaatgcaccaggta

SEQ ID NO: 244220 - DNA, 25 bp, Probe sequence
gtaaattgtatgttcaaataactgt

SEQ ID NO: 244221 - DNA, 25 bp, Probe sequence
gtgctaatgcaccaggtaaagatga

SEQ ID NO: 244222 - DNA, 25 bp, Probe sequence
tgctggtacacctgcatatatatat

SEQ ID NO: 244223 - DNA, 25 bp, Probe sequence
taatgactattttaataaaccggca

SEQ ID NO: 244224 - DNA, 25 bp, Probe sequence
taataaaccggcaaagtacattaag

SEQ ID NO: 244225 - DNA, 25 bp, Probe sequence
taatcgcaatcacattgtttgttag

SEQ ID NO: 244226 - DNA, 25 bp, Probe sequence
tatcatcatcgcgacattcagtaat

SEQ ID NO: 244227 - DNA, 25 bp, Probe sequence
attttacttatttcggcacatttat

SEQ ID NO: 244228 - DNA, 25 bp, Probe sequence
atccatcagccaaatttaatcaacc

SEQ ID NO: 244229 - DNA, 25 bp, Probe sequence
atgtaactgaggaacaacaactagt

SEQ ID NO: 244230 - DNA, 25 bp, Probe sequence
agtgccttcaaaacatcaaaatcaa

SEQ ID NO: 244231 - DNA, 25 bp, Probe sequence
agataaaatatccatcagccaaatt

SEQ ID NO: 244232 - DNA, 25 bp, Probe sequence
agaagtgccttcaaaacatcaaaat

SEQ ID NO: 244233 - DNA, 25 bp, Probe sequence
agcgttaccagcttttaatagagat

SEQ ID NO: 244234 - DNA, 25 bp, Probe sequence
agcgtgttggctgatgagataaaat

SEQ ID NO: 244235 - DNA, 25 bp, Probe sequence
acttatttcggcacatttatacagc

SEQ ID NO: 244236 - DNA, 25 bp, Probe sequence
acagcagaaagagaggtaaccaagt

SEQ ID NO: 244237 - DNA, 25 bp, Probe sequence
acaatgattggtagcgtgttggctg

SEQ ID NO: 244238 - DNA, 25 bp, Probe sequence
aaatcaatatgcatgttaaaacgtt

SEQ ID NO: 244239 - DNA, 25 bp, Probe sequence
aaatgatattcctgtacaaaaagat

SEQ ID NO: 244240 - DNA, 25 bp, Probe sequence
aaagcatcaggtacattaaaagttg

SEQ ID NO: 244241 - DNA, 25 bp, Probe sequence
aaaaggcgcaattgatttcagatat

SEQ ID NO: 244242 - DNA, 25 bp, Probe sequence
aacaactagttgacgaaaaggcgca

SEQ ID NO: 244243 - DNA, 25 bp, Probe sequence
aacaaattgctacaaaatctattat

SEQ ID NO: 244244 - DNA, 25 bp, Probe sequence
aagaacttgatgaaccaaatcataa

SEQ ID NO: 244245 - DNA, 25 bp, Probe sequence
aataatcacaaagagcaaccgaaac

SEQ ID NO: 244246 - DNA, 25 bp, Probe sequence
caaagagcaaccgaaacataaagat

SEQ ID NO: 244247 - DNA, 25 bp, Probe sequence
gccaaatttaatcaacctgaagcaa

SEQ ID NO: 244248 - DNA, 25 bp, Probe sequence
gcgcaattgatttcagatatgactg

SEQ ID NO: 244249 - DNA, 25 bp, Probe sequence
gcatgttaaaacgttggctgaaaag

SEQ ID NO: 244250 - DNA, 25 bp, Probe sequence
gaatagtagtcaattatctagtgat

SEQ ID NO: 244251 - DNA, 25 bp, Probe sequence
gaacaacttgtttttcaaaatgaca

SEQ ID NO: 244252 - DNA, 25 bp, Probe sequence
gaaagacgtactagcctttttactg

SEQ ID NO: 244253 - DNA, 25 bp, Probe sequence
gactggtaaaatttacttgcaagta

SEQ ID NO: 244254 - DNA, 25 bp, Probe sequence
gagcgacctaaagcatcaggtacat

SEQ ID NO: 244255 - DNA, 25 bp, Probe sequence
gatgatgatagcaagaatagtagtc

SEQ ID NO: 244256 - DNA, 25 bp, Probe sequence
gataaagtgcaacaagacagtaata

SEQ ID NO: 244257 - DNA, 25 bp, Probe sequence
gattggtagcgtgttggctgatgag

SEQ ID NO: 244258 - DNA, 25 bp, Probe sequence
ggatgacacaatagtaagaatttta

SEQ ID NO: 244259 - DNA, 25 bp, Probe sequence
tcggcacatttatacagcagaaaga

SEQ ID NO: 244260 - DNA, 25 bp, Probe sequence
tatttcggcacatttatacagcaga

SEQ ID NO: 244261 - DNA, 25 bp, Probe sequence
atccggcgaattcagaatcgtacca

SEQ ID NO: 244262 - DNA, 25 bp, Probe sequence
attggtcaaccaatggagccgaatg

SEQ ID NO: 244263 - DNA, 25 bp, Probe sequence
atcatgtttatgacttagaggaagt

SEQ ID NO: 244264 - DNA, 25 bp, Probe sequence
atcttaaccagctgtcaatcttcca

SEQ ID NO: 244265 - DNA, 25 bp, Probe sequence
atcttccagttctcaagaatcaact

SEQ ID NO: 244266 - DNA, 25 bp, Probe sequence
atgaccatttaaattctgtaaagca

SEQ ID NO: 244267 - DNA, 25 bp, Probe sequence
agtgccattcggtattacagcaaat

SEQ ID NO: 244268 - DNA, 25 bp, Probe sequence
agctgtcaatcttccagttctcaag

SEQ ID NO: 244269 - DNA, 25 bp, Probe sequence
acccacgtcatataagacattgcct

SEQ ID NO: 244270 - DNA, 25 bp, Probe sequence
acatgttttgagtgtgtcaacgatt

SEQ ID NO: 244271 - DNA, 25 bp, Probe sequence
aaatttgttgaatatcaatccagat

SEQ ID NO: 244272 - DNA, 25 bp, Probe sequence
aaagatcgtcaatatatttcgtcta

SEQ ID NO: 244273 - DNA, 25 bp, Probe sequence
aaccagctgtcaatcttccagttct

SEQ ID NO: 244274 - DNA, 25 bp, Probe sequence
aagaatcaactaaatccggcgaatt

SEQ ID NO: 244275 - DNA, 25 bp, Probe sequence
aagacattgcctaatcgttataaag

SEQ ID NO: 244276 - DNA, 25 bp, Probe sequence
aatgcaaccattttacaaacaatta

SEQ ID NO: 244277 - DNA, 25 bp, Probe sequence
caacaactgttgcattgacaatgac

SEQ ID NO: 244278 - DNA, 25 bp, Probe sequence
gaaacatcccaaagtattaatatta

SEQ ID NO: 244279 - DNA, 25 bp, Probe sequence
gaaaggctacttttatgattttgat

SEQ ID NO: 244280 - DNA, 25 bp, Probe sequence
gacattggacaaattggatttacca

SEQ ID NO: 244281 - DNA, 25 bp, Probe sequence
gactcaattatatgatttattttat

SEQ ID NO: 244282 - DNA, 25 bp, Probe sequence
gaggaagtgccattcggtattacag

SEQ ID NO: 244283 - DNA, 25 bp, Probe sequence
gatgtaccggaaattggtcaaccaa

SEQ ID NO: 244284 - DNA, 25 bp, Probe sequence
gatttaccaattgtcggcaaaccca

SEQ ID NO: 244285 - DNA, 25 bp, Probe sequence
gtcaatatatttcgtctaatactga

SEQ ID NO: 244286 - DNA, 25 bp, Probe sequence
gggatgcaaaagtcgattacacaat

SEQ ID NO: 244287 - DNA, 25 bp, Probe sequence
ggtgatcaatttaatcgtaaagcac

SEQ ID NO: 244288 - DNA, 25 bp, Probe sequence
ggtagctatttagtagcaactgata

SEQ ID NO: 244289 - DNA, 25 bp, Probe sequence
ggagccgaatgttgaagctgttaaa

SEQ ID NO: 244290 - DNA, 25 bp, Probe sequence
tgctgataaggcaatgactcaatta

SEQ ID NO: 244291 - DNA, 25 bp, Probe sequence
tcagaatcgtaccaacaactgttgc

SEQ ID NO: 244292 - DNA, 25 bp, Probe sequence
taagcgtcgttatcttaaccagctg

SEQ ID NO: 244293 - DNA, 25 bp, Probe sequence
taaccattttagtgataagcgtcgt

SEQ ID NO: 244294 - DNA, 25 bp, Probe sequence
ttgtcggcaaacccacgtcatataa

SEQ ID NO: 244295 - DNA, 25 bp, Probe sequence
atgaatgcaatttacgctggtgtcg

SEQ ID NO: 244296 - DNA, 25 bp, Probe sequence
aggtgtacgtcatcatgtaggtaat

SEQ ID NO: 244297 - DNA, 25 bp, Probe sequence
acagcacgtgacaaaggtgtacgtc

SEQ ID NO: 244298 - DNA, 25 bp, Probe sequence
aaaaagtttctgtcatgggttcagg

SEQ ID NO: 244299 - DNA, 25 bp, Probe sequence
aatttacgctggtgtcgaagcatta

SEQ ID NO: 244300 - DNA, 25 bp, Probe sequence
aattaccaggtcattttgcgccaat

SEQ ID NO: 244301 - DNA, 25 bp, Probe sequence
caaggtgcctctactgattcaaatt

SEQ ID NO: 244302 - DNA, 25 bp, Probe sequence
cattttgcgccaattgcttcttatc

SEQ ID NO: 244303 - DNA, 25 bp, Probe sequence
cgaagcattaggtgtgttcacagtg

SEQ ID NO: 244304 - DNA, 25 bp, Probe sequence
gccaggagatccgttaagagctaag

SEQ ID NO: 244305 - DNA, 25 bp, Probe sequence
ccatctattggcatttactcttatg

SEQ ID NO: 244306 - DNA, 25 bp, Probe sequence
gcctctactgattcaaattacgttc

SEQ ID NO: 244307 - DNA, 25 bp, Probe sequence
gcgagtgaacgttggatgcgtatgg

SEQ ID NO: 244308 - DNA, 25 bp, Probe sequence
gcggatacaacagcgagtgaacgtt

SEQ ID NO: 244309 - DNA, 25 bp, Probe sequence
gcgatcatttaattcatgaaacgtc

SEQ ID NO: 244310 - DNA, 25 bp, Probe sequence
gaaacggttctattgccaggagatc

SEQ ID NO: 244311 - DNA, 25 bp, Probe sequence
gaaacgtcaacaacacctgaggaaa

SEQ ID NO: 244312 - DNA, 25 bp, Probe sequence
gaaatcaacaccacacattaaacca

SEQ ID NO: 244313 - DNA, 25 bp, Probe sequence
gacgtcgaaattgcagaaacggttc

SEQ ID NO: 244314 - DNA, 25 bp, Probe sequence
gatgcgtatgggtattttaggtgta

SEQ ID NO: 244315 - DNA, 25 bp, Probe sequence
gttaagagctaagttcattgcagaa

SEQ ID NO: 244316 - DNA, 25 bp, Probe sequence
gtaggtaatgtgttatcaagtgata

SEQ ID NO: 244317 - DNA, 25 bp, Probe sequence
ggaaagggaacgtgcatttacagat

SEQ ID NO: 244318 - DNA, 25 bp, Probe sequence
gtgatattttctataacgcggatac

SEQ ID NO: 244319 - DNA, 25 bp, Probe sequence
gtgttcacagtgagcgatcatttaa

SEQ ID NO: 244320 - DNA, 25 bp, Probe sequence
gtggcgcgatgcaagaaaacattga

SEQ ID NO: 244321 - DNA, 25 bp, Probe sequence
gtggaacagttcaatacagtgcgaa

SEQ ID NO: 244322 - DNA, 25 bp, Probe sequence
ggaatcagctgcattatacatgaat

SEQ ID NO: 244323 - DNA, 25 bp, Probe sequence
ggcatttactcttatgaattaattc

SEQ ID NO: 244324 - DNA, 25 bp, Probe sequence
tgattgaaattgcactgtcattggt

SEQ ID NO: 244325 - DNA, 25 bp, Probe sequence
tgaattaattcatacatttggttgt

SEQ ID NO: 244326 - DNA, 25 bp, Probe sequence
tacgttcaacaatatcaattaccag

SEQ ID NO: 244327 - DNA, 25 bp, Probe sequence
ttaaaccaatgaatgacgtcgaaat

SEQ ID NO: 244328 - DNA, 25 bp, Probe sequence
ttgcacaaggtgcctctactgattc

SEQ ID NO: 244329 - DNA, 25 bp, Probe sequence
attgatttgcgattgccacgtatat

SEQ ID NO: 244330 - DNA, 25 bp, Probe sequence
attaggacgagtgatacagcctcct

SEQ ID NO: 244331 - DNA, 25 bp, Probe sequence
attaattgcattgatggttggcgca

SEQ ID NO: 244332 - DNA, 25 bp, Probe sequence
attagtaggtgttgcgttattcgta

SEQ ID NO: 244333 - DNA, 25 bp, Probe sequence
attagcagtatcagcattattggga

SEQ ID NO: 244334 - DNA, 25 bp, Probe sequence
agcagtatttttagcaagtgcaact

SEQ ID NO: 244335 - DNA, 25 bp, Probe sequence
gctattttaatgattgtcggtggtc

SEQ ID NO: 244336 - DNA, 25 bp, Probe sequence
gcagcactacaaaatcctttggcag

SEQ ID NO: 244337 - DNA, 25 bp, Probe sequence
gcactttgtatgttgtttattccac

SEQ ID NO: 244338 - DNA, 25 bp, Probe sequence
gcacttataatgagagcactttgta

SEQ ID NO: 244339 - DNA, 25 bp, Probe sequence
gaaaattcctcaaggcttaacaatg

SEQ ID NO: 244340 - DNA, 25 bp, Probe sequence
gaaattccagccaatgctattttaa

SEQ ID NO: 244341 - DNA, 25 bp, Probe sequence
gagtacttattccgttttctacagt

SEQ ID NO: 244342 - DNA, 25 bp, Probe sequence
gttgggggcaattacagagtactta

SEQ ID NO: 244343 - DNA, 25 bp, Probe sequence
gttggcgcaatgttagcagtttctg

SEQ ID NO: 244344 - DNA, 25 bp, Probe sequence
gttagtggctgatttattaggacga

SEQ ID NO: 244345 - DNA, 25 bp, Probe sequence
gtttgttagtcattttaatcgcaac

SEQ ID NO: 244346 - DNA, 25 bp, Probe sequence
gtcggtggtccaatgctaatttact

SEQ ID NO: 244347 - DNA, 25 bp, Probe sequence
gtgcaactgttgcgattgttggaca

SEQ ID NO: 244348 - DNA, 25 bp, Probe sequence
ggtgttgcgttattcgtattattaa

SEQ ID NO: 244349 - DNA, 25 bp, Probe sequence
ggtgcatggctattgttagtggctg

SEQ ID NO: 244350 - DNA, 25 bp, Probe sequence
ggttaacaggtttattagcagtatt

SEQ ID NO: 244351 - DNA, 25 bp, Probe sequence
ggagcattattacaagcagcactac

SEQ ID NO: 244352 - DNA, 25 bp, Probe sequence
ggcagaggcgaatatcattggcgtt

SEQ ID NO: 244353 - DNA, 25 bp, Probe sequence
tgttggacaactagcctttttaggt

SEQ ID NO: 244354 - DNA, 25 bp, Probe sequence
tgcgattgccacgtatattaattgc

SEQ ID NO: 244355 - DNA, 25 bp, Probe sequence
tgccacatgtggttagaaagctagt

SEQ ID NO: 244356 - DNA, 25 bp, Probe sequence
tccacaattgtacttttacttacca

SEQ ID NO: 244357 - DNA, 25 bp, Probe sequence
tctacagttattggtgcatggctat

SEQ ID NO: 244358 - DNA, 25 bp, Probe sequence
tcggttttaatattgatcgttacag

SEQ ID NO: 244359 - DNA, 25 bp, Probe sequence
tacaagcgcgaagtatcggttttaa

SEQ ID NO: 244360 - DNA, 25 bp, Probe sequence
tactattgtcccctaaattgaattt

SEQ ID NO: 244361 - DNA, 25 bp, Probe sequence
tagcagtttctggagcattattaca

SEQ ID NO: 244362 - DNA, 25 bp, Probe sequence
ttaacattactattgtcccctaaat

SEQ ID NO: 244363 - DNA, 25 bp, Probe sequence
attacatacgtacagattttgaaaa

SEQ ID NO: 244364 - DNA, 25 bp, Probe sequence
attatccagtactacaaggtaagac

SEQ ID NO: 244365 - DNA, 25 bp, Probe sequence
ataatgactttatcaacgtgcgaag

SEQ ID NO: 244366 - DNA, 25 bp, Probe sequence
atcaagattatcaacaatttttaga

SEQ ID NO: 244367 - DNA, 25 bp, Probe sequence
acgggcaccatgtcggtgataatac

SEQ ID NO: 244368 - DNA, 25 bp, Probe sequence
actattgtacaaattttattggttg

SEQ ID NO: 244369 - DNA, 25 bp, Probe sequence
aaactactactaaagataattacat

SEQ ID NO: 244370 - DNA, 25 bp, Probe sequence
aagacattgttggatggataaaatt

SEQ ID NO: 244371 - DNA, 25 bp, Probe sequence
aatactattttatacgggcaccatg

SEQ ID NO: 244372 - DNA, 25 bp, Probe sequence
aatacgatgtttgatgtgttagaag

SEQ ID NO: 244373 - DNA, 25 bp, Probe sequence
aatatcaattgcaagtatttagtgc

SEQ ID NO: 244374 - DNA, 25 bp, Probe sequence
caaggtaagacaaatcacgattatt

SEQ ID NO: 244375 - DNA, 25 bp, Probe sequence
caacgtgcgaagatgcatatagtga

SEQ ID NO: 244376 - DNA, 25 bp, Probe sequence
caccatgtcggtgataatacgatgt

SEQ ID NO: 244377 - DNA, 25 bp, Probe sequence
cgaaaagaattgttgttgtcgcaaa

SEQ ID NO: 244378 - DNA, 25 bp, Probe sequence
gcgagaacatcgacgtaaaggtagt

SEQ ID NO: 244379 - DNA, 25 bp, Probe sequence
gcaagaacgcgcaaattatgagaaa

SEQ ID NO: 244380 - DNA, 25 bp, Probe sequence
gaagacaagcaagaacgcgcaaatt

SEQ ID NO: 244381 - DNA, 25 bp, Probe sequence
gaagcgatttttaactattgtacaa

SEQ ID NO: 244382 - DNA, 25 bp, Probe sequence
gaacatcgacgtaaaggtagtattt

SEQ ID NO: 244383 - DNA, 25 bp, Probe sequence
gacaagcaagaacgcgcaaattatg

SEQ ID NO: 244384 - DNA, 25 bp, Probe sequence
gactttatcaacgtgcgaagatgca

SEQ ID NO: 244385 - DNA, 25 bp, Probe sequence
gaccacaatttgaatcacttgaaaa

SEQ ID NO: 244386 - DNA, 25 bp, Probe sequence
gagaatgaagcgatttttaactatt

SEQ ID NO: 244387 - DNA, 25 bp, Probe sequence
gattttgagcgagaacatcgacgta

SEQ ID NO: 244388 - DNA, 25 bp, Probe sequence
gtttgatgtgttagaagattattta

SEQ ID NO: 244389 - DNA, 25 bp, Probe sequence
gtgcatataaaactactactaaaga

SEQ ID NO: 244390 - DNA, 25 bp, Probe sequence
ggataaaattatcaggaacatcatt

SEQ ID NO: 244391 - DNA, 25 bp, Probe sequence
tgagaccacaatttgaatcacttga

SEQ ID NO: 244392 - DNA, 25 bp, Probe sequence
taattattatcatttttggttacaa

SEQ ID NO: 244393 - DNA, 25 bp, Probe sequence
tattttatacgggcaccatgtcggt

SEQ ID NO: 244394 - DNA, 25 bp, Probe sequence
ttatacgggcaccatgtcggtgata

SEQ ID NO: 244395 - DNA, 25 bp, Probe sequence
ttttattggttgtaattattatcat

SEQ ID NO: 244396 - DNA, 25 bp, Probe sequence
ttgttgtcgcaaaaataattaaggt

SEQ ID NO: 244397 - DNA, 25 bp, Probe sequence
attacatatgatataggctatagtt

SEQ ID NO: 244398 - DNA, 25 bp, Probe sequence
attagaaggctttgatggcatgttt

SEQ ID NO: 244399 - DNA, 25 bp, Probe sequence
agaaggctttgatggcatgtttgtt

SEQ ID NO: 244400 - DNA, 25 bp, Probe sequence
acgattttacacgagacatgggatt

SEQ ID NO: 244401 - DNA, 25 bp, Probe sequence
acacgagacatgggattgaaacatt

SEQ ID NO: 244402 - DNA, 25 bp, Probe sequence
aacagtttggaaatcaaagcaagct

SEQ ID NO: 244403 - DNA, 25 bp, Probe sequence
aacattagaaggctttgatggcatg

SEQ ID NO: 244404 - DNA, 25 bp, Probe sequence
aagatattatagaacgattttacac

SEQ ID NO: 244405 - DNA, 25 bp, Probe sequence
aaggctttgatggcatgtttgttac

SEQ ID NO: 244406 - DNA, 25 bp, Probe sequence
caaagcaagcttttacggattggtt

SEQ ID NO: 244407 - DNA, 25 bp, Probe sequence
ctttgatggcatgtttgttacacaa

SEQ ID NO: 244408 - DNA, 25 bp, Probe sequence
ctgacgttaacaaaaggaacagcaa

SEQ ID NO: 244409 - DNA, 25 bp, Probe sequence
gctttgatggcatgtttgttacaca

SEQ ID NO: 244410 - DNA, 25 bp, Probe sequence
gaaggctttgatggcatgtttgtta

SEQ ID NO: 244411 - DNA, 25 bp, Probe sequence
gaacgattttacacgagacatggga

SEQ ID NO: 244412 - DNA, 25 bp, Probe sequence
gaaaataggctgacgttaacaaaag

SEQ ID NO: 244413 - DNA, 25 bp, Probe sequence
gaaacattagaaggctttgatggca

SEQ ID NO: 244414 - DNA, 25 bp, Probe sequence
gatggcatgtttgttacacaaactt

SEQ ID NO: 244415 - DNA, 25 bp, Probe sequence
gatataggctatagttacatgaaat

SEQ ID NO: 244416 - DNA, 25 bp, Probe sequence
gattttacacgagacatgggattga

SEQ ID NO: 244417 - DNA, 25 bp, Probe sequence
gggattgaaacattagaaggctttg

SEQ ID NO: 244418 - DNA, 25 bp, Probe sequence
ggattggttaaaatctgatgtcttt

SEQ ID NO: 244419 - DNA, 25 bp, Probe sequence
ggaacagcaaaagatattatagaac

SEQ ID NO: 244420 - DNA, 25 bp, Probe sequence
ggcagaaaataggctgacgttaaca

SEQ ID NO: 244421 - DNA, 25 bp, Probe sequence
ggcatgtttgttacacaaactttag

SEQ ID NO: 244422 - DNA, 25 bp, Probe sequence
ggctttgatggcatgtttgttacac

SEQ ID NO: 244423 - DNA, 25 bp, Probe sequence
tgaagtgaaaattttaacagtttgg

SEQ ID NO: 244424 - DNA, 25 bp, Probe sequence
taaaatctgatgtctttaaagcagc

SEQ ID NO: 244425 - DNA, 25 bp, Probe sequence
tagaacgattttacacgagacatgg

SEQ ID NO: 244426 - DNA, 25 bp, Probe sequence
tatggcagaaaataggctgacgtta

SEQ ID NO: 244427 - DNA, 25 bp, Probe sequence
taggctgacgttaacaaaaggaaca

SEQ ID NO: 244428 - DNA, 25 bp, Probe sequence
tataggctatagttacatgaaataa

SEQ ID NO: 244429 - DNA, 25 bp, Probe sequence
tttgatggcatgtttgttacacaaa

SEQ ID NO: 244430 - DNA, 25 bp, Probe sequence
ttacacgagacatgggattgaaaca

SEQ ID NO: 244431 - DNA, 25 bp, Probe sequence
atcagcaaattatcgcatacgcgca

SEQ ID NO: 244432 - DNA, 25 bp, Probe sequence
atcgatcgtgttcaagatcctggaa

SEQ ID NO: 244433 - DNA, 25 bp, Probe sequence
atgatatttctaaagcacaacaagt

SEQ ID NO: 244434 - DNA, 25 bp, Probe sequence
atggtacagcacttgaaaacgcagt

SEQ ID NO: 244435 - DNA, 25 bp, Probe sequence
atggaacaaattacttctgcacaaa

SEQ ID NO: 244436 - DNA, 25 bp, Probe sequence
aggtgtgcatttaattgaagaagct

SEQ ID NO: 244437 - DNA, 25 bp, Probe sequence
agatcctggaaatttaggcacatta

SEQ ID NO: 244438 - DNA, 25 bp, Probe sequence
agcacatactacacaaaatttaatc

SEQ ID NO: 244439 - DNA, 25 bp, Probe sequence
accacaagggtttttcgcaatcatt

SEQ ID NO: 244440 - DNA, 25 bp, Probe sequence
aagatctcgatacgtttattactca

SEQ ID NO: 244441 - DNA, 25 bp, Probe sequence
aatggtcctgtttatggtacagcac

SEQ ID NO: 244442 - DNA, 25 bp, Probe sequence
aatcctgaattattagcacatacta

SEQ ID NO: 244443 - DNA, 25 bp, Probe sequence
aattatttgcaattgaaccggcaag

SEQ ID NO: 244444 - DNA, 25 bp, Probe sequence
gctggaatggatgctgtaataatgg

SEQ ID NO: 244445 - DNA, 25 bp, Probe sequence
gaaccggcaagattagatcagcaaa

SEQ ID NO: 244446 - DNA, 25 bp, Probe sequence
gaactgcggatgctgctggaatgga

SEQ ID NO: 244447 - DNA, 25 bp, Probe sequence
gaaagttgctgaatctttatcaggt

SEQ ID NO: 244448 - DNA, 25 bp, Probe sequence
gagagggataaaactggattagctt

SEQ ID NO: 244449 - DNA, 25 bp, Probe sequence
gagggagaaggtgttaatcctgaat

SEQ ID NO: 244450 - DNA, 25 bp, Probe sequence
gataaagtgttgcgagcgagtcaag

SEQ ID NO: 244451 - DNA, 25 bp, Probe sequence
gattagctttaattgaaggtgtgca

SEQ ID NO: 244452 - DNA, 25 bp, Probe sequence
gattcttttgcattactattaggta

SEQ ID NO: 244453 - DNA, 25 bp, Probe sequence
gttacttcaagtgattcttttgcat

SEQ ID NO: 244454 - DNA, 25 bp, Probe sequence
gtagtattttactttatcatttgaa

SEQ ID NO: 244455 - DNA, 25 bp, Probe sequence
gtgacaccacaagggtttttcgcaa

SEQ ID NO: 244456 - DNA, 25 bp, Probe sequence
gggtacgacagatccttatcaagat

SEQ ID NO: 244457 - DNA, 25 bp, Probe sequence
ggtttttcgcaatcattgagaagcc

SEQ ID NO: 244458 - DNA, 25 bp, Probe sequence
ggatgctgctggaatggatgctgta

SEQ ID NO: 244459 - DNA, 25 bp, Probe sequence
ggcacattaattagaactgcggatg

SEQ ID NO: 244460 - DNA, 25 bp, Probe sequence
tgtagcgattgcaggtagtatttta

SEQ ID NO: 244461 - DNA, 25 bp, Probe sequence
tgccagttatgacacaagatctcga

SEQ ID NO: 244462 - DNA, 25 bp, Probe sequence
tgcgagcgagtcaaggtagtgtttt

SEQ ID NO: 244463 - DNA, 25 bp, Probe sequence
tcgcatacgcgcaagaagtttttga

SEQ ID NO: 244464 - DNA, 25 bp, Probe sequence
tttatcaggtacagtgacaccacaa

SEQ ID NO: 244465 - DNA, 25 bp, Probe sequence
ataacttcgaaatgctgaatttacc

SEQ ID NO: 244466 - DNA, 25 bp, Probe sequence
atcacgtcatggtcaaggtccagtt

SEQ ID NO: 244467 - DNA, 25 bp, Probe sequence
agagtactctggatttgcatttggt

SEQ ID NO: 244468 - DNA, 25 bp, Probe sequence
acaagcgcttgtagatattaatgaa

SEQ ID NO: 244469 - DNA, 25 bp, Probe sequence
aaagggtcagttagcggactaatga

SEQ ID NO: 244470 - DNA, 25 bp, Probe sequence
aagcatccattaacacgtacaatag

SEQ ID NO: 244471 - DNA, 25 bp, Probe sequence
aattgatgaaggatttgccgaatga

SEQ ID NO: 244472 - DNA, 25 bp, Probe sequence
caaatgatgaacgtgcactgcaaga

SEQ ID NO: 244473 - DNA, 25 bp, Probe sequence
caggtcgtcatattgaaatcggttc

SEQ ID NO: 244474 - DNA, 25 bp, Probe sequence
cggatgaaattttattacgtacgca

SEQ ID NO: 244475 - DNA, 25 bp, Probe sequence
cttctgtagaagttgatgtgtcatg

SEQ ID NO: 244476 - DNA, 25 bp, Probe sequence
ctggatttgcatttggtatgggacc

SEQ ID NO: 244477 - DNA, 25 bp, Probe sequence
cgtacgatggaatcacgtcatggtc

SEQ ID NO: 244478 - DNA, 25 bp, Probe sequence
gctggaatggtacatcctaatgtat

SEQ ID NO: 244479 - DNA, 25 bp, Probe sequence
gaagatattcgtcatttctatacta

SEQ ID NO: 244480 - DNA, 25 bp, Probe sequence
gaaatggctggttttgattcttcag

SEQ ID NO: 244481 - DNA, 25 bp, Probe sequence
gaaatcggttcaaagcatccattaa

SEQ ID NO: 244482 - DNA, 25 bp, Probe sequence
gacacatagtcatcaatttacacaa

SEQ ID NO: 244483 - DNA, 25 bp, Probe sequence
gacttattcttaggtttaggttatg

SEQ ID NO: 244484 - DNA, 25 bp, Probe sequence
gaccagaccgtattgcaatgttgaa

SEQ ID NO: 244485 - DNA, 25 bp, Probe sequence
gatcgtgaaattcgtttacgtccaa

SEQ ID NO: 244486 - DNA, 25 bp, Probe sequence
gtatcgtcgtgactctgatgatgcg

SEQ ID NO: 244487 - DNA, 25 bp, Probe sequence
gtatgggaccagaccgtattgcaat

SEQ ID NO: 244488 - DNA, 25 bp, Probe sequence
ggtccagttaaaattatttgccctg

SEQ ID NO: 244489 - DNA, 25 bp, Probe sequence
ggttttgattcttcagagtactctg

SEQ ID NO: 244490 - DNA, 25 bp, Probe sequence
tgactctgatgatgcgacacatagt

SEQ ID NO: 244491 - DNA, 25 bp, Probe sequence
tgaatttacctaaatcacaccctgc

SEQ ID NO: 244492 - DNA, 25 bp, Probe sequence
tcacaccctgcacgtgatatgcaag

SEQ ID NO: 244493 - DNA, 25 bp, Probe sequence
tacgtacgcatacatcaccagtgca

SEQ ID NO: 244494 - DNA, 25 bp, Probe sequence
ttgccctggtaaagtgtatcgtcgt

SEQ ID NO: 244495 - DNA, 25 bp, Probe sequence
tttggtgctgatcgtgaaattcgtt

SEQ ID NO: 244496 - DNA, 25 bp, Probe sequence
ttacgtccaagttacttcccattca

SEQ ID NO: 244497 - DNA, 25 bp, Probe sequence
ttcccattcactgaaccttctgtag

SEQ ID NO: 244498 - DNA, 25 bp, Probe sequence
ttgatgtatcattaccaggtcgtca

SEQ ID NO: 244499 - DNA, 25 bp, Probe sequence
attcccaggcatgtctcgtgacatt

SEQ ID NO: 244500 - DNA, 25 bp, Probe sequence
attacaccaatcgacatcactgctg

SEQ ID NO: 244501 - DNA, 25 bp, Probe sequence
atgtttgccaagttgatatcggaga

SEQ ID NO: 244502 - DNA, 25 bp, Probe sequence
atgggtggcgatttttcagaagtta

SEQ ID NO: 244503 - DNA, 25 bp, Probe sequence
aggagaacttggtgcatttattaca

SEQ ID NO: 244504 - DNA, 25 bp, Probe sequence
aggtgtcgtggatcgagtatctgaa

SEQ ID NO: 244505 - DNA, 25 bp, Probe sequence
agctattacgtattcgttagtttct

SEQ ID NO: 244506 - DNA, 25 bp, Probe sequence
aagtaccatattatagtgcacgtgt

SEQ ID NO: 244507 - DNA, 25 bp, Probe sequence
cgcagtgaatcatctagtcgttttg

SEQ ID NO: 244508 - DNA, 25 bp, Probe sequence
cgcactattggatttgatttgtcac

SEQ ID NO: 244509 - DNA, 25 bp, Probe sequence
ccagccaattccgagattcccaggc

SEQ ID NO: 244510 - DNA, 25 bp, Probe sequence
tgccaatgagtgaagcgcatgcgtc

SEQ ID NO: 244511 - DNA, 25 bp, Probe sequence
gcattagctggtgttatgggtggcg

SEQ ID NO: 244512 - DNA, 25 bp, Probe sequence
gaatttgatttaacgccgaatcgtg

SEQ ID NO: 244513 - DNA, 25 bp, Probe sequence
gaaggtgctatttttgatccagttt

SEQ ID NO: 244514 - DNA, 25 bp, Probe sequence
gaagcgcatgcgtcattacgtcaaa

SEQ ID NO: 244515 - DNA, 25 bp, Probe sequence
gaacgtattacgcgcacaggtattg

SEQ ID NO: 244516 - DNA, 25 bp, Probe sequence
gaaatcggcaatgtcttctttgcta

SEQ ID NO: 244517 - DNA, 25 bp, Probe sequence
gatgaagcagtcgaccgtgcatgtt

SEQ ID NO: 244518 - DNA, 25 bp, Probe sequence
gatgcaacagcgtcaaacaattgat

SEQ ID NO: 244519 - DNA, 25 bp, Probe sequence
gatcaagatgcgattggttcacaac

SEQ ID NO: 244520 - DNA, 25 bp, Probe sequence
gatagagtgtcttcaggagaacttg

SEQ ID NO: 244521 - DNA, 25 bp, Probe sequence
gttgttcgtcaagctaatgaaggcg

SEQ ID NO: 244522 - DNA, 25 bp, Probe sequence
gtagatcaaaatattccagcagctg

SEQ ID NO: 244523 - DNA, 25 bp, Probe sequence
gtgccaaattacgcggtgaacgttc

SEQ ID NO: 244524 - DNA, 25 bp, Probe sequence
gtcgaccgtgcatgttatttattac

SEQ ID NO: 244525 - DNA, 25 bp, Probe sequence
gtgcacgtgttgttcacgacgtgac

SEQ ID NO: 244526 - DNA, 25 bp, Probe sequence
ggtactgcttatgaagttgcagcat

SEQ ID NO: 244527 - DNA, 25 bp, Probe sequence
ggttacattaattaccagccaattc

SEQ ID NO: 244528 - DNA, 25 bp, Probe sequence
ggacaaactccaattgcattagctg

SEQ ID NO: 244529 - DNA, 25 bp, Probe sequence
ggaacagatgccttacaagctttat

SEQ ID NO: 244530 - DNA, 25 bp, Probe sequence
tacggtcaaccattgcacatgtttg

SEQ ID NO: 244531 - DNA, 25 bp, Probe sequence
tacgtcaaagtttattaccacattt

SEQ ID NO: 244532 - DNA, 25 bp, Probe sequence
ttgatccagtttcaattcgtcatac

SEQ ID NO: 244533 - DNA, 25 bp, Probe sequence
attcacaaattgcagcagcgtgagc

SEQ ID NO: 244534 - DNA, 25 bp, Probe sequence
attatgcatgaaaaagtactactag

SEQ ID NO: 244535 - DNA, 25 bp, Probe sequence
atatgtagcacatttagttgatgat

SEQ ID NO: 244536 - DNA, 25 bp, Probe sequence
atactaactgctgtgaatattatgc

SEQ ID NO: 244537 - DNA, 25 bp, Probe sequence
ataacccagagcacatacgatatgt

SEQ ID NO: 244538 - DNA, 25 bp, Probe sequence
atcaattaatgatcagctttttaca

SEQ ID NO: 244539 - DNA, 25 bp, Probe sequence
atgatcagctttttacaattgttgg

SEQ ID NO: 244540 - DNA, 25 bp, Probe sequence
atgtagcacatttagttgatgataa

SEQ ID NO: 244541 - DNA, 25 bp, Probe sequence
agataacccagagcacatacgatat

SEQ ID NO: 244542 - DNA, 25 bp, Probe sequence
agcaatactaactgctgtgaatatt

SEQ ID NO: 244543 - DNA, 25 bp, Probe sequence
agcagcaggtttagatacttcaaga

SEQ ID NO: 244544 - DNA, 25 bp, Probe sequence
acccagagcacatacgatatgtagc

SEQ ID NO: 244545 - DNA, 25 bp, Probe sequence
acatacgatatgtagcacatttagt

SEQ ID NO: 244546 - DNA, 25 bp, Probe sequence
acaaggtaaatgtatcaattaatga

SEQ ID NO: 244547 - DNA, 25 bp, Probe sequence
aaagcagcaggtttagatacttcaa

SEQ ID NO: 244548 - DNA, 25 bp, Probe sequence
aactgctgtgaatattatgcatgaa

SEQ ID NO: 244549 - DNA, 25 bp, Probe sequence
aagataacccagagcacatacgata

SEQ ID NO: 244550 - DNA, 25 bp, Probe sequence
caaattcacaaattgcagcagcgtg

SEQ ID NO: 244551 - DNA, 25 bp, Probe sequence
caaattgcagcagcgtgagcaataa

SEQ ID NO: 244552 - DNA, 25 bp, Probe sequence
gctttttacaattgttggggaagat

SEQ ID NO: 244553 - DNA, 25 bp, Probe sequence
gcaggtttagatacttcaagaaaag

SEQ ID NO: 244554 - DNA, 25 bp, Probe sequence
gcagcaggtttagatacttcaagaa

SEQ ID NO: 244555 - DNA, 25 bp, Probe sequence
gaattagggtataaagcagcaggtt

SEQ ID NO: 244556 - DNA, 25 bp, Probe sequence
gaagataacccagagcacatacgat

SEQ ID NO: 244557 - DNA, 25 bp, Probe sequence
gaaaagcaatactaactgctgtgaa

SEQ ID NO: 244558 - DNA, 25 bp, Probe sequence
gaaacaacaaattcacaaattgcag

SEQ ID NO: 244559 - DNA, 25 bp, Probe sequence
gagcacatacgatatgtagcacatt

SEQ ID NO: 244560 - DNA, 25 bp, Probe sequence
gatcagctttttacaattgttgggg

SEQ ID NO: 244561 - DNA, 25 bp, Probe sequence
gataacccagagcacatacgatatg

SEQ ID NO: 244562 - DNA, 25 bp, Probe sequence
ggtttagatacttcaagaaaagcaa

SEQ ID NO: 244563 - DNA, 25 bp, Probe sequence
ggaagataacccagagcacatacga

SEQ ID NO: 244564 - DNA, 25 bp, Probe sequence
tcagctttttacaattgttggggaa

SEQ ID NO: 244565 - DNA, 25 bp, Probe sequence
tcacaaattgcagcagcgtgagcaa

SEQ ID NO: 244566 - DNA, 25 bp, Probe sequence
taatgatcagctttttacaattgtt

SEQ ID NO: 244567 - DNA, 25 bp, Probe sequence
attgtcttacactttacgttatatc

SEQ ID NO: 244568 - DNA, 25 bp, Probe sequence
attgccagtcaattttacaaatcta

SEQ ID NO: 244569 - DNA, 25 bp, Probe sequence
attccatatcctaaaacaacagcat

SEQ ID NO: 244570 - DNA, 25 bp, Probe sequence
attttcagtcgtgcaatgggaatga

SEQ ID NO: 244571 - DNA, 25 bp, Probe sequence
atatttatcggctttcaccattaat

SEQ ID NO: 244572 - DNA, 25 bp, Probe sequence
ataatagcgtatcaaaacattcata

SEQ ID NO: 244573 - DNA, 25 bp, Probe sequence
atctatgatacatttgagtgcaacg

SEQ ID NO: 244574 - DNA, 25 bp, Probe sequence
atcggctttcaccattaatttataa

SEQ ID NO: 244575 - DNA, 25 bp, Probe sequence
atgggaatgatagttggtgtgttta

SEQ ID NO: 244576 - DNA, 25 bp, Probe sequence
agcgattgtagcttttttaatgatt

SEQ ID NO: 244577 - DNA, 25 bp, Probe sequence
acttttgcgtttcattttaatcatc

SEQ ID NO: 244578 - DNA, 25 bp, Probe sequence
acatcccatatttatcggctttcac

SEQ ID NO: 244579 - DNA, 25 bp, Probe sequence
acaacatcagcttaaaatatctatt

SEQ ID NO: 244580 - DNA, 25 bp, Probe sequence
aaatatctattgtgagtcattcatt

SEQ ID NO: 244581 - DNA, 25 bp, Probe sequence
aacaacagcatttaatacaactttt

SEQ ID NO: 244582 - DNA, 25 bp, Probe sequence
aacattcatattttcagtcgtgcaa

SEQ ID NO: 244583 - DNA, 25 bp, Probe sequence
cctaacgaagcattacaacatcagc

SEQ ID NO: 244584 - DNA, 25 bp, Probe sequence
gacgataattgtcttacactttacg

SEQ ID NO: 244585 - DNA, 25 bp, Probe sequence
gacgaggtttttggttatctatgat

SEQ ID NO: 244586 - DNA, 25 bp, Probe sequence
gagtgcaacgattgtatcattgtgg

SEQ ID NO: 244587 - DNA, 25 bp, Probe sequence
gttggattcagacgaggtttttggt

SEQ ID NO: 244588 - DNA, 25 bp, Probe sequence
gttatatctattggcattatatcct

SEQ ID NO: 244589 - DNA, 25 bp, Probe sequence
gttttgtaagttcattttatatcta

SEQ ID NO: 244590 - DNA, 25 bp, Probe sequence
gtatcattgtggattgccagtcaat

SEQ ID NO: 244591 - DNA, 25 bp, Probe sequence
gtcattcattgatttttcacatccc

SEQ ID NO: 244592 - DNA, 25 bp, Probe sequence
ggtgtgtttatgacgataattgtct

SEQ ID NO: 244593 - DNA, 25 bp, Probe sequence
ggcattatatcctaacgaagcatta

SEQ ID NO: 244594 - DNA, 25 bp, Probe sequence
tcattttctttgtgtattttgtcat

SEQ ID NO: 244595 - DNA, 25 bp, Probe sequence
taattgtatttattccatatcctaa

SEQ ID NO: 244596 - DNA, 25 bp, Probe sequence
taatacaacttttgcgtttcatttt

SEQ ID NO: 244597 - DNA, 25 bp, Probe sequence
tacactttacgttatatctattggc

SEQ ID NO: 244598 - DNA, 25 bp, Probe sequence
tatatctaattatcgtaacttttga

SEQ ID NO: 244599 - DNA, 25 bp, Probe sequence
tttcacatcccatatttatcggctt

SEQ ID NO: 244600 - DNA, 25 bp, Probe sequence
ttatcataatcattttctttgtgta

SEQ ID NO: 244601 - DNA, 25 bp, Probe sequence
attcgaacaaactaatcaatcatta

SEQ ID NO: 244602 - DNA, 25 bp, Probe sequence
attatccagatatttatctccatag

SEQ ID NO: 244603 - DNA, 25 bp, Probe sequence
atttagctgtaggtgtggcatttga

SEQ ID NO: 244604 - DNA, 25 bp, Probe sequence
atttatctccatagtaatttagctg

SEQ ID NO: 244605 - DNA, 25 bp, Probe sequence
atatgtattacatcatggtttagat

SEQ ID NO: 244606 - DNA, 25 bp, Probe sequence
ataatttctactttgagaatattga

SEQ ID NO: 244607 - DNA, 25 bp, Probe sequence
atctccatagtaatttagctgtagg

SEQ ID NO: 244608 - DNA, 25 bp, Probe sequence
atgtttttggatgggcttaaatgtg

SEQ ID NO: 244609 - DNA, 25 bp, Probe sequence
atgtttgactcattaaaagaagtta

SEQ ID NO: 244610 - DNA, 25 bp, Probe sequence
agttattatccagatatttatctcc

SEQ ID NO: 244611 - DNA, 25 bp, Probe sequence
aatatgtttttggatgggcttaaat

SEQ ID NO: 244612 - DNA, 25 bp, Probe sequence
aatttagctgtaggtgtggcatttg

SEQ ID NO: 244613 - DNA, 25 bp, Probe sequence
cagatatttatctccatagtaattt

SEQ ID NO: 244614 - DNA, 25 bp, Probe sequence
ctccatagtaatttagctgtaggtg

SEQ ID NO: 244615 - DNA, 25 bp, Probe sequence
ctgagaaagaacttttgaatagcta

SEQ ID NO: 244616 - DNA, 25 bp, Probe sequence
gctgtaggtgtggcatttgaaatta

SEQ ID NO: 244617 - DNA, 25 bp, Probe sequence
gaattcgaacaaactaatcaatcat

SEQ ID NO: 244618 - DNA, 25 bp, Probe sequence
gaagaaaaattttatcatttgatga

SEQ ID NO: 244619 - DNA, 25 bp, Probe sequence
gacaatttagaacttattaatatgt

SEQ ID NO: 244620 - DNA, 25 bp, Probe sequence
gatgggcttaaatgtgaattcgaac

SEQ ID NO: 244621 - DNA, 25 bp, Probe sequence
gatatttatctccatagtaatttag

SEQ ID NO: 244622 - DNA, 25 bp, Probe sequence
gtttttggatgggcttaaatgtgaa

SEQ ID NO: 244623 - DNA, 25 bp, Probe sequence
gtttgttaataatttctactttgag

SEQ ID NO: 244624 - DNA, 25 bp, Probe sequence
gtaatttagctgtaggtgtggcatt

SEQ ID NO: 244625 - DNA, 25 bp, Probe sequence
gtgaattcgaacaaactaatcaatc

SEQ ID NO: 244626 - DNA, 25 bp, Probe sequence
ggtgtggcatttgaaattataggag

SEQ ID NO: 244627 - DNA, 25 bp, Probe sequence
tgggcttaaatgtgaattcgaacaa

SEQ ID NO: 244628 - DNA, 25 bp, Probe sequence
tgtaggtgtggcatttgaaattata

SEQ ID NO: 244629 - DNA, 25 bp, Probe sequence
tagctgtaggtgtggcatttgaaat

SEQ ID NO: 244630 - DNA, 25 bp, Probe sequence
tatccagatatttatctccatagta

SEQ ID NO: 244631 - DNA, 25 bp, Probe sequence
tattaatatgtttttggatgggctt

SEQ ID NO: 244632 - DNA, 25 bp, Probe sequence
tttagctgtaggtgtggcatttgaa

SEQ ID NO: 244633 - DNA, 25 bp, Probe sequence
ttatctccatagtaatttagctgta

SEQ ID NO: 244634 - DNA, 25 bp, Probe sequence
ttggatgggcttaaatgtgaattcg

SEQ ID NO: 244635 - DNA, 25 bp, Probe sequence
attagattcaaaggtaattgactat

SEQ ID NO: 244636 - DNA, 25 bp, Probe sequence
atttcatgcaatattaaattttatt

SEQ ID NO: 244637 - DNA, 25 bp, Probe sequence
atttccgaatgaatatatatatgca

SEQ ID NO: 244638 - DNA, 25 bp, Probe sequence
atagtatatgaatatattccacaag

SEQ ID NO: 244639 - DNA, 25 bp, Probe sequence
atagagataaatcatttcatgcaat

SEQ ID NO: 244640 - DNA, 25 bp, Probe sequence
ataaatttccgaatgaatatatata

SEQ ID NO: 244641 - DNA, 25 bp, Probe sequence
ataaatcatttcatgcaatattaaa

SEQ ID NO: 244642 - DNA, 25 bp, Probe sequence
atcatttcatgcaatattaaatttt

SEQ ID NO: 244643 - DNA, 25 bp, Probe sequence
atgaatatattccacaagataaaat

SEQ ID NO: 244644 - DNA, 25 bp, Probe sequence
agtatatgaatatattccacaagat

SEQ ID NO: 244645 - DNA, 25 bp, Probe sequence
agataaatcatttcatgcaatatta

SEQ ID NO: 244646 - DNA, 25 bp, Probe sequence
agagataaatcatttcatgcaatat

SEQ ID NO: 244647 - DNA, 25 bp, Probe sequence
aaatcatttcatgcaatattaaatt

SEQ ID NO: 244648 - DNA, 25 bp, Probe sequence
aagataatcaagttatagtatatga

SEQ ID NO: 244649 - DNA, 25 bp, Probe sequence
aatgaatatatatatgcatggtatt

SEQ ID NO: 244650 - DNA, 25 bp, Probe sequence
aatcatttcatgcaatattaaattt

SEQ ID NO: 244651 - DNA, 25 bp, Probe sequence
aatttccgaatgaatatatatatgc

SEQ ID NO: 244652 - DNA, 25 bp, Probe sequence
ccgaatgaatatatatatgcatggt

SEQ ID NO: 244653 - DNA, 25 bp, Probe sequence
gaatatattccacaagataaaatag

SEQ ID NO: 244654 - DNA, 25 bp, Probe sequence
gaatgaatatatatatgcatggtat

SEQ ID NO: 244655 - DNA, 25 bp, Probe sequence
gaaaataaatttccgaatgaatata

SEQ ID NO: 244656 - DNA, 25 bp, Probe sequence
gagataaatcatttcatgcaatatt

SEQ ID NO: 244657 - DNA, 25 bp, Probe sequence
gataaatcatttcatgcaatattaa

SEQ ID NO: 244658 - DNA, 25 bp, Probe sequence
gattcaaaggtaattgactataaat

SEQ ID NO: 244659 - DNA, 25 bp, Probe sequence
gtatatgaatatattccacaagata

SEQ ID NO: 244660 - DNA, 25 bp, Probe sequence
ggtaattgactataaattatcaaaa

SEQ ID NO: 244661 - DNA, 25 bp, Probe sequence
tgaatatatatatgcatggtattaa

SEQ ID NO: 244662 - DNA, 25 bp, Probe sequence
tccgaatgaatatatatatgcatgg

SEQ ID NO: 244663 - DNA, 25 bp, Probe sequence
tcatttcatgcaatattaaatttta

SEQ ID NO: 244664 - DNA, 25 bp, Probe sequence
taaatcatttcatgcaatattaaat

SEQ ID NO: 244665 - DNA, 25 bp, Probe sequence
tagattcaaaggtaattgactataa

SEQ ID NO: 244666 - DNA, 25 bp, Probe sequence
tagagataaatcatttcatgcaata

SEQ ID NO: 244667 - DNA, 25 bp, Probe sequence
tatgaatatattccacaagataaaa

SEQ ID NO: 244668 - DNA, 25 bp, Probe sequence
tatagagataaatcatttcatgcaa

SEQ ID NO: 244669 - DNA, 25 bp, Probe sequence
attgcatggatttagaaacagattt

SEQ ID NO: 244670 - DNA, 25 bp, Probe sequence
attctggtaactattgcatggattt

SEQ ID NO: 244671 - DNA, 25 bp, Probe sequence
atttaggtttttattctattgatga

SEQ ID NO: 244672 - DNA, 25 bp, Probe sequence
atcgtaaaaatgttatagttacact

SEQ ID NO: 244673 - DNA, 25 bp, Probe sequence
agtgattctggtaactattgcatgg

SEQ ID NO: 244674 - DNA, 25 bp, Probe sequence
agatttaggtttttattctattgat

SEQ ID NO: 244675 - DNA, 25 bp, Probe sequence
agaaagtgattctggtaactattgc

SEQ ID NO: 244676 - DNA, 25 bp, Probe sequence
acagatttaggtttttattctattg

SEQ ID NO: 244677 - DNA, 25 bp, Probe sequence
aaatccgttagaaagtgattctggt

SEQ ID NO: 244678 - DNA, 25 bp, Probe sequence
aaagtgattctggtaactattgcat

SEQ ID NO: 244679 - DNA, 25 bp, Probe sequence
aactattgcatggatttagaaacag

SEQ ID NO: 244680 - DNA, 25 bp, Probe sequence
aagacatacaaataattacagaata

SEQ ID NO: 244681 - DNA, 25 bp, Probe sequence
aagatgtatatcgtaaaaatgttat

SEQ ID NO: 244682 - DNA, 25 bp, Probe sequence
aagtgattctggtaactattgcatg

SEQ ID NO: 244683 - DNA, 25 bp, Probe sequence
aatccgttagaaagtgattctggta

SEQ ID NO: 244684 - DNA, 25 bp, Probe sequence
cagatttaggtttttattctattga

SEQ ID NO: 244685 - DNA, 25 bp, Probe sequence
ctggtaactattgcatggatttaga

SEQ ID NO: 244686 - DNA, 25 bp, Probe sequence
gaatcagatattaaagacatacaaa

SEQ ID NO: 244687 - DNA, 25 bp, Probe sequence
gaaaatccgttagaaagtgattctg

SEQ ID NO: 244688 - DNA, 25 bp, Probe sequence
gaaagtgattctggtaactattgca

SEQ ID NO: 244689 - DNA, 25 bp, Probe sequence
gattttgaaaatccgttagaaagtg

SEQ ID NO: 244690 - DNA, 25 bp, Probe sequence
gatttaggtttttattctattgatg

SEQ ID NO: 244691 - DNA, 25 bp, Probe sequence
gattctggtaactattgcatggatt

SEQ ID NO: 244692 - DNA, 25 bp, Probe sequence
gttaatcaaagatgtatatcgtaaa

SEQ ID NO: 244693 - DNA, 25 bp, Probe sequence
gtaactattgcatggatttagaaac

SEQ ID NO: 244694 - DNA, 25 bp, Probe sequence
gtgattctggtaactattgcatgga

SEQ ID NO: 244695 - DNA, 25 bp, Probe sequence
ggtaactattgcatggatttagaaa

SEQ ID NO: 244696 - DNA, 25 bp, Probe sequence
tggtaactattgcatggatttagaa

SEQ ID NO: 244697 - DNA, 25 bp, Probe sequence
tgattctggtaactattgcatggat

SEQ ID NO: 244698 - DNA, 25 bp, Probe sequence
tccgttagaaagtgattctggtaac

SEQ ID NO: 244699 - DNA, 25 bp, Probe sequence
tctggtaactattgcatggatttag

SEQ ID NO: 244700 - DNA, 25 bp, Probe sequence
tttaggtttttattctattgatgaa

SEQ ID NO: 244701 - DNA, 25 bp, Probe sequence
ttaggtttttattctattgatgaat

SEQ ID NO: 244702 - DNA, 25 bp, Probe sequence
ttctggtaactattgcatggattta

SEQ ID NO: 244703 - DNA, 25 bp, Probe sequence
atcgttcgtaaatatccaaatgtga

SEQ ID NO: 244704 - DNA, 25 bp, Probe sequence
atagagtgattaacgcattatcgcg

SEQ ID NO: 244705 - DNA, 25 bp, Probe sequence
atcagcgtatcgaaaagcagctcaa

SEQ ID NO: 244706 - DNA, 25 bp, Probe sequence
agtaccgataacccaaaagcagtgc

SEQ ID NO: 244707 - DNA, 25 bp, Probe sequence
atgtgaattttataccacctgctat

SEQ ID NO: 244708 - DNA, 25 bp, Probe sequence
agaacaaattgctacttatatggaa

SEQ ID NO: 244709 - DNA, 25 bp, Probe sequence
aaagcagtgcagcagcaattattaa

SEQ ID NO: 244710 - DNA, 25 bp, Probe sequence
aaacgattggtgtcgattttcgatt

SEQ ID NO: 244711 - DNA, 25 bp, Probe sequence
aatgcatgtcgcaatccatacgtgc

SEQ ID NO: 244712 - DNA, 25 bp, Probe sequence
aattaatgccaatccacatcgactg

SEQ ID NO: 244713 - DNA, 25 bp, Probe sequence
caatccatacgtgcgacatatagcg

SEQ ID NO: 244714 - DNA, 25 bp, Probe sequence
cgacatatagcgcatccaacagggc

SEQ ID NO: 244715 - DNA, 25 bp, Probe sequence
gcatccaacagggcgtattataggt

SEQ ID NO: 244716 - DNA, 25 bp, Probe sequence
gctattcatcaaagctttaaccaat

SEQ ID NO: 244717 - DNA, 25 bp, Probe sequence
gcattatcgcgtgaagcttttaaag

SEQ ID NO: 244718 - DNA, 25 bp, Probe sequence
gcaggaagcttccgtcgttttaaag

SEQ ID NO: 244719 - DNA, 25 bp, Probe sequence
gaattcgacaacttgctaaagcacg

SEQ ID NO: 244720 - DNA, 25 bp, Probe sequence
gaattatggcgtagcaactgcgcaa

SEQ ID NO: 244721 - DNA, 25 bp, Probe sequence
gaagctgtgaaacaacttggtgcta

SEQ ID NO: 244722 - DNA, 25 bp, Probe sequence
gaccggtgaatctcagtatttacag

SEQ ID NO: 244723 - DNA, 25 bp, Probe sequence
gatggctcgctggattatgatgatg

SEQ ID NO: 244724 - DNA, 25 bp, Probe sequence
gatgaaattttagcacaacttgatt

SEQ ID NO: 244725 - DNA, 25 bp, Probe sequence
gatgcgcatcatacaaatcatttag

SEQ ID NO: 244726 - DNA, 25 bp, Probe sequence
ggtgatattcatatgcatacaacgt

SEQ ID NO: 244727 - DNA, 25 bp, Probe sequence
ggatatattacctgatggctcgctg

SEQ ID NO: 244728 - DNA, 25 bp, Probe sequence
ggaacgattagctaatgcatgtcgc

SEQ ID NO: 244729 - DNA, 25 bp, Probe sequence
ggaattgaacaagctgatggtacat

SEQ ID NO: 244730 - DNA, 25 bp, Probe sequence
tccggaaggtcttattccacttttg

SEQ ID NO: 244731 - DNA, 25 bp, Probe sequence
tcattcacaaagtttacgtgttgct

SEQ ID NO: 244732 - DNA, 25 bp, Probe sequence
tcatctgcaggaagcttccgtcgtt

SEQ ID NO: 244733 - DNA, 25 bp, Probe sequence
tcatggtaattactgatcattcaca

SEQ ID NO: 244734 - DNA, 25 bp, Probe sequence
taatcaatgattaccgtgagaccgg

SEQ ID NO: 244735 - DNA, 25 bp, Probe sequence
tacgtgttgctaatggcttacaagt

SEQ ID NO: 244736 - DNA, 25 bp, Probe sequence
tatcgatcaatattcatctgcagga

SEQ ID NO: 244737 - DNA, 25 bp, Probe sequence
atttacctaaagcataccatccatt

SEQ ID NO: 244738 - DNA, 25 bp, Probe sequence
atcattatcaactttttcatctcat

SEQ ID NO: 244739 - DNA, 25 bp, Probe sequence
aaattggttctctagtaatggcaac

SEQ ID NO: 244740 - DNA, 25 bp, Probe sequence
aagatgcactacttgtggcagaaca

SEQ ID NO: 244741 - DNA, 25 bp, Probe sequence
aagtatcagcattcattcatcgcgc

SEQ ID NO: 244742 - DNA, 25 bp, Probe sequence
ctgaacttgacttacgaggctatcg

SEQ ID NO: 244743 - DNA, 25 bp, Probe sequence
gcgaaggtggatttggcgttaccgt

SEQ ID NO: 244744 - DNA, 25 bp, Probe sequence
gcttgagtggcttatctaaagtatc

SEQ ID NO: 244745 - DNA, 25 bp, Probe sequence
gcataccatccattattaaatcgtg

SEQ ID NO: 244746 - DNA, 25 bp, Probe sequence
gcatcgtttaccaagcttgagtggc

SEQ ID NO: 244747 - DNA, 25 bp, Probe sequence
gaaggcgttatgaatgcgagtgtag

SEQ ID NO: 244748 - DNA, 25 bp, Probe sequence
gaaggtgctgcattagcaatgagca

SEQ ID NO: 244749 - DNA, 25 bp, Probe sequence
gaaacgttatacctgtcaaagctga

SEQ ID NO: 244750 - DNA, 25 bp, Probe sequence
gacgcactatcctgaacttaaagca

SEQ ID NO: 244751 - DNA, 25 bp, Probe sequence
gagactgttgtagctaataccatcg

SEQ ID NO: 244752 - DNA, 25 bp, Probe sequence
gaggttagaactggaccgtcttgta

SEQ ID NO: 244753 - DNA, 25 bp, Probe sequence
gaggtggtatgccaagcgaaggtgg

SEQ ID NO: 244754 - DNA, 25 bp, Probe sequence
gaggctatcgttatgaggatgcttt

SEQ ID NO: 244755 - DNA, 25 bp, Probe sequence
gatgccagctactaattttgaaacg

SEQ ID NO: 244756 - DNA, 25 bp, Probe sequence
gtacatgatcaatctgcttcaggac

SEQ ID NO: 244757 - DNA, 25 bp, Probe sequence
gtaatggcaacgacgcactatcctg

SEQ ID NO: 244758 - DNA, 25 bp, Probe sequence
ggttacacgtcaaaatcgtcaaaca

SEQ ID NO: 244759 - DNA, 25 bp, Probe sequence
ggtaaaggtacaggtgcacttcaaa

SEQ ID NO: 244760 - DNA, 25 bp, Probe sequence
ggaccgtattgttaaaagccaagca

SEQ ID NO: 244761 - DNA, 25 bp, Probe sequence
ggctaagacgatgattggtactgat

SEQ ID NO: 244762 - DNA, 25 bp, Probe sequence
ggcggcgttttaaatgtatcagagc

SEQ ID NO: 244763 - DNA, 25 bp, Probe sequence
tgccgggtcgttcaaatgcttttga

SEQ ID NO: 244764 - DNA, 25 bp, Probe sequence
tcatcgcgctgatattggcggcgtt

SEQ ID NO: 244765 - DNA, 25 bp, Probe sequence
tcaatatttagatcaagccgtttta

SEQ ID NO: 244766 - DNA, 25 bp, Probe sequence
taaaatcactcgttgccaatgaaac

SEQ ID NO: 244767 - DNA, 25 bp, Probe sequence
tacctgtgttaactgatctttttca

SEQ ID NO: 244768 - DNA, 25 bp, Probe sequence
ttggcgttaccgttgcaacactaaa

SEQ ID NO: 244769 - DNA, 25 bp, Probe sequence
tattgagccatcatcagttgttgaa

SEQ ID NO: 244770 - DNA, 25 bp, Probe sequence
ttaatgggtgtgccgggtcgttcaa

SEQ ID NO: 244771 - DNA, 25 bp, Probe sequence
attgaggcacaccatcctgatgtag

SEQ ID NO: 244772 - DNA, 25 bp, Probe sequence
attgaaatgtcaggcatgactggac

SEQ ID NO: 244773 - DNA, 25 bp, Probe sequence
attattgaggcacaccatcctgatg

SEQ ID NO: 244774 - DNA, 25 bp, Probe sequence
atatagtgcttctcttatgacttca

SEQ ID NO: 244775 - DNA, 25 bp, Probe sequence
atagtgcttctcttatgacttcatt

SEQ ID NO: 244776 - DNA, 25 bp, Probe sequence
agtgcttctcttatgacttcatttt

SEQ ID NO: 244777 - DNA, 25 bp, Probe sequence
agccgatgtagataatggtctcgat

SEQ ID NO: 244778 - DNA, 25 bp, Probe sequence
accatcctgatgtagttattttaga

SEQ ID NO: 244779 - DNA, 25 bp, Probe sequence
aaagctgttgcaaatgatgtggatg

SEQ ID NO: 244780 - DNA, 25 bp, Probe sequence
aaaattattgaggcacaccatcctg

SEQ ID NO: 244781 - DNA, 25 bp, Probe sequence
aattattgaggcacaccatcctgat

SEQ ID NO: 244782 - DNA, 25 bp, Probe sequence
cacaccatcctgatgtagttatttt

SEQ ID NO: 244783 - DNA, 25 bp, Probe sequence
cttatgacttcatttttcacagatg

SEQ ID NO: 244784 - DNA, 25 bp, Probe sequence
ctcttatgacttcatttttcacaga

SEQ ID NO: 244785 - DNA, 25 bp, Probe sequence
gcttctcttatgacttcatttttca

SEQ ID NO: 244786 - DNA, 25 bp, Probe sequence
gaatatagtgcttctcttatgactt

SEQ ID NO: 244787 - DNA, 25 bp, Probe sequence
gaaagaagcctttgaatattaaagt

SEQ ID NO: 244788 - DNA, 25 bp, Probe sequence
gaaagaatatagtgcttctcttatg

SEQ ID NO: 244789 - DNA, 25 bp, Probe sequence
gacttcatttttcacagatggaaca

SEQ ID NO: 244790 - DNA, 25 bp, Probe sequence
gaggcacaccatcctgatgtagtta

SEQ ID NO: 244791 - DNA, 25 bp, Probe sequence
gtgcttctcttatgacttcattttt

SEQ ID NO: 244792 - DNA, 25 bp, Probe sequence
ggggtattttgaaaaagctgttgca

SEQ ID NO: 244793 - DNA, 25 bp, Probe sequence
ggacttgaagttttatcagaaatta

SEQ ID NO: 244794 - DNA, 25 bp, Probe sequence
ggcacaccatcctgatgtagttatt

SEQ ID NO: 244795 - DNA, 25 bp, Probe sequence
tggtctcgatgcaataaaaattatt

SEQ ID NO: 244796 - DNA, 25 bp, Probe sequence
tgaggcacaccatcctgatgtagtt

SEQ ID NO: 244797 - DNA, 25 bp, Probe sequence
tcctgatgtagttattttagatatt

SEQ ID NO: 244798 - DNA, 25 bp, Probe sequence
tagatattgaaatgtcaggcatgac

SEQ ID NO: 244799 - DNA, 25 bp, Probe sequence
tagtgcttctcttatgacttcattt

SEQ ID NO: 244800 - DNA, 25 bp, Probe sequence
tatgacttcatttttcacagatgga

SEQ ID NO: 244801 - DNA, 25 bp, Probe sequence
tattgaggcacaccatcctgatgta

SEQ ID NO: 244802 - DNA, 25 bp, Probe sequence
ttttgaaattttagccgatgtagat

SEQ ID NO: 244803 - DNA, 25 bp, Probe sequence
ttcatttttcacagatggaacagtt

SEQ ID NO: 244804 - DNA, 25 bp, Probe sequence
ttctcttatgacttcatttttcaca

SEQ ID NO: 244805 - DNA, 25 bp, Probe sequence
attgtcggattagttttattcgtca

SEQ ID NO: 244806 - DNA, 25 bp, Probe sequence
attccttgtcattagttatcggtac

SEQ ID NO: 244807 - DNA, 25 bp, Probe sequence
atttctacgtatttacactggacaa

SEQ ID NO: 244808 - DNA, 25 bp, Probe sequence
atttctatgatattctttgcaggta

SEQ ID NO: 244809 - DNA, 25 bp, Probe sequence
atcacatttcaatcttcgtcatttc

SEQ ID NO: 244810 - DNA, 25 bp, Probe sequence
atcaggtggatttatttctacgtat

SEQ ID NO: 244811 - DNA, 25 bp, Probe sequence
atgattggtgccttaattgcgatta

SEQ ID NO: 244812 - DNA, 25 bp, Probe sequence
aaaatgcgcaacgtccattagtaaa

SEQ ID NO: 244813 - DNA, 25 bp, Probe sequence
aacgttatgcttcatttttatttat

SEQ ID NO: 244814 - DNA, 25 bp, Probe sequence
aattgatttctgtagccattgctga

SEQ ID NO: 244815 - DNA, 25 bp, Probe sequence
cagtacctattttattattcttatt

SEQ ID NO: 244816 - DNA, 25 bp, Probe sequence
cttaccttggcttaagtacgagcag

SEQ ID NO: 244817 - DNA, 25 bp, Probe sequence
ctgatgccattagtatacgcacact

SEQ ID NO: 244818 - DNA, 25 bp, Probe sequence
cctgcatttgcagtaggtaatcaca

SEQ ID NO: 244819 - DNA, 25 bp, Probe sequence
gcaagcgacattagccggtttagta

SEQ ID NO: 244820 - DNA, 25 bp, Probe sequence
gacaggtgtggctattggtttttat

SEQ ID NO: 244821 - DNA, 25 bp, Probe sequence
gaggaccagaagacttaccttggct

SEQ ID NO: 244822 - DNA, 25 bp, Probe sequence
gatgcattaagttcacatttcggta

SEQ ID NO: 244823 - DNA, 25 bp, Probe sequence
gattttgttggcttaattctagtgg

SEQ ID NO: 244824 - DNA, 25 bp, Probe sequence
gtattggcgctgtagtatacgcttc

SEQ ID NO: 244825 - DNA, 25 bp, Probe sequence
gttatatttttacgttcccattcat

SEQ ID NO: 244826 - DNA, 25 bp, Probe sequence
gtatttacgttgccattcctattta

SEQ ID NO: 244827 - DNA, 25 bp, Probe sequence
gtatgcacctttacttaacgaagcc

SEQ ID NO: 244828 - DNA, 25 bp, Probe sequence
gtagctttgctttaatgtatgcacc

SEQ ID NO: 244829 - DNA, 25 bp, Probe sequence
gtagccattgctgatgacttaaaca

SEQ ID NO: 244830 - DNA, 25 bp, Probe sequence
gtacgagcagttattccttgtcatt

SEQ ID NO: 244831 - DNA, 25 bp, Probe sequence
tggttacattttccaacatcaattc

SEQ ID NO: 244832 - DNA, 25 bp, Probe sequence
tgtaggtattgcgattgctgcggct

SEQ ID NO: 244833 - DNA, 25 bp, Probe sequence
tgagcttgattttacctgcatttgc

SEQ ID NO: 244834 - DNA, 25 bp, Probe sequence
tgcgattatcgtttttgcgctatat

SEQ ID NO: 244835 - DNA, 25 bp, Probe sequence
tatacgcacactatttatttatggc

SEQ ID NO: 244836 - DNA, 25 bp, Probe sequence
tatacgcttcattatctgatgccat

SEQ ID NO: 244837 - DNA, 25 bp, Probe sequence
ttaatgtggcggtatctgtaggtat

SEQ ID NO: 244838 - DNA, 25 bp, Probe sequence
ttaaatttcccaggcaatgatgcat

SEQ ID NO: 244839 - DNA, 25 bp, Probe sequence
attccaacattaatcgtctttaaag

SEQ ID NO: 244840 - DNA, 25 bp, Probe sequence
atccatcaactgcagctaaatatga

SEQ ID NO: 244841 - DNA, 25 bp, Probe sequence
atgaaaatccatcaactgcagctaa

SEQ ID NO: 244842 - DNA, 25 bp, Probe sequence
atgagtattccaacattaatcgtct

SEQ ID NO: 244843 - DNA, 25 bp, Probe sequence
atgatcgctccggtattagaagaat

SEQ ID NO: 244844 - DNA, 25 bp, Probe sequence
agtagatttttgggcaacatggtgt

SEQ ID NO: 244845 - DNA, 25 bp, Probe sequence
acttagctgaagttttagataaaca

SEQ ID NO: 244846 - DNA, 25 bp, Probe sequence
aaatccatcaactgcagctaaatat

SEQ ID NO: 244847 - DNA, 25 bp, Probe sequence
aaatgatcgctccggtattagaaga

SEQ ID NO: 244848 - DNA, 25 bp, Probe sequence
aacagatgcagattttgattcaaaa

SEQ ID NO: 244849 - DNA, 25 bp, Probe sequence
aactgcagctaaatatgaagtgatg

SEQ ID NO: 244850 - DNA, 25 bp, Probe sequence
cagttgataaagttgttggtttcca

SEQ ID NO: 244851 - DNA, 25 bp, Probe sequence
ccatgtaaaatgatcgctccggtat

SEQ ID NO: 244852 - DNA, 25 bp, Probe sequence
gaattagcagctgactatgaaggta

SEQ ID NO: 244853 - DNA, 25 bp, Probe sequence
gaaaatccatcaactgcagctaaat

SEQ ID NO: 244854 - DNA, 25 bp, Probe sequence
gactatgaaggtaaagctgacattt

SEQ ID NO: 244855 - DNA, 25 bp, Probe sequence
gagtattccaacattaatcgtcttt

SEQ ID NO: 244856 - DNA, 25 bp, Probe sequence
gatcgctccggtattagaagaatta

SEQ ID NO: 244857 - DNA, 25 bp, Probe sequence
gatttttgggcaacatggtgtggtc

SEQ ID NO: 244858 - DNA, 25 bp, Probe sequence
gtattccaacattaatcgtctttaa

SEQ ID NO: 244859 - DNA, 25 bp, Probe sequence
gtattagaagaattagcagctgact

SEQ ID NO: 244860 - DNA, 25 bp, Probe sequence
gtaaaatgatcgctccggtattaga

SEQ ID NO: 244861 - DNA, 25 bp, Probe sequence
gtaacagatgcagattttgattcaa

SEQ ID NO: 244862 - DNA, 25 bp, Probe sequence
gtctttaaagacggtcaaccagttg

SEQ ID NO: 244863 - DNA, 25 bp, Probe sequence
gtggtccatgtaaaatgatcgctcc

SEQ ID NO: 244864 - DNA, 25 bp, Probe sequence
ggtgtggtccatgtaaaatgatcgc

SEQ ID NO: 244865 - DNA, 25 bp, Probe sequence
ggtccatgtaaaatgatcgctccgg

SEQ ID NO: 244866 - DNA, 25 bp, Probe sequence
tgggcaacatggtgtggtccatgta

SEQ ID NO: 244867 - DNA, 25 bp, Probe sequence
tgataaagttgttggtttccaacca

SEQ ID NO: 244868 - DNA, 25 bp, Probe sequence
tgaagtgatgagtattccaacatta

SEQ ID NO: 244869 - DNA, 25 bp, Probe sequence
ttttgggcaacatggtgtggtccat

SEQ ID NO: 244870 - DNA, 25 bp, Probe sequence
tttaaagacggtcaaccagttgata

SEQ ID NO: 244871 - DNA, 25 bp, Probe sequence
ttagcagctgactatgaaggtaaag

SEQ ID NO: 244872 - DNA, 25 bp, Probe sequence
ttcaaaagtagaatctggtgtacaa

SEQ ID NO: 244873 - DNA, 25 bp, Probe sequence
attaggtcttgatatccctgttgca

SEQ ID NO: 244874 - DNA, 25 bp, Probe sequence
attattattgcgttcattcggttca

SEQ ID NO: 244875 - DNA, 25 bp, Probe sequence
atgattcaatctgttgtggacacta

SEQ ID NO: 244876 - DNA, 25 bp, Probe sequence
atggcgctagtgcagaaattgtacc

SEQ ID NO: 244877 - DNA, 25 bp, Probe sequence
acggttaaaggtccagatgattaca

SEQ ID NO: 244878 - DNA, 25 bp, Probe sequence
aacgattcgtgatgtctttggttat

SEQ ID NO: 244879 - DNA, 25 bp, Probe sequence
aagcgagatacaacgatgattccat

SEQ ID NO: 244880 - DNA, 25 bp, Probe sequence
aagacgacgatattctcgcgtttta

SEQ ID NO: 244881 - DNA, 25 bp, Probe sequence
aagaacctacatgaacaattgcata

SEQ ID NO: 244882 - DNA, 25 bp, Probe sequence
aaggaagttcatgtaccacgtaatt

SEQ ID NO: 244883 - DNA, 25 bp, Probe sequence
aatatcctagactactagtgacgag

SEQ ID NO: 244884 - DNA, 25 bp, Probe sequence
cgatgattccattacagcaaacaga

SEQ ID NO: 244885 - DNA, 25 bp, Probe sequence
cgagactggttggtgaaatacgtcg

SEQ ID NO: 244886 - DNA, 25 bp, Probe sequence
ccgcgcgaggtcccaaaaaagatat

SEQ ID NO: 244887 - DNA, 25 bp, Probe sequence
gcgttcattcggttcaatcaagaaa

SEQ ID NO: 244888 - DNA, 25 bp, Probe sequence
gctgcacataacgctaaagtatcct

SEQ ID NO: 244889 - DNA, 25 bp, Probe sequence
gacactaaaatcgttcaacccgcgc

SEQ ID NO: 244890 - DNA, 25 bp, Probe sequence
gaatgttaactgcaagtgaatcact

SEQ ID NO: 244891 - DNA, 25 bp, Probe sequence
gaaggaagctacacttgaagatttt

SEQ ID NO: 244892 - DNA, 25 bp, Probe sequence
gaaggattaccattacctgatttaa

SEQ ID NO: 244893 - DNA, 25 bp, Probe sequence
gaagcattcgataattctaatattc

SEQ ID NO: 244894 - DNA, 25 bp, Probe sequence
gacagaatatatccatatcgcaaat

SEQ ID NO: 244895 - DNA, 25 bp, Probe sequence
gaccgtatccgaatgcatattctgc

SEQ ID NO: 244896 - DNA, 25 bp, Probe sequence
gatgaggttcacagattcgcaatca

SEQ ID NO: 244897 - DNA, 25 bp, Probe sequence
gatccagtgtcagcaatggttacat

SEQ ID NO: 244898 - DNA, 25 bp, Probe sequence
gatatccctgttgcaggtttgcaga

SEQ ID NO: 244899 - DNA, 25 bp, Probe sequence
gattcgcaatcacatttcatagaca

SEQ ID NO: 244900 - DNA, 25 bp, Probe sequence
ggatgtgtatccaagttttctttat

SEQ ID NO: 244901 - DNA, 25 bp, Probe sequence
ggaccatgtgtatatgacgttgatt

SEQ ID NO: 244902 - DNA, 25 bp, Probe sequence
tggacaatgtttaggaccatgtgta

SEQ ID NO: 244903 - DNA, 25 bp, Probe sequence
tgaacggggttattgatgtgctaca

SEQ ID NO: 244904 - DNA, 25 bp, Probe sequence
tcaaggtgtggatccagtgtcagca

SEQ ID NO: 244905 - DNA, 25 bp, Probe sequence
tagcttaaaccaacatattttacct

SEQ ID NO: 244906 - DNA, 25 bp, Probe sequence
ttaaatgtcgtacctatggaaccag

SEQ ID NO: 244907 - DNA, 25 bp, Probe sequence
attactcgatttttagaaactggat

SEQ ID NO: 244908 - DNA, 25 bp, Probe sequence
atttttatttatatacattccgttg

SEQ ID NO: 244909 - DNA, 25 bp, Probe sequence
atcacaacgagtatttacatgggtt

SEQ ID NO: 244910 - DNA, 25 bp, Probe sequence
atcacggtttgtttggtatacacat

SEQ ID NO: 244911 - DNA, 25 bp, Probe sequence
atctaagacgtattcactcgttatt

SEQ ID NO: 244912 - DNA, 25 bp, Probe sequence
agtgaatcaccaagcaacacaaggt

SEQ ID NO: 244913 - DNA, 25 bp, Probe sequence
acattccgttgttatatcacggttt

SEQ ID NO: 244914 - DNA, 25 bp, Probe sequence
acatttatctttattggtatccatt

SEQ ID NO: 244915 - DNA, 25 bp, Probe sequence
acatcctggatgggcaatattttat

SEQ ID NO: 244916 - DNA, 25 bp, Probe sequence
aaagcattttacggcaaagaagtga

SEQ ID NO: 244917 - DNA, 25 bp, Probe sequence
aatgttggacattactcgattttta

SEQ ID NO: 244918 - DNA, 25 bp, Probe sequence
gcatctaactttatggaatcattac

SEQ ID NO: 244919 - DNA, 25 bp, Probe sequence
gcaaatggcttatggtcattcttag

SEQ ID NO: 244920 - DNA, 25 bp, Probe sequence
gcaacacaaggtgctgaagcgttta

SEQ ID NO: 244921 - DNA, 25 bp, Probe sequence
gaatcattaccatttctaattattg

SEQ ID NO: 244922 - DNA, 25 bp, Probe sequence
gaaactggatgttcttcttccaaag

SEQ ID NO: 244923 - DNA, 25 bp, Probe sequence
gaaacattgcaacatcctggatggg

SEQ ID NO: 244924 - DNA, 25 bp, Probe sequence
gacttcaatctccaaaatcacaacg

SEQ ID NO: 244925 - DNA, 25 bp, Probe sequence
gatgttcttcttccaaagagtgagt

SEQ ID NO: 244926 - DNA, 25 bp, Probe sequence
gttgtgttccactttgcaaatggct

SEQ ID NO: 244927 - DNA, 25 bp, Probe sequence
gttacttggggtggacttcaatctc

SEQ ID NO: 244928 - DNA, 25 bp, Probe sequence
gttatttcgtatattggtgttactg

SEQ ID NO: 244929 - DNA, 25 bp, Probe sequence
gtattattgctgttgtgttccactt

SEQ ID NO: 244930 - DNA, 25 bp, Probe sequence
gtgagtggtatcttaacatttatct

SEQ ID NO: 244931 - DNA, 25 bp, Probe sequence
ggtgttactgcaattattgccttta

SEQ ID NO: 244932 - DNA, 25 bp, Probe sequence
ggtgcatttttggtcgttcatttat

SEQ ID NO: 244933 - DNA, 25 bp, Probe sequence
ggtcgttcatttattagtgaatcac

SEQ ID NO: 244934 - DNA, 25 bp, Probe sequence
ggtattatcccaataggtgcatttt

SEQ ID NO: 244935 - DNA, 25 bp, Probe sequence
ggcaaacacgtttacaaaaagcatt

SEQ ID NO: 244936 - DNA, 25 bp, Probe sequence
tggtatacacattgcatttacagca

SEQ ID NO: 244937 - DNA, 25 bp, Probe sequence
tatggtcattcttagttacttgggg

SEQ ID NO: 244938 - DNA, 25 bp, Probe sequence
tatccatttatggcaaacacgttta

SEQ ID NO: 244939 - DNA, 25 bp, Probe sequence
ttacatgggtttcattaatcgtatt

SEQ ID NO: 244940 - DNA, 25 bp, Probe sequence
ttcactcgttattaggtattatccc

SEQ ID NO: 244941 - DNA, 25 bp, Probe sequence
attctccttggattcactttgatga

SEQ ID NO: 244942 - DNA, 25 bp, Probe sequence
atcttattgttgtcggaggtggcct

SEQ ID NO: 244943 - DNA, 25 bp, Probe sequence
agtacctcgtgatatcgcaacgcgt

SEQ ID NO: 244944 - DNA, 25 bp, Probe sequence
accgtaacgaatcacgcggtgccca

SEQ ID NO: 244945 - DNA, 25 bp, Probe sequence
acaggatcagcggcttccattgttt

SEQ ID NO: 244946 - DNA, 25 bp, Probe sequence
aaagcgatgacagaggcagcaccta

SEQ ID NO: 244947 - DNA, 25 bp, Probe sequence
aaaccagaattcccagagcgtaatg

SEQ ID NO: 244948 - DNA, 25 bp, Probe sequence
aaggggaaggcgattctccttggat

SEQ ID NO: 244949 - DNA, 25 bp, Probe sequence
aattcactggtgatgacccacgcaa

SEQ ID NO: 244950 - DNA, 25 bp, Probe sequence
caatggcctcattccaaggcgcatt

SEQ ID NO: 244951 - DNA, 25 bp, Probe sequence
cacgcggtgcccattataaaccaga

SEQ ID NO: 244952 - DNA, 25 bp, Probe sequence
gccaattcattgttatcagcgattt

SEQ ID NO: 244953 - DNA, 25 bp, Probe sequence
gcaaaccaaccacctgttaaagcga

SEQ ID NO: 244954 - DNA, 25 bp, Probe sequence
gacttctctcaacatggtggtaacc

SEQ ID NO: 244955 - DNA, 25 bp, Probe sequence
gatgacccacgcaaagtaccaatga

SEQ ID NO: 244956 - DNA, 25 bp, Probe sequence
gaggtggcctagcgggcttaatgtc

SEQ ID NO: 244957 - DNA, 25 bp, Probe sequence
gatgtgagtttaataccacctcgta

SEQ ID NO: 244958 - DNA, 25 bp, Probe sequence
gatggtaagccttggtacttcttag

SEQ ID NO: 244959 - DNA, 25 bp, Probe sequence
gatttgttctcagttgtaccagtaa

SEQ ID NO: 244960 - DNA, 25 bp, Probe sequence
gttcattcaaattcatcctactgca

SEQ ID NO: 244961 - DNA, 25 bp, Probe sequence
gtttaccaacaaggcgctatttatg

SEQ ID NO: 244962 - DNA, 25 bp, Probe sequence
gtttacttatgatgacgtcgatgtg

SEQ ID NO: 244963 - DNA, 25 bp, Probe sequence
gtaccaatgaagattttcccagctg

SEQ ID NO: 244964 - DNA, 25 bp, Probe sequence
gtaccagtaaagcgttcgcactctg

SEQ ID NO: 244965 - DNA, 25 bp, Probe sequence
gtggtaaccgcttaggtgccaattc

SEQ ID NO: 244966 - DNA, 25 bp, Probe sequence
gtggcattaatggtgcggtcaatac

SEQ ID NO: 244967 - DNA, 25 bp, Probe sequence
ggtacagtagcaggtccaaacgcga

SEQ ID NO: 244968 - DNA, 25 bp, Probe sequence
ggaacatgttagtacttgcacgtgt

SEQ ID NO: 244969 - DNA, 25 bp, Probe sequence
tatggcaacgggtggccctggtatt

SEQ ID NO: 244970 - DNA, 25 bp, Probe sequence
taccacctcgtaaacgtgattacac

SEQ ID NO: 244971 - DNA, 25 bp, Probe sequence
tatgcaggggcaacaactggacaac

SEQ ID NO: 244972 - DNA, 25 bp, Probe sequence
ttattagctatgcgcggtacagaaa

SEQ ID NO: 244973 - DNA, 25 bp, Probe sequence
ttagacgtttcggtggtacattaca

SEQ ID NO: 244974 - DNA, 25 bp, Probe sequence
ttcgcactctgtttgtgcccaaggt

SEQ ID NO: 244975 - DNA, 25 bp, Probe sequence
attaacaacatccattgcagcaatg

SEQ ID NO: 244976 - DNA, 25 bp, Probe sequence
atcttgttctgcgattgttgatcaa

SEQ ID NO: 244977 - DNA, 25 bp, Probe sequence
atgcttgccctaaaggtattccatt

SEQ ID NO: 244978 - DNA, 25 bp, Probe sequence
atggaacgtatgatttaggtccggg

SEQ ID NO: 244979 - DNA, 25 bp, Probe sequence
atggttatcaatggtcgtgcaagac

SEQ ID NO: 244980 - DNA, 25 bp, Probe sequence
agagccaatgaatactttcccagtt

SEQ ID NO: 244981 - DNA, 25 bp, Probe sequence
agtgaaaaacactccacaacatgaa

SEQ ID NO: 244982 - DNA, 25 bp, Probe sequence
acaacacctgttgtctgggatatga

SEQ ID NO: 244983 - DNA, 25 bp, Probe sequence
aaaactgtgttaatgcttgccctaa

SEQ ID NO: 244984 - DNA, 25 bp, Probe sequence
aacgtatgaaagcatggatcccaat

SEQ ID NO: 244985 - DNA, 25 bp, Probe sequence
aacgtcaaacagcttatgaattatc

SEQ ID NO: 244986 - DNA, 25 bp, Probe sequence
aagcaatctcgcaagttcgtttgtt

SEQ ID NO: 244987 - DNA, 25 bp, Probe sequence
taatggaaattagacgtaacccagt

SEQ ID NO: 244988 - DNA, 25 bp, Probe sequence
aatcattctttggttcagaccatga

SEQ ID NO: 244989 - DNA, 25 bp, Probe sequence
caacctattcgtttagagccaatga

SEQ ID NO: 244990 - DNA, 25 bp, Probe sequence
cattccacatgtttaaatcattctt

SEQ ID NO: 244991 - DNA, 25 bp, Probe sequence
gcatggatcccaattgatggaacgt

SEQ ID NO: 244992 - DNA, 25 bp, Probe sequence
gaacagagaaacaacattccacatg

SEQ ID NO: 244993 - DNA, 25 bp, Probe sequence
gaaacatttgaaattccatatcgtg

SEQ ID NO: 244994 - DNA, 25 bp, Probe sequence
gatcaattagaacaacctattcgtt

SEQ ID NO: 244995 - DNA, 25 bp, Probe sequence
gatacaagtgattctaagccttatg

SEQ ID NO: 244996 - DNA, 25 bp, Probe sequence
gttgtctgggatatgaactgcttag

SEQ ID NO: 244997 - DNA, 25 bp, Probe sequence
gtttgtcctaatgttactgaaaata

SEQ ID NO: 244998 - DNA, 25 bp, Probe sequence
gtattccattaacaacatccattgc

SEQ ID NO: 244999 - DNA, 25 bp, Probe sequence
gtatgccagagaaaaaacgtcaaac

SEQ ID NO: 245000 - DNA, 25 bp, Probe sequence
gtatgacatgtggtgtatgtttaga

SEQ ID NO: 245001 - DNA, 25 bp, Probe sequence
gtcgtgcaagacaatcttgttctgc

SEQ ID NO: 245002 - DNA, 25 bp, Probe sequence
gtgacttacaagttgatcgttctag

SEQ ID NO: 245003 - DNA, 25 bp, Probe sequence
tgtggagcatgttctatggttatca

SEQ ID NO: 245004 - DNA, 25 bp, Probe sequence
tgcacccaacaggatctatgactaa

SEQ ID NO: 245005 - DNA, 25 bp, Probe sequence
tcgtttgtttaatttgcacccaaca

SEQ ID NO: 245006 - DNA, 25 bp, Probe sequence
tcgttctagaatgttcgataactta

SEQ ID NO: 245007 - DNA, 25 bp, Probe sequence
tactttcccagttatccgtgactta

SEQ ID NO: 245008 - DNA, 25 bp, Probe sequence
ttcccagttatccgtgacttacaag

SEQ ID NO: 245009 - DNA, 25 bp, Probe sequence
atagtgatccaacaattacaagcat

SEQ ID NO: 245010 - DNA, 25 bp, Probe sequence
agaggtacatggcgttgcctgtcca

SEQ ID NO: 245011 - DNA, 25 bp, Probe sequence
agtgcattgctaacatttagtaatg

SEQ ID NO: 245012 - DNA, 25 bp, Probe sequence
acctatctatgattattttggtggt

SEQ ID NO: 245013 - DNA, 25 bp, Probe sequence
acggctcgtgaagttagtgcattgc

SEQ ID NO: 245014 - DNA, 25 bp, Probe sequence
actgtcattttaggatgtacccact

SEQ ID NO: 245015 - DNA, 25 bp, Probe sequence
actgaacatccagatcatcgatttt

SEQ ID NO: 245016 - DNA, 25 bp, Probe sequence
acaaaagaccttatcaatcccagtg

SEQ ID NO: 245017 - DNA, 25 bp, Probe sequence
aaatgctcgtgattgcttgtaatac

SEQ ID NO: 245018 - DNA, 25 bp, Probe sequence
aaagacagtgatttcgtctggatta

SEQ ID NO: 245019 - DNA, 25 bp, Probe sequence
aacgttggcgtaatagtgagtctga

SEQ ID NO: 245020 - DNA, 25 bp, Probe sequence
aatatacagttgaaatcgctcgtaa

SEQ ID NO: 245021 - DNA, 25 bp, Probe sequence
aatttatctgtcaatgtggaacgta

SEQ ID NO: 245022 - DNA, 25 bp, Probe sequence
aattgaaccaggtgctagaacagca

SEQ ID NO: 245023 - DNA, 25 bp, Probe sequence
caataggtgtaatagactctggtgt

SEQ ID NO: 245024 - DNA, 25 bp, Probe sequence
cgatgtccatatgggccaagaccag

SEQ ID NO: 245025 - DNA, 25 bp, Probe sequence
ccactatccattgctctataaacct

SEQ ID NO: 245026 - DNA, 25 bp, Probe sequence
gcaactgctgtagctttagaatatt

SEQ ID NO: 245027 - DNA, 25 bp, Probe sequence
gaaggcacaattaaatctgaagcat

SEQ ID NO: 245028 - DNA, 25 bp, Probe sequence
gaacatgcaagttatactgaacatc

SEQ ID NO: 245029 - DNA, 25 bp, Probe sequence
gaaatcgctcgtaaattaatggaat

SEQ ID NO: 245030 - DNA, 25 bp, Probe sequence
gaaattatgcgtcagttgccaaatg

SEQ ID NO: 245031 - DNA, 25 bp, Probe sequence
gatcatcgattttttgcaacaggtg

SEQ ID NO: 245032 - DNA, 25 bp, Probe sequence
gtctggattagaaacggctcgtgaa

SEQ ID NO: 245033 - DNA, 25 bp, Probe sequence
gtccaggttttgtgccacttgtaga

SEQ ID NO: 245034 - DNA, 25 bp, Probe sequence
gtgagtctgatactgtcattttagg

SEQ ID NO: 245035 - DNA, 25 bp, Probe sequence
gggccaagaccaggagaacaagtaa

SEQ ID NO: 245036 - DNA, 25 bp, Probe sequence
gtggaacgtatatcagtgaatgact

SEQ ID NO: 245037 - DNA, 25 bp, Probe sequence
tcggaggtttgacagtagctaaaga

SEQ ID NO: 245038 - DNA, 25 bp, Probe sequence
tgagacgatttattacttaggtgat

SEQ ID NO: 245039 - DNA, 25 bp, Probe sequence
tccattgctctataaacctatctat

SEQ ID NO: 245040 - DNA, 25 bp, Probe sequence
tcatcaaacactgaaacgttggcgt

SEQ ID NO: 245041 - DNA, 25 bp, Probe sequence
tagactctggtgtcggaggtttgac

SEQ ID NO: 245042 - DNA, 25 bp, Probe sequence
taggatgtacccactatccattgct

SEQ ID NO: 245043 - DNA, 25 bp, Probe sequence
atttagtttcaggtgtgcctttaat

SEQ ID NO: 245044 - DNA, 25 bp, Probe sequence
ctaaaagtgttgcaactgcacctcc

SEQ ID NO: 245045 - DNA, 25 bp, Probe sequence
atcgatttagatttagtttcaggtg

SEQ ID NO: 245046 - DNA, 25 bp, Probe sequence
atccaacgccaacctaaaagtgttg

SEQ ID NO: 245047 - DNA, 25 bp, Probe sequence
acgccaacctaaaagtgttgcaact

SEQ ID NO: 245048 - DNA, 25 bp, Probe sequence
acctaaaagtgttgcaactgcacct

SEQ ID NO: 245049 - DNA, 25 bp, Probe sequence
aaaatgaacaaacaccagagccgcc

SEQ ID NO: 245050 - DNA, 25 bp, Probe sequence
aaaagtgttgcaactgcacctccaa

SEQ ID NO: 245051 - DNA, 25 bp, Probe sequence
aactgcacctccaaaaaatgaacaa

SEQ ID NO: 245052 - DNA, 25 bp, Probe sequence
caactgcacctccaaaaaatgaaca

SEQ ID NO: 245053 - DNA, 25 bp, Probe sequence
ctgcacctccaaaaaatgaacaaac

SEQ ID NO: 245054 - DNA, 25 bp, Probe sequence
gccaacctaaaagtgttgcaactgc

SEQ ID NO: 245055 - DNA, 25 bp, Probe sequence
ccaacgccaacctaaaagtgttgca

SEQ ID NO: 245056 - DNA, 25 bp, Probe sequence
gcctttaataagaaacagcgcaatt

SEQ ID NO: 245057 - DNA, 25 bp, Probe sequence
gccccatgagccaattgaccaataa

SEQ ID NO: 245058 - DNA, 25 bp, Probe sequence
gcaactgcacctccaaaaaatgaac

SEQ ID NO: 245059 - DNA, 25 bp, Probe sequence
gaaacagcgcaattaatgaaattat

SEQ ID NO: 245060 - DNA, 25 bp, Probe sequence
gatgaaaatccaacgccaacctaaa

SEQ ID NO: 245061 - DNA, 25 bp, Probe sequence
gatttagatttagtttcaggtgtgc

SEQ ID NO: 245062 - DNA, 25 bp, Probe sequence
gatttagtttcaggtgtgcctttaa

SEQ ID NO: 245063 - DNA, 25 bp, Probe sequence
gttgcaactgcacctccaaaaaatg

SEQ ID NO: 245064 - DNA, 25 bp, Probe sequence
gtttcaggtgtgcctttaataagaa

SEQ ID NO: 245065 - DNA, 25 bp, Probe sequence
gtgttgcaactgcacctccaaaaaa

SEQ ID NO: 245066 - DNA, 25 bp, Probe sequence
gtgtgcctttaataagaaacagcgc

SEQ ID NO: 245067 - DNA, 25 bp, Probe sequence
tgttgcaactgcacctccaaaaaat

SEQ ID NO: 245068 - DNA, 25 bp, Probe sequence
tgaaaatccaacgccaacctaaaag

SEQ ID NO: 245069 - DNA, 25 bp, Probe sequence
tgcaactgcacctccaaaaaatgaa

SEQ ID NO: 245070 - DNA, 25 bp, Probe sequence
tcaggtgtgcctttaataagaaaca

SEQ ID NO: 245071 - DNA, 25 bp, Probe sequence
taaaagtgttgcaactgcacctcca

SEQ ID NO: 245072 - DNA, 25 bp, Probe sequence
tagatttagtttcaggtgtgccttt

SEQ ID NO: 245073 - DNA, 25 bp, Probe sequence
tagtttcaggtgtgcctttaataag

SEQ ID NO: 245074 - DNA, 25 bp, Probe sequence
tttagtttcaggtgtgcctttaata

SEQ ID NO: 245075 - DNA, 25 bp, Probe sequence
ttagatttagtttcaggtgtgcctt

SEQ ID NO: 245076 - DNA, 25 bp, Probe sequence
ttgcaactgcacctccaaaaaatga

SEQ ID NO: 245077 - DNA, 25 bp, Probe sequence
atatttccagattaccacgtaatag

SEQ ID NO: 245078 - DNA, 25 bp, Probe sequence
aggtatatactctgcacgttatgct

SEQ ID NO: 245079 - DNA, 25 bp, Probe sequence
agctgctgcaaaagcattgaataaa

SEQ ID NO: 245080 - DNA, 25 bp, Probe sequence
accacgtaataggtatttcagaact

SEQ ID NO: 245081 - DNA, 25 bp, Probe sequence
aaaagcgatgaagcaaatattgaaa

SEQ ID NO: 245082 - DNA, 25 bp, Probe sequence
aagcttggtaatacaactgatcgtc

SEQ ID NO: 245083 - DNA, 25 bp, Probe sequence
caatttgtttgtgtcataagtatga

SEQ ID NO: 245084 - DNA, 25 bp, Probe sequence
cgaaaatggtttcggatatgatccg

SEQ ID NO: 245085 - DNA, 25 bp, Probe sequence
gccaggtatatactctgcacgttat

SEQ ID NO: 245086 - DNA, 25 bp, Probe sequence
gaaagagattgttattgcatcgaat

SEQ ID NO: 245087 - DNA, 25 bp, Probe sequence
gacagtggactagaagtttttgcat

SEQ ID NO: 245088 - DNA, 25 bp, Probe sequence
gagccaggtatatactctgcacgtt

SEQ ID NO: 245089 - DNA, 25 bp, Probe sequence
gatattttatgtaccgaaattagat

SEQ ID NO: 245090 - DNA, 25 bp, Probe sequence
gtttttgcattaaatggtgagccag

SEQ ID NO: 245091 - DNA, 25 bp, Probe sequence
gtatttaaaggtactgtttcaggtg

SEQ ID NO: 245092 - DNA, 25 bp, Probe sequence
gtatatactctgcacgttatgctgg

SEQ ID NO: 245093 - DNA, 25 bp, Probe sequence
gtatgagtggccctgatatggaaac

SEQ ID NO: 245094 - DNA, 25 bp, Probe sequence
gtcataagtatgagtggccctgata

SEQ ID NO: 245095 - DNA, 25 bp, Probe sequence
gtggccctgatatggaaacaaaagt

SEQ ID NO: 245096 - DNA, 25 bp, Probe sequence
ggtgagccaggtatatactctgcac

SEQ ID NO: 245097 - DNA, 25 bp, Probe sequence
ggtactgtttcaggtgaaattgcag

SEQ ID NO: 245098 - DNA, 25 bp, Probe sequence
ggactagaagtttttgcattaaatg

SEQ ID NO: 245099 - DNA, 25 bp, Probe sequence
ggaagaaacaggatcaacatttgaa

SEQ ID NO: 245100 - DNA, 25 bp, Probe sequence
tgatccgatattttatgtaccgaaa

SEQ ID NO: 245101 - DNA, 25 bp, Probe sequence
tgagtggccctgatatggaaacaaa

SEQ ID NO: 245102 - DNA, 25 bp, Probe sequence
tctgcacgttatgctggtgaaaata

SEQ ID NO: 245103 - DNA, 25 bp, Probe sequence
tcatagctgatgacagtggactaga

SEQ ID NO: 245104 - DNA, 25 bp, Probe sequence
taagtatgagtggccctgatatgga

SEQ ID NO: 245105 - DNA, 25 bp, Probe sequence
tactctgcacgttatgctggtgaaa

SEQ ID NO: 245106 - DNA, 25 bp, Probe sequence
tatgatccgatattttatgtaccga

SEQ ID NO: 245107 - DNA, 25 bp, Probe sequence
tatactctgcacgttatgctggtga

SEQ ID NO: 245108 - DNA, 25 bp, Probe sequence
tattaaaatcagaagctgctgcaaa

SEQ ID NO: 245109 - DNA, 25 bp, Probe sequence
tattgcatcgaataatcaagggaaa

SEQ ID NO: 245110 - DNA, 25 bp, Probe sequence
ttggtaatacaactgatcgtcgtgc

SEQ ID NO: 245111 - DNA, 25 bp, Probe sequence
attacctagagctctagatagacat

SEQ ID NO: 245112 - DNA, 25 bp, Probe sequence
atttagttatctcccagtggaagga

SEQ ID NO: 245113 - DNA, 25 bp, Probe sequence
atttcagcatttactcttctgtgtt

SEQ ID NO: 245114 - DNA, 25 bp, Probe sequence
ataatttagttatctcccagtggaa

SEQ ID NO: 245115 - DNA, 25 bp, Probe sequence
agatagcgttgctcgtgactatttc

SEQ ID NO: 245116 - DNA, 25 bp, Probe sequence
agcatttactcttctgtgttattgg

SEQ ID NO: 245117 - DNA, 25 bp, Probe sequence
acgatattacaatctcgctattacc

SEQ ID NO: 245118 - DNA, 25 bp, Probe sequence
acaatctcgctattacctagagctc

SEQ ID NO: 245119 - DNA, 25 bp, Probe sequence
aatctcgctattacctagagctcta

SEQ ID NO: 245120 - DNA, 25 bp, Probe sequence
catttactcttctgtgttattggga

SEQ ID NO: 245121 - DNA, 25 bp, Probe sequence
gcgttgctcgtgactatttcagcat

SEQ ID NO: 245122 - DNA, 25 bp, Probe sequence
gctcgtgactatttcagcatttact

SEQ ID NO: 245123 - DNA, 25 bp, Probe sequence
gctcacgatattacaatctcgctat

SEQ ID NO: 245124 - DNA, 25 bp, Probe sequence
gctaaagatagcgttgctcgtgact

SEQ ID NO: 245125 - DNA, 25 bp, Probe sequence
gaatggcaagaagtcggtgatgacg

SEQ ID NO: 245126 - DNA, 25 bp, Probe sequence
gactatttcagcatttactcttctg

SEQ ID NO: 245127 - DNA, 25 bp, Probe sequence
gacgtaattgcattcgctaaagata

SEQ ID NO: 245128 - DNA, 25 bp, Probe sequence
gatgacgtaattgcattcgctaaag

SEQ ID NO: 245129 - DNA, 25 bp, Probe sequence
gatagacataagattcataacgaat

SEQ ID NO: 245130 - DNA, 25 bp, Probe sequence
gatattacaatctcgctattaccta

SEQ ID NO: 245131 - DNA, 25 bp, Probe sequence
gttgctcgtgactatttcagcattt

SEQ ID NO: 245132 - DNA, 25 bp, Probe sequence
gttatctcccagtggaaggaggtga

SEQ ID NO: 245133 - DNA, 25 bp, Probe sequence
gtcggtgatgacgtaattgcattcg

SEQ ID NO: 245134 - DNA, 25 bp, Probe sequence
gtgactatttcagcatttactcttc

SEQ ID NO: 245135 - DNA, 25 bp, Probe sequence
gtggaaggaggtgaaatttatggat

SEQ ID NO: 245136 - DNA, 25 bp, Probe sequence
ggtgatgacgtaattgcattcgcta

SEQ ID NO: 245137 - DNA, 25 bp, Probe sequence
ggatttagagaaaattgctcacgat

SEQ ID NO: 245138 - DNA, 25 bp, Probe sequence
tctcgctattacctagagctctaga

SEQ ID NO: 245139 - DNA, 25 bp, Probe sequence
tcttctgtgttattgggattacaag

SEQ ID NO: 245140 - DNA, 25 bp, Probe sequence
tactcttctgtgttattgggattac

SEQ ID NO: 245141 - DNA, 25 bp, Probe sequence
tagcgttgctcgtgactatttcagc

SEQ ID NO: 245142 - DNA, 25 bp, Probe sequence
tattacaatctcgctattacctaga

SEQ ID NO: 245143 - DNA, 25 bp, Probe sequence
ttcagcatttactcttctgtgttat

SEQ ID NO: 245144 - DNA, 25 bp, Probe sequence
ttgctcacgatattacaatctcgct

SEQ ID NO: 245145 - DNA, 25 bp, Probe sequence
ttaatggtaaagtgacgccgggtca

SEQ ID NO: 245146 - DNA, 25 bp, Probe sequence
atcaaacaagctatgaagtcatcga

SEQ ID NO: 245147 - DNA, 25 bp, Probe sequence
atcaaaacacatcatgtcacctctt

SEQ ID NO: 245148 - DNA, 25 bp, Probe sequence
acatcatgtcacctctttctgagtt

SEQ ID NO: 245149 - DNA, 25 bp, Probe sequence
acaactagcaacagaatcaaacaag

SEQ ID NO: 245150 - DNA, 25 bp, Probe sequence
aaatattgaatgttagcgaagcttg

SEQ ID NO: 245151 - DNA, 25 bp, Probe sequence
aaatcaatgcaatacaaaagttcaa

SEQ ID NO: 245152 - DNA, 25 bp, Probe sequence
aaatcgaaaactttatgcaatgggt

SEQ ID NO: 245153 - DNA, 25 bp, Probe sequence
aaaacacatcatgtcacctctttct

SEQ ID NO: 245154 - DNA, 25 bp, Probe sequence
aactttatgcaatgggttagagata

SEQ ID NO: 245155 - DNA, 25 bp, Probe sequence
aactggtatcaaattatcaaaaact

SEQ ID NO: 245156 - DNA, 25 bp, Probe sequence
cctctttctgagttcaatatttttg

SEQ ID NO: 245157 - DNA, 25 bp, Probe sequence
gcatcaagaaactatagctggtcat

SEQ ID NO: 245158 - DNA, 25 bp, Probe sequence
gcatggaagaagaaactggtatcaa

SEQ ID NO: 245159 - DNA, 25 bp, Probe sequence
gaagcttggttgttgggatacgacg

SEQ ID NO: 245160 - DNA, 25 bp, Probe sequence
gaagaaattatatgttttagctaaa

SEQ ID NO: 245161 - DNA, 25 bp, Probe sequence
gaacttttgttcaacggagcttata

SEQ ID NO: 245162 - DNA, 25 bp, Probe sequence
gaactctacaactagcaacagaatc

SEQ ID NO: 245163 - DNA, 25 bp, Probe sequence
gaaactatagctggtcatgcaaata

SEQ ID NO: 245164 - DNA, 25 bp, Probe sequence
gacgccgggtcagaagaaattatat

SEQ ID NO: 245165 - DNA, 25 bp, Probe sequence
gagataaatttaatcagcatcaaga

SEQ ID NO: 245166 - DNA, 25 bp, Probe sequence
gatgaatttactcctgaagaatggg

SEQ ID NO: 245167 - DNA, 25 bp, Probe sequence
gttcaacggagcttatactataact

SEQ ID NO: 245168 - DNA, 25 bp, Probe sequence
gttagcgaagcttggttgttgggat

SEQ ID NO: 245169 - DNA, 25 bp, Probe sequence
gtcacctctttctgagttcaatatt

SEQ ID NO: 245170 - DNA, 25 bp, Probe sequence
ggaggaggaaaattcattgaactct

SEQ ID NO: 245171 - DNA, 25 bp, Probe sequence
ggtaaagtgacgccgggtcagaaga

SEQ ID NO: 245172 - DNA, 25 bp, Probe sequence
tgaactacataaaccttaacacgtt

SEQ ID NO: 245173 - DNA, 25 bp, Probe sequence
tgaatttttctattgaacttttgtt

SEQ ID NO: 245174 - DNA, 25 bp, Probe sequence
tcatgtcacctctttctgagttcaa

SEQ ID NO: 245175 - DNA, 25 bp, Probe sequence
tatgaagtcatcgaatttaaaacaa

SEQ ID NO: 245176 - DNA, 25 bp, Probe sequence
tatagctggtcatgcaaataaagat

SEQ ID NO: 245177 - DNA, 25 bp, Probe sequence
ttcattgaactctacaactagcaac

SEQ ID NO: 245178 - DNA, 25 bp, Probe sequence
ttggttgttgggatacgacgtagaa

SEQ ID NO: 245179 - DNA, 25 bp, Probe sequence
atctcagctgttccattacgcgaaa

SEQ ID NO: 245180 - DNA, 25 bp, Probe sequence
agtattcgatcacatttgagccgtt

SEQ ID NO: 245181 - DNA, 25 bp, Probe sequence
agaattgcttatgaaatgtgaagtt

SEQ ID NO: 245182 - DNA, 25 bp, Probe sequence
acaaagagtacctcgaggattcgat

SEQ ID NO: 245183 - DNA, 25 bp, Probe sequence
aaattacgcaagacgacacggcttt

SEQ ID NO: 245184 - DNA, 25 bp, Probe sequence
aacacaaagagtacctcgaggattc

SEQ ID NO: 245185 - DNA, 25 bp, Probe sequence
aacattttagatcaatcgaaattca

SEQ ID NO: 245186 - DNA, 25 bp, Probe sequence
aagagtacctcgaggattcgatggt

SEQ ID NO: 245187 - DNA, 25 bp, Probe sequence
aagtattatatgaagaacttgccca

SEQ ID NO: 245188 - DNA, 25 bp, Probe sequence
cagctgttccattacgcgaaattgt

SEQ ID NO: 245189 - DNA, 25 bp, Probe sequence
ctatggcgagtattcgatcacattt

SEQ ID NO: 245190 - DNA, 25 bp, Probe sequence
ctcgaggattcgatggttggtatca

SEQ ID NO: 245191 - DNA, 25 bp, Probe sequence
ctcagctgttccattacgcgaaatt

SEQ ID NO: 245192 - DNA, 25 bp, Probe sequence
gcgagtattcgatcacatttgagcc

SEQ ID NO: 245193 - DNA, 25 bp, Probe sequence
gctgttccattacgcgaaattgtag

SEQ ID NO: 245194 - DNA, 25 bp, Probe sequence
gcaagtttgaaaattacgcaagacg

SEQ ID NO: 245195 - DNA, 25 bp, Probe sequence
gaaagaaacacaaagagtacctcga

SEQ ID NO: 245196 - DNA, 25 bp, Probe sequence
gagtacctcgaggattcgatggttg

SEQ ID NO: 245197 - DNA, 25 bp, Probe sequence
gaggattcgatggttggtatcaaga

SEQ ID NO: 245198 - DNA, 25 bp, Probe sequence
gattcgatggttggtatcaagaagg

SEQ ID NO: 245199 - DNA, 25 bp, Probe sequence
gttccattacgcgaaattgtagaag

SEQ ID NO: 245200 - DNA, 25 bp, Probe sequence
gtattcgatcacatttgagccgttg

SEQ ID NO: 245201 - DNA, 25 bp, Probe sequence
gtacctcgaggattcgatggttggt

SEQ ID NO: 245202 - DNA, 25 bp, Probe sequence
gggaaaatacgaagaattgcttatg

SEQ ID NO: 245203 - DNA, 25 bp, Probe sequence
ggtatcaagaaggagaaatttttat

SEQ ID NO: 245204 - DNA, 25 bp, Probe sequence
ggcgagtattcgatcacatttgagc

SEQ ID NO: 245205 - DNA, 25 bp, Probe sequence
tccattacgcgaaattgtagaagct

SEQ ID NO: 245206 - DNA, 25 bp, Probe sequence
tccctatccgaaaggaacaaattag

SEQ ID NO: 245207 - DNA, 25 bp, Probe sequence
tctcagctgttccattacgcgaaat

SEQ ID NO: 245208 - DNA, 25 bp, Probe sequence
tacgcaagacgacacggctttatct

SEQ ID NO: 245209 - DNA, 25 bp, Probe sequence
tatctcagctgttccattacgcgaa

SEQ ID NO: 245210 - DNA, 25 bp, Probe sequence
tattagaccttccctatccgaaagg

SEQ ID NO: 245211 - DNA, 25 bp, Probe sequence
ttagatcaatcgaaattcaacaatc

SEQ ID NO: 245212 - DNA, 25 bp, Probe sequence
ttacgcaagacgacacggctttatc

SEQ ID NO: 245213 - DNA, 25 bp, Probe sequence
atagctgctattagtttaacggtat

SEQ ID NO: 245214 - DNA, 25 bp, Probe sequence
atctcatgcacaaactaaaaacgtt

SEQ ID NO: 245215 - DNA, 25 bp, Probe sequence
agaactgttgcaacacaccgtaaag

SEQ ID NO: 245216 - DNA, 25 bp, Probe sequence
agctgctattagtttaacggtatca

SEQ ID NO: 245217 - DNA, 25 bp, Probe sequence
accgtaaagcacaaagagctgttaa

SEQ ID NO: 245218 - DNA, 25 bp, Probe sequence
acgtacaagaactgttgcaacacac

SEQ ID NO: 245219 - DNA, 25 bp, Probe sequence
actgttgcaacacaccgtaaagcac

SEQ ID NO: 245220 - DNA, 25 bp, Probe sequence
acaagaactgttgcaacacaccgta

SEQ ID NO: 245221 - DNA, 25 bp, Probe sequence
aaacgtacaagaactgttgcaacac

SEQ ID NO: 245222 - DNA, 25 bp, Probe sequence
aactgttgcaacacaccgtaaagca

SEQ ID NO: 245223 - DNA, 25 bp, Probe sequence
cacaccgtaaagcacaaagagctgt

SEQ ID NO: 245224 - DNA, 25 bp, Probe sequence
aagaactgttgcaacacaccgtaaa

SEQ ID NO: 245225 - DNA, 25 bp, Probe sequence
aatcgatctagttttaaaatataat

SEQ ID NO: 245226 - DNA, 25 bp, Probe sequence
caagaactgttgcaacacaccgtaa

SEQ ID NO: 245227 - DNA, 25 bp, Probe sequence
caacacaccgtaaagcacaaagagc

SEQ ID NO: 245228 - DNA, 25 bp, Probe sequence
catgcacaaactaaaaacgttgaag

SEQ ID NO: 245229 - DNA, 25 bp, Probe sequence
ctgttgcaacacaccgtaaagcaca

SEQ ID NO: 245230 - DNA, 25 bp, Probe sequence
ctgctattagtttaacggtatcaac

SEQ ID NO: 245231 - DNA, 25 bp, Probe sequence
ccggtgaatctcatgcacaaactaa

SEQ ID NO: 245232 - DNA, 25 bp, Probe sequence
gccggtgaatctcatgcacaaacta

SEQ ID NO: 245233 - DNA, 25 bp, Probe sequence
gcatagctgctattagtttaacggt

SEQ ID NO: 245234 - DNA, 25 bp, Probe sequence
gcaacacaccgtaaagcacaaagag

SEQ ID NO: 245235 - DNA, 25 bp, Probe sequence
gaatctcatgcacaaactaaaaacg

SEQ ID NO: 245236 - DNA, 25 bp, Probe sequence
gaactgttgcaacacaccgtaaagc

SEQ ID NO: 245237 - DNA, 25 bp, Probe sequence
gaaatcaattttaagcatagctgct

SEQ ID NO: 245238 - DNA, 25 bp, Probe sequence
gacaaatcgatctagttttaaaata

SEQ ID NO: 245239 - DNA, 25 bp, Probe sequence
gttgcaacacaccgtaaagcacaaa

SEQ ID NO: 245240 - DNA, 25 bp, Probe sequence
gtacaagaactgttgcaacacaccg

SEQ ID NO: 245241 - DNA, 25 bp, Probe sequence
ggtgaatctcatgcacaaactaaaa

SEQ ID NO: 245242 - DNA, 25 bp, Probe sequence
tgccggtgaatctcatgcacaaact

SEQ ID NO: 245243 - DNA, 25 bp, Probe sequence
tcaaacgtacaagaactgttgcaac

SEQ ID NO: 245244 - DNA, 25 bp, Probe sequence
tacaaagacaaatcgatctagtttt

SEQ ID NO: 245245 - DNA, 25 bp, Probe sequence
tttgccggtgaatctcatgcacaaa

SEQ ID NO: 245246 - DNA, 25 bp, Probe sequence
ttgccggtgaatctcatgcacaaac

SEQ ID NO: 245247 - DNA, 25 bp, Probe sequence
attgtaacggatatagtggcaaccg

SEQ ID NO: 245248 - DNA, 25 bp, Probe sequence
attaaacagtcgtaaagatgctaaa

SEQ ID NO: 245249 - DNA, 25 bp, Probe sequence
atatagtggcaaccgtgttaatcat

SEQ ID NO: 245250 - DNA, 25 bp, Probe sequence
atagtggcaaccgtgttaatcatac

SEQ ID NO: 245251 - DNA, 25 bp, Probe sequence
atacgtgctttattaaacagtcgta

SEQ ID NO: 245252 - DNA, 25 bp, Probe sequence
atcatacgtgctttattaaacagtc

SEQ ID NO: 245253 - DNA, 25 bp, Probe sequence
agtggcaaccgtgttaatcatacgt

SEQ ID NO: 245254 - DNA, 25 bp, Probe sequence
accgtgttaatcatacgtgctttat

SEQ ID NO: 245255 - DNA, 25 bp, Probe sequence
acggatatagtggcaaccgtgttaa

SEQ ID NO: 245256 - DNA, 25 bp, Probe sequence
aacggatatagtggcaaccgtgtta

SEQ ID NO: 245257 - DNA, 25 bp, Probe sequence
aaccgtgttaatcatacgtgcttta

SEQ ID NO: 245258 - DNA, 25 bp, Probe sequence
aattgtaacggatatagtggcaacc

SEQ ID NO: 245259 - DNA, 25 bp, Probe sequence
aatcgaatgtattaacaatcataaa

SEQ ID NO: 245260 - DNA, 25 bp, Probe sequence
caaccgtgttaatcatacgtgcttt

SEQ ID NO: 245261 - DNA, 25 bp, Probe sequence
catacgtgctttattaaacagtcgt

SEQ ID NO: 245262 - DNA, 25 bp, Probe sequence
cgtgctttattaaacagtcgtaaag

SEQ ID NO: 245263 - DNA, 25 bp, Probe sequence
cggatatagtggcaaccgtgttaat

SEQ ID NO: 245264 - DNA, 25 bp, Probe sequence
cgtgttaatcatacgtgctttatta

SEQ ID NO: 245265 - DNA, 25 bp, Probe sequence
ccgtgttaatcatacgtgctttatt

SEQ ID NO: 245266 - DNA, 25 bp, Probe sequence
gcaaccgtgttaatcatacgtgctt

SEQ ID NO: 245267 - DNA, 25 bp, Probe sequence
gatatagtggcaaccgtgttaatca

SEQ ID NO: 245268 - DNA, 25 bp, Probe sequence
gttaatcatacgtgctttattaaac

SEQ ID NO: 245269 - DNA, 25 bp, Probe sequence
gtaacggatatagtggcaaccgtgt

SEQ ID NO: 245270 - DNA, 25 bp, Probe sequence
gtgttaatcatacgtgctttattaa

SEQ ID NO: 245271 - DNA, 25 bp, Probe sequence
gtggcaaccgtgttaatcatacgtg

SEQ ID NO: 245272 - DNA, 25 bp, Probe sequence
ggatatagtggcaaccgtgttaatc

SEQ ID NO: 245273 - DNA, 25 bp, Probe sequence
ggcaaccgtgttaatcatacgtgct

SEQ ID NO: 245274 - DNA, 25 bp, Probe sequence
ggaaatcgaatgtattaacaatcat

SEQ ID NO: 245275 - DNA, 25 bp, Probe sequence
tggcaaccgtgttaatcatacgtgc

SEQ ID NO: 245276 - DNA, 25 bp, Probe sequence
tcatacgtgctttattaaacagtcg

SEQ ID NO: 245277 - DNA, 25 bp, Probe sequence
taacggatatagtggcaaccgtgtt

SEQ ID NO: 245278 - DNA, 25 bp, Probe sequence
tacgtgctttattaaacagtcgtaa

SEQ ID NO: 245279 - DNA, 25 bp, Probe sequence
tagtggcaaccgtgttaatcatacg

SEQ ID NO: 245280 - DNA, 25 bp, Probe sequence
tatagtggcaaccgtgttaatcata

SEQ ID NO: 245281 - DNA, 25 bp, Probe sequence
attctattactactttgtatattga

SEQ ID NO: 245282 - DNA, 25 bp, Probe sequence
attactactttgtatattgagctat

SEQ ID NO: 245283 - DNA, 25 bp, Probe sequence
atttcactggcaatatctgccgtaa

SEQ ID NO: 245284 - DNA, 25 bp, Probe sequence
atatttcactggcaatatctgccgt

SEQ ID NO: 245285 - DNA, 25 bp, Probe sequence
atcacaattgattttggtagttttt

SEQ ID NO: 245286 - DNA, 25 bp, Probe sequence
actactttgtatattgagctatttg

SEQ ID NO: 245287 - DNA, 25 bp, Probe sequence
actttgtatattgagctatttggtt

SEQ ID NO: 245288 - DNA, 25 bp, Probe sequence
aatttatcacaattgattttggtag

SEQ ID NO: 245289 - DNA, 25 bp, Probe sequence
caattctattactactttgtatatt

SEQ ID NO: 245290 - DNA, 25 bp, Probe sequence
caatatctgccgtaattatttatgg

SEQ ID NO: 245291 - DNA, 25 bp, Probe sequence
cactggcaatatctgccgtaattat

SEQ ID NO: 245292 - DNA, 25 bp, Probe sequence
catttaattcaatggttcttagttt

SEQ ID NO: 245293 - DNA, 25 bp, Probe sequence
ctattactactttgtatattgagct

SEQ ID NO: 245294 - DNA, 25 bp, Probe sequence
ctggcaatatctgccgtaattattt

SEQ ID NO: 245295 - DNA, 25 bp, Probe sequence
gcgatctatcaagcagtaaatgaaa

SEQ ID NO: 245296 - DNA, 25 bp, Probe sequence
gacgtgtctaatttgaatttagtaa

SEQ ID NO: 245297 - DNA, 25 bp, Probe sequence
gatatatttcactggcaatatctgc

SEQ ID NO: 245298 - DNA, 25 bp, Probe sequence
gtatattgagctatttggttacaaa

SEQ ID NO: 245299 - DNA, 25 bp, Probe sequence
gtcttttttgacgtgtctaatttga

SEQ ID NO: 245300 - DNA, 25 bp, Probe sequence
ggcaatatctgccgtaattatttat

SEQ ID NO: 245301 - DNA, 25 bp, Probe sequence
tgattttggtagttttttcttaatg

SEQ ID NO: 245302 - DNA, 25 bp, Probe sequence
tcactggcaatatctgccgtaatta

SEQ ID NO: 245303 - DNA, 25 bp, Probe sequence
taacaattctattactactttgtat

SEQ ID NO: 245304 - DNA, 25 bp, Probe sequence
tatatttcactggcaatatctgccg

SEQ ID NO: 245305 - DNA, 25 bp, Probe sequence
tatttcactggcaatatctgccgta

SEQ ID NO: 245306 - DNA, 25 bp, Probe sequence
tatttatagttagattactttttag

SEQ ID NO: 245307 - DNA, 25 bp, Probe sequence
tttcactggcaatatctgccgtaat

SEQ ID NO: 245308 - DNA, 25 bp, Probe sequence
tttgcgatctatcaagcagtaaatg

SEQ ID NO: 245309 - DNA, 25 bp, Probe sequence
ttttaacaattctattactactttg

SEQ ID NO: 245310 - DNA, 25 bp, Probe sequence
ttttgacgtgtctaatttgaattta

SEQ ID NO: 245311 - DNA, 25 bp, Probe sequence
ttataggatatatttcactggcaat

SEQ ID NO: 245312 - DNA, 25 bp, Probe sequence
ttcactggcaatatctgccgtaatt

SEQ ID NO: 245313 - DNA, 25 bp, Probe sequence
ttcaagtatattccaattatttata

SEQ ID NO: 245314 - DNA, 25 bp, Probe sequence
ttccaattatttatagttagattac

SEQ ID NO: 245315 - DNA, 25 bp, Probe sequence
attggtacgccaagagcattaacaa

SEQ ID NO: 245316 - DNA, 25 bp, Probe sequence
atcaagatgtcccttacactggtgc

SEQ ID NO: 245317 - DNA, 25 bp, Probe sequence
atcgcgataacttctgggcaacagc

SEQ ID NO: 245318 - DNA, 25 bp, Probe sequence
atgataaatcttttgttggcgggac

SEQ ID NO: 245319 - DNA, 25 bp, Probe sequence
atgatatgccatctactaatactaa

SEQ ID NO: 245320 - DNA, 25 bp, Probe sequence
atgtttatggcaagaatccttctca

SEQ ID NO: 245321 - DNA, 25 bp, Probe sequence
accacttcagatgttaatgctcagg

SEQ ID NO: 245322 - DNA, 25 bp, Probe sequence
acaaatacactacttctaatggatg

SEQ ID NO: 245323 - DNA, 25 bp, Probe sequence
aaaggttggcacaccggtgcaggca

SEQ ID NO: 245324 - DNA, 25 bp, Probe sequence
aaacgagtcatacagcgtcagcgac

SEQ ID NO: 245325 - DNA, 25 bp, Probe sequence
aaactctaatgatgctggtgtaaac

SEQ ID NO: 245326 - DNA, 25 bp, Probe sequence
aactaattcttctcacatgacaaaa

SEQ ID NO: 245327 - DNA, 25 bp, Probe sequence
aagaagccctagattggatgcacaa

SEQ ID NO: 245328 - DNA, 25 bp, Probe sequence
aagtgttcacttatgttcaagattc

SEQ ID NO: 245329 - DNA, 25 bp, Probe sequence
aatgatggcgtatttgctggggtta

SEQ ID NO: 245330 - DNA, 25 bp, Probe sequence
aatcctgaaactacaaataccgctt

SEQ ID NO: 245331 - DNA, 25 bp, Probe sequence
caggaaacccattcagtctttttag

SEQ ID NO: 245332 - DNA, 25 bp, Probe sequence
ctgccactggtaaaggtcgcaatgg

SEQ ID NO: 245333 - DNA, 25 bp, Probe sequence
ccggtgcaggcatgtcttatttata

SEQ ID NO: 245334 - DNA, 25 bp, Probe sequence
gcatatgttttgtatcctggtttat

SEQ ID NO: 245335 - DNA, 25 bp, Probe sequence
gaatctccttttaaaactacacaag

SEQ ID NO: 245336 - DNA, 25 bp, Probe sequence
gcaacagccgatatgacttgtcttc

SEQ ID NO: 245337 - DNA, 25 bp, Probe sequence
gaacatatttgtggtcaggagctga

SEQ ID NO: 245338 - DNA, 25 bp, Probe sequence
gacaaaattttatcttctgttggtg

SEQ ID NO: 245339 - DNA, 25 bp, Probe sequence
gacgtggctcgacgttaactacggt

SEQ ID NO: 245340 - DNA, 25 bp, Probe sequence
gacgaagggtttatgccattaatct

SEQ ID NO: 245341 - DNA, 25 bp, Probe sequence
gtacatatgcaccatccagtgacaa

SEQ ID NO: 245342 - DNA, 25 bp, Probe sequence
ggtgcttatggtgttgtactattag

SEQ ID NO: 245343 - DNA, 25 bp, Probe sequence
ggttatcatttcttagacaagccaa

SEQ ID NO: 245344 - DNA, 25 bp, Probe sequence
ggcaaactacacccaagaataactc

SEQ ID NO: 245345 - DNA, 25 bp, Probe sequence
taatgaccggagtgattgctttaaa

SEQ ID NO: 245346 - DNA, 25 bp, Probe sequence
taaagacctggactttgcatttggt

SEQ ID NO: 245347 - DNA, 25 bp, Probe sequence
tacgcaagcatcggtatggattttg

SEQ ID NO: 245348 - DNA, 25 bp, Probe sequence
ttgtcttccaggcactactacttta

SEQ ID NO: 245349 - DNA, 25 bp, Probe sequence
attcgtactgatttacaacttccca

SEQ ID NO: 245350 - DNA, 25 bp, Probe sequence
atattggccattttgatgatcctat

SEQ ID NO: 245351 - DNA, 25 bp, Probe sequence
ataccattcatttactggagacttt

SEQ ID NO: 245352 - DNA, 25 bp, Probe sequence
ataacacctaacgatcttgaacagt

SEQ ID NO: 245353 - DNA, 25 bp, Probe sequence
agagcttctaagcggttcacatgaa

SEQ ID NO: 245354 - DNA, 25 bp, Probe sequence
acggtacaacgtttgcagcacctaa

SEQ ID NO: 245355 - DNA, 25 bp, Probe sequence
acttttcggtgatctatgggcagct

SEQ ID NO: 245356 - DNA, 25 bp, Probe sequence
aaagacttgctacaatttgctgaaa

SEQ ID NO: 245357 - DNA, 25 bp, Probe sequence
aaagcagatttttcgactctattaa

SEQ ID NO: 245358 - DNA, 25 bp, Probe sequence
aaacgcgacgatacccagaatgggt

SEQ ID NO: 245359 - DNA, 25 bp, Probe sequence
aaccttcctttgattggtcaacaca

SEQ ID NO: 245360 - DNA, 25 bp, Probe sequence
aattcagcctgatgaagtgcgtaat

SEQ ID NO: 245361 - DNA, 25 bp, Probe sequence
caacttcccattcatcataacacaa

SEQ ID NO: 245362 - DNA, 25 bp, Probe sequence
caaacatacgactttcttggccaag

SEQ ID NO: 245363 - DNA, 25 bp, Probe sequence
taataggttacgctggcactgaccc

SEQ ID NO: 245364 - DNA, 25 bp, Probe sequence
tgggcagctaagtttgcaccgactc

SEQ ID NO: 245365 - DNA, 25 bp, Probe sequence
gcgtaatatcgctagcacaattcgt

SEQ ID NO: 245366 - DNA, 25 bp, Probe sequence
gctggcactgacccatatagtctaa

SEQ ID NO: 245367 - DNA, 25 bp, Probe sequence
gcatatgttttcgctccagtaatca

SEQ ID NO: 245368 - DNA, 25 bp, Probe sequence
gcagcacctaacgtataccattcat

SEQ ID NO: 245369 - DNA, 25 bp, Probe sequence
gaagtgtttccgatatgtcttatga

SEQ ID NO: 245370 - DNA, 25 bp, Probe sequence
gaaacaatgtcaggggctaatcgca

SEQ ID NO: 245371 - DNA, 25 bp, Probe sequence
gaaagcgatgtttttggactattta

SEQ ID NO: 245372 - DNA, 25 bp, Probe sequence
gaaattcacccattaggacatagtt

SEQ ID NO: 245373 - DNA, 25 bp, Probe sequence
gacgctctttcaagaagtgtttccg

SEQ ID NO: 245374 - DNA, 25 bp, Probe sequence
gatttcaattatttgacccatttgg

SEQ ID NO: 245375 - DNA, 25 bp, Probe sequence
gatttataactaaccttcctttgat

SEQ ID NO: 245376 - DNA, 25 bp, Probe sequence
gtttaggtgcgtttttagctcaata

SEQ ID NO: 245377 - DNA, 25 bp, Probe sequence
gtttgcaccgactcaaatggacgaa

SEQ ID NO: 245378 - DNA, 25 bp, Probe sequence
ggtcaacacacgcttaaatcttaca

SEQ ID NO: 245379 - DNA, 25 bp, Probe sequence
tgattttgatccttttgctattctc

SEQ ID NO: 245380 - DNA, 25 bp, Probe sequence
tgaggacgaaccattaattcccaaa

SEQ ID NO: 245381 - DNA, 25 bp, Probe sequence
tgaatctttcagacgctctttcaag

SEQ ID NO: 245382 - DNA, 25 bp, Probe sequence
tgaatttttttaatcctcgtattgg

SEQ ID NO: 245383 - DNA, 25 bp, Probe sequence
atgagctcaaaagatgcaaagaaaa

SEQ ID NO: 245384 - DNA, 25 bp, Probe sequence
agcaagcgaagcagcccaacaaagt

SEQ ID NO: 245385 - DNA, 25 bp, Probe sequence
aggaaaagcaagcgaagcagcccaa

SEQ ID NO: 245386 - DNA, 25 bp, Probe sequence
agaaggtacatttgaaggaaaagca

SEQ ID NO: 245387 - DNA, 25 bp, Probe sequence
agcgaagcagcccaacaaagtataa

SEQ ID NO: 245388 - DNA, 25 bp, Probe sequence
acaattaataattcttcgcaaagtt

SEQ ID NO: 245389 - DNA, 25 bp, Probe sequence
aaatttgagaccctattaaatacat

SEQ ID NO: 245390 - DNA, 25 bp, Probe sequence
aaagtcaagaagaagctagattaca

SEQ ID NO: 245391 - DNA, 25 bp, Probe sequence
aaagcaagcgaagcagcccaacaaa

SEQ ID NO: 245392 - DNA, 25 bp, Probe sequence
aaaagcaagcgaagcagcccaacaa

SEQ ID NO: 245393 - DNA, 25 bp, Probe sequence
aagcgaagcagcccaacaaagtata

SEQ ID NO: 245394 - DNA, 25 bp, Probe sequence
aagcaagcgaagcagcccaacaaag

SEQ ID NO: 245395 - DNA, 25 bp, Probe sequence
aagaagaagctagattacaacaatt

SEQ ID NO: 245396 - DNA, 25 bp, Probe sequence
aatagtactgataatatggttagca

SEQ ID NO: 245397 - DNA, 25 bp, Probe sequence
caagcgaagcagcccaacaaagtat

SEQ ID NO: 245398 - DNA, 25 bp, Probe sequence
ctgataatatggttagcaatgctaa

SEQ ID NO: 245399 - DNA, 25 bp, Probe sequence
gcgaagcagcccaacaaagtataaa

SEQ ID NO: 245400 - DNA, 25 bp, Probe sequence
gctagattacaacaattaaagcaag

SEQ ID NO: 245401 - DNA, 25 bp, Probe sequence
gcagcccaacaaagtataaataaac

SEQ ID NO: 245402 - DNA, 25 bp, Probe sequence
gcaagcgaagcagcccaacaaagta

SEQ ID NO: 245403 - DNA, 25 bp, Probe sequence
gcaagaaatgcgtaatagtactgat

SEQ ID NO: 245404 - DNA, 25 bp, Probe sequence
gaaggaaaagcaagcgaagcagccc

SEQ ID NO: 245405 - DNA, 25 bp, Probe sequence
gaagaagctagattacaacaattaa

SEQ ID NO: 245406 - DNA, 25 bp, Probe sequence
gaagcagcccaacaaagtataaata

SEQ ID NO: 245407 - DNA, 25 bp, Probe sequence
gaaaagcaagcgaagcagcccaaca

SEQ ID NO: 245408 - DNA, 25 bp, Probe sequence
gaaatgcgtaatagtactgataata

SEQ ID NO: 245409 - DNA, 25 bp, Probe sequence
gaccctattaaatacattgaagata

SEQ ID NO: 245410 - DNA, 25 bp, Probe sequence
gagaccctattaaatacattgaaga

SEQ ID NO: 245411 - DNA, 25 bp, Probe sequence
gtactgataatatggttagcaatgc

SEQ ID NO: 245412 - DNA, 25 bp, Probe sequence
ggaaaagcaagcgaagcagcccaac

SEQ ID NO: 245413 - DNA, 25 bp, Probe sequence
tgtagcattaaaatttcaaacatta

SEQ ID NO: 245414 - DNA, 25 bp, Probe sequence
tttgagaccctattaaatacattga

SEQ ID NO: 245415 - DNA, 25 bp, Probe sequence
ttaataattcttcgcaaagtttaga

SEQ ID NO: 245416 - DNA, 25 bp, Probe sequence
ttcgcaaagtttagaaggtacattt

SEQ ID NO: 245417 - DNA, 25 bp, Probe sequence
attgccaatgacacaggtaaatcag

SEQ ID NO: 245418 - DNA, 25 bp, Probe sequence
attaaaccgacagggattgccaatg

SEQ ID NO: 245419 - DNA, 25 bp, Probe sequence
atttggcacaagctaaaacaatgat

SEQ ID NO: 245420 - DNA, 25 bp, Probe sequence
atgattaaaccgacagggattgcca

SEQ ID NO: 245421 - DNA, 25 bp, Probe sequence
agggattgccaatgacacaggtaaa

SEQ ID NO: 245422 - DNA, 25 bp, Probe sequence
accgacagggattgccaatgacaca

SEQ ID NO: 245423 - DNA, 25 bp, Probe sequence
actgcaaaaatttggcacaagctaa

SEQ ID NO: 245424 - DNA, 25 bp, Probe sequence
acagggattgccaatgacacaggta

SEQ ID NO: 245425 - DNA, 25 bp, Probe sequence
aaaccgacagggattgccaatgaca

SEQ ID NO: 245426 - DNA, 25 bp, Probe sequence
aaacaatgattaaaccgacagggat

SEQ ID NO: 245427 - DNA, 25 bp, Probe sequence
aaaatttggcacaagctaaaacaat

SEQ ID NO: 245428 - DNA, 25 bp, Probe sequence
aacaatgattaaaccgacagggatt

SEQ ID NO: 245429 - DNA, 25 bp, Probe sequence
aaccgacagggattgccaatgacac

SEQ ID NO: 245430 - DNA, 25 bp, Probe sequence
aatgattaaaccgacagggattgcc

SEQ ID NO: 245431 - DNA, 25 bp, Probe sequence
aatgatgtgtagaagttcacaagta

SEQ ID NO: 245432 - DNA, 25 bp, Probe sequence
cgacagggattgccaatgacacagg

SEQ ID NO: 245433 - DNA, 25 bp, Probe sequence
ccgacagggattgccaatgacacag

SEQ ID NO: 245434 - DNA, 25 bp, Probe sequence
gccaatgacacaggtaaatcagtag

SEQ ID NO: 245435 - DNA, 25 bp, Probe sequence
gcaaaaatttggcacaagctaaaac

SEQ ID NO: 245436 - DNA, 25 bp, Probe sequence
gaactgcaaaaatttggcacaagct

SEQ ID NO: 245437 - DNA, 25 bp, Probe sequence
gacacaggtaaatcagtagaagaaa

SEQ ID NO: 245438 - DNA, 25 bp, Probe sequence
gacagggattgccaatgacacaggt

SEQ ID NO: 245439 - DNA, 25 bp, Probe sequence
gattaaaccgacagggattgccaat

SEQ ID NO: 245440 - DNA, 25 bp, Probe sequence
gttcacaagtaaactggaaaatagc

SEQ ID NO: 245441 - DNA, 25 bp, Probe sequence
gtagaagaaatgatgtgtagaagtt

SEQ ID NO: 245442 - DNA, 25 bp, Probe sequence
gtagaagttcacaagtaaactggaa

SEQ ID NO: 245443 - DNA, 25 bp, Probe sequence
gtaaactggaaaatagcaattaatt

SEQ ID NO: 245444 - DNA, 25 bp, Probe sequence
gggattgccaatgacacaggtaaat

SEQ ID NO: 245445 - DNA, 25 bp, Probe sequence
ggattgccaatgacacaggtaaatc

SEQ ID NO: 245446 - DNA, 25 bp, Probe sequence
tggcacaagctaaaacaatgattaa

SEQ ID NO: 245447 - DNA, 25 bp, Probe sequence
tgattaaaccgacagggattgccaa

SEQ ID NO: 245448 - DNA, 25 bp, Probe sequence
taaaccgacagggattgccaatgac

SEQ ID NO: 245449 - DNA, 25 bp, Probe sequence
ttaaaccgacagggattgccaatga

SEQ ID NO: 245450 - DNA, 25 bp, Probe sequence
ttgccaatgacacaggtaaatcagt

SEQ ID NO: 245451 - DNA, 25 bp, Probe sequence
attaagtagcgcatctgttcccttt

SEQ ID NO: 245452 - DNA, 25 bp, Probe sequence
attagatcaatcactcaagaattta

SEQ ID NO: 245453 - DNA, 25 bp, Probe sequence
atagaattaacttatcccttcgatt

SEQ ID NO: 245454 - DNA, 25 bp, Probe sequence
ataacacagatttacaagtcgaaaa

SEQ ID NO: 245455 - DNA, 25 bp, Probe sequence
ataagattggtgtaacccgtagatt

SEQ ID NO: 245456 - DNA, 25 bp, Probe sequence
agcaatgggtattatggacaatctt

SEQ ID NO: 245457 - DNA, 25 bp, Probe sequence
acacaatagcacagttcaattcatt

SEQ ID NO: 245458 - DNA, 25 bp, Probe sequence
aacggataatgtacgtattcctgaa

SEQ ID NO: 245459 - DNA, 25 bp, Probe sequence
aagttttatcagaacacaatagcac

SEQ ID NO: 245460 - DNA, 25 bp, Probe sequence
aatcccgttcagtttatcaatatat

SEQ ID NO: 245461 - DNA, 25 bp, Probe sequence
catctttctttagtataggcacacc

SEQ ID NO: 245462 - DNA, 25 bp, Probe sequence
cgcatctgttccctttgaattcgat

SEQ ID NO: 245463 - DNA, 25 bp, Probe sequence
gcacaggccaagcaaataatacgat

SEQ ID NO: 245464 - DNA, 25 bp, Probe sequence
gaacttgaacacattactagttatt

SEQ ID NO: 245465 - DNA, 25 bp, Probe sequence
gaaactttaagattaacttcactct

SEQ ID NO: 245466 - DNA, 25 bp, Probe sequence
gagaagaacgagctagactgaaaga

SEQ ID NO: 245467 - DNA, 25 bp, Probe sequence
gagacatcaaaatgcacaggccaag

SEQ ID NO: 245468 - DNA, 25 bp, Probe sequence
gatgaaccaaaagctatacaataca

SEQ ID NO: 245469 - DNA, 25 bp, Probe sequence
gatgtgcacgctttaattttctctg

SEQ ID NO: 245470 - DNA, 25 bp, Probe sequence
gataatgctcaatcagggtttgttt

SEQ ID NO: 245471 - DNA, 25 bp, Probe sequence
gataaagacattagacaccacaata

SEQ ID NO: 245472 - DNA, 25 bp, Probe sequence
gatttagttgaagtagactcatctc

SEQ ID NO: 245473 - DNA, 25 bp, Probe sequence
gttccctttgaattcgatgtgcacg

SEQ ID NO: 245474 - DNA, 25 bp, Probe sequence
gtataggcacaccaggtatagcaat

SEQ ID NO: 245475 - DNA, 25 bp, Probe sequence
gtaacccgtagattagaaccaatgg

SEQ ID NO: 245476 - DNA, 25 bp, Probe sequence
gtgcacgctttaattttctctgaaa

SEQ ID NO: 245477 - DNA, 25 bp, Probe sequence
ggtatagcaataatcccgttcagtt

SEQ ID NO: 245478 - DNA, 25 bp, Probe sequence
ggacaatcttagtaacatctttctt

SEQ ID NO: 245479 - DNA, 25 bp, Probe sequence
taacttatcccttcgatttagttga

SEQ ID NO: 245480 - DNA, 25 bp, Probe sequence
tagaacccgatttagtaacacttca

SEQ ID NO: 245481 - DNA, 25 bp, Probe sequence
tagactcatctcaaattaatacata

SEQ ID NO: 245482 - DNA, 25 bp, Probe sequence
tatttaatgctgaaacttctcaatt

SEQ ID NO: 245483 - DNA, 25 bp, Probe sequence
tattcctgaaactttacttgacata

SEQ ID NO: 245484 - DNA, 25 bp, Probe sequence
ttctctgaaaatgcttttgagctta

SEQ ID NO: 245485 - DNA, 25 bp, Probe sequence
attgcgatcccattaaaagatattg

SEQ ID NO: 245486 - DNA, 25 bp, Probe sequence
attatagaatcattagacttcttta

SEQ ID NO: 245487 - DNA, 25 bp, Probe sequence
atatacacatatatactgaagaata

SEQ ID NO: 245488 - DNA, 25 bp, Probe sequence
atatgattaggttcgatgttaatgg

SEQ ID NO: 245489 - DNA, 25 bp, Probe sequence
atagaatcattagacttctttatga

SEQ ID NO: 245490 - DNA, 25 bp, Probe sequence
ataatgaaagaatacctacgccaca

SEQ ID NO: 245491 - DNA, 25 bp, Probe sequence
ataatggtggtattgcgatcccatt

SEQ ID NO: 245492 - DNA, 25 bp, Probe sequence
atgaaagaatacctacgccacatat

SEQ ID NO: 245493 - DNA, 25 bp, Probe sequence
atggtggtattgcgatcccattaaa

SEQ ID NO: 245494 - DNA, 25 bp, Probe sequence
agaatcattagacttctttatgaag

SEQ ID NO: 245495 - DNA, 25 bp, Probe sequence
aaagaatacctacgccacatataca

SEQ ID NO: 245496 - DNA, 25 bp, Probe sequence
aagaatacctacgccacatatacac

SEQ ID NO: 245497 - DNA, 25 bp, Probe sequence
aatggtggtattgcgatcccattaa

SEQ ID NO: 245498 - DNA, 25 bp, Probe sequence
aatgaaagaatacctacgccacata

SEQ ID NO: 245499 - DNA, 25 bp, Probe sequence
aataatggtggtattgcgatcccat

SEQ ID NO: 245500 - DNA, 25 bp, Probe sequence
aataatgaaagaatacctacgccac

SEQ ID NO: 245501 - DNA, 25 bp, Probe sequence
ctaatatgattaggttcgatgttaa

SEQ ID NO: 245502 - DNA, 25 bp, Probe sequence
ccacatatacacatatatactgaag

SEQ ID NO: 245503 - DNA, 25 bp, Probe sequence
gaatcattagacttctttatgaagt

SEQ ID NO: 245504 - DNA, 25 bp, Probe sequence
gaaagaatacctacgccacatatac

SEQ ID NO: 245505 - DNA, 25 bp, Probe sequence
gtattgcgatcccattaaaagatat

SEQ ID NO: 245506 - DNA, 25 bp, Probe sequence
gtatactaatataaaacacgataat

SEQ ID NO: 245507 - DNA, 25 bp, Probe sequence
gtggtattgcgatcccattaaaaga

SEQ ID NO: 245508 - DNA, 25 bp, Probe sequence
ggtggtattgcgatcccattaaaag

SEQ ID NO: 245509 - DNA, 25 bp, Probe sequence
ggtattgcgatcccattaaaagata

SEQ ID NO: 245510 - DNA, 25 bp, Probe sequence
tggtattgcgatcccattaaaagat

SEQ ID NO: 245511 - DNA, 25 bp, Probe sequence
tggtggtattgcgatcccattaaaa

SEQ ID NO: 245512 - DNA, 25 bp, Probe sequence
tgattaggttcgatgttaatggtag

SEQ ID NO: 245513 - DNA, 25 bp, Probe sequence
tgaaagaatacctacgccacatata

SEQ ID NO: 245514 - DNA, 25 bp, Probe sequence
tgcgatcccattaaaagatattgaa

SEQ ID NO: 245515 - DNA, 25 bp, Probe sequence
taataatggtggtattgcgatccca

SEQ ID NO: 245516 - DNA, 25 bp, Probe sequence
taatggtggtattgcgatcccatta

SEQ ID NO: 245517 - DNA, 25 bp, Probe sequence
taatgaaagaatacctacgccacat

SEQ ID NO: 245518 - DNA, 25 bp, Probe sequence
tagacttctttatgaagtatactaa

SEQ ID NO: 245519 - DNA, 25 bp, Probe sequence
atatgctgatacactacctaataat

SEQ ID NO: 245520 - DNA, 25 bp, Probe sequence
agagttttgctcagtctaaacataa

SEQ ID NO: 245521 - DNA, 25 bp, Probe sequence
agaaattacagcggatgttaaaaat

SEQ ID NO: 245522 - DNA, 25 bp, Probe sequence
accttgagatattaaaatggtctaa

SEQ ID NO: 245523 - DNA, 25 bp, Probe sequence
accatttgaatgattttattagaat

SEQ ID NO: 245524 - DNA, 25 bp, Probe sequence
accgtgatatcaaaccaaacagacc

SEQ ID NO: 245525 - DNA, 25 bp, Probe sequence
actccctttaagaaccatttgaatg

SEQ ID NO: 245526 - DNA, 25 bp, Probe sequence
acggattgacgattaatgaattaga

SEQ ID NO: 245527 - DNA, 25 bp, Probe sequence
aacgagaactaaacttatacagaat

SEQ ID NO: 245528 - DNA, 25 bp, Probe sequence
aatgaagcttatatttaccgtgata

SEQ ID NO: 245529 - DNA, 25 bp, Probe sequence
aatcaggtttaaaatattctattga

SEQ ID NO: 245530 - DNA, 25 bp, Probe sequence
caaaatcacaaccagaaaaactagt

SEQ ID NO: 245531 - DNA, 25 bp, Probe sequence
cacaagtttctgtttctggagaatc

SEQ ID NO: 245532 - DNA, 25 bp, Probe sequence
gctgatacactacctaataatgaaa

SEQ ID NO: 245533 - DNA, 25 bp, Probe sequence
gaattagaaatgttgggtattgata

SEQ ID NO: 245534 - DNA, 25 bp, Probe sequence
gaatatatgctgatacactacctaa

SEQ ID NO: 245535 - DNA, 25 bp, Probe sequence
gaatgaacgaatatttcaactggtt

SEQ ID NO: 245536 - DNA, 25 bp, Probe sequence
gaagtatttgaattcttatatgacc

SEQ ID NO: 245537 - DNA, 25 bp, Probe sequence
gaagactatcgaagaaagaatgaac

SEQ ID NO: 245538 - DNA, 25 bp, Probe sequence
gaagcttatatttaccgtgatatca

SEQ ID NO: 245539 - DNA, 25 bp, Probe sequence
gaaagagcacaaactgtagcagaac

SEQ ID NO: 245540 - DNA, 25 bp, Probe sequence
gagcacaaactgtagcagaacatga

SEQ ID NO: 245541 - DNA, 25 bp, Probe sequence
gaggtttagcacaagtttctgtttc

SEQ ID NO: 245542 - DNA, 25 bp, Probe sequence
gttgggtattgatataaacacaaaa

SEQ ID NO: 245543 - DNA, 25 bp, Probe sequence
gttctacagaaattactactccctt

SEQ ID NO: 245544 - DNA, 25 bp, Probe sequence
gtttctgtttctggagaatcaggtt

SEQ ID NO: 245545 - DNA, 25 bp, Probe sequence
ggtttagcacaagtttctgtttctg

SEQ ID NO: 245546 - DNA, 25 bp, Probe sequence
tgaccttactttaactactaaatct

SEQ ID NO: 245547 - DNA, 25 bp, Probe sequence
tactactccctttaagaaccatttg

SEQ ID NO: 245548 - DNA, 25 bp, Probe sequence
tccagaaacaaattagaacctatca

SEQ ID NO: 245549 - DNA, 25 bp, Probe sequence
taataatgaaatttgtctatcagat

SEQ ID NO: 245550 - DNA, 25 bp, Probe sequence
tacagaaattactactccctttaag

SEQ ID NO: 245551 - DNA, 25 bp, Probe sequence
tatgaccttactttaactactaaat

SEQ ID NO: 245552 - DNA, 25 bp, Probe sequence
ttttgctcagtctaaacataattta

SEQ ID NO: 245553 - DNA, 25 bp, Probe sequence
atcaatggctgatgctaaagttgca

SEQ ID NO: 245554 - DNA, 25 bp, Probe sequence
atcatcaactgggatagcaactata

SEQ ID NO: 245555 - DNA, 25 bp, Probe sequence
atcgaatgtatatgcattagctgca

SEQ ID NO: 245556 - DNA, 25 bp, Probe sequence
agtagtctggacaaatatttaactg

SEQ ID NO: 245557 - DNA, 25 bp, Probe sequence
agagctaaagcggcacttaagaaaa

SEQ ID NO: 245558 - DNA, 25 bp, Probe sequence
agaactttacttaacaaatcgaatg

SEQ ID NO: 245559 - DNA, 25 bp, Probe sequence
agcattacttttatcatcaactggg

SEQ ID NO: 245560 - DNA, 25 bp, Probe sequence
actgaaagtcagtttcatgataaac

SEQ ID NO: 245561 - DNA, 25 bp, Probe sequence
aaatgatttcgtatcaatggctgat

SEQ ID NO: 245562 - DNA, 25 bp, Probe sequence
aaagcggcacttaagaaaaatgatt

SEQ ID NO: 245563 - DNA, 25 bp, Probe sequence
aaacgtacgattatgatgaatgaat

SEQ ID NO: 245564 - DNA, 25 bp, Probe sequence
aacaggaacattagcattactttta

SEQ ID NO: 245565 - DNA, 25 bp, Probe sequence
aatggctgatgctaaagttgcatta

SEQ ID NO: 245566 - DNA, 25 bp, Probe sequence
cattagcattacttttatcatcaac

SEQ ID NO: 245567 - DNA, 25 bp, Probe sequence
gcattacttttatcatcaactggga

SEQ ID NO: 245568 - DNA, 25 bp, Probe sequence
gcagatgcaagtagtctggacaaat

SEQ ID NO: 245569 - DNA, 25 bp, Probe sequence
gaatatagagctaaagcggcactta

SEQ ID NO: 245570 - DNA, 25 bp, Probe sequence
gaatgtatatgcattagctgcagga

SEQ ID NO: 245571 - DNA, 25 bp, Probe sequence
gaacattagcattacttttatcatc

SEQ ID NO: 245572 - DNA, 25 bp, Probe sequence
gatgcaagtagtctggacaaatatt

SEQ ID NO: 245573 - DNA, 25 bp, Probe sequence
gataaacgcatagcagaagaattaa

SEQ ID NO: 245574 - DNA, 25 bp, Probe sequence
gatttcgtatcaatggctgatgcta

SEQ ID NO: 245575 - DNA, 25 bp, Probe sequence
gtttcatgataaacgcatagcagaa

SEQ ID NO: 245576 - DNA, 25 bp, Probe sequence
ggatagcaactatagaagggaataa

SEQ ID NO: 245577 - DNA, 25 bp, Probe sequence
ggaacattagcattacttttatcat

SEQ ID NO: 245578 - DNA, 25 bp, Probe sequence
ggaagcttaaatccatattataaac

SEQ ID NO: 245579 - DNA, 25 bp, Probe sequence
ggctgatgctaaagttgcattagaa

SEQ ID NO: 245580 - DNA, 25 bp, Probe sequence
tgtatatgcattagctgcaggaagc

SEQ ID NO: 245581 - DNA, 25 bp, Probe sequence
tgcaggaagcttaaatccatattat

SEQ ID NO: 245582 - DNA, 25 bp, Probe sequence
tacttttatcatcaactgggatagc

SEQ ID NO: 245583 - DNA, 25 bp, Probe sequence
tatagagctaaagcggcacttaaga

SEQ ID NO: 245584 - DNA, 25 bp, Probe sequence
tttcgtatcaatggctgatgctaaa

SEQ ID NO: 245585 - DNA, 25 bp, Probe sequence
ttagcattacttttatcatcaactg

SEQ ID NO: 245586 - DNA, 25 bp, Probe sequence
ttaaatccatattataaacgtacga

SEQ ID NO: 245587 - DNA, 25 bp, Probe sequence
attggtccaatatctgtaactgtat

SEQ ID NO: 245588 - DNA, 25 bp, Probe sequence
atatgcaccaacaccgatgacaatt

SEQ ID NO: 245589 - DNA, 25 bp, Probe sequence
atatctgtaactgtattaattgcgg

SEQ ID NO: 245590 - DNA, 25 bp, Probe sequence
atagcaagatatgcaccaacaccga

SEQ ID NO: 245591 - DNA, 25 bp, Probe sequence
atctgtaactgtattaattgcggca

SEQ ID NO: 245592 - DNA, 25 bp, Probe sequence
atgcaccaacaccgatgacaattat

SEQ ID NO: 245593 - DNA, 25 bp, Probe sequence
agatatgcaccaacaccgatgacaa

SEQ ID NO: 245594 - DNA, 25 bp, Probe sequence
agcaagatatgcaccaacaccgatg

SEQ ID NO: 245595 - DNA, 25 bp, Probe sequence
accgatgacaattattggtccaata

SEQ ID NO: 245596 - DNA, 25 bp, Probe sequence
acaccgatgacaattattggtccaa

SEQ ID NO: 245597 - DNA, 25 bp, Probe sequence
aacaccgatgacaattattggtcca

SEQ ID NO: 245598 - DNA, 25 bp, Probe sequence
aagatatgcaccaacaccgatgaca

SEQ ID NO: 245599 - DNA, 25 bp, Probe sequence
aatagcaagatatgcaccaacaccg

SEQ ID NO: 245600 - DNA, 25 bp, Probe sequence
caagatatgcaccaacaccgatgac

SEQ ID NO: 245601 - DNA, 25 bp, Probe sequence
caacaccgatgacaattattggtcc

SEQ ID NO: 245602 - DNA, 25 bp, Probe sequence
caccgatgacaattattggtccaat

SEQ ID NO: 245603 - DNA, 25 bp, Probe sequence
caccaacaccgatgacaattattgg

SEQ ID NO: 245604 - DNA, 25 bp, Probe sequence
ctgtaactgtattaattgcggcaaa

SEQ ID NO: 245605 - DNA, 25 bp, Probe sequence
cgatgacaattattggtccaatatc

SEQ ID NO: 245606 - DNA, 25 bp, Probe sequence
gcaccaacaccgatgacaattattg

SEQ ID NO: 245607 - DNA, 25 bp, Probe sequence
gcaagatatgcaccaacaccgatga

SEQ ID NO: 245608 - DNA, 25 bp, Probe sequence
gatatgcaccaacaccgatgacaat

SEQ ID NO: 245609 - DNA, 25 bp, Probe sequence
gtccaatatctgtaactgtattaat

SEQ ID NO: 245610 - DNA, 25 bp, Probe sequence
gtgattgatccagaaatagcaagat

SEQ ID NO: 245611 - DNA, 25 bp, Probe sequence
ggtccaatatctgtaactgtattaa

SEQ ID NO: 245612 - DNA, 25 bp, Probe sequence
tggtccaatatctgtaactgtatta

SEQ ID NO: 245613 - DNA, 25 bp, Probe sequence
tgcaccaacaccgatgacaattatt

SEQ ID NO: 245614 - DNA, 25 bp, Probe sequence
tctgtaactgtattaattgcggcaa

SEQ ID NO: 245615 - DNA, 25 bp, Probe sequence
tagcaagatatgcaccaacaccgat

SEQ ID NO: 245616 - DNA, 25 bp, Probe sequence
tatgcaccaacaccgatgacaatta

SEQ ID NO: 245617 - DNA, 25 bp, Probe sequence
tatctgtaactgtattaattgcggc

SEQ ID NO: 245618 - DNA, 25 bp, Probe sequence
tattggtccaatatctgtaactgta

SEQ ID NO: 245619 - DNA, 25 bp, Probe sequence
ttattggtccaatatctgtaactgt

SEQ ID NO: 245620 - DNA, 25 bp, Probe sequence
ttggtccaatatctgtaactgtatt

SEQ ID NO: 245621 - DNA, 25 bp, Probe sequence
atttcggtagtgatgaatcctcatt

SEQ ID NO: 245622 - DNA, 25 bp, Probe sequence
atcgatgcagttcttgaattaaagc

SEQ ID NO: 245623 - DNA, 25 bp, Probe sequence
atggcggttttcttgagatggctct

SEQ ID NO: 245624 - DNA, 25 bp, Probe sequence
agactatatcgatgcagttcttgaa

SEQ ID NO: 245625 - DNA, 25 bp, Probe sequence
agagattttgtaattgcttctgctg

SEQ ID NO: 245626 - DNA, 25 bp, Probe sequence
agaattgacgaaggtatgtctaaac

SEQ ID NO: 245627 - DNA, 25 bp, Probe sequence
aacacttatgggtttaattagagat

SEQ ID NO: 245628 - DNA, 25 bp, Probe sequence
ctatatcgatgcagttcttgaatta

SEQ ID NO: 245629 - DNA, 25 bp, Probe sequence
ctcgagaaggtatcgcctactcaga

SEQ ID NO: 245630 - DNA, 25 bp, Probe sequence
gcggttttcttgagatggctctttc

SEQ ID NO: 245631 - DNA, 25 bp, Probe sequence
gcttctgctgaagatggcggttttc

SEQ ID NO: 245632 - DNA, 25 bp, Probe sequence
gcagttcttgaattaaagcatagag

SEQ ID NO: 245633 - DNA, 25 bp, Probe sequence
gaatcctcatttaacgctttctttt

SEQ ID NO: 245634 - DNA, 25 bp, Probe sequence
gaaggtatcgcctactcagaatcag

SEQ ID NO: 245635 - DNA, 25 bp, Probe sequence
gactgatgaagctaaatttgtcctt

SEQ ID NO: 245636 - DNA, 25 bp, Probe sequence
gagaaggtatcgcctactcagaatc

SEQ ID NO: 245637 - DNA, 25 bp, Probe sequence
gagatggctctttctcgagaaggta

SEQ ID NO: 245638 - DNA, 25 bp, Probe sequence
gatggctctttctcgagaaggtatc

SEQ ID NO: 245639 - DNA, 25 bp, Probe sequence
gatgaatcctcatttaacgctttct

SEQ ID NO: 245640 - DNA, 25 bp, Probe sequence
gatgaagctaaatttgtccttttac

SEQ ID NO: 245641 - DNA, 25 bp, Probe sequence
gattttgtaattgcttctgctgaag

SEQ ID NO: 245642 - DNA, 25 bp, Probe sequence
gttttcttgagatggctctttctcg

SEQ ID NO: 245643 - DNA, 25 bp, Probe sequence
gtaattgcttctgctgaagatggcg

SEQ ID NO: 245644 - DNA, 25 bp, Probe sequence
ggtatcgcctactcagaatcagaat

SEQ ID NO: 245645 - DNA, 25 bp, Probe sequence
ggttttaattttgaagactatatcg

SEQ ID NO: 245646 - DNA, 25 bp, Probe sequence
ggctctttctcgagaaggtatcgcc

SEQ ID NO: 245647 - DNA, 25 bp, Probe sequence
tcctcatttaacgctttctttttag

SEQ ID NO: 245648 - DNA, 25 bp, Probe sequence
tctttctcgagaaggtatcgcctac

SEQ ID NO: 245649 - DNA, 25 bp, Probe sequence
tcttgagatggctctttctcgagaa

SEQ ID NO: 245650 - DNA, 25 bp, Probe sequence
tttcttgagatggctctttctcgag

SEQ ID NO: 245651 - DNA, 25 bp, Probe sequence
ttctcgagaaggtatcgcctactca

SEQ ID NO: 245652 - DNA, 25 bp, Probe sequence
ttctgcatcttatttcggtagtgat

SEQ ID NO: 245653 - DNA, 25 bp, Probe sequence
ttctgctgaagatggcggttttctt

SEQ ID NO: 245654 - DNA, 25 bp, Probe sequence
ttgtccttttacaactttattcaat

SEQ ID NO: 245655 - DNA, 25 bp, Probe sequence
attagtgagcacgttagtgttaagt

SEQ ID NO: 245656 - DNA, 25 bp, Probe sequence
atggtctgtcacaaagagaatacaa

SEQ ID NO: 245657 - DNA, 25 bp, Probe sequence
aggtttattattagtgagcacgtta

SEQ ID NO: 245658 - DNA, 25 bp, Probe sequence
agagggtatgtctgagcaggctcaa

SEQ ID NO: 245659 - DNA, 25 bp, Probe sequence
agaagttgcaacacaacaacaacca

SEQ ID NO: 245660 - DNA, 25 bp, Probe sequence
accgcaacaacagataccacaaaat

SEQ ID NO: 245661 - DNA, 25 bp, Probe sequence
actatcatggtctgtcacaaagaga

SEQ ID NO: 245662 - DNA, 25 bp, Probe sequence
acaaccccaatcacaagagcaatcg

SEQ ID NO: 245663 - DNA, 25 bp, Probe sequence
acaaccgcaacaacagataccacaa

SEQ ID NO: 245664 - DNA, 25 bp, Probe sequence
aaaagactatcatggtctgtcacaa

SEQ ID NO: 245665 - DNA, 25 bp, Probe sequence
aacaacaaccagacaatcaaaccgt

SEQ ID NO: 245666 - DNA, 25 bp, Probe sequence
aagattgttaggtttattattagtg

SEQ ID NO: 245667 - DNA, 25 bp, Probe sequence
aataatatgcctcccactgattttt

SEQ ID NO: 245668 - DNA, 25 bp, Probe sequence
aatagtgttcctcagcaaaatgtcc

SEQ ID NO: 245669 - DNA, 25 bp, Probe sequence
caaccagacaatcaaaccgttgaac

SEQ ID NO: 245670 - DNA, 25 bp, Probe sequence
caacaaccgcaacaacagataccac

SEQ ID NO: 245671 - DNA, 25 bp, Probe sequence
ctcccactgatttttctacagaggg

SEQ ID NO: 245672 - DNA, 25 bp, Probe sequence
cgttgaacaaccccaatcacaagag

SEQ ID NO: 245673 - DNA, 25 bp, Probe sequence
ccccaatcacaagagcaatcggttc

SEQ ID NO: 245674 - DNA, 25 bp, Probe sequence
gcaaaatgtccaagttcaacaaaac

SEQ ID NO: 245675 - DNA, 25 bp, Probe sequence
gaatacaatgatagagtttctgaaa

SEQ ID NO: 245676 - DNA, 25 bp, Probe sequence
gaagagctttcaatgcaaaaagact

SEQ ID NO: 245677 - DNA, 25 bp, Probe sequence
gaacaaccccaatcacaagagcaat

SEQ ID NO: 245678 - DNA, 25 bp, Probe sequence
gagcaatcggttcaacaaccgcaac

SEQ ID NO: 245679 - DNA, 25 bp, Probe sequence
gataccacaaaatagtgttcctcag

SEQ ID NO: 245680 - DNA, 25 bp, Probe sequence
gatttaaataatatgcctcccactg

SEQ ID NO: 245681 - DNA, 25 bp, Probe sequence
gttagtgttaagtgcatgtggaaat

SEQ ID NO: 245682 - DNA, 25 bp, Probe sequence
gtatgtctgagcaggctcaaaaaca

SEQ ID NO: 245683 - DNA, 25 bp, Probe sequence
gtgcatgtggaaatgatgagaatca

SEQ ID NO: 245684 - DNA, 25 bp, Probe sequence
gtgttcctcagcaaaatgtccaagt

SEQ ID NO: 245685 - DNA, 25 bp, Probe sequence
tgatttttctacagagggtatgtct

SEQ ID NO: 245686 - DNA, 25 bp, Probe sequence
tcctcagcaaaatgtccaagttcaa

SEQ ID NO: 245687 - DNA, 25 bp, Probe sequence
tgcctcccactgatttttctacaga

SEQ ID NO: 245688 - DNA, 25 bp, Probe sequence
tcacaagagcaatcggttcaacaac

SEQ ID NO: 245689 - DNA, 25 bp, Probe sequence
atttaggcccaactggatcacaaat

SEQ ID NO: 245690 - DNA, 25 bp, Probe sequence
atattggcactgaaaagcctatgtt

SEQ ID NO: 245691 - DNA, 25 bp, Probe sequence
atcgctgtaaaaatattgccgctga

SEQ ID NO: 245692 - DNA, 25 bp, Probe sequence
atgcattaatgcaaggtgctgccat

SEQ ID NO: 245693 - DNA, 25 bp, Probe sequence
atgaacttccatttagtttgtccaa

SEQ ID NO: 245694 - DNA, 25 bp, Probe sequence
atgcaaggtgctgccattatgggta

SEQ ID NO: 245695 - DNA, 25 bp, Probe sequence
atggtggcaacatattaatcacaga

SEQ ID NO: 245696 - DNA, 25 bp, Probe sequence
agatcatcctactcaagttcttgct

SEQ ID NO: 245697 - DNA, 25 bp, Probe sequence
actgcacgtgtgcttggtggaatgt

SEQ ID NO: 245698 - DNA, 25 bp, Probe sequence
aaaatattgccgctgaaaatggtgg

SEQ ID NO: 245699 - DNA, 25 bp, Probe sequence
aagttgcagcgcatgatcaaggtgc

SEQ ID NO: 245700 - DNA, 25 bp, Probe sequence
aagtaaagcttcagttgtattccaa

SEQ ID NO: 245701 - DNA, 25 bp, Probe sequence
aatgtaacttatttaggcccaactg

SEQ ID NO: 245702 - DNA, 25 bp, Probe sequence
caactaaagatactgcacgtgtgct

SEQ ID NO: 245703 - DNA, 25 bp, Probe sequence
cagatgaattattaaatcgctgtaa

SEQ ID NO: 245704 - DNA, 25 bp, Probe sequence
cgtggtttttcacaaagaacagtag

SEQ ID NO: 245705 - DNA, 25 bp, Probe sequence
gcatttgaagttgcagcgcatgatc

SEQ ID NO: 245706 - DNA, 25 bp, Probe sequence
gaacgcgatgtgcatttgaagttgc

SEQ ID NO: 245707 - DNA, 25 bp, Probe sequence
gatggcattgaataccgtggttttt

SEQ ID NO: 245708 - DNA, 25 bp, Probe sequence
gatgaagatcatcctactcaagttc

SEQ ID NO: 245709 - DNA, 25 bp, Probe sequence
gattatgcagatattaactttacat

SEQ ID NO: 245710 - DNA, 25 bp, Probe sequence
gattctacaagaacgcgatgtgcat

SEQ ID NO: 245711 - DNA, 25 bp, Probe sequence
gttgtattccaagaagctgagaaca

SEQ ID NO: 245712 - DNA, 25 bp, Probe sequence
gtttgggtatcaatgggtgaacctg

SEQ ID NO: 245713 - DNA, 25 bp, Probe sequence
gtgtgcttggtggaatgtatgatgg

SEQ ID NO: 245714 - DNA, 25 bp, Probe sequence
gtgtggaatggtttaactgatgaag

SEQ ID NO: 245715 - DNA, 25 bp, Probe sequence
gggtgaacctgatgaagtatggaaa

SEQ ID NO: 245716 - DNA, 25 bp, Probe sequence
ggtaatccaaatgttatttttgagc

SEQ ID NO: 245717 - DNA, 25 bp, Probe sequence
ggtgctgccattatgggtatgaact

SEQ ID NO: 245718 - DNA, 25 bp, Probe sequence
tggttgctacattgggtgaatttta

SEQ ID NO: 245719 - DNA, 25 bp, Probe sequence
tattcaggcgtaccagtgtggaatg

SEQ ID NO: 245720 - DNA, 25 bp, Probe sequence
tcaagttcttgctgatttcttaaca

SEQ ID NO: 245721 - DNA, 25 bp, Probe sequence
tagaattcttattaacactctccga

SEQ ID NO: 245722 - DNA, 25 bp, Probe sequence
tttgagcattgcttaccatctttcc

SEQ ID NO: 245723 - DNA, 25 bp, Probe sequence
atttccatttgctgaatgtggcgca

SEQ ID NO: 245724 - DNA, 25 bp, Probe sequence
atttgggacttaactatgctgcaga

SEQ ID NO: 245725 - DNA, 25 bp, Probe sequence
atgatacactcgttattgctgctgg

SEQ ID NO: 245726 - DNA, 25 bp, Probe sequence
aggttggaagcattaatttgggact

SEQ ID NO: 245727 - DNA, 25 bp, Probe sequence
aggaaaatcacctcaagaacaactc

SEQ ID NO: 245728 - DNA, 25 bp, Probe sequence
agcttgttaaaaatactgcgaaatc

SEQ ID NO: 245729 - DNA, 25 bp, Probe sequence
aacactgaaaaccaacagcctttga

SEQ ID NO: 245730 - DNA, 25 bp, Probe sequence
aaggacatgagattgttattagtca

SEQ ID NO: 245731 - DNA, 25 bp, Probe sequence
aatgctttaggaaaatcacctcaag

SEQ ID NO: 245732 - DNA, 25 bp, Probe sequence
aatgcgatcaattgattattttaac

SEQ ID NO: 245733 - DNA, 25 bp, Probe sequence
caacccatctctattattgaattag

SEQ ID NO: 245734 - DNA, 25 bp, Probe sequence
caccacaacccatctctattattga

SEQ ID NO: 245735 - DNA, 25 bp, Probe sequence
gaattagatgctgccttagagggta

SEQ ID NO: 245736 - DNA, 25 bp, Probe sequence
gaatggataaacaagtggtaacact

SEQ ID NO: 245737 - DNA, 25 bp, Probe sequence
gaatgtggcgcaatgagtcaagctt

SEQ ID NO: 245738 - DNA, 25 bp, Probe sequence
gaagcagccatatcatttattgaaa

SEQ ID NO: 245739 - DNA, 25 bp, Probe sequence
gagtcaagcttacatcggctatcaa

SEQ ID NO: 245740 - DNA, 25 bp, Probe sequence
gagggtaaagtaggtactgtgatta

SEQ ID NO: 245741 - DNA, 25 bp, Probe sequence
gatgctgccttagagggtaaagtag

SEQ ID NO: 245742 - DNA, 25 bp, Probe sequence
gatggttttaaaggtattgatgcag

SEQ ID NO: 245743 - DNA, 25 bp, Probe sequence
gtccggcatttccatttgctgaatg

SEQ ID NO: 245744 - DNA, 25 bp, Probe sequence
gtggtaacactagtgacacaagttg

SEQ ID NO: 245745 - DNA, 25 bp, Probe sequence
gggtgctaatattcaatgcgatcaa

SEQ ID NO: 245746 - DNA, 25 bp, Probe sequence
ggtataccagtaattagagagcaac

SEQ ID NO: 245747 - DNA, 25 bp, Probe sequence
ggtattgatgcagttatagacaaag

SEQ ID NO: 245748 - DNA, 25 bp, Probe sequence
ggcatttaacaatccttcaaaacca

SEQ ID NO: 245749 - DNA, 25 bp, Probe sequence
ggcgcaatgagtcaagcttacatcg

SEQ ID NO: 245750 - DNA, 25 bp, Probe sequence
tgggacttaactatgctgcagaaca

SEQ ID NO: 245751 - DNA, 25 bp, Probe sequence
tgatccggcatttaacaatccttca

SEQ ID NO: 245752 - DNA, 25 bp, Probe sequence
tgaaaaccaacagcctttgaaaaca

SEQ ID NO: 245753 - DNA, 25 bp, Probe sequence
taacaatccttcaaaaccaattggg

SEQ ID NO: 245754 - DNA, 25 bp, Probe sequence
taccaaaaattgaagcagccatatc

SEQ ID NO: 245755 - DNA, 25 bp, Probe sequence
tagagagcaacatgatggttttaaa

SEQ ID NO: 245756 - DNA, 25 bp, Probe sequence
ttacatcggctatcaattacaagaa

SEQ ID NO: 245757 - DNA, 25 bp, Probe sequence
atgttattcttagcgccgactggac

SEQ ID NO: 245758 - DNA, 25 bp, Probe sequence
cttacgaaccttcatcccaagaact

SEQ ID NO: 245759 - DNA, 25 bp, Probe sequence
ataggtgcttgtattgtcggtgcga

SEQ ID NO: 245760 - DNA, 25 bp, Probe sequence
atgccaggtgcatttatgattttat

SEQ ID NO: 245761 - DNA, 25 bp, Probe sequence
aacatgggttattcctgctggtgca

SEQ ID NO: 245762 - DNA, 25 bp, Probe sequence
aagcaacatccagctggaccagaac

SEQ ID NO: 245763 - DNA, 25 bp, Probe sequence
caatcttacacttttcatcatcttt

SEQ ID NO: 245764 - DNA, 25 bp, Probe sequence
tcaactattaacccgttctcggttg

SEQ ID NO: 245765 - DNA, 25 bp, Probe sequence
cattatttgtactaccatttccaat

SEQ ID NO: 245766 - DNA, 25 bp, Probe sequence
cgttctcggttgtaattgcctctaa

SEQ ID NO: 245767 - DNA, 25 bp, Probe sequence
gccgactggacttgttatggccaca

SEQ ID NO: 245768 - DNA, 25 bp, Probe sequence
gccagtggttcttttgaatcgggat

SEQ ID NO: 245769 - DNA, 25 bp, Probe sequence
gcgtagttcaagccagtggttcttt

SEQ ID NO: 245770 - DNA, 25 bp, Probe sequence
gctggtgcatattctaaactttctt

SEQ ID NO: 245771 - DNA, 25 bp, Probe sequence
gatagttaaccctcataaccaagtg

SEQ ID NO: 245772 - DNA, 25 bp, Probe sequence
gatcctaaagcgtcatattcttatg

SEQ ID NO: 245773 - DNA, 25 bp, Probe sequence
gatagtgcccattttactttgcgta

SEQ ID NO: 245774 - DNA, 25 bp, Probe sequence
gttatggccacactacaaatgttaa

SEQ ID NO: 245775 - DNA, 25 bp, Probe sequence
gtcggtgcgatttttgttattagtt

SEQ ID NO: 245776 - DNA, 25 bp, Probe sequence
gtggttcccagttatggcttcagca

SEQ ID NO: 245777 - DNA, 25 bp, Probe sequence
gtggaccattatttatcatcgtatt

SEQ ID NO: 245778 - DNA, 25 bp, Probe sequence
ggttccgatttgtatggccggtagt

SEQ ID NO: 245779 - DNA, 25 bp, Probe sequence
tggccggtagttgcttttgtattga

SEQ ID NO: 245780 - DNA, 25 bp, Probe sequence
tgcgatattcacattggttccgatt

SEQ ID NO: 245781 - DNA, 25 bp, Probe sequence
tcgtattactatttattttcttctg

SEQ ID NO: 245782 - DNA, 25 bp, Probe sequence
tctttgcaccactagctgatacagt

SEQ ID NO: 245783 - DNA, 25 bp, Probe sequence
tcatcgttacgacatatcaatttgg

SEQ ID NO: 245784 - DNA, 25 bp, Probe sequence
tagggggacttattggcgtagttca

SEQ ID NO: 245785 - DNA, 25 bp, Probe sequence
taggttttatcgtgccatcatcttc

SEQ ID NO: 245786 - DNA, 25 bp, Probe sequence
tatgacgcaaggttggtggttccca

SEQ ID NO: 245787 - DNA, 25 bp, Probe sequence
tatccgattttagtccctatattta

SEQ ID NO: 245788 - DNA, 25 bp, Probe sequence
tatcaatgcctatctttgcaccact

SEQ ID NO: 245789 - DNA, 25 bp, Probe sequence
ttttgtattgattttcggtggcgga

SEQ ID NO: 245790 - DNA, 25 bp, Probe sequence
ttttcatcatctttagttcaacata

SEQ ID NO: 245791 - DNA, 25 bp, Probe sequence
attcattaacacaatcgtttgagct

SEQ ID NO: 245792 - DNA, 25 bp, Probe sequence
ataatgaacttgtaacggataactt

SEQ ID NO: 245793 - DNA, 25 bp, Probe sequence
atgccttatttaattcattaacaca

SEQ ID NO: 245794 - DNA, 25 bp, Probe sequence
agtgatgccttatttaattcattaa

SEQ ID NO: 245795 - DNA, 25 bp, Probe sequence
agtcatgtataagccaagaaaagaa

SEQ ID NO: 245796 - DNA, 25 bp, Probe sequence
acaatcgtttgagctaatagaaggt

SEQ ID NO: 245797 - DNA, 25 bp, Probe sequence
aacacaatcgtttgagctaatagaa

SEQ ID NO: 245798 - DNA, 25 bp, Probe sequence
aacggataacttgaaaatagtcatg

SEQ ID NO: 245799 - DNA, 25 bp, Probe sequence
aagtgatgccttatttaattcatta

SEQ ID NO: 245800 - DNA, 25 bp, Probe sequence
aagtggtcgaataaatcgtagattt

SEQ ID NO: 245801 - DNA, 25 bp, Probe sequence
aatgaacttgtaacggataacttga

SEQ ID NO: 245802 - DNA, 25 bp, Probe sequence
aatcgtttgagctaatagaaggtgt

SEQ ID NO: 245803 - DNA, 25 bp, Probe sequence
aatcaagtgatgccttatttaattc

SEQ ID NO: 245804 - DNA, 25 bp, Probe sequence
aatagtcatgtataagccaagaaaa

SEQ ID NO: 245805 - DNA, 25 bp, Probe sequence
aattcattaacacaatcgtttgagc

SEQ ID NO: 245806 - DNA, 25 bp, Probe sequence
caagtgatgccttatttaattcatt

SEQ ID NO: 245807 - DNA, 25 bp, Probe sequence
cacaatcgtttgagctaatagaagg

SEQ ID NO: 245808 - DNA, 25 bp, Probe sequence
cttgtaacggataacttgaaaatag

SEQ ID NO: 245809 - DNA, 25 bp, Probe sequence
cattaacacaatcgtttgagctaat

SEQ ID NO: 245810 - DNA, 25 bp, Probe sequence
gaaaagaaagtacaagtggtcgaat

SEQ ID NO: 245811 - DNA, 25 bp, Probe sequence
gaaaatagtcatgtataagccaaga

SEQ ID NO: 245812 - DNA, 25 bp, Probe sequence
gaaagtacaagtggtcgaataaatc

SEQ ID NO: 245813 - DNA, 25 bp, Probe sequence
gagtaaatcaagtgatgccttattt

SEQ ID NO: 245814 - DNA, 25 bp, Probe sequence
gatgccttatttaattcattaacac

SEQ ID NO: 245815 - DNA, 25 bp, Probe sequence
gtttgagctaatagaaggtgtatat

SEQ ID NO: 245816 - DNA, 25 bp, Probe sequence
gtacaagtggtcgaataaatcgtag

SEQ ID NO: 245817 - DNA, 25 bp, Probe sequence
gtaaatcaagtgatgccttatttaa

SEQ ID NO: 245818 - DNA, 25 bp, Probe sequence
gtgatgccttatttaattcattaac

SEQ ID NO: 245819 - DNA, 25 bp, Probe sequence
ggtgtatataatgaacttgtaacgg

SEQ ID NO: 245820 - DNA, 25 bp, Probe sequence
tgaacttgtaacggataacttgaaa

SEQ ID NO: 245821 - DNA, 25 bp, Probe sequence
tcattaacacaatcgtttgagctaa

SEQ ID NO: 245822 - DNA, 25 bp, Probe sequence
tcaagtgatgccttatttaattcat

SEQ ID NO: 245823 - DNA, 25 bp, Probe sequence
ttaacacaatcgtttgagctaatag

SEQ ID NO: 245824 - DNA, 25 bp, Probe sequence
ttcattaacacaatcgtttgagcta

SEQ ID NO: 245825 - DNA, 25 bp, Probe sequence
agtataccctaatggattccctgaa

SEQ ID NO: 245826 - DNA, 25 bp, Probe sequence
attggtcgtattatcgcacgtccat

SEQ ID NO: 245827 - DNA, 25 bp, Probe sequence
atcgatgagtggggcgagcaccaaa

SEQ ID NO: 245828 - DNA, 25 bp, Probe sequence
atcgacatgactatgcgttaaaacc

SEQ ID NO: 245829 - DNA, 25 bp, Probe sequence
atcccagtaattatgtacagtccga

SEQ ID NO: 245830 - DNA, 25 bp, Probe sequence
atgactggtcactgggaaattatgg

SEQ ID NO: 245831 - DNA, 25 bp, Probe sequence
aggtattggtgaagcgccagacgca

SEQ ID NO: 245832 - DNA, 25 bp, Probe sequence
agtaattattacagcagaccatggt

SEQ ID NO: 245833 - DNA, 25 bp, Probe sequence
aagcgccagacgcagctgattttaa

SEQ ID NO: 245834 - DNA, 25 bp, Probe sequence
aagaccatttaatcgtgtacattta

SEQ ID NO: 245835 - DNA, 25 bp, Probe sequence
aagatttcgatgatcgcttgccaga

SEQ ID NO: 245836 - DNA, 25 bp, Probe sequence
caacgtaacattaccagagttcggt

SEQ ID NO: 245837 - DNA, 25 bp, Probe sequence
cagacccagtattgcaaattgctgc

SEQ ID NO: 245838 - DNA, 25 bp, Probe sequence
ccggcatcgggtacgcaaattatcg

SEQ ID NO: 245839 - DNA, 25 bp, Probe sequence
gcgccaggtacggaccatacgagag

SEQ ID NO: 245840 - DNA, 25 bp, Probe sequence
gctgcacatgaagacattatcccat

SEQ ID NO: 245841 - DNA, 25 bp, Probe sequence
gcattatacggtcatcgtcgtgata

SEQ ID NO: 245842 - DNA, 25 bp, Probe sequence
gcacgtccatatgttggtgaaccag

SEQ ID NO: 245843 - DNA, 25 bp, Probe sequence
gaaggtgtaacagaagcggttcgta

SEQ ID NO: 245844 - DNA, 25 bp, Probe sequence
gaaccaggaaactttacacgtacat

SEQ ID NO: 245845 - DNA, 25 bp, Probe sequence
gacaggtcgtaaagttgttgctaac

SEQ ID NO: 245846 - DNA, 25 bp, Probe sequence
gaacaaccagaagcatactatacta

SEQ ID NO: 245847 - DNA, 25 bp, Probe sequence
gaccatggtaatgacccgacagcgc

SEQ ID NO: 245848 - DNA, 25 bp, Probe sequence
gatcgcttgccagaactgtttagca

SEQ ID NO: 245849 - DNA, 25 bp, Probe sequence
gatttcacaggtattagcttcttaa

SEQ ID NO: 245850 - DNA, 25 bp, Probe sequence
gttgttgctaacaaaccggcatcgg

SEQ ID NO: 245851 - DNA, 25 bp, Probe sequence
gttcgtgagttgacaaaagacccta

SEQ ID NO: 245852 - DNA, 25 bp, Probe sequence
gttcacatactttaagacatacctt

SEQ ID NO: 245853 - DNA, 25 bp, Probe sequence
gttaggtctagggaacatcgataaa

SEQ ID NO: 245854 - DNA, 25 bp, Probe sequence
gtccgaaatttaaaggtggtcatgc

SEQ ID NO: 245855 - DNA, 25 bp, Probe sequence
ggtaaaactgtcttagatcatttga

SEQ ID NO: 245856 - DNA, 25 bp, Probe sequence
tacacgtacatctaatcgacatgac

SEQ ID NO: 245857 - DNA, 25 bp, Probe sequence
ttcgatcaaactttaccaaaccttg

SEQ ID NO: 245858 - DNA, 25 bp, Probe sequence
ttgtttatacaagtgcagacccagt

SEQ ID NO: 245859 - DNA, 25 bp, Probe sequence
attgaaaaacgctgaactactttat

SEQ ID NO: 245860 - DNA, 25 bp, Probe sequence
attagacagtgatttgagcagttta

SEQ ID NO: 245861 - DNA, 25 bp, Probe sequence
atatgtcattgaaaaacgctgaact

SEQ ID NO: 245862 - DNA, 25 bp, Probe sequence
atgtcattgaaaaacgctgaactac

SEQ ID NO: 245863 - DNA, 25 bp, Probe sequence
agtgatttgagcagtttacatatat

SEQ ID NO: 245864 - DNA, 25 bp, Probe sequence
agatcattagacaatatgtcattga

SEQ ID NO: 245865 - DNA, 25 bp, Probe sequence
agacagtgatttgagcagtttacat

SEQ ID NO: 245866 - DNA, 25 bp, Probe sequence
acgctgaactactttataaatttgc

SEQ ID NO: 245867 - DNA, 25 bp, Probe sequence
acagtgatttgagcagtttacatat

SEQ ID NO: 245868 - DNA, 25 bp, Probe sequence
aaaactattagacagtgatttgagc

SEQ ID NO: 245869 - DNA, 25 bp, Probe sequence
aactattagacagtgatttgagcag

SEQ ID NO: 245870 - DNA, 25 bp, Probe sequence
aacgctgaactactttataaatttg

SEQ ID NO: 245871 - DNA, 25 bp, Probe sequence
aatatgtcattgaaaaacgctgaac

SEQ ID NO: 245872 - DNA, 25 bp, Probe sequence
aattcaaaaactattagacagtgat

SEQ ID NO: 245873 - DNA, 25 bp, Probe sequence
cagtgatttgagcagtttacatata

SEQ ID NO: 245874 - DNA, 25 bp, Probe sequence
cattgaaaaacgctgaactacttta

SEQ ID NO: 245875 - DNA, 25 bp, Probe sequence
ctattagacagtgatttgagcagtt

SEQ ID NO: 245876 - DNA, 25 bp, Probe sequence
ctgaactactttataaatttgccaa

SEQ ID NO: 245877 - DNA, 25 bp, Probe sequence
cgctgaactactttataaatttgcc

SEQ ID NO: 245878 - DNA, 25 bp, Probe sequence
gctgaactactttataaatttgcca

SEQ ID NO: 245879 - DNA, 25 bp, Probe sequence
gaaagatcattagacaatatgtcat

SEQ ID NO: 245880 - DNA, 25 bp, Probe sequence
gacaatatgtcattgaaaaacgctg

SEQ ID NO: 245881 - DNA, 25 bp, Probe sequence
gacagtgatttgagcagtttacata

SEQ ID NO: 245882 - DNA, 25 bp, Probe sequence
gtcattgaaaaacgctgaactactt

SEQ ID NO: 245883 - DNA, 25 bp, Probe sequence
gtgatttgagcagtttacatatatc

SEQ ID NO: 245884 - DNA, 25 bp, Probe sequence
tgtcattgaaaaacgctgaactact

SEQ ID NO: 245885 - DNA, 25 bp, Probe sequence
tgaaaaacgctgaactactttataa

SEQ ID NO: 245886 - DNA, 25 bp, Probe sequence
tgaactactttataaatttgccaat

SEQ ID NO: 245887 - DNA, 25 bp, Probe sequence
tcattgaaaaacgctgaactacttt

SEQ ID NO: 245888 - DNA, 25 bp, Probe sequence
tagacagtgatttgagcagtttaca

SEQ ID NO: 245889 - DNA, 25 bp, Probe sequence
tatgtcattgaaaaacgctgaacta

SEQ ID NO: 245890 - DNA, 25 bp, Probe sequence
tattagacagtgatttgagcagttt

SEQ ID NO: 245891 - DNA, 25 bp, Probe sequence
ttagacagtgatttgagcagtttac

SEQ ID NO: 245892 - DNA, 25 bp, Probe sequence
ttgaaaaacgctgaactactttata

SEQ ID NO: 245893 - DNA, 25 bp, Probe sequence
attaaagataccgtaactgcagcaa

SEQ ID NO: 245894 - DNA, 25 bp, Probe sequence
attaggcacaagcattgtgagcatc

SEQ ID NO: 245895 - DNA, 25 bp, Probe sequence
ataccgtaactgcagcaattaataa

SEQ ID NO: 245896 - DNA, 25 bp, Probe sequence
aggcacaagcattgtgagcatcgtt

SEQ ID NO: 245897 - DNA, 25 bp, Probe sequence
agataccgtaactgcagcaattaat

SEQ ID NO: 245898 - DNA, 25 bp, Probe sequence
agcatcgttgaaaatggcgtaggtt

SEQ ID NO: 245899 - DNA, 25 bp, Probe sequence
acgcaattaaagataccgtaactgc

SEQ ID NO: 245900 - DNA, 25 bp, Probe sequence
acaagcattgtgagcatcgttgaaa

SEQ ID NO: 245901 - DNA, 25 bp, Probe sequence
aaagataccgtaactgcagcaatta

SEQ ID NO: 245902 - DNA, 25 bp, Probe sequence
aagcattgtgagcatcgttgaaaat

SEQ ID NO: 245903 - DNA, 25 bp, Probe sequence
aagataccgtaactgcagcaattaa

SEQ ID NO: 245904 - DNA, 25 bp, Probe sequence
aattaaagataccgtaactgcagca

SEQ ID NO: 245905 - DNA, 25 bp, Probe sequence
caagcattgtgagcatcgttgaaaa

SEQ ID NO: 245906 - DNA, 25 bp, Probe sequence
cacaagcattgtgagcatcgttgaa

SEQ ID NO: 245907 - DNA, 25 bp, Probe sequence
catcgttgaaaatggcgtaggttta

SEQ ID NO: 245908 - DNA, 25 bp, Probe sequence
cgcaaaattaggcacaagcattgtg

SEQ ID NO: 245909 - DNA, 25 bp, Probe sequence
ccgtaactgcagcaattaataatga

SEQ ID NO: 245910 - DNA, 25 bp, Probe sequence
gcgcaaaattaggcacaagcattgt

SEQ ID NO: 245911 - DNA, 25 bp, Probe sequence
gcattgtgagcatcgttgaaaatgg

SEQ ID NO: 245912 - DNA, 25 bp, Probe sequence
gcatcgttgaaaatggcgtaggttt

SEQ ID NO: 245913 - DNA, 25 bp, Probe sequence
gcacaagcattgtgagcatcgttga

SEQ ID NO: 245914 - DNA, 25 bp, Probe sequence
gcaattaaagataccgtaactgcag

SEQ ID NO: 245915 - DNA, 25 bp, Probe sequence
gagcatcgttgaaaatggcgtaggt

SEQ ID NO: 245916 - DNA, 25 bp, Probe sequence
gataccgtaactgcagcaattaata

SEQ ID NO: 245917 - DNA, 25 bp, Probe sequence
gtgagcatcgttgaaaatggcgtag

SEQ ID NO: 245918 - DNA, 25 bp, Probe sequence
ggcacaagcattgtgagcatcgttg

SEQ ID NO: 245919 - DNA, 25 bp, Probe sequence
ggcgcaaaattaggcacaagcattg

SEQ ID NO: 245920 - DNA, 25 bp, Probe sequence
tgtgagcatcgttgaaaatggcgta

SEQ ID NO: 245921 - DNA, 25 bp, Probe sequence
tgagcatcgttgaaaatggcgtagg

SEQ ID NO: 245922 - DNA, 25 bp, Probe sequence
taaagataccgtaactgcagcaatt

SEQ ID NO: 245923 - DNA, 25 bp, Probe sequence
taccgtaactgcagcaattaataat

SEQ ID NO: 245924 - DNA, 25 bp, Probe sequence
taggcacaagcattgtgagcatcgt

SEQ ID NO: 245925 - DNA, 25 bp, Probe sequence
ttaaagataccgtaactgcagcaat

SEQ ID NO: 245926 - DNA, 25 bp, Probe sequence
ttgtgagcatcgttgaaaatggcgt

SEQ ID NO: 245927 - DNA, 25 bp, Probe sequence
attaggcacaagtatcgtagacatc

SEQ ID NO: 245928 - DNA, 25 bp, Probe sequence
atcgcaaatactgtgcaagctgcac

SEQ ID NO: 245929 - DNA, 25 bp, Probe sequence
atgactggactagcagaagcaatcg

SEQ ID NO: 245930 - DNA, 25 bp, Probe sequence
agacatcgttgctaacggtgtgggt

SEQ ID NO: 245931 - DNA, 25 bp, Probe sequence
agcaatcgcaaatactgtgcaagct

SEQ ID NO: 245932 - DNA, 25 bp, Probe sequence
actagcagaagcaatcgcaaatact

SEQ ID NO: 245933 - DNA, 25 bp, Probe sequence
acatcgttgctaacggtgtgggttt

SEQ ID NO: 245934 - DNA, 25 bp, Probe sequence
acaacatgatagtgtgaaattaggc

SEQ ID NO: 245935 - DNA, 25 bp, Probe sequence
acaagtatcgtagacatcgttgcta

SEQ ID NO: 245936 - DNA, 25 bp, Probe sequence
aagctgcacaacaacatgatagtgt

SEQ ID NO: 245937 - DNA, 25 bp, Probe sequence
aagtatcgtagacatcgttgctaac

SEQ ID NO: 245938 - DNA, 25 bp, Probe sequence
caatcgcaaatactgtgcaagctgc

SEQ ID NO: 245939 - DNA, 25 bp, Probe sequence
ctggactagcagaagcaatcgcaaa

SEQ ID NO: 245940 - DNA, 25 bp, Probe sequence
gctgcacaacaacatgatagtgtga

SEQ ID NO: 245941 - DNA, 25 bp, Probe sequence
gcagaagcaatcgcaaatactgtgc

SEQ ID NO: 245942 - DNA, 25 bp, Probe sequence
gcaaatactgtgcaagctgcacaac

SEQ ID NO: 245943 - DNA, 25 bp, Probe sequence
gcacaagtatcgtagacatcgttgc

SEQ ID NO: 245944 - DNA, 25 bp, Probe sequence
gcaagctgcacaacaacatgatagt

SEQ ID NO: 245945 - DNA, 25 bp, Probe sequence
gaagcaatcgcaaatactgtgcaag

SEQ ID NO: 245946 - DNA, 25 bp, Probe sequence
gaaattaggcacaagtatcgtagac

SEQ ID NO: 245947 - DNA, 25 bp, Probe sequence
gacatcgttgctaacggtgtgggtt

SEQ ID NO: 245948 - DNA, 25 bp, Probe sequence
gactggactagcagaagcaatcgca

SEQ ID NO: 245949 - DNA, 25 bp, Probe sequence
gttgctaacggtgtgggtttactag

SEQ ID NO: 245950 - DNA, 25 bp, Probe sequence
gtagacatcgttgctaacggtgtgg

SEQ ID NO: 245951 - DNA, 25 bp, Probe sequence
gtatcgtagacatcgttgctaacgg

SEQ ID NO: 245952 - DNA, 25 bp, Probe sequence
gtgcaagctgcacaacaacatgata

SEQ ID NO: 245953 - DNA, 25 bp, Probe sequence
ggactagcagaagcaatcgcaaata

SEQ ID NO: 245954 - DNA, 25 bp, Probe sequence
ggcacaagtatcgtagacatcgttg

SEQ ID NO: 245955 - DNA, 25 bp, Probe sequence
tgctaacggtgtgggtttactaggt

SEQ ID NO: 245956 - DNA, 25 bp, Probe sequence
tcgtagacatcgttgctaacggtgt

SEQ ID NO: 245957 - DNA, 25 bp, Probe sequence
tcgttgctaacggtgtgggtttact

SEQ ID NO: 245958 - DNA, 25 bp, Probe sequence
taggcacaagtatcgtagacatcgt

SEQ ID NO: 245959 - DNA, 25 bp, Probe sequence
tatcgtagacatcgttgctaacggt

SEQ ID NO: 245960 - DNA, 25 bp, Probe sequence
ttactaggtaaattatttggattct

SEQ ID NO: 245961 - DNA, 25 bp, Probe sequence
attacttcaaacatcatcaaatgga

SEQ ID NO: 245962 - DNA, 25 bp, Probe sequence
atcaatgcgggtatagctacttgct

SEQ ID NO: 245963 - DNA, 25 bp, Probe sequence
atgtttttaatgatattggtgagga

SEQ ID NO: 245964 - DNA, 25 bp, Probe sequence
actatatggcgaatgtttttaatca

SEQ ID NO: 245965 - DNA, 25 bp, Probe sequence
acagcactcgattatagttggagat

SEQ ID NO: 245966 - DNA, 25 bp, Probe sequence
aaaaatcaatcaccaacattgggaa

SEQ ID NO: 245967 - DNA, 25 bp, Probe sequence
aaaaatattttgatagactttgatg

SEQ ID NO: 245968 - DNA, 25 bp, Probe sequence
aagacagcactcgattatagttgga

SEQ ID NO: 245969 - DNA, 25 bp, Probe sequence
aatgcgggtatagctacttgctggt

SEQ ID NO: 245970 - DNA, 25 bp, Probe sequence
aattaacgaagtctgaagtattatc

SEQ ID NO: 245971 - DNA, 25 bp, Probe sequence
caaaagagaaggttaaatcagacgc

SEQ ID NO: 245972 - DNA, 25 bp, Probe sequence
caaatggaagttgatgggcatcgtg

SEQ ID NO: 245973 - DNA, 25 bp, Probe sequence
caacattgggaagcttttcaacaaa

SEQ ID NO: 245974 - DNA, 25 bp, Probe sequence
caccaacattgggaagcttttcaac

SEQ ID NO: 245975 - DNA, 25 bp, Probe sequence
cgtgcagatgtgttatttagaaatg

SEQ ID NO: 245976 - DNA, 25 bp, Probe sequence
gcgggtatagctacttgctggttta

SEQ ID NO: 245977 - DNA, 25 bp, Probe sequence
gctggtttaattttagaggatttga

SEQ ID NO: 245978 - DNA, 25 bp, Probe sequence
gctacttgctggtttaattttagag

SEQ ID NO: 245979 - DNA, 25 bp, Probe sequence
gaggatttgatcataatccaggaat

SEQ ID NO: 245980 - DNA, 25 bp, Probe sequence
gatgggcatcgtgcagatgtgttat

SEQ ID NO: 245981 - DNA, 25 bp, Probe sequence
gatgatacaattgttgatttttatg

SEQ ID NO: 245982 - DNA, 25 bp, Probe sequence
gatatcaaaaacctaatccggaatt

SEQ ID NO: 245983 - DNA, 25 bp, Probe sequence
gatcaaacattagaaacaattgtcg

SEQ ID NO: 245984 - DNA, 25 bp, Probe sequence
gattctttaacatctgacattctag

SEQ ID NO: 245985 - DNA, 25 bp, Probe sequence
gttggagattctttaacatctgaca

SEQ ID NO: 245986 - DNA, 25 bp, Probe sequence
ggtgaggatgaaagacagcactcga

SEQ ID NO: 245987 - DNA, 25 bp, Probe sequence
ggtatagctacttgctggtttaatt

SEQ ID NO: 245988 - DNA, 25 bp, Probe sequence
ggatgaaagacagcactcgattata

SEQ ID NO: 245989 - DNA, 25 bp, Probe sequence
ggaagttgatgggcatcgtgcagat

SEQ ID NO: 245990 - DNA, 25 bp, Probe sequence
ggcgaatgtttttaatcataaagca

SEQ ID NO: 245991 - DNA, 25 bp, Probe sequence
taatccaggaattatacctgattat

SEQ ID NO: 245992 - DNA, 25 bp, Probe sequence
ttaacatctgacattctaggtggaa

SEQ ID NO: 245993 - DNA, 25 bp, Probe sequence
ttctaggtggaatcaatgcgggtat

SEQ ID NO: 245994 - DNA, 25 bp, Probe sequence
ttgttgatttttatgatgcagaaga

SEQ ID NO: 245995 - DNA, 25 bp, Probe sequence
atttcaatatgatgcagctcaacaa

SEQ ID NO: 245996 - DNA, 25 bp, Probe sequence
atattgcggaaaatcaacctgaatt

SEQ ID NO: 245997 - DNA, 25 bp, Probe sequence
atacaatggagatgccagagacgac

SEQ ID NO: 245998 - DNA, 25 bp, Probe sequence
atcctgataaggctgagttgaaaca

SEQ ID NO: 245999 - DNA, 25 bp, Probe sequence
agatgcgcagtttgagccgttaaga

SEQ ID NO: 246000 - DNA, 25 bp, Probe sequence
acactccatccaatgggaggattac

SEQ ID NO: 246001 - DNA, 25 bp, Probe sequence
aaatgttcatttattcttacatgat

SEQ ID NO: 246002 - DNA, 25 bp, Probe sequence
aaagcatatggcgttctatttatag

SEQ ID NO: 246003 - DNA, 25 bp, Probe sequence
aacgtactcaaaatcaaggcttgaa

SEQ ID NO: 246004 - DNA, 25 bp, Probe sequence
aagcactactgcatgaaacatttaa

SEQ ID NO: 246005 - DNA, 25 bp, Probe sequence
aattagtttcgtatgatggtaagca

SEQ ID NO: 246006 - DNA, 25 bp, Probe sequence
caccactttcttacacttttgatca

SEQ ID NO: 246007 - DNA, 25 bp, Probe sequence
cagttgcttgatgatgcttttagag

SEQ ID NO: 246008 - DNA, 25 bp, Probe sequence
gcttttcgggggaccattgtataca

SEQ ID NO: 246009 - DNA, 25 bp, Probe sequence
gcaggagaagatcatgatttcgatg

SEQ ID NO: 246010 - DNA, 25 bp, Probe sequence
gcaacaagtagtaccagttttttgg

SEQ ID NO: 246011 - DNA, 25 bp, Probe sequence
gaagcggcattagcgaatgttattc

SEQ ID NO: 246012 - DNA, 25 bp, Probe sequence
gaaaaagtgttagtcgatggtgttg

SEQ ID NO: 246013 - DNA, 25 bp, Probe sequence
gaaaaatggaagcgcctatgtttaa

SEQ ID NO: 246014 - DNA, 25 bp, Probe sequence
gaaactgttcatacacaaggtctac

SEQ ID NO: 246015 - DNA, 25 bp, Probe sequence
gaaattaagtactgggctgaactaa

SEQ ID NO: 246016 - DNA, 25 bp, Probe sequence
gacaacaagcagggcttttcggggg

SEQ ID NO: 246017 - DNA, 25 bp, Probe sequence
gaaattcaagaaacactccatccaa

SEQ ID NO: 246018 - DNA, 25 bp, Probe sequence
gaccaatatgactcgtggactgata

SEQ ID NO: 246019 - DNA, 25 bp, Probe sequence
gatgccaaggcttagaattacttat

SEQ ID NO: 246020 - DNA, 25 bp, Probe sequence
gttgaaatgcctatcgtgatgccaa

SEQ ID NO: 246021 - DNA, 25 bp, Probe sequence
gtaccagttttttggattgcaggag

SEQ ID NO: 246022 - DNA, 25 bp, Probe sequence
gtctctagatattatcctgataagg

SEQ ID NO: 246023 - DNA, 25 bp, Probe sequence
gtgattggtggacaacaagcagggc

SEQ ID NO: 246024 - DNA, 25 bp, Probe sequence
gggggaccattgtatacattccata

SEQ ID NO: 246025 - DNA, 25 bp, Probe sequence
ggactgatatgtttaaagcactact

SEQ ID NO: 246026 - DNA, 25 bp, Probe sequence
tgggacagatgtgttcaagccctcc

SEQ ID NO: 246027 - DNA, 25 bp, Probe sequence
tgaagtgaatcatacatttgtttat

SEQ ID NO: 246028 - DNA, 25 bp, Probe sequence
taacggatacacataagcaacaagt

SEQ ID NO: 246029 - DNA, 25 bp, Probe sequence
ataacattgttggccgaaccggaat

SEQ ID NO: 246030 - DNA, 25 bp, Probe sequence
atttgctatagatacgccaaccaat

SEQ ID NO: 246031 - DNA, 25 bp, Probe sequence
atcatggaagcaactatcgcgaagt

SEQ ID NO: 246032 - DNA, 25 bp, Probe sequence
agttgcacagttttcaggaggcatg

SEQ ID NO: 246033 - DNA, 25 bp, Probe sequence
agctgaggaggtttgtcaatcatga

SEQ ID NO: 246034 - DNA, 25 bp, Probe sequence
acggaaagagtgtcgtcatcacaac

SEQ ID NO: 246035 - DNA, 25 bp, Probe sequence
acttaactgctcatgaaaacctaga

SEQ ID NO: 246036 - DNA, 25 bp, Probe sequence
aaaacatatcgttctagtgaattta

SEQ ID NO: 246037 - DNA, 25 bp, Probe sequence
aagttggacttattgtcgacggaag

SEQ ID NO: 246038 - DNA, 25 bp, Probe sequence
gaagcggtatttattaaagctgagg

SEQ ID NO: 246039 - DNA, 25 bp, Probe sequence
gaaaagatagattctggatctgcag

SEQ ID NO: 246040 - DNA, 25 bp, Probe sequence
gaaacgccgattatctttagcaata

SEQ ID NO: 246041 - DNA, 25 bp, Probe sequence
gaccctaaattgcgccaacaaatat

SEQ ID NO: 246042 - DNA, 25 bp, Probe sequence
gatgaaccaactgtaggcattgacc

SEQ ID NO: 246043 - DNA, 25 bp, Probe sequence
gatgcctaatcgcaaagctttaaat

SEQ ID NO: 246044 - DNA, 25 bp, Probe sequence
gtataacaagcatcacgtattaaac

SEQ ID NO: 246045 - DNA, 25 bp, Probe sequence
gtatctcaattttggaggggttatc

SEQ ID NO: 246046 - DNA, 25 bp, Probe sequence
gtgaactgctagggttaataggtcc

SEQ ID NO: 246047 - DNA, 25 bp, Probe sequence
ggggcaaactgatgcattatacgaa

SEQ ID NO: 246048 - DNA, 25 bp, Probe sequence
ggatgaggcggaacgttgtgataaa

SEQ ID NO: 246049 - DNA, 25 bp, Probe sequence
ggatctgcagaaattttcgctcata

SEQ ID NO: 246050 - DNA, 25 bp, Probe sequence
ggaggcatgaaacgccgattatctt

SEQ ID NO: 246051 - DNA, 25 bp, Probe sequence
ggaggggttatcatggaagcaacta

SEQ ID NO: 246052 - DNA, 25 bp, Probe sequence
ggcaacagttcaagcaaatgaccaa

SEQ ID NO: 246053 - DNA, 25 bp, Probe sequence
ggcattgaccctaaattgcgccaac

SEQ ID NO: 246054 - DNA, 25 bp, Probe sequence
ggccgaaccggaattaatcatatta

SEQ ID NO: 246055 - DNA, 25 bp, Probe sequence
tgtcgacggaagaatatttgctata

SEQ ID NO: 246056 - DNA, 25 bp, Probe sequence
tgtcgtcatcacaacacatgttatg

SEQ ID NO: 246057 - DNA, 25 bp, Probe sequence
taataggtcctagtggttctggtaa

SEQ ID NO: 246058 - DNA, 25 bp, Probe sequence
tttacggtcgtttgtcaggtctgaa

SEQ ID NO: 246059 - DNA, 25 bp, Probe sequence
tcgattaggctatatggggcaaact

SEQ ID NO: 246060 - DNA, 25 bp, Probe sequence
tagatacgccaaccaatttaaaaca

SEQ ID NO: 246061 - DNA, 25 bp, Probe sequence
tatacgaaaacttaactgctcatga

SEQ ID NO: 246062 - DNA, 25 bp, Probe sequence
ttcgctcataagatgcctaatcgca

SEQ ID NO: 246063 - DNA, 25 bp, Probe sequence
attgacgcttatgtattttattttt

SEQ ID NO: 246064 - DNA, 25 bp, Probe sequence
atcgttcttggttatctgattggct

SEQ ID NO: 246065 - DNA, 25 bp, Probe sequence
atgctggtgatgctttaaccaatgt

SEQ ID NO: 246066 - DNA, 25 bp, Probe sequence
atgtttctagcaccaattttaatat

SEQ ID NO: 246067 - DNA, 25 bp, Probe sequence
atggttcgatttactaattctaatg

SEQ ID NO: 246068 - DNA, 25 bp, Probe sequence
agctattacagcattatctatggga

SEQ ID NO: 246069 - DNA, 25 bp, Probe sequence
acgtgataaacgtacactcgcgcta

SEQ ID NO: 246070 - DNA, 25 bp, Probe sequence
acaaaacaattgccatcgtccgaca

SEQ ID NO: 246071 - DNA, 25 bp, Probe sequence
aaaactcaaacgttccattctcatg

SEQ ID NO: 246072 - DNA, 25 bp, Probe sequence
aacgtttgctaattctgagtttcaa

SEQ ID NO: 246073 - DNA, 25 bp, Probe sequence
aagatttcacattcctatttatacg

SEQ ID NO: 246074 - DNA, 25 bp, Probe sequence
aattgaaaaagcacctccgaccatg

SEQ ID NO: 246075 - DNA, 25 bp, Probe sequence
caaacattaatcatagtcctatttt

SEQ ID NO: 246076 - DNA, 25 bp, Probe sequence
cacctccgaccatgaaagaaccaaa

SEQ ID NO: 246077 - DNA, 25 bp, Probe sequence
cgtacactcgcgctaatgtttctag

SEQ ID NO: 246078 - DNA, 25 bp, Probe sequence
ccatcgtccgacataaaaactcaaa

SEQ ID NO: 246079 - DNA, 25 bp, Probe sequence
gaaacattggctatatcttccctct

SEQ ID NO: 246080 - DNA, 25 bp, Probe sequence
gatctttatcatagtctttattatc

SEQ ID NO: 246081 - DNA, 25 bp, Probe sequence
gtatagctttattacgtgaacgtac

SEQ ID NO: 246082 - DNA, 25 bp, Probe sequence
gtttccaatactaatgggcttcttt

SEQ ID NO: 246083 - DNA, 25 bp, Probe sequence
gtatattcgcaatcattcaaacatt

SEQ ID NO: 246084 - DNA, 25 bp, Probe sequence
gtacctcaggtattcttttcaggaa

SEQ ID NO: 246085 - DNA, 25 bp, Probe sequence
gtaattctgatagtacttatttcga

SEQ ID NO: 246086 - DNA, 25 bp, Probe sequence
gtgtattatcaacttcaattcgtcg

SEQ ID NO: 246087 - DNA, 25 bp, Probe sequence
gggaattttcatttcaacgtttgct

SEQ ID NO: 246088 - DNA, 25 bp, Probe sequence
ggtatcgatacatctgtttcatcaa

SEQ ID NO: 246089 - DNA, 25 bp, Probe sequence
tgggcttctttgtatttttatttgt

SEQ ID NO: 246090 - DNA, 25 bp, Probe sequence
tctgattggctatggtatattcgca

SEQ ID NO: 246091 - DNA, 25 bp, Probe sequence
tcttccctctcagatatgctggtga

SEQ ID NO: 246092 - DNA, 25 bp, Probe sequence
tagcaggtagcttatggtatgtaat

SEQ ID NO: 246093 - DNA, 25 bp, Probe sequence
tatgcctgattggctaggaaacatt

SEQ ID NO: 246094 - DNA, 25 bp, Probe sequence
ttattccactagttgctgtacctca

SEQ ID NO: 246095 - DNA, 25 bp, Probe sequence
tttccacttgaaaatatgcctgatt

SEQ ID NO: 246096 - DNA, 25 bp, Probe sequence
ttcgtcgaagtgaaatcgttcttgg

SEQ ID NO: 246097 - DNA, 25 bp, Probe sequence
atcgtattgagatttgggatagaga

SEQ ID NO: 246098 - DNA, 25 bp, Probe sequence
acctatgacaaaaaaagacgcacgt

SEQ ID NO: 246099 - DNA, 25 bp, Probe sequence
agtttatgcgtatgttcttctctgg

SEQ ID NO: 246100 - DNA, 25 bp, Probe sequence
aaatgtttattcggttacactctag

SEQ ID NO: 246101 - DNA, 25 bp, Probe sequence
aaacttggaatgatttctatgaaga

SEQ ID NO: 246102 - DNA, 25 bp, Probe sequence
aagaaagtttcgaagatattgctga

SEQ ID NO: 246103 - DNA, 25 bp, Probe sequence
aagacgcacgtaagtttatgcgtat

SEQ ID NO: 246104 - DNA, 25 bp, Probe sequence
caagaggccttgataaatgtttatt

SEQ ID NO: 246105 - DNA, 25 bp, Probe sequence
caaaacttgaggaaatacgctaatt

SEQ ID NO: 246106 - DNA, 25 bp, Probe sequence
ctaaagaatgtacagtaatcggtgt

SEQ ID NO: 246107 - DNA, 25 bp, Probe sequence
ctggtgctgttgaagtagaacttga

SEQ ID NO: 246108 - DNA, 25 bp, Probe sequence
cggttacactctagacgaatggcaa

SEQ ID NO: 246109 - DNA, 25 bp, Probe sequence
cgttttattatcacaagaggccttg

SEQ ID NO: 246110 - DNA, 25 bp, Probe sequence
gcgtattaacatccctcaaaacttg

SEQ ID NO: 246111 - DNA, 25 bp, Probe sequence
gattataccgtccaagtttcgttat

SEQ ID NO: 246112 - DNA, 25 bp, Probe sequence
gcaagggcgtattaacatccctcaa

SEQ ID NO: 246113 - DNA, 25 bp, Probe sequence
gaatacgatcatcaattagatacaa

SEQ ID NO: 246114 - DNA, 25 bp, Probe sequence
gaagatttaatagattttgattttt

SEQ ID NO: 246115 - DNA, 25 bp, Probe sequence
gaaaatgaaaaccttacctatgaca

SEQ ID NO: 246116 - DNA, 25 bp, Probe sequence
gagatttgggatagagaaacttgga

SEQ ID NO: 246117 - DNA, 25 bp, Probe sequence
gacgaatggcaacagattgaagaga

SEQ ID NO: 246118 - DNA, 25 bp, Probe sequence
gagcgttttattatcacaagaggcc

SEQ ID NO: 246119 - DNA, 25 bp, Probe sequence
gttcttctctggtgctgttgaagta

SEQ ID NO: 246120 - DNA, 25 bp, Probe sequence
gttcatgggagaatacgatcatcaa

SEQ ID NO: 246121 - DNA, 25 bp, Probe sequence
gttacactctagacgaatggcaaca

SEQ ID NO: 246122 - DNA, 25 bp, Probe sequence
gtttattcggttacactctagacga

SEQ ID NO: 246123 - DNA, 25 bp, Probe sequence
gtttcgttatgacttaaatgagcgt

SEQ ID NO: 246124 - DNA, 25 bp, Probe sequence
gtattaacatccctcaaaacttgag

SEQ ID NO: 246125 - DNA, 25 bp, Probe sequence
gtatgattataccgtccaagtttcg

SEQ ID NO: 246126 - DNA, 25 bp, Probe sequence
gtagaacttgataagcaagggcgta

SEQ ID NO: 246127 - DNA, 25 bp, Probe sequence
taccgtccaagtttcgttatgactt

SEQ ID NO: 246128 - DNA, 25 bp, Probe sequence
tatgttcttctctggtgctgttgaa

SEQ ID NO: 246129 - DNA, 25 bp, Probe sequence
tatgcgtatgttcttctctggtgct

SEQ ID NO: 246130 - DNA, 25 bp, Probe sequence
ttataccgtccaagtttcgttatga

SEQ ID NO: 246131 - DNA, 25 bp, Probe sequence
atagcaatcgatcaagaccaaactg

SEQ ID NO: 246132 - DNA, 25 bp, Probe sequence
agcactacgaattgcagtaaacgat

SEQ ID NO: 246133 - DNA, 25 bp, Probe sequence
acgacttgggtgtttcaagcccaca

SEQ ID NO: 246134 - DNA, 25 bp, Probe sequence
acattgactgtacgctaggtggagc

SEQ ID NO: 246135 - DNA, 25 bp, Probe sequence
acaattggtcatatgaagcgttagt

SEQ ID NO: 246136 - DNA, 25 bp, Probe sequence
aaggtccagaggtaccaagaggatt

SEQ ID NO: 246137 - DNA, 25 bp, Probe sequence
aaacgagtatttcaagcactacgaa

SEQ ID NO: 246138 - DNA, 25 bp, Probe sequence
aaacgatgaattgtcagcttttgaa

SEQ ID NO: 246139 - DNA, 25 bp, Probe sequence
cggtaatcactttccattctttaga

SEQ ID NO: 246140 - DNA, 25 bp, Probe sequence
cccacaactcgacattccagaacga

SEQ ID NO: 246141 - DNA, 25 bp, Probe sequence
gcgtatggaccaaacacaagaacta

SEQ ID NO: 246142 - DNA, 25 bp, Probe sequence
gcaacattagacatgcgtatggacc

SEQ ID NO: 246143 - DNA, 25 bp, Probe sequence
gcaacttccgtgaattaactcaaat

SEQ ID NO: 246144 - DNA, 25 bp, Probe sequence
gaaggtattcctgcaaaagcaagaa

SEQ ID NO: 246145 - DNA, 25 bp, Probe sequence
gaagaaaaggcggacatcctgcaaa

SEQ ID NO: 246146 - DNA, 25 bp, Probe sequence
gaagcgcgaaattacgtgtagctga

SEQ ID NO: 246147 - DNA, 25 bp, Probe sequence
gaagcgttagtgaagattttttatc

SEQ ID NO: 246148 - DNA, 25 bp, Probe sequence
gaaattttcaaaacagatagctcga

SEQ ID NO: 246149 - DNA, 25 bp, Probe sequence
gacaataacagagcacgaagcgcga

SEQ ID NO: 246150 - DNA, 25 bp, Probe sequence
gacttttgttcatagcaacttccgt

SEQ ID NO: 246151 - DNA, 25 bp, Probe sequence
gaggattcagttatcaccatgacgc

SEQ ID NO: 246152 - DNA, 25 bp, Probe sequence
gatagctcgaagaatcgaagcacat

SEQ ID NO: 246153 - DNA, 25 bp, Probe sequence
gttatcaccatgacgcaacattaga

SEQ ID NO: 246154 - DNA, 25 bp, Probe sequence
gtaaaccgattaccgctacagaaga

SEQ ID NO: 246155 - DNA, 25 bp, Probe sequence
gtaaacaggtgttccaagaatatga

SEQ ID NO: 246156 - DNA, 25 bp, Probe sequence
gtgtttcatcatatcagcgttatgt

SEQ ID NO: 246157 - DNA, 25 bp, Probe sequence
ggacatgccctttatttactaaatc

SEQ ID NO: 246158 - DNA, 25 bp, Probe sequence
ggcaggatttcggtaatcactttcc

SEQ ID NO: 246159 - DNA, 25 bp, Probe sequence
ggcggacatcctgcaaaacgagtat

SEQ ID NO: 246160 - DNA, 25 bp, Probe sequence
tgggtgtttcaagcccacaactcga

SEQ ID NO: 246161 - DNA, 25 bp, Probe sequence
tcgacattccagaacgaggattcag

SEQ ID NO: 246162 - DNA, 25 bp, Probe sequence
taaagcgtgttaatcgtaaaccgat

SEQ ID NO: 246163 - DNA, 25 bp, Probe sequence
taccagaagcatatacacctaagtt

SEQ ID NO: 246164 - DNA, 25 bp, Probe sequence
taggtggagcgggacatgcccttta

SEQ ID NO: 246165 - DNA, 25 bp, Probe sequence
ataccgaagcaacaaccacaaacta

SEQ ID NO: 246166 - DNA, 25 bp, Probe sequence
atgctatctttaaaaatggatgcgt

SEQ ID NO: 246167 - DNA, 25 bp, Probe sequence
aggtagtgcgtagtaatggcgaagc

SEQ ID NO: 246168 - DNA, 25 bp, Probe sequence
agtgcgtagtaatggcgaagcaaaa

SEQ ID NO: 246169 - DNA, 25 bp, Probe sequence
aaagtgtaccaaccatatgacgaac

SEQ ID NO: 246170 - DNA, 25 bp, Probe sequence
aagaattcttcttatgaacgcatat

SEQ ID NO: 246171 - DNA, 25 bp, Probe sequence
aagtgaaaacagtgctttacaatct

SEQ ID NO: 246172 - DNA, 25 bp, Probe sequence
aatggatgcgtatgatacgcgagga

SEQ ID NO: 246173 - DNA, 25 bp, Probe sequence
aatagtataccgaagcaacaaccac

SEQ ID NO: 246174 - DNA, 25 bp, Probe sequence
aattcttcttatgaacgcatatacg

SEQ ID NO: 246175 - DNA, 25 bp, Probe sequence
caaactaagcccgaaaagaagactg

SEQ ID NO: 246176 - DNA, 25 bp, Probe sequence
cagtgctttacaatctgaaatcaaa

SEQ ID NO: 246177 - DNA, 25 bp, Probe sequence
ccaaccatatgacgaacaagtttat

SEQ ID NO: 246178 - DNA, 25 bp, Probe sequence
gcaacaaccacaaactaagcccgaa

SEQ ID NO: 246179 - DNA, 25 bp, Probe sequence
gaagactgtttcgagaaaagtggtt

SEQ ID NO: 246180 - DNA, 25 bp, Probe sequence
gaagcaacaaccacaaactaagccc

SEQ ID NO: 246181 - DNA, 25 bp, Probe sequence
gaaaaggctaagaaacaggggatga

SEQ ID NO: 246182 - DNA, 25 bp, Probe sequence
gaacgcatatacgaaaaggctaaga

SEQ ID NO: 246183 - DNA, 25 bp, Probe sequence
gaaacaggggatgagccttgagaac

SEQ ID NO: 246184 - DNA, 25 bp, Probe sequence
gaaagattgcagatttagattataa

SEQ ID NO: 246185 - DNA, 25 bp, Probe sequence
gacgaacaagtttataatagtatac

SEQ ID NO: 246186 - DNA, 25 bp, Probe sequence
gatgagccttgagaacgataatgta

SEQ ID NO: 246187 - DNA, 25 bp, Probe sequence
gataatgtaaaggtagtgcgtagta

SEQ ID NO: 246188 - DNA, 25 bp, Probe sequence
gatacgcgaggaaagattgcagatt

SEQ ID NO: 246189 - DNA, 25 bp, Probe sequence
gttaagtatttatatgctatcttta

SEQ ID NO: 246190 - DNA, 25 bp, Probe sequence
gttttatacataactttgattactg

SEQ ID NO: 246191 - DNA, 25 bp, Probe sequence
gtttcgagaaaagtggttgtacaat

SEQ ID NO: 246192 - DNA, 25 bp, Probe sequence
gtataccgaagcaacaaccacaaac

SEQ ID NO: 246193 - DNA, 25 bp, Probe sequence
gtaattgctatgttaagtatttata

SEQ ID NO: 246194 - DNA, 25 bp, Probe sequence
gtgtaccaaccatatgacgaacaag

SEQ ID NO: 246195 - DNA, 25 bp, Probe sequence
gtggttgtacaattaactaaatttg

SEQ ID NO: 246196 - DNA, 25 bp, Probe sequence
ggggatgagccttgagaacgataat

SEQ ID NO: 246197 - DNA, 25 bp, Probe sequence
ggctgtagaaaaagtgtaccaacca

SEQ ID NO: 246198 - DNA, 25 bp, Probe sequence
tgattactgtaattgctatgttaag

SEQ ID NO: 246199 - DNA, 25 bp, Probe sequence
attttagcatacagtcagcgaccaa

SEQ ID NO: 246200 - DNA, 25 bp, Probe sequence
atacgctggtatgagcttggcacaa

SEQ ID NO: 246201 - DNA, 25 bp, Probe sequence
atgggttcacgtatttcagactgga

SEQ ID NO: 246202 - DNA, 25 bp, Probe sequence
atggcaattttgcatcacacttaat

SEQ ID NO: 246203 - DNA, 25 bp, Probe sequence
agatgtcattgcttttgaaaaccta

SEQ ID NO: 246204 - DNA, 25 bp, Probe sequence
agcgaccaacatttaatcctgaaac

SEQ ID NO: 246205 - DNA, 25 bp, Probe sequence
aaatcatatgggttagcagctgcta

SEQ ID NO: 246206 - DNA, 25 bp, Probe sequence
aaagtgccagatgttgaaggtcaag

SEQ ID NO: 246207 - DNA, 25 bp, Probe sequence
aaaacgtcatcatttggtcaatcga

SEQ ID NO: 246208 - DNA, 25 bp, Probe sequence
gaaaaatccggatactggtgaactt

SEQ ID NO: 246209 - DNA, 25 bp, Probe sequence
gcgcaatcagcgttctttaatgatg

SEQ ID NO: 246210 - DNA, 25 bp, Probe sequence
gcatcacacttaattggtagagctc

SEQ ID NO: 246211 - DNA, 25 bp, Probe sequence
gcagctgctattcaagaaggtgctt

SEQ ID NO: 246212 - DNA, 25 bp, Probe sequence
gaatagcgttgaaaatcctgttagt

SEQ ID NO: 246213 - DNA, 25 bp, Probe sequence
gaaggtgcttttgatcctgataaga

SEQ ID NO: 246214 - DNA, 25 bp, Probe sequence
gaagcacctggtcaaattggatgga

SEQ ID NO: 246215 - DNA, 25 bp, Probe sequence
gaagcagcctaaacgtggtgatgat

SEQ ID NO: 246216 - DNA, 25 bp, Probe sequence
gagcctggatcaacatttaaatcat

SEQ ID NO: 246217 - DNA, 25 bp, Probe sequence
gagacttaactatgcctgacatgtc

SEQ ID NO: 246218 - DNA, 25 bp, Probe sequence
gagtcacgctgcaaactatcgtatt

SEQ ID NO: 246219 - DNA, 25 bp, Probe sequence
gatgtccatttaacaatcgattcaa

SEQ ID NO: 246220 - DNA, 25 bp, Probe sequence
gataccagccgaaagatttatttgc

SEQ ID NO: 246221 - DNA, 25 bp, Probe sequence
gtcgctgcacctaatggtggtggat

SEQ ID NO: 246222 - DNA, 25 bp, Probe sequence
gtcactcggatttacttattcatct

SEQ ID NO: 246223 - DNA, 25 bp, Probe sequence
gggaataaagtcttacctcatagta

SEQ ID NO: 246224 - DNA, 25 bp, Probe sequence
gggtgaaatcccaatgtcactcgga

SEQ ID NO: 246225 - DNA, 25 bp, Probe sequence
ggtacagcacaagtcgctgcaccta

SEQ ID NO: 246226 - DNA, 25 bp, Probe sequence
ggttttgtgtcccaccaatcaatta

SEQ ID NO: 246227 - DNA, 25 bp, Probe sequence
ggactgctcttttttatattggttt

SEQ ID NO: 246228 - DNA, 25 bp, Probe sequence
ggcgagtgccaattctaaaaaacct

SEQ ID NO: 246229 - DNA, 25 bp, Probe sequence
tgcctggtatttctttattgcctga

SEQ ID NO: 246230 - DNA, 25 bp, Probe sequence
taggggcagtcctacttgttggttt

SEQ ID NO: 246231 - DNA, 25 bp, Probe sequence
tatttgcggttgtcatggatgccaa

SEQ ID NO: 246232 - DNA, 25 bp, Probe sequence
ttgttggtttattcggactgctctt

SEQ ID NO: 246233 - DNA, 25 bp, Probe sequence
attcctttgtccatcaattacatca

SEQ ID NO: 246234 - DNA, 25 bp, Probe sequence
attaattccatacgtacttggcata

SEQ ID NO: 246235 - DNA, 25 bp, Probe sequence
atatgtattacatccggtgctgtac

SEQ ID NO: 246236 - DNA, 25 bp, Probe sequence
atcaccaaaactaattccaaaccat

SEQ ID NO: 246237 - DNA, 25 bp, Probe sequence
atcacagtatattgccacaacgtgg

SEQ ID NO: 246238 - DNA, 25 bp, Probe sequence
acaacggtattttatctcctggaga

SEQ ID NO: 246239 - DNA, 25 bp, Probe sequence
aaaaggtatttatgtatcccagtat

SEQ ID NO: 246240 - DNA, 25 bp, Probe sequence
aaacaccatcatacattaattccat

SEQ ID NO: 246241 - DNA, 25 bp, Probe sequence
aaaagctatggcatcttagatacaa

SEQ ID NO: 246242 - DNA, 25 bp, Probe sequence
aatccacagttatacaagctttaga

SEQ ID NO: 246243 - DNA, 25 bp, Probe sequence
aatatactaatacacccaggagaaa

SEQ ID NO: 246244 - DNA, 25 bp, Probe sequence
caaggctcattttatatctggttta

SEQ ID NO: 246245 - DNA, 25 bp, Probe sequence
catccggtgctgtacaaggtttaaa

SEQ ID NO: 246246 - DNA, 25 bp, Probe sequence
cattaactctaaaagctatatccgc

SEQ ID NO: 246247 - DNA, 25 bp, Probe sequence
ctatatccgcttttcatactcatat

SEQ ID NO: 246248 - DNA, 25 bp, Probe sequence
ctcctggagataaattgtactcgca

SEQ ID NO: 246249 - DNA, 25 bp, Probe sequence
cgtacttggcataatatcagagcga

SEQ ID NO: 246250 - DNA, 25 bp, Probe sequence
gctgcataaccctactcaaaatact

SEQ ID NO: 246251 - DNA, 25 bp, Probe sequence
gcttttcatactcatatatcgacaa

SEQ ID NO: 246252 - DNA, 25 bp, Probe sequence
gaatttaatactgatatcgtccgat

SEQ ID NO: 246253 - DNA, 25 bp, Probe sequence
gaaccccaaggctcattttatatct

SEQ ID NO: 246254 - DNA, 25 bp, Probe sequence
gacggactgttaattccacaatcta

SEQ ID NO: 246255 - DNA, 25 bp, Probe sequence
gagcgaaaattattcctttgtccat

SEQ ID NO: 246256 - DNA, 25 bp, Probe sequence
gatatcgtccgattaggtactggag

SEQ ID NO: 246257 - DNA, 25 bp, Probe sequence
gattatataggcaacagcttttcta

SEQ ID NO: 246258 - DNA, 25 bp, Probe sequence
gtttacgtattggttggattatagc

SEQ ID NO: 246259 - DNA, 25 bp, Probe sequence
gtaattcatcatttagccgatttaa

SEQ ID NO: 246260 - DNA, 25 bp, Probe sequence
ggtactggagaactatcaccaaaac

SEQ ID NO: 246261 - DNA, 25 bp, Probe sequence
tggtttaagctatctgttccagtaa

SEQ ID NO: 246262 - DNA, 25 bp, Probe sequence
tcagccctaaccaacaaatttctat

SEQ ID NO: 246263 - DNA, 25 bp, Probe sequence
tactctgatttatggttcagcccta

SEQ ID NO: 246264 - DNA, 25 bp, Probe sequence
tactgtatacctacgctgcataacc

SEQ ID NO: 246265 - DNA, 25 bp, Probe sequence
tatggtgcaagttctatatcacagt

SEQ ID NO: 246266 - DNA, 25 bp, Probe sequence
ttaaaactaattgcagacggactgt

SEQ ID NO: 246267 - DNA, 25 bp, Probe sequence
attggtattttctgtatcattatgt

SEQ ID NO: 246268 - DNA, 25 bp, Probe sequence
atcaagctaatccaatcatactgtt

SEQ ID NO: 246269 - DNA, 25 bp, Probe sequence
atctgttatgttacaagtcgctagc

SEQ ID NO: 246270 - DNA, 25 bp, Probe sequence
atcggtttatggattggagtgcatt

SEQ ID NO: 246271 - DNA, 25 bp, Probe sequence
atgccatcatgagctttgtgttagg

SEQ ID NO: 246272 - DNA, 25 bp, Probe sequence
agtattgtgataacgtctttggtgg

SEQ ID NO: 246273 - DNA, 25 bp, Probe sequence
gaagactggtacaccaacgatgggt

SEQ ID NO: 246274 - DNA, 25 bp, Probe sequence
agcgctagtgattacatttgttttg

SEQ ID NO: 246275 - DNA, 25 bp, Probe sequence
acgagcatacatattccatttacga

SEQ ID NO: 246276 - DNA, 25 bp, Probe sequence
aaccctgctaaagtgtttatgggag

SEQ ID NO: 246277 - DNA, 25 bp, Probe sequence
aatcccactatcatttgcatatgtt

SEQ ID NO: 246278 - DNA, 25 bp, Probe sequence
ctggactgtcaattatcggatttac

SEQ ID NO: 246279 - DNA, 25 bp, Probe sequence
gatggattagcaactggactgtcaa

SEQ ID NO: 246280 - DNA, 25 bp, Probe sequence
gatgggtggactaacatttctatta

SEQ ID NO: 246281 - DNA, 25 bp, Probe sequence
gattacatttgttttggtacctgtt

SEQ ID NO: 246282 - DNA, 25 bp, Probe sequence
gtattttgggctgttggtctgattt

SEQ ID NO: 246283 - DNA, 25 bp, Probe sequence
gtatatgcgttattagcgctagtga

SEQ ID NO: 246284 - DNA, 25 bp, Probe sequence
gtatcattatgttgtttgcactttt

SEQ ID NO: 246285 - DNA, 25 bp, Probe sequence
gtcgctagctttaaattgactggaa

SEQ ID NO: 246286 - DNA, 25 bp, Probe sequence
gtgacgattggttttgggttaattg

SEQ ID NO: 246287 - DNA, 25 bp, Probe sequence
gggagatacaggtagcttagcttta

SEQ ID NO: 246288 - DNA, 25 bp, Probe sequence
ggtctgatttcaggtttaatcggtt

SEQ ID NO: 246289 - DNA, 25 bp, Probe sequence
ggtgaatttttctacgagcatacat

SEQ ID NO: 246290 - DNA, 25 bp, Probe sequence
ggtagcttagctttaggtggtatat

SEQ ID NO: 246291 - DNA, 25 bp, Probe sequence
tggtacctgttttaatacctacatt

SEQ ID NO: 246292 - DNA, 25 bp, Probe sequence
tgagtccgattcatcatcattttga

SEQ ID NO: 246293 - DNA, 25 bp, Probe sequence
tcggatttacaatgtatgccatcat

SEQ ID NO: 246294 - DNA, 25 bp, Probe sequence
taaacagaagtttttggcgcaaatt

SEQ ID NO: 246295 - DNA, 25 bp, Probe sequence
tactgttattatttgtgacgattgg

SEQ ID NO: 246296 - DNA, 25 bp, Probe sequence
tacgaatgtagcaatcccactatca

SEQ ID NO: 246297 - DNA, 25 bp, Probe sequence
tttcaatcatgcttaatcaggaatt

SEQ ID NO: 246298 - DNA, 25 bp, Probe sequence
ttttggcaagtaggtttttctaatg

SEQ ID NO: 246299 - DNA, 25 bp, Probe sequence
ttaccatataacattaaccctgcta

SEQ ID NO: 246300 - DNA, 25 bp, Probe sequence
ttgcacttttaggatttttaccata

SEQ ID NO: 246301 - DNA, 25 bp, Probe sequence
atacgagcaatattgtttcttcaaa

SEQ ID NO: 246302 - DNA, 25 bp, Probe sequence
ataacgcatgaatcgcaacctacaa

SEQ ID NO: 246303 - DNA, 25 bp, Probe sequence
accgcaatctttagctataacgcat

SEQ ID NO: 246304 - DNA, 25 bp, Probe sequence
aaatatttgtaattcctgaggctaa

SEQ ID NO: 246305 - DNA, 25 bp, Probe sequence
aaaaccttgattacaacagacttca

SEQ ID NO: 246306 - DNA, 25 bp, Probe sequence
aagctattgatggtcattcgaacat

SEQ ID NO: 246307 - DNA, 25 bp, Probe sequence
aagtgctttaccgcaatctttagct

SEQ ID NO: 246308 - DNA, 25 bp, Probe sequence
cattttcagattatgcggattcaat

SEQ ID NO: 246309 - DNA, 25 bp, Probe sequence
cattacaatgctgaccgaaatttaa

SEQ ID NO: 246310 - DNA, 25 bp, Probe sequence
ctggtgctgcagattgggttagtga

SEQ ID NO: 246311 - DNA, 25 bp, Probe sequence
ctgtctctgcaattgttgcaacggt

SEQ ID NO: 246312 - DNA, 25 bp, Probe sequence
ccaggttacagtactttgccaacag

SEQ ID NO: 246313 - DNA, 25 bp, Probe sequence
gcgtacgttttcgatataatgcact

SEQ ID NO: 246314 - DNA, 25 bp, Probe sequence
gcagcatttatcggtgattcatcac

SEQ ID NO: 246315 - DNA, 25 bp, Probe sequence
gcaacggtatcattaagtgctttac

SEQ ID NO: 246316 - DNA, 25 bp, Probe sequence
gaatcgcaacctacaaagcaacagc

SEQ ID NO: 246317 - DNA, 25 bp, Probe sequence
gaaaaagagccatggtcacaaccgc

SEQ ID NO: 246318 - DNA, 25 bp, Probe sequence
gaccagagcgttcaactgagcctga

SEQ ID NO: 246319 - DNA, 25 bp, Probe sequence
gatatcccgcaaaatgtttctgtaa

SEQ ID NO: 246320 - DNA, 25 bp, Probe sequence
gttgcttgattttgaacgaccagag

SEQ ID NO: 246321 - DNA, 25 bp, Probe sequence
gtatacaccagaacaattgccagcg

SEQ ID NO: 246322 - DNA, 25 bp, Probe sequence
gtaaatggtcacatgctgtagatca

SEQ ID NO: 246323 - DNA, 25 bp, Probe sequence
gtggaagatagttcgcccaaatatg

SEQ ID NO: 246324 - DNA, 25 bp, Probe sequence
gggttagtgatggtgcattttcaga

SEQ ID NO: 246325 - DNA, 25 bp, Probe sequence
ggtgattcatcacttgtggaagata

SEQ ID NO: 246326 - DNA, 25 bp, Probe sequence
ggacgtcaaatcggacaattttcaa

SEQ ID NO: 246327 - DNA, 25 bp, Probe sequence
ggcaatgaatggttatcgacgtgga

SEQ ID NO: 246328 - DNA, 25 bp, Probe sequence
tggtcacaaccgccgagtggttata

SEQ ID NO: 246329 - DNA, 25 bp, Probe sequence
tcctcagccaaacacaccagatgat

SEQ ID NO: 246330 - DNA, 25 bp, Probe sequence
tctcatggtcaaacagctggtgctg

SEQ ID NO: 246331 - DNA, 25 bp, Probe sequence
taagtcattaactgtctctgcaatt

SEQ ID NO: 246332 - DNA, 25 bp, Probe sequence
taaaactcggtgacaaaaccttgat

SEQ ID NO: 246333 - DNA, 25 bp, Probe sequence
tatctacaaactttggcgtacgttt

SEQ ID NO: 246334 - DNA, 25 bp, Probe sequence
ttattcgatcgttctcatggtcaaa

SEQ ID NO: 246335 - DNA, 25 bp, Probe sequence
attgaaagattccgtgcccatttac

SEQ ID NO: 246336 - DNA, 25 bp, Probe sequence
atagtttaactacattttcaggaat

SEQ ID NO: 246337 - DNA, 25 bp, Probe sequence
atattagcagctgtgcttgcttgta

SEQ ID NO: 246338 - DNA, 25 bp, Probe sequence
atatggaaaatgttcgcgcgatggt

SEQ ID NO: 246339 - DNA, 25 bp, Probe sequence
agttgtcgtcattccagttacttgg

SEQ ID NO: 246340 - DNA, 25 bp, Probe sequence
accacacattgctataattactaac

SEQ ID NO: 246341 - DNA, 25 bp, Probe sequence
acgacagttacttctctaattggag

SEQ ID NO: 246342 - DNA, 25 bp, Probe sequence
acacgctagcaacacagtttgcctt

SEQ ID NO: 246343 - DNA, 25 bp, Probe sequence
acacagtttgccttaaattcattta

SEQ ID NO: 246344 - DNA, 25 bp, Probe sequence
aaagcctacagattatttagttaca

SEQ ID NO: 246345 - DNA, 25 bp, Probe sequence
aagctaagacattgtatttctcaac

SEQ ID NO: 246346 - DNA, 25 bp, Probe sequence
aagttatctaatctctgaagcacca

SEQ ID NO: 246347 - DNA, 25 bp, Probe sequence
aagtcgcttaactggaagattatcc

SEQ ID NO: 246348 - DNA, 25 bp, Probe sequence
aattcatttaatcaaccaatcattt

SEQ ID NO: 246349 - DNA, 25 bp, Probe sequence
ctgaagcaccaatcatagctgtaac

SEQ ID NO: 246350 - DNA, 25 bp, Probe sequence
gcgaacaatgtcgaagacgctgttg

SEQ ID NO: 246351 - DNA, 25 bp, Probe sequence
gcgcatctagattaccatgaaaatt

SEQ ID NO: 246352 - DNA, 25 bp, Probe sequence
gaagattatccggcaatattggtta

SEQ ID NO: 246353 - DNA, 25 bp, Probe sequence
gaaaagtataaaccacacattgcta

SEQ ID NO: 246354 - DNA, 25 bp, Probe sequence
gatgaagcagtgaaacgaggtttga

SEQ ID NO: 246355 - DNA, 25 bp, Probe sequence
gttgtattattgtcacctgcttgtg

SEQ ID NO: 246356 - DNA, 25 bp, Probe sequence
gttcgcgcgatggttgtattcggac

SEQ ID NO: 246357 - DNA, 25 bp, Probe sequence
gttacagagttgtcgtcattccagt

SEQ ID NO: 246358 - DNA, 25 bp, Probe sequence
gtattgcctggtgaacataatttag

SEQ ID NO: 246359 - DNA, 25 bp, Probe sequence
gtacttttgaagagcgtggagagaa

SEQ ID NO: 246360 - DNA, 25 bp, Probe sequence
gtcgaagacgctgttgataaagtac

SEQ ID NO: 246361 - DNA, 25 bp, Probe sequence
gtgcttgcttgtattttagctggtg

SEQ ID NO: 246362 - DNA, 25 bp, Probe sequence
gggaaatcggtcattgaagcgaaca

SEQ ID NO: 246363 - DNA, 25 bp, Probe sequence
ggttatgttgcatctaaagtagcac

SEQ ID NO: 246364 - DNA, 25 bp, Probe sequence
ggttatgtggtggtttggatcgagg

SEQ ID NO: 246365 - DNA, 25 bp, Probe sequence
taatgattccaaagcaacaaacacg

SEQ ID NO: 246366 - DNA, 25 bp, Probe sequence
tttctgttgtaagtggaagtcatcc

SEQ ID NO: 246367 - DNA, 25 bp, Probe sequence
tttagctggtgtacctattaaagca

SEQ ID NO: 246368 - DNA, 25 bp, Probe sequence
ttgacgaactcattccttatatgga

SEQ ID NO: 246369 - DNA, 25 bp, Probe sequence
attgatttatcagtcggtgcttcat

SEQ ID NO: 246370 - DNA, 25 bp, Probe sequence
atttacgaggaatacatctaagaaa

SEQ ID NO: 246371 - DNA, 25 bp, Probe sequence
atcccataccgtggaaacacgtcta

SEQ ID NO: 246372 - DNA, 25 bp, Probe sequence
atcggtgatatttcgacgatatcta

SEQ ID NO: 246373 - DNA, 25 bp, Probe sequence
atgtgactaaatcatctcaagagga

SEQ ID NO: 246374 - DNA, 25 bp, Probe sequence
accacttagtaaaattgcgcatgta

SEQ ID NO: 246375 - DNA, 25 bp, Probe sequence
acatctcaacaagctgattttgatg

SEQ ID NO: 246376 - DNA, 25 bp, Probe sequence
aaatgctattaatgatctcgaagag

SEQ ID NO: 246377 - DNA, 25 bp, Probe sequence
aaaggctacacatttttctaatcaa

SEQ ID NO: 246378 - DNA, 25 bp, Probe sequence
aaagcagaattgaattgtttacgac

SEQ ID NO: 246379 - DNA, 25 bp, Probe sequence
aataatcacgttagtacttcaaaga

SEQ ID NO: 246380 - DNA, 25 bp, Probe sequence
aatatcgatgattctacagactcta

SEQ ID NO: 246381 - DNA, 25 bp, Probe sequence
aatttacatgttttcaccacttagt

SEQ ID NO: 246382 - DNA, 25 bp, Probe sequence
caaacacattaaacgtagatatcac

SEQ ID NO: 246383 - DNA, 25 bp, Probe sequence
gcttcatttatcccataccgtggaa

SEQ ID NO: 246384 - DNA, 25 bp, Probe sequence
gaagtgacatacgccccaagtaaaa

SEQ ID NO: 246385 - DNA, 25 bp, Probe sequence
gaatccaatacagtgttattacaat

SEQ ID NO: 246386 - DNA, 25 bp, Probe sequence
gaagttagacgatatattgccgaag

SEQ ID NO: 246387 - DNA, 25 bp, Probe sequence
gaaatgacacctgaagttagacgat

SEQ ID NO: 246388 - DNA, 25 bp, Probe sequence
gaaatattatccgcagatgtcacaa

SEQ ID NO: 246389 - DNA, 25 bp, Probe sequence
gatggacttcaagtaatcggtgata

SEQ ID NO: 246390 - DNA, 25 bp, Probe sequence
gatgtcaaaattaatgatgcacctg

SEQ ID NO: 246391 - DNA, 25 bp, Probe sequence
gatgatacatctcaacaagctgatt

SEQ ID NO: 246392 - DNA, 25 bp, Probe sequence
gatgcacctgtcatggatggtttca

SEQ ID NO: 246393 - DNA, 25 bp, Probe sequence
gatacacaagcaattaccaaacaca

SEQ ID NO: 246394 - DNA, 25 bp, Probe sequence
gattctacagactctaatattgaaa

SEQ ID NO: 246395 - DNA, 25 bp, Probe sequence
gtattgttgattgctgttatattaa

SEQ ID NO: 246396 - DNA, 25 bp, Probe sequence
gtcatggatggtttcaaaggtacaa

SEQ ID NO: 246397 - DNA, 25 bp, Probe sequence
gtgacatacgccccaagtaaaaaca

SEQ ID NO: 246398 - DNA, 25 bp, Probe sequence
ggtaaattgcttaaaggttcaaatg

SEQ ID NO: 246399 - DNA, 25 bp, Probe sequence
ggcgttatctgaaatgacacctgaa

SEQ ID NO: 246400 - DNA, 25 bp, Probe sequence
tatattgccgaagtgacatacgccc

SEQ ID NO: 246401 - DNA, 25 bp, Probe sequence
tcagtcggtgcttcatttatcccat

SEQ ID NO: 246402 - DNA, 25 bp, Probe sequence
ttatccgcagatgtcacaatcatta

SEQ ID NO: 246403 - DNA, 25 bp, Probe sequence
attcacacgccatcacaaatgggaa

SEQ ID NO: 246404 - DNA, 25 bp, Probe sequence
attgatgattttgatattgcgcgac

SEQ ID NO: 246405 - DNA, 25 bp, Probe sequence
attgccagacattcattaaaggttg

SEQ ID NO: 246406 - DNA, 25 bp, Probe sequence
attacctatcattggaacggaagtt

SEQ ID NO: 246407 - DNA, 25 bp, Probe sequence
attacagacgatattgcacaaggat

SEQ ID NO: 246408 - DNA, 25 bp, Probe sequence
attttcttcagcaatttctacaatt

SEQ ID NO: 246409 - DNA, 25 bp, Probe sequence
atggttcaatcctaacagctactga

SEQ ID NO: 246410 - DNA, 25 bp, Probe sequence
aaaggcatcaatcgcttcgggtgtt

SEQ ID NO: 246411 - DNA, 25 bp, Probe sequence
aaacacttcttatgaaactgctgaa

SEQ ID NO: 246412 - DNA, 25 bp, Probe sequence
aagttagaattcacacgccatcaca

SEQ ID NO: 246413 - DNA, 25 bp, Probe sequence
aagagttaggtgcatgtgtcattga

SEQ ID NO: 246414 - DNA, 25 bp, Probe sequence
aatggcagggcgtgatattacagac

SEQ ID NO: 246415 - DNA, 25 bp, Probe sequence
aatttctagtagtatcgcttttgat

SEQ ID NO: 246416 - DNA, 25 bp, Probe sequence
caatcgcttcgggtgttgatattaa

SEQ ID NO: 246417 - DNA, 25 bp, Probe sequence
gcgcgacaagcaatcaaagacacaa

SEQ ID NO: 246418 - DNA, 25 bp, Probe sequence
gcattctatgattctgcttcagatc

SEQ ID NO: 246419 - DNA, 25 bp, Probe sequence
gcaagttgctttttatgaacgcggt

SEQ ID NO: 246420 - DNA, 25 bp, Probe sequence
gcacaaggattaaacacttcttatg

SEQ ID NO: 246421 - DNA, 25 bp, Probe sequence
gaagttttcctgaaattacctatca

SEQ ID NO: 246422 - DNA, 25 bp, Probe sequence
gaagcaggcgtaattgctattcaaa

SEQ ID NO: 246423 - DNA, 25 bp, Probe sequence
gaacgcggtgaattagtagatgctg

SEQ ID NO: 246424 - DNA, 25 bp, Probe sequence
gaaaatgaggtttcagaccctaaag

SEQ ID NO: 246425 - DNA, 25 bp, Probe sequence
gaaatcgacttttatgaggatacag

SEQ ID NO: 246426 - DNA, 25 bp, Probe sequence
gaaatcaacggttcacatatcgaaa

SEQ ID NO: 246427 - DNA, 25 bp, Probe sequence
gaccctaaagaattaattgccagac

SEQ ID NO: 246428 - DNA, 25 bp, Probe sequence
gagtgactttattgaagcgcgtgta

SEQ ID NO: 246429 - DNA, 25 bp, Probe sequence
gatgctgattctatcgaaatggcag

SEQ ID NO: 246430 - DNA, 25 bp, Probe sequence
gatcaagatatcttcactgttgaac

SEQ ID NO: 246431 - DNA, 25 bp, Probe sequence
gtaggcgagaaatttcacaatggta

SEQ ID NO: 246432 - DNA, 25 bp, Probe sequence
gtgggtttattgtaactggtggatc

SEQ ID NO: 246433 - DNA, 25 bp, Probe sequence
gtggtgttgatgtattagatgttta

SEQ ID NO: 246434 - DNA, 25 bp, Probe sequence
ggtgaagacgttacgcaagttgctt

SEQ ID NO: 246435 - DNA, 25 bp, Probe sequence
ggtacaggacaaacctacacgagcg

SEQ ID NO: 246436 - DNA, 25 bp, Probe sequence
taggcggatttgattggtttaaacg

SEQ ID NO: 246437 - DNA, 25 bp, Probe sequence
agatattccaaagacggttagcgtc

SEQ ID NO: 246438 - DNA, 25 bp, Probe sequence
ataagcggttgctctttcatatcaa

SEQ ID NO: 246439 - DNA, 25 bp, Probe sequence
ataataagcggttgctctttcatat

SEQ ID NO: 246440 - DNA, 25 bp, Probe sequence
atcaatcataataagcggttgctct

SEQ ID NO: 246441 - DNA, 25 bp, Probe sequence
atgcgaatcttattatgcacatcaa

SEQ ID NO: 246442 - DNA, 25 bp, Probe sequence
atgatggtaaatatattggtgaaca

SEQ ID NO: 246443 - DNA, 25 bp, Probe sequence
agcggttgctctttcatatcaaaga

SEQ ID NO: 246444 - DNA, 25 bp, Probe sequence
aaaaattatgcgaatcttattatgc

SEQ ID NO: 246445 - DNA, 25 bp, Probe sequence
aatctggatttagcgaaaaagtaag

SEQ ID NO: 246446 - DNA, 25 bp, Probe sequence
aagcggttgctctttcatatcaaag

SEQ ID NO: 246447 - DNA, 25 bp, Probe sequence
aagatattccaaagacggttagcgt

SEQ ID NO: 246448 - DNA, 25 bp, Probe sequence
aatcataataagcggttgctctttc

SEQ ID NO: 246449 - DNA, 25 bp, Probe sequence
aataagcggttgctctttcatatca

SEQ ID NO: 246450 - DNA, 25 bp, Probe sequence
aattaatttagttgaggcctatact

SEQ ID NO: 246451 - DNA, 25 bp, Probe sequence
cataataagcggttgctctttcata

SEQ ID NO: 246452 - DNA, 25 bp, Probe sequence
gctctttcatatcaaagaaccaaac

SEQ ID NO: 246453 - DNA, 25 bp, Probe sequence
gcgaatcttattatgcacatcaatc

SEQ ID NO: 246454 - DNA, 25 bp, Probe sequence
gcggttgctctttcatatcaaagaa

SEQ ID NO: 246455 - DNA, 25 bp, Probe sequence
gaatcttattatgcacatcaatcat

SEQ ID NO: 246456 - DNA, 25 bp, Probe sequence
gaaagatacatttggttatgattgt

SEQ ID NO: 246457 - DNA, 25 bp, Probe sequence
gactatgtgaaagatacatttggtt

SEQ ID NO: 246458 - DNA, 25 bp, Probe sequence
gacggttagcgtcaaaaattatgat

SEQ ID NO: 246459 - DNA, 25 bp, Probe sequence
gaggcctatactaataaatctggat

SEQ ID NO: 246460 - DNA, 25 bp, Probe sequence
gttgaggcctatactaataaatctg

SEQ ID NO: 246461 - DNA, 25 bp, Probe sequence
gttgctctttcatatcaaagaacca

SEQ ID NO: 246462 - DNA, 25 bp, Probe sequence
gttagcgtcaaaaattatgatggta

SEQ ID NO: 246463 - DNA, 25 bp, Probe sequence
ggttgctctttcatatcaaagaacc

SEQ ID NO: 246464 - DNA, 25 bp, Probe sequence
ggcctatactaataaatctggattt

SEQ ID NO: 246465 - DNA, 25 bp, Probe sequence
tgcacatcaatcataataagcggtt

SEQ ID NO: 246466 - DNA, 25 bp, Probe sequence
tcataataagcggttgctctttcat

SEQ ID NO: 246467 - DNA, 25 bp, Probe sequence
taataagcggttgctctttcatatc

SEQ ID NO: 246468 - DNA, 25 bp, Probe sequence
taagcggttgctctttcatatcaaa

SEQ ID NO: 246469 - DNA, 25 bp, Probe sequence
tattccaaagacggttagcgtcaaa

SEQ ID NO: 246470 - DNA, 25 bp, Probe sequence
ttatgcgaatcttattatgcacatc

SEQ ID NO: 246471 - DNA, 25 bp, Probe sequence
atcagcggcagttgcagccatgatg

SEQ ID NO: 246472 - DNA, 25 bp, Probe sequence
atagctatcacaacatttacacctg

SEQ ID NO: 246473 - DNA, 25 bp, Probe sequence
atcacaacatttacacctggtcata

SEQ ID NO: 246474 - DNA, 25 bp, Probe sequence
atgaaacatcagcggcagttgcagc

SEQ ID NO: 246475 - DNA, 25 bp, Probe sequence
atgtttggaacctacaaaaatctat

SEQ ID NO: 246476 - DNA, 25 bp, Probe sequence
agcggcagttgcagccatgatgtat

SEQ ID NO: 246477 - DNA, 25 bp, Probe sequence
acagagagactgttgctaactatgt

SEQ ID NO: 246478 - DNA, 25 bp, Probe sequence
aacatcagcggcagttgcagccatg

SEQ ID NO: 246479 - DNA, 25 bp, Probe sequence
aacggttattatgccatgaatgaaa

SEQ ID NO: 246480 - DNA, 25 bp, Probe sequence
caatggtgttactaaacaatttttg

SEQ ID NO: 246481 - DNA, 25 bp, Probe sequence
caagaattcaatggtgttactaaac

SEQ ID NO: 246482 - DNA, 25 bp, Probe sequence
caacatttacacctggtcatataaa

SEQ ID NO: 246483 - DNA, 25 bp, Probe sequence
gctatcacaacatttacacctggtc

SEQ ID NO: 246484 - DNA, 25 bp, Probe sequence
gcagttgcagccatgatgtataagc

SEQ ID NO: 246485 - DNA, 25 bp, Probe sequence
gcagccatgatgtataagcgttatg

SEQ ID NO: 246486 - DNA, 25 bp, Probe sequence
gaagtccgagtttattgcctattac

SEQ ID NO: 246487 - DNA, 25 bp, Probe sequence
gaatttcaacacagacagtatcgat

SEQ ID NO: 246488 - DNA, 25 bp, Probe sequence
gaacctgaaattgaacaagctcgat

SEQ ID NO: 246489 - DNA, 25 bp, Probe sequence
gaacaagctcgattaaaattcaaat

SEQ ID NO: 246490 - DNA, 25 bp, Probe sequence
gaaaaacggttattatgccatgaat

SEQ ID NO: 246491 - DNA, 25 bp, Probe sequence
gagactgttgctaactatgtttgga

SEQ ID NO: 246492 - DNA, 25 bp, Probe sequence
gatgcattaaatcaacaattacaat

SEQ ID NO: 246493 - DNA, 25 bp, Probe sequence
gatatttgttgagtctggaaatggc

SEQ ID NO: 246494 - DNA, 25 bp, Probe sequence
gttgagtctggaaatggcatagcta

SEQ ID NO: 246495 - DNA, 25 bp, Probe sequence
gttgctaactatgtttggaacctac

SEQ ID NO: 246496 - DNA, 25 bp, Probe sequence
gtataagcgttatgaacctgaaatt

SEQ ID NO: 246497 - DNA, 25 bp, Probe sequence
gtccgagtttattgcctattacgat

SEQ ID NO: 246498 - DNA, 25 bp, Probe sequence
ggcatagctatcacaacatttacac

SEQ ID NO: 246499 - DNA, 25 bp, Probe sequence
tggaaatggcatagctatcacaaca

SEQ ID NO: 246500 - DNA, 25 bp, Probe sequence
tcaacacagacagtatcgatgattt

SEQ ID NO: 246501 - DNA, 25 bp, Probe sequence
tacacctggtcatataaatgaaaca

SEQ ID NO: 246502 - DNA, 25 bp, Probe sequence
tatgaagtccgagtttattgcctat

SEQ ID NO: 246503 - DNA, 25 bp, Probe sequence
ttattgcctattacgataaaggtga

SEQ ID NO: 246504 - DNA, 25 bp, Probe sequence
ttaataaatatcctcaaatacaaaa

SEQ ID NO: 246505 - DNA, 25 bp, Probe sequence
atcgttgacaaatctacgccaatga

SEQ ID NO: 246506 - DNA, 25 bp, Probe sequence
atctcttctccattacttgaaacat

SEQ ID NO: 246507 - DNA, 25 bp, Probe sequence
acgccgtaaaccgaatgattgacca

SEQ ID NO: 246508 - DNA, 25 bp, Probe sequence
acaaggtatctcagacttaatcgct

SEQ ID NO: 246509 - DNA, 25 bp, Probe sequence
aaatgggcgcattaactgttggtgt

SEQ ID NO: 246510 - DNA, 25 bp, Probe sequence
aaagctgcagaggaatctcgtgaac

SEQ ID NO: 246511 - DNA, 25 bp, Probe sequence
aaacgtcaaactcaagctgctgctg

SEQ ID NO: 246512 - DNA, 25 bp, Probe sequence
aaaaagcaatctcttctccattact

SEQ ID NO: 246513 - DNA, 25 bp, Probe sequence
aacgtgttacgccaaggtgtacaag

SEQ ID NO: 246514 - DNA, 25 bp, Probe sequence
aagaggctgctgatattgtccaaga

SEQ ID NO: 246515 - DNA, 25 bp, Probe sequence
aatgggtattggtgtttcttctggt

SEQ ID NO: 246516 - DNA, 25 bp, Probe sequence
aatcattcacttcaaattcatcaaa

SEQ ID NO: 246517 - DNA, 25 bp, Probe sequence
aatacttctagcaatgcaacttcta

SEQ ID NO: 246518 - DNA, 25 bp, Probe sequence
catggtcgtaaatctggtagcactg

SEQ ID NO: 246519 - DNA, 25 bp, Probe sequence
gctgaatctaaaatccaaatcggtg

SEQ ID NO: 246520 - DNA, 25 bp, Probe sequence
gctgctgctggagtagaagctatga

SEQ ID NO: 246521 - DNA, 25 bp, Probe sequence
gcttatgaatattactggtggcgag

SEQ ID NO: 246522 - DNA, 25 bp, Probe sequence
gcaatccaaggtgcagacatggtat

SEQ ID NO: 246523 - DNA, 25 bp, Probe sequence
gaaacatctatcgttggtgcacaag

SEQ ID NO: 246524 - DNA, 25 bp, Probe sequence
gacaattatgtctaaccaaggttct

SEQ ID NO: 246525 - DNA, 25 bp, Probe sequence
gacatggtatttgttacttctggta

SEQ ID NO: 246526 - DNA, 25 bp, Probe sequence
gacaaaccaacatcacatggtcgta

SEQ ID NO: 246527 - DNA, 25 bp, Probe sequence
gacttaatcgctgtttctggtgaag

SEQ ID NO: 246528 - DNA, 25 bp, Probe sequence
gacggtcaagctttaaacttatcta

SEQ ID NO: 246529 - DNA, 25 bp, Probe sequence
gaccgtttattagatatcgttgaca

SEQ ID NO: 246530 - DNA, 25 bp, Probe sequence
gatattgtccaagatgctgcagatg

SEQ ID NO: 246531 - DNA, 25 bp, Probe sequence
gttggtgttgtaactcgtccattta

SEQ ID NO: 246532 - DNA, 25 bp, Probe sequence
gtatgggtggcggaactggtactgg

SEQ ID NO: 246533 - DNA, 25 bp, Probe sequence
gtagcactggattcggaacaagcgt

SEQ ID NO: 246534 - DNA, 25 bp, Probe sequence
ggtggcgagtcattgtcattatttg

SEQ ID NO: 246535 - DNA, 25 bp, Probe sequence
ggtcattggtgtaggtggtggcggt

SEQ ID NO: 246536 - DNA, 25 bp, Probe sequence
taatcgttataccaaatgaccgttt

SEQ ID NO: 246537 - DNA, 25 bp, Probe sequence
taaacttagactttgcagacgttaa

SEQ ID NO: 246538 - DNA, 25 bp, Probe sequence
ttatcgctatcaacacagacggtca

SEQ ID NO: 246539 - DNA, 25 bp, Probe sequence
attgaaactagaggacgagatcgtc

SEQ ID NO: 246540 - DNA, 25 bp, Probe sequence
attagctgaagaaattgcgtttgat

SEQ ID NO: 246541 - DNA, 25 bp, Probe sequence
attatggtgttcctaaagaaaatat

SEQ ID NO: 246542 - DNA, 25 bp, Probe sequence
atacgacagcgtatgctacatctga

SEQ ID NO: 246543 - DNA, 25 bp, Probe sequence
agtgccaactatattgaaactagag

SEQ ID NO: 246544 - DNA, 25 bp, Probe sequence
agtgctaaaacatgtgaactttgat

SEQ ID NO: 246545 - DNA, 25 bp, Probe sequence
agtaatgtcttattaacgatgtgtt

SEQ ID NO: 246546 - DNA, 25 bp, Probe sequence
actgtgtaccagtatatttttatag

SEQ ID NO: 246547 - DNA, 25 bp, Probe sequence
actcaacatcaattgcaattagctg

SEQ ID NO: 246548 - DNA, 25 bp, Probe sequence
acattgccaattgatagtgccaact

SEQ ID NO: 246549 - DNA, 25 bp, Probe sequence
aaacacatgaaaataaagtcgcttg

SEQ ID NO: 246550 - DNA, 25 bp, Probe sequence
aactgatgcgcttcatggtattgat

SEQ ID NO: 246551 - DNA, 25 bp, Probe sequence
aacgatgtgttatgcagactgtgta

SEQ ID NO: 246552 - DNA, 25 bp, Probe sequence
aaggtcaaacaggacgcatgttagc

SEQ ID NO: 246553 - DNA, 25 bp, Probe sequence
cactttaactgatgcgcttcatggt

SEQ ID NO: 246554 - DNA, 25 bp, Probe sequence
gcccatataatattactcaacatca

SEQ ID NO: 246555 - DNA, 25 bp, Probe sequence
gcgatgtacacatatgatagtaatg

SEQ ID NO: 246556 - DNA, 25 bp, Probe sequence
gcgtatgctacatctgaacatttag

SEQ ID NO: 246557 - DNA, 25 bp, Probe sequence
gacagcgtatgctacatctgaacat

SEQ ID NO: 246558 - DNA, 25 bp, Probe sequence
gagatcgtcatggtattgatttgaa

SEQ ID NO: 246559 - DNA, 25 bp, Probe sequence
gatttgaaagacttacatgtcgtta

SEQ ID NO: 246560 - DNA, 25 bp, Probe sequence
gttagcattcattggtcaacagtaa

SEQ ID NO: 246561 - DNA, 25 bp, Probe sequence
gttattggaccatctacatcatcaa

SEQ ID NO: 246562 - DNA, 25 bp, Probe sequence
ggtattgatgcgatgtacacatatg

SEQ ID NO: 246563 - DNA, 25 bp, Probe sequence
ggacgcatgttagcattcattggtc

SEQ ID NO: 246564 - DNA, 25 bp, Probe sequence
ggaccatctacatcatcaagttatg

SEQ ID NO: 246565 - DNA, 25 bp, Probe sequence
ggacgagatcgtcatggtattgatt

SEQ ID NO: 246566 - DNA, 25 bp, Probe sequence
ggcgtggtacctatactgaaattgt

SEQ ID NO: 246567 - DNA, 25 bp, Probe sequence
tgtgttatgcagactgtgtaccagt

SEQ ID NO: 246568 - DNA, 25 bp, Probe sequence
tgcgcttcatggtattgatgcgatg

SEQ ID NO: 246569 - DNA, 25 bp, Probe sequence
tacatgtcgttattggaccatctac

SEQ ID NO: 246570 - DNA, 25 bp, Probe sequence
tagacactttaactgatgcgcttca

SEQ ID NO: 246571 - DNA, 25 bp, Probe sequence
taggcacaaatatagacactttaac

SEQ ID NO: 246572 - DNA, 25 bp, Probe sequence
ttatttttctcttatcgattagaaa

SEQ ID NO: 246573 - DNA, 25 bp, Probe sequence
atttccatgctttagatcgattgag

SEQ ID NO: 246574 - DNA, 25 bp, Probe sequence
atgagtaatgactatcttattgcag

SEQ ID NO: 246575 - DNA, 25 bp, Probe sequence
acgactcaatttagaatatgcgcct

SEQ ID NO: 246576 - DNA, 25 bp, Probe sequence
acgatggcaccattgacagatgatg

SEQ ID NO: 246577 - DNA, 25 bp, Probe sequence
acaacaaatctcaacacaaattaat

SEQ ID NO: 246578 - DNA, 25 bp, Probe sequence
aaatatgttacaatagagcgagcta

SEQ ID NO: 246579 - DNA, 25 bp, Probe sequence
aaagaagaaatacaacgactcaatt

SEQ ID NO: 246580 - DNA, 25 bp, Probe sequence
aaaccaaacgtgattgcagttacaa

SEQ ID NO: 246581 - DNA, 25 bp, Probe sequence
aaaattaaatgtttcttgcaagtga

SEQ ID NO: 246582 - DNA, 25 bp, Probe sequence
aacgacgtagattatttccatgctt

SEQ ID NO: 246583 - DNA, 25 bp, Probe sequence
aatgactatcttattgcagttgaag

SEQ ID NO: 246584 - DNA, 25 bp, Probe sequence
aatatgcgccttgtgatgaattatc

SEQ ID NO: 246585 - DNA, 25 bp, Probe sequence
gcgccttgtgatgaattatcaatgg

SEQ ID NO: 246586 - DNA, 25 bp, Probe sequence
gctttagatcgattgagcttagcca

SEQ ID NO: 246587 - DNA, 25 bp, Probe sequence
gaattgggactaaacttgtaggaga

SEQ ID NO: 246588 - DNA, 25 bp, Probe sequence
gaagatgttgatcagtttatagatg

SEQ ID NO: 246589 - DNA, 25 bp, Probe sequence
gaagcgtatgaggctggaataagac

SEQ ID NO: 246590 - DNA, 25 bp, Probe sequence
gaagcattaccatcagatgcggtga

SEQ ID NO: 246591 - DNA, 25 bp, Probe sequence
gaagcatatattagatcgttattta

SEQ ID NO: 246592 - DNA, 25 bp, Probe sequence
gaaattaacaaacgtgcagaacata

SEQ ID NO: 246593 - DNA, 25 bp, Probe sequence
gacgtagattatttccatgctttag

SEQ ID NO: 246594 - DNA, 25 bp, Probe sequence
gagcgagctaaagaagcgtatgagg

SEQ ID NO: 246595 - DNA, 25 bp, Probe sequence
gaggctggaataagacattttggtg

SEQ ID NO: 246596 - DNA, 25 bp, Probe sequence
gatcgattgagcttagccaaagaaa

SEQ ID NO: 246597 - DNA, 25 bp, Probe sequence
gataatttacaacaaatctcaacac

SEQ ID NO: 246598 - DNA, 25 bp, Probe sequence
gtttcttgcaagtgaacgtttcggg

SEQ ID NO: 246599 - DNA, 25 bp, Probe sequence
gtaggtttaatgacgatggcaccat

SEQ ID NO: 246600 - DNA, 25 bp, Probe sequence
gtgaacgtttcgggagaagcttcta

SEQ ID NO: 246601 - DNA, 25 bp, Probe sequence
gtgagaatagattggaaggcttttt

SEQ ID NO: 246602 - DNA, 25 bp, Probe sequence
ggtattgctttagaagatgttgatc

SEQ ID NO: 246603 - DNA, 25 bp, Probe sequence
ggcaccattgacagatgatgaagca

SEQ ID NO: 246604 - DNA, 25 bp, Probe sequence
tagatcgttatttaaacagttacgt

SEQ ID NO: 246605 - DNA, 25 bp, Probe sequence
tttagaatatgcgccttgtgatgaa

SEQ ID NO: 246606 - DNA, 25 bp, Probe sequence
ttataggatcattacaatctcgaaa

SEQ ID NO: 246607 - DNA, 25 bp, Probe sequence
ataattcacgtaatgttgtaactat

SEQ ID NO: 246608 - DNA, 25 bp, Probe sequence
agtccctcaaaaatctgcatcaaga

SEQ ID NO: 246609 - DNA, 25 bp, Probe sequence
acgcctgataatgtggaagtagctg

SEQ ID NO: 246610 - DNA, 25 bp, Probe sequence
acgcaatcaaatcagtccctcaaaa

SEQ ID NO: 246611 - DNA, 25 bp, Probe sequence
acgtgtaggtactgatattttctta

SEQ ID NO: 246612 - DNA, 25 bp, Probe sequence
aaatgtgtttattcgaaccacgtgt

SEQ ID NO: 246613 - DNA, 25 bp, Probe sequence
aaaacgcaatcaaatcagtccctca

SEQ ID NO: 246614 - DNA, 25 bp, Probe sequence
aactatgaacaatgctacaccaaac

SEQ ID NO: 246615 - DNA, 25 bp, Probe sequence
aagcggtactgtttatgcaatcggt

SEQ ID NO: 246616 - DNA, 25 bp, Probe sequence
aatcagtccctcaaaaatctgcatc

SEQ ID NO: 246617 - DNA, 25 bp, Probe sequence
cgaaccacgtgttttttcagataca

SEQ ID NO: 246618 - DNA, 25 bp, Probe sequence
cgccgtgcgacacttgtcaatttac

SEQ ID NO: 246619 - DNA, 25 bp, Probe sequence
gctgatgagcttaaaaaccgccgtg

SEQ ID NO: 246620 - DNA, 25 bp, Probe sequence
gctacaccaaacaatgcatcacaag

SEQ ID NO: 246621 - DNA, 25 bp, Probe sequence
gcatcaagatatacaacaacgtcag

SEQ ID NO: 246622 - DNA, 25 bp, Probe sequence
gcaatcggtggagatatccaacgtg

SEQ ID NO: 246623 - DNA, 25 bp, Probe sequence
gaagtagctggaagcattacagacc

SEQ ID NO: 246624 - DNA, 25 bp, Probe sequence
gaaaggaataaccgtatgtctaatt

SEQ ID NO: 246625 - DNA, 25 bp, Probe sequence
gaagcgccagcaaaagagcagtcac

SEQ ID NO: 246626 - DNA, 25 bp, Probe sequence
gacacttgtcaatttacaacgtatt

SEQ ID NO: 246627 - DNA, 25 bp, Probe sequence
gagccacttggctttaaaagattta

SEQ ID NO: 246628 - DNA, 25 bp, Probe sequence
gagcagtcacaacaaacaacaaaac

SEQ ID NO: 246629 - DNA, 25 bp, Probe sequence
gatattttcttatgtacgcctgata

SEQ ID NO: 246630 - DNA, 25 bp, Probe sequence
gtagaagtacctgacaaacaacaac

SEQ ID NO: 246631 - DNA, 25 bp, Probe sequence
gtggattttttgtaatagatgatga

SEQ ID NO: 246632 - DNA, 25 bp, Probe sequence
ggtactgtttatgcaatcggtggag

SEQ ID NO: 246633 - DNA, 25 bp, Probe sequence
ggagatatccaacgtgtaggtactg

SEQ ID NO: 246634 - DNA, 25 bp, Probe sequence
ggaagcattacagaccatattgaaa

SEQ ID NO: 246635 - DNA, 25 bp, Probe sequence
tgagcttaaaaaccgccgtgcgaca

SEQ ID NO: 246636 - DNA, 25 bp, Probe sequence
taaccgtatgtctaattattcaaaa

SEQ ID NO: 246637 - DNA, 25 bp, Probe sequence
taaaaaccgccgtgcgacacttgtc

SEQ ID NO: 246638 - DNA, 25 bp, Probe sequence
tattcgaaccacgtgttttttcaga

SEQ ID NO: 246639 - DNA, 25 bp, Probe sequence
tattgattttttaagcggtactgtt

SEQ ID NO: 246640 - DNA, 25 bp, Probe sequence
tttttcagatacacaagatattgct

SEQ ID NO: 246641 - DNA, 25 bp, Probe sequence
attggattttaattcaattacaata

SEQ ID NO: 246642 - DNA, 25 bp, Probe sequence
attatatatttctttacatcttggg

SEQ ID NO: 246643 - DNA, 25 bp, Probe sequence
atttctttacatcttgggtaccaag

SEQ ID NO: 246644 - DNA, 25 bp, Probe sequence
atttcggcatgattatatatttctt

SEQ ID NO: 246645 - DNA, 25 bp, Probe sequence
atatcatcaatcgctgcaattatcg

SEQ ID NO: 246646 - DNA, 25 bp, Probe sequence
atcaatcgctgcaattatcgtttta

SEQ ID NO: 246647 - DNA, 25 bp, Probe sequence
atcatcaatcgctgcaattatcgtt

SEQ ID NO: 246648 - DNA, 25 bp, Probe sequence
atcgacatatcatcaatcgctgcaa

SEQ ID NO: 246649 - DNA, 25 bp, Probe sequence
atcgctgcaattatcgttttagtat

SEQ ID NO: 246650 - DNA, 25 bp, Probe sequence
acatatcatcaatcgctgcaattat

SEQ ID NO: 246651 - DNA, 25 bp, Probe sequence
aaatttattatttcggcatgattat

SEQ ID NO: 246652 - DNA, 25 bp, Probe sequence
aatatatgaacctttcttacaacca

SEQ ID NO: 246653 - DNA, 25 bp, Probe sequence
caattatcgttttagtattattcca

SEQ ID NO: 246654 - DNA, 25 bp, Probe sequence
caatcgctgcaattatcgttttagt

SEQ ID NO: 246655 - DNA, 25 bp, Probe sequence
cacctattggaattatcgacatatc

SEQ ID NO: 246656 - DNA, 25 bp, Probe sequence
catcaatcgctgcaattatcgtttt

SEQ ID NO: 246657 - DNA, 25 bp, Probe sequence
cggcatgattatatatttctttaca

SEQ ID NO: 246658 - DNA, 25 bp, Probe sequence
gcgaaaatatatgaacctttcttac

SEQ ID NO: 246659 - DNA, 25 bp, Probe sequence
gctgcaattatcgttttagtattat

SEQ ID NO: 246660 - DNA, 25 bp, Probe sequence
gaattatcgacatatcatcaatcgc

SEQ ID NO: 246661 - DNA, 25 bp, Probe sequence
gacatatcatcaatcgctgcaatta

SEQ ID NO: 246662 - DNA, 25 bp, Probe sequence
ggttactccaaatctttaattggat

SEQ ID NO: 246663 - DNA, 25 bp, Probe sequence
tggatataaatgtgctagctacaat

SEQ ID NO: 246664 - DNA, 25 bp, Probe sequence
tccacctattggaattatcgacata

SEQ ID NO: 246665 - DNA, 25 bp, Probe sequence
tcgacatatcatcaatcgctgcaat

SEQ ID NO: 246666 - DNA, 25 bp, Probe sequence
tcatcaatcgctgcaattatcgttt

SEQ ID NO: 246667 - DNA, 25 bp, Probe sequence
tatatgaacctttcttacaaccatt

SEQ ID NO: 246668 - DNA, 25 bp, Probe sequence
tatatttctttacatcttgggtacc

SEQ ID NO: 246669 - DNA, 25 bp, Probe sequence
tatttctttacatcttgggtaccaa

SEQ ID NO: 246670 - DNA, 25 bp, Probe sequence
tttctttacatcttgggtaccaagt

SEQ ID NO: 246671 - DNA, 25 bp, Probe sequence
ttatcgacatatcatcaatcgctgc

SEQ ID NO: 246672 - DNA, 25 bp, Probe sequence
ttatatatttctttacatcttgggt

SEQ ID NO: 246673 - DNA, 25 bp, Probe sequence
ttagaaaagtaattccacctattgg

SEQ ID NO: 246674 - DNA, 25 bp, Probe sequence
ttgggtaccaagtattagagaaact

SEQ ID NO: 246675 - DNA, 25 bp, Probe sequence
ctttggtagggttaccagcgactga

SEQ ID NO: 246676 - DNA, 25 bp, Probe sequence
ctgcagttgacttaccggttgagga

SEQ ID NO: 246677 - DNA, 25 bp, Probe sequence
agggttaccagcgactgatacagct

SEQ ID NO: 246678 - DNA, 25 bp, Probe sequence
agagagtttcattacctttggtagg

SEQ ID NO: 246679 - DNA, 25 bp, Probe sequence
agaagctgcagttgacttaccggtt

SEQ ID NO: 246680 - DNA, 25 bp, Probe sequence
agctgcagttgacttaccggttgag

SEQ ID NO: 246681 - DNA, 25 bp, Probe sequence
agcgactgatacagctaaagaagct

SEQ ID NO: 246682 - DNA, 25 bp, Probe sequence
accagcgactgatacagctaaagaa

SEQ ID NO: 246683 - DNA, 25 bp, Probe sequence
aaagaagctgcagttgacttaccgg

SEQ ID NO: 246684 - DNA, 25 bp, Probe sequence
aagctgcagttgacttaccggttga

SEQ ID NO: 246685 - DNA, 25 bp, Probe sequence
aagaagctgcagttgacttaccggt

SEQ ID NO: 246686 - DNA, 25 bp, Probe sequence
aagagagtttcattacctttggtag

SEQ ID NO: 246687 - DNA, 25 bp, Probe sequence
tcattacctttggtagggttaccag

SEQ ID NO: 246688 - DNA, 25 bp, Probe sequence
cctttggtagggttaccagcgactg

SEQ ID NO: 246689 - DNA, 25 bp, Probe sequence
ccagcgactgatacagctaaagaag

SEQ ID NO: 246690 - DNA, 25 bp, Probe sequence
gctgcagttgacttaccggttgagg

SEQ ID NO: 246691 - DNA, 25 bp, Probe sequence
gctaaagaagctgcagttgacttac

SEQ ID NO: 246692 - DNA, 25 bp, Probe sequence
gcattccaatttctaaagagagttt

SEQ ID NO: 246693 - DNA, 25 bp, Probe sequence
gagagtttcattacctttggtaggg

SEQ ID NO: 246694 - DNA, 25 bp, Probe sequence
gttaccagcgactgatacagctaaa

SEQ ID NO: 246695 - DNA, 25 bp, Probe sequence
gtagggttaccagcgactgatacag

SEQ ID NO: 246696 - DNA, 25 bp, Probe sequence
gggttaccagcgactgatacagcta

SEQ ID NO: 246697 - DNA, 25 bp, Probe sequence
gtggcattccaatttctaaagagag

SEQ ID NO: 246698 - DNA, 25 bp, Probe sequence
ggtagggttaccagcgactgataca

SEQ ID NO: 246699 - DNA, 25 bp, Probe sequence
ggttaccagcgactgatacagctaa

SEQ ID NO: 246700 - DNA, 25 bp, Probe sequence
tggtagggttaccagcgactgatac

SEQ ID NO: 246701 - DNA, 25 bp, Probe sequence
ggcattccaatttctaaagagagtt

SEQ ID NO: 246702 - DNA, 25 bp, Probe sequence
tggcattccaatttctaaagagagt

SEQ ID NO: 246703 - DNA, 25 bp, Probe sequence
tttggtagggttaccagcgactgat

SEQ ID NO: 246704 - DNA, 25 bp, Probe sequence
tgcagttgacttaccggttgaggat

SEQ ID NO: 246705 - DNA, 25 bp, Probe sequence
taaagaagctgcagttgacttaccg

SEQ ID NO: 246706 - DNA, 25 bp, Probe sequence
taccagcgactgatacagctaaaga

SEQ ID NO: 246707 - DNA, 25 bp, Probe sequence
tagggttaccagcgactgatacagc

SEQ ID NO: 246708 - DNA, 25 bp, Probe sequence
ttaccagcgactgatacagctaaag

SEQ ID NO: 246709 - DNA, 25 bp, Probe sequence
attagaaaaacgagaagcaggacag

SEQ ID NO: 246710 - DNA, 25 bp, Probe sequence
atcataagtatttaactgaattttt

SEQ ID NO: 246711 - DNA, 25 bp, Probe sequence
atcggtagatattaatcataagtat

SEQ ID NO: 246712 - DNA, 25 bp, Probe sequence
aggacagttattaaatcggtagata

SEQ ID NO: 246713 - DNA, 25 bp, Probe sequence
agaaaaacgagaagcaggacagtta

SEQ ID NO: 246714 - DNA, 25 bp, Probe sequence
agaagcaggacagttattaaatcgg

SEQ ID NO: 246715 - DNA, 25 bp, Probe sequence
agcaggacagttattaaatcggtag

SEQ ID NO: 246716 - DNA, 25 bp, Probe sequence
acgagaagcaggacagttattaaat

SEQ ID NO: 246717 - DNA, 25 bp, Probe sequence
aaatcggtagatattaatcataagt

SEQ ID NO: 246718 - DNA, 25 bp, Probe sequence
aaacgagaagcaggacagttattaa

SEQ ID NO: 246719 - DNA, 25 bp, Probe sequence
aaaacgagaagcaggacagttatta

SEQ ID NO: 246720 - DNA, 25 bp, Probe sequence
aaaaacgagaagcaggacagttatt

SEQ ID NO: 246721 - DNA, 25 bp, Probe sequence
aacgagaagcaggacagttattaaa

SEQ ID NO: 246722 - DNA, 25 bp, Probe sequence
aagcaggacagttattaaatcggta

SEQ ID NO: 246723 - DNA, 25 bp, Probe sequence
aatcggtagatattaatcataagta

SEQ ID NO: 246724 - DNA, 25 bp, Probe sequence
caggacagttattaaatcggtagat

SEQ ID NO: 246725 - DNA, 25 bp, Probe sequence
cggtagatattaatcataagtattt

SEQ ID NO: 246726 - DNA, 25 bp, Probe sequence
cgagaagcaggacagttattaaatc

SEQ ID NO: 246727 - DNA, 25 bp, Probe sequence
ccttttgtcgaatatataactaaag

SEQ ID NO: 246728 - DNA, 25 bp, Probe sequence
gcaggacagttattaaatcggtaga

SEQ ID NO: 246729 - DNA, 25 bp, Probe sequence
gaagcaggacagttattaaatcggt

SEQ ID NO: 246730 - DNA, 25 bp, Probe sequence
gaaaaacgagaagcaggacagttat

SEQ ID NO: 246731 - DNA, 25 bp, Probe sequence
gagaagcaggacagttattaaatcg

SEQ ID NO: 246732 - DNA, 25 bp, Probe sequence
gatattagaaaaacgagaagcagga

SEQ ID NO: 246733 - DNA, 25 bp, Probe sequence
gatattaatcataagtatttaactg

SEQ ID NO: 246734 - DNA, 25 bp, Probe sequence
ggtagatattaatcataagtattta

SEQ ID NO: 246735 - DNA, 25 bp, Probe sequence
tgaatttttaccttttgtcgaatat

SEQ ID NO: 246736 - DNA, 25 bp, Probe sequence
tcataagtatttaactgaattttta

SEQ ID NO: 246737 - DNA, 25 bp, Probe sequence
taatcataagtatttaactgaattt

SEQ ID NO: 246738 - DNA, 25 bp, Probe sequence
taccttttgtcgaatatataactaa

SEQ ID NO: 246739 - DNA, 25 bp, Probe sequence
ttagaaaaacgagaagcaggacagt

SEQ ID NO: 246740 - DNA, 25 bp, Probe sequence
tttaccttttgtcgaatatataact

SEQ ID NO: 246741 - DNA, 25 bp, Probe sequence
ttaccttttgtcgaatatataacta

SEQ ID NO: 246742 - DNA, 25 bp, Probe sequence
ttgtcgaatatataactaaagttga

SEQ ID NO: 246743 - DNA, 25 bp, Probe sequence
attggaagtgatttgtggcagttat

SEQ ID NO: 246744 - DNA, 25 bp, Probe sequence
atcacgtacgattgcgaaacaacta

SEQ ID NO: 246745 - DNA, 25 bp, Probe sequence
atcacactattgttgattcagcaga

SEQ ID NO: 246746 - DNA, 25 bp, Probe sequence
atgtctttaggtatcgaacgcgaac

SEQ ID NO: 246747 - DNA, 25 bp, Probe sequence
acgcattttttagatccaagagggc

SEQ ID NO: 246748 - DNA, 25 bp, Probe sequence
acgaattaattgatcagctaacgga

SEQ ID NO: 246749 - DNA, 25 bp, Probe sequence
aaaacgcacattacctatagaacat

SEQ ID NO: 246750 - DNA, 25 bp, Probe sequence
aaaagagcaatcatttcgccgaact

SEQ ID NO: 246751 - DNA, 25 bp, Probe sequence
aacatcaacatattttagggacatt

SEQ ID NO: 246752 - DNA, 25 bp, Probe sequence
aacggataaatgtgatcaagcggaa

SEQ ID NO: 246753 - DNA, 25 bp, Probe sequence
aagtgcaacagttagttctttaagg

SEQ ID NO: 246754 - DNA, 25 bp, Probe sequence
aattcgtcactttaaaacatcaaca

SEQ ID NO: 246755 - DNA, 25 bp, Probe sequence
cagttaaactttatactattccagt

SEQ ID NO: 246756 - DNA, 25 bp, Probe sequence
ccaaggttttggtagagcacacatt

SEQ ID NO: 246757 - DNA, 25 bp, Probe sequence
gcaccagtattaacgcattttttag

SEQ ID NO: 246758 - DNA, 25 bp, Probe sequence
gcacacattactgacttaggtggta

SEQ ID NO: 246759 - DNA, 25 bp, Probe sequence
gcacattacctatagaacattattc

SEQ ID NO: 246760 - DNA, 25 bp, Probe sequence
gatacgtaaatcacgtacgattgcg

SEQ ID NO: 246761 - DNA, 25 bp, Probe sequence
gaacgaattcaatttgttttgacaa

SEQ ID NO: 246762 - DNA, 25 bp, Probe sequence
gagcaatcatttcgccgaactatta

SEQ ID NO: 246763 - DNA, 25 bp, Probe sequence
gatatttatcaacactttagacagg

SEQ ID NO: 246764 - DNA, 25 bp, Probe sequence
gatttaatatccatccaaggttttg

SEQ ID NO: 246765 - DNA, 25 bp, Probe sequence
gatttgtggcagttatgaagattta

SEQ ID NO: 246766 - DNA, 25 bp, Probe sequence
gattcagcagattttcaattacaag

SEQ ID NO: 246767 - DNA, 25 bp, Probe sequence
gattggaatcatttattatgttaga

SEQ ID NO: 246768 - DNA, 25 bp, Probe sequence
gttctttaaggttagatgttgttat

SEQ ID NO: 246769 - DNA, 25 bp, Probe sequence
gtatcgaacgcgaacaagttggaga

SEQ ID NO: 246770 - DNA, 25 bp, Probe sequence
ggacattaatgtctttaggtatcga

SEQ ID NO: 246771 - DNA, 25 bp, Probe sequence
ggcgcatcagttaaactttatacta

SEQ ID NO: 246772 - DNA, 25 bp, Probe sequence
tacaacgtattaaaggcgcatcagt

SEQ ID NO: 246773 - DNA, 25 bp, Probe sequence
tactattccagtaacagatatgata

SEQ ID NO: 246774 - DNA, 25 bp, Probe sequence
tagagcacacattactgacttaggt

SEQ ID NO: 246775 - DNA, 25 bp, Probe sequence
tagatccaagagggcaatatatatt

SEQ ID NO: 246776 - DNA, 25 bp, Probe sequence
tatcctgaaaaattcgtcactttaa

SEQ ID NO: 246777 - DNA, 25 bp, Probe sequence
atgccttttacaccaaatgaaatta

SEQ ID NO: 246778 - DNA, 25 bp, Probe sequence
agcactgaaattgaacgtcttaaag

SEQ ID NO: 246779 - DNA, 25 bp, Probe sequence
aaatgatttaaagccagatgaagtt

SEQ ID NO: 246780 - DNA, 25 bp, Probe sequence
aaaagcacgccgtttagcattccag

SEQ ID NO: 246781 - DNA, 25 bp, Probe sequence
aactaagcactgaaattgaacgtct

SEQ ID NO: 246782 - DNA, 25 bp, Probe sequence
aagacgtgcatcaatctgtaagtga

SEQ ID NO: 246783 - DNA, 25 bp, Probe sequence
aagtatttagatcgcgtttccgtat

SEQ ID NO: 246784 - DNA, 25 bp, Probe sequence
aattttttggagcaactaagcactg

SEQ ID NO: 246785 - DNA, 25 bp, Probe sequence
caaatggttggtgacgcggtagaaa

SEQ ID NO: 246786 - DNA, 25 bp, Probe sequence
caatctgtaagtgatgctttgatac

SEQ ID NO: 246787 - DNA, 25 bp, Probe sequence
caatccaatgattcagaaacaacta

SEQ ID NO: 246788 - DNA, 25 bp, Probe sequence
cagacaataatcaacaatccaatga

SEQ ID NO: 246789 - DNA, 25 bp, Probe sequence
cgccgtttagcattccagactgaag

SEQ ID NO: 246790 - DNA, 25 bp, Probe sequence
cctactgaagttgctaattttttgg

SEQ ID NO: 246791 - DNA, 25 bp, Probe sequence
gctaatcaaatggttggtgacgcgg

SEQ ID NO: 246792 - DNA, 25 bp, Probe sequence
gctgaagcgattatagctaaggcag

SEQ ID NO: 246793 - DNA, 25 bp, Probe sequence
gaataaagagttttcacgtgtaaag

SEQ ID NO: 246794 - DNA, 25 bp, Probe sequence
gaagattgggattacttgttgaatt

SEQ ID NO: 246795 - DNA, 25 bp, Probe sequence
gaaacgtcaatcaaaagtatttaga

SEQ ID NO: 246796 - DNA, 25 bp, Probe sequence
gactgaagatatgaaacgtcaatca

SEQ ID NO: 246797 - DNA, 25 bp, Probe sequence
gacgcggtagaaaaagcacgccgtt

SEQ ID NO: 246798 - DNA, 25 bp, Probe sequence
gagagatactaatattaagtcttat

SEQ ID NO: 246799 - DNA, 25 bp, Probe sequence
gagttttcacgtgtaaagaatggtt

SEQ ID NO: 246800 - DNA, 25 bp, Probe sequence
gatcgcgtttccgtatgttagttga

SEQ ID NO: 246801 - DNA, 25 bp, Probe sequence
gttgaattatgatttagacgctgaa

SEQ ID NO: 246802 - DNA, 25 bp, Probe sequence
gtttccgtatgttagttgaagcgca

SEQ ID NO: 246803 - DNA, 25 bp, Probe sequence
gtcttatcaagacgtgcatcaatct

SEQ ID NO: 246804 - DNA, 25 bp, Probe sequence
gtgacgcttgaaaatattcatcatt

SEQ ID NO: 246805 - DNA, 25 bp, Probe sequence
gtgatgctttgatacaagctcaaaa

SEQ ID NO: 246806 - DNA, 25 bp, Probe sequence
ggtgaagaaactaagcaagctgcag

SEQ ID NO: 246807 - DNA, 25 bp, Probe sequence
ggtttagaacctactgaagttgcta

SEQ ID NO: 246808 - DNA, 25 bp, Probe sequence
tagttgaagcgcaattagacttatt

SEQ ID NO: 246809 - DNA, 25 bp, Probe sequence
tttagatcgcgtttccgtatgttag

SEQ ID NO: 246810 - DNA, 25 bp, Probe sequence
ttagacgctgaacaagtgacgcttg

SEQ ID NO: 246811 - DNA, 25 bp, Probe sequence
ataatggtgattttttgcaagggtc

SEQ ID NO: 246812 - DNA, 25 bp, Probe sequence
atcccgcaagttgttgattttaaag

SEQ ID NO: 246813 - DNA, 25 bp, Probe sequence
atgatgattcaaggtcacgcagttg

SEQ ID NO: 246814 - DNA, 25 bp, Probe sequence
accagagcatattcagtcacttacg

SEQ ID NO: 246815 - DNA, 25 bp, Probe sequence
aacggctgtgattcaacctggtacg

SEQ ID NO: 246816 - DNA, 25 bp, Probe sequence
aagccattgaacgatcagcagaata

SEQ ID NO: 246817 - DNA, 25 bp, Probe sequence
aagacactttacgcagactcaatta

SEQ ID NO: 246818 - DNA, 25 bp, Probe sequence
aatggcattcgactttggtacgctt

SEQ ID NO: 246819 - DNA, 25 bp, Probe sequence
cacgcagttgatttaaagcagacat

SEQ ID NO: 246820 - DNA, 25 bp, Probe sequence
gcaagggtcaccattttgtaattac

SEQ ID NO: 246821 - DNA, 25 bp, Probe sequence
cgtgacgatgcgagatgttattaac

SEQ ID NO: 246822 - DNA, 25 bp, Probe sequence
cgcatagcggcagtagccagccttt

SEQ ID NO: 246823 - DNA, 25 bp, Probe sequence
gctttgtttgattctgctagtggtt

SEQ ID NO: 246824 - DNA, 25 bp, Probe sequence
gcagatgttgcctgtacagctttgt

SEQ ID NO: 246825 - DNA, 25 bp, Probe sequence
gcagatatcattgtggtttgttacc

SEQ ID NO: 246826 - DNA, 25 bp, Probe sequence
gaatcatgtgaattacttcctgtta

SEQ ID NO: 246827 - DNA, 25 bp, Probe sequence
gaaggcagtatgaccaaagttttaa

SEQ ID NO: 246828 - DNA, 25 bp, Probe sequence
gaagaccaaagggacaacgtgtgag

SEQ ID NO: 246829 - DNA, 25 bp, Probe sequence
gactttggtacgcttggtaatcatg

SEQ ID NO: 246830 - DNA, 25 bp, Probe sequence
gactcaattatccagttttgtgcgc

SEQ ID NO: 246831 - DNA, 25 bp, Probe sequence
gatatctttattacgggtcaccaac

SEQ ID NO: 246832 - DNA, 25 bp, Probe sequence
gttgaaggcgcacaattacttattg

SEQ ID NO: 246833 - DNA, 25 bp, Probe sequence
gtagccagcctttagttgattttta

SEQ ID NO: 246834 - DNA, 25 bp, Probe sequence
gtaattacttaatcgcgcatagcgg

SEQ ID NO: 246835 - DNA, 25 bp, Probe sequence
gtcacttacgtttcatagtgctttt

SEQ ID NO: 246836 - DNA, 25 bp, Probe sequence
gtggtttcaagcaagtcgtgacgat

SEQ ID NO: 246837 - DNA, 25 bp, Probe sequence
gggattgttactagcgaatcatgtt

SEQ ID NO: 246838 - DNA, 25 bp, Probe sequence
ggtggcgtaagttataccattcatg

SEQ ID NO: 246839 - DNA, 25 bp, Probe sequence
ggtcaccaacatcgacaaattgctg

SEQ ID NO: 246840 - DNA, 25 bp, Probe sequence
ggtttgttaccatggtggatttgaa

SEQ ID NO: 246841 - DNA, 25 bp, Probe sequence
tccccattgggaacaaccagagcat

SEQ ID NO: 246842 - DNA, 25 bp, Probe sequence
taacaattacccatttccaaataca

SEQ ID NO: 246843 - DNA, 25 bp, Probe sequence
ttaacgacacaatttattccccatt

SEQ ID NO: 246844 - DNA, 25 bp, Probe sequence
ttaatcatgcatttgaggcacgtgt

SEQ ID NO: 246845 - DNA, 25 bp, Probe sequence
attacacatagctatccacacgact

SEQ ID NO: 246846 - DNA, 25 bp, Probe sequence
ggttcgtgaccgtggcgaatgggtt

SEQ ID NO: 246847 - DNA, 25 bp, Probe sequence
atcgtggttggttcaactcttctat

SEQ ID NO: 246848 - DNA, 25 bp, Probe sequence
atgtcaacagctgaattccgtgaga

SEQ ID NO: 246849 - DNA, 25 bp, Probe sequence
agggttctatgcaccatacgtacca

SEQ ID NO: 246850 - DNA, 25 bp, Probe sequence
acagcaccaggtcacggggaagatg

SEQ ID NO: 246851 - DNA, 25 bp, Probe sequence
acaggttgtgtacatacagcaccag

SEQ ID NO: 246852 - DNA, 25 bp, Probe sequence
aaagccagtttattggtctccttca

SEQ ID NO: 246853 - DNA, 25 bp, Probe sequence
aaaacagatttcccaatgcgaggtg

SEQ ID NO: 246854 - DNA, 25 bp, Probe sequence
aacctgaatacgaagctgcacaaat

SEQ ID NO: 246855 - DNA, 25 bp, Probe sequence
aagtgttcacttagcagacatgcct

SEQ ID NO: 246856 - DNA, 25 bp, Probe sequence
aattcttactttctcatggttttgt

SEQ ID NO: 246857 - DNA, 25 bp, Probe sequence
caaatgttgcgattaccgttcatcc

SEQ ID NO: 246858 - DNA, 25 bp, Probe sequence
cagaggatcttggtgctgttgatga

SEQ ID NO: 246859 - DNA, 25 bp, Probe sequence
gcagccctaacggtacatttactaa

SEQ ID NO: 246860 - DNA, 25 bp, Probe sequence
gaatgggttatttctcgtcaacgtg

SEQ ID NO: 246861 - DNA, 25 bp, Probe sequence
gaagtttggtctcatacaccacatg

SEQ ID NO: 246862 - DNA, 25 bp, Probe sequence
gaaccgtgcattagaaactgctcgt

SEQ ID NO: 246863 - DNA, 25 bp, Probe sequence
gacaacaacgccatggacaattcca

SEQ ID NO: 246864 - DNA, 25 bp, Probe sequence
gacgaagttgttagcaccaatctta

SEQ ID NO: 246865 - DNA, 25 bp, Probe sequence
gatcgttacttgctaaatcgtttac

SEQ ID NO: 246866 - DNA, 25 bp, Probe sequence
gattctcatatccgtcgtagtatgc

SEQ ID NO: 246867 - DNA, 25 bp, Probe sequence
gttgtagcacaacatccattcttag

SEQ ID NO: 246868 - DNA, 25 bp, Probe sequence
gttcatcacaccgtggcgtgttgga

SEQ ID NO: 246869 - DNA, 25 bp, Probe sequence
gttcagcatcaatttacgttgcatt

SEQ ID NO: 246870 - DNA, 25 bp, Probe sequence
gtaatgtgattgtacctgaccaagt

SEQ ID NO: 246871 - DNA, 25 bp, Probe sequence
ggtctccttcaagtgagtcttcatt

SEQ ID NO: 246872 - DNA, 25 bp, Probe sequence
ggtgtaccgttaccagtattttatg

SEQ ID NO: 246873 - DNA, 25 bp, Probe sequence
ggtgttcgtggtgactttaatgatc

SEQ ID NO: 246874 - DNA, 25 bp, Probe sequence
ggtgctgatattgcgagactttggg

SEQ ID NO: 246875 - DNA, 25 bp, Probe sequence
tggacgtttggtttgattctggttc

SEQ ID NO: 246876 - DNA, 25 bp, Probe sequence
tccgtgctacaccacaatggtttgc

SEQ ID NO: 246877 - DNA, 25 bp, Probe sequence
tttacacatccaggcagccctaacg

SEQ ID NO: 246878 - DNA, 25 bp, Probe sequence
ttacatgatggcccaccatacgcga

SEQ ID NO: 246879 - DNA, 25 bp, Probe sequence
atcgctttaatcatatcgaagttga

SEQ ID NO: 246880 - DNA, 25 bp, Probe sequence
atgatattccagttaacggaggtat

SEQ ID NO: 246881 - DNA, 25 bp, Probe sequence
agagcaatcggcatatatggatgat

SEQ ID NO: 246882 - DNA, 25 bp, Probe sequence
agcatcgaatggctattatcaacat

SEQ ID NO: 246883 - DNA, 25 bp, Probe sequence
aaattttgatacgtatggattagca

SEQ ID NO: 246884 - DNA, 25 bp, Probe sequence
aacggaggtatacagcctgcttcgt

SEQ ID NO: 246885 - DNA, 25 bp, Probe sequence
aagacaattcatttatcagaggtaa

SEQ ID NO: 246886 - DNA, 25 bp, Probe sequence
aatcatgtcattacacttgttgaat

SEQ ID NO: 246887 - DNA, 25 bp, Probe sequence
aatttacaaggtccggatggtatct

SEQ ID NO: 246888 - DNA, 25 bp, Probe sequence
catatcgcaattaaactacctcaaa

SEQ ID NO: 246889 - DNA, 25 bp, Probe sequence
ctacctcaaattagtgatttagcta

SEQ ID NO: 246890 - DNA, 25 bp, Probe sequence
gcctgcttcgttatcattatttttt

SEQ ID NO: 246891 - DNA, 25 bp, Probe sequence
gctattatcaacatttggccatgaa

SEQ ID NO: 246892 - DNA, 25 bp, Probe sequence
gcaattgttgactttcattatcctg

SEQ ID NO: 246893 - DNA, 25 bp, Probe sequence
gaagtaggtcaaaataatcatgtca

SEQ ID NO: 246894 - DNA, 25 bp, Probe sequence
gaagcgggactgtttcatatcgcaa

SEQ ID NO: 246895 - DNA, 25 bp, Probe sequence
gacgaagcgcaatggacgaggcaaa

SEQ ID NO: 246896 - DNA, 25 bp, Probe sequence
gacgctattataggtgcattgcata

SEQ ID NO: 246897 - DNA, 25 bp, Probe sequence
gaccattaaatgtaccgagattagt

SEQ ID NO: 246898 - DNA, 25 bp, Probe sequence
gaggtatacagcctgcttcgttatc

SEQ ID NO: 246899 - DNA, 25 bp, Probe sequence
gatggtatctattatcgctttaatc

SEQ ID NO: 246900 - DNA, 25 bp, Probe sequence
gatttagctaatttactaattcatt

SEQ ID NO: 246901 - DNA, 25 bp, Probe sequence
gattattcaatatttttagcatcga

SEQ ID NO: 246902 - DNA, 25 bp, Probe sequence
gattgggtatcagcaacgaaacgtg

SEQ ID NO: 246903 - DNA, 25 bp, Probe sequence
gtatcataacagtaacgcaaacttt

SEQ ID NO: 246904 - DNA, 25 bp, Probe sequence
gtaccgagattagtgagtcatgcaa

SEQ ID NO: 246905 - DNA, 25 bp, Probe sequence
ggtccggatggtatctattatcgct

SEQ ID NO: 246906 - DNA, 25 bp, Probe sequence
ggtgcattgcatattaagacaattc

SEQ ID NO: 246907 - DNA, 25 bp, Probe sequence
ggttaggtattccagatgacgctat

SEQ ID NO: 246908 - DNA, 25 bp, Probe sequence
ggtattccagatgacgctattatag

SEQ ID NO: 246909 - DNA, 25 bp, Probe sequence
tcattatcctgaaacaacacattta

SEQ ID NO: 246910 - DNA, 25 bp, Probe sequence
tacagcctgcttcgttatcattatt

SEQ ID NO: 246911 - DNA, 25 bp, Probe sequence
tactacctcgattattttggattag

SEQ ID NO: 246912 - DNA, 25 bp, Probe sequence
tttggccatgaatgattgggtatca

SEQ ID NO: 246913 - DNA, 25 bp, Probe sequence
attagtttactttttgcaggtgcac

SEQ ID NO: 246914 - DNA, 25 bp, Probe sequence
atatttttggttatgattttccaat

SEQ ID NO: 246915 - DNA, 25 bp, Probe sequence
atagcagtatttgtcgttatatttg

SEQ ID NO: 246916 - DNA, 25 bp, Probe sequence
atagccttagtatatttctttatta

SEQ ID NO: 246917 - DNA, 25 bp, Probe sequence
ataatttgtttatgcaagttgctat

SEQ ID NO: 246918 - DNA, 25 bp, Probe sequence
atcgaaataatggtgctgcatgggg

SEQ ID NO: 246919 - DNA, 25 bp, Probe sequence
atgacatttttctttattattacca

SEQ ID NO: 246920 - DNA, 25 bp, Probe sequence
agattcatttgaagtgataccgcac

SEQ ID NO: 246921 - DNA, 25 bp, Probe sequence
acatcacatcgaaataatggtgctg

SEQ ID NO: 246922 - DNA, 25 bp, Probe sequence
aaatattttattggcacttccattt

SEQ ID NO: 246923 - DNA, 25 bp, Probe sequence
aacaggagaagttgttgactttatt

SEQ ID NO: 246924 - DNA, 25 bp, Probe sequence
aatattaattattattgccttatta

SEQ ID NO: 246925 - DNA, 25 bp, Probe sequence
aatatattatagctactacaatgaa

SEQ ID NO: 246926 - DNA, 25 bp, Probe sequence
cgcactttttaaacataacatcaca

SEQ ID NO: 246927 - DNA, 25 bp, Probe sequence
gccttattaaaggatacttccaata

SEQ ID NO: 246928 - DNA, 25 bp, Probe sequence
gccttagtatatttctttattaaag

SEQ ID NO: 246929 - DNA, 25 bp, Probe sequence
gctgcatggggaatattgagtggaa

SEQ ID NO: 246930 - DNA, 25 bp, Probe sequence
gcaggtgcacttggaaactttattg

SEQ ID NO: 246931 - DNA, 25 bp, Probe sequence
gcagattcaagtttaacaattggtg

SEQ ID NO: 246932 - DNA, 25 bp, Probe sequence
gcaagttgctattagtttacttttt

SEQ ID NO: 246933 - DNA, 25 bp, Probe sequence
gaagttgttgactttattgatacaa

SEQ ID NO: 246934 - DNA, 25 bp, Probe sequence
gacatttttctttattattaccatt

SEQ ID NO: 246935 - DNA, 25 bp, Probe sequence
gatgctcaatataatttgtttatgc

SEQ ID NO: 246936 - DNA, 25 bp, Probe sequence
gataccgcactttttaaacataaca

SEQ ID NO: 246937 - DNA, 25 bp, Probe sequence
gttgctattagtttactttttgcag

SEQ ID NO: 246938 - DNA, 25 bp, Probe sequence
gtttactttttgcaggtgcacttgg

SEQ ID NO: 246939 - DNA, 25 bp, Probe sequence
gtatttgtcgttatatttgaccaag

SEQ ID NO: 246940 - DNA, 25 bp, Probe sequence
gtcgttatatttgaccaagttacta

SEQ ID NO: 246941 - DNA, 25 bp, Probe sequence
gtgataccgcactttttaaacataa

SEQ ID NO: 246942 - DNA, 25 bp, Probe sequence
ggtgctgcatggggaatattgagtg

SEQ ID NO: 246943 - DNA, 25 bp, Probe sequence
ggtgcacttggaaactttattgata

SEQ ID NO: 246944 - DNA, 25 bp, Probe sequence
taccattattatattaatagcctta

SEQ ID NO: 246945 - DNA, 25 bp, Probe sequence
tttgcaggtgcacttggaaacttta

SEQ ID NO: 246946 - DNA, 25 bp, Probe sequence
tttattggcacttccattttaatag

SEQ ID NO: 246947 - DNA, 25 bp, Probe sequence
atggctgttgttgatgatggtaagg

SEQ ID NO: 246948 - DNA, 25 bp, Probe sequence
agatatggatacttctggtttatta

SEQ ID NO: 246949 - DNA, 25 bp, Probe sequence
agaacaaacaggtatgcgtgtagat

SEQ ID NO: 246950 - DNA, 25 bp, Probe sequence
acttctggtttattaatggttgcta

SEQ ID NO: 246951 - DNA, 25 bp, Probe sequence
acatgaaatatattggcttcccatt

SEQ ID NO: 246952 - DNA, 25 bp, Probe sequence
acaatcgatgcgccaattggtagaa

SEQ ID NO: 246953 - DNA, 25 bp, Probe sequence
aaatatatcgctttagttcacggga

SEQ ID NO: 246954 - DNA, 25 bp, Probe sequence
aagcaggtttagtcgttgcaaacga

SEQ ID NO: 246955 - DNA, 25 bp, Probe sequence
aaggcatggtagttcatccatcacc

SEQ ID NO: 246956 - DNA, 25 bp, Probe sequence
aatgatcgtcaatctatggctgttg

SEQ ID NO: 246957 - DNA, 25 bp, Probe sequence
caggacgtacgcatcaaatccgtgt

SEQ ID NO: 246958 - DNA, 25 bp, Probe sequence
gcgtgtagataagttgctgcctgaa

SEQ ID NO: 246959 - DNA, 25 bp, Probe sequence
gctggacttattggattcgaacatc

SEQ ID NO: 246960 - DNA, 25 bp, Probe sequence
gctcatcgtgggcttgtagaacaat

SEQ ID NO: 246961 - DNA, 25 bp, Probe sequence
gcatggtagttcatccatcaccagg

SEQ ID NO: 246962 - DNA, 25 bp, Probe sequence
gacattggatattggtggtcaagct

SEQ ID NO: 246963 - DNA, 25 bp, Probe sequence
gataagttgctgcctgaattaaata

SEQ ID NO: 246964 - DNA, 25 bp, Probe sequence
gattatacgcttgttgaatgtcaac

SEQ ID NO: 246965 - DNA, 25 bp, Probe sequence
gattcgaacatccagtaacaggtga

SEQ ID NO: 246966 - DNA, 25 bp, Probe sequence
gttggtgatccaaagtatggaccga

SEQ ID NO: 246967 - DNA, 25 bp, Probe sequence
gattggtctcgtaaccagatacaag

SEQ ID NO: 246968 - DNA, 25 bp, Probe sequence
gtattgttcaccgtatagatatgga

SEQ ID NO: 246969 - DNA, 25 bp, Probe sequence
gtgacacattttaacgtactagaac

SEQ ID NO: 246970 - DNA, 25 bp, Probe sequence
ggagaaattcgtccaggtattgttc

SEQ ID NO: 246971 - DNA, 25 bp, Probe sequence
ggagacttatgaatttaacattaca

SEQ ID NO: 246972 - DNA, 25 bp, Probe sequence
ggcttcccattagttggtgatccaa

SEQ ID NO: 246973 - DNA, 25 bp, Probe sequence
tggaccgaaaaagacattggatatt

SEQ ID NO: 246974 - DNA, 25 bp, Probe sequence
tggtaaggaagcagtgacacatttt

SEQ ID NO: 246975 - DNA, 25 bp, Probe sequence
tgatattgctcatcgtgggcttgta

SEQ ID NO: 246976 - DNA, 25 bp, Probe sequence
tcaacttgaaacaggacgtacgcat

SEQ ID NO: 246977 - DNA, 25 bp, Probe sequence
taatgatcatatagttgtcactgaa

SEQ ID NO: 246978 - DNA, 25 bp, Probe sequence
tacatgctggacttattggattcga

SEQ ID NO: 246979 - DNA, 25 bp, Probe sequence
tagttcacgggaatattcctcatga

SEQ ID NO: 246980 - DNA, 25 bp, Probe sequence
ttcgtccaggtattgttcaccgtat

SEQ ID NO: 246981 - DNA, 25 bp, Probe sequence
atgatgccgcaatacaacgtacagt

SEQ ID NO: 246982 - DNA, 25 bp, Probe sequence
atggatcaaagaaatgcagttataa

SEQ ID NO: 246983 - DNA, 25 bp, Probe sequence
agacgcaatagacatcgacacagat

SEQ ID NO: 246984 - DNA, 25 bp, Probe sequence
acgtatacctactggaacaattgat

SEQ ID NO: 246985 - DNA, 25 bp, Probe sequence
cgaggacatcgtgagttaccaattc

SEQ ID NO: 246986 - DNA, 25 bp, Probe sequence
aatggatgatgccgcaatacaacgt

SEQ ID NO: 246987 - DNA, 25 bp, Probe sequence
aatgctagacctattaaaattggtt

SEQ ID NO: 246988 - DNA, 25 bp, Probe sequence
aattcatcaaattgagcaacaacgt

SEQ ID NO: 246989 - DNA, 25 bp, Probe sequence
aattcgagcagattttgttggtaaa

SEQ ID NO: 246990 - DNA, 25 bp, Probe sequence
cagataaagtagtcatcattattga

SEQ ID NO: 246991 - DNA, 25 bp, Probe sequence
catcacttacgacaaaagacgcaat

SEQ ID NO: 246992 - DNA, 25 bp, Probe sequence
cgtgcttcacttgatgctattttgc

SEQ ID NO: 246993 - DNA, 25 bp, Probe sequence
gctgctttggttgatcgaggacatc

SEQ ID NO: 246994 - DNA, 25 bp, Probe sequence
gctgtatactggtcgaacggttcgt

SEQ ID NO: 246995 - DNA, 25 bp, Probe sequence
gcttcacttgatgctattttgctaa

SEQ ID NO: 246996 - DNA, 25 bp, Probe sequence
gcaacaacgtatacctactggaaca

SEQ ID NO: 246997 - DNA, 25 bp, Probe sequence
gaacaattgatattacatactttag

SEQ ID NO: 246998 - DNA, 25 bp, Probe sequence
gacatcgtgagttaccaattcgagc

SEQ ID NO: 246999 - DNA, 25 bp, Probe sequence
gacatcgacacagatattacagata

SEQ ID NO: 247000 - DNA, 25 bp, Probe sequence
gagcacatgtcatcacttacgacaa

SEQ ID NO: 247001 - DNA, 25 bp, Probe sequence
gaggaaacggtaagtgtctatttag

SEQ ID NO: 247002 - DNA, 25 bp, Probe sequence
gaggtgaatatttagcgaatcgtat

SEQ ID NO: 247003 - DNA, 25 bp, Probe sequence
gatgtgctgtatactggtcgaacgg

SEQ ID NO: 247004 - DNA, 25 bp, Probe sequence
gatgctattttgctaaatgctagac

SEQ ID NO: 247005 - DNA, 25 bp, Probe sequence
gatatagagcacatgtcatcactta

SEQ ID NO: 247006 - DNA, 25 bp, Probe sequence
gttaccaattcgagcagattttgtt

SEQ ID NO: 247007 - DNA, 25 bp, Probe sequence
gtgagttaccaattcgagcagattt

SEQ ID NO: 247008 - DNA, 25 bp, Probe sequence
ggtactgataatttaattcttttag

SEQ ID NO: 247009 - DNA, 25 bp, Probe sequence
ggttcgtgcttcacttgatgctatt

SEQ ID NO: 247010 - DNA, 25 bp, Probe sequence
tggtcgaacggttcgtgcttcactt

SEQ ID NO: 247011 - DNA, 25 bp, Probe sequence
tgagcaacaacgtatacctactgga

SEQ ID NO: 247012 - DNA, 25 bp, Probe sequence
taaaaatatacctacttctaaagag

SEQ ID NO: 247013 - DNA, 25 bp, Probe sequence
tatacctacttctaaagaggaaacg

SEQ ID NO: 247014 - DNA, 25 bp, Probe sequence
ttttgctaaatgctagacctattaa

SEQ ID NO: 247015 - DNA, 25 bp, Probe sequence
atatcagtttcttaattgttgcaat

SEQ ID NO: 247016 - DNA, 25 bp, Probe sequence
atacttgggatctagctttgcattt

SEQ ID NO: 247017 - DNA, 25 bp, Probe sequence
atcacgggattaagtacgcatagct

SEQ ID NO: 247018 - DNA, 25 bp, Probe sequence
atggcattagctgcactttcaggaa

SEQ ID NO: 247019 - DNA, 25 bp, Probe sequence
agtactagtaccattcttaacagga

SEQ ID NO: 247020 - DNA, 25 bp, Probe sequence
agttcactgcattaatttcttctat

SEQ ID NO: 247021 - DNA, 25 bp, Probe sequence
agcttaggagacatgcttgtagcat

SEQ ID NO: 247022 - DNA, 25 bp, Probe sequence
acagtatttacgtcattggtggtgc

SEQ ID NO: 247023 - DNA, 25 bp, Probe sequence
aaccacaaccagcgcaatgggcatt

SEQ ID NO: 247024 - DNA, 25 bp, Probe sequence
aagattatgtaccttcatttcactt

SEQ ID NO: 247025 - DNA, 25 bp, Probe sequence
aaggattcctatctttaattccagt

SEQ ID NO: 247026 - DNA, 25 bp, Probe sequence
aatggatagatttccctcatattta

SEQ ID NO: 247027 - DNA, 25 bp, Probe sequence
aatgggcatttttaagcttacaaca

SEQ ID NO: 247028 - DNA, 25 bp, Probe sequence
aatttcttctatacctacaccagtt

SEQ ID NO: 247029 - DNA, 25 bp, Probe sequence
caatgataaccttgcttgtaacaat

SEQ ID NO: 247030 - DNA, 25 bp, Probe sequence
gcagcgttactagcttcgggaatcg

SEQ ID NO: 247031 - DNA, 25 bp, Probe sequence
cttcatttcacttaggacttgtact

SEQ ID NO: 247032 - DNA, 25 bp, Probe sequence
cttagcgcctactgcagtcaatatg

SEQ ID NO: 247033 - DNA, 25 bp, Probe sequence
gcgatgtttggcgcaacagtactag

SEQ ID NO: 247034 - DNA, 25 bp, Probe sequence
gcttcgggaatcggtacattacttt

SEQ ID NO: 247035 - DNA, 25 bp, Probe sequence
gaaggcgcaaataccagcatacttg

SEQ ID NO: 247036 - DNA, 25 bp, Probe sequence
gaaattggtatcaaccttcaaattg

SEQ ID NO: 247037 - DNA, 25 bp, Probe sequence
gaggagtatctatattacttttcgg

SEQ ID NO: 247038 - DNA, 25 bp, Probe sequence
gtattatcgtaggttatgtggtagc

SEQ ID NO: 247039 - DNA, 25 bp, Probe sequence
gtggtgttatgtacgtcatcatcgg

SEQ ID NO: 247040 - DNA, 25 bp, Probe sequence
gtggtagcgatttttatggggattg

SEQ ID NO: 247041 - DNA, 25 bp, Probe sequence
ggtgtttctacaatgtttgccagta

SEQ ID NO: 247042 - DNA, 25 bp, Probe sequence
ggtaattggtttaagcttagcgcct

SEQ ID NO: 247043 - DNA, 25 bp, Probe sequence
ggaccagtcatcatggtaattggtt

SEQ ID NO: 247044 - DNA, 25 bp, Probe sequence
tgaaattattaccaccagttgttgt

SEQ ID NO: 247045 - DNA, 25 bp, Probe sequence
tacttttcggtattattgcagcaag

SEQ ID NO: 247046 - DNA, 25 bp, Probe sequence
ttagcattcattggtaagttcactg

SEQ ID NO: 247047 - DNA, 25 bp, Probe sequence
ttccctcatatttatctgccattta

SEQ ID NO: 247048 - DNA, 25 bp, Probe sequence
ttgccagtattattggtggaccacc

SEQ ID NO: 247049 - DNA, 25 bp, Probe sequence
attagtcattagacatccgtttaat

SEQ ID NO: 247050 - DNA, 25 bp, Probe sequence
atccggcacctgtgaatagaggagt

SEQ ID NO: 247051 - DNA, 25 bp, Probe sequence
atgcatccggcacctgtgaatagag

SEQ ID NO: 247052 - DNA, 25 bp, Probe sequence
atgcttggattgatgattctttaga

SEQ ID NO: 247053 - DNA, 25 bp, Probe sequence
agcgaatattaacatcccaattgcg

SEQ ID NO: 247054 - DNA, 25 bp, Probe sequence
agatttgcagcagatgattatcatc

SEQ ID NO: 247055 - DNA, 25 bp, Probe sequence
acattaaaaattcacgtgtcgcacg

SEQ ID NO: 247056 - DNA, 25 bp, Probe sequence
agcgatttagtagaagcttcaaaat

SEQ ID NO: 247057 - DNA, 25 bp, Probe sequence
aaatctggtgaacgtcaactaccaa

SEQ ID NO: 247058 - DNA, 25 bp, Probe sequence
aaacgattagctttgaaacatcaac

SEQ ID NO: 247059 - DNA, 25 bp, Probe sequence
aacatcatctgtttcaaaaggtgaa

SEQ ID NO: 247060 - DNA, 25 bp, Probe sequence
aacatcccaattgcgaatgctggtg

SEQ ID NO: 247061 - DNA, 25 bp, Probe sequence
aacatcaacatcatctgtttcaaaa

SEQ ID NO: 247062 - DNA, 25 bp, Probe sequence
aacgtaatgtttaatagcccaaatg

SEQ ID NO: 247063 - DNA, 25 bp, Probe sequence
aagtattggctgtgatttattagtc

SEQ ID NO: 247064 - DNA, 25 bp, Probe sequence
aaggcaagtcaatttaaatctggtg

SEQ ID NO: 247065 - DNA, 25 bp, Probe sequence
aatagcccaaatgcttggattgatg

SEQ ID NO: 247066 - DNA, 25 bp, Probe sequence
aatatggatattttgaaggcttgaa

SEQ ID NO: 247067 - DNA, 25 bp, Probe sequence
caatggaacatttatctacagatca

SEQ ID NO: 247068 - DNA, 25 bp, Probe sequence
catgggcttgcagaagaaactagat

SEQ ID NO: 247069 - DNA, 25 bp, Probe sequence
gcgaatgctggtgatggtagtggac

SEQ ID NO: 247070 - DNA, 25 bp, Probe sequence
gcaaatggaaaatggcgtttactta

SEQ ID NO: 247071 - DNA, 25 bp, Probe sequence
gaaggcttgaatgtattgatttgtg

SEQ ID NO: 247072 - DNA, 25 bp, Probe sequence
gaagaaactagatttgcagcagatg

SEQ ID NO: 247073 - DNA, 25 bp, Probe sequence
gaacgtcaactaccaaactttgaag

SEQ ID NO: 247074 - DNA, 25 bp, Probe sequence
gaaatggcagaacttaagctagggt

SEQ ID NO: 247075 - DNA, 25 bp, Probe sequence
gaaatatgtcgcaaatttattcttt

SEQ ID NO: 247076 - DNA, 25 bp, Probe sequence
gacatccgtttaataactactatga

SEQ ID NO: 247077 - DNA, 25 bp, Probe sequence
gatcaaatatacaaacttatccaaa

SEQ ID NO: 247078 - DNA, 25 bp, Probe sequence
gattatcatcaaaagcatggcttaa

SEQ ID NO: 247079 - DNA, 25 bp, Probe sequence
gtgtcgcacgtagtaattaccatag

SEQ ID NO: 247080 - DNA, 25 bp, Probe sequence
ggtgaatctttatatgacacatgta

SEQ ID NO: 247081 - DNA, 25 bp, Probe sequence
ggtagtggacaacatccaacacaaa

SEQ ID NO: 247082 - DNA, 25 bp, Probe sequence
tattctttgaaaattctactcgaac

SEQ ID NO: 247083 - DNA, 25 bp, Probe sequence
gaagggttactagacggtacaattg

SEQ ID NO: 247084 - DNA, 25 bp, Probe sequence
attgcacctgcaattgaaccaagca

SEQ ID NO: 247085 - DNA, 25 bp, Probe sequence
ataccaggtattccaaacatttgtg

SEQ ID NO: 247086 - DNA, 25 bp, Probe sequence
ataatacaccatttatcggctataa

SEQ ID NO: 247087 - DNA, 25 bp, Probe sequence
atcgatgacaatgctcaagtacgtg

SEQ ID NO: 247088 - DNA, 25 bp, Probe sequence
atgttacagctgaagttacaccaca

SEQ ID NO: 247089 - DNA, 25 bp, Probe sequence
aggtgcctttgcgtttacagatgac

SEQ ID NO: 247090 - DNA, 25 bp, Probe sequence
accatgcaccacatgcacgtgatga

SEQ ID NO: 247091 - DNA, 25 bp, Probe sequence
acagcattcccattattatatacgc

SEQ ID NO: 247092 - DNA, 25 bp, Probe sequence
acaagaccggtaccagattctgtag

SEQ ID NO: 247093 - DNA, 25 bp, Probe sequence
aaagccatcgtagcacactgtgaag

SEQ ID NO: 247094 - DNA, 25 bp, Probe sequence
aacgcgcaggcattcatgttacagc

SEQ ID NO: 247095 - DNA, 25 bp, Probe sequence
aagtacgtgtattaccttatgcttc

SEQ ID NO: 247096 - DNA, 25 bp, Probe sequence
aatgcctaacacaagaccggtacca

SEQ ID NO: 247097 - DNA, 25 bp, Probe sequence
catgtatgtcatgtttctactaaag

SEQ ID NO: 247098 - DNA, 25 bp, Probe sequence
cttatgcttcaattacaacacgtca

SEQ ID NO: 247099 - DNA, 25 bp, Probe sequence
gcgaaaggtcactttgtgtcacctg

SEQ ID NO: 247100 - DNA, 25 bp, Probe sequence
gctgctgctagaggcggatttacaa

SEQ ID NO: 247101 - DNA, 25 bp, Probe sequence
gaattggttgatttcccagcactag

SEQ ID NO: 247102 - DNA, 25 bp, Probe sequence
gaatccaccattgagaagtactgaa

SEQ ID NO: 247103 - DNA, 25 bp, Probe sequence
gaagcagcaggttgtcattatcatg

SEQ ID NO: 247104 - DNA, 25 bp, Probe sequence
gaaactggtactaaagctgctgcta

SEQ ID NO: 247105 - DNA, 25 bp, Probe sequence
gagaggctttgttagaagggttact

SEQ ID NO: 247106 - DNA, 25 bp, Probe sequence
gagatgtactattagctgaagcagc

SEQ ID NO: 247107 - DNA, 25 bp, Probe sequence
gatattcctggtaataatgccattt

SEQ ID NO: 247108 - DNA, 25 bp, Probe sequence
gtaggagtacaaactgcaagcatga

SEQ ID NO: 247109 - DNA, 25 bp, Probe sequence
gtgaatctgttcaaatcgcaagaga

SEQ ID NO: 247110 - DNA, 25 bp, Probe sequence
gtgtcacctggatttgtcgatgttc

SEQ ID NO: 247111 - DNA, 25 bp, Probe sequence
ggaaatccgatcttaacaatggttg

SEQ ID NO: 247112 - DNA, 25 bp, Probe sequence
ggaaaaagcaccattcggaattgtt

SEQ ID NO: 247113 - DNA, 25 bp, Probe sequence
tgtatcgcaacagaccatgcaccac

SEQ ID NO: 247114 - DNA, 25 bp, Probe sequence
taatctatggtggtgcaatgcatga

SEQ ID NO: 247115 - DNA, 25 bp, Probe sequence
tacaactgtatgtccaatgcctaac

SEQ ID NO: 247116 - DNA, 25 bp, Probe sequence
ttgtcgatgttcatgttcatttacg

SEQ ID NO: 247117 - DNA, 25 bp, Probe sequence
atcgtggtgcgaaccatccagttaa

SEQ ID NO: 247118 - DNA, 25 bp, Probe sequence
atcgtttcgactaaaacaccgtatg

SEQ ID NO: 247119 - DNA, 25 bp, Probe sequence
atgcaaagcaaacgttatctagtgt

SEQ ID NO: 247120 - DNA, 25 bp, Probe sequence
aggtaaggatctaagtgtcgtactt

SEQ ID NO: 247121 - DNA, 25 bp, Probe sequence
agaaactatttcagatccatcatat

SEQ ID NO: 247122 - DNA, 25 bp, Probe sequence
acggaccaggtaatcctgaagttgt

SEQ ID NO: 247123 - DNA, 25 bp, Probe sequence
acaggtcagatcattacttttacgt

SEQ ID NO: 247124 - DNA, 25 bp, Probe sequence
aaaggagcgtcatatcaatgcctaa

SEQ ID NO: 247125 - DNA, 25 bp, Probe sequence
aaagacacttcatgacgttttagaa

SEQ ID NO: 247126 - DNA, 25 bp, Probe sequence
aaagctggttttactgatcgaaaag

SEQ ID NO: 247127 - DNA, 25 bp, Probe sequence
aaaacattaccagcattttctgttc

SEQ ID NO: 247128 - DNA, 25 bp, Probe sequence
aacaccgtatgtttcgacaggtaag

SEQ ID NO: 247129 - DNA, 25 bp, Probe sequence
aagcgagtgcgcatccaagtaattt

SEQ ID NO: 247130 - DNA, 25 bp, Probe sequence
aattccagggattgcaggtgttgat

SEQ ID NO: 247131 - DNA, 25 bp, Probe sequence
gcattatctcaaggagcaagctcat

SEQ ID NO: 247132 - DNA, 25 bp, Probe sequence
gcattttctgttcaataccatcctg

SEQ ID NO: 247133 - DNA, 25 bp, Probe sequence
gcaatggctccagatggcgttatgc

SEQ ID NO: 247134 - DNA, 25 bp, Probe sequence
gaaggctaccgtttaggatctgata

SEQ ID NO: 247135 - DNA, 25 bp, Probe sequence
gaagtttggtcatcgtggtgcgaac

SEQ ID NO: 247136 - DNA, 25 bp, Probe sequence
tacttttacgtatccattaatcggt

SEQ ID NO: 247137 - DNA, 25 bp, Probe sequence
gaggttgtaacgtcacagttgtacc

SEQ ID NO: 247138 - DNA, 25 bp, Probe sequence
gattttgaatcattagtacctacat

SEQ ID NO: 247139 - DNA, 25 bp, Probe sequence
gttctttggtatctgtctaggacat

SEQ ID NO: 247140 - DNA, 25 bp, Probe sequence
gtaccatatacaactactgccgaag

SEQ ID NO: 247141 - DNA, 25 bp, Probe sequence
gtaaaattcgacaacacggtgtgtt

SEQ ID NO: 247142 - DNA, 25 bp, Probe sequence
gtgtcgtacttgtagactttggtaa

SEQ ID NO: 247143 - DNA, 25 bp, Probe sequence
ggatctgataacttaactgtaggag

SEQ ID NO: 247144 - DNA, 25 bp, Probe sequence
ggacatcaactttttgcattatctc

SEQ ID NO: 247145 - DNA, 25 bp, Probe sequence
ggaaaattccgttctttggtatctg

SEQ ID NO: 247146 - DNA, 25 bp, Probe sequence
ggcgttatgctatcaaacggaccag

SEQ ID NO: 247147 - DNA, 25 bp, Probe sequence
tccaggaccgtcagattcaaactat

SEQ ID NO: 247148 - DNA, 25 bp, Probe sequence
tcagatccatcatatacaggtcaga

SEQ ID NO: 247149 - DNA, 25 bp, Probe sequence
tcaataccatcctgaagcaaatcca

SEQ ID NO: 247150 - DNA, 25 bp, Probe sequence
tagaagttactcatcttgcattaaa

SEQ ID NO: 247151 - DNA, 25 bp, Probe sequence
atagcgcatcgctttaatatgacgg

SEQ ID NO: 247152 - DNA, 25 bp, Probe sequence
agtgggatacccgctaattgttaga

SEQ ID NO: 247153 - DNA, 25 bp, Probe sequence
agatggttgatacttgcgcagctga

SEQ ID NO: 247154 - DNA, 25 bp, Probe sequence
agctgctaaaatcgcggttggtcta

SEQ ID NO: 247155 - DNA, 25 bp, Probe sequence
aaatcttagtattaggctctggacc

SEQ ID NO: 247156 - DNA, 25 bp, Probe sequence
aaatccagcgacaatcatgactgat

SEQ ID NO: 247157 - DNA, 25 bp, Probe sequence
aagagcaacctgacgctttacttcc

SEQ ID NO: 247158 - DNA, 25 bp, Probe sequence
aattactgatattccaatggcacaa

SEQ ID NO: 247159 - DNA, 25 bp, Probe sequence
cagctacatcacctgaggaagcatt

SEQ ID NO: 247160 - DNA, 25 bp, Probe sequence
gctctggaccaattcgaatcggcca

SEQ ID NO: 247161 - DNA, 25 bp, Probe sequence
gaatgctgcagaaatcggatatccg

SEQ ID NO: 247162 - DNA, 25 bp, Probe sequence
gaagtaaatccgcgtgtatcacgtt

SEQ ID NO: 247163 - DNA, 25 bp, Probe sequence
gaacatcttatgcagcgtttgaacc

SEQ ID NO: 247164 - DNA, 25 bp, Probe sequence
gaaacagtttcaacagacttctcaa

SEQ ID NO: 247165 - DNA, 25 bp, Probe sequence
gacccaggctgtaaaagcgagtccg

SEQ ID NO: 247166 - DNA, 25 bp, Probe sequence
gacgctttacttccaactttaggtg

SEQ ID NO: 247167 - DNA, 25 bp, Probe sequence
gatggcttccaaattagacgtacta

SEQ ID NO: 247168 - DNA, 25 bp, Probe sequence
gatacagctaatgccttaacgaatg

SEQ ID NO: 247169 - DNA, 25 bp, Probe sequence
gatatccggttgtagtaagaccttc

SEQ ID NO: 247170 - DNA, 25 bp, Probe sequence
gattacttcttcttacacaagttcc

SEQ ID NO: 247171 - DNA, 25 bp, Probe sequence
gttatggccattggtcgaacttacg

SEQ ID NO: 247172 - DNA, 25 bp, Probe sequence
gtatcacgttcatcagcgttagctt

SEQ ID NO: 247173 - DNA, 25 bp, Probe sequence
gtggtgactcaatcgctgtatatcc

SEQ ID NO: 247174 - DNA, 25 bp, Probe sequence
gggtctgggccaattatcataggtc

SEQ ID NO: 247175 - DNA, 25 bp, Probe sequence
ggggttcaaccatatgctgagggtg

SEQ ID NO: 247176 - DNA, 25 bp, Probe sequence
ggtgtgcatcacttaggattaccaa

SEQ ID NO: 247177 - DNA, 25 bp, Probe sequence
ggtcttcattatagtccagcaacgc

SEQ ID NO: 247178 - DNA, 25 bp, Probe sequence
ggtattccatgtttgacatctttag

SEQ ID NO: 247179 - DNA, 25 bp, Probe sequence
ggagaacgagagcttggcacacaaa

SEQ ID NO: 247180 - DNA, 25 bp, Probe sequence
ggaactgagctaacatcaattcaac

SEQ ID NO: 247181 - DNA, 25 bp, Probe sequence
tgtattaggtggtcgcgcaatggaa

SEQ ID NO: 247182 - DNA, 25 bp, Probe sequence
tacgatgggtggtaccggaggcggt

SEQ ID NO: 247183 - DNA, 25 bp, Probe sequence
taaacatggcgattcaactacacga

SEQ ID NO: 247184 - DNA, 25 bp, Probe sequence
ttaacgtgccacagccacaagggaa

SEQ ID NO: 247185 - DNA, 25 bp, Probe sequence
attgaaatgtcacgtcctgtcaaaa

SEQ ID NO: 247186 - DNA, 25 bp, Probe sequence
atttttgaatcatctagcaggtatt

SEQ ID NO: 247187 - DNA, 25 bp, Probe sequence
atcatctagcaggtattaatttaaa

SEQ ID NO: 247188 - DNA, 25 bp, Probe sequence
atgtcacgtcctgtcaaaatgaata

SEQ ID NO: 247189 - DNA, 25 bp, Probe sequence
acgtcctgtcaaaatgaatagttta

SEQ ID NO: 247190 - DNA, 25 bp, Probe sequence
acatttttgaatcatctagcaggta

SEQ ID NO: 247191 - DNA, 25 bp, Probe sequence
aaatgtcacgtcctgtcaaaatgaa

SEQ ID NO: 247192 - DNA, 25 bp, Probe sequence
aaactctttaaggattatgttaatg

SEQ ID NO: 247193 - DNA, 25 bp, Probe sequence
aaacatttttgaatcatctagcagg

SEQ ID NO: 247194 - DNA, 25 bp, Probe sequence
aacatttttgaatcatctagcaggt

SEQ ID NO: 247195 - DNA, 25 bp, Probe sequence
aatgtcacgtcctgtcaaaatgaat

SEQ ID NO: 247196 - DNA, 25 bp, Probe sequence
cacgtcctgtcaaaatgaatagttt

SEQ ID NO: 247197 - DNA, 25 bp, Probe sequence
catttttgaatcatctagcaggtat

SEQ ID NO: 247198 - DNA, 25 bp, Probe sequence
ctgacaccacaaaaattattgaatt

SEQ ID NO: 247199 - DNA, 25 bp, Probe sequence
gaatcatctagcaggtattaattta

SEQ ID NO: 247200 - DNA, 25 bp, Probe sequence
gaaacatttttgaatcatctagcag

SEQ ID NO: 247201 - DNA, 25 bp, Probe sequence
gaaatgtcacgtcctgtcaaaatga

SEQ ID NO: 247202 - DNA, 25 bp, Probe sequence
gattgaaatgtcacgtcctgtcaaa

SEQ ID NO: 247203 - DNA, 25 bp, Probe sequence
gtttattaaagttgtattttgatag

SEQ ID NO: 247204 - DNA, 25 bp, Probe sequence
gtcacgtcctgtcaaaatgaatagt

SEQ ID NO: 247205 - DNA, 25 bp, Probe sequence
gtcctgtcaaaatgaatagtttatt

SEQ ID NO: 247206 - DNA, 25 bp, Probe sequence
gtgattgaaatgtcacgtcctgtca

SEQ ID NO: 247207 - DNA, 25 bp, Probe sequence
tgtcacgtcctgtcaaaatgaatag

SEQ ID NO: 247208 - DNA, 25 bp, Probe sequence
tgattgaaatgtcacgtcctgtcaa

SEQ ID NO: 247209 - DNA, 25 bp, Probe sequence
tgaaatgtcacgtcctgtcaaaatg

SEQ ID NO: 247210 - DNA, 25 bp, Probe sequence
tcatctagcaggtattaatttaaaa

SEQ ID NO: 247211 - DNA, 25 bp, Probe sequence
tcacgtcctgtcaaaatgaatagtt

SEQ ID NO: 247212 - DNA, 25 bp, Probe sequence
tactgacaccacaaaaattattgaa

SEQ ID NO: 247213 - DNA, 25 bp, Probe sequence
tagcaggtattaatttaaaactctt

SEQ ID NO: 247214 - DNA, 25 bp, Probe sequence
tttgaatcatctagcaggtattaat

SEQ ID NO: 247215 - DNA, 25 bp, Probe sequence
tttttgaatcatctagcaggtatta

SEQ ID NO: 247216 - DNA, 25 bp, Probe sequence
ttttgaatcatctagcaggtattaa

SEQ ID NO: 247217 - DNA, 25 bp, Probe sequence
ttgaaatgtcacgtcctgtcaaaat

SEQ ID NO: 247218 - DNA, 25 bp, Probe sequence
ttgaatcatctagcaggtattaatt

SEQ ID NO: 247219 - DNA, 25 bp, Probe sequence
attgcagtaacacagcttacgtcaa

SEQ ID NO: 247220 - DNA, 25 bp, Probe sequence
atgccaagttagcaaatgcagctgg

SEQ ID NO: 247221 - DNA, 25 bp, Probe sequence
atgcagctggtttagatggcgttgt

SEQ ID NO: 247222 - DNA, 25 bp, Probe sequence
atgaaagatttaccaattattgcat

SEQ ID NO: 247223 - DNA, 25 bp, Probe sequence
agaaagaggccatgatgtattttta

SEQ ID NO: 247224 - DNA, 25 bp, Probe sequence
agcttggttcgacgcatattgtagt

SEQ ID NO: 247225 - DNA, 25 bp, Probe sequence
acgacaccggaagaagcaagacagc

SEQ ID NO: 247226 - DNA, 25 bp, Probe sequence
acgacacgaacaaaatatacaaaca

SEQ ID NO: 247227 - DNA, 25 bp, Probe sequence
acatcgattgaagaggccgttttaa

SEQ ID NO: 247228 - DNA, 25 bp, Probe sequence
acagaagacatgttacgacacgaac

SEQ ID NO: 247229 - DNA, 25 bp, Probe sequence
aaatgttcatgctgctggtggcgta

SEQ ID NO: 247230 - DNA, 25 bp, Probe sequence
aacacagcttacgtcaacaacagaa

SEQ ID NO: 247231 - DNA, 25 bp, Probe sequence
aagacagcttggttcgacgcatatt

SEQ ID NO: 247232 - DNA, 25 bp, Probe sequence
caagaaggtcctcaattaattaatg

SEQ ID NO: 247233 - DNA, 25 bp, Probe sequence
gcgatggaaggactagctaaattga

SEQ ID NO: 247234 - DNA, 25 bp, Probe sequence
gcgtaaaaatgatgtctgaggccat

SEQ ID NO: 247235 - DNA, 25 bp, Probe sequence
gaatcattattcgtaaaagtaggta

SEQ ID NO: 247236 - DNA, 25 bp, Probe sequence
gaagcaagacagcttggttcgacgc

SEQ ID NO: 247237 - DNA, 25 bp, Probe sequence
gacaatccagtcgaaagttatcata

SEQ ID NO: 247238 - DNA, 25 bp, Probe sequence
gactgaaaagttaggtacatcattt

SEQ ID NO: 247239 - DNA, 25 bp, Probe sequence
gacgcatattgtagtcggtagaccg

SEQ ID NO: 247240 - DNA, 25 bp, Probe sequence
gaccaacaccgtattacgacaccgg

SEQ ID NO: 247241 - DNA, 25 bp, Probe sequence
gaggccgttttaaattatgccaagt

SEQ ID NO: 247242 - DNA, 25 bp, Probe sequence
gatgtctgaggccattaaaggatta

SEQ ID NO: 247243 - DNA, 25 bp, Probe sequence
gatctggtaaatgttcatgctgctg

SEQ ID NO: 247244 - DNA, 25 bp, Probe sequence
gttgtttgttcacctcttgaaagtc

SEQ ID NO: 247245 - DNA, 25 bp, Probe sequence
gttcatgctgctggtggcgtaaaaa

SEQ ID NO: 247246 - DNA, 25 bp, Probe sequence
gtcggtagaccgattacacaaagtg

SEQ ID NO: 247247 - DNA, 25 bp, Probe sequence
ggtatggaacttttttatcaagaag

SEQ ID NO: 247248 - DNA, 25 bp, Probe sequence
tcacctcttgaaagtcgtatgttga

SEQ ID NO: 247249 - DNA, 25 bp, Probe sequence
tacacaaagtgacaatccagtcgaa

SEQ ID NO: 247250 - DNA, 25 bp, Probe sequence
taccaattattgcattagattttga

SEQ ID NO: 247251 - DNA, 25 bp, Probe sequence
tagatggcgttgtttgttcacctct

SEQ ID NO: 247252 - DNA, 25 bp, Probe sequence
ttttttatcaagaaggtcctcaatt

SEQ ID NO: 247253 - DNA, 25 bp, Probe sequence
cctttagttcgaggcgcaatccgcg

SEQ ID NO: 247254 - DNA, 25 bp, Probe sequence
attgaagctgtaacattatcaccaa

SEQ ID NO: 247255 - DNA, 25 bp, Probe sequence
atgttcgttcatcaaataagagtca

SEQ ID NO: 247256 - DNA, 25 bp, Probe sequence
aggcgcaatccgcgatggtttaatt

SEQ ID NO: 247257 - DNA, 25 bp, Probe sequence
agaacactttcctgaagtagaagtt

SEQ ID NO: 247258 - DNA, 25 bp, Probe sequence
agaagttatttctggtactgcaaca

SEQ ID NO: 247259 - DNA, 25 bp, Probe sequence
agcaatattcaactacctttttaca

SEQ ID NO: 247260 - DNA, 25 bp, Probe sequence
accgatttactgtgataaccgtgtt

SEQ ID NO: 247261 - DNA, 25 bp, Probe sequence
aaatttctagtgaagatatccaaac

SEQ ID NO: 247262 - DNA, 25 bp, Probe sequence
aagagtcatggtaagcaaaatcaaa

SEQ ID NO: 247263 - DNA, 25 bp, Probe sequence
aattaccaatgaattatgttcgttc

SEQ ID NO: 247264 - DNA, 25 bp, Probe sequence
caatattcaactacctttttacact

SEQ ID NO: 247265 - DNA, 25 bp, Probe sequence
ctgtgataaccgtgttacgttaggt

SEQ ID NO: 247266 - DNA, 25 bp, Probe sequence
gctgtaacattatcaccaaatgatt

SEQ ID NO: 247267 - DNA, 25 bp, Probe sequence
gcaggtgcagaagtattaggtgttg

SEQ ID NO: 247268 - DNA, 25 bp, Probe sequence
gcagatgatacatttagcaatattc

SEQ ID NO: 247269 - DNA, 25 bp, Probe sequence
gcaacagctggtattccacatgcag

SEQ ID NO: 247270 - DNA, 25 bp, Probe sequence
gcaatccgcgatggtttaattaact

SEQ ID NO: 247271 - DNA, 25 bp, Probe sequence
gaagatatccaaacattagttgaat

SEQ ID NO: 247272 - DNA, 25 bp, Probe sequence
gacagggggatcttcagtcacagca

SEQ ID NO: 247273 - DNA, 25 bp, Probe sequence
gagttcaggtattaaatcaccgatt

SEQ ID NO: 247274 - DNA, 25 bp, Probe sequence
gatttatatacatggagttcaggta

SEQ ID NO: 247275 - DNA, 25 bp, Probe sequence
gtcacagcagttgaagccttaaaac

SEQ ID NO: 247276 - DNA, 25 bp, Probe sequence
gtgatagaagatttaatttcgacag

SEQ ID NO: 247277 - DNA, 25 bp, Probe sequence
gggatcttcagtcacagcagttgaa

SEQ ID NO: 247278 - DNA, 25 bp, Probe sequence
ggtactgcaacagctggtattccac

SEQ ID NO: 247279 - DNA, 25 bp, Probe sequence
ggtattccacatgcagcttttattg

SEQ ID NO: 247280 - DNA, 25 bp, Probe sequence
tgaatggagagacaacttagcataa

SEQ ID NO: 247281 - DNA, 25 bp, Probe sequence
tccacatgcagcttttattgctgaa

SEQ ID NO: 247282 - DNA, 25 bp, Probe sequence
tcgaggcgcaatccgcgatggttta

SEQ ID NO: 247283 - DNA, 25 bp, Probe sequence
tcagtcacagcagttgaagccttaa

SEQ ID NO: 247284 - DNA, 25 bp, Probe sequence
taatttcgacagggggatcttcagt

SEQ ID NO: 247285 - DNA, 25 bp, Probe sequence
taggttatcctttagttcgaggcgc

SEQ ID NO: 247286 - DNA, 25 bp, Probe sequence
tagttcgaggcgcaatccgcgatgg

SEQ ID NO: 247287 - DNA, 25 bp, Probe sequence
attccaatctatctagtagtcacga

SEQ ID NO: 247288 - DNA, 25 bp, Probe sequence
atctagtagtcacgatgtcgacgaa

SEQ ID NO: 247289 - DNA, 25 bp, Probe sequence
atcattcaaatgattccaatctatc

SEQ ID NO: 247290 - DNA, 25 bp, Probe sequence
atctatctagtagtcacgatgtcga

SEQ ID NO: 247291 - DNA, 25 bp, Probe sequence
atgattccaatctatctagtagtca

SEQ ID NO: 247292 - DNA, 25 bp, Probe sequence
aaaacatctaatgatttatatggga

SEQ ID NO: 247293 - DNA, 25 bp, Probe sequence
aacgaatttatcaatcattcaaatg

SEQ ID NO: 247294 - DNA, 25 bp, Probe sequence
aatgattccaatctatctagtagtc

SEQ ID NO: 247295 - DNA, 25 bp, Probe sequence
aatgatgatttatttaaacatgtaa

SEQ ID NO: 247296 - DNA, 25 bp, Probe sequence
aatctatctagtagtcacgatgtcg

SEQ ID NO: 247297 - DNA, 25 bp, Probe sequence
ctagtagtcacgatgtcgacgaaag

SEQ ID NO: 247298 - DNA, 25 bp, Probe sequence
caatctatctagtagtcacgatgtc

SEQ ID NO: 247299 - DNA, 25 bp, Probe sequence
cacgatgtcgacgaaagttcaacga

SEQ ID NO: 247300 - DNA, 25 bp, Probe sequence
cattcaaatgattccaatctatcta

SEQ ID NO: 247301 - DNA, 25 bp, Probe sequence
ctatctagtagtcacgatgtcgacg

SEQ ID NO: 247302 - DNA, 25 bp, Probe sequence
ccaatctatctagtagtcacgatgt

SEQ ID NO: 247303 - DNA, 25 bp, Probe sequence
gaatgacaaaacatctaatgattta

SEQ ID NO: 247304 - DNA, 25 bp, Probe sequence
gaaagttcaacgaagcaaaaacata

SEQ ID NO: 247305 - DNA, 25 bp, Probe sequence
gatgtcgacgaaagttcaacgaagc

SEQ ID NO: 247306 - DNA, 25 bp, Probe sequence
gattccaatctatctagtagtcacg

SEQ ID NO: 247307 - DNA, 25 bp, Probe sequence
gtagtcacgatgtcgacgaaagttc

SEQ ID NO: 247308 - DNA, 25 bp, Probe sequence
gtaacgaatttatcaatcattcaaa

SEQ ID NO: 247309 - DNA, 25 bp, Probe sequence
gtcgacgaaagttcaacgaagcaaa

SEQ ID NO: 247310 - DNA, 25 bp, Probe sequence
gtcacgatgtcgacgaaagttcaac

SEQ ID NO: 247311 - DNA, 25 bp, Probe sequence
tgattccaatctatctagtagtcac

SEQ ID NO: 247312 - DNA, 25 bp, Probe sequence
tccaatctatctagtagtcacgatg

SEQ ID NO: 247313 - DNA, 25 bp, Probe sequence
tctagtagtcacgatgtcgacgaaa

SEQ ID NO: 247314 - DNA, 25 bp, Probe sequence
tctatctagtagtcacgatgtcgac

SEQ ID NO: 247315 - DNA, 25 bp, Probe sequence
tcaaatgattccaatctatctagta

SEQ ID NO: 247316 - DNA, 25 bp, Probe sequence
taaaacattgtaacgaatttatcaa

SEQ ID NO: 247317 - DNA, 25 bp, Probe sequence
tatctagtagtcacgatgtcgacga

SEQ ID NO: 247318 - DNA, 25 bp, Probe sequence
tagtcacgatgtcgacgaaagttca

SEQ ID NO: 247319 - DNA, 25 bp, Probe sequence
tagtagtcacgatgtcgacgaaagt

SEQ ID NO: 247320 - DNA, 25 bp, Probe sequence
ttccaatctatctagtagtcacgat

SEQ ID NO: 247321 - DNA, 25 bp, Probe sequence
attaccaatgaatcctgcgatttca

SEQ ID NO: 247322 - DNA, 25 bp, Probe sequence
ataacaatggctaagtatggtgaaa

SEQ ID NO: 247323 - DNA, 25 bp, Probe sequence
atggaacgactatttaatggattaa

SEQ ID NO: 247324 - DNA, 25 bp, Probe sequence
agatagtgagattataacaatggct

SEQ ID NO: 247325 - DNA, 25 bp, Probe sequence
acagagagtttgcttgggttcaaga

SEQ ID NO: 247326 - DNA, 25 bp, Probe sequence
acacaagcttatttgaagatagtga

SEQ ID NO: 247327 - DNA, 25 bp, Probe sequence
aactatacacaagcttatttgaaga

SEQ ID NO: 247328 - DNA, 25 bp, Probe sequence
aagttttcaattagcattacctgag

SEQ ID NO: 247329 - DNA, 25 bp, Probe sequence
aatggacaagtattcatggcgattg

SEQ ID NO: 247330 - DNA, 25 bp, Probe sequence
aatgccaaaaacgaatatgccacca

SEQ ID NO: 247331 - DNA, 25 bp, Probe sequence
cacagaattaccaatgaatcctgcg

SEQ ID NO: 247332 - DNA, 25 bp, Probe sequence
catacagagagtttgcttgggttca

SEQ ID NO: 247333 - DNA, 25 bp, Probe sequence
gccaaaaacgaatatgccaccatac

SEQ ID NO: 247334 - DNA, 25 bp, Probe sequence
gcgatttcattatttgttacagtaa

SEQ ID NO: 247335 - DNA, 25 bp, Probe sequence
gctgttaaactatacacaagcttat

SEQ ID NO: 247336 - DNA, 25 bp, Probe sequence
gctaatagtggcacagaattaccaa

SEQ ID NO: 247337 - DNA, 25 bp, Probe sequence
gcttgggttcaagataagtttggag

SEQ ID NO: 247338 - DNA, 25 bp, Probe sequence
gaattaccaatgaatcctgcgattt

SEQ ID NO: 247339 - DNA, 25 bp, Probe sequence
gaatcctgcgatttcattatttgtt

SEQ ID NO: 247340 - DNA, 25 bp, Probe sequence
gaagaagctgttaaactatacacaa

SEQ ID NO: 247341 - DNA, 25 bp, Probe sequence
gacaagtattcatggcgattgatgc

SEQ ID NO: 247342 - DNA, 25 bp, Probe sequence
gatactattgaaatggaacgactat

SEQ ID NO: 247343 - DNA, 25 bp, Probe sequence
gtttggagtaagttttcaattagca

SEQ ID NO: 247344 - DNA, 25 bp, Probe sequence
gtattcatggcgattgatgctaata

SEQ ID NO: 247345 - DNA, 25 bp, Probe sequence
gggactgtacaacactcaatattta

SEQ ID NO: 247346 - DNA, 25 bp, Probe sequence
ggtgccattttaatgccaaaaacga

SEQ ID NO: 247347 - DNA, 25 bp, Probe sequence
ggattaaaagatgaaggtgccattt

SEQ ID NO: 247348 - DNA, 25 bp, Probe sequence
ggcgattgatgctaatagtggcaca

SEQ ID NO: 247349 - DNA, 25 bp, Probe sequence
tgccaccatacagagagtttgcttg

SEQ ID NO: 247350 - DNA, 25 bp, Probe sequence
tcctgcgatttcattatttgttaca

SEQ ID NO: 247351 - DNA, 25 bp, Probe sequence
tacaacactcaatatttacattaaa

SEQ ID NO: 247352 - DNA, 25 bp, Probe sequence
tatgccaccatacagagagtttgct

SEQ ID NO: 247353 - DNA, 25 bp, Probe sequence
tatggtgaaaatggacctggtgatc

SEQ ID NO: 247354 - DNA, 25 bp, Probe sequence
ttttcaattagcattacctgagtaa

SEQ ID NO: 247355 - DNA, 25 bp, Probe sequence
attctatttcaatgacaacacgtca

SEQ ID NO: 247356 - DNA, 25 bp, Probe sequence
atacgattacgttgtagttaatgat

SEQ ID NO: 247357 - DNA, 25 bp, Probe sequence
ataagtattctatttcaatgacaac

SEQ ID NO: 247358 - DNA, 25 bp, Probe sequence
atcgttttatcaggaccatctggag

SEQ ID NO: 247359 - DNA, 25 bp, Probe sequence
atgcgtgaaggtgaagttgatggcg

SEQ ID NO: 247360 - DNA, 25 bp, Probe sequence
atgatgaatttatacgattacgttg

SEQ ID NO: 247361 - DNA, 25 bp, Probe sequence
aggtgcaaagcaagttagaaagaaa

SEQ ID NO: 247362 - DNA, 25 bp, Probe sequence
agaaaacgaatatttgaagatccaa

SEQ ID NO: 247363 - DNA, 25 bp, Probe sequence
acgttgtagttaatgatgaagtaga

SEQ ID NO: 247364 - DNA, 25 bp, Probe sequence
aactagggatgcgtttgaagcttta

SEQ ID NO: 247365 - DNA, 25 bp, Probe sequence
ctagggatgcgtttgaagctttaat

SEQ ID NO: 247366 - DNA, 25 bp, Probe sequence
gcacttaaaaagagagcgcgtagaa

SEQ ID NO: 247367 - DNA, 25 bp, Probe sequence
gcaactattatggtacaccagttca

SEQ ID NO: 247368 - DNA, 25 bp, Probe sequence
gaatatgctgaatatgtaggcaact

SEQ ID NO: 247369 - DNA, 25 bp, Probe sequence
gaaggtgaagttgatggcgtagatt

SEQ ID NO: 247370 - DNA, 25 bp, Probe sequence
gacaacacgtcaaatgcgtgaaggt

SEQ ID NO: 247371 - DNA, 25 bp, Probe sequence
gaccatctggagtaggtaaaggtac

SEQ ID NO: 247372 - DNA, 25 bp, Probe sequence
gagagcgcgtagaagctaagtatag

SEQ ID NO: 247373 - DNA, 25 bp, Probe sequence
gatgaccaatttatagaatatgctg

SEQ ID NO: 247374 - DNA, 25 bp, Probe sequence
gttgatggcgtagattactttttta

SEQ ID NO: 247375 - DNA, 25 bp, Probe sequence
gttaatcgttttatcaggaccatct

SEQ ID NO: 247376 - DNA, 25 bp, Probe sequence
gttaaagatacaatggacgaaggtc

SEQ ID NO: 247377 - DNA, 25 bp, Probe sequence
gtaggcaactattatggtacaccag

SEQ ID NO: 247378 - DNA, 25 bp, Probe sequence
gtagaacttgcgaagaatagaattc

SEQ ID NO: 247379 - DNA, 25 bp, Probe sequence
ggtacaccagttcaatatgttaaag

SEQ ID NO: 247380 - DNA, 25 bp, Probe sequence
ggattgttaatcgttttatcaggac

SEQ ID NO: 247381 - DNA, 25 bp, Probe sequence
ggacgaaggtcatgatgtattttta

SEQ ID NO: 247382 - DNA, 25 bp, Probe sequence
tattttcttagcacctccaagttta

SEQ ID NO: 247383 - DNA, 25 bp, Probe sequence
tatggtacaccagttcaatatgtta

SEQ ID NO: 247384 - DNA, 25 bp, Probe sequence
tttattttcttagcacctccaagtt

SEQ ID NO: 247385 - DNA, 25 bp, Probe sequence
tatttattttcttagcacctccaag

SEQ ID NO: 247386 - DNA, 25 bp, Probe sequence
tattgtagaagctgagcacttaaaa

SEQ ID NO: 247387 - DNA, 25 bp, Probe sequence
ttatcaggaccatctggagtaggta

SEQ ID NO: 247388 - DNA, 25 bp, Probe sequence
ttttcttagcacctccaagtttaga

SEQ ID NO: 247389 - DNA, 25 bp, Probe sequence
attgctgacggtaaaattcgccctg

SEQ ID NO: 247390 - DNA, 25 bp, Probe sequence
attgatgaacaacctgaaactgaat

SEQ ID NO: 247391 - DNA, 25 bp, Probe sequence
atttaattgcaacaactgcagcgaa

SEQ ID NO: 247392 - DNA, 25 bp, Probe sequence
atatcattcatttaaaccagttggt

SEQ ID NO: 247393 - DNA, 25 bp, Probe sequence
accagttggtagagcgttagaagaa

SEQ ID NO: 247394 - DNA, 25 bp, Probe sequence
actgcagcgaaaagagcgcgtgaaa

SEQ ID NO: 247395 - DNA, 25 bp, Probe sequence
acaactgcagcgaaaagagcgcgtg

SEQ ID NO: 247396 - DNA, 25 bp, Probe sequence
aaaccagttggtagagcgttagaag

SEQ ID NO: 247397 - DNA, 25 bp, Probe sequence
aactgcagcgaaaagagcgcgtgaa

SEQ ID NO: 247398 - DNA, 25 bp, Probe sequence
aacgtcacaaattaaatcaaagtat

SEQ ID NO: 247399 - DNA, 25 bp, Probe sequence
aagagcgcgtgaaattgatgaacaa

SEQ ID NO: 247400 - DNA, 25 bp, Probe sequence
ccaattaacgtcacaaattaaatca

SEQ ID NO: 247401 - DNA, 25 bp, Probe sequence
caacctgaaactgaattattaagtg

SEQ ID NO: 247402 - DNA, 25 bp, Probe sequence
caaagtatttaattgcaacaactgc

SEQ ID NO: 247403 - DNA, 25 bp, Probe sequence
ctgacggtaaaattcgccctgttat

SEQ ID NO: 247404 - DNA, 25 bp, Probe sequence
gcgcgtgaaattgatgaacaacctg

SEQ ID NO: 247405 - DNA, 25 bp, Probe sequence
gcgtgaaattgatgaacaacctgaa

SEQ ID NO: 247406 - DNA, 25 bp, Probe sequence
gcaacaactgcagcgaaaagagcgc

SEQ ID NO: 247407 - DNA, 25 bp, Probe sequence
gaatatcattcatttaaaccagttg

SEQ ID NO: 247408 - DNA, 25 bp, Probe sequence
gaacaacctgaaactgaattattaa

SEQ ID NO: 247409 - DNA, 25 bp, Probe sequence
gaaaagagcgcgtgaaattgatgaa

SEQ ID NO: 247410 - DNA, 25 bp, Probe sequence
gaaattgatgaacaacctgaaactg

SEQ ID NO: 247411 - DNA, 25 bp, Probe sequence
gagcgttagaagaaattgctgacgg

SEQ ID NO: 247412 - DNA, 25 bp, Probe sequence
gagcgcgtgaaattgatgaacaacc

SEQ ID NO: 247413 - DNA, 25 bp, Probe sequence
gatgaacaacctgaaactgaattat

SEQ ID NO: 247414 - DNA, 25 bp, Probe sequence
gttggtagagcgttagaagaaattg

SEQ ID NO: 247415 - DNA, 25 bp, Probe sequence
gtatttaattgcaacaactgcagcg

SEQ ID NO: 247416 - DNA, 25 bp, Probe sequence
gtaaaattcgccctgttatttcaag

SEQ ID NO: 247417 - DNA, 25 bp, Probe sequence
tgacggtaaaattcgccctgttatt

SEQ ID NO: 247418 - DNA, 25 bp, Probe sequence
tgctgacggtaaaattcgccctgtt

SEQ ID NO: 247419 - DNA, 25 bp, Probe sequence
tcattcatttaaaccagttggtaga

SEQ ID NO: 247420 - DNA, 25 bp, Probe sequence
taattgcaacaactgcagcgaaaag

SEQ ID NO: 247421 - DNA, 25 bp, Probe sequence
tatcattcatttaaaccagttggta

SEQ ID NO: 247422 - DNA, 25 bp, Probe sequence
ttgctgacggtaaaattcgccctgt

SEQ ID NO: 247423 - DNA, 25 bp, Probe sequence
attgcgcctgctatgaatgtgcata

SEQ ID NO: 247424 - DNA, 25 bp, Probe sequence
atcgatccagtcagatttgtatcca

SEQ ID NO: 247425 - DNA, 25 bp, Probe sequence
atgtctatcggatttagttctgatg

SEQ ID NO: 247426 - DNA, 25 bp, Probe sequence
agtaatcgtttagctaatagttcat

SEQ ID NO: 247427 - DNA, 25 bp, Probe sequence
acagtatttaataggctttgcagca

SEQ ID NO: 247428 - DNA, 25 bp, Probe sequence
acaatctgggtatgaagttcgcgtt

SEQ ID NO: 247429 - DNA, 25 bp, Probe sequence
aactattgaagttatcgatccagtc

SEQ ID NO: 247430 - DNA, 25 bp, Probe sequence
aagaaccgcttcaaatcgtttctgt

SEQ ID NO: 247431 - DNA, 25 bp, Probe sequence
aagataaacgcgcattggttacagc

SEQ ID NO: 247432 - DNA, 25 bp, Probe sequence
aaggacgtatggaagaaccgcttca

SEQ ID NO: 247433 - DNA, 25 bp, Probe sequence
caggtggcattgcggcatataaagc

SEQ ID NO: 247434 - DNA, 25 bp, Probe sequence
gcagatgcaatcattgttgcacctg

SEQ ID NO: 247435 - DNA, 25 bp, Probe sequence
gcagcagccgtatctgactatacac

SEQ ID NO: 247436 - DNA, 25 bp, Probe sequence
gaagttattcatgttcaaagtgctg

SEQ ID NO: 247437 - DNA, 25 bp, Probe sequence
gaagcattgcgaaatcgaggagcta

SEQ ID NO: 247438 - DNA, 25 bp, Probe sequence
gaaaatccttcagaaatacagcata

SEQ ID NO: 247439 - DNA, 25 bp, Probe sequence
gacaagtaagttaacacaatctggg

SEQ ID NO: 247440 - DNA, 25 bp, Probe sequence
gacaccgaaatttattgcgcctgct

SEQ ID NO: 247441 - DNA, 25 bp, Probe sequence
gatattgttgtaaaagcagcagccg

SEQ ID NO: 247442 - DNA, 25 bp, Probe sequence
gatttgtatccaatcgttcttctgg

SEQ ID NO: 247443 - DNA, 25 bp, Probe sequence
gatttgtcagtatcttttaaacgta

SEQ ID NO: 247444 - DNA, 25 bp, Probe sequence
gttgcacctgcaacggcaaatacaa

SEQ ID NO: 247445 - DNA, 25 bp, Probe sequence
gttgctagcaacagagacaccgaaa

SEQ ID NO: 247446 - DNA, 25 bp, Probe sequence
gttatgttaacgaatcacgcacaaa

SEQ ID NO: 247447 - DNA, 25 bp, Probe sequence
gtatcattttatcgaaccaggaagc

SEQ ID NO: 247448 - DNA, 25 bp, Probe sequence
gtaggtattgctgatgatttggtga

SEQ ID NO: 247449 - DNA, 25 bp, Probe sequence
gtagtattagctgcacaaattttag

SEQ ID NO: 247450 - DNA, 25 bp, Probe sequence
gtgacaagccgatttgacgaacaag

SEQ ID NO: 247451 - DNA, 25 bp, Probe sequence
gtgacaccattagcatttcaagcaa

SEQ ID NO: 247452 - DNA, 25 bp, Probe sequence
gtggttatgttgctaaaggacgtat

SEQ ID NO: 247453 - DNA, 25 bp, Probe sequence
ggtatgaagttcgcgttatgttaac

SEQ ID NO: 247454 - DNA, 25 bp, Probe sequence
taggctttgcagcagagactgaaga

SEQ ID NO: 247455 - DNA, 25 bp, Probe sequence
tttggtgacatcaacgttgctagca

SEQ ID NO: 247456 - DNA, 25 bp, Probe sequence
ttagccgttacaggtggcattgcgg

SEQ ID NO: 247457 - DNA, 25 bp, Probe sequence
attatccgagatatcacgctagaga

SEQ ID NO: 247458 - DNA, 25 bp, Probe sequence
atttacctgattttcgggcgagcga

SEQ ID NO: 247459 - DNA, 25 bp, Probe sequence
atctgtcatccaacctggtgtgcgt

SEQ ID NO: 247460 - DNA, 25 bp, Probe sequence
acttcatggtgtgacgggatcaggt

SEQ ID NO: 247461 - DNA, 25 bp, Probe sequence
aaaagcgcttgtactaggtccatct

SEQ ID NO: 247462 - DNA, 25 bp, Probe sequence
aaccaagcgtgctgttcgtgtcatt

SEQ ID NO: 247463 - DNA, 25 bp, Probe sequence
aaggcaggtcaagtcatcattcaaa

SEQ ID NO: 247464 - DNA, 25 bp, Probe sequence
cagaacctgatgcacaacttgacgt

SEQ ID NO: 247465 - DNA, 25 bp, Probe sequence
caccgcaaatggttttacgcttcaa

SEQ ID NO: 247466 - DNA, 25 bp, Probe sequence
cacgctagagaaattgcccaatggc

SEQ ID NO: 247467 - DNA, 25 bp, Probe sequence
catctccggcagcacttgcgagaat

SEQ ID NO: 247468 - DNA, 25 bp, Probe sequence
cggtgacattttactaggtactcag

SEQ ID NO: 247469 - DNA, 25 bp, Probe sequence
gctgtattacattctggcttatcta

SEQ ID NO: 247470 - DNA, 25 bp, Probe sequence
gaagtgcaacaccatgtcttgaaag

SEQ ID NO: 247471 - DNA, 25 bp, Probe sequence
gaacacattcgacaagtaggtactg

SEQ ID NO: 247472 - DNA, 25 bp, Probe sequence
gaaagtcatagtcgatgtcgcgtcg

SEQ ID NO: 247473 - DNA, 25 bp, Probe sequence
gaaatcgctctaacaccgcaaatgg

SEQ ID NO: 247474 - DNA, 25 bp, Probe sequence
gacgcggttgttgaaagagacccat

SEQ ID NO: 247475 - DNA, 25 bp, Probe sequence
gagacccatttaaagatcgtgtttt

SEQ ID NO: 247476 - DNA, 25 bp, Probe sequence
gagtgaaccaacaagctttacctga

SEQ ID NO: 247477 - DNA, 25 bp, Probe sequence
gatgttagttcctgaaatcgctcta

SEQ ID NO: 247478 - DNA, 25 bp, Probe sequence
gatttgtatgcttacttgtctgaag

SEQ ID NO: 247479 - DNA, 25 bp, Probe sequence
gatttggtgatgacgttgctgtatt

SEQ ID NO: 247480 - DNA, 25 bp, Probe sequence
gtttatcatttgctatcattaccaa

SEQ ID NO: 247481 - DNA, 25 bp, Probe sequence
gtgtgttcgcacctttcaaaaattt

SEQ ID NO: 247482 - DNA, 25 bp, Probe sequence
gtggctggtagagctggtcgtcatg

SEQ ID NO: 247483 - DNA, 25 bp, Probe sequence
gtggatgggttcaactcatgtcatt

SEQ ID NO: 247484 - DNA, 25 bp, Probe sequence
ggattattacaagccattcagtttt

SEQ ID NO: 247485 - DNA, 25 bp, Probe sequence
ggaaagtatccaccgtattattatt

SEQ ID NO: 247486 - DNA, 25 bp, Probe sequence
ggcgagcgaacgtacttatcaacta

SEQ ID NO: 247487 - DNA, 25 bp, Probe sequence
tgtcgcgtcgaagagcgttgactat

SEQ ID NO: 247488 - DNA, 25 bp, Probe sequence
tcccgaacaactcgaatctgtcatc

SEQ ID NO: 247489 - DNA, 25 bp, Probe sequence
tacgcttcaaacgtcgatttggtga

SEQ ID NO: 247490 - DNA, 25 bp, Probe sequence
ttggtgcaaggtcaagtgtgttcgc

SEQ ID NO: 247491 - DNA, 25 bp, Probe sequence
atgacagaaaagtcgtttacgaata

SEQ ID NO: 247492 - DNA, 25 bp, Probe sequence
atggatttcttaaatgcatctagtg

SEQ ID NO: 247493 - DNA, 25 bp, Probe sequence
agtcgtagcaggttgttcttttggt

SEQ ID NO: 247494 - DNA, 25 bp, Probe sequence
aaatatgacgattattctaagttaa

SEQ ID NO: 247495 - DNA, 25 bp, Probe sequence
aagttggatccattaatgacagaaa

SEQ ID NO: 247496 - DNA, 25 bp, Probe sequence
aagtgattgaaacacacgatgatgt

SEQ ID NO: 247497 - DNA, 25 bp, Probe sequence
aattggcaattcaaacacacctgtt

SEQ ID NO: 247498 - DNA, 25 bp, Probe sequence
caaacacacctgttttttacgcaga

SEQ ID NO: 247499 - DNA, 25 bp, Probe sequence
caaatcaaatctttcggagtacctt

SEQ ID NO: 247500 - DNA, 25 bp, Probe sequence
cacacctgttttttacgcagaaatt

SEQ ID NO: 247501 - DNA, 25 bp, Probe sequence
cttttagtcgtagcaggttgttctt

SEQ ID NO: 247502 - DNA, 25 bp, Probe sequence
ctttaacaagcgtttcatttatgac

SEQ ID NO: 247503 - DNA, 25 bp, Probe sequence
ccagttccatatagcgtagctcaaa

SEQ ID NO: 247504 - DNA, 25 bp, Probe sequence
gcgtagctcaaatcaaatctttcgg

SEQ ID NO: 247505 - DNA, 25 bp, Probe sequence
gcatctagtgattttggtaacgcac

SEQ ID NO: 247506 - DNA, 25 bp, Probe sequence
gaatcaaactatgaaacagcgtcag

SEQ ID NO: 247507 - DNA, 25 bp, Probe sequence
gaagacaagtctaatccagatccaa

SEQ ID NO: 247508 - DNA, 25 bp, Probe sequence
gaaaaagacactgggatgtttactt

SEQ ID NO: 247509 - DNA, 25 bp, Probe sequence
gaaacagcgtcagatgattctttaa

SEQ ID NO: 247510 - DNA, 25 bp, Probe sequence
gaaaggaattaaagatgcgccatct

SEQ ID NO: 247511 - DNA, 25 bp, Probe sequence
gaaagttagtttatgcatcagtcga

SEQ ID NO: 247512 - DNA, 25 bp, Probe sequence
gacactgggatgtttacttttaatt

SEQ ID NO: 247513 - DNA, 25 bp, Probe sequence
gatgttgatgcattctttaaaggta

SEQ ID NO: 247514 - DNA, 25 bp, Probe sequence
gattattggtatgtagatccagatg

SEQ ID NO: 247515 - DNA, 25 bp, Probe sequence
gtagcaggttgttcttttggtggga

SEQ ID NO: 247516 - DNA, 25 bp, Probe sequence
gtctaatccagatccaaaagtttta

SEQ ID NO: 247517 - DNA, 25 bp, Probe sequence
gtggaacttgcagattatagattta

SEQ ID NO: 247518 - DNA, 25 bp, Probe sequence
ggtgggaatcataaattatcatcaa

SEQ ID NO: 247519 - DNA, 25 bp, Probe sequence
ggttgttcttttggtgggaatcata

SEQ ID NO: 247520 - DNA, 25 bp, Probe sequence
ggagtacctttaacaagcgtttcat

SEQ ID NO: 247521 - DNA, 25 bp, Probe sequence
tacttttaattatgcttttagtcgt

SEQ ID NO: 247522 - DNA, 25 bp, Probe sequence
tagtttatgcatcagtcgaaccagg

SEQ ID NO: 247523 - DNA, 25 bp, Probe sequence
ttttggtaacgcacattttgttgtt

SEQ ID NO: 247524 - DNA, 25 bp, Probe sequence
ttcactttttcaccaaaaaattatg

SEQ ID NO: 247525 - DNA, 25 bp, Probe sequence
attccacttgatgtagcgaatgatg

SEQ ID NO: 247526 - DNA, 25 bp, Probe sequence
agtttggcaaaacaggtttcaaatg

SEQ ID NO: 247527 - DNA, 25 bp, Probe sequence
atgttgagcgtgtaggatttttagt

SEQ ID NO: 247528 - DNA, 25 bp, Probe sequence
atgtagcgaatgatgcaataccatg

SEQ ID NO: 247529 - DNA, 25 bp, Probe sequence
atggctgacattccacttgatgtag

SEQ ID NO: 247530 - DNA, 25 bp, Probe sequence
aggtttcaaatgttgagcgtgtagg

SEQ ID NO: 247531 - DNA, 25 bp, Probe sequence
agcgtgtaggatttttagtacgtgt

SEQ ID NO: 247532 - DNA, 25 bp, Probe sequence
acattccacttgatgtagcgaatga

SEQ ID NO: 247533 - DNA, 25 bp, Probe sequence
acaggtttcaaatgttgagcgtgta

SEQ ID NO: 247534 - DNA, 25 bp, Probe sequence
aaaacaggtttcaaatgttgagcgt

SEQ ID NO: 247535 - DNA, 25 bp, Probe sequence
aacaggtttcaaatgttgagcgtgt

SEQ ID NO: 247536 - DNA, 25 bp, Probe sequence
aatgttgagcgtgtaggatttttag

SEQ ID NO: 247537 - DNA, 25 bp, Probe sequence
caaatgttgagcgtgtaggattttt

SEQ ID NO: 247538 - DNA, 25 bp, Probe sequence
cacttgatgtagcgaatgatgcaat

SEQ ID NO: 247539 - DNA, 25 bp, Probe sequence
caggtttcaaatgttgagcgtgtag

SEQ ID NO: 247540 - DNA, 25 bp, Probe sequence
ctgacattccacttgatgtagcgaa

SEQ ID NO: 247541 - DNA, 25 bp, Probe sequence
ccacttgatgtagcgaatgatgcaa

SEQ ID NO: 247542 - DNA, 25 bp, Probe sequence
gcgtgtaggatttttagtacgtgta

SEQ ID NO: 247543 - DNA, 25 bp, Probe sequence
gctgacattccacttgatgtagcga

SEQ ID NO: 247544 - DNA, 25 bp, Probe sequence
gcaaaacaggtttcaaatgttgagc

SEQ ID NO: 247545 - DNA, 25 bp, Probe sequence
gacattccacttgatgtagcgaatg

SEQ ID NO: 247546 - DNA, 25 bp, Probe sequence
gagcgtgtaggatttttagtacgtg

SEQ ID NO: 247547 - DNA, 25 bp, Probe sequence
gatgtagcgaatgatgcaataccat

SEQ ID NO: 247548 - DNA, 25 bp, Probe sequence
gtttggcaaaacaggtttcaaatgt

SEQ ID NO: 247549 - DNA, 25 bp, Probe sequence
gttgagcgtgtaggatttttagtac

SEQ ID NO: 247550 - DNA, 25 bp, Probe sequence
ggtttcaaatgttgagcgtgtagga

SEQ ID NO: 247551 - DNA, 25 bp, Probe sequence
ggctgacattccacttgatgtagcg

SEQ ID NO: 247552 - DNA, 25 bp, Probe sequence
tggctgacattccacttgatgtagc

SEQ ID NO: 247553 - DNA, 25 bp, Probe sequence
tgttgagcgtgtaggatttttagta

SEQ ID NO: 247554 - DNA, 25 bp, Probe sequence
tgatgtagcgaatgatgcaatacca

SEQ ID NO: 247555 - DNA, 25 bp, Probe sequence
tgacattccacttgatgtagcgaat

SEQ ID NO: 247556 - DNA, 25 bp, Probe sequence
tccacttgatgtagcgaatgatgca

SEQ ID NO: 247557 - DNA, 25 bp, Probe sequence
tttcaaatgttgagcgtgtaggatt

SEQ ID NO: 247558 - DNA, 25 bp, Probe sequence
ttccacttgatgtagcgaatgatgc

SEQ ID NO: 247559 - DNA, 25 bp, Probe sequence
tcccttttacagaacgtgcggaccg

SEQ ID NO: 247560 - DNA, 25 bp, Probe sequence
atggaaggattattacaacttgtta

SEQ ID NO: 247561 - DNA, 25 bp, Probe sequence
agatcaaatgaacggtatccctttt

SEQ ID NO: 247562 - DNA, 25 bp, Probe sequence
agaatgattttgcatattatagatc

SEQ ID NO: 247563 - DNA, 25 bp, Probe sequence
accagcatcgcatcctattttaacg

SEQ ID NO: 247564 - DNA, 25 bp, Probe sequence
aaagttagtaccagcatcgcatcct

SEQ ID NO: 247565 - DNA, 25 bp, Probe sequence
aaaagttagtaccagcatcgcatcc

SEQ ID NO: 247566 - DNA, 25 bp, Probe sequence
aacagacttagaaggttcaattaca

SEQ ID NO: 247567 - DNA, 25 bp, Probe sequence
aactgcacatgaagatgtagcaaga

SEQ ID NO: 247568 - DNA, 25 bp, Probe sequence
aagaagtggaggcatattttataaa

SEQ ID NO: 247569 - DNA, 25 bp, Probe sequence
aagatacaatgtatgcacaagaagc

SEQ ID NO: 247570 - DNA, 25 bp, Probe sequence
aatccgaaaattattagtcaatcaa

SEQ ID NO: 247571 - DNA, 25 bp, Probe sequence
aattaatcagtcattgcaagtggca

SEQ ID NO: 247572 - DNA, 25 bp, Probe sequence
caaatgaacggtatcccttttacag

SEQ ID NO: 247573 - DNA, 25 bp, Probe sequence
ctggcttatgtgcacctcaaattaa

SEQ ID NO: 247574 - DNA, 25 bp, Probe sequence
gccagatgtttacggcgaagtgaca

SEQ ID NO: 247575 - DNA, 25 bp, Probe sequence
gcatcgcatcctattttaacgaaaa

SEQ ID NO: 247576 - DNA, 25 bp, Probe sequence
gcacctcaaattaatcagtcattgc

SEQ ID NO: 247577 - DNA, 25 bp, Probe sequence
gaacgtgcggaccgtattttaacag

SEQ ID NO: 247578 - DNA, 25 bp, Probe sequence
gaaggttcaattacattgccagatg

SEQ ID NO: 247579 - DNA, 25 bp, Probe sequence
gaaagttatgacgtcaatgggaaca

SEQ ID NO: 247580 - DNA, 25 bp, Probe sequence
gatgattcgttaaaaagattattac

SEQ ID NO: 247581 - DNA, 25 bp, Probe sequence
gttgaactaactgcacatgaagatg

SEQ ID NO: 247582 - DNA, 25 bp, Probe sequence
gtttacggcgaagtgacaagaagta

SEQ ID NO: 247583 - DNA, 25 bp, Probe sequence
gtaccagcatcgcatcctattttaa

SEQ ID NO: 247584 - DNA, 25 bp, Probe sequence
gtgcggaccgtattttaacagataa

SEQ ID NO: 247585 - DNA, 25 bp, Probe sequence
ggtatcccttttacagaacgtgcgg

SEQ ID NO: 247586 - DNA, 25 bp, Probe sequence
ggaggcatattttataaatgactaa

SEQ ID NO: 247587 - DNA, 25 bp, Probe sequence
ggaacaaagttgaactaactgcaca

SEQ ID NO: 247588 - DNA, 25 bp, Probe sequence
tgaacggtatcccttttacagaacg

SEQ ID NO: 247589 - DNA, 25 bp, Probe sequence
tacattgccagatgtttacggcgaa

SEQ ID NO: 247590 - DNA, 25 bp, Probe sequence
tacaacttgttaatccgaaaattat

SEQ ID NO: 247591 - DNA, 25 bp, Probe sequence
ttatgacgtcaatgggaacaaagtt

SEQ ID NO: 247592 - DNA, 25 bp, Probe sequence
tttacagaacgtgcggaccgtattt

SEQ ID NO: 247593 - DNA, 25 bp, Probe sequence
attcaacagacgcctcatggtgagg

SEQ ID NO: 247594 - DNA, 25 bp, Probe sequence
atctataatcacgcgtagtttaact

SEQ ID NO: 247595 - DNA, 25 bp, Probe sequence
attattcaacagacgcctcatggtg

SEQ ID NO: 247596 - DNA, 25 bp, Probe sequence
atacattaaacatcccttacattat

SEQ ID NO: 247597 - DNA, 25 bp, Probe sequence
atcacgcgtagtttaactattacaa

SEQ ID NO: 247598 - DNA, 25 bp, Probe sequence
atcgcgctcattccgacggttattt

SEQ ID NO: 247599 - DNA, 25 bp, Probe sequence
atcgtaacgctattaattcgaatta

SEQ ID NO: 247600 - DNA, 25 bp, Probe sequence
atcccaatcacactatttacggcac

SEQ ID NO: 247601 - DNA, 25 bp, Probe sequence
aacagacgcctcatggtgaggggta

SEQ ID NO: 247602 - DNA, 25 bp, Probe sequence
aactcatatgaacatgttaatactt

SEQ ID NO: 247603 - DNA, 25 bp, Probe sequence
aatcacactatttacggcacttgtc

SEQ ID NO: 247604 - DNA, 25 bp, Probe sequence
aattcgaattataccttttatcatg

SEQ ID NO: 247605 - DNA, 25 bp, Probe sequence
cagcattattcaacagacgcctcat

SEQ ID NO: 247606 - DNA, 25 bp, Probe sequence
catttatcccaatcacactatttac

SEQ ID NO: 247607 - DNA, 25 bp, Probe sequence
ctatcatttatcccaatcacactat

SEQ ID NO: 247608 - DNA, 25 bp, Probe sequence
cccaatcacactatttacggcactt

SEQ ID NO: 247609 - DNA, 25 bp, Probe sequence
cgcgctcattccgacggttatttta

SEQ ID NO: 247610 - DNA, 25 bp, Probe sequence
gacagcattattcaacagacgcctc

SEQ ID NO: 247611 - DNA, 25 bp, Probe sequence
gacgcctcatggtgaggggtataca

SEQ ID NO: 247612 - DNA, 25 bp, Probe sequence
gatggctatcatttatcccaatcac

SEQ ID NO: 247613 - DNA, 25 bp, Probe sequence
gttcgatggctatcatttatcccaa

SEQ ID NO: 247614 - DNA, 25 bp, Probe sequence
gtggttcgatggctatcatttatcc

SEQ ID NO: 247615 - DNA, 25 bp, Probe sequence
gggtatacattaaacatcccttaca

SEQ ID NO: 247616 - DNA, 25 bp, Probe sequence
ggttattttatctataatcacgcgt

SEQ ID NO: 247617 - DNA, 25 bp, Probe sequence
tggctatcatttatcccaatcacac

SEQ ID NO: 247618 - DNA, 25 bp, Probe sequence
tgttaatacttattttattgtgtgg

SEQ ID NO: 247619 - DNA, 25 bp, Probe sequence
tgatttcaaaagtgcaattgcctga

SEQ ID NO: 247620 - DNA, 25 bp, Probe sequence
tcattccgacggttattttatctat

SEQ ID NO: 247621 - DNA, 25 bp, Probe sequence
tcacactatttacggcacttgtcat

SEQ ID NO: 247622 - DNA, 25 bp, Probe sequence
tattagtgggattgttatcatggca

SEQ ID NO: 247623 - DNA, 25 bp, Probe sequence
tttcaaaagtgcaattgcctgatgt

SEQ ID NO: 247624 - DNA, 25 bp, Probe sequence
ttatcccaatcacactatttacggc

SEQ ID NO: 247625 - DNA, 25 bp, Probe sequence
ttataccttttatcatgatttcaaa

SEQ ID NO: 247626 - DNA, 25 bp, Probe sequence
ttaaacatcccttacattatcgcgc

SEQ ID NO: 247627 - DNA, 25 bp, Probe sequence
attgttgggaatcttagcatgtcta

SEQ ID NO: 247628 - DNA, 25 bp, Probe sequence
atatacaagaacgagcaatgcttca

SEQ ID NO: 247629 - DNA, 25 bp, Probe sequence
atatcatcagttatttggacgatgt

SEQ ID NO: 247630 - DNA, 25 bp, Probe sequence
atagcgtctattgatttgacagatt

SEQ ID NO: 247631 - DNA, 25 bp, Probe sequence
agtgataggtttattcggatttata

SEQ ID NO: 247632 - DNA, 25 bp, Probe sequence
acgagatatggttgattgttggaaa

SEQ ID NO: 247633 - DNA, 25 bp, Probe sequence
aaagcaactctttggaatagacgta

SEQ ID NO: 247634 - DNA, 25 bp, Probe sequence
aattgtcttttgacgctataacgat

SEQ ID NO: 247635 - DNA, 25 bp, Probe sequence
cacattttatgagtactaatcctga

SEQ ID NO: 247636 - DNA, 25 bp, Probe sequence
ctaacgcagagagactttcacattt

SEQ ID NO: 247637 - DNA, 25 bp, Probe sequence
ccatttgtaaaactggatactctaa

SEQ ID NO: 247638 - DNA, 25 bp, Probe sequence
gctttcgcatgatgaagtgctttgg

SEQ ID NO: 247639 - DNA, 25 bp, Probe sequence
gcaatgcttcatttattaactcacg

SEQ ID NO: 247640 - DNA, 25 bp, Probe sequence
gaatttcgtttcatccatttgtaaa

SEQ ID NO: 247641 - DNA, 25 bp, Probe sequence
gaaagattgttttgatgatttgcat

SEQ ID NO: 247642 - DNA, 25 bp, Probe sequence
gacataggatgtcactagctattcc

SEQ ID NO: 247643 - DNA, 25 bp, Probe sequence
gactattatgcattgtcagataagt

SEQ ID NO: 247644 - DNA, 25 bp, Probe sequence
gagactttcacattttatgagtact

SEQ ID NO: 247645 - DNA, 25 bp, Probe sequence
gatactctaatatccggtaatagcc

SEQ ID NO: 247646 - DNA, 25 bp, Probe sequence
gatttggcttttgattttgaatttg

SEQ ID NO: 247647 - DNA, 25 bp, Probe sequence
gatttgcatattttaaaaccgaatt

SEQ ID NO: 247648 - DNA, 25 bp, Probe sequence
gattcaacatttctatggcgtgtgg

SEQ ID NO: 247649 - DNA, 25 bp, Probe sequence
gtatgcgcgttgaatttaatcctaa

SEQ ID NO: 247650 - DNA, 25 bp, Probe sequence
gtcactagctattccaaaattgtct

SEQ ID NO: 247651 - DNA, 25 bp, Probe sequence
ggtaatagccggttaaatcgacata

SEQ ID NO: 247652 - DNA, 25 bp, Probe sequence
ggacgatgttagttttacgagatta

SEQ ID NO: 247653 - DNA, 25 bp, Probe sequence
ggaatagacgtagtatgcgcgttga

SEQ ID NO: 247654 - DNA, 25 bp, Probe sequence
ggaatcttagcatgtctaacgcaga

SEQ ID NO: 247655 - DNA, 25 bp, Probe sequence
tcggctttgggatattttacaaaca

SEQ ID NO: 247656 - DNA, 25 bp, Probe sequence
tctatggcgtgtggaaattgaatta

SEQ ID NO: 247657 - DNA, 25 bp, Probe sequence
tacgagattagatttggcttttgat

SEQ ID NO: 247658 - DNA, 25 bp, Probe sequence
ttgacgctataacgattgttgggaa

SEQ ID NO: 247659 - DNA, 25 bp, Probe sequence
tttggtgtgcgtaatagtgataggt

SEQ ID NO: 247660 - DNA, 25 bp, Probe sequence
ttaatcctaataagctttcgcatga

SEQ ID NO: 247661 - DNA, 25 bp, Probe sequence
atttgcttccaatattcgacgcgaa

SEQ ID NO: 247662 - DNA, 25 bp, Probe sequence
atacaactatggatgacactaactt

SEQ ID NO: 247663 - DNA, 25 bp, Probe sequence
atgacaccaccaccagttaaaaaag

SEQ ID NO: 247664 - DNA, 25 bp, Probe sequence
atgggtacaccagacttttcaacaa

SEQ ID NO: 247665 - DNA, 25 bp, Probe sequence
acatgatgtcattgcagtcgtaacg

SEQ ID NO: 247666 - DNA, 25 bp, Probe sequence
acaccagacttttcaacaactgttt

SEQ ID NO: 247667 - DNA, 25 bp, Probe sequence
aaatgataatgaagctgttgcaatt

SEQ ID NO: 247668 - DNA, 25 bp, Probe sequence
aaaaagccattattgttgctacaaa

SEQ ID NO: 247669 - DNA, 25 bp, Probe sequence
aacttgaaaatatacgatgctgaac

SEQ ID NO: 247670 - DNA, 25 bp, Probe sequence
aacgtgttatgacaccaccaccagt

SEQ ID NO: 247671 - DNA, 25 bp, Probe sequence
aactgttttagaaatgcttattgca

SEQ ID NO: 247672 - DNA, 25 bp, Probe sequence
aacgcaaccagatcgacctgttgga

SEQ ID NO: 247673 - DNA, 25 bp, Probe sequence
aattgcttcaattagatgtagattt

SEQ ID NO: 247674 - DNA, 25 bp, Probe sequence
caggcaattatcgatggtgaacaag

SEQ ID NO: 247675 - DNA, 25 bp, Probe sequence
gctgccaattatttaagtggtgcgc

SEQ ID NO: 247676 - DNA, 25 bp, Probe sequence
gcttttggacaattattacctgaat

SEQ ID NO: 247677 - DNA, 25 bp, Probe sequence
gcaattaatgtacatgcatcattgt

SEQ ID NO: 247678 - DNA, 25 bp, Probe sequence
gaaaatgataatgtcggtacgatgc

SEQ ID NO: 247679 - DNA, 25 bp, Probe sequence
gaacaagaaaccggcataacaatta

SEQ ID NO: 247680 - DNA, 25 bp, Probe sequence
gactaataagataaacgagcctgga

SEQ ID NO: 247681 - DNA, 25 bp, Probe sequence
gagaatgttagctgccaattattta

SEQ ID NO: 247682 - DNA, 25 bp, Probe sequence
gaggtggtgcaccaattcatcaggc

SEQ ID NO: 247683 - DNA, 25 bp, Probe sequence
gatcgacctgttggacgtaaacgtg

SEQ ID NO: 247684 - DNA, 25 bp, Probe sequence
gatgctgaactcgttgagactaata

SEQ ID NO: 247685 - DNA, 25 bp, Probe sequence
gatacgcaagcaacatttgcttcca

SEQ ID NO: 247686 - DNA, 25 bp, Probe sequence
gtcggtacgatgcatgataaattaa

SEQ ID NO: 247687 - DNA, 25 bp, Probe sequence
gtggtgcgcaaaacacactagtagg

SEQ ID NO: 247688 - DNA, 25 bp, Probe sequence
ggtgcaccaattcatcaggcaatta

SEQ ID NO: 247689 - DNA, 25 bp, Probe sequence
ggtaatattatttcgcaacaagcaa

SEQ ID NO: 247690 - DNA, 25 bp, Probe sequence
ggattatcaccatggccagttgctt

SEQ ID NO: 247691 - DNA, 25 bp, Probe sequence
tgcagtcgtaacgcaaccagatcga

SEQ ID NO: 247692 - DNA, 25 bp, Probe sequence
tgcttattgcagaacatgatgtcat

SEQ ID NO: 247693 - DNA, 25 bp, Probe sequence
tcaccatggccagttgcttatacaa

SEQ ID NO: 247694 - DNA, 25 bp, Probe sequence
tacctgaatcattgttggcattacc

SEQ ID NO: 247695 - DNA, 25 bp, Probe sequence
aggacaaccaattattcattctcgt

SEQ ID NO: 247696 - DNA, 25 bp, Probe sequence
aggtgcgtatagtaacttgcgtatc

SEQ ID NO: 247697 - DNA, 25 bp, Probe sequence
aaagttgcaagacgaaggttatgac

SEQ ID NO: 247698 - DNA, 25 bp, Probe sequence
aaaagctcaatgtttgttgcacaca

SEQ ID NO: 247699 - DNA, 25 bp, Probe sequence
aacgttacaaatcatgccgcaagac

SEQ ID NO: 247700 - DNA, 25 bp, Probe sequence
aagggcaagttgacgcttcagatat

SEQ ID NO: 247701 - DNA, 25 bp, Probe sequence
aaggcatgggttaggcaattattat

SEQ ID NO: 247702 - DNA, 25 bp, Probe sequence
aattattcattctcgttcatttaaa

SEQ ID NO: 247703 - DNA, 25 bp, Probe sequence
cttgcgtatcaatgaagtgttgtca

SEQ ID NO: 247704 - DNA, 25 bp, Probe sequence
ctggagagttggtcaaaacgttaca

SEQ ID NO: 247705 - DNA, 25 bp, Probe sequence
gccgcaagactttaattcagatgga

SEQ ID NO: 247706 - DNA, 25 bp, Probe sequence
gctgaagttttaatgccagaagggc

SEQ ID NO: 247707 - DNA, 25 bp, Probe sequence
gcaaacaacatattgagtcactagt

SEQ ID NO: 247708 - DNA, 25 bp, Probe sequence
gcaatcgagtatagtatgccgaagt

SEQ ID NO: 247709 - DNA, 25 bp, Probe sequence
gaagtcttgcttttgacacgattca

SEQ ID NO: 247710 - DNA, 25 bp, Probe sequence
gaaccgtttcaacatccgataactg

SEQ ID NO: 247711 - DNA, 25 bp, Probe sequence
gaaaacgtgagaagtcttgcttttg

SEQ ID NO: 247712 - DNA, 25 bp, Probe sequence
gacatcaacaactgtgcgtgccaac

SEQ ID NO: 247713 - DNA, 25 bp, Probe sequence
gacttaccttattgtctccatatag

SEQ ID NO: 247714 - DNA, 25 bp, Probe sequence
gacgcttcagatatacatgatcaca

SEQ ID NO: 247715 - DNA, 25 bp, Probe sequence
gacgcgagcatcattagatgatatt

SEQ ID NO: 247716 - DNA, 25 bp, Probe sequence
gatggattcgtttcaattcaagata

SEQ ID NO: 247717 - DNA, 25 bp, Probe sequence
gatgcatgtagtgcacctggcggta

SEQ ID NO: 247718 - DNA, 25 bp, Probe sequence
gatgcgtagtgacttacctgatttt

SEQ ID NO: 247719 - DNA, 25 bp, Probe sequence
gatcatgacttaccttattgtctcc

SEQ ID NO: 247720 - DNA, 25 bp, Probe sequence
gataagatacttgttgatgcaccat

SEQ ID NO: 247721 - DNA, 25 bp, Probe sequence
gttgatgcaccatgtagcggattag

SEQ ID NO: 247722 - DNA, 25 bp, Probe sequence
gtagaccgacatgatcacgtattag

SEQ ID NO: 247723 - DNA, 25 bp, Probe sequence
ggattatagatcattgggcaacaca

SEQ ID NO: 247724 - DNA, 25 bp, Probe sequence
tcaacatgatgcgacaaaaccttat

SEQ ID NO: 247725 - DNA, 25 bp, Probe sequence
tacagaaattgtctacggaaccgtt

SEQ ID NO: 247726 - DNA, 25 bp, Probe sequence
tagcaaaagaacgcggtggctatca

SEQ ID NO: 247727 - DNA, 25 bp, Probe sequence
ttcagatggattctttatcactaag

SEQ ID NO: 247728 - DNA, 25 bp, Probe sequence
ttgggcaacacattatggtctcgaa

SEQ ID NO: 247729 - DNA, 25 bp, Probe sequence
attcctgtcaaccatgttccagaaa

SEQ ID NO: 247730 - DNA, 25 bp, Probe sequence
atttcttccaaattttgacaagcaa

SEQ ID NO: 247731 - DNA, 25 bp, Probe sequence
atcggatgtacgttttgtgcttcta

SEQ ID NO: 247732 - DNA, 25 bp, Probe sequence
agtttaaatattggtgcacgtcaca

SEQ ID NO: 247733 - DNA, 25 bp, Probe sequence
agacttacgacagcttttaaaagat

SEQ ID NO: 247734 - DNA, 25 bp, Probe sequence
agctggcgaaattgtttcacaagtt

SEQ ID NO: 247735 - DNA, 25 bp, Probe sequence
acgcttgatgccaattaaccgtgca

SEQ ID NO: 247736 - DNA, 25 bp, Probe sequence
acgttttgtgcttctacacttggcg

SEQ ID NO: 247737 - DNA, 25 bp, Probe sequence
acttaattcctgtcaaccatgttcc

SEQ ID NO: 247738 - DNA, 25 bp, Probe sequence
aaaggcttaaactgccatgttaact

SEQ ID NO: 247739 - DNA, 25 bp, Probe sequence
aaatcgtcgtgttacttttgaatat

SEQ ID NO: 247740 - DNA, 25 bp, Probe sequence
aacagttcaaaaagcccttgatgct

SEQ ID NO: 247741 - DNA, 25 bp, Probe sequence
aatgccacaatacgtcgtgaacaag

SEQ ID NO: 247742 - DNA, 25 bp, Probe sequence
aatatattcattgcgatttgacgaa

SEQ ID NO: 247743 - DNA, 25 bp, Probe sequence
cagtatcaacatcaggtatcattcc

SEQ ID NO: 247744 - DNA, 25 bp, Probe sequence
ctgccatgttaacttaattcctgtc

SEQ ID NO: 247745 - DNA, 25 bp, Probe sequence
gcccttgatgctacagaagagcgcg

SEQ ID NO: 247746 - DNA, 25 bp, Probe sequence
gcttacacgccgcaaaagatgaagt

SEQ ID NO: 247747 - DNA, 25 bp, Probe sequence
gaatatggtctgtttggtggtgtga

SEQ ID NO: 247748 - DNA, 25 bp, Probe sequence
gaagagcgcgtatctcaaattgtca

SEQ ID NO: 247749 - DNA, 25 bp, Probe sequence
gaaaccttgaagctggcgaaattgt

SEQ ID NO: 247750 - DNA, 25 bp, Probe sequence
gaaatgcaaaactggctcgttgaac

SEQ ID NO: 247751 - DNA, 25 bp, Probe sequence
gacgaacttatcgaaagacttacga

SEQ ID NO: 247752 - DNA, 25 bp, Probe sequence
gacgcagcttgtggtcaattaagag

SEQ ID NO: 247753 - DNA, 25 bp, Probe sequence
gagactaggaattaatgccacaata

SEQ ID NO: 247754 - DNA, 25 bp, Probe sequence
gatggctatacaattgaaactgttt

SEQ ID NO: 247755 - DNA, 25 bp, Probe sequence
gatggactttttaagaatcgtcaat

SEQ ID NO: 247756 - DNA, 25 bp, Probe sequence
gtgcacgtcacattacagtatcaac

SEQ ID NO: 247757 - DNA, 25 bp, Probe sequence
gtgtgaatgaccaactagaacatgc

SEQ ID NO: 247758 - DNA, 25 bp, Probe sequence
ggaaattcagtatgtgtaacgacac

SEQ ID NO: 247759 - DNA, 25 bp, Probe sequence
tgggtatcggtgaaccatttgaaaa

SEQ ID NO: 247760 - DNA, 25 bp, Probe sequence
tgaagtgcgatcacgcttgatgcca

SEQ ID NO: 247761 - DNA, 25 bp, Probe sequence
tgcttctacacttggcggcttaaaa

SEQ ID NO: 247762 - DNA, 25 bp, Probe sequence
tttgctgtaagcttacacgccgcaa

SEQ ID NO: 247763 - DNA, 25 bp, Probe sequence
gggtcaaattacgccggaagaagca

SEQ ID NO: 247764 - DNA, 25 bp, Probe sequence
atcagttgtgatagcaaatgtcggt

SEQ ID NO: 247765 - DNA, 25 bp, Probe sequence
atgctagaggcacaattttttactg

SEQ ID NO: 247766 - DNA, 25 bp, Probe sequence
aggtgatgggcacagataaacgtgt

SEQ ID NO: 247767 - DNA, 25 bp, Probe sequence
agtccagatttgtttattaagcgat

SEQ ID NO: 247768 - DNA, 25 bp, Probe sequence
agataacgttactttcatactcgcg

SEQ ID NO: 247769 - DNA, 25 bp, Probe sequence
acatcaagctgaaaattggttgcgt

SEQ ID NO: 247770 - DNA, 25 bp, Probe sequence
acacatccacaacgtaatattatta

SEQ ID NO: 247771 - DNA, 25 bp, Probe sequence
aaatgtcggtgattctagagcctat

SEQ ID NO: 247772 - DNA, 25 bp, Probe sequence
aatcaacaacttttagttctgtgtg

SEQ ID NO: 247773 - DNA, 25 bp, Probe sequence
taacgttactttcatactcgcggct

SEQ ID NO: 247774 - DNA, 25 bp, Probe sequence
gcattagataaccattcgaaagata

SEQ ID NO: 247775 - DNA, 25 bp, Probe sequence
gcaattggcattagataaccattcg

SEQ ID NO: 247776 - DNA, 25 bp, Probe sequence
gaaggtacaatagaagatcatggtg

SEQ ID NO: 247777 - DNA, 25 bp, Probe sequence
gaagatgcgggtggtattttttata

SEQ ID NO: 247778 - DNA, 25 bp, Probe sequence
gaagaagcatttacacatccacaac

SEQ ID NO: 247779 - DNA, 25 bp, Probe sequence
gaagcatttacacatccacaacgta

SEQ ID NO: 247780 - DNA, 25 bp, Probe sequence
gagaagttgcaagtaaatttgttac

SEQ ID NO: 247781 - DNA, 25 bp, Probe sequence
gatcatggtgatcaattaatgcaat

SEQ ID NO: 247782 - DNA, 25 bp, Probe sequence
gataaacgtgtgagtccagatttgt

SEQ ID NO: 247783 - DNA, 25 bp, Probe sequence
gttacagatgagttgaaatcccgtt

SEQ ID NO: 247784 - DNA, 25 bp, Probe sequence
gtgtttgtgcacttgtttttgaaaa

SEQ ID NO: 247785 - DNA, 25 bp, Probe sequence
gggtacaacatgtgtttgtgcactt

SEQ ID NO: 247786 - DNA, 25 bp, Probe sequence
ggtgattctagagcctatgttatta

SEQ ID NO: 247787 - DNA, 25 bp, Probe sequence
ggcacaattttttactgatactgga

SEQ ID NO: 247788 - DNA, 25 bp, Probe sequence
tgagttgaaatcccgttttgaagcg

SEQ ID NO: 247789 - DNA, 25 bp, Probe sequence
taatcatcttgttttaacgggtcaa

SEQ ID NO: 247790 - DNA, 25 bp, Probe sequence
tactcgcggctattgaaggtgataa

SEQ ID NO: 247791 - DNA, 25 bp, Probe sequence
tactgatactggacaacatagagat

SEQ ID NO: 247792 - DNA, 25 bp, Probe sequence
tattattacgaaggtgatgggcaca

SEQ ID NO: 247793 - DNA, 25 bp, Probe sequence
ttttagttctgtgtgatggtatggg

SEQ ID NO: 247794 - DNA, 25 bp, Probe sequence
ttttcagttatatcactatgcacaa

SEQ ID NO: 247795 - DNA, 25 bp, Probe sequence
ttactttcatactcgcggctattga

SEQ ID NO: 247796 - DNA, 25 bp, Probe sequence
ttgaacaaattactagtgatcactc

SEQ ID NO: 247797 - DNA, 25 bp, Probe sequence
atcggtagatgtaccatacactggt

SEQ ID NO: 247798 - DNA, 25 bp, Probe sequence
atgaaatgcttgttggtgaaccacc

SEQ ID NO: 247799 - DNA, 25 bp, Probe sequence
agaagatgactgttactacttagta

SEQ ID NO: 247800 - DNA, 25 bp, Probe sequence
actgtgcagtacttttcgccagaac

SEQ ID NO: 247801 - DNA, 25 bp, Probe sequence
aactcatcacagctatcacatcaaa

SEQ ID NO: 247802 - DNA, 25 bp, Probe sequence
aatcatgtgttaggtactgtgcagt

SEQ ID NO: 247803 - DNA, 25 bp, Probe sequence
catcatcagcaattccaaaagccag

SEQ ID NO: 247804 - DNA, 25 bp, Probe sequence
gaaggtccgactttgtctgagtata

SEQ ID NO: 247805 - DNA, 25 bp, Probe sequence
gaagagacacctgatgtaatcggga

SEQ ID NO: 247806 - DNA, 25 bp, Probe sequence
gaagatgtctatgaactcgataaaa

SEQ ID NO: 247807 - DNA, 25 bp, Probe sequence
gaacgtggtgacagtgttgatgttg

SEQ ID NO: 247808 - DNA, 25 bp, Probe sequence
gaacataagtcgaatcaacctaaac

SEQ ID NO: 247809 - DNA, 25 bp, Probe sequence
gaaactgcagttagcattgcgatta

SEQ ID NO: 247810 - DNA, 25 bp, Probe sequence
gaaatcgctattcatgattctaata

SEQ ID NO: 247811 - DNA, 25 bp, Probe sequence
gagacgtctttaactcagactaatc

SEQ ID NO: 247812 - DNA, 25 bp, Probe sequence
gattgcacttgtttcttttgtggca

SEQ ID NO: 247813 - DNA, 25 bp, Probe sequence
gtaaatgggcctgctcatcatcagc

SEQ ID NO: 247814 - DNA, 25 bp, Probe sequence
gtacctattgtaaatgggcctgctc

SEQ ID NO: 247815 - DNA, 25 bp, Probe sequence
gtacataactcatcacagctatcac

SEQ ID NO: 247816 - DNA, 25 bp, Probe sequence
gtgaaacgacgcaagtacctattgt

SEQ ID NO: 247817 - DNA, 25 bp, Probe sequence
gtaaccgcaaatactgaaatcgcta

SEQ ID NO: 247818 - DNA, 25 bp, Probe sequence
gtcatgggccattaagtgttgacac

SEQ ID NO: 247819 - DNA, 25 bp, Probe sequence
gtgctcttatcactaatcttttcgt

SEQ ID NO: 247820 - DNA, 25 bp, Probe sequence
gtgatcaacgtatagacattccttt

SEQ ID NO: 247821 - DNA, 25 bp, Probe sequence
gtggcatgagtaccgtttatcttgc

SEQ ID NO: 247822 - DNA, 25 bp, Probe sequence
ggtgaggcaacggatgaatgtacag

SEQ ID NO: 247823 - DNA, 25 bp, Probe sequence
ggtgatgtgatttctcaatctccta

SEQ ID NO: 247824 - DNA, 25 bp, Probe sequence
ggatattccgcaatctttaagtaat

SEQ ID NO: 247825 - DNA, 25 bp, Probe sequence
ggcgatttttataccacctagagaa

SEQ ID NO: 247826 - DNA, 25 bp, Probe sequence
tgaggggtcaacgatttcatttgtt

SEQ ID NO: 247827 - DNA, 25 bp, Probe sequence
tcttttcgttgttaatgattgcact

SEQ ID NO: 247828 - DNA, 25 bp, Probe sequence
taagcttggcggcggtggcatgagt

SEQ ID NO: 247829 - DNA, 25 bp, Probe sequence
taatgtcattttacgcgctacagaa

SEQ ID NO: 247830 - DNA, 25 bp, Probe sequence
ttcaggattctgtgccaaatgtgac

SEQ ID NO: 247831 - DNA, 25 bp, Probe sequence
attgcgcaatttagatacgaccatt

SEQ ID NO: 247832 - DNA, 25 bp, Probe sequence
atcgtccagaacttaatcttgagac

SEQ ID NO: 247833 - DNA, 25 bp, Probe sequence
agtccactttcttaaatcattatcg

SEQ ID NO: 247834 - DNA, 25 bp, Probe sequence
agttattgcacattcgtatcagtta

SEQ ID NO: 247835 - DNA, 25 bp, Probe sequence
aaatgagttgaaaagaccacctgta

SEQ ID NO: 247836 - DNA, 25 bp, Probe sequence
aaacaccaattgaaaagcagttcga

SEQ ID NO: 247837 - DNA, 25 bp, Probe sequence
aacggttatattgcagacacacctg

SEQ ID NO: 247838 - DNA, 25 bp, Probe sequence
aagaccacctgtaagtaatatagat

SEQ ID NO: 247839 - DNA, 25 bp, Probe sequence
aatcgaggaaagcatactacaagac

SEQ ID NO: 247840 - DNA, 25 bp, Probe sequence
cagctggacttatagtacttagtgg

SEQ ID NO: 247841 - DNA, 25 bp, Probe sequence
cttaaatcattatcgtccagaactt

SEQ ID NO: 247842 - DNA, 25 bp, Probe sequence
ctacaagacatgtcgaactattcga

SEQ ID NO: 247843 - DNA, 25 bp, Probe sequence
gcgaacgtttcaatacaaaaccacg

SEQ ID NO: 247844 - DNA, 25 bp, Probe sequence
gcagacacacctggattcagtgctt

SEQ ID NO: 247845 - DNA, 25 bp, Probe sequence
gcacattcgtatcagttaaatgcga

SEQ ID NO: 247846 - DNA, 25 bp, Probe sequence
gaagacaggtcgaatagtgaaatca

SEQ ID NO: 247847 - DNA, 25 bp, Probe sequence
gaacctaattgtaatgttaagcatc

SEQ ID NO: 247848 - DNA, 25 bp, Probe sequence
gacacacctggattcagtgctttag

SEQ ID NO: 247849 - DNA, 25 bp, Probe sequence
gagatagggaatattgcgcaattta

SEQ ID NO: 247850 - DNA, 25 bp, Probe sequence
gatacgaccattatttacaactatt

SEQ ID NO: 247851 - DNA, 25 bp, Probe sequence
gattcagtgctttagattttgatca

SEQ ID NO: 247852 - DNA, 25 bp, Probe sequence
gttaatggcgaacgtttcaatacaa

SEQ ID NO: 247853 - DNA, 25 bp, Probe sequence
gtacttagtggtcaatcaggtgtcg

SEQ ID NO: 247854 - DNA, 25 bp, Probe sequence
gtgaaatcaattagtggggtatatc

SEQ ID NO: 247855 - DNA, 25 bp, Probe sequence
gtggggtatatcaagtagacgttaa

SEQ ID NO: 247856 - DNA, 25 bp, Probe sequence
gtggtcaatcaggtgtcggtaagtc

SEQ ID NO: 247857 - DNA, 25 bp, Probe sequence
tggctatgagactgaatttattgga

SEQ ID NO: 247858 - DNA, 25 bp, Probe sequence
tgtaatcatatcaaagaacctaatt

SEQ ID NO: 247859 - DNA, 25 bp, Probe sequence
tcaggtgtcggtaagtccactttct

SEQ ID NO: 247860 - DNA, 25 bp, Probe sequence
tacaaaaccacgaggattatttaga

SEQ ID NO: 247861 - DNA, 25 bp, Probe sequence
tagatcgatttttagttattgcaca

SEQ ID NO: 247862 - DNA, 25 bp, Probe sequence
tagtaattgtaatgagtgctgtcga

SEQ ID NO: 247863 - DNA, 25 bp, Probe sequence
tattcgaacgtcaaaacggttatat

SEQ ID NO: 247864 - DNA, 25 bp, Probe sequence
tttcaacgcaattattagatcgatt

SEQ ID NO: 247865 - DNA, 25 bp, Probe sequence
attcatgtcgaatcaacgcctcata

SEQ ID NO: 247866 - DNA, 25 bp, Probe sequence
atatcacaaattgaacctattttag

SEQ ID NO: 247867 - DNA, 25 bp, Probe sequence
agtgatgacagttaacccagggttt

SEQ ID NO: 247868 - DNA, 25 bp, Probe sequence
acctatagacgtacatttgatgatt

SEQ ID NO: 247869 - DNA, 25 bp, Probe sequence
aaatggtgctacaatgctagtaaca

SEQ ID NO: 247870 - DNA, 25 bp, Probe sequence
aaagtcacacaagcattgaaaggtt

SEQ ID NO: 247871 - DNA, 25 bp, Probe sequence
aatccagaaaagtatattgcatcat

SEQ ID NO: 247872 - DNA, 25 bp, Probe sequence
caatcatttattgatcaatgcgtag

SEQ ID NO: 247873 - DNA, 25 bp, Probe sequence
catcgtgctattcaaatgattaaac

SEQ ID NO: 247874 - DNA, 25 bp, Probe sequence
ctatatccatcattattatctgttg

SEQ ID NO: 247875 - DNA, 25 bp, Probe sequence
gcctcatattcatcgtgctattcaa

SEQ ID NO: 247876 - DNA, 25 bp, Probe sequence
gccgatatgatttcaattcatgtcg

SEQ ID NO: 247877 - DNA, 25 bp, Probe sequence
gctggtgtagtaattaatcctggta

SEQ ID NO: 247878 - DNA, 25 bp, Probe sequence
gctagtaacaggttcatttttcttt

SEQ ID NO: 247879 - DNA, 25 bp, Probe sequence
gcatcatttgcagaacatggtgccg

SEQ ID NO: 247880 - DNA, 25 bp, Probe sequence
gaagttgatggaggcgtaaataccg

SEQ ID NO: 247881 - DNA, 25 bp, Probe sequence
gaacatggtgccgatatgatttcaa

SEQ ID NO: 247882 - DNA, 25 bp, Probe sequence
gacaaaactatatccatcattatta

SEQ ID NO: 247883 - DNA, 25 bp, Probe sequence
gttatggatggtcaatttgtgccta

SEQ ID NO: 247884 - DNA, 25 bp, Probe sequence
gtcgacggagttcattttgatgtta

SEQ ID NO: 247885 - DNA, 25 bp, Probe sequence
gtcgaatcaacgcctcatattcatc

SEQ ID NO: 247886 - DNA, 25 bp, Probe sequence
gtgcctaatatatctattggtttac

SEQ ID NO: 247887 - DNA, 25 bp, Probe sequence
gggtttggtggtcaatcatttattg

SEQ ID NO: 247888 - DNA, 25 bp, Probe sequence
ggtcaatttgtgcctaatatatcta

SEQ ID NO: 247889 - DNA, 25 bp, Probe sequence
ggaggcgtaaataccgatacagcga

SEQ ID NO: 247890 - DNA, 25 bp, Probe sequence
ggagttcattttgatgttatggatg

SEQ ID NO: 247891 - DNA, 25 bp, Probe sequence
ggaacgtcaattaaactttgatatt

SEQ ID NO: 247892 - DNA, 25 bp, Probe sequence
ggcacaacattacctatagacgtac

SEQ ID NO: 247893 - DNA, 25 bp, Probe sequence
tcaacgcctcatattcatcgtgcta

SEQ ID NO: 247894 - DNA, 25 bp, Probe sequence
taatcctggtacaccaatatcacaa

SEQ ID NO: 247895 - DNA, 25 bp, Probe sequence
taacccagggtttggtggtcaatca

SEQ ID NO: 247896 - DNA, 25 bp, Probe sequence
tagcgggtcttaatgctattaaaat

SEQ ID NO: 247897 - DNA, 25 bp, Probe sequence
ttatctgttgattttttggatttac

SEQ ID NO: 247898 - DNA, 25 bp, Probe sequence
ttggtttaccaatattagatgcagt

SEQ ID NO: 247899 - DNA, 25 bp, Probe sequence
attgcctaaaggtcaacatacagtt

SEQ ID NO: 247900 - DNA, 25 bp, Probe sequence
atcccttttttctcagtgggagact

SEQ ID NO: 247901 - DNA, 25 bp, Probe sequence
atccgtacatttcatttataccgat

SEQ ID NO: 247902 - DNA, 25 bp, Probe sequence
agctgttgcacttggatttgatagt

SEQ ID NO: 247903 - DNA, 25 bp, Probe sequence
acggatttagctttagcggttgata

SEQ ID NO: 247904 - DNA, 25 bp, Probe sequence
aaatcaaaccagttcaagctgaaaa

SEQ ID NO: 247905 - DNA, 25 bp, Probe sequence
aacagttacaaatcaaaccagttca

SEQ ID NO: 247906 - DNA, 25 bp, Probe sequence
aagagttatccgtacatttcattta

SEQ ID NO: 247907 - DNA, 25 bp, Probe sequence
cacttgccgcaagatatttgggcca

SEQ ID NO: 247908 - DNA, 25 bp, Probe sequence
caaattatcccttttttctcagtgg

SEQ ID NO: 247909 - DNA, 25 bp, Probe sequence
caaatgcttaatataggttctactt

SEQ ID NO: 247910 - DNA, 25 bp, Probe sequence
catttataccgatgactgatgatgt

SEQ ID NO: 247911 - DNA, 25 bp, Probe sequence
gccgcaagatatttgggccaaaagt

SEQ ID NO: 247912 - DNA, 25 bp, Probe sequence
gcggttgataaagctgttgcacttg

SEQ ID NO: 247913 - DNA, 25 bp, Probe sequence
gctgatacggatttagctttagcgg

SEQ ID NO: 247914 - DNA, 25 bp, Probe sequence
gcaagcgaaagtaactgtacatgat

SEQ ID NO: 247915 - DNA, 25 bp, Probe sequence
gaagcatcaaattatcccttttttc

SEQ ID NO: 247916 - DNA, 25 bp, Probe sequence
gaacgccaacttctaacagaacagt

SEQ ID NO: 247917 - DNA, 25 bp, Probe sequence
gaactttctctagcaggttttaaat

SEQ ID NO: 247918 - DNA, 25 bp, Probe sequence
gacgattagatcacttttttggggc

SEQ ID NO: 247919 - DNA, 25 bp, Probe sequence
gatcacttttttggggcaattcagt

SEQ ID NO: 247920 - DNA, 25 bp, Probe sequence
gatagaggtgctttgattttattga

SEQ ID NO: 247921 - DNA, 25 bp, Probe sequence
gttcatatagaagttatcgatcaac

SEQ ID NO: 247922 - DNA, 25 bp, Probe sequence
gtattacaatttatggtgcaacagg

SEQ ID NO: 247923 - DNA, 25 bp, Probe sequence
ggggcggcgttgatagaggtgcttt

SEQ ID NO: 247924 - DNA, 25 bp, Probe sequence
gtgggagactttgattcagtcagta

SEQ ID NO: 247925 - DNA, 25 bp, Probe sequence
ggtgcaacaggcggacgattagatc

SEQ ID NO: 247926 - DNA, 25 bp, Probe sequence
ggttctactttaactatttcaaatg

SEQ ID NO: 247927 - DNA, 25 bp, Probe sequence
tgtacatgatgggttgattttgcaa

SEQ ID NO: 247928 - DNA, 25 bp, Probe sequence
tgactgatgatgtagaactttctct

SEQ ID NO: 247929 - DNA, 25 bp, Probe sequence
tgaaattgagtctttgcaagcgaaa

SEQ ID NO: 247930 - DNA, 25 bp, Probe sequence
tgaaggtaaatggggcggcgttgat

SEQ ID NO: 247931 - DNA, 25 bp, Probe sequence
tcagtcagtaaagaagaacgccaac

SEQ ID NO: 247932 - DNA, 25 bp, Probe sequence
tttttggggcaattcagttattatt

SEQ ID NO: 247933 - DNA, 25 bp, Probe sequence
tcggttgtaggtggaaaggccgttg

SEQ ID NO: 247934 - DNA, 25 bp, Probe sequence
atgctaaaggcatcaaagtaactga

SEQ ID NO: 247935 - DNA, 25 bp, Probe sequence
atgttatggtattgtaggtatggca

SEQ ID NO: 247936 - DNA, 25 bp, Probe sequence
aggccgttgaatgttatggtattgt

SEQ ID NO: 247937 - DNA, 25 bp, Probe sequence
aggtatggcatctagacaacaagtt

SEQ ID NO: 247938 - DNA, 25 bp, Probe sequence
agtgattgcttcggttgtaggtgga

SEQ ID NO: 247939 - DNA, 25 bp, Probe sequence
agagatttcaaatgattacggtaaa

SEQ ID NO: 247940 - DNA, 25 bp, Probe sequence
acgactcgaaaactgataactcaca

SEQ ID NO: 247941 - DNA, 25 bp, Probe sequence
aaaggccgttgaatgttatggtatt

SEQ ID NO: 247942 - DNA, 25 bp, Probe sequence
aaagtaactgaaaataatggcgtag

SEQ ID NO: 247943 - DNA, 25 bp, Probe sequence
aagttagagatggtattgcggaaat

SEQ ID NO: 247944 - DNA, 25 bp, Probe sequence
aagtgattgcttcggttgtaggtgg

SEQ ID NO: 247945 - DNA, 25 bp, Probe sequence
aatggcgtagtggatatagatatgt

SEQ ID NO: 247946 - DNA, 25 bp, Probe sequence
gccgttgaatgttatggtattgtag

SEQ ID NO: 247947 - DNA, 25 bp, Probe sequence
gaaaactgataactcacaattatga

SEQ ID NO: 247948 - DNA, 25 bp, Probe sequence
gacatgaaaattatgctaaaggcat

SEQ ID NO: 247949 - DNA, 25 bp, Probe sequence
gactcgaaaactgataactcacaat

SEQ ID NO: 247950 - DNA, 25 bp, Probe sequence
gacgactcgaaaactgataactcac

SEQ ID NO: 247951 - DNA, 25 bp, Probe sequence
gatatttcaaacgaagtgattgctt

SEQ ID NO: 247952 - DNA, 25 bp, Probe sequence
gattacggtaaaattgatatttcaa

SEQ ID NO: 247953 - DNA, 25 bp, Probe sequence
gattgcttcggttgtaggtggaaag

SEQ ID NO: 247954 - DNA, 25 bp, Probe sequence
gttgtaggtggaaaggccgttgaat

SEQ ID NO: 247955 - DNA, 25 bp, Probe sequence
gtattgtaggtatggcatctagaca

SEQ ID NO: 247956 - DNA, 25 bp, Probe sequence
gtatggcatctagacaacaagttag

SEQ ID NO: 247957 - DNA, 25 bp, Probe sequence
gtgattgcttcggttgtaggtggaa

SEQ ID NO: 247958 - DNA, 25 bp, Probe sequence
ggtggaaaggccgttgaatgttatg

SEQ ID NO: 247959 - DNA, 25 bp, Probe sequence
ggtattgtaggtatggcatctagac

SEQ ID NO: 247960 - DNA, 25 bp, Probe sequence
ggaaaggccgttgaatgttatggta

SEQ ID NO: 247961 - DNA, 25 bp, Probe sequence
ggcatctagacaacaagttagagat

SEQ ID NO: 247962 - DNA, 25 bp, Probe sequence
ggcgtagtggatatagatatgtaca

SEQ ID NO: 247963 - DNA, 25 bp, Probe sequence
tgtaggtatggcatctagacaacaa

SEQ ID NO: 247964 - DNA, 25 bp, Probe sequence
tgcttcggttgtaggtggaaaggcc

SEQ ID NO: 247965 - DNA, 25 bp, Probe sequence
taggtggaaaggccgttgaatgtta

SEQ ID NO: 247966 - DNA, 25 bp, Probe sequence
tatggtattgtaggtatggcatcta

SEQ ID NO: 247967 - DNA, 25 bp, Probe sequence
atttatcaatatttcttttcagtag

SEQ ID NO: 247968 - DNA, 25 bp, Probe sequence
atgatgtggacgcaacacttgaaga

SEQ ID NO: 247969 - DNA, 25 bp, Probe sequence
atgggtgccacacatatcattagtg

SEQ ID NO: 247970 - DNA, 25 bp, Probe sequence
atggcaagtgaacaagcagcgagta

SEQ ID NO: 247971 - DNA, 25 bp, Probe sequence
agtgccagatggtgatacaggaaca

SEQ ID NO: 247972 - DNA, 25 bp, Probe sequence
agacgcgtttatgggcttgattgaa

SEQ ID NO: 247973 - DNA, 25 bp, Probe sequence
agaacagcacacagctaaaccgaaa

SEQ ID NO: 247974 - DNA, 25 bp, Probe sequence
acagcaattattactatttctatgg

SEQ ID NO: 247975 - DNA, 25 bp, Probe sequence
aaagcgcaaatggctgattcagtaa

SEQ ID NO: 247976 - DNA, 25 bp, Probe sequence
aagcgcactattccaatatgatgtg

SEQ ID NO: 247977 - DNA, 25 bp, Probe sequence
aagatgctgcgcaagctgcaataga

SEQ ID NO: 247978 - DNA, 25 bp, Probe sequence
aatctggttcattaacgtacgctgt

SEQ ID NO: 247979 - DNA, 25 bp, Probe sequence
caagctggtgttgaaacggcatata

SEQ ID NO: 247980 - DNA, 25 bp, Probe sequence
cacaccaaacttattagctgtactt

SEQ ID NO: 247981 - DNA, 25 bp, Probe sequence
cagcgagtattgttgatgcagaagc

SEQ ID NO: 247982 - DNA, 25 bp, Probe sequence
ctttgaatgtgtatccagtgccaga

SEQ ID NO: 247983 - DNA, 25 bp, Probe sequence
gaatcttactatgacttcaggtcgc

SEQ ID NO: 247984 - DNA, 25 bp, Probe sequence
gaatcacttgaaaacacaccaaact

SEQ ID NO: 247985 - DNA, 25 bp, Probe sequence
gaaggtacaatacttacagttgcaa

SEQ ID NO: 247986 - DNA, 25 bp, Probe sequence
gacaaacgatgaatccttctacaga

SEQ ID NO: 247987 - DNA, 25 bp, Probe sequence
gaggtaactctggtgtcatcttgtc

SEQ ID NO: 247988 - DNA, 25 bp, Probe sequence
gagtcaatttggtgattctttatta

SEQ ID NO: 247989 - DNA, 25 bp, Probe sequence
gttggtgttgttgatagtggcggta

SEQ ID NO: 247990 - DNA, 25 bp, Probe sequence
gtactgaaatgatggttcgttttgg

SEQ ID NO: 247991 - DNA, 25 bp, Probe sequence
gtaagcagccaaagtgatcaattaa

SEQ ID NO: 247992 - DNA, 25 bp, Probe sequence
gtggcggtaaaggtttgttatgcgt

SEQ ID NO: 247993 - DNA, 25 bp, Probe sequence
ggtgtcatcttgtcacaattattca

SEQ ID NO: 247994 - DNA, 25 bp, Probe sequence
ggaagttcatgaaggtggacaacca

SEQ ID NO: 247995 - DNA, 25 bp, Probe sequence
taacgtacgctgttcgtgatacgaa

SEQ ID NO: 247996 - DNA, 25 bp, Probe sequence
taaacgtgcaattattttaccgaat

SEQ ID NO: 247997 - DNA, 25 bp, Probe sequence
tattatttatggctattgtactgaa

SEQ ID NO: 247998 - DNA, 25 bp, Probe sequence
tattcctcaaggtataagcgcacta

SEQ ID NO: 247999 - DNA, 25 bp, Probe sequence
tattccaacgaaatctattcctcaa

SEQ ID NO: 248000 - DNA, 25 bp, Probe sequence
ttcacgtgcataccgaatacccagg

SEQ ID NO: 248001 - DNA, 25 bp, Probe sequence
attgcatcccctaaaacagaaacag

SEQ ID NO: 248002 - DNA, 25 bp, Probe sequence
attcgaattacgtatgcaatggcta

SEQ ID NO: 248003 - DNA, 25 bp, Probe sequence
atcgatttggtgtgaatcaacgcca

SEQ ID NO: 248004 - DNA, 25 bp, Probe sequence
atgtatttttttcaatcaaccgtat

SEQ ID NO: 248005 - DNA, 25 bp, Probe sequence
atgtaccgaatgcaacttttatgat

SEQ ID NO: 248006 - DNA, 25 bp, Probe sequence
agtgaccagcaaagttactgtgttt

SEQ ID NO: 248007 - DNA, 25 bp, Probe sequence
agcaccaatacgtatgcatcgatta

SEQ ID NO: 248008 - DNA, 25 bp, Probe sequence
acctatgcatttactgaactgtttt

SEQ ID NO: 248009 - DNA, 25 bp, Probe sequence
actttacatcagttacgcggtcgtg

SEQ ID NO: 248010 - DNA, 25 bp, Probe sequence
acttattcaatctggcgtattcttt

SEQ ID NO: 248011 - DNA, 25 bp, Probe sequence
acagctccagtagttgcattttttg

SEQ ID NO: 248012 - DNA, 25 bp, Probe sequence
aaacctatcattactacttgggcaa

SEQ ID NO: 248013 - DNA, 25 bp, Probe sequence
gctcgtgatgaagcagctgaactta

SEQ ID NO: 248014 - DNA, 25 bp, Probe sequence
gaaggacaagtatatacagctccag

SEQ ID NO: 248015 - DNA, 25 bp, Probe sequence
gaaccagtctatcgtattaaggaag

SEQ ID NO: 248016 - DNA, 25 bp, Probe sequence
gaacactagcaatatcagtttttgg

SEQ ID NO: 248017 - DNA, 25 bp, Probe sequence
gaaagttctgagcatctcgaagatg

SEQ ID NO: 248018 - DNA, 25 bp, Probe sequence
gaaagtccatattctcttttacaat

SEQ ID NO: 248019 - DNA, 25 bp, Probe sequence
gagaccttggactttactttgaaca

SEQ ID NO: 248020 - DNA, 25 bp, Probe sequence
gatggtaccaactgaaattttagca

SEQ ID NO: 248021 - DNA, 25 bp, Probe sequence
gatgcggatcgctttggattatcaa

SEQ ID NO: 248022 - DNA, 25 bp, Probe sequence
gatcttgttctttatttgccaacta

SEQ ID NO: 248023 - DNA, 25 bp, Probe sequence
gttgtcgcattgtacgagtctttac

SEQ ID NO: 248024 - DNA, 25 bp, Probe sequence
gttgctgcaatttgtatgtatgcgt

SEQ ID NO: 248025 - DNA, 25 bp, Probe sequence
gttttgatgcaaatgacctcagagt

SEQ ID NO: 248026 - DNA, 25 bp, Probe sequence
gtattatggtgtttcccgtgtaggg

SEQ ID NO: 248027 - DNA, 25 bp, Probe sequence
gtatgttagaagttgctcgtgatga

SEQ ID NO: 248028 - DNA, 25 bp, Probe sequence
ggtgagatggatgtgtcttcaatta

SEQ ID NO: 248029 - DNA, 25 bp, Probe sequence
tgccagatttcttagttgccaattt

SEQ ID NO: 248030 - DNA, 25 bp, Probe sequence
tcccgtgtagggttattgcatggta

SEQ ID NO: 248031 - DNA, 25 bp, Probe sequence
tactgtgttttaattgcatccccta

SEQ ID NO: 248032 - DNA, 25 bp, Probe sequence
tagtttctactactgttgttgaagt

SEQ ID NO: 248033 - DNA, 25 bp, Probe sequence
tatgcatcgattacttcaaggtgat

SEQ ID NO: 248034 - DNA, 25 bp, Probe sequence
ttacgtgctcgtagaacctatgcat

SEQ ID NO: 248035 - DNA, 25 bp, Probe sequence
atgaggggtgagacgttgaaactaa

SEQ ID NO: 248036 - DNA, 25 bp, Probe sequence
atgtgctgtttgctcaggcaaattc

SEQ ID NO: 248037 - DNA, 25 bp, Probe sequence
actaagcgacttatttcaagtgagt

SEQ ID NO: 248038 - DNA, 25 bp, Probe sequence
acaattcgtttagatcgcacttatt

SEQ ID NO: 248039 - DNA, 25 bp, Probe sequence
aaaactggaattgcgcgtggtcatg

SEQ ID NO: 248040 - DNA, 25 bp, Probe sequence
aacaagaatttattggtgatttgat

SEQ ID NO: 248041 - DNA, 25 bp, Probe sequence
aacataccagaattaaggaagcgta

SEQ ID NO: 248042 - DNA, 25 bp, Probe sequence
aactcatgagagtagcattcaattt

SEQ ID NO: 248043 - DNA, 25 bp, Probe sequence
aactgcaaaacattattacgtcgaa

SEQ ID NO: 248044 - DNA, 25 bp, Probe sequence
aagcgcaatcaattttagatattac

SEQ ID NO: 248045 - DNA, 25 bp, Probe sequence
aatcccttcatcacagaccatgaac

SEQ ID NO: 248046 - DNA, 25 bp, Probe sequence
aattgatagcaatcccttcatcaca

SEQ ID NO: 248047 - DNA, 25 bp, Probe sequence
aattatgaccaaataagttctattg

SEQ ID NO: 248048 - DNA, 25 bp, Probe sequence
aattgcgcgtggtcatgtgctgttt

SEQ ID NO: 248049 - DNA, 25 bp, Probe sequence
caagtgagtatacaaacaattcgtt

SEQ ID NO: 248050 - DNA, 25 bp, Probe sequence
cacagaccatgaactaagcgactta

SEQ ID NO: 248051 - DNA, 25 bp, Probe sequence
cgtggtcatgtgctgtttgctcagg

SEQ ID NO: 248052 - DNA, 25 bp, Probe sequence
gcacgagttgtaaatcaaactgcaa

SEQ ID NO: 248053 - DNA, 25 bp, Probe sequence
gcaaccaacagttttaactcatgag

SEQ ID NO: 248054 - DNA, 25 bp, Probe sequence
gagcagaagcacgagttgtaaatca

SEQ ID NO: 248055 - DNA, 25 bp, Probe sequence
gatcgcacttatttaaacataccag

SEQ ID NO: 248056 - DNA, 25 bp, Probe sequence
gatacggtaagagcagaagcacgag

SEQ ID NO: 248057 - DNA, 25 bp, Probe sequence
gatattacatcggattctgtttttc

SEQ ID NO: 248058 - DNA, 25 bp, Probe sequence
gtcatgtgctgtttgctcaggcaaa

SEQ ID NO: 248059 - DNA, 25 bp, Probe sequence
gtcaatccaaatgttaaagcgcaat

SEQ ID NO: 248060 - DNA, 25 bp, Probe sequence
gtgttgcgctaattaagcaaccaac

SEQ ID NO: 248061 - DNA, 25 bp, Probe sequence
ggtgatttgattcaagtcaatccaa

SEQ ID NO: 248062 - DNA, 25 bp, Probe sequence
ggattctgtttttcataaaactgga

SEQ ID NO: 248063 - DNA, 25 bp, Probe sequence
ggaagcgtattaaattagttgctga

SEQ ID NO: 248064 - DNA, 25 bp, Probe sequence
tggaattgcgcgtggtcatgtgctg

SEQ ID NO: 248065 - DNA, 25 bp, Probe sequence
tgatagcaatcccttcatcacagac

SEQ ID NO: 248066 - DNA, 25 bp, Probe sequence
taagcaaccaacagttttaactcat

SEQ ID NO: 248067 - DNA, 25 bp, Probe sequence
tacgtcgaagtaaagtcatatgtta

SEQ ID NO: 248068 - DNA, 25 bp, Probe sequence
tacatcggattctgtttttcataaa

SEQ ID NO: 248069 - DNA, 25 bp, Probe sequence
agaccggctttagtagtaacattgc

SEQ ID NO: 248070 - DNA, 25 bp, Probe sequence
atggctgaagctgtgaaatctggtg

SEQ ID NO: 248071 - DNA, 25 bp, Probe sequence
aggtaatactggtgctttaatgtca

SEQ ID NO: 248072 - DNA, 25 bp, Probe sequence
agaaggtactgcaaaatcaatcggt

SEQ ID NO: 248073 - DNA, 25 bp, Probe sequence
agcaattgatatgatgggtggcgac

SEQ ID NO: 248074 - DNA, 25 bp, Probe sequence
accgagccagctaaaggtaatagtt

SEQ ID NO: 248075 - DNA, 25 bp, Probe sequence
acggtagttcaaatgctaaagcttt

SEQ ID NO: 248076 - DNA, 25 bp, Probe sequence
acagtatgcgcaactaggggatatt

SEQ ID NO: 248077 - DNA, 25 bp, Probe sequence
aactaggggatatttatgctcaaaa

SEQ ID NO: 248078 - DNA, 25 bp, Probe sequence
aaggtgtagctagaccggctttagt

SEQ ID NO: 248079 - DNA, 25 bp, Probe sequence
cagatgttgtagttaccgatggcta

SEQ ID NO: 248080 - DNA, 25 bp, Probe sequence
gccgtacaaaaggctgttgaagact

SEQ ID NO: 248081 - DNA, 25 bp, Probe sequence
gcagatggatgtgtgtcagcaggta

SEQ ID NO: 248082 - DNA, 25 bp, Probe sequence
gaatcgaatttagacattgttctga

SEQ ID NO: 248083 - DNA, 25 bp, Probe sequence
gaacacttattacagtatgcgcaac

SEQ ID NO: 248084 - DNA, 25 bp, Probe sequence
gaaagagactgtaggtgaatcaaat

SEQ ID NO: 248085 - DNA, 25 bp, Probe sequence
gacaatgcgcctgatatcgtattag

SEQ ID NO: 248086 - DNA, 25 bp, Probe sequence
gacgttggtgcaaatgctgatgcta

SEQ ID NO: 248087 - DNA, 25 bp, Probe sequence
gaggtattgataatccgaaaatctc

SEQ ID NO: 248088 - DNA, 25 bp, Probe sequence
gatggattactcagaatacggtggt

SEQ ID NO: 248089 - DNA, 25 bp, Probe sequence
gatgggtggcgacaatgcgcctgat

SEQ ID NO: 248090 - DNA, 25 bp, Probe sequence
gttggacgtattaaaggtgtagcta

SEQ ID NO: 248091 - DNA, 25 bp, Probe sequence
gatatcgtattagaagccgtacaaa

SEQ ID NO: 248092 - DNA, 25 bp, Probe sequence
gttaccgatggctatactgggaaca

SEQ ID NO: 248093 - DNA, 25 bp, Probe sequence
gtagttaaagcacacggtagttcaa

SEQ ID NO: 248094 - DNA, 25 bp, Probe sequence
gtaacattgccaacgattgatggaa

SEQ ID NO: 248095 - DNA, 25 bp, Probe sequence
gtgtgtcagcaggtaatactggtgc

SEQ ID NO: 248096 - DNA, 25 bp, Probe sequence
ggctatactgggaacatggtcctta

SEQ ID NO: 248097 - DNA, 25 bp, Probe sequence
ggaagatgagcctgttagagcgatt

SEQ ID NO: 248098 - DNA, 25 bp, Probe sequence
tggtttattcattgttggacgtatt

SEQ ID NO: 248099 - DNA, 25 bp, Probe sequence
taatctgaaccatgaacgaatcgaa

SEQ ID NO: 248100 - DNA, 25 bp, Probe sequence
taatggatggcgatacagatgttgt

SEQ ID NO: 248101 - DNA, 25 bp, Probe sequence
taaagctttttattctgcaattaga

SEQ ID NO: 248102 - DNA, 25 bp, Probe sequence
ttgttgggaatattgaagcgaagac

SEQ ID NO: 248103 - DNA, 25 bp, Probe sequence
attgcccaggtcaaattgttgtttc

SEQ ID NO: 248104 - DNA, 25 bp, Probe sequence
attatattcaccagtacaattcatt

SEQ ID NO: 248105 - DNA, 25 bp, Probe sequence
atcaagcaactgaaattttaacttc

SEQ ID NO: 248106 - DNA, 25 bp, Probe sequence
atggcgtgatgctaagtttcctgta

SEQ ID NO: 248107 - DNA, 25 bp, Probe sequence
aggtcaaattgttgtttcaggtcac

SEQ ID NO: 248108 - DNA, 25 bp, Probe sequence
acagcaattatttttccgggacaag

SEQ ID NO: 248109 - DNA, 25 bp, Probe sequence
caaggtgcccaaaaagttggtatgg

SEQ ID NO: 248110 - DNA, 25 bp, Probe sequence
caaccagctttattgacgcatagtt

SEQ ID NO: 248111 - DNA, 25 bp, Probe sequence
caccagtacaattcattaactcaac

SEQ ID NO: 248112 - DNA, 25 bp, Probe sequence
cattttattgaaattggtcctggaa

SEQ ID NO: 248113 - DNA, 25 bp, Probe sequence
cgcatagttcggcattattagcagc

SEQ ID NO: 248114 - DNA, 25 bp, Probe sequence
ccattccattcatcgctaatgaaag

SEQ ID NO: 248115 - DNA, 25 bp, Probe sequence
gaatattcaagtttagttgcagctg

SEQ ID NO: 248116 - DNA, 25 bp, Probe sequence
gaatggctaatagaccaaggtgttg

SEQ ID NO: 248117 - DNA, 25 bp, Probe sequence
gaaccagcaaacattaattgcccag

SEQ ID NO: 248118 - DNA, 25 bp, Probe sequence
gaaaaaggtaaatcattaggtgcaa

SEQ ID NO: 248119 - DNA, 25 bp, Probe sequence
gaaatttgtaagtcattatcatctg

SEQ ID NO: 248120 - DNA, 25 bp, Probe sequence
gacgtattatcatttgaagatgcag

SEQ ID NO: 248121 - DNA, 25 bp, Probe sequence
gaccaaggtgttgatcattttattg

SEQ ID NO: 248122 - DNA, 25 bp, Probe sequence
gatattttagagacaatgtttactg

SEQ ID NO: 248123 - DNA, 25 bp, Probe sequence
gttgcagctgacgtattatcatttg

SEQ ID NO: 248124 - DNA, 25 bp, Probe sequence
gttaacatcaattcaaactttagaa

SEQ ID NO: 248125 - DNA, 25 bp, Probe sequence
gtttagttgcagctgacgtattatc

SEQ ID NO: 248126 - DNA, 25 bp, Probe sequence
gtaaatgcgcaaggtgaaactgaca

SEQ ID NO: 248127 - DNA, 25 bp, Probe sequence
gtcaattaatggcgcaagcatttcc

SEQ ID NO: 248128 - DNA, 25 bp, Probe sequence
gtgatgctaagtttcctgtagttca

SEQ ID NO: 248129 - DNA, 25 bp, Probe sequence
gtgtcatgcctttagcagtatctgg

SEQ ID NO: 248130 - DNA, 25 bp, Probe sequence
ggggcatagtttaggtgaatattca

SEQ ID NO: 248131 - DNA, 25 bp, Probe sequence
ggtcctggaaaagttttatctggct

SEQ ID NO: 248132 - DNA, 25 bp, Probe sequence
ggtcacaaagctttaattgatgagc

SEQ ID NO: 248133 - DNA, 25 bp, Probe sequence
tgtttcaggtcacaaagctttaatt

SEQ ID NO: 248134 - DNA, 25 bp, Probe sequence
taagtttcctgtagttcaaaatgta

SEQ ID NO: 248135 - DNA, 25 bp, Probe sequence
taactcaacagaatggctaatagac

SEQ ID NO: 248136 - DNA, 25 bp, Probe sequence
tattgacgcatagttcggcattatt

SEQ ID NO: 248137 - DNA, 25 bp, Probe sequence
atattacaggtcaaacaatccatgt

SEQ ID NO: 248138 - DNA, 25 bp, Probe sequence
ataatgcaggtattactcgcgataa

SEQ ID NO: 248139 - DNA, 25 bp, Probe sequence
atcactgtaaatgcagttgcacctg

SEQ ID NO: 248140 - DNA, 25 bp, Probe sequence
agcacgttttggtcaagacacagat

SEQ ID NO: 248141 - DNA, 25 bp, Probe sequence
agcatctcgtggtatcactgtaaat

SEQ ID NO: 248142 - DNA, 25 bp, Probe sequence
agctgaagcagtagtcgaagaaatc

SEQ ID NO: 248143 - DNA, 25 bp, Probe sequence
aaggtgttgacagttttgcgattca

SEQ ID NO: 248144 - DNA, 25 bp, Probe sequence
aatgttgccgatgctgatgaagtta

SEQ ID NO: 248145 - DNA, 25 bp, Probe sequence
aatacagtagcgttcttagcatcag

SEQ ID NO: 248146 - DNA, 25 bp, Probe sequence
ctggttttattgtttctgatatgac

SEQ ID NO: 248147 - DNA, 25 bp, Probe sequence
gcgttcttagcatcagacaaagcaa

SEQ ID NO: 248148 - DNA, 25 bp, Probe sequence
gcaacaccacaaatgttaagacaac

SEQ ID NO: 248149 - DNA, 25 bp, Probe sequence
gaagtagttagccaatttggttctt

SEQ ID NO: 248150 - DNA, 25 bp, Probe sequence
gacacagatattgctaatacagtag

SEQ ID NO: 248151 - DNA, 25 bp, Probe sequence
gagcagtaggtaatccgggacaagc

SEQ ID NO: 248152 - DNA, 25 bp, Probe sequence
gagtgctttagtaacaggtgcatca

SEQ ID NO: 248153 - DNA, 25 bp, Probe sequence
gatatgacagatgctttaagtgatg

SEQ ID NO: 248154 - DNA, 25 bp, Probe sequence
gttgactcaaattccgttagcacgt

SEQ ID NO: 248155 - DNA, 25 bp, Probe sequence
gttgcacctggttttattgtttctg

SEQ ID NO: 248156 - DNA, 25 bp, Probe sequence
gtttaactaaatctgcggcgcgtga

SEQ ID NO: 248157 - DNA, 25 bp, Probe sequence
gtagtattgcgttacaattagcaga

SEQ ID NO: 248158 - DNA, 25 bp, Probe sequence
gtagcagtaaactatgcaggcagca

SEQ ID NO: 248159 - DNA, 25 bp, Probe sequence
gtaacaggtgcatcaagaggaattg

SEQ ID NO: 248160 - DNA, 25 bp, Probe sequence
gggacaagcaaactatgttgcaaca

SEQ ID NO: 248161 - DNA, 25 bp, Probe sequence
gggatgatgttattgacacaaactt

SEQ ID NO: 248162 - DNA, 25 bp, Probe sequence
ggtaatccgggacaagcaaactatg

SEQ ID NO: 248163 - DNA, 25 bp, Probe sequence
ggaattggacgtagtattgcgttac

SEQ ID NO: 248164 - DNA, 25 bp, Probe sequence
tgcggcgcgtgaattagcatctcgt

SEQ ID NO: 248165 - DNA, 25 bp, Probe sequence
tccgttagcacgttttggtcaagac

SEQ ID NO: 248166 - DNA, 25 bp, Probe sequence
taagacaacgtagtggtgctatcat

SEQ ID NO: 248167 - DNA, 25 bp, Probe sequence
tactcgcgataatttattaatgcgt

SEQ ID NO: 248168 - DNA, 25 bp, Probe sequence
tagccaatttggttctttagatgtt

SEQ ID NO: 248169 - DNA, 25 bp, Probe sequence
tatcaagtgttgttggagcagtagg

SEQ ID NO: 248170 - DNA, 25 bp, Probe sequence
ttgcgattcaagcaaatgttgccga

SEQ ID NO: 248171 - DNA, 25 bp, Probe sequence
atgatttaggcgctgactcacttga

SEQ ID NO: 248172 - DNA, 25 bp, Probe sequence
aggcgctgactcacttgatatcgct

SEQ ID NO: 248173 - DNA, 25 bp, Probe sequence
agatgatttaggcgctgactcactt

SEQ ID NO: 248174 - DNA, 25 bp, Probe sequence
accgtttaggtgtagacgctgataa

SEQ ID NO: 248175 - DNA, 25 bp, Probe sequence
actcacttgatatcgctgaattagt

SEQ ID NO: 248176 - DNA, 25 bp, Probe sequence
aagatatcatcgttgaccgtttagg

SEQ ID NO: 248177 - DNA, 25 bp, Probe sequence
aagatgatttaggcgctgactcact

SEQ ID NO: 248178 - DNA, 25 bp, Probe sequence
aatcaacactgttggtgatgctgtt

SEQ ID NO: 248179 - DNA, 25 bp, Probe sequence
catcgttgaccgtttaggtgtagac

SEQ ID NO: 248180 - DNA, 25 bp, Probe sequence
cactgttggtgatgctgttaaattt

SEQ ID NO: 248181 - DNA, 25 bp, Probe sequence
cgttgaccgtttaggtgtagacgct

SEQ ID NO: 248182 - DNA, 25 bp, Probe sequence
cgagtttggtactgaaattcctgat

SEQ ID NO: 248183 - DNA, 25 bp, Probe sequence
cgctgactcacttgatatcgctgaa

SEQ ID NO: 248184 - DNA, 25 bp, Probe sequence
gctgactcacttgatatcgctgaat

SEQ ID NO: 248185 - DNA, 25 bp, Probe sequence
gaagctgaaaaaatcaacactgttg

SEQ ID NO: 248186 - DNA, 25 bp, Probe sequence
gacgagtttggtactgaaattcctg

SEQ ID NO: 248187 - DNA, 25 bp, Probe sequence
gatatcatcgttgaccgtttaggtg

SEQ ID NO: 248188 - DNA, 25 bp, Probe sequence
gatttaggcgctgactcacttgata

SEQ ID NO: 248189 - DNA, 25 bp, Probe sequence
gttggtgatgctgttaaatttatta

SEQ ID NO: 248190 - DNA, 25 bp, Probe sequence
gtttggtactgaaattcctgatgaa

SEQ ID NO: 248191 - DNA, 25 bp, Probe sequence
gtagacgctgataaagtaactgaag

SEQ ID NO: 248192 - DNA, 25 bp, Probe sequence
gtactgaaattcctgatgaagaagc

SEQ ID NO: 248193 - DNA, 25 bp, Probe sequence
gtaaaagatatcatcgttgaccgtt

SEQ ID NO: 248194 - DNA, 25 bp, Probe sequence
gtaactgaagatgcatctttcaaag

SEQ ID NO: 248195 - DNA, 25 bp, Probe sequence
ggtgtagacgctgataaagtaactg

SEQ ID NO: 248196 - DNA, 25 bp, Probe sequence
ggaattagaagacgagtttggtact

SEQ ID NO: 248197 - DNA, 25 bp, Probe sequence
ggcgctgactcacttgatatcgctg

SEQ ID NO: 248198 - DNA, 25 bp, Probe sequence
tgactcacttgatatcgctgaatta

SEQ ID NO: 248199 - DNA, 25 bp, Probe sequence
tctttcaaagatgatttaggcgctg

SEQ ID NO: 248200 - DNA, 25 bp, Probe sequence
tatcatcgttgaccgtttaggtgta

SEQ ID NO: 248201 - DNA, 25 bp, Probe sequence
ttaggcgctgactcacttgatatcg

SEQ ID NO: 248202 - DNA, 25 bp, Probe sequence
tttaggcgctgactcacttgatatc

SEQ ID NO: 248203 - DNA, 25 bp, Probe sequence
ttgaccgtttaggtgtagacgctga

SEQ ID NO: 248204 - DNA, 25 bp, Probe sequence
ttgatatcgctgaattagtaatgga

SEQ ID NO: 248205 - DNA, 25 bp, Probe sequence
attccaagaatatgtgcaccagcaa

SEQ ID NO: 248206 - DNA, 25 bp, Probe sequence
atttaacaaaaatgcgtgccactat

SEQ ID NO: 248207 - DNA, 25 bp, Probe sequence
agagtttttgggtgatgcggtatta

SEQ ID NO: 248208 - DNA, 25 bp, Probe sequence
acagggggacgtacaagaccatcat

SEQ ID NO: 248209 - DNA, 25 bp, Probe sequence
atgagcgtttagagtttttgggtga

SEQ ID NO: 248210 - DNA, 25 bp, Probe sequence
agaagagggaccggcacatcatcgt

SEQ ID NO: 248211 - DNA, 25 bp, Probe sequence
accaacaagcattttcgcattcgag

SEQ ID NO: 248212 - DNA, 25 bp, Probe sequence
acatcccaacttgccagaagggaat

SEQ ID NO: 248213 - DNA, 25 bp, Probe sequence
cacatcatcgtctattcacttcaga

SEQ ID NO: 248214 - DNA, 25 bp, Probe sequence
catcgtctattcacttcagaagtta

SEQ ID NO: 248215 - DNA, 25 bp, Probe sequence
gccactattgtatgtgagccctcac

SEQ ID NO: 248216 - DNA, 25 bp, Probe sequence
gcgtgccactattgtatgtgagccc

SEQ ID NO: 248217 - DNA, 25 bp, Probe sequence
gcattcgaagcatttattggggcat

SEQ ID NO: 248218 - DNA, 25 bp, Probe sequence
gcattttcgcattcgagttttatta

SEQ ID NO: 248219 - DNA, 25 bp, Probe sequence
gaatcgtttagaccataatgagcgt

SEQ ID NO: 248220 - DNA, 25 bp, Probe sequence
gaagttattctgcaaggggaagcaa

SEQ ID NO: 248221 - DNA, 25 bp, Probe sequence
gaagcatttattggggcattgtatt

SEQ ID NO: 248222 - DNA, 25 bp, Probe sequence
gaaagcgctttgatactaaaatgac

SEQ ID NO: 248223 - DNA, 25 bp, Probe sequence
gacagagttaggctttacttatcaa

SEQ ID NO: 248224 - DNA, 25 bp, Probe sequence
gagccctcacttgtaatatttgcga

SEQ ID NO: 248225 - DNA, 25 bp, Probe sequence
gagttattaggcgtggtagatttta

SEQ ID NO: 248226 - DNA, 25 bp, Probe sequence
gatgcggtattagaattgacggttt

SEQ ID NO: 248227 - DNA, 25 bp, Probe sequence
gataaacatcccaacttgccagaag

SEQ ID NO: 248228 - DNA, 25 bp, Probe sequence
gatatagtttggaaatttgctgaga

SEQ ID NO: 248229 - DNA, 25 bp, Probe sequence
gatttataccaacaagcattttcgc

SEQ ID NO: 248230 - DNA, 25 bp, Probe sequence
gttaatcgttttagaaagcgctttg

SEQ ID NO: 248231 - DNA, 25 bp, Probe sequence
gttaggctttacttatcaaaatatt

SEQ ID NO: 248232 - DNA, 25 bp, Probe sequence
gtagattttaaaacacaattccaag

SEQ ID NO: 248233 - DNA, 25 bp, Probe sequence
gtacaagaccatcattaatatcaga

SEQ ID NO: 248234 - DNA, 25 bp, Probe sequence
ggggcattgtatttggatcaaggac

SEQ ID NO: 248235 - DNA, 25 bp, Probe sequence
ggtgatgtaacctataatttaataa

SEQ ID NO: 248236 - DNA, 25 bp, Probe sequence
tgaacgaaatgattttacttggtaa

SEQ ID NO: 248237 - DNA, 25 bp, Probe sequence
ttttcccacatgtagaacaaaatga

SEQ ID NO: 248238 - DNA, 25 bp, Probe sequence
ttgacggtttcacgatatttatttg

SEQ ID NO: 248239 - DNA, 25 bp, Probe sequence
attccattgcttaattggttgacac

SEQ ID NO: 248240 - DNA, 25 bp, Probe sequence
atctgttggggtgcagtaactatgt

SEQ ID NO: 248241 - DNA, 25 bp, Probe sequence
atttgcatatttatatttcggtggt

SEQ ID NO: 248242 - DNA, 25 bp, Probe sequence
atagctatatacaaaaatcccaaat

SEQ ID NO: 248243 - DNA, 25 bp, Probe sequence
atagccatattttttgttgtatttc

SEQ ID NO: 248244 - DNA, 25 bp, Probe sequence
ataaacattgttcccattggcatta

SEQ ID NO: 248245 - DNA, 25 bp, Probe sequence
atgccctgataactatagatgttca

SEQ ID NO: 248246 - DNA, 25 bp, Probe sequence
aggtagttcagttttatttagtgtg

SEQ ID NO: 248247 - DNA, 25 bp, Probe sequence
acattttttctttataatatttgca

SEQ ID NO: 248248 - DNA, 25 bp, Probe sequence
aaaagctcatgtaatacttcttaaa

SEQ ID NO: 248249 - DNA, 25 bp, Probe sequence
aacattgttcccattggcattaaaa

SEQ ID NO: 248250 - DNA, 25 bp, Probe sequence
aattatatttatctgttggggtgca

SEQ ID NO: 248251 - DNA, 25 bp, Probe sequence
cagcattaggtagttcagttttatt

SEQ ID NO: 248252 - DNA, 25 bp, Probe sequence
catattttttgttgtatttcttggt

SEQ ID NO: 248253 - DNA, 25 bp, Probe sequence
catttttcactttatatgccctgat

SEQ ID NO: 248254 - DNA, 25 bp, Probe sequence
gcattttggccagcattaggtagtt

SEQ ID NO: 248255 - DNA, 25 bp, Probe sequence
gacttttagaaagtatatgccttta

SEQ ID NO: 248256 - DNA, 25 bp, Probe sequence
gatacatcaagatcagtcaagaaga

SEQ ID NO: 248257 - DNA, 25 bp, Probe sequence
gttcccattggcattaaaaaagctc

SEQ ID NO: 248258 - DNA, 25 bp, Probe sequence
gttcagttttatttagtgtgacttt

SEQ ID NO: 248259 - DNA, 25 bp, Probe sequence
gtaatacttcttaaaaaagctgaat

SEQ ID NO: 248260 - DNA, 25 bp, Probe sequence
ggggtgcagtaactatgtttttctt

SEQ ID NO: 248261 - DNA, 25 bp, Probe sequence
tggttgacaccaaaaagatacatca

SEQ ID NO: 248262 - DNA, 25 bp, Probe sequence
tggtttttcatttttcactttatat

SEQ ID NO: 248263 - DNA, 25 bp, Probe sequence
tccattgcttaattggttgacacca

SEQ ID NO: 248264 - DNA, 25 bp, Probe sequence
tttggccagcattaggtagttcagt

SEQ ID NO: 248265 - DNA, 25 bp, Probe sequence
tcactttatatgccctgataactat

SEQ ID NO: 248266 - DNA, 25 bp, Probe sequence
taaaaacaatgcattttggccagca

SEQ ID NO: 248267 - DNA, 25 bp, Probe sequence
tactttcaaacctgctaaaaacaat

SEQ ID NO: 248268 - DNA, 25 bp, Probe sequence
tagcattaagtgtttttactatgaa

SEQ ID NO: 248269 - DNA, 25 bp, Probe sequence
tatgcctttatttaatgttagattg

SEQ ID NO: 248270 - DNA, 25 bp, Probe sequence
tatttatatttcggtggtttttcat

SEQ ID NO: 248271 - DNA, 25 bp, Probe sequence
ttttcactttatatgccctgataac

SEQ ID NO: 248272 - DNA, 25 bp, Probe sequence
ttcatttttcactttatatgccctg

SEQ ID NO: 248273 - DNA, 25 bp, Probe sequence
attgccgatttatttttagattctg

SEQ ID NO: 248274 - DNA, 25 bp, Probe sequence
atcggctaaatcattacgtggctca

SEQ ID NO: 248275 - DNA, 25 bp, Probe sequence
atcgaactcgtattgttactttgga

SEQ ID NO: 248276 - DNA, 25 bp, Probe sequence
aggtgcagaacatcgcaaagctcaa

SEQ ID NO: 248277 - DNA, 25 bp, Probe sequence
agatctgcaccttttgttatattag

SEQ ID NO: 248278 - DNA, 25 bp, Probe sequence
aacaattgtttggtggaggcgatgc

SEQ ID NO: 248279 - DNA, 25 bp, Probe sequence
aagatattatcttctcaggtgcaga

SEQ ID NO: 248280 - DNA, 25 bp, Probe sequence
aattcattgttattacacaccgtaa

SEQ ID NO: 248281 - DNA, 25 bp, Probe sequence
caacgtacagatcttcgtaaagcta

SEQ ID NO: 248282 - DNA, 25 bp, Probe sequence
gcagatcaaaccaatgttcaattcg

SEQ ID NO: 248283 - DNA, 25 bp, Probe sequence
gaatcggctggtgtacttaaatata

SEQ ID NO: 248284 - DNA, 25 bp, Probe sequence
gaagccgattatttaacagctggta

SEQ ID NO: 248285 - DNA, 25 bp, Probe sequence
gaacgctacacaaaactttctaaag

SEQ ID NO: 248286 - DNA, 25 bp, Probe sequence
gaactcaatgctgtcattcgtgaac

SEQ ID NO: 248287 - DNA, 25 bp, Probe sequence
gaaacaatctgatcttgctgtggtt

SEQ ID NO: 248288 - DNA, 25 bp, Probe sequence
gaaacagcattaggtgcttcattac

SEQ ID NO: 248289 - DNA, 25 bp, Probe sequence
gaccaacaaagaactttctgctgta

SEQ ID NO: 248290 - DNA, 25 bp, Probe sequence
gatgtgccatctaaattaactcagg

SEQ ID NO: 248291 - DNA, 25 bp, Probe sequence
gatgaatcgattgacgcattacgta

SEQ ID NO: 248292 - DNA, 25 bp, Probe sequence
gatgccattggatttaagtcttttg

SEQ ID NO: 248293 - DNA, 25 bp, Probe sequence
gatattgtggtacaaccaccgggta

SEQ ID NO: 248294 - DNA, 25 bp, Probe sequence
gtttgtcaccaagatattttagcta

SEQ ID NO: 248295 - DNA, 25 bp, Probe sequence
gtcgattgatgaactaggtcctgta

SEQ ID NO: 248296 - DNA, 25 bp, Probe sequence
gtgatgggcgaacaagcttttcaaa

SEQ ID NO: 248297 - DNA, 25 bp, Probe sequence
gtggtggtgagcgtgcattaactgc

SEQ ID NO: 248298 - DNA, 25 bp, Probe sequence
gggtgttgggtgaacaatcggctaa

SEQ ID NO: 248299 - DNA, 25 bp, Probe sequence
ggagctcgatagattaactacacaa

SEQ ID NO: 248300 - DNA, 25 bp, Probe sequence
ggacgccaggctattcaatttttaa

SEQ ID NO: 248301 - DNA, 25 bp, Probe sequence
tgactggtggtggcgctcgtaagtc

SEQ ID NO: 248302 - DNA, 25 bp, Probe sequence
tggtggttctatgactggtggtggc

SEQ ID NO: 248303 - DNA, 25 bp, Probe sequence
tgcaaatgaattggcacgtgcgatt

SEQ ID NO: 248304 - DNA, 25 bp, Probe sequence
taggtcgtgcgacgtttttaccatt

SEQ ID NO: 248305 - DNA, 25 bp, Probe sequence
taactgctattgctttactatttgc

SEQ ID NO: 248306 - DNA, 25 bp, Probe sequence
ttagctatcgaaaatcactaccaag

SEQ ID NO: 248307 - DNA, 25 bp, Probe sequence
atccgttataatgccaaagacccgc

SEQ ID NO: 248308 - DNA, 25 bp, Probe sequence
attactaccgcatattatccgttat

SEQ ID NO: 248309 - DNA, 25 bp, Probe sequence
attatctccagtattagccttagta

SEQ ID NO: 248310 - DNA, 25 bp, Probe sequence
atatccgttggctgattttgcttta

SEQ ID NO: 248311 - DNA, 25 bp, Probe sequence
agcaggtatacctgtccccgaaaat

SEQ ID NO: 248312 - DNA, 25 bp, Probe sequence
atccaatcatttttgcattccatcc

SEQ ID NO: 248313 - DNA, 25 bp, Probe sequence
atgcgacgttcatttgtatccctac

SEQ ID NO: 248314 - DNA, 25 bp, Probe sequence
atggcagagctcgcatttgaagatc

SEQ ID NO: 248315 - DNA, 25 bp, Probe sequence
aggacacacagccgttatccataca

SEQ ID NO: 248316 - DNA, 25 bp, Probe sequence
aggttcagactatccgttatctcgt

SEQ ID NO: 248317 - DNA, 25 bp, Probe sequence
accggcattaggtgtgggaccaggt

SEQ ID NO: 248318 - DNA, 25 bp, Probe sequence
acgaattgattccgtctttaacatt

SEQ ID NO: 248319 - DNA, 25 bp, Probe sequence
actcaaattttcaaggtgcctgctc

SEQ ID NO: 248320 - DNA, 25 bp, Probe sequence
acaccatttgcagttatcacagata

SEQ ID NO: 248321 - DNA, 25 bp, Probe sequence
aatggtatgatttgtgcttctgaac

SEQ ID NO: 248322 - DNA, 25 bp, Probe sequence
aatacaccatcagcggttggaggta

SEQ ID NO: 248323 - DNA, 25 bp, Probe sequence
cacttggtggtggttcagcgatgga

SEQ ID NO: 248324 - DNA, 25 bp, Probe sequence
cgccaacaacaaatcctacgtcgac

SEQ ID NO: 248325 - DNA, 25 bp, Probe sequence
ccaggtaacgtgccgtcttacattg

SEQ ID NO: 248326 - DNA, 25 bp, Probe sequence
gcggcaatgaaggcaggtgcaccta

SEQ ID NO: 248327 - DNA, 25 bp, Probe sequence
gcattcttaggcattgcacactcaa

SEQ ID NO: 248328 - DNA, 25 bp, Probe sequence
gcataacgcatcaactttggctggt

SEQ ID NO: 248329 - DNA, 25 bp, Probe sequence
gcatattcaactggcaaaccggcat

SEQ ID NO: 248330 - DNA, 25 bp, Probe sequence
gaatcgtcgaagcgtgcagcagaag

SEQ ID NO: 248331 - DNA, 25 bp, Probe sequence
gaaagcttgtcgtgtacttgtaaat

SEQ ID NO: 248332 - DNA, 25 bp, Probe sequence
gaacaccctgagacatcattcttcg

SEQ ID NO: 248333 - DNA, 25 bp, Probe sequence
gacatcattcttcggtgctaaacaa

SEQ ID NO: 248334 - DNA, 25 bp, Probe sequence
gagcttagcagctgttgatcaacat

SEQ ID NO: 248335 - DNA, 25 bp, Probe sequence
gatgattgtctgtgaccctggtatg

SEQ ID NO: 248336 - DNA, 25 bp, Probe sequence
gttctagcaacaggtggttcgggca

SEQ ID NO: 248337 - DNA, 25 bp, Probe sequence
gtatccctacgacatcaggtacagg

SEQ ID NO: 248338 - DNA, 25 bp, Probe sequence
ggttcgggcatggttaagtctgcat

SEQ ID NO: 248339 - DNA, 25 bp, Probe sequence
tagcgaagtcgaaccgaacccatca

SEQ ID NO: 248340 - DNA, 25 bp, Probe sequence
ttggtgttatttgtggtgttacgcc

SEQ ID NO: 248341 - DNA, 25 bp, Probe sequence
attggaaaattagcttaccgatata

SEQ ID NO: 248342 - DNA, 25 bp, Probe sequence
agcaggactcgaaaaatctcgtcaa

SEQ ID NO: 248343 - DNA, 25 bp, Probe sequence
agcgtgtaattaatcgagcagtgcc

SEQ ID NO: 248344 - DNA, 25 bp, Probe sequence
actggtcagaatgcgttgtcacaag

SEQ ID NO: 248345 - DNA, 25 bp, Probe sequence
aaccctgaaagttatgtctacggct

SEQ ID NO: 248346 - DNA, 25 bp, Probe sequence
aatctcgtcaaaatttccaagaaca

SEQ ID NO: 248347 - DNA, 25 bp, Probe sequence
gcgcctcatgaagcattactatgtt

SEQ ID NO: 248348 - DNA, 25 bp, Probe sequence
gcgttgtcacaagctagaaacttta

SEQ ID NO: 248349 - DNA, 25 bp, Probe sequence
gcggattttgatgacgatggcttaa

SEQ ID NO: 248350 - DNA, 25 bp, Probe sequence
gcagacgtcggttttaatacagtga

SEQ ID NO: 248351 - DNA, 25 bp, Probe sequence
gcacaacgacgtaatattcaagata

SEQ ID NO: 248352 - DNA, 25 bp, Probe sequence
gaagatttgcgtgaagtcattgttg

SEQ ID NO: 248353 - DNA, 25 bp, Probe sequence
gaagaattacgtatggaagcacaac

SEQ ID NO: 248354 - DNA, 25 bp, Probe sequence
gaagccacgcaagttgagtgaagcg

SEQ ID NO: 248355 - DNA, 25 bp, Probe sequence
gatggtacagccaaaggtggtatcg

SEQ ID NO: 248356 - DNA, 25 bp, Probe sequence
gataccgctggacgtttacaaaata

SEQ ID NO: 248357 - DNA, 25 bp, Probe sequence
gttaatcactgcagacgtcggtttt

SEQ ID NO: 248358 - DNA, 25 bp, Probe sequence
gtttagatgctacaactggtcagaa

SEQ ID NO: 248359 - DNA, 25 bp, Probe sequence
gtttggggcgaacgtgttggtgtag

SEQ ID NO: 248360 - DNA, 25 bp, Probe sequence
gtatgatgcgattaatgccgctaaa

SEQ ID NO: 248361 - DNA, 25 bp, Probe sequence
gtagatgaagacttttttgaagctt

SEQ ID NO: 248362 - DNA, 25 bp, Probe sequence
gtaatgttagctgcgggcgatactt

SEQ ID NO: 248363 - DNA, 25 bp, Probe sequence
gtctacggcttattcgctgatatga

SEQ ID NO: 248364 - DNA, 25 bp, Probe sequence
gtgccagatgcgcctcatgaagcat

SEQ ID NO: 248365 - DNA, 25 bp, Probe sequence
gggcgatacttttagagcgggtgct

SEQ ID NO: 248366 - DNA, 25 bp, Probe sequence
ggtggtatcgtattagccattcgta

SEQ ID NO: 248367 - DNA, 25 bp, Probe sequence
ggtgagcaattagatgacttacaac

SEQ ID NO: 248368 - DNA, 25 bp, Probe sequence
tgacttacaaccatttaaccctgaa

SEQ ID NO: 248369 - DNA, 25 bp, Probe sequence
tgaaggttctgatccagctgctgtt

SEQ ID NO: 248370 - DNA, 25 bp, Probe sequence
tccagctgctgttatgtatgatgcg

SEQ ID NO: 248371 - DNA, 25 bp, Probe sequence
taatcgagcagtgccagatgcgcct

SEQ ID NO: 248372 - DNA, 25 bp, Probe sequence
taatctgtgataccgctggacgttt

SEQ ID NO: 248373 - DNA, 25 bp, Probe sequence
tagccattcgtaatgaattgcacat

SEQ ID NO: 248374 - DNA, 25 bp, Probe sequence
ttagagcgggtgctattgatcaatt

SEQ ID NO: 248375 - DNA, 25 bp, Probe sequence
attctttaagtgaaatcgcagatac

SEQ ID NO: 248376 - DNA, 25 bp, Probe sequence
attattctttaagtgaaatcgcaga

SEQ ID NO: 248377 - DNA, 25 bp, Probe sequence
atttgtttgatttttatcaatcctt

SEQ ID NO: 248378 - DNA, 25 bp, Probe sequence
atattcaacaattagaagacttaga

SEQ ID NO: 248379 - DNA, 25 bp, Probe sequence
ataccagaaatttgagcaacgccga

SEQ ID NO: 248380 - DNA, 25 bp, Probe sequence
atcaatccttattgacgaataaaca

SEQ ID NO: 248381 - DNA, 25 bp, Probe sequence
atccttattgacgaataaacaacgt

SEQ ID NO: 248382 - DNA, 25 bp, Probe sequence
atgaattatttgtttgatttttatc

SEQ ID NO: 248383 - DNA, 25 bp, Probe sequence
accagaaatttgagcaacgccgaga

SEQ ID NO: 248384 - DNA, 25 bp, Probe sequence
acgttacgaatgaattatttgtttg

SEQ ID NO: 248385 - DNA, 25 bp, Probe sequence
aacatttaagtaatccagaacaaat

SEQ ID NO: 248386 - DNA, 25 bp, Probe sequence
aacgccgagaaatatatgatgaaat

SEQ ID NO: 248387 - DNA, 25 bp, Probe sequence
aatcgcagatacttttaatgtgagt

SEQ ID NO: 248388 - DNA, 25 bp, Probe sequence
aatataagaagaactggcgatttag

SEQ ID NO: 248389 - DNA, 25 bp, Probe sequence
aatttgagcaacgccgagaaatata

SEQ ID NO: 248390 - DNA, 25 bp, Probe sequence
cagaaatttgagcaacgccgagaaa

SEQ ID NO: 248391 - DNA, 25 bp, Probe sequence
gcagatacttttaatgtgagtagac

SEQ ID NO: 248392 - DNA, 25 bp, Probe sequence
gcaacgccgagaaatatatgatgaa

SEQ ID NO: 248393 - DNA, 25 bp, Probe sequence
gaacaaatacaacgttatattcaac

SEQ ID NO: 248394 - DNA, 25 bp, Probe sequence
gaaatcgcagatacttttaatgtga

SEQ ID NO: 248395 - DNA, 25 bp, Probe sequence
gaaatttgagcaacgccgagaaata

SEQ ID NO: 248396 - DNA, 25 bp, Probe sequence
gagcaacgccgagaaatatatgatg

SEQ ID NO: 248397 - DNA, 25 bp, Probe sequence
gagtagacaagcagtttatgataat

SEQ ID NO: 248398 - DNA, 25 bp, Probe sequence
gtagacaagcagtttatgataatat

SEQ ID NO: 248399 - DNA, 25 bp, Probe sequence
gtaatccagaacaaatacaacgtta

SEQ ID NO: 248400 - DNA, 25 bp, Probe sequence
gtaattatttggaattattttatct

SEQ ID NO: 248401 - DNA, 25 bp, Probe sequence
gtgaaatcgcagatacttttaatgt

SEQ ID NO: 248402 - DNA, 25 bp, Probe sequence
gtgagtagacaagcagtttatgata

SEQ ID NO: 248403 - DNA, 25 bp, Probe sequence
taagaagaactggcgatttagttga

SEQ ID NO: 248404 - DNA, 25 bp, Probe sequence
tacaacgttatattcaacaattaga

SEQ ID NO: 248405 - DNA, 25 bp, Probe sequence
taccagaaatttgagcaacgccgag

SEQ ID NO: 248406 - DNA, 25 bp, Probe sequence
tttgagcaacgccgagaaatatatg

SEQ ID NO: 248407 - DNA, 25 bp, Probe sequence
ttataccagaaatttgagcaacgcc

SEQ ID NO: 248408 - DNA, 25 bp, Probe sequence
ttgtttgatttttatcaatccttat

SEQ ID NO: 248409 - DNA, 25 bp, Probe sequence
atatgtcaaataaaccacctactgt

SEQ ID NO: 248410 - DNA, 25 bp, Probe sequence
aggtatgggtgatgtgttaagttta

SEQ ID NO: 248411 - DNA, 25 bp, Probe sequence
acgaaattatgttagttgtcgattc

SEQ ID NO: 248412 - DNA, 25 bp, Probe sequence
aaaacagtatcagaacgcgcattag

SEQ ID NO: 248413 - DNA, 25 bp, Probe sequence
aacgcgcattaggttccgatgtaat

SEQ ID NO: 248414 - DNA, 25 bp, Probe sequence
aagcgattatccagtcaatgacgcc

SEQ ID NO: 248415 - DNA, 25 bp, Probe sequence
caaattgatattcctgtatacagtg

SEQ ID NO: 248416 - DNA, 25 bp, Probe sequence
cgggtcaagatgctgtcaatgttgc

SEQ ID NO: 248417 - DNA, 25 bp, Probe sequence
cgtccagcagcgataaatcaattac

SEQ ID NO: 248418 - DNA, 25 bp, Probe sequence
cgatcaacttgatgtcacaggtgtt

SEQ ID NO: 248419 - DNA, 25 bp, Probe sequence
cgttcattacaagaagtcaatcgtt

SEQ ID NO: 248420 - DNA, 25 bp, Probe sequence
gcagcagatatttatcgtccagcag

SEQ ID NO: 248421 - DNA, 25 bp, Probe sequence
gcaatcattaacaccagggcaacaa

SEQ ID NO: 248422 - DNA, 25 bp, Probe sequence
gaacatttagactttgtaatcattg

SEQ ID NO: 248423 - DNA, 25 bp, Probe sequence
gaaacaatccagacacattgaatgt

SEQ ID NO: 248424 - DNA, 25 bp, Probe sequence
gacgccggctgaaagaaacaatcca

SEQ ID NO: 248425 - DNA, 25 bp, Probe sequence
gatgtcacaggtgttaccttaacta

SEQ ID NO: 248426 - DNA, 25 bp, Probe sequence
gatggttggtttacaaggtgctggt

SEQ ID NO: 248427 - DNA, 25 bp, Probe sequence
gatgcgtgaagtaagattagcgtta

SEQ ID NO: 248428 - DNA, 25 bp, Probe sequence
gattacacatcgatgaagcattgat

SEQ ID NO: 248429 - DNA, 25 bp, Probe sequence
gttgtcgattcaatgacgggtcaag

SEQ ID NO: 248430 - DNA, 25 bp, Probe sequence
gtatggcatcacgtattttaggtat

SEQ ID NO: 248431 - DNA, 25 bp, Probe sequence
gtggtgcagctttatctattcgttc

SEQ ID NO: 248432 - DNA, 25 bp, Probe sequence
gggtaaacttactgaagctgatata

SEQ ID NO: 248433 - DNA, 25 bp, Probe sequence
ggtgatacacgtggtggtgcagctt

SEQ ID NO: 248434 - DNA, 25 bp, Probe sequence
ggtaaaacaacaactgcaggtaaat

SEQ ID NO: 248435 - DNA, 25 bp, Probe sequence
ggtttagagctattccatcctgaac

SEQ ID NO: 248436 - DNA, 25 bp, Probe sequence
ttgaggctgacgtaaactttaaagt

SEQ ID NO: 248437 - DNA, 25 bp, Probe sequence
taaaccacctactgttgttatgatg

SEQ ID NO: 248438 - DNA, 25 bp, Probe sequence
tatccagtcaatgacgccggctgaa

SEQ ID NO: 248439 - DNA, 25 bp, Probe sequence
taggttccgatgtaatgcaatcatt

SEQ ID NO: 248440 - DNA, 25 bp, Probe sequence
ttatctattcgttcggtgacacaaa

SEQ ID NO: 248441 - DNA, 25 bp, Probe sequence
ttccatcctgaacgtatggcatcac

SEQ ID NO: 248442 - DNA, 25 bp, Probe sequence
ttgatacagcaggtcgattacacat

SEQ ID NO: 248443 - DNA, 25 bp, Probe sequence
ataacccaacgagcgctaatgctcc

SEQ ID NO: 248444 - DNA, 25 bp, Probe sequence
atcggtacttataacccaacgagcg

SEQ ID NO: 248445 - DNA, 25 bp, Probe sequence
atacagttcacaatatcttatcaaa

SEQ ID NO: 248446 - DNA, 25 bp, Probe sequence
atcgtatcgtagtagcagatgctcg

SEQ ID NO: 248447 - DNA, 25 bp, Probe sequence
atgctccagaaattaaagttgacga

SEQ ID NO: 248448 - DNA, 25 bp, Probe sequence
atccattctatcgtatcgtagtagc

SEQ ID NO: 248449 - DNA, 25 bp, Probe sequence
agaaatccattctatcgtatcgtag

SEQ ID NO: 248450 - DNA, 25 bp, Probe sequence
agcgctaatgctccagaaattaaag

SEQ ID NO: 248451 - DNA, 25 bp, Probe sequence
acgtgacggacgtatcatcgaacaa

SEQ ID NO: 248452 - DNA, 25 bp, Probe sequence
acttataacccaacgagcgctaatg

SEQ ID NO: 248453 - DNA, 25 bp, Probe sequence
acagttcacaatatcttatcaaaag

SEQ ID NO: 248454 - DNA, 25 bp, Probe sequence
aaatccattctatcgtatcgtagta

SEQ ID NO: 248455 - DNA, 25 bp, Probe sequence
aaaatggttaaatgatggtgcgaaa

SEQ ID NO: 248456 - DNA, 25 bp, Probe sequence
aacccaacgagcgctaatgctccag

SEQ ID NO: 248457 - DNA, 25 bp, Probe sequence
aacgagcgctaatgctccagaaatt

SEQ ID NO: 248458 - DNA, 25 bp, Probe sequence
cattctatcgtatcgtagtagcaga

SEQ ID NO: 248459 - DNA, 25 bp, Probe sequence
cgttctccacgtgacggacgtatca

SEQ ID NO: 248460 - DNA, 25 bp, Probe sequence
ctccacgtgacggacgtatcatcga

SEQ ID NO: 248461 - DNA, 25 bp, Probe sequence
cggtacttataacccaacgagcgct

SEQ ID NO: 248462 - DNA, 25 bp, Probe sequence
cccaacgagcgctaatgctccagaa

SEQ ID NO: 248463 - DNA, 25 bp, Probe sequence
gaaaccaactgatacagttcacaat

SEQ ID NO: 248464 - DNA, 25 bp, Probe sequence
gacgaagcgttagctttaaaatggt

SEQ ID NO: 248465 - DNA, 25 bp, Probe sequence
gacggacgtatcatcgaacaaatcg

SEQ ID NO: 248466 - DNA, 25 bp, Probe sequence
gacgtatcatcgaacaaatcggtac

SEQ ID NO: 248467 - DNA, 25 bp, Probe sequence
gatggtgcgaaaccaactgatacag

SEQ ID NO: 248468 - DNA, 25 bp, Probe sequence
gtagtagcagatgctcgttctccac

SEQ ID NO: 248469 - DNA, 25 bp, Probe sequence
gtatcatcgaacaaatcggtactta

SEQ ID NO: 248470 - DNA, 25 bp, Probe sequence
gtacttataacccaacgagcgctaa

SEQ ID NO: 248471 - DNA, 25 bp, Probe sequence
ggtgcgaaaccaactgatacagttc

SEQ ID NO: 248472 - DNA, 25 bp, Probe sequence
tggcagttaaaattcgtttaacacg

SEQ ID NO: 248473 - DNA, 25 bp, Probe sequence
ttataacccaacgagcgctaatgct

SEQ ID NO: 248474 - DNA, 25 bp, Probe sequence
ttaggttcaaaaagaaatccattct

SEQ ID NO: 248475 - DNA, 25 bp, Probe sequence
ttaaagttgacgaagcgttagcttt

SEQ ID NO: 248476 - DNA, 25 bp, Probe sequence
ttctccacgtgacggacgtatcatc

SEQ ID NO: 248477 - DNA, 25 bp, Probe sequence
attgagcatttaaaagggagttcta

SEQ ID NO: 248478 - DNA, 25 bp, Probe sequence
atttgattccttatattgctgatgt

SEQ ID NO: 248479 - DNA, 25 bp, Probe sequence
atcgtacttgaggaaaatgaatttt

SEQ ID NO: 248480 - DNA, 25 bp, Probe sequence
ttcgttttcaacccggtcaagtgct

SEQ ID NO: 248481 - DNA, 25 bp, Probe sequence
agtgctgacagttgtgcataacaat

SEQ ID NO: 248482 - DNA, 25 bp, Probe sequence
acgaccttgaatatactgttaagtc

SEQ ID NO: 248483 - DNA, 25 bp, Probe sequence
acaataacgaccttgaatatactgt

SEQ ID NO: 248484 - DNA, 25 bp, Probe sequence
aaaaaattatcatcacgccaatgga

SEQ ID NO: 248485 - DNA, 25 bp, Probe sequence
aagttggtcaaattgttaacacaca

SEQ ID NO: 248486 - DNA, 25 bp, Probe sequence
aatccaattcagactttacagacgt

SEQ ID NO: 248487 - DNA, 25 bp, Probe sequence
aattcagactttacagacgttcgtt

SEQ ID NO: 248488 - DNA, 25 bp, Probe sequence
aattatcatcacgccaatggaagga

SEQ ID NO: 248489 - DNA, 25 bp, Probe sequence
aatatatttgaaacaggtgcgaatg

SEQ ID NO: 248490 - DNA, 25 bp, Probe sequence
caacccggtcaagtgctgacagttg

SEQ ID NO: 248491 - DNA, 25 bp, Probe sequence
caccaataggtcgtgtaattaatat

SEQ ID NO: 248492 - DNA, 25 bp, Probe sequence
cagactttacagacgttcgttttca

SEQ ID NO: 248493 - DNA, 25 bp, Probe sequence
caggtgcgaatgatgtgtgggtgat

SEQ ID NO: 248494 - DNA, 25 bp, Probe sequence
catcacgccaatggaaggattgttg

SEQ ID NO: 248495 - DNA, 25 bp, Probe sequence
catagagtgcataaagggcttcata

SEQ ID NO: 248496 - DNA, 25 bp, Probe sequence
cccggtcaagtgctgacagttgtgc

SEQ ID NO: 248497 - DNA, 25 bp, Probe sequence
gctgatgttgtaaaagaagtggatg

SEQ ID NO: 248498 - DNA, 25 bp, Probe sequence
gagcgtgatcatgaagatatcgtac

SEQ ID NO: 248499 - DNA, 25 bp, Probe sequence
gagtgcataaagggcttcatatgct

SEQ ID NO: 248500 - DNA, 25 bp, Probe sequence
gatcatgaagatatcgtacttgagg

SEQ ID NO: 248501 - DNA, 25 bp, Probe sequence
gattccttatattgctgatgttgta

SEQ ID NO: 248502 - DNA, 25 bp, Probe sequence
gttctatttatcaagagcgtgatca

SEQ ID NO: 248503 - DNA, 25 bp, Probe sequence
gttaacacacatggtattaaaggtg

SEQ ID NO: 248504 - DNA, 25 bp, Probe sequence
gttttcaacccggtcaagtgctgac

SEQ ID NO: 248505 - DNA, 25 bp, Probe sequence
gtcaagtgctgacagttgtgcataa

SEQ ID NO: 248506 - DNA, 25 bp, Probe sequence
gtgcgaatgatgtgtgggtgattaa

SEQ ID NO: 248507 - DNA, 25 bp, Probe sequence
gggagttctatttatcaagagcgtg

SEQ ID NO: 248508 - DNA, 25 bp, Probe sequence
ggtcaaattgttaacacacatggta

SEQ ID NO: 248509 - DNA, 25 bp, Probe sequence
tgtgcataacaataacgaccttgaa

SEQ ID NO: 248510 - DNA, 25 bp, Probe sequence
tatactgttaagtcacatagagtgc

SEQ ID NO: 248511 - DNA, 25 bp, Probe sequence
attcaattatgaaacgtgcccaaga

SEQ ID NO: 248512 - DNA, 25 bp, Probe sequence
atttcctgaaatgtttgatggtgtt

SEQ ID NO: 248513 - DNA, 25 bp, Probe sequence
atgcggacattatgaaggttacgat

SEQ ID NO: 248514 - DNA, 25 bp, Probe sequence
agtagatgattatccgtatggtggc

SEQ ID NO: 248515 - DNA, 25 bp, Probe sequence
acgcgttattttaatgtgtccacaa

SEQ ID NO: 248516 - DNA, 25 bp, Probe sequence
aaagcctgaacctgtttttaatgcg

SEQ ID NO: 248517 - DNA, 25 bp, Probe sequence
aaagttgatccgcacatataataaa

SEQ ID NO: 248518 - DNA, 25 bp, Probe sequence
aacagttccagatgttttattgtct

SEQ ID NO: 248519 - DNA, 25 bp, Probe sequence
cacgtccgcgtgaatttaagggtct

SEQ ID NO: 248520 - DNA, 25 bp, Probe sequence
aagacctgacttaattgaaaaatat

SEQ ID NO: 248521 - DNA, 25 bp, Probe sequence
gcgatggaagacttagatgtcacag

SEQ ID NO: 248522 - DNA, 25 bp, Probe sequence
gcaattaacaagcacaaccaagtag

SEQ ID NO: 248523 - DNA, 25 bp, Probe sequence
gaacctgtttttaatgcgatggaag

SEQ ID NO: 248524 - DNA, 25 bp, Probe sequence
gacatgagcaaaagttgatccgcac

SEQ ID NO: 248525 - DNA, 25 bp, Probe sequence
gactgattccaggtgttttaggtaa

SEQ ID NO: 248526 - DNA, 25 bp, Probe sequence
gaccacatcgttttcatatgcggac

SEQ ID NO: 248527 - DNA, 25 bp, Probe sequence
gagtttccgcaatatacacgtccgc

SEQ ID NO: 248528 - DNA, 25 bp, Probe sequence
gatgggttattagagtttccgcaat

SEQ ID NO: 248529 - DNA, 25 bp, Probe sequence
gatggtgttttaaatcattcaatta

SEQ ID NO: 248530 - DNA, 25 bp, Probe sequence
gatgctattgttagactgattccag

SEQ ID NO: 248531 - DNA, 25 bp, Probe sequence
gtatccgaacacatcttgtcacaga

SEQ ID NO: 248532 - DNA, 25 bp, Probe sequence
gtatggtggcggacaaggtatggtg

SEQ ID NO: 248533 - DNA, 25 bp, Probe sequence
gtgtccacaaggcgagccattttca

SEQ ID NO: 248534 - DNA, 25 bp, Probe sequence
ggtatggtgttaaagcctgaacctg

SEQ ID NO: 248535 - DNA, 25 bp, Probe sequence
ggttacgatgaacgtatccgaacac

SEQ ID NO: 248536 - DNA, 25 bp, Probe sequence
ggaaatcatgccaatattgatgcat

SEQ ID NO: 248537 - DNA, 25 bp, Probe sequence
ggcgagccattttcacatcagaaag

SEQ ID NO: 248538 - DNA, 25 bp, Probe sequence
tgttttattgtctggaaatcatgcc

SEQ ID NO: 248539 - DNA, 25 bp, Probe sequence
tgattatttaactttatttcctgaa

SEQ ID NO: 248540 - DNA, 25 bp, Probe sequence
tgaaacgtgcccaagaaaacaataa

SEQ ID NO: 248541 - DNA, 25 bp, Probe sequence
tgaacgtatccgaacacatcttgtc

SEQ ID NO: 248542 - DNA, 25 bp, Probe sequence
taggtaatgaacagtcacatcaaga

SEQ ID NO: 248543 - DNA, 25 bp, Probe sequence
ttaagggtctaacagttccagatgt

SEQ ID NO: 248544 - DNA, 25 bp, Probe sequence
ttccgcaatatacacgtccgcgtga

SEQ ID NO: 248545 - DNA, 25 bp, Probe sequence
cttaccaagtttccgtcctggtgat

SEQ ID NO: 248546 - DNA, 25 bp, Probe sequence
gtttccgtcctggtgatactttacg

SEQ ID NO: 248547 - DNA, 25 bp, Probe sequence
gttggcgtggaacgtacattcccat

SEQ ID NO: 248548 - DNA, 25 bp, Probe sequence
atcgaagcagtaactaaatcacaat

SEQ ID NO: 248549 - DNA, 25 bp, Probe sequence
actcgtgagcgtatccaagtattcg

SEQ ID NO: 248550 - DNA, 25 bp, Probe sequence
aaatttcatcaggtgttggcgtgga

SEQ ID NO: 248551 - DNA, 25 bp, Probe sequence
aagtacgtcgtgctaaattatatta

SEQ ID NO: 248552 - DNA, 25 bp, Probe sequence
cgtcgtggtaaagtacgtcgtgcta

SEQ ID NO: 248553 - DNA, 25 bp, Probe sequence
catcaggtgttggcgtggaacgtac

SEQ ID NO: 248554 - DNA, 25 bp, Probe sequence
cattcccattacacacaccaaaaat

SEQ ID NO: 248555 - DNA, 25 bp, Probe sequence
cgtggcggtggcgtttctgaaacgt

SEQ ID NO: 248556 - DNA, 25 bp, Probe sequence
cgtcgtgctaaattatattacttac

SEQ ID NO: 248557 - DNA, 25 bp, Probe sequence
ccaagtttccgtcctggtgatactt

SEQ ID NO: 248558 - DNA, 25 bp, Probe sequence
gcgtttctgaaacgtttacagttcg

SEQ ID NO: 248559 - DNA, 25 bp, Probe sequence
gctgctagaatccaagaaattcgtt

SEQ ID NO: 248560 - DNA, 25 bp, Probe sequence
gacaaatcacaaattaatcgaagca

SEQ ID NO: 248561 - DNA, 25 bp, Probe sequence
gagggtactcgtgagcgtatccaag

SEQ ID NO: 248562 - DNA, 25 bp, Probe sequence
gtttacgtggtaaagctgctagaat

SEQ ID NO: 248563 - DNA, 25 bp, Probe sequence
gtatcattgagggtactcgtgagcg

SEQ ID NO: 248564 - DNA, 25 bp, Probe sequence
gtacacgtacgtatcattgagggta

SEQ ID NO: 248565 - DNA, 25 bp, Probe sequence
gtaattaaacgtcgtggcggtggcg

SEQ ID NO: 248566 - DNA, 25 bp, Probe sequence
gtcctggtgatactttacgtgtaca

SEQ ID NO: 248567 - DNA, 25 bp, Probe sequence
ggtgatactttacgtgtacacgtac

SEQ ID NO: 248568 - DNA, 25 bp, Probe sequence
gggtactcgtgagcgtatccaagta

SEQ ID NO: 248569 - DNA, 25 bp, Probe sequence
ggcgtggaacgtacattcccattac

SEQ ID NO: 248570 - DNA, 25 bp, Probe sequence
ggtaaagctgctagaatccaagaaa

SEQ ID NO: 248571 - DNA, 25 bp, Probe sequence
ggaacgtacattcccattacacaca

SEQ ID NO: 248572 - DNA, 25 bp, Probe sequence
tgagcgtatccaagtattcgaaggc

SEQ ID NO: 248573 - DNA, 25 bp, Probe sequence
tccgtcctggtgatactttacgtgt

SEQ ID NO: 248574 - DNA, 25 bp, Probe sequence
tcccattacacacaccaaaaattga

SEQ ID NO: 248575 - DNA, 25 bp, Probe sequence
taaacgtcgtggcggtggcgtttct

SEQ ID NO: 248576 - DNA, 25 bp, Probe sequence
tacagttcgtaaaatttcatcaggt

SEQ ID NO: 248577 - DNA, 25 bp, Probe sequence
tacagacttaccaagtttccgtcct

SEQ ID NO: 248578 - DNA, 25 bp, Probe sequence
ttatattacttacgtagtttacgtg

SEQ ID NO: 248579 - DNA, 25 bp, Probe sequence
atccaggacatatggcgaaagccaa

SEQ ID NO: 248580 - DNA, 25 bp, Probe sequence
atgagatgtcaaaatgggaacaatt

SEQ ID NO: 248581 - DNA, 25 bp, Probe sequence
atggttattcaatggtatccaggac

SEQ ID NO: 248582 - DNA, 25 bp, Probe sequence
agttcaagaaaccctatgatagatg

SEQ ID NO: 248583 - DNA, 25 bp, Probe sequence
agcgtggtttgatgcgatagggaaa

SEQ ID NO: 248584 - DNA, 25 bp, Probe sequence
accaggtgtgaccaaacaacaacaa

SEQ ID NO: 248585 - DNA, 25 bp, Probe sequence
aaagaaagtggaagctgcagcaatt

SEQ ID NO: 248586 - DNA, 25 bp, Probe sequence
caatggtatccaggacatatggcga

SEQ ID NO: 248587 - DNA, 25 bp, Probe sequence
aataaactggcaaagcgtagtattg

SEQ ID NO: 248588 - DNA, 25 bp, Probe sequence
catagcgtggtttgatgcgataggg

SEQ ID NO: 248589 - DNA, 25 bp, Probe sequence
cgtggcttaattcgacgtggtaatg

SEQ ID NO: 248590 - DNA, 25 bp, Probe sequence
gcaagaattccatatagttcaagaa

SEQ ID NO: 248591 - DNA, 25 bp, Probe sequence
gaattccaaatgttggtaaatccac

SEQ ID NO: 248592 - DNA, 25 bp, Probe sequence
gaagttcctgaagatgcagaaatca

SEQ ID NO: 248593 - DNA, 25 bp, Probe sequence
gaagcagtcattgaactgattattt

SEQ ID NO: 248594 - DNA, 25 bp, Probe sequence
gaactgattatttatgatattcgaa

SEQ ID NO: 248595 - DNA, 25 bp, Probe sequence
gaactagtagatgcaagaattccat

SEQ ID NO: 248596 - DNA, 25 bp, Probe sequence
gaaaccctatgatagatgaagttat

SEQ ID NO: 248597 - DNA, 25 bp, Probe sequence
gaaatcatagcgtggtttgatgcga

SEQ ID NO: 248598 - DNA, 25 bp, Probe sequence
gaaattgattacgaagcagtcattg

SEQ ID NO: 248599 - DNA, 25 bp, Probe sequence
gatgcaagaattccatatagttcaa

SEQ ID NO: 248600 - DNA, 25 bp, Probe sequence
gatgcagaaatcatagcgtggtttg

SEQ ID NO: 248601 - DNA, 25 bp, Probe sequence
gttggtaaatccacattaataaata

SEQ ID NO: 248602 - DNA, 25 bp, Probe sequence
gtagatgtagtgtttgaactagtag

SEQ ID NO: 248603 - DNA, 25 bp, Probe sequence
gtaataaaccaggtgtgaccaaaca

SEQ ID NO: 248604 - DNA, 25 bp, Probe sequence
gtgtgaccaaacaacaacaatggat

SEQ ID NO: 248605 - DNA, 25 bp, Probe sequence
ggtatccaggacatatggcgaaagc

SEQ ID NO: 248606 - DNA, 25 bp, Probe sequence
ggatgctaagcacggtaaaaattta

SEQ ID NO: 248607 - DNA, 25 bp, Probe sequence
ggcgaaagccaaaagagaagtaagt

SEQ ID NO: 248608 - DNA, 25 bp, Probe sequence
ggcttaattcgacgtggtaatgaaa

SEQ ID NO: 248609 - DNA, 25 bp, Probe sequence
tgactgaggaattagcaaatgacgc

SEQ ID NO: 248610 - DNA, 25 bp, Probe sequence
tgcgatagggaaaaaacgtggctta

SEQ ID NO: 248611 - DNA, 25 bp, Probe sequence
ttgattacgaagcagtcattgaact

SEQ ID NO: 248612 - DNA, 25 bp, Probe sequence
ttgataaaggatactatcctgtatc

SEQ ID NO: 248613 - DNA, 25 bp, Probe sequence
atgaagttactgcttttgcatatgg

SEQ ID NO: 248614 - DNA, 25 bp, Probe sequence
atgacgcttgataatgcactgcctc

SEQ ID NO: 248615 - DNA, 25 bp, Probe sequence
aggtttttcgtgatgattatatgac

SEQ ID NO: 248616 - DNA, 25 bp, Probe sequence
acctttagcaggtccagtcgttgca

SEQ ID NO: 248617 - DNA, 25 bp, Probe sequence
agcaatcgatgatattggcattatg

SEQ ID NO: 248618 - DNA, 25 bp, Probe sequence
actcaaatcgccatgcagcgagcta

SEQ ID NO: 248619 - DNA, 25 bp, Probe sequence
aaatcacaattatttgggccttgat

SEQ ID NO: 248620 - DNA, 25 bp, Probe sequence
aacaacatttactagcaatcgatga

SEQ ID NO: 248621 - DNA, 25 bp, Probe sequence
aacgtctagaattaaatgaagcact

SEQ ID NO: 248622 - DNA, 25 bp, Probe sequence
aaccaacgcatttattgatagacgc

SEQ ID NO: 248623 - DNA, 25 bp, Probe sequence
aagctactcaaatcgccatgcagcg

SEQ ID NO: 248624 - DNA, 25 bp, Probe sequence
aatcgccatgcagcgagctattgat

SEQ ID NO: 248625 - DNA, 25 bp, Probe sequence
cacagttatctaaagattatcctga

SEQ ID NO: 248626 - DNA, 25 bp, Probe sequence
catgaatgctttttagatgagcgaa

SEQ ID NO: 248627 - DNA, 25 bp, Probe sequence
gcagttgattaatgcggttaataca

SEQ ID NO: 248628 - DNA, 25 bp, Probe sequence
gcactgcctcaagtatctttaatca

SEQ ID NO: 248629 - DNA, 25 bp, Probe sequence
gaagttggaagaggacctttagcag

SEQ ID NO: 248630 - DNA, 25 bp, Probe sequence
gacgcttgataatgcactgcctcaa

SEQ ID NO: 248631 - DNA, 25 bp, Probe sequence
gagcatagaaaaagctttgaaccta

SEQ ID NO: 248632 - DNA, 25 bp, Probe sequence
gattatatgacacagttatctaaag

SEQ ID NO: 248633 - DNA, 25 bp, Probe sequence
gtatctttaatcaagggtgatgcaa

SEQ ID NO: 248634 - DNA, 25 bp, Probe sequence
gtatgttgaaatgacttactttgaa

SEQ ID NO: 248635 - DNA, 25 bp, Probe sequence
ggtccagtcgttgcatgcgcaacaa

SEQ ID NO: 248636 - DNA, 25 bp, Probe sequence
ggtaccaaacaacatttactagcaa

SEQ ID NO: 248637 - DNA, 25 bp, Probe sequence
ggattatcagtacaaccaacgcatt

SEQ ID NO: 248638 - DNA, 25 bp, Probe sequence
tgcagcgagctattgatggattatc

SEQ ID NO: 248639 - DNA, 25 bp, Probe sequence
tgcatgcgcaacaattttaaattca

SEQ ID NO: 248640 - DNA, 25 bp, Probe sequence
tcgcgacagctgaagaaatagatga

SEQ ID NO: 248641 - DNA, 25 bp, Probe sequence
taatgcactgcctcaagtatcttta

SEQ ID NO: 248642 - DNA, 25 bp, Probe sequence
taaagctactcaaatcgccatgcag

SEQ ID NO: 248643 - DNA, 25 bp, Probe sequence
tatcagtacaaccaacgcatttatt

SEQ ID NO: 248644 - DNA, 25 bp, Probe sequence
ttagcaggtccagtcgttgcatgcg

SEQ ID NO: 248645 - DNA, 25 bp, Probe sequence
ttgatagacgcgatgacgcttgata

SEQ ID NO: 248646 - DNA, 25 bp, Probe sequence
ttgaacctataaaatcgttactgta

SEQ ID NO: 248647 - DNA, 25 bp, Probe sequence
atcatttcggtggaaacccagccaa

SEQ ID NO: 248648 - DNA, 25 bp, Probe sequence
atcttcaaagaaactatcgatccag

SEQ ID NO: 248649 - DNA, 25 bp, Probe sequence
acgttggattcgttattgatcgtgc

SEQ ID NO: 248650 - DNA, 25 bp, Probe sequence
aaacccagccaatttcttagatgca

SEQ ID NO: 248651 - DNA, 25 bp, Probe sequence
aacagctgatggtgatgtattggca

SEQ ID NO: 248652 - DNA, 25 bp, Probe sequence
aatatttcgttcaatgggcgttgca

SEQ ID NO: 248653 - DNA, 25 bp, Probe sequence
cacaaattcatgctggaggtagagg

SEQ ID NO: 248654 - DNA, 25 bp, Probe sequence
gcaacaatggctgaaggtgcacaaa

SEQ ID NO: 248655 - DNA, 25 bp, Probe sequence
gaatatccacgagtatcaaggtaaa

SEQ ID NO: 248656 - DNA, 25 bp, Probe sequence
gaagggggcactgagattgaagaag

SEQ ID NO: 248657 - DNA, 25 bp, Probe sequence
gaagaagttgctgcgaagactcctg

SEQ ID NO: 248658 - DNA, 25 bp, Probe sequence
gaagcgtctaaacatgatttatcat

SEQ ID NO: 248659 - DNA, 25 bp, Probe sequence
gaccaagtaacattgatggcgtctg

SEQ ID NO: 248660 - DNA, 25 bp, Probe sequence
gaggtagaggtaaagcaggcggagt

SEQ ID NO: 248661 - DNA, 25 bp, Probe sequence
gatggcgtctgaagaagggggcact

SEQ ID NO: 248662 - DNA, 25 bp, Probe sequence
gatccagtaatcggactttcaccat

SEQ ID NO: 248663 - DNA, 25 bp, Probe sequence
gatgcaggcggaagcgctactagag

SEQ ID NO: 248664 - DNA, 25 bp, Probe sequence
gatccgaaagagattgaagcgtcta

SEQ ID NO: 248665 - DNA, 25 bp, Probe sequence
gattagcaattgaaccagcagcaac

SEQ ID NO: 248666 - DNA, 25 bp, Probe sequence
gttgctgcgaagactcctgaaaaga

SEQ ID NO: 248667 - DNA, 25 bp, Probe sequence
gttcaatcgtagaaatcaacccatt

SEQ ID NO: 248668 - DNA, 25 bp, Probe sequence
gtagatttaactttaccactagttg

SEQ ID NO: 248669 - DNA, 25 bp, Probe sequence
gggcgttgcagttccagaaggacga

SEQ ID NO: 248670 - DNA, 25 bp, Probe sequence
ggtgacacatcaaactggtccagaa

SEQ ID NO: 248671 - DNA, 25 bp, Probe sequence
ggatgtatggttaatggtgcaggtt

SEQ ID NO: 248672 - DNA, 25 bp, Probe sequence
ggactttcaccattccaagcaagac

SEQ ID NO: 248673 - DNA, 25 bp, Probe sequence
ggacgagtagcatttactgctgaag

SEQ ID NO: 248674 - DNA, 25 bp, Probe sequence
tggtgcaggtttagccatggcaaca

SEQ ID NO: 248675 - DNA, 25 bp, Probe sequence
tcaacccattagttacaacagctga

SEQ ID NO: 248676 - DNA, 25 bp, Probe sequence
tagggaaaactttggtgacacatca

SEQ ID NO: 248677 - DNA, 25 bp, Probe sequence
tatcgcagaaggtatcgttgaagct

SEQ ID NO: 248678 - DNA, 25 bp, Probe sequence
tatcgaagaaggttgtgctattcaa

SEQ ID NO: 248679 - DNA, 25 bp, Probe sequence
ttgatcgtgcgactgaccaagtaac

SEQ ID NO: 248680 - DNA, 25 bp, Probe sequence
ttgtaaacattttcggtggcattat

SEQ ID NO: 248681 - DNA, 25 bp, Probe sequence
atttttaattattagcgctattgtt

SEQ ID NO: 248682 - DNA, 25 bp, Probe sequence
atctaaagcagacggtacagcagtt

SEQ ID NO: 248683 - DNA, 25 bp, Probe sequence
agggtgacaatcctcagtttatggc

SEQ ID NO: 248684 - DNA, 25 bp, Probe sequence
agtggtcataaacaagattcggaaa

SEQ ID NO: 248685 - DNA, 25 bp, Probe sequence
agatgaggtgtcaaaggacttaaat

SEQ ID NO: 248686 - DNA, 25 bp, Probe sequence
agcgctattgttacatttttcgtct

SEQ ID NO: 248687 - DNA, 25 bp, Probe sequence
caaactaagggtgacaatcctcagt

SEQ ID NO: 248688 - DNA, 25 bp, Probe sequence
caacatccaagttaaaagtggtcat

SEQ ID NO: 248689 - DNA, 25 bp, Probe sequence
cagacggtacagcagttaaagtcgc

SEQ ID NO: 248690 - DNA, 25 bp, Probe sequence
cgcgcttatatatatcttcttcaaa

SEQ ID NO: 248691 - DNA, 25 bp, Probe sequence
gcctgtattgggttcaattcaaaaa

SEQ ID NO: 248692 - DNA, 25 bp, Probe sequence
gaatagcttcgctaaagttacaagt

SEQ ID NO: 248693 - DNA, 25 bp, Probe sequence
gagtatgttgacaattacaaaccaa

SEQ ID NO: 248694 - DNA, 25 bp, Probe sequence
gattgcctgtattgggttcaattca

SEQ ID NO: 248695 - DNA, 25 bp, Probe sequence
gttgtcgcgcttatatatatcttct

SEQ ID NO: 248696 - DNA, 25 bp, Probe sequence
gttaaagtcgcaccaaaaactgtag

SEQ ID NO: 248697 - DNA, 25 bp, Probe sequence
gttacatttttcgtcttatcaccta

SEQ ID NO: 248698 - DNA, 25 bp, Probe sequence
gtaatattcaacttgtaaatacgta

SEQ ID NO: 248699 - DNA, 25 bp, Probe sequence
gtcttatcacctaaatatcaagcta

SEQ ID NO: 248700 - DNA, 25 bp, Probe sequence
gtcgcaccaaaaactgtagtgaatc

SEQ ID NO: 248701 - DNA, 25 bp, Probe sequence
gtcctagaattttagatgaggtgtc

SEQ ID NO: 248702 - DNA, 25 bp, Probe sequence
gtcgcgcttatatatatcttcttca

SEQ ID NO: 248703 - DNA, 25 bp, Probe sequence
ggattagttgtcgcgcttatatata

SEQ ID NO: 248704 - DNA, 25 bp, Probe sequence
tcggaaaaaattgcgaatagcttcg

SEQ ID NO: 248705 - DNA, 25 bp, Probe sequence
tgaagattttaattattttaccgct

SEQ ID NO: 248706 - DNA, 25 bp, Probe sequence
tctttttaggattagttgtcgcgct

SEQ ID NO: 248707 - DNA, 25 bp, Probe sequence
taacgtatcaattttatctaaagca

SEQ ID NO: 248708 - DNA, 25 bp, Probe sequence
tacatttttcgtcttatcacctaaa

SEQ ID NO: 248709 - DNA, 25 bp, Probe sequence
tatatatcttcttcaaagtaatttt

SEQ ID NO: 248710 - DNA, 25 bp, Probe sequence
tttaggattagttgtcgcgcttata

SEQ ID NO: 248711 - DNA, 25 bp, Probe sequence
tttttcgtcttatcacctaaatatc

SEQ ID NO: 248712 - DNA, 25 bp, Probe sequence
ttaggattgcctgtattgggttcaa

SEQ ID NO: 248713 - DNA, 25 bp, Probe sequence
ttacaagtaaacaaattccgaagat

SEQ ID NO: 248714 - DNA, 25 bp, Probe sequence
ttgttacatttttcgtcttatcacc

SEQ ID NO: 248715 - DNA, 25 bp, Probe sequence
attatgcctggctatattcacaaaa

SEQ ID NO: 248716 - DNA, 25 bp, Probe sequence
atagtagcaggtgtgacgcctggta

SEQ ID NO: 248717 - DNA, 25 bp, Probe sequence
aggtggtaaaggtactgctgaagag

SEQ ID NO: 248718 - DNA, 25 bp, Probe sequence
agttgtggtgtgaaaacagcggcaa

SEQ ID NO: 248719 - DNA, 25 bp, Probe sequence
agcaccatttgctgcagactcaatt

SEQ ID NO: 248720 - DNA, 25 bp, Probe sequence
acagcacctcctggaaaacgtatgg

SEQ ID NO: 248721 - DNA, 25 bp, Probe sequence
aaaaaggtcatgttggtgtagtatc

SEQ ID NO: 248722 - DNA, 25 bp, Probe sequence
aacaccttcagaaattggttcaaca

SEQ ID NO: 248723 - DNA, 25 bp, Probe sequence
aacagcggcaacaccttcagaaatt

SEQ ID NO: 248724 - DNA, 25 bp, Probe sequence
caaaaccagttgtaggctttatcgg

SEQ ID NO: 248725 - DNA, 25 bp, Probe sequence
cagctgatgcagacttagatatggt

SEQ ID NO: 248726 - DNA, 25 bp, Probe sequence
cagactcaattttagaagcagctga

SEQ ID NO: 248727 - DNA, 25 bp, Probe sequence
catttacgttccagcaccatttgct

SEQ ID NO: 248728 - DNA, 25 bp, Probe sequence
catattcctgtattagacatggtta

SEQ ID NO: 248729 - DNA, 25 bp, Probe sequence
gcgttcctgttttcaacactgttga

SEQ ID NO: 248730 - DNA, 25 bp, Probe sequence
gctgttggtattggtggagacccag

SEQ ID NO: 248731 - DNA, 25 bp, Probe sequence
gaaggtattggtcaaactacagctg

SEQ ID NO: 248732 - DNA, 25 bp, Probe sequence
gacgcctggtaaaggtggtcaagtt

SEQ ID NO: 248733 - DNA, 25 bp, Probe sequence
gaagcagtgcaccaattgactgaag

SEQ ID NO: 248734 - DNA, 25 bp, Probe sequence
gaaaacgtatgggacatgctggtgc

SEQ ID NO: 248735 - DNA, 25 bp, Probe sequence
gaaagcagttgttatgattggtgaa

SEQ ID NO: 248736 - DNA, 25 bp, Probe sequence
gtttcagtcatttacgttccagcac

SEQ ID NO: 248737 - DNA, 25 bp, Probe sequence
gtatcactgaacatattcctgtatt

SEQ ID NO: 248738 - DNA, 25 bp, Probe sequence
gtaggctttatcggtggacaaacag

SEQ ID NO: 248739 - DNA, 25 bp, Probe sequence
gtaaaattggtattatgcctggcta

SEQ ID NO: 248740 - DNA, 25 bp, Probe sequence
gtcaagttgttgaaggcgttcctgt

SEQ ID NO: 248741 - DNA, 25 bp, Probe sequence
gtccaggtgtgattacagcagatga

SEQ ID NO: 248742 - DNA, 25 bp, Probe sequence
ggggcaacggtttcagtcatttacg

SEQ ID NO: 248743 - DNA, 25 bp, Probe sequence
ggtcaaactacagctgttggtattg

SEQ ID NO: 248744 - DNA, 25 bp, Probe sequence
ggtacaaggtattacagggtctact

SEQ ID NO: 248745 - DNA, 25 bp, Probe sequence
ggacaaacagcacctcctggaaaac

SEQ ID NO: 248746 - DNA, 25 bp, Probe sequence
tactgcccttttccatacaaaacaa

SEQ ID NO: 248747 - DNA, 25 bp, Probe sequence
tatggttatttgtatcactgaacat

SEQ ID NO: 248748 - DNA, 25 bp, Probe sequence
tattacagggtctactgcccttttc

SEQ ID NO: 248749 - DNA, 25 bp, Probe sequence
attgggtatctccatcaaggttata

SEQ ID NO: 248750 - DNA, 25 bp, Probe sequence
attcttgttgatccatatttaatag

SEQ ID NO: 248751 - DNA, 25 bp, Probe sequence
attatctatcaagtggatcaaatcc

SEQ ID NO: 248752 - DNA, 25 bp, Probe sequence
atttctactctcatagaggtccttt

SEQ ID NO: 248753 - DNA, 25 bp, Probe sequence
agtgaagaagaatttaccaactaca

SEQ ID NO: 248754 - DNA, 25 bp, Probe sequence
accaactacaccaaaaagcacttca

SEQ ID NO: 248755 - DNA, 25 bp, Probe sequence
acctgttttggatttagctgctgct

SEQ ID NO: 248756 - DNA, 25 bp, Probe sequence
aaaccagtaagaccaattctatata

SEQ ID NO: 248757 - DNA, 25 bp, Probe sequence
aaaagactattgagattggtgttaa

SEQ ID NO: 248758 - DNA, 25 bp, Probe sequence
aacatggttttcatttcatgaatga

SEQ ID NO: 248759 - DNA, 25 bp, Probe sequence
aaggcaatgttaaagatagcttgta

SEQ ID NO: 248760 - DNA, 25 bp, Probe sequence
aattctacaaatatttctactctca

SEQ ID NO: 248761 - DNA, 25 bp, Probe sequence
cctttacttgattatttcgatgcta

SEQ ID NO: 248762 - DNA, 25 bp, Probe sequence
ccaaaaagcacttcaaacattatac

SEQ ID NO: 248763 - DNA, 25 bp, Probe sequence
gctgcatgtttattaacagaggcac

SEQ ID NO: 248764 - DNA, 25 bp, Probe sequence
gctgctgctttatttatatgtactg

SEQ ID NO: 248765 - DNA, 25 bp, Probe sequence
gcatatcatctacaatggcatatga

SEQ ID NO: 248766 - DNA, 25 bp, Probe sequence
gcacatattgtgggagtgaagaatg

SEQ ID NO: 248767 - DNA, 25 bp, Probe sequence
gaagaattaattggtgatttcatca

SEQ ID NO: 248768 - DNA, 25 bp, Probe sequence
gactgtgaacagagcattaaatgaa

SEQ ID NO: 248769 - DNA, 25 bp, Probe sequence
gagattggtgttaaggttgaagatt

SEQ ID NO: 248770 - DNA, 25 bp, Probe sequence
gaggtcctttacttgattatttcga

SEQ ID NO: 248771 - DNA, 25 bp, Probe sequence
gatggacctgttttggatttagctg

SEQ ID NO: 248772 - DNA, 25 bp, Probe sequence
gatgaagtttattatctatcaagtg

SEQ ID NO: 248773 - DNA, 25 bp, Probe sequence
gatgctaaattagtttgttactttt

SEQ ID NO: 248774 - DNA, 25 bp, Probe sequence
gtatttattcttgttgatccatatt

SEQ ID NO: 248775 - DNA, 25 bp, Probe sequence
gtgatttcatcaaaccagtaagacc

SEQ ID NO: 248776 - DNA, 25 bp, Probe sequence
ggttttaatgcacatgttgaagaat

SEQ ID NO: 248777 - DNA, 25 bp, Probe sequence
ggatttagctgctgctttatttata

SEQ ID NO: 248778 - DNA, 25 bp, Probe sequence
tgaagttatagctgcatgtttatta

SEQ ID NO: 248779 - DNA, 25 bp, Probe sequence
tactctcatagaggtcctttacttg

SEQ ID NO: 248780 - DNA, 25 bp, Probe sequence
taggtggatttctgtattggattta

SEQ ID NO: 248781 - DNA, 25 bp, Probe sequence
tatctccatcaaggttatacaacag

SEQ ID NO: 248782 - DNA, 25 bp, Probe sequence
ttatggaataacaggcgtctttagt

SEQ ID NO: 248783 - DNA, 25 bp, Probe sequence
attacgtaaatactatgcttttata

SEQ ID NO: 248784 - DNA, 25 bp, Probe sequence
atcacgatagattttgcattagagc

SEQ ID NO: 248785 - DNA, 25 bp, Probe sequence
atgttttacctggatctatgtttaa

SEQ ID NO: 248786 - DNA, 25 bp, Probe sequence
aggtgctaaggtagtattaaacgct

SEQ ID NO: 248787 - DNA, 25 bp, Probe sequence
agagattctacaagttatacccaac

SEQ ID NO: 248788 - DNA, 25 bp, Probe sequence
acgtatccaagaaggtgctaaggta

SEQ ID NO: 248789 - DNA, 25 bp, Probe sequence
acttttcgactaaacaaattcatca

SEQ ID NO: 248790 - DNA, 25 bp, Probe sequence
actatttttgcttaagttatactgg

SEQ ID NO: 248791 - DNA, 25 bp, Probe sequence
aaattcatcaatttttaatggcata

SEQ ID NO: 248792 - DNA, 25 bp, Probe sequence
aaatatagatttcctgagcgcaata

SEQ ID NO: 248793 - DNA, 25 bp, Probe sequence
aatatatcaatttccattacttctt

SEQ ID NO: 248794 - DNA, 25 bp, Probe sequence
caatttccattacttcttttctata

SEQ ID NO: 248795 - DNA, 25 bp, Probe sequence
cagtctttagaatttttattatcaa

SEQ ID NO: 248796 - DNA, 25 bp, Probe sequence
ctgaatacccagtgctattaaaaga

SEQ ID NO: 248797 - DNA, 25 bp, Probe sequence
gctcaaggagctgatgcaatggcac

SEQ ID NO: 248798 - DNA, 25 bp, Probe sequence
gctttaaaatacaatctccctacaa

SEQ ID NO: 248799 - DNA, 25 bp, Probe sequence
tgtttccggccttgctcaaggagct

SEQ ID NO: 248800 - DNA, 25 bp, Probe sequence
gcagtagtaggtgcaagagattcta

SEQ ID NO: 248801 - DNA, 25 bp, Probe sequence
gcagttttagcctttggccatcaaa

SEQ ID NO: 248802 - DNA, 25 bp, Probe sequence
gcaatggcacatcaaatagctttaa

SEQ ID NO: 248803 - DNA, 25 bp, Probe sequence
gaattatcagcggtttgtcaaaagg

SEQ ID NO: 248804 - DNA, 25 bp, Probe sequence
gaaatgtttatgttttacctggatc

SEQ ID NO: 248805 - DNA, 25 bp, Probe sequence
gatctatgtttaatcctatgacaaa

SEQ ID NO: 248806 - DNA, 25 bp, Probe sequence
gttatactgggcacacttttcgact

SEQ ID NO: 248807 - DNA, 25 bp, Probe sequence
gatttcctgagcgcaatagaattat

SEQ ID NO: 248808 - DNA, 25 bp, Probe sequence
gttatacccaacagtctttagaatt

SEQ ID NO: 248809 - DNA, 25 bp, Probe sequence
gtaatttattacgtatccaagaagg

SEQ ID NO: 248810 - DNA, 25 bp, Probe sequence
gtcacatcacgatagattttgcatt

SEQ ID NO: 248811 - DNA, 25 bp, Probe sequence
ggccatcaaacacattatcccaaaa

SEQ ID NO: 248812 - DNA, 25 bp, Probe sequence
tgggcacacttttcgactaaacaaa

SEQ ID NO: 248813 - DNA, 25 bp, Probe sequence
tttaacaattgtttccggccttgct

SEQ ID NO: 248814 - DNA, 25 bp, Probe sequence
ttttaattactgaggctaaggaaca

SEQ ID NO: 248815 - DNA, 25 bp, Probe sequence
taatatgcatcatttggcagtagta

SEQ ID NO: 248816 - DNA, 25 bp, Probe sequence
ttagcctttggccatcaaacacatt

SEQ ID NO: 248817 - DNA, 25 bp, Probe sequence
attgcagaaggcgacattacatgga

SEQ ID NO: 248818 - DNA, 25 bp, Probe sequence
atctcttgggataagccgattggaa

SEQ ID NO: 248819 - DNA, 25 bp, Probe sequence
acaaggtgaccaagatgcccatgag

SEQ ID NO: 248820 - DNA, 25 bp, Probe sequence
aaattgggcgaccatcaacttatgc

SEQ ID NO: 248821 - DNA, 25 bp, Probe sequence
aaacaatgatggtcgcacaacaatt

SEQ ID NO: 248822 - DNA, 25 bp, Probe sequence
aaaacgcgtaatccagcaaacccat

SEQ ID NO: 248823 - DNA, 25 bp, Probe sequence
cttgctcaaacttcccggattgtcg

SEQ ID NO: 248824 - DNA, 25 bp, Probe sequence
cctgaatgcgactttatctcttggg

SEQ ID NO: 248825 - DNA, 25 bp, Probe sequence
gcacttcgtttagtcattgaccgtg

SEQ ID NO: 248826 - DNA, 25 bp, Probe sequence
gcaaacccatttacaacttctacat

SEQ ID NO: 248827 - DNA, 25 bp, Probe sequence
gaatcgtgtcttttatggatgttcg

SEQ ID NO: 248828 - DNA, 25 bp, Probe sequence
gaagcaattgcttggcatttatcaa

SEQ ID NO: 248829 - DNA, 25 bp, Probe sequence
gaaccagctcaacactatacacaac

SEQ ID NO: 248830 - DNA, 25 bp, Probe sequence
gaaaaacgtctttctcgcaagtgac

SEQ ID NO: 248831 - DNA, 25 bp, Probe sequence
gaccttcaagtactatgcgtacgcc

SEQ ID NO: 248832 - DNA, 25 bp, Probe sequence
gagaaccgattctacacgtatttca

SEQ ID NO: 248833 - DNA, 25 bp, Probe sequence
gagttcaatctgttgcacttcgttt

SEQ ID NO: 248834 - DNA, 25 bp, Probe sequence
gatgagccagccggtgaagactgtg

SEQ ID NO: 248835 - DNA, 25 bp, Probe sequence
gtgaccccgaccgtgaaggtgaagc

SEQ ID NO: 248836 - DNA, 25 bp, Probe sequence
gatgcacaacaagcgcgtcgaatat

SEQ ID NO: 248837 - DNA, 25 bp, Probe sequence
gttggctataacatctcgccagttc

SEQ ID NO: 248838 - DNA, 25 bp, Probe sequence
gggacacgtcagagacttaccaaga

SEQ ID NO: 248839 - DNA, 25 bp, Probe sequence
gttatagcttcaatgggacacgtca

SEQ ID NO: 248840 - DNA, 25 bp, Probe sequence
ggctccagcaatacttgatacagtc

SEQ ID NO: 248841 - DNA, 25 bp, Probe sequence
tgcgtacgccagatgatatgaagtc

SEQ ID NO: 248842 - DNA, 25 bp, Probe sequence
tgcccatgaggctattagaccttca

SEQ ID NO: 248843 - DNA, 25 bp, Probe sequence
taagcgttttgttcctactgagttg

SEQ ID NO: 248844 - DNA, 25 bp, Probe sequence
tacacaaccacctccaagatatact

SEQ ID NO: 248845 - DNA, 25 bp, Probe sequence
tacattacaacaagaggcggcacgt

SEQ ID NO: 248846 - DNA, 25 bp, Probe sequence
tacggtgaatcttacacttctaaac

SEQ ID NO: 248847 - DNA, 25 bp, Probe sequence
tagtcattgttgaatcgcctgcaaa

SEQ ID NO: 248848 - DNA, 25 bp, Probe sequence
tttgtggttctcctatggttataaa

SEQ ID NO: 248849 - DNA, 25 bp, Probe sequence
ttgttgctagtcaaatggctccagc

SEQ ID NO: 248850 - DNA, 25 bp, Probe sequence
ttgtcagcgggtcgagttcaatctg

SEQ ID NO: 248851 - DNA, 25 bp, Probe sequence
atactgataaatttgcggaacttgt

SEQ ID NO: 248852 - DNA, 25 bp, Probe sequence
aggttatgtagaaagcgcagctagc

SEQ ID NO: 248853 - DNA, 25 bp, Probe sequence
agaacgctatgaagcacaagctaat

SEQ ID NO: 248854 - DNA, 25 bp, Probe sequence
aaacaccagcgcaccatactgataa

SEQ ID NO: 248855 - DNA, 25 bp, Probe sequence
aacttgtatgttccaattcattacg

SEQ ID NO: 248856 - DNA, 25 bp, Probe sequence
aagatcaactttatttctatgatgc

SEQ ID NO: 248857 - DNA, 25 bp, Probe sequence
aatgactggtgttgaaggttatgta

SEQ ID NO: 248858 - DNA, 25 bp, Probe sequence
aattgatttcacaaccaaacataca

SEQ ID NO: 248859 - DNA, 25 bp, Probe sequence
caattatcgcaacaggaccacttac

SEQ ID NO: 248860 - DNA, 25 bp, Probe sequence
caaagactgggaaacgtccttatgc

SEQ ID NO: 248861 - DNA, 25 bp, Probe sequence
cggttcagaagcggcatatcaatta

SEQ ID NO: 248862 - DNA, 25 bp, Probe sequence
gcgcagctagcggcttagttgcagg

SEQ ID NO: 248863 - DNA, 25 bp, Probe sequence
gctaacttcgggttattaccatctt

SEQ ID NO: 248864 - DNA, 25 bp, Probe sequence
gctggtcttgccggttcagaagcgg

SEQ ID NO: 248865 - DNA, 25 bp, Probe sequence
gcattagcagttgatagacacgatt

SEQ ID NO: 248866 - DNA, 25 bp, Probe sequence
gcaagacattactatttggaccaat

SEQ ID NO: 248867 - DNA, 25 bp, Probe sequence
gaatttccaacctatgaatgctaac

SEQ ID NO: 248868 - DNA, 25 bp, Probe sequence
gaagcggctgataaggcacgagttc

SEQ ID NO: 248869 - DNA, 25 bp, Probe sequence
gaagctgcatatttaaactgtccta

SEQ ID NO: 248870 - DNA, 25 bp, Probe sequence
gaaatgctttaactaatggtgtggg

SEQ ID NO: 248871 - DNA, 25 bp, Probe sequence
gaccacttactacagaaacccttgc

SEQ ID NO: 248872 - DNA, 25 bp, Probe sequence
gagacctgttaaacaaacaccagcg

SEQ ID NO: 248873 - DNA, 25 bp, Probe sequence
gttccagctggtggtgcattagcag

SEQ ID NO: 248874 - DNA, 25 bp, Probe sequence
gtgatgcatagaaataccttcatta

SEQ ID NO: 248875 - DNA, 25 bp, Probe sequence
ggaccaatgaaaccagtaggattag

SEQ ID NO: 248876 - DNA, 25 bp, Probe sequence
tggcttactatatttctcatgctaa

SEQ ID NO: 248877 - DNA, 25 bp, Probe sequence
tgtaataggtgctggtcttgccggt

SEQ ID NO: 248878 - DNA, 25 bp, Probe sequence
tgatagacacgatttttcaggttat

SEQ ID NO: 248879 - DNA, 25 bp, Probe sequence
taaggcacgagttccagctggtggt

SEQ ID NO: 248880 - DNA, 25 bp, Probe sequence
taatgccattccagatggatacaca

SEQ ID NO: 248881 - DNA, 25 bp, Probe sequence
taaactgtcctatgactgaggatga

SEQ ID NO: 248882 - DNA, 25 bp, Probe sequence
tacttaaagtcccgttatgataaag

SEQ ID NO: 248883 - DNA, 25 bp, Probe sequence
tttcgagggttgtatgccttttgaa

SEQ ID NO: 248884 - DNA, 25 bp, Probe sequence
ttaatcgcttttatgatgcagtatt

SEQ ID NO: 248885 - DNA, 25 bp, Probe sequence
atctaaatgcacatcctcgagcgaa

SEQ ID NO: 248886 - DNA, 25 bp, Probe sequence
atgagaacattattaatccatttgt

SEQ ID NO: 248887 - DNA, 25 bp, Probe sequence
aggtcatgttaatttgtcaacaact

SEQ ID NO: 248888 - DNA, 25 bp, Probe sequence
acgcgaatggtgttaccgtattagg

SEQ ID NO: 248889 - DNA, 25 bp, Probe sequence
acttttgaatacagagatgctagaa

SEQ ID NO: 248890 - DNA, 25 bp, Probe sequence
acatacatttgcaacgcatttattg

SEQ ID NO: 248891 - DNA, 25 bp, Probe sequence
acagtacaatcgttattaggtcatg

SEQ ID NO: 248892 - DNA, 25 bp, Probe sequence
aaagaaaaatatcttccgcaattct

SEQ ID NO: 248893 - DNA, 25 bp, Probe sequence
aaaccaattcagtcatgcaatcatg

SEQ ID NO: 248894 - DNA, 25 bp, Probe sequence
aacaagatatagatttttacgcgaa

SEQ ID NO: 248895 - DNA, 25 bp, Probe sequence
aacaactggtaaatatacacacgta

SEQ ID NO: 248896 - DNA, 25 bp, Probe sequence
aagtgtatctaaatgcacatcctcg

SEQ ID NO: 248897 - DNA, 25 bp, Probe sequence
aatgcacatcctcgagcgaaaaagg

SEQ ID NO: 248898 - DNA, 25 bp, Probe sequence
tttacgggatcgagttattcttgaa

SEQ ID NO: 248899 - DNA, 25 bp, Probe sequence
cgggatcgagttattcttgaattgt

SEQ ID NO: 248900 - DNA, 25 bp, Probe sequence
gcaacgcatttattgaatcaaggtg

SEQ ID NO: 248901 - DNA, 25 bp, Probe sequence
gaatattggatgacgcttgatgaga

SEQ ID NO: 248902 - DNA, 25 bp, Probe sequence
gaagcaatcactgaacgcggtgtac

SEQ ID NO: 248903 - DNA, 25 bp, Probe sequence
gaacgcggtgtacgatatgttttaa

SEQ ID NO: 248904 - DNA, 25 bp, Probe sequence
gaacatctgtttctcgtaaaatctc

SEQ ID NO: 248905 - DNA, 25 bp, Probe sequence
gatgacttaattcagtttaatcaat

SEQ ID NO: 248906 - DNA, 25 bp, Probe sequence
gatgctagaaattatttgagctatt

SEQ ID NO: 248907 - DNA, 25 bp, Probe sequence
gatttttacgcgaatggtgttaccg

SEQ ID NO: 248908 - DNA, 25 bp, Probe sequence
gttaaacgaacagcaggcgtaagtg

SEQ ID NO: 248909 - DNA, 25 bp, Probe sequence
gtaccgtttggtgcttattgtagac

SEQ ID NO: 248910 - DNA, 25 bp, Probe sequence
gtcatgcaatcatgattttcttatt

SEQ ID NO: 248911 - DNA, 25 bp, Probe sequence
ggtgcagacctaagaacagtacaat

SEQ ID NO: 248912 - DNA, 25 bp, Probe sequence
ggatgacgcttgatgagaacattat

SEQ ID NO: 248913 - DNA, 25 bp, Probe sequence
ggcgtaagtgagattcatccccaca

SEQ ID NO: 248914 - DNA, 25 bp, Probe sequence
tgtttctcgtaaaatctcaacgtta

SEQ ID NO: 248915 - DNA, 25 bp, Probe sequence
tccccacaagctcagacatacattt

SEQ ID NO: 248916 - DNA, 25 bp, Probe sequence
taagtgagattcatccccacaagct

SEQ ID NO: 248917 - DNA, 25 bp, Probe sequence
tacacacgtatctaaccaacaatta

SEQ ID NO: 248918 - DNA, 25 bp, Probe sequence
tagaacatttcaaaccaattcagtc

SEQ ID NO: 248919 - DNA, 25 bp, Probe sequence
attggcacaagaatggcgaggcgat

SEQ ID NO: 248920 - DNA, 25 bp, Probe sequence
atttgtctgctgaagaaatggcata

SEQ ID NO: 248921 - DNA, 25 bp, Probe sequence
agtagcggctgatatttgtgtcttt

SEQ ID NO: 248922 - DNA, 25 bp, Probe sequence
agagctgctgttgaattggcacaag

SEQ ID NO: 248923 - DNA, 25 bp, Probe sequence
agaagctatgctaattgtaatggat

SEQ ID NO: 248924 - DNA, 25 bp, Probe sequence
aagtcatcatgaaacaaacggcaag

SEQ ID NO: 248925 - DNA, 25 bp, Probe sequence
aagtgttagctggtttcgcaggtag

SEQ ID NO: 248926 - DNA, 25 bp, Probe sequence
aattacgtcaattagaagctatgct

SEQ ID NO: 248927 - DNA, 25 bp, Probe sequence
cattgaaacgccatgcatcgcattt

SEQ ID NO: 248928 - DNA, 25 bp, Probe sequence
ccagatgatgaccttatcgctattg

SEQ ID NO: 248929 - DNA, 25 bp, Probe sequence
gccatgcatcgcatttgtctgctga

SEQ ID NO: 248930 - DNA, 25 bp, Probe sequence
gcggctgatatttgtgtctttacca

SEQ ID NO: 248931 - DNA, 25 bp, Probe sequence
gcaggacgtgcattgaaacgccatg

SEQ ID NO: 248932 - DNA, 25 bp, Probe sequence
gcattaagcgcaggacgtgcattga

SEQ ID NO: 248933 - DNA, 25 bp, Probe sequence
gcaacaacaatttatgctgtaagac

SEQ ID NO: 248934 - DNA, 25 bp, Probe sequence
gaaacgccatgcatcgcatttgtct

SEQ ID NO: 248935 - DNA, 25 bp, Probe sequence
gaaatggcatatgagagcttgaaag

SEQ ID NO: 248936 - DNA, 25 bp, Probe sequence
gagagcttgaaagtagcggctgata

SEQ ID NO: 248937 - DNA, 25 bp, Probe sequence
gatgaccttatcgctattggatcag

SEQ ID NO: 248938 - DNA, 25 bp, Probe sequence
gatgcgtttacgttatttgaaaaat

SEQ ID NO: 248939 - DNA, 25 bp, Probe sequence
gatgctattttagttgtcagtggaa

SEQ ID NO: 248940 - DNA, 25 bp, Probe sequence
gatatttgtgtctttaccaacgata

SEQ ID NO: 248941 - DNA, 25 bp, Probe sequence
gttagctggtttcgcaggtagtgta

SEQ ID NO: 248942 - DNA, 25 bp, Probe sequence
gtagcagatgcgtttacgttatttg

SEQ ID NO: 248943 - DNA, 25 bp, Probe sequence
gtaacgcttggtcaacaagtcatca

SEQ ID NO: 248944 - DNA, 25 bp, Probe sequence
gtcagtggaactggcgaagttattg

SEQ ID NO: 248945 - DNA, 25 bp, Probe sequence
gtgtctttaccaacgataatattgt

SEQ ID NO: 248946 - DNA, 25 bp, Probe sequence
gggaaagcagctatggctggagatg

SEQ ID NO: 248947 - DNA, 25 bp, Probe sequence
ggtaacttagaaagagctgctgttg

SEQ ID NO: 248948 - DNA, 25 bp, Probe sequence
ggtttcgcaggtagtgtagcagatg

SEQ ID NO: 248949 - DNA, 25 bp, Probe sequence
ggcgaggcgataaacaattacgtca

SEQ ID NO: 248950 - DNA, 25 bp, Probe sequence
tgcatcgcatttgtctgctgaagaa

SEQ ID NO: 248951 - DNA, 25 bp, Probe sequence
tacaacagtttagtggtaacttaga

SEQ ID NO: 248952 - DNA, 25 bp, Probe sequence
tacaacattacatgcaacaacaatt

SEQ ID NO: 248953 - DNA, 25 bp, Probe sequence
attaccccacaatatgttgatgata

SEQ ID NO: 248954 - DNA, 25 bp, Probe sequence
atgcagttgtagatattaccccaca

SEQ ID NO: 248955 - DNA, 25 bp, Probe sequence
aggtgctggagctttccatgtatct

SEQ ID NO: 248956 - DNA, 25 bp, Probe sequence
agccgagtgacttgataccagaatt

SEQ ID NO: 248957 - DNA, 25 bp, Probe sequence
accagaattgcaaggtcgttttccg

SEQ ID NO: 248958 - DNA, 25 bp, Probe sequence
acatatgctgtttataggtgctgga

SEQ ID NO: 248959 - DNA, 25 bp, Probe sequence
aactttaccgatgaagcaattactc

SEQ ID NO: 248960 - DNA, 25 bp, Probe sequence
aagatttatcattcgaagcaccaag

SEQ ID NO: 248961 - DNA, 25 bp, Probe sequence
aagtcgaacaagatcctggtgcttt

SEQ ID NO: 248962 - DNA, 25 bp, Probe sequence
aataatcctttagagtcacttttcg

SEQ ID NO: 248963 - DNA, 25 bp, Probe sequence
gaaggtagcgttattcaaaccaaat

SEQ ID NO: 248964 - DNA, 25 bp, Probe sequence
gcgagaagttgctgttgagacggca

SEQ ID NO: 248965 - DNA, 25 bp, Probe sequence
gcgtctcaaacgaataatcctttag

SEQ ID NO: 248966 - DNA, 25 bp, Probe sequence
gaagaatggccaaagttgtcggcgc

SEQ ID NO: 248967 - DNA, 25 bp, Probe sequence
gaagcaccaagtatgccgaatgcag

SEQ ID NO: 248968 - DNA, 25 bp, Probe sequence
gaagcaacagctaaggccaatgaaa

SEQ ID NO: 248969 - DNA, 25 bp, Probe sequence
gaacaaatgggtatcatctttatag

SEQ ID NO: 248970 - DNA, 25 bp, Probe sequence
gaaatcgacaaagttgcgacgaata

SEQ ID NO: 248971 - DNA, 25 bp, Probe sequence
gacaacattggtgcacgtcgacttc

SEQ ID NO: 248972 - DNA, 25 bp, Probe sequence
gagacggcaaggaaaatcttagctg

SEQ ID NO: 248973 - DNA, 25 bp, Probe sequence
gagatcttgttgatgtttcagtaag

SEQ ID NO: 248974 - DNA, 25 bp, Probe sequence
gaggtgcaattccaaatttcggaca

SEQ ID NO: 248975 - DNA, 25 bp, Probe sequence
gatgaagaagaaccacctactgagg

SEQ ID NO: 248976 - DNA, 25 bp, Probe sequence
gatcaagaaagcgctaaccaagaag

SEQ ID NO: 248977 - DNA, 25 bp, Probe sequence
gatcctggtgctttaggtatgctag

SEQ ID NO: 248978 - DNA, 25 bp, Probe sequence
gttaagttattagttccaagtatga

SEQ ID NO: 248979 - DNA, 25 bp, Probe sequence
gtcacttttcggaggtgcaattcca

SEQ ID NO: 248980 - DNA, 25 bp, Probe sequence
gtcgttttccgattagagttgaact

SEQ ID NO: 248981 - DNA, 25 bp, Probe sequence
gtgcacgtcgacttcatacaatttt

SEQ ID NO: 248982 - DNA, 25 bp, Probe sequence
ggtactgtgaatactgaacatatgc

SEQ ID NO: 248983 - DNA, 25 bp, Probe sequence
tcttagctgatagttatgcggatga

SEQ ID NO: 248984 - DNA, 25 bp, Probe sequence
tagtggtcaagatgtctcaagacaa

SEQ ID NO: 248985 - DNA, 25 bp, Probe sequence
tttccatgtatctaagccgagtgac

SEQ ID NO: 248986 - DNA, 25 bp, Probe sequence
ttagctgagattgcttatcaagtaa

SEQ ID NO: 248987 - DNA, 25 bp, Probe sequence
attggtatggaaatcttacgtgaga

SEQ ID NO: 248988 - DNA, 25 bp, Probe sequence
atatctttgaagaacttggcggtac

SEQ ID NO: 248989 - DNA, 25 bp, Probe sequence
atgctgctacagttattggtatgga

SEQ ID NO: 248990 - DNA, 25 bp, Probe sequence
atgagcttattatctaaaacgagag

SEQ ID NO: 248991 - DNA, 25 bp, Probe sequence
atgtatttattgtatcgcgtcgagg

SEQ ID NO: 248992 - DNA, 25 bp, Probe sequence
aggtacattagtacttggtcgagta

SEQ ID NO: 248993 - DNA, 25 bp, Probe sequence
agaagcgcgcgataaagctgctatt

SEQ ID NO: 248994 - DNA, 25 bp, Probe sequence
aaagctgctattacaatggcaatta

SEQ ID NO: 248995 - DNA, 25 bp, Probe sequence
aacacaaaggtattgcggttgattt

SEQ ID NO: 248996 - DNA, 25 bp, Probe sequence
aacgattagtagcgtaactgtaaca

SEQ ID NO: 248997 - DNA, 25 bp, Probe sequence
aagttgcagatagagttggtattac

SEQ ID NO: 248998 - DNA, 25 bp, Probe sequence
aatcgcatcaaaagttgcagataga

SEQ ID NO: 248999 - DNA, 25 bp, Probe sequence
gcgcgcgataaagctgctattacaa

SEQ ID NO: 249000 - DNA, 25 bp, Probe sequence
gcggttgattttaaagatgtagcac

SEQ ID NO: 249001 - DNA, 25 bp, Probe sequence
gaaatcttacgtgagaagcatagtg

SEQ ID NO: 249002 - DNA, 25 bp, Probe sequence
gagaattattcatagatagtcgtac

SEQ ID NO: 249003 - DNA, 25 bp, Probe sequence
gagagagttaaacacgttacttcaa

SEQ ID NO: 249004 - DNA, 25 bp, Probe sequence
gatgtagcacaaacgattagtagcg

SEQ ID NO: 249005 - DNA, 25 bp, Probe sequence
gatctgtaattgtaaatgcactacg

SEQ ID NO: 249006 - DNA, 25 bp, Probe sequence
gtagcgtaactgtaacaaatgtatt

SEQ ID NO: 249007 - DNA, 25 bp, Probe sequence
gtacaactatcttcccaattttagg

SEQ ID NO: 249008 - DNA, 25 bp, Probe sequence
gtgaagtagaaaaagaagcgcgcga

SEQ ID NO: 249009 - DNA, 25 bp, Probe sequence
ggtgtaattgaatcacgttctttag

SEQ ID NO: 249010 - DNA, 25 bp, Probe sequence
ggtactaggtgaatatgctgctaca

SEQ ID NO: 249011 - DNA, 25 bp, Probe sequence
ggtattgcggttgattttaaagatg

SEQ ID NO: 249012 - DNA, 25 bp, Probe sequence
ggcaattaattcattatcttattct

SEQ ID NO: 249013 - DNA, 25 bp, Probe sequence
tgaaaatgatttggtactaggtgaa

SEQ ID NO: 249014 - DNA, 25 bp, Probe sequence
tgaatcacgttctttaggaatgaaa

SEQ ID NO: 249015 - DNA, 25 bp, Probe sequence
tcgtacaactatcttcccaatttta

SEQ ID NO: 249016 - DNA, 25 bp, Probe sequence
tagaaagtgctggtgtaattgaatc

SEQ ID NO: 249017 - DNA, 25 bp, Probe sequence
tagtcgtacaactatcttcccaatt

SEQ ID NO: 249018 - DNA, 25 bp, Probe sequence
tagagttggtattactagatctgta

SEQ ID NO: 249019 - DNA, 25 bp, Probe sequence
tatcgcgtcgaggtaaaattttagg

SEQ ID NO: 249020 - DNA, 25 bp, Probe sequence
ttgatatcgacaatgtattaacagt

SEQ ID NO: 249021 - DNA, 25 bp, Probe sequence
atacgttcaaacatcatgttttcaa

SEQ ID NO: 249022 - DNA, 25 bp, Probe sequence
atgtagcgattacttatgcacaagc

SEQ ID NO: 249023 - DNA, 25 bp, Probe sequence
aggtatacgttcaaacatcatgttt

SEQ ID NO: 249024 - DNA, 25 bp, Probe sequence
agtttcgaggtatacgttcaaacat

SEQ ID NO: 249025 - DNA, 25 bp, Probe sequence
agttattatcactattatggagatg

SEQ ID NO: 249026 - DNA, 25 bp, Probe sequence
acatcatgttttcaaaagcaaatgg

SEQ ID NO: 249027 - DNA, 25 bp, Probe sequence
aaacatcatgttttcaaaagcaaat

SEQ ID NO: 249028 - DNA, 25 bp, Probe sequence
aaaatacgacaacaacactatttgt

SEQ ID NO: 249029 - DNA, 25 bp, Probe sequence
aagcaaatggtgaagtaaagcgctt

SEQ ID NO: 249030 - DNA, 25 bp, Probe sequence
aaggaaaatacgacaacaacactat

SEQ ID NO: 249031 - DNA, 25 bp, Probe sequence
aatgtagcgattacttatgcacaag

SEQ ID NO: 249032 - DNA, 25 bp, Probe sequence
cacttatggaaaaagcaggcagtaa

SEQ ID NO: 249033 - DNA, 25 bp, Probe sequence
cgaggtatacgttcaaacatcatgt

SEQ ID NO: 249034 - DNA, 25 bp, Probe sequence
gccaacacaaaactatatttttaat

SEQ ID NO: 249035 - DNA, 25 bp, Probe sequence
gaaaaaccaaaatcaacaattagtg

SEQ ID NO: 249036 - DNA, 25 bp, Probe sequence
gaggtatacgttcaaacatcatgtt

SEQ ID NO: 249037 - DNA, 25 bp, Probe sequence
gtttcgaggtatacgttcaaacatc

SEQ ID NO: 249038 - DNA, 25 bp, Probe sequence
gtatacgttcaaacatcatgttttc

SEQ ID NO: 249039 - DNA, 25 bp, Probe sequence
gtagcgattacttatgcacaagcag

SEQ ID NO: 249040 - DNA, 25 bp, Probe sequence
gtaagccaacacaaaactatatttt

SEQ ID NO: 249041 - DNA, 25 bp, Probe sequence
ggtatacgttcaaacatcatgtttt

SEQ ID NO: 249042 - DNA, 25 bp, Probe sequence
tgtagcgattacttatgcacaagca

SEQ ID NO: 249043 - DNA, 25 bp, Probe sequence
tgaaaagtttcgaggtatacgttca

SEQ ID NO: 249044 - DNA, 25 bp, Probe sequence
tcgaggtatacgttcaaacatcatg

SEQ ID NO: 249045 - DNA, 25 bp, Probe sequence
tcttctagttattatcactattatg

SEQ ID NO: 249046 - DNA, 25 bp, Probe sequence
tcatgttttcaaaagcaaatggtga

SEQ ID NO: 249047 - DNA, 25 bp, Probe sequence
tcaacaattagtgaaaagtttcgag

SEQ ID NO: 249048 - DNA, 25 bp, Probe sequence
taagccaacacaaaactatattttt

SEQ ID NO: 249049 - DNA, 25 bp, Probe sequence
tacgttcaaacatcatgttttcaaa

SEQ ID NO: 249050 - DNA, 25 bp, Probe sequence
tagcgattacttatgcacaagcagg

SEQ ID NO: 249051 - DNA, 25 bp, Probe sequence
tattatcactattatggagatgaat

SEQ ID NO: 249052 - DNA, 25 bp, Probe sequence
tttcgaggtatacgttcaaacatca

SEQ ID NO: 249053 - DNA, 25 bp, Probe sequence
ttcgaggtatacgttcaaacatcat

SEQ ID NO: 249054 - DNA, 25 bp, Probe sequence
ttctagttattatcactattatgga

SEQ ID NO: 249055 - DNA, 25 bp, Probe sequence
atttttgtctaattttcaatcaaat

SEQ ID NO: 249056 - DNA, 25 bp, Probe sequence
atgaaatgactttgatgattatgtt

SEQ ID NO: 249057 - DNA, 25 bp, Probe sequence
atgactttgatgattatgttgaagt

SEQ ID NO: 249058 - DNA, 25 bp, Probe sequence
atgattatgttgaagtcatttcttt

SEQ ID NO: 249059 - DNA, 25 bp, Probe sequence
agtcatttctttatttttgtctaat

SEQ ID NO: 249060 - DNA, 25 bp, Probe sequence
actttgatgattatgttgaagtcat

SEQ ID NO: 249061 - DNA, 25 bp, Probe sequence
aaatgactttgatgattatgttgaa

SEQ ID NO: 249062 - DNA, 25 bp, Probe sequence
aatgactttgatgattatgttgaag

SEQ ID NO: 249063 - DNA, 25 bp, Probe sequence
caatgaaatgactttgatgattatg

SEQ ID NO: 249064 - DNA, 25 bp, Probe sequence
ctttgatgattatgttgaagtcatt

SEQ ID NO: 249065 - DNA, 25 bp, Probe sequence
gcggtagtcaatgaaatgactttga

SEQ ID NO: 249066 - DNA, 25 bp, Probe sequence
gaagtcatttctttatttttgtcta

SEQ ID NO: 249067 - DNA, 25 bp, Probe sequence
gaaatgactttgatgattatgttga

SEQ ID NO: 249068 - DNA, 25 bp, Probe sequence
gactttgatgattatgttgaagtca

SEQ ID NO: 249069 - DNA, 25 bp, Probe sequence
gatgattatgttgaagtcatttctt

SEQ ID NO: 249070 - DNA, 25 bp, Probe sequence
gtcaatgaaatgactttgatgatta

SEQ ID NO: 249071 - DNA, 25 bp, Probe sequence
gtcatttctttatttttgtctaatt

SEQ ID NO: 249072 - DNA, 25 bp, Probe sequence
ggtagtcaatgaaatgactttgatg

SEQ ID NO: 249073 - DNA, 25 bp, Probe sequence
ggcggtagtcaatgaaatgactttg

SEQ ID NO: 249074 - DNA, 25 bp, Probe sequence
tggcggtagtcaatgaaatgacttt

SEQ ID NO: 249075 - DNA, 25 bp, Probe sequence
tgattatgttgaagtcatttcttta

SEQ ID NO: 249076 - DNA, 25 bp, Probe sequence
tgatgattatgttgaagtcatttct

SEQ ID NO: 249077 - DNA, 25 bp, Probe sequence
tgaaatgactttgatgattatgttg

SEQ ID NO: 249078 - DNA, 25 bp, Probe sequence
tgaagtcatttctttatttttgtct

SEQ ID NO: 249079 - DNA, 25 bp, Probe sequence
tcatttctttatttttgtctaattt

SEQ ID NO: 249080 - DNA, 25 bp, Probe sequence
tatttttgtctaattttcaatcaaa

SEQ ID NO: 249081 - DNA, 25 bp, Probe sequence
tttgtctaattttcaatcaaattga

SEQ ID NO: 249082 - DNA, 25 bp, Probe sequence
tttatttttgtctaattttcaatca

SEQ ID NO: 249083 - DNA, 25 bp, Probe sequence
tttttgtctaattttcaatcaaatt

SEQ ID NO: 249084 - DNA, 25 bp, Probe sequence
ttttgtctaattttcaatcaaattg

SEQ ID NO: 249085 - DNA, 25 bp, Probe sequence
ttatttttgtctaattttcaatcaa

SEQ ID NO: 249086 - DNA, 25 bp, Probe sequence
ttggcggtagtcaatgaaatgactt

SEQ ID NO: 249087 - DNA, 25 bp, Probe sequence
ttgatgattatgttgaagtcatttc

SEQ ID NO: 249088 - DNA, 25 bp, Probe sequence
ttgtctaattttcaatcaaattgat

SEQ ID NO: 249089 - DNA, 25 bp, Probe sequence
atatatcttcactgagagaaatggt

SEQ ID NO: 249090 - DNA, 25 bp, Probe sequence
atgcctcaagcattattcgtagttg

SEQ ID NO: 249091 - DNA, 25 bp, Probe sequence
atgcaattgctgaagctcgtaaatt

SEQ ID NO: 249092 - DNA, 25 bp, Probe sequence
agtttcagaagatggtggacaagtc

SEQ ID NO: 249093 - DNA, 25 bp, Probe sequence
acgtgctggtcaattctacattaac

SEQ ID NO: 249094 - DNA, 25 bp, Probe sequence
cacttcggtcaccaaacacgtcgtt

SEQ ID NO: 249095 - DNA, 25 bp, Probe sequence
aactgtgatcctgacgaaattgact

SEQ ID NO: 249096 - DNA, 25 bp, Probe sequence
aacgacgatgctatccgtgcggtta

SEQ ID NO: 249097 - DNA, 25 bp, Probe sequence
aacgaatcaaacgtatttctgaaat

SEQ ID NO: 249098 - DNA, 25 bp, Probe sequence
cgaaattgactacgttatcccagca

SEQ ID NO: 249099 - DNA, 25 bp, Probe sequence
tcaccaaacacgtcgttggaaccca

SEQ ID NO: 249100 - DNA, 25 bp, Probe sequence
gaccgtttaatcaaattcttaggcg

SEQ ID NO: 249101 - DNA, 25 bp, Probe sequence
gctcgtaaattaaatattcctatcg

SEQ ID NO: 249102 - DNA, 25 bp, Probe sequence
gctgcagaacaaaacatcgatttag

SEQ ID NO: 249103 - DNA, 25 bp, Probe sequence
gcattattcgtagttgacccacgta

SEQ ID NO: 249104 - DNA, 25 bp, Probe sequence
gcagatgcaatcttagaaggtcaac

SEQ ID NO: 249105 - DNA, 25 bp, Probe sequence
gcaaacgacgatgctatccgtgcgg

SEQ ID NO: 249106 - DNA, 25 bp, Probe sequence
gaaggtcaacaaggcgtttctaatg

SEQ ID NO: 249107 - DNA, 25 bp, Probe sequence
gacccacgtaaagagcgtaatgcaa

SEQ ID NO: 249108 - DNA, 25 bp, Probe sequence
gaagcagaacgtgctggtcaattct

SEQ ID NO: 249109 - DNA, 25 bp, Probe sequence
gactacgttatcccagcaaacgacg

SEQ ID NO: 249110 - DNA, 25 bp, Probe sequence
gatggtttattcgaagtattaccta

SEQ ID NO: 249111 - DNA, 25 bp, Probe sequence
gaggcatacaacttcttgaaacaag

SEQ ID NO: 249112 - DNA, 25 bp, Probe sequence
gatgctatccgtgcggttaaattat

SEQ ID NO: 249113 - DNA, 25 bp, Probe sequence
gatatgaaatcaatgcctcaagcat

SEQ ID NO: 249114 - DNA, 25 bp, Probe sequence
gttgacactaactgtgatcctgacg

SEQ ID NO: 249115 - DNA, 25 bp, Probe sequence
gtagacgaggcatacaacttcttga

SEQ ID NO: 249116 - DNA, 25 bp, Probe sequence
gtggacaagtcttattcgtaggaac

SEQ ID NO: 249117 - DNA, 25 bp, Probe sequence
ggtgttcacttcggtcaccaaacac

SEQ ID NO: 249118 - DNA, 25 bp, Probe sequence
ggtcaattctacattaaccaaagat

SEQ ID NO: 249119 - DNA, 25 bp, Probe sequence
ggtatttatatcatcgacttacaaa

SEQ ID NO: 249120 - DNA, 25 bp, Probe sequence
tcctatcgtaggtatcgttgacact

SEQ ID NO: 249121 - DNA, 25 bp, Probe sequence
tagaagcgggtgttcacttcggtca

SEQ ID NO: 249122 - DNA, 25 bp, Probe sequence
ttcttaggcggaattcgtgatatga

SEQ ID NO: 249123 - DNA, 25 bp, Probe sequence
attacaaatattcaattagagtatt

SEQ ID NO: 249124 - DNA, 25 bp, Probe sequence
atcttgcctataataatgctaaaat

SEQ ID NO: 249125 - DNA, 25 bp, Probe sequence
atcgaggcaaattacaaatattcaa

SEQ ID NO: 249126 - DNA, 25 bp, Probe sequence
agaaaatcgaggcaaattacaaata

SEQ ID NO: 249127 - DNA, 25 bp, Probe sequence
atgggtgataagatattaatgctta

SEQ ID NO: 249128 - DNA, 25 bp, Probe sequence
aggcaaattacaaatattcaattag

SEQ ID NO: 249129 - DNA, 25 bp, Probe sequence
aaattacaaatattcaattagagta

SEQ ID NO: 249130 - DNA, 25 bp, Probe sequence
aaatcgaggcaaattacaaatattc

SEQ ID NO: 249131 - DNA, 25 bp, Probe sequence
aaaatcgaggcaaattacaaatatt

SEQ ID NO: 249132 - DNA, 25 bp, Probe sequence
aagaaaatcgaggcaaattacaaat

SEQ ID NO: 249133 - DNA, 25 bp, Probe sequence
aatcgaggcaaattacaaatattca

SEQ ID NO: 249134 - DNA, 25 bp, Probe sequence
aatcttgcctataataatgctaaaa

SEQ ID NO: 249135 - DNA, 25 bp, Probe sequence
aattacaaatattcaattagagtat

SEQ ID NO: 249136 - DNA, 25 bp, Probe sequence
caatcttgcctataataatgctaaa

SEQ ID NO: 249137 - DNA, 25 bp, Probe sequence
caaattacaaatattcaattagagt

SEQ ID NO: 249138 - DNA, 25 bp, Probe sequence
cttgcctataataatgctaaaatca

SEQ ID NO: 249139 - DNA, 25 bp, Probe sequence
cgaggcaaattacaaatattcaatt

SEQ ID NO: 249140 - DNA, 25 bp, Probe sequence
gcaaattacaaatattcaattagag

SEQ ID NO: 249141 - DNA, 25 bp, Probe sequence
gcaatcttgcctataataatgctaa

SEQ ID NO: 249142 - DNA, 25 bp, Probe sequence
gaaaatcgaggcaaattacaaatat

SEQ ID NO: 249143 - DNA, 25 bp, Probe sequence
gaggcaaattacaaatattcaatta

SEQ ID NO: 249144 - DNA, 25 bp, Probe sequence
ggcaaattacaaatattcaattaga

SEQ ID NO: 249145 - DNA, 25 bp, Probe sequence
tcgaggcaaattacaaatattcaat

SEQ ID NO: 249146 - DNA, 25 bp, Probe sequence
tcttgcctataataatgctaaaatc

SEQ ID NO: 249147 - DNA, 25 bp, Probe sequence
tattaatgcttatcaccttttttaa

SEQ ID NO: 249148 - DNA, 25 bp, Probe sequence
ggaaaacttgttgacttcgtacgct

SEQ ID NO: 249149 - DNA, 25 bp, Probe sequence
atgtttcttctgaacaagttagcga

SEQ ID NO: 249150 - DNA, 25 bp, Probe sequence
agcgctaactgaaactgatggtgac

SEQ ID NO: 249151 - DNA, 25 bp, Probe sequence
acttgttgacttcgtacgctatgaa

SEQ ID NO: 249152 - DNA, 25 bp, Probe sequence
aaagcagaccgtattgcggctgaag

SEQ ID NO: 249153 - DNA, 25 bp, Probe sequence
aactgataacgatgctttcggcgct

SEQ ID NO: 249154 - DNA, 25 bp, Probe sequence
aactggcgcgggtatgatggattgt

SEQ ID NO: 249155 - DNA, 25 bp, Probe sequence
aacgcgaagaaaactttgcggatga

SEQ ID NO: 249156 - DNA, 25 bp, Probe sequence
gtagaaactaaaggtaacgacgcag

SEQ ID NO: 249157 - DNA, 25 bp, Probe sequence
aagaagcaatttcaacaatcggtga

SEQ ID NO: 249158 - DNA, 25 bp, Probe sequence
caagacttcgttaaaaaccctgatg

SEQ ID NO: 249159 - DNA, 25 bp, Probe sequence
cagactttgttgctcgtaacgaagg

SEQ ID NO: 249160 - DNA, 25 bp, Probe sequence
cacatgggtggacgcattggtgtat

SEQ ID NO: 249161 - DNA, 25 bp, Probe sequence
cgacgcagttatcgttgaaatcaac

SEQ ID NO: 249162 - DNA, 25 bp, Probe sequence
gcggctgaaggtttagtacatgtag

SEQ ID NO: 249163 - DNA, 25 bp, Probe sequence
gctatgaagtaggcgaaggtatgga

SEQ ID NO: 249164 - DNA, 25 bp, Probe sequence
gcatatcgctgcaatcaaccctaaa

SEQ ID NO: 249165 - DNA, 25 bp, Probe sequence
gaaggtaaaccagaaaacatcgttg

SEQ ID NO: 249166 - DNA, 25 bp, Probe sequence
gaaacagactttgttgctcgtaacg

SEQ ID NO: 249167 - DNA, 25 bp, Probe sequence
gacgcattggtgtattaacagttgt

SEQ ID NO: 249168 - DNA, 25 bp, Probe sequence
gagacgttgctatgcatatcgctgc

SEQ ID NO: 249169 - DNA, 25 bp, Probe sequence
gatggattgtaaaaaagcgctaact

SEQ ID NO: 249170 - DNA, 25 bp, Probe sequence
gatggtgacatcgataaagcgattg

SEQ ID NO: 249171 - DNA, 25 bp, Probe sequence
gatgtaacagttgaagctttcttaa

SEQ ID NO: 249172 - DNA, 25 bp, Probe sequence
gttgaaatcaactctgaaacagact

SEQ ID NO: 249173 - DNA, 25 bp, Probe sequence
ggcaactatttcagcaaaacttgtt

SEQ ID NO: 249174 - DNA, 25 bp, Probe sequence
ggcgcttacttacacatgggtggac

SEQ ID NO: 249175 - DNA, 25 bp, Probe sequence
tgtgctgtagatcaagacttcgtta

SEQ ID NO: 249176 - DNA, 25 bp, Probe sequence
tgaaggttcaactgacgaagaagca

SEQ ID NO: 249177 - DNA, 25 bp, Probe sequence
tcgtcgttttgctatcagaactaaa

SEQ ID NO: 249178 - DNA, 25 bp, Probe sequence
tcaaccctaaatatgtttcttctga

SEQ ID NO: 249179 - DNA, 25 bp, Probe sequence
taagtgttcgtcgttttgctatcag

SEQ ID NO: 249180 - DNA, 25 bp, Probe sequence
taacgatgctttcggcgcttactta

SEQ ID NO: 249181 - DNA, 25 bp, Probe sequence
tagcgaagaagaaatcaaccacgaa

SEQ ID NO: 249182 - DNA, 25 bp, Probe sequence
atgccttagcattacaagatagttt

SEQ ID NO: 249183 - DNA, 25 bp, Probe sequence
aggtatggaccgtggaactgctgat

SEQ ID NO: 249184 - DNA, 25 bp, Probe sequence
agaagttgaagcagatgttatttta

SEQ ID NO: 249185 - DNA, 25 bp, Probe sequence
accttatattcgtcgtcgtgcaatt

SEQ ID NO: 249186 - DNA, 25 bp, Probe sequence
acattccgttaactgttttctctat

SEQ ID NO: 249187 - DNA, 25 bp, Probe sequence
acagcatcctcattctgtatggata

SEQ ID NO: 249188 - DNA, 25 bp, Probe sequence
aaacgtgctgttatgggtgaaaaga

SEQ ID NO: 249189 - DNA, 25 bp, Probe sequence
aagtggtgaagcgttagctggagaa

SEQ ID NO: 249190 - DNA, 25 bp, Probe sequence
cagatactacagcggcattacgtgc

SEQ ID NO: 249191 - DNA, 25 bp, Probe sequence
cttctctacagatactacagcggca

SEQ ID NO: 249192 - DNA, 25 bp, Probe sequence
cgttaactgttttctctattatgga

SEQ ID NO: 249193 - DNA, 25 bp, Probe sequence
gcggcattacgtgctgcagaagttg

SEQ ID NO: 249194 - DNA, 25 bp, Probe sequence
gctgcaggtattggaaacccatact

SEQ ID NO: 249195 - DNA, 25 bp, Probe sequence
gcaactgtaatgaatgccttagcat

SEQ ID NO: 249196 - DNA, 25 bp, Probe sequence
gaagcaagtggctgaaccttatatt

SEQ ID NO: 249197 - DNA, 25 bp, Probe sequence
gaaacccatacttctctacagatac

SEQ ID NO: 249198 - DNA, 25 bp, Probe sequence
gaccgtggaactgctgattacatgg

SEQ ID NO: 249199 - DNA, 25 bp, Probe sequence
gatggtgtatattctgcagatccta

SEQ ID NO: 249200 - DNA, 25 bp, Probe sequence
gatacacgagtattaacatctattg

SEQ ID NO: 249201 - DNA, 25 bp, Probe sequence
gattacatgggtatgcttgcaactg

SEQ ID NO: 249202 - DNA, 25 bp, Probe sequence
gttgctgagcaagtggctgaagttg

SEQ ID NO: 249203 - DNA, 25 bp, Probe sequence
gtagttatttttgctgcaggtattg

SEQ ID NO: 249204 - DNA, 25 bp, Probe sequence
gtaatcgttggtggcggaaacattt

SEQ ID NO: 249205 - DNA, 25 bp, Probe sequence
gtcgtcgtgcaattagacacttaga

SEQ ID NO: 249206 - DNA, 25 bp, Probe sequence
ggtggcggaaacatttggagaggta

SEQ ID NO: 249207 - DNA, 25 bp, Probe sequence
ggtagtgacttaggtatggaccgtg

SEQ ID NO: 249208 - DNA, 25 bp, Probe sequence
ggtatgcttgcaactgtaatgaatg

SEQ ID NO: 249209 - DNA, 25 bp, Probe sequence
ggattcaacagcatcctcattctgt

SEQ ID NO: 249210 - DNA, 25 bp, Probe sequence
ggagaggtaaaacaggtagtgactt

SEQ ID NO: 249211 - DNA, 25 bp, Probe sequence
ggctgaaccttatattcgtcgtcgt

SEQ ID NO: 249212 - DNA, 25 bp, Probe sequence
ggctgaagttgctaaaatggactgt

SEQ ID NO: 249213 - DNA, 25 bp, Probe sequence
tgaaatcgcagtaatcgttggtggc

SEQ ID NO: 249214 - DNA, 25 bp, Probe sequence
tattctgcagatcctaaagtaaaca

SEQ ID NO: 249215 - DNA, 25 bp, Probe sequence
ttaacgcatattcaaatgcttcaag

SEQ ID NO: 249216 - DNA, 25 bp, Probe sequence
attcgtcgtgatatgaatgatcagt

SEQ ID NO: 249217 - DNA, 25 bp, Probe sequence
atttctccatacgacaaaacttctg

SEQ ID NO: 249218 - DNA, 25 bp, Probe sequence
atacgacaaaacttctgtagctgac

SEQ ID NO: 249219 - DNA, 25 bp, Probe sequence
atcagtgcaggaagagctaattcaa

SEQ ID NO: 249220 - DNA, 25 bp, Probe sequence
agaaaagagcgcgttaaagatgtta

SEQ ID NO: 249221 - DNA, 25 bp, Probe sequence
acctgtacaacaattagcaagcatc

SEQ ID NO: 249222 - DNA, 25 bp, Probe sequence
acttctgtagctgacatcgaaaaag

SEQ ID NO: 249223 - DNA, 25 bp, Probe sequence
aaatcaatcgaaagcttatcacgtg

SEQ ID NO: 249224 - DNA, 25 bp, Probe sequence
aaatggcgacattactgaagatgag

SEQ ID NO: 249225 - DNA, 25 bp, Probe sequence
aaaacttctgtagctgacatcgaaa

SEQ ID NO: 249226 - DNA, 25 bp, Probe sequence
aacagttgattactatggtgcacca

SEQ ID NO: 249227 - DNA, 25 bp, Probe sequence
aacccaacaagtgatggtgaagtga

SEQ ID NO: 249228 - DNA, 25 bp, Probe sequence
aatgttccagaagcacgtttacttg

SEQ ID NO: 249229 - DNA, 25 bp, Probe sequence
aatcgaaagcttatcacgtgaatta

SEQ ID NO: 249230 - DNA, 25 bp, Probe sequence
aattagcaagcatcaatgttccaga

SEQ ID NO: 249231 - DNA, 25 bp, Probe sequence
caccaacacctgtacaacaattagc

SEQ ID NO: 249232 - DNA, 25 bp, Probe sequence
gcgacattactgaagatgagttgag

SEQ ID NO: 249233 - DNA, 25 bp, Probe sequence
gcatcaatgttccagaagcacgttt

SEQ ID NO: 249234 - DNA, 25 bp, Probe sequence
gcacgtttacttgttatttctccat

SEQ ID NO: 249235 - DNA, 25 bp, Probe sequence
gcaagcatcaatgttccagaagcac

SEQ ID NO: 249236 - DNA, 25 bp, Probe sequence
gaagaagctaaagtatctgttcgaa

SEQ ID NO: 249237 - DNA, 25 bp, Probe sequence
gaagcacgtttacttgttatttctc

SEQ ID NO: 249238 - DNA, 25 bp, Probe sequence
gaaattgatcaaatgattgctgata

SEQ ID NO: 249239 - DNA, 25 bp, Probe sequence
gacaaaacttctgtagctgacatcg

SEQ ID NO: 249240 - DNA, 25 bp, Probe sequence
gattactatggtgcaccaacacctg

SEQ ID NO: 249241 - DNA, 25 bp, Probe sequence
gttatttctccatacgacaaaactt

SEQ ID NO: 249242 - DNA, 25 bp, Probe sequence
gttccagaagcacgtttacttgtta

SEQ ID NO: 249243 - DNA, 25 bp, Probe sequence
gttcagaaagcaacagacaattcaa

SEQ ID NO: 249244 - DNA, 25 bp, Probe sequence
gtttacttgttatttctccatacga

SEQ ID NO: 249245 - DNA, 25 bp, Probe sequence
gtatctgttcgaaatattcgtcgtg

SEQ ID NO: 249246 - DNA, 25 bp, Probe sequence
gtgcaccaacacctgtacaacaatt

SEQ ID NO: 249247 - DNA, 25 bp, Probe sequence
gtgatggtgaagtgatacgtattgc

SEQ ID NO: 249248 - DNA, 25 bp, Probe sequence
tatggtgcaccaacacctgtacaac

SEQ ID NO: 249249 - DNA, 25 bp, Probe sequence
ttacttgttatttctccatacgaca

SEQ ID NO: 249250 - DNA, 25 bp, Probe sequence
attggtcaagacctgaaagtgaagt

SEQ ID NO: 249251 - DNA, 25 bp, Probe sequence
atttatcagtcacgtcaaagacgct

SEQ ID NO: 249252 - DNA, 25 bp, Probe sequence
atttgcctgtcaatttcttaaagac

SEQ ID NO: 249253 - DNA, 25 bp, Probe sequence
atatcgctattattatggatggtaa

SEQ ID NO: 249254 - DNA, 25 bp, Probe sequence
atgacaaaagactatcctgatccag

SEQ ID NO: 249255 - DNA, 25 bp, Probe sequence
atggatggtaatgggcgatgggcta

SEQ ID NO: 249256 - DNA, 25 bp, Probe sequence
atggcctgactttgacgaagatgaa

SEQ ID NO: 249257 - DNA, 25 bp, Probe sequence
aaaatatgtttgacgagcttcatca

SEQ ID NO: 249258 - DNA, 25 bp, Probe sequence
aaaattatggcctgactttgacgaa

SEQ ID NO: 249259 - DNA, 25 bp, Probe sequence
aagaagcgaaaaatgcctagaatta

SEQ ID NO: 249260 - DNA, 25 bp, Probe sequence
aagactatcctgatccagagttgtt

SEQ ID NO: 249261 - DNA, 25 bp, Probe sequence
aatgggcgatgggctaagaagcgaa

SEQ ID NO: 249262 - DNA, 25 bp, Probe sequence
gccttttccactgaaaattggtcaa

SEQ ID NO: 249263 - DNA, 25 bp, Probe sequence
gctttggcggattgagtgaggagta

SEQ ID NO: 249264 - DNA, 25 bp, Probe sequence
gcagaacttgttcatagtattaaaa

SEQ ID NO: 249265 - DNA, 25 bp, Probe sequence
gcaattaattatggtggcagagcag

SEQ ID NO: 249266 - DNA, 25 bp, Probe sequence
gaataagtaatttcttgatttggca

SEQ ID NO: 249267 - DNA, 25 bp, Probe sequence
gacagctaataataccggcttaaaa

SEQ ID NO: 249268 - DNA, 25 bp, Probe sequence
gacgctttggcggattgagtgagga

SEQ ID NO: 249269 - DNA, 25 bp, Probe sequence
gagttgttaattcgtacttcaggag

SEQ ID NO: 249270 - DNA, 25 bp, Probe sequence
gttgaaacaattggatttactgata

SEQ ID NO: 249271 - DNA, 25 bp, Probe sequence
gttaattcgtacttcaggagaacaa

SEQ ID NO: 249272 - DNA, 25 bp, Probe sequence
gtcacgtcaaagacgctttggcgga

SEQ ID NO: 249273 - DNA, 25 bp, Probe sequence
ggatttactgataagttgccaaaat

SEQ ID NO: 249274 - DNA, 25 bp, Probe sequence
tggtggcagagcagaacttgttcat

SEQ ID NO: 249275 - DNA, 25 bp, Probe sequence
tgatttggcaagtttcgtatagtga

SEQ ID NO: 249276 - DNA, 25 bp, Probe sequence
tcctgatccagagttgttaattcgt

SEQ ID NO: 249277 - DNA, 25 bp, Probe sequence
tcgtatagtgaatttatctttaatc

SEQ ID NO: 249278 - DNA, 25 bp, Probe sequence
taccggcttaaaattaatatttgca

SEQ ID NO: 249279 - DNA, 25 bp, Probe sequence
tagctagtgatattggtgttaagta

SEQ ID NO: 249280 - DNA, 25 bp, Probe sequence
tatgaatttgcctgtcaatttctta

SEQ ID NO: 249281 - DNA, 25 bp, Probe sequence
tagactcgtctaatatacctgaaca

SEQ ID NO: 249282 - DNA, 25 bp, Probe sequence
tatacctgaacatatcgctattatt

SEQ ID NO: 249283 - DNA, 25 bp, Probe sequence
ttgacgagcttcatcaacaaggttt

SEQ ID NO: 249284 - DNA, 25 bp, Probe sequence
atactacctggacacggtggtattt

SEQ ID NO: 249285 - DNA, 25 bp, Probe sequence
attgccttaatcgtattcttgccta

SEQ ID NO: 249286 - DNA, 25 bp, Probe sequence
attttgcttaatgtctgtggcttat

SEQ ID NO: 249287 - DNA, 25 bp, Probe sequence
atttcggcgttaaagactcaggtcg

SEQ ID NO: 249288 - DNA, 25 bp, Probe sequence
atgaaagttagaacgctgacagcta

SEQ ID NO: 249289 - DNA, 25 bp, Probe sequence
aggattcataggtggcttgttctgt

SEQ ID NO: 249290 - DNA, 25 bp, Probe sequence
agttatactgtcttatctaaaaaca

SEQ ID NO: 249291 - DNA, 25 bp, Probe sequence
agctttggccagtaataagtccgaa

SEQ ID NO: 249292 - DNA, 25 bp, Probe sequence
aacgctgacagctattattgcctta

SEQ ID NO: 249293 - DNA, 25 bp, Probe sequence
aagtttaattgcaatgagctttatt

SEQ ID NO: 249294 - DNA, 25 bp, Probe sequence
aaggcggccttgtgttaatgatatt

SEQ ID NO: 249295 - DNA, 25 bp, Probe sequence
ctatcttgttaaaaggcggccttgt

SEQ ID NO: 249296 - DNA, 25 bp, Probe sequence
cgtattcttgcctatcttgttaaaa

SEQ ID NO: 249297 - DNA, 25 bp, Probe sequence
gcagggccatgggtacaagtaattc

SEQ ID NO: 249298 - DNA, 25 bp, Probe sequence
gatcagaaggattacattacatatt

SEQ ID NO: 249299 - DNA, 25 bp, Probe sequence
gatttagttttatggatgctgcatt

SEQ ID NO: 249300 - DNA, 25 bp, Probe sequence
gattaaatttgtttcagttcctggt

SEQ ID NO: 249301 - DNA, 25 bp, Probe sequence
gtatggatattacttggagtgacat

SEQ ID NO: 249302 - DNA, 25 bp, Probe sequence
gtctgtggcttatgtaggcattggt

SEQ ID NO: 249303 - DNA, 25 bp, Probe sequence
gtcttatcatcattatgttgccaca

SEQ ID NO: 249304 - DNA, 25 bp, Probe sequence
ggtggtattttagaccgatttgaca

SEQ ID NO: 249305 - DNA, 25 bp, Probe sequence
ggtggcttgttctgtagtttgatag

SEQ ID NO: 249306 - DNA, 25 bp, Probe sequence
ggatttaagcgtcatttcggcgtta

SEQ ID NO: 249307 - DNA, 25 bp, Probe sequence
ggatgctgcattttgcttaatgtct

SEQ ID NO: 249308 - DNA, 25 bp, Probe sequence
ggagtgacattgattttaagtttat

SEQ ID NO: 249309 - DNA, 25 bp, Probe sequence
ggaatcaggatttaagcgtcatttc

SEQ ID NO: 249310 - DNA, 25 bp, Probe sequence
ggcttacagatacaggggcttactt

SEQ ID NO: 249311 - DNA, 25 bp, Probe sequence
ggcattggttttatgttcttttatg

SEQ ID NO: 249312 - DNA, 25 bp, Probe sequence
tgttgccacaacatgcagggccatg

SEQ ID NO: 249313 - DNA, 25 bp, Probe sequence
taatcgtattcttgcctatcttgtt

SEQ ID NO: 249314 - DNA, 25 bp, Probe sequence
tagtgcagttggtcttatcatcatt

SEQ ID NO: 249315 - DNA, 25 bp, Probe sequence
tatgcctttttaattgtttggctta

SEQ ID NO: 249316 - DNA, 25 bp, Probe sequence
ttatgtttgtgttaccattattaaa

SEQ ID NO: 249317 - DNA, 25 bp, Probe sequence
ttcagttcctggtttaattagtgca

SEQ ID NO: 249318 - DNA, 25 bp, Probe sequence
attcctgcactagacggtggtcgta

SEQ ID NO: 249319 - DNA, 25 bp, Probe sequence
attggtgccattttcatggtcgtta

SEQ ID NO: 249320 - DNA, 25 bp, Probe sequence
attcatagaaggtatcactgcttat

SEQ ID NO: 249321 - DNA, 25 bp, Probe sequence
atttaattcctattcctgcactaga

SEQ ID NO: 249322 - DNA, 25 bp, Probe sequence
ataagtatccagctcaacaagcagg

SEQ ID NO: 249323 - DNA, 25 bp, Probe sequence
atgtgtccagaatttgcgatcggta

SEQ ID NO: 249324 - DNA, 25 bp, Probe sequence
agatgatcatcataagtttcaacaa

SEQ ID NO: 249325 - DNA, 25 bp, Probe sequence
agccatggccgaaatttttaacatt

SEQ ID NO: 249326 - DNA, 25 bp, Probe sequence
aaagcgggtatcattagcttaattg

SEQ ID NO: 249327 - DNA, 25 bp, Probe sequence
aatggtccggttggtatttatcata

SEQ ID NO: 249328 - DNA, 25 bp, Probe sequence
ctcggattccaaccagcgagtgaac

SEQ ID NO: 249329 - DNA, 25 bp, Probe sequence
cgtatggcaggagatggcttagaag

SEQ ID NO: 249330 - DNA, 25 bp, Probe sequence
gctccgagagacagacaatttgcac

SEQ ID NO: 249331 - DNA, 25 bp, Probe sequence
gcttagaagagccaccagtcgagcc

SEQ ID NO: 249332 - DNA, 25 bp, Probe sequence
gaaacactttacactattaggttat

SEQ ID NO: 249333 - DNA, 25 bp, Probe sequence
gaaagtctttctttgttgaaaatgg

SEQ ID NO: 249334 - DNA, 25 bp, Probe sequence
gacgactgttaaatttgaacgtgat

SEQ ID NO: 249335 - DNA, 25 bp, Probe sequence
gacgaagtatgttctcggattccaa

SEQ ID NO: 249336 - DNA, 25 bp, Probe sequence
gatgatgttgataaggcgttagata

SEQ ID NO: 249337 - DNA, 25 bp, Probe sequence
gttggctagtatatttacgggcgga

SEQ ID NO: 249338 - DNA, 25 bp, Probe sequence
gatatgttaaatggtccggttggta

SEQ ID NO: 249339 - DNA, 25 bp, Probe sequence
gttggtggatatgttcgtatggcag

SEQ ID NO: 249340 - DNA, 25 bp, Probe sequence
gtatttatcataacgtcgactcagt

SEQ ID NO: 249341 - DNA, 25 bp, Probe sequence
gtcgactcagttgttaaagcgggta

SEQ ID NO: 249342 - DNA, 25 bp, Probe sequence
gtcgcagataagtatccagctcaac

SEQ ID NO: 249343 - DNA, 25 bp, Probe sequence
ggtagcttagttcaaattgctccga

SEQ ID NO: 249344 - DNA, 25 bp, Probe sequence
ggaatgatattcgacgatatttctt

SEQ ID NO: 249345 - DNA, 25 bp, Probe sequence
tctactgtagaacaagtcgcagata

SEQ ID NO: 249346 - DNA, 25 bp, Probe sequence
taacattatttgcgggaccgttatt

SEQ ID NO: 249347 - DNA, 25 bp, Probe sequence
tagacggtggtcgtattttatttgt

SEQ ID NO: 249348 - DNA, 25 bp, Probe sequence
tatgttctcggattccaaccagcga

SEQ ID NO: 249349 - DNA, 25 bp, Probe sequence
tatttattggtcttgcatattatca

SEQ ID NO: 249350 - DNA, 25 bp, Probe sequence
tttgcacataaaaagccatggccga

SEQ ID NO: 249351 - DNA, 25 bp, Probe sequence
ttaggttattgcctgttggtggata

SEQ ID NO: 249352 - DNA, 25 bp, Probe sequence
attgttgttggtaaacgtgcatcgg

SEQ ID NO: 249353 - DNA, 25 bp, Probe sequence
attcattccatgctgacgaggcatc

SEQ ID NO: 249354 - DNA, 25 bp, Probe sequence
atttaccgctagcaacacgtgtgtt

SEQ ID NO: 249355 - DNA, 25 bp, Probe sequence
atattactgcaattgtgcgacaaga

SEQ ID NO: 249356 - DNA, 25 bp, Probe sequence
atggcccagaattaatgcgtttaca

SEQ ID NO: 249357 - DNA, 25 bp, Probe sequence
agtcgtttacgaaccaaatcataag

SEQ ID NO: 249358 - DNA, 25 bp, Probe sequence
aaatcttatttcggcacagataata

SEQ ID NO: 249359 - DNA, 25 bp, Probe sequence
aacaattaccgatgacattattcca

SEQ ID NO: 249360 - DNA, 25 bp, Probe sequence
aacgtgcatcggaaggtattgtaga

SEQ ID NO: 249361 - DNA, 25 bp, Probe sequence
aagtttttataccaacgatgcgtga

SEQ ID NO: 249362 - DNA, 25 bp, Probe sequence
aatatattatggttttagtgcgtgg

SEQ ID NO: 249363 - DNA, 25 bp, Probe sequence
cggtgaggatacaatcgtttacagt

SEQ ID NO: 249364 - DNA, 25 bp, Probe sequence
gaagcaatccaaagtttttatacca

SEQ ID NO: 249365 - DNA, 25 bp, Probe sequence
gaagcagaagcacaaagtcatcgtt

SEQ ID NO: 249366 - DNA, 25 bp, Probe sequence
gacgttggggtgcatatggcccaga

SEQ ID NO: 249367 - DNA, 25 bp, Probe sequence
gaacgtttaacaggtgatagcgaag

SEQ ID NO: 249368 - DNA, 25 bp, Probe sequence
gaaatggaacgtatcgattctgttg

SEQ ID NO: 249369 - DNA, 25 bp, Probe sequence
gaaattttaatgccagcgttacaac

SEQ ID NO: 249370 - DNA, 25 bp, Probe sequence
gacaatttgcattaggtccaacaca

SEQ ID NO: 249371 - DNA, 25 bp, Probe sequence
gaggcatcattagatcaaacgtatc

SEQ ID NO: 249372 - DNA, 25 bp, Probe sequence
gatgacattattccaaattcaatct

SEQ ID NO: 249373 - DNA, 25 bp, Probe sequence
gatgccgatttaattggtttaccac

SEQ ID NO: 249374 - DNA, 25 bp, Probe sequence
gatatgtatcaagcgtatagccgta

SEQ ID NO: 249375 - DNA, 25 bp, Probe sequence
gtatagccgtatttttgagagagtt

SEQ ID NO: 249376 - DNA, 25 bp, Probe sequence
gtaggtagagacttcaacgttgatg

SEQ ID NO: 249377 - DNA, 25 bp, Probe sequence
gggaagaatcaggacgttggggtgc

SEQ ID NO: 249378 - DNA, 25 bp, Probe sequence
gtgggatttatagttatttaccgct

SEQ ID NO: 249379 - DNA, 25 bp, Probe sequence
ggtttaccactgcgaattgttgttg

SEQ ID NO: 249380 - DNA, 25 bp, Probe sequence
ggcagacttcttaggtagaccagta

SEQ ID NO: 249381 - DNA, 25 bp, Probe sequence
ggcattaagtgctatcggtgaggat

SEQ ID NO: 249382 - DNA, 25 bp, Probe sequence
ggcggtagccatacacatgaattta

SEQ ID NO: 249383 - DNA, 25 bp, Probe sequence
tgtacgatgatcgtcaggaacgtgc

SEQ ID NO: 249384 - DNA, 25 bp, Probe sequence
tatggcgatttccgttttattttag

SEQ ID NO: 249385 - DNA, 25 bp, Probe sequence
ttgtttggcctaaatcagttactcc

SEQ ID NO: 249386 - DNA, 25 bp, Probe sequence
atttccatcaaatgaagttccacac

SEQ ID NO: 249387 - DNA, 25 bp, Probe sequence
atcacatcacttacatcctcgatat

SEQ ID NO: 249388 - DNA, 25 bp, Probe sequence
atctaaagttttattatggtcagga

SEQ ID NO: 249389 - DNA, 25 bp, Probe sequence
atcggttcagatgcgcataacacag

SEQ ID NO: 249390 - DNA, 25 bp, Probe sequence
atcctcgatataccacacctataga

SEQ ID NO: 249391 - DNA, 25 bp, Probe sequence
acaagcgacaacacaaggtgttaca

SEQ ID NO: 249392 - DNA, 25 bp, Probe sequence
acaaaggtgctttaagtcaagtgac

SEQ ID NO: 249393 - DNA, 25 bp, Probe sequence
acaatctgacacatttcatcggttc

SEQ ID NO: 249394 - DNA, 25 bp, Probe sequence
aaatccttaatgatattgatcgaaa

SEQ ID NO: 249395 - DNA, 25 bp, Probe sequence
aaaccatattgaaagcttagaggaa

SEQ ID NO: 249396 - DNA, 25 bp, Probe sequence
aaaaccttgacatactatacgattt

SEQ ID NO: 249397 - DNA, 25 bp, Probe sequence
aagaattaccgatcaaatccttaat

SEQ ID NO: 249398 - DNA, 25 bp, Probe sequence
aatgcgaagttagttgttgatgata

SEQ ID NO: 249399 - DNA, 25 bp, Probe sequence
aatatcgatgacggtccgacaaatg

SEQ ID NO: 249400 - DNA, 25 bp, Probe sequence
cacttacatcctcgatataccacac

SEQ ID NO: 249401 - DNA, 25 bp, Probe sequence
gcgcataacacagaaatcagaccgt

SEQ ID NO: 249402 - DNA, 25 bp, Probe sequence
gcgtcattagcgggtatttccggta

SEQ ID NO: 249403 - DNA, 25 bp, Probe sequence
gaatgccacaacaagattataaaca

SEQ ID NO: 249404 - DNA, 25 bp, Probe sequence
gaagttccacactatactgatcaat

SEQ ID NO: 249405 - DNA, 25 bp, Probe sequence
gacaacggcgtcattagcgggtatt

SEQ ID NO: 249406 - DNA, 25 bp, Probe sequence
gaaatcagaccgttcttaatgaaag

SEQ ID NO: 249407 - DNA, 25 bp, Probe sequence
gacacatttcatcggttcagatgcg

SEQ ID NO: 249408 - DNA, 25 bp, Probe sequence
gacatactatacgatttaattaaca

SEQ ID NO: 249409 - DNA, 25 bp, Probe sequence
gacggtccgacaaatgaaacagaga

SEQ ID NO: 249410 - DNA, 25 bp, Probe sequence
gagtaaaggctttgtaccgattatt

SEQ ID NO: 249411 - DNA, 25 bp, Probe sequence
gaggaagtacaagcactaaatctaa

SEQ ID NO: 249412 - DNA, 25 bp, Probe sequence
gtaccgattattgcacatccagagc

SEQ ID NO: 249413 - DNA, 25 bp, Probe sequence
gtaacatcacatcacttacatcctc

SEQ ID NO: 249414 - DNA, 25 bp, Probe sequence
gtcaagtgacaacggcgtcattagc

SEQ ID NO: 249415 - DNA, 25 bp, Probe sequence
gtgaaatcatgtttaaaccatattg

SEQ ID NO: 249416 - DNA, 25 bp, Probe sequence
ggctttgtaccgattattgcacatc

SEQ ID NO: 249417 - DNA, 25 bp, Probe sequence
tatactgatcaattatttttcgaat

SEQ ID NO: 249418 - DNA, 25 bp, Probe sequence
tatttactaatagaatttccatcaa

SEQ ID NO: 249419 - DNA, 25 bp, Probe sequence
ttcctaaacgaatgccacaacaaga

SEQ ID NO: 249420 - DNA, 25 bp, Probe sequence
gttcccgtggttcagtaggttctag

SEQ ID NO: 249421 - DNA, 25 bp, Probe sequence
ataatgcttcgtttgatatgggctt

SEQ ID NO: 249422 - DNA, 25 bp, Probe sequence
atcgctcaactttaccggaagcaca

SEQ ID NO: 249423 - DNA, 25 bp, Probe sequence
atgggttagggctcaaggtcgtatt

SEQ ID NO: 249424 - DNA, 25 bp, Probe sequence
agtattccgtgcaggtacaattggt

SEQ ID NO: 249425 - DNA, 25 bp, Probe sequence
acaggcagcagactggggacatcca

SEQ ID NO: 249426 - DNA, 25 bp, Probe sequence
aagcccatgcagcagcatacgtttt

SEQ ID NO: 249427 - DNA, 25 bp, Probe sequence
aagatatcgccaacgttacatgtcg

SEQ ID NO: 249428 - DNA, 25 bp, Probe sequence
aatccacttaatcgctcaactttac

SEQ ID NO: 249429 - DNA, 25 bp, Probe sequence
cttactttacaattcgtgcgtcaga

SEQ ID NO: 249430 - DNA, 25 bp, Probe sequence
cctgggcttggcgaaaacgttgcga

SEQ ID NO: 249431 - DNA, 25 bp, Probe sequence
cctcgaattccacgttcattgttag

SEQ ID NO: 249432 - DNA, 25 bp, Probe sequence
gccgttcatatcagtgcctgggctt

SEQ ID NO: 249433 - DNA, 25 bp, Probe sequence
gaattgttgaagctcgtgacgatgg

SEQ ID NO: 249434 - DNA, 25 bp, Probe sequence
gacatccagccattgcggttacaga

SEQ ID NO: 249435 - DNA, 25 bp, Probe sequence
gacatgtattctcgctatatggatc

SEQ ID NO: 249436 - DNA, 25 bp, Probe sequence
gacgtgtgaaacttgtggagcgcca

SEQ ID NO: 249437 - DNA, 25 bp, Probe sequence
gacgacacattttgatttccattct

SEQ ID NO: 249438 - DNA, 25 bp, Probe sequence
gatccaacaatgattcgtatgcttc

SEQ ID NO: 249439 - DNA, 25 bp, Probe sequence
gataaaatcatcgagcttgcagctg

SEQ ID NO: 249440 - DNA, 25 bp, Probe sequence
gttagtagatgcccctgagattgaa

SEQ ID NO: 249441 - DNA, 25 bp, Probe sequence
gttaggctcattaccgaatttacca

SEQ ID NO: 249442 - DNA, 25 bp, Probe sequence
gggttggcgatgcgatattcgtagc

SEQ ID NO: 249443 - DNA, 25 bp, Probe sequence
ggtgttccgattgcatacaaaccac

SEQ ID NO: 249444 - DNA, 25 bp, Probe sequence
tggcagtacgtatcgcatatttcaa

SEQ ID NO: 249445 - DNA, 25 bp, Probe sequence
tgaccaaacagctttatctccaaaa

SEQ ID NO: 249446 - DNA, 25 bp, Probe sequence
tccagatgctcacgcagcagcggaa

SEQ ID NO: 249447 - DNA, 25 bp, Probe sequence
tccactttattactatgcatcttac

SEQ ID NO: 249448 - DNA, 25 bp, Probe sequence
tcaaccaccggcactttatcaagat

SEQ ID NO: 249449 - DNA, 25 bp, Probe sequence
taacgcaacatcaccgtgccattta

SEQ ID NO: 249450 - DNA, 25 bp, Probe sequence
tacttagttggttcccgtggttcag

SEQ ID NO: 249451 - DNA, 25 bp, Probe sequence
tacattaccacaattcttagctcat

SEQ ID NO: 249452 - DNA, 25 bp, Probe sequence
tacgccgatacaatatcctgccgat

SEQ ID NO: 249453 - DNA, 25 bp, Probe sequence
ttaatagcatcacaacccggcaatc

SEQ ID NO: 249454 - DNA, 25 bp, Probe sequence
atcgaggttatcgaatgcaaccgat

SEQ ID NO: 249455 - DNA, 25 bp, Probe sequence
atgggcttcatcgatacgggatatg

SEQ ID NO: 249456 - DNA, 25 bp, Probe sequence
atggcgcatcgaggttatcgaatgc

SEQ ID NO: 249457 - DNA, 25 bp, Probe sequence
aggtatccacaaaagaggtgctgaa

SEQ ID NO: 249458 - DNA, 25 bp, Probe sequence
catttggggtaccgaattcggacag

SEQ ID NO: 249459 - DNA, 25 bp, Probe sequence
agttatgcagatatttagtacacct

SEQ ID NO: 249460 - DNA, 25 bp, Probe sequence
agcaaagtgctgtcgataagtgtca

SEQ ID NO: 249461 - DNA, 25 bp, Probe sequence
agcgagtagaattccacttgcatac

SEQ ID NO: 249462 - DNA, 25 bp, Probe sequence
acgtcttgggtttggaccatcaacg

SEQ ID NO: 249463 - DNA, 25 bp, Probe sequence
acttatgttgtgttcgacgttgaga

SEQ ID NO: 249464 - DNA, 25 bp, Probe sequence
aaacatggtttgaatttcttggcta

SEQ ID NO: 249465 - DNA, 25 bp, Probe sequence
aaacaatacctgtagatgataaaga

SEQ ID NO: 249466 - DNA, 25 bp, Probe sequence
caggattcgtcgtcaaatgttagaa

SEQ ID NO: 249467 - DNA, 25 bp, Probe sequence
catggtttgaatttcttggctaaaa

SEQ ID NO: 249468 - DNA, 25 bp, Probe sequence
cgagtagaattccacttgcatactg

SEQ ID NO: 249469 - DNA, 25 bp, Probe sequence
gcttcaagatttatcaggaattgat

SEQ ID NO: 249470 - DNA, 25 bp, Probe sequence
gaattcggacaggattcgtcgtcaa

SEQ ID NO: 249471 - DNA, 25 bp, Probe sequence
gaacgtcttgggtttggaccatcaa

SEQ ID NO: 249472 - DNA, 25 bp, Probe sequence
gaaaagcgagtagaattccacttgc

SEQ ID NO: 249473 - DNA, 25 bp, Probe sequence
gacaggattcgtcgtcaaatgttag

SEQ ID NO: 249474 - DNA, 25 bp, Probe sequence
gactcgttaaaggatacatggatat

SEQ ID NO: 249475 - DNA, 25 bp, Probe sequence
gatatgggcttcatcgatacgggat

SEQ ID NO: 249476 - DNA, 25 bp, Probe sequence
gataacaagcaaagtgctgtcgata

SEQ ID NO: 249477 - DNA, 25 bp, Probe sequence
gtttgatatgggcttcatcgatacg

SEQ ID NO: 249478 - DNA, 25 bp, Probe sequence
gtcttgggtttggaccatcaacgaa

SEQ ID NO: 249479 - DNA, 25 bp, Probe sequence
gggtttggaccatcaacgaatggtg

SEQ ID NO: 249480 - DNA, 25 bp, Probe sequence
ggaattgatccaaaaacaatacctg

SEQ ID NO: 249481 - DNA, 25 bp, Probe sequence
ggcttcatcgatacgggatatgaac

SEQ ID NO: 249482 - DNA, 25 bp, Probe sequence
tccacttgcatactgcaatgagcca

SEQ ID NO: 249483 - DNA, 25 bp, Probe sequence
tcggacaggattcgtcgtcaaatgt

SEQ ID NO: 249484 - DNA, 25 bp, Probe sequence
tatgcagatatttagtacacctgaa

SEQ ID NO: 249485 - DNA, 25 bp, Probe sequence
tttcttggctaaaaaatatggcgta

SEQ ID NO: 249486 - DNA, 25 bp, Probe sequence
ttgtgttcgacgttgagacaactgg

SEQ ID NO: 249487 - DNA, 25 bp, Probe sequence
ttgcatactgcaatgagccaaatgg

SEQ ID NO: 249488 - DNA, 25 bp, Probe sequence
attgtacgctagcttctgaaaaaat

SEQ ID NO: 249489 - DNA, 25 bp, Probe sequence
ataagtgaagctatggatgcaaatg

SEQ ID NO: 249490 - DNA, 25 bp, Probe sequence
atgattgtacgctagcttctgaaaa

SEQ ID NO: 249491 - DNA, 25 bp, Probe sequence
agagataccgagagacaaaatagca

SEQ ID NO: 249492 - DNA, 25 bp, Probe sequence
agagggtagagatcattttcttaga

SEQ ID NO: 249493 - DNA, 25 bp, Probe sequence
agaacaagatttccaaaatgcaata

SEQ ID NO: 249494 - DNA, 25 bp, Probe sequence
agcacgtcacgcagttatgatttaa

SEQ ID NO: 249495 - DNA, 25 bp, Probe sequence
agcgtcacctggtgcagaacgtcca

SEQ ID NO: 249496 - DNA, 25 bp, Probe sequence
aaatgcaataactaaacctgtattt

SEQ ID NO: 249497 - DNA, 25 bp, Probe sequence
aacctgtatttgtttctttatatgt

SEQ ID NO: 249498 - DNA, 25 bp, Probe sequence
aaccaattatggaagacttgaattt

SEQ ID NO: 249499 - DNA, 25 bp, Probe sequence
aatgtattatttagacgtagcgtca

SEQ ID NO: 249500 - DNA, 25 bp, Probe sequence
aatagcaaaagcacgtcacgcagtt

SEQ ID NO: 249501 - DNA, 25 bp, Probe sequence
gcaaaagcacgtcacgcagttatga

SEQ ID NO: 249502 - DNA, 25 bp, Probe sequence
gcaaatgatcctattcctgaaatgt

SEQ ID NO: 249503 - DNA, 25 bp, Probe sequence
gaatctctattgataaagaaggtgg

SEQ ID NO: 249504 - DNA, 25 bp, Probe sequence
gaatatgtcaaagagggtagagatc

SEQ ID NO: 249505 - DNA, 25 bp, Probe sequence
gaaggtggcgtagatttaaatgatt

SEQ ID NO: 249506 - DNA, 25 bp, Probe sequence
gaaggtgaaaaggaatggttaggca

SEQ ID NO: 249507 - DNA, 25 bp, Probe sequence
gaacttgtagacgttgaatatgtca

SEQ ID NO: 249508 - DNA, 25 bp, Probe sequence
gacttgaattttgaacttgtagacg

SEQ ID NO: 249509 - DNA, 25 bp, Probe sequence
gacgtagcgtcacctggtgcagaac

SEQ ID NO: 249510 - DNA, 25 bp, Probe sequence
gatgcaaatgatcctattcctgaaa

SEQ ID NO: 249511 - DNA, 25 bp, Probe sequence
gatcctattcctgaaatgtattatt

SEQ ID NO: 249512 - DNA, 25 bp, Probe sequence
gatcattttcttagaatctctattg

SEQ ID NO: 249513 - DNA, 25 bp, Probe sequence
gatatagagataccgagagacaaaa

SEQ ID NO: 249514 - DNA, 25 bp, Probe sequence
gtttctttatatgtaccaattgaag

SEQ ID NO: 249515 - DNA, 25 bp, Probe sequence
gtatttgtttctttatatgtaccaa

SEQ ID NO: 249516 - DNA, 25 bp, Probe sequence
gtagcgtcacctggtgcagaacgtc

SEQ ID NO: 249517 - DNA, 25 bp, Probe sequence
ggtgcagaacgtccaattaaaaaag

SEQ ID NO: 249518 - DNA, 25 bp, Probe sequence
tggttaggcattttacaagaagtca

SEQ ID NO: 249519 - DNA, 25 bp, Probe sequence
tcacctggtgcagaacgtccaatta

SEQ ID NO: 249520 - DNA, 25 bp, Probe sequence
ttagacgtagcgtcacctggtgcag

SEQ ID NO: 249521 - DNA, 25 bp, Probe sequence
ttaaatgattgtacgctagcttctg

SEQ ID NO: 249522 - DNA, 25 bp, Probe sequence
agtggatttaagtacagcgcttgtt

SEQ ID NO: 249523 - DNA, 25 bp, Probe sequence
agttgttgttcctgattatcaattg

SEQ ID NO: 249524 - DNA, 25 bp, Probe sequence
agcgcttgttaaaaaccctgcatat

SEQ ID NO: 249525 - DNA, 25 bp, Probe sequence
aaattagtgtcttctctgaaaacaa

SEQ ID NO: 249526 - DNA, 25 bp, Probe sequence
aaatatattcctaacgaacgtatca

SEQ ID NO: 249527 - DNA, 25 bp, Probe sequence
aaatctatgtttctcgtagccatcc

SEQ ID NO: 249528 - DNA, 25 bp, Probe sequence
aaaggtcctcaaatctatgtttctc

SEQ ID NO: 249529 - DNA, 25 bp, Probe sequence
aaaatgctttaagcccttctcaagt

SEQ ID NO: 249530 - DNA, 25 bp, Probe sequence
aagcagtaatgcaacgtcttcgtga

SEQ ID NO: 249531 - DNA, 25 bp, Probe sequence
ctagctgctaaattaaccggctgga

SEQ ID NO: 249532 - DNA, 25 bp, Probe sequence
gtaacacctaaagattttggtcgtg

SEQ ID NO: 249533 - DNA, 25 bp, Probe sequence
gctggcgatcgctctaaaattagtg

SEQ ID NO: 249534 - DNA, 25 bp, Probe sequence
gctttagaagatgctgacacaacag

SEQ ID NO: 249535 - DNA, 25 bp, Probe sequence
gcaacgtcttcgtgatgctgaacgt

SEQ ID NO: 249536 - DNA, 25 bp, Probe sequence
gaagattcctagagcagtattaatt

SEQ ID NO: 249537 - DNA, 25 bp, Probe sequence
gaagacatacttactggaattattg

SEQ ID NO: 249538 - DNA, 25 bp, Probe sequence
gaagcagaaagaagtcctaacgaaa

SEQ ID NO: 249539 - DNA, 25 bp, Probe sequence
gaagcagctttaattactgcataca

SEQ ID NO: 249540 - DNA, 25 bp, Probe sequence
gaagctgttttatctgaagcagaaa

SEQ ID NO: 249541 - DNA, 25 bp, Probe sequence
gaagcgggtatctatccagtagttg

SEQ ID NO: 249542 - DNA, 25 bp, Probe sequence
gacacaacagaatcaaccgaagagg

SEQ ID NO: 249543 - DNA, 25 bp, Probe sequence
gatgctgttggtgcatgtgttggtg

SEQ ID NO: 249544 - DNA, 25 bp, Probe sequence
gatagtgcaagaaatgtccgtgtgg

SEQ ID NO: 249545 - DNA, 25 bp, Probe sequence
gttccagaaatttacgatggtactg

SEQ ID NO: 249546 - DNA, 25 bp, Probe sequence
gttatcgctcgtaaagatgttgttg

SEQ ID NO: 249547 - DNA, 25 bp, Probe sequence
gtagcacgtgaagctggcgatcgct

SEQ ID NO: 249548 - DNA, 25 bp, Probe sequence
gtaattgttaaatcagtagcacgtg

SEQ ID NO: 249549 - DNA, 25 bp, Probe sequence
ggtgctcaagcagcgaaacaagcag

SEQ ID NO: 249550 - DNA, 25 bp, Probe sequence
ggtactttcaaagttatcgctcgta

SEQ ID NO: 249551 - DNA, 25 bp, Probe sequence
ggacaaaacgcacgtctagctgcta

SEQ ID NO: 249552 - DNA, 25 bp, Probe sequence
ggaattattgaccgtgttgaccatc

SEQ ID NO: 249553 - DNA, 25 bp, Probe sequence
tgaccgtgttgaccatcgttatgta

SEQ ID NO: 249554 - DNA, 25 bp, Probe sequence
ttctcgtagccatccaggtttatta

SEQ ID NO: 249555 - DNA, 25 bp, Probe sequence
ttggtcgtgtaggtgctcaagcagc

SEQ ID NO: 249556 - DNA, 25 bp, Probe sequence
attccgatgcgaaaatgtattcttt

SEQ ID NO: 249557 - DNA, 25 bp, Probe sequence
atatgattcgtgttgttgttaataa

SEQ ID NO: 249558 - DNA, 25 bp, Probe sequence
atctttgcggatgttactggaaaga

SEQ ID NO: 249559 - DNA, 25 bp, Probe sequence
atgaaatgcatcccaaaaaagatat

SEQ ID NO: 249560 - DNA, 25 bp, Probe sequence
aggcgaaatctttgcggatgttact

SEQ ID NO: 249561 - DNA, 25 bp, Probe sequence
agatatgattcgtgttgttgttaat

SEQ ID NO: 249562 - DNA, 25 bp, Probe sequence
agaaggcgaaatctttgcggatgtt

SEQ ID NO: 249563 - DNA, 25 bp, Probe sequence
aatctttgcggatgttactggaaag

SEQ ID NO: 249564 - DNA, 25 bp, Probe sequence
aaatctttgcggatgttactggaaa

SEQ ID NO: 249565 - DNA, 25 bp, Probe sequence
aaaattccgatgcgaaaatgtattc

SEQ ID NO: 249566 - DNA, 25 bp, Probe sequence
aaagatatgattcgtgttgttgtta

SEQ ID NO: 249567 - DNA, 25 bp, Probe sequence
aaaagatatgattcgtgttgttgtt

SEQ ID NO: 249568 - DNA, 25 bp, Probe sequence
aagcatctaaagagcaattggatcc

SEQ ID NO: 249569 - DNA, 25 bp, Probe sequence
aagatatgattcgtgttgttgttaa

SEQ ID NO: 249570 - DNA, 25 bp, Probe sequence
aaggcgaaatctttgcggatgttac

SEQ ID NO: 249571 - DNA, 25 bp, Probe sequence
aattccgatgcgaaaatgtattctt

SEQ ID NO: 249572 - DNA, 25 bp, Probe sequence
ctttcaaatgaaatgcatcccaaaa

SEQ ID NO: 249573 - DNA, 25 bp, Probe sequence
ctggaaagaaacaaggccgtggcgc

SEQ ID NO: 249574 - DNA, 25 bp, Probe sequence
cgaaatctttgcggatgttactgga

SEQ ID NO: 249575 - DNA, 25 bp, Probe sequence
gcgaaatctttgcggatgttactgg

SEQ ID NO: 249576 - DNA, 25 bp, Probe sequence
gcgaaaatgtattctttcaaatgaa

SEQ ID NO: 249577 - DNA, 25 bp, Probe sequence
gaaggcgaaatctttgcggatgtta

SEQ ID NO: 249578 - DNA, 25 bp, Probe sequence
gaaatctttgcggatgttactggaa

SEQ ID NO: 249579 - DNA, 25 bp, Probe sequence
gatgcgaaaatgtattctttcaaat

SEQ ID NO: 249580 - DNA, 25 bp, Probe sequence
gatatgattcgtgttgttgttaata

SEQ ID NO: 249581 - DNA, 25 bp, Probe sequence
gttgctatggttgaaaaagcacaac

SEQ ID NO: 249582 - DNA, 25 bp, Probe sequence
gtttctaaagatgttgctatggttg

SEQ ID NO: 249583 - DNA, 25 bp, Probe sequence
ggcgaaatctttgcggatgttactg

SEQ ID NO: 249584 - DNA, 25 bp, Probe sequence
tccgatgcgaaaatgtattctttca

SEQ ID NO: 249585 - DNA, 25 bp, Probe sequence
tctaaagatgttgctatggttgaaa

SEQ ID NO: 249586 - DNA, 25 bp, Probe sequence
taaagatgttgctatggttgaaaaa

SEQ ID NO: 249587 - DNA, 25 bp, Probe sequence
tatgtttctaaagatgttgctatgg

SEQ ID NO: 249588 - DNA, 25 bp, Probe sequence
tttgcggatgttactggaaagaaac

SEQ ID NO: 249589 - DNA, 25 bp, Probe sequence
ttcaaatgaaatgcatcccaaaaaa

SEQ ID NO: 249590 - DNA, 25 bp, Probe sequence
attactgacccaggctttgctaaaa

SEQ ID NO: 249591 - DNA, 25 bp, Probe sequence
atagatcaaatattaaactttttag

SEQ ID NO: 249592 - DNA, 25 bp, Probe sequence
agggattactgacccaggctttgct

SEQ ID NO: 249593 - DNA, 25 bp, Probe sequence
atgtagggattactgacccaggctt

SEQ ID NO: 249594 - DNA, 25 bp, Probe sequence
aggtgagcgtgttaatgtagggatt

SEQ ID NO: 249595 - DNA, 25 bp, Probe sequence
agcacttggaaaaggtgagcgtgtt

SEQ ID NO: 249596 - DNA, 25 bp, Probe sequence
acttggaaaaggtgagcgtgttaat

SEQ ID NO: 249597 - DNA, 25 bp, Probe sequence
actgacccaggctttgctaaaaagt

SEQ ID NO: 249598 - DNA, 25 bp, Probe sequence
acaaagttccattcagaaagtttgg

SEQ ID NO: 249599 - DNA, 25 bp, Probe sequence
aaaggtgagcgtgttaatgtaggga

SEQ ID NO: 249600 - DNA, 25 bp, Probe sequence
aaaacaggtgaatcagtcattgtta

SEQ ID NO: 249601 - DNA, 25 bp, Probe sequence
aagctcgttattgttgcaaatgatg

SEQ ID NO: 249602 - DNA, 25 bp, Probe sequence
aagagttacaaagttccattcagaa

SEQ ID NO: 249603 - DNA, 25 bp, Probe sequence
aatacagctaaattaattacagata

SEQ ID NO: 249604 - DNA, 25 bp, Probe sequence
caggtgaatcagtcattgttaatga

SEQ ID NO: 249605 - DNA, 25 bp, Probe sequence
caggctttgctaaaaagttgctatc

SEQ ID NO: 249606 - DNA, 25 bp, Probe sequence
cgttattgttgcaaatgatgcgtct

SEQ ID NO: 249607 - DNA, 25 bp, Probe sequence
gctcgttattgttgcaaatgatgcg

SEQ ID NO: 249608 - DNA, 25 bp, Probe sequence
gaattgggaatagcacttggaaaag

SEQ ID NO: 249609 - DNA, 25 bp, Probe sequence
gaaatgaattgggaatagcacttgg

SEQ ID NO: 249610 - DNA, 25 bp, Probe sequence
gaaagtttggaaatcgaaatgaatt

SEQ ID NO: 249611 - DNA, 25 bp, Probe sequence
gacccaggctttgctaaaaagttgc

SEQ ID NO: 249612 - DNA, 25 bp, Probe sequence
gagcgtgttaatgtagggattactg

SEQ ID NO: 249613 - DNA, 25 bp, Probe sequence
gagttacaaagttccattcagaaag

SEQ ID NO: 249614 - DNA, 25 bp, Probe sequence
gattactgacccaggctttgctaaa

SEQ ID NO: 249615 - DNA, 25 bp, Probe sequence
gtagggattactgacccaggctttg

SEQ ID NO: 249616 - DNA, 25 bp, Probe sequence
tgtagggattactgacccaggcttt

SEQ ID NO: 249617 - DNA, 25 bp, Probe sequence
gttacaaagttccattcagaaagtt

SEQ ID NO: 249618 - DNA, 25 bp, Probe sequence
gtaagagttacaaagttccattcag

SEQ ID NO: 249619 - DNA, 25 bp, Probe sequence
ggaaaaggtgagcgtgttaatgtag

SEQ ID NO: 249620 - DNA, 25 bp, Probe sequence
taatgtagggattactgacccaggc

SEQ ID NO: 249621 - DNA, 25 bp, Probe sequence
tactgacccaggctttgctaaaaag

SEQ ID NO: 249622 - DNA, 25 bp, Probe sequence
tagggattactgacccaggctttgc

SEQ ID NO: 249623 - DNA, 25 bp, Probe sequence
ttactgacccaggctttgctaaaaa

SEQ ID NO: 249624 - DNA, 25 bp, Probe sequence
atacaccgggacatgctgcatttac

SEQ ID NO: 249625 - DNA, 25 bp, Probe sequence
accgtgctgttggtacagttatcga

SEQ ID NO: 249626 - DNA, 25 bp, Probe sequence
acaaagcactcaaaataatcaccaa

SEQ ID NO: 249627 - DNA, 25 bp, Probe sequence
aaatcactttcttagatacaccggg

SEQ ID NO: 249628 - DNA, 25 bp, Probe sequence
aacaagctcgtcgtattggtgaatc

SEQ ID NO: 249629 - DNA, 25 bp, Probe sequence
aaccagctgctccaaaagaaatacc

SEQ ID NO: 249630 - DNA, 25 bp, Probe sequence
aaccaacttcaaatcctgatcgagt

SEQ ID NO: 249631 - DNA, 25 bp, Probe sequence
aagttggtactattgctggatgtta

SEQ ID NO: 249632 - DNA, 25 bp, Probe sequence
aagtggtgatggtatcgacgattta

SEQ ID NO: 249633 - DNA, 25 bp, Probe sequence
aaggtttacttgatccagaatttga

SEQ ID NO: 249634 - DNA, 25 bp, Probe sequence
aaggttctgttgaagctttagctgc

SEQ ID NO: 249635 - DNA, 25 bp, Probe sequence
cagacgtgacacttgctaatgcctc

SEQ ID NO: 249636 - DNA, 25 bp, Probe sequence
gctgcatttacaacgatgcgtgcgc

SEQ ID NO: 249637 - DNA, 25 bp, Probe sequence
gctggtccatcaacgcctgttgaaa

SEQ ID NO: 249638 - DNA, 25 bp, Probe sequence
gcagctgacgatggtgttatgccac

SEQ ID NO: 249639 - DNA, 25 bp, Probe sequence
gcaaatcctaaaaaccgtgctgttg

SEQ ID NO: 249640 - DNA, 25 bp, Probe sequence
gaaggcgtaaatgttcgtatcattc

SEQ ID NO: 249641 - DNA, 25 bp, Probe sequence
gaagctttagctgcatcattaatga

SEQ ID NO: 249642 - DNA, 25 bp, Probe sequence
gaaacaattttcgttccactttctg

SEQ ID NO: 249643 - DNA, 25 bp, Probe sequence
gaaatgctggtgtacgtattattcg

SEQ ID NO: 249644 - DNA, 25 bp, Probe sequence
gacagtggtgcaaaacgtgctgcag

SEQ ID NO: 249645 - DNA, 25 bp, Probe sequence
gacacttgctaatgcctcaaatggt

SEQ ID NO: 249646 - DNA, 25 bp, Probe sequence
gatgtgccacaagctggggatcgct

SEQ ID NO: 249647 - DNA, 25 bp, Probe sequence
gaggtttcaaatcatatgcaagctt

SEQ ID NO: 249648 - DNA, 25 bp, Probe sequence
gatgcgtgcgcgtggtgcacaagta

SEQ ID NO: 249649 - DNA, 25 bp, Probe sequence
gttgatatgcgtttacacagagtta

SEQ ID NO: 249650 - DNA, 25 bp, Probe sequence
gtatcattcatacagcggttggtgc

SEQ ID NO: 249651 - DNA, 25 bp, Probe sequence
ggggatcgctttgttgtatttagtg

SEQ ID NO: 249652 - DNA, 25 bp, Probe sequence
ggtccttctgcatcattattagtac

SEQ ID NO: 249653 - DNA, 25 bp, Probe sequence
ggtttcaatgttcgtccagacagtg

SEQ ID NO: 249654 - DNA, 25 bp, Probe sequence
ggaatcactcaacatattggtgcat

SEQ ID NO: 249655 - DNA, 25 bp, Probe sequence
taattgccgatgattatggcgttga

SEQ ID NO: 249656 - DNA, 25 bp, Probe sequence
tatcggacaagctgaagttcgtcaa

SEQ ID NO: 249657 - DNA, 25 bp, Probe sequence
tttcgttccactttctgcattaagt

SEQ ID NO: 249658 - DNA, 25 bp, Probe sequence
atgcgattacgtattatgccggaat

SEQ ID NO: 249659 - DNA, 25 bp, Probe sequence
atgagagcagagcgtgttggtgaac

SEQ ID NO: 249660 - DNA, 25 bp, Probe sequence
agatcctcgagttggttttattaca

SEQ ID NO: 249661 - DNA, 25 bp, Probe sequence
aaagcacttgataaagcaaaaggct

SEQ ID NO: 249662 - DNA, 25 bp, Probe sequence
aagcaaaaggcttcattaagtctga

SEQ ID NO: 249663 - DNA, 25 bp, Probe sequence
aagtcaaagatcctcgagttggttt

SEQ ID NO: 249664 - DNA, 25 bp, Probe sequence
aaggcttcattaagtctgaattagg

SEQ ID NO: 249665 - DNA, 25 bp, Probe sequence
aatggatatcatcaacaataaagtc

SEQ ID NO: 249666 - DNA, 25 bp, Probe sequence
caataaagtcaaagatcctcgagtt

SEQ ID NO: 249667 - DNA, 25 bp, Probe sequence
caaagatcctcgagttggttttatt

SEQ ID NO: 249668 - DNA, 25 bp, Probe sequence
cgaatgattcaagatttacacaaac

SEQ ID NO: 249669 - DNA, 25 bp, Probe sequence
gcgattacgtattatgccggaatta

SEQ ID NO: 249670 - DNA, 25 bp, Probe sequence
gcaggctaaagtatttttaactgta

SEQ ID NO: 249671 - DNA, 25 bp, Probe sequence
gcagtatgagagcagagcgtgttgg

SEQ ID NO: 249672 - DNA, 25 bp, Probe sequence
gaatatgatcaatcaatcgaatatg

SEQ ID NO: 249673 - DNA, 25 bp, Probe sequence
gaatgcgattacgtattatgccgga

SEQ ID NO: 249674 - DNA, 25 bp, Probe sequence
gaaggaattaatggatatcatcaac

SEQ ID NO: 249675 - DNA, 25 bp, Probe sequence
gaacgaatgattcaagatttacaca

SEQ ID NO: 249676 - DNA, 25 bp, Probe sequence
gaaaatacatttaaagcacttgata

SEQ ID NO: 249677 - DNA, 25 bp, Probe sequence
gagcgtgttggtgaacaaatgaaga

SEQ ID NO: 249678 - DNA, 25 bp, Probe sequence
gagcagagcgtgttggtgaacaaat

SEQ ID NO: 249679 - DNA, 25 bp, Probe sequence
gagagcagagcgtgttggtgaacaa

SEQ ID NO: 249680 - DNA, 25 bp, Probe sequence
gagttggttttattacaattacaga

SEQ ID NO: 249681 - DNA, 25 bp, Probe sequence
gatttatcgcaggctaaagtatttt

SEQ ID NO: 249682 - DNA, 25 bp, Probe sequence
gattacgtattatgccggaattaat

SEQ ID NO: 249683 - DNA, 25 bp, Probe sequence
gtcaaagatcctcgagttggtttta

SEQ ID NO: 249684 - DNA, 25 bp, Probe sequence
gtctgaattaggttctagaatgcga

SEQ ID NO: 249685 - DNA, 25 bp, Probe sequence
tgagcagtatgagagcagagcgtgt

SEQ ID NO: 249686 - DNA, 25 bp, Probe sequence
tcctcgagttggttttattacaatt

SEQ ID NO: 249687 - DNA, 25 bp, Probe sequence
taacaaatgatttatcgcaggctaa

SEQ ID NO: 249688 - DNA, 25 bp, Probe sequence
tacaattacagatgttgttttaaca

SEQ ID NO: 249689 - DNA, 25 bp, Probe sequence
taggttctagaatgcgattacgtat

SEQ ID NO: 249690 - DNA, 25 bp, Probe sequence
ttatgccggaattaatgtatgaata

SEQ ID NO: 249691 - DNA, 25 bp, Probe sequence
ttaactgtattaggtaacgataaag

SEQ ID NO: 249692 - DNA, 25 bp, Probe sequence
attgggcgtatatctgaattagatt

SEQ ID NO: 249693 - DNA, 25 bp, Probe sequence
attagcaatttatatggtacaccct

SEQ ID NO: 249694 - DNA, 25 bp, Probe sequence
aggcgtgttaccggtatgtataggt

SEQ ID NO: 249695 - DNA, 25 bp, Probe sequence
acttcatgagcaggattcattgcaa

SEQ ID NO: 249696 - DNA, 25 bp, Probe sequence
aaaagaacttcatgagcaggattca

SEQ ID NO: 249697 - DNA, 25 bp, Probe sequence
aagatagccttacattagaacaaat

SEQ ID NO: 249698 - DNA, 25 bp, Probe sequence
aagaccaaattgtatttattgatga

SEQ ID NO: 249699 - DNA, 25 bp, Probe sequence
aattaggctttccggcacatatgtc

SEQ ID NO: 249700 - DNA, 25 bp, Probe sequence
aattgtttcctttagaatatggatt

SEQ ID NO: 249701 - DNA, 25 bp, Probe sequence
cattgcaaaataaattgtttccttt

SEQ ID NO: 249702 - DNA, 25 bp, Probe sequence
ccggtatgtataggtaatgcaacga

SEQ ID NO: 249703 - DNA, 25 bp, Probe sequence
gcaggcgtgttaccggtatgtatag

SEQ ID NO: 249704 - DNA, 25 bp, Probe sequence
gcaatttatatggtacaccctacaa

SEQ ID NO: 249705 - DNA, 25 bp, Probe sequence
gaatatgcgcgtaataatgaaacag

SEQ ID NO: 249706 - DNA, 25 bp, Probe sequence
gaatatggattaaagggtttgccaa

SEQ ID NO: 249707 - DNA, 25 bp, Probe sequence
gaatcgagtctggtggatttgtgtt

SEQ ID NO: 249708 - DNA, 25 bp, Probe sequence
gaagatcaaacgggtgatacattgg

SEQ ID NO: 249709 - DNA, 25 bp, Probe sequence
gaagttgcaggcgtgttaccggtat

SEQ ID NO: 249710 - DNA, 25 bp, Probe sequence
tgaaagaccaaagcgtaaagttaat

SEQ ID NO: 249711 - DNA, 25 bp, Probe sequence
gaaacagttgaaagaccaaagcgta

SEQ ID NO: 249712 - DNA, 25 bp, Probe sequence
gacgatattgaccgattgttagaaa

SEQ ID NO: 249713 - DNA, 25 bp, Probe sequence
gagagttagtgattatgttatggat

SEQ ID NO: 249714 - DNA, 25 bp, Probe sequence
gagtctggtggatttgtgttgaaag

SEQ ID NO: 249715 - DNA, 25 bp, Probe sequence
gatgattcagaaaaagtattagcaa

SEQ ID NO: 249716 - DNA, 25 bp, Probe sequence
gttgcaggcgtgttaccggtatgta

SEQ ID NO: 249717 - DNA, 25 bp, Probe sequence
gtgaaattaggctttccggcacata

SEQ ID NO: 249718 - DNA, 25 bp, Probe sequence
ggtgtgaaattaggctttccggcac

SEQ ID NO: 249719 - DNA, 25 bp, Probe sequence
ggtaatgcaacgagagttagtgatt

SEQ ID NO: 249720 - DNA, 25 bp, Probe sequence
ggtacaccctacaaaagaatcagaa

SEQ ID NO: 249721 - DNA, 25 bp, Probe sequence
ggatttgtgttgaaagatagcctta

SEQ ID NO: 249722 - DNA, 25 bp, Probe sequence
ggctttccggcacatatgtcgaaat

SEQ ID NO: 249723 - DNA, 25 bp, Probe sequence
ttaggctttccggcacatatgtcga

SEQ ID NO: 249724 - DNA, 25 bp, Probe sequence
ttaaaattaaagattcgcacataaa

SEQ ID NO: 249725 - DNA, 25 bp, Probe sequence
ttccggcacatatgtcgaaattaac

SEQ ID NO: 249726 - DNA, 25 bp, Probe sequence
attggcttcccaacagctaacattc

SEQ ID NO: 249727 - DNA, 25 bp, Probe sequence
attagccaacatgatattgattatt

SEQ ID NO: 249728 - DNA, 25 bp, Probe sequence
agtgatgattatttgttacctcgta

SEQ ID NO: 249729 - DNA, 25 bp, Probe sequence
agtgaatatctttgactttgaggat

SEQ ID NO: 249730 - DNA, 25 bp, Probe sequence
agaggatgttgcaatggcattcgga

SEQ ID NO: 249731 - DNA, 25 bp, Probe sequence
acttctattcgtcaagatttaatca

SEQ ID NO: 249732 - DNA, 25 bp, Probe sequence
acatttcatgatcctaacaaagcag

SEQ ID NO: 249733 - DNA, 25 bp, Probe sequence
aaatttctacaacttctattcgtca

SEQ ID NO: 249734 - DNA, 25 bp, Probe sequence
aaaggtcatgacaaagtctttgata

SEQ ID NO: 249735 - DNA, 25 bp, Probe sequence
aaagcagaagttgtcatcgaagtga

SEQ ID NO: 249736 - DNA, 25 bp, Probe sequence
aaagaagtcattgctggttttgatt

SEQ ID NO: 249737 - DNA, 25 bp, Probe sequence
aagcgaatgatgctttaggctatat

SEQ ID NO: 249738 - DNA, 25 bp, Probe sequence
catctaggtttgctaatgtgagcgt

SEQ ID NO: 249739 - DNA, 25 bp, Probe sequence
gctaacattcaacctagtgatgatt

SEQ ID NO: 249740 - DNA, 25 bp, Probe sequence
gcatcatttcttacgtcctgagatt

SEQ ID NO: 249741 - DNA, 25 bp, Probe sequence
gaattggcatcatttcttacgtcct

SEQ ID NO: 249742 - DNA, 25 bp, Probe sequence
gaagaactattggcttcccaacagc

SEQ ID NO: 249743 - DNA, 25 bp, Probe sequence
gaaatagctgaggcacgcagtttaa

SEQ ID NO: 249744 - DNA, 25 bp, Probe sequence
gatggtatcgacccattagttaaac

SEQ ID NO: 249745 - DNA, 25 bp, Probe sequence
gatgataaatcgcgtgctaaatatt

SEQ ID NO: 249746 - DNA, 25 bp, Probe sequence
gattttggtgatgaagtagcttata

SEQ ID NO: 249747 - DNA, 25 bp, Probe sequence
gttagtattgaaatcggcactgaaa

SEQ ID NO: 249748 - DNA, 25 bp, Probe sequence
gtaaagccaacatttcatgatccta

SEQ ID NO: 249749 - DNA, 25 bp, Probe sequence
ggttaatttttcatctaggtttgct

SEQ ID NO: 249750 - DNA, 25 bp, Probe sequence
ggcattcggatttttcgatggcatg

SEQ ID NO: 249751 - DNA, 25 bp, Probe sequence
tatcgaggggtagctaacataggtg

SEQ ID NO: 249752 - DNA, 25 bp, Probe sequence
tgttacctcgtaaaggtgtttatgc

SEQ ID NO: 249753 - DNA, 25 bp, Probe sequence
tgctggttttgattttacttttggt

SEQ ID NO: 249754 - DNA, 25 bp, Probe sequence
tccgtctgtcgtgttgaatcctaaa

SEQ ID NO: 249755 - DNA, 25 bp, Probe sequence
tagaagtgacacatcctatacaatc

SEQ ID NO: 249756 - DNA, 25 bp, Probe sequence
tattctattaaaggcactgtagtgc

SEQ ID NO: 249757 - DNA, 25 bp, Probe sequence
tttcgatggcatgcataaaggtcat

SEQ ID NO: 249758 - DNA, 25 bp, Probe sequence
ttagcagttgattttggtgatgaag

SEQ ID NO: 249759 - DNA, 25 bp, Probe sequence
ttcccaacagctaacattcaaccta

SEQ ID NO: 249760 - DNA, 25 bp, Probe sequence
attcacgtcgtggattattaaaaat

SEQ ID NO: 249761 - DNA, 25 bp, Probe sequence
attaaatcacttggtatccgtcgtt

SEQ ID NO: 249762 - DNA, 25 bp, Probe sequence
atcgctgtacttactgcagaaatca

SEQ ID NO: 249763 - DNA, 25 bp, Probe sequence
atggcaatttcacaagaacgtaaaa

SEQ ID NO: 249764 - DNA, 25 bp, Probe sequence
acgaaactgatactggttcaccaga

SEQ ID NO: 249765 - DNA, 25 bp, Probe sequence
acacgaaactgatactggttcacca

SEQ ID NO: 249766 - DNA, 25 bp, Probe sequence
acacaaaaaagaccaccattcacgt

SEQ ID NO: 249767 - DNA, 25 bp, Probe sequence
aaatcaacgcagtaaacgaacactt

SEQ ID NO: 249768 - DNA, 25 bp, Probe sequence
aaatcgctgtacttactgcagaaat

SEQ ID NO: 249769 - DNA, 25 bp, Probe sequence
aaaaaagaccaccattcacgtcgtg

SEQ ID NO: 249770 - DNA, 25 bp, Probe sequence
aaaagaccaccattcacgtcgtgga

SEQ ID NO: 249771 - DNA, 25 bp, Probe sequence
aactgatactggttcaccagaagta

SEQ ID NO: 249772 - DNA, 25 bp, Probe sequence
aagaccaccattcacgtcgtggatt

SEQ ID NO: 249773 - DNA, 25 bp, Probe sequence
cacgtcgtggattattaaaaatggt

SEQ ID NO: 249774 - DNA, 25 bp, Probe sequence
ctggttcaccagaagtacaaatcgc

SEQ ID NO: 249775 - DNA, 25 bp, Probe sequence
gcagtaaacgaacacttacgtacac

SEQ ID NO: 249776 - DNA, 25 bp, Probe sequence
cgctgtacttactgcagaaatcaac

SEQ ID NO: 249777 - DNA, 25 bp, Probe sequence
ccgtgtacacgaaactgatactggt

SEQ ID NO: 249778 - DNA, 25 bp, Probe sequence
ccaccattcacgtcgtggattatta

SEQ ID NO: 249779 - DNA, 25 bp, Probe sequence
gaacacttacgtacacacaaaaaag

SEQ ID NO: 249780 - DNA, 25 bp, Probe sequence
gaaatcattaaagaataccgtgtac

SEQ ID NO: 249781 - DNA, 25 bp, Probe sequence
gacatttattaaactacttacgtag

SEQ ID NO: 249782 - DNA, 25 bp, Probe sequence
gaccaccattcacgtcgtggattat

SEQ ID NO: 249783 - DNA, 25 bp, Probe sequence
gatattcaacgttaccgtgaattaa

SEQ ID NO: 249784 - DNA, 25 bp, Probe sequence
gttcaccagaagtacaaatcgctgt

SEQ ID NO: 249785 - DNA, 25 bp, Probe sequence
gtaaagatattcaacgttaccgtga

SEQ ID NO: 249786 - DNA, 25 bp, Probe sequence
gtacacgaaactgatactggttcac

SEQ ID NO: 249787 - DNA, 25 bp, Probe sequence
gtacacacaaaaaagaccaccattc

SEQ ID NO: 249788 - DNA, 25 bp, Probe sequence
tgtacttactgcagaaatcaacgca

SEQ ID NO: 249789 - DNA, 25 bp, Probe sequence
taattaaatcacttggtatccgtcg

SEQ ID NO: 249790 - DNA, 25 bp, Probe sequence
taaacgaacacttacgtacacacaa

SEQ ID NO: 249791 - DNA, 25 bp, Probe sequence
taaatcacttggtatccgtcgttaa

SEQ ID NO: 249792 - DNA, 25 bp, Probe sequence
tacaaatcgctgtacttactgcaga

SEQ ID NO: 249793 - DNA, 25 bp, Probe sequence
taccgtgtacacgaaactgatactg

SEQ ID NO: 249794 - DNA, 25 bp, Probe sequence
atatcactattcatatcgcatcata

SEQ ID NO: 249795 - DNA, 25 bp, Probe sequence
atactagcattaatcgattcactga

SEQ ID NO: 249796 - DNA, 25 bp, Probe sequence
atcattgcaattccaactattggtc

SEQ ID NO: 249797 - DNA, 25 bp, Probe sequence
atcatgcagcagcacacaagcacgt

SEQ ID NO: 249798 - DNA, 25 bp, Probe sequence
atcgagcgtgggaatatgccagtgt

SEQ ID NO: 249799 - DNA, 25 bp, Probe sequence
atcgcatcatatttcagcatttatt

SEQ ID NO: 249800 - DNA, 25 bp, Probe sequence
atgccagtgtgagtgaattgatttt

SEQ ID NO: 249801 - DNA, 25 bp, Probe sequence
aaattcgttatgatttctacggata

SEQ ID NO: 249802 - DNA, 25 bp, Probe sequence
aactttagttgttggtgctggtcaa

SEQ ID NO: 249803 - DNA, 25 bp, Probe sequence
aaccatacgcagtttatcatgcagc

SEQ ID NO: 249804 - DNA, 25 bp, Probe sequence
aattgcggcttttaatactagcatt

SEQ ID NO: 249805 - DNA, 25 bp, Probe sequence
cacacaagcacgtgccgttaatgga

SEQ ID NO: 249806 - DNA, 25 bp, Probe sequence
ctaatgtcatgggagcttcaaagcg

SEQ ID NO: 249807 - DNA, 25 bp, Probe sequence
gcggatattccagaactagtgagga

SEQ ID NO: 249808 - DNA, 25 bp, Probe sequence
gctggtcaagcaggttcaatgctga

SEQ ID NO: 249809 - DNA, 25 bp, Probe sequence
gcaggggcattagcagaaggtggcg

SEQ ID NO: 249810 - DNA, 25 bp, Probe sequence
gaaccggtattagcagtcgatgatg

SEQ ID NO: 249811 - DNA, 25 bp, Probe sequence
gacaagtttgtaatttctatccaga

SEQ ID NO: 249812 - DNA, 25 bp, Probe sequence
gaggatctgtgattccacttttcaa

SEQ ID NO: 249813 - DNA, 25 bp, Probe sequence
gttgatatcgttcctattatagcgg

SEQ ID NO: 249814 - DNA, 25 bp, Probe sequence
gttaaagctgtgacgacatctatcg

SEQ ID NO: 249815 - DNA, 25 bp, Probe sequence
gtattattctacttggccatggtga

SEQ ID NO: 249816 - DNA, 25 bp, Probe sequence
gtgacgaaatgaaacttgaaccggt

SEQ ID NO: 249817 - DNA, 25 bp, Probe sequence
ggtggctcaaggttattttggcgta

SEQ ID NO: 249818 - DNA, 25 bp, Probe sequence
ggtaatgtacttggatcgagaggat

SEQ ID NO: 249819 - DNA, 25 bp, Probe sequence
ggatgatgcacttgattttaatagg

SEQ ID NO: 249820 - DNA, 25 bp, Probe sequence
ggcacatttatctgtgaaattgcgg

SEQ ID NO: 249821 - DNA, 25 bp, Probe sequence
tgttacaggcaatagaccgtttttt

SEQ ID NO: 249822 - DNA, 25 bp, Probe sequence
tgatagtgacattttcagtattcgt

SEQ ID NO: 249823 - DNA, 25 bp, Probe sequence
tccaactattggtcaagagcgtttg

SEQ ID NO: 249824 - DNA, 25 bp, Probe sequence
tcgtgaattgcgaaatcgcttcgga

SEQ ID NO: 249825 - DNA, 25 bp, Probe sequence
tagagcgcgtatgtttgaaattatg

SEQ ID NO: 249826 - DNA, 25 bp, Probe sequence
tagttttgcaggcaggggcattagc

SEQ ID NO: 249827 - DNA, 25 bp, Probe sequence
tattggcagctatatcactattcat

SEQ ID NO: 249828 - DNA, 25 bp, Probe sequence
attcctgatactgctgatttcccat

SEQ ID NO: 249829 - DNA, 25 bp, Probe sequence
atacggtgcgtttgtaggcctattc

SEQ ID NO: 249830 - DNA, 25 bp, Probe sequence
agaccagacggccgtaaacctgatg

SEQ ID NO: 249831 - DNA, 25 bp, Probe sequence
aaacctgatgaaatccgtccattag

SEQ ID NO: 249832 - DNA, 25 bp, Probe sequence
aagatgcgttgcttcacatttcaca

SEQ ID NO: 249833 - DNA, 25 bp, Probe sequence
aagtgcttacgcgccaaaagttgta

SEQ ID NO: 249834 - DNA, 25 bp, Probe sequence
aatggcgctgtattggttcgttatg

SEQ ID NO: 249835 - DNA, 25 bp, Probe sequence
cgggcgtaccgattaaagcaccagt

SEQ ID NO: 249836 - DNA, 25 bp, Probe sequence
gctgatttcccatatacaattcgta

SEQ ID NO: 249837 - DNA, 25 bp, Probe sequence
gctatgggccttgttacacgtgaag

SEQ ID NO: 249838 - DNA, 25 bp, Probe sequence
gcaactgcatcaaaagaacctcgtg

SEQ ID NO: 249839 - DNA, 25 bp, Probe sequence
gaaggacgtcctggtgacgatgcaa

SEQ ID NO: 249840 - DNA, 25 bp, Probe sequence
gaagttcgacgtttaattgcagatg

SEQ ID NO: 249841 - DNA, 25 bp, Probe sequence
gaacctcgtgatggagatttcttcc

SEQ ID NO: 249842 - DNA, 25 bp, Probe sequence
gaaactggtccagtacgtgcgccag

SEQ ID NO: 249843 - DNA, 25 bp, Probe sequence
gacgatgcaacattaactgcgcgat

SEQ ID NO: 249844 - DNA, 25 bp, Probe sequence
gagatgttatcggacctggtggtaa

SEQ ID NO: 249845 - DNA, 25 bp, Probe sequence
gaggctctagaacaagcgagacgtg

SEQ ID NO: 249846 - DNA, 25 bp, Probe sequence
gatttcttcccattaacagtgaact

SEQ ID NO: 249847 - DNA, 25 bp, Probe sequence
gattggttcatctatggcgcttagt

SEQ ID NO: 249848 - DNA, 25 bp, Probe sequence
gtcggatattccattccaagggcca

SEQ ID NO: 249849 - DNA, 25 bp, Probe sequence
gttgctggtattgctatgggccttg

SEQ ID NO: 249850 - DNA, 25 bp, Probe sequence
gtaggtcaaacttatcaagccactg

SEQ ID NO: 249851 - DNA, 25 bp, Probe sequence
gtacgctgcgggtaaaattcctggt

SEQ ID NO: 249852 - DNA, 25 bp, Probe sequence
gtcgaccacattcaacctgttaaac

SEQ ID NO: 249853 - DNA, 25 bp, Probe sequence
gtgcagatcctgattgttcaccaca

SEQ ID NO: 249854 - DNA, 25 bp, Probe sequence
ggttcaggtctatttacacgtggtc

SEQ ID NO: 249855 - DNA, 25 bp, Probe sequence
ggttcatcatctcaagcgtcaattt

SEQ ID NO: 249856 - DNA, 25 bp, Probe sequence
ggcgcttagtgtgtcggatattcca

SEQ ID NO: 249857 - DNA, 25 bp, Probe sequence
tcgtgttatcgacggcaactgcatc

SEQ ID NO: 249858 - DNA, 25 bp, Probe sequence
tagaccaattagacctttattccct

SEQ ID NO: 249859 - DNA, 25 bp, Probe sequence
ttccaagggccaatcgccggtgtaa

SEQ ID NO: 249860 - DNA, 25 bp, Probe sequence
tagaggcgattttctttggtcatga

SEQ ID NO: 249861 - DNA, 25 bp, Probe sequence
ttccaacaacaaatcgtcgaccaca

SEQ ID NO: 249862 - DNA, 25 bp, Probe sequence
atatcgtgttgagagaccgtcatct

SEQ ID NO: 249863 - DNA, 25 bp, Probe sequence
ataccagacatttcatacgtacttg

SEQ ID NO: 249864 - DNA, 25 bp, Probe sequence
atgttagatgctggacttatgtttc

SEQ ID NO: 249865 - DNA, 25 bp, Probe sequence
atggtgccattgtgtatacaggtga

SEQ ID NO: 249866 - DNA, 25 bp, Probe sequence
agcaagctaaatcgtaaagtgtcat

SEQ ID NO: 249867 - DNA, 25 bp, Probe sequence
acgcgattggtgcagtgagttatgt

SEQ ID NO: 249868 - DNA, 25 bp, Probe sequence
aaatgagcttgtacgtgctggcgca

SEQ ID NO: 249869 - DNA, 25 bp, Probe sequence
aacgtcgtcctatgattattccagt

SEQ ID NO: 249870 - DNA, 25 bp, Probe sequence
aagatttgctaattcctataacaga

SEQ ID NO: 249871 - DNA, 25 bp, Probe sequence
cacacggacatgagcacgcgattgg

SEQ ID NO: 249872 - DNA, 25 bp, Probe sequence
gctactggtatgcaaggagaacctg

SEQ ID NO: 249873 - DNA, 25 bp, Probe sequence
gcttttgcaaaagtgcgaggtcgct

SEQ ID NO: 249874 - DNA, 25 bp, Probe sequence
gaatactttattcctgtacaaggtg

SEQ ID NO: 249875 - DNA, 25 bp, Probe sequence
gaaggcgattctgtatttttagcaa

SEQ ID NO: 249876 - DNA, 25 bp, Probe sequence
gaagccttaagtcaaatggcgcaac

SEQ ID NO: 249877 - DNA, 25 bp, Probe sequence
gaacaattagatgcaccagtatatg

SEQ ID NO: 249878 - DNA, 25 bp, Probe sequence
gaaacctggatataatactccggaa

SEQ ID NO: 249879 - DNA, 25 bp, Probe sequence
gaaagttcatttaatattgctcgta

SEQ ID NO: 249880 - DNA, 25 bp, Probe sequence
gaaattcaatctcgtgggtttgtat

SEQ ID NO: 249881 - DNA, 25 bp, Probe sequence
gagagaccgtcatcttttagcagaa

SEQ ID NO: 249882 - DNA, 25 bp, Probe sequence
gattcatgcttcaagtcatggttgc

SEQ ID NO: 249883 - DNA, 25 bp, Probe sequence
gttatgcttcgaactttatacgtat

SEQ ID NO: 249884 - DNA, 25 bp, Probe sequence
gtttacatggacattatgcaccaga

SEQ ID NO: 249885 - DNA, 25 bp, Probe sequence
gtattcacacttcatatggtgccat

SEQ ID NO: 249886 - DNA, 25 bp, Probe sequence
gtgctggcgcacatattattccaaa

SEQ ID NO: 249887 - DNA, 25 bp, Probe sequence
ggagaacctgtagaagccttaagtc

SEQ ID NO: 249888 - DNA, 25 bp, Probe sequence
gggtatattccttacacacggacat

SEQ ID NO: 249889 - DNA, 25 bp, Probe sequence
ggggtatttcgacattcctaaagat

SEQ ID NO: 249890 - DNA, 25 bp, Probe sequence
ggaagttatcattgcgaatacatta

SEQ ID NO: 249891 - DNA, 25 bp, Probe sequence
tagcacatgcgaagctagcagctga

SEQ ID NO: 249892 - DNA, 25 bp, Probe sequence
tacgacacacagtattcctgatagt

SEQ ID NO: 249893 - DNA, 25 bp, Probe sequence
tagcagctgaagcaggtgttgcacc

SEQ ID NO: 249894 - DNA, 25 bp, Probe sequence
tagtttctttaatacgacacacagt

SEQ ID NO: 249895 - DNA, 25 bp, Probe sequence
tatttttagcaattacggcttctgc

SEQ ID NO: 249896 - DNA, 25 bp, Probe sequence
attggtggcaggatcgacgggtagt

SEQ ID NO: 249897 - DNA, 25 bp, Probe sequence
attgcattgctatttgtatcacagt

SEQ ID NO: 249898 - DNA, 25 bp, Probe sequence
atttattccaacattcatcaactag

SEQ ID NO: 249899 - DNA, 25 bp, Probe sequence
attttagtactcttagcaactggtt

SEQ ID NO: 249900 - DNA, 25 bp, Probe sequence
atcagtcataccaacacagtcattt

SEQ ID NO: 249901 - DNA, 25 bp, Probe sequence
atggcacgtgcagcaggtatacatt

SEQ ID NO: 249902 - DNA, 25 bp, Probe sequence
aggtgatccaattactgttccacta

SEQ ID NO: 249903 - DNA, 25 bp, Probe sequence
agcaaccagaattaccttatatcgt

SEQ ID NO: 249904 - DNA, 25 bp, Probe sequence
aaagagaacctgtactttcttatgt

SEQ ID NO: 249905 - DNA, 25 bp, Probe sequence
aaagaccttctgtggatgtaattac

SEQ ID NO: 249906 - DNA, 25 bp, Probe sequence
aacatcgtaaatcatcatcaagcag

SEQ ID NO: 249907 - DNA, 25 bp, Probe sequence
aacggctggttcgattgtattgcaa

SEQ ID NO: 249908 - DNA, 25 bp, Probe sequence
aagcttggtttggttcatttaatga

SEQ ID NO: 249909 - DNA, 25 bp, Probe sequence
aatggaaccagatgcaccagtggat

SEQ ID NO: 249910 - DNA, 25 bp, Probe sequence
aatccgatacgttatgtcatagcta

SEQ ID NO: 249911 - DNA, 25 bp, Probe sequence
aattccggttgttacaaatcctcat

SEQ ID NO: 249912 - DNA, 25 bp, Probe sequence
caaatcctcataaagctgctcaagc

SEQ ID NO: 249913 - DNA, 25 bp, Probe sequence
catcacaaacacgtattcaaggggc

SEQ ID NO: 249914 - DNA, 25 bp, Probe sequence
gcaactggttttattacatactcta

SEQ ID NO: 249915 - DNA, 25 bp, Probe sequence
gcaagtacatcattgttacaacgcc

SEQ ID NO: 249916 - DNA, 25 bp, Probe sequence
gaacgcaatcaggtaatcggtccac

SEQ ID NO: 249917 - DNA, 25 bp, Probe sequence
gaaattcaaccagctcaaggggtta

SEQ ID NO: 249918 - DNA, 25 bp, Probe sequence
gagtgattttacggaagtgcctcaa

SEQ ID NO: 249919 - DNA, 25 bp, Probe sequence
gatgaagcgtatttgtttgttgttg

SEQ ID NO: 249920 - DNA, 25 bp, Probe sequence
gttccactaaatgaaatgccacact

SEQ ID NO: 249921 - DNA, 25 bp, Probe sequence
gtatcacagttagtttttcatttta

SEQ ID NO: 249922 - DNA, 25 bp, Probe sequence
gtcgtctaattgacagcttctttaa

SEQ ID NO: 249923 - DNA, 25 bp, Probe sequence
ggcgtttttaagtgaccaagaggtg

SEQ ID NO: 249924 - DNA, 25 bp, Probe sequence
ggaagcaagcctagacaagttttaa

SEQ ID NO: 249925 - DNA, 25 bp, Probe sequence
tcgtatgttgttccaccgttaactt

SEQ ID NO: 249926 - DNA, 25 bp, Probe sequence
taagcgtacctttaatttcattatt

SEQ ID NO: 249927 - DNA, 25 bp, Probe sequence
taactttacttaatcaacctgcaaa

SEQ ID NO: 249928 - DNA, 25 bp, Probe sequence
tattaacaaaccatcaacatcgtga

SEQ ID NO: 249929 - DNA, 25 bp, Probe sequence
ttggtcctgcagtaactcaatatga

SEQ ID NO: 249930 - DNA, 25 bp, Probe sequence
gccgatggagaaccggtcgtctatt

SEQ ID NO: 249931 - DNA, 25 bp, Probe sequence
attttgaagagggcacaagtgttaa

SEQ ID NO: 249932 - DNA, 25 bp, Probe sequence
atagcttagttcaatttaaaatcac

SEQ ID NO: 249933 - DNA, 25 bp, Probe sequence
agaacgattacgaactgccgatgga

SEQ ID NO: 249934 - DNA, 25 bp, Probe sequence
aactgccgatggagaaccggtcgtc

SEQ ID NO: 249935 - DNA, 25 bp, Probe sequence
accgacgatgtttatgaagcaattc

SEQ ID NO: 249936 - DNA, 25 bp, Probe sequence
actatgttagatgcaaatttgttga

SEQ ID NO: 249937 - DNA, 25 bp, Probe sequence
aaattttgatgagcaaccagcaact

SEQ ID NO: 249938 - DNA, 25 bp, Probe sequence
aagaattaacatgtacagagtatca

SEQ ID NO: 249939 - DNA, 25 bp, Probe sequence
ccccctttcttttatccattgaatg

SEQ ID NO: 249940 - DNA, 25 bp, Probe sequence
gcggaactgaatacttaaattttga

SEQ ID NO: 249941 - DNA, 25 bp, Probe sequence
gctgatacagaaattgaagcggtaa

SEQ ID NO: 249942 - DNA, 25 bp, Probe sequence
gcaggatttgaatgcggaactgaat

SEQ ID NO: 249943 - DNA, 25 bp, Probe sequence
gcaaccagcaactatgttagatgca

SEQ ID NO: 249944 - DNA, 25 bp, Probe sequence
gaatgcttcgccacacgaaggtttg

SEQ ID NO: 249945 - DNA, 25 bp, Probe sequence
gaacctcgaatatccgaagtactga

SEQ ID NO: 249946 - DNA, 25 bp, Probe sequence
gaaggatatccagtaaccattatag

SEQ ID NO: 249947 - DNA, 25 bp, Probe sequence
gaagtactgaatgcttcgccacacg

SEQ ID NO: 249948 - DNA, 25 bp, Probe sequence
gaagcaattcaggcattgattactg

SEQ ID NO: 249949 - DNA, 25 bp, Probe sequence
gaacttataagtattgggcaaatga

SEQ ID NO: 249950 - DNA, 25 bp, Probe sequence
gaaccggtcgtctattgtttagata

SEQ ID NO: 249951 - DNA, 25 bp, Probe sequence
gaagcggtaaattatgaacctcgaa

SEQ ID NO: 249952 - DNA, 25 bp, Probe sequence
gaacctattttgtattcattaaatt

SEQ ID NO: 249953 - DNA, 25 bp, Probe sequence
gagtatcaaatgagcaatggatcga

SEQ ID NO: 249954 - DNA, 25 bp, Probe sequence
gatgagcaaccagcaactatgttag

SEQ ID NO: 249955 - DNA, 25 bp, Probe sequence
gtaatttatcaattgccagagaatt

SEQ ID NO: 249956 - DNA, 25 bp, Probe sequence
gtcagaaatgaatgcggtatataac

SEQ ID NO: 249957 - DNA, 25 bp, Probe sequence
gtgaccaacttccaagtaatttatc

SEQ ID NO: 249958 - DNA, 25 bp, Probe sequence
ggagaaccggtcgtctattgtttag

SEQ ID NO: 249959 - DNA, 25 bp, Probe sequence
ggaatatggtgaccaacttccaagt

SEQ ID NO: 249960 - DNA, 25 bp, Probe sequence
ggcattgattactgaacaagtcatt

SEQ ID NO: 249961 - DNA, 25 bp, Probe sequence
gaatgcggtatataacgttaaacaa

SEQ ID NO: 249962 - DNA, 25 bp, Probe sequence
tccagtaaccattatagaacgatta

SEQ ID NO: 249963 - DNA, 25 bp, Probe sequence
tcgccacacgaaggtttgattttat

SEQ ID NO: 249964 - DNA, 25 bp, Probe sequence
attcaaagatcagcatgtcattaca

SEQ ID NO: 249965 - DNA, 25 bp, Probe sequence
ataaacatcaattccaacattctac

SEQ ID NO: 249966 - DNA, 25 bp, Probe sequence
atcacttagccgatttatatggtgc

SEQ ID NO: 249967 - DNA, 25 bp, Probe sequence
atggctatttatttgttttgagtgg

SEQ ID NO: 249968 - DNA, 25 bp, Probe sequence
agcaaccacaaagcaaagaaacatt

SEQ ID NO: 249969 - DNA, 25 bp, Probe sequence
actgctgaaacactatatcatacat

SEQ ID NO: 249970 - DNA, 25 bp, Probe sequence
acatgatgtttggaggagatccttc

SEQ ID NO: 249971 - DNA, 25 bp, Probe sequence
aaatacttatctacaggacaactag

SEQ ID NO: 249972 - DNA, 25 bp, Probe sequence
aaatcccacatattactgctgaaac

SEQ ID NO: 249973 - DNA, 25 bp, Probe sequence
aaagtaatcatttctcatcgatatg

SEQ ID NO: 249974 - DNA, 25 bp, Probe sequence
aaaagcaggagatttcactgaagaa

SEQ ID NO: 249975 - DNA, 25 bp, Probe sequence
aaaatttgcacttaaaccattcgat

SEQ ID NO: 249976 - DNA, 25 bp, Probe sequence
aaaattactcgaccatatgtttgaa

SEQ ID NO: 249977 - DNA, 25 bp, Probe sequence
aaccattcgataaacatcaattcca

SEQ ID NO: 249978 - DNA, 25 bp, Probe sequence
aatgttctgtttatgttgtcggcaa

SEQ ID NO: 249979 - DNA, 25 bp, Probe sequence
catatcaaagtttcaccaacaacta

SEQ ID NO: 249980 - DNA, 25 bp, Probe sequence
ccaaatattattagagcaaccacaa

SEQ ID NO: 249981 - DNA, 25 bp, Probe sequence
gcgaagatattgtttctgttgctga

SEQ ID NO: 249982 - DNA, 25 bp, Probe sequence
gaaaagcaaagtttagcgtactcta

SEQ ID NO: 249983 - DNA, 25 bp, Probe sequence
gacaactagaacaaatcccacatat

SEQ ID NO: 249984 - DNA, 25 bp, Probe sequence
gatgacgtggatcaagctaaattaa

SEQ ID NO: 249985 - DNA, 25 bp, Probe sequence
gatccttcatctgttttatttaatg

SEQ ID NO: 249986 - DNA, 25 bp, Probe sequence
gatcgtccgaaaagtattatagaga

SEQ ID NO: 249987 - DNA, 25 bp, Probe sequence
gatatgaatctgaagatcgtccgaa

SEQ ID NO: 249988 - DNA, 25 bp, Probe sequence
gtttagcgtactctatacattcaca

SEQ ID NO: 249989 - DNA, 25 bp, Probe sequence
gtacgaaactgcaaaagacactatt

SEQ ID NO: 249990 - DNA, 25 bp, Probe sequence
gtactctatacattcacaaattgat

SEQ ID NO: 249991 - DNA, 25 bp, Probe sequence
ggaggagatccttcatctgttttat

SEQ ID NO: 249992 - DNA, 25 bp, Probe sequence
tcagcatgtcattacattttcatta

SEQ ID NO: 249993 - DNA, 25 bp, Probe sequence
tacagaaggtaagtcgcgaagatat

SEQ ID NO: 249994 - DNA, 25 bp, Probe sequence
tagacaatctcaaccaaatatacat

SEQ ID NO: 249995 - DNA, 25 bp, Probe sequence
tagatacaatctatgtgttgacaaa

SEQ ID NO: 249996 - DNA, 25 bp, Probe sequence
tatagtttttaaatttatggcacct

SEQ ID NO: 249997 - DNA, 25 bp, Probe sequence
ttgtcggcaatgtagaacctgaaag

SEQ ID NO: 249998 - DNA, 25 bp, Probe sequence
atacgtgttgatattgccggtagtg

SEQ ID NO: 249999 - DNA, 25 bp, Probe sequence
atgcgtttacaagctttgatcgtac

SEQ ID NO: 250000 - DNA, 25 bp, Probe sequence
agtcgatagtcgtttggagattaaa

SEQ ID NO: 250001 - DNA, 25 bp, Probe sequence
actgtacctgatggagttgctcact

SEQ ID NO: 250002 - DNA, 25 bp, Probe sequence
acgtcatcgttatatttaaatttag

SEQ ID NO: 250003 - DNA, 25 bp, Probe sequence
aaattcaatcaccaagactaatgct

SEQ ID NO: 250004 - DNA, 25 bp, Probe sequence
aactcacctgaatatattgctaatc

SEQ ID NO: 250005 - DNA, 25 bp, Probe sequence
aagacatttgtcacttacactacac

SEQ ID NO: 250006 - DNA, 25 bp, Probe sequence
aagaccaatttgttactgtacctga

SEQ ID NO: 250007 - DNA, 25 bp, Probe sequence
caacccaaaatcgaacgaggacttg

SEQ ID NO: 250008 - DNA, 25 bp, Probe sequence
caagctacttgttcagtgcaactga

SEQ ID NO: 250009 - DNA, 25 bp, Probe sequence
cattagataatcaattcaaacccct

SEQ ID NO: 250010 - DNA, 25 bp, Probe sequence
gctttgatcgtacaagctacttgtt

SEQ ID NO: 250011 - DNA, 25 bp, Probe sequence
gcacaagcaaatgcgtttacaagct

SEQ ID NO: 250012 - DNA, 25 bp, Probe sequence
gaaggacttatcgatgatacatttg

SEQ ID NO: 250013 - DNA, 25 bp, Probe sequence
gaagcatttgttactgaatctatga

SEQ ID NO: 250014 - DNA, 25 bp, Probe sequence
gaagcgcctcaaaaatatgtacaac

SEQ ID NO: 250015 - DNA, 25 bp, Probe sequence
gaaacgttttatcatccatcaaata

SEQ ID NO: 250016 - DNA, 25 bp, Probe sequence
gaaatgtcattattctttgagttaa

SEQ ID NO: 250017 - DNA, 25 bp, Probe sequence
gatgctcgtaataaagttaaccaac

SEQ ID NO: 250018 - DNA, 25 bp, Probe sequence
gatattgccggtagtgtagaaagta

SEQ ID NO: 250019 - DNA, 25 bp, Probe sequence
gttatcaatttgtactagagccgac

SEQ ID NO: 250020 - DNA, 25 bp, Probe sequence
gtcacttacactacacaatttggtt

SEQ ID NO: 250021 - DNA, 25 bp, Probe sequence
gtgtttgacatgttagacattgttg

SEQ ID NO: 250022 - DNA, 25 bp, Probe sequence
ggagttgctcactttttagaacata

SEQ ID NO: 250023 - DNA, 25 bp, Probe sequence
tggggaagaaacagatttttatcag

SEQ ID NO: 250024 - DNA, 25 bp, Probe sequence
ggcaatttccaagatgcagaagcat

SEQ ID NO: 250025 - DNA, 25 bp, Probe sequence
tgcagaagcatttgaacttttgaaa

SEQ ID NO: 250026 - DNA, 25 bp, Probe sequence
tcatatcaagtttaaactcacctga

SEQ ID NO: 250027 - DNA, 25 bp, Probe sequence
taaaccattacaagaagcgcctcaa

SEQ ID NO: 250028 - DNA, 25 bp, Probe sequence
tacaatggttgaaacgccttatttt

SEQ ID NO: 250029 - DNA, 25 bp, Probe sequence
tacactacacaatttggttcattag

SEQ ID NO: 250030 - DNA, 25 bp, Probe sequence
tagtaaaacaacacgaggatgctcg

SEQ ID NO: 250031 - DNA, 25 bp, Probe sequence
tagatcagcaagtcgatagtcgttt

SEQ ID NO: 250032 - DNA, 25 bp, Probe sequence
attgtaatttcatcaatttggggtg

SEQ ID NO: 250033 - DNA, 25 bp, Probe sequence
atttcgttgatgttttacgtcaaag

SEQ ID NO: 250034 - DNA, 25 bp, Probe sequence
aggtggttctggttcaattggttct

SEQ ID NO: 250035 - DNA, 25 bp, Probe sequence
agtgagtggcaagaagatgaacttc

SEQ ID NO: 250036 - DNA, 25 bp, Probe sequence
aaagcattagtattaggtggttctg

SEQ ID NO: 250037 - DNA, 25 bp, Probe sequence
aactgaattaccacaacagcgattg

SEQ ID NO: 250038 - DNA, 25 bp, Probe sequence
aagcggatttatctcaaacaattga

SEQ ID NO: 250039 - DNA, 25 bp, Probe sequence
aagtgcacaattaggtttcgttaag

SEQ ID NO: 250040 - DNA, 25 bp, Probe sequence
aaggcgcttagtcaagagcttgcac

SEQ ID NO: 250041 - DNA, 25 bp, Probe sequence
aatgtcttgcaattaattcgattat

SEQ ID NO: 250042 - DNA, 25 bp, Probe sequence
caatttggggtgagacaggagctag

SEQ ID NO: 250043 - DNA, 25 bp, Probe sequence
aattggttctgagatagtcaaacaa

SEQ ID NO: 250044 - DNA, 25 bp, Probe sequence
ctgatggatttgaagtttatgtgca

SEQ ID NO: 250045 - DNA, 25 bp, Probe sequence
gcttgcactaacatcagtgacagta

SEQ ID NO: 250046 - DNA, 25 bp, Probe sequence
gcatgttatcagttaaatgtcttgc

SEQ ID NO: 250047 - DNA, 25 bp, Probe sequence
gcaagtggtcagtctttatatggtg

SEQ ID NO: 250048 - DNA, 25 bp, Probe sequence
gactgtttaatatatgcaagtggtc

SEQ ID NO: 250049 - DNA, 25 bp, Probe sequence
gaccatgatattgatgcatgttatc

SEQ ID NO: 250050 - DNA, 25 bp, Probe sequence
gatgaacttcaagcaatgataactg

SEQ ID NO: 250051 - DNA, 25 bp, Probe sequence
gattatgtagatatttcgttgatgt

SEQ ID NO: 250052 - DNA, 25 bp, Probe sequence
gttgctcatacatgcgcctatttat

SEQ ID NO: 250053 - DNA, 25 bp, Probe sequence
gtcaagagcttgcactaacatcagt

SEQ ID NO: 250054 - DNA, 25 bp, Probe sequence
gtgacagtaaatgctatcgcacctg

SEQ ID NO: 250055 - DNA, 25 bp, Probe sequence
ggtgttttacaagatatgaaagacc

SEQ ID NO: 250056 - DNA, 25 bp, Probe sequence
ggtgacattaaatcattagactgtt

SEQ ID NO: 250057 - DNA, 25 bp, Probe sequence
ggtcagtctttatatggtgttttac

SEQ ID NO: 250058 - DNA, 25 bp, Probe sequence
ggtaatatggcaagtgagtggcaag

SEQ ID NO: 250059 - DNA, 25 bp, Probe sequence
ggttctggttcaattggttctgaga

SEQ ID NO: 250060 - DNA, 25 bp, Probe sequence
tgaggttgctcatacatgcgcctat

SEQ ID NO: 250061 - DNA, 25 bp, Probe sequence
tcatacatgcgcctatttatatcac

SEQ ID NO: 250062 - DNA, 25 bp, Probe sequence
taggtttcgttaaggcgcttagtca

SEQ ID NO: 250063 - DNA, 25 bp, Probe sequence
tatgtgcaatattatcgtactgata

SEQ ID NO: 250064 - DNA, 25 bp, Probe sequence
ttttaccgagtgaggttgctcatac

SEQ ID NO: 250065 - DNA, 25 bp, Probe sequence
ttttatacaagcggatttatctcaa

SEQ ID NO: 250066 - DNA, 25 bp, Probe sequence
atagaccgggtcttttaggtgatgt

SEQ ID NO: 250067 - DNA, 25 bp, Probe sequence
attattgatggtgcagttactgcca

SEQ ID NO: 250068 - DNA, 25 bp, Probe sequence
ataagttgattggcattagaggtat

SEQ ID NO: 250069 - DNA, 25 bp, Probe sequence
agaaaacctttcgatttgagcgtga

SEQ ID NO: 250070 - DNA, 25 bp, Probe sequence
agcgtgaagatttaggcttgttagt

SEQ ID NO: 250071 - DNA, 25 bp, Probe sequence
accagaattaagagaccgtcttgca

SEQ ID NO: 250072 - DNA, 25 bp, Probe sequence
aaacagacagtccaaagtaagaata

SEQ ID NO: 250073 - DNA, 25 bp, Probe sequence
aaaacaaactgtacgtagctctcta

SEQ ID NO: 250074 - DNA, 25 bp, Probe sequence
aactgtacgtagctctctaattaaa

SEQ ID NO: 250075 - DNA, 25 bp, Probe sequence
aacctttcgatttgagcgtgaagat

SEQ ID NO: 250076 - DNA, 25 bp, Probe sequence
caagtacttgtacaatggaagattt

SEQ ID NO: 250077 - DNA, 25 bp, Probe sequence
ctaatccaaaacatcaagagcttgt

SEQ ID NO: 250078 - DNA, 25 bp, Probe sequence
gccagagaatctaatccaaaacatc

SEQ ID NO: 250079 - DNA, 25 bp, Probe sequence
gaatcaattgttgcgggaagtgttt

SEQ ID NO: 250080 - DNA, 25 bp, Probe sequence
gaatggtacctagaatacgaaattg

SEQ ID NO: 250081 - DNA, 25 bp, Probe sequence
gaaggtcataagttgattggcatta

SEQ ID NO: 250082 - DNA, 25 bp, Probe sequence
gaagattttgactatattatcgaat

SEQ ID NO: 250083 - DNA, 25 bp, Probe sequence
gaaatgaagaaacagacagtccaaa

SEQ ID NO: 250084 - DNA, 25 bp, Probe sequence
gagcttgttaacgaagttatgacgt

SEQ ID NO: 250085 - DNA, 25 bp, Probe sequence
gagcaaatagctcgtggtataaatg

SEQ ID NO: 250086 - DNA, 25 bp, Probe sequence
gatggttatttattagttctacttt

SEQ ID NO: 250087 - DNA, 25 bp, Probe sequence
gatttaggcttgttagtagactttt

SEQ ID NO: 250088 - DNA, 25 bp, Probe sequence
gttgcgggaagtgtttgtgcacata

SEQ ID NO: 250089 - DNA, 25 bp, Probe sequence
gttgaacgttttgagcaaatagctc

SEQ ID NO: 250090 - DNA, 25 bp, Probe sequence
gttactgccagagaatctaatccaa

SEQ ID NO: 250091 - DNA, 25 bp, Probe sequence
gtattgttacaattaatggtgttga

SEQ ID NO: 250092 - DNA, 25 bp, Probe sequence
gtagctctctaattaaaggggaata

SEQ ID NO: 250093 - DNA, 25 bp, Probe sequence
gtagactttttagctgaattgttca

SEQ ID NO: 250094 - DNA, 25 bp, Probe sequence
gtgcagttactgccagagaatctaa

SEQ ID NO: 250095 - DNA, 25 bp, Probe sequence
gtgtttgtgcacataagagatggtt

SEQ ID NO: 250096 - DNA, 25 bp, Probe sequence
gggtcttttaggtgatgtatctagt

SEQ ID NO: 250097 - DNA, 25 bp, Probe sequence
ggggaatatgatgccaatcatgtat

SEQ ID NO: 250098 - DNA, 25 bp, Probe sequence
ggtgttgatcaaggtaaacgaggcc

SEQ ID NO: 250099 - DNA, 25 bp, Probe sequence
ggtgatgtatctagtttattaggta

SEQ ID NO: 250100 - DNA, 25 bp, Probe sequence
cggtcggtgaagcgctaaaaggtag

SEQ ID NO: 250101 - DNA, 25 bp, Probe sequence
attccatcgaaccaagccgaatggg

SEQ ID NO: 250102 - DNA, 25 bp, Probe sequence
attacagcgaaggatttattagaaa

SEQ ID NO: 250103 - DNA, 25 bp, Probe sequence
atgaaattccatcgaaccaagccga

SEQ ID NO: 250104 - DNA, 25 bp, Probe sequence
atgaattcgatcaactaccgaataa

SEQ ID NO: 250105 - DNA, 25 bp, Probe sequence
aggttaggaatgactttaacagaat

SEQ ID NO: 250106 - DNA, 25 bp, Probe sequence
aactttattgttatggatcatgtta

SEQ ID NO: 250107 - DNA, 25 bp, Probe sequence
aacgtgaaatgctagtgcatattga

SEQ ID NO: 250108 - DNA, 25 bp, Probe sequence
aaccaattaattcaagctcatcaag

SEQ ID NO: 250109 - DNA, 25 bp, Probe sequence
aatcaaaagagccaatacaattatt

SEQ ID NO: 250110 - DNA, 25 bp, Probe sequence
aataatgaattcgatcaactaccga

SEQ ID NO: 250111 - DNA, 25 bp, Probe sequence
caattaattcaagctcatcaagatg

SEQ ID NO: 250112 - DNA, 25 bp, Probe sequence
caactaccgaataaaaattacagcg

SEQ ID NO: 250113 - DNA, 25 bp, Probe sequence
cagaattagagcaacgtactggaat

SEQ ID NO: 250114 - DNA, 25 bp, Probe sequence
catcgaaccaagccgaatgggacga

SEQ ID NO: 250115 - DNA, 25 bp, Probe sequence
gccgaatgggacgaagtaattacag

SEQ ID NO: 250116 - DNA, 25 bp, Probe sequence
gcgtagtaaatattgaacctaacca

SEQ ID NO: 250117 - DNA, 25 bp, Probe sequence
gctcatcaagatgaaattccatcga

SEQ ID NO: 250118 - DNA, 25 bp, Probe sequence
gaaccaagccgaatgggacgaagta

SEQ ID NO: 250119 - DNA, 25 bp, Probe sequence
gaacctaaccaattaattcaagctc

SEQ ID NO: 250120 - DNA, 25 bp, Probe sequence
gaagcgctaaaaggtagacgtgaaa

SEQ ID NO: 250121 - DNA, 25 bp, Probe sequence
gaaattccatcgaaccaagccgaat

SEQ ID NO: 250122 - DNA, 25 bp, Probe sequence
gagccaatacaattattagtaatca

SEQ ID NO: 250123 - DNA, 25 bp, Probe sequence
gttatggatcatgttagttttaata

SEQ ID NO: 250124 - DNA, 25 bp, Probe sequence
gtagacgtgaaaggttaggaatgac

SEQ ID NO: 250125 - DNA, 25 bp, Probe sequence
gtactggaattaaacgtgaaatgct

SEQ ID NO: 250126 - DNA, 25 bp, Probe sequence
ggtgaagcgctaaaaggtagacgtg

SEQ ID NO: 250127 - DNA, 25 bp, Probe sequence
ggatcatgttagttttaatatttta

SEQ ID NO: 250128 - DNA, 25 bp, Probe sequence
ggacgaagtaattacagttttcaat

SEQ ID NO: 250129 - DNA, 25 bp, Probe sequence
tgaaaacggtcggtgaagcgctaaa

SEQ ID NO: 250130 - DNA, 25 bp, Probe sequence
taatcatgggtattacagttttaat

SEQ ID NO: 250131 - DNA, 25 bp, Probe sequence
ttagaaaatatgcaagcgtagtaaa

SEQ ID NO: 250132 - DNA, 25 bp, Probe sequence
ttagagcaacgtactggaattaaac

SEQ ID NO: 250133 - DNA, 25 bp, Probe sequence
ttgaaaacggtcggtgaagcgctaa

SEQ ID NO: 250134 - DNA, 25 bp, Probe sequence
attggcttcccttagcgattttgtt

SEQ ID NO: 250135 - DNA, 25 bp, Probe sequence
aggtgatccattggcaacattgatt

SEQ ID NO: 250136 - DNA, 25 bp, Probe sequence
actatcttatctggtattgaatact

SEQ ID NO: 250137 - DNA, 25 bp, Probe sequence
acattggcgttatttttactatctt

SEQ ID NO: 250138 - DNA, 25 bp, Probe sequence
aacagcagttactatggtagcaatt

SEQ ID NO: 250139 - DNA, 25 bp, Probe sequence
aattctgtagtagcaatcattatta

SEQ ID NO: 250140 - DNA, 25 bp, Probe sequence
cattgattggtttgtcattaggaca

SEQ ID NO: 250141 - DNA, 25 bp, Probe sequence
cccttagcgattttgttgatggtta

SEQ ID NO: 250142 - DNA, 25 bp, Probe sequence
ccagattacggtttttagagtagtg

SEQ ID NO: 250143 - DNA, 25 bp, Probe sequence
gcgattttgttgatggttatttagc

SEQ ID NO: 250144 - DNA, 25 bp, Probe sequence
gcttcccttagcgattttgttgatg

SEQ ID NO: 250145 - DNA, 25 bp, Probe sequence
gcaatgtgtcatttctaggaggata

SEQ ID NO: 250146 - DNA, 25 bp, Probe sequence
gaatattccgaaccagattacggtt

SEQ ID NO: 250147 - DNA, 25 bp, Probe sequence
gagaatttgccgtaactggtttacg

SEQ ID NO: 250148 - DNA, 25 bp, Probe sequence
gacaaattttattatacattggcgt

SEQ ID NO: 250149 - DNA, 25 bp, Probe sequence
gagtagtgttaataccagtttttat

SEQ ID NO: 250150 - DNA, 25 bp, Probe sequence
gagttattaatcagtggttttattt

SEQ ID NO: 250151 - DNA, 25 bp, Probe sequence
gataaattattagttgcaagtgctt

SEQ ID NO: 250152 - DNA, 25 bp, Probe sequence
gattttggatttggcaatgtgtcat

SEQ ID NO: 250153 - DNA, 25 bp, Probe sequence
gtttgcgttagttgattttggattt

SEQ ID NO: 250154 - DNA, 25 bp, Probe sequence
gtagcaatcattattattgccagag

SEQ ID NO: 250155 - DNA, 25 bp, Probe sequence
gtaagtgcagctggtcaattaggta

SEQ ID NO: 250156 - DNA, 25 bp, Probe sequence
gtgcagctggtcaattaggtaaaat

SEQ ID NO: 250157 - DNA, 25 bp, Probe sequence
ggtagcaattacttggttgttatta

SEQ ID NO: 250158 - DNA, 25 bp, Probe sequence
ggttgttattaggtgatccattggc

SEQ ID NO: 250159 - DNA, 25 bp, Probe sequence
ggaaatttttggatccattagcgga

SEQ ID NO: 250160 - DNA, 25 bp, Probe sequence
ggcgttatttttactatcttatctg

SEQ ID NO: 250161 - DNA, 25 bp, Probe sequence
tggcaacattgattggtttgtcatt

SEQ ID NO: 250162 - DNA, 25 bp, Probe sequence
taccagtttttatattgtttgcgtt

SEQ ID NO: 250163 - DNA, 25 bp, Probe sequence
tattagttgcaagtgctttaattgt

SEQ ID NO: 250164 - DNA, 25 bp, Probe sequence
tatattggcttcccttagcgatttt

SEQ ID NO: 250165 - DNA, 25 bp, Probe sequence
tatttttatattggcttcccttagc

SEQ ID NO: 250166 - DNA, 25 bp, Probe sequence
tattgccagagaatttgccgtaact

SEQ ID NO: 250167 - DNA, 25 bp, Probe sequence
ttacgtttactacaaattgaacaag

SEQ ID NO: 250168 - DNA, 25 bp, Probe sequence
attggtacagaaaatgtcttacaaa

SEQ ID NO: 250169 - DNA, 25 bp, Probe sequence
attctttccagttgaggcagtgaag

SEQ ID NO: 250170 - DNA, 25 bp, Probe sequence
agtgccggcagactccagagattta

SEQ ID NO: 250171 - DNA, 25 bp, Probe sequence
agaattgtttgaagctgataatgca

SEQ ID NO: 250172 - DNA, 25 bp, Probe sequence
agctggagaacctttaacgattaca

SEQ ID NO: 250173 - DNA, 25 bp, Probe sequence
acagatcctgatatgacaagatttt

SEQ ID NO: 250174 - DNA, 25 bp, Probe sequence
aaattaaagttctacattggtgatg

SEQ ID NO: 250175 - DNA, 25 bp, Probe sequence
aaagtcatatgtttatctacagata

SEQ ID NO: 250176 - DNA, 25 bp, Probe sequence
aactagttgttcatgcatttaagca

SEQ ID NO: 250177 - DNA, 25 bp, Probe sequence
aaggcagcgtatcctattaatgcta

SEQ ID NO: 250178 - DNA, 25 bp, Probe sequence
aatacacatattttaacggtggaag

SEQ ID NO: 250179 - DNA, 25 bp, Probe sequence
cgtattttttcacgcgatgagaaaa

SEQ ID NO: 250180 - DNA, 25 bp, Probe sequence
ccgtcatgtgaattctttccagttg

SEQ ID NO: 250181 - DNA, 25 bp, Probe sequence
gccggcagactccagagatttaaat

SEQ ID NO: 250182 - DNA, 25 bp, Probe sequence
gcgaccgcattattagaattgtttg

SEQ ID NO: 250183 - DNA, 25 bp, Probe sequence
gcacaatgtgaagatatgggtgatt

SEQ ID NO: 250184 - DNA, 25 bp, Probe sequence
gaatataactccgataatacacata

SEQ ID NO: 250185 - DNA, 25 bp, Probe sequence
gaatgattataaagcttcaatgaga

SEQ ID NO: 250186 - DNA, 25 bp, Probe sequence
gaacctttaacgattacagatcctg

SEQ ID NO: 250187 - DNA, 25 bp, Probe sequence
gaaacagcaatgcgagatgttgatt

SEQ ID NO: 250188 - DNA, 25 bp, Probe sequence
gaaatattcgtagtgaacaaacgct

SEQ ID NO: 250189 - DNA, 25 bp, Probe sequence
gaggcagtgaagacaaatattattg

SEQ ID NO: 250190 - DNA, 25 bp, Probe sequence
gattacgcaatcttatgaatataac

SEQ ID NO: 250191 - DNA, 25 bp, Probe sequence
gtattccatgcagcagctttaaaac

SEQ ID NO: 250192 - DNA, 25 bp, Probe sequence
gtaggggatcttgcgaccgcattat

SEQ ID NO: 250193 - DNA, 25 bp, Probe sequence
gtgatagtcaaagtgtagaaacagc

SEQ ID NO: 250194 - DNA, 25 bp, Probe sequence
gtgaattctttccagttgaggcagt

SEQ ID NO: 250195 - DNA, 25 bp, Probe sequence
gggatcttgcgaccgcattattaga

SEQ ID NO: 250196 - DNA, 25 bp, Probe sequence
gggtgattattttagagtgccggca

SEQ ID NO: 250197 - DNA, 25 bp, Probe sequence
ggatcattcggtaatgctgttatga

SEQ ID NO: 250198 - DNA, 25 bp, Probe sequence
ggcacaggatcattcggtaatgctg

SEQ ID NO: 250199 - DNA, 25 bp, Probe sequence
tctacagataaggcagcgtatccta

SEQ ID NO: 250200 - DNA, 25 bp, Probe sequence
tttagagtgccggcagactccagag

SEQ ID NO: 250201 - DNA, 25 bp, Probe sequence
ttatagtaattatgttgaaaccggt

SEQ ID NO: 250202 - DNA, 25 bp, Probe sequence
attgttgtcacattttataaaccat

SEQ ID NO: 250203 - DNA, 25 bp, Probe sequence
attatggttcagatgacacattaat

SEQ ID NO: 250204 - DNA, 25 bp, Probe sequence
atgaaccttttgtaatatatgatgg

SEQ ID NO: 250205 - DNA, 25 bp, Probe sequence
atgtgtcatcagcaattattctatt

SEQ ID NO: 250206 - DNA, 25 bp, Probe sequence
agcacaatcattgattcaacctgtt

SEQ ID NO: 250207 - DNA, 25 bp, Probe sequence
acagtggcccagattgttggtaaag

SEQ ID NO: 250208 - DNA, 25 bp, Probe sequence
acaggctttagtaattgaaggttca

SEQ ID NO: 250209 - DNA, 25 bp, Probe sequence
aaatcatcatggcatggctccagga

SEQ ID NO: 250210 - DNA, 25 bp, Probe sequence
aaacgatgttctaaagggtatgatt

SEQ ID NO: 250211 - DNA, 25 bp, Probe sequence
aacgaagcatacagtggcccagatt

SEQ ID NO: 250212 - DNA, 25 bp, Probe sequence
aatggtgctttatatcatcgattga

SEQ ID NO: 250213 - DNA, 25 bp, Probe sequence
caagaaattcttgatcgtattggag

SEQ ID NO: 250214 - DNA, 25 bp, Probe sequence
cagactaatcctacgattgcgcctt

SEQ ID NO: 250215 - DNA, 25 bp, Probe sequence
gcaaatgccgactcaaaagaacaag

SEQ ID NO: 250216 - DNA, 25 bp, Probe sequence
gaagtggatttaaacgatgttctaa

SEQ ID NO: 250217 - DNA, 25 bp, Probe sequence
gatggtattactaatggtgctttat

SEQ ID NO: 250218 - DNA, 25 bp, Probe sequence
gatgacacattaattgagcaagctg

SEQ ID NO: 250219 - DNA, 25 bp, Probe sequence
gatgagccttctttaaaatatattg

SEQ ID NO: 250220 - DNA, 25 bp, Probe sequence
gatgcagtgcaatttgttaataaat

SEQ ID NO: 250221 - DNA, 25 bp, Probe sequence
gatcttatcgataaacagactaatc

SEQ ID NO: 250222 - DNA, 25 bp, Probe sequence
gattgactgcaaatgccgactcaaa

SEQ ID NO: 250223 - DNA, 25 bp, Probe sequence
gtcaattgccattattgctgtaggc

SEQ ID NO: 250224 - DNA, 25 bp, Probe sequence
gtccaccgaaagaaatgcaaccaat

SEQ ID NO: 250225 - DNA, 25 bp, Probe sequence
ggtcctacgaaagatgacttaacga

SEQ ID NO: 250226 - DNA, 25 bp, Probe sequence
ggacaatttctatctaaagtattta

SEQ ID NO: 250227 - DNA, 25 bp, Probe sequence
ggacaagaaatgacacctaataata

SEQ ID NO: 250228 - DNA, 25 bp, Probe sequence
ggcatggctccaggaatgatggtga

SEQ ID NO: 250229 - DNA, 25 bp, Probe sequence
ggctcagaactattgctaggtcaaa

SEQ ID NO: 250230 - DNA, 25 bp, Probe sequence
tgctaggtcaaatcgctaataccaa

SEQ ID NO: 250231 - DNA, 25 bp, Probe sequence
tgctgtaggctcagaactattgcta

SEQ ID NO: 250232 - DNA, 25 bp, Probe sequence
taacaggtggcttaggtcctacgaa

SEQ ID NO: 250233 - DNA, 25 bp, Probe sequence
tattaccaggtccaccgaaagaaat

SEQ ID NO: 250234 - DNA, 25 bp, Probe sequence
tattctattagagtatgatggtgta

SEQ ID NO: 250235 - DNA, 25 bp, Probe sequence
tttagttattgatgagccttcttta

SEQ ID NO: 250236 - DNA, 25 bp, Probe sequence
aggtgccgtaatgaagttgggtgac

SEQ ID NO: 250237 - DNA, 25 bp, Probe sequence
atgcgctaggtgtaggtggctatcc

SEQ ID NO: 250238 - DNA, 25 bp, Probe sequence
aatttatggtcctgaaagttctggt

SEQ ID NO: 250239 - DNA, 25 bp, Probe sequence
agatgcaccaaagtcattatttgac

SEQ ID NO: 250240 - DNA, 25 bp, Probe sequence
agcgcttcacgctattgctgaagta

SEQ ID NO: 250241 - DNA, 25 bp, Probe sequence
aactttcaggtgctatttctaaatc

SEQ ID NO: 250242 - DNA, 25 bp, Probe sequence
aagctcgtttaatgtcacaagcgtt

SEQ ID NO: 250243 - DNA, 25 bp, Probe sequence
aatggcgaacgaatgggtcaaggta

SEQ ID NO: 250244 - DNA, 25 bp, Probe sequence
caagcgttacgtaaactttcaggtg

SEQ ID NO: 250245 - DNA, 25 bp, Probe sequence
ctcacgttggtttacaagctcgttt

SEQ ID NO: 250246 - DNA, 25 bp, Probe sequence
ctcagttgctgctttaacacctaaa

SEQ ID NO: 250247 - DNA, 25 bp, Probe sequence
cgatgctgaacatgctttagatcca

SEQ ID NO: 250248 - DNA, 25 bp, Probe sequence
gctcaagcattaggcgtagatatcg

SEQ ID NO: 250249 - DNA, 25 bp, Probe sequence
gaagtggtgcagttgatattgtagt

SEQ ID NO: 250250 - DNA, 25 bp, Probe sequence
gaagtacgtcgtgcagaacagctta

SEQ ID NO: 250251 - DNA, 25 bp, Probe sequence
gagaaatctttcggtaaaggtgccg

SEQ ID NO: 250252 - DNA, 25 bp, Probe sequence
gagactacaccaggtggacgtgcat

SEQ ID NO: 250253 - DNA, 25 bp, Probe sequence
gttcggtaatccagagactacacca

SEQ ID NO: 250254 - DNA, 25 bp, Probe sequence
gataacgatcgtcaaaaagctttag

SEQ ID NO: 250255 - DNA, 25 bp, Probe sequence
gttgggtgacaatataggtcgccga

SEQ ID NO: 250256 - DNA, 25 bp, Probe sequence
gtttcaactacatcaactggttcag

SEQ ID NO: 250257 - DNA, 25 bp, Probe sequence
gtaggtggctatcctaaaggacgaa

SEQ ID NO: 250258 - DNA, 25 bp, Probe sequence
gtagttgtagactcagttgctgctt

SEQ ID NO: 250259 - DNA, 25 bp, Probe sequence
gtaagacaacagtagcgcttcacgc

SEQ ID NO: 250260 - DNA, 25 bp, Probe sequence
gtggcaccaccatttagagtagctg

SEQ ID NO: 250261 - DNA, 25 bp, Probe sequence
ggtggacgtgcattaaaattctata

SEQ ID NO: 250262 - DNA, 25 bp, Probe sequence
ggatcatggtgaacaaggtcttgaa

SEQ ID NO: 250263 - DNA, 25 bp, Probe sequence
tggcggggtggcagcatttatcgat

SEQ ID NO: 250264 - DNA, 25 bp, Probe sequence
tgggagacactcacgttggtttaca

SEQ ID NO: 250265 - DNA, 25 bp, Probe sequence
taggtcgccgagtttcaactacatc

SEQ ID NO: 250266 - DNA, 25 bp, Probe sequence
tacaactgctattttcatcaaccaa

SEQ ID NO: 250267 - DNA, 25 bp, Probe sequence
tatatttatcgcaaccggatcatgg

SEQ ID NO: 250268 - DNA, 25 bp, Probe sequence
ttagatccagaatatgctcaagcat

SEQ ID NO: 250269 - DNA, 25 bp, Probe sequence
ttggtgttatgttcggtaatccaga

SEQ ID NO: 250270 - DNA, 25 bp, Probe sequence
attttccggatgaagcgccgggaat

SEQ ID NO: 250271 - DNA, 25 bp, Probe sequence
atttcatgactatgggtaatcacac

SEQ ID NO: 250272 - DNA, 25 bp, Probe sequence
atgccagatattgatgatcctttta

SEQ ID NO: 250273 - DNA, 25 bp, Probe sequence
atgatgaccatccattttcaacatt

SEQ ID NO: 250274 - DNA, 25 bp, Probe sequence
agcgctgttgttggaacgcatacac

SEQ ID NO: 250275 - DNA, 25 bp, Probe sequence
aaagcacatcgaacgtatattgata

SEQ ID NO: 250276 - DNA, 25 bp, Probe sequence
aacagaggtaattgagcgttttatc

SEQ ID NO: 250277 - DNA, 25 bp, Probe sequence
aatggtgtagatttcatgactatgg

SEQ ID NO: 250278 - DNA, 25 bp, Probe sequence
ctccgtttatatttgttgattttca

SEQ ID NO: 250279 - DNA, 25 bp, Probe sequence
gcatacacacattcaaacagcagat

SEQ ID NO: 250280 - DNA, 25 bp, Probe sequence
gcagatgaacgtattttaccaaagg

SEQ ID NO: 250281 - DNA, 25 bp, Probe sequence
gaagtgtattatctggtgttgttat

SEQ ID NO: 250282 - DNA, 25 bp, Probe sequence
gaagcacaagaacaaactccgttta

SEQ ID NO: 250283 - DNA, 25 bp, Probe sequence
gaagcgccgggaattggtatgagat

SEQ ID NO: 250284 - DNA, 25 bp, Probe sequence
gaaacgtacatacctcaactgaagc

SEQ ID NO: 250285 - DNA, 25 bp, Probe sequence
gacatgttgttccaaatgaaggtag

SEQ ID NO: 250286 - DNA, 25 bp, Probe sequence
gagcgttttatcactagtttgccac

SEQ ID NO: 250287 - DNA, 25 bp, Probe sequence
gatggtagagctagcgctgttgttg

SEQ ID NO: 250288 - DNA, 25 bp, Probe sequence
gttggaacgcatacacacattcaaa

SEQ ID NO: 250289 - DNA, 25 bp, Probe sequence
gttattaatctgcaaggaagagcgt

SEQ ID NO: 250290 - DNA, 25 bp, Probe sequence
gttttatcactagtttgccacaaag

SEQ ID NO: 250291 - DNA, 25 bp, Probe sequence
gtttgccacaaagacatgttgttcc

SEQ ID NO: 250292 - DNA, 25 bp, Probe sequence
gtataaaccaacagttacaattgta

SEQ ID NO: 250293 - DNA, 25 bp, Probe sequence
gtacatacctcaactgaagcaaaag

SEQ ID NO: 250294 - DNA, 25 bp, Probe sequence
gggatggcatttagatggtagagct

SEQ ID NO: 250295 - DNA, 25 bp, Probe sequence
gggtaatcacacatatggtcaacgt

SEQ ID NO: 250296 - DNA, 25 bp, Probe sequence
ggtaaaacaaagcacatcgaacgta

SEQ ID NO: 250297 - DNA, 25 bp, Probe sequence
ggtatataacggatgttggtatgac

SEQ ID NO: 250298 - DNA, 25 bp, Probe sequence
ggacgagacgcaattgaaacgtaca

SEQ ID NO: 250299 - DNA, 25 bp, Probe sequence
ggaagagcgtttatgccagatattg

SEQ ID NO: 250300 - DNA, 25 bp, Probe sequence
ggcagatcaattagtcaaggaagca

SEQ ID NO: 250301 - DNA, 25 bp, Probe sequence
tgattttcatgcagaaacaacttct

SEQ ID NO: 250302 - DNA, 25 bp, Probe sequence
tgaccatccattttcaacattttaa

SEQ ID NO: 250303 - DNA, 25 bp, Probe sequence
taggggatatcgtaggtaaaattgg

SEQ ID NO: 250304 - DNA, 25 bp, Probe sequence
attatcgtggaaagttggcggtcaa

SEQ ID NO: 250305 - DNA, 25 bp, Probe sequence
atgcactaccacatctatatatgat

SEQ ID NO: 250306 - DNA, 25 bp, Probe sequence
atgcacagcttattgaattaccttt

SEQ ID NO: 250307 - DNA, 25 bp, Probe sequence
atggtggagtcagagcgtttacggc

SEQ ID NO: 250308 - DNA, 25 bp, Probe sequence
agagcgtttacggctagtgctggtc

SEQ ID NO: 250309 - DNA, 25 bp, Probe sequence
agagtcaacagatgcactaccacat

SEQ ID NO: 250310 - DNA, 25 bp, Probe sequence
accagaaggatgtcatgcacagctt

SEQ ID NO: 250311 - DNA, 25 bp, Probe sequence
acgacgcctgttcatgcaattagtg

SEQ ID NO: 250312 - DNA, 25 bp, Probe sequence
acacctttcctaccacatgaaatcg

SEQ ID NO: 250313 - DNA, 25 bp, Probe sequence
acaatatcaatgccctgttatagtt

SEQ ID NO: 250314 - DNA, 25 bp, Probe sequence
aattgctgctgtaactatggctatt

SEQ ID NO: 250315 - DNA, 25 bp, Probe sequence
catccattcccaacaagcgttattc

SEQ ID NO: 250316 - DNA, 25 bp, Probe sequence
gctgatgccaaggctaaacctgtga

SEQ ID NO: 250317 - DNA, 25 bp, Probe sequence
gcaggttcacaatttatggcggcat

SEQ ID NO: 250318 - DNA, 25 bp, Probe sequence
gaattaccttttacagcaaccgcta

SEQ ID NO: 250319 - DNA, 25 bp, Probe sequence
gaatcgccagtagaagctaacttac

SEQ ID NO: 250320 - DNA, 25 bp, Probe sequence
gaagaaagtcgttgtagtggagcac

SEQ ID NO: 250321 - DNA, 25 bp, Probe sequence
gagcagttactaattgaatcgccag

SEQ ID NO: 250322 - DNA, 25 bp, Probe sequence
gattggtaacgatgccattggatta

SEQ ID NO: 250323 - DNA, 25 bp, Probe sequence
gtatgatgggacacctttcctacca

SEQ ID NO: 250324 - DNA, 25 bp, Probe sequence
gtgctggtccaggtttatctttaat

SEQ ID NO: 250325 - DNA, 25 bp, Probe sequence
gtggaccttctactggattacctac

SEQ ID NO: 250326 - DNA, 25 bp, Probe sequence
ggttatttcaagcgttatgcgttaa

SEQ ID NO: 250327 - DNA, 25 bp, Probe sequence
ggttgcaataggtgctactagcgca

SEQ ID NO: 250328 - DNA, 25 bp, Probe sequence
ggattatctggtatgactgaaacgc

SEQ ID NO: 250329 - DNA, 25 bp, Probe sequence
ggaggtattcatcatataactggtg

SEQ ID NO: 250330 - DNA, 25 bp, Probe sequence
tggcggtcaacaaggcgaaggtatt

SEQ ID NO: 250331 - DNA, 25 bp, Probe sequence
tcctattacacctgcgtctgaagtt

SEQ ID NO: 250332 - DNA, 25 bp, Probe sequence
tctttatatcggttttatttctaca

SEQ ID NO: 250333 - DNA, 25 bp, Probe sequence
tagacaattgcatccattcccaaca

SEQ ID NO: 250334 - DNA, 25 bp, Probe sequence
tagacatttttcaagtcgtatcaaa

SEQ ID NO: 250335 - DNA, 25 bp, Probe sequence
taggtgcaattgctgcaggttcaca

SEQ ID NO: 250336 - DNA, 25 bp, Probe sequence
ttatggcggcatatcctattacacc

SEQ ID NO: 250337 - DNA, 25 bp, Probe sequence
ttagagtttctacgacgcctgttca

SEQ ID NO: 250338 - DNA, 25 bp, Probe sequence
atcaccggtataggatgttctggcc

SEQ ID NO: 250339 - DNA, 25 bp, Probe sequence
attatcatctggtgccacatttgta

SEQ ID NO: 250340 - DNA, 25 bp, Probe sequence
ataatgttaagcctaactggtgccc

SEQ ID NO: 250341 - DNA, 25 bp, Probe sequence
atctggtgccacatttgtagcccaa

SEQ ID NO: 250342 - DNA, 25 bp, Probe sequence
atcgccgtcatcagcagtaggattt

SEQ ID NO: 250343 - DNA, 25 bp, Probe sequence
atgttctggccgtctttcaggatat

SEQ ID NO: 250344 - DNA, 25 bp, Probe sequence
acacatacgattggtttaaagaaca

SEQ ID NO: 250345 - DNA, 25 bp, Probe sequence
aagtagctatcatcaccggtatagg

SEQ ID NO: 250346 - DNA, 25 bp, Probe sequence
aattagcgactaaaactgttattga

SEQ ID NO: 250347 - DNA, 25 bp, Probe sequence
caattcaaaaagcagccgcaaatat

SEQ ID NO: 250348 - DNA, 25 bp, Probe sequence
caaacatcgccgtcatcagcagtag

SEQ ID NO: 250349 - DNA, 25 bp, Probe sequence
cagccgcaaatatagggttagaacc

SEQ ID NO: 250350 - DNA, 25 bp, Probe sequence
catttgtagcccaaggtttttcaag

SEQ ID NO: 250351 - DNA, 25 bp, Probe sequence
gcgttcattctattcacggacgtgc

SEQ ID NO: 250352 - DNA, 25 bp, Probe sequence
gaacatgaatctttagtaactggta

SEQ ID NO: 250353 - DNA, 25 bp, Probe sequence
gaaaaaaatgttgcgcctttagaat

SEQ ID NO: 250354 - DNA, 25 bp, Probe sequence
gacaaagggacaaacatcgccgtca

SEQ ID NO: 250355 - DNA, 25 bp, Probe sequence
gacgtgcattacctttagctcaagg

SEQ ID NO: 250356 - DNA, 25 bp, Probe sequence
gacgtatatagtcatggataatcaa

SEQ ID NO: 250357 - DNA, 25 bp, Probe sequence
gaggagatggtgatggttatgctat

SEQ ID NO: 250358 - DNA, 25 bp, Probe sequence
gttaatgtcttttcaccatgtgtga

SEQ ID NO: 250359 - DNA, 25 bp, Probe sequence
gtaactggtattgtttatcaagata

SEQ ID NO: 250360 - DNA, 25 bp, Probe sequence
gtcttttcaccatgtgtgacttata

SEQ ID NO: 250361 - DNA, 25 bp, Probe sequence
ggggcatacaatccatgctttaaga

SEQ ID NO: 250362 - DNA, 25 bp, Probe sequence
ggtatggggcatacaatccatgctt

SEQ ID NO: 250363 - DNA, 25 bp, Probe sequence
ggatgtggcgatttctcagtacaag

SEQ ID NO: 250364 - DNA, 25 bp, Probe sequence
ggatatattaattcttatggcgttc

SEQ ID NO: 250365 - DNA, 25 bp, Probe sequence
ggcgatttctcagtacaagctgcaa

SEQ ID NO: 250366 - DNA, 25 bp, Probe sequence
tggccgtctttcaggatatattaat

SEQ ID NO: 250367 - DNA, 25 bp, Probe sequence
tggtgccacatttgtagcccaaggt

SEQ ID NO: 250368 - DNA, 25 bp, Probe sequence
tagctcaaggtgtaaaaatggcgaa

SEQ ID NO: 250369 - DNA, 25 bp, Probe sequence
tatggcgttcattctattcacggac

SEQ ID NO: 250370 - DNA, 25 bp, Probe sequence
ttcacggacgtgcattacctttagc

SEQ ID NO: 250371 - DNA, 25 bp, Probe sequence
ttctcagtacaagctgcaattcaaa

SEQ ID NO: 250372 - DNA, 25 bp, Probe sequence
ataccttacgtagacgaggcgatta

SEQ ID NO: 250373 - DNA, 25 bp, Probe sequence
atgaatgtttaattttaatacaatc

SEQ ID NO: 250374 - DNA, 25 bp, Probe sequence
atgacaatgttataccttacgtaga

SEQ ID NO: 250375 - DNA, 25 bp, Probe sequence
atgttataccttacgtagacgaggc

SEQ ID NO: 250376 - DNA, 25 bp, Probe sequence
atgtccaagtattattagccaagtt

SEQ ID NO: 250377 - DNA, 25 bp, Probe sequence
aagttaagttttatcatgtgccaga

SEQ ID NO: 250378 - DNA, 25 bp, Probe sequence
aatgacaatgttataccttacgtag

SEQ ID NO: 250379 - DNA, 25 bp, Probe sequence
caatgttataccttacgtagacgag

SEQ ID NO: 250380 - DNA, 25 bp, Probe sequence
caatgacaatgttataccttacgta

SEQ ID NO: 250381 - DNA, 25 bp, Probe sequence
caagttaagttttatcatgtgccag

SEQ ID NO: 250382 - DNA, 25 bp, Probe sequence
cttacgtagacgaggcgattaaaat

SEQ ID NO: 250383 - DNA, 25 bp, Probe sequence
gccaagttaagttttatcatgtgcc

SEQ ID NO: 250384 - DNA, 25 bp, Probe sequence
gcattttagagtaggtccgttagaa

SEQ ID NO: 250385 - DNA, 25 bp, Probe sequence
gaatgtccaagtattattagccaag

SEQ ID NO: 250386 - DNA, 25 bp, Probe sequence
gaatggtggaacttgaatgtccaag

SEQ ID NO: 250387 - DNA, 25 bp, Probe sequence
gaacgaatggtggaacttgaatgtc

SEQ ID NO: 250388 - DNA, 25 bp, Probe sequence
gaaactttaactgaaaaatatgatg

SEQ ID NO: 250389 - DNA, 25 bp, Probe sequence
gaaacgacagtacaaggaaatatga

SEQ ID NO: 250390 - DNA, 25 bp, Probe sequence
gacaatgttataccttacgtagacg

SEQ ID NO: 250391 - DNA, 25 bp, Probe sequence
gacgaggcgattaaaataattgacg

SEQ ID NO: 250392 - DNA, 25 bp, Probe sequence
gttagaaacgacagtacaaggaaat

SEQ ID NO: 250393 - DNA, 25 bp, Probe sequence
gagtaggtccgttagaaacgacagt

SEQ ID NO: 250394 - DNA, 25 bp, Probe sequence
gttataccttacgtagacgaggcga

SEQ ID NO: 250395 - DNA, 25 bp, Probe sequence
tgtccaagtattattagccaagtta

SEQ ID NO: 250396 - DNA, 25 bp, Probe sequence
gtccaagtattattagccaagttaa

SEQ ID NO: 250397 - DNA, 25 bp, Probe sequence
ggtggaacttgaatgtccaagtatt

SEQ ID NO: 250398 - DNA, 25 bp, Probe sequence
ggtccgttagaaacgacagtacaag

SEQ ID NO: 250399 - DNA, 25 bp, Probe sequence
tgcattttagagtaggtccgttaga

SEQ ID NO: 250400 - DNA, 25 bp, Probe sequence
taaatgaacgaatggtggaacttga

SEQ ID NO: 250401 - DNA, 25 bp, Probe sequence
taccttacgtagacgaggcgattaa

SEQ ID NO: 250402 - DNA, 25 bp, Probe sequence
taggtccgttagaaacgacagtaca

SEQ ID NO: 250403 - DNA, 25 bp, Probe sequence
tataccttacgtagacgaggcgatt

SEQ ID NO: 250404 - DNA, 25 bp, Probe sequence
ttataccttacgtagacgaggcgat

SEQ ID NO: 250405 - DNA, 25 bp, Probe sequence
ttgaatgtccaagtattattagcca

SEQ ID NO: 250406 - DNA, 25 bp, Probe sequence
atcgcggtatggggaacgagcgtac

SEQ ID NO: 250407 - DNA, 25 bp, Probe sequence
aaagtccgtgaaggcaacattaaag

SEQ ID NO: 250408 - DNA, 25 bp, Probe sequence
aaactgtaacagtactttgtgaagg

SEQ ID NO: 250409 - DNA, 25 bp, Probe sequence
aagaacgacctgatattttaatcgg

SEQ ID NO: 250410 - DNA, 25 bp, Probe sequence
aagttctgtagatgttttagctgag

SEQ ID NO: 250411 - DNA, 25 bp, Probe sequence
aatggttgttgaagtatggtctaaa

SEQ ID NO: 250412 - DNA, 25 bp, Probe sequence
aatattcatcatttaccagaaattt

SEQ ID NO: 250413 - DNA, 25 bp, Probe sequence
cacaacgtgatggtacgcctgctgc

SEQ ID NO: 250414 - DNA, 25 bp, Probe sequence
catatccacttgccagttcaatctg

SEQ ID NO: 250415 - DNA, 25 bp, Probe sequence
gctggtatacttgaagcattaggct

SEQ ID NO: 250416 - DNA, 25 bp, Probe sequence
gcattaggctatcaagcaacgactg

SEQ ID NO: 250417 - DNA, 25 bp, Probe sequence
gcaacgactgatattaacactgcag

SEQ ID NO: 250418 - DNA, 25 bp, Probe sequence
gaagcatacttatctaaagcaatgg

SEQ ID NO: 250419 - DNA, 25 bp, Probe sequence
gaaataacgcttttaggtcaaaatg

SEQ ID NO: 250420 - DNA, 25 bp, Probe sequence
gacactgaggtcattgctggtatac

SEQ ID NO: 250421 - DNA, 25 bp, Probe sequence
gagttcgtttcacaacaagtcatcc

SEQ ID NO: 250422 - DNA, 25 bp, Probe sequence
gatggtacgcctgctgctaaaatga

SEQ ID NO: 250423 - DNA, 25 bp, Probe sequence
gatgaagtacgtgaacttgctcgtg

SEQ ID NO: 250424 - DNA, 25 bp, Probe sequence
gatgatcaggttcttgctggctaca

SEQ ID NO: 250425 - DNA, 25 bp, Probe sequence
gattgatgttatttcagagggtggt

SEQ ID NO: 250426 - DNA, 25 bp, Probe sequence
gttggtcattattcacaaatagcta

SEQ ID NO: 250427 - DNA, 25 bp, Probe sequence
gtatgtcacaagaagagtcagtagt

SEQ ID NO: 250428 - DNA, 25 bp, Probe sequence
gtagagccggaaatggtgattcaat

SEQ ID NO: 250429 - DNA, 25 bp, Probe sequence
gtgcgattagagaaaatgccgagaa

SEQ ID NO: 250430 - DNA, 25 bp, Probe sequence
gtgaacttgctcgtgaaggttacaa

SEQ ID NO: 250431 - DNA, 25 bp, Probe sequence
gggtcaatattatgtatggttgtga

SEQ ID NO: 250432 - DNA, 25 bp, Probe sequence
ggttcttgctggctacactgataaa

SEQ ID NO: 250433 - DNA, 25 bp, Probe sequence
ggcaacattaaagcatgggtcaata

SEQ ID NO: 250434 - DNA, 25 bp, Probe sequence
tggggaacgagcgtacatttttaat

SEQ ID NO: 250435 - DNA, 25 bp, Probe sequence
tgaaaatcttccaaaagtccgtgaa

SEQ ID NO: 250436 - DNA, 25 bp, Probe sequence
tagcgattccaagagttcgtttcac

SEQ ID NO: 250437 - DNA, 25 bp, Probe sequence
tttcagagggtggtaatatcgttcc

SEQ ID NO: 250438 - DNA, 25 bp, Probe sequence
ttcacaacaagtcatccttgggact

SEQ ID NO: 250439 - DNA, 25 bp, Probe sequence
ttggttttgaacatgcatatacgta

SEQ ID NO: 250440 - DNA, 25 bp, Probe sequence
attgcccatagttgaacagtttcaa

SEQ ID NO: 250441 - DNA, 25 bp, Probe sequence
attacgggaaacaaaatgcgctaga

SEQ ID NO: 250442 - DNA, 25 bp, Probe sequence
ataaatacattgcccatagttgaac

SEQ ID NO: 250443 - DNA, 25 bp, Probe sequence
atacattgcccatagttgaacagtt

SEQ ID NO: 250444 - DNA, 25 bp, Probe sequence
agttgaacagtttcaaacttcacaa

SEQ ID NO: 250445 - DNA, 25 bp, Probe sequence
agcacagattcatcagaaccaaacg

SEQ ID NO: 250446 - DNA, 25 bp, Probe sequence
acatatcaacaaattgaagcacaga

SEQ ID NO: 250447 - DNA, 25 bp, Probe sequence
acagattcatcagaaccaaacgata

SEQ ID NO: 250448 - DNA, 25 bp, Probe sequence
aaatacattgcccatagttgaacag

SEQ ID NO: 250449 - DNA, 25 bp, Probe sequence
aaaatgcgctagaacagtcggaaca

SEQ ID NO: 250450 - DNA, 25 bp, Probe sequence
aaagcatcaaaaacaagcagtaaac

SEQ ID NO: 250451 - DNA, 25 bp, Probe sequence
aacaaaatgcgctagaacagtcgga

SEQ ID NO: 250452 - DNA, 25 bp, Probe sequence
aatgcgctagaacagtcggaacata

SEQ ID NO: 250453 - DNA, 25 bp, Probe sequence
caagcagtaaactttcaaaattacg

SEQ ID NO: 250454 - DNA, 25 bp, Probe sequence
caaacttcacaatatgaagcgaatc

SEQ ID NO: 250455 - DNA, 25 bp, Probe sequence
cattgcccatagttgaacagtttca

SEQ ID NO: 250456 - DNA, 25 bp, Probe sequence
gcccatagttgaacagtttcaaact

SEQ ID NO: 250457 - DNA, 25 bp, Probe sequence
gcgctagaacagtcggaacatacca

SEQ ID NO: 250458 - DNA, 25 bp, Probe sequence
gctagaacagtcggaacataccatt

SEQ ID NO: 250459 - DNA, 25 bp, Probe sequence
gcacagattcatcagaaccaaacga

SEQ ID NO: 250460 - DNA, 25 bp, Probe sequence
gaagcagaaataaatacattgccca

SEQ ID NO: 250461 - DNA, 25 bp, Probe sequence
gaagcacagattcatcagaaccaaa

SEQ ID NO: 250462 - DNA, 25 bp, Probe sequence
gaaataaatacattgcccatagttg

SEQ ID NO: 250463 - DNA, 25 bp, Probe sequence
gattcatcagaaccaaacgataaag

SEQ ID NO: 250464 - DNA, 25 bp, Probe sequence
gtttaaatgaccataataaagccaa

SEQ ID NO: 250465 - DNA, 25 bp, Probe sequence
gtatcaacaatggaaacacgtttaa

SEQ ID NO: 250466 - DNA, 25 bp, Probe sequence
ggatactatcaaaacatatcaacaa

SEQ ID NO: 250467 - DNA, 25 bp, Probe sequence
ggaaacacgtttaaatgaccataat

SEQ ID NO: 250468 - DNA, 25 bp, Probe sequence
ggaaacaaaatgcgctagaacagtc

SEQ ID NO: 250469 - DNA, 25 bp, Probe sequence
tgtataataaagatgacgtgttgaa

SEQ ID NO: 250470 - DNA, 25 bp, Probe sequence
tgcgctagaacagtcggaacatacc

SEQ ID NO: 250471 - DNA, 25 bp, Probe sequence
tcagaaccaaacgataaagactaaa

SEQ ID NO: 250472 - DNA, 25 bp, Probe sequence
tacattgcccatagttgaacagttt

SEQ ID NO: 250473 - DNA, 25 bp, Probe sequence
tagaacagtcggaacataccattca

SEQ ID NO: 250474 - DNA, 25 bp, Probe sequence
atggccgcggtcggtgaagtacttg

SEQ ID NO: 250475 - DNA, 25 bp, Probe sequence
atttccttgggcttcaagacttctt

SEQ ID NO: 250476 - DNA, 25 bp, Probe sequence
atttgtataccattagcatatttcc

SEQ ID NO: 250477 - DNA, 25 bp, Probe sequence
ataactgcacttttaattgcaataa

SEQ ID NO: 250478 - DNA, 25 bp, Probe sequence
atcggatctattataagttatttct

SEQ ID NO: 250479 - DNA, 25 bp, Probe sequence
aggcagcaccagtacagcattttgt

SEQ ID NO: 250480 - DNA, 25 bp, Probe sequence
aggtccttggtatggattagctcaa

SEQ ID NO: 250481 - DNA, 25 bp, Probe sequence
agtctcaagtgctatcggatctatt

SEQ ID NO: 250482 - DNA, 25 bp, Probe sequence
agaaaactggctataactgcacttt

SEQ ID NO: 250483 - DNA, 25 bp, Probe sequence
accattagcatatttccttgggctt

SEQ ID NO: 250484 - DNA, 25 bp, Probe sequence
actggctataactgcacttttaatt

SEQ ID NO: 250485 - DNA, 25 bp, Probe sequence
cattcctctaggaccagttaaggca

SEQ ID NO: 250486 - DNA, 25 bp, Probe sequence
cttgggcttcaagacttcttcatta

SEQ ID NO: 250487 - DNA, 25 bp, Probe sequence
gcggtcggtgaagtacttggaactg

SEQ ID NO: 250488 - DNA, 25 bp, Probe sequence
gctcaagcgcttatatcatcaattt

SEQ ID NO: 250489 - DNA, 25 bp, Probe sequence
gcttcaagacttcttcattaaaccg

SEQ ID NO: 250490 - DNA, 25 bp, Probe sequence
gcagtattatcatcattcctctagg

SEQ ID NO: 250491 - DNA, 25 bp, Probe sequence
gcaccagtacagcattttgtaaatg

SEQ ID NO: 250492 - DNA, 25 bp, Probe sequence
gattacgttcatagtctcaagtgct

SEQ ID NO: 250493 - DNA, 25 bp, Probe sequence
gtattatcatcattcctctaggacc

SEQ ID NO: 250494 - DNA, 25 bp, Probe sequence
gtagtatgattggagttttattggc

SEQ ID NO: 250495 - DNA, 25 bp, Probe sequence
gtacttggaactggtgtcatcggaa

SEQ ID NO: 250496 - DNA, 25 bp, Probe sequence
gtaaatgtattaagtgcggtcatag

SEQ ID NO: 250497 - DNA, 25 bp, Probe sequence
gtgcggtcatagtaggtccttggta

SEQ ID NO: 250498 - DNA, 25 bp, Probe sequence
gtgtcatcggaagtttaatttgtat

SEQ ID NO: 250499 - DNA, 25 bp, Probe sequence
ggtatggattagctcaagcgcttat

SEQ ID NO: 250500 - DNA, 25 bp, Probe sequence
ggagttttattggctagtatgtttt

SEQ ID NO: 250501 - DNA, 25 bp, Probe sequence
ggaccagttaaggcagcaccagtac

SEQ ID NO: 250502 - DNA, 25 bp, Probe sequence
ggaactggtgtcatcggaagtttaa

SEQ ID NO: 250503 - DNA, 25 bp, Probe sequence
ggctagtatgttttacatatatcgt

SEQ ID NO: 250504 - DNA, 25 bp, Probe sequence
taagcagtattatcatcattcctct

SEQ ID NO: 250505 - DNA, 25 bp, Probe sequence
tatcatcattcctctaggaccagtt

SEQ ID NO: 250506 - DNA, 25 bp, Probe sequence
tatcatcaattttaagagttctttt

SEQ ID NO: 250507 - DNA, 25 bp, Probe sequence
ttagcatatttccttgggcttcaag

SEQ ID NO: 250508 - DNA, 25 bp, Probe sequence
acaagttcaaacagtcacgtctcga

SEQ ID NO: 250509 - DNA, 25 bp, Probe sequence
atggcaatacggtttatatttatcg

SEQ ID NO: 250510 - DNA, 25 bp, Probe sequence
agtggtgtaagccgaattataactc

SEQ ID NO: 250511 - DNA, 25 bp, Probe sequence
agtacgtatttaagctatctaccta

SEQ ID NO: 250512 - DNA, 25 bp, Probe sequence
agttatcccttacttatgaatgtgg

SEQ ID NO: 250513 - DNA, 25 bp, Probe sequence
aactacgtggatgatatcgtcgctg

SEQ ID NO: 250514 - DNA, 25 bp, Probe sequence
aagctatctacctagtacagacttt

SEQ ID NO: 250515 - DNA, 25 bp, Probe sequence
caaacagtcacgtctcgatcgaaca

SEQ ID NO: 250516 - DNA, 25 bp, Probe sequence
catgtacttgatatattaactagaa

SEQ ID NO: 250517 - DNA, 25 bp, Probe sequence
cgatattattatcgtcttcaataca

SEQ ID NO: 250518 - DNA, 25 bp, Probe sequence
ccggatcgtggtcaagtttctgtaa

SEQ ID NO: 250519 - DNA, 25 bp, Probe sequence
gccagatacgtatttcttggaggta

SEQ ID NO: 250520 - DNA, 25 bp, Probe sequence
gccgaagagtatggcaatacggttt

SEQ ID NO: 250521 - DNA, 25 bp, Probe sequence
tctagtcgtatcaggtaaaggggta

SEQ ID NO: 250522 - DNA, 25 bp, Probe sequence
gcaacacaagataatccttatggtg

SEQ ID NO: 250523 - DNA, 25 bp, Probe sequence
gaatttataaaaacaccggatcgtg

SEQ ID NO: 250524 - DNA, 25 bp, Probe sequence
gaagttgtagacataccagtaggat

SEQ ID NO: 250525 - DNA, 25 bp, Probe sequence
gaacattgccgaaattagataactt

SEQ ID NO: 250526 - DNA, 25 bp, Probe sequence
gaaaaatttctagtcgtatcaggta

SEQ ID NO: 250527 - DNA, 25 bp, Probe sequence
gaaatgtttgatccaaatcagccag

SEQ ID NO: 250528 - DNA, 25 bp, Probe sequence
gacataccagtaggatacacacata

SEQ ID NO: 250529 - DNA, 25 bp, Probe sequence
gatccaaatcagccagatacgtatt

SEQ ID NO: 250530 - DNA, 25 bp, Probe sequence
gatatggtaactattatgtgggtga

SEQ ID NO: 250531 - DNA, 25 bp, Probe sequence
gtctcgatcgaacattgccgaaatt

SEQ ID NO: 250532 - DNA, 25 bp, Probe sequence
gtacagactttagttatcccttact

SEQ ID NO: 250533 - DNA, 25 bp, Probe sequence
gtcacgtctcgatcgaacattgccg

SEQ ID NO: 250534 - DNA, 25 bp, Probe sequence
gtgagttatttagatcatgtacttg

SEQ ID NO: 250535 - DNA, 25 bp, Probe sequence
gtgatagcaacattttgttacaaaa

SEQ ID NO: 250536 - DNA, 25 bp, Probe sequence
gtggatgatatcgtcgctgaaataa

SEQ ID NO: 250537 - DNA, 25 bp, Probe sequence
ggtcaagtttctgtaaatatttcta

SEQ ID NO: 250538 - DNA, 25 bp, Probe sequence
ggtaattcgttttagacatgttaat

SEQ ID NO: 250539 - DNA, 25 bp, Probe sequence
tatcgtcttcaatacaagcaacaca

SEQ ID NO: 250540 - DNA, 25 bp, Probe sequence
tattttcgaagtacatcgacaaact

SEQ ID NO: 250541 - DNA, 25 bp, Probe sequence
ttgcacgtaacgaagagattcaagt

SEQ ID NO: 250542 - DNA, 25 bp, Probe sequence
caattccgatgtgtggtgttccgta

SEQ ID NO: 250543 - DNA, 25 bp, Probe sequence
attcaacttaaacattccatttctg

SEQ ID NO: 250544 - DNA, 25 bp, Probe sequence
attacaggtccgaatatgtctggta

SEQ ID NO: 250545 - DNA, 25 bp, Probe sequence
atcaattatttgttcagctacgtga

SEQ ID NO: 250546 - DNA, 25 bp, Probe sequence
agattgtttacagagctttgcagaa

SEQ ID NO: 250547 - DNA, 25 bp, Probe sequence
actatgtgcctaataattgtcgatt

SEQ ID NO: 250548 - DNA, 25 bp, Probe sequence
aaaggtgaacttatattcttgcata

SEQ ID NO: 250549 - DNA, 25 bp, Probe sequence
aaaatgttcacgtcgctgctaatga

SEQ ID NO: 250550 - DNA, 25 bp, Probe sequence
aacgttattttcaacacattatcat

SEQ ID NO: 250551 - DNA, 25 bp, Probe sequence
aagcgagtttgaagcgtctgctggt

SEQ ID NO: 250552 - DNA, 25 bp, Probe sequence
cgaaaacaccaatgggagcacgccg

SEQ ID NO: 250553 - DNA, 25 bp, Probe sequence
cgtggtacttcaacgtatgacggtt

SEQ ID NO: 250554 - DNA, 25 bp, Probe sequence
gcgtctgctggtaaaaaatcatcga

SEQ ID NO: 250555 - DNA, 25 bp, Probe sequence
gaatttagtgctcatttcatagaaa

SEQ ID NO: 250556 - DNA, 25 bp, Probe sequence
gaatcaacctgaaattgcgcttagt

SEQ ID NO: 250557 - DNA, 25 bp, Probe sequence
gaagatatcattttaggtgcggaag

SEQ ID NO: 250558 - DNA, 25 bp, Probe sequence
gaacgtcttgttgggcgtgttagtt

SEQ ID NO: 250559 - DNA, 25 bp, Probe sequence
gaaacaactgatactttatctcaaa

SEQ ID NO: 250560 - DNA, 25 bp, Probe sequence
gacaacattagatcaagcattacca

SEQ ID NO: 250561 - DNA, 25 bp, Probe sequence
gacggtttagctttagcgcaggcaa

SEQ ID NO: 250562 - DNA, 25 bp, Probe sequence
gagcttatgtcccttgtaaagaggc

SEQ ID NO: 250563 - DNA, 25 bp, Probe sequence
gagacaagttgccataattagtata

SEQ ID NO: 250564 - DNA, 25 bp, Probe sequence
gatggtgcagttgacgatagttatg

SEQ ID NO: 250565 - DNA, 25 bp, Probe sequence
gtagaagaaccaccaatttcagtta

SEQ ID NO: 250566 - DNA, 25 bp, Probe sequence
gtggaatctaggcacccagtagtgg

SEQ ID NO: 250567 - DNA, 25 bp, Probe sequence
ggtgcggcagatgatttggtttcag

SEQ ID NO: 250568 - DNA, 25 bp, Probe sequence
ggaactgtgatggagcaaggtggtg

SEQ ID NO: 250569 - DNA, 25 bp, Probe sequence
ggcccaaatgggagcttatgtccct

SEQ ID NO: 250570 - DNA, 25 bp, Probe sequence
tggtgttccgtatcattctgcagat

SEQ ID NO: 250571 - DNA, 25 bp, Probe sequence
tgccaaggaggcatcacgtgtactt

SEQ ID NO: 250572 - DNA, 25 bp, Probe sequence
tgcgcttagttactgtgatgtttct

SEQ ID NO: 250573 - DNA, 25 bp, Probe sequence
taagaattgtgactccaggaactgt

SEQ ID NO: 250574 - DNA, 25 bp, Probe sequence
tagaaataacacgtgccaacttgca

SEQ ID NO: 250575 - DNA, 25 bp, Probe sequence
ttcgatgaaattggacgtggtactt

SEQ ID NO: 250576 - DNA, 25 bp, Probe sequence
aggattccgtggtgaagcactagcc

SEQ ID NO: 250577 - DNA, 25 bp, Probe sequence
agtagaggaatctggcgtccaatct

SEQ ID NO: 250578 - DNA, 25 bp, Probe sequence
atccagtttggttccctaaagatga

SEQ ID NO: 250579 - DNA, 25 bp, Probe sequence
atgctatagatgcaggcgctacaga

SEQ ID NO: 250580 - DNA, 25 bp, Probe sequence
agtagacgtaaatgttcatccaaca

SEQ ID NO: 250581 - DNA, 25 bp, Probe sequence
agatgtagcaatcatgatgtcatgt

SEQ ID NO: 250582 - DNA, 25 bp, Probe sequence
agaccctaaacgaagaattccatat

SEQ ID NO: 250583 - DNA, 25 bp, Probe sequence
agaactccaaacctcattagcaaat

SEQ ID NO: 250584 - DNA, 25 bp, Probe sequence
aaaatcgcagcaggtgaagtagttg

SEQ ID NO: 250585 - DNA, 25 bp, Probe sequence
aatggatccaatcttagtagacgta

SEQ ID NO: 250586 - DNA, 25 bp, Probe sequence
catccggacattcgaatagcactca

SEQ ID NO: 250587 - DNA, 25 bp, Probe sequence
gccagtatttcatcagttgctaaag

SEQ ID NO: 250588 - DNA, 25 bp, Probe sequence
gcggaagatccatttacatgtccac

SEQ ID NO: 250589 - DNA, 25 bp, Probe sequence
gaatagcactcatttcagatggcaa

SEQ ID NO: 250590 - DNA, 25 bp, Probe sequence
gaaggttttgttgcaaagcctgaac

SEQ ID NO: 250591 - DNA, 25 bp, Probe sequence
gaaggctatcatacactcttaacaa

SEQ ID NO: 250592 - DNA, 25 bp, Probe sequence
gaagcactagccagtatttcatcag

SEQ ID NO: 250593 - DNA, 25 bp, Probe sequence
gaaagttgcacgagatttagtacat

SEQ ID NO: 250594 - DNA, 25 bp, Probe sequence
gaaagaccgagttctgttgtgaaag

SEQ ID NO: 250595 - DNA, 25 bp, Probe sequence
gagcttcaacaagtaggtatcatgt

SEQ ID NO: 250596 - DNA, 25 bp, Probe sequence
gattgaccagcatgcagctcaagaa

SEQ ID NO: 250597 - DNA, 25 bp, Probe sequence
gattcatataatccattcgtaacga

SEQ ID NO: 250598 - DNA, 25 bp, Probe sequence
gttgcaaagcctgaacattctagaa

SEQ ID NO: 250599 - DNA, 25 bp, Probe sequence
gttagaacattttggtggtcatgat

SEQ ID NO: 250600 - DNA, 25 bp, Probe sequence
gtatttcatagacatgcgactagta

SEQ ID NO: 250601 - DNA, 25 bp, Probe sequence
gtagctatccagtttggttccctaa

SEQ ID NO: 250602 - DNA, 25 bp, Probe sequence
gtaacattgaagacttgcacggata

SEQ ID NO: 250603 - DNA, 25 bp, Probe sequence
ggcgtccaatctattcgcgtagtcg

SEQ ID NO: 250604 - DNA, 25 bp, Probe sequence
tggcatgtacatgattgaccagcat

SEQ ID NO: 250605 - DNA, 25 bp, Probe sequence
taagcactatatttctatttttatt

SEQ ID NO: 250606 - DNA, 25 bp, Probe sequence
taggtaggttcccgatttgttatat

SEQ ID NO: 250607 - DNA, 25 bp, Probe sequence
tattttataatacaccagcacgttt

SEQ ID NO: 250608 - DNA, 25 bp, Probe sequence
tattaatcccgttaacatttcattt

SEQ ID NO: 250609 - DNA, 25 bp, Probe sequence
ttacatgtccacatggtcgtccaat

SEQ ID NO: 250610 - DNA, 25 bp, Probe sequence
attgctgaagcaaaatcatatagag

SEQ ID NO: 250611 - DNA, 25 bp, Probe sequence
agagtgttttattcatatagatttg

SEQ ID NO: 250612 - DNA, 25 bp, Probe sequence
acaagtcattgcaggtggcctaatt

SEQ ID NO: 250613 - DNA, 25 bp, Probe sequence
aaatcatatagagtgttttattcat

SEQ ID NO: 250614 - DNA, 25 bp, Probe sequence
aacacacaagtcattgcaggtggcc

SEQ ID NO: 250615 - DNA, 25 bp, Probe sequence
aacaaacacacaagtcattgcaggt

SEQ ID NO: 250616 - DNA, 25 bp, Probe sequence
aagcgattcatcatattcagaaaga

SEQ ID NO: 250617 - DNA, 25 bp, Probe sequence
aagtcattgcaggtggcctaattaa

SEQ ID NO: 250618 - DNA, 25 bp, Probe sequence
aagtattatggaattgctgaagcaa

SEQ ID NO: 250619 - DNA, 25 bp, Probe sequence
aagtgaataacaacatattgcctgc

SEQ ID NO: 250620 - DNA, 25 bp, Probe sequence
aatgtgtgtgcttctagatatgcat

SEQ ID NO: 250621 - DNA, 25 bp, Probe sequence
gaacctgattttgttgaagtacttc

SEQ ID NO: 250622 - DNA, 25 bp, Probe sequence
cacacaagtcattgcaggtggccta

SEQ ID NO: 250623 - DNA, 25 bp, Probe sequence
cacgatgaatttgcaagtgaattta

SEQ ID NO: 250624 - DNA, 25 bp, Probe sequence
gcgagtaaagcgattcatcatattc

SEQ ID NO: 250625 - DNA, 25 bp, Probe sequence
gcattgaaacgcagtatagatttga

SEQ ID NO: 250626 - DNA, 25 bp, Probe sequence
gaatttattattcagcaatacaagc

SEQ ID NO: 250627 - DNA, 25 bp, Probe sequence
gaagctgttaaaaatggagcgaaat

SEQ ID NO: 250628 - DNA, 25 bp, Probe sequence
gaaacgcagtatagatttgataaaa

SEQ ID NO: 250629 - DNA, 25 bp, Probe sequence
gaaagaaacaaacacacaagtcatt

SEQ ID NO: 250630 - DNA, 25 bp, Probe sequence
gatagtcaagcattgaaacgcagta

SEQ ID NO: 250631 - DNA, 25 bp, Probe sequence
gattcatcatattcagaaagaaaca

SEQ ID NO: 250632 - DNA, 25 bp, Probe sequence
gttgcgagtaaagcgattcatcata

SEQ ID NO: 250633 - DNA, 25 bp, Probe sequence
gtatcgactaaatctaaagtaataa

SEQ ID NO: 250634 - DNA, 25 bp, Probe sequence
gtaaagcgattcatcatattcagaa

SEQ ID NO: 250635 - DNA, 25 bp, Probe sequence
gtcaagcattgaaacgcagtataga

SEQ ID NO: 250636 - DNA, 25 bp, Probe sequence
gtcattgcaggtggcctaattaata

SEQ ID NO: 250637 - DNA, 25 bp, Probe sequence
gtgcttctagatatgcatataggac

SEQ ID NO: 250638 - DNA, 25 bp, Probe sequence
gtgtgtgcttctagatatgcatata

SEQ ID NO: 250639 - DNA, 25 bp, Probe sequence
ggtggcctaattaatacaatagatg

SEQ ID NO: 250640 - DNA, 25 bp, Probe sequence
ggtgttgcgagtaaagcgattcatc

SEQ ID NO: 250641 - DNA, 25 bp, Probe sequence
tgcaggtggcctaattaatacaata

SEQ ID NO: 250642 - DNA, 25 bp, Probe sequence
taaaatgtgtgtgcttctagatatg

SEQ ID NO: 250643 - DNA, 25 bp, Probe sequence
tattcagcaatacaagccaaaaggt

SEQ ID NO: 250644 - DNA, 25 bp, Probe sequence
atcacagctggatggggattagcgg

SEQ ID NO: 250645 - DNA, 25 bp, Probe sequence
atgtatatttagcagaattcctagg

SEQ ID NO: 250646 - DNA, 25 bp, Probe sequence
aggcggtgctactggttatgcaatc

SEQ ID NO: 250647 - DNA, 25 bp, Probe sequence
aggtccgagaattgcacatgcgatt

SEQ ID NO: 250648 - DNA, 25 bp, Probe sequence
aggtggttcaaattggtcatatgca

SEQ ID NO: 250649 - DNA, 25 bp, Probe sequence
aaattaggtgttttctctacagcac

SEQ ID NO: 250650 - DNA, 25 bp, Probe sequence
aaatcctttaattgtcggagcatta

SEQ ID NO: 250651 - DNA, 25 bp, Probe sequence
caattgccggtggtttattaggtgc

SEQ ID NO: 250652 - DNA, 25 bp, Probe sequence
caggtgcacatttaaacccagcggt

SEQ ID NO: 250653 - DNA, 25 bp, Probe sequence
cggtgtctttagctcttgcattaga

SEQ ID NO: 250654 - DNA, 25 bp, Probe sequence
cccagcacgtgatttaggtccgaga

SEQ ID NO: 250655 - DNA, 25 bp, Probe sequence
gcacatgcgattttaccaatagctg

SEQ ID NO: 250656 - DNA, 25 bp, Probe sequence
gaattcctaggaactgcaatcttaa

SEQ ID NO: 250657 - DNA, 25 bp, Probe sequence
gcaattgttgtagttattattactt

SEQ ID NO: 250658 - DNA, 25 bp, Probe sequence
gaagtgctgcgaatggtgctgattg

SEQ ID NO: 250659 - DNA, 25 bp, Probe sequence
gaatggtgctgattggattgtcatc

SEQ ID NO: 250660 - DNA, 25 bp, Probe sequence
gaactgcaatcttaatcctttttgg

SEQ ID NO: 250661 - DNA, 25 bp, Probe sequence
gaacaatggcattaactttaggtat

SEQ ID NO: 250662 - DNA, 25 bp, Probe sequence
gattggtcattagttcctggttata

SEQ ID NO: 250663 - DNA, 25 bp, Probe sequence
gattggattgtcatcacagctggat

SEQ ID NO: 250664 - DNA, 25 bp, Probe sequence
gttcctggttatattgttgctcaaa

SEQ ID NO: 250665 - DNA, 25 bp, Probe sequence
gttatgcaatcaacccagcacgtga

SEQ ID NO: 250666 - DNA, 25 bp, Probe sequence
gtcatatgcaatcgttcctatctta

SEQ ID NO: 250667 - DNA, 25 bp, Probe sequence
ggggattagcggttacaatgggtgt

SEQ ID NO: 250668 - DNA, 25 bp, Probe sequence
ggtggtggcgtttgtgccaatgtca

SEQ ID NO: 250669 - DNA, 25 bp, Probe sequence
ggattaagtttaggcggtgctactg

SEQ ID NO: 250670 - DNA, 25 bp, Probe sequence
ggcgtttgtgccaatgtcaatttaa

SEQ ID NO: 250671 - DNA, 25 bp, Probe sequence
tgtatggttaatgtacttgccacat

SEQ ID NO: 250672 - DNA, 25 bp, Probe sequence
tcctatcttaggaccaattgccggt

SEQ ID NO: 250673 - DNA, 25 bp, Probe sequence
taatcctttttggtggtggcgtttg

SEQ ID NO: 250674 - DNA, 25 bp, Probe sequence
tattactttgattttaggttacatt

SEQ ID NO: 250675 - DNA, 25 bp, Probe sequence
tattggttgtgcaattgcaattgtt

SEQ ID NO: 250676 - DNA, 25 bp, Probe sequence
ttaaacccagcggtgtctttagctc

SEQ ID NO: 250677 - DNA, 25 bp, Probe sequence
ttgtcggagcattaattgttgcaat

SEQ ID NO: 250678 - DNA, 25 bp, Probe sequence
atgttaccaaactcgtgacgttatg

SEQ ID NO: 250679 - DNA, 25 bp, Probe sequence
agacattgttaatacttctgttgaa

SEQ ID NO: 250680 - DNA, 25 bp, Probe sequence
agacaattgattaccacttctatgg

SEQ ID NO: 250681 - DNA, 25 bp, Probe sequence
agcacgtggtgcgattttcggttta

SEQ ID NO: 250682 - DNA, 25 bp, Probe sequence
acgagttgactctactgagggtgtt

SEQ ID NO: 250683 - DNA, 25 bp, Probe sequence
aaaaagagcactttatccgtgcaac

SEQ ID NO: 250684 - DNA, 25 bp, Probe sequence
aagctcaagagcgattttattcaat

SEQ ID NO: 250685 - DNA, 25 bp, Probe sequence
aagttatgcgacacgagttgactct

SEQ ID NO: 250686 - DNA, 25 bp, Probe sequence
aatggcgatctattatttggaacga

SEQ ID NO: 250687 - DNA, 25 bp, Probe sequence
cacgcaattgtttggcaatcacgtc

SEQ ID NO: 250688 - DNA, 25 bp, Probe sequence
cagtacctaaaaatatgttgccaga

SEQ ID NO: 250689 - DNA, 25 bp, Probe sequence
catactggccgcccaatttatcacg

SEQ ID NO: 250690 - DNA, 25 bp, Probe sequence
cattatttggacaagcttgcttcga

SEQ ID NO: 250691 - DNA, 25 bp, Probe sequence
gcaggggtagcacaacgtgagttta

SEQ ID NO: 250692 - DNA, 25 bp, Probe sequence
gagtttaagcaatattttccacaat

SEQ ID NO: 250693 - DNA, 25 bp, Probe sequence
gagggtgtttatgttgttccagctt

SEQ ID NO: 250694 - DNA, 25 bp, Probe sequence
gatgtccaaagtttacgtgtcgatg

SEQ ID NO: 250695 - DNA, 25 bp, Probe sequence
gtttgggacaaacatactggccgcc

SEQ ID NO: 250696 - DNA, 25 bp, Probe sequence
gattaattcagcaccacaatcagaa

SEQ ID NO: 250697 - DNA, 25 bp, Probe sequence
gttgttccagcttttgtaggtttag

SEQ ID NO: 250698 - DNA, 25 bp, Probe sequence
ggtgatcaacaagcagcattatttg

SEQ ID NO: 250699 - DNA, 25 bp, Probe sequence
ggacatctgtgttagctgtaatgac

SEQ ID NO: 250700 - DNA, 25 bp, Probe sequence
ggaactggtggcttcatgttaatga

SEQ ID NO: 250701 - DNA, 25 bp, Probe sequence
ggcaatcacgtcaaacacaatcaat

SEQ ID NO: 250702 - DNA, 25 bp, Probe sequence
tgattattcaaatgcgagtcgtaca

SEQ ID NO: 250703 - DNA, 25 bp, Probe sequence
ttgggattctgaagcacgtggtgcg

SEQ ID NO: 250704 - DNA, 25 bp, Probe sequence
tcgggttcagcaatccaatggttac

SEQ ID NO: 250705 - DNA, 25 bp, Probe sequence
tacgtgtcgatggtggtgcagttaa

SEQ ID NO: 250706 - DNA, 25 bp, Probe sequence
tagaccaaggaacaacaagctcaag

SEQ ID NO: 250707 - DNA, 25 bp, Probe sequence
tatgcagttccaagcagacattgtt

SEQ ID NO: 250708 - DNA, 25 bp, Probe sequence
ttccatctttgtttcgggttcagca

SEQ ID NO: 250709 - DNA, 25 bp, Probe sequence
tttccacaatcaggttgggttgaac

SEQ ID NO: 250710 - DNA, 25 bp, Probe sequence
ttagatccgtattttgcaggtacaa

SEQ ID NO: 250711 - DNA, 25 bp, Probe sequence
ttatgcgcttgaaggttccatcttt

SEQ ID NO: 250712 - DNA, 25 bp, Probe sequence
atgacaatatcaaatcttcaccatt

SEQ ID NO: 250713 - DNA, 25 bp, Probe sequence
aaatcttcaccattaactacacaag

SEQ ID NO: 250714 - DNA, 25 bp, Probe sequence
aaaggcggcggttactatgttgaat

SEQ ID NO: 250715 - DNA, 25 bp, Probe sequence
aagactttgcacaaggaacaagctc

SEQ ID NO: 250716 - DNA, 25 bp, Probe sequence
aaggcgcagaaattatcaactatac

SEQ ID NO: 250717 - DNA, 25 bp, Probe sequence
aattcccattaggtcaagcagtata

SEQ ID NO: 250718 - DNA, 25 bp, Probe sequence
ctattgaagttatgaagcgtgctgc

SEQ ID NO: 250719 - DNA, 25 bp, Probe sequence
cctcatgttacgactccagagtgga

SEQ ID NO: 250720 - DNA, 25 bp, Probe sequence
gccgaaactggtaaagaacgtgcga

SEQ ID NO: 250721 - DNA, 25 bp, Probe sequence
gcgattaattacatgttccctagtg

SEQ ID NO: 250722 - DNA, 25 bp, Probe sequence
gcaaagacccttctgaaatctctcg

SEQ ID NO: 250723 - DNA, 25 bp, Probe sequence
gaatatcgtactgacgatgcgcgtt

SEQ ID NO: 250724 - DNA, 25 bp, Probe sequence
gaatgtatgatcgtttagcaggtgt

SEQ ID NO: 250725 - DNA, 25 bp, Probe sequence
gaagtggtgattatgcacgcaataa

SEQ ID NO: 250726 - DNA, 25 bp, Probe sequence
gaacatttggtaaattctcaacatc

SEQ ID NO: 250727 - DNA, 25 bp, Probe sequence
gacgatgcgcgtttaactattgaag

SEQ ID NO: 250728 - DNA, 25 bp, Probe sequence
tgcaggtattgcactagacgcgagt

SEQ ID NO: 250729 - DNA, 25 bp, Probe sequence
gagtggatgcttttaccaatgcata

SEQ ID NO: 250730 - DNA, 25 bp, Probe sequence
gatgaattgttcaacattgcgcaaa

SEQ ID NO: 250731 - DNA, 25 bp, Probe sequence
gatcaatcaaaattcccattaggtc

SEQ ID NO: 250732 - DNA, 25 bp, Probe sequence
gatttcttagttcgtcgttctggta

SEQ ID NO: 250733 - DNA, 25 bp, Probe sequence
gtagcaagaactttgatgcgtttgt

SEQ ID NO: 250734 - DNA, 25 bp, Probe sequence
gtagctaaaggattcggcattgatg

SEQ ID NO: 250735 - DNA, 25 bp, Probe sequence
gtgtacatgttgttattgatcaatc

SEQ ID NO: 250736 - DNA, 25 bp, Probe sequence
ggtggcgatgtaggtggtagcaaga

SEQ ID NO: 250737 - DNA, 25 bp, Probe sequence
ggtggcggtattacaggtgcaggta

SEQ ID NO: 250738 - DNA, 25 bp, Probe sequence
ggtactacagatacattctatgaca

SEQ ID NO: 250739 - DNA, 25 bp, Probe sequence
ggtttattaactattgcaggtggta

SEQ ID NO: 250740 - DNA, 25 bp, Probe sequence
ggaacaagctcaagatctacaaaat

SEQ ID NO: 250741 - DNA, 25 bp, Probe sequence
tgttccctagtgttaatgttacaga

SEQ ID NO: 250742 - DNA, 25 bp, Probe sequence
tcgtcacatggctcaagacattgtt

SEQ ID NO: 250743 - DNA, 25 bp, Probe sequence
taacaggctatcgtcacatggctca

SEQ ID NO: 250744 - DNA, 25 bp, Probe sequence
tagttcgtcgttctggtaaaatgta

SEQ ID NO: 250745 - DNA, 25 bp, Probe sequence
ttgcgcaaacatctcaataccatga

SEQ ID NO: 250746 - DNA, 25 bp, Probe sequence
attcatatatttcatggtatggctg

SEQ ID NO: 250747 - DNA, 25 bp, Probe sequence
attattagtttcaggatatgacgat

SEQ ID NO: 250748 - DNA, 25 bp, Probe sequence
atatccgcaatatgttgatggtcta

SEQ ID NO: 250749 - DNA, 25 bp, Probe sequence
atcgaggacatggtattaatattga

SEQ ID NO: 250750 - DNA, 25 bp, Probe sequence
atcggtgatgcctttgaagtagcgc

SEQ ID NO: 250751 - DNA, 25 bp, Probe sequence
atgtgtcaaatcaattattatatca

SEQ ID NO: 250752 - DNA, 25 bp, Probe sequence
atggctgaacatatggaacgttacg

SEQ ID NO: 250753 - DNA, 25 bp, Probe sequence
acgtcataatcatcgaggacatggt

SEQ ID NO: 250754 - DNA, 25 bp, Probe sequence
acgataaattagcacatgcactttc

SEQ ID NO: 250755 - DNA, 25 bp, Probe sequence
acacaaagtgattggatttctagta

SEQ ID NO: 250756 - DNA, 25 bp, Probe sequence
aaatcatgccatgcctatattatta

SEQ ID NO: 250757 - DNA, 25 bp, Probe sequence
aaccatacattataatcggacattc

SEQ ID NO: 250758 - DNA, 25 bp, Probe sequence
aactttattaaagatccatatagtg

SEQ ID NO: 250759 - DNA, 25 bp, Probe sequence
aagcatggcttcgatgtgatacgtc

SEQ ID NO: 250760 - DNA, 25 bp, Probe sequence
aacgagttatcggtgatgcctttga

SEQ ID NO: 250761 - DNA, 25 bp, Probe sequence
aatctttatcatcataaacgtcatg

SEQ ID NO: 250762 - DNA, 25 bp, Probe sequence
cgtccattacgtacacaaagtgatt

SEQ ID NO: 250763 - DNA, 25 bp, Probe sequence
gccatgcctatattattagtttcag

SEQ ID NO: 250764 - DNA, 25 bp, Probe sequence
gaatgggttaaccagttagtatcaa

SEQ ID NO: 250765 - DNA, 25 bp, Probe sequence
gaagacttgtttaaatggttgaatc

SEQ ID NO: 250766 - DNA, 25 bp, Probe sequence
gacattcaatgggatccgttatagc

SEQ ID NO: 250767 - DNA, 25 bp, Probe sequence
gagaggcaatgttgataaaccatac

SEQ ID NO: 250768 - DNA, 25 bp, Probe sequence
gagggcattacgatgatatgaaacg

SEQ ID NO: 250769 - DNA, 25 bp, Probe sequence
gatggtctaattttaagtggtactg

SEQ ID NO: 250770 - DNA, 25 bp, Probe sequence
gatgaatcaacaagagggcattacg

SEQ ID NO: 250771 - DNA, 25 bp, Probe sequence
gtttgtagaaacatatccgcaatat

SEQ ID NO: 250772 - DNA, 25 bp, Probe sequence
gtagcgcaaacagtgagaggcaatg

SEQ ID NO: 250773 - DNA, 25 bp, Probe sequence
gtgatgcctttgaagtagcgcaaac

SEQ ID NO: 250774 - DNA, 25 bp, Probe sequence
gggatccgttatagctagattgttt

SEQ ID NO: 250775 - DNA, 25 bp, Probe sequence
ggaacgttacgataaattagcacat

SEQ ID NO: 250776 - DNA, 25 bp, Probe sequence
ggcttcgatgtgatacgtcataatc

SEQ ID NO: 250777 - DNA, 25 bp, Probe sequence
tccatatagtggatttaatgtgtca

SEQ ID NO: 250778 - DNA, 25 bp, Probe sequence
taaacgtcatgaagtgttatttgaa

SEQ ID NO: 250779 - DNA, 25 bp, Probe sequence
tatatgctacatacatcacaattaa

SEQ ID NO: 250780 - DNA, 25 bp, Probe sequence
atttagataatcagcaactacacga

SEQ ID NO: 250781 - DNA, 25 bp, Probe sequence
ataagccttttattgtagtaattgt

SEQ ID NO: 250782 - DNA, 25 bp, Probe sequence
atgagtgttcattggttagataaag

SEQ ID NO: 250783 - DNA, 25 bp, Probe sequence
agaggtaaagttccaatcatagcag

SEQ ID NO: 250784 - DNA, 25 bp, Probe sequence
agcaacattcacgccaatatgcaaa

SEQ ID NO: 250785 - DNA, 25 bp, Probe sequence
actcgcgaagcgtatcaatggtgaa

SEQ ID NO: 250786 - DNA, 25 bp, Probe sequence
aaagttatctgcattagaacattta

SEQ ID NO: 250787 - DNA, 25 bp, Probe sequence
aaacagttacacctgcacaattatc

SEQ ID NO: 250788 - DNA, 25 bp, Probe sequence
aaacgacaaatgacatggttcaaga

SEQ ID NO: 250789 - DNA, 25 bp, Probe sequence
aacaggcttatatattcaatcatta

SEQ ID NO: 250790 - DNA, 25 bp, Probe sequence
aatacctgtgattaacggacaaatg

SEQ ID NO: 250791 - DNA, 25 bp, Probe sequence
aatatgtcacttcaaatgatgttag

SEQ ID NO: 250792 - DNA, 25 bp, Probe sequence
caaagtatgcaagctattggatata

SEQ ID NO: 250793 - DNA, 25 bp, Probe sequence
cttcaggtaaaacagagcttagcat

SEQ ID NO: 250794 - DNA, 25 bp, Probe sequence
gctatgaatcttgccaaagtatgca

SEQ ID NO: 250795 - DNA, 25 bp, Probe sequence
gcatatgaattcaagcgattagcag

SEQ ID NO: 250796 - DNA, 25 bp, Probe sequence
gcaggtggaacaggcttatatattc

SEQ ID NO: 250797 - DNA, 25 bp, Probe sequence
gaagatgaaacagttacacctgcac

SEQ ID NO: 250798 - DNA, 25 bp, Probe sequence
gaagatgctgtcaatgatttaaagc

SEQ ID NO: 250799 - DNA, 25 bp, Probe sequence
gaacaaggctatgaatcttgccaaa

SEQ ID NO: 250800 - DNA, 25 bp, Probe sequence
gaaatggatggtattccacatcatt

SEQ ID NO: 250801 - DNA, 25 bp, Probe sequence
gatggtattccacatcatttaattg

SEQ ID NO: 250802 - DNA, 25 bp, Probe sequence
gatgagattacaacccagattaagt

SEQ ID NO: 250803 - DNA, 25 bp, Probe sequence
gatattatgttggatcacggattat

SEQ ID NO: 250804 - DNA, 25 bp, Probe sequence
gatttaaagcaacattcacgccaat

SEQ ID NO: 250805 - DNA, 25 bp, Probe sequence
gttggatcacggattatttagagaa

SEQ ID NO: 250806 - DNA, 25 bp, Probe sequence
gtaattgtggggccaactgcttcag

SEQ ID NO: 250807 - DNA, 25 bp, Probe sequence
gtcgcgtaaaacattatattcaaga

SEQ ID NO: 250808 - DNA, 25 bp, Probe sequence
ggggccaactgcttcaggtaaaaca

SEQ ID NO: 250809 - DNA, 25 bp, Probe sequence
tggaactgcaaaagtaacacctgaa

SEQ ID NO: 250810 - DNA, 25 bp, Probe sequence
tgatgatacattttcagcatatgaa

SEQ ID NO: 250811 - DNA, 25 bp, Probe sequence
tcttgaatcctgatgatacattttc

SEQ ID NO: 250812 - DNA, 25 bp, Probe sequence
tagggattgaaatgtcgcgtaaaac

SEQ ID NO: 250813 - DNA, 25 bp, Probe sequence
ttcacgccaatatgcaaaacgacaa

SEQ ID NO: 250814 - DNA, 25 bp, Probe sequence
atccaagacaaagcactagagaatt

SEQ ID NO: 250815 - DNA, 25 bp, Probe sequence
atgcgatcagcacttatacagtaga

SEQ ID NO: 250816 - DNA, 25 bp, Probe sequence
atgtcgtaagcttaaattctcaagg

SEQ ID NO: 250817 - DNA, 25 bp, Probe sequence
agcttaaattctcaaggcaaacaac

SEQ ID NO: 250818 - DNA, 25 bp, Probe sequence
accaaactgaagtaactgtattctt

SEQ ID NO: 250819 - DNA, 25 bp, Probe sequence
acatgcgatcagcacttatacagta

SEQ ID NO: 250820 - DNA, 25 bp, Probe sequence
acatccaagacaaagcactagagaa

SEQ ID NO: 250821 - DNA, 25 bp, Probe sequence
acacttgatttacaaacatgcgatc

SEQ ID NO: 250822 - DNA, 25 bp, Probe sequence
acaacacttgatttacaaacatgcg

SEQ ID NO: 250823 - DNA, 25 bp, Probe sequence
aaacatccaagacaaagcactagag

SEQ ID NO: 250824 - DNA, 25 bp, Probe sequence
aacatgcgatcagcacttatacagt

SEQ ID NO: 250825 - DNA, 25 bp, Probe sequence
aactgaagtaactgtattctttcta

SEQ ID NO: 250826 - DNA, 25 bp, Probe sequence
aagcactagagaattttaaagcaaa

SEQ ID NO: 250827 - DNA, 25 bp, Probe sequence
aaggcaaacaacacttgatttacaa

SEQ ID NO: 250828 - DNA, 25 bp, Probe sequence
caaacatgcgatcagcacttataca

SEQ ID NO: 250829 - DNA, 25 bp, Probe sequence
gcgatcagcacttatacagtagaaa

SEQ ID NO: 250830 - DNA, 25 bp, Probe sequence
gaagtaactgtattctttctaaacg

SEQ ID NO: 250831 - DNA, 25 bp, Probe sequence
gaaaacatccaagacaaagcactag

SEQ ID NO: 250832 - DNA, 25 bp, Probe sequence
gagaattttaaagcaaaccaaactg

SEQ ID NO: 250833 - DNA, 25 bp, Probe sequence
gacaagtatgtcgtaagcttaaatt

SEQ ID NO: 250834 - DNA, 25 bp, Probe sequence
gatcagcacttatacagtagaaact

SEQ ID NO: 250835 - DNA, 25 bp, Probe sequence
gatttacaaacatgcgatcagcact

SEQ ID NO: 250836 - DNA, 25 bp, Probe sequence
gattgcaaacgaaaacatccaagac

SEQ ID NO: 250837 - DNA, 25 bp, Probe sequence
gtatgtcgtaagcttaaattctcaa

SEQ ID NO: 250838 - DNA, 25 bp, Probe sequence
gtaagcttaaattctcaaggcaaac

SEQ ID NO: 250839 - DNA, 25 bp, Probe sequence
gtcgtaagcttaaattctcaaggca

SEQ ID NO: 250840 - DNA, 25 bp, Probe sequence
ggtgttattgaagaatacgacaagt

SEQ ID NO: 250841 - DNA, 25 bp, Probe sequence
ggtttccaaatgaaaggtgttattg

SEQ ID NO: 250842 - DNA, 25 bp, Probe sequence
ggcaaacaacacttgatttacaaac

SEQ ID NO: 250843 - DNA, 25 bp, Probe sequence
tgcaaacgaaaacatccaagacaaa

SEQ ID NO: 250844 - DNA, 25 bp, Probe sequence
taaagcaaaccaaactgaagtaact

SEQ ID NO: 250845 - DNA, 25 bp, Probe sequence
taaattctcaaggcaaacaacactt

SEQ ID NO: 250846 - DNA, 25 bp, Probe sequence
tacaaacatgcgatcagcacttata

SEQ ID NO: 250847 - DNA, 25 bp, Probe sequence
tttacaaacatgcgatcagcactta

SEQ ID NO: 250848 - DNA, 25 bp, Probe sequence
attgcaagtagagctagcacaactt

SEQ ID NO: 250849 - DNA, 25 bp, Probe sequence
attacctagattgcaaggccatggt

SEQ ID NO: 250850 - DNA, 25 bp, Probe sequence
atcgtgtagatcgcaaatattatgt

SEQ ID NO: 250851 - DNA, 25 bp, Probe sequence
agatcctaaaacacgacaaattcaa

SEQ ID NO: 250852 - DNA, 25 bp, Probe sequence
agacatattcgaactcgtatgaatg

SEQ ID NO: 250853 - DNA, 25 bp, Probe sequence
agccatcctgaataccgtacgcagt

SEQ ID NO: 250854 - DNA, 25 bp, Probe sequence
acgactgcacaatccaaatcactaa

SEQ ID NO: 250855 - DNA, 25 bp, Probe sequence
acaacttgattatttattacctaga

SEQ ID NO: 250856 - DNA, 25 bp, Probe sequence
aaatgctggtaaatcatcatggttt

SEQ ID NO: 250857 - DNA, 25 bp, Probe sequence
aaaggacttatgtgatcatgcatca

SEQ ID NO: 250858 - DNA, 25 bp, Probe sequence
aacaacatacattagtgactgaact

SEQ ID NO: 250859 - DNA, 25 bp, Probe sequence
aatgcagatcgattatattttctaa

SEQ ID NO: 250860 - DNA, 25 bp, Probe sequence
aatcaggtgtttcaagtagctttag

SEQ ID NO: 250861 - DNA, 25 bp, Probe sequence
aattgcagcttttaaatcaacttta

SEQ ID NO: 250862 - DNA, 25 bp, Probe sequence
caattatttgcaacgttagatccta

SEQ ID NO: 250863 - DNA, 25 bp, Probe sequence
cagagacttgccaacttgaagtgtt

SEQ ID NO: 250864 - DNA, 25 bp, Probe sequence
catgtcgtagatagtagccatcctg

SEQ ID NO: 250865 - DNA, 25 bp, Probe sequence
ctttctcgtttaggtggcggtattg

SEQ ID NO: 250866 - DNA, 25 bp, Probe sequence
gcggtattggaactagaggccctgg

SEQ ID NO: 250867 - DNA, 25 bp, Probe sequence
gaagtgttgggtcaaattactcaaa

SEQ ID NO: 250868 - DNA, 25 bp, Probe sequence
gaggccctggtgaaacgaagttaga

SEQ ID NO: 250869 - DNA, 25 bp, Probe sequence
gatgaattaacgactgcacaatcca

SEQ ID NO: 250870 - DNA, 25 bp, Probe sequence
gatagaactcagttgattcttgaaa

SEQ ID NO: 250871 - DNA, 25 bp, Probe sequence
gtccagcaagtgatttgcctaatgt

SEQ ID NO: 250872 - DNA, 25 bp, Probe sequence
gtgatttgcctaatgtttttgtttc

SEQ ID NO: 250873 - DNA, 25 bp, Probe sequence
ggtgcagatttattagtacatgtcg

SEQ ID NO: 250874 - DNA, 25 bp, Probe sequence
ggaggaattatcatctttatcagag

SEQ ID NO: 250875 - DNA, 25 bp, Probe sequence
ggctcagcaacaaattcatgatact

SEQ ID NO: 250876 - DNA, 25 bp, Probe sequence
tcatctttatcagagacttgccaac

SEQ ID NO: 250877 - DNA, 25 bp, Probe sequence
tacctacgacgttaattgcagcttt

SEQ ID NO: 250878 - DNA, 25 bp, Probe sequence
taccgtacgcagtatgacacagtta

SEQ ID NO: 250879 - DNA, 25 bp, Probe sequence
tagtcggtgtacatgctcaagatga

SEQ ID NO: 250880 - DNA, 25 bp, Probe sequence
tttatacagaaactacctacgacgt

SEQ ID NO: 250881 - DNA, 25 bp, Probe sequence
tttcagatactgttggttttataca

SEQ ID NO: 250882 - DNA, 25 bp, Probe sequence
attcgaacttccacagaaagaccgg

SEQ ID NO: 250883 - DNA, 25 bp, Probe sequence
atttgaatttgatccattagttaaa

SEQ ID NO: 250884 - DNA, 25 bp, Probe sequence
atcgtaaaattgttgaccatgtcag

SEQ ID NO: 250885 - DNA, 25 bp, Probe sequence
agatgcatttgttgtgctatcagat

SEQ ID NO: 250886 - DNA, 25 bp, Probe sequence
agatgctttgatcagaatgtacctg

SEQ ID NO: 250887 - DNA, 25 bp, Probe sequence
aacaatctaatccaatccgttgaac

SEQ ID NO: 250888 - DNA, 25 bp, Probe sequence
aagcgaatatctttgtgacaggatc

SEQ ID NO: 250889 - DNA, 25 bp, Probe sequence
aatccaatccgttgaactagcaaga

SEQ ID NO: 250890 - DNA, 25 bp, Probe sequence
aatagttgtttagcagcagtatctg

SEQ ID NO: 250891 - DNA, 25 bp, Probe sequence
ctggtgtccttattcgaacttccac

SEQ ID NO: 250892 - DNA, 25 bp, Probe sequence
cctgtgatttattcaacgcatccaa

SEQ ID NO: 250893 - DNA, 25 bp, Probe sequence
gcgggtaatagatgctttgatcaga

SEQ ID NO: 250894 - DNA, 25 bp, Probe sequence
gctatcagatagtggaacattgtca

SEQ ID NO: 250895 - DNA, 25 bp, Probe sequence
gaatgcgataaatgatattgccaaa

SEQ ID NO: 250896 - DNA, 25 bp, Probe sequence
gaagtgatagaagcgcatcgagata

SEQ ID NO: 250897 - DNA, 25 bp, Probe sequence
gaaccgatgattgatgctattgatt

SEQ ID NO: 250898 - DNA, 25 bp, Probe sequence
gacaatagttggtacaaggcctgaa

SEQ ID NO: 250899 - DNA, 25 bp, Probe sequence
gaaacgatggggaatattattgcga

SEQ ID NO: 250900 - DNA, 25 bp, Probe sequence
gaaagaccggaagtactagataaag

SEQ ID NO: 250901 - DNA, 25 bp, Probe sequence
gacaaccggaccactacttagaggc

SEQ ID NO: 250902 - DNA, 25 bp, Probe sequence
gagtcgtctattttgaagttccctg

SEQ ID NO: 250903 - DNA, 25 bp, Probe sequence
gatgcaaaacaataacgaaccgatg

SEQ ID NO: 250904 - DNA, 25 bp, Probe sequence
gatgcacttttaattcttggtgata

SEQ ID NO: 250905 - DNA, 25 bp, Probe sequence
gatattagtacacactggtcaaaat

SEQ ID NO: 250906 - DNA, 25 bp, Probe sequence
gttaaagccatttggtttctttgat

SEQ ID NO: 250907 - DNA, 25 bp, Probe sequence
gtcagtgatgtgaatctaccttata

SEQ ID NO: 250908 - DNA, 25 bp, Probe sequence
gtgacaggatcaccgatgacagaag

SEQ ID NO: 250909 - DNA, 25 bp, Probe sequence
ggtggtattacctataacaatctaa

SEQ ID NO: 250910 - DNA, 25 bp, Probe sequence
ggtttctttgattataatgcattgc

SEQ ID NO: 250911 - DNA, 25 bp, Probe sequence
ggaacattgtcagaagagtcgtcta

SEQ ID NO: 250912 - DNA, 25 bp, Probe sequence
ggcctgaaatcattcgtttatcatc

SEQ ID NO: 250913 - DNA, 25 bp, Probe sequence
tacattttagtatctgcgcatagag

SEQ ID NO: 250914 - DNA, 25 bp, Probe sequence
tataaagacactaacgtttcgacaa

SEQ ID NO: 250915 - DNA, 25 bp, Probe sequence
ttttgaagttccctggtgtccttat

SEQ ID NO: 250916 - DNA, 25 bp, Probe sequence
attcgtcctccttatgaagcatatg

SEQ ID NO: 250917 - DNA, 25 bp, Probe sequence
atatgcctggttacgaagatgatgt

SEQ ID NO: 250918 - DNA, 25 bp, Probe sequence
atcaaggtttctttttagcaccaca

SEQ ID NO: 250919 - DNA, 25 bp, Probe sequence
agtccatatgacactttacttgaag

SEQ ID NO: 250920 - DNA, 25 bp, Probe sequence
agatagtagctgacgtcgaatcaac

SEQ ID NO: 250921 - DNA, 25 bp, Probe sequence
accaaagtaatagcgattcaacgtt

SEQ ID NO: 250922 - DNA, 25 bp, Probe sequence
accctggcggtggtttagctaagat

SEQ ID NO: 250923 - DNA, 25 bp, Probe sequence
aaattatttcaggtacgcatgcgat

SEQ ID NO: 250924 - DNA, 25 bp, Probe sequence
aacacgcatccccaattaatgcaca

SEQ ID NO: 250925 - DNA, 25 bp, Probe sequence
gcgattcaacgttcgaaaggctatg

SEQ ID NO: 250926 - DNA, 25 bp, Probe sequence
gctatgatcaaagaccttcaattcc

SEQ ID NO: 250927 - DNA, 25 bp, Probe sequence
gcattgtttactagtttatttttag

SEQ ID NO: 250928 - DNA, 25 bp, Probe sequence
gcatttcatcatgtcaaagcaaccg

SEQ ID NO: 250929 - DNA, 25 bp, Probe sequence
gaacacaacgccgaagtactacgaa

SEQ ID NO: 250930 - DNA, 25 bp, Probe sequence
gcaaccgaaagtgatctacaaggat

SEQ ID NO: 250931 - DNA, 25 bp, Probe sequence
gaatatgaacacaacgccgaagtac

SEQ ID NO: 250932 - DNA, 25 bp, Probe sequence
gaacctatagaatgtggtgccgatt

SEQ ID NO: 250933 - DNA, 25 bp, Probe sequence
gaacacgttaaaattgctgtgacaa

SEQ ID NO: 250934 - DNA, 25 bp, Probe sequence
gattgacagcacctggtattggtaa

SEQ ID NO: 250935 - DNA, 25 bp, Probe sequence
gattggtggatacattgctggtaga

SEQ ID NO: 250936 - DNA, 25 bp, Probe sequence
gtacgcatgcgattactattgcatt

SEQ ID NO: 250937 - DNA, 25 bp, Probe sequence
gtcaaagtattcaacacgcatcccc

SEQ ID NO: 250938 - DNA, 25 bp, Probe sequence
gtcgaatcaacgttagcaccatatt

SEQ ID NO: 250939 - DNA, 25 bp, Probe sequence
gtggttatagattgacagcacctgg

SEQ ID NO: 250940 - DNA, 25 bp, Probe sequence
ggtgcatcattaaatgcattgcttg

SEQ ID NO: 250941 - DNA, 25 bp, Probe sequence
ggtgccgatttaatagcaggatcat

SEQ ID NO: 250942 - DNA, 25 bp, Probe sequence
ggttcatcgattgaattatctgcag

SEQ ID NO: 250943 - DNA, 25 bp, Probe sequence
ggatcattaattaaaaaccctggcg

SEQ ID NO: 250944 - DNA, 25 bp, Probe sequence
ggaatttgttgaaagacgtgaacct

SEQ ID NO: 250945 - DNA, 25 bp, Probe sequence
tggtacgtttattcaaggttcatcg

SEQ ID NO: 250946 - DNA, 25 bp, Probe sequence
tgcagatggacctattcgtcctcct

SEQ ID NO: 250947 - DNA, 25 bp, Probe sequence
tatgcgcaggcatttaaagcagaag

SEQ ID NO: 250948 - DNA, 25 bp, Probe sequence
ttatctgcagatggacctattcgtc

SEQ ID NO: 250949 - DNA, 25 bp, Probe sequence
ttaatgcacattttagtccagaacc

SEQ ID NO: 250950 - DNA, 25 bp, Probe sequence
atatggctgtcttctctatgagtgt

SEQ ID NO: 250951 - DNA, 25 bp, Probe sequence
atcgtggtgatttatcccgatttat

SEQ ID NO: 250952 - DNA, 25 bp, Probe sequence
atggctgtcttctctatgagtgtag

SEQ ID NO: 250953 - DNA, 25 bp, Probe sequence
aaatcatttatgactcacaagagca

SEQ ID NO: 250954 - DNA, 25 bp, Probe sequence
aaagcctattggagaaactttgcca

SEQ ID NO: 250955 - DNA, 25 bp, Probe sequence
aaaacgtctgttctcactcaatgat

SEQ ID NO: 250956 - DNA, 25 bp, Probe sequence
aaaagatgattgtagatgccacgca

SEQ ID NO: 250957 - DNA, 25 bp, Probe sequence
aacgtctgttctcactcaatgattt

SEQ ID NO: 250958 - DNA, 25 bp, Probe sequence
caaaaacgtctgttctcactcaatg

SEQ ID NO: 250959 - DNA, 25 bp, Probe sequence
cacatgaactcatcaaacctgaaag

SEQ ID NO: 250960 - DNA, 25 bp, Probe sequence
cgccaaggcaaatacgttactatga

SEQ ID NO: 250961 - DNA, 25 bp, Probe sequence
gccacgcaaaagcctattggagaaa

SEQ ID NO: 250962 - DNA, 25 bp, Probe sequence
gaaggtcaaaaacgtctgttctcac

SEQ ID NO: 250963 - DNA, 25 bp, Probe sequence
gaactcatcaaacctgaaagaacag

SEQ ID NO: 250964 - DNA, 25 bp, Probe sequence
gaaactttgccaataaatcgtggtg

SEQ ID NO: 250965 - DNA, 25 bp, Probe sequence
gaaacacatgaactcatcaaacctg

SEQ ID NO: 250966 - DNA, 25 bp, Probe sequence
gaaatatggctgtcttctctatgag

SEQ ID NO: 250967 - DNA, 25 bp, Probe sequence
gactcacaagagcatttaacaacag

SEQ ID NO: 250968 - DNA, 25 bp, Probe sequence
gacgaaatatggctgtcttctctat

SEQ ID NO: 250969 - DNA, 25 bp, Probe sequence
gagtgtagtaagtaagttaacggat

SEQ ID NO: 250970 - DNA, 25 bp, Probe sequence
gatgccacgcaaaagcctattggag

SEQ ID NO: 250971 - DNA, 25 bp, Probe sequence
gatatcgaatgatgcaatcagacga

SEQ ID NO: 250972 - DNA, 25 bp, Probe sequence
gattgtagatgccacgcaaaagcct

SEQ ID NO: 250973 - DNA, 25 bp, Probe sequence
gttctcactcaatgatttggaaaga

SEQ ID NO: 250974 - DNA, 25 bp, Probe sequence
gtagatgccacgcaaaagcctattg

SEQ ID NO: 250975 - DNA, 25 bp, Probe sequence
gtcttctctatgagtgtagtaagta

SEQ ID NO: 250976 - DNA, 25 bp, Probe sequence
gtctgttctcactcaatgatttgga

SEQ ID NO: 250977 - DNA, 25 bp, Probe sequence
gtggtgatttatcccgatttattaa

SEQ ID NO: 250978 - DNA, 25 bp, Probe sequence
ggtcaaaaacgtctgttctcactca

SEQ ID NO: 250979 - DNA, 25 bp, Probe sequence
ggatttaacgccaaggcaaatacgt

SEQ ID NO: 250980 - DNA, 25 bp, Probe sequence
ggcaaatacgttactatgaaacaca

SEQ ID NO: 250981 - DNA, 25 bp, Probe sequence
ggctgtcttctctatgagtgtagta

SEQ ID NO: 250982 - DNA, 25 bp, Probe sequence
tgatgcaatcagacgaaatatggct

SEQ ID NO: 250983 - DNA, 25 bp, Probe sequence
taacggatttaacgccaaggcaaat

SEQ ID NO: 250984 - DNA, 25 bp, Probe sequence
atcttcccatggactgctggacaag

SEQ ID NO: 250985 - DNA, 25 bp, Probe sequence
atgccaaaacgtactttcactaaag

SEQ ID NO: 250986 - DNA, 25 bp, Probe sequence
agaggatatgggcttcgatattgaa

SEQ ID NO: 250987 - DNA, 25 bp, Probe sequence
actgtcgtcgtgatattgttttaga

SEQ ID NO: 250988 - DNA, 25 bp, Probe sequence
aaatgatgtttgacggttcttctat

SEQ ID NO: 250989 - DNA, 25 bp, Probe sequence
aaacaatcgcacgtaaacataattt

SEQ ID NO: 250990 - DNA, 25 bp, Probe sequence
aaaatgttgaagtgcctgtaagcca

SEQ ID NO: 250991 - DNA, 25 bp, Probe sequence
aagctagtcaccatgaagttgcccc

SEQ ID NO: 250992 - DNA, 25 bp, Probe sequence
cctgaaccagaattcttcttgttta

SEQ ID NO: 250993 - DNA, 25 bp, Probe sequence
gctgttacagcatgtgataatatcc

SEQ ID NO: 250994 - DNA, 25 bp, Probe sequence
gctggacaaggtaaagttgcacgtt

SEQ ID NO: 250995 - DNA, 25 bp, Probe sequence
gcactttaacgtttcattattcaaa

SEQ ID NO: 250996 - DNA, 25 bp, Probe sequence
gaattcttcttgtttaagttggatg

SEQ ID NO: 250997 - DNA, 25 bp, Probe sequence
gaaggtttcgtacgtatcgaagaat

SEQ ID NO: 250998 - DNA, 25 bp, Probe sequence
gaagtgcctgtaagccaattagaaa

SEQ ID NO: 250999 - DNA, 25 bp, Probe sequence
gaagaacgtgaagcagtaggcattc

SEQ ID NO: 251000 - DNA, 25 bp, Probe sequence
gaagttgcccctggtcaacatgaaa

SEQ ID NO: 251001 - DNA, 25 bp, Probe sequence
gatacttgggtaatcttcccatgga

SEQ ID NO: 251002 - DNA, 25 bp, Probe sequence
gaacaccatttgaaggggatcctcg

SEQ ID NO: 251003 - DNA, 25 bp, Probe sequence
gacggttcttctatcgaaggtttcg

SEQ ID NO: 251004 - DNA, 25 bp, Probe sequence
gatttaggcttcacagactttaacc

SEQ ID NO: 251005 - DNA, 25 bp, Probe sequence
gatttaggtgaaaactgtcgtcgtg

SEQ ID NO: 251006 - DNA, 25 bp, Probe sequence
gattacaattcactgatattttagg

SEQ ID NO: 251007 - DNA, 25 bp, Probe sequence
gttgcacgtttaatttgtgatgtat

SEQ ID NO: 251008 - DNA, 25 bp, Probe sequence
gtaggcattcaagacttaccttcaa

SEQ ID NO: 251009 - DNA, 25 bp, Probe sequence
gtagcggtatgcactttaacgtttc

SEQ ID NO: 251010 - DNA, 25 bp, Probe sequence
gtacttacatccagatttagatact

SEQ ID NO: 251011 - DNA, 25 bp, Probe sequence
gggatcctcgtgcaaacttaaaacg

SEQ ID NO: 251012 - DNA, 25 bp, Probe sequence
ggatatttcgatttagcacctacag

SEQ ID NO: 251013 - DNA, 25 bp, Probe sequence
ggaaccaactttagaacttaatgat

SEQ ID NO: 251014 - DNA, 25 bp, Probe sequence
taaatatgcagatgctgttacagca

SEQ ID NO: 251015 - DNA, 25 bp, Probe sequence
tacacgcaacatttatgcctaaacc

SEQ ID NO: 251016 - DNA, 25 bp, Probe sequence
ttaatccgtgtaccatcttcaagag

SEQ ID NO: 251017 - DNA, 25 bp, Probe sequence
ttcaagacttaccttcaacacttta

SEQ ID NO: 251018 - DNA, 25 bp, Probe sequence
attagtcatatttttgacaatttac

SEQ ID NO: 251019 - DNA, 25 bp, Probe sequence
attatttcttacattagtcatattt

SEQ ID NO: 251020 - DNA, 25 bp, Probe sequence
attttcaactattatttcttacatt

SEQ ID NO: 251021 - DNA, 25 bp, Probe sequence
atttcttacattagtcatatttttg

SEQ ID NO: 251022 - DNA, 25 bp, Probe sequence
agtcatatttttgacaatttactat

SEQ ID NO: 251023 - DNA, 25 bp, Probe sequence
actattatttcttacattagtcata

SEQ ID NO: 251024 - DNA, 25 bp, Probe sequence
acattagtcatatttttgacaattt

SEQ ID NO: 251025 - DNA, 25 bp, Probe sequence
aattttcaactattatttcttacat

SEQ ID NO: 251026 - DNA, 25 bp, Probe sequence
cttacattagtcatatttttgacaa

SEQ ID NO: 251027 - DNA, 25 bp, Probe sequence
ctttgatgatgcaatgtttattaac

SEQ ID NO: 251028 - DNA, 25 bp, Probe sequence
ctattatttcttacattagtcatat

SEQ ID NO: 251029 - DNA, 25 bp, Probe sequence
gatgatgcaatgtttattaacaaat

SEQ ID NO: 251030 - DNA, 25 bp, Probe sequence
gatgcaatgtttattaacaaatttt

SEQ ID NO: 251031 - DNA, 25 bp, Probe sequence
gtctttgatgatgcaatgtttatta

SEQ ID NO: 251032 - DNA, 25 bp, Probe sequence
ggtctttgatgatgcaatgtttatt

SEQ ID NO: 251033 - DNA, 25 bp, Probe sequence
tggtctttgatgatgcaatgtttat

SEQ ID NO: 251034 - DNA, 25 bp, Probe sequence
tgtttattaacaaattttcaactat

SEQ ID NO: 251035 - DNA, 25 bp, Probe sequence
tctttgatgatgcaatgtttattaa

SEQ ID NO: 251036 - DNA, 25 bp, Probe sequence
tcttacattagtcatatttttgaca

SEQ ID NO: 251037 - DNA, 25 bp, Probe sequence
tcatatttttgacaatttactatta

SEQ ID NO: 251038 - DNA, 25 bp, Probe sequence
taacaaattttcaactattatttct

SEQ ID NO: 251039 - DNA, 25 bp, Probe sequence
tacattagtcatatttttgacaatt

SEQ ID NO: 251040 - DNA, 25 bp, Probe sequence
tagtcatatttttgacaatttacta

SEQ ID NO: 251041 - DNA, 25 bp, Probe sequence
tatttcttacattagtcatattttt

SEQ ID NO: 251042 - DNA, 25 bp, Probe sequence
tattatttcttacattagtcatatt

SEQ ID NO: 251043 - DNA, 25 bp, Probe sequence
tattaacaaattttcaactattatt

SEQ ID NO: 251044 - DNA, 25 bp, Probe sequence
tttggtctttgatgatgcaatgttt

SEQ ID NO: 251045 - DNA, 25 bp, Probe sequence
tttgatgatgcaatgtttattaaca

SEQ ID NO: 251046 - DNA, 25 bp, Probe sequence
tttcttacattagtcatatttttga

SEQ ID NO: 251047 - DNA, 25 bp, Probe sequence
ttattaacaaattttcaactattat

SEQ ID NO: 251048 - DNA, 25 bp, Probe sequence
ttatttcttacattagtcatatttt

SEQ ID NO: 251049 - DNA, 25 bp, Probe sequence
ttcttacattagtcatatttttgac

SEQ ID NO: 251050 - DNA, 25 bp, Probe sequence
ttgatgatgcaatgtttattaacaa

SEQ ID NO: 251051 - DNA, 25 bp, Probe sequence
ttggtctttgatgatgcaatgttta

SEQ ID NO: 251052 - DNA, 25 bp, Probe sequence
atactgggataagttacggtaatat

SEQ ID NO: 251053 - DNA, 25 bp, Probe sequence
ataagttacggtaatattaatgcta

SEQ ID NO: 251054 - DNA, 25 bp, Probe sequence
atgcaaagatcttatatgaatatgc

SEQ ID NO: 251055 - DNA, 25 bp, Probe sequence
agttacggtaatattaatgctatgc

SEQ ID NO: 251056 - DNA, 25 bp, Probe sequence
agatactgggataagttacggtaat

SEQ ID NO: 251057 - DNA, 25 bp, Probe sequence
agatcttatatgaatatgcgaaaaa

SEQ ID NO: 251058 - DNA, 25 bp, Probe sequence
agaatgcaaagatcttatatgaata

SEQ ID NO: 251059 - DNA, 25 bp, Probe sequence
agcttaaagaatgcaaagatcttat

SEQ ID NO: 251060 - DNA, 25 bp, Probe sequence
acggtaatattaatgctatgcgccg

SEQ ID NO: 251061 - DNA, 25 bp, Probe sequence
aaagatcttatatgaatatgcgaaa

SEQ ID NO: 251062 - DNA, 25 bp, Probe sequence
aagttacggtaatattaatgctatg

SEQ ID NO: 251063 - DNA, 25 bp, Probe sequence
aagcttaaagaatgcaaagatctta

SEQ ID NO: 251064 - DNA, 25 bp, Probe sequence
aagatcttatatgaatatgcgaaaa

SEQ ID NO: 251065 - DNA, 25 bp, Probe sequence
aatgcaaagatcttatatgaatatg

SEQ ID NO: 251066 - DNA, 25 bp, Probe sequence
caaagatcttatatgaatatgcgaa

SEQ ID NO: 251067 - DNA, 25 bp, Probe sequence
cggtaatattaatgctatgcgccgt

SEQ ID NO: 251068 - DNA, 25 bp, Probe sequence
gcttaaagaatgcaaagatcttata

SEQ ID NO: 251069 - DNA, 25 bp, Probe sequence
gcaaagatcttatatgaatatgcga

SEQ ID NO: 251070 - DNA, 25 bp, Probe sequence
gaatgcaaagatcttatatgaatat

SEQ ID NO: 251071 - DNA, 25 bp, Probe sequence
gatcttatatgaatatgcgaaaaag

SEQ ID NO: 251072 - DNA, 25 bp, Probe sequence
gataagttacggtaatattaatgct

SEQ ID NO: 251073 - DNA, 25 bp, Probe sequence
gatactgggataagttacggtaata

SEQ ID NO: 251074 - DNA, 25 bp, Probe sequence
gttacggtaatattaatgctatgcg

SEQ ID NO: 251075 - DNA, 25 bp, Probe sequence
gggataagttacggtaatattaatg

SEQ ID NO: 251076 - DNA, 25 bp, Probe sequence
ggataagttacggtaatattaatgc

SEQ ID NO: 251077 - DNA, 25 bp, Probe sequence
tgggataagttacggtaatattaat

SEQ ID NO: 251078 - DNA, 25 bp, Probe sequence
tgcaaagatcttatatgaatatgcg

SEQ ID NO: 251079 - DNA, 25 bp, Probe sequence
taagttacggtaatattaatgctat

SEQ ID NO: 251080 - DNA, 25 bp, Probe sequence
taagcttaaagaatgcaaagatctt

SEQ ID NO: 251081 - DNA, 25 bp, Probe sequence
taaagatactgggataagttacggt

SEQ ID NO: 251082 - DNA, 25 bp, Probe sequence
tactgggataagttacggtaatatt

SEQ ID NO: 251083 - DNA, 25 bp, Probe sequence
tacggtaatattaatgctatgcgcc

SEQ ID NO: 251084 - DNA, 25 bp, Probe sequence
ttacggtaatattaatgctatgcgc

SEQ ID NO: 251085 - DNA, 25 bp, Probe sequence
ttaagcttaaagaatgcaaagatct

SEQ ID NO: 251086 - DNA, 25 bp, Probe sequence
attcgagacaaaacctgatcatcaa

SEQ ID NO: 251087 - DNA, 25 bp, Probe sequence
atatataggtgtgctactactttat

SEQ ID NO: 251088 - DNA, 25 bp, Probe sequence
atataggtgtgctactactttatta

SEQ ID NO: 251089 - DNA, 25 bp, Probe sequence
ataggtgtgctactactttattatt

SEQ ID NO: 251090 - DNA, 25 bp, Probe sequence
atgtcgcctaaagatacaacaagat

SEQ ID NO: 251091 - DNA, 25 bp, Probe sequence
aggattccactatatataggtgtgc

SEQ ID NO: 251092 - DNA, 25 bp, Probe sequence
aggtgtgctactactttattattct

SEQ ID NO: 251093 - DNA, 25 bp, Probe sequence
actatatataggtgtgctactactt

SEQ ID NO: 251094 - DNA, 25 bp, Probe sequence
acaacaagattcgagacaaaacctg

SEQ ID NO: 251095 - DNA, 25 bp, Probe sequence
aacaagattcgagacaaaacctgat

SEQ ID NO: 251096 - DNA, 25 bp, Probe sequence
aagattcgagacaaaacctgatcat

SEQ ID NO: 251097 - DNA, 25 bp, Probe sequence
caaaacctgatcatcaagcacagtt

SEQ ID NO: 251098 - DNA, 25 bp, Probe sequence
gctactactttattattctcgtttt

SEQ ID NO: 251099 - DNA, 25 bp, Probe sequence
gaaagataatcaaaggattccacta

SEQ ID NO: 251100 - DNA, 25 bp, Probe sequence
gacaaaacctgatcatcaagcacag

SEQ ID NO: 251101 - DNA, 25 bp, Probe sequence
gagacaaaacctgatcatcaagcac

SEQ ID NO: 251102 - DNA, 25 bp, Probe sequence
gataatcaaaggattccactatata

SEQ ID NO: 251103 - DNA, 25 bp, Probe sequence
gatacaacaagattcgagacaaaac

SEQ ID NO: 251104 - DNA, 25 bp, Probe sequence
gattcgagacaaaacctgatcatca

SEQ ID NO: 251105 - DNA, 25 bp, Probe sequence
gattccactatatataggtgtgcta

SEQ ID NO: 251106 - DNA, 25 bp, Probe sequence
gtcgcctaaagatacaacaagattc

SEQ ID NO: 251107 - DNA, 25 bp, Probe sequence
gtgctactactttattattctcgtt

SEQ ID NO: 251108 - DNA, 25 bp, Probe sequence
gtgtgctactactttattattctcg

SEQ ID NO: 251109 - DNA, 25 bp, Probe sequence
ggtgtgctactactttattattctc

SEQ ID NO: 251110 - DNA, 25 bp, Probe sequence
tgtgctactactttattattctcgt

SEQ ID NO: 251111 - DNA, 25 bp, Probe sequence
tgctactactttattattctcgttt

SEQ ID NO: 251112 - DNA, 25 bp, Probe sequence
tcgagacaaaacctgatcatcaagc

SEQ ID NO: 251113 - DNA, 25 bp, Probe sequence
tcaaaggattccactatatataggt

SEQ ID NO: 251114 - DNA, 25 bp, Probe sequence
taaagatacaacaagattcgagaca

SEQ ID NO: 251115 - DNA, 25 bp, Probe sequence
taggtgtgctactactttattattc

SEQ ID NO: 251116 - DNA, 25 bp, Probe sequence
tataggtgtgctactactttattat

SEQ ID NO: 251117 - DNA, 25 bp, Probe sequence
tatataggtgtgctactactttatt

SEQ ID NO: 251118 - DNA, 25 bp, Probe sequence
tatatataggtgtgctactacttta

SEQ ID NO: 251119 - DNA, 25 bp, Probe sequence
ttccactatatataggtgtgctact

SEQ ID NO: 251120 - DNA, 25 bp, Probe sequence
attttcttcattccatatatggaga

SEQ ID NO: 251121 - DNA, 25 bp, Probe sequence
atttgtgattttcttcattccatat

SEQ ID NO: 251122 - DNA, 25 bp, Probe sequence
atactctgtgccctatttgtgattt

SEQ ID NO: 251123 - DNA, 25 bp, Probe sequence
atgacatacggttcaattgtagcta

SEQ ID NO: 251124 - DNA, 25 bp, Probe sequence
acggttcaattgtagctatactctg

SEQ ID NO: 251125 - DNA, 25 bp, Probe sequence
actctgtgccctatttgtgattttc

SEQ ID NO: 251126 - DNA, 25 bp, Probe sequence
caattgtagctatactctgtgccct

SEQ ID NO: 251127 - DNA, 25 bp, Probe sequence
aattgtagctatactctgtgcccta

SEQ ID NO: 251128 - DNA, 25 bp, Probe sequence
catacggttcaattgtagctatact

SEQ ID NO: 251129 - DNA, 25 bp, Probe sequence
ctatttgtgattttcttcattccat

SEQ ID NO: 251130 - DNA, 25 bp, Probe sequence
ctctgtgccctatttgtgattttct

SEQ ID NO: 251131 - DNA, 25 bp, Probe sequence
ctgtgccctatttgtgattttcttc

SEQ ID NO: 251132 - DNA, 25 bp, Probe sequence
ccctatttgtgattttcttcattcc

SEQ ID NO: 251133 - DNA, 25 bp, Probe sequence
cctatttgtgattttcttcattcca

SEQ ID NO: 251134 - DNA, 25 bp, Probe sequence
gccctatttgtgattttcttcattc

SEQ ID NO: 251135 - DNA, 25 bp, Probe sequence
gacatacggttcaattgtagctata

SEQ ID NO: 251136 - DNA, 25 bp, Probe sequence
gattttcttcattccatatatggag

SEQ ID NO: 251137 - DNA, 25 bp, Probe sequence
gttcaattgtagctatactctgtgc

SEQ ID NO: 251138 - DNA, 25 bp, Probe sequence
gtgccctatttgtgattttcttcat

SEQ ID NO: 251139 - DNA, 25 bp, Probe sequence
gtgattttcttcattccatatatgg

SEQ ID NO: 251140 - DNA, 25 bp, Probe sequence
ggttcaattgtagctatactctgtg

SEQ ID NO: 251141 - DNA, 25 bp, Probe sequence
tgtgattttcttcattccatatatg

SEQ ID NO: 251142 - DNA, 25 bp, Probe sequence
tgtgccctatttgtgattttcttca

SEQ ID NO: 251143 - DNA, 25 bp, Probe sequence
tgattttcttcattccatatatgga

SEQ ID NO: 251144 - DNA, 25 bp, Probe sequence
tgccctatttgtgattttcttcatt

SEQ ID NO: 251145 - DNA, 25 bp, Probe sequence
tctgtgccctatttgtgattttctt

SEQ ID NO: 251146 - DNA, 25 bp, Probe sequence
tcaattgtagctatactctgtgccc

SEQ ID NO: 251147 - DNA, 25 bp, Probe sequence
tactctgtgccctatttgtgatttt

SEQ ID NO: 251148 - DNA, 25 bp, Probe sequence
tacggttcaattgtagctatactct

SEQ ID NO: 251149 - DNA, 25 bp, Probe sequence
tatactctgtgccctatttgtgatt

SEQ ID NO: 251150 - DNA, 25 bp, Probe sequence
tatttgtgattttcttcattccata

SEQ ID NO: 251151 - DNA, 25 bp, Probe sequence
tttgtgattttcttcattccatata

SEQ ID NO: 251152 - DNA, 25 bp, Probe sequence
ttcttcattccatatatggagaaga

SEQ ID NO: 251153 - DNA, 25 bp, Probe sequence
ttgtgattttcttcattccatatat

SEQ ID NO: 251154 - DNA, 25 bp, Probe sequence
atgataaatcaatatctaattatag

SEQ ID NO: 251155 - DNA, 25 bp, Probe sequence
atggtggtataagtgaattaagaag

SEQ ID NO: 251156 - DNA, 25 bp, Probe sequence
cagcggaaaaactctataattacca

SEQ ID NO: 251157 - DNA, 25 bp, Probe sequence
aatgataaatcaatatctaattata

SEQ ID NO: 251158 - DNA, 25 bp, Probe sequence
aattatagaattaatcaagacactg

SEQ ID NO: 251159 - DNA, 25 bp, Probe sequence
gaataatttaactttagaaacagcg

SEQ ID NO: 251160 - DNA, 25 bp, Probe sequence
gaaacagcggaaaaactctataatt

SEQ ID NO: 251161 - DNA, 25 bp, Probe sequence
gataaatcaatatctaattatagaa

SEQ ID NO: 251162 - DNA, 25 bp, Probe sequence
gtttcttatggtggtataagtgaat

SEQ ID NO: 251163 - DNA, 25 bp, Probe sequence
gtataagtgaattaagaagcgggaa

SEQ ID NO: 251164 - DNA, 25 bp, Probe sequence
gtgaataatttaactttagaaacag

SEQ ID NO: 251165 - DNA, 25 bp, Probe sequence
gtggtataagtgaattaagaagcgg

SEQ ID NO: 251166 - DNA, 25 bp, Probe sequence
ggtggtataagtgaattaagaagcg

SEQ ID NO: 251167 - DNA, 25 bp, Probe sequence
ggtataagtgaattaagaagcggga

SEQ ID NO: 251168 - DNA, 25 bp, Probe sequence
tggtataagtgaattaagaagcggg

SEQ ID NO: 251169 - DNA, 25 bp, Probe sequence
tggtggtataagtgaattaagaagc

SEQ ID NO: 251170 - DNA, 25 bp, Probe sequence
tgtttcttatggtggtataagtgaa

SEQ ID NO: 251171 - DNA, 25 bp, Probe sequence
tgataaatcaatatctaattataga

SEQ ID NO: 251172 - DNA, 25 bp, Probe sequence
tgacaaaaattatgaaccagtttaa

SEQ ID NO: 251173 - DNA, 25 bp, Probe sequence
tgaataatttaactttagaaacagc

SEQ ID NO: 251174 - DNA, 25 bp, Probe sequence
taagtgaattaagaagcgggaaaag

SEQ ID NO: 251175 - DNA, 25 bp, Probe sequence
tatggtggtataagtgaattaagaa

SEQ ID NO: 251176 - DNA, 25 bp, Probe sequence
tatgaaccagtttaaagaaatttat

SEQ ID NO: 251177 - DNA, 25 bp, Probe sequence
tataagtgaattaagaagcgggaaa

SEQ ID NO: 251178 - DNA, 25 bp, Probe sequence
tttcttatggtggtataagtgaatt

SEQ ID NO: 251179 - DNA, 25 bp, Probe sequence
attcatatgggcattctcgctcata

SEQ ID NO: 251180 - DNA, 25 bp, Probe sequence
attattcatatgggcattctcgctc

SEQ ID NO: 251181 - DNA, 25 bp, Probe sequence
atagcacttacgtatatttatacta

SEQ ID NO: 251182 - DNA, 25 bp, Probe sequence
atacttatctttttcacatttatat

SEQ ID NO: 251183 - DNA, 25 bp, Probe sequence
ataattatgaacatcgttgcaatca

SEQ ID NO: 251184 - DNA, 25 bp, Probe sequence
atgacattgagtcaacctctcaccg

SEQ ID NO: 251185 - DNA, 25 bp, Probe sequence
atctttttcacatttatattatcaa

SEQ ID NO: 251186 - DNA, 25 bp, Probe sequence
atcgttgcaatcattatgacattga

SEQ ID NO: 251187 - DNA, 25 bp, Probe sequence
acctctcaccgtgaattactttagt

SEQ ID NO: 251188 - DNA, 25 bp, Probe sequence
acatcgttgcaatcattatgacatt

SEQ ID NO: 251189 - DNA, 25 bp, Probe sequence
aagtctatttataattatgaacatc

SEQ ID NO: 251190 - DNA, 25 bp, Probe sequence
aatatattaacgattctttccattg

SEQ ID NO: 251191 - DNA, 25 bp, Probe sequence
caacctctcaccgtgaattacttta

SEQ ID NO: 251192 - DNA, 25 bp, Probe sequence
cacatttatattatcaatctttttc

SEQ ID NO: 251193 - DNA, 25 bp, Probe sequence
catatgggcattctcgctcatagca

SEQ ID NO: 251194 - DNA, 25 bp, Probe sequence
cattctcgctcatagcacttacgta

SEQ ID NO: 251195 - DNA, 25 bp, Probe sequence
ctcatagcacttacgtatatttata

SEQ ID NO: 251196 - DNA, 25 bp, Probe sequence
ctcgctcatagcacttacgtatatt

SEQ ID NO: 251197 - DNA, 25 bp, Probe sequence
cgggttatacttatctttttcacat

SEQ ID NO: 251198 - DNA, 25 bp, Probe sequence
cgctcatagcacttacgtatattta

SEQ ID NO: 251199 - DNA, 25 bp, Probe sequence
gagtcaacctctcaccgtgaattac

SEQ ID NO: 251200 - DNA, 25 bp, Probe sequence
gaacatcgttgcaatcattatgaca

SEQ ID NO: 251201 - DNA, 25 bp, Probe sequence
gagaacaattattttaagtctattt

SEQ ID NO: 251202 - DNA, 25 bp, Probe sequence
gttatacttatctttttcacattta

SEQ ID NO: 251203 - DNA, 25 bp, Probe sequence
gtcaacctctcaccgtgaattactt

SEQ ID NO: 251204 - DNA, 25 bp, Probe sequence
ggttatacttatctttttcacattt

SEQ ID NO: 251205 - DNA, 25 bp, Probe sequence
tgacattgagtcaacctctcaccgt

SEQ ID NO: 251206 - DNA, 25 bp, Probe sequence
tctttttcattttaattaagtcatc

SEQ ID NO: 251207 - DNA, 25 bp, Probe sequence
tcatatgggcattctcgctcatagc

SEQ ID NO: 251208 - DNA, 25 bp, Probe sequence
tattcatatgggcattctcgctcat

SEQ ID NO: 251209 - DNA, 25 bp, Probe sequence
ttgagtcaacctctcaccgtgaatt

SEQ ID NO: 251210 - DNA, 25 bp, Probe sequence
ttatattatcaatctttttcatttt

SEQ ID NO: 251211 - DNA, 25 bp, Probe sequence
ttatcaatctttttcattttaatta

SEQ ID NO: 251212 - DNA, 25 bp, Probe sequence
ttctcgctcatagcacttacgtata

SEQ ID NO: 251213 - DNA, 25 bp, Probe sequence
attaagacagggcaaacgcgaagta

SEQ ID NO: 251214 - DNA, 25 bp, Probe sequence
ataatctaaccctgaatacaacaga

SEQ ID NO: 251215 - DNA, 25 bp, Probe sequence
atctaaccctgaatacaacagaaaa

SEQ ID NO: 251216 - DNA, 25 bp, Probe sequence
agggcaaacgcgaagtagataatct

SEQ ID NO: 251217 - DNA, 25 bp, Probe sequence
agtagataatctaaccctgaataca

SEQ ID NO: 251218 - DNA, 25 bp, Probe sequence
agataatctaaccctgaatacaaca

SEQ ID NO: 251219 - DNA, 25 bp, Probe sequence
agacagggcaaacgcgaagtagata

SEQ ID NO: 251220 - DNA, 25 bp, Probe sequence
acagggcaaacgcgaagtagataat

SEQ ID NO: 251221 - DNA, 25 bp, Probe sequence
actttcacaattaagacagggcaaa

SEQ ID NO: 251222 - DNA, 25 bp, Probe sequence
acaattaagacagggcaaacgcgaa

SEQ ID NO: 251223 - DNA, 25 bp, Probe sequence
aacgcgaagtagataatctaaccct

SEQ ID NO: 251224 - DNA, 25 bp, Probe sequence
aagacagggcaaacgcgaagtagat

SEQ ID NO: 251225 - DNA, 25 bp, Probe sequence
aatctaaccctgaatacaacagaaa

SEQ ID NO: 251226 - DNA, 25 bp, Probe sequence
aattaagacagggcaaacgcgaagt

SEQ ID NO: 251227 - DNA, 25 bp, Probe sequence
cacaattaagacagggcaaacgcga

SEQ ID NO: 251228 - DNA, 25 bp, Probe sequence
ctaaccctgaatacaacagaaaaat

SEQ ID NO: 251229 - DNA, 25 bp, Probe sequence
cgcgaagtagataatctaaccctga

SEQ ID NO: 251230 - DNA, 25 bp, Probe sequence
gcgaagtagataatctaaccctgaa

SEQ ID NO: 251231 - DNA, 25 bp, Probe sequence
gcaaacgcgaagtagataatctaac

SEQ ID NO: 251232 - DNA, 25 bp, Probe sequence
gacagggcaaacgcgaagtagataa

SEQ ID NO: 251233 - DNA, 25 bp, Probe sequence
gataatctaaccctgaatacaacag

SEQ ID NO: 251234 - DNA, 25 bp, Probe sequence
gtagataatctaaccctgaatacaa

SEQ ID NO: 251235 - DNA, 25 bp, Probe sequence
gtactttcacaattaagacagggca

SEQ ID NO: 251236 - DNA, 25 bp, Probe sequence
gggcaaacgcgaagtagataatcta

SEQ ID NO: 251237 - DNA, 25 bp, Probe sequence
ggcaaacgcgaagtagataatctaa

SEQ ID NO: 251238 - DNA, 25 bp, Probe sequence
tgaatatgccaataaagttttgtaa

SEQ ID NO: 251239 - DNA, 25 bp, Probe sequence
tctaaaaaaactggagtttctcaat

SEQ ID NO: 251240 - DNA, 25 bp, Probe sequence
tcacaattaagacagggcaaacgcg

SEQ ID NO: 251241 - DNA, 25 bp, Probe sequence
taatctaaccctgaatacaacagaa

SEQ ID NO: 251242 - DNA, 25 bp, Probe sequence
taagacagggcaaacgcgaagtaga

SEQ ID NO: 251243 - DNA, 25 bp, Probe sequence
tagataatctaaccctgaatacaac

SEQ ID NO: 251244 - DNA, 25 bp, Probe sequence
ttaagacagggcaaacgcgaagtag

SEQ ID NO: 251245 - DNA, 25 bp, Probe sequence
ttaacaggatatgaaatttctaaaa

SEQ ID NO: 251246 - DNA, 25 bp, Probe sequence
ttcacaattaagacagggcaaacgc

SEQ ID NO: 251247 - DNA, 25 bp, Probe sequence
attcgattttaagttattatccaga

SEQ ID NO: 251248 - DNA, 25 bp, Probe sequence
attttaagttattatccagaatata

SEQ ID NO: 251249 - DNA, 25 bp, Probe sequence
atataatatcgcagtaagttggcaa

SEQ ID NO: 251250 - DNA, 25 bp, Probe sequence
atatcgcagtaagttggcaacgttt

SEQ ID NO: 251251 - DNA, 25 bp, Probe sequence
ataatatcgcagtaagttggcaacg

SEQ ID NO: 251252 - DNA, 25 bp, Probe sequence
atcgcagtaagttggcaacgtttaa

SEQ ID NO: 251253 - DNA, 25 bp, Probe sequence
atccagaatataatatcgcagtaag

SEQ ID NO: 251254 - DNA, 25 bp, Probe sequence
agtgaattattcgattttaagttat

SEQ ID NO: 251255 - DNA, 25 bp, Probe sequence
agaatataatatcgcagtaagttgg

SEQ ID NO: 251256 - DNA, 25 bp, Probe sequence
aatatcgcagtaagttggcaacgtt

SEQ ID NO: 251257 - DNA, 25 bp, Probe sequence
aatataatatcgcagtaagttggca

SEQ ID NO: 251258 - DNA, 25 bp, Probe sequence
cagaatataatatcgcagtaagttg

SEQ ID NO: 251259 - DNA, 25 bp, Probe sequence
cagtaagttggcaacgtttaagaga

SEQ ID NO: 251260 - DNA, 25 bp, Probe sequence
cgattttaagttattatccagaata

SEQ ID NO: 251261 - DNA, 25 bp, Probe sequence
cgcagtaagttggcaacgtttaaga

SEQ ID NO: 251262 - DNA, 25 bp, Probe sequence
gcagtaagttggcaacgtttaagag

SEQ ID NO: 251263 - DNA, 25 bp, Probe sequence
gaatataatatcgcagtaagttggc

SEQ ID NO: 251264 - DNA, 25 bp, Probe sequence
gaattattcgattttaagttattat

SEQ ID NO: 251265 - DNA, 25 bp, Probe sequence
gattttaagttattatccagaatat

SEQ ID NO: 251266 - DNA, 25 bp, Probe sequence
gtaagttggcaacgtttaagagaag

SEQ ID NO: 251267 - DNA, 25 bp, Probe sequence
gtgaattattcgattttaagttatt

SEQ ID NO: 251268 - DNA, 25 bp, Probe sequence
tgaattattcgattttaagttatta

SEQ ID NO: 251269 - DNA, 25 bp, Probe sequence
tcgcagtaagttggcaacgtttaag

SEQ ID NO: 251270 - DNA, 25 bp, Probe sequence
tccagaatataatatcgcagtaagt

SEQ ID NO: 251271 - DNA, 25 bp, Probe sequence
tcgattttaagttattatccagaat

SEQ ID NO: 251272 - DNA, 25 bp, Probe sequence
taagttggcaacgtttaagagaagg

SEQ ID NO: 251273 - DNA, 25 bp, Probe sequence
taatatcgcagtaagttggcaacgt

SEQ ID NO: 251274 - DNA, 25 bp, Probe sequence
tatcgcagtaagttggcaacgttta

SEQ ID NO: 251275 - DNA, 25 bp, Probe sequence
tatccagaatataatatcgcagtaa

SEQ ID NO: 251276 - DNA, 25 bp, Probe sequence
tataatatcgcagtaagttggcaac

SEQ ID NO: 251277 - DNA, 25 bp, Probe sequence
tattcgattttaagttattatccag

SEQ ID NO: 251278 - DNA, 25 bp, Probe sequence
ttattcgattttaagttattatcca

SEQ ID NO: 251279 - DNA, 25 bp, Probe sequence
ttatccagaatataatatcgcagta

SEQ ID NO: 251280 - DNA, 25 bp, Probe sequence
ttcgattttaagttattatccagaa

SEQ ID NO: 251281 - DNA, 25 bp, Probe sequence
atcagagtagaaagtgttgaggcgt

SEQ ID NO: 251282 - DNA, 25 bp, Probe sequence
atgcctaaaaatgtcatatatgtaa

SEQ ID NO: 251283 - DNA, 25 bp, Probe sequence
atgtcatatatgtaatcagagtaga

SEQ ID NO: 251284 - DNA, 25 bp, Probe sequence
agtgttgaggcgtttcagaagttgt

SEQ ID NO: 251285 - DNA, 25 bp, Probe sequence
agtagaaagtgttgaggcgtttcag

SEQ ID NO: 251286 - DNA, 25 bp, Probe sequence
agagtagaaagtgttgaggcgtttc

SEQ ID NO: 251287 - DNA, 25 bp, Probe sequence
agaaagtgttgaggcgtttcagaag

SEQ ID NO: 251288 - DNA, 25 bp, Probe sequence
aaatgcactgagcaacaaaagatgt

SEQ ID NO: 251289 - DNA, 25 bp, Probe sequence
aaagtgttgaggcgtttcagaagtt

SEQ ID NO: 251290 - DNA, 25 bp, Probe sequence
aaatgtcatatatgtaatcagagta

SEQ ID NO: 251291 - DNA, 25 bp, Probe sequence
aaaaatgcactgagcaacaaaagat

SEQ ID NO: 251292 - DNA, 25 bp, Probe sequence
aaaatgcactgagcaacaaaagatg

SEQ ID NO: 251293 - DNA, 25 bp, Probe sequence
aagtgttgaggcgtttcagaagttg

SEQ ID NO: 251294 - DNA, 25 bp, Probe sequence
aatgcactgagcaacaaaagatgtt

SEQ ID NO: 251295 - DNA, 25 bp, Probe sequence
aataaaaaatgcactgagcaacaaa

SEQ ID NO: 251296 - DNA, 25 bp, Probe sequence
caacaaaagatgttgctcgtgcatt

SEQ ID NO: 251297 - DNA, 25 bp, Probe sequence
cagagtagaaagtgttgaggcgttt

SEQ ID NO: 251298 - DNA, 25 bp, Probe sequence
gcgtttcagaagttgtttagaaaag

SEQ ID NO: 251299 - DNA, 25 bp, Probe sequence
gaaagtgttgaggcgtttcagaagt

SEQ ID NO: 251300 - DNA, 25 bp, Probe sequence
gtagaaagtgttgaggcgtttcaga

SEQ ID NO: 251301 - DNA, 25 bp, Probe sequence
gagtagaaagtgttgaggcgtttca

SEQ ID NO: 251302 - DNA, 25 bp, Probe sequence
gaggcgtttcagaagttgtttagaa

SEQ ID NO: 251303 - DNA, 25 bp, Probe sequence
gttgaggcgtttcagaagttgttta

SEQ ID NO: 251304 - DNA, 25 bp, Probe sequence
gtcatatatgtaatcagagtagaaa

SEQ ID NO: 251305 - DNA, 25 bp, Probe sequence
gtgttgaggcgtttcagaagttgtt

SEQ ID NO: 251306 - DNA, 25 bp, Probe sequence
tgtcatatatgtaatcagagtagaa

SEQ ID NO: 251307 - DNA, 25 bp, Probe sequence
tgttgaggcgtttcagaagttgttt

SEQ ID NO: 251308 - DNA, 25 bp, Probe sequence
tgaggcgtttcagaagttgtttaga

SEQ ID NO: 251309 - DNA, 25 bp, Probe sequence
tgcctaaaaatgtcatatatgtaat

SEQ ID NO: 251310 - DNA, 25 bp, Probe sequence
tcagagtagaaagtgttgaggcgtt

SEQ ID NO: 251311 - DNA, 25 bp, Probe sequence
tcagaagttgtttagaaaagtaagt

SEQ ID NO: 251312 - DNA, 25 bp, Probe sequence
taaaaaatgcactgagcaacaaaag

SEQ ID NO: 251313 - DNA, 25 bp, Probe sequence
tagaaagtgttgaggcgtttcagaa

SEQ ID NO: 251314 - DNA, 25 bp, Probe sequence
ttgaggcgtttcagaagttgtttag

SEQ ID NO: 251315 - DNA, 25 bp, Probe sequence
attgaccctgagtaatgaaaaatat

SEQ ID NO: 251316 - DNA, 25 bp, Probe sequence
atttagctgatgttgaatgggttat

SEQ ID NO: 251317 - DNA, 25 bp, Probe sequence
atatcatcatttagctgatgttgaa

SEQ ID NO: 251318 - DNA, 25 bp, Probe sequence
atcatcatttagctgatgttgaatg

SEQ ID NO: 251319 - DNA, 25 bp, Probe sequence
atcatttagctgatgttgaatgggt

SEQ ID NO: 251320 - DNA, 25 bp, Probe sequence
atgagacaacttctacaatggttga

SEQ ID NO: 251321 - DNA, 25 bp, Probe sequence
atgtgatgtcttgttaaaggtgggg

SEQ ID NO: 251322 - DNA, 25 bp, Probe sequence
agacaacttctacaatggttgaagg

SEQ ID NO: 251323 - DNA, 25 bp, Probe sequence
agaatgtgatgtcttgttaaaggtg

SEQ ID NO: 251324 - DNA, 25 bp, Probe sequence
agctgatgttgaatgggttattatt

SEQ ID NO: 251325 - DNA, 25 bp, Probe sequence
aatgtgatgtcttgttaaaggtggg

SEQ ID NO: 251326 - DNA, 25 bp, Probe sequence
aatatcatcatttagctgatgttga

SEQ ID NO: 251327 - DNA, 25 bp, Probe sequence
caatatcatcatttagctgatgttg

SEQ ID NO: 251328 - DNA, 25 bp, Probe sequence
catttagctgatgttgaatgggtta

SEQ ID NO: 251329 - DNA, 25 bp, Probe sequence
ccaatatcatcatttagctgatgtt

SEQ ID NO: 251330 - DNA, 25 bp, Probe sequence
gaatgtgatgtcttgttaaaggtgg

SEQ ID NO: 251331 - DNA, 25 bp, Probe sequence
gacaacttctacaatggttgaagga

SEQ ID NO: 251332 - DNA, 25 bp, Probe sequence
gagacaacttctacaatggttgaag

SEQ ID NO: 251333 - DNA, 25 bp, Probe sequence
gttccaatatcatcatttagctgat

SEQ ID NO: 251334 - DNA, 25 bp, Probe sequence
gtgatgtcttgttaaaggtggggtt

SEQ ID NO: 251335 - DNA, 25 bp, Probe sequence
ggttccaatatcatcatttagctga

SEQ ID NO: 251336 - DNA, 25 bp, Probe sequence
tgtgatgtcttgttaaaggtggggt

SEQ ID NO: 251337 - DNA, 25 bp, Probe sequence
tgatgtcttgttaaaggtggggttc

SEQ ID NO: 251338 - DNA, 25 bp, Probe sequence
tccaatatcatcatttagctgatgt

SEQ ID NO: 251339 - DNA, 25 bp, Probe sequence
tcatttagctgatgttgaatgggtt

SEQ ID NO: 251340 - DNA, 25 bp, Probe sequence
tcatcatttagctgatgttgaatgg

SEQ ID NO: 251341 - DNA, 25 bp, Probe sequence
tagctgatgttgaatgggttattat

SEQ ID NO: 251342 - DNA, 25 bp, Probe sequence
tatcatcatttagctgatgttgaat

SEQ ID NO: 251343 - DNA, 25 bp, Probe sequence
tattgaccctgagtaatgaaaaata

SEQ ID NO: 251344 - DNA, 25 bp, Probe sequence
tttagctgatgttgaatgggttatt

SEQ ID NO: 251345 - DNA, 25 bp, Probe sequence
tttattgaccctgagtaatgaaaaa

SEQ ID NO: 251346 - DNA, 25 bp, Probe sequence
ttattgaccctgagtaatgaaaaat

SEQ ID NO: 251347 - DNA, 25 bp, Probe sequence
ttagctgatgttgaatgggttatta

SEQ ID NO: 251348 - DNA, 25 bp, Probe sequence
ttccaatatcatcatttagctgatg

SEQ ID NO: 251349 - DNA, 25 bp, Probe sequence
atttcacacagcttcattaataaaa

SEQ ID NO: 251350 - DNA, 25 bp, Probe sequence
ataacaaaacgaatccgcttcatcc

SEQ ID NO: 251351 - DNA, 25 bp, Probe sequence
atcactatatttcacacagcttcat

SEQ ID NO: 251352 - DNA, 25 bp, Probe sequence
agcctacttcattcaataacaaaac

SEQ ID NO: 251353 - DNA, 25 bp, Probe sequence
acgaatccgcttcatccaaaatcaa

SEQ ID NO: 251354 - DNA, 25 bp, Probe sequence
actggcttcaacttcagcctacttc

SEQ ID NO: 251355 - DNA, 25 bp, Probe sequence
actatatttcacacagcttcattaa

SEQ ID NO: 251356 - DNA, 25 bp, Probe sequence
acttcagcctacttcattcaataac

SEQ ID NO: 251357 - DNA, 25 bp, Probe sequence
aaacgaatccgcttcatccaaaatc

SEQ ID NO: 251358 - DNA, 25 bp, Probe sequence
aacaaaacgaatccgcttcatccaa

SEQ ID NO: 251359 - DNA, 25 bp, Probe sequence
aacttcaactggcttcaacttcagc

SEQ ID NO: 251360 - DNA, 25 bp, Probe sequence
aacttcagcctacttcattcaataa

SEQ ID NO: 251361 - DNA, 25 bp, Probe sequence
aactggcttcaacttcagcctactt

SEQ ID NO: 251362 - DNA, 25 bp, Probe sequence
caatcactatatttcacacagcttc

SEQ ID NO: 251363 - DNA, 25 bp, Probe sequence
caacttcagcctacttcattcaata

SEQ ID NO: 251364 - DNA, 25 bp, Probe sequence
caaaacgaatccgcttcatccaaaa

SEQ ID NO: 251365 - DNA, 25 bp, Probe sequence
cttcaacttcaactggcttcaactt

SEQ ID NO: 251366 - DNA, 25 bp, Probe sequence
cttcaactggcttcaacttcagcct

SEQ ID NO: 251367 - DNA, 25 bp, Probe sequence
gcttcaacttcaactggcttcaact

SEQ ID NO: 251368 - DNA, 25 bp, Probe sequence
gttcaatcactatatttcacacagc

SEQ ID NO: 251369 - DNA, 25 bp, Probe sequence
tggcttcaacttcagcctacttcat

SEQ ID NO: 251370 - DNA, 25 bp, Probe sequence
tccgcttcatccaaaatcaaccatt

SEQ ID NO: 251371 - DNA, 25 bp, Probe sequence
tcagcctacttcattcaataacaaa

SEQ ID NO: 251372 - DNA, 25 bp, Probe sequence
tcactatatttcacacagcttcatt

SEQ ID NO: 251373 - DNA, 25 bp, Probe sequence
tcacacagcttcattaataaaacga

SEQ ID NO: 251374 - DNA, 25 bp, Probe sequence
tcaactggcttcaacttcagcctac

SEQ ID NO: 251375 - DNA, 25 bp, Probe sequence
tcaacttcagcctacttcattcaat

SEQ ID NO: 251376 - DNA, 25 bp, Probe sequence
tcaacttcaactggcttcaacttca

SEQ ID NO: 251377 - DNA, 25 bp, Probe sequence
taaaacgaaattgcttcaacccgct

SEQ ID NO: 251378 - DNA, 25 bp, Probe sequence
tatatttcacacagcttcattaata

SEQ ID NO: 251379 - DNA, 25 bp, Probe sequence
ttcaacttcaactggcttcaacttc

SEQ ID NO: 251380 - DNA, 25 bp, Probe sequence
ttcaacttcagcctacttcattcaa

SEQ ID NO: 251381 - DNA, 25 bp, Probe sequence
ttcagcctacttcattcaataacaa

SEQ ID NO: 251382 - DNA, 25 bp, Probe sequence
ttgttcaatcactatatttcacaca

SEQ ID NO: 251383 - DNA, 25 bp, Probe sequence
attgtaatgtcgtggaaattttatg

SEQ ID NO: 251384 - DNA, 25 bp, Probe sequence
attatggagttataccagaagttga

SEQ ID NO: 251385 - DNA, 25 bp, Probe sequence
atattatggagttataccagaagtt

SEQ ID NO: 251386 - DNA, 25 bp, Probe sequence
atgtcgtggaaatattatggagtta

SEQ ID NO: 251387 - DNA, 25 bp, Probe sequence
atgtcgtggaaattttatgggcatt

SEQ ID NO: 251388 - DNA, 25 bp, Probe sequence
agttgatttgtattgtaatgtcgtg

SEQ ID NO: 251389 - DNA, 25 bp, Probe sequence
accagaagttgatttgtattgtaat

SEQ ID NO: 251390 - DNA, 25 bp, Probe sequence
aagttgatttgtattgtaatgtcgt

SEQ ID NO: 251391 - DNA, 25 bp, Probe sequence
aatgtcgtggaaattttatgggcat

SEQ ID NO: 251392 - DNA, 25 bp, Probe sequence
cgtggaaatattatggagttatacc

SEQ ID NO: 251393 - DNA, 25 bp, Probe sequence
cgtggaaattttatgggcattgcac

SEQ ID NO: 251394 - DNA, 25 bp, Probe sequence
gaagttgatttgtattgtaatgtcg

SEQ ID NO: 251395 - DNA, 25 bp, Probe sequence
gagttataccagaagttgatttgta

SEQ ID NO: 251396 - DNA, 25 bp, Probe sequence
gatgtcgtggaaatattatggagtt

SEQ ID NO: 251397 - DNA, 25 bp, Probe sequence
gatttgtattgtaatgtcgtggaaa

SEQ ID NO: 251398 - DNA, 25 bp, Probe sequence
gttgatttgtattgtaatgtcgtgg

SEQ ID NO: 251399 - DNA, 25 bp, Probe sequence
gttataccagaagttgatttgtatt

SEQ ID NO: 251400 - DNA, 25 bp, Probe sequence
gtattgtaatgtcgtggaaatttta

SEQ ID NO: 251401 - DNA, 25 bp, Probe sequence
gtaatgtcgtggaaattttatgggc

SEQ ID NO: 251402 - DNA, 25 bp, Probe sequence
gtcgtggaaattttatgggcattgc

SEQ ID NO: 251403 - DNA, 25 bp, Probe sequence
gtcgtggaaatattatggagttata

SEQ ID NO: 251404 - DNA, 25 bp, Probe sequence
gtgatgtcgtggaaatattatggag

SEQ ID NO: 251405 - DNA, 25 bp, Probe sequence
ggagttataccagaagttgatttgt

SEQ ID NO: 251406 - DNA, 25 bp, Probe sequence
ggaaatattatggagttataccaga

SEQ ID NO: 251407 - DNA, 25 bp, Probe sequence
tggaaattttatgggcattgcacct

SEQ ID NO: 251408 - DNA, 25 bp, Probe sequence
tgtcgtggaaattttatgggcattg

SEQ ID NO: 251409 - DNA, 25 bp, Probe sequence
tgtattgtaatgtcgtggaaatttt

SEQ ID NO: 251410 - DNA, 25 bp, Probe sequence
tgatttgtattgtaatgtcgtggaa

SEQ ID NO: 251411 - DNA, 25 bp, Probe sequence
tgatgtcgtggaaatattatggagt

SEQ ID NO: 251412 - DNA, 25 bp, Probe sequence
tcgtggaaattttatgggcattgca

SEQ ID NO: 251413 - DNA, 25 bp, Probe sequence
taatgtcgtggaaattttatgggca

SEQ ID NO: 251414 - DNA, 25 bp, Probe sequence
tataccagaagttgatttgtattgt

SEQ ID NO: 251415 - DNA, 25 bp, Probe sequence
tttgtattgtaatgtcgtggaaatt

SEQ ID NO: 251416 - DNA, 25 bp, Probe sequence
ttgatttgtattgtaatgtcgtgga

SEQ ID NO: 251417 - DNA, 25 bp, Probe sequence
atatatgaagcgttgattaagtatg

SEQ ID NO: 251418 - DNA, 25 bp, Probe sequence
atatgaagcgttgattaagtatgga

SEQ ID NO: 251419 - DNA, 25 bp, Probe sequence
atagtgaaaatctcgtgttttttgg

SEQ ID NO: 251420 - DNA, 25 bp, Probe sequence
atgaagcgttgattaagtatggaat

SEQ ID NO: 251421 - DNA, 25 bp, Probe sequence
atggcttacatatatgaagcgttga

SEQ ID NO: 251422 - DNA, 25 bp, Probe sequence
agatagtgaaaatctcgtgtttttt

SEQ ID NO: 251423 - DNA, 25 bp, Probe sequence
agcgttgattaagtatggaattgtt

SEQ ID NO: 251424 - DNA, 25 bp, Probe sequence
acatatatgaagcgttgattaagta

SEQ ID NO: 251425 - DNA, 25 bp, Probe sequence
aaatggcttacatatatgaagcgtt

SEQ ID NO: 251426 - DNA, 25 bp, Probe sequence
aaagatagtgaaaatctcgtgtttt

SEQ ID NO: 251427 - DNA, 25 bp, Probe sequence
aagcgttgattaagtatggaattgt

SEQ ID NO: 251428 - DNA, 25 bp, Probe sequence
aagatagtgaaaatctcgtgttttt

SEQ ID NO: 251429 - DNA, 25 bp, Probe sequence
aatggcttacatatatgaagcgttg

SEQ ID NO: 251430 - DNA, 25 bp, Probe sequence
catatatgaagcgttgattaagtat

SEQ ID NO: 251431 - DNA, 25 bp, Probe sequence
cttacatatatgaagcgttgattaa

SEQ ID NO: 251432 - DNA, 25 bp, Probe sequence
gcgttgattaagtatggaattgtta

SEQ ID NO: 251433 - DNA, 25 bp, Probe sequence
gaagcgttgattaagtatggaattg

SEQ ID NO: 251434 - DNA, 25 bp, Probe sequence
gaaagatagtgaaaatctcgtgttt

SEQ ID NO: 251435 - DNA, 25 bp, Probe sequence
gatagtgaaaatctcgtgttttttg

SEQ ID NO: 251436 - DNA, 25 bp, Probe sequence
ggcttacatatatgaagcgttgatt

SEQ ID NO: 251437 - DNA, 25 bp, Probe sequence
tggcttacatatatgaagcgttgat

SEQ ID NO: 251438 - DNA, 25 bp, Probe sequence
tggttttgaggtgttgtttgtattt

SEQ ID NO: 251439 - DNA, 25 bp, Probe sequence
tgaggtgttgtttgtattttataaa

SEQ ID NO: 251440 - DNA, 25 bp, Probe sequence
tgaagcgttgattaagtatggaatt

SEQ ID NO: 251441 - DNA, 25 bp, Probe sequence
tctcgtgttttttggttttgaggtg

SEQ ID NO: 251442 - DNA, 25 bp, Probe sequence
tacatatatgaagcgttgattaagt

SEQ ID NO: 251443 - DNA, 25 bp, Probe sequence
tagtgaaaatctcgtgttttttggt

SEQ ID NO: 251444 - DNA, 25 bp, Probe sequence
tatgaagcgttgattaagtatggaa

SEQ ID NO: 251445 - DNA, 25 bp, Probe sequence
tatatgaagcgttgattaagtatgg

SEQ ID NO: 251446 - DNA, 25 bp, Probe sequence
tttggttttgaggtgttgtttgtat

SEQ ID NO: 251447 - DNA, 25 bp, Probe sequence
tttgaggtgttgtttgtattttata

SEQ ID NO: 251448 - DNA, 25 bp, Probe sequence
ttttgaggtgttgtttgtattttat

SEQ ID NO: 251449 - DNA, 25 bp, Probe sequence
ttggttttgaggtgttgtttgtatt

SEQ ID NO: 251450 - DNA, 25 bp, Probe sequence
ttgaggtgttgtttgtattttataa

SEQ ID NO: 251451 - DNA, 25 bp, Probe sequence
attacctatggcgattttcaaggta

SEQ ID NO: 251452 - DNA, 25 bp, Probe sequence
atttagtaatattacctatggcgat

SEQ ID NO: 251453 - DNA, 25 bp, Probe sequence
atattacctatggcgattttcaagg

SEQ ID NO: 251454 - DNA, 25 bp, Probe sequence
atgcagtgtgcatttagtaatatta

SEQ ID NO: 251455 - DNA, 25 bp, Probe sequence
atggcgattttcaaggtattgaatt

SEQ ID NO: 251456 - DNA, 25 bp, Probe sequence
agtgtgcatttagtaatattaccta

SEQ ID NO: 251457 - DNA, 25 bp, Probe sequence
agtaatattacctatggcgattttc

SEQ ID NO: 251458 - DNA, 25 bp, Probe sequence
acctatggcgattttcaaggtattg

SEQ ID NO: 251459 - DNA, 25 bp, Probe sequence
acatatgcagtgtgcatttagtaat

SEQ ID NO: 251460 - DNA, 25 bp, Probe sequence
acaacatatgcagtgtgcatttagt

SEQ ID NO: 251461 - DNA, 25 bp, Probe sequence
aaaacaacatatgcagtgtgcattt

SEQ ID NO: 251462 - DNA, 25 bp, Probe sequence
aacaacatatgcagtgtgcatttag

SEQ ID NO: 251463 - DNA, 25 bp, Probe sequence
aatattacctatggcgattttcaag

SEQ ID NO: 251464 - DNA, 25 bp, Probe sequence
caacatatgcagtgtgcatttagta

SEQ ID NO: 251465 - DNA, 25 bp, Probe sequence
cagtgtgcatttagtaatattacct

SEQ ID NO: 251466 - DNA, 25 bp, Probe sequence
catttagtaatattacctatggcga

SEQ ID NO: 251467 - DNA, 25 bp, Probe sequence
ctatggcgattttcaaggtattgaa

SEQ ID NO: 251468 - DNA, 25 bp, Probe sequence
cctatggcgattttcaaggtattga

SEQ ID NO: 251469 - DNA, 25 bp, Probe sequence
gcatttagtaatattacctatggcg

SEQ ID NO: 251470 - DNA, 25 bp, Probe sequence
gcagtgtgcatttagtaatattacc

SEQ ID NO: 251471 - DNA, 25 bp, Probe sequence
gttaaaacaacatatgcagtgtgca

SEQ ID NO: 251472 - DNA, 25 bp, Probe sequence
gtaatattacctatggcgattttca

SEQ ID NO: 251473 - DNA, 25 bp, Probe sequence
gtgcatttagtaatattacctatgg

SEQ ID NO: 251474 - DNA, 25 bp, Probe sequence
gtgtgcatttagtaatattacctat

SEQ ID NO: 251475 - DNA, 25 bp, Probe sequence
ggcgattttcaaggtattgaattaa

SEQ ID NO: 251476 - DNA, 25 bp, Probe sequence
tgaaaacgttctcaattacatggta

SEQ ID NO: 251477 - DNA, 25 bp, Probe sequence
tgcagtgtgcatttagtaatattac

SEQ ID NO: 251478 - DNA, 25 bp, Probe sequence
tattacctatggcgattttcaaggt

SEQ ID NO: 251479 - DNA, 25 bp, Probe sequence
taatattacctatggcgattttcaa

SEQ ID NO: 251480 - DNA, 25 bp, Probe sequence
tacctatggcgattttcaaggtatt

SEQ ID NO: 251481 - DNA, 25 bp, Probe sequence
tagtaatattacctatggcgatttt

SEQ ID NO: 251482 - DNA, 25 bp, Probe sequence
ttagtaatattacctatggcgattt

SEQ ID NO: 251483 - DNA, 25 bp, Probe sequence
ttacctatggcgattttcaaggtat

SEQ ID NO: 251484 - DNA, 25 bp, Probe sequence
ttaaaacaacatatgcagtgtgcat

SEQ ID NO: 251485 - DNA, 25 bp, Probe sequence
attaagaaaatgtgccttttatatt

SEQ ID NO: 251486 - DNA, 25 bp, Probe sequence
atagtattaagaaaatgtgcctttt

SEQ ID NO: 251487 - DNA, 25 bp, Probe sequence
atgtgccttttatatttagcatttt

SEQ ID NO: 251488 - DNA, 25 bp, Probe sequence
atgtgaatcaaaagatgcgatatag

SEQ ID NO: 251489 - DNA, 25 bp, Probe sequence
agtattaagaaaatgtgccttttat

SEQ ID NO: 251490 - DNA, 25 bp, Probe sequence
agaaaatgtgccttttatatttagc

SEQ ID NO: 251491 - DNA, 25 bp, Probe sequence
agaatgtgaatcaaaagatgcgata

SEQ ID NO: 251492 - DNA, 25 bp, Probe sequence
aaatgtgccttttatatttagcatt

SEQ ID NO: 251493 - DNA, 25 bp, Probe sequence
aaagatgcgatatagtattaagaaa

SEQ ID NO: 251494 - DNA, 25 bp, Probe sequence
aaaagatgcgatatagtattaagaa

SEQ ID NO: 251495 - DNA, 25 bp, Probe sequence
aaaatggattttgaagaatgtgaat

SEQ ID NO: 251496 - DNA, 25 bp, Probe sequence
aaaatgtgccttttatatttagcat

SEQ ID NO: 251497 - DNA, 25 bp, Probe sequence
aagaatgtgaatcaaaagatgcgat

SEQ ID NO: 251498 - DNA, 25 bp, Probe sequence
aagaaaatgtgccttttatatttag

SEQ ID NO: 251499 - DNA, 25 bp, Probe sequence
aagatgcgatatagtattaagaaaa

SEQ ID NO: 251500 - DNA, 25 bp, Probe sequence
aatgtgccttttatatttagcattt

SEQ ID NO: 251501 - DNA, 25 bp, Probe sequence
aatgtgaatcaaaagatgcgatata

SEQ ID NO: 251502 - DNA, 25 bp, Probe sequence
caaaagatgcgatatagtattaaga

SEQ ID NO: 251503 - DNA, 25 bp, Probe sequence
gccttttatatttagcattttttca

SEQ ID NO: 251504 - DNA, 25 bp, Probe sequence
gaatcaaaagatgcgatatagtatt

SEQ ID NO: 251505 - DNA, 25 bp, Probe sequence
gaatgtgaatcaaaagatgcgatat

SEQ ID NO: 251506 - DNA, 25 bp, Probe sequence
gaagaatgtgaatcaaaagatgcga

SEQ ID NO: 251507 - DNA, 25 bp, Probe sequence
gaaaatgtgccttttatatttagca

SEQ ID NO: 251508 - DNA, 25 bp, Probe sequence
gatgcgatatagtattaagaaaatg

SEQ ID NO: 251509 - DNA, 25 bp, Probe sequence
gtattaagaaaatgtgccttttata

SEQ ID NO: 251510 - DNA, 25 bp, Probe sequence
gtgccttttatatttagcatttttt

SEQ ID NO: 251511 - DNA, 25 bp, Probe sequence
gtgaatcaaaagatgcgatatagta

SEQ ID NO: 251512 - DNA, 25 bp, Probe sequence
tgtgccttttatatttagcattttt

SEQ ID NO: 251513 - DNA, 25 bp, Probe sequence
tgccttttatatttagcattttttc

SEQ ID NO: 251514 - DNA, 25 bp, Probe sequence
tcaaaagatgcgatatagtattaag

SEQ ID NO: 251515 - DNA, 25 bp, Probe sequence
taagaaaatgtgccttttatattta

SEQ ID NO: 251516 - DNA, 25 bp, Probe sequence
tagtattaagaaaatgtgcctttta

SEQ ID NO: 251517 - DNA, 25 bp, Probe sequence
tattaagaaaatgtgccttttatat

SEQ ID NO: 251518 - DNA, 25 bp, Probe sequence
ttaagaaaatgtgccttttatattt

SEQ ID NO: 251519 - DNA, 25 bp, Probe sequence
atatcttttttattcaccgagatta

SEQ ID NO: 251520 - DNA, 25 bp, Probe sequence
atcgaaacgacacagttatgtcagt

SEQ ID NO: 251521 - DNA, 25 bp, Probe sequence
atgtgttgttttttacaatagtatt

SEQ ID NO: 251522 - DNA, 25 bp, Probe sequence
agagtcgtcggtgtattatttttag

SEQ ID NO: 251523 - DNA, 25 bp, Probe sequence
acgacacagttatgtcagtgttgaa

SEQ ID NO: 251524 - DNA, 25 bp, Probe sequence
actttttaggtggttgattgatgaa

SEQ ID NO: 251525 - DNA, 25 bp, Probe sequence
aacgacacagttatgtcagtgttga

SEQ ID NO: 251526 - DNA, 25 bp, Probe sequence
aatactttttaggtggttgattgat

SEQ ID NO: 251527 - DNA, 25 bp, Probe sequence
aatatatcttttttattcaccgaga

SEQ ID NO: 251528 - DNA, 25 bp, Probe sequence
aattataagagtcgtcggtgtatta

SEQ ID NO: 251529 - DNA, 25 bp, Probe sequence
gctaattaatgtgttgttttttaca

SEQ ID NO: 251530 - DNA, 25 bp, Probe sequence
gaagatgattttgttttatcgaaac

SEQ ID NO: 251531 - DNA, 25 bp, Probe sequence
gaaacgacacagttatgtcagtgtt

SEQ ID NO: 251532 - DNA, 25 bp, Probe sequence
gacacagttatgtcagtgttgaaaa

SEQ ID NO: 251533 - DNA, 25 bp, Probe sequence
gagtcgtcggtgtattatttttagt

SEQ ID NO: 251534 - DNA, 25 bp, Probe sequence
gatgattttgttttatcgaaacgac

SEQ ID NO: 251535 - DNA, 25 bp, Probe sequence
gattttgttttatcgaaacgacaca

SEQ ID NO: 251536 - DNA, 25 bp, Probe sequence
gttaattataagagtcgtcggtgta

SEQ ID NO: 251537 - DNA, 25 bp, Probe sequence
gttatgtcagtgttgaaaatttgct

SEQ ID NO: 251538 - DNA, 25 bp, Probe sequence
gttttatcgaaacgacacagttatg

SEQ ID NO: 251539 - DNA, 25 bp, Probe sequence
gtcagtgttgaaaatttgctaatta

SEQ ID NO: 251540 - DNA, 25 bp, Probe sequence
gtcggtgtattatttttagttggat

SEQ ID NO: 251541 - DNA, 25 bp, Probe sequence
gtcgtcggtgtattatttttagttg

SEQ ID NO: 251542 - DNA, 25 bp, Probe sequence
tcggtgtattatttttagttggatt

SEQ ID NO: 251543 - DNA, 25 bp, Probe sequence
tcgtcggtgtattatttttagttgg

SEQ ID NO: 251544 - DNA, 25 bp, Probe sequence
taagagtcgtcggtgtattattttt

SEQ ID NO: 251545 - DNA, 25 bp, Probe sequence
tagttggatttttaatatatctttt

SEQ ID NO: 251546 - DNA, 25 bp, Probe sequence
tttgttttatcgaaacgacacagtt

SEQ ID NO: 251547 - DNA, 25 bp, Probe sequence
tatcttttttattcaccgagattaa

SEQ ID NO: 251548 - DNA, 25 bp, Probe sequence
tatatcttttttattcaccgagatt

SEQ ID NO: 251549 - DNA, 25 bp, Probe sequence
tattaatactttttaggtggttgat

SEQ ID NO: 251550 - DNA, 25 bp, Probe sequence
tttgctaattaatgtgttgtttttt

SEQ ID NO: 251551 - DNA, 25 bp, Probe sequence
ttaggtggttgattgatgaaaaagt

SEQ ID NO: 251552 - DNA, 25 bp, Probe sequence
ttaatatatcttttttattcaccga

SEQ ID NO: 251553 - DNA, 25 bp, Probe sequence
aatggatttggtcaagttttggtca

SEQ ID NO: 251554 - DNA, 25 bp, Probe sequence
atgggatttcacttgaccacttttg

SEQ ID NO: 251555 - DNA, 25 bp, Probe sequence
atggatttggtcaagttttggtcaa

SEQ ID NO: 251556 - DNA, 25 bp, Probe sequence
agctggggaagaccattttatattt

SEQ ID NO: 251557 - DNA, 25 bp, Probe sequence
aaagctggggaagaccattttatat

SEQ ID NO: 251558 - DNA, 25 bp, Probe sequence
aagctggggaagaccattttatatt

SEQ ID NO: 251559 - DNA, 25 bp, Probe sequence
caagtaaatgttttatgtatttatt

SEQ ID NO: 251560 - DNA, 25 bp, Probe sequence
gatttggtcaagttttggtcaagta

SEQ ID NO: 251561 - DNA, 25 bp, Probe sequence
gatttcacttgaccacttttgttaa

SEQ ID NO: 251562 - DNA, 25 bp, Probe sequence
gttttggtcaagtaaatgttttatg

SEQ ID NO: 251563 - DNA, 25 bp, Probe sequence
gtcaagttttggtcaagtaaatgtt

SEQ ID NO: 251564 - DNA, 25 bp, Probe sequence
gtcaagtaaatgttttatgtattta

SEQ ID NO: 251565 - DNA, 25 bp, Probe sequence
ggtcaagttttggtcaagtaaatgt

SEQ ID NO: 251566 - DNA, 25 bp, Probe sequence
ggtcaagtaaatgttttatgtattt

SEQ ID NO: 251567 - DNA, 25 bp, Probe sequence
ggatttggtcaagttttggtcaagt

SEQ ID NO: 251568 - DNA, 25 bp, Probe sequence
ggatttcacttgaccacttttgtta

SEQ ID NO: 251569 - DNA, 25 bp, Probe sequence
tggatttggtcaagttttggtcaag

SEQ ID NO: 251570 - DNA, 25 bp, Probe sequence
tggtcaagttttggtcaagtaaatg

SEQ ID NO: 251571 - DNA, 25 bp, Probe sequence
tggtcaagtaaatgttttatgtatt

SEQ ID NO: 251572 - DNA, 25 bp, Probe sequence
tgggatttcacttgaccacttttgt

SEQ ID NO: 251573 - DNA, 25 bp, Probe sequence
tgaccacttttgttaaaaaatggat

SEQ ID NO: 251574 - DNA, 25 bp, Probe sequence
tcaagttttggtcaagtaaatgttt

SEQ ID NO: 251575 - DNA, 25 bp, Probe sequence
tcaagtaaatgttttatgtatttat

SEQ ID NO: 251576 - DNA, 25 bp, Probe sequence
taaagctggggaagaccattttata

SEQ ID NO: 251577 - DNA, 25 bp, Probe sequence
tttggtcaagtaaatgttttatgta

SEQ ID NO: 251578 - DNA, 25 bp, Probe sequence
ttttggtcaagtaaatgttttatgt

SEQ ID NO: 251579 - DNA, 25 bp, Probe sequence
ttaaagctggggaagaccattttat

SEQ ID NO: 251580 - DNA, 25 bp, Probe sequence
ttggtcaagttttggtcaagtaaat

SEQ ID NO: 251581 - DNA, 25 bp, Probe sequence
ttggtcaagtaaatgttttatgtat

SEQ ID NO: 251582 - DNA, 25 bp, Probe sequence
attatatcatgctatagctttccaa

SEQ ID NO: 251583 - DNA, 25 bp, Probe sequence
attttcactccttaacaataacatt

SEQ ID NO: 251584 - DNA, 25 bp, Probe sequence
atagctttccaaaatattgaaatat

SEQ ID NO: 251585 - DNA, 25 bp, Probe sequence
ataacattatatcatgctatagctt

SEQ ID NO: 251586 - DNA, 25 bp, Probe sequence
atgttcatttattttcactccttaa

SEQ ID NO: 251587 - DNA, 25 bp, Probe sequence
actccttaacaataacattatatca

SEQ ID NO: 251588 - DNA, 25 bp, Probe sequence
acattatatcatgctatagctttcc

SEQ ID NO: 251589 - DNA, 25 bp, Probe sequence
acaataacattatatcatgctatag

SEQ ID NO: 251590 - DNA, 25 bp, Probe sequence
aaatgttcatttattttcactcctt

SEQ ID NO: 251591 - DNA, 25 bp, Probe sequence
aacaataacattatatcatgctata

SEQ ID NO: 251592 - DNA, 25 bp, Probe sequence
aacattatatcatgctatagctttc

SEQ ID NO: 251593 - DNA, 25 bp, Probe sequence
aatgttcatttattttcactcctta

SEQ ID NO: 251594 - DNA, 25 bp, Probe sequence
aataacattatatcatgctatagct

SEQ ID NO: 251595 - DNA, 25 bp, Probe sequence
caataacattatatcatgctatagc

SEQ ID NO: 251596 - DNA, 25 bp, Probe sequence
cactccttaacaataacattatatc

SEQ ID NO: 251597 - DNA, 25 bp, Probe sequence
cattatatcatgctatagctttcca

SEQ ID NO: 251598 - DNA, 25 bp, Probe sequence
catttattttcactccttaacaata

SEQ ID NO: 251599 - DNA, 25 bp, Probe sequence
ctccttaacaataacattatatcat

SEQ ID NO: 251600 - DNA, 25 bp, Probe sequence
gaaatgttcatttattttcactcct

SEQ ID NO: 251601 - DNA, 25 bp, Probe sequence
gttcatttattttcactccttaaca

SEQ ID NO: 251602 - DNA, 25 bp, Probe sequence
tgttcatttattttcactccttaac

SEQ ID NO: 251603 - DNA, 25 bp, Probe sequence
tcatttattttcactccttaacaat

SEQ ID NO: 251604 - DNA, 25 bp, Probe sequence
tcactccttaacaataacattatat

SEQ ID NO: 251605 - DNA, 25 bp, Probe sequence
taacattatatcatgctatagcttt

SEQ ID NO: 251606 - DNA, 25 bp, Probe sequence
taacaataacattatatcatgctat

SEQ ID NO: 251607 - DNA, 25 bp, Probe sequence
tattttcactccttaacaataacat

SEQ ID NO: 251608 - DNA, 25 bp, Probe sequence
tattttcatttgaaatgttcattta

SEQ ID NO: 251609 - DNA, 25 bp, Probe sequence
tattgaaatatgtagatatggctat

SEQ ID NO: 251610 - DNA, 25 bp, Probe sequence
tttcactccttaacaataacattat

SEQ ID NO: 251611 - DNA, 25 bp, Probe sequence
ttttcactccttaacaataacatta

SEQ ID NO: 251612 - DNA, 25 bp, Probe sequence
ttattttcactccttaacaataaca

SEQ ID NO: 251613 - DNA, 25 bp, Probe sequence
ttatatcatgctatagctttccaaa

SEQ ID NO: 251614 - DNA, 25 bp, Probe sequence
ttcatttattttcactccttaacaa

SEQ ID NO: 251615 - DNA, 25 bp, Probe sequence
ttcactccttaacaataacattata

SEQ ID NO: 251616 - DNA, 25 bp, Probe sequence
attttatcgtgtatgttgttatacg

SEQ ID NO: 251617 - DNA, 25 bp, Probe sequence
atttaaatcaaatacacctctgctg

SEQ ID NO: 251618 - DNA, 25 bp, Probe sequence
atacgatgaaaatacttttaatcta

SEQ ID NO: 251619 - DNA, 25 bp, Probe sequence
atacacctctgctgattaacaacac

SEQ ID NO: 251620 - DNA, 25 bp, Probe sequence
atcaaatacacctctgctgattaac

SEQ ID NO: 251621 - DNA, 25 bp, Probe sequence
acctctgctgattaacaacacatac

SEQ ID NO: 251622 - DNA, 25 bp, Probe sequence
acacctctgctgattaacaacacat

SEQ ID NO: 251623 - DNA, 25 bp, Probe sequence
aaattttatcgtgtatgttgttata

SEQ ID NO: 251624 - DNA, 25 bp, Probe sequence
aaatacacctctgctgattaacaac

SEQ ID NO: 251625 - DNA, 25 bp, Probe sequence
aaatcaaatacacctctgctgatta

SEQ ID NO: 251626 - DNA, 25 bp, Probe sequence
aaaattttatcgtgtatgttgttat

SEQ ID NO: 251627 - DNA, 25 bp, Probe sequence
aatcaaatacacctctgctgattaa

SEQ ID NO: 251628 - DNA, 25 bp, Probe sequence
aatacacctctgctgattaacaaca

SEQ ID NO: 251629 - DNA, 25 bp, Probe sequence
caaatacacctctgctgattaacaa

SEQ ID NO: 251630 - DNA, 25 bp, Probe sequence
cacctctgctgattaacaacacata

SEQ ID NO: 251631 - DNA, 25 bp, Probe sequence
ctctgctgattaacaacacatactt

SEQ ID NO: 251632 - DNA, 25 bp, Probe sequence
ctgctgattaacaacacatacttgt

SEQ ID NO: 251633 - DNA, 25 bp, Probe sequence
cctctgctgattaacaacacatact

SEQ ID NO: 251634 - DNA, 25 bp, Probe sequence
gctgattaacaacacatacttgtac

SEQ ID NO: 251635 - DNA, 25 bp, Probe sequence
gatgaaaatacttttaatctaataa

SEQ ID NO: 251636 - DNA, 25 bp, Probe sequence
gattaacaacacatacttgtacttg

SEQ ID NO: 251637 - DNA, 25 bp, Probe sequence
gttgttatacgatgaaaatactttt

SEQ ID NO: 251638 - DNA, 25 bp, Probe sequence
gttatctgttaaatcaagtaaatct

SEQ ID NO: 251639 - DNA, 25 bp, Probe sequence
gtgttatctgttaaatcaagtaaat

SEQ ID NO: 251640 - DNA, 25 bp, Probe sequence
tcgtgtatgttgttatacgatgaaa

SEQ ID NO: 251641 - DNA, 25 bp, Probe sequence
tctaaaaacttcctatataaataca

SEQ ID NO: 251642 - DNA, 25 bp, Probe sequence
tctgctgattaacaacacatacttg

SEQ ID NO: 251643 - DNA, 25 bp, Probe sequence
tcaagtaaatctaaaaacttcctat

SEQ ID NO: 251644 - DNA, 25 bp, Probe sequence
tcaaatacacctctgctgattaaca

SEQ ID NO: 251645 - DNA, 25 bp, Probe sequence
taaatcaaatacacctctgctgatt

SEQ ID NO: 251646 - DNA, 25 bp, Probe sequence
tacacctctgctgattaacaacaca

SEQ ID NO: 251647 - DNA, 25 bp, Probe sequence
tttaaatcaaatacacctctgctga

SEQ ID NO: 251648 - DNA, 25 bp, Probe sequence
ttaacaacacatacttgtacttgcc

SEQ ID NO: 251649 - DNA, 25 bp, Probe sequence
ttaaatcaaatacacctctgctgat

SEQ ID NO: 251650 - DNA, 25 bp, Probe sequence
cgtttactaccaaacttgtgtggtg

SEQ ID NO: 251651 - DNA, 25 bp, Probe sequence
attgtgtctttcgcatttatactaa

SEQ ID NO: 251652 - DNA, 25 bp, Probe sequence
actaccaaacttgtgtggtgaaatt

SEQ ID NO: 251653 - DNA, 25 bp, Probe sequence
agtttggtgtttcactataatgttg

SEQ ID NO: 251654 - DNA, 25 bp, Probe sequence
aacttgtgtggtgaaatttatgaat

SEQ ID NO: 251655 - DNA, 25 bp, Probe sequence
aagtttggtgtttcactataatgtt

SEQ ID NO: 251656 - DNA, 25 bp, Probe sequence
caacgtttactaccaaacttgtgtg

SEQ ID NO: 251657 - DNA, 25 bp, Probe sequence
ctttcgcatttatactaatttaagt

SEQ ID NO: 251658 - DNA, 25 bp, Probe sequence
ccaaacttgtgtggtgaaatttatg

SEQ ID NO: 251659 - DNA, 25 bp, Probe sequence
gtttactaccaaacttgtgtggtga

SEQ ID NO: 251660 - DNA, 25 bp, Probe sequence
gtttcactataatgttgtgtataat

SEQ ID NO: 251661 - DNA, 25 bp, Probe sequence
gtttggtgtttcactataatgttgt

SEQ ID NO: 251662 - DNA, 25 bp, Probe sequence
gtattgtgtctttcgcatttatact

SEQ ID NO: 251663 - DNA, 25 bp, Probe sequence
gtctttcgcatttatactaatttaa

SEQ ID NO: 251664 - DNA, 25 bp, Probe sequence
gtgtattgtgtctttcgcatttata

SEQ ID NO: 251665 - DNA, 25 bp, Probe sequence
gtgtttcactataatgttgtgtata

SEQ ID NO: 251666 - DNA, 25 bp, Probe sequence
gtgtctttcgcatttatactaattt

SEQ ID NO: 251667 - DNA, 25 bp, Probe sequence
ggtgtattgtgtctttcgcatttat

SEQ ID NO: 251668 - DNA, 25 bp, Probe sequence
ggtgtttcactataatgttgtgtat

SEQ ID NO: 251669 - DNA, 25 bp, Probe sequence
tggtgtattgtgtctttcgcattta

SEQ ID NO: 251670 - DNA, 25 bp, Probe sequence
tgtgtctttcgcatttatactaatt

SEQ ID NO: 251671 - DNA, 25 bp, Probe sequence
tgtctttcgcatttatactaattta

SEQ ID NO: 251672 - DNA, 25 bp, Probe sequence
tttaagtttggtgtttcactataat

SEQ ID NO: 251673 - DNA, 25 bp, Probe sequence
tgtattgtgtctttcgcatttatac

SEQ ID NO: 251674 - DNA, 25 bp, Probe sequence
tcgcatttatactaatttaagtttg

SEQ ID NO: 251675 - DNA, 25 bp, Probe sequence
tctttcgcatttatactaatttaag

SEQ ID NO: 251676 - DNA, 25 bp, Probe sequence
taatttaagtttggtgtttcactat

SEQ ID NO: 251677 - DNA, 25 bp, Probe sequence
taagtttggtgtttcactataatgt

SEQ ID NO: 251678 - DNA, 25 bp, Probe sequence
tattgtgtctttcgcatttatacta

SEQ ID NO: 251679 - DNA, 25 bp, Probe sequence
tttactaccaaacttgtgtggtgaa

SEQ ID NO: 251680 - DNA, 25 bp, Probe sequence
ttactaccaaacttgtgtggtgaaa

SEQ ID NO: 251681 - DNA, 25 bp, Probe sequence
ttgtgtctttcgcatttatactaat

SEQ ID NO: 251682 - DNA, 25 bp, Probe sequence
ttggtgtttcactataatgttgtgt

SEQ ID NO: 251683 - DNA, 25 bp, Probe sequence
ttggtgtattgtgtctttcgcattt

SEQ ID NO: 251684 - DNA, 25 bp, Probe sequence
atttgagcatcctcctatcaattac

SEQ ID NO: 251685 - DNA, 25 bp, Probe sequence
ataacttcatttgagcatcctccta

SEQ ID NO: 251686 - DNA, 25 bp, Probe sequence
atctagttaatgtattagctcgatt

SEQ ID NO: 251687 - DNA, 25 bp, Probe sequence
atcctcctatcaattactatataaa

SEQ ID NO: 251688 - DNA, 25 bp, Probe sequence
atgataacttcatttgagcatcctc

SEQ ID NO: 251689 - DNA, 25 bp, Probe sequence
agcatcctcctatcaattactatat

SEQ ID NO: 251690 - DNA, 25 bp, Probe sequence
aaatctagttaatgtattagctcga

SEQ ID NO: 251691 - DNA, 25 bp, Probe sequence
aacttcatttgagcatcctcctatc

SEQ ID NO: 251692 - DNA, 25 bp, Probe sequence
aatctagttaatgtattagctcgat

SEQ ID NO: 251693 - DNA, 25 bp, Probe sequence
cacttaattataacaaattctcaaa

SEQ ID NO: 251694 - DNA, 25 bp, Probe sequence
catcctcctatcaattactatataa

SEQ ID NO: 251695 - DNA, 25 bp, Probe sequence
catttgagcatcctcctatcaatta

SEQ ID NO: 251696 - DNA, 25 bp, Probe sequence
cttcatttgagcatcctcctatcaa

SEQ ID NO: 251697 - DNA, 25 bp, Probe sequence
cttttgccacttaattataacaaat

SEQ ID NO: 251698 - DNA, 25 bp, Probe sequence
ctcctatcaattactatataaattt

SEQ ID NO: 251699 - DNA, 25 bp, Probe sequence
cctcctatcaattactatataaatt

SEQ ID NO: 251700 - DNA, 25 bp, Probe sequence
gccacttaattataacaaattctca

SEQ ID NO: 251701 - DNA, 25 bp, Probe sequence
gcatcctcctatcaattactatata

SEQ ID NO: 251702 - DNA, 25 bp, Probe sequence
gaaaatctagttaatgtattagctc

SEQ ID NO: 251703 - DNA, 25 bp, Probe sequence
gataacttcatttgagcatcctcct

SEQ ID NO: 251704 - DNA, 25 bp, Probe sequence
gattgaccatgaaatgataacttca

SEQ ID NO: 251705 - DNA, 25 bp, Probe sequence
tgataacttcatttgagcatcctcc

SEQ ID NO: 251706 - DNA, 25 bp, Probe sequence
tgattgaccatgaaatgataacttc

SEQ ID NO: 251707 - DNA, 25 bp, Probe sequence
tgagcatcctcctatcaattactat

SEQ ID NO: 251708 - DNA, 25 bp, Probe sequence
tcctcctatcaattactatataaat

SEQ ID NO: 251709 - DNA, 25 bp, Probe sequence
tctagttaatgtattagctcgattt

SEQ ID NO: 251710 - DNA, 25 bp, Probe sequence
tcatttgagcatcctcctatcaatt

SEQ ID NO: 251711 - DNA, 25 bp, Probe sequence
taacttcatttgagcatcctcctat

SEQ ID NO: 251712 - DNA, 25 bp, Probe sequence
tagtacccttttgccacttaattat

SEQ ID NO: 251713 - DNA, 25 bp, Probe sequence
tttgagcatcctcctatcaattact

SEQ ID NO: 251714 - DNA, 25 bp, Probe sequence
ttaattataacaaattctcaaattt

SEQ ID NO: 251715 - DNA, 25 bp, Probe sequence
ttcatttgagcatcctcctatcaat

SEQ ID NO: 251716 - DNA, 25 bp, Probe sequence
ttgccacttaattataacaaattct

SEQ ID NO: 251717 - DNA, 25 bp, Probe sequence
ttgagcatcctcctatcaattacta

SEQ ID NO: 251718 - DNA, 25 bp, Probe sequence
atttcatgcaagttggtggagctcc

SEQ ID NO: 251719 - DNA, 25 bp, Probe sequence
ataacatgcaagttggcgaggcccc

SEQ ID NO: 251720 - DNA, 25 bp, Probe sequence
aggcttcggaatgtcagcttctatt

SEQ ID NO: 251721 - DNA, 25 bp, Probe sequence
agaggcttcggaatgtcagcttcta

SEQ ID NO: 251722 - DNA, 25 bp, Probe sequence
gaggccccaaaatagtgagatcgga

SEQ ID NO: 251723 - DNA, 25 bp, Probe sequence
caatttctacagacattgcaaattg

SEQ ID NO: 251724 - DNA, 25 bp, Probe sequence
cgggccacaaactcagaaactggtg

SEQ ID NO: 251725 - DNA, 25 bp, Probe sequence
gcagtccacaacatagaggcttcgg

SEQ ID NO: 251726 - DNA, 25 bp, Probe sequence
gcttctatttcatgcaagttggtgg

SEQ ID NO: 251727 - DNA, 25 bp, Probe sequence
gcaagttggcgaggccccaaaatag

SEQ ID NO: 251728 - DNA, 25 bp, Probe sequence
gcaagttggtggagctccaacatag

SEQ ID NO: 251729 - DNA, 25 bp, Probe sequence
gaacttttgatatattactatgtct

SEQ ID NO: 251730 - DNA, 25 bp, Probe sequence
gaaacgggccacaaactcagaaact

SEQ ID NO: 251731 - DNA, 25 bp, Probe sequence
gaaactggtggaaagtcagcttaaa

SEQ ID NO: 251732 - DNA, 25 bp, Probe sequence
gaaagtcagcttaaaataacatgca

SEQ ID NO: 251733 - DNA, 25 bp, Probe sequence
gacattgcaaattggggaaacgggc

SEQ ID NO: 251734 - DNA, 25 bp, Probe sequence
gactgcagtccacaacatagaggct

SEQ ID NO: 251735 - DNA, 25 bp, Probe sequence
ttggcagtagttgactgcagtccac

SEQ ID NO: 251736 - DNA, 25 bp, Probe sequence
gatcggatttctaatttctacagac

SEQ ID NO: 251737 - DNA, 25 bp, Probe sequence
gatatattactatgtctggtacaca

SEQ ID NO: 251738 - DNA, 25 bp, Probe sequence
gatttctaatttctacagacattgc

SEQ ID NO: 251739 - DNA, 25 bp, Probe sequence
gtagttgactgcagtccacaacata

SEQ ID NO: 251740 - DNA, 25 bp, Probe sequence
gtacacaaatcaatgttttatgctt

SEQ ID NO: 251741 - DNA, 25 bp, Probe sequence
gtcagcttctatttcatgcaagttg

SEQ ID NO: 251742 - DNA, 25 bp, Probe sequence
gtgagatcggatttctaatttctac

SEQ ID NO: 251743 - DNA, 25 bp, Probe sequence
ggtggagctccaacatagtggaatt

SEQ ID NO: 251744 - DNA, 25 bp, Probe sequence
tggggaaacgggccacaaactcaga

SEQ ID NO: 251745 - DNA, 25 bp, Probe sequence
ggagtaattaattatcaattccgtt

SEQ ID NO: 251746 - DNA, 25 bp, Probe sequence
ggagctccaacatagtggaattgga

SEQ ID NO: 251747 - DNA, 25 bp, Probe sequence
ggcgaggccccaaaatagtgagatc

SEQ ID NO: 251748 - DNA, 25 bp, Probe sequence
tctaatttctacagacattgcaaat

SEQ ID NO: 251749 - DNA, 25 bp, Probe sequence
tcaatgttttatgctttacaaagtt

SEQ ID NO: 251750 - DNA, 25 bp, Probe sequence
tactatgtctggtacacaaatcaat

SEQ ID NO: 251751 - DNA, 25 bp, Probe sequence
tatcaattccgtttaaatggtgttt

SEQ ID NO: 251752 - DNA, 25 bp, Probe sequence
atataaaaaatgcttctgcaataga

SEQ ID NO: 251753 - DNA, 25 bp, Probe sequence
atatggaggcgaagtaaatgaaaag

SEQ ID NO: 251754 - DNA, 25 bp, Probe sequence
atagatgcaataaacatgcaataca

SEQ ID NO: 251755 - DNA, 25 bp, Probe sequence
ataaaaaatgcttctgcaatagatg

SEQ ID NO: 251756 - DNA, 25 bp, Probe sequence
atgcttctgcaatagatgcaataaa

SEQ ID NO: 251757 - DNA, 25 bp, Probe sequence
atgcaatacaatatggaggcgaagt

SEQ ID NO: 251758 - DNA, 25 bp, Probe sequence
atggaggcgaagtaaatgaaaagta

SEQ ID NO: 251759 - DNA, 25 bp, Probe sequence
aggtatataaaaaatgcttctgcaa

SEQ ID NO: 251760 - DNA, 25 bp, Probe sequence
acatgcaatacaatatggaggcgaa

SEQ ID NO: 251761 - DNA, 25 bp, Probe sequence
acaatatggaggcgaagtaaatgaa

SEQ ID NO: 251762 - DNA, 25 bp, Probe sequence
aaatgcttctgcaatagatgcaata

SEQ ID NO: 251763 - DNA, 25 bp, Probe sequence
aaacatgcaatacaatatggaggcg

SEQ ID NO: 251764 - DNA, 25 bp, Probe sequence
aaaaatgcttctgcaatagatgcaa

SEQ ID NO: 251765 - DNA, 25 bp, Probe sequence
aaaaaatgcttctgcaatagatgca

SEQ ID NO: 251766 - DNA, 25 bp, Probe sequence
aaaatgcttctgcaatagatgcaat

SEQ ID NO: 251767 - DNA, 25 bp, Probe sequence
aacatgcaatacaatatggaggcga

SEQ ID NO: 251768 - DNA, 25 bp, Probe sequence
aatgcttctgcaatagatgcaataa

SEQ ID NO: 251769 - DNA, 25 bp, Probe sequence
caatatggaggcgaagtaaatgaaa

SEQ ID NO: 251770 - DNA, 25 bp, Probe sequence
caaacattgaaattagaggtatata

SEQ ID NO: 251771 - DNA, 25 bp, Probe sequence
catgcaatacaatatggaggcgaag

SEQ ID NO: 251772 - DNA, 25 bp, Probe sequence
gcttctgcaatagatgcaataaaca

SEQ ID NO: 251773 - DNA, 25 bp, Probe sequence
gcaatacaatatggaggcgaagtaa

SEQ ID NO: 251774 - DNA, 25 bp, Probe sequence
gcaataaacatgcaatacaatatgg

SEQ ID NO: 251775 - DNA, 25 bp, Probe sequence
gaggtatataaaaaatgcttctgca

SEQ ID NO: 251776 - DNA, 25 bp, Probe sequence
gttacaaacattgaaattagaggta

SEQ ID NO: 251777 - DNA, 25 bp, Probe sequence
gtatataaaaaatgcttctgcaata

SEQ ID NO: 251778 - DNA, 25 bp, Probe sequence
ggtatataaaaaatgcttctgcaat

SEQ ID NO: 251779 - DNA, 25 bp, Probe sequence
ggaggcgaagtaaatgaaaagtatt

SEQ ID NO: 251780 - DNA, 25 bp, Probe sequence
tggaggcgaagtaaatgaaaagtat

SEQ ID NO: 251781 - DNA, 25 bp, Probe sequence
tgcaatacaatatggaggcgaagta

SEQ ID NO: 251782 - DNA, 25 bp, Probe sequence
tgcttctgcaatagatgcaataaac

SEQ ID NO: 251783 - DNA, 25 bp, Probe sequence
taaaaaatgcttctgcaatagatgc

SEQ ID NO: 251784 - DNA, 25 bp, Probe sequence
taaacatgcaatacaatatggaggc

SEQ ID NO: 251785 - DNA, 25 bp, Probe sequence
tataaaaaatgcttctgcaatagat

SEQ ID NO: 251786 - DNA, 25 bp, Probe sequence
atgacggttttacaagattagattt

SEQ ID NO: 251787 - DNA, 25 bp, Probe sequence
atgagtgtagagccccaaataagac

SEQ ID NO: 251788 - DNA, 25 bp, Probe sequence
atgtctgaacatttatggcgtgtag

SEQ ID NO: 251789 - DNA, 25 bp, Probe sequence
acaacgctcaagccctttctaaatt

SEQ ID NO: 251790 - DNA, 25 bp, Probe sequence
aaatcacgatttagacaatttttct

SEQ ID NO: 251791 - DNA, 25 bp, Probe sequence
aaacaaatcgatttttggcaacatg

SEQ ID NO: 251792 - DNA, 25 bp, Probe sequence
aacaatcatgcaaatcattcaaatc

SEQ ID NO: 251793 - DNA, 25 bp, Probe sequence
aacgcactgcggatagagcaatagt

SEQ ID NO: 251794 - DNA, 25 bp, Probe sequence
aagccctttctaaatttatgagtgt

SEQ ID NO: 251795 - DNA, 25 bp, Probe sequence
aagactttgggatattcttcaaaca

SEQ ID NO: 251796 - DNA, 25 bp, Probe sequence
aagttttgatgcaatgacgatcgtt

SEQ ID NO: 251797 - DNA, 25 bp, Probe sequence
aatagccggttggacgcacatactg

SEQ ID NO: 251798 - DNA, 25 bp, Probe sequence
catactgtgtgcatatctgatccaa

SEQ ID NO: 251799 - DNA, 25 bp, Probe sequence
gctacatggaagatgacggttttac

SEQ ID NO: 251800 - DNA, 25 bp, Probe sequence
gaaaactatccaacgcactgcggat

SEQ ID NO: 251801 - DNA, 25 bp, Probe sequence
gaaagcagatagttgggatagacgt

SEQ ID NO: 251802 - DNA, 25 bp, Probe sequence
gaaatttcgccagtcgatttaacgg

SEQ ID NO: 251803 - DNA, 25 bp, Probe sequence
gacgatcgttggaaatctcaaccga

SEQ ID NO: 251804 - DNA, 25 bp, Probe sequence
gagtgactactatgcaatgtctgat

SEQ ID NO: 251805 - DNA, 25 bp, Probe sequence
gatgctgaagttatgtctgaacatt

SEQ ID NO: 251806 - DNA, 25 bp, Probe sequence
gattaaggagtcgattttttatgta

SEQ ID NO: 251807 - DNA, 25 bp, Probe sequence
gattagatttagcctttgattttga

SEQ ID NO: 251808 - DNA, 25 bp, Probe sequence
gtgatttacatatcttgcaaccaga

SEQ ID NO: 251809 - DNA, 25 bp, Probe sequence
gggatagacgtaatatgcgtattga

SEQ ID NO: 251810 - DNA, 25 bp, Probe sequence
ggggaaagcttcacagaaattctag

SEQ ID NO: 251811 - DNA, 25 bp, Probe sequence
ggtggattactggaatgattgcttt

SEQ ID NO: 251812 - DNA, 25 bp, Probe sequence
ggaatgattgctttagtgatttaca

SEQ ID NO: 251813 - DNA, 25 bp, Probe sequence
tctcaaccgagacaacgctcaagcc

SEQ ID NO: 251814 - DNA, 25 bp, Probe sequence
taacggacttaatgaaatcgacttt

SEQ ID NO: 251815 - DNA, 25 bp, Probe sequence
tactctaatagccggttggacgcac

SEQ ID NO: 251816 - DNA, 25 bp, Probe sequence
tttctaaaaccggctactctaatag

SEQ ID NO: 251817 - DNA, 25 bp, Probe sequence
tatggcgtgtagaaatcgaacttaa

SEQ ID NO: 251818 - DNA, 25 bp, Probe sequence
tttaatccaaacaaacttacacgag

SEQ ID NO: 251819 - DNA, 25 bp, Probe sequence
ttatggtcgtaatggtaagccagaa

SEQ ID NO: 251820 - DNA, 25 bp, Probe sequence
atatagaaaaagggcaacatgcgca

SEQ ID NO: 251821 - DNA, 25 bp, Probe sequence
atagaaaaagggcaacatgcgcaaa

SEQ ID NO: 251822 - DNA, 25 bp, Probe sequence
atgcgcaaacatgttaccctaatga

SEQ ID NO: 251823 - DNA, 25 bp, Probe sequence
atggtgtgttaatttatatatagaa

SEQ ID NO: 251824 - DNA, 25 bp, Probe sequence
agggcaacatgcgcaaacatgttac

SEQ ID NO: 251825 - DNA, 25 bp, Probe sequence
agaaaaagggcaacatgcgcaaaca

SEQ ID NO: 251826 - DNA, 25 bp, Probe sequence
acatgcgcaaacatgttaccctaat

SEQ ID NO: 251827 - DNA, 25 bp, Probe sequence
aacatgttaccctaatgagcccgtt

SEQ ID NO: 251828 - DNA, 25 bp, Probe sequence
aaagggcaacatgcgcaaacatgtt

SEQ ID NO: 251829 - DNA, 25 bp, Probe sequence
aaacatgttaccctaatgagcccgt

SEQ ID NO: 251830 - DNA, 25 bp, Probe sequence
aaaaagggcaacatgcgcaaacatg

SEQ ID NO: 251831 - DNA, 25 bp, Probe sequence
aaaagggcaacatgcgcaaacatgt

SEQ ID NO: 251832 - DNA, 25 bp, Probe sequence
aacatgcgcaaacatgttaccctaa

SEQ ID NO: 251833 - DNA, 25 bp, Probe sequence
aagggcaacatgcgcaaacatgtta

SEQ ID NO: 251834 - DNA, 25 bp, Probe sequence
caacatgcgcaaacatgttacccta

SEQ ID NO: 251835 - DNA, 25 bp, Probe sequence
caaacatgttaccctaatgagcccg

SEQ ID NO: 251836 - DNA, 25 bp, Probe sequence
catgcgcaaacatgttaccctaatg

SEQ ID NO: 251837 - DNA, 25 bp, Probe sequence
cgcaaacatgttaccctaatgagcc

SEQ ID NO: 251838 - DNA, 25 bp, Probe sequence
gcgcaaacatgttaccctaatgagc

SEQ ID NO: 251839 - DNA, 25 bp, Probe sequence
gcaaacatgttaccctaatgagccc

SEQ ID NO: 251840 - DNA, 25 bp, Probe sequence
gcaacatgcgcaaacatgttaccct

SEQ ID NO: 251841 - DNA, 25 bp, Probe sequence
gaaaaagggcaacatgcgcaaacat

SEQ ID NO: 251842 - DNA, 25 bp, Probe sequence
gggcaacatgcgcaaacatgttacc

SEQ ID NO: 251843 - DNA, 25 bp, Probe sequence
ggtgtgttaatttatatatagaaaa

SEQ ID NO: 251844 - DNA, 25 bp, Probe sequence
ggcaacatgcgcaaacatgttaccc

SEQ ID NO: 251845 - DNA, 25 bp, Probe sequence
tggtgtgttaatttatatatagaaa

SEQ ID NO: 251846 - DNA, 25 bp, Probe sequence
tgatatttatattatggtgtgttaa

SEQ ID NO: 251847 - DNA, 25 bp, Probe sequence
tgcgcaaacatgttaccctaatgag

SEQ ID NO: 251848 - DNA, 25 bp, Probe sequence
taaaaagacggtggctattttagat

SEQ ID NO: 251849 - DNA, 25 bp, Probe sequence
tagaaaaagggcaacatgcgcaaac

SEQ ID NO: 251850 - DNA, 25 bp, Probe sequence
tatggtgtgttaatttatatataga

SEQ ID NO: 251851 - DNA, 25 bp, Probe sequence
tatagaaaaagggcaacatgcgcaa

SEQ ID NO: 251852 - DNA, 25 bp, Probe sequence
tatatagaaaaagggcaacatgcgc

SEQ ID NO: 251853 - DNA, 25 bp, Probe sequence
ttatggtgtgttaatttatatatag

SEQ ID NO: 251854 - DNA, 25 bp, Probe sequence
tggaagtcatcgagccgttttaccc

SEQ ID NO: 251855 - DNA, 25 bp, Probe sequence
atcaagcgacagttcggcttcgtga

SEQ ID NO: 251856 - DNA, 25 bp, Probe sequence
atccgggccagggtggagcacccat

SEQ ID NO: 251857 - DNA, 25 bp, Probe sequence
atggcgcgatggaagatgctctgta

SEQ ID NO: 251858 - DNA, 25 bp, Probe sequence
aggagcaatttgtctcagccgatgc

SEQ ID NO: 251859 - DNA, 25 bp, Probe sequence
agtggcactttggcatgaaggccca

SEQ ID NO: 251860 - DNA, 25 bp, Probe sequence
accccaaggctggtaatggccggcg

SEQ ID NO: 251861 - DNA, 25 bp, Probe sequence
actggcgatgttattcacgctggcc

SEQ ID NO: 251862 - DNA, 25 bp, Probe sequence
acatgaaagccagcatccgggccag

SEQ ID NO: 251863 - DNA, 25 bp, Probe sequence
aagaaccttgaaacagcatccacgc

SEQ ID NO: 251864 - DNA, 25 bp, Probe sequence
aattcagcagtaagcgccgtcagac

SEQ ID NO: 251865 - DNA, 25 bp, Probe sequence
caaagagcagcaacgcgatccggag

SEQ ID NO: 251866 - DNA, 25 bp, Probe sequence
cacccagctcgaccaagaacaaaga

SEQ ID NO: 251867 - DNA, 25 bp, Probe sequence
ctgctggagcagcatcaactggccc

SEQ ID NO: 251868 - DNA, 25 bp, Probe sequence
cgatgccaagagtggcctgacccac

SEQ ID NO: 251869 - DNA, 25 bp, Probe sequence
gcgatccggagatgcatcagaccaa

SEQ ID NO: 251870 - DNA, 25 bp, Probe sequence
gcgtcatgatgactcaaggcacctt

SEQ ID NO: 251871 - DNA, 25 bp, Probe sequence
gctacgcattcactgcatgcagcat

SEQ ID NO: 251872 - DNA, 25 bp, Probe sequence
gcacccatttcgcatcatcaagcga

SEQ ID NO: 251873 - DNA, 25 bp, Probe sequence
gaccttatccgctggaaaccatgct

SEQ ID NO: 251874 - DNA, 25 bp, Probe sequence
gagcatgacctcaatcagctgggta

SEQ ID NO: 251875 - DNA, 25 bp, Probe sequence
gatgccaccatcattgaggcaccca

SEQ ID NO: 251876 - DNA, 25 bp, Probe sequence
tggatgtggactggctgatcgccga

SEQ ID NO: 251877 - DNA, 25 bp, Probe sequence
ggagctggccgaggtggatgtggac

SEQ ID NO: 251878 - DNA, 25 bp, Probe sequence
tggcccgccaattgttcaagaccat

SEQ ID NO: 251879 - DNA, 25 bp, Probe sequence
tgaaggcccacattggtgtcgatgc

SEQ ID NO: 251880 - DNA, 25 bp, Probe sequence
tggctggccgaagcaggcgtcatga

SEQ ID NO: 251881 - DNA, 25 bp, Probe sequence
tggtacaacctgagcgatggcgcga

SEQ ID NO: 251882 - DNA, 25 bp, Probe sequence
tgtcccgcatggagcagattctgcc

SEQ ID NO: 251883 - DNA, 25 bp, Probe sequence
tcaaggcaccttggtcgatgccacc

SEQ ID NO: 251884 - DNA, 25 bp, Probe sequence
tctgtacgaaatcgcctccatgcgt

SEQ ID NO: 251885 - DNA, 25 bp, Probe sequence
tcatgagtcatcaacttaccttcgc

SEQ ID NO: 251886 - DNA, 25 bp, Probe sequence
tcaagaccatcaatcgctggctggc

SEQ ID NO: 251887 - DNA, 25 bp, Probe sequence
taccttcgccgacagtgaattcagc

SEQ ID NO: 251888 - DNA, 25 bp, Probe sequence
atgtctatcattctcatttttatca

SEQ ID NO: 251889 - DNA, 25 bp, Probe sequence
aggacaaagcatctgcgctttctct

SEQ ID NO: 251890 - DNA, 25 bp, Probe sequence
agtccatttttaaaagcacaagcga

SEQ ID NO: 251891 - DNA, 25 bp, Probe sequence
agcttaggacaaagcatctgcgctt

SEQ ID NO: 251892 - DNA, 25 bp, Probe sequence
acaaagcatctgcgctttctctagt

SEQ ID NO: 251893 - DNA, 25 bp, Probe sequence
aaagcttaggacaaagcatctgcgc

SEQ ID NO: 251894 - DNA, 25 bp, Probe sequence
aaagcacaagcgaaaattattatag

SEQ ID NO: 251895 - DNA, 25 bp, Probe sequence
aagcttaggacaaagcatctgcgct

SEQ ID NO: 251896 - DNA, 25 bp, Probe sequence
caaagcatctgcgctttctctagtc

SEQ ID NO: 251897 - DNA, 25 bp, Probe sequence
cttaggacaaagcatctgcgctttc

SEQ ID NO: 251898 - DNA, 25 bp, Probe sequence
ctagtccatttttaaaagcacaagc

SEQ ID NO: 251899 - DNA, 25 bp, Probe sequence
ctcatttttatcatccttttcttaa

SEQ ID NO: 251900 - DNA, 25 bp, Probe sequence
ctctagtccatttttaaaagcacaa

SEQ ID NO: 251901 - DNA, 25 bp, Probe sequence
gcgaaaattattatagcaagctatc

SEQ ID NO: 251902 - DNA, 25 bp, Probe sequence
gctttctctagtccatttttaaaag

SEQ ID NO: 251903 - DNA, 25 bp, Probe sequence
gcttaggacaaagcatctgcgcttt

SEQ ID NO: 251904 - DNA, 25 bp, Probe sequence
gcacaagcgaaaattattatagcaa

SEQ ID NO: 251905 - DNA, 25 bp, Probe sequence
gacaaagcatctgcgctttctctag

SEQ ID NO: 251906 - DNA, 25 bp, Probe sequence
gtccatttttaaaagcacaagcgaa

SEQ ID NO: 251907 - DNA, 25 bp, Probe sequence
ggacaaagcatctgcgctttctcta

SEQ ID NO: 251908 - DNA, 25 bp, Probe sequence
tccatttttaaaagcacaagcgaaa

SEQ ID NO: 251909 - DNA, 25 bp, Probe sequence
tctctagtccatttttaaaagcaca

SEQ ID NO: 251910 - DNA, 25 bp, Probe sequence
tctcatttttatcatccttttctta

SEQ ID NO: 251911 - DNA, 25 bp, Probe sequence
tcatttttatcatccttttcttaaa

SEQ ID NO: 251912 - DNA, 25 bp, Probe sequence
tcatccttttcttaaaaagcttagg

SEQ ID NO: 251913 - DNA, 25 bp, Probe sequence
tagtccatttttaaaagcacaagcg

SEQ ID NO: 251914 - DNA, 25 bp, Probe sequence
taggacaaagcatctgcgctttctc

SEQ ID NO: 251915 - DNA, 25 bp, Probe sequence
tatcatccttttcttaaaaagctta

SEQ ID NO: 251916 - DNA, 25 bp, Probe sequence
tatagcaagctatcgatttcatttt

SEQ ID NO: 251917 - DNA, 25 bp, Probe sequence
tttctctagtccatttttaaaagca

SEQ ID NO: 251918 - DNA, 25 bp, Probe sequence
tttatcatccttttcttaaaaagct

SEQ ID NO: 251919 - DNA, 25 bp, Probe sequence
ttatcatccttttcttaaaaagctt

SEQ ID NO: 251920 - DNA, 25 bp, Probe sequence
ttaggacaaagcatctgcgctttct

SEQ ID NO: 251921 - DNA, 25 bp, Probe sequence
ttctctagtccatttttaaaagcac

SEQ ID NO: 251922 - DNA, 25 bp, Probe sequence
attctggagataagctgtttgttac

SEQ ID NO: 251923 - DNA, 25 bp, Probe sequence
atagtcaataacaaacaagggtggt

SEQ ID NO: 251924 - DNA, 25 bp, Probe sequence
agttgaaaccttatctcgattctgg

SEQ ID NO: 251925 - DNA, 25 bp, Probe sequence
agaaaagttgaaaccttatctcgat

SEQ ID NO: 251926 - DNA, 25 bp, Probe sequence
agctgtttgttacagaaatagtcaa

SEQ ID NO: 251927 - DNA, 25 bp, Probe sequence
acaatgggattttatcaaccataat

SEQ ID NO: 251928 - DNA, 25 bp, Probe sequence
aaagttgaaaccttatctcgattct

SEQ ID NO: 251929 - DNA, 25 bp, Probe sequence
aaaccttatctcgattctggagata

SEQ ID NO: 251930 - DNA, 25 bp, Probe sequence
aacaatgggattttatcaaccataa

SEQ ID NO: 251931 - DNA, 25 bp, Probe sequence
aaccttatctcgattctggagataa

SEQ ID NO: 251932 - DNA, 25 bp, Probe sequence
aagttgaaaccttatctcgattctg

SEQ ID NO: 251933 - DNA, 25 bp, Probe sequence
aatgggattttatcaaccataatat

SEQ ID NO: 251934 - DNA, 25 bp, Probe sequence
ctcgattctggagataagctgtttg

SEQ ID NO: 251935 - DNA, 25 bp, Probe sequence
ctggagataagctgtttgttacaga

SEQ ID NO: 251936 - DNA, 25 bp, Probe sequence
cgattctggagataagctgtttgtt

SEQ ID NO: 251937 - DNA, 25 bp, Probe sequence
gaaaagttgaaaccttatctcgatt

SEQ ID NO: 251938 - DNA, 25 bp, Probe sequence
gaaaccttatctcgattctggagat

SEQ ID NO: 251939 - DNA, 25 bp, Probe sequence
gagataagctgtttgttacagaaat

SEQ ID NO: 251940 - DNA, 25 bp, Probe sequence
gattttatcaaccataatattttta

SEQ ID NO: 251941 - DNA, 25 bp, Probe sequence
gattctggagataagctgtttgtta

SEQ ID NO: 251942 - DNA, 25 bp, Probe sequence
gttgaaaccttatctcgattctgga

SEQ ID NO: 251943 - DNA, 25 bp, Probe sequence
gggattttatcaaccataatatttt

SEQ ID NO: 251944 - DNA, 25 bp, Probe sequence
ggattttatcaaccataatattttt

SEQ ID NO: 251945 - DNA, 25 bp, Probe sequence
ggagataagctgtttgttacagaaa

SEQ ID NO: 251946 - DNA, 25 bp, Probe sequence
tgggattttatcaaccataatattt

SEQ ID NO: 251947 - DNA, 25 bp, Probe sequence
tgtttgttacagaaatagtcaataa

SEQ ID NO: 251948 - DNA, 25 bp, Probe sequence
tgaaaccttatctcgattctggaga

SEQ ID NO: 251949 - DNA, 25 bp, Probe sequence
tcgattctggagataagctgtttgt

SEQ ID NO: 251950 - DNA, 25 bp, Probe sequence
tctggagataagctgtttgttacag

SEQ ID NO: 251951 - DNA, 25 bp, Probe sequence
taagctgtttgttacagaaatagtc

SEQ ID NO: 251952 - DNA, 25 bp, Probe sequence
tagaaaagttgaaaccttatctcga

SEQ ID NO: 251953 - DNA, 25 bp, Probe sequence
tatcaaccataatatttttatttag

SEQ ID NO: 251954 - DNA, 25 bp, Probe sequence
ttctggagataagctgtttgttaca

SEQ ID NO: 251955 - DNA, 25 bp, Probe sequence
ttgaaaccttatctcgattctggag

SEQ ID NO: 251956 - DNA, 25 bp, Probe sequence
attaatacaaatgatcctgccaaaa

SEQ ID NO: 251957 - DNA, 25 bp, Probe sequence
attaccgcaacaaatgacatacaat

SEQ ID NO: 251958 - DNA, 25 bp, Probe sequence
attattaccgcaacaaatgacatac

SEQ ID NO: 251959 - DNA, 25 bp, Probe sequence
atacaaatgatcctgccaaaatagc

SEQ ID NO: 251960 - DNA, 25 bp, Probe sequence
atgatcctgccaaaatagcaattaa

SEQ ID NO: 251961 - DNA, 25 bp, Probe sequence
atgatcggatataacggtactttat

SEQ ID NO: 251962 - DNA, 25 bp, Probe sequence
atggtcgttccatatttggttcacg

SEQ ID NO: 251963 - DNA, 25 bp, Probe sequence
acggtactttatatggtcgttccat

SEQ ID NO: 251964 - DNA, 25 bp, Probe sequence
acaaatgatcctgccaaaatagcaa

SEQ ID NO: 251965 - DNA, 25 bp, Probe sequence
aaattgtgtaaacagtgtattaatt

SEQ ID NO: 251966 - DNA, 25 bp, Probe sequence
aaattattaccgcaacaaatgacat

SEQ ID NO: 251967 - DNA, 25 bp, Probe sequence
aaatgatcctgccaaaatagcaatt

SEQ ID NO: 251968 - DNA, 25 bp, Probe sequence
aatgatcctgccaaaatagcaatta

SEQ ID NO: 251969 - DNA, 25 bp, Probe sequence
aatacaaatgatcctgccaaaatag

SEQ ID NO: 251970 - DNA, 25 bp, Probe sequence
caaatgatcctgccaaaatagcaat

SEQ ID NO: 251971 - DNA, 25 bp, Probe sequence
cggtactttatatggtcgttccata

SEQ ID NO: 251972 - DNA, 25 bp, Probe sequence
gatcctgccaaaatagcaattaaag

SEQ ID NO: 251973 - DNA, 25 bp, Probe sequence
gattgctaatataaattgtgtaaac

SEQ ID NO: 251974 - DNA, 25 bp, Probe sequence
gttccatatttggttcacgttttct

SEQ ID NO: 251975 - DNA, 25 bp, Probe sequence
gtcgttccatatttggttcacgttt

SEQ ID NO: 251976 - DNA, 25 bp, Probe sequence
ggtcgttccatatttggttcacgtt

SEQ ID NO: 251977 - DNA, 25 bp, Probe sequence
ggtatgatcggatataacggtactt

SEQ ID NO: 251978 - DNA, 25 bp, Probe sequence
tggtcgttccatatttggttcacgt

SEQ ID NO: 251979 - DNA, 25 bp, Probe sequence
tgatcctgccaaaatagcaattaaa

SEQ ID NO: 251980 - DNA, 25 bp, Probe sequence
tccatatttggttcacgttttctta

SEQ ID NO: 251981 - DNA, 25 bp, Probe sequence
tcgttccatatttggttcacgtttt

SEQ ID NO: 251982 - DNA, 25 bp, Probe sequence
tcttaaaattattaccgcaacaaat

SEQ ID NO: 251983 - DNA, 25 bp, Probe sequence
taattaatacaaatgatcctgccaa

SEQ ID NO: 251984 - DNA, 25 bp, Probe sequence
tacaaatgatcctgccaaaatagca

SEQ ID NO: 251985 - DNA, 25 bp, Probe sequence
taccgcaacaaatgacatacaatag

SEQ ID NO: 251986 - DNA, 25 bp, Probe sequence
tagcaattaaaggtatgatcggata

SEQ ID NO: 251987 - DNA, 25 bp, Probe sequence
tatgatcggatataacggtacttta

SEQ ID NO: 251988 - DNA, 25 bp, Probe sequence
ttccatatttggttcacgttttctt

SEQ ID NO: 251989 - DNA, 25 bp, Probe sequence
ttattaccgcaacaaatgacataca

SEQ ID NO: 251990 - DNA, 25 bp, Probe sequence
attggttcctttaccatggacttgt

SEQ ID NO: 251991 - DNA, 25 bp, Probe sequence
atattggttcctttaccatggactt

SEQ ID NO: 251992 - DNA, 25 bp, Probe sequence
atggacttgtggtttttcacttact

SEQ ID NO: 251993 - DNA, 25 bp, Probe sequence
aggtgcagaacattggggacacgaa

SEQ ID NO: 251994 - DNA, 25 bp, Probe sequence
actcgcagccataggtgcagaacat

SEQ ID NO: 251995 - DNA, 25 bp, Probe sequence
acttacttgtttcttacgtgcttgc

SEQ ID NO: 251996 - DNA, 25 bp, Probe sequence
aagtgtgtttgtggtgttactcgca

SEQ ID NO: 251997 - DNA, 25 bp, Probe sequence
catctttaagtgtgtttgtggtgtt

SEQ ID NO: 251998 - DNA, 25 bp, Probe sequence
cttgtttcttacgtgcttgcacttt

SEQ ID NO: 251999 - DNA, 25 bp, Probe sequence
ggttcctttaccatggacttgtggt

SEQ ID NO: 252000 - DNA, 25 bp, Probe sequence
gcttgcactttatcccataatgatt

SEQ ID NO: 252001 - DNA, 25 bp, Probe sequence
gcagccataggtgcagaacattggg

SEQ ID NO: 252002 - DNA, 25 bp, Probe sequence
gacttgtggtttttcacttacttgt

SEQ ID NO: 252003 - DNA, 25 bp, Probe sequence
gaacattggggacacgaaattattc

SEQ ID NO: 252004 - DNA, 25 bp, Probe sequence
gttactcgcagccataggtgcagaa

SEQ ID NO: 252005 - DNA, 25 bp, Probe sequence
gtttcttacgtgcttgcactttatc

SEQ ID NO: 252006 - DNA, 25 bp, Probe sequence
gtttgtggtgttactcgcagccata

SEQ ID NO: 252007 - DNA, 25 bp, Probe sequence
gtgccatctttaagtgtgtttgtgg

SEQ ID NO: 252008 - DNA, 25 bp, Probe sequence
gtgcttgcactttatcccataatga

SEQ ID NO: 252009 - DNA, 25 bp, Probe sequence
gtgttactcgcagccataggtgcag

SEQ ID NO: 252010 - DNA, 25 bp, Probe sequence
gtgtttgtggtgttactcgcagcca

SEQ ID NO: 252011 - DNA, 25 bp, Probe sequence
tggggacacgaaattattccagtta

SEQ ID NO: 252012 - DNA, 25 bp, Probe sequence
tgtgtttgtggtgttactcgcagcc

SEQ ID NO: 252013 - DNA, 25 bp, Probe sequence
tgtggtgttactcgcagccataggt

SEQ ID NO: 252014 - DNA, 25 bp, Probe sequence
tgtggtttttcacttacttgtttct

SEQ ID NO: 252015 - DNA, 25 bp, Probe sequence
tcctttaccatggacttgtggtttt

SEQ ID NO: 252016 - DNA, 25 bp, Probe sequence
tcttacgtgcttgcactttatccca

SEQ ID NO: 252017 - DNA, 25 bp, Probe sequence
tacgtgcttgcactttatcccataa

SEQ ID NO: 252018 - DNA, 25 bp, Probe sequence
taccatggacttgtggtttttcact

SEQ ID NO: 252019 - DNA, 25 bp, Probe sequence
tattccagttaaaatattggttcct

SEQ ID NO: 252020 - DNA, 25 bp, Probe sequence
ttttcacttacttgtttcttacgtg

SEQ ID NO: 252021 - DNA, 25 bp, Probe sequence
ttacttgtttcttacgtgcttgcac

SEQ ID NO: 252022 - DNA, 25 bp, Probe sequence
ttcacttacttgtttcttacgtgct

SEQ ID NO: 252023 - DNA, 25 bp, Probe sequence
ttgcactttatcccataatgattga

SEQ ID NO: 252024 - DNA, 25 bp, Probe sequence
ataacgaagacgcatttgctggttt

SEQ ID NO: 252025 - DNA, 25 bp, Probe sequence
acgaagacgcatttgctggtttgga

SEQ ID NO: 252026 - DNA, 25 bp, Probe sequence
acgcatttgctggtttggaaatggt

SEQ ID NO: 252027 - DNA, 25 bp, Probe sequence
aaagtagtgaaagcgttagacaagc

SEQ ID NO: 252028 - DNA, 25 bp, Probe sequence
aaagctacgaagtgctatcaaagag

SEQ ID NO: 252029 - DNA, 25 bp, Probe sequence
aaaaagctacgaagtgctatcaaag

SEQ ID NO: 252030 - DNA, 25 bp, Probe sequence
aacagagtggcggaaagtgaatcag

SEQ ID NO: 252031 - DNA, 25 bp, Probe sequence
aacgaagacgcatttgctggtttgg

SEQ ID NO: 252032 - DNA, 25 bp, Probe sequence
aagcgttagacaagcttaacggtgt

SEQ ID NO: 252033 - DNA, 25 bp, Probe sequence
aagacgcatttgctggtttggaaat

SEQ ID NO: 252034 - DNA, 25 bp, Probe sequence
aagtgctatcaaagagttccaaaaa

SEQ ID NO: 252035 - DNA, 25 bp, Probe sequence
caagcttaacggtgttgaaagcgat

SEQ ID NO: 252036 - DNA, 25 bp, Probe sequence
ctggtttggaaatggtagaagatga

SEQ ID NO: 252037 - DNA, 25 bp, Probe sequence
cgaagtgctatcaaagagttccaaa

SEQ ID NO: 252038 - DNA, 25 bp, Probe sequence
cgaagacgcatttgctggtttggaa

SEQ ID NO: 252039 - DNA, 25 bp, Probe sequence
gcgataacaaagttactgatttaac

SEQ ID NO: 252040 - DNA, 25 bp, Probe sequence
gctacgaagtgctatcaaagagttc

SEQ ID NO: 252041 - DNA, 25 bp, Probe sequence
gcttaacggtgttgaaagcgataac

SEQ ID NO: 252042 - DNA, 25 bp, Probe sequence
gaataacgaagacgcatttgctggt

SEQ ID NO: 252043 - DNA, 25 bp, Probe sequence
gaagacgcatttgctggtttggaaa

SEQ ID NO: 252044 - DNA, 25 bp, Probe sequence
gaaagcgttagacaagcttaacggt

SEQ ID NO: 252045 - DNA, 25 bp, Probe sequence
gaaagcgataacaaagttactgatt

SEQ ID NO: 252046 - DNA, 25 bp, Probe sequence
gacaagcttaacggtgttgaaagcg

SEQ ID NO: 252047 - DNA, 25 bp, Probe sequence
gacgcatttgctggtttggaaatgg

SEQ ID NO: 252048 - DNA, 25 bp, Probe sequence
gagttccaaaaagtagtgaaagcgt

SEQ ID NO: 252049 - DNA, 25 bp, Probe sequence
gatgaaattactaaaaagctacgaa

SEQ ID NO: 252050 - DNA, 25 bp, Probe sequence
gatttaacagagtggcggaaagtga

SEQ ID NO: 252051 - DNA, 25 bp, Probe sequence
gttagacaagcttaacggtgttgaa

SEQ ID NO: 252052 - DNA, 25 bp, Probe sequence
gtgctatcaaagagttccaaaaagt

SEQ ID NO: 252053 - DNA, 25 bp, Probe sequence
taacgaagacgcatttgctggtttg

SEQ ID NO: 252054 - DNA, 25 bp, Probe sequence
tactgatttaacagagtggcggaaa

SEQ ID NO: 252055 - DNA, 25 bp, Probe sequence
tacgaagtgctatcaaagagttcca

SEQ ID NO: 252056 - DNA, 25 bp, Probe sequence
tagacaagcttaacggtgttgaaag

SEQ ID NO: 252057 - DNA, 25 bp, Probe sequence
tttgctggtttggaaatggtagaag

SEQ ID NO: 252058 - DNA, 25 bp, Probe sequence
attgtcttttgttgcgtatactact

SEQ ID NO: 252059 - DNA, 25 bp, Probe sequence
attattttgttaacacagggtggtg

SEQ ID NO: 252060 - DNA, 25 bp, Probe sequence
atactacttttgctatcttacaatc

SEQ ID NO: 252061 - DNA, 25 bp, Probe sequence
actacttttgctatcttacaatcaa

SEQ ID NO: 252062 - DNA, 25 bp, Probe sequence
acttttgctatcttacaatcaatta

SEQ ID NO: 252063 - DNA, 25 bp, Probe sequence
aacgaattgtcttttgttgcgtata

SEQ ID NO: 252064 - DNA, 25 bp, Probe sequence
aattgtcttttgttgcgtatactac

SEQ ID NO: 252065 - DNA, 25 bp, Probe sequence
caatcaattattttgttaacacagg

SEQ ID NO: 252066 - DNA, 25 bp, Probe sequence
ctaacgaattgtcttttgttgcgta

SEQ ID NO: 252067 - DNA, 25 bp, Probe sequence
cttttgttgcgtatactacttttgc

SEQ ID NO: 252068 - DNA, 25 bp, Probe sequence
ctacttttgctatcttacaatcaat

SEQ ID NO: 252069 - DNA, 25 bp, Probe sequence
cgtatactacttttgctatcttaca

SEQ ID NO: 252070 - DNA, 25 bp, Probe sequence
cgaattgtcttttgttgcgtatact

SEQ ID NO: 252071 - DNA, 25 bp, Probe sequence
gcgtatactacttttgctatcttac

SEQ ID NO: 252072 - DNA, 25 bp, Probe sequence
gaattgtcttttgttgcgtatacta

SEQ ID NO: 252073 - DNA, 25 bp, Probe sequence
gttaacacagggtggtgttgaacca

SEQ ID NO: 252074 - DNA, 25 bp, Probe sequence
gttgcgtatactacttttgctatct

SEQ ID NO: 252075 - DNA, 25 bp, Probe sequence
gtatactacttttgctatcttacaa

SEQ ID NO: 252076 - DNA, 25 bp, Probe sequence
gtctaacgaattgtcttttgttgcg

SEQ ID NO: 252077 - DNA, 25 bp, Probe sequence
gtcttttgttgcgtatactactttt

SEQ ID NO: 252078 - DNA, 25 bp, Probe sequence
gtgtctaacgaattgtcttttgttg

SEQ ID NO: 252079 - DNA, 25 bp, Probe sequence
tgtcttttgttgcgtatactacttt

SEQ ID NO: 252080 - DNA, 25 bp, Probe sequence
tgttgcgtatactacttttgctatc

SEQ ID NO: 252081 - DNA, 25 bp, Probe sequence
tgctatcttacaatcaattattttg

SEQ ID NO: 252082 - DNA, 25 bp, Probe sequence
tgcgtatactacttttgctatctta

SEQ ID NO: 252083 - DNA, 25 bp, Probe sequence
taacacagggtggtgttgaaccaaa

SEQ ID NO: 252084 - DNA, 25 bp, Probe sequence
tactacttttgctatcttacaatca

SEQ ID NO: 252085 - DNA, 25 bp, Probe sequence
tatactacttttgctatcttacaat

SEQ ID NO: 252086 - DNA, 25 bp, Probe sequence
tttgttgcgtatactacttttgcta

SEQ ID NO: 252087 - DNA, 25 bp, Probe sequence
ttttgttgcgtatactacttttgct

SEQ ID NO: 252088 - DNA, 25 bp, Probe sequence
ttttgctatcttacaatcaattatt

SEQ ID NO: 252089 - DNA, 25 bp, Probe sequence
ttgcgtatactacttttgctatctt

SEQ ID NO: 252090 - DNA, 25 bp, Probe sequence
ttgtcttttgttgcgtatactactt

SEQ ID NO: 252091 - DNA, 25 bp, Probe sequence
ttgttgcgtatactacttttgctat

SEQ ID NO: 252092 - DNA, 25 bp, Probe sequence
attccatttagttgcccttgtattc

SEQ ID NO: 252093 - DNA, 25 bp, Probe sequence
atttagttgcccttgtattctatta

SEQ ID NO: 252094 - DNA, 25 bp, Probe sequence
ataattccatttagttgcccttgta

SEQ ID NO: 252095 - DNA, 25 bp, Probe sequence
atgatacccatcaagcgttggagtg

SEQ ID NO: 252096 - DNA, 25 bp, Probe sequence
agcgttggagtgaactctttgatgc

SEQ ID NO: 252097 - DNA, 25 bp, Probe sequence
acccatcaagcgttggagtgaactc

SEQ ID NO: 252098 - DNA, 25 bp, Probe sequence
actctttgatgcacttatttgtgta

SEQ ID NO: 252099 - DNA, 25 bp, Probe sequence
aataattccatttagttgcccttgt

SEQ ID NO: 252100 - DNA, 25 bp, Probe sequence
aattccatttagttgcccttgtatt

SEQ ID NO: 252101 - DNA, 25 bp, Probe sequence
cctccatcattttaataattccatt

SEQ ID NO: 252102 - DNA, 25 bp, Probe sequence
ccttcctccatcattttaataattc

SEQ ID NO: 252103 - DNA, 25 bp, Probe sequence
ccatcaagcgttggagtgaactctt

SEQ ID NO: 252104 - DNA, 25 bp, Probe sequence
ccatttagttgcccttgtattctat

SEQ ID NO: 252105 - DNA, 25 bp, Probe sequence
gcccttgtattctattaatacgatt

SEQ ID NO: 252106 - DNA, 25 bp, Probe sequence
gcacttatttgtgtaatgacatctt

SEQ ID NO: 252107 - DNA, 25 bp, Probe sequence
gaactctttgatgcacttatttgtg

SEQ ID NO: 252108 - DNA, 25 bp, Probe sequence
gacatctttacagtcttttccttcc

SEQ ID NO: 252109 - DNA, 25 bp, Probe sequence
gatgcacttatttgtgtaatgacat

SEQ ID NO: 252110 - DNA, 25 bp, Probe sequence
gatacccatcaagcgttggagtgaa

SEQ ID NO: 252111 - DNA, 25 bp, Probe sequence
gttggagtgaactctttgatgcact

SEQ ID NO: 252112 - DNA, 25 bp, Probe sequence
gttgcccttgtattctattaatacg

SEQ ID NO: 252113 - DNA, 25 bp, Probe sequence
ggagtgaactctttgatgcacttat

SEQ ID NO: 252114 - DNA, 25 bp, Probe sequence
tgacatctttacagtcttttccttc

SEQ ID NO: 252115 - DNA, 25 bp, Probe sequence
tgaactctttgatgcacttatttgt

SEQ ID NO: 252116 - DNA, 25 bp, Probe sequence
tccatttagttgcccttgtattcta

SEQ ID NO: 252117 - DNA, 25 bp, Probe sequence
tccttcctccatcattttaataatt

SEQ ID NO: 252118 - DNA, 25 bp, Probe sequence
ttccatttagttgcccttgtattct

SEQ ID NO: 252119 - DNA, 25 bp, Probe sequence
tcaagcgttggagtgaactctttga

SEQ ID NO: 252120 - DNA, 25 bp, Probe sequence
taattccatttagttgcccttgtat

SEQ ID NO: 252121 - DNA, 25 bp, Probe sequence
tagttgcccttgtattctattaata

SEQ ID NO: 252122 - DNA, 25 bp, Probe sequence
tttccttcctccatcattttaataa

SEQ ID NO: 252123 - DNA, 25 bp, Probe sequence
tttagttgcccttgtattctattaa

SEQ ID NO: 252124 - DNA, 25 bp, Probe sequence
ttcctccatcattttaataattcca

SEQ ID NO: 252125 - DNA, 25 bp, Probe sequence
ttccttcctccatcattttaataat

SEQ ID NO: 252126 - DNA, 25 bp, Probe sequence
attactatactattagcgactacag

SEQ ID NO: 252127 - DNA, 25 bp, Probe sequence
attagcgactacagtattcattggt

SEQ ID NO: 252128 - DNA, 25 bp, Probe sequence
atttgctagaaatgcacctaacata

SEQ ID NO: 252129 - DNA, 25 bp, Probe sequence
acctactatacctgaaataatacca

SEQ ID NO: 252130 - DNA, 25 bp, Probe sequence
agaaatgcacctaacatactcccta

SEQ ID NO: 252131 - DNA, 25 bp, Probe sequence
agcgactacagtattcattggtaat

SEQ ID NO: 252132 - DNA, 25 bp, Probe sequence
acctaacatactccctataatcatg

SEQ ID NO: 252133 - DNA, 25 bp, Probe sequence
actattagcgactacagtattcatt

SEQ ID NO: 252134 - DNA, 25 bp, Probe sequence
actatacctgaaataataccaatga

SEQ ID NO: 252135 - DNA, 25 bp, Probe sequence
aaagcaataatgatatataccgtat

SEQ ID NO: 252136 - DNA, 25 bp, Probe sequence
aataatgaaggcaccacctgcacct

SEQ ID NO: 252137 - DNA, 25 bp, Probe sequence
aacatactccctataatcatgccgc

SEQ ID NO: 252138 - DNA, 25 bp, Probe sequence
aagcaattactatactattagcgac

SEQ ID NO: 252139 - DNA, 25 bp, Probe sequence
aataccaatgaaaaggccaatgata

SEQ ID NO: 252140 - DNA, 25 bp, Probe sequence
cacctaacatactccctataatcat

SEQ ID NO: 252141 - DNA, 25 bp, Probe sequence
ctaacatactccctataatcatgcc

SEQ ID NO: 252142 - DNA, 25 bp, Probe sequence
ctgcacctactatacctgaaataat

SEQ ID NO: 252143 - DNA, 25 bp, Probe sequence
cctgcacctactatacctgaaataa

SEQ ID NO: 252144 - DNA, 25 bp, Probe sequence
cctaacatactccctataatcatgc

SEQ ID NO: 252145 - DNA, 25 bp, Probe sequence
gctagaaatgcacctaacatactcc

SEQ ID NO: 252146 - DNA, 25 bp, Probe sequence
gcacctactatacctgaaataatac

SEQ ID NO: 252147 - DNA, 25 bp, Probe sequence
gcaataatgatatataccgtattta

SEQ ID NO: 252148 - DNA, 25 bp, Probe sequence
gcaattactatactattagcgacta

SEQ ID NO: 252149 - DNA, 25 bp, Probe sequence
gaaaaggccaatgataactaataaa

SEQ ID NO: 252150 - DNA, 25 bp, Probe sequence
ggtttcactttaataaacattaatg

SEQ ID NO: 252151 - DNA, 25 bp, Probe sequence
ggaataataatgaaggcaccacctg

SEQ ID NO: 252152 - DNA, 25 bp, Probe sequence
taataatgaaggcaccacctgcacc

SEQ ID NO: 252153 - DNA, 25 bp, Probe sequence
taacatactccctataatcatgccg

SEQ ID NO: 252154 - DNA, 25 bp, Probe sequence
taaatgaagacttttcggaactagg

SEQ ID NO: 252155 - DNA, 25 bp, Probe sequence
taaatttgctagaaatgcacctaac

SEQ ID NO: 252156 - DNA, 25 bp, Probe sequence
tactatactattagcgactacagta

SEQ ID NO: 252157 - DNA, 25 bp, Probe sequence
taccgtatttacaaatgtagcatca

SEQ ID NO: 252158 - DNA, 25 bp, Probe sequence
tagcgactacagtattcattggtaa

SEQ ID NO: 252159 - DNA, 25 bp, Probe sequence
tagaaatgcacctaacatactccct

SEQ ID NO: 252160 - DNA, 25 bp, Probe sequence
atttttctgcaagttcaagtcctgt

SEQ ID NO: 252161 - DNA, 25 bp, Probe sequence
atttcatctttctcatatttgttaa

SEQ ID NO: 252162 - DNA, 25 bp, Probe sequence
atctttctcatatttgttaaacaat

SEQ ID NO: 252163 - DNA, 25 bp, Probe sequence
atctaatagttctttgcttgtgtgt

SEQ ID NO: 252164 - DNA, 25 bp, Probe sequence
atgcaatctcaacaaatctaatagt

SEQ ID NO: 252165 - DNA, 25 bp, Probe sequence
atggattgtggaaaatgcctctacc

SEQ ID NO: 252166 - DNA, 25 bp, Probe sequence
acaatgtgtttggtgcaatttcgtc

SEQ ID NO: 252167 - DNA, 25 bp, Probe sequence
aacaatgatagatgcaatctcaaca

SEQ ID NO: 252168 - DNA, 25 bp, Probe sequence
aatgcctctaccaatcatgatgcca

SEQ ID NO: 252169 - DNA, 25 bp, Probe sequence
aatagcttcgattaattcccaatgt

SEQ ID NO: 252170 - DNA, 25 bp, Probe sequence
aataccatatttttctgcaagttca

SEQ ID NO: 252171 - DNA, 25 bp, Probe sequence
aattcccaatgtgcatctactttac

SEQ ID NO: 252172 - DNA, 25 bp, Probe sequence
cccaatgtgcatctactttactcat

SEQ ID NO: 252173 - DNA, 25 bp, Probe sequence
gcctctaccaatcatgatgccatca

SEQ ID NO: 252174 - DNA, 25 bp, Probe sequence
gcttcgattaattcccaatgtgcat

SEQ ID NO: 252175 - DNA, 25 bp, Probe sequence
gcaagttcaagtcctgtttttctat

SEQ ID NO: 252176 - DNA, 25 bp, Probe sequence
gaattgtcgtatttcatctttctca

SEQ ID NO: 252177 - DNA, 25 bp, Probe sequence
gatgccatcaataccatatttttct

SEQ ID NO: 252178 - DNA, 25 bp, Probe sequence
gattaattcccaatgtgcatctact

SEQ ID NO: 252179 - DNA, 25 bp, Probe sequence
gttcaagtcctgtttttctatcggg

SEQ ID NO: 252180 - DNA, 25 bp, Probe sequence
gtcacgtaaatttttaatagcttcg

SEQ ID NO: 252181 - DNA, 25 bp, Probe sequence
gtcctgtttttctatcgggaatatc

SEQ ID NO: 252182 - DNA, 25 bp, Probe sequence
gtcgtatttcatctttctcatattt

SEQ ID NO: 252183 - DNA, 25 bp, Probe sequence
gtgcatctactttactcatgcgttt

SEQ ID NO: 252184 - DNA, 25 bp, Probe sequence
gtgtttggtgcaatttcgtcacgta

SEQ ID NO: 252185 - DNA, 25 bp, Probe sequence
gggaatatcatcgttaattgttaac

SEQ ID NO: 252186 - DNA, 25 bp, Probe sequence
ggtgcaatttcgtcacgtaaatttt

SEQ ID NO: 252187 - DNA, 25 bp, Probe sequence
ggaaaatgcctctaccaatcatgat

SEQ ID NO: 252188 - DNA, 25 bp, Probe sequence
tgttcgcgtggttctttttcaaaag

SEQ ID NO: 252189 - DNA, 25 bp, Probe sequence
tctgcaagttcaagtcctgtttttc

SEQ ID NO: 252190 - DNA, 25 bp, Probe sequence
tctactttactcatgcgtttgataa

SEQ ID NO: 252191 - DNA, 25 bp, Probe sequence
tagttctttgcttgtgtgttcgcgt

SEQ ID NO: 252192 - DNA, 25 bp, Probe sequence
ttcgcgtggttctttttcaaaagtg

SEQ ID NO: 252193 - DNA, 25 bp, Probe sequence
ttctatcgggaatatcatcgttaat

SEQ ID NO: 252194 - DNA, 25 bp, Probe sequence
atttctcaggtaattcttttgctaa

SEQ ID NO: 252195 - DNA, 25 bp, Probe sequence
agcatcatccatacatagaatataa

SEQ ID NO: 252196 - DNA, 25 bp, Probe sequence
accacctgctgatgattttaataga

SEQ ID NO: 252197 - DNA, 25 bp, Probe sequence
acctgctgatgattttaatagagtt

SEQ ID NO: 252198 - DNA, 25 bp, Probe sequence
acgacactctttaaagcatcatcca

SEQ ID NO: 252199 - DNA, 25 bp, Probe sequence
aatctttttctaatagatgtctatt

SEQ ID NO: 252200 - DNA, 25 bp, Probe sequence
cactctttaaagcatcatccataca

SEQ ID NO: 252201 - DNA, 25 bp, Probe sequence
caggtaattcttttgctaattttgg

SEQ ID NO: 252202 - DNA, 25 bp, Probe sequence
ctcctgtaacgacactctttaaagc

SEQ ID NO: 252203 - DNA, 25 bp, Probe sequence
gctttttactcctgtaacgacactc

SEQ ID NO: 252204 - DNA, 25 bp, Probe sequence
ctgtaccacctgctgatgattttaa

SEQ ID NO: 252205 - DNA, 25 bp, Probe sequence
ctgtaacgacactctttaaagcatc

SEQ ID NO: 252206 - DNA, 25 bp, Probe sequence
gacactctttaaagcatcatccata

SEQ ID NO: 252207 - DNA, 25 bp, Probe sequence
gatgtctattagaataccatgttat

SEQ ID NO: 252208 - DNA, 25 bp, Probe sequence
gttatatttttgctttttactcctg

SEQ ID NO: 252209 - DNA, 25 bp, Probe sequence
gtaccacctgctgatgattttaata

SEQ ID NO: 252210 - DNA, 25 bp, Probe sequence
gtaacgacactctttaaagcatcat

SEQ ID NO: 252211 - DNA, 25 bp, Probe sequence
ggtacaataaatctttttctaatag

SEQ ID NO: 252212 - DNA, 25 bp, Probe sequence
tggaaattctgtaccacctgctgat

SEQ ID NO: 252213 - DNA, 25 bp, Probe sequence
tgaatctggtttatttaggtacaat

SEQ ID NO: 252214 - DNA, 25 bp, Probe sequence
tttgctttttactcctgtaacgaca

SEQ ID NO: 252215 - DNA, 25 bp, Probe sequence
ttttggaaattctgtaccacctgct

SEQ ID NO: 252216 - DNA, 25 bp, Probe sequence
tctttaaagcatcatccatacatag

SEQ ID NO: 252217 - DNA, 25 bp, Probe sequence
taattcttttgctaattttggaaat

SEQ ID NO: 252218 - DNA, 25 bp, Probe sequence
taaagcatcatccatacatagaata

SEQ ID NO: 252219 - DNA, 25 bp, Probe sequence
tactcctgtaacgacactctttaaa

SEQ ID NO: 252220 - DNA, 25 bp, Probe sequence
taccatgttatatttttgcttttta

SEQ ID NO: 252221 - DNA, 25 bp, Probe sequence
tagagttaatgaatctggtttattt

SEQ ID NO: 252222 - DNA, 25 bp, Probe sequence
tatatttttgctttttactcctgta

SEQ ID NO: 252223 - DNA, 25 bp, Probe sequence
tttactcctgtaacgacactcttta

SEQ ID NO: 252224 - DNA, 25 bp, Probe sequence
tttttactcctgtaacgacactctt

SEQ ID NO: 252225 - DNA, 25 bp, Probe sequence
ttatatttatttaatttctcaggta

SEQ ID NO: 252226 - DNA, 25 bp, Probe sequence
ttctgtaccacctgctgatgatttt

SEQ ID NO: 252227 - DNA, 25 bp, Probe sequence
ttctcaggtaattcttttgctaatt

SEQ ID NO: 252228 - DNA, 25 bp, Probe sequence
atacccaaagggtgcatgtgttgta

SEQ ID NO: 252229 - DNA, 25 bp, Probe sequence
atttttgacttgttcgcctatatta

SEQ ID NO: 252230 - DNA, 25 bp, Probe sequence
aggtaataattgaacacagctttta

SEQ ID NO: 252231 - DNA, 25 bp, Probe sequence
actgttggtgcttttactgtgtcta

SEQ ID NO: 252232 - DNA, 25 bp, Probe sequence
aaagggtgcatgtgttgtaatcatt

SEQ ID NO: 252233 - DNA, 25 bp, Probe sequence
cacagcttttactgttggtgctttt

SEQ ID NO: 252234 - DNA, 25 bp, Probe sequence
cttgttcgcctatattatcagattc

SEQ ID NO: 252235 - DNA, 25 bp, Probe sequence
ctgtgtctatcgtgaaagtaccatt

SEQ ID NO: 252236 - DNA, 25 bp, Probe sequence
ccatttttgacttgttcgcctatat

SEQ ID NO: 252237 - DNA, 25 bp, Probe sequence
gctttttctttgattccatttttga

SEQ ID NO: 252238 - DNA, 25 bp, Probe sequence
gcttttactgttggtgcttttactg

SEQ ID NO: 252239 - DNA, 25 bp, Probe sequence
gaacacagcttttactgttggtgct

SEQ ID NO: 252240 - DNA, 25 bp, Probe sequence
gacttgttcgcctatattatcagat

SEQ ID NO: 252241 - DNA, 25 bp, Probe sequence
gttggtgcttttactgtgtctatcg

SEQ ID NO: 252242 - DNA, 25 bp, Probe sequence
gttcgcctatattatcagattctag

SEQ ID NO: 252243 - DNA, 25 bp, Probe sequence
gtaccattatgatagtgatacccaa

SEQ ID NO: 252244 - DNA, 25 bp, Probe sequence
gtctatcgtgaaagtaccattatga

SEQ ID NO: 252245 - DNA, 25 bp, Probe sequence
ggtgcttttactgtgtctatcgtga

SEQ ID NO: 252246 - DNA, 25 bp, Probe sequence
ggtgcatgtgttgtaatcattttac

SEQ ID NO: 252247 - DNA, 25 bp, Probe sequence
tgtttcgctttttctttgattccat

SEQ ID NO: 252248 - DNA, 25 bp, Probe sequence
tgattccatttttgacttgttcgcc

SEQ ID NO: 252249 - DNA, 25 bp, Probe sequence
tgcttttactgtgtctatcgtgaaa

SEQ ID NO: 252250 - DNA, 25 bp, Probe sequence
tcgctttttctttgattccattttt

SEQ ID NO: 252251 - DNA, 25 bp, Probe sequence
tctttgattccatttttgacttgtt

SEQ ID NO: 252252 - DNA, 25 bp, Probe sequence
taatcattttaccttgtttcgcttt

SEQ ID NO: 252253 - DNA, 25 bp, Probe sequence
ttatgatagtgatacccaaagggtg

SEQ ID NO: 252254 - DNA, 25 bp, Probe sequence
tttcgctttttctttgattccattt

SEQ ID NO: 252255 - DNA, 25 bp, Probe sequence
ttttgacttgttcgcctatattatc

SEQ ID NO: 252256 - DNA, 25 bp, Probe sequence
ttttctttgattccatttttgactt

SEQ ID NO: 252257 - DNA, 25 bp, Probe sequence
ttataaccataaccttgaaggtaat

SEQ ID NO: 252258 - DNA, 25 bp, Probe sequence
ttactgttggtgcttttactgtgtc

SEQ ID NO: 252259 - DNA, 25 bp, Probe sequence
ttccatttttgacttgttcgcctat

SEQ ID NO: 252260 - DNA, 25 bp, Probe sequence
ttgcgcaatttttttataaccataa

SEQ ID NO: 252261 - DNA, 25 bp, Probe sequence
ttgtttcgctttttctttgattcca

SEQ ID NO: 252262 - DNA, 25 bp, Probe sequence
attcaaaccatcattacgtgcacta

SEQ ID NO: 252263 - DNA, 25 bp, Probe sequence
agtactaattactgaggttccccag

SEQ ID NO: 252264 - DNA, 25 bp, Probe sequence
accatcattacgtgcactattattg

SEQ ID NO: 252265 - DNA, 25 bp, Probe sequence
acgtgcactattattgaaaatactg

SEQ ID NO: 252266 - DNA, 25 bp, Probe sequence
actgtgttcggcagtactaattact

SEQ ID NO: 252267 - DNA, 25 bp, Probe sequence
acttgacttctccgtgtatattaga

SEQ ID NO: 252268 - DNA, 25 bp, Probe sequence
acattcaaaccatcattacgtgcac

SEQ ID NO: 252269 - DNA, 25 bp, Probe sequence
aaaccatcattacgtgcactattat

SEQ ID NO: 252270 - DNA, 25 bp, Probe sequence
aaccatcattacgtgcactattatt

SEQ ID NO: 252271 - DNA, 25 bp, Probe sequence
aatactgtgttcggcagtactaatt

SEQ ID NO: 252272 - DNA, 25 bp, Probe sequence
caaaccatcattacgtgcactatta

SEQ ID NO: 252273 - DNA, 25 bp, Probe sequence
catcattacgtgcactattattgaa

SEQ ID NO: 252274 - DNA, 25 bp, Probe sequence
cattacgtgcactattattgaaaat

SEQ ID NO: 252275 - DNA, 25 bp, Probe sequence
cattcaaaccatcattacgtgcact

SEQ ID NO: 252276 - DNA, 25 bp, Probe sequence
ccagttttttagtgacttgacttct

SEQ ID NO: 252277 - DNA, 25 bp, Probe sequence
gaaaatactgtgttcggcagtacta

SEQ ID NO: 252278 - DNA, 25 bp, Probe sequence
gacttgacttctccgtgtatattag

SEQ ID NO: 252279 - DNA, 25 bp, Probe sequence
gacttctccgtgtatattagaacgt

SEQ ID NO: 252280 - DNA, 25 bp, Probe sequence
gttttttagtgacttgacttctccg

SEQ ID NO: 252281 - DNA, 25 bp, Probe sequence
gtacgtacattcaaaccatcattac

SEQ ID NO: 252282 - DNA, 25 bp, Probe sequence
gtacattcaaaccatcattacgtgc

SEQ ID NO: 252283 - DNA, 25 bp, Probe sequence
gtgtatattagaacgttgtcttcct

SEQ ID NO: 252284 - DNA, 25 bp, Probe sequence
tggtacgtacattcaaaccatcatt

SEQ ID NO: 252285 - DNA, 25 bp, Probe sequence
tgacttgacttctccgtgtatatta

SEQ ID NO: 252286 - DNA, 25 bp, Probe sequence
tccccagttttttagtgacttgact

SEQ ID NO: 252287 - DNA, 25 bp, Probe sequence
tcaaaccatcattacgtgcactatt

SEQ ID NO: 252288 - DNA, 25 bp, Probe sequence
tactaattactgaggttccccagtt

SEQ ID NO: 252289 - DNA, 25 bp, Probe sequence
tatattagaacgttgtcttccttga

SEQ ID NO: 252290 - DNA, 25 bp, Probe sequence
tttttagtgacttgacttctccgtg

SEQ ID NO: 252291 - DNA, 25 bp, Probe sequence
tttagtgacttgacttctccgtgta

SEQ ID NO: 252292 - DNA, 25 bp, Probe sequence
ttttagtgacttgacttctccgtgt

SEQ ID NO: 252293 - DNA, 25 bp, Probe sequence
ttagtgacttgacttctccgtgtat

SEQ ID NO: 252294 - DNA, 25 bp, Probe sequence
ttcaaaccatcattacgtgcactat

SEQ ID NO: 252295 - DNA, 25 bp, Probe sequence
ttgacttctccgtgtatattagaac

SEQ ID NO: 252296 - DNA, 25 bp, Probe sequence
atttttcgtcctttggcagattgaa

SEQ ID NO: 252297 - DNA, 25 bp, Probe sequence
atagattcacattcccatttttcgt

SEQ ID NO: 252298 - DNA, 25 bp, Probe sequence
atgcctttcatgaagtgtgtcagag

SEQ ID NO: 252299 - DNA, 25 bp, Probe sequence
acttcctcgatagattcacattccc

SEQ ID NO: 252300 - DNA, 25 bp, Probe sequence
aaggatattatctgccacttcctcg

SEQ ID NO: 252301 - DNA, 25 bp, Probe sequence
cacttcctcgatagattcacattcc

SEQ ID NO: 252302 - DNA, 25 bp, Probe sequence
catttttcgtcctttggcagattga

SEQ ID NO: 252303 - DNA, 25 bp, Probe sequence
cttcctcgatagattcacattccca

SEQ ID NO: 252304 - DNA, 25 bp, Probe sequence
ctcgatagattcacattcccatttt

SEQ ID NO: 252305 - DNA, 25 bp, Probe sequence
cgatagattcacattcccatttttc

SEQ ID NO: 252306 - DNA, 25 bp, Probe sequence
cccatttttcgtcctttggcagatt

SEQ ID NO: 252307 - DNA, 25 bp, Probe sequence
cctcgatagattcacattcccattt

SEQ ID NO: 252308 - DNA, 25 bp, Probe sequence
ccacttcctcgatagattcacattc

SEQ ID NO: 252309 - DNA, 25 bp, Probe sequence
gcctttcatgaagtgtgtcagagta

SEQ ID NO: 252310 - DNA, 25 bp, Probe sequence
gcggaccaagtctgatatattgatc

SEQ ID NO: 252311 - DNA, 25 bp, Probe sequence
gaaggatattatctgccacttcctc

SEQ ID NO: 252312 - DNA, 25 bp, Probe sequence
gaagtgtgtcagagtagtaagtata

SEQ ID NO: 252313 - DNA, 25 bp, Probe sequence
gaccaagtctgatatattgatcagg

SEQ ID NO: 252314 - DNA, 25 bp, Probe sequence
gatcaggaaggatattatctgccac

SEQ ID NO: 252315 - DNA, 25 bp, Probe sequence
gatagattcacattcccatttttcg

SEQ ID NO: 252316 - DNA, 25 bp, Probe sequence
gtatgaaggattttgttggtaagcg

SEQ ID NO: 252317 - DNA, 25 bp, Probe sequence
gtcagagtagtaagtatacgtatga

SEQ ID NO: 252318 - DNA, 25 bp, Probe sequence
ggtaagcggaccaagtctgatatat

SEQ ID NO: 252319 - DNA, 25 bp, Probe sequence
ggattttgttggtaagcggaccaag

SEQ ID NO: 252320 - DNA, 25 bp, Probe sequence
tgaaggattttgttggtaagcggac

SEQ ID NO: 252321 - DNA, 25 bp, Probe sequence
tgccacttcctcgatagattcacat

SEQ ID NO: 252322 - DNA, 25 bp, Probe sequence
tcccatttttcgtcctttggcagat

SEQ ID NO: 252323 - DNA, 25 bp, Probe sequence
tcctcgatagattcacattcccatt

SEQ ID NO: 252324 - DNA, 25 bp, Probe sequence
tcgatagattcacattcccattttt

SEQ ID NO: 252325 - DNA, 25 bp, Probe sequence
tagattcacattcccatttttcgtc

SEQ ID NO: 252326 - DNA, 25 bp, Probe sequence
tatacgtatgaaggattttgttggt

SEQ ID NO: 252327 - DNA, 25 bp, Probe sequence
tttcgtcctttggcagattgaataa

SEQ ID NO: 252328 - DNA, 25 bp, Probe sequence
tttttcgtcctttggcagattgaat

SEQ ID NO: 252329 - DNA, 25 bp, Probe sequence
ttcctcgatagattcacattcccat

SEQ ID NO: 252330 - DNA, 25 bp, Probe sequence
atagctacattaccatgctcggctt

SEQ ID NO: 252331 - DNA, 25 bp, Probe sequence
atcagctgtctcgatggcagtatct

SEQ ID NO: 252332 - DNA, 25 bp, Probe sequence
atgctaccaaaatagtggctcccat

SEQ ID NO: 252333 - DNA, 25 bp, Probe sequence
atgcaatatcagctgtctcgatggc

SEQ ID NO: 252334 - DNA, 25 bp, Probe sequence
aggcaattatcttaattccgatggc

SEQ ID NO: 252335 - DNA, 25 bp, Probe sequence
agtgcaggagcatcattgacgccat

SEQ ID NO: 252336 - DNA, 25 bp, Probe sequence
agtacttatttatccttcactctca

SEQ ID NO: 252337 - DNA, 25 bp, Probe sequence
agcttacttaaatcatctcccatta

SEQ ID NO: 252338 - DNA, 25 bp, Probe sequence
agcgttttcctgctaagtcttactg

SEQ ID NO: 252339 - DNA, 25 bp, Probe sequence
aaatagtggctcccatatcggaaag

SEQ ID NO: 252340 - DNA, 25 bp, Probe sequence
aacgtgatgttcgctttgatgatat

SEQ ID NO: 252341 - DNA, 25 bp, Probe sequence
aatcatctcccattaatgcaatatc

SEQ ID NO: 252342 - DNA, 25 bp, Probe sequence
gccaacagtggatgcagcaagtgca

SEQ ID NO: 252343 - DNA, 25 bp, Probe sequence
ctctcatcagtcgcaaactatttaa

SEQ ID NO: 252344 - DNA, 25 bp, Probe sequence
cgcccattgcaatgccaacagtgga

SEQ ID NO: 252345 - DNA, 25 bp, Probe sequence
ccaaagggttagccagcctggaata

SEQ ID NO: 252346 - DNA, 25 bp, Probe sequence
ccatcgccaatcatagctacattac

SEQ ID NO: 252347 - DNA, 25 bp, Probe sequence
ccatgctcggctttcatttttttaa

SEQ ID NO: 252348 - DNA, 25 bp, Probe sequence
gctcggctttcatttttttaatata

SEQ ID NO: 252349 - DNA, 25 bp, Probe sequence
gctgtctcgatggcagtatctgttc

SEQ ID NO: 252350 - DNA, 25 bp, Probe sequence
gcacacatatagtacttatttatcc

SEQ ID NO: 252351 - DNA, 25 bp, Probe sequence
gcaatgccaacagtggatgcagcaa

SEQ ID NO: 252352 - DNA, 25 bp, Probe sequence
gaagcttacttaaatcatctcccat

SEQ ID NO: 252353 - DNA, 25 bp, Probe sequence
gaaagaatcgcaatccaaagggtta

SEQ ID NO: 252354 - DNA, 25 bp, Probe sequence
gttttcctgctaagtcttactgcaa

SEQ ID NO: 252355 - DNA, 25 bp, Probe sequence
gtcttactgcaaatggaagcttact

SEQ ID NO: 252356 - DNA, 25 bp, Probe sequence
gtggatgcagcaagtgcaggagcat

SEQ ID NO: 252357 - DNA, 25 bp, Probe sequence
gtggctcccatatcggaaagaatcg

SEQ ID NO: 252358 - DNA, 25 bp, Probe sequence
tcgcaatccaaagggttagccagcc

SEQ ID NO: 252359 - DNA, 25 bp, Probe sequence
tcgatggcagtatctgttccagcac

SEQ ID NO: 252360 - DNA, 25 bp, Probe sequence
tagccagcctggaataaccaatagt

SEQ ID NO: 252361 - DNA, 25 bp, Probe sequence
ttaattccgatggcaaacgtgatgt

SEQ ID NO: 252362 - DNA, 25 bp, Probe sequence
ttcactctcatcagtcgcaaactat

SEQ ID NO: 252363 - DNA, 25 bp, Probe sequence
ttgatgatatttagcgttttcctgc

SEQ ID NO: 252364 - DNA, 25 bp, Probe sequence
agggggatggcctggagtgtgtaag

SEQ ID NO: 252365 - DNA, 25 bp, Probe sequence
actctcagggggatggcctggagtg

SEQ ID NO: 252366 - DNA, 25 bp, Probe sequence
atactctcagggggatggcctggag

SEQ ID NO: 252367 - DNA, 25 bp, Probe sequence
aaactaatactctcagggggatggc

SEQ ID NO: 252368 - DNA, 25 bp, Probe sequence
atgaagtcaccgctaaataatccca

SEQ ID NO: 252369 - DNA, 25 bp, Probe sequence
agtcaccgctaaataatcccattgg

SEQ ID NO: 252370 - DNA, 25 bp, Probe sequence
actaatactctcagggggatggcct

SEQ ID NO: 252371 - DNA, 25 bp, Probe sequence
aactaatactctcagggggatggcc

SEQ ID NO: 252372 - DNA, 25 bp, Probe sequence
aaaaactaatactctcagggggatg

SEQ ID NO: 252373 - DNA, 25 bp, Probe sequence
aagtcaccgctaaataatcccattg

SEQ ID NO: 252374 - DNA, 25 bp, Probe sequence
aatactctcagggggatggcctgga

SEQ ID NO: 252375 - DNA, 25 bp, Probe sequence
caccgctaaataatcccattggtat

SEQ ID NO: 252376 - DNA, 25 bp, Probe sequence
ctcagggggatggcctggagtgtgt

SEQ ID NO: 252377 - DNA, 25 bp, Probe sequence
tactctcagggggatggcctggagt

SEQ ID NO: 252378 - DNA, 25 bp, Probe sequence
ctctcagggggatggcctggagtgt

SEQ ID NO: 252379 - DNA, 25 bp, Probe sequence
ccgctaaataatcccattggtatac

SEQ ID NO: 252380 - DNA, 25 bp, Probe sequence
gcctggagtgtgtaagacttctaat

SEQ ID NO: 252381 - DNA, 25 bp, Probe sequence
tcccattggtatactggaaccccca

SEQ ID NO: 252382 - DNA, 25 bp, Probe sequence
gctaaataatcccattggtatactg

SEQ ID NO: 252383 - DNA, 25 bp, Probe sequence
gaagtcaccgctaaataatcccatt

SEQ ID NO: 252384 - DNA, 25 bp, Probe sequence
gatggcctggagtgtgtaagacttc

SEQ ID NO: 252385 - DNA, 25 bp, Probe sequence
gtcaccgctaaataatcccattggt

SEQ ID NO: 252386 - DNA, 25 bp, Probe sequence
gtgtgtaagacttctaatttaatct

SEQ ID NO: 252387 - DNA, 25 bp, Probe sequence
gggggatggcctggagtgtgtaaga

SEQ ID NO: 252388 - DNA, 25 bp, Probe sequence
gggatggcctggagtgtgtaagact

SEQ ID NO: 252389 - DNA, 25 bp, Probe sequence
ggggatggcctggagtgtgtaagac

SEQ ID NO: 252390 - DNA, 25 bp, Probe sequence
ggagtgtgtaagacttctaatttaa

SEQ ID NO: 252391 - DNA, 25 bp, Probe sequence
tggcctggagtgtgtaagacttcta

SEQ ID NO: 252392 - DNA, 25 bp, Probe sequence
ggcctggagtgtgtaagacttctaa

SEQ ID NO: 252393 - DNA, 25 bp, Probe sequence
tgaagtcaccgctaaataatcccat

SEQ ID NO: 252394 - DNA, 25 bp, Probe sequence
tcaccgctaaataatcccattggta

SEQ ID NO: 252395 - DNA, 25 bp, Probe sequence
taatcccattggtatactggaaccc

SEQ ID NO: 252396 - DNA, 25 bp, Probe sequence
taagacttctaatttaatctttcct

SEQ ID NO: 252397 - DNA, 25 bp, Probe sequence
ttctaatttaatctttcctaaatag

SEQ ID NO: 252398 - DNA, 25 bp, Probe sequence
attccctaattggctatttagattg

SEQ ID NO: 252399 - DNA, 25 bp, Probe sequence
ataccctctttctatttaagataca

SEQ ID NO: 252400 - DNA, 25 bp, Probe sequence
ataacaccagtgaaatccatatgca

SEQ ID NO: 252401 - DNA, 25 bp, Probe sequence
atgcttgtaataacaccagtgaaat

SEQ ID NO: 252402 - DNA, 25 bp, Probe sequence
atgcataccctctttctatttaaga

SEQ ID NO: 252403 - DNA, 25 bp, Probe sequence
agtgaaatccatatgcataccctct

SEQ ID NO: 252404 - DNA, 25 bp, Probe sequence
accagtgaaatccatatgcataccc

SEQ ID NO: 252405 - DNA, 25 bp, Probe sequence
acaccagtgaaatccatatgcatac

SEQ ID NO: 252406 - DNA, 25 bp, Probe sequence
aaattccctaattggctatttagat

SEQ ID NO: 252407 - DNA, 25 bp, Probe sequence
aaatcgtcatattggaaatacgtaa

SEQ ID NO: 252408 - DNA, 25 bp, Probe sequence
aaaacatacaacgactttgcataaa

SEQ ID NO: 252409 - DNA, 25 bp, Probe sequence
aacaccagtgaaatccatatgcata

SEQ ID NO: 252410 - DNA, 25 bp, Probe sequence
aacatacaacgactttgcataaaaa

SEQ ID NO: 252411 - DNA, 25 bp, Probe sequence
aataatgcttgtaataacaccagtg

SEQ ID NO: 252412 - DNA, 25 bp, Probe sequence
caccagtgaaatccatatgcatacc

SEQ ID NO: 252413 - DNA, 25 bp, Probe sequence
cagtgaaatccatatgcataccctc

SEQ ID NO: 252414 - DNA, 25 bp, Probe sequence
cataccctctttctatttaagatac

SEQ ID NO: 252415 - DNA, 25 bp, Probe sequence
cttgattaaatcaataatgcttgta

SEQ ID NO: 252416 - DNA, 25 bp, Probe sequence
ccctctttctatttaagatacatta

SEQ ID NO: 252417 - DNA, 25 bp, Probe sequence
ccagtgaaatccatatgcataccct

SEQ ID NO: 252418 - DNA, 25 bp, Probe sequence
gcataccctctttctatttaagata

SEQ ID NO: 252419 - DNA, 25 bp, Probe sequence
gaaaaacatacaacgactttgcata

SEQ ID NO: 252420 - DNA, 25 bp, Probe sequence
gaaatccatatgcataccctctttc

SEQ ID NO: 252421 - DNA, 25 bp, Probe sequence
gactttgcataaaaaatcgtcatat

SEQ ID NO: 252422 - DNA, 25 bp, Probe sequence
ggctatttagattgcataaatgtca

SEQ ID NO: 252423 - DNA, 25 bp, Probe sequence
tgttaaaaattccctaattggctat

SEQ ID NO: 252424 - DNA, 25 bp, Probe sequence
tgaaatccatatgcataccctcttt

SEQ ID NO: 252425 - DNA, 25 bp, Probe sequence
tgcataccctctttctatttaagat

SEQ ID NO: 252426 - DNA, 25 bp, Probe sequence
tccctaattggctatttagattgca

SEQ ID NO: 252427 - DNA, 25 bp, Probe sequence
taattggctatttagattgcataaa

SEQ ID NO: 252428 - DNA, 25 bp, Probe sequence
taatgcttgtaataacaccagtgaa

SEQ ID NO: 252429 - DNA, 25 bp, Probe sequence
taacaccagtgaaatccatatgcat

SEQ ID NO: 252430 - DNA, 25 bp, Probe sequence
taccctctttctatttaagatacat

SEQ ID NO: 252431 - DNA, 25 bp, Probe sequence
tatgcataccctctttctatttaag

SEQ ID NO: 252432 - DNA, 25 bp, Probe sequence
atttccgacgcggtgaggccatttt

SEQ ID NO: 252433 - DNA, 25 bp, Probe sequence
atatatgccgcgggcgatgtgaccc

SEQ ID NO: 252434 - DNA, 25 bp, Probe sequence
atggatttgatctcattcgtggcga

SEQ ID NO: 252435 - DNA, 25 bp, Probe sequence
agaccttacggatagctttgcgcct

SEQ ID NO: 252436 - DNA, 25 bp, Probe sequence
agctttgcgccttatttaacgatgg

SEQ ID NO: 252437 - DNA, 25 bp, Probe sequence
aaagcttgcagccttgacgtttgat

SEQ ID NO: 252438 - DNA, 25 bp, Probe sequence
aaaatcgatcttcgctttgttcccg

SEQ ID NO: 252439 - DNA, 25 bp, Probe sequence
aacctgatcactggggtcacttatc

SEQ ID NO: 252440 - DNA, 25 bp, Probe sequence
aagatgtttcggccgatttccgacg

SEQ ID NO: 252441 - DNA, 25 bp, Probe sequence
caaacgagtaccggtgctgcggacc

SEQ ID NO: 252442 - DNA, 25 bp, Probe sequence
cgatcgccacagtcggcttgactga

SEQ ID NO: 252443 - DNA, 25 bp, Probe sequence
catcgaagccgatcaagtcctcgtg

SEQ ID NO: 252444 - DNA, 25 bp, Probe sequence
ctcggtccgcaattcgtttatgttg

SEQ ID NO: 252445 - DNA, 25 bp, Probe sequence
cgggatggcgattacgatcttctga

SEQ ID NO: 252446 - DNA, 25 bp, Probe sequence
gcttctccggctgttccggaaatcc

SEQ ID NO: 252447 - DNA, 25 bp, Probe sequence
gcgttttctgcagctatcaaggcca

SEQ ID NO: 252448 - DNA, 25 bp, Probe sequence
gcgggccttagtcaatcacgaaaca

SEQ ID NO: 252449 - DNA, 25 bp, Probe sequence
gaagccatcgatgaatccttaactg

SEQ ID NO: 252450 - DNA, 25 bp, Probe sequence
gaagcgagcgtctgtttaaaaccta

SEQ ID NO: 252451 - DNA, 25 bp, Probe sequence
gaaagccagccctctgaaaacagtg

SEQ ID NO: 252452 - DNA, 25 bp, Probe sequence
gaaattgatcggagcgcacattgtg

SEQ ID NO: 252453 - DNA, 25 bp, Probe sequence
gtcaaaacatcggtccttccgttgg

SEQ ID NO: 252454 - DNA, 25 bp, Probe sequence
gaggccatttttgaactcagcgatg

SEQ ID NO: 252455 - DNA, 25 bp, Probe sequence
gatcctgaaatttccgaagccatcg

SEQ ID NO: 252456 - DNA, 25 bp, Probe sequence
gatcttctgattattggttccggcg

SEQ ID NO: 252457 - DNA, 25 bp, Probe sequence
gtaccgtcaaaaaccatgcttcgtg

SEQ ID NO: 252458 - DNA, 25 bp, Probe sequence
gtcaaatgtttcacaacctcggaac

SEQ ID NO: 252459 - DNA, 25 bp, Probe sequence
gggacctgcgttaacatcggttgtg

SEQ ID NO: 252460 - DNA, 25 bp, Probe sequence
ggcagtgatcggttctggctatatc

SEQ ID NO: 252461 - DNA, 25 bp, Probe sequence
tcgtggcgaggcctcgtttatcgac

SEQ ID NO: 252462 - DNA, 25 bp, Probe sequence
tttaatcgcaacgggggcttctccg

SEQ ID NO: 252463 - DNA, 25 bp, Probe sequence
taacaagtacatccgcactcgaatt

SEQ ID NO: 252464 - DNA, 25 bp, Probe sequence
tatgcggcaacgttagcggttcaat

SEQ ID NO: 252465 - DNA, 25 bp, Probe sequence
tatttcggcagccggctatcaaccc

SEQ ID NO: 252466 - DNA, 25 bp, Probe sequence
acgcctccagagagcgtggatcgga

SEQ ID NO: 252467 - DNA, 25 bp, Probe sequence
attggccattgttatgattgctctg

SEQ ID NO: 252468 - DNA, 25 bp, Probe sequence
attgctgtacgcctccagagagcgt

SEQ ID NO: 252469 - DNA, 25 bp, Probe sequence
accgattctccttgttgcattaggg

SEQ ID NO: 252470 - DNA, 25 bp, Probe sequence
gctcgaaaggtaaccgctggggtgt

SEQ ID NO: 252471 - DNA, 25 bp, Probe sequence
ctttactttgttgcgcaggaccgat

SEQ ID NO: 252472 - DNA, 25 bp, Probe sequence
ccctctttgctggtgcgacaggaaa

SEQ ID NO: 252473 - DNA, 25 bp, Probe sequence
gccattgttatgattgctctgatcc

SEQ ID NO: 252474 - DNA, 25 bp, Probe sequence
gctctgatcctcagcaagttgttga

SEQ ID NO: 252475 - DNA, 25 bp, Probe sequence
gcgtggatcggaaacatgagacaag

SEQ ID NO: 252476 - DNA, 25 bp, Probe sequence
gctgtacgcctccagagagcgtgga

SEQ ID NO: 252477 - DNA, 25 bp, Probe sequence
gcatttttgcagcattggccattgt

SEQ ID NO: 252478 - DNA, 25 bp, Probe sequence
gcacaggtattggtgccctctttgc

SEQ ID NO: 252479 - DNA, 25 bp, Probe sequence
gaatattattggttcctttattggt

SEQ ID NO: 252480 - DNA, 25 bp, Probe sequence
gaatcgctcgaaaggtaaccgctgg

SEQ ID NO: 252481 - DNA, 25 bp, Probe sequence
gaacaaatacaattctcctgaaggc

SEQ ID NO: 252482 - DNA, 25 bp, Probe sequence
gaccggcatttttgcagcattggcc

SEQ ID NO: 252483 - DNA, 25 bp, Probe sequence
gagagcgtggatcggaaacatgaga

SEQ ID NO: 252484 - DNA, 25 bp, Probe sequence
gatggatgagaatcgctcgaaaggt

SEQ ID NO: 252485 - DNA, 25 bp, Probe sequence
gatcctcagcaagttgttgaagaac

SEQ ID NO: 252486 - DNA, 25 bp, Probe sequence
gattctccttgttgcattagggagc

SEQ ID NO: 252487 - DNA, 25 bp, Probe sequence
gattgctctgatcctcagcaagttg

SEQ ID NO: 252488 - DNA, 25 bp, Probe sequence
gtacgcctccagagagcgtggatcg

SEQ ID NO: 252489 - DNA, 25 bp, Probe sequence
gggagcacaggtattggtgccctct

SEQ ID NO: 252490 - DNA, 25 bp, Probe sequence
ggtgcgacaggaaattggtggttga

SEQ ID NO: 252491 - DNA, 25 bp, Probe sequence
ggttgaccggcatttttgcagcatt

SEQ ID NO: 252492 - DNA, 25 bp, Probe sequence
ggaaattggtggttgaccggcattt

SEQ ID NO: 252493 - DNA, 25 bp, Probe sequence
tggttcctttactttgttgcgcagg

SEQ ID NO: 252494 - DNA, 25 bp, Probe sequence
tggtggttgaccggcatttttgcag

SEQ ID NO: 252495 - DNA, 25 bp, Probe sequence
tgttatgattgctctgatcctcagc

SEQ ID NO: 252496 - DNA, 25 bp, Probe sequence
tccttgttgcattagggagcacagg

SEQ ID NO: 252497 - DNA, 25 bp, Probe sequence
tactttgttgcgcaggaccgattct

SEQ ID NO: 252498 - DNA, 25 bp, Probe sequence
tacaattctcctgaaggcaatggaa

SEQ ID NO: 252499 - DNA, 25 bp, Probe sequence
tttgcagcattggccattgttatga

SEQ ID NO: 252500 - DNA, 25 bp, Probe sequence
attggggttgggcatgctatttggg

SEQ ID NO: 252501 - DNA, 25 bp, Probe sequence
atagcctatgccgtgacatcacttg

SEQ ID NO: 252502 - DNA, 25 bp, Probe sequence
atgggaattgtggtgacagcgatca

SEQ ID NO: 252503 - DNA, 25 bp, Probe sequence
aggattagggcttggtggagcgatg

SEQ ID NO: 252504 - DNA, 25 bp, Probe sequence
agcgcactaacagggatttttccga

SEQ ID NO: 252505 - DNA, 25 bp, Probe sequence
agcgtaacggccgtgatcatcaagt

SEQ ID NO: 252506 - DNA, 25 bp, Probe sequence
agcctttatgttggtggtctctgca

SEQ ID NO: 252507 - DNA, 25 bp, Probe sequence
aaaggatcattcgttccgctatgca

SEQ ID NO: 252508 - DNA, 25 bp, Probe sequence
aatggtctatctatttttacggaat

SEQ ID NO: 252509 - DNA, 25 bp, Probe sequence
cattcgttccgctatgcaattttta

SEQ ID NO: 252510 - DNA, 25 bp, Probe sequence
cttccttcttatatctcctatttaa

SEQ ID NO: 252511 - DNA, 25 bp, Probe sequence
gctatttgggaagcatttgccgatt

SEQ ID NO: 252512 - DNA, 25 bp, Probe sequence
gaatggttgcggcctttaatccttg

SEQ ID NO: 252513 - DNA, 25 bp, Probe sequence
gacagcgatcacgatggtctcattg

SEQ ID NO: 252514 - DNA, 25 bp, Probe sequence
gacatcacttggttgtaccttgcca

SEQ ID NO: 252515 - DNA, 25 bp, Probe sequence
gatggtctcattgatttcacgacaa

SEQ ID NO: 252516 - DNA, 25 bp, Probe sequence
gatttttgtattggctggtttgttg

SEQ ID NO: 252517 - DNA, 25 bp, Probe sequence
gtttctgcacaactatatgggttct

SEQ ID NO: 252518 - DNA, 25 bp, Probe sequence
gtggtctctgcatcgctgaatgaca

SEQ ID NO: 252519 - DNA, 25 bp, Probe sequence
gggtatactcattgctttattgggg

SEQ ID NO: 252520 - DNA, 25 bp, Probe sequence
ggaggattgggaagcgcactaacag

SEQ ID NO: 252521 - DNA, 25 bp, Probe sequence
ggttctggtggcatttgtacatttt

SEQ ID NO: 252522 - DNA, 25 bp, Probe sequence
ggatcttttcaagtcaagccaggga

SEQ ID NO: 252523 - DNA, 25 bp, Probe sequence
tggagcgatgaccacggggttttta

SEQ ID NO: 252524 - DNA, 25 bp, Probe sequence
tgagtttttcgtttctcttcattct

SEQ ID NO: 252525 - DNA, 25 bp, Probe sequence
tcctctccggtttgtacatgactta

SEQ ID NO: 252526 - DNA, 25 bp, Probe sequence
tctcttcattctgaccgctggaatg

SEQ ID NO: 252527 - DNA, 25 bp, Probe sequence
tcatcaagttcatcatctactccct

SEQ ID NO: 252528 - DNA, 25 bp, Probe sequence
tcatcatctactcccttggtatggg

SEQ ID NO: 252529 - DNA, 25 bp, Probe sequence
tactggtatttcggttctggtggca

SEQ ID NO: 252530 - DNA, 25 bp, Probe sequence
taccttgccagcctttatgttggtg

SEQ ID NO: 252531 - DNA, 25 bp, Probe sequence
tagcagctgttgtgattttcctctc

SEQ ID NO: 252532 - DNA, 25 bp, Probe sequence
tttaatccttgtggtatcgccttgc

SEQ ID NO: 252533 - DNA, 25 bp, Probe sequence
ttttccgattctttcattggttatg

SEQ ID NO: 252534 - DNA, 25 bp, Probe sequence
tggcggggattggccccatgtttta

SEQ ID NO: 252535 - DNA, 25 bp, Probe sequence
atttatcacagttagtttagaccct

SEQ ID NO: 252536 - DNA, 25 bp, Probe sequence
atcaaaggttcaagacattcaagga

SEQ ID NO: 252537 - DNA, 25 bp, Probe sequence
aacagcttgtggagcagaatctgat

SEQ ID NO: 252538 - DNA, 25 bp, Probe sequence
aacccacactcatttattttatggc

SEQ ID NO: 252539 - DNA, 25 bp, Probe sequence
aaggaaatccagtcagcctacctaa

SEQ ID NO: 252540 - DNA, 25 bp, Probe sequence
aatccagtcagcctacctaatgaga

SEQ ID NO: 252541 - DNA, 25 bp, Probe sequence
cactcatttattttatggcaacctg

SEQ ID NO: 252542 - DNA, 25 bp, Probe sequence
ctggtgtccatcttgtatatacaat

SEQ ID NO: 252543 - DNA, 25 bp, Probe sequence
gcctacctaatgagaaacccacact

SEQ ID NO: 252544 - DNA, 25 bp, Probe sequence
gcatttccttcaccgctataatgac

SEQ ID NO: 252545 - DNA, 25 bp, Probe sequence
gcagaatctgataccgcgaatgaat

SEQ ID NO: 252546 - DNA, 25 bp, Probe sequence
gcaacctggtgtccatcttgtatat

SEQ ID NO: 252547 - DNA, 25 bp, Probe sequence
gaacgatgttcaatttatcacagtt

SEQ ID NO: 252548 - DNA, 25 bp, Probe sequence
gaaagctttgcgaaatttaaacagg

SEQ ID NO: 252549 - DNA, 25 bp, Probe sequence
gaaattcatcaactaaacccgaacg

SEQ ID NO: 252550 - DNA, 25 bp, Probe sequence
gacattcaaggaaatccagtcagcc

SEQ ID NO: 252551 - DNA, 25 bp, Probe sequence
gagaaacccacactcatttatttta

SEQ ID NO: 252552 - DNA, 25 bp, Probe sequence
gaggaaatctttaaggaaattcatc

SEQ ID NO: 252553 - DNA, 25 bp, Probe sequence
gataccgcgaatgaatcaaaggttc

SEQ ID NO: 252554 - DNA, 25 bp, Probe sequence
gattatggcggggattggccccatg

SEQ ID NO: 252555 - DNA, 25 bp, Probe sequence
gattggccccatgttttaaagatag

SEQ ID NO: 252556 - DNA, 25 bp, Probe sequence
gtttagaccctaacacagatacaaa

SEQ ID NO: 252557 - DNA, 25 bp, Probe sequence
gtcagcctacctaatgagaaaccca

SEQ ID NO: 252558 - DNA, 25 bp, Probe sequence
ggagcagaatctgataccgcgaatg

SEQ ID NO: 252559 - DNA, 25 bp, Probe sequence
ggccccatgttttaaagataggagt

SEQ ID NO: 252560 - DNA, 25 bp, Probe sequence
tgaaaaaacgcatttccttcaccgc

SEQ ID NO: 252561 - DNA, 25 bp, Probe sequence
tcaactaaacccgaacgatgttcaa

SEQ ID NO: 252562 - DNA, 25 bp, Probe sequence
taatcggtttaacagcttgtggagc

SEQ ID NO: 252563 - DNA, 25 bp, Probe sequence
taaacaggattatggcggggattgg

SEQ ID NO: 252564 - DNA, 25 bp, Probe sequence
taatgacggtgttgttaatcggttt

SEQ ID NO: 252565 - DNA, 25 bp, Probe sequence
tagaccctaacacagatacaaaaga

SEQ ID NO: 252566 - DNA, 25 bp, Probe sequence
tatggcaacctggtgtccatcttgt

SEQ ID NO: 252567 - DNA, 25 bp, Probe sequence
tttccttcaccgctataatgacggt

SEQ ID NO: 252568 - DNA, 25 bp, Probe sequence
acagcagatcgggtacggtttatta

SEQ ID NO: 252569 - DNA, 25 bp, Probe sequence
aaatcagtgaattggctaaagcgtg

SEQ ID NO: 252570 - DNA, 25 bp, Probe sequence
aagaaatcgagcggaaagtgcagga

SEQ ID NO: 252571 - DNA, 25 bp, Probe sequence
aagatatgtacgcctttaccgttca

SEQ ID NO: 252572 - DNA, 25 bp, Probe sequence
aagtgtccagatgaaaaggcgatat

SEQ ID NO: 252573 - DNA, 25 bp, Probe sequence
aaggcgatatatacctgtcctatta

SEQ ID NO: 252574 - DNA, 25 bp, Probe sequence
aatccacctgttgtttggtgtggtt

SEQ ID NO: 252575 - DNA, 25 bp, Probe sequence
aatcagggtatcgaatatattcaga

SEQ ID NO: 252576 - DNA, 25 bp, Probe sequence
cgggcctcccagaaacgaatcaggg

SEQ ID NO: 252577 - DNA, 25 bp, Probe sequence
cctgttgtttggtgtggttgatcaa

SEQ ID NO: 252578 - DNA, 25 bp, Probe sequence
gctaaaggaaatccacctgttgttt

SEQ ID NO: 252579 - DNA, 25 bp, Probe sequence
gaatgaaggaattggatttctcgct

SEQ ID NO: 252580 - DNA, 25 bp, Probe sequence
gaatccaacggttattagaggaatt

SEQ ID NO: 252581 - DNA, 25 bp, Probe sequence
gaggaaacagcagatcgggtacggt

SEQ ID NO: 252582 - DNA, 25 bp, Probe sequence
gaaacgttaatgggagggcctgata

SEQ ID NO: 252583 - DNA, 25 bp, Probe sequence
gagcggaaagtgcaggatttgttac

SEQ ID NO: 252584 - DNA, 25 bp, Probe sequence
gatggggagagatgtaaagatatgt

SEQ ID NO: 252585 - DNA, 25 bp, Probe sequence
gatatgtacgcctttaccgttcaaa

SEQ ID NO: 252586 - DNA, 25 bp, Probe sequence
gatatatacctgtcctattattgaa

SEQ ID NO: 252587 - DNA, 25 bp, Probe sequence
gatttgttacgaatccaacggttat

SEQ ID NO: 252588 - DNA, 25 bp, Probe sequence
gttcggtattacgagcggaaaggat

SEQ ID NO: 252589 - DNA, 25 bp, Probe sequence
gttaatgggagggcctgataaataa

SEQ ID NO: 252590 - DNA, 25 bp, Probe sequence
gttacgaatccaacggttattagag

SEQ ID NO: 252591 - DNA, 25 bp, Probe sequence
ggtgtggttgatcaagatggggaga

SEQ ID NO: 252592 - DNA, 25 bp, Probe sequence
ggaaaggattgatagccgggcctcc

SEQ ID NO: 252593 - DNA, 25 bp, Probe sequence
ggaattggatttctcgctaaaggaa

SEQ ID NO: 252594 - DNA, 25 bp, Probe sequence
ggaaagtgcaggatttgttacgaat

SEQ ID NO: 252595 - DNA, 25 bp, Probe sequence
ggaaatccacctgttgtttggtgtg

SEQ ID NO: 252596 - DNA, 25 bp, Probe sequence
ggcctcccagaaacgaatcagggta

SEQ ID NO: 252597 - DNA, 25 bp, Probe sequence
ggcgatatatacctgtcctattatt

SEQ ID NO: 252598 - DNA, 25 bp, Probe sequence
tgtgaataaagaaaccgttcggtat

SEQ ID NO: 252599 - DNA, 25 bp, Probe sequence
tacctgtcctattattgaaacgtta

SEQ ID NO: 252600 - DNA, 25 bp, Probe sequence
ttctcgctaaaggaaatccacctgt

SEQ ID NO: 252601 - DNA, 25 bp, Probe sequence
ttggctaaagcgtgtgatgtgaata

SEQ ID NO: 252602 - DNA, 25 bp, Probe sequence
atttgcctatccaacggcagcttcg

SEQ ID NO: 252603 - DNA, 25 bp, Probe sequence
aggaaagtttcatgtgtacgctcga

SEQ ID NO: 252604 - DNA, 25 bp, Probe sequence
aacatctccgactggtttacgtata

SEQ ID NO: 252605 - DNA, 25 bp, Probe sequence
agccattcgctttggaatttcaacc

SEQ ID NO: 252606 - DNA, 25 bp, Probe sequence
acaggtacatcttcaacattccgtt

SEQ ID NO: 252607 - DNA, 25 bp, Probe sequence
acaggccgtttggaggcacgtgtgc

SEQ ID NO: 252608 - DNA, 25 bp, Probe sequence
aaatgaggactttgctgcgtttaaa

SEQ ID NO: 252609 - DNA, 25 bp, Probe sequence
aaaaggttctacatggtgctgccga

SEQ ID NO: 252610 - DNA, 25 bp, Probe sequence
aagccggctggaatgtagctatggt

SEQ ID NO: 252611 - DNA, 25 bp, Probe sequence
aagaatcgtctttgttggtggtggg

SEQ ID NO: 252612 - DNA, 25 bp, Probe sequence
aagttgtcggtgctcatttgattag

SEQ ID NO: 252613 - DNA, 25 bp, Probe sequence
gaacctttacagatgatgtcccgga

SEQ ID NO: 252614 - DNA, 25 bp, Probe sequence
ctcacacctgtagccagtgcagatt

SEQ ID NO: 252615 - DNA, 25 bp, Probe sequence
ccgtctgaagtctccatcaactgga

SEQ ID NO: 252616 - DNA, 25 bp, Probe sequence
ccatctgctgtatttaccgtaccta

SEQ ID NO: 252617 - DNA, 25 bp, Probe sequence
gcggggtcaatcacagcagcaaaat

SEQ ID NO: 252618 - DNA, 25 bp, Probe sequence
ttattcatggtgctggacgggtccc

SEQ ID NO: 252619 - DNA, 25 bp, Probe sequence
gcagcttcggacattgcacacatgt

SEQ ID NO: 252620 - DNA, 25 bp, Probe sequence
gaagttcatattatccatcgaggtc

SEQ ID NO: 252621 - DNA, 25 bp, Probe sequence
gaggggagtcatttcttgatcgcta

SEQ ID NO: 252622 - DNA, 25 bp, Probe sequence
gggtccctgccttagatatgaatct

SEQ ID NO: 252623 - DNA, 25 bp, Probe sequence
gattggtacaggttctgcggggtca

SEQ ID NO: 252624 - DNA, 25 bp, Probe sequence
gtaacccgaatgtctatgcagctgg

SEQ ID NO: 252625 - DNA, 25 bp, Probe sequence
gtgctgccgagcttattgattggaa

SEQ ID NO: 252626 - DNA, 25 bp, Probe sequence
gtgcagattctcatgtcgtagcatc

SEQ ID NO: 252627 - DNA, 25 bp, Probe sequence
gtgtgcactacgtggatgtgaccca

SEQ ID NO: 252628 - DNA, 25 bp, Probe sequence
ggcaatgcatctttcgtgagtgagg

SEQ ID NO: 252629 - DNA, 25 bp, Probe sequence
tggtggtgggtatatttcgtttgaa

SEQ ID NO: 252630 - DNA, 25 bp, Probe sequence
tgaatatcccgtgattccatctgct

SEQ ID NO: 252631 - DNA, 25 bp, Probe sequence
tgaatttgctcatatcgcggcacgt

SEQ ID NO: 252632 - DNA, 25 bp, Probe sequence
tgctgcagcaacggatggcttgccc

SEQ ID NO: 252633 - DNA, 25 bp, Probe sequence
tcgctagtggtgcgaaacctacccc

SEQ ID NO: 252634 - DNA, 25 bp, Probe sequence
taaccactttgcaacagccattcgc

SEQ ID NO: 252635 - DNA, 25 bp, Probe sequence
tatcgcggcacgtgctggatcagaa

SEQ ID NO: 252636 - DNA, 25 bp, Probe sequence
attcgacgactcatcgttacgatca

SEQ ID NO: 252637 - DNA, 25 bp, Probe sequence
atcattcatatctttcatacgtttt

SEQ ID NO: 252638 - DNA, 25 bp, Probe sequence
atcgttacgatcattcctttacctt

SEQ ID NO: 252639 - DNA, 25 bp, Probe sequence
atggtatgcatggaaggtacatcaa

SEQ ID NO: 252640 - DNA, 25 bp, Probe sequence
agatgagccagtcatcaccacttta

SEQ ID NO: 252641 - DNA, 25 bp, Probe sequence
acccctttatcatcatcatctgaat

SEQ ID NO: 252642 - DNA, 25 bp, Probe sequence
acgatcattcctttacctttcatcg

SEQ ID NO: 252643 - DNA, 25 bp, Probe sequence
aaatcctgtgagccacatatctcga

SEQ ID NO: 252644 - DNA, 25 bp, Probe sequence
aacagcaattcgacgactcatcgtt

SEQ ID NO: 252645 - DNA, 25 bp, Probe sequence
aatgacccctttatcatcatcatct

SEQ ID NO: 252646 - DNA, 25 bp, Probe sequence
aatcaacagcaattcgacgactcat

SEQ ID NO: 252647 - DNA, 25 bp, Probe sequence
aatcacgagttgtaattcatcattc

SEQ ID NO: 252648 - DNA, 25 bp, Probe sequence
aattcatcattcatatctttcatac

SEQ ID NO: 252649 - DNA, 25 bp, Probe sequence
cacatatctcgaacaatcacgagtt

SEQ ID NO: 252650 - DNA, 25 bp, Probe sequence
gttgggtcactagatgagccagtca

SEQ ID NO: 252651 - DNA, 25 bp, Probe sequence
catcatcatctgaatgccattctgg

SEQ ID NO: 252652 - DNA, 25 bp, Probe sequence
cctgtgagccacatatctcgaacaa

SEQ ID NO: 252653 - DNA, 25 bp, Probe sequence
ccactttaatgacccctttatcatc

SEQ ID NO: 252654 - DNA, 25 bp, Probe sequence
gcaattcgacgactcatcgttacga

SEQ ID NO: 252655 - DNA, 25 bp, Probe sequence
gaatgccattctggttttagacgaa

SEQ ID NO: 252656 - DNA, 25 bp, Probe sequence
gacgactcatcgttacgatcattcc

SEQ ID NO: 252657 - DNA, 25 bp, Probe sequence
gagccacatatctcgaacaatcacg

SEQ ID NO: 252658 - DNA, 25 bp, Probe sequence
gagttgtaattcatcattcatatct

SEQ ID NO: 252659 - DNA, 25 bp, Probe sequence
gtctttggaaagaagttgggtcact

SEQ ID NO: 252660 - DNA, 25 bp, Probe sequence
ggtacatcaaatcctgtgagccaca

SEQ ID NO: 252661 - DNA, 25 bp, Probe sequence
tctggttttagacgaatgatttcat

SEQ ID NO: 252662 - DNA, 25 bp, Probe sequence
tctttcatacgtttttctaataaat

SEQ ID NO: 252663 - DNA, 25 bp, Probe sequence
tcatatctttcatacgtttttctaa

SEQ ID NO: 252664 - DNA, 25 bp, Probe sequence
tcatcaccactttaatgaccccttt

SEQ ID NO: 252665 - DNA, 25 bp, Probe sequence
tcaccactttaatgacccctttatc

SEQ ID NO: 252666 - DNA, 25 bp, Probe sequence
tacgacgttttttaggaccaatatg

SEQ ID NO: 252667 - DNA, 25 bp, Probe sequence
tatcatcatcatctgaatgccattc

SEQ ID NO: 252668 - DNA, 25 bp, Probe sequence
tttcatcgtataaatcaacagcaat

SEQ ID NO: 252669 - DNA, 25 bp, Probe sequence
ttaggaccaatatgtctttggaaag

SEQ ID NO: 252670 - DNA, 25 bp, Probe sequence
atttcctaacatttcagagaaacgc

SEQ ID NO: 252671 - DNA, 25 bp, Probe sequence
atactgtcgcgttcgttttcattaa

SEQ ID NO: 252672 - DNA, 25 bp, Probe sequence
atcgatttaataattctaccgcaac

SEQ ID NO: 252673 - DNA, 25 bp, Probe sequence
atgagttcttcaatcacttttgatg

SEQ ID NO: 252674 - DNA, 25 bp, Probe sequence
agatactgtcgcgttcgttttcatt

SEQ ID NO: 252675 - DNA, 25 bp, Probe sequence
actgtcgcgttcgttttcattaatg

SEQ ID NO: 252676 - DNA, 25 bp, Probe sequence
aatcgaatttcctaacatttcagag

SEQ ID NO: 252677 - DNA, 25 bp, Probe sequence
aatcgggttgttcaagacctagtgt

SEQ ID NO: 252678 - DNA, 25 bp, Probe sequence
caatccttcgacatcttttaggaag

SEQ ID NO: 252679 - DNA, 25 bp, Probe sequence
cagagaaacgcttagatactgtcgc

SEQ ID NO: 252680 - DNA, 25 bp, Probe sequence
cattaatgattttacttgccctttg

SEQ ID NO: 252681 - DNA, 25 bp, Probe sequence
cttgccctttgagtaatcgatttaa

SEQ ID NO: 252682 - DNA, 25 bp, Probe sequence
cttcaatcacttttgatgtttcaat

SEQ ID NO: 252683 - DNA, 25 bp, Probe sequence
gcttagatactgtcgcgttcgtttt

SEQ ID NO: 252684 - DNA, 25 bp, Probe sequence
gcaacatttttttgtttcaatcctt

SEQ ID NO: 252685 - DNA, 25 bp, Probe sequence
gaacggctattatatttattaatcg

SEQ ID NO: 252686 - DNA, 25 bp, Probe sequence
gacatcttttaggaagtcatctgat

SEQ ID NO: 252687 - DNA, 25 bp, Probe sequence
gatgtttcaatagaacggctattat

SEQ ID NO: 252688 - DNA, 25 bp, Probe sequence
gataaatcgggttgttcaagaccta

SEQ ID NO: 252689 - DNA, 25 bp, Probe sequence
gattttacttgccctttgagtaatc

SEQ ID NO: 252690 - DNA, 25 bp, Probe sequence
gttcttcaatcacttttgatgtttc

SEQ ID NO: 252691 - DNA, 25 bp, Probe sequence
gtttcaatccttcgacatcttttag

SEQ ID NO: 252692 - DNA, 25 bp, Probe sequence
gtcgcgttcgttttcattaatgatt

SEQ ID NO: 252693 - DNA, 25 bp, Probe sequence
gggttgttcaagacctagtgtttgg

SEQ ID NO: 252694 - DNA, 25 bp, Probe sequence
ggaagtcatctgataggattgataa

SEQ ID NO: 252695 - DNA, 25 bp, Probe sequence
tctaccgcaacatttttttgtttca

SEQ ID NO: 252696 - DNA, 25 bp, Probe sequence
taatgattttacttgccctttgagt

SEQ ID NO: 252697 - DNA, 25 bp, Probe sequence
taattctaccgcaacatttttttgt

SEQ ID NO: 252698 - DNA, 25 bp, Probe sequence
taataattctaccgcaacatttttt

SEQ ID NO: 252699 - DNA, 25 bp, Probe sequence
ttagatactgtcgcgttcgttttca

SEQ ID NO: 252700 - DNA, 25 bp, Probe sequence
tattaatcgaatttcctaacatttc

SEQ ID NO: 252701 - DNA, 25 bp, Probe sequence
tttgtttcaatccttcgacatcttt

SEQ ID NO: 252702 - DNA, 25 bp, Probe sequence
ttttttgtttcaatccttcgacatc

SEQ ID NO: 252703 - DNA, 25 bp, Probe sequence
ttgttcaagacctagtgtttggtaa

SEQ ID NO: 252704 - DNA, 25 bp, Probe sequence
gagtttccacctatacgaacaggaa

SEQ ID NO: 252705 - DNA, 25 bp, Probe sequence
atattgatgatagaagcgatgaaga

SEQ ID NO: 252706 - DNA, 25 bp, Probe sequence
ataaaggtccatacgatgctttcag

SEQ ID NO: 252707 - DNA, 25 bp, Probe sequence
atcctatgaaagctgctgtcactat

SEQ ID NO: 252708 - DNA, 25 bp, Probe sequence
atgaaagctgctgtcactattgata

SEQ ID NO: 252709 - DNA, 25 bp, Probe sequence
atgactatcgtatagatactactag

SEQ ID NO: 252710 - DNA, 25 bp, Probe sequence
aggttatcctatgaaagctgctgtc

SEQ ID NO: 252711 - DNA, 25 bp, Probe sequence
agaactgataataatgtgtacgcta

SEQ ID NO: 252712 - DNA, 25 bp, Probe sequence
agctgctgtcactattgataagcga

SEQ ID NO: 252713 - DNA, 25 bp, Probe sequence
aaaagatgagtttccacctatacga

SEQ ID NO: 252714 - DNA, 25 bp, Probe sequence
aagcgaacaggagaatttattgatt

SEQ ID NO: 252715 - DNA, 25 bp, Probe sequence
aagatgagtttccacctatacgaac

SEQ ID NO: 252716 - DNA, 25 bp, Probe sequence
aagagcgtcatgtccaacatgctaa

SEQ ID NO: 252717 - DNA, 25 bp, Probe sequence
aagtaaaagatgagtttccacctat

SEQ ID NO: 252718 - DNA, 25 bp, Probe sequence
aaggtccatacgatgctttcagaaa

SEQ ID NO: 252719 - DNA, 25 bp, Probe sequence
caagatgcagaaggttatcctatga

SEQ ID NO: 252720 - DNA, 25 bp, Probe sequence
gaaggttatcctatgaaagctgctg

SEQ ID NO: 252721 - DNA, 25 bp, Probe sequence
gaagataaagagcgtcatgtccaac

SEQ ID NO: 252722 - DNA, 25 bp, Probe sequence
gaacaggaaatgactatcgtataga

SEQ ID NO: 252723 - DNA, 25 bp, Probe sequence
gaaagtactctttataaaggtccat

SEQ ID NO: 252724 - DNA, 25 bp, Probe sequence
gaaagctgctgtcactattgataag

SEQ ID NO: 252725 - DNA, 25 bp, Probe sequence
gagcgtcatgtccaacatgctaaag

SEQ ID NO: 252726 - DNA, 25 bp, Probe sequence
gatgagtttccacctatacgaacag

SEQ ID NO: 252727 - DNA, 25 bp, Probe sequence
gatgctttcagaaaagattttagtc

SEQ ID NO: 252728 - DNA, 25 bp, Probe sequence
gataaagagcgtcatgtccaacatg

SEQ ID NO: 252729 - DNA, 25 bp, Probe sequence
gttatcctatgaaagctgctgtcac

SEQ ID NO: 252730 - DNA, 25 bp, Probe sequence
gtcactattgataagcgaacaggag

SEQ ID NO: 252731 - DNA, 25 bp, Probe sequence
gtccaacatgctaaagaaagtactc

SEQ ID NO: 252732 - DNA, 25 bp, Probe sequence
gtgtacgctatcaaatttacttctc

SEQ ID NO: 252733 - DNA, 25 bp, Probe sequence
ggtccatacgatgctttcagaaaag

SEQ ID NO: 252734 - DNA, 25 bp, Probe sequence
tgctgtcactattgataagcgaaca

SEQ ID NO: 252735 - DNA, 25 bp, Probe sequence
tcgtatagatactactagaactgat

SEQ ID NO: 252736 - DNA, 25 bp, Probe sequence
tcaaatttacttctcaagatgcaga

SEQ ID NO: 252737 - DNA, 25 bp, Probe sequence
tacgctatcaaatttacttctcaag

SEQ ID NO: 252738 - DNA, 25 bp, Probe sequence
ctcgtggcgaagttcctgaacctgg

SEQ ID NO: 252739 - DNA, 25 bp, Probe sequence
atggcaataacctaggagttcaaga

SEQ ID NO: 252740 - DNA, 25 bp, Probe sequence
aggtaaactacagccatcttcagat

SEQ ID NO: 252741 - DNA, 25 bp, Probe sequence
aaaagctgctcgtggcgaagttcct

SEQ ID NO: 252742 - DNA, 25 bp, Probe sequence
agttcctgaacctggagaaacaata

SEQ ID NO: 252743 - DNA, 25 bp, Probe sequence
agttgcaatattgggagttgctgtt

SEQ ID NO: 252744 - DNA, 25 bp, Probe sequence
agaatggttgaagagtggactaaga

SEQ ID NO: 252745 - DNA, 25 bp, Probe sequence
actacagccatcttcagatagaatg

SEQ ID NO: 252746 - DNA, 25 bp, Probe sequence
acagcaccaaatgaaaaagcacaat

SEQ ID NO: 252747 - DNA, 25 bp, Probe sequence
aaatgtacaaaaaagctgctcgtgg

SEQ ID NO: 252748 - DNA, 25 bp, Probe sequence
aaaaatgatcctaatagtgtgctta

SEQ ID NO: 252749 - DNA, 25 bp, Probe sequence
aacaccagaagctcaaaaattagtt

SEQ ID NO: 252750 - DNA, 25 bp, Probe sequence
aacggagatggacttatcttcacta

SEQ ID NO: 252751 - DNA, 25 bp, Probe sequence
aagcacaatatggcaataacctagg

SEQ ID NO: 252752 - DNA, 25 bp, Probe sequence
aatcaaacaattacagcaccaaatg

SEQ ID NO: 252753 - DNA, 25 bp, Probe sequence
aatacatatgactatgatgaatcat

SEQ ID NO: 252754 - DNA, 25 bp, Probe sequence
aatagtgtgcttagatttgatacaa

SEQ ID NO: 252755 - DNA, 25 bp, Probe sequence
cagccatcttcagatagaatggttg

SEQ ID NO: 252756 - DNA, 25 bp, Probe sequence
ctagtgaagtaacaccagaagctca

SEQ ID NO: 252757 - DNA, 25 bp, Probe sequence
gcgaagttcctgaacctggagaaac

SEQ ID NO: 252758 - DNA, 25 bp, Probe sequence
gctgttgtatttgcatatgggagtt

SEQ ID NO: 252759 - DNA, 25 bp, Probe sequence
gcaagcttaggtgttattttattag

SEQ ID NO: 252760 - DNA, 25 bp, Probe sequence
gaagtaacaccagaagctcaaaaat

SEQ ID NO: 252761 - DNA, 25 bp, Probe sequence
gaaaatttttgcaagcttaggtgtt

SEQ ID NO: 252762 - DNA, 25 bp, Probe sequence
gatggacttatcttcactagtgaag

SEQ ID NO: 252763 - DNA, 25 bp, Probe sequence
gatttgatacaaacggagatggact

SEQ ID NO: 252764 - DNA, 25 bp, Probe sequence
gttgatgaaggtaaactacagccat

SEQ ID NO: 252765 - DNA, 25 bp, Probe sequence
gtggcgaagttcctgaacctggaga

SEQ ID NO: 252766 - DNA, 25 bp, Probe sequence
gggagttgctgttgtatttgcatat

SEQ ID NO: 252767 - DNA, 25 bp, Probe sequence
ggagatggacttatcttcactagtg

SEQ ID NO: 252768 - DNA, 25 bp, Probe sequence
tgcatatgggagttacaaagattta

SEQ ID NO: 252769 - DNA, 25 bp, Probe sequence
taaactacagccatcttcagataga

SEQ ID NO: 252770 - DNA, 25 bp, Probe sequence
tattgggagttgctgttgtatttgc

SEQ ID NO: 252771 - DNA, 25 bp, Probe sequence
ttaggtgttattttattagttgcaa

SEQ ID NO: 252772 - DNA, 25 bp, Probe sequence
atcgaatagccatgagcgcgaacta

SEQ ID NO: 252773 - DNA, 25 bp, Probe sequence
atgaattaggagaaccgatagaaat

SEQ ID NO: 252774 - DNA, 25 bp, Probe sequence
atggctaattgctttgacttcaggt

SEQ ID NO: 252775 - DNA, 25 bp, Probe sequence
agataatgcgcagataacaacgtat

SEQ ID NO: 252776 - DNA, 25 bp, Probe sequence
acttgtaatcaaaggaccattagga

SEQ ID NO: 252777 - DNA, 25 bp, Probe sequence
aatagggaaagttgcgttaggatgg

SEQ ID NO: 252778 - DNA, 25 bp, Probe sequence
aaacacctaatatcattggtctaac

SEQ ID NO: 252779 - DNA, 25 bp, Probe sequence
aacaacgtatcattttaagagtcat

SEQ ID NO: 252780 - DNA, 25 bp, Probe sequence
aatgcgcagataacaacgtatcatt

SEQ ID NO: 252781 - DNA, 25 bp, Probe sequence
aatacttacctcagttgcaagacgt

SEQ ID NO: 252782 - DNA, 25 bp, Probe sequence
caggtggaagtatattagccattgg

SEQ ID NO: 252783 - DNA, 25 bp, Probe sequence
cattggtctaacagtgatatttgat

SEQ ID NO: 252784 - DNA, 25 bp, Probe sequence
cttacctcagttgcaagacgtacac

SEQ ID NO: 252785 - DNA, 25 bp, Probe sequence
cctaatatcattggtctaacagtga

SEQ ID NO: 252786 - DNA, 25 bp, Probe sequence
gccatgagcgcgaactattaaaagt

SEQ ID NO: 252787 - DNA, 25 bp, Probe sequence
gaatagccatgagcgcgaactatta

SEQ ID NO: 252788 - DNA, 25 bp, Probe sequence
gaaaaatcgaatagccatgagcgcg

SEQ ID NO: 252789 - DNA, 25 bp, Probe sequence
gagcgcgaactattaaaagtattta

SEQ ID NO: 252790 - DNA, 25 bp, Probe sequence
gttgcaagacgtacacttgtaatca

SEQ ID NO: 252791 - DNA, 25 bp, Probe sequence
gtatttggaatacttacctcagttg

SEQ ID NO: 252792 - DNA, 25 bp, Probe sequence
gtacacttgtaatcaaaggaccatt

SEQ ID NO: 252793 - DNA, 25 bp, Probe sequence
gggaaagttgcgttaggatggctaa

SEQ ID NO: 252794 - DNA, 25 bp, Probe sequence
ggatggctaattgctttgacttcag

SEQ ID NO: 252795 - DNA, 25 bp, Probe sequence
ggagagacaaaaacacctaatatca

SEQ ID NO: 252796 - DNA, 25 bp, Probe sequence
ggaatacttacctcagttgcaagac

SEQ ID NO: 252797 - DNA, 25 bp, Probe sequence
ggaagtatattagccattggagcag

SEQ ID NO: 252798 - DNA, 25 bp, Probe sequence
ggaatttgcatattatgaagcgaaa

SEQ ID NO: 252799 - DNA, 25 bp, Probe sequence
ggctaattgctttgacttcaggtgg

SEQ ID NO: 252800 - DNA, 25 bp, Probe sequence
tgaactaaaaacacttgctttaaat

SEQ ID NO: 252801 - DNA, 25 bp, Probe sequence
taattgctttgacttcaggtggaag

SEQ ID NO: 252802 - DNA, 25 bp, Probe sequence
tacctcagttgcaagacgtacactt

SEQ ID NO: 252803 - DNA, 25 bp, Probe sequence
tacttacctcagttgcaagacgtac

SEQ ID NO: 252804 - DNA, 25 bp, Probe sequence
tagccattggagcagtatttggaat

SEQ ID NO: 252805 - DNA, 25 bp, Probe sequence
tttggaatacttacctcagttgcaa

SEQ ID NO: 252806 - DNA, 25 bp, Probe sequence
attgcggctaaatccttattacaag

SEQ ID NO: 252807 - DNA, 25 bp, Probe sequence
atattgcggctaaatccttattaca

SEQ ID NO: 252808 - DNA, 25 bp, Probe sequence
aggtgtcggtgcagcagcatattat

SEQ ID NO: 252809 - DNA, 25 bp, Probe sequence
agatgatggggattatgatacttat

SEQ ID NO: 252810 - DNA, 25 bp, Probe sequence
acttatattgcggctaaatccttat

SEQ ID NO: 252811 - DNA, 25 bp, Probe sequence
acaggcgatagaggtttgatgagag

SEQ ID NO: 252812 - DNA, 25 bp, Probe sequence
aaaggtgtcggtgcagcagcatatt

SEQ ID NO: 252813 - DNA, 25 bp, Probe sequence
ccatcggtgcgatttgggaaacaac

SEQ ID NO: 252814 - DNA, 25 bp, Probe sequence
gcgatttgggaaacaacaggcgata

SEQ ID NO: 252815 - DNA, 25 bp, Probe sequence
gcggctaaatccttattacaagaga

SEQ ID NO: 252816 - DNA, 25 bp, Probe sequence
gctgccatcggtgcgatttgggaaa

SEQ ID NO: 252817 - DNA, 25 bp, Probe sequence
gctaaatccttattacaagagagag

SEQ ID NO: 252818 - DNA, 25 bp, Probe sequence
gctttaagtgatagctctaaccaag

SEQ ID NO: 252819 - DNA, 25 bp, Probe sequence
gcagcatattattcagttgcgactg

SEQ ID NO: 252820 - DNA, 25 bp, Probe sequence
gcagcagcatattattcagttgcga

SEQ ID NO: 252821 - DNA, 25 bp, Probe sequence
gcaaaggtattggaaaaggtgtcgg

SEQ ID NO: 252822 - DNA, 25 bp, Probe sequence
gacgctttaagtgatagctctaacc

SEQ ID NO: 252823 - DNA, 25 bp, Probe sequence
gagagaggattcacttataatcatg

SEQ ID NO: 252824 - DNA, 25 bp, Probe sequence
gagtaacatcataaaaacaataggc

SEQ ID NO: 252825 - DNA, 25 bp, Probe sequence
gaggtttgatgagagacgctttaag

SEQ ID NO: 252826 - DNA, 25 bp, Probe sequence
gatacttatattgcggctaaatcct

SEQ ID NO: 252827 - DNA, 25 bp, Probe sequence
gatagctctaaccaagacttaatag

SEQ ID NO: 252828 - DNA, 25 bp, Probe sequence
gatagaggtttgatgagagacgctt

SEQ ID NO: 252829 - DNA, 25 bp, Probe sequence
gtttgatgagagacgctttaagtga

SEQ ID NO: 252830 - DNA, 25 bp, Probe sequence
gtcggtgcagcagcatattattcag

SEQ ID NO: 252831 - DNA, 25 bp, Probe sequence
gtgctgccatcggtgcgatttggga

SEQ ID NO: 252832 - DNA, 25 bp, Probe sequence
gtgatagctctaaccaagacttaat

SEQ ID NO: 252833 - DNA, 25 bp, Probe sequence
gtgtcggtgcagcagcatattattc

SEQ ID NO: 252834 - DNA, 25 bp, Probe sequence
ggtgcgatttgggaaacaacaggcg

SEQ ID NO: 252835 - DNA, 25 bp, Probe sequence
ggtgcagcagcatattattcagttg

SEQ ID NO: 252836 - DNA, 25 bp, Probe sequence
ggattatgatacttatattgcggct

SEQ ID NO: 252837 - DNA, 25 bp, Probe sequence
ggattcacttataatcatgaaacga

SEQ ID NO: 252838 - DNA, 25 bp, Probe sequence
ggaatgggaattatgagtaacatca

SEQ ID NO: 252839 - DNA, 25 bp, Probe sequence
tcagttgcgactgttggtgctgcca

SEQ ID NO: 252840 - DNA, 25 bp, Probe sequence
attacctttatcgatgtactatcaa

SEQ ID NO: 252841 - DNA, 25 bp, Probe sequence
atatcgacgatataagaaacttctt

SEQ ID NO: 252842 - DNA, 25 bp, Probe sequence
agcaatcactcacattagaactcga

SEQ ID NO: 252843 - DNA, 25 bp, Probe sequence
agcgcacctaaagaaattacgtacg

SEQ ID NO: 252844 - DNA, 25 bp, Probe sequence
acatcattcaaattatcgaactaca

SEQ ID NO: 252845 - DNA, 25 bp, Probe sequence
acaacaccaaaattaagccattact

SEQ ID NO: 252846 - DNA, 25 bp, Probe sequence
aaatcaatatcttcaatacaatcaa

SEQ ID NO: 252847 - DNA, 25 bp, Probe sequence
aaatgaatctgagtttgtctgaaaa

SEQ ID NO: 252848 - DNA, 25 bp, Probe sequence
aaacaggtatttcgacatcatcatt

SEQ ID NO: 252849 - DNA, 25 bp, Probe sequence
aactctgttttatgtatcgatccaa

SEQ ID NO: 252850 - DNA, 25 bp, Probe sequence
aagccattacttttatcaatatctt

SEQ ID NO: 252851 - DNA, 25 bp, Probe sequence
aagtcctcggacgatacaaagagat

SEQ ID NO: 252852 - DNA, 25 bp, Probe sequence
aatccgtcaacaagcaatcactcac

SEQ ID NO: 252853 - DNA, 25 bp, Probe sequence
aatatcttgagcgttttgaaattga

SEQ ID NO: 252854 - DNA, 25 bp, Probe sequence
caaaatctattattacctttatcga

SEQ ID NO: 252855 - DNA, 25 bp, Probe sequence
cgcattatcttatcgtcacttttaa

SEQ ID NO: 252856 - DNA, 25 bp, Probe sequence
ccaatatacgtatcatttcaccccc

SEQ ID NO: 252857 - DNA, 25 bp, Probe sequence
gcatgcttttcacttggtatatcga

SEQ ID NO: 252858 - DNA, 25 bp, Probe sequence
gaagcgattcaactctgttttatgt

SEQ ID NO: 252859 - DNA, 25 bp, Probe sequence
gaactcgatacaagtcctcggacga

SEQ ID NO: 252860 - DNA, 25 bp, Probe sequence
gacatcatcattagttgttcaagca

SEQ ID NO: 252861 - DNA, 25 bp, Probe sequence
gactgctttatacctaacaacacca

SEQ ID NO: 252862 - DNA, 25 bp, Probe sequence
gatatacaatcgtttactacaaaat

SEQ ID NO: 252863 - DNA, 25 bp, Probe sequence
gtactatcaaatgcatgcttttcac

SEQ ID NO: 252864 - DNA, 25 bp, Probe sequence
gtaaatcatggataagcgcacctaa

SEQ ID NO: 252865 - DNA, 25 bp, Probe sequence
gtctgaaaaatctgtggacacacat

SEQ ID NO: 252866 - DNA, 25 bp, Probe sequence
gtgtggtcaaaaatgcatcgatatt

SEQ ID NO: 252867 - DNA, 25 bp, Probe sequence
ggtacaaacctatatcacgtttgaa

SEQ ID NO: 252868 - DNA, 25 bp, Probe sequence
ggatcgtgcatttcgaatacttacg

SEQ ID NO: 252869 - DNA, 25 bp, Probe sequence
tgatgcgcattatcttatcgtcact

SEQ ID NO: 252870 - DNA, 25 bp, Probe sequence
tcaccccctgatttgaaggaacaag

SEQ ID NO: 252871 - DNA, 25 bp, Probe sequence
tatgtatgatattttgactgcttta

SEQ ID NO: 252872 - DNA, 25 bp, Probe sequence
tatcatttcaccccctgatttgaag

SEQ ID NO: 252873 - DNA, 25 bp, Probe sequence
ttattaatcgtcaaacatcattcaa

SEQ ID NO: 252874 - DNA, 25 bp, Probe sequence
attgccaataacttacctatcatct

SEQ ID NO: 252875 - DNA, 25 bp, Probe sequence
attacgtcatgttactaccggaaga

SEQ ID NO: 252876 - DNA, 25 bp, Probe sequence
atagattactttcatatcttccagt

SEQ ID NO: 252877 - DNA, 25 bp, Probe sequence
atagtagcacaacgtgaaaacgaac

SEQ ID NO: 252878 - DNA, 25 bp, Probe sequence
atcaaacacaaacaagaacgtcctg

SEQ ID NO: 252879 - DNA, 25 bp, Probe sequence
atcttacaacaacaattatggaaaa

SEQ ID NO: 252880 - DNA, 25 bp, Probe sequence
atcttccagttcaacatgcataatg

SEQ ID NO: 252881 - DNA, 25 bp, Probe sequence
agaagcaatagattactttcatatc

SEQ ID NO: 252882 - DNA, 25 bp, Probe sequence
acgaacagtccaaggaactagaagc

SEQ ID NO: 252883 - DNA, 25 bp, Probe sequence
acgtcctgagtacatcaaaacacat

SEQ ID NO: 252884 - DNA, 25 bp, Probe sequence
acagtccaaggaactagaagcaata

SEQ ID NO: 252885 - DNA, 25 bp, Probe sequence
aacaagaacgtcctgagtacatcaa

SEQ ID NO: 252886 - DNA, 25 bp, Probe sequence
aacacaaacaagaacgtcctgagta

SEQ ID NO: 252887 - DNA, 25 bp, Probe sequence
aacttacctatcatcttacaacaac

SEQ ID NO: 252888 - DNA, 25 bp, Probe sequence
aataacttacctatcatcttacaac

SEQ ID NO: 252889 - DNA, 25 bp, Probe sequence
caaacaagaacgtcctgagtacatc

SEQ ID NO: 252890 - DNA, 25 bp, Probe sequence
catatcttccagttcaacatgcata

SEQ ID NO: 252891 - DNA, 25 bp, Probe sequence
cttacctatcatcttacaacaacaa

SEQ ID NO: 252892 - DNA, 25 bp, Probe sequence
ctttcatatcttccagttcaacatg

SEQ ID NO: 252893 - DNA, 25 bp, Probe sequence
cctatcatcttacaacaacaattat

SEQ ID NO: 252894 - DNA, 25 bp, Probe sequence
gccaataacttacctatcatcttac

SEQ ID NO: 252895 - DNA, 25 bp, Probe sequence
gaatagatatattactcaaggtatt

SEQ ID NO: 252896 - DNA, 25 bp, Probe sequence
gaacgtcctgagtacatcaaaacac

SEQ ID NO: 252897 - DNA, 25 bp, Probe sequence
gagtacatcaaaacacataaagcta

SEQ ID NO: 252898 - DNA, 25 bp, Probe sequence
gttcaacatgcataatgatcaatta

SEQ ID NO: 252899 - DNA, 25 bp, Probe sequence
gtattgccaataacttacctatcat

SEQ ID NO: 252900 - DNA, 25 bp, Probe sequence
gtgaaaacgaacagtccaaggaact

SEQ ID NO: 252901 - DNA, 25 bp, Probe sequence
taaataaggtctatattatccgaga

SEQ ID NO: 252902 - DNA, 25 bp, Probe sequence
tacgtcatgttactaccggaagaat

SEQ ID NO: 252903 - DNA, 25 bp, Probe sequence
tactttcatatcttccagttcaaca

SEQ ID NO: 252904 - DNA, 25 bp, Probe sequence
tacctatcatcttacaacaacaatt

SEQ ID NO: 252905 - DNA, 25 bp, Probe sequence
ttattacgtcatgttactaccggaa

SEQ ID NO: 252906 - DNA, 25 bp, Probe sequence
ttcatatcttccagttcaacatgca

SEQ ID NO: 252907 - DNA, 25 bp, Probe sequence
ttccagttcaacatgcataatgatc

SEQ ID NO: 252908 - DNA, 25 bp, Probe sequence
atcagaaacaactcatagccatcgg

SEQ ID NO: 252909 - DNA, 25 bp, Probe sequence
atgccccttttggatcaacgatact

SEQ ID NO: 252910 - DNA, 25 bp, Probe sequence
actcaaacactatataactaactta

SEQ ID NO: 252911 - DNA, 25 bp, Probe sequence
acacgtaagacttggtccacttagt

SEQ ID NO: 252912 - DNA, 25 bp, Probe sequence
acaacaactcaaacactatataact

SEQ ID NO: 252913 - DNA, 25 bp, Probe sequence
aaaccacgataaggatttcttgtat

SEQ ID NO: 252914 - DNA, 25 bp, Probe sequence
aaaatacttcagactaatacctact

SEQ ID NO: 252915 - DNA, 25 bp, Probe sequence
aactcatagccatcggttatattga

SEQ ID NO: 252916 - DNA, 25 bp, Probe sequence
aagtaatatctatcccttcatcctc

SEQ ID NO: 252917 - DNA, 25 bp, Probe sequence
gccccttttggatcaacgatactta

SEQ ID NO: 252918 - DNA, 25 bp, Probe sequence
gccgctgatgatattctacctgaac

SEQ ID NO: 252919 - DNA, 25 bp, Probe sequence
gaagccgctgatgatattctacctg

SEQ ID NO: 252920 - DNA, 25 bp, Probe sequence
gaacaacacgtaagacttggtccac

SEQ ID NO: 252921 - DNA, 25 bp, Probe sequence
gaaacaactcatagccatcggttat

SEQ ID NO: 252922 - DNA, 25 bp, Probe sequence
gacttggtccacttagtaataaaat

SEQ ID NO: 252923 - DNA, 25 bp, Probe sequence
gacattagaacaacaactcaaacac

SEQ ID NO: 252924 - DNA, 25 bp, Probe sequence
gactaatacctactactcatacaca

SEQ ID NO: 252925 - DNA, 25 bp, Probe sequence
gatgatattctacctgaacaacacg

SEQ ID NO: 252926 - DNA, 25 bp, Probe sequence
gatacttactaacaggaggacaata

SEQ ID NO: 252927 - DNA, 25 bp, Probe sequence
gatattctacctgaacaacacgtaa

SEQ ID NO: 252928 - DNA, 25 bp, Probe sequence
gtatctacacaacactatcatgccc

SEQ ID NO: 252929 - DNA, 25 bp, Probe sequence
gtaagacttggtccacttagtaata

SEQ ID NO: 252930 - DNA, 25 bp, Probe sequence
gtgaatccatcgaagaagccgctga

SEQ ID NO: 252931 - DNA, 25 bp, Probe sequence
gggaatgtgaatccatcgaagaagc

SEQ ID NO: 252932 - DNA, 25 bp, Probe sequence
ggatcaacgatacttactaacagga

SEQ ID NO: 252933 - DNA, 25 bp, Probe sequence
ggatttcttgtatctacacaacact

SEQ ID NO: 252934 - DNA, 25 bp, Probe sequence
tcccttcatcctctactatcagaaa

SEQ ID NO: 252935 - DNA, 25 bp, Probe sequence
tcatgccccttttggatcaacgata

SEQ ID NO: 252936 - DNA, 25 bp, Probe sequence
taatacctactactcatacacactt

SEQ ID NO: 252937 - DNA, 25 bp, Probe sequence
tacttcagactaatacctactactc

SEQ ID NO: 252938 - DNA, 25 bp, Probe sequence
tactactcatacacacttcacaaaa

SEQ ID NO: 252939 - DNA, 25 bp, Probe sequence
tactcatacacacttcacaaaagta

SEQ ID NO: 252940 - DNA, 25 bp, Probe sequence
ttcagactaatacctactactcata

SEQ ID NO: 252941 - DNA, 25 bp, Probe sequence
ttcatcctctactatcagaaacaac

SEQ ID NO: 252942 - DNA, 25 bp, Probe sequence
atttttaaatgacactcatcaagtc

SEQ ID NO: 252943 - DNA, 25 bp, Probe sequence
atacttttacctattacaatgatga

SEQ ID NO: 252944 - DNA, 25 bp, Probe sequence
atcagcatttacccttttttatgtt

SEQ ID NO: 252945 - DNA, 25 bp, Probe sequence
agaattagtagcaataggttattta

SEQ ID NO: 252946 - DNA, 25 bp, Probe sequence
cttgggctcgtgaaaccgtagatgc

SEQ ID NO: 252947 - DNA, 25 bp, Probe sequence
aacttgggctcgtgaaaccgtagat

SEQ ID NO: 252948 - DNA, 25 bp, Probe sequence
aagtcattattgatgaacgctactt

SEQ ID NO: 252949 - DNA, 25 bp, Probe sequence
caagaaacttgggctcgtgaaaccg

SEQ ID NO: 252950 - DNA, 25 bp, Probe sequence
ccgtagatgcggtggctgaagatgt

SEQ ID NO: 252951 - DNA, 25 bp, Probe sequence
gcggtggctgaagatgtattacctg

SEQ ID NO: 252952 - DNA, 25 bp, Probe sequence
gaaacttgggctcgtgaaaccgtag

SEQ ID NO: 252953 - DNA, 25 bp, Probe sequence
gaaatcagcatttacccttttttat

SEQ ID NO: 252954 - DNA, 25 bp, Probe sequence
gactttatatttttaaatgacactc

SEQ ID NO: 252955 - DNA, 25 bp, Probe sequence
gacgctaagcaaacaacttaaaacg

SEQ ID NO: 252956 - DNA, 25 bp, Probe sequence
gatgcggtggctgaagatgtattac

SEQ ID NO: 252957 - DNA, 25 bp, Probe sequence
gtatattactgaacgatttaaatta

SEQ ID NO: 252958 - DNA, 25 bp, Probe sequence
gtgaaaccgtagatgcggtggctga

SEQ ID NO: 252959 - DNA, 25 bp, Probe sequence
gtggctgaagatgtattacctgaaa

SEQ ID NO: 252960 - DNA, 25 bp, Probe sequence
tgggctcgtgaaaccgtagatgcgg

SEQ ID NO: 252961 - DNA, 25 bp, Probe sequence
ggaggtcattataatgacgctaagc

SEQ ID NO: 252962 - DNA, 25 bp, Probe sequence
ggagtacacattattaattaaggag

SEQ ID NO: 252963 - DNA, 25 bp, Probe sequence
ggctcgtgaaaccgtagatgcggtg

SEQ ID NO: 252964 - DNA, 25 bp, Probe sequence
tgaacgctacttgttacaaaaaggg

SEQ ID NO: 252965 - DNA, 25 bp, Probe sequence
tgacactcatcaagtcattattgat

SEQ ID NO: 252966 - DNA, 25 bp, Probe sequence
tcagcatttacccttttttatgtta

SEQ ID NO: 252967 - DNA, 25 bp, Probe sequence
taattttgatttagactttatattt

SEQ ID NO: 252968 - DNA, 25 bp, Probe sequence
taatgacgctaagcaaacaacttaa

SEQ ID NO: 252969 - DNA, 25 bp, Probe sequence
taaaacgtatattactgaacgattt

SEQ ID NO: 252970 - DNA, 25 bp, Probe sequence
tacatgaaatcagcatttacccttt

SEQ ID NO: 252971 - DNA, 25 bp, Probe sequence
tacccttttttatgttatctagata

SEQ ID NO: 252972 - DNA, 25 bp, Probe sequence
tattaaaaatagtccacttgaaaat

SEQ ID NO: 252973 - DNA, 25 bp, Probe sequence
ttattgatgaacgctacttgttaca

SEQ ID NO: 252974 - DNA, 25 bp, Probe sequence
ttacctattacaatgatgaattaca

SEQ ID NO: 252975 - DNA, 25 bp, Probe sequence
ttaaatacttttacctattacaatg

SEQ ID NO: 252976 - DNA, 25 bp, Probe sequence
atcaatttgttttaacaccgattat

SEQ ID NO: 252977 - DNA, 25 bp, Probe sequence
atgagtatgatccgcaattagaaaa

SEQ ID NO: 252978 - DNA, 25 bp, Probe sequence
agatatcagatatactattagaact

SEQ ID NO: 252979 - DNA, 25 bp, Probe sequence
agagtttacttttgacgctgagaaa

SEQ ID NO: 252980 - DNA, 25 bp, Probe sequence
aaatacatcttaaattcaattacag

SEQ ID NO: 252981 - DNA, 25 bp, Probe sequence
aaatggttggaagaacgcacatatg

SEQ ID NO: 252982 - DNA, 25 bp, Probe sequence
aaacaatataagcataccggctata

SEQ ID NO: 252983 - DNA, 25 bp, Probe sequence
aacgacaaccacaaatggcgaatat

SEQ ID NO: 252984 - DNA, 25 bp, Probe sequence
aagcataccggctatatgaagatta

SEQ ID NO: 252985 - DNA, 25 bp, Probe sequence
aaggacgtaagattgagtggttaga

SEQ ID NO: 252986 - DNA, 25 bp, Probe sequence
aattgctacttctcctgacttaaaa

SEQ ID NO: 252987 - DNA, 25 bp, Probe sequence
cacaccttaaatctacctattcaaa

SEQ ID NO: 252988 - DNA, 25 bp, Probe sequence
caccgattatcaaggagctttctcc

SEQ ID NO: 252989 - DNA, 25 bp, Probe sequence
cttctcctgacttaaaatacatctt

SEQ ID NO: 252990 - DNA, 25 bp, Probe sequence
ccaacacaaaatgagtatgatccgc

SEQ ID NO: 252991 - DNA, 25 bp, Probe sequence
gctacttctcctgacttaaaataca

SEQ ID NO: 252992 - DNA, 25 bp, Probe sequence
gctttctccaatatttagtaatctt

SEQ ID NO: 252993 - DNA, 25 bp, Probe sequence
gcatttttaaaacaacttcaagttg

SEQ ID NO: 252994 - DNA, 25 bp, Probe sequence
gcattcacaataaacgacaaccaca

SEQ ID NO: 252995 - DNA, 25 bp, Probe sequence
gaatgtctaatattaatcaatttgt

SEQ ID NO: 252996 - DNA, 25 bp, Probe sequence
gaagactttagagaacgactagata

SEQ ID NO: 252997 - DNA, 25 bp, Probe sequence
gaacgcacatatgaaaaaccaacac

SEQ ID NO: 252998 - DNA, 25 bp, Probe sequence
gaacgactagatattccagaatcct

SEQ ID NO: 252999 - DNA, 25 bp, Probe sequence
gacacaccttaaatctacctattca

SEQ ID NO: 253000 - DNA, 25 bp, Probe sequence
gagaaacgcattcacaataaacgac

SEQ ID NO: 253001 - DNA, 25 bp, Probe sequence
gagatgacacaccttaaatctacct

SEQ ID NO: 253002 - DNA, 25 bp, Probe sequence
gtggttagagtttacttttgacgct

SEQ ID NO: 253003 - DNA, 25 bp, Probe sequence
ggtaagtcacgacaatacataagtc

SEQ ID NO: 253004 - DNA, 25 bp, Probe sequence
ggagctttctccaatatttagtaat

SEQ ID NO: 253005 - DNA, 25 bp, Probe sequence
ggcgaatataggtaagtcacgacaa

SEQ ID NO: 253006 - DNA, 25 bp, Probe sequence
taaaaaattcgtcttattctataag

SEQ ID NO: 253007 - DNA, 25 bp, Probe sequence
tacataagtcgtgaaaaaacgccaa

SEQ ID NO: 253008 - DNA, 25 bp, Probe sequence
tagaaattgctacttctcctgactt

SEQ ID NO: 253009 - DNA, 25 bp, Probe sequence
ttccagaatcctatagaatgtctaa

SEQ ID NO: 253010 - DNA, 25 bp, Probe sequence
atattattctaattgctggccaaaa

SEQ ID NO: 253011 - DNA, 25 bp, Probe sequence
aggttatttaagtggctgggggcat

SEQ ID NO: 253012 - DNA, 25 bp, Probe sequence
atatgatatgcgctttaaaacttta

SEQ ID NO: 253013 - DNA, 25 bp, Probe sequence
ataacaccacaactatttttgtaca

SEQ ID NO: 253014 - DNA, 25 bp, Probe sequence
atgcacactctcaattacacaataa

SEQ ID NO: 253015 - DNA, 25 bp, Probe sequence
agagattacaacttcacgcaaactt

SEQ ID NO: 253016 - DNA, 25 bp, Probe sequence
agacctttcaacaatgatagatacc

SEQ ID NO: 253017 - DNA, 25 bp, Probe sequence
aaagtatgaatataattgcccctat

SEQ ID NO: 253018 - DNA, 25 bp, Probe sequence
aacattttcttgatgatcctacttt

SEQ ID NO: 253019 - DNA, 25 bp, Probe sequence
aagttctgcttatgtagtagctaat

SEQ ID NO: 253020 - DNA, 25 bp, Probe sequence
aaggcaagcctttaataacagcaaa

SEQ ID NO: 253021 - DNA, 25 bp, Probe sequence
aattattacggtttagacactagcg

SEQ ID NO: 253022 - DNA, 25 bp, Probe sequence
caacttcacgcaaacttataaccga

SEQ ID NO: 253023 - DNA, 25 bp, Probe sequence
gcctaaaagatacattacgccaatt

SEQ ID NO: 253024 - DNA, 25 bp, Probe sequence
gctggccaaaatccagaggctacag

SEQ ID NO: 253025 - DNA, 25 bp, Probe sequence
gaatttgaaaactctaacgactata

SEQ ID NO: 253026 - DNA, 25 bp, Probe sequence
gaaaacccgtaattactggatatag

SEQ ID NO: 253027 - DNA, 25 bp, Probe sequence
gacactagcgattattctttaggtt

SEQ ID NO: 253028 - DNA, 25 bp, Probe sequence
gatcctactttatctaatggcgcta

SEQ ID NO: 253029 - DNA, 25 bp, Probe sequence
gagcgcataatgtgtttgatgtggc

SEQ ID NO: 253030 - DNA, 25 bp, Probe sequence
gaggctacagctgtagctggttata

SEQ ID NO: 253031 - DNA, 25 bp, Probe sequence
gatgtggcagatacgaaaggcaagc

SEQ ID NO: 253032 - DNA, 25 bp, Probe sequence
gatactacagcgaaatttcacaact

SEQ ID NO: 253033 - DNA, 25 bp, Probe sequence
gtacgtgataataacggtaatccta

SEQ ID NO: 253034 - DNA, 25 bp, Probe sequence
gtaatctctgatgatttgtcatatg

SEQ ID NO: 253035 - DNA, 25 bp, Probe sequence
gtggctgggggcataatataagtga

SEQ ID NO: 253036 - DNA, 25 bp, Probe sequence
ggtaaaacgcaaatatctgaacata

SEQ ID NO: 253037 - DNA, 25 bp, Probe sequence
ggcgctaaaggttattatagtccta

SEQ ID NO: 253038 - DNA, 25 bp, Probe sequence
ggccaacgatcaaatatgactgcta

SEQ ID NO: 253039 - DNA, 25 bp, Probe sequence
tcgaggctgaaagttctgcttatgt

SEQ ID NO: 253040 - DNA, 25 bp, Probe sequence
taattgcccctattgtacaaaaacg

SEQ ID NO: 253041 - DNA, 25 bp, Probe sequence
taaattcattgccagagttttctca

SEQ ID NO: 253042 - DNA, 25 bp, Probe sequence
tacatgaatatgcacactctcaatt

SEQ ID NO: 253043 - DNA, 25 bp, Probe sequence
tatacattcgttcgcaaaaactaca

SEQ ID NO: 253044 - DNA, 25 bp, Probe sequence
atttggaagatggttcttcaataaa

SEQ ID NO: 253045 - DNA, 25 bp, Probe sequence
atagatcagcagacgcaaagaaaat

SEQ ID NO: 253046 - DNA, 25 bp, Probe sequence
atcagcagacgcaaagaaaattata

SEQ ID NO: 253047 - DNA, 25 bp, Probe sequence
atgaaaaatttggaagatggttctt

SEQ ID NO: 253048 - DNA, 25 bp, Probe sequence
atggctgatattcaaaaaatgttag

SEQ ID NO: 253049 - DNA, 25 bp, Probe sequence
agtaaatagatcagcagacgcaaag

SEQ ID NO: 253050 - DNA, 25 bp, Probe sequence
agatcagcagacgcaaagaaaatta

SEQ ID NO: 253051 - DNA, 25 bp, Probe sequence
agatggttcttcaataaatttaaag

SEQ ID NO: 253052 - DNA, 25 bp, Probe sequence
agcagacgcaaagaaaattataaat

SEQ ID NO: 253053 - DNA, 25 bp, Probe sequence
aaatttggaagatggttcttcaata

SEQ ID NO: 253054 - DNA, 25 bp, Probe sequence
aaatttgcttaatattgaagatact

SEQ ID NO: 253055 - DNA, 25 bp, Probe sequence
aaatagatcagcagacgcaaagaaa

SEQ ID NO: 253056 - DNA, 25 bp, Probe sequence
aaagtaaatagatcagcagacgcaa

SEQ ID NO: 253057 - DNA, 25 bp, Probe sequence
aaaatttggaagatggttcttcaat

SEQ ID NO: 253058 - DNA, 25 bp, Probe sequence
aagtaaatagatcagcagacgcaaa

SEQ ID NO: 253059 - DNA, 25 bp, Probe sequence
aatagatcagcagacgcaaagaaaa

SEQ ID NO: 253060 - DNA, 25 bp, Probe sequence
aatttggaagatggttcttcaataa

SEQ ID NO: 253061 - DNA, 25 bp, Probe sequence
cagcagacgcaaagaaaattataaa

SEQ ID NO: 253062 - DNA, 25 bp, Probe sequence
gcagacgcaaagaaaattataaata

SEQ ID NO: 253063 - DNA, 25 bp, Probe sequence
gaagatggttcttcaataaatttaa

SEQ ID NO: 253064 - DNA, 25 bp, Probe sequence
gaaaaatttggaagatggttcttca

SEQ ID NO: 253065 - DNA, 25 bp, Probe sequence
gaaataaatgaaataaaccacaata

SEQ ID NO: 253066 - DNA, 25 bp, Probe sequence
gatggttcttcaataaatttaaagt

SEQ ID NO: 253067 - DNA, 25 bp, Probe sequence
gatcagcagacgcaaagaaaattat

SEQ ID NO: 253068 - DNA, 25 bp, Probe sequence
gtaaatagatcagcagacgcaaaga

SEQ ID NO: 253069 - DNA, 25 bp, Probe sequence
ggaagatggttcttcaataaattta

SEQ ID NO: 253070 - DNA, 25 bp, Probe sequence
ggctgatattcaaaaaatgttagaa

SEQ ID NO: 253071 - DNA, 25 bp, Probe sequence
tcagcagacgcaaagaaaattataa

SEQ ID NO: 253072 - DNA, 25 bp, Probe sequence
taaagtaaatagatcagcagacgca

SEQ ID NO: 253073 - DNA, 25 bp, Probe sequence
taaatagatcagcagacgcaaagaa

SEQ ID NO: 253074 - DNA, 25 bp, Probe sequence
tagatcagcagacgcaaagaaaatt

SEQ ID NO: 253075 - DNA, 25 bp, Probe sequence
tttggaagatggttcttcaataaat

SEQ ID NO: 253076 - DNA, 25 bp, Probe sequence
ttgaagatactaaagaacacaattt

SEQ ID NO: 253077 - DNA, 25 bp, Probe sequence
ttggaagatggttcttcaataaatt

SEQ ID NO: 253078 - DNA, 25 bp, Probe sequence
atttatctcaatttttattcttcca

SEQ ID NO: 253079 - DNA, 25 bp, Probe sequence
atctcaatttttattcttccatgga

SEQ ID NO: 253080 - DNA, 25 bp, Probe sequence
atgctgttcatattaaccctatttt

SEQ ID NO: 253081 - DNA, 25 bp, Probe sequence
atgtgtgttcctatgacagttgctt

SEQ ID NO: 253082 - DNA, 25 bp, Probe sequence
agttgctttatgtacaatattcctt

SEQ ID NO: 253083 - DNA, 25 bp, Probe sequence
aaatgctgttcatattaaccctatt

SEQ ID NO: 253084 - DNA, 25 bp, Probe sequence
caatattccttaaatttatctcaat

SEQ ID NO: 253085 - DNA, 25 bp, Probe sequence
gcgaaaatgctgttcatattaaccc

SEQ ID NO: 253086 - DNA, 25 bp, Probe sequence
gctggcgaaaatgctgttcatatta

SEQ ID NO: 253087 - DNA, 25 bp, Probe sequence
gctgttcatattaaccctattttta

SEQ ID NO: 253088 - DNA, 25 bp, Probe sequence
gacagttgctttatgtacaatattc

SEQ ID NO: 253089 - DNA, 25 bp, Probe sequence
gattttattatcaacagctggcgaa

SEQ ID NO: 253090 - DNA, 25 bp, Probe sequence
gttcctatgacagttgctttatgta

SEQ ID NO: 253091 - DNA, 25 bp, Probe sequence
gttcatattaaccctatttttagat

SEQ ID NO: 253092 - DNA, 25 bp, Probe sequence
gtttgtatattggtattgctttagg

SEQ ID NO: 253093 - DNA, 25 bp, Probe sequence
gtatattggtattgctttaggtatt

SEQ ID NO: 253094 - DNA, 25 bp, Probe sequence
gtatgtttgtatattggtattgctt

SEQ ID NO: 253095 - DNA, 25 bp, Probe sequence
gtacaatattccttaaatttatctc

SEQ ID NO: 253096 - DNA, 25 bp, Probe sequence
gtgttcctatgacagttgctttatg

SEQ ID NO: 253097 - DNA, 25 bp, Probe sequence
gtgtgttcctatgacagttgcttta

SEQ ID NO: 253098 - DNA, 25 bp, Probe sequence
ggtattgctttaggtattattgtta

SEQ ID NO: 253099 - DNA, 25 bp, Probe sequence
tcctatgacagttgctttatgtaca

SEQ ID NO: 253100 - DNA, 25 bp, Probe sequence
ttcttttggttataacaattggtat

SEQ ID NO: 253101 - DNA, 25 bp, Probe sequence
tctcaatttttattcttccatggaa

SEQ ID NO: 253102 - DNA, 25 bp, Probe sequence
tctatattttattatgtgtgttcct

SEQ ID NO: 253103 - DNA, 25 bp, Probe sequence
tcatattaaccctatttttagattt

SEQ ID NO: 253104 - DNA, 25 bp, Probe sequence
tattatcaacagctggcgaaaatgc

SEQ ID NO: 253105 - DNA, 25 bp, Probe sequence
tattttattatgtgtgttcctatga

SEQ ID NO: 253106 - DNA, 25 bp, Probe sequence
ttattatgtgtgttcctatgacagt

SEQ ID NO: 253107 - DNA, 25 bp, Probe sequence
ttatgtgtgttcctatgacagttgc

SEQ ID NO: 253108 - DNA, 25 bp, Probe sequence
ttatctcaatttttattcttccatg

SEQ ID NO: 253109 - DNA, 25 bp, Probe sequence
ttcttccatggaaagtatgtttgta

SEQ ID NO: 253110 - DNA, 25 bp, Probe sequence
ttgctttaggtattattgttactat

SEQ ID NO: 253111 - DNA, 25 bp, Probe sequence
ttgctttatgtacaatattccttaa

SEQ ID NO: 253112 - DNA, 25 bp, Probe sequence
attgctactggtatgccaagtaatg

SEQ ID NO: 253113 - DNA, 25 bp, Probe sequence
attcagatgtgttcgagaaagcaga

SEQ ID NO: 253114 - DNA, 25 bp, Probe sequence
atactggtaaagatactgcctcaac

SEQ ID NO: 253115 - DNA, 25 bp, Probe sequence
aggcgttaagatagtagctcaacct

SEQ ID NO: 253116 - DNA, 25 bp, Probe sequence
agatactgcctcaacaaatgataga

SEQ ID NO: 253117 - DNA, 25 bp, Probe sequence
agaaggtgcctcaatcacaccacgt

SEQ ID NO: 253118 - DNA, 25 bp, Probe sequence
acctatgggaactttacttgatctt

SEQ ID NO: 253119 - DNA, 25 bp, Probe sequence
actggtggtggtgcaaacattcatt

SEQ ID NO: 253120 - DNA, 25 bp, Probe sequence
aacattcattttgattcattaagtc

SEQ ID NO: 253121 - DNA, 25 bp, Probe sequence
aacgaattgctagtcacgtatctaa

SEQ ID NO: 253122 - DNA, 25 bp, Probe sequence
aagtcattattattcagatgtgttc

SEQ ID NO: 253123 - DNA, 25 bp, Probe sequence
aaggcaagtacagtgttcttgactt

SEQ ID NO: 253124 - DNA, 25 bp, Probe sequence
aatggctttagattttggtaatgga

SEQ ID NO: 253125 - DNA, 25 bp, Probe sequence
aatttgtaatcccttcaagaatcgg

SEQ ID NO: 253126 - DNA, 25 bp, Probe sequence
cagtttagtaatgttcgtggatatg

SEQ ID NO: 253127 - DNA, 25 bp, Probe sequence
gaattattgttactggtggtggtgc

SEQ ID NO: 253128 - DNA, 25 bp, Probe sequence
gaagtaccagaagaagttgtcaacg

SEQ ID NO: 253129 - DNA, 25 bp, Probe sequence
gaaagcagatgatagccagtttagt

SEQ ID NO: 253130 - DNA, 25 bp, Probe sequence
gacggtatcgctaaaacaattaatg

SEQ ID NO: 253131 - DNA, 25 bp, Probe sequence
gagtaactttgaaatcactgtaggt

SEQ ID NO: 253132 - DNA, 25 bp, Probe sequence
gagtaacgtatatgtaatggcttta

SEQ ID NO: 253133 - DNA, 25 bp, Probe sequence
gatagccagtttagtaatgttcgtg

SEQ ID NO: 253134 - DNA, 25 bp, Probe sequence
gatttggttgaatgttctataggat

SEQ ID NO: 253135 - DNA, 25 bp, Probe sequence
gttgtcaacgttgtaattgctactg

SEQ ID NO: 253136 - DNA, 25 bp, Probe sequence
gttgtaattgctactggtatgccaa

SEQ ID NO: 253137 - DNA, 25 bp, Probe sequence
gtattcaaagcatttacagaaggca

SEQ ID NO: 253138 - DNA, 25 bp, Probe sequence
gtatcagaatttattatcaatggga

SEQ ID NO: 253139 - DNA, 25 bp, Probe sequence
gtagtggtactacaattattgatac

SEQ ID NO: 253140 - DNA, 25 bp, Probe sequence
gtagctcaacctatgggaactttac

SEQ ID NO: 253141 - DNA, 25 bp, Probe sequence
gtgttcttgactttggtagtggtac

SEQ ID NO: 253142 - DNA, 25 bp, Probe sequence
ggattattagcaagagaagtaccag

SEQ ID NO: 253143 - DNA, 25 bp, Probe sequence
ggaactttacttgatcttaatatgg

SEQ ID NO: 253144 - DNA, 25 bp, Probe sequence
tgcctcaatcacaccacgtatgatt

SEQ ID NO: 253145 - DNA, 25 bp, Probe sequence
ttaattgaaattgacggtatcgcta

SEQ ID NO: 253146 - DNA, 25 bp, Probe sequence
attgaggcgctatattgaagaaata

SEQ ID NO: 253147 - DNA, 25 bp, Probe sequence
attaaaacaagctgaaatgcctaaa

SEQ ID NO: 253148 - DNA, 25 bp, Probe sequence
ataagagaggcattgaggcgctata

SEQ ID NO: 253149 - DNA, 25 bp, Probe sequence
agattaccctcaaatcttcgatttt

SEQ ID NO: 253150 - DNA, 25 bp, Probe sequence
agatattagtattgatgacctttaa

SEQ ID NO: 253151 - DNA, 25 bp, Probe sequence
agagcatacagaacctattaaacgt

SEQ ID NO: 253152 - DNA, 25 bp, Probe sequence
agaacacacagcgcccttaaaagag

SEQ ID NO: 253153 - DNA, 25 bp, Probe sequence
acagcgcccttaaaagagcatacag

SEQ ID NO: 253154 - DNA, 25 bp, Probe sequence
acacacagcgcccttaaaagagcat

SEQ ID NO: 253155 - DNA, 25 bp, Probe sequence
acacagcgcccttaaaagagcatac

SEQ ID NO: 253156 - DNA, 25 bp, Probe sequence
aaagaacacacagcgcccttaaaag

SEQ ID NO: 253157 - DNA, 25 bp, Probe sequence
aacaagctgaaatgcctaaaataga

SEQ ID NO: 253158 - DNA, 25 bp, Probe sequence
aacagcccacataagagaggcattg

SEQ ID NO: 253159 - DNA, 25 bp, Probe sequence
aagacgcaatggaacgtaaggatca

SEQ ID NO: 253160 - DNA, 25 bp, Probe sequence
cgcccttaaaagagcatacagaacc

SEQ ID NO: 253161 - DNA, 25 bp, Probe sequence
gaggtactaaaacagcccacataag

SEQ ID NO: 253162 - DNA, 25 bp, Probe sequence
cccacataagagaggcattgaggcg

SEQ ID NO: 253163 - DNA, 25 bp, Probe sequence
cctccaataccttcaaaagaacaca

SEQ ID NO: 253164 - DNA, 25 bp, Probe sequence
ccttcaaaagaacacacagcgccct

SEQ ID NO: 253165 - DNA, 25 bp, Probe sequence
gcatacagaacctattaaacgtaat

SEQ ID NO: 253166 - DNA, 25 bp, Probe sequence
gcaatggaacgtaaggatcaattaa

SEQ ID NO: 253167 - DNA, 25 bp, Probe sequence
gaacacacagcgcccttaaaagagc

SEQ ID NO: 253168 - DNA, 25 bp, Probe sequence
gaaactaaacatcttctgaaaataa

SEQ ID NO: 253169 - DNA, 25 bp, Probe sequence
gaaagaaactaaacatcttctgaaa

SEQ ID NO: 253170 - DNA, 25 bp, Probe sequence
gagaggcattgaggcgctatattga

SEQ ID NO: 253171 - DNA, 25 bp, Probe sequence
gaggcattgaggcgctatattgaag

SEQ ID NO: 253172 - DNA, 25 bp, Probe sequence
gattaccctcaaatcttcgattttt

SEQ ID NO: 253173 - DNA, 25 bp, Probe sequence
gtagatattagtattgatgaccttt

SEQ ID NO: 253174 - DNA, 25 bp, Probe sequence
ggtactaaaacagcccacataagag

SEQ ID NO: 253175 - DNA, 25 bp, Probe sequence
ggcattgaggcgctatattgaagaa

SEQ ID NO: 253176 - DNA, 25 bp, Probe sequence
tcaaaagaacacacagcgcccttaa

SEQ ID NO: 253177 - DNA, 25 bp, Probe sequence
tactaaaacagcccacataagagag

SEQ ID NO: 253178 - DNA, 25 bp, Probe sequence
taccctcaaatcttcgattttttag

SEQ ID NO: 253179 - DNA, 25 bp, Probe sequence
tagaaaatgttcctagaggtactaa

SEQ ID NO: 253180 - DNA, 25 bp, Probe sequence
atatagaacttcaagaactccccga

SEQ ID NO: 253181 - DNA, 25 bp, Probe sequence
atatttcatttatacagttgctgat

SEQ ID NO: 253182 - DNA, 25 bp, Probe sequence
ataaagatttatcgaatgacgctaa

SEQ ID NO: 253183 - DNA, 25 bp, Probe sequence
ataacaaatacgatactttctatat

SEQ ID NO: 253184 - DNA, 25 bp, Probe sequence
atcattcaaatcacttttcaaatat

SEQ ID NO: 253185 - DNA, 25 bp, Probe sequence
atgagaagtatcattgctgaacttg

SEQ ID NO: 253186 - DNA, 25 bp, Probe sequence
atgacgctaaaattgcttacgcaat

SEQ ID NO: 253187 - DNA, 25 bp, Probe sequence
agttgaggccttacaagacaaggaa

SEQ ID NO: 253188 - DNA, 25 bp, Probe sequence
agaaggtaacatatatttcatttat

SEQ ID NO: 253189 - DNA, 25 bp, Probe sequence
aaaggacacacaaatgatactgatt

SEQ ID NO: 253190 - DNA, 25 bp, Probe sequence
aaaagtagctaatatggaaggttat

SEQ ID NO: 253191 - DNA, 25 bp, Probe sequence
aaaaccagccataactaaaaatgat

SEQ ID NO: 253192 - DNA, 25 bp, Probe sequence
aagtatcattgctgaacttgaagaa

SEQ ID NO: 253193 - DNA, 25 bp, Probe sequence
aatcaacattcaaatcattcaaatc

SEQ ID NO: 253194 - DNA, 25 bp, Probe sequence
aatacgatactttctatatgttaga

SEQ ID NO: 253195 - DNA, 25 bp, Probe sequence
cagaaatgtcaaaaggacacgtcta

SEQ ID NO: 253196 - DNA, 25 bp, Probe sequence
gaatgacgctaaaattgcttacgca

SEQ ID NO: 253197 - DNA, 25 bp, Probe sequence
gaagtgatattaaattgtgggaaca

SEQ ID NO: 253198 - DNA, 25 bp, Probe sequence
gaaaatgtagatttactaatccaaa

SEQ ID NO: 253199 - DNA, 25 bp, Probe sequence
gacacacaaatgatactgattttat

SEQ ID NO: 253200 - DNA, 25 bp, Probe sequence
gagagatcgtttacaattatctatt

SEQ ID NO: 253201 - DNA, 25 bp, Probe sequence
gaggccttacaagacaaggaagtgt

SEQ ID NO: 253202 - DNA, 25 bp, Probe sequence
gatgaagaattactattggttttaa

SEQ ID NO: 253203 - DNA, 25 bp, Probe sequence
gatacaaatcaacattcaaatcatt

SEQ ID NO: 253204 - DNA, 25 bp, Probe sequence
gatttactaatccaaaaaaggcagg

SEQ ID NO: 253205 - DNA, 25 bp, Probe sequence
ggaagtgtcaaaaggacacgtccag

SEQ ID NO: 253206 - DNA, 25 bp, Probe sequence
ggaaggttatttaatgagaagtatc

SEQ ID NO: 253207 - DNA, 25 bp, Probe sequence
ggctgaaaatgaagttgaggcctta

SEQ ID NO: 253208 - DNA, 25 bp, Probe sequence
tcaaatcacttttcaaatattcatg

SEQ ID NO: 253209 - DNA, 25 bp, Probe sequence
tagaacttcaagaactccccgaatt

SEQ ID NO: 253210 - DNA, 25 bp, Probe sequence
tacagttgctgatttagaagtgata

SEQ ID NO: 253211 - DNA, 25 bp, Probe sequence
ttttattgatactgattttattgat

SEQ ID NO: 253212 - DNA, 25 bp, Probe sequence
ttatattaataatttcagctatgaa

SEQ ID NO: 253213 - DNA, 25 bp, Probe sequence
ttgcttacgcaatattgagagatcg

SEQ ID NO: 253214 - DNA, 25 bp, Probe sequence
attgcgtactattagaaacactaat

SEQ ID NO: 253215 - DNA, 25 bp, Probe sequence
atcgacagtgaattgcgtactatta

SEQ ID NO: 253216 - DNA, 25 bp, Probe sequence
atgagaaataatttggttctgttgc

SEQ ID NO: 253217 - DNA, 25 bp, Probe sequence
atgttatcgacagtgaattgcgtac

SEQ ID NO: 253218 - DNA, 25 bp, Probe sequence
agtgaattgcgtactattagaaaca

SEQ ID NO: 253219 - DNA, 25 bp, Probe sequence
agatgttatcgacagtgaattgcgt

SEQ ID NO: 253220 - DNA, 25 bp, Probe sequence
acagtgaattgcgtactattagaaa

SEQ ID NO: 253221 - DNA, 25 bp, Probe sequence
aaagatgttatcgacagtgaattgc

SEQ ID NO: 253222 - DNA, 25 bp, Probe sequence
aaacactaatcatttagttatgaga

SEQ ID NO: 253223 - DNA, 25 bp, Probe sequence
aacactaatcatttagttatgagaa

SEQ ID NO: 253224 - DNA, 25 bp, Probe sequence
aagatgttatcgacagtgaattgcg

SEQ ID NO: 253225 - DNA, 25 bp, Probe sequence
aattgcgtactattagaaacactaa

SEQ ID NO: 253226 - DNA, 25 bp, Probe sequence
cagtgaattgcgtactattagaaac

SEQ ID NO: 253227 - DNA, 25 bp, Probe sequence
cgacagtgaattgcgtactattaga

SEQ ID NO: 253228 - DNA, 25 bp, Probe sequence
cgtactattagaaacactaatcatt

SEQ ID NO: 253229 - DNA, 25 bp, Probe sequence
gcgtactattagaaacactaatcat

SEQ ID NO: 253230 - DNA, 25 bp, Probe sequence
gaattgcgtactattagaaacacta

SEQ ID NO: 253231 - DNA, 25 bp, Probe sequence
gaaacactaatcatttagttatgag

SEQ ID NO: 253232 - DNA, 25 bp, Probe sequence
gacagtgaattgcgtactattagaa

SEQ ID NO: 253233 - DNA, 25 bp, Probe sequence
gagaaataatttggttctgttgcaa

SEQ ID NO: 253234 - DNA, 25 bp, Probe sequence
gatgttatcgacagtgaattgcgta

SEQ ID NO: 253235 - DNA, 25 bp, Probe sequence
gataatgtagtaaatacactagaag

SEQ ID NO: 253236 - DNA, 25 bp, Probe sequence
gttatcgacagtgaattgcgtacta

SEQ ID NO: 253237 - DNA, 25 bp, Probe sequence
gtactattagaaacactaatcattt

SEQ ID NO: 253238 - DNA, 25 bp, Probe sequence
gtgaattgcgtactattagaaacac

SEQ ID NO: 253239 - DNA, 25 bp, Probe sequence
tgttatcgacagtgaattgcgtact

SEQ ID NO: 253240 - DNA, 25 bp, Probe sequence
tgagaaataatttggttctgttgca

SEQ ID NO: 253241 - DNA, 25 bp, Probe sequence
tgaattgcgtactattagaaacact

SEQ ID NO: 253242 - DNA, 25 bp, Probe sequence
tgcgtactattagaaacactaatca

SEQ ID NO: 253243 - DNA, 25 bp, Probe sequence
tcgacagtgaattgcgtactattag

SEQ ID NO: 253244 - DNA, 25 bp, Probe sequence
tagaaacactaatcatttagttatg

SEQ ID NO: 253245 - DNA, 25 bp, Probe sequence
tatcgacagtgaattgcgtactatt

SEQ ID NO: 253246 - DNA, 25 bp, Probe sequence
ttatcgacagtgaattgcgtactat

SEQ ID NO: 253247 - DNA, 25 bp, Probe sequence
ttgcgtactattagaaacactaatc

SEQ ID NO: 253248 - DNA, 25 bp, Probe sequence
attctggactgtttaaagaggcaag

SEQ ID NO: 253249 - DNA, 25 bp, Probe sequence
atggctgaatttatggcgagatgtc

SEQ ID NO: 253250 - DNA, 25 bp, Probe sequence
atggcgagatgtcactggaattgat

SEQ ID NO: 253251 - DNA, 25 bp, Probe sequence
acattcttgagttttgtggcagata

SEQ ID NO: 253252 - DNA, 25 bp, Probe sequence
aaattcttgtttattctggactgtt

SEQ ID NO: 253253 - DNA, 25 bp, Probe sequence
aaaatcgattttgtcctgtatgtgc

SEQ ID NO: 253254 - DNA, 25 bp, Probe sequence
aagcgagaaaagatgcgttaggttt

SEQ ID NO: 253255 - DNA, 25 bp, Probe sequence
aagcttataatcactcttttcaaaa

SEQ ID NO: 253256 - DNA, 25 bp, Probe sequence
aagaacgtgatgactataacccgca

SEQ ID NO: 253257 - DNA, 25 bp, Probe sequence
cagaaatttattgaacgacatgtca

SEQ ID NO: 253258 - DNA, 25 bp, Probe sequence
gaagtagatccaacagaatatattt

SEQ ID NO: 253259 - DNA, 25 bp, Probe sequence
gaaatcacacaagtacatgctcaaa

SEQ ID NO: 253260 - DNA, 25 bp, Probe sequence
gacaccaaatgtaacagttgagcat

SEQ ID NO: 253261 - DNA, 25 bp, Probe sequence
gagtgcaacacattcttgagttttg

SEQ ID NO: 253262 - DNA, 25 bp, Probe sequence
gatgcgttaggtttatcattgatga

SEQ ID NO: 253263 - DNA, 25 bp, Probe sequence
gataagggagtgcaacacattcttg

SEQ ID NO: 253264 - DNA, 25 bp, Probe sequence
gatagcgactatttaattaatcaaa

SEQ ID NO: 253265 - DNA, 25 bp, Probe sequence
gattttgtcctgtatgtgcatggcg

SEQ ID NO: 253266 - DNA, 25 bp, Probe sequence
gtattctggtaaagatagcgactat

SEQ ID NO: 253267 - DNA, 25 bp, Probe sequence
gtattttacagacaaacgatattat

SEQ ID NO: 253268 - DNA, 25 bp, Probe sequence
gtatgtgcatggcgaaaagcgagaa

SEQ ID NO: 253269 - DNA, 25 bp, Probe sequence
gtacatgctcaaaaaatcaaacaga

SEQ ID NO: 253270 - DNA, 25 bp, Probe sequence
gtgatgactataacccgcattttca

SEQ ID NO: 253271 - DNA, 25 bp, Probe sequence
gtgttcgatacattttataaatctc

SEQ ID NO: 253272 - DNA, 25 bp, Probe sequence
ggtaatttctgctacgaaaggttat

SEQ ID NO: 253273 - DNA, 25 bp, Probe sequence
tgctgttaacaaatcgtattttaca

SEQ ID NO: 253274 - DNA, 25 bp, Probe sequence
tacttagcgagtgaaatttttgatt

SEQ ID NO: 253275 - DNA, 25 bp, Probe sequence
tacgaaatggcgaagtattctggta

SEQ ID NO: 253276 - DNA, 25 bp, Probe sequence
tatctttttaacacttacgacacca

SEQ ID NO: 253277 - DNA, 25 bp, Probe sequence
tatcaaattttttatcattggaacc

SEQ ID NO: 253278 - DNA, 25 bp, Probe sequence
tataacccgcattttcatgttttaa

SEQ ID NO: 253279 - DNA, 25 bp, Probe sequence
tttaacacttacgacaccaaatgta

SEQ ID NO: 253280 - DNA, 25 bp, Probe sequence
ttttcatgttttaattgctgttaac

SEQ ID NO: 253281 - DNA, 25 bp, Probe sequence
ttgtcctgtatgtgcatggcgaaaa

SEQ ID NO: 253282 - DNA, 25 bp, Probe sequence
atacaaccctagtacctttgatggt

SEQ ID NO: 253283 - DNA, 25 bp, Probe sequence
atgttataggtcaatatccagacaa

SEQ ID NO: 253284 - DNA, 25 bp, Probe sequence
atggttttcaatgttctggtggtaa

SEQ ID NO: 253285 - DNA, 25 bp, Probe sequence
acgacttattggtacaattcgattc

SEQ ID NO: 253286 - DNA, 25 bp, Probe sequence
aaagttttttcataagtcattcaca

SEQ ID NO: 253287 - DNA, 25 bp, Probe sequence
aacagcatgtatgtatggtggagta

SEQ ID NO: 253288 - DNA, 25 bp, Probe sequence
aagatcaatttttagattacacact

SEQ ID NO: 253289 - DNA, 25 bp, Probe sequence
aatcgtgtttcatacctcaaaagaa

SEQ ID NO: 253290 - DNA, 25 bp, Probe sequence
aatacctattaatttatggattgat

SEQ ID NO: 253291 - DNA, 25 bp, Probe sequence
aattcagaaaggactaatcgtgttt

SEQ ID NO: 253292 - DNA, 25 bp, Probe sequence
cagacatatatacttctttaacgaa

SEQ ID NO: 253293 - DNA, 25 bp, Probe sequence
cttcaggcaagatattatttacata

SEQ ID NO: 253294 - DNA, 25 bp, Probe sequence
cccctttagtttacagcgatagcaa

SEQ ID NO: 253295 - DNA, 25 bp, Probe sequence
gaaccgttggttagttatgatttat

SEQ ID NO: 253296 - DNA, 25 bp, Probe sequence
gaactgttgttccgctagatatagt

SEQ ID NO: 253297 - DNA, 25 bp, Probe sequence
gagtaacactgcatgaaaacaatca

SEQ ID NO: 253298 - DNA, 25 bp, Probe sequence
gatagcatcagaactgttgttccgc

SEQ ID NO: 253299 - DNA, 25 bp, Probe sequence
gttgttccgctagatatagttaaaa

SEQ ID NO: 253300 - DNA, 25 bp, Probe sequence
gtttcatacctcaaaagaaccgttg

SEQ ID NO: 253301 - DNA, 25 bp, Probe sequence
gtattactttaaataacctcagaca

SEQ ID NO: 253302 - DNA, 25 bp, Probe sequence
gtatggtggagtaacactgcatgaa

SEQ ID NO: 253303 - DNA, 25 bp, Probe sequence
gtaaccattcaagaactagatcttc

SEQ ID NO: 253304 - DNA, 25 bp, Probe sequence
gtcattcacagtataacgacttatt

SEQ ID NO: 253305 - DNA, 25 bp, Probe sequence
ggcaaacaagtagatctatacggat

SEQ ID NO: 253306 - DNA, 25 bp, Probe sequence
tccctgacgttaacactactaataa

SEQ ID NO: 253307 - DNA, 25 bp, Probe sequence
taataagtctacctttggttctgta

SEQ ID NO: 253308 - DNA, 25 bp, Probe sequence
taacgaaaagggtatctctgaaaag

SEQ ID NO: 253309 - DNA, 25 bp, Probe sequence
taacccctttagtttacagcgatag

SEQ ID NO: 253310 - DNA, 25 bp, Probe sequence
taacctcagacatatatacttcttt

SEQ ID NO: 253311 - DNA, 25 bp, Probe sequence
tagattacacactattatttaaaag

SEQ ID NO: 253312 - DNA, 25 bp, Probe sequence
tataatttatacaaccctagtacct

SEQ ID NO: 253313 - DNA, 25 bp, Probe sequence
tatacggatcttattatggttttca

SEQ ID NO: 253314 - DNA, 25 bp, Probe sequence
tatttatactgattttctccctgac

SEQ ID NO: 253315 - DNA, 25 bp, Probe sequence
ttctccctgacgttaacactactaa

SEQ ID NO: 253316 - DNA, 25 bp, Probe sequence
attaataacgttgcacaagctgctg

SEQ ID NO: 253317 - DNA, 25 bp, Probe sequence
atttcaacgaaagaattgatgctaa

SEQ ID NO: 253318 - DNA, 25 bp, Probe sequence
atagatattgaaagtttaactacta

SEQ ID NO: 253319 - DNA, 25 bp, Probe sequence
atacatggaagaatttaactaacaa

SEQ ID NO: 253320 - DNA, 25 bp, Probe sequence
ataacgttgcacaagctgctgaaac

SEQ ID NO: 253321 - DNA, 25 bp, Probe sequence
atgggaactctaatggagatttttc

SEQ ID NO: 253322 - DNA, 25 bp, Probe sequence
agacggacagttgtggaaaaatgta

SEQ ID NO: 253323 - DNA, 25 bp, Probe sequence
accattcatagtaaagaccaaaaag

SEQ ID NO: 253324 - DNA, 25 bp, Probe sequence
acgttgcacaagctgctgaaacaac

SEQ ID NO: 253325 - DNA, 25 bp, Probe sequence
aaaagatcctaaaatctctggaata

SEQ ID NO: 253326 - DNA, 25 bp, Probe sequence
aaaatctctggaatagttggacaag

SEQ ID NO: 253327 - DNA, 25 bp, Probe sequence
aaaatttcagcaaatgggaactcta

SEQ ID NO: 253328 - DNA, 25 bp, Probe sequence
aacagacggacagttgtggaaaaat

SEQ ID NO: 253329 - DNA, 25 bp, Probe sequence
aacgttgcacaagctgctgaaacaa

SEQ ID NO: 253330 - DNA, 25 bp, Probe sequence
aagtaaccattcatagtaaagacca

SEQ ID NO: 253331 - DNA, 25 bp, Probe sequence
caagctgctgaaacaacagacggac

SEQ ID NO: 253332 - DNA, 25 bp, Probe sequence
ctctaatggagatttttccaaacaa

SEQ ID NO: 253333 - DNA, 25 bp, Probe sequence
gctgctgaaacaacagacggacagt

SEQ ID NO: 253334 - DNA, 25 bp, Probe sequence
gcacaagctgctgaaacaacagacg

SEQ ID NO: 253335 - DNA, 25 bp, Probe sequence
gaaacaacagacggacagttgtgga

SEQ ID NO: 253336 - DNA, 25 bp, Probe sequence
gaaagaggctaatataattgatgga

SEQ ID NO: 253337 - DNA, 25 bp, Probe sequence
gaccaaaaagatcctaaaatctctg

SEQ ID NO: 253338 - DNA, 25 bp, Probe sequence
gagacgctttgaaagaggctaatat

SEQ ID NO: 253339 - DNA, 25 bp, Probe sequence
gatcctaaaatctctggaatagttg

SEQ ID NO: 253340 - DNA, 25 bp, Probe sequence
gattttactgagcataagaattata

SEQ ID NO: 253341 - DNA, 25 bp, Probe sequence
gttggacaagattttactgagcata

SEQ ID NO: 253342 - DNA, 25 bp, Probe sequence
gttgcacaagctgctgaaacaacag

SEQ ID NO: 253343 - DNA, 25 bp, Probe sequence
gtaagagacgctttgaaagaggcta

SEQ ID NO: 253344 - DNA, 25 bp, Probe sequence
gtaaccattcatagtaaagaccaaa

SEQ ID NO: 253345 - DNA, 25 bp, Probe sequence
ggtgataaagtaaccattcatagta

SEQ ID NO: 253346 - DNA, 25 bp, Probe sequence
ggacaagattttactgagcataaga

SEQ ID NO: 253347 - DNA, 25 bp, Probe sequence
ggaactctaatggagatttttccaa

SEQ ID NO: 253348 - DNA, 25 bp, Probe sequence
tcagcaaatgggaactctaatggag

SEQ ID NO: 253349 - DNA, 25 bp, Probe sequence
taataacgttgcacaagctgctgaa

SEQ ID NO: 253350 - DNA, 25 bp, Probe sequence
gccccaaaacggatacacaactcga

SEQ ID NO: 253351 - DNA, 25 bp, Probe sequence
agtgttaaatcattgttgctatcga

SEQ ID NO: 253352 - DNA, 25 bp, Probe sequence
agtgctaggcattcctgaacggaca

SEQ ID NO: 253353 - DNA, 25 bp, Probe sequence
agaagcgaacgtcaacgtgttcatt

SEQ ID NO: 253354 - DNA, 25 bp, Probe sequence
acaagccttatttagtgacgaccaa

SEQ ID NO: 253355 - DNA, 25 bp, Probe sequence
aaatcattgttgctatcgatcatta

SEQ ID NO: 253356 - DNA, 25 bp, Probe sequence
aaaagcgatgtatacaagccttatt

SEQ ID NO: 253357 - DNA, 25 bp, Probe sequence
aactcgatttgtttagctacgatac

SEQ ID NO: 253358 - DNA, 25 bp, Probe sequence
aacgtcaacgtgttcatttgtcaga

SEQ ID NO: 253359 - DNA, 25 bp, Probe sequence
aacgtgttcatttgtcagaatggaa

SEQ ID NO: 253360 - DNA, 25 bp, Probe sequence
aaggcgctgacaaattcttttgatt

SEQ ID NO: 253361 - DNA, 25 bp, Probe sequence
aattgctgaaggtactgaaggcgaa

SEQ ID NO: 253362 - DNA, 25 bp, Probe sequence
caagagactttaaacaagctagcag

SEQ ID NO: 253363 - DNA, 25 bp, Probe sequence
ctagcagaacgccccaaaacggata

SEQ ID NO: 253364 - DNA, 25 bp, Probe sequence
gctaggcattcctgaacggacatta

SEQ ID NO: 253365 - DNA, 25 bp, Probe sequence
gcattcaacttgctagtgttaaatc

SEQ ID NO: 253366 - DNA, 25 bp, Probe sequence
gcagaacgccccaaaacggatacac

SEQ ID NO: 253367 - DNA, 25 bp, Probe sequence
gaaggcgaatcaggaaattttcttt

SEQ ID NO: 253368 - DNA, 25 bp, Probe sequence
gaagatttaatggcttatattagcg

SEQ ID NO: 253369 - DNA, 25 bp, Probe sequence
gaacggacattagataaattgctga

SEQ ID NO: 253370 - DNA, 25 bp, Probe sequence
gaaagctatataaaggcgctgacaa

SEQ ID NO: 253371 - DNA, 25 bp, Probe sequence
gaaatggtggcattcaacttgctag

SEQ ID NO: 253372 - DNA, 25 bp, Probe sequence
gacaaattcttttgatttagagcat

SEQ ID NO: 253373 - DNA, 25 bp, Probe sequence
gagaagtgctaggcattcctgaacg

SEQ ID NO: 253374 - DNA, 25 bp, Probe sequence
gagcatacattcattcaagagactt

SEQ ID NO: 253375 - DNA, 25 bp, Probe sequence
gatacacaactcgatttgtttagct

SEQ ID NO: 253376 - DNA, 25 bp, Probe sequence
gatttatttgtccgtcaagggtggt

SEQ ID NO: 253377 - DNA, 25 bp, Probe sequence
gatttagagcatacattcattcaag

SEQ ID NO: 253378 - DNA, 25 bp, Probe sequence
gtgacgaccaaaaaagagattagag

SEQ ID NO: 253379 - DNA, 25 bp, Probe sequence
ggtggcattcaacttgctagtgtta

SEQ ID NO: 253380 - DNA, 25 bp, Probe sequence
ggcattcctgaacggacattagata

SEQ ID NO: 253381 - DNA, 25 bp, Probe sequence
tgttgctatcgatcattaaagtaaa

SEQ ID NO: 253382 - DNA, 25 bp, Probe sequence
taaacaagctagcagaacgccccaa

SEQ ID NO: 253383 - DNA, 25 bp, Probe sequence
tttgtttagctacgatacaggctga

SEQ ID NO: 253384 - DNA, 25 bp, Probe sequence
attggcgatcttcttggtagttggc

SEQ ID NO: 253385 - DNA, 25 bp, Probe sequence
attagtgggtggtttccattgtcaa

SEQ ID NO: 253386 - DNA, 25 bp, Probe sequence
attagtttcagctgctagcgtgatt

SEQ ID NO: 253387 - DNA, 25 bp, Probe sequence
atggtttatcagaagttgaactcat

SEQ ID NO: 253388 - DNA, 25 bp, Probe sequence
agttattggcgatcttcttggtagt

SEQ ID NO: 253389 - DNA, 25 bp, Probe sequence
agttggcgttgttttatggataatt

SEQ ID NO: 253390 - DNA, 25 bp, Probe sequence
actcatttcaaataaaaagcacttt

SEQ ID NO: 253391 - DNA, 25 bp, Probe sequence
aaagcacttttctagtaggaataat

SEQ ID NO: 253392 - DNA, 25 bp, Probe sequence
aacacagcaatctattattcacttt

SEQ ID NO: 253393 - DNA, 25 bp, Probe sequence
aatgctgataacagtttttccttgt

SEQ ID NO: 253394 - DNA, 25 bp, Probe sequence
aattattacattagtttcagctgct

SEQ ID NO: 253395 - DNA, 25 bp, Probe sequence
cagctgctagcgtgatttatgagat

SEQ ID NO: 253396 - DNA, 25 bp, Probe sequence
cagtttttccttgtttgataattag

SEQ ID NO: 253397 - DNA, 25 bp, Probe sequence
gcaatctattattcacttttttgta

SEQ ID NO: 253398 - DNA, 25 bp, Probe sequence
gagcggaatatctttaataatggtt

SEQ ID NO: 253399 - DNA, 25 bp, Probe sequence
gagattgataatttaactttaacac

SEQ ID NO: 253400 - DNA, 25 bp, Probe sequence
gatcttcttggtagttggcgttgtt

SEQ ID NO: 253401 - DNA, 25 bp, Probe sequence
gataacagtttttccttgtttgata

SEQ ID NO: 253402 - DNA, 25 bp, Probe sequence
gatttcttaaagttattggcgatct

SEQ ID NO: 253403 - DNA, 25 bp, Probe sequence
gtttcagctgctagcgtgatttatg

SEQ ID NO: 253404 - DNA, 25 bp, Probe sequence
gggtggtttccattgtcaaatatct

SEQ ID NO: 253405 - DNA, 25 bp, Probe sequence
ggtagttggcgttgttttatggata

SEQ ID NO: 253406 - DNA, 25 bp, Probe sequence
ggcgatcttcttggtagttggcgtt

SEQ ID NO: 253407 - DNA, 25 bp, Probe sequence
tggataatttcattttttatttttg

SEQ ID NO: 253408 - DNA, 25 bp, Probe sequence
tggtttccattgtcaaatatctttg

SEQ ID NO: 253409 - DNA, 25 bp, Probe sequence
tgcaatcataaggggaattattccc

SEQ ID NO: 253410 - DNA, 25 bp, Probe sequence
tgctagcgtgatttatgagattgat

SEQ ID NO: 253411 - DNA, 25 bp, Probe sequence
tattcacttttttgtaatgctgata

SEQ ID NO: 253412 - DNA, 25 bp, Probe sequence
tttccttgtttgataattagtgggt

SEQ ID NO: 253413 - DNA, 25 bp, Probe sequence
tttaactttaacacagcaatctatt

SEQ ID NO: 253414 - DNA, 25 bp, Probe sequence
ttattccctttgtaattatgagcgg

SEQ ID NO: 253415 - DNA, 25 bp, Probe sequence
ttacattagtttcagctgctagcgt

SEQ ID NO: 253416 - DNA, 25 bp, Probe sequence
ttcttggtagttggcgttgttttat

SEQ ID NO: 253417 - DNA, 25 bp, Probe sequence
ttgtcaaatatctttgatttcttaa

SEQ ID NO: 253418 - DNA, 25 bp, Probe sequence
aggcaaattcaaaggtcggcaactg

SEQ ID NO: 253419 - DNA, 25 bp, Probe sequence
atcaatcgccgaacgtttagaaggt

SEQ ID NO: 253420 - DNA, 25 bp, Probe sequence
atcgagcaagatataacgtgacagt

SEQ ID NO: 253421 - DNA, 25 bp, Probe sequence
acgcccacaattacaagctatgctt

SEQ ID NO: 253422 - DNA, 25 bp, Probe sequence
aagcatgctttcgatttgtttttga

SEQ ID NO: 253423 - DNA, 25 bp, Probe sequence
aatagggtatgcacgagtaagtagc

SEQ ID NO: 253424 - DNA, 25 bp, Probe sequence
aataaccttgtcattgaattgtaca

SEQ ID NO: 253425 - DNA, 25 bp, Probe sequence
aatttaccctcaatgaatgggattg

SEQ ID NO: 253426 - DNA, 25 bp, Probe sequence
aattaaggaacgtcaggcacaggga

SEQ ID NO: 253427 - DNA, 25 bp, Probe sequence
caaactggaatcaatcgccgaacgt

SEQ ID NO: 253428 - DNA, 25 bp, Probe sequence
caagctatgcttaactatattcgtg

SEQ ID NO: 253429 - DNA, 25 bp, Probe sequence
cagggcgtttctaaggtcttttcag

SEQ ID NO: 253430 - DNA, 25 bp, Probe sequence
gcgttacagggcgtttctaaggtct

SEQ ID NO: 253431 - DNA, 25 bp, Probe sequence
gcttaactatattcgtgaaggggat

SEQ ID NO: 253432 - DNA, 25 bp, Probe sequence
gaagatgaaaatttaaggcgtttga

SEQ ID NO: 253433 - DNA, 25 bp, Probe sequence
gaacgtttagaaggtatcgagcaag

SEQ ID NO: 253434 - DNA, 25 bp, Probe sequence
gaacagaacttagatcggcaattac

SEQ ID NO: 253435 - DNA, 25 bp, Probe sequence
gacaaattaagcggtcaatcggtcg

SEQ ID NO: 253436 - DNA, 25 bp, Probe sequence
gatcggcaattacaagcgttacagg

SEQ ID NO: 253437 - DNA, 25 bp, Probe sequence
gttactgaattagatcgattaggac

SEQ ID NO: 253438 - DNA, 25 bp, Probe sequence
gtcgaacgcccacaattacaagcta

SEQ ID NO: 253439 - DNA, 25 bp, Probe sequence
ggtcttttcagacaaattaagcggt

SEQ ID NO: 253440 - DNA, 25 bp, Probe sequence
ggggatattgttattgttactgaat

SEQ ID NO: 253441 - DNA, 25 bp, Probe sequence
ggaacgtcaggcacagggaatcgaa

SEQ ID NO: 253442 - DNA, 25 bp, Probe sequence
ggaagtcttaaatttaccctcaatg

SEQ ID NO: 253443 - DNA, 25 bp, Probe sequence
ggcgtttctaaggtcttttcagaca

SEQ ID NO: 253444 - DNA, 25 bp, Probe sequence
ggcacagggaatcgaaattgctaag

SEQ ID NO: 253445 - DNA, 25 bp, Probe sequence
ggcgtttgattaataaccttgtcat

SEQ ID NO: 253446 - DNA, 25 bp, Probe sequence
tgtacaagtatcaagcagaatcaga

SEQ ID NO: 253447 - DNA, 25 bp, Probe sequence
tgatccacgtttaaagcatgctttc

SEQ ID NO: 253448 - DNA, 25 bp, Probe sequence
tacaagcgttacagggcgtttctaa

SEQ ID NO: 253449 - DNA, 25 bp, Probe sequence
tcaaaggtcggcaactgaaatttaa

SEQ ID NO: 253450 - DNA, 25 bp, Probe sequence
taagcggtcaatcggtcgaacgccc

SEQ ID NO: 253451 - DNA, 25 bp, Probe sequence
ttgtttttgaatggtttatccgata

SEQ ID NO: 253452 - DNA, 25 bp, Probe sequence
attgcaagaaaggtcaaaattactt

SEQ ID NO: 253453 - DNA, 25 bp, Probe sequence
attaacgaagaaccatccacaatag

SEQ ID NO: 253454 - DNA, 25 bp, Probe sequence
attattcttttgatacgtctgctaa

SEQ ID NO: 253455 - DNA, 25 bp, Probe sequence
atatgggtttgaaagtactaataca

SEQ ID NO: 253456 - DNA, 25 bp, Probe sequence
atacaaaggttggagtctgagttag

SEQ ID NO: 253457 - DNA, 25 bp, Probe sequence
atgatgttgatgtagaaaagattat

SEQ ID NO: 253458 - DNA, 25 bp, Probe sequence
acttaattattcttttgatacgtct

SEQ ID NO: 253459 - DNA, 25 bp, Probe sequence
acaaaggttggagtctgagttagaa

SEQ ID NO: 253460 - DNA, 25 bp, Probe sequence
acaacttaattattcttttgatacg

SEQ ID NO: 253461 - DNA, 25 bp, Probe sequence
aaatgttaatgtacaagaaccagta

SEQ ID NO: 253462 - DNA, 25 bp, Probe sequence
aaacaagaaaagcgtcatgaagtga

SEQ ID NO: 253463 - DNA, 25 bp, Probe sequence
aaaaggataatacttcattcataaa

SEQ ID NO: 253464 - DNA, 25 bp, Probe sequence
aattattcttttgatacgtctgcta

SEQ ID NO: 253465 - DNA, 25 bp, Probe sequence
aattattaacgaagaaccatccaca

SEQ ID NO: 253466 - DNA, 25 bp, Probe sequence
caaataattgaactgcttgaaaagc

SEQ ID NO: 253467 - DNA, 25 bp, Probe sequence
gcttgaaaagcaaatagacacttta

SEQ ID NO: 253468 - DNA, 25 bp, Probe sequence
gaagtgacaatagaattttatagga

SEQ ID NO: 253469 - DNA, 25 bp, Probe sequence
gaagagtgtcaaagaactcagtgaa

SEQ ID NO: 253470 - DNA, 25 bp, Probe sequence
gaaccagtaaagatatacctgaaga

SEQ ID NO: 253471 - DNA, 25 bp, Probe sequence
gaaaagattattcaaagagtaacca

SEQ ID NO: 253472 - DNA, 25 bp, Probe sequence
gaaaagcgtcatgaagtgacaatag

SEQ ID NO: 253473 - DNA, 25 bp, Probe sequence
gaaaaccaacaagtattaacattag

SEQ ID NO: 253474 - DNA, 25 bp, Probe sequence
gaaagtactaatacaaactcagaaa

SEQ ID NO: 253475 - DNA, 25 bp, Probe sequence
gatacgtctgctaatgagagacaaa

SEQ ID NO: 253476 - DNA, 25 bp, Probe sequence
gtgtcaaagaactcagtgaaaaatt

SEQ ID NO: 253477 - DNA, 25 bp, Probe sequence
ggttggagtctgagttagaagaaga

SEQ ID NO: 253478 - DNA, 25 bp, Probe sequence
ggataatacttcattcataaaaaat

SEQ ID NO: 253479 - DNA, 25 bp, Probe sequence
taattattcttttgatacgtctgct

SEQ ID NO: 253480 - DNA, 25 bp, Probe sequence
tagacactttaaataaacaacttga

SEQ ID NO: 253481 - DNA, 25 bp, Probe sequence
tattcttttgatacgtctgctaatg

SEQ ID NO: 253482 - DNA, 25 bp, Probe sequence
ttattaacgaagaaccatccacaat

SEQ ID NO: 253483 - DNA, 25 bp, Probe sequence
ttttgatacgtctgctaatgagaga

SEQ ID NO: 253484 - DNA, 25 bp, Probe sequence
ttattcttttgatacgtctgctaat

SEQ ID NO: 253485 - DNA, 25 bp, Probe sequence
ttcttttgatacgtctgctaatgag

SEQ ID NO: 253486 - DNA, 25 bp, Probe sequence
attggtgtactgctactcacgaatg

SEQ ID NO: 253487 - DNA, 25 bp, Probe sequence
atttgacgatgatatttttggagct

SEQ ID NO: 253488 - DNA, 25 bp, Probe sequence
actgctactcacgaatgtatgtctt

SEQ ID NO: 253489 - DNA, 25 bp, Probe sequence
actttttctttgagtgactattggg

SEQ ID NO: 253490 - DNA, 25 bp, Probe sequence
acaagtgacatggttcgaggaagtt

SEQ ID NO: 253491 - DNA, 25 bp, Probe sequence
aaattggtgtactgctactcacgaa

SEQ ID NO: 253492 - DNA, 25 bp, Probe sequence
aaaggaaattggtgtactgctactc

SEQ ID NO: 253493 - DNA, 25 bp, Probe sequence
aaacactttttctttgagtgactat

SEQ ID NO: 253494 - DNA, 25 bp, Probe sequence
aattggtgtactgctactcacgaat

SEQ ID NO: 253495 - DNA, 25 bp, Probe sequence
ctgctactcacgaatgtatgtcttg

SEQ ID NO: 253496 - DNA, 25 bp, Probe sequence
ctcacgaatgtatgtcttggtgtaa

SEQ ID NO: 253497 - DNA, 25 bp, Probe sequence
cgaatgtatgtcttggtgtaaataa

SEQ ID NO: 253498 - DNA, 25 bp, Probe sequence
gctactcacgaatgtatgtcttggt

SEQ ID NO: 253499 - DNA, 25 bp, Probe sequence
gcttgtagtacaaacactttttctt

SEQ ID NO: 253500 - DNA, 25 bp, Probe sequence
gaagaacaagtgacatggttcgagg

SEQ ID NO: 253501 - DNA, 25 bp, Probe sequence
gaaattggtgtactgctactcacga

SEQ ID NO: 253502 - DNA, 25 bp, Probe sequence
gacatggttcgaggaagtttcagaa

SEQ ID NO: 253503 - DNA, 25 bp, Probe sequence
gacgatgatatttttggagcttgta

SEQ ID NO: 253504 - DNA, 25 bp, Probe sequence
gagtgactattggggtaataaagga

SEQ ID NO: 253505 - DNA, 25 bp, Probe sequence
gatgatatttttggagcttgtagta

SEQ ID NO: 253506 - DNA, 25 bp, Probe sequence
gtactgctactcacgaatgtatgtc

SEQ ID NO: 253507 - DNA, 25 bp, Probe sequence
gtagtacaaacactttttctttgag

SEQ ID NO: 253508 - DNA, 25 bp, Probe sequence
gtacaaacactttttctttgagtga

SEQ ID NO: 253509 - DNA, 25 bp, Probe sequence
ggttcgaggaagtttcagaacaaga

SEQ ID NO: 253510 - DNA, 25 bp, Probe sequence
gtgacatggttcgaggaagtttcag

SEQ ID NO: 253511 - DNA, 25 bp, Probe sequence
gtgtactgctactcacgaatgtatg

SEQ ID NO: 253512 - DNA, 25 bp, Probe sequence
ggtgtactgctactcacgaatgtat

SEQ ID NO: 253513 - DNA, 25 bp, Probe sequence
ggaaattggtgtactgctactcacg

SEQ ID NO: 253514 - DNA, 25 bp, Probe sequence
ttttctttgagtgactattggggta

SEQ ID NO: 253515 - DNA, 25 bp, Probe sequence
tggtgtactgctactcacgaatgta

SEQ ID NO: 253516 - DNA, 25 bp, Probe sequence
tgatatttttggagcttgtagtaca

SEQ ID NO: 253517 - DNA, 25 bp, Probe sequence
tcagaacaagaatttgacgatgata

SEQ ID NO: 253518 - DNA, 25 bp, Probe sequence
tactcacgaatgtatgtcttggtgt

SEQ ID NO: 253519 - DNA, 25 bp, Probe sequence
ttctttgagtgactattggggtaat

SEQ ID NO: 253520 - DNA, 25 bp, Probe sequence
acctttagccttattgggtggagct

SEQ ID NO: 253521 - DNA, 25 bp, Probe sequence
atgcagctggaacacctttagcctt

SEQ ID NO: 253522 - DNA, 25 bp, Probe sequence
atgtccaacaactgcttgtacacgc

SEQ ID NO: 253523 - DNA, 25 bp, Probe sequence
agaatcagacatgctagaaattact

SEQ ID NO: 253524 - DNA, 25 bp, Probe sequence
agctgccaccggggtgataggttat

SEQ ID NO: 253525 - DNA, 25 bp, Probe sequence
agctggaacacctttagccttattg

SEQ ID NO: 253526 - DNA, 25 bp, Probe sequence
accaaacatgtccaacaactgcttg

SEQ ID NO: 253527 - DNA, 25 bp, Probe sequence
acatgtccaacaactgcttgtacac

SEQ ID NO: 253528 - DNA, 25 bp, Probe sequence
aattttcagaatcagacatgctaga

SEQ ID NO: 253529 - DNA, 25 bp, Probe sequence
caaacatgtccaacaactgcttgta

SEQ ID NO: 253530 - DNA, 25 bp, Probe sequence
caccggggtgataggttatatttct

SEQ ID NO: 253531 - DNA, 25 bp, Probe sequence
ctggaacacctttagccttattggg

SEQ ID NO: 253532 - DNA, 25 bp, Probe sequence
gccttattgggtggagctgccaccg

SEQ ID NO: 253533 - DNA, 25 bp, Probe sequence
gcagctggaacacctttagccttat

SEQ ID NO: 253534 - DNA, 25 bp, Probe sequence
gaagtatatgcagctggaacacctt

SEQ ID NO: 253535 - DNA, 25 bp, Probe sequence
gaacacctttagccttattgggtgg

SEQ ID NO: 253536 - DNA, 25 bp, Probe sequence
gacatgctagaaattactgatgatg

SEQ ID NO: 253537 - DNA, 25 bp, Probe sequence
gagttaggtaaattttcagaatcag

SEQ ID NO: 253538 - DNA, 25 bp, Probe sequence
gatgatgaagtatatgcagctggaa

SEQ ID NO: 253539 - DNA, 25 bp, Probe sequence
gtatatgcagctggaacacctttag

SEQ ID NO: 253540 - DNA, 25 bp, Probe sequence
gtccaacaactgcttgtacacgcgc

SEQ ID NO: 253541 - DNA, 25 bp, Probe sequence
tggagctgccaccggggtgataggt

SEQ ID NO: 253542 - DNA, 25 bp, Probe sequence
ggagctgccaccggggtgataggtt

SEQ ID NO: 253543 - DNA, 25 bp, Probe sequence
tggaacacctttagccttattgggt

SEQ ID NO: 253544 - DNA, 25 bp, Probe sequence
tgcagctggaacacctttagcctta

SEQ ID NO: 253545 - DNA, 25 bp, Probe sequence
tgccaccggggtgataggttatatt

SEQ ID NO: 253546 - DNA, 25 bp, Probe sequence
tccaacaactgcttgtacacgcgct

SEQ ID NO: 253547 - DNA, 25 bp, Probe sequence
taaccaaacatgtccaacaactgct

SEQ ID NO: 253548 - DNA, 25 bp, Probe sequence
tagccttattgggtggagctgccac

SEQ ID NO: 253549 - DNA, 25 bp, Probe sequence
tatgcagctggaacacctttagcct

SEQ ID NO: 253550 - DNA, 25 bp, Probe sequence
tattgggtggagctgccaccggggt

SEQ ID NO: 253551 - DNA, 25 bp, Probe sequence
tatttctaaccaaacatgtccaaca

SEQ ID NO: 253552 - DNA, 25 bp, Probe sequence
ttatatttctaaccaaacatgtcca

SEQ ID NO: 253553 - DNA, 25 bp, Probe sequence
ttctaaccaaacatgtccaacaact

SEQ ID NO: 253554 - DNA, 25 bp, Probe sequence
attatacctttatctgtagttccga

SEQ ID NO: 253555 - DNA, 25 bp, Probe sequence
tatagtggcagaactggcccctttc

SEQ ID NO: 253556 - DNA, 25 bp, Probe sequence
atatggagcctttatactgctggaa

SEQ ID NO: 253557 - DNA, 25 bp, Probe sequence
ataagcctagacctatttcaggaga

SEQ ID NO: 253558 - DNA, 25 bp, Probe sequence
atgaccggtataaccatttgcctaa

SEQ ID NO: 253559 - DNA, 25 bp, Probe sequence
atggtgaaattgatgtctctcccct

SEQ ID NO: 253560 - DNA, 25 bp, Probe sequence
agagcattctatctcatattttatg

SEQ ID NO: 253561 - DNA, 25 bp, Probe sequence
aaaccggagctctattacatttatg

SEQ ID NO: 253562 - DNA, 25 bp, Probe sequence
aactacttgtagtcctgcgtatata

SEQ ID NO: 253563 - DNA, 25 bp, Probe sequence
aataacggttcttctgtttcagtag

SEQ ID NO: 253564 - DNA, 25 bp, Probe sequence
ctatcctctggattagctcatggaa

SEQ ID NO: 253565 - DNA, 25 bp, Probe sequence
gccggtagaattgctgctttaatgt

SEQ ID NO: 253566 - DNA, 25 bp, Probe sequence
gaatacttacggactccgaaccatc

SEQ ID NO: 253567 - DNA, 25 bp, Probe sequence
gactccaggagttttaggctatgat

SEQ ID NO: 253568 - DNA, 25 bp, Probe sequence
gagacgaaaacagcaactctccctt

SEQ ID NO: 253569 - DNA, 25 bp, Probe sequence
gagtgtacacagctttggaatggag

SEQ ID NO: 253570 - DNA, 25 bp, Probe sequence
gatttagctcatatgttgctttctc

SEQ ID NO: 253571 - DNA, 25 bp, Probe sequence
gttgctttctcgtattggaatttta

SEQ ID NO: 253572 - DNA, 25 bp, Probe sequence
gtagttccgatactctgtcatggta

SEQ ID NO: 253573 - DNA, 25 bp, Probe sequence
gtagatatacacttagcccaggact

SEQ ID NO: 253574 - DNA, 25 bp, Probe sequence
gtcacttggttacctaaatctccca

SEQ ID NO: 253575 - DNA, 25 bp, Probe sequence
gtctggagacatacttgggatacta

SEQ ID NO: 253576 - DNA, 25 bp, Probe sequence
gtctgggataggagctttttctgga

SEQ ID NO: 253577 - DNA, 25 bp, Probe sequence
ggtgcaatggtttatccggactact

SEQ ID NO: 253578 - DNA, 25 bp, Probe sequence
ggggatttggtttcacttcttatat

SEQ ID NO: 253579 - DNA, 25 bp, Probe sequence
ggataggacctgtctctcaatatgg

SEQ ID NO: 253580 - DNA, 25 bp, Probe sequence
ggaatccttcctatacatttaacta

SEQ ID NO: 253581 - DNA, 25 bp, Probe sequence
tggcccctttctagctttattatta

SEQ ID NO: 253582 - DNA, 25 bp, Probe sequence
tggagatatcccttatttttctata

SEQ ID NO: 253583 - DNA, 25 bp, Probe sequence
tctctcccctaacttttgaggtgta

SEQ ID NO: 253584 - DNA, 25 bp, Probe sequence
taatatttcatcgtcttggtgcaat

SEQ ID NO: 253585 - DNA, 25 bp, Probe sequence
taacggccctattcctattgattta

SEQ ID NO: 253586 - DNA, 25 bp, Probe sequence
tttactggactaataacggccctat

SEQ ID NO: 253587 - DNA, 25 bp, Probe sequence
tattcgcaagtcgctttttcttatt

SEQ ID NO: 253588 - DNA, 25 bp, Probe sequence
attgctcatcgatttgctactgtat

SEQ ID NO: 253589 - DNA, 25 bp, Probe sequence
atttctgaagctttgacggcaacga

SEQ ID NO: 253590 - DNA, 25 bp, Probe sequence
atagcagtgttcttgtcatttttga

SEQ ID NO: 253591 - DNA, 25 bp, Probe sequence
atgactttaggacaggcgattgcag

SEQ ID NO: 253592 - DNA, 25 bp, Probe sequence
atgattttagtgtttctttaccaga

SEQ ID NO: 253593 - DNA, 25 bp, Probe sequence
agtctgttgtttctatgttgttcac

SEQ ID NO: 253594 - DNA, 25 bp, Probe sequence
agttcttctgcaatctcctaaatta

SEQ ID NO: 253595 - DNA, 25 bp, Probe sequence
agaatgcggattgtgttgtgtgaaa

SEQ ID NO: 253596 - DNA, 25 bp, Probe sequence
aaacgttgccaatctatgccatttt

SEQ ID NO: 253597 - DNA, 25 bp, Probe sequence
aaacgtagttattatggatccatca

SEQ ID NO: 253598 - DNA, 25 bp, Probe sequence
aaacgtttattatatttgcctgcaa

SEQ ID NO: 253599 - DNA, 25 bp, Probe sequence
aaacttttgctccactgctaatttt

SEQ ID NO: 253600 - DNA, 25 bp, Probe sequence
aaaatacttcagcgttcgttctcca

SEQ ID NO: 253601 - DNA, 25 bp, Probe sequence
aagctacttcttcacttgataatgt

SEQ ID NO: 253602 - DNA, 25 bp, Probe sequence
cgaaccttctagtggcagcatttta

SEQ ID NO: 253603 - DNA, 25 bp, Probe sequence
gctttagtgggcatgtcgggatcag

SEQ ID NO: 253604 - DNA, 25 bp, Probe sequence
gcattcaagatattataggccctac

SEQ ID NO: 253605 - DNA, 25 bp, Probe sequence
gaatttgcactttagttacacacca

SEQ ID NO: 253606 - DNA, 25 bp, Probe sequence
gaagtagtgctcaaagtatccaact

SEQ ID NO: 253607 - DNA, 25 bp, Probe sequence
gaacggctttcaaacttttgctcca

SEQ ID NO: 253608 - DNA, 25 bp, Probe sequence
gaaaggctgtcattacgttgtttta

SEQ ID NO: 253609 - DNA, 25 bp, Probe sequence
gagttccaccatctttacaaattgc

SEQ ID NO: 253610 - DNA, 25 bp, Probe sequence
gatacgtgattttatgtactccaaa

SEQ ID NO: 253611 - DNA, 25 bp, Probe sequence
gttgaagttggcgcacataatgaat

SEQ ID NO: 253612 - DNA, 25 bp, Probe sequence
gttacacaccagaaagccctttagc

SEQ ID NO: 253613 - DNA, 25 bp, Probe sequence
gttacataccacaagaagcatacct

SEQ ID NO: 253614 - DNA, 25 bp, Probe sequence
gtagttgcactttattaggttatgt

SEQ ID NO: 253615 - DNA, 25 bp, Probe sequence
gtgtcgcagtcacatgtatatgacg

SEQ ID NO: 253616 - DNA, 25 bp, Probe sequence
ggcgattgcagtacagtctgttgtt

SEQ ID NO: 253617 - DNA, 25 bp, Probe sequence
tgcaccaaaatcgtaattgctcatc

SEQ ID NO: 253618 - DNA, 25 bp, Probe sequence
tgaattttccgttaatagccttttg

SEQ ID NO: 253619 - DNA, 25 bp, Probe sequence
taggccctacattggtacgttctat

SEQ ID NO: 253620 - DNA, 25 bp, Probe sequence
tattagtactcttttcgaaccttct

SEQ ID NO: 253621 - DNA, 25 bp, Probe sequence
ttacattgtcaattcccatagccac

SEQ ID NO: 253622 - DNA, 25 bp, Probe sequence
attgtagcactatttcttatgctgt

SEQ ID NO: 253623 - DNA, 25 bp, Probe sequence
attttctttataattgtagcactat

SEQ ID NO: 253624 - DNA, 25 bp, Probe sequence
ataattgtagcactatttcttatgc

SEQ ID NO: 253625 - DNA, 25 bp, Probe sequence
atcttggttttctcaatatccagaa

SEQ ID NO: 253626 - DNA, 25 bp, Probe sequence
agtgcttaaatttacaggtttgtca

SEQ ID NO: 253627 - DNA, 25 bp, Probe sequence
agatcgatacgatgaaagacaacgt

SEQ ID NO: 253628 - DNA, 25 bp, Probe sequence
acaggtttgtcaccaagtattgaag

SEQ ID NO: 253629 - DNA, 25 bp, Probe sequence
acaaatatttaccttcagaaacatt

SEQ ID NO: 253630 - DNA, 25 bp, Probe sequence
aaatgtttattgaaatactggctaa

SEQ ID NO: 253631 - DNA, 25 bp, Probe sequence
aaaggacaacaagatcgatacgatg

SEQ ID NO: 253632 - DNA, 25 bp, Probe sequence
aagttttatttggattgtatattgt

SEQ ID NO: 253633 - DNA, 25 bp, Probe sequence
aatttacaggtttgtcaccaagtat

SEQ ID NO: 253634 - DNA, 25 bp, Probe sequence
gctgtttaattactatactacaaat

SEQ ID NO: 253635 - DNA, 25 bp, Probe sequence
gcttaaatttacaggtttgtcacca

SEQ ID NO: 253636 - DNA, 25 bp, Probe sequence
gcactatttcttatgctgtttaatt

SEQ ID NO: 253637 - DNA, 25 bp, Probe sequence
gaaggatcttggttttctcaatatc

SEQ ID NO: 253638 - DNA, 25 bp, Probe sequence
gaaagacaacgtaaaatgtttattg

SEQ ID NO: 253639 - DNA, 25 bp, Probe sequence
gtattgaaggatcttggttttctca

SEQ ID NO: 253640 - DNA, 25 bp, Probe sequence
gtttgtcaccaagtattgaaggatc

SEQ ID NO: 253641 - DNA, 25 bp, Probe sequence
gtatgttatttacactagtgcttaa

SEQ ID NO: 253642 - DNA, 25 bp, Probe sequence
gtagcactatttcttatgctgttta

SEQ ID NO: 253643 - DNA, 25 bp, Probe sequence
ggatcttggttttctcaatatccag

SEQ ID NO: 253644 - DNA, 25 bp, Probe sequence
tggattgtatattgtatgttattta

SEQ ID NO: 253645 - DNA, 25 bp, Probe sequence
tgaaatactggctaaaagttttatt

SEQ ID NO: 253646 - DNA, 25 bp, Probe sequence
tgaatttaattccttttattattat

SEQ ID NO: 253647 - DNA, 25 bp, Probe sequence
tctcaatatccagaaattttcttta

SEQ ID NO: 253648 - DNA, 25 bp, Probe sequence
tcttgtttatggacggctataacta

SEQ ID NO: 253649 - DNA, 25 bp, Probe sequence
taactaacaaatatttaccttcaga

SEQ ID NO: 253650 - DNA, 25 bp, Probe sequence
tacactagtgcttaaatttacaggt

SEQ ID NO: 253651 - DNA, 25 bp, Probe sequence
tatggacggctataactaacaaata

SEQ ID NO: 253652 - DNA, 25 bp, Probe sequence
tatttaccttcagaaacattagata

SEQ ID NO: 253653 - DNA, 25 bp, Probe sequence
tatttcttatgctgtttaattacta

SEQ ID NO: 253654 - DNA, 25 bp, Probe sequence
ttttttcttgtttatggacggctat

SEQ ID NO: 253655 - DNA, 25 bp, Probe sequence
ttatgctgtttaattactatactac

SEQ ID NO: 253656 - DNA, 25 bp, Probe sequence
tctaacggtacgggcaagaccacct

SEQ ID NO: 253657 - DNA, 25 bp, Probe sequence
attaaaggactggcatggagcattt

SEQ ID NO: 253658 - DNA, 25 bp, Probe sequence
ataagctggcaattatcggctctaa

SEQ ID NO: 253659 - DNA, 25 bp, Probe sequence
agagctcgacaagactattttagaa

SEQ ID NO: 253660 - DNA, 25 bp, Probe sequence
agcagctagtttttacgttcgagga

SEQ ID NO: 253661 - DNA, 25 bp, Probe sequence
aaatcgccaagagcaattagcacat

SEQ ID NO: 253662 - DNA, 25 bp, Probe sequence
aaacccagaactgttactagcagat

SEQ ID NO: 253663 - DNA, 25 bp, Probe sequence
aagctagggaggaaacacgggatat

SEQ ID NO: 253664 - DNA, 25 bp, Probe sequence
aatagctacccgaatcatgatgatt

SEQ ID NO: 253665 - DNA, 25 bp, Probe sequence
cacggtgcgaactcattccacaatt

SEQ ID NO: 253666 - DNA, 25 bp, Probe sequence
cttattcgaaccattctagcgagaa

SEQ ID NO: 253667 - DNA, 25 bp, Probe sequence
ctagcgagaatgcattttttcagag

SEQ ID NO: 253668 - DNA, 25 bp, Probe sequence
ctgtaactcagtattcacggtgcga

SEQ ID NO: 253669 - DNA, 25 bp, Probe sequence
gcagatgaaccgacaactaaccttg

SEQ ID NO: 253670 - DNA, 25 bp, Probe sequence
gctcaacgagctactaagaaaccga

SEQ ID NO: 253671 - DNA, 25 bp, Probe sequence
gcaagcacttgataaaaacccagaa

SEQ ID NO: 253672 - DNA, 25 bp, Probe sequence
gaagatgtttcgggtgtaattgagg

SEQ ID NO: 253673 - DNA, 25 bp, Probe sequence
gaagcgtaatttttgtctcccatga

SEQ ID NO: 253674 - DNA, 25 bp, Probe sequence
gaagccatacttcgcaaataaacag

SEQ ID NO: 253675 - DNA, 25 bp, Probe sequence
gaaaacgtccaatcttcttcacggc

SEQ ID NO: 253676 - DNA, 25 bp, Probe sequence
gaaaatattgttagaggctcttcgt

SEQ ID NO: 253677 - DNA, 25 bp, Probe sequence
gaggcgtttgaatccttattagagg

SEQ ID NO: 253678 - DNA, 25 bp, Probe sequence
tatcggctctaacggtacgggcaag

SEQ ID NO: 253679 - DNA, 25 bp, Probe sequence
gttcaggataagccaggtatttcat

SEQ ID NO: 253680 - DNA, 25 bp, Probe sequence
gtatttcattttcaccatctgttaa

SEQ ID NO: 253681 - DNA, 25 bp, Probe sequence
gtctcccatgatcgtaggtttatcg

SEQ ID NO: 253682 - DNA, 25 bp, Probe sequence
gtccaatcttcttcacggcaaaatg

SEQ ID NO: 253683 - DNA, 25 bp, Probe sequence
gtgctttcttagatactctttgtac

SEQ ID NO: 253684 - DNA, 25 bp, Probe sequence
gggggagagcgagttaaggtagcac

SEQ ID NO: 253685 - DNA, 25 bp, Probe sequence
ggttactttagccagaatctagaca

SEQ ID NO: 253686 - DNA, 25 bp, Probe sequence
ggattatactccgtgttgaagatgt

SEQ ID NO: 253687 - DNA, 25 bp, Probe sequence
ggagcatttatcatcgtttcacatg

SEQ ID NO: 253688 - DNA, 25 bp, Probe sequence
ggctcttcgtataaaaccctatgtt

SEQ ID NO: 253689 - DNA, 25 bp, Probe sequence
tcgtttcacatgatcgtgctttctt

SEQ ID NO: 253690 - DNA, 25 bp, Probe sequence
attgctatagaagaaacccaaacta

SEQ ID NO: 253691 - DNA, 25 bp, Probe sequence
attcctttgataaatctactaatga

SEQ ID NO: 253692 - DNA, 25 bp, Probe sequence
ataattcagatggctttgagacatt

SEQ ID NO: 253693 - DNA, 25 bp, Probe sequence
atcatatacttcggattctgtaaat

SEQ ID NO: 253694 - DNA, 25 bp, Probe sequence
agatataataattcagatggctttg

SEQ ID NO: 253695 - DNA, 25 bp, Probe sequence
agcatcatatacttcggattctgta

SEQ ID NO: 253696 - DNA, 25 bp, Probe sequence
acttcggattctgtaaatactgatc

SEQ ID NO: 253697 - DNA, 25 bp, Probe sequence
aagcatcatatacttcggattctgt

SEQ ID NO: 253698 - DNA, 25 bp, Probe sequence
aagatatatctgagagtcaacaaga

SEQ ID NO: 253699 - DNA, 25 bp, Probe sequence
aagatattgctatagaagaaaccca

SEQ ID NO: 253700 - DNA, 25 bp, Probe sequence
aagttattcctttgataaatctact

SEQ ID NO: 253701 - DNA, 25 bp, Probe sequence
aatggagtgaattatattgatgata

SEQ ID NO: 253702 - DNA, 25 bp, Probe sequence
aattcagatggctttgagacattaa

SEQ ID NO: 253703 - DNA, 25 bp, Probe sequence
cagatggctttgagacattaaaaac

SEQ ID NO: 253704 - DNA, 25 bp, Probe sequence
gcatcatatacttcggattctgtaa

SEQ ID NO: 253705 - DNA, 25 bp, Probe sequence
gaaaactttgatgtacaagaagcat

SEQ ID NO: 253706 - DNA, 25 bp, Probe sequence
gaaataacttatgaaaacactgaaa

SEQ ID NO: 253707 - DNA, 25 bp, Probe sequence
gacaattaagttattcctttgataa

SEQ ID NO: 253708 - DNA, 25 bp, Probe sequence
gagagacaattaagttattcctttg

SEQ ID NO: 253709 - DNA, 25 bp, Probe sequence
gagacaattaagttattcctttgat

SEQ ID NO: 253710 - DNA, 25 bp, Probe sequence
gagagtcaacaagatgaaaaatcac

SEQ ID NO: 253711 - DNA, 25 bp, Probe sequence
gaggttcaacctaaagatatatctg

SEQ ID NO: 253712 - DNA, 25 bp, Probe sequence
gatcgagaaaactttgatgtacaag

SEQ ID NO: 253713 - DNA, 25 bp, Probe sequence
gataaatctactaatgatcgagaaa

SEQ ID NO: 253714 - DNA, 25 bp, Probe sequence
gattctgtaaatactgatcaatatc

SEQ ID NO: 253715 - DNA, 25 bp, Probe sequence
gttattcctttgataaatctactaa

SEQ ID NO: 253716 - DNA, 25 bp, Probe sequence
gtacaagaagcatcatatacttcgg

SEQ ID NO: 253717 - DNA, 25 bp, Probe sequence
ggttcaacctaaagatatatctgag

SEQ ID NO: 253718 - DNA, 25 bp, Probe sequence
taaaaaaggcttctggagtcgtttg

SEQ ID NO: 253719 - DNA, 25 bp, Probe sequence
tcacaacaacaagatgattcattta

SEQ ID NO: 253720 - DNA, 25 bp, Probe sequence
tatacttcggattctgtaaatactg

SEQ ID NO: 253721 - DNA, 25 bp, Probe sequence
ttagagaatcaacaaattttagctt

SEQ ID NO: 253722 - DNA, 25 bp, Probe sequence
ttcggattctgtaaatactgatcaa

SEQ ID NO: 253723 - DNA, 25 bp, Probe sequence
ttggaacatcaattagaggaagaga

SEQ ID NO: 253724 - DNA, 25 bp, Probe sequence
tattaccgtttagaagacgtcgaat

SEQ ID NO: 253725 - DNA, 25 bp, Probe sequence
atttctaagaattctcattcgaatc

SEQ ID NO: 253726 - DNA, 25 bp, Probe sequence
atatctgcaagtgaattcgaaacat

SEQ ID NO: 253727 - DNA, 25 bp, Probe sequence
atacacatgatacatattaccgttt

SEQ ID NO: 253728 - DNA, 25 bp, Probe sequence
atgcccacagatgcaaaagttatgt

SEQ ID NO: 253729 - DNA, 25 bp, Probe sequence
agttccagaactaataaatcatcag

SEQ ID NO: 253730 - DNA, 25 bp, Probe sequence
accttcgcaaatcaaatcttatgta

SEQ ID NO: 253731 - DNA, 25 bp, Probe sequence
acgaattatacgaatgatacatcta

SEQ ID NO: 253732 - DNA, 25 bp, Probe sequence
aaagccatgttgctacaaaaaaatg

SEQ ID NO: 253733 - DNA, 25 bp, Probe sequence
aaacagttatgctcaattttaaatt

SEQ ID NO: 253734 - DNA, 25 bp, Probe sequence
aacatacctcaatacaatatcttta

SEQ ID NO: 253735 - DNA, 25 bp, Probe sequence
aaccgaatttaataatgatgcctta

SEQ ID NO: 253736 - DNA, 25 bp, Probe sequence
aaccgttgaaactatgcaaggctat

SEQ ID NO: 253737 - DNA, 25 bp, Probe sequence
aagatcgctttgaactatcaagatt

SEQ ID NO: 253738 - DNA, 25 bp, Probe sequence
aatcatcaacaaaccgaatttaata

SEQ ID NO: 253739 - DNA, 25 bp, Probe sequence
aatttatttactcgaacccacatat

SEQ ID NO: 253740 - DNA, 25 bp, Probe sequence
aattctaagtcaagtgatactgatt

SEQ ID NO: 253741 - DNA, 25 bp, Probe sequence
caaagaatttattagttccagaact

SEQ ID NO: 253742 - DNA, 25 bp, Probe sequence
caggcgcttgaagaattaccttcgc

SEQ ID NO: 253743 - DNA, 25 bp, Probe sequence
gcaaggctatttaatgcaatcaatt

SEQ ID NO: 253744 - DNA, 25 bp, Probe sequence
gaattaccttcgcaaatcaaatctt

SEQ ID NO: 253745 - DNA, 25 bp, Probe sequence
gaatacttttctaaaatgcccacag

SEQ ID NO: 253746 - DNA, 25 bp, Probe sequence
gaacccacatatgacaaggaactaa

SEQ ID NO: 253747 - DNA, 25 bp, Probe sequence
gaaattaaagacatccgtattatta

SEQ ID NO: 253748 - DNA, 25 bp, Probe sequence
gacgtcgaatttgaacttgtaagtg

SEQ ID NO: 253749 - DNA, 25 bp, Probe sequence
gatgccttaaaattccaggcgcttg

SEQ ID NO: 253750 - DNA, 25 bp, Probe sequence
gatacatctaacatgatttctaaga

SEQ ID NO: 253751 - DNA, 25 bp, Probe sequence
gtatgctttattaaaagatcgcttt

SEQ ID NO: 253752 - DNA, 25 bp, Probe sequence
gtgatactgattttaataatactga

SEQ ID NO: 253753 - DNA, 25 bp, Probe sequence
tgcgtcgtcaaaacatacctcaata

SEQ ID NO: 253754 - DNA, 25 bp, Probe sequence
tacatgcattaaatatgcgtcgtca

SEQ ID NO: 253755 - DNA, 25 bp, Probe sequence
tatcaattacccaaatttttatttg

SEQ ID NO: 253756 - DNA, 25 bp, Probe sequence
tttactcgaacccacatatgacaag

SEQ ID NO: 253757 - DNA, 25 bp, Probe sequence
ttcgaaacattacgtttttatcaat

SEQ ID NO: 253758 - DNA, 25 bp, Probe sequence
attactcttttgatacagcgactaa

SEQ ID NO: 253759 - DNA, 25 bp, Probe sequence
atcataagggcataactaaagcgaa

SEQ ID NO: 253760 - DNA, 25 bp, Probe sequence
agcttaattactcttttgatacagc

SEQ ID NO: 253761 - DNA, 25 bp, Probe sequence
aaagcattaatccgcaagaagcaac

SEQ ID NO: 253762 - DNA, 25 bp, Probe sequence
aaagcatatatacaataattcaaat

SEQ ID NO: 253763 - DNA, 25 bp, Probe sequence
aacgaagacgtattaaagagagatg

SEQ ID NO: 253764 - DNA, 25 bp, Probe sequence
ctgaggacagggaagtagaaacacc

SEQ ID NO: 253765 - DNA, 25 bp, Probe sequence
aatgaaaatactgcagagtttgaaa

SEQ ID NO: 253766 - DNA, 25 bp, Probe sequence
aatagagagtggacctgaggacagg

SEQ ID NO: 253767 - DNA, 25 bp, Probe sequence
aatactgcagagtttgaaaagcata

SEQ ID NO: 253768 - DNA, 25 bp, Probe sequence
aattactcttttgatacagcgacta

SEQ ID NO: 253769 - DNA, 25 bp, Probe sequence
aattcaaatggttttgagtcattaa

SEQ ID NO: 253770 - DNA, 25 bp, Probe sequence
caaaatagcaaccaacaacaaaaga

SEQ ID NO: 253771 - DNA, 25 bp, Probe sequence
cttaattactcttttgatacagcga

SEQ ID NO: 253772 - DNA, 25 bp, Probe sequence
ctcttttgatacagcgactaatgat

SEQ ID NO: 253773 - DNA, 25 bp, Probe sequence
gcgaaaaaggatgacagttcaaacg

SEQ ID NO: 253774 - DNA, 25 bp, Probe sequence
gcagagtttgaaaagcatatataca

SEQ ID NO: 253775 - DNA, 25 bp, Probe sequence
gaatatcaaaatagcaaccaacaac

SEQ ID NO: 253776 - DNA, 25 bp, Probe sequence
gaagaaatagagagtggacctgagg

SEQ ID NO: 253777 - DNA, 25 bp, Probe sequence
gaagcagaattaaatcataagggca

SEQ ID NO: 253778 - DNA, 25 bp, Probe sequence
gaaaatacaaccaatagaagcagaa

SEQ ID NO: 253779 - DNA, 25 bp, Probe sequence
gacaaagcattaatccgcaagaagc

SEQ ID NO: 253780 - DNA, 25 bp, Probe sequence
gacagcttaattactcttttgatac

SEQ ID NO: 253781 - DNA, 25 bp, Probe sequence
gacagttcaaacgaagacgtattaa

SEQ ID NO: 253782 - DNA, 25 bp, Probe sequence
gagagatgataaactatctgaagaa

SEQ ID NO: 253783 - DNA, 25 bp, Probe sequence
gagagtggacctgaggacagggaag

SEQ ID NO: 253784 - DNA, 25 bp, Probe sequence
gagtggacctgaggacagggaagta

SEQ ID NO: 253785 - DNA, 25 bp, Probe sequence
gatacagcgactaatgatagacaaa

SEQ ID NO: 253786 - DNA, 25 bp, Probe sequence
gatagacaaagcattaatccgcaag

SEQ ID NO: 253787 - DNA, 25 bp, Probe sequence
ggatgacagttcaaacgaagacgta

SEQ ID NO: 253788 - DNA, 25 bp, Probe sequence
taattactcttttgatacagcgact

SEQ ID NO: 253789 - DNA, 25 bp, Probe sequence
taagggcataactaaagcgaaaaag

SEQ ID NO: 253790 - DNA, 25 bp, Probe sequence
tactcttttgatacagcgactaatg

SEQ ID NO: 253791 - DNA, 25 bp, Probe sequence
tttgatacagcgactaatgatagac

SEQ ID NO: 253792 - DNA, 25 bp, Probe sequence
atagtatagttgatattgccgaaaa

SEQ ID NO: 253793 - DNA, 25 bp, Probe sequence
atggaagaatacaacgtgactcaca

SEQ ID NO: 253794 - DNA, 25 bp, Probe sequence
agaagtcatggaagaatacaacgtg

SEQ ID NO: 253795 - DNA, 25 bp, Probe sequence
acgtgactcacaaggttataaccga

SEQ ID NO: 253796 - DNA, 25 bp, Probe sequence
acgtaagcgatatctcattcaaaaa

SEQ ID NO: 253797 - DNA, 25 bp, Probe sequence
acaggctagtcaacagttagttaat

SEQ ID NO: 253798 - DNA, 25 bp, Probe sequence
aaaacaattcgctatgatcgacaag

SEQ ID NO: 253799 - DNA, 25 bp, Probe sequence
aaaagttaagcaatcacgtaagcga

SEQ ID NO: 253800 - DNA, 25 bp, Probe sequence
aacaattcgctatgatcgacaagat

SEQ ID NO: 253801 - DNA, 25 bp, Probe sequence
aaccgagtgggaaatgatgggactt

SEQ ID NO: 253802 - DNA, 25 bp, Probe sequence
aatcacgtaagcgatatctcattca

SEQ ID NO: 253803 - DNA, 25 bp, Probe sequence
aattcgctatgatcgacaagatatc

SEQ ID NO: 253804 - DNA, 25 bp, Probe sequence
cttagtgaacaggctagtcaacagt

SEQ ID NO: 253805 - DNA, 25 bp, Probe sequence
ctacttagtgaacaggctagtcaac

SEQ ID NO: 253806 - DNA, 25 bp, Probe sequence
gccaactacttagtgaacaggctag

SEQ ID NO: 253807 - DNA, 25 bp, Probe sequence
gcgatatctcattcaaaaagaagtc

SEQ ID NO: 253808 - DNA, 25 bp, Probe sequence
gcaatcacgtaagcgatatctcatt

SEQ ID NO: 253809 - DNA, 25 bp, Probe sequence
gaatacaacgtgactcacaaggtta

SEQ ID NO: 253810 - DNA, 25 bp, Probe sequence
gaacaggctagtcaacagttagtta

SEQ ID NO: 253811 - DNA, 25 bp, Probe sequence
gactcacaaggttataaccgagtgg

SEQ ID NO: 253812 - DNA, 25 bp, Probe sequence
gagtgggaaatgatgggacttcgta

SEQ ID NO: 253813 - DNA, 25 bp, Probe sequence
gatgggacttcgtaaagttaagatt

SEQ ID NO: 253814 - DNA, 25 bp, Probe sequence
gatattgccgaaaaaatagctttag

SEQ ID NO: 253815 - DNA, 25 bp, Probe sequence
gtatagttgatattgccgaaaaaat

SEQ ID NO: 253816 - DNA, 25 bp, Probe sequence
gtaagcgatatctcattcaaaaaga

SEQ ID NO: 253817 - DNA, 25 bp, Probe sequence
gtgaacaggctagtcaacagttagt

SEQ ID NO: 253818 - DNA, 25 bp, Probe sequence
ggaaatgatgggacttcgtaaagtt

SEQ ID NO: 253819 - DNA, 25 bp, Probe sequence
ggaagaatacaacgtgactcacaag

SEQ ID NO: 253820 - DNA, 25 bp, Probe sequence
ggctagtcaacagttagttaatagt

SEQ ID NO: 253821 - DNA, 25 bp, Probe sequence
tgagccaactacttagtgaacaggc

SEQ ID NO: 253822 - DNA, 25 bp, Probe sequence
tcgctatgatcgacaagatatcgaa

SEQ ID NO: 253823 - DNA, 25 bp, Probe sequence
tcacgtaagcgatatctcattcaaa

SEQ ID NO: 253824 - DNA, 25 bp, Probe sequence
taagcaatcacgtaagcgatatctc

SEQ ID NO: 253825 - DNA, 25 bp, Probe sequence
ttggtaaaacaattcgctatgatcg

SEQ ID NO: 253826 - DNA, 25 bp, Probe sequence
attatttctgagttccttgatattg

SEQ ID NO: 253827 - DNA, 25 bp, Probe sequence
atttctgagttccttgatattgata

SEQ ID NO: 253828 - DNA, 25 bp, Probe sequence
aggtctttctgctacttatttagct

SEQ ID NO: 253829 - DNA, 25 bp, Probe sequence
agggttgttctcatttcatgactat

SEQ ID NO: 253830 - DNA, 25 bp, Probe sequence
aaattatttctgagttccttgatat

SEQ ID NO: 253831 - DNA, 25 bp, Probe sequence
aaagggttgttctcatttcatgact

SEQ ID NO: 253832 - DNA, 25 bp, Probe sequence
aaaaattatttctgagttccttgat

SEQ ID NO: 253833 - DNA, 25 bp, Probe sequence
aaacgaggtctttctgctacttatt

SEQ ID NO: 253834 - DNA, 25 bp, Probe sequence
aaaaagggttgttctcatttcatga

SEQ ID NO: 253835 - DNA, 25 bp, Probe sequence
aaaagggttgttctcatttcatgac

SEQ ID NO: 253836 - DNA, 25 bp, Probe sequence
aaaacgaggtctttctgctacttat

SEQ ID NO: 253837 - DNA, 25 bp, Probe sequence
aagggttgttctcatttcatgacta

SEQ ID NO: 253838 - DNA, 25 bp, Probe sequence
aattatttctgagttccttgatatt

SEQ ID NO: 253839 - DNA, 25 bp, Probe sequence
ctttctgctacttatttagctcaat

SEQ ID NO: 253840 - DNA, 25 bp, Probe sequence
ctgctacttatttagctcaattaat

SEQ ID NO: 253841 - DNA, 25 bp, Probe sequence
cgaggtctttctgctacttatttag

SEQ ID NO: 253842 - DNA, 25 bp, Probe sequence
gaaggcaatatgaatctaaagaaaa

SEQ ID NO: 253843 - DNA, 25 bp, Probe sequence
gaggtctttctgctacttatttagc

SEQ ID NO: 253844 - DNA, 25 bp, Probe sequence
gaggttaaaacgaggtctttctgct

SEQ ID NO: 253845 - DNA, 25 bp, Probe sequence
gttgttctcatttcatgactatgag

SEQ ID NO: 253846 - DNA, 25 bp, Probe sequence
gttctcatttcatgactatgagata

SEQ ID NO: 253847 - DNA, 25 bp, Probe sequence
gttaaaacgaggtctttctgctact

SEQ ID NO: 253848 - DNA, 25 bp, Probe sequence
gtctttctgctacttatttagctca

SEQ ID NO: 253849 - DNA, 25 bp, Probe sequence
gggttgttctcatttcatgactatg

SEQ ID NO: 253850 - DNA, 25 bp, Probe sequence
ggtctttctgctacttatttagctc

SEQ ID NO: 253851 - DNA, 25 bp, Probe sequence
ggttgttctcatttcatgactatga

SEQ ID NO: 253852 - DNA, 25 bp, Probe sequence
tgagttccttgatattgataaagaa

SEQ ID NO: 253853 - DNA, 25 bp, Probe sequence
tctttctgctacttatttagctcaa

SEQ ID NO: 253854 - DNA, 25 bp, Probe sequence
taaaacgaggtctttctgctactta

SEQ ID NO: 253855 - DNA, 25 bp, Probe sequence
tacttatttagctcaattaataggt

SEQ ID NO: 253856 - DNA, 25 bp, Probe sequence
ttatttctgagttccttgatattga

SEQ ID NO: 253857 - DNA, 25 bp, Probe sequence
ttaaaacgaggtctttctgctactt

SEQ ID NO: 253858 - DNA, 25 bp, Probe sequence
ttctgctacttatttagctcaatta

SEQ ID NO: 253859 - DNA, 25 bp, Probe sequence
ttctgagttccttgatattgataaa

SEQ ID NO: 253860 - DNA, 25 bp, Probe sequence
attccaaattcaccagaaggcacct

SEQ ID NO: 253861 - DNA, 25 bp, Probe sequence
atttcagcgaatccttctggaagca

SEQ ID NO: 253862 - DNA, 25 bp, Probe sequence
atatcatatctaacgctggcaattt

SEQ ID NO: 253863 - DNA, 25 bp, Probe sequence
agaaaattccaatgacactgctgtt

SEQ ID NO: 253864 - DNA, 25 bp, Probe sequence
acagatgcgacagcgccagatgcac

SEQ ID NO: 253865 - DNA, 25 bp, Probe sequence
acatcgccacttgtaggcaaaccgc

SEQ ID NO: 253866 - DNA, 25 bp, Probe sequence
aactgtaggcgttagagtcgtactt

SEQ ID NO: 253867 - DNA, 25 bp, Probe sequence
aatgttgatactcctttagaagcag

SEQ ID NO: 253868 - DNA, 25 bp, Probe sequence
aattctaaactaccagcaccatcta

SEQ ID NO: 253869 - DNA, 25 bp, Probe sequence
aattccatttgacctacatagttac

SEQ ID NO: 253870 - DNA, 25 bp, Probe sequence
aattgttcgtacttctgaaagcagt

SEQ ID NO: 253871 - DNA, 25 bp, Probe sequence
gcgtcgttgcttgtgggaacaacac

SEQ ID NO: 253872 - DNA, 25 bp, Probe sequence
gctacaccaacagcattgcgtgcag

SEQ ID NO: 253873 - DNA, 25 bp, Probe sequence
gcaccatctattaatcctgttgacg

SEQ ID NO: 253874 - DNA, 25 bp, Probe sequence
gaaggcacctatactattgcaattg

SEQ ID NO: 253875 - DNA, 25 bp, Probe sequence
gaagtgaggcgcaagcagcagaatt

SEQ ID NO: 253876 - DNA, 25 bp, Probe sequence
gaagatttcacatttgctggttatt

SEQ ID NO: 253877 - DNA, 25 bp, Probe sequence
gaagacacagtcgtttctggttctg

SEQ ID NO: 253878 - DNA, 25 bp, Probe sequence
gaaattctttcacaatatactgcta

SEQ ID NO: 253879 - DNA, 25 bp, Probe sequence
gacactgctgttgaatctacgaatg

SEQ ID NO: 253880 - DNA, 25 bp, Probe sequence
gagcatgtcactaaaatttcagcga

SEQ ID NO: 253881 - DNA, 25 bp, Probe sequence
gatggtcattctcagtgtcaattcc

SEQ ID NO: 253882 - DNA, 25 bp, Probe sequence
gttgctgacttaaccattgacgagg

SEQ ID NO: 253883 - DNA, 25 bp, Probe sequence
gtaaatggtacgtcaggttcaactg

SEQ ID NO: 253884 - DNA, 25 bp, Probe sequence
gtcaactgtccgattcagaaaccaa

SEQ ID NO: 253885 - DNA, 25 bp, Probe sequence
gggaagtcaactttattcgtgcaaa

SEQ ID NO: 253886 - DNA, 25 bp, Probe sequence
ggcaaaccgcaagcagcagatatta

SEQ ID NO: 253887 - DNA, 25 bp, Probe sequence
tgttccgtgctatggctacaccaac

SEQ ID NO: 253888 - DNA, 25 bp, Probe sequence
tgcgtgcagcagttaaccaagatga

SEQ ID NO: 253889 - DNA, 25 bp, Probe sequence
tcaggtgtttgttcgagattctaga

SEQ ID NO: 253890 - DNA, 25 bp, Probe sequence
taaagacttactaccctatatcgaa

SEQ ID NO: 253891 - DNA, 25 bp, Probe sequence
tttctggttctgttcctcttaaaga

SEQ ID NO: 253892 - DNA, 25 bp, Probe sequence
ttaggcacttcaacactagcgctac

SEQ ID NO: 253893 - DNA, 25 bp, Probe sequence
ttcacagtgggtactgcgtcgttgc

SEQ ID NO: 253894 - DNA, 25 bp, Probe sequence
attcaagctctaacaaagattcaat

SEQ ID NO: 253895 - DNA, 25 bp, Probe sequence
atttgctggtttaggttctctatta

SEQ ID NO: 253896 - DNA, 25 bp, Probe sequence
atacttctgaaccaaagctcacgaa

SEQ ID NO: 253897 - DNA, 25 bp, Probe sequence
atggtacattatttggaacgttatt

SEQ ID NO: 253898 - DNA, 25 bp, Probe sequence
acttctgaaccaaagctcacgaacg

SEQ ID NO: 253899 - DNA, 25 bp, Probe sequence
acttctgaaagtaccaatacgacta

SEQ ID NO: 253900 - DNA, 25 bp, Probe sequence
acaactctgataacgaagataattc

SEQ ID NO: 253901 - DNA, 25 bp, Probe sequence
aacggagataattcaggtgctggag

SEQ ID NO: 253902 - DNA, 25 bp, Probe sequence
aacgaagataattcaagctctaaca

SEQ ID NO: 253903 - DNA, 25 bp, Probe sequence
aatcgattctgatgacaactctgat

SEQ ID NO: 253904 - DNA, 25 bp, Probe sequence
caaaatgaattaccagaaacgggtg

SEQ ID NO: 253905 - DNA, 25 bp, Probe sequence
cattatttggaacgttatttgctgg

SEQ ID NO: 253906 - DNA, 25 bp, Probe sequence
cttcagattctgatgacaactctgg

SEQ ID NO: 253907 - DNA, 25 bp, Probe sequence
ctgaaccaaagctcacgaacgttac

SEQ ID NO: 253908 - DNA, 25 bp, Probe sequence
ctgatgacaactctggtaacggaga

SEQ ID NO: 253909 - DNA, 25 bp, Probe sequence
cgattctgatgacaactctgataac

SEQ ID NO: 253910 - DNA, 25 bp, Probe sequence
ccaaagctcacgaacgttacagaca

SEQ ID NO: 253911 - DNA, 25 bp, Probe sequence
gctggtttaggttctctattattat

SEQ ID NO: 253912 - DNA, 25 bp, Probe sequence
gaaccaaagctcacgaacgttacag

SEQ ID NO: 253913 - DNA, 25 bp, Probe sequence
gaaagtaccaatacgactataatcg

SEQ ID NO: 253914 - DNA, 25 bp, Probe sequence
gacaactctggtaacggagataatt

SEQ ID NO: 253915 - DNA, 25 bp, Probe sequence
gactataatcgattctgatgacaac

SEQ ID NO: 253916 - DNA, 25 bp, Probe sequence
gataattcaggtgctggagacaatt

SEQ ID NO: 253917 - DNA, 25 bp, Probe sequence
gattcaattaatcaagactcaaatg

SEQ ID NO: 253918 - DNA, 25 bp, Probe sequence
gttatttgctggtttaggttctcta

SEQ ID NO: 253919 - DNA, 25 bp, Probe sequence
gtaccaatacgactataatcgattc

SEQ ID NO: 253920 - DNA, 25 bp, Probe sequence
ggtaacggagataattcaggtgctg

SEQ ID NO: 253921 - DNA, 25 bp, Probe sequence
ggagacacttcagattctgatgaca

SEQ ID NO: 253922 - DNA, 25 bp, Probe sequence
ggcaatacttctgaaagtaccaata

SEQ ID NO: 253923 - DNA, 25 bp, Probe sequence
tggaacgttatttgctggtttaggt

SEQ ID NO: 253924 - DNA, 25 bp, Probe sequence
tattattatttaccaaacgtcgtag

SEQ ID NO: 253925 - DNA, 25 bp, Probe sequence
ttaggttctctattattatttacca

SEQ ID NO: 253926 - DNA, 25 bp, Probe sequence
ttctgaaccaaagctcacgaacgtt

SEQ ID NO: 253927 - DNA, 25 bp, Probe sequence
ttctctattattatttaccaaacgt

SEQ ID NO: 253928 - DNA, 25 bp, Probe sequence
acctttaaattgtgaagcttgtggc

SEQ ID NO: 253929 - DNA, 25 bp, Probe sequence
atgttcctaagcaagaaggctcggc

SEQ ID NO: 253930 - DNA, 25 bp, Probe sequence
atgtaacgcgcacacaattcataaa

SEQ ID NO: 253931 - DNA, 25 bp, Probe sequence
aggctcggcaacaagattaacctta

SEQ ID NO: 253932 - DNA, 25 bp, Probe sequence
agaaggctcggcaacaagattaacc

SEQ ID NO: 253933 - DNA, 25 bp, Probe sequence
agcaagaaggctcggcaacaagatt

SEQ ID NO: 253934 - DNA, 25 bp, Probe sequence
aaattgtgaagcttgtggcaataga

SEQ ID NO: 253935 - DNA, 25 bp, Probe sequence
aaatgtaacgcgcacacaattcata

SEQ ID NO: 253936 - DNA, 25 bp, Probe sequence
aaaatgtaacgcgcacacaattcat

SEQ ID NO: 253937 - DNA, 25 bp, Probe sequence
aacgcgcacacaattcataaagaat

SEQ ID NO: 253938 - DNA, 25 bp, Probe sequence
aagaaggctcggcaacaagattaac

SEQ ID NO: 253939 - DNA, 25 bp, Probe sequence
aatgtaacgcgcacacaattcataa

SEQ ID NO: 253940 - DNA, 25 bp, Probe sequence
aatacctttaaattgtgaagcttgt

SEQ ID NO: 253941 - DNA, 25 bp, Probe sequence
ccttaaagaaatattgtccaaaatg

SEQ ID NO: 253942 - DNA, 25 bp, Probe sequence
ctttaaattgtgaagcttgtggcaa

SEQ ID NO: 253943 - DNA, 25 bp, Probe sequence
ctaagcaagaaggctcggcaacaag

SEQ ID NO: 253944 - DNA, 25 bp, Probe sequence
ccaaaatgtaacgcgcacacaattc

SEQ ID NO: 253945 - DNA, 25 bp, Probe sequence
gctcggcaacaagattaaccttaaa

SEQ ID NO: 253946 - DNA, 25 bp, Probe sequence
gcgcacacaattcataaagaatcga

SEQ ID NO: 253947 - DNA, 25 bp, Probe sequence
gcaagaaggctcggcaacaagatta

SEQ ID NO: 253948 - DNA, 25 bp, Probe sequence
gaaggctcggcaacaagattaacct

SEQ ID NO: 253949 - DNA, 25 bp, Probe sequence
gaagcttgtggcaatagaaattata

SEQ ID NO: 253950 - DNA, 25 bp, Probe sequence
gaaattataatgttcctaagcaaga

SEQ ID NO: 253951 - DNA, 25 bp, Probe sequence
gttcctaagcaagaaggctcggcaa

SEQ ID NO: 253952 - DNA, 25 bp, Probe sequence
gtaacgcgcacacaattcataaaga

SEQ ID NO: 253953 - DNA, 25 bp, Probe sequence
gtccaaaatgtaacgcgcacacaat

SEQ ID NO: 253954 - DNA, 25 bp, Probe sequence
ggctcggcaacaagattaaccttaa

SEQ ID NO: 253955 - DNA, 25 bp, Probe sequence
tgtccaaaatgtaacgcgcacacaa

SEQ ID NO: 253956 - DNA, 25 bp, Probe sequence
tgttcctaagcaagaaggctcggca

SEQ ID NO: 253957 - DNA, 25 bp, Probe sequence
tcctaagcaagaaggctcggcaaca

SEQ ID NO: 253958 - DNA, 25 bp, Probe sequence
tcggcaacaagattaaccttaaaga

SEQ ID NO: 253959 - DNA, 25 bp, Probe sequence
taacgcgcacacaattcataaagaa

SEQ ID NO: 253960 - DNA, 25 bp, Probe sequence
ttcctaagcaagaaggctcggcaac

SEQ ID NO: 253961 - DNA, 25 bp, Probe sequence
ttgtgaagcttgtggcaatagaaat

SEQ ID NO: 253962 - DNA, 25 bp, Probe sequence
ataactggctttacgcgagaagatt

SEQ ID NO: 253963 - DNA, 25 bp, Probe sequence
atcaagtataactggctttacgcga

SEQ ID NO: 253964 - DNA, 25 bp, Probe sequence
agtacacaactagttagtggtgcag

SEQ ID NO: 253965 - DNA, 25 bp, Probe sequence
agactcaacgatatctaaatctgta

SEQ ID NO: 253966 - DNA, 25 bp, Probe sequence
agaagttcttttgcctagagggaca

SEQ ID NO: 253967 - DNA, 25 bp, Probe sequence
acgcgagaagatttacatatgttac

SEQ ID NO: 253968 - DNA, 25 bp, Probe sequence
acgatatctaaatctgtaacaccag

SEQ ID NO: 253969 - DNA, 25 bp, Probe sequence
actcctctaagatcagcaaatggtg

SEQ ID NO: 253970 - DNA, 25 bp, Probe sequence
aagcagcatatattgattctaaaga

SEQ ID NO: 253971 - DNA, 25 bp, Probe sequence
aagagttaacagcatacccaggtca

SEQ ID NO: 253972 - DNA, 25 bp, Probe sequence
aagtcagccaagtattcttctaaag

SEQ ID NO: 253973 - DNA, 25 bp, Probe sequence
aatagttcacccataaatactcctc

SEQ ID NO: 253974 - DNA, 25 bp, Probe sequence
gcatacccaggtcaacaagaagttc

SEQ ID NO: 253975 - DNA, 25 bp, Probe sequence
gcaggttagacaattagactcaacg

SEQ ID NO: 253976 - DNA, 25 bp, Probe sequence
gcagcactagcaggtaggccaattg

SEQ ID NO: 253977 - DNA, 25 bp, Probe sequence
gaatatgctgtaggcagtgttaaac

SEQ ID NO: 253978 - DNA, 25 bp, Probe sequence
gaagctactaaatggggaaactcat

SEQ ID NO: 253979 - DNA, 25 bp, Probe sequence
gaagcgcttgtgtcaaaactaaata

SEQ ID NO: 253980 - DNA, 25 bp, Probe sequence
gaaaatggctactctagtacacaac

SEQ ID NO: 253981 - DNA, 25 bp, Probe sequence
gaaagataattataactgctgtagt

SEQ ID NO: 253982 - DNA, 25 bp, Probe sequence
gattcagtctatgtatacagattat

SEQ ID NO: 253983 - DNA, 25 bp, Probe sequence
gtaacaccagattcagtctatgtat

SEQ ID NO: 253984 - DNA, 25 bp, Probe sequence
gtcaatataatgaagcgcttgtgtc

SEQ ID NO: 253985 - DNA, 25 bp, Probe sequence
gtggtgcagcactagcaggtaggcc

SEQ ID NO: 253986 - DNA, 25 bp, Probe sequence
ggtgacgtgaacaaattatccgaaa

SEQ ID NO: 253987 - DNA, 25 bp, Probe sequence
ggaaactcattaataaagtcagcca

SEQ ID NO: 253988 - DNA, 25 bp, Probe sequence
tacaacaaactaacaatggtcaata

SEQ ID NO: 253989 - DNA, 25 bp, Probe sequence
tacctaaaggtactaaagcagcata

SEQ ID NO: 253990 - DNA, 25 bp, Probe sequence
tagcaggtaggccaattgaattaaa

SEQ ID NO: 253991 - DNA, 25 bp, Probe sequence
taggcagtgttaaactttctgataa

SEQ ID NO: 253992 - DNA, 25 bp, Probe sequence
tatccgaaaacattcaagagcaggt

SEQ ID NO: 253993 - DNA, 25 bp, Probe sequence
ttttacagacttagttgaagctact

SEQ ID NO: 253994 - DNA, 25 bp, Probe sequence
ttcacccataaatactcctctaaga

SEQ ID NO: 253995 - DNA, 25 bp, Probe sequence
ttgcctagagggacagaatatgctg

SEQ ID NO: 253996 - DNA, 25 bp, Probe sequence
atatcttgtgttttgtatgcaaatg

SEQ ID NO: 253997 - DNA, 25 bp, Probe sequence
atcttgtgttttgtatgcaaatgct

SEQ ID NO: 253998 - DNA, 25 bp, Probe sequence
atgcaaatgctttatttatgaagaa

SEQ ID NO: 253999 - DNA, 25 bp, Probe sequence
agacacaatatcttgtgttttgtat

SEQ ID NO: 254000 - DNA, 25 bp, Probe sequence
acaatatcttgtgttttgtatgcaa

SEQ ID NO: 254001 - DNA, 25 bp, Probe sequence
aaacgaaaaagacacaatatcttgt

SEQ ID NO: 254002 - DNA, 25 bp, Probe sequence
aaagacacaatatcttgtgttttgt

SEQ ID NO: 254003 - DNA, 25 bp, Probe sequence
aaaagacacaatatcttgtgttttg

SEQ ID NO: 254004 - DNA, 25 bp, Probe sequence
aacacagaaatttaatagttattat

SEQ ID NO: 254005 - DNA, 25 bp, Probe sequence
aacgaaaaagacacaatatcttgtg

SEQ ID NO: 254006 - DNA, 25 bp, Probe sequence
aagacacaatatcttgtgttttgta

SEQ ID NO: 254007 - DNA, 25 bp, Probe sequence
aatgctttatttatgaagaaattac

SEQ ID NO: 254008 - DNA, 25 bp, Probe sequence
aatatcttgtgttttgtatgcaaat

SEQ ID NO: 254009 - DNA, 25 bp, Probe sequence
caatatcttgtgttttgtatgcaaa

SEQ ID NO: 254010 - DNA, 25 bp, Probe sequence
cacaatatcttgtgttttgtatgca

SEQ ID NO: 254011 - DNA, 25 bp, Probe sequence
caaatgctttatttatgaagaaatt

SEQ ID NO: 254012 - DNA, 25 bp, Probe sequence
cttgtgttttgtatgcaaatgcttt

SEQ ID NO: 254013 - DNA, 25 bp, Probe sequence
gcaaatgctttatttatgaagaaat

SEQ ID NO: 254014 - DNA, 25 bp, Probe sequence
gacacaatatcttgtgttttgtatg

SEQ ID NO: 254015 - DNA, 25 bp, Probe sequence
gttttgtatgcaaatgctttattta

SEQ ID NO: 254016 - DNA, 25 bp, Probe sequence
gtatgcaaatgctttatttatgaag

SEQ ID NO: 254017 - DNA, 25 bp, Probe sequence
gtgttttgtatgcaaatgctttatt

SEQ ID NO: 254018 - DNA, 25 bp, Probe sequence
tggttaaacgaaaaagacacaatat

SEQ ID NO: 254019 - DNA, 25 bp, Probe sequence
tgtgttttgtatgcaaatgctttat

SEQ ID NO: 254020 - DNA, 25 bp, Probe sequence
tgtatgcaaatgctttatttatgaa

SEQ ID NO: 254021 - DNA, 25 bp, Probe sequence
tgttttgtatgcaaatgctttattt

SEQ ID NO: 254022 - DNA, 25 bp, Probe sequence
tgcaaatgctttatttatgaagaaa

SEQ ID NO: 254023 - DNA, 25 bp, Probe sequence
tcttgtgttttgtatgcaaatgctt

SEQ ID NO: 254024 - DNA, 25 bp, Probe sequence
tatgcaaatgctttatttatgaaga

SEQ ID NO: 254025 - DNA, 25 bp, Probe sequence
tatcttgtgttttgtatgcaaatgc

SEQ ID NO: 254026 - DNA, 25 bp, Probe sequence
tttgtatgcaaatgctttatttatg

SEQ ID NO: 254027 - DNA, 25 bp, Probe sequence
ttttgtatgcaaatgctttatttat

SEQ ID NO: 254028 - DNA, 25 bp, Probe sequence
ttgtatgcaaatgctttatttatga

SEQ ID NO: 254029 - DNA, 25 bp, Probe sequence
ttgtgttttgtatgcaaatgcttta

SEQ ID NO: 254030 - DNA, 25 bp, Probe sequence
atataatgatataagactttcttta

SEQ ID NO: 254031 - DNA, 25 bp, Probe sequence
atatgatacaccaatttcagacact

SEQ ID NO: 254032 - DNA, 25 bp, Probe sequence
atgagttctttctataattataatt

SEQ ID NO: 254033 - DNA, 25 bp, Probe sequence
agtttatagtcttgtctgtgaagtt

SEQ ID NO: 254034 - DNA, 25 bp, Probe sequence
agaagcgatagatcagtttcgtaaa

SEQ ID NO: 254035 - DNA, 25 bp, Probe sequence
acaccaatttcagacacttattact

SEQ ID NO: 254036 - DNA, 25 bp, Probe sequence
acactttttgcatcatactatggtc

SEQ ID NO: 254037 - DNA, 25 bp, Probe sequence
aaattagatttgatacttggtgata

SEQ ID NO: 254038 - DNA, 25 bp, Probe sequence
aaatttaatccagatatacatgatt

SEQ ID NO: 254039 - DNA, 25 bp, Probe sequence
aaatgctaaggatttacgtgctaaa

SEQ ID NO: 254040 - DNA, 25 bp, Probe sequence
aaaatcctgatgacaattcgaaaat

SEQ ID NO: 254041 - DNA, 25 bp, Probe sequence
aaaatctagagtcacaatttgctga

SEQ ID NO: 254042 - DNA, 25 bp, Probe sequence
aagatgccaaagacaaactgatgac

SEQ ID NO: 254043 - DNA, 25 bp, Probe sequence
gcatcatactatggtcatgacaaat

SEQ ID NO: 254044 - DNA, 25 bp, Probe sequence
gcaattgatttattagaggattatc

SEQ ID NO: 254045 - DNA, 25 bp, Probe sequence
gaaaaagctacagatgaagtttata

SEQ ID NO: 254046 - DNA, 25 bp, Probe sequence
gacaattcgaaaatgagttctttct

SEQ ID NO: 254047 - DNA, 25 bp, Probe sequence
gacaaactgatgactaggattttag

SEQ ID NO: 254048 - DNA, 25 bp, Probe sequence
gacacactttttgcatcatactatg

SEQ ID NO: 254049 - DNA, 25 bp, Probe sequence
gagaagcagtcgcaaaggctgacga

SEQ ID NO: 254050 - DNA, 25 bp, Probe sequence
gatgatatacagtcgaaaaagttag

SEQ ID NO: 254051 - DNA, 25 bp, Probe sequence
gatgactaggattttaggtgaagat

SEQ ID NO: 254052 - DNA, 25 bp, Probe sequence
gatgaagtttatagtcttgtctgtg

SEQ ID NO: 254053 - DNA, 25 bp, Probe sequence
gatcagtttcgtaaagatgtagatg

SEQ ID NO: 254054 - DNA, 25 bp, Probe sequence
gatacaccaatttcagacacttatt

SEQ ID NO: 254055 - DNA, 25 bp, Probe sequence
gttgacacactttttgcatcatact

SEQ ID NO: 254056 - DNA, 25 bp, Probe sequence
gtcttgtctgtgaagttgacacact

SEQ ID NO: 254057 - DNA, 25 bp, Probe sequence
gtgaagttgacacactttttgcatc

SEQ ID NO: 254058 - DNA, 25 bp, Probe sequence
ggatttacgtgctaaattagatttg

SEQ ID NO: 254059 - DNA, 25 bp, Probe sequence
ggaaactgatcaaaatagaccatca

SEQ ID NO: 254060 - DNA, 25 bp, Probe sequence
tcaaaatagaccatcaaacataact

SEQ ID NO: 254061 - DNA, 25 bp, Probe sequence
tagagtcacaatttgctgaagcaat

SEQ ID NO: 254062 - DNA, 25 bp, Probe sequence
tttgcatcatactatggtcatgaca

SEQ ID NO: 254063 - DNA, 25 bp, Probe sequence
ttcagacacttattactggggagta

SEQ ID NO: 254064 - DNA, 25 bp, Probe sequence
attccatgactttgatatatataga

SEQ ID NO: 254065 - DNA, 25 bp, Probe sequence
attcatgattataccaacaagcctg

SEQ ID NO: 254066 - DNA, 25 bp, Probe sequence
atatgattcgccaatttcagactgg

SEQ ID NO: 254067 - DNA, 25 bp, Probe sequence
atatggtcataatgcgaaagagtta

SEQ ID NO: 254068 - DNA, 25 bp, Probe sequence
atagatacactatacgcagcatatt

SEQ ID NO: 254069 - DNA, 25 bp, Probe sequence
atacgcagcatatttcaatcataat

SEQ ID NO: 254070 - DNA, 25 bp, Probe sequence
atgcgaaagagttaagagcgaagtt

SEQ ID NO: 254071 - DNA, 25 bp, Probe sequence
atgactttgtttgtgagatagatac

SEQ ID NO: 254072 - DNA, 25 bp, Probe sequence
atgattataccaacaagcctgaaaa

SEQ ID NO: 254073 - DNA, 25 bp, Probe sequence
atgattcgccaatttcagactggta

SEQ ID NO: 254074 - DNA, 25 bp, Probe sequence
agatattattcttggtgatgtaaaa

SEQ ID NO: 254075 - DNA, 25 bp, Probe sequence
agatcctattagaattacaaatgaa

SEQ ID NO: 254076 - DNA, 25 bp, Probe sequence
agaccatcactaagcaataattata

SEQ ID NO: 254077 - DNA, 25 bp, Probe sequence
acataacagaccatcactaagcaat

SEQ ID NO: 254078 - DNA, 25 bp, Probe sequence
aaatataatcctgatattcatgatt

SEQ ID NO: 254079 - DNA, 25 bp, Probe sequence
aaatgactaaattccatgactttga

SEQ ID NO: 254080 - DNA, 25 bp, Probe sequence
aacagaccatcactaagcaataatt

SEQ ID NO: 254081 - DNA, 25 bp, Probe sequence
aagatttagtaccatacaatgaaga

SEQ ID NO: 254082 - DNA, 25 bp, Probe sequence
aatacaatgagatacatcaatctat

SEQ ID NO: 254083 - DNA, 25 bp, Probe sequence
cagactggtatttaagtagtgtttt

SEQ ID NO: 254084 - DNA, 25 bp, Probe sequence
gcagcatatttcaatcataatcaat

SEQ ID NO: 254085 - DNA, 25 bp, Probe sequence
gaagaaactgaaaagcgtgtaacta

SEQ ID NO: 254086 - DNA, 25 bp, Probe sequence
gaagctgttgacgattttaatagtg

SEQ ID NO: 254087 - DNA, 25 bp, Probe sequence
gaaaagcgtgtaactaacggtatat

SEQ ID NO: 254088 - DNA, 25 bp, Probe sequence
gactaaattccatgactttgatata

SEQ ID NO: 254089 - DNA, 25 bp, Probe sequence
gatggatgacttaaattcgattatt

SEQ ID NO: 254090 - DNA, 25 bp, Probe sequence
gtaactaacggtatatatgactttg

SEQ ID NO: 254091 - DNA, 25 bp, Probe sequence
gtgagatagatacactatacgcagc

SEQ ID NO: 254092 - DNA, 25 bp, Probe sequence
ggtgatgtaaaagatcctattagaa

SEQ ID NO: 254093 - DNA, 25 bp, Probe sequence
ggtatatatgactttgtttgtgaga

SEQ ID NO: 254094 - DNA, 25 bp, Probe sequence
ggaacataacagaccatcactaagc

SEQ ID NO: 254095 - DNA, 25 bp, Probe sequence
tgaataggttaggggatcaaattta

SEQ ID NO: 254096 - DNA, 25 bp, Probe sequence
tagtgttttgaataggttaggggat

SEQ ID NO: 254097 - DNA, 25 bp, Probe sequence
ttataccaacaagcctgaaaataga

SEQ ID NO: 254098 - DNA, 25 bp, Probe sequence
attgatcgtcaacttatttatatag

SEQ ID NO: 254099 - DNA, 25 bp, Probe sequence
atcacactgacgcagctagacctaa

SEQ ID NO: 254100 - DNA, 25 bp, Probe sequence
atggctgataaaatggatgctaaaa

SEQ ID NO: 254101 - DNA, 25 bp, Probe sequence
aggtaactattctggaggtggtaag

SEQ ID NO: 254102 - DNA, 25 bp, Probe sequence
agctattggtggtttaagtctgata

SEQ ID NO: 254103 - DNA, 25 bp, Probe sequence
agctagacctaattttcaagttgta

SEQ ID NO: 254104 - DNA, 25 bp, Probe sequence
agcgtatagacaataagttagattc

SEQ ID NO: 254105 - DNA, 25 bp, Probe sequence
acactgacgcagctagacctaattt

SEQ ID NO: 254106 - DNA, 25 bp, Probe sequence
acaacattcgccagaataatggtaa

SEQ ID NO: 254107 - DNA, 25 bp, Probe sequence
aaaaagtatcacactgacgcagcta

SEQ ID NO: 254108 - DNA, 25 bp, Probe sequence
aagcggtttagaagctaggcagaca

SEQ ID NO: 254109 - DNA, 25 bp, Probe sequence
aagtatcacactgacgcagctagac

SEQ ID NO: 254110 - DNA, 25 bp, Probe sequence
aatggatgctaaaataagcggttta

SEQ ID NO: 254111 - DNA, 25 bp, Probe sequence
aatctttacttaacaacattcgcca

SEQ ID NO: 254112 - DNA, 25 bp, Probe sequence
ctttacttaacaacattcgccagaa

SEQ ID NO: 254113 - DNA, 25 bp, Probe sequence
ctgacgcagctagacctaattttca

SEQ ID NO: 254114 - DNA, 25 bp, Probe sequence
gctataagtacagctattggtggtt

SEQ ID NO: 254115 - DNA, 25 bp, Probe sequence
gaagctaggcagacaaaatggtttg

SEQ ID NO: 254116 - DNA, 25 bp, Probe sequence
gaacagtttgaaaagcgtatagaca

SEQ ID NO: 254117 - DNA, 25 bp, Probe sequence
gaaaaaggtaactattctggaggtg

SEQ ID NO: 254118 - DNA, 25 bp, Probe sequence
gacgcagctagacctaattttcaag

SEQ ID NO: 254119 - DNA, 25 bp, Probe sequence
gacctaattttcaagttgtagatga

SEQ ID NO: 254120 - DNA, 25 bp, Probe sequence
gtatcacactgacgcagctagacct

SEQ ID NO: 254121 - DNA, 25 bp, Probe sequence
gattctttacctgacagaatggctg

SEQ ID NO: 254122 - DNA, 25 bp, Probe sequence
gttagattctttacctgacagaatg

SEQ ID NO: 254123 - DNA, 25 bp, Probe sequence
gtaggagcagtaggattgatcgtca

SEQ ID NO: 254124 - DNA, 25 bp, Probe sequence
gtaggattgatcgtcaacttattta

SEQ ID NO: 254125 - DNA, 25 bp, Probe sequence
gtacagctattggtggtttaagtct

SEQ ID NO: 254126 - DNA, 25 bp, Probe sequence
gtggtttaagtctgatagtaggagc

SEQ ID NO: 254127 - DNA, 25 bp, Probe sequence
ggtttgtaggaatagctataagtac

SEQ ID NO: 254128 - DNA, 25 bp, Probe sequence
ggagcagtaggattgatcgtcaact

SEQ ID NO: 254129 - DNA, 25 bp, Probe sequence
ggaggtggtaagatgaatggaaaat

SEQ ID NO: 254130 - DNA, 25 bp, Probe sequence
tttacctgacagaatggctgataaa

SEQ ID NO: 254131 - DNA, 25 bp, Probe sequence
ttacttaacaacattcgccagaata

SEQ ID NO: 254132 - DNA, 25 bp, Probe sequence
attaatcgatgagcctataacaagc

SEQ ID NO: 254133 - DNA, 25 bp, Probe sequence
ataccttcacaatatcttttggaat

SEQ ID NO: 254134 - DNA, 25 bp, Probe sequence
atccaagtaacaatttattaatcga

SEQ ID NO: 254135 - DNA, 25 bp, Probe sequence
agacttgttattttaacgtcatgtt

SEQ ID NO: 254136 - DNA, 25 bp, Probe sequence
agcactcagacttgttattttaacg

SEQ ID NO: 254137 - DNA, 25 bp, Probe sequence
agcatttcgctgtttaatgttccta

SEQ ID NO: 254138 - DNA, 25 bp, Probe sequence
acgtcatgttaaatcaggagttaga

SEQ ID NO: 254139 - DNA, 25 bp, Probe sequence
aacgtgctaacggacttgtagattt

SEQ ID NO: 254140 - DNA, 25 bp, Probe sequence
aatgttcctagtcaatataccttca

SEQ ID NO: 254141 - DNA, 25 bp, Probe sequence
aatcacctctaatagagtattcaac

SEQ ID NO: 254142 - DNA, 25 bp, Probe sequence
caaccgttacattgaataatttcct

SEQ ID NO: 254143 - DNA, 25 bp, Probe sequence
cattgaataatttccttttcgaaga

SEQ ID NO: 254144 - DNA, 25 bp, Probe sequence
cttcacaatatcttttggaatctca

SEQ ID NO: 254145 - DNA, 25 bp, Probe sequence
cgctgtttaatgttcctagtcaata

SEQ ID NO: 254146 - DNA, 25 bp, Probe sequence
gaagtgaaaaacaaacgtgctaacg

SEQ ID NO: 254147 - DNA, 25 bp, Probe sequence
gaagttgggcgaaagcactcagact

SEQ ID NO: 254148 - DNA, 25 bp, Probe sequence
gaaagcactcagacttgttatttta

SEQ ID NO: 254149 - DNA, 25 bp, Probe sequence
gaaattgttaacgcacctttatata

SEQ ID NO: 254150 - DNA, 25 bp, Probe sequence
gagcctataacaagcatttcgctgt

SEQ ID NO: 254151 - DNA, 25 bp, Probe sequence
gagtattcaacaatccaagtaacaa

SEQ ID NO: 254152 - DNA, 25 bp, Probe sequence
gatgagcctataacaagcatttcgc

SEQ ID NO: 254153 - DNA, 25 bp, Probe sequence
gatctaaatgatgtacaaactataa

SEQ ID NO: 254154 - DNA, 25 bp, Probe sequence
gattttgtttcaaccgttacattga

SEQ ID NO: 254155 - DNA, 25 bp, Probe sequence
gattggataatcacctctaatagag

SEQ ID NO: 254156 - DNA, 25 bp, Probe sequence
gttcctagtcaatataccttcacaa

SEQ ID NO: 254157 - DNA, 25 bp, Probe sequence
gttgggcgaaagcactcagacttgt

SEQ ID NO: 254158 - DNA, 25 bp, Probe sequence
gttaacgcacctttatatatagata

SEQ ID NO: 254159 - DNA, 25 bp, Probe sequence
gtagattttgtttcaaccgttacat

SEQ ID NO: 254160 - DNA, 25 bp, Probe sequence
gtcaatataccttcacaatatcttt

SEQ ID NO: 254161 - DNA, 25 bp, Probe sequence
gggcgaaagcactcagacttgttat

SEQ ID NO: 254162 - DNA, 25 bp, Probe sequence
ggacttgtagattttgtttcaaccg

SEQ ID NO: 254163 - DNA, 25 bp, Probe sequence
tcctagtcaatataccttcacaata

SEQ ID NO: 254164 - DNA, 25 bp, Probe sequence
ttttcgaagaaacaggtaatcatta

SEQ ID NO: 254165 - DNA, 25 bp, Probe sequence
tttcgctgtttaatgttcctagtca

SEQ ID NO: 254166 - DNA, 25 bp, Probe sequence
atggttgaaatccccttttatacag

SEQ ID NO: 254167 - DNA, 25 bp, Probe sequence
agaagaagaactgacttataggttg

SEQ ID NO: 254168 - DNA, 25 bp, Probe sequence
agaagaactgacttataggttgaat

SEQ ID NO: 254169 - DNA, 25 bp, Probe sequence
agaactgacttataggttgaataat

SEQ ID NO: 254170 - DNA, 25 bp, Probe sequence
actgacttataggttgaataatggt

SEQ ID NO: 254171 - DNA, 25 bp, Probe sequence
acagaagaagaactgacttataggt

SEQ ID NO: 254172 - DNA, 25 bp, Probe sequence
aaagaagttgacattaacattgaag

SEQ ID NO: 254173 - DNA, 25 bp, Probe sequence
aagaagaactgacttataggttgaa

SEQ ID NO: 254174 - DNA, 25 bp, Probe sequence
aagaagttgacattaacattgaaga

SEQ ID NO: 254175 - DNA, 25 bp, Probe sequence
aagaactgacttataggttgaataa

SEQ ID NO: 254176 - DNA, 25 bp, Probe sequence
aagttgacattaacattgaagagtg

SEQ ID NO: 254177 - DNA, 25 bp, Probe sequence
cagaagaagaactgacttataggtt

SEQ ID NO: 254178 - DNA, 25 bp, Probe sequence
gaagttgacattaacattgaagagt

SEQ ID NO: 254179 - DNA, 25 bp, Probe sequence
gaagaagaactgacttataggttga

SEQ ID NO: 254180 - DNA, 25 bp, Probe sequence
gaagaactgacttataggttgaata

SEQ ID NO: 254181 - DNA, 25 bp, Probe sequence
gaactgacttataggttgaataatg

SEQ ID NO: 254182 - DNA, 25 bp, Probe sequence
gaacttgaagaacaggagtcgaaaa

SEQ ID NO: 254183 - DNA, 25 bp, Probe sequence
gaaatccccttttatacagaagaag

SEQ ID NO: 254184 - DNA, 25 bp, Probe sequence
gacattaacattgaagagtgggaaa

SEQ ID NO: 254185 - DNA, 25 bp, Probe sequence
gagtgggaaatggttgaaatcccct

SEQ ID NO: 254186 - DNA, 25 bp, Probe sequence
gttgaaatccccttttatacagaag

SEQ ID NO: 254187 - DNA, 25 bp, Probe sequence
gttgacattaacattgaagagtggg

SEQ ID NO: 254188 - DNA, 25 bp, Probe sequence
gttgaataatggtttacctataact

SEQ ID NO: 254189 - DNA, 25 bp, Probe sequence
tggttgaaatccccttttatacaga

SEQ ID NO: 254190 - DNA, 25 bp, Probe sequence
tgaaatccccttttatacagaagaa

SEQ ID NO: 254191 - DNA, 25 bp, Probe sequence
tgacattaacattgaagagtgggaa

SEQ ID NO: 254192 - DNA, 25 bp, Probe sequence
tgaacttgaagaacaggagtcgaaa

SEQ ID NO: 254193 - DNA, 25 bp, Probe sequence
tgaataatggtttacctataactaa

SEQ ID NO: 254194 - DNA, 25 bp, Probe sequence
tgaagaacaggagtcgaaaaaatga

SEQ ID NO: 254195 - DNA, 25 bp, Probe sequence
tacctataactaaaagtgaacttga

SEQ ID NO: 254196 - DNA, 25 bp, Probe sequence
ttacctataactaaaagtgaacttg

SEQ ID NO: 254197 - DNA, 25 bp, Probe sequence
ttgacattaacattgaagagtggga

SEQ ID NO: 254198 - DNA, 25 bp, Probe sequence
ttgaataatggtttacctataacta

SEQ ID NO: 254199 - DNA, 25 bp, Probe sequence
ttgaaatccccttttatacagaaga

SEQ ID NO: 254200 - DNA, 25 bp, Probe sequence
attcatctctcggtatatataatcc

SEQ ID NO: 254201 - DNA, 25 bp, Probe sequence
attttgtcgtcgctaatgactcgtc

SEQ ID NO: 254202 - DNA, 25 bp, Probe sequence
atagctaattcgtcatcagagtttt

SEQ ID NO: 254203 - DNA, 25 bp, Probe sequence
atctctaccgattcttacgagcata

SEQ ID NO: 254204 - DNA, 25 bp, Probe sequence
atctctcggtatatataatccaagt

SEQ ID NO: 254205 - DNA, 25 bp, Probe sequence
aggtctatctgcatactcaattttt

SEQ ID NO: 254206 - DNA, 25 bp, Probe sequence
agttcagttttgttattagcgatct

SEQ ID NO: 254207 - DNA, 25 bp, Probe sequence
agttatttgcatgctccaatcgata

SEQ ID NO: 254208 - DNA, 25 bp, Probe sequence
acctgcgtttataaagattgtttct

SEQ ID NO: 254209 - DNA, 25 bp, Probe sequence
aaagtataagttaatctctaccgat

SEQ ID NO: 254210 - DNA, 25 bp, Probe sequence
aaaccagaagttatgatagctaatt

SEQ ID NO: 254211 - DNA, 25 bp, Probe sequence
aacgtagtattggaatctgatgaat

SEQ ID NO: 254212 - DNA, 25 bp, Probe sequence
aagttaatctctaccgattcttacg

SEQ ID NO: 254213 - DNA, 25 bp, Probe sequence
aattcgaattagaacctgcgtttat

SEQ ID NO: 254214 - DNA, 25 bp, Probe sequence
aattcgtcatcagagtttttatata

SEQ ID NO: 254215 - DNA, 25 bp, Probe sequence
caatctactttgttttcaaacgttg

SEQ ID NO: 254216 - DNA, 25 bp, Probe sequence
ctaccgattcttacgagcataatta

SEQ ID NO: 254217 - DNA, 25 bp, Probe sequence
ctcgttctcaaaataagttcagttt

SEQ ID NO: 254218 - DNA, 25 bp, Probe sequence
gctttaggtctatctgcatactcaa

SEQ ID NO: 254219 - DNA, 25 bp, Probe sequence
gcttttctagctttaggtctatctg

SEQ ID NO: 254220 - DNA, 25 bp, Probe sequence
gcatgctccaatcgataaacaatta

SEQ ID NO: 254221 - DNA, 25 bp, Probe sequence
gactcgtctagaactcatactttag

SEQ ID NO: 254222 - DNA, 25 bp, Probe sequence
gatgaatattcatctctcggtatat

SEQ ID NO: 254223 - DNA, 25 bp, Probe sequence
gattgtttctaatcaacgaataaac

SEQ ID NO: 254224 - DNA, 25 bp, Probe sequence
gtagaattaaattttgtcgtcgcta

SEQ ID NO: 254225 - DNA, 25 bp, Probe sequence
gtcgctaatgactcgtctagaactc

SEQ ID NO: 254226 - DNA, 25 bp, Probe sequence
ggaattcatacaatctactttgttt

SEQ ID NO: 254227 - DNA, 25 bp, Probe sequence
tgtcgtcgctaatgactcgtctaga

SEQ ID NO: 254228 - DNA, 25 bp, Probe sequence
tcaattttttatactcgttctcaaa

SEQ ID NO: 254229 - DNA, 25 bp, Probe sequence
taatccaagttatttgcatgctcca

SEQ ID NO: 254230 - DNA, 25 bp, Probe sequence
taacacctattaacgtagtattgga

SEQ ID NO: 254231 - DNA, 25 bp, Probe sequence
tactcaattttttatactcgttctc

SEQ ID NO: 254232 - DNA, 25 bp, Probe sequence
tttcaaacgttgtagcttttctagc

SEQ ID NO: 254233 - DNA, 25 bp, Probe sequence
ttagcgatcttaatttctactatga

SEQ ID NO: 254234 - DNA, 25 bp, Probe sequence
atgccttccggaattagaaacacca

SEQ ID NO: 254235 - DNA, 25 bp, Probe sequence
atgtataaggactattcttcgttag

SEQ ID NO: 254236 - DNA, 25 bp, Probe sequence
agatacggctttcagccttttgcgt

SEQ ID NO: 254237 - DNA, 25 bp, Probe sequence
agaaacaccatgttgttattcataa

SEQ ID NO: 254238 - DNA, 25 bp, Probe sequence
acctactccagctctaaaactgact

SEQ ID NO: 254239 - DNA, 25 bp, Probe sequence
aaatccctgaattttcaaactcatt

SEQ ID NO: 254240 - DNA, 25 bp, Probe sequence
aaatctatccgtcgaatcaaatggg

SEQ ID NO: 254241 - DNA, 25 bp, Probe sequence
aaatccaagagttatcacacccgct

SEQ ID NO: 254242 - DNA, 25 bp, Probe sequence
aaacacgcttattaacgctaaatct

SEQ ID NO: 254243 - DNA, 25 bp, Probe sequence
aacacatgacacaagtacagaccta

SEQ ID NO: 254244 - DNA, 25 bp, Probe sequence
aactgactaacatcgagcatttaac

SEQ ID NO: 254245 - DNA, 25 bp, Probe sequence
aatttcagagcgtagttccgttatt

SEQ ID NO: 254246 - DNA, 25 bp, Probe sequence
ctttcagccttttgcgttacgaata

SEQ ID NO: 254247 - DNA, 25 bp, Probe sequence
gccttttataacttttcttgcaaat

SEQ ID NO: 254248 - DNA, 25 bp, Probe sequence
gctacaagcttttctaacagccctt

SEQ ID NO: 254249 - DNA, 25 bp, Probe sequence
gcatttaacaactcttagtcgtact

SEQ ID NO: 254250 - DNA, 25 bp, Probe sequence
gcaaatgaacttttaccttttatgc

SEQ ID NO: 254251 - DNA, 25 bp, Probe sequence
gcaatactatagatacggctttcag

SEQ ID NO: 254252 - DNA, 25 bp, Probe sequence
gaattttcaaactcattattttctg

SEQ ID NO: 254253 - DNA, 25 bp, Probe sequence
gagcgtagttccgttattcaaaatt

SEQ ID NO: 254254 - DNA, 25 bp, Probe sequence
gagaagataaaaagcgcaaccgaat

SEQ ID NO: 254255 - DNA, 25 bp, Probe sequence
gtaaatatacctactccagctctaa

SEQ ID NO: 254256 - DNA, 25 bp, Probe sequence
gtacagacctataatgttcaaagtg

SEQ ID NO: 254257 - DNA, 25 bp, Probe sequence
ggccggattcggaaaacacatgaca

SEQ ID NO: 254258 - DNA, 25 bp, Probe sequence
ggagcgccaaattaaagttgctaca

SEQ ID NO: 254259 - DNA, 25 bp, Probe sequence
taccttttatgccttccggaattag

SEQ ID NO: 254260 - DNA, 25 bp, Probe sequence
tctgaagaaacctctgactttgtta

SEQ ID NO: 254261 - DNA, 25 bp, Probe sequence
tcaaatgggaacctgtaacggccgg

SEQ ID NO: 254262 - DNA, 25 bp, Probe sequence
tcataatttttatagttgctcgtaa

SEQ ID NO: 254263 - DNA, 25 bp, Probe sequence
taacgctaaatctatccgtcgaatc

SEQ ID NO: 254264 - DNA, 25 bp, Probe sequence
tactataaatactttggagcgccaa

SEQ ID NO: 254265 - DNA, 25 bp, Probe sequence
tatcacacccgctttctgaattaat

SEQ ID NO: 254266 - DNA, 25 bp, Probe sequence
ttcttcgttagtacaatttcagtta

SEQ ID NO: 254267 - DNA, 25 bp, Probe sequence
ttgagattgctcgtaaaatttcaga

SEQ ID NO: 254268 - DNA, 25 bp, Probe sequence
attggttagatggaggctggggcgt

SEQ ID NO: 254269 - DNA, 25 bp, Probe sequence
attactcaagcaaacccagaaggtg

SEQ ID NO: 254270 - DNA, 25 bp, Probe sequence
atagatatagattttgacgctcaac

SEQ ID NO: 254271 - DNA, 25 bp, Probe sequence
ataccatgcatttccaaagaagctc

SEQ ID NO: 254272 - DNA, 25 bp, Probe sequence
agattttgacgctcaacacactcaa

SEQ ID NO: 254273 - DNA, 25 bp, Probe sequence
agatattcatcctataaatttaaat

SEQ ID NO: 254274 - DNA, 25 bp, Probe sequence
agaagctcaacttctttttcattcc

SEQ ID NO: 254275 - DNA, 25 bp, Probe sequence
aaatgatgatggttccattactcaa

SEQ ID NO: 254276 - DNA, 25 bp, Probe sequence
aacaacaaagagaacacagagatat

SEQ ID NO: 254277 - DNA, 25 bp, Probe sequence
aagttgattggatgccttcacgtat

SEQ ID NO: 254278 - DNA, 25 bp, Probe sequence
aatggaagtaactcattggttagat

SEQ ID NO: 254279 - DNA, 25 bp, Probe sequence
caagcaaacccagaaggtggcaatt

SEQ ID NO: 254280 - DNA, 25 bp, Probe sequence
cttctttttcattccggttatgaat

SEQ ID NO: 254281 - DNA, 25 bp, Probe sequence
gccttcacgtatggaacttaaacat

SEQ ID NO: 254282 - DNA, 25 bp, Probe sequence
gctggggcgtagatgtattaactgg

SEQ ID NO: 254283 - DNA, 25 bp, Probe sequence
gaatggttttcagaaactaattata

SEQ ID NO: 254284 - DNA, 25 bp, Probe sequence
gaaggtggcaattacatctttcaaa

SEQ ID NO: 254285 - DNA, 25 bp, Probe sequence
gacgctcaacacactcaaaaagtta

SEQ ID NO: 254286 - DNA, 25 bp, Probe sequence
gaggctggggcgtagatgtattaac

SEQ ID NO: 254287 - DNA, 25 bp, Probe sequence
gatggaggctggggcgtagatgtat

SEQ ID NO: 254288 - DNA, 25 bp, Probe sequence
gatatttagatattcatcctataaa

SEQ ID NO: 254289 - DNA, 25 bp, Probe sequence
gatttattttatattttagacttat

SEQ ID NO: 254290 - DNA, 25 bp, Probe sequence
gattggatgccttcacgtatggaac

SEQ ID NO: 254291 - DNA, 25 bp, Probe sequence
gttgattggatgccttcacgtatgg

SEQ ID NO: 254292 - DNA, 25 bp, Probe sequence
gttccattactcaagcaaacccaga

SEQ ID NO: 254293 - DNA, 25 bp, Probe sequence
ggggcgtagatgtattaactggaaa

SEQ ID NO: 254294 - DNA, 25 bp, Probe sequence
ggtcgaaaaataccatgcatttcca

SEQ ID NO: 254295 - DNA, 25 bp, Probe sequence
ggttagatggaggctggggcgtaga

SEQ ID NO: 254296 - DNA, 25 bp, Probe sequence
ggatgccttcacgtatggaacttaa

SEQ ID NO: 254297 - DNA, 25 bp, Probe sequence
ggcaattacatctttcaaaatgaat

SEQ ID NO: 254298 - DNA, 25 bp, Probe sequence
tgatggttccattactcaagcaaac

SEQ ID NO: 254299 - DNA, 25 bp, Probe sequence
tgcatttccaaagaagctcaacttc

SEQ ID NO: 254300 - DNA, 25 bp, Probe sequence
tcattccggttatgaattaacagaa

SEQ ID NO: 254301 - DNA, 25 bp, Probe sequence
tcaacttctttttcattccggttat

SEQ ID NO: 254302 - DNA, 25 bp, Probe sequence
atatttctggtgttagccaaatttt

SEQ ID NO: 254303 - DNA, 25 bp, Probe sequence
atagcaaatatcttaggtgttacga

SEQ ID NO: 254304 - DNA, 25 bp, Probe sequence
atcatttacgtacgctttataagca

SEQ ID NO: 254305 - DNA, 25 bp, Probe sequence
atgcatctcatcatttacgtacgct

SEQ ID NO: 254306 - DNA, 25 bp, Probe sequence
acgctttataagcaaggggtggtca

SEQ ID NO: 254307 - DNA, 25 bp, Probe sequence
aggtgatgaacatatcaggcagata

SEQ ID NO: 254308 - DNA, 25 bp, Probe sequence
acagttgatatttctggtgttagcc

SEQ ID NO: 254309 - DNA, 25 bp, Probe sequence
acaaggggatttacaaacagttgat

SEQ ID NO: 254310 - DNA, 25 bp, Probe sequence
aaactagctttatattctttaggtg

SEQ ID NO: 254311 - DNA, 25 bp, Probe sequence
aaaattacttacgctctgtgtcagg

SEQ ID NO: 254312 - DNA, 25 bp, Probe sequence
aatgatgatcgccctagcacataag

SEQ ID NO: 254313 - DNA, 25 bp, Probe sequence
aattacttacgctctgtgtcaggat

SEQ ID NO: 254314 - DNA, 25 bp, Probe sequence
caggcagataatgatgatcgcccta

SEQ ID NO: 254315 - DNA, 25 bp, Probe sequence
catctcatcatttacgtacgcttta

SEQ ID NO: 254316 - DNA, 25 bp, Probe sequence
cttacgctctgtgtcaggatgaaga

SEQ ID NO: 254317 - DNA, 25 bp, Probe sequence
ctcatcatttacgtacgctttataa

SEQ ID NO: 254318 - DNA, 25 bp, Probe sequence
gccaaattttaaaggctattgccga

SEQ ID NO: 254319 - DNA, 25 bp, Probe sequence
gaaggaaaactagctttatattctt

SEQ ID NO: 254320 - DNA, 25 bp, Probe sequence
gcagataatgatgatcgccctagca

SEQ ID NO: 254321 - DNA, 25 bp, Probe sequence
gcaaaaattacttacgctctgtgtc

SEQ ID NO: 254322 - DNA, 25 bp, Probe sequence
gaagaaaaggttaatcgaatacaag

SEQ ID NO: 254323 - DNA, 25 bp, Probe sequence
gaaagaagtgaaggtcaatgtctga

SEQ ID NO: 254324 - DNA, 25 bp, Probe sequence
gatgatcgccctagcacataagaaa

SEQ ID NO: 254325 - DNA, 25 bp, Probe sequence
gatcgccctagcacataagaaagaa

SEQ ID NO: 254326 - DNA, 25 bp, Probe sequence
gataatgatgatcgccctagcacat

SEQ ID NO: 254327 - DNA, 25 bp, Probe sequence
gatacttgtgaaattttttgttatg

SEQ ID NO: 254328 - DNA, 25 bp, Probe sequence
gttacgatagcaaatgcatctcatc

SEQ ID NO: 254329 - DNA, 25 bp, Probe sequence
gtcaggatgaagagttgtgtgtttg

SEQ ID NO: 254330 - DNA, 25 bp, Probe sequence
gtgaaattttttgttatgacgaaga

SEQ ID NO: 254331 - DNA, 25 bp, Probe sequence
taagcaaggggtggtcaactttaga

SEQ ID NO: 254332 - DNA, 25 bp, Probe sequence
tagctttatattctttaggtgatga

SEQ ID NO: 254333 - DNA, 25 bp, Probe sequence
ttacttacgctctgtgtcaggatga

SEQ ID NO: 254334 - DNA, 25 bp, Probe sequence
ttaggtgttacgatagcaaatgcat

SEQ ID NO: 254335 - DNA, 25 bp, Probe sequence
ttaaaggctattgccgatgaaaata

SEQ ID NO: 254336 - DNA, 25 bp, Probe sequence
attgcttaatccaaacggtgtttca

SEQ ID NO: 254337 - DNA, 25 bp, Probe sequence
attttccgaatcattcagagttatt

SEQ ID NO: 254338 - DNA, 25 bp, Probe sequence
atacgctttcgactccattgtagaa

SEQ ID NO: 254339 - DNA, 25 bp, Probe sequence
atccaaacggtgtttcaaacgatga

SEQ ID NO: 254340 - DNA, 25 bp, Probe sequence
atcattcaatacgctttcgactcca

SEQ ID NO: 254341 - DNA, 25 bp, Probe sequence
atgtgaatattcatcttaattcgat

SEQ ID NO: 254342 - DNA, 25 bp, Probe sequence
atggcgtttcgcaatgacatacatg

SEQ ID NO: 254343 - DNA, 25 bp, Probe sequence
agctttacataaattgcttaatcca

SEQ ID NO: 254344 - DNA, 25 bp, Probe sequence
actaccattggataaagagagacta

SEQ ID NO: 254345 - DNA, 25 bp, Probe sequence
acatgagtatggtcaaagtacactt

SEQ ID NO: 254346 - DNA, 25 bp, Probe sequence
aaatctgaaaaccttactacaatag

SEQ ID NO: 254347 - DNA, 25 bp, Probe sequence
aaaacgatcatttgctgaagaacaa

SEQ ID NO: 254348 - DNA, 25 bp, Probe sequence
aacaaatcattcaatacgctttcga

SEQ ID NO: 254349 - DNA, 25 bp, Probe sequence
aagtacacttgatgatgggttagat

SEQ ID NO: 254350 - DNA, 25 bp, Probe sequence
aaggagttaagggatctactgtaag

SEQ ID NO: 254351 - DNA, 25 bp, Probe sequence
aattagctgatatgacacctggaca

SEQ ID NO: 254352 - DNA, 25 bp, Probe sequence
aattcgatgaaattacatgcattaa

SEQ ID NO: 254353 - DNA, 25 bp, Probe sequence
catgcattaattgacggtttagctt

SEQ ID NO: 254354 - DNA, 25 bp, Probe sequence
gcgaaattagctgatatgacacctg

SEQ ID NO: 254355 - DNA, 25 bp, Probe sequence
gcgagtttattaacagtactaccat

SEQ ID NO: 254356 - DNA, 25 bp, Probe sequence
gctttcgactccattgtagaaaaag

SEQ ID NO: 254357 - DNA, 25 bp, Probe sequence
gacagattagatattattttccgaa

SEQ ID NO: 254358 - DNA, 25 bp, Probe sequence
gacggtttagctttacataaattgc

SEQ ID NO: 254359 - DNA, 25 bp, Probe sequence
gagactagctgatatggaagtttgg

SEQ ID NO: 254360 - DNA, 25 bp, Probe sequence
gatgggttagatcaattatgtaata

SEQ ID NO: 254361 - DNA, 25 bp, Probe sequence
gatatgacacctggacagattagat

SEQ ID NO: 254362 - DNA, 25 bp, Probe sequence
gttattaaatgctgtaatgtctaca

SEQ ID NO: 254363 - DNA, 25 bp, Probe sequence
gtttggatggcgtttcgcaatgaca

SEQ ID NO: 254364 - DNA, 25 bp, Probe sequence
gtttcgcaatgacatacatgagtat

SEQ ID NO: 254365 - DNA, 25 bp, Probe sequence
ggtgtttcaaacgatgatattcaaa

SEQ ID NO: 254366 - DNA, 25 bp, Probe sequence
ggatctactgtaagacaaattgcga

SEQ ID NO: 254367 - DNA, 25 bp, Probe sequence
ggaagtttggatggcgtttcgcaat

SEQ ID NO: 254368 - DNA, 25 bp, Probe sequence
tattaacagtactaccattggataa

SEQ ID NO: 254369 - DNA, 25 bp, Probe sequence
ttcaatacgctttcgactccattgt

SEQ ID NO: 254370 - DNA, 25 bp, Probe sequence
atattctttattaggatatccttat

SEQ ID NO: 254371 - DNA, 25 bp, Probe sequence
agagctttatacacacattacggat

SEQ ID NO: 254372 - DNA, 25 bp, Probe sequence
accacgttgcaagagaagcagccaa

SEQ ID NO: 254373 - DNA, 25 bp, Probe sequence
aaaaatgaattccctactccgtatg

SEQ ID NO: 254374 - DNA, 25 bp, Probe sequence
aaaatttgaggttccacctacagat

SEQ ID NO: 254375 - DNA, 25 bp, Probe sequence
aaccagctaatatacctgatcatat

SEQ ID NO: 254376 - DNA, 25 bp, Probe sequence
aagaatacagcgcagaagaaatcag

SEQ ID NO: 254377 - DNA, 25 bp, Probe sequence
aagcagccaaaaacccatcgaatat

SEQ ID NO: 254378 - DNA, 25 bp, Probe sequence
aagttcactctattcggttgataat

SEQ ID NO: 254379 - DNA, 25 bp, Probe sequence
aagtccttataattctgttggtaca

SEQ ID NO: 254380 - DNA, 25 bp, Probe sequence
aaggcggacaacataatcttccaat

SEQ ID NO: 254381 - DNA, 25 bp, Probe sequence
cttccaataggagtgtttttcaata

SEQ ID NO: 254382 - DNA, 25 bp, Probe sequence
ctgttggtacagtgtttgtcaaagg

SEQ ID NO: 254383 - DNA, 25 bp, Probe sequence
cgaatattatttttacacccgctca

SEQ ID NO: 254384 - DNA, 25 bp, Probe sequence
gcgggagatttaattcaaccagcta

SEQ ID NO: 254385 - DNA, 25 bp, Probe sequence
gcagcgtcaatttttactatttcct

SEQ ID NO: 254386 - DNA, 25 bp, Probe sequence
gaattccctactccgtatggaaaat

SEQ ID NO: 254387 - DNA, 25 bp, Probe sequence
gaatctccgtatggacaaggactcg

SEQ ID NO: 254388 - DNA, 25 bp, Probe sequence
gaaagataagttcactctattcggt

SEQ ID NO: 254389 - DNA, 25 bp, Probe sequence
gagacactttggggaacgatttgaa

SEQ ID NO: 254390 - DNA, 25 bp, Probe sequence
gaggtaggaaactctggatcaggta

SEQ ID NO: 254391 - DNA, 25 bp, Probe sequence
gttcaatgattctcaatattttgga

SEQ ID NO: 254392 - DNA, 25 bp, Probe sequence
gtattcacagtggtaaaggcggaca

SEQ ID NO: 254393 - DNA, 25 bp, Probe sequence
ggttccacctacagataaagagctt

SEQ ID NO: 254394 - DNA, 25 bp, Probe sequence
ggttgataatacttttggagacact

SEQ ID NO: 254395 - DNA, 25 bp, Probe sequence
ggatatccttataattattcagctt

SEQ ID NO: 254396 - DNA, 25 bp, Probe sequence
ggacaaggactcgatttagctataa

SEQ ID NO: 254397 - DNA, 25 bp, Probe sequence
tgttactaattaccacgttgcaaga

SEQ ID NO: 254398 - DNA, 25 bp, Probe sequence
tccttacctgtgattccttttgaaa

SEQ ID NO: 254399 - DNA, 25 bp, Probe sequence
tacacccgctcaaaatagagatgca

SEQ ID NO: 254400 - DNA, 25 bp, Probe sequence
tactatttccttacctgtgattcct

SEQ ID NO: 254401 - DNA, 25 bp, Probe sequence
tacggataatgcaagaagtccttat

SEQ ID NO: 254402 - DNA, 25 bp, Probe sequence
tagtacattagctaccggagtttta

SEQ ID NO: 254403 - DNA, 25 bp, Probe sequence
tattcagcttactctttatatcaaa

SEQ ID NO: 254404 - DNA, 25 bp, Probe sequence
atttggtttatataactcagacagc

SEQ ID NO: 254405 - DNA, 25 bp, Probe sequence
atataactcagacagctttggcggt

SEQ ID NO: 254406 - DNA, 25 bp, Probe sequence
aggtcatccatggtataacgattta

SEQ ID NO: 254407 - DNA, 25 bp, Probe sequence
acctccatattgatttgtatttata

SEQ ID NO: 254408 - DNA, 25 bp, Probe sequence
aaaggttttttcacaggtcatccat

SEQ ID NO: 254409 - DNA, 25 bp, Probe sequence
aaacaaactacagtacctatagata

SEQ ID NO: 254410 - DNA, 25 bp, Probe sequence
aacagcatgtatgtacgggggtgta

SEQ ID NO: 254411 - DNA, 25 bp, Probe sequence
aacagcatttatactacttttattc

SEQ ID NO: 254412 - DNA, 25 bp, Probe sequence
aactattaattcagagaacctccat

SEQ ID NO: 254413 - DNA, 25 bp, Probe sequence
aagggcaatatccagatacattatt

SEQ ID NO: 254414 - DNA, 25 bp, Probe sequence
cagacagctttggcggtaaggtgca

SEQ ID NO: 254415 - DNA, 25 bp, Probe sequence
cattcttctgaagggtccacggtaa

SEQ ID NO: 254416 - DNA, 25 bp, Probe sequence
gtttcattcttctgaagggtccacg

SEQ ID NO: 254417 - DNA, 25 bp, Probe sequence
gcttgattgtgtttcattcttctga

SEQ ID NO: 254418 - DNA, 25 bp, Probe sequence
gcatttatactacttttattcattg

SEQ ID NO: 254419 - DNA, 25 bp, Probe sequence
gagtgatgatcagtttttagagaat

SEQ ID NO: 254420 - DNA, 25 bp, Probe sequence
gaggcttgattgtgtttcattcttc

SEQ ID NO: 254421 - DNA, 25 bp, Probe sequence
gatcttggttcaaaagatgctacta

SEQ ID NO: 254422 - DNA, 25 bp, Probe sequence
gttatgatttgtttgatgctcaagg

SEQ ID NO: 254423 - DNA, 25 bp, Probe sequence
gttttttcacaggtcatccatggta

SEQ ID NO: 254424 - DNA, 25 bp, Probe sequence
gtacgggggtgtaacattacatgat

SEQ ID NO: 254425 - DNA, 25 bp, Probe sequence
gtaccaattaacttgtggatagacg

SEQ ID NO: 254426 - DNA, 25 bp, Probe sequence
gtaactgttcaagagctagatcttc

SEQ ID NO: 254427 - DNA, 25 bp, Probe sequence
gtgctggaggcacaccaaataaaac

SEQ ID NO: 254428 - DNA, 25 bp, Probe sequence
gggtccacggtaagttatgatttgt

SEQ ID NO: 254429 - DNA, 25 bp, Probe sequence
ggcggtaaggtgcaaagaggcttga

SEQ ID NO: 254430 - DNA, 25 bp, Probe sequence
ggcaaggcattatttacacggaaaa

SEQ ID NO: 254431 - DNA, 25 bp, Probe sequence
tgttcaagagctagatcttcaggca

SEQ ID NO: 254432 - DNA, 25 bp, Probe sequence
taattcagagaacctccatattgat

SEQ ID NO: 254433 - DNA, 25 bp, Probe sequence
taagcaatcttaggcaaatttatta

SEQ ID NO: 254434 - DNA, 25 bp, Probe sequence
tatggatatcaatgtgctggaggca

SEQ ID NO: 254435 - DNA, 25 bp, Probe sequence
ttcacaggtcatccatggtataacg

SEQ ID NO: 254436 - DNA, 25 bp, Probe sequence
ttcaggcaaggcattatttacacgg

SEQ ID NO: 254437 - DNA, 25 bp, Probe sequence
ttgatgctcaagggcaatatccaga

SEQ ID NO: 254438 - DNA, 25 bp, Probe sequence
attatgcgaacatttttctatcaat

SEQ ID NO: 254439 - DNA, 25 bp, Probe sequence
atttagcgccatgtacaaagggtgc

SEQ ID NO: 254440 - DNA, 25 bp, Probe sequence
ataacagagactatcgtggaggaag

SEQ ID NO: 254441 - DNA, 25 bp, Probe sequence
agagttcagttggtgatgcatttga

SEQ ID NO: 254442 - DNA, 25 bp, Probe sequence
agagcattttctttgaagtctgggt

SEQ ID NO: 254443 - DNA, 25 bp, Probe sequence
agaccacacactaataacagagact

SEQ ID NO: 254444 - DNA, 25 bp, Probe sequence
taaaccattcccggaagttgaagag

SEQ ID NO: 254445 - DNA, 25 bp, Probe sequence
aaacaagccgtacataatcgcgcaa

SEQ ID NO: 254446 - DNA, 25 bp, Probe sequence
aactggtcaatcgataaattatgcg

SEQ ID NO: 254447 - DNA, 25 bp, Probe sequence
aacggacctgtcaaaagaatgtggg

SEQ ID NO: 254448 - DNA, 25 bp, Probe sequence
aagaaatcagccttattcagacata

SEQ ID NO: 254449 - DNA, 25 bp, Probe sequence
aagtatgtcatttggagcttttaaa

SEQ ID NO: 254450 - DNA, 25 bp, Probe sequence
aagggtgcgaatgctagttctttaa

SEQ ID NO: 254451 - DNA, 25 bp, Probe sequence
aatcgcgcaaaagaagctgttggta

SEQ ID NO: 254452 - DNA, 25 bp, Probe sequence
aatttgccatgttagaccacacact

SEQ ID NO: 254453 - DNA, 25 bp, Probe sequence
gcctgaagaagacataaacggacct

SEQ ID NO: 254454 - DNA, 25 bp, Probe sequence
gcacaatggcgaaactttttgttag

SEQ ID NO: 254455 - DNA, 25 bp, Probe sequence
gaaggatatcctagtgcacaatggc

SEQ ID NO: 254456 - DNA, 25 bp, Probe sequence
gaagcggtgctttatgaaatgcata

SEQ ID NO: 254457 - DNA, 25 bp, Probe sequence
gaacacctagtgataattggattat

SEQ ID NO: 254458 - DNA, 25 bp, Probe sequence
gaaatgcataaaaacccgattgatt

SEQ ID NO: 254459 - DNA, 25 bp, Probe sequence
gacctgactcagatgattattcgga

SEQ ID NO: 254460 - DNA, 25 bp, Probe sequence
gatatggcagaagctggggtggaac

SEQ ID NO: 254461 - DNA, 25 bp, Probe sequence
gattattcggatgagtggatgacta

SEQ ID NO: 254462 - DNA, 25 bp, Probe sequence
gattcaattgtcaaagacccatttg

SEQ ID NO: 254463 - DNA, 25 bp, Probe sequence
gtttgacaagttatttagcgccatg

SEQ ID NO: 254464 - DNA, 25 bp, Probe sequence
gtaatgcagataagcttcctaaaaa

SEQ ID NO: 254465 - DNA, 25 bp, Probe sequence
gggtatatgacatctattttacgca

SEQ ID NO: 254466 - DNA, 25 bp, Probe sequence
ggggtggaacttaaggcaacgccat

SEQ ID NO: 254467 - DNA, 25 bp, Probe sequence
ggtgtcacattagaagctgtaccgg

SEQ ID NO: 254468 - DNA, 25 bp, Probe sequence
taactggattaatagacctgactca

SEQ ID NO: 254469 - DNA, 25 bp, Probe sequence
tagcctctgccattttaaatctaaa

SEQ ID NO: 254470 - DNA, 25 bp, Probe sequence
tatagaatagcctctgccattttaa

SEQ ID NO: 254471 - DNA, 25 bp, Probe sequence
tttacgcaaatatgttctaggtgat

SEQ ID NO: 254472 - DNA, 25 bp, Probe sequence
ataggactcatattactcatgatat

SEQ ID NO: 254473 - DNA, 25 bp, Probe sequence
atcaccttcgagtcagagagggaga

SEQ ID NO: 254474 - DNA, 25 bp, Probe sequence
atgaattcagtcagctacgtttatt

SEQ ID NO: 254475 - DNA, 25 bp, Probe sequence
agggcgttttattctggcaaattat

SEQ ID NO: 254476 - DNA, 25 bp, Probe sequence
agattcattagagttacctgcaaga

SEQ ID NO: 254477 - DNA, 25 bp, Probe sequence
aacgaactactaaagatggtcatga

SEQ ID NO: 254478 - DNA, 25 bp, Probe sequence
aagtagtagaattgtttgcgggtgt

SEQ ID NO: 254479 - DNA, 25 bp, Probe sequence
aaggatattgcccaggtatctgatg

SEQ ID NO: 254480 - DNA, 25 bp, Probe sequence
aatggcgcgtgattaatgctgctga

SEQ ID NO: 254481 - DNA, 25 bp, Probe sequence
aatgcttacaagtgaatcatctatt

SEQ ID NO: 254482 - DNA, 25 bp, Probe sequence
catttcctaaatacttgttgcttga

SEQ ID NO: 254483 - DNA, 25 bp, Probe sequence
gctcttgttgtgcctttgattacta

SEQ ID NO: 254484 - DNA, 25 bp, Probe sequence
gcttttccgattgaagattatgcca

SEQ ID NO: 254485 - DNA, 25 bp, Probe sequence
gaaggtggtatgtctgaaacagatt

SEQ ID NO: 254486 - DNA, 25 bp, Probe sequence
gaactttgacacctattgaagcaga

SEQ ID NO: 254487 - DNA, 25 bp, Probe sequence
gaaatggcaaatactgaagctgata

SEQ ID NO: 254488 - DNA, 25 bp, Probe sequence
gactttgctgtaatgttatcaacct

SEQ ID NO: 254489 - DNA, 25 bp, Probe sequence
gagccctcacgaaaaatccaacatg

SEQ ID NO: 254490 - DNA, 25 bp, Probe sequence
gagagggagagactttgctgtaatg

SEQ ID NO: 254491 - DNA, 25 bp, Probe sequence
gatacttttgtatgggcaatgctct

SEQ ID NO: 254492 - DNA, 25 bp, Probe sequence
gatatttcagataatttcagttttc

SEQ ID NO: 254493 - DNA, 25 bp, Probe sequence
gattattgaaatcaccttcgagtca

SEQ ID NO: 254494 - DNA, 25 bp, Probe sequence
gatttaagaacggcatccatagtaa

SEQ ID NO: 254495 - DNA, 25 bp, Probe sequence
gattgtaggaggatttccttgccaa

SEQ ID NO: 254496 - DNA, 25 bp, Probe sequence
gttacctgcaagaacaatgcttaca

SEQ ID NO: 254497 - DNA, 25 bp, Probe sequence
gggcaatgctcttgttgtgcctttg

SEQ ID NO: 254498 - DNA, 25 bp, Probe sequence
ggtttgtttgctgaagcttttccga

SEQ ID NO: 254499 - DNA, 25 bp, Probe sequence
ggcaatgctcaaagacgtagaaggg

SEQ ID NO: 254500 - DNA, 25 bp, Probe sequence
ggcaaatcaatgggagccctcacga

SEQ ID NO: 254501 - DNA, 25 bp, Probe sequence
tggtatatttgacataacttgggca

SEQ ID NO: 254502 - DNA, 25 bp, Probe sequence
tgtttgcgggtgtaggcgggtttcg

SEQ ID NO: 254503 - DNA, 25 bp, Probe sequence
tgctgctgattatggcaatgctcaa

SEQ ID NO: 254504 - DNA, 25 bp, Probe sequence
taggctataatgttgaatggcgcgt

SEQ ID NO: 254505 - DNA, 25 bp, Probe sequence
ttccttgccaagattattcagttgc

SEQ ID NO: 254506 - DNA, 25 bp, Probe sequence
atttttttgagtttatctttagcat

SEQ ID NO: 254507 - DNA, 25 bp, Probe sequence
atttcactgatttagatgaggcaac

SEQ ID NO: 254508 - DNA, 25 bp, Probe sequence
atagttctaagataaatggtccatt

SEQ ID NO: 254509 - DNA, 25 bp, Probe sequence
aggtggtagacctattgaattaagg

SEQ ID NO: 254510 - DNA, 25 bp, Probe sequence
atggtccattaagactcgcaggtgg

SEQ ID NO: 254511 - DNA, 25 bp, Probe sequence
agaagttttattacctagaggcaca

SEQ ID NO: 254512 - DNA, 25 bp, Probe sequence
agaagattagattcatctatttcta

SEQ ID NO: 254513 - DNA, 25 bp, Probe sequence
acgctgttggaagtgtagaattgtc

SEQ ID NO: 254514 - DNA, 25 bp, Probe sequence
actactcctgaatctgtatacgttt

SEQ ID NO: 254515 - DNA, 25 bp, Probe sequence
acaacagaccaataatggccagtat

SEQ ID NO: 254516 - DNA, 25 bp, Probe sequence
aaagctgcgtatcttaattctaaag

SEQ ID NO: 254517 - DNA, 25 bp, Probe sequence
aacaagctaagtatagttcggatga

SEQ ID NO: 254518 - DNA, 25 bp, Probe sequence
aactgcttactatggtcaacaagaa

SEQ ID NO: 254519 - DNA, 25 bp, Probe sequence
aagctagattcaacaactcaagaca

SEQ ID NO: 254520 - DNA, 25 bp, Probe sequence
aagactcgcaggtggagatattaat

SEQ ID NO: 254521 - DNA, 25 bp, Probe sequence
aatacttctttagcagctgatgtta

SEQ ID NO: 254522 - DNA, 25 bp, Probe sequence
caattagttagtggagcagctgtag

SEQ ID NO: 254523 - DNA, 25 bp, Probe sequence
caaaagggactaaagctgcgtatct

SEQ ID NO: 254524 - DNA, 25 bp, Probe sequence
ctaaatctactactcctgaatctgt

SEQ ID NO: 254525 - DNA, 25 bp, Probe sequence
gcagctgatgttaaaaatttcactg

SEQ ID NO: 254526 - DNA, 25 bp, Probe sequence
gaatctgtatacgtttatagacttt

SEQ ID NO: 254527 - DNA, 25 bp, Probe sequence
gagaagacggatactctagtacaca

SEQ ID NO: 254528 - DNA, 25 bp, Probe sequence
gatgaggcaactaaatgggggaata

SEQ ID NO: 254529 - DNA, 25 bp, Probe sequence
gagtttatctttagcattaagcgtt

SEQ ID NO: 254530 - DNA, 25 bp, Probe sequence
gatttaactgcttactatggtcaac

SEQ ID NO: 254531 - DNA, 25 bp, Probe sequence
gttcggatgataaaatagctctata

SEQ ID NO: 254532 - DNA, 25 bp, Probe sequence
gtatctaatacttctttagcagctg

SEQ ID NO: 254533 - DNA, 25 bp, Probe sequence
gtggagcagctgtaggtggtagacc

SEQ ID NO: 254534 - DNA, 25 bp, Probe sequence
ggatactctagtacacaattagtta

SEQ ID NO: 254535 - DNA, 25 bp, Probe sequence
tctatttctaaatctactactcctg

SEQ ID NO: 254536 - DNA, 25 bp, Probe sequence
taatggccagtatgatgaaaatcta

SEQ ID NO: 254537 - DNA, 25 bp, Probe sequence
tagaggcacagaatacgctgttgga

SEQ ID NO: 254538 - DNA, 25 bp, Probe sequence
ttagcattaagcgtttattcaatta

SEQ ID NO: 254539 - DNA, 25 bp, Probe sequence
ttgacaagtatcgttggatttacaa

SEQ ID NO: 254540 - DNA, 25 bp, Probe sequence
atgttaaccgttaccaaccaagcag

SEQ ID NO: 254541 - DNA, 25 bp, Probe sequence
agttaaaagcccacgtattctagat

SEQ ID NO: 254542 - DNA, 25 bp, Probe sequence
agcagagtctcaagtattaaatatt

SEQ ID NO: 254543 - DNA, 25 bp, Probe sequence
accgttaccaaccaagcagagtctc

SEQ ID NO: 254544 - DNA, 25 bp, Probe sequence
aaaggaaatgactcacaaattatgg

SEQ ID NO: 254545 - DNA, 25 bp, Probe sequence
aaagcccacgtattctagataaggt

SEQ ID NO: 254546 - DNA, 25 bp, Probe sequence
aatattaccacttttaggtctgcta

SEQ ID NO: 254547 - DNA, 25 bp, Probe sequence
caactagtaaacacatattcagaga

SEQ ID NO: 254548 - DNA, 25 bp, Probe sequence
ctcacaaattatggcacaagaagtt

SEQ ID NO: 254549 - DNA, 25 bp, Probe sequence
gcccacgtattctagataaggtttc

SEQ ID NO: 254550 - DNA, 25 bp, Probe sequence
gcttctactcaaatattagtgaatc

SEQ ID NO: 254551 - DNA, 25 bp, Probe sequence
gaaaacaagttgcaccaaaacctat

SEQ ID NO: 254552 - DNA, 25 bp, Probe sequence
gaattggtgatacctgtactgggtt

SEQ ID NO: 254553 - DNA, 25 bp, Probe sequence
gaatgttgataatgtttctgtttta

SEQ ID NO: 254554 - DNA, 25 bp, Probe sequence
gaagtatttagtgatgaagtgcctg

SEQ ID NO: 254555 - DNA, 25 bp, Probe sequence
gagatagttaaaagcccacgtattc

SEQ ID NO: 254556 - DNA, 25 bp, Probe sequence
gatgtaaagtaccaagcttctactc

SEQ ID NO: 254557 - DNA, 25 bp, Probe sequence
gatgataaatattcacgtagtgaga

SEQ ID NO: 254558 - DNA, 25 bp, Probe sequence
gatgaagtgcctgatattatgaatg

SEQ ID NO: 254559 - DNA, 25 bp, Probe sequence
gttgttggtttagtaataggattgg

SEQ ID NO: 254560 - DNA, 25 bp, Probe sequence
gttgcaccaaaacctatggttaatt

SEQ ID NO: 254561 - DNA, 25 bp, Probe sequence
gtttctgttttatctacagcggata

SEQ ID NO: 254562 - DNA, 25 bp, Probe sequence
gtactgggttcaatccaaaaatttg

SEQ ID NO: 254563 - DNA, 25 bp, Probe sequence
gtaccaagcttctactcaaatatta

SEQ ID NO: 254564 - DNA, 25 bp, Probe sequence
gtgatacctgtactgggttcaatcc

SEQ ID NO: 254565 - DNA, 25 bp, Probe sequence
gtgagatatcaagtatgttaaccgt

SEQ ID NO: 254566 - DNA, 25 bp, Probe sequence
ggaaagtacaattgatttatctgaa

SEQ ID NO: 254567 - DNA, 25 bp, Probe sequence
tacagcggataatacaggaaaacaa

SEQ ID NO: 254568 - DNA, 25 bp, Probe sequence
tacctgtactgggttcaatccaaaa

SEQ ID NO: 254569 - DNA, 25 bp, Probe sequence
tagtgcaataatttcttttttcttt

SEQ ID NO: 254570 - DNA, 25 bp, Probe sequence
taggattggttatcgcattattaat

SEQ ID NO: 254571 - DNA, 25 bp, Probe sequence
ttaccacttttaggtctgctaatta

SEQ ID NO: 254572 - DNA, 25 bp, Probe sequence
ttaggtctgctaattagtgcaataa

SEQ ID NO: 254573 - DNA, 25 bp, Probe sequence
ttaccaaccaagcagagtctcaagt

SEQ ID NO: 254574 - DNA, 25 bp, Probe sequence
cggtgggaaagtattaggcgcagtt

SEQ ID NO: 254575 - DNA, 25 bp, Probe sequence
attgcttctagcaaatttgcaacta

SEQ ID NO: 254576 - DNA, 25 bp, Probe sequence
atttgcctaataatagtgggctatc

SEQ ID NO: 254577 - DNA, 25 bp, Probe sequence
agctactattactactatggagaag

SEQ ID NO: 254578 - DNA, 25 bp, Probe sequence
acattatatctttgatttgcctaat

SEQ ID NO: 254579 - DNA, 25 bp, Probe sequence
aaatatcatgttttctaatgctgaa

SEQ ID NO: 254580 - DNA, 25 bp, Probe sequence
aaaagcttgttgataacttctgaaa

SEQ ID NO: 254581 - DNA, 25 bp, Probe sequence
aaaattctagctactattactacta

SEQ ID NO: 254582 - DNA, 25 bp, Probe sequence
aacttctgaaaaatccgcatctggt

SEQ ID NO: 254583 - DNA, 25 bp, Probe sequence
aactacatatagcgattcaattaaa

SEQ ID NO: 254584 - DNA, 25 bp, Probe sequence
aagaaaagcactatatcaccactat

SEQ ID NO: 254585 - DNA, 25 bp, Probe sequence
aagagcatactttcggcaaacattg

SEQ ID NO: 254586 - DNA, 25 bp, Probe sequence
aatccgcatctggtaagagcatact

SEQ ID NO: 254587 - DNA, 25 bp, Probe sequence
aatccttcagaattaattgcttcta

SEQ ID NO: 254588 - DNA, 25 bp, Probe sequence
aattgtgtgcttgtcatagatgctg

SEQ ID NO: 254589 - DNA, 25 bp, Probe sequence
caccgcctaatccttcagaattaat

SEQ ID NO: 254590 - DNA, 25 bp, Probe sequence
ctatatcaccactatatgttcatga

SEQ ID NO: 254591 - DNA, 25 bp, Probe sequence
cggatgctcaagtatatgcgcgaat

SEQ ID NO: 254592 - DNA, 25 bp, Probe sequence
gcagtaacatatgcacaggcaggtt

SEQ ID NO: 254593 - DNA, 25 bp, Probe sequence
gacacacctccgattaatacagtaa

SEQ ID NO: 254594 - DNA, 25 bp, Probe sequence
gagaaagcctacacaacattatatc

SEQ ID NO: 254595 - DNA, 25 bp, Probe sequence
gaggtattcgatcaaatatcatgtt

SEQ ID NO: 254596 - DNA, 25 bp, Probe sequence
gatagacacacctccgattaataca

SEQ ID NO: 254597 - DNA, 25 bp, Probe sequence
gttcatgataaacctaaatcgacga

SEQ ID NO: 254598 - DNA, 25 bp, Probe sequence
gtgtgcttgtcatagatgctgaaaa

SEQ ID NO: 254599 - DNA, 25 bp, Probe sequence
ggagatatgagaaagcctacacaac

SEQ ID NO: 254600 - DNA, 25 bp, Probe sequence
tgaacttttgaatcattatgacttc

SEQ ID NO: 254601 - DNA, 25 bp, Probe sequence
tgcacaggcaggttacaaaacatta

SEQ ID NO: 254602 - DNA, 25 bp, Probe sequence
tactttcggcaaacattgcagtaac

SEQ ID NO: 254603 - DNA, 25 bp, Probe sequence
tagtgggctatctaatttaattatt

SEQ ID NO: 254604 - DNA, 25 bp, Probe sequence
ttttaacagcaggaccaacaccgcc

SEQ ID NO: 254605 - DNA, 25 bp, Probe sequence
ttatgacttcattgtgatagacaca

SEQ ID NO: 254606 - DNA, 25 bp, Probe sequence
ttaatacagtaacggatgctcaagt

SEQ ID NO: 254607 - DNA, 25 bp, Probe sequence
ttgcaactatatttaatgaactttt

SEQ ID NO: 254608 - DNA, 25 bp, Probe sequence
attgggagattttgggaataacata

SEQ ID NO: 254609 - DNA, 25 bp, Probe sequence
attgagttgcttaaacaagcccaaa

SEQ ID NO: 254610 - DNA, 25 bp, Probe sequence
attccaatcattgcgcatccagaac

SEQ ID NO: 254611 - DNA, 25 bp, Probe sequence
atttcctagcaatgagattccttat

SEQ ID NO: 254612 - DNA, 25 bp, Probe sequence
atggtggtgcattaagtcagattac

SEQ ID NO: 254613 - DNA, 25 bp, Probe sequence
agcaatgagattccttattatacga

SEQ ID NO: 254614 - DNA, 25 bp, Probe sequence
acctcaccatcttcataagagatat

SEQ ID NO: 254615 - DNA, 25 bp, Probe sequence
acagcttcttcattattgggagatt

SEQ ID NO: 254616 - DNA, 25 bp, Probe sequence
aacaatgggatatattccaatcatt

SEQ ID NO: 254617 - DNA, 25 bp, Probe sequence
aagcgatagttcaaaatttagattt

SEQ ID NO: 254618 - DNA, 25 bp, Probe sequence
aagtcagattacagcttcttcatta

SEQ ID NO: 254619 - DNA, 25 bp, Probe sequence
caatcattgcgcatccagaacggaa

SEQ ID NO: 254620 - DNA, 25 bp, Probe sequence
caagcccaaagtgaaaatgtaacag

SEQ ID NO: 254621 - DNA, 25 bp, Probe sequence
caacacctcaccatcttcataagag

SEQ ID NO: 254622 - DNA, 25 bp, Probe sequence
gcatcagatgcacatagtataacaa

SEQ ID NO: 254623 - DNA, 25 bp, Probe sequence
gcacatagtataacaaatcgacctt

SEQ ID NO: 254624 - DNA, 25 bp, Probe sequence
gaatttccaaacagataccaactca

SEQ ID NO: 254625 - DNA, 25 bp, Probe sequence
gaatcaattattctatgagttacaa

SEQ ID NO: 254626 - DNA, 25 bp, Probe sequence
gaccttttatgctaaaacagttgtt

SEQ ID NO: 254627 - DNA, 25 bp, Probe sequence
gagattcgtataacggatcaaatta

SEQ ID NO: 254628 - DNA, 25 bp, Probe sequence
gatgatggaccaaaaagcattaatg

SEQ ID NO: 254629 - DNA, 25 bp, Probe sequence
gataccaactcaagattataagcag

SEQ ID NO: 254630 - DNA, 25 bp, Probe sequence
gatagatagtaatttagcacatttt

SEQ ID NO: 254631 - DNA, 25 bp, Probe sequence
gatatagttgcaacacctcaccatc

SEQ ID NO: 254632 - DNA, 25 bp, Probe sequence
gatatacataatcatattttggttg

SEQ ID NO: 254633 - DNA, 25 bp, Probe sequence
gattacagcttcttcattattggga

SEQ ID NO: 254634 - DNA, 25 bp, Probe sequence
gttggacaagagattcgtataacgg

SEQ ID NO: 254635 - DNA, 25 bp, Probe sequence
gtatttgttaatagaatttcctagc

SEQ ID NO: 254636 - DNA, 25 bp, Probe sequence
ggaattaatgaatctaggtatttgt

SEQ ID NO: 254637 - DNA, 25 bp, Probe sequence
taacaaatcgaccttttatgctaaa

SEQ ID NO: 254638 - DNA, 25 bp, Probe sequence
tagcacattttattgcatcagatgc

SEQ ID NO: 254639 - DNA, 25 bp, Probe sequence
taggacttaatttatatgttggaca

SEQ ID NO: 254640 - DNA, 25 bp, Probe sequence
tattttggttgatgtagatgatgga

SEQ ID NO: 254641 - DNA, 25 bp, Probe sequence
ttgcgcatccagaacggaataaagc

SEQ ID NO: 254642 - DNA, 25 bp, Probe sequence
aattgaatcaggtggtccggttaca

SEQ ID NO: 254643 - DNA, 25 bp, Probe sequence
aggcggatctgttttaattcgtgaa

SEQ ID NO: 254644 - DNA, 25 bp, Probe sequence
aggatcggtcatacctctatttaaa

SEQ ID NO: 254645 - DNA, 25 bp, Probe sequence
agtaggggctggacaaggcggatct

SEQ ID NO: 254646 - DNA, 25 bp, Probe sequence
agaagccaagatatgcgtatgcaac

SEQ ID NO: 254647 - DNA, 25 bp, Probe sequence
agccatatgctgtttatcatgctgc

SEQ ID NO: 254648 - DNA, 25 bp, Probe sequence
aagcggttacaagttcaatagtggt

SEQ ID NO: 254649 - DNA, 25 bp, Probe sequence
aagacttgtattacaggccggggca

SEQ ID NO: 254650 - DNA, 25 bp, Probe sequence
cgagcgtgggagtatgcgagtgtaa

SEQ ID NO: 254651 - DNA, 25 bp, Probe sequence
gcgtatgcaaccagttttagctgtt

SEQ ID NO: 254652 - DNA, 25 bp, Probe sequence
gctgcagcacataagcatgtaccat

SEQ ID NO: 254653 - DNA, 25 bp, Probe sequence
gcatttgctattgattggtggctct

SEQ ID NO: 254654 - DNA, 25 bp, Probe sequence
gaattttcagggattagaccaggag

SEQ ID NO: 254655 - DNA, 25 bp, Probe sequence
gaatttgttcctgttatagctgatg

SEQ ID NO: 254656 - DNA, 25 bp, Probe sequence
gaaagtccatttctaaggttatatt

SEQ ID NO: 254657 - DNA, 25 bp, Probe sequence
gaaattcatccgcagcaggtatatg

SEQ ID NO: 254658 - DNA, 25 bp, Probe sequence
gacacgatatttcatgactatacca

SEQ ID NO: 254659 - DNA, 25 bp, Probe sequence
gactataccagaagcatcaagactt

SEQ ID NO: 254660 - DNA, 25 bp, Probe sequence
gagatccagttgaactagacatggc

SEQ ID NO: 254661 - DNA, 25 bp, Probe sequence
gaggcaaagttgaccactatattaa

SEQ ID NO: 254662 - DNA, 25 bp, Probe sequence
gattattattgctataccgacatta

SEQ ID NO: 254663 - DNA, 25 bp, Probe sequence
gttggtatcacatcatatattcgca

SEQ ID NO: 254664 - DNA, 25 bp, Probe sequence
gtaactcaccctgaaatgacacgat

SEQ ID NO: 254665 - DNA, 25 bp, Probe sequence
gtggtaacacttttattagtttcat

SEQ ID NO: 254666 - DNA, 25 bp, Probe sequence
ggtggctctagattgttttggcggg

SEQ ID NO: 254667 - DNA, 25 bp, Probe sequence
ggtccggttacagtaactcaccctg

SEQ ID NO: 254668 - DNA, 25 bp, Probe sequence
ggccggggcattggcacaaggtggc

SEQ ID NO: 254669 - DNA, 25 bp, Probe sequence
ggtaactggagctggaggatcaata

SEQ ID NO: 254670 - DNA, 25 bp, Probe sequence
ggtattttattgataacgctgtcga

SEQ ID NO: 254671 - DNA, 25 bp, Probe sequence
ggcgaagtatttgtgctagacatgg

SEQ ID NO: 254672 - DNA, 25 bp, Probe sequence
tggaatacaaccctcatgaagctat

SEQ ID NO: 254673 - DNA, 25 bp, Probe sequence
taaagctgtaaatccatctaatgta

SEQ ID NO: 254674 - DNA, 25 bp, Probe sequence
tagattcgtttattgttacattttc

SEQ ID NO: 254675 - DNA, 25 bp, Probe sequence
tatcatctgttatattgttggtatc

SEQ ID NO: 254676 - DNA, 25 bp, Probe sequence
atatatttttagccaatcctttagt

SEQ ID NO: 254677 - DNA, 25 bp, Probe sequence
ataactatagctatgaccgtgtact

SEQ ID NO: 254678 - DNA, 25 bp, Probe sequence
atctaatttgtttagcattgctact

SEQ ID NO: 254679 - DNA, 25 bp, Probe sequence
agaagcgtattacaatggtgcaatt

SEQ ID NO: 254680 - DNA, 25 bp, Probe sequence
agctatgaccgtgtacttactttac

SEQ ID NO: 254681 - DNA, 25 bp, Probe sequence
aaataatttattctactacacagga

SEQ ID NO: 254682 - DNA, 25 bp, Probe sequence
aagaattaccaatgtatacgtacgg

SEQ ID NO: 254683 - DNA, 25 bp, Probe sequence
caattctatctgcacttggagtgtt

SEQ ID NO: 254684 - DNA, 25 bp, Probe sequence
caattgggattgcatttgcattttc

SEQ ID NO: 254685 - DNA, 25 bp, Probe sequence
cattttcattcgtacctgcatacat

SEQ ID NO: 254686 - DNA, 25 bp, Probe sequence
cattgctacttttgcgatattaact

SEQ ID NO: 254687 - DNA, 25 bp, Probe sequence
ccagggttacaacctgtaaactatg

SEQ ID NO: 254688 - DNA, 25 bp, Probe sequence
gccaatcctttagtggagtatcacg

SEQ ID NO: 254689 - DNA, 25 bp, Probe sequence
gcgccctttaggttatgtaactagg

SEQ ID NO: 254690 - DNA, 25 bp, Probe sequence
gcaaaagttacttagcacctattca

SEQ ID NO: 254691 - DNA, 25 bp, Probe sequence
gaaacgcattttcattcgtacctgc

SEQ ID NO: 254692 - DNA, 25 bp, Probe sequence
gaaatgctgtcaatgggtactgcaa

SEQ ID NO: 254693 - DNA, 25 bp, Probe sequence
gactacctggtatgggttttaatgt

SEQ ID NO: 254694 - DNA, 25 bp, Probe sequence
gacggtggggaaagcatagtttatg

SEQ ID NO: 254695 - DNA, 25 bp, Probe sequence
gtaactaggtggattgacggtgggg

SEQ ID NO: 254696 - DNA, 25 bp, Probe sequence
gtattttatccaattctatctgcac

SEQ ID NO: 254697 - DNA, 25 bp, Probe sequence
gtatatttacattcatcggttattt

SEQ ID NO: 254698 - DNA, 25 bp, Probe sequence
gtatcacggtgatttatcttggtat

SEQ ID NO: 254699 - DNA, 25 bp, Probe sequence
gtacctgcatacatattaattatca

SEQ ID NO: 254700 - DNA, 25 bp, Probe sequence
gtaattatattaactccccaagtgt

SEQ ID NO: 254701 - DNA, 25 bp, Probe sequence
gggtactgcaattgtaagtgtatta

SEQ ID NO: 254702 - DNA, 25 bp, Probe sequence
ggtgttattagtgcttttactttgg

SEQ ID NO: 254703 - DNA, 25 bp, Probe sequence
tggatttactatacaatttcttttt

SEQ ID NO: 254704 - DNA, 25 bp, Probe sequence
tgataggttttagagttgttacaat

SEQ ID NO: 254705 - DNA, 25 bp, Probe sequence
tgaaataggctacacactgcgccct

SEQ ID NO: 254706 - DNA, 25 bp, Probe sequence
taaattggttttcttcacttgttga

SEQ ID NO: 254707 - DNA, 25 bp, Probe sequence
tacacactgcgccctttaggttatg

SEQ ID NO: 254708 - DNA, 25 bp, Probe sequence
tacggtatattctttttttcaattg

SEQ ID NO: 254709 - DNA, 25 bp, Probe sequence
tataactggtcgattagcaattaat

SEQ ID NO: 254710 - DNA, 25 bp, Probe sequence
actggtaatcggtgggttattcgca

SEQ ID NO: 254711 - DNA, 25 bp, Probe sequence
atattctttattaggtgctgcttta

SEQ ID NO: 254712 - DNA, 25 bp, Probe sequence
atattctcatttgctattatcgata

SEQ ID NO: 254713 - DNA, 25 bp, Probe sequence
atatcctgtatattctcatttgcta

SEQ ID NO: 254714 - DNA, 25 bp, Probe sequence
atatggcacttttatttttagtaat

SEQ ID NO: 254715 - DNA, 25 bp, Probe sequence
atgtttgttgctaatatactgtctg

SEQ ID NO: 254716 - DNA, 25 bp, Probe sequence
atgtgctcggtaatattgagtttgt

SEQ ID NO: 254717 - DNA, 25 bp, Probe sequence
aggtatattttctacaattgcgtat

SEQ ID NO: 254718 - DNA, 25 bp, Probe sequence
actcggaatctcaatgggtatttat

SEQ ID NO: 254719 - DNA, 25 bp, Probe sequence
aaggtctgtaattgtcacgaatgat

SEQ ID NO: 254720 - DNA, 25 bp, Probe sequence
aatcattctttcttttggtttgctt

SEQ ID NO: 254721 - DNA, 25 bp, Probe sequence
aatttttattggtatgtgctcggta

SEQ ID NO: 254722 - DNA, 25 bp, Probe sequence
aattgcgtatgtactggtaatcggt

SEQ ID NO: 254723 - DNA, 25 bp, Probe sequence
caaaatttctctaatactattgttt

SEQ ID NO: 254724 - DNA, 25 bp, Probe sequence
cacacaacttgaatatggcactttt

SEQ ID NO: 254725 - DNA, 25 bp, Probe sequence
cttacaatacctcttgctttttcaa

SEQ ID NO: 254726 - DNA, 25 bp, Probe sequence
gctaatatactgtctgcattgtgca

SEQ ID NO: 254727 - DNA, 25 bp, Probe sequence
gctttttcaagtgcgttaggatcat

SEQ ID NO: 254728 - DNA, 25 bp, Probe sequence
gaaatggtgatttaactactatatt

SEQ ID NO: 254729 - DNA, 25 bp, Probe sequence
gagatttttattcttacaatacctc

SEQ ID NO: 254730 - DNA, 25 bp, Probe sequence
gtaggacgttataattatgctttag

SEQ ID NO: 254731 - DNA, 25 bp, Probe sequence
gtctcaaattactcggaatctcaat

SEQ ID NO: 254732 - DNA, 25 bp, Probe sequence
gtgaggccttgttatcattgttatt

SEQ ID NO: 254733 - DNA, 25 bp, Probe sequence
gggttattcgcaaattcaatcagtc

SEQ ID NO: 254734 - DNA, 25 bp, Probe sequence
ggggacaactataatagccactgga

SEQ ID NO: 254735 - DNA, 25 bp, Probe sequence
ggaacacctgaggatgtaggacgtt

SEQ ID NO: 254736 - DNA, 25 bp, Probe sequence
ggatcattaaatacaggaattccta

SEQ ID NO: 254737 - DNA, 25 bp, Probe sequence
tgagtttgtttttaggtgaggcctt

SEQ ID NO: 254738 - DNA, 25 bp, Probe sequence
tcaatcagtcaagtttttttaccca

SEQ ID NO: 254739 - DNA, 25 bp, Probe sequence
taactgctccaatttttttatttat

SEQ ID NO: 254740 - DNA, 25 bp, Probe sequence
tactatttcacaattcgttgcttta

SEQ ID NO: 254741 - DNA, 25 bp, Probe sequence
tatgctttagttataactgctccaa

SEQ ID NO: 254742 - DNA, 25 bp, Probe sequence
tatatattctttttcacacaacttg

SEQ ID NO: 254743 - DNA, 25 bp, Probe sequence
tttgctttttatactcagtggtatt

SEQ ID NO: 254744 - DNA, 25 bp, Probe sequence
attttcatagaatatttatcggtaa

SEQ ID NO: 254745 - DNA, 25 bp, Probe sequence
atattagaaaatgcggattacacaa

SEQ ID NO: 254746 - DNA, 25 bp, Probe sequence
atcctgagatagataattttcatag

SEQ ID NO: 254747 - DNA, 25 bp, Probe sequence
atgttttcatagggattaattcaat

SEQ ID NO: 254748 - DNA, 25 bp, Probe sequence
agtggtgtaaaatttgctacccatg

SEQ ID NO: 254749 - DNA, 25 bp, Probe sequence
acatttggatctgagccttacctga

SEQ ID NO: 254750 - DNA, 25 bp, Probe sequence
aatttgctacccatgatggtggggt

SEQ ID NO: 254751 - DNA, 25 bp, Probe sequence
aaagtatagaggcctatgaaactaa

SEQ ID NO: 254752 - DNA, 25 bp, Probe sequence
aatgattgtaggtttttaagtgttg

SEQ ID NO: 254753 - DNA, 25 bp, Probe sequence
aatcatgtaacaataactagtggtg

SEQ ID NO: 254754 - DNA, 25 bp, Probe sequence
aattttgccaggagtaacaatagga

SEQ ID NO: 254755 - DNA, 25 bp, Probe sequence
gctgggagtgtggtaacgaaagatg

SEQ ID NO: 254756 - DNA, 25 bp, Probe sequence
gaaattgggtgtacaagttggaaat

SEQ ID NO: 254757 - DNA, 25 bp, Probe sequence
gagccttacctgattcaaataggaa

SEQ ID NO: 254758 - DNA, 25 bp, Probe sequence
gaggcctatgaaactaaaatattag

SEQ ID NO: 254759 - DNA, 25 bp, Probe sequence
gatggtggggtatggatttttagaa

SEQ ID NO: 254760 - DNA, 25 bp, Probe sequence
gatctgagccttacctgattcaaat

SEQ ID NO: 254761 - DNA, 25 bp, Probe sequence
gttgtagtaggtgctgggagtgtgg

SEQ ID NO: 254762 - DNA, 25 bp, Probe sequence
gttaatgaaaaggaatctatctgaa

SEQ ID NO: 254763 - DNA, 25 bp, Probe sequence
gtaggtgctgggagtgtggtaacga

SEQ ID NO: 254764 - DNA, 25 bp, Probe sequence
gtaggtttttaagtgttgatagatc

SEQ ID NO: 254765 - DNA, 25 bp, Probe sequence
gtgtaaaatttgctacccatgatgg

SEQ ID NO: 254766 - DNA, 25 bp, Probe sequence
gtaacgaaagatgtacctgataatg

SEQ ID NO: 254767 - DNA, 25 bp, Probe sequence
gtaattattggtggtaatcctgcca

SEQ ID NO: 254768 - DNA, 25 bp, Probe sequence
ggtgctgggagtgtggtaacgaaag

SEQ ID NO: 254769 - DNA, 25 bp, Probe sequence
ggattaattcaataattttgccagg

SEQ ID NO: 254770 - DNA, 25 bp, Probe sequence
ggaaataatgttgtagtaggtgctg

SEQ ID NO: 254771 - DNA, 25 bp, Probe sequence
tggatctgagccttacctgattcaa

SEQ ID NO: 254772 - DNA, 25 bp, Probe sequence
tggtggtaatcctgccaaaaaaatt

SEQ ID NO: 254773 - DNA, 25 bp, Probe sequence
tctgagccttacctgattcaaatag

SEQ ID NO: 254774 - DNA, 25 bp, Probe sequence
tcaacatttggatctgagccttacc

SEQ ID NO: 254775 - DNA, 25 bp, Probe sequence
tatttatcggtaataatgttttcat

SEQ ID NO: 254776 - DNA, 25 bp, Probe sequence
tttggatctgagccttacctgattc

SEQ ID NO: 254777 - DNA, 25 bp, Probe sequence
ttattggtggtaatcctgccaaaaa

SEQ ID NO: 254778 - DNA, 25 bp, Probe sequence
attactttctttttcagcaaatgta

SEQ ID NO: 254779 - DNA, 25 bp, Probe sequence
atatcaatatgactacacaagaatt

SEQ ID NO: 254780 - DNA, 25 bp, Probe sequence
atcaatattttaaagactcttcatt

SEQ ID NO: 254781 - DNA, 25 bp, Probe sequence
agtactgaaagccattatagaaatc

SEQ ID NO: 254782 - DNA, 25 bp, Probe sequence
aagactcttcatttgaattagaatt

SEQ ID NO: 254783 - DNA, 25 bp, Probe sequence
caattgtattgttatatcttcgaat

SEQ ID NO: 254784 - DNA, 25 bp, Probe sequence
ccgggagcattgatagaagcgcatc

SEQ ID NO: 254785 - DNA, 25 bp, Probe sequence
ccaaaaacttgggcctcaactatca

SEQ ID NO: 254786 - DNA, 25 bp, Probe sequence
gaataacacactttagaacttccaa

SEQ ID NO: 254787 - DNA, 25 bp, Probe sequence
gaattagagggattaccgggagcat

SEQ ID NO: 254788 - DNA, 25 bp, Probe sequence
gaatattttttgtttcctagtgaat

SEQ ID NO: 254789 - DNA, 25 bp, Probe sequence
gaatctatgggtattacgatacatt

SEQ ID NO: 254790 - DNA, 25 bp, Probe sequence
gaatgaatcgtggcggtgcagaatt

SEQ ID NO: 254791 - DNA, 25 bp, Probe sequence
gaagcgcatcatcacaattgtattg

SEQ ID NO: 254792 - DNA, 25 bp, Probe sequence
gaaccaattatttttgttagatgta

SEQ ID NO: 254793 - DNA, 25 bp, Probe sequence
gaaaaaggggcgaattagatgatga

SEQ ID NO: 254794 - DNA, 25 bp, Probe sequence
gaaatctttagtacgaaaatcttat

SEQ ID NO: 254795 - DNA, 25 bp, Probe sequence
gaaattacttttgttggcaatattc

SEQ ID NO: 254796 - DNA, 25 bp, Probe sequence
gagtttcatgtatgtgctacatcag

SEQ ID NO: 254797 - DNA, 25 bp, Probe sequence
gattcaattactttctttttcagca

SEQ ID NO: 254798 - DNA, 25 bp, Probe sequence
gattctaatgtttttgatatcaata

SEQ ID NO: 254799 - DNA, 25 bp, Probe sequence
gttggcaatattcaaactgattatg

SEQ ID NO: 254800 - DNA, 25 bp, Probe sequence
gttttatttatgtcggtaggttcat

SEQ ID NO: 254801 - DNA, 25 bp, Probe sequence
gtcacatactttttatgagtggatt

SEQ ID NO: 254802 - DNA, 25 bp, Probe sequence
gtcggtaggttcattcatactaaga

SEQ ID NO: 254803 - DNA, 25 bp, Probe sequence
gtgctacatcaggaaaaaggggcga

SEQ ID NO: 254804 - DNA, 25 bp, Probe sequence
gggcctcaactatcaaaaagctaat

SEQ ID NO: 254805 - DNA, 25 bp, Probe sequence
gggagtttgagtttcatgtatgtgc

SEQ ID NO: 254806 - DNA, 25 bp, Probe sequence
ggagaagtgaataacccattagatt

SEQ ID NO: 254807 - DNA, 25 bp, Probe sequence
ggcggtgcagaattaagaactatgg

SEQ ID NO: 254808 - DNA, 25 bp, Probe sequence
tgttgtacatagtcacatacttttt

SEQ ID NO: 254809 - DNA, 25 bp, Probe sequence
taatctcaatgaaactttttccgaa

SEQ ID NO: 254810 - DNA, 25 bp, Probe sequence
tagttttcctttcaagttcataaag

SEQ ID NO: 254811 - DNA, 25 bp, Probe sequence
tttagcagaatgaatcgtggcggtg

SEQ ID NO: 254812 - DNA, 25 bp, Probe sequence
attaatcacaggtacagcaggtttt

SEQ ID NO: 254813 - DNA, 25 bp, Probe sequence
atatgcaccatataaagtctacaat

SEQ ID NO: 254814 - DNA, 25 bp, Probe sequence
atctagttctgtttatggtgcaaat

SEQ ID NO: 254815 - DNA, 25 bp, Probe sequence
atccaaggacgtatattgattctaa

SEQ ID NO: 254816 - DNA, 25 bp, Probe sequence
atggtcaggggccgaccctgaccct

SEQ ID NO: 254817 - DNA, 25 bp, Probe sequence
agcacttcggataatattgatcatc

SEQ ID NO: 254818 - DNA, 25 bp, Probe sequence
aaatgatcaagctatagacgtctat

SEQ ID NO: 254819 - DNA, 25 bp, Probe sequence
aacaaggtcattacgttataggtgt

SEQ ID NO: 254820 - DNA, 25 bp, Probe sequence
aactacatggatttacaaccaggag

SEQ ID NO: 254821 - DNA, 25 bp, Probe sequence
aaccagcgtcccctaataaagaatg

SEQ ID NO: 254822 - DNA, 25 bp, Probe sequence
aatgattattattcagtttctttga

SEQ ID NO: 254823 - DNA, 25 bp, Probe sequence
catttatacaatttacctacaacag

SEQ ID NO: 254824 - DNA, 25 bp, Probe sequence
cctggttcctcatatgcaccatata

SEQ ID NO: 254825 - DNA, 25 bp, Probe sequence
gctgctcaagcaggtgttagataca

SEQ ID NO: 254826 - DNA, 25 bp, Probe sequence
gcttgttaagaaaccagcgtcccct

SEQ ID NO: 254827 - DNA, 25 bp, Probe sequence
gagctaatggcacatacgtatagtc

SEQ ID NO: 254828 - DNA, 25 bp, Probe sequence
gagagactttacttacgtggatgat

SEQ ID NO: 254829 - DNA, 25 bp, Probe sequence
gatcatccgttaagtttatatgcag

SEQ ID NO: 254830 - DNA, 25 bp, Probe sequence
gatatggcgctatttaaatttacaa

SEQ ID NO: 254831 - DNA, 25 bp, Probe sequence
gatttttcacagtatatggtccatg

SEQ ID NO: 254832 - DNA, 25 bp, Probe sequence
gattctaatattgtcggttttatga

SEQ ID NO: 254833 - DNA, 25 bp, Probe sequence
gattgatggaatttgtagaggctat

SEQ ID NO: 254834 - DNA, 25 bp, Probe sequence
gtagtagttaatttagctgctcaag

SEQ ID NO: 254835 - DNA, 25 bp, Probe sequence
gggaacaacagtccagttagattga

SEQ ID NO: 254836 - DNA, 25 bp, Probe sequence
gggtcacatcttgcgaaaaaactaa

SEQ ID NO: 254837 - DNA, 25 bp, Probe sequence
gggggagaccagatatggcgctatt

SEQ ID NO: 254838 - DNA, 25 bp, Probe sequence
ggtacagcaggttttattgggtcac

SEQ ID NO: 254839 - DNA, 25 bp, Probe sequence
ggtgcaaatacttctaaaccattta

SEQ ID NO: 254840 - DNA, 25 bp, Probe sequence
ggttttattgggtcacatcttgcga

SEQ ID NO: 254841 - DNA, 25 bp, Probe sequence
ggagatgtacctgaaacttatgcaa

SEQ ID NO: 254842 - DNA, 25 bp, Probe sequence
tgcagtaggcattttaatattcaaa

SEQ ID NO: 254843 - DNA, 25 bp, Probe sequence
taaaccatttagcacttcggataat

SEQ ID NO: 254844 - DNA, 25 bp, Probe sequence
tatagacgtctataatcacggaaat

SEQ ID NO: 254845 - DNA, 25 bp, Probe sequence
tttatgcttcatctagttctgttta

SEQ ID NO: 254846 - DNA, 25 bp, Probe sequence
attggatctacgtttgttgattata

SEQ ID NO: 254847 - DNA, 25 bp, Probe sequence
ataggcttctctcacaaaatttgga

SEQ ID NO: 254848 - DNA, 25 bp, Probe sequence
atgcaattactctttgtacatgatt

SEQ ID NO: 254849 - DNA, 25 bp, Probe sequence
agatctattttgtctaagcaatatc

SEQ ID NO: 254850 - DNA, 25 bp, Probe sequence
agatttgtatattcaaccaagttta

SEQ ID NO: 254851 - DNA, 25 bp, Probe sequence
aaggacataacgtagctataaaatc

SEQ ID NO: 254852 - DNA, 25 bp, Probe sequence
aaggcatttcaaacgtacaatctgt

SEQ ID NO: 254853 - DNA, 25 bp, Probe sequence
aatatttgaagcccttacaatttct

SEQ ID NO: 254854 - DNA, 25 bp, Probe sequence
caaccaagtttaacagagggacatt

SEQ ID NO: 254855 - DNA, 25 bp, Probe sequence
gcgtctaatgctggtggtaattcgg

SEQ ID NO: 254856 - DNA, 25 bp, Probe sequence
gctagcatagcgatttatgtaacta

SEQ ID NO: 254857 - DNA, 25 bp, Probe sequence
gctataaatcacctaaatctctaat

SEQ ID NO: 254858 - DNA, 25 bp, Probe sequence
gcagcatttgacgcatattggtttc

SEQ ID NO: 254859 - DNA, 25 bp, Probe sequence
gaatttgtgggtgatgggcccagta

SEQ ID NO: 254860 - DNA, 25 bp, Probe sequence
gaagcccttacaatttctatcaaga

SEQ ID NO: 254861 - DNA, 25 bp, Probe sequence
gacgcatattggtttcatggatcaa

SEQ ID NO: 254862 - DNA, 25 bp, Probe sequence
gagtaacaaatatccttgtaacggg

SEQ ID NO: 254863 - DNA, 25 bp, Probe sequence
gagggacattgtcgagcaattgtgg

SEQ ID NO: 254864 - DNA, 25 bp, Probe sequence
gttacaacctggaaaatattcaaat

SEQ ID NO: 254865 - DNA, 25 bp, Probe sequence
gtagttggtgcagcatttgacgcat

SEQ ID NO: 254866 - DNA, 25 bp, Probe sequence
gtaaaatttatgacaagacagcgtt

SEQ ID NO: 254867 - DNA, 25 bp, Probe sequence
gtgatgggcccagtaagaaatttat

SEQ ID NO: 254868 - DNA, 25 bp, Probe sequence
gtgttttaggatttattgcagctct

SEQ ID NO: 254869 - DNA, 25 bp, Probe sequence
ggtggtaattcggatagtgttaaca

SEQ ID NO: 254870 - DNA, 25 bp, Probe sequence
ggatttattgcagctctaatatgta

SEQ ID NO: 254871 - DNA, 25 bp, Probe sequence
ggaatcgatatttaaccatttttga

SEQ ID NO: 254872 - DNA, 25 bp, Probe sequence
tggaaaaattttatcgttacctatg

SEQ ID NO: 254873 - DNA, 25 bp, Probe sequence
tggagtgcctacattagcgtctaat

SEQ ID NO: 254874 - DNA, 25 bp, Probe sequence
tgatggtgttttaattagggtacca

SEQ ID NO: 254875 - DNA, 25 bp, Probe sequence
tatggtggaagtagttggtgcagca

SEQ ID NO: 254876 - DNA, 25 bp, Probe sequence
tatcgttacctatggaatatttaca

SEQ ID NO: 254877 - DNA, 25 bp, Probe sequence
tattactcaataggcttctctcaca

SEQ ID NO: 254878 - DNA, 25 bp, Probe sequence
ttggacttattggatctacgtttgt

SEQ ID NO: 254879 - DNA, 25 bp, Probe sequence
ttgtacatgatttcccagttgaaaa

SEQ ID NO: 254880 - DNA, 25 bp, Probe sequence
attgaatcgcaatttgtacagaatg

SEQ ID NO: 254881 - DNA, 25 bp, Probe sequence
attaagttttacaccaattgctatt

SEQ ID NO: 254882 - DNA, 25 bp, Probe sequence
atagcttaccttgattattttaaag

SEQ ID NO: 254883 - DNA, 25 bp, Probe sequence
atactactactacaccattattgag

SEQ ID NO: 254884 - DNA, 25 bp, Probe sequence
atcactgttgcaaatataaaccaat

SEQ ID NO: 254885 - DNA, 25 bp, Probe sequence
atgcttcttctgaaggagcaccttt

SEQ ID NO: 254886 - DNA, 25 bp, Probe sequence
aaaaatgggcactggcggttcgact

SEQ ID NO: 254887 - DNA, 25 bp, Probe sequence
actaatgtgaatttgtcaacagcaa

SEQ ID NO: 254888 - DNA, 25 bp, Probe sequence
acagttattcataggattgcgagat

SEQ ID NO: 254889 - DNA, 25 bp, Probe sequence
aaaagcttttaattgtccagtgcgt

SEQ ID NO: 254890 - DNA, 25 bp, Probe sequence
aacaatgattttttacagtctagag

SEQ ID NO: 254891 - DNA, 25 bp, Probe sequence
aagataccatcaacacctggtggaa

SEQ ID NO: 254892 - DNA, 25 bp, Probe sequence
aatcattcaccaataattttccaaa

SEQ ID NO: 254893 - DNA, 25 bp, Probe sequence
caccaattgctatttttcctaatgc

SEQ ID NO: 254894 - DNA, 25 bp, Probe sequence
ctgaaactttggatggctatactac

SEQ ID NO: 254895 - DNA, 25 bp, Probe sequence
gctatttttcctaatgcagaaactt

SEQ ID NO: 254896 - DNA, 25 bp, Probe sequence
gcttttaattgtccagtgcgtaatc

SEQ ID NO: 254897 - DNA, 25 bp, Probe sequence
gcactggcggttcgactggtaaaag

SEQ ID NO: 254898 - DNA, 25 bp, Probe sequence
gaattatcggtcgtaacaatgattt

SEQ ID NO: 254899 - DNA, 25 bp, Probe sequence
gaaggagcaccttttattacagaaa

SEQ ID NO: 254900 - DNA, 25 bp, Probe sequence
gaaaatgagcttcccgtaaattatc

SEQ ID NO: 254901 - DNA, 25 bp, Probe sequence
gaaaagagttagtgtaggtggtaga

SEQ ID NO: 254902 - DNA, 25 bp, Probe sequence
gagttgaaattcaggtttggtacaa

SEQ ID NO: 254903 - DNA, 25 bp, Probe sequence
gagcttcccgtaaattatcaacaaa

SEQ ID NO: 254904 - DNA, 25 bp, Probe sequence
gagtgtaatgatttatttgaacttc

SEQ ID NO: 254905 - DNA, 25 bp, Probe sequence
gatatctgcttatcatgctgatggt

SEQ ID NO: 254906 - DNA, 25 bp, Probe sequence
gtttttatactactactacaccatt

SEQ ID NO: 254907 - DNA, 25 bp, Probe sequence
gtagctactggagtgtttgagtgta

SEQ ID NO: 254908 - DNA, 25 bp, Probe sequence
gtgcgtaatcaatatgcttcttctg

SEQ ID NO: 254909 - DNA, 25 bp, Probe sequence
gtgacaggtttttatactactacta

SEQ ID NO: 254910 - DNA, 25 bp, Probe sequence
ggtacaaatactaatttccattttg

SEQ ID NO: 254911 - DNA, 25 bp, Probe sequence
ggttttttatactaatgcatatgat

SEQ ID NO: 254912 - DNA, 25 bp, Probe sequence
ggatggctatactacagttattcat

SEQ ID NO: 254913 - DNA, 25 bp, Probe sequence
taaaccaattgcctgaaattacgaa

SEQ ID NO: 254914 - DNA, 25 bp, Probe sequence
attactccagacacaatcgttgtat

SEQ ID NO: 254915 - DNA, 25 bp, Probe sequence
agttcagtagtcacagcaggagttc

SEQ ID NO: 254916 - DNA, 25 bp, Probe sequence
actcacctgaaagaattaatcctgg

SEQ ID NO: 254917 - DNA, 25 bp, Probe sequence
aaagctcaggaagttgggcaccatc

SEQ ID NO: 254918 - DNA, 25 bp, Probe sequence
aaccaggattagtagggggacattg

SEQ ID NO: 254919 - DNA, 25 bp, Probe sequence
aacgtgatgtaaatattgccctaat

SEQ ID NO: 254920 - DNA, 25 bp, Probe sequence
aagcatcttctattaaagtagcaga

SEQ ID NO: 254921 - DNA, 25 bp, Probe sequence
aaggttgtatctggccaaacgcttg

SEQ ID NO: 254922 - DNA, 25 bp, Probe sequence
aatattctggactcgtttgtggtaa

SEQ ID NO: 254923 - DNA, 25 bp, Probe sequence
cgaggtattaaaagcttcaggaaca

SEQ ID NO: 254924 - DNA, 25 bp, Probe sequence
gctgtgccaacaccaatcgataagc

SEQ ID NO: 254925 - DNA, 25 bp, Probe sequence
gcaggagttcataaagcatcttcta

SEQ ID NO: 254926 - DNA, 25 bp, Probe sequence
gcaacagttaatgtgctaggtctta

SEQ ID NO: 254927 - DNA, 25 bp, Probe sequence
gaatctacagtttatcctggcgcaa

SEQ ID NO: 254928 - DNA, 25 bp, Probe sequence
gaaggtaattactccagacacaatc

SEQ ID NO: 254929 - DNA, 25 bp, Probe sequence
gaagttgggcaccatcctgaagtga

SEQ ID NO: 254930 - DNA, 25 bp, Probe sequence
gaagaagaatgtgtacctgtattgg

SEQ ID NO: 254931 - DNA, 25 bp, Probe sequence
gatttttttgttggttactcacctg

SEQ ID NO: 254932 - DNA, 25 bp, Probe sequence
gattttattattatagctgtgccaa

SEQ ID NO: 254933 - DNA, 25 bp, Probe sequence
gattgtggcatagtgtttgacatta

SEQ ID NO: 254934 - DNA, 25 bp, Probe sequence
gttgcagacgtatatagttcagtag

SEQ ID NO: 254935 - DNA, 25 bp, Probe sequence
gtttatcctggcgcaacagaagaag

SEQ ID NO: 254936 - DNA, 25 bp, Probe sequence
gtatctggccaaacgcttgaagtat

SEQ ID NO: 254937 - DNA, 25 bp, Probe sequence
gtggacccatattatttaacacata

SEQ ID NO: 254938 - DNA, 25 bp, Probe sequence
ggggacattgcattggtgtggaccc

SEQ ID NO: 254939 - DNA, 25 bp, Probe sequence
ggtacatacttttgaaaccattact

SEQ ID NO: 254940 - DNA, 25 bp, Probe sequence
ggttatgtaggtttaccagtagctg

SEQ ID NO: 254941 - DNA, 25 bp, Probe sequence
ggatgtagtgttatttgcagtgcca

SEQ ID NO: 254942 - DNA, 25 bp, Probe sequence
ggcaccatcctgaagtgattttagc

SEQ ID NO: 254943 - DNA, 25 bp, Probe sequence
ggctaaatatattgcttctaacgtt

SEQ ID NO: 254944 - DNA, 25 bp, Probe sequence
tggaacttcttgaattttaaaccag

SEQ ID NO: 254945 - DNA, 25 bp, Probe sequence
taccagtagctgtaacttttgggaa

SEQ ID NO: 254946 - DNA, 25 bp, Probe sequence
taaacctgatttattaccattatta

SEQ ID NO: 254947 - DNA, 25 bp, Probe sequence
ttgcagtgccacataaagactatat

SEQ ID NO: 254948 - DNA, 25 bp, Probe sequence
attctggtactccaaaagcaggatt

SEQ ID NO: 254949 - DNA, 25 bp, Probe sequence
attacccaaagacctattagaatat

SEQ ID NO: 254950 - DNA, 25 bp, Probe sequence
atttattgttaattctggtactcca

SEQ ID NO: 254951 - DNA, 25 bp, Probe sequence
atgtcaaattgcttgttattggtag

SEQ ID NO: 254952 - DNA, 25 bp, Probe sequence
atggatgttcacattgtttcgagtg

SEQ ID NO: 254953 - DNA, 25 bp, Probe sequence
agaggctcaagcacttgaagtgcca

SEQ ID NO: 254954 - DNA, 25 bp, Probe sequence
aactcaaaatcctaatgtagtacta

SEQ ID NO: 254955 - DNA, 25 bp, Probe sequence
aaggtgactttaaagcaatcgctga

SEQ ID NO: 254956 - DNA, 25 bp, Probe sequence
aatatttcatttagttactgtttct

SEQ ID NO: 254957 - DNA, 25 bp, Probe sequence
aattttgttattggctatgtaggaa

SEQ ID NO: 254958 - DNA, 25 bp, Probe sequence
caagcatgtttcagatccaatttca

SEQ ID NO: 254959 - DNA, 25 bp, Probe sequence
cacattgtttcgagtgatggtaagg

SEQ ID NO: 254960 - DNA, 25 bp, Probe sequence
caggcgctattgatactgtagtaaa

SEQ ID NO: 254961 - DNA, 25 bp, Probe sequence
gctgcgtttattacccaaagaccta

SEQ ID NO: 254962 - DNA, 25 bp, Probe sequence
gcaactgatataatagcaatttctg

SEQ ID NO: 254963 - DNA, 25 bp, Probe sequence
gaatctgactatttatttttaactc

SEQ ID NO: 254964 - DNA, 25 bp, Probe sequence
gaatgtatttgtttttccaactcat

SEQ ID NO: 254965 - DNA, 25 bp, Probe sequence
gaagtgccagtaattactactaatg

SEQ ID NO: 254966 - DNA, 25 bp, Probe sequence
gaaatgttagtatagaggctcaagc

SEQ ID NO: 254967 - DNA, 25 bp, Probe sequence
gaaatagctcatgttatacctatga

SEQ ID NO: 254968 - DNA, 25 bp, Probe sequence
gagaaactattggtcataatggaag

SEQ ID NO: 254969 - DNA, 25 bp, Probe sequence
gagtattccacttatgagaggacaa

SEQ ID NO: 254970 - DNA, 25 bp, Probe sequence
gatagcaatgttttgtgcaactgat

SEQ ID NO: 254971 - DNA, 25 bp, Probe sequence
gttactgtttctaagagtattccac

SEQ ID NO: 254972 - DNA, 25 bp, Probe sequence
gtttcagatccaatttcattttata

SEQ ID NO: 254973 - DNA, 25 bp, Probe sequence
gtatgtacaatacttttctaaaaga

SEQ ID NO: 254974 - DNA, 25 bp, Probe sequence
gtagtactaatcaagcatgtttcag

SEQ ID NO: 254975 - DNA, 25 bp, Probe sequence
ggatttggtagttctaatggtatac

SEQ ID NO: 254976 - DNA, 25 bp, Probe sequence
ggaacaatagctgcgtttattaccc

SEQ ID NO: 254977 - DNA, 25 bp, Probe sequence
tactgtgagaggtttaaggcttgaa

SEQ ID NO: 254978 - DNA, 25 bp, Probe sequence
tactactaatgttacaggcgctatt

SEQ ID NO: 254979 - DNA, 25 bp, Probe sequence
tactgttttgggatttggtagttct

SEQ ID NO: 254980 - DNA, 25 bp, Probe sequence
tattacatctaatttggctaaggaa

SEQ ID NO: 254981 - DNA, 25 bp, Probe sequence
tttgtttttccaactcatagagaag

SEQ ID NO: 254982 - DNA, 25 bp, Probe sequence
atattttctaatcttgaaacacttt

SEQ ID NO: 254983 - DNA, 25 bp, Probe sequence
atacaattaccaatccaaatattat

SEQ ID NO: 254984 - DNA, 25 bp, Probe sequence
atcgtattattggtggaaatccgag

SEQ ID NO: 254985 - DNA, 25 bp, Probe sequence
aggggtgataaacttgtaattggca

SEQ ID NO: 254986 - DNA, 25 bp, Probe sequence
actccatctcttgaagatttaccat

SEQ ID NO: 254987 - DNA, 25 bp, Probe sequence
acatgtgacacatcattatgaattt

SEQ ID NO: 254988 - DNA, 25 bp, Probe sequence
acaaaagatgtaccaccatatcgta

SEQ ID NO: 254989 - DNA, 25 bp, Probe sequence
aaatttgaagaacatgtgacacatc

SEQ ID NO: 254990 - DNA, 25 bp, Probe sequence
aaaagcaactccatctcttgaagat

SEQ ID NO: 254991 - DNA, 25 bp, Probe sequence
aaaatggtgggattggtcagcacaa

SEQ ID NO: 254992 - DNA, 25 bp, Probe sequence
caataacaacttatccttttaatat

SEQ ID NO: 254993 - DNA, 25 bp, Probe sequence
ctgttgttggaaatgatgtgtggat

SEQ ID NO: 254994 - DNA, 25 bp, Probe sequence
gaaacactttgtagctctgatttag

SEQ ID NO: 254995 - DNA, 25 bp, Probe sequence
gaaatatggccctgatccaaatagc

SEQ ID NO: 254996 - DNA, 25 bp, Probe sequence
gagcaattgttgctgcgaattcagt

SEQ ID NO: 254997 - DNA, 25 bp, Probe sequence
gagattatacttactattccgatgt

SEQ ID NO: 254998 - DNA, 25 bp, Probe sequence
gatgttaacggagctgaaaaatttg

SEQ ID NO: 254999 - DNA, 25 bp, Probe sequence
gatgtgtggattggtcagaatgtta

SEQ ID NO: 255000 - DNA, 25 bp, Probe sequence
gatgtaccaccatatcgtattattg

SEQ ID NO: 255001 - DNA, 25 bp, Probe sequence
gatccaaatagcatatatccacatg

SEQ ID NO: 255002 - DNA, 25 bp, Probe sequence
gatttaccatttaagggagatactg

SEQ ID NO: 255003 - DNA, 25 bp, Probe sequence
gttgctgcgaattcagttgttacaa

SEQ ID NO: 255004 - DNA, 25 bp, Probe sequence
gggaaaaagcaactccatctcttga

SEQ ID NO: 255005 - DNA, 25 bp, Probe sequence
gggagatactgttgttggaaatgat

SEQ ID NO: 255006 - DNA, 25 bp, Probe sequence
ggtggaaatccgagtagaattataa

SEQ ID NO: 255007 - DNA, 25 bp, Probe sequence
ggtgggattggtcagcacaaaaaat

SEQ ID NO: 255008 - DNA, 25 bp, Probe sequence
ggtcagaatgttactgttatgccag

SEQ ID NO: 255009 - DNA, 25 bp, Probe sequence
ggagatggagcaattgttgctgcga

SEQ ID NO: 255010 - DNA, 25 bp, Probe sequence
ggagcaaaccatagaatgaattcaa

SEQ ID NO: 255011 - DNA, 25 bp, Probe sequence
ggccctgatccaaatagcatatatc

SEQ ID NO: 255012 - DNA, 25 bp, Probe sequence
tactgttatgccaggaattcaaata

SEQ ID NO: 255013 - DNA, 25 bp, Probe sequence
tagcatatatccacatgaagaaata

SEQ ID NO: 255014 - DNA, 25 bp, Probe sequence
tatacttactattccgatgttaacg

SEQ ID NO: 255015 - DNA, 25 bp, Probe sequence
ttggcaagttttgtgcaatagctga

SEQ ID NO: 255016 - DNA, 25 bp, Probe sequence
attggaagtgcatttcttaaatctt

SEQ ID NO: 255017 - DNA, 25 bp, Probe sequence
atttaataatagccataagtactga

SEQ ID NO: 255018 - DNA, 25 bp, Probe sequence
atgccttatatttatttaataatag

SEQ ID NO: 255019 - DNA, 25 bp, Probe sequence
agtgcatttcttaaatcttcagaag

SEQ ID NO: 255020 - DNA, 25 bp, Probe sequence
agtactgaagttattggaagtgcat

SEQ ID NO: 255021 - DNA, 25 bp, Probe sequence
agccataagtactgaagttattgga

SEQ ID NO: 255022 - DNA, 25 bp, Probe sequence
aaatcttcagaaggcttttcaaaat

SEQ ID NO: 255023 - DNA, 25 bp, Probe sequence
aaatgccttatatttatttaataat

SEQ ID NO: 255024 - DNA, 25 bp, Probe sequence
aagttattggaagtgcatttcttaa

SEQ ID NO: 255025 - DNA, 25 bp, Probe sequence
aagtgcatttcttaaatcttcagaa

SEQ ID NO: 255026 - DNA, 25 bp, Probe sequence
aatcttcagaaggcttttcaaaatt

SEQ ID NO: 255027 - DNA, 25 bp, Probe sequence
aataatagccataagtactgaagtt

SEQ ID NO: 255028 - DNA, 25 bp, Probe sequence
aatagccataagtactgaagttatt

SEQ ID NO: 255029 - DNA, 25 bp, Probe sequence
caaaatttataccatcctttagaat

SEQ ID NO: 255030 - DNA, 25 bp, Probe sequence
catttcttaaatcttcagaaggctt

SEQ ID NO: 255031 - DNA, 25 bp, Probe sequence
cttaaatcttcagaaggcttttcaa

SEQ ID NO: 255032 - DNA, 25 bp, Probe sequence
gcttttcaaaatttataccatcctt

SEQ ID NO: 255033 - DNA, 25 bp, Probe sequence
gcatttcttaaatcttcagaaggct

SEQ ID NO: 255034 - DNA, 25 bp, Probe sequence
gaaggcttttcaaaatttataccat

SEQ ID NO: 255035 - DNA, 25 bp, Probe sequence
gaagtgcatttcttaaatcttcaga

SEQ ID NO: 255036 - DNA, 25 bp, Probe sequence
gaagttattggaagtgcatttctta

SEQ ID NO: 255037 - DNA, 25 bp, Probe sequence
gttattggaagtgcatttcttaaat

SEQ ID NO: 255038 - DNA, 25 bp, Probe sequence
gtgcatttcttaaatcttcagaagg

SEQ ID NO: 255039 - DNA, 25 bp, Probe sequence
ggagttaaaaatgccttatatttat

SEQ ID NO: 255040 - DNA, 25 bp, Probe sequence
ggaagtgcatttcttaaatcttcag

SEQ ID NO: 255041 - DNA, 25 bp, Probe sequence
ggcttttcaaaatttataccatcct

SEQ ID NO: 255042 - DNA, 25 bp, Probe sequence
tggaagtgcatttcttaaatcttca

SEQ ID NO: 255043 - DNA, 25 bp, Probe sequence
tcttcagaaggcttttcaaaattta

SEQ ID NO: 255044 - DNA, 25 bp, Probe sequence
tcaaaatttataccatcctttagaa

SEQ ID NO: 255045 - DNA, 25 bp, Probe sequence
tataccatcctttagaataaaatta

SEQ ID NO: 255046 - DNA, 25 bp, Probe sequence
tttcaaaatttataccatcctttag

SEQ ID NO: 255047 - DNA, 25 bp, Probe sequence
ttataccatcctttagaataaaatt

SEQ ID NO: 255048 - DNA, 25 bp, Probe sequence
ttcttaaatcttcagaaggcttttc

SEQ ID NO: 255049 - DNA, 25 bp, Probe sequence
ttcaaaatttataccatcctttaga

SEQ ID NO: 255050 - DNA, 25 bp, Probe sequence
ggtggttcacgtgcaaggggcaccc

SEQ ID NO: 255051 - DNA, 25 bp, Probe sequence
attagtgcaatgtatcgaggagaat

SEQ ID NO: 255052 - DNA, 25 bp, Probe sequence
atattgcgggtcatgtttttcgtat

SEQ ID NO: 255053 - DNA, 25 bp, Probe sequence
atcatatttttgaagtactcggtat

SEQ ID NO: 255054 - DNA, 25 bp, Probe sequence
atcctctctgtcttatatagaaggt

SEQ ID NO: 255055 - DNA, 25 bp, Probe sequence
agtactcggtatctcactttttgaa

SEQ ID NO: 255056 - DNA, 25 bp, Probe sequence
agaaattatcctctctgtcttatat

SEQ ID NO: 255057 - DNA, 25 bp, Probe sequence
agcagggttctctttaatgtttgta

SEQ ID NO: 255058 - DNA, 25 bp, Probe sequence
acgacatgaccgagaagctttataa

SEQ ID NO: 255059 - DNA, 25 bp, Probe sequence
aaatactattaatcaattcgctaca

SEQ ID NO: 255060 - DNA, 25 bp, Probe sequence
aaactgcttgaaacttttgaacata

SEQ ID NO: 255061 - DNA, 25 bp, Probe sequence
aaacaggcagaaacttatcccaatg

SEQ ID NO: 255062 - DNA, 25 bp, Probe sequence
aataatgcttattgtatcaacgaaa

SEQ ID NO: 255063 - DNA, 25 bp, Probe sequence
caattcgctacaaagctggatgatg

SEQ ID NO: 255064 - DNA, 25 bp, Probe sequence
cagagcacggaattgttactgccaa

SEQ ID NO: 255065 - DNA, 25 bp, Probe sequence
catagaaataaccttgttgtacctc

SEQ ID NO: 255066 - DNA, 25 bp, Probe sequence
catgtggatttaattttacgtgata

SEQ ID NO: 255067 - DNA, 25 bp, Probe sequence
catccccatggttatattagtgcaa

SEQ ID NO: 255068 - DNA, 25 bp, Probe sequence
tcagactgggcatccccatggttat

SEQ ID NO: 255069 - DNA, 25 bp, Probe sequence
gcgggtcatgtttttcgtatagttt

SEQ ID NO: 255070 - DNA, 25 bp, Probe sequence
gaatgctacgacatgaccgagaagc

SEQ ID NO: 255071 - DNA, 25 bp, Probe sequence
gaaacttatcccaatgctttgcaga

SEQ ID NO: 255072 - DNA, 25 bp, Probe sequence
gattaatggcggcggatggttagtc

SEQ ID NO: 255073 - DNA, 25 bp, Probe sequence
gatatcggcatctattacaattcag

SEQ ID NO: 255074 - DNA, 25 bp, Probe sequence
gttactgccaattatcagactgggc

SEQ ID NO: 255075 - DNA, 25 bp, Probe sequence
gtacctcccggagcatggggtgatt

SEQ ID NO: 255076 - DNA, 25 bp, Probe sequence
gtcataaacgggtatcatgtggatt

SEQ ID NO: 255077 - DNA, 25 bp, Probe sequence
ggggtgattggattaatggcggcgg

SEQ ID NO: 255078 - DNA, 25 bp, Probe sequence
ggggcacccatacagaggattcgga

SEQ ID NO: 255079 - DNA, 25 bp, Probe sequence
ggtatctcactttttgaatgctacg

SEQ ID NO: 255080 - DNA, 25 bp, Probe sequence
ggtattgttttaggtggttcacgtg

SEQ ID NO: 255081 - DNA, 25 bp, Probe sequence
ggcggcggatggttagtcataaacg

SEQ ID NO: 255082 - DNA, 25 bp, Probe sequence
tgtttttcgtatagtttcatgttta

SEQ ID NO: 255083 - DNA, 25 bp, Probe sequence
tatgtttgaagcagggttctcttta

SEQ ID NO: 255084 - DNA, 25 bp, Probe sequence
attggacctttacagaattactcta

SEQ ID NO: 255085 - DNA, 25 bp, Probe sequence
attgtggtttcaaaatcggctccgt

SEQ ID NO: 255086 - DNA, 25 bp, Probe sequence
atatagaagatatcgccgtatgtaa

SEQ ID NO: 255087 - DNA, 25 bp, Probe sequence
aggcataggcagcgcgcttatcaat

SEQ ID NO: 255088 - DNA, 25 bp, Probe sequence
aaatcggctccgtcgatactatgtt

SEQ ID NO: 255089 - DNA, 25 bp, Probe sequence
aaattctatcataattgtggtttca

SEQ ID NO: 255090 - DNA, 25 bp, Probe sequence
aacccaggacaataaccttatagct

SEQ ID NO: 255091 - DNA, 25 bp, Probe sequence
aacccagcgaaccatttgaggtgat

SEQ ID NO: 255092 - DNA, 25 bp, Probe sequence
aagctaccaagacgaagaggatgaa

SEQ ID NO: 255093 - DNA, 25 bp, Probe sequence
aatgcgtcggaaaagttaaactgcg

SEQ ID NO: 255094 - DNA, 25 bp, Probe sequence
aataaccttatagcttgtaaattct

SEQ ID NO: 255095 - DNA, 25 bp, Probe sequence
aatatatctttactaccaagacgat

SEQ ID NO: 255096 - DNA, 25 bp, Probe sequence
aattggaaccggtacgcttatatag

SEQ ID NO: 255097 - DNA, 25 bp, Probe sequence
cagggggcaaggcataggcagcgcg

SEQ ID NO: 255098 - DNA, 25 bp, Probe sequence
ctaccaagacgataaatgcgtcgga

SEQ ID NO: 255099 - DNA, 25 bp, Probe sequence
cggctccgtcgatactatgttatac

SEQ ID NO: 255100 - DNA, 25 bp, Probe sequence
gcgccatatttaaaaagctaccaag

SEQ ID NO: 255101 - DNA, 25 bp, Probe sequence
gcataaaaacttgcatggactaatg

SEQ ID NO: 255102 - DNA, 25 bp, Probe sequence
gcagggcacctgaaagatatcgata

SEQ ID NO: 255103 - DNA, 25 bp, Probe sequence
gaattactctatgaagcgccatatt

SEQ ID NO: 255104 - DNA, 25 bp, Probe sequence
gaagaggatgaggaggcagattgcc

SEQ ID NO: 255105 - DNA, 25 bp, Probe sequence
gaaaacgagaattggacctttacag

SEQ ID NO: 255106 - DNA, 25 bp, Probe sequence
gatactatgttatacgccaactttg

SEQ ID NO: 255107 - DNA, 25 bp, Probe sequence
gataaacccagcgaaccatttgagg

SEQ ID NO: 255108 - DNA, 25 bp, Probe sequence
gatatcgataaacccagcgaaccat

SEQ ID NO: 255109 - DNA, 25 bp, Probe sequence
gatatcgccgtatgtaaggatttca

SEQ ID NO: 255110 - DNA, 25 bp, Probe sequence
gttatacgccaactttgaaaaagct

SEQ ID NO: 255111 - DNA, 25 bp, Probe sequence
gtaaggatttcagggggcaaggcat

SEQ ID NO: 255112 - DNA, 25 bp, Probe sequence
ggactaatgcttgaaacccaggaca

SEQ ID NO: 255113 - DNA, 25 bp, Probe sequence
ggaaccggtacgcttatatagaaga

SEQ ID NO: 255114 - DNA, 25 bp, Probe sequence
ggcagcgcgcttatcaatatatcta

SEQ ID NO: 255115 - DNA, 25 bp, Probe sequence
ggcagattgccttgaatatattgac

SEQ ID NO: 255116 - DNA, 25 bp, Probe sequence
tgaaaaagctgttttctggtattta

SEQ ID NO: 255117 - DNA, 25 bp, Probe sequence
ttacagaaatgaaagcagggcacct

SEQ ID NO: 255118 - DNA, 25 bp, Probe sequence
ctaccaggttgccgggggaattcat

SEQ ID NO: 255119 - DNA, 25 bp, Probe sequence
attcggatgcggtgctgtttgggtc

SEQ ID NO: 255120 - DNA, 25 bp, Probe sequence
attagccttgatggccgcattaaag

SEQ ID NO: 255121 - DNA, 25 bp, Probe sequence
atatcctgctgaaacagaggctgat

SEQ ID NO: 255122 - DNA, 25 bp, Probe sequence
aggagtcatacctgacagcagaggt

SEQ ID NO: 255123 - DNA, 25 bp, Probe sequence
actgccactccgaaggaatatttga

SEQ ID NO: 255124 - DNA, 25 bp, Probe sequence
aaagcctttcagatcctgcatgagc

SEQ ID NO: 255125 - DNA, 25 bp, Probe sequence
aatactgtttttactgcatttgaaa

SEQ ID NO: 255126 - DNA, 25 bp, Probe sequence
catgcggacagacagtggcggtgga

SEQ ID NO: 255127 - DNA, 25 bp, Probe sequence
catgtggactatgaaaaagcctttc

SEQ ID NO: 255128 - DNA, 25 bp, Probe sequence
gcggacagacagtggcggtggatta

SEQ ID NO: 255129 - DNA, 25 bp, Probe sequence
gcggtgctgtttgggtccaatactg

SEQ ID NO: 255130 - DNA, 25 bp, Probe sequence
gcatttgaaaaatatcctgctgaaa

SEQ ID NO: 255131 - DNA, 25 bp, Probe sequence
gcagaggtatcttgagaagtcttca

SEQ ID NO: 255132 - DNA, 25 bp, Probe sequence
gaagtcttcattgcttaagaaatct

SEQ ID NO: 255133 - DNA, 25 bp, Probe sequence
gaaggaaattgtcattctggtatca

SEQ ID NO: 255134 - DNA, 25 bp, Probe sequence
gaaaatcataacaagcccggaggac

SEQ ID NO: 255135 - DNA, 25 bp, Probe sequence
gaaaccaaagataattatgcacaca

SEQ ID NO: 255136 - DNA, 25 bp, Probe sequence
gaaatcttggatatctgaaggaaat

SEQ ID NO: 255137 - DNA, 25 bp, Probe sequence
gaccccagaccaataggagtcatac

SEQ ID NO: 255138 - DNA, 25 bp, Probe sequence
gatggccgcattaaaggctttgata

SEQ ID NO: 255139 - DNA, 25 bp, Probe sequence
gatcctgcatgagcaatatgggtgt

SEQ ID NO: 255140 - DNA, 25 bp, Probe sequence
gataatccggaagtttactaccagg

SEQ ID NO: 255141 - DNA, 25 bp, Probe sequence
gtcattctggtatcaactgccactc

SEQ ID NO: 255142 - DNA, 25 bp, Probe sequence
gtgtcaggaaatgatcatgtggact

SEQ ID NO: 255143 - DNA, 25 bp, Probe sequence
ggaggaccccagaccaataggagtc

SEQ ID NO: 255144 - DNA, 25 bp, Probe sequence
gggtccaatactgtttttactgcat

SEQ ID NO: 255145 - DNA, 25 bp, Probe sequence
ggggaattcattcggatgcggtgct

SEQ ID NO: 255146 - DNA, 25 bp, Probe sequence
gggtgtaaatacatgcggacagaca

SEQ ID NO: 255147 - DNA, 25 bp, Probe sequence
ggaggaaggcattacccatatattg

SEQ ID NO: 255148 - DNA, 25 bp, Probe sequence
ggcattacccatatattgtgtcagg

SEQ ID NO: 255149 - DNA, 25 bp, Probe sequence
taaaggctttgataatccggaagtt

SEQ ID NO: 255150 - DNA, 25 bp, Probe sequence
tatgcacacacaaattagccttgat

SEQ ID NO: 255151 - DNA, 25 bp, Probe sequence
tatcaactgccactccgaaggaata

SEQ ID NO: 255152 - DNA, 25 bp, Probe sequence
atatttcatatgcaacatgggcagg

SEQ ID NO: 255153 - DNA, 25 bp, Probe sequence
agtacttacaactctagtttcagtc

SEQ ID NO: 255154 - DNA, 25 bp, Probe sequence
agtacttctgaatgtttttggatca

SEQ ID NO: 255155 - DNA, 25 bp, Probe sequence
acttacaactctagtttcagtcatt

SEQ ID NO: 255156 - DNA, 25 bp, Probe sequence
acatgggcaggattaggtttagtac

SEQ ID NO: 255157 - DNA, 25 bp, Probe sequence
acaactctagtttcagtcattattt

SEQ ID NO: 255158 - DNA, 25 bp, Probe sequence
aacacttatttcgttcggaatatgt

SEQ ID NO: 255159 - DNA, 25 bp, Probe sequence
aactatggccaacactaggaacact

SEQ ID NO: 255160 - DNA, 25 bp, Probe sequence
aatcagcagaaggttttacaaaact

SEQ ID NO: 255161 - DNA, 25 bp, Probe sequence
caacactaggaacacttatttcgtt

SEQ ID NO: 255162 - DNA, 25 bp, Probe sequence
cacttatttcgttcggaatatgttt

SEQ ID NO: 255163 - DNA, 25 bp, Probe sequence
cactaggaacacttatttcgttcgg

SEQ ID NO: 255164 - DNA, 25 bp, Probe sequence
cagccatgaaatatttaccactaaa

SEQ ID NO: 255165 - DNA, 25 bp, Probe sequence
ctctagtttcagtcattatttttaa

SEQ ID NO: 255166 - DNA, 25 bp, Probe sequence
gaatgtttttggatcaggacactaa

SEQ ID NO: 255167 - DNA, 25 bp, Probe sequence
gattaggtttagtacttacaactct

SEQ ID NO: 255168 - DNA, 25 bp, Probe sequence
gtatattttcaataaccctaattat

SEQ ID NO: 255169 - DNA, 25 bp, Probe sequence
gggacaagttttttaaaatcagcag

SEQ ID NO: 255170 - DNA, 25 bp, Probe sequence
ggcaggattaggtttagtacttaca

SEQ ID NO: 255171 - DNA, 25 bp, Probe sequence
ggagtagtacttctgaatgtttttg

SEQ ID NO: 255172 - DNA, 25 bp, Probe sequence
ggccaacactaggaacacttatttc

SEQ ID NO: 255173 - DNA, 25 bp, Probe sequence
taatctaattagtatattttcaata

SEQ ID NO: 255174 - DNA, 25 bp, Probe sequence
tactttttaagtacagccatgaaat

SEQ ID NO: 255175 - DNA, 25 bp, Probe sequence
taaccctaattattattggagtagt

SEQ ID NO: 255176 - DNA, 25 bp, Probe sequence
tacaaaactatggccaacactagga

SEQ ID NO: 255177 - DNA, 25 bp, Probe sequence
tatgcaacatgggcaggattaggtt

SEQ ID NO: 255178 - DNA, 25 bp, Probe sequence
tacagccatgaaatatttaccacta

SEQ ID NO: 255179 - DNA, 25 bp, Probe sequence
taggtttagtacttacaactctagt

SEQ ID NO: 255180 - DNA, 25 bp, Probe sequence
tagtttcagtcattatttttaaaga

SEQ ID NO: 255181 - DNA, 25 bp, Probe sequence
taggaacacttatttcgttcggaat

SEQ ID NO: 255182 - DNA, 25 bp, Probe sequence
tatggccaacactaggaacacttat

SEQ ID NO: 255183 - DNA, 25 bp, Probe sequence
tttacttatagcaataataaccgaa

SEQ ID NO: 255184 - DNA, 25 bp, Probe sequence
tttaccactaaatatttcatatgca

SEQ ID NO: 255185 - DNA, 25 bp, Probe sequence
tttagtacttacaactctagtttca

SEQ ID NO: 255186 - DNA, 25 bp, Probe sequence
atttggatatcgatgctgttgaggc

SEQ ID NO: 255187 - DNA, 25 bp, Probe sequence
atatctctcaattagaagaaccaca

SEQ ID NO: 255188 - DNA, 25 bp, Probe sequence
atacattaattcttgatgaaccaac

SEQ ID NO: 255189 - DNA, 25 bp, Probe sequence
atcaatttctttggagagatgcttc

SEQ ID NO: 255190 - DNA, 25 bp, Probe sequence
aggtgttgtgttatttgcttcccat

SEQ ID NO: 255191 - DNA, 25 bp, Probe sequence
agaattgttaattacctatgaaggt

SEQ ID NO: 255192 - DNA, 25 bp, Probe sequence
agcaagattacatttttatcgcaat

SEQ ID NO: 255193 - DNA, 25 bp, Probe sequence
acaacattgttgaagctgattctag

SEQ ID NO: 255194 - DNA, 25 bp, Probe sequence
aaattggatacgtcagtcaaaactt

SEQ ID NO: 255195 - DNA, 25 bp, Probe sequence
aaaggttgcttttgccaagctattt

SEQ ID NO: 255196 - DNA, 25 bp, Probe sequence
aaagagcttccttctattaaaatgg

SEQ ID NO: 255197 - DNA, 25 bp, Probe sequence
aaactagcagagggatttcaagatc

SEQ ID NO: 255198 - DNA, 25 bp, Probe sequence
aacaatgggaacatctgaatctaga

SEQ ID NO: 255199 - DNA, 25 bp, Probe sequence
aatgctcgtagatgaacctacaagt

SEQ ID NO: 255200 - DNA, 25 bp, Probe sequence
cttttttggtagtatctcatgatag

SEQ ID NO: 255201 - DNA, 25 bp, Probe sequence
gccaagctatttgttagcgattgta

SEQ ID NO: 255202 - DNA, 25 bp, Probe sequence
ggcgcaaggaatgattaagccccct

SEQ ID NO: 255203 - DNA, 25 bp, Probe sequence
gaattcatcggtaattatacaaact

SEQ ID NO: 255204 - DNA, 25 bp, Probe sequence
gaatcagtaataatatcaccatcag

SEQ ID NO: 255205 - DNA, 25 bp, Probe sequence
gaaaatgttatgtctacctccattc

SEQ ID NO: 255206 - DNA, 25 bp, Probe sequence
gagtaccgtgatacttttttggtag

SEQ ID NO: 255207 - DNA, 25 bp, Probe sequence
gatcaatgttctttaatgctcgtag

SEQ ID NO: 255208 - DNA, 25 bp, Probe sequence
gattaagcccccttcaaaaacaatg

SEQ ID NO: 255209 - DNA, 25 bp, Probe sequence
gtcagtcaaaacttagatgttctac

SEQ ID NO: 255210 - DNA, 25 bp, Probe sequence
gtgttatttgcttcccatgataaaa

SEQ ID NO: 255211 - DNA, 25 bp, Probe sequence
ggagagatgcttcatttgtcattaa

SEQ ID NO: 255212 - DNA, 25 bp, Probe sequence
ggaaaatgcaacatgctactaaaca

SEQ ID NO: 255213 - DNA, 25 bp, Probe sequence
ggaatgacaatatgagtggtggtga

SEQ ID NO: 255214 - DNA, 25 bp, Probe sequence
tggagttggcaaaacaacactttta

SEQ ID NO: 255215 - DNA, 25 bp, Probe sequence
tgtctacctccattcaagatgaaac

SEQ ID NO: 255216 - DNA, 25 bp, Probe sequence
tgttctacaatctcataaatctatc

SEQ ID NO: 255217 - DNA, 25 bp, Probe sequence
tcatggtcgcaatgtaattagttta

SEQ ID NO: 255218 - DNA, 25 bp, Probe sequence
tagagagcaatttcatggtcgcaat

SEQ ID NO: 255219 - DNA, 25 bp, Probe sequence
ttatacaaaacctagctgaacaatt

SEQ ID NO: 255220 - DNA, 25 bp, Probe sequence
tcaaagggtacacacgacgtgatag

SEQ ID NO: 255221 - DNA, 25 bp, Probe sequence
atatcaaagggtacacacgacgtga

SEQ ID NO: 255222 - DNA, 25 bp, Probe sequence
atcaaagggtacacacgacgtgata

SEQ ID NO: 255223 - DNA, 25 bp, Probe sequence
atcaaatggtagtcctaatatcaaa

SEQ ID NO: 255224 - DNA, 25 bp, Probe sequence
atggtagtcctaatatcaaagggta

SEQ ID NO: 255225 - DNA, 25 bp, Probe sequence
agtggtcaaaggagtataaacaatc

SEQ ID NO: 255226 - DNA, 25 bp, Probe sequence
agtcctaatatcaaagggtacacac

SEQ ID NO: 255227 - DNA, 25 bp, Probe sequence
acagtggtcaaaggagtataaacaa

SEQ ID NO: 255228 - DNA, 25 bp, Probe sequence
acaatcaaatggtagtcctaatatc

SEQ ID NO: 255229 - DNA, 25 bp, Probe sequence
aaatggtagtcctaatatcaaaggg

SEQ ID NO: 255230 - DNA, 25 bp, Probe sequence
aatatcaaagggtacacacgacgtg

SEQ ID NO: 255231 - DNA, 25 bp, Probe sequence
aacagtggtcaaaggagtataaaca

SEQ ID NO: 255232 - DNA, 25 bp, Probe sequence
aatggtagtcctaatatcaaagggt

SEQ ID NO: 255233 - DNA, 25 bp, Probe sequence
aatcaaatggtagtcctaatatcaa

SEQ ID NO: 255234 - DNA, 25 bp, Probe sequence
caatcaaatggtagtcctaatatca

SEQ ID NO: 255235 - DNA, 25 bp, Probe sequence
caaatggtagtcctaatatcaaagg

SEQ ID NO: 255236 - DNA, 25 bp, Probe sequence
ctcgaacagtggtcaaaggagtata

SEQ ID NO: 255237 - DNA, 25 bp, Probe sequence
ctaatatcaaagggtacacacgacg

SEQ ID NO: 255238 - DNA, 25 bp, Probe sequence
cgaacagtggtcaaaggagtataaa

SEQ ID NO: 255239 - DNA, 25 bp, Probe sequence
gctcgaacagtggtcaaaggagtat

SEQ ID NO: 255240 - DNA, 25 bp, Probe sequence
gaacagtggtcaaaggagtataaac

SEQ ID NO: 255241 - DNA, 25 bp, Probe sequence
ggtagtcctaatatcaaagggtaca

SEQ ID NO: 255242 - DNA, 25 bp, Probe sequence
gtataaacaatcaaatggtagtcct

SEQ ID NO: 255243 - DNA, 25 bp, Probe sequence
gtagtcctaatatcaaagggtacac

SEQ ID NO: 255244 - DNA, 25 bp, Probe sequence
gtcctaatatcaaagggtacacacg

SEQ ID NO: 255245 - DNA, 25 bp, Probe sequence
gtggtcaaaggagtataaacaatca

SEQ ID NO: 255246 - DNA, 25 bp, Probe sequence
ggtcaaaggagtataaacaatcaaa

SEQ ID NO: 255247 - DNA, 25 bp, Probe sequence
tggtagtcctaatatcaaagggtac

SEQ ID NO: 255248 - DNA, 25 bp, Probe sequence
tcctaatatcaaagggtacacacga

SEQ ID NO: 255249 - DNA, 25 bp, Probe sequence
tcgaacagtggtcaaaggagtataa

SEQ ID NO: 255250 - DNA, 25 bp, Probe sequence
tcaaatggtagtcctaatatcaaag

SEQ ID NO: 255251 - DNA, 25 bp, Probe sequence
taatatcaaagggtacacacgacgt

SEQ ID NO: 255252 - DNA, 25 bp, Probe sequence
tatcaaagggtacacacgacgtgat

SEQ ID NO: 255253 - DNA, 25 bp, Probe sequence
tagtcctaatatcaaagggtacaca

SEQ ID NO: 255254 - DNA, 25 bp, Probe sequence
gggaattttctggaggagtaggtgc

SEQ ID NO: 255255 - DNA, 25 bp, Probe sequence
atattgagtggggggtatccttgcc

SEQ ID NO: 255256 - DNA, 25 bp, Probe sequence
atccatttagatttcctttagctca

SEQ ID NO: 255257 - DNA, 25 bp, Probe sequence
aggaacactgttctatccatatagt

SEQ ID NO: 255258 - DNA, 25 bp, Probe sequence
agcgctggcttgtcaacttatggag

SEQ ID NO: 255259 - DNA, 25 bp, Probe sequence
acgttaacaacatctcctagtcaaa

SEQ ID NO: 255260 - DNA, 25 bp, Probe sequence
actcgtggaattatgatgtagcgca

SEQ ID NO: 255261 - DNA, 25 bp, Probe sequence
aaatgccgcagaaactttgagaatt

SEQ ID NO: 255262 - DNA, 25 bp, Probe sequence
aaaagtatctcctaatgacattata

SEQ ID NO: 255263 - DNA, 25 bp, Probe sequence
aagccaactatcattcatgttttca

SEQ ID NO: 255264 - DNA, 25 bp, Probe sequence
ctttagctcaagtatacaaacctgt

SEQ ID NO: 255265 - DNA, 25 bp, Probe sequence
gctagaattcaatcgttccctgatg

SEQ ID NO: 255266 - DNA, 25 bp, Probe sequence
gcactaggcttagaaagcgctggct

SEQ ID NO: 255267 - DNA, 25 bp, Probe sequence
gaatgttattaagttggcagatgtt

SEQ ID NO: 255268 - DNA, 25 bp, Probe sequence
gaacgatattgaattcattgctgat

SEQ ID NO: 255269 - DNA, 25 bp, Probe sequence
gaaaagttggtattcaggtggtggt

SEQ ID NO: 255270 - DNA, 25 bp, Probe sequence
gaccaaatgccaattaactctgatt

SEQ ID NO: 255271 - DNA, 25 bp, Probe sequence
gttttcagatgaatatgagcctctt

SEQ ID NO: 255272 - DNA, 25 bp, Probe sequence
gtaacgctgtacctgtaaatctagc

SEQ ID NO: 255273 - DNA, 25 bp, Probe sequence
gtcatcctgatgaaactcgaccatt

SEQ ID NO: 255274 - DNA, 25 bp, Probe sequence
gggctggtggactagcactaggctt

SEQ ID NO: 255275 - DNA, 25 bp, Probe sequence
ggggtatccttgccaaacatttagt

SEQ ID NO: 255276 - DNA, 25 bp, Probe sequence
ggataagttgggacgagccttgttt

SEQ ID NO: 255277 - DNA, 25 bp, Probe sequence
ggattagtcaatcacgacgatggca

SEQ ID NO: 255278 - DNA, 25 bp, Probe sequence
ggagtaggtgcacaatacagacaaa

SEQ ID NO: 255279 - DNA, 25 bp, Probe sequence
ggacgagccttgtttgacgttaaca

SEQ ID NO: 255280 - DNA, 25 bp, Probe sequence
ggaaggttatgaggtttactggaat

SEQ ID NO: 255281 - DNA, 25 bp, Probe sequence
ggctgttgggtagatttacctgaac

SEQ ID NO: 255282 - DNA, 25 bp, Probe sequence
tcgaccatttagtatcagagagtat

SEQ ID NO: 255283 - DNA, 25 bp, Probe sequence
taatgtattcgaaacctttgccggg

SEQ ID NO: 255284 - DNA, 25 bp, Probe sequence
taaagttacagcatacagtgacaaa

SEQ ID NO: 255285 - DNA, 25 bp, Probe sequence
tagacgaagaagaccaaatgccaat

SEQ ID NO: 255286 - DNA, 25 bp, Probe sequence
tagttccaccaggaggctgttgggt

SEQ ID NO: 255287 - DNA, 25 bp, Probe sequence
ttactggaatattttgaactcgtgg

SEQ ID NO: 255288 - DNA, 25 bp, Probe sequence
attgcttctggagatcaattttata

SEQ ID NO: 255289 - DNA, 25 bp, Probe sequence
atatccagacgccatttgctattat

SEQ ID NO: 255290 - DNA, 25 bp, Probe sequence
agagggctatactaattatccagtt

SEQ ID NO: 255291 - DNA, 25 bp, Probe sequence
agcaaaggcaaataaccgaacatta

SEQ ID NO: 255292 - DNA, 25 bp, Probe sequence
aaaccaagattttctcacccaagag

SEQ ID NO: 255293 - DNA, 25 bp, Probe sequence
aacattcctatagcattagatgatt

SEQ ID NO: 255294 - DNA, 25 bp, Probe sequence
aagcataatactttgaccggtactc

SEQ ID NO: 255295 - DNA, 25 bp, Probe sequence
aagattggttagcggcagagttgca

SEQ ID NO: 255296 - DNA, 25 bp, Probe sequence
aagtatttaagttttatcactgatg

SEQ ID NO: 255297 - DNA, 25 bp, Probe sequence
aatactttgaccggtactcatacta

SEQ ID NO: 255298 - DNA, 25 bp, Probe sequence
cacccaagagtaagaattgcttctg

SEQ ID NO: 255299 - DNA, 25 bp, Probe sequence
ctatactaattatccagttggttat

SEQ ID NO: 255300 - DNA, 25 bp, Probe sequence
gcaactagcttataacattcctata

SEQ ID NO: 255301 - DNA, 25 bp, Probe sequence
gaagactattactaatcatgtagga

SEQ ID NO: 255302 - DNA, 25 bp, Probe sequence
gaccggtactcatactaaaagtctg

SEQ ID NO: 255303 - DNA, 25 bp, Probe sequence
gacgccatttgctattatgttagaa

SEQ ID NO: 255304 - DNA, 25 bp, Probe sequence
gagtgagcaagattggttagcggca

SEQ ID NO: 255305 - DNA, 25 bp, Probe sequence
gatgaggatctattcgaatgtattg

SEQ ID NO: 255306 - DNA, 25 bp, Probe sequence
gatgctttcaagcaactagcttata

SEQ ID NO: 255307 - DNA, 25 bp, Probe sequence
gatacatttaagatgacttttgata

SEQ ID NO: 255308 - DNA, 25 bp, Probe sequence
gattatgatgttgctaaggatgata

SEQ ID NO: 255309 - DNA, 25 bp, Probe sequence
gttggttatgattatgatgttgcta

SEQ ID NO: 255310 - DNA, 25 bp, Probe sequence
gttactggagaagaagatgctttca

SEQ ID NO: 255311 - DNA, 25 bp, Probe sequence
gtttcaaaaaatatgtggctatgca

SEQ ID NO: 255312 - DNA, 25 bp, Probe sequence
gtactcatactaaaagtctgtttca

SEQ ID NO: 255313 - DNA, 25 bp, Probe sequence
gtggctatgcagaaaaatatccaga

SEQ ID NO: 255314 - DNA, 25 bp, Probe sequence
ggatcaagcttaggactatttgcag

SEQ ID NO: 255315 - DNA, 25 bp, Probe sequence
ggatgataatacactttttgcagaa

SEQ ID NO: 255316 - DNA, 25 bp, Probe sequence
ggcagagttgcaaagacaagttgag

SEQ ID NO: 255317 - DNA, 25 bp, Probe sequence
tacagagtatgaaaaagcgcttgaa

SEQ ID NO: 255318 - DNA, 25 bp, Probe sequence
tatttgcagaactttatcaacaagc

SEQ ID NO: 255319 - DNA, 25 bp, Probe sequence
tttctattaattatcctaaatctaa

SEQ ID NO: 255320 - DNA, 25 bp, Probe sequence
ttatcactgatgaggatctattcga

SEQ ID NO: 255321 - DNA, 25 bp, Probe sequence
ttaggactatttgcagaactttatc

SEQ ID NO: 255322 - DNA, 25 bp, Probe sequence
attgctggtcagtatagagtttata

SEQ ID NO: 255323 - DNA, 25 bp, Probe sequence
atagagtttatagcgaagaaggcgc

SEQ ID NO: 255324 - DNA, 25 bp, Probe sequence
agcctggccttcagcatttaaggta

SEQ ID NO: 255325 - DNA, 25 bp, Probe sequence
accattgctggtcagtatagagttt

SEQ ID NO: 255326 - DNA, 25 bp, Probe sequence
cattgctggtcagtatagagtttat

SEQ ID NO: 255327 - DNA, 25 bp, Probe sequence
cgctaataaaagcggtttagcctgg

SEQ ID NO: 255328 - DNA, 25 bp, Probe sequence
ctggccttcagcatttaaggtatag

SEQ ID NO: 255329 - DNA, 25 bp, Probe sequence
ctggtcagtatagagtttatagcga

SEQ ID NO: 255330 - DNA, 25 bp, Probe sequence
cctggccttcagcatttaaggtata

SEQ ID NO: 255331 - DNA, 25 bp, Probe sequence
ccattgctggtcagtatagagttta

SEQ ID NO: 255332 - DNA, 25 bp, Probe sequence
gcctggccttcagcatttaaggtat

SEQ ID NO: 255333 - DNA, 25 bp, Probe sequence
gcgctaataaaagcggtttagcctg

SEQ ID NO: 255334 - DNA, 25 bp, Probe sequence
gctggtcagtatagagtttatagcg

SEQ ID NO: 255335 - DNA, 25 bp, Probe sequence
gctaataaaagcggtttagcctggc

SEQ ID NO: 255336 - DNA, 25 bp, Probe sequence
gaaggcgctaataaaagcggtttag

SEQ ID NO: 255337 - DNA, 25 bp, Probe sequence
gaagaaggcgctaataaaagcggtt

SEQ ID NO: 255338 - DNA, 25 bp, Probe sequence
gagtttatagcgaagaaggcgctaa

SEQ ID NO: 255339 - DNA, 25 bp, Probe sequence
gtatagagtttatagcgaagaaggc

SEQ ID NO: 255340 - DNA, 25 bp, Probe sequence
gtaccattgctggtcagtatagagt

SEQ ID NO: 255341 - DNA, 25 bp, Probe sequence
gtcagtatagagtttatagcgaaga

SEQ ID NO: 255342 - DNA, 25 bp, Probe sequence
ggtcagtatagagtttatagcgaag

SEQ ID NO: 255343 - DNA, 25 bp, Probe sequence
ggtaccattgctggtcagtatagag

SEQ ID NO: 255344 - DNA, 25 bp, Probe sequence
ggcgctaataaaagcggtttagcct

SEQ ID NO: 255345 - DNA, 25 bp, Probe sequence
tggtcagtatagagtttatagcgaa

SEQ ID NO: 255346 - DNA, 25 bp, Probe sequence
tgctggtcagtatagagtttatagc

SEQ ID NO: 255347 - DNA, 25 bp, Probe sequence
taataaaagcggtttagcctggcct

SEQ ID NO: 255348 - DNA, 25 bp, Probe sequence
tcagtatagagtttatagcgaagaa

SEQ ID NO: 255349 - DNA, 25 bp, Probe sequence
taccattgctggtcagtatagagtt

SEQ ID NO: 255350 - DNA, 25 bp, Probe sequence
tagcctggccttcagcatttaaggt

SEQ ID NO: 255351 - DNA, 25 bp, Probe sequence
tagagtttatagcgaagaaggcgct

SEQ ID NO: 255352 - DNA, 25 bp, Probe sequence
tatagagtttatagcgaagaaggcg

SEQ ID NO: 255353 - DNA, 25 bp, Probe sequence
tttagcctggccttcagcatttaag

SEQ ID NO: 255354 - DNA, 25 bp, Probe sequence
ttagcctggccttcagcatttaagg

SEQ ID NO: 255355 - DNA, 25 bp, Probe sequence
ttgctggtcagtatagagtttatag

SEQ ID NO: 255356 - DNA, 25 bp, Probe sequence
aggtgttaatattgttggttctatc

SEQ ID NO: 255357 - DNA, 25 bp, Probe sequence
agttgaggacaatgtggttgacaat

SEQ ID NO: 255358 - DNA, 25 bp, Probe sequence
agataaaacacctacagttgttggt

SEQ ID NO: 255359 - DNA, 25 bp, Probe sequence
accaatcaattaacaggtgcttttg

SEQ ID NO: 255360 - DNA, 25 bp, Probe sequence
aaaccttatggtgtcaactgggatg

SEQ ID NO: 255361 - DNA, 25 bp, Probe sequence
aaagcattgacttgggaacataata

SEQ ID NO: 255362 - DNA, 25 bp, Probe sequence
aacacctacagttgttggtggaatt

SEQ ID NO: 255363 - DNA, 25 bp, Probe sequence
aactcctaaggaatatggtactgat

SEQ ID NO: 255364 - DNA, 25 bp, Probe sequence
aacgttttgggtagctactgtatct

SEQ ID NO: 255365 - DNA, 25 bp, Probe sequence
aagacccagaaaaagcattgacttg

SEQ ID NO: 255366 - DNA, 25 bp, Probe sequence
aatatggtactgatgaagacttttc

SEQ ID NO: 255367 - DNA, 25 bp, Probe sequence
caaacagattaccatgaaccacgtg

SEQ ID NO: 255368 - DNA, 25 bp, Probe sequence
cactgcttgcaggtttaggtatttt

SEQ ID NO: 255369 - DNA, 25 bp, Probe sequence
ctagtcaagtagagcaaggtgttaa

SEQ ID NO: 255370 - DNA, 25 bp, Probe sequence
gcactagcagtatttaccaatcaat

SEQ ID NO: 255371 - DNA, 25 bp, Probe sequence
gaagagccttttaaagaccaagcta

SEQ ID NO: 255372 - DNA, 25 bp, Probe sequence
gaagacttttcagatgtagaccctc

SEQ ID NO: 255373 - DNA, 25 bp, Probe sequence
gaaccacgtgattctaaagacccag

SEQ ID NO: 255374 - DNA, 25 bp, Probe sequence
gaccctcatgtatatgatgcggacg

SEQ ID NO: 255375 - DNA, 25 bp, Probe sequence
gaccaagctaaaccttatggtgtca

SEQ ID NO: 255376 - DNA, 25 bp, Probe sequence
gatgcggacgaagagccttttaaag

SEQ ID NO: 255377 - DNA, 25 bp, Probe sequence
gatagtgttattgttcaaacagatt

SEQ ID NO: 255378 - DNA, 25 bp, Probe sequence
gattaccatgaaccacgtgattcta

SEQ ID NO: 255379 - DNA, 25 bp, Probe sequence
gttggttctatcttaacactgcttg

SEQ ID NO: 255380 - DNA, 25 bp, Probe sequence
gtagctactgtatctgcactagcag

SEQ ID NO: 255381 - DNA, 25 bp, Probe sequence
gggagttattgatgaaaaccctgaa

SEQ ID NO: 255382 - DNA, 25 bp, Probe sequence
gggatgagacagtagatacgactaa

SEQ ID NO: 255383 - DNA, 25 bp, Probe sequence
ggtgcttttggtttagactattcta

SEQ ID NO: 255384 - DNA, 25 bp, Probe sequence
ggttgacaatactaaaactcctaag

SEQ ID NO: 255385 - DNA, 25 bp, Probe sequence
tgcaggtttaggtattttagtagat

SEQ ID NO: 255386 - DNA, 25 bp, Probe sequence
tctgcactagcagtatttaccaatc

SEQ ID NO: 255387 - DNA, 25 bp, Probe sequence
tttcagatgtagaccctcatgtata

SEQ ID NO: 255388 - DNA, 25 bp, Probe sequence
ttctatcttaacactgcttgcaggt

SEQ ID NO: 255389 - DNA, 25 bp, Probe sequence
ttgggtagctactgtatctgcacta

SEQ ID NO: 255390 - DNA, 25 bp, Probe sequence
atgcgggatataaccgatgggctca

SEQ ID NO: 255391 - DNA, 25 bp, Probe sequence
agctcactcatatatttctgaaggt

SEQ ID NO: 255392 - DNA, 25 bp, Probe sequence
aactcttttggtggtactgctacgg

SEQ ID NO: 255393 - DNA, 25 bp, Probe sequence
aaaccagttaagcagtcaagtacaa

SEQ ID NO: 255394 - DNA, 25 bp, Probe sequence
aaaaccgagttagctacaatcagaa

SEQ ID NO: 255395 - DNA, 25 bp, Probe sequence
caaacagcgttttatgaggcatcac

SEQ ID NO: 255396 - DNA, 25 bp, Probe sequence
cagcacgtcaaggtatcgttacacg

SEQ ID NO: 255397 - DNA, 25 bp, Probe sequence
ctataaatccgagagcgctacgttt

SEQ ID NO: 255398 - DNA, 25 bp, Probe sequence
ctggaccttttactacgtgtcctca

SEQ ID NO: 255399 - DNA, 25 bp, Probe sequence
cctgacccttatggagaccttcaat

SEQ ID NO: 255400 - DNA, 25 bp, Probe sequence
tcgttacacgatatactggaccttt

SEQ ID NO: 255401 - DNA, 25 bp, Probe sequence
gcaatagttactaaccctgaccctt

SEQ ID NO: 255402 - DNA, 25 bp, Probe sequence
gaatgtggggtaatgctaaggatgc

SEQ ID NO: 255403 - DNA, 25 bp, Probe sequence
gaacacacgattacacaggaattac

SEQ ID NO: 255404 - DNA, 25 bp, Probe sequence
gaaagtcgtatagcttggcattgtg

SEQ ID NO: 255405 - DNA, 25 bp, Probe sequence
gacattatgggtcagctatggggag

SEQ ID NO: 255406 - DNA, 25 bp, Probe sequence
gaccctactaaaacttctatcactc

SEQ ID NO: 255407 - DNA, 25 bp, Probe sequence
gagcgctacgtttaagtgtacagca

SEQ ID NO: 255408 - DNA, 25 bp, Probe sequence
gatgggctcaaggtatagctcactc

SEQ ID NO: 255409 - DNA, 25 bp, Probe sequence
gtaaaacaccagtaccaacagtagt

SEQ ID NO: 255410 - DNA, 25 bp, Probe sequence
gtaattttacacaacgatgctggaa

SEQ ID NO: 255411 - DNA, 25 bp, Probe sequence
gggtatcagtgtatggacttagcag

SEQ ID NO: 255412 - DNA, 25 bp, Probe sequence
ggtcaagatgtttggatgcctgtaa

SEQ ID NO: 255413 - DNA, 25 bp, Probe sequence
ggagtactatattatggtcaatctg

SEQ ID NO: 255414 - DNA, 25 bp, Probe sequence
ggagaccttcaatatgttacagttc

SEQ ID NO: 255415 - DNA, 25 bp, Probe sequence
ggactactggtaattttgcaactta

SEQ ID NO: 255416 - DNA, 25 bp, Probe sequence
ggaattacacattttattagaccta

SEQ ID NO: 255417 - DNA, 25 bp, Probe sequence
tgtcctcatcgctctatgaagttgc

SEQ ID NO: 255418 - DNA, 25 bp, Probe sequence
tgccaatcaatgactgcatctgatg

SEQ ID NO: 255419 - DNA, 25 bp, Probe sequence
taccctgcttttagacctaagtacg

SEQ ID NO: 255420 - DNA, 25 bp, Probe sequence
tacgtgtcctcaagcaggagtacta

SEQ ID NO: 255421 - DNA, 25 bp, Probe sequence
tagacctaactttgctactgaatca

SEQ ID NO: 255422 - DNA, 25 bp, Probe sequence
tattaccaaactgcatgtcctcatc

SEQ ID NO: 255423 - DNA, 25 bp, Probe sequence
ttggcattgtgctaatcagtgggga

SEQ ID NO: 255424 - DNA, 25 bp, Probe sequence
atttgtgcctagcgagttaaaacct

SEQ ID NO: 255425 - DNA, 25 bp, Probe sequence
atctatctgattgcacatcgatttt

SEQ ID NO: 255426 - DNA, 25 bp, Probe sequence
atcgctttgtacactacatcaccaa

SEQ ID NO: 255427 - DNA, 25 bp, Probe sequence
atccctcactttttcgtcgatagat

SEQ ID NO: 255428 - DNA, 25 bp, Probe sequence
atgtatgggcgtgcagacctataga

SEQ ID NO: 255429 - DNA, 25 bp, Probe sequence
agatgaaatccctcactttttcgtc

SEQ ID NO: 255430 - DNA, 25 bp, Probe sequence
aaattttgtttactactgcacatat

SEQ ID NO: 255431 - DNA, 25 bp, Probe sequence
aactcattttgttagacccgcatac

SEQ ID NO: 255432 - DNA, 25 bp, Probe sequence
aacggttatcacgattctgtagtgt

SEQ ID NO: 255433 - DNA, 25 bp, Probe sequence
aacgtacaggtttatcaattcttga

SEQ ID NO: 255434 - DNA, 25 bp, Probe sequence
caaagcagaaccgaaacctacacca

SEQ ID NO: 255435 - DNA, 25 bp, Probe sequence
caaaacaatcctgcacctaaagacc

SEQ ID NO: 255436 - DNA, 25 bp, Probe sequence
cacctaaagaccctgaaccatcaaa

SEQ ID NO: 255437 - DNA, 25 bp, Probe sequence
cttacgttggtagtcctgcagcaaa

SEQ ID NO: 255438 - DNA, 25 bp, Probe sequence
cgcggagtcacggatggacatcacc

SEQ ID NO: 255439 - DNA, 25 bp, Probe sequence
gacacactggtattgttgtaggtcc

SEQ ID NO: 255440 - DNA, 25 bp, Probe sequence
gactatcaaaaggccgttaacgagc

SEQ ID NO: 255441 - DNA, 25 bp, Probe sequence
gactgggcaatcaatttaatcggca

SEQ ID NO: 255442 - DNA, 25 bp, Probe sequence
gagaacgttcaaattgcacactggt

SEQ ID NO: 255443 - DNA, 25 bp, Probe sequence
gagtgccagcaatattatcgttgac

SEQ ID NO: 255444 - DNA, 25 bp, Probe sequence
ggtacatcattctttgcgagtggca

SEQ ID NO: 255445 - DNA, 25 bp, Probe sequence
ggacattggctaatcaaggacatgc

SEQ ID NO: 255446 - DNA, 25 bp, Probe sequence
ggacatcaccaaccaaagcaattat

SEQ ID NO: 255447 - DNA, 25 bp, Probe sequence
ggaacacttggggacacactggtat

SEQ ID NO: 255448 - DNA, 25 bp, Probe sequence
ggaataactctaactcttacgttgg

SEQ ID NO: 255449 - DNA, 25 bp, Probe sequence
ggcagtggtgtcgatgttgatggtt

SEQ ID NO: 255450 - DNA, 25 bp, Probe sequence
tggaacccgcaaaaaccaggcacac

SEQ ID NO: 255451 - DNA, 25 bp, Probe sequence
tgaaatccagtagttttacctcaaa

SEQ ID NO: 255452 - DNA, 25 bp, Probe sequence
tgcaatggcgtttgcgcggagtcac

SEQ ID NO: 255453 - DNA, 25 bp, Probe sequence
taatccgaagccccaaacatctaat

SEQ ID NO: 255454 - DNA, 25 bp, Probe sequence
taaatctgctatggacactactaaa

SEQ ID NO: 255455 - DNA, 25 bp, Probe sequence
tacaccaccagcacaaaacaatcct

SEQ ID NO: 255456 - DNA, 25 bp, Probe sequence
ttgtatcgtatgaggtggaacccgc

SEQ ID NO: 255457 - DNA, 25 bp, Probe sequence
ttggtggcgctgaatttgttggaaa

SEQ ID NO: 255458 - DNA, 25 bp, Probe sequence
atgggtcttgttagtgatggcgaaa

SEQ ID NO: 255459 - DNA, 25 bp, Probe sequence
aggtcgtcgtgaaatcggtcacggt

SEQ ID NO: 255460 - DNA, 25 bp, Probe sequence
agacggaatcactgctttacaaatg

SEQ ID NO: 255461 - DNA, 25 bp, Probe sequence
agcaaacgtttcatccatcattata

SEQ ID NO: 255462 - DNA, 25 bp, Probe sequence
agcgcctttaggggaacatcaaatt

SEQ ID NO: 255463 - DNA, 25 bp, Probe sequence
acttcccacaattctctgttggttc

SEQ ID NO: 255464 - DNA, 25 bp, Probe sequence
acagcattattgatgaaaccggcgt

SEQ ID NO: 255465 - DNA, 25 bp, Probe sequence
aaatggttcttcttcacaagcaagt

SEQ ID NO: 255466 - DNA, 25 bp, Probe sequence
aattatcgatgggttgggtgtccaa

SEQ ID NO: 255467 - DNA, 25 bp, Probe sequence
ctgttggttcaacaggacgcgcggg

SEQ ID NO: 255468 - DNA, 25 bp, Probe sequence
cgggtgtgccaattaaagcgccagt

SEQ ID NO: 255469 - DNA, 25 bp, Probe sequence
gctgctcctcgtgaagaattaagtc

SEQ ID NO: 255470 - DNA, 25 bp, Probe sequence
gcaggtattgcaatgggtcttgtta

SEQ ID NO: 255471 - DNA, 25 bp, Probe sequence
gcaagtatttgcgcgggaacattag

SEQ ID NO: 255472 - DNA, 25 bp, Probe sequence
gaagaagacttcccttacacaatcc

SEQ ID NO: 255473 - DNA, 25 bp, Probe sequence
gaaaccggcgttaagattgatatcg

SEQ ID NO: 255474 - DNA, 25 bp, Probe sequence
gaaatcggtcacggtgcgttaggtg

SEQ ID NO: 255475 - DNA, 25 bp, Probe sequence
gaccaccttggcgatatggacttta

SEQ ID NO: 255476 - DNA, 25 bp, Probe sequence
gatgtcattggtaaaggtggcgaaa

SEQ ID NO: 255477 - DNA, 25 bp, Probe sequence
gatatcgatcaagacggtaacgtaa

SEQ ID NO: 255478 - DNA, 25 bp, Probe sequence
gttgaagtcacatcaagtatcactt

SEQ ID NO: 255479 - DNA, 25 bp, Probe sequence
gtaagtattgcttcatcagatgctg

SEQ ID NO: 255480 - DNA, 25 bp, Probe sequence
gtgccttagcacaaattattccatc

SEQ ID NO: 255481 - DNA, 25 bp, Probe sequence
gtgcgttaggtgaacgtgccttagc

SEQ ID NO: 255482 - DNA, 25 bp, Probe sequence
ggtttagaagaccaccttggcgata

SEQ ID NO: 255483 - DNA, 25 bp, Probe sequence
gggtgtccaagatagcaaacgtttc

SEQ ID NO: 255484 - DNA, 25 bp, Probe sequence
ggtggcgaaacaatcaacagcatta

SEQ ID NO: 255485 - DNA, 25 bp, Probe sequence
tcccttacacaatccgcttagtagc

SEQ ID NO: 255486 - DNA, 25 bp, Probe sequence
tggcgaaaactatacaatcttaaca

SEQ ID NO: 255487 - DNA, 25 bp, Probe sequence
tcatccatcattataacttcccaca

SEQ ID NO: 255488 - DNA, 25 bp, Probe sequence
taacggaagcattagaccaagcgaa

SEQ ID NO: 255489 - DNA, 25 bp, Probe sequence
taacaacaacgattgctgctcctcg

SEQ ID NO: 255490 - DNA, 25 bp, Probe sequence
ttaaagcgccagttgcaggtattgc

SEQ ID NO: 255491 - DNA, 25 bp, Probe sequence
ttatccgtttgtacattagcgcctt

SEQ ID NO: 255492 - DNA, 25 bp, Probe sequence
attaatgttggcagtcgttattttt

SEQ ID NO: 255493 - DNA, 25 bp, Probe sequence
attattaatgttggcagtcgttatt

SEQ ID NO: 255494 - DNA, 25 bp, Probe sequence
attattattaatgttggcagtcgtt

SEQ ID NO: 255495 - DNA, 25 bp, Probe sequence
atttttatgctattacctggttgat

SEQ ID NO: 255496 - DNA, 25 bp, Probe sequence
acctggttgattggactgtttgtat

SEQ ID NO: 255497 - DNA, 25 bp, Probe sequence
aaatttttatgctattacctggttg

SEQ ID NO: 255498 - DNA, 25 bp, Probe sequence
aaatggtctagtttaataatgggtg

SEQ ID NO: 255499 - DNA, 25 bp, Probe sequence
aatgttggcagtcgttatttttaca

SEQ ID NO: 255500 - DNA, 25 bp, Probe sequence
cagtcgttatttttacatttccaat

SEQ ID NO: 255501 - DNA, 25 bp, Probe sequence
ctggttgattggactgtttgtatta

SEQ ID NO: 255502 - DNA, 25 bp, Probe sequence
gctattacctggttgattggactgt

SEQ ID NO: 255503 - DNA, 25 bp, Probe sequence
gcagtcgttatttttacatttccaa

SEQ ID NO: 255504 - DNA, 25 bp, Probe sequence
gaaaatttttatgctattacctggt

SEQ ID NO: 255505 - DNA, 25 bp, Probe sequence
gattggactgtttgtattaattaac

SEQ ID NO: 255506 - DNA, 25 bp, Probe sequence
gttggcagtcgttatttttacattt

SEQ ID NO: 255507 - DNA, 25 bp, Probe sequence
gtattaattaacggtgtgattcaaa

SEQ ID NO: 255508 - DNA, 25 bp, Probe sequence
gtcgttatttttacatttccaattg

SEQ ID NO: 255509 - DNA, 25 bp, Probe sequence
gtgtgattcaaatcgtttaccgtag

SEQ ID NO: 255510 - DNA, 25 bp, Probe sequence
gtgattcaaatcgtttaccgtagaa

SEQ ID NO: 255511 - DNA, 25 bp, Probe sequence
ggtgtgattcaaatcgtttaccgta

SEQ ID NO: 255512 - DNA, 25 bp, Probe sequence
ggttgattggactgtttgtattaat

SEQ ID NO: 255513 - DNA, 25 bp, Probe sequence
ggcagtcgttatttttacatttcca

SEQ ID NO: 255514 - DNA, 25 bp, Probe sequence
ggactgtttgtattaattaacggtg

SEQ ID NO: 255515 - DNA, 25 bp, Probe sequence
tggcagtcgttatttttacatttcc

SEQ ID NO: 255516 - DNA, 25 bp, Probe sequence
tggtctagtttaataatgggtgtat

SEQ ID NO: 255517 - DNA, 25 bp, Probe sequence
tgattcaaatcgtttaccgtagaaa

SEQ ID NO: 255518 - DNA, 25 bp, Probe sequence
tcaaatcgtttaccgtagaaaagca

SEQ ID NO: 255519 - DNA, 25 bp, Probe sequence
taatgttggcagtcgttatttttac

SEQ ID NO: 255520 - DNA, 25 bp, Probe sequence
tatgctattacctggttgattggac

SEQ ID NO: 255521 - DNA, 25 bp, Probe sequence
tattacctggttgattggactgttt

SEQ ID NO: 255522 - DNA, 25 bp, Probe sequence
tttttatgctattacctggttgatt

SEQ ID NO: 255523 - DNA, 25 bp, Probe sequence
tttatgctattacctggttgattgg

SEQ ID NO: 255524 - DNA, 25 bp, Probe sequence
ttacctggttgattggactgtttgt

SEQ ID NO: 255525 - DNA, 25 bp, Probe sequence
ttggcagtcgttatttttacatttc

SEQ ID NO: 255526 - DNA, 25 bp, Probe sequence
atttactgcgagttctgtttcgtca

SEQ ID NO: 255527 - DNA, 25 bp, Probe sequence
atgttgttggtgaaggttcaaaaag

SEQ ID NO: 255528 - DNA, 25 bp, Probe sequence
atagtgttgggaatgttgttggtga

SEQ ID NO: 255529 - DNA, 25 bp, Probe sequence
ataagccctaagaaatggagctggt

SEQ ID NO: 255530 - DNA, 25 bp, Probe sequence
agtgttgggaatgttgttggtgaag

SEQ ID NO: 255531 - DNA, 25 bp, Probe sequence
agttctgtttcgtcaatacttgtat

SEQ ID NO: 255532 - DNA, 25 bp, Probe sequence
agctggatttactgcgagttctgtt

SEQ ID NO: 255533 - DNA, 25 bp, Probe sequence
actgcgagttctgtttcgtcaatac

SEQ ID NO: 255534 - DNA, 25 bp, Probe sequence
aatcatataagccctaagaaatgga

SEQ ID NO: 255535 - DNA, 25 bp, Probe sequence
ctgcgagttctgtttcgtcaatact

SEQ ID NO: 255536 - DNA, 25 bp, Probe sequence
ctggatttactgcgagttctgtttc

SEQ ID NO: 255537 - DNA, 25 bp, Probe sequence
cgagttctgtttcgtcaatacttgt

SEQ ID NO: 255538 - DNA, 25 bp, Probe sequence
gcgagttctgtttcgtcaatacttg

SEQ ID NO: 255539 - DNA, 25 bp, Probe sequence
gctggatttactgcgagttctgttt

SEQ ID NO: 255540 - DNA, 25 bp, Probe sequence
gaatgttgttggtgaaggttcaaaa

SEQ ID NO: 255541 - DNA, 25 bp, Probe sequence
gagttctgtttcgtcaatacttgta

SEQ ID NO: 255542 - DNA, 25 bp, Probe sequence
gatttactgcgagttctgtttcgtc

SEQ ID NO: 255543 - DNA, 25 bp, Probe sequence
gttgggaatgttgttggtgaaggtt

SEQ ID NO: 255544 - DNA, 25 bp, Probe sequence
gttctgtttcgtcaatacttgtata

SEQ ID NO: 255545 - DNA, 25 bp, Probe sequence
gtgttgggaatgttgttggtgaagg

SEQ ID NO: 255546 - DNA, 25 bp, Probe sequence
gggaatgttgttggtgaaggttcaa

SEQ ID NO: 255547 - DNA, 25 bp, Probe sequence
ggatttactgcgagttctgtttcgt

SEQ ID NO: 255548 - DNA, 25 bp, Probe sequence
tgttgggaatgttgttggtgaaggt

SEQ ID NO: 255549 - DNA, 25 bp, Probe sequence
tggatttactgcgagttctgtttcg

SEQ ID NO: 255550 - DNA, 25 bp, Probe sequence
tgcgagttctgtttcgtcaatactt

SEQ ID NO: 255551 - DNA, 25 bp, Probe sequence
tctaatcatataagccctaagaaat

SEQ ID NO: 255552 - DNA, 25 bp, Probe sequence
tctgtttcgtcaatacttgtatatt

SEQ ID NO: 255553 - DNA, 25 bp, Probe sequence
taagccctaagaaatggagctggta

SEQ ID NO: 255554 - DNA, 25 bp, Probe sequence
tactgcgagttctgtttcgtcaata

SEQ ID NO: 255555 - DNA, 25 bp, Probe sequence
tagtgttgggaatgttgttggtgaa

SEQ ID NO: 255556 - DNA, 25 bp, Probe sequence
tttctaatcatataagccctaagaa

SEQ ID NO: 255557 - DNA, 25 bp, Probe sequence
tttactgcgagttctgtttcgtcaa

SEQ ID NO: 255558 - DNA, 25 bp, Probe sequence
ttactgcgagttctgtttcgtcaat

SEQ ID NO: 255559 - DNA, 25 bp, Probe sequence
ttctgtttcgtcaatacttgtatat

SEQ ID NO: 255560 - DNA, 25 bp, Probe sequence
atacaatgtctggttgctcttttaa

SEQ ID NO: 255561 - DNA, 25 bp, Probe sequence
ataaatacaatgtctggttgctctt

SEQ ID NO: 255562 - DNA, 25 bp, Probe sequence
atctaagacagagactggttctgca

SEQ ID NO: 255563 - DNA, 25 bp, Probe sequence
atcccactacattcaataaatacaa

SEQ ID NO: 255564 - DNA, 25 bp, Probe sequence
atgggcgttaaacaagcatctaaga

SEQ ID NO: 255565 - DNA, 25 bp, Probe sequence
atgtctggttgctcttttaaatata

SEQ ID NO: 255566 - DNA, 25 bp, Probe sequence
agacagagactggttctgcaatccc

SEQ ID NO: 255567 - DNA, 25 bp, Probe sequence
agcatctaagacagagactggttct

SEQ ID NO: 255568 - DNA, 25 bp, Probe sequence
acagagactggttctgcaatcccac

SEQ ID NO: 255569 - DNA, 25 bp, Probe sequence
acaatgtctggttgctcttttaaat

SEQ ID NO: 255570 - DNA, 25 bp, Probe sequence
aaatacaatgtctggttgctctttt

SEQ ID NO: 255571 - DNA, 25 bp, Probe sequence
aacaagcatctaagacagagactgg

SEQ ID NO: 255572 - DNA, 25 bp, Probe sequence
aagacagagactggttctgcaatcc

SEQ ID NO: 255573 - DNA, 25 bp, Probe sequence
aatgtctggttgctcttttaaatat

SEQ ID NO: 255574 - DNA, 25 bp, Probe sequence
aatcccactacattcaataaataca

SEQ ID NO: 255575 - DNA, 25 bp, Probe sequence
aatacaatgtctggttgctctttta

SEQ ID NO: 255576 - DNA, 25 bp, Probe sequence
caatgtctggttgctcttttaaata

SEQ ID NO: 255577 - DNA, 25 bp, Probe sequence
caatcccactacattcaataaatac

SEQ ID NO: 255578 - DNA, 25 bp, Probe sequence
caagcatctaagacagagactggtt

SEQ ID NO: 255579 - DNA, 25 bp, Probe sequence
cagagactggttctgcaatcccact

SEQ ID NO: 255580 - DNA, 25 bp, Probe sequence
ctgcaatcccactacattcaataaa

SEQ ID NO: 255581 - DNA, 25 bp, Probe sequence
gcgttaaacaagcatctaagacaga

SEQ ID NO: 255582 - DNA, 25 bp, Probe sequence
gcaatcccactacattcaataaata

SEQ ID NO: 255583 - DNA, 25 bp, Probe sequence
gacagagactggttctgcaatccca

SEQ ID NO: 255584 - DNA, 25 bp, Probe sequence
gtctggttgctcttttaaatataat

SEQ ID NO: 255585 - DNA, 25 bp, Probe sequence
gggcgttaaacaagcatctaagaca

SEQ ID NO: 255586 - DNA, 25 bp, Probe sequence
ggcgttaaacaagcatctaagacag

SEQ ID NO: 255587 - DNA, 25 bp, Probe sequence
tgggcgttaaacaagcatctaagac

SEQ ID NO: 255588 - DNA, 25 bp, Probe sequence
tgtctggttgctcttttaaatataa

SEQ ID NO: 255589 - DNA, 25 bp, Probe sequence
tgcaatcccactacattcaataaat

SEQ ID NO: 255590 - DNA, 25 bp, Probe sequence
tctgcaatcccactacattcaataa

SEQ ID NO: 255591 - DNA, 25 bp, Probe sequence
taaatacaatgtctggttgctcttt

SEQ ID NO: 255592 - DNA, 25 bp, Probe sequence
tacaatgtctggttgctcttttaaa

SEQ ID NO: 255593 - DNA, 25 bp, Probe sequence
ttctgcaatcccactacattcaata

SEQ ID NO: 255594 - DNA, 25 bp, Probe sequence
gctaccactacctgaaaacgtaaat

SEQ ID NO: 255595 - DNA, 25 bp, Probe sequence
attagttttaagctaccactacctg

SEQ ID NO: 255596 - DNA, 25 bp, Probe sequence
ataatccagcaatagaactaaaaat

SEQ ID NO: 255597 - DNA, 25 bp, Probe sequence
atcactgaaattagttttaagctac

SEQ ID NO: 255598 - DNA, 25 bp, Probe sequence
atgacaccgaaaacaatacctaata

SEQ ID NO: 255599 - DNA, 25 bp, Probe sequence
acctgaaaacgtaaataatccagca

SEQ ID NO: 255600 - DNA, 25 bp, Probe sequence
acgtaaataatccagcaatagaact

SEQ ID NO: 255601 - DNA, 25 bp, Probe sequence
aaataatccagcaatagaactaaaa

SEQ ID NO: 255602 - DNA, 25 bp, Probe sequence
aaatcactgaaattagttttaagct

SEQ ID NO: 255603 - DNA, 25 bp, Probe sequence
aaacgtaaataatccagcaatagaa

SEQ ID NO: 255604 - DNA, 25 bp, Probe sequence
aaaacgtaaataatccagcaataga

SEQ ID NO: 255605 - DNA, 25 bp, Probe sequence
aaaataaaccaaaatgcaaacatgt

SEQ ID NO: 255606 - DNA, 25 bp, Probe sequence
aacgtaaataatccagcaatagaac

SEQ ID NO: 255607 - DNA, 25 bp, Probe sequence
aatcactgaaattagttttaagcta

SEQ ID NO: 255608 - DNA, 25 bp, Probe sequence
aataaaccaaaatgcaaacatgtag

SEQ ID NO: 255609 - DNA, 25 bp, Probe sequence
aataatccagcaatagaactaaaaa

SEQ ID NO: 255610 - DNA, 25 bp, Probe sequence
cactgaaattagttttaagctacca

SEQ ID NO: 255611 - DNA, 25 bp, Probe sequence
ctacctgaaaacgtaaataatccag

SEQ ID NO: 255612 - DNA, 25 bp, Probe sequence
ctgaaattagttttaagctaccact

SEQ ID NO: 255613 - DNA, 25 bp, Probe sequence
cgtaaataatccagcaatagaacta

SEQ ID NO: 255614 - DNA, 25 bp, Probe sequence
gaaaacgtaaataatccagcaatag

SEQ ID NO: 255615 - DNA, 25 bp, Probe sequence
gtaaataatccagcaatagaactaa

SEQ ID NO: 255616 - DNA, 25 bp, Probe sequence
tgacaccgaaaacaatacctaataa

SEQ ID NO: 255617 - DNA, 25 bp, Probe sequence
tgaaattagttttaagctaccacta

SEQ ID NO: 255618 - DNA, 25 bp, Probe sequence
tgaaaacgtaaataatccagcaata

SEQ ID NO: 255619 - DNA, 25 bp, Probe sequence
tcactgaaattagttttaagctacc

SEQ ID NO: 255620 - DNA, 25 bp, Probe sequence
taatccagcaatagaactaaaaata

SEQ ID NO: 255621 - DNA, 25 bp, Probe sequence
taagctaccactacctgaaaacgta

SEQ ID NO: 255622 - DNA, 25 bp, Probe sequence
taaataatccagcaatagaactaaa

SEQ ID NO: 255623 - DNA, 25 bp, Probe sequence
tacctgaaaacgtaaataatccagc

SEQ ID NO: 255624 - DNA, 25 bp, Probe sequence
tagttttaagctaccactacctgaa

SEQ ID NO: 255625 - DNA, 25 bp, Probe sequence
tttaagctaccactacctgaaaacg

SEQ ID NO: 255626 - DNA, 25 bp, Probe sequence
ttagttttaagctaccactacctga

SEQ ID NO: 255627 - DNA, 25 bp, Probe sequence
ttaagctaccactacctgaaaacgt

SEQ ID NO: 255628 - DNA, 25 bp, Probe sequence
attatatccgagagaacgtagctga

SEQ ID NO: 255629 - DNA, 25 bp, Probe sequence
atatccgagagaacgtagctgatgg

SEQ ID NO: 255630 - DNA, 25 bp, Probe sequence
atagtgcttccagaagaacagtcag

SEQ ID NO: 255631 - DNA, 25 bp, Probe sequence
atgtctgcccttgaatattatcaag

SEQ ID NO: 255632 - DNA, 25 bp, Probe sequence
agtcagattatatccgagagaacgt

SEQ ID NO: 255633 - DNA, 25 bp, Probe sequence
agacatagaatagtgcttccagaag

SEQ ID NO: 255634 - DNA, 25 bp, Probe sequence
agaagaacagtcagattatatccga

SEQ ID NO: 255635 - DNA, 25 bp, Probe sequence
agaacagtcagattatatccgagag

SEQ ID NO: 255636 - DNA, 25 bp, Probe sequence
acagtcagattatatccgagagaac

SEQ ID NO: 255637 - DNA, 25 bp, Probe sequence
aagaaagtctaattgtgggagacat

SEQ ID NO: 255638 - DNA, 25 bp, Probe sequence
cagattatatccgagagaacgtagc

SEQ ID NO: 255639 - DNA, 25 bp, Probe sequence
catagaatagtgcttccagaagaac

SEQ ID NO: 255640 - DNA, 25 bp, Probe sequence
cttccagaagaacagtcagattata

SEQ ID NO: 255641 - DNA, 25 bp, Probe sequence
ccgagagaacgtagctgatggatag

SEQ ID NO: 255642 - DNA, 25 bp, Probe sequence
ccagaagaacagtcagattatatcc

SEQ ID NO: 255643 - DNA, 25 bp, Probe sequence
gcttccagaagaacagtcagattat

SEQ ID NO: 255644 - DNA, 25 bp, Probe sequence
gaatagtgcttccagaagaacagtc

SEQ ID NO: 255645 - DNA, 25 bp, Probe sequence
gaagaacagtcagattatatccgag

SEQ ID NO: 255646 - DNA, 25 bp, Probe sequence
gaacagtcagattatatccgagaga

SEQ ID NO: 255647 - DNA, 25 bp, Probe sequence
gacatagaatagtgcttccagaaga

SEQ ID NO: 255648 - DNA, 25 bp, Probe sequence
gagacatagaatagtgcttccagaa

SEQ ID NO: 255649 - DNA, 25 bp, Probe sequence
gattatatccgagagaacgtagctg

SEQ ID NO: 255650 - DNA, 25 bp, Probe sequence
gtcagattatatccgagagaacgta

SEQ ID NO: 255651 - DNA, 25 bp, Probe sequence
gtctgcccttgaatattatcaagaa

SEQ ID NO: 255652 - DNA, 25 bp, Probe sequence
gtgcttccagaagaacagtcagatt

SEQ ID NO: 255653 - DNA, 25 bp, Probe sequence
gtgggagacatagaatagtgcttcc

SEQ ID NO: 255654 - DNA, 25 bp, Probe sequence
gggagacatagaatagtgcttccag

SEQ ID NO: 255655 - DNA, 25 bp, Probe sequence
ggagacatagaatagtgcttccaga

SEQ ID NO: 255656 - DNA, 25 bp, Probe sequence
tgtgggagacatagaatagtgcttc

SEQ ID NO: 255657 - DNA, 25 bp, Probe sequence
tctgcccttgaatattatcaagaat

SEQ ID NO: 255658 - DNA, 25 bp, Probe sequence
tagtgcttccagaagaacagtcaga

SEQ ID NO: 255659 - DNA, 25 bp, Probe sequence
tatccgagagaacgtagctgatgga

SEQ ID NO: 255660 - DNA, 25 bp, Probe sequence
tatatccgagagaacgtagctgatg

SEQ ID NO: 255661 - DNA, 25 bp, Probe sequence
ttatatccgagagaacgtagctgat

SEQ ID NO: 255662 - DNA, 25 bp, Probe sequence
attgcaacgattattctcaatgaga

SEQ ID NO: 255663 - DNA, 25 bp, Probe sequence
attctcaatgagatagcatattctg

SEQ ID NO: 255664 - DNA, 25 bp, Probe sequence
attatatctattggaattaaaccaa

SEQ ID NO: 255665 - DNA, 25 bp, Probe sequence
atgagatagcatattctgttaacag

SEQ ID NO: 255666 - DNA, 25 bp, Probe sequence
aggatagcttttcatttagagtaaa

SEQ ID NO: 255667 - DNA, 25 bp, Probe sequence
agaaattgcaacgattattctcaat

SEQ ID NO: 255668 - DNA, 25 bp, Probe sequence
aaattgcaacgattattctcaatga

SEQ ID NO: 255669 - DNA, 25 bp, Probe sequence
aacagatatcatgctcaaagattaa

SEQ ID NO: 255670 - DNA, 25 bp, Probe sequence
aagaaattgcaacgattattctcaa

SEQ ID NO: 255671 - DNA, 25 bp, Probe sequence
aaggatagcttttcatttagagtaa

SEQ ID NO: 255672 - DNA, 25 bp, Probe sequence
aatgagatagcatattctgttaaca

SEQ ID NO: 255673 - DNA, 25 bp, Probe sequence
aattgcaacgattattctcaatgag

SEQ ID NO: 255674 - DNA, 25 bp, Probe sequence
caatgagatagcatattctgttaac

SEQ ID NO: 255675 - DNA, 25 bp, Probe sequence
cagatatcatgctcaaagattaatt

SEQ ID NO: 255676 - DNA, 25 bp, Probe sequence
ctcaatgagatagcatattctgtta

SEQ ID NO: 255677 - DNA, 25 bp, Probe sequence
ctgttaacagatatcatgctcaaag

SEQ ID NO: 255678 - DNA, 25 bp, Probe sequence
gcaacgattattctcaatgagatag

SEQ ID NO: 255679 - DNA, 25 bp, Probe sequence
gaaggatagcttttcatttagagta

SEQ ID NO: 255680 - DNA, 25 bp, Probe sequence
gaaattgcaacgattattctcaatg

SEQ ID NO: 255681 - DNA, 25 bp, Probe sequence
gagatagcatattctgttaacagat

SEQ ID NO: 255682 - DNA, 25 bp, Probe sequence
gatatcatgctcaaagattaattaa

SEQ ID NO: 255683 - DNA, 25 bp, Probe sequence
gttaacagatatcatgctcaaagat

SEQ ID NO: 255684 - DNA, 25 bp, Probe sequence
ggatagcttttcatttagagtaaaa

SEQ ID NO: 255685 - DNA, 25 bp, Probe sequence
tgttaacagatatcatgctcaaaga

SEQ ID NO: 255686 - DNA, 25 bp, Probe sequence
tgagatagcatattctgttaacaga

SEQ ID NO: 255687 - DNA, 25 bp, Probe sequence
tgcaacgattattctcaatgagata

SEQ ID NO: 255688 - DNA, 25 bp, Probe sequence
tctgttaacagatatcatgctcaaa

SEQ ID NO: 255689 - DNA, 25 bp, Probe sequence
tctcaatgagatagcatattctgtt

SEQ ID NO: 255690 - DNA, 25 bp, Probe sequence
tcatgctcaaagattaattaaagat

SEQ ID NO: 255691 - DNA, 25 bp, Probe sequence
taacagatatcatgctcaaagatta

SEQ ID NO: 255692 - DNA, 25 bp, Probe sequence
ttaacagatatcatgctcaaagatt

SEQ ID NO: 255693 - DNA, 25 bp, Probe sequence
ttctgttaacagatatcatgctcaa

SEQ ID NO: 255694 - DNA, 25 bp, Probe sequence
ttctcaatgagatagcatattctgt

SEQ ID NO: 255695 - DNA, 25 bp, Probe sequence
ttgcaacgattattctcaatgagat

SEQ ID NO: 255696 - DNA, 25 bp, Probe sequence
agtcttaaaagtgattagtcgtata

SEQ ID NO: 255697 - DNA, 25 bp, Probe sequence
ataacagtaattgcaatttgtgaaa

SEQ ID NO: 255698 - DNA, 25 bp, Probe sequence
atcattttcaaaagtttattagcga

SEQ ID NO: 255699 - DNA, 25 bp, Probe sequence
agtgattagtcgtataacagtaatt

SEQ ID NO: 255700 - DNA, 25 bp, Probe sequence
agtcgtataacagtaattgcaattt

SEQ ID NO: 255701 - DNA, 25 bp, Probe sequence
agatacgttagtcttaaaagtgatt

SEQ ID NO: 255702 - DNA, 25 bp, Probe sequence
agcgaaatagatacgttagtcttaa

SEQ ID NO: 255703 - DNA, 25 bp, Probe sequence
aaatcatcattttcaaaagtttatt

SEQ ID NO: 255704 - DNA, 25 bp, Probe sequence
aaagtgattagtcgtataacagtaa

SEQ ID NO: 255705 - DNA, 25 bp, Probe sequence
aaaagtgattagtcgtataacagta

SEQ ID NO: 255706 - DNA, 25 bp, Probe sequence
aacagtaattgcaatttgtgaaagt

SEQ ID NO: 255707 - DNA, 25 bp, Probe sequence
aagtgattagtcgtataacagtaat

SEQ ID NO: 255708 - DNA, 25 bp, Probe sequence
aatcatcattttcaaaagtttatta

SEQ ID NO: 255709 - DNA, 25 bp, Probe sequence
aatagatacgttagtcttaaaagtg

SEQ ID NO: 255710 - DNA, 25 bp, Probe sequence
gcgaaatagatacgttagtcttaaa

SEQ ID NO: 255711 - DNA, 25 bp, Probe sequence
gaaatagatacgttagtcttaaaag

SEQ ID NO: 255712 - DNA, 25 bp, Probe sequence
gatacgttagtcttaaaagtgatta

SEQ ID NO: 255713 - DNA, 25 bp, Probe sequence
gattagtcgtataacagtaattgca

SEQ ID NO: 255714 - DNA, 25 bp, Probe sequence
gttaaatcatcattttcaaaagttt

SEQ ID NO: 255715 - DNA, 25 bp, Probe sequence
gttagtcttaaaagtgattagtcgt

SEQ ID NO: 255716 - DNA, 25 bp, Probe sequence
gtataacagtaattgcaatttgtga

SEQ ID NO: 255717 - DNA, 25 bp, Probe sequence
gtcttaaaagtgattagtcgtataa

SEQ ID NO: 255718 - DNA, 25 bp, Probe sequence
gtcgtataacagtaattgcaatttg

SEQ ID NO: 255719 - DNA, 25 bp, Probe sequence
tgattagtcgtataacagtaattgc

SEQ ID NO: 255720 - DNA, 25 bp, Probe sequence
tcattttcaaaagtttattagcgaa

SEQ ID NO: 255721 - DNA, 25 bp, Probe sequence
tcatcattttcaaaagtttattagc

SEQ ID NO: 255722 - DNA, 25 bp, Probe sequence
tacgttagtcttaaaagtgattagt

SEQ ID NO: 255723 - DNA, 25 bp, Probe sequence
tagcgaaatagatacgttagtctta

SEQ ID NO: 255724 - DNA, 25 bp, Probe sequence
tagatacgttagtcttaaaagtgat

SEQ ID NO: 255725 - DNA, 25 bp, Probe sequence
tagtcttaaaagtgattagtcgtat

SEQ ID NO: 255726 - DNA, 25 bp, Probe sequence
tagtcgtataacagtaattgcaatt

SEQ ID NO: 255727 - DNA, 25 bp, Probe sequence
tattagcgaaatagatacgttagtc

SEQ ID NO: 255728 - DNA, 25 bp, Probe sequence
ttagcgaaatagatacgttagtctt

SEQ ID NO: 255729 - DNA, 25 bp, Probe sequence
ttagtcgtataacagtaattgcaat

SEQ ID NO: 255730 - DNA, 25 bp, Probe sequence
atagtacctatgtttctactattcg

SEQ ID NO: 255731 - DNA, 25 bp, Probe sequence
atgactttttttatagtacctatgt

SEQ ID NO: 255732 - DNA, 25 bp, Probe sequence
atgtttctactattcgtgtatctgc

SEQ ID NO: 255733 - DNA, 25 bp, Probe sequence
agtacctatgtttctactattcgtg

SEQ ID NO: 255734 - DNA, 25 bp, Probe sequence
acctatgtttctactattcgtgtat

SEQ ID NO: 255735 - DNA, 25 bp, Probe sequence
ctactattcgtgtatctgccgaatt

SEQ ID NO: 255736 - DNA, 25 bp, Probe sequence
ctatgtttctactattcgtgtatct

SEQ ID NO: 255737 - DNA, 25 bp, Probe sequence
cctatgtttctactattcgtgtatc

SEQ ID NO: 255738 - DNA, 25 bp, Probe sequence
gtttctactattcgtgtatctgccg

SEQ ID NO: 255739 - DNA, 25 bp, Probe sequence
gtatgactttttttatagtacctat

SEQ ID NO: 255740 - DNA, 25 bp, Probe sequence
gtacctatgtttctactattcgtgt

SEQ ID NO: 255741 - DNA, 25 bp, Probe sequence
tggtatgactttttttatagtacct

SEQ ID NO: 255742 - DNA, 25 bp, Probe sequence
tgtttctactattcgtgtatctgcc

SEQ ID NO: 255743 - DNA, 25 bp, Probe sequence
tgactttttttatagtacctatgtt

SEQ ID NO: 255744 - DNA, 25 bp, Probe sequence
tctactattcgtgtatctgccgaat

SEQ ID NO: 255745 - DNA, 25 bp, Probe sequence
tactattcgtgtatctgccgaatta

SEQ ID NO: 255746 - DNA, 25 bp, Probe sequence
tacctatgtttctactattcgtgta

SEQ ID NO: 255747 - DNA, 25 bp, Probe sequence
tagtacctatgtttctactattcgt

SEQ ID NO: 255748 - DNA, 25 bp, Probe sequence
taggttggtatgactttttttatag

SEQ ID NO: 255749 - DNA, 25 bp, Probe sequence
tatgtttctactattcgtgtatctg

SEQ ID NO: 255750 - DNA, 25 bp, Probe sequence
tatgactttttttatagtacctatg

SEQ ID NO: 255751 - DNA, 25 bp, Probe sequence
tatagtacctatgtttctactattc

SEQ ID NO: 255752 - DNA, 25 bp, Probe sequence
tttctactattcgtgtatctgccga

SEQ ID NO: 255753 - DNA, 25 bp, Probe sequence
tttatagtacctatgtttctactat

SEQ ID NO: 255754 - DNA, 25 bp, Probe sequence
ttttatagtacctatgtttctacta

SEQ ID NO: 255755 - DNA, 25 bp, Probe sequence
tttttatagtacctatgtttctact

SEQ ID NO: 255756 - DNA, 25 bp, Probe sequence
ttatagtacctatgtttctactatt

SEQ ID NO: 255757 - DNA, 25 bp, Probe sequence
ttctactattcgtgtatctgccgaa

SEQ ID NO: 255758 - DNA, 25 bp, Probe sequence
aatttaaggggagagcgaactatca

SEQ ID NO: 255759 - DNA, 25 bp, Probe sequence
atttaaggggagagcgaactatcaa

SEQ ID NO: 255760 - DNA, 25 bp, Probe sequence
atcaatgatgctgcaaaacacaatc

SEQ ID NO: 255761 - DNA, 25 bp, Probe sequence
atgctgcaaaacacaatcgcaatga

SEQ ID NO: 255762 - DNA, 25 bp, Probe sequence
atgatgctgcaaaacacaatcgcaa

SEQ ID NO: 255763 - DNA, 25 bp, Probe sequence
atgagtatgaagggggatttaattg

SEQ ID NO: 255764 - DNA, 25 bp, Probe sequence
aggggagagcgaactatcaatgatg

SEQ ID NO: 255765 - DNA, 25 bp, Probe sequence
agagcgaactatcaatgatgctgca

SEQ ID NO: 255766 - DNA, 25 bp, Probe sequence
agcgaactatcaatgatgctgcaaa

SEQ ID NO: 255767 - DNA, 25 bp, Probe sequence
aacacaatcgcaatgaaaaaacagg

SEQ ID NO: 255768 - DNA, 25 bp, Probe sequence
aactatcaatgatgctgcaaaacac

SEQ ID NO: 255769 - DNA, 25 bp, Probe sequence
aaggggagagcgaactatcaatgat

SEQ ID NO: 255770 - DNA, 25 bp, Probe sequence
aatgatgctgcaaaacacaatcgca

SEQ ID NO: 255771 - DNA, 25 bp, Probe sequence
caatcgcaatgaaaaaacaggcgcg

SEQ ID NO: 255772 - DNA, 25 bp, Probe sequence
caatgatgctgcaaaacacaatcgc

SEQ ID NO: 255773 - DNA, 25 bp, Probe sequence
ctatcaatgatgctgcaaaacacaa

SEQ ID NO: 255774 - DNA, 25 bp, Probe sequence
cgaactatcaatgatgctgcaaaac

SEQ ID NO: 255775 - DNA, 25 bp, Probe sequence
gcgaactatcaatgatgctgcaaaa

SEQ ID NO: 255776 - DNA, 25 bp, Probe sequence
gctgcaaaacacaatcgcaatgaaa

SEQ ID NO: 255777 - DNA, 25 bp, Probe sequence
gcaaaacacaatcgcaatgaaaaaa

SEQ ID NO: 255778 - DNA, 25 bp, Probe sequence
gaactatcaatgatgctgcaaaaca

SEQ ID NO: 255779 - DNA, 25 bp, Probe sequence
gagcgaactatcaatgatgctgcaa

SEQ ID NO: 255780 - DNA, 25 bp, Probe sequence
gagagcgaactatcaatgatgctgc

SEQ ID NO: 255781 - DNA, 25 bp, Probe sequence
gagtatgaagggggatttaattgat

SEQ ID NO: 255782 - DNA, 25 bp, Probe sequence
gatgctgcaaaacacaatcgcaatg

SEQ ID NO: 255783 - DNA, 25 bp, Probe sequence
gggagagcgaactatcaatgatgct

SEQ ID NO: 255784 - DNA, 25 bp, Probe sequence
ggagagcgaactatcaatgatgctg

SEQ ID NO: 255785 - DNA, 25 bp, Probe sequence
ggggagagcgaactatcaatgatgc

SEQ ID NO: 255786 - DNA, 25 bp, Probe sequence
tgatgctgcaaaacacaatcgcaat

SEQ ID NO: 255787 - DNA, 25 bp, Probe sequence
tgaagggggatttaattgatgattt

SEQ ID NO: 255788 - DNA, 25 bp, Probe sequence
tgctgcaaaacacaatcgcaatgaa

SEQ ID NO: 255789 - DNA, 25 bp, Probe sequence
taaggggagagcgaactatcaatga

SEQ ID NO: 255790 - DNA, 25 bp, Probe sequence
tttaaggggagagcgaactatcaat

SEQ ID NO: 255791 - DNA, 25 bp, Probe sequence
ttaaggggagagcgaactatcaatg

SEQ ID NO: 255792 - DNA, 25 bp, Probe sequence
attatttgctacttgcatacgaata

SEQ ID NO: 255793 - DNA, 25 bp, Probe sequence
atcatcgaatgggttattatttgct

SEQ ID NO: 255794 - DNA, 25 bp, Probe sequence
atcgaatgggttattatttgctact

SEQ ID NO: 255795 - DNA, 25 bp, Probe sequence
atgccttgttaaagatggggttcca

SEQ ID NO: 255796 - DNA, 25 bp, Probe sequence
atgagacaagtccaacaatggttga

SEQ ID NO: 255797 - DNA, 25 bp, Probe sequence
atggggttccaatatcatcgaatgg

SEQ ID NO: 255798 - DNA, 25 bp, Probe sequence
atgtgatgccttgttaaagatgggg

SEQ ID NO: 255799 - DNA, 25 bp, Probe sequence
atgggttattatttgctacttgcat

SEQ ID NO: 255800 - DNA, 25 bp, Probe sequence
aagatggggttccaatatcatcgaa

SEQ ID NO: 255801 - DNA, 25 bp, Probe sequence
gctacttgcatacgaatatgagtct

SEQ ID NO: 255802 - DNA, 25 bp, Probe sequence
gcatacgaatatgagtcttttcaaa

SEQ ID NO: 255803 - DNA, 25 bp, Probe sequence
gaatatgagtcttttcaaattttta

SEQ ID NO: 255804 - DNA, 25 bp, Probe sequence
gaatgggttattatttgctacttgc

SEQ ID NO: 255805 - DNA, 25 bp, Probe sequence
gaatgtgatgccttgttaaagatgg

SEQ ID NO: 255806 - DNA, 25 bp, Probe sequence
gacaagtccaacaatggttgaagga

SEQ ID NO: 255807 - DNA, 25 bp, Probe sequence
gacgcatttgtaagtagctatgctg

SEQ ID NO: 255808 - DNA, 25 bp, Probe sequence
gagacaagtccaacaatggttgaag

SEQ ID NO: 255809 - DNA, 25 bp, Probe sequence
gatgccttgttaaagatggggttcc

SEQ ID NO: 255810 - DNA, 25 bp, Probe sequence
gttccaatatcatcgaatgggttat

SEQ ID NO: 255811 - DNA, 25 bp, Probe sequence
gttattatttgctacttgcatacga

SEQ ID NO: 255812 - DNA, 25 bp, Probe sequence
gtagctatgctgataaagaatgtga

SEQ ID NO: 255813 - DNA, 25 bp, Probe sequence
gtgatgccttgttaaagatggggtt

SEQ ID NO: 255814 - DNA, 25 bp, Probe sequence
gggttattatttgctacttgcatac

SEQ ID NO: 255815 - DNA, 25 bp, Probe sequence
ggggttccaatatcatcgaatgggt

SEQ ID NO: 255816 - DNA, 25 bp, Probe sequence
ggttccaatatcatcgaatgggtta

SEQ ID NO: 255817 - DNA, 25 bp, Probe sequence
ggttgaaggaagacgcatttgtaag

SEQ ID NO: 255818 - DNA, 25 bp, Probe sequence
ggaagacgcatttgtaagtagctat

SEQ ID NO: 255819 - DNA, 25 bp, Probe sequence
tgccttgttaaagatggggttccaa

SEQ ID NO: 255820 - DNA, 25 bp, Probe sequence
tccaatatcatcgaatgggttatta

SEQ ID NO: 255821 - DNA, 25 bp, Probe sequence
tcttttcaaatttttattgaccctg

SEQ ID NO: 255822 - DNA, 25 bp, Probe sequence
tatgagtcttttcaaatttttattg

SEQ ID NO: 255823 - DNA, 25 bp, Probe sequence
tatgctgataaagaatgtgatgcct

SEQ ID NO: 255824 - DNA, 25 bp, Probe sequence
ttttcaaatttttattgaccctgag

SEQ ID NO: 255825 - DNA, 25 bp, Probe sequence
tatttgctacttgcatacgaatatg

SEQ ID NO: 255826 - DNA, 25 bp, Probe sequence
attgtcacttcatttataactaaac

SEQ ID NO: 255827 - DNA, 25 bp, Probe sequence
atatgcgataatttggaagttaaca

SEQ ID NO: 255828 - DNA, 25 bp, Probe sequence
ataactaaacatgagtcttcaagca

SEQ ID NO: 255829 - DNA, 25 bp, Probe sequence
atgcgataatttggaagttaacaag

SEQ ID NO: 255830 - DNA, 25 bp, Probe sequence
atgagtcttcaagcataggtttagt

SEQ ID NO: 255831 - DNA, 25 bp, Probe sequence
agtcttcaagcataggtttagtgga

SEQ ID NO: 255832 - DNA, 25 bp, Probe sequence
actaaacatgagtcttcaagcatag

SEQ ID NO: 255833 - DNA, 25 bp, Probe sequence
acatgagtcttcaagcataggttta

SEQ ID NO: 255834 - DNA, 25 bp, Probe sequence
acaaaaaattgtcacttcatttata

SEQ ID NO: 255835 - DNA, 25 bp, Probe sequence
aaattgtcacttcatttataactaa

SEQ ID NO: 255836 - DNA, 25 bp, Probe sequence
aaacatgagtcttcaagcataggtt

SEQ ID NO: 255837 - DNA, 25 bp, Probe sequence
aaaaattgtcacttcatttataact

SEQ ID NO: 255838 - DNA, 25 bp, Probe sequence
aaaattgtcacttcatttataacta

SEQ ID NO: 255839 - DNA, 25 bp, Probe sequence
aacatgagtcttcaagcataggttt

SEQ ID NO: 255840 - DNA, 25 bp, Probe sequence
aactaaacatgagtcttcaagcata

SEQ ID NO: 255841 - DNA, 25 bp, Probe sequence
aattgtcacttcatttataactaaa

SEQ ID NO: 255842 - DNA, 25 bp, Probe sequence
caaaaaattgtcacttcatttataa

SEQ ID NO: 255843 - DNA, 25 bp, Probe sequence
catgagtcttcaagcataggtttag

SEQ ID NO: 255844 - DNA, 25 bp, Probe sequence
ctaaacatgagtcttcaagcatagg

SEQ ID NO: 255845 - DNA, 25 bp, Probe sequence
gcataggtttagtggaaaattattt

SEQ ID NO: 255846 - DNA, 25 bp, Probe sequence
gagtcttcaagcataggtttagtgg

SEQ ID NO: 255847 - DNA, 25 bp, Probe sequence
gtcacttcatttataactaaacatg

SEQ ID NO: 255848 - DNA, 25 bp, Probe sequence
gtcttcaagcataggtttagtggaa

SEQ ID NO: 255849 - DNA, 25 bp, Probe sequence
tgtcacttcatttataactaaacat

SEQ ID NO: 255850 - DNA, 25 bp, Probe sequence
tgagtcttcaagcataggtttagtg

SEQ ID NO: 255851 - DNA, 25 bp, Probe sequence
tcttcaagcataggtttagtggaaa

SEQ ID NO: 255852 - DNA, 25 bp, Probe sequence
tcaagcataggtttagtggaaaatt

SEQ ID NO: 255853 - DNA, 25 bp, Probe sequence
taatttggaagttaacaagattaca

SEQ ID NO: 255854 - DNA, 25 bp, Probe sequence
taactaaacatgagtcttcaagcat

SEQ ID NO: 255855 - DNA, 25 bp, Probe sequence
taaacatgagtcttcaagcataggt

SEQ ID NO: 255856 - DNA, 25 bp, Probe sequence
tacaaaaaattgtcacttcatttat

SEQ ID NO: 255857 - DNA, 25 bp, Probe sequence
tataactaaacatgagtcttcaagc

SEQ ID NO: 255858 - DNA, 25 bp, Probe sequence
ttatatgcgataatttggaagttaa

SEQ ID NO: 255859 - DNA, 25 bp, Probe sequence
ttgtcacttcatttataactaaaca

SEQ ID NO: 255860 - DNA, 25 bp, Probe sequence
agtactttcctgatgttagtaaaga

SEQ ID NO: 255861 - DNA, 25 bp, Probe sequence
atttgaacagtactttcctgatgtt

SEQ ID NO: 255862 - DNA, 25 bp, Probe sequence
agtatttgaacagtactttcctgat

SEQ ID NO: 255863 - DNA, 25 bp, Probe sequence
acagtactttcctgatgttagtaaa

SEQ ID NO: 255864 - DNA, 25 bp, Probe sequence
acagtagttggctggtacaacatta

SEQ ID NO: 255865 - DNA, 25 bp, Probe sequence
acaacattaaagatactcaacataa

SEQ ID NO: 255866 - DNA, 25 bp, Probe sequence
aaagatactcaacataatttaatgt

SEQ ID NO: 255867 - DNA, 25 bp, Probe sequence
aaacagtagttggctggtacaacat

SEQ ID NO: 255868 - DNA, 25 bp, Probe sequence
aaaacagtagttggctggtacaaca

SEQ ID NO: 255869 - DNA, 25 bp, Probe sequence
aacagtagttggctggtacaacatt

SEQ ID NO: 255870 - DNA, 25 bp, Probe sequence
aacagtactttcctgatgttagtaa

SEQ ID NO: 255871 - DNA, 25 bp, Probe sequence
caaaaacagtagttggctggtacaa

SEQ ID NO: 255872 - DNA, 25 bp, Probe sequence
cagtagttggctggtacaacattaa

SEQ ID NO: 255873 - DNA, 25 bp, Probe sequence
cagtactttcctgatgttagtaaag

SEQ ID NO: 255874 - DNA, 25 bp, Probe sequence
gctggtacaacattaaagatactca

SEQ ID NO: 255875 - DNA, 25 bp, Probe sequence
gaacagtactttcctgatgttagta

SEQ ID NO: 255876 - DNA, 25 bp, Probe sequence
gttagtaaagatgtcaagttgcgtg

SEQ ID NO: 255877 - DNA, 25 bp, Probe sequence
gtatttgaacagtactttcctgatg

SEQ ID NO: 255878 - DNA, 25 bp, Probe sequence
gtagttggctggtacaacattaaag

SEQ ID NO: 255879 - DNA, 25 bp, Probe sequence
gtactttcctgatgttagtaaagat

SEQ ID NO: 255880 - DNA, 25 bp, Probe sequence
ggtacaacattaaagatactcaaca

SEQ ID NO: 255881 - DNA, 25 bp, Probe sequence
ggctggtacaacattaaagatactc

SEQ ID NO: 255882 - DNA, 25 bp, Probe sequence
tgaacagtactttcctgatgttagt

SEQ ID NO: 255883 - DNA, 25 bp, Probe sequence
taatgttaaatataccgccaaaagt

SEQ ID NO: 255884 - DNA, 25 bp, Probe sequence
tacaaaaacagtagttggctggtac

SEQ ID NO: 255885 - DNA, 25 bp, Probe sequence
taaatataccgccaaaagtatttga

SEQ ID NO: 255886 - DNA, 25 bp, Probe sequence
tacaacattaaagatactcaacata

SEQ ID NO: 255887 - DNA, 25 bp, Probe sequence
tactttcctgatgttagtaaagatg

SEQ ID NO: 255888 - DNA, 25 bp, Probe sequence
tagtaaagatgtcaagttgcgtgtt

SEQ ID NO: 255889 - DNA, 25 bp, Probe sequence
tatttgaacagtactttcctgatgt

SEQ ID NO: 255890 - DNA, 25 bp, Probe sequence
tttgaacagtactttcctgatgtta

SEQ ID NO: 255891 - DNA, 25 bp, Probe sequence
ttaatgttaaatataccgccaaaag

SEQ ID NO: 255892 - DNA, 25 bp, Probe sequence
ttgaacagtactttcctgatgttag

SEQ ID NO: 255893 - DNA, 25 bp, Probe sequence
ttggctggtacaacattaaagatac

SEQ ID NO: 255894 - DNA, 25 bp, Probe sequence
atatacatgtttcagtggtgttgct

SEQ ID NO: 255895 - DNA, 25 bp, Probe sequence
atacatgtttcagtggtgttgctgt

SEQ ID NO: 255896 - DNA, 25 bp, Probe sequence
ataatcatggcgaattaatcaaaaa

SEQ ID NO: 255897 - DNA, 25 bp, Probe sequence
atcaaaaagcactgcaattataaaa

SEQ ID NO: 255898 - DNA, 25 bp, Probe sequence
atgcgatatacatgtttcagtggtg

SEQ ID NO: 255899 - DNA, 25 bp, Probe sequence
atggtgatattaaagtctgtgaaaa

SEQ ID NO: 255900 - DNA, 25 bp, Probe sequence
agtctgtgaaaataatcatggcgaa

SEQ ID NO: 255901 - DNA, 25 bp, Probe sequence
acatgtttcagtggtgttgctgtgt

SEQ ID NO: 255902 - DNA, 25 bp, Probe sequence
aaataatcatggcgaattaatcaaa

SEQ ID NO: 255903 - DNA, 25 bp, Probe sequence
aaagcactgcaattataaaaatatt

SEQ ID NO: 255904 - DNA, 25 bp, Probe sequence
aaaagcactgcaattataaaaatat

SEQ ID NO: 255905 - DNA, 25 bp, Probe sequence
aagcactgcaattataaaaatatta

SEQ ID NO: 255906 - DNA, 25 bp, Probe sequence
aagtctgtgaaaataatcatggcga

SEQ ID NO: 255907 - DNA, 25 bp, Probe sequence
aatcaaaaagcactgcaattataaa

SEQ ID NO: 255908 - DNA, 25 bp, Probe sequence
aataatcatggcgaattaatcaaaa

SEQ ID NO: 255909 - DNA, 25 bp, Probe sequence
ctgtgtatggtgatattaaagtctg

SEQ ID NO: 255910 - DNA, 25 bp, Probe sequence
ctgtgaaaataatcatggcgaatta

SEQ ID NO: 255911 - DNA, 25 bp, Probe sequence
cgatatacatgtttcagtggtgttg

SEQ ID NO: 255912 - DNA, 25 bp, Probe sequence
gcgatatacatgtttcagtggtgtt

SEQ ID NO: 255913 - DNA, 25 bp, Probe sequence
gaaaataatcatggcgaattaatca

SEQ ID NO: 255914 - DNA, 25 bp, Probe sequence
gatatacatgtttcagtggtgttgc

SEQ ID NO: 255915 - DNA, 25 bp, Probe sequence
gtatggtgatattaaagtctgtgaa

SEQ ID NO: 255916 - DNA, 25 bp, Probe sequence
gtctgtgaaaataatcatggcgaat

SEQ ID NO: 255917 - DNA, 25 bp, Probe sequence
gtgtatggtgatattaaagtctgtg

SEQ ID NO: 255918 - DNA, 25 bp, Probe sequence
tggtgatattaaagtctgtgaaaat

SEQ ID NO: 255919 - DNA, 25 bp, Probe sequence
tgtgtatggtgatattaaagtctgt

SEQ ID NO: 255920 - DNA, 25 bp, Probe sequence
tgtatggtgatattaaagtctgtga

SEQ ID NO: 255921 - DNA, 25 bp, Probe sequence
tgcgatatacatgtttcagtggtgt

SEQ ID NO: 255922 - DNA, 25 bp, Probe sequence
tctgtgaaaataatcatggcgaatt

SEQ ID NO: 255923 - DNA, 25 bp, Probe sequence
taatcatggcgaattaatcaaaaag

SEQ ID NO: 255924 - DNA, 25 bp, Probe sequence
taatcaaaaagcactgcaattataa

SEQ ID NO: 255925 - DNA, 25 bp, Probe sequence
tacatgtttcagtggtgttgctgtg

SEQ ID NO: 255926 - DNA, 25 bp, Probe sequence
tatggtgatattaaagtctgtgaaa

SEQ ID NO: 255927 - DNA, 25 bp, Probe sequence
tatacatgtttcagtggtgttgctg

SEQ ID NO: 255928 - DNA, 25 bp, Probe sequence
atgttgaatcgtgcttgttatggaa

SEQ ID NO: 255929 - DNA, 25 bp, Probe sequence
agtcgcagcacgcattatcttttac

SEQ ID NO: 255930 - DNA, 25 bp, Probe sequence
agcgacgtactgttgcttagcttct

SEQ ID NO: 255931 - DNA, 25 bp, Probe sequence
acgcattatcttttacttaactagc

SEQ ID NO: 255932 - DNA, 25 bp, Probe sequence
acttaactagcttaatcatatttta

SEQ ID NO: 255933 - DNA, 25 bp, Probe sequence
acagtcgcagcacgcattatctttt

SEQ ID NO: 255934 - DNA, 25 bp, Probe sequence
acacaaacagtcgcagcacgcatta

SEQ ID NO: 255935 - DNA, 25 bp, Probe sequence
acaaacagtcgcagcacgcattatc

SEQ ID NO: 255936 - DNA, 25 bp, Probe sequence
aaactcacacaaacagtcgcagcac

SEQ ID NO: 255937 - DNA, 25 bp, Probe sequence
aaacagtcgcagcacgcattatctt

SEQ ID NO: 255938 - DNA, 25 bp, Probe sequence
aacagtcgcagcacgcattatcttt

SEQ ID NO: 255939 - DNA, 25 bp, Probe sequence
aactcacacaaacagtcgcagcacg

SEQ ID NO: 255940 - DNA, 25 bp, Probe sequence
aagcgacgtactgttgcttagcttc

SEQ ID NO: 255941 - DNA, 25 bp, Probe sequence
caaacagtcgcagcacgcattatct

SEQ ID NO: 255942 - DNA, 25 bp, Probe sequence
caaaactcacacaaacagtcgcagc

SEQ ID NO: 255943 - DNA, 25 bp, Probe sequence
cacacaaacagtcgcagcacgcatt

SEQ ID NO: 255944 - DNA, 25 bp, Probe sequence
cagcacgcattatcttttacttaac

SEQ ID NO: 255945 - DNA, 25 bp, Probe sequence
cagtcgcagcacgcattatctttta

SEQ ID NO: 255946 - DNA, 25 bp, Probe sequence
cttttacttaactagcttaatcata

SEQ ID NO: 255947 - DNA, 25 bp, Probe sequence
cgcagcacgcattatcttttactta

SEQ ID NO: 255948 - DNA, 25 bp, Probe sequence
gcattatcttttacttaactagctt

SEQ ID NO: 255949 - DNA, 25 bp, Probe sequence
gcagcacgcattatcttttacttaa

SEQ ID NO: 255950 - DNA, 25 bp, Probe sequence
gcacgcattatcttttacttaacta

SEQ ID NO: 255951 - DNA, 25 bp, Probe sequence
gaatcgtgcttgttatggaaatata

SEQ ID NO: 255952 - DNA, 25 bp, Probe sequence
gagggcaaagttacaaaactcacac

SEQ ID NO: 255953 - DNA, 25 bp, Probe sequence
gttgaatcgtgcttgttatggaaat

SEQ ID NO: 255954 - DNA, 25 bp, Probe sequence
gttaagcgacgtactgttgcttagc

SEQ ID NO: 255955 - DNA, 25 bp, Probe sequence
gtcgcagcacgcattatcttttact

SEQ ID NO: 255956 - DNA, 25 bp, Probe sequence
ggaagttaagcgacgtactgttgct

SEQ ID NO: 255957 - DNA, 25 bp, Probe sequence
ggaaatatatggaagttaagcgacg

SEQ ID NO: 255958 - DNA, 25 bp, Probe sequence
tcgcagcacgcattatcttttactt

SEQ ID NO: 255959 - DNA, 25 bp, Probe sequence
tcacacaaacagtcgcagcacgcat

SEQ ID NO: 255960 - DNA, 25 bp, Probe sequence
tatcttttacttaactagcttaatc

SEQ ID NO: 255961 - DNA, 25 bp, Probe sequence
ttagcttcttttttgagggcaaagt

SEQ ID NO: 255962 - DNA, 25 bp, Probe sequence
ataccaatctatcaagcgttgaagt

SEQ ID NO: 255963 - DNA, 25 bp, Probe sequence
atctatcaagcgttgaagtacaaca

SEQ ID NO: 255964 - DNA, 25 bp, Probe sequence
atgattcaaatatagttaaacaagg

SEQ ID NO: 255965 - DNA, 25 bp, Probe sequence
agcgttgaagtacaacaaaagtcat

SEQ ID NO: 255966 - DNA, 25 bp, Probe sequence
accaatctatcaagcgttgaagtac

SEQ ID NO: 255967 - DNA, 25 bp, Probe sequence
acgatgattcaaatatagttaaaca

SEQ ID NO: 255968 - DNA, 25 bp, Probe sequence
aaataccaatctatcaagcgttgaa

SEQ ID NO: 255969 - DNA, 25 bp, Probe sequence
aaaaataccaatctatcaagcgttg

SEQ ID NO: 255970 - DNA, 25 bp, Probe sequence
aaaataccaatctatcaagcgttga

SEQ ID NO: 255971 - DNA, 25 bp, Probe sequence
aatctatcaagcgttgaagtacaac

SEQ ID NO: 255972 - DNA, 25 bp, Probe sequence
aataccaatctatcaagcgttgaag

SEQ ID NO: 255973 - DNA, 25 bp, Probe sequence
caatctatcaagcgttgaagtacaa

SEQ ID NO: 255974 - DNA, 25 bp, Probe sequence
caagcgttgaagtacaacaaaagtc

SEQ ID NO: 255975 - DNA, 25 bp, Probe sequence
cattatggattccttaatttaatta

SEQ ID NO: 255976 - DNA, 25 bp, Probe sequence
ctatcaagcgttgaagtacaacaaa

SEQ ID NO: 255977 - DNA, 25 bp, Probe sequence
ctaaaaataccaatctatcaagcgt

SEQ ID NO: 255978 - DNA, 25 bp, Probe sequence
ccaatctatcaagcgttgaagtaca

SEQ ID NO: 255979 - DNA, 25 bp, Probe sequence
gaagtacaacaaaagtcatttttat

SEQ ID NO: 255980 - DNA, 25 bp, Probe sequence
gatgattcaaatatagttaaacaag

SEQ ID NO: 255981 - DNA, 25 bp, Probe sequence
gattccttaatttaattaacgatga

SEQ ID NO: 255982 - DNA, 25 bp, Probe sequence
gttgaagtacaacaaaagtcatttt

SEQ ID NO: 255983 - DNA, 25 bp, Probe sequence
gtctaaaaataccaatctatcaagc

SEQ ID NO: 255984 - DNA, 25 bp, Probe sequence
gtgtctaaaaataccaatctatcaa

SEQ ID NO: 255985 - DNA, 25 bp, Probe sequence
ggattccttaatttaattaacgatg

SEQ ID NO: 255986 - DNA, 25 bp, Probe sequence
tggattccttaatttaattaacgat

SEQ ID NO: 255987 - DNA, 25 bp, Probe sequence
tgtctaaaaataccaatctatcaag

SEQ ID NO: 255988 - DNA, 25 bp, Probe sequence
tgaagtacaacaaaagtcattttta

SEQ ID NO: 255989 - DNA, 25 bp, Probe sequence
tctaaaaataccaatctatcaagcg

SEQ ID NO: 255990 - DNA, 25 bp, Probe sequence
tctatcaagcgttgaagtacaacaa

SEQ ID NO: 255991 - DNA, 25 bp, Probe sequence
taaaaataccaatctatcaagcgtt

SEQ ID NO: 255992 - DNA, 25 bp, Probe sequence
taccaatctatcaagcgttgaagta

SEQ ID NO: 255993 - DNA, 25 bp, Probe sequence
tatggattccttaatttaattaacg

SEQ ID NO: 255994 - DNA, 25 bp, Probe sequence
tatcaagcgttgaagtacaacaaaa

SEQ ID NO: 255995 - DNA, 25 bp, Probe sequence
ttgaagtacaacaaaagtcattttt

SEQ ID NO: 255996 - DNA, 25 bp, Probe sequence
attagttgtagaaaacgatgatccg

SEQ ID NO: 255997 - DNA, 25 bp, Probe sequence
atgatccggaaaaacaacgacatgt

SEQ ID NO: 255998 - DNA, 25 bp, Probe sequence
gatccggaaaaacaacgacatgtaa

SEQ ID NO: 255999 - DNA, 25 bp, Probe sequence
agtagaaataacacaattagttgta

SEQ ID NO: 256000 - DNA, 25 bp, Probe sequence
agttgtagaaaacgatgatccggaa

SEQ ID NO: 256001 - DNA, 25 bp, Probe sequence
agagtagaaataacacaattagttg

SEQ ID NO: 256002 - DNA, 25 bp, Probe sequence
acgatgatccggaaaaacaacgaca

SEQ ID NO: 256003 - DNA, 25 bp, Probe sequence
acaacgacatgtaaagcgtgaaagt

SEQ ID NO: 256004 - DNA, 25 bp, Probe sequence
aaagagtagaaataacacaattagt

SEQ ID NO: 256005 - DNA, 25 bp, Probe sequence
aaaaacaacgacatgtaaagcgtga

SEQ ID NO: 256006 - DNA, 25 bp, Probe sequence
aaacaacgacatgtaaagcgtgaaa

SEQ ID NO: 256007 - DNA, 25 bp, Probe sequence
aaaacaacgacatgtaaagcgtgaa

SEQ ID NO: 256008 - DNA, 25 bp, Probe sequence
aacaacgacatgtaaagcgtgaaag

SEQ ID NO: 256009 - DNA, 25 bp, Probe sequence
aagagtagaaataacacaattagtt

SEQ ID NO: 256010 - DNA, 25 bp, Probe sequence
tagaaaacgatgatccggaaaaaca

SEQ ID NO: 256011 - DNA, 25 bp, Probe sequence
cggaaaaacaacgacatgtaaagcg

SEQ ID NO: 256012 - DNA, 25 bp, Probe sequence
cgatgatccggaaaaacaacgacat

SEQ ID NO: 256013 - DNA, 25 bp, Probe sequence
tccggaaaaacaacgacatgtaaag

SEQ ID NO: 256014 - DNA, 25 bp, Probe sequence
gaaaaacaacgacatgtaaagcgtg

SEQ ID NO: 256015 - DNA, 25 bp, Probe sequence
gaaataacacaattagttgtagaaa

SEQ ID NO: 256016 - DNA, 25 bp, Probe sequence
gagtagaaataacacaattagttgt

SEQ ID NO: 256017 - DNA, 25 bp, Probe sequence
gatgatccggaaaaacaacgacatg

SEQ ID NO: 256018 - DNA, 25 bp, Probe sequence
gttgtagaaaacgatgatccggaaa

SEQ ID NO: 256019 - DNA, 25 bp, Probe sequence
gtagaaataacacaattagttgtag

SEQ ID NO: 256020 - DNA, 25 bp, Probe sequence
ggaaaaacaacgacatgtaaagcgt

SEQ ID NO: 256021 - DNA, 25 bp, Probe sequence
tgtagaaaacgatgatccggaaaaa

SEQ ID NO: 256022 - DNA, 25 bp, Probe sequence
tgatccggaaaaacaacgacatgta

SEQ ID NO: 256023 - DNA, 25 bp, Probe sequence
tagttgtagaaaacgatgatccgga

SEQ ID NO: 256024 - DNA, 25 bp, Probe sequence
tttgcgtttcaaagagtagaaataa

SEQ ID NO: 256025 - DNA, 25 bp, Probe sequence
tttttgcgtttcaaagagtagaaat

SEQ ID NO: 256026 - DNA, 25 bp, Probe sequence
ttttgcgtttcaaagagtagaaata

SEQ ID NO: 256027 - DNA, 25 bp, Probe sequence
ttagttgtagaaaacgatgatccgg

SEQ ID NO: 256028 - DNA, 25 bp, Probe sequence
ttgcgtttcaaagagtagaaataac

SEQ ID NO: 256029 - DNA, 25 bp, Probe sequence
ttgtagaaaacgatgatccggaaaa

SEQ ID NO: 256030 - DNA, 25 bp, Probe sequence
attttaaagcagagtttacttatgt

SEQ ID NO: 256031 - DNA, 25 bp, Probe sequence
ataaaacgtttagcagacaatgagt

SEQ ID NO: 256032 - DNA, 25 bp, Probe sequence
agtttacttatgtaaatgagtattt

SEQ ID NO: 256033 - DNA, 25 bp, Probe sequence
agagtttacttatgtaaatgagtat

SEQ ID NO: 256034 - DNA, 25 bp, Probe sequence
agcagacaatgagttaaattatttt

SEQ ID NO: 256035 - DNA, 25 bp, Probe sequence
agcagagtttacttatgtaaatgag

SEQ ID NO: 256036 - DNA, 25 bp, Probe sequence
acgtttagcagacaatgagttaaat

SEQ ID NO: 256037 - DNA, 25 bp, Probe sequence
aaaacgtttagcagacaatgagtta

SEQ ID NO: 256038 - DNA, 25 bp, Probe sequence
aaagcagagtttacttatgtaaatg

SEQ ID NO: 256039 - DNA, 25 bp, Probe sequence
aaacgtttagcagacaatgagttaa

SEQ ID NO: 256040 - DNA, 25 bp, Probe sequence
aacgtttagcagacaatgagttaaa

SEQ ID NO: 256041 - DNA, 25 bp, Probe sequence
aagcagagtttacttatgtaaatga

SEQ ID NO: 256042 - DNA, 25 bp, Probe sequence
aataaaacgtttagcagacaatgag

SEQ ID NO: 256043 - DNA, 25 bp, Probe sequence
cagagtttacttatgtaaatgagta

SEQ ID NO: 256044 - DNA, 25 bp, Probe sequence
cgtttagcagacaatgagttaaatt

SEQ ID NO: 256045 - DNA, 25 bp, Probe sequence
gcagagtttacttatgtaaatgagt

SEQ ID NO: 256046 - DNA, 25 bp, Probe sequence
gagtttacttatgtaaatgagtatt

SEQ ID NO: 256047 - DNA, 25 bp, Probe sequence
gtttagcagacaatgagttaaatta

SEQ ID NO: 256048 - DNA, 25 bp, Probe sequence
taaaacgtttagcagacaatgagtt

SEQ ID NO: 256049 - DNA, 25 bp, Probe sequence
taaagcagagtttacttatgtaaat

SEQ ID NO: 256050 - DNA, 25 bp, Probe sequence
tagcagacaatgagttaaattattt

SEQ ID NO: 256051 - DNA, 25 bp, Probe sequence
tattttaaagcagagtttacttatg

SEQ ID NO: 256052 - DNA, 25 bp, Probe sequence
tttaaagcagagtttacttatgtaa

SEQ ID NO: 256053 - DNA, 25 bp, Probe sequence
tttagcagacaatgagttaaattat

SEQ ID NO: 256054 - DNA, 25 bp, Probe sequence
ttttaaagcagagtttacttatgta

SEQ ID NO: 256055 - DNA, 25 bp, Probe sequence
ttattttaaagcagagtttacttat

SEQ ID NO: 256056 - DNA, 25 bp, Probe sequence
ttagcagacaatgagttaaattatt

SEQ ID NO: 256057 - DNA, 25 bp, Probe sequence
ttaaagcagagtttacttatgtaaa

SEQ ID NO: 256058 - DNA, 25 bp, Probe sequence
ataaacctaatgcgatagctcctgc

SEQ ID NO: 256059 - DNA, 25 bp, Probe sequence
ataagtgtaacctctagcatggtat

SEQ ID NO: 256060 - DNA, 25 bp, Probe sequence
agagttaaggctgaggcatttctaa

SEQ ID NO: 256061 - DNA, 25 bp, Probe sequence
agctcctgcaataagtgtaacctct

SEQ ID NO: 256062 - DNA, 25 bp, Probe sequence
acctaatgcgatagctcctgcaata

SEQ ID NO: 256063 - DNA, 25 bp, Probe sequence
acctctagcatggtattgattgctg

SEQ ID NO: 256064 - DNA, 25 bp, Probe sequence
aaacctaatgcgatagctcctgcaa

SEQ ID NO: 256065 - DNA, 25 bp, Probe sequence
aacctaatgcgatagctcctgcaat

SEQ ID NO: 256066 - DNA, 25 bp, Probe sequence
aagatttcacgaatccagaaacaat

SEQ ID NO: 256067 - DNA, 25 bp, Probe sequence
aagtgtaacctctagcatggtattg

SEQ ID NO: 256068 - DNA, 25 bp, Probe sequence
aaggctgaggcatttctaacaaata

SEQ ID NO: 256069 - DNA, 25 bp, Probe sequence
aatgcgatagctcctgcaataagtg

SEQ ID NO: 256070 - DNA, 25 bp, Probe sequence
cacgaatccagaaacaattaatttg

SEQ ID NO: 256071 - DNA, 25 bp, Probe sequence
ctaatgcgatagctcctgcaataag

SEQ ID NO: 256072 - DNA, 25 bp, Probe sequence
cgtttaaaagatttcacgaatccag

SEQ ID NO: 256073 - DNA, 25 bp, Probe sequence
ccaagagttaaggctgaggcatttc

SEQ ID NO: 256074 - DNA, 25 bp, Probe sequence
gcgatagctcctgcaataagtgtaa

SEQ ID NO: 256075 - DNA, 25 bp, Probe sequence
gctcctgcaataagtgtaacctcta

SEQ ID NO: 256076 - DNA, 25 bp, Probe sequence
gcatggtattgattgctgtactgaa

SEQ ID NO: 256077 - DNA, 25 bp, Probe sequence
gcaataagtgtaacctctagcatgg

SEQ ID NO: 256078 - DNA, 25 bp, Probe sequence
gaggcatttctaacaaatatttata

SEQ ID NO: 256079 - DNA, 25 bp, Probe sequence
gatagctcctgcaataagtgtaacc

SEQ ID NO: 256080 - DNA, 25 bp, Probe sequence
gattgctgtactgaaatttaataat

SEQ ID NO: 256081 - DNA, 25 bp, Probe sequence
gtcggcgaataataaacctaatgcg

SEQ ID NO: 256082 - DNA, 25 bp, Probe sequence
gtaacctctagcatggtattgattg

SEQ ID NO: 256083 - DNA, 25 bp, Probe sequence
gtgtaacctctagcatggtattgat

SEQ ID NO: 256084 - DNA, 25 bp, Probe sequence
ggtattgattgctgtactgaaattt

SEQ ID NO: 256085 - DNA, 25 bp, Probe sequence
ggctgaggcatttctaacaaatatt

SEQ ID NO: 256086 - DNA, 25 bp, Probe sequence
tcctgcaataagtgtaacctctagc

SEQ ID NO: 256087 - DNA, 25 bp, Probe sequence
taatactaaatttttcgttgcatcg

SEQ ID NO: 256088 - DNA, 25 bp, Probe sequence
taatttggaaatttggtcggcgaat

SEQ ID NO: 256089 - DNA, 25 bp, Probe sequence
tagctcctgcaataagtgtaacctc

SEQ ID NO: 256090 - DNA, 25 bp, Probe sequence
tttggaaatttggtcggcgaataat

SEQ ID NO: 256091 - DNA, 25 bp, Probe sequence
ttaaggctgaggcatttctaacaaa

SEQ ID NO: 256092 - DNA, 25 bp, Probe sequence
attcaatggttctcacctcgtaatt

SEQ ID NO: 256093 - DNA, 25 bp, Probe sequence
attctaaattcaatggttctcacct

SEQ ID NO: 256094 - DNA, 25 bp, Probe sequence
attttgctcaatgtgtcaatactta

SEQ ID NO: 256095 - DNA, 25 bp, Probe sequence
atcattttgctcaatgtgtcaatac

SEQ ID NO: 256096 - DNA, 25 bp, Probe sequence
atggttctcacctcgtaattgtaac

SEQ ID NO: 256097 - DNA, 25 bp, Probe sequence
acctcgtaattgtaactgtattagt

SEQ ID NO: 256098 - DNA, 25 bp, Probe sequence
aaattctaaattcaatggttctcac

SEQ ID NO: 256099 - DNA, 25 bp, Probe sequence
aaattcaatggttctcacctcgtaa

SEQ ID NO: 256100 - DNA, 25 bp, Probe sequence
aaatcattttgctcaatgtgtcaat

SEQ ID NO: 256101 - DNA, 25 bp, Probe sequence
aaaaatcattttgctcaatgtgtca

SEQ ID NO: 256102 - DNA, 25 bp, Probe sequence
aaaatcattttgctcaatgtgtcaa

SEQ ID NO: 256103 - DNA, 25 bp, Probe sequence
aatggttctcacctcgtaattgtaa

SEQ ID NO: 256104 - DNA, 25 bp, Probe sequence
aatcattttgctcaatgtgtcaata

SEQ ID NO: 256105 - DNA, 25 bp, Probe sequence
aattcaatggttctcacctcgtaat

SEQ ID NO: 256106 - DNA, 25 bp, Probe sequence
aattctaaattcaatggttctcacc

SEQ ID NO: 256107 - DNA, 25 bp, Probe sequence
caatggttctcacctcgtaattgta

SEQ ID NO: 256108 - DNA, 25 bp, Probe sequence
cacctcgtaattgtaactgtattag

SEQ ID NO: 256109 - DNA, 25 bp, Probe sequence
cattttgctcaatgtgtcaatactt

SEQ ID NO: 256110 - DNA, 25 bp, Probe sequence
ctaaattcaatggttctcacctcgt

SEQ ID NO: 256111 - DNA, 25 bp, Probe sequence
ctcacctcgtaattgtaactgtatt

SEQ ID NO: 256112 - DNA, 25 bp, Probe sequence
cctcgtaattgtaactgtattagtt

SEQ ID NO: 256113 - DNA, 25 bp, Probe sequence
gttctcacctcgtaattgtaactgt

SEQ ID NO: 256114 - DNA, 25 bp, Probe sequence
ggttctcacctcgtaattgtaactg

SEQ ID NO: 256115 - DNA, 25 bp, Probe sequence
tggttctcacctcgtaattgtaact

SEQ ID NO: 256116 - DNA, 25 bp, Probe sequence
tctaaattcaatggttctcacctcg

SEQ ID NO: 256117 - DNA, 25 bp, Probe sequence
tctcacctcgtaattgtaactgtat

SEQ ID NO: 256118 - DNA, 25 bp, Probe sequence
tcattttgctcaatgtgtcaatact

SEQ ID NO: 256119 - DNA, 25 bp, Probe sequence
tcaatggttctcacctcgtaattgt

SEQ ID NO: 256120 - DNA, 25 bp, Probe sequence
tcacctcgtaattgtaactgtatta

SEQ ID NO: 256121 - DNA, 25 bp, Probe sequence
taaattcaatggttctcacctcgta

SEQ ID NO: 256122 - DNA, 25 bp, Probe sequence
taaattctaaattcaatggttctca

SEQ ID NO: 256123 - DNA, 25 bp, Probe sequence
ttctaaattcaatggttctcacctc

SEQ ID NO: 256124 - DNA, 25 bp, Probe sequence
ttcaatggttctcacctcgtaattg

SEQ ID NO: 256125 - DNA, 25 bp, Probe sequence
ttctcacctcgtaattgtaactgta

SEQ ID NO: 256126 - DNA, 25 bp, Probe sequence
attgtgggtgtcttaagtgtactaa

SEQ ID NO: 256127 - DNA, 25 bp, Probe sequence
atgtctattgtgggtgtcttaagtg

SEQ ID NO: 256128 - DNA, 25 bp, Probe sequence
agtgctgttgtcatgtctattgtgg

SEQ ID NO: 256129 - DNA, 25 bp, Probe sequence
aacaagtgctgttgtcatgtctatt

SEQ ID NO: 256130 - DNA, 25 bp, Probe sequence
aagctctgtatcgatttcaagattt

SEQ ID NO: 256131 - DNA, 25 bp, Probe sequence
aagtgctgttgtcatgtctattgtg

SEQ ID NO: 256132 - DNA, 25 bp, Probe sequence
caagatttattggtggggggtatgt

SEQ ID NO: 256133 - DNA, 25 bp, Probe sequence
caagtgctgttgtcatgtctattgt

SEQ ID NO: 256134 - DNA, 25 bp, Probe sequence
catgtctattgtgggtgtcttaagt

SEQ ID NO: 256135 - DNA, 25 bp, Probe sequence
ctattgtgggtgtcttaagtgtact

SEQ ID NO: 256136 - DNA, 25 bp, Probe sequence
gctgttgtcatgtctattgtgggtg

SEQ ID NO: 256137 - DNA, 25 bp, Probe sequence
gctctgtatcgatttcaagatttat

SEQ ID NO: 256138 - DNA, 25 bp, Probe sequence
gatttcaagatttattggtgggggg

SEQ ID NO: 256139 - DNA, 25 bp, Probe sequence
gatttattggtggggggtatgtgtt

SEQ ID NO: 256140 - DNA, 25 bp, Probe sequence
gttgtcatgtctattgtgggtgtct

SEQ ID NO: 256141 - DNA, 25 bp, Probe sequence
gtatcgatttcaagatttattggtg

SEQ ID NO: 256142 - DNA, 25 bp, Probe sequence
gtaagctctgtatcgatttcaagat

SEQ ID NO: 256143 - DNA, 25 bp, Probe sequence
gtcatgtctattgtgggtgtcttaa

SEQ ID NO: 256144 - DNA, 25 bp, Probe sequence
gtctattgtgggtgtcttaagtgta

SEQ ID NO: 256145 - DNA, 25 bp, Probe sequence
gtgctgttgtcatgtctattgtggg

SEQ ID NO: 256146 - DNA, 25 bp, Probe sequence
gtgtcttaagtgtactaatgggcac

SEQ ID NO: 256147 - DNA, 25 bp, Probe sequence
gggtgtcttaagtgtactaatgggc

SEQ ID NO: 256148 - DNA, 25 bp, Probe sequence
tgtgggtgtcttaagtgtactaatg

SEQ ID NO: 256149 - DNA, 25 bp, Probe sequence
tgtcatgtctattgtgggtgtctta

SEQ ID NO: 256150 - DNA, 25 bp, Probe sequence
tgttgtcatgtctattgtgggtgtc

SEQ ID NO: 256151 - DNA, 25 bp, Probe sequence
tgctgttgtcatgtctattgtgggt

SEQ ID NO: 256152 - DNA, 25 bp, Probe sequence
tcttaagtgtactaatgggcaccgt

SEQ ID NO: 256153 - DNA, 25 bp, Probe sequence
tcttttgtaagctctgtatcgattt

SEQ ID NO: 256154 - DNA, 25 bp, Probe sequence
tcatgtctattgtgggtgtcttaag

SEQ ID NO: 256155 - DNA, 25 bp, Probe sequence
tatcttttgtaagctctgtatcgat

SEQ ID NO: 256156 - DNA, 25 bp, Probe sequence
tatatcttttgtaagctctgtatcg

SEQ ID NO: 256157 - DNA, 25 bp, Probe sequence
ttttgtaagctctgtatcgatttca

SEQ ID NO: 256158 - DNA, 25 bp, Probe sequence
ttgtaagctctgtatcgatttcaag

SEQ ID NO: 256159 - DNA, 25 bp, Probe sequence
ttgtcatgtctattgtgggtgtctt

SEQ ID NO: 256160 - DNA, 25 bp, Probe sequence
atgatgccaatgaggctagaaagta

SEQ ID NO: 256161 - DNA, 25 bp, Probe sequence
agggtgtgctattttactatataca

SEQ ID NO: 256162 - DNA, 25 bp, Probe sequence
actgcattacaaaagggtgtgctat

SEQ ID NO: 256163 - DNA, 25 bp, Probe sequence
actatatacatctaaattacacatt

SEQ ID NO: 256164 - DNA, 25 bp, Probe sequence
acaaaagggtgtgctattttactat

SEQ ID NO: 256165 - DNA, 25 bp, Probe sequence
acaagatactgcattacaaaagggt

SEQ ID NO: 256166 - DNA, 25 bp, Probe sequence
aaatgatttctattttaattgcaaa

SEQ ID NO: 256167 - DNA, 25 bp, Probe sequence
aaagggtgtgctattttactatata

SEQ ID NO: 256168 - DNA, 25 bp, Probe sequence
aaaagggtgtgctattttactatat

SEQ ID NO: 256169 - DNA, 25 bp, Probe sequence
aagatactgcattacaaaagggtgt

SEQ ID NO: 256170 - DNA, 25 bp, Probe sequence
aagggtgtgctattttactatatac

SEQ ID NO: 256171 - DNA, 25 bp, Probe sequence
aatgaggctagaaagtatacaagat

SEQ ID NO: 256172 - DNA, 25 bp, Probe sequence
caagatactgcattacaaaagggtg

SEQ ID NO: 256173 - DNA, 25 bp, Probe sequence
caaaagggtgtgctattttactata

SEQ ID NO: 256174 - DNA, 25 bp, Probe sequence
ctatatacatctaaattacacattt

SEQ ID NO: 256175 - DNA, 25 bp, Probe sequence
gccaatgaggctagaaagtatacaa

SEQ ID NO: 256176 - DNA, 25 bp, Probe sequence
gctattttactatatacatctaaat

SEQ ID NO: 256177 - DNA, 25 bp, Probe sequence
gcattacaaaagggtgtgctatttt

SEQ ID NO: 256178 - DNA, 25 bp, Probe sequence
gatactgcattacaaaagggtgtgc

SEQ ID NO: 256179 - DNA, 25 bp, Probe sequence
gtatacaagatactgcattacaaaa

SEQ ID NO: 256180 - DNA, 25 bp, Probe sequence
gtgctattttactatatacatctaa

SEQ ID NO: 256181 - DNA, 25 bp, Probe sequence
gtgtgctattttactatatacatct

SEQ ID NO: 256182 - DNA, 25 bp, Probe sequence
gggtgtgctattttactatatacat

SEQ ID NO: 256183 - DNA, 25 bp, Probe sequence
ggtgtgctattttactatatacatc

SEQ ID NO: 256184 - DNA, 25 bp, Probe sequence
tgtgctattttactatatacatcta

SEQ ID NO: 256185 - DNA, 25 bp, Probe sequence
tgcattacaaaagggtgtgctattt

SEQ ID NO: 256186 - DNA, 25 bp, Probe sequence
tgctattttactatatacatctaaa

SEQ ID NO: 256187 - DNA, 25 bp, Probe sequence
tgccaatgaggctagaaagtataca

SEQ ID NO: 256188 - DNA, 25 bp, Probe sequence
tacaaaagggtgtgctattttacta

SEQ ID NO: 256189 - DNA, 25 bp, Probe sequence
tacatctaaattacacatttacaaa

SEQ ID NO: 256190 - DNA, 25 bp, Probe sequence
tactatatacatctaaattacacat

SEQ ID NO: 256191 - DNA, 25 bp, Probe sequence
tactgcattacaaaagggtgtgcta

SEQ ID NO: 256192 - DNA, 25 bp, Probe sequence
tatacaagatactgcattacaaaag

SEQ ID NO: 256193 - DNA, 25 bp, Probe sequence
tatacatctaaattacacatttaca

SEQ ID NO: 256194 - DNA, 25 bp, Probe sequence
atgctactaagagacgtttgggtgc

SEQ ID NO: 256195 - DNA, 25 bp, Probe sequence
atccacatgctactaagagacgttt

SEQ ID NO: 256196 - DNA, 25 bp, Probe sequence
atggcacctacaaatccacatgcta

SEQ ID NO: 256197 - DNA, 25 bp, Probe sequence
agtactgttgatataaagctgattg

SEQ ID NO: 256198 - DNA, 25 bp, Probe sequence
acctacaaatccacatgctactaag

SEQ ID NO: 256199 - DNA, 25 bp, Probe sequence
actgttgatataaagctgattgtaa

SEQ ID NO: 256200 - DNA, 25 bp, Probe sequence
acatgctactaagagacgtttgggt

SEQ ID NO: 256201 - DNA, 25 bp, Probe sequence
actaagagacgtttgggtgcattga

SEQ ID NO: 256202 - DNA, 25 bp, Probe sequence
acaaatccacatgctactaagagac

SEQ ID NO: 256203 - DNA, 25 bp, Probe sequence
aaatccacatgctactaagagacgt

SEQ ID NO: 256204 - DNA, 25 bp, Probe sequence
aagagacgtttgggtgcattgaaaa

SEQ ID NO: 256205 - DNA, 25 bp, Probe sequence
aatccacatgctactaagagacgtt

SEQ ID NO: 256206 - DNA, 25 bp, Probe sequence
cacatgctactaagagacgtttggg

SEQ ID NO: 256207 - DNA, 25 bp, Probe sequence
caaatccacatgctactaagagacg

SEQ ID NO: 256208 - DNA, 25 bp, Probe sequence
cacctacaaatccacatgctactaa

SEQ ID NO: 256209 - DNA, 25 bp, Probe sequence
catgctactaagagacgtttgggtg

SEQ ID NO: 256210 - DNA, 25 bp, Probe sequence
ctaagagacgtttgggtgcattgaa

SEQ ID NO: 256211 - DNA, 25 bp, Probe sequence
ctactaagagacgtttgggtgcatt

SEQ ID NO: 256212 - DNA, 25 bp, Probe sequence
ctacaaatccacatgctactaagag

SEQ ID NO: 256213 - DNA, 25 bp, Probe sequence
cctacaaatccacatgctactaaga

SEQ ID NO: 256214 - DNA, 25 bp, Probe sequence
gctactaagagacgtttgggtgcat

SEQ ID NO: 256215 - DNA, 25 bp, Probe sequence
gcacctacaaatccacatgctacta

SEQ ID NO: 256216 - DNA, 25 bp, Probe sequence
gacgtttgggtgcattgaaaatgat

SEQ ID NO: 256217 - DNA, 25 bp, Probe sequence
gagacgtttgggtgcattgaaaatg

SEQ ID NO: 256218 - DNA, 25 bp, Probe sequence
gatagagaaaagtactgttgatata

SEQ ID NO: 256219 - DNA, 25 bp, Probe sequence
gtttgggtgcattgaaaatgataga

SEQ ID NO: 256220 - DNA, 25 bp, Probe sequence
gtactgttgatataaagctgattgt

SEQ ID NO: 256221 - DNA, 25 bp, Probe sequence
ggcacctacaaatccacatgctact

SEQ ID NO: 256222 - DNA, 25 bp, Probe sequence
tggcacctacaaatccacatgctac

SEQ ID NO: 256223 - DNA, 25 bp, Probe sequence
tgttgatataaagctgattgtaaaa

SEQ ID NO: 256224 - DNA, 25 bp, Probe sequence
tccacatgctactaagagacgtttg

SEQ ID NO: 256225 - DNA, 25 bp, Probe sequence
tactaagagacgtttgggtgcattg

SEQ ID NO: 256226 - DNA, 25 bp, Probe sequence
taagagacgtttgggtgcattgaaa

SEQ ID NO: 256227 - DNA, 25 bp, Probe sequence
tacaaatccacatgctactaagaga

SEQ ID NO: 256228 - DNA, 25 bp, Probe sequence
acaggactttagtgattttcctagt

SEQ ID NO: 256229 - DNA, 25 bp, Probe sequence
attgttttatttgtttgattctaat

SEQ ID NO: 256230 - DNA, 25 bp, Probe sequence
attcattgtcggttattattggggt

SEQ ID NO: 256231 - DNA, 25 bp, Probe sequence
attatcgataataccaataccatat

SEQ ID NO: 256232 - DNA, 25 bp, Probe sequence
attattggggttacattttcatata

SEQ ID NO: 256233 - DNA, 25 bp, Probe sequence
atttttacctgtggcatttttatgc

SEQ ID NO: 256234 - DNA, 25 bp, Probe sequence
ataatgcttttatagttccttttgt

SEQ ID NO: 256235 - DNA, 25 bp, Probe sequence
acctgctaatatttttacctgtggc

SEQ ID NO: 256236 - DNA, 25 bp, Probe sequence
acgcagtaacaaatttatgcaattc

SEQ ID NO: 256237 - DNA, 25 bp, Probe sequence
actgttacaccaactgtttacaaat

SEQ ID NO: 256238 - DNA, 25 bp, Probe sequence
aataccatatttgtattttattcct

SEQ ID NO: 256239 - DNA, 25 bp, Probe sequence
cttttgtgtcacttatattatcgat

SEQ ID NO: 256240 - DNA, 25 bp, Probe sequence
gcttttatagttccttttgtgtcac

SEQ ID NO: 256241 - DNA, 25 bp, Probe sequence
gcaattcaattgttttatttgtttg

SEQ ID NO: 256242 - DNA, 25 bp, Probe sequence
gaagggatagctatttttattggta

SEQ ID NO: 256243 - DNA, 25 bp, Probe sequence
gaaattactgttacaccaactgttt

SEQ ID NO: 256244 - DNA, 25 bp, Probe sequence
gacttgagtttatcttcatttttga

SEQ ID NO: 256245 - DNA, 25 bp, Probe sequence
gagacattgccaaatttttttgttt

SEQ ID NO: 256246 - DNA, 25 bp, Probe sequence
gttattcttattaaatgcgtacatc

SEQ ID NO: 256247 - DNA, 25 bp, Probe sequence
gtattttattcctacaatatctaca

SEQ ID NO: 256248 - DNA, 25 bp, Probe sequence
gtatgaatatacaggactttagtga

SEQ ID NO: 256249 - DNA, 25 bp, Probe sequence
gtaaagtgttacctgctaatatttt

SEQ ID NO: 256250 - DNA, 25 bp, Probe sequence
gtgacttataatcttaatgggtttt

SEQ ID NO: 256251 - DNA, 25 bp, Probe sequence
ggtattttgcctcatggtattttag

SEQ ID NO: 256252 - DNA, 25 bp, Probe sequence
tgggtttttggagatatttgttaat

SEQ ID NO: 256253 - DNA, 25 bp, Probe sequence
tagtgattttcctagtaaagattta

SEQ ID NO: 256254 - DNA, 25 bp, Probe sequence
tatagttccttttgtgtcacttata

SEQ ID NO: 256255 - DNA, 25 bp, Probe sequence
tatacttaacaagcattgaactatc

SEQ ID NO: 256256 - DNA, 25 bp, Probe sequence
tattcctacaatatctacaatttat

SEQ ID NO: 256257 - DNA, 25 bp, Probe sequence
tttgcctcatggtattttagaaata

SEQ ID NO: 256258 - DNA, 25 bp, Probe sequence
ttttatgcgctttaattgaaattac

SEQ ID NO: 256259 - DNA, 25 bp, Probe sequence
ttattggtattttgcctcatggtat

SEQ ID NO: 256260 - DNA, 25 bp, Probe sequence
ttatcttcatttttgaaacgcagta

SEQ ID NO: 256261 - DNA, 25 bp, Probe sequence
ttgaactatcaatgttattcttatt

SEQ ID NO: 256262 - DNA, 25 bp, Probe sequence
attttaaatgatcgtgataacggat

SEQ ID NO: 256263 - DNA, 25 bp, Probe sequence
atacatttttaatcgaaatcaggtt

SEQ ID NO: 256264 - DNA, 25 bp, Probe sequence
atagtattttaaatgatcgtgataa

SEQ ID NO: 256265 - DNA, 25 bp, Probe sequence
atcgtgataacggatacatttttaa

SEQ ID NO: 256266 - DNA, 25 bp, Probe sequence
atgatcgtgataacggatacatttt

SEQ ID NO: 256267 - DNA, 25 bp, Probe sequence
agtattttaaatgatcgtgataacg

SEQ ID NO: 256268 - DNA, 25 bp, Probe sequence
acggatacatttttaatcgaaatca

SEQ ID NO: 256269 - DNA, 25 bp, Probe sequence
aaatgatcgtgataacggatacatt

SEQ ID NO: 256270 - DNA, 25 bp, Probe sequence
aatgatcgtgataacggatacattt

SEQ ID NO: 256271 - DNA, 25 bp, Probe sequence
aatagtattttaaatgatcgtgata

SEQ ID NO: 256272 - DNA, 25 bp, Probe sequence
catttttaatcgaaatcaggttacg

SEQ ID NO: 256273 - DNA, 25 bp, Probe sequence
cgtgataacggatacatttttaatc

SEQ ID NO: 256274 - DNA, 25 bp, Probe sequence
cggatacatttttaatcgaaatcag

SEQ ID NO: 256275 - DNA, 25 bp, Probe sequence
gatcgtgataacggatacattttta

SEQ ID NO: 256276 - DNA, 25 bp, Probe sequence
gataacggatacatttttaatcgaa

SEQ ID NO: 256277 - DNA, 25 bp, Probe sequence
gatacatttttaatcgaaatcaggt

SEQ ID NO: 256278 - DNA, 25 bp, Probe sequence
gtattttaaatgatcgtgataacgg

SEQ ID NO: 256279 - DNA, 25 bp, Probe sequence
gtgataacggatacatttttaatcg

SEQ ID NO: 256280 - DNA, 25 bp, Probe sequence
ggatacatttttaatcgaaatcagg

SEQ ID NO: 256281 - DNA, 25 bp, Probe sequence
tgataacggatacatttttaatcga

SEQ ID NO: 256282 - DNA, 25 bp, Probe sequence
tgatcgtgataacggatacattttt

SEQ ID NO: 256283 - DNA, 25 bp, Probe sequence
tcgtgataacggatacatttttaat

SEQ ID NO: 256284 - DNA, 25 bp, Probe sequence
tttaaatgatcgtgataacggatac

SEQ ID NO: 256285 - DNA, 25 bp, Probe sequence
taatagtattttaaatgatcgtgat

SEQ ID NO: 256286 - DNA, 25 bp, Probe sequence
taacggatacatttttaatcgaaat

SEQ ID NO: 256287 - DNA, 25 bp, Probe sequence
taaatgatcgtgataacggatacat

SEQ ID NO: 256288 - DNA, 25 bp, Probe sequence
tacatttttaatcgaaatcaggtta

SEQ ID NO: 256289 - DNA, 25 bp, Probe sequence
tagtattttaaatgatcgtgataac

SEQ ID NO: 256290 - DNA, 25 bp, Probe sequence
tattttaaatgatcgtgataacgga

SEQ ID NO: 256291 - DNA, 25 bp, Probe sequence
ttttaaatgatcgtgataacggata

SEQ ID NO: 256292 - DNA, 25 bp, Probe sequence
ttaaatgatcgtgataacggataca

SEQ ID NO: 256293 - DNA, 25 bp, Probe sequence
atactaccggaacaccataaatata

SEQ ID NO: 256294 - DNA, 25 bp, Probe sequence
atattccaataaatccaactaaatc

SEQ ID NO: 256295 - DNA, 25 bp, Probe sequence
atataaatcctctccagttaagtat

SEQ ID NO: 256296 - DNA, 25 bp, Probe sequence
atatacctcttatgatggtgataac

SEQ ID NO: 256297 - DNA, 25 bp, Probe sequence
ataacaaattcgtaccattggatta

SEQ ID NO: 256298 - DNA, 25 bp, Probe sequence
atctacatcgattcatgacaatgac

SEQ ID NO: 256299 - DNA, 25 bp, Probe sequence
atcctctccagttaagtatataagc

SEQ ID NO: 256300 - DNA, 25 bp, Probe sequence
atgacaatgacaaaggtgagtgttt

SEQ ID NO: 256301 - DNA, 25 bp, Probe sequence
atgacgatttatttttagactttga

SEQ ID NO: 256302 - DNA, 25 bp, Probe sequence
atggtgataacatactattgataga

SEQ ID NO: 256303 - DNA, 25 bp, Probe sequence
acatttctgttatgccatattatgt

SEQ ID NO: 256304 - DNA, 25 bp, Probe sequence
aaaagtgagttatcgctattgaatg

SEQ ID NO: 256305 - DNA, 25 bp, Probe sequence
aagcttatatatacctcttatgatg

SEQ ID NO: 256306 - DNA, 25 bp, Probe sequence
aagtgagttaagacctgtaaattgt

SEQ ID NO: 256307 - DNA, 25 bp, Probe sequence
aattcgtaccattggattatttaag

SEQ ID NO: 256308 - DNA, 25 bp, Probe sequence
atgccatattatgtgagtgaagata

SEQ ID NO: 256309 - DNA, 25 bp, Probe sequence
gcataccttctttattagagaattc

SEQ ID NO: 256310 - DNA, 25 bp, Probe sequence
gaactttgggtattcatagacaata

SEQ ID NO: 256311 - DNA, 25 bp, Probe sequence
gaacgatgtaataacatttctgtta

SEQ ID NO: 256312 - DNA, 25 bp, Probe sequence
gaaatagcctcatggttaaaatata

SEQ ID NO: 256313 - DNA, 25 bp, Probe sequence
gactgcttgtctttggaaatgattt

SEQ ID NO: 256314 - DNA, 25 bp, Probe sequence
gatattatatatctacatcgattca

SEQ ID NO: 256315 - DNA, 25 bp, Probe sequence
gattgggctataacaacaatggaga

SEQ ID NO: 256316 - DNA, 25 bp, Probe sequence
gttcggttagaaatagcctcatggt

SEQ ID NO: 256317 - DNA, 25 bp, Probe sequence
gttaaaatataaatcctctccagtt

SEQ ID NO: 256318 - DNA, 25 bp, Probe sequence
gtatataagcataccttctttatta

SEQ ID NO: 256319 - DNA, 25 bp, Probe sequence
gtgagtgtttaagagactgcttgtc

SEQ ID NO: 256320 - DNA, 25 bp, Probe sequence
gtgagttatcgctattgaatgaacg

SEQ ID NO: 256321 - DNA, 25 bp, Probe sequence
tgatttgtgatgaactttgggtatt

SEQ ID NO: 256322 - DNA, 25 bp, Probe sequence
tatattccagaaggagttcggttag

SEQ ID NO: 256323 - DNA, 25 bp, Probe sequence
tattaatatactaccggaacaccat

SEQ ID NO: 256324 - DNA, 25 bp, Probe sequence
ttatttttagactttgatgattcaa

SEQ ID NO: 256325 - DNA, 25 bp, Probe sequence
ttaatttatctttttcagaatgcaa

SEQ ID NO: 256326 - DNA, 25 bp, Probe sequence
ttcagaatgcaaaatacctaaatat

SEQ ID NO: 256327 - DNA, 25 bp, Probe sequence
attggcttatcattcgtaaacatta

SEQ ID NO: 256328 - DNA, 25 bp, Probe sequence
attgaattggcttatcattcgtaaa

SEQ ID NO: 256329 - DNA, 25 bp, Probe sequence
attcttataagtggaacgagtgtaa

SEQ ID NO: 256330 - DNA, 25 bp, Probe sequence
attatgacgtaacaattcttataag

SEQ ID NO: 256331 - DNA, 25 bp, Probe sequence
attattatgacgtaacaattcttat

SEQ ID NO: 256332 - DNA, 25 bp, Probe sequence
atgacgtaacaattcttataagtgg

SEQ ID NO: 256333 - DNA, 25 bp, Probe sequence
acattattatgacgtaacaattctt

SEQ ID NO: 256334 - DNA, 25 bp, Probe sequence
aaattgaattggcttatcattcgta

SEQ ID NO: 256335 - DNA, 25 bp, Probe sequence
aacaattcttataagtggaacgagt

SEQ ID NO: 256336 - DNA, 25 bp, Probe sequence
aacattattatgacgtaacaattct

SEQ ID NO: 256337 - DNA, 25 bp, Probe sequence
aacgagtgtaattataccatctgta

SEQ ID NO: 256338 - DNA, 25 bp, Probe sequence
aattgaattggcttatcattcgtaa

SEQ ID NO: 256339 - DNA, 25 bp, Probe sequence
caattcttataagtggaacgagtgt

SEQ ID NO: 256340 - DNA, 25 bp, Probe sequence
aattggcttatcattcgtaaacatt

SEQ ID NO: 256341 - DNA, 25 bp, Probe sequence
cattcgtaaacattattatgacgta

SEQ ID NO: 256342 - DNA, 25 bp, Probe sequence
cttatcattcgtaaacattattatg

SEQ ID NO: 256343 - DNA, 25 bp, Probe sequence
gcttatcattcgtaaacattattat

SEQ ID NO: 256344 - DNA, 25 bp, Probe sequence
gaattggcttatcattcgtaaacat

SEQ ID NO: 256345 - DNA, 25 bp, Probe sequence
gaacgagtgtaattataccatctgt

SEQ ID NO: 256346 - DNA, 25 bp, Probe sequence
gacgtaacaattcttataagtggaa

SEQ ID NO: 256347 - DNA, 25 bp, Probe sequence
gtaacaattcttataagtggaacga

SEQ ID NO: 256348 - DNA, 25 bp, Probe sequence
gtaaacattattatgacgtaacaat

SEQ ID NO: 256349 - DNA, 25 bp, Probe sequence
gtggaacgagtgtaattataccatc

SEQ ID NO: 256350 - DNA, 25 bp, Probe sequence
ggaacgagtgtaattataccatctg

SEQ ID NO: 256351 - DNA, 25 bp, Probe sequence
ggcttatcattcgtaaacattatta

SEQ ID NO: 256352 - DNA, 25 bp, Probe sequence
tggcttatcattcgtaaacattatt

SEQ ID NO: 256353 - DNA, 25 bp, Probe sequence
tgacgtaacaattcttataagtgga

SEQ ID NO: 256354 - DNA, 25 bp, Probe sequence
tgaattggcttatcattcgtaaaca

SEQ ID NO: 256355 - DNA, 25 bp, Probe sequence
taagtggaacgagtgtaattatacc

SEQ ID NO: 256356 - DNA, 25 bp, Probe sequence
tatgacgtaacaattcttataagtg

SEQ ID NO: 256357 - DNA, 25 bp, Probe sequence
ttattatgacgtaacaattcttata

SEQ ID NO: 256358 - DNA, 25 bp, Probe sequence
ttcgtaaacattattatgacgtaac

SEQ ID NO: 256359 - DNA, 25 bp, Probe sequence
ttgaattggcttatcattcgtaaac

SEQ ID NO: 256360 - DNA, 25 bp, Probe sequence
ttggcttatcattcgtaaacattat

SEQ ID NO: 256361 - DNA, 25 bp, Probe sequence
ataagtgggtgacagatgaaattgt

SEQ ID NO: 256362 - DNA, 25 bp, Probe sequence
ataacgtataagtgggtgacagatg

SEQ ID NO: 256363 - DNA, 25 bp, Probe sequence
atgaagaaaatattactaagtagta

SEQ ID NO: 256364 - DNA, 25 bp, Probe sequence
agtgggtgacagatgaaattgtaag

SEQ ID NO: 256365 - DNA, 25 bp, Probe sequence
agtagtataacgtataagtgggtga

SEQ ID NO: 256366 - DNA, 25 bp, Probe sequence
agtataacgtataagtgggtgacag

SEQ ID NO: 256367 - DNA, 25 bp, Probe sequence
agatgaaattgtaagttatattata

SEQ ID NO: 256368 - DNA, 25 bp, Probe sequence
gtagtataacgtataagtgggtgac

SEQ ID NO: 256369 - DNA, 25 bp, Probe sequence
acgtataagtgggtgacagatgaaa

SEQ ID NO: 256370 - DNA, 25 bp, Probe sequence
actaagtagtataacgtataagtgg

SEQ ID NO: 256371 - DNA, 25 bp, Probe sequence
aacgtataagtgggtgacagatgaa

SEQ ID NO: 256372 - DNA, 25 bp, Probe sequence
aagtagtataacgtataagtgggtg

SEQ ID NO: 256373 - DNA, 25 bp, Probe sequence
aagtgggtgacagatgaaattgtaa

SEQ ID NO: 256374 - DNA, 25 bp, Probe sequence
cagatgaaattgtaagttatattat

SEQ ID NO: 256375 - DNA, 25 bp, Probe sequence
ctaagtagtataacgtataagtggg

SEQ ID NO: 256376 - DNA, 25 bp, Probe sequence
cgtataagtgggtgacagatgaaat

SEQ ID NO: 256377 - DNA, 25 bp, Probe sequence
gacagatgaaattgtaagttatatt

SEQ ID NO: 256378 - DNA, 25 bp, Probe sequence
gatgaaattgtaagttatattataa

SEQ ID NO: 256379 - DNA, 25 bp, Probe sequence
gtataacgtataagtgggtgacaga

SEQ ID NO: 256380 - DNA, 25 bp, Probe sequence
gtataagtgggtgacagatgaaatt

SEQ ID NO: 256381 - DNA, 25 bp, Probe sequence
gtgacagatgaaattgtaagttata

SEQ ID NO: 256382 - DNA, 25 bp, Probe sequence
gtgggtgacagatgaaattgtaagt

SEQ ID NO: 256383 - DNA, 25 bp, Probe sequence
gggtgacagatgaaattgtaagtta

SEQ ID NO: 256384 - DNA, 25 bp, Probe sequence
ggtgacagatgaaattgtaagttat

SEQ ID NO: 256385 - DNA, 25 bp, Probe sequence
tgggtgacagatgaaattgtaagtt

SEQ ID NO: 256386 - DNA, 25 bp, Probe sequence
tagtataacgtataagtgggtgaca

SEQ ID NO: 256387 - DNA, 25 bp, Probe sequence
taagtgggtgacagatgaaattgta

SEQ ID NO: 256388 - DNA, 25 bp, Probe sequence
taagtagtataacgtataagtgggt

SEQ ID NO: 256389 - DNA, 25 bp, Probe sequence
taacgtataagtgggtgacagatga

SEQ ID NO: 256390 - DNA, 25 bp, Probe sequence
tactaagtagtataacgtataagtg

SEQ ID NO: 256391 - DNA, 25 bp, Probe sequence
tataagtgggtgacagatgaaattg

SEQ ID NO: 256392 - DNA, 25 bp, Probe sequence
tataacgtataagtgggtgacagat

SEQ ID NO: 256393 - DNA, 25 bp, Probe sequence
attgttttccaacgtttggcgtgca

SEQ ID NO: 256394 - DNA, 25 bp, Probe sequence
ataaattgggagttgcagcatataa

SEQ ID NO: 256395 - DNA, 25 bp, Probe sequence
agcacgccaaaacgttagcattgtt

SEQ ID NO: 256396 - DNA, 25 bp, Probe sequence
agcattgttttccaacgtttggcgt

SEQ ID NO: 256397 - DNA, 25 bp, Probe sequence
acgtttggcgtgcaactatttaatt

SEQ ID NO: 256398 - DNA, 25 bp, Probe sequence
aaagcacgccaaaacgttagcattg

SEQ ID NO: 256399 - DNA, 25 bp, Probe sequence
aaaagcacgccaaaacgttagcatt

SEQ ID NO: 256400 - DNA, 25 bp, Probe sequence
aacgtttggcgtgcaactatttaat

SEQ ID NO: 256401 - DNA, 25 bp, Probe sequence
aagcacgccaaaacgttagcattgt

SEQ ID NO: 256402 - DNA, 25 bp, Probe sequence
caacgtttggcgtgcaactatttaa

SEQ ID NO: 256403 - DNA, 25 bp, Probe sequence
caactatttaattcagtgtgtttat

SEQ ID NO: 256404 - DNA, 25 bp, Probe sequence
cattgttttccaacgtttggcgtgc

SEQ ID NO: 256405 - DNA, 25 bp, Probe sequence
cgtttggcgtgcaactatttaattc

SEQ ID NO: 256406 - DNA, 25 bp, Probe sequence
tccaacgtttggcgtgcaactattt

SEQ ID NO: 256407 - DNA, 25 bp, Probe sequence
ccaacgtttggcgtgcaactattta

SEQ ID NO: 256408 - DNA, 25 bp, Probe sequence
gcgtgcaactatttaattcagtgtg

SEQ ID NO: 256409 - DNA, 25 bp, Probe sequence
gcattgttttccaacgtttggcgtg

SEQ ID NO: 256410 - DNA, 25 bp, Probe sequence
gcagcatataaaaaagcacgccaaa

SEQ ID NO: 256411 - DNA, 25 bp, Probe sequence
gcaactatttaattcagtgtgttta

SEQ ID NO: 256412 - DNA, 25 bp, Probe sequence
gataaataaattgggagttgcagca

SEQ ID NO: 256413 - DNA, 25 bp, Probe sequence
gttttccaacgtttggcgtgcaact

SEQ ID NO: 256414 - DNA, 25 bp, Probe sequence
gttagcattgttttccaacgtttgg

SEQ ID NO: 256415 - DNA, 25 bp, Probe sequence
gtttggcgtgcaactatttaattca

SEQ ID NO: 256416 - DNA, 25 bp, Probe sequence
gtgcaactatttaattcagtgtgtt

SEQ ID NO: 256417 - DNA, 25 bp, Probe sequence
ggcgtgcaactatttaattcagtgt

SEQ ID NO: 256418 - DNA, 25 bp, Probe sequence
tgttttccaacgtttggcgtgcaac

SEQ ID NO: 256419 - DNA, 25 bp, Probe sequence
tagcattgttttccaacgtttggcg

SEQ ID NO: 256420 - DNA, 25 bp, Probe sequence
tttggcgtgcaactatttaattcag

SEQ ID NO: 256421 - DNA, 25 bp, Probe sequence
tttccaacgtttggcgtgcaactat

SEQ ID NO: 256422 - DNA, 25 bp, Probe sequence
ttgttttccaacgtttggcgtgcaa

SEQ ID NO: 256423 - DNA, 25 bp, Probe sequence
ttttccaacgtttggcgtgcaacta

SEQ ID NO: 256424 - DNA, 25 bp, Probe sequence
ttagcattgttttccaacgtttggc

SEQ ID NO: 256425 - DNA, 25 bp, Probe sequence
ttccaacgtttggcgtgcaactatt

SEQ ID NO: 256426 - DNA, 25 bp, Probe sequence
ttggcgtgcaactatttaattcagt

SEQ ID NO: 256427 - DNA, 25 bp, Probe sequence
attgttgtcggattaaatataccaa

SEQ ID NO: 256428 - DNA, 25 bp, Probe sequence
attgagccacattaaaggtgacagc

SEQ ID NO: 256429 - DNA, 25 bp, Probe sequence
atataccaacagtttctcctatttt

SEQ ID NO: 256430 - DNA, 25 bp, Probe sequence
atagctcgtaccatagccataataa

SEQ ID NO: 256431 - DNA, 25 bp, Probe sequence
atgaatagaaaattgagccacatta

SEQ ID NO: 256432 - DNA, 25 bp, Probe sequence
atgatagctcgtaccatagccataa

SEQ ID NO: 256433 - DNA, 25 bp, Probe sequence
agctcgtaccatagccataataagt

SEQ ID NO: 256434 - DNA, 25 bp, Probe sequence
accaacagtttctcctattttaatg

SEQ ID NO: 256435 - DNA, 25 bp, Probe sequence
acagtttctcctattttaatgaata

SEQ ID NO: 256436 - DNA, 25 bp, Probe sequence
aaatataccaacagtttctcctatt

SEQ ID NO: 256437 - DNA, 25 bp, Probe sequence
aaaatgtattgttgtcggattaaat

SEQ ID NO: 256438 - DNA, 25 bp, Probe sequence
aacagtttctcctattttaatgaat

SEQ ID NO: 256439 - DNA, 25 bp, Probe sequence
aatataccaacagtttctcctattt

SEQ ID NO: 256440 - DNA, 25 bp, Probe sequence
cataataagttggtttgtcggccaa

SEQ ID NO: 256441 - DNA, 25 bp, Probe sequence
ctcgtaccatagccataataagttg

SEQ ID NO: 256442 - DNA, 25 bp, Probe sequence
cggccaaaaatgtattgttgtcgga

SEQ ID NO: 256443 - DNA, 25 bp, Probe sequence
ccaacagtttctcctattttaatga

SEQ ID NO: 256444 - DNA, 25 bp, Probe sequence
gccaaaaatgtattgttgtcggatt

SEQ ID NO: 256445 - DNA, 25 bp, Probe sequence
gccataataagttggtttgtcggcc

SEQ ID NO: 256446 - DNA, 25 bp, Probe sequence
gagccacattaaaggtgacagcgaa

SEQ ID NO: 256447 - DNA, 25 bp, Probe sequence
gatagctcgtaccatagccataata

SEQ ID NO: 256448 - DNA, 25 bp, Probe sequence
gattaaatataccaacagtttctcc

SEQ ID NO: 256449 - DNA, 25 bp, Probe sequence
gttggtttgtcggccaaaaatgtat

SEQ ID NO: 256450 - DNA, 25 bp, Probe sequence
gtttctcctattttaatgaatagaa

SEQ ID NO: 256451 - DNA, 25 bp, Probe sequence
gtcggccaaaaatgtattgttgtcg

SEQ ID NO: 256452 - DNA, 25 bp, Probe sequence
gtcggattaaatataccaacagttt

SEQ ID NO: 256453 - DNA, 25 bp, Probe sequence
ggtttgtcggccaaaaatgtattgt

SEQ ID NO: 256454 - DNA, 25 bp, Probe sequence
tgatagctcgtaccatagccataat

SEQ ID NO: 256455 - DNA, 25 bp, Probe sequence
taagttggtttgtcggccaaaaatg

SEQ ID NO: 256456 - DNA, 25 bp, Probe sequence
taaatataccaacagtttctcctat

SEQ ID NO: 256457 - DNA, 25 bp, Probe sequence
taccaacagtttctcctattttaat

SEQ ID NO: 256458 - DNA, 25 bp, Probe sequence
tagctcgtaccatagccataataag

SEQ ID NO: 256459 - DNA, 25 bp, Probe sequence
tataccaacagtttctcctatttta

SEQ ID NO: 256460 - DNA, 25 bp, Probe sequence
ttaaatataccaacagtttctccta

SEQ ID NO: 256461 - DNA, 25 bp, Probe sequence
attacaaagttacatgcctaaatgt

SEQ ID NO: 256462 - DNA, 25 bp, Probe sequence
atactttatttcatgaaagtttttg

SEQ ID NO: 256463 - DNA, 25 bp, Probe sequence
atgcctaaatgtttcttaacaaaat

SEQ ID NO: 256464 - DNA, 25 bp, Probe sequence
agtatactttatttcatgaaagttt

SEQ ID NO: 256465 - DNA, 25 bp, Probe sequence
agttacatgcctaaatgtttcttaa

SEQ ID NO: 256466 - DNA, 25 bp, Probe sequence
acatgcctaaatgtttcttaacaaa

SEQ ID NO: 256467 - DNA, 25 bp, Probe sequence
acaaagttacatgcctaaatgtttc

SEQ ID NO: 256468 - DNA, 25 bp, Probe sequence
aaagttacatgcctaaatgtttctt

SEQ ID NO: 256469 - DNA, 25 bp, Probe sequence
aaagtatactttatttcatgaaagt

SEQ ID NO: 256470 - DNA, 25 bp, Probe sequence
aaaagtatactttatttcatgaaag

SEQ ID NO: 256471 - DNA, 25 bp, Probe sequence
aagttacatgcctaaatgtttctta

SEQ ID NO: 256472 - DNA, 25 bp, Probe sequence
aagtatactttatttcatgaaagtt

SEQ ID NO: 256473 - DNA, 25 bp, Probe sequence
caaagttacatgcctaaatgtttct

SEQ ID NO: 256474 - DNA, 25 bp, Probe sequence
catgaaagtttttggtacatttatt

SEQ ID NO: 256475 - DNA, 25 bp, Probe sequence
catgcctaaatgtttcttaacaaaa

SEQ ID NO: 256476 - DNA, 25 bp, Probe sequence
gaaaagtatactttatttcatgaaa

SEQ ID NO: 256477 - DNA, 25 bp, Probe sequence
gttacatgcctaaatgtttcttaac

SEQ ID NO: 256478 - DNA, 25 bp, Probe sequence
gtttttattacaaagttacatgcct

SEQ ID NO: 256479 - DNA, 25 bp, Probe sequence
gtatactttatttcatgaaagtttt

SEQ ID NO: 256480 - DNA, 25 bp, Probe sequence
tgaaagtttttggtacatttatttg

SEQ ID NO: 256481 - DNA, 25 bp, Probe sequence
tgcctaaatgtttcttaacaaaatt

SEQ ID NO: 256482 - DNA, 25 bp, Probe sequence
taatagatttgaaaagtatacttta

SEQ ID NO: 256483 - DNA, 25 bp, Probe sequence
tacaaagttacatgcctaaatgttt

SEQ ID NO: 256484 - DNA, 25 bp, Probe sequence
tacatgcctaaatgtttcttaacaa

SEQ ID NO: 256485 - DNA, 25 bp, Probe sequence
tatactttatttcatgaaagttttt

SEQ ID NO: 256486 - DNA, 25 bp, Probe sequence
tattacaaagttacatgcctaaatg

SEQ ID NO: 256487 - DNA, 25 bp, Probe sequence
tttttggtacatttatttgaaaatg

SEQ ID NO: 256488 - DNA, 25 bp, Probe sequence
tttattacaaagttacatgcctaaa

SEQ ID NO: 256489 - DNA, 25 bp, Probe sequence
tttttattacaaagttacatgccta

SEQ ID NO: 256490 - DNA, 25 bp, Probe sequence
ttttattacaaagttacatgcctaa

SEQ ID NO: 256491 - DNA, 25 bp, Probe sequence
ttattacaaagttacatgcctaaat

SEQ ID NO: 256492 - DNA, 25 bp, Probe sequence
ttacaaagttacatgcctaaatgtt

SEQ ID NO: 256493 - DNA, 25 bp, Probe sequence
ttacatgcctaaatgtttcttaaca

SEQ ID NO: 256494 - DNA, 25 bp, Probe sequence
cttccgcaactacactttaggcttt

SEQ ID NO: 256495 - DNA, 25 bp, Probe sequence
aggctttgcaacacttgccacaata

SEQ ID NO: 256496 - DNA, 25 bp, Probe sequence
agcgaaatcttccgcaactacactt

SEQ ID NO: 256497 - DNA, 25 bp, Probe sequence
agccaaaagcgaaatcttccgcaac

SEQ ID NO: 256498 - DNA, 25 bp, Probe sequence
actacactttaggctttgcaacact

SEQ ID NO: 256499 - DNA, 25 bp, Probe sequence
actttaggctttgcaacacttgcca

SEQ ID NO: 256500 - DNA, 25 bp, Probe sequence
acactttaggctttgcaacacttgc

SEQ ID NO: 256501 - DNA, 25 bp, Probe sequence
acacttgccacaataataaaatgtt

SEQ ID NO: 256502 - DNA, 25 bp, Probe sequence
aaatgacaaatatcgcaaaagccaa

SEQ ID NO: 256503 - DNA, 25 bp, Probe sequence
aaagcgaaatcttccgcaactacac

SEQ ID NO: 256504 - DNA, 25 bp, Probe sequence
aaagccaaaagcgaaatcttccgca

SEQ ID NO: 256505 - DNA, 25 bp, Probe sequence
aaaagcgaaatcttccgcaactaca

SEQ ID NO: 256506 - DNA, 25 bp, Probe sequence
aactacactttaggctttgcaacac

SEQ ID NO: 256507 - DNA, 25 bp, Probe sequence
aagcgaaatcttccgcaactacact

SEQ ID NO: 256508 - DNA, 25 bp, Probe sequence
caactacactttaggctttgcaaca

SEQ ID NO: 256509 - DNA, 25 bp, Probe sequence
caaaagcgaaatcttccgcaactac

SEQ ID NO: 256510 - DNA, 25 bp, Probe sequence
cactttaggctttgcaacacttgcc

SEQ ID NO: 256511 - DNA, 25 bp, Probe sequence
ctttaggctttgcaacacttgccac

SEQ ID NO: 256512 - DNA, 25 bp, Probe sequence
ctacactttaggctttgcaacactt

SEQ ID NO: 256513 - DNA, 25 bp, Probe sequence
ccgcaactacactttaggctttgca

SEQ ID NO: 256514 - DNA, 25 bp, Probe sequence
gccaaaagcgaaatcttccgcaact

SEQ ID NO: 256515 - DNA, 25 bp, Probe sequence
gctttgcaacacttgccacaataat

SEQ ID NO: 256516 - DNA, 25 bp, Probe sequence
gcaacacttgccacaataataaaat

SEQ ID NO: 256517 - DNA, 25 bp, Probe sequence
gcaactacactttaggctttgcaac

SEQ ID NO: 256518 - DNA, 25 bp, Probe sequence
gacaaatatcgcaaaagccaaaagc

SEQ ID NO: 256519 - DNA, 25 bp, Probe sequence
ggctttgcaacacttgccacaataa

SEQ ID NO: 256520 - DNA, 25 bp, Probe sequence
tccgcaactacactttaggctttgc

SEQ ID NO: 256521 - DNA, 25 bp, Probe sequence
tcttccgcaactacactttaggctt

SEQ ID NO: 256522 - DNA, 25 bp, Probe sequence
tacactttaggctttgcaacacttg

SEQ ID NO: 256523 - DNA, 25 bp, Probe sequence
taggctttgcaacacttgccacaat

SEQ ID NO: 256524 - DNA, 25 bp, Probe sequence
tttaggctttgcaacacttgccaca

SEQ ID NO: 256525 - DNA, 25 bp, Probe sequence
ttaggctttgcaacacttgccacaa

SEQ ID NO: 256526 - DNA, 25 bp, Probe sequence
ttccgcaactacactttaggctttg

SEQ ID NO: 256527 - DNA, 25 bp, Probe sequence
ttgcaacacttgccacaataataaa

SEQ ID NO: 256528 - DNA, 25 bp, Probe sequence
attgaataaaaaaacacgcatccta

SEQ ID NO: 256529 - DNA, 25 bp, Probe sequence
attaaaaatctacttcatctgtccg

SEQ ID NO: 256530 - DNA, 25 bp, Probe sequence
atatgaacacaaaaaatggacagat

SEQ ID NO: 256531 - DNA, 25 bp, Probe sequence
ataaaaaaacacgcatcctacgata

SEQ ID NO: 256532 - DNA, 25 bp, Probe sequence
atgaacacaaaaaatggacagatga

SEQ ID NO: 256533 - DNA, 25 bp, Probe sequence
atgtttcctgataaattttccaaat

SEQ ID NO: 256534 - DNA, 25 bp, Probe sequence
aaaaaaacacgcatcctacgatacg

SEQ ID NO: 256535 - DNA, 25 bp, Probe sequence
aaattaaaaatctacttcatctgtc

SEQ ID NO: 256536 - DNA, 25 bp, Probe sequence
aaaaacacgcatcctacgatacgtg

SEQ ID NO: 256537 - DNA, 25 bp, Probe sequence
aaaaaacacgcatcctacgatacgt

SEQ ID NO: 256538 - DNA, 25 bp, Probe sequence
aaaaatctacttcatctgtccgatt

SEQ ID NO: 256539 - DNA, 25 bp, Probe sequence
aataaaaaaacacgcatcctacgat

SEQ ID NO: 256540 - DNA, 25 bp, Probe sequence
aattaaaaatctacttcatctgtcc

SEQ ID NO: 256541 - DNA, 25 bp, Probe sequence
gaataaaaaaacacgcatcctacga

SEQ ID NO: 256542 - DNA, 25 bp, Probe sequence
gaaattaaaaatctacttcatctgt

SEQ ID NO: 256543 - DNA, 25 bp, Probe sequence
tgtttcctgataaattttccaaatt

SEQ ID NO: 256544 - DNA, 25 bp, Probe sequence
tgaataaaaaaacacgcatcctacg

SEQ ID NO: 256545 - DNA, 25 bp, Probe sequence
tgaacacaaaaaatggacagatgaa

SEQ ID NO: 256546 - DNA, 25 bp, Probe sequence
taaaaaaacacgcatcctacgatac

SEQ ID NO: 256547 - DNA, 25 bp, Probe sequence
taaaaatctacttcatctgtccgat

SEQ ID NO: 256548 - DNA, 25 bp, Probe sequence
tatgaacacaaaaaatggacagatg

SEQ ID NO: 256549 - DNA, 25 bp, Probe sequence
tattgaataaaaaaacacgcatcct

SEQ ID NO: 256550 - DNA, 25 bp, Probe sequence
ttaaaaatctacttcatctgtccga

SEQ ID NO: 256551 - DNA, 25 bp, Probe sequence
ttgaataaaaaaacacgcatcctac

SEQ ID NO: 256552 - DNA, 25 bp, Probe sequence
attactttttacactcacgtgttgc

SEQ ID NO: 256553 - DNA, 25 bp, Probe sequence
atgatgcaacatctgatacaacact

SEQ ID NO: 256554 - DNA, 25 bp, Probe sequence
atgatacaacacctacgattacttt

SEQ ID NO: 256555 - DNA, 25 bp, Probe sequence
actttttacactcacgtgttgcatc

SEQ ID NO: 256556 - DNA, 25 bp, Probe sequence
acgattactttttacactcacgtgt

SEQ ID NO: 256557 - DNA, 25 bp, Probe sequence
acgtgttgcatcactcaaaaaatga

SEQ ID NO: 256558 - DNA, 25 bp, Probe sequence
actcacgtgttgcatcactcaaaaa

SEQ ID NO: 256559 - DNA, 25 bp, Probe sequence
acactcacgtgttgcatcactcaaa

SEQ ID NO: 256560 - DNA, 25 bp, Probe sequence
aaaatgatacaacacctacgattac

SEQ ID NO: 256561 - DNA, 25 bp, Probe sequence
aatgatacaacacctacgattactt

SEQ ID NO: 256562 - DNA, 25 bp, Probe sequence
cactcacgtgttgcatcactcaaaa

SEQ ID NO: 256563 - DNA, 25 bp, Probe sequence
cacgtgttgcatcactcaaaaaatg

SEQ ID NO: 256564 - DNA, 25 bp, Probe sequence
caccaaaaatgatacaacacctacg

SEQ ID NO: 256565 - DNA, 25 bp, Probe sequence
cacctacgattactttttacactca

SEQ ID NO: 256566 - DNA, 25 bp, Probe sequence
ctttttacactcacgtgttgcatca

SEQ ID NO: 256567 - DNA, 25 bp, Probe sequence
ctacgattactttttacactcacgt

SEQ ID NO: 256568 - DNA, 25 bp, Probe sequence
ctcacgtgttgcatcactcaaaaaa

SEQ ID NO: 256569 - DNA, 25 bp, Probe sequence
cgattactttttacactcacgtgtt

SEQ ID NO: 256570 - DNA, 25 bp, Probe sequence
cctacgattactttttacactcacg

SEQ ID NO: 256571 - DNA, 25 bp, Probe sequence
ccaaaaatgatacaacacctacgat

SEQ ID NO: 256572 - DNA, 25 bp, Probe sequence
gcatcaccaaaaatgatacaacacc

SEQ ID NO: 256573 - DNA, 25 bp, Probe sequence
gatacaacacctacgattacttttt

SEQ ID NO: 256574 - DNA, 25 bp, Probe sequence
gattactttttacactcacgtgttg

SEQ ID NO: 256575 - DNA, 25 bp, Probe sequence
tgatacaacacctacgattactttt

SEQ ID NO: 256576 - DNA, 25 bp, Probe sequence
tgatgcaacatctgatacaacactc

SEQ ID NO: 256577 - DNA, 25 bp, Probe sequence
tcactcaaaaaatgatgcaacatct

SEQ ID NO: 256578 - DNA, 25 bp, Probe sequence
tacactcacgtgttgcatcactcaa

SEQ ID NO: 256579 - DNA, 25 bp, Probe sequence
tactttttacactcacgtgttgcat

SEQ ID NO: 256580 - DNA, 25 bp, Probe sequence
tacgattactttttacactcacgtg

SEQ ID NO: 256581 - DNA, 25 bp, Probe sequence
tttacactcacgtgttgcatcactc

SEQ ID NO: 256582 - DNA, 25 bp, Probe sequence
tttttacactcacgtgttgcatcac

SEQ ID NO: 256583 - DNA, 25 bp, Probe sequence
ttttacactcacgtgttgcatcact

SEQ ID NO: 256584 - DNA, 25 bp, Probe sequence
ttactttttacactcacgtgttgca

SEQ ID NO: 256585 - DNA, 25 bp, Probe sequence
ttacactcacgtgttgcatcactca

SEQ ID NO: 256586 - DNA, 25 bp, Probe sequence
atacttgcgaatcctgcaatggacc

SEQ ID NO: 256587 - DNA, 25 bp, Probe sequence
atcctgcaatggaccacgctgtagt

SEQ ID NO: 256588 - DNA, 25 bp, Probe sequence
atcgctaagaccgtgaagcatagca

SEQ ID NO: 256589 - DNA, 25 bp, Probe sequence
atgagtacaatcgctaagaccgtga

SEQ ID NO: 256590 - DNA, 25 bp, Probe sequence
atgttgcgatacttgcgaatcctgc

SEQ ID NO: 256591 - DNA, 25 bp, Probe sequence
agaccgtgaagcatagcactgctat

SEQ ID NO: 256592 - DNA, 25 bp, Probe sequence
accgtgaagcatagcactgctatta

SEQ ID NO: 256593 - DNA, 25 bp, Probe sequence
acttgcgaatcctgcaatggaccac

SEQ ID NO: 256594 - DNA, 25 bp, Probe sequence
aagaccgtgaagcatagcactgcta

SEQ ID NO: 256595 - DNA, 25 bp, Probe sequence
aatggaccacgctgtagtgaagtat

SEQ ID NO: 256596 - DNA, 25 bp, Probe sequence
caatcgctaagaccgtgaagcatag

SEQ ID NO: 256597 - DNA, 25 bp, Probe sequence
cttgcgaatcctgcaatggaccacg

SEQ ID NO: 256598 - DNA, 25 bp, Probe sequence
ctaagaccgtgaagcatagcactgc

SEQ ID NO: 256599 - DNA, 25 bp, Probe sequence
ctgcaatggaccacgctgtagtgaa

SEQ ID NO: 256600 - DNA, 25 bp, Probe sequence
cgtgaagcatagcactgctattagg

SEQ ID NO: 256601 - DNA, 25 bp, Probe sequence
cgatacttgcgaatcctgcaatgga

SEQ ID NO: 256602 - DNA, 25 bp, Probe sequence
cctgcaatggaccacgctgtagtga

SEQ ID NO: 256603 - DNA, 25 bp, Probe sequence
gcgatacttgcgaatcctgcaatgg

SEQ ID NO: 256604 - DNA, 25 bp, Probe sequence
gcaatggaccacgctgtagtgaagt

SEQ ID NO: 256605 - DNA, 25 bp, Probe sequence
gaccgtgaagcatagcactgctatt

SEQ ID NO: 256606 - DNA, 25 bp, Probe sequence
gagtacaatcgctaagaccgtgaag

SEQ ID NO: 256607 - DNA, 25 bp, Probe sequence
gatacttgcgaatcctgcaatggac

SEQ ID NO: 256608 - DNA, 25 bp, Probe sequence
gttgcgatacttgcgaatcctgcaa

SEQ ID NO: 256609 - DNA, 25 bp, Probe sequence
gtacaatcgctaagaccgtgaagca

SEQ ID NO: 256610 - DNA, 25 bp, Probe sequence
tgttgcgatacttgcgaatcctgca

SEQ ID NO: 256611 - DNA, 25 bp, Probe sequence
tgagtacaatcgctaagaccgtgaa

SEQ ID NO: 256612 - DNA, 25 bp, Probe sequence
tgcaatggaccacgctgtagtgaag

SEQ ID NO: 256613 - DNA, 25 bp, Probe sequence
tgcgaatcctgcaatggaccacgct

SEQ ID NO: 256614 - DNA, 25 bp, Probe sequence
tgcgatacttgcgaatcctgcaatg

SEQ ID NO: 256615 - DNA, 25 bp, Probe sequence
tcctgcaatggaccacgctgtagtg

SEQ ID NO: 256616 - DNA, 25 bp, Probe sequence
tacaatcgctaagaccgtgaagcat

SEQ ID NO: 256617 - DNA, 25 bp, Probe sequence
tacttgcgaatcctgcaatggacca

SEQ ID NO: 256618 - DNA, 25 bp, Probe sequence
ttgcgatacttgcgaatcctgcaat

SEQ ID NO: 256619 - DNA, 25 bp, Probe sequence
ttgcgaatcctgcaatggaccacgc

SEQ ID NO: 256620 - DNA, 25 bp, Probe sequence
attcttcaagcccactttttatctt

SEQ ID NO: 256621 - DNA, 25 bp, Probe sequence
attaaccatcttcaaacattgccgt

SEQ ID NO: 256622 - DNA, 25 bp, Probe sequence
attaattaaccatcttcaaacattg

SEQ ID NO: 256623 - DNA, 25 bp, Probe sequence
agcccactttttatcttggaataca

SEQ ID NO: 256624 - DNA, 25 bp, Probe sequence
accatcttcaaacattgccgttaga

SEQ ID NO: 256625 - DNA, 25 bp, Probe sequence
acattaattaaccatcttcaaacat

SEQ ID NO: 256626 - DNA, 25 bp, Probe sequence
aaacattgccgttagattcgccaaa

SEQ ID NO: 256627 - DNA, 25 bp, Probe sequence
aacattgccgttagattcgccaaat

SEQ ID NO: 256628 - DNA, 25 bp, Probe sequence
aaccatcttcaaacattgccgttag

SEQ ID NO: 256629 - DNA, 25 bp, Probe sequence
aatacattaattaaccatcttcaaa

SEQ ID NO: 256630 - DNA, 25 bp, Probe sequence
aattaaccatcttcaaacattgccg

SEQ ID NO: 256631 - DNA, 25 bp, Probe sequence
caagcccactttttatcttggaata

SEQ ID NO: 256632 - DNA, 25 bp, Probe sequence
caaacattgccgttagattcgccaa

SEQ ID NO: 256633 - DNA, 25 bp, Probe sequence
cactttttatcttggaatacattaa

SEQ ID NO: 256634 - DNA, 25 bp, Probe sequence
catcttcaaacattgccgttagatt

SEQ ID NO: 256635 - DNA, 25 bp, Probe sequence
cttcaagcccactttttatcttgga

SEQ ID NO: 256636 - DNA, 25 bp, Probe sequence
cttcaaacattgccgttagattcgc

SEQ ID NO: 256637 - DNA, 25 bp, Probe sequence
ctattcttcaagcccactttttatc

SEQ ID NO: 256638 - DNA, 25 bp, Probe sequence
cccactttttatcttggaatacatt

SEQ ID NO: 256639 - DNA, 25 bp, Probe sequence
ccatcttcaaacattgccgttagat

SEQ ID NO: 256640 - DNA, 25 bp, Probe sequence
gcccactttttatcttggaatacat

SEQ ID NO: 256641 - DNA, 25 bp, Probe sequence
ggaatacattaattaaccatcttca

SEQ ID NO: 256642 - DNA, 25 bp, Probe sequence
tcttcaagcccactttttatcttgg

SEQ ID NO: 256643 - DNA, 25 bp, Probe sequence
tcttcaaacattgccgttagattcg

SEQ ID NO: 256644 - DNA, 25 bp, Probe sequence
tcaaacattgccgttagattcgcca

SEQ ID NO: 256645 - DNA, 25 bp, Probe sequence
tcaagcccactttttatcttggaat

SEQ ID NO: 256646 - DNA, 25 bp, Probe sequence
taattaaccatcttcaaacattgcc

SEQ ID NO: 256647 - DNA, 25 bp, Probe sequence
taaccatcttcaaacattgccgtta

SEQ ID NO: 256648 - DNA, 25 bp, Probe sequence
tacattaattaaccatcttcaaaca

SEQ ID NO: 256649 - DNA, 25 bp, Probe sequence
tattcttcaagcccactttttatct

SEQ ID NO: 256650 - DNA, 25 bp, Probe sequence
ttaaccatcttcaaacattgccgtt

SEQ ID NO: 256651 - DNA, 25 bp, Probe sequence
ttcaagcccactttttatcttggaa

SEQ ID NO: 256652 - DNA, 25 bp, Probe sequence
ttcaaacattgccgttagattcgcc

SEQ ID NO: 256653 - DNA, 25 bp, Probe sequence
ttcttcaagcccactttttatcttg

SEQ ID NO: 256654 - DNA, 25 bp, Probe sequence
aggctgtattggagcaggcccgact

SEQ ID NO: 256655 - DNA, 25 bp, Probe sequence
attattttgcgcaggcgacgcgcta

SEQ ID NO: 256656 - DNA, 25 bp, Probe sequence
attagcattagaattattattattt

SEQ ID NO: 256657 - DNA, 25 bp, Probe sequence
attttgcgcaggcgacgcgctaggc

SEQ ID NO: 256658 - DNA, 25 bp, Probe sequence
acgcgctaggctgtattggagcagg

SEQ ID NO: 256659 - DNA, 25 bp, Probe sequence
aaattattatttgtattcgccgctg

SEQ ID NO: 256660 - DNA, 25 bp, Probe sequence
aattattatttgtattcgccgctgg

SEQ ID NO: 256661 - DNA, 25 bp, Probe sequence
ctaggctgtattggagcaggcccga

SEQ ID NO: 256662 - DNA, 25 bp, Probe sequence
cgcgctaggctgtattggagcaggc

SEQ ID NO: 256663 - DNA, 25 bp, Probe sequence
ctgttgctgttgaattagcattaga

SEQ ID NO: 256664 - DNA, 25 bp, Probe sequence
ctggctctgttgctgttgaattagc

SEQ ID NO: 256665 - DNA, 25 bp, Probe sequence
cgacgcgctaggctgtattggagca

SEQ ID NO: 256666 - DNA, 25 bp, Probe sequence
cgctaggctgtattggagcaggccc

SEQ ID NO: 256667 - DNA, 25 bp, Probe sequence
gcgctaggctgtattggagcaggcc

SEQ ID NO: 256668 - DNA, 25 bp, Probe sequence
gcgacgcgctaggctgtattggagc

SEQ ID NO: 256669 - DNA, 25 bp, Probe sequence
gctctgttgctgttgaattagcatt

SEQ ID NO: 256670 - DNA, 25 bp, Probe sequence
gctaggctgtattggagcaggcccg

SEQ ID NO: 256671 - DNA, 25 bp, Probe sequence
gacgcgctaggctgtattggagcag

SEQ ID NO: 256672 - DNA, 25 bp, Probe sequence
gttatctgtattattaggcacgttt

SEQ ID NO: 256673 - DNA, 25 bp, Probe sequence
gtattgttatttgatgctaaattat

SEQ ID NO: 256674 - DNA, 25 bp, Probe sequence
gtattattaggcacgtttaatgtat

SEQ ID NO: 256675 - DNA, 25 bp, Probe sequence
ttttgcgcaggcgacgcgctaggct

SEQ ID NO: 256676 - DNA, 25 bp, Probe sequence
ggcacgtttaatgtattgttatttg

SEQ ID NO: 256677 - DNA, 25 bp, Probe sequence
ggctctgttgctgttgaattagcat

SEQ ID NO: 256678 - DNA, 25 bp, Probe sequence
taatgtattgttatttgatgctaaa

SEQ ID NO: 256679 - DNA, 25 bp, Probe sequence
taggctgtattggagcaggcccgac

SEQ ID NO: 256680 - DNA, 25 bp, Probe sequence
taggcacgtttaatgtattgttatt

SEQ ID NO: 256681 - DNA, 25 bp, Probe sequence
tatctgtattattaggcacgtttaa

SEQ ID NO: 256682 - DNA, 25 bp, Probe sequence
tattttgcgcaggcgacgcgctagg

SEQ ID NO: 256683 - DNA, 25 bp, Probe sequence
tattattttgcgcaggcgacgcgct

SEQ ID NO: 256684 - DNA, 25 bp, Probe sequence
tattattattttgcgcaggcgacgc

SEQ ID NO: 256685 - DNA, 25 bp, Probe sequence
ttattttgcgcaggcgacgcgctag

SEQ ID NO: 256686 - DNA, 25 bp, Probe sequence
ttatctgtattattaggcacgttta

SEQ ID NO: 256687 - DNA, 25 bp, Probe sequence
ttgttatctgtattattaggcacgt

SEQ ID NO: 256688 - DNA, 25 bp, Probe sequence
ctcgaattccctattactaaagcca

SEQ ID NO: 256689 - DNA, 25 bp, Probe sequence
atcaattttaatcgatgcggcaaaa

SEQ ID NO: 256690 - DNA, 25 bp, Probe sequence
atgtctcttatttccaaaaaatgct

SEQ ID NO: 256691 - DNA, 25 bp, Probe sequence
atgtgtctttctgtaccatgaatac

SEQ ID NO: 256692 - DNA, 25 bp, Probe sequence
agaagtcgatgaacccatgtctctt

SEQ ID NO: 256693 - DNA, 25 bp, Probe sequence
actcaacattaacaagctggtgcct

SEQ ID NO: 256694 - DNA, 25 bp, Probe sequence
actttatatccaaaccgcaacttcg

SEQ ID NO: 256695 - DNA, 25 bp, Probe sequence
acttcgaaccatcttgagacaaaat

SEQ ID NO: 256696 - DNA, 25 bp, Probe sequence
acaaacatatatcaatgcacactat

SEQ ID NO: 256697 - DNA, 25 bp, Probe sequence
aaatgggcaattcgactatgctcca

SEQ ID NO: 256698 - DNA, 25 bp, Probe sequence
aaagccattccttattatgctaaat

SEQ ID NO: 256699 - DNA, 25 bp, Probe sequence
aaaacaaaagcgtgcaccgatacaa

SEQ ID NO: 256700 - DNA, 25 bp, Probe sequence
aacaagctggtgcctatttacctta

SEQ ID NO: 256701 - DNA, 25 bp, Probe sequence
aagacatttctacaaaacacctact

SEQ ID NO: 256702 - DNA, 25 bp, Probe sequence
cgatgaacccatgtctcttatttcc

SEQ ID NO: 256703 - DNA, 25 bp, Probe sequence
ccgcaacttcgaaccatcttgagac

SEQ ID NO: 256704 - DNA, 25 bp, Probe sequence
gccattccttattatgctaaattgc

SEQ ID NO: 256705 - DNA, 25 bp, Probe sequence
gcggcaaaaagcatactcaacatta

SEQ ID NO: 256706 - DNA, 25 bp, Probe sequence
gctggtgcctatttaccttaatccg

SEQ ID NO: 256707 - DNA, 25 bp, Probe sequence
gctaaattgcattttacatcagcat

SEQ ID NO: 256708 - DNA, 25 bp, Probe sequence
gcattttacatcagcatcaatttta

SEQ ID NO: 256709 - DNA, 25 bp, Probe sequence
gcacactatataattggtatgacgg

SEQ ID NO: 256710 - DNA, 25 bp, Probe sequence
gcaattcgactatgctccatttcaa

SEQ ID NO: 256711 - DNA, 25 bp, Probe sequence
gaacccatgtctcttatttccaaaa

SEQ ID NO: 256712 - DNA, 25 bp, Probe sequence
gacaaaatgtgtctttctgtaccat

SEQ ID NO: 256713 - DNA, 25 bp, Probe sequence
gtatgacggaaatgggcaattcgac

SEQ ID NO: 256714 - DNA, 25 bp, Probe sequence
gtttagcattgaagcatttcattga

SEQ ID NO: 256715 - DNA, 25 bp, Probe sequence
tggtgcctatttaccttaatccgaa

SEQ ID NO: 256716 - DNA, 25 bp, Probe sequence
tcgactatgctccatttcaaaaatg

SEQ ID NO: 256717 - DNA, 25 bp, Probe sequence
tacaatctcgaattccctattacta

SEQ ID NO: 256718 - DNA, 25 bp, Probe sequence
tacaaaacacctactttatatccaa

SEQ ID NO: 256719 - DNA, 25 bp, Probe sequence
tatccaaaccgcaacttcgaaccat

SEQ ID NO: 256720 - DNA, 25 bp, Probe sequence
ttccctattactaaagccattcctt

SEQ ID NO: 256721 - DNA, 25 bp, Probe sequence
ttctgtaccatgaatacaatctcga

SEQ ID NO: 256722 - DNA, 25 bp, Probe sequence
attctggagtgatttttggcctaat

SEQ ID NO: 256723 - DNA, 25 bp, Probe sequence
attcttgattactattattctacta

SEQ ID NO: 256724 - DNA, 25 bp, Probe sequence
attatccgcattcttgattactatt

SEQ ID NO: 256725 - DNA, 25 bp, Probe sequence
atatcatcggtggtgcattgctaat

SEQ ID NO: 256726 - DNA, 25 bp, Probe sequence
atgacgtaccgacaaatgaacaaga

SEQ ID NO: 256727 - DNA, 25 bp, Probe sequence
agtgctcatcggtattgtgttatta

SEQ ID NO: 256728 - DNA, 25 bp, Probe sequence
agatcatctttatttacattttcat

SEQ ID NO: 256729 - DNA, 25 bp, Probe sequence
aataacctatcctcattactcattc

SEQ ID NO: 256730 - DNA, 25 bp, Probe sequence
caaggatttgttttatgatgattta

SEQ ID NO: 256731 - DNA, 25 bp, Probe sequence
ctagtctagtgtttgcatcattgca

SEQ ID NO: 256732 - DNA, 25 bp, Probe sequence
gcatcattgcatgaatcggatactt

SEQ ID NO: 256733 - DNA, 25 bp, Probe sequence
gcacgtggaaattattttctaactt

SEQ ID NO: 256734 - DNA, 25 bp, Probe sequence
gaagaaatcgtttttcgaggcatga

SEQ ID NO: 256735 - DNA, 25 bp, Probe sequence
gagtgatttttggcctaatatattt

SEQ ID NO: 256736 - DNA, 25 bp, Probe sequence
gatgatttatcagttgcacgtggaa

SEQ ID NO: 256737 - DNA, 25 bp, Probe sequence
gatcgagaattacaacatatgcctt

SEQ ID NO: 256738 - DNA, 25 bp, Probe sequence
gatacacacatactttatggcgtgt

SEQ ID NO: 256739 - DNA, 25 bp, Probe sequence
gtcacaagtgatttatatcatcggt

SEQ ID NO: 256740 - DNA, 25 bp, Probe sequence
gtggtgcattgctaatttatgggtt

SEQ ID NO: 256741 - DNA, 25 bp, Probe sequence
ggtttcgttgtcagtgatacacaca

SEQ ID NO: 256742 - DNA, 25 bp, Probe sequence
ggtattgtgttattacggttattca

SEQ ID NO: 256743 - DNA, 25 bp, Probe sequence
ggattagttgtgtctagtctagtgt

SEQ ID NO: 256744 - DNA, 25 bp, Probe sequence
tggcgtgtttatagtgctcatcggt

SEQ ID NO: 256745 - DNA, 25 bp, Probe sequence
tgggtacttaccttatttatattct

SEQ ID NO: 256746 - DNA, 25 bp, Probe sequence
tattctactaattggtttcgttgtc

SEQ ID NO: 256747 - DNA, 25 bp, Probe sequence
tgcctttgtatatgtctattgtcac

SEQ ID NO: 256748 - DNA, 25 bp, Probe sequence
tcctcattactcattctgatatggg

SEQ ID NO: 256749 - DNA, 25 bp, Probe sequence
tcggatacttggattgggtacttac

SEQ ID NO: 256750 - DNA, 25 bp, Probe sequence
taatccactttataaataacctatc

SEQ ID NO: 256751 - DNA, 25 bp, Probe sequence
tagaagtcgttattttaatccactt

SEQ ID NO: 256752 - DNA, 25 bp, Probe sequence
tatccctgccattgtagaagaaatc

SEQ ID NO: 256753 - DNA, 25 bp, Probe sequence
ttctaactttattatccgcattctt

SEQ ID NO: 256754 - DNA, 25 bp, Probe sequence
ttgctattatccctgccattgtaga

SEQ ID NO: 256755 - DNA, 25 bp, Probe sequence
ttgtcacaattgctattatccctgc

SEQ ID NO: 256756 - DNA, 25 bp, Probe sequence
attttatcaataacctcttagccat

SEQ ID NO: 256757 - DNA, 25 bp, Probe sequence
atttggatttttgttgatgtatgga

SEQ ID NO: 256758 - DNA, 25 bp, Probe sequence
atgaccatgagtatgttgggctatt

SEQ ID NO: 256759 - DNA, 25 bp, Probe sequence
atgttgatcatttttttagtaatta

SEQ ID NO: 256760 - DNA, 25 bp, Probe sequence
accttaccacatagctctgcttagt

SEQ ID NO: 256761 - DNA, 25 bp, Probe sequence
acttatatgatacgttcgcaccgcc

SEQ ID NO: 256762 - DNA, 25 bp, Probe sequence
aaacatcaatttattatctttcaaa

SEQ ID NO: 256763 - DNA, 25 bp, Probe sequence
aaacacgctgattggttatcttccg

SEQ ID NO: 256764 - DNA, 25 bp, Probe sequence
aaaattaaaattccctcatatgctt

SEQ ID NO: 256765 - DNA, 25 bp, Probe sequence
aatcatcttttcttaggttttatag

SEQ ID NO: 256766 - DNA, 25 bp, Probe sequence
aattccctcatatgctttatattat

SEQ ID NO: 256767 - DNA, 25 bp, Probe sequence
gctctgcttagtactgctatcattc

SEQ ID NO: 256768 - DNA, 25 bp, Probe sequence
gctaatacatgaatcaaacacgctg

SEQ ID NO: 256769 - DNA, 25 bp, Probe sequence
gctatcattccaccaattacagaag

SEQ ID NO: 256770 - DNA, 25 bp, Probe sequence
gaattttattcagaaatcatctttt

SEQ ID NO: 256771 - DNA, 25 bp, Probe sequence
gaagaaatcatctgtcgtggattga

SEQ ID NO: 256772 - DNA, 25 bp, Probe sequence
gagtctgaagatgcaccttaccaca

SEQ ID NO: 256773 - DNA, 25 bp, Probe sequence
gatgtatggattagattacttatat

SEQ ID NO: 256774 - DNA, 25 bp, Probe sequence
gattggttatcttccgtatttttat

SEQ ID NO: 256775 - DNA, 25 bp, Probe sequence
gttcgcaccgcctacattaaatgaa

SEQ ID NO: 256776 - DNA, 25 bp, Probe sequence
gtttcaactgtattcttcacgctaa

SEQ ID NO: 256777 - DNA, 25 bp, Probe sequence
ggaacagacatcagttatgaccatg

SEQ ID NO: 256778 - DNA, 25 bp, Probe sequence
tgttgggctatttattatattacta

SEQ ID NO: 256779 - DNA, 25 bp, Probe sequence
tgaagatgcaccttaccacatagct

SEQ ID NO: 256780 - DNA, 25 bp, Probe sequence
tcatctgtcgtggattgattatacg

SEQ ID NO: 256781 - DNA, 25 bp, Probe sequence
tcaggtttaatttttggctatactt

SEQ ID NO: 256782 - DNA, 25 bp, Probe sequence
tactgctatcattccaccaattaca

SEQ ID NO: 256783 - DNA, 25 bp, Probe sequence
tagaggtaccgattttaatacattt

SEQ ID NO: 256784 - DNA, 25 bp, Probe sequence
tatcttccgtatttttattcaggtt

SEQ ID NO: 256785 - DNA, 25 bp, Probe sequence
tatttttgttgatgatttgtctgta

SEQ ID NO: 256786 - DNA, 25 bp, Probe sequence
tattactaggtgttgtacttcttaa

SEQ ID NO: 256787 - DNA, 25 bp, Probe sequence
tattcttcacgctaatacatgaatc

SEQ ID NO: 256788 - DNA, 25 bp, Probe sequence
ttagtactgctatcattccaccaat

SEQ ID NO: 256789 - DNA, 25 bp, Probe sequence
ttcttaggttttatagtttcaactg

SEQ ID NO: 256790 - DNA, 25 bp, Probe sequence
atagaagaaaatcctcaactttcta

SEQ ID NO: 256791 - DNA, 25 bp, Probe sequence
ataatgctaattatggtaagttaat

SEQ ID NO: 256792 - DNA, 25 bp, Probe sequence
atgaagaaaccacttatcacatatt

SEQ ID NO: 256793 - DNA, 25 bp, Probe sequence
atggagacatcttaaaccaacccgg

SEQ ID NO: 256794 - DNA, 25 bp, Probe sequence
agaaaccacttatcacatattgacg

SEQ ID NO: 256795 - DNA, 25 bp, Probe sequence
accacttatcacatattgacgaatg

SEQ ID NO: 256796 - DNA, 25 bp, Probe sequence
acttatcacatattgacgaatggag

SEQ ID NO: 256797 - DNA, 25 bp, Probe sequence
acatattgacgaatggagacatctt

SEQ ID NO: 256798 - DNA, 25 bp, Probe sequence
aaatcctcaactttctaattatgaa

SEQ ID NO: 256799 - DNA, 25 bp, Probe sequence
aaaccacttatcacatattgacgaa

SEQ ID NO: 256800 - DNA, 25 bp, Probe sequence
aaaatcctcaactttctaattatga

SEQ ID NO: 256801 - DNA, 25 bp, Probe sequence
aagaaaccacttatcacatattgac

SEQ ID NO: 256802 - DNA, 25 bp, Probe sequence
aagacacaatttatcaaaagtacta

SEQ ID NO: 256803 - DNA, 25 bp, Probe sequence
aatggagacatcttaaaccaacccg

SEQ ID NO: 256804 - DNA, 25 bp, Probe sequence
aatcctcaactttctaattatgaat

SEQ ID NO: 256805 - DNA, 25 bp, Probe sequence
ctcaactttctaattatgaatcaga

SEQ ID NO: 256806 - DNA, 25 bp, Probe sequence
ccacttatcacatattgacgaatgg

SEQ ID NO: 256807 - DNA, 25 bp, Probe sequence
gaatattatcttcttgaaaaaaatt

SEQ ID NO: 256808 - DNA, 25 bp, Probe sequence
gaatcagaatattatcttcttgaaa

SEQ ID NO: 256809 - DNA, 25 bp, Probe sequence
gaatggagacatcttaaaccaaccc

SEQ ID NO: 256810 - DNA, 25 bp, Probe sequence
gaagaaaatcctcaactttctaatt

SEQ ID NO: 256811 - DNA, 25 bp, Probe sequence
gaagaaaccacttatcacatattga

SEQ ID NO: 256812 - DNA, 25 bp, Probe sequence
gaaaatcctcaactttctaattatg

SEQ ID NO: 256813 - DNA, 25 bp, Probe sequence
gaaaccacttatcacatattgacga

SEQ ID NO: 256814 - DNA, 25 bp, Probe sequence
gacgaatggagacatcttaaaccaa

SEQ ID NO: 256815 - DNA, 25 bp, Probe sequence
gatgtctatatgaagaaaccactta

SEQ ID NO: 256816 - DNA, 25 bp, Probe sequence
gttaatattacatttagtaacatca

SEQ ID NO: 256817 - DNA, 25 bp, Probe sequence
gtagatgtctatatgaagaaaccac

SEQ ID NO: 256818 - DNA, 25 bp, Probe sequence
gtctatatgaagaaaccacttatca

SEQ ID NO: 256819 - DNA, 25 bp, Probe sequence
tggagacatcttaaaccaacccgga

SEQ ID NO: 256820 - DNA, 25 bp, Probe sequence
tcctcaactttctaattatgaatca

SEQ ID NO: 256821 - DNA, 25 bp, Probe sequence
tacatttagtaacatcaaagttaac

SEQ ID NO: 256822 - DNA, 25 bp, Probe sequence
tatatgaagaaaccacttatcacat

SEQ ID NO: 256823 - DNA, 25 bp, Probe sequence
ttgacgaatggagacatcttaaacc

SEQ ID NO: 256824 - DNA, 25 bp, Probe sequence
attttcacttgtcatattcccattc

SEQ ID NO: 256825 - DNA, 25 bp, Probe sequence
atttctaaaatggactcttcttggc

SEQ ID NO: 256826 - DNA, 25 bp, Probe sequence
atttgtgccttacattataatagat

SEQ ID NO: 256827 - DNA, 25 bp, Probe sequence
atattcccattcttatttgtgcctt

SEQ ID NO: 256828 - DNA, 25 bp, Probe sequence
atactttctatacctttaacatcta

SEQ ID NO: 256829 - DNA, 25 bp, Probe sequence
atactcgttcatttatctaataatc

SEQ ID NO: 256830 - DNA, 25 bp, Probe sequence
atcatctatttcacatatattttta

SEQ ID NO: 256831 - DNA, 25 bp, Probe sequence
atgaaggtatgcaaatggatattta

SEQ ID NO: 256832 - DNA, 25 bp, Probe sequence
atggactcttcttggcatttttatg

SEQ ID NO: 256833 - DNA, 25 bp, Probe sequence
acctttaacatctaattcatgtagg

SEQ ID NO: 256834 - DNA, 25 bp, Probe sequence
actttctatacctttaacatctaat

SEQ ID NO: 256835 - DNA, 25 bp, Probe sequence
aaacttaatattttcacttgtcata

SEQ ID NO: 256836 - DNA, 25 bp, Probe sequence
aacatatcgataaaagtaacttcca

SEQ ID NO: 256837 - DNA, 25 bp, Probe sequence
cacttgtcatattcccattcttatt

SEQ ID NO: 256838 - DNA, 25 bp, Probe sequence
cattcttatttgtgccttacattat

SEQ ID NO: 256839 - DNA, 25 bp, Probe sequence
cttgtcatattcccattcttatttg

SEQ ID NO: 256840 - DNA, 25 bp, Probe sequence
gtttatacgctatactttctatacc

SEQ ID NO: 256841 - DNA, 25 bp, Probe sequence
gtatttttttatatcctaagccatc

SEQ ID NO: 256842 - DNA, 25 bp, Probe sequence
gtaacagcaataagtttatacgcta

SEQ ID NO: 256843 - DNA, 25 bp, Probe sequence
gtcatattcccattcttatttgtgc

SEQ ID NO: 256844 - DNA, 25 bp, Probe sequence
ggactcttcttggcatttttatgcg

SEQ ID NO: 256845 - DNA, 25 bp, Probe sequence
tcccattcttatttgtgccttacat

SEQ ID NO: 256846 - DNA, 25 bp, Probe sequence
tctatacctttaacatctaattcat

SEQ ID NO: 256847 - DNA, 25 bp, Probe sequence
tacgctatactttctatacctttaa

SEQ ID NO: 256848 - DNA, 25 bp, Probe sequence
tatcctaagccatcatatcaatata

SEQ ID NO: 256849 - DNA, 25 bp, Probe sequence
tataatagatatactcgttcattta

SEQ ID NO: 256850 - DNA, 25 bp, Probe sequence
tatacgctatactttctataccttt

SEQ ID NO: 256851 - DNA, 25 bp, Probe sequence
tattatcatctatttcacatatatt

SEQ ID NO: 256852 - DNA, 25 bp, Probe sequence
tttatatcctaagccatcatatcaa

SEQ ID NO: 256853 - DNA, 25 bp, Probe sequence
tttttaatgttctttgtaacagcaa

SEQ ID NO: 256854 - DNA, 25 bp, Probe sequence
ttcacttgtcatattcccattctta

SEQ ID NO: 256855 - DNA, 25 bp, Probe sequence
ttaagttattatcatctatttcaca

SEQ ID NO: 256856 - DNA, 25 bp, Probe sequence
ttcatgtaggaaatcaagctttaga

SEQ ID NO: 256857 - DNA, 25 bp, Probe sequence
ttcccattcttatttgtgccttaca

SEQ ID NO: 256858 - DNA, 25 bp, Probe sequence
attgcacgtaaattagaccgatccg

SEQ ID NO: 256859 - DNA, 25 bp, Probe sequence
attagaccgatccgcatctactatc

SEQ ID NO: 256860 - DNA, 25 bp, Probe sequence
atatcaatctgaaacggctcaaaag

SEQ ID NO: 256861 - DNA, 25 bp, Probe sequence
atcaatctgaaacggctcaaaagaa

SEQ ID NO: 256862 - DNA, 25 bp, Probe sequence
atccgcatctactatcttacgtgaa

SEQ ID NO: 256863 - DNA, 25 bp, Probe sequence
acgtaaattagaccgatccgcatct

SEQ ID NO: 256864 - DNA, 25 bp, Probe sequence
actatcttacgtgaaattagcagaa

SEQ ID NO: 256865 - DNA, 25 bp, Probe sequence
actttgtggtcatcctactggattt

SEQ ID NO: 256866 - DNA, 25 bp, Probe sequence
aaattagaccgatccgcatctacta

SEQ ID NO: 256867 - DNA, 25 bp, Probe sequence
aaactttgtggtcatcctactggat

SEQ ID NO: 256868 - DNA, 25 bp, Probe sequence
aaaactttgtggtcatcctactgga

SEQ ID NO: 256869 - DNA, 25 bp, Probe sequence
aactttgtggtcatcctactggatt

SEQ ID NO: 256870 - DNA, 25 bp, Probe sequence
aagttatatcaatctgaaacggctc

SEQ ID NO: 256871 - DNA, 25 bp, Probe sequence
aattagaccgatccgcatctactat

SEQ ID NO: 256872 - DNA, 25 bp, Probe sequence
catcctactggatttactccagaac

SEQ ID NO: 256873 - DNA, 25 bp, Probe sequence
cacgtaaattagaccgatccgcatc

SEQ ID NO: 256874 - DNA, 25 bp, Probe sequence
ctccagaacttagcaatatcattaa

SEQ ID NO: 256875 - DNA, 25 bp, Probe sequence
ccgcatctactatcttacgtgaaat

SEQ ID NO: 256876 - DNA, 25 bp, Probe sequence
gcatctactatcttacgtgaaatta

SEQ ID NO: 256877 - DNA, 25 bp, Probe sequence
gcacgtaaattagaccgatccgcat

SEQ ID NO: 256878 - DNA, 25 bp, Probe sequence
gaaaactttgtggtcatcctactgg

SEQ ID NO: 256879 - DNA, 25 bp, Probe sequence
gaaacggctcaaaagaattatgtaa

SEQ ID NO: 256880 - DNA, 25 bp, Probe sequence
gagcacgtatagagaaaattattct

SEQ ID NO: 256881 - DNA, 25 bp, Probe sequence
gttatatcaatctgaaacggctcaa

SEQ ID NO: 256882 - DNA, 25 bp, Probe sequence
gtaaattagaccgatccgcatctac

SEQ ID NO: 256883 - DNA, 25 bp, Probe sequence
gtcatcctactggatttactccaga

SEQ ID NO: 256884 - DNA, 25 bp, Probe sequence
gtggtcatcctactggatttactcc

SEQ ID NO: 256885 - DNA, 25 bp, Probe sequence
ggctcaaaagaattatgtaactaca

SEQ ID NO: 256886 - DNA, 25 bp, Probe sequence
tggtcatcctactggatttactcca

SEQ ID NO: 256887 - DNA, 25 bp, Probe sequence
tgtggtcatcctactggatttactc

SEQ ID NO: 256888 - DNA, 25 bp, Probe sequence
tccgcatctactatcttacgtgaaa

SEQ ID NO: 256889 - DNA, 25 bp, Probe sequence
tttgtggtcatcctactggatttac

SEQ ID NO: 256890 - DNA, 25 bp, Probe sequence
tttactccagaacttagcaatatca

SEQ ID NO: 256891 - DNA, 25 bp, Probe sequence
ttgcacgtaaattagaccgatccgc

SEQ ID NO: 256892 - DNA, 25 bp, Probe sequence
atatatttgtttttatttatctctt

SEQ ID NO: 256893 - DNA, 25 bp, Probe sequence
ataataaacctcttttgagcatggc

SEQ ID NO: 256894 - DNA, 25 bp, Probe sequence
ataaacctcttttgagcatggcgct

SEQ ID NO: 256895 - DNA, 25 bp, Probe sequence
atgcacttacctcattagtaattga

SEQ ID NO: 256896 - DNA, 25 bp, Probe sequence
atgaacttgatgcacttacctcatt

SEQ ID NO: 256897 - DNA, 25 bp, Probe sequence
atggcgcttcctccaaatataatat

SEQ ID NO: 256898 - DNA, 25 bp, Probe sequence
acttacctcattagtaattgaagaa

SEQ ID NO: 256899 - DNA, 25 bp, Probe sequence
acttgatgcacttacctcattagta

SEQ ID NO: 256900 - DNA, 25 bp, Probe sequence
aaacctcttttgagcatggcgcttc

SEQ ID NO: 256901 - DNA, 25 bp, Probe sequence
aaaataataaacctcttttgagcat

SEQ ID NO: 256902 - DNA, 25 bp, Probe sequence
aacttgatgcacttacctcattagt

SEQ ID NO: 256903 - DNA, 25 bp, Probe sequence
aatgaacttgatgcacttacctcat

SEQ ID NO: 256904 - DNA, 25 bp, Probe sequence
aataaacctcttttgagcatggcgc

SEQ ID NO: 256905 - DNA, 25 bp, Probe sequence
catggcgcttcctccaaatataata

SEQ ID NO: 256906 - DNA, 25 bp, Probe sequence
cttgatgcacttacctcattagtaa

SEQ ID NO: 256907 - DNA, 25 bp, Probe sequence
cgaatgaacttgatgcacttacctc

SEQ ID NO: 256908 - DNA, 25 bp, Probe sequence
cgcttcctccaaatataatatattt

SEQ ID NO: 256909 - DNA, 25 bp, Probe sequence
gcgcttcctccaaatataatatatt

SEQ ID NO: 256910 - DNA, 25 bp, Probe sequence
gcacttacctcattagtaattgaag

SEQ ID NO: 256911 - DNA, 25 bp, Probe sequence
gaatgaacttgatgcacttacctca

SEQ ID NO: 256912 - DNA, 25 bp, Probe sequence
gaacttgatgcacttacctcattag

SEQ ID NO: 256913 - DNA, 25 bp, Probe sequence
gatgcacttacctcattagtaattg

SEQ ID NO: 256914 - DNA, 25 bp, Probe sequence
gtcgaatgaacttgatgcacttacc

SEQ ID NO: 256915 - DNA, 25 bp, Probe sequence
ggcgcttcctccaaatataatatat

SEQ ID NO: 256916 - DNA, 25 bp, Probe sequence
tggcgcttcctccaaatataatata

SEQ ID NO: 256917 - DNA, 25 bp, Probe sequence
tgtcgaatgaacttgatgcacttac

SEQ ID NO: 256918 - DNA, 25 bp, Probe sequence
tgatgcacttacctcattagtaatt

SEQ ID NO: 256919 - DNA, 25 bp, Probe sequence
tgaacttgatgcacttacctcatta

SEQ ID NO: 256920 - DNA, 25 bp, Probe sequence
tgcacttacctcattagtaattgaa

SEQ ID NO: 256921 - DNA, 25 bp, Probe sequence
tcgaatgaacttgatgcacttacct

SEQ ID NO: 256922 - DNA, 25 bp, Probe sequence
taaacctcttttgagcatggcgctt

SEQ ID NO: 256923 - DNA, 25 bp, Probe sequence
tatatttgtttttatttatctcttt

SEQ ID NO: 256924 - DNA, 25 bp, Probe sequence
ttgatgcacttacctcattagtaat

SEQ ID NO: 256925 - DNA, 25 bp, Probe sequence
ttgtcgaatgaacttgatgcactta

SEQ ID NO: 256926 - DNA, 25 bp, Probe sequence
atttcacactgttacatgtatttgt

SEQ ID NO: 256927 - DNA, 25 bp, Probe sequence
atgccgttgtgacgttattatttca

SEQ ID NO: 256928 - DNA, 25 bp, Probe sequence
atgatgtggcgttgcggtgttatgg

SEQ ID NO: 256929 - DNA, 25 bp, Probe sequence
atgtggcgttgcggtgttatgggtg

SEQ ID NO: 256930 - DNA, 25 bp, Probe sequence
actgatgaatcattgtgtcaagatg

SEQ ID NO: 256931 - DNA, 25 bp, Probe sequence
aaatctcgttaatattatttcaaat

SEQ ID NO: 256932 - DNA, 25 bp, Probe sequence
aatgtgtattatgccgttgtgacgt

SEQ ID NO: 256933 - DNA, 25 bp, Probe sequence
aattctatgatatgtcgttgggacg

SEQ ID NO: 256934 - DNA, 25 bp, Probe sequence
aattgctgtggaaatgttgcgacat

SEQ ID NO: 256935 - DNA, 25 bp, Probe sequence
catgtatttgtgaattgctgtggaa

SEQ ID NO: 256936 - DNA, 25 bp, Probe sequence
ctctgttattaaccactttttacat

SEQ ID NO: 256937 - DNA, 25 bp, Probe sequence
cccgtggtattgatgccatgccgtt

SEQ ID NO: 256938 - DNA, 25 bp, Probe sequence
ccactttttacatggtgaaatctcg

SEQ ID NO: 256939 - DNA, 25 bp, Probe sequence
gccatgccgttacaattctatgata

SEQ ID NO: 256940 - DNA, 25 bp, Probe sequence
gcggtgttatgggtggcatagcccg

SEQ ID NO: 256941 - DNA, 25 bp, Probe sequence
gcgacatatactgctacactgatga

SEQ ID NO: 256942 - DNA, 25 bp, Probe sequence
gcaactctgttattaaccacttttt

SEQ ID NO: 256943 - DNA, 25 bp, Probe sequence
gcaatgaagaatagcaactctgtta

SEQ ID NO: 256944 - DNA, 25 bp, Probe sequence
gaatagcaactctgttattaaccac

SEQ ID NO: 256945 - DNA, 25 bp, Probe sequence
gacgttattatttcacactgttaca

SEQ ID NO: 256946 - DNA, 25 bp, Probe sequence
gacgttgcaatgtgtattatgccgt

SEQ ID NO: 256947 - DNA, 25 bp, Probe sequence
gatatgtcgttgggacgttgcaatg

SEQ ID NO: 256948 - DNA, 25 bp, Probe sequence
gttgcgacatatactgctacactga

SEQ ID NO: 256949 - DNA, 25 bp, Probe sequence
gtattatgccgttgtgacgttatta

SEQ ID NO: 256950 - DNA, 25 bp, Probe sequence
gtcgttgggacgttgcaatgtgtat

SEQ ID NO: 256951 - DNA, 25 bp, Probe sequence
gtgtcaagatgacattgcaatgaag

SEQ ID NO: 256952 - DNA, 25 bp, Probe sequence
gtggtattgatgccatgccgttaca

SEQ ID NO: 256953 - DNA, 25 bp, Probe sequence
gggtggcatagcccgtggtattgat

SEQ ID NO: 256954 - DNA, 25 bp, Probe sequence
ggcgttgcggtgttatgggtggcat

SEQ ID NO: 256955 - DNA, 25 bp, Probe sequence
tgatgccatgccgttacaattctat

SEQ ID NO: 256956 - DNA, 25 bp, Probe sequence
tacatggtgaaatctcgttaatatt

SEQ ID NO: 256957 - DNA, 25 bp, Probe sequence
tagcccgtggtattgatgccatgcc

SEQ ID NO: 256958 - DNA, 25 bp, Probe sequence
tatactgctacactgatgaatcatt

SEQ ID NO: 256959 - DNA, 25 bp, Probe sequence
ttatgggtggcatagcccgtggtat

SEQ ID NO: 256960 - DNA, 25 bp, Probe sequence
cagctggttgtgctgtacctgctgc

SEQ ID NO: 256961 - DNA, 25 bp, Probe sequence
ctgctggttgtccttggttggcagg

SEQ ID NO: 256962 - DNA, 25 bp, Probe sequence
ctgcagacgctgttgtcgggttaat

SEQ ID NO: 256963 - DNA, 25 bp, Probe sequence
ctgcttggttggcaggtgctgcttg

SEQ ID NO: 256964 - DNA, 25 bp, Probe sequence
ctgtgtttgatttgccggtgttgta

SEQ ID NO: 256965 - DNA, 25 bp, Probe sequence
ctggctgtgctgtaggattagcttg

SEQ ID NO: 256966 - DNA, 25 bp, Probe sequence
gcgttaggctgtgcattggcatcag

SEQ ID NO: 256967 - DNA, 25 bp, Probe sequence
gctgattttactctgctgcagacgc

SEQ ID NO: 256968 - DNA, 25 bp, Probe sequence
gcattcgctggctgtgtttgatttg

SEQ ID NO: 256969 - DNA, 25 bp, Probe sequence
gacgctgttgtcgggttaatagata

SEQ ID NO: 256970 - DNA, 25 bp, Probe sequence
gatttgccggtgttgtattattatt

SEQ ID NO: 256971 - DNA, 25 bp, Probe sequence
gattagcttgagcaccagcatttgc

SEQ ID NO: 256972 - DNA, 25 bp, Probe sequence
gttgtccttggttggcaggtgcagc

SEQ ID NO: 256973 - DNA, 25 bp, Probe sequence
gtgctgcttgatttccaggttgtgc

SEQ ID NO: 256974 - DNA, 25 bp, Probe sequence
gtgcaggctgattttactctgctgc

SEQ ID NO: 256975 - DNA, 25 bp, Probe sequence
gtgcagcgttattcggatcagcttg

SEQ ID NO: 256976 - DNA, 25 bp, Probe sequence
gtgctggttgattttgtgcaggctg

SEQ ID NO: 256977 - DNA, 25 bp, Probe sequence
ggtgcagctggctgtgctgtaggat

SEQ ID NO: 256978 - DNA, 25 bp, Probe sequence
ggtgttgcttggttatttccttgac

SEQ ID NO: 256979 - DNA, 25 bp, Probe sequence
ggttgtgcttgtgcagcgttattcg

SEQ ID NO: 256980 - DNA, 25 bp, Probe sequence
ggatcagcttgattaccttgtccag

SEQ ID NO: 256981 - DNA, 25 bp, Probe sequence
ggcatcagctggttgtgctggttga

SEQ ID NO: 256982 - DNA, 25 bp, Probe sequence
tggcaggtgctgcttgatttccagg

SEQ ID NO: 256983 - DNA, 25 bp, Probe sequence
tggagcattcgctggctgtgtttga

SEQ ID NO: 256984 - DNA, 25 bp, Probe sequence
tgtgcattggcatcagctggttgtg

SEQ ID NO: 256985 - DNA, 25 bp, Probe sequence
tgattaccttgtccagctggttgtg

SEQ ID NO: 256986 - DNA, 25 bp, Probe sequence
tgatttccaggttgtgcttgtgcag

SEQ ID NO: 256987 - DNA, 25 bp, Probe sequence
tgagcaccagcatttgcgttaggct

SEQ ID NO: 256988 - DNA, 25 bp, Probe sequence
tgcttggttatttccttgacctgct

SEQ ID NO: 256989 - DNA, 25 bp, Probe sequence
tttgtgcgtttgctgctacaggtgc

SEQ ID NO: 256990 - DNA, 25 bp, Probe sequence
tccaccttggtttgctggttgtgct

SEQ ID NO: 256991 - DNA, 25 bp, Probe sequence
ttatttccttgacctgcttggttgg

SEQ ID NO: 256992 - DNA, 25 bp, Probe sequence
ttgagtttgtgcgtttgctgctaca

SEQ ID NO: 256993 - DNA, 25 bp, Probe sequence
ttggcaggtgcagctggctgtgctg

SEQ ID NO: 256994 - DNA, 25 bp, Probe sequence
attgcatatacgactattaaatacg

SEQ ID NO: 256995 - DNA, 25 bp, Probe sequence
attcctgtagtatttatcggcatca

SEQ ID NO: 256996 - DNA, 25 bp, Probe sequence
attaattcctgtagtatttatcggc

SEQ ID NO: 256997 - DNA, 25 bp, Probe sequence
atttatcggcatcatgagtaaagaa

SEQ ID NO: 256998 - DNA, 25 bp, Probe sequence
atgtgagatttcttcatttttcaaa

SEQ ID NO: 256999 - DNA, 25 bp, Probe sequence
acattctaattgcatatacgactat

SEQ ID NO: 257000 - DNA, 25 bp, Probe sequence
aacattctaattgcatatacgacta

SEQ ID NO: 257001 - DNA, 25 bp, Probe sequence
aagaattaattcctgtagtatttat

SEQ ID NO: 257002 - DNA, 25 bp, Probe sequence
aattcctgtagtatttatcggcatc

SEQ ID NO: 257003 - DNA, 25 bp, Probe sequence
catgtgagatttcttcatttttcaa

SEQ ID NO: 257004 - DNA, 25 bp, Probe sequence
cattctaattgcatatacgactatt

SEQ ID NO: 257005 - DNA, 25 bp, Probe sequence
ctgtagtatttatcggcatcatgag

SEQ ID NO: 257006 - DNA, 25 bp, Probe sequence
cctgtagtatttatcggcatcatga

SEQ ID NO: 257007 - DNA, 25 bp, Probe sequence
ccatgtgagatttcttcatttttca

SEQ ID NO: 257008 - DNA, 25 bp, Probe sequence
gccatgtgagatttcttcatttttc

SEQ ID NO: 257009 - DNA, 25 bp, Probe sequence
gaattaattcctgtagtatttatcg

SEQ ID NO: 257010 - DNA, 25 bp, Probe sequence
gaaaacattctaattgcatatacga

SEQ ID NO: 257011 - DNA, 25 bp, Probe sequence
gaaactgaaaacattctaattgcat

SEQ ID NO: 257012 - DNA, 25 bp, Probe sequence
gagatttcttcatttttcaaagaat

SEQ ID NO: 257013 - DNA, 25 bp, Probe sequence
gatttcttcatttttcaaagaatta

SEQ ID NO: 257014 - DNA, 25 bp, Probe sequence
gtatttatcggcatcatgagtaaag

SEQ ID NO: 257015 - DNA, 25 bp, Probe sequence
gtagtatttatcggcatcatgagta

SEQ ID NO: 257016 - DNA, 25 bp, Probe sequence
gtgccatgtgagatttcttcatttt

SEQ ID NO: 257017 - DNA, 25 bp, Probe sequence
gtgagatttcttcatttttcaaaga

SEQ ID NO: 257018 - DNA, 25 bp, Probe sequence
tgtgagatttcttcatttttcaaag

SEQ ID NO: 257019 - DNA, 25 bp, Probe sequence
tgtagtatttatcggcatcatgagt

SEQ ID NO: 257020 - DNA, 25 bp, Probe sequence
tgccatgtgagatttcttcattttt

SEQ ID NO: 257021 - DNA, 25 bp, Probe sequence
tcctgtagtatttatcggcatcatg

SEQ ID NO: 257022 - DNA, 25 bp, Probe sequence
tcggcatcatgagtaaagaaactga

SEQ ID NO: 257023 - DNA, 25 bp, Probe sequence
taattcctgtagtatttatcggcat

SEQ ID NO: 257024 - DNA, 25 bp, Probe sequence
tagtatttatcggcatcatgagtaa

SEQ ID NO: 257025 - DNA, 25 bp, Probe sequence
ttaattcctgtagtatttatcggca

SEQ ID NO: 257026 - DNA, 25 bp, Probe sequence
ttctaattgcatatacgactattaa

SEQ ID NO: 257027 - DNA, 25 bp, Probe sequence
ttcctgtagtatttatcggcatcat

SEQ ID NO: 257028 - DNA, 25 bp, Probe sequence
atttgagaatgaggtctttagtcaa

SEQ ID NO: 257029 - DNA, 25 bp, Probe sequence
atatttgagaatgaggtctttagtc

SEQ ID NO: 257030 - DNA, 25 bp, Probe sequence
atgacggtttgaaaatgctgttttt

SEQ ID NO: 257031 - DNA, 25 bp, Probe sequence
atgaggtctttagtcaatgacggtt

SEQ ID NO: 257032 - DNA, 25 bp, Probe sequence
aggtctttagtcaatgacggtttga

SEQ ID NO: 257033 - DNA, 25 bp, Probe sequence
agtcaatgacggtttgaaattgtcg

SEQ ID NO: 257034 - DNA, 25 bp, Probe sequence
agaatgaggtctttagtcaatgacg

SEQ ID NO: 257035 - DNA, 25 bp, Probe sequence
agcatatttgagaatgaggtcttta

SEQ ID NO: 257036 - DNA, 25 bp, Probe sequence
aatgaggtctttagtcaatgacggt

SEQ ID NO: 257037 - DNA, 25 bp, Probe sequence
caatgacggtttgaaattgtcgttt

SEQ ID NO: 257038 - DNA, 25 bp, Probe sequence
cggtttgaaaatgctgtttttggcg

SEQ ID NO: 257039 - DNA, 25 bp, Probe sequence
gcatatttgagaatgaggtctttag

SEQ ID NO: 257040 - DNA, 25 bp, Probe sequence
gaatgaggtctttagtcaatgacgg

SEQ ID NO: 257041 - DNA, 25 bp, Probe sequence
gacggtttgaaaatgctgtttttgg

SEQ ID NO: 257042 - DNA, 25 bp, Probe sequence
gagaatgaggtctttagtcaatgac

SEQ ID NO: 257043 - DNA, 25 bp, Probe sequence
gaggtctttagtcaatgacggtttg

SEQ ID NO: 257044 - DNA, 25 bp, Probe sequence
gttagcatatttgagaatgaggtct

SEQ ID NO: 257045 - DNA, 25 bp, Probe sequence
gtctttagtcaatgacggtttgaaa

SEQ ID NO: 257046 - DNA, 25 bp, Probe sequence
gtcaatgacggtttgaaattgtcgt

SEQ ID NO: 257047 - DNA, 25 bp, Probe sequence
ggtctttagtcaatgacggtttgaa

SEQ ID NO: 257048 - DNA, 25 bp, Probe sequence
tgaggtctttagtcaatgacggttt

SEQ ID NO: 257049 - DNA, 25 bp, Probe sequence
tgagaatgaggtctttagtcaatga

SEQ ID NO: 257050 - DNA, 25 bp, Probe sequence
tgacggtttgaaaatgctgtttttg

SEQ ID NO: 257051 - DNA, 25 bp, Probe sequence
tctttagtcaatgacggtttgaaat

SEQ ID NO: 257052 - DNA, 25 bp, Probe sequence
tcaatgacggtttgaaattgtcgtt

SEQ ID NO: 257053 - DNA, 25 bp, Probe sequence
tagcatatttgagaatgaggtcttt

SEQ ID NO: 257054 - DNA, 25 bp, Probe sequence
tagtcaatgacggtttgaaattgtc

SEQ ID NO: 257055 - DNA, 25 bp, Probe sequence
tatgacggtttgaaaatgctgtttt

SEQ ID NO: 257056 - DNA, 25 bp, Probe sequence
tatttgagaatgaggtctttagtca

SEQ ID NO: 257057 - DNA, 25 bp, Probe sequence
tttgagaatgaggtctttagtcaat

SEQ ID NO: 257058 - DNA, 25 bp, Probe sequence
tttagtcaatgacggtttgaaattg

SEQ ID NO: 257059 - DNA, 25 bp, Probe sequence
tttatgacggtttgaaaatgctgtt

SEQ ID NO: 257060 - DNA, 25 bp, Probe sequence
ttatgacggtttgaaaatgctgttt

SEQ ID NO: 257061 - DNA, 25 bp, Probe sequence
ttgagaatgaggtctttagtcaatg

SEQ ID NO: 257062 - DNA, 25 bp, Probe sequence
attgtctattataatttgatttcga

SEQ ID NO: 257063 - DNA, 25 bp, Probe sequence
agtccacctcctaaaattgtctatt

SEQ ID NO: 257064 - DNA, 25 bp, Probe sequence
acaccagatggtaagtttaagccca

SEQ ID NO: 257065 - DNA, 25 bp, Probe sequence
catcgaaagtccacctcctaaaatt

SEQ ID NO: 257066 - DNA, 25 bp, Probe sequence
aatttgatttcgatgtctacaccag

SEQ ID NO: 257067 - DNA, 25 bp, Probe sequence
caccagaacgtttcgctgtttctac

SEQ ID NO: 257068 - DNA, 25 bp, Probe sequence
catctgcaccagaacgtttcgctgt

SEQ ID NO: 257069 - DNA, 25 bp, Probe sequence
ctgcaccagaacgtttcgctgtttc

SEQ ID NO: 257070 - DNA, 25 bp, Probe sequence
cgtttcgctgtttctacaatcttct

SEQ ID NO: 257071 - DNA, 25 bp, Probe sequence
ccgatttctcagttggtaacggaat

SEQ ID NO: 257072 - DNA, 25 bp, Probe sequence
ccacctcctaaaattgtctattata

SEQ ID NO: 257073 - DNA, 25 bp, Probe sequence
gcccattaaagcgtcaactgttttt

SEQ ID NO: 257074 - DNA, 25 bp, Probe sequence
gcgtcaactgtttttggtgttgggt

SEQ ID NO: 257075 - DNA, 25 bp, Probe sequence
gaattggtccagaaacatctgcacc

SEQ ID NO: 257076 - DNA, 25 bp, Probe sequence
gaatctttatacttatgcacggcac

SEQ ID NO: 257077 - DNA, 25 bp, Probe sequence
gaacgtttcgctgtttctacaatct

SEQ ID NO: 257078 - DNA, 25 bp, Probe sequence
gaaagtccacctcctaaaattgtct

SEQ ID NO: 257079 - DNA, 25 bp, Probe sequence
gatttcgatgtctacaccagatggt

SEQ ID NO: 257080 - DNA, 25 bp, Probe sequence
gttgttcgaattgttcacgtgaatc

SEQ ID NO: 257081 - DNA, 25 bp, Probe sequence
gattgtgtataccgatttctcagtt

SEQ ID NO: 257082 - DNA, 25 bp, Probe sequence
gtttatgtgtacgttgttcgaattg

SEQ ID NO: 257083 - DNA, 25 bp, Probe sequence
gtataccgatttctcagttggtaac

SEQ ID NO: 257084 - DNA, 25 bp, Probe sequence
gtgtacgttgttcgaattgttcacg

SEQ ID NO: 257085 - DNA, 25 bp, Probe sequence
ggtccagaaacatctgcaccagaac

SEQ ID NO: 257086 - DNA, 25 bp, Probe sequence
ggatgattgtgtataccgatttctc

SEQ ID NO: 257087 - DNA, 25 bp, Probe sequence
tctcagttggtaacggaattggtcc

SEQ ID NO: 257088 - DNA, 25 bp, Probe sequence
tgtttctacaatcttctctgctgat

SEQ ID NO: 257089 - DNA, 25 bp, Probe sequence
tgttcacgtgaatctttatacttat

SEQ ID NO: 257090 - DNA, 25 bp, Probe sequence
taaagcgtcaactgtttttggtgtt

SEQ ID NO: 257091 - DNA, 25 bp, Probe sequence
tacaatatcgattaaacgtttatgt

SEQ ID NO: 257092 - DNA, 25 bp, Probe sequence
tatgcacggcacggatgattgtgta

SEQ ID NO: 257093 - DNA, 25 bp, Probe sequence
tatacttatgcacggcacggatgat

SEQ ID NO: 257094 - DNA, 25 bp, Probe sequence
ttggtgttgggtttacaatatcgat

SEQ ID NO: 257095 - DNA, 25 bp, Probe sequence
ttaagcccattaaagcgtcaactgt

SEQ ID NO: 257096 - DNA, 25 bp, Probe sequence
attttatcgtacaactgatttttat

SEQ ID NO: 257097 - DNA, 25 bp, Probe sequence
atacttgtctcaggattttttaaca

SEQ ID NO: 257098 - DNA, 25 bp, Probe sequence
ataagagcaaagtatcgcatcatag

SEQ ID NO: 257099 - DNA, 25 bp, Probe sequence
agtatcgcatcatagtagatacaca

SEQ ID NO: 257100 - DNA, 25 bp, Probe sequence
agagcaaagtatcgcatcatagtag

SEQ ID NO: 257101 - DNA, 25 bp, Probe sequence
agcaaagtatcgcatcatagtagat

SEQ ID NO: 257102 - DNA, 25 bp, Probe sequence
acttcatacttgtctcaggattttt

SEQ ID NO: 257103 - DNA, 25 bp, Probe sequence
acttgtctcaggattttttaacata

SEQ ID NO: 257104 - DNA, 25 bp, Probe sequence
acacttcatacttgtctcaggattt

SEQ ID NO: 257105 - DNA, 25 bp, Probe sequence
aagagcaaagtatcgcatcatagta

SEQ ID NO: 257106 - DNA, 25 bp, Probe sequence
cacttcatacttgtctcaggatttt

SEQ ID NO: 257107 - DNA, 25 bp, Probe sequence
catacttgtctcaggattttttaac

SEQ ID NO: 257108 - DNA, 25 bp, Probe sequence
cttgtctcaggattttttaacatat

SEQ ID NO: 257109 - DNA, 25 bp, Probe sequence
cttcatacttgtctcaggatttttt

SEQ ID NO: 257110 - DNA, 25 bp, Probe sequence
ctcaggattttttaacatattgaat

SEQ ID NO: 257111 - DNA, 25 bp, Probe sequence
ctgggacacttcatacttgtctcag

SEQ ID NO: 257112 - DNA, 25 bp, Probe sequence
gcaaagtatcgcatcatagtagata

SEQ ID NO: 257113 - DNA, 25 bp, Probe sequence
gacacttcatacttgtctcaggatt

SEQ ID NO: 257114 - DNA, 25 bp, Probe sequence
gagcaaagtatcgcatcatagtaga

SEQ ID NO: 257115 - DNA, 25 bp, Probe sequence
gtctcaggattttttaacatattga

SEQ ID NO: 257116 - DNA, 25 bp, Probe sequence
gggacacttcatacttgtctcagga

SEQ ID NO: 257117 - DNA, 25 bp, Probe sequence
ggacacttcatacttgtctcaggat

SEQ ID NO: 257118 - DNA, 25 bp, Probe sequence
tgggacacttcatacttgtctcagg

SEQ ID NO: 257119 - DNA, 25 bp, Probe sequence
tcatacttgtctcaggattttttaa

SEQ ID NO: 257120 - DNA, 25 bp, Probe sequence
taagagcaaagtatcgcatcatagt

SEQ ID NO: 257121 - DNA, 25 bp, Probe sequence
tacttgtctcaggattttttaacat

SEQ ID NO: 257122 - DNA, 25 bp, Probe sequence
tataagagcaaagtatcgcatcata

SEQ ID NO: 257123 - DNA, 25 bp, Probe sequence
tattttatcgtacaactgattttta

SEQ ID NO: 257124 - DNA, 25 bp, Probe sequence
ttttttaacatattgaatcagcctc

SEQ ID NO: 257125 - DNA, 25 bp, Probe sequence
ttttaacatattgaatcagcctcat

SEQ ID NO: 257126 - DNA, 25 bp, Probe sequence
ttataagagcaaagtatcgcatcat

SEQ ID NO: 257127 - DNA, 25 bp, Probe sequence
ttattttatcgtacaactgattttt

SEQ ID NO: 257128 - DNA, 25 bp, Probe sequence
ttcatacttgtctcaggatttttta

SEQ ID NO: 257129 - DNA, 25 bp, Probe sequence
ttgtctcaggattttttaacatatt

SEQ ID NO: 257130 - DNA, 25 bp, Probe sequence
attacgccttcatatcaagtacatt

SEQ ID NO: 257131 - DNA, 25 bp, Probe sequence
atatcaagtacatttctattcaatc

SEQ ID NO: 257132 - DNA, 25 bp, Probe sequence
atcaagtacatttctattcaatcac

SEQ ID NO: 257133 - DNA, 25 bp, Probe sequence
agtacatttctattcaatcaccctt

SEQ ID NO: 257134 - DNA, 25 bp, Probe sequence
acgccttcatatcaagtacatttct

SEQ ID NO: 257135 - DNA, 25 bp, Probe sequence
actaaaattacgccttcatatcaag

SEQ ID NO: 257136 - DNA, 25 bp, Probe sequence
aaattacgccttcatatcaagtaca

SEQ ID NO: 257137 - DNA, 25 bp, Probe sequence
aaaattacgccttcatatcaagtac

SEQ ID NO: 257138 - DNA, 25 bp, Probe sequence
aactaaaattacgccttcatatcaa

SEQ ID NO: 257139 - DNA, 25 bp, Probe sequence
aagtacatttctattcaatcaccct

SEQ ID NO: 257140 - DNA, 25 bp, Probe sequence
aattacgccttcatatcaagtacat

SEQ ID NO: 257141 - DNA, 25 bp, Probe sequence
caagtacatttctattcaatcaccc

SEQ ID NO: 257142 - DNA, 25 bp, Probe sequence
caactaaaattacgccttcatatca

SEQ ID NO: 257143 - DNA, 25 bp, Probe sequence
cagggttcttctttatgaattatga

SEQ ID NO: 257144 - DNA, 25 bp, Probe sequence
ctaaaattacgccttcatatcaagt

SEQ ID NO: 257145 - DNA, 25 bp, Probe sequence
cgccttcatatcaagtacatttcta

SEQ ID NO: 257146 - DNA, 25 bp, Probe sequence
ccttcatatcaagtacatttctatt

SEQ ID NO: 257147 - DNA, 25 bp, Probe sequence
gccttcatatcaagtacatttctat

SEQ ID NO: 257148 - DNA, 25 bp, Probe sequence
gaattatgagattgaatcttcaact

SEQ ID NO: 257149 - DNA, 25 bp, Probe sequence
gtcagggttcttctttatgaattat

SEQ ID NO: 257150 - DNA, 25 bp, Probe sequence
gggttcttctttatgaattatgaga

SEQ ID NO: 257151 - DNA, 25 bp, Probe sequence
ggttcttctttatgaattatgagat

SEQ ID NO: 257152 - DNA, 25 bp, Probe sequence
tgtcagggttcttctttatgaatta

SEQ ID NO: 257153 - DNA, 25 bp, Probe sequence
tcatatcaagtacatttctattcaa

SEQ ID NO: 257154 - DNA, 25 bp, Probe sequence
tcagggttcttctttatgaattatg

SEQ ID NO: 257155 - DNA, 25 bp, Probe sequence
tcaactaaaattacgccttcatatc

SEQ ID NO: 257156 - DNA, 25 bp, Probe sequence
tcaagtacatttctattcaatcacc

SEQ ID NO: 257157 - DNA, 25 bp, Probe sequence
taaaattacgccttcatatcaagta

SEQ ID NO: 257158 - DNA, 25 bp, Probe sequence
tacgccttcatatcaagtacatttc

SEQ ID NO: 257159 - DNA, 25 bp, Probe sequence
ttatgagattgaatcttcaactaaa

SEQ ID NO: 257160 - DNA, 25 bp, Probe sequence
ttacgccttcatatcaagtacattt

SEQ ID NO: 257161 - DNA, 25 bp, Probe sequence
ttcaactaaaattacgccttcatat

SEQ ID NO: 257162 - DNA, 25 bp, Probe sequence
ttcatatcaagtacatttctattca

SEQ ID NO: 257163 - DNA, 25 bp, Probe sequence
ttgtcagggttcttctttatgaatt

SEQ ID NO: 257164 - DNA, 25 bp, Probe sequence
atttcgtttatatatcgtggacatg

SEQ ID NO: 257165 - DNA, 25 bp, Probe sequence
atatatcgtggacatgatacagtta

SEQ ID NO: 257166 - DNA, 25 bp, Probe sequence
atatcgtggacatgatacagttata

SEQ ID NO: 257167 - DNA, 25 bp, Probe sequence
atcttgtaggtaatcatactaaaat

SEQ ID NO: 257168 - DNA, 25 bp, Probe sequence
atcatactaaaattcaatatagaca

SEQ ID NO: 257169 - DNA, 25 bp, Probe sequence
atcgtggacatgatacagttatata

SEQ ID NO: 257170 - DNA, 25 bp, Probe sequence
atgatacagttatatataatcttgt

SEQ ID NO: 257171 - DNA, 25 bp, Probe sequence
aggtaatcatactaaaattcaatat

SEQ ID NO: 257172 - DNA, 25 bp, Probe sequence
agttatatataatcttgtaggtaat

SEQ ID NO: 257173 - DNA, 25 bp, Probe sequence
acagttatatataatcttgtaggta

SEQ ID NO: 257174 - DNA, 25 bp, Probe sequence
cttgtaggtaatcatactaaaattc

SEQ ID NO: 257175 - DNA, 25 bp, Probe sequence
cagttatatataatcttgtaggtaa

SEQ ID NO: 257176 - DNA, 25 bp, Probe sequence
cgtggacatgatacagttatatata

SEQ ID NO: 257177 - DNA, 25 bp, Probe sequence
cgtttatatatcgtggacatgatac

SEQ ID NO: 257178 - DNA, 25 bp, Probe sequence
gacatgatacagttatatataatct

SEQ ID NO: 257179 - DNA, 25 bp, Probe sequence
gatacagttatatataatcttgtag

SEQ ID NO: 257180 - DNA, 25 bp, Probe sequence
gtttatatatcgtggacatgataca

SEQ ID NO: 257181 - DNA, 25 bp, Probe sequence
gtaggtaatcatactaaaattcaat

SEQ ID NO: 257182 - DNA, 25 bp, Probe sequence
gtaatcatactaaaattcaatatag

SEQ ID NO: 257183 - DNA, 25 bp, Probe sequence
gtggacatgatacagttatatataa

SEQ ID NO: 257184 - DNA, 25 bp, Probe sequence
ggtaatcatactaaaattcaatata

SEQ ID NO: 257185 - DNA, 25 bp, Probe sequence
ggacatgatacagttatatataatc

SEQ ID NO: 257186 - DNA, 25 bp, Probe sequence
tggacatgatacagttatatataat

SEQ ID NO: 257187 - DNA, 25 bp, Probe sequence
tcgtggacatgatacagttatatat

SEQ ID NO: 257188 - DNA, 25 bp, Probe sequence
tcttgtaggtaatcatactaaaatt

SEQ ID NO: 257189 - DNA, 25 bp, Probe sequence
tactaaaattcaatatagacatgac

SEQ ID NO: 257190 - DNA, 25 bp, Probe sequence
taggtaatcatactaaaattcaata

SEQ ID NO: 257191 - DNA, 25 bp, Probe sequence
tatcgtggacatgatacagttatat

SEQ ID NO: 257192 - DNA, 25 bp, Probe sequence
tatatatcgtggacatgatacagtt

SEQ ID NO: 257193 - DNA, 25 bp, Probe sequence
tatatcgtggacatgatacagttat

SEQ ID NO: 257194 - DNA, 25 bp, Probe sequence
tttcgtttatatatcgtggacatga

SEQ ID NO: 257195 - DNA, 25 bp, Probe sequence
tttatatatcgtggacatgatacag

SEQ ID NO: 257196 - DNA, 25 bp, Probe sequence
ttatatatcgtggacatgatacagt

SEQ ID NO: 257197 - DNA, 25 bp, Probe sequence
ttgtaggtaatcatactaaaattca

SEQ ID NO: 257198 - DNA, 25 bp, Probe sequence
accttcaacgaataaccaaaatcat

SEQ ID NO: 257199 - DNA, 25 bp, Probe sequence
atcagggcggtagcagtcaaccttc

SEQ ID NO: 257200 - DNA, 25 bp, Probe sequence
ataaagctacccatcaaaagaaaga

SEQ ID NO: 257201 - DNA, 25 bp, Probe sequence
atcaatcatctacgccatcaactgt

SEQ ID NO: 257202 - DNA, 25 bp, Probe sequence
atcatcttgttaattggtgcacttg

SEQ ID NO: 257203 - DNA, 25 bp, Probe sequence
aaatttcttattactgttgttatca

SEQ ID NO: 257204 - DNA, 25 bp, Probe sequence
aacagcaccagcgaatacacaacca

SEQ ID NO: 257205 - DNA, 25 bp, Probe sequence
aacggtgttactaatggcaatcaat

SEQ ID NO: 257206 - DNA, 25 bp, Probe sequence
aaccatctaatccgaatcaatcaaa

SEQ ID NO: 257207 - DNA, 25 bp, Probe sequence
aagacgagaatacaaacaacacaaa

SEQ ID NO: 257208 - DNA, 25 bp, Probe sequence
aatgctaatacaaacgagtcttcta

SEQ ID NO: 257209 - DNA, 25 bp, Probe sequence
aataacggttcaacagcaccagcga

SEQ ID NO: 257210 - DNA, 25 bp, Probe sequence
aattggtgcacttggattcgctatt

SEQ ID NO: 257211 - DNA, 25 bp, Probe sequence
caaattcaaatcagggcggtagcag

SEQ ID NO: 257212 - DNA, 25 bp, Probe sequence
caaaacagcaacaacggtgttacta

SEQ ID NO: 257213 - DNA, 25 bp, Probe sequence
cataaacaacagaatacaccggccc

SEQ ID NO: 257214 - DNA, 25 bp, Probe sequence
ccatcacaaccgcaatcatctaaaa

SEQ ID NO: 257215 - DNA, 25 bp, Probe sequence
gccatcaactgtccaaaataacggt

SEQ ID NO: 257216 - DNA, 25 bp, Probe sequence
gcgaatacacaaccatctaatccga

SEQ ID NO: 257217 - DNA, 25 bp, Probe sequence
gcggtagcagtcaaccttcaacgaa

SEQ ID NO: 257218 - DNA, 25 bp, Probe sequence
gcagtcaaccttcaacgaataacca

SEQ ID NO: 257219 - DNA, 25 bp, Probe sequence
gagcaagataataaagctacccatc

SEQ ID NO: 257220 - DNA, 25 bp, Probe sequence
gagtcttctaagcaggcatcaccat

SEQ ID NO: 257221 - DNA, 25 bp, Probe sequence
ggtgcacttggattcgctatttatg

SEQ ID NO: 257222 - DNA, 25 bp, Probe sequence
ggttcaacagcaccagcgaatacac

SEQ ID NO: 257223 - DNA, 25 bp, Probe sequence
ggcaatcaatcatctacgccatcaa

SEQ ID NO: 257224 - DNA, 25 bp, Probe sequence
ggccccaaacaaatctaataatgct

SEQ ID NO: 257225 - DNA, 25 bp, Probe sequence
tctaagcaggcatcaccatcacaac

SEQ ID NO: 257226 - DNA, 25 bp, Probe sequence
tctacgccatcaactgtccaaaata

SEQ ID NO: 257227 - DNA, 25 bp, Probe sequence
tacaccggccccaaacaaatctaat

SEQ ID NO: 257228 - DNA, 25 bp, Probe sequence
tacacaaccatctaatccgaatcaa

SEQ ID NO: 257229 - DNA, 25 bp, Probe sequence
tattactgttgttatcatcttgtta

SEQ ID NO: 257230 - DNA, 25 bp, Probe sequence
ttctacatcatcaaatcataataat

SEQ ID NO: 257231 - DNA, 25 bp, Probe sequence
ttggattcgctatttatgctgcaat

SEQ ID NO: 257232 - DNA, 25 bp, Probe sequence
attcagatgtgcttgttgatgttga

SEQ ID NO: 257233 - DNA, 25 bp, Probe sequence
atgtgcttgttgatgttgaaccact

SEQ ID NO: 257234 - DNA, 25 bp, Probe sequence
agcgattcagatgtgcttgttgatg

SEQ ID NO: 257235 - DNA, 25 bp, Probe sequence
accagacatacttagcgattcagat

SEQ ID NO: 257236 - DNA, 25 bp, Probe sequence
acttagcgattcagatgtgcttgtt

SEQ ID NO: 257237 - DNA, 25 bp, Probe sequence
aaccagacatacttagcgattcaga

SEQ ID NO: 257238 - DNA, 25 bp, Probe sequence
aatctgaaccagacatacttagcga

SEQ ID NO: 257239 - DNA, 25 bp, Probe sequence
cagatgtgcttgttgatgttgaacc

SEQ ID NO: 257240 - DNA, 25 bp, Probe sequence
catacttagcgattcagatgtgctt

SEQ ID NO: 257241 - DNA, 25 bp, Probe sequence
ctgagtcgctaattgatgttgaatc

SEQ ID NO: 257242 - DNA, 25 bp, Probe sequence
ctgaaccagacatacttagcgattc

SEQ ID NO: 257243 - DNA, 25 bp, Probe sequence
cgttgaatctgaaccagacatactt

SEQ ID NO: 257244 - DNA, 25 bp, Probe sequence
cgctcgttgaatctgaaccagacat

SEQ ID NO: 257245 - DNA, 25 bp, Probe sequence
ccagacatacttagcgattcagatg

SEQ ID NO: 257246 - DNA, 25 bp, Probe sequence
gcgattcagatgtgcttgttgatgt

SEQ ID NO: 257247 - DNA, 25 bp, Probe sequence
gctcgttgaatctgaaccagacata

SEQ ID NO: 257248 - DNA, 25 bp, Probe sequence
gaagtcgagttagacatacttgttg

SEQ ID NO: 257249 - DNA, 25 bp, Probe sequence
gaaccacttgttgagccagatgtac

SEQ ID NO: 257250 - DNA, 25 bp, Probe sequence
gacatacttagcgattcagatgtgc

SEQ ID NO: 257251 - DNA, 25 bp, Probe sequence
gacatacttgttgatgttgagtcag

SEQ ID NO: 257252 - DNA, 25 bp, Probe sequence
gagttagacatacttgttgatgttg

SEQ ID NO: 257253 - DNA, 25 bp, Probe sequence
gagtcgctaattgatgttgaatcgg

SEQ ID NO: 257254 - DNA, 25 bp, Probe sequence
gatgtgcttgttgatgttgaaccac

SEQ ID NO: 257255 - DNA, 25 bp, Probe sequence
gatgttgagtcagaaatgctttgtg

SEQ ID NO: 257256 - DNA, 25 bp, Probe sequence
gattcagatgtgcttgttgatgttg

SEQ ID NO: 257257 - DNA, 25 bp, Probe sequence
gttgagtcagaaatgctttgtgaac

SEQ ID NO: 257258 - DNA, 25 bp, Probe sequence
gtcgagttagacatacttgttgatg

SEQ ID NO: 257259 - DNA, 25 bp, Probe sequence
tgttgaatcggatttgtcttgtgac

SEQ ID NO: 257260 - DNA, 25 bp, Probe sequence
tgagtcagaaatgctttgtgaacca

SEQ ID NO: 257261 - DNA, 25 bp, Probe sequence
tctgaaccagacatacttagcgatt

SEQ ID NO: 257262 - DNA, 25 bp, Probe sequence
tacttagcgattcagatgtgcttgt

SEQ ID NO: 257263 - DNA, 25 bp, Probe sequence
tagacatacttgttgatgttgagtc

SEQ ID NO: 257264 - DNA, 25 bp, Probe sequence
ttgctcattgaagtcgagttagaca

SEQ ID NO: 257265 - DNA, 25 bp, Probe sequence
ttagcgattcagatgtgcttgttga

SEQ ID NO: 257266 - DNA, 25 bp, Probe sequence
attaatacaaatgaccctgccaaaa

SEQ ID NO: 257267 - DNA, 25 bp, Probe sequence
attaccgcaacaaatgacatacaat

SEQ ID NO: 257268 - DNA, 25 bp, Probe sequence
atacaaatgaccctgccaaaattgc

SEQ ID NO: 257269 - DNA, 25 bp, Probe sequence
atgaccctgccaaaattgcaattaa

SEQ ID NO: 257270 - DNA, 25 bp, Probe sequence
atggtcgctccatatttggttcgcg

SEQ ID NO: 257271 - DNA, 25 bp, Probe sequence
accctgccaaaattgcaattaaagg

SEQ ID NO: 257272 - DNA, 25 bp, Probe sequence
acggtactttatatggtcgctccat

SEQ ID NO: 257273 - DNA, 25 bp, Probe sequence
acaaatgaccctgccaaaattgcaa

SEQ ID NO: 257274 - DNA, 25 bp, Probe sequence
aaattgtgtaaacagtgtattaatt

SEQ ID NO: 257275 - DNA, 25 bp, Probe sequence
aaattattaccgcaacaaatgacat

SEQ ID NO: 257276 - DNA, 25 bp, Probe sequence
aaatgaccctgccaaaattgcaatt

SEQ ID NO: 257277 - DNA, 25 bp, Probe sequence
aacggtactttatatggtcgctcca

SEQ ID NO: 257278 - DNA, 25 bp, Probe sequence
aatgaccctgccaaaattgcaatta

SEQ ID NO: 257279 - DNA, 25 bp, Probe sequence
aatacaaatgaccctgccaaaattg

SEQ ID NO: 257280 - DNA, 25 bp, Probe sequence
aattaatacaaatgaccctgccaaa

SEQ ID NO: 257281 - DNA, 25 bp, Probe sequence
caaatgaccctgccaaaattgcaat

SEQ ID NO: 257282 - DNA, 25 bp, Probe sequence
cttaaaattattaccgcaacaaatg

SEQ ID NO: 257283 - DNA, 25 bp, Probe sequence
cggtactttatatggtcgctccata

SEQ ID NO: 257284 - DNA, 25 bp, Probe sequence
cgctccatatttggttcgcgtttcc

SEQ ID NO: 257285 - DNA, 25 bp, Probe sequence
gaccctgccaaaattgcaattaaag

SEQ ID NO: 257286 - DNA, 25 bp, Probe sequence
gattgctagtataaattgtgtaaac

SEQ ID NO: 257287 - DNA, 25 bp, Probe sequence
gtcgctccatatttggttcgcgttt

SEQ ID NO: 257288 - DNA, 25 bp, Probe sequence
ggtcgctccatatttggttcgcgtt

SEQ ID NO: 257289 - DNA, 25 bp, Probe sequence
ggtactttatatggtcgctccatat

SEQ ID NO: 257290 - DNA, 25 bp, Probe sequence
ggtatgattggatataacggtactt

SEQ ID NO: 257291 - DNA, 25 bp, Probe sequence
tggtcgctccatatttggttcgcgt

SEQ ID NO: 257292 - DNA, 25 bp, Probe sequence
tgaccctgccaaaattgcaattaaa

SEQ ID NO: 257293 - DNA, 25 bp, Probe sequence
tccatatttggttcgcgtttcctta

SEQ ID NO: 257294 - DNA, 25 bp, Probe sequence
tcgctccatatttggttcgcgtttc

SEQ ID NO: 257295 - DNA, 25 bp, Probe sequence
taacggtactttatatggtcgctcc

SEQ ID NO: 257296 - DNA, 25 bp, Probe sequence
taattaatacaaatgaccctgccaa

SEQ ID NO: 257297 - DNA, 25 bp, Probe sequence
tacaaatgaccctgccaaaattgca

SEQ ID NO: 257298 - DNA, 25 bp, Probe sequence
taccgcaacaaatgacatacaatag

SEQ ID NO: 257299 - DNA, 25 bp, Probe sequence
ttattaccgcaacaaatgacataca

SEQ ID NO: 257300 - DNA, 25 bp, Probe sequence
atccttttttgtgaccgttatcatt

SEQ ID NO: 257301 - DNA, 25 bp, Probe sequence
attattactcctttcccaattatag

SEQ ID NO: 257302 - DNA, 25 bp, Probe sequence
atatcctagctcaactaaatccttt

SEQ ID NO: 257303 - DNA, 25 bp, Probe sequence
atcctagctcaactaaatccttttt

SEQ ID NO: 257304 - DNA, 25 bp, Probe sequence
agttccatatcctagctcaactaaa

SEQ ID NO: 257305 - DNA, 25 bp, Probe sequence
agaagttccatatcctagctcaact

SEQ ID NO: 257306 - DNA, 25 bp, Probe sequence
agctcaactaaatccttttttgtga

SEQ ID NO: 257307 - DNA, 25 bp, Probe sequence
aatccttttttgtgaccgttatcat

SEQ ID NO: 257308 - DNA, 25 bp, Probe sequence
aaagaagttccatatcctagctcaa

SEQ ID NO: 257309 - DNA, 25 bp, Probe sequence
aaaagaagttccatatcctagctca

SEQ ID NO: 257310 - DNA, 25 bp, Probe sequence
aaaaagaagttccatatcctagctc

SEQ ID NO: 257311 - DNA, 25 bp, Probe sequence
aagaagttccatatcctagctcaac

SEQ ID NO: 257312 - DNA, 25 bp, Probe sequence
aagttccatatcctagctcaactaa

SEQ ID NO: 257313 - DNA, 25 bp, Probe sequence
catatcctagctcaactaaatcctt

SEQ ID NO: 257314 - DNA, 25 bp, Probe sequence
cattattactcctttcccaattata

SEQ ID NO: 257315 - DNA, 25 bp, Probe sequence
cttttttgtgaccgttatcattatt

SEQ ID NO: 257316 - DNA, 25 bp, Probe sequence
ctagctcaactaaatccttttttgt

SEQ ID NO: 257317 - DNA, 25 bp, Probe sequence
ccttttttgtgaccgttatcattat

SEQ ID NO: 257318 - DNA, 25 bp, Probe sequence
cctagctcaactaaatccttttttg

SEQ ID NO: 257319 - DNA, 25 bp, Probe sequence
ccatatcctagctcaactaaatcct

SEQ ID NO: 257320 - DNA, 25 bp, Probe sequence
gctcaactaaatccttttttgtgac

SEQ ID NO: 257321 - DNA, 25 bp, Probe sequence
gaagttccatatcctagctcaacta

SEQ ID NO: 257322 - DNA, 25 bp, Probe sequence
gttccatatcctagctcaactaaat

SEQ ID NO: 257323 - DNA, 25 bp, Probe sequence
tccatatcctagctcaactaaatcc

SEQ ID NO: 257324 - DNA, 25 bp, Probe sequence
tccttttttgtgaccgttatcatta

SEQ ID NO: 257325 - DNA, 25 bp, Probe sequence
tcctagctcaactaaatcctttttt

SEQ ID NO: 257326 - DNA, 25 bp, Probe sequence
tattactcctttcccaattataggc

SEQ ID NO: 257327 - DNA, 25 bp, Probe sequence
tcattattactcctttcccaattat

SEQ ID NO: 257328 - DNA, 25 bp, Probe sequence
tcaactaaatccttttttgtgaccg

SEQ ID NO: 257329 - DNA, 25 bp, Probe sequence
tagctcaactaaatccttttttgtg

SEQ ID NO: 257330 - DNA, 25 bp, Probe sequence
tatcctagctcaactaaatcctttt

SEQ ID NO: 257331 - DNA, 25 bp, Probe sequence
tttttgtgaccgttatcattattac

SEQ ID NO: 257332 - DNA, 25 bp, Probe sequence
ttattactcctttcccaattatagg

SEQ ID NO: 257333 - DNA, 25 bp, Probe sequence
ttccatatcctagctcaactaaatc

SEQ ID NO: 257334 - DNA, 25 bp, Probe sequence
atctaactgaactgcttgccagttc

SEQ ID NO: 257335 - DNA, 25 bp, Probe sequence
atgtatctaactgaactgcttgcca

SEQ ID NO: 257336 - DNA, 25 bp, Probe sequence
aggacgactagaaaaactaccagca

SEQ ID NO: 257337 - DNA, 25 bp, Probe sequence
atggcgtatgaagttgatagaaaaa

SEQ ID NO: 257338 - DNA, 25 bp, Probe sequence
accgattgtaacgctctccaatgaa

SEQ ID NO: 257339 - DNA, 25 bp, Probe sequence
actgaactgcttgccagttcaccga

SEQ ID NO: 257340 - DNA, 25 bp, Probe sequence
aaatgtatctaactgaactgcttgc

SEQ ID NO: 257341 - DNA, 25 bp, Probe sequence
aactgaactgcttgccagttcaccg

SEQ ID NO: 257342 - DNA, 25 bp, Probe sequence
aactgcttgccagttcaccgattgt

SEQ ID NO: 257343 - DNA, 25 bp, Probe sequence
aacgctctccaatgaaaagggagta

SEQ ID NO: 257344 - DNA, 25 bp, Probe sequence
aatgtatctaactgaactgcttgcc

SEQ ID NO: 257345 - DNA, 25 bp, Probe sequence
aatgatagaccaagtgcttatcgtt

SEQ ID NO: 257346 - DNA, 25 bp, Probe sequence
cttgccagttcaccgattgtaacgc

SEQ ID NO: 257347 - DNA, 25 bp, Probe sequence
ctaccagcaatgaaattagtacaaa

SEQ ID NO: 257348 - DNA, 25 bp, Probe sequence
ctgaactgcttgccagttcaccgat

SEQ ID NO: 257349 - DNA, 25 bp, Probe sequence
ccgattgtaacgctctccaatgaaa

SEQ ID NO: 257350 - DNA, 25 bp, Probe sequence
ccagttcaccgattgtaacgctctc

SEQ ID NO: 257351 - DNA, 25 bp, Probe sequence
gaactgcttgccagttcaccgattg

SEQ ID NO: 257352 - DNA, 25 bp, Probe sequence
gaaaaactaccagcaatgaaattag

SEQ ID NO: 257353 - DNA, 25 bp, Probe sequence
gaaaaatgtatctaactgaactgct

SEQ ID NO: 257354 - DNA, 25 bp, Probe sequence
gactagaaaaactaccagcaatgaa

SEQ ID NO: 257355 - DNA, 25 bp, Probe sequence
gacgactagaaaaactaccagcaat

SEQ ID NO: 257356 - DNA, 25 bp, Probe sequence
gatagaccaagtgcttatcgttggc

SEQ ID NO: 257357 - DNA, 25 bp, Probe sequence
gattgtaacgctctccaatgaaaag

SEQ ID NO: 257358 - DNA, 25 bp, Probe sequence
gtatctaactgaactgcttgccagt

SEQ ID NO: 257359 - DNA, 25 bp, Probe sequence
gtacaaaatgatagaccaagtgctt

SEQ ID NO: 257360 - DNA, 25 bp, Probe sequence
tgtaacgctctccaatgaaaaggga

SEQ ID NO: 257361 - DNA, 25 bp, Probe sequence
tgtatctaactgaactgcttgccag

SEQ ID NO: 257362 - DNA, 25 bp, Probe sequence
tgaaaagggagtaggacgactagaa

SEQ ID NO: 257363 - DNA, 25 bp, Probe sequence
tgcttgccagttcaccgattgtaac

SEQ ID NO: 257364 - DNA, 25 bp, Probe sequence
tgccagttcaccgattgtaacgctc

SEQ ID NO: 257365 - DNA, 25 bp, Probe sequence
tagaccaagtgcttatcgttggctt

SEQ ID NO: 257366 - DNA, 25 bp, Probe sequence
ttgccagttcaccgattgtaacgct

SEQ ID NO: 257367 - DNA, 25 bp, Probe sequence
ttgtaacgctctccaatgaaaaggg

SEQ ID NO: 257368 - DNA, 25 bp, Probe sequence
ataaaagctacttaatagcagtatt

SEQ ID NO: 257369 - DNA, 25 bp, Probe sequence
atgccacttttgtacttcactacag

SEQ ID NO: 257370 - DNA, 25 bp, Probe sequence
agtcttagcaatttgtttaatgcca

SEQ ID NO: 257371 - DNA, 25 bp, Probe sequence
agcaatttgtttaatgccacttttg

SEQ ID NO: 257372 - DNA, 25 bp, Probe sequence
agctacttaatagcagtattatgct

SEQ ID NO: 257373 - DNA, 25 bp, Probe sequence
acttaatagcagtattatgcttcac

SEQ ID NO: 257374 - DNA, 25 bp, Probe sequence
acagtcttagcaatttgtttaatgc

SEQ ID NO: 257375 - DNA, 25 bp, Probe sequence
aaagctacttaatagcagtattatg

SEQ ID NO: 257376 - DNA, 25 bp, Probe sequence
aaaagctacttaatagcagtattat

SEQ ID NO: 257377 - DNA, 25 bp, Probe sequence
aagctacttaatagcagtattatgc

SEQ ID NO: 257378 - DNA, 25 bp, Probe sequence
aatgccacttttgtacttcactaca

SEQ ID NO: 257379 - DNA, 25 bp, Probe sequence
cacagtcttagcaatttgtttaatg

SEQ ID NO: 257380 - DNA, 25 bp, Probe sequence
cagtcttagcaatttgtttaatgcc

SEQ ID NO: 257381 - DNA, 25 bp, Probe sequence
cttcacagtcttagcaatttgttta

SEQ ID NO: 257382 - DNA, 25 bp, Probe sequence
cttaatagcagtattatgcttcaca

SEQ ID NO: 257383 - DNA, 25 bp, Probe sequence
cttagcaatttgtttaatgccactt

SEQ ID NO: 257384 - DNA, 25 bp, Probe sequence
gtcttagcaatttgtttaatgccac

SEQ ID NO: 257385 - DNA, 25 bp, Probe sequence
ctacttaatagcagtattatgcttc

SEQ ID NO: 257386 - DNA, 25 bp, Probe sequence
gctacttaatagcagtattatgctt

SEQ ID NO: 257387 - DNA, 25 bp, Probe sequence
gtttaatgccacttttgtacttcac

SEQ ID NO: 257388 - DNA, 25 bp, Probe sequence
tgtttaatgccacttttgtacttca

SEQ ID NO: 257389 - DNA, 25 bp, Probe sequence
tcttagcaatttgtttaatgccact

SEQ ID NO: 257390 - DNA, 25 bp, Probe sequence
tcacagtcttagcaatttgtttaat

SEQ ID NO: 257391 - DNA, 25 bp, Probe sequence
taatgccacttttgtacttcactac

SEQ ID NO: 257392 - DNA, 25 bp, Probe sequence
taaaagctacttaatagcagtatta

SEQ ID NO: 257393 - DNA, 25 bp, Probe sequence
tacttaatagcagtattatgcttca

SEQ ID NO: 257394 - DNA, 25 bp, Probe sequence
tagcaatttgtttaatgccactttt

SEQ ID NO: 257395 - DNA, 25 bp, Probe sequence
tttaatgccacttttgtacttcact

SEQ ID NO: 257396 - DNA, 25 bp, Probe sequence
ttagcaatttgtttaatgccacttt

SEQ ID NO: 257397 - DNA, 25 bp, Probe sequence
ttaatgccacttttgtacttcacta

SEQ ID NO: 257398 - DNA, 25 bp, Probe sequence
ttcacagtcttagcaatttgtttaa

SEQ ID NO: 257399 - DNA, 25 bp, Probe sequence
ttgtttaatgccacttttgtacttc

SEQ ID NO: 257400 - DNA, 25 bp, Probe sequence
atttcagcaacaaatgtgtgaatct

SEQ ID NO: 257401 - DNA, 25 bp, Probe sequence
atgttcacatttcagcaacaaatgt

SEQ ID NO: 257402 - DNA, 25 bp, Probe sequence
atgtgtgaatctattatattttaca

SEQ ID NO: 257403 - DNA, 25 bp, Probe sequence
agaaagccttttcaaacatcaattg

SEQ ID NO: 257404 - DNA, 25 bp, Probe sequence
agccttttcaaacatcaattgcatt

SEQ ID NO: 257405 - DNA, 25 bp, Probe sequence
acatcaattgcatttgttgaaaaat

SEQ ID NO: 257406 - DNA, 25 bp, Probe sequence
aaatgttcacatttcagcaacaaat

SEQ ID NO: 257407 - DNA, 25 bp, Probe sequence
aaagccttttcaaacatcaattgca

SEQ ID NO: 257408 - DNA, 25 bp, Probe sequence
aaacatcaattgcatttgttgaaaa

SEQ ID NO: 257409 - DNA, 25 bp, Probe sequence
aaaatgttcacatttcagcaacaaa

SEQ ID NO: 257410 - DNA, 25 bp, Probe sequence
aacaaatgtgtgaatctattatatt

SEQ ID NO: 257411 - DNA, 25 bp, Probe sequence
aagccttttcaaacatcaattgcat

SEQ ID NO: 257412 - DNA, 25 bp, Probe sequence
aatgtgtgaatctattatattttac

SEQ ID NO: 257413 - DNA, 25 bp, Probe sequence
aatgttcacatttcagcaacaaatg

SEQ ID NO: 257414 - DNA, 25 bp, Probe sequence
caaacatcaattgcatttgttgaaa

SEQ ID NO: 257415 - DNA, 25 bp, Probe sequence
cagcaacaaatgtgtgaatctatta

SEQ ID NO: 257416 - DNA, 25 bp, Probe sequence
cttttcaaacatcaattgcatttgt

SEQ ID NO: 257417 - DNA, 25 bp, Probe sequence
ccttttcaaacatcaattgcatttg

SEQ ID NO: 257418 - DNA, 25 bp, Probe sequence
gccttttcaaacatcaattgcattt

SEQ ID NO: 257419 - DNA, 25 bp, Probe sequence
gcaacaaatgtgtgaatctattata

SEQ ID NO: 257420 - DNA, 25 bp, Probe sequence
gaaaaatgttcacatttcagcaaca

SEQ ID NO: 257421 - DNA, 25 bp, Probe sequence
gaaagccttttcaaacatcaattgc

SEQ ID NO: 257422 - DNA, 25 bp, Probe sequence
gagaaagccttttcaaacatcaatt

SEQ ID NO: 257423 - DNA, 25 bp, Probe sequence
gttgaaaaatgttcacatttcagca

SEQ ID NO: 257424 - DNA, 25 bp, Probe sequence
gtgtgaatctattatattttacaga

SEQ ID NO: 257425 - DNA, 25 bp, Probe sequence
tgtgtgaatctattatattttacag

SEQ ID NO: 257426 - DNA, 25 bp, Probe sequence
tgagaaagccttttcaaacatcaat

SEQ ID NO: 257427 - DNA, 25 bp, Probe sequence
tcagcaacaaatgtgtgaatctatt

SEQ ID NO: 257428 - DNA, 25 bp, Probe sequence
tcaaacatcaattgcatttgttgaa

SEQ ID NO: 257429 - DNA, 25 bp, Probe sequence
tttcagcaacaaatgtgtgaatcta

SEQ ID NO: 257430 - DNA, 25 bp, Probe sequence
tttcaaacatcaattgcatttgttg

SEQ ID NO: 257431 - DNA, 25 bp, Probe sequence
ttttcaaacatcaattgcatttgtt

SEQ ID NO: 257432 - DNA, 25 bp, Probe sequence
ttcaaacatcaattgcatttgttga

SEQ ID NO: 257433 - DNA, 25 bp, Probe sequence
ttgagaaagccttttcaaacatcaa

SEQ ID NO: 257434 - DNA, 25 bp, Probe sequence
atttttatcattatatttcaactga

SEQ ID NO: 257435 - DNA, 25 bp, Probe sequence
atttgtaactcatagaaaattttat

SEQ ID NO: 257436 - DNA, 25 bp, Probe sequence
atatttgtaactcatagaaaatttt

SEQ ID NO: 257437 - DNA, 25 bp, Probe sequence
atcatatttgtaactcatagaaaat

SEQ ID NO: 257438 - DNA, 25 bp, Probe sequence
atcattatatttcaactgaaaatga

SEQ ID NO: 257439 - DNA, 25 bp, Probe sequence
atgcacatcatatttgtaactcata

SEQ ID NO: 257440 - DNA, 25 bp, Probe sequence
atgagaaacaaaatggcacttttta

SEQ ID NO: 257441 - DNA, 25 bp, Probe sequence
atgatgcacatcatatttgtaactc

SEQ ID NO: 257442 - DNA, 25 bp, Probe sequence
acatcatatttgtaactcatagaaa

SEQ ID NO: 257443 - DNA, 25 bp, Probe sequence
aaatgagaaacaaaatggcactttt

SEQ ID NO: 257444 - DNA, 25 bp, Probe sequence
aaaatgagaaacaaaatggcacttt

SEQ ID NO: 257445 - DNA, 25 bp, Probe sequence
aatgagaaacaaaatggcacttttt

SEQ ID NO: 257446 - DNA, 25 bp, Probe sequence
aatttttatcattatatttcaactg

SEQ ID NO: 257447 - DNA, 25 bp, Probe sequence
cacatcatatttgtaactcatagaa

SEQ ID NO: 257448 - DNA, 25 bp, Probe sequence
catcatatttgtaactcatagaaaa

SEQ ID NO: 257449 - DNA, 25 bp, Probe sequence
catatttgtaactcatagaaaattt

SEQ ID NO: 257450 - DNA, 25 bp, Probe sequence
gcacatcatatttgtaactcataga

SEQ ID NO: 257451 - DNA, 25 bp, Probe sequence
gaaaatgagaaacaaaatggcactt

SEQ ID NO: 257452 - DNA, 25 bp, Probe sequence
gatgcacatcatatttgtaactcat

SEQ ID NO: 257453 - DNA, 25 bp, Probe sequence
tgatgcacatcatatttgtaactca

SEQ ID NO: 257454 - DNA, 25 bp, Probe sequence
tgagaaacaaaatggcactttttac

SEQ ID NO: 257455 - DNA, 25 bp, Probe sequence
tgcacatcatatttgtaactcatag

SEQ ID NO: 257456 - DNA, 25 bp, Probe sequence
tcatatttgtaactcatagaaaatt

SEQ ID NO: 257457 - DNA, 25 bp, Probe sequence
tatttgtaactcatagaaaatttta

SEQ ID NO: 257458 - DNA, 25 bp, Probe sequence
tatcattatatttcaactgaaaatg

SEQ ID NO: 257459 - DNA, 25 bp, Probe sequence
tttgtaactcatagaaaattttata

SEQ ID NO: 257460 - DNA, 25 bp, Probe sequence
tttatcattatatttcaactgaaaa

SEQ ID NO: 257461 - DNA, 25 bp, Probe sequence
tttttatcattatatttcaactgaa

SEQ ID NO: 257462 - DNA, 25 bp, Probe sequence
ttttatcattatatttcaactgaaa

SEQ ID NO: 257463 - DNA, 25 bp, Probe sequence
ttatcattatatttcaactgaaaat

SEQ ID NO: 257464 - DNA, 25 bp, Probe sequence
attatcaagcaatagctacacatat

SEQ ID NO: 257465 - DNA, 25 bp, Probe sequence
atataatctgtttatcttattactt

SEQ ID NO: 257466 - DNA, 25 bp, Probe sequence
atagctacacatataatctgtttat

SEQ ID NO: 257467 - DNA, 25 bp, Probe sequence
ataatctgtttatcttattacttca

SEQ ID NO: 257468 - DNA, 25 bp, Probe sequence
atctgtttatcttattacttcataa

SEQ ID NO: 257469 - DNA, 25 bp, Probe sequence
atgcgcttaccattatcaagcaata

SEQ ID NO: 257470 - DNA, 25 bp, Probe sequence
agcaatagctacacatataatctgt

SEQ ID NO: 257471 - DNA, 25 bp, Probe sequence
agctacacatataatctgtttatct

SEQ ID NO: 257472 - DNA, 25 bp, Probe sequence
accattatcaagcaatagctacaca

SEQ ID NO: 257473 - DNA, 25 bp, Probe sequence
acatataatctgtttatcttattac

SEQ ID NO: 257474 - DNA, 25 bp, Probe sequence
acacatataatctgtttatcttatt

SEQ ID NO: 257475 - DNA, 25 bp, Probe sequence
aagcaatagctacacatataatctg

SEQ ID NO: 257476 - DNA, 25 bp, Probe sequence
aatctgtttatcttattacttcata

SEQ ID NO: 257477 - DNA, 25 bp, Probe sequence
aatagctacacatataatctgttta

SEQ ID NO: 257478 - DNA, 25 bp, Probe sequence
caatagctacacatataatctgttt

SEQ ID NO: 257479 - DNA, 25 bp, Probe sequence
caagcaatagctacacatataatct

SEQ ID NO: 257480 - DNA, 25 bp, Probe sequence
cttaccattatcaagcaatagctac

SEQ ID NO: 257481 - DNA, 25 bp, Probe sequence
ctacacatataatctgtttatctta

SEQ ID NO: 257482 - DNA, 25 bp, Probe sequence
ctgtttatcttattacttcataaaa

SEQ ID NO: 257483 - DNA, 25 bp, Probe sequence
cgcttaccattatcaagcaatagct

SEQ ID NO: 257484 - DNA, 25 bp, Probe sequence
ccattatcaagcaatagctacacat

SEQ ID NO: 257485 - DNA, 25 bp, Probe sequence
gcgcttaccattatcaagcaatagc

SEQ ID NO: 257486 - DNA, 25 bp, Probe sequence
gctacacatataatctgtttatctt

SEQ ID NO: 257487 - DNA, 25 bp, Probe sequence
gcaatagctacacatataatctgtt

SEQ ID NO: 257488 - DNA, 25 bp, Probe sequence
tgtttatcttattacttcataaaaa

SEQ ID NO: 257489 - DNA, 25 bp, Probe sequence
tgcgcttaccattatcaagcaatag

SEQ ID NO: 257490 - DNA, 25 bp, Probe sequence
tctgtttatcttattacttcataaa

SEQ ID NO: 257491 - DNA, 25 bp, Probe sequence
taatctgtttatcttattacttcat

SEQ ID NO: 257492 - DNA, 25 bp, Probe sequence
tacacatataatctgtttatcttat

SEQ ID NO: 257493 - DNA, 25 bp, Probe sequence
taccattatcaagcaatagctacac

SEQ ID NO: 257494 - DNA, 25 bp, Probe sequence
tagctacacatataatctgtttatc

SEQ ID NO: 257495 - DNA, 25 bp, Probe sequence
tataatctgtttatcttattacttc

SEQ ID NO: 257496 - DNA, 25 bp, Probe sequence
ttatcaagcaatagctacacatata

SEQ ID NO: 257497 - DNA, 25 bp, Probe sequence
ttaccattatcaagcaatagctaca

SEQ ID NO: 257498 - DNA, 25 bp, Probe sequence
attaccatatccaacaacgccagtt

SEQ ID NO: 257499 - DNA, 25 bp, Probe sequence
atttattttacgtgttcatattttg

SEQ ID NO: 257500 - DNA, 25 bp, Probe sequence
atgtctttgattgaatgtagtcctt

SEQ ID NO: 257501 - DNA, 25 bp, Probe sequence
agtcctttatcggcgaagtatgatc

SEQ ID NO: 257502 - DNA, 25 bp, Probe sequence
agttgtcttttgtagcttgtcagca

SEQ ID NO: 257503 - DNA, 25 bp, Probe sequence
agccgtcttgcttagctttgttgat

SEQ ID NO: 257504 - DNA, 25 bp, Probe sequence
acatcaaagccgtcttgcttagctt

SEQ ID NO: 257505 - DNA, 25 bp, Probe sequence
aacacatcgatatagcttaattcat

SEQ ID NO: 257506 - DNA, 25 bp, Probe sequence
aactttcgcatctgcttgattacca

SEQ ID NO: 257507 - DNA, 25 bp, Probe sequence
aagaagtttgcgtcatcatgtagta

SEQ ID NO: 257508 - DNA, 25 bp, Probe sequence
caacgccagttgctaatacacctac

SEQ ID NO: 257509 - DNA, 25 bp, Probe sequence
cagttgctaatacacctaccattgc

SEQ ID NO: 257510 - DNA, 25 bp, Probe sequence
cgatatagcttaattcatgttctaa

SEQ ID NO: 257511 - DNA, 25 bp, Probe sequence
ccatatccaacaacgccagttgcta

SEQ ID NO: 257512 - DNA, 25 bp, Probe sequence
gctaatacacctaccattgccgtag

SEQ ID NO: 257513 - DNA, 25 bp, Probe sequence
gcgtcatcatgtagtacgagtccat

SEQ ID NO: 257514 - DNA, 25 bp, Probe sequence
gcttgattaccatatccaacaacgc

SEQ ID NO: 257515 - DNA, 25 bp, Probe sequence
gcttgtcagcattcttatctaataa

SEQ ID NO: 257516 - DNA, 25 bp, Probe sequence
gcattcttatctaataacacatcga

SEQ ID NO: 257517 - DNA, 25 bp, Probe sequence
gcatctgcttgattaccatatccaa

SEQ ID NO: 257518 - DNA, 25 bp, Probe sequence
gaatgtagtcctttatcggcgaagt

SEQ ID NO: 257519 - DNA, 25 bp, Probe sequence
gaagtatgatcttaagttgtctttt

SEQ ID NO: 257520 - DNA, 25 bp, Probe sequence
gaaacatcaaagccgtcttgcttag

SEQ ID NO: 257521 - DNA, 25 bp, Probe sequence
gagaataaactttcgcatctgcttg

SEQ ID NO: 257522 - DNA, 25 bp, Probe sequence
gattgaatgtagtcctttatcggcg

SEQ ID NO: 257523 - DNA, 25 bp, Probe sequence
gtagtacgagtccattttgagaata

SEQ ID NO: 257524 - DNA, 25 bp, Probe sequence
gtacgagtccattttgagaataaac

SEQ ID NO: 257525 - DNA, 25 bp, Probe sequence
gtcttttgtagcttgtcagcattct

SEQ ID NO: 257526 - DNA, 25 bp, Probe sequence
gtcttgcttagctttgttgataatg

SEQ ID NO: 257527 - DNA, 25 bp, Probe sequence
tgttctaagaagtttgcgtcatcat

SEQ ID NO: 257528 - DNA, 25 bp, Probe sequence
tgtagcttgtcagcattcttatcta

SEQ ID NO: 257529 - DNA, 25 bp, Probe sequence
tacgtgttcatattttgaaacatca

SEQ ID NO: 257530 - DNA, 25 bp, Probe sequence
tagctttgttgataatgtctttgat

SEQ ID NO: 257531 - DNA, 25 bp, Probe sequence
ttcgcatctgcttgattaccatatc

SEQ ID NO: 257532 - DNA, 25 bp, Probe sequence
attctgagttttacattcaacattg

SEQ ID NO: 257533 - DNA, 25 bp, Probe sequence
atataaaaatgtgaatcgtctacac

SEQ ID NO: 257534 - DNA, 25 bp, Probe sequence
atacgcaaaaaattctccatgttat

SEQ ID NO: 257535 - DNA, 25 bp, Probe sequence
agttttacattcaacattgttcatg

SEQ ID NO: 257536 - DNA, 25 bp, Probe sequence
agttggattctgagttttacattca

SEQ ID NO: 257537 - DNA, 25 bp, Probe sequence
acgcaaaaaattctccatgttatat

SEQ ID NO: 257538 - DNA, 25 bp, Probe sequence
aaattctccatgttatatatgtcaa

SEQ ID NO: 257539 - DNA, 25 bp, Probe sequence
aaagttggattctgagttttacatt

SEQ ID NO: 257540 - DNA, 25 bp, Probe sequence
aaaaattctccatgttatatatgtc

SEQ ID NO: 257541 - DNA, 25 bp, Probe sequence
aacattgttcatgaagaaacttctt

SEQ ID NO: 257542 - DNA, 25 bp, Probe sequence
aagttggattctgagttttacattc

SEQ ID NO: 257543 - DNA, 25 bp, Probe sequence
aagtgtcaaaaaagttggattctga

SEQ ID NO: 257544 - DNA, 25 bp, Probe sequence
aattctccatgttatatatgtcaat

SEQ ID NO: 257545 - DNA, 25 bp, Probe sequence
ctttatacgcaaaaaattctccatg

SEQ ID NO: 257546 - DNA, 25 bp, Probe sequence
ctgagttttacattcaacattgttc

SEQ ID NO: 257547 - DNA, 25 bp, Probe sequence
cgcaaaaaattctccatgttatata

SEQ ID NO: 257548 - DNA, 25 bp, Probe sequence
gcaaaaaattctccatgttatatat

SEQ ID NO: 257549 - DNA, 25 bp, Probe sequence
gagttttacattcaacattgttcat

SEQ ID NO: 257550 - DNA, 25 bp, Probe sequence
gattctgagttttacattcaacatt

SEQ ID NO: 257551 - DNA, 25 bp, Probe sequence
gttggattctgagttttacattcaa

SEQ ID NO: 257552 - DNA, 25 bp, Probe sequence
gttttacattcaacattgttcatga

SEQ ID NO: 257553 - DNA, 25 bp, Probe sequence
ggattctgagttttacattcaacat

SEQ ID NO: 257554 - DNA, 25 bp, Probe sequence
tggattctgagttttacattcaaca

SEQ ID NO: 257555 - DNA, 25 bp, Probe sequence
tgagttttacattcaacattgttca

SEQ ID NO: 257556 - DNA, 25 bp, Probe sequence
tgaagaaacttctttatacgcaaaa

SEQ ID NO: 257557 - DNA, 25 bp, Probe sequence
tacattcaacattgttcatgaagaa

SEQ ID NO: 257558 - DNA, 25 bp, Probe sequence
tacgcaaaaaattctccatgttata

SEQ ID NO: 257559 - DNA, 25 bp, Probe sequence
tatacgcaaaaaattctccatgtta

SEQ ID NO: 257560 - DNA, 25 bp, Probe sequence
tttacattcaacattgttcatgaag

SEQ ID NO: 257561 - DNA, 25 bp, Probe sequence
ttatacgcaaaaaattctccatgtt

SEQ ID NO: 257562 - DNA, 25 bp, Probe sequence
ttctttatacgcaaaaaattctcca

SEQ ID NO: 257563 - DNA, 25 bp, Probe sequence
ttctgagttttacattcaacattgt

SEQ ID NO: 257564 - DNA, 25 bp, Probe sequence
ttctccatgttatatatgtcaatat

SEQ ID NO: 257565 - DNA, 25 bp, Probe sequence
ttggattctgagttttacattcaac

SEQ ID NO: 257566 - DNA, 25 bp, Probe sequence
atgacctatttatccgaaaacttgc

SEQ ID NO: 257567 - DNA, 25 bp, Probe sequence
atttatccgaaaacttgcagaacgt

SEQ ID NO: 257568 - DNA, 25 bp, Probe sequence
atatgacctatttatccgaaaactt

SEQ ID NO: 257569 - DNA, 25 bp, Probe sequence
atagacgagacacaaggcaatgaaa

SEQ ID NO: 257570 - DNA, 25 bp, Probe sequence
atgtacgctcagaaactcatagacg

SEQ ID NO: 257571 - DNA, 25 bp, Probe sequence
atccgaaaacttgcagaacgtcata

SEQ ID NO: 257572 - DNA, 25 bp, Probe sequence
agttatatgacctatttatccgaaa

SEQ ID NO: 257573 - DNA, 25 bp, Probe sequence
acctatttatccgaaaacttgcaga

SEQ ID NO: 257574 - DNA, 25 bp, Probe sequence
acgctcagaaactcatagacgagac

SEQ ID NO: 257575 - DNA, 25 bp, Probe sequence
acttgagtgttcagatatgtacgct

SEQ ID NO: 257576 - DNA, 25 bp, Probe sequence
aaacttgcagaacgtcatacacgcc

SEQ ID NO: 257577 - DNA, 25 bp, Probe sequence
aaaactaaacttgagtgttcagata

SEQ ID NO: 257578 - DNA, 25 bp, Probe sequence
aaaacttgcagaacgtcatacacgc

SEQ ID NO: 257579 - DNA, 25 bp, Probe sequence
aacttgcagaacgtcatacacgccc

SEQ ID NO: 257580 - DNA, 25 bp, Probe sequence
cagatatgtacgctcagaaactcat

SEQ ID NO: 257581 - DNA, 25 bp, Probe sequence
ctcatagacgagacacaaggcaatg

SEQ ID NO: 257582 - DNA, 25 bp, Probe sequence
ctatttatccgaaaacttgcagaac

SEQ ID NO: 257583 - DNA, 25 bp, Probe sequence
ccgaaaacttgcagaacgtcataca

SEQ ID NO: 257584 - DNA, 25 bp, Probe sequence
gctcagaaactcatagacgagacac

SEQ ID NO: 257585 - DNA, 25 bp, Probe sequence
gaaaacttgcagaacgtcatacacg

SEQ ID NO: 257586 - DNA, 25 bp, Probe sequence
gaaactcatagacgagacacaaggc

SEQ ID NO: 257587 - DNA, 25 bp, Probe sequence
gacgagacacaaggcaatgaaaata

SEQ ID NO: 257588 - DNA, 25 bp, Probe sequence
gacctatttatccgaaaacttgcag

SEQ ID NO: 257589 - DNA, 25 bp, Probe sequence
gagtgttcagatatgtacgctcaga

SEQ ID NO: 257590 - DNA, 25 bp, Probe sequence
gatatgtacgctcagaaactcatag

SEQ ID NO: 257591 - DNA, 25 bp, Probe sequence
gttcagatatgtacgctcagaaact

SEQ ID NO: 257592 - DNA, 25 bp, Probe sequence
gtacgctcagaaactcatagacgag

SEQ ID NO: 257593 - DNA, 25 bp, Probe sequence
gtgttcagatatgtacgctcagaaa

SEQ ID NO: 257594 - DNA, 25 bp, Probe sequence
tgtacgctcagaaactcatagacga

SEQ ID NO: 257595 - DNA, 25 bp, Probe sequence
tgacctatttatccgaaaacttgca

SEQ ID NO: 257596 - DNA, 25 bp, Probe sequence
tcagatatgtacgctcagaaactca

SEQ ID NO: 257597 - DNA, 25 bp, Probe sequence
taagttatatgacctatttatccga

SEQ ID NO: 257598 - DNA, 25 bp, Probe sequence
ttatatgacctatttatccgaaaac

SEQ ID NO: 257599 - DNA, 25 bp, Probe sequence
ttatccgaaaacttgcagaacgtca

SEQ ID NO: 257600 - DNA, 25 bp, Probe sequence
atttttactctattatacatttcag

SEQ ID NO: 257601 - DNA, 25 bp, Probe sequence
atttcagatatcttacttacttggt

SEQ ID NO: 257602 - DNA, 25 bp, Probe sequence
atacatttcagatatcttacttact

SEQ ID NO: 257603 - DNA, 25 bp, Probe sequence
agtatgcttcctgtcttttgagctg

SEQ ID NO: 257604 - DNA, 25 bp, Probe sequence
aaataaaaagccagtgccgatgcac

SEQ ID NO: 257605 - DNA, 25 bp, Probe sequence
aacttcacttgcagtatgcttcctg

SEQ ID NO: 257606 - DNA, 25 bp, Probe sequence
aagccagtgccgatgcactgaccaa

SEQ ID NO: 257607 - DNA, 25 bp, Probe sequence
aataccatgtacgtacctcttttca

SEQ ID NO: 257608 - DNA, 25 bp, Probe sequence
catgtacgtacctcttttcaatcaa

SEQ ID NO: 257609 - DNA, 25 bp, Probe sequence
cattatttacatttacgaccataca

SEQ ID NO: 257610 - DNA, 25 bp, Probe sequence
cttcccaacttcacttgcagtatgc

SEQ ID NO: 257611 - DNA, 25 bp, Probe sequence
cttcctgtcttttgagctgtgtaat

SEQ ID NO: 257612 - DNA, 25 bp, Probe sequence
cccaacttcacttgcagtatgcttc

SEQ ID NO: 257613 - DNA, 25 bp, Probe sequence
cctgtcttttgagctgtgtaatacc

SEQ ID NO: 257614 - DNA, 25 bp, Probe sequence
gcagtatgcttcctgtcttttgagc

SEQ ID NO: 257615 - DNA, 25 bp, Probe sequence
gagctgtgtaataccatgtacgtac

SEQ ID NO: 257616 - DNA, 25 bp, Probe sequence
gatatcttacttacttggtattaac

SEQ ID NO: 257617 - DNA, 25 bp, Probe sequence
gatttcatttttactctattataca

SEQ ID NO: 257618 - DNA, 25 bp, Probe sequence
gtcttttgagctgtgtaataccatg

SEQ ID NO: 257619 - DNA, 25 bp, Probe sequence
gtgccgatgcactgaccaaaaacat

SEQ ID NO: 257620 - DNA, 25 bp, Probe sequence
gtgtaataccatgtacgtacctctt

SEQ ID NO: 257621 - DNA, 25 bp, Probe sequence
tggtattaacaacacttcccaactt

SEQ ID NO: 257622 - DNA, 25 bp, Probe sequence
tgtacgtacctcttttcaatcaaaa

SEQ ID NO: 257623 - DNA, 25 bp, Probe sequence
tgcttcctgtcttttgagctgtgta

SEQ ID NO: 257624 - DNA, 25 bp, Probe sequence
tgcactgaccaaaaacattatttac

SEQ ID NO: 257625 - DNA, 25 bp, Probe sequence
tcacttgcagtatgcttcctgtctt

SEQ ID NO: 257626 - DNA, 25 bp, Probe sequence
tacttggtattaacaacacttccca

SEQ ID NO: 257627 - DNA, 25 bp, Probe sequence
tacgtacctcttttcaatcaaaata

SEQ ID NO: 257628 - DNA, 25 bp, Probe sequence
taccatgtacgtacctcttttcaat

SEQ ID NO: 257629 - DNA, 25 bp, Probe sequence
tatgcttcctgtcttttgagctgtg

SEQ ID NO: 257630 - DNA, 25 bp, Probe sequence
tatacactttttatatttgtctata

SEQ ID NO: 257631 - DNA, 25 bp, Probe sequence
tatattactatacactttttatatt

SEQ ID NO: 257632 - DNA, 25 bp, Probe sequence
tttacatttacgaccatacaaataa

SEQ ID NO: 257633 - DNA, 25 bp, Probe sequence
ttgcagtatgcttcctgtcttttga

SEQ ID NO: 257634 - DNA, 25 bp, Probe sequence
attgttctgaacactctaagacatt

SEQ ID NO: 257635 - DNA, 25 bp, Probe sequence
atcacctccacaattttatctaata

SEQ ID NO: 257636 - DNA, 25 bp, Probe sequence
atcttacagattgttctgaacactc

SEQ ID NO: 257637 - DNA, 25 bp, Probe sequence
aggtttcataccataatcttacaga

SEQ ID NO: 257638 - DNA, 25 bp, Probe sequence
accataatcttacagattgttctga

SEQ ID NO: 257639 - DNA, 25 bp, Probe sequence
actctaagacattgctaatatcttt

SEQ ID NO: 257640 - DNA, 25 bp, Probe sequence
actacgtccttgtattaaagaatcg

SEQ ID NO: 257641 - DNA, 25 bp, Probe sequence
acactctaagacattgctaatatct

SEQ ID NO: 257642 - DNA, 25 bp, Probe sequence
aacactctaagacattgctaatatc

SEQ ID NO: 257643 - DNA, 25 bp, Probe sequence
cacctccacaattttatctaataag

SEQ ID NO: 257644 - DNA, 25 bp, Probe sequence
cagattgttctgaacactctaagac

SEQ ID NO: 257645 - DNA, 25 bp, Probe sequence
cataccataatcttacagattgttc

SEQ ID NO: 257646 - DNA, 25 bp, Probe sequence
cttacagattgttctgaacactcta

SEQ ID NO: 257647 - DNA, 25 bp, Probe sequence
ctgaacactctaagacattgctaat

SEQ ID NO: 257648 - DNA, 25 bp, Probe sequence
cctccacaattttatctaataaggt

SEQ ID NO: 257649 - DNA, 25 bp, Probe sequence
gctaatatctttaaaactacgtcct

SEQ ID NO: 257650 - DNA, 25 bp, Probe sequence
gaacactctaagacattgctaatat

SEQ ID NO: 257651 - DNA, 25 bp, Probe sequence
gacattgctaatatctttaaaacta

SEQ ID NO: 257652 - DNA, 25 bp, Probe sequence
gattgttctgaacactctaagacat

SEQ ID NO: 257653 - DNA, 25 bp, Probe sequence
gttctgaacactctaagacattgct

SEQ ID NO: 257654 - DNA, 25 bp, Probe sequence
gtttcataccataatcttacagatt

SEQ ID NO: 257655 - DNA, 25 bp, Probe sequence
ggtttcataccataatcttacagat

SEQ ID NO: 257656 - DNA, 25 bp, Probe sequence
tgttctgaacactctaagacattgc

SEQ ID NO: 257657 - DNA, 25 bp, Probe sequence
tgaacactctaagacattgctaata

SEQ ID NO: 257658 - DNA, 25 bp, Probe sequence
tctgaacactctaagacattgctaa

SEQ ID NO: 257659 - DNA, 25 bp, Probe sequence
tcacctccacaattttatctaataa

SEQ ID NO: 257660 - DNA, 25 bp, Probe sequence
taatatctttaaaactacgtccttg

SEQ ID NO: 257661 - DNA, 25 bp, Probe sequence
taatcttacagattgttctgaacac

SEQ ID NO: 257662 - DNA, 25 bp, Probe sequence
tacagattgttctgaacactctaag

SEQ ID NO: 257663 - DNA, 25 bp, Probe sequence
tacgtccttgtattaaagaatcgaa

SEQ ID NO: 257664 - DNA, 25 bp, Probe sequence
tatctttaaaactacgtccttgtat

SEQ ID NO: 257665 - DNA, 25 bp, Probe sequence
ttttatctaataaggtttcatacca

SEQ ID NO: 257666 - DNA, 25 bp, Probe sequence
ttctgaacactctaagacattgcta

SEQ ID NO: 257667 - DNA, 25 bp, Probe sequence
ttgttctgaacactctaagacattg

SEQ ID NO: 257668 - DNA, 25 bp, Probe sequence
attagaattttcatcacctattgaa

SEQ ID NO: 257669 - DNA, 25 bp, Probe sequence
atttcatcatctatcaacacatcac

SEQ ID NO: 257670 - DNA, 25 bp, Probe sequence
atcatctatcaacacatcacttata

SEQ ID NO: 257671 - DNA, 25 bp, Probe sequence
atcatcggtttttatttcatcatct

SEQ ID NO: 257672 - DNA, 25 bp, Probe sequence
atcggtttttatttcatcatctatc

SEQ ID NO: 257673 - DNA, 25 bp, Probe sequence
atccattcattagaattttcatcac

SEQ ID NO: 257674 - DNA, 25 bp, Probe sequence
aatcatcggtttttatttcatcatc

SEQ ID NO: 257675 - DNA, 25 bp, Probe sequence
catcggtttttatttcatcatctat

SEQ ID NO: 257676 - DNA, 25 bp, Probe sequence
catcatctatcaacacatcacttat

SEQ ID NO: 257677 - DNA, 25 bp, Probe sequence
cattagaattttcatcacctattga

SEQ ID NO: 257678 - DNA, 25 bp, Probe sequence
cattcattagaattttcatcaccta

SEQ ID NO: 257679 - DNA, 25 bp, Probe sequence
ctgccatccattcattagaattttc

SEQ ID NO: 257680 - DNA, 25 bp, Probe sequence
cggtttttatttcatcatctatcaa

SEQ ID NO: 257681 - DNA, 25 bp, Probe sequence
cgtctgccatccattcattagaatt

SEQ ID NO: 257682 - DNA, 25 bp, Probe sequence
gccatccattcattagaattttcat

SEQ ID NO: 257683 - DNA, 25 bp, Probe sequence
gaattttcatcacctattgaaagaa

SEQ ID NO: 257684 - DNA, 25 bp, Probe sequence
gtctgccatccattcattagaattt

SEQ ID NO: 257685 - DNA, 25 bp, Probe sequence
ggtttttatttcatcatctatcaac

SEQ ID NO: 257686 - DNA, 25 bp, Probe sequence
tcgtctgccatccattcattagaat

SEQ ID NO: 257687 - DNA, 25 bp, Probe sequence
tcggtttttatttcatcatctatca

SEQ ID NO: 257688 - DNA, 25 bp, Probe sequence
tctgccatccattcattagaatttt

SEQ ID NO: 257689 - DNA, 25 bp, Probe sequence
tcatcacctattgaaagaaatcatc

SEQ ID NO: 257690 - DNA, 25 bp, Probe sequence
tcatcatctatcaacacatcactta

SEQ ID NO: 257691 - DNA, 25 bp, Probe sequence
tcatctatcaacacatcacttatag

SEQ ID NO: 257692 - DNA, 25 bp, Probe sequence
tcatcggtttttatttcatcatcta

SEQ ID NO: 257693 - DNA, 25 bp, Probe sequence
tcacctattgaaagaaatcatcggt

SEQ ID NO: 257694 - DNA, 25 bp, Probe sequence
tatttcatcatctatcaacacatca

SEQ ID NO: 257695 - DNA, 25 bp, Probe sequence
tttcatcatctatcaacacatcact

SEQ ID NO: 257696 - DNA, 25 bp, Probe sequence
tttatttcatcatctatcaacacat

SEQ ID NO: 257697 - DNA, 25 bp, Probe sequence
tttttatttcatcatctatcaacac

SEQ ID NO: 257698 - DNA, 25 bp, Probe sequence
ttttatttcatcatctatcaacaca

SEQ ID NO: 257699 - DNA, 25 bp, Probe sequence
ttatttcatcatctatcaacacatc

SEQ ID NO: 257700 - DNA, 25 bp, Probe sequence
ttcattagaattttcatcacctatt

SEQ ID NO: 257701 - DNA, 25 bp, Probe sequence
ttcatcatctatcaacacatcactt

SEQ ID NO: 257702 - DNA, 25 bp, Probe sequence
attacaactccttatgctgcaaagt

SEQ ID NO: 257703 - DNA, 25 bp, Probe sequence
atctgatgtagcaccagcttcgtat

SEQ ID NO: 257704 - DNA, 25 bp, Probe sequence
agctttatctgattttaagaattcc

SEQ ID NO: 257705 - DNA, 25 bp, Probe sequence
actcttttgctaatttactatctga

SEQ ID NO: 257706 - DNA, 25 bp, Probe sequence
acaactccttatgctgcaaagtggt

SEQ ID NO: 257707 - DNA, 25 bp, Probe sequence
aaaggtgttaagtcaggcatggatt

SEQ ID NO: 257708 - DNA, 25 bp, Probe sequence
aactccttatgctgcaaagtggtat

SEQ ID NO: 257709 - DNA, 25 bp, Probe sequence
cagcttcgtatgtgattggtttctt

SEQ ID NO: 257710 - DNA, 25 bp, Probe sequence
caggcatggattacaactccttatg

SEQ ID NO: 257711 - DNA, 25 bp, Probe sequence
catggattacaactccttatgctgc

SEQ ID NO: 257712 - DNA, 25 bp, Probe sequence
cttttacagtatcaatttttttgtg

SEQ ID NO: 257713 - DNA, 25 bp, Probe sequence
ctatctgatgtagcaccagcttcgt

SEQ ID NO: 257714 - DNA, 25 bp, Probe sequence
ctgatgtagcaccagcttcgtatgt

SEQ ID NO: 257715 - DNA, 25 bp, Probe sequence
ccatccactcttttgctaatttact

SEQ ID NO: 257716 - DNA, 25 bp, Probe sequence
gcttcgtatgtgattggtttcttaa

SEQ ID NO: 257717 - DNA, 25 bp, Probe sequence
gcaccagcttcgtatgtgattggtt

SEQ ID NO: 257718 - DNA, 25 bp, Probe sequence
gcaaagtggtattcttttaatattt

SEQ ID NO: 257719 - DNA, 25 bp, Probe sequence
gatgtagcaccagcttcgtatgtga

SEQ ID NO: 257720 - DNA, 25 bp, Probe sequence
gatatccaaaaaggtgttaagtcag

SEQ ID NO: 257721 - DNA, 25 bp, Probe sequence
gattggtttcttaagttctacttct

SEQ ID NO: 257722 - DNA, 25 bp, Probe sequence
gtatgtgattggtttcttaagttct

SEQ ID NO: 257723 - DNA, 25 bp, Probe sequence
gtagcaccagcttcgtatgtgattg

SEQ ID NO: 257724 - DNA, 25 bp, Probe sequence
gtcaggcatggattacaactcctta

SEQ ID NO: 257725 - DNA, 25 bp, Probe sequence
gtgattggtttcttaagttctactt

SEQ ID NO: 257726 - DNA, 25 bp, Probe sequence
ggtgttaagtcaggcatggattaca

SEQ ID NO: 257727 - DNA, 25 bp, Probe sequence
ggattacaactccttatgctgcaaa

SEQ ID NO: 257728 - DNA, 25 bp, Probe sequence
tgattttaagaattccatccactct

SEQ ID NO: 257729 - DNA, 25 bp, Probe sequence
tactatctgatgtagcaccagcttc

SEQ ID NO: 257730 - DNA, 25 bp, Probe sequence
tccactcttttgctaatttactatc

SEQ ID NO: 257731 - DNA, 25 bp, Probe sequence
tctacttctttaattacttttacag

SEQ ID NO: 257732 - DNA, 25 bp, Probe sequence
taagaattccatccactcttttgct

SEQ ID NO: 257733 - DNA, 25 bp, Probe sequence
tatgctgcaaagtggtattctttta

SEQ ID NO: 257734 - DNA, 25 bp, Probe sequence
ttaatatttctttagctttatctga

SEQ ID NO: 257735 - DNA, 25 bp, Probe sequence
ttccatccactcttttgctaattta

SEQ ID NO: 257736 - DNA, 25 bp, Probe sequence
atactgcaaagagggagccaacaac

SEQ ID NO: 257737 - DNA, 25 bp, Probe sequence
agagggagccaacaacaaaaccaat

SEQ ID NO: 257738 - DNA, 25 bp, Probe sequence
atgaaacgaaccacatcacgatatt

SEQ ID NO: 257739 - DNA, 25 bp, Probe sequence
agggagccaacaacaaaaccaatga

SEQ ID NO: 257740 - DNA, 25 bp, Probe sequence
acgaaccacatcacgatattagttg

SEQ ID NO: 257741 - DNA, 25 bp, Probe sequence
actgcaaagagggagccaacaacaa

SEQ ID NO: 257742 - DNA, 25 bp, Probe sequence
actactaatgaaacgaaccacatca

SEQ ID NO: 257743 - DNA, 25 bp, Probe sequence
actaatgaaacgaaccacatcacga

SEQ ID NO: 257744 - DNA, 25 bp, Probe sequence
acaacaaaaccaatgattaatgcaa

SEQ ID NO: 257745 - DNA, 25 bp, Probe sequence
aaacgaaccacatcacgatattagt

SEQ ID NO: 257746 - DNA, 25 bp, Probe sequence
aaaaccaatgattaatgcaaaagtc

SEQ ID NO: 257747 - DNA, 25 bp, Probe sequence
aacgaaccacatcacgatattagtt

SEQ ID NO: 257748 - DNA, 25 bp, Probe sequence
aatgaaacgaaccacatcacgatat

SEQ ID NO: 257749 - DNA, 25 bp, Probe sequence
aatactgcaaagagggagccaacaa

SEQ ID NO: 257750 - DNA, 25 bp, Probe sequence
aatactactaatgaaacgaaccaca

SEQ ID NO: 257751 - DNA, 25 bp, Probe sequence
cacgatattagttggtaaacctgga

SEQ ID NO: 257752 - DNA, 25 bp, Probe sequence
cacatcacgatattagttggtaaac

SEQ ID NO: 257753 - DNA, 25 bp, Probe sequence
catcacgatattagttggtaaacct

SEQ ID NO: 257754 - DNA, 25 bp, Probe sequence
cgaaccacatcacgatattagttgg

SEQ ID NO: 257755 - DNA, 25 bp, Probe sequence
gccaacaacaaaaccaatgattaat

SEQ ID NO: 257756 - DNA, 25 bp, Probe sequence
gcaaagagggagccaacaacaaaac

SEQ ID NO: 257757 - DNA, 25 bp, Probe sequence
gaaccacatcacgatattagttggt

SEQ ID NO: 257758 - DNA, 25 bp, Probe sequence
gaaacgaaccacatcacgatattag

SEQ ID NO: 257759 - DNA, 25 bp, Probe sequence
gaaatactgcaaagagggagccaac

SEQ ID NO: 257760 - DNA, 25 bp, Probe sequence
gagccaacaacaaaaccaatgatta

SEQ ID NO: 257761 - DNA, 25 bp, Probe sequence
gagggagccaacaacaaaaccaatg

SEQ ID NO: 257762 - DNA, 25 bp, Probe sequence
gataaatactactaatgaaacgaac

SEQ ID NO: 257763 - DNA, 25 bp, Probe sequence
gttggtaaacctggaaatactgcaa

SEQ ID NO: 257764 - DNA, 25 bp, Probe sequence
gtaaacctggaaatactgcaaagag

SEQ ID NO: 257765 - DNA, 25 bp, Probe sequence
gggagccaacaacaaaaccaatgat

SEQ ID NO: 257766 - DNA, 25 bp, Probe sequence
ggagccaacaacaaaaccaatgatt

SEQ ID NO: 257767 - DNA, 25 bp, Probe sequence
tggtaaacctggaaatactgcaaag

SEQ ID NO: 257768 - DNA, 25 bp, Probe sequence
tgaaacgaaccacatcacgatatta

SEQ ID NO: 257769 - DNA, 25 bp, Probe sequence
taatgaaacgaaccacatcacgata

SEQ ID NO: 257770 - DNA, 25 bp, Probe sequence
attatgctaatttgcgatgcagcta

SEQ ID NO: 257771 - DNA, 25 bp, Probe sequence
atttgcgatgcagctattataagga

SEQ ID NO: 257772 - DNA, 25 bp, Probe sequence
atgctaatttgcgatgcagctatta

SEQ ID NO: 257773 - DNA, 25 bp, Probe sequence
atgcagctattataaggacagagtt

SEQ ID NO: 257774 - DNA, 25 bp, Probe sequence
aggacagagttgtttatgaattgtg

SEQ ID NO: 257775 - DNA, 25 bp, Probe sequence
agagttgtttatgaattgtggtgat

SEQ ID NO: 257776 - DNA, 25 bp, Probe sequence
agctattataaggacagagttgttt

SEQ ID NO: 257777 - DNA, 25 bp, Probe sequence
actgctgtttttaattatgctaatt

SEQ ID NO: 257778 - DNA, 25 bp, Probe sequence
acagagttgtttatgaattgtggtg

SEQ ID NO: 257779 - DNA, 25 bp, Probe sequence
aatttgcgatgcagctattataagg

SEQ ID NO: 257780 - DNA, 25 bp, Probe sequence
aattatgctaatttgcgatgcagct

SEQ ID NO: 257781 - DNA, 25 bp, Probe sequence
cagctattataaggacagagttgtt

SEQ ID NO: 257782 - DNA, 25 bp, Probe sequence
cagagttgtttatgaattgtggtga

SEQ ID NO: 257783 - DNA, 25 bp, Probe sequence
ctaatttgcgatgcagctattataa

SEQ ID NO: 257784 - DNA, 25 bp, Probe sequence
ctgctgtttttaattatgctaattt

SEQ ID NO: 257785 - DNA, 25 bp, Probe sequence
cgatgcagctattataaggacagag

SEQ ID NO: 257786 - DNA, 25 bp, Probe sequence
gcgatgcagctattataaggacaga

SEQ ID NO: 257787 - DNA, 25 bp, Probe sequence
gctgtttttaattatgctaatttgc

SEQ ID NO: 257788 - DNA, 25 bp, Probe sequence
gctaatttgcgatgcagctattata

SEQ ID NO: 257789 - DNA, 25 bp, Probe sequence
gctattataaggacagagttgttta

SEQ ID NO: 257790 - DNA, 25 bp, Probe sequence
gcagctattataaggacagagttgt

SEQ ID NO: 257791 - DNA, 25 bp, Probe sequence
gacagagttgtttatgaattgtggt

SEQ ID NO: 257792 - DNA, 25 bp, Probe sequence
gagttgtttatgaattgtggtgatt

SEQ ID NO: 257793 - DNA, 25 bp, Probe sequence
gatgcagctattataaggacagagt

SEQ ID NO: 257794 - DNA, 25 bp, Probe sequence
ggacagagttgtttatgaattgtgg

SEQ ID NO: 257795 - DNA, 25 bp, Probe sequence
tgcagctattataaggacagagttg

SEQ ID NO: 257796 - DNA, 25 bp, Probe sequence
tgctaatttgcgatgcagctattat

SEQ ID NO: 257797 - DNA, 25 bp, Probe sequence
tgcgatgcagctattataaggacag

SEQ ID NO: 257798 - DNA, 25 bp, Probe sequence
taattatgctaatttgcgatgcagc

SEQ ID NO: 257799 - DNA, 25 bp, Probe sequence
taatttgcgatgcagctattataag

SEQ ID NO: 257800 - DNA, 25 bp, Probe sequence
tatgctaatttgcgatgcagctatt

SEQ ID NO: 257801 - DNA, 25 bp, Probe sequence
tttgcgatgcagctattataaggac

SEQ ID NO: 257802 - DNA, 25 bp, Probe sequence
ttatgctaatttgcgatgcagctat

SEQ ID NO: 257803 - DNA, 25 bp, Probe sequence
ttgcgatgcagctattataaggaca

SEQ ID NO: 257804 - DNA, 25 bp, Probe sequence
attagctttttcaactttagcattt

SEQ ID NO: 257805 - DNA, 25 bp, Probe sequence
atttggcgtttttgatgcattggat

SEQ ID NO: 257806 - DNA, 25 bp, Probe sequence
atgatttagcatttgttgtttttga

SEQ ID NO: 257807 - DNA, 25 bp, Probe sequence
atgtacgtttctctattttactatt

SEQ ID NO: 257808 - DNA, 25 bp, Probe sequence
agctttttcaactttagcatttggc

SEQ ID NO: 257809 - DNA, 25 bp, Probe sequence
acgtttctctattttactattagct

SEQ ID NO: 257810 - DNA, 25 bp, Probe sequence
actattagctttttcaactttagca

SEQ ID NO: 257811 - DNA, 25 bp, Probe sequence
actttagcatttggcgtttttgatg

SEQ ID NO: 257812 - DNA, 25 bp, Probe sequence
aatgtacgtttctctattttactat

SEQ ID NO: 257813 - DNA, 25 bp, Probe sequence
caactttagcatttggcgtttttga

SEQ ID NO: 257814 - DNA, 25 bp, Probe sequence
catttggcgtttttgatgcattgga

SEQ ID NO: 257815 - DNA, 25 bp, Probe sequence
ctttttcaactttagcatttggcgt

SEQ ID NO: 257816 - DNA, 25 bp, Probe sequence
gcattggatgatttagcatttgttg

SEQ ID NO: 257817 - DNA, 25 bp, Probe sequence
gcatttgttgtttttgaattcttat

SEQ ID NO: 257818 - DNA, 25 bp, Probe sequence
gaatgtacgtttctctattttacta

SEQ ID NO: 257819 - DNA, 25 bp, Probe sequence
gatttagcatttgttgtttttgaat

SEQ ID NO: 257820 - DNA, 25 bp, Probe sequence
gtttttgatgcattggatgatttag

SEQ ID NO: 257821 - DNA, 25 bp, Probe sequence
gtttctctattttactattagcttt

SEQ ID NO: 257822 - DNA, 25 bp, Probe sequence
gtacgtttctctattttactattag

SEQ ID NO: 257823 - DNA, 25 bp, Probe sequence
ggatgatttagcatttgttgttttt

SEQ ID NO: 257824 - DNA, 25 bp, Probe sequence
ggcgtttttgatgcattggatgatt

SEQ ID NO: 257825 - DNA, 25 bp, Probe sequence
tgtacgtttctctattttactatta

SEQ ID NO: 257826 - DNA, 25 bp, Probe sequence
tgtttttgaattcttattactagtt

SEQ ID NO: 257827 - DNA, 25 bp, Probe sequence
tgttgtttttgaattcttattacta

SEQ ID NO: 257828 - DNA, 25 bp, Probe sequence
tctctattttactattagctttttc

SEQ ID NO: 257829 - DNA, 25 bp, Probe sequence
tctattttactattagctttttcaa

SEQ ID NO: 257830 - DNA, 25 bp, Probe sequence
tagcatttggcgtttttgatgcatt

SEQ ID NO: 257831 - DNA, 25 bp, Probe sequence
tagcatttgttgtttttgaattctt

SEQ ID NO: 257832 - DNA, 25 bp, Probe sequence
tattttactattagctttttcaact

SEQ ID NO: 257833 - DNA, 25 bp, Probe sequence
ttttcaactttagcatttggcgttt

SEQ ID NO: 257834 - DNA, 25 bp, Probe sequence
ttactattagctttttcaactttag

SEQ ID NO: 257835 - DNA, 25 bp, Probe sequence
ttcaactttagcatttggcgttttt

SEQ ID NO: 257836 - DNA, 25 bp, Probe sequence
ttgaatgtacgtttctctattttac

SEQ ID NO: 257837 - DNA, 25 bp, Probe sequence
ttggcgtttttgatgcattggatga

SEQ ID NO: 257838 - DNA, 25 bp, Probe sequence
agaaagaacaaggtcaacgagtcag

SEQ ID NO: 257839 - DNA, 25 bp, Probe sequence
agaacaaggtcaacgagtcagaaaa

SEQ ID NO: 257840 - DNA, 25 bp, Probe sequence
agaacaagaaagaacaaggtcaacg

SEQ ID NO: 257841 - DNA, 25 bp, Probe sequence
agcagataacttttttatttgcacg

SEQ ID NO: 257842 - DNA, 25 bp, Probe sequence
aacaagaaagaacaaggtcaacgag

SEQ ID NO: 257843 - DNA, 25 bp, Probe sequence
acaagaaagaacaaggtcaacgagt

SEQ ID NO: 257844 - DNA, 25 bp, Probe sequence
acaaggtcaacgagtcagaaaaact

SEQ ID NO: 257845 - DNA, 25 bp, Probe sequence
aaagaacaaggtcaacgagtcagaa

SEQ ID NO: 257846 - DNA, 25 bp, Probe sequence
aaagcagataacttttttatttgca

SEQ ID NO: 257847 - DNA, 25 bp, Probe sequence
aagcagataacttttttatttgcac

SEQ ID NO: 257848 - DNA, 25 bp, Probe sequence
aagaaagaacaaggtcaacgagtca

SEQ ID NO: 257849 - DNA, 25 bp, Probe sequence
aagaacaaggtcaacgagtcagaaa

SEQ ID NO: 257850 - DNA, 25 bp, Probe sequence
caaggtcaacgagtcagaaaaactt

SEQ ID NO: 257851 - DNA, 25 bp, Probe sequence
caagaaagaacaaggtcaacgagtc

SEQ ID NO: 257852 - DNA, 25 bp, Probe sequence
cagataacttttttatttgcacgtt

SEQ ID NO: 257853 - DNA, 25 bp, Probe sequence
cgagtcagaaaaactttttcttgat

SEQ ID NO: 257854 - DNA, 25 bp, Probe sequence
gcagataacttttttatttgcacgt

SEQ ID NO: 257855 - DNA, 25 bp, Probe sequence
gaacaaggtcaacgagtcagaaaaa

SEQ ID NO: 257856 - DNA, 25 bp, Probe sequence
gaacaagaaagaacaaggtcaacga

SEQ ID NO: 257857 - DNA, 25 bp, Probe sequence
gaaagaacaaggtcaacgagtcaga

SEQ ID NO: 257858 - DNA, 25 bp, Probe sequence
gagtcagaaaaactttttcttgata

SEQ ID NO: 257859 - DNA, 25 bp, Probe sequence
gtcagaaaaactttttcttgatacg

SEQ ID NO: 257860 - DNA, 25 bp, Probe sequence
tgcacgttttattttagaacaagaa

SEQ ID NO: 257861 - DNA, 25 bp, Probe sequence
tcagaaaaactttttcttgatacgt

SEQ ID NO: 257862 - DNA, 25 bp, Probe sequence
tcaacgagtcagaaaaactttttct

SEQ ID NO: 257863 - DNA, 25 bp, Probe sequence
tttgcacgttttattttagaacaag

SEQ ID NO: 257864 - DNA, 25 bp, Probe sequence
ttgcacgttttattttagaacaaga

SEQ ID NO: 257865 - DNA, 25 bp, Probe sequence
atacatgcaccgagcgcaagcaaaa

SEQ ID NO: 257866 - DNA, 25 bp, Probe sequence
atgcaccgagcgcaagcaaaaaagc

SEQ ID NO: 257867 - DNA, 25 bp, Probe sequence
caccgagcgcaagcaaaaaagcccc

SEQ ID NO: 257868 - DNA, 25 bp, Probe sequence
accgagcgcaagcaaaaaagcccct

SEQ ID NO: 257869 - DNA, 25 bp, Probe sequence
aggaagaagagggatacatgcaccg

SEQ ID NO: 257870 - DNA, 25 bp, Probe sequence
agaagagggatacatgcaccgagca

SEQ ID NO: 257871 - DNA, 25 bp, Probe sequence
agcgcaagcaaaaaagcccctaaca

SEQ ID NO: 257872 - DNA, 25 bp, Probe sequence
acatgcgccgagcacatgcaaaaaa

SEQ ID NO: 257873 - DNA, 25 bp, Probe sequence
acatgcaccgagcgcaagcaaaaaa

SEQ ID NO: 257874 - DNA, 25 bp, Probe sequence
aagaagagggatacatgcaccgagc

SEQ ID NO: 257875 - DNA, 25 bp, Probe sequence
aaggaagaagagggatacatgcacc

SEQ ID NO: 257876 - DNA, 25 bp, Probe sequence
catgcgccgagcacatgcaaaaaag

SEQ ID NO: 257877 - DNA, 25 bp, Probe sequence
catgcaccgagcgcaagcaaaaaag

SEQ ID NO: 257878 - DNA, 25 bp, Probe sequence
cgagcgcaagcaaaaaagcccctaa

SEQ ID NO: 257879 - DNA, 25 bp, Probe sequence
ccgagcgcaagcaaaaaagccccta

SEQ ID NO: 257880 - DNA, 25 bp, Probe sequence
gcgcaagcaaaaaagcccctaacaa

SEQ ID NO: 257881 - DNA, 25 bp, Probe sequence
gcaccgagcgcaagcaaaaaagccc

SEQ ID NO: 257882 - DNA, 25 bp, Probe sequence
gaagagggatacatgcaccgagcac

SEQ ID NO: 257883 - DNA, 25 bp, Probe sequence
gaagaagagggatacatgcaccgag

SEQ ID NO: 257884 - DNA, 25 bp, Probe sequence
gagcgcaagcaaaaaagcccctaac

SEQ ID NO: 257885 - DNA, 25 bp, Probe sequence
ggaagaagagggatacatgcaccga

SEQ ID NO: 257886 - DNA, 25 bp, Probe sequence
tgcaccgagcgcaagcaaaaaagcc

SEQ ID NO: 257887 - DNA, 25 bp, Probe sequence
taaggaagaagagggatacatgcac

SEQ ID NO: 257888 - DNA, 25 bp, Probe sequence
tacatgcaccgagcgcaagcaaaaa

SEQ ID NO: 257889 - DNA, 25 bp, Probe sequence
tacatgcgccgagcacatgcaaaaa

SEQ ID NO: 257890 - DNA, 25 bp, Probe sequence
atttgctttttcatgcaagtaaaga

SEQ ID NO: 257891 - DNA, 25 bp, Probe sequence
atgcggggcatttatcgagtagatt

SEQ ID NO: 257892 - DNA, 25 bp, Probe sequence
atgtatggagatgcggggcatttat

SEQ ID NO: 257893 - DNA, 25 bp, Probe sequence
atgtaggtgatttgctttttcatgc

SEQ ID NO: 257894 - DNA, 25 bp, Probe sequence
atggagatgcggggcatttatcgag

SEQ ID NO: 257895 - DNA, 25 bp, Probe sequence
aggtgatttgctttttcatgcaagt

SEQ ID NO: 257896 - DNA, 25 bp, Probe sequence
agatgcggggcatttatcgagtaga

SEQ ID NO: 257897 - DNA, 25 bp, Probe sequence
agagcatgtaggtgatttgcttttt

SEQ ID NO: 257898 - DNA, 25 bp, Probe sequence
acaattagagcatgtaggtgatttg

SEQ ID NO: 257899 - DNA, 25 bp, Probe sequence
cggggcatttatcgagtagattaca

SEQ ID NO: 257900 - DNA, 25 bp, Probe sequence
cgagtagattacaattagagcatgt

SEQ ID NO: 257901 - DNA, 25 bp, Probe sequence
gcggggcatttatcgagtagattac

SEQ ID NO: 257902 - DNA, 25 bp, Probe sequence
gcatttatcgagtagattacaatta

SEQ ID NO: 257903 - DNA, 25 bp, Probe sequence
gcatgtaggtgatttgctttttcat

SEQ ID NO: 257904 - DNA, 25 bp, Probe sequence
gagcatgtaggtgatttgctttttc

SEQ ID NO: 257905 - DNA, 25 bp, Probe sequence
gagatgcggggcatttatcgagtag

SEQ ID NO: 257906 - DNA, 25 bp, Probe sequence
gatgcggggcatttatcgagtagat

SEQ ID NO: 257907 - DNA, 25 bp, Probe sequence
gatttgctttttcatgcaagtaaag

SEQ ID NO: 257908 - DNA, 25 bp, Probe sequence
gtatggagatgcggggcatttatcg

SEQ ID NO: 257909 - DNA, 25 bp, Probe sequence
gtaggtgatttgctttttcatgcaa

SEQ ID NO: 257910 - DNA, 25 bp, Probe sequence
gtgatttgctttttcatgcaagtaa

SEQ ID NO: 257911 - DNA, 25 bp, Probe sequence
gggcatttatcgagtagattacaat

SEQ ID NO: 257912 - DNA, 25 bp, Probe sequence
ggggcatttatcgagtagattacaa

SEQ ID NO: 257913 - DNA, 25 bp, Probe sequence
ggtgatttgctttttcatgcaagta

SEQ ID NO: 257914 - DNA, 25 bp, Probe sequence
ggagatgcggggcatttatcgagta

SEQ ID NO: 257915 - DNA, 25 bp, Probe sequence
ggcatttatcgagtagattacaatt

SEQ ID NO: 257916 - DNA, 25 bp, Probe sequence
tggagatgcggggcatttatcgagt

SEQ ID NO: 257917 - DNA, 25 bp, Probe sequence
tgtaggtgatttgctttttcatgca

SEQ ID NO: 257918 - DNA, 25 bp, Probe sequence
tgatttgctttttcatgcaagtaaa

SEQ ID NO: 257919 - DNA, 25 bp, Probe sequence
tgcggggcatttatcgagtagatta

SEQ ID NO: 257920 - DNA, 25 bp, Probe sequence
taggtgatttgctttttcatgcaag

SEQ ID NO: 257921 - DNA, 25 bp, Probe sequence
tatggagatgcggggcatttatcga

SEQ ID NO: 257922 - DNA, 25 bp, Probe sequence
tatcgagtagattacaattagagca

SEQ ID NO: 257923 - DNA, 25 bp, Probe sequence
ttgctttttcatgcaagtaaagata

SEQ ID NO: 257924 - DNA, 25 bp, Probe sequence
atttactttcatcctgctgaaaaag

SEQ ID NO: 257925 - DNA, 25 bp, Probe sequence
atatttactttcatcctgctgaaaa

SEQ ID NO: 257926 - DNA, 25 bp, Probe sequence
ataatatttactttcatcctgctga

SEQ ID NO: 257927 - DNA, 25 bp, Probe sequence
atgagaatgtgtctttcaggtagct

SEQ ID NO: 257928 - DNA, 25 bp, Probe sequence
atgtgtctttcaggtagctcatttg

SEQ ID NO: 257929 - DNA, 25 bp, Probe sequence
aggatgagaatgtgtctttcaggta

SEQ ID NO: 257930 - DNA, 25 bp, Probe sequence
aggtagctcatttgatgataacctt

SEQ ID NO: 257931 - DNA, 25 bp, Probe sequence
agaatgtgtctttcaggtagctcat

SEQ ID NO: 257932 - DNA, 25 bp, Probe sequence
acataatatttactttcatcctgct

SEQ ID NO: 257933 - DNA, 25 bp, Probe sequence
aagatgatattgagggaaggatgag

SEQ ID NO: 257934 - DNA, 25 bp, Probe sequence
aatgtgtctttcaggtagctcattt

SEQ ID NO: 257935 - DNA, 25 bp, Probe sequence
aatatttactttcatcctgctgaaa

SEQ ID NO: 257936 - DNA, 25 bp, Probe sequence
cataatatttactttcatcctgctg

SEQ ID NO: 257937 - DNA, 25 bp, Probe sequence
ctttcaggtagctcatttgatgata

SEQ ID NO: 257938 - DNA, 25 bp, Probe sequence
gctcatttgatgataaccttaaaca

SEQ ID NO: 257939 - DNA, 25 bp, Probe sequence
gaaggatgagaatgtgtctttcagg

SEQ ID NO: 257940 - DNA, 25 bp, Probe sequence
gaatgtgtctttcaggtagctcatt

SEQ ID NO: 257941 - DNA, 25 bp, Probe sequence
gagaatgtgtctttcaggtagctca

SEQ ID NO: 257942 - DNA, 25 bp, Probe sequence
gatgataaccttaaacataatattt

SEQ ID NO: 257943 - DNA, 25 bp, Probe sequence
gatgagaatgtgtctttcaggtagc

SEQ ID NO: 257944 - DNA, 25 bp, Probe sequence
gtctttcaggtagctcatttgatga

SEQ ID NO: 257945 - DNA, 25 bp, Probe sequence
gtgtctttcaggtagctcatttgat

SEQ ID NO: 257946 - DNA, 25 bp, Probe sequence
gggaaggatgagaatgtgtctttca

SEQ ID NO: 257947 - DNA, 25 bp, Probe sequence
ggatgagaatgtgtctttcaggtag

SEQ ID NO: 257948 - DNA, 25 bp, Probe sequence
tgtgtctttcaggtagctcatttga

SEQ ID NO: 257949 - DNA, 25 bp, Probe sequence
tgtctttcaggtagctcatttgatg

SEQ ID NO: 257950 - DNA, 25 bp, Probe sequence
tgagaatgtgtctttcaggtagctc

SEQ ID NO: 257951 - DNA, 25 bp, Probe sequence
tgaaaaagaggttacagtttcaagc

SEQ ID NO: 257952 - DNA, 25 bp, Probe sequence
tcctgctgaaaaagaggttacagtt

SEQ ID NO: 257953 - DNA, 25 bp, Probe sequence
tctttcaggtagctcatttgatgat

SEQ ID NO: 257954 - DNA, 25 bp, Probe sequence
tcatttgatgataaccttaaacata

SEQ ID NO: 257955 - DNA, 25 bp, Probe sequence
tcaggtagctcatttgatgataacc

SEQ ID NO: 257956 - DNA, 25 bp, Probe sequence
taatatttactttcatcctgctgaa

SEQ ID NO: 257957 - DNA, 25 bp, Probe sequence
tatttactttcatcctgctgaaaaa

SEQ ID NO: 257958 - DNA, 25 bp, Probe sequence
atattaatggtgagcagtttttaaa

SEQ ID NO: 257959 - DNA, 25 bp, Probe sequence
ataatattaatggtgagcagttttt

SEQ ID NO: 257960 - DNA, 25 bp, Probe sequence
atcaagtctgggaagtcaatagaaa

SEQ ID NO: 257961 - DNA, 25 bp, Probe sequence
aggccaaccgaattttcagttagat

SEQ ID NO: 257962 - DNA, 25 bp, Probe sequence
agtcaaaggccaaccgaattttcag

SEQ ID NO: 257963 - DNA, 25 bp, Probe sequence
agcaatcaagtctgggaagtcaata

SEQ ID NO: 257964 - DNA, 25 bp, Probe sequence
accgaattttcagttagatataata

SEQ ID NO: 257965 - DNA, 25 bp, Probe sequence
aaagcaatcaagtctgggaagtcaa

SEQ ID NO: 257966 - DNA, 25 bp, Probe sequence
aaaagcaatcaagtctgggaagtca

SEQ ID NO: 257967 - DNA, 25 bp, Probe sequence
aaaaagcaatcaagtctgggaagtc

SEQ ID NO: 257968 - DNA, 25 bp, Probe sequence
caaccgaattttcagttagatataa

SEQ ID NO: 257969 - DNA, 25 bp, Probe sequence
aaccgaattttcagttagatataat

SEQ ID NO: 257970 - DNA, 25 bp, Probe sequence
aagcaatcaagtctgggaagtcaat

SEQ ID NO: 257971 - DNA, 25 bp, Probe sequence
aatattaatggtgagcagtttttaa

SEQ ID NO: 257972 - DNA, 25 bp, Probe sequence
ccgaattttcagttagatataatat

SEQ ID NO: 257973 - DNA, 25 bp, Probe sequence
ccaaccgaattttcagttagatata

SEQ ID NO: 257974 - DNA, 25 bp, Probe sequence
gccaaccgaattttcagttagatat

SEQ ID NO: 257975 - DNA, 25 bp, Probe sequence
gcaatcaagtctgggaagtcaatag

SEQ ID NO: 257976 - DNA, 25 bp, Probe sequence
gaattttcagttagatataatatta

SEQ ID NO: 257977 - DNA, 25 bp, Probe sequence
gaaaaagcaatcaagtctgggaagt

SEQ ID NO: 257978 - DNA, 25 bp, Probe sequence
gatataatattaatggtgagcagtt

SEQ ID NO: 257979 - DNA, 25 bp, Probe sequence
gtcaaaggccaaccgaattttcagt

SEQ ID NO: 257980 - DNA, 25 bp, Probe sequence
gtctgggaagtcaatagaaaatgtt

SEQ ID NO: 257981 - DNA, 25 bp, Probe sequence
gggaaaaagcaatcaagtctgggaa

SEQ ID NO: 257982 - DNA, 25 bp, Probe sequence
ggaagtcaatagaaaatgttaaagt

SEQ ID NO: 257983 - DNA, 25 bp, Probe sequence
ggaaaaagcaatcaagtctgggaag

SEQ ID NO: 257984 - DNA, 25 bp, Probe sequence
ggccaaccgaattttcagttagata

SEQ ID NO: 257985 - DNA, 25 bp, Probe sequence
tagtcaaaggccaaccgaattttca

SEQ ID NO: 257986 - DNA, 25 bp, Probe sequence
tcaaaggccaaccgaattttcagtt

SEQ ID NO: 257987 - DNA, 25 bp, Probe sequence
tcaagtctgggaagtcaatagaaaa

SEQ ID NO: 257988 - DNA, 25 bp, Probe sequence
taatagtcaaaggccaaccgaattt

SEQ ID NO: 257989 - DNA, 25 bp, Probe sequence
taatattaatggtgagcagttttta

SEQ ID NO: 257990 - DNA, 25 bp, Probe sequence
taatggtgagcagtttttaaaaaat

SEQ ID NO: 257991 - DNA, 25 bp, Probe sequence
tattaatggtgagcagtttttaaaa

SEQ ID NO: 257992 - DNA, 25 bp, Probe sequence
attacgatgaaaatcaccaatacaa

SEQ ID NO: 257993 - DNA, 25 bp, Probe sequence
atattacgatgaaaatcaccaatac

SEQ ID NO: 257994 - DNA, 25 bp, Probe sequence
atcagtgtaagaaaagcattcatga

SEQ ID NO: 257995 - DNA, 25 bp, Probe sequence
atgaaaatcaccaatacaataatat

SEQ ID NO: 257996 - DNA, 25 bp, Probe sequence
atgtttgcgagccatcatgtgcaat

SEQ ID NO: 257997 - DNA, 25 bp, Probe sequence
atgtgcaatattacgatgaaaatca

SEQ ID NO: 257998 - DNA, 25 bp, Probe sequence
agaaaagcattcatgaacgtcactc

SEQ ID NO: 257999 - DNA, 25 bp, Probe sequence
agccatcatgtgcaatattacgatg

SEQ ID NO: 258000 - DNA, 25 bp, Probe sequence
aaagcattcatgaacgtcactcctc

SEQ ID NO: 258001 - DNA, 25 bp, Probe sequence
aaaagcattcatgaacgtcactcct

SEQ ID NO: 258002 - DNA, 25 bp, Probe sequence
aagaaaagcattcatgaacgtcact

SEQ ID NO: 258003 - DNA, 25 bp, Probe sequence
aatcaccaatacaataatattaatc

SEQ ID NO: 258004 - DNA, 25 bp, Probe sequence
caatattacgatgaaaatcaccaat

SEQ ID NO: 258005 - DNA, 25 bp, Probe sequence
catcatgtgcaatattacgatgaaa

SEQ ID NO: 258006 - DNA, 25 bp, Probe sequence
cgagccatcatgtgcaatattacga

SEQ ID NO: 258007 - DNA, 25 bp, Probe sequence
ccatcatgtgcaatattacgatgaa

SEQ ID NO: 258008 - DNA, 25 bp, Probe sequence
gccatcatgtgcaatattacgatga

SEQ ID NO: 258009 - DNA, 25 bp, Probe sequence
gcgagccatcatgtgcaatattacg

SEQ ID NO: 258010 - DNA, 25 bp, Probe sequence
gcaatattacgatgaaaatcaccaa

SEQ ID NO: 258011 - DNA, 25 bp, Probe sequence
gaaaatcaccaatacaataatatta

SEQ ID NO: 258012 - DNA, 25 bp, Probe sequence
gaaaagcattcatgaacgtcactcc

SEQ ID NO: 258013 - DNA, 25 bp, Probe sequence
gagccatcatgtgcaatattacgat

SEQ ID NO: 258014 - DNA, 25 bp, Probe sequence
gatgaaaatcaccaatacaataata

SEQ ID NO: 258015 - DNA, 25 bp, Probe sequence
gtttgcgagccatcatgtgcaatat

SEQ ID NO: 258016 - DNA, 25 bp, Probe sequence
gtaagaaaagcattcatgaacgtca

SEQ ID NO: 258017 - DNA, 25 bp, Probe sequence
gtgcaatattacgatgaaaatcacc

SEQ ID NO: 258018 - DNA, 25 bp, Probe sequence
tgtttgcgagccatcatgtgcaata

SEQ ID NO: 258019 - DNA, 25 bp, Probe sequence
tgcgagccatcatgtgcaatattac

SEQ ID NO: 258020 - DNA, 25 bp, Probe sequence
taagaaaagcattcatgaacgtcac

SEQ ID NO: 258021 - DNA, 25 bp, Probe sequence
tacgatgaaaatcaccaatacaata

SEQ ID NO: 258022 - DNA, 25 bp, Probe sequence
tattacgatgaaaatcaccaataca

SEQ ID NO: 258023 - DNA, 25 bp, Probe sequence
tttgcgagccatcatgtgcaatatt

SEQ ID NO: 258024 - DNA, 25 bp, Probe sequence
ttacgatgaaaatcaccaatacaat

SEQ ID NO: 258025 - DNA, 25 bp, Probe sequence
ttgcgagccatcatgtgcaatatta

SEQ ID NO: 258026 - DNA, 25 bp, Probe sequence
attggcgtaccaatttctttatgtt

SEQ ID NO: 258027 - DNA, 25 bp, Probe sequence
atatctgtagaaattggcgtaccaa

SEQ ID NO: 258028 - DNA, 25 bp, Probe sequence
atgtgatgaaatgatgggagttata

SEQ ID NO: 258029 - DNA, 25 bp, Probe sequence
aagattgtagagcctacgatttgga

SEQ ID NO: 258030 - DNA, 25 bp, Probe sequence
aatgatgggagttatatctgtagaa

SEQ ID NO: 258031 - DNA, 25 bp, Probe sequence
ctgggatcggtttcctattcttatt

SEQ ID NO: 258032 - DNA, 25 bp, Probe sequence
cctgggatcggtttcctattcttat

SEQ ID NO: 258033 - DNA, 25 bp, Probe sequence
gcctacgatttggattttatgtcct

SEQ ID NO: 258034 - DNA, 25 bp, Probe sequence
gcgattggtatgggcaacatcatgt

SEQ ID NO: 258035 - DNA, 25 bp, Probe sequence
gattttatgtcctgggatcggtttc

SEQ ID NO: 258036 - DNA, 25 bp, Probe sequence
gagcctacgatttggattttatgtc

SEQ ID NO: 258037 - DNA, 25 bp, Probe sequence
gatcggtttcctattcttattaaat

SEQ ID NO: 258038 - DNA, 25 bp, Probe sequence
gatttggattttatgtcctgggatc

SEQ ID NO: 258039 - DNA, 25 bp, Probe sequence
gattggtatgggcaacatcatgtga

SEQ ID NO: 258040 - DNA, 25 bp, Probe sequence
gtgcgattggtatgggcaacatcat

SEQ ID NO: 258041 - DNA, 25 bp, Probe sequence
ggtgcgattggtatgggcaacatca

SEQ ID NO: 258042 - DNA, 25 bp, Probe sequence
ggtatgggcaacatcatgtgatgaa

SEQ ID NO: 258043 - DNA, 25 bp, Probe sequence
ggattttatgtcctgggatcggttt

SEQ ID NO: 258044 - DNA, 25 bp, Probe sequence
tggcgtaccaatttctttatgttgg

SEQ ID NO: 258045 - DNA, 25 bp, Probe sequence
tggtgcgattggtatgggcaacatc

SEQ ID NO: 258046 - DNA, 25 bp, Probe sequence
tggattttatgtcctgggatcggtt

SEQ ID NO: 258047 - DNA, 25 bp, Probe sequence
tgggatcggtttcctattcttatta

SEQ ID NO: 258048 - DNA, 25 bp, Probe sequence
tgtagagcctacgatttggatttta

SEQ ID NO: 258049 - DNA, 25 bp, Probe sequence
tcctgggatcggtttcctattctta

SEQ ID NO: 258050 - DNA, 25 bp, Probe sequence
tcggtttcctattcttattaaatag

SEQ ID NO: 258051 - DNA, 25 bp, Probe sequence
tatgtcctgggatcggtttcctatt

SEQ ID NO: 258052 - DNA, 25 bp, Probe sequence
tacgatttggattttatgtcctggg

SEQ ID NO: 258053 - DNA, 25 bp, Probe sequence
tagagcctacgatttggattttatg

SEQ ID NO: 258054 - DNA, 25 bp, Probe sequence
tttatgtcctgggatcggtttccta

SEQ ID NO: 258055 - DNA, 25 bp, Probe sequence
ttatgtcctgggatcggtttcctat

SEQ ID NO: 258056 - DNA, 25 bp, Probe sequence
tttggattttatgtcctgggatcgg

SEQ ID NO: 258057 - DNA, 25 bp, Probe sequence
ttttatgtcctgggatcggtttcct

SEQ ID NO: 258058 - DNA, 25 bp, Probe sequence
ttggcgtaccaatttctttatgttg

SEQ ID NO: 258059 - DNA, 25 bp, Probe sequence
ttggtatgggcaacatcatgtgatg

SEQ ID NO: 258060 - DNA, 25 bp, Probe sequence
atttcatttgcgttagttaaaggtg

SEQ ID NO: 258061 - DNA, 25 bp, Probe sequence
agtgaaccaatagcttttgtgattt

SEQ ID NO: 258062 - DNA, 25 bp, Probe sequence
acagacgttaataaaacggcagtca

SEQ ID NO: 258063 - DNA, 25 bp, Probe sequence
aacggcagtcaagactagtgaacca

SEQ ID NO: 258064 - DNA, 25 bp, Probe sequence
aaccaatagcttttgtgattttcat

SEQ ID NO: 258065 - DNA, 25 bp, Probe sequence
aagactagtgaaccaatagcttttg

SEQ ID NO: 258066 - DNA, 25 bp, Probe sequence
cattatacatttatctcctttaata

SEQ ID NO: 258067 - DNA, 25 bp, Probe sequence
ctagtgaaccaatagcttttgtgat

SEQ ID NO: 258068 - DNA, 25 bp, Probe sequence
ctgtatttcatttgcgttagttaaa

SEQ ID NO: 258069 - DNA, 25 bp, Probe sequence
gcgttagttaaaggtgaaacagacg

SEQ ID NO: 258070 - DNA, 25 bp, Probe sequence
gaatttgcaaaaccaaatgtttgaa

SEQ ID NO: 258071 - DNA, 25 bp, Probe sequence
gaaccaatagcttttgtgattttca

SEQ ID NO: 258072 - DNA, 25 bp, Probe sequence
gactagtgaaccaatagcttttgtg

SEQ ID NO: 258073 - DNA, 25 bp, Probe sequence
gattttcattatacatttatctcct

SEQ ID NO: 258074 - DNA, 25 bp, Probe sequence
gttaataaaacggcagtcaagacta

SEQ ID NO: 258075 - DNA, 25 bp, Probe sequence
gtatttcatttgcgttagttaaagg

SEQ ID NO: 258076 - DNA, 25 bp, Probe sequence
gtttgtctgtatttcatttgcgtta

SEQ ID NO: 258077 - DNA, 25 bp, Probe sequence
gtcaagactagtgaaccaatagctt

SEQ ID NO: 258078 - DNA, 25 bp, Probe sequence
gtctgtatttcatttgcgttagtta

SEQ ID NO: 258079 - DNA, 25 bp, Probe sequence
gtgattttcattatacatttatctc

SEQ ID NO: 258080 - DNA, 25 bp, Probe sequence
ggcagtcaagactagtgaaccaata

SEQ ID NO: 258081 - DNA, 25 bp, Probe sequence
tgtctgtatttcatttgcgttagtt

SEQ ID NO: 258082 - DNA, 25 bp, Probe sequence
tgtttgtctgtatttcatttgcgtt

SEQ ID NO: 258083 - DNA, 25 bp, Probe sequence
tgaaccaatagcttttgtgattttc

SEQ ID NO: 258084 - DNA, 25 bp, Probe sequence
tctgtatttcatttgcgttagttaa

SEQ ID NO: 258085 - DNA, 25 bp, Probe sequence
tctcctttaatagtgaatttgcaaa

SEQ ID NO: 258086 - DNA, 25 bp, Probe sequence
tcatttgcgttagttaaaggtgaaa

SEQ ID NO: 258087 - DNA, 25 bp, Probe sequence
tatctcctttaatagtgaatttgca

SEQ ID NO: 258088 - DNA, 25 bp, Probe sequence
tttgtctgtatttcatttgcgttag

SEQ ID NO: 258089 - DNA, 25 bp, Probe sequence
tttcattatacatttatctccttta

SEQ ID NO: 258090 - DNA, 25 bp, Probe sequence
ttttcattatacatttatctccttt

SEQ ID NO: 258091 - DNA, 25 bp, Probe sequence
ttcattatacatttatctcctttaa

SEQ ID NO: 258092 - DNA, 25 bp, Probe sequence
ttgtctgtatttcatttgcgttagt

SEQ ID NO: 258093 - DNA, 25 bp, Probe sequence
ttgtttgtctgtatttcatttgcgt

SEQ ID NO: 258094 - DNA, 25 bp, Probe sequence
atgccacttaacacaattattaaaa

SEQ ID NO: 258095 - DNA, 25 bp, Probe sequence
atgaagtgactgtttgtaagaaccc

SEQ ID NO: 258096 - DNA, 25 bp, Probe sequence
atgaaagaagtccaagctaatacaa

SEQ ID NO: 258097 - DNA, 25 bp, Probe sequence
agtccaagctaatacaagtgaacat

SEQ ID NO: 258098 - DNA, 25 bp, Probe sequence
agtactaatgaagtgactgtttgta

SEQ ID NO: 258099 - DNA, 25 bp, Probe sequence
agaagtccaagctaatacaagtgaa

SEQ ID NO: 258100 - DNA, 25 bp, Probe sequence
actaatgaagtgactgtttgtaaga

SEQ ID NO: 258101 - DNA, 25 bp, Probe sequence
actatgaaagaagtccaagctaata

SEQ ID NO: 258102 - DNA, 25 bp, Probe sequence
acaagtgaacatattaaaagtacta

SEQ ID NO: 258103 - DNA, 25 bp, Probe sequence
aaagtactaatgaagtgactgtttg

SEQ ID NO: 258104 - DNA, 25 bp, Probe sequence
aaagaagtccaagctaatacaagtg

SEQ ID NO: 258105 - DNA, 25 bp, Probe sequence
aaaagtactaatgaagtgactgttt

SEQ ID NO: 258106 - DNA, 25 bp, Probe sequence
aactatgaaagaagtccaagctaat

SEQ ID NO: 258107 - DNA, 25 bp, Probe sequence
aagaagtccaagctaatacaagtga

SEQ ID NO: 258108 - DNA, 25 bp, Probe sequence
aagtactaatgaagtgactgtttgt

SEQ ID NO: 258109 - DNA, 25 bp, Probe sequence
aagtccaagctaatacaagtgaaca

SEQ ID NO: 258110 - DNA, 25 bp, Probe sequence
aatgaagtgactgtttgtaagaacc

SEQ ID NO: 258111 - DNA, 25 bp, Probe sequence
ctatgaaagaagtccaagctaatac

SEQ ID NO: 258112 - DNA, 25 bp, Probe sequence
ccaagctaatacaagtgaacatatt

SEQ ID NO: 258113 - DNA, 25 bp, Probe sequence
gccacttaacacaattattaaaagt

SEQ ID NO: 258114 - DNA, 25 bp, Probe sequence
gaagtgactgtttgtaagaacccaa

SEQ ID NO: 258115 - DNA, 25 bp, Probe sequence
gaagtccaagctaatacaagtgaac

SEQ ID NO: 258116 - DNA, 25 bp, Probe sequence
gaaagaagtccaagctaatacaagt

SEQ ID NO: 258117 - DNA, 25 bp, Probe sequence
gtactaatgaagtgactgtttgtaa

SEQ ID NO: 258118 - DNA, 25 bp, Probe sequence
gtaactatgaaagaagtccaagcta

SEQ ID NO: 258119 - DNA, 25 bp, Probe sequence
gtccaagctaatacaagtgaacata

SEQ ID NO: 258120 - DNA, 25 bp, Probe sequence
tgactgtttgtaagaacccaaaaag

SEQ ID NO: 258121 - DNA, 25 bp, Probe sequence
tgaaagaagtccaagctaatacaag

SEQ ID NO: 258122 - DNA, 25 bp, Probe sequence
tgaagtgactgtttgtaagaaccca

SEQ ID NO: 258123 - DNA, 25 bp, Probe sequence
tgccacttaacacaattattaaaag

SEQ ID NO: 258124 - DNA, 25 bp, Probe sequence
tccaagctaatacaagtgaacatat

SEQ ID NO: 258125 - DNA, 25 bp, Probe sequence
taactatgaaagaagtccaagctaa

SEQ ID NO: 258126 - DNA, 25 bp, Probe sequence
tactaatgaagtgactgtttgtaag

SEQ ID NO: 258127 - DNA, 25 bp, Probe sequence
tatgaaagaagtccaagctaataca

SEQ ID NO: 258128 - DNA, 25 bp, Probe sequence
attattatgcgctgggaaacgccac

SEQ ID NO: 258129 - DNA, 25 bp, Probe sequence
attgttagagattattatgcgctgg

SEQ ID NO: 258130 - DNA, 25 bp, Probe sequence
attatgcgctgggaaacgccactgt

SEQ ID NO: 258131 - DNA, 25 bp, Probe sequence
agattattatgcgctgggaaacgcc

SEQ ID NO: 258132 - DNA, 25 bp, Probe sequence
agattgttagagattattatgcgct

SEQ ID NO: 258133 - DNA, 25 bp, Probe sequence
agagattattatgcgctgggaaacg

SEQ ID NO: 258134 - DNA, 25 bp, Probe sequence
aaacgccactgttacagtggaagag

SEQ ID NO: 258135 - DNA, 25 bp, Probe sequence
acgccactgttacagtggaagagga

SEQ ID NO: 258136 - DNA, 25 bp, Probe sequence
actgttacagtggaagaggaatttg

SEQ ID NO: 258137 - DNA, 25 bp, Probe sequence
aacgccactgttacagtggaagagg

SEQ ID NO: 258138 - DNA, 25 bp, Probe sequence
aagattgttagagattattatgcgc

SEQ ID NO: 258139 - DNA, 25 bp, Probe sequence
ctgggaaacgccactgttacagtgg

SEQ ID NO: 258140 - DNA, 25 bp, Probe sequence
ctgttacagtggaagaggaatttgg

SEQ ID NO: 258141 - DNA, 25 bp, Probe sequence
cgctgggaaacgccactgttacagt

SEQ ID NO: 258142 - DNA, 25 bp, Probe sequence
gctgggaaacgccactgttacagtg

SEQ ID NO: 258143 - DNA, 25 bp, Probe sequence
gaaacgccactgttacagtggaaga

SEQ ID NO: 258144 - DNA, 25 bp, Probe sequence
gggaaacgccactgttacagtggaa

SEQ ID NO: 258145 - DNA, 25 bp, Probe sequence
gagattattatgcgctgggaaacgc

SEQ ID NO: 258146 - DNA, 25 bp, Probe sequence
gagtcgttaatttatttaaatctat

SEQ ID NO: 258147 - DNA, 25 bp, Probe sequence
gattattatgcgctgggaaacgcca

SEQ ID NO: 258148 - DNA, 25 bp, Probe sequence
gattgttagagattattatgcgctg

SEQ ID NO: 258149 - DNA, 25 bp, Probe sequence
gttagagattattatgcgctgggaa

SEQ ID NO: 258150 - DNA, 25 bp, Probe sequence
ggaaacgccactgttacagtggaag

SEQ ID NO: 258151 - DNA, 25 bp, Probe sequence
tgggaaacgccactgttacagtgga

SEQ ID NO: 258152 - DNA, 25 bp, Probe sequence
tgttagagattattatgcgctggga

SEQ ID NO: 258153 - DNA, 25 bp, Probe sequence
tgttacagtggaagaggaatttgga

SEQ ID NO: 258154 - DNA, 25 bp, Probe sequence
tgcgctgggaaacgccactgttaca

SEQ ID NO: 258155 - DNA, 25 bp, Probe sequence
tagagattattatgcgctgggaaac

SEQ ID NO: 258156 - DNA, 25 bp, Probe sequence
tatgcgctgggaaacgccactgtta

SEQ ID NO: 258157 - DNA, 25 bp, Probe sequence
tattatgcgctgggaaacgccactg

SEQ ID NO: 258158 - DNA, 25 bp, Probe sequence
ttatgcgctgggaaacgccactgtt

SEQ ID NO: 258159 - DNA, 25 bp, Probe sequence
ttattatgcgctgggaaacgccact

SEQ ID NO: 258160 - DNA, 25 bp, Probe sequence
ttagagattattatgcgctgggaaa

SEQ ID NO: 258161 - DNA, 25 bp, Probe sequence
ttgttagagattattatgcgctggg

SEQ ID NO: 258162 - DNA, 25 bp, Probe sequence
attccttaatttacttaataatgat

SEQ ID NO: 258163 - DNA, 25 bp, Probe sequence
atttacttaataatgattcaatgat

SEQ ID NO: 258164 - DNA, 25 bp, Probe sequence
atttaacgaacattatagattcctt

SEQ ID NO: 258165 - DNA, 25 bp, Probe sequence
atcagttttatttaacgaacattat

SEQ ID NO: 258166 - DNA, 25 bp, Probe sequence
agattccttaatttacttaataatg

SEQ ID NO: 258167 - DNA, 25 bp, Probe sequence
agcacaacggaatcagttttattta

SEQ ID NO: 258168 - DNA, 25 bp, Probe sequence
acgaacattatagattccttaattt

SEQ ID NO: 258169 - DNA, 25 bp, Probe sequence
acattatagattccttaatttactt

SEQ ID NO: 258170 - DNA, 25 bp, Probe sequence
aacattatagattccttaatttact

SEQ ID NO: 258171 - DNA, 25 bp, Probe sequence
aacgaacattatagattccttaatt

SEQ ID NO: 258172 - DNA, 25 bp, Probe sequence
cagttttatttaacgaacattatag

SEQ ID NO: 258173 - DNA, 25 bp, Probe sequence
cattatagattccttaatttactta

SEQ ID NO: 258174 - DNA, 25 bp, Probe sequence
cgaacattatagattccttaattta

SEQ ID NO: 258175 - DNA, 25 bp, Probe sequence
gcacaacggaatcagttttatttaa

SEQ ID NO: 258176 - DNA, 25 bp, Probe sequence
gaatcagttttatttaacgaacatt

SEQ ID NO: 258177 - DNA, 25 bp, Probe sequence
gaacattatagattccttaatttac

SEQ ID NO: 258178 - DNA, 25 bp, Probe sequence
gagcacaacggaatcagttttattt

SEQ ID NO: 258179 - DNA, 25 bp, Probe sequence
gattcaatgattattaaacatggtt

SEQ ID NO: 258180 - DNA, 25 bp, Probe sequence
gattccttaatttacttaataatga

SEQ ID NO: 258181 - DNA, 25 bp, Probe sequence
gtgtggagcacaacggaatcagttt

SEQ ID NO: 258182 - DNA, 25 bp, Probe sequence
gtggagcacaacggaatcagtttta

SEQ ID NO: 258183 - DNA, 25 bp, Probe sequence
ggagcacaacggaatcagttttatt

SEQ ID NO: 258184 - DNA, 25 bp, Probe sequence
ggaatcagttttatttaacgaacat

SEQ ID NO: 258185 - DNA, 25 bp, Probe sequence
tggagcacaacggaatcagttttat

SEQ ID NO: 258186 - DNA, 25 bp, Probe sequence
tgtggagcacaacggaatcagtttt

SEQ ID NO: 258187 - DNA, 25 bp, Probe sequence
tcagttttatttaacgaacattata

SEQ ID NO: 258188 - DNA, 25 bp, Probe sequence
taacgaacattatagattccttaat

SEQ ID NO: 258189 - DNA, 25 bp, Probe sequence
tagattccttaatttacttaataat

SEQ ID NO: 258190 - DNA, 25 bp, Probe sequence
tatagattccttaatttacttaata

SEQ ID NO: 258191 - DNA, 25 bp, Probe sequence
tttaacgaacattatagattcctta

SEQ ID NO: 258192 - DNA, 25 bp, Probe sequence
ttatagattccttaatttacttaat

SEQ ID NO: 258193 - DNA, 25 bp, Probe sequence
ttaacgaacattatagattccttaa

SEQ ID NO: 258194 - DNA, 25 bp, Probe sequence
ttaatttacttaataatgattcaat

SEQ ID NO: 258195 - DNA, 25 bp, Probe sequence
ttcaatgattattaaacatggttta

SEQ ID NO: 258196 - DNA, 25 bp, Probe sequence
atcatggcgattaagttacactata

SEQ ID NO: 258197 - DNA, 25 bp, Probe sequence
atgatgggttcgcaatgttagattg

SEQ ID NO: 258198 - DNA, 25 bp, Probe sequence
atgggttcgcaatgttagattggac

SEQ ID NO: 258199 - DNA, 25 bp, Probe sequence
atggcgattaagttacactataatg

SEQ ID NO: 258200 - DNA, 25 bp, Probe sequence
agatccaaatgatgggttcgcaatg

SEQ ID NO: 258201 - DNA, 25 bp, Probe sequence
agaacgtcacacattgacttacaca

SEQ ID NO: 258202 - DNA, 25 bp, Probe sequence
acgtcacacattgacttacacaagt

SEQ ID NO: 258203 - DNA, 25 bp, Probe sequence
aaatgatgggttcgcaatgttagat

SEQ ID NO: 258204 - DNA, 25 bp, Probe sequence
aacgtcacacattgacttacacaag

SEQ ID NO: 258205 - DNA, 25 bp, Probe sequence
aatgatgggttcgcaatgttagatt

SEQ ID NO: 258206 - DNA, 25 bp, Probe sequence
aatgttagaacgtcacacattgact

SEQ ID NO: 258207 - DNA, 25 bp, Probe sequence
caaatgatgggttcgcaatgttaga

SEQ ID NO: 258208 - DNA, 25 bp, Probe sequence
cactataatgttagaacgtcacaca

SEQ ID NO: 258209 - DNA, 25 bp, Probe sequence
catcatggcgattaagttacactat

SEQ ID NO: 258210 - DNA, 25 bp, Probe sequence
ccaaatgatgggttcgcaatgttag

SEQ ID NO: 258211 - DNA, 25 bp, Probe sequence
gcaatgttagattggacatcatggc

SEQ ID NO: 258212 - DNA, 25 bp, Probe sequence
gaacgtcacacattgacttacacaa

SEQ ID NO: 258213 - DNA, 25 bp, Probe sequence
gacatcatggcgattaagttacact

SEQ ID NO: 258214 - DNA, 25 bp, Probe sequence
gatccaaatgatgggttcgcaatgt

SEQ ID NO: 258215 - DNA, 25 bp, Probe sequence
gatgggttcgcaatgttagattgga

SEQ ID NO: 258216 - DNA, 25 bp, Probe sequence
gattggacatcatggcgattaagtt

SEQ ID NO: 258217 - DNA, 25 bp, Probe sequence
gttcgcaatgttagattggacatca

SEQ ID NO: 258218 - DNA, 25 bp, Probe sequence
gttacactataatgttagaacgtca

SEQ ID NO: 258219 - DNA, 25 bp, Probe sequence
gttagaacgtcacacattgacttac

SEQ ID NO: 258220 - DNA, 25 bp, Probe sequence
gttagattggacatcatggcgatta

SEQ ID NO: 258221 - DNA, 25 bp, Probe sequence
gtcacacattgacttacacaagttt

SEQ ID NO: 258222 - DNA, 25 bp, Probe sequence
gggttcgcaatgttagattggacat

SEQ ID NO: 258223 - DNA, 25 bp, Probe sequence
ggacatcatggcgattaagttacac

SEQ ID NO: 258224 - DNA, 25 bp, Probe sequence
ggcgattaagttacactataatgtt

SEQ ID NO: 258225 - DNA, 25 bp, Probe sequence
tccaaatgatgggttcgcaatgtta

SEQ ID NO: 258226 - DNA, 25 bp, Probe sequence
tcacacattgacttacacaagttta

SEQ ID NO: 258227 - DNA, 25 bp, Probe sequence
tagaacgtcacacattgacttacac

SEQ ID NO: 258228 - DNA, 25 bp, Probe sequence
tagattggacatcatggcgattaag

SEQ ID NO: 258229 - DNA, 25 bp, Probe sequence
ttggacatcatggcgattaagttac

SEQ ID NO: 258230 - DNA, 25 bp, Probe sequence
attgatttatgactcaggcacatca

SEQ ID NO: 258231 - DNA, 25 bp, Probe sequence
atttatgactcaggcacatcaaatg

SEQ ID NO: 258232 - DNA, 25 bp, Probe sequence
atatcattgtagagtttaggaaatt

SEQ ID NO: 258233 - DNA, 25 bp, Probe sequence
atcattgtagagtttaggaaattga

SEQ ID NO: 258234 - DNA, 25 bp, Probe sequence
atgactcaggcacatcaaatgagaa

SEQ ID NO: 258235 - DNA, 25 bp, Probe sequence
agtcaactacgaccaatatatcatt

SEQ ID NO: 258236 - DNA, 25 bp, Probe sequence
agttattcagtcaactacgaccaat

SEQ ID NO: 258237 - DNA, 25 bp, Probe sequence
aaattgatttatgactcaggcacat

SEQ ID NO: 258238 - DNA, 25 bp, Probe sequence
aacaagttttgatatttataatggt

SEQ ID NO: 258239 - DNA, 25 bp, Probe sequence
aagttttgatatttataatggtagt

SEQ ID NO: 258240 - DNA, 25 bp, Probe sequence
aatggtagtagttattcagtcaact

SEQ ID NO: 258241 - DNA, 25 bp, Probe sequence
aattgatttatgactcaggcacatc

SEQ ID NO: 258242 - DNA, 25 bp, Probe sequence
caactacgaccaatatatcattgta

SEQ ID NO: 258243 - DNA, 25 bp, Probe sequence
cagtcaactacgaccaatatatcat

SEQ ID NO: 258244 - DNA, 25 bp, Probe sequence
ctggaagatgtgtttatttataaaa

SEQ ID NO: 258245 - DNA, 25 bp, Probe sequence
gaaattgatttatgactcaggcaca

SEQ ID NO: 258246 - DNA, 25 bp, Probe sequence
gactcaggcacatcaaatgagaaga

SEQ ID NO: 258247 - DNA, 25 bp, Probe sequence
gatttatgactcaggcacatcaaat

SEQ ID NO: 258248 - DNA, 25 bp, Probe sequence
gttattcagtcaactacgaccaata

SEQ ID NO: 258249 - DNA, 25 bp, Probe sequence
gtagttattcagtcaactacgacca

SEQ ID NO: 258250 - DNA, 25 bp, Probe sequence
gtcaactacgaccaatatatcattg

SEQ ID NO: 258251 - DNA, 25 bp, Probe sequence
ggtagtagttattcagtcaactacg

SEQ ID NO: 258252 - DNA, 25 bp, Probe sequence
ggaaattgatttatgactcaggcac

SEQ ID NO: 258253 - DNA, 25 bp, Probe sequence
ggcacatcaaatgagaagatttata

SEQ ID NO: 258254 - DNA, 25 bp, Probe sequence
tgatttatgactcaggcacatcaaa

SEQ ID NO: 258255 - DNA, 25 bp, Probe sequence
tcaggcacatcaaatgagaagattt

SEQ ID NO: 258256 - DNA, 25 bp, Probe sequence
tcaactacgaccaatatatcattgt

SEQ ID NO: 258257 - DNA, 25 bp, Probe sequence
taatggtagtagttattcagtcaac

SEQ ID NO: 258258 - DNA, 25 bp, Probe sequence
tagttattcagtcaactacgaccaa

SEQ ID NO: 258259 - DNA, 25 bp, Probe sequence
tatgactcaggcacatcaaatgaga

SEQ ID NO: 258260 - DNA, 25 bp, Probe sequence
ttatgactcaggcacatcaaatgag

SEQ ID NO: 258261 - DNA, 25 bp, Probe sequence
tttatgactcaggcacatcaaatga

SEQ ID NO: 258262 - DNA, 25 bp, Probe sequence
ttattcagtcaactacgaccaatat

SEQ ID NO: 258263 - DNA, 25 bp, Probe sequence
ttgatttatgactcaggcacatcaa

SEQ ID NO: 258264 - DNA, 25 bp, Probe sequence
attgtatatcactgggtcgaatgga

SEQ ID NO: 258265 - DNA, 25 bp, Probe sequence
attcctcagtacattccaagaaaat

SEQ ID NO: 258266 - DNA, 25 bp, Probe sequence
attcaaactattattgtgttcaatg

SEQ ID NO: 258267 - DNA, 25 bp, Probe sequence
atttttatcagtatgattcctcagt

SEQ ID NO: 258268 - DNA, 25 bp, Probe sequence
atatcactgggtcgaatggataatg

SEQ ID NO: 258269 - DNA, 25 bp, Probe sequence
atcagtatgattcctcagtacattc

SEQ ID NO: 258270 - DNA, 25 bp, Probe sequence
atgattcctcagtacattccaagaa

SEQ ID NO: 258271 - DNA, 25 bp, Probe sequence
agtatgattcctcagtacattccaa

SEQ ID NO: 258272 - DNA, 25 bp, Probe sequence
agaaattgtatatcactgggtcgaa

SEQ ID NO: 258273 - DNA, 25 bp, Probe sequence
agcatttttatcagtatgattcctc

SEQ ID NO: 258274 - DNA, 25 bp, Probe sequence
acattccaagaaaattgtatattgc

SEQ ID NO: 258275 - DNA, 25 bp, Probe sequence
acaaatccaaagcatttttatcagt

SEQ ID NO: 258276 - DNA, 25 bp, Probe sequence
aaattcaaactattattgtgttcaa

SEQ ID NO: 258277 - DNA, 25 bp, Probe sequence
aatccaaagcatttttatcagtatg

SEQ ID NO: 258278 - DNA, 25 bp, Probe sequence
aattgtatatcactgggtcgaatgg

SEQ ID NO: 258279 - DNA, 25 bp, Probe sequence
caaactattattgtgttcaatgtga

SEQ ID NO: 258280 - DNA, 25 bp, Probe sequence
cagtatgattcctcagtacattcca

SEQ ID NO: 258281 - DNA, 25 bp, Probe sequence
gcatttttatcagtatgattcctca

SEQ ID NO: 258282 - DNA, 25 bp, Probe sequence
gaaaattgtatattgcagaaattgt

SEQ ID NO: 258283 - DNA, 25 bp, Probe sequence
gaaagtacaaatccaaagcattttt

SEQ ID NO: 258284 - DNA, 25 bp, Probe sequence
gaaattgtatatcactgggtcgaat

SEQ ID NO: 258285 - DNA, 25 bp, Probe sequence
gattcctcagtacattccaagaaaa

SEQ ID NO: 258286 - DNA, 25 bp, Probe sequence
gttcaatgtgaaagtacaaatccaa

SEQ ID NO: 258287 - DNA, 25 bp, Probe sequence
gtatatcactgggtcgaatggataa

SEQ ID NO: 258288 - DNA, 25 bp, Probe sequence
gtatgattcctcagtacattccaag

SEQ ID NO: 258289 - DNA, 25 bp, Probe sequence
gtacaaatccaaagcatttttatca

SEQ ID NO: 258290 - DNA, 25 bp, Probe sequence
tgattcctcagtacattccaagaaa

SEQ ID NO: 258291 - DNA, 25 bp, Probe sequence
tcctcagtacattccaagaaaattg

SEQ ID NO: 258292 - DNA, 25 bp, Probe sequence
tccaaagcatttttatcagtatgat

SEQ ID NO: 258293 - DNA, 25 bp, Probe sequence
tcagtatgattcctcagtacattcc

SEQ ID NO: 258294 - DNA, 25 bp, Probe sequence
tatgattcctcagtacattccaaga

SEQ ID NO: 258295 - DNA, 25 bp, Probe sequence
tatcagtatgattcctcagtacatt

SEQ ID NO: 258296 - DNA, 25 bp, Probe sequence
ttatcagtatgattcctcagtacat

SEQ ID NO: 258297 - DNA, 25 bp, Probe sequence
ttgtatatcactgggtcgaatggat

SEQ ID NO: 258298 - DNA, 25 bp, Probe sequence
atagaagaattggtggaaaccatta

SEQ ID NO: 258299 - DNA, 25 bp, Probe sequence
atacggagagaaagaatatagcgcc

SEQ ID NO: 258300 - DNA, 25 bp, Probe sequence
atgcatatgttttaaaagaacgttc

SEQ ID NO: 258301 - DNA, 25 bp, Probe sequence
atgatgtggatgcatatgttttaaa

SEQ ID NO: 258302 - DNA, 25 bp, Probe sequence
atgtggatgcatatgttttaaaaga

SEQ ID NO: 258303 - DNA, 25 bp, Probe sequence
agaagaattggtggaaaccattaat

SEQ ID NO: 258304 - DNA, 25 bp, Probe sequence
agaacgttctatagaagaattggtg

SEQ ID NO: 258305 - DNA, 25 bp, Probe sequence
acgttctatagaagaattggtggaa

SEQ ID NO: 258306 - DNA, 25 bp, Probe sequence
acggagagaaagaatatagcgccac

SEQ ID NO: 258307 - DNA, 25 bp, Probe sequence
aacgttctatagaagaattggtgga

SEQ ID NO: 258308 - DNA, 25 bp, Probe sequence
aagaacgttctatagaagaattggt

SEQ ID NO: 258309 - DNA, 25 bp, Probe sequence
aatgatgtggatgcatatgttttaa

SEQ ID NO: 258310 - DNA, 25 bp, Probe sequence
catatgttttaaaagaacgttctat

SEQ ID NO: 258311 - DNA, 25 bp, Probe sequence
ctatagaagaattggtggaaaccat

SEQ ID NO: 258312 - DNA, 25 bp, Probe sequence
cggagagaaagaatatagcgccaca

SEQ ID NO: 258313 - DNA, 25 bp, Probe sequence
gcatatgttttaaaagaacgttcta

SEQ ID NO: 258314 - DNA, 25 bp, Probe sequence
gaattggtggaaaccattaataaag

SEQ ID NO: 258315 - DNA, 25 bp, Probe sequence
gaatgatgtggatgcatatgtttta

SEQ ID NO: 258316 - DNA, 25 bp, Probe sequence
gaagaattggtggaaaccattaata

SEQ ID NO: 258317 - DNA, 25 bp, Probe sequence
gaacgttctatagaagaattggtgg

SEQ ID NO: 258318 - DNA, 25 bp, Probe sequence
gatgtggatgcatatgttttaaaag

SEQ ID NO: 258319 - DNA, 25 bp, Probe sequence
gatgcatatgttttaaaagaacgtt

SEQ ID NO: 258320 - DNA, 25 bp, Probe sequence
gtgaatgatgtggatgcatatgttt

SEQ ID NO: 258321 - DNA, 25 bp, Probe sequence
gtggatgcatatgttttaaaagaac

SEQ ID NO: 258322 - DNA, 25 bp, Probe sequence
ggatgcatatgttttaaaagaacgt

SEQ ID NO: 258323 - DNA, 25 bp, Probe sequence
ggagagaaagaatatagcgccacat

SEQ ID NO: 258324 - DNA, 25 bp, Probe sequence
tggatgcatatgttttaaaagaacg

SEQ ID NO: 258325 - DNA, 25 bp, Probe sequence
tgtggatgcatatgttttaaaagaa

SEQ ID NO: 258326 - DNA, 25 bp, Probe sequence
tgatgtggatgcatatgttttaaaa

SEQ ID NO: 258327 - DNA, 25 bp, Probe sequence
tgaatgatgtggatgcatatgtttt

SEQ ID NO: 258328 - DNA, 25 bp, Probe sequence
tgcatatgttttaaaagaacgttct

SEQ ID NO: 258329 - DNA, 25 bp, Probe sequence
tctatagaagaattggtggaaacca

SEQ ID NO: 258330 - DNA, 25 bp, Probe sequence
tacggagagaaagaatatagcgcca

SEQ ID NO: 258331 - DNA, 25 bp, Probe sequence
tatgttttaaaagaacgttctatag

SEQ ID NO: 258332 - DNA, 25 bp, Probe sequence
cttactaatggatctccgacgttaa

SEQ ID NO: 258333 - DNA, 25 bp, Probe sequence
attggtgaaattacagatttagcgt

SEQ ID NO: 258334 - DNA, 25 bp, Probe sequence
attacagatttagcgttattattaa

SEQ ID NO: 258335 - DNA, 25 bp, Probe sequence
atcttactaatggatctccgacgtt

SEQ ID NO: 258336 - DNA, 25 bp, Probe sequence
atggatctccgacgttaactcgtca

SEQ ID NO: 258337 - DNA, 25 bp, Probe sequence
aggttgaatcttactaatggatctc

SEQ ID NO: 258338 - DNA, 25 bp, Probe sequence
actaatggatctccgacgttaactc

SEQ ID NO: 258339 - DNA, 25 bp, Probe sequence
aaattacagatttagcgttattatt

SEQ ID NO: 258340 - DNA, 25 bp, Probe sequence
aatggatctccgacgttaactcgtc

SEQ ID NO: 258341 - DNA, 25 bp, Probe sequence
aaggttgaatcttactaatggatct

SEQ ID NO: 258342 - DNA, 25 bp, Probe sequence
aatcttactaatggatctccgacgt

SEQ ID NO: 258343 - DNA, 25 bp, Probe sequence
aattacagatttagcgttattatta

SEQ ID NO: 258344 - DNA, 25 bp, Probe sequence
caaggttgaatcttactaatggatc

SEQ ID NO: 258345 - DNA, 25 bp, Probe sequence
cagatttagcgttattattaatata

SEQ ID NO: 258346 - DNA, 25 bp, Probe sequence
ctaatggatctccgacgttaactcg

SEQ ID NO: 258347 - DNA, 25 bp, Probe sequence
gaatcttactaatggatctccgacg

SEQ ID NO: 258348 - DNA, 25 bp, Probe sequence
gaaattacagatttagcgttattat

SEQ ID NO: 258349 - DNA, 25 bp, Probe sequence
gttgaatcttactaatggatctccg

SEQ ID NO: 258350 - DNA, 25 bp, Probe sequence
gttattattaatatattcaaggttg

SEQ ID NO: 258351 - DNA, 25 bp, Probe sequence
gtgaaattacagatttagcgttatt

SEQ ID NO: 258352 - DNA, 25 bp, Probe sequence
gtgttagtaattataattggtgaaa

SEQ ID NO: 258353 - DNA, 25 bp, Probe sequence
tggatctccgacgttaactcgtcac

SEQ ID NO: 258354 - DNA, 25 bp, Probe sequence
ggatctccgacgttaactcgtcacc

SEQ ID NO: 258355 - DNA, 25 bp, Probe sequence
ggtgaaattacagatttagcgttat

SEQ ID NO: 258356 - DNA, 25 bp, Probe sequence
ggttgaatcttactaatggatctcc

SEQ ID NO: 258357 - DNA, 25 bp, Probe sequence
tgaatcttactaatggatctccgac

SEQ ID NO: 258358 - DNA, 25 bp, Probe sequence
tcttactaatggatctccgacgtta

SEQ ID NO: 258359 - DNA, 25 bp, Probe sequence
tcaaggttgaatcttactaatggat

SEQ ID NO: 258360 - DNA, 25 bp, Probe sequence
taatggatctccgacgttaactcgt

SEQ ID NO: 258361 - DNA, 25 bp, Probe sequence
tacagatttagcgttattattaata

SEQ ID NO: 258362 - DNA, 25 bp, Probe sequence
tactaatggatctccgacgttaact

SEQ ID NO: 258363 - DNA, 25 bp, Probe sequence
ttcaaggttgaatcttactaatgga

SEQ ID NO: 258364 - DNA, 25 bp, Probe sequence
ttactaatggatctccgacgttaac

SEQ ID NO: 258365 - DNA, 25 bp, Probe sequence
ttgaatcttactaatggatctccga

SEQ ID NO: 258366 - DNA, 25 bp, Probe sequence
attcttttaaacatagctcatctcc

SEQ ID NO: 258367 - DNA, 25 bp, Probe sequence
attatcgttgctattaagattagtt

SEQ ID NO: 258368 - DNA, 25 bp, Probe sequence
atcgttgctattaagattagtttaa

SEQ ID NO: 258369 - DNA, 25 bp, Probe sequence
atcctgatagtattatcgttgctat

SEQ ID NO: 258370 - DNA, 25 bp, Probe sequence
agttgaacatcctgatagtattatc

SEQ ID NO: 258371 - DNA, 25 bp, Probe sequence
acatcctgatagtattatcgttgct

SEQ ID NO: 258372 - DNA, 25 bp, Probe sequence
aaacatagctcatctcccatttatg

SEQ ID NO: 258373 - DNA, 25 bp, Probe sequence
aacatcctgatagtattatcgttgc

SEQ ID NO: 258374 - DNA, 25 bp, Probe sequence
aattcttttaaacatagctcatctc

SEQ ID NO: 258375 - DNA, 25 bp, Probe sequence
catcctgatagtattatcgttgcta

SEQ ID NO: 258376 - DNA, 25 bp, Probe sequence
cttttaaacatagctcatctcccat

SEQ ID NO: 258377 - DNA, 25 bp, Probe sequence
ctgatagtattatcgttgctattaa

SEQ ID NO: 258378 - DNA, 25 bp, Probe sequence
cctgatagtattatcgttgctatta

SEQ ID NO: 258379 - DNA, 25 bp, Probe sequence
gctattaagattagtttaattcttt

SEQ ID NO: 258380 - DNA, 25 bp, Probe sequence
gaacatcctgatagtattatcgttg

SEQ ID NO: 258381 - DNA, 25 bp, Probe sequence
gatagtattatcgttgctattaaga

SEQ ID NO: 258382 - DNA, 25 bp, Probe sequence
gttgaacatcctgatagtattatcg

SEQ ID NO: 258383 - DNA, 25 bp, Probe sequence
gtattatcgttgctattaagattag

SEQ ID NO: 258384 - DNA, 25 bp, Probe sequence
gtagttgaacatcctgatagtatta

SEQ ID NO: 258385 - DNA, 25 bp, Probe sequence
ggtagttgaacatcctgatagtatt

SEQ ID NO: 258386 - DNA, 25 bp, Probe sequence
tggtagttgaacatcctgatagtat

SEQ ID NO: 258387 - DNA, 25 bp, Probe sequence
tgaacatcctgatagtattatcgtt

SEQ ID NO: 258388 - DNA, 25 bp, Probe sequence
tcctgatagtattatcgttgctatt

SEQ ID NO: 258389 - DNA, 25 bp, Probe sequence
tcttttaaacatagctcatctccca

SEQ ID NO: 258390 - DNA, 25 bp, Probe sequence
taattcttttaaacatagctcatct

SEQ ID NO: 258391 - DNA, 25 bp, Probe sequence
taaacatagctcatctcccatttat

SEQ ID NO: 258392 - DNA, 25 bp, Probe sequence
tagtattatcgttgctattaagatt

SEQ ID NO: 258393 - DNA, 25 bp, Probe sequence
tatcgttgctattaagattagttta

SEQ ID NO: 258394 - DNA, 25 bp, Probe sequence
tttaaacatagctcatctcccattt

SEQ ID NO: 258395 - DNA, 25 bp, Probe sequence
ttttaaacatagctcatctcccatt

SEQ ID NO: 258396 - DNA, 25 bp, Probe sequence
ttaaacatagctcatctcccattta

SEQ ID NO: 258397 - DNA, 25 bp, Probe sequence
ttaattcttttaaacatagctcatc

SEQ ID NO: 258398 - DNA, 25 bp, Probe sequence
ttcttttaaacatagctcatctccc

SEQ ID NO: 258399 - DNA, 25 bp, Probe sequence
ttggtagttgaacatcctgatagta

SEQ ID NO: 258400 - DNA, 25 bp, Probe sequence
attacttttggcgaataagactgtg

SEQ ID NO: 258401 - DNA, 25 bp, Probe sequence
atatatggtgacacactattcgctg

SEQ ID NO: 258402 - DNA, 25 bp, Probe sequence
atatggtgacacactattcgctgtt

SEQ ID NO: 258403 - DNA, 25 bp, Probe sequence
atcatttgtaatcacctttcgttat

SEQ ID NO: 258404 - DNA, 25 bp, Probe sequence
atgaaagcaattggccaaatattaa

SEQ ID NO: 258405 - DNA, 25 bp, Probe sequence
atgtatcatttgtaatcacctttcg

SEQ ID NO: 258406 - DNA, 25 bp, Probe sequence
agtaaagttatatatggtgacacac

SEQ ID NO: 258407 - DNA, 25 bp, Probe sequence
accagcggacttattaataaaacat

SEQ ID NO: 258408 - DNA, 25 bp, Probe sequence
accttctatctttaaatgtatcatt

SEQ ID NO: 258409 - DNA, 25 bp, Probe sequence
acttttggcgaataagactgtgaaa

SEQ ID NO: 258410 - DNA, 25 bp, Probe sequence
aacaaagaaataccagcggacttat

SEQ ID NO: 258411 - DNA, 25 bp, Probe sequence
aacatacatactgaaagaattttta

SEQ ID NO: 258412 - DNA, 25 bp, Probe sequence
aagaaataccagcggacttattaat

SEQ ID NO: 258413 - DNA, 25 bp, Probe sequence
aatgtatcatttgtaatcacctttc

SEQ ID NO: 258414 - DNA, 25 bp, Probe sequence
aatttgataccttctatctttaaat

SEQ ID NO: 258415 - DNA, 25 bp, Probe sequence
catttgtaatcacctttcgttattt

SEQ ID NO: 258416 - DNA, 25 bp, Probe sequence
cgctgttcccgtattacttttggcg

SEQ ID NO: 258417 - DNA, 25 bp, Probe sequence
gcaaaacaaagaaataccagcggac

SEQ ID NO: 258418 - DNA, 25 bp, Probe sequence
gcaattggccaaatattaaatagta

SEQ ID NO: 258419 - DNA, 25 bp, Probe sequence
gaaataccagcggacttattaataa

SEQ ID NO: 258420 - DNA, 25 bp, Probe sequence
gacttattaataaaacatacatact

SEQ ID NO: 258421 - DNA, 25 bp, Probe sequence
gtattacttttggcgaataagactg

SEQ ID NO: 258422 - DNA, 25 bp, Probe sequence
gtatcatttgtaatcacctttcgtt

SEQ ID NO: 258423 - DNA, 25 bp, Probe sequence
ggcgaataagactgtgaaaatagca

SEQ ID NO: 258424 - DNA, 25 bp, Probe sequence
tgttcccgtattacttttggcgaat

SEQ ID NO: 258425 - DNA, 25 bp, Probe sequence
tgtatcatttgtaatcacctttcgt

SEQ ID NO: 258426 - DNA, 25 bp, Probe sequence
tgataccttctatctttaaatgtat

SEQ ID NO: 258427 - DNA, 25 bp, Probe sequence
tcccgtattacttttggcgaataag

SEQ ID NO: 258428 - DNA, 25 bp, Probe sequence
tcatttgtaatcacctttcgttatt

SEQ ID NO: 258429 - DNA, 25 bp, Probe sequence
taaatttgataccttctatctttaa

SEQ ID NO: 258430 - DNA, 25 bp, Probe sequence
tatggtgacacactattcgctgttc

SEQ ID NO: 258431 - DNA, 25 bp, Probe sequence
tatcatttgtaatcacctttcgtta

SEQ ID NO: 258432 - DNA, 25 bp, Probe sequence
tttgataccttctatctttaaatgt

SEQ ID NO: 258433 - DNA, 25 bp, Probe sequence
ttttaaatttgataccttctatctt

SEQ ID NO: 258434 - DNA, 25 bp, Probe sequence
atcttccaaagaccgcaaactgtag

SEQ ID NO: 258435 - DNA, 25 bp, Probe sequence
atatatatcttccaaagaccgcaaa

SEQ ID NO: 258436 - DNA, 25 bp, Probe sequence
atatatcttccaaagaccgcaaact

SEQ ID NO: 258437 - DNA, 25 bp, Probe sequence
atatcttccaaagaccgcaaactgt

SEQ ID NO: 258438 - DNA, 25 bp, Probe sequence
atgagaaccttgcgtttttgaaatg

SEQ ID NO: 258439 - DNA, 25 bp, Probe sequence
atgatatatatcttccaaagaccgc

SEQ ID NO: 258440 - DNA, 25 bp, Probe sequence
agaaaatgagaaccttgcgtttttg

SEQ ID NO: 258441 - DNA, 25 bp, Probe sequence
agaccgcaaactgtagcagaaaatg

SEQ ID NO: 258442 - DNA, 25 bp, Probe sequence
agcagaaaatgagaaccttgcgttt

SEQ ID NO: 258443 - DNA, 25 bp, Probe sequence
aaagaccgcaaactgtagcagaaaa

SEQ ID NO: 258444 - DNA, 25 bp, Probe sequence
aagaccgcaaactgtagcagaaaat

SEQ ID NO: 258445 - DNA, 25 bp, Probe sequence
aatgagaaccttgcgtttttgaaat

SEQ ID NO: 258446 - DNA, 25 bp, Probe sequence
caaagaccgcaaactgtagcagaaa

SEQ ID NO: 258447 - DNA, 25 bp, Probe sequence
cagaaaatgagaaccttgcgttttt

SEQ ID NO: 258448 - DNA, 25 bp, Probe sequence
cttccaaagaccgcaaactgtagca

SEQ ID NO: 258449 - DNA, 25 bp, Probe sequence
cttgcgtttttgaaatggtctaata

SEQ ID NO: 258450 - DNA, 25 bp, Probe sequence
ccttgcgtttttgaaatggtctaat

SEQ ID NO: 258451 - DNA, 25 bp, Probe sequence
ccaaagaccgcaaactgtagcagaa

SEQ ID NO: 258452 - DNA, 25 bp, Probe sequence
gcagaaaatgagaaccttgcgtttt

SEQ ID NO: 258453 - DNA, 25 bp, Probe sequence
gaaccttgcgtttttgaaatggtct

SEQ ID NO: 258454 - DNA, 25 bp, Probe sequence
gaaaatgagaaccttgcgtttttga

SEQ ID NO: 258455 - DNA, 25 bp, Probe sequence
gagaaccttgcgtttttgaaatggt

SEQ ID NO: 258456 - DNA, 25 bp, Probe sequence
gatatatatcttccaaagaccgcaa

SEQ ID NO: 258457 - DNA, 25 bp, Probe sequence
gtagcagaaaatgagaaccttgcgt

SEQ ID NO: 258458 - DNA, 25 bp, Probe sequence
tgatatatatcttccaaagaccgca

SEQ ID NO: 258459 - DNA, 25 bp, Probe sequence
tgagaaccttgcgtttttgaaatgg

SEQ ID NO: 258460 - DNA, 25 bp, Probe sequence
tgcgtttttgaaatggtctaataaa

SEQ ID NO: 258461 - DNA, 25 bp, Probe sequence
tccaaagaccgcaaactgtagcaga

SEQ ID NO: 258462 - DNA, 25 bp, Probe sequence
tcttccaaagaccgcaaactgtagc

SEQ ID NO: 258463 - DNA, 25 bp, Probe sequence
ttccaaagaccgcaaactgtagcag

SEQ ID NO: 258464 - DNA, 25 bp, Probe sequence
tatcttccaaagaccgcaaactgta

SEQ ID NO: 258465 - DNA, 25 bp, Probe sequence
tatatcttccaaagaccgcaaactg

SEQ ID NO: 258466 - DNA, 25 bp, Probe sequence
tatatatcttccaaagaccgcaaac

SEQ ID NO: 258467 - DNA, 25 bp, Probe sequence
ttgcgtttttgaaatggtctaataa

SEQ ID NO: 258468 - DNA, 25 bp, Probe sequence
attaccactcgttcaagcaattgct

SEQ ID NO: 258469 - DNA, 25 bp, Probe sequence
atacgtttcattaccactcgttcaa

SEQ ID NO: 258470 - DNA, 25 bp, Probe sequence
atgctgctgtatacgtttcattacc

SEQ ID NO: 258471 - DNA, 25 bp, Probe sequence
accactcgttcaagcaattgctaat

SEQ ID NO: 258472 - DNA, 25 bp, Probe sequence
acgtttcattaccactcgttcaagc

SEQ ID NO: 258473 - DNA, 25 bp, Probe sequence
acgatgctgctgtatacgtttcatt

SEQ ID NO: 258474 - DNA, 25 bp, Probe sequence
caagcaattgctaatgtaacctttt

SEQ ID NO: 258475 - DNA, 25 bp, Probe sequence
cactcgttcaagcaattgctaatgt

SEQ ID NO: 258476 - DNA, 25 bp, Probe sequence
cacgatgctgctgtatacgtttcat

SEQ ID NO: 258477 - DNA, 25 bp, Probe sequence
cattaccactcgttcaagcaattgc

SEQ ID NO: 258478 - DNA, 25 bp, Probe sequence
ctgtatacgtttcattaccactcgt

SEQ ID NO: 258479 - DNA, 25 bp, Probe sequence
gctgtatacgtttcattaccactcg

SEQ ID NO: 258480 - DNA, 25 bp, Probe sequence
gctgctgtatacgtttcattaccac

SEQ ID NO: 258481 - DNA, 25 bp, Probe sequence
gcaattgctaatgtaaccttttatt

SEQ ID NO: 258482 - DNA, 25 bp, Probe sequence
gatgctgctgtatacgtttcattac

SEQ ID NO: 258483 - DNA, 25 bp, Probe sequence
gtttttacacgatgctgctgtatac

SEQ ID NO: 258484 - DNA, 25 bp, Probe sequence
gtttcattaccactcgttcaagcaa

SEQ ID NO: 258485 - DNA, 25 bp, Probe sequence
gtttgtattgtttttacacgatgct

SEQ ID NO: 258486 - DNA, 25 bp, Probe sequence
gtattgtttttacacgatgctgctg

SEQ ID NO: 258487 - DNA, 25 bp, Probe sequence
gtatacgtttcattaccactcgttc

SEQ ID NO: 258488 - DNA, 25 bp, Probe sequence
tgctaatgtaaccttttatttttcg

SEQ ID NO: 258489 - DNA, 25 bp, Probe sequence
tgctgtatacgtttcattaccactc

SEQ ID NO: 258490 - DNA, 25 bp, Probe sequence
tcattaccactcgttcaagcaattg

SEQ ID NO: 258491 - DNA, 25 bp, Probe sequence
tacacgatgctgctgtatacgtttc

SEQ ID NO: 258492 - DNA, 25 bp, Probe sequence
tacgtttcattaccactcgttcaag

SEQ ID NO: 258493 - DNA, 25 bp, Probe sequence
taccactcgttcaagcaattgctaa

SEQ ID NO: 258494 - DNA, 25 bp, Probe sequence
tatacgtttcattaccactcgttca

SEQ ID NO: 258495 - DNA, 25 bp, Probe sequence
tttcattaccactcgttcaagcaat

SEQ ID NO: 258496 - DNA, 25 bp, Probe sequence
tattgtttttacacgatgctgctgt

SEQ ID NO: 258497 - DNA, 25 bp, Probe sequence
tttacacgatgctgctgtatacgtt

SEQ ID NO: 258498 - DNA, 25 bp, Probe sequence
ttaccactcgttcaagcaattgcta

SEQ ID NO: 258499 - DNA, 25 bp, Probe sequence
ttcattaccactcgttcaagcaatt

SEQ ID NO: 258500 - DNA, 25 bp, Probe sequence
ttgtttttacacgatgctgctgtat

SEQ ID NO: 258501 - DNA, 25 bp, Probe sequence
ttggttgactttcttttgtttgtat

SEQ ID NO: 258502 - DNA, 25 bp, Probe sequence
attggcagtgatcttttttatattc

SEQ ID NO: 258503 - DNA, 25 bp, Probe sequence
attcaacttattatttatcgcgcac

SEQ ID NO: 258504 - DNA, 25 bp, Probe sequence
attatttatcgcgcactagcgtcag

SEQ ID NO: 258505 - DNA, 25 bp, Probe sequence
atttatcgcgcactagcgtcagcaa

SEQ ID NO: 258506 - DNA, 25 bp, Probe sequence
atcgcgcactagcgtcagcaaaaag

SEQ ID NO: 258507 - DNA, 25 bp, Probe sequence
atgattggcagtgatcttttttata

SEQ ID NO: 258508 - DNA, 25 bp, Probe sequence
agcgtcagcaaaaagccctattatt

SEQ ID NO: 258509 - DNA, 25 bp, Probe sequence
actagcgtcagcaaaaagccctatt

SEQ ID NO: 258510 - DNA, 25 bp, Probe sequence
acttattatttatcgcgcactagcg

SEQ ID NO: 258511 - DNA, 25 bp, Probe sequence
aacttattatttatcgcgcactagc

SEQ ID NO: 258512 - DNA, 25 bp, Probe sequence
caacttattatttatcgcgcactag

SEQ ID NO: 258513 - DNA, 25 bp, Probe sequence
cactagcgtcagcaaaaagccctat

SEQ ID NO: 258514 - DNA, 25 bp, Probe sequence
cagtgatcttttttatattcaactt

SEQ ID NO: 258515 - DNA, 25 bp, Probe sequence
cgtcagcaaaaagccctattatttt

SEQ ID NO: 258516 - DNA, 25 bp, Probe sequence
ctagcgtcagcaaaaagccctatta

SEQ ID NO: 258517 - DNA, 25 bp, Probe sequence
cgcactagcgtcagcaaaaagccct

SEQ ID NO: 258518 - DNA, 25 bp, Probe sequence
cgcgcactagcgtcagcaaaaagcc

SEQ ID NO: 258519 - DNA, 25 bp, Probe sequence
gcgcactagcgtcagcaaaaagccc

SEQ ID NO: 258520 - DNA, 25 bp, Probe sequence
gcgtcagcaaaaagccctattattt

SEQ ID NO: 258521 - DNA, 25 bp, Probe sequence
gcactagcgtcagcaaaaagcccta

SEQ ID NO: 258522 - DNA, 25 bp, Probe sequence
gatcttttttatattcaacttatta

SEQ ID NO: 258523 - DNA, 25 bp, Probe sequence
gtgatcttttttatattcaacttat

SEQ ID NO: 258524 - DNA, 25 bp, Probe sequence
ggcagtgatcttttttatattcaac

SEQ ID NO: 258525 - DNA, 25 bp, Probe sequence
tcagcaaaaagccctattatttttt

SEQ ID NO: 258526 - DNA, 25 bp, Probe sequence
tcaacttattatttatcgcgcacta

SEQ ID NO: 258527 - DNA, 25 bp, Probe sequence
tatttatcgcgcactagcgtcagca

SEQ ID NO: 258528 - DNA, 25 bp, Probe sequence
tatcgcgcactagcgtcagcaaaaa

SEQ ID NO: 258529 - DNA, 25 bp, Probe sequence
tattcaacttattatttatcgcgca

SEQ ID NO: 258530 - DNA, 25 bp, Probe sequence
tttatcgcgcactagcgtcagcaaa

SEQ ID NO: 258531 - DNA, 25 bp, Probe sequence
ttatttatcgcgcactagcgtcagc

SEQ ID NO: 258532 - DNA, 25 bp, Probe sequence
tttttacaagaacatgatactgaaa

SEQ ID NO: 258533 - DNA, 25 bp, Probe sequence
ttattatttatcgcgcactagcgtc

SEQ ID NO: 258534 - DNA, 25 bp, Probe sequence
ttatcgcgcactagcgtcagcaaaa

SEQ ID NO: 258535 - DNA, 25 bp, Probe sequence
ttcaacttattatttatcgcgcact

SEQ ID NO: 258536 - DNA, 25 bp, Probe sequence
atgccatgttactttgatgtgttgt

SEQ ID NO: 258537 - DNA, 25 bp, Probe sequence
atgcgatgtaatggcgtgttgttgt

SEQ ID NO: 258538 - DNA, 25 bp, Probe sequence
atgatgatgcgatgtaatggcgtgt

SEQ ID NO: 258539 - DNA, 25 bp, Probe sequence
atgttactttgatgtgttgttgtgg

SEQ ID NO: 258540 - DNA, 25 bp, Probe sequence
atgtaatggcgtgttgttgtggaag

SEQ ID NO: 258541 - DNA, 25 bp, Probe sequence
atgtgttgttgtggaagcttggtgt

SEQ ID NO: 258542 - DNA, 25 bp, Probe sequence
atggcgtgttgttgtggaagcttgg

SEQ ID NO: 258543 - DNA, 25 bp, Probe sequence
aatggcgtgttgttgtggaagcttg

SEQ ID NO: 258544 - DNA, 25 bp, Probe sequence
catgccatgttactttgatgtgttg

SEQ ID NO: 258545 - DNA, 25 bp, Probe sequence
cgtgttgttgtggaagcttggtgtc

SEQ ID NO: 258546 - DNA, 25 bp, Probe sequence
cgatgtaatggcgtgttgttgtgga

SEQ ID NO: 258547 - DNA, 25 bp, Probe sequence
gccatgttactttgatgtgttgttg

SEQ ID NO: 258548 - DNA, 25 bp, Probe sequence
gcgatgtaatggcgtgttgttgtgg

SEQ ID NO: 258549 - DNA, 25 bp, Probe sequence
gcgtgttgttgtggaagcttggtgt

SEQ ID NO: 258550 - DNA, 25 bp, Probe sequence
gatgtgttgttgtggaagcttggtg

SEQ ID NO: 258551 - DNA, 25 bp, Probe sequence
gatgtaatggcgtgttgttgtggaa

SEQ ID NO: 258552 - DNA, 25 bp, Probe sequence
gatgatgcgatgtaatggcgtgttg

SEQ ID NO: 258553 - DNA, 25 bp, Probe sequence
gatgcgatgtaatggcgtgttgttg

SEQ ID NO: 258554 - DNA, 25 bp, Probe sequence
gttactttgatgtgttgttgtggaa

SEQ ID NO: 258555 - DNA, 25 bp, Probe sequence
gtaatggcgtgttgttgtggaagct

SEQ ID NO: 258556 - DNA, 25 bp, Probe sequence
gtcatgccatgttactttgatgtgt

SEQ ID NO: 258557 - DNA, 25 bp, Probe sequence
gtgtcatgccatgttactttgatgt

SEQ ID NO: 258558 - DNA, 25 bp, Probe sequence
ggtgtcatgccatgttactttgatg

SEQ ID NO: 258559 - DNA, 25 bp, Probe sequence
ggcgtgttgttgtggaagcttggtg

SEQ ID NO: 258560 - DNA, 25 bp, Probe sequence
tggcgtgttgttgtggaagcttggt

SEQ ID NO: 258561 - DNA, 25 bp, Probe sequence
tggtgtcatgccatgttactttgat

SEQ ID NO: 258562 - DNA, 25 bp, Probe sequence
tgtgttgttgtggaagcttggtgtt

SEQ ID NO: 258563 - DNA, 25 bp, Probe sequence
tgtcatgccatgttactttgatgtg

SEQ ID NO: 258564 - DNA, 25 bp, Probe sequence
tgatgcgatgtaatggcgtgttgtt

SEQ ID NO: 258565 - DNA, 25 bp, Probe sequence
tgatgtgttgttgtggaagcttggt

SEQ ID NO: 258566 - DNA, 25 bp, Probe sequence
tcatgccatgttactttgatgtgtt

SEQ ID NO: 258567 - DNA, 25 bp, Probe sequence
taatggcgtgttgttgtggaagctt

SEQ ID NO: 258568 - DNA, 25 bp, Probe sequence
tttgatgtgttgttgtggaagcttg

SEQ ID NO: 258569 - DNA, 25 bp, Probe sequence
ttggtgtcatgccatgttactttga

SEQ ID NO: 258570 - DNA, 25 bp, Probe sequence
cggactgaaaatgttgtttttggcg

SEQ ID NO: 258571 - DNA, 25 bp, Probe sequence
attgttgttttatggcggactgaaa

SEQ ID NO: 258572 - DNA, 25 bp, Probe sequence
ataatttttggatgtcgtgtttagt

SEQ ID NO: 258573 - DNA, 25 bp, Probe sequence
atgagtgatggaggattgattgatg

SEQ ID NO: 258574 - DNA, 25 bp, Probe sequence
atggcggactgaaaatgttgttttt

SEQ ID NO: 258575 - DNA, 25 bp, Probe sequence
aaattgttgttttatggcggactga

SEQ ID NO: 258576 - DNA, 25 bp, Probe sequence
aatggcgatttgaaattgttgtttt

SEQ ID NO: 258577 - DNA, 25 bp, Probe sequence
aataatttttggatgtcgtgtttag

SEQ ID NO: 258578 - DNA, 25 bp, Probe sequence
aatttttggatgtcgtgtttagtca

SEQ ID NO: 258579 - DNA, 25 bp, Probe sequence
aattgttgttttatggcggactgaa

SEQ ID NO: 258580 - DNA, 25 bp, Probe sequence
caataatttttggatgtcgtgttta

SEQ ID NO: 258581 - DNA, 25 bp, Probe sequence
gcggactgaaaatgttgtttttggc

SEQ ID NO: 258582 - DNA, 25 bp, Probe sequence
gagtgatggaggattgattgatgtg

SEQ ID NO: 258583 - DNA, 25 bp, Probe sequence
gatggaggattgattgatgtgaaga

SEQ ID NO: 258584 - DNA, 25 bp, Probe sequence
gatttgaaattgttgttttatggcg

SEQ ID NO: 258585 - DNA, 25 bp, Probe sequence
gattatgagtgatggaggattgatt

SEQ ID NO: 258586 - DNA, 25 bp, Probe sequence
gttacaataatttttggatgtcgtg

SEQ ID NO: 258587 - DNA, 25 bp, Probe sequence
gtttagtcaatggcgatttgaaatt

SEQ ID NO: 258588 - DNA, 25 bp, Probe sequence
gtcaatggcgatttgaaattgttgt

SEQ ID NO: 258589 - DNA, 25 bp, Probe sequence
gtgatggaggattgattgatgtgaa

SEQ ID NO: 258590 - DNA, 25 bp, Probe sequence
gtgattatgagtgatggaggattga

SEQ ID NO: 258591 - DNA, 25 bp, Probe sequence
ggattgattgatgtgaagaattgtt

SEQ ID NO: 258592 - DNA, 25 bp, Probe sequence
ggaggattgattgatgtgaagaatt

SEQ ID NO: 258593 - DNA, 25 bp, Probe sequence
ggcggactgaaaatgttgtttttgg

SEQ ID NO: 258594 - DNA, 25 bp, Probe sequence
ggcgatttgaaattgttgttttatg

SEQ ID NO: 258595 - DNA, 25 bp, Probe sequence
taatttttggatgtcgtgtttagtc

SEQ ID NO: 258596 - DNA, 25 bp, Probe sequence
tacaataatttttggatgtcgtgtt

SEQ ID NO: 258597 - DNA, 25 bp, Probe sequence
tatggcggactgaaaatgttgtttt

SEQ ID NO: 258598 - DNA, 25 bp, Probe sequence
tttggatgtcgtgtttagtcaatgg

SEQ ID NO: 258599 - DNA, 25 bp, Probe sequence
tttatggcggactgaaaatgttgtt

SEQ ID NO: 258600 - DNA, 25 bp, Probe sequence
tttttggatgtcgtgtttagtcaat

SEQ ID NO: 258601 - DNA, 25 bp, Probe sequence
ttttggatgtcgtgtttagtcaatg

SEQ ID NO: 258602 - DNA, 25 bp, Probe sequence
ttgttgttttatggcggactgaaaa

SEQ ID NO: 258603 - DNA, 25 bp, Probe sequence
ttgatgtgaagaattgttacaataa

SEQ ID NO: 258604 - DNA, 25 bp, Probe sequence
atctatgaaactgactcacaaaatg

SEQ ID NO: 258605 - DNA, 25 bp, Probe sequence
atgaaactgactcacaaaatgtcaa

SEQ ID NO: 258606 - DNA, 25 bp, Probe sequence
atgtcaaaactcaagaagaattgtt

SEQ ID NO: 258607 - DNA, 25 bp, Probe sequence
agaagaattgtttactgaatacaaa

SEQ ID NO: 258608 - DNA, 25 bp, Probe sequence
actgactcacaaaatgtcaaaactc

SEQ ID NO: 258609 - DNA, 25 bp, Probe sequence
actcaagaagaattgtttactgaat

SEQ ID NO: 258610 - DNA, 25 bp, Probe sequence
actcacaaaatgtcaaaactcaaga

SEQ ID NO: 258611 - DNA, 25 bp, Probe sequence
acaaaatgtcaaaactcaagaagaa

SEQ ID NO: 258612 - DNA, 25 bp, Probe sequence
aaatgtcaaaactcaagaagaattg

SEQ ID NO: 258613 - DNA, 25 bp, Probe sequence
aaactgactcacaaaatgtcaaaac

SEQ ID NO: 258614 - DNA, 25 bp, Probe sequence
aaaatgtcaaaactcaagaagaatt

SEQ ID NO: 258615 - DNA, 25 bp, Probe sequence
aactcaagaagaattgtttactgaa

SEQ ID NO: 258616 - DNA, 25 bp, Probe sequence
aactgactcacaaaatgtcaaaact

SEQ ID NO: 258617 - DNA, 25 bp, Probe sequence
aagaagaattgtttactgaatacaa

SEQ ID NO: 258618 - DNA, 25 bp, Probe sequence
caagaagaattgtttactgaataca

SEQ ID NO: 258619 - DNA, 25 bp, Probe sequence
caaaatgtcaaaactcaagaagaat

SEQ ID NO: 258620 - DNA, 25 bp, Probe sequence
cacaaaatgtcaaaactcaagaaga

SEQ ID NO: 258621 - DNA, 25 bp, Probe sequence
ctatgaaactgactcacaaaatgtc

SEQ ID NO: 258622 - DNA, 25 bp, Probe sequence
ctcacaaaatgtcaaaactcaagaa

SEQ ID NO: 258623 - DNA, 25 bp, Probe sequence
ctcaagaagaattgtttactgaata

SEQ ID NO: 258624 - DNA, 25 bp, Probe sequence
ctgactcacaaaatgtcaaaactca

SEQ ID NO: 258625 - DNA, 25 bp, Probe sequence
gaattgtttactgaatacaaaaatt

SEQ ID NO: 258626 - DNA, 25 bp, Probe sequence
gaagaattgtttactgaatacaaaa

SEQ ID NO: 258627 - DNA, 25 bp, Probe sequence
gaaactgactcacaaaatgtcaaaa

SEQ ID NO: 258628 - DNA, 25 bp, Probe sequence
gactcacaaaatgtcaaaactcaag

SEQ ID NO: 258629 - DNA, 25 bp, Probe sequence
gatctatgaaactgactcacaaaat

SEQ ID NO: 258630 - DNA, 25 bp, Probe sequence
tgatctatgaaactgactcacaaaa

SEQ ID NO: 258631 - DNA, 25 bp, Probe sequence
tgactcacaaaatgtcaaaactcaa

SEQ ID NO: 258632 - DNA, 25 bp, Probe sequence
tgaaactgactcacaaaatgtcaaa

SEQ ID NO: 258633 - DNA, 25 bp, Probe sequence
tctatgaaactgactcacaaaatgt

SEQ ID NO: 258634 - DNA, 25 bp, Probe sequence
tcaagaagaattgtttactgaatac

SEQ ID NO: 258635 - DNA, 25 bp, Probe sequence
tcacaaaatgtcaaaactcaagaag

SEQ ID NO: 258636 - DNA, 25 bp, Probe sequence
tatgaaactgactcacaaaatgtca

SEQ ID NO: 258637 - DNA, 25 bp, Probe sequence
ttgatctatgaaactgactcacaaa

SEQ ID NO: 258638 - DNA, 25 bp, Probe sequence
attgactacatatatattttattat

SEQ ID NO: 258639 - DNA, 25 bp, Probe sequence
atttaaaaatgctttcatttatatg

SEQ ID NO: 258640 - DNA, 25 bp, Probe sequence
atatattttattatgattgtgaaaa

SEQ ID NO: 258641 - DNA, 25 bp, Probe sequence
atagacaaagtattgactacatata

SEQ ID NO: 258642 - DNA, 25 bp, Probe sequence
agtgaacataaggattttcccttat

SEQ ID NO: 258643 - DNA, 25 bp, Probe sequence
agtattgactacatatatattttat

SEQ ID NO: 258644 - DNA, 25 bp, Probe sequence
agacaaagtattgactacatatata

SEQ ID NO: 258645 - DNA, 25 bp, Probe sequence
acaaagtattgactacatatatatt

SEQ ID NO: 258646 - DNA, 25 bp, Probe sequence
aaatcattcaatatagacaaagtat

SEQ ID NO: 258647 - DNA, 25 bp, Probe sequence
aaagtattgactacatatatatttt

SEQ ID NO: 258648 - DNA, 25 bp, Probe sequence
aagtattgactacatatatatttta

SEQ ID NO: 258649 - DNA, 25 bp, Probe sequence
aatcattcaatatagacaaagtatt

SEQ ID NO: 258650 - DNA, 25 bp, Probe sequence
caaagtattgactacatatatattt

SEQ ID NO: 258651 - DNA, 25 bp, Probe sequence
gaaatcattcaatatagacaaagta

SEQ ID NO: 258652 - DNA, 25 bp, Probe sequence
gacaaagtattgactacatatatat

SEQ ID NO: 258653 - DNA, 25 bp, Probe sequence
gtattgactacatatatattttatt

SEQ ID NO: 258654 - DNA, 25 bp, Probe sequence
gtgaacataaggattttcccttatt

SEQ ID NO: 258655 - DNA, 25 bp, Probe sequence
tgaaatcattcaatatagacaaagt

SEQ ID NO: 258656 - DNA, 25 bp, Probe sequence
tgaacataaggattttcccttattt

SEQ ID NO: 258657 - DNA, 25 bp, Probe sequence
taaaaatgctttcatttatatgaaa

SEQ ID NO: 258658 - DNA, 25 bp, Probe sequence
tagacaaagtattgactacatatat

SEQ ID NO: 258659 - DNA, 25 bp, Probe sequence
tattgactacatatatattttatta

SEQ ID NO: 258660 - DNA, 25 bp, Probe sequence
tttaaaaatgctttcatttatatga

SEQ ID NO: 258661 - DNA, 25 bp, Probe sequence
ttattatgattgtgaaaaagtgaac

SEQ ID NO: 258662 - DNA, 25 bp, Probe sequence
ttaaaaatgctttcatttatatgaa

SEQ ID NO: 258663 - DNA, 25 bp, Probe sequence
aaattggttttgcatgggccctggt

SEQ ID NO: 258664 - DNA, 25 bp, Probe sequence
atggtggtgaaattaccggtggctt

SEQ ID NO: 258665 - DNA, 25 bp, Probe sequence
cttaatggtggtgaaattaccggtg

SEQ ID NO: 258666 - DNA, 25 bp, Probe sequence
tgaaattaccggtggcttaccacca

SEQ ID NO: 258667 - DNA, 25 bp, Probe sequence
acaacttccattggcaaggggatta

SEQ ID NO: 258668 - DNA, 25 bp, Probe sequence
aaaaattggttttgcatgggccctg

SEQ ID NO: 258669 - DNA, 25 bp, Probe sequence
aaaattggttttgcatgggccctgg

SEQ ID NO: 258670 - DNA, 25 bp, Probe sequence
aacaacttccattggcaaggggatt

SEQ ID NO: 258671 - DNA, 25 bp, Probe sequence
aatggtggtgaaattaccggtggct

SEQ ID NO: 258672 - DNA, 25 bp, Probe sequence
caacaacttccattggcaaggggat

SEQ ID NO: 258673 - DNA, 25 bp, Probe sequence
caacttccattggcaaggggattaa

SEQ ID NO: 258674 - DNA, 25 bp, Probe sequence
ctggttcaacaacttccattggcaa

SEQ ID NO: 258675 - DNA, 25 bp, Probe sequence
cctggttcaacaacttccattggca

SEQ ID NO: 258676 - DNA, 25 bp, Probe sequence
tccattggcaaggggattaaaacct

SEQ ID NO: 258677 - DNA, 25 bp, Probe sequence
gaaattaccggtggcttaccaccag

SEQ ID NO: 258678 - DNA, 25 bp, Probe sequence
gttcaacaacttccattggcaaggg

SEQ ID NO: 258679 - DNA, 25 bp, Probe sequence
ggttcaacaacttccattggcaagg

SEQ ID NO: 258680 - DNA, 25 bp, Probe sequence
tggttcaacaacttccattggcaag

SEQ ID NO: 258681 - DNA, 25 bp, Probe sequence
tggtgaaattaccggtggcttacca

SEQ ID NO: 258682 - DNA, 25 bp, Probe sequence
tggtggtgaaattaccggtggctta

SEQ ID NO: 258683 - DNA, 25 bp, Probe sequence
tcaacaacttccattggcaagggga

SEQ ID NO: 258684 - DNA, 25 bp, Probe sequence
tcccttaatggtggtgaaattaccg

SEQ ID NO: 258685 - DNA, 25 bp, Probe sequence
taatggtggtgaaattaccggtggc

SEQ ID NO: 258686 - DNA, 25 bp, Probe sequence
ttcaacaacttccattggcaagggg

SEQ ID NO: 258687 - DNA, 25 bp, Probe sequence
ttaatggtggtgaaattaccggtgg

SEQ ID NO: 258688 - DNA, 25 bp, Probe sequence
atttcaaggttctggatcaaaacta

SEQ ID NO: 258689 - DNA, 25 bp, Probe sequence
attctatggtctacattttggtcaa

SEQ ID NO: 258690 - DNA, 25 bp, Probe sequence
atgggactttggctaataccaggat

SEQ ID NO: 258691 - DNA, 25 bp, Probe sequence
aggatttttggcggaagaattctat

SEQ ID NO: 258692 - DNA, 25 bp, Probe sequence
acccgttaaagccaatattaccatg

SEQ ID NO: 258693 - DNA, 25 bp, Probe sequence
acattttggtcaagataatcatggt

SEQ ID NO: 258694 - DNA, 25 bp, Probe sequence
aaagccaatattaccatggttatta

SEQ ID NO: 258695 - DNA, 25 bp, Probe sequence
aatccaattaagaaaatgcggcaaa

SEQ ID NO: 258696 - DNA, 25 bp, Probe sequence
catggttattaaacctattattccg

SEQ ID NO: 258697 - DNA, 25 bp, Probe sequence
gttaaagccaatattaccatggtta

SEQ ID NO: 258698 - DNA, 25 bp, Probe sequence
ccaggatttttggcggaagaattct

SEQ ID NO: 258699 - DNA, 25 bp, Probe sequence
gccaatattaccatggttattaaac

SEQ ID NO: 258700 - DNA, 25 bp, Probe sequence
gaattctatggtctacattttggtc

SEQ ID NO: 258701 - DNA, 25 bp, Probe sequence
gaaaatgcggcaaaaggattccgca

SEQ ID NO: 258702 - DNA, 25 bp, Probe sequence
gactttggctaataccaggattttt

SEQ ID NO: 258703 - DNA, 25 bp, Probe sequence
gacccgttaaagccaatattaccat

SEQ ID NO: 258704 - DNA, 25 bp, Probe sequence
gtggatttcaaggttctggatcaaa

SEQ ID NO: 258705 - DNA, 25 bp, Probe sequence
gggactttggctaataccaggattt

SEQ ID NO: 258706 - DNA, 25 bp, Probe sequence
ggtggatttcaaggttctggatcaa

SEQ ID NO: 258707 - DNA, 25 bp, Probe sequence
ggtctacattttggtcaagataatc

SEQ ID NO: 258708 - DNA, 25 bp, Probe sequence
ggttctggatcaaaactaaatcttt

SEQ ID NO: 258709 - DNA, 25 bp, Probe sequence
ggatttcaaggttctggatcaaaac

SEQ ID NO: 258710 - DNA, 25 bp, Probe sequence
ggaagaattctatggtctacatttt

SEQ ID NO: 258711 - DNA, 25 bp, Probe sequence
ggctaataccaggatttttggcgga

SEQ ID NO: 258712 - DNA, 25 bp, Probe sequence
ggcggaagaattctatggtctacat

SEQ ID NO: 258713 - DNA, 25 bp, Probe sequence
tcatggttatttattaccggacccg

SEQ ID NO: 258714 - DNA, 25 bp, Probe sequence
taataccaggatttttggcggaaga

SEQ ID NO: 258715 - DNA, 25 bp, Probe sequence
tctggatcaaaactaaatcttttat

SEQ ID NO: 258716 - DNA, 25 bp, Probe sequence
tctatggtctacattttggtcaaga

SEQ ID NO: 258717 - DNA, 25 bp, Probe sequence
taatcatggttatttattaccggac

SEQ ID NO: 258718 - DNA, 25 bp, Probe sequence
tatggtctacattttggtcaagata

SEQ ID NO: 258719 - DNA, 25 bp, Probe sequence
ttttttggtggatttcaaggttctg

SEQ ID NO: 258720 - DNA, 25 bp, Probe sequence
ttggtggatttcaaggttctggatc

SEQ ID NO: 258721 - DNA, 25 bp, Probe sequence
ttggcggaagaattctatggtctac

SEQ ID NO: 258722 - DNA, 25 bp, Probe sequence
tggaccttcaaaaccttggtctaag

SEQ ID NO: 258723 - DNA, 25 bp, Probe sequence
attcctaaaccatggctttggccta

SEQ ID NO: 258724 - DNA, 25 bp, Probe sequence
attacccgggtgggccaggagatat

SEQ ID NO: 258725 - DNA, 25 bp, Probe sequence
attggtggccttggttattccacat

SEQ ID NO: 258726 - DNA, 25 bp, Probe sequence
acaccgagtggctgggcggtttcac

SEQ ID NO: 258727 - DNA, 25 bp, Probe sequence
aggaacaccgagtggctgggcggtt

SEQ ID NO: 258728 - DNA, 25 bp, Probe sequence
atggctttggcctattggggaatac

SEQ ID NO: 258729 - DNA, 25 bp, Probe sequence
aaaccatggctttggcctattgggg

SEQ ID NO: 258730 - DNA, 25 bp, Probe sequence
caattggtggttcacccaggaccca

SEQ ID NO: 258731 - DNA, 25 bp, Probe sequence
cacattatttaattggcctttattt

SEQ ID NO: 258732 - DNA, 25 bp, Probe sequence
cacctattcctaaaccatggctttg

SEQ ID NO: 258733 - DNA, 25 bp, Probe sequence
cttttcacctattcctaaaccatgg

SEQ ID NO: 258734 - DNA, 25 bp, Probe sequence
tcgacggtggaacttcaaattagga

SEQ ID NO: 258735 - DNA, 25 bp, Probe sequence
cccttggcaattggtggttcaccca

SEQ ID NO: 258736 - DNA, 25 bp, Probe sequence
gtattatattacccgggtgggccag

SEQ ID NO: 258737 - DNA, 25 bp, Probe sequence
gggtgggccaggagatattgggaaa

SEQ ID NO: 258738 - DNA, 25 bp, Probe sequence
gattcttggtctacatttaaaacat

SEQ ID NO: 258739 - DNA, 25 bp, Probe sequence
ggaatttattggtggccttggttat

SEQ ID NO: 258740 - DNA, 25 bp, Probe sequence
gggagggattcttggtctacattta

SEQ ID NO: 258741 - DNA, 25 bp, Probe sequence
ggtctaaggcattattttttggatt

SEQ ID NO: 258742 - DNA, 25 bp, Probe sequence
ggaccccttggcaattggtggttca

SEQ ID NO: 258743 - DNA, 25 bp, Probe sequence
tggccgttaaacaaatacctggaga

SEQ ID NO: 258744 - DNA, 25 bp, Probe sequence
ggaattactggattatggcttgggg

SEQ ID NO: 258745 - DNA, 25 bp, Probe sequence
ggcttggggagggattcttggtcta

SEQ ID NO: 258746 - DNA, 25 bp, Probe sequence
ggctggagccattaaggaattactg

SEQ ID NO: 258747 - DNA, 25 bp, Probe sequence
tggccttggttattccacattattt

SEQ ID NO: 258748 - DNA, 25 bp, Probe sequence
tggggaatacattaacccactttgg

SEQ ID NO: 258749 - DNA, 25 bp, Probe sequence
tggatttttttggcgatatttaaat

SEQ ID NO: 258750 - DNA, 25 bp, Probe sequence
tcacggttcacaaaaacttttggat

SEQ ID NO: 258751 - DNA, 25 bp, Probe sequence
tactggcttaacaaaaggaacaccg

SEQ ID NO: 258752 - DNA, 25 bp, Probe sequence
taaacaaatacctggagaatctttt

SEQ ID NO: 258753 - DNA, 25 bp, Probe sequence
ttatttttggaccccttggcaattg

SEQ ID NO: 258754 - DNA, 25 bp, Probe sequence
ttaccaatggattggctggagccat

SEQ ID NO: 258755 - DNA, 25 bp, Probe sequence
ttggcattttcgacggtggaacttc

SEQ ID NO: 258756 - DNA, 25 bp, Probe sequence
attggaccaactggggcttgacctt

SEQ ID NO: 258757 - DNA, 25 bp, Probe sequence
actggggcttgaccttaacttaatg

SEQ ID NO: 258758 - DNA, 25 bp, Probe sequence
atccacctgagaaacaactgggacc

SEQ ID NO: 258759 - DNA, 25 bp, Probe sequence
aatggacccatttgggcttatggaa

SEQ ID NO: 258760 - DNA, 25 bp, Probe sequence
cagccggtggcttattggaccaact

SEQ ID NO: 258761 - DNA, 25 bp, Probe sequence
aatccaaaaccacttattccaattg

SEQ ID NO: 258762 - DNA, 25 bp, Probe sequence
cacttattccaattgaaattcccca

SEQ ID NO: 258763 - DNA, 25 bp, Probe sequence
cacctgagaaacaactgggaccggt

SEQ ID NO: 258764 - DNA, 25 bp, Probe sequence
gaggtaatggacccatttgggctta

SEQ ID NO: 258765 - DNA, 25 bp, Probe sequence
gccggtggcttattggaccaactgg

SEQ ID NO: 258766 - DNA, 25 bp, Probe sequence
cctttcgaggtaatggacccatttg

SEQ ID NO: 258767 - DNA, 25 bp, Probe sequence
ccattttccagccggtggcttattg

SEQ ID NO: 258768 - DNA, 25 bp, Probe sequence
gacccatttgggcttatggaaaatc

SEQ ID NO: 258769 - DNA, 25 bp, Probe sequence
gttgcactggttgtggaaaatccac

SEQ ID NO: 258770 - DNA, 25 bp, Probe sequence
ttttccagccggtggcttattggac

SEQ ID NO: 258771 - DNA, 25 bp, Probe sequence
gtaatggacccatttgggcttatgg

SEQ ID NO: 258772 - DNA, 25 bp, Probe sequence
gtcttaacccagttgcactggttgt

SEQ ID NO: 258773 - DNA, 25 bp, Probe sequence
ggtggcttattggaccaactggggc

SEQ ID NO: 258774 - DNA, 25 bp, Probe sequence
tggggcttgaccttaacttaatggg

SEQ ID NO: 258775 - DNA, 25 bp, Probe sequence
ggaaaatccacctgagaaacaactg

SEQ ID NO: 258776 - DNA, 25 bp, Probe sequence
ggcttattggaccaactggggcttg

SEQ ID NO: 258777 - DNA, 25 bp, Probe sequence
ggcttgaccttaacttaatgggtct

SEQ ID NO: 258778 - DNA, 25 bp, Probe sequence
ggcttatggaaaatccaaaaccact

SEQ ID NO: 258779 - DNA, 25 bp, Probe sequence
tgggtcttaacccagttgcactggt

SEQ ID NO: 258780 - DNA, 25 bp, Probe sequence
tggtttttattccaatggcttattt

SEQ ID NO: 258781 - DNA, 25 bp, Probe sequence
tgagaaacaactgggaccggtttat

SEQ ID NO: 258782 - DNA, 25 bp, Probe sequence
tccaaaaccacttattccaattgaa

SEQ ID NO: 258783 - DNA, 25 bp, Probe sequence
taatgggtcttaacccagttgcact

SEQ ID NO: 258784 - DNA, 25 bp, Probe sequence
taacccagttgcactggttgtggaa

SEQ ID NO: 258785 - DNA, 25 bp, Probe sequence
tacctttcgaggtaatggacccatt

SEQ ID NO: 258786 - DNA, 25 bp, Probe sequence
ttccagccggtggcttattggacca

SEQ ID NO: 258787 - DNA, 25 bp, Probe sequence
tattccaattgaaattccccaaccg

SEQ ID NO: 258788 - DNA, 25 bp, Probe sequence
tattccaatggcttattttttacct

SEQ ID NO: 258789 - DNA, 25 bp, Probe sequence
ttattggaccaactggggcttgacc

SEQ ID NO: 258790 - DNA, 25 bp, Probe sequence
aaaaatgactggagaccggactggt

SEQ ID NO: 258791 - DNA, 25 bp, Probe sequence
atgactggagaccggactggtgaaa

SEQ ID NO: 258792 - DNA, 25 bp, Probe sequence
atggattttatttattcaaattggg

SEQ ID NO: 258793 - DNA, 25 bp, Probe sequence
caaattgggaagggggatggatggg

SEQ ID NO: 258794 - DNA, 25 bp, Probe sequence
aaaatgactggagaccggactggtg

SEQ ID NO: 258795 - DNA, 25 bp, Probe sequence
caaggtggacattttggccgaaagg

SEQ ID NO: 258796 - DNA, 25 bp, Probe sequence
aaggctgggtaccagaacctggcct

SEQ ID NO: 258797 - DNA, 25 bp, Probe sequence
aatgactggagaccggactggtgaa

SEQ ID NO: 258798 - DNA, 25 bp, Probe sequence
cattttggccgaaagggaaaggctg

SEQ ID NO: 258799 - DNA, 25 bp, Probe sequence
ctggagaccggactggtgaaattat

SEQ ID NO: 258800 - DNA, 25 bp, Probe sequence
gaagggggatggatgggaaccttat

SEQ ID NO: 258801 - DNA, 25 bp, Probe sequence
gaaaggctgggtaccagaacctggc

SEQ ID NO: 258802 - DNA, 25 bp, Probe sequence
gtaccagaacctggcctttcggatt

SEQ ID NO: 258803 - DNA, 25 bp, Probe sequence
gactggagaccggactggtgaaatt

SEQ ID NO: 258804 - DNA, 25 bp, Probe sequence
gactggtgaaattatttcttccccg

SEQ ID NO: 258805 - DNA, 25 bp, Probe sequence
gaccggactggtgaaattatttctt

SEQ ID NO: 258806 - DNA, 25 bp, Probe sequence
gagaccggactggtgaaattatttc

SEQ ID NO: 258807 - DNA, 25 bp, Probe sequence
gatggatgggaaccttatttacttt

SEQ ID NO: 258808 - DNA, 25 bp, Probe sequence
gttcacttcccttaccagaattatt

SEQ ID NO: 258809 - DNA, 25 bp, Probe sequence
tgggaagggggatggatgggaacct

SEQ ID NO: 258810 - DNA, 25 bp, Probe sequence
gggaaaggctgggtaccagaacctg

SEQ ID NO: 258811 - DNA, 25 bp, Probe sequence
gggatggatgggaaccttatttact

SEQ ID NO: 258812 - DNA, 25 bp, Probe sequence
tggacattttggccgaaagggaaag

SEQ ID NO: 258813 - DNA, 25 bp, Probe sequence
tggtgaaattatttcttccccgtct

SEQ ID NO: 258814 - DNA, 25 bp, Probe sequence
tcccttaccagaattattttcaatt

SEQ ID NO: 258815 - DNA, 25 bp, Probe sequence
tctggacatttaacaattggtgaaa

SEQ ID NO: 258816 - DNA, 25 bp, Probe sequence
ttaccaaggtggacattttggccga

SEQ ID NO: 258817 - DNA, 25 bp, Probe sequence
tcacttcccttaccagaattatttt

SEQ ID NO: 258818 - DNA, 25 bp, Probe sequence
taccaaggtggacattttggccgaa

SEQ ID NO: 258819 - DNA, 25 bp, Probe sequence
ttatttactttaccaaggtggacat

SEQ ID NO: 258820 - DNA, 25 bp, Probe sequence
ttttctggacatttaacaattggtg

SEQ ID NO: 258821 - DNA, 25 bp, Probe sequence
ttactttaccaaggtggacattttg

SEQ ID NO: 258822 - DNA, 25 bp, Probe sequence
ttcccttaccagaattattttcaat

SEQ ID NO: 258823 - DNA, 25 bp, Probe sequence
ttcacttcccttaccagaattattt

SEQ ID NO: 258824 - DNA, 25 bp, Probe sequence
tccattaatggacccgacccaggga

SEQ ID NO: 258825 - DNA, 25 bp, Probe sequence
ccattaatggacccgacccagggat

SEQ ID NO: 258826 - DNA, 25 bp, Probe sequence
atttccattaatggacccgacccag

SEQ ID NO: 258827 - DNA, 25 bp, Probe sequence
attaatggacccgacccagggattg

SEQ ID NO: 258828 - DNA, 25 bp, Probe sequence
cattaatggacccgacccagggatt

SEQ ID NO: 258829 - DNA, 25 bp, Probe sequence
atggacccgacccagggattgattt

SEQ ID NO: 258830 - DNA, 25 bp, Probe sequence
tggacccgacccagggattgattta

SEQ ID NO: 258831 - DNA, 25 bp, Probe sequence
ggacccgacccagggattgatttat

SEQ ID NO: 258832 - DNA, 25 bp, Probe sequence
acccagggattgatttattaaatga

SEQ ID NO: 258833 - DNA, 25 bp, Probe sequence
aatggacccgacccagggattgatt

SEQ ID NO: 258834 - DNA, 25 bp, Probe sequence
taatggacccgacccagggattgat

SEQ ID NO: 258835 - DNA, 25 bp, Probe sequence
cgacccagggattgatttattaaat

SEQ ID NO: 258836 - DNA, 25 bp, Probe sequence
ccgggtacaagaccatttactggtg

SEQ ID NO: 258837 - DNA, 25 bp, Probe sequence
ggttccaggggtatttccattaatg

SEQ ID NO: 258838 - DNA, 25 bp, Probe sequence
gcttccaaaattgattttggttcca

SEQ ID NO: 258839 - DNA, 25 bp, Probe sequence
gaatcttttgactttgaaatggtga

SEQ ID NO: 258840 - DNA, 25 bp, Probe sequence
gacccgacccagggattgatttatt

SEQ ID NO: 258841 - DNA, 25 bp, Probe sequence
gttccaggggtatttccattaatgg

SEQ ID NO: 258842 - DNA, 25 bp, Probe sequence
gtacaagaccatttactggtggttt

SEQ ID NO: 258843 - DNA, 25 bp, Probe sequence
gggtacaagaccatttactggtggt

SEQ ID NO: 258844 - DNA, 25 bp, Probe sequence
ggtacaagaccatttactggtggtt

SEQ ID NO: 258845 - DNA, 25 bp, Probe sequence
ttaaaggggcagcttccaaaattga

SEQ ID NO: 258846 - DNA, 25 bp, Probe sequence
tggttccaggggtatttccattaat

SEQ ID NO: 258847 - DNA, 25 bp, Probe sequence
tccaggggtatttccattaatggac

SEQ ID NO: 258848 - DNA, 25 bp, Probe sequence
tgaaatggtgagaccaatggtaggg

SEQ ID NO: 258849 - DNA, 25 bp, Probe sequence
tttccattaatggacccgacccagg

SEQ ID NO: 258850 - DNA, 25 bp, Probe sequence
ttaatggacccgacccagggattga

SEQ ID NO: 258851 - DNA, 25 bp, Probe sequence
tacaagaccatttactggtggtttt

SEQ ID NO: 258852 - DNA, 25 bp, Probe sequence
tactggtggttttaaaggggcagct

SEQ ID NO: 258853 - DNA, 25 bp, Probe sequence
tatttccattaatggacccgaccca

SEQ ID NO: 258854 - DNA, 25 bp, Probe sequence
tttaaaggggcagcttccaaaattg

SEQ ID NO: 258855 - DNA, 25 bp, Probe sequence
ttttgactttgaaatggtgagacca

SEQ ID NO: 258856 - DNA, 25 bp, Probe sequence
ttaaatgaatcttttgactttgaaa

SEQ ID NO: 258857 - DNA, 25 bp, Probe sequence
ttgactttgaaatggtgagaccaat

SEQ ID NO: 258858 - DNA, 25 bp, Probe sequence
attaatattttggtggaatttggca

SEQ ID NO: 258859 - DNA, 25 bp, Probe sequence
atattttggtggaatttggcatggt

SEQ ID NO: 258860 - DNA, 25 bp, Probe sequence
ttcttgggctggattaaaacccact

SEQ ID NO: 258861 - DNA, 25 bp, Probe sequence
atgggtggagaattaattggacctg

SEQ ID NO: 258862 - DNA, 25 bp, Probe sequence
aatgggtggagaattaattggacct

SEQ ID NO: 258863 - DNA, 25 bp, Probe sequence
aatattttggtggaatttggcatgg

SEQ ID NO: 258864 - DNA, 25 bp, Probe sequence
gcttcttgggctggattaaaaccca

SEQ ID NO: 258865 - DNA, 25 bp, Probe sequence
gcgttattaatattttggtggaatt

SEQ ID NO: 258866 - DNA, 25 bp, Probe sequence
gaattaattggacctgaaaaaatgg

SEQ ID NO: 258867 - DNA, 25 bp, Probe sequence
gaatgggtggagaattaattggacc

SEQ ID NO: 258868 - DNA, 25 bp, Probe sequence
gagaattaattggacctgaaaaaat

SEQ ID NO: 258869 - DNA, 25 bp, Probe sequence
tcttgggctggattaaaacccactt

SEQ ID NO: 258870 - DNA, 25 bp, Probe sequence
gttattaatattttggtggaatttg

SEQ ID NO: 258871 - DNA, 25 bp, Probe sequence
gtagcttcttgggctggattaaaac

SEQ ID NO: 258872 - DNA, 25 bp, Probe sequence
gggaatgggtggagaattaattgga

SEQ ID NO: 258873 - DNA, 25 bp, Probe sequence
gtggagaattaattggacctgaaaa

SEQ ID NO: 258874 - DNA, 25 bp, Probe sequence
gggtggagaattaattggacctgaa

SEQ ID NO: 258875 - DNA, 25 bp, Probe sequence
ggtggagaattaattggacctgaaa

SEQ ID NO: 258876 - DNA, 25 bp, Probe sequence
ggtagcttcttgggctggattaaaa

SEQ ID NO: 258877 - DNA, 25 bp, Probe sequence
ggaatgggtggagaattaattggac

SEQ ID NO: 258878 - DNA, 25 bp, Probe sequence
ggcgttattaatattttggtggaat

SEQ ID NO: 258879 - DNA, 25 bp, Probe sequence
tggcgttattaatattttggtggaa

SEQ ID NO: 258880 - DNA, 25 bp, Probe sequence
tggagaattaattggacctgaaaaa

SEQ ID NO: 258881 - DNA, 25 bp, Probe sequence
tgggtggagaattaattggacctga

SEQ ID NO: 258882 - DNA, 25 bp, Probe sequence
tggtagcttcttgggctggattaaa

SEQ ID NO: 258883 - DNA, 25 bp, Probe sequence
taatattttggtggaatttggcatg

SEQ ID NO: 258884 - DNA, 25 bp, Probe sequence
tagcttcttgggctggattaaaacc

SEQ ID NO: 258885 - DNA, 25 bp, Probe sequence
tattaatattttggtggaatttggc

SEQ ID NO: 258886 - DNA, 25 bp, Probe sequence
ttggaaaagggaatgggtggagaat

SEQ ID NO: 258887 - DNA, 25 bp, Probe sequence
tttggcgttattaatattttggtgg

SEQ ID NO: 258888 - DNA, 25 bp, Probe sequence
ttttggcgttattaatattttggtg

SEQ ID NO: 258889 - DNA, 25 bp, Probe sequence
ttaatattttggtggaatttggcat

SEQ ID NO: 258890 - DNA, 25 bp, Probe sequence
ttggtagcttcttgggctggattaa

SEQ ID NO: 258891 - DNA, 25 bp, Probe sequence
ttggcgttattaatattttggtgga

SEQ ID NO: 258892 - DNA, 25 bp, Probe sequence
attgaagaaaccgcatattaagcaa

SEQ ID NO: 258893 - DNA, 25 bp, Probe sequence
ataaaagcgggctatagtgcaaata

SEQ ID NO: 258894 - DNA, 25 bp, Probe sequence
atgtacttaccaatgcggcagtcgg

SEQ ID NO: 258895 - DNA, 25 bp, Probe sequence
agttactacatgtacttaccaatgc

SEQ ID NO: 258896 - DNA, 25 bp, Probe sequence
agagttactacatgtacttaccaat

SEQ ID NO: 258897 - DNA, 25 bp, Probe sequence
actacatgtacttaccaatgcggca

SEQ ID NO: 258898 - DNA, 25 bp, Probe sequence
acttaatgttacacaaagtgctata

SEQ ID NO: 258899 - DNA, 25 bp, Probe sequence
acatgtacttaccaatgcggcagtc

SEQ ID NO: 258900 - DNA, 25 bp, Probe sequence
acacaaagtgctataaaagcgggct

SEQ ID NO: 258901 - DNA, 25 bp, Probe sequence
aaccgcatattaagcaatatataca

SEQ ID NO: 258902 - DNA, 25 bp, Probe sequence
aagcgggctatagtgcaaatagcgc

SEQ ID NO: 258903 - DNA, 25 bp, Probe sequence
aagtgctataaaagcgggctatagt

SEQ ID NO: 258904 - DNA, 25 bp, Probe sequence
cacaaagtgctataaaagcgggcta

SEQ ID NO: 258905 - DNA, 25 bp, Probe sequence
caaagtgctataaaagcgggctata

SEQ ID NO: 258906 - DNA, 25 bp, Probe sequence
catgtacttaccaatgcggcagtcg

SEQ ID NO: 258907 - DNA, 25 bp, Probe sequence
ctacatgtacttaccaatgcggcag

SEQ ID NO: 258908 - DNA, 25 bp, Probe sequence
gctataaaagcgggctatagtgcaa

SEQ ID NO: 258909 - DNA, 25 bp, Probe sequence
gaagaaaccgcatattaagcaatat

SEQ ID NO: 258910 - DNA, 25 bp, Probe sequence
gaaaccgcatattaagcaatatata

SEQ ID NO: 258911 - DNA, 25 bp, Probe sequence
gagttactacatgtacttaccaatg

SEQ ID NO: 258912 - DNA, 25 bp, Probe sequence
gttactacatgtacttaccaatgcg

SEQ ID NO: 258913 - DNA, 25 bp, Probe sequence
gttacacaaagtgctataaaagcgg

SEQ ID NO: 258914 - DNA, 25 bp, Probe sequence
gttattgaagaaaccgcatattaag

SEQ ID NO: 258915 - DNA, 25 bp, Probe sequence
gtatattagaacacttaatgttaca

SEQ ID NO: 258916 - DNA, 25 bp, Probe sequence
gtgctataaaagcgggctatagtgc

SEQ ID NO: 258917 - DNA, 25 bp, Probe sequence
tgtacttaccaatgcggcagtcggt

SEQ ID NO: 258918 - DNA, 25 bp, Probe sequence
tgaagaaaccgcatattaagcaata

SEQ ID NO: 258919 - DNA, 25 bp, Probe sequence
taaaagcgggctatagtgcaaatag

SEQ ID NO: 258920 - DNA, 25 bp, Probe sequence
tacatgtacttaccaatgcggcagt

SEQ ID NO: 258921 - DNA, 25 bp, Probe sequence
tactacatgtacttaccaatgcggc

SEQ ID NO: 258922 - DNA, 25 bp, Probe sequence
tataaaagcgggctatagtgcaaat

SEQ ID NO: 258923 - DNA, 25 bp, Probe sequence
tattgaagaaaccgcatattaagca

SEQ ID NO: 258924 - DNA, 25 bp, Probe sequence
ttactacatgtacttaccaatgcgg

SEQ ID NO: 258925 - DNA, 25 bp, Probe sequence
ttaatgttacacaaagtgctataaa

SEQ ID NO: 258926 - DNA, 25 bp, Probe sequence
attagtggtgtcttagattgttcag

SEQ ID NO: 258927 - DNA, 25 bp, Probe sequence
attatcatgagcgaactagaagtga

SEQ ID NO: 258928 - DNA, 25 bp, Probe sequence
atattagtggtgtcttagattgttc

SEQ ID NO: 258929 - DNA, 25 bp, Probe sequence
atatttttgattcccttatacaagg

SEQ ID NO: 258930 - DNA, 25 bp, Probe sequence
atcaagatattagtggtgtcttaga

SEQ ID NO: 258931 - DNA, 25 bp, Probe sequence
atgagcgaactagaagtgatgtatt

SEQ ID NO: 258932 - DNA, 25 bp, Probe sequence
agtggtgtcttagattgttcagaac

SEQ ID NO: 258933 - DNA, 25 bp, Probe sequence
agttatcaagatattagtggtgtct

SEQ ID NO: 258934 - DNA, 25 bp, Probe sequence
agatattagtggtgtcttagattgt

SEQ ID NO: 258935 - DNA, 25 bp, Probe sequence
aatagctgatgaaaattccaatgaa

SEQ ID NO: 258936 - DNA, 25 bp, Probe sequence
gcgaactagaagtgatgtattaata

SEQ ID NO: 258937 - DNA, 25 bp, Probe sequence
gaagtgatgtattaatagatgatga

SEQ ID NO: 258938 - DNA, 25 bp, Probe sequence
gagcgaactagaagtgatgtattaa

SEQ ID NO: 258939 - DNA, 25 bp, Probe sequence
gatgatataaatactgatgaattct

SEQ ID NO: 258940 - DNA, 25 bp, Probe sequence
gatattagtggtgtcttagattgtt

SEQ ID NO: 258941 - DNA, 25 bp, Probe sequence
gattatcatgagcgaactagaagtg

SEQ ID NO: 258942 - DNA, 25 bp, Probe sequence
gttatcaagatattagtggtgtctt

SEQ ID NO: 258943 - DNA, 25 bp, Probe sequence
gtgattatcatgagcgaactagaag

SEQ ID NO: 258944 - DNA, 25 bp, Probe sequence
gtggtgtcttagattgttcagaaca

SEQ ID NO: 258945 - DNA, 25 bp, Probe sequence
tgattatcatgagcgaactagaagt

SEQ ID NO: 258946 - DNA, 25 bp, Probe sequence
tgattcccttatacaaggacgtagt

SEQ ID NO: 258947 - DNA, 25 bp, Probe sequence
tcatgagcgaactagaagtgatgta

SEQ ID NO: 258948 - DNA, 25 bp, Probe sequence
tcaatagctgatgaaaattccaatg

SEQ ID NO: 258949 - DNA, 25 bp, Probe sequence
tagtggtgtcttagattgttcagaa

SEQ ID NO: 258950 - DNA, 25 bp, Probe sequence
tatatttttgattcccttatacaag

SEQ ID NO: 258951 - DNA, 25 bp, Probe sequence
tatttttgattcccttatacaagga

SEQ ID NO: 258952 - DNA, 25 bp, Probe sequence
tattagtggtgtcttagattgttca

SEQ ID NO: 258953 - DNA, 25 bp, Probe sequence
tttgattcccttatacaaggacgta

SEQ ID NO: 258954 - DNA, 25 bp, Probe sequence
ttttgattcccttatacaaggacgt

SEQ ID NO: 258955 - DNA, 25 bp, Probe sequence
tttttgattcccttatacaaggacg

SEQ ID NO: 258956 - DNA, 25 bp, Probe sequence
tttatatttttgattcccttataca

SEQ ID NO: 258957 - DNA, 25 bp, Probe sequence
ttatatttttgattcccttatacaa

SEQ ID NO: 258958 - DNA, 25 bp, Probe sequence
ttagtggtgtcttagattgttcaga

SEQ ID NO: 258959 - DNA, 25 bp, Probe sequence
ttgattcccttatacaaggacgtag

SEQ ID NO: 258960 - DNA, 25 bp, Probe sequence
atatgcaggagatttcaagtgagtt

SEQ ID NO: 258961 - DNA, 25 bp, Probe sequence
acaacgctacaaaatttagctaagc

SEQ ID NO: 258962 - DNA, 25 bp, Probe sequence
aaagcaatatggtacaacgctacaa

SEQ ID NO: 258963 - DNA, 25 bp, Probe sequence
aacaatatgcaggagatttcaagtg

SEQ ID NO: 258964 - DNA, 25 bp, Probe sequence
aacgctacaaaatttagctaagcaa

SEQ ID NO: 258965 - DNA, 25 bp, Probe sequence
aagcaatatggtacaacgctacaaa

SEQ ID NO: 258966 - DNA, 25 bp, Probe sequence
aatgctgttgatttggatattaaaa

SEQ ID NO: 258967 - DNA, 25 bp, Probe sequence
aataaatgctgttgatttggatatt

SEQ ID NO: 258968 - DNA, 25 bp, Probe sequence
aatactaaaaaggtcgcaaacgcat

SEQ ID NO: 258969 - DNA, 25 bp, Probe sequence
aatatggtacaacgctacaaaattt

SEQ ID NO: 258970 - DNA, 25 bp, Probe sequence
caagcagaacagtctaagcaaaagc

SEQ ID NO: 258971 - DNA, 25 bp, Probe sequence
caacaagcagaacagtctaagcaaa

SEQ ID NO: 258972 - DNA, 25 bp, Probe sequence
gcaggagatttcaagtgagttacaa

SEQ ID NO: 258973 - DNA, 25 bp, Probe sequence
gcagaacagtctaagcaaaagcaat

SEQ ID NO: 258974 - DNA, 25 bp, Probe sequence
gcaaacgcattttgtttaaatgaag

SEQ ID NO: 258975 - DNA, 25 bp, Probe sequence
gcaatatggtacaacgctacaaaat

SEQ ID NO: 258976 - DNA, 25 bp, Probe sequence
gaacagtctaagcaaaagcaatatg

SEQ ID NO: 258977 - DNA, 25 bp, Probe sequence
gagttacaacaagcagaacagtcta

SEQ ID NO: 258978 - DNA, 25 bp, Probe sequence
gatacaaatctattaataaatgctg

SEQ ID NO: 258979 - DNA, 25 bp, Probe sequence
gatttcaagtgagttacaacaagca

SEQ ID NO: 258980 - DNA, 25 bp, Probe sequence
gttacaacaagcagaacagtctaag

SEQ ID NO: 258981 - DNA, 25 bp, Probe sequence
gtctaagcaaaagcaatatggtaca

SEQ ID NO: 258982 - DNA, 25 bp, Probe sequence
gtcgcaaacgcattttgtttaaatg

SEQ ID NO: 258983 - DNA, 25 bp, Probe sequence
gtgagttacaacaagcagaacagtc

SEQ ID NO: 258984 - DNA, 25 bp, Probe sequence
ggtcgcaaacgcattttgtttaaat

SEQ ID NO: 258985 - DNA, 25 bp, Probe sequence
ggtacaacgctacaaaatttagcta

SEQ ID NO: 258986 - DNA, 25 bp, Probe sequence
ggagatttcaagtgagttacaacaa

SEQ ID NO: 258987 - DNA, 25 bp, Probe sequence
tcgcaaacgcattttgtttaaatga

SEQ ID NO: 258988 - DNA, 25 bp, Probe sequence
tcaagtgagttacaacaagcagaac

SEQ ID NO: 258989 - DNA, 25 bp, Probe sequence
taaaaaggtcgcaaacgcattttgt

SEQ ID NO: 258990 - DNA, 25 bp, Probe sequence
tacaacaagcagaacagtctaagca

SEQ ID NO: 258991 - DNA, 25 bp, Probe sequence
tatgcaggagatttcaagtgagtta

SEQ ID NO: 258992 - DNA, 25 bp, Probe sequence
tatggtacaacgctacaaaatttag

SEQ ID NO: 258993 - DNA, 25 bp, Probe sequence
ttagctaagcaaaacaggattatta

SEQ ID NO: 258994 - DNA, 25 bp, Probe sequence
attagatcaacacaaagctatacaa

SEQ ID NO: 258995 - DNA, 25 bp, Probe sequence
atcaaagtgaattgtcatcgttata

SEQ ID NO: 258996 - DNA, 25 bp, Probe sequence
atcaacacaaagctatacaagaatt

SEQ ID NO: 258997 - DNA, 25 bp, Probe sequence
atgagcaccagcaatatgcgagtgt

SEQ ID NO: 258998 - DNA, 25 bp, Probe sequence
agtccacatacaagcagttaatcat

SEQ ID NO: 258999 - DNA, 25 bp, Probe sequence
agataagtccacatacaagcagtta

SEQ ID NO: 259000 - DNA, 25 bp, Probe sequence
agaaaagcgttgaatggccacttta

SEQ ID NO: 259001 - DNA, 25 bp, Probe sequence
agaaaagcaatcagccatagaaaaa

SEQ ID NO: 259002 - DNA, 25 bp, Probe sequence
agcaccagcaatatgcgagtgtgta

SEQ ID NO: 259003 - DNA, 25 bp, Probe sequence
agcgttgaatggccactttaaagaa

SEQ ID NO: 259004 - DNA, 25 bp, Probe sequence
aaaagcagttgatgcatataatgag

SEQ ID NO: 259005 - DNA, 25 bp, Probe sequence
aacatcaaagtgaattgtcatcgtt

SEQ ID NO: 259006 - DNA, 25 bp, Probe sequence
aagcgttgaatggccactttaaaga

SEQ ID NO: 259007 - DNA, 25 bp, Probe sequence
aagcaatcagccatagaaaaattaa

SEQ ID NO: 259008 - DNA, 25 bp, Probe sequence
aagtccacatacaagcagttaatca

SEQ ID NO: 259009 - DNA, 25 bp, Probe sequence
aatcaatttgtattagatcaacaca

SEQ ID NO: 259010 - DNA, 25 bp, Probe sequence
aatatgcgagtgtgtatagtcaaga

SEQ ID NO: 259011 - DNA, 25 bp, Probe sequence
caaagtgaattgtcatcgttatatg

SEQ ID NO: 259012 - DNA, 25 bp, Probe sequence
cacatacaagcagttaatcatggat

SEQ ID NO: 259013 - DNA, 25 bp, Probe sequence
cagcaatatgcgagtgtgtatagtc

SEQ ID NO: 259014 - DNA, 25 bp, Probe sequence
gcgttgaatggccactttaaagaaa

SEQ ID NO: 259015 - DNA, 25 bp, Probe sequence
gcgtaatgcattggaaagcaaaata

SEQ ID NO: 259016 - DNA, 25 bp, Probe sequence
gctagaaaagcgttgaatggccact

SEQ ID NO: 259017 - DNA, 25 bp, Probe sequence
gcaccagcaatatgcgagtgtgtat

SEQ ID NO: 259018 - DNA, 25 bp, Probe sequence
gaatggccactttaaagaaaatata

SEQ ID NO: 259019 - DNA, 25 bp, Probe sequence
gaaaagcgttgaatggccactttaa

SEQ ID NO: 259020 - DNA, 25 bp, Probe sequence
gagcaccagcaatatgcgagtgtgt

SEQ ID NO: 259021 - DNA, 25 bp, Probe sequence
gataagtccacatacaagcagttaa

SEQ ID NO: 259022 - DNA, 25 bp, Probe sequence
gtcatcgttatatgaatcagaaaag

SEQ ID NO: 259023 - DNA, 25 bp, Probe sequence
gtgaattgtcatcgttatatgaatc

SEQ ID NO: 259024 - DNA, 25 bp, Probe sequence
gtgtatctaaggaagttaaatatca

SEQ ID NO: 259025 - DNA, 25 bp, Probe sequence
tgagcaccagcaatatgcgagtgtg

SEQ ID NO: 259026 - DNA, 25 bp, Probe sequence
tgcgagtgtgtatagtcaagaacaa

SEQ ID NO: 259027 - DNA, 25 bp, Probe sequence
ttatatgatgacaaagaggctagaa

SEQ ID NO: 259028 - DNA, 25 bp, Probe sequence
atgatggcaaacagctttctattag

SEQ ID NO: 259029 - DNA, 25 bp, Probe sequence
atggcaaacagctttctattagtga

SEQ ID NO: 259030 - DNA, 25 bp, Probe sequence
agagttagttgagggggtgagatta

SEQ ID NO: 259031 - DNA, 25 bp, Probe sequence
agtacaaccatgttgctttaagtta

SEQ ID NO: 259032 - DNA, 25 bp, Probe sequence
agctttctattagtgatgtgatggc

SEQ ID NO: 259033 - DNA, 25 bp, Probe sequence
actacacggggttattagaacatag

SEQ ID NO: 259034 - DNA, 25 bp, Probe sequence
aagacgagaaggctacacaagagga

SEQ ID NO: 259035 - DNA, 25 bp, Probe sequence
aaaaacgtcttattatagcttgagt

SEQ ID NO: 259036 - DNA, 25 bp, Probe sequence
aaaacgtcttattatagcttgagta

SEQ ID NO: 259037 - DNA, 25 bp, Probe sequence
aacagctttctattagtgatgtgat

SEQ ID NO: 259038 - DNA, 25 bp, Probe sequence
aacgtcttattatagcttgagtaaa

SEQ ID NO: 259039 - DNA, 25 bp, Probe sequence
caaacagctttctattagtgatgtg

SEQ ID NO: 259040 - DNA, 25 bp, Probe sequence
catagtaaagtacaaccatgttgct

SEQ ID NO: 259041 - DNA, 25 bp, Probe sequence
cgagaaggctacacaagaggattac

SEQ ID NO: 259042 - DNA, 25 bp, Probe sequence
ccatttgatatggtttatgtgatga

SEQ ID NO: 259043 - DNA, 25 bp, Probe sequence
gcatgatggcaaacagctttctatt

SEQ ID NO: 259044 - DNA, 25 bp, Probe sequence
gcaagacgagaaggctacacaagag

SEQ ID NO: 259045 - DNA, 25 bp, Probe sequence
gagggggtgagattagtaactgagt

SEQ ID NO: 259046 - DNA, 25 bp, Probe sequence
gaatgatctaaaaacgtcttattat

SEQ ID NO: 259047 - DNA, 25 bp, Probe sequence
gacgagaaggctacacaagaggatt

SEQ ID NO: 259048 - DNA, 25 bp, Probe sequence
gagtttgtgcaagacgagaaggcta

SEQ ID NO: 259049 - DNA, 25 bp, Probe sequence
gatggcaaacagctttctattagtg

SEQ ID NO: 259050 - DNA, 25 bp, Probe sequence
gatgtgatggctagtcaattgtttg

SEQ ID NO: 259051 - DNA, 25 bp, Probe sequence
gatctaaaaacgtcttattatagct

SEQ ID NO: 259052 - DNA, 25 bp, Probe sequence
gttagttgagggggtgagattagta

SEQ ID NO: 259053 - DNA, 25 bp, Probe sequence
gtttgtgcaagacgagaaggctaca

SEQ ID NO: 259054 - DNA, 25 bp, Probe sequence
gtaggttatgaattgcatgatggca

SEQ ID NO: 259055 - DNA, 25 bp, Probe sequence
gtaaagtacaaccatgttgctttaa

SEQ ID NO: 259056 - DNA, 25 bp, Probe sequence
gtaactgagtttgtgcaagacgaga

SEQ ID NO: 259057 - DNA, 25 bp, Probe sequence
gtgatgtgatggctagtcaattgtt

SEQ ID NO: 259058 - DNA, 25 bp, Probe sequence
ggcaaacagctttctattagtgatg

SEQ ID NO: 259059 - DNA, 25 bp, Probe sequence
tgcatgatggcaaacagctttctat

SEQ ID NO: 259060 - DNA, 25 bp, Probe sequence
tagtgatgtgatggctagtcaattg

SEQ ID NO: 259061 - DNA, 25 bp, Probe sequence
tatggtttatgtgatgatgaacagc

SEQ ID NO: 259062 - DNA, 25 bp, Probe sequence
agttaatggagattctatggaacct

SEQ ID NO: 259063 - DNA, 25 bp, Probe sequence
acacctccacgacaaaacaatgtac

SEQ ID NO: 259064 - DNA, 25 bp, Probe sequence
acctccacgacaaaacaatgtacta

SEQ ID NO: 259065 - DNA, 25 bp, Probe sequence
actccggttaatgtcaatggttgcg

SEQ ID NO: 259066 - DNA, 25 bp, Probe sequence
aaactccggttaatgtcaatggttg

SEQ ID NO: 259067 - DNA, 25 bp, Probe sequence
aacaatgtactaaactacgcaaata

SEQ ID NO: 259068 - DNA, 25 bp, Probe sequence
aactccggttaatgtcaatggttgc

SEQ ID NO: 259069 - DNA, 25 bp, Probe sequence
cacacctccacgacaaaacaatgta

SEQ ID NO: 259070 - DNA, 25 bp, Probe sequence
cacctccacgacaaaacaatgtact

SEQ ID NO: 259071 - DNA, 25 bp, Probe sequence
caggataaaactccggttaatgtca

SEQ ID NO: 259072 - DNA, 25 bp, Probe sequence
ctctgccggtgtgggagaacgtcta

SEQ ID NO: 259073 - DNA, 25 bp, Probe sequence
ctccggttaatgtcaatggttgcgt

SEQ ID NO: 259074 - DNA, 25 bp, Probe sequence
ctgccggtgtgggagaacgtctaca

SEQ ID NO: 259075 - DNA, 25 bp, Probe sequence
ctgaaatggttaaagctcctgttcc

SEQ ID NO: 259076 - DNA, 25 bp, Probe sequence
tccggttaatgtcaatggttgcgtc

SEQ ID NO: 259077 - DNA, 25 bp, Probe sequence
cgcaaatagtcaattagatgaacag

SEQ ID NO: 259078 - DNA, 25 bp, Probe sequence
cctccacgacaaaacaatgtactaa

SEQ ID NO: 259079 - DNA, 25 bp, Probe sequence
tctctgccggtgtgggagaacgtct

SEQ ID NO: 259080 - DNA, 25 bp, Probe sequence
gcgtgaggttggttgggaaagttat

SEQ ID NO: 259081 - DNA, 25 bp, Probe sequence
gaatggtcagattggtatattcatc

SEQ ID NO: 259082 - DNA, 25 bp, Probe sequence
gaaatggttaaagctcctgttcctc

SEQ ID NO: 259083 - DNA, 25 bp, Probe sequence
gaaagcgtgaggttggttgggaaag

SEQ ID NO: 259084 - DNA, 25 bp, Probe sequence
gaaacgaaagcgtgaggttggttgg

SEQ ID NO: 259085 - DNA, 25 bp, Probe sequence
gacaaaacaatgtactaaactacgc

SEQ ID NO: 259086 - DNA, 25 bp, Probe sequence
gataaaactccggttaatgtcaatg

SEQ ID NO: 259087 - DNA, 25 bp, Probe sequence
gtttcactgaacaaaaagtaccgtg

SEQ ID NO: 259088 - DNA, 25 bp, Probe sequence
gtactaaactacgcaaatagtcaat

SEQ ID NO: 259089 - DNA, 25 bp, Probe sequence
ggataaaactccggttaatgtcaat

SEQ ID NO: 259090 - DNA, 25 bp, Probe sequence
tgaacaaaaagtaccgtgaccttca

SEQ ID NO: 259091 - DNA, 25 bp, Probe sequence
tgaaatggttaaagctcctgttcct

SEQ ID NO: 259092 - DNA, 25 bp, Probe sequence
tctgccggtgtgggagaacgtctac

SEQ ID NO: 259093 - DNA, 25 bp, Probe sequence
tgccggtgtgggagaacgtctacac

SEQ ID NO: 259094 - DNA, 25 bp, Probe sequence
tcacacctccacgacaaaacaatgt

SEQ ID NO: 259095 - DNA, 25 bp, Probe sequence
taaaactccggttaatgtcaatggt

SEQ ID NO: 259096 - DNA, 25 bp, Probe sequence
cgggggccccaacatagaagctggc

SEQ ID NO: 259097 - DNA, 25 bp, Probe sequence
ataggatcaccaattccaacaaaca

SEQ ID NO: 259098 - DNA, 25 bp, Probe sequence
atgtgcaagttggcggggccacaac

SEQ ID NO: 259099 - DNA, 25 bp, Probe sequence
agtcagcatacaaaaatgtgcaagt

SEQ ID NO: 259100 - DNA, 25 bp, Probe sequence
agttggcggggccccaacatagaga

SEQ ID NO: 259101 - DNA, 25 bp, Probe sequence
accccaatttctacagacaatgcaa

SEQ ID NO: 259102 - DNA, 25 bp, Probe sequence
acaatgcaagttggcgggggcccca

SEQ ID NO: 259103 - DNA, 25 bp, Probe sequence
aaaatgtgcaagttggcggggccac

SEQ ID NO: 259104 - DNA, 25 bp, Probe sequence
aagtcagcttacaaaaatgtgcaag

SEQ ID NO: 259105 - DNA, 25 bp, Probe sequence
caagttggcggggccccaacataga

SEQ ID NO: 259106 - DNA, 25 bp, Probe sequence
aatgcaagttggggtaggacatcga

SEQ ID NO: 259107 - DNA, 25 bp, Probe sequence
caaaaatgtgcaagttggcggggcc

SEQ ID NO: 259108 - DNA, 25 bp, Probe sequence
caacatagagaaattggaaccccaa

SEQ ID NO: 259109 - DNA, 25 bp, Probe sequence
caccaattccaacaaacaatgcaag

SEQ ID NO: 259110 - DNA, 25 bp, Probe sequence
gccccaacatagaagctggcgaaaa

SEQ ID NO: 259111 - DNA, 25 bp, Probe sequence
gcggggccccaacatagagaaattg

SEQ ID NO: 259112 - DNA, 25 bp, Probe sequence
gcggggccacaacagagagaaatag

SEQ ID NO: 259113 - DNA, 25 bp, Probe sequence
gcaagttggcggggccacaacagag

SEQ ID NO: 259114 - DNA, 25 bp, Probe sequence
gaagctggcgaaaagtcagcataca

SEQ ID NO: 259115 - DNA, 25 bp, Probe sequence
gaagctggcgaaaagtcagcttaca

SEQ ID NO: 259116 - DNA, 25 bp, Probe sequence
gaaccccaatttctacagacaatgc

SEQ ID NO: 259117 - DNA, 25 bp, Probe sequence
gtgcaagttggcggggccacaacag

SEQ ID NO: 259118 - DNA, 25 bp, Probe sequence
gagaaataggatcaccaattccaac

SEQ ID NO: 259119 - DNA, 25 bp, Probe sequence
gatcaccaattccaacaaacaatgc

SEQ ID NO: 259120 - DNA, 25 bp, Probe sequence
gttggcggggccacaacagagagaa

SEQ ID NO: 259121 - DNA, 25 bp, Probe sequence
gggccccaacatagaagctggcgaa

SEQ ID NO: 259122 - DNA, 25 bp, Probe sequence
gggcccaacacagaagctggcgaaa

SEQ ID NO: 259123 - DNA, 25 bp, Probe sequence
tggcggggccccaacatagagaaat

SEQ ID NO: 259124 - DNA, 25 bp, Probe sequence
ggcggggccacaacagagagaaata

SEQ ID NO: 259125 - DNA, 25 bp, Probe sequence
ggcccaacacagaagctggcgaaaa

SEQ ID NO: 259126 - DNA, 25 bp, Probe sequence
tggggtggggcccaacacagaagct

SEQ ID NO: 259127 - DNA, 25 bp, Probe sequence
ttctacagacaatgcaagttggggt

SEQ ID NO: 259128 - DNA, 25 bp, Probe sequence
ttggcgggggccccaacatagaagc

SEQ ID NO: 259129 - DNA, 25 bp, Probe sequence
ttggaaccccaatttctacagacaa

SEQ ID NO: 259130 - DNA, 25 bp, Probe sequence
attggattcccaatttctacagaca

SEQ ID NO: 259131 - DNA, 25 bp, Probe sequence
attcccaatttctacagacaatgca

SEQ ID NO: 259132 - DNA, 25 bp, Probe sequence
atttctacagacaatgcaagttggc

SEQ ID NO: 259133 - DNA, 25 bp, Probe sequence
agttggcggggccccaacatagtga

SEQ ID NO: 259134 - DNA, 25 bp, Probe sequence
agttggcggggccccaacatagaag

SEQ ID NO: 259135 - DNA, 25 bp, Probe sequence
aagttggcggggccccaacatagtg

SEQ ID NO: 259136 - DNA, 25 bp, Probe sequence
caagttggcggggccccaacatagt

SEQ ID NO: 259137 - DNA, 25 bp, Probe sequence
caagttggcggggccccaacataga

SEQ ID NO: 259138 - DNA, 25 bp, Probe sequence
caacatagaagctggcggaaagtca

SEQ ID NO: 259139 - DNA, 25 bp, Probe sequence
caacatagtgaaattggattcccaa

SEQ ID NO: 259140 - DNA, 25 bp, Probe sequence
cagacaatgcaagttggcggggccc

SEQ ID NO: 259141 - DNA, 25 bp, Probe sequence
cggggccccaacatagaagctggcg

SEQ ID NO: 259142 - DNA, 25 bp, Probe sequence
cggggccccaacatagtgaaattgg

SEQ ID NO: 259143 - DNA, 25 bp, Probe sequence
cccaatttctacagacaatgcaagt

SEQ ID NO: 259144 - DNA, 25 bp, Probe sequence
gccccaacatagaagctggcggaaa

SEQ ID NO: 259145 - DNA, 25 bp, Probe sequence
gctggcggaaagtcagcttacaata

SEQ ID NO: 259146 - DNA, 25 bp, Probe sequence
gcttacaataatgtgcaagttgggg

SEQ ID NO: 259147 - DNA, 25 bp, Probe sequence
gaagctggcggaaagtcagcttaca

SEQ ID NO: 259148 - DNA, 25 bp, Probe sequence
gaaagtcagcttacaataatgtgca

SEQ ID NO: 259149 - DNA, 25 bp, Probe sequence
gattcccaatttctacagacaatgc

SEQ ID NO: 259150 - DNA, 25 bp, Probe sequence
gttggcggggccccaacatagaagc

SEQ ID NO: 259151 - DNA, 25 bp, Probe sequence
gttggcggggccccaacatagtgaa

SEQ ID NO: 259152 - DNA, 25 bp, Probe sequence
gtcagcttacaataatgtgcaagtt

SEQ ID NO: 259153 - DNA, 25 bp, Probe sequence
gggccccaacatagtgaaattggat

SEQ ID NO: 259154 - DNA, 25 bp, Probe sequence
gggccccaacatagaagctggcgga

SEQ ID NO: 259155 - DNA, 25 bp, Probe sequence
ggattcccaatttctacagacaatg

SEQ ID NO: 259156 - DNA, 25 bp, Probe sequence
ggcggaaagtcagcttacaataatg

SEQ ID NO: 259157 - DNA, 25 bp, Probe sequence
ggccccaacatagaagctggcggaa

SEQ ID NO: 259158 - DNA, 25 bp, Probe sequence
tggattcccaatttctacagacaat

SEQ ID NO: 259159 - DNA, 25 bp, Probe sequence
tctacagacaatgcaagttggcggg

SEQ ID NO: 259160 - DNA, 25 bp, Probe sequence
tacagacaatgcaagttggcggggc

SEQ ID NO: 259161 - DNA, 25 bp, Probe sequence
ttcccaatttctacagacaatgcaa

SEQ ID NO: 259162 - DNA, 25 bp, Probe sequence
ttggattcccaatttctacagacaa

SEQ ID NO: 259163 - DNA, 25 bp, Probe sequence
ttggcggggccccaacatagtgaaa

SEQ ID NO: 259164 - DNA, 25 bp, Probe sequence
atatagaagatggcgaagtgtggta

SEQ ID NO: 259165 - DNA, 25 bp, Probe sequence
atagaagatggcgaagtgtggtatt

SEQ ID NO: 259166 - DNA, 25 bp, Probe sequence
agatggcgaagtgtggtattcacca

SEQ ID NO: 259167 - DNA, 25 bp, Probe sequence
atcgataaagcgggtacatttagta

SEQ ID NO: 259168 - DNA, 25 bp, Probe sequence
atgcatcgataaagcgggtacattt

SEQ ID NO: 259169 - DNA, 25 bp, Probe sequence
atgatagtgatgatgtgggatgcat

SEQ ID NO: 259170 - DNA, 25 bp, Probe sequence
atgtgggatgcatcgataaagcggg

SEQ ID NO: 259171 - DNA, 25 bp, Probe sequence
atggctcaaaaggaggtaacacaat

SEQ ID NO: 259172 - DNA, 25 bp, Probe sequence
atggcgaagtgtggtattcaccagt

SEQ ID NO: 259173 - DNA, 25 bp, Probe sequence
agaagatggcgaagtgtggtattca

SEQ ID NO: 259174 - DNA, 25 bp, Probe sequence
agcgcataatattaatttctatgat

SEQ ID NO: 259175 - DNA, 25 bp, Probe sequence
accagttgtatgtatggctttaaat

SEQ ID NO: 259176 - DNA, 25 bp, Probe sequence
aagatggcgaagtgtggtattcacc

SEQ ID NO: 259177 - DNA, 25 bp, Probe sequence
cagttgtatgtatggctttaaataa

SEQ ID NO: 259178 - DNA, 25 bp, Probe sequence
ctatgatagtgatgatgtgggatgc

SEQ ID NO: 259179 - DNA, 25 bp, Probe sequence
gcatcgataaagcgggtacatttag

SEQ ID NO: 259180 - DNA, 25 bp, Probe sequence
gaagatggcgaagtgtggtattcac

SEQ ID NO: 259181 - DNA, 25 bp, Probe sequence
gatggcgaagtgtggtattcaccag

SEQ ID NO: 259182 - DNA, 25 bp, Probe sequence
gatgatgtgggatgcatcgataaag

SEQ ID NO: 259183 - DNA, 25 bp, Probe sequence
gatgcatcgataaagcgggtacatt

SEQ ID NO: 259184 - DNA, 25 bp, Probe sequence
gataaagcgggtacatttagtatta

SEQ ID NO: 259185 - DNA, 25 bp, Probe sequence
gatagtgatgatgtgggatgcatcg

SEQ ID NO: 259186 - DNA, 25 bp, Probe sequence
gttgtatgtatggctttaaataaag

SEQ ID NO: 259187 - DNA, 25 bp, Probe sequence
gtgatgatgtgggatgcatcgataa

SEQ ID NO: 259188 - DNA, 25 bp, Probe sequence
gtgggatgcatcgataaagcgggta

SEQ ID NO: 259189 - DNA, 25 bp, Probe sequence
gggatgcatcgataaagcgggtaca

SEQ ID NO: 259190 - DNA, 25 bp, Probe sequence
ggatgcatcgataaagcgggtacat

SEQ ID NO: 259191 - DNA, 25 bp, Probe sequence
ggctcaaaaggaggtaacacaatga

SEQ ID NO: 259192 - DNA, 25 bp, Probe sequence
tggcgaagtgtggtattcaccagtt

SEQ ID NO: 259193 - DNA, 25 bp, Probe sequence
tgggatgcatcgataaagcgggtac

SEQ ID NO: 259194 - DNA, 25 bp, Probe sequence
tgtgggatgcatcgataaagcgggt

SEQ ID NO: 259195 - DNA, 25 bp, Probe sequence
taaagcgcataatattaatttctat

SEQ ID NO: 259196 - DNA, 25 bp, Probe sequence
tagtgatgatgtgggatgcatcgat

SEQ ID NO: 259197 - DNA, 25 bp, Probe sequence
tttctatgatagtgatgatgtggga

SEQ ID NO: 259198 - DNA, 25 bp, Probe sequence
agacaaactatttcgctaattgagc

SEQ ID NO: 259199 - DNA, 25 bp, Probe sequence
agcgggtgtttcaagacaaactatt

SEQ ID NO: 259200 - DNA, 25 bp, Probe sequence
acgagcacgagatggcttaaaccaa

SEQ ID NO: 259201 - DNA, 25 bp, Probe sequence
actttatgccatcggtattaactgc

SEQ ID NO: 259202 - DNA, 25 bp, Probe sequence
actatttttattattgaggaggatg

SEQ ID NO: 259203 - DNA, 25 bp, Probe sequence
acaactttatgccatcggtattaac

SEQ ID NO: 259204 - DNA, 25 bp, Probe sequence
acaagcgggtgtttcaagacaaact

SEQ ID NO: 259205 - DNA, 25 bp, Probe sequence
aaagattgctcgtatcttcaatgaa

SEQ ID NO: 259206 - DNA, 25 bp, Probe sequence
aacgcagcttgctaaacaagcgggt

SEQ ID NO: 259207 - DNA, 25 bp, Probe sequence
aaccaaacgcagcttgctaaacaag

SEQ ID NO: 259208 - DNA, 25 bp, Probe sequence
aattgagcgaaacaactttatgcca

SEQ ID NO: 259209 - DNA, 25 bp, Probe sequence
cttgctaaacaagcgggtgtttcaa

SEQ ID NO: 259210 - DNA, 25 bp, Probe sequence
gccatcggtattaactgcaataaag

SEQ ID NO: 259211 - DNA, 25 bp, Probe sequence
gcgaaacaactttatgccatcggta

SEQ ID NO: 259212 - DNA, 25 bp, Probe sequence
gctcgtatcttcaatgaaaaggtgg

SEQ ID NO: 259213 - DNA, 25 bp, Probe sequence
gcttaaaccaaacgcagcttgctaa

SEQ ID NO: 259214 - DNA, 25 bp, Probe sequence
gcagcttgctaaacaagcgggtgtt

SEQ ID NO: 259215 - DNA, 25 bp, Probe sequence
gcacgagatggcttaaaccaaacgc

SEQ ID NO: 259216 - DNA, 25 bp, Probe sequence
gcaataaagattgctcgtatcttca

SEQ ID NO: 259217 - DNA, 25 bp, Probe sequence
gaattacgagcacgagatggcttaa

SEQ ID NO: 259218 - DNA, 25 bp, Probe sequence
gaaacaactttatgccatcggtatt

SEQ ID NO: 259219 - DNA, 25 bp, Probe sequence
gaaagaattacgagcacgagatggc

SEQ ID NO: 259220 - DNA, 25 bp, Probe sequence
gagcgaaacaactttatgccatcgg

SEQ ID NO: 259221 - DNA, 25 bp, Probe sequence
gagatggcttaaaccaaacgcagct

SEQ ID NO: 259222 - DNA, 25 bp, Probe sequence
gatggcttaaaccaaacgcagcttg

SEQ ID NO: 259223 - DNA, 25 bp, Probe sequence
gattgctcgtatcttcaatgaaaag

SEQ ID NO: 259224 - DNA, 25 bp, Probe sequence
gattgaaagaattacgagcacgaga

SEQ ID NO: 259225 - DNA, 25 bp, Probe sequence
ggtgtttcaagacaaactatttcgc

SEQ ID NO: 259226 - DNA, 25 bp, Probe sequence
ggtggaaactatttttattattgag

SEQ ID NO: 259227 - DNA, 25 bp, Probe sequence
tggcttaaaccaaacgcagcttgct

SEQ ID NO: 259228 - DNA, 25 bp, Probe sequence
taaaccaaacgcagcttgctaaaca

SEQ ID NO: 259229 - DNA, 25 bp, Probe sequence
tatgccatcggtattaactgcaata

SEQ ID NO: 259230 - DNA, 25 bp, Probe sequence
ttacgagcacgagatggcttaaacc

SEQ ID NO: 259231 - DNA, 25 bp, Probe sequence
ttcaagacaaactatttcgctaatt

SEQ ID NO: 259232 - DNA, 25 bp, Probe sequence
atatgctgcttgatgcaatatggta

SEQ ID NO: 259233 - DNA, 25 bp, Probe sequence
atcaaacagtaatatgctgcttgat

SEQ ID NO: 259234 - DNA, 25 bp, Probe sequence
atgcgtcaactaatggggattttag

SEQ ID NO: 259235 - DNA, 25 bp, Probe sequence
atgctgcttgatgcaatatggtatt

SEQ ID NO: 259236 - DNA, 25 bp, Probe sequence
atggggattttaggatggatagaga

SEQ ID NO: 259237 - DNA, 25 bp, Probe sequence
agtaatatgctgcttgatgcaatat

SEQ ID NO: 259238 - DNA, 25 bp, Probe sequence
acagtaatatgctgcttgatgcaat

SEQ ID NO: 259239 - DNA, 25 bp, Probe sequence
aaacagtaatatgctgcttgatgca

SEQ ID NO: 259240 - DNA, 25 bp, Probe sequence
aacagtaatatgctgcttgatgcaa

SEQ ID NO: 259241 - DNA, 25 bp, Probe sequence
aactaatggggattttaggatggat

SEQ ID NO: 259242 - DNA, 25 bp, Probe sequence
aatggggattttaggatggatagag

SEQ ID NO: 259243 - DNA, 25 bp, Probe sequence
aatatgctgcttgatgcaatatggt

SEQ ID NO: 259244 - DNA, 25 bp, Probe sequence
caaacagtaatatgctgcttgatgc

SEQ ID NO: 259245 - DNA, 25 bp, Probe sequence
cagtaatatgctgcttgatgcaata

SEQ ID NO: 259246 - DNA, 25 bp, Probe sequence
catcaaacagtaatatgctgcttga

SEQ ID NO: 259247 - DNA, 25 bp, Probe sequence
ctgcttgatgcaatatggtattggt

SEQ ID NO: 259248 - DNA, 25 bp, Probe sequence
cgtcaactaatggggattttaggat

SEQ ID NO: 259249 - DNA, 25 bp, Probe sequence
gcgtcaactaatggggattttagga

SEQ ID NO: 259250 - DNA, 25 bp, Probe sequence
gctgcttgatgcaatatggtattgg

SEQ ID NO: 259251 - DNA, 25 bp, Probe sequence
gcatcaaacagtaatatgctgcttg

SEQ ID NO: 259252 - DNA, 25 bp, Probe sequence
gtaatatgctgcttgatgcaatatg

SEQ ID NO: 259253 - DNA, 25 bp, Probe sequence
gtcaactaatggggattttaggatg

SEQ ID NO: 259254 - DNA, 25 bp, Probe sequence
gggattttaggatggatagagaatt

SEQ ID NO: 259255 - DNA, 25 bp, Probe sequence
ggggattttaggatggatagagaat

SEQ ID NO: 259256 - DNA, 25 bp, Probe sequence
ggatggatagagaatttaaggcaat

SEQ ID NO: 259257 - DNA, 25 bp, Probe sequence
ggcaattaaaaaagcatcaaacagt

SEQ ID NO: 259258 - DNA, 25 bp, Probe sequence
tggggattttaggatggatagagaa

SEQ ID NO: 259259 - DNA, 25 bp, Probe sequence
tgctgcttgatgcaatatggtattg

SEQ ID NO: 259260 - DNA, 25 bp, Probe sequence
tcaaacagtaatatgctgcttgatg

SEQ ID NO: 259261 - DNA, 25 bp, Probe sequence
tcaactaatggggattttaggatgg

SEQ ID NO: 259262 - DNA, 25 bp, Probe sequence
taatatgctgcttgatgcaatatgg

SEQ ID NO: 259263 - DNA, 25 bp, Probe sequence
taatggggattttaggatggataga

SEQ ID NO: 259264 - DNA, 25 bp, Probe sequence
taaggcaattaaaaaagcatcaaac

SEQ ID NO: 259265 - DNA, 25 bp, Probe sequence
tatgctgcttgatgcaatatggtat

SEQ ID NO: 259266 - DNA, 25 bp, Probe sequence
atatcatgcgctagatcatgaagat

SEQ ID NO: 259267 - DNA, 25 bp, Probe sequence
atatatcatgcgctagatcatgaag

SEQ ID NO: 259268 - DNA, 25 bp, Probe sequence
atcatgcgctagatcatgaagatca

SEQ ID NO: 259269 - DNA, 25 bp, Probe sequence
acgcgtccaatatatcatgcgctag

SEQ ID NO: 259270 - DNA, 25 bp, Probe sequence
aatatatcatgcgctagatcatgaa

SEQ ID NO: 259271 - DNA, 25 bp, Probe sequence
caatatatcatgcgctagatcatga

SEQ ID NO: 259272 - DNA, 25 bp, Probe sequence
cacgcgtccaatatatcatgcgcta

SEQ ID NO: 259273 - DNA, 25 bp, Probe sequence
ctgcacgcgtccaatatatcatgcg

SEQ ID NO: 259274 - DNA, 25 bp, Probe sequence
cgtccaatatatcatgcgctagatc

SEQ ID NO: 259275 - DNA, 25 bp, Probe sequence
cgcgtccaatatatcatgcgctaga

SEQ ID NO: 259276 - DNA, 25 bp, Probe sequence
ccaatatatcatgcgctagatcatg

SEQ ID NO: 259277 - DNA, 25 bp, Probe sequence
gcgtccaatatatcatgcgctagat

SEQ ID NO: 259278 - DNA, 25 bp, Probe sequence
gcacgcgtccaatatatcatgcgct

SEQ ID NO: 259279 - DNA, 25 bp, Probe sequence
gcaatgaaattctgcacgcgtccaa

SEQ ID NO: 259280 - DNA, 25 bp, Probe sequence
gtttcagcctaaacgtgcaatgaaa

SEQ ID NO: 259281 - DNA, 25 bp, Probe sequence
gtccaatatatcatgcgctagatca

SEQ ID NO: 259282 - DNA, 25 bp, Probe sequence
gtgcaatgaaattctgcacgcgtcc

SEQ ID NO: 259283 - DNA, 25 bp, Probe sequence
tgcaatgaaattctgcacgcgtcca

SEQ ID NO: 259284 - DNA, 25 bp, Probe sequence
tgcacgcgtccaatatatcatgcgc

SEQ ID NO: 259285 - DNA, 25 bp, Probe sequence
tccaatatatcatgcgctagatcat

SEQ ID NO: 259286 - DNA, 25 bp, Probe sequence
tctgcacgcgtccaatatatcatgc

SEQ ID NO: 259287 - DNA, 25 bp, Probe sequence
tcatgcgctagatcatgaagatcat

SEQ ID NO: 259288 - DNA, 25 bp, Probe sequence
tcagcctaaacgtgcaatgaaattc

SEQ ID NO: 259289 - DNA, 25 bp, Probe sequence
tatcatgcgctagatcatgaagatc

SEQ ID NO: 259290 - DNA, 25 bp, Probe sequence
tatatcatgcgctagatcatgaaga

SEQ ID NO: 259291 - DNA, 25 bp, Probe sequence
tttcagcctaaacgtgcaatgaaat

SEQ ID NO: 259292 - DNA, 25 bp, Probe sequence
ttcagcctaaacgtgcaatgaaatt

SEQ ID NO: 259293 - DNA, 25 bp, Probe sequence
ttctgcacgcgtccaatatatcatg

SEQ ID NO: 259294 - DNA, 25 bp, Probe sequence
attaggtgtgattattatgatgatt

SEQ ID NO: 259295 - DNA, 25 bp, Probe sequence
atttgaaagttgttgcattaacggt

SEQ ID NO: 259296 - DNA, 25 bp, Probe sequence
atgtgtcaatacttatgtttgaaaa

SEQ ID NO: 259297 - DNA, 25 bp, Probe sequence
aggtgtgattattatgatgatttat

SEQ ID NO: 259298 - DNA, 25 bp, Probe sequence
agttgttgcattaacggtgagattg

SEQ ID NO: 259299 - DNA, 25 bp, Probe sequence
aaagttgttgcattaacggtgagat

SEQ ID NO: 259300 - DNA, 25 bp, Probe sequence
aaagtgttgaattaggtgtgattat

SEQ ID NO: 259301 - DNA, 25 bp, Probe sequence
aagttgttgcattaacggtgagatt

SEQ ID NO: 259302 - DNA, 25 bp, Probe sequence
aagtgttgaattaggtgtgattatt

SEQ ID NO: 259303 - DNA, 25 bp, Probe sequence
gaattaggtgtgattattatgatga

SEQ ID NO: 259304 - DNA, 25 bp, Probe sequence
gaaaagtgttgaattaggtgtgatt

SEQ ID NO: 259305 - DNA, 25 bp, Probe sequence
gaaagttgttgcattaacggtgaga

SEQ ID NO: 259306 - DNA, 25 bp, Probe sequence
gatttattatttgaaagttgttgca

SEQ ID NO: 259307 - DNA, 25 bp, Probe sequence
gattattatgatgatttattatttg

SEQ ID NO: 259308 - DNA, 25 bp, Probe sequence
gttgttgcattaacggtgagattgc

SEQ ID NO: 259309 - DNA, 25 bp, Probe sequence
gttgaattaggtgtgattattatga

SEQ ID NO: 259310 - DNA, 25 bp, Probe sequence
gttgcattaacggtgagattgcgta

SEQ ID NO: 259311 - DNA, 25 bp, Probe sequence
gtttgaaaagtgttgaattaggtgt

SEQ ID NO: 259312 - DNA, 25 bp, Probe sequence
gtgattattatgatgatttattatt

SEQ ID NO: 259313 - DNA, 25 bp, Probe sequence
gtgtcaatacttatgtttgaaaagt

SEQ ID NO: 259314 - DNA, 25 bp, Probe sequence
gtgtgattattatgatgatttatta

SEQ ID NO: 259315 - DNA, 25 bp, Probe sequence
ggtgtgattattatgatgatttatt

SEQ ID NO: 259316 - DNA, 25 bp, Probe sequence
tgttgcattaacggtgagattgcgt

SEQ ID NO: 259317 - DNA, 25 bp, Probe sequence
tgaaagttgttgcattaacggtgag

SEQ ID NO: 259318 - DNA, 25 bp, Probe sequence
tgaaaagtgttgaattaggtgtgat

SEQ ID NO: 259319 - DNA, 25 bp, Probe sequence
tgcattaacggtgagattgcgtaat

SEQ ID NO: 259320 - DNA, 25 bp, Probe sequence
taggtgtgattattatgatgattta

SEQ ID NO: 259321 - DNA, 25 bp, Probe sequence
tttgaaagttgttgcattaacggtg

SEQ ID NO: 259322 - DNA, 25 bp, Probe sequence
ttattatgatgatttattatttgaa

SEQ ID NO: 259323 - DNA, 25 bp, Probe sequence
ttattatttgaaagttgttgcatta

SEQ ID NO: 259324 - DNA, 25 bp, Probe sequence
ttaggtgtgattattatgatgattt

SEQ ID NO: 259325 - DNA, 25 bp, Probe sequence
ttgaaagttgttgcattaacggtga

SEQ ID NO: 259326 - DNA, 25 bp, Probe sequence
ttgcattaacggtgagattgcgtaa

SEQ ID NO: 259327 - DNA, 25 bp, Probe sequence
ttgttgcattaacggtgagattgcg

SEQ ID NO: 259328 - DNA, 25 bp, Probe sequence
attattggtgcattagtttcatcta

SEQ ID NO: 259329 - DNA, 25 bp, Probe sequence
ataacccaggtggtggctttatagg

SEQ ID NO: 259330 - DNA, 25 bp, Probe sequence
ataacactgtttgaattgggcattt

SEQ ID NO: 259331 - DNA, 25 bp, Probe sequence
atgtaacgacaataacactgtttga

SEQ ID NO: 259332 - DNA, 25 bp, Probe sequence
accaattttagggcacattcatgta

SEQ ID NO: 259333 - DNA, 25 bp, Probe sequence
acaataacccaggtggtggctttat

SEQ ID NO: 259334 - DNA, 25 bp, Probe sequence
aacggtgatgctgtctcttagtgga

SEQ ID NO: 259335 - DNA, 25 bp, Probe sequence
aattgggcattttgttctcggttgt

SEQ ID NO: 259336 - DNA, 25 bp, Probe sequence
caggtggtggctttataggtggttt

SEQ ID NO: 259337 - DNA, 25 bp, Probe sequence
gcgataatgccaacattttttggaa

SEQ ID NO: 259338 - DNA, 25 bp, Probe sequence
gctggccacaataacccaggtggtg

SEQ ID NO: 259339 - DNA, 25 bp, Probe sequence
gctgtctcttagtggaggtcgatca

SEQ ID NO: 259340 - DNA, 25 bp, Probe sequence
gaagtattagaaagcttaccgatag

SEQ ID NO: 259341 - DNA, 25 bp, Probe sequence
gaaaaccttttttgtcgcaatatga

SEQ ID NO: 259342 - DNA, 25 bp, Probe sequence
gaaagcttaccgatagattttagaa

SEQ ID NO: 259343 - DNA, 25 bp, Probe sequence
gacactaccaattttagggcacatt

SEQ ID NO: 259344 - DNA, 25 bp, Probe sequence
gatgctgtctcttagtggaggtcga

SEQ ID NO: 259345 - DNA, 25 bp, Probe sequence
gtcggggttattgtaacggtgatgc

SEQ ID NO: 259346 - DNA, 25 bp, Probe sequence
ggtggctttataggtggtttaatat

SEQ ID NO: 259347 - DNA, 25 bp, Probe sequence
ggtgatgctgtctcttagtggaggt

SEQ ID NO: 259348 - DNA, 25 bp, Probe sequence
ggtgcattagtttcatctattactg

SEQ ID NO: 259349 - DNA, 25 bp, Probe sequence
ggcacattcatgtaacgacaataac

SEQ ID NO: 259350 - DNA, 25 bp, Probe sequence
tggaaaaccttttttgtcgcaatat

SEQ ID NO: 259351 - DNA, 25 bp, Probe sequence
tgtaacggtgatgctgtctcttagt

SEQ ID NO: 259352 - DNA, 25 bp, Probe sequence
tgttctcggttgtcggggttattgt

SEQ ID NO: 259353 - DNA, 25 bp, Probe sequence
tgtttctagcttttaatgtcgaaga

SEQ ID NO: 259354 - DNA, 25 bp, Probe sequence
tgcattagtttcatctattactgcg

SEQ ID NO: 259355 - DNA, 25 bp, Probe sequence
taatgtttctagcttttaatgtcga

SEQ ID NO: 259356 - DNA, 25 bp, Probe sequence
ttcgctggccacaataacccaggtg

SEQ ID NO: 259357 - DNA, 25 bp, Probe sequence
tatgaaacaacattgacactaccaa

SEQ ID NO: 259358 - DNA, 25 bp, Probe sequence
ttagggcacattcatgtaacgacaa

SEQ ID NO: 259359 - DNA, 25 bp, Probe sequence
tattactgcgataatgccaacattt

SEQ ID NO: 259360 - DNA, 25 bp, Probe sequence
tattgtaacggtgatgctgtctctt

SEQ ID NO: 259361 - DNA, 25 bp, Probe sequence
ttcttcgctggccacaataacccag

SEQ ID NO: 259362 - DNA, 25 bp, Probe sequence
attcatacactgactgttttaataa

SEQ ID NO: 259363 - DNA, 25 bp, Probe sequence
attttatatcgcatttctaattatt

SEQ ID NO: 259364 - DNA, 25 bp, Probe sequence
atttctaattattatatggctgaat

SEQ ID NO: 259365 - DNA, 25 bp, Probe sequence
atatcgcatttctaattattatatg

SEQ ID NO: 259366 - DNA, 25 bp, Probe sequence
atcgcatttctaattattatatggc

SEQ ID NO: 259367 - DNA, 25 bp, Probe sequence
atgaagtcattcatacactgactgt

SEQ ID NO: 259368 - DNA, 25 bp, Probe sequence
agtcattcatacactgactgtttta

SEQ ID NO: 259369 - DNA, 25 bp, Probe sequence
actattttatatcgcatttctaatt

SEQ ID NO: 259370 - DNA, 25 bp, Probe sequence
aaactattttatatcgcatttctaa

SEQ ID NO: 259371 - DNA, 25 bp, Probe sequence
aactattttatatcgcatttctaat

SEQ ID NO: 259372 - DNA, 25 bp, Probe sequence
aagagggttaaaaatgacagagttg

SEQ ID NO: 259373 - DNA, 25 bp, Probe sequence
aagtcattcatacactgactgtttt

SEQ ID NO: 259374 - DNA, 25 bp, Probe sequence
aatgaagtcattcatacactgactg

SEQ ID NO: 259375 - DNA, 25 bp, Probe sequence
cactgactgttttaataacaacatt

SEQ ID NO: 259376 - DNA, 25 bp, Probe sequence
cattcatacactgactgttttaata

SEQ ID NO: 259377 - DNA, 25 bp, Probe sequence
ctattttatatcgcatttctaatta

SEQ ID NO: 259378 - DNA, 25 bp, Probe sequence
cgcatttctaattattatatggctg

SEQ ID NO: 259379 - DNA, 25 bp, Probe sequence
gcatttctaattattatatggctga

SEQ ID NO: 259380 - DNA, 25 bp, Probe sequence
gaagtcattcatacactgactgttt

SEQ ID NO: 259381 - DNA, 25 bp, Probe sequence
gaaactattttatatcgcatttcta

SEQ ID NO: 259382 - DNA, 25 bp, Probe sequence
gactgttttaataacaacattgtat

SEQ ID NO: 259383 - DNA, 25 bp, Probe sequence
gagggttaaaaatgacagagttgaa

SEQ ID NO: 259384 - DNA, 25 bp, Probe sequence
gtcattcatacactgactgttttaa

SEQ ID NO: 259385 - DNA, 25 bp, Probe sequence
tgaagtcattcatacactgactgtt

SEQ ID NO: 259386 - DNA, 25 bp, Probe sequence
tcatacactgactgttttaataaca

SEQ ID NO: 259387 - DNA, 25 bp, Probe sequence
tcattcatacactgactgttttaat

SEQ ID NO: 259388 - DNA, 25 bp, Probe sequence
tacactgactgttttaataacaaca

SEQ ID NO: 259389 - DNA, 25 bp, Probe sequence
tatggctgaatatatttttaggaaa

SEQ ID NO: 259390 - DNA, 25 bp, Probe sequence
tatcgcatttctaattattatatgg

SEQ ID NO: 259391 - DNA, 25 bp, Probe sequence
tatatcgcatttctaattattatat

SEQ ID NO: 259392 - DNA, 25 bp, Probe sequence
tttatatcgcatttctaattattat

SEQ ID NO: 259393 - DNA, 25 bp, Probe sequence
ttttatatcgcatttctaattatta

SEQ ID NO: 259394 - DNA, 25 bp, Probe sequence
ttatatcgcatttctaattattata

SEQ ID NO: 259395 - DNA, 25 bp, Probe sequence
ttcatacactgactgttttaataac

SEQ ID NO: 259396 - DNA, 25 bp, Probe sequence
atatgagtatcaaaagtcgtcagaa

SEQ ID NO: 259397 - DNA, 25 bp, Probe sequence
atactaaaataaaggatgccaaatt

SEQ ID NO: 259398 - DNA, 25 bp, Probe sequence
atcaaaagtcgtcagaaaataattc

SEQ ID NO: 259399 - DNA, 25 bp, Probe sequence
atcaagttatatgagtatcaaaagt

SEQ ID NO: 259400 - DNA, 25 bp, Probe sequence
atgagtatcaaaagtcgtcagaaaa

SEQ ID NO: 259401 - DNA, 25 bp, Probe sequence
agtcgtcagaaaataattcagagtg

SEQ ID NO: 259402 - DNA, 25 bp, Probe sequence
agttatatgagtatcaaaagtcgtc

SEQ ID NO: 259403 - DNA, 25 bp, Probe sequence
agtatcaaaagtcgtcagaaaataa

SEQ ID NO: 259404 - DNA, 25 bp, Probe sequence
aaagtcgtcagaaaataattcagag

SEQ ID NO: 259405 - DNA, 25 bp, Probe sequence
aaaagtcgtcagaaaataattcaga

SEQ ID NO: 259406 - DNA, 25 bp, Probe sequence
aagttatatgagtatcaaaagtcgt

SEQ ID NO: 259407 - DNA, 25 bp, Probe sequence
aagtcgtcagaaaataattcagagt

SEQ ID NO: 259408 - DNA, 25 bp, Probe sequence
aatcaagttatatgagtatcaaaag

SEQ ID NO: 259409 - DNA, 25 bp, Probe sequence
aatactaaaataaaggatgccaaat

SEQ ID NO: 259410 - DNA, 25 bp, Probe sequence
caagttatatgagtatcaaaagtcg

SEQ ID NO: 259411 - DNA, 25 bp, Probe sequence
caaaagtcgtcagaaaataattcag

SEQ ID NO: 259412 - DNA, 25 bp, Probe sequence
gagtatcaaaagtcgtcagaaaata

SEQ ID NO: 259413 - DNA, 25 bp, Probe sequence
gttatatgagtatcaaaagtcgtca

SEQ ID NO: 259414 - DNA, 25 bp, Probe sequence
gtatcaaaagtcgtcagaaaataat

SEQ ID NO: 259415 - DNA, 25 bp, Probe sequence
gtaatactaaaataaaggatgccaa

SEQ ID NO: 259416 - DNA, 25 bp, Probe sequence
gtcgtcagaaaataattcagagtgc

SEQ ID NO: 259417 - DNA, 25 bp, Probe sequence
ggtaatactaaaataaaggatgcca

SEQ ID NO: 259418 - DNA, 25 bp, Probe sequence
tgagtatcaaaagtcgtcagaaaat

SEQ ID NO: 259419 - DNA, 25 bp, Probe sequence
tcaaaagtcgtcagaaaataattca

SEQ ID NO: 259420 - DNA, 25 bp, Probe sequence
tcaagttatatgagtatcaaaagtc

SEQ ID NO: 259421 - DNA, 25 bp, Probe sequence
taatactaaaataaaggatgccaaa

SEQ ID NO: 259422 - DNA, 25 bp, Probe sequence
taaaggatgccaaatttaaaacaat

SEQ ID NO: 259423 - DNA, 25 bp, Probe sequence
tatgagtatcaaaagtcgtcagaaa

SEQ ID NO: 259424 - DNA, 25 bp, Probe sequence
tatcaaaagtcgtcagaaaataatt

SEQ ID NO: 259425 - DNA, 25 bp, Probe sequence
tatatgagtatcaaaagtcgtcaga

SEQ ID NO: 259426 - DNA, 25 bp, Probe sequence
ttatatgagtatcaaaagtcgtcag

SEQ ID NO: 259427 - DNA, 25 bp, Probe sequence
attaaagtgtattgtcatcatttca

SEQ ID NO: 259428 - DNA, 25 bp, Probe sequence
atatcgcaaagtgacatttctaatt

SEQ ID NO: 259429 - DNA, 25 bp, Probe sequence
atcgcaaagtgacatttctaattaa

SEQ ID NO: 259430 - DNA, 25 bp, Probe sequence
acagctaaacctttgtctctgcttc

SEQ ID NO: 259431 - DNA, 25 bp, Probe sequence
aaacagctaaacctttgtctctgct

SEQ ID NO: 259432 - DNA, 25 bp, Probe sequence
aaaaacagctaaacctttgtctctg

SEQ ID NO: 259433 - DNA, 25 bp, Probe sequence
aaaacagctaaacctttgtctctgc

SEQ ID NO: 259434 - DNA, 25 bp, Probe sequence
aacagctaaacctttgtctctgctt

SEQ ID NO: 259435 - DNA, 25 bp, Probe sequence
aagtatctatatttacacattactt

SEQ ID NO: 259436 - DNA, 25 bp, Probe sequence
aatttcacaaaaataattcccgctg

SEQ ID NO: 259437 - DNA, 25 bp, Probe sequence
aattaaagtgtattgtcatcatttc

SEQ ID NO: 259438 - DNA, 25 bp, Probe sequence
caatttcacaaaaataattcccgct

SEQ ID NO: 259439 - DNA, 25 bp, Probe sequence
caaaaacagctaaacctttgtctct

SEQ ID NO: 259440 - DNA, 25 bp, Probe sequence
caaagtgacatttctaattaaagtg

SEQ ID NO: 259441 - DNA, 25 bp, Probe sequence
cagctaaacctttgtctctgcttca

SEQ ID NO: 259442 - DNA, 25 bp, Probe sequence
ctttgtctctgcttcaatttcacaa

SEQ ID NO: 259443 - DNA, 25 bp, Probe sequence
ctctgcttcaatttcacaaaaataa

SEQ ID NO: 259444 - DNA, 25 bp, Probe sequence
ctgaaagtatctatatttacacatt

SEQ ID NO: 259445 - DNA, 25 bp, Probe sequence
cccgctgaaagtatctatatttaca

SEQ ID NO: 259446 - DNA, 25 bp, Probe sequence
gcaaagtgacatttctaattaaagt

SEQ ID NO: 259447 - DNA, 25 bp, Probe sequence
gacatttctaattaaagtgtattgt

SEQ ID NO: 259448 - DNA, 25 bp, Probe sequence
gtctctgcttcaatttcacaaaaat

SEQ ID NO: 259449 - DNA, 25 bp, Probe sequence
gtgacatttctaattaaagtgtatt

SEQ ID NO: 259450 - DNA, 25 bp, Probe sequence
tgtctctgcttcaatttcacaaaaa

SEQ ID NO: 259451 - DNA, 25 bp, Probe sequence
tcgcaaagtgacatttctaattaaa

SEQ ID NO: 259452 - DNA, 25 bp, Probe sequence
tctgcttcaatttcacaaaaataat

SEQ ID NO: 259453 - DNA, 25 bp, Probe sequence
tctctgcttcaatttcacaaaaata

SEQ ID NO: 259454 - DNA, 25 bp, Probe sequence
taaacctttgtctctgcttcaattt

SEQ ID NO: 259455 - DNA, 25 bp, Probe sequence
tatcgcaaagtgacatttctaatta

SEQ ID NO: 259456 - DNA, 25 bp, Probe sequence
tatatcgcaaagtgacatttctaat

SEQ ID NO: 259457 - DNA, 25 bp, Probe sequence
tttgtctctgcttcaatttcacaaa

SEQ ID NO: 259458 - DNA, 25 bp, Probe sequence
ttatatcgcaaagtgacatttctaa

SEQ ID NO: 259459 - DNA, 25 bp, Probe sequence
ttaaagtgtattgtcatcatttcaa

SEQ ID NO: 259460 - DNA, 25 bp, Probe sequence
ttgtctctgcttcaatttcacaaaa

SEQ ID NO: 259461 - DNA, 25 bp, Probe sequence
atagctaaaccttcttcttcgattc

SEQ ID NO: 259462 - DNA, 25 bp, Probe sequence
attcagtttcatgaaataattcccg

SEQ ID NO: 259463 - DNA, 25 bp, Probe sequence
atatcattcaataatagctaaacct

SEQ ID NO: 259464 - DNA, 25 bp, Probe sequence
ataatagctaaaccttcttcttcga

SEQ ID NO: 259465 - DNA, 25 bp, Probe sequence
atcattcaataatagctaaaccttc

SEQ ID NO: 259466 - DNA, 25 bp, Probe sequence
aaccttcttcttcgattcagtttca

SEQ ID NO: 259467 - DNA, 25 bp, Probe sequence
aagtatcatgatttacacattactt

SEQ ID NO: 259468 - DNA, 25 bp, Probe sequence
aataatagctaaaccttcttcttcg

SEQ ID NO: 259469 - DNA, 25 bp, Probe sequence
aatagctaaaccttcttcttcgatt

SEQ ID NO: 259470 - DNA, 25 bp, Probe sequence
caataatagctaaaccttcttcttc

SEQ ID NO: 259471 - DNA, 25 bp, Probe sequence
cagtttcatgaaataattcccgctg

SEQ ID NO: 259472 - DNA, 25 bp, Probe sequence
cattcaataatagctaaaccttctt

SEQ ID NO: 259473 - DNA, 25 bp, Probe sequence
ctaaaccttcttcttcgattcagtt

SEQ ID NO: 259474 - DNA, 25 bp, Probe sequence
cttcgattcagtttcatgaaataat

SEQ ID NO: 259475 - DNA, 25 bp, Probe sequence
cttcttcgattcagtttcatgaaat

SEQ ID NO: 259476 - DNA, 25 bp, Probe sequence
cttcttcttcgattcagtttcatga

SEQ ID NO: 259477 - DNA, 25 bp, Probe sequence
ctgaaagtatcatgatttacacatt

SEQ ID NO: 259478 - DNA, 25 bp, Probe sequence
cccgctgaaagtatcatgatttaca

SEQ ID NO: 259479 - DNA, 25 bp, Probe sequence
ccttcttcttcgattcagtttcatg

SEQ ID NO: 259480 - DNA, 25 bp, Probe sequence
gattcagtttcatgaaataattccc

SEQ ID NO: 259481 - DNA, 25 bp, Probe sequence
tcttcgattcagtttcatgaaataa

SEQ ID NO: 259482 - DNA, 25 bp, Probe sequence
tcttcttcgattcagtttcatgaaa

SEQ ID NO: 259483 - DNA, 25 bp, Probe sequence
tcattcaataatagctaaaccttct

SEQ ID NO: 259484 - DNA, 25 bp, Probe sequence
tcagtttcatgaaataattcccgct

SEQ ID NO: 259485 - DNA, 25 bp, Probe sequence
tcaataatagctaaaccttcttctt

SEQ ID NO: 259486 - DNA, 25 bp, Probe sequence
taatagctaaaccttcttcttcgat

SEQ ID NO: 259487 - DNA, 25 bp, Probe sequence
taaaccttcttcttcgattcagttt

SEQ ID NO: 259488 - DNA, 25 bp, Probe sequence
tatcattcaataatagctaaacctt

SEQ ID NO: 259489 - DNA, 25 bp, Probe sequence
attcaataatagctaaaccttcttc

SEQ ID NO: 259490 - DNA, 25 bp, Probe sequence
ttcaataatagctaaaccttcttct

SEQ ID NO: 259491 - DNA, 25 bp, Probe sequence
ttcaatatcattcaataatagctaa

SEQ ID NO: 259492 - DNA, 25 bp, Probe sequence
ttcagtttcatgaaataattcccgc

SEQ ID NO: 259493 - DNA, 25 bp, Probe sequence
ttcttcgattcagtttcatgaaata

SEQ ID NO: 259494 - DNA, 25 bp, Probe sequence
ttcttcttcgattcagtttcatgaa

SEQ ID NO: 259495 - DNA, 25 bp, Probe sequence
attggattcccaatttctacagaca

SEQ ID NO: 259496 - DNA, 25 bp, Probe sequence
attcccaatttctacagacaatgca

SEQ ID NO: 259497 - DNA, 25 bp, Probe sequence
atttctacagacaatgcaagttggg

SEQ ID NO: 259498 - DNA, 25 bp, Probe sequence
atgtgcaagttggggtgggccccaa

SEQ ID NO: 259499 - DNA, 25 bp, Probe sequence
agacaatgcaagttgggggcggggc

SEQ ID NO: 259500 - DNA, 25 bp, Probe sequence
acagacaatgcaagttgggggcggg

SEQ ID NO: 259501 - DNA, 25 bp, Probe sequence
aatgtgcaagttggggtgggcccca

SEQ ID NO: 259502 - DNA, 25 bp, Probe sequence
aagtcagcttacattaatgtgcaag

SEQ ID NO: 259503 - DNA, 25 bp, Probe sequence
caatttctacagacaatgcaagttg

SEQ ID NO: 259504 - DNA, 25 bp, Probe sequence
caacacaaaagctggcggaaagtca

SEQ ID NO: 259505 - DNA, 25 bp, Probe sequence
ctggcggaaagtcagcttacattaa

SEQ ID NO: 259506 - DNA, 25 bp, Probe sequence
cccaatttctacagacaatgcaagt

SEQ ID NO: 259507 - DNA, 25 bp, Probe sequence
cccaacacaaaagctggcggaaagt

SEQ ID NO: 259508 - DNA, 25 bp, Probe sequence
gccccaacacaaaagctggcggaaa

SEQ ID NO: 259509 - DNA, 25 bp, Probe sequence
gctggcggaaagtcagcttacatta

SEQ ID NO: 259510 - DNA, 25 bp, Probe sequence
gcaagttggggtgggccccaacata

SEQ ID NO: 259511 - DNA, 25 bp, Probe sequence
gaaagtcagcttacattaatgtgca

SEQ ID NO: 259512 - DNA, 25 bp, Probe sequence
gacaatgcaagttgggggcggggcc

SEQ ID NO: 259513 - DNA, 25 bp, Probe sequence
gattcccaatttctacagacaatgc

SEQ ID NO: 259514 - DNA, 25 bp, Probe sequence
gtcagcttacattaatgtgcaagtt

SEQ ID NO: 259515 - DNA, 25 bp, Probe sequence
gtgcaagttggggtgggccccaaca

SEQ ID NO: 259516 - DNA, 25 bp, Probe sequence
gtgggccccaacataaagaaatact

SEQ ID NO: 259517 - DNA, 25 bp, Probe sequence
gggccccaacataaagaaattggat

SEQ ID NO: 259518 - DNA, 25 bp, Probe sequence
ggattcccaatttctacagacaatg

SEQ ID NO: 259519 - DNA, 25 bp, Probe sequence
ggaaagtcagcttacattaatgtgc

SEQ ID NO: 259520 - DNA, 25 bp, Probe sequence
ggcggaaagtcagcttacattaatg

SEQ ID NO: 259521 - DNA, 25 bp, Probe sequence
ggccccaacacaaaagctggcggaa

SEQ ID NO: 259522 - DNA, 25 bp, Probe sequence
tgacggggccccaacataaagaaat

SEQ ID NO: 259523 - DNA, 25 bp, Probe sequence
tggattcccaatttctacagacaat

SEQ ID NO: 259524 - DNA, 25 bp, Probe sequence
tgggccccaacataaagaaatactt

SEQ ID NO: 259525 - DNA, 25 bp, Probe sequence
tctacagacaatgcaagttgggggc

SEQ ID NO: 259526 - DNA, 25 bp, Probe sequence
taatgtgcaagttggggtgggcccc

SEQ ID NO: 259527 - DNA, 25 bp, Probe sequence
ttcccaatttctacagacaatgcaa

SEQ ID NO: 259528 - DNA, 25 bp, Probe sequence
ttggattcccaatttctacagacaa

SEQ ID NO: 259529 - DNA, 25 bp, Probe sequence
attgtcatttccttgcaatcacacc

SEQ ID NO: 259530 - DNA, 25 bp, Probe sequence
atttccttgcaatcacacctaaaaa

SEQ ID NO: 259531 - DNA, 25 bp, Probe sequence
atgctagtagtatgtcgtagaccta

SEQ ID NO: 259532 - DNA, 25 bp, Probe sequence
atgtcgtagacctatgacaaatctg

SEQ ID NO: 259533 - DNA, 25 bp, Probe sequence
agtagtatgtcgtagacctatgaca

SEQ ID NO: 259534 - DNA, 25 bp, Probe sequence
agtatgtcgtagacctatgacaaat

SEQ ID NO: 259535 - DNA, 25 bp, Probe sequence
catttccttgcaatcacacctaaaa

SEQ ID NO: 259536 - DNA, 25 bp, Probe sequence
cttgcaatcacacctaaaaacacta

SEQ ID NO: 259537 - DNA, 25 bp, Probe sequence
ctagtagtatgtcgtagacctatga

SEQ ID NO: 259538 - DNA, 25 bp, Probe sequence
ccttgcaatcacacctaaaaacact

SEQ ID NO: 259539 - DNA, 25 bp, Probe sequence
gctagtagtatgtcgtagacctatg

SEQ ID NO: 259540 - DNA, 25 bp, Probe sequence
gtatgtcgtagacctatgacaaatc

SEQ ID NO: 259541 - DNA, 25 bp, Probe sequence
gtagtatgtcgtagacctatgacaa

SEQ ID NO: 259542 - DNA, 25 bp, Probe sequence
gtcgtagacctatgacaaatctgaa

SEQ ID NO: 259543 - DNA, 25 bp, Probe sequence
tccttgcaatcacacctaaaaacac

SEQ ID NO: 259544 - DNA, 25 bp, Probe sequence
tgtcgtagacctatgacaaatctga

SEQ ID NO: 259545 - DNA, 25 bp, Probe sequence
tgcaatcacacctaaaaacactaat

SEQ ID NO: 259546 - DNA, 25 bp, Probe sequence
tgctagtagtatgtcgtagacctat

SEQ ID NO: 259547 - DNA, 25 bp, Probe sequence
tcgtagacctatgacaaatctgaat

SEQ ID NO: 259548 - DNA, 25 bp, Probe sequence
tagtagtatgtcgtagacctatgac

SEQ ID NO: 259549 - DNA, 25 bp, Probe sequence
tagtatgtcgtagacctatgacaaa

SEQ ID NO: 259550 - DNA, 25 bp, Probe sequence
tatgtcgtagacctatgacaaatct

SEQ ID NO: 259551 - DNA, 25 bp, Probe sequence
tttccttgcaatcacacctaaaaac

SEQ ID NO: 259552 - DNA, 25 bp, Probe sequence
ttccttgcaatcacacctaaaaaca

SEQ ID NO: 259553 - DNA, 25 bp, Probe sequence
ttgcaatcacacctaaaaacactaa

SEQ ID NO: 259554 - DNA, 25 bp, Probe sequence
ttgtcatttccttgcaatcacacct

SEQ ID NO: 259555 - DNA, 25 bp, Probe sequence
attgaagtcgaagttgaagcagcac

SEQ ID NO: 259556 - DNA, 25 bp, Probe sequence
atacctatgcgatggccattgcaat

SEQ ID NO: 259557 - DNA, 25 bp, Probe sequence
atgtcgcatagttgatacgcgttgt

SEQ ID NO: 259558 - DNA, 25 bp, Probe sequence
agggtttgaacacacgcataacaga

SEQ ID NO: 259559 - DNA, 25 bp, Probe sequence
acctcaagggtttgaacacacgcat

SEQ ID NO: 259560 - DNA, 25 bp, Probe sequence
acatgtcgcatagttgatacgcgtt

SEQ ID NO: 259561 - DNA, 25 bp, Probe sequence
acacacgcataacagattaaatatt

SEQ ID NO: 259562 - DNA, 25 bp, Probe sequence
aacctcaagggtttgaacacacgca

SEQ ID NO: 259563 - DNA, 25 bp, Probe sequence
aagtcgaagttgaagcagcacataa

SEQ ID NO: 259564 - DNA, 25 bp, Probe sequence
aagggtttgaacacacgcataacag

SEQ ID NO: 259565 - DNA, 25 bp, Probe sequence
aatatacctatgcgatggccattgc

SEQ ID NO: 259566 - DNA, 25 bp, Probe sequence
caagggtttgaacacacgcataaca

SEQ ID NO: 259567 - DNA, 25 bp, Probe sequence
cacatgtcgcatagttgatacgcgt

SEQ ID NO: 259568 - DNA, 25 bp, Probe sequence
catgtcgcatagttgatacgcgttg

SEQ ID NO: 259569 - DNA, 25 bp, Probe sequence
ctatgcgatggccattgcaatttta

SEQ ID NO: 259570 - DNA, 25 bp, Probe sequence
ctcaagggtttgaacacacgcataa

SEQ ID NO: 259571 - DNA, 25 bp, Probe sequence
cgaagttgaagcagcacataataat

SEQ ID NO: 259572 - DNA, 25 bp, Probe sequence
cctatgcgatggccattgcaatttt

SEQ ID NO: 259573 - DNA, 25 bp, Probe sequence
gaatatacctatgcgatggccattg

SEQ ID NO: 259574 - DNA, 25 bp, Probe sequence
gaagtcgaagttgaagcagcacata

SEQ ID NO: 259575 - DNA, 25 bp, Probe sequence
gaacctcaagggtttgaacacacgc

SEQ ID NO: 259576 - DNA, 25 bp, Probe sequence
gaacacacgcataacagattaaata

SEQ ID NO: 259577 - DNA, 25 bp, Probe sequence
gatgaacctcaagggtttgaacaca

SEQ ID NO: 259578 - DNA, 25 bp, Probe sequence
gtcgaagttgaagcagcacataata

SEQ ID NO: 259579 - DNA, 25 bp, Probe sequence
gggtttgaacacacgcataacagat

SEQ ID NO: 259580 - DNA, 25 bp, Probe sequence
ggtttgaacacacgcataacagatt

SEQ ID NO: 259581 - DNA, 25 bp, Probe sequence
tgaatatacctatgcgatggccatt

SEQ ID NO: 259582 - DNA, 25 bp, Probe sequence
tgaagtcgaagttgaagcagcacat

SEQ ID NO: 259583 - DNA, 25 bp, Probe sequence
tcaagggtttgaacacacgcataac

SEQ ID NO: 259584 - DNA, 25 bp, Probe sequence
tacctatgcgatggccattgcaatt

SEQ ID NO: 259585 - DNA, 25 bp, Probe sequence
tatgcgatggccattgcaattttaa

SEQ ID NO: 259586 - DNA, 25 bp, Probe sequence
tatacctatgcgatggccattgcaa

SEQ ID NO: 259587 - DNA, 25 bp, Probe sequence
tttgaacacacgcataacagattaa

SEQ ID NO: 259588 - DNA, 25 bp, Probe sequence
ttgaacacacgcataacagattaaa

SEQ ID NO: 259589 - DNA, 25 bp, Probe sequence
attgttattgtcttaagcaccgtta

SEQ ID NO: 259590 - DNA, 25 bp, Probe sequence
attgtcttaagcaccgttacaacac

SEQ ID NO: 259591 - DNA, 25 bp, Probe sequence
agcaccgttacaacaccaattatag

SEQ ID NO: 259592 - DNA, 25 bp, Probe sequence
acaccaattataggtattccagctg

SEQ ID NO: 259593 - DNA, 25 bp, Probe sequence
aacaccaattataggtattccagct

SEQ ID NO: 259594 - DNA, 25 bp, Probe sequence
aagcaccgttacaacaccaattata

SEQ ID NO: 259595 - DNA, 25 bp, Probe sequence
aattataggtattccagctggttta

SEQ ID NO: 259596 - DNA, 25 bp, Probe sequence
aattattgttattgtcttaagcacc

SEQ ID NO: 259597 - DNA, 25 bp, Probe sequence
caattataggtattccagctggttt

SEQ ID NO: 259598 - DNA, 25 bp, Probe sequence
caccgttacaacaccaattataggt

SEQ ID NO: 259599 - DNA, 25 bp, Probe sequence
caccaattataggtattccagctgg

SEQ ID NO: 259600 - DNA, 25 bp, Probe sequence
cttaagcaccgttacaacaccaatt

SEQ ID NO: 259601 - DNA, 25 bp, Probe sequence
gcgcttattatttaaaacgccgcga

SEQ ID NO: 259602 - DNA, 25 bp, Probe sequence
gcttattatttaaaacgccgcgaag

SEQ ID NO: 259603 - DNA, 25 bp, Probe sequence
gctttagcaattattgttattgtct

SEQ ID NO: 259604 - DNA, 25 bp, Probe sequence
gcaccgttacaacaccaattatagg

SEQ ID NO: 259605 - DNA, 25 bp, Probe sequence
gttattgtcttaagcaccgttacaa

SEQ ID NO: 259606 - DNA, 25 bp, Probe sequence
gtcttaagcaccgttacaacaccaa

SEQ ID NO: 259607 - DNA, 25 bp, Probe sequence
ggtataacgttattgctttagcaat

SEQ ID NO: 259608 - DNA, 25 bp, Probe sequence
ggtttattaggtggcgcttattatt

SEQ ID NO: 259609 - DNA, 25 bp, Probe sequence
tggtataacgttattgctttagcaa

SEQ ID NO: 259610 - DNA, 25 bp, Probe sequence
tgtcttaagcaccgttacaacacca

SEQ ID NO: 259611 - DNA, 25 bp, Probe sequence
tgttattgtcttaagcaccgttaca

SEQ ID NO: 259612 - DNA, 25 bp, Probe sequence
tcttaagcaccgttacaacaccaat

SEQ ID NO: 259613 - DNA, 25 bp, Probe sequence
taagcaccgttacaacaccaattat

SEQ ID NO: 259614 - DNA, 25 bp, Probe sequence
tacgaggatttaaaaaacttgactg

SEQ ID NO: 259615 - DNA, 25 bp, Probe sequence
tattgtcttaagcaccgttacaaca

SEQ ID NO: 259616 - DNA, 25 bp, Probe sequence
tattaggtggcgcttattatttaaa

SEQ ID NO: 259617 - DNA, 25 bp, Probe sequence
tattgttattgtcttaagcaccgtt

SEQ ID NO: 259618 - DNA, 25 bp, Probe sequence
ttattgttattgtcttaagcaccgt

SEQ ID NO: 259619 - DNA, 25 bp, Probe sequence
ttattgtcttaagcaccgttacaac

SEQ ID NO: 259620 - DNA, 25 bp, Probe sequence
ttaagcaccgttacaacaccaatta

SEQ ID NO: 259621 - DNA, 25 bp, Probe sequence
ttgtcttaagcaccgttacaacacc

SEQ ID NO: 259622 - DNA, 25 bp, Probe sequence
ttgttattgtcttaagcaccgttac

SEQ ID NO: 259623 - DNA, 25 bp, Probe sequence
attactagtcatcttattgtttggt

SEQ ID NO: 259624 - DNA, 25 bp, Probe sequence
attatattactagtcatcttattgt

SEQ ID NO: 259625 - DNA, 25 bp, Probe sequence
atattactagtcatcttattgtttg

SEQ ID NO: 259626 - DNA, 25 bp, Probe sequence
agcaattatattactagtcatctta

SEQ ID NO: 259627 - DNA, 25 bp, Probe sequence
actagtcatcttattgtttggtgtg

SEQ ID NO: 259628 - DNA, 25 bp, Probe sequence
aagtagattgagacattttgaaggt

SEQ ID NO: 259629 - DNA, 25 bp, Probe sequence
caagctgaacagttaaaaggcgatg

SEQ ID NO: 259630 - DNA, 25 bp, Probe sequence
ctagtcatcttattgtttggtgtga

SEQ ID NO: 259631 - DNA, 25 bp, Probe sequence
gctgaacagttaaaaggcgatgtga

SEQ ID NO: 259632 - DNA, 25 bp, Probe sequence
gcaattatattactagtcatcttat

SEQ ID NO: 259633 - DNA, 25 bp, Probe sequence
gagcgggagatagagatattaagaa

SEQ ID NO: 259634 - DNA, 25 bp, Probe sequence
gatgttgcaagctgaacagttaaaa

SEQ ID NO: 259635 - DNA, 25 bp, Probe sequence
gttgcaagctgaacagttaaaaggc

SEQ ID NO: 259636 - DNA, 25 bp, Probe sequence
gttaaagagcgggagatagagatat

SEQ ID NO: 259637 - DNA, 25 bp, Probe sequence
gtttggtgtgatgttgcaagctgaa

SEQ ID NO: 259638 - DNA, 25 bp, Probe sequence
gtcatcttattgtttggtgtgatgt

SEQ ID NO: 259639 - DNA, 25 bp, Probe sequence
gtcatagcaattatattactagtca

SEQ ID NO: 259640 - DNA, 25 bp, Probe sequence
gtgaaagttaaagagcgggagatag

SEQ ID NO: 259641 - DNA, 25 bp, Probe sequence
gtgatgttgcaagctgaacagttaa

SEQ ID NO: 259642 - DNA, 25 bp, Probe sequence
gtgtgatgttgcaagctgaacagtt

SEQ ID NO: 259643 - DNA, 25 bp, Probe sequence
ggttagtcatagcaattatattact

SEQ ID NO: 259644 - DNA, 25 bp, Probe sequence
ggcgatgtgaaagttaaagagcggg

SEQ ID NO: 259645 - DNA, 25 bp, Probe sequence
tggtgtgatgttgcaagctgaacag

SEQ ID NO: 259646 - DNA, 25 bp, Probe sequence
tgtggttagtcatagcaattatatt

SEQ ID NO: 259647 - DNA, 25 bp, Probe sequence
tgatgtggttagtcatagcaattat

SEQ ID NO: 259648 - DNA, 25 bp, Probe sequence
tcttattgtttggtgtgatgttgca

SEQ ID NO: 259649 - DNA, 25 bp, Probe sequence
taagaagtagattgagacattttga

SEQ ID NO: 259650 - DNA, 25 bp, Probe sequence
tactagtcatcttattgtttggtgt

SEQ ID NO: 259651 - DNA, 25 bp, Probe sequence
tagtcatcttattgtttggtgtgat

SEQ ID NO: 259652 - DNA, 25 bp, Probe sequence
tatattactagtcatcttattgttt

SEQ ID NO: 259653 - DNA, 25 bp, Probe sequence
tattactagtcatcttattgtttgg

SEQ ID NO: 259654 - DNA, 25 bp, Probe sequence
tttggtgtgatgttgcaagctgaac

SEQ ID NO: 259655 - DNA, 25 bp, Probe sequence
ttactagtcatcttattgtttggtg

SEQ ID NO: 259656 - DNA, 25 bp, Probe sequence
ttggtgtgatgttgcaagctgaaca

SEQ ID NO: 259657 - DNA, 25 bp, Probe sequence
atgtgaaagttaaagagcgggagat

SEQ ID NO: 259658 - DNA, 25 bp, Probe sequence
aggcgatgtgaaagttaaagagcgg

SEQ ID NO: 259659 - DNA, 25 bp, Probe sequence
agtagattgagacattttgaaggtt

SEQ ID NO: 259660 - DNA, 25 bp, Probe sequence
agagcgggagatagagatattaaga

SEQ ID NO: 259661 - DNA, 25 bp, Probe sequence
agaagtagattgagacattttgaag

SEQ ID NO: 259662 - DNA, 25 bp, Probe sequence
agctgaacagttaaaaggcgatgtg

SEQ ID NO: 259663 - DNA, 25 bp, Probe sequence
aaaaggcgatgtgaaagttaaagag

SEQ ID NO: 259664 - DNA, 25 bp, Probe sequence
aagctgaacagttaaaaggcgatgt

SEQ ID NO: 259665 - DNA, 25 bp, Probe sequence
aagaagtagattgagacattttgaa

SEQ ID NO: 259666 - DNA, 25 bp, Probe sequence
aagagcgggagatagagatattaag

SEQ ID NO: 259667 - DNA, 25 bp, Probe sequence
aagttaaagagcgggagatagagat

SEQ ID NO: 259668 - DNA, 25 bp, Probe sequence
aagtagattgagacattttgaaggt

SEQ ID NO: 259669 - DNA, 25 bp, Probe sequence
aaggcgatgtgaaagttaaagagcg

SEQ ID NO: 259670 - DNA, 25 bp, Probe sequence
caagctgaacagttaaaaggcgatg

SEQ ID NO: 259671 - DNA, 25 bp, Probe sequence
cagttaaaaggcgatgtgaaagtta

SEQ ID NO: 259672 - DNA, 25 bp, Probe sequence
ctgaacagttaaaaggcgatgtgaa

SEQ ID NO: 259673 - DNA, 25 bp, Probe sequence
gcgatgtgaaagttaaagagcggga

SEQ ID NO: 259674 - DNA, 25 bp, Probe sequence
gcgggagatagagatattaagaagt

SEQ ID NO: 259675 - DNA, 25 bp, Probe sequence
gctgaacagttaaaaggcgatgtga

SEQ ID NO: 259676 - DNA, 25 bp, Probe sequence
gcaagctgaacagttaaaaggcgat

SEQ ID NO: 259677 - DNA, 25 bp, Probe sequence
gaagtagattgagacattttgaagg

SEQ ID NO: 259678 - DNA, 25 bp, Probe sequence
gaacagttaaaaggcgatgtgaaag

SEQ ID NO: 259679 - DNA, 25 bp, Probe sequence
gaaagttaaagagcgggagatagag

SEQ ID NO: 259680 - DNA, 25 bp, Probe sequence
gagcgggagatagagatattaagaa

SEQ ID NO: 259681 - DNA, 25 bp, Probe sequence
gatgtgaaagttaaagagcgggaga

SEQ ID NO: 259682 - DNA, 25 bp, Probe sequence
gttaaagagcgggagatagagatat

SEQ ID NO: 259683 - DNA, 25 bp, Probe sequence
gtagattgagacattttgaaggtta

SEQ ID NO: 259684 - DNA, 25 bp, Probe sequence
gtgaaagttaaagagcgggagatag

SEQ ID NO: 259685 - DNA, 25 bp, Probe sequence
ggcgatgtgaaagttaaagagcggg

SEQ ID NO: 259686 - DNA, 25 bp, Probe sequence
tgcaagctgaacagttaaaaggcga

SEQ ID NO: 259687 - DNA, 25 bp, Probe sequence
ttgcaagctgaacagttaaaaggcg

SEQ ID NO: 259688 - DNA, 25 bp, Probe sequence
taagaagtagattgagacattttga

SEQ ID NO: 259689 - DNA, 25 bp, Probe sequence
tagattgagacattttgaaggttaa

SEQ ID NO: 259690 - DNA, 25 bp, Probe sequence
ttaaagagcgggagatagagatatt

SEQ ID NO: 259691 - DNA, 25 bp, Probe sequence
ataactttatgccatcggtattaac

SEQ ID NO: 259692 - DNA, 25 bp, Probe sequence
atcttcaatgaaacggtggaaactg

SEQ ID NO: 259693 - DNA, 25 bp, Probe sequence
accaaacgcagcttgccaaactagc

SEQ ID NO: 259694 - DNA, 25 bp, Probe sequence
acgcagcttgccaaactagcgggtg

SEQ ID NO: 259695 - DNA, 25 bp, Probe sequence
acgagcacgagatggcttaaaccaa

SEQ ID NO: 259696 - DNA, 25 bp, Probe sequence
actttatgccatcggtattaactgc

SEQ ID NO: 259697 - DNA, 25 bp, Probe sequence
aaaccaaacgcagcttgccaaacta

SEQ ID NO: 259698 - DNA, 25 bp, Probe sequence
aacgcagcttgccaaactagcgggt

SEQ ID NO: 259699 - DNA, 25 bp, Probe sequence
caagacaaaccatttcgctaattga

SEQ ID NO: 259700 - DNA, 25 bp, Probe sequence
caaacgcagcttgccaaactagcgg

SEQ ID NO: 259701 - DNA, 25 bp, Probe sequence
ctagcgggtgtttcaagacaaacca

SEQ ID NO: 259702 - DNA, 25 bp, Probe sequence
ctgtttttattattgaggaggatga

SEQ ID NO: 259703 - DNA, 25 bp, Probe sequence
gccatcggtattaactgcaataaag

SEQ ID NO: 259704 - DNA, 25 bp, Probe sequence
gccaaactagcgggtgtttcaagac

SEQ ID NO: 259705 - DNA, 25 bp, Probe sequence
gcgggtgtttcaagacaaaccattt

SEQ ID NO: 259706 - DNA, 25 bp, Probe sequence
gctcgtatcttcaatgaaacggtgg

SEQ ID NO: 259707 - DNA, 25 bp, Probe sequence
gcttgccaaactagcgggtgtttca

SEQ ID NO: 259708 - DNA, 25 bp, Probe sequence
gcagcttgccaaactagcgggtgtt

SEQ ID NO: 259709 - DNA, 25 bp, Probe sequence
gcacgagatggcttaaaccaaacgc

SEQ ID NO: 259710 - DNA, 25 bp, Probe sequence
gcaataaagattgctcgtatcttca

SEQ ID NO: 259711 - DNA, 25 bp, Probe sequence
gaattacgagcacgagatggcttaa

SEQ ID NO: 259712 - DNA, 25 bp, Probe sequence
gaaataactttatgccatcggtatt

SEQ ID NO: 259713 - DNA, 25 bp, Probe sequence
gacaaaccatttcgctaattgagcg

SEQ ID NO: 259714 - DNA, 25 bp, Probe sequence
gagcgaaataactttatgccatcgg

SEQ ID NO: 259715 - DNA, 25 bp, Probe sequence
gagatggcttaaaccaaacgcagct

SEQ ID NO: 259716 - DNA, 25 bp, Probe sequence
gatggcttaaaccaaacgcagcttg

SEQ ID NO: 259717 - DNA, 25 bp, Probe sequence
gattgctcgtatcttcaatgaaacg

SEQ ID NO: 259718 - DNA, 25 bp, Probe sequence
gattgaaagaattacgagcacgaga

SEQ ID NO: 259719 - DNA, 25 bp, Probe sequence
gtggaaactgtttttattattgagg

SEQ ID NO: 259720 - DNA, 25 bp, Probe sequence
ggtgtttcaagacaaaccatttcgc

SEQ ID NO: 259721 - DNA, 25 bp, Probe sequence
ggcttaaaccaaacgcagcttgcca

SEQ ID NO: 259722 - DNA, 25 bp, Probe sequence
tatgccatcggtattaactgcaata

SEQ ID NO: 259723 - DNA, 25 bp, Probe sequence
tttcaagacaaaccatttcgctaat

SEQ ID NO: 259724 - DNA, 25 bp, Probe sequence
ttaaaccaaacgcagcttgccaaac

SEQ ID NO: 259725 - DNA, 25 bp, Probe sequence
atgcccaaatgatgactttagctaa

SEQ ID NO: 259726 - DNA, 25 bp, Probe sequence
atgctgcttgatgcccaaatgatga

SEQ ID NO: 259727 - DNA, 25 bp, Probe sequence
atgactttagctaaattgattagtc

SEQ ID NO: 259728 - DNA, 25 bp, Probe sequence
atgatgactttagctaaattgatta

SEQ ID NO: 259729 - DNA, 25 bp, Probe sequence
actttagctaaattgattagtcact

SEQ ID NO: 259730 - DNA, 25 bp, Probe sequence
aaatgatgactttagctaaattgat

SEQ ID NO: 259731 - DNA, 25 bp, Probe sequence
aatgatgactttagctaaattgatt

SEQ ID NO: 259732 - DNA, 25 bp, Probe sequence
caaatgatgactttagctaaattga

SEQ ID NO: 259733 - DNA, 25 bp, Probe sequence
cttgatgcccaaatgatgactttag

SEQ ID NO: 259734 - DNA, 25 bp, Probe sequence
ctttagctaaattgattagtcactt

SEQ ID NO: 259735 - DNA, 25 bp, Probe sequence
ctgcttgatgcccaaatgatgactt

SEQ ID NO: 259736 - DNA, 25 bp, Probe sequence
cccaaatgatgactttagctaaatt

SEQ ID NO: 259737 - DNA, 25 bp, Probe sequence
ccaaatgatgactttagctaaattg

SEQ ID NO: 259738 - DNA, 25 bp, Probe sequence
gcccaaatgatgactttagctaaat

SEQ ID NO: 259739 - DNA, 25 bp, Probe sequence
gctgcttgatgcccaaatgatgact

SEQ ID NO: 259740 - DNA, 25 bp, Probe sequence
gcttgatgcccaaatgatgacttta

SEQ ID NO: 259741 - DNA, 25 bp, Probe sequence
gactttagctaaattgattagtcac

SEQ ID NO: 259742 - DNA, 25 bp, Probe sequence
gatgactttagctaaattgattagt

SEQ ID NO: 259743 - DNA, 25 bp, Probe sequence
gatgcccaaatgatgactttagcta

SEQ ID NO: 259744 - DNA, 25 bp, Probe sequence
tgatgcccaaatgatgactttagct

SEQ ID NO: 259745 - DNA, 25 bp, Probe sequence
tgatgactttagctaaattgattag

SEQ ID NO: 259746 - DNA, 25 bp, Probe sequence
tgactttagctaaattgattagtca

SEQ ID NO: 259747 - DNA, 25 bp, Probe sequence
tgcttgatgcccaaatgatgacttt

SEQ ID NO: 259748 - DNA, 25 bp, Probe sequence
tgcccaaatgatgactttagctaaa

SEQ ID NO: 259749 - DNA, 25 bp, Probe sequence
tgctgcttgatgcccaaatgatgac

SEQ ID NO: 259750 - DNA, 25 bp, Probe sequence
tatgctgcttgatgcccaaatgatg

SEQ ID NO: 259751 - DNA, 25 bp, Probe sequence
tttagctaaattgattagtcacttt

SEQ ID NO: 259752 - DNA, 25 bp, Probe sequence
ttgatgcccaaatgatgactttagc

SEQ ID NO: 259753 - DNA, 25 bp, Probe sequence
attgtgatgatttattgtttgaaag

SEQ ID NO: 259754 - DNA, 25 bp, Probe sequence
attaggtgtgtttattgtgatgatt

SEQ ID NO: 259755 - DNA, 25 bp, Probe sequence
atacttatgtttgagaactattgaa

SEQ ID NO: 259756 - DNA, 25 bp, Probe sequence
atgtgtcaatacttatgtttgagaa

SEQ ID NO: 259757 - DNA, 25 bp, Probe sequence
aggtgtgtttattgtgatgatttat

SEQ ID NO: 259758 - DNA, 25 bp, Probe sequence
agttgttgcattaacggtgagattg

SEQ ID NO: 259759 - DNA, 25 bp, Probe sequence
agaactattgaattaggtgtgttta

SEQ ID NO: 259760 - DNA, 25 bp, Probe sequence
aaagttgttgcattaacggtgagat

SEQ ID NO: 259761 - DNA, 25 bp, Probe sequence
aactattgaattaggtgtgtttatt

SEQ ID NO: 259762 - DNA, 25 bp, Probe sequence
aagttgttgcattaacggtgagatt

SEQ ID NO: 259763 - DNA, 25 bp, Probe sequence
ctattgaattaggtgtgtttattgt

SEQ ID NO: 259764 - DNA, 25 bp, Probe sequence
gaattaggtgtgtttattgtgatga

SEQ ID NO: 259765 - DNA, 25 bp, Probe sequence
gaactattgaattaggtgtgtttat

SEQ ID NO: 259766 - DNA, 25 bp, Probe sequence
gaaagttgttgcattaacggtgaga

SEQ ID NO: 259767 - DNA, 25 bp, Probe sequence
gagaactattgaattaggtgtgttt

SEQ ID NO: 259768 - DNA, 25 bp, Probe sequence
gatttattgtttgaaagttgttgca

SEQ ID NO: 259769 - DNA, 25 bp, Probe sequence
gttgttgcattaacggtgagattgc

SEQ ID NO: 259770 - DNA, 25 bp, Probe sequence
gttgcattaacggtgagattgcaca

SEQ ID NO: 259771 - DNA, 25 bp, Probe sequence
gtttattgtgatgatttattgtttg

SEQ ID NO: 259772 - DNA, 25 bp, Probe sequence
gtttgagaactattgaattaggtgt

SEQ ID NO: 259773 - DNA, 25 bp, Probe sequence
gtttgaaagttgttgcattaacggt

SEQ ID NO: 259774 - DNA, 25 bp, Probe sequence
gtgatgatttattgtttgaaagttg

SEQ ID NO: 259775 - DNA, 25 bp, Probe sequence
gtgtttattgtgatgatttattgtt

SEQ ID NO: 259776 - DNA, 25 bp, Probe sequence
gtgtcaatacttatgtttgagaact

SEQ ID NO: 259777 - DNA, 25 bp, Probe sequence
gtgtgtttattgtgatgatttattg

SEQ ID NO: 259778 - DNA, 25 bp, Probe sequence
ggtgtgtttattgtgatgatttatt

SEQ ID NO: 259779 - DNA, 25 bp, Probe sequence
tgcattaacggtgagattgcacaat

SEQ ID NO: 259780 - DNA, 25 bp, Probe sequence
tcaatacttatgtttgagaactatt

SEQ ID NO: 259781 - DNA, 25 bp, Probe sequence
taggtgtgtttattgtgatgattta

SEQ ID NO: 259782 - DNA, 25 bp, Probe sequence
tattgtttgaaagttgttgcattaa

SEQ ID NO: 259783 - DNA, 25 bp, Probe sequence
tttattgtttgaaagttgttgcatt

SEQ ID NO: 259784 - DNA, 25 bp, Probe sequence
ttattgtgatgatttattgtttgaa

SEQ ID NO: 259785 - DNA, 25 bp, Probe sequence
ttaggtgtgtttattgtgatgattt

SEQ ID NO: 259786 - DNA, 25 bp, Probe sequence
ttgaaagttgttgcattaacggtga

SEQ ID NO: 259787 - DNA, 25 bp, Probe sequence
atttctttgctcagttacgtcatcc

SEQ ID NO: 259788 - DNA, 25 bp, Probe sequence
atacctatgctatgcccattgcaat

SEQ ID NO: 259789 - DNA, 25 bp, Probe sequence
atgctatgcccattgcaattttaat

SEQ ID NO: 259790 - DNA, 25 bp, Probe sequence
agtatgtctaaacaacacatgttgc

SEQ ID NO: 259791 - DNA, 25 bp, Probe sequence
acctcaggggtttgaacgcacgcat

SEQ ID NO: 259792 - DNA, 25 bp, Probe sequence
acattacgtattatgatactgtaga

SEQ ID NO: 259793 - DNA, 25 bp, Probe sequence
acatgttgcatagttgatatacgtt

SEQ ID NO: 259794 - DNA, 25 bp, Probe sequence
aacacttcagacaatatgttgttta

SEQ ID NO: 259795 - DNA, 25 bp, Probe sequence
caagcatttttgtttttgcgtactt

SEQ ID NO: 259796 - DNA, 25 bp, Probe sequence
gcccattgcaattttaataagacac

SEQ ID NO: 259797 - DNA, 25 bp, Probe sequence
gcgaatcgactatcgactgtcgtat

SEQ ID NO: 259798 - DNA, 25 bp, Probe sequence
gcaacgcataataaatgctcgtggt

SEQ ID NO: 259799 - DNA, 25 bp, Probe sequence
gaatatacctatgctatgcccattg

SEQ ID NO: 259800 - DNA, 25 bp, Probe sequence
gaagtcgacgttgaagcaacgcata

SEQ ID NO: 259801 - DNA, 25 bp, Probe sequence
gaaaatcgactgtgaatatacctat

SEQ ID NO: 259802 - DNA, 25 bp, Probe sequence
gacaatgctcatttctttgctcagt

SEQ ID NO: 259803 - DNA, 25 bp, Probe sequence
gactgtcgtataacttttacattac

SEQ ID NO: 259804 - DNA, 25 bp, Probe sequence
gagcgagacagatgaacctcagggg

SEQ ID NO: 259805 - DNA, 25 bp, Probe sequence
gagggattgacgtgagcgagacaga

SEQ ID NO: 259806 - DNA, 25 bp, Probe sequence
gatgtcattcgacaatgctcatttc

SEQ ID NO: 259807 - DNA, 25 bp, Probe sequence
gataggagggattgacgtgagcgag

SEQ ID NO: 259808 - DNA, 25 bp, Probe sequence
gatatacgttgtttaaatactaaga

SEQ ID NO: 259809 - DNA, 25 bp, Probe sequence
gtaaattgaagtcgacgttgaagca

SEQ ID NO: 259810 - DNA, 25 bp, Probe sequence
gtgcgtgtttattggcaaacgtaca

SEQ ID NO: 259811 - DNA, 25 bp, Probe sequence
gtgacaagcatttttgtttttgcgt

SEQ ID NO: 259812 - DNA, 25 bp, Probe sequence
ggggtttgaacgcacgcataatata

SEQ ID NO: 259813 - DNA, 25 bp, Probe sequence
ggcaaacgtacaacatagtagtata

SEQ ID NO: 259814 - DNA, 25 bp, Probe sequence
tgcgtacttaaacaacacttcagac

SEQ ID NO: 259815 - DNA, 25 bp, Probe sequence
tgctcgtggtaaaaagcgaatcgac

SEQ ID NO: 259816 - DNA, 25 bp, Probe sequence
tgctcatttctttgctcagttacgt

SEQ ID NO: 259817 - DNA, 25 bp, Probe sequence
tctttgctcagttacgtcatcctgt

SEQ ID NO: 259818 - DNA, 25 bp, Probe sequence
taagacacacgatgtcattcgacaa

SEQ ID NO: 259819 - DNA, 25 bp, Probe sequence
taggcaacaaatgatatgtgcgtgt

SEQ ID NO: 259820 - DNA, 25 bp, Probe sequence
taggcagagtctaatgacattcatt

SEQ ID NO: 259821 - DNA, 25 bp, Probe sequence
aggcactacaacgcttattggcggg

SEQ ID NO: 259822 - DNA, 25 bp, Probe sequence
aggaaacttggacatcaatcaaagt

SEQ ID NO: 259823 - DNA, 25 bp, Probe sequence
attgggtccgtaatttctacagaca

SEQ ID NO: 259824 - DNA, 25 bp, Probe sequence
ataggaaacttggacatcaatcaaa

SEQ ID NO: 259825 - DNA, 25 bp, Probe sequence
ataggcactacaacgcttattggcg

SEQ ID NO: 259826 - DNA, 25 bp, Probe sequence
atgcaagttggggaaggacaacaaa

SEQ ID NO: 259827 - DNA, 25 bp, Probe sequence
atcaatcaaagtaataggcactaca

SEQ ID NO: 259828 - DNA, 25 bp, Probe sequence
atcaaagtaataggcactacaacgc

SEQ ID NO: 259829 - DNA, 25 bp, Probe sequence
agtaataggcactacaacgcttatt

SEQ ID NO: 259830 - DNA, 25 bp, Probe sequence
aaagtaataggcactacaacgctta

SEQ ID NO: 259831 - DNA, 25 bp, Probe sequence
aaacttggacatcaatcaaagtaat

SEQ ID NO: 259832 - DNA, 25 bp, Probe sequence
aagtaataggcactacaacgcttat

SEQ ID NO: 259833 - DNA, 25 bp, Probe sequence
aataggcactacaacgcttattggc

SEQ ID NO: 259834 - DNA, 25 bp, Probe sequence
cactacaacgcttattggcggggcc

SEQ ID NO: 259835 - DNA, 25 bp, Probe sequence
caatcaaagtaataggcactacaac

SEQ ID NO: 259836 - DNA, 25 bp, Probe sequence
caaagtaataggcactacaacgctt

SEQ ID NO: 259837 - DNA, 25 bp, Probe sequence
catcaatcaaagtaataggcactac

SEQ ID NO: 259838 - DNA, 25 bp, Probe sequence
gcactacaacgcttattggcggggc

SEQ ID NO: 259839 - DNA, 25 bp, Probe sequence
gcaagttggggaaggacaacaaatt

SEQ ID NO: 259840 - DNA, 25 bp, Probe sequence
gaaacttggacatcaatcaaagtaa

SEQ ID NO: 259841 - DNA, 25 bp, Probe sequence
gaaattgggtccgtaatttctacag

SEQ ID NO: 259842 - DNA, 25 bp, Probe sequence
gacatcaatcaaagtaataggcact

SEQ ID NO: 259843 - DNA, 25 bp, Probe sequence
gataggaaacttggacatcaatcaa

SEQ ID NO: 259844 - DNA, 25 bp, Probe sequence
gtaataggcactacaacgcttattg

SEQ ID NO: 259845 - DNA, 25 bp, Probe sequence
gtgataggaaacttggacatcaatc

SEQ ID NO: 259846 - DNA, 25 bp, Probe sequence
ggcactacaacgcttattggcgggg

SEQ ID NO: 259847 - DNA, 25 bp, Probe sequence
ggacatcaatcaaagtaataggcac

SEQ ID NO: 259848 - DNA, 25 bp, Probe sequence
ggaaacttggacatcaatcaaagta

SEQ ID NO: 259849 - DNA, 25 bp, Probe sequence
tggacatcaatcaaagtaataggca

SEQ ID NO: 259850 - DNA, 25 bp, Probe sequence
tcaaagtaataggcactacaacgct

SEQ ID NO: 259851 - DNA, 25 bp, Probe sequence
taataggcactacaacgcttattgg

SEQ ID NO: 259852 - DNA, 25 bp, Probe sequence
taggaaacttggacatcaatcaaag

SEQ ID NO: 259853 - DNA, 25 bp, Probe sequence
taggcactacaacgcttattggcgg

SEQ ID NO: 259854 - DNA, 25 bp, Probe sequence
ttgggtccgtaatttctacagacaa

SEQ ID NO: 259855 - DNA, 25 bp, Probe sequence
attggaatatcactatacaaactat

SEQ ID NO: 259856 - DNA, 25 bp, Probe sequence
atactctcaatcacacatgaacaag

SEQ ID NO: 259857 - DNA, 25 bp, Probe sequence
atctctagaccttcaaatcttactt

SEQ ID NO: 259858 - DNA, 25 bp, Probe sequence
atggaggggaatagtatgcaaatca

SEQ ID NO: 259859 - DNA, 25 bp, Probe sequence
agaatatactctcaatcacacatga

SEQ ID NO: 259860 - DNA, 25 bp, Probe sequence
acctaagaaagtctacgtcattcga

SEQ ID NO: 259861 - DNA, 25 bp, Probe sequence
acctatctctagaccttcaaatctt

SEQ ID NO: 259862 - DNA, 25 bp, Probe sequence
aacacctatctctagaccttcaaat

SEQ ID NO: 259863 - DNA, 25 bp, Probe sequence
aacgcattacctaagaaagtctacg

SEQ ID NO: 259864 - DNA, 25 bp, Probe sequence
aacctgatacagattacctacacat

SEQ ID NO: 259865 - DNA, 25 bp, Probe sequence
aagaaagagataatcaacctgatac

SEQ ID NO: 259866 - DNA, 25 bp, Probe sequence
aatcaatcgatacattacacgaggc

SEQ ID NO: 259867 - DNA, 25 bp, Probe sequence
aatcaaaacgcattacctaagaaag

SEQ ID NO: 259868 - DNA, 25 bp, Probe sequence
caatcgatacattacacgaggcatt

SEQ ID NO: 259869 - DNA, 25 bp, Probe sequence
cacacatgaacaagaacaacctgca

SEQ ID NO: 259870 - DNA, 25 bp, Probe sequence
gaagatgatgtagacctttcttatt

SEQ ID NO: 259871 - DNA, 25 bp, Probe sequence
gaacaacctgcatacaaattggaat

SEQ ID NO: 259872 - DNA, 25 bp, Probe sequence
gaacaagaacaacctgcatacaaat

SEQ ID NO: 259873 - DNA, 25 bp, Probe sequence
gaaagtctacgtcattcgagaagat

SEQ ID NO: 259874 - DNA, 25 bp, Probe sequence
gaccttcaaatcttactttggaata

SEQ ID NO: 259875 - DNA, 25 bp, Probe sequence
gaggcattagtgaacacctatctct

SEQ ID NO: 259876 - DNA, 25 bp, Probe sequence
gatgtagacctttcttattatgtca

SEQ ID NO: 259877 - DNA, 25 bp, Probe sequence
gatacagattacctacacattttta

SEQ ID NO: 259878 - DNA, 25 bp, Probe sequence
gatacattacacgaggcattagtga

SEQ ID NO: 259879 - DNA, 25 bp, Probe sequence
gattacctacacatttttagactgc

SEQ ID NO: 259880 - DNA, 25 bp, Probe sequence
gtagacctttcttattatgtcatgt

SEQ ID NO: 259881 - DNA, 25 bp, Probe sequence
gtcatgttactaccagaagaatact

SEQ ID NO: 259882 - DNA, 25 bp, Probe sequence
gtctacgtcattcgagaagatgatg

SEQ ID NO: 259883 - DNA, 25 bp, Probe sequence
ggggaatagtatgcaaatcaatcga

SEQ ID NO: 259884 - DNA, 25 bp, Probe sequence
tgaacacctatctctagaccttcaa

SEQ ID NO: 259885 - DNA, 25 bp, Probe sequence
tacacatttttagactgcaagaaga

SEQ ID NO: 259886 - DNA, 25 bp, Probe sequence
tagtgaacacctatctctagacctt

SEQ ID NO: 259887 - DNA, 25 bp, Probe sequence
ttattatgtcatgttactaccagaa

SEQ ID NO: 259888 - DNA, 25 bp, Probe sequence
ttatgtcatgttactaccagaagaa

SEQ ID NO: 259889 - DNA, 25 bp, Probe sequence
attggaacgccaatttctacagaca

SEQ ID NO: 259890 - DNA, 25 bp, Probe sequence
attggattcccaatttctacagaca

SEQ ID NO: 259891 - DNA, 25 bp, Probe sequence
attcccaatttctacagacaatgca

SEQ ID NO: 259892 - DNA, 25 bp, Probe sequence
agttggcggggccccaacatagaga

SEQ ID NO: 259893 - DNA, 25 bp, Probe sequence
acgccaatttctacagacaatgcaa

SEQ ID NO: 259894 - DNA, 25 bp, Probe sequence
actgcggggccccaacatagagaaa

SEQ ID NO: 259895 - DNA, 25 bp, Probe sequence
acaatgcaagttggggtgggcccca

SEQ ID NO: 259896 - DNA, 25 bp, Probe sequence
aacgccaatttctacagacaatgca

SEQ ID NO: 259897 - DNA, 25 bp, Probe sequence
aagttggcggggccccaacatagag

SEQ ID NO: 259898 - DNA, 25 bp, Probe sequence
caagttggcggggccccaacataga

SEQ ID NO: 259899 - DNA, 25 bp, Probe sequence
caacatagagaaattggattcccaa

SEQ ID NO: 259900 - DNA, 25 bp, Probe sequence
cagacaatgcaagttggcggggccc

SEQ ID NO: 259901 - DNA, 25 bp, Probe sequence
ctgcggggccccaacatagagaaat

SEQ ID NO: 259902 - DNA, 25 bp, Probe sequence
cccaatttctacagacaatgcaagt

SEQ ID NO: 259903 - DNA, 25 bp, Probe sequence
gccaatttctacagacaatgcaagt

SEQ ID NO: 259904 - DNA, 25 bp, Probe sequence
gcggggccccaacatagagaaattg

SEQ ID NO: 259905 - DNA, 25 bp, Probe sequence
gcaagttggggtgggccccaacata

SEQ ID NO: 259906 - DNA, 25 bp, Probe sequence
gaacgccaatttctacagacaatgc

SEQ ID NO: 259907 - DNA, 25 bp, Probe sequence
gacaatgcaagttggggtgggcccc

SEQ ID NO: 259908 - DNA, 25 bp, Probe sequence
gattcccaatttctacagacaatgc

SEQ ID NO: 259909 - DNA, 25 bp, Probe sequence
gttggcggggccccaacatagagaa

SEQ ID NO: 259910 - DNA, 25 bp, Probe sequence
gtgggccccaacataaagaaatact

SEQ ID NO: 259911 - DNA, 25 bp, Probe sequence
gggccccaacatagagaaattggaa

SEQ ID NO: 259912 - DNA, 25 bp, Probe sequence
ggggccccaacatagagaaattgga

SEQ ID NO: 259913 - DNA, 25 bp, Probe sequence
ggattcccaatttctacagacaatg

SEQ ID NO: 259914 - DNA, 25 bp, Probe sequence
ggaacgccaatttctacagacaatg

SEQ ID NO: 259915 - DNA, 25 bp, Probe sequence
tggcggggccccaacatagagaaat

SEQ ID NO: 259916 - DNA, 25 bp, Probe sequence
tggaacgccaatttctacagacaat

SEQ ID NO: 259917 - DNA, 25 bp, Probe sequence
tggattcccaatttctacagacaat

SEQ ID NO: 259918 - DNA, 25 bp, Probe sequence
tgggccccaacataaagaaatactt

SEQ ID NO: 259919 - DNA, 25 bp, Probe sequence
ttcccaatttctacagacaatgcaa

SEQ ID NO: 259920 - DNA, 25 bp, Probe sequence
ttggaacgccaatttctacagacaa

SEQ ID NO: 259921 - DNA, 25 bp, Probe sequence
ttggattcccaatttctacagacaa

SEQ ID NO: 259922 - DNA, 25 bp, Probe sequence
ttggcggggccccaacatagagaaa

SEQ ID NO: 259923 - DNA, 25 bp, Probe sequence
atatgtcaatcaagatagtgtatct

SEQ ID NO: 259924 - DNA, 25 bp, Probe sequence
atagcaatgaagtagcttatttgtt

SEQ ID NO: 259925 - DNA, 25 bp, Probe sequence
atcaagatagtgtatcttttgtgcc

SEQ ID NO: 259926 - DNA, 25 bp, Probe sequence
atgaagtagcttatttgttaaaaga

SEQ ID NO: 259927 - DNA, 25 bp, Probe sequence
atgtcaatcaagatagtgtatcttt

SEQ ID NO: 259928 - DNA, 25 bp, Probe sequence
agtagcttatttgttaaaagatggt

SEQ ID NO: 259929 - DNA, 25 bp, Probe sequence
agtatatgtcaatcaagatagtgta

SEQ ID NO: 259930 - DNA, 25 bp, Probe sequence
agatagtgtatcttttgtgccaggg

SEQ ID NO: 259931 - DNA, 25 bp, Probe sequence
agcaatgaagtagcttatttgttaa

SEQ ID NO: 259932 - DNA, 25 bp, Probe sequence
acaaaagtatatgtcaatcaagata

SEQ ID NO: 259933 - DNA, 25 bp, Probe sequence
aaagtatatgtcaatcaagatagtg

SEQ ID NO: 259934 - DNA, 25 bp, Probe sequence
aaaagtatatgtcaatcaagatagt

SEQ ID NO: 259935 - DNA, 25 bp, Probe sequence
aagatagtgtatcttttgtgccagg

SEQ ID NO: 259936 - DNA, 25 bp, Probe sequence
aagtagcttatttgttaaaagatgg

SEQ ID NO: 259937 - DNA, 25 bp, Probe sequence
aagtatatgtcaatcaagatagtgt

SEQ ID NO: 259938 - DNA, 25 bp, Probe sequence
aatgaagtagcttatttgttaaaag

SEQ ID NO: 259939 - DNA, 25 bp, Probe sequence
caatgaagtagcttatttgttaaaa

SEQ ID NO: 259940 - DNA, 25 bp, Probe sequence
caagatagtgtatcttttgtgccag

SEQ ID NO: 259941 - DNA, 25 bp, Probe sequence
caaaagtatatgtcaatcaagatag

SEQ ID NO: 259942 - DNA, 25 bp, Probe sequence
gcaatgaagtagcttatttgttaaa

SEQ ID NO: 259943 - DNA, 25 bp, Probe sequence
gaagtagcttatttgttaaaagatg

SEQ ID NO: 259944 - DNA, 25 bp, Probe sequence
gatagcaatgaagtagcttatttgt

SEQ ID NO: 259945 - DNA, 25 bp, Probe sequence
gtatatgtcaatcaagatagtgtat

SEQ ID NO: 259946 - DNA, 25 bp, Probe sequence
gtagcttatttgttaaaagatggta

SEQ ID NO: 259947 - DNA, 25 bp, Probe sequence
gtcaatcaagatagtgtatcttttg

SEQ ID NO: 259948 - DNA, 25 bp, Probe sequence
ggaaaacaatgatagcaatgaagta

SEQ ID NO: 259949 - DNA, 25 bp, Probe sequence
tgaagtagcttatttgttaaaagat

SEQ ID NO: 259950 - DNA, 25 bp, Probe sequence
tcaagatagtgtatcttttgtgcca

SEQ ID NO: 259951 - DNA, 25 bp, Probe sequence
tacaaaagtatatgtcaatcaagat

SEQ ID NO: 259952 - DNA, 25 bp, Probe sequence
tagcttatttgttaaaagatggtaa

SEQ ID NO: 259953 - DNA, 25 bp, Probe sequence
tagcaatgaagtagcttatttgtta

SEQ ID NO: 259954 - DNA, 25 bp, Probe sequence
tatgtcaatcaagatagtgtatctt

SEQ ID NO: 259955 - DNA, 25 bp, Probe sequence
tatatgtcaatcaagatagtgtatc

SEQ ID NO: 259956 - DNA, 25 bp, Probe sequence
tttacaaaagtatatgtcaatcaag

SEQ ID NO: 259957 - DNA, 25 bp, Probe sequence
attttgtgctaaatattttacgcat

SEQ ID NO: 259958 - DNA, 25 bp, Probe sequence
attttacgcatattaatatcattaa

SEQ ID NO: 259959 - DNA, 25 bp, Probe sequence
atcattaatgatagccatattgaaa

SEQ ID NO: 259960 - DNA, 25 bp, Probe sequence
atgacaatcgttactaataagggac

SEQ ID NO: 259961 - DNA, 25 bp, Probe sequence
atgttacataaccatcctggacagt

SEQ ID NO: 259962 - DNA, 25 bp, Probe sequence
agcatccatcaataaaatcaatgac

SEQ ID NO: 259963 - DNA, 25 bp, Probe sequence
accatcctggacagtcaggattttc

SEQ ID NO: 259964 - DNA, 25 bp, Probe sequence
acataaccatcctggacagtcagga

SEQ ID NO: 259965 - DNA, 25 bp, Probe sequence
acattttttaagcatccatcaataa

SEQ ID NO: 259966 - DNA, 25 bp, Probe sequence
aaaatcaatgacaatcgttactaat

SEQ ID NO: 259967 - DNA, 25 bp, Probe sequence
aatcaatgacaatcgttactaataa

SEQ ID NO: 259968 - DNA, 25 bp, Probe sequence
aatagtgagtaaattttgtgctaaa

SEQ ID NO: 259969 - DNA, 25 bp, Probe sequence
caatcgttactaataagggacaagt

SEQ ID NO: 259970 - DNA, 25 bp, Probe sequence
caagtcaaataggtttcatggtaaa

SEQ ID NO: 259971 - DNA, 25 bp, Probe sequence
gacaatcgttactaataagggacaa

SEQ ID NO: 259972 - DNA, 25 bp, Probe sequence
gacagtcaggattttcagaatatga

SEQ ID NO: 259973 - DNA, 25 bp, Probe sequence
gatagccatattgaaaaattattga

SEQ ID NO: 259974 - DNA, 25 bp, Probe sequence
gatttatttacattttttaagcatc

SEQ ID NO: 259975 - DNA, 25 bp, Probe sequence
gttacataaccatcctggacagtca

SEQ ID NO: 259976 - DNA, 25 bp, Probe sequence
gtcaaataggtttcatggtaaaata

SEQ ID NO: 259977 - DNA, 25 bp, Probe sequence
gtcaggattttcagaatatgattta

SEQ ID NO: 259978 - DNA, 25 bp, Probe sequence
ggattttcagaatatgatttattta

SEQ ID NO: 259979 - DNA, 25 bp, Probe sequence
tggacagtcaggattttcagaatat

SEQ ID NO: 259980 - DNA, 25 bp, Probe sequence
tgttacataaccatcctggacagtc

SEQ ID NO: 259981 - DNA, 25 bp, Probe sequence
taaccatcctggacagtcaggattt

SEQ ID NO: 259982 - DNA, 25 bp, Probe sequence
tacataaccatcctggacagtcagg

SEQ ID NO: 259983 - DNA, 25 bp, Probe sequence
tacattttttaagcatccatcaata

SEQ ID NO: 259984 - DNA, 25 bp, Probe sequence
taggtttcatggtaaaatagtgagt

SEQ ID NO: 259985 - DNA, 25 bp, Probe sequence
tatttacattttttaagcatccatc

SEQ ID NO: 259986 - DNA, 25 bp, Probe sequence
tttgtgctaaatattttacgcatat

SEQ ID NO: 259987 - DNA, 25 bp, Probe sequence
tttacattttttaagcatccatcaa

SEQ ID NO: 259988 - DNA, 25 bp, Probe sequence
ttaccaagtcaaataggtttcatgg

SEQ ID NO: 259989 - DNA, 25 bp, Probe sequence
ttacataaccatcctggacagtcag

SEQ ID NO: 259990 - DNA, 25 bp, Probe sequence
ttaagcatccatcaataaaatcaat

SEQ ID NO: 259991 - DNA, 25 bp, Probe sequence
attgattggataaatacagagtttg

SEQ ID NO: 259992 - DNA, 25 bp, Probe sequence
atagatgatgaaggaggcgaagtgt

SEQ ID NO: 259993 - DNA, 25 bp, Probe sequence
atgaaggaggcgaagtgttctacta

SEQ ID NO: 259994 - DNA, 25 bp, Probe sequence
atgataccggtagaatgggaaaagg

SEQ ID NO: 259995 - DNA, 25 bp, Probe sequence
atgcaatggcatatatagatgatga

SEQ ID NO: 259996 - DNA, 25 bp, Probe sequence
atggattcagcgtatgagttgtata

SEQ ID NO: 259997 - DNA, 25 bp, Probe sequence
atggaatatgaaatggaggaggtta

SEQ ID NO: 259998 - DNA, 25 bp, Probe sequence
aggaggttaaacaaatcgagcaata

SEQ ID NO: 259999 - DNA, 25 bp, Probe sequence
agattagcagtatgataccggtaga

SEQ ID NO: 260000 - DNA, 25 bp, Probe sequence
acagagtttgatcaattgggccgtc

SEQ ID NO: 260001 - DNA, 25 bp, Probe sequence
acagaacctggaagtaatgaattat

SEQ ID NO: 260002 - DNA, 25 bp, Probe sequence
aatcgagcaatatattaaagagcaa

SEQ ID NO: 260003 - DNA, 25 bp, Probe sequence
aatttatggattcagcgtatgagtt

SEQ ID NO: 260004 - DNA, 25 bp, Probe sequence
ctactattacacagaacctggaagt

SEQ ID NO: 260005 - DNA, 25 bp, Probe sequence
gcagtatgataccggtagaatggga

SEQ ID NO: 260006 - DNA, 25 bp, Probe sequence
gaattatactattatactagtgtat

SEQ ID NO: 260007 - DNA, 25 bp, Probe sequence
gaaggacatgaaccatggacatcat

SEQ ID NO: 260008 - DNA, 25 bp, Probe sequence
gaaccatggacatcatgcgaatttg

SEQ ID NO: 260009 - DNA, 25 bp, Probe sequence
gacatcatgcgaatttgattttaca

SEQ ID NO: 260010 - DNA, 25 bp, Probe sequence
gagtttgatcaattgggccgtcaaa

SEQ ID NO: 260011 - DNA, 25 bp, Probe sequence
gatcaattgggccgtcaaaattatt

SEQ ID NO: 260012 - DNA, 25 bp, Probe sequence
gatatatcggaatcagaatttatgg

SEQ ID NO: 260013 - DNA, 25 bp, Probe sequence
gattcagcgtatgagttgtataaac

SEQ ID NO: 260014 - DNA, 25 bp, Probe sequence
gtttcatttgattatattgattgga

SEQ ID NO: 260015 - DNA, 25 bp, Probe sequence
gtcaaatgtataacgagattgcgaa

SEQ ID NO: 260016 - DNA, 25 bp, Probe sequence
gtgttctactattacacagaacctg

SEQ ID NO: 260017 - DNA, 25 bp, Probe sequence
gggccgtcaaaattattatatgtac

SEQ ID NO: 260018 - DNA, 25 bp, Probe sequence
ggaggcgaagtgttctactattaca

SEQ ID NO: 260019 - DNA, 25 bp, Probe sequence
ggacatgaaccatggacatcatgcg

SEQ ID NO: 260020 - DNA, 25 bp, Probe sequence
ggcgaagtgttctactattacacag

SEQ ID NO: 260021 - DNA, 25 bp, Probe sequence
tgggaaaaggtatatgcaatggcat

SEQ ID NO: 260022 - DNA, 25 bp, Probe sequence
tgaaggaggcgaagtgttctactat

SEQ ID NO: 260023 - DNA, 25 bp, Probe sequence
taacgagattgcgaataagattagc

SEQ ID NO: 260024 - DNA, 25 bp, Probe sequence
tttggggttataccagaaatggaat

SEQ ID NO: 260025 - DNA, 25 bp, Probe sequence
attttactatacgagcgtgttaaat

SEQ ID NO: 260026 - DNA, 25 bp, Probe sequence
atatgcaatggcttatgtaaatgaa

SEQ ID NO: 260027 - DNA, 25 bp, Probe sequence
ataggggagataacatggctttcga

SEQ ID NO: 260028 - DNA, 25 bp, Probe sequence
agtgttttacaattatactgaacca

SEQ ID NO: 260029 - DNA, 25 bp, Probe sequence
agatcagaatttatggactcagtat

SEQ ID NO: 260030 - DNA, 25 bp, Probe sequence
agaagtggagaagtgttttacaatt

SEQ ID NO: 260031 - DNA, 25 bp, Probe sequence
aaattagcagtatgataccggtaga

SEQ ID NO: 260032 - DNA, 25 bp, Probe sequence
aaatataatataccaagatcagaat

SEQ ID NO: 260033 - DNA, 25 bp, Probe sequence
aacggtatatgcaatggcttatgta

SEQ ID NO: 260034 - DNA, 25 bp, Probe sequence
aagaatatgccataaattgggttaa

SEQ ID NO: 260035 - DNA, 25 bp, Probe sequence
aagaaggactcgaaccatggacatc

SEQ ID NO: 260036 - DNA, 25 bp, Probe sequence
aagagcaagatgaagctgaactata

SEQ ID NO: 260037 - DNA, 25 bp, Probe sequence
aaggactcgaaccatggacatcatg

SEQ ID NO: 260038 - DNA, 25 bp, Probe sequence
gcagtatgataccggtagaatggga

SEQ ID NO: 260039 - DNA, 25 bp, Probe sequence
gaattgtttatagaagaaggactcg

SEQ ID NO: 260040 - DNA, 25 bp, Probe sequence
gaatttatggactcagtatatgaat

SEQ ID NO: 260041 - DNA, 25 bp, Probe sequence
gaattattttactatacgagcgtgt

SEQ ID NO: 260042 - DNA, 25 bp, Probe sequence
gaatttggcctgaaaaagaatatgc

SEQ ID NO: 260043 - DNA, 25 bp, Probe sequence
gaatttggaccaatgggaagagaac

SEQ ID NO: 260044 - DNA, 25 bp, Probe sequence
gaatttgactttacaagagatggca

SEQ ID NO: 260045 - DNA, 25 bp, Probe sequence
gaatgtatcttttgattatattgat

SEQ ID NO: 260046 - DNA, 25 bp, Probe sequence
gaaggactcgaaccatggacatcat

SEQ ID NO: 260047 - DNA, 25 bp, Probe sequence
gaaccaagcagtgatgaattatttt

SEQ ID NO: 260048 - DNA, 25 bp, Probe sequence
gaaatgtacaatgagattgcgaata

SEQ ID NO: 260049 - DNA, 25 bp, Probe sequence
gactcgaaccatggacatcatgtga

SEQ ID NO: 260050 - DNA, 25 bp, Probe sequence
gagatggcaaattgaatgtatcttt

SEQ ID NO: 260051 - DNA, 25 bp, Probe sequence
gattatattgattgggtgaattcag

SEQ ID NO: 260052 - DNA, 25 bp, Probe sequence
gtgaattcagaatttggaccaatgg

SEQ ID NO: 260053 - DNA, 25 bp, Probe sequence
gggaaacggtatatgcaatggctta

SEQ ID NO: 260054 - DNA, 25 bp, Probe sequence
ggggagataacatggctttcgaaga

SEQ ID NO: 260055 - DNA, 25 bp, Probe sequence
ggtagaatgggaaacggtatatgca

SEQ ID NO: 260056 - DNA, 25 bp, Probe sequence
ggagataacatggctttcgaagaaa

SEQ ID NO: 260057 - DNA, 25 bp, Probe sequence
ggacatcatgtgaatttgactttac

SEQ ID NO: 260058 - DNA, 25 bp, Probe sequence
ttttacaattatactgaaccaagca

SEQ ID NO: 260059 - DNA, 25 bp, Probe sequence
attgcttatgtagatgatcaaggtg

SEQ ID NO: 260060 - DNA, 25 bp, Probe sequence
attacacggatatatctagagatta

SEQ ID NO: 260061 - DNA, 25 bp, Probe sequence
ataagattagcagtatgataccggt

SEQ ID NO: 260062 - DNA, 25 bp, Probe sequence
aggaaaggaaaactactatatgtat

SEQ ID NO: 260063 - DNA, 25 bp, Probe sequence
agcagtatgataccggtagagtggg

SEQ ID NO: 260064 - DNA, 25 bp, Probe sequence
aaaactaagtcaaatgtacaacgag

SEQ ID NO: 260065 - DNA, 25 bp, Probe sequence
aagaaggtcttgaaccatggacatc

SEQ ID NO: 260066 - DNA, 25 bp, Probe sequence
aatatttgatgatttatggatgaat

SEQ ID NO: 260067 - DNA, 25 bp, Probe sequence
caacgagattgcgaataagattagc

SEQ ID NO: 260068 - DNA, 25 bp, Probe sequence
gcaagatgaagctgaactatagggg

SEQ ID NO: 260069 - DNA, 25 bp, Probe sequence
gaattattacacggatatatctaga

SEQ ID NO: 260070 - DNA, 25 bp, Probe sequence
gaatttgattttacaagagagggta

SEQ ID NO: 260071 - DNA, 25 bp, Probe sequence
gaatctttattacttgtttatgaat

SEQ ID NO: 260072 - DNA, 25 bp, Probe sequence
gaaggtcttgaaccatggacatcat

SEQ ID NO: 260073 - DNA, 25 bp, Probe sequence
gaagatttgaattattacacggata

SEQ ID NO: 260074 - DNA, 25 bp, Probe sequence
gaaccatggacatcatgtgaatttg

SEQ ID NO: 260075 - DNA, 25 bp, Probe sequence
gaagctgaactataggggagataat

SEQ ID NO: 260076 - DNA, 25 bp, Probe sequence
gaaaaagtatatacaattgcttatg

SEQ ID NO: 260077 - DNA, 25 bp, Probe sequence
gaaatcgagcaatttattaaagagc

SEQ ID NO: 260078 - DNA, 25 bp, Probe sequence
gagggtaatttgaaagtatcgtttg

SEQ ID NO: 260079 - DNA, 25 bp, Probe sequence
gatcaaggtggagaggtcattttta

SEQ ID NO: 260080 - DNA, 25 bp, Probe sequence
gtatgataccggtagagtgggaaaa

SEQ ID NO: 260081 - DNA, 25 bp, Probe sequence
gtatcgtttgattatatagattgga

SEQ ID NO: 260082 - DNA, 25 bp, Probe sequence
gtcaaatgtacaacgagattgcgaa

SEQ ID NO: 260083 - DNA, 25 bp, Probe sequence
ggtgttataccagaaacggaatatg

SEQ ID NO: 260084 - DNA, 25 bp, Probe sequence
ggggagataatatgactttcgaaga

SEQ ID NO: 260085 - DNA, 25 bp, Probe sequence
ggtcttgaaccatggacatcatgtg

SEQ ID NO: 260086 - DNA, 25 bp, Probe sequence
ggatgaatctttattacttgtttat

SEQ ID NO: 260087 - DNA, 25 bp, Probe sequence
ggagaggtcatttttaattatacaa

SEQ ID NO: 260088 - DNA, 25 bp, Probe sequence
ggacatcatgtgaatttgattttac

SEQ ID NO: 260089 - DNA, 25 bp, Probe sequence
taattatacaaaacctgaaagtgaa

SEQ ID NO: 260090 - DNA, 25 bp, Probe sequence
ttaaattaggttttggtccatcagg

SEQ ID NO: 260091 - DNA, 25 bp, Probe sequence
taggttttggtccatcaggaaagga

SEQ ID NO: 260092 - DNA, 25 bp, Probe sequence
ttacttgtttatgaatttgagggat

SEQ ID NO: 260093 - DNA, 25 bp, Probe sequence
attgcctatgtaactgatcaaggtg

SEQ ID NO: 260094 - DNA, 25 bp, Probe sequence
attacacggatatatctagagatta

SEQ ID NO: 260095 - DNA, 25 bp, Probe sequence
aggccgtgaaaactattatatgtat

SEQ ID NO: 260096 - DNA, 25 bp, Probe sequence
aaccaggtagcgatgaattgaatta

SEQ ID NO: 260097 - DNA, 25 bp, Probe sequence
aagagcaagatgaagctgaactata

SEQ ID NO: 260098 - DNA, 25 bp, Probe sequence
ctataggggcgataacatgactttc

SEQ ID NO: 260099 - DNA, 25 bp, Probe sequence
gaattattacacggatatatctaga

SEQ ID NO: 260100 - DNA, 25 bp, Probe sequence
gaatttgattttacaagcgaaggta

SEQ ID NO: 260101 - DNA, 25 bp, Probe sequence
gaatctttattacttgtttatgaat

SEQ ID NO: 260102 - DNA, 25 bp, Probe sequence
gaaggtcttgaaccatggacatcat

SEQ ID NO: 260103 - DNA, 25 bp, Probe sequence
gaaccatggacatcatgtgaatttg

SEQ ID NO: 260104 - DNA, 25 bp, Probe sequence
gaagctgaactataggggcgataac

SEQ ID NO: 260105 - DNA, 25 bp, Probe sequence
gaaaagctaagtcaaatgtacaatg

SEQ ID NO: 260106 - DNA, 25 bp, Probe sequence
gaaatcgagcaatatattaaagagc

SEQ ID NO: 260107 - DNA, 25 bp, Probe sequence
gaaatcagtggaatgataccagtag

SEQ ID NO: 260108 - DNA, 25 bp, Probe sequence
gaaattgcagatgaaatcagtggaa

SEQ ID NO: 260109 - DNA, 25 bp, Probe sequence
gagtttgatcaattaggccgtgaaa

SEQ ID NO: 260110 - DNA, 25 bp, Probe sequence
gatgaattgaattattacacggata

SEQ ID NO: 260111 - DNA, 25 bp, Probe sequence
gatcaaggtggagaggtcattttta

SEQ ID NO: 260112 - DNA, 25 bp, Probe sequence
gatcaattaggccgtgaaaactatt

SEQ ID NO: 260113 - DNA, 25 bp, Probe sequence
gtttcatttgattatattgattgga

SEQ ID NO: 260114 - DNA, 25 bp, Probe sequence
gtggaatgataccagtagaatggga

SEQ ID NO: 260115 - DNA, 25 bp, Probe sequence
gggaaaatatatatacaattgccta

SEQ ID NO: 260116 - DNA, 25 bp, Probe sequence
ggtgttttaccagaaatggaatacg

SEQ ID NO: 260117 - DNA, 25 bp, Probe sequence
ggggcgataacatgactttcgaaga

SEQ ID NO: 260118 - DNA, 25 bp, Probe sequence
ggtcttgaaccatggacatcatgtg

SEQ ID NO: 260119 - DNA, 25 bp, Probe sequence
ggatgaatctttattacttgtttat

SEQ ID NO: 260120 - DNA, 25 bp, Probe sequence
ggagaggtcatttttaattatacta

SEQ ID NO: 260121 - DNA, 25 bp, Probe sequence
ggacatcatgtgaatttgattttac

SEQ ID NO: 260122 - DNA, 25 bp, Probe sequence
tacagagtttgatcaattaggccgt

SEQ ID NO: 260123 - DNA, 25 bp, Probe sequence
tacaattgcctatgtaactgatcaa

SEQ ID NO: 260124 - DNA, 25 bp, Probe sequence
tatacaattgcctatgtaactgatc

SEQ ID NO: 260125 - DNA, 25 bp, Probe sequence
ttacttgtttatgaatttgagggat

SEQ ID NO: 260126 - DNA, 25 bp, Probe sequence
ttaattatactaaaccaggtagcga

SEQ ID NO: 260127 - DNA, 25 bp, Probe sequence
ataaaaggaagttcaattggatata

SEQ ID NO: 260128 - DNA, 25 bp, Probe sequence
ataatgtaccaagtttcgatgcaga

SEQ ID NO: 260129 - DNA, 25 bp, Probe sequence
atcacaacaaaaaaatctccagtat

SEQ ID NO: 260130 - DNA, 25 bp, Probe sequence
atgtaccaagtttcgatgcagaata

SEQ ID NO: 260131 - DNA, 25 bp, Probe sequence
agagctttgagaaaactttagatat

SEQ ID NO: 260132 - DNA, 25 bp, Probe sequence
accaagtttcgatgcagaatatcaa

SEQ ID NO: 260133 - DNA, 25 bp, Probe sequence
aaaagacgaagaaacagctgttaga

SEQ ID NO: 260134 - DNA, 25 bp, Probe sequence
aacaaaccaggtgagatagatgatg

SEQ ID NO: 260135 - DNA, 25 bp, Probe sequence
aacttagagaggtttatccaatcac

SEQ ID NO: 260136 - DNA, 25 bp, Probe sequence
aagtgcagataatgtaccaagtttc

SEQ ID NO: 260137 - DNA, 25 bp, Probe sequence
aatagtttttatagcaggttgtggc

SEQ ID NO: 260138 - DNA, 25 bp, Probe sequence
caagtttcgatgcagaatatcaaat

SEQ ID NO: 260139 - DNA, 25 bp, Probe sequence
cacaacaaaaaaatctccagtatta

SEQ ID NO: 260140 - DNA, 25 bp, Probe sequence
cagtacgctgattttagagatttta

SEQ ID NO: 260141 - DNA, 25 bp, Probe sequence
cttagagaggtttatccaatcacaa

SEQ ID NO: 260142 - DNA, 25 bp, Probe sequence
ccaggtgagatagatgatgaaggca

SEQ ID NO: 260143 - DNA, 25 bp, Probe sequence
gcagataatgtaccaagtttcgatg

SEQ ID NO: 260144 - DNA, 25 bp, Probe sequence
gacgaagaaacagctgttagagatt

SEQ ID NO: 260145 - DNA, 25 bp, Probe sequence
gagaggtttatccaatcacaacaaa

SEQ ID NO: 260146 - DNA, 25 bp, Probe sequence
gaggtttatccaatcacaacaaaaa

SEQ ID NO: 260147 - DNA, 25 bp, Probe sequence
gataatgtagaagattcaaagctca

SEQ ID NO: 260148 - DNA, 25 bp, Probe sequence
gataatgtaccaagtttcgatgcag

SEQ ID NO: 260149 - DNA, 25 bp, Probe sequence
gtttcgatgcagaatatcaaataag

SEQ ID NO: 260150 - DNA, 25 bp, Probe sequence
gtagaagattcaaagctcaaaaata

SEQ ID NO: 260151 - DNA, 25 bp, Probe sequence
gtaccaagtttcgatgcagaatatc

SEQ ID NO: 260152 - DNA, 25 bp, Probe sequence
gtacgctgattttagagattttaaa

SEQ ID NO: 260153 - DNA, 25 bp, Probe sequence
gtcagtacgctgattttagagattt

SEQ ID NO: 260154 - DNA, 25 bp, Probe sequence
gtgcagataatgtaccaagtttcga

SEQ ID NO: 260155 - DNA, 25 bp, Probe sequence
tccaatcacaacaaaaaaatctcca

SEQ ID NO: 260156 - DNA, 25 bp, Probe sequence
tgagaaaactttagatatgtatcca

SEQ ID NO: 260157 - DNA, 25 bp, Probe sequence
tcaagtgcagataatgtaccaagtt

SEQ ID NO: 260158 - DNA, 25 bp, Probe sequence
taataaaatagttcttttggataat

SEQ ID NO: 260159 - DNA, 25 bp, Probe sequence
taatgtaccaagtttcgatgcagaa

SEQ ID NO: 260160 - DNA, 25 bp, Probe sequence
tagagaggtttatccaatcacaaca

SEQ ID NO: 260161 - DNA, 25 bp, Probe sequence
attgggtaagatgacacgcgaaaaa

SEQ ID NO: 260162 - DNA, 25 bp, Probe sequence
atatctatcaatgaaaatgttccgt

SEQ ID NO: 260163 - DNA, 25 bp, Probe sequence
ataagcagatagagtacatgttttc

SEQ ID NO: 260164 - DNA, 25 bp, Probe sequence
atcaatgaaaatgttccgtattatg

SEQ ID NO: 260165 - DNA, 25 bp, Probe sequence
atggtgctacatttgaatagaaata

SEQ ID NO: 260166 - DNA, 25 bp, Probe sequence
aggacggcaactgggcattatacta

SEQ ID NO: 260167 - DNA, 25 bp, Probe sequence
agtatgcagattttaaagatttgaa

SEQ ID NO: 260168 - DNA, 25 bp, Probe sequence
agagtacatgttttctaaggagaaa

SEQ ID NO: 260169 - DNA, 25 bp, Probe sequence
acggcaactgggcattatactataa

SEQ ID NO: 260170 - DNA, 25 bp, Probe sequence
acaaaccaggtgaaatggatagtga

SEQ ID NO: 260171 - DNA, 25 bp, Probe sequence
aaagcaacaaaccaggtgaaatgga

SEQ ID NO: 260172 - DNA, 25 bp, Probe sequence
aacttcggaccatcacatagtaatt

SEQ ID NO: 260173 - DNA, 25 bp, Probe sequence
aatatgaggacggcaactgggcatt

SEQ ID NO: 260174 - DNA, 25 bp, Probe sequence
cttcggaccatcacatagtaattag

SEQ ID NO: 260175 - DNA, 25 bp, Probe sequence
gaattgggtaagatgacacgcgaaa

SEQ ID NO: 260176 - DNA, 25 bp, Probe sequence
gaaggtatggtgctacatttgaata

SEQ ID NO: 260177 - DNA, 25 bp, Probe sequence
gaacttcggaccatcacatagtaat

SEQ ID NO: 260178 - DNA, 25 bp, Probe sequence
gaaatatgaggacggcaactgggca

SEQ ID NO: 260179 - DNA, 25 bp, Probe sequence
gacggcaactgggcattatactata

SEQ ID NO: 260180 - DNA, 25 bp, Probe sequence
gaggacggcaactgggcattatact

SEQ ID NO: 260181 - DNA, 25 bp, Probe sequence
gatgacacgcgaaaaaaattatcgt

SEQ ID NO: 260182 - DNA, 25 bp, Probe sequence
gatgaattgggtaagatgacacgcg

SEQ ID NO: 260183 - DNA, 25 bp, Probe sequence
gatagagtacatgttttctaaggag

SEQ ID NO: 260184 - DNA, 25 bp, Probe sequence
gtgaaggtatggtgctacatttgaa

SEQ ID NO: 260185 - DNA, 25 bp, Probe sequence
gggtaagatgacacgcgaaaaaaat

SEQ ID NO: 260186 - DNA, 25 bp, Probe sequence
ggtatggtgctacatttgaatagaa

SEQ ID NO: 260187 - DNA, 25 bp, Probe sequence
ggatagtgaaggtatggtgctacat

SEQ ID NO: 260188 - DNA, 25 bp, Probe sequence
ggacggcaactgggcattatactat

SEQ ID NO: 260189 - DNA, 25 bp, Probe sequence
ggcaactgggcattatactataaga

SEQ ID NO: 260190 - DNA, 25 bp, Probe sequence
tgggcattatactataagaacaact

SEQ ID NO: 260191 - DNA, 25 bp, Probe sequence
tgaggacggcaactgggcattatac

SEQ ID NO: 260192 - DNA, 25 bp, Probe sequence
tgaacttcggaccatcacatagtaa

SEQ ID NO: 260193 - DNA, 25 bp, Probe sequence
tatgaggacggcaactgggcattat

SEQ ID NO: 260194 - DNA, 25 bp, Probe sequence
ttgaacttcggaccatcacatagta

SEQ ID NO: 260195 - DNA, 25 bp, Probe sequence
atagttgttttagatcatgaaggaa

SEQ ID NO: 260196 - DNA, 25 bp, Probe sequence
atagcgtcgaaatagttgttttaga

SEQ ID NO: 260197 - DNA, 25 bp, Probe sequence
atgtagatggctttgattttcgatt

SEQ ID NO: 260198 - DNA, 25 bp, Probe sequence
acgggttactagtttctgatgagaa

SEQ ID NO: 260199 - DNA, 25 bp, Probe sequence
actagtttctgatgagaacgatcta

SEQ ID NO: 260200 - DNA, 25 bp, Probe sequence
acacagctttagatattttaaaaca

SEQ ID NO: 260201 - DNA, 25 bp, Probe sequence
aacgagcgtatagcgtcgaaatagt

SEQ ID NO: 260202 - DNA, 25 bp, Probe sequence
aatggattgaattcaacacagatga

SEQ ID NO: 260203 - DNA, 25 bp, Probe sequence
aattgacgggttactagtttctgat

SEQ ID NO: 260204 - DNA, 25 bp, Probe sequence
caatgtattacaaaacgggtgacgt

SEQ ID NO: 260205 - DNA, 25 bp, Probe sequence
caacacagatgaacaggacaaatta

SEQ ID NO: 260206 - DNA, 25 bp, Probe sequence
ctatacacagctttagatattttaa

SEQ ID NO: 260207 - DNA, 25 bp, Probe sequence
cgggttactagtttctgatgagaac

SEQ ID NO: 260208 - DNA, 25 bp, Probe sequence
gcgtatagcgtcgaaatagttgttt

SEQ ID NO: 260209 - DNA, 25 bp, Probe sequence
gcgtcgaaatagttgttttagatca

SEQ ID NO: 260210 - DNA, 25 bp, Probe sequence
gaacgatctatacacagctttagat

SEQ ID NO: 260211 - DNA, 25 bp, Probe sequence
gaaacgagcgtatagcgtcgaaata

SEQ ID NO: 260212 - DNA, 25 bp, Probe sequence
gacgggttactagtttctgatgaga

SEQ ID NO: 260213 - DNA, 25 bp, Probe sequence
gagcgtatagcgtcgaaatagttgt

SEQ ID NO: 260214 - DNA, 25 bp, Probe sequence
gagaacgatctatacacagctttag

SEQ ID NO: 260215 - DNA, 25 bp, Probe sequence
gatggctttgattttcgattaagag

SEQ ID NO: 260216 - DNA, 25 bp, Probe sequence
gatgagaacgatctatacacagctt

SEQ ID NO: 260217 - DNA, 25 bp, Probe sequence
gatgaacaggacaaattaatcaatt

SEQ ID NO: 260218 - DNA, 25 bp, Probe sequence
gattgaattcaacacagatgaacag

SEQ ID NO: 260219 - DNA, 25 bp, Probe sequence
gttaagaaacgagcgtatagcgtcg

SEQ ID NO: 260220 - DNA, 25 bp, Probe sequence
gtagatggctttgattttcgattaa

SEQ ID NO: 260221 - DNA, 25 bp, Probe sequence
gggttactagtttctgatgagaacg

SEQ ID NO: 260222 - DNA, 25 bp, Probe sequence
ggaggactaaaacaatgtattacaa

SEQ ID NO: 260223 - DNA, 25 bp, Probe sequence
ggaaattcaattgacgggttactag

SEQ ID NO: 260224 - DNA, 25 bp, Probe sequence
ggctttgattttcgattaagagtta

SEQ ID NO: 260225 - DNA, 25 bp, Probe sequence
tcaattgacgggttactagtttctg

SEQ ID NO: 260226 - DNA, 25 bp, Probe sequence
tgacgggttactagtttctgatgag

SEQ ID NO: 260227 - DNA, 25 bp, Probe sequence
tgagaacgatctatacacagcttta

SEQ ID NO: 260228 - DNA, 25 bp, Probe sequence
ttacaaaacgggtgacgtatgtcaa

SEQ ID NO: 260229 - DNA, 25 bp, Probe sequence
attcaaagattcaacaggactacca

SEQ ID NO: 260230 - DNA, 25 bp, Probe sequence
attactgtggctagagataatcaga

SEQ ID NO: 260231 - DNA, 25 bp, Probe sequence
atcagacgtttacagttgttgaggc

SEQ ID NO: 260232 - DNA, 25 bp, Probe sequence
aggactaccacatgaacatattact

SEQ ID NO: 260233 - DNA, 25 bp, Probe sequence
acaggactaccacatgaacatatta

SEQ ID NO: 260234 - DNA, 25 bp, Probe sequence
acatgaacatattactgtggctaga

SEQ ID NO: 260235 - DNA, 25 bp, Probe sequence
acagttgttgaggcagagagtaaag

SEQ ID NO: 260236 - DNA, 25 bp, Probe sequence
acaacattcaaagattcaacaggac

SEQ ID NO: 260237 - DNA, 25 bp, Probe sequence
acaatacttagttacaacattcaaa

SEQ ID NO: 260238 - DNA, 25 bp, Probe sequence
aaagattcaacaggactaccacatg

SEQ ID NO: 260239 - DNA, 25 bp, Probe sequence
aacaggactaccacatgaacatatt

SEQ ID NO: 260240 - DNA, 25 bp, Probe sequence
aagattcaacaggactaccacatga

SEQ ID NO: 260241 - DNA, 25 bp, Probe sequence
aagggatgcagttattaaattaagt

SEQ ID NO: 260242 - DNA, 25 bp, Probe sequence
aattaagtagatataggagagggat

SEQ ID NO: 260243 - DNA, 25 bp, Probe sequence
cagacgtttacagttgttgaggcag

SEQ ID NO: 260244 - DNA, 25 bp, Probe sequence
gaagcgaaagagaagtacgaggaac

SEQ ID NO: 260245 - DNA, 25 bp, Probe sequence
gaacatattactgtggctagagata

SEQ ID NO: 260246 - DNA, 25 bp, Probe sequence
gaaagagaagtacgaggaacaagtt

SEQ ID NO: 260247 - DNA, 25 bp, Probe sequence
gacacaatacttagttacaacattc

SEQ ID NO: 260248 - DNA, 25 bp, Probe sequence
gactaccacatgaacatattactgt

SEQ ID NO: 260249 - DNA, 25 bp, Probe sequence
gacgtttacagttgttgaggcagag

SEQ ID NO: 260250 - DNA, 25 bp, Probe sequence
gagataatcagacgtttacagttgt

SEQ ID NO: 260251 - DNA, 25 bp, Probe sequence
gaggaacaagttaaaagggatgcag

SEQ ID NO: 260252 - DNA, 25 bp, Probe sequence
gataatcagacgtttacagttgttg

SEQ ID NO: 260253 - DNA, 25 bp, Probe sequence
gattcaacaggactaccacatgaac

SEQ ID NO: 260254 - DNA, 25 bp, Probe sequence
gttgttgaggcagagagtaaagaag

SEQ ID NO: 260255 - DNA, 25 bp, Probe sequence
gtttacagttgttgaggcagagagt

SEQ ID NO: 260256 - DNA, 25 bp, Probe sequence
gtgacacaatacttagttacaacat

SEQ ID NO: 260257 - DNA, 25 bp, Probe sequence
gtggctagagataatcagacgttta

SEQ ID NO: 260258 - DNA, 25 bp, Probe sequence
ggctagagataatcagacgtttaca

SEQ ID NO: 260259 - DNA, 25 bp, Probe sequence
tcaaagattcaacaggactaccaca

SEQ ID NO: 260260 - DNA, 25 bp, Probe sequence
tcaacaggactaccacatgaacata

SEQ ID NO: 260261 - DNA, 25 bp, Probe sequence
taatcagacgtttacagttgttgag

SEQ ID NO: 260262 - DNA, 25 bp, Probe sequence
ttagttacaacattcaaagattcaa

SEQ ID NO: 260263 - DNA, 25 bp, Probe sequence
atatgatatcaagccaggaacattt

SEQ ID NO: 260264 - DNA, 25 bp, Probe sequence
atcaagccaggaacatttaaatata

SEQ ID NO: 260265 - DNA, 25 bp, Probe sequence
atcgcaatacagttactacaatacg

SEQ ID NO: 260266 - DNA, 25 bp, Probe sequence
atggggaacacaatatatgatatca

SEQ ID NO: 260267 - DNA, 25 bp, Probe sequence
actaacattgtgtatggaccgttgc

SEQ ID NO: 260268 - DNA, 25 bp, Probe sequence
aaagcgatagcttatcatgcaggta

SEQ ID NO: 260269 - DNA, 25 bp, Probe sequence
aacattgtgtatggaccgttgcaaa

SEQ ID NO: 260270 - DNA, 25 bp, Probe sequence
aacccaacgaaagagctagacacta

SEQ ID NO: 260271 - DNA, 25 bp, Probe sequence
aagaactttgttaaagcgatagctt

SEQ ID NO: 260272 - DNA, 25 bp, Probe sequence
aatggcaacaagattattgactaat

SEQ ID NO: 260273 - DNA, 25 bp, Probe sequence
aatacagttactacaatacgaaaga

SEQ ID NO: 260274 - DNA, 25 bp, Probe sequence
catgcatcgcaatacagttactaca

SEQ ID NO: 260275 - DNA, 25 bp, Probe sequence
cattgtgtatggaccgttgcaaaaa

SEQ ID NO: 260276 - DNA, 25 bp, Probe sequence
cctagaagaaatggtcgaagcagtt

SEQ ID NO: 260277 - DNA, 25 bp, Probe sequence
gcgatagcttatcatgcaggtatca

SEQ ID NO: 260278 - DNA, 25 bp, Probe sequence
gcatgtcacatgcatcgcaatacag

SEQ ID NO: 260279 - DNA, 25 bp, Probe sequence
gaatacttaaagttacctgaagatc

SEQ ID NO: 260280 - DNA, 25 bp, Probe sequence
gaacaactgaactaatggcaacaag

SEQ ID NO: 260281 - DNA, 25 bp, Probe sequence
gaaagagctagacactaacattgtg

SEQ ID NO: 260282 - DNA, 25 bp, Probe sequence
gaaatggtcgaagcagttgaaagtg

SEQ ID NO: 260283 - DNA, 25 bp, Probe sequence
gagaatggagatacttaacccaacg

SEQ ID NO: 260284 - DNA, 25 bp, Probe sequence
gagcaaataggagatgcatgtcaca

SEQ ID NO: 260285 - DNA, 25 bp, Probe sequence
gatacttaacccaacgaaagagcta

SEQ ID NO: 260286 - DNA, 25 bp, Probe sequence
gttactacaatacgaaagaactttg

SEQ ID NO: 260287 - DNA, 25 bp, Probe sequence
gtcacatgcatcgcaatacagttac

SEQ ID NO: 260288 - DNA, 25 bp, Probe sequence
ggaccgttgcaaaaaggtgaaccag

SEQ ID NO: 260289 - DNA, 25 bp, Probe sequence
ggtgaaccagttagaacaactgaac

SEQ ID NO: 260290 - DNA, 25 bp, Probe sequence
ggtcgaagcagttgaaagtgaatac

SEQ ID NO: 260291 - DNA, 25 bp, Probe sequence
ggagatacttaacccaacgaaagag

SEQ ID NO: 260292 - DNA, 25 bp, Probe sequence
tgactaataagatgttacgaaacct

SEQ ID NO: 260293 - DNA, 25 bp, Probe sequence
tgcatcgcaatacagttactacaat

SEQ ID NO: 260294 - DNA, 25 bp, Probe sequence
taagatgttacgaaacctagaagaa

SEQ ID NO: 260295 - DNA, 25 bp, Probe sequence
taaagttacctgaagatcataagaa

SEQ ID NO: 260296 - DNA, 25 bp, Probe sequence
tagcttatcatgcaggtatcaaata

SEQ ID NO: 260297 - DNA, 25 bp, Probe sequence
attaaagatgcggttcaagaagctg

SEQ ID NO: 260298 - DNA, 25 bp, Probe sequence
atgcggttcaagaagctgagaagtt

SEQ ID NO: 260299 - DNA, 25 bp, Probe sequence
atgaacgtattaaagatgcggttca

SEQ ID NO: 260300 - DNA, 25 bp, Probe sequence
agatgcggttcaagaagctgagaag

SEQ ID NO: 260301 - DNA, 25 bp, Probe sequence
agaagctgagaagttagctaaaatg

SEQ ID NO: 260302 - DNA, 25 bp, Probe sequence
acgtattaaagatgcggttcaagaa

SEQ ID NO: 260303 - DNA, 25 bp, Probe sequence
aaagatgcggttcaagaagctgaga

SEQ ID NO: 260304 - DNA, 25 bp, Probe sequence
aacgtattaaagatgcggttcaaga

SEQ ID NO: 260305 - DNA, 25 bp, Probe sequence
aagctgagaagttagctaaaatgaa

SEQ ID NO: 260306 - DNA, 25 bp, Probe sequence
aagaagctgagaagttagctaaaat

SEQ ID NO: 260307 - DNA, 25 bp, Probe sequence
aagatgcggttcaagaagctgagaa

SEQ ID NO: 260308 - DNA, 25 bp, Probe sequence
caagaagctgagaagttagctaaaa

SEQ ID NO: 260309 - DNA, 25 bp, Probe sequence
cggttcaagaagctgagaagttagc

SEQ ID NO: 260310 - DNA, 25 bp, Probe sequence
ctgagaagttagctaaaatgaagta

SEQ ID NO: 260311 - DNA, 25 bp, Probe sequence
cgtattaaagatgcggttcaagaag

SEQ ID NO: 260312 - DNA, 25 bp, Probe sequence
gcggttcaagaagctgagaagttag

SEQ ID NO: 260313 - DNA, 25 bp, Probe sequence
gctgagaagttagctaaaatgaagt

SEQ ID NO: 260314 - DNA, 25 bp, Probe sequence
gaagctgagaagttagctaaaatga

SEQ ID NO: 260315 - DNA, 25 bp, Probe sequence
gaacgtattaaagatgcggttcaag

SEQ ID NO: 260316 - DNA, 25 bp, Probe sequence
gatgaacgtattaaagatgcggttc

SEQ ID NO: 260317 - DNA, 25 bp, Probe sequence
gatgcggttcaagaagctgagaagt

SEQ ID NO: 260318 - DNA, 25 bp, Probe sequence
gttcaagaagctgagaagttagcta

SEQ ID NO: 260319 - DNA, 25 bp, Probe sequence
gtattaaagatgcggttcaagaagc

SEQ ID NO: 260320 - DNA, 25 bp, Probe sequence
ggttcaagaagctgagaagttagct

SEQ ID NO: 260321 - DNA, 25 bp, Probe sequence
tgagaagttagctaaaatgaagtag

SEQ ID NO: 260322 - DNA, 25 bp, Probe sequence
tgaacgtattaaagatgcggttcaa

SEQ ID NO: 260323 - DNA, 25 bp, Probe sequence
tgcggttcaagaagctgagaagtta

SEQ ID NO: 260324 - DNA, 25 bp, Probe sequence
tcaagaagctgagaagttagctaaa

SEQ ID NO: 260325 - DNA, 25 bp, Probe sequence
taaagatgcggttcaagaagctgag

SEQ ID NO: 260326 - DNA, 25 bp, Probe sequence
tattaaagatgcggttcaagaagct

SEQ ID NO: 260327 - DNA, 25 bp, Probe sequence
ttaaagatgcggttcaagaagctga

SEQ ID NO: 260328 - DNA, 25 bp, Probe sequence
ttcaagaagctgagaagttagctaa

SEQ ID NO: 260329 - DNA, 25 bp, Probe sequence
attggttatgggagactcaagataa

SEQ ID NO: 260330 - DNA, 25 bp, Probe sequence
attagatacacctatcaaaatcgat

SEQ ID NO: 260331 - DNA, 25 bp, Probe sequence
atcgattggttatgggagactcaag

SEQ ID NO: 260332 - DNA, 25 bp, Probe sequence
aggtgacaccacaatctgttaaatt

SEQ ID NO: 260333 - DNA, 25 bp, Probe sequence
agatacacctatcaaaatcgattta

SEQ ID NO: 260334 - DNA, 25 bp, Probe sequence
accacaatctgttaaattgatgaat

SEQ ID NO: 260335 - DNA, 25 bp, Probe sequence
acgatagaagtagttactgatcaaa

SEQ ID NO: 260336 - DNA, 25 bp, Probe sequence
acgtgttagcaacgtcaaaagttgg

SEQ ID NO: 260337 - DNA, 25 bp, Probe sequence
actgatcaaaaagtaatcgattggt

SEQ ID NO: 260338 - DNA, 25 bp, Probe sequence
aaaggtgacaccacaatctgttaaa

SEQ ID NO: 260339 - DNA, 25 bp, Probe sequence
aattgaaaacgtgttagcaacgtca

SEQ ID NO: 260340 - DNA, 25 bp, Probe sequence
aagccacgatagaagtagttactga

SEQ ID NO: 260341 - DNA, 25 bp, Probe sequence
aaggtgacaccacaatctgttaaat

SEQ ID NO: 260342 - DNA, 25 bp, Probe sequence
aatggaagccacgatagaagtagtt

SEQ ID NO: 260343 - DNA, 25 bp, Probe sequence
cgattggttatgggagactcaagat

SEQ ID NO: 260344 - DNA, 25 bp, Probe sequence
cgttgaaatggaagccacgatagaa

SEQ ID NO: 260345 - DNA, 25 bp, Probe sequence
gccacgatagaagtagttactgatc

SEQ ID NO: 260346 - DNA, 25 bp, Probe sequence
gaagccacgatagaagtagttactg

SEQ ID NO: 260347 - DNA, 25 bp, Probe sequence
gaaaacgtgttagcaacgtcaaaag

SEQ ID NO: 260348 - DNA, 25 bp, Probe sequence
gacaccacaatctgttaaattgatg

SEQ ID NO: 260349 - DNA, 25 bp, Probe sequence
gactcaagataaaagctttttcagt

SEQ ID NO: 260350 - DNA, 25 bp, Probe sequence
gatacacctatcaaaatcgatttat

SEQ ID NO: 260351 - DNA, 25 bp, Probe sequence
gtgttttaaaggtgacaccacaatc

SEQ ID NO: 260352 - DNA, 25 bp, Probe sequence
gtttcgttgaaatggaagccacgat

SEQ ID NO: 260353 - DNA, 25 bp, Probe sequence
gtaatcgattggttatgggagactc

SEQ ID NO: 260354 - DNA, 25 bp, Probe sequence
gtgacaccacaatctgttaaattga

SEQ ID NO: 260355 - DNA, 25 bp, Probe sequence
ggagactcaagataaaagctttttc

SEQ ID NO: 260356 - DNA, 25 bp, Probe sequence
ggtgacaccacaatctgttaaattg

SEQ ID NO: 260357 - DNA, 25 bp, Probe sequence
ggaagccacgatagaagtagttact

SEQ ID NO: 260358 - DNA, 25 bp, Probe sequence
tggaagccacgatagaagtagttac

SEQ ID NO: 260359 - DNA, 25 bp, Probe sequence
taatcgattggttatgggagactca

SEQ ID NO: 260360 - DNA, 25 bp, Probe sequence
taaaggtgacaccacaatctgttaa

SEQ ID NO: 260361 - DNA, 25 bp, Probe sequence
tacacctatcaaaatcgatttataa

SEQ ID NO: 260362 - DNA, 25 bp, Probe sequence
tttgtgttttaaaggtgacaccaca

SEQ ID NO: 260363 - DNA, 25 bp, Probe sequence
atttatcatcgcgttgtagaaatgt

SEQ ID NO: 260364 - DNA, 25 bp, Probe sequence
atcatcgcgttgtagaaatgttaga

SEQ ID NO: 260365 - DNA, 25 bp, Probe sequence
atcggtttgtagtagaatccattga

SEQ ID NO: 260366 - DNA, 25 bp, Probe sequence
atcgcgttgtagaaatgttagaaga

SEQ ID NO: 260367 - DNA, 25 bp, Probe sequence
atgttagaagaaggccaatcaatta

SEQ ID NO: 260368 - DNA, 25 bp, Probe sequence
acttcaagaagcacttaactttttg

SEQ ID NO: 260369 - DNA, 25 bp, Probe sequence
agcacttaactttttgaggatggga

SEQ ID NO: 260370 - DNA, 25 bp, Probe sequence
agaaggccaatcaattagtaaaatt

SEQ ID NO: 260371 - DNA, 25 bp, Probe sequence
aaaatagaccagtacttcaagaagc

SEQ ID NO: 260372 - DNA, 25 bp, Probe sequence
aacaaggcagacgatttacagaatt

SEQ ID NO: 260373 - DNA, 25 bp, Probe sequence
aagacgttttgtgctgaaaaaatat

SEQ ID NO: 260374 - DNA, 25 bp, Probe sequence
aagtaaatataacaaggcagacgat

SEQ ID NO: 260375 - DNA, 25 bp, Probe sequence
aagatccacagaaacgtattattta

SEQ ID NO: 260376 - DNA, 25 bp, Probe sequence
aatccattgattgtttaggtcgtaa

SEQ ID NO: 260377 - DNA, 25 bp, Probe sequence
aatcaatgattgttggctatgcgag

SEQ ID NO: 260378 - DNA, 25 bp, Probe sequence
caaggcagacgatttacagaattaa

SEQ ID NO: 260379 - DNA, 25 bp, Probe sequence
caagaagcacttaactttttgagga

SEQ ID NO: 260380 - DNA, 25 bp, Probe sequence
cggtttgtagtagaatccattgatt

SEQ ID NO: 260381 - DNA, 25 bp, Probe sequence
gcacttaactttttgaggatgggag

SEQ ID NO: 260382 - DNA, 25 bp, Probe sequence
gaagcacttaactttttgaggatgg

SEQ ID NO: 260383 - DNA, 25 bp, Probe sequence
gaaaatttaaagacgttttgtgctg

SEQ ID NO: 260384 - DNA, 25 bp, Probe sequence
gaccagtacttcaagaagcacttaa

SEQ ID NO: 260385 - DNA, 25 bp, Probe sequence
gagatcggtttgtagtagaatccat

SEQ ID NO: 260386 - DNA, 25 bp, Probe sequence
gaggatgggagatcggtttgtagta

SEQ ID NO: 260387 - DNA, 25 bp, Probe sequence
gatgaagtggttggcaatccattac

SEQ ID NO: 260388 - DNA, 25 bp, Probe sequence
gggagatcggtttgtagtagaatcc

SEQ ID NO: 260389 - DNA, 25 bp, Probe sequence
ggatgggagatcggtttgtagtaga

SEQ ID NO: 260390 - DNA, 25 bp, Probe sequence
ggaaatcaatgattgttggctatgc

SEQ ID NO: 260391 - DNA, 25 bp, Probe sequence
tccattgattgtttaggtcgtaatt

SEQ ID NO: 260392 - DNA, 25 bp, Probe sequence
tcaatgattgttggctatgcgagag

SEQ ID NO: 260393 - DNA, 25 bp, Probe sequence
taaagatccacagaaacgtattatt

SEQ ID NO: 260394 - DNA, 25 bp, Probe sequence
tagaccagtacttcaagaagcactt

SEQ ID NO: 260395 - DNA, 25 bp, Probe sequence
ttagaagaaggccaatcaattagta

SEQ ID NO: 260396 - DNA, 25 bp, Probe sequence
ttaactttttgaggatgggagatcg

SEQ ID NO: 260397 - DNA, 25 bp, Probe sequence
attccagacattaccgaagcaataa

SEQ ID NO: 260398 - DNA, 25 bp, Probe sequence
attatttattatgatagtgtggtta

SEQ ID NO: 260399 - DNA, 25 bp, Probe sequence
atattaattccagacattaccgaag

SEQ ID NO: 260400 - DNA, 25 bp, Probe sequence
atctcactaatttatttgagctcat

SEQ ID NO: 260401 - DNA, 25 bp, Probe sequence
agtgtacgtcatcaattgcaagata

SEQ ID NO: 260402 - DNA, 25 bp, Probe sequence
agacattaccgaagcaataaatctc

SEQ ID NO: 260403 - DNA, 25 bp, Probe sequence
agcaataaatctcactaatttattt

SEQ ID NO: 260404 - DNA, 25 bp, Probe sequence
accgaagcaataaatctcactaatt

SEQ ID NO: 260405 - DNA, 25 bp, Probe sequence
aaatctcactaatttatttgagctc

SEQ ID NO: 260406 - DNA, 25 bp, Probe sequence
aaagtgtacgtcatcaattgcaaga

SEQ ID NO: 260407 - DNA, 25 bp, Probe sequence
aaaagtgtacgtcatcaattgcaag

SEQ ID NO: 260408 - DNA, 25 bp, Probe sequence
aagcaataaatctcactaatttatt

SEQ ID NO: 260409 - DNA, 25 bp, Probe sequence
aagtgtacgtcatcaattgcaagat

SEQ ID NO: 260410 - DNA, 25 bp, Probe sequence
aatctcactaatttatttgagctca

SEQ ID NO: 260411 - DNA, 25 bp, Probe sequence
aattccagacattaccgaagcaata

SEQ ID NO: 260412 - DNA, 25 bp, Probe sequence
cactaatttatttgagctcataaaa

SEQ ID NO: 260413 - DNA, 25 bp, Probe sequence
cagacattaccgaagcaataaatct

SEQ ID NO: 260414 - DNA, 25 bp, Probe sequence
catatccaggtgccaaagaaatgat

SEQ ID NO: 260415 - DNA, 25 bp, Probe sequence
ctcactaatttatttgagctcataa

SEQ ID NO: 260416 - DNA, 25 bp, Probe sequence
cgaagcaataaatctcactaattta

SEQ ID NO: 260417 - DNA, 25 bp, Probe sequence
ccgaagcaataaatctcactaattt

SEQ ID NO: 260418 - DNA, 25 bp, Probe sequence
ccagacattaccgaagcaataaatc

SEQ ID NO: 260419 - DNA, 25 bp, Probe sequence
gcaataaatctcactaatttatttg

SEQ ID NO: 260420 - DNA, 25 bp, Probe sequence
gaagcaataaatctcactaatttat

SEQ ID NO: 260421 - DNA, 25 bp, Probe sequence
tccaggtgccaaagaaatgatatta

SEQ ID NO: 260422 - DNA, 25 bp, Probe sequence
tccagacattaccgaagcaataaat

SEQ ID NO: 260423 - DNA, 25 bp, Probe sequence
tcgccatatccaggtgccaaagaaa

SEQ ID NO: 260424 - DNA, 25 bp, Probe sequence
tctcactaatttatttgagctcata

SEQ ID NO: 260425 - DNA, 25 bp, Probe sequence
tcactaatttatttgagctcataaa

SEQ ID NO: 260426 - DNA, 25 bp, Probe sequence
taattccagacattaccgaagcaat

SEQ ID NO: 260427 - DNA, 25 bp, Probe sequence
taaatctcactaatttatttgagct

SEQ ID NO: 260428 - DNA, 25 bp, Probe sequence
taccgaagcaataaatctcactaat

SEQ ID NO: 260429 - DNA, 25 bp, Probe sequence
tattaattccagacattaccgaagc

SEQ ID NO: 260430 - DNA, 25 bp, Probe sequence
ttccagacattaccgaagcaataaa

SEQ ID NO: 260431 - DNA, 25 bp, Probe sequence
attagttttctgtttttaatcatca

SEQ ID NO: 260432 - DNA, 25 bp, Probe sequence
atatactttagtgatgggctacatt

SEQ ID NO: 260433 - DNA, 25 bp, Probe sequence
atactttagtgatgggctacatttt

SEQ ID NO: 260434 - DNA, 25 bp, Probe sequence
atgggctacattttaatccaagtga

SEQ ID NO: 260435 - DNA, 25 bp, Probe sequence
agtgatgggctacattttaatccaa

SEQ ID NO: 260436 - DNA, 25 bp, Probe sequence
agttttctgtttttaatcatcagta

SEQ ID NO: 260437 - DNA, 25 bp, Probe sequence
actttagtgatgggctacattttaa

SEQ ID NO: 260438 - DNA, 25 bp, Probe sequence
aaaggttcatcaattggctacaaaa

SEQ ID NO: 260439 - DNA, 25 bp, Probe sequence
aaaaggttcatcaattggctacaaa

SEQ ID NO: 260440 - DNA, 25 bp, Probe sequence
gctacattttaatccaagtgaggat

SEQ ID NO: 260441 - DNA, 25 bp, Probe sequence
gatgggctacattttaatccaagtg

SEQ ID NO: 260442 - DNA, 25 bp, Probe sequence
gttttctgtttttaatcatcagtat

SEQ ID NO: 260443 - DNA, 25 bp, Probe sequence
gtttttaatcatcagtatctttgct

SEQ ID NO: 260444 - DNA, 25 bp, Probe sequence
gtattagttttctgtttttaatcat

SEQ ID NO: 260445 - DNA, 25 bp, Probe sequence
gtgatgggctacattttaatccaag

SEQ ID NO: 260446 - DNA, 25 bp, Probe sequence
gggctacattttaatccaagtgagg

SEQ ID NO: 260447 - DNA, 25 bp, Probe sequence
ggctacattttaatccaagtgagga

SEQ ID NO: 260448 - DNA, 25 bp, Probe sequence
tgggctacattttaatccaagtgag

SEQ ID NO: 260449 - DNA, 25 bp, Probe sequence
tgtttttaatcatcagtatctttgc

SEQ ID NO: 260450 - DNA, 25 bp, Probe sequence
tgatgggctacattttaatccaagt

SEQ ID NO: 260451 - DNA, 25 bp, Probe sequence
tactttagtgatgggctacatttta

SEQ ID NO: 260452 - DNA, 25 bp, Probe sequence
tagttttctgtttttaatcatcagt

SEQ ID NO: 260453 - DNA, 25 bp, Probe sequence
tagtgatgggctacattttaatcca

SEQ ID NO: 260454 - DNA, 25 bp, Probe sequence
tagtgctaggtattagttttctgtt

SEQ ID NO: 260455 - DNA, 25 bp, Probe sequence
tatactttagtgatgggctacattt

SEQ ID NO: 260456 - DNA, 25 bp, Probe sequence
tattagttttctgtttttaatcatc

SEQ ID NO: 260457 - DNA, 25 bp, Probe sequence
tttctgtttttaatcatcagtatct

SEQ ID NO: 260458 - DNA, 25 bp, Probe sequence
tttagtgatgggctacattttaatc

SEQ ID NO: 260459 - DNA, 25 bp, Probe sequence
tttttaatcatcagtatctttgctg

SEQ ID NO: 260460 - DNA, 25 bp, Probe sequence
ttttaatcatcagtatctttgctgg

SEQ ID NO: 260461 - DNA, 25 bp, Probe sequence
ttttctgtttttaatcatcagtatc

SEQ ID NO: 260462 - DNA, 25 bp, Probe sequence
ttagtgatgggctacattttaatcc

SEQ ID NO: 260463 - DNA, 25 bp, Probe sequence
ttagttttctgtttttaatcatcag

SEQ ID NO: 260464 - DNA, 25 bp, Probe sequence
ttctgtttttaatcatcagtatctt

SEQ ID NO: 260465 - DNA, 25 bp, Probe sequence
atttctattgtgcaatcttcattcc

SEQ ID NO: 260466 - DNA, 25 bp, Probe sequence
ataatttcagaaactttggtggctt

SEQ ID NO: 260467 - DNA, 25 bp, Probe sequence
atcaactattccaattttcagcatc

SEQ ID NO: 260468 - DNA, 25 bp, Probe sequence
atctgatgcctttaatgaccatttt

SEQ ID NO: 260469 - DNA, 25 bp, Probe sequence
atcgtttgttaagacctgctaaagg

SEQ ID NO: 260470 - DNA, 25 bp, Probe sequence
atgaccatttttcaaaagacgcatt

SEQ ID NO: 260471 - DNA, 25 bp, Probe sequence
atggcacttatggatttttacatca

SEQ ID NO: 260472 - DNA, 25 bp, Probe sequence
actgatggtgagactgttttaaaat

SEQ ID NO: 260473 - DNA, 25 bp, Probe sequence
actattccaattttcagcatcagat

SEQ ID NO: 260474 - DNA, 25 bp, Probe sequence
aaagctatcgtttgttaagacctgc

SEQ ID NO: 260475 - DNA, 25 bp, Probe sequence
aacagaagatcatgcatatcaactt

SEQ ID NO: 260476 - DNA, 25 bp, Probe sequence
aacatcatttctattgtgcaatctt

SEQ ID NO: 260477 - DNA, 25 bp, Probe sequence
aagaaactgattagtgtagacgata

SEQ ID NO: 260478 - DNA, 25 bp, Probe sequence
cagtgaacatcatttctattgtgca

SEQ ID NO: 260479 - DNA, 25 bp, Probe sequence
cgacccatcaactattccaattttc

SEQ ID NO: 260480 - DNA, 25 bp, Probe sequence
cgacatgcatacgaagactttaagc

SEQ ID NO: 260481 - DNA, 25 bp, Probe sequence
cccatcaactattccaattttcagc

SEQ ID NO: 260482 - DNA, 25 bp, Probe sequence
gctgatcgacatgcatacgaagact

SEQ ID NO: 260483 - DNA, 25 bp, Probe sequence
gctatcgtttgttaagacctgctaa

SEQ ID NO: 260484 - DNA, 25 bp, Probe sequence
gcatcagatacttcagttatttttg

SEQ ID NO: 260485 - DNA, 25 bp, Probe sequence
gcaatctgatgcctttaatgaccat

SEQ ID NO: 260486 - DNA, 25 bp, Probe sequence
gaattcagtgaacatcatttctatt

SEQ ID NO: 260487 - DNA, 25 bp, Probe sequence
gaagatcatgcatatcaacttgaaa

SEQ ID NO: 260488 - DNA, 25 bp, Probe sequence
gaaattggtgaattcagtgaacatc

SEQ ID NO: 260489 - DNA, 25 bp, Probe sequence
gactttaagcaatctgatgccttta

SEQ ID NO: 260490 - DNA, 25 bp, Probe sequence
gatgcctttaatgaccatttttcaa

SEQ ID NO: 260491 - DNA, 25 bp, Probe sequence
gtgtagacgataatttcagaaactt

SEQ ID NO: 260492 - DNA, 25 bp, Probe sequence
ggatttgctgatcgacatgcatacg

SEQ ID NO: 260493 - DNA, 25 bp, Probe sequence
tggctttaaaagctatcgtttgtta

SEQ ID NO: 260494 - DNA, 25 bp, Probe sequence
tccaattttcagcatcagatacttc

SEQ ID NO: 260495 - DNA, 25 bp, Probe sequence
taaaaatcaataacccgacccatca

SEQ ID NO: 260496 - DNA, 25 bp, Probe sequence
ttgttaagacctgctaaaggtacaa

SEQ ID NO: 260497 - DNA, 25 bp, Probe sequence
ttttcagcatcagatacttcagtta

SEQ ID NO: 260498 - DNA, 25 bp, Probe sequence
ttgaagaaactgatggtgagactgt

SEQ ID NO: 260499 - DNA, 25 bp, Probe sequence
atacaattctgaagcccctatctac

SEQ ID NO: 260500 - DNA, 25 bp, Probe sequence
aggacattgagtttacattcgtgga

SEQ ID NO: 260501 - DNA, 25 bp, Probe sequence
agcccctatctactcagcaaaatat

SEQ ID NO: 260502 - DNA, 25 bp, Probe sequence
aaatagtacctattgatccaattaa

SEQ ID NO: 260503 - DNA, 25 bp, Probe sequence
aaacgttatccagtaaagatggtga

SEQ ID NO: 260504 - DNA, 25 bp, Probe sequence
aaaaggttcatcaatcggacataag

SEQ ID NO: 260505 - DNA, 25 bp, Probe sequence
aacagccaaaaggtgaaattatgaa

SEQ ID NO: 260506 - DNA, 25 bp, Probe sequence
aagggacatgggttatcagttcagt

SEQ ID NO: 260507 - DNA, 25 bp, Probe sequence
aaggatattttattgtagatgaaac

SEQ ID NO: 260508 - DNA, 25 bp, Probe sequence
aatggagaggtttcatacaattctg

SEQ ID NO: 260509 - DNA, 25 bp, Probe sequence
aatcggacataaggacattgagttt

SEQ ID NO: 260510 - DNA, 25 bp, Probe sequence
cagaaaaggctcccaaattgttgtt

SEQ ID NO: 260511 - DNA, 25 bp, Probe sequence
ccctatctactcagcaaaatatcaa

SEQ ID NO: 260512 - DNA, 25 bp, Probe sequence
gaatatattttttactgatagtttg

SEQ ID NO: 260513 - DNA, 25 bp, Probe sequence
gacaaagggacatgggttatcagtt

SEQ ID NO: 260514 - DNA, 25 bp, Probe sequence
gacattgagtttacattcgtggaga

SEQ ID NO: 260515 - DNA, 25 bp, Probe sequence
gagtttacattcgtggagaatcaag

SEQ ID NO: 260516 - DNA, 25 bp, Probe sequence
gagtttacctcaagtgagaactatt

SEQ ID NO: 260517 - DNA, 25 bp, Probe sequence
gatagtttggagtttacctcaagtg

SEQ ID NO: 260518 - DNA, 25 bp, Probe sequence
gatatatcaacagaaaaggctccca

SEQ ID NO: 260519 - DNA, 25 bp, Probe sequence
gttgttgaaaggtactggagattta

SEQ ID NO: 260520 - DNA, 25 bp, Probe sequence
gttcagtaatggttaaacagccaaa

SEQ ID NO: 260521 - DNA, 25 bp, Probe sequence
gtttttctcacaatatggtgatttt

SEQ ID NO: 260522 - DNA, 25 bp, Probe sequence
gtttggagtttacctcaagtgagaa

SEQ ID NO: 260523 - DNA, 25 bp, Probe sequence
gtacctattgatccaattaatgata

SEQ ID NO: 260524 - DNA, 25 bp, Probe sequence
gggttatcagttcagtaatggttaa

SEQ ID NO: 260525 - DNA, 25 bp, Probe sequence
ggtttcatacaattctgaagcccct

SEQ ID NO: 260526 - DNA, 25 bp, Probe sequence
ggttcatcaatcggacataaggaca

SEQ ID NO: 260527 - DNA, 25 bp, Probe sequence
ggacatgggttatcagttcagtaat

SEQ ID NO: 260528 - DNA, 25 bp, Probe sequence
tcatacaattctgaagcccctatct

SEQ ID NO: 260529 - DNA, 25 bp, Probe sequence
tcaagagggatgtatctatttttaa

SEQ ID NO: 260530 - DNA, 25 bp, Probe sequence
tacaagaaccgcaaaaggatatttt

SEQ ID NO: 260531 - DNA, 25 bp, Probe sequence
tactgatagtttggagtttacctca

SEQ ID NO: 260532 - DNA, 25 bp, Probe sequence
ttttaagtttttctcacaatatggt

SEQ ID NO: 260533 - DNA, 25 bp, Probe sequence
attattttattagacaaggtggaag

SEQ ID NO: 260534 - DNA, 25 bp, Probe sequence
atacacgaacggccaagggatatta

SEQ ID NO: 260535 - DNA, 25 bp, Probe sequence
agggatgtggacgatttacacagat

SEQ ID NO: 260536 - DNA, 25 bp, Probe sequence
agtcgattcattaaattttcaacct

SEQ ID NO: 260537 - DNA, 25 bp, Probe sequence
agcgaattatcaatagtcgattcat

SEQ ID NO: 260538 - DNA, 25 bp, Probe sequence
aagttacaaccatggcgacgtttca

SEQ ID NO: 260539 - DNA, 25 bp, Probe sequence
caatatgccgatttcaagagtttga

SEQ ID NO: 260540 - DNA, 25 bp, Probe sequence
caaccatggcgacgtttcaattaat

SEQ ID NO: 260541 - DNA, 25 bp, Probe sequence
gatggggacttaaaaggcagttccg

SEQ ID NO: 260542 - DNA, 25 bp, Probe sequence
cggacaatatgccgatttcaagagt

SEQ ID NO: 260543 - DNA, 25 bp, Probe sequence
ccatggcgacgtttcaattaatagt

SEQ ID NO: 260544 - DNA, 25 bp, Probe sequence
gaaaagttacaaccatggcgacgtt

SEQ ID NO: 260545 - DNA, 25 bp, Probe sequence
gacaaggtggaagatcaaaaactta

SEQ ID NO: 260546 - DNA, 25 bp, Probe sequence
gaaatacacgaacggccaagggata

SEQ ID NO: 260547 - DNA, 25 bp, Probe sequence
gacaatcatgaaaactcttatagta

SEQ ID NO: 260548 - DNA, 25 bp, Probe sequence
gacttaaaaggcagttccgttggat

SEQ ID NO: 260549 - DNA, 25 bp, Probe sequence
gacgatttacacagatttcgccaaa

SEQ ID NO: 260550 - DNA, 25 bp, Probe sequence
gagtatttttataattggttgtggc

SEQ ID NO: 260551 - DNA, 25 bp, Probe sequence
gagtttgaaaagttacaaccatggc

SEQ ID NO: 260552 - DNA, 25 bp, Probe sequence
gagtagtattgtacataagcattat

SEQ ID NO: 260553 - DNA, 25 bp, Probe sequence
gatagaaatacacgaacggccaagg

SEQ ID NO: 260554 - DNA, 25 bp, Probe sequence
gattcattaaattttcaacctgcca

SEQ ID NO: 260555 - DNA, 25 bp, Probe sequence
gttacaaccatggcgacgtttcaat

SEQ ID NO: 260556 - DNA, 25 bp, Probe sequence
gtaatagaccaggtgtattagataa

SEQ ID NO: 260557 - DNA, 25 bp, Probe sequence
gggatattattttgtagatactata

SEQ ID NO: 260558 - DNA, 25 bp, Probe sequence
ggcagttccgttggatataaaaagt

SEQ ID NO: 260559 - DNA, 25 bp, Probe sequence
ggcgacgtttcaattaatagtaatg

SEQ ID NO: 260560 - DNA, 25 bp, Probe sequence
tgtagatactatatatgacaatcat

SEQ ID NO: 260561 - DNA, 25 bp, Probe sequence
tcgccaaaagtaatagaccaggtgt

SEQ ID NO: 260562 - DNA, 25 bp, Probe sequence
taaaaggcagttccgttggatataa

SEQ ID NO: 260563 - DNA, 25 bp, Probe sequence
tacaaccatggcgacgtttcaatta

SEQ ID NO: 260564 - DNA, 25 bp, Probe sequence
tttcaacctgccaaaaataaagatg

SEQ ID NO: 260565 - DNA, 25 bp, Probe sequence
ttttataattggttgtggcaaaggt

SEQ ID NO: 260566 - DNA, 25 bp, Probe sequence
ttcattaaattttcaacctgccaaa

SEQ ID NO: 260567 - DNA, 25 bp, Probe sequence
attattgtttaagggatctggagat

SEQ ID NO: 260568 - DNA, 25 bp, Probe sequence
atgctcccaattactctgcagaata

SEQ ID NO: 260569 - DNA, 25 bp, Probe sequence
atgacagaaacattcaacagttgaa

SEQ ID NO: 260570 - DNA, 25 bp, Probe sequence
atgttgacagcgttgagttcgttcc

SEQ ID NO: 260571 - DNA, 25 bp, Probe sequence
aggggtcttctgtaggatataagga

SEQ ID NO: 260572 - DNA, 25 bp, Probe sequence
aaaactagcaagacaccaaaattat

SEQ ID NO: 260573 - DNA, 25 bp, Probe sequence
aatgaaatagagtcgtttgaattat

SEQ ID NO: 260574 - DNA, 25 bp, Probe sequence
cagcgttgagttcgttccaagtaac

SEQ ID NO: 260575 - DNA, 25 bp, Probe sequence
catataatcctaatgctcccaatta

SEQ ID NO: 260576 - DNA, 25 bp, Probe sequence
gcgttgagttcgttccaagtaacaa

SEQ ID NO: 260577 - DNA, 25 bp, Probe sequence
gctcccaattactctgcagaatata

SEQ ID NO: 260578 - DNA, 25 bp, Probe sequence
gctatagtatcacaaccaaaaggcg

SEQ ID NO: 260579 - DNA, 25 bp, Probe sequence
gcaagacaccaaaattattgtttaa

SEQ ID NO: 260580 - DNA, 25 bp, Probe sequence
gaattattttcacaatatggaaact

SEQ ID NO: 260581 - DNA, 25 bp, Probe sequence
gaagcatttattatgttgacagcgt

SEQ ID NO: 260582 - DNA, 25 bp, Probe sequence
gaaactttaatcattttgatcggaa

SEQ ID NO: 260583 - DNA, 25 bp, Probe sequence
gacagcgttgagttcgttccaagta

SEQ ID NO: 260584 - DNA, 25 bp, Probe sequence
gagttcgttccaagtaacaaaatga

SEQ ID NO: 260585 - DNA, 25 bp, Probe sequence
gatctggagatataaaggggtcttc

SEQ ID NO: 260586 - DNA, 25 bp, Probe sequence
gataaggggacgtgggttctgtatt

SEQ ID NO: 260587 - DNA, 25 bp, Probe sequence
gttgacagcgttgagttcgttccaa

SEQ ID NO: 260588 - DNA, 25 bp, Probe sequence
gttctgtattcagctatagtatcac

SEQ ID NO: 260589 - DNA, 25 bp, Probe sequence
gttatggtagcaggttgtggtaaaa

SEQ ID NO: 260590 - DNA, 25 bp, Probe sequence
gtattcagctatagtatcacaacca

SEQ ID NO: 260591 - DNA, 25 bp, Probe sequence
gtatcacaaccaaaaggcgagagtt

SEQ ID NO: 260592 - DNA, 25 bp, Probe sequence
gtatcttgattttaatagttatggt

SEQ ID NO: 260593 - DNA, 25 bp, Probe sequence
gggtgataaggggacgtgggttctg

SEQ ID NO: 260594 - DNA, 25 bp, Probe sequence
ggtgaataataggatagttttggta

SEQ ID NO: 260595 - DNA, 25 bp, Probe sequence
tcccaattactctgcagaatataaa

SEQ ID NO: 260596 - DNA, 25 bp, Probe sequence
taatcctaatgctcccaattactct

SEQ ID NO: 260597 - DNA, 25 bp, Probe sequence
taatgctcccaattactctgcagaa

SEQ ID NO: 260598 - DNA, 25 bp, Probe sequence
taaaggggtcttctgtaggatataa

SEQ ID NO: 260599 - DNA, 25 bp, Probe sequence
tatggaaactttaatcattttgatc

SEQ ID NO: 260600 - DNA, 25 bp, Probe sequence
ttttgatcggaatgagattactaat

SEQ ID NO: 260601 - DNA, 25 bp, Probe sequence
attaagaatctcgagaatctatatg

SEQ ID NO: 260602 - DNA, 25 bp, Probe sequence
atagaaatacgaggacagcaacagg

SEQ ID NO: 260603 - DNA, 25 bp, Probe sequence
ataaacagatagaatacacattttc

SEQ ID NO: 260604 - DNA, 25 bp, Probe sequence
aggatattatactgtaagaacaact

SEQ ID NO: 260605 - DNA, 25 bp, Probe sequence
agttattatggttatgagtgttttt

SEQ ID NO: 260606 - DNA, 25 bp, Probe sequence
agaatctcgagaatctatatgacaa

SEQ ID NO: 260607 - DNA, 25 bp, Probe sequence
agaatacacattttctaaggagaaa

SEQ ID NO: 260608 - DNA, 25 bp, Probe sequence
agcaatgaaaatgttccttattatg

SEQ ID NO: 260609 - DNA, 25 bp, Probe sequence
acgaggacagcaacaggatattata

SEQ ID NO: 260610 - DNA, 25 bp, Probe sequence
acttcggtccatcacacagtaaata

SEQ ID NO: 260611 - DNA, 25 bp, Probe sequence
aaagcaacaagcaaggtgaaatgaa

SEQ ID NO: 260612 - DNA, 25 bp, Probe sequence
aacaagcaaggtgaaatgaatagcg

SEQ ID NO: 260613 - DNA, 25 bp, Probe sequence
aacttcggtccatcacacagtaaat

SEQ ID NO: 260614 - DNA, 25 bp, Probe sequence
aagacttgtattgtacatagttatt

SEQ ID NO: 260615 - DNA, 25 bp, Probe sequence
aagatagttctattggacaaagtag

SEQ ID NO: 260616 - DNA, 25 bp, Probe sequence
cttcggtccatcacacagtaaatag

SEQ ID NO: 260617 - DNA, 25 bp, Probe sequence
gcgaaggtatggtactacattttaa

SEQ ID NO: 260618 - DNA, 25 bp, Probe sequence
gaatagcgaaggtatggtactacat

SEQ ID NO: 260619 - DNA, 25 bp, Probe sequence
gaaggtatggtactacattttaata

SEQ ID NO: 260620 - DNA, 25 bp, Probe sequence
gaagtggataagttggcacgcgaaa

SEQ ID NO: 260621 - DNA, 25 bp, Probe sequence
gaaatacgaggacagcaacaggata

SEQ ID NO: 260622 - DNA, 25 bp, Probe sequence
gacttgtattgtacatagttattat

SEQ ID NO: 260623 - DNA, 25 bp, Probe sequence
gatgaagtggataagttggcacgcg

SEQ ID NO: 260624 - DNA, 25 bp, Probe sequence
gataagttggcacgcgaaaaaaaat

SEQ ID NO: 260625 - DNA, 25 bp, Probe sequence
gttggcacgcgaaaaaaaatatcgt

SEQ ID NO: 260626 - DNA, 25 bp, Probe sequence
gtggataagttggcacgcgaaaaaa

SEQ ID NO: 260627 - DNA, 25 bp, Probe sequence
ggtatggtactacattttaatagaa

SEQ ID NO: 260628 - DNA, 25 bp, Probe sequence
tgatgggttatttaaaaagacttgt

SEQ ID NO: 260629 - DNA, 25 bp, Probe sequence
tctcgagaatctatatgacaaagaa

SEQ ID NO: 260630 - DNA, 25 bp, Probe sequence
tacgaggacagcaacaggatattat

SEQ ID NO: 260631 - DNA, 25 bp, Probe sequence
tagcgaaggtatggtactacatttt

SEQ ID NO: 260632 - DNA, 25 bp, Probe sequence
tatctagcaatgaaaatgttcctta

SEQ ID NO: 260633 - DNA, 25 bp, Probe sequence
tttcgggcaatatgccgattttaaa

SEQ ID NO: 260634 - DNA, 25 bp, Probe sequence
ttttcgggcaatatgccgattttaa

SEQ ID NO: 260635 - DNA, 25 bp, Probe sequence
atatttttaagtaagccttcatacg

SEQ ID NO: 260636 - DNA, 25 bp, Probe sequence
aggcaatttgactaataatgaggat

SEQ ID NO: 260637 - DNA, 25 bp, Probe sequence
agtaagccttcatacgggaaatttg

SEQ ID NO: 260638 - DNA, 25 bp, Probe sequence
agccttcatacgggaaatttgattt

SEQ ID NO: 260639 - DNA, 25 bp, Probe sequence
acagtcccatatacatataataaat

SEQ ID NO: 260640 - DNA, 25 bp, Probe sequence
aaaggttatgcttcgatttcaaaag

SEQ ID NO: 260641 - DNA, 25 bp, Probe sequence
aacccgatttaatcgttgtagatgc

SEQ ID NO: 260642 - DNA, 25 bp, Probe sequence
aaacccgatttaatcgttgtagatg

SEQ ID NO: 260643 - DNA, 25 bp, Probe sequence
aacagtcccatatacatataataaa

SEQ ID NO: 260644 - DNA, 25 bp, Probe sequence
aagccttcatacgggaaatttgatt

SEQ ID NO: 260645 - DNA, 25 bp, Probe sequence
aaggttatgcttcgatttcaaaaga

SEQ ID NO: 260646 - DNA, 25 bp, Probe sequence
aatttgactaataatgaggataaag

SEQ ID NO: 260647 - DNA, 25 bp, Probe sequence
caatttgactaataatgaggataaa

SEQ ID NO: 260648 - DNA, 25 bp, Probe sequence
caacagtcccatatacatataataa

SEQ ID NO: 260649 - DNA, 25 bp, Probe sequence
cttcatacgggaaatttgattttga

SEQ ID NO: 260650 - DNA, 25 bp, Probe sequence
ccttcatacgggaaatttgattttg

SEQ ID NO: 260651 - DNA, 25 bp, Probe sequence
ccaacagtcccatatacatataata

SEQ ID NO: 260652 - DNA, 25 bp, Probe sequence
gccaacagtcccatatacatataat

SEQ ID NO: 260653 - DNA, 25 bp, Probe sequence
gccttcatacgggaaatttgatttt

SEQ ID NO: 260654 - DNA, 25 bp, Probe sequence
gcaaaacccgatttaatcgttgtag

SEQ ID NO: 260655 - DNA, 25 bp, Probe sequence
gcaatttgactaataatgaggataa

SEQ ID NO: 260656 - DNA, 25 bp, Probe sequence
gaagagtgggaagataaaactagga

SEQ ID NO: 260657 - DNA, 25 bp, Probe sequence
gagtgggaagataaaactaggaaag

SEQ ID NO: 260658 - DNA, 25 bp, Probe sequence
gataaaaaaggttatgcttcgattt

SEQ ID NO: 260659 - DNA, 25 bp, Probe sequence
gtaagccttcatacgggaaatttga

SEQ ID NO: 260660 - DNA, 25 bp, Probe sequence
ggcaatttgactaataatgaggata

SEQ ID NO: 260661 - DNA, 25 bp, Probe sequence
taagtaagccttcatacgggaaatt

SEQ ID NO: 260662 - DNA, 25 bp, Probe sequence
taagccttcatacgggaaatttgat

SEQ ID NO: 260663 - DNA, 25 bp, Probe sequence
ttaagtaagccttcatacgggaaat

SEQ ID NO: 260664 - DNA, 25 bp, Probe sequence
taaaaaaggttatgcttcgatttca

SEQ ID NO: 260665 - DNA, 25 bp, Probe sequence
taggcaatttgactaataatgagga

SEQ ID NO: 260666 - DNA, 25 bp, Probe sequence
tatttttaagtaagccttcatacgg

SEQ ID NO: 260667 - DNA, 25 bp, Probe sequence
tatatttttaagtaagccttcatac

SEQ ID NO: 260668 - DNA, 25 bp, Probe sequence
ttcatacgggaaatttgattttgaa

SEQ ID NO: 260669 - DNA, 25 bp, Probe sequence
cgggcatatcgtgccaggttggcaa

SEQ ID NO: 260670 - DNA, 25 bp, Probe sequence
atatccatgtagtgaatggcactta

SEQ ID NO: 260671 - DNA, 25 bp, Probe sequence
atcaggataacgaacgagtggcaca

SEQ ID NO: 260672 - DNA, 25 bp, Probe sequence
atgcctaaaaccgatagcgcacgca

SEQ ID NO: 260673 - DNA, 25 bp, Probe sequence
atggcacttattactttcacgggca

SEQ ID NO: 260674 - DNA, 25 bp, Probe sequence
accaatttttcggatctaagagata

SEQ ID NO: 260675 - DNA, 25 bp, Probe sequence
acttattactttcacgggcatatcg

SEQ ID NO: 260676 - DNA, 25 bp, Probe sequence
aaaaccgatagcgcacgcaaagaat

SEQ ID NO: 260677 - DNA, 25 bp, Probe sequence
aaaagacatttgatactgctgaaga

SEQ ID NO: 260678 - DNA, 25 bp, Probe sequence
aacgaacgagtggcacatatccatg

SEQ ID NO: 260679 - DNA, 25 bp, Probe sequence
aagcaacatggtttggaatacgagg

SEQ ID NO: 260680 - DNA, 25 bp, Probe sequence
cacgggcatatcgtgccaggttggc

SEQ ID NO: 260681 - DNA, 25 bp, Probe sequence
ctttcacgggcatatcgtgccaggt

SEQ ID NO: 260682 - DNA, 25 bp, Probe sequence
cctaaaaccgatagcgcacgcaaag

SEQ ID NO: 260683 - DNA, 25 bp, Probe sequence
ctgaagagctcgaaatatatataaa

SEQ ID NO: 260684 - DNA, 25 bp, Probe sequence
gccaggttggcaaagcgttaaaaag

SEQ ID NO: 260685 - DNA, 25 bp, Probe sequence
gcctaaaaccgatagcgcacgcaaa

SEQ ID NO: 260686 - DNA, 25 bp, Probe sequence
gcgcacgcaaagaatacttaaacca

SEQ ID NO: 260687 - DNA, 25 bp, Probe sequence
gcacttattactttcacgggcatat

SEQ ID NO: 260688 - DNA, 25 bp, Probe sequence
gaatggcacttattactttcacggg

SEQ ID NO: 260689 - DNA, 25 bp, Probe sequence
gaacgagtggcacatatccatgtag

SEQ ID NO: 260690 - DNA, 25 bp, Probe sequence
gaacagaagcaactaactttatttt

SEQ ID NO: 260691 - DNA, 25 bp, Probe sequence
gacatttgatactgctgaagagctc

SEQ ID NO: 260692 - DNA, 25 bp, Probe sequence
gagatatctgtatcaggataacgaa

SEQ ID NO: 260693 - DNA, 25 bp, Probe sequence
gagtggcacatatccatgtagtgaa

SEQ ID NO: 260694 - DNA, 25 bp, Probe sequence
gatactgctgaagagctcgaaatat

SEQ ID NO: 260695 - DNA, 25 bp, Probe sequence
gatagcgcacgcaaagaatacttaa

SEQ ID NO: 260696 - DNA, 25 bp, Probe sequence
gttggcaaagcgttaaaaagacatt

SEQ ID NO: 260697 - DNA, 25 bp, Probe sequence
ggatctaagagatatctgtatcagg

SEQ ID NO: 260698 - DNA, 25 bp, Probe sequence
ggaatacgaggaacagaagcaacta

SEQ ID NO: 260699 - DNA, 25 bp, Probe sequence
ggcacatatccatgtagtgaatggc

SEQ ID NO: 260700 - DNA, 25 bp, Probe sequence
taaaccaatttttcggatctaagag

SEQ ID NO: 260701 - DNA, 25 bp, Probe sequence
tatcgtgccaggttggcaaagcgtt

SEQ ID NO: 260702 - DNA, 25 bp, Probe sequence
ttactttcacgggcatatcgtgcca

SEQ ID NO: 260703 - DNA, 25 bp, Probe sequence
ataacggcaatgacacagagggatt

SEQ ID NO: 260704 - DNA, 25 bp, Probe sequence
atccgttataagtgctagtgcgtat

SEQ ID NO: 260705 - DNA, 25 bp, Probe sequence
atgctattcaacattcagttaaaga

SEQ ID NO: 260706 - DNA, 25 bp, Probe sequence
atgacacagagggattgctaaaaga

SEQ ID NO: 260707 - DNA, 25 bp, Probe sequence
acgtgtataagaaagcgcgagcatt

SEQ ID NO: 260708 - DNA, 25 bp, Probe sequence
aacaatccgttataagtgctagtgc

SEQ ID NO: 260709 - DNA, 25 bp, Probe sequence
aagaaagcgcgagcatttgatgaaa

SEQ ID NO: 260710 - DNA, 25 bp, Probe sequence
aagttgtctataaatatgaggagga

SEQ ID NO: 260711 - DNA, 25 bp, Probe sequence
aagtgctagtgcgtataacggcaat

SEQ ID NO: 260712 - DNA, 25 bp, Probe sequence
aatcgtgaacaaattgaacaatccg

SEQ ID NO: 260713 - DNA, 25 bp, Probe sequence
caatccgttataagtgctagtgcgt

SEQ ID NO: 260714 - DNA, 25 bp, Probe sequence
gcgcgagcatttgatgaaatacttg

SEQ ID NO: 260715 - DNA, 25 bp, Probe sequence
gcgtataacggcaatgacacagagg

SEQ ID NO: 260716 - DNA, 25 bp, Probe sequence
gctaaaagagattgaggacgtgtat

SEQ ID NO: 260717 - DNA, 25 bp, Probe sequence
gctagtgcgtataacggcaatgaca

SEQ ID NO: 260718 - DNA, 25 bp, Probe sequence
gcagtagggattatgacgggtcaag

SEQ ID NO: 260719 - DNA, 25 bp, Probe sequence
gaaggtattggtcttgatgaagcag

SEQ ID NO: 260720 - DNA, 25 bp, Probe sequence
gaagcagtagggattatgacgggtc

SEQ ID NO: 260721 - DNA, 25 bp, Probe sequence
gaacaatccgttataagtgctagtg

SEQ ID NO: 260722 - DNA, 25 bp, Probe sequence
gaaagcgcgagcatttgatgaaata

SEQ ID NO: 260723 - DNA, 25 bp, Probe sequence
gacaaatgctattcaacattcagtt

SEQ ID NO: 260724 - DNA, 25 bp, Probe sequence
gacgggtcaagttgtctataaatat

SEQ ID NO: 260725 - DNA, 25 bp, Probe sequence
gagggattgctaaaagagattgagg

SEQ ID NO: 260726 - DNA, 25 bp, Probe sequence
gatggaatgacaaatgctattcaac

SEQ ID NO: 260727 - DNA, 25 bp, Probe sequence
gtattggtcttgatgaagcagtagg

SEQ ID NO: 260728 - DNA, 25 bp, Probe sequence
gtataacggcaatgacacagaggga

SEQ ID NO: 260729 - DNA, 25 bp, Probe sequence
gtataagaaagcgcgagcatttgat

SEQ ID NO: 260730 - DNA, 25 bp, Probe sequence
gtgctagtgcgtataacggcaatga

SEQ ID NO: 260731 - DNA, 25 bp, Probe sequence
gggattatgacgggtcaagttgtct

SEQ ID NO: 260732 - DNA, 25 bp, Probe sequence
ggacgtgtataagaaagcgcgagca

SEQ ID NO: 260733 - DNA, 25 bp, Probe sequence
tgaggaggaacaggaaaatgactaa

SEQ ID NO: 260734 - DNA, 25 bp, Probe sequence
tataagtgctagtgcgtataacggc

SEQ ID NO: 260735 - DNA, 25 bp, Probe sequence
ttatgacgggtcaagttgtctataa

SEQ ID NO: 260736 - DNA, 25 bp, Probe sequence
ttgatgaaatacttgatggaatgac

SEQ ID NO: 260737 - DNA, 25 bp, Probe sequence
attaggtcagttgtttgaaaatata

SEQ ID NO: 260738 - DNA, 25 bp, Probe sequence
attttactgctgttagagataatca

SEQ ID NO: 260739 - DNA, 25 bp, Probe sequence
atacttagtcacaacattcaaagat

SEQ ID NO: 260740 - DNA, 25 bp, Probe sequence
atcagacgtttacagttgttgaggc

SEQ ID NO: 260741 - DNA, 25 bp, Probe sequence
aggacaaccacatgaacattttact

SEQ ID NO: 260742 - DNA, 25 bp, Probe sequence
accacatgaacattttactgctgtt

SEQ ID NO: 260743 - DNA, 25 bp, Probe sequence
acatgaacattttactgctgttaga

SEQ ID NO: 260744 - DNA, 25 bp, Probe sequence
acagttgttgaggcggagagtaaag

SEQ ID NO: 260745 - DNA, 25 bp, Probe sequence
aacaggacaaccacatgaacatttt

SEQ ID NO: 260746 - DNA, 25 bp, Probe sequence
aagattcaacaggacaaccacatga

SEQ ID NO: 260747 - DNA, 25 bp, Probe sequence
caaccacatgaacattttactgctg

SEQ ID NO: 260748 - DNA, 25 bp, Probe sequence
cagacgtttacagttgttgaggcgg

SEQ ID NO: 260749 - DNA, 25 bp, Probe sequence
gcaatacttagtcacaacattcaaa

SEQ ID NO: 260750 - DNA, 25 bp, Probe sequence
gaagcgaaagagaagtacgaggcac

SEQ ID NO: 260751 - DNA, 25 bp, Probe sequence
gaacattttactgctgttagagata

SEQ ID NO: 260752 - DNA, 25 bp, Probe sequence
gaaagagaagtacgaggcacaagtt

SEQ ID NO: 260753 - DNA, 25 bp, Probe sequence
gacaaccacatgaacattttactgc

SEQ ID NO: 260754 - DNA, 25 bp, Probe sequence
gacgtttacagttgttgaggcggag

SEQ ID NO: 260755 - DNA, 25 bp, Probe sequence
gacgcaatacttagtcacaacattc

SEQ ID NO: 260756 - DNA, 25 bp, Probe sequence
gagaagtacgaggcacaagttaaaa

SEQ ID NO: 260757 - DNA, 25 bp, Probe sequence
gagataatcagacgtttacagttgt

SEQ ID NO: 260758 - DNA, 25 bp, Probe sequence
gaggcggagagtaaagaagaagcga

SEQ ID NO: 260759 - DNA, 25 bp, Probe sequence
gaggcacaagttaaaagggatgcaa

SEQ ID NO: 260760 - DNA, 25 bp, Probe sequence
gataatcagacgtttacagttgttg

SEQ ID NO: 260761 - DNA, 25 bp, Probe sequence
gattcaacaggacaaccacatgaac

SEQ ID NO: 260762 - DNA, 25 bp, Probe sequence
gttgttgaggcggagagtaaagaag

SEQ ID NO: 260763 - DNA, 25 bp, Probe sequence
gtttacagttgttgaggcggagagt

SEQ ID NO: 260764 - DNA, 25 bp, Probe sequence
gtacgaggcacaagttaaaagggat

SEQ ID NO: 260765 - DNA, 25 bp, Probe sequence
gtcacaacattcaaagattcaacag

SEQ ID NO: 260766 - DNA, 25 bp, Probe sequence
gggatgcaattattaaattaggtca

SEQ ID NO: 260767 - DNA, 25 bp, Probe sequence
tgaaaatataagggagtgtgggaaa

SEQ ID NO: 260768 - DNA, 25 bp, Probe sequence
tcaaagattcaacaggacaaccaca

SEQ ID NO: 260769 - DNA, 25 bp, Probe sequence
tagtcacaacattcaaagattcaac

SEQ ID NO: 260770 - DNA, 25 bp, Probe sequence
ttattaaattaggtcagttgtttga

SEQ ID NO: 260771 - DNA, 25 bp, Probe sequence
attattcggcgtaatcgcactgatg

SEQ ID NO: 260772 - DNA, 25 bp, Probe sequence
atgcttgttgtcatatcgcctatct

SEQ ID NO: 260773 - DNA, 25 bp, Probe sequence
agacaacaagcaagtcatcgaaaac

SEQ ID NO: 260774 - DNA, 25 bp, Probe sequence
actgatgcttgttgtcatatcgcct

SEQ ID NO: 260775 - DNA, 25 bp, Probe sequence
aactctgacttactattcaaaaaga

SEQ ID NO: 260776 - DNA, 25 bp, Probe sequence
aatcgcactgatgcttgttgtcata

SEQ ID NO: 260777 - DNA, 25 bp, Probe sequence
aatactgcgattattcggcgtaatc

SEQ ID NO: 260778 - DNA, 25 bp, Probe sequence
aatatggattggttcgatatcttta

SEQ ID NO: 260779 - DNA, 25 bp, Probe sequence
catcgaaaactctgacttactattc

SEQ ID NO: 260780 - DNA, 25 bp, Probe sequence
cttgttgtcatatcgcctatctata

SEQ ID NO: 260781 - DNA, 25 bp, Probe sequence
ctgatgcttgttgtcatatcgccta

SEQ ID NO: 260782 - DNA, 25 bp, Probe sequence
cggcgtaatcgcactgatgcttgtt

SEQ ID NO: 260783 - DNA, 25 bp, Probe sequence
gcgtaatcgcactgatgcttgttgt

SEQ ID NO: 260784 - DNA, 25 bp, Probe sequence
gcactgatgcttgttgtcatatcgc

SEQ ID NO: 260785 - DNA, 25 bp, Probe sequence
gaagacaagttctatattgtgttag

SEQ ID NO: 260786 - DNA, 25 bp, Probe sequence
gaaaactctgacttactattcaaaa

SEQ ID NO: 260787 - DNA, 25 bp, Probe sequence
gacaagttctatattgtgttagaca

SEQ ID NO: 260788 - DNA, 25 bp, Probe sequence
gatgcttgttgtcatatcgcctatc

SEQ ID NO: 260789 - DNA, 25 bp, Probe sequence
gttgtcatatcgcctatctatacag

SEQ ID NO: 260790 - DNA, 25 bp, Probe sequence
gtaatcgcactgatgcttgttgtca

SEQ ID NO: 260791 - DNA, 25 bp, Probe sequence
gtgttagacaacaagcaagtcatcg

SEQ ID NO: 260792 - DNA, 25 bp, Probe sequence
ggattggttcgatatctttattgtt

SEQ ID NO: 260793 - DNA, 25 bp, Probe sequence
ggaatactgcgattattcggcgtaa

SEQ ID NO: 260794 - DNA, 25 bp, Probe sequence
ggcgtaatcgcactgatgcttgttg

SEQ ID NO: 260795 - DNA, 25 bp, Probe sequence
tgttgtcatatcgcctatctataca

SEQ ID NO: 260796 - DNA, 25 bp, Probe sequence
tcgcactgatgcttgttgtcatatc

SEQ ID NO: 260797 - DNA, 25 bp, Probe sequence
tcgaaaactctgacttactattcaa

SEQ ID NO: 260798 - DNA, 25 bp, Probe sequence
taatcgcactgatgcttgttgtcat

SEQ ID NO: 260799 - DNA, 25 bp, Probe sequence
taaaagtaggcgacaaagtagaagt

SEQ ID NO: 260800 - DNA, 25 bp, Probe sequence
tattcggcgtaatcgcactgatgct

SEQ ID NO: 260801 - DNA, 25 bp, Probe sequence
tgatgcttgttgtcatatcgcctat

SEQ ID NO: 260802 - DNA, 25 bp, Probe sequence
ttcggcgtaatcgcactgatgcttg

SEQ ID NO: 260803 - DNA, 25 bp, Probe sequence
ttggttcgatatctttattgttgga

SEQ ID NO: 260804 - DNA, 25 bp, Probe sequence
ttgtcatatcgcctatctatacagt

SEQ ID NO: 260805 - DNA, 25 bp, Probe sequence
atgtagaggcgccgagtgacttcgc

SEQ ID NO: 260806 - DNA, 25 bp, Probe sequence
agactattattcttactagcgatgt

SEQ ID NO: 260807 - DNA, 25 bp, Probe sequence
aaagttgagcgatcagtctgatttg

SEQ ID NO: 260808 - DNA, 25 bp, Probe sequence
aatgatgatgtagaggcgccgagtg

SEQ ID NO: 260809 - DNA, 25 bp, Probe sequence
cagtctgatttgatgagggcggagg

SEQ ID NO: 260810 - DNA, 25 bp, Probe sequence
ctattattcttactagcgatgtatg

SEQ ID NO: 260811 - DNA, 25 bp, Probe sequence
ccgagtgacttcgcaaagttgagcg

SEQ ID NO: 260812 - DNA, 25 bp, Probe sequence
gccgagtgacttcgcaaagttgagc

SEQ ID NO: 260813 - DNA, 25 bp, Probe sequence
gcgccgagtgacttcgcaaagttga

SEQ ID NO: 260814 - DNA, 25 bp, Probe sequence
gcgatcagtctgatttgatgagggc

SEQ ID NO: 260815 - DNA, 25 bp, Probe sequence
gcgatgtatgagctaggtaagtatg

SEQ ID NO: 260816 - DNA, 25 bp, Probe sequence
gcaaagttgagcgatcagtctgatt

SEQ ID NO: 260817 - DNA, 25 bp, Probe sequence
gaaagtatatattatgacgacggct

SEQ ID NO: 260818 - DNA, 25 bp, Probe sequence
gacttcgcaaagttgagcgatcagt

SEQ ID NO: 260819 - DNA, 25 bp, Probe sequence
gactattattcttactagcgatgta

SEQ ID NO: 260820 - DNA, 25 bp, Probe sequence
gacgacggctaatgatgatgtagag

SEQ ID NO: 260821 - DNA, 25 bp, Probe sequence
gagctaggtaagtatgtaactgaga

SEQ ID NO: 260822 - DNA, 25 bp, Probe sequence
gagtgacttcgcaaagttgagcgat

SEQ ID NO: 260823 - DNA, 25 bp, Probe sequence
gatgtagaggcgccgagtgacttcg

SEQ ID NO: 260824 - DNA, 25 bp, Probe sequence
gatgatgtagaggcgccgagtgact

SEQ ID NO: 260825 - DNA, 25 bp, Probe sequence
gatgagggcggaggtgacagagtag

SEQ ID NO: 260826 - DNA, 25 bp, Probe sequence
gatcagtctgatttgatgagggcgg

SEQ ID NO: 260827 - DNA, 25 bp, Probe sequence
gatttgatgagggcggaggtgacag

SEQ ID NO: 260828 - DNA, 25 bp, Probe sequence
gttgagcgatcagtctgatttgatg

SEQ ID NO: 260829 - DNA, 25 bp, Probe sequence
gtatatattatgacgacggctaatg

SEQ ID NO: 260830 - DNA, 25 bp, Probe sequence
gtctgatttgatgagggcggaggtg

SEQ ID NO: 260831 - DNA, 25 bp, Probe sequence
gtatgagctaggtaagtatgtaact

SEQ ID NO: 260832 - DNA, 25 bp, Probe sequence
gtgacttcgcaaagttgagcgatca

SEQ ID NO: 260833 - DNA, 25 bp, Probe sequence
tgtagaggcgccgagtgacttcgca

SEQ ID NO: 260834 - DNA, 25 bp, Probe sequence
tgatgtagaggcgccgagtgacttc

SEQ ID NO: 260835 - DNA, 25 bp, Probe sequence
tagaggcgccgagtgacttcgcaaa

SEQ ID NO: 260836 - DNA, 25 bp, Probe sequence
tatgacgacggctaatgatgatgta

SEQ ID NO: 260837 - DNA, 25 bp, Probe sequence
ttattcttactagcgatgtatgagc

SEQ ID NO: 260838 - DNA, 25 bp, Probe sequence
ttgatgagggcggaggtgacagagt

SEQ ID NO: 260839 - DNA, 25 bp, Probe sequence
atttatggtaaagcttatgaattaa

SEQ ID NO: 260840 - DNA, 25 bp, Probe sequence
atttacttctcacggtgtttataga

SEQ ID NO: 260841 - DNA, 25 bp, Probe sequence
atttgaatgatgttgagtcgcacaa

SEQ ID NO: 260842 - DNA, 25 bp, Probe sequence
aggttcagttgacggtggttatatt

SEQ ID NO: 260843 - DNA, 25 bp, Probe sequence
agttgatttatttacttctcacggt

SEQ ID NO: 260844 - DNA, 25 bp, Probe sequence
agaaggttcagttgacggtggttat

SEQ ID NO: 260845 - DNA, 25 bp, Probe sequence
acagttgatttatttacttctcacg

SEQ ID NO: 260846 - DNA, 25 bp, Probe sequence
acagaaggttcagttgacggtggtt

SEQ ID NO: 260847 - DNA, 25 bp, Probe sequence
aacagaaggttcagttgacggtggt

SEQ ID NO: 260848 - DNA, 25 bp, Probe sequence
aagtgttgagtgattactacgaagg

SEQ ID NO: 260849 - DNA, 25 bp, Probe sequence
cagaaggttcagttgacggtggtta

SEQ ID NO: 260850 - DNA, 25 bp, Probe sequence
cagttgatttatttacttctcacgg

SEQ ID NO: 260851 - DNA, 25 bp, Probe sequence
cttatattagtgattttattaacgg

SEQ ID NO: 260852 - DNA, 25 bp, Probe sequence
cgacctagattaaaagtgttgagtg

SEQ ID NO: 260853 - DNA, 25 bp, Probe sequence
gaaggttcagttgacggtggttata

SEQ ID NO: 260854 - DNA, 25 bp, Probe sequence
gaaacagaaggttcagttgacggtg

SEQ ID NO: 260855 - DNA, 25 bp, Probe sequence
gagaaacagaaggttcagttgacgg

SEQ ID NO: 260856 - DNA, 25 bp, Probe sequence
gatttatttacttctcacggtgttt

SEQ ID NO: 260857 - DNA, 25 bp, Probe sequence
gttgatttatttacttctcacggtg

SEQ ID NO: 260858 - DNA, 25 bp, Probe sequence
gttcagttgacggtggttatattta

SEQ ID NO: 260859 - DNA, 25 bp, Probe sequence
gtgttgagtgattactacgaaggta

SEQ ID NO: 260860 - DNA, 25 bp, Probe sequence
ggtaaaactaagaatctggttgagt

SEQ ID NO: 260861 - DNA, 25 bp, Probe sequence
ggtaaagcttatgaattaatgatta

SEQ ID NO: 260862 - DNA, 25 bp, Probe sequence
ggttcagttgacggtggttatattt

SEQ ID NO: 260863 - DNA, 25 bp, Probe sequence
tgatttatttacttctcacggtgtt

SEQ ID NO: 260864 - DNA, 25 bp, Probe sequence
tgatttgaatgatgttgagtcgcac

SEQ ID NO: 260865 - DNA, 25 bp, Probe sequence
taagaatctggttgagttaacacga

SEQ ID NO: 260866 - DNA, 25 bp, Probe sequence
tacagttgatttatttacttctcac

SEQ ID NO: 260867 - DNA, 25 bp, Probe sequence
tatttacttctcacggtgtttatag

SEQ ID NO: 260868 - DNA, 25 bp, Probe sequence
tttatttacttctcacggtgtttat

SEQ ID NO: 260869 - DNA, 25 bp, Probe sequence
ttatttacttctcacggtgtttata

SEQ ID NO: 260870 - DNA, 25 bp, Probe sequence
ttcagttgacggtggttatatttat

SEQ ID NO: 260871 - DNA, 25 bp, Probe sequence
ttgatttatttacttctcacggtgt

SEQ ID NO: 260872 - DNA, 25 bp, Probe sequence
ttgaatgatgttgagtcgcacaata

SEQ ID NO: 260873 - DNA, 25 bp, Probe sequence
atatagatggattagacgcactgtt

SEQ ID NO: 260874 - DNA, 25 bp, Probe sequence
agaattgaaagcgttgtttgaatag

SEQ ID NO: 260875 - DNA, 25 bp, Probe sequence
accttttatgtggccagtatatgag

SEQ ID NO: 260876 - DNA, 25 bp, Probe sequence
acgccaaagaatatgtagtacgagc

SEQ ID NO: 260877 - DNA, 25 bp, Probe sequence
actgcagaagaattgaaagcgttgt

SEQ ID NO: 260878 - DNA, 25 bp, Probe sequence
acatcgcatgcagcttatagtggtt

SEQ ID NO: 260879 - DNA, 25 bp, Probe sequence
aaaactggcgatttgcaatacacta

SEQ ID NO: 260880 - DNA, 25 bp, Probe sequence
caatacactatcacatcgcatgcag

SEQ ID NO: 260881 - DNA, 25 bp, Probe sequence
cactatcacatcgcatgcagcttat

SEQ ID NO: 260882 - DNA, 25 bp, Probe sequence
gcagaaccttttatgtggccagtat

SEQ ID NO: 260883 - DNA, 25 bp, Probe sequence
gcatgcagcttatagtggtttctta

SEQ ID NO: 260884 - DNA, 25 bp, Probe sequence
gcagcttatagtggtttcttagagt

SEQ ID NO: 260885 - DNA, 25 bp, Probe sequence
gcactgttaaaccaatttcatgata

SEQ ID NO: 260886 - DNA, 25 bp, Probe sequence
gaataagggttattggactggtaat

SEQ ID NO: 260887 - DNA, 25 bp, Probe sequence
gaatatgtagtacgagctaaattga

SEQ ID NO: 260888 - DNA, 25 bp, Probe sequence
gacgcactgttaaaccaatttcatg

SEQ ID NO: 260889 - DNA, 25 bp, Probe sequence
gatggattagacgcactgttaaacc

SEQ ID NO: 260890 - DNA, 25 bp, Probe sequence
gatatgaaaaccaacattgatgatg

SEQ ID NO: 260891 - DNA, 25 bp, Probe sequence
gatattttacaggaaaacgccaaag

SEQ ID NO: 260892 - DNA, 25 bp, Probe sequence
gatttgcaatacactatcacatcgc

SEQ ID NO: 260893 - DNA, 25 bp, Probe sequence
gtttggtactcgatacatggaggca

SEQ ID NO: 260894 - DNA, 25 bp, Probe sequence
gtggccagtatatgaggtaataaga

SEQ ID NO: 260895 - DNA, 25 bp, Probe sequence
ggtaatttatcacgcaatatcagat

SEQ ID NO: 260896 - DNA, 25 bp, Probe sequence
ggtactcgatacatggaggcagaac

SEQ ID NO: 260897 - DNA, 25 bp, Probe sequence
ggtaataagaaaatcaactgcagaa

SEQ ID NO: 260898 - DNA, 25 bp, Probe sequence
ggattagacgcactgttaaaccaat

SEQ ID NO: 260899 - DNA, 25 bp, Probe sequence
ggaggcagaaccttttatgtggcca

SEQ ID NO: 260900 - DNA, 25 bp, Probe sequence
ggcgatttgcaatacactatcacat

SEQ ID NO: 260901 - DNA, 25 bp, Probe sequence
tggactggtaatttatcacgcaata

SEQ ID NO: 260902 - DNA, 25 bp, Probe sequence
tgatgatgatgtagatgatatttta

SEQ ID NO: 260903 - DNA, 25 bp, Probe sequence
tacactatcacatcgcatgcagctt

SEQ ID NO: 260904 - DNA, 25 bp, Probe sequence
tagtggtttcttagagtttggtact

SEQ ID NO: 260905 - DNA, 25 bp, Probe sequence
tatcacatcgcatgcagcttatagt

SEQ ID NO: 260906 - DNA, 25 bp, Probe sequence
ttatgtggccagtatatgaggtaat

SEQ ID NO: 260907 - DNA, 25 bp, Probe sequence
atattcgtagagaaaactcataata

SEQ ID NO: 260908 - DNA, 25 bp, Probe sequence
atatacagtaaactcacgcctccaa

SEQ ID NO: 260909 - DNA, 25 bp, Probe sequence
acctatcccaccacatgatttagca

SEQ ID NO: 260910 - DNA, 25 bp, Probe sequence
actcacgcctccaagacaaaaaaat

SEQ ID NO: 260911 - DNA, 25 bp, Probe sequence
acaggatagaattgcagttaacgtc

SEQ ID NO: 260912 - DNA, 25 bp, Probe sequence
cactgaacaaagaataccgcgacct

SEQ ID NO: 260913 - DNA, 25 bp, Probe sequence
acaaagaataccgcgaccttcactt

SEQ ID NO: 260914 - DNA, 25 bp, Probe sequence
tacacggtgaaacattgtttaccga

SEQ ID NO: 260915 - DNA, 25 bp, Probe sequence
aagacggtgaaattatattcgtaga

SEQ ID NO: 260916 - DNA, 25 bp, Probe sequence
aatggttaaagcacctatcccacca

SEQ ID NO: 260917 - DNA, 25 bp, Probe sequence
aatgtgcttaactatgcaaacgagc

SEQ ID NO: 260918 - DNA, 25 bp, Probe sequence
caaagaataccgcgaccttcacttt

SEQ ID NO: 260919 - DNA, 25 bp, Probe sequence
catcgcttccatatacagtaaactc

SEQ ID NO: 260920 - DNA, 25 bp, Probe sequence
cgacatcgcttccatatacagtaaa

SEQ ID NO: 260921 - DNA, 25 bp, Probe sequence
ccatatacagtaaactcacgcctcc

SEQ ID NO: 260922 - DNA, 25 bp, Probe sequence
gcctccaagacaaaaaaatgtgctt

SEQ ID NO: 260923 - DNA, 25 bp, Probe sequence
gcttaactatgcaaacgagcaatta

SEQ ID NO: 260924 - DNA, 25 bp, Probe sequence
gcattaaaagtaaacggtgattcta

SEQ ID NO: 260925 - DNA, 25 bp, Probe sequence
gaacgtctacacggtgaaacattgt

SEQ ID NO: 260926 - DNA, 25 bp, Probe sequence
gaacaaagaataccgcgaccttcac

SEQ ID NO: 260927 - DNA, 25 bp, Probe sequence
gaaagtgtgaggttagtagggaaag

SEQ ID NO: 260928 - DNA, 25 bp, Probe sequence
gacatcgcttccatatacagtaaac

SEQ ID NO: 260929 - DNA, 25 bp, Probe sequence
gactctagtctcactgaacaaagaa

SEQ ID NO: 260930 - DNA, 25 bp, Probe sequence
gagaacgtctacacggtgaaacatt

SEQ ID NO: 260931 - DNA, 25 bp, Probe sequence
gatgaacagaatactaaaggcgata

SEQ ID NO: 260932 - DNA, 25 bp, Probe sequence
gatagaattgcagttaacgtcaatg

SEQ ID NO: 260933 - DNA, 25 bp, Probe sequence
gattgactctagtctcactgaacaa

SEQ ID NO: 260934 - DNA, 25 bp, Probe sequence
gtctacacggtgaaacattgtttac

SEQ ID NO: 260935 - DNA, 25 bp, Probe sequence
gtctcactgaacaaagaataccgcg

SEQ ID NO: 260936 - DNA, 25 bp, Probe sequence
gtgaaacattgtttaccgaaatggt

SEQ ID NO: 260937 - DNA, 25 bp, Probe sequence
taaactcacgcctccaagacaaaaa

SEQ ID NO: 260938 - DNA, 25 bp, Probe sequence
taaaggcgataatattgtcgatatt

SEQ ID NO: 260939 - DNA, 25 bp, Probe sequence
tagattgactctagtctcactgaac

SEQ ID NO: 260940 - DNA, 25 bp, Probe sequence
ttgactctagtctcactgaacaaag

SEQ ID NO: 260941 - DNA, 25 bp, Probe sequence
atagatacatcaatcctaaagatat

SEQ ID NO: 260942 - DNA, 25 bp, Probe sequence
atgagactgtattcggtaaagtagg

SEQ ID NO: 260943 - DNA, 25 bp, Probe sequence
agtacagaccctaaagatgagactg

SEQ ID NO: 260944 - DNA, 25 bp, Probe sequence
agactgtattcggtaaagtaggaga

SEQ ID NO: 260945 - DNA, 25 bp, Probe sequence
agatgagactgtattcggtaaagta

SEQ ID NO: 260946 - DNA, 25 bp, Probe sequence
agaccctaaagatgagactgtattc

SEQ ID NO: 260947 - DNA, 25 bp, Probe sequence
agaagataaatcaaacgtaagcaat

SEQ ID NO: 260948 - DNA, 25 bp, Probe sequence
agcaatagatacatcaatcctaaag

SEQ ID NO: 260949 - DNA, 25 bp, Probe sequence
accctaaagatgagactgtattcgg

SEQ ID NO: 260950 - DNA, 25 bp, Probe sequence
acatcaatcctaaagatataaatga

SEQ ID NO: 260951 - DNA, 25 bp, Probe sequence
aaagatgagactgtattcggtaaag

SEQ ID NO: 260952 - DNA, 25 bp, Probe sequence
aagcaatagatacatcaatcctaaa

SEQ ID NO: 260953 - DNA, 25 bp, Probe sequence
aagtacagaccctaaagatgagact

SEQ ID NO: 260954 - DNA, 25 bp, Probe sequence
aagatgagactgtattcggtaaagt

SEQ ID NO: 260955 - DNA, 25 bp, Probe sequence
aatgaaattcaaatcactaaaaaat

SEQ ID NO: 260956 - DNA, 25 bp, Probe sequence
aatagatacatcaatcctaaagata

SEQ ID NO: 260957 - DNA, 25 bp, Probe sequence
caatagatacatcaatcctaaagat

SEQ ID NO: 260958 - DNA, 25 bp, Probe sequence
ctaaagatgagactgtattcggtaa

SEQ ID NO: 260959 - DNA, 25 bp, Probe sequence
ctgtattcggtaaagtaggagaaga

SEQ ID NO: 260960 - DNA, 25 bp, Probe sequence
ccctaaagatgagactgtattcggt

SEQ ID NO: 260961 - DNA, 25 bp, Probe sequence
cctaaagatgagactgtattcggta

SEQ ID NO: 260962 - DNA, 25 bp, Probe sequence
gcaatagatacatcaatcctaaaga

SEQ ID NO: 260963 - DNA, 25 bp, Probe sequence
gaagataaatcaaacgtaagcaata

SEQ ID NO: 260964 - DNA, 25 bp, Probe sequence
gagactgtattcggtaaagtaggag

SEQ ID NO: 260965 - DNA, 25 bp, Probe sequence
gactgtattcggtaaagtaggagaa

SEQ ID NO: 260966 - DNA, 25 bp, Probe sequence
gaccctaaagatgagactgtattcg

SEQ ID NO: 260967 - DNA, 25 bp, Probe sequence
gatgagactgtattcggtaaagtag

SEQ ID NO: 260968 - DNA, 25 bp, Probe sequence
gatacatcaatcctaaagatataaa

SEQ ID NO: 260969 - DNA, 25 bp, Probe sequence
gtacagaccctaaagatgagactgt

SEQ ID NO: 260970 - DNA, 25 bp, Probe sequence
gtaagcaatagatacatcaatccta

SEQ ID NO: 260971 - DNA, 25 bp, Probe sequence
tgagactgtattcggtaaagtagga

SEQ ID NO: 260972 - DNA, 25 bp, Probe sequence
taagcaatagatacatcaatcctaa

SEQ ID NO: 260973 - DNA, 25 bp, Probe sequence
taaagatgagactgtattcggtaaa

SEQ ID NO: 260974 - DNA, 25 bp, Probe sequence
tagatacatcaatcctaaagatata

SEQ ID NO: 260975 - DNA, 25 bp, Probe sequence
attgatgcttctaatgaagcgagta

SEQ ID NO: 260976 - DNA, 25 bp, Probe sequence
attcaatttcaagcatgccggcaca

SEQ ID NO: 260977 - DNA, 25 bp, Probe sequence
atatactatcgagcattctatttat

SEQ ID NO: 260978 - DNA, 25 bp, Probe sequence
atcaatatactatcgagcattctat

SEQ ID NO: 260979 - DNA, 25 bp, Probe sequence
atcgtacacttgttgctggtattga

SEQ ID NO: 260980 - DNA, 25 bp, Probe sequence
aggttatcgtacacttgttgctggt

SEQ ID NO: 260981 - DNA, 25 bp, Probe sequence
accttggccagcatatcaatatact

SEQ ID NO: 260982 - DNA, 25 bp, Probe sequence
actggttagatttagctttttatga

SEQ ID NO: 260983 - DNA, 25 bp, Probe sequence
actgaccaatgtaggctataaattt

SEQ ID NO: 260984 - DNA, 25 bp, Probe sequence
acttgttgctggtattgatgcttct

SEQ ID NO: 260985 - DNA, 25 bp, Probe sequence
acagcgtttaattgtagaggcaaaa

SEQ ID NO: 260986 - DNA, 25 bp, Probe sequence
acaacgatgccattattaatacaac

SEQ ID NO: 260987 - DNA, 25 bp, Probe sequence
aaattcaatttcaagcatgccggca

SEQ ID NO: 260988 - DNA, 25 bp, Probe sequence
aaaggttatcgtacacttgttgctg

SEQ ID NO: 260989 - DNA, 25 bp, Probe sequence
gcgatatacaacgatgccattatta

SEQ ID NO: 260990 - DNA, 25 bp, Probe sequence
gctggtattgatgcttctaatgaag

SEQ ID NO: 260991 - DNA, 25 bp, Probe sequence
gctaaaggttatcgtacacttgttg

SEQ ID NO: 260992 - DNA, 25 bp, Probe sequence
gctagtcaattattacagcgtttaa

SEQ ID NO: 260993 - DNA, 25 bp, Probe sequence
gcatatcaatatactatcgagcatt

SEQ ID NO: 260994 - DNA, 25 bp, Probe sequence
gattactggttagatttagcttttt

SEQ ID NO: 260995 - DNA, 25 bp, Probe sequence
gaagcgagtattaaattacatcaaa

SEQ ID NO: 260996 - DNA, 25 bp, Probe sequence
gaaaaggtatcgctagtcaattatt

SEQ ID NO: 260997 - DNA, 25 bp, Probe sequence
gttgctggtattgatgcttctaatg

SEQ ID NO: 260998 - DNA, 25 bp, Probe sequence
gttagatttagctttttatgaatta

SEQ ID NO: 260999 - DNA, 25 bp, Probe sequence
gttatcgtacacttgttgctggtat

SEQ ID NO: 261000 - DNA, 25 bp, Probe sequence
gtacacttgttgctggtattgatgc

SEQ ID NO: 261001 - DNA, 25 bp, Probe sequence
ggtatcgctagtcaattattacagc

SEQ ID NO: 261002 - DNA, 25 bp, Probe sequence
ggccagcatatcaatatactatcga

SEQ ID NO: 261003 - DNA, 25 bp, Probe sequence
tgccattattaatacaacagctgtt

SEQ ID NO: 261004 - DNA, 25 bp, Probe sequence
tactatcgagcattctatttatgtc

SEQ ID NO: 261005 - DNA, 25 bp, Probe sequence
taggctataaatttgattactggtt

SEQ ID NO: 261006 - DNA, 25 bp, Probe sequence
tattaatacaacagctgtttatact

SEQ ID NO: 261007 - DNA, 25 bp, Probe sequence
ttataaaccgcaaaccatagacgaa

SEQ ID NO: 261008 - DNA, 25 bp, Probe sequence
ttatacttataaaccgcaaaccata

SEQ ID NO: 261009 - DNA, 25 bp, Probe sequence
atggaagcgacaatcgaaatcgtta

SEQ ID NO: 261010 - DNA, 25 bp, Probe sequence
agtgattgattggctatgggaaaca

SEQ ID NO: 261011 - DNA, 25 bp, Probe sequence
agttcaaaagaagacccagagttat

SEQ ID NO: 261012 - DNA, 25 bp, Probe sequence
agacccagagttatgtgttttaaga

SEQ ID NO: 261013 - DNA, 25 bp, Probe sequence
agaagacccagagttatgtgtttta

SEQ ID NO: 261014 - DNA, 25 bp, Probe sequence
acccagagttatgtgttttaagagt

SEQ ID NO: 261015 - DNA, 25 bp, Probe sequence
acgacacaactaatcgtagtttcgt

SEQ ID NO: 261016 - DNA, 25 bp, Probe sequence
acacaactaatcgtagtttcgttga

SEQ ID NO: 261017 - DNA, 25 bp, Probe sequence
aaaagaagacccagagttatgtgtt

SEQ ID NO: 261018 - DNA, 25 bp, Probe sequence
aacacaagacaaaagctttttcagt

SEQ ID NO: 261019 - DNA, 25 bp, Probe sequence
aagcgacaatcgaaatcgttacaga

SEQ ID NO: 261020 - DNA, 25 bp, Probe sequence
aagaagtgattgattggctatggga

SEQ ID NO: 261021 - DNA, 25 bp, Probe sequence
aagaagacccagagttatgtgtttt

SEQ ID NO: 261022 - DNA, 25 bp, Probe sequence
aagacccagagttatgtgttttaag

SEQ ID NO: 261023 - DNA, 25 bp, Probe sequence
aagtgattgattggctatgggaaac

SEQ ID NO: 261024 - DNA, 25 bp, Probe sequence
caatcgaaatcgttacagaacaaga

SEQ ID NO: 261025 - DNA, 25 bp, Probe sequence
caatccattaagctaatgaatgata

SEQ ID NO: 261026 - DNA, 25 bp, Probe sequence
cgaaatcgttacagaacaagaagtg

SEQ ID NO: 261027 - DNA, 25 bp, Probe sequence
gcgacaatcgaaatcgttacagaac

SEQ ID NO: 261028 - DNA, 25 bp, Probe sequence
gaagtgattgattggctatgggaaa

SEQ ID NO: 261029 - DNA, 25 bp, Probe sequence
gaagacccagagttatgtgttttaa

SEQ ID NO: 261030 - DNA, 25 bp, Probe sequence
gaagcgacaatcgaaatcgttacag

SEQ ID NO: 261031 - DNA, 25 bp, Probe sequence
gacacaactaatcgtagtttcgttg

SEQ ID NO: 261032 - DNA, 25 bp, Probe sequence
gacaatcgaaatcgttacagaacaa

SEQ ID NO: 261033 - DNA, 25 bp, Probe sequence
gacccagagttatgtgttttaagag

SEQ ID NO: 261034 - DNA, 25 bp, Probe sequence
gagttatgtgttttaagagtagttc

SEQ ID NO: 261035 - DNA, 25 bp, Probe sequence
gattgattggctatgggaaacacaa

SEQ ID NO: 261036 - DNA, 25 bp, Probe sequence
gattggctatgggaaacacaagaca

SEQ ID NO: 261037 - DNA, 25 bp, Probe sequence
ggaagcgacaatcgaaatcgttaca

SEQ ID NO: 261038 - DNA, 25 bp, Probe sequence
ggctataacgacacaactaatcgta

SEQ ID NO: 261039 - DNA, 25 bp, Probe sequence
ggctatgggaaacacaagacaaaag

SEQ ID NO: 261040 - DNA, 25 bp, Probe sequence
tgattgattggctatgggaaacaca

SEQ ID NO: 261041 - DNA, 25 bp, Probe sequence
taacgacacaactaatcgtagtttc

SEQ ID NO: 261042 - DNA, 25 bp, Probe sequence
taggctataacgacacaactaatcg

SEQ ID NO: 261043 - DNA, 25 bp, Probe sequence
attaccttcagattcagatgttaaa

SEQ ID NO: 261044 - DNA, 25 bp, Probe sequence
attagtttaatcgccatcatgttaa

SEQ ID NO: 261045 - DNA, 25 bp, Probe sequence
atcgccatcatgttaattgtatgta

SEQ ID NO: 261046 - DNA, 25 bp, Probe sequence
atgaaagataatactactattgaaa

SEQ ID NO: 261047 - DNA, 25 bp, Probe sequence
atgttaattgtatgtattgtattag

SEQ ID NO: 261048 - DNA, 25 bp, Probe sequence
agtttaatcgccatcatgttaattg

SEQ ID NO: 261049 - DNA, 25 bp, Probe sequence
accttcagattcagatgttaaagtt

SEQ ID NO: 261050 - DNA, 25 bp, Probe sequence
aatcgccatcatgttaattgtatgt

SEQ ID NO: 261051 - DNA, 25 bp, Probe sequence
aattaccttcagattcagatgttaa

SEQ ID NO: 261052 - DNA, 25 bp, Probe sequence
catgttaattgtatgtattgtatta

SEQ ID NO: 261053 - DNA, 25 bp, Probe sequence
cttcagattcagatgttaaagttaa

SEQ ID NO: 261054 - DNA, 25 bp, Probe sequence
ccttcagattcagatgttaaagtta

SEQ ID NO: 261055 - DNA, 25 bp, Probe sequence
gaaagataatactactattgaaaaa

SEQ ID NO: 261056 - DNA, 25 bp, Probe sequence
gttaattgtatgtattgtattagta

SEQ ID NO: 261057 - DNA, 25 bp, Probe sequence
gtttataaattagcagattcagata

SEQ ID NO: 261058 - DNA, 25 bp, Probe sequence
gtttaatcgccatcatgttaattgt

SEQ ID NO: 261059 - DNA, 25 bp, Probe sequence
tgtttataaattagcagattcagat

SEQ ID NO: 261060 - DNA, 25 bp, Probe sequence
tgttaattgtatgtattgtattagt

SEQ ID NO: 261061 - DNA, 25 bp, Probe sequence
tgaaagataatactactattgaaaa

SEQ ID NO: 261062 - DNA, 25 bp, Probe sequence
tcgccatcatgttaattgtatgtat

SEQ ID NO: 261063 - DNA, 25 bp, Probe sequence
tcatgttaattgtatgtattgtatt

SEQ ID NO: 261064 - DNA, 25 bp, Probe sequence
taattgtatgtattgtattagtaat

SEQ ID NO: 261065 - DNA, 25 bp, Probe sequence
taatactactattgaaaaaatgatt

SEQ ID NO: 261066 - DNA, 25 bp, Probe sequence
taatcgccatcatgttaattgtatg

SEQ ID NO: 261067 - DNA, 25 bp, Probe sequence
taccttcagattcagatgttaaagt

SEQ ID NO: 261068 - DNA, 25 bp, Probe sequence
tagtttaatcgccatcatgttaatt

SEQ ID NO: 261069 - DNA, 25 bp, Probe sequence
tatgaaagataatactactattgaa

SEQ ID NO: 261070 - DNA, 25 bp, Probe sequence
tttaatcgccatcatgttaattgta

SEQ ID NO: 261071 - DNA, 25 bp, Probe sequence
tttataaattagcagattcagataa

SEQ ID NO: 261072 - DNA, 25 bp, Probe sequence
ttagtttaatcgccatcatgttaat

SEQ ID NO: 261073 - DNA, 25 bp, Probe sequence
ttaccttcagattcagatgttaaag

SEQ ID NO: 261074 - DNA, 25 bp, Probe sequence
ttaattgtatgtattgtattagtaa

SEQ ID NO: 261075 - DNA, 25 bp, Probe sequence
ttaatcgccatcatgttaattgtat

SEQ ID NO: 261076 - DNA, 25 bp, Probe sequence
atcaaacgcagcttgccaaactagc

SEQ ID NO: 261077 - DNA, 25 bp, Probe sequence
agacaaaccatttcgctaattgagc

SEQ ID NO: 261078 - DNA, 25 bp, Probe sequence
acggtttttattattgaggaggatg

SEQ ID NO: 261079 - DNA, 25 bp, Probe sequence
actagctggtgtttcaagacaaacc

SEQ ID NO: 261080 - DNA, 25 bp, Probe sequence
aaatcaaacgcagcttgccaaacta

SEQ ID NO: 261081 - DNA, 25 bp, Probe sequence
aaagattgctcgcattttcaatgaa

SEQ ID NO: 261082 - DNA, 25 bp, Probe sequence
aacggcaataaagattgctcgcatt

SEQ ID NO: 261083 - DNA, 25 bp, Probe sequence
aacgcagcttgccaaactagctggt

SEQ ID NO: 261084 - DNA, 25 bp, Probe sequence
aataaagattgctcgcattttcaat

SEQ ID NO: 261085 - DNA, 25 bp, Probe sequence
aattttatgccatcagtattaacgg

SEQ ID NO: 261086 - DNA, 25 bp, Probe sequence
caagacaaaccatttcgctaattga

SEQ ID NO: 261087 - DNA, 25 bp, Probe sequence
cgcagcttgccaaactagctggtgt

SEQ ID NO: 261088 - DNA, 25 bp, Probe sequence
gccaaactagctggtgtttcaagac

SEQ ID NO: 261089 - DNA, 25 bp, Probe sequence
gcgaaacaattttatgccatcagta

SEQ ID NO: 261090 - DNA, 25 bp, Probe sequence
gctcgcattttcaatgaaacggtgg

SEQ ID NO: 261091 - DNA, 25 bp, Probe sequence
gcttgccaaactagctggtgtttca

SEQ ID NO: 261092 - DNA, 25 bp, Probe sequence
gcacgagatggcttaaatcaaacgc

SEQ ID NO: 261093 - DNA, 25 bp, Probe sequence
gaaacaattttatgccatcagtatt

SEQ ID NO: 261094 - DNA, 25 bp, Probe sequence
gaaagagttacgagcacgagatggc

SEQ ID NO: 261095 - DNA, 25 bp, Probe sequence
gacaaaccatttcgctaattgagcg

SEQ ID NO: 261096 - DNA, 25 bp, Probe sequence
gagcgaaacaattttatgccatcag

SEQ ID NO: 261097 - DNA, 25 bp, Probe sequence
gagatggcttaaatcaaacgcagct

SEQ ID NO: 261098 - DNA, 25 bp, Probe sequence
gagttacgagcacgagatggcttaa

SEQ ID NO: 261099 - DNA, 25 bp, Probe sequence
gattgaaagagttacgagcacgaga

SEQ ID NO: 261100 - DNA, 25 bp, Probe sequence
gattgctcgcattttcaatgaaacg

SEQ ID NO: 261101 - DNA, 25 bp, Probe sequence
gtgcgtaatcgattgaaagagttac

SEQ ID NO: 261102 - DNA, 25 bp, Probe sequence
ggtgtttcaagacaaaccatttcgc

SEQ ID NO: 261103 - DNA, 25 bp, Probe sequence
ggcttaaatcaaacgcagcttgcca

SEQ ID NO: 261104 - DNA, 25 bp, Probe sequence
tcaaacgcagcttgccaaactagct

SEQ ID NO: 261105 - DNA, 25 bp, Probe sequence
tatgccatcagtattaacggcaata

SEQ ID NO: 261106 - DNA, 25 bp, Probe sequence
tattattgaggaggatgaagcatga

SEQ ID NO: 261107 - DNA, 25 bp, Probe sequence
tttcaagacaaaccatttcgctaat

SEQ ID NO: 261108 - DNA, 25 bp, Probe sequence
ttacgagcacgagatggcttaaatc

SEQ ID NO: 261109 - DNA, 25 bp, Probe sequence
ttgccaaactagctggtgtttcaag

SEQ ID NO: 261110 - DNA, 25 bp, Probe sequence
atcaaacagtaatatgctgcttgat

SEQ ID NO: 261111 - DNA, 25 bp, Probe sequence
atgggtgattttggcatagatagag

SEQ ID NO: 261112 - DNA, 25 bp, Probe sequence
agtaatatgctgcttgatgcaaaat

SEQ ID NO: 261113 - DNA, 25 bp, Probe sequence
actaatgggtgattttggcatagat

SEQ ID NO: 261114 - DNA, 25 bp, Probe sequence
acagtaatatgctgcttgatgcaaa

SEQ ID NO: 261115 - DNA, 25 bp, Probe sequence
aaacagtaatatgctgcttgatgca

SEQ ID NO: 261116 - DNA, 25 bp, Probe sequence
aacagtaatatgctgcttgatgcaa

SEQ ID NO: 261117 - DNA, 25 bp, Probe sequence
aactaatgggtgattttggcataga

SEQ ID NO: 261118 - DNA, 25 bp, Probe sequence
aatgggtgattttggcatagataga

SEQ ID NO: 261119 - DNA, 25 bp, Probe sequence
caactaatgggtgattttggcatag

SEQ ID NO: 261120 - DNA, 25 bp, Probe sequence
caaacagtaatatgctgcttgatgc

SEQ ID NO: 261121 - DNA, 25 bp, Probe sequence
cagtaatatgctgcttgatgcaaaa

SEQ ID NO: 261122 - DNA, 25 bp, Probe sequence
catcaaacagtaatatgctgcttga

SEQ ID NO: 261123 - DNA, 25 bp, Probe sequence
ctaatgggtgattttggcatagata

SEQ ID NO: 261124 - DNA, 25 bp, Probe sequence
cgtcaactaatgggtgattttggca

SEQ ID NO: 261125 - DNA, 25 bp, Probe sequence
gcgtcaactaatgggtgattttggc

SEQ ID NO: 261126 - DNA, 25 bp, Probe sequence
gcatcaaacagtaatatgctgcttg

SEQ ID NO: 261127 - DNA, 25 bp, Probe sequence
gcatagatagagaatttaaggcaat

SEQ ID NO: 261128 - DNA, 25 bp, Probe sequence
gattttggcatagatagagaattta

SEQ ID NO: 261129 - DNA, 25 bp, Probe sequence
gtaatatgctgcttgatgcaaaatg

SEQ ID NO: 261130 - DNA, 25 bp, Probe sequence
gtcaactaatgggtgattttggcat

SEQ ID NO: 261131 - DNA, 25 bp, Probe sequence
gtgattttggcatagatagagaatt

SEQ ID NO: 261132 - DNA, 25 bp, Probe sequence
gggtgattttggcatagatagagaa

SEQ ID NO: 261133 - DNA, 25 bp, Probe sequence
ggtgattttggcatagatagagaat

SEQ ID NO: 261134 - DNA, 25 bp, Probe sequence
ggcaattaaaaaagcatcaaacagt

SEQ ID NO: 261135 - DNA, 25 bp, Probe sequence
ggcatagatagagaatttaaggcaa

SEQ ID NO: 261136 - DNA, 25 bp, Probe sequence
tgggtgattttggcatagatagaga

SEQ ID NO: 261137 - DNA, 25 bp, Probe sequence
tgattttggcatagatagagaattt

SEQ ID NO: 261138 - DNA, 25 bp, Probe sequence
tcaaacagtaatatgctgcttgatg

SEQ ID NO: 261139 - DNA, 25 bp, Probe sequence
tcaactaatgggtgattttggcata

SEQ ID NO: 261140 - DNA, 25 bp, Probe sequence
taatatgctgcttgatgcaaaatgg

SEQ ID NO: 261141 - DNA, 25 bp, Probe sequence
taatgggtgattttggcatagatag

SEQ ID NO: 261142 - DNA, 25 bp, Probe sequence
taaggcaattaaaaaagcatcaaac

SEQ ID NO: 261143 - DNA, 25 bp, Probe sequence
ttttggcatagatagagaatttaag

SEQ ID NO: 261144 - DNA, 25 bp, Probe sequence
atatatcttgcgccagatcaagaag

SEQ ID NO: 261145 - DNA, 25 bp, Probe sequence
atatcttgcgccagatcaagaagat

SEQ ID NO: 261146 - DNA, 25 bp, Probe sequence
atcttgcgccagatcaagaagatca

SEQ ID NO: 261147 - DNA, 25 bp, Probe sequence
acgcggccaatatatcttgcgccag

SEQ ID NO: 261148 - DNA, 25 bp, Probe sequence
aatatatcttgcgccagatcaagaa

SEQ ID NO: 261149 - DNA, 25 bp, Probe sequence
caatatatcttgcgccagatcaaga

SEQ ID NO: 261150 - DNA, 25 bp, Probe sequence
cacgcggccaatatatcttgcgcca

SEQ ID NO: 261151 - DNA, 25 bp, Probe sequence
cggccaatatatcttgcgccagatc

SEQ ID NO: 261152 - DNA, 25 bp, Probe sequence
ctgcacgcggccaatatatcttgcg

SEQ ID NO: 261153 - DNA, 25 bp, Probe sequence
cgtgcaacgaaattctgcacgcggc

SEQ ID NO: 261154 - DNA, 25 bp, Probe sequence
cgcggccaatatatcttgcgccaga

SEQ ID NO: 261155 - DNA, 25 bp, Probe sequence
ccaatatatcttgcgccagatcaag

SEQ ID NO: 261156 - DNA, 25 bp, Probe sequence
gccaatatatcttgcgccagatcaa

SEQ ID NO: 261157 - DNA, 25 bp, Probe sequence
gcacgcggccaatatatcttgcgcc

SEQ ID NO: 261158 - DNA, 25 bp, Probe sequence
gtttcagactaaacgtgcaacgaaa

SEQ ID NO: 261159 - DNA, 25 bp, Probe sequence
gtgcaacgaaattctgcacgcggcc

SEQ ID NO: 261160 - DNA, 25 bp, Probe sequence
ggccaatatatcttgcgccagatca

SEQ ID NO: 261161 - DNA, 25 bp, Probe sequence
tgcaacgaaattctgcacgcggcca

SEQ ID NO: 261162 - DNA, 25 bp, Probe sequence
tgcacgcggccaatatatcttgcgc

SEQ ID NO: 261163 - DNA, 25 bp, Probe sequence
tctgcacgcggccaatatatcttgc

SEQ ID NO: 261164 - DNA, 25 bp, Probe sequence
tcttgcgccagatcaagaagatcat

SEQ ID NO: 261165 - DNA, 25 bp, Probe sequence
tcagactaaacgtgcaacgaaattc

SEQ ID NO: 261166 - DNA, 25 bp, Probe sequence
tatatcttgcgccagatcaagaaga

SEQ ID NO: 261167 - DNA, 25 bp, Probe sequence
tatcttgcgccagatcaagaagatc

SEQ ID NO: 261168 - DNA, 25 bp, Probe sequence
tttcagactaaacgtgcaacgaaat

SEQ ID NO: 261169 - DNA, 25 bp, Probe sequence
ttcagactaaacgtgcaacgaaatt

SEQ ID NO: 261170 - DNA, 25 bp, Probe sequence
ttctgcacgcggccaatatatcttg

SEQ ID NO: 261171 - DNA, 25 bp, Probe sequence
atacctaaaacaccaattaatcctg

SEQ ID NO: 261172 - DNA, 25 bp, Probe sequence
attgtcatttccttgtaatcatacc

SEQ ID NO: 261173 - DNA, 25 bp, Probe sequence
attaatcctgtgcgtgtcgctgact

SEQ ID NO: 261174 - DNA, 25 bp, Probe sequence
atcatacctaaaacaccaattaatc

SEQ ID NO: 261175 - DNA, 25 bp, Probe sequence
acctaaaacaccaattaatcctgtg

SEQ ID NO: 261176 - DNA, 25 bp, Probe sequence
acaccaattaatcctgtgcgtgtcg

SEQ ID NO: 261177 - DNA, 25 bp, Probe sequence
aaacaccaattaatcctgtgcgtgt

SEQ ID NO: 261178 - DNA, 25 bp, Probe sequence
aaaacaccaattaatcctgtgcgtg

SEQ ID NO: 261179 - DNA, 25 bp, Probe sequence
aacaccaattaatcctgtgcgtgtc

SEQ ID NO: 261180 - DNA, 25 bp, Probe sequence
aatcatacctaaaacaccaattaat

SEQ ID NO: 261181 - DNA, 25 bp, Probe sequence
aattaatcctgtgcgtgtcgctgac

SEQ ID NO: 261182 - DNA, 25 bp, Probe sequence
caattaatcctgtgcgtgtcgctga

SEQ ID NO: 261183 - DNA, 25 bp, Probe sequence
caccaattaatcctgtgcgtgtcgc

SEQ ID NO: 261184 - DNA, 25 bp, Probe sequence
catacctaaaacaccaattaatcct

SEQ ID NO: 261185 - DNA, 25 bp, Probe sequence
cttgtaatcatacctaaaacaccaa

SEQ ID NO: 261186 - DNA, 25 bp, Probe sequence
catttccttgtaatcatacctaaaa

SEQ ID NO: 261187 - DNA, 25 bp, Probe sequence
ctaaaacaccaattaatcctgtgcg

SEQ ID NO: 261188 - DNA, 25 bp, Probe sequence
cctaaaacaccaattaatcctgtgc

SEQ ID NO: 261189 - DNA, 25 bp, Probe sequence
ccttgtaatcatacctaaaacacca

SEQ ID NO: 261190 - DNA, 25 bp, Probe sequence
gtaatcatacctaaaacaccaatta

SEQ ID NO: 261191 - DNA, 25 bp, Probe sequence
gtcatttccttgtaatcatacctaa

SEQ ID NO: 261192 - DNA, 25 bp, Probe sequence
tgtcatttccttgtaatcataccta

SEQ ID NO: 261193 - DNA, 25 bp, Probe sequence
tgtaatcatacctaaaacaccaatt

SEQ ID NO: 261194 - DNA, 25 bp, Probe sequence
tccttgtaatcatacctaaaacacc

SEQ ID NO: 261195 - DNA, 25 bp, Probe sequence
tcatacctaaaacaccaattaatcc

SEQ ID NO: 261196 - DNA, 25 bp, Probe sequence
tcatttccttgtaatcatacctaaa

SEQ ID NO: 261197 - DNA, 25 bp, Probe sequence
taatcctgtgcgtgtcgctgacttt

SEQ ID NO: 261198 - DNA, 25 bp, Probe sequence
taaaacaccaattaatcctgtgcgt

SEQ ID NO: 261199 - DNA, 25 bp, Probe sequence
tacctaaaacaccaattaatcctgt

SEQ ID NO: 261200 - DNA, 25 bp, Probe sequence
tttccttgtaatcatacctaaaaca

SEQ ID NO: 261201 - DNA, 25 bp, Probe sequence
ttaatcctgtgcgtgtcgctgactt

SEQ ID NO: 261202 - DNA, 25 bp, Probe sequence
ttccttgtaatcatacctaaaacac

SEQ ID NO: 261203 - DNA, 25 bp, Probe sequence
ttgtcatttccttgtaatcatacct

SEQ ID NO: 261204 - DNA, 25 bp, Probe sequence
ttgtaatcatacctaaaacaccaat

SEQ ID NO: 261205 - DNA, 25 bp, Probe sequence
atatcatgagcgtgttttagcatta

SEQ ID NO: 261206 - DNA, 25 bp, Probe sequence
atcatgagcgtgttttagcattaag

SEQ ID NO: 261207 - DNA, 25 bp, Probe sequence
atgagcgtgttttagcattaagagc

SEQ ID NO: 261208 - DNA, 25 bp, Probe sequence
agtgtccatgacgcccaagtaaaat

SEQ ID NO: 261209 - DNA, 25 bp, Probe sequence
agaaccgcatttgattttcgattcg

SEQ ID NO: 261210 - DNA, 25 bp, Probe sequence
accgcatttgattttcgattcgaag

SEQ ID NO: 261211 - DNA, 25 bp, Probe sequence
aaatatggacgatgtaagaatgccc

SEQ ID NO: 261212 - DNA, 25 bp, Probe sequence
aaagaaccgcatttgattttcgatt

SEQ ID NO: 261213 - DNA, 25 bp, Probe sequence
aaaagctgaaaaagcatttcgacac

SEQ ID NO: 261214 - DNA, 25 bp, Probe sequence
aaccgcatttgattttcgattcgaa

SEQ ID NO: 261215 - DNA, 25 bp, Probe sequence
aagaaccgcatttgattttcgattc

SEQ ID NO: 261216 - DNA, 25 bp, Probe sequence
aagtgtccatgacgcccaagtaaaa

SEQ ID NO: 261217 - DNA, 25 bp, Probe sequence
aatgttgtatattcttataacggca

SEQ ID NO: 261218 - DNA, 25 bp, Probe sequence
caagtgtccatgacgcccaagtaaa

SEQ ID NO: 261219 - DNA, 25 bp, Probe sequence
catgacgcccaagtaaaattatata

SEQ ID NO: 261220 - DNA, 25 bp, Probe sequence
cttctcaagtgtccatgacgcccaa

SEQ ID NO: 261221 - DNA, 25 bp, Probe sequence
cgcatttgattttcgattcgaagat

SEQ ID NO: 261222 - DNA, 25 bp, Probe sequence
ccgcatttgattttcgattcgaaga

SEQ ID NO: 261223 - DNA, 25 bp, Probe sequence
gaaccgcatttgattttcgattcga

SEQ ID NO: 261224 - DNA, 25 bp, Probe sequence
gttgtatattcttataacggcatta

SEQ ID NO: 261225 - DNA, 25 bp, Probe sequence
gtatattcttataacggcattaaac

SEQ ID NO: 261226 - DNA, 25 bp, Probe sequence
gtccatgacgcccaagtaaaattat

SEQ ID NO: 261227 - DNA, 25 bp, Probe sequence
gtgtccatgacgcccaagtaaaatt

SEQ ID NO: 261228 - DNA, 25 bp, Probe sequence
tgtccatgacgcccaagtaaaatta

SEQ ID NO: 261229 - DNA, 25 bp, Probe sequence
tccatgacgcccaagtaaaattata

SEQ ID NO: 261230 - DNA, 25 bp, Probe sequence
tcgacacgaagttaaaaatatggac

SEQ ID NO: 261231 - DNA, 25 bp, Probe sequence
tcgattcgaagatttatttagcaaa

SEQ ID NO: 261232 - DNA, 25 bp, Probe sequence
tcatgagcgtgttttagcattaaga

SEQ ID NO: 261233 - DNA, 25 bp, Probe sequence
tcaagtgtccatgacgcccaagtaa

SEQ ID NO: 261234 - DNA, 25 bp, Probe sequence
tatcatgagcgtgttttagcattaa

SEQ ID NO: 261235 - DNA, 25 bp, Probe sequence
tattcttataacggcattaaacgta

SEQ ID NO: 261236 - DNA, 25 bp, Probe sequence
tttcgattcgaagatttatttagca

SEQ ID NO: 261237 - DNA, 25 bp, Probe sequence
ttcttataacggcattaaacgtaat

SEQ ID NO: 261238 - DNA, 25 bp, Probe sequence
ttctcaagtgtccatgacgcccaag

SEQ ID NO: 261239 - DNA, 25 bp, Probe sequence
ataatgtgcaagttggggtgggacg

SEQ ID NO: 261240 - DNA, 25 bp, Probe sequence
atcacaaacgacgttatataaggca

SEQ ID NO: 261241 - DNA, 25 bp, Probe sequence
atgtgcaagttggggtgggacgacg

SEQ ID NO: 261242 - DNA, 25 bp, Probe sequence
actcccatcacaaacgacgttatat

SEQ ID NO: 261243 - DNA, 25 bp, Probe sequence
acaataatgtgcaagttggggtggg

SEQ ID NO: 261244 - DNA, 25 bp, Probe sequence
aaagtcagcttacaataatgtgcaa

SEQ ID NO: 261245 - DNA, 25 bp, Probe sequence
aatgtgcaagttggggtgggacgac

SEQ ID NO: 261246 - DNA, 25 bp, Probe sequence
aagtcagcttacaataatgtgcaag

SEQ ID NO: 261247 - DNA, 25 bp, Probe sequence
aataatgtgcaagttggggtgggac

SEQ ID NO: 261248 - DNA, 25 bp, Probe sequence
cactcccatcacaaacgacgttata

SEQ ID NO: 261249 - DNA, 25 bp, Probe sequence
cagcttacaataatgtgcaagttgg

SEQ ID NO: 261250 - DNA, 25 bp, Probe sequence
ctcccatcacaaacgacgttatata

SEQ ID NO: 261251 - DNA, 25 bp, Probe sequence
cgaaaatatcatttctgtcccactc

SEQ ID NO: 261252 - DNA, 25 bp, Probe sequence
cccatcacaaacgacgttatataag

SEQ ID NO: 261253 - DNA, 25 bp, Probe sequence
ccccaacacagaagctgacgaaaag

SEQ ID NO: 261254 - DNA, 25 bp, Probe sequence
ccatcacaaacgacgttatataagg

SEQ ID NO: 261255 - DNA, 25 bp, Probe sequence
ccaacacagaagctgacgaaaagtc

SEQ ID NO: 261256 - DNA, 25 bp, Probe sequence
gccccaacacagaagctgacgaaaa

SEQ ID NO: 261257 - DNA, 25 bp, Probe sequence
gcttacaataatgtgcaagttgggg

SEQ ID NO: 261258 - DNA, 25 bp, Probe sequence
gcaagttggggtgggacgacgaaat

SEQ ID NO: 261259 - DNA, 25 bp, Probe sequence
gaaaatatcatttctgtcccactcc

SEQ ID NO: 261260 - DNA, 25 bp, Probe sequence
gaaaagtcagcttacaataatgtgc

SEQ ID NO: 261261 - DNA, 25 bp, Probe sequence
gacgaaaagtcagcttacaataatg

SEQ ID NO: 261262 - DNA, 25 bp, Probe sequence
gtcagcttacaataatgtgcaagtt

SEQ ID NO: 261263 - DNA, 25 bp, Probe sequence
gtgcaagttggggtgggacgacgaa

SEQ ID NO: 261264 - DNA, 25 bp, Probe sequence
ggccccaacacagaagctgacgaaa

SEQ ID NO: 261265 - DNA, 25 bp, Probe sequence
tgcaagttggggtgggacgacgaaa

SEQ ID NO: 261266 - DNA, 25 bp, Probe sequence
tgtgcaagttggggtgggacgacga

SEQ ID NO: 261267 - DNA, 25 bp, Probe sequence
tcccatcacaaacgacgttatataa

SEQ ID NO: 261268 - DNA, 25 bp, Probe sequence
tcgaaaatatcatttctgtcccact

SEQ ID NO: 261269 - DNA, 25 bp, Probe sequence
taatgtgcaagttggggtgggacga

SEQ ID NO: 261270 - DNA, 25 bp, Probe sequence
tttcgaaaatatcatttctgtccca

SEQ ID NO: 261271 - DNA, 25 bp, Probe sequence
ttttcgaaaatatcatttctgtccc

SEQ ID NO: 261272 - DNA, 25 bp, Probe sequence
ttcgaaaatatcatttctgtcccac

SEQ ID NO: 261273 - DNA, 25 bp, Probe sequence
atgccattatcaatactacagctgt

SEQ ID NO: 261274 - DNA, 25 bp, Probe sequence
agtttgcttttaagcatgccggcac

SEQ ID NO: 261275 - DNA, 25 bp, Probe sequence
agttgcaggcattgatgcttccaac

SEQ ID NO: 261276 - DNA, 25 bp, Probe sequence
agcgagtattcagttgcatcaaaag

SEQ ID NO: 261277 - DNA, 25 bp, Probe sequence
acctatatacaatcgaacattctat

SEQ ID NO: 261278 - DNA, 25 bp, Probe sequence
aaagcgagtattcagttgcatcaaa

SEQ ID NO: 261279 - DNA, 25 bp, Probe sequence
aacaaagcgagtattcagttgcatc

SEQ ID NO: 261280 - DNA, 25 bp, Probe sequence
cattatcaatactacagctgtttat

SEQ ID NO: 261281 - DNA, 25 bp, Probe sequence
cttggccagcatacctatatacaat

SEQ ID NO: 261282 - DNA, 25 bp, Probe sequence
cttccaacaaagcgagtattcagtt

SEQ ID NO: 261283 - DNA, 25 bp, Probe sequence
ctagttgcaggcattgatgcttcca

SEQ ID NO: 261284 - DNA, 25 bp, Probe sequence
ccttggccagcatacctatatacaa

SEQ ID NO: 261285 - DNA, 25 bp, Probe sequence
ccagcatacctatatacaatcgaac

SEQ ID NO: 261286 - DNA, 25 bp, Probe sequence
gccattatcaatactacagctgttt

SEQ ID NO: 261287 - DNA, 25 bp, Probe sequence
gcgatatacaatgatgccattatca

SEQ ID NO: 261288 - DNA, 25 bp, Probe sequence
gctgtttatacttatgaaccacaaa

SEQ ID NO: 261289 - DNA, 25 bp, Probe sequence
gcattttacgaattagatttacaag

SEQ ID NO: 261290 - DNA, 25 bp, Probe sequence
gcatacctatatacaatcgaacatt

SEQ ID NO: 261291 - DNA, 25 bp, Probe sequence
gagtattcagttgcatcaaaagttt

SEQ ID NO: 261292 - DNA, 25 bp, Probe sequence
gatgcttccaacaaagcgagtattc

SEQ ID NO: 261293 - DNA, 25 bp, Probe sequence
gatgccattatcaatactacagctg

SEQ ID NO: 261294 - DNA, 25 bp, Probe sequence
gatttagcattttacgaattagatt

SEQ ID NO: 261295 - DNA, 25 bp, Probe sequence
gttgcaggcattgatgcttccaaca

SEQ ID NO: 261296 - DNA, 25 bp, Probe sequence
gtttgcttttaagcatgccggcaca

SEQ ID NO: 261297 - DNA, 25 bp, Probe sequence
ggttagatttagcattttacgaatt

SEQ ID NO: 261298 - DNA, 25 bp, Probe sequence
tggccagcatacctatatacaatcg

SEQ ID NO: 261299 - DNA, 25 bp, Probe sequence
ggccagcatacctatatacaatcga

SEQ ID NO: 261300 - DNA, 25 bp, Probe sequence
tcagttgcatcaaaagtttgctttt

SEQ ID NO: 261301 - DNA, 25 bp, Probe sequence
tacaatcgaacattctatttatgtc

SEQ ID NO: 261302 - DNA, 25 bp, Probe sequence
tacttatgaaccacaaaccatagac

SEQ ID NO: 261303 - DNA, 25 bp, Probe sequence
tatcaatactacagctgtttatact

SEQ ID NO: 261304 - DNA, 25 bp, Probe sequence
tatacaatcgaacattctatttatg

SEQ ID NO: 261305 - DNA, 25 bp, Probe sequence
tttatacttatgaaccacaaaccat

SEQ ID NO: 261306 - DNA, 25 bp, Probe sequence
ttatgaaccacaaaccatagacgaa

SEQ ID NO: 261307 - DNA, 25 bp, Probe sequence
attaatcagagtagtctgggtgtag

SEQ ID NO: 261308 - DNA, 25 bp, Probe sequence
atattaatcagagtagtctgggtgt

SEQ ID NO: 261309 - DNA, 25 bp, Probe sequence
atcagagtagtctgggtgtagtgac

SEQ ID NO: 261310 - DNA, 25 bp, Probe sequence
agtgacatacattacaaataaatta

SEQ ID NO: 261311 - DNA, 25 bp, Probe sequence
agtctgggtgtagtgacatacatta

SEQ ID NO: 261312 - DNA, 25 bp, Probe sequence
agtagtctgggtgtagtgacataca

SEQ ID NO: 261313 - DNA, 25 bp, Probe sequence
agagtagtctgggtgtagtgacata

SEQ ID NO: 261314 - DNA, 25 bp, Probe sequence
aaatattaatcagagtagtctgggt

SEQ ID NO: 261315 - DNA, 25 bp, Probe sequence
aatcagagtagtctgggtgtagtga

SEQ ID NO: 261316 - DNA, 25 bp, Probe sequence
aatattaatcagagtagtctgggtg

SEQ ID NO: 261317 - DNA, 25 bp, Probe sequence
cagagtagtctgggtgtagtgacat

SEQ ID NO: 261318 - DNA, 25 bp, Probe sequence
ctgggtgtagtgacatacattacaa

SEQ ID NO: 261319 - DNA, 25 bp, Probe sequence
gagtagtctgggtgtagtgacatac

SEQ ID NO: 261320 - DNA, 25 bp, Probe sequence
gtagtctgggtgtagtgacatacat

SEQ ID NO: 261321 - DNA, 25 bp, Probe sequence
gtagtgacatacattacaaataaat

SEQ ID NO: 261322 - DNA, 25 bp, Probe sequence
gtctgggtgtagtgacatacattac

SEQ ID NO: 261323 - DNA, 25 bp, Probe sequence
gtgacatacattacaaataaattaa

SEQ ID NO: 261324 - DNA, 25 bp, Probe sequence
gtgtagtgacatacattacaaataa

SEQ ID NO: 261325 - DNA, 25 bp, Probe sequence
gggtgtagtgacatacattacaaat

SEQ ID NO: 261326 - DNA, 25 bp, Probe sequence
ggtgtagtgacatacattacaaata

SEQ ID NO: 261327 - DNA, 25 bp, Probe sequence
tgggtgtagtgacatacattacaaa

SEQ ID NO: 261328 - DNA, 25 bp, Probe sequence
tgtagtgacatacattacaaataaa

SEQ ID NO: 261329 - DNA, 25 bp, Probe sequence
tgacatacattacaaataaattaaa

SEQ ID NO: 261330 - DNA, 25 bp, Probe sequence
tctgggtgtagtgacatacattaca

SEQ ID NO: 261331 - DNA, 25 bp, Probe sequence
tcagagtagtctgggtgtagtgaca

SEQ ID NO: 261332 - DNA, 25 bp, Probe sequence
taatcagagtagtctgggtgtagtg

SEQ ID NO: 261333 - DNA, 25 bp, Probe sequence
tagtctgggtgtagtgacatacatt

SEQ ID NO: 261334 - DNA, 25 bp, Probe sequence
tagtgacatacattacaaataaatt

SEQ ID NO: 261335 - DNA, 25 bp, Probe sequence
tattaatcagagtagtctgggtgta

SEQ ID NO: 261336 - DNA, 25 bp, Probe sequence
ttaatcagagtagtctgggtgtagt

SEQ ID NO: 261337 - DNA, 25 bp, Probe sequence
attggattcccaatttctacagaca

SEQ ID NO: 261338 - DNA, 25 bp, Probe sequence
attcccaatttctacagacaatgca

SEQ ID NO: 261339 - DNA, 25 bp, Probe sequence
atgtgcaagttggggtgggacgacg

SEQ ID NO: 261340 - DNA, 25 bp, Probe sequence
agttggcggggccccaacatagaag

SEQ ID NO: 261341 - DNA, 25 bp, Probe sequence
agctggcggaaagtcagtttacaat

SEQ ID NO: 261342 - DNA, 25 bp, Probe sequence
caagttggcggggccccaacataga

SEQ ID NO: 261343 - DNA, 25 bp, Probe sequence
caacatagaagctggcggaaagtca

SEQ ID NO: 261344 - DNA, 25 bp, Probe sequence
cagacaatgcaagttggcggggccc

SEQ ID NO: 261345 - DNA, 25 bp, Probe sequence
cggggccccaacatagaagctggcg

SEQ ID NO: 261346 - DNA, 25 bp, Probe sequence
cccaatttctacagacaatgcaagt

SEQ ID NO: 261347 - DNA, 25 bp, Probe sequence
gccccaacatagaagctggcggaaa

SEQ ID NO: 261348 - DNA, 25 bp, Probe sequence
gcgaaaatatcatttctgtcccact

SEQ ID NO: 261349 - DNA, 25 bp, Probe sequence
gatgggccccaacaaagagaaattg

SEQ ID NO: 261350 - DNA, 25 bp, Probe sequence
gcaagttggggtgggacgacgaaat

SEQ ID NO: 261351 - DNA, 25 bp, Probe sequence
gaagctggcggaaagtcagtttaca

SEQ ID NO: 261352 - DNA, 25 bp, Probe sequence
gaaaatatcatttctgtcccactcc

SEQ ID NO: 261353 - DNA, 25 bp, Probe sequence
gattcccaatttctacagacaatgc

SEQ ID NO: 261354 - DNA, 25 bp, Probe sequence
gttggcggggccccaacatagaagc

SEQ ID NO: 261355 - DNA, 25 bp, Probe sequence
gtcagtttacaataatgtgcaagtt

SEQ ID NO: 261356 - DNA, 25 bp, Probe sequence
gtgcaagttggggtgggacgacgaa

SEQ ID NO: 261357 - DNA, 25 bp, Probe sequence
gtgcaagttggggatgggccccaac

SEQ ID NO: 261358 - DNA, 25 bp, Probe sequence
gtgggacgacgaaataaattttgcg

SEQ ID NO: 261359 - DNA, 25 bp, Probe sequence
gggccccaacaaagagaaattggat

SEQ ID NO: 261360 - DNA, 25 bp, Probe sequence
gggccccaacatagaagctggcgga

SEQ ID NO: 261361 - DNA, 25 bp, Probe sequence
ggatgggccccaacaaagagaaatt

SEQ ID NO: 261362 - DNA, 25 bp, Probe sequence
ggattcccaatttctacagacaatg

SEQ ID NO: 261363 - DNA, 25 bp, Probe sequence
ggaaagtcagtttacaataatgtgc

SEQ ID NO: 261364 - DNA, 25 bp, Probe sequence
ggcggaaagtcagtttacaataatg

SEQ ID NO: 261365 - DNA, 25 bp, Probe sequence
ggccccaacatagaagctggcggaa

SEQ ID NO: 261366 - DNA, 25 bp, Probe sequence
tggattcccaatttctacagacaat

SEQ ID NO: 261367 - DNA, 25 bp, Probe sequence
tgtgcaagttggggtgggacgacga

SEQ ID NO: 261368 - DNA, 25 bp, Probe sequence
tttgcgaaaatatcatttctgtccc

SEQ ID NO: 261369 - DNA, 25 bp, Probe sequence
ttcccaatttctacagacaatgcaa

SEQ ID NO: 261370 - DNA, 25 bp, Probe sequence
ttggattcccaatttctacagacaa

SEQ ID NO: 261371 - DNA, 25 bp, Probe sequence
attcgaaaatgatcattggcataca

SEQ ID NO: 261372 - DNA, 25 bp, Probe sequence
attaaattattatgcaacacgtttt

SEQ ID NO: 261373 - DNA, 25 bp, Probe sequence
attactgatatcagtggtacattcc

SEQ ID NO: 261374 - DNA, 25 bp, Probe sequence
atttacaaattgattcatctcgtta

SEQ ID NO: 261375 - DNA, 25 bp, Probe sequence
atttggccgtgctacaatgtctgaa

SEQ ID NO: 261376 - DNA, 25 bp, Probe sequence
atatctataaatatcgatgcacttt

SEQ ID NO: 261377 - DNA, 25 bp, Probe sequence
atagcaacatcgaatataatcaaac

SEQ ID NO: 261378 - DNA, 25 bp, Probe sequence
agacaaggatattttctatgttcaa

SEQ ID NO: 261379 - DNA, 25 bp, Probe sequence
actttaacaaggaatggtagctcag

SEQ ID NO: 261380 - DNA, 25 bp, Probe sequence
acttgttgtttctataaatgatgta

SEQ ID NO: 261381 - DNA, 25 bp, Probe sequence
aaatatgaagctgaattcaaaccta

SEQ ID NO: 261382 - DNA, 25 bp, Probe sequence
aactgatgttggctttggagactta

SEQ ID NO: 261383 - DNA, 25 bp, Probe sequence
cattcctattacttcatctgagcat

SEQ ID NO: 261384 - DNA, 25 bp, Probe sequence
ctgaacggttcacatgcttcacttg

SEQ ID NO: 261385 - DNA, 25 bp, Probe sequence
gccattcctattacttcatctgagc

SEQ ID NO: 261386 - DNA, 25 bp, Probe sequence
gcgctatttttaacaacgaagacaa

SEQ ID NO: 261387 - DNA, 25 bp, Probe sequence
gcaacacgttttatgttaactgtac

SEQ ID NO: 261388 - DNA, 25 bp, Probe sequence
gaagattttaatagcaacatcgaat

SEQ ID NO: 261389 - DNA, 25 bp, Probe sequence
gagcatacacaaccaattactgata

SEQ ID NO: 261390 - DNA, 25 bp, Probe sequence
gatgtattctatgtaactgatgttg

SEQ ID NO: 261391 - DNA, 25 bp, Probe sequence
gattcatctcgttataatcgaccga

SEQ ID NO: 261392 - DNA, 25 bp, Probe sequence
gattcaatatttgtacagcatttat

SEQ ID NO: 261393 - DNA, 25 bp, Probe sequence
gtctgaacggttcacatgcttcact

SEQ ID NO: 261394 - DNA, 25 bp, Probe sequence
gtctgaaaatcatttaactttaaca

SEQ ID NO: 261395 - DNA, 25 bp, Probe sequence
ggccgtgctacaatgtctgaaaatc

SEQ ID NO: 261396 - DNA, 25 bp, Probe sequence
tgttaactgtaccttttgaaaatat

SEQ ID NO: 261397 - DNA, 25 bp, Probe sequence
tgcgaagttagagaattatttacaa

SEQ ID NO: 261398 - DNA, 25 bp, Probe sequence
tccgcgctatttttaacaacgaaga

SEQ ID NO: 261399 - DNA, 25 bp, Probe sequence
tcatctgagcatacacaaccaatta

SEQ ID NO: 261400 - DNA, 25 bp, Probe sequence
taatgtcagctactattcacacacc

SEQ ID NO: 261401 - DNA, 25 bp, Probe sequence
tacacaaccaattactgatatcagt

SEQ ID NO: 261402 - DNA, 25 bp, Probe sequence
tacatgccattcctattacttcatc

SEQ ID NO: 261403 - DNA, 25 bp, Probe sequence
tacttcatctgagcatacacaacca

SEQ ID NO: 261404 - DNA, 25 bp, Probe sequence
tactattcacacacccggtggcggt

SEQ ID NO: 261405 - DNA, 25 bp, Probe sequence
attttcgttcagtcaactactgcca

SEQ ID NO: 261406 - DNA, 25 bp, Probe sequence
ataacttcgtagagcatagaacatt

SEQ ID NO: 261407 - DNA, 25 bp, Probe sequence
agcgcattttcgttcagtcaactac

SEQ ID NO: 261408 - DNA, 25 bp, Probe sequence
acaagcgcattttcgttcagtcaac

SEQ ID NO: 261409 - DNA, 25 bp, Probe sequence
aacttcgtagagcatagaacattga

SEQ ID NO: 261410 - DNA, 25 bp, Probe sequence
aacattgatttatgtaccagcctga

SEQ ID NO: 261411 - DNA, 25 bp, Probe sequence
aagcgcattttcgttcagtcaacta

SEQ ID NO: 261412 - DNA, 25 bp, Probe sequence
aatataacttcgtagagcatagaac

SEQ ID NO: 261413 - DNA, 25 bp, Probe sequence
caagcgcattttcgttcagtcaact

SEQ ID NO: 261414 - DNA, 25 bp, Probe sequence
caactactgccaatataacttcgta

SEQ ID NO: 261415 - DNA, 25 bp, Probe sequence
caccccagcaaggttgactagaatt

SEQ ID NO: 261416 - DNA, 25 bp, Probe sequence
cagtcaactactgccaatataactt

SEQ ID NO: 261417 - DNA, 25 bp, Probe sequence
gcattttcgttcagtcaactactgc

SEQ ID NO: 261418 - DNA, 25 bp, Probe sequence
cttcgtagagcatagaacattgatt

SEQ ID NO: 261419 - DNA, 25 bp, Probe sequence
cccaccccagcaaggttgactagaa

SEQ ID NO: 261420 - DNA, 25 bp, Probe sequence
cgttcagtcaactactgccaatata

SEQ ID NO: 261421 - DNA, 25 bp, Probe sequence
ccccagcaaggttgactagaattga

SEQ ID NO: 261422 - DNA, 25 bp, Probe sequence
gcgcattttcgttcagtcaactact

SEQ ID NO: 261423 - DNA, 25 bp, Probe sequence
gcttgttacaagcgcattttcgttc

SEQ ID NO: 261424 - DNA, 25 bp, Probe sequence
gaacattgatttatgtaccagcctg

SEQ ID NO: 261425 - DNA, 25 bp, Probe sequence
gactagaattgaaaaaagcttgtta

SEQ ID NO: 261426 - DNA, 25 bp, Probe sequence
gttacaagcgcattttcgttcagtc

SEQ ID NO: 261427 - DNA, 25 bp, Probe sequence
gtcaactactgccaatataacttcg

SEQ ID NO: 261428 - DNA, 25 bp, Probe sequence
tcccaccccagcaaggttgactaga

SEQ ID NO: 261429 - DNA, 25 bp, Probe sequence
tgccaatataacttcgtagagcata

SEQ ID NO: 261430 - DNA, 25 bp, Probe sequence
tcgcaaaatttatttcgtcgtccca

SEQ ID NO: 261431 - DNA, 25 bp, Probe sequence
tcaactactgccaatataacttcgt

SEQ ID NO: 261432 - DNA, 25 bp, Probe sequence
tacaagcgcattttcgttcagtcaa

SEQ ID NO: 261433 - DNA, 25 bp, Probe sequence
tactgccaatataacttcgtagagc

SEQ ID NO: 261434 - DNA, 25 bp, Probe sequence
tattttcgcaaaatttatttcgtcg

SEQ ID NO: 261435 - DNA, 25 bp, Probe sequence
tttcgttcagtcaactactgccaat

SEQ ID NO: 261436 - DNA, 25 bp, Probe sequence
ttgttacaagcgcattttcgttcag

SEQ ID NO: 261437 - DNA, 25 bp, Probe sequence
ttacaagcgcattttcgttcagtca

SEQ ID NO: 261438 - DNA, 25 bp, Probe sequence
ttcgttcagtcaactactgccaata

SEQ ID NO: 261439 - DNA, 25 bp, Probe sequence
agagatcaccgtaccggttcgattc

SEQ ID NO: 261440 - DNA, 25 bp, Probe sequence
atcctgcggtgagagatcaccgtac

SEQ ID NO: 261441 - DNA, 25 bp, Probe sequence
actggcagacgcacaggacttaaaa

SEQ ID NO: 261442 - DNA, 25 bp, Probe sequence
acttaaaatcctgcggtgagagatc

SEQ ID NO: 261443 - DNA, 25 bp, Probe sequence
acaggacttaaaatcctgcggtgag

SEQ ID NO: 261444 - DNA, 25 bp, Probe sequence
aaatcctgcggtgagagatcaccgt

SEQ ID NO: 261445 - DNA, 25 bp, Probe sequence
aactggcagacgcacaggacttaaa

SEQ ID NO: 261446 - DNA, 25 bp, Probe sequence
ctgcggtgagagatcaccgtaccgg

SEQ ID NO: 261447 - DNA, 25 bp, Probe sequence
cggaactggcagacgcacaggactt

SEQ ID NO: 261448 - DNA, 25 bp, Probe sequence
cgcacaggacttaaaatcctgcggt

SEQ ID NO: 261449 - DNA, 25 bp, Probe sequence
cctgcggtgagagatcaccgtaccg

SEQ ID NO: 261450 - DNA, 25 bp, Probe sequence
gcggtgagagatcaccgtaccggtt

SEQ ID NO: 261451 - DNA, 25 bp, Probe sequence
gcagacgcacaggacttaaaatcct

SEQ ID NO: 261452 - DNA, 25 bp, Probe sequence
gcacaggacttaaaatcctgcggtg

SEQ ID NO: 261453 - DNA, 25 bp, Probe sequence
gaactggcagacgcacaggacttaa

SEQ ID NO: 261454 - DNA, 25 bp, Probe sequence
gagatcaccgtaccggttcgattcc

SEQ ID NO: 261455 - DNA, 25 bp, Probe sequence
gatcaccgtaccggttcgattccgg

SEQ ID NO: 261456 - DNA, 25 bp, Probe sequence
gacttaaaatcctgcggtgagagat

SEQ ID NO: 261457 - DNA, 25 bp, Probe sequence
gacgcacaggacttaaaatcctgcg

SEQ ID NO: 261458 - DNA, 25 bp, Probe sequence
gagagatcaccgtaccggttcgatt

SEQ ID NO: 261459 - DNA, 25 bp, Probe sequence
gtgagagatcaccgtaccggttcga

SEQ ID NO: 261460 - DNA, 25 bp, Probe sequence
gtggcggaactggcagacgcacagg

SEQ ID NO: 261461 - DNA, 25 bp, Probe sequence
ggtggcggaactggcagacgcacag

SEQ ID NO: 261462 - DNA, 25 bp, Probe sequence
ggtgagagatcaccgtaccggttcg

SEQ ID NO: 261463 - DNA, 25 bp, Probe sequence
ggacttaaaatcctgcggtgagaga

SEQ ID NO: 261464 - DNA, 25 bp, Probe sequence
ggaactggcagacgcacaggactta

SEQ ID NO: 261465 - DNA, 25 bp, Probe sequence
tgagagatcaccgtaccggttcgat

SEQ ID NO: 261466 - DNA, 25 bp, Probe sequence
ggcagacgcacaggacttaaaatcc

SEQ ID NO: 261467 - DNA, 25 bp, Probe sequence
ggcggaactggcagacgcacaggac

SEQ ID NO: 261468 - DNA, 25 bp, Probe sequence
tggcggaactggcagacgcacagga

SEQ ID NO: 261469 - DNA, 25 bp, Probe sequence
tggcagacgcacaggacttaaaatc

SEQ ID NO: 261470 - DNA, 25 bp, Probe sequence
tgcggtgagagatcaccgtaccggt

SEQ ID NO: 261471 - DNA, 25 bp, Probe sequence
taaaatcctgcggtgagagatcacc

SEQ ID NO: 261472 - DNA, 25 bp, Probe sequence
ttaaaatcctgcggtgagagatcac

SEQ ID NO: 261473 - DNA, 25 bp, Probe sequence
cgaccgttggcataaggggatttgt

SEQ ID NO: 261474 - DNA, 25 bp, Probe sequence
attcgaccgttggcataaggggatt

SEQ ID NO: 261475 - DNA, 25 bp, Probe sequence
atcgttttgaattcagtagtgatag

SEQ ID NO: 261476 - DNA, 25 bp, Probe sequence
atgaaattcgaccgttggcataagg

SEQ ID NO: 261477 - DNA, 25 bp, Probe sequence
atgatgaaattcgaccgttggcata

SEQ ID NO: 261478 - DNA, 25 bp, Probe sequence
acatgatgaaattcgaccgttggca

SEQ ID NO: 261479 - DNA, 25 bp, Probe sequence
acaaatcgttttgaattcagtagtg

SEQ ID NO: 261480 - DNA, 25 bp, Probe sequence
aaatcgttttgaattcagtagtgat

SEQ ID NO: 261481 - DNA, 25 bp, Probe sequence
aaacatgatgaaattcgaccgttgg

SEQ ID NO: 261482 - DNA, 25 bp, Probe sequence
aacatgatgaaattcgaccgttggc

SEQ ID NO: 261483 - DNA, 25 bp, Probe sequence
aattcgaccgttggcataaggggat

SEQ ID NO: 261484 - DNA, 25 bp, Probe sequence
aatcgttttgaattcagtagtgata

SEQ ID NO: 261485 - DNA, 25 bp, Probe sequence
cagtagtgataggtggaaagggtaa

SEQ ID NO: 261486 - DNA, 25 bp, Probe sequence
catgatgaaattcgaccgttggcat

SEQ ID NO: 261487 - DNA, 25 bp, Probe sequence
cgttttgaattcagtagtgataggt

SEQ ID NO: 261488 - DNA, 25 bp, Probe sequence
ttcgaccgttggcataaggggattt

SEQ ID NO: 261489 - DNA, 25 bp, Probe sequence
gaattcagtagtgataggtggaaag

SEQ ID NO: 261490 - DNA, 25 bp, Probe sequence
gaaattcgaccgttggcataagggg

SEQ ID NO: 261491 - DNA, 25 bp, Probe sequence
gaccgttggcataaggggatttgta

SEQ ID NO: 261492 - DNA, 25 bp, Probe sequence
gatgaaattcgaccgttggcataag

SEQ ID NO: 261493 - DNA, 25 bp, Probe sequence
gttggcataaggggatttgtaaaca

SEQ ID NO: 261494 - DNA, 25 bp, Probe sequence
gttttgaattcagtagtgataggtg

SEQ ID NO: 261495 - DNA, 25 bp, Probe sequence
gtaaacaaatcgttttgaattcagt

SEQ ID NO: 261496 - DNA, 25 bp, Probe sequence
gtaaacatgatgaaattcgaccgtt

SEQ ID NO: 261497 - DNA, 25 bp, Probe sequence
ggcataaggggatttgtaaacaaat

SEQ ID NO: 261498 - DNA, 25 bp, Probe sequence
tggcataaggggatttgtaaacaaa

SEQ ID NO: 261499 - DNA, 25 bp, Probe sequence
tgaaattcgaccgttggcataaggg

SEQ ID NO: 261500 - DNA, 25 bp, Probe sequence
tgatgaaattcgaccgttggcataa

SEQ ID NO: 261501 - DNA, 25 bp, Probe sequence
tcgaccgttggcataaggggatttg

SEQ ID NO: 261502 - DNA, 25 bp, Probe sequence
tgaattcagtagtgataggtggaaa

SEQ ID NO: 261503 - DNA, 25 bp, Probe sequence
tcgttttgaattcagtagtgatagg

SEQ ID NO: 261504 - DNA, 25 bp, Probe sequence
tcagtagtgataggtggaaagggta

SEQ ID NO: 261505 - DNA, 25 bp, Probe sequence
taaacatgatgaaattcgaccgttg

SEQ ID NO: 261506 - DNA, 25 bp, Probe sequence
tttgaattcagtagtgataggtgga

SEQ ID NO: 261507 - DNA, 25 bp, Probe sequence
cacccgaccaagatagaatttacct

SEQ ID NO: 261508 - DNA, 25 bp, Probe sequence
ctgaacgttggtgaagcgtggctta

SEQ ID NO: 261509 - DNA, 25 bp, Probe sequence
atatcattaataaatcgaaacctta

SEQ ID NO: 261510 - DNA, 25 bp, Probe sequence
ataacatattttctcaactcacacc

SEQ ID NO: 261511 - DNA, 25 bp, Probe sequence
atcgagttcctgatgaagaacgtca

SEQ ID NO: 261512 - DNA, 25 bp, Probe sequence
agcactttatctcaatatattaacg

SEQ ID NO: 261513 - DNA, 25 bp, Probe sequence
agcgtggcttatggggtatgatgta

SEQ ID NO: 261514 - DNA, 25 bp, Probe sequence
actttatctcaatatattaacgacg

SEQ ID NO: 261515 - DNA, 25 bp, Probe sequence
aaaagcactttatctcaatatatta

SEQ ID NO: 261516 - DNA, 25 bp, Probe sequence
aactctgaacgttggtgaagcgtgg

SEQ ID NO: 261517 - DNA, 25 bp, Probe sequence
caatcacccgaccaagatagaattt

SEQ ID NO: 261518 - DNA, 25 bp, Probe sequence
caataacatattttctcaactcaca

SEQ ID NO: 261519 - DNA, 25 bp, Probe sequence
ctaaaactctgaacgttggtgaagc

SEQ ID NO: 261520 - DNA, 25 bp, Probe sequence
ctttctaaaactctgaacgttggtg

SEQ ID NO: 261521 - DNA, 25 bp, Probe sequence
ctactttctaaaactctgaacgttg

SEQ ID NO: 261522 - DNA, 25 bp, Probe sequence
cgtggcttatggggtatgatgtaga

SEQ ID NO: 261523 - DNA, 25 bp, Probe sequence
cgtacaatcacccgaccaagataga

SEQ ID NO: 261524 - DNA, 25 bp, Probe sequence
gaacgttggtgaagcgtggcttatg

SEQ ID NO: 261525 - DNA, 25 bp, Probe sequence
gaacgtcaagatgaaacgataatgt

SEQ ID NO: 261526 - DNA, 25 bp, Probe sequence
gaccaagatagaatttacctacttt

SEQ ID NO: 261527 - DNA, 25 bp, Probe sequence
gatgtagattcttatcgagttcctg

SEQ ID NO: 261528 - DNA, 25 bp, Probe sequence
gattcttatcgagttcctgatgaag

SEQ ID NO: 261529 - DNA, 25 bp, Probe sequence
gtagattcttatcgagttcctgatg

SEQ ID NO: 261530 - DNA, 25 bp, Probe sequence
gtacaatcacccgaccaagatagaa

SEQ ID NO: 261531 - DNA, 25 bp, Probe sequence
ggggtatgatgtagattcttatcga

SEQ ID NO: 261532 - DNA, 25 bp, Probe sequence
ggtatatctttaagtaaaagcactt

SEQ ID NO: 261533 - DNA, 25 bp, Probe sequence
ggcttatggggtatgatgtagattc

SEQ ID NO: 261534 - DNA, 25 bp, Probe sequence
tcgaaaccttatcaaaagaaactag

SEQ ID NO: 261535 - DNA, 25 bp, Probe sequence
tcaaatagacttaaacacattatga

SEQ ID NO: 261536 - DNA, 25 bp, Probe sequence
taacatattttctcaactcacacct

SEQ ID NO: 261537 - DNA, 25 bp, Probe sequence
tacctactttctaaaactctgaacg

SEQ ID NO: 261538 - DNA, 25 bp, Probe sequence
tattaacgacgtacaatcacccgac

SEQ ID NO: 261539 - DNA, 25 bp, Probe sequence
ttaacgacgtacaatcacccgacca

SEQ ID NO: 261540 - DNA, 25 bp, Probe sequence
ttcctgatgaagaacgtcaagatga

SEQ ID NO: 261541 - DNA, 25 bp, Probe sequence
attagcagcatgataccggtagagt

SEQ ID NO: 261542 - DNA, 25 bp, Probe sequence
attatactactatactagtgtatta

SEQ ID NO: 261543 - DNA, 25 bp, Probe sequence
atcatgcgaatttgactttacaaga

SEQ ID NO: 261544 - DNA, 25 bp, Probe sequence
atggattcagtgtatgagttgtata

SEQ ID NO: 261545 - DNA, 25 bp, Probe sequence
aggtcgacaaaattactataagtat

SEQ ID NO: 261546 - DNA, 25 bp, Probe sequence
agattagcagcatgataccggtaga

SEQ ID NO: 261547 - DNA, 25 bp, Probe sequence
acacagaacctggaagtaatgaatt

SEQ ID NO: 261548 - DNA, 25 bp, Probe sequence
aatcggaatttatggattcagtgta

SEQ ID NO: 261549 - DNA, 25 bp, Probe sequence
aatcgagcaatatgttaaagagcaa

SEQ ID NO: 261550 - DNA, 25 bp, Probe sequence
ctactattacacagaacctggaagt

SEQ ID NO: 261551 - DNA, 25 bp, Probe sequence
catggacatcatgcgaatttgactt

SEQ ID NO: 261552 - DNA, 25 bp, Probe sequence
gcgaatttgactttacaagagaagg

SEQ ID NO: 261553 - DNA, 25 bp, Probe sequence
gcatgataccggtagagtgggaaaa

SEQ ID NO: 261554 - DNA, 25 bp, Probe sequence
gcagcatgataccggtagagtggga

SEQ ID NO: 261555 - DNA, 25 bp, Probe sequence
gaatttggtcaagtaggtcgacaaa

SEQ ID NO: 261556 - DNA, 25 bp, Probe sequence
gcaatggcatatatagatgacggag

SEQ ID NO: 261557 - DNA, 25 bp, Probe sequence
gaaggtgaattaaaagtttcatttg

SEQ ID NO: 261558 - DNA, 25 bp, Probe sequence
gaaccatggacatcatgcgaatttg

SEQ ID NO: 261559 - DNA, 25 bp, Probe sequence
gatgacggaggaggagaagtgttct

SEQ ID NO: 261560 - DNA, 25 bp, Probe sequence
gatatatcggaatcggaatttatgg

SEQ ID NO: 261561 - DNA, 25 bp, Probe sequence
gtttcatttgattatattgattgga

SEQ ID NO: 261562 - DNA, 25 bp, Probe sequence
gtatgagttgtataaacaatttcaa

SEQ ID NO: 261563 - DNA, 25 bp, Probe sequence
gtaatgaattatactactatactag

SEQ ID NO: 261564 - DNA, 25 bp, Probe sequence
gtgggaaaaggtatatgcaatggca

SEQ ID NO: 261565 - DNA, 25 bp, Probe sequence
gtgaaatgtatagcgagattgcgaa

SEQ ID NO: 261566 - DNA, 25 bp, Probe sequence
gtgttctactattacacagaacctg

SEQ ID NO: 261567 - DNA, 25 bp, Probe sequence
ggaattttaccagaaacggaatatg

SEQ ID NO: 261568 - DNA, 25 bp, Probe sequence
ggaggagaagtgttctactattaca

SEQ ID NO: 261569 - DNA, 25 bp, Probe sequence
ggagaagtgttctactattacacag

SEQ ID NO: 261570 - DNA, 25 bp, Probe sequence
ggacatcatgcgaatttgactttac

SEQ ID NO: 261571 - DNA, 25 bp, Probe sequence
tgacggaggaggagaagtgttctac

SEQ ID NO: 261572 - DNA, 25 bp, Probe sequence
taagattagcagcatgataccggta

SEQ ID NO: 261573 - DNA, 25 bp, Probe sequence
tagcgagattgcgaataagattagc

SEQ ID NO: 261574 - DNA, 25 bp, Probe sequence
ttcagaatttggtcaagtaggtcga

SEQ ID NO: 261575 - DNA, 25 bp, Probe sequence
attcagtatatgagttgcatgatca

SEQ ID NO: 261576 - DNA, 25 bp, Probe sequence
attattttactatacaagtgtgata

SEQ ID NO: 261577 - DNA, 25 bp, Probe sequence
attttactatacaagtgtgataaag

SEQ ID NO: 261578 - DNA, 25 bp, Probe sequence
atatgagttgcatgatcaatttgag

SEQ ID NO: 261579 - DNA, 25 bp, Probe sequence
atcaagctttatggattcagtatat

SEQ ID NO: 261580 - DNA, 25 bp, Probe sequence
atgagttgcatgatcaatttgagga

SEQ ID NO: 261581 - DNA, 25 bp, Probe sequence
atggattcagtatatgagttgcatg

SEQ ID NO: 261582 - DNA, 25 bp, Probe sequence
agttgcatgatcaatttgaggaact

SEQ ID NO: 261583 - DNA, 25 bp, Probe sequence
agctttatggattcagtatatgagt

SEQ ID NO: 261584 - DNA, 25 bp, Probe sequence
aaatcaagctttatggattcagtat

SEQ ID NO: 261585 - DNA, 25 bp, Probe sequence
aagctttatggattcagtatatgag

SEQ ID NO: 261586 - DNA, 25 bp, Probe sequence
aatggcatatatcgatgaagaatgt

SEQ ID NO: 261587 - DNA, 25 bp, Probe sequence
caagctttatggattcagtatatga

SEQ ID NO: 261588 - DNA, 25 bp, Probe sequence
cagtatatgagttgcatgatcaatt

SEQ ID NO: 261589 - DNA, 25 bp, Probe sequence
gcatgatcaatttgaggaactaaga

SEQ ID NO: 261590 - DNA, 25 bp, Probe sequence
gcaatggcatatatcgatgaagaat

SEQ ID NO: 261591 - DNA, 25 bp, Probe sequence
gaagtataatttattgaaatcaagc

SEQ ID NO: 261592 - DNA, 25 bp, Probe sequence
gaagtatttatagaagaaggtcttg

SEQ ID NO: 261593 - DNA, 25 bp, Probe sequence
gaaatcaagctttatggattcagta

SEQ ID NO: 261594 - DNA, 25 bp, Probe sequence
gagttgcatgatcaatttgaggaac

SEQ ID NO: 261595 - DNA, 25 bp, Probe sequence
gatgaagaatgtggagaagtgtttt

SEQ ID NO: 261596 - DNA, 25 bp, Probe sequence
gatcaatttgaggaactaagagaag

SEQ ID NO: 261597 - DNA, 25 bp, Probe sequence
gattcagtatatgagttgcatgatc

SEQ ID NO: 261598 - DNA, 25 bp, Probe sequence
gttgcatgatcaatttgaggaacta

SEQ ID NO: 261599 - DNA, 25 bp, Probe sequence
gtatatgagttgcatgatcaatttg

SEQ ID NO: 261600 - DNA, 25 bp, Probe sequence
ggattcagtatatgagttgcatgat

SEQ ID NO: 261601 - DNA, 25 bp, Probe sequence
ggaactaagagaagtatttatagaa

SEQ ID NO: 261602 - DNA, 25 bp, Probe sequence
ggcatatatcgatgaagaatgtgga

SEQ ID NO: 261603 - DNA, 25 bp, Probe sequence
tgagttgcatgatcaatttgaggaa

SEQ ID NO: 261604 - DNA, 25 bp, Probe sequence
tgcaatggcatatatcgatgaagaa

SEQ ID NO: 261605 - DNA, 25 bp, Probe sequence
tcagtatatgagttgcatgatcaat

SEQ ID NO: 261606 - DNA, 25 bp, Probe sequence
tcaagctttatggattcagtatatg

SEQ ID NO: 261607 - DNA, 25 bp, Probe sequence
tatgagttgcatgatcaatttgagg

SEQ ID NO: 261608 - DNA, 25 bp, Probe sequence
ttcagtatatgagttgcatgatcaa

SEQ ID NO: 261609 - DNA, 25 bp, Probe sequence
atttgttgcatcaatgttgcatcac

SEQ ID NO: 261610 - DNA, 25 bp, Probe sequence
atttgatgcaacattggaaacaaac

SEQ ID NO: 261611 - DNA, 25 bp, Probe sequence
atcatttgttgcatcaatgttgcat

SEQ ID NO: 261612 - DNA, 25 bp, Probe sequence
atgcaacattggaaacaaacagggt

SEQ ID NO: 261613 - DNA, 25 bp, Probe sequence
aggtgttgtatcatttgttgcatca

SEQ ID NO: 261614 - DNA, 25 bp, Probe sequence
agaggtgttgtatcatttgttgcat

SEQ ID NO: 261615 - DNA, 25 bp, Probe sequence
aaagaggtgttgtatcatttgttgc

SEQ ID NO: 261616 - DNA, 25 bp, Probe sequence
aagaggtgttgtatcatttgttgca

SEQ ID NO: 261617 - DNA, 25 bp, Probe sequence
catttgttgcatcaatgttgcatca

SEQ ID NO: 261618 - DNA, 25 bp, Probe sequence
gcaacattggaaacaaacagggttg

SEQ ID NO: 261619 - DNA, 25 bp, Probe sequence
gaatttgatgcaacattggaaacaa

SEQ ID NO: 261620 - DNA, 25 bp, Probe sequence
gaaagaggtgttgtatcatttgttg

SEQ ID NO: 261621 - DNA, 25 bp, Probe sequence
gaggtgttgtatcatttgttgcatc

SEQ ID NO: 261622 - DNA, 25 bp, Probe sequence
gatgcaacattggaaacaaacaggg

SEQ ID NO: 261623 - DNA, 25 bp, Probe sequence
gttgtatcatttgttgcatcaatgt

SEQ ID NO: 261624 - DNA, 25 bp, Probe sequence
gttgcatcaatgttgcatcaccaaa

SEQ ID NO: 261625 - DNA, 25 bp, Probe sequence
gtatcatttgttgcatcaatgttgc

SEQ ID NO: 261626 - DNA, 25 bp, Probe sequence
gtgaatttgatgcaacattggaaac

SEQ ID NO: 261627 - DNA, 25 bp, Probe sequence
gtgttgtatcatttgttgcatcaat

SEQ ID NO: 261628 - DNA, 25 bp, Probe sequence
ggtgttgtatcatttgttgcatcaa

SEQ ID NO: 261629 - DNA, 25 bp, Probe sequence
ggaaagaggtgttgtatcatttgtt

SEQ ID NO: 261630 - DNA, 25 bp, Probe sequence
tgtatcatttgttgcatcaatgttg

SEQ ID NO: 261631 - DNA, 25 bp, Probe sequence
tgttgcatcaatgttgcatcaccaa

SEQ ID NO: 261632 - DNA, 25 bp, Probe sequence
tgttgtatcatttgttgcatcaatg

SEQ ID NO: 261633 - DNA, 25 bp, Probe sequence
tgcaacattggaaacaaacagggtt

SEQ ID NO: 261634 - DNA, 25 bp, Probe sequence
tgaatttgatgcaacattggaaaca

SEQ ID NO: 261635 - DNA, 25 bp, Probe sequence
tgcatcaatgttgcatcaccaaaaa

SEQ ID NO: 261636 - DNA, 25 bp, Probe sequence
tcatttgttgcatcaatgttgcatc

SEQ ID NO: 261637 - DNA, 25 bp, Probe sequence
tatcatttgttgcatcaatgttgca

SEQ ID NO: 261638 - DNA, 25 bp, Probe sequence
tttgttgcatcaatgttgcatcacc

SEQ ID NO: 261639 - DNA, 25 bp, Probe sequence
ttgatgcaacattggaaacaaacag

SEQ ID NO: 261640 - DNA, 25 bp, Probe sequence
ttgcatcaatgttgcatcaccaaaa

SEQ ID NO: 261641 - DNA, 25 bp, Probe sequence
ttgttgcatcaatgttgcatcacca

SEQ ID NO: 261642 - DNA, 25 bp, Probe sequence
ttgtatcatttgttgcatcaatgtt

SEQ ID NO: 261643 - DNA, 25 bp, Probe sequence
atattattatagccaaaaacattag

SEQ ID NO: 261644 - DNA, 25 bp, Probe sequence
agcgttaaaagtaaatggtgattct

SEQ ID NO: 261645 - DNA, 25 bp, Probe sequence
accatctactttaagcgattattta

SEQ ID NO: 261646 - DNA, 25 bp, Probe sequence
acgacgatctacacttttatagaaa

SEQ ID NO: 261647 - DNA, 25 bp, Probe sequence
acggcgttatacaaaggatagctga

SEQ ID NO: 261648 - DNA, 25 bp, Probe sequence
aaagattacgacgatctacactttt

SEQ ID NO: 261649 - DNA, 25 bp, Probe sequence
aaagcgacatagatactacatacaa

SEQ ID NO: 261650 - DNA, 25 bp, Probe sequence
aaaaccatctactttaagcgattat

SEQ ID NO: 261651 - DNA, 25 bp, Probe sequence
aaaagaaacttgctgaactcattaa

SEQ ID NO: 261652 - DNA, 25 bp, Probe sequence
aaggatagctgatgttttcgaggtt

SEQ ID NO: 261653 - DNA, 25 bp, Probe sequence
caacgattcaaatatgtctcaaaag

SEQ ID NO: 261654 - DNA, 25 bp, Probe sequence
ctatccccacacacgatttagcgtt

SEQ ID NO: 261655 - DNA, 25 bp, Probe sequence
cgaggttggtaaaagcgacatagat

SEQ ID NO: 261656 - DNA, 25 bp, Probe sequence
ccacacacgatttagcgttaaaagt

SEQ ID NO: 261657 - DNA, 25 bp, Probe sequence
gaactcattaacataaaaccatcta

SEQ ID NO: 261658 - DNA, 25 bp, Probe sequence
gaaacttgctgaactcattaacata

SEQ ID NO: 261659 - DNA, 25 bp, Probe sequence
gaaagtgtgaggttaattggaaaag

SEQ ID NO: 261660 - DNA, 25 bp, Probe sequence
gactctagtttcactaaataaagat

SEQ ID NO: 261661 - DNA, 25 bp, Probe sequence
gagaaaactccagttaacgtcaatg

SEQ ID NO: 261662 - DNA, 25 bp, Probe sequence
gatgttttcgaggttggtaaaagcg

SEQ ID NO: 261663 - DNA, 25 bp, Probe sequence
gatactacatacaaagacgataacg

SEQ ID NO: 261664 - DNA, 25 bp, Probe sequence
gatagctgatgttttcgaggttggt

SEQ ID NO: 261665 - DNA, 25 bp, Probe sequence
gattacgacgatctacacttttata

SEQ ID NO: 261666 - DNA, 25 bp, Probe sequence
gattgactctagtttcactaaataa

SEQ ID NO: 261667 - DNA, 25 bp, Probe sequence
gtctcaaaagaaacttgctgaactc

SEQ ID NO: 261668 - DNA, 25 bp, Probe sequence
tggttaaaggacctatccccacaca

SEQ ID NO: 261669 - DNA, 25 bp, Probe sequence
tgtaggagaacgtttacacgatgaa

SEQ ID NO: 261670 - DNA, 25 bp, Probe sequence
tccccacacacgatttagcgttaaa

SEQ ID NO: 261671 - DNA, 25 bp, Probe sequence
tacaaagacgataacgacatcactt

SEQ ID NO: 261672 - DNA, 25 bp, Probe sequence
tagctgatgttttcgaggttggtaa

SEQ ID NO: 261673 - DNA, 25 bp, Probe sequence
tagattgactctagtttcactaaat

SEQ ID NO: 261674 - DNA, 25 bp, Probe sequence
tatccccacacacgatttagcgtta

SEQ ID NO: 261675 - DNA, 25 bp, Probe sequence
ttagaaaatttctcaacgattcaaa

SEQ ID NO: 261676 - DNA, 25 bp, Probe sequence
ttctcaacgattcaaatatgtctca

SEQ ID NO: 261677 - DNA, 25 bp, Probe sequence
attattacacatatatccctagaga

SEQ ID NO: 261678 - DNA, 25 bp, Probe sequence
ataatgtctctgaaaaagtatttta

SEQ ID NO: 261679 - DNA, 25 bp, Probe sequence
atcatgtgaatttgactttacaaga

SEQ ID NO: 261680 - DNA, 25 bp, Probe sequence
atgttgtatttgattatgttgattg

SEQ ID NO: 261681 - DNA, 25 bp, Probe sequence
atggacatcatgtgaatttgacttt

SEQ ID NO: 261682 - DNA, 25 bp, Probe sequence
agtattttatgatttgtggacggat

SEQ ID NO: 261683 - DNA, 25 bp, Probe sequence
agaaacgcatttaaagaagaagatt

SEQ ID NO: 261684 - DNA, 25 bp, Probe sequence
acacatatatccctagagagtataa

SEQ ID NO: 261685 - DNA, 25 bp, Probe sequence
aagagcaagatgaagctgaactata

SEQ ID NO: 261686 - DNA, 25 bp, Probe sequence
gaattattacacatatatccctaga

SEQ ID NO: 261687 - DNA, 25 bp, Probe sequence
gaatttgactttacaagagatggta

SEQ ID NO: 261688 - DNA, 25 bp, Probe sequence
gaatgttgtatttgattatgttgat

SEQ ID NO: 261689 - DNA, 25 bp, Probe sequence
gaagatttagaaccatggacatcat

SEQ ID NO: 261690 - DNA, 25 bp, Probe sequence
gaaccatggacatcatgtgaatttg

SEQ ID NO: 261691 - DNA, 25 bp, Probe sequence
gaagaagatttagaaccatggacat

SEQ ID NO: 261692 - DNA, 25 bp, Probe sequence
gacatcatgtgaatttgactttaca

SEQ ID NO: 261693 - DNA, 25 bp, Probe sequence
gacggatttatatagattgtttaag

SEQ ID NO: 261694 - DNA, 25 bp, Probe sequence
gagatggtaaattgaatgttgtatt

SEQ ID NO: 261695 - DNA, 25 bp, Probe sequence
gagtataatgtctctgaaaaagtat

SEQ ID NO: 261696 - DNA, 25 bp, Probe sequence
gatttgtggacggatttatatagat

SEQ ID NO: 261697 - DNA, 25 bp, Probe sequence
gatttagaaccatggacatcatgtg

SEQ ID NO: 261698 - DNA, 25 bp, Probe sequence
gattatgttgattggatgaattcag

SEQ ID NO: 261699 - DNA, 25 bp, Probe sequence
gttgtatttgattatgttgattgga

SEQ ID NO: 261700 - DNA, 25 bp, Probe sequence
gtatttgattatgttgattggatga

SEQ ID NO: 261701 - DNA, 25 bp, Probe sequence
tggtgttttaccagaaacggaatat

SEQ ID NO: 261702 - DNA, 25 bp, Probe sequence
tggacggatttatatagattgttta

SEQ ID NO: 261703 - DNA, 25 bp, Probe sequence
tatatccctagagagtataatgtct

SEQ ID NO: 261704 - DNA, 25 bp, Probe sequence
tattacacatatatccctagagagt

SEQ ID NO: 261705 - DNA, 25 bp, Probe sequence
ttttatgatttgtggacggatttat

SEQ ID NO: 261706 - DNA, 25 bp, Probe sequence
ttaccagaaacggaatatgaaatta

SEQ ID NO: 261707 - DNA, 25 bp, Probe sequence
ttacacatatatccctagagagtat

SEQ ID NO: 261708 - DNA, 25 bp, Probe sequence
ttaattatactaaaccaggtagcga

SEQ ID NO: 261709 - DNA, 25 bp, Probe sequence
ttgaattattacacatatatcccta

SEQ ID NO: 261710 - DNA, 25 bp, Probe sequence
ttggatgaattcagaatttggtcca

SEQ ID NO: 261711 - DNA, 25 bp, Probe sequence
attgcaagtgagatcagtggaatga

SEQ ID NO: 261712 - DNA, 25 bp, Probe sequence
attcagacatacctaaagattgcaa

SEQ ID NO: 261713 - DNA, 25 bp, Probe sequence
atacctaaagattgcaatgtctcaa

SEQ ID NO: 261714 - DNA, 25 bp, Probe sequence
ataaaattgcaagtgagatcagtgg

SEQ ID NO: 261715 - DNA, 25 bp, Probe sequence
atcatgcgaatttgactttacaaga

SEQ ID NO: 261716 - DNA, 25 bp, Probe sequence
agaattcatggtttaaagtttatcg

SEQ ID NO: 261717 - DNA, 25 bp, Probe sequence
agctggggaagtcatttttaattat

SEQ ID NO: 261718 - DNA, 25 bp, Probe sequence
acaatagcttatgtaactgatcaag

SEQ ID NO: 261719 - DNA, 25 bp, Probe sequence
aaattattattcagacatacctaaa

SEQ ID NO: 261720 - DNA, 25 bp, Probe sequence
aaccaggtagtgatgaattaaatta

SEQ ID NO: 261721 - DNA, 25 bp, Probe sequence
aagatatttttaagaattcatggtt

SEQ ID NO: 261722 - DNA, 25 bp, Probe sequence
aagtttatcgaatgtttgatgagtt

SEQ ID NO: 261723 - DNA, 25 bp, Probe sequence
caagctggggaagtcatttttaatt

SEQ ID NO: 261724 - DNA, 25 bp, Probe sequence
gaatttggcctgaaaaagaatatgc

SEQ ID NO: 261725 - DNA, 25 bp, Probe sequence
gaatttggaccaatgggaagagaac

SEQ ID NO: 261726 - DNA, 25 bp, Probe sequence
gaatatgccataaattgggttgaaa

SEQ ID NO: 261727 - DNA, 25 bp, Probe sequence
gaatgtatcttttgattatattgat

SEQ ID NO: 261728 - DNA, 25 bp, Probe sequence
gaaccatggacatcatgcgaatttg

SEQ ID NO: 261729 - DNA, 25 bp, Probe sequence
gaagagcttgaaccatggacatcat

SEQ ID NO: 261730 - DNA, 25 bp, Probe sequence
gaagaagagcttgaaccatggacat

SEQ ID NO: 261731 - DNA, 25 bp, Probe sequence
gagcttgaaccatggacatcatgcg

SEQ ID NO: 261732 - DNA, 25 bp, Probe sequence
gagaaactaagtcaaatgtacaata

SEQ ID NO: 261733 - DNA, 25 bp, Probe sequence
gagatcagtggaatgataccagtag

SEQ ID NO: 261734 - DNA, 25 bp, Probe sequence
gatggcaaattgaatgtatcttttg

SEQ ID NO: 261735 - DNA, 25 bp, Probe sequence
gatcaagctggggaagtcattttta

SEQ ID NO: 261736 - DNA, 25 bp, Probe sequence
gataccagtagaatgggagcaagta

SEQ ID NO: 261737 - DNA, 25 bp, Probe sequence
gattatattgattgggtgaattcag

SEQ ID NO: 261738 - DNA, 25 bp, Probe sequence
gattgcaatgtctcaaaagatattt

SEQ ID NO: 261739 - DNA, 25 bp, Probe sequence
gtcatttttaattatactaaaccag

SEQ ID NO: 261740 - DNA, 25 bp, Probe sequence
gtgaattcagaatttggaccaatgg

SEQ ID NO: 261741 - DNA, 25 bp, Probe sequence
gggagcaagtatttacaatagctta

SEQ ID NO: 261742 - DNA, 25 bp, Probe sequence
ggacatcatgcgaatttgactttac

SEQ ID NO: 261743 - DNA, 25 bp, Probe sequence
ttatgtaactgatcaagctggggaa

SEQ ID NO: 261744 - DNA, 25 bp, Probe sequence
ttgactttacaagagatggcaaatt

SEQ ID NO: 261745 - DNA, 25 bp, Probe sequence
attcagacatacctaaagattgcaa

SEQ ID NO: 261746 - DNA, 25 bp, Probe sequence
atacctaaagattgcaatgtctcaa

SEQ ID NO: 261747 - DNA, 25 bp, Probe sequence
atcatgcgaatttgactttacaaga

SEQ ID NO: 261748 - DNA, 25 bp, Probe sequence
agaattcatggtttaaagtttatcg

SEQ ID NO: 261749 - DNA, 25 bp, Probe sequence
acaatagcttatgtaactgatcaag

SEQ ID NO: 261750 - DNA, 25 bp, Probe sequence
aaattattattcagacatacctaaa

SEQ ID NO: 261751 - DNA, 25 bp, Probe sequence
aaaccagatagtgatgaattaaatt

SEQ ID NO: 261752 - DNA, 25 bp, Probe sequence
aagatatttttaagaattcatggtt

SEQ ID NO: 261753 - DNA, 25 bp, Probe sequence
aagtttatcgaatgtttgatgagtt

SEQ ID NO: 261754 - DNA, 25 bp, Probe sequence
caagctggagaagtcatctttaatt

SEQ ID NO: 261755 - DNA, 25 bp, Probe sequence
cagagtttgatcaattgggccgtca

SEQ ID NO: 261756 - DNA, 25 bp, Probe sequence
gctggagaagtcatctttaattata

SEQ ID NO: 261757 - DNA, 25 bp, Probe sequence
gaagggcttgaaccatggacatcat

SEQ ID NO: 261758 - DNA, 25 bp, Probe sequence
gaaccatggacatcatgcgaatttg

SEQ ID NO: 261759 - DNA, 25 bp, Probe sequence
gaagaagggcttgaaccatggacat

SEQ ID NO: 261760 - DNA, 25 bp, Probe sequence
gagattgcgaatgagattagtggga

SEQ ID NO: 261761 - DNA, 25 bp, Probe sequence
gagattagtgggatgataccggtag

SEQ ID NO: 261762 - DNA, 25 bp, Probe sequence
gatggcaaattgaatgtatcttttg

SEQ ID NO: 261763 - DNA, 25 bp, Probe sequence
gatcaagctggagaagtcatcttta

SEQ ID NO: 261764 - DNA, 25 bp, Probe sequence
gatcaattgggccgtcaaaattatt

SEQ ID NO: 261765 - DNA, 25 bp, Probe sequence
gataccggtagaatgggagcaagta

SEQ ID NO: 261766 - DNA, 25 bp, Probe sequence
gattgcaatgtctcaaaagatattt

SEQ ID NO: 261767 - DNA, 25 bp, Probe sequence
gtcaaatgtacaacgagattgcgaa

SEQ ID NO: 261768 - DNA, 25 bp, Probe sequence
gtcatctttaattatactaaaccag

SEQ ID NO: 261769 - DNA, 25 bp, Probe sequence
gggcttgaaccatggacatcatgcg

SEQ ID NO: 261770 - DNA, 25 bp, Probe sequence
gggccgtcaaaattattatatgtac

SEQ ID NO: 261771 - DNA, 25 bp, Probe sequence
gggagcaagtatttacaatagctta

SEQ ID NO: 261772 - DNA, 25 bp, Probe sequence
gggatgataccggtagaatgggagc

SEQ ID NO: 261773 - DNA, 25 bp, Probe sequence
ggacatcatgcgaatttgactttac

SEQ ID NO: 261774 - DNA, 25 bp, Probe sequence
ggaaaactaagtcaaatgtacaacg

SEQ ID NO: 261775 - DNA, 25 bp, Probe sequence
tgaatgtatcttttgattatataga

SEQ ID NO: 261776 - DNA, 25 bp, Probe sequence
tttggggttataccagaaatggaat

SEQ ID NO: 261777 - DNA, 25 bp, Probe sequence
ttatgtaactgatcaagctggagaa

SEQ ID NO: 261778 - DNA, 25 bp, Probe sequence
ttgactttacaagagatggcaaatt

SEQ ID NO: 261779 - DNA, 25 bp, Probe sequence
attgaattattacacatatatccct

SEQ ID NO: 261780 - DNA, 25 bp, Probe sequence
attattacacatatatccctagaga

SEQ ID NO: 261781 - DNA, 25 bp, Probe sequence
ataatgtctctgaaaaagtatttta

SEQ ID NO: 261782 - DNA, 25 bp, Probe sequence
atccctagagagtataatgtctctg

SEQ ID NO: 261783 - DNA, 25 bp, Probe sequence
agtttgatcaattaggccgtgaaaa

SEQ ID NO: 261784 - DNA, 25 bp, Probe sequence
agtattttatgatttgtggacggat

SEQ ID NO: 261785 - DNA, 25 bp, Probe sequence
agagcaagatgaagctgaactatag

SEQ ID NO: 261786 - DNA, 25 bp, Probe sequence
acacatatatccctagagagtataa

SEQ ID NO: 261787 - DNA, 25 bp, Probe sequence
aaaagtttcatttgattatattgat

SEQ ID NO: 261788 - DNA, 25 bp, Probe sequence
aattattacacatatatccctagag

SEQ ID NO: 261789 - DNA, 25 bp, Probe sequence
cagagtttgatcaattaggccgtga

SEQ ID NO: 261790 - DNA, 25 bp, Probe sequence
gaattattacacatatatccctaga

SEQ ID NO: 261791 - DNA, 25 bp, Probe sequence
gaatttgactttacaagcgaaggta

SEQ ID NO: 261792 - DNA, 25 bp, Probe sequence
gaaatggaatacgaaatggaagaag

SEQ ID NO: 261793 - DNA, 25 bp, Probe sequence
gaaatcgagcaatatattaaagagc

SEQ ID NO: 261794 - DNA, 25 bp, Probe sequence
gacggatttatatagattgtttaag

SEQ ID NO: 261795 - DNA, 25 bp, Probe sequence
gagcaatatattaaagagcaagatg

SEQ ID NO: 261796 - DNA, 25 bp, Probe sequence
gagtttgatcaattaggccgtgaaa

SEQ ID NO: 261797 - DNA, 25 bp, Probe sequence
gagtataatgtctctgaaaaagtat

SEQ ID NO: 261798 - DNA, 25 bp, Probe sequence
gatttgtggacggatttatatagat

SEQ ID NO: 261799 - DNA, 25 bp, Probe sequence
gattggataaatacagagtttgatc

SEQ ID NO: 261800 - DNA, 25 bp, Probe sequence
gtttcatttgattatattgattgga

SEQ ID NO: 261801 - DNA, 25 bp, Probe sequence
gtattttatgatttgtggacggatt

SEQ ID NO: 261802 - DNA, 25 bp, Probe sequence
gtcatttttaattatactaaaccag

SEQ ID NO: 261803 - DNA, 25 bp, Probe sequence
gtgaatttgactttacaagcgaagg

SEQ ID NO: 261804 - DNA, 25 bp, Probe sequence
ggaagaagttaaagaaatcgagcaa

SEQ ID NO: 261805 - DNA, 25 bp, Probe sequence
tggacggatttatatagattgttta

SEQ ID NO: 261806 - DNA, 25 bp, Probe sequence
tacagagtttgatcaattaggccgt

SEQ ID NO: 261807 - DNA, 25 bp, Probe sequence
tatgatttgtggacggatttatata

SEQ ID NO: 261808 - DNA, 25 bp, Probe sequence
tatatccctagagagtataatgtct

SEQ ID NO: 261809 - DNA, 25 bp, Probe sequence
tattacacatatatccctagagagt

SEQ ID NO: 261810 - DNA, 25 bp, Probe sequence
tttgtggacggatttatatagattg

SEQ ID NO: 261811 - DNA, 25 bp, Probe sequence
ttttatgatttgtggacggatttat

SEQ ID NO: 261812 - DNA, 25 bp, Probe sequence
ttacacatatatccctagagagtat

SEQ ID NO: 261813 - DNA, 25 bp, Probe sequence
attgcctacgtagatgatgaaggtg

SEQ ID NO: 261814 - DNA, 25 bp, Probe sequence
attcctaaagattgcaatgtctcaa

SEQ ID NO: 261815 - DNA, 25 bp, Probe sequence
attaggttttggcccatcaggaaag

SEQ ID NO: 261816 - DNA, 25 bp, Probe sequence
attcagatattcctaaagattgcaa

SEQ ID NO: 261817 - DNA, 25 bp, Probe sequence
atactaaaccaggaagtgaagattt

SEQ ID NO: 261818 - DNA, 25 bp, Probe sequence
atacaattgcctacgtagatgatga

SEQ ID NO: 261819 - DNA, 25 bp, Probe sequence
atcatgtgaatttgactttacaaga

SEQ ID NO: 261820 - DNA, 25 bp, Probe sequence
atgaaattgcaaatgaaatcagtgg

SEQ ID NO: 261821 - DNA, 25 bp, Probe sequence
agaattcatggtttaaagtttatcg

SEQ ID NO: 261822 - DNA, 25 bp, Probe sequence
aaagaagatttagaaccgtggacat

SEQ ID NO: 261823 - DNA, 25 bp, Probe sequence
aaccaggaagtgaagatttgaatta

SEQ ID NO: 261824 - DNA, 25 bp, Probe sequence
aagatatttttaagaattcatggtt

SEQ ID NO: 261825 - DNA, 25 bp, Probe sequence
aagtttatcgaatgtttgatgagtt

SEQ ID NO: 261826 - DNA, 25 bp, Probe sequence
aagtatatacaattgcctacgtaga

SEQ ID NO: 261827 - DNA, 25 bp, Probe sequence
aattattattcagatattcctaaag

SEQ ID NO: 261828 - DNA, 25 bp, Probe sequence
cgagcagtagagaagtatgttaaag

SEQ ID NO: 261829 - DNA, 25 bp, Probe sequence
gaaccgtggacatcatgtgaatttg

SEQ ID NO: 261830 - DNA, 25 bp, Probe sequence
gaaaagctaagtcaaatgtacaatg

SEQ ID NO: 261831 - DNA, 25 bp, Probe sequence
gaaatggaagaaattcgagcagtag

SEQ ID NO: 261832 - DNA, 25 bp, Probe sequence
gaaaggaaaactactatatgtacaa

SEQ ID NO: 261833 - DNA, 25 bp, Probe sequence
gaaatcagtggaatgataccagtag

SEQ ID NO: 261834 - DNA, 25 bp, Probe sequence
gatgaaggtggagaggttgttttta

SEQ ID NO: 261835 - DNA, 25 bp, Probe sequence
gattaaattaggttttggcccatca

SEQ ID NO: 261836 - DNA, 25 bp, Probe sequence
gatttagaaccgtggacatcatgtg

SEQ ID NO: 261837 - DNA, 25 bp, Probe sequence
gattgcaatgtctcaaaagatattt

SEQ ID NO: 261838 - DNA, 25 bp, Probe sequence
gtggaatgataccagtagaatggga

SEQ ID NO: 261839 - DNA, 25 bp, Probe sequence
ggcccatcaggaaaggaaaactact

SEQ ID NO: 261840 - DNA, 25 bp, Probe sequence
ggacatcatgtgaatttgactttac

SEQ ID NO: 261841 - DNA, 25 bp, Probe sequence
tggagaggttgtttttaattatact

SEQ ID NO: 261842 - DNA, 25 bp, Probe sequence
tcgaatgtttgatgagttaagagaa

SEQ ID NO: 261843 - DNA, 25 bp, Probe sequence
tcatttgattatatagattggatta

SEQ ID NO: 261844 - DNA, 25 bp, Probe sequence
ttaaattaggttttggcccatcagg

SEQ ID NO: 261845 - DNA, 25 bp, Probe sequence
taggttttggcccatcaggaaagga

SEQ ID NO: 261846 - DNA, 25 bp, Probe sequence
ttggtattttaccagatatggaata

SEQ ID NO: 261847 - DNA, 25 bp, Probe sequence
attgtacttatgccgtttctatact

SEQ ID NO: 261848 - DNA, 25 bp, Probe sequence
attcgcaagtatcgcaacattcata

SEQ ID NO: 261849 - DNA, 25 bp, Probe sequence
atacttcactacagcatggtcaatt

SEQ ID NO: 261850 - DNA, 25 bp, Probe sequence
atcgcaacattcatattttataaag

SEQ ID NO: 261851 - DNA, 25 bp, Probe sequence
agctacctagtagcagtactatgct

SEQ ID NO: 261852 - DNA, 25 bp, Probe sequence
acctagtagcagtactatgcttcac

SEQ ID NO: 261853 - DNA, 25 bp, Probe sequence
acttcactacagcatggtcaattgc

SEQ ID NO: 261854 - DNA, 25 bp, Probe sequence
aagtatcgcaacattcatattttat

SEQ ID NO: 261855 - DNA, 25 bp, Probe sequence
cagtactatgcttcacagtcttagc

SEQ ID NO: 261856 - DNA, 25 bp, Probe sequence
cttatgccgtttctatacttcacta

SEQ ID NO: 261857 - DNA, 25 bp, Probe sequence
ctatacttcactacagcatggtcaa

SEQ ID NO: 261858 - DNA, 25 bp, Probe sequence
cgtttctatacttcactacagcatg

SEQ ID NO: 261859 - DNA, 25 bp, Probe sequence
ccgtttctatacttcactacagcat

SEQ ID NO: 261860 - DNA, 25 bp, Probe sequence
gcgacacatataaaagctacctagt

SEQ ID NO: 261861 - DNA, 25 bp, Probe sequence
gcagtactatgcttcacagtcttag

SEQ ID NO: 261862 - DNA, 25 bp, Probe sequence
gcaagtatcgcaacattcatatttt

SEQ ID NO: 261863 - DNA, 25 bp, Probe sequence
gacacatataaaagctacctagtag

SEQ ID NO: 261864 - DNA, 25 bp, Probe sequence
gagcgacacatataaaagctaccta

SEQ ID NO: 261865 - DNA, 25 bp, Probe sequence
gattcgcaagtatcgcaacattcat

SEQ ID NO: 261866 - DNA, 25 bp, Probe sequence
gtttctatacttcactacagcatgg

SEQ ID NO: 261867 - DNA, 25 bp, Probe sequence
gtatcgcaacattcatattttataa

SEQ ID NO: 261868 - DNA, 25 bp, Probe sequence
gtagcagtactatgcttcacagtct

SEQ ID NO: 261869 - DNA, 25 bp, Probe sequence
gtacttatgccgtttctatacttca

SEQ ID NO: 261870 - DNA, 25 bp, Probe sequence
ggattcgcaagtatcgcaacattca

SEQ ID NO: 261871 - DNA, 25 bp, Probe sequence
tgtacttatgccgtttctatacttc

SEQ ID NO: 261872 - DNA, 25 bp, Probe sequence
tcgcaagtatcgcaacattcatatt

SEQ ID NO: 261873 - DNA, 25 bp, Probe sequence
tctatacttcactacagcatggtca

SEQ ID NO: 261874 - DNA, 25 bp, Probe sequence
tacttcactacagcatggtcaattg

SEQ ID NO: 261875 - DNA, 25 bp, Probe sequence
tacttatgccgtttctatacttcac

SEQ ID NO: 261876 - DNA, 25 bp, Probe sequence
tagtagcagtactatgcttcacagt

SEQ ID NO: 261877 - DNA, 25 bp, Probe sequence
tatacttcactacagcatggtcaat

SEQ ID NO: 261878 - DNA, 25 bp, Probe sequence
tttctatacttcactacagcatggt

SEQ ID NO: 261879 - DNA, 25 bp, Probe sequence
ttatgccgtttctatacttcactac

SEQ ID NO: 261880 - DNA, 25 bp, Probe sequence
ttctatacttcactacagcatggtc

SEQ ID NO: 261881 - DNA, 25 bp, Probe sequence
attcgctcacaggagcccatttcag

SEQ ID NO: 261882 - DNA, 25 bp, Probe sequence
aggagcccatttcagcgacgaaaag

SEQ ID NO: 261883 - DNA, 25 bp, Probe sequence
aggcgctcacgggcttttatatgag

SEQ ID NO: 261884 - DNA, 25 bp, Probe sequence
agcccatttcagcgacgaaaagaaa

SEQ ID NO: 261885 - DNA, 25 bp, Probe sequence
acggaagatatcaaagtcatcaagt

SEQ ID NO: 261886 - DNA, 25 bp, Probe sequence
aacgatttaaaggcgctcacgggct

SEQ ID NO: 261887 - DNA, 25 bp, Probe sequence
aagatatcaaagtcatcaagtataa

SEQ ID NO: 261888 - DNA, 25 bp, Probe sequence
aagtttattcgctcacaggagccca

SEQ ID NO: 261889 - DNA, 25 bp, Probe sequence
aatgaagtttattcgctcacaggag

SEQ ID NO: 261890 - DNA, 25 bp, Probe sequence
cacgggcttttatatgagcaagagc

SEQ ID NO: 261891 - DNA, 25 bp, Probe sequence
catcaagtataaagacaacgtaaat

SEQ ID NO: 261892 - DNA, 25 bp, Probe sequence
cgctcacaggagcccatttcagcga

SEQ ID NO: 261893 - DNA, 25 bp, Probe sequence
gcgctcacgggcttttatatgagca

SEQ ID NO: 261894 - DNA, 25 bp, Probe sequence
gcaagagctaggattacaagcaacg

SEQ ID NO: 261895 - DNA, 25 bp, Probe sequence
gaagatggcacggaagatatcaaag

SEQ ID NO: 261896 - DNA, 25 bp, Probe sequence
gaaaaatattacttataccgagaag

SEQ ID NO: 261897 - DNA, 25 bp, Probe sequence
gactgatagtgacctaaaacgattt

SEQ ID NO: 261898 - DNA, 25 bp, Probe sequence
gagctaggattacaagcaacgatat

SEQ ID NO: 261899 - DNA, 25 bp, Probe sequence
gatggcacggaagatatcaaagtca

SEQ ID NO: 261900 - DNA, 25 bp, Probe sequence
gatttaaaggcgctcacgggctttt

SEQ ID NO: 261901 - DNA, 25 bp, Probe sequence
gtttattcgctcacaggagcccatt

SEQ ID NO: 261902 - DNA, 25 bp, Probe sequence
gtaaatgaagtttattcgctcacag

SEQ ID NO: 261903 - DNA, 25 bp, Probe sequence
ggagcccatttcagcgacgaaaaga

SEQ ID NO: 261904 - DNA, 25 bp, Probe sequence
gggcttttatatgagcaagagctag

SEQ ID NO: 261905 - DNA, 25 bp, Probe sequence
ggattacaagcaacgatatttgata

SEQ ID NO: 261906 - DNA, 25 bp, Probe sequence
ggcacggaagatatcaaagtcatca

SEQ ID NO: 261907 - DNA, 25 bp, Probe sequence
tgaagtttattcgctcacaggagcc

SEQ ID NO: 261908 - DNA, 25 bp, Probe sequence
tcgctcacaggagcccatttcagcg

SEQ ID NO: 261909 - DNA, 25 bp, Probe sequence
taaaacgatttaaaggcgctcacgg

SEQ ID NO: 261910 - DNA, 25 bp, Probe sequence
taaaggcgctcacgggcttttatat

SEQ ID NO: 261911 - DNA, 25 bp, Probe sequence
tttaaaggcgctcacgggcttttat

SEQ ID NO: 261912 - DNA, 25 bp, Probe sequence
ttattcgctcacaggagcccatttc

SEQ ID NO: 261913 - DNA, 25 bp, Probe sequence
ttacttataccgagaagatggcacg

SEQ ID NO: 261914 - DNA, 25 bp, Probe sequence
ttcgctcacaggagcccatttcagc

SEQ ID NO: 261915 - DNA, 25 bp, Probe sequence
attgggtcaccaatttcaacagaca

SEQ ID NO: 261916 - DNA, 25 bp, Probe sequence
ataggatcaccaattccaacaaaca

SEQ ID NO: 261917 - DNA, 25 bp, Probe sequence
atcaccaatttcaacagacaatgca

SEQ ID NO: 261918 - DNA, 25 bp, Probe sequence
aacagacaatgcaagttggggtagg

SEQ ID NO: 261919 - DNA, 25 bp, Probe sequence
aagaaattctacaaacaatgcaagt

SEQ ID NO: 261920 - DNA, 25 bp, Probe sequence
aagttggcggggccccaacatagag

SEQ ID NO: 261921 - DNA, 25 bp, Probe sequence
caagttggcggggccccaacataga

SEQ ID NO: 261922 - DNA, 25 bp, Probe sequence
caatgcaagttggggtggggccaca

SEQ ID NO: 261923 - DNA, 25 bp, Probe sequence
caaaaatgtgcaagttggcggggcc

SEQ ID NO: 261924 - DNA, 25 bp, Probe sequence
caaacaatgcaagttggcggggccc

SEQ ID NO: 261925 - DNA, 25 bp, Probe sequence
caccaattccaacagacaatgcaag

SEQ ID NO: 261926 - DNA, 25 bp, Probe sequence
cagacaatgcaagttggcggggccc

SEQ ID NO: 261927 - DNA, 25 bp, Probe sequence
gccccaacacagagaatttcgaaaa

SEQ ID NO: 261928 - DNA, 25 bp, Probe sequence
gcggggccccaacatagagaaattg

SEQ ID NO: 261929 - DNA, 25 bp, Probe sequence
gcaagttggggtggggccacaacag

SEQ ID NO: 261930 - DNA, 25 bp, Probe sequence
gcaagttggggtaggacatcgataa

SEQ ID NO: 261931 - DNA, 25 bp, Probe sequence
gaagctggcgaaaagtcagcataca

SEQ ID NO: 261932 - DNA, 25 bp, Probe sequence
gaaataggatcaccaattccaacag

SEQ ID NO: 261933 - DNA, 25 bp, Probe sequence
gacaatgcaagttggggtggggccc

SEQ ID NO: 261934 - DNA, 25 bp, Probe sequence
gagaaataggatcaccaattccaac

SEQ ID NO: 261935 - DNA, 25 bp, Probe sequence
gatcaccaattccaacagacaatgc

SEQ ID NO: 261936 - DNA, 25 bp, Probe sequence
gatcaccaattccaacaaacaatgc

SEQ ID NO: 261937 - DNA, 25 bp, Probe sequence
gggccccaacacagagaatttcgaa

SEQ ID NO: 261938 - DNA, 25 bp, Probe sequence
gggcccaacacagaagctggcgaaa

SEQ ID NO: 261939 - DNA, 25 bp, Probe sequence
gggtggggccacaacagagagaaat

SEQ ID NO: 261940 - DNA, 25 bp, Probe sequence
ggggccccaacatagagaaattgga

SEQ ID NO: 261941 - DNA, 25 bp, Probe sequence
ggggccacaacagagagaaatagga

SEQ ID NO: 261942 - DNA, 25 bp, Probe sequence
ggtcaccaatttcaacagacaatgc

SEQ ID NO: 261943 - DNA, 25 bp, Probe sequence
tggcggggccccaacatagagaaat

SEQ ID NO: 261944 - DNA, 25 bp, Probe sequence
tggatcaccaatttcaacagacaat

SEQ ID NO: 261945 - DNA, 25 bp, Probe sequence
tggggtggggcccaacacagaagct

SEQ ID NO: 261946 - DNA, 25 bp, Probe sequence
tgggtcaccaatttcaacagacaat

SEQ ID NO: 261947 - DNA, 25 bp, Probe sequence
ttggcggggccccaacatagagaaa

SEQ ID NO: 261948 - DNA, 25 bp, Probe sequence
ttggatcaccaatttcaacagacaa

SEQ ID NO: 261949 - DNA, 25 bp, Probe sequence
atatttttttcaacaggatttagtg

SEQ ID NO: 261950 - DNA, 25 bp, Probe sequence
aaatccggatctatcacaaggaaaa

SEQ ID NO: 261951 - DNA, 25 bp, Probe sequence
aactatgacgttaatctggaaagat

SEQ ID NO: 261952 - DNA, 25 bp, Probe sequence
aactctacactatatgagaacacta

SEQ ID NO: 261953 - DNA, 25 bp, Probe sequence
aatgggcgcgagaaaatccggatct

SEQ ID NO: 261954 - DNA, 25 bp, Probe sequence
aatacaaataagtgttcgacgtcaa

SEQ ID NO: 261955 - DNA, 25 bp, Probe sequence
aattgatatccccttcatagttgat

SEQ ID NO: 261956 - DNA, 25 bp, Probe sequence
caaagcattctacatcttaaacgat

SEQ ID NO: 261957 - DNA, 25 bp, Probe sequence
cttaaacgatgacctaactatgacg

SEQ ID NO: 261958 - DNA, 25 bp, Probe sequence
gcctaccaaagcattctacatctta

SEQ ID NO: 261959 - DNA, 25 bp, Probe sequence
gcagatgtgtgcctaccaaagcatt

SEQ ID NO: 261960 - DNA, 25 bp, Probe sequence
gaatgtttatatggcagatgtgtgc

SEQ ID NO: 261961 - DNA, 25 bp, Probe sequence
gaaggagactataactctacactat

SEQ ID NO: 261962 - DNA, 25 bp, Probe sequence
gaaagatggggagttgctagtatga

SEQ ID NO: 261963 - DNA, 25 bp, Probe sequence
gagactaaggttgataggttgattg

SEQ ID NO: 261964 - DNA, 25 bp, Probe sequence
gagaaaatccggatctatcacaagg

SEQ ID NO: 261965 - DNA, 25 bp, Probe sequence
gagactataactctacactatatga

SEQ ID NO: 261966 - DNA, 25 bp, Probe sequence
gatgacctaactatgacgttaatct

SEQ ID NO: 261967 - DNA, 25 bp, Probe sequence
gatgaattaattaaatgggcgcgag

SEQ ID NO: 261968 - DNA, 25 bp, Probe sequence
gataggttgattgaattattcgaga

SEQ ID NO: 261969 - DNA, 25 bp, Probe sequence
gattcgttcgttttcatccaaatac

SEQ ID NO: 261970 - DNA, 25 bp, Probe sequence
gttcgttttcatccaaatacaaata

SEQ ID NO: 261971 - DNA, 25 bp, Probe sequence
gttttattccaattgatatcccctt

SEQ ID NO: 261972 - DNA, 25 bp, Probe sequence
gtaacggaagagactaaggttgata

SEQ ID NO: 261973 - DNA, 25 bp, Probe sequence
gtgatggattcgttcgttttcatcc

SEQ ID NO: 261974 - DNA, 25 bp, Probe sequence
gtgttcgacgtcaagttttattcca

SEQ ID NO: 261975 - DNA, 25 bp, Probe sequence
gtgtgcctaccaaagcattctacat

SEQ ID NO: 261976 - DNA, 25 bp, Probe sequence
gggcgcgagaaaatccggatctatc

SEQ ID NO: 261977 - DNA, 25 bp, Probe sequence
ggatttagtgatggattcgttcgtt

SEQ ID NO: 261978 - DNA, 25 bp, Probe sequence
tccaattgatatccccttcatagtt

SEQ ID NO: 261979 - DNA, 25 bp, Probe sequence
tatccccttcatagttgatattgaa

SEQ ID NO: 261980 - DNA, 25 bp, Probe sequence
tattccaattgatatccccttcata

SEQ ID NO: 261981 - DNA, 25 bp, Probe sequence
tattcgagattcaagaaggagacta

SEQ ID NO: 261982 - DNA, 25 bp, Probe sequence
ttcgacgtcaagttttattccaatt

SEQ ID NO: 261983 - DNA, 25 bp, Probe sequence
atttttcctactaaagcattctata

SEQ ID NO: 261984 - DNA, 25 bp, Probe sequence
atatttttcctactaaagcattcta

SEQ ID NO: 261985 - DNA, 25 bp, Probe sequence
atatcttaaacgatgacatgacgat

SEQ ID NO: 261986 - DNA, 25 bp, Probe sequence
atccgcattacacaaaggtatcagt

SEQ ID NO: 261987 - DNA, 25 bp, Probe sequence
aggagtctataaatccgcattacac

SEQ ID NO: 261988 - DNA, 25 bp, Probe sequence
agtctataaatccgcattacacaaa

SEQ ID NO: 261989 - DNA, 25 bp, Probe sequence
agagactaagtttgataggttgtta

SEQ ID NO: 261990 - DNA, 25 bp, Probe sequence
actaaagcattctatatcttaaacg

SEQ ID NO: 261991 - DNA, 25 bp, Probe sequence
aaatccgcattacacaaaggtatca

SEQ ID NO: 261992 - DNA, 25 bp, Probe sequence
aacgatgacatgacgatgacattga

SEQ ID NO: 261993 - DNA, 25 bp, Probe sequence
aagtttgataggttgttagaggtat

SEQ ID NO: 261994 - DNA, 25 bp, Probe sequence
caatatttttcctactaaagcattc

SEQ ID NO: 261995 - DNA, 25 bp, Probe sequence
catgacgatgacattgatttggaaa

SEQ ID NO: 261996 - DNA, 25 bp, Probe sequence
cattctatatcttaaacgatgacat

SEQ ID NO: 261997 - DNA, 25 bp, Probe sequence
cgacaatatttttcctactaaagca

SEQ ID NO: 261998 - DNA, 25 bp, Probe sequence
ccgcattacacaaaggtatcagttt

SEQ ID NO: 261999 - DNA, 25 bp, Probe sequence
gaagacgacaatatttttcctacta

SEQ ID NO: 262000 - DNA, 25 bp, Probe sequence
gaaggagtctataaatccgcattac

SEQ ID NO: 262001 - DNA, 25 bp, Probe sequence
gaacgaacgttttgaagacgacaat

SEQ ID NO: 262002 - DNA, 25 bp, Probe sequence
gacaatatttttcctactaaagcat

SEQ ID NO: 262003 - DNA, 25 bp, Probe sequence
gacatgacgatgacattgatttgga

SEQ ID NO: 262004 - DNA, 25 bp, Probe sequence
gacgacaatatttttcctactaaag

SEQ ID NO: 262005 - DNA, 25 bp, Probe sequence
gagtctataaatccgcattacacaa

SEQ ID NO: 262006 - DNA, 25 bp, Probe sequence
gatgacatgacgatgacattgattt

SEQ ID NO: 262007 - DNA, 25 bp, Probe sequence
gtctataaatccgcattacacaaag

SEQ ID NO: 262008 - DNA, 25 bp, Probe sequence
ggtatcagtttgaacgaacgttttg

SEQ ID NO: 262009 - DNA, 25 bp, Probe sequence
ggttgttagaggtatatgagattca

SEQ ID NO: 262010 - DNA, 25 bp, Probe sequence
tgttagaggtatatgagattcaaga

SEQ ID NO: 262011 - DNA, 25 bp, Probe sequence
tcctactaaagcattctatatctta

SEQ ID NO: 262012 - DNA, 25 bp, Probe sequence
taaacgatgacatgacgatgacatt

SEQ ID NO: 262013 - DNA, 25 bp, Probe sequence
tataaatccgcattacacaaaggta

SEQ ID NO: 262014 - DNA, 25 bp, Probe sequence
tatttttcctactaaagcattctat

SEQ ID NO: 262015 - DNA, 25 bp, Probe sequence
tttcctactaaagcattctatatct

SEQ ID NO: 262016 - DNA, 25 bp, Probe sequence
tttttcctactaaagcattctatat

SEQ ID NO: 262017 - DNA, 25 bp, Probe sequence
attagtgctagtgcgtataacggta

SEQ ID NO: 262018 - DNA, 25 bp, Probe sequence
atcgcgaaaaaatcgaacagtccgt

SEQ ID NO: 262019 - DNA, 25 bp, Probe sequence
atcgaacagtccgttattagtgcta

SEQ ID NO: 262020 - DNA, 25 bp, Probe sequence
agtccgttattagtgctagtgcgta

SEQ ID NO: 262021 - DNA, 25 bp, Probe sequence
atggcaggtcaagttgtctataaat

SEQ ID NO: 262022 - DNA, 25 bp, Probe sequence
agtgctagtgcgtataacggtaatg

SEQ ID NO: 262023 - DNA, 25 bp, Probe sequence
agcagtagggattatggcaggtcaa

SEQ ID NO: 262024 - DNA, 25 bp, Probe sequence
acagtccgttattagtgctagtgcg

SEQ ID NO: 262025 - DNA, 25 bp, Probe sequence
aaaatcgaacagtccgttattagtg

SEQ ID NO: 262026 - DNA, 25 bp, Probe sequence
aacagtccgttattagtgctagtgc

SEQ ID NO: 262027 - DNA, 25 bp, Probe sequence
aagcgtttgatgaaatacttgaggg

SEQ ID NO: 262028 - DNA, 25 bp, Probe sequence
aagttgtctataaatatgaggagga

SEQ ID NO: 262029 - DNA, 25 bp, Probe sequence
aatcgaacagtccgttattagtgct

SEQ ID NO: 262030 - DNA, 25 bp, Probe sequence
caacattcagttaaagaaggtattg

SEQ ID NO: 262031 - DNA, 25 bp, Probe sequence
cagtccgttattagtgctagtgcgt

SEQ ID NO: 262032 - DNA, 25 bp, Probe sequence
cgtttgatgaaatacttgagggaat

SEQ ID NO: 262033 - DNA, 25 bp, Probe sequence
cgtataacggtaatgacacagaggg

SEQ ID NO: 262034 - DNA, 25 bp, Probe sequence
gcgaaaaaatcgaacagtccgttat

SEQ ID NO: 262035 - DNA, 25 bp, Probe sequence
cgaacagtccgttattagtgctagt

SEQ ID NO: 262036 - DNA, 25 bp, Probe sequence
gctagtgcgtataacggtaatgaca

SEQ ID NO: 262037 - DNA, 25 bp, Probe sequence
gcagtagggattatggcaggtcaag

SEQ ID NO: 262038 - DNA, 25 bp, Probe sequence
gcaggtcaagttgtctataaatatg

SEQ ID NO: 262039 - DNA, 25 bp, Probe sequence
gaaggtattgaacttgatgaagcag

SEQ ID NO: 262040 - DNA, 25 bp, Probe sequence
gaagcagtagggattatggcaggtc

SEQ ID NO: 262041 - DNA, 25 bp, Probe sequence
gaacagtccgttattagtgctagtg

SEQ ID NO: 262042 - DNA, 25 bp, Probe sequence
gattatggcaggtcaagttgtctat

SEQ ID NO: 262043 - DNA, 25 bp, Probe sequence
gtagggattatggcaggtcaagttg

SEQ ID NO: 262044 - DNA, 25 bp, Probe sequence
gtccgttattagtgctagtgcgtat

SEQ ID NO: 262045 - DNA, 25 bp, Probe sequence
gggattatggcaggtcaagttgtct

SEQ ID NO: 262046 - DNA, 25 bp, Probe sequence
ggtattgaacttgatgaagcagtag

SEQ ID NO: 262047 - DNA, 25 bp, Probe sequence
tgcgtataacggtaatgacacagag

SEQ ID NO: 262048 - DNA, 25 bp, Probe sequence
tccgttattagtgctagtgcgtata

SEQ ID NO: 262049 - DNA, 25 bp, Probe sequence
tattagtgctagtgcgtataacggt

SEQ ID NO: 262050 - DNA, 25 bp, Probe sequence
ttatggcaggtcaagttgtctataa

SEQ ID NO: 262051 - DNA, 25 bp, Probe sequence
attaaagcgagtcagttgtttgaaa

SEQ ID NO: 262052 - DNA, 25 bp, Probe sequence
attactgtggctagagataatcaga

SEQ ID NO: 262053 - DNA, 25 bp, Probe sequence
atacttagtcacaacattcaaagat

SEQ ID NO: 262054 - DNA, 25 bp, Probe sequence
atcagacgtttacagttgttgaggc

SEQ ID NO: 262055 - DNA, 25 bp, Probe sequence
aggactaccacatgaacatattact

SEQ ID NO: 262056 - DNA, 25 bp, Probe sequence
acaggactaccacatgaacatatta

SEQ ID NO: 262057 - DNA, 25 bp, Probe sequence
acatgaacatattactgtggctaga

SEQ ID NO: 262058 - DNA, 25 bp, Probe sequence
acagttgttgaggcagagaataaag

SEQ ID NO: 262059 - DNA, 25 bp, Probe sequence
aaagcgagtcagttgtttgaaaata

SEQ ID NO: 262060 - DNA, 25 bp, Probe sequence
aagattcaacaggactaccacatga

SEQ ID NO: 262061 - DNA, 25 bp, Probe sequence
aattattaaagcgagtcagttgttt

SEQ ID NO: 262062 - DNA, 25 bp, Probe sequence
caaagattcaacaggactaccacat

SEQ ID NO: 262063 - DNA, 25 bp, Probe sequence
cagacgtttacagttgttgaggcag

SEQ ID NO: 262064 - DNA, 25 bp, Probe sequence
gcgagtcagttgtttgaaaatataa

SEQ ID NO: 262065 - DNA, 25 bp, Probe sequence
gcaaaagagaagtatgaggcacaag

SEQ ID NO: 262066 - DNA, 25 bp, Probe sequence
gcaatacttagtcacaacattcaaa

SEQ ID NO: 262067 - DNA, 25 bp, Probe sequence
gaacatattactgtggctagagata

SEQ ID NO: 262068 - DNA, 25 bp, Probe sequence
gactaccacatgaacatattactgt

SEQ ID NO: 262069 - DNA, 25 bp, Probe sequence
gacgtttacagttgttgaggcagag

SEQ ID NO: 262070 - DNA, 25 bp, Probe sequence
gacgcaatacttagtcacaacattc

SEQ ID NO: 262071 - DNA, 25 bp, Probe sequence
gagaagtatgaggcacaagttaaaa

SEQ ID NO: 262072 - DNA, 25 bp, Probe sequence
gagataatcagacgtttacagttgt

SEQ ID NO: 262073 - DNA, 25 bp, Probe sequence
gaggcacaagttaaaagggatgcaa

SEQ ID NO: 262074 - DNA, 25 bp, Probe sequence
gatgcaattattaaagcgagtcagt

SEQ ID NO: 262075 - DNA, 25 bp, Probe sequence
gataatcagacgtttacagttgttg

SEQ ID NO: 262076 - DNA, 25 bp, Probe sequence
gattcaacaggactaccacatgaac

SEQ ID NO: 262077 - DNA, 25 bp, Probe sequence
gtttacagttgttgaggcagagaat

SEQ ID NO: 262078 - DNA, 25 bp, Probe sequence
gtcacaacattcaaagattcaacag

SEQ ID NO: 262079 - DNA, 25 bp, Probe sequence
gtggctagagataatcagacgttta

SEQ ID NO: 262080 - DNA, 25 bp, Probe sequence
tgaaaatataagggagtgtgggaaa

SEQ ID NO: 262081 - DNA, 25 bp, Probe sequence
tcaacaggactaccacatgaacata

SEQ ID NO: 262082 - DNA, 25 bp, Probe sequence
taatcagacgtttacagttgttgag

SEQ ID NO: 262083 - DNA, 25 bp, Probe sequence
tagtcacaacattcaaagattcaac

SEQ ID NO: 262084 - DNA, 25 bp, Probe sequence
ttcaaagattcaacaggactaccac

SEQ ID NO: 262085 - DNA, 25 bp, Probe sequence
atgatgatgtagaggcgccgagtga

SEQ ID NO: 262086 - DNA, 25 bp, Probe sequence
atgatgtagaggcgccgagtgatta

SEQ ID NO: 262087 - DNA, 25 bp, Probe sequence
atgtagaggcgccgagtgattacga

SEQ ID NO: 262088 - DNA, 25 bp, Probe sequence
aggcgccgagtgattacgaaaaaat

SEQ ID NO: 262089 - DNA, 25 bp, Probe sequence
agaggcgccgagtgattacgaaaaa

SEQ ID NO: 262090 - DNA, 25 bp, Probe sequence
agactattattcttactagcaatgt

SEQ ID NO: 262091 - DNA, 25 bp, Probe sequence
agcaatgtatgagttaggtaagtat

SEQ ID NO: 262092 - DNA, 25 bp, Probe sequence
actgagcaagtgtatattatgatga

SEQ ID NO: 262093 - DNA, 25 bp, Probe sequence
aaatcagagctgaagtttcatggta

SEQ ID NO: 262094 - DNA, 25 bp, Probe sequence
aagtgtatattatgatgacggctaa

SEQ ID NO: 262095 - DNA, 25 bp, Probe sequence
aatgatgatgtagaggcgccgagtg

SEQ ID NO: 262096 - DNA, 25 bp, Probe sequence
aatcagagctgaagtttcatggtaa

SEQ ID NO: 262097 - DNA, 25 bp, Probe sequence
gctaatgatgatgtagaggcgccga

SEQ ID NO: 262098 - DNA, 25 bp, Probe sequence
gcaagtgtatattatgatgacggct

SEQ ID NO: 262099 - DNA, 25 bp, Probe sequence
gactattattcttactagcaatgta

SEQ ID NO: 262100 - DNA, 25 bp, Probe sequence
gacggctaatgatgatgtagaggcg

SEQ ID NO: 262101 - DNA, 25 bp, Probe sequence
gaggcgccgagtgattacgaaaaaa

SEQ ID NO: 262102 - DNA, 25 bp, Probe sequence
gatgtagaggcgccgagtgattacg

SEQ ID NO: 262103 - DNA, 25 bp, Probe sequence
gatgatgtagaggcgccgagtgatt

SEQ ID NO: 262104 - DNA, 25 bp, Probe sequence
gatgacggctaatgatgatgtagag

SEQ ID NO: 262105 - DNA, 25 bp, Probe sequence
gtatgtaactgagcaagtgtatatt

SEQ ID NO: 262106 - DNA, 25 bp, Probe sequence
gtagaggcgccgagtgattacgaaa

SEQ ID NO: 262107 - DNA, 25 bp, Probe sequence
gtgtatattatgatgacggctaatg

SEQ ID NO: 262108 - DNA, 25 bp, Probe sequence
ggtaagtatgtaactgagcaagtgt

SEQ ID NO: 262109 - DNA, 25 bp, Probe sequence
ggcgccgagtgattacgaaaaaatc

SEQ ID NO: 262110 - DNA, 25 bp, Probe sequence
tgtagaggcgccgagtgattacgaa

SEQ ID NO: 262111 - DNA, 25 bp, Probe sequence
tgatgtagaggcgccgagtgattac

SEQ ID NO: 262112 - DNA, 25 bp, Probe sequence
tgatgatgtagaggcgccgagtgat

SEQ ID NO: 262113 - DNA, 25 bp, Probe sequence
tcttactagcaatgtatgagttagg

SEQ ID NO: 262114 - DNA, 25 bp, Probe sequence
taatgatgatgtagaggcgccgagt

SEQ ID NO: 262115 - DNA, 25 bp, Probe sequence
tagaggcgccgagtgattacgaaaa

SEQ ID NO: 262116 - DNA, 25 bp, Probe sequence
tatgatgacggctaatgatgatgta

SEQ ID NO: 262117 - DNA, 25 bp, Probe sequence
tattattcttactagcaatgtatga

SEQ ID NO: 262118 - DNA, 25 bp, Probe sequence
tattcttactagcaatgtatgagtt

SEQ ID NO: 262119 - DNA, 25 bp, Probe sequence
atagcgtatcatgcaggtatcaaat

SEQ ID NO: 262120 - DNA, 25 bp, Probe sequence
atcgcaatacagttactacaatacg

SEQ ID NO: 262121 - DNA, 25 bp, Probe sequence
atggcgacaaggttattgactaata

SEQ ID NO: 262122 - DNA, 25 bp, Probe sequence
agaagagatggttgaagcagttgaa

SEQ ID NO: 262123 - DNA, 25 bp, Probe sequence
agcgtatcatgcaggtatcaaataa

SEQ ID NO: 262124 - DNA, 25 bp, Probe sequence
agcgatagcgtatcatgcaggtatc

SEQ ID NO: 262125 - DNA, 25 bp, Probe sequence
accaacattgtgtatggaccgttac

SEQ ID NO: 262126 - DNA, 25 bp, Probe sequence
acgaaagaactagacaccaacattg

SEQ ID NO: 262127 - DNA, 25 bp, Probe sequence
acaactgagttaatggcgacaaggt

SEQ ID NO: 262128 - DNA, 25 bp, Probe sequence
aactttgttaaagcgatagcgtatc

SEQ ID NO: 262129 - DNA, 25 bp, Probe sequence
aacattgtgtatggaccgttacaaa

SEQ ID NO: 262130 - DNA, 25 bp, Probe sequence
aagccaggtacatttaaatatattg

SEQ ID NO: 262131 - DNA, 25 bp, Probe sequence
caaataggggatgcttgtcacatgc

SEQ ID NO: 262132 - DNA, 25 bp, Probe sequence
catgcatcgcaatacagttactaca

SEQ ID NO: 262133 - DNA, 25 bp, Probe sequence
gcttgtcacatgcatcgcaatacag

SEQ ID NO: 262134 - DNA, 25 bp, Probe sequence
gacaccaacattgtgtatggaccgt

SEQ ID NO: 262135 - DNA, 25 bp, Probe sequence
gaccgttacaaaaaggagagccagt

SEQ ID NO: 262136 - DNA, 25 bp, Probe sequence
gagaatggagatacttaacccaacg

SEQ ID NO: 262137 - DNA, 25 bp, Probe sequence
gagtacttaaagttacctgaagatc

SEQ ID NO: 262138 - DNA, 25 bp, Probe sequence
gagtcagagatatataacctacaag

SEQ ID NO: 262139 - DNA, 25 bp, Probe sequence
gatgttacgtaacttagaagagatg

SEQ ID NO: 262140 - DNA, 25 bp, Probe sequence
gatatataacctacaagagaacaag

SEQ ID NO: 262141 - DNA, 25 bp, Probe sequence
gttactacaatacgaaagaactttg

SEQ ID NO: 262142 - DNA, 25 bp, Probe sequence
gtcacatgcatcgcaatacagttac

SEQ ID NO: 262143 - DNA, 25 bp, Probe sequence
ggggatgcttgtcacatgcatcgca

SEQ ID NO: 262144 - DNA, 25 bp, Probe sequence
ggttgaagcagttgaaagtgagtac

SEQ ID NO: 262145 - DNA, 25 bp, Probe sequence
ggatgcttgtcacatgcatcgcaat

SEQ ID NO: 262146 - DNA, 25 bp, Probe sequence
ggagagccagttagaacaactgagt

SEQ ID NO: 262147 - DNA, 25 bp, Probe sequence
ggcatcatatgatattaagccaggt

SEQ ID NO: 262148 - DNA, 25 bp, Probe sequence
tggagatacttaacccaacgaaaga

SEQ ID NO: 262149 - DNA, 25 bp, Probe sequence
tgcatcgcaatacagttactacaat

SEQ ID NO: 262150 - DNA, 25 bp, Probe sequence
taaagttacctgaagatcataagaa

SEQ ID NO: 262151 - DNA, 25 bp, Probe sequence
tatgatattaagccaggtacattta

SEQ ID NO: 262152 - DNA, 25 bp, Probe sequence
ttgactaataagatgttacgtaact

SEQ ID NO: 262153 - DNA, 25 bp, Probe sequence
attgctcgcattttcaatgaaacgg

SEQ ID NO: 262154 - DNA, 25 bp, Probe sequence
agacaaaccatatcgctaattgagc

SEQ ID NO: 262155 - DNA, 25 bp, Probe sequence
agcgggcgtttcaagacaaaccata

SEQ ID NO: 262156 - DNA, 25 bp, Probe sequence
acgagcacgagatggcttaaaccaa

SEQ ID NO: 262157 - DNA, 25 bp, Probe sequence
aaaaattgctcgcattttcaatgaa

SEQ ID NO: 262158 - DNA, 25 bp, Probe sequence
aacgcaacttgctaaacaagcgggc

SEQ ID NO: 262159 - DNA, 25 bp, Probe sequence
aaccatatcgctaattgagcgaaac

SEQ ID NO: 262160 - DNA, 25 bp, Probe sequence
aattttatgccatcagtattaacgg

SEQ ID NO: 262161 - DNA, 25 bp, Probe sequence
caagcgggcgtttcaagacaaacca

SEQ ID NO: 262162 - DNA, 25 bp, Probe sequence
cttgctaaacaagcgggcgtttcaa

SEQ ID NO: 262163 - DNA, 25 bp, Probe sequence
ctgtttttattattgaggaggatga

SEQ ID NO: 262164 - DNA, 25 bp, Probe sequence
gccatcagtattaacggcaataaaa

SEQ ID NO: 262165 - DNA, 25 bp, Probe sequence
gcgaaacaattttatgccatcagta

SEQ ID NO: 262166 - DNA, 25 bp, Probe sequence
gcgtttcaagacaaaccatatcgct

SEQ ID NO: 262167 - DNA, 25 bp, Probe sequence
gctcgcattttcaatgaaacggtgg

SEQ ID NO: 262168 - DNA, 25 bp, Probe sequence
gctaaacaagcgggcgtttcaagac

SEQ ID NO: 262169 - DNA, 25 bp, Probe sequence
gcttaaaccaaacgcaacttgctaa

SEQ ID NO: 262170 - DNA, 25 bp, Probe sequence
gcacgagatggcttaaaccaaacgc

SEQ ID NO: 262171 - DNA, 25 bp, Probe sequence
gcaacttgctaaacaagcgggcgtt

SEQ ID NO: 262172 - DNA, 25 bp, Probe sequence
gcaataaaaattgctcgcattttca

SEQ ID NO: 262173 - DNA, 25 bp, Probe sequence
gaattacgagcacgagatggcttaa

SEQ ID NO: 262174 - DNA, 25 bp, Probe sequence
gaaacaattttatgccatcagtatt

SEQ ID NO: 262175 - DNA, 25 bp, Probe sequence
gaaactgtttttattattgaggagg

SEQ ID NO: 262176 - DNA, 25 bp, Probe sequence
gagcgaaacaattttatgccatcag

SEQ ID NO: 262177 - DNA, 25 bp, Probe sequence
gagatggcttaaaccaaacgcaact

SEQ ID NO: 262178 - DNA, 25 bp, Probe sequence
gatggcttaaaccaaacgcaacttg

SEQ ID NO: 262179 - DNA, 25 bp, Probe sequence
gattgaaagaattacgagcacgaga

SEQ ID NO: 262180 - DNA, 25 bp, Probe sequence
gggcgtttcaagacaaaccatatcg

SEQ ID NO: 262181 - DNA, 25 bp, Probe sequence
gtggaaactgtttttattattgagg

SEQ ID NO: 262182 - DNA, 25 bp, Probe sequence
ggcttaaaccaaacgcaacttgcta

SEQ ID NO: 262183 - DNA, 25 bp, Probe sequence
taaaccaaacgcaacttgctaaaca

SEQ ID NO: 262184 - DNA, 25 bp, Probe sequence
tatgccatcagtattaacggcaata

SEQ ID NO: 262185 - DNA, 25 bp, Probe sequence
ttacgagcacgagatggcttaaacc

SEQ ID NO: 262186 - DNA, 25 bp, Probe sequence
ttcaagacaaaccatatcgctaatt

SEQ ID NO: 262187 - DNA, 25 bp, Probe sequence
attagaatgggtgcagacataagaa

SEQ ID NO: 262188 - DNA, 25 bp, Probe sequence
atcatcgaatctcatgatgatacac

SEQ ID NO: 262189 - DNA, 25 bp, Probe sequence
atcgaatctcatgatgatacacaaa

SEQ ID NO: 262190 - DNA, 25 bp, Probe sequence
atgggtgcagacataagaattaaat

SEQ ID NO: 262191 - DNA, 25 bp, Probe sequence
agaatgggtgcagacataagaatta

SEQ ID NO: 262192 - DNA, 25 bp, Probe sequence
acttaaaaaaatcatcgaatctcat

SEQ ID NO: 262193 - DNA, 25 bp, Probe sequence
acatgcgtgtggaacaaaccgtttt

SEQ ID NO: 262194 - DNA, 25 bp, Probe sequence
aaatcatcgaatctcatgatgatac

SEQ ID NO: 262195 - DNA, 25 bp, Probe sequence
aaaaatcatcgaatctcatgatgat

SEQ ID NO: 262196 - DNA, 25 bp, Probe sequence
aaaaaaatcatcgaatctcatgatg

SEQ ID NO: 262197 - DNA, 25 bp, Probe sequence
aaaaaatcatcgaatctcatgatga

SEQ ID NO: 262198 - DNA, 25 bp, Probe sequence
aaaatcatcgaatctcatgatgata

SEQ ID NO: 262199 - DNA, 25 bp, Probe sequence
aacttaaaaaaatcatcgaatctca

SEQ ID NO: 262200 - DNA, 25 bp, Probe sequence
aatgggtgcagacataagaattaaa

SEQ ID NO: 262201 - DNA, 25 bp, Probe sequence
aatcatcgaatctcatgatgataca

SEQ ID NO: 262202 - DNA, 25 bp, Probe sequence
catgcgtgtggaacaaaccgtttta

SEQ ID NO: 262203 - DNA, 25 bp, Probe sequence
catcgaatctcatgatgatacacaa

SEQ ID NO: 262204 - DNA, 25 bp, Probe sequence
cttaaaaaaatcatcgaatctcatg

SEQ ID NO: 262205 - DNA, 25 bp, Probe sequence
cgaatctcatgatgatacacaaaga

SEQ ID NO: 262206 - DNA, 25 bp, Probe sequence
gaatgggtgcagacataagaattaa

SEQ ID NO: 262207 - DNA, 25 bp, Probe sequence
gtcaaagaagtattatgattccacg

SEQ ID NO: 262208 - DNA, 25 bp, Probe sequence
gtgcagacataagaattaaatgtga

SEQ ID NO: 262209 - DNA, 25 bp, Probe sequence
gggtgcagacataagaattaaatgt

SEQ ID NO: 262210 - DNA, 25 bp, Probe sequence
ggtgcagacataagaattaaatgtg

SEQ ID NO: 262211 - DNA, 25 bp, Probe sequence
tgggtgcagacataagaattaaatg

SEQ ID NO: 262212 - DNA, 25 bp, Probe sequence
tgtcaaagaagtattatgattccac

SEQ ID NO: 262213 - DNA, 25 bp, Probe sequence
tcgaatctcatgatgatacacaaag

SEQ ID NO: 262214 - DNA, 25 bp, Probe sequence
tcatcgaatctcatgatgatacaca

SEQ ID NO: 262215 - DNA, 25 bp, Probe sequence
tcaaagaagtattatgattccacgt

SEQ ID NO: 262216 - DNA, 25 bp, Probe sequence
taaaaaaatcatcgaatctcatgat

SEQ ID NO: 262217 - DNA, 25 bp, Probe sequence
tagaatgggtgcagacataagaatt

SEQ ID NO: 262218 - DNA, 25 bp, Probe sequence
tattagaatgggtgcagacataaga

SEQ ID NO: 262219 - DNA, 25 bp, Probe sequence
ttagaatgggtgcagacataagaat

SEQ ID NO: 262220 - DNA, 25 bp, Probe sequence
ttaaaaaaatcatcgaatctcatga

SEQ ID NO: 262221 - DNA, 25 bp, Probe sequence
attatatcaatatgctacatcaata

SEQ ID NO: 262222 - DNA, 25 bp, Probe sequence
atatcaatatgctacatcaatacta

SEQ ID NO: 262223 - DNA, 25 bp, Probe sequence
atcagtgtttggatttgtaagtaat

SEQ ID NO: 262224 - DNA, 25 bp, Probe sequence
atcaatatgctacatcaatactatt

SEQ ID NO: 262225 - DNA, 25 bp, Probe sequence
atgtgagatcagtgtttggatttgt

SEQ ID NO: 262226 - DNA, 25 bp, Probe sequence
agatcagtgtttggatttgtaagta

SEQ ID NO: 262227 - DNA, 25 bp, Probe sequence
agaaaaaacacatggccttgatgtc

SEQ ID NO: 262228 - DNA, 25 bp, Probe sequence
acatcaatactattctgaagaaagt

SEQ ID NO: 262229 - DNA, 25 bp, Probe sequence
acacatggccttgatgtctttgcag

SEQ ID NO: 262230 - DNA, 25 bp, Probe sequence
aaagtagaacttgatgagacacaac

SEQ ID NO: 262231 - DNA, 25 bp, Probe sequence
aaacacatggccttgatgtctttgc

SEQ ID NO: 262232 - DNA, 25 bp, Probe sequence
aaaacacatggccttgatgtctttg

SEQ ID NO: 262233 - DNA, 25 bp, Probe sequence
aacacatggccttgatgtctttgca

SEQ ID NO: 262234 - DNA, 25 bp, Probe sequence
aatgtgagatcagtgtttggatttg

SEQ ID NO: 262235 - DNA, 25 bp, Probe sequence
aatactattctgaagaaagttttga

SEQ ID NO: 262236 - DNA, 25 bp, Probe sequence
aatattaactacaggtgtgtttaca

SEQ ID NO: 262237 - DNA, 25 bp, Probe sequence
cacatggccttgatgtctttgcagt

SEQ ID NO: 262238 - DNA, 25 bp, Probe sequence
gaatattaactacaggtgtgtttac

SEQ ID NO: 262239 - DNA, 25 bp, Probe sequence
gaaaaaacacatggccttgatgtct

SEQ ID NO: 262240 - DNA, 25 bp, Probe sequence
gagatcagtgtttggatttgtaagt

SEQ ID NO: 262241 - DNA, 25 bp, Probe sequence
gatcagtgtttggatttgtaagtaa

SEQ ID NO: 262242 - DNA, 25 bp, Probe sequence
gatttgtaagtaatccaagtctaca

SEQ ID NO: 262243 - DNA, 25 bp, Probe sequence
gtaagtaatccaagtctacaagtta

SEQ ID NO: 262244 - DNA, 25 bp, Probe sequence
gtgagatcagtgtttggatttgtaa

SEQ ID NO: 262245 - DNA, 25 bp, Probe sequence
ggaatattaactacaggtgtgttta

SEQ ID NO: 262246 - DNA, 25 bp, Probe sequence
tgtgagatcagtgtttggatttgta

SEQ ID NO: 262247 - DNA, 25 bp, Probe sequence
tgatgtaatggatagtaagcaaatt

SEQ ID NO: 262248 - DNA, 25 bp, Probe sequence
tgagatcagtgtttggatttgtaag

SEQ ID NO: 262249 - DNA, 25 bp, Probe sequence
tcacgcgaaagtagaacttgatgag

SEQ ID NO: 262250 - DNA, 25 bp, Probe sequence
taagtaatccaagtctacaagttaa

SEQ ID NO: 262251 - DNA, 25 bp, Probe sequence
tatcaatatgctacatcaatactat

SEQ ID NO: 262252 - DNA, 25 bp, Probe sequence
tataaaaggtggcatatatagcgtt

SEQ ID NO: 262253 - DNA, 25 bp, Probe sequence
tatatcaatatgctacatcaatact

SEQ ID NO: 262254 - DNA, 25 bp, Probe sequence
tattatatcaatatgctacatcaat

SEQ ID NO: 262255 - DNA, 25 bp, Probe sequence
agatggtagggtcaaaattagcttg

SEQ ID NO: 262256 - DNA, 25 bp, Probe sequence
attagtgctttgaaacatggtaaaa

SEQ ID NO: 262257 - DNA, 25 bp, Probe sequence
atttcaacagcgtagttatgagggg

SEQ ID NO: 262258 - DNA, 25 bp, Probe sequence
atactacactggaaagactatggaa

SEQ ID NO: 262259 - DNA, 25 bp, Probe sequence
atctggagttgtcagtgcaccaata

SEQ ID NO: 262260 - DNA, 25 bp, Probe sequence
agcgtagttatgaggggttagatgt

SEQ ID NO: 262261 - DNA, 25 bp, Probe sequence
agttgtcagtgcaccaatattaaat

SEQ ID NO: 262262 - DNA, 25 bp, Probe sequence
agatggcagtttttataaccttgat

SEQ ID NO: 262263 - DNA, 25 bp, Probe sequence
acatctggagttgtcagtgcaccaa

SEQ ID NO: 262264 - DNA, 25 bp, Probe sequence
acagcgtagttatgaggggttagat

SEQ ID NO: 262265 - DNA, 25 bp, Probe sequence
aaagagataagcacgatatatttta

SEQ ID NO: 262266 - DNA, 25 bp, Probe sequence
aaacatctggagttgtcagtgcacc

SEQ ID NO: 262267 - DNA, 25 bp, Probe sequence
aacagaagttcattcaggtcatgca

SEQ ID NO: 262268 - DNA, 25 bp, Probe sequence
aagattcaagttttactgcctggaa

SEQ ID NO: 262269 - DNA, 25 bp, Probe sequence
aagttttactgcctggaaatgataa

SEQ ID NO: 262270 - DNA, 25 bp, Probe sequence
aagtaaatttcaacagcgtagttat

SEQ ID NO: 262271 - DNA, 25 bp, Probe sequence
aatattagtgctttgaaacatggta

SEQ ID NO: 262272 - DNA, 25 bp, Probe sequence
ctggagttgtcagtgcaccaatatt

SEQ ID NO: 262273 - DNA, 25 bp, Probe sequence
cgatatattttatactgttggtggt

SEQ ID NO: 262274 - DNA, 25 bp, Probe sequence
gcacgatatattttatactgttggt
